United States Patent Application Publication US 2015/0232836 A1 - sequence listing, part 17

SEQ ID NO: 582199 - DNA, 15 bp, Homo sapiens
attcaactagctcct

SEQ ID NO: 582200 - DNA, 15 bp, Homo sapiens
ttcaactagctcctg

SEQ ID NO: 582201 - DNA, 15 bp, Homo sapiens
tcaactagctcctgt

SEQ ID NO: 582202 - DNA, 15 bp, Homo sapiens
caactagctcctgtg

SEQ ID NO: 582203 - DNA, 15 bp, Homo sapiens
aactagctcctgtgt

SEQ ID NO: 582204 - DNA, 15 bp, Homo sapiens
actagctcctgtgtg

SEQ ID NO: 582205 - DNA, 15 bp, Homo sapiens
ctagctcctgtgtga

SEQ ID NO: 582206 - DNA, 15 bp, Homo sapiens
tagctcctgtgtgac

SEQ ID NO: 582207 - DNA, 15 bp, Homo sapiens
agctcctgtgtgact

SEQ ID NO: 582208 - DNA, 15 bp, Homo sapiens
gctcctgtgtgactc

SEQ ID NO: 582209 - DNA, 15 bp, Homo sapiens
ctcctgtgtgactcc

SEQ ID NO: 582210 - DNA, 15 bp, Homo sapiens
tcctgtgtgactcca

SEQ ID NO: 582211 - DNA, 15 bp, Homo sapiens
cctgtgtgactccat

SEQ ID NO: 582212 - DNA, 15 bp, Homo sapiens
ctgtgtgactccatg

SEQ ID NO: 582213 - DNA, 15 bp, Homo sapiens
tgtgtgactccatgt

SEQ ID NO: 582214 - DNA, 15 bp, Homo sapiens
gtgtgactccatgtc

SEQ ID NO: 582215 - DNA, 15 bp, Homo sapiens
tgtgactccatgtcc

SEQ ID NO: 582216 - DNA, 15 bp, Homo sapiens
gtgactccatgtcct

SEQ ID NO: 582217 - DNA, 15 bp, Homo sapiens
tgactccatgtcctt

SEQ ID NO: 582218 - DNA, 15 bp, Homo sapiens
gactccatgtccttg

SEQ ID NO: 582219 - DNA, 15 bp, Homo sapiens
actccatgtccttgc

SEQ ID NO: 582220 - DNA, 15 bp, Homo sapiens
ctccatgtccttgcc

SEQ ID NO: 582221 - DNA, 15 bp, Homo sapiens
tccatgtccttgcca

SEQ ID NO: 582222 - DNA, 15 bp, Homo sapiens
ccatgtccttgccac

SEQ ID NO: 582223 - DNA, 15 bp, Homo sapiens
catgtccttgccact

SEQ ID NO: 582224 - DNA, 15 bp, Homo sapiens
atgtccttgccacta

SEQ ID NO: 582225 - DNA, 15 bp, Homo sapiens
tgtccttgccactat

SEQ ID NO: 582226 - DNA, 15 bp, Homo sapiens
gtccttgccactatg

SEQ ID NO: 582227 - DNA, 15 bp, Homo sapiens
tccttgccactatgc

SEQ ID NO: 582228 - DNA, 15 bp, Homo sapiens
ccttgccactatgca

SEQ ID NO: 582229 - DNA, 15 bp, Homo sapiens
cttgccactatgcaa

SEQ ID NO: 582230 - DNA, 15 bp, Homo sapiens
ttgccactatgcaat

SEQ ID NO: 582231 - DNA, 15 bp, Homo sapiens
tgccactatgcaata

SEQ ID NO: 582232 - DNA, 15 bp, Homo sapiens
gccactatgcaataa

SEQ ID NO: 582233 - DNA, 15 bp, Homo sapiens
ccactatgcaataat

SEQ ID NO: 582234 - DNA, 15 bp, Homo sapiens
cactatgcaataatg

SEQ ID NO: 582235 - DNA, 15 bp, Homo sapiens
actatgcaataatgc

SEQ ID NO: 582236 - DNA, 15 bp, Homo sapiens
ctatgcaataatgct

SEQ ID NO: 582237 - DNA, 15 bp, Homo sapiens
tatgcaataatgcta

SEQ ID NO: 582238 - DNA, 15 bp, Homo sapiens
atgcaataatgctaa

SEQ ID NO: 582239 - DNA, 15 bp, Homo sapiens
tgcaataatgctaat

SEQ ID NO: 582240 - DNA, 15 bp, Homo sapiens
gcaataatgctaatt

SEQ ID NO: 582241 - DNA, 15 bp, Homo sapiens
caataatgctaattt

SEQ ID NO: 582242 - DNA, 15 bp, Homo sapiens
aataatgctaatttt

SEQ ID NO: 582243 - DNA, 15 bp, Homo sapiens
ataatgctaattttg

SEQ ID NO: 582244 - DNA, 15 bp, Homo sapiens
taatgctaattttgc

SEQ ID NO: 582245 - DNA, 15 bp, Homo sapiens
aatgctaattttgca

SEQ ID NO: 582246 - DNA, 15 bp, Homo sapiens
atgctaattttgcac

SEQ ID NO: 582247 - DNA, 15 bp, Homo sapiens
tgctaattttgcact

SEQ ID NO: 582248 - DNA, 15 bp, Homo sapiens
gctaattttgcactc

SEQ ID NO: 582249 - DNA, 15 bp, Homo sapiens
ctaattttgcactca

SEQ ID NO: 582250 - DNA, 15 bp, Homo sapiens
taattttgcactcaa

SEQ ID NO: 582251 - DNA, 15 bp, Homo sapiens
aattttgcactcaac

SEQ ID NO: 582252 - DNA, 15 bp, Homo sapiens
attttgcactcaacg

SEQ ID NO: 582253 - DNA, 15 bp, Homo sapiens
ttttgcactcaacga

SEQ ID NO: 582254 - DNA, 15 bp, Homo sapiens
tttgcactcaacgat

SEQ ID NO: 582255 - DNA, 15 bp, Homo sapiens
ttgcactcaacgatt

SEQ ID NO: 582256 - DNA, 15 bp, Homo sapiens
tgcactcaacgattg

SEQ ID NO: 582257 - DNA, 15 bp, Homo sapiens
gcactcaacgattga

SEQ ID NO: 582258 - DNA, 15 bp, Homo sapiens
cactcaacgattgag

SEQ ID NO: 582259 - DNA, 15 bp, Homo sapiens
actcaacgattgaga

SEQ ID NO: 582260 - DNA, 15 bp, Homo sapiens
ctcaacgattgagac

SEQ ID NO: 582261 - DNA, 15 bp, Homo sapiens
tcaacgattgagact

SEQ ID NO: 582262 - DNA, 15 bp, Homo sapiens
caacgattgagactt

SEQ ID NO: 582263 - DNA, 15 bp, Homo sapiens
aacgattgagactta

SEQ ID NO: 582264 - DNA, 15 bp, Homo sapiens
acgattgagacttag

SEQ ID NO: 582265 - DNA, 15 bp, Homo sapiens
cgattgagacttagg

SEQ ID NO: 582266 - DNA, 15 bp, Homo sapiens
gattgagacttaggc

SEQ ID NO: 582267 - DNA, 15 bp, Homo sapiens
attgagacttaggct

SEQ ID NO: 582268 - DNA, 15 bp, Homo sapiens
ttgagacttaggcta

SEQ ID NO: 582269 - DNA, 15 bp, Homo sapiens
tgagacttaggctaa

SEQ ID NO: 582270 - DNA, 15 bp, Homo sapiens
gagacttaggctaaa

SEQ ID NO: 582271 - DNA, 15 bp, Homo sapiens
agacttaggctaaaa

SEQ ID NO: 582272 - DNA, 15 bp, Homo sapiens
gacttaggctaaaac

SEQ ID NO: 582273 - DNA, 15 bp, Homo sapiens
acttaggctaaaact

SEQ ID NO: 582274 - DNA, 15 bp, Homo sapiens
cttaggctaaaactc

SEQ ID NO: 582275 - DNA, 15 bp, Homo sapiens
ttaggctaaaactca

SEQ ID NO: 582276 - DNA, 15 bp, Homo sapiens
taggctaaaactcaa

SEQ ID NO: 582277 - DNA, 15 bp, Homo sapiens
aggctaaaactcaat

SEQ ID NO: 582278 - DNA, 15 bp, Homo sapiens
ggctaaaactcaata

SEQ ID NO: 582279 - DNA, 15 bp, Homo sapiens
gctaaaactcaatag

SEQ ID NO: 582280 - DNA, 15 bp, Homo sapiens
ctaaaactcaataga

SEQ ID NO: 582281 - DNA, 15 bp, Homo sapiens
taaaactcaatagaa

SEQ ID NO: 582282 - DNA, 15 bp, Homo sapiens
aaaactcaatagaag

SEQ ID NO: 582283 - DNA, 15 bp, Homo sapiens
aaactcaatagaagc

SEQ ID NO: 582284 - DNA, 15 bp, Homo sapiens
aactcaatagaagca

SEQ ID NO: 582285 - DNA, 15 bp, Homo sapiens
actcaatagaagcag

SEQ ID NO: 582286 - DNA, 15 bp, Homo sapiens
ctcaatagaagcaga

SEQ ID NO: 582287 - DNA, 15 bp, Homo sapiens
tcaatagaagcagaa

SEQ ID NO: 582288 - DNA, 15 bp, Homo sapiens
caatagaagcagaaa

SEQ ID NO: 582289 - DNA, 15 bp, Homo sapiens
aatagaagcagaaat

SEQ ID NO: 582290 - DNA, 15 bp, Homo sapiens
atagaagcagaaata

SEQ ID NO: 582291 - DNA, 15 bp, Homo sapiens
tagaagcagaaataa

SEQ ID NO: 582292 - DNA, 15 bp, Homo sapiens
agaagcagaaataaa

SEQ ID NO: 582293 - DNA, 15 bp, Homo sapiens
gaagcagaaataaaa

SEQ ID NO: 582294 - DNA, 15 bp, Homo sapiens
aagcagaaataaaac

SEQ ID NO: 582295 - DNA, 15 bp, Homo sapiens
agcagaaataaaaca

SEQ ID NO: 582296 - DNA, 15 bp, Homo sapiens
gcagaaataaaacac

SEQ ID NO: 582297 - DNA, 15 bp, Homo sapiens
cagaaataaaacact

SEQ ID NO: 582298 - DNA, 15 bp, Homo sapiens
agaaataaaacacta

SEQ ID NO: 582299 - DNA, 15 bp, Homo sapiens
gaaataaaacactag

SEQ ID NO: 582300 - DNA, 15 bp, Homo sapiens
aaataaaacactagt

SEQ ID NO: 582301 - DNA, 15 bp, Homo sapiens
aataaaacactagtt

SEQ ID NO: 582302 - DNA, 15 bp, Homo sapiens
ataaaacactagtta

SEQ ID NO: 582303 - DNA, 15 bp, Homo sapiens
taaaacactagttag

SEQ ID NO: 582304 - DNA, 15 bp, Homo sapiens
aaaacactagttagg

SEQ ID NO: 582305 - DNA, 15 bp, Homo sapiens
aaacactagttagga

SEQ ID NO: 582306 - DNA, 15 bp, Homo sapiens
aacactagttaggaa

SEQ ID NO: 582307 - DNA, 15 bp, Homo sapiens
acactagttaggaaa

SEQ ID NO: 582308 - DNA, 15 bp, Homo sapiens
cactagttaggaaat

SEQ ID NO: 582309 - DNA, 15 bp, Homo sapiens
actagttaggaaata

SEQ ID NO: 582310 - DNA, 15 bp, Homo sapiens
ctagttaggaaataa

SEQ ID NO: 582311 - DNA, 15 bp, Homo sapiens
tagttaggaaataat

SEQ ID NO: 582312 - DNA, 15 bp, Homo sapiens
agttaggaaataatt

SEQ ID NO: 582313 - DNA, 15 bp, Homo sapiens
gttaggaaataattt

SEQ ID NO: 582314 - DNA, 15 bp, Homo sapiens
ttaggaaataatttc

SEQ ID NO: 582315 - DNA, 15 bp, Homo sapiens
taggaaataatttcc

SEQ ID NO: 582316 - DNA, 15 bp, Homo sapiens
aggaaataatttccc

SEQ ID NO: 582317 - DNA, 15 bp, Homo sapiens
ggaaataatttccct

SEQ ID NO: 582318 - DNA, 15 bp, Homo sapiens
gaaataatttcccta

SEQ ID NO: 582319 - DNA, 15 bp, Homo sapiens
aaataatttccctag

SEQ ID NO: 582320 - DNA, 15 bp, Homo sapiens
aataatttccctaga

SEQ ID NO: 582321 - DNA, 15 bp, Homo sapiens
ataatttccctagac

SEQ ID NO: 582322 - DNA, 15 bp, Homo sapiens
taatttccctagacc

SEQ ID NO: 582323 - DNA, 15 bp, Homo sapiens
aatttccctagacca

SEQ ID NO: 582324 - DNA, 15 bp, Homo sapiens
atttccctagaccag

SEQ ID NO: 582325 - DNA, 15 bp, Homo sapiens
tttccctagaccagt

SEQ ID NO: 582326 - DNA, 15 bp, Homo sapiens
ttccctagaccagtg

SEQ ID NO: 582327 - DNA, 15 bp, Homo sapiens
tccctagaccagtgg

SEQ ID NO: 582328 - DNA, 15 bp, Homo sapiens
ccctagaccagtggt

SEQ ID NO: 582329 - DNA, 15 bp, Homo sapiens
cctagaccagtggtt

SEQ ID NO: 582330 - DNA, 15 bp, Homo sapiens
ctagaccagtggttc

SEQ ID NO: 582331 - DNA, 15 bp, Homo sapiens
tagaccagtggttcg

SEQ ID NO: 582332 - DNA, 15 bp, Homo sapiens
agaccagtggttcgc

SEQ ID NO: 582333 - DNA, 15 bp, Homo sapiens
gaccagtggttcgca

SEQ ID NO: 582334 - DNA, 15 bp, Homo sapiens
accagtggttcgcaa

SEQ ID NO: 582335 - DNA, 15 bp, Homo sapiens
ccagtggttcgcaaa

SEQ ID NO: 582336 - DNA, 15 bp, Homo sapiens
cagtggttcgcaaat

SEQ ID NO: 582337 - DNA, 15 bp, Homo sapiens
agtggttcgcaaatt

SEQ ID NO: 582338 - DNA, 15 bp, Homo sapiens
gtggttcgcaaattt

SEQ ID NO: 582339 - DNA, 15 bp, Homo sapiens
tggttcgcaaatttt

SEQ ID NO: 582340 - DNA, 15 bp, Homo sapiens
ggttcgcaaatttta

SEQ ID NO: 582341 - DNA, 15 bp, Homo sapiens
gttcgcaaattttaa

SEQ ID NO: 582342 - DNA, 15 bp, Homo sapiens
ttcgcaaattttaac

SEQ ID NO: 582343 - DNA, 15 bp, Homo sapiens
tcgcaaattttaaca

SEQ ID NO: 582344 - DNA, 15 bp, Homo sapiens
cgcaaattttaacat

SEQ ID NO: 582345 - DNA, 15 bp, Homo sapiens
gcaaattttaacata

SEQ ID NO: 582346 - DNA, 15 bp, Homo sapiens
caaattttaacatac

SEQ ID NO: 582347 - DNA, 15 bp, Homo sapiens
aaattttaacataca

SEQ ID NO: 582348 - DNA, 15 bp, Homo sapiens
aattttaacatacat

SEQ ID NO: 582349 - DNA, 15 bp, Homo sapiens
attttaacatacatt

SEQ ID NO: 582350 - DNA, 15 bp, Homo sapiens
ttttaacatacatta

SEQ ID NO: 582351 - DNA, 15 bp, Homo sapiens
tttaacatacattat

SEQ ID NO: 582352 - DNA, 15 bp, Homo sapiens
ttaacatacattata

SEQ ID NO: 582353 - DNA, 15 bp, Homo sapiens
taacatacattataa

SEQ ID NO: 582354 - DNA, 15 bp, Homo sapiens
aacatacattataat

SEQ ID NO: 582355 - DNA, 15 bp, Homo sapiens
acatacattataatc

SEQ ID NO: 582356 - DNA, 15 bp, Homo sapiens
catacattataatca

SEQ ID NO: 582357 - DNA, 15 bp, Homo sapiens
atacattataatcaa

SEQ ID NO: 582358 - DNA, 15 bp, Homo sapiens
tacattataatcaac

SEQ ID NO: 582359 - DNA, 15 bp, Homo sapiens
acattataatcaact

SEQ ID NO: 582360 - DNA, 15 bp, Homo sapiens
cattataatcaactg

SEQ ID NO: 582361 - DNA, 15 bp, Homo sapiens
attataatcaactgg

SEQ ID NO: 582362 - DNA, 15 bp, Homo sapiens
ttataatcaactgga

SEQ ID NO: 582363 - DNA, 15 bp, Homo sapiens
tataatcaactggag

SEQ ID NO: 582364 - DNA, 15 bp, Homo sapiens
ataatcaactggagg

SEQ ID NO: 582365 - DNA, 15 bp, Homo sapiens
taatcaactggaggt

SEQ ID NO: 582366 - DNA, 15 bp, Homo sapiens
aatcaactggaggta

SEQ ID NO: 582367 - DNA, 15 bp, Homo sapiens
atcaactggaggtat

SEQ ID NO: 582368 - DNA, 15 bp, Homo sapiens
tcaactggaggtatt

SEQ ID NO: 582369 - DNA, 15 bp, Homo sapiens
caactggaggtattg

SEQ ID NO: 582370 - DNA, 15 bp, Homo sapiens
aactggaggtattgt

SEQ ID NO: 582371 - DNA, 15 bp, Homo sapiens
actggaggtattgta

SEQ ID NO: 582372 - DNA, 15 bp, Homo sapiens
ctggaggtattgtaa

SEQ ID NO: 582373 - DNA, 15 bp, Homo sapiens
tggaggtattgtaaa

SEQ ID NO: 582374 - DNA, 15 bp, Homo sapiens
ggaggtattgtaaaa

SEQ ID NO: 582375 - DNA, 15 bp, Homo sapiens
gaggtattgtaaaac

SEQ ID NO: 582376 - DNA, 15 bp, Homo sapiens
aggtattgtaaaaca

SEQ ID NO: 582377 - DNA, 15 bp, Homo sapiens
ggtattgtaaaacag

SEQ ID NO: 582378 - DNA, 15 bp, Homo sapiens
gtattgtaaaacaga

SEQ ID NO: 582379 - DNA, 15 bp, Homo sapiens
tattgtaaaacagat

SEQ ID NO: 582380 - DNA, 15 bp, Homo sapiens
attgtaaaacagatt

SEQ ID NO: 582381 - DNA, 15 bp, Homo sapiens
ttgtaaaacagattg

SEQ ID NO: 582382 - DNA, 15 bp, Homo sapiens
tgtaaaacagattgc

SEQ ID NO: 582383 - DNA, 15 bp, Homo sapiens
gtaaaacagattgct

SEQ ID NO: 582384 - DNA, 15 bp, Homo sapiens
taaaacagattgctg

SEQ ID NO: 582385 - DNA, 15 bp, Homo sapiens
aaaacagattgctgg

SEQ ID NO: 582386 - DNA, 15 bp, Homo sapiens
aaacagattgctggg

SEQ ID NO: 582387 - DNA, 15 bp, Homo sapiens
aacagattgctgggc

SEQ ID NO: 582388 - DNA, 15 bp, Homo sapiens
acagattgctgggcc

SEQ ID NO: 582389 - DNA, 15 bp, Homo sapiens
cagattgctgggcct

SEQ ID NO: 582390 - DNA, 15 bp, Homo sapiens
agattgctgggccta

SEQ ID NO: 582391 - DNA, 15 bp, Homo sapiens
gattgctgggcctag

SEQ ID NO: 582392 - DNA, 15 bp, Homo sapiens
attgctgggcctagc

SEQ ID NO: 582393 - DNA, 15 bp, Homo sapiens
ttgctgggcctagcc

SEQ ID NO: 582394 - DNA, 15 bp, Homo sapiens
tgctgggcctagcct

SEQ ID NO: 582395 - DNA, 15 bp, Homo sapiens
gctgggcctagcctc

SEQ ID NO: 582396 - DNA, 15 bp, Homo sapiens
ctgggcctagcctcc

SEQ ID NO: 582397 - DNA, 15 bp, Homo sapiens
tgggcctagcctcca

SEQ ID NO: 582398 - DNA, 15 bp, Homo sapiens
gggcctagcctccag

SEQ ID NO: 582399 - DNA, 15 bp, Homo sapiens
ggcctagcctccaga

SEQ ID NO: 582400 - DNA, 15 bp, Homo sapiens
gcctagcctccagac

SEQ ID NO: 582401 - DNA, 15 bp, Homo sapiens
cctagcctccagact

SEQ ID NO: 582402 - DNA, 15 bp, Homo sapiens
ctagcctccagactt

SEQ ID NO: 582403 - DNA, 15 bp, Homo sapiens
tagcctccagacttt

SEQ ID NO: 582404 - DNA, 15 bp, Homo sapiens
agcctccagactttc

SEQ ID NO: 582405 - DNA, 15 bp, Homo sapiens
gcctccagactttct

SEQ ID NO: 582406 - DNA, 15 bp, Homo sapiens
cctccagactttctg

SEQ ID NO: 582407 - DNA, 15 bp, Homo sapiens
ctccagactttctga

SEQ ID NO: 582408 - DNA, 15 bp, Homo sapiens
tccagactttctgat

SEQ ID NO: 582409 - DNA, 15 bp, Homo sapiens
ccagactttctgatt

SEQ ID NO: 582410 - DNA, 15 bp, Homo sapiens
cagactttctgatta

SEQ ID NO: 582411 - DNA, 15 bp, Homo sapiens
agactttctgattat

SEQ ID NO: 582412 - DNA, 15 bp, Homo sapiens
gactttctgattata

SEQ ID NO: 582413 - DNA, 15 bp, Homo sapiens
actttctgattatac

SEQ ID NO: 582414 - DNA, 15 bp, Homo sapiens
ctttctgattataca

SEQ ID NO: 582415 - DNA, 15 bp, Homo sapiens
tttctgattatacat

SEQ ID NO: 582416 - DNA, 15 bp, Homo sapiens
ttctgattatacata

SEQ ID NO: 582417 - DNA, 15 bp, Homo sapiens
tctgattatacataa

SEQ ID NO: 582418 - DNA, 15 bp, Homo sapiens
ctgattatacataat

SEQ ID NO: 582419 - DNA, 15 bp, Homo sapiens
tgattatacataatc

SEQ ID NO: 582420 - DNA, 15 bp, Homo sapiens
gattatacataatca

SEQ ID NO: 582421 - DNA, 15 bp, Homo sapiens
attatacataatcag

SEQ ID NO: 582422 - DNA, 15 bp, Homo sapiens
ttatacataatcaga

SEQ ID NO: 582423 - DNA, 15 bp, Homo sapiens
tatacataatcagaa

SEQ ID NO: 582424 - DNA, 15 bp, Homo sapiens
atacataatcagaaa

SEQ ID NO: 582425 - DNA, 15 bp, Homo sapiens
tacataatcagaaaa

SEQ ID NO: 582426 - DNA, 15 bp, Homo sapiens
acataatcagaaaac

SEQ ID NO: 582427 - DNA, 15 bp, Homo sapiens
cataatcagaaaact

SEQ ID NO: 582428 - DNA, 15 bp, Homo sapiens
ataatcagaaaacta

SEQ ID NO: 582429 - DNA, 15 bp, Homo sapiens
taatcagaaaactac

SEQ ID NO: 582430 - DNA, 15 bp, Homo sapiens
aatcagaaaactaca

SEQ ID NO: 582431 - DNA, 15 bp, Homo sapiens
atcagaaaactacag

SEQ ID NO: 582432 - DNA, 15 bp, Homo sapiens
tcagaaaactacaga

SEQ ID NO: 582433 - DNA, 15 bp, Homo sapiens
cagaaaactacagat

SEQ ID NO: 582434 - DNA, 15 bp, Homo sapiens
agaaaactacagatc

SEQ ID NO: 582435 - DNA, 15 bp, Homo sapiens
gaaaactacagatct

SEQ ID NO: 582436 - DNA, 15 bp, Homo sapiens
aaaactacagatctg

SEQ ID NO: 582437 - DNA, 15 bp, Homo sapiens
aaactacagatctgg

SEQ ID NO: 582438 - DNA, 15 bp, Homo sapiens
aactacagatctggg

SEQ ID NO: 582439 - DNA, 15 bp, Homo sapiens
actacagatctgggt

SEQ ID NO: 582440 - DNA, 15 bp, Homo sapiens
ctacagatctgggta

SEQ ID NO: 582441 - DNA, 15 bp, Homo sapiens
tacagatctgggtag

SEQ ID NO: 582442 - DNA, 15 bp, Homo sapiens
acagatctgggtagg

SEQ ID NO: 582443 - DNA, 15 bp, Homo sapiens
cagatctgggtaggg

SEQ ID NO: 582444 - DNA, 15 bp, Homo sapiens
agatctgggtagggc

SEQ ID NO: 582445 - DNA, 15 bp, Homo sapiens
gatctgggtagggcc

SEQ ID NO: 582446 - DNA, 15 bp, Homo sapiens
atctgggtagggcct

SEQ ID NO: 582447 - DNA, 15 bp, Homo sapiens
tctgggtagggcctg

SEQ ID NO: 582448 - DNA, 15 bp, Homo sapiens
ctgggtagggcctga

SEQ ID NO: 582449 - DNA, 15 bp, Homo sapiens
tgggtagggcctgag

SEQ ID NO: 582450 - DNA, 15 bp, Homo sapiens
gggtagggcctgaga

SEQ ID NO: 582451 - DNA, 15 bp, Homo sapiens
ggtagggcctgagaa

SEQ ID NO: 582452 - DNA, 15 bp, Homo sapiens
gtagggcctgagaat

SEQ ID NO: 582453 - DNA, 15 bp, Homo sapiens
tagggcctgagaatt

SEQ ID NO: 582454 - DNA, 15 bp, Homo sapiens
agggcctgagaattt

SEQ ID NO: 582455 - DNA, 15 bp, Homo sapiens
gggcctgagaatttg

SEQ ID NO: 582456 - DNA, 15 bp, Homo sapiens
ggcctgagaatttgc

SEQ ID NO: 582457 - DNA, 15 bp, Homo sapiens
gcctgagaatttgca

SEQ ID NO: 582458 - DNA, 15 bp, Homo sapiens
cctgagaatttgcat

SEQ ID NO: 582459 - DNA, 15 bp, Homo sapiens
ctgagaatttgcatt

SEQ ID NO: 582460 - DNA, 15 bp, Homo sapiens
tgagaatttgcattt

SEQ ID NO: 582461 - DNA, 15 bp, Homo sapiens
gagaatttgcatttc

SEQ ID NO: 582462 - DNA, 15 bp, Homo sapiens
agaatttgcatttca

SEQ ID NO: 582463 - DNA, 15 bp, Homo sapiens
gaatttgcatttcaa

SEQ ID NO: 582464 - DNA, 15 bp, Homo sapiens
aatttgcatttcaag

SEQ ID NO: 582465 - DNA, 15 bp, Homo sapiens
atttgcatttcaagc

SEQ ID NO: 582466 - DNA, 15 bp, Homo sapiens
tttgcatttcaagca

SEQ ID NO: 582467 - DNA, 15 bp, Homo sapiens
ttgcatttcaagcaa

SEQ ID NO: 582468 - DNA, 15 bp, Homo sapiens
tgcatttcaagcaaa

SEQ ID NO: 582469 - DNA, 15 bp, Homo sapiens
gcatttcaagcaaat

SEQ ID NO: 582470 - DNA, 15 bp, Homo sapiens
catttcaagcaaatt

SEQ ID NO: 582471 - DNA, 15 bp, Homo sapiens
atttcaagcaaattc

SEQ ID NO: 582472 - DNA, 15 bp, Homo sapiens
tttcaagcaaattcc

SEQ ID NO: 582473 - DNA, 15 bp, Homo sapiens
ttcaagcaaattccc

SEQ ID NO: 582474 - DNA, 15 bp, Homo sapiens
tcaagcaaattccca

SEQ ID NO: 582475 - DNA, 15 bp, Homo sapiens
caagcaaattcccaa

SEQ ID NO: 582476 - DNA, 15 bp, Homo sapiens
aagcaaattcccaag

SEQ ID NO: 582477 - DNA, 15 bp, Homo sapiens
agcaaattcccaagt

SEQ ID NO: 582478 - DNA, 15 bp, Homo sapiens
gcaaattcccaagtg

SEQ ID NO: 582479 - DNA, 15 bp, Homo sapiens
caaattcccaagtga

SEQ ID NO: 582480 - DNA, 15 bp, Homo sapiens
aaattcccaagtgat

SEQ ID NO: 582481 - DNA, 15 bp, Homo sapiens
aattcccaagtgatg

SEQ ID NO: 582482 - DNA, 15 bp, Homo sapiens
attcccaagtgatgc

SEQ ID NO: 582483 - DNA, 15 bp, Homo sapiens
ttcccaagtgatgct

SEQ ID NO: 582484 - DNA, 15 bp, Homo sapiens
tcccaagtgatgcta

SEQ ID NO: 582485 - DNA, 15 bp, Homo sapiens
cccaagtgatgctaa

SEQ ID NO: 582486 - DNA, 15 bp, Homo sapiens
ccaagtgatgctaat

SEQ ID NO: 582487 - DNA, 15 bp, Homo sapiens
caagtgatgctaatg

SEQ ID NO: 582488 - DNA, 15 bp, Homo sapiens
aagtgatgctaatgc

SEQ ID NO: 582489 - DNA, 15 bp, Homo sapiens
agtgatgctaatgct

SEQ ID NO: 582490 - DNA, 15 bp, Homo sapiens
gtgatgctaatgctg

SEQ ID NO: 582491 - DNA, 15 bp, Homo sapiens
tgatgctaatgctgg

SEQ ID NO: 582492 - DNA, 15 bp, Homo sapiens
gatgctaatgctggt

SEQ ID NO: 582493 - DNA, 15 bp, Homo sapiens
atgctaatgctggtg

SEQ ID NO: 582494 - DNA, 15 bp, Homo sapiens
tgctaatgctggtgg

SEQ ID NO: 582495 - DNA, 15 bp, Homo sapiens
gctaatgctggtggt

SEQ ID NO: 582496 - DNA, 15 bp, Homo sapiens
ctaatgctggtggtc

SEQ ID NO: 582497 - DNA, 15 bp, Homo sapiens
taatgctggtggtct

SEQ ID NO: 582498 - DNA, 15 bp, Homo sapiens
aatgctggtggtcta

SEQ ID NO: 582499 - DNA, 15 bp, Homo sapiens
atgctggtggtctaa

SEQ ID NO: 582500 - DNA, 15 bp, Homo sapiens
tgctggtggtctaag

SEQ ID NO: 582501 - DNA, 15 bp, Homo sapiens
gctggtggtctaaga

SEQ ID NO: 582502 - DNA, 15 bp, Homo sapiens
ctggtggtctaagaa

SEQ ID NO: 582503 - DNA, 15 bp, Homo sapiens
tggtggtctaagaaa

SEQ ID NO: 582504 - DNA, 15 bp, Homo sapiens
ggtggtctaagaaac

SEQ ID NO: 582505 - DNA, 15 bp, Homo sapiens
gtggtctaagaaaca

SEQ ID NO: 582506 - DNA, 15 bp, Homo sapiens
tggtctaagaaacac

SEQ ID NO: 582507 - DNA, 15 bp, Homo sapiens
ggtctaagaaacact

SEQ ID NO: 582508 - DNA, 15 bp, Homo sapiens
gtctaagaaacactt

SEQ ID NO: 582509 - DNA, 15 bp, Homo sapiens
tctaagaaacacttt

SEQ ID NO: 582510 - DNA, 15 bp, Homo sapiens
ctaagaaacactttt

SEQ ID NO: 582511 - DNA, 15 bp, Homo sapiens
taagaaacacttttt

SEQ ID NO: 582512 - DNA, 15 bp, Homo sapiens
aagaaacactttttt

SEQ ID NO: 582513 - DNA, 15 bp, Homo sapiens
agaaacacttttttt

SEQ ID NO: 582514 - DNA, 15 bp, Homo sapiens
gaaacactttttttt

SEQ ID NO: 582515 - DNA, 15 bp, Homo sapiens
aaacacttttttttt

SEQ ID NO: 582516 - DNA, 15 bp, Homo sapiens
aacactttttttttc

SEQ ID NO: 582517 - DNA, 15 bp, Homo sapiens
acactttttttttct

SEQ ID NO: 582518 - DNA, 15 bp, Homo sapiens
cactttttttttctt

SEQ ID NO: 582519 - DNA, 15 bp, Homo sapiens
actttttttttcttt

SEQ ID NO: 582520 - DNA, 15 bp, Homo sapiens
ctttttttttctttt

SEQ ID NO: 582521 - DNA, 15 bp, Homo sapiens
tttttttttcttttt

SEQ ID NO: 582522 - DNA, 15 bp, Homo sapiens
ttttttttctttttt

SEQ ID NO: 582523 - DNA, 15 bp, Homo sapiens
tttttttcttttttt

SEQ ID NO: 582524 - DNA, 15 bp, Homo sapiens
ttttttctttttttt

SEQ ID NO: 582525 - DNA, 15 bp, Homo sapiens
tttttcttttttttg

SEQ ID NO: 582526 - DNA, 15 bp, Homo sapiens
ttttcttttttttgt

SEQ ID NO: 582527 - DNA, 15 bp, Homo sapiens
tttcttttttttgtg

SEQ ID NO: 582528 - DNA, 15 bp, Homo sapiens
ttcttttttttgtgg

SEQ ID NO: 582529 - DNA, 15 bp, Homo sapiens
tcttttttttgtggg

SEQ ID NO: 582530 - DNA, 15 bp, Homo sapiens
cttttttttgtgggt

SEQ ID NO: 582531 - DNA, 15 bp, Homo sapiens
ttttttttgtgggta

SEQ ID NO: 582532 - DNA, 15 bp, Homo sapiens
tttttttgtgggtag

SEQ ID NO: 582533 - DNA, 15 bp, Homo sapiens
ttttttgtgggtagt

SEQ ID NO: 582534 - DNA, 15 bp, Homo sapiens
tttttgtgggtagtg

SEQ ID NO: 582535 - DNA, 15 bp, Homo sapiens
ttttgtgggtagtgg

SEQ ID NO: 582536 - DNA, 15 bp, Homo sapiens
tttgtgggtagtggg

SEQ ID NO: 582537 - DNA, 15 bp, Homo sapiens
ttgtgggtagtgggg

SEQ ID NO: 582538 - DNA, 15 bp, Homo sapiens
tgtgggtagtggggt

SEQ ID NO: 582539 - DNA, 15 bp, Homo sapiens
gtgggtagtggggtg

SEQ ID NO: 582540 - DNA, 15 bp, Homo sapiens
tgggtagtggggtgg

SEQ ID NO: 582541 - DNA, 15 bp, Homo sapiens
gggtagtggggtggg

SEQ ID NO: 582542 - DNA, 15 bp, Homo sapiens
ggtagtggggtggga

SEQ ID NO: 582543 - DNA, 15 bp, Homo sapiens
gtagtggggtgggag

SEQ ID NO: 582544 - DNA, 15 bp, Homo sapiens
tagtggggtgggaga

SEQ ID NO: 582545 - DNA, 15 bp, Homo sapiens
agtggggtgggagat

SEQ ID NO: 582546 - DNA, 15 bp, Homo sapiens
gtggggtgggagatg

SEQ ID NO: 582547 - DNA, 15 bp, Homo sapiens
tggggtgggagatgg

SEQ ID NO: 582548 - DNA, 15 bp, Homo sapiens
ggggtgggagatgga

SEQ ID NO: 582549 - DNA, 15 bp, Homo sapiens
gggtgggagatggag

SEQ ID NO: 582550 - DNA, 15 bp, Homo sapiens
ggtgggagatggagt

SEQ ID NO: 582551 - DNA, 15 bp, Homo sapiens
gtgggagatggagtc

SEQ ID NO: 582552 - DNA, 15 bp, Homo sapiens
tgggagatggagtct

SEQ ID NO: 582553 - DNA, 15 bp, Homo sapiens
gggagatggagtctc

SEQ ID NO: 582554 - DNA, 15 bp, Homo sapiens
ggagatggagtctca

SEQ ID NO: 582555 - DNA, 15 bp, Homo sapiens
gagatggagtctcac

SEQ ID NO: 582556 - DNA, 15 bp, Homo sapiens
agatggagtctcact

SEQ ID NO: 582557 - DNA, 15 bp, Homo sapiens
gatggagtctcactc

SEQ ID NO: 582558 - DNA, 15 bp, Homo sapiens
atggagtctcactct

SEQ ID NO: 582559 - DNA, 15 bp, Homo sapiens
tggagtctcactctg

SEQ ID NO: 582560 - DNA, 15 bp, Homo sapiens
ggagtctcactctgt

SEQ ID NO: 582561 - DNA, 15 bp, Homo sapiens
gagtctcactctgtc

SEQ ID NO: 582562 - DNA, 15 bp, Homo sapiens
agtctcactctgtca

SEQ ID NO: 582563 - DNA, 15 bp, Homo sapiens
gtctcactctgtcac

SEQ ID NO: 582564 - DNA, 15 bp, Homo sapiens
tctcactctgtcacc

SEQ ID NO: 582565 - DNA, 15 bp, Homo sapiens
ctcactctgtcaccc

SEQ ID NO: 582566 - DNA, 15 bp, Homo sapiens
tcactctgtcaccca

SEQ ID NO: 582567 - DNA, 15 bp, Homo sapiens
cactctgtcacccag

SEQ ID NO: 582568 - DNA, 15 bp, Homo sapiens
actctgtcacccagg

SEQ ID NO: 582569 - DNA, 15 bp, Homo sapiens
tcacccaggctggag

SEQ ID NO: 582570 - DNA, 15 bp, Homo sapiens
cacccaggctggagt

SEQ ID NO: 582571 - DNA, 15 bp, Homo sapiens
acccaggctggagtg

SEQ ID NO: 582572 - DNA, 15 bp, Homo sapiens
ctggagtgcagtggt

SEQ ID NO: 582573 - DNA, 15 bp, Homo sapiens
ggagtgcagtggtgt

SEQ ID NO: 582574 - DNA, 15 bp, Homo sapiens
gagtgcagtggtgtg

SEQ ID NO: 582575 - DNA, 15 bp, Homo sapiens
agtgcagtggtgtga

SEQ ID NO: 582576 - DNA, 15 bp, Homo sapiens
gtgcagtggtgtgat

SEQ ID NO: 582577 - DNA, 15 bp, Homo sapiens
tgcagtggtgtgatc

SEQ ID NO: 582578 - DNA, 15 bp, Homo sapiens
gcagtggtgtgatct

SEQ ID NO: 582579 - DNA, 15 bp, Homo sapiens
cagtggtgtgatctc

SEQ ID NO: 582580 - DNA, 15 bp, Homo sapiens
agtggtgtgatctcg

SEQ ID NO: 582581 - DNA, 15 bp, Homo sapiens
gtggtgtgatctcgg

SEQ ID NO: 582582 - DNA, 15 bp, Homo sapiens
tggtgtgatctcggc

SEQ ID NO: 582583 - DNA, 15 bp, Homo sapiens
ggtgtgatctcggct

SEQ ID NO: 582584 - DNA, 15 bp, Homo sapiens
gtgtgatctcggctc

SEQ ID NO: 582585 - DNA, 15 bp, Homo sapiens
tgtgatctcggctca

SEQ ID NO: 582586 - DNA, 15 bp, Homo sapiens
ctcaccgcaacctcc

SEQ ID NO: 582587 - DNA, 15 bp, Homo sapiens
tcaccgcaacctcct

SEQ ID NO: 582588 - DNA, 15 bp, Homo sapiens
caccgcaacctcctc

SEQ ID NO: 582589 - DNA, 15 bp, Homo sapiens
accgcaacctcctcc

SEQ ID NO: 582590 - DNA, 15 bp, Homo sapiens
ccgcaacctcctcct

SEQ ID NO: 582591 - DNA, 15 bp, Homo sapiens
cgcaacctcctcctc

SEQ ID NO: 582592 - DNA, 15 bp, Homo sapiens
gcaacctcctcctcc

SEQ ID NO: 582593 - DNA, 15 bp, Homo sapiens
caacctcctcctccc

SEQ ID NO: 582594 - DNA, 15 bp, Homo sapiens
aacctcctcctcccg

SEQ ID NO: 582595 - DNA, 15 bp, Homo sapiens
acctcctcctcccgg

SEQ ID NO: 582596 - DNA, 15 bp, Homo sapiens
cctcctcctcccggg

SEQ ID NO: 582597 - DNA, 15 bp, Homo sapiens
ctcctcctcccgggt

SEQ ID NO: 582598 - DNA, 15 bp, Homo sapiens
tcctcctcccgggtt

SEQ ID NO: 582599 - DNA, 15 bp, Homo sapiens
cctcctcccgggttc

SEQ ID NO: 582600 - DNA, 15 bp, Homo sapiens
ctcctcccgggttca

SEQ ID NO: 582601 - DNA, 15 bp, Homo sapiens
tcctcccgggttcaa

SEQ ID NO: 582602 - DNA, 15 bp, Homo sapiens
cctcccgggttcaag

SEQ ID NO: 582603 - DNA, 15 bp, Homo sapiens
ctcccgggttcaagt

SEQ ID NO: 582604 - DNA, 15 bp, Homo sapiens
tcccgggttcaagtg

SEQ ID NO: 582605 - DNA, 15 bp, Homo sapiens
cccgggttcaagtga

SEQ ID NO: 582606 - DNA, 15 bp, Homo sapiens
ccgggttcaagtgat

SEQ ID NO: 582607 - DNA, 15 bp, Homo sapiens
cgggttcaagtgatt

SEQ ID NO: 582608 - DNA, 15 bp, Homo sapiens
ttcaagtgattctcc

SEQ ID NO: 582609 - DNA, 15 bp, Homo sapiens
tcaagtgattctcct

SEQ ID NO: 582610 - DNA, 15 bp, Homo sapiens
tgcctcagcctccta

SEQ ID NO: 582611 - DNA, 15 bp, Homo sapiens
gcctcagcctcctaa

SEQ ID NO: 582612 - DNA, 15 bp, Homo sapiens
cctcagcctcctaag

SEQ ID NO: 582613 - DNA, 15 bp, Homo sapiens
ctcagcctcctaagt

SEQ ID NO: 582614 - DNA, 15 bp, Homo sapiens
tcagcctcctaagta

SEQ ID NO: 582615 - DNA, 15 bp, Homo sapiens
cagcctcctaagtag

SEQ ID NO: 582616 - DNA, 15 bp, Homo sapiens
agcctcctaagtagc

SEQ ID NO: 582617 - DNA, 15 bp, Homo sapiens
gcctcctaagtagct

SEQ ID NO: 582618 - DNA, 15 bp, Homo sapiens
cctcctaagtagctg

SEQ ID NO: 582619 - DNA, 15 bp, Homo sapiens
ctcctaagtagctgg

SEQ ID NO: 582620 - DNA, 15 bp, Homo sapiens
tcctaagtagctggg

SEQ ID NO: 582621 - DNA, 15 bp, Homo sapiens
cctaagtagctggga

SEQ ID NO: 582622 - DNA, 15 bp, Homo sapiens
ctaagtagctgggat

SEQ ID NO: 582623 - DNA, 15 bp, Homo sapiens
taagtagctgggatt

SEQ ID NO: 582624 - DNA, 15 bp, Homo sapiens
tgggattacaggcgc

SEQ ID NO: 582625 - DNA, 15 bp, Homo sapiens
gggattacaggcgcc

SEQ ID NO: 582626 - DNA, 15 bp, Homo sapiens
ggattacaggcgcct

SEQ ID NO: 582627 - DNA, 15 bp, Homo sapiens
gattacaggcgcctg

SEQ ID NO: 582628 - DNA, 15 bp, Homo sapiens
attacaggcgcctgc

SEQ ID NO: 582629 - DNA, 15 bp, Homo sapiens
ttacaggcgcctgcc

SEQ ID NO: 582630 - DNA, 15 bp, Homo sapiens
tacaggcgcctgcca

SEQ ID NO: 582631 - DNA, 15 bp, Homo sapiens
acaggcgcctgccac

SEQ ID NO: 582632 - DNA, 15 bp, Homo sapiens
caggcgcctgccacc

SEQ ID NO: 582633 - DNA, 15 bp, Homo sapiens
aggcgcctgccacca

SEQ ID NO: 582634 - DNA, 15 bp, Homo sapiens
ggcgcctgccaccat

SEQ ID NO: 582635 - DNA, 15 bp, Homo sapiens
gcgcctgccaccatg

SEQ ID NO: 582636 - DNA, 15 bp, Homo sapiens
cgcctgccaccatgc

SEQ ID NO: 582637 - DNA, 15 bp, Homo sapiens
gcctgccaccatgcc

SEQ ID NO: 582638 - DNA, 15 bp, Homo sapiens
cctgccaccatgcct

SEQ ID NO: 582639 - DNA, 15 bp, Homo sapiens
ctgccaccatgcctg

SEQ ID NO: 582640 - DNA, 15 bp, Homo sapiens
cctggctaatttttg

SEQ ID NO: 582641 - DNA, 15 bp, Homo sapiens
ctggctaatttttgt

SEQ ID NO: 582642 - DNA, 15 bp, Homo sapiens
tggctaatttttgta

SEQ ID NO: 582643 - DNA, 15 bp, Homo sapiens
ggctaatttttgtat

SEQ ID NO: 582644 - DNA, 15 bp, Homo sapiens
tttttagtagagaca

SEQ ID NO: 582645 - DNA, 15 bp, Homo sapiens
ttttagtagagacag

SEQ ID NO: 582646 - DNA, 15 bp, Homo sapiens
tttagtagagacagg

SEQ ID NO: 582647 - DNA, 15 bp, Homo sapiens
ttagtagagacaggg

SEQ ID NO: 582648 - DNA, 15 bp, Homo sapiens
tagtagagacagggt

SEQ ID NO: 582649 - DNA, 15 bp, Homo sapiens
agagacagggtttca

SEQ ID NO: 582650 - DNA, 15 bp, Homo sapiens
tgttggccaggctgt

SEQ ID NO: 582651 - DNA, 15 bp, Homo sapiens
gttggccaggctgtt

SEQ ID NO: 582652 - DNA, 15 bp, Homo sapiens
ttggccaggctgttc

SEQ ID NO: 582653 - DNA, 15 bp, Homo sapiens
ggccaggctgttctt

SEQ ID NO: 582654 - DNA, 15 bp, Homo sapiens
gccaggctgttcttg

SEQ ID NO: 582655 - DNA, 15 bp, Homo sapiens
ccaggctgttcttga

SEQ ID NO: 582656 - DNA, 15 bp, Homo sapiens
caggctgttcttgaa

SEQ ID NO: 582657 - DNA, 15 bp, Homo sapiens
aggctgttcttgaac

SEQ ID NO: 582658 - DNA, 15 bp, Homo sapiens
ggctgttcttgaact

SEQ ID NO: 582659 - DNA, 15 bp, Homo sapiens
gctgttcttgaactc

SEQ ID NO: 582660 - DNA, 15 bp, Homo sapiens
ctgttcttgaactcc

SEQ ID NO: 582661 - DNA, 15 bp, Homo sapiens
tgttcttgaactcct

SEQ ID NO: 582662 - DNA, 15 bp, Homo sapiens
gttcttgaactcctg

SEQ ID NO: 582663 - DNA, 15 bp, Homo sapiens
ttcttgaactcctga

SEQ ID NO: 582664 - DNA, 15 bp, Homo sapiens
tcttgaactcctgac

SEQ ID NO: 582665 - DNA, 15 bp, Homo sapiens
cttgaactcctgacc

SEQ ID NO: 582666 - DNA, 15 bp, Homo sapiens
ttgaactcctgacct

SEQ ID NO: 582667 - DNA, 15 bp, Homo sapiens
tgaactcctgacctc

SEQ ID NO: 582668 - DNA, 15 bp, Homo sapiens
aactcctgacctcaa

SEQ ID NO: 582669 - DNA, 15 bp, Homo sapiens
actcctgacctcaag

SEQ ID NO: 582670 - DNA, 15 bp, Homo sapiens
ctcctgacctcaagt

SEQ ID NO: 582671 - DNA, 15 bp, Homo sapiens
tcctgacctcaagtg

SEQ ID NO: 582672 - DNA, 15 bp, Homo sapiens
cctgacctcaagtga

SEQ ID NO: 582673 - DNA, 15 bp, Homo sapiens
ctgacctcaagtgat

SEQ ID NO: 582674 - DNA, 15 bp, Homo sapiens
tgacctcaagtgatc

SEQ ID NO: 582675 - DNA, 15 bp, Homo sapiens
gacctcaagtgatcc

SEQ ID NO: 582676 - DNA, 15 bp, Homo sapiens
acctcaagtgatcca

SEQ ID NO: 582677 - DNA, 15 bp, Homo sapiens
cctcaagtgatccac

SEQ ID NO: 582678 - DNA, 15 bp, Homo sapiens
ctcaagtgatccacc

SEQ ID NO: 582679 - DNA, 15 bp, Homo sapiens
tcaagtgatccaccc

SEQ ID NO: 582680 - DNA, 15 bp, Homo sapiens
caagtgatccaccca

SEQ ID NO: 582681 - DNA, 15 bp, Homo sapiens
aagtgatccacccac

SEQ ID NO: 582682 - DNA, 15 bp, Homo sapiens
agtgatccacccacc

SEQ ID NO: 582683 - DNA, 15 bp, Homo sapiens
tgatccacccacctt

SEQ ID NO: 582684 - DNA, 15 bp, Homo sapiens
gatccacccaccttg

SEQ ID NO: 582685 - DNA, 15 bp, Homo sapiens
atccacccaccttgc

SEQ ID NO: 582686 - DNA, 15 bp, Homo sapiens
tccacccaccttgct

SEQ ID NO: 582687 - DNA, 15 bp, Homo sapiens
ccacccaccttgctc

SEQ ID NO: 582688 - DNA, 15 bp, Homo sapiens
cacccaccttgctct

SEQ ID NO: 582689 - DNA, 15 bp, Homo sapiens
acccaccttgctctc

SEQ ID NO: 582690 - DNA, 15 bp, Homo sapiens
cccaccttgctctct

SEQ ID NO: 582691 - DNA, 15 bp, Homo sapiens
ccaccttgctctctc

SEQ ID NO: 582692 - DNA, 15 bp, Homo sapiens
caccttgctctctca

SEQ ID NO: 582693 - DNA, 15 bp, Homo sapiens
accttgctctctcaa

SEQ ID NO: 582694 - DNA, 15 bp, Homo sapiens
ccttgctctctcaaa

SEQ ID NO: 582695 - DNA, 15 bp, Homo sapiens
cttgctctctcaaag

SEQ ID NO: 582696 - DNA, 15 bp, Homo sapiens
ttgctctctcaaagt

SEQ ID NO: 582697 - DNA, 15 bp, Homo sapiens
tgctctctcaaagtg

SEQ ID NO: 582698 - DNA, 15 bp, Homo sapiens
gctctctcaaagtgc

SEQ ID NO: 582699 - DNA, 15 bp, Homo sapiens
ctctctcaaagtgct

SEQ ID NO: 582700 - DNA, 15 bp, Homo sapiens
tctctcaaagtgctg

SEQ ID NO: 582701 - DNA, 15 bp, Homo sapiens
ctctcaaagtgctgg

SEQ ID NO: 582702 - DNA, 15 bp, Homo sapiens
tctcaaagtgctggg

SEQ ID NO: 582703 - DNA, 15 bp, Homo sapiens
ctcaaagtgctggga

SEQ ID NO: 582704 - DNA, 15 bp, Homo sapiens
tcaaagtgctgggat

SEQ ID NO: 582705 - DNA, 15 bp, Homo sapiens
attacaggcgtgagt

SEQ ID NO: 582706 - DNA, 15 bp, Homo sapiens
ttacaggcgtgagtt

SEQ ID NO: 582707 - DNA, 15 bp, Homo sapiens
tacaggcgtgagtta

SEQ ID NO: 582708 - DNA, 15 bp, Homo sapiens
acaggcgtgagttac

SEQ ID NO: 582709 - DNA, 15 bp, Homo sapiens
caggcgtgagttact

SEQ ID NO: 582710 - DNA, 15 bp, Homo sapiens
aggcgtgagttacta

SEQ ID NO: 582711 - DNA, 15 bp, Homo sapiens
ggcgtgagttactat

SEQ ID NO: 582712 - DNA, 15 bp, Homo sapiens
gcgtgagttactatg

SEQ ID NO: 582713 - DNA, 15 bp, Homo sapiens
cgtgagttactatgc

SEQ ID NO: 582714 - DNA, 15 bp, Homo sapiens
gtgagttactatgcc

SEQ ID NO: 582715 - DNA, 15 bp, Homo sapiens
tgagttactatgccc

SEQ ID NO: 582716 - DNA, 15 bp, Homo sapiens
gagttactatgccca

SEQ ID NO: 582717 - DNA, 15 bp, Homo sapiens
agttactatgcccag

SEQ ID NO: 582718 - DNA, 15 bp, Homo sapiens
gttactatgcccagc

SEQ ID NO: 582719 - DNA, 15 bp, Homo sapiens
ttactatgcccagct

SEQ ID NO: 582720 - DNA, 15 bp, Homo sapiens
tactatgcccagctg

SEQ ID NO: 582721 - DNA, 15 bp, Homo sapiens
actatgcccagctga

SEQ ID NO: 582722 - DNA, 15 bp, Homo sapiens
ctatgcccagctgag

SEQ ID NO: 582723 - DNA, 15 bp, Homo sapiens
tatgcccagctgaga

SEQ ID NO: 582724 - DNA, 15 bp, Homo sapiens
atgcccagctgagaa

SEQ ID NO: 582725 - DNA, 15 bp, Homo sapiens
tgcccagctgagaag

SEQ ID NO: 582726 - DNA, 15 bp, Homo sapiens
gcccagctgagaagc

SEQ ID NO: 582727 - DNA, 15 bp, Homo sapiens
cccagctgagaagca

SEQ ID NO: 582728 - DNA, 15 bp, Homo sapiens
ccagctgagaagcac

SEQ ID NO: 582729 - DNA, 15 bp, Homo sapiens
cagctgagaagcaca

SEQ ID NO: 582730 - DNA, 15 bp, Homo sapiens
agctgagaagcacac

SEQ ID NO: 582731 - DNA, 15 bp, Homo sapiens
gctgagaagcacact

SEQ ID NO: 582732 - DNA, 15 bp, Homo sapiens
ctgagaagcacactt

SEQ ID NO: 582733 - DNA, 15 bp, Homo sapiens
tgagaagcacacttt

SEQ ID NO: 582734 - DNA, 15 bp, Homo sapiens
gagaagcacactttg

SEQ ID NO: 582735 - DNA, 15 bp, Homo sapiens
agaagcacactttga

SEQ ID NO: 582736 - DNA, 15 bp, Homo sapiens
gaagcacactttgaa

SEQ ID NO: 582737 - DNA, 15 bp, Homo sapiens
aagcacactttgaaa

SEQ ID NO: 582738 - DNA, 15 bp, Homo sapiens
agcacactttgaaaa

SEQ ID NO: 582739 - DNA, 15 bp, Homo sapiens
gcacactttgaaaat

SEQ ID NO: 582740 - DNA, 15 bp, Homo sapiens
cacactttgaaaatc

SEQ ID NO: 582741 - DNA, 15 bp, Homo sapiens
acactttgaaaatca

SEQ ID NO: 582742 - DNA, 15 bp, Homo sapiens
cactttgaaaatcaa

SEQ ID NO: 582743 - DNA, 15 bp, Homo sapiens
actttgaaaatcaaa

SEQ ID NO: 582744 - DNA, 15 bp, Homo sapiens
ctttgaaaatcaaag

SEQ ID NO: 582745 - DNA, 15 bp, Homo sapiens
tttgaaaatcaaagc

SEQ ID NO: 582746 - DNA, 15 bp, Homo sapiens
ttgaaaatcaaagcc

SEQ ID NO: 582747 - DNA, 15 bp, Homo sapiens
tgaaaatcaaagccc

SEQ ID NO: 582748 - DNA, 15 bp, Homo sapiens
gaaaatcaaagccct

SEQ ID NO: 582749 - DNA, 15 bp, Homo sapiens
aaaatcaaagcccta

SEQ ID NO: 582750 - DNA, 15 bp, Homo sapiens
aaatcaaagccctag

SEQ ID NO: 582751 - DNA, 15 bp, Homo sapiens
aatcaaagccctaga

SEQ ID NO: 582752 - DNA, 15 bp, Homo sapiens
atcaaagccctagac

SEQ ID NO: 582753 - DNA, 15 bp, Homo sapiens
tcaaagccctagaca

SEQ ID NO: 582754 - DNA, 15 bp, Homo sapiens
caaagccctagacag

SEQ ID NO: 582755 - DNA, 15 bp, Homo sapiens
aaagccctagacagt

SEQ ID NO: 582756 - DNA, 15 bp, Homo sapiens
aagccctagacagtg

SEQ ID NO: 582757 - DNA, 15 bp, Homo sapiens
agccctagacagtgg

SEQ ID NO: 582758 - DNA, 15 bp, Homo sapiens
gccctagacagtgga

SEQ ID NO: 582759 - DNA, 15 bp, Homo sapiens
ccctagacagtggag

SEQ ID NO: 582760 - DNA, 15 bp, Homo sapiens
cctagacagtggaga

SEQ ID NO: 582761 - DNA, 15 bp, Homo sapiens
ctagacagtggagac

SEQ ID NO: 582762 - DNA, 15 bp, Homo sapiens
tagacagtggagact

SEQ ID NO: 582763 - DNA, 15 bp, Homo sapiens
agacagtggagactt

SEQ ID NO: 582764 - DNA, 15 bp, Homo sapiens
gacagtggagacttt

SEQ ID NO: 582765 - DNA, 15 bp, Homo sapiens
acagtggagactttt

SEQ ID NO: 582766 - DNA, 15 bp, Homo sapiens
cagtggagacttttc

SEQ ID NO: 582767 - DNA, 15 bp, Homo sapiens
agtggagacttttca

SEQ ID NO: 582768 - DNA, 15 bp, Homo sapiens
gtggagacttttcag

SEQ ID NO: 582769 - DNA, 15 bp, Homo sapiens
tggagacttttcagc

SEQ ID NO: 582770 - DNA, 15 bp, Homo sapiens
ggagacttttcagct

SEQ ID NO: 582771 - DNA, 15 bp, Homo sapiens
gagacttttcagctc

SEQ ID NO: 582772 - DNA, 15 bp, Homo sapiens
agacttttcagctcg

SEQ ID NO: 582773 - DNA, 15 bp, Homo sapiens
gacttttcagctcgt

SEQ ID NO: 582774 - DNA, 15 bp, Homo sapiens
acttttcagctcgtt

SEQ ID NO: 582775 - DNA, 15 bp, Homo sapiens
cttttcagctcgttt

SEQ ID NO: 582776 - DNA, 15 bp, Homo sapiens
ttttcagctcgttta

SEQ ID NO: 582777 - DNA, 15 bp, Homo sapiens
tttcagctcgtttac

SEQ ID NO: 582778 - DNA, 15 bp, Homo sapiens
ttcagctcgtttaca

SEQ ID NO: 582779 - DNA, 15 bp, Homo sapiens
tcagctcgtttacat

SEQ ID NO: 582780 - DNA, 15 bp, Homo sapiens
cagctcgtttacatg

SEQ ID NO: 582781 - DNA, 15 bp, Homo sapiens
agctcgtttacatgt

SEQ ID NO: 582782 - DNA, 15 bp, Homo sapiens
gctcgtttacatgtt

SEQ ID NO: 582783 - DNA, 15 bp, Homo sapiens
ctcgtttacatgttt

SEQ ID NO: 582784 - DNA, 15 bp, Homo sapiens
tcgtttacatgtttt

SEQ ID NO: 582785 - DNA, 15 bp, Homo sapiens
cgtttacatgttttt

SEQ ID NO: 582786 - DNA, 15 bp, Homo sapiens
gtttacatgtttttc

SEQ ID NO: 582787 - DNA, 15 bp, Homo sapiens
tttacatgtttttca

SEQ ID NO: 582788 - DNA, 15 bp, Homo sapiens
ttacatgtttttcat

SEQ ID NO: 582789 - DNA, 15 bp, Homo sapiens
tacatgtttttcatt

SEQ ID NO: 582790 - DNA, 15 bp, Homo sapiens
acatgtttttcatta

SEQ ID NO: 582791 - DNA, 15 bp, Homo sapiens
catgtttttcattac

SEQ ID NO: 582792 - DNA, 15 bp, Homo sapiens
atgtttttcattacc

SEQ ID NO: 582793 - DNA, 15 bp, Homo sapiens
tgtttttcattacct

SEQ ID NO: 582794 - DNA, 15 bp, Homo sapiens
gtttttcattacctt

SEQ ID NO: 582795 - DNA, 15 bp, Homo sapiens
tttttcattacctta

SEQ ID NO: 582796 - DNA, 15 bp, Homo sapiens
ttttcattaccttat

SEQ ID NO: 582797 - DNA, 15 bp, Homo sapiens
tttcattaccttatc

SEQ ID NO: 582798 - DNA, 15 bp, Homo sapiens
ttcattaccttatct

SEQ ID NO: 582799 - DNA, 15 bp, Homo sapiens
tcattaccttatcta

SEQ ID NO: 582800 - DNA, 15 bp, Homo sapiens
cattaccttatctac

SEQ ID NO: 582801 - DNA, 15 bp, Homo sapiens
attaccttatctact

SEQ ID NO: 582802 - DNA, 15 bp, Homo sapiens
ttaccttatctactg

SEQ ID NO: 582803 - DNA, 15 bp, Homo sapiens
taccttatctactgt

SEQ ID NO: 582804 - DNA, 15 bp, Homo sapiens
accttatctactgtg

SEQ ID NO: 582805 - DNA, 15 bp, Homo sapiens
ccttatctactgtgc

SEQ ID NO: 582806 - DNA, 15 bp, Homo sapiens
cttatctactgtgct

SEQ ID NO: 582807 - DNA, 15 bp, Homo sapiens
ttatctactgtgctt

SEQ ID NO: 582808 - DNA, 15 bp, Homo sapiens
tatctactgtgcttt

SEQ ID NO: 582809 - DNA, 15 bp, Homo sapiens
atctactgtgctttc

SEQ ID NO: 582810 - DNA, 15 bp, Homo sapiens
tctactgtgctttcg

SEQ ID NO: 582811 - DNA, 15 bp, Homo sapiens
ctactgtgctttcgg

SEQ ID NO: 582812 - DNA, 15 bp, Homo sapiens
tactgtgctttcggg

SEQ ID NO: 582813 - DNA, 15 bp, Homo sapiens
actgtgctttcggga

SEQ ID NO: 582814 - DNA, 15 bp, Homo sapiens
ctgtgctttcgggaa

SEQ ID NO: 582815 - DNA, 15 bp, Homo sapiens
tgtgctttcgggaat

SEQ ID NO: 582816 - DNA, 15 bp, Homo sapiens
gtgctttcgggaatc

SEQ ID NO: 582817 - DNA, 15 bp, Homo sapiens
tgctttcgggaatca

SEQ ID NO: 582818 - DNA, 15 bp, Homo sapiens
gctttcgggaatcaa

SEQ ID NO: 582819 - DNA, 15 bp, Homo sapiens
ctttcgggaatcaaa

SEQ ID NO: 582820 - DNA, 15 bp, Homo sapiens
tttcgggaatcaaaa

SEQ ID NO: 582821 - DNA, 15 bp, Homo sapiens
ttcgggaatcaaaag

SEQ ID NO: 582822 - DNA, 15 bp, Homo sapiens
tcgggaatcaaaagc

SEQ ID NO: 582823 - DNA, 15 bp, Homo sapiens
cgggaatcaaaagca

SEQ ID NO: 582824 - DNA, 15 bp, Homo sapiens
gggaatcaaaagcag

SEQ ID NO: 582825 - DNA, 15 bp, Homo sapiens
ggaatcaaaagcagt

SEQ ID NO: 582826 - DNA, 15 bp, Homo sapiens
gaatcaaaagcagtc

SEQ ID NO: 582827 - DNA, 15 bp, Homo sapiens
aatcaaaagcagtct

SEQ ID NO: 582828 - DNA, 15 bp, Homo sapiens
atcaaaagcagtctc

SEQ ID NO: 582829 - DNA, 15 bp, Homo sapiens
tcaaaagcagtctca

SEQ ID NO: 582830 - DNA, 15 bp, Homo sapiens
caaaagcagtctcag

SEQ ID NO: 582831 - DNA, 15 bp, Homo sapiens
aaaagcagtctcagt

SEQ ID NO: 582832 - DNA, 15 bp, Homo sapiens
aaagcagtctcagta

SEQ ID NO: 582833 - DNA, 15 bp, Homo sapiens
aagcagtctcagtag

SEQ ID NO: 582834 - DNA, 15 bp, Homo sapiens
agcagtctcagtagg

SEQ ID NO: 582835 - DNA, 15 bp, Homo sapiens
gcagtctcagtaggc

SEQ ID NO: 582836 - DNA, 15 bp, Homo sapiens
cagtctcagtaggct

SEQ ID NO: 582837 - DNA, 15 bp, Homo sapiens
agtctcagtaggcta

SEQ ID NO: 582838 - DNA, 15 bp, Homo sapiens
gtctcagtaggctac

SEQ ID NO: 582839 - DNA, 15 bp, Homo sapiens
tctcagtaggctaca

SEQ ID NO: 582840 - DNA, 15 bp, Homo sapiens
ctcagtaggctacag

SEQ ID NO: 582841 - DNA, 15 bp, Homo sapiens
tcagtaggctacaga

SEQ ID NO: 582842 - DNA, 15 bp, Homo sapiens
cagtaggctacagac

SEQ ID NO: 582843 - DNA, 15 bp, Homo sapiens
agtaggctacagact

SEQ ID NO: 582844 - DNA, 15 bp, Homo sapiens
gtaggctacagactc

SEQ ID NO: 582845 - DNA, 15 bp, Homo sapiens
taggctacagactca

SEQ ID NO: 582846 - DNA, 15 bp, Homo sapiens
aggctacagactcat

SEQ ID NO: 582847 - DNA, 15 bp, Homo sapiens
ggctacagactcata

SEQ ID NO: 582848 - DNA, 15 bp, Homo sapiens
gctacagactcatat

SEQ ID NO: 582849 - DNA, 15 bp, Homo sapiens
ctacagactcatatt

SEQ ID NO: 582850 - DNA, 15 bp, Homo sapiens
tacagactcatattt

SEQ ID NO: 582851 - DNA, 15 bp, Homo sapiens
acagactcatatttt

SEQ ID NO: 582852 - DNA, 15 bp, Homo sapiens
cagactcatattttc

SEQ ID NO: 582853 - DNA, 15 bp, Homo sapiens
agactcatattttca

SEQ ID NO: 582854 - DNA, 15 bp, Homo sapiens
gactcatattttcaa

SEQ ID NO: 582855 - DNA, 15 bp, Homo sapiens
actcatattttcaag

SEQ ID NO: 582856 - DNA, 15 bp, Homo sapiens
ctcatattttcaagt

SEQ ID NO: 582857 - DNA, 15 bp, Homo sapiens
tcatattttcaagtt

SEQ ID NO: 582858 - DNA, 15 bp, Homo sapiens
catattttcaagttc

SEQ ID NO: 582859 - DNA, 15 bp, Homo sapiens
atattttcaagttct

SEQ ID NO: 582860 - DNA, 15 bp, Homo sapiens
tattttcaagttcta

SEQ ID NO: 582861 - DNA, 15 bp, Homo sapiens
attttcaagttctag

SEQ ID NO: 582862 - DNA, 15 bp, Homo sapiens
ttttcaagttctagt

SEQ ID NO: 582863 - DNA, 15 bp, Homo sapiens
tttcaagttctagta

SEQ ID NO: 582864 - DNA, 15 bp, Homo sapiens
ttcaagttctagtaa

SEQ ID NO: 582865 - DNA, 15 bp, Homo sapiens
tcaagttctagtaaa

SEQ ID NO: 582866 - DNA, 15 bp, Homo sapiens
caagttctagtaaaa

SEQ ID NO: 582867 - DNA, 15 bp, Homo sapiens
aagttctagtaaaag

SEQ ID NO: 582868 - DNA, 15 bp, Homo sapiens
agttctagtaaaagt

SEQ ID NO: 582869 - DNA, 15 bp, Homo sapiens
gttctagtaaaagta

SEQ ID NO: 582870 - DNA, 15 bp, Homo sapiens
ttctagtaaaagtaa

SEQ ID NO: 582871 - DNA, 15 bp, Homo sapiens
tctagtaaaagtaat

SEQ ID NO: 582872 - DNA, 15 bp, Homo sapiens
ctagtaaaagtaatg

SEQ ID NO: 582873 - DNA, 15 bp, Homo sapiens
tagtaaaagtaatgt

SEQ ID NO: 582874 - DNA, 15 bp, Homo sapiens
agtaaaagtaatgtc

SEQ ID NO: 582875 - DNA, 15 bp, Homo sapiens
gtaaaagtaatgtca

SEQ ID NO: 582876 - DNA, 15 bp, Homo sapiens
taaaagtaatgtcac

SEQ ID NO: 582877 - DNA, 15 bp, Homo sapiens
aaaagtaatgtcact

SEQ ID NO: 582878 - DNA, 15 bp, Homo sapiens
aaagtaatgtcactt

SEQ ID NO: 582879 - DNA, 15 bp, Homo sapiens
aagtaatgtcacttt

SEQ ID NO: 582880 - DNA, 15 bp, Homo sapiens
agtaatgtcactttt

SEQ ID NO: 582881 - DNA, 15 bp, Homo sapiens
gtaatgtcactttta

SEQ ID NO: 582882 - DNA, 15 bp, Homo sapiens
taatgtcacttttag

SEQ ID NO: 582883 - DNA, 15 bp, Homo sapiens
aatgtcacttttagg

SEQ ID NO: 582884 - DNA, 15 bp, Homo sapiens
atgtcacttttagga

SEQ ID NO: 582885 - DNA, 15 bp, Homo sapiens
tgtcacttttaggat

SEQ ID NO: 582886 - DNA, 15 bp, Homo sapiens
gtcacttttaggata

SEQ ID NO: 582887 - DNA, 15 bp, Homo sapiens
tcacttttaggataa

SEQ ID NO: 582888 - DNA, 15 bp, Homo sapiens
cacttttaggataaa

SEQ ID NO: 582889 - DNA, 15 bp, Homo sapiens
acttttaggataaat

SEQ ID NO: 582890 - DNA, 15 bp, Homo sapiens
cttttaggataaatg

SEQ ID NO: 582891 - DNA, 15 bp, Homo sapiens
ttttaggataaatgt

SEQ ID NO: 582892 - DNA, 15 bp, Homo sapiens
tttaggataaatgta

SEQ ID NO: 582893 - DNA, 15 bp, Homo sapiens
ttaggataaatgtaa

SEQ ID NO: 582894 - DNA, 15 bp, Homo sapiens
taggataaatgtaat

SEQ ID NO: 582895 - DNA, 15 bp, Homo sapiens
aggataaatgtaatt

SEQ ID NO: 582896 - DNA, 15 bp, Homo sapiens
ggataaatgtaattt

SEQ ID NO: 582897 - DNA, 15 bp, Homo sapiens
gataaatgtaattta

SEQ ID NO: 582898 - DNA, 15 bp, Homo sapiens
ataaatgtaatttat

SEQ ID NO: 582899 - DNA, 15 bp, Homo sapiens
taaatgtaatttatt

SEQ ID NO: 582900 - DNA, 15 bp, Homo sapiens
aaatgtaatttattt

SEQ ID NO: 582901 - DNA, 15 bp, Homo sapiens
aatgtaatttatttg

SEQ ID NO: 582902 - DNA, 15 bp, Homo sapiens
atgtaatttatttga

SEQ ID NO: 582903 - DNA, 15 bp, Homo sapiens
tgtaatttatttgaa

SEQ ID NO: 582904 - DNA, 15 bp, Homo sapiens
gtaatttatttgaag

SEQ ID NO: 582905 - DNA, 15 bp, Homo sapiens
taatttatttgaagc

SEQ ID NO: 582906 - DNA, 15 bp, Homo sapiens
aatttatttgaagcc

SEQ ID NO: 582907 - DNA, 15 bp, Homo sapiens
atttatttgaagcct

SEQ ID NO: 582908 - DNA, 15 bp, Homo sapiens
tttatttgaagcctc

SEQ ID NO: 582909 - DNA, 15 bp, Homo sapiens
ttatttgaagcctca

SEQ ID NO: 582910 - DNA, 15 bp, Homo sapiens
tatttgaagcctcaa

SEQ ID NO: 582911 - DNA, 15 bp, Homo sapiens
atttgaagcctcaaa

SEQ ID NO: 582912 - DNA, 15 bp, Homo sapiens
tttgaagcctcaaaa

SEQ ID NO: 582913 - DNA, 15 bp, Homo sapiens
ttgaagcctcaaaaa

SEQ ID NO: 582914 - DNA, 15 bp, Homo sapiens
tgaagcctcaaaaag

SEQ ID NO: 582915 - DNA, 15 bp, Homo sapiens
gaagcctcaaaaagt

SEQ ID NO: 582916 - DNA, 15 bp, Homo sapiens
aagcctcaaaaagta

SEQ ID NO: 582917 - DNA, 15 bp, Homo sapiens
agcctcaaaaagtag

SEQ ID NO: 582918 - DNA, 15 bp, Homo sapiens
gcctcaaaaagtaga

SEQ ID NO: 582919 - DNA, 15 bp, Homo sapiens
cctcaaaaagtagag

SEQ ID NO: 582920 - DNA, 15 bp, Homo sapiens
ctcaaaaagtagagc

SEQ ID NO: 582921 - DNA, 15 bp, Homo sapiens
tcaaaaagtagagct

SEQ ID NO: 582922 - DNA, 15 bp, Homo sapiens
caaaaagtagagctt

SEQ ID NO: 582923 - DNA, 15 bp, Homo sapiens
aaaaagtagagcttt

SEQ ID NO: 582924 - DNA, 15 bp, Homo sapiens
aaaagtagagctttg

SEQ ID NO: 582925 - DNA, 15 bp, Homo sapiens
aaagtagagctttgt

SEQ ID NO: 582926 - DNA, 15 bp, Homo sapiens
aagtagagctttgta

SEQ ID NO: 582927 - DNA, 15 bp, Homo sapiens
agtagagctttgtag

SEQ ID NO: 582928 - DNA, 15 bp, Homo sapiens
gtagagctttgtaga

SEQ ID NO: 582929 - DNA, 15 bp, Homo sapiens
tagagctttgtagag

SEQ ID NO: 582930 - DNA, 15 bp, Homo sapiens
agagctttgtagaga

SEQ ID NO: 582931 - DNA, 15 bp, Homo sapiens
gagctttgtagagaa

SEQ ID NO: 582932 - DNA, 15 bp, Homo sapiens
agctttgtagagaaa

SEQ ID NO: 582933 - DNA, 15 bp, Homo sapiens
gctttgtagagaaag

SEQ ID NO: 582934 - DNA, 15 bp, Homo sapiens
ctttgtagagaaagt

SEQ ID NO: 582935 - DNA, 15 bp, Homo sapiens
tttgtagagaaagta

SEQ ID NO: 582936 - DNA, 15 bp, Homo sapiens
ttgtagagaaagtat

SEQ ID NO: 582937 - DNA, 15 bp, Homo sapiens
tgtagagaaagtata

SEQ ID NO: 582938 - DNA, 15 bp, Homo sapiens
gtagagaaagtatac

SEQ ID NO: 582939 - DNA, 15 bp, Homo sapiens
tagagaaagtatact

SEQ ID NO: 582940 - DNA, 15 bp, Homo sapiens
agagaaagtatactg

SEQ ID NO: 582941 - DNA, 15 bp, Homo sapiens
gagaaagtatactgt

SEQ ID NO: 582942 - DNA, 15 bp, Homo sapiens
agaaagtatactgta

SEQ ID NO: 582943 - DNA, 15 bp, Homo sapiens
gaaagtatactgtat

SEQ ID NO: 582944 - DNA, 15 bp, Homo sapiens
aaagtatactgtata

SEQ ID NO: 582945 - DNA, 15 bp, Homo sapiens
aagtatactgtatac

SEQ ID NO: 582946 - DNA, 15 bp, Homo sapiens
agtatactgtatact

SEQ ID NO: 582947 - DNA, 15 bp, Homo sapiens
gtatactgtatactt

SEQ ID NO: 582948 - DNA, 15 bp, Homo sapiens
tatactgtatacttt

SEQ ID NO: 582949 - DNA, 15 bp, Homo sapiens
atactgtatactttg

SEQ ID NO: 582950 - DNA, 15 bp, Homo sapiens
tactgtatactttgg

SEQ ID NO: 582951 - DNA, 15 bp, Homo sapiens
actgtatactttgga

SEQ ID NO: 582952 - DNA, 15 bp, Homo sapiens
ctgtatactttggag

SEQ ID NO: 582953 - DNA, 15 bp, Homo sapiens
tgtatactttggagt

SEQ ID NO: 582954 - DNA, 15 bp, Homo sapiens
gtatactttggagtt

SEQ ID NO: 582955 - DNA, 15 bp, Homo sapiens
tatactttggagtta

SEQ ID NO: 582956 - DNA, 15 bp, Homo sapiens
atactttggagttag

SEQ ID NO: 582957 - DNA, 15 bp, Homo sapiens
tactttggagttagg

SEQ ID NO: 582958 - DNA, 15 bp, Homo sapiens
actttggagttaggc

SEQ ID NO: 582959 - DNA, 15 bp, Homo sapiens
ctttggagttaggca

SEQ ID NO: 582960 - DNA, 15 bp, Homo sapiens
tttggagttaggcag

SEQ ID NO: 582961 - DNA, 15 bp, Homo sapiens
ttggagttaggcaga

SEQ ID NO: 582962 - DNA, 15 bp, Homo sapiens
tggagttaggcagag

SEQ ID NO: 582963 - DNA, 15 bp, Homo sapiens
ggagttaggcagagt

SEQ ID NO: 582964 - DNA, 15 bp, Homo sapiens
gagttaggcagagtt

SEQ ID NO: 582965 - DNA, 15 bp, Homo sapiens
agttaggcagagttg

SEQ ID NO: 582966 - DNA, 15 bp, Homo sapiens
gttaggcagagttga

SEQ ID NO: 582967 - DNA, 15 bp, Homo sapiens
ttaggcagagttgag

SEQ ID NO: 582968 - DNA, 15 bp, Homo sapiens
taggcagagttgagt

SEQ ID NO: 582969 - DNA, 15 bp, Homo sapiens
aggcagagttgagtt

SEQ ID NO: 582970 - DNA, 15 bp, Homo sapiens
ggcagagttgagtta

SEQ ID NO: 582971 - DNA, 15 bp, Homo sapiens
gcagagttgagttaa

SEQ ID NO: 582972 - DNA, 15 bp, Homo sapiens
cagagttgagttaaa

SEQ ID NO: 582973 - DNA, 15 bp, Homo sapiens
agagttgagttaaaa

SEQ ID NO: 582974 - DNA, 15 bp, Homo sapiens
gagttgagttaaaat

SEQ ID NO: 582975 - DNA, 15 bp, Homo sapiens
agttgagttaaaatt

SEQ ID NO: 582976 - DNA, 15 bp, Homo sapiens
gttgagttaaaattc

SEQ ID NO: 582977 - DNA, 15 bp, Homo sapiens
ttgagttaaaattcc

SEQ ID NO: 582978 - DNA, 15 bp, Homo sapiens
tgagttaaaattcca

SEQ ID NO: 582979 - DNA, 15 bp, Homo sapiens
gagttaaaattccaa

SEQ ID NO: 582980 - DNA, 15 bp, Homo sapiens
agttaaaattccaat

SEQ ID NO: 582981 - DNA, 15 bp, Homo sapiens
gttaaaattccaatc

SEQ ID NO: 582982 - DNA, 15 bp, Homo sapiens
ttaaaattccaatcc

SEQ ID NO: 582983 - DNA, 15 bp, Homo sapiens
taaaattccaatcca

SEQ ID NO: 582984 - DNA, 15 bp, Homo sapiens
aaaattccaatccat

SEQ ID NO: 582985 - DNA, 15 bp, Homo sapiens
aaattccaatccatc

SEQ ID NO: 582986 - DNA, 15 bp, Homo sapiens
aattccaatccatca

SEQ ID NO: 582987 - DNA, 15 bp, Homo sapiens
attccaatccatcaa

SEQ ID NO: 582988 - DNA, 15 bp, Homo sapiens
ttccaatccatcaat

SEQ ID NO: 582989 - DNA, 15 bp, Homo sapiens
tccaatccatcaatt

SEQ ID NO: 582990 - DNA, 15 bp, Homo sapiens
ccaatccatcaatta

SEQ ID NO: 582991 - DNA, 15 bp, Homo sapiens
caatccatcaattag

SEQ ID NO: 582992 - DNA, 15 bp, Homo sapiens
aatccatcaattagc

SEQ ID NO: 582993 - DNA, 15 bp, Homo sapiens
atccatcaattagct

SEQ ID NO: 582994 - DNA, 15 bp, Homo sapiens
tccatcaattagctc

SEQ ID NO: 582995 - DNA, 15 bp, Homo sapiens
ccatcaattagctct

SEQ ID NO: 582996 - DNA, 15 bp, Homo sapiens
catcaattagctctg

SEQ ID NO: 582997 - DNA, 15 bp, Homo sapiens
atcaattagctctgt

SEQ ID NO: 582998 - DNA, 15 bp, Homo sapiens
tcaattagctctgtg

SEQ ID NO: 582999 - DNA, 15 bp, Homo sapiens
caattagctctgtga

SEQ ID NO: 583000 - DNA, 15 bp, Homo sapiens
aattagctctgtgac

SEQ ID NO: 583001 - DNA, 15 bp, Homo sapiens
attagctctgtgacc

SEQ ID NO: 583002 - DNA, 15 bp, Homo sapiens
ttagctctgtgaccc

SEQ ID NO: 583003 - DNA, 15 bp, Homo sapiens
tagctctgtgaccct

SEQ ID NO: 583004 - DNA, 15 bp, Homo sapiens
agctctgtgaccctg

SEQ ID NO: 583005 - DNA, 15 bp, Homo sapiens
gctctgtgaccctgg

SEQ ID NO: 583006 - DNA, 15 bp, Homo sapiens
ctctgtgaccctggg

SEQ ID NO: 583007 - DNA, 15 bp, Homo sapiens
tctgtgaccctgggc

SEQ ID NO: 583008 - DNA, 15 bp, Homo sapiens
ctgtgaccctgggca

SEQ ID NO: 583009 - DNA, 15 bp, Homo sapiens
tgtgaccctgggcaa

SEQ ID NO: 583010 - DNA, 15 bp, Homo sapiens
gtgaccctgggcaaa

SEQ ID NO: 583011 - DNA, 15 bp, Homo sapiens
tgaccctgggcaaat

SEQ ID NO: 583012 - DNA, 15 bp, Homo sapiens
gaccctgggcaaatt

SEQ ID NO: 583013 - DNA, 15 bp, Homo sapiens
accctgggcaaatta

SEQ ID NO: 583014 - DNA, 15 bp, Homo sapiens
ccctgggcaaattat

SEQ ID NO: 583015 - DNA, 15 bp, Homo sapiens
cctgggcaaattatt

SEQ ID NO: 583016 - DNA, 15 bp, Homo sapiens
ctgggcaaattattt

SEQ ID NO: 583017 - DNA, 15 bp, Homo sapiens
tgggcaaattatttc

SEQ ID NO: 583018 - DNA, 15 bp, Homo sapiens
gggcaaattatttca

SEQ ID NO: 583019 - DNA, 15 bp, Homo sapiens
ggcaaattatttcac

SEQ ID NO: 583020 - DNA, 15 bp, Homo sapiens
gcaaattatttcact

SEQ ID NO: 583021 - DNA, 15 bp, Homo sapiens
caaattatttcactt

SEQ ID NO: 583022 - DNA, 15 bp, Homo sapiens
aaattatttcacttc

SEQ ID NO: 583023 - DNA, 15 bp, Homo sapiens
aattatttcacttct

SEQ ID NO: 583024 - DNA, 15 bp, Homo sapiens
attatttcacttctt

SEQ ID NO: 583025 - DNA, 15 bp, Homo sapiens
ttatttcacttcttc

SEQ ID NO: 583026 - DNA, 15 bp, Homo sapiens
gtgtttttaaaaaaa

SEQ ID NO: 583027 - DNA, 15 bp, Homo sapiens
tgtttttaaaaaaaa

SEQ ID NO: 583028 - DNA, 15 bp, Homo sapiens
gtttttaaaaaaaac

SEQ ID NO: 583029 - DNA, 15 bp, Homo sapiens
tttttaaaaaaaacc

SEQ ID NO: 583030 - DNA, 15 bp, Homo sapiens
ttttaaaaaaaacca

SEQ ID NO: 583031 - DNA, 15 bp, Homo sapiens
tttaaaaaaaaccat

SEQ ID NO: 583032 - DNA, 15 bp, Homo sapiens
ttaaaaaaaaccata

SEQ ID NO: 583033 - DNA, 15 bp, Homo sapiens
taaaaaaaaccatag

SEQ ID NO: 583034 - DNA, 15 bp, Homo sapiens
aaaaaaaaccatagt

SEQ ID NO: 583035 - DNA, 15 bp, Homo sapiens
aaaaaaaccatagta

SEQ ID NO: 583036 - DNA, 15 bp, Homo sapiens
aaaaaaccatagtag

SEQ ID NO: 583037 - DNA, 15 bp, Homo sapiens
aaaaaccatagtagc

SEQ ID NO: 583038 - DNA, 15 bp, Homo sapiens
aaaaccatagtagct

SEQ ID NO: 583039 - DNA, 15 bp, Homo sapiens
aaaccatagtagctt

SEQ ID NO: 583040 - DNA, 15 bp, Homo sapiens
aaccatagtagcttg

SEQ ID NO: 583041 - DNA, 15 bp, Homo sapiens
accatagtagcttga

SEQ ID NO: 583042 - DNA, 15 bp, Homo sapiens
ccatagtagcttgaa

SEQ ID NO: 583043 - DNA, 15 bp, Homo sapiens
catagtagcttgaaa

SEQ ID NO: 583044 - DNA, 15 bp, Homo sapiens
atagtagcttgaaac

SEQ ID NO: 583045 - DNA, 15 bp, Homo sapiens
tagtagcttgaaaca

SEQ ID NO: 583046 - DNA, 15 bp, Homo sapiens
agtagcttgaaacaa

SEQ ID NO: 583047 - DNA, 15 bp, Homo sapiens
gtagcttgaaacaac

SEQ ID NO: 583048 - DNA, 15 bp, Homo sapiens
tagcttgaaacaaca

SEQ ID NO: 583049 - DNA, 15 bp, Homo sapiens
agcttgaaacaacaa

SEQ ID NO: 583050 - DNA, 15 bp, Homo sapiens
gcttgaaacaacaaa

SEQ ID NO: 583051 - DNA, 15 bp, Homo sapiens
cttgaaacaacaaac

SEQ ID NO: 583052 - DNA, 15 bp, Homo sapiens
ttgaaacaacaaacc

SEQ ID NO: 583053 - DNA, 15 bp, Homo sapiens
tgaaacaacaaacct

SEQ ID NO: 583054 - DNA, 15 bp, Homo sapiens
gaaacaacaaacctt

SEQ ID NO: 583055 - DNA, 15 bp, Homo sapiens
aaacaacaaaccttt

SEQ ID NO: 583056 - DNA, 15 bp, Homo sapiens
aacaacaaacctttg

SEQ ID NO: 583057 - DNA, 15 bp, Homo sapiens
acaacaaacctttgt

SEQ ID NO: 583058 - DNA, 15 bp, Homo sapiens
caacaaacctttgtt

SEQ ID NO: 583059 - DNA, 15 bp, Homo sapiens
aacaaacctttgtta

SEQ ID NO: 583060 - DNA, 15 bp, Homo sapiens
acaaacctttgttat

SEQ ID NO: 583061 - DNA, 15 bp, Homo sapiens
caaacctttgttatc

SEQ ID NO: 583062 - DNA, 15 bp, Homo sapiens
aaacctttgttatct

SEQ ID NO: 583063 - DNA, 15 bp, Homo sapiens
aacctttgttatctc

SEQ ID NO: 583064 - DNA, 15 bp, Homo sapiens
acctttgttatctca

SEQ ID NO: 583065 - DNA, 15 bp, Homo sapiens
cctttgttatctcac

SEQ ID NO: 583066 - DNA, 15 bp, Homo sapiens
ctttgttatctcaca

SEQ ID NO: 583067 - DNA, 15 bp, Homo sapiens
tttgttatctcacac

SEQ ID NO: 583068 - DNA, 15 bp, Homo sapiens
ttgttatctcacaca

SEQ ID NO: 583069 - DNA, 15 bp, Homo sapiens
tgttatctcacacag

SEQ ID NO: 583070 - DNA, 15 bp, Homo sapiens
gttatctcacacagt

SEQ ID NO: 583071 - DNA, 15 bp, Homo sapiens
ttatctcacacagtt

SEQ ID NO: 583072 - DNA, 15 bp, Homo sapiens
tatctcacacagttt

SEQ ID NO: 583073 - DNA, 15 bp, Homo sapiens
atctcacacagtttc

SEQ ID NO: 583074 - DNA, 15 bp, Homo sapiens
tctcacacagtttct

SEQ ID NO: 583075 - DNA, 15 bp, Homo sapiens
ctcacacagtttctg

SEQ ID NO: 583076 - DNA, 15 bp, Homo sapiens
tcacacagtttctgt

SEQ ID NO: 583077 - DNA, 15 bp, Homo sapiens
cacacagtttctgta

SEQ ID NO: 583078 - DNA, 15 bp, Homo sapiens
acacagtttctgtag

SEQ ID NO: 583079 - DNA, 15 bp, Homo sapiens
cacagtttctgtagg

SEQ ID NO: 583080 - DNA, 15 bp, Homo sapiens
acagtttctgtaggt

SEQ ID NO: 583081 - DNA, 15 bp, Homo sapiens
cagtttctgtaggtc

SEQ ID NO: 583082 - DNA, 15 bp, Homo sapiens
agtttctgtaggtca

SEQ ID NO: 583083 - DNA, 15 bp, Homo sapiens
gtttctgtaggtcaa

SEQ ID NO: 583084 - DNA, 15 bp, Homo sapiens
tttctgtaggtcaag

SEQ ID NO: 583085 - DNA, 15 bp, Homo sapiens
ttctgtaggtcaaga

SEQ ID NO: 583086 - DNA, 15 bp, Homo sapiens
tctgtaggtcaagaa

SEQ ID NO: 583087 - DNA, 15 bp, Homo sapiens
ctgtaggtcaagaat

SEQ ID NO: 583088 - DNA, 15 bp, Homo sapiens
tgtaggtcaagaatt

SEQ ID NO: 583089 - DNA, 15 bp, Homo sapiens
gtaggtcaagaattc

SEQ ID NO: 583090 - DNA, 15 bp, Homo sapiens
taggtcaagaattca

SEQ ID NO: 583091 - DNA, 15 bp, Homo sapiens
aggtcaagaattcag

SEQ ID NO: 583092 - DNA, 15 bp, Homo sapiens
ggtcaagaattcaga

SEQ ID NO: 583093 - DNA, 15 bp, Homo sapiens
gtcaagaattcagaa

SEQ ID NO: 583094 - DNA, 15 bp, Homo sapiens
tcaagaattcagaag

SEQ ID NO: 583095 - DNA, 15 bp, Homo sapiens
caagaattcagaagc

SEQ ID NO: 583096 - DNA, 15 bp, Homo sapiens
aagaattcagaagca

SEQ ID NO: 583097 - DNA, 15 bp, Homo sapiens
agaattcagaagcag

SEQ ID NO: 583098 - DNA, 15 bp, Homo sapiens
gaattcagaagcagc

SEQ ID NO: 583099 - DNA, 15 bp, Homo sapiens
aattcagaagcagct

SEQ ID NO: 583100 - DNA, 15 bp, Homo sapiens
attcagaagcagctt

SEQ ID NO: 583101 - DNA, 15 bp, Homo sapiens
ttcagaagcagctta

SEQ ID NO: 583102 - DNA, 15 bp, Homo sapiens
tcagaagcagcttag

SEQ ID NO: 583103 - DNA, 15 bp, Homo sapiens
cagaagcagcttagc

SEQ ID NO: 583104 - DNA, 15 bp, Homo sapiens
agaagcagcttagct

SEQ ID NO: 583105 - DNA, 15 bp, Homo sapiens
gaagcagcttagctg

SEQ ID NO: 583106 - DNA, 15 bp, Homo sapiens
aagcagcttagctgg

SEQ ID NO: 583107 - DNA, 15 bp, Homo sapiens
agcagcttagctggg

SEQ ID NO: 583108 - DNA, 15 bp, Homo sapiens
gcagcttagctgggt

SEQ ID NO: 583109 - DNA, 15 bp, Homo sapiens
cagcttagctgggtg

SEQ ID NO: 583110 - DNA, 15 bp, Homo sapiens
agcttagctgggtgg

SEQ ID NO: 583111 - DNA, 15 bp, Homo sapiens
gcttagctgggtggt

SEQ ID NO: 583112 - DNA, 15 bp, Homo sapiens
cttagctgggtggtc

SEQ ID NO: 583113 - DNA, 15 bp, Homo sapiens
ttagctgggtggtct

SEQ ID NO: 583114 - DNA, 15 bp, Homo sapiens
tagctgggtggtctg

SEQ ID NO: 583115 - DNA, 15 bp, Homo sapiens
agctgggtggtctgg

SEQ ID NO: 583116 - DNA, 15 bp, Homo sapiens
gctgggtggtctggc

SEQ ID NO: 583117 - DNA, 15 bp, Homo sapiens
ctgggtggtctggct

SEQ ID NO: 583118 - DNA, 15 bp, Homo sapiens
tgggtggtctggctt

SEQ ID NO: 583119 - DNA, 15 bp, Homo sapiens
gggtggtctggcttg

SEQ ID NO: 583120 - DNA, 15 bp, Homo sapiens
ggtggtctggcttgg

SEQ ID NO: 583121 - DNA, 15 bp, Homo sapiens
gtggtctggcttggt

SEQ ID NO: 583122 - DNA, 15 bp, Homo sapiens
tggtctggcttggtg

SEQ ID NO: 583123 - DNA, 15 bp, Homo sapiens
ggtctggcttggtgt

SEQ ID NO: 583124 - DNA, 15 bp, Homo sapiens
gtctggcttggtgtc

SEQ ID NO: 583125 - DNA, 15 bp, Homo sapiens
tctggcttggtgtct

SEQ ID NO: 583126 - DNA, 15 bp, Homo sapiens
ctggcttggtgtctc

SEQ ID NO: 583127 - DNA, 15 bp, Homo sapiens
tggcttggtgtctct

SEQ ID NO: 583128 - DNA, 15 bp, Homo sapiens
ggcttggtgtctctc

SEQ ID NO: 583129 - DNA, 15 bp, Homo sapiens
gcttggtgtctctcc

SEQ ID NO: 583130 - DNA, 15 bp, Homo sapiens
cttggtgtctctcct

SEQ ID NO: 583131 - DNA, 15 bp, Homo sapiens
ttggtgtctctcctg

SEQ ID NO: 583132 - DNA, 15 bp, Homo sapiens
tggtgtctctcctga

SEQ ID NO: 583133 - DNA, 15 bp, Homo sapiens
ggtgtctctcctgag

SEQ ID NO: 583134 - DNA, 15 bp, Homo sapiens
gtgtctctcctgagg

SEQ ID NO: 583135 - DNA, 15 bp, Homo sapiens
tgtctctcctgaggt

SEQ ID NO: 583136 - DNA, 15 bp, Homo sapiens
gtctctcctgaggtc

SEQ ID NO: 583137 - DNA, 15 bp, Homo sapiens
tctctcctgaggtca

SEQ ID NO: 583138 - DNA, 15 bp, Homo sapiens
ctctcctgaggtcag

SEQ ID NO: 583139 - DNA, 15 bp, Homo sapiens
tctcctgaggtcagg

SEQ ID NO: 583140 - DNA, 15 bp, Homo sapiens
ctcctgaggtcaggg

SEQ ID NO: 583141 - DNA, 15 bp, Homo sapiens
tcctgaggtcagggt

SEQ ID NO: 583142 - DNA, 15 bp, Homo sapiens
cctgaggtcagggtt

SEQ ID NO: 583143 - DNA, 15 bp, Homo sapiens
ctgaggtcagggttt

SEQ ID NO: 583144 - DNA, 15 bp, Homo sapiens
tgaggtcagggtttt

SEQ ID NO: 583145 - DNA, 15 bp, Homo sapiens
gaggtcagggttttg

SEQ ID NO: 583146 - DNA, 15 bp, Homo sapiens
aggtcagggttttgg

SEQ ID NO: 583147 - DNA, 15 bp, Homo sapiens
ggtcagggttttggc

SEQ ID NO: 583148 - DNA, 15 bp, Homo sapiens
gtcagggttttggct

SEQ ID NO: 583149 - DNA, 15 bp, Homo sapiens
tcagggttttggctg

SEQ ID NO: 583150 - DNA, 15 bp, Homo sapiens
cagggttttggctgg

SEQ ID NO: 583151 - DNA, 15 bp, Homo sapiens
agggttttggctggg

SEQ ID NO: 583152 - DNA, 15 bp, Homo sapiens
gggttttggctgggg

SEQ ID NO: 583153 - DNA, 15 bp, Homo sapiens
ggttttggctggggc

SEQ ID NO: 583154 - DNA, 15 bp, Homo sapiens
gttttggctggggct

SEQ ID NO: 583155 - DNA, 15 bp, Homo sapiens
ttttggctggggctg

SEQ ID NO: 583156 - DNA, 15 bp, Homo sapiens
tttggctggggctgc

SEQ ID NO: 583157 - DNA, 15 bp, Homo sapiens
ttggctggggctgca

SEQ ID NO: 583158 - DNA, 15 bp, Homo sapiens
tggctggggctgcat

SEQ ID NO: 583159 - DNA, 15 bp, Homo sapiens
ggctggggctgcatc

SEQ ID NO: 583160 - DNA, 15 bp, Homo sapiens
gctggggctgcatca

SEQ ID NO: 583161 - DNA, 15 bp, Homo sapiens
ctggggctgcatcac

SEQ ID NO: 583162 - DNA, 15 bp, Homo sapiens
tggggctgcatcacc

SEQ ID NO: 583163 - DNA, 15 bp, Homo sapiens
ggggctgcatcacct

SEQ ID NO: 583164 - DNA, 15 bp, Homo sapiens
gggctgcatcacctg

SEQ ID NO: 583165 - DNA, 15 bp, Homo sapiens
ggctgcatcacctga

SEQ ID NO: 583166 - DNA, 15 bp, Homo sapiens
gctgcatcacctgaa

SEQ ID NO: 583167 - DNA, 15 bp, Homo sapiens
ctgcatcacctgaag

SEQ ID NO: 583168 - DNA, 15 bp, Homo sapiens
tgcatcacctgaagg

SEQ ID NO: 583169 - DNA, 15 bp, Homo sapiens
gcatcacctgaaggc

SEQ ID NO: 583170 - DNA, 15 bp, Homo sapiens
catcacctgaaggct

SEQ ID NO: 583171 - DNA, 15 bp, Homo sapiens
atcacctgaaggctt

SEQ ID NO: 583172 - DNA, 15 bp, Homo sapiens
tcacctgaaggcttg

SEQ ID NO: 583173 - DNA, 15 bp, Homo sapiens
cacctgaaggcttga

SEQ ID NO: 583174 - DNA, 15 bp, Homo sapiens
acctgaaggcttgac

SEQ ID NO: 583175 - DNA, 15 bp, Homo sapiens
cctgaaggcttgact

SEQ ID NO: 583176 - DNA, 15 bp, Homo sapiens
ctgaaggcttgactg

SEQ ID NO: 583177 - DNA, 15 bp, Homo sapiens
tgaaggcttgactgg

SEQ ID NO: 583178 - DNA, 15 bp, Homo sapiens
gaaggcttgactggg

SEQ ID NO: 583179 - DNA, 15 bp, Homo sapiens
aaggcttgactgggg

SEQ ID NO: 583180 - DNA, 15 bp, Homo sapiens
aggcttgactggggc

SEQ ID NO: 583181 - DNA, 15 bp, Homo sapiens
ggcttgactggggcc

SEQ ID NO: 583182 - DNA, 15 bp, Homo sapiens
gcttgactggggcca

SEQ ID NO: 583183 - DNA, 15 bp, Homo sapiens
cttgactggggccag

SEQ ID NO: 583184 - DNA, 15 bp, Homo sapiens
ttgactggggccaga

SEQ ID NO: 583185 - DNA, 15 bp, Homo sapiens
tgactggggccagag

SEQ ID NO: 583186 - DNA, 15 bp, Homo sapiens
gactggggccagagg

SEQ ID NO: 583187 - DNA, 15 bp, Homo sapiens
actggggccagagga

SEQ ID NO: 583188 - DNA, 15 bp, Homo sapiens
ctggggccagaggag

SEQ ID NO: 583189 - DNA, 15 bp, Homo sapiens
tggggccagaggagc

SEQ ID NO: 583190 - DNA, 15 bp, Homo sapiens
ggggccagaggagct

SEQ ID NO: 583191 - DNA, 15 bp, Homo sapiens
gggccagaggagctg

SEQ ID NO: 583192 - DNA, 15 bp, Homo sapiens
ggccagaggagctgc

SEQ ID NO: 583193 - DNA, 15 bp, Homo sapiens
gccagaggagctgct

SEQ ID NO: 583194 - DNA, 15 bp, Homo sapiens
ccagaggagctgctt

SEQ ID NO: 583195 - DNA, 15 bp, Homo sapiens
cagaggagctgcttc

SEQ ID NO: 583196 - DNA, 15 bp, Homo sapiens
agaggagctgcttcc

SEQ ID NO: 583197 - DNA, 15 bp, Homo sapiens
gaggagctgcttcca

SEQ ID NO: 583198 - DNA, 15 bp, Homo sapiens
aggagctgcttccaa

SEQ ID NO: 583199 - DNA, 15 bp, Homo sapiens
ggagctgcttccaaa

SEQ ID NO: 583200 - DNA, 15 bp, Homo sapiens
gagctgcttccaaag

SEQ ID NO: 583201 - DNA, 15 bp, Homo sapiens
agctgcttccaaagt

SEQ ID NO: 583202 - DNA, 15 bp, Homo sapiens
gctgcttccaaagtg

SEQ ID NO: 583203 - DNA, 15 bp, Homo sapiens
ctgcttccaaagtgg

SEQ ID NO: 583204 - DNA, 15 bp, Homo sapiens
tgcttccaaagtggt

SEQ ID NO: 583205 - DNA, 15 bp, Homo sapiens
gcttccaaagtggtc

SEQ ID NO: 583206 - DNA, 15 bp, Homo sapiens
cttccaaagtggtcc

SEQ ID NO: 583207 - DNA, 15 bp, Homo sapiens
ttccaaagtggtcca

SEQ ID NO: 583208 - DNA, 15 bp, Homo sapiens
tccaaagtggtccac

SEQ ID NO: 583209 - DNA, 15 bp, Homo sapiens
ccaaagtggtccact

SEQ ID NO: 583210 - DNA, 15 bp, Homo sapiens
caaagtggtccactc

SEQ ID NO: 583211 - DNA, 15 bp, Homo sapiens
aaagtggtccactca

SEQ ID NO: 583212 - DNA, 15 bp, Homo sapiens
aagtggtccactcac

SEQ ID NO: 583213 - DNA, 15 bp, Homo sapiens
agtggtccactcaca

SEQ ID NO: 583214 - DNA, 15 bp, Homo sapiens
gtggtccactcacat

SEQ ID NO: 583215 - DNA, 15 bp, Homo sapiens
tggtccactcacatg

SEQ ID NO: 583216 - DNA, 15 bp, Homo sapiens
ggtccactcacatgg

SEQ ID NO: 583217 - DNA, 15 bp, Homo sapiens
gtccactcacatggc

SEQ ID NO: 583218 - DNA, 15 bp, Homo sapiens
tccactcacatggct

SEQ ID NO: 583219 - DNA, 15 bp, Homo sapiens
ccactcacatggctg

SEQ ID NO: 583220 - DNA, 15 bp, Homo sapiens
cactcacatggctgg

SEQ ID NO: 583221 - DNA, 15 bp, Homo sapiens
actcacatggctggc

SEQ ID NO: 583222 - DNA, 15 bp, Homo sapiens
ctcacatggctggca

SEQ ID NO: 583223 - DNA, 15 bp, Homo sapiens
tcacatggctggcaa

SEQ ID NO: 583224 - DNA, 15 bp, Homo sapiens
cacatggctggcaag

SEQ ID NO: 583225 - DNA, 15 bp, Homo sapiens
acatggctggcaagt

SEQ ID NO: 583226 - DNA, 15 bp, Homo sapiens
catggctggcaagtt

SEQ ID NO: 583227 - DNA, 15 bp, Homo sapiens
atggctggcaagttg

SEQ ID NO: 583228 - DNA, 15 bp, Homo sapiens
tggctggcaagttgg

SEQ ID NO: 583229 - DNA, 15 bp, Homo sapiens
ggctggcaagttgga

SEQ ID NO: 583230 - DNA, 15 bp, Homo sapiens
gctggcaagttggag

SEQ ID NO: 583231 - DNA, 15 bp, Homo sapiens
ctggcaagttggagt

SEQ ID NO: 583232 - DNA, 15 bp, Homo sapiens
tggcaagttggagtt

SEQ ID NO: 583233 - DNA, 15 bp, Homo sapiens
ggcaagttggagttg

SEQ ID NO: 583234 - DNA, 15 bp, Homo sapiens
gcaagttggagttgc

SEQ ID NO: 583235 - DNA, 15 bp, Homo sapiens
caagttggagttgcg

SEQ ID NO: 583236 - DNA, 15 bp, Homo sapiens
aagttggagttgcgt

SEQ ID NO: 583237 - DNA, 15 bp, Homo sapiens
agttggagttgcgta

SEQ ID NO: 583238 - DNA, 15 bp, Homo sapiens
gttggagttgcgtat

SEQ ID NO: 583239 - DNA, 15 bp, Homo sapiens
ttggagttgcgtatt

SEQ ID NO: 583240 - DNA, 15 bp, Homo sapiens
tggagttgcgtattg

SEQ ID NO: 583241 - DNA, 15 bp, Homo sapiens
ggagttgcgtattgg

SEQ ID NO: 583242 - DNA, 15 bp, Homo sapiens
gagttgcgtattggc

SEQ ID NO: 583243 - DNA, 15 bp, Homo sapiens
agttgcgtattggca

SEQ ID NO: 583244 - DNA, 15 bp, Homo sapiens
gttgcgtattggcaa

SEQ ID NO: 583245 - DNA, 15 bp, Homo sapiens
ttgcgtattggcaag

SEQ ID NO: 583246 - DNA, 15 bp, Homo sapiens
tgcgtattggcaaga

SEQ ID NO: 583247 - DNA, 15 bp, Homo sapiens
gcgtattggcaagag

SEQ ID NO: 583248 - DNA, 15 bp, Homo sapiens
cgtattggcaagaga

SEQ ID NO: 583249 - DNA, 15 bp, Homo sapiens
gtattggcaagagac

SEQ ID NO: 583250 - DNA, 15 bp, Homo sapiens
tattggcaagagact

SEQ ID NO: 583251 - DNA, 15 bp, Homo sapiens
attggcaagagactt

SEQ ID NO: 583252 - DNA, 15 bp, Homo sapiens
ttggcaagagacttc

SEQ ID NO: 583253 - DNA, 15 bp, Homo sapiens
tggcaagagacttcg

SEQ ID NO: 583254 - DNA, 15 bp, Homo sapiens
ggcaagagacttcgc

SEQ ID NO: 583255 - DNA, 15 bp, Homo sapiens
gcaagagacttcgct

SEQ ID NO: 583256 - DNA, 15 bp, Homo sapiens
caagagacttcgctt

SEQ ID NO: 583257 - DNA, 15 bp, Homo sapiens
aagagacttcgcttc

SEQ ID NO: 583258 - DNA, 15 bp, Homo sapiens
agagacttcgcttct

SEQ ID NO: 583259 - DNA, 15 bp, Homo sapiens
gagacttcgcttctt

SEQ ID NO: 583260 - DNA, 15 bp, Homo sapiens
agacttcgcttcttc

SEQ ID NO: 583261 - DNA, 15 bp, Homo sapiens
gacttcgcttcttct

SEQ ID NO: 583262 - DNA, 15 bp, Homo sapiens
acttcgcttcttctc

SEQ ID NO: 583263 - DNA, 15 bp, Homo sapiens
cttcgcttcttctca

SEQ ID NO: 583264 - DNA, 15 bp, Homo sapiens
ttcgcttcttctcaa

SEQ ID NO: 583265 - DNA, 15 bp, Homo sapiens
tcgcttcttctcaat

SEQ ID NO: 583266 - DNA, 15 bp, Homo sapiens
cgcttcttctcaatg

SEQ ID NO: 583267 - DNA, 15 bp, Homo sapiens
gcttcttctcaatgg

SEQ ID NO: 583268 - DNA, 15 bp, Homo sapiens
cttcttctcaatgga

SEQ ID NO: 583269 - DNA, 15 bp, Homo sapiens
ttcttctcaatggat

SEQ ID NO: 583270 - DNA, 15 bp, Homo sapiens
tcttctcaatggatc

SEQ ID NO: 583271 - DNA, 15 bp, Homo sapiens
cttctcaatggatct

SEQ ID NO: 583272 - DNA, 15 bp, Homo sapiens
ttctcaatggatctt

SEQ ID NO: 583273 - DNA, 15 bp, Homo sapiens
tctcaatggatcttc

SEQ ID NO: 583274 - DNA, 15 bp, Homo sapiens
ctcaatggatcttcc

SEQ ID NO: 583275 - DNA, 15 bp, Homo sapiens
tcaatggatcttccc

SEQ ID NO: 583276 - DNA, 15 bp, Homo sapiens
caatggatcttccca

SEQ ID NO: 583277 - DNA, 15 bp, Homo sapiens
aatggatcttcccag

SEQ ID NO: 583278 - DNA, 15 bp, Homo sapiens
atggatcttcccaga

SEQ ID NO: 583279 - DNA, 15 bp, Homo sapiens
tggatcttcccagag

SEQ ID NO: 583280 - DNA, 15 bp, Homo sapiens
ggatcttcccagagt

SEQ ID NO: 583281 - DNA, 15 bp, Homo sapiens
gatcttcccagagtt

SEQ ID NO: 583282 - DNA, 15 bp, Homo sapiens
atcttcccagagttc

SEQ ID NO: 583283 - DNA, 15 bp, Homo sapiens
tcttcccagagttct

SEQ ID NO: 583284 - DNA, 15 bp, Homo sapiens
cttcccagagttctt

SEQ ID NO: 583285 - DNA, 15 bp, Homo sapiens
ttcccagagttcttg

SEQ ID NO: 583286 - DNA, 15 bp, Homo sapiens
tcccagagttcttgt

SEQ ID NO: 583287 - DNA, 15 bp, Homo sapiens
cccagagttcttgta

SEQ ID NO: 583288 - DNA, 15 bp, Homo sapiens
ccagagttcttgtag

SEQ ID NO: 583289 - DNA, 15 bp, Homo sapiens
cagagttcttgtagg

SEQ ID NO: 583290 - DNA, 15 bp, Homo sapiens
agagttcttgtaggc

SEQ ID NO: 583291 - DNA, 15 bp, Homo sapiens
gagttcttgtaggca

SEQ ID NO: 583292 - DNA, 15 bp, Homo sapiens
agttcttgtaggcaa

SEQ ID NO: 583293 - DNA, 15 bp, Homo sapiens
gttcttgtaggcaac

SEQ ID NO: 583294 - DNA, 15 bp, Homo sapiens
ttcttgtaggcaacc

SEQ ID NO: 583295 - DNA, 15 bp, Homo sapiens
tcttgtaggcaacct

SEQ ID NO: 583296 - DNA, 15 bp, Homo sapiens
cttgtaggcaacctc

SEQ ID NO: 583297 - DNA, 15 bp, Homo sapiens
ttgtaggcaacctca

SEQ ID NO: 583298 - DNA, 15 bp, Homo sapiens
tgtaggcaacctcat

SEQ ID NO: 583299 - DNA, 15 bp, Homo sapiens
gtaggcaacctcata

SEQ ID NO: 583300 - DNA, 15 bp, Homo sapiens
taggcaacctcatag

SEQ ID NO: 583301 - DNA, 15 bp, Homo sapiens
aggcaacctcatagc

SEQ ID NO: 583302 - DNA, 15 bp, Homo sapiens
ggcaacctcatagca

SEQ ID NO: 583303 - DNA, 15 bp, Homo sapiens
gcaacctcatagcat

SEQ ID NO: 583304 - DNA, 15 bp, Homo sapiens
caacctcatagcata

SEQ ID NO: 583305 - DNA, 15 bp, Homo sapiens
aacctcatagcatag

SEQ ID NO: 583306 - DNA, 15 bp, Homo sapiens
acctcatagcatagc

SEQ ID NO: 583307 - DNA, 15 bp, Homo sapiens
cctcatagcatagca

SEQ ID NO: 583308 - DNA, 15 bp, Homo sapiens
ctcatagcatagcag

SEQ ID NO: 583309 - DNA, 15 bp, Homo sapiens
tcatagcatagcagt

SEQ ID NO: 583310 - DNA, 15 bp, Homo sapiens
catagcatagcagtt

SEQ ID NO: 583311 - DNA, 15 bp, Homo sapiens
atagcatagcagttg

SEQ ID NO: 583312 - DNA, 15 bp, Homo sapiens
tagcatagcagttgg

SEQ ID NO: 583313 - DNA, 15 bp, Homo sapiens
agcatagcagttggc

SEQ ID NO: 583314 - DNA, 15 bp, Homo sapiens
gcatagcagttggct

SEQ ID NO: 583315 - DNA, 15 bp, Homo sapiens
catagcagttggctt

SEQ ID NO: 583316 - DNA, 15 bp, Homo sapiens
atagcagttggcttc

SEQ ID NO: 583317 - DNA, 15 bp, Homo sapiens
tagcagttggcttcc

SEQ ID NO: 583318 - DNA, 15 bp, Homo sapiens
agcagttggcttccc

SEQ ID NO: 583319 - DNA, 15 bp, Homo sapiens
gcagttggcttcccc

SEQ ID NO: 583320 - DNA, 15 bp, Homo sapiens
cagttggcttccccc

SEQ ID NO: 583321 - DNA, 15 bp, Homo sapiens
agttggcttccccca

SEQ ID NO: 583322 - DNA, 15 bp, Homo sapiens
gttggcttcccccag

SEQ ID NO: 583323 - DNA, 15 bp, Homo sapiens
ttggcttcccccaga

SEQ ID NO: 583324 - DNA, 15 bp, Homo sapiens
tggcttcccccagag

SEQ ID NO: 583325 - DNA, 15 bp, Homo sapiens
ggcttcccccagagg

SEQ ID NO: 583326 - DNA, 15 bp, Homo sapiens
gcttcccccagaggg

SEQ ID NO: 583327 - DNA, 15 bp, Homo sapiens
cttcccccagaggga

SEQ ID NO: 583328 - DNA, 15 bp, Homo sapiens
ttcccccagagggaa

SEQ ID NO: 583329 - DNA, 15 bp, Homo sapiens
tcccccagagggaac

SEQ ID NO: 583330 - DNA, 15 bp, Homo sapiens
cccccagagggaaca

SEQ ID NO: 583331 - DNA, 15 bp, Homo sapiens
ccccagagggaacag

SEQ ID NO: 583332 - DNA, 15 bp, Homo sapiens
cccagagggaacagt

SEQ ID NO: 583333 - DNA, 15 bp, Homo sapiens
ccagagggaacagtc

SEQ ID NO: 583334 - DNA, 15 bp, Homo sapiens
cagagggaacagtcc

SEQ ID NO: 583335 - DNA, 15 bp, Homo sapiens
agagggaacagtcca

SEQ ID NO: 583336 - DNA, 15 bp, Homo sapiens
gagggaacagtccag

SEQ ID NO: 583337 - DNA, 15 bp, Homo sapiens
agggaacagtccagg

SEQ ID NO: 583338 - DNA, 15 bp, Homo sapiens
gggaacagtccagga

SEQ ID NO: 583339 - DNA, 15 bp, Homo sapiens
ggaacagtccaggag

SEQ ID NO: 583340 - DNA, 15 bp, Homo sapiens
gaacagtccaggaga

SEQ ID NO: 583341 - DNA, 15 bp, Homo sapiens
aacagtccaggagag

SEQ ID NO: 583342 - DNA, 15 bp, Homo sapiens
acagtccaggagaga

SEQ ID NO: 583343 - DNA, 15 bp, Homo sapiens
cagtccaggagagaa

SEQ ID NO: 583344 - DNA, 15 bp, Homo sapiens
agtccaggagagaac

SEQ ID NO: 583345 - DNA, 15 bp, Homo sapiens
gtccaggagagaaca

SEQ ID NO: 583346 - DNA, 15 bp, Homo sapiens
tccaggagagaacaa

SEQ ID NO: 583347 - DNA, 15 bp, Homo sapiens
ccaggagagaacaag

SEQ ID NO: 583348 - DNA, 15 bp, Homo sapiens
caggagagaacaagg

SEQ ID NO: 583349 - DNA, 15 bp, Homo sapiens
aggagagaacaaggc

SEQ ID NO: 583350 - DNA, 15 bp, Homo sapiens
ggagagaacaaggca

SEQ ID NO: 583351 - DNA, 15 bp, Homo sapiens
gagagaacaaggcag

SEQ ID NO: 583352 - DNA, 15 bp, Homo sapiens
agagaacaaggcaga

SEQ ID NO: 583353 - DNA, 15 bp, Homo sapiens
gagaacaaggcagaa

SEQ ID NO: 583354 - DNA, 15 bp, Homo sapiens
agaacaaggcagaaa

SEQ ID NO: 583355 - DNA, 15 bp, Homo sapiens
gaacaaggcagaaac

SEQ ID NO: 583356 - DNA, 15 bp, Homo sapiens
aacaaggcagaaacc

SEQ ID NO: 583357 - DNA, 15 bp, Homo sapiens
acaaggcagaaacca

SEQ ID NO: 583358 - DNA, 15 bp, Homo sapiens
caaggcagaaaccac

SEQ ID NO: 583359 - DNA, 15 bp, Homo sapiens
aaggcagaaaccaca

SEQ ID NO: 583360 - DNA, 15 bp, Homo sapiens
aggcagaaaccacag

SEQ ID NO: 583361 - DNA, 15 bp, Homo sapiens
ggcagaaaccacagg

SEQ ID NO: 583362 - DNA, 15 bp, Homo sapiens
gcagaaaccacaggg

SEQ ID NO: 583363 - DNA, 15 bp, Homo sapiens
cagaaaccacagggt

SEQ ID NO: 583364 - DNA, 15 bp, Homo sapiens
agaaaccacagggtc

SEQ ID NO: 583365 - DNA, 15 bp, Homo sapiens
gaaaccacagggtct

SEQ ID NO: 583366 - DNA, 15 bp, Homo sapiens
aaaccacagggtctt

SEQ ID NO: 583367 - DNA, 15 bp, Homo sapiens
aaccacagggtcttt

SEQ ID NO: 583368 - DNA, 15 bp, Homo sapiens
accacagggtctttt

SEQ ID NO: 583369 - DNA, 15 bp, Homo sapiens
ccacagggtcttttc

SEQ ID NO: 583370 - DNA, 15 bp, Homo sapiens
cacagggtcttttct

SEQ ID NO: 583371 - DNA, 15 bp, Homo sapiens
acagggtcttttctg

SEQ ID NO: 583372 - DNA, 15 bp, Homo sapiens
cagggtcttttctgg

SEQ ID NO: 583373 - DNA, 15 bp, Homo sapiens
agggtcttttctggc

SEQ ID NO: 583374 - DNA, 15 bp, Homo sapiens
gggtcttttctggct

SEQ ID NO: 583375 - DNA, 15 bp, Homo sapiens
ggtcttttctggctt

SEQ ID NO: 583376 - DNA, 15 bp, Homo sapiens
gtcttttctggctta

SEQ ID NO: 583377 - DNA, 15 bp, Homo sapiens
tcttttctggcttag

SEQ ID NO: 583378 - DNA, 15 bp, Homo sapiens
cttttctggcttagg

SEQ ID NO: 583379 - DNA, 15 bp, Homo sapiens
ttttctggcttaggc

SEQ ID NO: 583380 - DNA, 15 bp, Homo sapiens
tttctggcttaggct

SEQ ID NO: 583381 - DNA, 15 bp, Homo sapiens
ttctggcttaggctc

SEQ ID NO: 583382 - DNA, 15 bp, Homo sapiens
tctggcttaggctcc

SEQ ID NO: 583383 - DNA, 15 bp, Homo sapiens
ctggcttaggctcca

SEQ ID NO: 583384 - DNA, 15 bp, Homo sapiens
tggcttaggctccaa

SEQ ID NO: 583385 - DNA, 15 bp, Homo sapiens
ggcttaggctccaaa

SEQ ID NO: 583386 - DNA, 15 bp, Homo sapiens
gcttaggctccaaag

SEQ ID NO: 583387 - DNA, 15 bp, Homo sapiens
cttaggctccaaagt

SEQ ID NO: 583388 - DNA, 15 bp, Homo sapiens
ttaggctccaaagtc

SEQ ID NO: 583389 - DNA, 15 bp, Homo sapiens
taggctccaaagtca

SEQ ID NO: 583390 - DNA, 15 bp, Homo sapiens
aggctccaaagtcat

SEQ ID NO: 583391 - DNA, 15 bp, Homo sapiens
ggctccaaagtcata

SEQ ID NO: 583392 - DNA, 15 bp, Homo sapiens
gctccaaagtcatac

SEQ ID NO: 583393 - DNA, 15 bp, Homo sapiens
ctccaaagtcatact

SEQ ID NO: 583394 - DNA, 15 bp, Homo sapiens
tccaaagtcatactc

SEQ ID NO: 583395 - DNA, 15 bp, Homo sapiens
ccaaagtcatactcc

SEQ ID NO: 583396 - DNA, 15 bp, Homo sapiens
caaagtcatactcca

SEQ ID NO: 583397 - DNA, 15 bp, Homo sapiens
aaagtcatactccac

SEQ ID NO: 583398 - DNA, 15 bp, Homo sapiens
aagtcatactccacc

SEQ ID NO: 583399 - DNA, 15 bp, Homo sapiens
agtcatactccacca

SEQ ID NO: 583400 - DNA, 15 bp, Homo sapiens
gtcatactccaccat

SEQ ID NO: 583401 - DNA, 15 bp, Homo sapiens
tcatactccaccatt

SEQ ID NO: 583402 - DNA, 15 bp, Homo sapiens
catactccaccattt

SEQ ID NO: 583403 - DNA, 15 bp, Homo sapiens
atactccaccatttc

SEQ ID NO: 583404 - DNA, 15 bp, Homo sapiens
tactccaccatttct

SEQ ID NO: 583405 - DNA, 15 bp, Homo sapiens
actccaccatttctg

SEQ ID NO: 583406 - DNA, 15 bp, Homo sapiens
ctccaccatttctgc

SEQ ID NO: 583407 - DNA, 15 bp, Homo sapiens
tccaccatttctgca

SEQ ID NO: 583408 - DNA, 15 bp, Homo sapiens
ccaccatttctgcat

SEQ ID NO: 583409 - DNA, 15 bp, Homo sapiens
caccatttctgcatt

SEQ ID NO: 583410 - DNA, 15 bp, Homo sapiens
accatttctgcatta

SEQ ID NO: 583411 - DNA, 15 bp, Homo sapiens
ccatttctgcattat

SEQ ID NO: 583412 - DNA, 15 bp, Homo sapiens
catttctgcattatc

SEQ ID NO: 583413 - DNA, 15 bp, Homo sapiens
atttctgcattatca

SEQ ID NO: 583414 - DNA, 15 bp, Homo sapiens
tttctgcattatcat

SEQ ID NO: 583415 - DNA, 15 bp, Homo sapiens
ttctgcattatcata

SEQ ID NO: 583416 - DNA, 15 bp, Homo sapiens
tctgcattatcatat

SEQ ID NO: 583417 - DNA, 15 bp, Homo sapiens
ctgcattatcatatt

SEQ ID NO: 583418 - DNA, 15 bp, Homo sapiens
tgcattatcatatta

SEQ ID NO: 583419 - DNA, 15 bp, Homo sapiens
gcattatcatattag

SEQ ID NO: 583420 - DNA, 15 bp, Homo sapiens
cattatcatattagt

SEQ ID NO: 583421 - DNA, 15 bp, Homo sapiens
attatcatattagtt

SEQ ID NO: 583422 - DNA, 15 bp, Homo sapiens
ttatcatattagtta

SEQ ID NO: 583423 - DNA, 15 bp, Homo sapiens
tatcatattagttac

SEQ ID NO: 583424 - DNA, 15 bp, Homo sapiens
atcatattagttaca

SEQ ID NO: 583425 - DNA, 15 bp, Homo sapiens
tcatattagttacac

SEQ ID NO: 583426 - DNA, 15 bp, Homo sapiens
catattagttacaca

SEQ ID NO: 583427 - DNA, 15 bp, Homo sapiens
atattagttacacag

SEQ ID NO: 583428 - DNA, 15 bp, Homo sapiens
tattagttacacagg

SEQ ID NO: 583429 - DNA, 15 bp, Homo sapiens
attagttacacaggc

SEQ ID NO: 583430 - DNA, 15 bp, Homo sapiens
ttagttacacaggct

SEQ ID NO: 583431 - DNA, 15 bp, Homo sapiens
tagttacacaggcta

SEQ ID NO: 583432 - DNA, 15 bp, Homo sapiens
agttacacaggctag

SEQ ID NO: 583433 - DNA, 15 bp, Homo sapiens
gttacacaggctaga

SEQ ID NO: 583434 - DNA, 15 bp, Homo sapiens
ttacacaggctagac

SEQ ID NO: 583435 - DNA, 15 bp, Homo sapiens
tacacaggctagacc

SEQ ID NO: 583436 - DNA, 15 bp, Homo sapiens
acacaggctagacct

SEQ ID NO: 583437 - DNA, 15 bp, Homo sapiens
cacaggctagaccta

SEQ ID NO: 583438 - DNA, 15 bp, Homo sapiens
acaggctagacctat

SEQ ID NO: 583439 - DNA, 15 bp, Homo sapiens
caggctagacctatt

SEQ ID NO: 583440 - DNA, 15 bp, Homo sapiens
aggctagacctattc

SEQ ID NO: 583441 - DNA, 15 bp, Homo sapiens
ggctagacctattct

SEQ ID NO: 583442 - DNA, 15 bp, Homo sapiens
gctagacctattctg

SEQ ID NO: 583443 - DNA, 15 bp, Homo sapiens
ctagacctattctgc

SEQ ID NO: 583444 - DNA, 15 bp, Homo sapiens
tagacctattctgca

SEQ ID NO: 583445 - DNA, 15 bp, Homo sapiens
agacctattctgcat

SEQ ID NO: 583446 - DNA, 15 bp, Homo sapiens
gacctattctgcatg

SEQ ID NO: 583447 - DNA, 15 bp, Homo sapiens
acctattctgcatgg

SEQ ID NO: 583448 - DNA, 15 bp, Homo sapiens
cctattctgcatgga

SEQ ID NO: 583449 - DNA, 15 bp, Homo sapiens
ctattctgcatggaa

SEQ ID NO: 583450 - DNA, 15 bp, Homo sapiens
tattctgcatggaag

SEQ ID NO: 583451 - DNA, 15 bp, Homo sapiens
attctgcatggaaga

SEQ ID NO: 583452 - DNA, 15 bp, Homo sapiens
ttctgcatggaagag

SEQ ID NO: 583453 - DNA, 15 bp, Homo sapiens
tctgcatggaagaga

SEQ ID NO: 583454 - DNA, 15 bp, Homo sapiens
ctgcatggaagagac

SEQ ID NO: 583455 - DNA, 15 bp, Homo sapiens
tgcatggaagagact

SEQ ID NO: 583456 - DNA, 15 bp, Homo sapiens
gcatggaagagacta

SEQ ID NO: 583457 - DNA, 15 bp, Homo sapiens
catggaagagactat

SEQ ID NO: 583458 - DNA, 15 bp, Homo sapiens
atggaagagactata

SEQ ID NO: 583459 - DNA, 15 bp, Homo sapiens
tggaagagactatac

SEQ ID NO: 583460 - DNA, 15 bp, Homo sapiens
ggaagagactatacc

SEQ ID NO: 583461 - DNA, 15 bp, Homo sapiens
gaagagactatacca

SEQ ID NO: 583462 - DNA, 15 bp, Homo sapiens
aagagactataccat

SEQ ID NO: 583463 - DNA, 15 bp, Homo sapiens
agagactataccatg

SEQ ID NO: 583464 - DNA, 15 bp, Homo sapiens
gagactataccatgg

SEQ ID NO: 583465 - DNA, 15 bp, Homo sapiens
agactataccatggg

SEQ ID NO: 583466 - DNA, 15 bp, Homo sapiens
gactataccatgggg

SEQ ID NO: 583467 - DNA, 15 bp, Homo sapiens
actataccatggggt

SEQ ID NO: 583468 - DNA, 15 bp, Homo sapiens
ctataccatggggtg

SEQ ID NO: 583469 - DNA, 15 bp, Homo sapiens
tataccatggggtga

SEQ ID NO: 583470 - DNA, 15 bp, Homo sapiens
ataccatggggtgaa

SEQ ID NO: 583471 - DNA, 15 bp, Homo sapiens
taccatggggtgaat

SEQ ID NO: 583472 - DNA, 15 bp, Homo sapiens
accatggggtgaata

SEQ ID NO: 583473 - DNA, 15 bp, Homo sapiens
ccatggggtgaatac

SEQ ID NO: 583474 - DNA, 15 bp, Homo sapiens
catggggtgaatacc

SEQ ID NO: 583475 - DNA, 15 bp, Homo sapiens
atggggtgaatacca

SEQ ID NO: 583476 - DNA, 15 bp, Homo sapiens
tggggtgaataccag

SEQ ID NO: 583477 - DNA, 15 bp, Homo sapiens
ggggtgaataccaga

SEQ ID NO: 583478 - DNA, 15 bp, Homo sapiens
gggtgaataccagaa

SEQ ID NO: 583479 - DNA, 15 bp, Homo sapiens
ggtgaataccagaag

SEQ ID NO: 583480 - DNA, 15 bp, Homo sapiens
gtgaataccagaagc

SEQ ID NO: 583481 - DNA, 15 bp, Homo sapiens
tgaataccagaagca

SEQ ID NO: 583482 - DNA, 15 bp, Homo sapiens
gaataccagaagcag

SEQ ID NO: 583483 - DNA, 15 bp, Homo sapiens
aataccagaagcagg

SEQ ID NO: 583484 - DNA, 15 bp, Homo sapiens
ataccagaagcaggg

SEQ ID NO: 583485 - DNA, 15 bp, Homo sapiens
taccagaagcagggc

SEQ ID NO: 583486 - DNA, 15 bp, Homo sapiens
accagaagcagggct

SEQ ID NO: 583487 - DNA, 15 bp, Homo sapiens
ccagaagcagggcta

SEQ ID NO: 583488 - DNA, 15 bp, Homo sapiens
cagaagcagggctaa

SEQ ID NO: 583489 - DNA, 15 bp, Homo sapiens
agaagcagggctaat

SEQ ID NO: 583490 - DNA, 15 bp, Homo sapiens
gaagcagggctaatt

SEQ ID NO: 583491 - DNA, 15 bp, Homo sapiens
aagcagggctaattg

SEQ ID NO: 583492 - DNA, 15 bp, Homo sapiens
agcagggctaattga

SEQ ID NO: 583493 - DNA, 15 bp, Homo sapiens
gcagggctaattgaa

SEQ ID NO: 583494 - DNA, 15 bp, Homo sapiens
cagggctaattgaag

SEQ ID NO: 583495 - DNA, 15 bp, Homo sapiens
agggctaattgaagg

SEQ ID NO: 583496 - DNA, 15 bp, Homo sapiens
gggctaattgaaggc

SEQ ID NO: 583497 - DNA, 15 bp, Homo sapiens
ggctaattgaaggcc

SEQ ID NO: 583498 - DNA, 15 bp, Homo sapiens
gctaattgaaggcca

SEQ ID NO: 583499 - DNA, 15 bp, Homo sapiens
ctaattgaaggccag

SEQ ID NO: 583500 - DNA, 15 bp, Homo sapiens
taattgaaggccagc

SEQ ID NO: 583501 - DNA, 15 bp, Homo sapiens
aattgaaggccagct

SEQ ID NO: 583502 - DNA, 15 bp, Homo sapiens
attgaaggccagctt

SEQ ID NO: 583503 - DNA, 15 bp, Homo sapiens
ttgaaggccagcttc

SEQ ID NO: 583504 - DNA, 15 bp, Homo sapiens
tgaaggccagcttca

SEQ ID NO: 583505 - DNA, 15 bp, Homo sapiens
gaaggccagcttcaa

SEQ ID NO: 583506 - DNA, 15 bp, Homo sapiens
aaggccagcttcaag

SEQ ID NO: 583507 - DNA, 15 bp, Homo sapiens
aggccagcttcaagg

SEQ ID NO: 583508 - DNA, 15 bp, Homo sapiens
ggccagcttcaaggg

SEQ ID NO: 583509 - DNA, 15 bp, Homo sapiens
gccagcttcaagggc

SEQ ID NO: 583510 - DNA, 15 bp, Homo sapiens
ccagcttcaagggcg

SEQ ID NO: 583511 - DNA, 15 bp, Homo sapiens
cagcttcaagggcgg

SEQ ID NO: 583512 - DNA, 15 bp, Homo sapiens
agcttcaagggcggc

SEQ ID NO: 583513 - DNA, 15 bp, Homo sapiens
gcttcaagggcggct

SEQ ID NO: 583514 - DNA, 15 bp, Homo sapiens
cttcaagggcggcta

SEQ ID NO: 583515 - DNA, 15 bp, Homo sapiens
ttcaagggcggctac

SEQ ID NO: 583516 - DNA, 15 bp, Homo sapiens
tcaagggcggctaca

SEQ ID NO: 583517 - DNA, 15 bp, Homo sapiens
caagggcggctacac

SEQ ID NO: 583518 - DNA, 15 bp, Homo sapiens
aagggcggctacaca

SEQ ID NO: 583519 - DNA, 15 bp, Homo sapiens
agggcggctacacat

SEQ ID NO: 583520 - DNA, 15 bp, Homo sapiens
gggcggctacacatt

SEQ ID NO: 583521 - DNA, 15 bp, Homo sapiens
ggcggctacacattc

SEQ ID NO: 583522 - DNA, 15 bp, Homo sapiens
gcggctacacattcc

SEQ ID NO: 583523 - DNA, 15 bp, Homo sapiens
cggctacacattccc

SEQ ID NO: 583524 - DNA, 15 bp, Homo sapiens
ggctacacattccct

SEQ ID NO: 583525 - DNA, 15 bp, Homo sapiens
gctacacattccctt

SEQ ID NO: 583526 - DNA, 15 bp, Homo sapiens
ctacacattcccttt

SEQ ID NO: 583527 - DNA, 15 bp, Homo sapiens
tacacattccctttc

SEQ ID NO: 583528 - DNA, 15 bp, Homo sapiens
acacattccctttca

SEQ ID NO: 583529 - DNA, 15 bp, Homo sapiens
cacattccctttcaa

SEQ ID NO: 583530 - DNA, 15 bp, Homo sapiens
acattccctttcaac

SEQ ID NO: 583531 - DNA, 15 bp, Homo sapiens
cattccctttcaaca

SEQ ID NO: 583532 - DNA, 15 bp, Homo sapiens
attccctttcaacag

SEQ ID NO: 583533 - DNA, 15 bp, Homo sapiens
ttccctttcaacagt

SEQ ID NO: 583534 - DNA, 15 bp, Homo sapiens
tccctttcaacagta

SEQ ID NO: 583535 - DNA, 15 bp, Homo sapiens
ccctttcaacagtat

SEQ ID NO: 583536 - DNA, 15 bp, Homo sapiens
cctttcaacagtatg

SEQ ID NO: 583537 - DNA, 15 bp, Homo sapiens
ctttcaacagtatgt

SEQ ID NO: 583538 - DNA, 15 bp, Homo sapiens
tttcaacagtatgtc

SEQ ID NO: 583539 - DNA, 15 bp, Homo sapiens
ttcaacagtatgtca

SEQ ID NO: 583540 - DNA, 15 bp, Homo sapiens
tcaacagtatgtcat

SEQ ID NO: 583541 - DNA, 15 bp, Homo sapiens
caacagtatgtcatg

SEQ ID NO: 583542 - DNA, 15 bp, Homo sapiens
aacagtatgtcatga

SEQ ID NO: 583543 - DNA, 15 bp, Homo sapiens
acagtatgtcatgaa

SEQ ID NO: 583544 - DNA, 15 bp, Homo sapiens
cagtatgtcatgaac

SEQ ID NO: 583545 - DNA, 15 bp, Homo sapiens
agtatgtcatgaaca

SEQ ID NO: 583546 - DNA, 15 bp, Homo sapiens
gtatgtcatgaacat

SEQ ID NO: 583547 - DNA, 15 bp, Homo sapiens
tatgtcatgaacatc

SEQ ID NO: 583548 - DNA, 15 bp, Homo sapiens
atgtcatgaacatct

SEQ ID NO: 583549 - DNA, 15 bp, Homo sapiens
tgtcatgaacatctt

SEQ ID NO: 583550 - DNA, 15 bp, Homo sapiens
gtcatgaacatcttt

SEQ ID NO: 583551 - DNA, 15 bp, Homo sapiens
tcatgaacatctttc

SEQ ID NO: 583552 - DNA, 15 bp, Homo sapiens
catgaacatctttcc

SEQ ID NO: 583553 - DNA, 15 bp, Homo sapiens
atgaacatctttcca

SEQ ID NO: 583554 - DNA, 15 bp, Homo sapiens
tgaacatctttccat

SEQ ID NO: 583555 - DNA, 15 bp, Homo sapiens
gaacatctttccatg

SEQ ID NO: 583556 - DNA, 15 bp, Homo sapiens
aacatctttccatgc

SEQ ID NO: 583557 - DNA, 15 bp, Homo sapiens
acatctttccatgcc

SEQ ID NO: 583558 - DNA, 15 bp, Homo sapiens
catctttccatgcca

SEQ ID NO: 583559 - DNA, 15 bp, Homo sapiens
atctttccatgccaa

SEQ ID NO: 583560 - DNA, 15 bp, Homo sapiens
tctttccatgccaat

SEQ ID NO: 583561 - DNA, 15 bp, Homo sapiens
ctttccatgccaata

SEQ ID NO: 583562 - DNA, 15 bp, Homo sapiens
tttccatgccaatag

SEQ ID NO: 583563 - DNA, 15 bp, Homo sapiens
ttccatgccaataga

SEQ ID NO: 583564 - DNA, 15 bp, Homo sapiens
tccatgccaatagag

SEQ ID NO: 583565 - DNA, 15 bp, Homo sapiens
ccatgccaatagagc

SEQ ID NO: 583566 - DNA, 15 bp, Homo sapiens
catgccaatagagca

SEQ ID NO: 583567 - DNA, 15 bp, Homo sapiens
atgccaatagagcag

SEQ ID NO: 583568 - DNA, 15 bp, Homo sapiens
tgccaatagagcaga

SEQ ID NO: 583569 - DNA, 15 bp, Homo sapiens
gccaatagagcagat

SEQ ID NO: 583570 - DNA, 15 bp, Homo sapiens
ccaatagagcagatg

SEQ ID NO: 583571 - DNA, 15 bp, Homo sapiens
caatagagcagatga

SEQ ID NO: 583572 - DNA, 15 bp, Homo sapiens
aatagagcagatgaa

SEQ ID NO: 583573 - DNA, 15 bp, Homo sapiens
atagagcagatgaat

SEQ ID NO: 583574 - DNA, 15 bp, Homo sapiens
tagagcagatgaatc

SEQ ID NO: 583575 - DNA, 15 bp, Homo sapiens
agagcagatgaatct

SEQ ID NO: 583576 - DNA, 15 bp, Homo sapiens
gagcagatgaatctt

SEQ ID NO: 583577 - DNA, 15 bp, Homo sapiens
agcagatgaatctta

SEQ ID NO: 583578 - DNA, 15 bp, Homo sapiens
gcagatgaatcttac

SEQ ID NO: 583579 - DNA, 15 bp, Homo sapiens
cagatgaatcttacc

SEQ ID NO: 583580 - DNA, 15 bp, Homo sapiens
agatgaatcttacca

SEQ ID NO: 583581 - DNA, 15 bp, Homo sapiens
gatgaatcttaccat

SEQ ID NO: 583582 - DNA, 15 bp, Homo sapiens
atgaatcttaccatt

SEQ ID NO: 583583 - DNA, 15 bp, Homo sapiens
tgaatcttaccattt

SEQ ID NO: 583584 - DNA, 15 bp, Homo sapiens
gaatcttaccatttt

SEQ ID NO: 583585 - DNA, 15 bp, Homo sapiens
aatcttaccattttt

SEQ ID NO: 583586 - DNA, 15 bp, Homo sapiens
atcttaccattttta

SEQ ID NO: 583587 - DNA, 15 bp, Homo sapiens
tcttaccatttttaa

SEQ ID NO: 583588 - DNA, 15 bp, Homo sapiens
cttaccatttttaat

SEQ ID NO: 583589 - DNA, 15 bp, Homo sapiens
ttaccatttttaatg

SEQ ID NO: 583590 - DNA, 15 bp, Homo sapiens
taccatttttaatga

SEQ ID NO: 583591 - DNA, 15 bp, Homo sapiens
accatttttaatgac

SEQ ID NO: 583592 - DNA, 15 bp, Homo sapiens
ccatttttaatgact

SEQ ID NO: 583593 - DNA, 15 bp, Homo sapiens
catttttaatgacta

SEQ ID NO: 583594 - DNA, 15 bp, Homo sapiens
atttttaatgactac

SEQ ID NO: 583595 - DNA, 15 bp, Homo sapiens
tttttaatgactaca

SEQ ID NO: 583596 - DNA, 15 bp, Homo sapiens
ttttaatgactacat

SEQ ID NO: 583597 - DNA, 15 bp, Homo sapiens
tttaatgactacatg

SEQ ID NO: 583598 - DNA, 15 bp, Homo sapiens
ttaatgactacatgt

SEQ ID NO: 583599 - DNA, 15 bp, Homo sapiens
taatgactacatgta

SEQ ID NO: 583600 - DNA, 15 bp, Homo sapiens
aatgactacatgtaa

SEQ ID NO: 583601 - DNA, 15 bp, Homo sapiens
atgactacatgtaag

SEQ ID NO: 583602 - DNA, 15 bp, Homo sapiens
tgactacatgtaagt

SEQ ID NO: 583603 - DNA, 15 bp, Homo sapiens
gactacatgtaagtg

SEQ ID NO: 583604 - DNA, 15 bp, Homo sapiens
actacatgtaagtgt

SEQ ID NO: 583605 - DNA, 15 bp, Homo sapiens
ctacatgtaagtgta

SEQ ID NO: 583606 - DNA, 15 bp, Homo sapiens
tacatgtaagtgtag

SEQ ID NO: 583607 - DNA, 15 bp, Homo sapiens
acatgtaagtgtagc

SEQ ID NO: 583608 - DNA, 15 bp, Homo sapiens
catgtaagtgtagca

SEQ ID NO: 583609 - DNA, 15 bp, Homo sapiens
atgtaagtgtagcat

SEQ ID NO: 583610 - DNA, 15 bp, Homo sapiens
tgtaagtgtagcata

SEQ ID NO: 583611 - DNA, 15 bp, Homo sapiens
gtaagtgtagcataa

SEQ ID NO: 583612 - DNA, 15 bp, Homo sapiens
taagtgtagcataat

SEQ ID NO: 583613 - DNA, 15 bp, Homo sapiens
aagtgtagcataatt

SEQ ID NO: 583614 - DNA, 15 bp, Homo sapiens
agtgtagcataattt

SEQ ID NO: 583615 - DNA, 15 bp, Homo sapiens
gtgtagcataattta

SEQ ID NO: 583616 - DNA, 15 bp, Homo sapiens
tgtagcataatttat

SEQ ID NO: 583617 - DNA, 15 bp, Homo sapiens
gtagcataatttatt

SEQ ID NO: 583618 - DNA, 15 bp, Homo sapiens
tagcataatttattt

SEQ ID NO: 583619 - DNA, 15 bp, Homo sapiens
agcataatttattta

SEQ ID NO: 583620 - DNA, 15 bp, Homo sapiens
gcataatttatttaa

SEQ ID NO: 583621 - DNA, 15 bp, Homo sapiens
cataatttatttaac

SEQ ID NO: 583622 - DNA, 15 bp, Homo sapiens
ataatttatttaacc

SEQ ID NO: 583623 - DNA, 15 bp, Homo sapiens
taatttatttaacca

SEQ ID NO: 583624 - DNA, 15 bp, Homo sapiens
aatttatttaaccaa

SEQ ID NO: 583625 - DNA, 15 bp, Homo sapiens
atttatttaaccaac

SEQ ID NO: 583626 - DNA, 15 bp, Homo sapiens
tttatttaaccaacc

SEQ ID NO: 583627 - DNA, 15 bp, Homo sapiens
ttatttaaccaacct

SEQ ID NO: 583628 - DNA, 15 bp, Homo sapiens
tatttaaccaacctc

SEQ ID NO: 583629 - DNA, 15 bp, Homo sapiens
atttaaccaacctcc

SEQ ID NO: 583630 - DNA, 15 bp, Homo sapiens
tttaaccaacctcct

SEQ ID NO: 583631 - DNA, 15 bp, Homo sapiens
ttaaccaacctcctg

SEQ ID NO: 583632 - DNA, 15 bp, Homo sapiens
taaccaacctcctgt

SEQ ID NO: 583633 - DNA, 15 bp, Homo sapiens
aaccaacctcctgta

SEQ ID NO: 583634 - DNA, 15 bp, Homo sapiens
accaacctcctgtag

SEQ ID NO: 583635 - DNA, 15 bp, Homo sapiens
ccaacctcctgtagt

SEQ ID NO: 583636 - DNA, 15 bp, Homo sapiens
caacctcctgtagtt

SEQ ID NO: 583637 - DNA, 15 bp, Homo sapiens
aacctcctgtagttg

SEQ ID NO: 583638 - DNA, 15 bp, Homo sapiens
acctcctgtagttgg

SEQ ID NO: 583639 - DNA, 15 bp, Homo sapiens
cctcctgtagttggg

SEQ ID NO: 583640 - DNA, 15 bp, Homo sapiens
ctcctgtagttgggt

SEQ ID NO: 583641 - DNA, 15 bp, Homo sapiens
tcctgtagttgggta

SEQ ID NO: 583642 - DNA, 15 bp, Homo sapiens
cctgtagttgggtat

SEQ ID NO: 583643 - DNA, 15 bp, Homo sapiens
ctgtagttgggtatg

SEQ ID NO: 583644 - DNA, 15 bp, Homo sapiens
tgtagttgggtatgt

SEQ ID NO: 583645 - DNA, 15 bp, Homo sapiens
gtagttgggtatgtg

SEQ ID NO: 583646 - DNA, 15 bp, Homo sapiens
tagttgggtatgtgg

SEQ ID NO: 583647 - DNA, 15 bp, Homo sapiens
agttgggtatgtggg

SEQ ID NO: 583648 - DNA, 15 bp, Homo sapiens
gttgggtatgtgggt

SEQ ID NO: 583649 - DNA, 15 bp, Homo sapiens
ttgggtatgtgggtt

SEQ ID NO: 583650 - DNA, 15 bp, Homo sapiens
tgggtatgtgggttg

SEQ ID NO: 583651 - DNA, 15 bp, Homo sapiens
gggtatgtgggttgt

SEQ ID NO: 583652 - DNA, 15 bp, Homo sapiens
ggtatgtgggttgtg

SEQ ID NO: 583653 - DNA, 15 bp, Homo sapiens
gtatgtgggttgtgt

SEQ ID NO: 583654 - DNA, 15 bp, Homo sapiens
tatgtgggttgtgtc

SEQ ID NO: 583655 - DNA, 15 bp, Homo sapiens
atgtgggttgtgtct

SEQ ID NO: 583656 - DNA, 15 bp, Homo sapiens
tgtgggttgtgtctc

SEQ ID NO: 583657 - DNA, 15 bp, Homo sapiens
gtgggttgtgtctcg

SEQ ID NO: 583658 - DNA, 15 bp, Homo sapiens
tgggttgtgtctcgt

SEQ ID NO: 583659 - DNA, 15 bp, Homo sapiens
gggttgtgtctcgtt

SEQ ID NO: 583660 - DNA, 15 bp, Homo sapiens
ggttgtgtctcgttt

SEQ ID NO: 583661 - DNA, 15 bp, Homo sapiens
gttgtgtctcgtttt

SEQ ID NO: 583662 - DNA, 15 bp, Homo sapiens
ttgtgtctcgttttt

SEQ ID NO: 583663 - DNA, 15 bp, Homo sapiens
tgtgtctcgtttttt

SEQ ID NO: 583664 - DNA, 15 bp, Homo sapiens
gtgtctcgttttttg

SEQ ID NO: 583665 - DNA, 15 bp, Homo sapiens
tgtctcgttttttga

SEQ ID NO: 583666 - DNA, 15 bp, Homo sapiens
gtctcgttttttgat

SEQ ID NO: 583667 - DNA, 15 bp, Homo sapiens
tctcgttttttgata

SEQ ID NO: 583668 - DNA, 15 bp, Homo sapiens
ctcgttttttgatag

SEQ ID NO: 583669 - DNA, 15 bp, Homo sapiens
tcgttttttgatagt

SEQ ID NO: 583670 - DNA, 15 bp, Homo sapiens
cgttttttgatagta

SEQ ID NO: 583671 - DNA, 15 bp, Homo sapiens
gttttttgatagtag

SEQ ID NO: 583672 - DNA, 15 bp, Homo sapiens
ttttttgatagtaga

SEQ ID NO: 583673 - DNA, 15 bp, Homo sapiens
tttttgatagtagaa

SEQ ID NO: 583674 - DNA, 15 bp, Homo sapiens
ttttgatagtagaat

SEQ ID NO: 583675 - DNA, 15 bp, Homo sapiens
tttgatagtagaatt

SEQ ID NO: 583676 - DNA, 15 bp, Homo sapiens
ttgatagtagaatta

SEQ ID NO: 583677 - DNA, 15 bp, Homo sapiens
tgatagtagaattaa

SEQ ID NO: 583678 - DNA, 15 bp, Homo sapiens
gatagtagaattaat

SEQ ID NO: 583679 - DNA, 15 bp, Homo sapiens
atagtagaattaatc

SEQ ID NO: 583680 - DNA, 15 bp, Homo sapiens
tagtagaattaatca

SEQ ID NO: 583681 - DNA, 15 bp, Homo sapiens
agtagaattaatcat

SEQ ID NO: 583682 - DNA, 15 bp, Homo sapiens
gtagaattaatcatc

SEQ ID NO: 583683 - DNA, 15 bp, Homo sapiens
tagaattaatcatct

SEQ ID NO: 583684 - DNA, 15 bp, Homo sapiens
agaattaatcatctt

SEQ ID NO: 583685 - DNA, 15 bp, Homo sapiens
gaattaatcatcttg

SEQ ID NO: 583686 - DNA, 15 bp, Homo sapiens
aattaatcatcttga

SEQ ID NO: 583687 - DNA, 15 bp, Homo sapiens
attaatcatcttgaa

SEQ ID NO: 583688 - DNA, 15 bp, Homo sapiens
ttaatcatcttgaat

SEQ ID NO: 583689 - DNA, 15 bp, Homo sapiens
taatcatcttgaata

SEQ ID NO: 583690 - DNA, 15 bp, Homo sapiens
aatcatcttgaatat

SEQ ID NO: 583691 - DNA, 15 bp, Homo sapiens
atcatcttgaatatc

SEQ ID NO: 583692 - DNA, 15 bp, Homo sapiens
tcatcttgaatatcc

SEQ ID NO: 583693 - DNA, 15 bp, Homo sapiens
catcttgaatatcca

SEQ ID NO: 583694 - DNA, 15 bp, Homo sapiens
atcttgaatatccat

SEQ ID NO: 583695 - DNA, 15 bp, Homo sapiens
tcttgaatatccatc

SEQ ID NO: 583696 - DNA, 15 bp, Homo sapiens
cttgaatatccatca

SEQ ID NO: 583697 - DNA, 15 bp, Homo sapiens
ttgaatatccatcac

SEQ ID NO: 583698 - DNA, 15 bp, Homo sapiens
tgaatatccatcacc

SEQ ID NO: 583699 - DNA, 15 bp, Homo sapiens
gaatatccatcacca

SEQ ID NO: 583700 - DNA, 15 bp, Homo sapiens
aatatccatcaccaa

SEQ ID NO: 583701 - DNA, 15 bp, Homo sapiens
atatccatcaccaaa

SEQ ID NO: 583702 - DNA, 15 bp, Homo sapiens
tatccatcaccaaac

SEQ ID NO: 583703 - DNA, 15 bp, Homo sapiens
atccatcaccaaact

SEQ ID NO: 583704 - DNA, 15 bp, Homo sapiens
tccatcaccaaactt

SEQ ID NO: 583705 - DNA, 15 bp, Homo sapiens
ccatcaccaaacttg

SEQ ID NO: 583706 - DNA, 15 bp, Homo sapiens
catcaccaaacttgt

SEQ ID NO: 583707 - DNA, 15 bp, Homo sapiens
atcaccaaacttgtc

SEQ ID NO: 583708 - DNA, 15 bp, Homo sapiens
tcaccaaacttgtca

SEQ ID NO: 583709 - DNA, 15 bp, Homo sapiens
caccaaacttgtcat

SEQ ID NO: 583710 - DNA, 15 bp, Homo sapiens
accaaacttgtcata

SEQ ID NO: 583711 - DNA, 15 bp, Homo sapiens
ccaaacttgtcatat

SEQ ID NO: 583712 - DNA, 15 bp, Homo sapiens
caaacttgtcatatt

SEQ ID NO: 583713 - DNA, 15 bp, Homo sapiens
aaacttgtcatatta

SEQ ID NO: 583714 - DNA, 15 bp, Homo sapiens
aacttgtcatattat

SEQ ID NO: 583715 - DNA, 15 bp, Homo sapiens
acttgtcatattatt

SEQ ID NO: 583716 - DNA, 15 bp, Homo sapiens
cttgtcatattattt

SEQ ID NO: 583717 - DNA, 15 bp, Homo sapiens
ttgtcatattatttt

SEQ ID NO: 583718 - DNA, 15 bp, Homo sapiens
tgtcatattattttc

SEQ ID NO: 583719 - DNA, 15 bp, Homo sapiens
gtcatattattttct

SEQ ID NO: 583720 - DNA, 15 bp, Homo sapiens
tcatattattttctt

SEQ ID NO: 583721 - DNA, 15 bp, Homo sapiens
catattattttcttt

SEQ ID NO: 583722 - DNA, 15 bp, Homo sapiens
atattattttctttt

SEQ ID NO: 583723 - DNA, 15 bp, Homo sapiens
tattattttcttttg

SEQ ID NO: 583724 - DNA, 15 bp, Homo sapiens
attattttcttttga

SEQ ID NO: 583725 - DNA, 15 bp, Homo sapiens
ttattttcttttgat

SEQ ID NO: 583726 - DNA, 15 bp, Homo sapiens
tattttcttttgatg

SEQ ID NO: 583727 - DNA, 15 bp, Homo sapiens
attttcttttgatga

SEQ ID NO: 583728 - DNA, 15 bp, Homo sapiens
ttttcttttgatgaa

SEQ ID NO: 583729 - DNA, 15 bp, Homo sapiens
tttcttttgatgaat

SEQ ID NO: 583730 - DNA, 15 bp, Homo sapiens
ttcttttgatgaatg

SEQ ID NO: 583731 - DNA, 15 bp, Homo sapiens
tcttttgatgaatga

SEQ ID NO: 583732 - DNA, 15 bp, Homo sapiens
cttttgatgaatgaa

SEQ ID NO: 583733 - DNA, 15 bp, Homo sapiens
ttttgatgaatgaaa

SEQ ID NO: 583734 - DNA, 15 bp, Homo sapiens
tttgatgaatgaaaa

SEQ ID NO: 583735 - DNA, 15 bp, Homo sapiens
ttgatgaatgaaaaa

SEQ ID NO: 583736 - DNA, 15 bp, Homo sapiens
tgatgaatgaaaaag

SEQ ID NO: 583737 - DNA, 15 bp, Homo sapiens
gatgaatgaaaaaga

SEQ ID NO: 583738 - DNA, 15 bp, Homo sapiens
atgaatgaaaaagaa

SEQ ID NO: 583739 - DNA, 15 bp, Homo sapiens
tgaatgaaaaagaaa

SEQ ID NO: 583740 - DNA, 15 bp, Homo sapiens
gaatgaaaaagaaaa

SEQ ID NO: 583741 - DNA, 15 bp, Homo sapiens
aatgaaaaagaaaat

SEQ ID NO: 583742 - DNA, 15 bp, Homo sapiens
atgaaaaagaaaatc

SEQ ID NO: 583743 - DNA, 15 bp, Homo sapiens
tgaaaaagaaaatca

SEQ ID NO: 583744 - DNA, 15 bp, Homo sapiens
gaaaaagaaaatcaa

SEQ ID NO: 583745 - DNA, 15 bp, Homo sapiens
aaaaagaaaatcaag

SEQ ID NO: 583746 - DNA, 15 bp, Homo sapiens
aaaagaaaatcaagt

SEQ ID NO: 583747 - DNA, 15 bp, Homo sapiens
aaagaaaatcaagtc

SEQ ID NO: 583748 - DNA, 15 bp, Homo sapiens
aagaaaatcaagtca

SEQ ID NO: 583749 - DNA, 15 bp, Homo sapiens
agaaaatcaagtcat

SEQ ID NO: 583750 - DNA, 15 bp, Homo sapiens
gaaaatcaagtcatg

SEQ ID NO: 583751 - DNA, 15 bp, Homo sapiens
aaaatcaagtcatgt

SEQ ID NO: 583752 - DNA, 15 bp, Homo sapiens
aaatcaagtcatgtc

SEQ ID NO: 583753 - DNA, 15 bp, Homo sapiens
aatcaagtcatgtct

SEQ ID NO: 583754 - DNA, 15 bp, Homo sapiens
atcaagtcatgtctg

SEQ ID NO: 583755 - DNA, 15 bp, Homo sapiens
tcaagtcatgtctgt

SEQ ID NO: 583756 - DNA, 15 bp, Homo sapiens
caagtcatgtctgtc

SEQ ID NO: 583757 - DNA, 15 bp, Homo sapiens
aagtcatgtctgtca

SEQ ID NO: 583758 - DNA, 15 bp, Homo sapiens
agtcatgtctgtcaa

SEQ ID NO: 583759 - DNA, 15 bp, Homo sapiens
gtcatgtctgtcaat

SEQ ID NO: 583760 - DNA, 15 bp, Homo sapiens
tcatgtctgtcaatc

SEQ ID NO: 583761 - DNA, 15 bp, Homo sapiens
catgtctgtcaatca

SEQ ID NO: 583762 - DNA, 15 bp, Homo sapiens
atgtctgtcaatcag

SEQ ID NO: 583763 - DNA, 15 bp, Homo sapiens
tgtctgtcaatcaga

SEQ ID NO: 583764 - DNA, 15 bp, Homo sapiens
gtctgtcaatcagaa

SEQ ID NO: 583765 - DNA, 15 bp, Homo sapiens
tctgtcaatcagaac

SEQ ID NO: 583766 - DNA, 15 bp, Homo sapiens
ctgtcaatcagaacc

SEQ ID NO: 583767 - DNA, 15 bp, Homo sapiens
tgtcaatcagaaccc

SEQ ID NO: 583768 - DNA, 15 bp, Homo sapiens
gtcaatcagaaccct

SEQ ID NO: 583769 - DNA, 15 bp, Homo sapiens
tcaatcagaaccctg

SEQ ID NO: 583770 - DNA, 15 bp, Homo sapiens
caatcagaaccctga

SEQ ID NO: 583771 - DNA, 15 bp, Homo sapiens
aatcagaaccctgag

SEQ ID NO: 583772 - DNA, 15 bp, Homo sapiens
atcagaaccctgagc

SEQ ID NO: 583773 - DNA, 15 bp, Homo sapiens
tcagaaccctgagca

SEQ ID NO: 583774 - DNA, 15 bp, Homo sapiens
cagaaccctgagcaa

SEQ ID NO: 583775 - DNA, 15 bp, Homo sapiens
agaaccctgagcaac

SEQ ID NO: 583776 - DNA, 15 bp, Homo sapiens
gaaccctgagcaact

SEQ ID NO: 583777 - DNA, 15 bp, Homo sapiens
aaccctgagcaacta

SEQ ID NO: 583778 - DNA, 15 bp, Homo sapiens
accctgagcaactaa

SEQ ID NO: 583779 - DNA, 15 bp, Homo sapiens
ccctgagcaactaag

SEQ ID NO: 583780 - DNA, 15 bp, Homo sapiens
cctgagcaactaaga

SEQ ID NO: 583781 - DNA, 15 bp, Homo sapiens
ctgagcaactaagaa

SEQ ID NO: 583782 - DNA, 15 bp, Homo sapiens
tgagcaactaagaaa

SEQ ID NO: 583783 - DNA, 15 bp, Homo sapiens
gagcaactaagaaat

SEQ ID NO: 583784 - DNA, 15 bp, Homo sapiens
agcaactaagaaatg

SEQ ID NO: 583785 - DNA, 15 bp, Homo sapiens
gcaactaagaaatgg

SEQ ID NO: 583786 - DNA, 15 bp, Homo sapiens
caactaagaaatggg

SEQ ID NO: 583787 - DNA, 15 bp, Homo sapiens
aactaagaaatgggg

SEQ ID NO: 583788 - DNA, 15 bp, Homo sapiens
actaagaaatggggg

SEQ ID NO: 583789 - DNA, 15 bp, Homo sapiens
ctaagaaatgggggt

SEQ ID NO: 583790 - DNA, 15 bp, Homo sapiens
taagaaatgggggta

SEQ ID NO: 583791 - DNA, 15 bp, Homo sapiens
aagaaatgggggtac

SEQ ID NO: 583792 - DNA, 15 bp, Homo sapiens
agaaatgggggtacc

SEQ ID NO: 583793 - DNA, 15 bp, Homo sapiens
gaaatgggggtacca

SEQ ID NO: 583794 - DNA, 15 bp, Homo sapiens
aaatgggggtaccac

SEQ ID NO: 583795 - DNA, 15 bp, Homo sapiens
aatgggggtaccact

SEQ ID NO: 583796 - DNA, 15 bp, Homo sapiens
atgggggtaccactg

SEQ ID NO: 583797 - DNA, 15 bp, Homo sapiens
tgggggtaccactgg

SEQ ID NO: 583798 - DNA, 15 bp, Homo sapiens
gggggtaccactggg

SEQ ID NO: 583799 - DNA, 15 bp, Homo sapiens
ggggtaccactggga

SEQ ID NO: 583800 - DNA, 15 bp, Homo sapiens
gggtaccactgggac

SEQ ID NO: 583801 - DNA, 15 bp, Homo sapiens
ggtaccactgggaca

SEQ ID NO: 583802 - DNA, 15 bp, Homo sapiens
gtaccactgggacat

SEQ ID NO: 583803 - DNA, 15 bp, Homo sapiens
taccactgggacata

SEQ ID NO: 583804 - DNA, 15 bp, Homo sapiens
accactgggacatag

SEQ ID NO: 583805 - DNA, 15 bp, Homo sapiens
ccactgggacataga

SEQ ID NO: 583806 - DNA, 15 bp, Homo sapiens
cactgggacatagag

SEQ ID NO: 583807 - DNA, 15 bp, Homo sapiens
actgggacatagagc

SEQ ID NO: 583808 - DNA, 15 bp, Homo sapiens
ctgggacatagagca

SEQ ID NO: 583809 - DNA, 15 bp, Homo sapiens
tgggacatagagcaa

SEQ ID NO: 583810 - DNA, 15 bp, Homo sapiens
gggacatagagcaag

SEQ ID NO: 583811 - DNA, 15 bp, Homo sapiens
ggacatagagcaagg

SEQ ID NO: 583812 - DNA, 15 bp, Homo sapiens
gacatagagcaaggt

SEQ ID NO: 583813 - DNA, 15 bp, Homo sapiens
acatagagcaaggtc

SEQ ID NO: 583814 - DNA, 15 bp, Homo sapiens
catagagcaaggtcc

SEQ ID NO: 583815 - DNA, 15 bp, Homo sapiens
atagagcaaggtccc

SEQ ID NO: 583816 - DNA, 15 bp, Homo sapiens
tagagcaaggtccct

SEQ ID NO: 583817 - DNA, 15 bp, Homo sapiens
agagcaaggtccctt

SEQ ID NO: 583818 - DNA, 15 bp, Homo sapiens
gagcaaggtcccttc

SEQ ID NO: 583819 - DNA, 15 bp, Homo sapiens
agcaaggtcccttct

SEQ ID NO: 583820 - DNA, 15 bp, Homo sapiens
gcaaggtcccttctg

SEQ ID NO: 583821 - DNA, 15 bp, Homo sapiens
caaggtcccttctga

SEQ ID NO: 583822 - DNA, 15 bp, Homo sapiens
aaggtcccttctgat

SEQ ID NO: 583823 - DNA, 15 bp, Homo sapiens
aggtcccttctgatt

SEQ ID NO: 583824 - DNA, 15 bp, Homo sapiens
ggtcccttctgattc

SEQ ID NO: 583825 - DNA, 15 bp, Homo sapiens
gtcccttctgattct

SEQ ID NO: 583826 - DNA, 15 bp, Homo sapiens
tcccttctgattctg

SEQ ID NO: 583827 - DNA, 15 bp, Homo sapiens
cccttctgattctgc

SEQ ID NO: 583828 - DNA, 15 bp, Homo sapiens
ccttctgattctgct

SEQ ID NO: 583829 - DNA, 15 bp, Homo sapiens
cttctgattctgctc

SEQ ID NO: 583830 - DNA, 15 bp, Homo sapiens
ttctgattctgctct

SEQ ID NO: 583831 - DNA, 15 bp, Homo sapiens
tctgattctgctctt

SEQ ID NO: 583832 - DNA, 15 bp, Homo sapiens
ctgattctgctcttg

SEQ ID NO: 583833 - DNA, 15 bp, Homo sapiens
tgattctgctcttgt

SEQ ID NO: 583834 - DNA, 15 bp, Homo sapiens
gattctgctcttgtc

SEQ ID NO: 583835 - DNA, 15 bp, Homo sapiens
attctgctcttgtct

SEQ ID NO: 583836 - DNA, 15 bp, Homo sapiens
ttctgctcttgtctt

SEQ ID NO: 583837 - DNA, 15 bp, Homo sapiens
tctgctcttgtcttt

SEQ ID NO: 583838 - DNA, 15 bp, Homo sapiens
ctgctcttgtctttc

SEQ ID NO: 583839 - DNA, 15 bp, Homo sapiens
tgctcttgtctttct

SEQ ID NO: 583840 - DNA, 15 bp, Homo sapiens
gctcttgtctttctc

SEQ ID NO: 583841 - DNA, 15 bp, Homo sapiens
ctcttgtctttctct

SEQ ID NO: 583842 - DNA, 15 bp, Homo sapiens
tcttgtctttctctc

SEQ ID NO: 583843 - DNA, 15 bp, Homo sapiens
cttgtctttctctcc

SEQ ID NO: 583844 - DNA, 15 bp, Homo sapiens
ttgtctttctctccc

SEQ ID NO: 583845 - DNA, 15 bp, Homo sapiens
tgtctttctctcccc

SEQ ID NO: 583846 - DNA, 15 bp, Homo sapiens
gtctttctctcccca

SEQ ID NO: 583847 - DNA, 15 bp, Homo sapiens
tctttctctccccat

SEQ ID NO: 583848 - DNA, 15 bp, Homo sapiens
ctttctctccccatg

SEQ ID NO: 583849 - DNA, 15 bp, Homo sapiens
tttctctccccatga

SEQ ID NO: 583850 - DNA, 15 bp, Homo sapiens
ttctctccccatgaa

SEQ ID NO: 583851 - DNA, 15 bp, Homo sapiens
tctctccccatgaaa

SEQ ID NO: 583852 - DNA, 15 bp, Homo sapiens
ctctccccatgaaat

SEQ ID NO: 583853 - DNA, 15 bp, Homo sapiens
tctccccatgaaatg

SEQ ID NO: 583854 - DNA, 15 bp, Homo sapiens
ctccccatgaaatgg

SEQ ID NO: 583855 - DNA, 15 bp, Homo sapiens
tccccatgaaatggg

SEQ ID NO: 583856 - DNA, 15 bp, Homo sapiens
ccccatgaaatgggg

SEQ ID NO: 583857 - DNA, 15 bp, Homo sapiens
cccatgaaatgggga

SEQ ID NO: 583858 - DNA, 15 bp, Homo sapiens
ccatgaaatggggag

SEQ ID NO: 583859 - DNA, 15 bp, Homo sapiens
catgaaatggggagt

SEQ ID NO: 583860 - DNA, 15 bp, Homo sapiens
atgaaatggggagtt

SEQ ID NO: 583861 - DNA, 15 bp, Homo sapiens
tgaaatggggagttc

SEQ ID NO: 583862 - DNA, 15 bp, Homo sapiens
gaaatggggagttca

SEQ ID NO: 583863 - DNA, 15 bp, Homo sapiens
aaatggggagttcac

SEQ ID NO: 583864 - DNA, 15 bp, Homo sapiens
aatggggagttcact

SEQ ID NO: 583865 - DNA, 15 bp, Homo sapiens
atggggagttcacta

SEQ ID NO: 583866 - DNA, 15 bp, Homo sapiens
tggggagttcactat

SEQ ID NO: 583867 - DNA, 15 bp, Homo sapiens
ggggagttcactatc

SEQ ID NO: 583868 - DNA, 15 bp, Homo sapiens
gggagttcactatct

SEQ ID NO: 583869 - DNA, 15 bp, Homo sapiens
ggagttcactatcta

SEQ ID NO: 583870 - DNA, 15 bp, Homo sapiens
gagttcactatctac

SEQ ID NO: 583871 - DNA, 15 bp, Homo sapiens
agttcactatctact

SEQ ID NO: 583872 - DNA, 15 bp, Homo sapiens
gttcactatctactg

SEQ ID NO: 583873 - DNA, 15 bp, Homo sapiens
ttcactatctactga

SEQ ID NO: 583874 - DNA, 15 bp, Homo sapiens
tcactatctactgag

SEQ ID NO: 583875 - DNA, 15 bp, Homo sapiens
cactatctactgaga

SEQ ID NO: 583876 - DNA, 15 bp, Homo sapiens
actatctactgagac

SEQ ID NO: 583877 - DNA, 15 bp, Homo sapiens
ctatctactgagaca

SEQ ID NO: 583878 - DNA, 15 bp, Homo sapiens
tatctactgagacat

SEQ ID NO: 583879 - DNA, 15 bp, Homo sapiens
atctactgagacatc

SEQ ID NO: 583880 - DNA, 15 bp, Homo sapiens
tctactgagacatcc

SEQ ID NO: 583881 - DNA, 15 bp, Homo sapiens
ctactgagacatcct

SEQ ID NO: 583882 - DNA, 15 bp, Homo sapiens
tactgagacatccta

SEQ ID NO: 583883 - DNA, 15 bp, Homo sapiens
actgagacatcctag

SEQ ID NO: 583884 - DNA, 15 bp, Homo sapiens
ctgagacatcctagc

SEQ ID NO: 583885 - DNA, 15 bp, Homo sapiens
tgagacatcctagcc

SEQ ID NO: 583886 - DNA, 15 bp, Homo sapiens
gagacatcctagccc

SEQ ID NO: 583887 - DNA, 15 bp, Homo sapiens
agacatcctagccca

SEQ ID NO: 583888 - DNA, 15 bp, Homo sapiens
gacatcctagcccac

SEQ ID NO: 583889 - DNA, 15 bp, Homo sapiens
acatcctagcccaca

SEQ ID NO: 583890 - DNA, 15 bp, Homo sapiens
catcctagcccacag

SEQ ID NO: 583891 - DNA, 15 bp, Homo sapiens
atcctagcccacagc

SEQ ID NO: 583892 - DNA, 15 bp, Homo sapiens
tcctagcccacagct

SEQ ID NO: 583893 - DNA, 15 bp, Homo sapiens
cctagcccacagctg

SEQ ID NO: 583894 - DNA, 15 bp, Homo sapiens
ctagcccacagctgc

SEQ ID NO: 583895 - DNA, 15 bp, Homo sapiens
tagcccacagctgca

SEQ ID NO: 583896 - DNA, 15 bp, Homo sapiens
agcccacagctgcac

SEQ ID NO: 583897 - DNA, 15 bp, Homo sapiens
gcccacagctgcaca

SEQ ID NO: 583898 - DNA, 15 bp, Homo sapiens
cccacagctgcacag

SEQ ID NO: 583899 - DNA, 15 bp, Homo sapiens
ccacagctgcacagt

SEQ ID NO: 583900 - DNA, 15 bp, Homo sapiens
cacagctgcacagtt

SEQ ID NO: 583901 - DNA, 15 bp, Homo sapiens
acagctgcacagttc

SEQ ID NO: 583902 - DNA, 15 bp, Homo sapiens
cagctgcacagttct

SEQ ID NO: 583903 - DNA, 15 bp, Homo sapiens
agctgcacagttctg

SEQ ID NO: 583904 - DNA, 15 bp, Homo sapiens
gctgcacagttctgt

SEQ ID NO: 583905 - DNA, 15 bp, Homo sapiens
ctgcacagttctgtc

SEQ ID NO: 583906 - DNA, 15 bp, Homo sapiens
tgcacagttctgtct

SEQ ID NO: 583907 - DNA, 15 bp, Homo sapiens
gcacagttctgtctt

SEQ ID NO: 583908 - DNA, 15 bp, Homo sapiens
cacagttctgtcttt

SEQ ID NO: 583909 - DNA, 15 bp, Homo sapiens
acagttctgtctttt

SEQ ID NO: 583910 - DNA, 15 bp, Homo sapiens
cagttctgtcttttt

SEQ ID NO: 583911 - DNA, 15 bp, Homo sapiens
agttctgtcttttta

SEQ ID NO: 583912 - DNA, 15 bp, Homo sapiens
gttctgtctttttag

SEQ ID NO: 583913 - DNA, 15 bp, Homo sapiens
ttctgtctttttaga

SEQ ID NO: 583914 - DNA, 15 bp, Homo sapiens
tctgtctttttagaa

SEQ ID NO: 583915 - DNA, 15 bp, Homo sapiens
ctgtctttttagaaa

SEQ ID NO: 583916 - DNA, 15 bp, Homo sapiens
tgtctttttagaaag

SEQ ID NO: 583917 - DNA, 15 bp, Homo sapiens
gtctttttagaaagc

SEQ ID NO: 583918 - DNA, 15 bp, Homo sapiens
tctttttagaaagct

SEQ ID NO: 583919 - DNA, 15 bp, Homo sapiens
ctttttagaaagctc

SEQ ID NO: 583920 - DNA, 15 bp, Homo sapiens
tttttagaaagctct

SEQ ID NO: 583921 - DNA, 15 bp, Homo sapiens
ttttagaaagctcta

SEQ ID NO: 583922 - DNA, 15 bp, Homo sapiens
tttagaaagctctaa

SEQ ID NO: 583923 - DNA, 15 bp, Homo sapiens
ttagaaagctctaag

SEQ ID NO: 583924 - DNA, 15 bp, Homo sapiens
tagaaagctctaagc

SEQ ID NO: 583925 - DNA, 15 bp, Homo sapiens
agaaagctctaagca

SEQ ID NO: 583926 - DNA, 15 bp, Homo sapiens
gaaagctctaagcag

SEQ ID NO: 583927 - DNA, 15 bp, Homo sapiens
aaagctctaagcaga

SEQ ID NO: 583928 - DNA, 15 bp, Homo sapiens
aagctctaagcagaa

SEQ ID NO: 583929 - DNA, 15 bp, Homo sapiens
agctctaagcagaaa

SEQ ID NO: 583930 - DNA, 15 bp, Homo sapiens
gctctaagcagaaac

SEQ ID NO: 583931 - DNA, 15 bp, Homo sapiens
ctctaagcagaaaca

SEQ ID NO: 583932 - DNA, 15 bp, Homo sapiens
tctaagcagaaacaa

SEQ ID NO: 583933 - DNA, 15 bp, Homo sapiens
ctaagcagaaacaat

SEQ ID NO: 583934 - DNA, 15 bp, Homo sapiens
taagcagaaacaatg

SEQ ID NO: 583935 - DNA, 15 bp, Homo sapiens
aagcagaaacaatgt

SEQ ID NO: 583936 - DNA, 15 bp, Homo sapiens
agcagaaacaatgtt

SEQ ID NO: 583937 - DNA, 15 bp, Homo sapiens
gcagaaacaatgttc

SEQ ID NO: 583938 - DNA, 15 bp, Homo sapiens
cagaaacaatgttca

SEQ ID NO: 583939 - DNA, 15 bp, Homo sapiens
agaaacaatgttcat

SEQ ID NO: 583940 - DNA, 15 bp, Homo sapiens
gaaacaatgttcatc

SEQ ID NO: 583941 - DNA, 15 bp, Homo sapiens
aaacaatgttcatcc

SEQ ID NO: 583942 - DNA, 15 bp, Homo sapiens
aacaatgttcatcca

SEQ ID NO: 583943 - DNA, 15 bp, Homo sapiens
acaatgttcatccat

SEQ ID NO: 583944 - DNA, 15 bp, Homo sapiens
caatgttcatccatc

SEQ ID NO: 583945 - DNA, 15 bp, Homo sapiens
aatgttcatccatcc

SEQ ID NO: 583946 - DNA, 15 bp, Homo sapiens
atgttcatccatcct

SEQ ID NO: 583947 - DNA, 15 bp, Homo sapiens
tgttcatccatcctc

SEQ ID NO: 583948 - DNA, 15 bp, Homo sapiens
gttcatccatcctcc

SEQ ID NO: 583949 - DNA, 15 bp, Homo sapiens
ttcatccatcctcct

SEQ ID NO: 583950 - DNA, 15 bp, Homo sapiens
tcatccatcctcctc

SEQ ID NO: 583951 - DNA, 15 bp, Homo sapiens
catccatcctcctcg

SEQ ID NO: 583952 - DNA, 15 bp, Homo sapiens
atccatcctcctcgg

SEQ ID NO: 583953 - DNA, 15 bp, Homo sapiens
tccatcctcctcggg

SEQ ID NO: 583954 - DNA, 15 bp, Homo sapiens
ccatcctcctcggga

SEQ ID NO: 583955 - DNA, 15 bp, Homo sapiens
catcctcctcgggac

SEQ ID NO: 583956 - DNA, 15 bp, Homo sapiens
atcctcctcgggaca

SEQ ID NO: 583957 - DNA, 15 bp, Homo sapiens
tcctcctcgggacag

SEQ ID NO: 583958 - DNA, 15 bp, Homo sapiens
cctcctcgggacagc

SEQ ID NO: 583959 - DNA, 15 bp, Homo sapiens
ctcctcgggacagcc

SEQ ID NO: 583960 - DNA, 15 bp, Homo sapiens
tcctcgggacagccc

SEQ ID NO: 583961 - DNA, 15 bp, Homo sapiens
cctcgggacagccct

SEQ ID NO: 583962 - DNA, 15 bp, Homo sapiens
ctcgggacagccctt

SEQ ID NO: 583963 - DNA, 15 bp, Homo sapiens
tcgggacagcccttg

SEQ ID NO: 583964 - DNA, 15 bp, Homo sapiens
cgggacagcccttga

SEQ ID NO: 583965 - DNA, 15 bp, Homo sapiens
gggacagcccttgag

SEQ ID NO: 583966 - DNA, 15 bp, Homo sapiens
ggacagcccttgagc

SEQ ID NO: 583967 - DNA, 15 bp, Homo sapiens
gacagcccttgagct

SEQ ID NO: 583968 - DNA, 15 bp, Homo sapiens
acagcccttgagcta

SEQ ID NO: 583969 - DNA, 15 bp, Homo sapiens
cagcccttgagctac

SEQ ID NO: 583970 - DNA, 15 bp, Homo sapiens
agcccttgagctact

SEQ ID NO: 583971 - DNA, 15 bp, Homo sapiens
gcccttgagctactg

SEQ ID NO: 583972 - DNA, 15 bp, Homo sapiens
cccttgagctactga

SEQ ID NO: 583973 - DNA, 15 bp, Homo sapiens
ccttgagctactgaa

SEQ ID NO: 583974 - DNA, 15 bp, Homo sapiens
cttgagctactgaag

SEQ ID NO: 583975 - DNA, 15 bp, Homo sapiens
ttgagctactgaaga

SEQ ID NO: 583976 - DNA, 15 bp, Homo sapiens
tgagctactgaagac

SEQ ID NO: 583977 - DNA, 15 bp, Homo sapiens
gagctactgaagact

SEQ ID NO: 583978 - DNA, 15 bp, Homo sapiens
agctactgaagactc

SEQ ID NO: 583979 - DNA, 15 bp, Homo sapiens
gctactgaagactct

SEQ ID NO: 583980 - DNA, 15 bp, Homo sapiens
ctactgaagactcta

SEQ ID NO: 583981 - DNA, 15 bp, Homo sapiens
tactgaagactctaa

SEQ ID NO: 583982 - DNA, 15 bp, Homo sapiens
actgaagactctaag

SEQ ID NO: 583983 - DNA, 15 bp, Homo sapiens
ctgaagactctaagc

SEQ ID NO: 583984 - DNA, 15 bp, Homo sapiens
tgaagactctaagca

SEQ ID NO: 583985 - DNA, 15 bp, Homo sapiens
gaagactctaagcat

SEQ ID NO: 583986 - DNA, 15 bp, Homo sapiens
aagactctaagcatg

SEQ ID NO: 583987 - DNA, 15 bp, Homo sapiens
agactctaagcatgt

SEQ ID NO: 583988 - DNA, 15 bp, Homo sapiens
gactctaagcatgtc

SEQ ID NO: 583989 - DNA, 15 bp, Homo sapiens
actctaagcatgtcc

SEQ ID NO: 583990 - DNA, 15 bp, Homo sapiens
ctctaagcatgtcct

SEQ ID NO: 583991 - DNA, 15 bp, Homo sapiens
tctaagcatgtcctg

SEQ ID NO: 583992 - DNA, 15 bp, Homo sapiens
ctaagcatgtcctgg

SEQ ID NO: 583993 - DNA, 15 bp, Homo sapiens
taagcatgtcctggt

SEQ ID NO: 583994 - DNA, 15 bp, Homo sapiens
aagcatgtcctggtc

SEQ ID NO: 583995 - DNA, 15 bp, Homo sapiens
agcatgtcctggtca

SEQ ID NO: 583996 - DNA, 15 bp, Homo sapiens
gcatgtcctggtcat

SEQ ID NO: 583997 - DNA, 15 bp, Homo sapiens
catgtcctggtcatc

SEQ ID NO: 583998 - DNA, 15 bp, Homo sapiens
atgtcctggtcatcc

SEQ ID NO: 583999 - DNA, 15 bp, Homo sapiens
tgtcctggtcatcct

SEQ ID NO: 584000 - DNA, 15 bp, Homo sapiens
gtcctggtcatcctc

SEQ ID NO: 584001 - DNA, 15 bp, Homo sapiens
tcctggtcatcctcc

SEQ ID NO: 584002 - DNA, 15 bp, Homo sapiens
cctggtcatcctcca

SEQ ID NO: 584003 - DNA, 15 bp, Homo sapiens
ctggtcatcctccat

SEQ ID NO: 584004 - DNA, 15 bp, Homo sapiens
tggtcatcctccatg

SEQ ID NO: 584005 - DNA, 15 bp, Homo sapiens
ggtcatcctccatga

SEQ ID NO: 584006 - DNA, 15 bp, Homo sapiens
gtcatcctccatgag

SEQ ID NO: 584007 - DNA, 15 bp, Homo sapiens
tcatcctccatgagc

SEQ ID NO: 584008 - DNA, 15 bp, Homo sapiens
catcctccatgagcc

SEQ ID NO: 584009 - DNA, 15 bp, Homo sapiens
atcctccatgagcca

SEQ ID NO: 584010 - DNA, 15 bp, Homo sapiens
tcctccatgagccat

SEQ ID NO: 584011 - DNA, 15 bp, Homo sapiens
cctccatgagccatc

SEQ ID NO: 584012 - DNA, 15 bp, Homo sapiens
ctccatgagccatca

SEQ ID NO: 584013 - DNA, 15 bp, Homo sapiens
tccatgagccatcat

SEQ ID NO: 584014 - DNA, 15 bp, Homo sapiens
ccatgagccatcatc

SEQ ID NO: 584015 - DNA, 15 bp, Homo sapiens
catgagccatcatct

SEQ ID NO: 584016 - DNA, 15 bp, Homo sapiens
atgagccatcatctc

SEQ ID NO: 584017 - DNA, 15 bp, Homo sapiens
tgagccatcatctct

SEQ ID NO: 584018 - DNA, 15 bp, Homo sapiens
gagccatcatctctg

SEQ ID NO: 584019 - DNA, 15 bp, Homo sapiens
agccatcatctctga

SEQ ID NO: 584020 - DNA, 15 bp, Homo sapiens
gccatcatctctgag

SEQ ID NO: 584021 - DNA, 15 bp, Homo sapiens
ccatcatctctgagg

SEQ ID NO: 584022 - DNA, 15 bp, Homo sapiens
catcatctctgaggc

SEQ ID NO: 584023 - DNA, 15 bp, Homo sapiens
atcatctctgaggcc

SEQ ID NO: 584024 - DNA, 15 bp, Homo sapiens
tcatctctgaggccc

SEQ ID NO: 584025 - DNA, 15 bp, Homo sapiens
catctctgaggccct

SEQ ID NO: 584026 - DNA, 15 bp, Homo sapiens
atctctgaggccctc

SEQ ID NO: 584027 - DNA, 15 bp, Homo sapiens
tctctgaggccctcc

SEQ ID NO: 584028 - DNA, 15 bp, Homo sapiens
ctctgaggccctccc

SEQ ID NO: 584029 - DNA, 15 bp, Homo sapiens
tctgaggccctcccc

SEQ ID NO: 584030 - DNA, 15 bp, Homo sapiens
ctgaggccctcccct

SEQ ID NO: 584031 - DNA, 15 bp, Homo sapiens
tgaggccctcccctt

SEQ ID NO: 584032 - DNA, 15 bp, Homo sapiens
gaggccctccccttc

SEQ ID NO: 584033 - DNA, 15 bp, Homo sapiens
aggccctccccttct

SEQ ID NO: 584034 - DNA, 15 bp, Homo sapiens
ggccctccccttctt

SEQ ID NO: 584035 - DNA, 15 bp, Homo sapiens
gccctccccttcttg

SEQ ID NO: 584036 - DNA, 15 bp, Homo sapiens
ccctccccttcttgg

SEQ ID NO: 584037 - DNA, 15 bp, Homo sapiens
cctccccttcttggc

SEQ ID NO: 584038 - DNA, 15 bp, Homo sapiens
ctccccttcttggcc

SEQ ID NO: 584039 - DNA, 15 bp, Homo sapiens
tccccttcttggccc

SEQ ID NO: 584040 - DNA, 15 bp, Homo sapiens
ccccttcttggcccc

SEQ ID NO: 584041 - DNA, 15 bp, Homo sapiens
cccttcttggcccct

SEQ ID NO: 584042 - DNA, 15 bp, Homo sapiens
ccttcttggcccctc

SEQ ID NO: 584043 - DNA, 15 bp, Homo sapiens
cttcttggcccctct

SEQ ID NO: 584044 - DNA, 15 bp, Homo sapiens
ttcttggcccctctt

SEQ ID NO: 584045 - DNA, 15 bp, Homo sapiens
tcttggcccctcttc

SEQ ID NO: 584046 - DNA, 15 bp, Homo sapiens
cttggcccctcttct

SEQ ID NO: 584047 - DNA, 15 bp, Homo sapiens
ttggcccctcttctc

SEQ ID NO: 584048 - DNA, 15 bp, Homo sapiens
tggcccctcttctct

SEQ ID NO: 584049 - DNA, 15 bp, Homo sapiens
ggcccctcttctctg

SEQ ID NO: 584050 - DNA, 15 bp, Homo sapiens
gcccctcttctctgg

SEQ ID NO: 584051 - DNA, 15 bp, Homo sapiens
cccctcttctctgga

SEQ ID NO: 584052 - DNA, 15 bp, Homo sapiens
ccctcttctctggac

SEQ ID NO: 584053 - DNA, 15 bp, Homo sapiens
cctcttctctggaca

SEQ ID NO: 584054 - DNA, 15 bp, Homo sapiens
ctcttctctggacag

SEQ ID NO: 584055 - DNA, 15 bp, Homo sapiens
tcttctctggacagg

SEQ ID NO: 584056 - DNA, 15 bp, Homo sapiens
cttctctggacaggt

SEQ ID NO: 584057 - DNA, 15 bp, Homo sapiens
ttctctggacaggtt

SEQ ID NO: 584058 - DNA, 15 bp, Homo sapiens
tctctggacaggttc

SEQ ID NO: 584059 - DNA, 15 bp, Homo sapiens
ctctggacaggttct

SEQ ID NO: 584060 - DNA, 15 bp, Homo sapiens
tctggacaggttctg

SEQ ID NO: 584061 - DNA, 15 bp, Homo sapiens
ctggacaggttctgg

SEQ ID NO: 584062 - DNA, 15 bp, Homo sapiens
tggacaggttctgga

SEQ ID NO: 584063 - DNA, 15 bp, Homo sapiens
ggacaggttctggac

SEQ ID NO: 584064 - DNA, 15 bp, Homo sapiens
gacaggttctggaca

SEQ ID NO: 584065 - DNA, 15 bp, Homo sapiens
acaggttctggacag

SEQ ID NO: 584066 - DNA, 15 bp, Homo sapiens
caggttctggacagt

SEQ ID NO: 584067 - DNA, 15 bp, Homo sapiens
aggttctggacagtc

SEQ ID NO: 584068 - DNA, 15 bp, Homo sapiens
ggttctggacagtct

SEQ ID NO: 584069 - DNA, 15 bp, Homo sapiens
gttctggacagtctt

SEQ ID NO: 584070 - DNA, 15 bp, Homo sapiens
ttctggacagtcttg

SEQ ID NO: 584071 - DNA, 15 bp, Homo sapiens
tctggacagtcttgc

SEQ ID NO: 584072 - DNA, 15 bp, Homo sapiens
ctggacagtcttgcc

SEQ ID NO: 584073 - DNA, 15 bp, Homo sapiens
tggacagtcttgccc

SEQ ID NO: 584074 - DNA, 15 bp, Homo sapiens
ggacagtcttgccct

SEQ ID NO: 584075 - DNA, 15 bp, Homo sapiens
gacagtcttgccctt

SEQ ID NO: 584076 - DNA, 15 bp, Homo sapiens
acagtcttgcccttc

SEQ ID NO: 584077 - DNA, 15 bp, Homo sapiens
cagtcttgcccttcc

SEQ ID NO: 584078 - DNA, 15 bp, Homo sapiens
agtcttgcccttcca

SEQ ID NO: 584079 - DNA, 15 bp, Homo sapiens
gtcttgcccttccaa

SEQ ID NO: 584080 - DNA, 15 bp, Homo sapiens
tcttgcccttccaaa

SEQ ID NO: 584081 - DNA, 15 bp, Homo sapiens
cttgcccttccaaaa

SEQ ID NO: 584082 - DNA, 15 bp, Homo sapiens
ttgcccttccaaaat

SEQ ID NO: 584083 - DNA, 15 bp, Homo sapiens
tgcccttccaaaatt

SEQ ID NO: 584084 - DNA, 15 bp, Homo sapiens
gcccttccaaaattc

SEQ ID NO: 584085 - DNA, 15 bp, Homo sapiens
cccttccaaaattcc

SEQ ID NO: 584086 - DNA, 15 bp, Homo sapiens
ccttccaaaattcct

SEQ ID NO: 584087 - DNA, 15 bp, Homo sapiens
cttccaaaattcctg

SEQ ID NO: 584088 - DNA, 15 bp, Homo sapiens
ttccaaaattcctgg

SEQ ID NO: 584089 - DNA, 15 bp, Homo sapiens
tccaaaattcctgga

SEQ ID NO: 584090 - DNA, 15 bp, Homo sapiens
ccaaaattcctggaa

SEQ ID NO: 584091 - DNA, 15 bp, Homo sapiens
caaaattcctggaaa

SEQ ID NO: 584092 - DNA, 15 bp, Homo sapiens
aaaattcctggaaag

SEQ ID NO: 584093 - DNA, 15 bp, Homo sapiens
aaattcctggaaagc

SEQ ID NO: 584094 - DNA, 15 bp, Homo sapiens
aattcctggaaagca

SEQ ID NO: 584095 - DNA, 15 bp, Homo sapiens
attcctggaaagcag

SEQ ID NO: 584096 - DNA, 15 bp, Homo sapiens
ttcctggaaagcagg

SEQ ID NO: 584097 - DNA, 15 bp, Homo sapiens
tcctggaaagcagga

SEQ ID NO: 584098 - DNA, 15 bp, Homo sapiens
cctggaaagcaggaa

SEQ ID NO: 584099 - DNA, 15 bp, Homo sapiens
ctggaaagcaggaac

SEQ ID NO: 584100 - DNA, 15 bp, Homo sapiens
tggaaagcaggaact

SEQ ID NO: 584101 - DNA, 15 bp, Homo sapiens
ggaaagcaggaactg

SEQ ID NO: 584102 - DNA, 15 bp, Homo sapiens
gaaagcaggaactgt

SEQ ID NO: 584103 - DNA, 15 bp, Homo sapiens
aaagcaggaactgtt

SEQ ID NO: 584104 - DNA, 15 bp, Homo sapiens
aagcaggaactgttc

SEQ ID NO: 584105 - DNA, 15 bp, Homo sapiens
agcaggaactgttcc

SEQ ID NO: 584106 - DNA, 15 bp, Homo sapiens
gcaggaactgttcct

SEQ ID NO: 584107 - DNA, 15 bp, Homo sapiens
caggaactgttcctg

SEQ ID NO: 584108 - DNA, 15 bp, Homo sapiens
aggaactgttcctgc

SEQ ID NO: 584109 - DNA, 15 bp, Homo sapiens
ggaactgttcctgct

SEQ ID NO: 584110 - DNA, 15 bp, Homo sapiens
gaactgttcctgcta

SEQ ID NO: 584111 - DNA, 15 bp, Homo sapiens
aactgttcctgctac

SEQ ID NO: 584112 - DNA, 15 bp, Homo sapiens
actgttcctgctaca

SEQ ID NO: 584113 - DNA, 15 bp, Homo sapiens
ctgttcctgctacaa

SEQ ID NO: 584114 - DNA, 15 bp, Homo sapiens
tgttcctgctacaat

SEQ ID NO: 584115 - DNA, 15 bp, Homo sapiens
gttcctgctacaatg

SEQ ID NO: 584116 - DNA, 15 bp, Homo sapiens
ttcctgctacaatga

SEQ ID NO: 584117 - DNA, 15 bp, Homo sapiens
tcctgctacaatgac

SEQ ID NO: 584118 - DNA, 15 bp, Homo sapiens
cctgctacaatgact

SEQ ID NO: 584119 - DNA, 15 bp, Homo sapiens
ctgctacaatgactc

SEQ ID NO: 584120 - DNA, 15 bp, Homo sapiens
tgctacaatgactct

SEQ ID NO: 584121 - DNA, 15 bp, Homo sapiens
gctacaatgactctc

SEQ ID NO: 584122 - DNA, 15 bp, Homo sapiens
ctacaatgactctca

SEQ ID NO: 584123 - DNA, 15 bp, Homo sapiens
tacaatgactctcaa

SEQ ID NO: 584124 - DNA, 15 bp, Homo sapiens
acaatgactctcaac

SEQ ID NO: 584125 - DNA, 15 bp, Homo sapiens
caatgactctcaact

SEQ ID NO: 584126 - DNA, 15 bp, Homo sapiens
aatgactctcaactc

SEQ ID NO: 584127 - DNA, 15 bp, Homo sapiens
atgactctcaactcc

SEQ ID NO: 584128 - DNA, 15 bp, Homo sapiens
tgactctcaactcca

SEQ ID NO: 584129 - DNA, 15 bp, Homo sapiens
gactctcaactccag

SEQ ID NO: 584130 - DNA, 15 bp, Homo sapiens
actctcaactccagt

SEQ ID NO: 584131 - DNA, 15 bp, Homo sapiens
ctctcaactccagtg

SEQ ID NO: 584132 - DNA, 15 bp, Homo sapiens
tctcaactccagtgc

SEQ ID NO: 584133 - DNA, 15 bp, Homo sapiens
ctcaactccagtgca

SEQ ID NO: 584134 - DNA, 15 bp, Homo sapiens
tcaactccagtgcag

SEQ ID NO: 584135 - DNA, 15 bp, Homo sapiens
caactccagtgcagt

SEQ ID NO: 584136 - DNA, 15 bp, Homo sapiens
aactccagtgcagta

SEQ ID NO: 584137 - DNA, 15 bp, Homo sapiens
actccagtgcagtac

SEQ ID NO: 584138 - DNA, 15 bp, Homo sapiens
ctccagtgcagtaca

SEQ ID NO: 584139 - DNA, 15 bp, Homo sapiens
tccagtgcagtacag

SEQ ID NO: 584140 - DNA, 15 bp, Homo sapiens
ccagtgcagtacaga

SEQ ID NO: 584141 - DNA, 15 bp, Homo sapiens
cagtgcagtacagac

SEQ ID NO: 584142 - DNA, 15 bp, Homo sapiens
agtgcagtacagact

SEQ ID NO: 584143 - DNA, 15 bp, Homo sapiens
gtgcagtacagactg

SEQ ID NO: 584144 - DNA, 15 bp, Homo sapiens
tgcagtacagactgt

SEQ ID NO: 584145 - DNA, 15 bp, Homo sapiens
gcagtacagactgtt

SEQ ID NO: 584146 - DNA, 15 bp, Homo sapiens
cagtacagactgttg

SEQ ID NO: 584147 - DNA, 15 bp, Homo sapiens
agtacagactgttgg

SEQ ID NO: 584148 - DNA, 15 bp, Homo sapiens
gtacagactgttggt

SEQ ID NO: 584149 - DNA, 15 bp, Homo sapiens
tacagactgttggtg

SEQ ID NO: 584150 - DNA, 15 bp, Homo sapiens
acagactgttggtgt

SEQ ID NO: 584151 - DNA, 15 bp, Homo sapiens
cagactgttggtgtc

SEQ ID NO: 584152 - DNA, 15 bp, Homo sapiens
agactgttggtgtca

SEQ ID NO: 584153 - DNA, 15 bp, Homo sapiens
gactgttggtgtcac

SEQ ID NO: 584154 - DNA, 15 bp, Homo sapiens
actgttggtgtcacc

SEQ ID NO: 584155 - DNA, 15 bp, Homo sapiens
ctgttggtgtcaccc

SEQ ID NO: 584156 - DNA, 15 bp, Homo sapiens
tgttggtgtcacccc

SEQ ID NO: 584157 - DNA, 15 bp, Homo sapiens
gttggtgtcacccct

SEQ ID NO: 584158 - DNA, 15 bp, Homo sapiens
ttggtgtcacccctt

SEQ ID NO: 584159 - DNA, 15 bp, Homo sapiens
tggtgtcacccctta

SEQ ID NO: 584160 - DNA, 15 bp, Homo sapiens
ggtgtcaccccttat

SEQ ID NO: 584161 - DNA, 15 bp, Homo sapiens
gtgtcaccccttatc

SEQ ID NO: 584162 - DNA, 15 bp, Homo sapiens
tgtcaccccttatcc

SEQ ID NO: 584163 - DNA, 15 bp, Homo sapiens
gtcaccccttatcct

SEQ ID NO: 584164 - DNA, 15 bp, Homo sapiens
tcaccccttatcctg

SEQ ID NO: 584165 - DNA, 15 bp, Homo sapiens
caccccttatcctga

SEQ ID NO: 584166 - DNA, 15 bp, Homo sapiens
accccttatcctgaa

SEQ ID NO: 584167 - DNA, 15 bp, Homo sapiens
ccccttatcctgaag

SEQ ID NO: 584168 - DNA, 15 bp, Homo sapiens
cccttatcctgaaga

SEQ ID NO: 584169 - DNA, 15 bp, Homo sapiens
ccttatcctgaagaa

SEQ ID NO: 584170 - DNA, 15 bp, Homo sapiens
cttatcctgaagaag

SEQ ID NO: 584171 - DNA, 15 bp, Homo sapiens
ttatcctgaagaaga

SEQ ID NO: 584172 - DNA, 15 bp, Homo sapiens
tatcctgaagaagag

SEQ ID NO: 584173 - DNA, 15 bp, Homo sapiens
atcctgaagaagagg

SEQ ID NO: 584174 - DNA, 15 bp, Homo sapiens
tcctgaagaagaggc

SEQ ID NO: 584175 - DNA, 15 bp, Homo sapiens
cctgaagaagaggca

SEQ ID NO: 584176 - DNA, 15 bp, Homo sapiens
ctgaagaagaggcac

SEQ ID NO: 584177 - DNA, 15 bp, Homo sapiens
tgaagaagaggcact

SEQ ID NO: 584178 - DNA, 15 bp, Homo sapiens
gaagaagaggcactg

SEQ ID NO: 584179 - DNA, 15 bp, Homo sapiens
aagaagaggcactga

SEQ ID NO: 584180 - DNA, 15 bp, Homo sapiens
agaagaggcactgag

SEQ ID NO: 584181 - DNA, 15 bp, Homo sapiens
gaagaggcactgaga

SEQ ID NO: 584182 - DNA, 15 bp, Homo sapiens
aagaggcactgagac

SEQ ID NO: 584183 - DNA, 15 bp, Homo sapiens
agaggcactgagaca

SEQ ID NO: 584184 - DNA, 15 bp, Homo sapiens
gaggcactgagacag

SEQ ID NO: 584185 - DNA, 15 bp, Homo sapiens
aggcactgagacagg

SEQ ID NO: 584186 - DNA, 15 bp, Homo sapiens
ggcactgagacagga

SEQ ID NO: 584187 - DNA, 15 bp, Homo sapiens
gcactgagacaggac

SEQ ID NO: 584188 - DNA, 15 bp, Homo sapiens
cactgagacaggaca

SEQ ID NO: 584189 - DNA, 15 bp, Homo sapiens
actgagacaggacaa

SEQ ID NO: 584190 - DNA, 15 bp, Homo sapiens
ctgagacaggacaag

SEQ ID NO: 584191 - DNA, 15 bp, Homo sapiens
tgagacaggacaagg

SEQ ID NO: 584192 - DNA, 15 bp, Homo sapiens
gagacaggacaaggg

SEQ ID NO: 584193 - DNA, 15 bp, Homo sapiens
agacaggacaagggt

SEQ ID NO: 584194 - DNA, 15 bp, Homo sapiens
gacaggacaagggtg

SEQ ID NO: 584195 - DNA, 15 bp, Homo sapiens
acaggacaagggtgg

SEQ ID NO: 584196 - DNA, 15 bp, Homo sapiens
caggacaagggtggg

SEQ ID NO: 584197 - DNA, 15 bp, Homo sapiens
aggacaagggtgggt

SEQ ID NO: 584198 - DNA, 15 bp, Homo sapiens
ggacaagggtgggtg

SEQ ID NO: 584199 - DNA, 15 bp, Homo sapiens
gacaagggtgggtgc

SEQ ID NO: 584200 - DNA, 15 bp, Homo sapiens
acaagggtgggtgcc

SEQ ID NO: 584201 - DNA, 15 bp, Homo sapiens
caagggtgggtgccc

SEQ ID NO: 584202 - DNA, 15 bp, Homo sapiens
aagggtgggtgccca

SEQ ID NO: 584203 - DNA, 15 bp, Homo sapiens
agggtgggtgcccag

SEQ ID NO: 584204 - DNA, 15 bp, Homo sapiens
gggtgggtgcccagg

SEQ ID NO: 584205 - DNA, 15 bp, Homo sapiens
ggtgggtgcccagga

SEQ ID NO: 584206 - DNA, 15 bp, Homo sapiens
gtgggtgcccaggag

SEQ ID NO: 584207 - DNA, 15 bp, Homo sapiens
tgggtgcccaggagg

SEQ ID NO: 584208 - DNA, 15 bp, Homo sapiens
gggtgcccaggaggg

SEQ ID NO: 584209 - DNA, 15 bp, Homo sapiens
ggtgcccaggagggc

SEQ ID NO: 584210 - DNA, 15 bp, Homo sapiens
gtgcccaggagggct

SEQ ID NO: 584211 - DNA, 15 bp, Homo sapiens
tgcccaggagggctg

SEQ ID NO: 584212 - DNA, 15 bp, Homo sapiens
gcccaggagggctgg

SEQ ID NO: 584213 - DNA, 15 bp, Homo sapiens
cccaggagggctggc

SEQ ID NO: 584214 - DNA, 15 bp, Homo sapiens
ccaggagggctggca

SEQ ID NO: 584215 - DNA, 15 bp, Homo sapiens
caggagggctggcat

SEQ ID NO: 584216 - DNA, 15 bp, Homo sapiens
aggagggctggcatg

SEQ ID NO: 584217 - DNA, 15 bp, Homo sapiens
ggagggctggcatga

SEQ ID NO: 584218 - DNA, 15 bp, Homo sapiens
gagggctggcatgag

SEQ ID NO: 584219 - DNA, 15 bp, Homo sapiens
agggctggcatgagt

SEQ ID NO: 584220 - DNA, 15 bp, Homo sapiens
gggctggcatgagtc

SEQ ID NO: 584221 - DNA, 15 bp, Homo sapiens
ggctggcatgagtca

SEQ ID NO: 584222 - DNA, 15 bp, Homo sapiens
gctggcatgagtcat

SEQ ID NO: 584223 - DNA, 15 bp, Homo sapiens
ctggcatgagtcatg

SEQ ID NO: 584224 - DNA, 15 bp, Homo sapiens
tggcatgagtcatga

SEQ ID NO: 584225 - DNA, 15 bp, Homo sapiens
ggcatgagtcatgag

SEQ ID NO: 584226 - DNA, 15 bp, Homo sapiens
gcatgagtcatgaga

SEQ ID NO: 584227 - DNA, 15 bp, Homo sapiens
catgagtcatgagaa

SEQ ID NO: 584228 - DNA, 15 bp, Homo sapiens
atgagtcatgagaat

SEQ ID NO: 584229 - DNA, 15 bp, Homo sapiens
tgagtcatgagaatc

SEQ ID NO: 584230 - DNA, 15 bp, Homo sapiens
gagtcatgagaatct

SEQ ID NO: 584231 - DNA, 15 bp, Homo sapiens
agtcatgagaatctg

SEQ ID NO: 584232 - DNA, 15 bp, Homo sapiens
gtcatgagaatctgg

SEQ ID NO: 584233 - DNA, 15 bp, Homo sapiens
tcatgagaatctggt

SEQ ID NO: 584234 - DNA, 15 bp, Homo sapiens
catgagaatctggtc

SEQ ID NO: 584235 - DNA, 15 bp, Homo sapiens
atgagaatctggtcc

SEQ ID NO: 584236 - DNA, 15 bp, Homo sapiens
tgagaatctggtccc

SEQ ID NO: 584237 - DNA, 15 bp, Homo sapiens
gagaatctggtcccg

SEQ ID NO: 584238 - DNA, 15 bp, Homo sapiens
agaatctggtcccgg

SEQ ID NO: 584239 - DNA, 15 bp, Homo sapiens
gaatctggtcccgga

SEQ ID NO: 584240 - DNA, 15 bp, Homo sapiens
aatctggtcccggag

SEQ ID NO: 584241 - DNA, 15 bp, Homo sapiens
atctggtcccggaga

SEQ ID NO: 584242 - DNA, 15 bp, Homo sapiens
tctggtcccggagaa

SEQ ID NO: 584243 - DNA, 15 bp, Homo sapiens
ctggtcccggagaat

SEQ ID NO: 584244 - DNA, 15 bp, Homo sapiens
tggtcccggagaatt

SEQ ID NO: 584245 - DNA, 15 bp, Homo sapiens
ggtcccggagaatta

SEQ ID NO: 584246 - DNA, 15 bp, Homo sapiens
gtcccggagaattag

SEQ ID NO: 584247 - DNA, 15 bp, Homo sapiens
tcccggagaattaga

SEQ ID NO: 584248 - DNA, 15 bp, Homo sapiens
cccggagaattagac

SEQ ID NO: 584249 - DNA, 15 bp, Homo sapiens
ccggagaattagacg

SEQ ID NO: 584250 - DNA, 15 bp, Homo sapiens
cggagaattagacgg

SEQ ID NO: 584251 - DNA, 15 bp, Homo sapiens
ggagaattagacggt

SEQ ID NO: 584252 - DNA, 15 bp, Homo sapiens
gagaattagacggtg

SEQ ID NO: 584253 - DNA, 15 bp, Homo sapiens
agaattagacggtgt

SEQ ID NO: 584254 - DNA, 15 bp, Homo sapiens
gaattagacggtgtg

SEQ ID NO: 584255 - DNA, 15 bp, Homo sapiens
aattagacggtgtgg

SEQ ID NO: 584256 - DNA, 15 bp, Homo sapiens
attagacggtgtggg

SEQ ID NO: 584257 - DNA, 15 bp, Homo sapiens
ttagacggtgtgggg

SEQ ID NO: 584258 - DNA, 15 bp, Homo sapiens
tagacggtgtgggga

SEQ ID NO: 584259 - DNA, 15 bp, Homo sapiens
agacggtgtggggaa

SEQ ID NO: 584260 - DNA, 15 bp, Homo sapiens
gacggtgtggggaag

SEQ ID NO: 584261 - DNA, 15 bp, Homo sapiens
acggtgtggggaagt

SEQ ID NO: 584262 - DNA, 15 bp, Homo sapiens
cggtgtggggaagta

SEQ ID NO: 584263 - DNA, 15 bp, Homo sapiens
ggtgtggggaagtag

SEQ ID NO: 584264 - DNA, 15 bp, Homo sapiens
gtgtggggaagtagg

SEQ ID NO: 584265 - DNA, 15 bp, Homo sapiens
tgtggggaagtaggg

SEQ ID NO: 584266 - DNA, 15 bp, Homo sapiens
gtggggaagtagggg

SEQ ID NO: 584267 - DNA, 15 bp, Homo sapiens
tggggaagtaggggt

SEQ ID NO: 584268 - DNA, 15 bp, Homo sapiens
ggggaagtaggggtg

SEQ ID NO: 584269 - DNA, 15 bp, Homo sapiens
gggaagtaggggtgt

SEQ ID NO: 584270 - DNA, 15 bp, Homo sapiens
ggaagtaggggtgtt

SEQ ID NO: 584271 - DNA, 15 bp, Homo sapiens
gaagtaggggtgttg

SEQ ID NO: 584272 - DNA, 15 bp, Homo sapiens
aagtaggggtgttgg

SEQ ID NO: 584273 - DNA, 15 bp, Homo sapiens
agtaggggtgttggg

SEQ ID NO: 584274 - DNA, 15 bp, Homo sapiens
gtaggggtgttgggc

SEQ ID NO: 584275 - DNA, 15 bp, Homo sapiens
taggggtgttgggcc

SEQ ID NO: 584276 - DNA, 15 bp, Homo sapiens
aggggtgttgggccg

SEQ ID NO: 584277 - DNA, 15 bp, Homo sapiens
ggggtgttgggccgc

SEQ ID NO: 584278 - DNA, 15 bp, Homo sapiens
gggtgttgggccgct

SEQ ID NO: 584279 - DNA, 15 bp, Homo sapiens
ggtgttgggccgctt

SEQ ID NO: 584280 - DNA, 15 bp, Homo sapiens
gtgttgggccgcttt

SEQ ID NO: 584281 - DNA, 15 bp, Homo sapiens
tgttgggccgctttc

SEQ ID NO: 584282 - DNA, 15 bp, Homo sapiens
gttgggccgctttct

SEQ ID NO: 584283 - DNA, 15 bp, Homo sapiens
ttgggccgctttctg

SEQ ID NO: 584284 - DNA, 15 bp, Homo sapiens
tgggccgctttctgg

SEQ ID NO: 584285 - DNA, 15 bp, Homo sapiens
gggccgctttctggc

SEQ ID NO: 584286 - DNA, 15 bp, Homo sapiens
ggccgctttctggcc

SEQ ID NO: 584287 - DNA, 15 bp, Homo sapiens
gccgctttctggcct

SEQ ID NO: 584288 - DNA, 15 bp, Homo sapiens
ccgctttctggcctc

SEQ ID NO: 584289 - DNA, 15 bp, Homo sapiens
cgctttctggcctca

SEQ ID NO: 584290 - DNA, 15 bp, Homo sapiens
gctttctggcctcat

SEQ ID NO: 584291 - DNA, 15 bp, Homo sapiens
ctttctggcctcatg

SEQ ID NO: 584292 - DNA, 15 bp, Homo sapiens
tttctggcctcatgg

SEQ ID NO: 584293 - DNA, 15 bp, Homo sapiens
ttctggcctcatgga

SEQ ID NO: 584294 - DNA, 15 bp, Homo sapiens
tctggcctcatggat

SEQ ID NO: 584295 - DNA, 15 bp, Homo sapiens
ctggcctcatggatg

SEQ ID NO: 584296 - DNA, 15 bp, Homo sapiens
tggcctcatggatgc

SEQ ID NO: 584297 - DNA, 15 bp, Homo sapiens
ggcctcatggatgcc

SEQ ID NO: 584298 - DNA, 15 bp, Homo sapiens
gcctcatggatgcca

SEQ ID NO: 584299 - DNA, 15 bp, Homo sapiens
cctcatggatgccaa

SEQ ID NO: 584300 - DNA, 15 bp, Homo sapiens
ctcatggatgccaat

SEQ ID NO: 584301 - DNA, 15 bp, Homo sapiens
tcatggatgccaatg

SEQ ID NO: 584302 - DNA, 15 bp, Homo sapiens
catggatgccaatga

SEQ ID NO: 584303 - DNA, 15 bp, Homo sapiens
atggatgccaatgaa

SEQ ID NO: 584304 - DNA, 15 bp, Homo sapiens
tggatgccaatgaat

SEQ ID NO: 584305 - DNA, 15 bp, Homo sapiens
ggatgccaatgaata

SEQ ID NO: 584306 - DNA, 15 bp, Homo sapiens
gatgccaatgaatat

SEQ ID NO: 584307 - DNA, 15 bp, Homo sapiens
atgccaatgaatatc

SEQ ID NO: 584308 - DNA, 15 bp, Homo sapiens
tgccaatgaatatca

SEQ ID NO: 584309 - DNA, 15 bp, Homo sapiens
gccaatgaatatcag

SEQ ID NO: 584310 - DNA, 15 bp, Homo sapiens
ccaatgaatatcagc

SEQ ID NO: 584311 - DNA, 15 bp, Homo sapiens
caatgaatatcagca

SEQ ID NO: 584312 - DNA, 15 bp, Homo sapiens
aatgaatatcagcag

SEQ ID NO: 584313 - DNA, 15 bp, Homo sapiens
atgaatatcagcagg

SEQ ID NO: 584314 - DNA, 15 bp, Homo sapiens
tgaatatcagcaggt

SEQ ID NO: 584315 - DNA, 15 bp, Homo sapiens
gaatatcagcaggtg

SEQ ID NO: 584316 - DNA, 15 bp, Homo sapiens
aatatcagcaggtgg

SEQ ID NO: 584317 - DNA, 15 bp, Homo sapiens
atatcagcaggtggc

SEQ ID NO: 584318 - DNA, 15 bp, Homo sapiens
tatcagcaggtggct

SEQ ID NO: 584319 - DNA, 15 bp, Homo sapiens
atcagcaggtggctc

SEQ ID NO: 584320 - DNA, 15 bp, Homo sapiens
tcagcaggtggctcc

SEQ ID NO: 584321 - DNA, 15 bp, Homo sapiens
cagcaggtggctccc

SEQ ID NO: 584322 - DNA, 15 bp, Homo sapiens
agcaggtggctccca

SEQ ID NO: 584323 - DNA, 15 bp, Homo sapiens
gcaggtggctcccag

SEQ ID NO: 584324 - DNA, 15 bp, Homo sapiens
caggtggctcccaga

SEQ ID NO: 584325 - DNA, 15 bp, Homo sapiens
aggtggctcccagaa

SEQ ID NO: 584326 - DNA, 15 bp, Homo sapiens
ggtggctcccagaaa

SEQ ID NO: 584327 - DNA, 15 bp, Homo sapiens
gtggctcccagaaag

SEQ ID NO: 584328 - DNA, 15 bp, Homo sapiens
tggctcccagaaagg

SEQ ID NO: 584329 - DNA, 15 bp, Homo sapiens
ggctcccagaaagga

SEQ ID NO: 584330 - DNA, 15 bp, Homo sapiens
gctcccagaaaggaa

SEQ ID NO: 584331 - DNA, 15 bp, Homo sapiens
ctcccagaaaggaac

SEQ ID NO: 584332 - DNA, 15 bp, Homo sapiens
tcccagaaaggaact

SEQ ID NO: 584333 - DNA, 15 bp, Homo sapiens
cccagaaaggaactc

SEQ ID NO: 584334 - DNA, 15 bp, Homo sapiens
ccagaaaggaactct

SEQ ID NO: 584335 - DNA, 15 bp, Homo sapiens
cagaaaggaactcta

SEQ ID NO: 584336 - DNA, 15 bp, Homo sapiens
agaaaggaactctag

SEQ ID NO: 584337 - DNA, 15 bp, Homo sapiens
gaaaggaactctagg

SEQ ID NO: 584338 - DNA, 15 bp, Homo sapiens
aaaggaactctaggg

SEQ ID NO: 584339 - DNA, 15 bp, Homo sapiens
aaggaactctagggg

SEQ ID NO: 584340 - DNA, 15 bp, Homo sapiens
aggaactctagggga

SEQ ID NO: 584341 - DNA, 15 bp, Homo sapiens
ggaactctaggggat

SEQ ID NO: 584342 - DNA, 15 bp, Homo sapiens
gaactctaggggatg

SEQ ID NO: 584343 - DNA, 15 bp, Homo sapiens
aactctaggggatgc

SEQ ID NO: 584344 - DNA, 15 bp, Homo sapiens
actctaggggatgcc

SEQ ID NO: 584345 - DNA, 15 bp, Homo sapiens
ctctaggggatgcct

SEQ ID NO: 584346 - DNA, 15 bp, Homo sapiens
tctaggggatgcctg

SEQ ID NO: 584347 - DNA, 15 bp, Homo sapiens
ctaggggatgcctgt

SEQ ID NO: 584348 - DNA, 15 bp, Homo sapiens
taggggatgcctgtt

SEQ ID NO: 584349 - DNA, 15 bp, Homo sapiens
aggggatgcctgttg

SEQ ID NO: 584350 - DNA, 15 bp, Homo sapiens
ggggatgcctgttgc

SEQ ID NO: 584351 - DNA, 15 bp, Homo sapiens
gggatgcctgttgct

SEQ ID NO: 584352 - DNA, 15 bp, Homo sapiens
ggatgcctgttgctc

SEQ ID NO: 584353 - DNA, 15 bp, Homo sapiens
gatgcctgttgctct

SEQ ID NO: 584354 - DNA, 15 bp, Homo sapiens
atgcctgttgctcta

SEQ ID NO: 584355 - DNA, 15 bp, Homo sapiens
tgcctgttgctctaa

SEQ ID NO: 584356 - DNA, 15 bp, Homo sapiens
gcctgttgctctaaa

SEQ ID NO: 584357 - DNA, 15 bp, Homo sapiens
cctgttgctctaaat

SEQ ID NO: 584358 - DNA, 15 bp, Homo sapiens
ctgttgctctaaata

SEQ ID NO: 584359 - DNA, 15 bp, Homo sapiens
tgttgctctaaatag

SEQ ID NO: 584360 - DNA, 15 bp, Homo sapiens
gttgctctaaataga

SEQ ID NO: 584361 - DNA, 15 bp, Homo sapiens
ttgctctaaatagag

SEQ ID NO: 584362 - DNA, 15 bp, Homo sapiens
tgctctaaatagagg

SEQ ID NO: 584363 - DNA, 15 bp, Homo sapiens
gctctaaatagaggc

SEQ ID NO: 584364 - DNA, 15 bp, Homo sapiens
ctctaaatagaggct

SEQ ID NO: 584365 - DNA, 15 bp, Homo sapiens
tctaaatagaggcta

SEQ ID NO: 584366 - DNA, 15 bp, Homo sapiens
ctaaatagaggctag

SEQ ID NO: 584367 - DNA, 15 bp, Homo sapiens
taaatagaggctaga

SEQ ID NO: 584368 - DNA, 15 bp, Homo sapiens
aaatagaggctagag

SEQ ID NO: 584369 - DNA, 15 bp, Homo sapiens
aatagaggctagaga

SEQ ID NO: 584370 - DNA, 15 bp, Homo sapiens
atagaggctagagag

SEQ ID NO: 584371 - DNA, 15 bp, Homo sapiens
tagaggctagagagg

SEQ ID NO: 584372 - DNA, 15 bp, Homo sapiens
agaggctagagaggg

SEQ ID NO: 584373 - DNA, 15 bp, Homo sapiens
gaggctagagagggc

SEQ ID NO: 584374 - DNA, 15 bp, Homo sapiens
aggctagagagggca

SEQ ID NO: 584375 - DNA, 15 bp, Homo sapiens
ggctagagagggcac

SEQ ID NO: 584376 - DNA, 15 bp, Homo sapiens
gctagagagggcact

SEQ ID NO: 584377 - DNA, 15 bp, Homo sapiens
ctagagagggcactg

SEQ ID NO: 584378 - DNA, 15 bp, Homo sapiens
tagagagggcactgg

SEQ ID NO: 584379 - DNA, 15 bp, Homo sapiens
agagagggcactggc

SEQ ID NO: 584380 - DNA, 15 bp, Homo sapiens
gagagggcactggca

SEQ ID NO: 584381 - DNA, 15 bp, Homo sapiens
agagggcactggcag

SEQ ID NO: 584382 - DNA, 15 bp, Homo sapiens
gagggcactggcagt

SEQ ID NO: 584383 - DNA, 15 bp, Homo sapiens
agggcactggcagtt

SEQ ID NO: 584384 - DNA, 15 bp, Homo sapiens
gggcactggcagttc

SEQ ID NO: 584385 - DNA, 15 bp, Homo sapiens
ggcactggcagttca

SEQ ID NO: 584386 - DNA, 15 bp, Homo sapiens
gcactggcagttcag

SEQ ID NO: 584387 - DNA, 15 bp, Homo sapiens
cactggcagttcagt

SEQ ID NO: 584388 - DNA, 15 bp, Homo sapiens
actggcagttcagtc

SEQ ID NO: 584389 - DNA, 15 bp, Homo sapiens
ctggcagttcagtca

SEQ ID NO: 584390 - DNA, 15 bp, Homo sapiens
tggcagttcagtcaa

SEQ ID NO: 584391 - DNA, 15 bp, Homo sapiens
ggcagttcagtcaac

SEQ ID NO: 584392 - DNA, 15 bp, Homo sapiens
gcagttcagtcaacc

SEQ ID NO: 584393 - DNA, 15 bp, Homo sapiens
cagttcagtcaacca

SEQ ID NO: 584394 - DNA, 15 bp, Homo sapiens
agttcagtcaaccaa

SEQ ID NO: 584395 - DNA, 15 bp, Homo sapiens
gttcagtcaaccaag

SEQ ID NO: 584396 - DNA, 15 bp, Homo sapiens
ttcagtcaaccaaga

SEQ ID NO: 584397 - DNA, 15 bp, Homo sapiens
tcagtcaaccaagaa

SEQ ID NO: 584398 - DNA, 15 bp, Homo sapiens
cagtcaaccaagaaa

SEQ ID NO: 584399 - DNA, 15 bp, Homo sapiens
agtcaaccaagaaag

SEQ ID NO: 584400 - DNA, 15 bp, Homo sapiens
gtcaaccaagaaagg

SEQ ID NO: 584401 - DNA, 15 bp, Homo sapiens
tcaaccaagaaaggg

SEQ ID NO: 584402 - DNA, 15 bp, Homo sapiens
caaccaagaaagggg

SEQ ID NO: 584403 - DNA, 15 bp, Homo sapiens
aaccaagaaaggggg

SEQ ID NO: 584404 - DNA, 15 bp, Homo sapiens
accaagaaagggggc

SEQ ID NO: 584405 - DNA, 15 bp, Homo sapiens
ccaagaaagggggcc

SEQ ID NO: 584406 - DNA, 15 bp, Homo sapiens
caagaaagggggccc

SEQ ID NO: 584407 - DNA, 15 bp, Homo sapiens
aagaaagggggccca

SEQ ID NO: 584408 - DNA, 15 bp, Homo sapiens
agaaagggggcccac

SEQ ID NO: 584409 - DNA, 15 bp, Homo sapiens
gaaagggggcccact

SEQ ID NO: 584410 - DNA, 15 bp, Homo sapiens
aaagggggcccactt

SEQ ID NO: 584411 - DNA, 15 bp, Homo sapiens
aagggggcccacttg

SEQ ID NO: 584412 - DNA, 15 bp, Homo sapiens
agggggcccacttgc

SEQ ID NO: 584413 - DNA, 15 bp, Homo sapiens
gggggcccacttgcc

SEQ ID NO: 584414 - DNA, 15 bp, Homo sapiens
ggggcccacttgcct

SEQ ID NO: 584415 - DNA, 15 bp, Homo sapiens
gggcccacttgcctc

SEQ ID NO: 584416 - DNA, 15 bp, Homo sapiens
ggcccacttgcctca

SEQ ID NO: 584417 - DNA, 15 bp, Homo sapiens
gcccacttgcctcag

SEQ ID NO: 584418 - DNA, 15 bp, Homo sapiens
cccacttgcctcagc

SEQ ID NO: 584419 - DNA, 15 bp, Homo sapiens
ccacttgcctcagct

SEQ ID NO: 584420 - DNA, 15 bp, Homo sapiens
cacttgcctcagctt

SEQ ID NO: 584421 - DNA, 15 bp, Homo sapiens
acttgcctcagcttc

SEQ ID NO: 584422 - DNA, 15 bp, Homo sapiens
cttgcctcagcttca

SEQ ID NO: 584423 - DNA, 15 bp, Homo sapiens
ttgcctcagcttcag

SEQ ID NO: 584424 - DNA, 15 bp, Homo sapiens
tgcctcagcttcagg

SEQ ID NO: 584425 - DNA, 15 bp, Homo sapiens
gcctcagcttcaggc

SEQ ID NO: 584426 - DNA, 15 bp, Homo sapiens
cctcagcttcaggct

SEQ ID NO: 584427 - DNA, 15 bp, Homo sapiens
ctcagcttcaggctt

SEQ ID NO: 584428 - DNA, 15 bp, Homo sapiens
tcagcttcaggcttt

SEQ ID NO: 584429 - DNA, 15 bp, Homo sapiens
cagcttcaggctttg

SEQ ID NO: 584430 - DNA, 15 bp, Homo sapiens
agcttcaggctttgt

SEQ ID NO: 584431 - DNA, 15 bp, Homo sapiens
gcttcaggctttgta

SEQ ID NO: 584432 - DNA, 15 bp, Homo sapiens
cttcaggctttgtac

SEQ ID NO: 584433 - DNA, 15 bp, Homo sapiens
ttcaggctttgtaca

SEQ ID NO: 584434 - DNA, 15 bp, Homo sapiens
tcaggctttgtacac

SEQ ID NO: 584435 - DNA, 15 bp, Homo sapiens
caggctttgtacaca

SEQ ID NO: 584436 - DNA, 15 bp, Homo sapiens
aggctttgtacacat

SEQ ID NO: 584437 - DNA, 15 bp, Homo sapiens
ggctttgtacacatc

SEQ ID NO: 584438 - DNA, 15 bp, Homo sapiens
gctttgtacacatcc

SEQ ID NO: 584439 - DNA, 15 bp, Homo sapiens
ctttgtacacatcct

SEQ ID NO: 584440 - DNA, 15 bp, Homo sapiens
tttgtacacatcctc

SEQ ID NO: 584441 - DNA, 15 bp, Homo sapiens
ttgtacacatcctca

SEQ ID NO: 584442 - DNA, 15 bp, Homo sapiens
tgtacacatcctcag

SEQ ID NO: 584443 - DNA, 15 bp, Homo sapiens
gtacacatcctcagc

SEQ ID NO: 584444 - DNA, 15 bp, Homo sapiens
tacacatcctcagcc

SEQ ID NO: 584445 - DNA, 15 bp, Homo sapiens
acacatcctcagcct

SEQ ID NO: 584446 - DNA, 15 bp, Homo sapiens
cacatcctcagcctt

SEQ ID NO: 584447 - DNA, 15 bp, Homo sapiens
acatcctcagccttt

SEQ ID NO: 584448 - DNA, 15 bp, Homo sapiens
catcctcagcctttc

SEQ ID NO: 584449 - DNA, 15 bp, Homo sapiens
atcctcagcctttct

SEQ ID NO: 584450 - DNA, 15 bp, Homo sapiens
tcctcagcctttctt

SEQ ID NO: 584451 - DNA, 15 bp, Homo sapiens
cctcagcctttcttg

SEQ ID NO: 584452 - DNA, 15 bp, Homo sapiens
ctcagcctttcttga

SEQ ID NO: 584453 - DNA, 15 bp, Homo sapiens
tcagcctttcttgag

SEQ ID NO: 584454 - DNA, 15 bp, Homo sapiens
cagcctttcttgaga

SEQ ID NO: 584455 - DNA, 15 bp, Homo sapiens
agcctttcttgagaa

SEQ ID NO: 584456 - DNA, 15 bp, Homo sapiens
gcctttcttgagaac

SEQ ID NO: 584457 - DNA, 15 bp, Homo sapiens
cctttcttgagaact

SEQ ID NO: 584458 - DNA, 15 bp, Homo sapiens
ctttcttgagaactg

SEQ ID NO: 584459 - DNA, 15 bp, Homo sapiens
tttcttgagaactga

SEQ ID NO: 584460 - DNA, 15 bp, Homo sapiens
ttcttgagaactgaa

SEQ ID NO: 584461 - DNA, 15 bp, Homo sapiens
tcttgagaactgaat

SEQ ID NO: 584462 - DNA, 15 bp, Homo sapiens
cttgagaactgaatt

SEQ ID NO: 584463 - DNA, 15 bp, Homo sapiens
ttgagaactgaattt

SEQ ID NO: 584464 - DNA, 15 bp, Homo sapiens
tgagaactgaattta

SEQ ID NO: 584465 - DNA, 15 bp, Homo sapiens
gagaactgaatttag

SEQ ID NO: 584466 - DNA, 15 bp, Homo sapiens
agaactgaatttaga

SEQ ID NO: 584467 - DNA, 15 bp, Homo sapiens
gaactgaatttagat

SEQ ID NO: 584468 - DNA, 15 bp, Homo sapiens
aactgaatttagatt

SEQ ID NO: 584469 - DNA, 15 bp, Homo sapiens
actgaatttagattc

SEQ ID NO: 584470 - DNA, 15 bp, Homo sapiens
ctgaatttagattct

SEQ ID NO: 584471 - DNA, 15 bp, Homo sapiens
tgaatttagattctc

SEQ ID NO: 584472 - DNA, 15 bp, Homo sapiens
gaatttagattctcc

SEQ ID NO: 584473 - DNA, 15 bp, Homo sapiens
aatttagattctcct

SEQ ID NO: 584474 - DNA, 15 bp, Homo sapiens
atttagattctcctc

SEQ ID NO: 584475 - DNA, 15 bp, Homo sapiens
tttagattctcctcc

SEQ ID NO: 584476 - DNA, 15 bp, Homo sapiens
ttagattctcctccc

SEQ ID NO: 584477 - DNA, 15 bp, Homo sapiens
tagattctcctcccc

SEQ ID NO: 584478 - DNA, 15 bp, Homo sapiens
agattctcctcccct

SEQ ID NO: 584479 - DNA, 15 bp, Homo sapiens
gattctcctcccctg

SEQ ID NO: 584480 - DNA, 15 bp, Homo sapiens
attctcctcccctgt

SEQ ID NO: 584481 - DNA, 15 bp, Homo sapiens
ttctcctcccctgtg

SEQ ID NO: 584482 - DNA, 15 bp, Homo sapiens
tctcctcccctgtgc

SEQ ID NO: 584483 - DNA, 15 bp, Homo sapiens
ctcctcccctgtgct

SEQ ID NO: 584484 - DNA, 15 bp, Homo sapiens
tcctcccctgtgctg

SEQ ID NO: 584485 - DNA, 15 bp, Homo sapiens
cctcccctgtgctgt

SEQ ID NO: 584486 - DNA, 15 bp, Homo sapiens
ctcccctgtgctgtg

SEQ ID NO: 584487 - DNA, 15 bp, Homo sapiens
tcccctgtgctgtgt

SEQ ID NO: 584488 - DNA, 15 bp, Homo sapiens
cccctgtgctgtgtg

SEQ ID NO: 584489 - DNA, 15 bp, Homo sapiens
ccctgtgctgtgtgc

SEQ ID NO: 584490 - DNA, 15 bp, Homo sapiens
cctgtgctgtgtgct

SEQ ID NO: 584491 - DNA, 15 bp, Homo sapiens
ctgtgctgtgtgctt

SEQ ID NO: 584492 - DNA, 15 bp, Homo sapiens
tgtgctgtgtgcttg

SEQ ID NO: 584493 - DNA, 15 bp, Homo sapiens
gtgctgtgtgcttgg

SEQ ID NO: 584494 - DNA, 15 bp, Homo sapiens
tgctgtgtgcttggc

SEQ ID NO: 584495 - DNA, 15 bp, Homo sapiens
gctgtgtgcttggcc

SEQ ID NO: 584496 - DNA, 15 bp, Homo sapiens
ctgtgtgcttggccc

SEQ ID NO: 584497 - DNA, 15 bp, Homo sapiens
tgtgtgcttggccca

SEQ ID NO: 584498 - DNA, 15 bp, Homo sapiens
gtgtgcttggcccag

SEQ ID NO: 584499 - DNA, 15 bp, Homo sapiens
tgtgcttggcccaga

SEQ ID NO: 584500 - DNA, 15 bp, Homo sapiens
gtgcttggcccagaa

SEQ ID NO: 584501 - DNA, 15 bp, Homo sapiens
tgcttggcccagaag

SEQ ID NO: 584502 - DNA, 15 bp, Homo sapiens
gcttggcccagaaga

SEQ ID NO: 584503 - DNA, 15 bp, Homo sapiens
cttggcccagaagaa

SEQ ID NO: 584504 - DNA, 15 bp, Homo sapiens
ttggcccagaagaag

SEQ ID NO: 584505 - DNA, 15 bp, Homo sapiens
tggcccagaagaagg

SEQ ID NO: 584506 - DNA, 15 bp, Homo sapiens
ggcccagaagaaggg

SEQ ID NO: 584507 - DNA, 15 bp, Homo sapiens
gcccagaagaagggc

SEQ ID NO: 584508 - DNA, 15 bp, Homo sapiens
cccagaagaagggca

SEQ ID NO: 584509 - DNA, 15 bp, Homo sapiens
ccagaagaagggcaa

SEQ ID NO: 584510 - DNA, 15 bp, Homo sapiens
cagaagaagggcaag

SEQ ID NO: 584511 - DNA, 15 bp, Homo sapiens
agaagaagggcaagt

SEQ ID NO: 584512 - DNA, 15 bp, Homo sapiens
gaagaagggcaagtc

SEQ ID NO: 584513 - DNA, 15 bp, Homo sapiens
aagaagggcaagtct

SEQ ID NO: 584514 - DNA, 15 bp, Homo sapiens
agaagggcaagtctc

SEQ ID NO: 584515 - DNA, 15 bp, Homo sapiens
gaagggcaagtctcg

SEQ ID NO: 584516 - DNA, 15 bp, Homo sapiens
aagggcaagtctcgc

SEQ ID NO: 584517 - DNA, 15 bp, Homo sapiens
agggcaagtctcgct

SEQ ID NO: 584518 - DNA, 15 bp, Homo sapiens
gggcaagtctcgctg

SEQ ID NO: 584519 - DNA, 15 bp, Homo sapiens
ggcaagtctcgctgg

SEQ ID NO: 584520 - DNA, 15 bp, Homo sapiens
gcaagtctcgctggg

SEQ ID NO: 584521 - DNA, 15 bp, Homo sapiens
caagtctcgctgggt

SEQ ID NO: 584522 - DNA, 15 bp, Homo sapiens
aagtctcgctgggtg

SEQ ID NO: 584523 - DNA, 15 bp, Homo sapiens
agtctcgctgggtgg

SEQ ID NO: 584524 - DNA, 15 bp, Homo sapiens
gtctcgctgggtggc

SEQ ID NO: 584525 - DNA, 15 bp, Homo sapiens
tctcgctgggtggct

SEQ ID NO: 584526 - DNA, 15 bp, Homo sapiens
ctcgctgggtggctg

SEQ ID NO: 584527 - DNA, 15 bp, Homo sapiens
tcgctgggtggctgc

SEQ ID NO: 584528 - DNA, 15 bp, Homo sapiens
cgctgggtggctgct

SEQ ID NO: 584529 - DNA, 15 bp, Homo sapiens
gctgggtggctgctt

SEQ ID NO: 584530 - DNA, 15 bp, Homo sapiens
ctgggtggctgcttc

SEQ ID NO: 584531 - DNA, 15 bp, Homo sapiens
tgggtggctgcttct

SEQ ID NO: 584532 - DNA, 15 bp, Homo sapiens
gggtggctgcttctt

SEQ ID NO: 584533 - DNA, 15 bp, Homo sapiens
ggtggctgcttcttg

SEQ ID NO: 584534 - DNA, 15 bp, Homo sapiens
gtggctgcttcttgg

SEQ ID NO: 584535 - DNA, 15 bp, Homo sapiens
tggctgcttcttggc

SEQ ID NO: 584536 - DNA, 15 bp, Homo sapiens
ggctgcttcttggcc

SEQ ID NO: 584537 - DNA, 15 bp, Homo sapiens
gctgcttcttggcct

SEQ ID NO: 584538 - DNA, 15 bp, Homo sapiens
ctgcttcttggcctg

SEQ ID NO: 584539 - DNA, 15 bp, Homo sapiens
tgcttcttggcctgg

SEQ ID NO: 584540 - DNA, 15 bp, Homo sapiens
gcttcttggcctggc

SEQ ID NO: 584541 - DNA, 15 bp, Homo sapiens
cttcttggcctggct

SEQ ID NO: 584542 - DNA, 15 bp, Homo sapiens
ttcttggcctggctg

SEQ ID NO: 584543 - DNA, 15 bp, Homo sapiens
tcttggcctggctga

SEQ ID NO: 584544 - DNA, 15 bp, Homo sapiens
cttggcctggctgaa

SEQ ID NO: 584545 - DNA, 15 bp, Homo sapiens
ttggcctggctgaac

SEQ ID NO: 584546 - DNA, 15 bp, Homo sapiens
tggcctggctgaacc

SEQ ID NO: 584547 - DNA, 15 bp, Homo sapiens
ggcctggctgaacca

SEQ ID NO: 584548 - DNA, 15 bp, Homo sapiens
gcctggctgaaccag

SEQ ID NO: 584549 - DNA, 15 bp, Homo sapiens
cctggctgaaccaga

SEQ ID NO: 584550 - DNA, 15 bp, Homo sapiens
ctggctgaaccagaa

SEQ ID NO: 584551 - DNA, 15 bp, Homo sapiens
tggctgaaccagaag

SEQ ID NO: 584552 - DNA, 15 bp, Homo sapiens
ggctgaaccagaagg

SEQ ID NO: 584553 - DNA, 15 bp, Homo sapiens
gctgaaccagaaggc

SEQ ID NO: 584554 - DNA, 15 bp, Homo sapiens
ctgaaccagaaggcc

SEQ ID NO: 584555 - DNA, 15 bp, Homo sapiens
tgaaccagaaggccc

SEQ ID NO: 584556 - DNA, 15 bp, Homo sapiens
gaaccagaaggcccc

SEQ ID NO: 584557 - DNA, 15 bp, Homo sapiens
aaccagaaggcccca

SEQ ID NO: 584558 - DNA, 15 bp, Homo sapiens
accagaaggccccag

SEQ ID NO: 584559 - DNA, 15 bp, Homo sapiens
ccagaaggccccagt

SEQ ID NO: 584560 - DNA, 15 bp, Homo sapiens
cagaaggccccagtg

SEQ ID NO: 584561 - DNA, 15 bp, Homo sapiens
agaaggccccagtgc

SEQ ID NO: 584562 - DNA, 15 bp, Homo sapiens
gaaggccccagtgcc

SEQ ID NO: 584563 - DNA, 15 bp, Homo sapiens
aaggccccagtgcca

SEQ ID NO: 584564 - DNA, 15 bp, Homo sapiens
aggccccagtgccac

SEQ ID NO: 584565 - DNA, 15 bp, Homo sapiens
ggccccagtgccact

SEQ ID NO: 584566 - DNA, 15 bp, Homo sapiens
gccccagtgccactc

SEQ ID NO: 584567 - DNA, 15 bp, Homo sapiens
ccccagtgccactcc

SEQ ID NO: 584568 - DNA, 15 bp, Homo sapiens
cccagtgccactcca

SEQ ID NO: 584569 - DNA, 15 bp, Homo sapiens
ccagtgccactccaa

SEQ ID NO: 584570 - DNA, 15 bp, Homo sapiens
cagtgccactccaaa

SEQ ID NO: 584571 - DNA, 15 bp, Homo sapiens
agtgccactccaaac

SEQ ID NO: 584572 - DNA, 15 bp, Homo sapiens
gtgccactccaaacc

SEQ ID NO: 584573 - DNA, 15 bp, Homo sapiens
tgccactccaaacct

SEQ ID NO: 584574 - DNA, 15 bp, Homo sapiens
gccactccaaacctg

SEQ ID NO: 584575 - DNA, 15 bp, Homo sapiens
ccactccaaacctgg

SEQ ID NO: 584576 - DNA, 15 bp, Homo sapiens
cactccaaacctggg

SEQ ID NO: 584577 - DNA, 15 bp, Homo sapiens
actccaaacctgggt

SEQ ID NO: 584578 - DNA, 15 bp, Homo sapiens
ctccaaacctgggtg

SEQ ID NO: 584579 - DNA, 15 bp, Homo sapiens
tccaaacctgggtgt

SEQ ID NO: 584580 - DNA, 15 bp, Homo sapiens
ccaaacctgggtgtg

SEQ ID NO: 584581 - DNA, 15 bp, Homo sapiens
caaacctgggtgtga

SEQ ID NO: 584582 - DNA, 15 bp, Homo sapiens
aaacctgggtgtgag

SEQ ID NO: 584583 - DNA, 15 bp, Homo sapiens
aacctgggtgtgagc

SEQ ID NO: 584584 - DNA, 15 bp, Homo sapiens
acctgggtgtgagcc

SEQ ID NO: 584585 - DNA, 15 bp, Homo sapiens
cctgggtgtgagccc

SEQ ID NO: 584586 - DNA, 15 bp, Homo sapiens
ctgggtgtgagccct

SEQ ID NO: 584587 - DNA, 15 bp, Homo sapiens
tgggtgtgagccctg

SEQ ID NO: 584588 - DNA, 15 bp, Homo sapiens
gggtgtgagccctgc

SEQ ID NO: 584589 - DNA, 15 bp, Homo sapiens
ggtgtgagccctgcc

SEQ ID NO: 584590 - DNA, 15 bp, Homo sapiens
gtgtgagccctgccc

SEQ ID NO: 584591 - DNA, 15 bp, Homo sapiens
tgtgagccctgcccc

SEQ ID NO: 584592 - DNA, 15 bp, Homo sapiens
gtgagccctgccccc

SEQ ID NO: 584593 - DNA, 15 bp, Homo sapiens
tgagccctgccccca

SEQ ID NO: 584594 - DNA, 15 bp, Homo sapiens
gagccctgcccccat

SEQ ID NO: 584595 - DNA, 15 bp, Homo sapiens
agccctgcccccatg

SEQ ID NO: 584596 - DNA, 15 bp, Homo sapiens
gccctgcccccatga

SEQ ID NO: 584597 - DNA, 15 bp, Homo sapiens
ccctgcccccatgag

SEQ ID NO: 584598 - DNA, 15 bp, Homo sapiens
cctgcccccatgagc

SEQ ID NO: 584599 - DNA, 15 bp, Homo sapiens
ctgcccccatgagca

SEQ ID NO: 584600 - DNA, 15 bp, Homo sapiens
tgcccccatgagcaa

SEQ ID NO: 584601 - DNA, 15 bp, Homo sapiens
gcccccatgagcaaa

SEQ ID NO: 584602 - DNA, 15 bp, Homo sapiens
cccccatgagcaaac

SEQ ID NO: 584603 - DNA, 15 bp, Homo sapiens
ccccatgagcaaaca

SEQ ID NO: 584604 - DNA, 15 bp, Homo sapiens
cccatgagcaaacag

SEQ ID NO: 584605 - DNA, 15 bp, Homo sapiens
ccatgagcaaacagt

SEQ ID NO: 584606 - DNA, 15 bp, Homo sapiens
catgagcaaacagta

SEQ ID NO: 584607 - DNA, 15 bp, Homo sapiens
atgagcaaacagtag

SEQ ID NO: 584608 - DNA, 15 bp, Homo sapiens
tgagcaaacagtagc

SEQ ID NO: 584609 - DNA, 15 bp, Homo sapiens
gagcaaacagtagct

SEQ ID NO: 584610 - DNA, 15 bp, Homo sapiens
agcaaacagtagctc

SEQ ID NO: 584611 - DNA, 15 bp, Homo sapiens
gcaaacagtagctca

SEQ ID NO: 584612 - DNA, 15 bp, Homo sapiens
caaacagtagctcag

SEQ ID NO: 584613 - DNA, 15 bp, Homo sapiens
aaacagtagctcaga

SEQ ID NO: 584614 - DNA, 15 bp, Homo sapiens
aacagtagctcagag

SEQ ID NO: 584615 - DNA, 15 bp, Homo sapiens
acagtagctcagagc

SEQ ID NO: 584616 - DNA, 15 bp, Homo sapiens
cagtagctcagagct

SEQ ID NO: 584617 - DNA, 15 bp, Homo sapiens
agtagctcagagctg

SEQ ID NO: 584618 - DNA, 15 bp, Homo sapiens
gtagctcagagctgg

SEQ ID NO: 584619 - DNA, 15 bp, Homo sapiens
tagctcagagctggg

SEQ ID NO: 584620 - DNA, 15 bp, Homo sapiens
agctcagagctgggg

SEQ ID NO: 584621 - DNA, 15 bp, Homo sapiens
gctcagagctggggg

SEQ ID NO: 584622 - DNA, 15 bp, Homo sapiens
ctcagagctgggggc

SEQ ID NO: 584623 - DNA, 15 bp, Homo sapiens
tcagagctgggggct

SEQ ID NO: 584624 - DNA, 15 bp, Homo sapiens
cagagctgggggctg

SEQ ID NO: 584625 - DNA, 15 bp, Homo sapiens
agagctgggggctgt

SEQ ID NO: 584626 - DNA, 15 bp, Homo sapiens
gagctgggggctgtg

SEQ ID NO: 584627 - DNA, 15 bp, Homo sapiens
agctgggggctgtgg

SEQ ID NO: 584628 - DNA, 15 bp, Homo sapiens
gctgggggctgtggg

SEQ ID NO: 584629 - DNA, 15 bp, Homo sapiens
ctgggggctgtgggg

SEQ ID NO: 584630 - DNA, 15 bp, Homo sapiens
tgggggctgtggggg

SEQ ID NO: 584631 - DNA, 15 bp, Homo sapiens
gggggctgtgggggt

SEQ ID NO: 584632 - DNA, 15 bp, Homo sapiens
ggggctgtgggggtc

SEQ ID NO: 584633 - DNA, 15 bp, Homo sapiens
gggctgtgggggtca

SEQ ID NO: 584634 - DNA, 15 bp, Homo sapiens
ggctgtgggggtcag

SEQ ID NO: 584635 - DNA, 15 bp, Homo sapiens
gctgtgggggtcagt

SEQ ID NO: 584636 - DNA, 15 bp, Homo sapiens
ctgtgggggtcagtg

SEQ ID NO: 584637 - DNA, 15 bp, Homo sapiens
tgtgggggtcagtgg

SEQ ID NO: 584638 - DNA, 15 bp, Homo sapiens
gtgggggtcagtggc

SEQ ID NO: 584639 - DNA, 15 bp, Homo sapiens
tgggggtcagtggcc

SEQ ID NO: 584640 - DNA, 15 bp, Homo sapiens
gggggtcagtggcct

SEQ ID NO: 584641 - DNA, 15 bp, Homo sapiens
ggggtcagtggcctg

SEQ ID NO: 584642 - DNA, 15 bp, Homo sapiens
gggtcagtggcctgt

SEQ ID NO: 584643 - DNA, 15 bp, Homo sapiens
ggtcagtggcctgtc

SEQ ID NO: 584644 - DNA, 15 bp, Homo sapiens
gtcagtggcctgtca

SEQ ID NO: 584645 - DNA, 15 bp, Homo sapiens
tcagtggcctgtcac

SEQ ID NO: 584646 - DNA, 15 bp, Homo sapiens
cagtggcctgtcaca

SEQ ID NO: 584647 - DNA, 15 bp, Homo sapiens
agtggcctgtcacat

SEQ ID NO: 584648 - DNA, 15 bp, Homo sapiens
gtggcctgtcacatg

SEQ ID NO: 584649 - DNA, 15 bp, Homo sapiens
tggcctgtcacatga

SEQ ID NO: 584650 - DNA, 15 bp, Homo sapiens
ggcctgtcacatgag

SEQ ID NO: 584651 - DNA, 15 bp, Homo sapiens
gcctgtcacatgaga

SEQ ID NO: 584652 - DNA, 15 bp, Homo sapiens
cctgtcacatgagat

SEQ ID NO: 584653 - DNA, 15 bp, Homo sapiens
ctgtcacatgagatc

SEQ ID NO: 584654 - DNA, 15 bp, Homo sapiens
tgtcacatgagatct

SEQ ID NO: 584655 - DNA, 15 bp, Homo sapiens
gtcacatgagatctg

SEQ ID NO: 584656 - DNA, 15 bp, Homo sapiens
tcacatgagatctga

SEQ ID NO: 584657 - DNA, 15 bp, Homo sapiens
cacatgagatctgat

SEQ ID NO: 584658 - DNA, 15 bp, Homo sapiens
acatgagatctgatg

SEQ ID NO: 584659 - DNA, 15 bp, Homo sapiens
catgagatctgatga

SEQ ID NO: 584660 - DNA, 15 bp, Homo sapiens
atgagatctgatgag

SEQ ID NO: 584661 - DNA, 15 bp, Homo sapiens
tgagatctgatgagg

SEQ ID NO: 584662 - DNA, 15 bp, Homo sapiens
gagatctgatgaggc

SEQ ID NO: 584663 - DNA, 15 bp, Homo sapiens
agatctgatgaggcc

SEQ ID NO: 584664 - DNA, 15 bp, Homo sapiens
gatctgatgaggcca

SEQ ID NO: 584665 - DNA, 15 bp, Homo sapiens
atctgatgaggccat

SEQ ID NO: 584666 - DNA, 15 bp, Homo sapiens
tctgatgaggccatc

SEQ ID NO: 584667 - DNA, 15 bp, Homo sapiens
ctgatgaggccatct

SEQ ID NO: 584668 - DNA, 15 bp, Homo sapiens
tgatgaggccatctc

SEQ ID NO: 584669 - DNA, 15 bp, Homo sapiens
gatgaggccatctct

SEQ ID NO: 584670 - DNA, 15 bp, Homo sapiens
atgaggccatctctg

SEQ ID NO: 584671 - DNA, 15 bp, Homo sapiens
tgaggccatctctgc

SEQ ID NO: 584672 - DNA, 15 bp, Homo sapiens
gaggccatctctgct

SEQ ID NO: 584673 - DNA, 15 bp, Homo sapiens
aggccatctctgctc

SEQ ID NO: 584674 - DNA, 15 bp, Homo sapiens
ggccatctctgctct

SEQ ID NO: 584675 - DNA, 15 bp, Homo sapiens
gccatctctgctcta

SEQ ID NO: 584676 - DNA, 15 bp, Homo sapiens
ccatctctgctctat

SEQ ID NO: 584677 - DNA, 15 bp, Homo sapiens
catctctgctctata

SEQ ID NO: 584678 - DNA, 15 bp, Homo sapiens
atctctgctctatat

SEQ ID NO: 584679 - DNA, 15 bp, Homo sapiens
tctctgctctatatt

SEQ ID NO: 584680 - DNA, 15 bp, Homo sapiens
ctctgctctatattg

SEQ ID NO: 584681 - DNA, 15 bp, Homo sapiens
tctgctctatattgg

SEQ ID NO: 584682 - DNA, 15 bp, Homo sapiens
ctgctctatattggg

SEQ ID NO: 584683 - DNA, 15 bp, Homo sapiens
tgctctatattggga

SEQ ID NO: 584684 - DNA, 15 bp, Homo sapiens
gctctatattgggaa

SEQ ID NO: 584685 - DNA, 15 bp, Homo sapiens
ctctatattgggaaa

SEQ ID NO: 584686 - DNA, 15 bp, Homo sapiens
tctatattgggaaag

SEQ ID NO: 584687 - DNA, 15 bp, Homo sapiens
ctatattgggaaagg

SEQ ID NO: 584688 - DNA, 15 bp, Homo sapiens
tatattgggaaaggg

SEQ ID NO: 584689 - DNA, 15 bp, Homo sapiens
atattgggaaaggga

SEQ ID NO: 584690 - DNA, 15 bp, Homo sapiens
tattgggaaagggat

SEQ ID NO: 584691 - DNA, 15 bp, Homo sapiens
attgggaaagggatc

SEQ ID NO: 584692 - DNA, 15 bp, Homo sapiens
ttgggaaagggatca

SEQ ID NO: 584693 - DNA, 15 bp, Homo sapiens
tgggaaagggatcaa

SEQ ID NO: 584694 - DNA, 15 bp, Homo sapiens
gggaaagggatcaat

SEQ ID NO: 584695 - DNA, 15 bp, Homo sapiens
ggaaagggatcaatt

SEQ ID NO: 584696 - DNA, 15 bp, Homo sapiens
gaaagggatcaattg

SEQ ID NO: 584697 - DNA, 15 bp, Homo sapiens
aaagggatcaattgt

SEQ ID NO: 584698 - DNA, 15 bp, Homo sapiens
aagggatcaattgta

SEQ ID NO: 584699 - DNA, 15 bp, Homo sapiens
agggatcaattgtat

SEQ ID NO: 584700 - DNA, 15 bp, Homo sapiens
gggatcaattgtatc

SEQ ID NO: 584701 - DNA, 15 bp, Homo sapiens
ggatcaattgtatca

SEQ ID NO: 584702 - DNA, 15 bp, Homo sapiens
gatcaattgtatcaa

SEQ ID NO: 584703 - DNA, 15 bp, Homo sapiens
atcaattgtatcaag

SEQ ID NO: 584704 - DNA, 15 bp, Homo sapiens
tcaattgtatcaagg

SEQ ID NO: 584705 - DNA, 15 bp, Homo sapiens
caattgtatcaaggg

SEQ ID NO: 584706 - DNA, 15 bp, Homo sapiens
aattgtatcaagggc

SEQ ID NO: 584707 - DNA, 15 bp, Homo sapiens
attgtatcaagggct

SEQ ID NO: 584708 - DNA, 15 bp, Homo sapiens
ttgtatcaagggctt

SEQ ID NO: 584709 - DNA, 15 bp, Homo sapiens
tgtatcaagggcttt

SEQ ID NO: 584710 - DNA, 15 bp, Homo sapiens
gtatcaagggctttc

SEQ ID NO: 584711 - DNA, 15 bp, Homo sapiens
tatcaagggctttct

SEQ ID NO: 584712 - DNA, 15 bp, Homo sapiens
atcaagggctttctt

SEQ ID NO: 584713 - DNA, 15 bp, Homo sapiens
tcaagggctttcttg

SEQ ID NO: 584714 - DNA, 15 bp, Homo sapiens
caagggctttcttgg

SEQ ID NO: 584715 - DNA, 15 bp, Homo sapiens
aagggctttcttggg

SEQ ID NO: 584716 - DNA, 15 bp, Homo sapiens
agggctttcttggga

SEQ ID NO: 584717 - DNA, 15 bp, Homo sapiens
gggctttcttgggag

SEQ ID NO: 584718 - DNA, 15 bp, Homo sapiens
ggctttcttgggagt

SEQ ID NO: 584719 - DNA, 15 bp, Homo sapiens
gctttcttgggagtg

SEQ ID NO: 584720 - DNA, 15 bp, Homo sapiens
ctttcttgggagtga

SEQ ID NO: 584721 - DNA, 15 bp, Homo sapiens
tttcttgggagtgat

SEQ ID NO: 584722 - DNA, 15 bp, Homo sapiens
ttcttgggagtgatc

SEQ ID NO: 584723 - DNA, 15 bp, Homo sapiens
tcttgggagtgatca

SEQ ID NO: 584724 - DNA, 15 bp, Homo sapiens
cttgggagtgatcac

SEQ ID NO: 584725 - DNA, 15 bp, Homo sapiens
ttgggagtgatcact

SEQ ID NO: 584726 - DNA, 15 bp, Homo sapiens
tgggagtgatcactc

SEQ ID NO: 584727 - DNA, 15 bp, Homo sapiens
gggagtgatcactct

SEQ ID NO: 584728 - DNA, 15 bp, Homo sapiens
ggagtgatcactctg

SEQ ID NO: 584729 - DNA, 15 bp, Homo sapiens
gagtgatcactctgg

SEQ ID NO: 584730 - DNA, 15 bp, Homo sapiens
agtgatcactctggc

SEQ ID NO: 584731 - DNA, 15 bp, Homo sapiens
gtgatcactctggcc

SEQ ID NO: 584732 - DNA, 15 bp, Homo sapiens
tgatcactctggcca

SEQ ID NO: 584733 - DNA, 15 bp, Homo sapiens
gatcactctggccat

SEQ ID NO: 584734 - DNA, 15 bp, Homo sapiens
atcactctggccatt

SEQ ID NO: 584735 - DNA, 15 bp, Homo sapiens
tcactctggccattg

SEQ ID NO: 584736 - DNA, 15 bp, Homo sapiens
cactctggccattgg

SEQ ID NO: 584737 - DNA, 15 bp, Homo sapiens
actctggccattggc

SEQ ID NO: 584738 - DNA, 15 bp, Homo sapiens
ctctggccattggcg

SEQ ID NO: 584739 - DNA, 15 bp, Homo sapiens
tctggccattggcga

SEQ ID NO: 584740 - DNA, 15 bp, Homo sapiens
ctggccattggcgag

SEQ ID NO: 584741 - DNA, 15 bp, Homo sapiens
tggccattggcgaga

SEQ ID NO: 584742 - DNA, 15 bp, Homo sapiens
ggccattggcgagag

SEQ ID NO: 584743 - DNA, 15 bp, Homo sapiens
gccattggcgagaga

SEQ ID NO: 584744 - DNA, 15 bp, Homo sapiens
ccattggcgagagac

SEQ ID NO: 584745 - DNA, 15 bp, Homo sapiens
cattggcgagagacc

SEQ ID NO: 584746 - DNA, 15 bp, Homo sapiens
attggcgagagacct

SEQ ID NO: 584747 - DNA, 15 bp, Homo sapiens
ttggcgagagacctg

SEQ ID NO: 584748 - DNA, 15 bp, Homo sapiens
tggcgagagacctgg

SEQ ID NO: 584749 - DNA, 15 bp, Homo sapiens
ggcgagagacctggc

SEQ ID NO: 584750 - DNA, 15 bp, Homo sapiens
gcgagagacctggca

SEQ ID NO: 584751 - DNA, 15 bp, Homo sapiens
cgagagacctggcat

SEQ ID NO: 584752 - DNA, 15 bp, Homo sapiens
gagagacctggcatt

SEQ ID NO: 584753 - DNA, 15 bp, Homo sapiens
agagacctggcattc

SEQ ID NO: 584754 - DNA, 15 bp, Homo sapiens
gagacctggcattct

SEQ ID NO: 584755 - DNA, 15 bp, Homo sapiens
agacctggcattctg

SEQ ID NO: 584756 - DNA, 15 bp, Homo sapiens
gacctggcattctga

SEQ ID NO: 584757 - DNA, 15 bp, Homo sapiens
acctggcattctgac

SEQ ID NO: 584758 - DNA, 15 bp, Homo sapiens
cctggcattctgaca

SEQ ID NO: 584759 - DNA, 15 bp, Homo sapiens
ctggcattctgacaa

SEQ ID NO: 584760 - DNA, 15 bp, Homo sapiens
tggcattctgacaag

SEQ ID NO: 584761 - DNA, 15 bp, Homo sapiens
ggcattctgacaagg

SEQ ID NO: 584762 - DNA, 15 bp, Homo sapiens
gcattctgacaaggc

SEQ ID NO: 584763 - DNA, 15 bp, Homo sapiens
cattctgacaaggca

SEQ ID NO: 584764 - DNA, 15 bp, Homo sapiens
attctgacaaggcac

SEQ ID NO: 584765 - DNA, 15 bp, Homo sapiens
ttctgacaaggcacc

SEQ ID NO: 584766 - DNA, 15 bp, Homo sapiens
tctgacaaggcaccc

SEQ ID NO: 584767 - DNA, 15 bp, Homo sapiens
ctgacaaggcaccct

SEQ ID NO: 584768 - DNA, 15 bp, Homo sapiens
tgacaaggcaccctc

SEQ ID NO: 584769 - DNA, 15 bp, Homo sapiens
gacaaggcaccctcc

SEQ ID NO: 584770 - DNA, 15 bp, Homo sapiens
acaaggcaccctcca

SEQ ID NO: 584771 - DNA, 15 bp, Homo sapiens
caaggcaccctccat

SEQ ID NO: 584772 - DNA, 15 bp, Homo sapiens
aaggcaccctccata

SEQ ID NO: 584773 - DNA, 15 bp, Homo sapiens
aggcaccctccatac

SEQ ID NO: 584774 - DNA, 15 bp, Homo sapiens
ggcaccctccatacc

SEQ ID NO: 584775 - DNA, 15 bp, Homo sapiens
gcaccctccataccc

SEQ ID NO: 584776 - DNA, 15 bp, Homo sapiens
caccctccataccct

SEQ ID NO: 584777 - DNA, 15 bp, Homo sapiens
accctccataccctg

SEQ ID NO: 584778 - DNA, 15 bp, Homo sapiens
ccctccataccctga

SEQ ID NO: 584779 - DNA, 15 bp, Homo sapiens
cctccataccctgac

SEQ ID NO: 584780 - DNA, 15 bp, Homo sapiens
ctccataccctgacc

SEQ ID NO: 584781 - DNA, 15 bp, Homo sapiens
tccataccctgaccc

SEQ ID NO: 584782 - DNA, 15 bp, Homo sapiens
ccataccctgaccca

SEQ ID NO: 584783 - DNA, 15 bp, Homo sapiens
cataccctgacccac

SEQ ID NO: 584784 - DNA, 15 bp, Homo sapiens
ataccctgacccact

SEQ ID NO: 584785 - DNA, 15 bp, Homo sapiens
taccctgacccactt

SEQ ID NO: 584786 - DNA, 15 bp, Homo sapiens
accctgacccacttg

SEQ ID NO: 584787 - DNA, 15 bp, Homo sapiens
ccctgacccacttgc

SEQ ID NO: 584788 - DNA, 15 bp, Homo sapiens
cctgacccacttgcc

SEQ ID NO: 584789 - DNA, 15 bp, Homo sapiens
ctgacccacttgcca

SEQ ID NO: 584790 - DNA, 15 bp, Homo sapiens
tgacccacttgccag

SEQ ID NO: 584791 - DNA, 15 bp, Homo sapiens
gacccacttgccagc

SEQ ID NO: 584792 - DNA, 15 bp, Homo sapiens
acccacttgccagct

SEQ ID NO: 584793 - DNA, 15 bp, Homo sapiens
cccacttgccagctc

SEQ ID NO: 584794 - DNA, 15 bp, Homo sapiens
ccacttgccagctcc

SEQ ID NO: 584795 - DNA, 15 bp, Homo sapiens
cacttgccagctcca

SEQ ID NO: 584796 - DNA, 15 bp, Homo sapiens
acttgccagctccag

SEQ ID NO: 584797 - DNA, 15 bp, Homo sapiens
cttgccagctccagc

SEQ ID NO: 584798 - DNA, 15 bp, Homo sapiens
ttgccagctccagct

SEQ ID NO: 584799 - DNA, 15 bp, Homo sapiens
tgccagctccagcta

SEQ ID NO: 584800 - DNA, 15 bp, Homo sapiens
gccagctccagctaa

SEQ ID NO: 584801 - DNA, 15 bp, Homo sapiens
ccagctccagctaat

SEQ ID NO: 584802 - DNA, 15 bp, Homo sapiens
cagctccagctaatt

SEQ ID NO: 584803 - DNA, 15 bp, Homo sapiens
agctccagctaattt

SEQ ID NO: 584804 - DNA, 15 bp, Homo sapiens
gctccagctaatttt

SEQ ID NO: 584805 - DNA, 15 bp, Homo sapiens
ctccagctaatttta

SEQ ID NO: 584806 - DNA, 15 bp, Homo sapiens
tccagctaattttag

SEQ ID NO: 584807 - DNA, 15 bp, Homo sapiens
ccagctaattttagc

SEQ ID NO: 584808 - DNA, 15 bp, Homo sapiens
cagctaattttagca

SEQ ID NO: 584809 - DNA, 15 bp, Homo sapiens
agctaattttagcag

SEQ ID NO: 584810 - DNA, 15 bp, Homo sapiens
gctaattttagcagg

SEQ ID NO: 584811 - DNA, 15 bp, Homo sapiens
ctaattttagcaggc

SEQ ID NO: 584812 - DNA, 15 bp, Homo sapiens
taattttagcaggct

SEQ ID NO: 584813 - DNA, 15 bp, Homo sapiens
aattttagcaggctt

SEQ ID NO: 584814 - DNA, 15 bp, Homo sapiens
attttagcaggcttt

SEQ ID NO: 584815 - DNA, 15 bp, Homo sapiens
ttttagcaggctttg

SEQ ID NO: 584816 - DNA, 15 bp, Homo sapiens
tttagcaggctttgg

SEQ ID NO: 584817 - DNA, 15 bp, Homo sapiens
ttagcaggctttggc

SEQ ID NO: 584818 - DNA, 15 bp, Homo sapiens
tagcaggctttggca

SEQ ID NO: 584819 - DNA, 15 bp, Homo sapiens
agcaggctttggcag

SEQ ID NO: 584820 - DNA, 15 bp, Homo sapiens
gcaggctttggcagg

SEQ ID NO: 584821 - DNA, 15 bp, Homo sapiens
caggctttggcaggt

SEQ ID NO: 584822 - DNA, 15 bp, Homo sapiens
aggctttggcaggtg

SEQ ID NO: 584823 - DNA, 15 bp, Homo sapiens
ggctttggcaggtgc

SEQ ID NO: 584824 - DNA, 15 bp, Homo sapiens
gctttggcaggtgcc

SEQ ID NO: 584825 - DNA, 15 bp, Homo sapiens
ctttggcaggtgcca

SEQ ID NO: 584826 - DNA, 15 bp, Homo sapiens
tttggcaggtgccag

SEQ ID NO: 584827 - DNA, 15 bp, Homo sapiens
ttggcaggtgccagc

SEQ ID NO: 584828 - DNA, 15 bp, Homo sapiens
tggcaggtgccagca

SEQ ID NO: 584829 - DNA, 15 bp, Homo sapiens
ggcaggtgccagcaa

SEQ ID NO: 584830 - DNA, 15 bp, Homo sapiens
gcaggtgccagcaag

SEQ ID NO: 584831 - DNA, 15 bp, Homo sapiens
caggtgccagcaagt

SEQ ID NO: 584832 - DNA, 15 bp, Homo sapiens
aggtgccagcaagta

SEQ ID NO: 584833 - DNA, 15 bp, Homo sapiens
ggtgccagcaagtac

SEQ ID NO: 584834 - DNA, 15 bp, Homo sapiens
gtgccagcaagtaca

SEQ ID NO: 584835 - DNA, 15 bp, Homo sapiens
tgccagcaagtacat

SEQ ID NO: 584836 - DNA, 15 bp, Homo sapiens
gccagcaagtacata

SEQ ID NO: 584837 - DNA, 15 bp, Homo sapiens
ccagcaagtacatag

SEQ ID NO: 584838 - DNA, 15 bp, Homo sapiens
cagcaagtacatagc

SEQ ID NO: 584839 - DNA, 15 bp, Homo sapiens
agcaagtacatagca

SEQ ID NO: 584840 - DNA, 15 bp, Homo sapiens
gcaagtacatagcat

SEQ ID NO: 584841 - DNA, 15 bp, Homo sapiens
caagtacatagcatg

SEQ ID NO: 584842 - DNA, 15 bp, Homo sapiens
aagtacatagcatgt

SEQ ID NO: 584843 - DNA, 15 bp, Homo sapiens
agtacatagcatgtg

SEQ ID NO: 584844 - DNA, 15 bp, Homo sapiens
gtacatagcatgtgg

SEQ ID NO: 584845 - DNA, 15 bp, Homo sapiens
tacatagcatgtgga

SEQ ID NO: 584846 - DNA, 15 bp, Homo sapiens
acatagcatgtggat

SEQ ID NO: 584847 - DNA, 15 bp, Homo sapiens
catagcatgtggatg

SEQ ID NO: 584848 - DNA, 15 bp, Homo sapiens
atagcatgtggatgt

SEQ ID NO: 584849 - DNA, 15 bp, Homo sapiens
tagcatgtggatgtc

SEQ ID NO: 584850 - DNA, 15 bp, Homo sapiens
agcatgtggatgtca

SEQ ID NO: 584851 - DNA, 15 bp, Homo sapiens
gcatgtggatgtcac

SEQ ID NO: 584852 - DNA, 15 bp, Homo sapiens
catgtggatgtcact

SEQ ID NO: 584853 - DNA, 15 bp, Homo sapiens
atgtggatgtcactc

SEQ ID NO: 584854 - DNA, 15 bp, Homo sapiens
tgtggatgtcactcc

SEQ ID NO: 584855 - DNA, 15 bp, Homo sapiens
gtggatgtcactccc

SEQ ID NO: 584856 - DNA, 15 bp, Homo sapiens
tggatgtcactccca

SEQ ID NO: 584857 - DNA, 15 bp, Homo sapiens
ggatgtcactcccag

SEQ ID NO: 584858 - DNA, 15 bp, Homo sapiens
gatgtcactcccagg

SEQ ID NO: 584859 - DNA, 15 bp, Homo sapiens
atgtcactcccaggt

SEQ ID NO: 584860 - DNA, 15 bp, Homo sapiens
tgtcactcccaggtg

SEQ ID NO: 584861 - DNA, 15 bp, Homo sapiens
gtcactcccaggtga

SEQ ID NO: 584862 - DNA, 15 bp, Homo sapiens
tcactcccaggtgag

SEQ ID NO: 584863 - DNA, 15 bp, Homo sapiens
cactcccaggtgagc

SEQ ID NO: 584864 - DNA, 15 bp, Homo sapiens
actcccaggtgagcc

SEQ ID NO: 584865 - DNA, 15 bp, Homo sapiens
ctcccaggtgagccc

SEQ ID NO: 584866 - DNA, 15 bp, Homo sapiens
tcccaggtgagccca

SEQ ID NO: 584867 - DNA, 15 bp, Homo sapiens
cccaggtgagcccaa

SEQ ID NO: 584868 - DNA, 15 bp, Homo sapiens
ccaggtgagcccaag

SEQ ID NO: 584869 - DNA, 15 bp, Homo sapiens
caggtgagcccaagg

SEQ ID NO: 584870 - DNA, 15 bp, Homo sapiens
aggtgagcccaagga

SEQ ID NO: 584871 - DNA, 15 bp, Homo sapiens
ggtgagcccaaggag

SEQ ID NO: 584872 - DNA, 15 bp, Homo sapiens
gtgagcccaaggaga

SEQ ID NO: 584873 - DNA, 15 bp, Homo sapiens
tgagcccaaggagag

SEQ ID NO: 584874 - DNA, 15 bp, Homo sapiens
gagcccaaggagagg

SEQ ID NO: 584875 - DNA, 15 bp, Homo sapiens
agcccaaggagaggc

SEQ ID NO: 584876 - DNA, 15 bp, Homo sapiens
gcccaaggagaggcc

SEQ ID NO: 584877 - DNA, 15 bp, Homo sapiens
cccaaggagaggcct

SEQ ID NO: 584878 - DNA, 15 bp, Homo sapiens
ccaaggagaggcctg

SEQ ID NO: 584879 - DNA, 15 bp, Homo sapiens
caaggagaggcctgg

SEQ ID NO: 584880 - DNA, 15 bp, Homo sapiens
aaggagaggcctggg

SEQ ID NO: 584881 - DNA, 15 bp, Homo sapiens
aggagaggcctgggc

SEQ ID NO: 584882 - DNA, 15 bp, Homo sapiens
ggagaggcctgggcc

SEQ ID NO: 584883 - DNA, 15 bp, Homo sapiens
gagaggcctgggcca

SEQ ID NO: 584884 - DNA, 15 bp, Homo sapiens
agaggcctgggccag

SEQ ID NO: 584885 - DNA, 15 bp, Homo sapiens
gaggcctgggccaga

SEQ ID NO: 584886 - DNA, 15 bp, Homo sapiens
aggcctgggccagag

SEQ ID NO: 584887 - DNA, 15 bp, Homo sapiens
ggcctgggccagagc

SEQ ID NO: 584888 - DNA, 15 bp, Homo sapiens
gcctgggccagagcc

SEQ ID NO: 584889 - DNA, 15 bp, Homo sapiens
cctgggccagagcct

SEQ ID NO: 584890 - DNA, 15 bp, Homo sapiens
ctgggccagagcctg

SEQ ID NO: 584891 - DNA, 15 bp, Homo sapiens
tgggccagagcctgg

SEQ ID NO: 584892 - DNA, 15 bp, Homo sapiens
gggccagagcctgga

SEQ ID NO: 584893 - DNA, 15 bp, Homo sapiens
ggccagagcctggaa

SEQ ID NO: 584894 - DNA, 15 bp, Homo sapiens
gccagagcctggaag

SEQ ID NO: 584895 - DNA, 15 bp, Homo sapiens
ccagagcctggaagt

SEQ ID NO: 584896 - DNA, 15 bp, Homo sapiens
cagagcctggaagtc

SEQ ID NO: 584897 - DNA, 15 bp, Homo sapiens
agagcctggaagtca

SEQ ID NO: 584898 - DNA, 15 bp, Homo sapiens
gagcctggaagtcat

SEQ ID NO: 584899 - DNA, 15 bp, Homo sapiens
agcctggaagtcatg

SEQ ID NO: 584900 - DNA, 15 bp, Homo sapiens
gcctggaagtcatgg

SEQ ID NO: 584901 - DNA, 15 bp, Homo sapiens
cctggaagtcatggt

SEQ ID NO: 584902 - DNA, 15 bp, Homo sapiens
ctggaagtcatggtc

SEQ ID NO: 584903 - DNA, 15 bp, Homo sapiens
tggaagtcatggtct

SEQ ID NO: 584904 - DNA, 15 bp, Homo sapiens
ggaagtcatggtcta

SEQ ID NO: 584905 - DNA, 15 bp, Homo sapiens
gaagtcatggtctat

SEQ ID NO: 584906 - DNA, 15 bp, Homo sapiens
aagtcatggtctatg

SEQ ID NO: 584907 - DNA, 15 bp, Homo sapiens
agtcatggtctatgc

SEQ ID NO: 584908 - DNA, 15 bp, Homo sapiens
gtcatggtctatgcc

SEQ ID NO: 584909 - DNA, 15 bp, Homo sapiens
tcatggtctatgccc

SEQ ID NO: 584910 - DNA, 15 bp, Homo sapiens
catggtctatgccca

SEQ ID NO: 584911 - DNA, 15 bp, Homo sapiens
atggtctatgcccat

SEQ ID NO: 584912 - DNA, 15 bp, Homo sapiens
tggtctatgcccatg

SEQ ID NO: 584913 - DNA, 15 bp, Homo sapiens
ggtctatgcccatgg

SEQ ID NO: 584914 - DNA, 15 bp, Homo sapiens
gtctatgcccatgga

SEQ ID NO: 584915 - DNA, 15 bp, Homo sapiens
tctatgcccatggag

SEQ ID NO: 584916 - DNA, 15 bp, Homo sapiens
ctatgcccatggagg

SEQ ID NO: 584917 - DNA, 15 bp, Homo sapiens
tatgcccatggaggc

SEQ ID NO: 584918 - DNA, 15 bp, Homo sapiens
atgcccatggaggca

SEQ ID NO: 584919 - DNA, 15 bp, Homo sapiens
tgcccatggaggcac

SEQ ID NO: 584920 - DNA, 15 bp, Homo sapiens
gcccatggaggcacc

SEQ ID NO: 584921 - DNA, 15 bp, Homo sapiens
cccatggaggcaccc

SEQ ID NO: 584922 - DNA, 15 bp, Homo sapiens
ccatggaggcaccca

SEQ ID NO: 584923 - DNA, 15 bp, Homo sapiens
catggaggcacccaa

SEQ ID NO: 584924 - DNA, 15 bp, Homo sapiens
atggaggcacccaaa

SEQ ID NO: 584925 - DNA, 15 bp, Homo sapiens
tggaggcacccaaag

SEQ ID NO: 584926 - DNA, 15 bp, Homo sapiens
ggaggcacccaaagc

SEQ ID NO: 584927 - DNA, 15 bp, Homo sapiens
gaggcacccaaagca

SEQ ID NO: 584928 - DNA, 15 bp, Homo sapiens
aggcacccaaagcaa

SEQ ID NO: 584929 - DNA, 15 bp, Homo sapiens
ggcacccaaagcaag

SEQ ID NO: 584930 - DNA, 15 bp, Homo sapiens
gcacccaaagcaagc

SEQ ID NO: 584931 - DNA, 15 bp, Homo sapiens
cacccaaagcaagcc

SEQ ID NO: 584932 - DNA, 15 bp, Homo sapiens
acccaaagcaagcct

SEQ ID NO: 584933 - DNA, 15 bp, Homo sapiens
cccaaagcaagcctg

SEQ ID NO: 584934 - DNA, 15 bp, Homo sapiens
ccaaagcaagcctga

SEQ ID NO: 584935 - DNA, 15 bp, Homo sapiens
caaagcaagcctgag

SEQ ID NO: 584936 - DNA, 15 bp, Homo sapiens
aaagcaagcctgagg

SEQ ID NO: 584937 - DNA, 15 bp, Homo sapiens
aagcaagcctgaggc

SEQ ID NO: 584938 - DNA, 15 bp, Homo sapiens
agcaagcctgaggcc

SEQ ID NO: 584939 - DNA, 15 bp, Homo sapiens
gcaagcctgaggcct

SEQ ID NO: 584940 - DNA, 15 bp, Homo sapiens
caagcctgaggcctg

SEQ ID NO: 584941 - DNA, 15 bp, Homo sapiens
aagcctgaggcctgg

SEQ ID NO: 584942 - DNA, 15 bp, Homo sapiens
agcctgaggcctgga

SEQ ID NO: 584943 - DNA, 15 bp, Homo sapiens
gcctgaggcctggac

SEQ ID NO: 584944 - DNA, 15 bp, Homo sapiens
cctgaggcctggact

SEQ ID NO: 584945 - DNA, 15 bp, Homo sapiens
ctgaggcctggactt

SEQ ID NO: 584946 - DNA, 15 bp, Homo sapiens
tgaggcctggacttt

SEQ ID NO: 584947 - DNA, 15 bp, Homo sapiens
gaggcctggactttg

SEQ ID NO: 584948 - DNA, 15 bp, Homo sapiens
aggcctggactttgc

SEQ ID NO: 584949 - DNA, 15 bp, Homo sapiens
ggcctggactttgca

SEQ ID NO: 584950 - DNA, 15 bp, Homo sapiens
gcctggactttgcag

SEQ ID NO: 584951 - DNA, 15 bp, Homo sapiens
cctggactttgcagt

SEQ ID NO: 584952 - DNA, 15 bp, Homo sapiens
ctggactttgcagtc

SEQ ID NO: 584953 - DNA, 15 bp, Homo sapiens
tggactttgcagtca

SEQ ID NO: 584954 - DNA, 15 bp, Homo sapiens
ggactttgcagtcac

SEQ ID NO: 584955 - DNA, 15 bp, Homo sapiens
gactttgcagtcaca

SEQ ID NO: 584956 - DNA, 15 bp, Homo sapiens
actttgcagtcacaa

SEQ ID NO: 584957 - DNA, 15 bp, Homo sapiens
ctttgcagtcacaaa

SEQ ID NO: 584958 - DNA, 15 bp, Homo sapiens
tttgcagtcacaaaa

SEQ ID NO: 584959 - DNA, 15 bp, Homo sapiens
ttgcagtcacaaaat

SEQ ID NO: 584960 - DNA, 15 bp, Homo sapiens
tgcagtcacaaaatt

SEQ ID NO: 584961 - DNA, 15 bp, Homo sapiens
gcagtcacaaaatta

SEQ ID NO: 584962 - DNA, 15 bp, Homo sapiens
cagtcacaaaattaa

SEQ ID NO: 584963 - DNA, 15 bp, Homo sapiens
agtcacaaaattaag

SEQ ID NO: 584964 - DNA, 15 bp, Homo sapiens
gtcacaaaattaaga

SEQ ID NO: 584965 - DNA, 15 bp, Homo sapiens
tcacaaaattaagaa

SEQ ID NO: 584966 - DNA, 15 bp, Homo sapiens
cacaaaattaagaat

SEQ ID NO: 584967 - DNA, 15 bp, Homo sapiens
acaaaattaagaatg

SEQ ID NO: 584968 - DNA, 15 bp, Homo sapiens
caaaattaagaatga

SEQ ID NO: 584969 - DNA, 15 bp, Homo sapiens
aaaattaagaatgat

SEQ ID NO: 584970 - DNA, 15 bp, Homo sapiens
aaattaagaatgata

SEQ ID NO: 584971 - DNA, 15 bp, Homo sapiens
aattaagaatgatac

SEQ ID NO: 584972 - DNA, 15 bp, Homo sapiens
attaagaatgatacc

SEQ ID NO: 584973 - DNA, 15 bp, Homo sapiens
ttaagaatgataccc

SEQ ID NO: 584974 - DNA, 15 bp, Homo sapiens
taagaatgatacccc

SEQ ID NO: 584975 - DNA, 15 bp, Homo sapiens
aagaatgatacccct

SEQ ID NO: 584976 - DNA, 15 bp, Homo sapiens
agaatgatacccctg

SEQ ID NO: 584977 - DNA, 15 bp, Homo sapiens
gaatgatacccctgt

SEQ ID NO: 584978 - DNA, 15 bp, Homo sapiens
aatgatacccctgtt

SEQ ID NO: 584979 - DNA, 15 bp, Homo sapiens
atgatacccctgttt

SEQ ID NO: 584980 - DNA, 15 bp, Homo sapiens
tgatacccctgtttt

SEQ ID NO: 584981 - DNA, 15 bp, Homo sapiens
gatacccctgttttt

SEQ ID NO: 584982 - DNA, 15 bp, Homo sapiens
atacccctgtttttt

SEQ ID NO: 584983 - DNA, 15 bp, Homo sapiens
tacccctgttttttg

SEQ ID NO: 584984 - DNA, 15 bp, Homo sapiens
acccctgttttttgt

SEQ ID NO: 584985 - DNA, 15 bp, Homo sapiens
cccctgttttttgtt

SEQ ID NO: 584986 - DNA, 15 bp, Homo sapiens
ccctgttttttgttt

SEQ ID NO: 584987 - DNA, 15 bp, Homo sapiens
cctgttttttgtttg

SEQ ID NO: 584988 - DNA, 15 bp, Homo sapiens
ctgttttttgtttgt

SEQ ID NO: 584989 - DNA, 15 bp, Homo sapiens
tgttttttgtttgtt

SEQ ID NO: 584990 - DNA, 15 bp, Homo sapiens
gttttttgtttgttt

SEQ ID NO: 584991 - DNA, 15 bp, Homo sapiens
ttttttgtttgtttt

SEQ ID NO: 584992 - DNA, 15 bp, Homo sapiens
tttttgtttgttttt

SEQ ID NO: 584993 - DNA, 15 bp, Homo sapiens
ttttgtttgtttttg

SEQ ID NO: 584994 - DNA, 15 bp, Homo sapiens
tttgtttgtttttga

SEQ ID NO: 584995 - DNA, 15 bp, Homo sapiens
ttgtttgtttttgat

SEQ ID NO: 584996 - DNA, 15 bp, Homo sapiens
tgtttgtttttgatc

SEQ ID NO: 584997 - DNA, 15 bp, Homo sapiens
gtttgtttttgatca

SEQ ID NO: 584998 - DNA, 15 bp, Homo sapiens
tttgtttttgatcag

SEQ ID NO: 584999 - DNA, 15 bp, Homo sapiens
ttgtttttgatcagt

SEQ ID NO: 585000 - DNA, 15 bp, Homo sapiens
tgtttttgatcagtt

SEQ ID NO: 585001 - DNA, 15 bp, Homo sapiens
gtttttgatcagttg

SEQ ID NO: 585002 - DNA, 15 bp, Homo sapiens
tttttgatcagttgg

SEQ ID NO: 585003 - DNA, 15 bp, Homo sapiens
ttttgatcagttggc

SEQ ID NO: 585004 - DNA, 15 bp, Homo sapiens
tttgatcagttggcc

SEQ ID NO: 585005 - DNA, 15 bp, Homo sapiens
ttgatcagttggcca

SEQ ID NO: 585006 - DNA, 15 bp, Homo sapiens
tgatcagttggccac

SEQ ID NO: 585007 - DNA, 15 bp, Homo sapiens
gatcagttggccacc

SEQ ID NO: 585008 - DNA, 15 bp, Homo sapiens
atcagttggccacct

SEQ ID NO: 585009 - DNA, 15 bp, Homo sapiens
tcagttggccacctt

SEQ ID NO: 585010 - DNA, 15 bp, Homo sapiens
cagttggccaccttc

SEQ ID NO: 585011 - DNA, 15 bp, Homo sapiens
agttggccaccttcc

SEQ ID NO: 585012 - DNA, 15 bp, Homo sapiens
gttggccaccttcct

SEQ ID NO: 585013 - DNA, 15 bp, Homo sapiens
ttggccaccttcctc

SEQ ID NO: 585014 - DNA, 15 bp, Homo sapiens
tggccaccttcctcc

SEQ ID NO: 585015 - DNA, 15 bp, Homo sapiens
ggccaccttcctcca

SEQ ID NO: 585016 - DNA, 15 bp, Homo sapiens
gccaccttcctccac

SEQ ID NO: 585017 - DNA, 15 bp, Homo sapiens
ccaccttcctccacc

SEQ ID NO: 585018 - DNA, 15 bp, Homo sapiens
caccttcctccacca

SEQ ID NO: 585019 - DNA, 15 bp, Homo sapiens
accttcctccaccac

SEQ ID NO: 585020 - DNA, 15 bp, Homo sapiens
ccttcctccaccacc

SEQ ID NO: 585021 - DNA, 15 bp, Homo sapiens
cttcctccaccaccc

SEQ ID NO: 585022 - DNA, 15 bp, Homo sapiens
ttcctccaccacccc

SEQ ID NO: 585023 - DNA, 15 bp, Homo sapiens
tcctccaccacccct

SEQ ID NO: 585024 - DNA, 15 bp, Homo sapiens
cctccaccacccctt

SEQ ID NO: 585025 - DNA, 15 bp, Homo sapiens
ctccaccaccccttc

SEQ ID NO: 585026 - DNA, 15 bp, Homo sapiens
tccaccaccccttcc

SEQ ID NO: 585027 - DNA, 15 bp, Homo sapiens
ccaccaccccttccc

SEQ ID NO: 585028 - DNA, 15 bp, Homo sapiens
caccaccccttcccc

SEQ ID NO: 585029 - DNA, 15 bp, Homo sapiens
accaccccttcccca

SEQ ID NO: 585030 - DNA, 15 bp, Homo sapiens
ccaccccttccccaa

SEQ ID NO: 585031 - DNA, 15 bp, Homo sapiens
caccccttccccaag

SEQ ID NO: 585032 - DNA, 15 bp, Homo sapiens
accccttccccaagt

SEQ ID NO: 585033 - DNA, 15 bp, Homo sapiens
ccccttccccaagtt

SEQ ID NO: 585034 - DNA, 15 bp, Homo sapiens
cccttccccaagttc

SEQ ID NO: 585035 - DNA, 15 bp, Homo sapiens
ccttccccaagttcc

SEQ ID NO: 585036 - DNA, 15 bp, Homo sapiens
cttccccaagttcca

SEQ ID NO: 585037 - DNA, 15 bp, Homo sapiens
ttccccaagttccat

SEQ ID NO: 585038 - DNA, 15 bp, Homo sapiens
tccccaagttccata

SEQ ID NO: 585039 - DNA, 15 bp, Homo sapiens
ccccaagttccatac

SEQ ID NO: 585040 - DNA, 15 bp, Homo sapiens
cccaagttccataca

SEQ ID NO: 585041 - DNA, 15 bp, Homo sapiens
ccaagttccatacag

SEQ ID NO: 585042 - DNA, 15 bp, Homo sapiens
caagttccatacaga

SEQ ID NO: 585043 - DNA, 15 bp, Homo sapiens
aagttccatacagac

SEQ ID NO: 585044 - DNA, 15 bp, Homo sapiens
agttccatacagacc

SEQ ID NO: 585045 - DNA, 15 bp, Homo sapiens
gttccatacagaccc

SEQ ID NO: 585046 - DNA, 15 bp, Homo sapiens
ttccatacagacccc

SEQ ID NO: 585047 - DNA, 15 bp, Homo sapiens
tccatacagacccct

SEQ ID NO: 585048 - DNA, 15 bp, Homo sapiens
ccatacagacccctg

SEQ ID NO: 585049 - DNA, 15 bp, Homo sapiens
catacagacccctgg

SEQ ID NO: 585050 - DNA, 15 bp, Homo sapiens
atacagacccctgga

SEQ ID NO: 585051 - DNA, 15 bp, Homo sapiens
tacagacccctggat

SEQ ID NO: 585052 - DNA, 15 bp, Homo sapiens
acagacccctggatt

SEQ ID NO: 585053 - DNA, 15 bp, Homo sapiens
cagacccctggattg

SEQ ID NO: 585054 - DNA, 15 bp, Homo sapiens
agacccctggattgt

SEQ ID NO: 585055 - DNA, 15 bp, Homo sapiens
gacccctggattgta

SEQ ID NO: 585056 - DNA, 15 bp, Homo sapiens
acccctggattgtat

SEQ ID NO: 585057 - DNA, 15 bp, Homo sapiens
cccctggattgtatg

SEQ ID NO: 585058 - DNA, 15 bp, Homo sapiens
ccctggattgtatga

SEQ ID NO: 585059 - DNA, 15 bp, Homo sapiens
cctggattgtatgaa

SEQ ID NO: 585060 - DNA, 15 bp, Homo sapiens
ctggattgtatgaaa

SEQ ID NO: 585061 - DNA, 15 bp, Homo sapiens
tggattgtatgaaat

SEQ ID NO: 585062 - DNA, 15 bp, Homo sapiens
ggattgtatgaaatg

SEQ ID NO: 585063 - DNA, 15 bp, Homo sapiens
gattgtatgaaatgc

SEQ ID NO: 585064 - DNA, 15 bp, Homo sapiens
attgtatgaaatgca

SEQ ID NO: 585065 - DNA, 15 bp, Homo sapiens
ttgtatgaaatgcaa

SEQ ID NO: 585066 - DNA, 15 bp, Homo sapiens
tgtatgaaatgcaaa

SEQ ID NO: 585067 - DNA, 15 bp, Homo sapiens
gtatgaaatgcaaat

SEQ ID NO: 585068 - DNA, 15 bp, Homo sapiens
tatgaaatgcaaatc

SEQ ID NO: 585069 - DNA, 15 bp, Homo sapiens
atgaaatgcaaatcg

SEQ ID NO: 585070 - DNA, 15 bp, Homo sapiens
tgaaatgcaaatcga

SEQ ID NO: 585071 - DNA, 15 bp, Homo sapiens
gaaatgcaaatcgaa

SEQ ID NO: 585072 - DNA, 15 bp, Homo sapiens
aaatgcaaatcgaac

SEQ ID NO: 585073 - DNA, 15 bp, Homo sapiens
aatgcaaatcgaacc

SEQ ID NO: 585074 - DNA, 15 bp, Homo sapiens
atgcaaatcgaacct

SEQ ID NO: 585075 - DNA, 15 bp, Homo sapiens
tgcaaatcgaacctc

SEQ ID NO: 585076 - DNA, 15 bp, Homo sapiens
gcaaatcgaacctct

SEQ ID NO: 585077 - DNA, 15 bp, Homo sapiens
caaatcgaacctctc

SEQ ID NO: 585078 - DNA, 15 bp, Homo sapiens
aaatcgaacctctct

SEQ ID NO: 585079 - DNA, 15 bp, Homo sapiens
aatcgaacctctctg

SEQ ID NO: 585080 - DNA, 15 bp, Homo sapiens
atcgaacctctctgc

SEQ ID NO: 585081 - DNA, 15 bp, Homo sapiens
tcgaacctctctgca

SEQ ID NO: 585082 - DNA, 15 bp, Homo sapiens
cgaacctctctgcag

SEQ ID NO: 585083 - DNA, 15 bp, Homo sapiens
gaacctctctgcaga

SEQ ID NO: 585084 - DNA, 15 bp, Homo sapiens
aacctctctgcagat

SEQ ID NO: 585085 - DNA, 15 bp, Homo sapiens
acctctctgcagatg

SEQ ID NO: 585086 - DNA, 15 bp, Homo sapiens
cctctctgcagatga

SEQ ID NO: 585087 - DNA, 15 bp, Homo sapiens
ctctctgcagatgaa

SEQ ID NO: 585088 - DNA, 15 bp, Homo sapiens
tctctgcagatgaaa

SEQ ID NO: 585089 - DNA, 15 bp, Homo sapiens
ctctgcagatgaaaa

SEQ ID NO: 585090 - DNA, 15 bp, Homo sapiens
tctgcagatgaaaat

SEQ ID NO: 585091 - DNA, 15 bp, Homo sapiens
ctgcagatgaaaatc

SEQ ID NO: 585092 - DNA, 15 bp, Homo sapiens
tgcagatgaaaatcc

SEQ ID NO: 585093 - DNA, 15 bp, Homo sapiens
gcagatgaaaatcca

SEQ ID NO: 585094 - DNA, 15 bp, Homo sapiens
cagatgaaaatccac

SEQ ID NO: 585095 - DNA, 15 bp, Homo sapiens
agatgaaaatccact

SEQ ID NO: 585096 - DNA, 15 bp, Homo sapiens
gatgaaaatccactg

SEQ ID NO: 585097 - DNA, 15 bp, Homo sapiens
atgaaaatccactgg

SEQ ID NO: 585098 - DNA, 15 bp, Homo sapiens
tgaaaatccactggg

SEQ ID NO: 585099 - DNA, 15 bp, Homo sapiens
gaaaatccactgggg

SEQ ID NO: 585100 - DNA, 15 bp, Homo sapiens
aaaatccactgggga

SEQ ID NO: 585101 - DNA, 15 bp, Homo sapiens
aaatccactggggat

SEQ ID NO: 585102 - DNA, 15 bp, Homo sapiens
aatccactggggatc

SEQ ID NO: 585103 - DNA, 15 bp, Homo sapiens
atccactggggatcc

SEQ ID NO: 585104 - DNA, 15 bp, Homo sapiens
tccactggggatccc

SEQ ID NO: 585105 - DNA, 15 bp, Homo sapiens
ccactggggatcccc

SEQ ID NO: 585106 - DNA, 15 bp, Homo sapiens
cactggggatcccct

SEQ ID NO: 585107 - DNA, 15 bp, Homo sapiens
actggggatcccctt

SEQ ID NO: 585108 - DNA, 15 bp, Homo sapiens
ctggggatccccttg

SEQ ID NO: 585109 - DNA, 15 bp, Homo sapiens
tggggatccccttgc

SEQ ID NO: 585110 - DNA, 15 bp, Homo sapiens
ggggatccccttgcc

SEQ ID NO: 585111 - DNA, 15 bp, Homo sapiens
gggatccccttgcct

SEQ ID NO: 585112 - DNA, 15 bp, Homo sapiens
ggatccccttgcctc

SEQ ID NO: 585113 - DNA, 15 bp, Homo sapiens
gatccccttgcctcc

SEQ ID NO: 585114 - DNA, 15 bp, Homo sapiens
atccccttgcctcca

SEQ ID NO: 585115 - DNA, 15 bp, Homo sapiens
tccccttgcctccaa

SEQ ID NO: 585116 - DNA, 15 bp, Homo sapiens
ccccttgcctccaag

SEQ ID NO: 585117 - DNA, 15 bp, Homo sapiens
cccttgcctccaaga

SEQ ID NO: 585118 - DNA, 15 bp, Homo sapiens
ccttgcctccaagag

SEQ ID NO: 585119 - DNA, 15 bp, Homo sapiens
cttgcctccaagagc

SEQ ID NO: 585120 - DNA, 15 bp, Homo sapiens
ttgcctccaagagca

SEQ ID NO: 585121 - DNA, 15 bp, Homo sapiens
tgcctccaagagcaa

SEQ ID NO: 585122 - DNA, 15 bp, Homo sapiens
gcctccaagagcaag

SEQ ID NO: 585123 - DNA, 15 bp, Homo sapiens
cctccaagagcaagt

SEQ ID NO: 585124 - DNA, 15 bp, Homo sapiens
ctccaagagcaagtc

SEQ ID NO: 585125 - DNA, 15 bp, Homo sapiens
tccaagagcaagtcc

SEQ ID NO: 585126 - DNA, 15 bp, Homo sapiens
ccaagagcaagtcca

SEQ ID NO: 585127 - DNA, 15 bp, Homo sapiens
caagagcaagtccag

SEQ ID NO: 585128 - DNA, 15 bp, Homo sapiens
aagagcaagtccaga

SEQ ID NO: 585129 - DNA, 15 bp, Homo sapiens
agagcaagtccagac

SEQ ID NO: 585130 - DNA, 15 bp, Homo sapiens
gagcaagtccagacc

SEQ ID NO: 585131 - DNA, 15 bp, Homo sapiens
agcaagtccagacct

SEQ ID NO: 585132 - DNA, 15 bp, Homo sapiens
gcaagtccagacctg

SEQ ID NO: 585133 - DNA, 15 bp, Homo sapiens
caagtccagacctgc

SEQ ID NO: 585134 - DNA, 15 bp, Homo sapiens
aagtccagacctgca

SEQ ID NO: 585135 - DNA, 15 bp, Homo sapiens
agtccagacctgcac

SEQ ID NO: 585136 - DNA, 15 bp, Homo sapiens
gtccagacctgcacc

SEQ ID NO: 585137 - DNA, 15 bp, Homo sapiens
tccagacctgcacca

SEQ ID NO: 585138 - DNA, 15 bp, Homo sapiens
ccagacctgcaccag

SEQ ID NO: 585139 - DNA, 15 bp, Homo sapiens
cagacctgcaccagc

SEQ ID NO: 585140 - DNA, 15 bp, Homo sapiens
agacctgcaccagcg

SEQ ID NO: 585141 - DNA, 15 bp, Homo sapiens
gacctgcaccagcgc

SEQ ID NO: 585142 - DNA, 15 bp, Homo sapiens
acctgcaccagcgcg

SEQ ID NO: 585143 - DNA, 15 bp, Homo sapiens
cctgcaccagcgcgg

SEQ ID NO: 585144 - DNA, 15 bp, Homo sapiens
ctgcaccagcgcggg

SEQ ID NO: 585145 - DNA, 15 bp, Homo sapiens
tgcaccagcgcgggc

SEQ ID NO: 585146 - DNA, 15 bp, Homo sapiens
gcaccagcgcgggcc

SEQ ID NO: 585147 - DNA, 15 bp, Homo sapiens
caccagcgcgggcca

SEQ ID NO: 585148 - DNA, 15 bp, Homo sapiens
accagcgcgggccag

SEQ ID NO: 585149 - DNA, 15 bp, Homo sapiens
ccagcgcgggccagg

SEQ ID NO: 585150 - DNA, 15 bp, Homo sapiens
cagcgcgggccaggc

SEQ ID NO: 585151 - DNA, 15 bp, Homo sapiens
agcgcgggccaggcc

SEQ ID NO: 585152 - DNA, 15 bp, Homo sapiens
gcgcgggccaggccc

SEQ ID NO: 585153 - DNA, 15 bp, Homo sapiens
cgcgggccaggcccc

SEQ ID NO: 585154 - DNA, 15 bp, Homo sapiens
gcgggccaggccccc

SEQ ID NO: 585155 - DNA, 15 bp, Homo sapiens
cgggccaggccccct

SEQ ID NO: 585156 - DNA, 15 bp, Homo sapiens
gggccaggccccctt

SEQ ID NO: 585157 - DNA, 15 bp, Homo sapiens
ggccaggccccctta

SEQ ID NO: 585158 - DNA, 15 bp, Homo sapiens
gccaggcccccttag

SEQ ID NO: 585159 - DNA, 15 bp, Homo sapiens
ccaggcccccttagg

SEQ ID NO: 585160 - DNA, 15 bp, Homo sapiens
caggcccccttagga

SEQ ID NO: 585161 - DNA, 15 bp, Homo sapiens
aggcccccttaggac

SEQ ID NO: 585162 - DNA, 15 bp, Homo sapiens
ggcccccttaggacc

SEQ ID NO: 585163 - DNA, 15 bp, Homo sapiens
gcccccttaggaccc

SEQ ID NO: 585164 - DNA, 15 bp, Homo sapiens
cccccttaggacccc

SEQ ID NO: 585165 - DNA, 15 bp, Homo sapiens
ccccttaggaccccc

SEQ ID NO: 585166 - DNA, 15 bp, Homo sapiens
cccttaggaccccct

SEQ ID NO: 585167 - DNA, 15 bp, Homo sapiens
ccttaggaccccctc

SEQ ID NO: 585168 - DNA, 15 bp, Homo sapiens
cttaggaccccctcc

SEQ ID NO: 585169 - DNA, 15 bp, Homo sapiens
ttaggaccccctccc

SEQ ID NO: 585170 - DNA, 15 bp, Homo sapiens
taggaccccctccct

SEQ ID NO: 585171 - DNA, 15 bp, Homo sapiens
aggaccccctccctg

SEQ ID NO: 585172 - DNA, 15 bp, Homo sapiens
ggaccccctccctgt

SEQ ID NO: 585173 - DNA, 15 bp, Homo sapiens
gaccccctccctgtc

SEQ ID NO: 585174 - DNA, 15 bp, Homo sapiens
accccctccctgtcc

SEQ ID NO: 585175 - DNA, 15 bp, Homo sapiens
ccccctccctgtcca

SEQ ID NO: 585176 - DNA, 15 bp, Homo sapiens
cccctccctgtccaa

SEQ ID NO: 585177 - DNA, 15 bp, Homo sapiens
ccctccctgtccaag

SEQ ID NO: 585178 - DNA, 15 bp, Homo sapiens
cctccctgtccaagg

SEQ ID NO: 585179 - DNA, 15 bp, Homo sapiens
ctccctgtccaaggg

SEQ ID NO: 585180 - DNA, 15 bp, Homo sapiens
tccctgtccaagggc

SEQ ID NO: 585181 - DNA, 15 bp, Homo sapiens
ccctgtccaagggca

SEQ ID NO: 585182 - DNA, 15 bp, Homo sapiens
cctgtccaagggcat

SEQ ID NO: 585183 - DNA, 15 bp, Homo sapiens
ctgtccaagggcatt

SEQ ID NO: 585184 - DNA, 15 bp, Homo sapiens
tgtccaagggcattt

SEQ ID NO: 585185 - DNA, 15 bp, Homo sapiens
gtccaagggcatttc

SEQ ID NO: 585186 - DNA, 15 bp, Homo sapiens
tccaagggcatttca

SEQ ID NO: 585187 - DNA, 15 bp, Homo sapiens
ccaagggcatttcag

SEQ ID NO: 585188 - DNA, 15 bp, Homo sapiens
caagggcatttcagt

SEQ ID NO: 585189 - DNA, 15 bp, Homo sapiens
aagggcatttcagta

SEQ ID NO: 585190 - DNA, 15 bp, Homo sapiens
agggcatttcagtaa

SEQ ID NO: 585191 - DNA, 15 bp, Homo sapiens
gggcatttcagtaag

SEQ ID NO: 585192 - DNA, 15 bp, Homo sapiens
ggcatttcagtaagt

SEQ ID NO: 585193 - DNA, 15 bp, Homo sapiens
gcatttcagtaagtg

SEQ ID NO: 585194 - DNA, 15 bp, Homo sapiens
catttcagtaagtgt

SEQ ID NO: 585195 - DNA, 15 bp, Homo sapiens
atttcagtaagtgtt

SEQ ID NO: 585196 - DNA, 15 bp, Homo sapiens
tttcagtaagtgttc

SEQ ID NO: 585197 - DNA, 15 bp, Homo sapiens
ttcagtaagtgttct

SEQ ID NO: 585198 - DNA, 15 bp, Homo sapiens
tcagtaagtgttctg

SEQ ID NO: 585199 - DNA, 15 bp, Homo sapiens
cagtaagtgttctgt

SEQ ID NO: 585200 - DNA, 15 bp, Homo sapiens
agtaagtgttctgtg

SEQ ID NO: 585201 - DNA, 15 bp, Homo sapiens
gtaagtgttctgtgg

SEQ ID NO: 585202 - DNA, 15 bp, Homo sapiens
taagtgttctgtggc

SEQ ID NO: 585203 - DNA, 15 bp, Homo sapiens
aagtgttctgtggcc

SEQ ID NO: 585204 - DNA, 15 bp, Homo sapiens
agtgttctgtggcca

SEQ ID NO: 585205 - DNA, 15 bp, Homo sapiens
gtgttctgtggccaa

SEQ ID NO: 585206 - DNA, 15 bp, Homo sapiens
tgttctgtggccaag

SEQ ID NO: 585207 - DNA, 15 bp, Homo sapiens
gttctgtggccaagg

SEQ ID NO: 585208 - DNA, 15 bp, Homo sapiens
ttctgtggccaaggc

SEQ ID NO: 585209 - DNA, 15 bp, Homo sapiens
tctgtggccaaggca

SEQ ID NO: 585210 - DNA, 15 bp, Homo sapiens
ctgtggccaaggcag

SEQ ID NO: 585211 - DNA, 15 bp, Homo sapiens
tgtggccaaggcagc

SEQ ID NO: 585212 - DNA, 15 bp, Homo sapiens
gtggccaaggcagcc

SEQ ID NO: 585213 - DNA, 15 bp, Homo sapiens
tggccaaggcagcct

SEQ ID NO: 585214 - DNA, 15 bp, Homo sapiens
ggccaaggcagcctg

SEQ ID NO: 585215 - DNA, 15 bp, Homo sapiens
gccaaggcagcctgg

SEQ ID NO: 585216 - DNA, 15 bp, Homo sapiens
ccaaggcagcctggt

SEQ ID NO: 585217 - DNA, 15 bp, Homo sapiens
caaggcagcctggtg

SEQ ID NO: 585218 - DNA, 15 bp, Homo sapiens
aaggcagcctggtga

SEQ ID NO: 585219 - DNA, 15 bp, Homo sapiens
aggcagcctggtgac

SEQ ID NO: 585220 - DNA, 15 bp, Homo sapiens
ggcagcctggtgact

SEQ ID NO: 585221 - DNA, 15 bp, Homo sapiens
gcagcctggtgactt

SEQ ID NO: 585222 - DNA, 15 bp, Homo sapiens
cagcctggtgacttt

SEQ ID NO: 585223 - DNA, 15 bp, Homo sapiens
agcctggtgactttc

SEQ ID NO: 585224 - DNA, 15 bp, Homo sapiens
gcctggtgactttct

SEQ ID NO: 585225 - DNA, 15 bp, Homo sapiens
cctggtgactttctg

SEQ ID NO: 585226 - DNA, 15 bp, Homo sapiens
ctggtgactttctgc

SEQ ID NO: 585227 - DNA, 15 bp, Homo sapiens
tggtgactttctgcc

SEQ ID NO: 585228 - DNA, 15 bp, Homo sapiens
ggtgactttctgccc

SEQ ID NO: 585229 - DNA, 15 bp, Homo sapiens
gtgactttctgcccg

SEQ ID NO: 585230 - DNA, 15 bp, Homo sapiens
tgactttctgcccgc

SEQ ID NO: 585231 - DNA, 15 bp, Homo sapiens
gactttctgcccgca

SEQ ID NO: 585232 - DNA, 15 bp, Homo sapiens
actttctgcccgcac

SEQ ID NO: 585233 - DNA, 15 bp, Homo sapiens
ctttctgcccgcaca

SEQ ID NO: 585234 - DNA, 15 bp, Homo sapiens
tttctgcccgcacaa

SEQ ID NO: 585235 - DNA, 15 bp, Homo sapiens
ttctgcccgcacaag

SEQ ID NO: 585236 - DNA, 15 bp, Homo sapiens
tctgcccgcacaagg

SEQ ID NO: 585237 - DNA, 15 bp, Homo sapiens
ctgcccgcacaaggc

SEQ ID NO: 585238 - DNA, 15 bp, Homo sapiens
tgcccgcacaaggct

SEQ ID NO: 585239 - DNA, 15 bp, Homo sapiens
gcccgcacaaggctg

SEQ ID NO: 585240 - DNA, 15 bp, Homo sapiens
cccgcacaaggctga

SEQ ID NO: 585241 - DNA, 15 bp, Homo sapiens
ccgcacaaggctgag

SEQ ID NO: 585242 - DNA, 15 bp, Homo sapiens
cgcacaaggctgagg

SEQ ID NO: 585243 - DNA, 15 bp, Homo sapiens
gcacaaggctgagga

SEQ ID NO: 585244 - DNA, 15 bp, Homo sapiens
cacaaggctgaggaa

SEQ ID NO: 585245 - DNA, 15 bp, Homo sapiens
acaaggctgaggaat

SEQ ID NO: 585246 - DNA, 15 bp, Homo sapiens
caaggctgaggaatg

SEQ ID NO: 585247 - DNA, 15 bp, Homo sapiens
aaggctgaggaatgg

SEQ ID NO: 585248 - DNA, 15 bp, Homo sapiens
aggctgaggaatgga

SEQ ID NO: 585249 - DNA, 15 bp, Homo sapiens
ggctgaggaatggaa

SEQ ID NO: 585250 - DNA, 15 bp, Homo sapiens
gctgaggaatggaag

SEQ ID NO: 585251 - DNA, 15 bp, Homo sapiens
ctgaggaatggaaga

SEQ ID NO: 585252 - DNA, 15 bp, Homo sapiens
tgaggaatggaagat

SEQ ID NO: 585253 - DNA, 15 bp, Homo sapiens
gaggaatggaagatg

SEQ ID NO: 585254 - DNA, 15 bp, Homo sapiens
aggaatggaagatgg

SEQ ID NO: 585255 - DNA, 15 bp, Homo sapiens
ggaatggaagatggg

SEQ ID NO: 585256 - DNA, 15 bp, Homo sapiens
gaatggaagatgggt

SEQ ID NO: 585257 - DNA, 15 bp, Homo sapiens
aatggaagatgggta

SEQ ID NO: 585258 - DNA, 15 bp, Homo sapiens
atggaagatgggtag

SEQ ID NO: 585259 - DNA, 15 bp, Homo sapiens
tggaagatgggtagg

SEQ ID NO: 585260 - DNA, 15 bp, Homo sapiens
ggaagatgggtaggc

SEQ ID NO: 585261 - DNA, 15 bp, Homo sapiens
gaagatgggtaggct

SEQ ID NO: 585262 - DNA, 15 bp, Homo sapiens
aagatgggtaggctg

SEQ ID NO: 585263 - DNA, 15 bp, Homo sapiens
agatgggtaggctgg

SEQ ID NO: 585264 - DNA, 15 bp, Homo sapiens
gatgggtaggctggc

SEQ ID NO: 585265 - DNA, 15 bp, Homo sapiens
atgggtaggctggct

SEQ ID NO: 585266 - DNA, 15 bp, Homo sapiens
tgggtaggctggctc

SEQ ID NO: 585267 - DNA, 15 bp, Homo sapiens
gggtaggctggctct

SEQ ID NO: 585268 - DNA, 15 bp, Homo sapiens
ggtaggctggctctg

SEQ ID NO: 585269 - DNA, 15 bp, Homo sapiens
gtaggctggctctgc

SEQ ID NO: 585270 - DNA, 15 bp, Homo sapiens
taggctggctctgca

SEQ ID NO: 585271 - DNA, 15 bp, Homo sapiens
aggctggctctgcac

SEQ ID NO: 585272 - DNA, 15 bp, Homo sapiens
ggctggctctgcaca

SEQ ID NO: 585273 - DNA, 15 bp, Homo sapiens
gctggctctgcacac

SEQ ID NO: 585274 - DNA, 15 bp, Homo sapiens
ctggctctgcacacc

SEQ ID NO: 585275 - DNA, 15 bp, Homo sapiens
tggctctgcacaccc

SEQ ID NO: 585276 - DNA, 15 bp, Homo sapiens
ggctctgcacacccc

SEQ ID NO: 585277 - DNA, 15 bp, Homo sapiens
gctctgcacaccccc

SEQ ID NO: 585278 - DNA, 15 bp, Homo sapiens
ctctgcacaccccct

SEQ ID NO: 585279 - DNA, 15 bp, Homo sapiens
tctgcacaccccctc

SEQ ID NO: 585280 - DNA, 15 bp, Homo sapiens
ctgcacaccccctcc

SEQ ID NO: 585281 - DNA, 15 bp, Homo sapiens
tgcacaccccctcct

SEQ ID NO: 585282 - DNA, 15 bp, Homo sapiens
gcacaccccctcctg

SEQ ID NO: 585283 - DNA, 15 bp, Homo sapiens
cacaccccctcctgc

SEQ ID NO: 585284 - DNA, 15 bp, Homo sapiens
acaccccctcctgct

SEQ ID NO: 585285 - DNA, 15 bp, Homo sapiens
caccccctcctgctg

SEQ ID NO: 585286 - DNA, 15 bp, Homo sapiens
accccctcctgctgg

SEQ ID NO: 585287 - DNA, 15 bp, Homo sapiens
ccccctcctgctggg

SEQ ID NO: 585288 - DNA, 15 bp, Homo sapiens
cccctcctgctgggc

SEQ ID NO: 585289 - DNA, 15 bp, Homo sapiens
ccctcctgctgggca

SEQ ID NO: 585290 - DNA, 15 bp, Homo sapiens
cctcctgctgggcag

SEQ ID NO: 585291 - DNA, 15 bp, Homo sapiens
ctcctgctgggcagc

SEQ ID NO: 585292 - DNA, 15 bp, Homo sapiens
tcctgctgggcagca

SEQ ID NO: 585293 - DNA, 15 bp, Homo sapiens
cctgctgggcagcaa

SEQ ID NO: 585294 - DNA, 15 bp, Homo sapiens
ctgctgggcagcaat

SEQ ID NO: 585295 - DNA, 15 bp, Homo sapiens
tgctgggcagcaatc

SEQ ID NO: 585296 - DNA, 15 bp, Homo sapiens
gctgggcagcaatcc

SEQ ID NO: 585297 - DNA, 15 bp, Homo sapiens
ctgggcagcaatccc

SEQ ID NO: 585298 - DNA, 15 bp, Homo sapiens
tgggcagcaatccct

SEQ ID NO: 585299 - DNA, 15 bp, Homo sapiens
gggcagcaatcccta

SEQ ID NO: 585300 - DNA, 15 bp, Homo sapiens
ggcagcaatccctac

SEQ ID NO: 585301 - DNA, 15 bp, Homo sapiens
gcagcaatccctacc

SEQ ID NO: 585302 - DNA, 15 bp, Homo sapiens
cagcaatccctaccc

SEQ ID NO: 585303 - DNA, 15 bp, Homo sapiens
agcaatccctacccc

SEQ ID NO: 585304 - DNA, 15 bp, Homo sapiens
gcaatccctacccca

SEQ ID NO: 585305 - DNA, 15 bp, Homo sapiens
caatccctaccccat

SEQ ID NO: 585306 - DNA, 15 bp, Homo sapiens
aatccctaccccatg

SEQ ID NO: 585307 - DNA, 15 bp, Homo sapiens
atccctaccccatgt

SEQ ID NO: 585308 - DNA, 15 bp, Homo sapiens
tccctaccccatgtt

SEQ ID NO: 585309 - DNA, 15 bp, Homo sapiens
ccctaccccatgttc

SEQ ID NO: 585310 - DNA, 15 bp, Homo sapiens
cctaccccatgttca

SEQ ID NO: 585311 - DNA, 15 bp, Homo sapiens
ctaccccatgttcac

SEQ ID NO: 585312 - DNA, 15 bp, Homo sapiens
taccccatgttcaca

SEQ ID NO: 585313 - DNA, 15 bp, Homo sapiens
accccatgttcacag

SEQ ID NO: 585314 - DNA, 15 bp, Homo sapiens
ccccatgttcacaga

SEQ ID NO: 585315 - DNA, 15 bp, Homo sapiens
cccatgttcacagag

SEQ ID NO: 585316 - DNA, 15 bp, Homo sapiens
ccatgttcacagagt

SEQ ID NO: 585317 - DNA, 15 bp, Homo sapiens
catgttcacagagtg

SEQ ID NO: 585318 - DNA, 15 bp, Homo sapiens
atgttcacagagtgt

SEQ ID NO: 585319 - DNA, 15 bp, Homo sapiens
tgttcacagagtgtg

SEQ ID NO: 585320 - DNA, 15 bp, Homo sapiens
gttcacagagtgtgg

SEQ ID NO: 585321 - DNA, 15 bp, Homo sapiens
ttcacagagtgtggc

SEQ ID NO: 585322 - DNA, 15 bp, Homo sapiens
tcacagagtgtggcc

SEQ ID NO: 585323 - DNA, 15 bp, Homo sapiens
cacagagtgtggccg

SEQ ID NO: 585324 - DNA, 15 bp, Homo sapiens
acagagtgtggccgg

SEQ ID NO: 585325 - DNA, 15 bp, Homo sapiens
cagagtgtggccggc

SEQ ID NO: 585326 - DNA, 15 bp, Homo sapiens
agagtgtggccggct

SEQ ID NO: 585327 - DNA, 15 bp, Homo sapiens
gagtgtggccggctg

SEQ ID NO: 585328 - DNA, 15 bp, Homo sapiens
agtgtggccggctgc

SEQ ID NO: 585329 - DNA, 15 bp, Homo sapiens
gtgtggccggctgcc

SEQ ID NO: 585330 - DNA, 15 bp, Homo sapiens
tgtggccggctgccc

SEQ ID NO: 585331 - DNA, 15 bp, Homo sapiens
gtggccggctgcccc

SEQ ID NO: 585332 - DNA, 15 bp, Homo sapiens
tggccggctgcccca

SEQ ID NO: 585333 - DNA, 15 bp, Homo sapiens
ggccggctgccccat

SEQ ID NO: 585334 - DNA, 15 bp, Homo sapiens
gccggctgccccatg

SEQ ID NO: 585335 - DNA, 15 bp, Homo sapiens
ccggctgccccatgg

SEQ ID NO: 585336 - DNA, 15 bp, Homo sapiens
cggctgccccatggc

SEQ ID NO: 585337 - DNA, 15 bp, Homo sapiens
ggctgccccatggct

SEQ ID NO: 585338 - DNA, 15 bp, Homo sapiens
gctgccccatggctc

SEQ ID NO: 585339 - DNA, 15 bp, Homo sapiens
ctgccccatggctct

SEQ ID NO: 585340 - DNA, 15 bp, Homo sapiens
tgccccatggctctg

SEQ ID NO: 585341 - DNA, 15 bp, Homo sapiens
gccccatggctctgt

SEQ ID NO: 585342 - DNA, 15 bp, Homo sapiens
ccccatggctctgtc

SEQ ID NO: 585343 - DNA, 15 bp, Homo sapiens
cccatggctctgtcc

SEQ ID NO: 585344 - DNA, 15 bp, Homo sapiens
ccatggctctgtccc

SEQ ID NO: 585345 - DNA, 15 bp, Homo sapiens
catggctctgtcccc

SEQ ID NO: 585346 - DNA, 15 bp, Homo sapiens
atggctctgtccccg

SEQ ID NO: 585347 - DNA, 15 bp, Homo sapiens
tggctctgtccccgt

SEQ ID NO: 585348 - DNA, 15 bp, Homo sapiens
ggctctgtccccgtg

SEQ ID NO: 585349 - DNA, 15 bp, Homo sapiens
gctctgtccccgtgg

SEQ ID NO: 585350 - DNA, 15 bp, Homo sapiens
ctctgtccccgtggc

SEQ ID NO: 585351 - DNA, 15 bp, Homo sapiens
tctgtccccgtggcc

SEQ ID NO: 585352 - DNA, 15 bp, Homo sapiens
ctgtccccgtggccc

SEQ ID NO: 585353 - DNA, 15 bp, Homo sapiens
tgtccccgtggccct

SEQ ID NO: 585354 - DNA, 15 bp, Homo sapiens
gtccccgtggccctg

SEQ ID NO: 585355 - DNA, 15 bp, Homo sapiens
tccccgtggccctgt

SEQ ID NO: 585356 - DNA, 15 bp, Homo sapiens
ccccgtggccctgtc

SEQ ID NO: 585357 - DNA, 15 bp, Homo sapiens
cccgtggccctgtca

SEQ ID NO: 585358 - DNA, 15 bp, Homo sapiens
ccgtggccctgtcaa

SEQ ID NO: 585359 - DNA, 15 bp, Homo sapiens
cgtggccctgtcaac

SEQ ID NO: 585360 - DNA, 15 bp, Homo sapiens
gtggccctgtcaact

SEQ ID NO: 585361 - DNA, 15 bp, Homo sapiens
tggccctgtcaactg

SEQ ID NO: 585362 - DNA, 15 bp, Homo sapiens
ggccctgtcaactgt

SEQ ID NO: 585363 - DNA, 15 bp, Homo sapiens
gccctgtcaactgtt

SEQ ID NO: 585364 - DNA, 15 bp, Homo sapiens
ccctgtcaactgtta

SEQ ID NO: 585365 - DNA, 15 bp, Homo sapiens
cctgtcaactgttac

SEQ ID NO: 585366 - DNA, 15 bp, Homo sapiens
ctgtcaactgttacc

SEQ ID NO: 585367 - DNA, 15 bp, Homo sapiens
tgtcaactgttaccc

SEQ ID NO: 585368 - DNA, 15 bp, Homo sapiens
gtcaactgttaccca

SEQ ID NO: 585369 - DNA, 15 bp, Homo sapiens
tcaactgttacccac

SEQ ID NO: 585370 - DNA, 15 bp, Homo sapiens
caactgttacccaca

SEQ ID NO: 585371 - DNA, 15 bp, Homo sapiens
aactgttacccacat

SEQ ID NO: 585372 - DNA, 15 bp, Homo sapiens
actgttacccacatg

SEQ ID NO: 585373 - DNA, 15 bp, Homo sapiens
ctgttacccacatgg

SEQ ID NO: 585374 - DNA, 15 bp, Homo sapiens
tgttacccacatggc

SEQ ID NO: 585375 - DNA, 15 bp, Homo sapiens
gttacccacatggcc

SEQ ID NO: 585376 - DNA, 15 bp, Homo sapiens
ttacccacatggcct

SEQ ID NO: 585377 - DNA, 15 bp, Homo sapiens
tacccacatggccta

SEQ ID NO: 585378 - DNA, 15 bp, Homo sapiens
acccacatggcctac

SEQ ID NO: 585379 - DNA, 15 bp, Homo sapiens
cccacatggcctacc

SEQ ID NO: 585380 - DNA, 15 bp, Homo sapiens
ccacatggcctaccc

SEQ ID NO: 585381 - DNA, 15 bp, Homo sapiens
cacatggcctaccct

SEQ ID NO: 585382 - DNA, 15 bp, Homo sapiens
acatggcctaccctc

SEQ ID NO: 585383 - DNA, 15 bp, Homo sapiens
catggcctaccctcc

SEQ ID NO: 585384 - DNA, 15 bp, Homo sapiens
atggcctaccctccc

SEQ ID NO: 585385 - DNA, 15 bp, Homo sapiens
tggcctaccctccct

SEQ ID NO: 585386 - DNA, 15 bp, Homo sapiens
ggcctaccctccctt

SEQ ID NO: 585387 - DNA, 15 bp, Homo sapiens
gcctaccctcccttt

SEQ ID NO: 585388 - DNA, 15 bp, Homo sapiens
cctaccctccctttc

SEQ ID NO: 585389 - DNA, 15 bp, Homo sapiens
ctaccctccctttct

SEQ ID NO: 585390 - DNA, 15 bp, Homo sapiens
taccctccctttctg

SEQ ID NO: 585391 - DNA, 15 bp, Homo sapiens
accctccctttctgc

SEQ ID NO: 585392 - DNA, 15 bp, Homo sapiens
ccctccctttctgcc

SEQ ID NO: 585393 - DNA, 15 bp, Homo sapiens
cctccctttctgccc

SEQ ID NO: 585394 - DNA, 15 bp, Homo sapiens
ctccctttctgccct

SEQ ID NO: 585395 - DNA, 15 bp, Homo sapiens
tccctttctgccctg

SEQ ID NO: 585396 - DNA, 15 bp, Homo sapiens
ccctttctgccctgc

SEQ ID NO: 585397 - DNA, 15 bp, Homo sapiens
cctttctgccctgcc

SEQ ID NO: 585398 - DNA, 15 bp, Homo sapiens
ctttctgccctgcct

SEQ ID NO: 585399 - DNA, 15 bp, Homo sapiens
tttctgccctgcctc

SEQ ID NO: 585400 - DNA, 15 bp, Homo sapiens
ttctgccctgcctct

SEQ ID NO: 585401 - DNA, 15 bp, Homo sapiens
tctgccctgcctctg

SEQ ID NO: 585402 - DNA, 15 bp, Homo sapiens
ctgccctgcctctga

SEQ ID NO: 585403 - DNA, 15 bp, Homo sapiens
tgccctgcctctgac

SEQ ID NO: 585404 - DNA, 15 bp, Homo sapiens
gccctgcctctgacc

SEQ ID NO: 585405 - DNA, 15 bp, Homo sapiens
ccctgcctctgaccc

SEQ ID NO: 585406 - DNA, 15 bp, Homo sapiens
cctgcctctgacccc

SEQ ID NO: 585407 - DNA, 15 bp, Homo sapiens
ctgcctctgacccca

SEQ ID NO: 585408 - DNA, 15 bp, Homo sapiens
tgcctctgaccccat

SEQ ID NO: 585409 - DNA, 15 bp, Homo sapiens
gcctctgaccccatg

SEQ ID NO: 585410 - DNA, 15 bp, Homo sapiens
cctctgaccccatgg

SEQ ID NO: 585411 - DNA, 15 bp, Homo sapiens
ctctgaccccatggc

SEQ ID NO: 585412 - DNA, 15 bp, Homo sapiens
tctgaccccatggca

SEQ ID NO: 585413 - DNA, 15 bp, Homo sapiens
ctgaccccatggcag

SEQ ID NO: 585414 - DNA, 15 bp, Homo sapiens
tgaccccatggcagg

SEQ ID NO: 585415 - DNA, 15 bp, Homo sapiens
gaccccatggcaggg

SEQ ID NO: 585416 - DNA, 15 bp, Homo sapiens
accccatggcagggg

SEQ ID NO: 585417 - DNA, 15 bp, Homo sapiens
ccccatggcaggggg

SEQ ID NO: 585418 - DNA, 15 bp, Homo sapiens
cccatggcagggggc

SEQ ID NO: 585419 - DNA, 15 bp, Homo sapiens
ccatggcagggggca

SEQ ID NO: 585420 - DNA, 15 bp, Homo sapiens
catggcagggggcag

SEQ ID NO: 585421 - DNA, 15 bp, Homo sapiens
atggcagggggcaga

SEQ ID NO: 585422 - DNA, 15 bp, Homo sapiens
tggcagggggcagag

SEQ ID NO: 585423 - DNA, 15 bp, Homo sapiens
ggcagggggcagagt

SEQ ID NO: 585424 - DNA, 15 bp, Homo sapiens
gcagggggcagagta

SEQ ID NO: 585425 - DNA, 15 bp, Homo sapiens
cagggggcagagtat

SEQ ID NO: 585426 - DNA, 15 bp, Homo sapiens
agggggcagagtatt

SEQ ID NO: 585427 - DNA, 15 bp, Homo sapiens
gggggcagagtattt

SEQ ID NO: 585428 - DNA, 15 bp, Homo sapiens
ggggcagagtatttg

SEQ ID NO: 585429 - DNA, 15 bp, Homo sapiens
gggcagagtatttga

SEQ ID NO: 585430 - DNA, 15 bp, Homo sapiens
ggcagagtatttgag

SEQ ID NO: 585431 - DNA, 15 bp, Homo sapiens
gcagagtatttgagc

SEQ ID NO: 585432 - DNA, 15 bp, Homo sapiens
cagagtatttgagca

SEQ ID NO: 585433 - DNA, 15 bp, Homo sapiens
agagtatttgagcag

SEQ ID NO: 585434 - DNA, 15 bp, Homo sapiens
gagtatttgagcagc

SEQ ID NO: 585435 - DNA, 15 bp, Homo sapiens
agtatttgagcagcc

SEQ ID NO: 585436 - DNA, 15 bp, Homo sapiens
gtatttgagcagccg

SEQ ID NO: 585437 - DNA, 15 bp, Homo sapiens
tatttgagcagccgc

SEQ ID NO: 585438 - DNA, 15 bp, Homo sapiens
atttgagcagccgcc

SEQ ID NO: 585439 - DNA, 15 bp, Homo sapiens
tttgagcagccgcca

SEQ ID NO: 585440 - DNA, 15 bp, Homo sapiens
ttgagcagccgccag

SEQ ID NO: 585441 - DNA, 15 bp, Homo sapiens
tgagcagccgccagg

SEQ ID NO: 585442 - DNA, 15 bp, Homo sapiens
gagcagccgccaggc

SEQ ID NO: 585443 - DNA, 15 bp, Homo sapiens
agcagccgccaggct

SEQ ID NO: 585444 - DNA, 15 bp, Homo sapiens
gcagccgccaggctg

SEQ ID NO: 585445 - DNA, 15 bp, Homo sapiens
cagccgccaggctga

SEQ ID NO: 585446 - DNA, 15 bp, Homo sapiens
agccgccaggctgag

SEQ ID NO: 585447 - DNA, 15 bp, Homo sapiens
gccgccaggctgagc

SEQ ID NO: 585448 - DNA, 15 bp, Homo sapiens
ccgccaggctgagcc

SEQ ID NO: 585449 - DNA, 15 bp, Homo sapiens
cgccaggctgagccc

SEQ ID NO: 585450 - DNA, 15 bp, Homo sapiens
gccaggctgagccct

SEQ ID NO: 585451 - DNA, 15 bp, Homo sapiens
ccaggctgagccctt

SEQ ID NO: 585452 - DNA, 15 bp, Homo sapiens
caggctgagcccttt

SEQ ID NO: 585453 - DNA, 15 bp, Homo sapiens
aggctgagccctttc

SEQ ID NO: 585454 - DNA, 15 bp, Homo sapiens
ggctgagccctttca

SEQ ID NO: 585455 - DNA, 15 bp, Homo sapiens
gctgagccctttcag

SEQ ID NO: 585456 - DNA, 15 bp, Homo sapiens
ctgagccctttcagt

SEQ ID NO: 585457 - DNA, 15 bp, Homo sapiens
tgagccctttcagtg

SEQ ID NO: 585458 - DNA, 15 bp, Homo sapiens
gagccctttcagtgc

SEQ ID NO: 585459 - DNA, 15 bp, Homo sapiens
agccctttcagtgca

SEQ ID NO: 585460 - DNA, 15 bp, Homo sapiens
gccctttcagtgcag

SEQ ID NO: 585461 - DNA, 15 bp, Homo sapiens
ccctttcagtgcaga

SEQ ID NO: 585462 - DNA, 15 bp, Homo sapiens
cctttcagtgcagaa

SEQ ID NO: 585463 - DNA, 15 bp, Homo sapiens
ctttcagtgcagaag

SEQ ID NO: 585464 - DNA, 15 bp, Homo sapiens
tttcagtgcagaagc

SEQ ID NO: 585465 - DNA, 15 bp, Homo sapiens
ttcagtgcagaagcc

SEQ ID NO: 585466 - DNA, 15 bp, Homo sapiens
tcagtgcagaagccc

SEQ ID NO: 585467 - DNA, 15 bp, Homo sapiens
cagtgcagaagccct

SEQ ID NO: 585468 - DNA, 15 bp, Homo sapiens
agtgcagaagccctg

SEQ ID NO: 585469 - DNA, 15 bp, Homo sapiens
gtgcagaagccctgg

SEQ ID NO: 585470 - DNA, 15 bp, Homo sapiens
tgcagaagccctggg

SEQ ID NO: 585471 - DNA, 15 bp, Homo sapiens
gcagaagccctgggc

SEQ ID NO: 585472 - DNA, 15 bp, Homo sapiens
cagaagccctgggct

SEQ ID NO: 585473 - DNA, 15 bp, Homo sapiens
agaagccctgggctg

SEQ ID NO: 585474 - DNA, 15 bp, Homo sapiens
gaagccctgggctgc

SEQ ID NO: 585475 - DNA, 15 bp, Homo sapiens
aagccctgggctgcc

SEQ ID NO: 585476 - DNA, 15 bp, Homo sapiens
agccctgggctgcca

SEQ ID NO: 585477 - DNA, 15 bp, Homo sapiens
gccctgggctgccag

SEQ ID NO: 585478 - DNA, 15 bp, Homo sapiens
ccctgggctgccagc

SEQ ID NO: 585479 - DNA, 15 bp, Homo sapiens
cctgggctgccagcc

SEQ ID NO: 585480 - DNA, 15 bp, Homo sapiens
ctgggctgccagcct

SEQ ID NO: 585481 - DNA, 15 bp, Homo sapiens
tgggctgccagcctc

SEQ ID NO: 585482 - DNA, 15 bp, Homo sapiens
gggctgccagcctca

SEQ ID NO: 585483 - DNA, 15 bp, Homo sapiens
ggctgccagcctcag

SEQ ID NO: 585484 - DNA, 15 bp, Homo sapiens
gctgccagcctcagg

SEQ ID NO: 585485 - DNA, 15 bp, Homo sapiens
ctgccagcctcaggc

SEQ ID NO: 585486 - DNA, 15 bp, Homo sapiens
tgccagcctcaggca

SEQ ID NO: 585487 - DNA, 15 bp, Homo sapiens
gccagcctcaggcag

SEQ ID NO: 585488 - DNA, 15 bp, Homo sapiens
ccagcctcaggcagc

SEQ ID NO: 585489 - DNA, 15 bp, Homo sapiens
cagcctcaggcagct

SEQ ID NO: 585490 - DNA, 15 bp, Homo sapiens
agcctcaggcagctc

SEQ ID NO: 585491 - DNA, 15 bp, Homo sapiens
gcctcaggcagctct

SEQ ID NO: 585492 - DNA, 15 bp, Homo sapiens
cctcaggcagctctc

SEQ ID NO: 585493 - DNA, 15 bp, Homo sapiens
ctcaggcagctctcc

SEQ ID NO: 585494 - DNA, 15 bp, Homo sapiens
tcaggcagctctcca

SEQ ID NO: 585495 - DNA, 15 bp, Homo sapiens
caggcagctctccat

SEQ ID NO: 585496 - DNA, 15 bp, Homo sapiens
aggcagctctccatc

SEQ ID NO: 585497 - DNA, 15 bp, Homo sapiens
ggcagctctccatcc

SEQ ID NO: 585498 - DNA, 15 bp, Homo sapiens
gcagctctccatcca

SEQ ID NO: 585499 - DNA, 15 bp, Homo sapiens
cagctctccatccaa

SEQ ID NO: 585500 - DNA, 15 bp, Homo sapiens
agctctccatccaag

SEQ ID NO: 585501 - DNA, 15 bp, Homo sapiens
gctctccatccaagc

SEQ ID NO: 585502 - DNA, 15 bp, Homo sapiens
ctctccatccaagca

SEQ ID NO: 585503 - DNA, 15 bp, Homo sapiens
tctccatccaagcag

SEQ ID NO: 585504 - DNA, 15 bp, Homo sapiens
ctccatccaagcagc

SEQ ID NO: 585505 - DNA, 15 bp, Homo sapiens
tccatccaagcagcc

SEQ ID NO: 585506 - DNA, 15 bp, Homo sapiens
ccatccaagcagccg

SEQ ID NO: 585507 - DNA, 15 bp, Homo sapiens
catccaagcagccgt

SEQ ID NO: 585508 - DNA, 15 bp, Homo sapiens
atccaagcagccgtt

SEQ ID NO: 585509 - DNA, 15 bp, Homo sapiens
tccaagcagccgttg

SEQ ID NO: 585510 - DNA, 15 bp, Homo sapiens
ccaagcagccgttgc

SEQ ID NO: 585511 - DNA, 15 bp, Homo sapiens
caagcagccgttgct

SEQ ID NO: 585512 - DNA, 15 bp, Homo sapiens
aagcagccgttgctg

SEQ ID NO: 585513 - DNA, 15 bp, Homo sapiens
agcagccgttgctgc

SEQ ID NO: 585514 - DNA, 15 bp, Homo sapiens
gcagccgttgctgcc

SEQ ID NO: 585515 - DNA, 15 bp, Homo sapiens
cagccgttgctgcca

SEQ ID NO: 585516 - DNA, 15 bp, Homo sapiens
agccgttgctgccac

SEQ ID NO: 585517 - DNA, 15 bp, Homo sapiens
gccgttgctgccaca

SEQ ID NO: 585518 - DNA, 15 bp, Homo sapiens
ccgttgctgccacag

SEQ ID NO: 585519 - DNA, 15 bp, Homo sapiens
cgttgctgccacagg

SEQ ID NO: 585520 - DNA, 15 bp, Homo sapiens
gttgctgccacaggc

SEQ ID NO: 585521 - DNA, 15 bp, Homo sapiens
ttgctgccacaggcg

SEQ ID NO: 585522 - DNA, 15 bp, Homo sapiens
tgctgccacaggcgg

SEQ ID NO: 585523 - DNA, 15 bp, Homo sapiens
gctgccacaggcggg

SEQ ID NO: 585524 - DNA, 15 bp, Homo sapiens
ctgccacaggcgggc

SEQ ID NO: 585525 - DNA, 15 bp, Homo sapiens
tgccacaggcgggcc

SEQ ID NO: 585526 - DNA, 15 bp, Homo sapiens
gccacaggcgggcct

SEQ ID NO: 585527 - DNA, 15 bp, Homo sapiens
ccacaggcgggcctt

SEQ ID NO: 585528 - DNA, 15 bp, Homo sapiens
cacaggcgggcctta

SEQ ID NO: 585529 - DNA, 15 bp, Homo sapiens
acaggcgggccttac

SEQ ID NO: 585530 - DNA, 15 bp, Homo sapiens
caggcgggccttacg

SEQ ID NO: 585531 - DNA, 15 bp, Homo sapiens
aggcgggccttacgc

SEQ ID NO: 585532 - DNA, 15 bp, Homo sapiens
ggcgggccttacgct

SEQ ID NO: 585533 - DNA, 15 bp, Homo sapiens
gcgggccttacgctc

SEQ ID NO: 585534 - DNA, 15 bp, Homo sapiens
cgggccttacgctcc

SEQ ID NO: 585535 - DNA, 15 bp, Homo sapiens
gggccttacgctcca

SEQ ID NO: 585536 - DNA, 15 bp, Homo sapiens
ggccttacgctccaa

SEQ ID NO: 585537 - DNA, 15 bp, Homo sapiens
gccttacgctccaag

SEQ ID NO: 585538 - DNA, 15 bp, Homo sapiens
ccttacgctccaagg

SEQ ID NO: 585539 - DNA, 15 bp, Homo sapiens
cttacgctccaaggc

SEQ ID NO: 585540 - DNA, 15 bp, Homo sapiens
ttacgctccaaggct

SEQ ID NO: 585541 - DNA, 15 bp, Homo sapiens
tacgctccaaggcta

SEQ ID NO: 585542 - DNA, 15 bp, Homo sapiens
acgctccaaggctac

SEQ ID NO: 585543 - DNA, 15 bp, Homo sapiens
cgctccaaggctaca

SEQ ID NO: 585544 - DNA, 15 bp, Homo sapiens
gctccaaggctacag

SEQ ID NO: 585545 - DNA, 15 bp, Homo sapiens
ctccaaggctacagc

SEQ ID NO: 585546 - DNA, 15 bp, Homo sapiens
tccaaggctacagca

SEQ ID NO: 585547 - DNA, 15 bp, Homo sapiens
ccaaggctacagcat

SEQ ID NO: 585548 - DNA, 15 bp, Homo sapiens
caaggctacagcatg

SEQ ID NO: 585549 - DNA, 15 bp, Homo sapiens
aaggctacagcatgt

SEQ ID NO: 585550 - DNA, 15 bp, Homo sapiens
aggctacagcatgtg

SEQ ID NO: 585551 - DNA, 15 bp, Homo sapiens
ggctacagcatgtgc

SEQ ID NO: 585552 - DNA, 15 bp, Homo sapiens
gctacagcatgtgct

SEQ ID NO: 585553 - DNA, 15 bp, Homo sapiens
ctacagcatgtgcta

SEQ ID NO: 585554 - DNA, 15 bp, Homo sapiens
tacagcatgtgctag

SEQ ID NO: 585555 - DNA, 15 bp, Homo sapiens
acagcatgtgctagg

SEQ ID NO: 585556 - DNA, 15 bp, Homo sapiens
cagcatgtgctaggc

SEQ ID NO: 585557 - DNA, 15 bp, Homo sapiens
agcatgtgctaggcc

SEQ ID NO: 585558 - DNA, 15 bp, Homo sapiens
gcatgtgctaggcct

SEQ ID NO: 585559 - DNA, 15 bp, Homo sapiens
catgtgctaggcctc

SEQ ID NO: 585560 - DNA, 15 bp, Homo sapiens
atgtgctaggcctca

SEQ ID NO: 585561 - DNA, 15 bp, Homo sapiens
tgtgctaggcctcag

SEQ ID NO: 585562 - DNA, 15 bp, Homo sapiens
gtgctaggcctcagc

SEQ ID NO: 585563 - DNA, 15 bp, Homo sapiens
tgctaggcctcagca

SEQ ID NO: 585564 - DNA, 15 bp, Homo sapiens
gctaggcctcagcag

SEQ ID NO: 585565 - DNA, 15 bp, Homo sapiens
ctaggcctcagcagg

SEQ ID NO: 585566 - DNA, 15 bp, Homo sapiens
taggcctcagcaggc

SEQ ID NO: 585567 - DNA, 15 bp, Homo sapiens
aggcctcagcaggca

SEQ ID NO: 585568 - DNA, 15 bp, Homo sapiens
ggcctcagcaggcag

SEQ ID NO: 585569 - DNA, 15 bp, Homo sapiens
gcctcagcaggcagg

SEQ ID NO: 585570 - DNA, 15 bp, Homo sapiens
cctcagcaggcagga

SEQ ID NO: 585571 - DNA, 15 bp, Homo sapiens
ctcagcaggcaggag

SEQ ID NO: 585572 - DNA, 15 bp, Homo sapiens
tcagcaggcaggagc

SEQ ID NO: 585573 - DNA, 15 bp, Homo sapiens
cagcaggcaggagca

SEQ ID NO: 585574 - DNA, 15 bp, Homo sapiens
agcaggcaggagcat

SEQ ID NO: 585575 - DNA, 15 bp, Homo sapiens
gcaggcaggagcatc

SEQ ID NO: 585576 - DNA, 15 bp, Homo sapiens
caggcaggagcatct

SEQ ID NO: 585577 - DNA, 15 bp, Homo sapiens
aggcaggagcatctc

SEQ ID NO: 585578 - DNA, 15 bp, Homo sapiens
ggcaggagcatctct

SEQ ID NO: 585579 - DNA, 15 bp, Homo sapiens
gcaggagcatctctg

SEQ ID NO: 585580 - DNA, 15 bp, Homo sapiens
caggagcatctctgc

SEQ ID NO: 585581 - DNA, 15 bp, Homo sapiens
aggagcatctctgcc

SEQ ID NO: 585582 - DNA, 15 bp, Homo sapiens
ggagcatctctgcct

SEQ ID NO: 585583 - DNA, 15 bp, Homo sapiens
gagcatctctgcctc

SEQ ID NO: 585584 - DNA, 15 bp, Homo sapiens
agcatctctgcctcc

SEQ ID NO: 585585 - DNA, 15 bp, Homo sapiens
gcatctctgcctccc

SEQ ID NO: 585586 - DNA, 15 bp, Homo sapiens
catctctgcctccca

SEQ ID NO: 585587 - DNA, 15 bp, Homo sapiens
atctctgcctcccaa

SEQ ID NO: 585588 - DNA, 15 bp, Homo sapiens
tctctgcctcccaaa

SEQ ID NO: 585589 - DNA, 15 bp, Homo sapiens
ctctgcctcccaaag

SEQ ID NO: 585590 - DNA, 15 bp, Homo sapiens
tctgcctcccaaagc

SEQ ID NO: 585591 - DNA, 15 bp, Homo sapiens
ctgcctcccaaagca

SEQ ID NO: 585592 - DNA, 15 bp, Homo sapiens
tgcctcccaaagcat

SEQ ID NO: 585593 - DNA, 15 bp, Homo sapiens
gcctcccaaagcatc

SEQ ID NO: 585594 - DNA, 15 bp, Homo sapiens
cctcccaaagcatct

SEQ ID NO: 585595 - DNA, 15 bp, Homo sapiens
ctcccaaagcatcta

SEQ ID NO: 585596 - DNA, 15 bp, Homo sapiens
tcccaaagcatctac

SEQ ID NO: 585597 - DNA, 15 bp, Homo sapiens
cccaaagcatctacc

SEQ ID NO: 585598 - DNA, 15 bp, Homo sapiens
ccaaagcatctacct

SEQ ID NO: 585599 - DNA, 15 bp, Homo sapiens
caaagcatctacctc

SEQ ID NO: 585600 - DNA, 15 bp, Homo sapiens
aaagcatctacctct

SEQ ID NO: 585601 - DNA, 15 bp, Homo sapiens
aagcatctacctctt

SEQ ID NO: 585602 - DNA, 15 bp, Homo sapiens
agcatctacctctta

SEQ ID NO: 585603 - DNA, 15 bp, Homo sapiens
gcatctacctcttag

SEQ ID NO: 585604 - DNA, 15 bp, Homo sapiens
catctacctcttagc

SEQ ID NO: 585605 - DNA, 15 bp, Homo sapiens
atctacctcttagcc

SEQ ID NO: 585606 - DNA, 15 bp, Homo sapiens
tctacctcttagccc

SEQ ID NO: 585607 - DNA, 15 bp, Homo sapiens
ctacctcttagcccc

SEQ ID NO: 585608 - DNA, 15 bp, Homo sapiens
tacctcttagcccct

SEQ ID NO: 585609 - DNA, 15 bp, Homo sapiens
acctcttagcccctc

SEQ ID NO: 585610 - DNA, 15 bp, Homo sapiens
cctcttagcccctcg

SEQ ID NO: 585611 - DNA, 15 bp, Homo sapiens
ctcttagcccctcgg

SEQ ID NO: 585612 - DNA, 15 bp, Homo sapiens
tcttagcccctcgga

SEQ ID NO: 585613 - DNA, 15 bp, Homo sapiens
cttagcccctcggag

SEQ ID NO: 585614 - DNA, 15 bp, Homo sapiens
ttagcccctcggaga

SEQ ID NO: 585615 - DNA, 15 bp, Homo sapiens
tagcccctcggagag

SEQ ID NO: 585616 - DNA, 15 bp, Homo sapiens
agcccctcggagaga

SEQ ID NO: 585617 - DNA, 15 bp, Homo sapiens
gcccctcggagagat

SEQ ID NO: 585618 - DNA, 15 bp, Homo sapiens
cccctcggagagatg

SEQ ID NO: 585619 - DNA, 15 bp, Homo sapiens
ccctcggagagatgg

SEQ ID NO: 585620 - DNA, 15 bp, Homo sapiens
cctcggagagatggc

SEQ ID NO: 585621 - DNA, 15 bp, Homo sapiens
ctcggagagatggcg

SEQ ID NO: 585622 - DNA, 15 bp, Homo sapiens
tcggagagatggcga

SEQ ID NO: 585623 - DNA, 15 bp, Homo sapiens
cggagagatggcgat

SEQ ID NO: 585624 - DNA, 15 bp, Homo sapiens
ggagagatggcgatg

SEQ ID NO: 585625 - DNA, 15 bp, Homo sapiens
gagagatggcgatgg

SEQ ID NO: 585626 - DNA, 15 bp, Homo sapiens
agagatggcgatgga

SEQ ID NO: 585627 - DNA, 15 bp, Homo sapiens
gagatggcgatggat

SEQ ID NO: 585628 - DNA, 15 bp, Homo sapiens
agatggcgatggatg

SEQ ID NO: 585629 - DNA, 15 bp, Homo sapiens
gatggcgatggatgt

SEQ ID NO: 585630 - DNA, 15 bp, Homo sapiens
atggcgatggatgtc

SEQ ID NO: 585631 - DNA, 15 bp, Homo sapiens
tggcgatggatgtca

SEQ ID NO: 585632 - DNA, 15 bp, Homo sapiens
ggcgatggatgtcac

SEQ ID NO: 585633 - DNA, 15 bp, Homo sapiens
gcgatggatgtcaca

SEQ ID NO: 585634 - DNA, 15 bp, Homo sapiens
cgatggatgtcacaa

SEQ ID NO: 585635 - DNA, 15 bp, Homo sapiens
gatggatgtcacaag

SEQ ID NO: 585636 - DNA, 15 bp, Homo sapiens
atggatgtcacaagg

SEQ ID NO: 585637 - DNA, 15 bp, Homo sapiens
tggatgtcacaagga

SEQ ID NO: 585638 - DNA, 15 bp, Homo sapiens
ggatgtcacaaggag

SEQ ID NO: 585639 - DNA, 15 bp, Homo sapiens
gatgtcacaaggagc

SEQ ID NO: 585640 - DNA, 15 bp, Homo sapiens
atgtcacaaggagcc

SEQ ID NO: 585641 - DNA, 15 bp, Homo sapiens
tgtcacaaggagcca

SEQ ID NO: 585642 - DNA, 15 bp, Homo sapiens
gtcacaaggagccag

SEQ ID NO: 585643 - DNA, 15 bp, Homo sapiens
tcacaaggagccagg

SEQ ID NO: 585644 - DNA, 15 bp, Homo sapiens
cacaaggagccaggc

SEQ ID NO: 585645 - DNA, 15 bp, Homo sapiens
acaaggagccaggcc

SEQ ID NO: 585646 - DNA, 15 bp, Homo sapiens
caaggagccaggccc

SEQ ID NO: 585647 - DNA, 15 bp, Homo sapiens
aaggagccaggccca

SEQ ID NO: 585648 - DNA, 15 bp, Homo sapiens
aggagccaggcccag

SEQ ID NO: 585649 - DNA, 15 bp, Homo sapiens
ggagccaggcccaga

SEQ ID NO: 585650 - DNA, 15 bp, Homo sapiens
gagccaggcccagac

SEQ ID NO: 585651 - DNA, 15 bp, Homo sapiens
agccaggcccagaca

SEQ ID NO: 585652 - DNA, 15 bp, Homo sapiens
gccaggcccagacag

SEQ ID NO: 585653 - DNA, 15 bp, Homo sapiens
ccaggcccagacagc

SEQ ID NO: 585654 - DNA, 15 bp, Homo sapiens
caggcccagacagcc

SEQ ID NO: 585655 - DNA, 15 bp, Homo sapiens
aggcccagacagcct

SEQ ID NO: 585656 - DNA, 15 bp, Homo sapiens
ggcccagacagcctt

SEQ ID NO: 585657 - DNA, 15 bp, Homo sapiens
gcccagacagccttg

SEQ ID NO: 585658 - DNA, 15 bp, Homo sapiens
cccagacagccttga

SEQ ID NO: 585659 - DNA, 15 bp, Homo sapiens
ccagacagccttgac

SEQ ID NO: 585660 - DNA, 15 bp, Homo sapiens
cagacagccttgact

SEQ ID NO: 585661 - DNA, 15 bp, Homo sapiens
agacagccttgactc

SEQ ID NO: 585662 - DNA, 15 bp, Homo sapiens
gacagccttgactct

SEQ ID NO: 585663 - DNA, 15 bp, Homo sapiens
acagccttgactctg

SEQ ID NO: 585664 - DNA, 15 bp, Homo sapiens
cagccttgactctgg

SEQ ID NO: 585665 - DNA, 15 bp, Homo sapiens
agccttgactctggt

SEQ ID NO: 585666 - DNA, 15 bp, Homo sapiens
gccttgactctggta

SEQ ID NO: 585667 - DNA, 15 bp, Homo sapiens
ccttgactctggtaa

SEQ ID NO: 585668 - DNA, 15 bp, Homo sapiens
cttgactctggtaag

SEQ ID NO: 585669 - DNA, 15 bp, Homo sapiens
ttgactctggtaagg

SEQ ID NO: 585670 - DNA, 15 bp, Homo sapiens
tgactctggtaaggg

SEQ ID NO: 585671 - DNA, 15 bp, Homo sapiens
gactctggtaagggt

SEQ ID NO: 585672 - DNA, 15 bp, Homo sapiens
actctggtaagggtc

SEQ ID NO: 585673 - DNA, 15 bp, Homo sapiens
ctctggtaagggtca

SEQ ID NO: 585674 - DNA, 15 bp, Homo sapiens
tctggtaagggtcac

SEQ ID NO: 585675 - DNA, 15 bp, Homo sapiens
ctggtaagggtcaca

SEQ ID NO: 585676 - DNA, 15 bp, Homo sapiens
tggtaagggtcacac

SEQ ID NO: 585677 - DNA, 15 bp, Homo sapiens
ggtaagggtcacacc

SEQ ID NO: 585678 - DNA, 15 bp, Homo sapiens
gtaagggtcacacca

SEQ ID NO: 585679 - DNA, 15 bp, Homo sapiens
taagggtcacaccaa

SEQ ID NO: 585680 - DNA, 15 bp, Homo sapiens
aagggtcacaccaaa

SEQ ID NO: 585681 - DNA, 15 bp, Homo sapiens
agggtcacaccaaag

SEQ ID NO: 585682 - DNA, 15 bp, Homo sapiens
gggtcacaccaaagt

SEQ ID NO: 585683 - DNA, 15 bp, Homo sapiens
ggtcacaccaaagtt

SEQ ID NO: 585684 - DNA, 15 bp, Homo sapiens
gtcacaccaaagtta

SEQ ID NO: 585685 - DNA, 15 bp, Homo sapiens
tcacaccaaagttag

SEQ ID NO: 585686 - DNA, 15 bp, Homo sapiens
cacaccaaagttagg

SEQ ID NO: 585687 - DNA, 15 bp, Homo sapiens
acaccaaagttaggg

SEQ ID NO: 585688 - DNA, 15 bp, Homo sapiens
caccaaagttaggga

SEQ ID NO: 585689 - DNA, 15 bp, Homo sapiens
accaaagttagggac

SEQ ID NO: 585690 - DNA, 15 bp, Homo sapiens
ccaaagttagggact

SEQ ID NO: 585691 - DNA, 15 bp, Homo sapiens
caaagttagggactt

SEQ ID NO: 585692 - DNA, 15 bp, Homo sapiens
aaagttagggacttt

SEQ ID NO: 585693 - DNA, 15 bp, Homo sapiens
aagttagggactttg

SEQ ID NO: 585694 - DNA, 15 bp, Homo sapiens
agttagggactttgc

SEQ ID NO: 585695 - DNA, 15 bp, Homo sapiens
gttagggactttgca

SEQ ID NO: 585696 - DNA, 15 bp, Homo sapiens
ttagggactttgcac

SEQ ID NO: 585697 - DNA, 15 bp, Homo sapiens
tagggactttgcact

SEQ ID NO: 585698 - DNA, 15 bp, Homo sapiens
agggactttgcactg

SEQ ID NO: 585699 - DNA, 15 bp, Homo sapiens
gggactttgcactgg

SEQ ID NO: 585700 - DNA, 15 bp, Homo sapiens
ggactttgcactggg

SEQ ID NO: 585701 - DNA, 15 bp, Homo sapiens
gactttgcactggga

SEQ ID NO: 585702 - DNA, 15 bp, Homo sapiens
actttgcactgggag

SEQ ID NO: 585703 - DNA, 15 bp, Homo sapiens
ctttgcactgggaga

SEQ ID NO: 585704 - DNA, 15 bp, Homo sapiens
tttgcactgggagag

SEQ ID NO: 585705 - DNA, 15 bp, Homo sapiens
ttgcactgggagagc

SEQ ID NO: 585706 - DNA, 15 bp, Homo sapiens
tgcactgggagagca

SEQ ID NO: 585707 - DNA, 15 bp, Homo sapiens
gcactgggagagcag

SEQ ID NO: 585708 - DNA, 15 bp, Homo sapiens
cactgggagagcagc

SEQ ID NO: 585709 - DNA, 15 bp, Homo sapiens
actgggagagcagca

SEQ ID NO: 585710 - DNA, 15 bp, Homo sapiens
ctgggagagcagcac

SEQ ID NO: 585711 - DNA, 15 bp, Homo sapiens
tgggagagcagcacc

SEQ ID NO: 585712 - DNA, 15 bp, Homo sapiens
gggagagcagcaccc

SEQ ID NO: 585713 - DNA, 15 bp, Homo sapiens
ggagagcagcaccca

SEQ ID NO: 585714 - DNA, 15 bp, Homo sapiens
gagagcagcacccag

SEQ ID NO: 585715 - DNA, 15 bp, Homo sapiens
agagcagcacccagg

SEQ ID NO: 585716 - DNA, 15 bp, Homo sapiens
gagcagcacccaggg

SEQ ID NO: 585717 - DNA, 15 bp, Homo sapiens
agcagcacccagggc

SEQ ID NO: 585718 - DNA, 15 bp, Homo sapiens
gcagcacccagggca

SEQ ID NO: 585719 - DNA, 15 bp, Homo sapiens
cagcacccagggcag

SEQ ID NO: 585720 - DNA, 15 bp, Homo sapiens
agcacccagggcagg

SEQ ID NO: 585721 - DNA, 15 bp, Homo sapiens
gcacccagggcaggg

SEQ ID NO: 585722 - DNA, 15 bp, Homo sapiens
cacccagggcagggc

SEQ ID NO: 585723 - DNA, 15 bp, Homo sapiens
acccagggcagggcc

SEQ ID NO: 585724 - DNA, 15 bp, Homo sapiens
cccagggcagggccc

SEQ ID NO: 585725 - DNA, 15 bp, Homo sapiens
ccagggcagggccct

SEQ ID NO: 585726 - DNA, 15 bp, Homo sapiens
cagggcagggccctt

SEQ ID NO: 585727 - DNA, 15 bp, Homo sapiens
agggcagggcccttg

SEQ ID NO: 585728 - DNA, 15 bp, Homo sapiens
gggcagggcccttgg

SEQ ID NO: 585729 - DNA, 15 bp, Homo sapiens
ggcagggcccttggt

SEQ ID NO: 585730 - DNA, 15 bp, Homo sapiens
gcagggcccttggtt

SEQ ID NO: 585731 - DNA, 15 bp, Homo sapiens
cagggcccttggttt

SEQ ID NO: 585732 - DNA, 15 bp, Homo sapiens
agggcccttggtttt

SEQ ID NO: 585733 - DNA, 15 bp, Homo sapiens
gggcccttggttttg

SEQ ID NO: 585734 - DNA, 15 bp, Homo sapiens
ggcccttggttttgc

SEQ ID NO: 585735 - DNA, 15 bp, Homo sapiens
gcccttggttttgca

SEQ ID NO: 585736 - DNA, 15 bp, Homo sapiens
cccttggttttgcag

SEQ ID NO: 585737 - DNA, 15 bp, Homo sapiens
ccttggttttgcaga

SEQ ID NO: 585738 - DNA, 15 bp, Homo sapiens
cttggttttgcagat

SEQ ID NO: 585739 - DNA, 15 bp, Homo sapiens
ttggttttgcagatt

SEQ ID NO: 585740 - DNA, 15 bp, Homo sapiens
tggttttgcagatta

SEQ ID NO: 585741 - DNA, 15 bp, Homo sapiens
ggttttgcagattac

SEQ ID NO: 585742 - DNA, 15 bp, Homo sapiens
gttttgcagattacc

SEQ ID NO: 585743 - DNA, 15 bp, Homo sapiens
ttttgcagattacca

SEQ ID NO: 585744 - DNA, 15 bp, Homo sapiens
tttgcagattaccaa

SEQ ID NO: 585745 - DNA, 15 bp, Homo sapiens
ttgcagattaccaaa

SEQ ID NO: 585746 - DNA, 15 bp, Homo sapiens
tgcagattaccaaaa

SEQ ID NO: 585747 - DNA, 15 bp, Homo sapiens
gcagattaccaaaac

SEQ ID NO: 585748 - DNA, 15 bp, Homo sapiens
cagattaccaaaact

SEQ ID NO: 585749 - DNA, 15 bp, Homo sapiens
agattaccaaaacta

SEQ ID NO: 585750 - DNA, 15 bp, Homo sapiens
gattaccaaaactaa

SEQ ID NO: 585751 - DNA, 15 bp, Homo sapiens
attaccaaaactaag

SEQ ID NO: 585752 - DNA, 15 bp, Homo sapiens
ttaccaaaactaagg

SEQ ID NO: 585753 - DNA, 15 bp, Homo sapiens
taccaaaactaaggc

SEQ ID NO: 585754 - DNA, 15 bp, Homo sapiens
accaaaactaaggct

SEQ ID NO: 585755 - DNA, 15 bp, Homo sapiens
ccaaaactaaggctg

SEQ ID NO: 585756 - DNA, 15 bp, Homo sapiens
caaaactaaggctgg

SEQ ID NO: 585757 - DNA, 15 bp, Homo sapiens
aaaactaaggctggg

SEQ ID NO: 585758 - DNA, 15 bp, Homo sapiens
aaactaaggctgggg

SEQ ID NO: 585759 - DNA, 15 bp, Homo sapiens
aactaaggctggggg

SEQ ID NO: 585760 - DNA, 15 bp, Homo sapiens
actaaggctgggggc

SEQ ID NO: 585761 - DNA, 15 bp, Homo sapiens
ctaaggctgggggca

SEQ ID NO: 585762 - DNA, 15 bp, Homo sapiens
taaggctgggggcag

SEQ ID NO: 585763 - DNA, 15 bp, Homo sapiens
aaggctgggggcagg

SEQ ID NO: 585764 - DNA, 15 bp, Homo sapiens
aggctgggggcaggg

SEQ ID NO: 585765 - DNA, 15 bp, Homo sapiens
ggctgggggcaggga

SEQ ID NO: 585766 - DNA, 15 bp, Homo sapiens
gctgggggcagggaa

SEQ ID NO: 585767 - DNA, 15 bp, Homo sapiens
ctgggggcagggaag

SEQ ID NO: 585768 - DNA, 15 bp, Homo sapiens
tgggggcagggaagg

SEQ ID NO: 585769 - DNA, 15 bp, Homo sapiens
gggggcagggaaggc

SEQ ID NO: 585770 - DNA, 15 bp, Homo sapiens
ggggcagggaaggcg

SEQ ID NO: 585771 - DNA, 15 bp, Homo sapiens
gggcagggaaggcga

SEQ ID NO: 585772 - DNA, 15 bp, Homo sapiens
ggcagggaaggcgag

SEQ ID NO: 585773 - DNA, 15 bp, Homo sapiens
gcagggaaggcgagc

SEQ ID NO: 585774 - DNA, 15 bp, Homo sapiens
cagggaaggcgagca

SEQ ID NO: 585775 - DNA, 15 bp, Homo sapiens
agggaaggcgagcag

SEQ ID NO: 585776 - DNA, 15 bp, Homo sapiens
gggaaggcgagcagg

SEQ ID NO: 585777 - DNA, 15 bp, Homo sapiens
ggaaggcgagcaggc

SEQ ID NO: 585778 - DNA, 15 bp, Homo sapiens
gaaggcgagcaggct

SEQ ID NO: 585779 - DNA, 15 bp, Homo sapiens
aaggcgagcaggctt

SEQ ID NO: 585780 - DNA, 15 bp, Homo sapiens
aggcgagcaggcttg

SEQ ID NO: 585781 - DNA, 15 bp, Homo sapiens
ggcgagcaggcttgg

SEQ ID NO: 585782 - DNA, 15 bp, Homo sapiens
gcgagcaggcttggg

SEQ ID NO: 585783 - DNA, 15 bp, Homo sapiens
cgagcaggcttgggg

SEQ ID NO: 585784 - DNA, 15 bp, Homo sapiens
gagcaggcttggggc

SEQ ID NO: 585785 - DNA, 15 bp, Homo sapiens
agcaggcttggggca

SEQ ID NO: 585786 - DNA, 15 bp, Homo sapiens
gcaggcttggggcac

SEQ ID NO: 585787 - DNA, 15 bp, Homo sapiens
caggcttggggcacc

SEQ ID NO: 585788 - DNA, 15 bp, Homo sapiens
aggcttggggcacct

SEQ ID NO: 585789 - DNA, 15 bp, Homo sapiens
ggcttggggcacctt

SEQ ID NO: 585790 - DNA, 15 bp, Homo sapiens
gcttggggcaccttg

SEQ ID NO: 585791 - DNA, 15 bp, Homo sapiens
cttggggcaccttgg

SEQ ID NO: 585792 - DNA, 15 bp, Homo sapiens
ttggggcaccttgga

SEQ ID NO: 585793 - DNA, 15 bp, Homo sapiens
tggggcaccttggaa

SEQ ID NO: 585794 - DNA, 15 bp, Homo sapiens
ggggcaccttggaag

SEQ ID NO: 585795 - DNA, 15 bp, Homo sapiens
gggcaccttggaagg

SEQ ID NO: 585796 - DNA, 15 bp, Homo sapiens
ggcaccttggaagga

SEQ ID NO: 585797 - DNA, 15 bp, Homo sapiens
gcaccttggaaggag

SEQ ID NO: 585798 - DNA, 15 bp, Homo sapiens
caccttggaaggagg

SEQ ID NO: 585799 - DNA, 15 bp, Homo sapiens
accttggaaggaggc

SEQ ID NO: 585800 - DNA, 15 bp, Homo sapiens
ccttggaaggaggca

SEQ ID NO: 585801 - DNA, 15 bp, Homo sapiens
cttggaaggaggcac

SEQ ID NO: 585802 - DNA, 15 bp, Homo sapiens
ttggaaggaggcaca

SEQ ID NO: 585803 - DNA, 15 bp, Homo sapiens
tggaaggaggcacat

SEQ ID NO: 585804 - DNA, 15 bp, Homo sapiens
ggaaggaggcacatg

SEQ ID NO: 585805 - DNA, 15 bp, Homo sapiens
gaaggaggcacatgg

SEQ ID NO: 585806 - DNA, 15 bp, Homo sapiens
aaggaggcacatggg

SEQ ID NO: 585807 - DNA, 15 bp, Homo sapiens
aggaggcacatgggc

SEQ ID NO: 585808 - DNA, 15 bp, Homo sapiens
ggaggcacatgggcc

SEQ ID NO: 585809 - DNA, 15 bp, Homo sapiens
gaggcacatgggcct

SEQ ID NO: 585810 - DNA, 15 bp, Homo sapiens
aggcacatgggcctt

SEQ ID NO: 585811 - DNA, 15 bp, Homo sapiens
ggcacatgggccttg

SEQ ID NO: 585812 - DNA, 15 bp, Homo sapiens
gcacatgggccttgg

SEQ ID NO: 585813 - DNA, 15 bp, Homo sapiens
cacatgggccttggg

SEQ ID NO: 585814 - DNA, 15 bp, Homo sapiens
acatgggccttgggg

SEQ ID NO: 585815 - DNA, 15 bp, Homo sapiens
catgggccttggggg

SEQ ID NO: 585816 - DNA, 15 bp, Homo sapiens
atgggccttgggggt

SEQ ID NO: 585817 - DNA, 15 bp, Homo sapiens
tgggccttgggggtc

SEQ ID NO: 585818 - DNA, 15 bp, Homo sapiens
gggccttgggggtcc

SEQ ID NO: 585819 - DNA, 15 bp, Homo sapiens
ggccttgggggtcct

SEQ ID NO: 585820 - DNA, 15 bp, Homo sapiens
gccttgggggtcctg

SEQ ID NO: 585821 - DNA, 15 bp, Homo sapiens
ccttgggggtcctgg

SEQ ID NO: 585822 - DNA, 15 bp, Homo sapiens
cttgggggtcctggc

SEQ ID NO: 585823 - DNA, 15 bp, Homo sapiens
ttgggggtcctggct

SEQ ID NO: 585824 - DNA, 15 bp, Homo sapiens
tgggggtcctggcta

SEQ ID NO: 585825 - DNA, 15 bp, Homo sapiens
gggggtcctggctag

SEQ ID NO: 585826 - DNA, 15 bp, Homo sapiens
ggggtcctggctagg

SEQ ID NO: 585827 - DNA, 15 bp, Homo sapiens
gggtcctggctaggg

SEQ ID NO: 585828 - DNA, 15 bp, Homo sapiens
ggtcctggctagggc

SEQ ID NO: 585829 - DNA, 15 bp, Homo sapiens
gtcctggctagggca

SEQ ID NO: 585830 - DNA, 15 bp, Homo sapiens
tcctggctagggcag

SEQ ID NO: 585831 - DNA, 15 bp, Homo sapiens
cctggctagggcagc

SEQ ID NO: 585832 - DNA, 15 bp, Homo sapiens
ctggctagggcagct

SEQ ID NO: 585833 - DNA, 15 bp, Homo sapiens
tggctagggcagctg

SEQ ID NO: 585834 - DNA, 15 bp, Homo sapiens
ggctagggcagctgt

SEQ ID NO: 585835 - DNA, 15 bp, Homo sapiens
gctagggcagctgtg

SEQ ID NO: 585836 - DNA, 15 bp, Homo sapiens
ctagggcagctgtgc

SEQ ID NO: 585837 - DNA, 15 bp, Homo sapiens
tagggcagctgtgcc

SEQ ID NO: 585838 - DNA, 15 bp, Homo sapiens
agggcagctgtgcct

SEQ ID NO: 585839 - DNA, 15 bp, Homo sapiens
gggcagctgtgcctg

SEQ ID NO: 585840 - DNA, 15 bp, Homo sapiens
ggcagctgtgcctgc

SEQ ID NO: 585841 - DNA, 15 bp, Homo sapiens
gcagctgtgcctgcc

SEQ ID NO: 585842 - DNA, 15 bp, Homo sapiens
cagctgtgcctgcca

SEQ ID NO: 585843 - DNA, 15 bp, Homo sapiens
agctgtgcctgccac

SEQ ID NO: 585844 - DNA, 15 bp, Homo sapiens
gctgtgcctgccact

SEQ ID NO: 585845 - DNA, 15 bp, Homo sapiens
ctgtgcctgccactg

SEQ ID NO: 585846 - DNA, 15 bp, Homo sapiens
tgtgcctgccactgg

SEQ ID NO: 585847 - DNA, 15 bp, Homo sapiens
gtgcctgccactggc

SEQ ID NO: 585848 - DNA, 15 bp, Homo sapiens
tgcctgccactggcc

SEQ ID NO: 585849 - DNA, 15 bp, Homo sapiens
gcctgccactggccc

SEQ ID NO: 585850 - DNA, 15 bp, Homo sapiens
cctgccactggccct

SEQ ID NO: 585851 - DNA, 15 bp, Homo sapiens
ctgccactggccctc

SEQ ID NO: 585852 - DNA, 15 bp, Homo sapiens
tgccactggccctct

SEQ ID NO: 585853 - DNA, 15 bp, Homo sapiens
gccactggccctctg

SEQ ID NO: 585854 - DNA, 15 bp, Homo sapiens
ccactggccctctgc

SEQ ID NO: 585855 - DNA, 15 bp, Homo sapiens
cactggccctctgcc

SEQ ID NO: 585856 - DNA, 15 bp, Homo sapiens
actggccctctgccc

SEQ ID NO: 585857 - DNA, 15 bp, Homo sapiens
ctggccctctgccca

SEQ ID NO: 585858 - DNA, 15 bp, Homo sapiens
tggccctctgcccac

SEQ ID NO: 585859 - DNA, 15 bp, Homo sapiens
ggccctctgcccacc

SEQ ID NO: 585860 - DNA, 15 bp, Homo sapiens
gccctctgcccacca

SEQ ID NO: 585861 - DNA, 15 bp, Homo sapiens
ccctctgcccaccac

SEQ ID NO: 585862 - DNA, 15 bp, Homo sapiens
cctctgcccaccacc

SEQ ID NO: 585863 - DNA, 15 bp, Homo sapiens
ctctgcccaccaccc

SEQ ID NO: 585864 - DNA, 15 bp, Homo sapiens
tctgcccaccacccc

SEQ ID NO: 585865 - DNA, 15 bp, Homo sapiens
ctgcccaccacccct

SEQ ID NO: 585866 - DNA, 15 bp, Homo sapiens
tgcccaccacccctc

SEQ ID NO: 585867 - DNA, 15 bp, Homo sapiens
gcccaccacccctcc

SEQ ID NO: 585868 - DNA, 15 bp, Homo sapiens
cccaccacccctcct

SEQ ID NO: 585869 - DNA, 15 bp, Homo sapiens
ccaccacccctcctc

SEQ ID NO: 585870 - DNA, 15 bp, Homo sapiens
caccacccctcctca

SEQ ID NO: 585871 - DNA, 15 bp, Homo sapiens
accacccctcctcac

SEQ ID NO: 585872 - DNA, 15 bp, Homo sapiens
ccacccctcctcact

SEQ ID NO: 585873 - DNA, 15 bp, Homo sapiens
cacccctcctcactg

SEQ ID NO: 585874 - DNA, 15 bp, Homo sapiens
acccctcctcactgt

SEQ ID NO: 585875 - DNA, 15 bp, Homo sapiens
cccctcctcactgtg

SEQ ID NO: 585876 - DNA, 15 bp, Homo sapiens
ccctcctcactgtgg

SEQ ID NO: 585877 - DNA, 15 bp, Homo sapiens
cctcctcactgtggc

SEQ ID NO: 585878 - DNA, 15 bp, Homo sapiens
ctcctcactgtggct

SEQ ID NO: 585879 - DNA, 15 bp, Homo sapiens
tcctcactgtggcta

SEQ ID NO: 585880 - DNA, 15 bp, Homo sapiens
cctcactgtggctat

SEQ ID NO: 585881 - DNA, 15 bp, Homo sapiens
ctcactgtggctatc

SEQ ID NO: 585882 - DNA, 15 bp, Homo sapiens
tcactgtggctatcc

SEQ ID NO: 585883 - DNA, 15 bp, Homo sapiens
cactgtggctatcca

SEQ ID NO: 585884 - DNA, 15 bp, Homo sapiens
actgtggctatccag

SEQ ID NO: 585885 - DNA, 15 bp, Homo sapiens
ctgtggctatccagt

SEQ ID NO: 585886 - DNA, 15 bp, Homo sapiens
tgtggctatccagtg

SEQ ID NO: 585887 - DNA, 15 bp, Homo sapiens
gtggctatccagtgt

SEQ ID NO: 585888 - DNA, 15 bp, Homo sapiens
tggctatccagtgtc

SEQ ID NO: 585889 - DNA, 15 bp, Homo sapiens
ggctatccagtgtcc

SEQ ID NO: 585890 - DNA, 15 bp, Homo sapiens
gctatccagtgtcca

SEQ ID NO: 585891 - DNA, 15 bp, Homo sapiens
ctatccagtgtccag

SEQ ID NO: 585892 - DNA, 15 bp, Homo sapiens
tatccagtgtccagc

SEQ ID NO: 585893 - DNA, 15 bp, Homo sapiens
atccagtgtccagcc

SEQ ID NO: 585894 - DNA, 15 bp, Homo sapiens
tccagtgtccagcct

SEQ ID NO: 585895 - DNA, 15 bp, Homo sapiens
ccagtgtccagcctc

SEQ ID NO: 585896 - DNA, 15 bp, Homo sapiens
cagtgtccagcctct

SEQ ID NO: 585897 - DNA, 15 bp, Homo sapiens
agtgtccagcctctc

SEQ ID NO: 585898 - DNA, 15 bp, Homo sapiens
gtgtccagcctctcg

SEQ ID NO: 585899 - DNA, 15 bp, Homo sapiens
tgtccagcctctcga

SEQ ID NO: 585900 - DNA, 15 bp, Homo sapiens
gtccagcctctcgag

SEQ ID NO: 585901 - DNA, 15 bp, Homo sapiens
tccagcctctcgagg

SEQ ID NO: 585902 - DNA, 15 bp, Homo sapiens
ccagcctctcgaggg

SEQ ID NO: 585903 - DNA, 15 bp, Homo sapiens
cagcctctcgagggg

SEQ ID NO: 585904 - DNA, 15 bp, Homo sapiens
agcctctcgaggggt

SEQ ID NO: 585905 - DNA, 15 bp, Homo sapiens
gcctctcgaggggtt

SEQ ID NO: 585906 - DNA, 15 bp, Homo sapiens
cctctcgaggggttc

SEQ ID NO: 585907 - DNA, 15 bp, Homo sapiens
ctctcgaggggttct

SEQ ID NO: 585908 - DNA, 15 bp, Homo sapiens
tctcgaggggttcta

SEQ ID NO: 585909 - DNA, 15 bp, Homo sapiens
ctcgaggggttctag

SEQ ID NO: 585910 - DNA, 15 bp, Homo sapiens
tcgaggggttctagg

SEQ ID NO: 585911 - DNA, 15 bp, Homo sapiens
cgaggggttctaggg

SEQ ID NO: 585912 - DNA, 15 bp, Homo sapiens
gaggggttctagggt

SEQ ID NO: 585913 - DNA, 15 bp, Homo sapiens
aggggttctagggta

SEQ ID NO: 585914 - DNA, 15 bp, Homo sapiens
ggggttctagggtac

SEQ ID NO: 585915 - DNA, 15 bp, Homo sapiens
gggttctagggtact

SEQ ID NO: 585916 - DNA, 15 bp, Homo sapiens
ggttctagggtactt

SEQ ID NO: 585917 - DNA, 15 bp, Homo sapiens
gttctagggtactta

SEQ ID NO: 585918 - DNA, 15 bp, Homo sapiens
ttctagggtacttat

SEQ ID NO: 585919 - DNA, 15 bp, Homo sapiens
tctagggtacttatt

SEQ ID NO: 585920 - DNA, 15 bp, Homo sapiens
ctagggtacttattc

SEQ ID NO: 585921 - DNA, 15 bp, Homo sapiens
tagggtacttattcc

SEQ ID NO: 585922 - DNA, 15 bp, Homo sapiens
agggtacttattcct

SEQ ID NO: 585923 - DNA, 15 bp, Homo sapiens
gggtacttattcctg

SEQ ID NO: 585924 - DNA, 15 bp, Homo sapiens
ggtacttattcctgg

SEQ ID NO: 585925 - DNA, 15 bp, Homo sapiens
gtacttattcctgga

SEQ ID NO: 585926 - DNA, 15 bp, Homo sapiens
tacttattcctggag

SEQ ID NO: 585927 - DNA, 15 bp, Homo sapiens
acttattcctggagc

SEQ ID NO: 585928 - DNA, 15 bp, Homo sapiens
cttattcctggagct

SEQ ID NO: 585929 - DNA, 15 bp, Homo sapiens
ttattcctggagcta

SEQ ID NO: 585930 - DNA, 15 bp, Homo sapiens
tattcctggagctaa

SEQ ID NO: 585931 - DNA, 15 bp, Homo sapiens
attcctggagctaac

SEQ ID NO: 585932 - DNA, 15 bp, Homo sapiens
ttcctggagctaacg

SEQ ID NO: 585933 - DNA, 15 bp, Homo sapiens
tcctggagctaacgg

SEQ ID NO: 585934 - DNA, 15 bp, Homo sapiens
cctggagctaacggt

SEQ ID NO: 585935 - DNA, 15 bp, Homo sapiens
ctggagctaacggtg

SEQ ID NO: 585936 - DNA, 15 bp, Homo sapiens
tggagctaacggtga

SEQ ID NO: 585937 - DNA, 15 bp, Homo sapiens
ggagctaacggtgac

SEQ ID NO: 585938 - DNA, 15 bp, Homo sapiens
gagctaacggtgacc

SEQ ID NO: 585939 - DNA, 15 bp, Homo sapiens
agctaacggtgaccc

SEQ ID NO: 585940 - DNA, 15 bp, Homo sapiens
gctaacggtgaccca

SEQ ID NO: 585941 - DNA, 15 bp, Homo sapiens
ctaacggtgacccag

SEQ ID NO: 585942 - DNA, 15 bp, Homo sapiens
taacggtgacccagg

SEQ ID NO: 585943 - DNA, 15 bp, Homo sapiens
aacggtgacccagga

SEQ ID NO: 585944 - DNA, 15 bp, Homo sapiens
acggtgacccaggac

SEQ ID NO: 585945 - DNA, 15 bp, Homo sapiens
cggtgacccaggaca

SEQ ID NO: 585946 - DNA, 15 bp, Homo sapiens
ggtgacccaggacac

SEQ ID NO: 585947 - DNA, 15 bp, Homo sapiens
gtgacccaggacacc

SEQ ID NO: 585948 - DNA, 15 bp, Homo sapiens
tgacccaggacacca

SEQ ID NO: 585949 - DNA, 15 bp, Homo sapiens
gacccaggacaccag

SEQ ID NO: 585950 - DNA, 15 bp, Homo sapiens
acccaggacaccagt

SEQ ID NO: 585951 - DNA, 15 bp, Homo sapiens
cccaggacaccagtg

SEQ ID NO: 585952 - DNA, 15 bp, Homo sapiens
ccaggacaccagtgt

SEQ ID NO: 585953 - DNA, 15 bp, Homo sapiens
caggacaccagtgtc

SEQ ID NO: 585954 - DNA, 15 bp, Homo sapiens
aggacaccagtgtcc

SEQ ID NO: 585955 - DNA, 15 bp, Homo sapiens
ggacaccagtgtccg

SEQ ID NO: 585956 - DNA, 15 bp, Homo sapiens
gacaccagtgtccgg

SEQ ID NO: 585957 - DNA, 15 bp, Homo sapiens
acaccagtgtccggg

SEQ ID NO: 585958 - DNA, 15 bp, Homo sapiens
caccagtgtccgggg

SEQ ID NO: 585959 - DNA, 15 bp, Homo sapiens
accagtgtccggggc

SEQ ID NO: 585960 - DNA, 15 bp, Homo sapiens
ccagtgtccggggcc

SEQ ID NO: 585961 - DNA, 15 bp, Homo sapiens
cagtgtccggggcct

SEQ ID NO: 585962 - DNA, 15 bp, Homo sapiens
agtgtccggggcctg

SEQ ID NO: 585963 - DNA, 15 bp, Homo sapiens
gtgtccggggcctgg

SEQ ID NO: 585964 - DNA, 15 bp, Homo sapiens
tgtccggggcctggc

SEQ ID NO: 585965 - DNA, 15 bp, Homo sapiens
gtccggggcctggcc

SEQ ID NO: 585966 - DNA, 15 bp, Homo sapiens
tccggggcctggcct

SEQ ID NO: 585967 - DNA, 15 bp, Homo sapiens
ccggggcctggcctg

SEQ ID NO: 585968 - DNA, 15 bp, Homo sapiens
cggggcctggcctgg

SEQ ID NO: 585969 - DNA, 15 bp, Homo sapiens
ggggcctggcctggg

SEQ ID NO: 585970 - DNA, 15 bp, Homo sapiens
gggcctggcctgggg

SEQ ID NO: 585971 - DNA, 15 bp, Homo sapiens
ggcctggcctggggc

SEQ ID NO: 585972 - DNA, 15 bp, Homo sapiens
gcctggcctggggct

SEQ ID NO: 585973 - DNA, 15 bp, Homo sapiens
cctggcctggggctt

SEQ ID NO: 585974 - DNA, 15 bp, Homo sapiens
ctggcctggggcttt

SEQ ID NO: 585975 - DNA, 15 bp, Homo sapiens
tggcctggggctttt

SEQ ID NO: 585976 - DNA, 15 bp, Homo sapiens
ggcctggggctttta

SEQ ID NO: 585977 - DNA, 15 bp, Homo sapiens
gcctggggcttttat

SEQ ID NO: 585978 - DNA, 15 bp, Homo sapiens
cctggggcttttatg

SEQ ID NO: 585979 - DNA, 15 bp, Homo sapiens
ctggggcttttatgg

SEQ ID NO: 585980 - DNA, 15 bp, Homo sapiens
tggggcttttatggg

SEQ ID NO: 585981 - DNA, 15 bp, Homo sapiens
ggggcttttatgggg

SEQ ID NO: 585982 - DNA, 15 bp, Homo sapiens
gggcttttatggggg

SEQ ID NO: 585983 - DNA, 15 bp, Homo sapiens
ggcttttatgggggg

SEQ ID NO: 585984 - DNA, 15 bp, Homo sapiens
gcttttatgggggga

SEQ ID NO: 585985 - DNA, 15 bp, Homo sapiens
cttttatggggggag

SEQ ID NO: 585986 - DNA, 15 bp, Homo sapiens
ttttatggggggagc

SEQ ID NO: 585987 - DNA, 15 bp, Homo sapiens
tttatggggggagct

SEQ ID NO: 585988 - DNA, 15 bp, Homo sapiens
ttatggggggagctg

SEQ ID NO: 585989 - DNA, 15 bp, Homo sapiens
tatggggggagctgg

SEQ ID NO: 585990 - DNA, 15 bp, Homo sapiens
atggggggagctggc

SEQ ID NO: 585991 - DNA, 15 bp, Homo sapiens
tggggggagctggct

SEQ ID NO: 585992 - DNA, 15 bp, Homo sapiens
ggggggagctggctg

SEQ ID NO: 585993 - DNA, 15 bp, Homo sapiens
gggggagctggctgg

SEQ ID NO: 585994 - DNA, 15 bp, Homo sapiens
ggggagctggctggc

SEQ ID NO: 585995 - DNA, 15 bp, Homo sapiens
gggagctggctggct

SEQ ID NO: 585996 - DNA, 15 bp, Homo sapiens
ggagctggctggctg

SEQ ID NO: 585997 - DNA, 15 bp, Homo sapiens
gagctggctggctgc

SEQ ID NO: 585998 - DNA, 15 bp, Homo sapiens
agctggctggctgcc

SEQ ID NO: 585999 - DNA, 15 bp, Homo sapiens
gctggctggctgccc

SEQ ID NO: 586000 - DNA, 15 bp, Homo sapiens
ctggctggctgccca

SEQ ID NO: 586001 - DNA, 15 bp, Homo sapiens
tggctggctgcccag

SEQ ID NO: 586002 - DNA, 15 bp, Homo sapiens
ggctggctgcccagg

SEQ ID NO: 586003 - DNA, 15 bp, Homo sapiens
gctggctgcccaggg

SEQ ID NO: 586004 - DNA, 15 bp, Homo sapiens
ctggctgcccagggc

SEQ ID NO: 586005 - DNA, 15 bp, Homo sapiens
tggctgcccagggct

SEQ ID NO: 586006 - DNA, 15 bp, Homo sapiens
ggctgcccagggctg

SEQ ID NO: 586007 - DNA, 15 bp, Homo sapiens
gctgcccagggctgt

SEQ ID NO: 586008 - DNA, 15 bp, Homo sapiens
ctgcccagggctgtc

SEQ ID NO: 586009 - DNA, 15 bp, Homo sapiens
tgcccagggctgtct

SEQ ID NO: 586010 - DNA, 15 bp, Homo sapiens
gcccagggctgtctg

SEQ ID NO: 586011 - DNA, 15 bp, Homo sapiens
cccagggctgtctgg

SEQ ID NO: 586012 - DNA, 15 bp, Homo sapiens
ccagggctgtctggc

SEQ ID NO: 586013 - DNA, 15 bp, Homo sapiens
cagggctgtctggct

SEQ ID NO: 586014 - DNA, 15 bp, Homo sapiens
agggctgtctggctc

SEQ ID NO: 586015 - DNA, 15 bp, Homo sapiens
gggctgtctggctct

SEQ ID NO: 586016 - DNA, 15 bp, Homo sapiens
ggctgtctggctctc

SEQ ID NO: 586017 - DNA, 15 bp, Homo sapiens
gctgtctggctctct

SEQ ID NO: 586018 - DNA, 15 bp, Homo sapiens
ctgtctggctctctg

SEQ ID NO: 586019 - DNA, 15 bp, Homo sapiens
tgtctggctctctgg

SEQ ID NO: 586020 - DNA, 15 bp, Homo sapiens
gtctggctctctggg

SEQ ID NO: 586021 - DNA, 15 bp, Homo sapiens
tctggctctctgggg

SEQ ID NO: 586022 - DNA, 15 bp, Homo sapiens
ctggctctctggggg

SEQ ID NO: 586023 - DNA, 15 bp, Homo sapiens
tggctctctgggggc

SEQ ID NO: 586024 - DNA, 15 bp, Homo sapiens
ggctctctgggggct

SEQ ID NO: 586025 - DNA, 15 bp, Homo sapiens
gctctctgggggctc

SEQ ID NO: 586026 - DNA, 15 bp, Homo sapiens
ctctctgggggctct

SEQ ID NO: 586027 - DNA, 15 bp, Homo sapiens
tctctgggggctctg

SEQ ID NO: 586028 - DNA, 15 bp, Homo sapiens
ctctgggggctctgc

SEQ ID NO: 586029 - DNA, 15 bp, Homo sapiens
tctgggggctctgca

SEQ ID NO: 586030 - DNA, 15 bp, Homo sapiens
ctgggggctctgcat

SEQ ID NO: 586031 - DNA, 15 bp, Homo sapiens
tgggggctctgcatg

SEQ ID NO: 586032 - DNA, 15 bp, Homo sapiens
gggggctctgcatgg

SEQ ID NO: 586033 - DNA, 15 bp, Homo sapiens
ggggctctgcatggc

SEQ ID NO: 586034 - DNA, 15 bp, Homo sapiens
gggctctgcatggca

SEQ ID NO: 586035 - DNA, 15 bp, Homo sapiens
ggctctgcatggcat

SEQ ID NO: 586036 - DNA, 15 bp, Homo sapiens
gctctgcatggcatt

SEQ ID NO: 586037 - DNA, 15 bp, Homo sapiens
ctctgcatggcattt

SEQ ID NO: 586038 - DNA, 15 bp, Homo sapiens
tctgcatggcatttc

SEQ ID NO: 586039 - DNA, 15 bp, Homo sapiens
ctgcatggcatttcc

SEQ ID NO: 586040 - DNA, 15 bp, Homo sapiens
tgcatggcatttcca

SEQ ID NO: 586041 - DNA, 15 bp, Homo sapiens
gcatggcatttccag

SEQ ID NO: 586042 - DNA, 15 bp, Homo sapiens
catggcatttccagg

SEQ ID NO: 586043 - DNA, 15 bp, Homo sapiens
atggcatttccaggg

SEQ ID NO: 586044 - DNA, 15 bp, Homo sapiens
tggcatttccagggg

SEQ ID NO: 586045 - DNA, 15 bp, Homo sapiens
ggcatttccaggggt

SEQ ID NO: 586046 - DNA, 15 bp, Homo sapiens
gcatttccaggggtt

SEQ ID NO: 586047 - DNA, 15 bp, Homo sapiens
catttccaggggttg

SEQ ID NO: 586048 - DNA, 15 bp, Homo sapiens
atttccaggggttgg

SEQ ID NO: 586049 - DNA, 15 bp, Homo sapiens
tttccaggggttggt

SEQ ID NO: 586050 - DNA, 15 bp, Homo sapiens
ttccaggggttggtg

SEQ ID NO: 586051 - DNA, 15 bp, Homo sapiens
tccaggggttggtgg

SEQ ID NO: 586052 - DNA, 15 bp, Homo sapiens
ccaggggttggtgga

SEQ ID NO: 586053 - DNA, 15 bp, Homo sapiens
caggggttggtggat

SEQ ID NO: 586054 - DNA, 15 bp, Homo sapiens
aggggttggtggatc

SEQ ID NO: 586055 - DNA, 15 bp, Homo sapiens
ggggttggtggatca

SEQ ID NO: 586056 - DNA, 15 bp, Homo sapiens
gggttggtggatcag

SEQ ID NO: 586057 - DNA, 15 bp, Homo sapiens
ggttggtggatcagg

SEQ ID NO: 586058 - DNA, 15 bp, Homo sapiens
gttggtggatcaggg

SEQ ID NO: 586059 - DNA, 15 bp, Homo sapiens
ttggtggatcaggga

SEQ ID NO: 586060 - DNA, 15 bp, Homo sapiens
tggtggatcagggat

SEQ ID NO: 586061 - DNA, 15 bp, Homo sapiens
ggtggatcagggatt

SEQ ID NO: 586062 - DNA, 15 bp, Homo sapiens
gtggatcagggattc

SEQ ID NO: 586063 - DNA, 15 bp, Homo sapiens
tggatcagggattct

SEQ ID NO: 586064 - DNA, 15 bp, Homo sapiens
ggatcagggattctg

SEQ ID NO: 586065 - DNA, 15 bp, Homo sapiens
gatcagggattctgt

SEQ ID NO: 586066 - DNA, 15 bp, Homo sapiens
atcagggattctgtc

SEQ ID NO: 586067 - DNA, 15 bp, Homo sapiens
tcagggattctgtcc

SEQ ID NO: 586068 - DNA, 15 bp, Homo sapiens
cagggattctgtccc

SEQ ID NO: 586069 - DNA, 15 bp, Homo sapiens
agggattctgtccct

SEQ ID NO: 586070 - DNA, 15 bp, Homo sapiens
gggattctgtccctc

SEQ ID NO: 586071 - DNA, 15 bp, Homo sapiens
ggattctgtccctca

SEQ ID NO: 586072 - DNA, 15 bp, Homo sapiens
gattctgtccctcag

SEQ ID NO: 586073 - DNA, 15 bp, Homo sapiens
attctgtccctcagg

SEQ ID NO: 586074 - DNA, 15 bp, Homo sapiens
ttctgtccctcagga

SEQ ID NO: 586075 - DNA, 15 bp, Homo sapiens
tctgtccctcaggag

SEQ ID NO: 586076 - DNA, 15 bp, Homo sapiens
ctgtccctcaggaga

SEQ ID NO: 586077 - DNA, 15 bp, Homo sapiens
tgtccctcaggagaa

SEQ ID NO: 586078 - DNA, 15 bp, Homo sapiens
gtccctcaggagaat

SEQ ID NO: 586079 - DNA, 15 bp, Homo sapiens
tccctcaggagaatg

SEQ ID NO: 586080 - DNA, 15 bp, Homo sapiens
ccctcaggagaatgt

SEQ ID NO: 586081 - DNA, 15 bp, Homo sapiens
cctcaggagaatgtg

SEQ ID NO: 586082 - DNA, 15 bp, Homo sapiens
ctcaggagaatgtgg

SEQ ID NO: 586083 - DNA, 15 bp, Homo sapiens
tcaggagaatgtggg

SEQ ID NO: 586084 - DNA, 15 bp, Homo sapiens
caggagaatgtgggc

SEQ ID NO: 586085 - DNA, 15 bp, Homo sapiens
aggagaatgtgggca

SEQ ID NO: 586086 - DNA, 15 bp, Homo sapiens
ggagaatgtgggcac

SEQ ID NO: 586087 - DNA, 15 bp, Homo sapiens
gagaatgtgggcact

SEQ ID NO: 586088 - DNA, 15 bp, Homo sapiens
agaatgtgggcacta

SEQ ID NO: 586089 - DNA, 15 bp, Homo sapiens
gaatgtgggcactag

SEQ ID NO: 586090 - DNA, 15 bp, Homo sapiens
aatgtgggcactagc

SEQ ID NO: 586091 - DNA, 15 bp, Homo sapiens
atgtgggcactagcc

SEQ ID NO: 586092 - DNA, 15 bp, Homo sapiens
tgtgggcactagccc

SEQ ID NO: 586093 - DNA, 15 bp, Homo sapiens
gtgggcactagccca

SEQ ID NO: 586094 - DNA, 15 bp, Homo sapiens
tgggcactagcccaa

SEQ ID NO: 586095 - DNA, 15 bp, Homo sapiens
gggcactagcccaag

SEQ ID NO: 586096 - DNA, 15 bp, Homo sapiens
ggcactagcccaagg

SEQ ID NO: 586097 - DNA, 15 bp, Homo sapiens
gcactagcccaaggc

SEQ ID NO: 586098 - DNA, 15 bp, Homo sapiens
cactagcccaaggcc

SEQ ID NO: 586099 - DNA, 15 bp, Homo sapiens
actagcccaaggcca

SEQ ID NO: 586100 - DNA, 15 bp, Homo sapiens
ctagcccaaggccac

SEQ ID NO: 586101 - DNA, 15 bp, Homo sapiens
tagcccaaggccact

SEQ ID NO: 586102 - DNA, 15 bp, Homo sapiens
agcccaaggccactc

SEQ ID NO: 586103 - DNA, 15 bp, Homo sapiens
gcccaaggccactca

SEQ ID NO: 586104 - DNA, 15 bp, Homo sapiens
cccaaggccactcac

SEQ ID NO: 586105 - DNA, 15 bp, Homo sapiens
ccaaggccactcact

SEQ ID NO: 586106 - DNA, 15 bp, Homo sapiens
caaggccactcactt

SEQ ID NO: 586107 - DNA, 15 bp, Homo sapiens
aaggccactcacttc

SEQ ID NO: 586108 - DNA, 15 bp, Homo sapiens
aggccactcacttct

SEQ ID NO: 586109 - DNA, 15 bp, Homo sapiens
ggccactcacttctg

SEQ ID NO: 586110 - DNA, 15 bp, Homo sapiens
gccactcacttctgt

SEQ ID NO: 586111 - DNA, 15 bp, Homo sapiens
ccactcacttctgtg

SEQ ID NO: 586112 - DNA, 15 bp, Homo sapiens
cactcacttctgtgt

SEQ ID NO: 586113 - DNA, 15 bp, Homo sapiens
actcacttctgtgta

SEQ ID NO: 586114 - DNA, 15 bp, Homo sapiens
ctcacttctgtgtac

SEQ ID NO: 586115 - DNA, 15 bp, Homo sapiens
tcacttctgtgtaca

SEQ ID NO: 586116 - DNA, 15 bp, Homo sapiens
cacttctgtgtacat

SEQ ID NO: 586117 - DNA, 15 bp, Homo sapiens
acttctgtgtacata

SEQ ID NO: 586118 - DNA, 15 bp, Homo sapiens
cttctgtgtacatag

SEQ ID NO: 586119 - DNA, 15 bp, Homo sapiens
ttctgtgtacatagc

SEQ ID NO: 586120 - DNA, 15 bp, Homo sapiens
tctgtgtacatagcc

SEQ ID NO: 586121 - DNA, 15 bp, Homo sapiens
ctgtgtacatagcca

SEQ ID NO: 586122 - DNA, 15 bp, Homo sapiens
tgtgtacatagccac

SEQ ID NO: 586123 - DNA, 15 bp, Homo sapiens
gtgtacatagccacc

SEQ ID NO: 586124 - DNA, 15 bp, Homo sapiens
tgtacatagccacct

SEQ ID NO: 586125 - DNA, 15 bp, Homo sapiens
gtacatagccacctg

SEQ ID NO: 586126 - DNA, 15 bp, Homo sapiens
tacatagccacctga

SEQ ID NO: 586127 - DNA, 15 bp, Homo sapiens
acatagccacctgag

SEQ ID NO: 586128 - DNA, 15 bp, Homo sapiens
catagccacctgagg

SEQ ID NO: 586129 - DNA, 15 bp, Homo sapiens
atagccacctgaggg

SEQ ID NO: 586130 - DNA, 15 bp, Homo sapiens
tagccacctgagggc

SEQ ID NO: 586131 - DNA, 15 bp, Homo sapiens
agccacctgagggcc

SEQ ID NO: 586132 - DNA, 15 bp, Homo sapiens
gccacctgagggccc

SEQ ID NO: 586133 - DNA, 15 bp, Homo sapiens
ccacctgagggccca

SEQ ID NO: 586134 - DNA, 15 bp, Homo sapiens
cacctgagggcccag

SEQ ID NO: 586135 - DNA, 15 bp, Homo sapiens
acctgagggcccagg

SEQ ID NO: 586136 - DNA, 15 bp, Homo sapiens
cctgagggcccagga

SEQ ID NO: 586137 - DNA, 15 bp, Homo sapiens
ctgagggcccaggaa

SEQ ID NO: 586138 - DNA, 15 bp, Homo sapiens
tgagggcccaggaat

SEQ ID NO: 586139 - DNA, 15 bp, Homo sapiens
gagggcccaggaatg

SEQ ID NO: 586140 - DNA, 15 bp, Homo sapiens
agggcccaggaatgg

SEQ ID NO: 586141 - DNA, 15 bp, Homo sapiens
gggcccaggaatgga

SEQ ID NO: 586142 - DNA, 15 bp, Homo sapiens
ggcccaggaatggag

SEQ ID NO: 586143 - DNA, 15 bp, Homo sapiens
gcccaggaatggagg

SEQ ID NO: 586144 - DNA, 15 bp, Homo sapiens
cccaggaatggaggg

SEQ ID NO: 586145 - DNA, 15 bp, Homo sapiens
ccaggaatggagggg

SEQ ID NO: 586146 - DNA, 15 bp, Homo sapiens
caggaatggaggggg

SEQ ID NO: 586147 - DNA, 15 bp, Homo sapiens
aggaatggagggggc

SEQ ID NO: 586148 - DNA, 15 bp, Homo sapiens
ggaatggagggggcc

SEQ ID NO: 586149 - DNA, 15 bp, Homo sapiens
gaatggagggggcca

SEQ ID NO: 586150 - DNA, 15 bp, Homo sapiens
aatggagggggccag

SEQ ID NO: 586151 - DNA, 15 bp, Homo sapiens
atggagggggccagg

SEQ ID NO: 586152 - DNA, 15 bp, Homo sapiens
tggagggggccaggc

SEQ ID NO: 586153 - DNA, 15 bp, Homo sapiens
ggagggggccaggct

SEQ ID NO: 586154 - DNA, 15 bp, Homo sapiens
gagggggccaggcta

SEQ ID NO: 586155 - DNA, 15 bp, Homo sapiens
agggggccaggctac

SEQ ID NO: 586156 - DNA, 15 bp, Homo sapiens
gggggccaggctaca

SEQ ID NO: 586157 - DNA, 15 bp, Homo sapiens
ggggccaggctacag

SEQ ID NO: 586158 - DNA, 15 bp, Homo sapiens
gggccaggctacagc

SEQ ID NO: 586159 - DNA, 15 bp, Homo sapiens
ggccaggctacagct

SEQ ID NO: 586160 - DNA, 15 bp, Homo sapiens
gccaggctacagctg

SEQ ID NO: 586161 - DNA, 15 bp, Homo sapiens
ccaggctacagctgg

SEQ ID NO: 586162 - DNA, 15 bp, Homo sapiens
caggctacagctgga

SEQ ID NO: 586163 - DNA, 15 bp, Homo sapiens
aggctacagctggac

SEQ ID NO: 586164 - DNA, 15 bp, Homo sapiens
ggctacagctggaca

SEQ ID NO: 586165 - DNA, 15 bp, Homo sapiens
gctacagctggacat

SEQ ID NO: 586166 - DNA, 15 bp, Homo sapiens
ctacagctggacatc

SEQ ID NO: 586167 - DNA, 15 bp, Homo sapiens
tacagctggacatct

SEQ ID NO: 586168 - DNA, 15 bp, Homo sapiens
acagctggacatctg

SEQ ID NO: 586169 - DNA, 15 bp, Homo sapiens
cagctggacatctgg

SEQ ID NO: 586170 - DNA, 15 bp, Homo sapiens
agctggacatctggc

SEQ ID NO: 586171 - DNA, 15 bp, Homo sapiens
gctggacatctggca

SEQ ID NO: 586172 - DNA, 15 bp, Homo sapiens
ctggacatctggcac

SEQ ID NO: 586173 - DNA, 15 bp, Homo sapiens
tggacatctggcact

SEQ ID NO: 586174 - DNA, 15 bp, Homo sapiens
ggacatctggcactc

SEQ ID NO: 586175 - DNA, 15 bp, Homo sapiens
gacatctggcactcg

SEQ ID NO: 586176 - DNA, 15 bp, Homo sapiens
acatctggcactcgg

SEQ ID NO: 586177 - DNA, 15 bp, Homo sapiens
catctggcactcgga

SEQ ID NO: 586178 - DNA, 15 bp, Homo sapiens
atctggcactcggat

SEQ ID NO: 586179 - DNA, 15 bp, Homo sapiens
tctggcactcggatg

SEQ ID NO: 586180 - DNA, 15 bp, Homo sapiens
ctggcactcggatgg

SEQ ID NO: 586181 - DNA, 15 bp, Homo sapiens
tggcactcggatggg

SEQ ID NO: 586182 - DNA, 15 bp, Homo sapiens
ggcactcggatgggc

SEQ ID NO: 586183 - DNA, 15 bp, Homo sapiens
gcactcggatgggct

SEQ ID NO: 586184 - DNA, 15 bp, Homo sapiens
cactcggatgggctc

SEQ ID NO: 586185 - DNA, 15 bp, Homo sapiens
actcggatgggctct

SEQ ID NO: 586186 - DNA, 15 bp, Homo sapiens
ctcggatgggctctg

SEQ ID NO: 586187 - DNA, 15 bp, Homo sapiens
tcggatgggctctgg

SEQ ID NO: 586188 - DNA, 15 bp, Homo sapiens
cggatgggctctgga

SEQ ID NO: 586189 - DNA, 15 bp, Homo sapiens
ggatgggctctggag

SEQ ID NO: 586190 - DNA, 15 bp, Homo sapiens
gatgggctctggagc

SEQ ID NO: 586191 - DNA, 15 bp, Homo sapiens
atgggctctggagcc

SEQ ID NO: 586192 - DNA, 15 bp, Homo sapiens
tgggctctggagccc

SEQ ID NO: 586193 - DNA, 15 bp, Homo sapiens
gggctctggagcccc

SEQ ID NO: 586194 - DNA, 15 bp, Homo sapiens
ggctctggagccccc

SEQ ID NO: 586195 - DNA, 15 bp, Homo sapiens
gctctggagccccca

SEQ ID NO: 586196 - DNA, 15 bp, Homo sapiens
ctctggagcccccag

SEQ ID NO: 586197 - DNA, 15 bp, Homo sapiens
tctggagcccccagg

SEQ ID NO: 586198 - DNA, 15 bp, Homo sapiens
ctggagcccccaggc

SEQ ID NO: 586199 - DNA, 15 bp, Homo sapiens
tggagcccccaggcc

SEQ ID NO: 586200 - DNA, 15 bp, Homo sapiens
ggagcccccaggcct

SEQ ID NO: 586201 - DNA, 15 bp, Homo sapiens
gagcccccaggcctg

SEQ ID NO: 586202 - DNA, 15 bp, Homo sapiens
agcccccaggcctgc

SEQ ID NO: 586203 - DNA, 15 bp, Homo sapiens
gcccccaggcctgca

SEQ ID NO: 586204 - DNA, 15 bp, Homo sapiens
cccccaggcctgcag

SEQ ID NO: 586205 - DNA, 15 bp, Homo sapiens
ccccaggcctgcagc

SEQ ID NO: 586206 - DNA, 15 bp, Homo sapiens
cccaggcctgcagca

SEQ ID NO: 586207 - DNA, 15 bp, Homo sapiens
ccaggcctgcagcat

SEQ ID NO: 586208 - DNA, 15 bp, Homo sapiens
caggcctgcagcatc

SEQ ID NO: 586209 - DNA, 15 bp, Homo sapiens
aggcctgcagcatct

SEQ ID NO: 586210 - DNA, 15 bp, Homo sapiens
ggcctgcagcatctg

SEQ ID NO: 586211 - DNA, 15 bp, Homo sapiens
gcctgcagcatctgc

SEQ ID NO: 586212 - DNA, 15 bp, Homo sapiens
cctgcagcatctgcc

SEQ ID NO: 586213 - DNA, 15 bp, Homo sapiens
ctgcagcatctgccc

SEQ ID NO: 586214 - DNA, 15 bp, Homo sapiens
tgcagcatctgccca

SEQ ID NO: 586215 - DNA, 15 bp, Homo sapiens
gcagcatctgcccag

SEQ ID NO: 586216 - DNA, 15 bp, Homo sapiens
cagcatctgcccagg

SEQ ID NO: 586217 - DNA, 15 bp, Homo sapiens
agcatctgcccaggg

SEQ ID NO: 586218 - DNA, 15 bp, Homo sapiens
gcatctgcccaggga

SEQ ID NO: 586219 - DNA, 15 bp, Homo sapiens
catctgcccagggac

SEQ ID NO: 586220 - DNA, 15 bp, Homo sapiens
atctgcccagggact

SEQ ID NO: 586221 - DNA, 15 bp, Homo sapiens
tctgcccagggactg

SEQ ID NO: 586222 - DNA, 15 bp, Homo sapiens
ctgcccagggactgc

SEQ ID NO: 586223 - DNA, 15 bp, Homo sapiens
tgcccagggactgcc

SEQ ID NO: 586224 - DNA, 15 bp, Homo sapiens
gcccagggactgccc

SEQ ID NO: 586225 - DNA, 15 bp, Homo sapiens
cccagggactgccct

SEQ ID NO: 586226 - DNA, 15 bp, Homo sapiens
ccagggactgccctg

SEQ ID NO: 586227 - DNA, 15 bp, Homo sapiens
cagggactgccctgg

SEQ ID NO: 586228 - DNA, 15 bp, Homo sapiens
agggactgccctggc

SEQ ID NO: 586229 - DNA, 15 bp, Homo sapiens
gggactgccctggcc

SEQ ID NO: 586230 - DNA, 15 bp, Homo sapiens
ggactgccctggccc

SEQ ID NO: 586231 - DNA, 15 bp, Homo sapiens
gactgccctggccct

SEQ ID NO: 586232 - DNA, 15 bp, Homo sapiens
actgccctggccctt

SEQ ID NO: 586233 - DNA, 15 bp, Homo sapiens
ctgccctggcccttg

SEQ ID NO: 586234 - DNA, 15 bp, Homo sapiens
tgccctggcccttgg

SEQ ID NO: 586235 - DNA, 15 bp, Homo sapiens
gccctggcccttggc

SEQ ID NO: 586236 - DNA, 15 bp, Homo sapiens
ccctggcccttggcc

SEQ ID NO: 586237 - DNA, 15 bp, Homo sapiens
cctggcccttggcca

SEQ ID NO: 586238 - DNA, 15 bp, Homo sapiens
ctggcccttggccat

SEQ ID NO: 586239 - DNA, 15 bp, Homo sapiens
tggcccttggccatt

SEQ ID NO: 586240 - DNA, 15 bp, Homo sapiens
ggcccttggccattt

SEQ ID NO: 586241 - DNA, 15 bp, Homo sapiens
gcccttggccatttc

SEQ ID NO: 586242 - DNA, 15 bp, Homo sapiens
cccttggccatttcc

SEQ ID NO: 586243 - DNA, 15 bp, Homo sapiens
ccttggccatttcct

SEQ ID NO: 586244 - DNA, 15 bp, Homo sapiens
cttggccatttcctc

SEQ ID NO: 586245 - DNA, 15 bp, Homo sapiens
ttggccatttcctca

SEQ ID NO: 586246 - DNA, 15 bp, Homo sapiens
tggccatttcctcag

SEQ ID NO: 586247 - DNA, 15 bp, Homo sapiens
ggccatttcctcagg

SEQ ID NO: 586248 - DNA, 15 bp, Homo sapiens
gccatttcctcaggg

SEQ ID NO: 586249 - DNA, 15 bp, Homo sapiens
ccatttcctcaggga

SEQ ID NO: 586250 - DNA, 15 bp, Homo sapiens
catttcctcagggac

SEQ ID NO: 586251 - DNA, 15 bp, Homo sapiens
atttcctcagggacc

SEQ ID NO: 586252 - DNA, 15 bp, Homo sapiens
tttcctcagggaccc

SEQ ID NO: 586253 - DNA, 15 bp, Homo sapiens
ttcctcagggaccca

SEQ ID NO: 586254 - DNA, 15 bp, Homo sapiens
tcctcagggacccac

SEQ ID NO: 586255 - DNA, 15 bp, Homo sapiens
cctcagggacccaca

SEQ ID NO: 586256 - DNA, 15 bp, Homo sapiens
ctcagggacccacag

SEQ ID NO: 586257 - DNA, 15 bp, Homo sapiens
tcagggacccacagc

SEQ ID NO: 586258 - DNA, 15 bp, Homo sapiens
cagggacccacagct

SEQ ID NO: 586259 - DNA, 15 bp, Homo sapiens
agggacccacagctc

SEQ ID NO: 586260 - DNA, 15 bp, Homo sapiens
gggacccacagctcc

SEQ ID NO: 586261 - DNA, 15 bp, Homo sapiens
ggacccacagctcca

SEQ ID NO: 586262 - DNA, 15 bp, Homo sapiens
gacccacagctccac

SEQ ID NO: 586263 - DNA, 15 bp, Homo sapiens
acccacagctccacc

SEQ ID NO: 586264 - DNA, 15 bp, Homo sapiens
cccacagctccacca

SEQ ID NO: 586265 - DNA, 15 bp, Homo sapiens
ccacagctccaccag

SEQ ID NO: 586266 - DNA, 15 bp, Homo sapiens
cacagctccaccagc

SEQ ID NO: 586267 - DNA, 15 bp, Homo sapiens
acagctccaccagcc

SEQ ID NO: 586268 - DNA, 15 bp, Homo sapiens
cagctccaccagccg

SEQ ID NO: 586269 - DNA, 15 bp, Homo sapiens
agctccaccagccgg

SEQ ID NO: 586270 - DNA, 15 bp, Homo sapiens
gctccaccagccggc

SEQ ID NO: 586271 - DNA, 15 bp, Homo sapiens
ctccaccagccggcc

SEQ ID NO: 586272 - DNA, 15 bp, Homo sapiens
tccaccagccggccc

SEQ ID NO: 586273 - DNA, 15 bp, Homo sapiens
ccaccagccggcccc

SEQ ID NO: 586274 - DNA, 15 bp, Homo sapiens
caccagccggcccct

SEQ ID NO: 586275 - DNA, 15 bp, Homo sapiens
accagccggcccctc

SEQ ID NO: 586276 - DNA, 15 bp, Homo sapiens
ccagccggcccctcc

SEQ ID NO: 586277 - DNA, 15 bp, Homo sapiens
cagccggcccctccc

SEQ ID NO: 586278 - DNA, 15 bp, Homo sapiens
agccggcccctccca

SEQ ID NO: 586279 - DNA, 15 bp, Homo sapiens
gccggcccctcccag

SEQ ID NO: 586280 - DNA, 15 bp, Homo sapiens
ccggcccctcccagt

SEQ ID NO: 586281 - DNA, 15 bp, Homo sapiens
cggcccctcccagtg

SEQ ID NO: 586282 - DNA, 15 bp, Homo sapiens
ggcccctcccagtgc

SEQ ID NO: 586283 - DNA, 15 bp, Homo sapiens
gcccctcccagtgct

SEQ ID NO: 586284 - DNA, 15 bp, Homo sapiens
cccctcccagtgctg

SEQ ID NO: 586285 - DNA, 15 bp, Homo sapiens
ccctcccagtgctgg

SEQ ID NO: 586286 - DNA, 15 bp, Homo sapiens
cctcccagtgctgga

SEQ ID NO: 586287 - DNA, 15 bp, Homo sapiens
ctcccagtgctggaa

SEQ ID NO: 586288 - DNA, 15 bp, Homo sapiens
tcccagtgctggaat

SEQ ID NO: 586289 - DNA, 15 bp, Homo sapiens
cccagtgctggaata

SEQ ID NO: 586290 - DNA, 15 bp, Homo sapiens
ccagtgctggaatag

SEQ ID NO: 586291 - DNA, 15 bp, Homo sapiens
cagtgctggaataga

SEQ ID NO: 586292 - DNA, 15 bp, Homo sapiens
agtgctggaatagac

SEQ ID NO: 586293 - DNA, 15 bp, Homo sapiens
gtgctggaatagaca

SEQ ID NO: 586294 - DNA, 15 bp, Homo sapiens
tgctggaatagacag

SEQ ID NO: 586295 - DNA, 15 bp, Homo sapiens
gctggaatagacagt

SEQ ID NO: 586296 - DNA, 15 bp, Homo sapiens
ctggaatagacagtt

SEQ ID NO: 586297 - DNA, 15 bp, Homo sapiens
tggaatagacagttc

SEQ ID NO: 586298 - DNA, 15 bp, Homo sapiens
ggaatagacagttcc

SEQ ID NO: 586299 - DNA, 15 bp, Homo sapiens
gaatagacagttcct

SEQ ID NO: 586300 - DNA, 15 bp, Homo sapiens
aatagacagttcctc

SEQ ID NO: 586301 - DNA, 15 bp, Homo sapiens
atagacagttcctca

SEQ ID NO: 586302 - DNA, 15 bp, Homo sapiens
tagacagttcctcag

SEQ ID NO: 586303 - DNA, 15 bp, Homo sapiens
agacagttcctcagt

SEQ ID NO: 586304 - DNA, 15 bp, Homo sapiens
gacagttcctcagtc

SEQ ID NO: 586305 - DNA, 15 bp, Homo sapiens
acagttcctcagtcc

SEQ ID NO: 586306 - DNA, 15 bp, Homo sapiens
cagttcctcagtcca

SEQ ID NO: 586307 - DNA, 15 bp, Homo sapiens
agttcctcagtccac

SEQ ID NO: 586308 - DNA, 15 bp, Homo sapiens
gttcctcagtccaca

SEQ ID NO: 586309 - DNA, 15 bp, Homo sapiens
ttcctcagtccacat

SEQ ID NO: 586310 - DNA, 15 bp, Homo sapiens
tcctcagtccacatc

SEQ ID NO: 586311 - DNA, 15 bp, Homo sapiens
cctcagtccacatct

SEQ ID NO: 586312 - DNA, 15 bp, Homo sapiens
ctcagtccacatctg

SEQ ID NO: 586313 - DNA, 15 bp, Homo sapiens
tcagtccacatctgc

SEQ ID NO: 586314 - DNA, 15 bp, Homo sapiens
cagtccacatctgcc

SEQ ID NO: 586315 - DNA, 15 bp, Homo sapiens
agtccacatctgcca

SEQ ID NO: 586316 - DNA, 15 bp, Homo sapiens
gtccacatctgccaa

SEQ ID NO: 586317 - DNA, 15 bp, Homo sapiens
tccacatctgccaaa

SEQ ID NO: 586318 - DNA, 15 bp, Homo sapiens
ccacatctgccaaag

SEQ ID NO: 586319 - DNA, 15 bp, Homo sapiens
cacatctgccaaagg

SEQ ID NO: 586320 - DNA, 15 bp, Homo sapiens
acatctgccaaaggc

SEQ ID NO: 586321 - DNA, 15 bp, Homo sapiens
catctgccaaaggcg

SEQ ID NO: 586322 - DNA, 15 bp, Homo sapiens
atctgccaaaggcgg

SEQ ID NO: 586323 - DNA, 15 bp, Homo sapiens
tctgccaaaggcggc

SEQ ID NO: 586324 - DNA, 15 bp, Homo sapiens
ctgccaaaggcggca

SEQ ID NO: 586325 - DNA, 15 bp, Homo sapiens
tgccaaaggcggcac

SEQ ID NO: 586326 - DNA, 15 bp, Homo sapiens
gccaaaggcggcact

SEQ ID NO: 586327 - DNA, 15 bp, Homo sapiens
ccaaaggcggcacta

SEQ ID NO: 586328 - DNA, 15 bp, Homo sapiens
caaaggcggcactag

SEQ ID NO: 586329 - DNA, 15 bp, Homo sapiens
aaaggcggcactaga

SEQ ID NO: 586330 - DNA, 15 bp, Homo sapiens
aaggcggcactagaa

SEQ ID NO: 586331 - DNA, 15 bp, Homo sapiens
aggcggcactagaag

SEQ ID NO: 586332 - DNA, 15 bp, Homo sapiens
ggcggcactagaagg

SEQ ID NO: 586333 - DNA, 15 bp, Homo sapiens
gcggcactagaaggc

SEQ ID NO: 586334 - DNA, 15 bp, Homo sapiens
cggcactagaaggca

SEQ ID NO: 586335 - DNA, 15 bp, Homo sapiens
ggcactagaaggcat

SEQ ID NO: 586336 - DNA, 15 bp, Homo sapiens
gcactagaaggcatc

SEQ ID NO: 586337 - DNA, 15 bp, Homo sapiens
cactagaaggcatcc

SEQ ID NO: 586338 - DNA, 15 bp, Homo sapiens
actagaaggcatcct

SEQ ID NO: 586339 - DNA, 15 bp, Homo sapiens
ctagaaggcatcctg

SEQ ID NO: 586340 - DNA, 15 bp, Homo sapiens
tagaaggcatcctgc

SEQ ID NO: 586341 - DNA, 15 bp, Homo sapiens
agaaggcatcctgcc

SEQ ID NO: 586342 - DNA, 15 bp, Homo sapiens
gaaggcatcctgcct

SEQ ID NO: 586343 - DNA, 15 bp, Homo sapiens
aaggcatcctgcctt

SEQ ID NO: 586344 - DNA, 15 bp, Homo sapiens
aggcatcctgccttt

SEQ ID NO: 586345 - DNA, 15 bp, Homo sapiens
ggcatcctgcctttt

SEQ ID NO: 586346 - DNA, 15 bp, Homo sapiens
gcatcctgccttttt

SEQ ID NO: 586347 - DNA, 15 bp, Homo sapiens
catcctgcctttttt

SEQ ID NO: 586348 - DNA, 15 bp, Homo sapiens
atcctgcctttttta

SEQ ID NO: 586349 - DNA, 15 bp, Homo sapiens
tcctgccttttttac

SEQ ID NO: 586350 - DNA, 15 bp, Homo sapiens
cctgccttttttact

SEQ ID NO: 586351 - DNA, 15 bp, Homo sapiens
ctgccttttttactg

SEQ ID NO: 586352 - DNA, 15 bp, Homo sapiens
tgccttttttactgc

SEQ ID NO: 586353 - DNA, 15 bp, Homo sapiens
gccttttttactgcg

SEQ ID NO: 586354 - DNA, 15 bp, Homo sapiens
ccttttttactgcgt

SEQ ID NO: 586355 - DNA, 15 bp, Homo sapiens
cttttttactgcgtt

SEQ ID NO: 586356 - DNA, 15 bp, Homo sapiens
ttttttactgcgttc

SEQ ID NO: 586357 - DNA, 15 bp, Homo sapiens
tttttactgcgttct

SEQ ID NO: 586358 - DNA, 15 bp, Homo sapiens
ttttactgcgttctg

SEQ ID NO: 586359 - DNA, 15 bp, Homo sapiens
tttactgcgttctgg

SEQ ID NO: 586360 - DNA, 15 bp, Homo sapiens
ttactgcgttctgga

SEQ ID NO: 586361 - DNA, 15 bp, Homo sapiens
tactgcgttctggag

SEQ ID NO: 586362 - DNA, 15 bp, Homo sapiens
actgcgttctggagg

SEQ ID NO: 586363 - DNA, 15 bp, Homo sapiens
ctgcgttctggaggt

SEQ ID NO: 586364 - DNA, 15 bp, Homo sapiens
tgcgttctggaggtg

SEQ ID NO: 586365 - DNA, 15 bp, Homo sapiens
gcgttctggaggtgg

SEQ ID NO: 586366 - DNA, 15 bp, Homo sapiens
cgttctggaggtggg

SEQ ID NO: 586367 - DNA, 15 bp, Homo sapiens
gttctggaggtgggg

SEQ ID NO: 586368 - DNA, 15 bp, Homo sapiens
ttctggaggtggggt

SEQ ID NO: 586369 - DNA, 15 bp, Homo sapiens
tctggaggtggggtc

SEQ ID NO: 586370 - DNA, 15 bp, Homo sapiens
ctggaggtggggtca

SEQ ID NO: 586371 - DNA, 15 bp, Homo sapiens
tggaggtggggtcac

SEQ ID NO: 586372 - DNA, 15 bp, Homo sapiens
ggaggtggggtcaca

SEQ ID NO: 586373 - DNA, 15 bp, Homo sapiens
gaggtggggtcacaa

SEQ ID NO: 586374 - DNA, 15 bp, Homo sapiens
aggtggggtcacaaa

SEQ ID NO: 586375 - DNA, 15 bp, Homo sapiens
ggtggggtcacaaag

SEQ ID NO: 586376 - DNA, 15 bp, Homo sapiens
gtggggtcacaaagc

SEQ ID NO: 586377 - DNA, 15 bp, Homo sapiens
tggggtcacaaagca

SEQ ID NO: 586378 - DNA, 15 bp, Homo sapiens
ggggtcacaaagcac

SEQ ID NO: 586379 - DNA, 15 bp, Homo sapiens
gggtcacaaagcact

SEQ ID NO: 586380 - DNA, 15 bp, Homo sapiens
ggtcacaaagcactg

SEQ ID NO: 586381 - DNA, 15 bp, Homo sapiens
gtcacaaagcactgc

SEQ ID NO: 586382 - DNA, 15 bp, Homo sapiens
tcacaaagcactgct

SEQ ID NO: 586383 - DNA, 15 bp, Homo sapiens
cacaaagcactgctc

SEQ ID NO: 586384 - DNA, 15 bp, Homo sapiens
acaaagcactgctca

SEQ ID NO: 586385 - DNA, 15 bp, Homo sapiens
caaagcactgctcac

SEQ ID NO: 586386 - DNA, 15 bp, Homo sapiens
aaagcactgctcact

SEQ ID NO: 586387 - DNA, 15 bp, Homo sapiens
aagcactgctcactg

SEQ ID NO: 586388 - DNA, 15 bp, Homo sapiens
agcactgctcactgc

SEQ ID NO: 586389 - DNA, 15 bp, Homo sapiens
gcactgctcactgca

SEQ ID NO: 586390 - DNA, 15 bp, Homo sapiens
cactgctcactgcat

SEQ ID NO: 586391 - DNA, 15 bp, Homo sapiens
actgctcactgcata

SEQ ID NO: 586392 - DNA, 15 bp, Homo sapiens
ctgctcactgcataa

SEQ ID NO: 586393 - DNA, 15 bp, Homo sapiens
tgctcactgcataaa

SEQ ID NO: 586394 - DNA, 15 bp, Homo sapiens
gctcactgcataaaa

SEQ ID NO: 586395 - DNA, 15 bp, Homo sapiens
ctcactgcataaaag

SEQ ID NO: 586396 - DNA, 15 bp, Homo sapiens
tcactgcataaaagg

SEQ ID NO: 586397 - DNA, 15 bp, Homo sapiens
cactgcataaaaggg

SEQ ID NO: 586398 - DNA, 15 bp, Homo sapiens
actgcataaaaggga

SEQ ID NO: 586399 - DNA, 15 bp, Homo sapiens
ctgcataaaagggac

SEQ ID NO: 586400 - DNA, 15 bp, Homo sapiens
tgcataaaagggaca

SEQ ID NO: 586401 - DNA, 15 bp, Homo sapiens
gcataaaagggacag

SEQ ID NO: 586402 - DNA, 15 bp, Homo sapiens
cataaaagggacagc

SEQ ID NO: 586403 - DNA, 15 bp, Homo sapiens
ataaaagggacagca

SEQ ID NO: 586404 - DNA, 15 bp, Homo sapiens
taaaagggacagcat

SEQ ID NO: 586405 - DNA, 15 bp, Homo sapiens
aaaagggacagcatc

SEQ ID NO: 586406 - DNA, 15 bp, Homo sapiens
aaagggacagcatcc

SEQ ID NO: 586407 - DNA, 15 bp, Homo sapiens
aagggacagcatcct

SEQ ID NO: 586408 - DNA, 15 bp, Homo sapiens
agggacagcatcctg

SEQ ID NO: 586409 - DNA, 15 bp, Homo sapiens
gggacagcatcctgc

SEQ ID NO: 586410 - DNA, 15 bp, Homo sapiens
ggacagcatcctgcc

SEQ ID NO: 586411 - DNA, 15 bp, Homo sapiens
gacagcatcctgccc

SEQ ID NO: 586412 - DNA, 15 bp, Homo sapiens
acagcatcctgcccc

SEQ ID NO: 586413 - DNA, 15 bp, Homo sapiens
cagcatcctgcccct

SEQ ID NO: 586414 - DNA, 15 bp, Homo sapiens
agcatcctgcccctg

SEQ ID NO: 586415 - DNA, 15 bp, Homo sapiens
gcatcctgcccctgg

SEQ ID NO: 586416 - DNA, 15 bp, Homo sapiens
catcctgcccctggc

SEQ ID NO: 586417 - DNA, 15 bp, Homo sapiens
atcctgcccctggca

SEQ ID NO: 586418 - DNA, 15 bp, Homo sapiens
tcctgcccctggcag

SEQ ID NO: 586419 - DNA, 15 bp, Homo sapiens
cctgcccctggcagc

SEQ ID NO: 586420 - DNA, 15 bp, Homo sapiens
ctgcccctggcagcc

SEQ ID NO: 586421 - DNA, 15 bp, Homo sapiens
tgcccctggcagccc

SEQ ID NO: 586422 - DNA, 15 bp, Homo sapiens
gcccctggcagccct

SEQ ID NO: 586423 - DNA, 15 bp, Homo sapiens
cccctggcagccctg

SEQ ID NO: 586424 - DNA, 15 bp, Homo sapiens
ccctggcagccctgc

SEQ ID NO: 586425 - DNA, 15 bp, Homo sapiens
cctggcagccctgcc

SEQ ID NO: 586426 - DNA, 15 bp, Homo sapiens
ctggcagccctgcct

SEQ ID NO: 586427 - DNA, 15 bp, Homo sapiens
tggcagccctgcctg

SEQ ID NO: 586428 - DNA, 15 bp, Homo sapiens
ggcagccctgcctga

SEQ ID NO: 586429 - DNA, 15 bp, Homo sapiens
gcagccctgcctgac

SEQ ID NO: 586430 - DNA, 15 bp, Homo sapiens
cagccctgcctgacc

SEQ ID NO: 586431 - DNA, 15 bp, Homo sapiens
agccctgcctgacca

SEQ ID NO: 586432 - DNA, 15 bp, Homo sapiens
gccctgcctgaccag

SEQ ID NO: 586433 - DNA, 15 bp, Homo sapiens
ccctgcctgaccagc

SEQ ID NO: 586434 - DNA, 15 bp, Homo sapiens
cctgcctgaccagct

SEQ ID NO: 586435 - DNA, 15 bp, Homo sapiens
ctgcctgaccagctc

SEQ ID NO: 586436 - DNA, 15 bp, Homo sapiens
tgcctgaccagctcc

SEQ ID NO: 586437 - DNA, 15 bp, Homo sapiens
gcctgaccagctccg

SEQ ID NO: 586438 - DNA, 15 bp, Homo sapiens
cctgaccagctccgc

SEQ ID NO: 586439 - DNA, 15 bp, Homo sapiens
ctgaccagctccgcc

SEQ ID NO: 586440 - DNA, 15 bp, Homo sapiens
tgaccagctccgcct

SEQ ID NO: 586441 - DNA, 15 bp, Homo sapiens
gaccagctccgcctc

SEQ ID NO: 586442 - DNA, 15 bp, Homo sapiens
accagctccgcctct

SEQ ID NO: 586443 - DNA, 15 bp, Homo sapiens
ccagctccgcctctc

SEQ ID NO: 586444 - DNA, 15 bp, Homo sapiens
cagctccgcctctcc

SEQ ID NO: 586445 - DNA, 15 bp, Homo sapiens
agctccgcctctccc

SEQ ID NO: 586446 - DNA, 15 bp, Homo sapiens
gctccgcctctccca

SEQ ID NO: 586447 - DNA, 15 bp, Homo sapiens
ctccgcctctcccac

SEQ ID NO: 586448 - DNA, 15 bp, Homo sapiens
tccgcctctcccact

SEQ ID NO: 586449 - DNA, 15 bp, Homo sapiens
ccgcctctcccactg

SEQ ID NO: 586450 - DNA, 15 bp, Homo sapiens
cgcctctcccactgc

SEQ ID NO: 586451 - DNA, 15 bp, Homo sapiens
gcctctcccactgct

SEQ ID NO: 586452 - DNA, 15 bp, Homo sapiens
cctctcccactgcta

SEQ ID NO: 586453 - DNA, 15 bp, Homo sapiens
ctctcccactgctat

SEQ ID NO: 586454 - DNA, 15 bp, Homo sapiens
tctcccactgctatc

SEQ ID NO: 586455 - DNA, 15 bp, Homo sapiens
ctcccactgctatcc

SEQ ID NO: 586456 - DNA, 15 bp, Homo sapiens
tcccactgctatcca

SEQ ID NO: 586457 - DNA, 15 bp, Homo sapiens
cccactgctatccaa

SEQ ID NO: 586458 - DNA, 15 bp, Homo sapiens
ccactgctatccaac

SEQ ID NO: 586459 - DNA, 15 bp, Homo sapiens
cactgctatccaacc

SEQ ID NO: 586460 - DNA, 15 bp, Homo sapiens
actgctatccaacct

SEQ ID NO: 586461 - DNA, 15 bp, Homo sapiens
ctgctatccaacctg

SEQ ID NO: 586462 - DNA, 15 bp, Homo sapiens
tgctatccaacctgt

SEQ ID NO: 586463 - DNA, 15 bp, Homo sapiens
gctatccaacctgta

SEQ ID NO: 586464 - DNA, 15 bp, Homo sapiens
ctatccaacctgtac

SEQ ID NO: 586465 - DNA, 15 bp, Homo sapiens
tatccaacctgtaca

SEQ ID NO: 586466 - DNA, 15 bp, Homo sapiens
atccaacctgtacac

SEQ ID NO: 586467 - DNA, 15 bp, Homo sapiens
tccaacctgtacacc

SEQ ID NO: 586468 - DNA, 15 bp, Homo sapiens
ccaacctgtacaccc

SEQ ID NO: 586469 - DNA, 15 bp, Homo sapiens
caacctgtacaccct

SEQ ID NO: 586470 - DNA, 15 bp, Homo sapiens
aacctgtacaccctg

SEQ ID NO: 586471 - DNA, 15 bp, Homo sapiens
acctgtacaccctgg

SEQ ID NO: 586472 - DNA, 15 bp, Homo sapiens
cctgtacaccctggt

SEQ ID NO: 586473 - DNA, 15 bp, Homo sapiens
ctgtacaccctggtg

SEQ ID NO: 586474 - DNA, 15 bp, Homo sapiens
tgtacaccctggtga

SEQ ID NO: 586475 - DNA, 15 bp, Homo sapiens
gtacaccctggtgac

SEQ ID NO: 586476 - DNA, 15 bp, Homo sapiens
tacaccctggtgacc

SEQ ID NO: 586477 - DNA, 15 bp, Homo sapiens
acaccctggtgacca

SEQ ID NO: 586478 - DNA, 15 bp, Homo sapiens
caccctggtgaccat

SEQ ID NO: 586479 - DNA, 15 bp, Homo sapiens
accctggtgaccatg

SEQ ID NO: 586480 - DNA, 15 bp, Homo sapiens
ccctggtgaccatgt

SEQ ID NO: 586481 - DNA, 15 bp, Homo sapiens
cctggtgaccatgtc

SEQ ID NO: 586482 - DNA, 15 bp, Homo sapiens
ctggtgaccatgtcc

SEQ ID NO: 586483 - DNA, 15 bp, Homo sapiens
tggtgaccatgtcca

SEQ ID NO: 586484 - DNA, 15 bp, Homo sapiens
ggtgaccatgtccag

SEQ ID NO: 586485 - DNA, 15 bp, Homo sapiens
gtgaccatgtccagg

SEQ ID NO: 586486 - DNA, 15 bp, Homo sapiens
tgaccatgtccaggc

SEQ ID NO: 586487 - DNA, 15 bp, Homo sapiens
gaccatgtccaggcc

SEQ ID NO: 586488 - DNA, 15 bp, Homo sapiens
accatgtccaggcca

SEQ ID NO: 586489 - DNA, 15 bp, Homo sapiens
ccatgtccaggccag

SEQ ID NO: 586490 - DNA, 15 bp, Homo sapiens
catgtccaggccagt

SEQ ID NO: 586491 - DNA, 15 bp, Homo sapiens
atgtccaggccagtg

SEQ ID NO: 586492 - DNA, 15 bp, Homo sapiens
tgtccaggccagtgg

SEQ ID NO: 586493 - DNA, 15 bp, Homo sapiens
gtccaggccagtggc

SEQ ID NO: 586494 - DNA, 15 bp, Homo sapiens
tccaggccagtggcc

SEQ ID NO: 586495 - DNA, 15 bp, Homo sapiens
ccaggccagtggcct

SEQ ID NO: 586496 - DNA, 15 bp, Homo sapiens
caggccagtggcctt

SEQ ID NO: 586497 - DNA, 15 bp, Homo sapiens
aggccagtggcctta

SEQ ID NO: 586498 - DNA, 15 bp, Homo sapiens
ggccagtggccttaa

SEQ ID NO: 586499 - DNA, 15 bp, Homo sapiens
gccagtggccttaag

SEQ ID NO: 586500 - DNA, 15 bp, Homo sapiens
ccagtggccttaagg

SEQ ID NO: 586501 - DNA, 15 bp, Homo sapiens
cagtggccttaagga

SEQ ID NO: 586502 - DNA, 15 bp, Homo sapiens
agtggccttaaggac

SEQ ID NO: 586503 - DNA, 15 bp, Homo sapiens
gtggccttaaggact

SEQ ID NO: 586504 - DNA, 15 bp, Homo sapiens
tggccttaaggactg

SEQ ID NO: 586505 - DNA, 15 bp, Homo sapiens
ggccttaaggactgt

SEQ ID NO: 586506 - DNA, 15 bp, Homo sapiens
gccttaaggactgtc

SEQ ID NO: 586507 - DNA, 15 bp, Homo sapiens
ccttaaggactgtct

SEQ ID NO: 586508 - DNA, 15 bp, Homo sapiens
cttaaggactgtctc

SEQ ID NO: 586509 - DNA, 15 bp, Homo sapiens
ttaaggactgtctct

SEQ ID NO: 586510 - DNA, 15 bp, Homo sapiens
taaggactgtctctg

SEQ ID NO: 586511 - DNA, 15 bp, Homo sapiens
aaggactgtctctgt

SEQ ID NO: 586512 - DNA, 15 bp, Homo sapiens
aggactgtctctgta

SEQ ID NO: 586513 - DNA, 15 bp, Homo sapiens
ggactgtctctgtac

SEQ ID NO: 586514 - DNA, 15 bp, Homo sapiens
gactgtctctgtact

SEQ ID NO: 586515 - DNA, 15 bp, Homo sapiens
actgtctctgtactg

SEQ ID NO: 586516 - DNA, 15 bp, Homo sapiens
ctgtctctgtactga

SEQ ID NO: 586517 - DNA, 15 bp, Homo sapiens
tgtctctgtactgat

SEQ ID NO: 586518 - DNA, 15 bp, Homo sapiens
gtctctgtactgatg

SEQ ID NO: 586519 - DNA, 15 bp, Homo sapiens
tctctgtactgatgg

SEQ ID NO: 586520 - DNA, 15 bp, Homo sapiens
ctctgtactgatggc

SEQ ID NO: 586521 - DNA, 15 bp, Homo sapiens
tctgtactgatggct

SEQ ID NO: 586522 - DNA, 15 bp, Homo sapiens
ctgtactgatggctc

SEQ ID NO: 586523 - DNA, 15 bp, Homo sapiens
tgtactgatggctcc

SEQ ID NO: 586524 - DNA, 15 bp, Homo sapiens
gtactgatggctcca

SEQ ID NO: 586525 - DNA, 15 bp, Homo sapiens
tactgatggctccac

SEQ ID NO: 586526 - DNA, 15 bp, Homo sapiens
actgatggctccaca

SEQ ID NO: 586527 - DNA, 15 bp, Homo sapiens
ctgatggctccacat

SEQ ID NO: 586528 - DNA, 15 bp, Homo sapiens
tgatggctccacatc

SEQ ID NO: 586529 - DNA, 15 bp, Homo sapiens
gatggctccacatct

SEQ ID NO: 586530 - DNA, 15 bp, Homo sapiens
atggctccacatcta

SEQ ID NO: 586531 - DNA, 15 bp, Homo sapiens
tggctccacatctac

SEQ ID NO: 586532 - DNA, 15 bp, Homo sapiens
ggctccacatctacc

SEQ ID NO: 586533 - DNA, 15 bp, Homo sapiens
gctccacatctacct

SEQ ID NO: 586534 - DNA, 15 bp, Homo sapiens
ctccacatctacctc

SEQ ID NO: 586535 - DNA, 15 bp, Homo sapiens
tccacatctacctct

SEQ ID NO: 586536 - DNA, 15 bp, Homo sapiens
ccacatctacctctc

SEQ ID NO: 586537 - DNA, 15 bp, Homo sapiens
cacatctacctctcc

SEQ ID NO: 586538 - DNA, 15 bp, Homo sapiens
acatctacctctcca

SEQ ID NO: 586539 - DNA, 15 bp, Homo sapiens
catctacctctccag

SEQ ID NO: 586540 - DNA, 15 bp, Homo sapiens
atctacctctccagc

SEQ ID NO: 586541 - DNA, 15 bp, Homo sapiens
tctacctctccagcc

SEQ ID NO: 586542 - DNA, 15 bp, Homo sapiens
ctacctctccagcca

SEQ ID NO: 586543 - DNA, 15 bp, Homo sapiens
tacctctccagccag

SEQ ID NO: 586544 - DNA, 15 bp, Homo sapiens
acctctccagccaga

SEQ ID NO: 586545 - DNA, 15 bp, Homo sapiens
cctctccagccagac

SEQ ID NO: 586546 - DNA, 15 bp, Homo sapiens
ctctccagccagact

SEQ ID NO: 586547 - DNA, 15 bp, Homo sapiens
tctccagccagactc

SEQ ID NO: 586548 - DNA, 15 bp, Homo sapiens
ctccagccagactct

SEQ ID NO: 586549 - DNA, 15 bp, Homo sapiens
tccagccagactctc

SEQ ID NO: 586550 - DNA, 15 bp, Homo sapiens
ccagccagactctcc

SEQ ID NO: 586551 - DNA, 15 bp, Homo sapiens
cagccagactctcct

SEQ ID NO: 586552 - DNA, 15 bp, Homo sapiens
agccagactctcctc

SEQ ID NO: 586553 - DNA, 15 bp, Homo sapiens
gccagactctcctct

SEQ ID NO: 586554 - DNA, 15 bp, Homo sapiens
ccagactctcctctg

SEQ ID NO: 586555 - DNA, 15 bp, Homo sapiens
accagccttcactga

SEQ ID NO: 586556 - DNA, 15 bp, Homo sapiens
ccagccttcactgag

SEQ ID NO: 586557 - DNA, 15 bp, Homo sapiens
cagccttcactgagg

SEQ ID NO: 586558 - DNA, 15 bp, Homo sapiens
agccttcactgagga

SEQ ID NO: 586559 - DNA, 15 bp, Homo sapiens
gccttcactgaggag

SEQ ID NO: 586560 - DNA, 15 bp, Homo sapiens
ccttcactgaggagc

SEQ ID NO: 586561 - DNA, 15 bp, Homo sapiens
cttcactgaggagca

SEQ ID NO: 586562 - DNA, 15 bp, Homo sapiens
ttcactgaggagcaa

SEQ ID NO: 586563 - DNA, 15 bp, Homo sapiens
tcactgaggagcaat

SEQ ID NO: 586564 - DNA, 15 bp, Homo sapiens
cactgaggagcaatc

SEQ ID NO: 586565 - DNA, 15 bp, Homo sapiens
actgaggagcaatcc

SEQ ID NO: 586566 - DNA, 15 bp, Homo sapiens
ctgaggagcaatcca

SEQ ID NO: 586567 - DNA, 15 bp, Homo sapiens
tgaggagcaatccaa

SEQ ID NO: 586568 - DNA, 15 bp, Homo sapiens
gaggagcaatccaat

SEQ ID NO: 586569 - DNA, 15 bp, Homo sapiens
aggagcaatccaatc

SEQ ID NO: 586570 - DNA, 15 bp, Homo sapiens
ggagcaatccaatca

SEQ ID NO: 586571 - DNA, 15 bp, Homo sapiens
gagcaatccaatcag

SEQ ID NO: 586572 - DNA, 15 bp, Homo sapiens
agcaatccaatcaga

SEQ ID NO: 586573 - DNA, 15 bp, Homo sapiens
gcaatccaatcagat

SEQ ID NO: 586574 - DNA, 15 bp, Homo sapiens
caatccaatcagatc

SEQ ID NO: 586575 - DNA, 15 bp, Homo sapiens
aatccaatcagatca

SEQ ID NO: 586576 - DNA, 15 bp, Homo sapiens
atccaatcagatcag

SEQ ID NO: 586577 - DNA, 15 bp, Homo sapiens
tccaatcagatcagt

SEQ ID NO: 586578 - DNA, 15 bp, Homo sapiens
ccaatcagatcagtt

SEQ ID NO: 586579 - DNA, 15 bp, Homo sapiens
caatcagatcagtta

SEQ ID NO: 586580 - DNA, 15 bp, Homo sapiens
aatcagatcagttat

SEQ ID NO: 586581 - DNA, 15 bp, Homo sapiens
atcagatcagttatc

SEQ ID NO: 586582 - DNA, 15 bp, Homo sapiens
tcagatcagttatct

SEQ ID NO: 586583 - DNA, 15 bp, Homo sapiens
cagatcagttatctg

SEQ ID NO: 586584 - DNA, 15 bp, Homo sapiens
agatcagttatctgc

SEQ ID NO: 586585 - DNA, 15 bp, Homo sapiens
gatcagttatctgct

SEQ ID NO: 586586 - DNA, 15 bp, Homo sapiens
atcagttatctgctg

SEQ ID NO: 586587 - DNA, 15 bp, Homo sapiens
tcagttatctgctgt

SEQ ID NO: 586588 - DNA, 15 bp, Homo sapiens
cagttatctgctgtg

SEQ ID NO: 586589 - DNA, 15 bp, Homo sapiens
agttatctgctgtgc

SEQ ID NO: 586590 - DNA, 15 bp, Homo sapiens
gttatctgctgtgcg

SEQ ID NO: 586591 - DNA, 15 bp, Homo sapiens
ttatctgctgtgcgc

SEQ ID NO: 586592 - DNA, 15 bp, Homo sapiens
tatctgctgtgcgca

SEQ ID NO: 586593 - DNA, 15 bp, Homo sapiens
atctgctgtgcgcac

SEQ ID NO: 586594 - DNA, 15 bp, Homo sapiens
tctgctgtgcgcaca

SEQ ID NO: 586595 - DNA, 15 bp, Homo sapiens
ctgctgtgcgcacag

SEQ ID NO: 586596 - DNA, 15 bp, Homo sapiens
tgctgtgcgcacagc

SEQ ID NO: 586597 - DNA, 15 bp, Homo sapiens
gctgtgcgcacagcc

SEQ ID NO: 586598 - DNA, 15 bp, Homo sapiens
ctgtgcgcacagccg

SEQ ID NO: 586599 - DNA, 15 bp, Homo sapiens
tgtgcgcacagccgt

SEQ ID NO: 586600 - DNA, 15 bp, Homo sapiens
gtgcgcacagccgtg

SEQ ID NO: 586601 - DNA, 15 bp, Homo sapiens
tgcgcacagccgtgt

SEQ ID NO: 586602 - DNA, 15 bp, Homo sapiens
gcgcacagccgtgtg

SEQ ID NO: 586603 - DNA, 15 bp, Homo sapiens
cgcacagccgtgtgg

SEQ ID NO: 586604 - DNA, 15 bp, Homo sapiens
gcacagccgtgtggt

SEQ ID NO: 586605 - DNA, 15 bp, Homo sapiens
cacagccgtgtggtt

SEQ ID NO: 586606 - DNA, 15 bp, Homo sapiens
acagccgtgtggttc

SEQ ID NO: 586607 - DNA, 15 bp, Homo sapiens
cagccgtgtggttct

SEQ ID NO: 586608 - DNA, 15 bp, Homo sapiens
agccgtgtggttcta

SEQ ID NO: 586609 - DNA, 15 bp, Homo sapiens
gccgtgtggttctat

SEQ ID NO: 586610 - DNA, 15 bp, Homo sapiens
ccgtgtggttctata

SEQ ID NO: 586611 - DNA, 15 bp, Homo sapiens
cgtgtggttctatac

SEQ ID NO: 586612 - DNA, 15 bp, Homo sapiens
gtgtggttctatact

SEQ ID NO: 586613 - DNA, 15 bp, Homo sapiens
tgtggttctatactt

SEQ ID NO: 586614 - DNA, 15 bp, Homo sapiens
gtggttctatacttc

SEQ ID NO: 586615 - DNA, 15 bp, Homo sapiens
tggttctatacttct

SEQ ID NO: 586616 - DNA, 15 bp, Homo sapiens
ggttctatacttctc

SEQ ID NO: 586617 - DNA, 15 bp, Homo sapiens
gttctatacttctct

SEQ ID NO: 586618 - DNA, 15 bp, Homo sapiens
ttctatacttctctt

SEQ ID NO: 586619 - DNA, 15 bp, Homo sapiens
tctatacttctctta

SEQ ID NO: 586620 - DNA, 15 bp, Homo sapiens
ctatacttctcttac

SEQ ID NO: 586621 - DNA, 15 bp, Homo sapiens
tatacttctcttact

SEQ ID NO: 586622 - DNA, 15 bp, Homo sapiens
atacttctcttactt

SEQ ID NO: 586623 - DNA, 15 bp, Homo sapiens
tacttctcttacttc

SEQ ID NO: 586624 - DNA, 15 bp, Homo sapiens
acttctcttacttcc

SEQ ID NO: 586625 - DNA, 15 bp, Homo sapiens
cttctcttacttcca

SEQ ID NO: 586626 - DNA, 15 bp, Homo sapiens
ttctcttacttccat

SEQ ID NO: 586627 - DNA, 15 bp, Homo sapiens
tctcttacttccatt

SEQ ID NO: 586628 - DNA, 15 bp, Homo sapiens
ctcttacttccattt

SEQ ID NO: 586629 - DNA, 15 bp, Homo sapiens
tcttacttccatttt

SEQ ID NO: 586630 - DNA, 15 bp, Homo sapiens
cttacttccattttc

SEQ ID NO: 586631 - DNA, 15 bp, Homo sapiens
ttacttccattttca

SEQ ID NO: 586632 - DNA, 15 bp, Homo sapiens
tacttccattttcac

SEQ ID NO: 586633 - DNA, 15 bp, Homo sapiens
acttccattttcacc

SEQ ID NO: 586634 - DNA, 15 bp, Homo sapiens
cttccattttcacct

SEQ ID NO: 586635 - DNA, 15 bp, Homo sapiens
ttccattttcacctt

SEQ ID NO: 586636 - DNA, 15 bp, Homo sapiens
tccattttcaccttt

SEQ ID NO: 586637 - DNA, 15 bp, Homo sapiens
ccattttcacctttc

SEQ ID NO: 586638 - DNA, 15 bp, Homo sapiens
cattttcacctttca

SEQ ID NO: 586639 - DNA, 15 bp, Homo sapiens
attttcacctttcag

SEQ ID NO: 586640 - DNA, 15 bp, Homo sapiens
ttttcacctttcaga

SEQ ID NO: 586641 - DNA, 15 bp, Homo sapiens
tttcacctttcagaa

SEQ ID NO: 586642 - DNA, 15 bp, Homo sapiens
ttcacctttcagaag

SEQ ID NO: 586643 - DNA, 15 bp, Homo sapiens
tcacctttcagaagg

SEQ ID NO: 586644 - DNA, 15 bp, Homo sapiens
cacctttcagaagga

SEQ ID NO: 586645 - DNA, 15 bp, Homo sapiens
acctttcagaaggaa

SEQ ID NO: 586646 - DNA, 15 bp, Homo sapiens
cctttcagaaggaac

SEQ ID NO: 586647 - DNA, 15 bp, Homo sapiens
ctttcagaaggaacg

SEQ ID NO: 586648 - DNA, 15 bp, Homo sapiens
tttcagaaggaacgt

SEQ ID NO: 586649 - DNA, 15 bp, Homo sapiens
ttcagaaggaacgtt

SEQ ID NO: 586650 - DNA, 15 bp, Homo sapiens
tcagaaggaacgttg

SEQ ID NO: 586651 - DNA, 15 bp, Homo sapiens
cagaaggaacgttgt

SEQ ID NO: 586652 - DNA, 15 bp, Homo sapiens
agaaggaacgttgtc

SEQ ID NO: 586653 - DNA, 15 bp, Homo sapiens
gaaggaacgttgtct

SEQ ID NO: 586654 - DNA, 15 bp, Homo sapiens
aaggaacgttgtctt

SEQ ID NO: 586655 - DNA, 15 bp, Homo sapiens
aggaacgttgtcttt

SEQ ID NO: 586656 - DNA, 15 bp, Homo sapiens
ggaacgttgtcttta

SEQ ID NO: 586657 - DNA, 15 bp, Homo sapiens
gaacgttgtctttaa

SEQ ID NO: 586658 - DNA, 15 bp, Homo sapiens
aacgttgtctttaaa

SEQ ID NO: 586659 - DNA, 15 bp, Homo sapiens
acgttgtctttaaat

SEQ ID NO: 586660 - DNA, 15 bp, Homo sapiens
cgttgtctttaaatc

SEQ ID NO: 586661 - DNA, 15 bp, Homo sapiens
gttgtctttaaatcc

SEQ ID NO: 586662 - DNA, 15 bp, Homo sapiens
ttgtctttaaatcca

SEQ ID NO: 586663 - DNA, 15 bp, Homo sapiens
tgtctttaaatccag

SEQ ID NO: 586664 - DNA, 15 bp, Homo sapiens
gtctttaaatccagc

SEQ ID NO: 586665 - DNA, 15 bp, Homo sapiens
tctttaaatccagca

SEQ ID NO: 586666 - DNA, 15 bp, Homo sapiens
ctttaaatccagcat

SEQ ID NO: 586667 - DNA, 15 bp, Homo sapiens
tttaaatccagcatc

SEQ ID NO: 586668 - DNA, 15 bp, Homo sapiens
ttaaatccagcatct

SEQ ID NO: 586669 - DNA, 15 bp, Homo sapiens
taaatccagcatcta

SEQ ID NO: 586670 - DNA, 15 bp, Homo sapiens
aaatccagcatctaa

SEQ ID NO: 586671 - DNA, 15 bp, Homo sapiens
aatccagcatctaaa

SEQ ID NO: 586672 - DNA, 15 bp, Homo sapiens
atccagcatctaaac

SEQ ID NO: 586673 - DNA, 15 bp, Homo sapiens
tccagcatctaaacg

SEQ ID NO: 586674 - DNA, 15 bp, Homo sapiens
ccagcatctaaacgt

SEQ ID NO: 586675 - DNA, 15 bp, Homo sapiens
cagcatctaaacgtg

SEQ ID NO: 586676 - DNA, 15 bp, Homo sapiens
agcatctaaacgtga

SEQ ID NO: 586677 - DNA, 15 bp, Homo sapiens
gcatctaaacgtgag

SEQ ID NO: 586678 - DNA, 15 bp, Homo sapiens
catctaaacgtgagc

SEQ ID NO: 586679 - DNA, 15 bp, Homo sapiens
atctaaacgtgagcc

SEQ ID NO: 586680 - DNA, 15 bp, Homo sapiens
tctaaacgtgagccc

SEQ ID NO: 586681 - DNA, 15 bp, Homo sapiens
ctaaacgtgagcccc

SEQ ID NO: 586682 - DNA, 15 bp, Homo sapiens
taaacgtgagcccca

SEQ ID NO: 586683 - DNA, 15 bp, Homo sapiens
aaacgtgagccccag

SEQ ID NO: 586684 - DNA, 15 bp, Homo sapiens
aacgtgagccccagc

SEQ ID NO: 586685 - DNA, 15 bp, Homo sapiens
acgtgagccccagcc

SEQ ID NO: 586686 - DNA, 15 bp, Homo sapiens
cgtgagccccagcca

SEQ ID NO: 586687 - DNA, 15 bp, Homo sapiens
gtgagccccagccat

SEQ ID NO: 586688 - DNA, 15 bp, Homo sapiens
tgagccccagccatc

SEQ ID NO: 586689 - DNA, 15 bp, Homo sapiens
gagccccagccatcc

SEQ ID NO: 586690 - DNA, 15 bp, Homo sapiens
agccccagccatccc

SEQ ID NO: 586691 - DNA, 15 bp, Homo sapiens
gccccagccatccct

SEQ ID NO: 586692 - DNA, 15 bp, Homo sapiens
ccccagccatccctg

SEQ ID NO: 586693 - DNA, 15 bp, Homo sapiens
cccagccatccctgg

SEQ ID NO: 586694 - DNA, 15 bp, Homo sapiens
ccagccatccctggc

SEQ ID NO: 586695 - DNA, 15 bp, Homo sapiens
cagccatccctggct

SEQ ID NO: 586696 - DNA, 15 bp, Homo sapiens
agccatccctggctg

SEQ ID NO: 586697 - DNA, 15 bp, Homo sapiens
gccatccctggctgt

SEQ ID NO: 586698 - DNA, 15 bp, Homo sapiens
ccatccctggctgtg

SEQ ID NO: 586699 - DNA, 15 bp, Homo sapiens
catccctggctgtga

SEQ ID NO: 586700 - DNA, 15 bp, Homo sapiens
atccctggctgtgat

SEQ ID NO: 586701 - DNA, 15 bp, Homo sapiens
tccctggctgtgatc

SEQ ID NO: 586702 - DNA, 15 bp, Homo sapiens
ccctggctgtgatcc

SEQ ID NO: 586703 - DNA, 15 bp, Homo sapiens
cctggctgtgatccc

SEQ ID NO: 586704 - DNA, 15 bp, Homo sapiens
ctggctgtgatcccc

SEQ ID NO: 586705 - DNA, 15 bp, Homo sapiens
tggctgtgatccccc

SEQ ID NO: 586706 - DNA, 15 bp, Homo sapiens
ggctgtgatcccccc

SEQ ID NO: 586707 - DNA, 15 bp, Homo sapiens
gctgtgatcccccca

SEQ ID NO: 586708 - DNA, 15 bp, Homo sapiens
ctgtgatccccccag

SEQ ID NO: 586709 - DNA, 15 bp, Homo sapiens
tgtgatccccccagc

SEQ ID NO: 586710 - DNA, 15 bp, Homo sapiens
gtgatccccccagcc

SEQ ID NO: 586711 - DNA, 15 bp, Homo sapiens
tgatccccccagccc

SEQ ID NO: 586712 - DNA, 15 bp, Homo sapiens
gatccccccagccct

SEQ ID NO: 586713 - DNA, 15 bp, Homo sapiens
atccccccagccctt

SEQ ID NO: 586714 - DNA, 15 bp, Homo sapiens
tccccccagcccttt

SEQ ID NO: 586715 - DNA, 15 bp, Homo sapiens
ccccccagccctttc

SEQ ID NO: 586716 - DNA, 15 bp, Homo sapiens
cccccagccctttcc

SEQ ID NO: 586717 - DNA, 15 bp, Homo sapiens
ccccagccctttcca

SEQ ID NO: 586718 - DNA, 15 bp, Homo sapiens
cccagccctttccac

SEQ ID NO: 586719 - DNA, 15 bp, Homo sapiens
ccagccctttccacc

SEQ ID NO: 586720 - DNA, 15 bp, Homo sapiens
cagccctttccaccc

SEQ ID NO: 586721 - DNA, 15 bp, Homo sapiens
agccctttccaccct

SEQ ID NO: 586722 - DNA, 15 bp, Homo sapiens
gccctttccacccta

SEQ ID NO: 586723 - DNA, 15 bp, Homo sapiens
ccctttccaccctat

SEQ ID NO: 586724 - DNA, 15 bp, Homo sapiens
cctttccaccctatc

SEQ ID NO: 586725 - DNA, 15 bp, Homo sapiens
ctttccaccctatcc

SEQ ID NO: 586726 - DNA, 15 bp, Homo sapiens
tttccaccctatcct

SEQ ID NO: 586727 - DNA, 15 bp, Homo sapiens
ttccaccctatcctc

SEQ ID NO: 586728 - DNA, 15 bp, Homo sapiens
tccaccctatcctct

SEQ ID NO: 586729 - DNA, 15 bp, Homo sapiens
ccaccctatcctctg

SEQ ID NO: 586730 - DNA, 15 bp, Homo sapiens
caccctatcctctgg

SEQ ID NO: 586731 - DNA, 15 bp, Homo sapiens
accctatcctctgga

SEQ ID NO: 586732 - DNA, 15 bp, Homo sapiens
ccctatcctctggaa

SEQ ID NO: 586733 - DNA, 15 bp, Homo sapiens
cctatcctctggaac

SEQ ID NO: 586734 - DNA, 15 bp, Homo sapiens
ctatcctctggaact

SEQ ID NO: 586735 - DNA, 15 bp, Homo sapiens
tatcctctggaactg

SEQ ID NO: 586736 - DNA, 15 bp, Homo sapiens
atcctctggaactgc

SEQ ID NO: 586737 - DNA, 15 bp, Homo sapiens
tcctctggaactgcc

SEQ ID NO: 586738 - DNA, 15 bp, Homo sapiens
cctctggaactgcct

SEQ ID NO: 586739 - DNA, 15 bp, Homo sapiens
ctctggaactgcctg

SEQ ID NO: 586740 - DNA, 15 bp, Homo sapiens
tctggaactgcctgg

SEQ ID NO: 586741 - DNA, 15 bp, Homo sapiens
ctggaactgcctggg

SEQ ID NO: 586742 - DNA, 15 bp, Homo sapiens
tggaactgcctgggg

SEQ ID NO: 586743 - DNA, 15 bp, Homo sapiens
ggaactgcctggggc

SEQ ID NO: 586744 - DNA, 15 bp, Homo sapiens
gaactgcctggggct

SEQ ID NO: 586745 - DNA, 15 bp, Homo sapiens
aactgcctggggctc

SEQ ID NO: 586746 - DNA, 15 bp, Homo sapiens
actgcctggggctcc

SEQ ID NO: 586747 - DNA, 15 bp, Homo sapiens
ctgcctggggctccc

SEQ ID NO: 586748 - DNA, 15 bp, Homo sapiens
tgcctggggctcccc

SEQ ID NO: 586749 - DNA, 15 bp, Homo sapiens
gcctggggctcccca

SEQ ID NO: 586750 - DNA, 15 bp, Homo sapiens
cctggggctccccaa

SEQ ID NO: 586751 - DNA, 15 bp, Homo sapiens
ctggggctccccaag

SEQ ID NO: 586752 - DNA, 15 bp, Homo sapiens
tggggctccccaaga

SEQ ID NO: 586753 - DNA, 15 bp, Homo sapiens
ggggctccccaagac

SEQ ID NO: 586754 - DNA, 15 bp, Homo sapiens
gggctccccaagaca

SEQ ID NO: 586755 - DNA, 15 bp, Homo sapiens
ggctccccaagacac

SEQ ID NO: 586756 - DNA, 15 bp, Homo sapiens
gctccccaagacact

SEQ ID NO: 586757 - DNA, 15 bp, Homo sapiens
ctccccaagacactt

SEQ ID NO: 586758 - DNA, 15 bp, Homo sapiens
tccccaagacacttc

SEQ ID NO: 586759 - DNA, 15 bp, Homo sapiens
ccccaagacacttcc

SEQ ID NO: 586760 - DNA, 15 bp, Homo sapiens
cccaagacacttcca

SEQ ID NO: 586761 - DNA, 15 bp, Homo sapiens
ccaagacacttccac

SEQ ID NO: 586762 - DNA, 15 bp, Homo sapiens
caagacacttccaca

SEQ ID NO: 586763 - DNA, 15 bp, Homo sapiens
aagacacttccacat

SEQ ID NO: 586764 - DNA, 15 bp, Homo sapiens
agacacttccacatg

SEQ ID NO: 586765 - DNA, 15 bp, Homo sapiens
gacacttccacatga

SEQ ID NO: 586766 - DNA, 15 bp, Homo sapiens
acacttccacatgaa

SEQ ID NO: 586767 - DNA, 15 bp, Homo sapiens
cacttccacatgaat

SEQ ID NO: 586768 - DNA, 15 bp, Homo sapiens
acttccacatgaatt

SEQ ID NO: 586769 - DNA, 15 bp, Homo sapiens
cttccacatgaattc

SEQ ID NO: 586770 - DNA, 15 bp, Homo sapiens
ttccacatgaattcc

SEQ ID NO: 586771 - DNA, 15 bp, Homo sapiens
tccacatgaattccc

SEQ ID NO: 586772 - DNA, 15 bp, Homo sapiens
ccacatgaattccca

SEQ ID NO: 586773 - DNA, 15 bp, Homo sapiens
cacatgaattcccac

SEQ ID NO: 586774 - DNA, 15 bp, Homo sapiens
acatgaattcccacc

SEQ ID NO: 586775 - DNA, 15 bp, Homo sapiens
catgaattcccacca

SEQ ID NO: 586776 - DNA, 15 bp, Homo sapiens
atgaattcccaccaa

SEQ ID NO: 586777 - DNA, 15 bp, Homo sapiens
tgaattcccaccaag

SEQ ID NO: 586778 - DNA, 15 bp, Homo sapiens
gaattcccaccaagc

SEQ ID NO: 586779 - DNA, 15 bp, Homo sapiens
aattcccaccaagcc

SEQ ID NO: 586780 - DNA, 15 bp, Homo sapiens
attcccaccaagcca

SEQ ID NO: 586781 - DNA, 15 bp, Homo sapiens
ttcccaccaagccaa

SEQ ID NO: 586782 - DNA, 15 bp, Homo sapiens
tcccaccaagccaag

SEQ ID NO: 586783 - DNA, 15 bp, Homo sapiens
cccaccaagccaagc

SEQ ID NO: 586784 - DNA, 15 bp, Homo sapiens
ccaccaagccaagct

SEQ ID NO: 586785 - DNA, 15 bp, Homo sapiens
caccaagccaagctg

SEQ ID NO: 586786 - DNA, 15 bp, Homo sapiens
accaagccaagctgc

SEQ ID NO: 586787 - DNA, 15 bp, Homo sapiens
ccaagccaagctgca

SEQ ID NO: 586788 - DNA, 15 bp, Homo sapiens
caagccaagctgcag

SEQ ID NO: 586789 - DNA, 15 bp, Homo sapiens
aagccaagctgcagc

SEQ ID NO: 586790 - DNA, 15 bp, Homo sapiens
agccaagctgcagct

SEQ ID NO: 586791 - DNA, 15 bp, Homo sapiens
gccaagctgcagctg

SEQ ID NO: 586792 - DNA, 15 bp, Homo sapiens
ccaagctgcagctgc

SEQ ID NO: 586793 - DNA, 15 bp, Homo sapiens
caagctgcagctgct

SEQ ID NO: 586794 - DNA, 15 bp, Homo sapiens
aagctgcagctgctg

SEQ ID NO: 586795 - DNA, 15 bp, Homo sapiens
agctgcagctgctgg

SEQ ID NO: 586796 - DNA, 15 bp, Homo sapiens
gctgcagctgctggg

SEQ ID NO: 586797 - DNA, 15 bp, Homo sapiens
ctgcagctgctgggc

SEQ ID NO: 586798 - DNA, 15 bp, Homo sapiens
tgcagctgctgggcc

SEQ ID NO: 586799 - DNA, 15 bp, Homo sapiens
gcagctgctgggccc

SEQ ID NO: 586800 - DNA, 15 bp, Homo sapiens
cagctgctgggccca

SEQ ID NO: 586801 - DNA, 15 bp, Homo sapiens
agctgctgggcccag

SEQ ID NO: 586802 - DNA, 15 bp, Homo sapiens
gctgctgggcccagg

SEQ ID NO: 586803 - DNA, 15 bp, Homo sapiens
ctgctgggcccaggc

SEQ ID NO: 586804 - DNA, 15 bp, Homo sapiens
tgctgggcccaggca

SEQ ID NO: 586805 - DNA, 15 bp, Homo sapiens
gctgggcccaggcat

SEQ ID NO: 586806 - DNA, 15 bp, Homo sapiens
ctgggcccaggcata

SEQ ID NO: 586807 - DNA, 15 bp, Homo sapiens
tgggcccaggcataa

SEQ ID NO: 586808 - DNA, 15 bp, Homo sapiens
gggcccaggcataac

SEQ ID NO: 586809 - DNA, 15 bp, Homo sapiens
ggcccaggcataacc

SEQ ID NO: 586810 - DNA, 15 bp, Homo sapiens
gcccaggcataaccc

SEQ ID NO: 586811 - DNA, 15 bp, Homo sapiens
cccaggcataacccc

SEQ ID NO: 586812 - DNA, 15 bp, Homo sapiens
ccaggcataacccct

SEQ ID NO: 586813 - DNA, 15 bp, Homo sapiens
caggcataacccctc

SEQ ID NO: 586814 - DNA, 15 bp, Homo sapiens
aggcataacccctcc

SEQ ID NO: 586815 - DNA, 15 bp, Homo sapiens
ggcataacccctcct

SEQ ID NO: 586816 - DNA, 15 bp, Homo sapiens
gcataacccctcctg

SEQ ID NO: 586817 - DNA, 15 bp, Homo sapiens
cataacccctcctgg

SEQ ID NO: 586818 - DNA, 15 bp, Homo sapiens
ataacccctcctggg

SEQ ID NO: 586819 - DNA, 15 bp, Homo sapiens
taacccctcctgggg

SEQ ID NO: 586820 - DNA, 15 bp, Homo sapiens
aacccctcctggggc

SEQ ID NO: 586821 - DNA, 15 bp, Homo sapiens
acccctcctggggca

SEQ ID NO: 586822 - DNA, 15 bp, Homo sapiens
cccctcctggggcag

SEQ ID NO: 586823 - DNA, 15 bp, Homo sapiens
ccctcctggggcaga

SEQ ID NO: 586824 - DNA, 15 bp, Homo sapiens
cctcctggggcagag

SEQ ID NO: 586825 - DNA, 15 bp, Homo sapiens
ctcctggggcagagg

SEQ ID NO: 586826 - DNA, 15 bp, Homo sapiens
tcctggggcagaggt

SEQ ID NO: 586827 - DNA, 15 bp, Homo sapiens
cctggggcagaggtg

SEQ ID NO: 586828 - DNA, 15 bp, Homo sapiens
ctggggcagaggtgg

SEQ ID NO: 586829 - DNA, 15 bp, Homo sapiens
tggggcagaggtggc

SEQ ID NO: 586830 - DNA, 15 bp, Homo sapiens
ggggcagaggtggca

SEQ ID NO: 586831 - DNA, 15 bp, Homo sapiens
gggcagaggtggcaa

SEQ ID NO: 586832 - DNA, 15 bp, Homo sapiens
ggcagaggtggcaag

SEQ ID NO: 586833 - DNA, 15 bp, Homo sapiens
gcagaggtggcaagg

SEQ ID NO: 586834 - DNA, 15 bp, Homo sapiens
cagaggtggcaagga

SEQ ID NO: 586835 - DNA, 15 bp, Homo sapiens
agaggtggcaaggag

SEQ ID NO: 586836 - DNA, 15 bp, Homo sapiens
gaggtggcaaggagt

SEQ ID NO: 586837 - DNA, 15 bp, Homo sapiens
aggtggcaaggagtg

SEQ ID NO: 586838 - DNA, 15 bp, Homo sapiens
ggtggcaaggagtga

SEQ ID NO: 586839 - DNA, 15 bp, Homo sapiens
gtggcaaggagtgac

SEQ ID NO: 586840 - DNA, 15 bp, Homo sapiens
tggcaaggagtgacc

SEQ ID NO: 586841 - DNA, 15 bp, Homo sapiens
ggcaaggagtgaccc

SEQ ID NO: 586842 - DNA, 15 bp, Homo sapiens
gcaaggagtgaccca

SEQ ID NO: 586843 - DNA, 15 bp, Homo sapiens
caaggagtgacccac

SEQ ID NO: 586844 - DNA, 15 bp, Homo sapiens
aaggagtgacccacc

SEQ ID NO: 586845 - DNA, 15 bp, Homo sapiens
aggagtgacccacca

SEQ ID NO: 586846 - DNA, 15 bp, Homo sapiens
ggagtgacccaccac

SEQ ID NO: 586847 - DNA, 15 bp, Homo sapiens
gagtgacccaccact

SEQ ID NO: 586848 - DNA, 15 bp, Homo sapiens
agtgacccaccactc

SEQ ID NO: 586849 - DNA, 15 bp, Homo sapiens
gtgacccaccactca

SEQ ID NO: 586850 - DNA, 15 bp, Homo sapiens
tgacccaccactcac

SEQ ID NO: 586851 - DNA, 15 bp, Homo sapiens
gacccaccactcaca

SEQ ID NO: 586852 - DNA, 15 bp, Homo sapiens
acccaccactcacat

SEQ ID NO: 586853 - DNA, 15 bp, Homo sapiens
cccaccactcacatc

SEQ ID NO: 586854 - DNA, 15 bp, Homo sapiens
ccaccactcacatct

SEQ ID NO: 586855 - DNA, 15 bp, Homo sapiens
caccactcacatctg

SEQ ID NO: 586856 - DNA, 15 bp, Homo sapiens
accactcacatctgc

SEQ ID NO: 586857 - DNA, 15 bp, Homo sapiens
ccactcacatctgcc

SEQ ID NO: 586858 - DNA, 15 bp, Homo sapiens
cactcacatctgccc

SEQ ID NO: 586859 - DNA, 15 bp, Homo sapiens
actcacatctgcccc

SEQ ID NO: 586860 - DNA, 15 bp, Homo sapiens
ctcacatctgcccca

SEQ ID NO: 586861 - DNA, 15 bp, Homo sapiens
tcacatctgccccac

SEQ ID NO: 586862 - DNA, 15 bp, Homo sapiens
cacatctgccccaca

SEQ ID NO: 586863 - DNA, 15 bp, Homo sapiens
acatctgccccacat

SEQ ID NO: 586864 - DNA, 15 bp, Homo sapiens
catctgccccacatc

SEQ ID NO: 586865 - DNA, 15 bp, Homo sapiens
atctgccccacatcc

SEQ ID NO: 586866 - DNA, 15 bp, Homo sapiens
tctgccccacatcca

SEQ ID NO: 586867 - DNA, 15 bp, Homo sapiens
ctgccccacatccac

SEQ ID NO: 586868 - DNA, 15 bp, Homo sapiens
tgccccacatccact

SEQ ID NO: 586869 - DNA, 15 bp, Homo sapiens
gccccacatccactc

SEQ ID NO: 586870 - DNA, 15 bp, Homo sapiens
ccccacatccactct

SEQ ID NO: 586871 - DNA, 15 bp, Homo sapiens
cccacatccactctt

SEQ ID NO: 586872 - DNA, 15 bp, Homo sapiens
ccacatccactcttg

SEQ ID NO: 586873 - DNA, 15 bp, Homo sapiens
cacatccactcttga

SEQ ID NO: 586874 - DNA, 15 bp, Homo sapiens
acatccactcttgac

SEQ ID NO: 586875 - DNA, 15 bp, Homo sapiens
catccactcttgact

SEQ ID NO: 586876 - DNA, 15 bp, Homo sapiens
atccactcttgactc

SEQ ID NO: 586877 - DNA, 15 bp, Homo sapiens
tccactcttgactct

SEQ ID NO: 586878 - DNA, 15 bp, Homo sapiens
ccactcttgactctg

SEQ ID NO: 586879 - DNA, 15 bp, Homo sapiens
cactcttgactctgc

SEQ ID NO: 586880 - DNA, 15 bp, Homo sapiens
actcttgactctgct

SEQ ID NO: 586881 - DNA, 15 bp, Homo sapiens
ctcttgactctgctc

SEQ ID NO: 586882 - DNA, 15 bp, Homo sapiens
tcttgactctgctca

SEQ ID NO: 586883 - DNA, 15 bp, Homo sapiens
cttgactctgctcag

SEQ ID NO: 586884 - DNA, 15 bp, Homo sapiens
ttgactctgctcagt

SEQ ID NO: 586885 - DNA, 15 bp, Homo sapiens
tgactctgctcagtg

SEQ ID NO: 586886 - DNA, 15 bp, Homo sapiens
gactctgctcagtgt

SEQ ID NO: 586887 - DNA, 15 bp, Homo sapiens
actctgctcagtgtt

SEQ ID NO: 586888 - DNA, 15 bp, Homo sapiens
ctctgctcagtgttt

SEQ ID NO: 586889 - DNA, 15 bp, Homo sapiens
tctgctcagtgttta

SEQ ID NO: 586890 - DNA, 15 bp, Homo sapiens
ctgctcagtgtttaa

SEQ ID NO: 586891 - DNA, 15 bp, Homo sapiens
tgctcagtgtttaaa

SEQ ID NO: 586892 - DNA, 15 bp, Homo sapiens
gctcagtgtttaaaa

SEQ ID NO: 586893 - DNA, 15 bp, Homo sapiens
ctcagtgtttaaaaa

SEQ ID NO: 586894 - DNA, 15 bp, Homo sapiens
tcagtgtttaaaaac

SEQ ID NO: 586895 - DNA, 15 bp, Homo sapiens
cagtgtttaaaaaca

SEQ ID NO: 586896 - DNA, 15 bp, Homo sapiens
agtgtttaaaaacat

SEQ ID NO: 586897 - DNA, 15 bp, Homo sapiens
gtgtttaaaaacatg

SEQ ID NO: 586898 - DNA, 15 bp, Homo sapiens
tgtttaaaaacatgt

SEQ ID NO: 586899 - DNA, 15 bp, Homo sapiens
gtttaaaaacatgtt

SEQ ID NO: 586900 - DNA, 15 bp, Homo sapiens
tttaaaaacatgttt

SEQ ID NO: 586901 - DNA, 15 bp, Homo sapiens
ttaaaaacatgttta

SEQ ID NO: 586902 - DNA, 15 bp, Homo sapiens
taaaaacatgtttat

SEQ ID NO: 586903 - DNA, 15 bp, Homo sapiens
aaaaacatgtttata

SEQ ID NO: 586904 - DNA, 15 bp, Homo sapiens
aaaacatgtttataa

SEQ ID NO: 586905 - DNA, 15 bp, Homo sapiens
aaacatgtttataac

SEQ ID NO: 586906 - DNA, 15 bp, Homo sapiens
aacatgtttataaca

SEQ ID NO: 586907 - DNA, 15 bp, Homo sapiens
acatgtttataacaa

SEQ ID NO: 586908 - DNA, 15 bp, Homo sapiens
catgtttataacaat

SEQ ID NO: 586909 - DNA, 15 bp, Homo sapiens
atgtttataacaatt

SEQ ID NO: 586910 - DNA, 15 bp, Homo sapiens
tgtttataacaatta

SEQ ID NO: 586911 - DNA, 15 bp, Homo sapiens
gtttataacaattac

SEQ ID NO: 586912 - DNA, 15 bp, Homo sapiens
tttataacaattacc

SEQ ID NO: 586913 - DNA, 15 bp, Homo sapiens
ttataacaattacca

SEQ ID NO: 586914 - DNA, 15 bp, Homo sapiens
tataacaattaccaa

SEQ ID NO: 586915 - DNA, 15 bp, Homo sapiens
ataacaattaccaag

SEQ ID NO: 586916 - DNA, 15 bp, Homo sapiens
taacaattaccaaga

SEQ ID NO: 586917 - DNA, 15 bp, Homo sapiens
aacaattaccaagat

SEQ ID NO: 586918 - DNA, 15 bp, Homo sapiens
acaattaccaagatc

SEQ ID NO: 586919 - DNA, 15 bp, Homo sapiens
caattaccaagatct

SEQ ID NO: 586920 - DNA, 15 bp, Homo sapiens
aattaccaagatctg

SEQ ID NO: 586921 - DNA, 15 bp, Homo sapiens
attaccaagatctga

SEQ ID NO: 586922 - DNA, 15 bp, Homo sapiens
ttaccaagatctgaa

SEQ ID NO: 586923 - DNA, 15 bp, Homo sapiens
taccaagatctgaaa

SEQ ID NO: 586924 - DNA, 15 bp, Homo sapiens
accaagatctgaaaa

SEQ ID NO: 586925 - DNA, 15 bp, Homo sapiens
ccaagatctgaaaat

SEQ ID NO: 586926 - DNA, 15 bp, Homo sapiens
caagatctgaaaatt

SEQ ID NO: 586927 - DNA, 15 bp, Homo sapiens
aagatctgaaaatta

SEQ ID NO: 586928 - DNA, 15 bp, Homo sapiens
agatctgaaaattag

SEQ ID NO: 586929 - DNA, 15 bp, Homo sapiens
gatctgaaaattagg

SEQ ID NO: 586930 - DNA, 15 bp, Homo sapiens
atctgaaaattagga

SEQ ID NO: 586931 - DNA, 15 bp, Homo sapiens
tctgaaaattaggag

SEQ ID NO: 586932 - DNA, 15 bp, Homo sapiens
ctgaaaattaggaga

SEQ ID NO: 586933 - DNA, 15 bp, Homo sapiens
tgaaaattaggagaa

SEQ ID NO: 586934 - DNA, 15 bp, Homo sapiens
gaaaattaggagaat

SEQ ID NO: 586935 - DNA, 15 bp, Homo sapiens
aaaattaggagaatt

SEQ ID NO: 586936 - DNA, 15 bp, Homo sapiens
aaattaggagaattc

SEQ ID NO: 586937 - DNA, 15 bp, Homo sapiens
aattaggagaattca

SEQ ID NO: 586938 - DNA, 15 bp, Homo sapiens
attaggagaattcac

SEQ ID NO: 586939 - DNA, 15 bp, Homo sapiens
ttaggagaattcaca

SEQ ID NO: 586940 - DNA, 15 bp, Homo sapiens
taggagaattcacat

SEQ ID NO: 586941 - DNA, 15 bp, Homo sapiens
aggagaattcacatc

SEQ ID NO: 586942 - DNA, 15 bp, Homo sapiens
ggagaattcacatca

SEQ ID NO: 586943 - DNA, 15 bp, Homo sapiens
gagaattcacatcaa

SEQ ID NO: 586944 - DNA, 15 bp, Homo sapiens
agaattcacatcaaa

SEQ ID NO: 586945 - DNA, 15 bp, Homo sapiens
gaattcacatcaaag

SEQ ID NO: 586946 - DNA, 15 bp, Homo sapiens
aattcacatcaaagt

SEQ ID NO: 586947 - DNA, 15 bp, Homo sapiens
attcacatcaaagtc

SEQ ID NO: 586948 - DNA, 15 bp, Homo sapiens
ttcacatcaaagtct

SEQ ID NO: 586949 - DNA, 15 bp, Homo sapiens
tcacatcaaagtctg

SEQ ID NO: 586950 - DNA, 15 bp, Homo sapiens
cacatcaaagtctgg

SEQ ID NO: 586951 - DNA, 15 bp, Homo sapiens
acatcaaagtctgga

SEQ ID NO: 586952 - DNA, 15 bp, Homo sapiens
catcaaagtctggat

SEQ ID NO: 586953 - DNA, 15 bp, Homo sapiens
atcaaagtctggatt

SEQ ID NO: 586954 - DNA, 15 bp, Homo sapiens
tcaaagtctggattt

SEQ ID NO: 586955 - DNA, 15 bp, Homo sapiens
caaagtctggatttc

SEQ ID NO: 586956 - DNA, 15 bp, Homo sapiens
aaagtctggatttct

SEQ ID NO: 586957 - DNA, 15 bp, Homo sapiens
aagtctggatttctg

SEQ ID NO: 586958 - DNA, 15 bp, Homo sapiens
agtctggatttctgt

SEQ ID NO: 586959 - DNA, 15 bp, Homo sapiens
gtctggatttctgtt

SEQ ID NO: 586960 - DNA, 15 bp, Homo sapiens
tctggatttctgttt

SEQ ID NO: 586961 - DNA, 15 bp, Homo sapiens
ctggatttctgtttg

SEQ ID NO: 586962 - DNA, 15 bp, Homo sapiens
tggatttctgtttgt

SEQ ID NO: 586963 - DNA, 15 bp, Homo sapiens
ggatttctgtttgtt

SEQ ID NO: 586964 - DNA, 15 bp, Homo sapiens
gatttctgtttgttc

SEQ ID NO: 586965 - DNA, 15 bp, Homo sapiens
atttctgtttgttca

SEQ ID NO: 586966 - DNA, 15 bp, Homo sapiens
tttctgtttgttcat

SEQ ID NO: 586967 - DNA, 15 bp, Homo sapiens
ttctgtttgttcata

SEQ ID NO: 586968 - DNA, 15 bp, Homo sapiens
tctgtttgttcataa

SEQ ID NO: 586969 - DNA, 15 bp, Homo sapiens
ctgtttgttcataaa

SEQ ID NO: 586970 - DNA, 15 bp, Homo sapiens
tgtttgttcataaaa

SEQ ID NO: 586971 - DNA, 15 bp, Homo sapiens
gtttgttcataaaaa

SEQ ID NO: 586972 - DNA, 15 bp, Homo sapiens
tttgttcataaaaaa

SEQ ID NO: 586973 - DNA, 15 bp, Homo sapiens
ttgttcataaaaaac

SEQ ID NO: 586974 - DNA, 15 bp, Homo sapiens
tgttcataaaaaact

SEQ ID NO: 586975 - DNA, 15 bp, Homo sapiens
gttcataaaaaacta

SEQ ID NO: 586976 - DNA, 15 bp, Homo sapiens
ttcataaaaaactag

SEQ ID NO: 586977 - DNA, 15 bp, Homo sapiens
tcataaaaaactaga

SEQ ID NO: 586978 - DNA, 15 bp, Homo sapiens
cataaaaaactagaa

SEQ ID NO: 586979 - DNA, 15 bp, Homo sapiens
ataaaaaactagaag

SEQ ID NO: 586980 - DNA, 15 bp, Homo sapiens
taaaaaactagaagg

SEQ ID NO: 586981 - DNA, 15 bp, Homo sapiens
aaaaaactagaaggc

SEQ ID NO: 586982 - DNA, 15 bp, Homo sapiens
aaaaactagaaggca

SEQ ID NO: 586983 - DNA, 15 bp, Homo sapiens
aaaactagaaggcag

SEQ ID NO: 586984 - DNA, 15 bp, Homo sapiens
aaactagaaggcagc

SEQ ID NO: 586985 - DNA, 15 bp, Homo sapiens
aactagaaggcagcc

SEQ ID NO: 586986 - DNA, 15 bp, Homo sapiens
actagaaggcagcca

SEQ ID NO: 586987 - DNA, 15 bp, Homo sapiens
ctagaaggcagccag

SEQ ID NO: 586988 - DNA, 15 bp, Homo sapiens
tagaaggcagccagg

SEQ ID NO: 586989 - DNA, 15 bp, Homo sapiens
agaaggcagccaggc

SEQ ID NO: 586990 - DNA, 15 bp, Homo sapiens
gaaggcagccaggca

SEQ ID NO: 586991 - DNA, 15 bp, Homo sapiens
aaggcagccaggcaa

SEQ ID NO: 586992 - DNA, 15 bp, Homo sapiens
aggcagccaggcaag

SEQ ID NO: 586993 - DNA, 15 bp, Homo sapiens
ggcagccaggcaagg

SEQ ID NO: 586994 - DNA, 15 bp, Homo sapiens
gcagccaggcaaggt

SEQ ID NO: 586995 - DNA, 15 bp, Homo sapiens
cagccaggcaaggtg

SEQ ID NO: 586996 - DNA, 15 bp, Homo sapiens
agccaggcaaggtgg

SEQ ID NO: 586997 - DNA, 15 bp, Homo sapiens
gccaggcaaggtggc

SEQ ID NO: 586998 - DNA, 15 bp, Homo sapiens
ccaggcaaggtggct

SEQ ID NO: 586999 - DNA, 15 bp, Homo sapiens
caggcaaggtggctc

SEQ ID NO: 587000 - DNA, 15 bp, Homo sapiens
aggcaaggtggctca

SEQ ID NO: 587001 - DNA, 15 bp, Homo sapiens
ggcaaggtggctcac

SEQ ID NO: 587002 - DNA, 15 bp, Homo sapiens
gcaaggtggctcacg

SEQ ID NO: 587003 - DNA, 15 bp, Homo sapiens
caaggtggctcacgc

SEQ ID NO: 587004 - DNA, 15 bp, Homo sapiens
aaggtggctcacgcc

SEQ ID NO: 587005 - DNA, 15 bp, Homo sapiens
aggtggctcacgcca

SEQ ID NO: 587006 - DNA, 15 bp, Homo sapiens
ggtggctcacgccag

SEQ ID NO: 587007 - DNA, 15 bp, Homo sapiens
gtggctcacgccagt

SEQ ID NO: 587008 - DNA, 15 bp, Homo sapiens
tggctcacgccagta

SEQ ID NO: 587009 - DNA, 15 bp, Homo sapiens
ggctcacgccagtaa

SEQ ID NO: 587010 - DNA, 15 bp, Homo sapiens
gctcacgccagtaat

SEQ ID NO: 587011 - DNA, 15 bp, Homo sapiens
ctcacgccagtaatc

SEQ ID NO: 587012 - DNA, 15 bp, Homo sapiens
tcacgccagtaatcc

SEQ ID NO: 587013 - DNA, 15 bp, Homo sapiens
cacgccagtaatccc

SEQ ID NO: 587014 - DNA, 15 bp, Homo sapiens
acgccagtaatccca

SEQ ID NO: 587015 - DNA, 15 bp, Homo sapiens
cgccagtaatcccaa

SEQ ID NO: 587016 - DNA, 15 bp, Homo sapiens
gccagtaatcccaac

SEQ ID NO: 587017 - DNA, 15 bp, Homo sapiens
ccagtaatcccaaca

SEQ ID NO: 587018 - DNA, 15 bp, Homo sapiens
cagtaatcccaacac

SEQ ID NO: 587019 - DNA, 15 bp, Homo sapiens
agtaatcccaacact

SEQ ID NO: 587020 - DNA, 15 bp, Homo sapiens
gtaatcccaacactt

SEQ ID NO: 587021 - DNA, 15 bp, Homo sapiens
taatcccaacacttt

SEQ ID NO: 587022 - DNA, 15 bp, Homo sapiens
aatcccaacactttg

SEQ ID NO: 587023 - DNA, 15 bp, Homo sapiens
atcccaacactttgg

SEQ ID NO: 587024 - DNA, 15 bp, Homo sapiens
tcccaacactttggg

SEQ ID NO: 587025 - DNA, 15 bp, Homo sapiens
cccaacactttggga

SEQ ID NO: 587026 - DNA, 15 bp, Homo sapiens
cactttgggaggcta

SEQ ID NO: 587027 - DNA, 15 bp, Homo sapiens
actttgggaggctaa

SEQ ID NO: 587028 - DNA, 15 bp, Homo sapiens
ctttgggaggctaag

SEQ ID NO: 587029 - DNA, 15 bp, Homo sapiens
tttgggaggctaagg

SEQ ID NO: 587030 - DNA, 15 bp, Homo sapiens
ttgggaggctaaggc

SEQ ID NO: 587031 - DNA, 15 bp, Homo sapiens
tgggaggctaaggca

SEQ ID NO: 587032 - DNA, 15 bp, Homo sapiens
gggaggctaaggcag

SEQ ID NO: 587033 - DNA, 15 bp, Homo sapiens
ggaggctaaggcagg

SEQ ID NO: 587034 - DNA, 15 bp, Homo sapiens
gaggctaaggcaggc

SEQ ID NO: 587035 - DNA, 15 bp, Homo sapiens
aggctaaggcaggcg

SEQ ID NO: 587036 - DNA, 15 bp, Homo sapiens
ggctaaggcaggcgg

SEQ ID NO: 587037 - DNA, 15 bp, Homo sapiens
gctaaggcaggcggg

SEQ ID NO: 587038 - DNA, 15 bp, Homo sapiens
ctaaggcaggcgggt

SEQ ID NO: 587039 - DNA, 15 bp, Homo sapiens
taaggcaggcgggtc

SEQ ID NO: 587040 - DNA, 15 bp, Homo sapiens
aaggcaggcgggtca

SEQ ID NO: 587041 - DNA, 15 bp, Homo sapiens
aggcaggcgggtcac

SEQ ID NO: 587042 - DNA, 15 bp, Homo sapiens
ggcaggcgggtcact

SEQ ID NO: 587043 - DNA, 15 bp, Homo sapiens
gcaggcgggtcactt

SEQ ID NO: 587044 - DNA, 15 bp, Homo sapiens
caggcgggtcacttg

SEQ ID NO: 587045 - DNA, 15 bp, Homo sapiens
aggcgggtcacttga

SEQ ID NO: 587046 - DNA, 15 bp, Homo sapiens
ggcgggtcacttgag

SEQ ID NO: 587047 - DNA, 15 bp, Homo sapiens
gcgggtcacttgagg

SEQ ID NO: 587048 - DNA, 15 bp, Homo sapiens
cgggtcacttgaggt

SEQ ID NO: 587049 - DNA, 15 bp, Homo sapiens
gggtcacttgaggtc

SEQ ID NO: 587050 - DNA, 15 bp, Homo sapiens
ggtcacttgaggtca

SEQ ID NO: 587051 - DNA, 15 bp, Homo sapiens
gtcacttgaggtcag

SEQ ID NO: 587052 - DNA, 15 bp, Homo sapiens
tcacttgaggtcagg

SEQ ID NO: 587053 - DNA, 15 bp, Homo sapiens
cacttgaggtcagga

SEQ ID NO: 587054 - DNA, 15 bp, Homo sapiens
acttgaggtcaggat

SEQ ID NO: 587055 - DNA, 15 bp, Homo sapiens
cttgaggtcaggatt

SEQ ID NO: 587056 - DNA, 15 bp, Homo sapiens
ttgaggtcaggattt

SEQ ID NO: 587057 - DNA, 15 bp, Homo sapiens
tgaggtcaggatttg

SEQ ID NO: 587058 - DNA, 15 bp, Homo sapiens
gaggtcaggatttga

SEQ ID NO: 587059 - DNA, 15 bp, Homo sapiens
aggtcaggatttgaa

SEQ ID NO: 587060 - DNA, 15 bp, Homo sapiens
ggtcaggatttgaag

SEQ ID NO: 587061 - DNA, 15 bp, Homo sapiens
gtcaggatttgaaga

SEQ ID NO: 587062 - DNA, 15 bp, Homo sapiens
tcaggatttgaagac

SEQ ID NO: 587063 - DNA, 15 bp, Homo sapiens
caggatttgaagact

SEQ ID NO: 587064 - DNA, 15 bp, Homo sapiens
aggatttgaagacta

SEQ ID NO: 587065 - DNA, 15 bp, Homo sapiens
ggatttgaagactag

SEQ ID NO: 587066 - DNA, 15 bp, Homo sapiens
gatttgaagactagc

SEQ ID NO: 587067 - DNA, 15 bp, Homo sapiens
atttgaagactagct

SEQ ID NO: 587068 - DNA, 15 bp, Homo sapiens
tttgaagactagctg

SEQ ID NO: 587069 - DNA, 15 bp, Homo sapiens
ttgaagactagctgg

SEQ ID NO: 587070 - DNA, 15 bp, Homo sapiens
tgaagactagctggc

SEQ ID NO: 587071 - DNA, 15 bp, Homo sapiens
gaagactagctggcc

SEQ ID NO: 587072 - DNA, 15 bp, Homo sapiens
aagactagctggcca

SEQ ID NO: 587073 - DNA, 15 bp, Homo sapiens
agactagctggccaa

SEQ ID NO: 587074 - DNA, 15 bp, Homo sapiens
gactagctggccaac

SEQ ID NO: 587075 - DNA, 15 bp, Homo sapiens
actagctggccaaca

SEQ ID NO: 587076 - DNA, 15 bp, Homo sapiens
ctagctggccaacaa

SEQ ID NO: 587077 - DNA, 15 bp, Homo sapiens
tagctggccaacaag

SEQ ID NO: 587078 - DNA, 15 bp, Homo sapiens
agctggccaacaagg

SEQ ID NO: 587079 - DNA, 15 bp, Homo sapiens
gctggccaacaaggt

SEQ ID NO: 587080 - DNA, 15 bp, Homo sapiens
ctggccaacaaggtg

SEQ ID NO: 587081 - DNA, 15 bp, Homo sapiens
tggccaacaaggtgt

SEQ ID NO: 587082 - DNA, 15 bp, Homo sapiens
ggccaacaaggtgta

SEQ ID NO: 587083 - DNA, 15 bp, Homo sapiens
gccaacaaggtgtaa

SEQ ID NO: 587084 - DNA, 15 bp, Homo sapiens
ccaacaaggtgtaac

SEQ ID NO: 587085 - DNA, 15 bp, Homo sapiens
caacaaggtgtaacc

SEQ ID NO: 587086 - DNA, 15 bp, Homo sapiens
aacaaggtgtaacct

SEQ ID NO: 587087 - DNA, 15 bp, Homo sapiens
acaaggtgtaacctc

SEQ ID NO: 587088 - DNA, 15 bp, Homo sapiens
caaggtgtaacctcg

SEQ ID NO: 587089 - DNA, 15 bp, Homo sapiens
aaggtgtaacctcgt

SEQ ID NO: 587090 - DNA, 15 bp, Homo sapiens
aggtgtaacctcgtc

SEQ ID NO: 587091 - DNA, 15 bp, Homo sapiens
ggtgtaacctcgtct

SEQ ID NO: 587092 - DNA, 15 bp, Homo sapiens
gtgtaacctcgtctc

SEQ ID NO: 587093 - DNA, 15 bp, Homo sapiens
tgtaacctcgtctct

SEQ ID NO: 587094 - DNA, 15 bp, Homo sapiens
gtaacctcgtctcta

SEQ ID NO: 587095 - DNA, 15 bp, Homo sapiens
taacctcgtctctac

SEQ ID NO: 587096 - DNA, 15 bp, Homo sapiens
aacctcgtctctact

SEQ ID NO: 587097 - DNA, 15 bp, Homo sapiens
acctcgtctctacta

SEQ ID NO: 587098 - DNA, 15 bp, Homo sapiens
cctcgtctctactaa

SEQ ID NO: 587099 - DNA, 15 bp, Homo sapiens
ctcgtctctactaaa

SEQ ID NO: 587100 - DNA, 15 bp, Homo sapiens
tcgtctctactaaaa

SEQ ID NO: 587101 - DNA, 15 bp, Homo sapiens
aaatacaaaaattag

SEQ ID NO: 587102 - DNA, 15 bp, Homo sapiens
aatacaaaaattagc

SEQ ID NO: 587103 - DNA, 15 bp, Homo sapiens
atacaaaaattagct

SEQ ID NO: 587104 - DNA, 15 bp, Homo sapiens
tacaaaaattagctg

SEQ ID NO: 587105 - DNA, 15 bp, Homo sapiens
acaaaaattagctgg

SEQ ID NO: 587106 - DNA, 15 bp, Homo sapiens
caaaaattagctggg

SEQ ID NO: 587107 - DNA, 15 bp, Homo sapiens
aaaaattagctgggt

SEQ ID NO: 587108 - DNA, 15 bp, Homo sapiens
aaaattagctgggtg

SEQ ID NO: 587109 - DNA, 15 bp, Homo sapiens
aaattagctgggtgt

SEQ ID NO: 587110 - DNA, 15 bp, Homo sapiens
aattagctgggtgtg

SEQ ID NO: 587111 - DNA, 15 bp, Homo sapiens
attagctgggtgtga

SEQ ID NO: 587112 - DNA, 15 bp, Homo sapiens
ttagctgggtgtgat

SEQ ID NO: 587113 - DNA, 15 bp, Homo sapiens
tagctgggtgtgatg

SEQ ID NO: 587114 - DNA, 15 bp, Homo sapiens
agctgggtgtgatgg

SEQ ID NO: 587115 - DNA, 15 bp, Homo sapiens
gctgggtgtgatggc

SEQ ID NO: 587116 - DNA, 15 bp, Homo sapiens
ctgggtgtgatggcg

SEQ ID NO: 587117 - DNA, 15 bp, Homo sapiens
tgggtgtgatggcgc

SEQ ID NO: 587118 - DNA, 15 bp, Homo sapiens
gggtgtgatggcgca

SEQ ID NO: 587119 - DNA, 15 bp, Homo sapiens
ggtgtgatggcgcat

SEQ ID NO: 587120 - DNA, 15 bp, Homo sapiens
gtgtgatggcgcatg

SEQ ID NO: 587121 - DNA, 15 bp, Homo sapiens
tgtgatggcgcatgc

SEQ ID NO: 587122 - DNA, 15 bp, Homo sapiens
gtgatggcgcatgcc

SEQ ID NO: 587123 - DNA, 15 bp, Homo sapiens
tgatggcgcatgcct

SEQ ID NO: 587124 - DNA, 15 bp, Homo sapiens
gatggcgcatgcctg

SEQ ID NO: 587125 - DNA, 15 bp, Homo sapiens
atggcgcatgcctgt

SEQ ID NO: 587126 - DNA, 15 bp, Homo sapiens
tggcgcatgcctgta

SEQ ID NO: 587127 - DNA, 15 bp, Homo sapiens
ggcgcatgcctgtaa

SEQ ID NO: 587128 - DNA, 15 bp, Homo sapiens
gcgcatgcctgtaat

SEQ ID NO: 587129 - DNA, 15 bp, Homo sapiens
cgcatgcctgtaatc

SEQ ID NO: 587130 - DNA, 15 bp, Homo sapiens
gcatgcctgtaatcc

SEQ ID NO: 587131 - DNA, 15 bp, Homo sapiens
gcctgtaatcccagg

SEQ ID NO: 587132 - DNA, 15 bp, Homo sapiens
cctgtaatcccaggt

SEQ ID NO: 587133 - DNA, 15 bp, Homo sapiens
ctgtaatcccaggta

SEQ ID NO: 587134 - DNA, 15 bp, Homo sapiens
tgtaatcccaggtac

SEQ ID NO: 587135 - DNA, 15 bp, Homo sapiens
gtaatcccaggtact

SEQ ID NO: 587136 - DNA, 15 bp, Homo sapiens
taatcccaggtactc

SEQ ID NO: 587137 - DNA, 15 bp, Homo sapiens
aatcccaggtactca

SEQ ID NO: 587138 - DNA, 15 bp, Homo sapiens
atcccaggtactcag

SEQ ID NO: 587139 - DNA, 15 bp, Homo sapiens
tcccaggtactcagg

SEQ ID NO: 587140 - DNA, 15 bp, Homo sapiens
cccaggtactcagga

SEQ ID NO: 587141 - DNA, 15 bp, Homo sapiens
ccaggtactcaggag

SEQ ID NO: 587142 - DNA, 15 bp, Homo sapiens
caggtactcaggaga

SEQ ID NO: 587143 - DNA, 15 bp, Homo sapiens
aggtactcaggagac

SEQ ID NO: 587144 - DNA, 15 bp, Homo sapiens
ggtactcaggagact

SEQ ID NO: 587145 - DNA, 15 bp, Homo sapiens
gtactcaggagactg

SEQ ID NO: 587146 - DNA, 15 bp, Homo sapiens
tactcaggagactga

SEQ ID NO: 587147 - DNA, 15 bp, Homo sapiens
actcaggagactgag

SEQ ID NO: 587148 - DNA, 15 bp, Homo sapiens
ctcaggagactgagg

SEQ ID NO: 587149 - DNA, 15 bp, Homo sapiens
tcaggagactgaggc

SEQ ID NO: 587150 - DNA, 15 bp, Homo sapiens
caggagactgaggca

SEQ ID NO: 587151 - DNA, 15 bp, Homo sapiens
aggagactgaggcag

SEQ ID NO: 587152 - DNA, 15 bp, Homo sapiens
ggagactgaggcagg

SEQ ID NO: 587153 - DNA, 15 bp, Homo sapiens
gagactgaggcagga

SEQ ID NO: 587154 - DNA, 15 bp, Homo sapiens
agactgaggcaggag

SEQ ID NO: 587155 - DNA, 15 bp, Homo sapiens
gactgaggcaggaga

SEQ ID NO: 587156 - DNA, 15 bp, Homo sapiens
actgaggcaggagaa

SEQ ID NO: 587157 - DNA, 15 bp, Homo sapiens
ctgaggcaggagaat

SEQ ID NO: 587158 - DNA, 15 bp, Homo sapiens
tgaggcaggagaatt

SEQ ID NO: 587159 - DNA, 15 bp, Homo sapiens
gaggcaggagaattg

SEQ ID NO: 587160 - DNA, 15 bp, Homo sapiens
aggcaggagaattgc

SEQ ID NO: 587161 - DNA, 15 bp, Homo sapiens
ggcaggagaattgct

SEQ ID NO: 587162 - DNA, 15 bp, Homo sapiens
gcaggagaattgctt

SEQ ID NO: 587163 - DNA, 15 bp, Homo sapiens
caggagaattgctta

SEQ ID NO: 587164 - DNA, 15 bp, Homo sapiens
aggagaattgcttaa

SEQ ID NO: 587165 - DNA, 15 bp, Homo sapiens
ggagaattgcttaaa

SEQ ID NO: 587166 - DNA, 15 bp, Homo sapiens
gagaattgcttaaac

SEQ ID NO: 587167 - DNA, 15 bp, Homo sapiens
agaattgcttaaacc

SEQ ID NO: 587168 - DNA, 15 bp, Homo sapiens
gaattgcttaaaccc

SEQ ID NO: 587169 - DNA, 15 bp, Homo sapiens
aattgcttaaaccct

SEQ ID NO: 587170 - DNA, 15 bp, Homo sapiens
attgcttaaaccctg

SEQ ID NO: 587171 - DNA, 15 bp, Homo sapiens
ttgcttaaaccctgg

SEQ ID NO: 587172 - DNA, 15 bp, Homo sapiens
tgcttaaaccctgga

SEQ ID NO: 587173 - DNA, 15 bp, Homo sapiens
gcttaaaccctggag

SEQ ID NO: 587174 - DNA, 15 bp, Homo sapiens
cttaaaccctggagg

SEQ ID NO: 587175 - DNA, 15 bp, Homo sapiens
ttaaaccctggaggc

SEQ ID NO: 587176 - DNA, 15 bp, Homo sapiens
taaaccctggaggca

SEQ ID NO: 587177 - DNA, 15 bp, Homo sapiens
aaaccctggaggcag

SEQ ID NO: 587178 - DNA, 15 bp, Homo sapiens
aaccctggaggcaga

SEQ ID NO: 587179 - DNA, 15 bp, Homo sapiens
accctggaggcagag

SEQ ID NO: 587180 - DNA, 15 bp, Homo sapiens
ccctggaggcagagg

SEQ ID NO: 587181 - DNA, 15 bp, Homo sapiens
cctggaggcagaggt

SEQ ID NO: 587182 - DNA, 15 bp, Homo sapiens
ctggaggcagaggtt

SEQ ID NO: 587183 - DNA, 15 bp, Homo sapiens
tggaggcagaggttg

SEQ ID NO: 587184 - DNA, 15 bp, Homo sapiens
ggaggcagaggttgc

SEQ ID NO: 587185 - DNA, 15 bp, Homo sapiens
gaggcagaggttgca

SEQ ID NO: 587186 - DNA, 15 bp, Homo sapiens
aggcagaggttgcag

SEQ ID NO: 587187 - DNA, 15 bp, Homo sapiens
ggcagaggttgcagt

SEQ ID NO: 587188 - DNA, 15 bp, Homo sapiens
gcagaggttgcagtg

SEQ ID NO: 587189 - DNA, 15 bp, Homo sapiens
cagaggttgcagtga

SEQ ID NO: 587190 - DNA, 15 bp, Homo sapiens
agaggttgcagtgag

SEQ ID NO: 587191 - DNA, 15 bp, Homo sapiens
ttgcagtgagccaag

SEQ ID NO: 587192 - DNA, 15 bp, Homo sapiens
tgcagtgagccaaga

SEQ ID NO: 587193 - DNA, 15 bp, Homo sapiens
gcagtgagccaagat

SEQ ID NO: 587194 - DNA, 15 bp, Homo sapiens
cagtgagccaagatc

SEQ ID NO: 587195 - DNA, 15 bp, Homo sapiens
agtgagccaagatca

SEQ ID NO: 587196 - DNA, 15 bp, Homo sapiens
gtgagccaagatcac

SEQ ID NO: 587197 - DNA, 15 bp, Homo sapiens
tgagccaagatcacg

SEQ ID NO: 587198 - DNA, 15 bp, Homo sapiens
gagccaagatcacgc

SEQ ID NO: 587199 - DNA, 15 bp, Homo sapiens
agccaagatcacgcc

SEQ ID NO: 587200 - DNA, 15 bp, Homo sapiens
gccaagatcacgcca

SEQ ID NO: 587201 - DNA, 15 bp, Homo sapiens
ccaagatcacgccac

SEQ ID NO: 587202 - DNA, 15 bp, Homo sapiens
caagatcacgccact

SEQ ID NO: 587203 - DNA, 15 bp, Homo sapiens
aagatcacgccactg

SEQ ID NO: 587204 - DNA, 15 bp, Homo sapiens
agatcacgccactgc

SEQ ID NO: 587205 - DNA, 15 bp, Homo sapiens
gatcacgccactgca

SEQ ID NO: 587206 - DNA, 15 bp, Homo sapiens
atcacgccactgcac

SEQ ID NO: 587207 - DNA, 15 bp, Homo sapiens
tcacgccactgcact

SEQ ID NO: 587208 - DNA, 15 bp, Homo sapiens
cacgccactgcactc

SEQ ID NO: 587209 - DNA, 15 bp, Homo sapiens
acgccactgcactcc

SEQ ID NO: 587210 - DNA, 15 bp, Homo sapiens
cactccagcctgggt

SEQ ID NO: 587211 - DNA, 15 bp, Homo sapiens
actccagcctgggtg

SEQ ID NO: 587212 - DNA, 15 bp, Homo sapiens
ctccagcctgggtga

SEQ ID NO: 587213 - DNA, 15 bp, Homo sapiens
tccagcctgggtgat

SEQ ID NO: 587214 - DNA, 15 bp, Homo sapiens
ccagcctgggtgatg

SEQ ID NO: 587215 - DNA, 15 bp, Homo sapiens
cagcctgggtgatgg

SEQ ID NO: 587216 - DNA, 15 bp, Homo sapiens
agcctgggtgatgga

SEQ ID NO: 587217 - DNA, 15 bp, Homo sapiens
gcctgggtgatggag

SEQ ID NO: 587218 - DNA, 15 bp, Homo sapiens
cctgggtgatggagt

SEQ ID NO: 587219 - DNA, 15 bp, Homo sapiens
ctgggtgatggagtg

SEQ ID NO: 587220 - DNA, 15 bp, Homo sapiens
tgggtgatggagtga

SEQ ID NO: 587221 - DNA, 15 bp, Homo sapiens
gggtgatggagtgag

SEQ ID NO: 587222 - DNA, 15 bp, Homo sapiens
ggtgatggagtgagt

SEQ ID NO: 587223 - DNA, 15 bp, Homo sapiens
gtgatggagtgagtg

SEQ ID NO: 587224 - DNA, 15 bp, Homo sapiens
tgatggagtgagtga

SEQ ID NO: 587225 - DNA, 15 bp, Homo sapiens
gatggagtgagtgag

SEQ ID NO: 587226 - DNA, 15 bp, Homo sapiens
atggagtgagtgaga

SEQ ID NO: 587227 - DNA, 15 bp, Homo sapiens
tggagtgagtgagac

SEQ ID NO: 587228 - DNA, 15 bp, Homo sapiens
ggagtgagtgagact

SEQ ID NO: 587229 - DNA, 15 bp, Homo sapiens
gagtgagtgagactc

SEQ ID NO: 587230 - DNA, 15 bp, Homo sapiens
agtgagtgagactct

SEQ ID NO: 587231 - DNA, 15 bp, Homo sapiens
gtgagtgagactctg

SEQ ID NO: 587232 - DNA, 15 bp, Homo sapiens
tgagtgagactctgt

SEQ ID NO: 587233 - DNA, 15 bp, Homo sapiens
gagtgagactctgtc

SEQ ID NO: 587234 - DNA, 15 bp, Homo sapiens
agtgagactctgtct

SEQ ID NO: 587235 - DNA, 15 bp, Homo sapiens
gtgagactctgtctc

SEQ ID NO: 587236 - DNA, 15 bp, Homo sapiens
tgagactctgtctcc

SEQ ID NO: 587237 - DNA, 15 bp, Homo sapiens
gagactctgtctcca

SEQ ID NO: 587238 - DNA, 15 bp, Homo sapiens
agactctgtctccaa

SEQ ID NO: 587239 - DNA, 15 bp, Homo sapiens
gactctgtctccaaa

SEQ ID NO: 587240 - DNA, 15 bp, Homo sapiens
actctgtctccaaat

SEQ ID NO: 587241 - DNA, 15 bp, Homo sapiens
ctctgtctccaaata

SEQ ID NO: 587242 - DNA, 15 bp, Homo sapiens
tctgtctccaaataa

SEQ ID NO: 587243 - DNA, 15 bp, Homo sapiens
ctgtctccaaataaa

SEQ ID NO: 587244 - DNA, 15 bp, Homo sapiens
tgtctccaaataaat

SEQ ID NO: 587245 - DNA, 15 bp, Homo sapiens
gtctccaaataaata

SEQ ID NO: 587246 - DNA, 15 bp, Homo sapiens
tctccaaataaataa

SEQ ID NO: 587247 - DNA, 15 bp, Homo sapiens
ctccaaataaataaa

SEQ ID NO: 587248 - DNA, 15 bp, Homo sapiens
tccaaataaataaat

SEQ ID NO: 587249 - DNA, 15 bp, Homo sapiens
ccaaataaataaata

SEQ ID NO: 587250 - DNA, 15 bp, Homo sapiens
caaataaataaataa

SEQ ID NO: 587251 - DNA, 15 bp, Homo sapiens
aaataaataaataaa

SEQ ID NO: 587252 - DNA, 15 bp, Homo sapiens
aataaataaataaat

SEQ ID NO: 587253 - DNA, 15 bp, Homo sapiens
ataaataaataaata

SEQ ID NO: 587254 - DNA, 15 bp, Homo sapiens
taaataaataaataa

SEQ ID NO: 587255 - DNA, 15 bp, Homo sapiens
aataaataaataaaa

SEQ ID NO: 587256 - DNA, 15 bp, Homo sapiens
ataaataaataaaaa

SEQ ID NO: 587257 - DNA, 15 bp, Homo sapiens
taaataaataaaaac

SEQ ID NO: 587258 - DNA, 15 bp, Homo sapiens
aaataaataaaaact

SEQ ID NO: 587259 - DNA, 15 bp, Homo sapiens
aataaataaaaactg

SEQ ID NO: 587260 - DNA, 15 bp, Homo sapiens
ataaataaaaactgg

SEQ ID NO: 587261 - DNA, 15 bp, Homo sapiens
taaataaaaactgga

SEQ ID NO: 587262 - DNA, 15 bp, Homo sapiens
aaataaaaactggaa

SEQ ID NO: 587263 - DNA, 15 bp, Homo sapiens
aataaaaactggaag

SEQ ID NO: 587264 - DNA, 15 bp, Homo sapiens
ataaaaactggaagt

SEQ ID NO: 587265 - DNA, 15 bp, Homo sapiens
taaaaactggaagtc

SEQ ID NO: 587266 - DNA, 15 bp, Homo sapiens
aaaaactggaagtct

SEQ ID NO: 587267 - DNA, 15 bp, Homo sapiens
aaaactggaagtcta

SEQ ID NO: 587268 - DNA, 15 bp, Homo sapiens
aaactggaagtctaa

SEQ ID NO: 587269 - DNA, 15 bp, Homo sapiens
aactggaagtctaag

SEQ ID NO: 587270 - DNA, 15 bp, Homo sapiens
actggaagtctaagc

SEQ ID NO: 587271 - DNA, 15 bp, Homo sapiens
ctggaagtctaagca

SEQ ID NO: 587272 - DNA, 15 bp, Homo sapiens
tggaagtctaagcat

SEQ ID NO: 587273 - DNA, 15 bp, Homo sapiens
ggaagtctaagcatc

SEQ ID NO: 587274 - DNA, 15 bp, Homo sapiens
gaagtctaagcatca

SEQ ID NO: 587275 - DNA, 15 bp, Homo sapiens
aagtctaagcatcac

SEQ ID NO: 587276 - DNA, 15 bp, Homo sapiens
agtctaagcatcact

SEQ ID NO: 587277 - DNA, 15 bp, Homo sapiens
gtctaagcatcactg

SEQ ID NO: 587278 - DNA, 15 bp, Homo sapiens
tctaagcatcactga

SEQ ID NO: 587279 - DNA, 15 bp, Homo sapiens
ctaagcatcactgag

SEQ ID NO: 587280 - DNA, 15 bp, Homo sapiens
taagcatcactgagc

SEQ ID NO: 587281 - DNA, 15 bp, Homo sapiens
aagcatcactgagcc

SEQ ID NO: 587282 - DNA, 15 bp, Homo sapiens
agcatcactgagccc

SEQ ID NO: 587283 - DNA, 15 bp, Homo sapiens
gcatcactgagccct

SEQ ID NO: 587284 - DNA, 15 bp, Homo sapiens
catcactgagccctg

SEQ ID NO: 587285 - DNA, 15 bp, Homo sapiens
atcactgagccctga

SEQ ID NO: 587286 - DNA, 15 bp, Homo sapiens
tcactgagccctgat

SEQ ID NO: 587287 - DNA, 15 bp, Homo sapiens
cactgagccctgatt

SEQ ID NO: 587288 - DNA, 15 bp, Homo sapiens
actgagccctgattc

SEQ ID NO: 587289 - DNA, 15 bp, Homo sapiens
ctgagccctgattcc

SEQ ID NO: 587290 - DNA, 15 bp, Homo sapiens
tgagccctgattcct

SEQ ID NO: 587291 - DNA, 15 bp, Homo sapiens
gagccctgattccta

SEQ ID NO: 587292 - DNA, 15 bp, Homo sapiens
agccctgattcctat

SEQ ID NO: 587293 - DNA, 15 bp, Homo sapiens
gccctgattcctatg

SEQ ID NO: 587294 - DNA, 15 bp, Homo sapiens
ccctgattcctatgt

SEQ ID NO: 587295 - DNA, 15 bp, Homo sapiens
cctgattcctatgtg

SEQ ID NO: 587296 - DNA, 15 bp, Homo sapiens
ctgattcctatgtgg

SEQ ID NO: 587297 - DNA, 15 bp, Homo sapiens
tgattcctatgtggc

SEQ ID NO: 587298 - DNA, 15 bp, Homo sapiens
gattcctatgtggca

SEQ ID NO: 587299 - DNA, 15 bp, Homo sapiens
attcctatgtggcag

SEQ ID NO: 587300 - DNA, 15 bp, Homo sapiens
ttcctatgtggcagc

SEQ ID NO: 587301 - DNA, 15 bp, Homo sapiens
tcctatgtggcagct

SEQ ID NO: 587302 - DNA, 15 bp, Homo sapiens
cctatgtggcagctc

SEQ ID NO: 587303 - DNA, 15 bp, Homo sapiens
ctatgtggcagctcg

SEQ ID NO: 587304 - DNA, 15 bp, Homo sapiens
tatgtggcagctcga

SEQ ID NO: 587305 - DNA, 15 bp, Homo sapiens
atgtggcagctcgac

SEQ ID NO: 587306 - DNA, 15 bp, Homo sapiens
tgtggcagctcgact

SEQ ID NO: 587307 - DNA, 15 bp, Homo sapiens
gtggcagctcgactg

SEQ ID NO: 587308 - DNA, 15 bp, Homo sapiens
tggcagctcgactga

SEQ ID NO: 587309 - DNA, 15 bp, Homo sapiens
ggcagctcgactgac

SEQ ID NO: 587310 - DNA, 15 bp, Homo sapiens
gcagctcgactgacc

SEQ ID NO: 587311 - DNA, 15 bp, Homo sapiens
cagctcgactgacca

SEQ ID NO: 587312 - DNA, 15 bp, Homo sapiens
agctcgactgaccag

SEQ ID NO: 587313 - DNA, 15 bp, Homo sapiens
gctcgactgaccagc

SEQ ID NO: 587314 - DNA, 15 bp, Homo sapiens
ctcgactgaccagca

SEQ ID NO: 587315 - DNA, 15 bp, Homo sapiens
tcgactgaccagcat

SEQ ID NO: 587316 - DNA, 15 bp, Homo sapiens
cgactgaccagcatt

SEQ ID NO: 587317 - DNA, 15 bp, Homo sapiens
gactgaccagcattt

SEQ ID NO: 587318 - DNA, 15 bp, Homo sapiens
actgaccagcatttg

SEQ ID NO: 587319 - DNA, 15 bp, Homo sapiens
ctgaccagcatttga

SEQ ID NO: 587320 - DNA, 15 bp, Homo sapiens
tgaccagcatttgag

SEQ ID NO: 587321 - DNA, 15 bp, Homo sapiens
gaccagcatttgagt

SEQ ID NO: 587322 - DNA, 15 bp, Homo sapiens
accagcatttgagtt

SEQ ID NO: 587323 - DNA, 15 bp, Homo sapiens
ccagcatttgagttg

SEQ ID NO: 587324 - DNA, 15 bp, Homo sapiens
cagcatttgagttgc

SEQ ID NO: 587325 - DNA, 15 bp, Homo sapiens
agcatttgagttgct

SEQ ID NO: 587326 - DNA, 15 bp, Homo sapiens
gcatttgagttgctg

SEQ ID NO: 587327 - DNA, 15 bp, Homo sapiens
catttgagttgctgt

SEQ ID NO: 587328 - DNA, 15 bp, Homo sapiens
atttgagttgctgtc

SEQ ID NO: 587329 - DNA, 15 bp, Homo sapiens
tttgagttgctgtcc

SEQ ID NO: 587330 - DNA, 15 bp, Homo sapiens
ttgagttgctgtccc

SEQ ID NO: 587331 - DNA, 15 bp, Homo sapiens
tgagttgctgtccct

SEQ ID NO: 587332 - DNA, 15 bp, Homo sapiens
gagttgctgtccctg

SEQ ID NO: 587333 - DNA, 15 bp, Homo sapiens
agttgctgtccctga

SEQ ID NO: 587334 - DNA, 15 bp, Homo sapiens
gttgctgtccctgac

SEQ ID NO: 587335 - DNA, 15 bp, Homo sapiens
ttgctgtccctgaca

SEQ ID NO: 587336 - DNA, 15 bp, Homo sapiens
tgctgtccctgacag

SEQ ID NO: 587337 - DNA, 15 bp, Homo sapiens
gctgtccctgacagc

SEQ ID NO: 587338 - DNA, 15 bp, Homo sapiens
ctgtccctgacagct

SEQ ID NO: 587339 - DNA, 15 bp, Homo sapiens
tgtccctgacagctt

SEQ ID NO: 587340 - DNA, 15 bp, Homo sapiens
gtccctgacagcttt

SEQ ID NO: 587341 - DNA, 15 bp, Homo sapiens
tccctgacagctttg

SEQ ID NO: 587342 - DNA, 15 bp, Homo sapiens
ccctgacagctttgg

SEQ ID NO: 587343 - DNA, 15 bp, Homo sapiens
cctgacagctttggg

SEQ ID NO: 587344 - DNA, 15 bp, Homo sapiens
ctgacagctttgggg

SEQ ID NO: 587345 - DNA, 15 bp, Homo sapiens
tgacagctttggggg

SEQ ID NO: 587346 - DNA, 15 bp, Homo sapiens
gacagctttgggggt

SEQ ID NO: 587347 - DNA, 15 bp, Homo sapiens
acagctttgggggtg

SEQ ID NO: 587348 - DNA, 15 bp, Homo sapiens
cagctttgggggtgt

SEQ ID NO: 587349 - DNA, 15 bp, Homo sapiens
agctttgggggtgtg

SEQ ID NO: 587350 - DNA, 15 bp, Homo sapiens
gctttgggggtgtgc

SEQ ID NO: 587351 - DNA, 15 bp, Homo sapiens
ctttgggggtgtgca

SEQ ID NO: 587352 - DNA, 15 bp, Homo sapiens
tttgggggtgtgcag

SEQ ID NO: 587353 - DNA, 15 bp, Homo sapiens
ttgggggtgtgcagc

SEQ ID NO: 587354 - DNA, 15 bp, Homo sapiens
tgggggtgtgcagcc

SEQ ID NO: 587355 - DNA, 15 bp, Homo sapiens
gggggtgtgcagccc

SEQ ID NO: 587356 - DNA, 15 bp, Homo sapiens
ggggtgtgcagccca

SEQ ID NO: 587357 - DNA, 15 bp, Homo sapiens
gggtgtgcagcccac

SEQ ID NO: 587358 - DNA, 15 bp, Homo sapiens
ggtgtgcagcccaca

SEQ ID NO: 587359 - DNA, 15 bp, Homo sapiens
gtgtgcagcccacac

SEQ ID NO: 587360 - DNA, 15 bp, Homo sapiens
tgtgcagcccacaca

SEQ ID NO: 587361 - DNA, 15 bp, Homo sapiens
gtgcagcccacacag

SEQ ID NO: 587362 - DNA, 15 bp, Homo sapiens
tgcagcccacacagt

SEQ ID NO: 587363 - DNA, 15 bp, Homo sapiens
gcagcccacacagtc

SEQ ID NO: 587364 - DNA, 15 bp, Homo sapiens
cagcccacacagtca

SEQ ID NO: 587365 - DNA, 15 bp, Homo sapiens
agcccacacagtcat

SEQ ID NO: 587366 - DNA, 15 bp, Homo sapiens
gcccacacagtcatg

SEQ ID NO: 587367 - DNA, 15 bp, Homo sapiens
cccacacagtcatgc

SEQ ID NO: 587368 - DNA, 15 bp, Homo sapiens
ccacacagtcatgct

SEQ ID NO: 587369 - DNA, 15 bp, Homo sapiens
cacacagtcatgcta

SEQ ID NO: 587370 - DNA, 15 bp, Homo sapiens
acacagtcatgctag

SEQ ID NO: 587371 - DNA, 15 bp, Homo sapiens
cacagtcatgctagc

SEQ ID NO: 587372 - DNA, 15 bp, Homo sapiens
acagtcatgctagct

SEQ ID NO: 587373 - DNA, 15 bp, Homo sapiens
cagtcatgctagctt

SEQ ID NO: 587374 - DNA, 15 bp, Homo sapiens
agtcatgctagcttg

SEQ ID NO: 587375 - DNA, 15 bp, Homo sapiens
gtcatgctagcttga

SEQ ID NO: 587376 - DNA, 15 bp, Homo sapiens
tcatgctagcttgag

SEQ ID NO: 587377 - DNA, 15 bp, Homo sapiens
catgctagcttgagg

SEQ ID NO: 587378 - DNA, 15 bp, Homo sapiens
atgctagcttgaggc

SEQ ID NO: 587379 - DNA, 15 bp, Homo sapiens
tgctagcttgaggct

SEQ ID NO: 587380 - DNA, 15 bp, Homo sapiens
gctagcttgaggctc

SEQ ID NO: 587381 - DNA, 15 bp, Homo sapiens
ctagcttgaggctct

SEQ ID NO: 587382 - DNA, 15 bp, Homo sapiens
tagcttgaggctctg

SEQ ID NO: 587383 - DNA, 15 bp, Homo sapiens
agcttgaggctctgc

SEQ ID NO: 587384 - DNA, 15 bp, Homo sapiens
gcttgaggctctgct

SEQ ID NO: 587385 - DNA, 15 bp, Homo sapiens
cttgaggctctgctg

SEQ ID NO: 587386 - DNA, 15 bp, Homo sapiens
ttgaggctctgctgt

SEQ ID NO: 587387 - DNA, 15 bp, Homo sapiens
tgaggctctgctgtc

SEQ ID NO: 587388 - DNA, 15 bp, Homo sapiens
gaggctctgctgtca

SEQ ID NO: 587389 - DNA, 15 bp, Homo sapiens
aggctctgctgtcag

SEQ ID NO: 587390 - DNA, 15 bp, Homo sapiens
ggctctgctgtcagc

SEQ ID NO: 587391 - DNA, 15 bp, Homo sapiens
gctctgctgtcagca

SEQ ID NO: 587392 - DNA, 15 bp, Homo sapiens
ctctgctgtcagcag

SEQ ID NO: 587393 - DNA, 15 bp, Homo sapiens
tctgctgtcagcagt

SEQ ID NO: 587394 - DNA, 15 bp, Homo sapiens
ctgctgtcagcagtt

SEQ ID NO: 587395 - DNA, 15 bp, Homo sapiens
tgctgtcagcagttt

SEQ ID NO: 587396 - DNA, 15 bp, Homo sapiens
gctgtcagcagtttg

SEQ ID NO: 587397 - DNA, 15 bp, Homo sapiens
ctgtcagcagtttga

SEQ ID NO: 587398 - DNA, 15 bp, Homo sapiens
tgtcagcagtttgaa

SEQ ID NO: 587399 - DNA, 15 bp, Homo sapiens
gtcagcagtttgaaa

SEQ ID NO: 587400 - DNA, 15 bp, Homo sapiens
tcagcagtttgaaac

SEQ ID NO: 587401 - DNA, 15 bp, Homo sapiens
cagcagtttgaaact

SEQ ID NO: 587402 - DNA, 15 bp, Homo sapiens
agcagtttgaaactc

SEQ ID NO: 587403 - DNA, 15 bp, Homo sapiens
gcagtttgaaactct

SEQ ID NO: 587404 - DNA, 15 bp, Homo sapiens
cagtttgaaactctt

SEQ ID NO: 587405 - DNA, 15 bp, Homo sapiens
agtttgaaactctta

SEQ ID NO: 587406 - DNA, 15 bp, Homo sapiens
gtttgaaactcttaa

SEQ ID NO: 587407 - DNA, 15 bp, Homo sapiens
tttgaaactcttaat

SEQ ID NO: 587408 - DNA, 15 bp, Homo sapiens
ttgaaactcttaata

SEQ ID NO: 587409 - DNA, 15 bp, Homo sapiens
tgaaactcttaataa

SEQ ID NO: 587410 - DNA, 15 bp, Homo sapiens
gaaactcttaataac

SEQ ID NO: 587411 - DNA, 15 bp, Homo sapiens
aaactcttaataact

SEQ ID NO: 587412 - DNA, 15 bp, Homo sapiens
aactcttaataactt

SEQ ID NO: 587413 - DNA, 15 bp, Homo sapiens
actcttaataacttg

SEQ ID NO: 587414 - DNA, 15 bp, Homo sapiens
ctcttaataacttgt

SEQ ID NO: 587415 - DNA, 15 bp, Homo sapiens
tcttaataacttgtg

SEQ ID NO: 587416 - DNA, 15 bp, Homo sapiens
cttaataacttgtga

SEQ ID NO: 587417 - DNA, 15 bp, Homo sapiens
ttaataacttgtgaa

SEQ ID NO: 587418 - DNA, 15 bp, Homo sapiens
taataacttgtgaac

SEQ ID NO: 587419 - DNA, 15 bp, Homo sapiens
aataacttgtgaaca

SEQ ID NO: 587420 - DNA, 15 bp, Homo sapiens
ataacttgtgaacaa

SEQ ID NO: 587421 - DNA, 15 bp, Homo sapiens
taacttgtgaacaaa

SEQ ID NO: 587422 - DNA, 15 bp, Homo sapiens
aacttgtgaacaaaa

SEQ ID NO: 587423 - DNA, 15 bp, Homo sapiens
acttgtgaacaaaag

SEQ ID NO: 587424 - DNA, 15 bp, Homo sapiens
cttgtgaacaaaaga

SEQ ID NO: 587425 - DNA, 15 bp, Homo sapiens
ttgtgaacaaaagac

SEQ ID NO: 587426 - DNA, 15 bp, Homo sapiens
tgtgaacaaaagact

SEQ ID NO: 587427 - DNA, 15 bp, Homo sapiens
gtgaacaaaagactc

SEQ ID NO: 587428 - DNA, 15 bp, Homo sapiens
tgaacaaaagactcc

SEQ ID NO: 587429 - DNA, 15 bp, Homo sapiens
gaacaaaagactcca

SEQ ID NO: 587430 - DNA, 15 bp, Homo sapiens
aacaaaagactccat

SEQ ID NO: 587431 - DNA, 15 bp, Homo sapiens
acaaaagactccatg

SEQ ID NO: 587432 - DNA, 15 bp, Homo sapiens
caaaagactccatgt

SEQ ID NO: 587433 - DNA, 15 bp, Homo sapiens
aaaagactccatgtt

SEQ ID NO: 587434 - DNA, 15 bp, Homo sapiens
aaagactccatgttg

SEQ ID NO: 587435 - DNA, 15 bp, Homo sapiens
aagactccatgttgt

SEQ ID NO: 587436 - DNA, 15 bp, Homo sapiens
agactccatgttgtc

SEQ ID NO: 587437 - DNA, 15 bp, Homo sapiens
gactccatgttgtca

SEQ ID NO: 587438 - DNA, 15 bp, Homo sapiens
actccatgttgtcac

SEQ ID NO: 587439 - DNA, 15 bp, Homo sapiens
ctccatgttgtcact

SEQ ID NO: 587440 - DNA, 15 bp, Homo sapiens
tccatgttgtcactc

SEQ ID NO: 587441 - DNA, 15 bp, Homo sapiens
ccatgttgtcactct

SEQ ID NO: 587442 - DNA, 15 bp, Homo sapiens
catgttgtcactctg

SEQ ID NO: 587443 - DNA, 15 bp, Homo sapiens
atgttgtcactctgc

SEQ ID NO: 587444 - DNA, 15 bp, Homo sapiens
tgttgtcactctgca

SEQ ID NO: 587445 - DNA, 15 bp, Homo sapiens
gttgtcactctgcac

SEQ ID NO: 587446 - DNA, 15 bp, Homo sapiens
ttgtcactctgcaca

SEQ ID NO: 587447 - DNA, 15 bp, Homo sapiens
tgtcactctgcacag

SEQ ID NO: 587448 - DNA, 15 bp, Homo sapiens
gtcactctgcacagg

SEQ ID NO: 587449 - DNA, 15 bp, Homo sapiens
tcactctgcacaggg

SEQ ID NO: 587450 - DNA, 15 bp, Homo sapiens
cactctgcacagggg

SEQ ID NO: 587451 - DNA, 15 bp, Homo sapiens
actctgcacaggggc

SEQ ID NO: 587452 - DNA, 15 bp, Homo sapiens
ctctgcacaggggcc

SEQ ID NO: 587453 - DNA, 15 bp, Homo sapiens
tctgcacaggggcca

SEQ ID NO: 587454 - DNA, 15 bp, Homo sapiens
ctgcacaggggccag

SEQ ID NO: 587455 - DNA, 15 bp, Homo sapiens
tgcacaggggccagc

SEQ ID NO: 587456 - DNA, 15 bp, Homo sapiens
gcacaggggccagca

SEQ ID NO: 587457 - DNA, 15 bp, Homo sapiens
cacaggggccagcaa

SEQ ID NO: 587458 - DNA, 15 bp, Homo sapiens
acaggggccagcaaa

SEQ ID NO: 587459 - DNA, 15 bp, Homo sapiens
caggggccagcaaat

SEQ ID NO: 587460 - DNA, 15 bp, Homo sapiens
aggggccagcaaatt

SEQ ID NO: 587461 - DNA, 15 bp, Homo sapiens
ggggccagcaaatta

SEQ ID NO: 587462 - DNA, 15 bp, Homo sapiens
gggccagcaaattac

SEQ ID NO: 587463 - DNA, 15 bp, Homo sapiens
ggccagcaaattaca

SEQ ID NO: 587464 - DNA, 15 bp, Homo sapiens
gccagcaaattacaa

SEQ ID NO: 587465 - DNA, 15 bp, Homo sapiens
ccagcaaattacaaa

SEQ ID NO: 587466 - DNA, 15 bp, Homo sapiens
cagcaaattacaaaa

SEQ ID NO: 587467 - DNA, 15 bp, Homo sapiens
agcaaattacaaaat

SEQ ID NO: 587468 - DNA, 15 bp, Homo sapiens
gcaaattacaaaatt

SEQ ID NO: 587469 - DNA, 15 bp, Homo sapiens
caaattacaaaattc

SEQ ID NO: 587470 - DNA, 15 bp, Homo sapiens
aaattacaaaattcc

SEQ ID NO: 587471 - DNA, 15 bp, Homo sapiens
aattacaaaattcca

SEQ ID NO: 587472 - DNA, 15 bp, Homo sapiens
attacaaaattccat

SEQ ID NO: 587473 - DNA, 15 bp, Homo sapiens
ttacaaaattccata

SEQ ID NO: 587474 - DNA, 15 bp, Homo sapiens
tacaaaattccatat

SEQ ID NO: 587475 - DNA, 15 bp, Homo sapiens
acaaaattccatatc

SEQ ID NO: 587476 - DNA, 15 bp, Homo sapiens
caaaattccatatcc

SEQ ID NO: 587477 - DNA, 15 bp, Homo sapiens
aaaattccatatccg

SEQ ID NO: 587478 - DNA, 15 bp, Homo sapiens
aaattccatatccgg

SEQ ID NO: 587479 - DNA, 15 bp, Homo sapiens
aattccatatccgga

SEQ ID NO: 587480 - DNA, 15 bp, Homo sapiens
attccatatccggaa

SEQ ID NO: 587481 - DNA, 15 bp, Homo sapiens
ttccatatccggaat

SEQ ID NO: 587482 - DNA, 15 bp, Homo sapiens
tccatatccggaatt

SEQ ID NO: 587483 - DNA, 15 bp, Homo sapiens
ccatatccggaattg

SEQ ID NO: 587484 - DNA, 15 bp, Homo sapiens
catatccggaattgt

SEQ ID NO: 587485 - DNA, 15 bp, Homo sapiens
atatccggaattgtc

SEQ ID NO: 587486 - DNA, 15 bp, Homo sapiens
tatccggaattgtct

SEQ ID NO: 587487 - DNA, 15 bp, Homo sapiens
atccggaattgtcta

SEQ ID NO: 587488 - DNA, 15 bp, Homo sapiens
tccggaattgtctac

SEQ ID NO: 587489 - DNA, 15 bp, Homo sapiens
ccggaattgtctaca

SEQ ID NO: 587490 - DNA, 15 bp, Homo sapiens
cggaattgtctacag

SEQ ID NO: 587491 - DNA, 15 bp, Homo sapiens
ggaattgtctacagg

SEQ ID NO: 587492 - DNA, 15 bp, Homo sapiens
gaattgtctacagga

SEQ ID NO: 587493 - DNA, 15 bp, Homo sapiens
aattgtctacaggag

SEQ ID NO: 587494 - DNA, 15 bp, Homo sapiens
attgtctacaggagc

SEQ ID NO: 587495 - DNA, 15 bp, Homo sapiens
ttgtctacaggagcc

SEQ ID NO: 587496 - DNA, 15 bp, Homo sapiens
tgtctacaggagcct

SEQ ID NO: 587497 - DNA, 15 bp, Homo sapiens
gtctacaggagcctc

SEQ ID NO: 587498 - DNA, 15 bp, Homo sapiens
tctacaggagcctct

SEQ ID NO: 587499 - DNA, 15 bp, Homo sapiens
ctacaggagcctctg

SEQ ID NO: 587500 - DNA, 15 bp, Homo sapiens
tacaggagcctctgg

SEQ ID NO: 587501 - DNA, 15 bp, Homo sapiens
acaggagcctctggg

SEQ ID NO: 587502 - DNA, 15 bp, Homo sapiens
caggagcctctgggc

SEQ ID NO: 587503 - DNA, 15 bp, Homo sapiens
aggagcctctgggct

SEQ ID NO: 587504 - DNA, 15 bp, Homo sapiens
ggagcctctgggctg

SEQ ID NO: 587505 - DNA, 15 bp, Homo sapiens
gagcctctgggctgc

SEQ ID NO: 587506 - DNA, 15 bp, Homo sapiens
agcctctgggctgct

SEQ ID NO: 587507 - DNA, 15 bp, Homo sapiens
gcctctgggctgctc

SEQ ID NO: 587508 - DNA, 15 bp, Homo sapiens
cctctgggctgctcc

SEQ ID NO: 587509 - DNA, 15 bp, Homo sapiens
ctctgggctgctccc

SEQ ID NO: 587510 - DNA, 15 bp, Homo sapiens
tctgggctgctccca

SEQ ID NO: 587511 - DNA, 15 bp, Homo sapiens
ctgggctgctcccaa

SEQ ID NO: 587512 - DNA, 15 bp, Homo sapiens
tgggctgctcccaag

SEQ ID NO: 587513 - DNA, 15 bp, Homo sapiens
gggctgctcccaagg

SEQ ID NO: 587514 - DNA, 15 bp, Homo sapiens
ggctgctcccaaggg

SEQ ID NO: 587515 - DNA, 15 bp, Homo sapiens
gctgctcccaagggc

SEQ ID NO: 587516 - DNA, 15 bp, Homo sapiens
ctgctcccaagggcc

SEQ ID NO: 587517 - DNA, 15 bp, Homo sapiens
tgctcccaagggccc

SEQ ID NO: 587518 - DNA, 15 bp, Homo sapiens
gctcccaagggccca

SEQ ID NO: 587519 - DNA, 15 bp, Homo sapiens
ctcccaagggcccac

SEQ ID NO: 587520 - DNA, 15 bp, Homo sapiens
tcccaagggcccaca

SEQ ID NO: 587521 - DNA, 15 bp, Homo sapiens
cccaagggcccacac

SEQ ID NO: 587522 - DNA, 15 bp, Homo sapiens
ccaagggcccacacc

SEQ ID NO: 587523 - DNA, 15 bp, Homo sapiens
caagggcccacacca

SEQ ID NO: 587524 - DNA, 15 bp, Homo sapiens
aagggcccacaccat

SEQ ID NO: 587525 - DNA, 15 bp, Homo sapiens
agggcccacaccatg

SEQ ID NO: 587526 - DNA, 15 bp, Homo sapiens
gggcccacaccatgc

SEQ ID NO: 587527 - DNA, 15 bp, Homo sapiens
ggcccacaccatgcc

SEQ ID NO: 587528 - DNA, 15 bp, Homo sapiens
gcccacaccatgcct

SEQ ID NO: 587529 - DNA, 15 bp, Homo sapiens
cccacaccatgcctt

SEQ ID NO: 587530 - DNA, 15 bp, Homo sapiens
ccacaccatgcctta

SEQ ID NO: 587531 - DNA, 15 bp, Homo sapiens
cacaccatgccttac

SEQ ID NO: 587532 - DNA, 15 bp, Homo sapiens
acaccatgccttact

SEQ ID NO: 587533 - DNA, 15 bp, Homo sapiens
caccatgccttactc

SEQ ID NO: 587534 - DNA, 15 bp, Homo sapiens
accatgccttactca

SEQ ID NO: 587535 - DNA, 15 bp, Homo sapiens
ccatgccttactcac

SEQ ID NO: 587536 - DNA, 15 bp, Homo sapiens
catgccttactcact

SEQ ID NO: 587537 - DNA, 15 bp, Homo sapiens
atgccttactcactt

SEQ ID NO: 587538 - DNA, 15 bp, Homo sapiens
tgccttactcacttt

SEQ ID NO: 587539 - DNA, 15 bp, Homo sapiens
gccttactcactttg

SEQ ID NO: 587540 - DNA, 15 bp, Homo sapiens
ccttactcactttgg

SEQ ID NO: 587541 - DNA, 15 bp, Homo sapiens
cttactcactttggg

SEQ ID NO: 587542 - DNA, 15 bp, Homo sapiens
ttactcactttgggt

SEQ ID NO: 587543 - DNA, 15 bp, Homo sapiens
tactcactttgggtt

SEQ ID NO: 587544 - DNA, 15 bp, Homo sapiens
actcactttgggttg

SEQ ID NO: 587545 - DNA, 15 bp, Homo sapiens
ctcactttgggttgc

SEQ ID NO: 587546 - DNA, 15 bp, Homo sapiens
tcactttgggttgcc

SEQ ID NO: 587547 - DNA, 15 bp, Homo sapiens
cactttgggttgcca

SEQ ID NO: 587548 - DNA, 15 bp, Homo sapiens
actttgggttgccat

SEQ ID NO: 587549 - DNA, 15 bp, Homo sapiens
ctttgggttgccatc

SEQ ID NO: 587550 - DNA, 15 bp, Homo sapiens
tttgggttgccatcc

SEQ ID NO: 587551 - DNA, 15 bp, Homo sapiens
ttgggttgccatcca

SEQ ID NO: 587552 - DNA, 15 bp, Homo sapiens
tgggttgccatccaa

SEQ ID NO: 587553 - DNA, 15 bp, Homo sapiens
gggttgccatccaaa

SEQ ID NO: 587554 - DNA, 15 bp, Homo sapiens
ggttgccatccaaac

SEQ ID NO: 587555 - DNA, 15 bp, Homo sapiens
gttgccatccaaaca

SEQ ID NO: 587556 - DNA, 15 bp, Homo sapiens
ttgccatccaaacat

SEQ ID NO: 587557 - DNA, 15 bp, Homo sapiens
tgccatccaaacatg

SEQ ID NO: 587558 - DNA, 15 bp, Homo sapiens
gccatccaaacatgt

SEQ ID NO: 587559 - DNA, 15 bp, Homo sapiens
ccatccaaacatgtc

SEQ ID NO: 587560 - DNA, 15 bp, Homo sapiens
catccaaacatgtct

SEQ ID NO: 587561 - DNA, 15 bp, Homo sapiens
atccaaacatgtctc

SEQ ID NO: 587562 - DNA, 15 bp, Homo sapiens
tccaaacatgtctca

SEQ ID NO: 587563 - DNA, 15 bp, Homo sapiens
ccaaacatgtctcat

SEQ ID NO: 587564 - DNA, 15 bp, Homo sapiens
caaacatgtctcatg

SEQ ID NO: 587565 - DNA, 15 bp, Homo sapiens
aaacatgtctcatga

SEQ ID NO: 587566 - DNA, 15 bp, Homo sapiens
aacatgtctcatgac

SEQ ID NO: 587567 - DNA, 15 bp, Homo sapiens
acatgtctcatgaca

SEQ ID NO: 587568 - DNA, 15 bp, Homo sapiens
catgtctcatgacaa

SEQ ID NO: 587569 - DNA, 15 bp, Homo sapiens
atgtctcatgacaaa

SEQ ID NO: 587570 - DNA, 15 bp, Homo sapiens
tgtctcatgacaaag

SEQ ID NO: 587571 - DNA, 15 bp, Homo sapiens
gtctcatgacaaaga

SEQ ID NO: 587572 - DNA, 15 bp, Homo sapiens
tctcatgacaaagaa

SEQ ID NO: 587573 - DNA, 15 bp, Homo sapiens
ctcatgacaaagaag

SEQ ID NO: 587574 - DNA, 15 bp, Homo sapiens
tcatgacaaagaagc

SEQ ID NO: 587575 - DNA, 15 bp, Homo sapiens
catgacaaagaagct

SEQ ID NO: 587576 - DNA, 15 bp, Homo sapiens
atgacaaagaagctc

SEQ ID NO: 587577 - DNA, 15 bp, Homo sapiens
tgacaaagaagctca

SEQ ID NO: 587578 - DNA, 15 bp, Homo sapiens
gacaaagaagctcaa

SEQ ID NO: 587579 - DNA, 15 bp, Homo sapiens
acaaagaagctcaaa

SEQ ID NO: 587580 - DNA, 15 bp, Homo sapiens
caaagaagctcaaac

SEQ ID NO: 587581 - DNA, 15 bp, Homo sapiens
aaagaagctcaaaca

SEQ ID NO: 587582 - DNA, 15 bp, Homo sapiens
aagaagctcaaacat

SEQ ID NO: 587583 - DNA, 15 bp, Homo sapiens
agaagctcaaacatg

SEQ ID NO: 587584 - DNA, 15 bp, Homo sapiens
gaagctcaaacatgt

SEQ ID NO: 587585 - DNA, 15 bp, Homo sapiens
aagctcaaacatgtg

SEQ ID NO: 587586 - DNA, 15 bp, Homo sapiens
agctcaaacatgtgc

SEQ ID NO: 587587 - DNA, 15 bp, Homo sapiens
gctcaaacatgtgca

SEQ ID NO: 587588 - DNA, 15 bp, Homo sapiens
ctcaaacatgtgcat

SEQ ID NO: 587589 - DNA, 15 bp, Homo sapiens
tcaaacatgtgcatg

SEQ ID NO: 587590 - DNA, 15 bp, Homo sapiens
caaacatgtgcatgg

SEQ ID NO: 587591 - DNA, 15 bp, Homo sapiens
aaacatgtgcatgga

SEQ ID NO: 587592 - DNA, 15 bp, Homo sapiens
aacatgtgcatggac

SEQ ID NO: 587593 - DNA, 15 bp, Homo sapiens
acatgtgcatggaca

SEQ ID NO: 587594 - DNA, 15 bp, Homo sapiens
catgtgcatggacag

SEQ ID NO: 587595 - DNA, 15 bp, Homo sapiens
atgtgcatggacagt

SEQ ID NO: 587596 - DNA, 15 bp, Homo sapiens
tgtgcatggacagtg

SEQ ID NO: 587597 - DNA, 15 bp, Homo sapiens
gtgcatggacagtgc

SEQ ID NO: 587598 - DNA, 15 bp, Homo sapiens
tgcatggacagtgcc

SEQ ID NO: 587599 - DNA, 15 bp, Homo sapiens
gcatggacagtgcca

SEQ ID NO: 587600 - DNA, 15 bp, Homo sapiens
catggacagtgccag

SEQ ID NO: 587601 - DNA, 15 bp, Homo sapiens
atggacagtgccaga

SEQ ID NO: 587602 - DNA, 15 bp, Homo sapiens
tggacagtgccagaa

SEQ ID NO: 587603 - DNA, 15 bp, Homo sapiens
ggacagtgccagaaa

SEQ ID NO: 587604 - DNA, 15 bp, Homo sapiens
gacagtgccagaaaa

SEQ ID NO: 587605 - DNA, 15 bp, Homo sapiens
acagtgccagaaaac

SEQ ID NO: 587606 - DNA, 15 bp, Homo sapiens
cagtgccagaaaaca

SEQ ID NO: 587607 - DNA, 15 bp, Homo sapiens
agtgccagaaaacaa

SEQ ID NO: 587608 - DNA, 15 bp, Homo sapiens
gtgccagaaaacaag

SEQ ID NO: 587609 - DNA, 15 bp, Homo sapiens
tgccagaaaacaagg

SEQ ID NO: 587610 - DNA, 15 bp, Homo sapiens
gccagaaaacaaggg

SEQ ID NO: 587611 - DNA, 15 bp, Homo sapiens
ccagaaaacaagggt

SEQ ID NO: 587612 - DNA, 15 bp, Homo sapiens
cagaaaacaagggtc

SEQ ID NO: 587613 - DNA, 15 bp, Homo sapiens
agaaaacaagggtcg

SEQ ID NO: 587614 - DNA, 15 bp, Homo sapiens
gaaaacaagggtcgt

SEQ ID NO: 587615 - DNA, 15 bp, Homo sapiens
aaaacaagggtcgta

SEQ ID NO: 587616 - DNA, 15 bp, Homo sapiens
aaacaagggtcgtac

SEQ ID NO: 587617 - DNA, 15 bp, Homo sapiens
aacaagggtcgtaca

SEQ ID NO: 587618 - DNA, 15 bp, Homo sapiens
acaagggtcgtacat

SEQ ID NO: 587619 - DNA, 15 bp, Homo sapiens
caagggtcgtacata

SEQ ID NO: 587620 - DNA, 15 bp, Homo sapiens
aagggtcgtacatag

SEQ ID NO: 587621 - DNA, 15 bp, Homo sapiens
agggtcgtacataga

SEQ ID NO: 587622 - DNA, 15 bp, Homo sapiens
gggtcgtacatagac

SEQ ID NO: 587623 - DNA, 15 bp, Homo sapiens
ggtcgtacatagaca

SEQ ID NO: 587624 - DNA, 15 bp, Homo sapiens
gtcgtacatagacaa

SEQ ID NO: 587625 - DNA, 15 bp, Homo sapiens
tcgtacatagacaaa

SEQ ID NO: 587626 - DNA, 15 bp, Homo sapiens
cgtacatagacaaaa

SEQ ID NO: 587627 - DNA, 15 bp, Homo sapiens
gtacatagacaaaat

SEQ ID NO: 587628 - DNA, 15 bp, Homo sapiens
tacatagacaaaata

SEQ ID NO: 587629 - DNA, 15 bp, Homo sapiens
acatagacaaaataa

SEQ ID NO: 587630 - DNA, 15 bp, Homo sapiens
catagacaaaataaa

SEQ ID NO: 587631 - DNA, 15 bp, Homo sapiens
atagacaaaataaaa

SEQ ID NO: 587632 - DNA, 15 bp, Homo sapiens
tagacaaaataaaat

SEQ ID NO: 587633 - DNA, 15 bp, Homo sapiens
agacaaaataaaatg

SEQ ID NO: 587634 - DNA, 15 bp, Homo sapiens
gacaaaataaaatga

SEQ ID NO: 587635 - DNA, 15 bp, Homo sapiens
acaaaataaaatgat

SEQ ID NO: 587636 - DNA, 15 bp, Homo sapiens
caaaataaaatgata

SEQ ID NO: 587637 - DNA, 15 bp, Homo sapiens
aaaataaaatgataa

SEQ ID NO: 587638 - DNA, 15 bp, Homo sapiens
aaataaaatgataac

SEQ ID NO: 587639 - DNA, 15 bp, Homo sapiens
aataaaatgataacg

SEQ ID NO: 587640 - DNA, 15 bp, Homo sapiens
ataaaatgataacgt

SEQ ID NO: 587641 - DNA, 15 bp, Homo sapiens
taaaatgataacgtc

SEQ ID NO: 587642 - DNA, 15 bp, Homo sapiens
aaaatgataacgtcc

SEQ ID NO: 587643 - DNA, 15 bp, Homo sapiens
aaatgataacgtccc

SEQ ID NO: 587644 - DNA, 15 bp, Homo sapiens
aatgataacgtccca

SEQ ID NO: 587645 - DNA, 15 bp, Homo sapiens
atgataacgtcccac

SEQ ID NO: 587646 - DNA, 15 bp, Homo sapiens
tgataacgtcccaca

SEQ ID NO: 587647 - DNA, 15 bp, Homo sapiens
gataacgtcccacaa

SEQ ID NO: 587648 - DNA, 15 bp, Homo sapiens
ataacgtcccacaac

SEQ ID NO: 587649 - DNA, 15 bp, Homo sapiens
taacgtcccacaacc

SEQ ID NO: 587650 - DNA, 15 bp, Homo sapiens
aacgtcccacaacca

SEQ ID NO: 587651 - DNA, 15 bp, Homo sapiens
acgtcccacaaccat

SEQ ID NO: 587652 - DNA, 15 bp, Homo sapiens
cgtcccacaaccatt

SEQ ID NO: 587653 - DNA, 15 bp, Homo sapiens
gtcccacaaccattt

SEQ ID NO: 587654 - DNA, 15 bp, Homo sapiens
tcccacaaccatttc

SEQ ID NO: 587655 - DNA, 15 bp, Homo sapiens
cccacaaccatttct

SEQ ID NO: 587656 - DNA, 15 bp, Homo sapiens
ccacaaccatttctt

SEQ ID NO: 587657 - DNA, 15 bp, Homo sapiens
cacaaccatttcttt

SEQ ID NO: 587658 - DNA, 15 bp, Homo sapiens
acaaccatttctttg

SEQ ID NO: 587659 - DNA, 15 bp, Homo sapiens
caaccatttctttga

SEQ ID NO: 587660 - DNA, 15 bp, Homo sapiens
aaccatttctttgat

SEQ ID NO: 587661 - DNA, 15 bp, Homo sapiens
accatttctttgata

SEQ ID NO: 587662 - DNA, 15 bp, Homo sapiens
ccatttctttgatac

SEQ ID NO: 587663 - DNA, 15 bp, Homo sapiens
catttctttgataca

SEQ ID NO: 587664 - DNA, 15 bp, Homo sapiens
atttctttgatacac

SEQ ID NO: 587665 - DNA, 15 bp, Homo sapiens
tttctttgatacaca

SEQ ID NO: 587666 - DNA, 15 bp, Homo sapiens
ttctttgatacacac

SEQ ID NO: 587667 - DNA, 15 bp, Homo sapiens
tctttgatacacact

SEQ ID NO: 587668 - DNA, 15 bp, Homo sapiens
ctttgatacacactg

SEQ ID NO: 587669 - DNA, 15 bp, Homo sapiens
tttgatacacactgt

SEQ ID NO: 587670 - DNA, 15 bp, Homo sapiens
ttgatacacactgtt

SEQ ID NO: 587671 - DNA, 15 bp, Homo sapiens
tgatacacactgttt

SEQ ID NO: 587672 - DNA, 15 bp, Homo sapiens
gatacacactgtttc

SEQ ID NO: 587673 - DNA, 15 bp, Homo sapiens
atacacactgtttct

SEQ ID NO: 587674 - DNA, 15 bp, Homo sapiens
tacacactgtttctc

SEQ ID NO: 587675 - DNA, 15 bp, Homo sapiens
acacactgtttctct

SEQ ID NO: 587676 - DNA, 15 bp, Homo sapiens
cacactgtttctctc

SEQ ID NO: 587677 - DNA, 15 bp, Homo sapiens
acactgtttctctca

SEQ ID NO: 587678 - DNA, 15 bp, Homo sapiens
cactgtttctctcag

SEQ ID NO: 587679 - DNA, 15 bp, Homo sapiens
actgtttctctcagt

SEQ ID NO: 587680 - DNA, 15 bp, Homo sapiens
ctgtttctctcagtc

SEQ ID NO: 587681 - DNA, 15 bp, Homo sapiens
tgtttctctcagtcc

SEQ ID NO: 587682 - DNA, 15 bp, Homo sapiens
gtttctctcagtcct

SEQ ID NO: 587683 - DNA, 15 bp, Homo sapiens
tttctctcagtcctc

SEQ ID NO: 587684 - DNA, 15 bp, Homo sapiens
ttctctcagtcctcc

SEQ ID NO: 587685 - DNA, 15 bp, Homo sapiens
tctctcagtcctccc

SEQ ID NO: 587686 - DNA, 15 bp, Homo sapiens
ctctcagtcctccca

SEQ ID NO: 587687 - DNA, 15 bp, Homo sapiens
tctcagtcctcccaa

SEQ ID NO: 587688 - DNA, 15 bp, Homo sapiens
ctcagtcctcccaac

SEQ ID NO: 587689 - DNA, 15 bp, Homo sapiens
tcagtcctcccaacc

SEQ ID NO: 587690 - DNA, 15 bp, Homo sapiens
cagtcctcccaacca

SEQ ID NO: 587691 - DNA, 15 bp, Homo sapiens
agtcctcccaaccac

SEQ ID NO: 587692 - DNA, 15 bp, Homo sapiens
gtcctcccaaccacc

SEQ ID NO: 587693 - DNA, 15 bp, Homo sapiens
tcctcccaaccacct

SEQ ID NO: 587694 - DNA, 15 bp, Homo sapiens
cctcccaaccaccta

SEQ ID NO: 587695 - DNA, 15 bp, Homo sapiens
ctcccaaccacctag

SEQ ID NO: 587696 - DNA, 15 bp, Homo sapiens
tcccaaccacctagg

SEQ ID NO: 587697 - DNA, 15 bp, Homo sapiens
cccaaccacctaggt

SEQ ID NO: 587698 - DNA, 15 bp, Homo sapiens
ccaaccacctaggta

SEQ ID NO: 587699 - DNA, 15 bp, Homo sapiens
caaccacctaggtaa

SEQ ID NO: 587700 - DNA, 15 bp, Homo sapiens
aaccacctaggtaac

SEQ ID NO: 587701 - DNA, 15 bp, Homo sapiens
accacctaggtaaca

SEQ ID NO: 587702 - DNA, 15 bp, Homo sapiens
ccacctaggtaacag

SEQ ID NO: 587703 - DNA, 15 bp, Homo sapiens
cacctaggtaacagg

SEQ ID NO: 587704 - DNA, 15 bp, Homo sapiens
acctaggtaacaggc

SEQ ID NO: 587705 - DNA, 15 bp, Homo sapiens
cctaggtaacaggca

SEQ ID NO: 587706 - DNA, 15 bp, Homo sapiens
ctaggtaacaggcag

SEQ ID NO: 587707 - DNA, 15 bp, Homo sapiens
taggtaacaggcagg

SEQ ID NO: 587708 - DNA, 15 bp, Homo sapiens
aggtaacaggcaggg

SEQ ID NO: 587709 - DNA, 15 bp, Homo sapiens
ggtaacaggcaggga

SEQ ID NO: 587710 - DNA, 15 bp, Homo sapiens
gtaacaggcagggaa

SEQ ID NO: 587711 - DNA, 15 bp, Homo sapiens
taacaggcagggaag

SEQ ID NO: 587712 - DNA, 15 bp, Homo sapiens
aacaggcagggaagg

SEQ ID NO: 587713 - DNA, 15 bp, Homo sapiens
acaggcagggaaggt

SEQ ID NO: 587714 - DNA, 15 bp, Homo sapiens
caggcagggaaggtg

SEQ ID NO: 587715 - DNA, 15 bp, Homo sapiens
aggcagggaaggtgt

SEQ ID NO: 587716 - DNA, 15 bp, Homo sapiens
ggcagggaaggtgtt

SEQ ID NO: 587717 - DNA, 15 bp, Homo sapiens
gcagggaaggtgtta

SEQ ID NO: 587718 - DNA, 15 bp, Homo sapiens
cagggaaggtgttac

SEQ ID NO: 587719 - DNA, 15 bp, Homo sapiens
agggaaggtgttact

SEQ ID NO: 587720 - DNA, 15 bp, Homo sapiens
gggaaggtgttactg

SEQ ID NO: 587721 - DNA, 15 bp, Homo sapiens
ggaaggtgttactgt

SEQ ID NO: 587722 - DNA, 15 bp, Homo sapiens
gaaggtgttactgtt

SEQ ID NO: 587723 - DNA, 15 bp, Homo sapiens
aaggtgttactgttg

SEQ ID NO: 587724 - DNA, 15 bp, Homo sapiens
aggtgttactgttgc

SEQ ID NO: 587725 - DNA, 15 bp, Homo sapiens
ggtgttactgttgcc

SEQ ID NO: 587726 - DNA, 15 bp, Homo sapiens
gtgttactgttgcct

SEQ ID NO: 587727 - DNA, 15 bp, Homo sapiens
tgttactgttgcctg

SEQ ID NO: 587728 - DNA, 15 bp, Homo sapiens
gttactgttgcctgt

SEQ ID NO: 587729 - DNA, 15 bp, Homo sapiens
ttactgttgcctgtt

SEQ ID NO: 587730 - DNA, 15 bp, Homo sapiens
tactgttgcctgtta

SEQ ID NO: 587731 - DNA, 15 bp, Homo sapiens
actgttgcctgttag

SEQ ID NO: 587732 - DNA, 15 bp, Homo sapiens
ctgttgcctgttagg

SEQ ID NO: 587733 - DNA, 15 bp, Homo sapiens
tgttgcctgttagga

SEQ ID NO: 587734 - DNA, 15 bp, Homo sapiens
gttgcctgttaggaa

SEQ ID NO: 587735 - DNA, 15 bp, Homo sapiens
ttgcctgttaggaaa

SEQ ID NO: 587736 - DNA, 15 bp, Homo sapiens
tgcctgttaggaaag

SEQ ID NO: 587737 - DNA, 15 bp, Homo sapiens
gcctgttaggaaaga

SEQ ID NO: 587738 - DNA, 15 bp, Homo sapiens
cctgttaggaaagag

SEQ ID NO: 587739 - DNA, 15 bp, Homo sapiens
ctgttaggaaagagg

SEQ ID NO: 587740 - DNA, 15 bp, Homo sapiens
tgttaggaaagagga

SEQ ID NO: 587741 - DNA, 15 bp, Homo sapiens
gttaggaaagaggac

SEQ ID NO: 587742 - DNA, 15 bp, Homo sapiens
ttaggaaagaggaca

SEQ ID NO: 587743 - DNA, 15 bp, Homo sapiens
taggaaagaggacag

SEQ ID NO: 587744 - DNA, 15 bp, Homo sapiens
aggaaagaggacagc

SEQ ID NO: 587745 - DNA, 15 bp, Homo sapiens
ggaaagaggacagcc

SEQ ID NO: 587746 - DNA, 15 bp, Homo sapiens
gaaagaggacagccc

SEQ ID NO: 587747 - DNA, 15 bp, Homo sapiens
aaagaggacagccct

SEQ ID NO: 587748 - DNA, 15 bp, Homo sapiens
aagaggacagccctg

SEQ ID NO: 587749 - DNA, 15 bp, Homo sapiens
agaggacagccctga

SEQ ID NO: 587750 - DNA, 15 bp, Homo sapiens
gaggacagccctgaa

SEQ ID NO: 587751 - DNA, 15 bp, Homo sapiens
aggacagccctgaaa

SEQ ID NO: 587752 - DNA, 15 bp, Homo sapiens
ggacagccctgaaag

SEQ ID NO: 587753 - DNA, 15 bp, Homo sapiens
gacagccctgaaagc

SEQ ID NO: 587754 - DNA, 15 bp, Homo sapiens
acagccctgaaagct

SEQ ID NO: 587755 - DNA, 15 bp, Homo sapiens
cagccctgaaagctg

SEQ ID NO: 587756 - DNA, 15 bp, Homo sapiens
agccctgaaagctgt

SEQ ID NO: 587757 - DNA, 15 bp, Homo sapiens
gccctgaaagctgtc

SEQ ID NO: 587758 - DNA, 15 bp, Homo sapiens
ccctgaaagctgtcc

SEQ ID NO: 587759 - DNA, 15 bp, Homo sapiens
cctgaaagctgtccc

SEQ ID NO: 587760 - DNA, 15 bp, Homo sapiens
ctgaaagctgtccct

SEQ ID NO: 587761 - DNA, 15 bp, Homo sapiens
tgaaagctgtccctg

SEQ ID NO: 587762 - DNA, 15 bp, Homo sapiens
gaaagctgtccctgg

SEQ ID NO: 587763 - DNA, 15 bp, Homo sapiens
aaagctgtccctggc

SEQ ID NO: 587764 - DNA, 15 bp, Homo sapiens
aagctgtccctggcc

SEQ ID NO: 587765 - DNA, 15 bp, Homo sapiens
agctgtccctggcca

SEQ ID NO: 587766 - DNA, 15 bp, Homo sapiens
gctgtccctggccac

SEQ ID NO: 587767 - DNA, 15 bp, Homo sapiens
ctgtccctggccact

SEQ ID NO: 587768 - DNA, 15 bp, Homo sapiens
tgtccctggccactg

SEQ ID NO: 587769 - DNA, 15 bp, Homo sapiens
gtccctggccactga

SEQ ID NO: 587770 - DNA, 15 bp, Homo sapiens
tccctggccactgaa

SEQ ID NO: 587771 - DNA, 15 bp, Homo sapiens
ccctggccactgaag

SEQ ID NO: 587772 - DNA, 15 bp, Homo sapiens
cctggccactgaagc

SEQ ID NO: 587773 - DNA, 15 bp, Homo sapiens
ctggccactgaagca

SEQ ID NO: 587774 - DNA, 15 bp, Homo sapiens
tggccactgaagcaa

SEQ ID NO: 587775 - DNA, 15 bp, Homo sapiens
ggccactgaagcaac

SEQ ID NO: 587776 - DNA, 15 bp, Homo sapiens
gccactgaagcaacc

SEQ ID NO: 587777 - DNA, 15 bp, Homo sapiens
ccactgaagcaaccc

SEQ ID NO: 587778 - DNA, 15 bp, Homo sapiens
cactgaagcaaccca

SEQ ID NO: 587779 - DNA, 15 bp, Homo sapiens
actgaagcaacccag

SEQ ID NO: 587780 - DNA, 15 bp, Homo sapiens
ctgaagcaacccagg

SEQ ID NO: 587781 - DNA, 15 bp, Homo sapiens
tgaagcaacccaggt

SEQ ID NO: 587782 - DNA, 15 bp, Homo sapiens
gaagcaacccaggtc

SEQ ID NO: 587783 - DNA, 15 bp, Homo sapiens
aagcaacccaggtct

SEQ ID NO: 587784 - DNA, 15 bp, Homo sapiens
agcaacccaggtctt

SEQ ID NO: 587785 - DNA, 15 bp, Homo sapiens
gcaacccaggtcttc

SEQ ID NO: 587786 - DNA, 15 bp, Homo sapiens
caacccaggtcttcc

SEQ ID NO: 587787 - DNA, 15 bp, Homo sapiens
aacccaggtcttcca

SEQ ID NO: 587788 - DNA, 15 bp, Homo sapiens
acccaggtcttccag

SEQ ID NO: 587789 - DNA, 15 bp, Homo sapiens
cccaggtcttccagc

SEQ ID NO: 587790 - DNA, 15 bp, Homo sapiens
ccaggtcttccagcc

SEQ ID NO: 587791 - DNA, 15 bp, Homo sapiens
caggtcttccagccc

SEQ ID NO: 587792 - DNA, 15 bp, Homo sapiens
aggtcttccagcccc

SEQ ID NO: 587793 - DNA, 15 bp, Homo sapiens
ggtcttccagcccca

SEQ ID NO: 587794 - DNA, 15 bp, Homo sapiens
gtcttccagccccag

SEQ ID NO: 587795 - DNA, 15 bp, Homo sapiens
tcttccagccccagg

SEQ ID NO: 587796 - DNA, 15 bp, Homo sapiens
cttccagccccaggg

SEQ ID NO: 587797 - DNA, 15 bp, Homo sapiens
ttccagccccaggga

SEQ ID NO: 587798 - DNA, 15 bp, Homo sapiens
tccagccccagggag

SEQ ID NO: 587799 - DNA, 15 bp, Homo sapiens
ccagccccagggaga

SEQ ID NO: 587800 - DNA, 15 bp, Homo sapiens
cagccccagggagag

SEQ ID NO: 587801 - DNA, 15 bp, Homo sapiens
agccccagggagagc

SEQ ID NO: 587802 - DNA, 15 bp, Homo sapiens
gccccagggagagcc

SEQ ID NO: 587803 - DNA, 15 bp, Homo sapiens
ccccagggagagccg

SEQ ID NO: 587804 - DNA, 15 bp, Homo sapiens
cccagggagagccgc

SEQ ID NO: 587805 - DNA, 15 bp, Homo sapiens
ccagggagagccgcc

SEQ ID NO: 587806 - DNA, 15 bp, Homo sapiens
cagggagagccgcct

SEQ ID NO: 587807 - DNA, 15 bp, Homo sapiens
agggagagccgcctt

SEQ ID NO: 587808 - DNA, 15 bp, Homo sapiens
gggagagccgccttt

SEQ ID NO: 587809 - DNA, 15 bp, Homo sapiens
ggagagccgcctttc

SEQ ID NO: 587810 - DNA, 15 bp, Homo sapiens
gagagccgcctttcc

SEQ ID NO: 587811 - DNA, 15 bp, Homo sapiens
agagccgcctttcca

SEQ ID NO: 587812 - DNA, 15 bp, Homo sapiens
gagccgcctttccat

SEQ ID NO: 587813 - DNA, 15 bp, Homo sapiens
agccgcctttccatt

SEQ ID NO: 587814 - DNA, 15 bp, Homo sapiens
gccgcctttccattg

SEQ ID NO: 587815 - DNA, 15 bp, Homo sapiens
ccgcctttccattgt

SEQ ID NO: 587816 - DNA, 15 bp, Homo sapiens
cgcctttccattgtt

SEQ ID NO: 587817 - DNA, 15 bp, Homo sapiens
gcctttccattgttc

SEQ ID NO: 587818 - DNA, 15 bp, Homo sapiens
cctttccattgttcc

SEQ ID NO: 587819 - DNA, 15 bp, Homo sapiens
ctttccattgttcca

SEQ ID NO: 587820 - DNA, 15 bp, Homo sapiens
tttccattgttccag

SEQ ID NO: 587821 - DNA, 15 bp, Homo sapiens
ttccattgttccaga

SEQ ID NO: 587822 - DNA, 15 bp, Homo sapiens
tccattgttccagac

SEQ ID NO: 587823 - DNA, 15 bp, Homo sapiens
ccattgttccagaca

SEQ ID NO: 587824 - DNA, 15 bp, Homo sapiens
cattgttccagacaa

SEQ ID NO: 587825 - DNA, 15 bp, Homo sapiens
attgttccagacaaa

SEQ ID NO: 587826 - DNA, 15 bp, Homo sapiens
ttgttccagacaaag

SEQ ID NO: 587827 - DNA, 15 bp, Homo sapiens
tgttccagacaaagc

SEQ ID NO: 587828 - DNA, 15 bp, Homo sapiens
gttccagacaaagca

SEQ ID NO: 587829 - DNA, 15 bp, Homo sapiens
ttccagacaaagcag

SEQ ID NO: 587830 - DNA, 15 bp, Homo sapiens
tccagacaaagcaga

SEQ ID NO: 587831 - DNA, 15 bp, Homo sapiens
ccagacaaagcagag

SEQ ID NO: 587832 - DNA, 15 bp, Homo sapiens
cagacaaagcagaga

SEQ ID NO: 587833 - DNA, 15 bp, Homo sapiens
agacaaagcagagac

SEQ ID NO: 587834 - DNA, 15 bp, Homo sapiens
gacaaagcagagaca

SEQ ID NO: 587835 - DNA, 15 bp, Homo sapiens
acaaagcagagacag

SEQ ID NO: 587836 - DNA, 15 bp, Homo sapiens
caaagcagagacagg

SEQ ID NO: 587837 - DNA, 15 bp, Homo sapiens
aaagcagagacaggc

SEQ ID NO: 587838 - DNA, 15 bp, Homo sapiens
aagcagagacaggca

SEQ ID NO: 587839 - DNA, 15 bp, Homo sapiens
agcagagacaggcat

SEQ ID NO: 587840 - DNA, 15 bp, Homo sapiens
gcagagacaggcatg

SEQ ID NO: 587841 - DNA, 15 bp, Homo sapiens
cagagacaggcatgg

SEQ ID NO: 587842 - DNA, 15 bp, Homo sapiens
agagacaggcatggg

SEQ ID NO: 587843 - DNA, 15 bp, Homo sapiens
gagacaggcatgggg

SEQ ID NO: 587844 - DNA, 15 bp, Homo sapiens
agacaggcatggggg

SEQ ID NO: 587845 - DNA, 15 bp, Homo sapiens
gacaggcatggggga

SEQ ID NO: 587846 - DNA, 15 bp, Homo sapiens
acaggcatgggggag

SEQ ID NO: 587847 - DNA, 15 bp, Homo sapiens
caggcatgggggagc

SEQ ID NO: 587848 - DNA, 15 bp, Homo sapiens
aggcatgggggagcg

SEQ ID NO: 587849 - DNA, 15 bp, Homo sapiens
ggcatgggggagcgg

SEQ ID NO: 587850 - DNA, 15 bp, Homo sapiens
gcatgggggagcggg

SEQ ID NO: 587851 - DNA, 15 bp, Homo sapiens
catgggggagcggga

SEQ ID NO: 587852 - DNA, 15 bp, Homo sapiens
atgggggagcgggag

SEQ ID NO: 587853 - DNA, 15 bp, Homo sapiens
tgggggagcgggaga

SEQ ID NO: 587854 - DNA, 15 bp, Homo sapiens
gggggagcgggagag

SEQ ID NO: 587855 - DNA, 15 bp, Homo sapiens
ggggagcgggagagg

SEQ ID NO: 587856 - DNA, 15 bp, Homo sapiens
gggagcgggagaggg

SEQ ID NO: 587857 - DNA, 15 bp, Homo sapiens
ggagcgggagaggga

SEQ ID NO: 587858 - DNA, 15 bp, Homo sapiens
gagcgggagagggac

SEQ ID NO: 587859 - DNA, 15 bp, Homo sapiens
agcgggagagggact

SEQ ID NO: 587860 - DNA, 15 bp, Homo sapiens
gcgggagagggactc

SEQ ID NO: 587861 - DNA, 15 bp, Homo sapiens
cgggagagggactcc

SEQ ID NO: 587862 - DNA, 15 bp, Homo sapiens
gggagagggactcct

SEQ ID NO: 587863 - DNA, 15 bp, Homo sapiens
ggagagggactcctg

SEQ ID NO: 587864 - DNA, 15 bp, Homo sapiens
gagagggactcctgt

SEQ ID NO: 587865 - DNA, 15 bp, Homo sapiens
agagggactcctgtg

SEQ ID NO: 587866 - DNA, 15 bp, Homo sapiens
gagggactcctgtgg

SEQ ID NO: 587867 - DNA, 15 bp, Homo sapiens
agggactcctgtggg

SEQ ID NO: 587868 - DNA, 15 bp, Homo sapiens
gggactcctgtgggc

SEQ ID NO: 587869 - DNA, 15 bp, Homo sapiens
ggactcctgtgggca

SEQ ID NO: 587870 - DNA, 15 bp, Homo sapiens
gactcctgtgggcag

SEQ ID NO: 587871 - DNA, 15 bp, Homo sapiens
actcctgtgggcagg

SEQ ID NO: 587872 - DNA, 15 bp, Homo sapiens
ctcctgtgggcagga

SEQ ID NO: 587873 - DNA, 15 bp, Homo sapiens
tcctgtgggcaggaa

SEQ ID NO: 587874 - DNA, 15 bp, Homo sapiens
cctgtgggcaggaac

SEQ ID NO: 587875 - DNA, 15 bp, Homo sapiens
ctgtgggcaggaacc

SEQ ID NO: 587876 - DNA, 15 bp, Homo sapiens
tgtgggcaggaacca

SEQ ID NO: 587877 - DNA, 15 bp, Homo sapiens
gtgggcaggaaccag

SEQ ID NO: 587878 - DNA, 15 bp, Homo sapiens
tgggcaggaaccagg

SEQ ID NO: 587879 - DNA, 15 bp, Homo sapiens
gggcaggaaccaggc

SEQ ID NO: 587880 - DNA, 15 bp, Homo sapiens
ggcaggaaccaggcc

SEQ ID NO: 587881 - DNA, 15 bp, Homo sapiens
gcaggaaccaggccc

SEQ ID NO: 587882 - DNA, 15 bp, Homo sapiens
caggaaccaggccct

SEQ ID NO: 587883 - DNA, 15 bp, Homo sapiens
aggaaccaggcccta

SEQ ID NO: 587884 - DNA, 15 bp, Homo sapiens
ggaaccaggccctac

SEQ ID NO: 587885 - DNA, 15 bp, Homo sapiens
gaaccaggccctact

SEQ ID NO: 587886 - DNA, 15 bp, Homo sapiens
aaccaggccctactc

SEQ ID NO: 587887 - DNA, 15 bp, Homo sapiens
accaggccctactcc

SEQ ID NO: 587888 - DNA, 15 bp, Homo sapiens
ccaggccctactccg

SEQ ID NO: 587889 - DNA, 15 bp, Homo sapiens
caggccctactccgg

SEQ ID NO: 587890 - DNA, 15 bp, Homo sapiens
aggccctactccggg

SEQ ID NO: 587891 - DNA, 15 bp, Homo sapiens
ggccctactccgggg

SEQ ID NO: 587892 - DNA, 15 bp, Homo sapiens
gccctactccggggc

SEQ ID NO: 587893 - DNA, 15 bp, Homo sapiens
ccctactccggggca

SEQ ID NO: 587894 - DNA, 15 bp, Homo sapiens
cctactccggggcag

SEQ ID NO: 587895 - DNA, 15 bp, Homo sapiens
ctactccggggcagt

SEQ ID NO: 587896 - DNA, 15 bp, Homo sapiens
tactccggggcagtg

SEQ ID NO: 587897 - DNA, 15 bp, Homo sapiens
actccggggcagtgc

SEQ ID NO: 587898 - DNA, 15 bp, Homo sapiens
ctccggggcagtgca

SEQ ID NO: 587899 - DNA, 15 bp, Homo sapiens
tccggggcagtgcag

SEQ ID NO: 587900 - DNA, 15 bp, Homo sapiens
ccggggcagtgcagc

SEQ ID NO: 587901 - DNA, 15 bp, Homo sapiens
cggggcagtgcagct

SEQ ID NO: 587902 - DNA, 15 bp, Homo sapiens
ggggcagtgcagctc

SEQ ID NO: 587903 - DNA, 15 bp, Homo sapiens
gggcagtgcagctct

SEQ ID NO: 587904 - DNA, 15 bp, Homo sapiens
ggcagtgcagctctc

SEQ ID NO: 587905 - DNA, 15 bp, Homo sapiens
gcagtgcagctctcg

SEQ ID NO: 587906 - DNA, 15 bp, Homo sapiens
cagtgcagctctcgc

SEQ ID NO: 587907 - DNA, 15 bp, Homo sapiens
agtgcagctctcgct

SEQ ID NO: 587908 - DNA, 15 bp, Homo sapiens
gtgcagctctcgctg

SEQ ID NO: 587909 - DNA, 15 bp, Homo sapiens
tgcagctctcgctga

SEQ ID NO: 587910 - DNA, 15 bp, Homo sapiens
gcagctctcgctgac

SEQ ID NO: 587911 - DNA, 15 bp, Homo sapiens
cagctctcgctgaca

SEQ ID NO: 587912 - DNA, 15 bp, Homo sapiens
agctctcgctgacag

SEQ ID NO: 587913 - DNA, 15 bp, Homo sapiens
gctctcgctgacagt

SEQ ID NO: 587914 - DNA, 15 bp, Homo sapiens
ctctcgctgacagtc

SEQ ID NO: 587915 - DNA, 15 bp, Homo sapiens
tctcgctgacagtcc

SEQ ID NO: 587916 - DNA, 15 bp, Homo sapiens
ctcgctgacagtccc

SEQ ID NO: 587917 - DNA, 15 bp, Homo sapiens
tcgctgacagtcccc

SEQ ID NO: 587918 - DNA, 15 bp, Homo sapiens
cgctgacagtccccc

SEQ ID NO: 587919 - DNA, 15 bp, Homo sapiens
gctgacagtcccccc

SEQ ID NO: 587920 - DNA, 15 bp, Homo sapiens
ctgacagtccccccg

SEQ ID NO: 587921 - DNA, 15 bp, Homo sapiens
tgacagtccccccga

SEQ ID NO: 587922 - DNA, 15 bp, Homo sapiens
gacagtccccccgac

SEQ ID NO: 587923 - DNA, 15 bp, Homo sapiens
acagtccccccgacc

SEQ ID NO: 587924 - DNA, 15 bp, Homo sapiens
cagtccccccgacct

SEQ ID NO: 587925 - DNA, 15 bp, Homo sapiens
agtccccccgacctc

SEQ ID NO: 587926 - DNA, 15 bp, Homo sapiens
gtccccccgacctcc

SEQ ID NO: 587927 - DNA, 15 bp, Homo sapiens
tccccccgacctcca

SEQ ID NO: 587928 - DNA, 15 bp, Homo sapiens
ccccccgacctccac

SEQ ID NO: 587929 - DNA, 15 bp, Homo sapiens
cccccgacctccacc

SEQ ID NO: 587930 - DNA, 15 bp, Homo sapiens
ccccgacctccaccc

SEQ ID NO: 587931 - DNA, 15 bp, Homo sapiens
cccgacctccacccc

SEQ ID NO: 587932 - DNA, 15 bp, Homo sapiens
ccgacctccacccca

SEQ ID NO: 587933 - DNA, 15 bp, Homo sapiens
cgacctccaccccag

SEQ ID NO: 587934 - DNA, 15 bp, Homo sapiens
gacctccaccccagg

SEQ ID NO: 587935 - DNA, 15 bp, Homo sapiens
acctccaccccaggc

SEQ ID NO: 587936 - DNA, 15 bp, Homo sapiens
cctccaccccaggca

SEQ ID NO: 587937 - DNA, 15 bp, Homo sapiens
ctccaccccaggcac

SEQ ID NO: 587938 - DNA, 15 bp, Homo sapiens
tccaccccaggcacg

SEQ ID NO: 587939 - DNA, 15 bp, Homo sapiens
ccaccccaggcacgg

SEQ ID NO: 587940 - DNA, 15 bp, Homo sapiens
caccccaggcacggg

SEQ ID NO: 587941 - DNA, 15 bp, Homo sapiens
accccaggcacgggc

SEQ ID NO: 587942 - DNA, 15 bp, Homo sapiens
ccccaggcacgggct

SEQ ID NO: 587943 - DNA, 15 bp, Homo sapiens
cccaggcacgggctg

SEQ ID NO: 587944 - DNA, 15 bp, Homo sapiens
ccaggcacgggctgc

SEQ ID NO: 587945 - DNA, 15 bp, Homo sapiens
caggcacgggctgca

SEQ ID NO: 587946 - DNA, 15 bp, Homo sapiens
aggcacgggctgcaa

SEQ ID NO: 587947 - DNA, 15 bp, Homo sapiens
ggcacgggctgcaat

SEQ ID NO: 587948 - DNA, 15 bp, Homo sapiens
gcacgggctgcaatg

SEQ ID NO: 587949 - DNA, 15 bp, Homo sapiens
cacgggctgcaatgc

SEQ ID NO: 587950 - DNA, 15 bp, Homo sapiens
acgggctgcaatgcc

SEQ ID NO: 587951 - DNA, 15 bp, Homo sapiens
cgggctgcaatgcct

SEQ ID NO: 587952 - DNA, 15 bp, Homo sapiens
gggctgcaatgcctg

SEQ ID NO: 587953 - DNA, 15 bp, Homo sapiens
ggctgcaatgcctgc

SEQ ID NO: 587954 - DNA, 15 bp, Homo sapiens
gctgcaatgcctgct

SEQ ID NO: 587955 - DNA, 15 bp, Homo sapiens
ctgcaatgcctgcta

SEQ ID NO: 587956 - DNA, 15 bp, Homo sapiens
tgcaatgcctgctac

SEQ ID NO: 587957 - DNA, 15 bp, Homo sapiens
gcaatgcctgctaca

SEQ ID NO: 587958 - DNA, 15 bp, Homo sapiens
caatgcctgctacat

SEQ ID NO: 587959 - DNA, 15 bp, Homo sapiens
aatgcctgctacatg

SEQ ID NO: 587960 - DNA, 15 bp, Homo sapiens
atgcctgctacatgg

SEQ ID NO: 587961 - DNA, 15 bp, Homo sapiens
tgcctgctacatgga

SEQ ID NO: 587962 - DNA, 15 bp, Homo sapiens
gcctgctacatggag

SEQ ID NO: 587963 - DNA, 15 bp, Homo sapiens
cctgctacatggagg

SEQ ID NO: 587964 - DNA, 15 bp, Homo sapiens
ctgctacatggagga

SEQ ID NO: 587965 - DNA, 15 bp, Homo sapiens
tgctacatggaggag

SEQ ID NO: 587966 - DNA, 15 bp, Homo sapiens
gctacatggaggaga

SEQ ID NO: 587967 - DNA, 15 bp, Homo sapiens
ctacatggaggagat

SEQ ID NO: 587968 - DNA, 15 bp, Homo sapiens
tacatggaggagatg

SEQ ID NO: 587969 - DNA, 15 bp, Homo sapiens
acatggaggagatgc

SEQ ID NO: 587970 - DNA, 15 bp, Homo sapiens
catggaggagatgca

SEQ ID NO: 587971 - DNA, 15 bp, Homo sapiens
atggaggagatgcag

SEQ ID NO: 587972 - DNA, 15 bp, Homo sapiens
tggaggagatgcaga

SEQ ID NO: 587973 - DNA, 15 bp, Homo sapiens
ggaggagatgcagaa

SEQ ID NO: 587974 - DNA, 15 bp, Homo sapiens
gaggagatgcagaat

SEQ ID NO: 587975 - DNA, 15 bp, Homo sapiens
aggagatgcagaatg

SEQ ID NO: 587976 - DNA, 15 bp, Homo sapiens
ggagatgcagaatgt

SEQ ID NO: 587977 - DNA, 15 bp, Homo sapiens
gagatgcagaatgtg

SEQ ID NO: 587978 - DNA, 15 bp, Homo sapiens
agatgcagaatgtgg

SEQ ID NO: 587979 - DNA, 15 bp, Homo sapiens
gatgcagaatgtgga

SEQ ID NO: 587980 - DNA, 15 bp, Homo sapiens
atgcagaatgtggag

SEQ ID NO: 587981 - DNA, 15 bp, Homo sapiens
tgcagaatgtggagc

SEQ ID NO: 587982 - DNA, 15 bp, Homo sapiens
gcagaatgtggagct

SEQ ID NO: 587983 - DNA, 15 bp, Homo sapiens
cagaatgtggagctg

SEQ ID NO: 587984 - DNA, 15 bp, Homo sapiens
agaatgtggagctgg

SEQ ID NO: 587985 - DNA, 15 bp, Homo sapiens
gaatgtggagctggt

SEQ ID NO: 587986 - DNA, 15 bp, Homo sapiens
aatgtggagctggtg

SEQ ID NO: 587987 - DNA, 15 bp, Homo sapiens
atgtggagctggtgg

SEQ ID NO: 587988 - DNA, 15 bp, Homo sapiens
tgtggagctggtgga

SEQ ID NO: 587989 - DNA, 15 bp, Homo sapiens
gtggagctggtggag

SEQ ID NO: 587990 - DNA, 15 bp, Homo sapiens
tggagctggtggagg

SEQ ID NO: 587991 - DNA, 15 bp, Homo sapiens
ggagctggtggaggg

SEQ ID NO: 587992 - DNA, 15 bp, Homo sapiens
gagctggtggagggg

SEQ ID NO: 587993 - DNA, 15 bp, Homo sapiens
agctggtggaggggg

SEQ ID NO: 587994 - DNA, 15 bp, Homo sapiens
gctggtggaggggga

SEQ ID NO: 587995 - DNA, 15 bp, Homo sapiens
ctggtggagggggac

SEQ ID NO: 587996 - DNA, 15 bp, Homo sapiens
tggtggagggggacg

SEQ ID NO: 587997 - DNA, 15 bp, Homo sapiens
ggtggagggggacga

SEQ ID NO: 587998 - DNA, 15 bp, Homo sapiens
gtggagggggacgag

SEQ ID NO: 587999 - DNA, 15 bp, Homo sapiens
tggagggggacgagg

SEQ ID NO: 588000 - DNA, 15 bp, Homo sapiens
ggagggggacgaggg

SEQ ID NO: 588001 - DNA, 15 bp, Homo sapiens
gagggggacgagggc

SEQ ID NO: 588002 - DNA, 15 bp, Homo sapiens
agggggacgagggcc

SEQ ID NO: 588003 - DNA, 15 bp, Homo sapiens
gggggacgagggccg

SEQ ID NO: 588004 - DNA, 15 bp, Homo sapiens
ggggacgagggccgc

SEQ ID NO: 588005 - DNA, 15 bp, Homo sapiens
gggacgagggccgca

SEQ ID NO: 588006 - DNA, 15 bp, Homo sapiens
ggacgagggccgcat

SEQ ID NO: 588007 - DNA, 15 bp, Homo sapiens
gacgagggccgcatg

SEQ ID NO: 588008 - DNA, 15 bp, Homo sapiens
acgagggccgcatgt

SEQ ID NO: 588009 - DNA, 15 bp, Homo sapiens
cgagggccgcatgtg

SEQ ID NO: 588010 - DNA, 15 bp, Homo sapiens
gagggccgcatgtgc

SEQ ID NO: 588011 - DNA, 15 bp, Homo sapiens
agggccgcatgtgcg

SEQ ID NO: 588012 - DNA, 15 bp, Homo sapiens
gggccgcatgtgcgt

SEQ ID NO: 588013 - DNA, 15 bp, Homo sapiens
ggccgcatgtgcgtc

SEQ ID NO: 588014 - DNA, 15 bp, Homo sapiens
gccgcatgtgcgtca

SEQ ID NO: 588015 - DNA, 15 bp, Homo sapiens
ccgcatgtgcgtcaa

SEQ ID NO: 588016 - DNA, 15 bp, Homo sapiens
cgcatgtgcgtcaat

SEQ ID NO: 588017 - DNA, 15 bp, Homo sapiens
gcatgtgcgtcaata

SEQ ID NO: 588018 - DNA, 15 bp, Homo sapiens
catgtgcgtcaatac

SEQ ID NO: 588019 - DNA, 15 bp, Homo sapiens
atgtgcgtcaatacc

SEQ ID NO: 588020 - DNA, 15 bp, Homo sapiens
tgtgcgtcaataccg

SEQ ID NO: 588021 - DNA, 15 bp, Homo sapiens
gtgcgtcaataccga

SEQ ID NO: 588022 - DNA, 15 bp, Homo sapiens
tgcgtcaataccgag

SEQ ID NO: 588023 - DNA, 15 bp, Homo sapiens
gcgtcaataccgagt

SEQ ID NO: 588024 - DNA, 15 bp, Homo sapiens
cgtcaataccgagtg

SEQ ID NO: 588025 - DNA, 15 bp, Homo sapiens
gtcaataccgagtgg

SEQ ID NO: 588026 - DNA, 15 bp, Homo sapiens
tcaataccgagtggg

SEQ ID NO: 588027 - DNA, 15 bp, Homo sapiens
caataccgagtgggg

SEQ ID NO: 588028 - DNA, 15 bp, Homo sapiens
aataccgagtggggc

SEQ ID NO: 588029 - DNA, 15 bp, Homo sapiens
ataccgagtggggcg

SEQ ID NO: 588030 - DNA, 15 bp, Homo sapiens
taccgagtggggcgc

SEQ ID NO: 588031 - DNA, 15 bp, Homo sapiens
accgagtggggcgcc

SEQ ID NO: 588032 - DNA, 15 bp, Homo sapiens
ccgagtggggcgcct

SEQ ID NO: 588033 - DNA, 15 bp, Homo sapiens
cgagtggggcgcctt

SEQ ID NO: 588034 - DNA, 15 bp, Homo sapiens
gagtggggcgccttc

SEQ ID NO: 588035 - DNA, 15 bp, Homo sapiens
agtggggcgccttcg

SEQ ID NO: 588036 - DNA, 15 bp, Homo sapiens
gtggggcgccttcgg

SEQ ID NO: 588037 - DNA, 15 bp, Homo sapiens
tggggcgccttcggg

SEQ ID NO: 588038 - DNA, 15 bp, Homo sapiens
ggggcgccttcgggg

SEQ ID NO: 588039 - DNA, 15 bp, Homo sapiens
gggcgccttcgggga

SEQ ID NO: 588040 - DNA, 15 bp, Homo sapiens
ggcgccttcggggac

SEQ ID NO: 588041 - DNA, 15 bp, Homo sapiens
gcgccttcggggact

SEQ ID NO: 588042 - DNA, 15 bp, Homo sapiens
cgccttcggggactc

SEQ ID NO: 588043 - DNA, 15 bp, Homo sapiens
gccttcggggactcc

SEQ ID NO: 588044 - DNA, 15 bp, Homo sapiens
ccttcggggactccg

SEQ ID NO: 588045 - DNA, 15 bp, Homo sapiens
cttcggggactccgg

SEQ ID NO: 588046 - DNA, 15 bp, Homo sapiens
ttcggggactccggc

SEQ ID NO: 588047 - DNA, 15 bp, Homo sapiens
tcggggactccggcg

SEQ ID NO: 588048 - DNA, 15 bp, Homo sapiens
cggggactccggcga

SEQ ID NO: 588049 - DNA, 15 bp, Homo sapiens
ggggactccggcgag

SEQ ID NO: 588050 - DNA, 15 bp, Homo sapiens
gggactccggcgagc

SEQ ID NO: 588051 - DNA, 15 bp, Homo sapiens
ggactccggcgagct

SEQ ID NO: 588052 - DNA, 15 bp, Homo sapiens
gactccggcgagctg

SEQ ID NO: 588053 - DNA, 15 bp, Homo sapiens
actccggcgagctgg

SEQ ID NO: 588054 - DNA, 15 bp, Homo sapiens
ctccggcgagctgga

SEQ ID NO: 588055 - DNA, 15 bp, Homo sapiens
tccggcgagctggac

SEQ ID NO: 588056 - DNA, 15 bp, Homo sapiens
ccggcgagctggacg

SEQ ID NO: 588057 - DNA, 15 bp, Homo sapiens
cggcgagctggacga

SEQ ID NO: 588058 - DNA, 15 bp, Homo sapiens
ggcgagctggacgag

SEQ ID NO: 588059 - DNA, 15 bp, Homo sapiens
gcgagctggacgagt

SEQ ID NO: 588060 - DNA, 15 bp, Homo sapiens
cgagctggacgagtt

SEQ ID NO: 588061 - DNA, 15 bp, Homo sapiens
gagctggacgagttc

SEQ ID NO: 588062 - DNA, 15 bp, Homo sapiens
agctggacgagttcc

SEQ ID NO: 588063 - DNA, 15 bp, Homo sapiens
gctggacgagttcct

SEQ ID NO: 588064 - DNA, 15 bp, Homo sapiens
ctggacgagttcctg

SEQ ID NO: 588065 - DNA, 15 bp, Homo sapiens
tggacgagttcctgc

SEQ ID NO: 588066 - DNA, 15 bp, Homo sapiens
ggacgagttcctgct

SEQ ID NO: 588067 - DNA, 15 bp, Homo sapiens
gacgagttcctgctg

SEQ ID NO: 588068 - DNA, 15 bp, Homo sapiens
acgagttcctgctgg

SEQ ID NO: 588069 - DNA, 15 bp, Homo sapiens
cgagttcctgctgga

SEQ ID NO: 588070 - DNA, 15 bp, Homo sapiens
gagttcctgctggag

SEQ ID NO: 588071 - DNA, 15 bp, Homo sapiens
agttcctgctggagt

SEQ ID NO: 588072 - DNA, 15 bp, Homo sapiens
gttcctgctggagta

SEQ ID NO: 588073 - DNA, 15 bp, Homo sapiens
ttcctgctggagtat

SEQ ID NO: 588074 - DNA, 15 bp, Homo sapiens
tcctgctggagtatg

SEQ ID NO: 588075 - DNA, 15 bp, Homo sapiens
cctgctggagtatga

SEQ ID NO: 588076 - DNA, 15 bp, Homo sapiens
ctgctggagtatgac

SEQ ID NO: 588077 - DNA, 15 bp, Homo sapiens
tgctggagtatgacc

SEQ ID NO: 588078 - DNA, 15 bp, Homo sapiens
gctggagtatgaccg

SEQ ID NO: 588079 - DNA, 15 bp, Homo sapiens
ctggagtatgaccgc

SEQ ID NO: 588080 - DNA, 15 bp, Homo sapiens
tggagtatgaccgcc

SEQ ID NO: 588081 - DNA, 15 bp, Homo sapiens
ggagtatgaccgcct

SEQ ID NO: 588082 - DNA, 15 bp, Homo sapiens
gagtatgaccgcctg

SEQ ID NO: 588083 - DNA, 15 bp, Homo sapiens
agtatgaccgcctgg

SEQ ID NO: 588084 - DNA, 15 bp, Homo sapiens
gtatgaccgcctggt

SEQ ID NO: 588085 - DNA, 15 bp, Homo sapiens
tatgaccgcctggtg

SEQ ID NO: 588086 - DNA, 15 bp, Homo sapiens
atgaccgcctggtgg

SEQ ID NO: 588087 - DNA, 15 bp, Homo sapiens
tgaccgcctggtgga

SEQ ID NO: 588088 - DNA, 15 bp, Homo sapiens
gaccgcctggtggac

SEQ ID NO: 588089 - DNA, 15 bp, Homo sapiens
accgcctggtggacg

SEQ ID NO: 588090 - DNA, 15 bp, Homo sapiens
ccgcctggtggacga

SEQ ID NO: 588091 - DNA, 15 bp, Homo sapiens
cgcctggtggacgag

SEQ ID NO: 588092 - DNA, 15 bp, Homo sapiens
gcctggtggacgaga

SEQ ID NO: 588093 - DNA, 15 bp, Homo sapiens
cctggtggacgagag

SEQ ID NO: 588094 - DNA, 15 bp, Homo sapiens
ctggtggacgagagc

SEQ ID NO: 588095 - DNA, 15 bp, Homo sapiens
tggtggacgagagct

SEQ ID NO: 588096 - DNA, 15 bp, Homo sapiens
ggtggacgagagctc

SEQ ID NO: 588097 - DNA, 15 bp, Homo sapiens
gtggacgagagctct

SEQ ID NO: 588098 - DNA, 15 bp, Homo sapiens
tggacgagagctctg

SEQ ID NO: 588099 - DNA, 15 bp, Homo sapiens
ggacgagagctctgc

SEQ ID NO: 588100 - DNA, 15 bp, Homo sapiens
gacgagagctctgca

SEQ ID NO: 588101 - DNA, 15 bp, Homo sapiens
acgagagctctgcaa

SEQ ID NO: 588102 - DNA, 15 bp, Homo sapiens
cgagagctctgcaaa

SEQ ID NO: 588103 - DNA, 15 bp, Homo sapiens
gagagctctgcaaac

SEQ ID NO: 588104 - DNA, 15 bp, Homo sapiens
agagctctgcaaacc

SEQ ID NO: 588105 - DNA, 15 bp, Homo sapiens
gagctctgcaaaccc

SEQ ID NO: 588106 - DNA, 15 bp, Homo sapiens
agctctgcaaacccc

SEQ ID NO: 588107 - DNA, 15 bp, Homo sapiens
gctctgcaaaccccg

SEQ ID NO: 588108 - DNA, 15 bp, Homo sapiens
ctctgcaaaccccgg

SEQ ID NO: 588109 - DNA, 15 bp, Homo sapiens
tctgcaaaccccggt

SEQ ID NO: 588110 - DNA, 15 bp, Homo sapiens
ctgcaaaccccggtc

SEQ ID NO: 588111 - DNA, 15 bp, Homo sapiens
tgcaaaccccggtca

SEQ ID NO: 588112 - DNA, 15 bp, Homo sapiens
gcaaaccccggtcag

SEQ ID NO: 588113 - DNA, 15 bp, Homo sapiens
caaaccccggtcagc

SEQ ID NO: 588114 - DNA, 15 bp, Homo sapiens
aaaccccggtcagca

SEQ ID NO: 588115 - DNA, 15 bp, Homo sapiens
aaccccggtcagcag

SEQ ID NO: 588116 - DNA, 15 bp, Homo sapiens
accccggtcagcagc

SEQ ID NO: 588117 - DNA, 15 bp, Homo sapiens
ccccggtcagcagct

SEQ ID NO: 588118 - DNA, 15 bp, Homo sapiens
cccggtcagcagctg

SEQ ID NO: 588119 - DNA, 15 bp, Homo sapiens
ccggtcagcagctgt

SEQ ID NO: 588120 - DNA, 15 bp, Homo sapiens
cggtcagcagctgta

SEQ ID NO: 588121 - DNA, 15 bp, Homo sapiens
ggtcagcagctgtaa

SEQ ID NO: 588122 - DNA, 15 bp, Homo sapiens
gtcagcagctgtaag

SEQ ID NO: 588123 - DNA, 15 bp, Homo sapiens
tcagcagctgtaagg

SEQ ID NO: 588124 - DNA, 15 bp, Homo sapiens
cagcagctgtaagga

SEQ ID NO: 588125 - DNA, 15 bp, Homo sapiens
agcagctgtaaggat

SEQ ID NO: 588126 - DNA, 15 bp, Homo sapiens
gcagctgtaaggatg

SEQ ID NO: 588127 - DNA, 15 bp, Homo sapiens
cagctgtaaggatgc

SEQ ID NO: 588128 - DNA, 15 bp, Homo sapiens
agctgtaaggatgcc

SEQ ID NO: 588129 - DNA, 15 bp, Homo sapiens
gctgtaaggatgccc

SEQ ID NO: 588130 - DNA, 15 bp, Homo sapiens
ctgtaaggatgcccc

SEQ ID NO: 588131 - DNA, 15 bp, Homo sapiens
tgtaaggatgccccc

SEQ ID NO: 588132 - DNA, 15 bp, Homo sapiens
gtaaggatgcccccc

SEQ ID NO: 588133 - DNA, 15 bp, Homo sapiens
taaggatgcccccct

SEQ ID NO: 588134 - DNA, 15 bp, Homo sapiens
aaggatgcccccctc

SEQ ID NO: 588135 - DNA, 15 bp, Homo sapiens
aggatgcccccctcc

SEQ ID NO: 588136 - DNA, 15 bp, Homo sapiens
ggatgcccccctccc

SEQ ID NO: 588137 - DNA, 15 bp, Homo sapiens
gatgcccccctcccc

SEQ ID NO: 588138 - DNA, 15 bp, Homo sapiens
atgcccccctccccc

SEQ ID NO: 588139 - DNA, 15 bp, Homo sapiens
tgcccccctccccca

SEQ ID NO: 588140 - DNA, 15 bp, Homo sapiens
gcccccctcccccac

SEQ ID NO: 588141 - DNA, 15 bp, Homo sapiens
cccccctcccccaca

SEQ ID NO: 588142 - DNA, 15 bp, Homo sapiens
ccccctcccccacaa

SEQ ID NO: 588143 - DNA, 15 bp, Homo sapiens
cccctcccccacaac

SEQ ID NO: 588144 - DNA, 15 bp, Homo sapiens
ccctcccccacaacc

SEQ ID NO: 588145 - DNA, 15 bp, Homo sapiens
cctcccccacaaccc

SEQ ID NO: 588146 - DNA, 15 bp, Homo sapiens
ctcccccacaaccca

SEQ ID NO: 588147 - DNA, 15 bp, Homo sapiens
tcccccacaacccag

SEQ ID NO: 588148 - DNA, 15 bp, Homo sapiens
cccccacaacccagg

SEQ ID NO: 588149 - DNA, 15 bp, Homo sapiens
ccccacaacccaggc

SEQ ID NO: 588150 - DNA, 15 bp, Homo sapiens
cccacaacccaggcc

SEQ ID NO: 588151 - DNA, 15 bp, Homo sapiens
ccacaacccaggccc

SEQ ID NO: 588152 - DNA, 15 bp, Homo sapiens
cacaacccaggccct

SEQ ID NO: 588153 - DNA, 15 bp, Homo sapiens
acaacccaggccctg

SEQ ID NO: 588154 - DNA, 15 bp, Homo sapiens
caacccaggccctgg

SEQ ID NO: 588155 - DNA, 15 bp, Homo sapiens
aacccaggccctggg

SEQ ID NO: 588156 - DNA, 15 bp, Homo sapiens
acccaggccctgggc

SEQ ID NO: 588157 - DNA, 15 bp, Homo sapiens
cccaggccctgggcc

SEQ ID NO: 588158 - DNA, 15 bp, Homo sapiens
ccaggccctgggccg

SEQ ID NO: 588159 - DNA, 15 bp, Homo sapiens
caggccctgggccgc

SEQ ID NO: 588160 - DNA, 15 bp, Homo sapiens
aggccctgggccgct

SEQ ID NO: 588161 - DNA, 15 bp, Homo sapiens
ggccctgggccgctc

SEQ ID NO: 588162 - DNA, 15 bp, Homo sapiens
gccctgggccgctct

SEQ ID NO: 588163 - DNA, 15 bp, Homo sapiens
ccctgggccgctctg

SEQ ID NO: 588164 - DNA, 15 bp, Homo sapiens
cctgggccgctctgg

SEQ ID NO: 588165 - DNA, 15 bp, Homo sapiens
ctgggccgctctggt

SEQ ID NO: 588166 - DNA, 15 bp, Homo sapiens
tgggccgctctggtg

SEQ ID NO: 588167 - DNA, 15 bp, Homo sapiens
gggccgctctggtgc

SEQ ID NO: 588168 - DNA, 15 bp, Homo sapiens
ggccgctctggtgca

SEQ ID NO: 588169 - DNA, 15 bp, Homo sapiens
gccgctctggtgcag

SEQ ID NO: 588170 - DNA, 15 bp, Homo sapiens
ccgctctggtgcagc

SEQ ID NO: 588171 - DNA, 15 bp, Homo sapiens
cgctctggtgcagcg

SEQ ID NO: 588172 - DNA, 15 bp, Homo sapiens
gctctggtgcagcgg

SEQ ID NO: 588173 - DNA, 15 bp, Homo sapiens
ctctggtgcagcggc

SEQ ID NO: 588174 - DNA, 15 bp, Homo sapiens
tctggtgcagcggca

SEQ ID NO: 588175 - DNA, 15 bp, Homo sapiens
ctggtgcagcggcag

SEQ ID NO: 588176 - DNA, 15 bp, Homo sapiens
tggtgcagcggcaga

SEQ ID NO: 588177 - DNA, 15 bp, Homo sapiens
ggtgcagcggcagat

SEQ ID NO: 588178 - DNA, 15 bp, Homo sapiens
gtgcagcggcagatg

SEQ ID NO: 588179 - DNA, 15 bp, Homo sapiens
tgcagcggcagatgg

SEQ ID NO: 588180 - DNA, 15 bp, Homo sapiens
gcagcggcagatggg

SEQ ID NO: 588181 - DNA, 15 bp, Homo sapiens
cagcggcagatggga

SEQ ID NO: 588182 - DNA, 15 bp, Homo sapiens
agcggcagatgggag

SEQ ID NO: 588183 - DNA, 15 bp, Homo sapiens
gcggcagatgggagc

SEQ ID NO: 588184 - DNA, 15 bp, Homo sapiens
cggcagatgggagcc

SEQ ID NO: 588185 - DNA, 15 bp, Homo sapiens
ggcagatgggagccg

SEQ ID NO: 588186 - DNA, 15 bp, Homo sapiens
gcagatgggagccgg

SEQ ID NO: 588187 - DNA, 15 bp, Homo sapiens
cagatgggagccggg

SEQ ID NO: 588188 - DNA, 15 bp, Homo sapiens
agatgggagccgggc

SEQ ID NO: 588189 - DNA, 15 bp, Homo sapiens
gatgggagccgggcc

SEQ ID NO: 588190 - DNA, 15 bp, Homo sapiens
atgggagccgggcca

SEQ ID NO: 588191 - DNA, 15 bp, Homo sapiens
tgggagccgggccat

SEQ ID NO: 588192 - DNA, 15 bp, Homo sapiens
gggagccgggccatt

SEQ ID NO: 588193 - DNA, 15 bp, Homo sapiens
ggagccgggccattg

SEQ ID NO: 588194 - DNA, 15 bp, Homo sapiens
gagccgggccattgc

SEQ ID NO: 588195 - DNA, 15 bp, Homo sapiens
agccgggccattgca

SEQ ID NO: 588196 - DNA, 15 bp, Homo sapiens
gccgggccattgcag

SEQ ID NO: 588197 - DNA, 15 bp, Homo sapiens
ccgggccattgcaga

SEQ ID NO: 588198 - DNA, 15 bp, Homo sapiens
cgggccattgcagat

SEQ ID NO: 588199 - DNA, 15 bp, Homo sapiens
gggccattgcagata

SEQ ID NO: 588200 - DNA, 15 bp, Homo sapiens
ggccattgcagataa

SEQ ID NO: 588201 - DNA, 15 bp, Homo sapiens
gccattgcagataat

SEQ ID NO: 588202 - DNA, 15 bp, Homo sapiens
ccattgcagataatg

SEQ ID NO: 588203 - DNA, 15 bp, Homo sapiens
cattgcagataatgg

SEQ ID NO: 588204 - DNA, 15 bp, Homo sapiens
attgcagataatggg

SEQ ID NO: 588205 - DNA, 15 bp, Homo sapiens
ttgcagataatgggc

SEQ ID NO: 588206 - DNA, 15 bp, Homo sapiens
tgcagataatgggct

SEQ ID NO: 588207 - DNA, 15 bp, Homo sapiens
gcagataatgggctt

SEQ ID NO: 588208 - DNA, 15 bp, Homo sapiens
cagataatgggcttg

SEQ ID NO: 588209 - DNA, 15 bp, Homo sapiens
agataatgggcttgt

SEQ ID NO: 588210 - DNA, 15 bp, Homo sapiens
gataatgggcttgtt

SEQ ID NO: 588211 - DNA, 15 bp, Homo sapiens
ataatgggcttgttt

SEQ ID NO: 588212 - DNA, 15 bp, Homo sapiens
taatgggcttgtttt

SEQ ID NO: 588213 - DNA, 15 bp, Homo sapiens
aatgggcttgttttt

SEQ ID NO: 588214 - DNA, 15 bp, Homo sapiens
atgggcttgttttta

SEQ ID NO: 588215 - DNA, 15 bp, Homo sapiens
tgggcttgtttttaa

SEQ ID NO: 588216 - DNA, 15 bp, Homo sapiens
gggcttgtttttaaa

SEQ ID NO: 588217 - DNA, 15 bp, Homo sapiens
ggcttgtttttaaac

SEQ ID NO: 588218 - DNA, 15 bp, Homo sapiens
gcttgtttttaaaca

SEQ ID NO: 588219 - DNA, 15 bp, Homo sapiens
cttgtttttaaacaa

SEQ ID NO: 588220 - DNA, 15 bp, Homo sapiens
ttgtttttaaacaac

SEQ ID NO: 588221 - DNA, 15 bp, Homo sapiens
tgtttttaaacaact

SEQ ID NO: 588222 - DNA, 15 bp, Homo sapiens
gtttttaaacaactc

SEQ ID NO: 588223 - DNA, 15 bp, Homo sapiens
tttttaaacaactct

SEQ ID NO: 588224 - DNA, 15 bp, Homo sapiens
ttttaaacaactctg

SEQ ID NO: 588225 - DNA, 15 bp, Homo sapiens
tttaaacaactctgg

SEQ ID NO: 588226 - DNA, 15 bp, Homo sapiens
ttaaacaactctggg

SEQ ID NO: 588227 - DNA, 15 bp, Homo sapiens
taaacaactctgggg

SEQ ID NO: 588228 - DNA, 15 bp, Homo sapiens
aaacaactctgggga

SEQ ID NO: 588229 - DNA, 15 bp, Homo sapiens
aacaactctggggaa

SEQ ID NO: 588230 - DNA, 15 bp, Homo sapiens
acaactctggggaaa

SEQ ID NO: 588231 - DNA, 15 bp, Homo sapiens
caactctggggaaaa

SEQ ID NO: 588232 - DNA, 15 bp, Homo sapiens
aactctggggaaaag

SEQ ID NO: 588233 - DNA, 15 bp, Homo sapiens
actctggggaaaagc

SEQ ID NO: 588234 - DNA, 15 bp, Homo sapiens
ctctggggaaaagca

SEQ ID NO: 588235 - DNA, 15 bp, Homo sapiens
tctggggaaaagcaa

SEQ ID NO: 588236 - DNA, 15 bp, Homo sapiens
ctggggaaaagcaaa

SEQ ID NO: 588237 - DNA, 15 bp, Homo sapiens
tggggaaaagcaaac

SEQ ID NO: 588238 - DNA, 15 bp, Homo sapiens
ggggaaaagcaaact

SEQ ID NO: 588239 - DNA, 15 bp, Homo sapiens
gggaaaagcaaactg

SEQ ID NO: 588240 - DNA, 15 bp, Homo sapiens
ggaaaagcaaactga

SEQ ID NO: 588241 - DNA, 15 bp, Homo sapiens
gaaaagcaaactgac

SEQ ID NO: 588242 - DNA, 15 bp, Homo sapiens
aaaagcaaactgaca

SEQ ID NO: 588243 - DNA, 15 bp, Homo sapiens
aaagcaaactgacaa

SEQ ID NO: 588244 - DNA, 15 bp, Homo sapiens
aagcaaactgacaat

SEQ ID NO: 588245 - DNA, 15 bp, Homo sapiens
agcaaactgacaatc

SEQ ID NO: 588246 - DNA, 15 bp, Homo sapiens
gcaaactgacaatcc

SEQ ID NO: 588247 - DNA, 15 bp, Homo sapiens
caaactgacaatccg

SEQ ID NO: 588248 - DNA, 15 bp, Homo sapiens
aaactgacaatccgt

SEQ ID NO: 588249 - DNA, 15 bp, Homo sapiens
aactgacaatccgtt

SEQ ID NO: 588250 - DNA, 15 bp, Homo sapiens
actgacaatccgttc

SEQ ID NO: 588251 - DNA, 15 bp, Homo sapiens
ctgacaatccgttcg

SEQ ID NO: 588252 - DNA, 15 bp, Homo sapiens
tgacaatccgttcgt

SEQ ID NO: 588253 - DNA, 15 bp, Homo sapiens
gacaatccgttcgta

SEQ ID NO: 588254 - DNA, 15 bp, Homo sapiens
acaatccgttcgtaa

SEQ ID NO: 588255 - DNA, 15 bp, Homo sapiens
caatccgttcgtaag

SEQ ID NO: 588256 - DNA, 15 bp, Homo sapiens
aatccgttcgtaagc

SEQ ID NO: 588257 - DNA, 15 bp, Homo sapiens
atccgttcgtaagct

SEQ ID NO: 588258 - DNA, 15 bp, Homo sapiens
tccgttcgtaagctc

SEQ ID NO: 588259 - DNA, 15 bp, Homo sapiens
ccgttcgtaagctcc

SEQ ID NO: 588260 - DNA, 15 bp, Homo sapiens
cgttcgtaagctcca

SEQ ID NO: 588261 - DNA, 15 bp, Homo sapiens
gttcgtaagctccat

SEQ ID NO: 588262 - DNA, 15 bp, Homo sapiens
ttcgtaagctccatc

SEQ ID NO: 588263 - DNA, 15 bp, Homo sapiens
tcgtaagctccatcc

SEQ ID NO: 588264 - DNA, 15 bp, Homo sapiens
cgtaagctccatccc

SEQ ID NO: 588265 - DNA, 15 bp, Homo sapiens
gtaagctccatccct

SEQ ID NO: 588266 - DNA, 15 bp, Homo sapiens
taagctccatccctt

SEQ ID NO: 588267 - DNA, 15 bp, Homo sapiens
aagctccatcccttc

SEQ ID NO: 588268 - DNA, 15 bp, Homo sapiens
agctccatcccttct

SEQ ID NO: 588269 - DNA, 15 bp, Homo sapiens
gctccatcccttctg

SEQ ID NO: 588270 - DNA, 15 bp, Homo sapiens
ctccatcccttctgc

SEQ ID NO: 588271 - DNA, 15 bp, Homo sapiens
tccatcccttctgct

SEQ ID NO: 588272 - DNA, 15 bp, Homo sapiens
ccatcccttctgctc

SEQ ID NO: 588273 - DNA, 15 bp, Homo sapiens
catcccttctgctca

SEQ ID NO: 588274 - DNA, 15 bp, Homo sapiens
atcccttctgctcag

SEQ ID NO: 588275 - DNA, 15 bp, Homo sapiens
tcccttctgctcagt

SEQ ID NO: 588276 - DNA, 15 bp, Homo sapiens
cccttctgctcagtc

SEQ ID NO: 588277 - DNA, 15 bp, Homo sapiens
ccttctgctcagtca

SEQ ID NO: 588278 - DNA, 15 bp, Homo sapiens
cttctgctcagtcat

SEQ ID NO: 588279 - DNA, 15 bp, Homo sapiens
ttctgctcagtcatg

SEQ ID NO: 588280 - DNA, 15 bp, Homo sapiens
tctgctcagtcatga

SEQ ID NO: 588281 - DNA, 15 bp, Homo sapiens
ctgctcagtcatgac

SEQ ID NO: 588282 - DNA, 15 bp, Homo sapiens
tgctcagtcatgacc

SEQ ID NO: 588283 - DNA, 15 bp, Homo sapiens
gctcagtcatgacct

SEQ ID NO: 588284 - DNA, 15 bp, Homo sapiens
ctcagtcatgacctg

SEQ ID NO: 588285 - DNA, 15 bp, Homo sapiens
tcagtcatgacctgc

SEQ ID NO: 588286 - DNA, 15 bp, Homo sapiens
cagtcatgacctgcc

SEQ ID NO: 588287 - DNA, 15 bp, Homo sapiens
agtcatgacctgccc

SEQ ID NO: 588288 - DNA, 15 bp, Homo sapiens
gtcatgacctgcccc

SEQ ID NO: 588289 - DNA, 15 bp, Homo sapiens
tcatgacctgcccct

SEQ ID NO: 588290 - DNA, 15 bp, Homo sapiens
catgacctgcccctg

SEQ ID NO: 588291 - DNA, 15 bp, Homo sapiens
atgacctgcccctgt

SEQ ID NO: 588292 - DNA, 15 bp, Homo sapiens
tgacctgcccctgtg

SEQ ID NO: 588293 - DNA, 15 bp, Homo sapiens
gacctgcccctgtga

SEQ ID NO: 588294 - DNA, 15 bp, Homo sapiens
acctgcccctgtgag

SEQ ID NO: 588295 - DNA, 15 bp, Homo sapiens
cctgcccctgtgaga

SEQ ID NO: 588296 - DNA, 15 bp, Homo sapiens
ctgcccctgtgagag

SEQ ID NO: 588297 - DNA, 15 bp, Homo sapiens
tgcccctgtgagaga

SEQ ID NO: 588298 - DNA, 15 bp, Homo sapiens
gcccctgtgagagat

SEQ ID NO: 588299 - DNA, 15 bp, Homo sapiens
cccctgtgagagatg

SEQ ID NO: 588300 - DNA, 15 bp, Homo sapiens
ccctgtgagagatga

SEQ ID NO: 588301 - DNA, 15 bp, Homo sapiens
cctgtgagagatgaa

SEQ ID NO: 588302 - DNA, 15 bp, Homo sapiens
ctgtgagagatgaag

SEQ ID NO: 588303 - DNA, 15 bp, Homo sapiens
tgtgagagatgaagg

SEQ ID NO: 588304 - DNA, 15 bp, Homo sapiens
gtgagagatgaaggg

SEQ ID NO: 588305 - DNA, 15 bp, Homo sapiens
tgagagatgaagggt

SEQ ID NO: 588306 - DNA, 15 bp, Homo sapiens
gagagatgaagggtt

SEQ ID NO: 588307 - DNA, 15 bp, Homo sapiens
agagatgaagggtta

SEQ ID NO: 588308 - DNA, 15 bp, Homo sapiens
gagatgaagggttag

SEQ ID NO: 588309 - DNA, 15 bp, Homo sapiens
agatgaagggttagt

SEQ ID NO: 588310 - DNA, 15 bp, Homo sapiens
gatgaagggttagtc

SEQ ID NO: 588311 - DNA, 15 bp, Homo sapiens
atgaagggttagtcc

SEQ ID NO: 588312 - DNA, 15 bp, Homo sapiens
tgaagggttagtccc

SEQ ID NO: 588313 - DNA, 15 bp, Homo sapiens
gaagggttagtccca

SEQ ID NO: 588314 - DNA, 15 bp, Homo sapiens
aagggttagtcccag

SEQ ID NO: 588315 - DNA, 15 bp, Homo sapiens
agggttagtcccagt

SEQ ID NO: 588316 - DNA, 15 bp, Homo sapiens
gggttagtcccagtt

SEQ ID NO: 588317 - DNA, 15 bp, Homo sapiens
ggttagtcccagttg

SEQ ID NO: 588318 - DNA, 15 bp, Homo sapiens
gttagtcccagttgt

SEQ ID NO: 588319 - DNA, 15 bp, Homo sapiens
ttagtcccagttgtg

SEQ ID NO: 588320 - DNA, 15 bp, Homo sapiens
tagtcccagttgtga

SEQ ID NO: 588321 - DNA, 15 bp, Homo sapiens
agtcccagttgtgat

SEQ ID NO: 588322 - DNA, 15 bp, Homo sapiens
gtcccagttgtgatg

SEQ ID NO: 588323 - DNA, 15 bp, Homo sapiens
tcccagttgtgatgt

SEQ ID NO: 588324 - DNA, 15 bp, Homo sapiens
cccagttgtgatgtg

SEQ ID NO: 588325 - DNA, 15 bp, Homo sapiens
ccagttgtgatgtga

SEQ ID NO: 588326 - DNA, 15 bp, Homo sapiens
cagttgtgatgtgat

SEQ ID NO: 588327 - DNA, 15 bp, Homo sapiens
agttgtgatgtgata

SEQ ID NO: 588328 - DNA, 15 bp, Homo sapiens
gttgtgatgtgataa

SEQ ID NO: 588329 - DNA, 15 bp, Homo sapiens
ttgtgatgtgataag

SEQ ID NO: 588330 - DNA, 15 bp, Homo sapiens
tgtgatgtgataagc

SEQ ID NO: 588331 - DNA, 15 bp, Homo sapiens
gtgatgtgataagcc

SEQ ID NO: 588332 - DNA, 15 bp, Homo sapiens
tgatgtgataagccc

SEQ ID NO: 588333 - DNA, 15 bp, Homo sapiens
gatgtgataagccca

SEQ ID NO: 588334 - DNA, 15 bp, Homo sapiens
atgtgataagcccag

SEQ ID NO: 588335 - DNA, 15 bp, Homo sapiens
tgtgataagcccaga

SEQ ID NO: 588336 - DNA, 15 bp, Homo sapiens
gtgataagcccagac

SEQ ID NO: 588337 - DNA, 15 bp, Homo sapiens
tgataagcccagacc

SEQ ID NO: 588338 - DNA, 15 bp, Homo sapiens
gataagcccagacct

SEQ ID NO: 588339 - DNA, 15 bp, Homo sapiens
ataagcccagacctc

SEQ ID NO: 588340 - DNA, 15 bp, Homo sapiens
taagcccagacctct

SEQ ID NO: 588341 - DNA, 15 bp, Homo sapiens
aagcccagacctctt

SEQ ID NO: 588342 - DNA, 15 bp, Homo sapiens
agcccagacctcttt

SEQ ID NO: 588343 - DNA, 15 bp, Homo sapiens
gcccagacctctttc

SEQ ID NO: 588344 - DNA, 15 bp, Homo sapiens
cccagacctctttcc

SEQ ID NO: 588345 - DNA, 15 bp, Homo sapiens
ccagacctctttcct

SEQ ID NO: 588346 - DNA, 15 bp, Homo sapiens
cagacctctttcctt

SEQ ID NO: 588347 - DNA, 15 bp, Homo sapiens
agacctctttccttc

SEQ ID NO: 588348 - DNA, 15 bp, Homo sapiens
gacctctttccttcc

SEQ ID NO: 588349 - DNA, 15 bp, Homo sapiens
acctctttccttccg

SEQ ID NO: 588350 - DNA, 15 bp, Homo sapiens
cctctttccttccga

SEQ ID NO: 588351 - DNA, 15 bp, Homo sapiens
ctctttccttccgac

SEQ ID NO: 588352 - DNA, 15 bp, Homo sapiens
tctttccttccgaca

SEQ ID NO: 588353 - DNA, 15 bp, Homo sapiens
ctttccttccgacag

SEQ ID NO: 588354 - DNA, 15 bp, Homo sapiens
tttccttccgacagg

SEQ ID NO: 588355 - DNA, 15 bp, Homo sapiens
ttccttccgacaggt

SEQ ID NO: 588356 - DNA, 15 bp, Homo sapiens
tccttccgacaggtg

SEQ ID NO: 588357 - DNA, 15 bp, Homo sapiens
ccttccgacaggtga

SEQ ID NO: 588358 - DNA, 15 bp, Homo sapiens
cttccgacaggtgat

SEQ ID NO: 588359 - DNA, 15 bp, Homo sapiens
ttccgacaggtgatc

SEQ ID NO: 588360 - DNA, 15 bp, Homo sapiens
tccgacaggtgatcg

SEQ ID NO: 588361 - DNA, 15 bp, Homo sapiens
ccgacaggtgatcgt

SEQ ID NO: 588362 - DNA, 15 bp, Homo sapiens
cgacaggtgatcgtg

SEQ ID NO: 588363 - DNA, 15 bp, Homo sapiens
gacaggtgatcgtgc

SEQ ID NO: 588364 - DNA, 15 bp, Homo sapiens
acaggtgatcgtgca

SEQ ID NO: 588365 - DNA, 15 bp, Homo sapiens
caggtgatcgtgcat

SEQ ID NO: 588366 - DNA, 15 bp, Homo sapiens
aggtgatcgtgcatg

SEQ ID NO: 588367 - DNA, 15 bp, Homo sapiens
ggtgatcgtgcatgc

SEQ ID NO: 588368 - DNA, 15 bp, Homo sapiens
gtgatcgtgcatgca

SEQ ID NO: 588369 - DNA, 15 bp, Homo sapiens
tgatcgtgcatgcag

SEQ ID NO: 588370 - DNA, 15 bp, Homo sapiens
gatcgtgcatgcaga

SEQ ID NO: 588371 - DNA, 15 bp, Homo sapiens
atcgtgcatgcagag

SEQ ID NO: 588372 - DNA, 15 bp, Homo sapiens
tcgtgcatgcagagg

SEQ ID NO: 588373 - DNA, 15 bp, Homo sapiens
cgtgcatgcagagga

SEQ ID NO: 588374 - DNA, 15 bp, Homo sapiens
gtgcatgcagaggag

SEQ ID NO: 588375 - DNA, 15 bp, Homo sapiens
tgcatgcagaggagg

SEQ ID NO: 588376 - DNA, 15 bp, Homo sapiens
gcatgcagaggaggc

SEQ ID NO: 588377 - DNA, 15 bp, Homo sapiens
catgcagaggaggct

SEQ ID NO: 588378 - DNA, 15 bp, Homo sapiens
atgcagaggaggctc

SEQ ID NO: 588379 - DNA, 15 bp, Homo sapiens
tgcagaggaggctct

SEQ ID NO: 588380 - DNA, 15 bp, Homo sapiens
gcagaggaggctctg

SEQ ID NO: 588381 - DNA, 15 bp, Homo sapiens
cagaggaggctctga

SEQ ID NO: 588382 - DNA, 15 bp, Homo sapiens
agaggaggctctgag

SEQ ID NO: 588383 - DNA, 15 bp, Homo sapiens
gaggaggctctgaga

SEQ ID NO: 588384 - DNA, 15 bp, Homo sapiens
aggaggctctgagac

SEQ ID NO: 588385 - DNA, 15 bp, Homo sapiens
ggaggctctgagacg

SEQ ID NO: 588386 - DNA, 15 bp, Homo sapiens
gaggctctgagacgc

SEQ ID NO: 588387 - DNA, 15 bp, Homo sapiens
aggctctgagacgcc

SEQ ID NO: 588388 - DNA, 15 bp, Homo sapiens
ggctctgagacgccc

SEQ ID NO: 588389 - DNA, 15 bp, Homo sapiens
gctctgagacgcccc

SEQ ID NO: 588390 - DNA, 15 bp, Homo sapiens
ctctgagacgccccc

SEQ ID NO: 588391 - DNA, 15 bp, Homo sapiens
tctgagacgccccca

SEQ ID NO: 588392 - DNA, 15 bp, Homo sapiens
ctgagacgcccccag

SEQ ID NO: 588393 - DNA, 15 bp, Homo sapiens
tgagacgcccccagc

SEQ ID NO: 588394 - DNA, 15 bp, Homo sapiens
gagacgcccccagca

SEQ ID NO: 588395 - DNA, 15 bp, Homo sapiens
agacgcccccagcaa

SEQ ID NO: 588396 - DNA, 15 bp, Homo sapiens
gacgcccccagcaag

SEQ ID NO: 588397 - DNA, 15 bp, Homo sapiens
acgcccccagcaagg

SEQ ID NO: 588398 - DNA, 15 bp, Homo sapiens
cgcccccagcaaggt

SEQ ID NO: 588399 - DNA, 15 bp, Homo sapiens
gcccccagcaaggtt

SEQ ID NO: 588400 - DNA, 15 bp, Homo sapiens
cccccagcaaggttc

SEQ ID NO: 588401 - DNA, 15 bp, Homo sapiens
ccccagcaaggttcc

SEQ ID NO: 588402 - DNA, 15 bp, Homo sapiens
cccagcaaggttcct

SEQ ID NO: 588403 - DNA, 15 bp, Homo sapiens
ccagcaaggttcctg

SEQ ID NO: 588404 - DNA, 15 bp, Homo sapiens
cagcaaggttcctgg

SEQ ID NO: 588405 - DNA, 15 bp, Homo sapiens
agcaaggttcctggg

SEQ ID NO: 588406 - DNA, 15 bp, Homo sapiens
gcaaggttcctgggt

SEQ ID NO: 588407 - DNA, 15 bp, Homo sapiens
caaggttcctgggtt

SEQ ID NO: 588408 - DNA, 15 bp, Homo sapiens
aaggttcctgggttt

SEQ ID NO: 588409 - DNA, 15 bp, Homo sapiens
aggttcctgggttta

SEQ ID NO: 588410 - DNA, 15 bp, Homo sapiens
ggttcctgggtttaa

SEQ ID NO: 588411 - DNA, 15 bp, Homo sapiens
gttcctgggtttaac

SEQ ID NO: 588412 - DNA, 15 bp, Homo sapiens
ttcctgggtttaacc

SEQ ID NO: 588413 - DNA, 15 bp, Homo sapiens
tcctgggtttaaccc

SEQ ID NO: 588414 - DNA, 15 bp, Homo sapiens
cctgggtttaaccca

SEQ ID NO: 588415 - DNA, 15 bp, Homo sapiens
ctgggtttaacccaa

SEQ ID NO: 588416 - DNA, 15 bp, Homo sapiens
tgggtttaacccaac

SEQ ID NO: 588417 - DNA, 15 bp, Homo sapiens
gggtttaacccaaca

SEQ ID NO: 588418 - DNA, 15 bp, Homo sapiens
ggtttaacccaacat

SEQ ID NO: 588419 - DNA, 15 bp, Homo sapiens
gtttaacccaacatt

SEQ ID NO: 588420 - DNA, 15 bp, Homo sapiens
tttaacccaacattc

SEQ ID NO: 588421 - DNA, 15 bp, Homo sapiens
ttaacccaacattcc

SEQ ID NO: 588422 - DNA, 15 bp, Homo sapiens
taacccaacattccc

SEQ ID NO: 588423 - DNA, 15 bp, Homo sapiens
aacccaacattcccc

SEQ ID NO: 588424 - DNA, 15 bp, Homo sapiens
acccaacattcccca

SEQ ID NO: 588425 - DNA, 15 bp, Homo sapiens
cccaacattccccaa

SEQ ID NO: 588426 - DNA, 15 bp, Homo sapiens
ccaacattccccaaa

SEQ ID NO: 588427 - DNA, 15 bp, Homo sapiens
caacattccccaaag

SEQ ID NO: 588428 - DNA, 15 bp, Homo sapiens
aacattccccaaagt

SEQ ID NO: 588429 - DNA, 15 bp, Homo sapiens
acattccccaaagta

SEQ ID NO: 588430 - DNA, 15 bp, Homo sapiens
cattccccaaagtat

SEQ ID NO: 588431 - DNA, 15 bp, Homo sapiens
attccccaaagtatg

SEQ ID NO: 588432 - DNA, 15 bp, Homo sapiens
ttccccaaagtatgt

SEQ ID NO: 588433 - DNA, 15 bp, Homo sapiens
tccccaaagtatgta

SEQ ID NO: 588434 - DNA, 15 bp, Homo sapiens
ccccaaagtatgtat

SEQ ID NO: 588435 - DNA, 15 bp, Homo sapiens
cccaaagtatgtatt

SEQ ID NO: 588436 - DNA, 15 bp, Homo sapiens
ccaaagtatgtattt

SEQ ID NO: 588437 - DNA, 15 bp, Homo sapiens
caaagtatgtatttg

SEQ ID NO: 588438 - DNA, 15 bp, Homo sapiens
aaagtatgtatttgg

SEQ ID NO: 588439 - DNA, 15 bp, Homo sapiens
aagtatgtatttggc

SEQ ID NO: 588440 - DNA, 15 bp, Homo sapiens
agtatgtatttggcc

SEQ ID NO: 588441 - DNA, 15 bp, Homo sapiens
gtatgtatttggcca

SEQ ID NO: 588442 - DNA, 15 bp, Homo sapiens
tatgtatttggccac

SEQ ID NO: 588443 - DNA, 15 bp, Homo sapiens
atgtatttggccaca

SEQ ID NO: 588444 - DNA, 15 bp, Homo sapiens
tgtatttggccacat

SEQ ID NO: 588445 - DNA, 15 bp, Homo sapiens
gtatttggccacatt

SEQ ID NO: 588446 - DNA, 15 bp, Homo sapiens
tatttggccacattc

SEQ ID NO: 588447 - DNA, 15 bp, Homo sapiens
atttggccacattca

SEQ ID NO: 588448 - DNA, 15 bp, Homo sapiens
tttggccacattcac

SEQ ID NO: 588449 - DNA, 15 bp, Homo sapiens
ttggccacattcaca

SEQ ID NO: 588450 - DNA, 15 bp, Homo sapiens
tggccacattcacag

SEQ ID NO: 588451 - DNA, 15 bp, Homo sapiens
ggccacattcacaga

SEQ ID NO: 588452 - DNA, 15 bp, Homo sapiens
gccacattcacagaa

SEQ ID NO: 588453 - DNA, 15 bp, Homo sapiens
ccacattcacagaaa

SEQ ID NO: 588454 - DNA, 15 bp, Homo sapiens
cacattcacagaaag

SEQ ID NO: 588455 - DNA, 15 bp, Homo sapiens
acattcacagaaaga

SEQ ID NO: 588456 - DNA, 15 bp, Homo sapiens
cattcacagaaagaa

SEQ ID NO: 588457 - DNA, 15 bp, Homo sapiens
attcacagaaagaat

SEQ ID NO: 588458 - DNA, 15 bp, Homo sapiens
ttcacagaaagaata

SEQ ID NO: 588459 - DNA, 15 bp, Homo sapiens
tcacagaaagaatat

SEQ ID NO: 588460 - DNA, 15 bp, Homo sapiens
cacagaaagaatatt

SEQ ID NO: 588461 - DNA, 15 bp, Homo sapiens
acagaaagaatatta

SEQ ID NO: 588462 - DNA, 15 bp, Homo sapiens
cagaaagaatattag

SEQ ID NO: 588463 - DNA, 15 bp, Homo sapiens
agaaagaatattagt

SEQ ID NO: 588464 - DNA, 15 bp, Homo sapiens
gaaagaatattagtc

SEQ ID NO: 588465 - DNA, 15 bp, Homo sapiens
aaagaatattagtct

SEQ ID NO: 588466 - DNA, 15 bp, Homo sapiens
aagaatattagtctt

SEQ ID NO: 588467 - DNA, 15 bp, Homo sapiens
agaatattagtcttt

SEQ ID NO: 588468 - DNA, 15 bp, Homo sapiens
gaatattagtctttt

SEQ ID NO: 588469 - DNA, 15 bp, Homo sapiens
aatattagtcttttg

SEQ ID NO: 588470 - DNA, 15 bp, Homo sapiens
atattagtcttttgt

SEQ ID NO: 588471 - DNA, 15 bp, Homo sapiens
tattagtcttttgtg

SEQ ID NO: 588472 - DNA, 15 bp, Homo sapiens
attagtcttttgtgg

SEQ ID NO: 588473 - DNA, 15 bp, Homo sapiens
ttagtcttttgtgga

SEQ ID NO: 588474 - DNA, 15 bp, Homo sapiens
tagtcttttgtggaa

SEQ ID NO: 588475 - DNA, 15 bp, Homo sapiens
agtcttttgtggaat

SEQ ID NO: 588476 - DNA, 15 bp, Homo sapiens
gtcttttgtggaatg

SEQ ID NO: 588477 - DNA, 15 bp, Homo sapiens
tcttttgtggaatgc

SEQ ID NO: 588478 - DNA, 15 bp, Homo sapiens
cttttgtggaatgct

SEQ ID NO: 588479 - DNA, 15 bp, Homo sapiens
ttttgtggaatgctg

SEQ ID NO: 588480 - DNA, 15 bp, Homo sapiens
tttgtggaatgctgc

SEQ ID NO: 588481 - DNA, 15 bp, Homo sapiens
ttgtggaatgctgcg

SEQ ID NO: 588482 - DNA, 15 bp, Homo sapiens
tgtggaatgctgcgg

SEQ ID NO: 588483 - DNA, 15 bp, Homo sapiens
gtggaatgctgcggg

SEQ ID NO: 588484 - DNA, 15 bp, Homo sapiens
tggaatgctgcgggt

SEQ ID NO: 588485 - DNA, 15 bp, Homo sapiens
ggaatgctgcgggtt

SEQ ID NO: 588486 - DNA, 15 bp, Homo sapiens
gaatgctgcgggttg

SEQ ID NO: 588487 - DNA, 15 bp, Homo sapiens
aatgctgcgggttga

SEQ ID NO: 588488 - DNA, 15 bp, Homo sapiens
atgctgcgggttgac

SEQ ID NO: 588489 - DNA, 15 bp, Homo sapiens
tgctgcgggttgaca

SEQ ID NO: 588490 - DNA, 15 bp, Homo sapiens
gctgcgggttgacag

SEQ ID NO: 588491 - DNA, 15 bp, Homo sapiens
ctgcgggttgacagt

SEQ ID NO: 588492 - DNA, 15 bp, Homo sapiens
tgcgggttgacagtc

SEQ ID NO: 588493 - DNA, 15 bp, Homo sapiens
gcgggttgacagtca

SEQ ID NO: 588494 - DNA, 15 bp, Homo sapiens
cgggttgacagtcac

SEQ ID NO: 588495 - DNA, 15 bp, Homo sapiens
gggttgacagtcaca

SEQ ID NO: 588496 - DNA, 15 bp, Homo sapiens
ggttgacagtcacag

SEQ ID NO: 588497 - DNA, 15 bp, Homo sapiens
gttgacagtcacagc

SEQ ID NO: 588498 - DNA, 15 bp, Homo sapiens
ttgacagtcacagct

SEQ ID NO: 588499 - DNA, 15 bp, Homo sapiens
tgacagtcacagctt

SEQ ID NO: 588500 - DNA, 15 bp, Homo sapiens
gacagtcacagcttg

SEQ ID NO: 588501 - DNA, 15 bp, Homo sapiens
acagtcacagcttgg

SEQ ID NO: 588502 - DNA, 15 bp, Homo sapiens
cagtcacagcttgga

SEQ ID NO: 588503 - DNA, 15 bp, Homo sapiens
agtcacagcttggaa

SEQ ID NO: 588504 - DNA, 15 bp, Homo sapiens
gtcacagcttggaaa

SEQ ID NO: 588505 - DNA, 15 bp, Homo sapiens
tcacagcttggaaac

SEQ ID NO: 588506 - DNA, 15 bp, Homo sapiens
cacagcttggaaacc

SEQ ID NO: 588507 - DNA, 15 bp, Homo sapiens
acagcttggaaacca

SEQ ID NO: 588508 - DNA, 15 bp, Homo sapiens
cagcttggaaaccaa

SEQ ID NO: 588509 - DNA, 15 bp, Homo sapiens
agcttggaaaccaac

SEQ ID NO: 588510 - DNA, 15 bp, Homo sapiens
gcttggaaaccaacc

SEQ ID NO: 588511 - DNA, 15 bp, Homo sapiens
cttggaaaccaaccc

SEQ ID NO: 588512 - DNA, 15 bp, Homo sapiens
ttggaaaccaaccca

SEQ ID NO: 588513 - DNA, 15 bp, Homo sapiens
tggaaaccaacccac

SEQ ID NO: 588514 - DNA, 15 bp, Homo sapiens
ggaaaccaacccaca

SEQ ID NO: 588515 - DNA, 15 bp, Homo sapiens
gaaaccaacccacag

SEQ ID NO: 588516 - DNA, 15 bp, Homo sapiens
aaaccaacccacaga

SEQ ID NO: 588517 - DNA, 15 bp, Homo sapiens
aaccaacccacagag

SEQ ID NO: 588518 - DNA, 15 bp, Homo sapiens
accaacccacagaga

SEQ ID NO: 588519 - DNA, 15 bp, Homo sapiens
ccaacccacagagag

SEQ ID NO: 588520 - DNA, 15 bp, Homo sapiens
caacccacagagagc

SEQ ID NO: 588521 - DNA, 15 bp, Homo sapiens
aacccacagagagct

SEQ ID NO: 588522 - DNA, 15 bp, Homo sapiens
acccacagagagctc

SEQ ID NO: 588523 - DNA, 15 bp, Homo sapiens
cccacagagagctca

SEQ ID NO: 588524 - DNA, 15 bp, Homo sapiens
ccacagagagctcat

SEQ ID NO: 588525 - DNA, 15 bp, Homo sapiens
cacagagagctcatc

SEQ ID NO: 588526 - DNA, 15 bp, Homo sapiens
acagagagctcatca

SEQ ID NO: 588527 - DNA, 15 bp, Homo sapiens
cagagagctcatcat

SEQ ID NO: 588528 - DNA, 15 bp, Homo sapiens
agagagctcatcatt

SEQ ID NO: 588529 - DNA, 15 bp, Homo sapiens
gagagctcatcatta

SEQ ID NO: 588530 - DNA, 15 bp, Homo sapiens
agagctcatcattaa

SEQ ID NO: 588531 - DNA, 15 bp, Homo sapiens
gagctcatcattaat

SEQ ID NO: 588532 - DNA, 15 bp, Homo sapiens
agctcatcattaatc

SEQ ID NO: 588533 - DNA, 15 bp, Homo sapiens
gctcatcattaatca

SEQ ID NO: 588534 - DNA, 15 bp, Homo sapiens
ctcatcattaatcat

SEQ ID NO: 588535 - DNA, 15 bp, Homo sapiens
tcatcattaatcatg

SEQ ID NO: 588536 - DNA, 15 bp, Homo sapiens
catcattaatcatgg

SEQ ID NO: 588537 - DNA, 15 bp, Homo sapiens
atcattaatcatggc

SEQ ID NO: 588538 - DNA, 15 bp, Homo sapiens
tcattaatcatggct

SEQ ID NO: 588539 - DNA, 15 bp, Homo sapiens
cattaatcatggcta

SEQ ID NO: 588540 - DNA, 15 bp, Homo sapiens
attaatcatggctat

SEQ ID NO: 588541 - DNA, 15 bp, Homo sapiens
ttaatcatggctatc

SEQ ID NO: 588542 - DNA, 15 bp, Homo sapiens
taatcatggctatca

SEQ ID NO: 588543 - DNA, 15 bp, Homo sapiens
aatcatggctatcac

SEQ ID NO: 588544 - DNA, 15 bp, Homo sapiens
atcatggctatcact

SEQ ID NO: 588545 - DNA, 15 bp, Homo sapiens
tcatggctatcactt

SEQ ID NO: 588546 - DNA, 15 bp, Homo sapiens
catggctatcacttg

SEQ ID NO: 588547 - DNA, 15 bp, Homo sapiens
atggctatcacttgt

SEQ ID NO: 588548 - DNA, 15 bp, Homo sapiens
tggctatcacttgtt

SEQ ID NO: 588549 - DNA, 15 bp, Homo sapiens
ggctatcacttgttt

SEQ ID NO: 588550 - DNA, 15 bp, Homo sapiens
gctatcacttgttta

SEQ ID NO: 588551 - DNA, 15 bp, Homo sapiens
ctatcacttgtttac

SEQ ID NO: 588552 - DNA, 15 bp, Homo sapiens
tatcacttgtttacc

SEQ ID NO: 588553 - DNA, 15 bp, Homo sapiens
atcacttgtttacca

SEQ ID NO: 588554 - DNA, 15 bp, Homo sapiens
tcacttgtttaccac

SEQ ID NO: 588555 - DNA, 15 bp, Homo sapiens
cacttgtttaccacc

SEQ ID NO: 588556 - DNA, 15 bp, Homo sapiens
acttgtttaccacct

SEQ ID NO: 588557 - DNA, 15 bp, Homo sapiens
cttgtttaccaccta

SEQ ID NO: 588558 - DNA, 15 bp, Homo sapiens
ttgtttaccacctac

SEQ ID NO: 588559 - DNA, 15 bp, Homo sapiens
tgtttaccacctact

SEQ ID NO: 588560 - DNA, 15 bp, Homo sapiens
gtttaccacctactg

SEQ ID NO: 588561 - DNA, 15 bp, Homo sapiens
tttaccacctactgt

SEQ ID NO: 588562 - DNA, 15 bp, Homo sapiens
ttaccacctactgtg

SEQ ID NO: 588563 - DNA, 15 bp, Homo sapiens
taccacctactgtgc

SEQ ID NO: 588564 - DNA, 15 bp, Homo sapiens
accacctactgtgcc

SEQ ID NO: 588565 - DNA, 15 bp, Homo sapiens
ccacctactgtgcca

SEQ ID NO: 588566 - DNA, 15 bp, Homo sapiens
cacctactgtgccag

SEQ ID NO: 588567 - DNA, 15 bp, Homo sapiens
acctactgtgccagg

SEQ ID NO: 588568 - DNA, 15 bp, Homo sapiens
cctactgtgccaggc

SEQ ID NO: 588569 - DNA, 15 bp, Homo sapiens
ctactgtgccaggcc

SEQ ID NO: 588570 - DNA, 15 bp, Homo sapiens
tactgtgccaggcct

SEQ ID NO: 588571 - DNA, 15 bp, Homo sapiens
actgtgccaggccta

SEQ ID NO: 588572 - DNA, 15 bp, Homo sapiens
ctgtgccaggcctat

SEQ ID NO: 588573 - DNA, 15 bp, Homo sapiens
tgtgccaggcctatg

SEQ ID NO: 588574 - DNA, 15 bp, Homo sapiens
gtgccaggcctatgc

SEQ ID NO: 588575 - DNA, 15 bp, Homo sapiens
tgccaggcctatgct

SEQ ID NO: 588576 - DNA, 15 bp, Homo sapiens
gccaggcctatgcta

SEQ ID NO: 588577 - DNA, 15 bp, Homo sapiens
ccaggcctatgctaa

SEQ ID NO: 588578 - DNA, 15 bp, Homo sapiens
caggcctatgctaat

SEQ ID NO: 588579 - DNA, 15 bp, Homo sapiens
aggcctatgctaatt

SEQ ID NO: 588580 - DNA, 15 bp, Homo sapiens
ggcctatgctaatta

SEQ ID NO: 588581 - DNA, 15 bp, Homo sapiens
gcctatgctaattac

SEQ ID NO: 588582 - DNA, 15 bp, Homo sapiens
cctatgctaattact

SEQ ID NO: 588583 - DNA, 15 bp, Homo sapiens
ctatgctaattactt

SEQ ID NO: 588584 - DNA, 15 bp, Homo sapiens
tatgctaattacttt

SEQ ID NO: 588585 - DNA, 15 bp, Homo sapiens
atgctaattacttta

SEQ ID NO: 588586 - DNA, 15 bp, Homo sapiens
tgctaattactttat

SEQ ID NO: 588587 - DNA, 15 bp, Homo sapiens
gctaattactttatt

SEQ ID NO: 588588 - DNA, 15 bp, Homo sapiens
ctaattactttatta

SEQ ID NO: 588589 - DNA, 15 bp, Homo sapiens
taattactttattag

SEQ ID NO: 588590 - DNA, 15 bp, Homo sapiens
aattactttattagc

SEQ ID NO: 588591 - DNA, 15 bp, Homo sapiens
attactttattagcg

SEQ ID NO: 588592 - DNA, 15 bp, Homo sapiens
ttactttattagcgt

SEQ ID NO: 588593 - DNA, 15 bp, Homo sapiens
tactttattagcgtc

SEQ ID NO: 588594 - DNA, 15 bp, Homo sapiens
actttattagcgtcc

SEQ ID NO: 588595 - DNA, 15 bp, Homo sapiens
ctttattagcgtcct

SEQ ID NO: 588596 - DNA, 15 bp, Homo sapiens
tttattagcgtcctc

SEQ ID NO: 588597 - DNA, 15 bp, Homo sapiens
ttattagcgtcctct

SEQ ID NO: 588598 - DNA, 15 bp, Homo sapiens
tattagcgtcctctc

SEQ ID NO: 588599 - DNA, 15 bp, Homo sapiens
attagcgtcctctct

SEQ ID NO: 588600 - DNA, 15 bp, Homo sapiens
ttagcgtcctctctg

SEQ ID NO: 588601 - DNA, 15 bp, Homo sapiens
tagcgtcctctctgc

SEQ ID NO: 588602 - DNA, 15 bp, Homo sapiens
agcgtcctctctgcc

SEQ ID NO: 588603 - DNA, 15 bp, Homo sapiens
gcgtcctctctgccg

SEQ ID NO: 588604 - DNA, 15 bp, Homo sapiens
cgtcctctctgccgc

SEQ ID NO: 588605 - DNA, 15 bp, Homo sapiens
gtcctctctgccgct

SEQ ID NO: 588606 - DNA, 15 bp, Homo sapiens
tcctctctgccgctc

SEQ ID NO: 588607 - DNA, 15 bp, Homo sapiens
cctctctgccgctcg

SEQ ID NO: 588608 - DNA, 15 bp, Homo sapiens
ctctctgccgctcgc

SEQ ID NO: 588609 - DNA, 15 bp, Homo sapiens
tctctgccgctcgca

SEQ ID NO: 588610 - DNA, 15 bp, Homo sapiens
ctctgccgctcgcag

SEQ ID NO: 588611 - DNA, 15 bp, Homo sapiens
tctgccgctcgcagg

SEQ ID NO: 588612 - DNA, 15 bp, Homo sapiens
ctgccgctcgcaggc

SEQ ID NO: 588613 - DNA, 15 bp, Homo sapiens
tgccgctcgcaggcc

SEQ ID NO: 588614 - DNA, 15 bp, Homo sapiens
gccgctcgcaggcct

SEQ ID NO: 588615 - DNA, 15 bp, Homo sapiens
ccgctcgcaggcctc

SEQ ID NO: 588616 - DNA, 15 bp, Homo sapiens
cgctcgcaggcctct

SEQ ID NO: 588617 - DNA, 15 bp, Homo sapiens
gctcgcaggcctcta

SEQ ID NO: 588618 - DNA, 15 bp, Homo sapiens
ctcgcaggcctctat

SEQ ID NO: 588619 - DNA, 15 bp, Homo sapiens
tcgcaggcctctatt

SEQ ID NO: 588620 - DNA, 15 bp, Homo sapiens
cgcaggcctctatta

SEQ ID NO: 588621 - DNA, 15 bp, Homo sapiens
gcaggcctctattat

SEQ ID NO: 588622 - DNA, 15 bp, Homo sapiens
caggcctctattatt

SEQ ID NO: 588623 - DNA, 15 bp, Homo sapiens
aggcctctattatta

SEQ ID NO: 588624 - DNA, 15 bp, Homo sapiens
ggcctctattattat

SEQ ID NO: 588625 - DNA, 15 bp, Homo sapiens
gcctctattattata

SEQ ID NO: 588626 - DNA, 15 bp, Homo sapiens
cctctattattatag

SEQ ID NO: 588627 - DNA, 15 bp, Homo sapiens
ctctattattatagg

SEQ ID NO: 588628 - DNA, 15 bp, Homo sapiens
tctattattataggt

SEQ ID NO: 588629 - DNA, 15 bp, Homo sapiens
ctattattataggtc

SEQ ID NO: 588630 - DNA, 15 bp, Homo sapiens
tattattataggtca

SEQ ID NO: 588631 - DNA, 15 bp, Homo sapiens
attattataggtcag

SEQ ID NO: 588632 - DNA, 15 bp, Homo sapiens
ttattataggtcagt

SEQ ID NO: 588633 - DNA, 15 bp, Homo sapiens
tattataggtcagta

SEQ ID NO: 588634 - DNA, 15 bp, Homo sapiens
attataggtcagtag

SEQ ID NO: 588635 - DNA, 15 bp, Homo sapiens
ttataggtcagtagt

SEQ ID NO: 588636 - DNA, 15 bp, Homo sapiens
tataggtcagtagta

SEQ ID NO: 588637 - DNA, 15 bp, Homo sapiens
ataggtcagtagtat

SEQ ID NO: 588638 - DNA, 15 bp, Homo sapiens
taggtcagtagtatt

SEQ ID NO: 588639 - DNA, 15 bp, Homo sapiens
aggtcagtagtattc

SEQ ID NO: 588640 - DNA, 15 bp, Homo sapiens
ggtcagtagtattcg

SEQ ID NO: 588641 - DNA, 15 bp, Homo sapiens
gtcagtagtattcga

SEQ ID NO: 588642 - DNA, 15 bp, Homo sapiens
tcagtagtattcgat

SEQ ID NO: 588643 - DNA, 15 bp, Homo sapiens
cagtagtattcgatt

SEQ ID NO: 588644 - DNA, 15 bp, Homo sapiens
agtagtattcgattt

SEQ ID NO: 588645 - DNA, 15 bp, Homo sapiens
gtagtattcgattta

SEQ ID NO: 588646 - DNA, 15 bp, Homo sapiens
tagtattcgatttat

SEQ ID NO: 588647 - DNA, 15 bp, Homo sapiens
agtattcgatttatt

SEQ ID NO: 588648 - DNA, 15 bp, Homo sapiens
gtattcgatttattt

SEQ ID NO: 588649 - DNA, 15 bp, Homo sapiens
tattcgatttattta

SEQ ID NO: 588650 - DNA, 15 bp, Homo sapiens
attcgatttatttaa

SEQ ID NO: 588651 - DNA, 15 bp, Homo sapiens
ttcgatttatttaaa

SEQ ID NO: 588652 - DNA, 15 bp, Homo sapiens
tcgatttatttaaat

SEQ ID NO: 588653 - DNA, 15 bp, Homo sapiens
cgatttatttaaatt

SEQ ID NO: 588654 - DNA, 15 bp, Homo sapiens
gatttatttaaatta

SEQ ID NO: 588655 - DNA, 15 bp, Homo sapiens
atttatttaaattaa

SEQ ID NO: 588656 - DNA, 15 bp, Homo sapiens
tttatttaaattaaa

SEQ ID NO: 588657 - DNA, 15 bp, Homo sapiens
ttatttaaattaaat

SEQ ID NO: 588658 - DNA, 15 bp, Homo sapiens
tatttaaattaaata

SEQ ID NO: 588659 - DNA, 15 bp, Homo sapiens
atttaaattaaatac

SEQ ID NO: 588660 - DNA, 15 bp, Homo sapiens
tttaaattaaatacg

SEQ ID NO: 588661 - DNA, 15 bp, Homo sapiens
ttaaattaaatacgg

SEQ ID NO: 588662 - DNA, 15 bp, Homo sapiens
taaattaaatacgga

SEQ ID NO: 588663 - DNA, 15 bp, Homo sapiens
aaattaaatacggaa

SEQ ID NO: 588664 - DNA, 15 bp, Homo sapiens
aattaaatacggaag

SEQ ID NO: 588665 - DNA, 15 bp, Homo sapiens
attaaatacggaagg

SEQ ID NO: 588666 - DNA, 15 bp, Homo sapiens
ttaaatacggaaggt

SEQ ID NO: 588667 - DNA, 15 bp, Homo sapiens
taaatacggaaggtc

SEQ ID NO: 588668 - DNA, 15 bp, Homo sapiens
aaatacggaaggtca

SEQ ID NO: 588669 - DNA, 15 bp, Homo sapiens
aatacggaaggtcat

SEQ ID NO: 588670 - DNA, 15 bp, Homo sapiens
atacggaaggtcata

SEQ ID NO: 588671 - DNA, 15 bp, Homo sapiens
tacggaaggtcatag

SEQ ID NO: 588672 - DNA, 15 bp, Homo sapiens
acggaaggtcataga

SEQ ID NO: 588673 - DNA, 15 bp, Homo sapiens
cggaaggtcatagat

SEQ ID NO: 588674 - DNA, 15 bp, Homo sapiens
ggaaggtcatagatt

SEQ ID NO: 588675 - DNA, 15 bp, Homo sapiens
gaaggtcatagatta

SEQ ID NO: 588676 - DNA, 15 bp, Homo sapiens
aaggtcatagattaa

SEQ ID NO: 588677 - DNA, 15 bp, Homo sapiens
aggtcatagattaag

SEQ ID NO: 588678 - DNA, 15 bp, Homo sapiens
ggtcatagattaagc

SEQ ID NO: 588679 - DNA, 15 bp, Homo sapiens
gtcatagattaagca

SEQ ID NO: 588680 - DNA, 15 bp, Homo sapiens
tcatagattaagcaa

SEQ ID NO: 588681 - DNA, 15 bp, Homo sapiens
catagattaagcaag

SEQ ID NO: 588682 - DNA, 15 bp, Homo sapiens
atagattaagcaaga

SEQ ID NO: 588683 - DNA, 15 bp, Homo sapiens
tagattaagcaagaa

SEQ ID NO: 588684 - DNA, 15 bp, Homo sapiens
agattaagcaagaaa

SEQ ID NO: 588685 - DNA, 15 bp, Homo sapiens
gattaagcaagaaag

SEQ ID NO: 588686 - DNA, 15 bp, Homo sapiens
attaagcaagaaagt

SEQ ID NO: 588687 - DNA, 15 bp, Homo sapiens
ttaagcaagaaagtg

SEQ ID NO: 588688 - DNA, 15 bp, Homo sapiens
taagcaagaaagtgc

SEQ ID NO: 588689 - DNA, 15 bp, Homo sapiens
aagcaagaaagtgcc

SEQ ID NO: 588690 - DNA, 15 bp, Homo sapiens
agcaagaaagtgcca

SEQ ID NO: 588691 - DNA, 15 bp, Homo sapiens
gcaagaaagtgccag

SEQ ID NO: 588692 - DNA, 15 bp, Homo sapiens
caagaaagtgccagc

SEQ ID NO: 588693 - DNA, 15 bp, Homo sapiens
aagaaagtgccagca

SEQ ID NO: 588694 - DNA, 15 bp, Homo sapiens
agaaagtgccagcaa

SEQ ID NO: 588695 - DNA, 15 bp, Homo sapiens
gaaagtgccagcaac

SEQ ID NO: 588696 - DNA, 15 bp, Homo sapiens
aaagtgccagcaaca

SEQ ID NO: 588697 - DNA, 15 bp, Homo sapiens
aagtgccagcaacat

SEQ ID NO: 588698 - DNA, 15 bp, Homo sapiens
agtgccagcaacatg

SEQ ID NO: 588699 - DNA, 15 bp, Homo sapiens
gtgccagcaacatgg

SEQ ID NO: 588700 - DNA, 15 bp, Homo sapiens
tgccagcaacatggt

SEQ ID NO: 588701 - DNA, 15 bp, Homo sapiens
gccagcaacatggtg

SEQ ID NO: 588702 - DNA, 15 bp, Homo sapiens
ccagcaacatggtgc

SEQ ID NO: 588703 - DNA, 15 bp, Homo sapiens
cagcaacatggtgcg

SEQ ID NO: 588704 - DNA, 15 bp, Homo sapiens
agcaacatggtgcgt

SEQ ID NO: 588705 - DNA, 15 bp, Homo sapiens
gcaacatggtgcgtg

SEQ ID NO: 588706 - DNA, 15 bp, Homo sapiens
caacatggtgcgtgc

SEQ ID NO: 588707 - DNA, 15 bp, Homo sapiens
aacatggtgcgtgcc

SEQ ID NO: 588708 - DNA, 15 bp, Homo sapiens
acatggtgcgtgcct

SEQ ID NO: 588709 - DNA, 15 bp, Homo sapiens
catggtgcgtgcctc

SEQ ID NO: 588710 - DNA, 15 bp, Homo sapiens
atggtgcgtgcctct

SEQ ID NO: 588711 - DNA, 15 bp, Homo sapiens
tggtgcgtgcctctg

SEQ ID NO: 588712 - DNA, 15 bp, Homo sapiens
ggtgcgtgcctctga

SEQ ID NO: 588713 - DNA, 15 bp, Homo sapiens
gtgcgtgcctctgac

SEQ ID NO: 588714 - DNA, 15 bp, Homo sapiens
tgcgtgcctctgact

SEQ ID NO: 588715 - DNA, 15 bp, Homo sapiens
gcgtgcctctgactg

SEQ ID NO: 588716 - DNA, 15 bp, Homo sapiens
cgtgcctctgactgg

SEQ ID NO: 588717 - DNA, 15 bp, Homo sapiens
gtgcctctgactggg

SEQ ID NO: 588718 - DNA, 15 bp, Homo sapiens
tgcctctgactgggc

SEQ ID NO: 588719 - DNA, 15 bp, Homo sapiens
gcctctgactgggca

SEQ ID NO: 588720 - DNA, 15 bp, Homo sapiens
cctctgactgggcac

SEQ ID NO: 588721 - DNA, 15 bp, Homo sapiens
ctctgactgggcact

SEQ ID NO: 588722 - DNA, 15 bp, Homo sapiens
tctgactgggcacta

SEQ ID NO: 588723 - DNA, 15 bp, Homo sapiens
ctgactgggcactaa

SEQ ID NO: 588724 - DNA, 15 bp, Homo sapiens
tgactgggcactaac

SEQ ID NO: 588725 - DNA, 15 bp, Homo sapiens
gactgggcactaacc

SEQ ID NO: 588726 - DNA, 15 bp, Homo sapiens
actgggcactaaccc

SEQ ID NO: 588727 - DNA, 15 bp, Homo sapiens
ctgggcactaaccct

SEQ ID NO: 588728 - DNA, 15 bp, Homo sapiens
tgggcactaaccctc

SEQ ID NO: 588729 - DNA, 15 bp, Homo sapiens
gggcactaaccctcc

SEQ ID NO: 588730 - DNA, 15 bp, Homo sapiens
ggcactaaccctcca

SEQ ID NO: 588731 - DNA, 15 bp, Homo sapiens
gcactaaccctccaa

SEQ ID NO: 588732 - DNA, 15 bp, Homo sapiens
cactaaccctccaag

SEQ ID NO: 588733 - DNA, 15 bp, Homo sapiens
actaaccctccaagt

SEQ ID NO: 588734 - DNA, 15 bp, Homo sapiens
ctaaccctccaagtc

SEQ ID NO: 588735 - DNA, 15 bp, Homo sapiens
taaccctccaagtct

SEQ ID NO: 588736 - DNA, 15 bp, Homo sapiens
aaccctccaagtctt

SEQ ID NO: 588737 - DNA, 15 bp, Homo sapiens
accctccaagtctta

SEQ ID NO: 588738 - DNA, 15 bp, Homo sapiens
ccctccaagtcttag

SEQ ID NO: 588739 - DNA, 15 bp, Homo sapiens
cctccaagtcttagt

SEQ ID NO: 588740 - DNA, 15 bp, Homo sapiens
ctccaagtcttagtt

SEQ ID NO: 588741 - DNA, 15 bp, Homo sapiens
tccaagtcttagttt

SEQ ID NO: 588742 - DNA, 15 bp, Homo sapiens
ccaagtcttagtttt

SEQ ID NO: 588743 - DNA, 15 bp, Homo sapiens
caagtcttagttttc

SEQ ID NO: 588744 - DNA, 15 bp, Homo sapiens
aagtcttagttttcc

SEQ ID NO: 588745 - DNA, 15 bp, Homo sapiens
agtcttagttttccc

SEQ ID NO: 588746 - DNA, 15 bp, Homo sapiens
gtcttagttttccca

SEQ ID NO: 588747 - DNA, 15 bp, Homo sapiens
tcttagttttcccaa

SEQ ID NO: 588748 - DNA, 15 bp, Homo sapiens
cttagttttcccaac

SEQ ID NO: 588749 - DNA, 15 bp, Homo sapiens
ttagttttcccaacc

SEQ ID NO: 588750 - DNA, 15 bp, Homo sapiens
tagttttcccaacca

SEQ ID NO: 588751 - DNA, 15 bp, Homo sapiens
agttttcccaaccat

SEQ ID NO: 588752 - DNA, 15 bp, Homo sapiens
gttttcccaaccata

SEQ ID NO: 588753 - DNA, 15 bp, Homo sapiens
ttttcccaaccataa

SEQ ID NO: 588754 - DNA, 15 bp, Homo sapiens
tttcccaaccataac

SEQ ID NO: 588755 - DNA, 15 bp, Homo sapiens
ttcccaaccataact

SEQ ID NO: 588756 - DNA, 15 bp, Homo sapiens
tcccaaccataactg

SEQ ID NO: 588757 - DNA, 15 bp, Homo sapiens
cccaaccataactgg

SEQ ID NO: 588758 - DNA, 15 bp, Homo sapiens
ccaaccataactggc

SEQ ID NO: 588759 - DNA, 15 bp, Homo sapiens
caaccataactggcc

SEQ ID NO: 588760 - DNA, 15 bp, Homo sapiens
aaccataactggcca

SEQ ID NO: 588761 - DNA, 15 bp, Homo sapiens
accataactggccaa

SEQ ID NO: 588762 - DNA, 15 bp, Homo sapiens
ccataactggccaat

SEQ ID NO: 588763 - DNA, 15 bp, Homo sapiens
cataactggccaatg

SEQ ID NO: 588764 - DNA, 15 bp, Homo sapiens
ataactggccaatga

SEQ ID NO: 588765 - DNA, 15 bp, Homo sapiens
taactggccaatgaa

SEQ ID NO: 588766 - DNA, 15 bp, Homo sapiens
aactggccaatgaac

SEQ ID NO: 588767 - DNA, 15 bp, Homo sapiens
actggccaatgaaca

SEQ ID NO: 588768 - DNA, 15 bp, Homo sapiens
ctggccaatgaacag

SEQ ID NO: 588769 - DNA, 15 bp, Homo sapiens
tggccaatgaacagc

SEQ ID NO: 588770 - DNA, 15 bp, Homo sapiens
ggccaatgaacagca

SEQ ID NO: 588771 - DNA, 15 bp, Homo sapiens
gccaatgaacagcag

SEQ ID NO: 588772 - DNA, 15 bp, Homo sapiens
ccaatgaacagcagc

SEQ ID NO: 588773 - DNA, 15 bp, Homo sapiens
caatgaacagcagct

SEQ ID NO: 588774 - DNA, 15 bp, Homo sapiens
aatgaacagcagctc

SEQ ID NO: 588775 - DNA, 15 bp, Homo sapiens
atgaacagcagctct

SEQ ID NO: 588776 - DNA, 15 bp, Homo sapiens
tgaacagcagctctg

SEQ ID NO: 588777 - DNA, 15 bp, Homo sapiens
gaacagcagctctgg

SEQ ID NO: 588778 - DNA, 15 bp, Homo sapiens
aacagcagctctgga

SEQ ID NO: 588779 - DNA, 15 bp, Homo sapiens
acagcagctctggat

SEQ ID NO: 588780 - DNA, 15 bp, Homo sapiens
cagcagctctggatg

SEQ ID NO: 588781 - DNA, 15 bp, Homo sapiens
agcagctctggatgc

SEQ ID NO: 588782 - DNA, 15 bp, Homo sapiens
gcagctctggatgca

SEQ ID NO: 588783 - DNA, 15 bp, Homo sapiens
cagctctggatgcag

SEQ ID NO: 588784 - DNA, 15 bp, Homo sapiens
agctctggatgcagc

SEQ ID NO: 588785 - DNA, 15 bp, Homo sapiens
gctctggatgcagct

SEQ ID NO: 588786 - DNA, 15 bp, Homo sapiens
ctctggatgcagcta

SEQ ID NO: 588787 - DNA, 15 bp, Homo sapiens
tctggatgcagctaa

SEQ ID NO: 588788 - DNA, 15 bp, Homo sapiens
ctggatgcagctaaa

SEQ ID NO: 588789 - DNA, 15 bp, Homo sapiens
tggatgcagctaaag

SEQ ID NO: 588790 - DNA, 15 bp, Homo sapiens
ggatgcagctaaagg

SEQ ID NO: 588791 - DNA, 15 bp, Homo sapiens
gatgcagctaaagga

SEQ ID NO: 588792 - DNA, 15 bp, Homo sapiens
atgcagctaaaggaa

SEQ ID NO: 588793 - DNA, 15 bp, Homo sapiens
tgcagctaaaggaag

SEQ ID NO: 588794 - DNA, 15 bp, Homo sapiens
gcagctaaaggaaga

SEQ ID NO: 588795 - DNA, 15 bp, Homo sapiens
cagctaaaggaagac

SEQ ID NO: 588796 - DNA, 15 bp, Homo sapiens
agctaaaggaagact

SEQ ID NO: 588797 - DNA, 15 bp, Homo sapiens
gctaaaggaagactg

SEQ ID NO: 588798 - DNA, 15 bp, Homo sapiens
ctaaaggaagactga

SEQ ID NO: 588799 - DNA, 15 bp, Homo sapiens
taaaggaagactgaa

SEQ ID NO: 588800 - DNA, 15 bp, Homo sapiens
aaaggaagactgaag

SEQ ID NO: 588801 - DNA, 15 bp, Homo sapiens
aaggaagactgaagc

SEQ ID NO: 588802 - DNA, 15 bp, Homo sapiens
aggaagactgaagct

SEQ ID NO: 588803 - DNA, 15 bp, Homo sapiens
ggaagactgaagctg

SEQ ID NO: 588804 - DNA, 15 bp, Homo sapiens
gaagactgaagctgt

SEQ ID NO: 588805 - DNA, 15 bp, Homo sapiens
aagactgaagctgta

SEQ ID NO: 588806 - DNA, 15 bp, Homo sapiens
agactgaagctgtag

SEQ ID NO: 588807 - DNA, 15 bp, Homo sapiens
gactgaagctgtagg

SEQ ID NO: 588808 - DNA, 15 bp, Homo sapiens
actgaagctgtaggt

SEQ ID NO: 588809 - DNA, 15 bp, Homo sapiens
ctgaagctgtaggtc

SEQ ID NO: 588810 - DNA, 15 bp, Homo sapiens
tgaagctgtaggtcc

SEQ ID NO: 588811 - DNA, 15 bp, Homo sapiens
gaagctgtaggtccc

SEQ ID NO: 588812 - DNA, 15 bp, Homo sapiens
aagctgtaggtcccg

SEQ ID NO: 588813 - DNA, 15 bp, Homo sapiens
agctgtaggtcccgt

SEQ ID NO: 588814 - DNA, 15 bp, Homo sapiens
gctgtaggtcccgtg

SEQ ID NO: 588815 - DNA, 15 bp, Homo sapiens
ctgtaggtcccgtgc

SEQ ID NO: 588816 - DNA, 15 bp, Homo sapiens
tgtaggtcccgtgct

SEQ ID NO: 588817 - DNA, 15 bp, Homo sapiens
gtaggtcccgtgctc

SEQ ID NO: 588818 - DNA, 15 bp, Homo sapiens
taggtcccgtgctcg

SEQ ID NO: 588819 - DNA, 15 bp, Homo sapiens
aggtcccgtgctcgg

SEQ ID NO: 588820 - DNA, 15 bp, Homo sapiens
ggtcccgtgctcggc

SEQ ID NO: 588821 - DNA, 15 bp, Homo sapiens
gtcccgtgctcggcg

SEQ ID NO: 588822 - DNA, 15 bp, Homo sapiens
tcccgtgctcggcgc

SEQ ID NO: 588823 - DNA, 15 bp, Homo sapiens
cccgtgctcggcgca

SEQ ID NO: 588824 - DNA, 15 bp, Homo sapiens
ccgtgctcggcgcag

SEQ ID NO: 588825 - DNA, 15 bp, Homo sapiens
cgtgctcggcgcagg

SEQ ID NO: 588826 - DNA, 15 bp, Homo sapiens
gtgctcggcgcaggg

SEQ ID NO: 588827 - DNA, 15 bp, Homo sapiens
tgctcggcgcagggc

SEQ ID NO: 588828 - DNA, 15 bp, Homo sapiens
gctcggcgcagggcc

SEQ ID NO: 588829 - DNA, 15 bp, Homo sapiens
ctcggcgcagggccc

SEQ ID NO: 588830 - DNA, 15 bp, Homo sapiens
tcggcgcagggcccc

SEQ ID NO: 588831 - DNA, 15 bp, Homo sapiens
cggcgcagggccccc

SEQ ID NO: 588832 - DNA, 15 bp, Homo sapiens
ggcgcagggccccct

SEQ ID NO: 588833 - DNA, 15 bp, Homo sapiens
gcgcagggccccctg

SEQ ID NO: 588834 - DNA, 15 bp, Homo sapiens
cgcagggccccctgc

SEQ ID NO: 588835 - DNA, 15 bp, Homo sapiens
gcagggccccctgca

SEQ ID NO: 588836 - DNA, 15 bp, Homo sapiens
cagggccccctgcaa

SEQ ID NO: 588837 - DNA, 15 bp, Homo sapiens
agggccccctgcaag

SEQ ID NO: 588838 - DNA, 15 bp, Homo sapiens
gggccccctgcaagg

SEQ ID NO: 588839 - DNA, 15 bp, Homo sapiens
ggccccctgcaagga

SEQ ID NO: 588840 - DNA, 15 bp, Homo sapiens
gccccctgcaaggaa

SEQ ID NO: 588841 - DNA, 15 bp, Homo sapiens
ccccctgcaaggaag

SEQ ID NO: 588842 - DNA, 15 bp, Homo sapiens
cccctgcaaggaagg

SEQ ID NO: 588843 - DNA, 15 bp, Homo sapiens
ccctgcaaggaaggt

SEQ ID NO: 588844 - DNA, 15 bp, Homo sapiens
cctgcaaggaaggtt

SEQ ID NO: 588845 - DNA, 15 bp, Homo sapiens
ctgcaaggaaggttt

SEQ ID NO: 588846 - DNA, 15 bp, Homo sapiens
tgcaaggaaggtttc

SEQ ID NO: 588847 - DNA, 15 bp, Homo sapiens
gcaaggaaggtttcg

SEQ ID NO: 588848 - DNA, 15 bp, Homo sapiens
caaggaaggtttcgg

SEQ ID NO: 588849 - DNA, 15 bp, Homo sapiens
aaggaaggtttcgga

SEQ ID NO: 588850 - DNA, 15 bp, Homo sapiens
aggaaggtttcggag

SEQ ID NO: 588851 - DNA, 15 bp, Homo sapiens
ggaaggtttcggagg

SEQ ID NO: 588852 - DNA, 15 bp, Homo sapiens
gaaggtttcggaggg

SEQ ID NO: 588853 - DNA, 15 bp, Homo sapiens
aaggtttcggaggga

SEQ ID NO: 588854 - DNA, 15 bp, Homo sapiens
aggtttcggagggac

SEQ ID NO: 588855 - DNA, 15 bp, Homo sapiens
ggtttcggagggact

SEQ ID NO: 588856 - DNA, 15 bp, Homo sapiens
gtttcggagggactg

SEQ ID NO: 588857 - DNA, 15 bp, Homo sapiens
tttcggagggactgg

SEQ ID NO: 588858 - DNA, 15 bp, Homo sapiens
ttcggagggactgga

SEQ ID NO: 588859 - DNA, 15 bp, Homo sapiens
tcggagggactggat

SEQ ID NO: 588860 - DNA, 15 bp, Homo sapiens
cggagggactggatg

SEQ ID NO: 588861 - DNA, 15 bp, Homo sapiens
ggagggactggatgg

SEQ ID NO: 588862 - DNA, 15 bp, Homo sapiens
gagggactggatggg

SEQ ID NO: 588863 - DNA, 15 bp, Homo sapiens
agggactggatgggg

SEQ ID NO: 588864 - DNA, 15 bp, Homo sapiens
gggactggatggggt

SEQ ID NO: 588865 - DNA, 15 bp, Homo sapiens
ggactggatggggtc

SEQ ID NO: 588866 - DNA, 15 bp, Homo sapiens
gactggatggggtct

SEQ ID NO: 588867 - DNA, 15 bp, Homo sapiens
actggatggggtctt

SEQ ID NO: 588868 - DNA, 15 bp, Homo sapiens
ctggatggggtcttt

SEQ ID NO: 588869 - DNA, 15 bp, Homo sapiens
tggatggggtctttg

SEQ ID NO: 588870 - DNA, 15 bp, Homo sapiens
ggatggggtctttga

SEQ ID NO: 588871 - DNA, 15 bp, Homo sapiens
gatggggtctttgaa

SEQ ID NO: 588872 - DNA, 15 bp, Homo sapiens
atggggtctttgaac

SEQ ID NO: 588873 - DNA, 15 bp, Homo sapiens
tggggtctttgaact

SEQ ID NO: 588874 - DNA, 15 bp, Homo sapiens
ggggtctttgaacta

SEQ ID NO: 588875 - DNA, 15 bp, Homo sapiens
gggtctttgaactat

SEQ ID NO: 588876 - DNA, 15 bp, Homo sapiens
ggtctttgaactatc

SEQ ID NO: 588877 - DNA, 15 bp, Homo sapiens
gtctttgaactatct

SEQ ID NO: 588878 - DNA, 15 bp, Homo sapiens
tctttgaactatctg

SEQ ID NO: 588879 - DNA, 15 bp, Homo sapiens
ctttgaactatctgt

SEQ ID NO: 588880 - DNA, 15 bp, Homo sapiens
tttgaactatctgtc

SEQ ID NO: 588881 - DNA, 15 bp, Homo sapiens
ttgaactatctgtct

SEQ ID NO: 588882 - DNA, 15 bp, Homo sapiens
tgaactatctgtctt

SEQ ID NO: 588883 - DNA, 15 bp, Homo sapiens
gaactatctgtcttt

SEQ ID NO: 588884 - DNA, 15 bp, Homo sapiens
aactatctgtctttc

SEQ ID NO: 588885 - DNA, 15 bp, Homo sapiens
actatctgtctttcc

SEQ ID NO: 588886 - DNA, 15 bp, Homo sapiens
ctatctgtctttccc

SEQ ID NO: 588887 - DNA, 15 bp, Homo sapiens
tatctgtctttccct

SEQ ID NO: 588888 - DNA, 15 bp, Homo sapiens
atctgtctttccctt

SEQ ID NO: 588889 - DNA, 15 bp, Homo sapiens
tctgtctttcccttt

SEQ ID NO: 588890 - DNA, 15 bp, Homo sapiens
ctgtctttcccttta

SEQ ID NO: 588891 - DNA, 15 bp, Homo sapiens
tgtctttccctttac

SEQ ID NO: 588892 - DNA, 15 bp, Homo sapiens
gtctttccctttact

SEQ ID NO: 588893 - DNA, 15 bp, Homo sapiens
tctttccctttactg

SEQ ID NO: 588894 - DNA, 15 bp, Homo sapiens
ctttccctttactgc

SEQ ID NO: 588895 - DNA, 15 bp, Homo sapiens
tttccctttactgca

SEQ ID NO: 588896 - DNA, 15 bp, Homo sapiens
ttccctttactgcag

SEQ ID NO: 588897 - DNA, 15 bp, Homo sapiens
tccctttactgcagt

SEQ ID NO: 588898 - DNA, 15 bp, Homo sapiens
ccctttactgcagtg

SEQ ID NO: 588899 - DNA, 15 bp, Homo sapiens
cctttactgcagtgg

SEQ ID NO: 588900 - DNA, 15 bp, Homo sapiens
ctttactgcagtggg

SEQ ID NO: 588901 - DNA, 15 bp, Homo sapiens
tttactgcagtgggc

SEQ ID NO: 588902 - DNA, 15 bp, Homo sapiens
ttactgcagtgggcc

SEQ ID NO: 588903 - DNA, 15 bp, Homo sapiens
tactgcagtgggccc

SEQ ID NO: 588904 - DNA, 15 bp, Homo sapiens
actgcagtgggccca

SEQ ID NO: 588905 - DNA, 15 bp, Homo sapiens
ctgcagtgggcccag

SEQ ID NO: 588906 - DNA, 15 bp, Homo sapiens
tgcagtgggcccagg

SEQ ID NO: 588907 - DNA, 15 bp, Homo sapiens
gcagtgggcccaggg

SEQ ID NO: 588908 - DNA, 15 bp, Homo sapiens
cagtgggcccagggg

SEQ ID NO: 588909 - DNA, 15 bp, Homo sapiens
agtgggcccaggggc

SEQ ID NO: 588910 - DNA, 15 bp, Homo sapiens
gtgggcccaggggca

SEQ ID NO: 588911 - DNA, 15 bp, Homo sapiens
tgggcccaggggcag

SEQ ID NO: 588912 - DNA, 15 bp, Homo sapiens
gggcccaggggcagg

SEQ ID NO: 588913 - DNA, 15 bp, Homo sapiens
ggcccaggggcaggc

SEQ ID NO: 588914 - DNA, 15 bp, Homo sapiens
gcccaggggcaggcc

SEQ ID NO: 588915 - DNA, 15 bp, Homo sapiens
cccaggggcaggcca

SEQ ID NO: 588916 - DNA, 15 bp, Homo sapiens
ccaggggcaggccaa

SEQ ID NO: 588917 - DNA, 15 bp, Homo sapiens
caggggcaggccaaa

SEQ ID NO: 588918 - DNA, 15 bp, Homo sapiens
aggggcaggccaaag

SEQ ID NO: 588919 - DNA, 15 bp, Homo sapiens
ggggcaggccaaagt

SEQ ID NO: 588920 - DNA, 15 bp, Homo sapiens
gggcaggccaaagtt

SEQ ID NO: 588921 - DNA, 15 bp, Homo sapiens
ggcaggccaaagttg

SEQ ID NO: 588922 - DNA, 15 bp, Homo sapiens
gcaggccaaagttgc

SEQ ID NO: 588923 - DNA, 15 bp, Homo sapiens
caggccaaagttgct

SEQ ID NO: 588924 - DNA, 15 bp, Homo sapiens
aggccaaagttgctc

SEQ ID NO: 588925 - DNA, 15 bp, Homo sapiens
ggccaaagttgctcc

SEQ ID NO: 588926 - DNA, 15 bp, Homo sapiens
gccaaagttgctccc

SEQ ID NO: 588927 - DNA, 15 bp, Homo sapiens
ccaaagttgctcccg

SEQ ID NO: 588928 - DNA, 15 bp, Homo sapiens
caaagttgctcccgt

SEQ ID NO: 588929 - DNA, 15 bp, Homo sapiens
aaagttgctcccgtg

SEQ ID NO: 588930 - DNA, 15 bp, Homo sapiens
aagttgctcccgtga

SEQ ID NO: 588931 - DNA, 15 bp, Homo sapiens
agttgctcccgtgat

SEQ ID NO: 588932 - DNA, 15 bp, Homo sapiens
gttgctcccgtgatt

SEQ ID NO: 588933 - DNA, 15 bp, Homo sapiens
ttgctcccgtgattg

SEQ ID NO: 588934 - DNA, 15 bp, Homo sapiens
tgctcccgtgattga

SEQ ID NO: 588935 - DNA, 15 bp, Homo sapiens
gctcccgtgattgac

SEQ ID NO: 588936 - DNA, 15 bp, Homo sapiens
ctcccgtgattgact

SEQ ID NO: 588937 - DNA, 15 bp, Homo sapiens
tcccgtgattgactt

SEQ ID NO: 588938 - DNA, 15 bp, Homo sapiens
cccgtgattgacttg

SEQ ID NO: 588939 - DNA, 15 bp, Homo sapiens
ccgtgattgacttga

SEQ ID NO: 588940 - DNA, 15 bp, Homo sapiens
cgtgattgacttgaa

SEQ ID NO: 588941 - DNA, 15 bp, Homo sapiens
gtgattgacttgaac

SEQ ID NO: 588942 - DNA, 15 bp, Homo sapiens
tgattgacttgaacg

SEQ ID NO: 588943 - DNA, 15 bp, Homo sapiens
gattgacttgaacgt

SEQ ID NO: 588944 - DNA, 15 bp, Homo sapiens
attgacttgaacgtg

SEQ ID NO: 588945 - DNA, 15 bp, Homo sapiens
ttgacttgaacgtgc

SEQ ID NO: 588946 - DNA, 15 bp, Homo sapiens
tgacttgaacgtgca

SEQ ID NO: 588947 - DNA, 15 bp, Homo sapiens
gacttgaacgtgcac

SEQ ID NO: 588948 - DNA, 15 bp, Homo sapiens
acttgaacgtgcacg

SEQ ID NO: 588949 - DNA, 15 bp, Homo sapiens
cttgaacgtgcacgt

SEQ ID NO: 588950 - DNA, 15 bp, Homo sapiens
ttgaacgtgcacgtt

SEQ ID NO: 588951 - DNA, 15 bp, Homo sapiens
tgaacgtgcacgttc

SEQ ID NO: 588952 - DNA, 15 bp, Homo sapiens
gaacgtgcacgttcc

SEQ ID NO: 588953 - DNA, 15 bp, Homo sapiens
aacgtgcacgttcct

SEQ ID NO: 588954 - DNA, 15 bp, Homo sapiens
acgtgcacgttccta

SEQ ID NO: 588955 - DNA, 15 bp, Homo sapiens
cgtgcacgttcctaa

SEQ ID NO: 588956 - DNA, 15 bp, Homo sapiens
gtgcacgttcctaat

SEQ ID NO: 588957 - DNA, 15 bp, Homo sapiens
tgcacgttcctaatc

SEQ ID NO: 588958 - DNA, 15 bp, Homo sapiens
gcacgttcctaatcc

SEQ ID NO: 588959 - DNA, 15 bp, Homo sapiens
cacgttcctaatccc

SEQ ID NO: 588960 - DNA, 15 bp, Homo sapiens
acgttcctaatccct

SEQ ID NO: 588961 - DNA, 15 bp, Homo sapiens
cgttcctaatccctg

SEQ ID NO: 588962 - DNA, 15 bp, Homo sapiens
gttcctaatccctga

SEQ ID NO: 588963 - DNA, 15 bp, Homo sapiens
ttcctaatccctgac

SEQ ID NO: 588964 - DNA, 15 bp, Homo sapiens
tcctaatccctgaca

SEQ ID NO: 588965 - DNA, 15 bp, Homo sapiens
cctaatccctgacat

SEQ ID NO: 588966 - DNA, 15 bp, Homo sapiens
ctaatccctgacatt

SEQ ID NO: 588967 - DNA, 15 bp, Homo sapiens
taatccctgacattt

SEQ ID NO: 588968 - DNA, 15 bp, Homo sapiens
aatccctgacatttc

SEQ ID NO: 588969 - DNA, 15 bp, Homo sapiens
atccctgacatttct

SEQ ID NO: 588970 - DNA, 15 bp, Homo sapiens
tccctgacatttcta

SEQ ID NO: 588971 - DNA, 15 bp, Homo sapiens
ccctgacatttctaa

SEQ ID NO: 588972 - DNA, 15 bp, Homo sapiens
cctgacatttctaaa

SEQ ID NO: 588973 - DNA, 15 bp, Homo sapiens
ctgacatttctaaag

SEQ ID NO: 588974 - DNA, 15 bp, Homo sapiens
tgacatttctaaagc

SEQ ID NO: 588975 - DNA, 15 bp, Homo sapiens
gacatttctaaagct

SEQ ID NO: 588976 - DNA, 15 bp, Homo sapiens
acatttctaaagctc

SEQ ID NO: 588977 - DNA, 15 bp, Homo sapiens
catttctaaagctct

SEQ ID NO: 588978 - DNA, 15 bp, Homo sapiens
atttctaaagctctg

SEQ ID NO: 588979 - DNA, 15 bp, Homo sapiens
tttctaaagctctgg

SEQ ID NO: 588980 - DNA, 15 bp, Homo sapiens
ttctaaagctctggc

SEQ ID NO: 588981 - DNA, 15 bp, Homo sapiens
tctaaagctctggct

SEQ ID NO: 588982 - DNA, 15 bp, Homo sapiens
ctaaagctctggctc

SEQ ID NO: 588983 - DNA, 15 bp, Homo sapiens
taaagctctggctca

SEQ ID NO: 588984 - DNA, 15 bp, Homo sapiens
aaagctctggctcat

SEQ ID NO: 588985 - DNA, 15 bp, Homo sapiens
aagctctggctcatt

SEQ ID NO: 588986 - DNA, 15 bp, Homo sapiens
agctctggctcatta

SEQ ID NO: 588987 - DNA, 15 bp, Homo sapiens
gctctggctcattaa

SEQ ID NO: 588988 - DNA, 15 bp, Homo sapiens
ctctggctcattaac

SEQ ID NO: 588989 - DNA, 15 bp, Homo sapiens
tctggctcattaacg

SEQ ID NO: 588990 - DNA, 15 bp, Homo sapiens
ctggctcattaacga

SEQ ID NO: 588991 - DNA, 15 bp, Homo sapiens
tggctcattaacgag

SEQ ID NO: 588992 - DNA, 15 bp, Homo sapiens
ggctcattaacgagg

SEQ ID NO: 588993 - DNA, 15 bp, Homo sapiens
gctcattaacgaggg

SEQ ID NO: 588994 - DNA, 15 bp, Homo sapiens
ctcattaacgaggga

SEQ ID NO: 588995 - DNA, 15 bp, Homo sapiens
tcattaacgagggaa

SEQ ID NO: 588996 - DNA, 15 bp, Homo sapiens
cattaacgagggaaa

SEQ ID NO: 588997 - DNA, 15 bp, Homo sapiens
attaacgagggaaag

SEQ ID NO: 588998 - DNA, 15 bp, Homo sapiens
ttaacgagggaaaga

SEQ ID NO: 588999 - DNA, 15 bp, Homo sapiens
taacgagggaaagac

SEQ ID NO: 589000 - DNA, 15 bp, Homo sapiens
aacgagggaaagacg

SEQ ID NO: 589001 - DNA, 15 bp, Homo sapiens
acgagggaaagacgt

SEQ ID NO: 589002 - DNA, 15 bp, Homo sapiens
cgagggaaagacgtg

SEQ ID NO: 589003 - DNA, 15 bp, Homo sapiens
gagggaaagacgtga

SEQ ID NO: 589004 - DNA, 15 bp, Homo sapiens
agggaaagacgtgaa

SEQ ID NO: 589005 - DNA, 15 bp, Homo sapiens
gggaaagacgtgaac

SEQ ID NO: 589006 - DNA, 15 bp, Homo sapiens
ggaaagacgtgaacc

SEQ ID NO: 589007 - DNA, 15 bp, Homo sapiens
gaaagacgtgaacca

SEQ ID NO: 589008 - DNA, 15 bp, Homo sapiens
aaagacgtgaaccag

SEQ ID NO: 589009 - DNA, 15 bp, Homo sapiens
aagacgtgaaccagc

SEQ ID NO: 589010 - DNA, 15 bp, Homo sapiens
agacgtgaaccagct

SEQ ID NO: 589011 - DNA, 15 bp, Homo sapiens
gacgtgaaccagctg

SEQ ID NO: 589012 - DNA, 15 bp, Homo sapiens
acgtgaaccagctgg

SEQ ID NO: 589013 - DNA, 15 bp, Homo sapiens
cgtgaaccagctggg

SEQ ID NO: 589014 - DNA, 15 bp, Homo sapiens
gtgaaccagctgggg

SEQ ID NO: 589015 - DNA, 15 bp, Homo sapiens
tgaaccagctggggg

SEQ ID NO: 589016 - DNA, 15 bp, Homo sapiens
gaaccagctggggga

SEQ ID NO: 589017 - DNA, 15 bp, Homo sapiens
aaccagctgggggag

SEQ ID NO: 589018 - DNA, 15 bp, Homo sapiens
accagctgggggagt

SEQ ID NO: 589019 - DNA, 15 bp, Homo sapiens
ccagctgggggagtg

SEQ ID NO: 589020 - DNA, 15 bp, Homo sapiens
cagctgggggagtgg

SEQ ID NO: 589021 - DNA, 15 bp, Homo sapiens
agctgggggagtggg

SEQ ID NO: 589022 - DNA, 15 bp, Homo sapiens
gctgggggagtgggg

SEQ ID NO: 589023 - DNA, 15 bp, Homo sapiens
ctgggggagtgggga

SEQ ID NO: 589024 - DNA, 15 bp, Homo sapiens
tgggggagtggggat

SEQ ID NO: 589025 - DNA, 15 bp, Homo sapiens
gggggagtggggatc

SEQ ID NO: 589026 - DNA, 15 bp, Homo sapiens
ggggagtggggatcg

SEQ ID NO: 589027 - DNA, 15 bp, Homo sapiens
gggagtggggatcgc

SEQ ID NO: 589028 - DNA, 15 bp, Homo sapiens
ggagtggggatcgca

SEQ ID NO: 589029 - DNA, 15 bp, Homo sapiens
gagtggggatcgcag

SEQ ID NO: 589030 - DNA, 15 bp, Homo sapiens
agtggggatcgcagt

SEQ ID NO: 589031 - DNA, 15 bp, Homo sapiens
gtggggatcgcagtg

SEQ ID NO: 589032 - DNA, 15 bp, Homo sapiens
tggggatcgcagtgc

SEQ ID NO: 589033 - DNA, 15 bp, Homo sapiens
ggggatcgcagtgcc

SEQ ID NO: 589034 - DNA, 15 bp, Homo sapiens
gggatcgcagtgccc

SEQ ID NO: 589035 - DNA, 15 bp, Homo sapiens
ggatcgcagtgcccc

SEQ ID NO: 589036 - DNA, 15 bp, Homo sapiens
gatcgcagtgcccca

SEQ ID NO: 589037 - DNA, 15 bp, Homo sapiens
atcgcagtgccccac

SEQ ID NO: 589038 - DNA, 15 bp, Homo sapiens
tcgcagtgccccacg

SEQ ID NO: 589039 - DNA, 15 bp, Homo sapiens
cgcagtgccccacgt

SEQ ID NO: 589040 - DNA, 15 bp, Homo sapiens
gcagtgccccacgtg

SEQ ID NO: 589041 - DNA, 15 bp, Homo sapiens
cagtgccccacgtgg

SEQ ID NO: 589042 - DNA, 15 bp, Homo sapiens
agtgccccacgtggc

SEQ ID NO: 589043 - DNA, 15 bp, Homo sapiens
gtgccccacgtggcc

SEQ ID NO: 589044 - DNA, 15 bp, Homo sapiens
tgccccacgtggccg

SEQ ID NO: 589045 - DNA, 15 bp, Homo sapiens
gccccacgtggccgc

SEQ ID NO: 589046 - DNA, 15 bp, Homo sapiens
ccccacgtggccgcc

SEQ ID NO: 589047 - DNA, 15 bp, Homo sapiens
cccacgtggccgcct

SEQ ID NO: 589048 - DNA, 15 bp, Homo sapiens
ccacgtggccgcctc

SEQ ID NO: 589049 - DNA, 15 bp, Homo sapiens
cacgtggccgcctcg

SEQ ID NO: 589050 - DNA, 15 bp, Homo sapiens
acgtggccgcctcgt

SEQ ID NO: 589051 - DNA, 15 bp, Homo sapiens
cgtggccgcctcgtg

SEQ ID NO: 589052 - DNA, 15 bp, Homo sapiens
gtggccgcctcgtga

SEQ ID NO: 589053 - DNA, 15 bp, Homo sapiens
tggccgcctcgtgac

SEQ ID NO: 589054 - DNA, 15 bp, Homo sapiens
ggccgcctcgtgacc

SEQ ID NO: 589055 - DNA, 15 bp, Homo sapiens
gccgcctcgtgacct

SEQ ID NO: 589056 - DNA, 15 bp, Homo sapiens
ccgcctcgtgacctc

SEQ ID NO: 589057 - DNA, 15 bp, Homo sapiens
cgcctcgtgacctca

SEQ ID NO: 589058 - DNA, 15 bp, Homo sapiens
gcctcgtgacctcag

SEQ ID NO: 589059 - DNA, 15 bp, Homo sapiens
cctcgtgacctcagt

SEQ ID NO: 589060 - DNA, 15 bp, Homo sapiens
ctcgtgacctcagtg

SEQ ID NO: 589061 - DNA, 15 bp, Homo sapiens
tcgtgacctcagtgg

SEQ ID NO: 589062 - DNA, 15 bp, Homo sapiens
cgtgacctcagtggg

SEQ ID NO: 589063 - DNA, 15 bp, Homo sapiens
gtgacctcagtgggg

SEQ ID NO: 589064 - DNA, 15 bp, Homo sapiens
tgacctcagtgggga

SEQ ID NO: 589065 - DNA, 15 bp, Homo sapiens
gacctcagtggggag

SEQ ID NO: 589066 - DNA, 15 bp, Homo sapiens
acctcagtggggagc

SEQ ID NO: 589067 - DNA, 15 bp, Homo sapiens
cctcagtggggagca

SEQ ID NO: 589068 - DNA, 15 bp, Homo sapiens
ctcagtggggagcag

SEQ ID NO: 589069 - DNA, 15 bp, Homo sapiens
tcagtggggagcagt

SEQ ID NO: 589070 - DNA, 15 bp, Homo sapiens
cagtggggagcagtg

SEQ ID NO: 589071 - DNA, 15 bp, Homo sapiens
agtggggagcagtgg

SEQ ID NO: 589072 - DNA, 15 bp, Homo sapiens
gtggggagcagtggg

SEQ ID NO: 589073 - DNA, 15 bp, Homo sapiens
tggggagcagtgggg

SEQ ID NO: 589074 - DNA, 15 bp, Homo sapiens
ggggagcagtggggc

SEQ ID NO: 589075 - DNA, 15 bp, Homo sapiens
gggagcagtggggcc

SEQ ID NO: 589076 - DNA, 15 bp, Homo sapiens
ggagcagtggggccg

SEQ ID NO: 589077 - DNA, 15 bp, Homo sapiens
gagcagtggggccgg

SEQ ID NO: 589078 - DNA, 15 bp, Homo sapiens
agcagtggggccggc

SEQ ID NO: 589079 - DNA, 15 bp, Homo sapiens
gcagtggggccggct

SEQ ID NO: 589080 - DNA, 15 bp, Homo sapiens
cagtggggccggctc

SEQ ID NO: 589081 - DNA, 15 bp, Homo sapiens
agtggggccggctcc

SEQ ID NO: 589082 - DNA, 15 bp, Homo sapiens
gtggggccggctccc

SEQ ID NO: 589083 - DNA, 15 bp, Homo sapiens
tggggccggctcccg

SEQ ID NO: 589084 - DNA, 15 bp, Homo sapiens
ggggccggctcccgg

SEQ ID NO: 589085 - DNA, 15 bp, Homo sapiens
gggccggctcccggc

SEQ ID NO: 589086 - DNA, 15 bp, Homo sapiens
ggccggctcccggct

SEQ ID NO: 589087 - DNA, 15 bp, Homo sapiens
gccggctcccggctt

SEQ ID NO: 589088 - DNA, 15 bp, Homo sapiens
ccggctcccggcttc

SEQ ID NO: 589089 - DNA, 15 bp, Homo sapiens
cggctcccggcttcc

SEQ ID NO: 589090 - DNA, 15 bp, Homo sapiens
ggctcccggcttcca

SEQ ID NO: 589091 - DNA, 15 bp, Homo sapiens
gctcccggcttccac

SEQ ID NO: 589092 - DNA, 15 bp, Homo sapiens
ctcccggcttccacc

SEQ ID NO: 589093 - DNA, 15 bp, Homo sapiens
tcccggcttccacct

SEQ ID NO: 589094 - DNA, 15 bp, Homo sapiens
cccggcttccacctg

SEQ ID NO: 589095 - DNA, 15 bp, Homo sapiens
ccggcttccacctgc

SEQ ID NO: 589096 - DNA, 15 bp, Homo sapiens
cggcttccacctgca

SEQ ID NO: 589097 - DNA, 15 bp, Homo sapiens
ggcttccacctgcat

SEQ ID NO: 589098 - DNA, 15 bp, Homo sapiens
gcttccacctgcatg

SEQ ID NO: 589099 - DNA, 15 bp, Homo sapiens
cttccacctgcatga

SEQ ID NO: 589100 - DNA, 15 bp, Homo sapiens
ttccacctgcatgag

SEQ ID NO: 589101 - DNA, 15 bp, Homo sapiens
tccacctgcatgagg

SEQ ID NO: 589102 - DNA, 15 bp, Homo sapiens
ccacctgcatgaggg

SEQ ID NO: 589103 - DNA, 15 bp, Homo sapiens
cacctgcatgagggg

SEQ ID NO: 589104 - DNA, 15 bp, Homo sapiens
acctgcatgaggggc

SEQ ID NO: 589105 - DNA, 15 bp, Homo sapiens
cctgcatgaggggcc

SEQ ID NO: 589106 - DNA, 15 bp, Homo sapiens
ctgcatgaggggccc

SEQ ID NO: 589107 - DNA, 15 bp, Homo sapiens
tgcatgaggggccct

SEQ ID NO: 589108 - DNA, 15 bp, Homo sapiens
gcatgaggggccctc

SEQ ID NO: 589109 - DNA, 15 bp, Homo sapiens
catgaggggccctcc

SEQ ID NO: 589110 - DNA, 15 bp, Homo sapiens
atgaggggccctccc

SEQ ID NO: 589111 - DNA, 15 bp, Homo sapiens
tgaggggccctccct

SEQ ID NO: 589112 - DNA, 15 bp, Homo sapiens
gaggggccctccctc

SEQ ID NO: 589113 - DNA, 15 bp, Homo sapiens
aggggccctccctcg

SEQ ID NO: 589114 - DNA, 15 bp, Homo sapiens
ggggccctccctcgt

SEQ ID NO: 589115 - DNA, 15 bp, Homo sapiens
gggccctccctcgtg

SEQ ID NO: 589116 - DNA, 15 bp, Homo sapiens
ggccctccctcgtgc

SEQ ID NO: 589117 - DNA, 15 bp, Homo sapiens
gccctccctcgtgcc

SEQ ID NO: 589118 - DNA, 15 bp, Homo sapiens
ccctccctcgtgcct

SEQ ID NO: 589119 - DNA, 15 bp, Homo sapiens
cctccctcgtgcctg

SEQ ID NO: 589120 - DNA, 15 bp, Homo sapiens
ctccctcgtgcctgc

SEQ ID NO: 589121 - DNA, 15 bp, Homo sapiens
tccctcgtgcctgct

SEQ ID NO: 589122 - DNA, 15 bp, Homo sapiens
ccctcgtgcctgctg

SEQ ID NO: 589123 - DNA, 15 bp, Homo sapiens
cctcgtgcctgctga

SEQ ID NO: 589124 - DNA, 15 bp, Homo sapiens
ctcgtgcctgctgat

SEQ ID NO: 589125 - DNA, 15 bp, Homo sapiens
tcgtgcctgctgatg

SEQ ID NO: 589126 - DNA, 15 bp, Homo sapiens
cgtgcctgctgatgt

SEQ ID NO: 589127 - DNA, 15 bp, Homo sapiens
gtgcctgctgatgta

SEQ ID NO: 589128 - DNA, 15 bp, Homo sapiens
tgcctgctgatgtaa

SEQ ID NO: 589129 - DNA, 15 bp, Homo sapiens
gcctgctgatgtaat

SEQ ID NO: 589130 - DNA, 15 bp, Homo sapiens
cctgctgatgtaatg

SEQ ID NO: 589131 - DNA, 15 bp, Homo sapiens
ctgctgatgtaatgg

SEQ ID NO: 589132 - DNA, 15 bp, Homo sapiens
tgctgatgtaatgga

SEQ ID NO: 589133 - DNA, 15 bp, Homo sapiens
gctgatgtaatggac

SEQ ID NO: 589134 - DNA, 15 bp, Homo sapiens
ctgatgtaatggacc

SEQ ID NO: 589135 - DNA, 15 bp, Homo sapiens
tgatgtaatggacct

SEQ ID NO: 589136 - DNA, 15 bp, Homo sapiens
gatgtaatggacctg

SEQ ID NO: 589137 - DNA, 15 bp, Homo sapiens
atgtaatggacctgc

SEQ ID NO: 589138 - DNA, 15 bp, Homo sapiens
tgtaatggacctgcc

SEQ ID NO: 589139 - DNA, 15 bp, Homo sapiens
gtaatggacctgccc

SEQ ID NO: 589140 - DNA, 15 bp, Homo sapiens
taatggacctgccct

SEQ ID NO: 589141 - DNA, 15 bp, Homo sapiens
aatggacctgcccta

SEQ ID NO: 589142 - DNA, 15 bp, Homo sapiens
atggacctgccctat

SEQ ID NO: 589143 - DNA, 15 bp, Homo sapiens
tggacctgccctatg

SEQ ID NO: 589144 - DNA, 15 bp, Homo sapiens
ggacctgccctatgt

SEQ ID NO: 589145 - DNA, 15 bp, Homo sapiens
gacctgccctatgtc

SEQ ID NO: 589146 - DNA, 15 bp, Homo sapiens
acctgccctatgtcc

SEQ ID NO: 589147 - DNA, 15 bp, Homo sapiens
cctgccctatgtcca

SEQ ID NO: 589148 - DNA, 15 bp, Homo sapiens
ctgccctatgtccag

SEQ ID NO: 589149 - DNA, 15 bp, Homo sapiens
tgccctatgtccagg

SEQ ID NO: 589150 - DNA, 15 bp, Homo sapiens
gccctatgtccaggt

SEQ ID NO: 589151 - DNA, 15 bp, Homo sapiens
ccctatgtccaggta

SEQ ID NO: 589152 - DNA, 15 bp, Homo sapiens
cctatgtccaggtat

SEQ ID NO: 589153 - DNA, 15 bp, Homo sapiens
ctatgtccaggtatg

SEQ ID NO: 589154 - DNA, 15 bp, Homo sapiens
tatgtccaggtatga

SEQ ID NO: 589155 - DNA, 15 bp, Homo sapiens
atgtccaggtatgag

SEQ ID NO: 589156 - DNA, 15 bp, Homo sapiens
tgtccaggtatgaga

SEQ ID NO: 589157 - DNA, 15 bp, Homo sapiens
gtccaggtatgagaa

SEQ ID NO: 589158 - DNA, 15 bp, Homo sapiens
tccaggtatgagaag

SEQ ID NO: 589159 - DNA, 15 bp, Homo sapiens
ccaggtatgagaagc

SEQ ID NO: 589160 - DNA, 15 bp, Homo sapiens
caggtatgagaagct

SEQ ID NO: 589161 - DNA, 15 bp, Homo sapiens
aggtatgagaagctc

SEQ ID NO: 589162 - DNA, 15 bp, Homo sapiens
ggtatgagaagctca

SEQ ID NO: 589163 - DNA, 15 bp, Homo sapiens
gtatgagaagctcat

SEQ ID NO: 589164 - DNA, 15 bp, Homo sapiens
tatgagaagctcata

SEQ ID NO: 589165 - DNA, 15 bp, Homo sapiens
atgagaagctcatag

SEQ ID NO: 589166 - DNA, 15 bp, Homo sapiens
tgagaagctcatagg

SEQ ID NO: 589167 - DNA, 15 bp, Homo sapiens
gagaagctcataggt

SEQ ID NO: 589168 - DNA, 15 bp, Homo sapiens
agaagctcataggtg

SEQ ID NO: 589169 - DNA, 15 bp, Homo sapiens
gaagctcataggtgg

SEQ ID NO: 589170 - DNA, 15 bp, Homo sapiens
aagctcataggtggc

SEQ ID NO: 589171 - DNA, 15 bp, Homo sapiens
agctcataggtggca

SEQ ID NO: 589172 - DNA, 15 bp, Homo sapiens
gctcataggtggcaa

SEQ ID NO: 589173 - DNA, 15 bp, Homo sapiens
ctcataggtggcaag

SEQ ID NO: 589174 - DNA, 15 bp, Homo sapiens
tcataggtggcaagt

SEQ ID NO: 589175 - DNA, 15 bp, Homo sapiens
cataggtggcaagta

SEQ ID NO: 589176 - DNA, 15 bp, Homo sapiens
ataggtggcaagtac

SEQ ID NO: 589177 - DNA, 15 bp, Homo sapiens
taggtggcaagtaca

SEQ ID NO: 589178 - DNA, 15 bp, Homo sapiens
aggtggcaagtacat

SEQ ID NO: 589179 - DNA, 15 bp, Homo sapiens
ggtggcaagtacatg

SEQ ID NO: 589180 - DNA, 15 bp, Homo sapiens
gtggcaagtacatgg

SEQ ID NO: 589181 - DNA, 15 bp, Homo sapiens
tggcaagtacatggg

SEQ ID NO: 589182 - DNA, 15 bp, Homo sapiens
ggcaagtacatgggc

SEQ ID NO: 589183 - DNA, 15 bp, Homo sapiens
gcaagtacatgggcg

SEQ ID NO: 589184 - DNA, 15 bp, Homo sapiens
caagtacatgggcga

SEQ ID NO: 589185 - DNA, 15 bp, Homo sapiens
aagtacatgggcgag

SEQ ID NO: 589186 - DNA, 15 bp, Homo sapiens
agtacatgggcgagc

SEQ ID NO: 589187 - DNA, 15 bp, Homo sapiens
gtacatgggcgagct

SEQ ID NO: 589188 - DNA, 15 bp, Homo sapiens
tacatgggcgagctg

SEQ ID NO: 589189 - DNA, 15 bp, Homo sapiens
acatgggcgagctgg

SEQ ID NO: 589190 - DNA, 15 bp, Homo sapiens
catgggcgagctggt

SEQ ID NO: 589191 - DNA, 15 bp, Homo sapiens
atgggcgagctggtg

SEQ ID NO: 589192 - DNA, 15 bp, Homo sapiens
tgggcgagctggtgc

SEQ ID NO: 589193 - DNA, 15 bp, Homo sapiens
gggcgagctggtgcg

SEQ ID NO: 589194 - DNA, 15 bp, Homo sapiens
ggcgagctggtgcgg

SEQ ID NO: 589195 - DNA, 15 bp, Homo sapiens
gcgagctggtgcggc

SEQ ID NO: 589196 - DNA, 15 bp, Homo sapiens
cgagctggtgcggct

SEQ ID NO: 589197 - DNA, 15 bp, Homo sapiens
gagctggtgcggctt

SEQ ID NO: 589198 - DNA, 15 bp, Homo sapiens
agctggtgcggcttg

SEQ ID NO: 589199 - DNA, 15 bp, Homo sapiens
gctggtgcggcttgt

SEQ ID NO: 589200 - DNA, 15 bp, Homo sapiens
ctggtgcggcttgtg

SEQ ID NO: 589201 - DNA, 15 bp, Homo sapiens
tggtgcggcttgtgc

SEQ ID NO: 589202 - DNA, 15 bp, Homo sapiens
ggtgcggcttgtgct

SEQ ID NO: 589203 - DNA, 15 bp, Homo sapiens
gtgcggcttgtgctg

SEQ ID NO: 589204 - DNA, 15 bp, Homo sapiens
tgcggcttgtgctgc

SEQ ID NO: 589205 - DNA, 15 bp, Homo sapiens
gcggcttgtgctgct

SEQ ID NO: 589206 - DNA, 15 bp, Homo sapiens
cggcttgtgctgctc

SEQ ID NO: 589207 - DNA, 15 bp, Homo sapiens
ggcttgtgctgctca

SEQ ID NO: 589208 - DNA, 15 bp, Homo sapiens
gcttgtgctgctcag

SEQ ID NO: 589209 - DNA, 15 bp, Homo sapiens
cttgtgctgctcagg

SEQ ID NO: 589210 - DNA, 15 bp, Homo sapiens
ttgtgctgctcaggc

SEQ ID NO: 589211 - DNA, 15 bp, Homo sapiens
tgtgctgctcaggct

SEQ ID NO: 589212 - DNA, 15 bp, Homo sapiens
gtgctgctcaggctc

SEQ ID NO: 589213 - DNA, 15 bp, Homo sapiens
tgctgctcaggctcg

SEQ ID NO: 589214 - DNA, 15 bp, Homo sapiens
gctgctcaggctcgt

SEQ ID NO: 589215 - DNA, 15 bp, Homo sapiens
ctgctcaggctcgtg

SEQ ID NO: 589216 - DNA, 15 bp, Homo sapiens
tgctcaggctcgtgg

SEQ ID NO: 589217 - DNA, 15 bp, Homo sapiens
gctcaggctcgtgga

SEQ ID NO: 589218 - DNA, 15 bp, Homo sapiens
ctcaggctcgtggac

SEQ ID NO: 589219 - DNA, 15 bp, Homo sapiens
tcaggctcgtggacg

SEQ ID NO: 589220 - DNA, 15 bp, Homo sapiens
caggctcgtggacga

SEQ ID NO: 589221 - DNA, 15 bp, Homo sapiens
aggctcgtggacgaa

SEQ ID NO: 589222 - DNA, 15 bp, Homo sapiens
ggctcgtggacgaaa

SEQ ID NO: 589223 - DNA, 15 bp, Homo sapiens
gctcgtggacgaaaa

SEQ ID NO: 589224 - DNA, 15 bp, Homo sapiens
ctcgtggacgaaaac

SEQ ID NO: 589225 - DNA, 15 bp, Homo sapiens
tcgtggacgaaaacc

SEQ ID NO: 589226 - DNA, 15 bp, Homo sapiens
cgtggacgaaaacct

SEQ ID NO: 589227 - DNA, 15 bp, Homo sapiens
gtggacgaaaacctg

SEQ ID NO: 589228 - DNA, 15 bp, Homo sapiens
tggacgaaaacctgc

SEQ ID NO: 589229 - DNA, 15 bp, Homo sapiens
ggacgaaaacctgct

SEQ ID NO: 589230 - DNA, 15 bp, Homo sapiens
gacgaaaacctgctc

SEQ ID NO: 589231 - DNA, 15 bp, Homo sapiens
acgaaaacctgctct

SEQ ID NO: 589232 - DNA, 15 bp, Homo sapiens
cgaaaacctgctctt

SEQ ID NO: 589233 - DNA, 15 bp, Homo sapiens
gaaaacctgctcttc

SEQ ID NO: 589234 - DNA, 15 bp, Homo sapiens
aaaacctgctcttcc

SEQ ID NO: 589235 - DNA, 15 bp, Homo sapiens
aaacctgctcttcca

SEQ ID NO: 589236 - DNA, 15 bp, Homo sapiens
aacctgctcttccac

SEQ ID NO: 589237 - DNA, 15 bp, Homo sapiens
acctgctcttccacg

SEQ ID NO: 589238 - DNA, 15 bp, Homo sapiens
cctgctcttccacgg

SEQ ID NO: 589239 - DNA, 15 bp, Homo sapiens
ctgctcttccacggg

SEQ ID NO: 589240 - DNA, 15 bp, Homo sapiens
tgctcttccacgggg

SEQ ID NO: 589241 - DNA, 15 bp, Homo sapiens
gctcttccacgggga

SEQ ID NO: 589242 - DNA, 15 bp, Homo sapiens
ctcttccacggggag

SEQ ID NO: 589243 - DNA, 15 bp, Homo sapiens
tcttccacggggagg

SEQ ID NO: 589244 - DNA, 15 bp, Homo sapiens
cttccacggggaggc

SEQ ID NO: 589245 - DNA, 15 bp, Homo sapiens
ttccacggggaggcc

SEQ ID NO: 589246 - DNA, 15 bp, Homo sapiens
tccacggggaggcct

SEQ ID NO: 589247 - DNA, 15 bp, Homo sapiens
ccacggggaggcctc

SEQ ID NO: 589248 - DNA, 15 bp, Homo sapiens
cacggggaggcctcc

SEQ ID NO: 589249 - DNA, 15 bp, Homo sapiens
acggggaggcctccg

SEQ ID NO: 589250 - DNA, 15 bp, Homo sapiens
cggggaggcctccga

SEQ ID NO: 589251 - DNA, 15 bp, Homo sapiens
ggggaggcctccgag

SEQ ID NO: 589252 - DNA, 15 bp, Homo sapiens
gggaggcctccgagc

SEQ ID NO: 589253 - DNA, 15 bp, Homo sapiens
ggaggcctccgagca

SEQ ID NO: 589254 - DNA, 15 bp, Homo sapiens
gaggcctccgagcag

SEQ ID NO: 589255 - DNA, 15 bp, Homo sapiens
aggcctccgagcagc

SEQ ID NO: 589256 - DNA, 15 bp, Homo sapiens
ggcctccgagcagct

SEQ ID NO: 589257 - DNA, 15 bp, Homo sapiens
gcctccgagcagctg

SEQ ID NO: 589258 - DNA, 15 bp, Homo sapiens
cctccgagcagctgc

SEQ ID NO: 589259 - DNA, 15 bp, Homo sapiens
ctccgagcagctgcg

SEQ ID NO: 589260 - DNA, 15 bp, Homo sapiens
tccgagcagctgcgc

SEQ ID NO: 589261 - DNA, 15 bp, Homo sapiens
ccgagcagctgcgca

SEQ ID NO: 589262 - DNA, 15 bp, Homo sapiens
cgagcagctgcgcac

SEQ ID NO: 589263 - DNA, 15 bp, Homo sapiens
gagcagctgcgcaca

SEQ ID NO: 589264 - DNA, 15 bp, Homo sapiens
agcagctgcgcacac

SEQ ID NO: 589265 - DNA, 15 bp, Homo sapiens
gcagctgcgcacacg

SEQ ID NO: 589266 - DNA, 15 bp, Homo sapiens
cagctgcgcacacgc

SEQ ID NO: 589267 - DNA, 15 bp, Homo sapiens
agctgcgcacacgcg

SEQ ID NO: 589268 - DNA, 15 bp, Homo sapiens
gctgcgcacacgcgg

SEQ ID NO: 589269 - DNA, 15 bp, Homo sapiens
ctgcgcacacgcgga

SEQ ID NO: 589270 - DNA, 15 bp, Homo sapiens
tgcgcacacgcggag

SEQ ID NO: 589271 - DNA, 15 bp, Homo sapiens
gcgcacacgcggagc

SEQ ID NO: 589272 - DNA, 15 bp, Homo sapiens
cgcacacgcggagcc

SEQ ID NO: 589273 - DNA, 15 bp, Homo sapiens
gcacacgcggagcct

SEQ ID NO: 589274 - DNA, 15 bp, Homo sapiens
cacacgcggagcctt

SEQ ID NO: 589275 - DNA, 15 bp, Homo sapiens
acacgcggagccttc

SEQ ID NO: 589276 - DNA, 15 bp, Homo sapiens
cacgcggagccttcg

SEQ ID NO: 589277 - DNA, 15 bp, Homo sapiens
acgcggagccttcga

SEQ ID NO: 589278 - DNA, 15 bp, Homo sapiens
cgcggagccttcgag

SEQ ID NO: 589279 - DNA, 15 bp, Homo sapiens
gcggagccttcgaga

SEQ ID NO: 589280 - DNA, 15 bp, Homo sapiens
cggagccttcgagac

SEQ ID NO: 589281 - DNA, 15 bp, Homo sapiens
ggagccttcgagacg

SEQ ID NO: 589282 - DNA, 15 bp, Homo sapiens
gagccttcgagacgc

SEQ ID NO: 589283 - DNA, 15 bp, Homo sapiens
agccttcgagacgcg

SEQ ID NO: 589284 - DNA, 15 bp, Homo sapiens
gccttcgagacgcgc

SEQ ID NO: 589285 - DNA, 15 bp, Homo sapiens
ccttcgagacgcgct

SEQ ID NO: 589286 - DNA, 15 bp, Homo sapiens
cttcgagacgcgctt

SEQ ID NO: 589287 - DNA, 15 bp, Homo sapiens
ttcgagacgcgcttc

SEQ ID NO: 589288 - DNA, 15 bp, Homo sapiens
tcgagacgcgcttcg

SEQ ID NO: 589289 - DNA, 15 bp, Homo sapiens
cgagacgcgcttcgt

SEQ ID NO: 589290 - DNA, 15 bp, Homo sapiens
gagacgcgcttcgtg

SEQ ID NO: 589291 - DNA, 15 bp, Homo sapiens
agacgcgcttcgtgt

SEQ ID NO: 589292 - DNA, 15 bp, Homo sapiens
gacgcgcttcgtgtc

SEQ ID NO: 589293 - DNA, 15 bp, Homo sapiens
acgcgcttcgtgtcg

SEQ ID NO: 589294 - DNA, 15 bp, Homo sapiens
cgcgcttcgtgtcgc

SEQ ID NO: 589295 - DNA, 15 bp, Homo sapiens
gcgcttcgtgtcgca

SEQ ID NO: 589296 - DNA, 15 bp, Homo sapiens
cgcttcgtgtcgcag

SEQ ID NO: 589297 - DNA, 15 bp, Homo sapiens
gcttcgtgtcgcagg

SEQ ID NO: 589298 - DNA, 15 bp, Homo sapiens
cttcgtgtcgcaggt

SEQ ID NO: 589299 - DNA, 15 bp, Homo sapiens
ttcgtgtcgcaggtg

SEQ ID NO: 589300 - DNA, 15 bp, Homo sapiens
tcgtgtcgcaggtgg

SEQ ID NO: 589301 - DNA, 15 bp, Homo sapiens
cgtgtcgcaggtgga

SEQ ID NO: 589302 - DNA, 15 bp, Homo sapiens
gtgtcgcaggtggag

SEQ ID NO: 589303 - DNA, 15 bp, Homo sapiens
tgtcgcaggtggaga

SEQ ID NO: 589304 - DNA, 15 bp, Homo sapiens
gtcgcaggtggagag

SEQ ID NO: 589305 - DNA, 15 bp, Homo sapiens
tcgcaggtggagagg

SEQ ID NO: 589306 - DNA, 15 bp, Homo sapiens
cgcaggtggagaggt

SEQ ID NO: 589307 - DNA, 15 bp, Homo sapiens
gcaggtggagaggtg

SEQ ID NO: 589308 - DNA, 15 bp, Homo sapiens
caggtggagaggtgt

SEQ ID NO: 589309 - DNA, 15 bp, Homo sapiens
aggtggagaggtgtg

SEQ ID NO: 589310 - DNA, 15 bp, Homo sapiens
ggtggagaggtgtgc

SEQ ID NO: 589311 - DNA, 15 bp, Homo sapiens
gtggagaggtgtgcg

SEQ ID NO: 589312 - DNA, 15 bp, Homo sapiens
tggagaggtgtgcgg

SEQ ID NO: 589313 - DNA, 15 bp, Homo sapiens
ggagaggtgtgcgga

SEQ ID NO: 589314 - DNA, 15 bp, Homo sapiens
gagaggtgtgcggag

SEQ ID NO: 589315 - DNA, 15 bp, Homo sapiens
agaggtgtgcggagg

SEQ ID NO: 589316 - DNA, 15 bp, Homo sapiens
gaggtgtgcggagga

SEQ ID NO: 589317 - DNA, 15 bp, Homo sapiens
aggtgtgcggaggag

SEQ ID NO: 589318 - DNA, 15 bp, Homo sapiens
ggtgtgcggaggagg

SEQ ID NO: 589319 - DNA, 15 bp, Homo sapiens
gtgtgcggaggagga

SEQ ID NO: 589320 - DNA, 15 bp, Homo sapiens
tgtgcggaggaggag

SEQ ID NO: 589321 - DNA, 15 bp, Homo sapiens
gtgcggaggaggagg

SEQ ID NO: 589322 - DNA, 15 bp, Homo sapiens
tgcggaggaggaggg

SEQ ID NO: 589323 - DNA, 15 bp, Homo sapiens
gcggaggaggagggt

SEQ ID NO: 589324 - DNA, 15 bp, Homo sapiens
cggaggaggagggtg

SEQ ID NO: 589325 - DNA, 15 bp, Homo sapiens
ggaggaggagggtgg

SEQ ID NO: 589326 - DNA, 15 bp, Homo sapiens
gaggaggagggtggg

SEQ ID NO: 589327 - DNA, 15 bp, Homo sapiens
aggaggagggtgggt

SEQ ID NO: 589328 - DNA, 15 bp, Homo sapiens
ggaggagggtgggtg

SEQ ID NO: 589329 - DNA, 15 bp, Homo sapiens
gaggagggtgggtgc

SEQ ID NO: 589330 - DNA, 15 bp, Homo sapiens
aggagggtgggtgca

SEQ ID NO: 589331 - DNA, 15 bp, Homo sapiens
ggagggtgggtgcaa

SEQ ID NO: 589332 - DNA, 15 bp, Homo sapiens
gagggtgggtgcaaa

SEQ ID NO: 589333 - DNA, 15 bp, Homo sapiens
agggtgggtgcaaag

SEQ ID NO: 589334 - DNA, 15 bp, Homo sapiens
gggtgggtgcaaagg

SEQ ID NO: 589335 - DNA, 15 bp, Homo sapiens
ggtgggtgcaaaggg

SEQ ID NO: 589336 - DNA, 15 bp, Homo sapiens
gtgggtgcaaagggc

SEQ ID NO: 589337 - DNA, 15 bp, Homo sapiens
tgggtgcaaagggca

SEQ ID NO: 589338 - DNA, 15 bp, Homo sapiens
gggtgcaaagggcag

SEQ ID NO: 589339 - DNA, 15 bp, Homo sapiens
ggtgcaaagggcagg

SEQ ID NO: 589340 - DNA, 15 bp, Homo sapiens
gtgcaaagggcaggg

SEQ ID NO: 589341 - DNA, 15 bp, Homo sapiens
tgcaaagggcagggg

SEQ ID NO: 589342 - DNA, 15 bp, Homo sapiens
gcaaagggcaggggc

SEQ ID NO: 589343 - DNA, 15 bp, Homo sapiens
caaagggcaggggct

SEQ ID NO: 589344 - DNA, 15 bp, Homo sapiens
aaagggcaggggctg

SEQ ID NO: 589345 - DNA, 15 bp, Homo sapiens
aagggcaggggctgg

SEQ ID NO: 589346 - DNA, 15 bp, Homo sapiens
agggcaggggctggg

SEQ ID NO: 589347 - DNA, 15 bp, Homo sapiens
gggcaggggctgggg

SEQ ID NO: 589348 - DNA, 15 bp, Homo sapiens
ggcaggggctgggga

SEQ ID NO: 589349 - DNA, 15 bp, Homo sapiens
gcaggggctggggac

SEQ ID NO: 589350 - DNA, 15 bp, Homo sapiens
caggggctggggacg

SEQ ID NO: 589351 - DNA, 15 bp, Homo sapiens
aggggctggggacgc

SEQ ID NO: 589352 - DNA, 15 bp, Homo sapiens
ggggctggggacgcc

SEQ ID NO: 589353 - DNA, 15 bp, Homo sapiens
gggctggggacgccc

SEQ ID NO: 589354 - DNA, 15 bp, Homo sapiens
ggctggggacgcccg

SEQ ID NO: 589355 - DNA, 15 bp, Homo sapiens
gctggggacgcccgg

SEQ ID NO: 589356 - DNA, 15 bp, Homo sapiens
ctggggacgcccggg

SEQ ID NO: 589357 - DNA, 15 bp, Homo sapiens
tggggacgcccgggc

SEQ ID NO: 589358 - DNA, 15 bp, Homo sapiens
ggggacgcccgggca

SEQ ID NO: 589359 - DNA, 15 bp, Homo sapiens
gggacgcccgggcac

SEQ ID NO: 589360 - DNA, 15 bp, Homo sapiens
ggacgcccgggcact

SEQ ID NO: 589361 - DNA, 15 bp, Homo sapiens
gacgcccgggcactg

SEQ ID NO: 589362 - DNA, 15 bp, Homo sapiens
acgcccgggcactgc

SEQ ID NO: 589363 - DNA, 15 bp, Homo sapiens
cgcccgggcactgca

SEQ ID NO: 589364 - DNA, 15 bp, Homo sapiens
gcccgggcactgcag

SEQ ID NO: 589365 - DNA, 15 bp, Homo sapiens
cccgggcactgcaga

SEQ ID NO: 589366 - DNA, 15 bp, Homo sapiens
ccgggcactgcagac

SEQ ID NO: 589367 - DNA, 15 bp, Homo sapiens
cgggcactgcagact

SEQ ID NO: 589368 - DNA, 15 bp, Homo sapiens
gggcactgcagactt

SEQ ID NO: 589369 - DNA, 15 bp, Homo sapiens
ggcactgcagacttg

SEQ ID NO: 589370 - DNA, 15 bp, Homo sapiens
gcactgcagacttgg

SEQ ID NO: 589371 - DNA, 15 bp, Homo sapiens
cactgcagacttggt

SEQ ID NO: 589372 - DNA, 15 bp, Homo sapiens
actgcagacttggtc

SEQ ID NO: 589373 - DNA, 15 bp, Homo sapiens
ctgcagacttggtct

SEQ ID NO: 589374 - DNA, 15 bp, Homo sapiens
tgcagacttggtctc

SEQ ID NO: 589375 - DNA, 15 bp, Homo sapiens
gcagacttggtctca

SEQ ID NO: 589376 - DNA, 15 bp, Homo sapiens
cagacttggtctcag

SEQ ID NO: 589377 - DNA, 15 bp, Homo sapiens
agacttggtctcagg

SEQ ID NO: 589378 - DNA, 15 bp, Homo sapiens
gacttggtctcaggg

SEQ ID NO: 589379 - DNA, 15 bp, Homo sapiens
acttggtctcagggc

SEQ ID NO: 589380 - DNA, 15 bp, Homo sapiens
cttggtctcagggcg

SEQ ID NO: 589381 - DNA, 15 bp, Homo sapiens
ttggtctcagggcga

SEQ ID NO: 589382 - DNA, 15 bp, Homo sapiens
tggtctcagggcgac

SEQ ID NO: 589383 - DNA, 15 bp, Homo sapiens
ggtctcagggcgacg

SEQ ID NO: 589384 - DNA, 15 bp, Homo sapiens
gtctcagggcgacgc

SEQ ID NO: 589385 - DNA, 15 bp, Homo sapiens
tctcagggcgacgct

SEQ ID NO: 589386 - DNA, 15 bp, Homo sapiens
ctcagggcgacgctg

SEQ ID NO: 589387 - DNA, 15 bp, Homo sapiens
tcagggcgacgctga

SEQ ID NO: 589388 - DNA, 15 bp, Homo sapiens
cagggcgacgctgag

SEQ ID NO: 589389 - DNA, 15 bp, Homo sapiens
agggcgacgctgagt

SEQ ID NO: 589390 - DNA, 15 bp, Homo sapiens
gggcgacgctgagtc

SEQ ID NO: 589391 - DNA, 15 bp, Homo sapiens
ggcgacgctgagtcc

SEQ ID NO: 589392 - DNA, 15 bp, Homo sapiens
gcgacgctgagtccc

SEQ ID NO: 589393 - DNA, 15 bp, Homo sapiens
cgacgctgagtccca

SEQ ID NO: 589394 - DNA, 15 bp, Homo sapiens
gacgctgagtcccag

SEQ ID NO: 589395 - DNA, 15 bp, Homo sapiens
acgctgagtcccagg

SEQ ID NO: 589396 - DNA, 15 bp, Homo sapiens
cgctgagtcccaggc

SEQ ID NO: 589397 - DNA, 15 bp, Homo sapiens
gctgagtcccaggcc

SEQ ID NO: 589398 - DNA, 15 bp, Homo sapiens
ctgagtcccaggccc

SEQ ID NO: 589399 - DNA, 15 bp, Homo sapiens
tgagtcccaggcccg

SEQ ID NO: 589400 - DNA, 15 bp, Homo sapiens
gagtcccaggcccgg

SEQ ID NO: 589401 - DNA, 15 bp, Homo sapiens
agtcccaggcccggg

SEQ ID NO: 589402 - DNA, 15 bp, Homo sapiens
gtcccaggcccgggg

SEQ ID NO: 589403 - DNA, 15 bp, Homo sapiens
tcccaggcccggggc

SEQ ID NO: 589404 - DNA, 15 bp, Homo sapiens
cccaggcccggggcg

SEQ ID NO: 589405 - DNA, 15 bp, Homo sapiens
ccaggcccggggcgc

SEQ ID NO: 589406 - DNA, 15 bp, Homo sapiens
caggcccggggcgca

SEQ ID NO: 589407 - DNA, 15 bp, Homo sapiens
aggcccggggcgcag

SEQ ID NO: 589408 - DNA, 15 bp, Homo sapiens
ggcccggggcgcagg

SEQ ID NO: 589409 - DNA, 15 bp, Homo sapiens
gcccggggcgcaggg

SEQ ID NO: 589410 - DNA, 15 bp, Homo sapiens
cccggggcgcaggga

SEQ ID NO: 589411 - DNA, 15 bp, Homo sapiens
ccggggcgcagggat

SEQ ID NO: 589412 - DNA, 15 bp, Homo sapiens
cggggcgcagggatg

SEQ ID NO: 589413 - DNA, 15 bp, Homo sapiens
ggggcgcagggatgg

SEQ ID NO: 589414 - DNA, 15 bp, Homo sapiens
gggcgcagggatggg

SEQ ID NO: 589415 - DNA, 15 bp, Homo sapiens
ggcgcagggatggga

SEQ ID NO: 589416 - DNA, 15 bp, Homo sapiens
gcgcagggatgggaa

SEQ ID NO: 589417 - DNA, 15 bp, Homo sapiens
cgcagggatgggaaa

SEQ ID NO: 589418 - DNA, 15 bp, Homo sapiens
gcagggatgggaaac

SEQ ID NO: 589419 - DNA, 15 bp, Homo sapiens
cagggatgggaaact

SEQ ID NO: 589420 - DNA, 15 bp, Homo sapiens
agggatgggaaacta

SEQ ID NO: 589421 - DNA, 15 bp, Homo sapiens
gggatgggaaactag

SEQ ID NO: 589422 - DNA, 15 bp, Homo sapiens
ggatgggaaactagg

SEQ ID NO: 589423 - DNA, 15 bp, Homo sapiens
gatgggaaactaggg

SEQ ID NO: 589424 - DNA, 15 bp, Homo sapiens
atgggaaactagggc

SEQ ID NO: 589425 - DNA, 15 bp, Homo sapiens
tgggaaactagggcc

SEQ ID NO: 589426 - DNA, 15 bp, Homo sapiens
gggaaactagggcct

SEQ ID NO: 589427 - DNA, 15 bp, Homo sapiens
ggaaactagggcctg

SEQ ID NO: 589428 - DNA, 15 bp, Homo sapiens
gaaactagggcctgg

SEQ ID NO: 589429 - DNA, 15 bp, Homo sapiens
aaactagggcctggg

SEQ ID NO: 589430 - DNA, 15 bp, Homo sapiens
aactagggcctgggg

SEQ ID NO: 589431 - DNA, 15 bp, Homo sapiens
actagggcctggggc

SEQ ID NO: 589432 - DNA, 15 bp, Homo sapiens
ctagggcctggggcg

SEQ ID NO: 589433 - DNA, 15 bp, Homo sapiens
tagggcctggggcgg

SEQ ID NO: 589434 - DNA, 15 bp, Homo sapiens
agggcctggggcggg

SEQ ID NO: 589435 - DNA, 15 bp, Homo sapiens
gggcctggggcggga

SEQ ID NO: 589436 - DNA, 15 bp, Homo sapiens
ggcctggggcgggat

SEQ ID NO: 589437 - DNA, 15 bp, Homo sapiens
gcctggggcgggatt

SEQ ID NO: 589438 - DNA, 15 bp, Homo sapiens
cctggggcgggattc

SEQ ID NO: 589439 - DNA, 15 bp, Homo sapiens
ctggggcgggattcc

SEQ ID NO: 589440 - DNA, 15 bp, Homo sapiens
tggggcgggattccg

SEQ ID NO: 589441 - DNA, 15 bp, Homo sapiens
ggggcgggattccgg

SEQ ID NO: 589442 - DNA, 15 bp, Homo sapiens
gggcgggattccggg

SEQ ID NO: 589443 - DNA, 15 bp, Homo sapiens
ggcgggattccgggc

SEQ ID NO: 589444 - DNA, 15 bp, Homo sapiens
gcgggattccgggcg

SEQ ID NO: 589445 - DNA, 15 bp, Homo sapiens
cgggattccgggcgt

SEQ ID NO: 589446 - DNA, 15 bp, Homo sapiens
gggattccgggcgtg

SEQ ID NO: 589447 - DNA, 15 bp, Homo sapiens
ggattccgggcgtgg

SEQ ID NO: 589448 - DNA, 15 bp, Homo sapiens
gattccgggcgtggg

SEQ ID NO: 589449 - DNA, 15 bp, Homo sapiens
attccgggcgtgggc

SEQ ID NO: 589450 - DNA, 15 bp, Homo sapiens
ttccgggcgtgggcg

SEQ ID NO: 589451 - DNA, 15 bp, Homo sapiens
tccgggcgtgggcgg

SEQ ID NO: 589452 - DNA, 15 bp, Homo sapiens
ccgggcgtgggcggg

SEQ ID NO: 589453 - DNA, 15 bp, Homo sapiens
cgggcgtgggcgggg

SEQ ID NO: 589454 - DNA, 15 bp, Homo sapiens
gggcgtgggcggggc

SEQ ID NO: 589455 - DNA, 15 bp, Homo sapiens
ggcgtgggcggggcc

SEQ ID NO: 589456 - DNA, 15 bp, Homo sapiens
gcgtgggcggggccc

SEQ ID NO: 589457 - DNA, 15 bp, Homo sapiens
cgtgggcggggcccg

SEQ ID NO: 589458 - DNA, 15 bp, Homo sapiens
gtgggcggggcccgg

SEQ ID NO: 589459 - DNA, 15 bp, Homo sapiens
tgggcggggcccggg

SEQ ID NO: 589460 - DNA, 15 bp, Homo sapiens
gggcggggcccgggg

SEQ ID NO: 589461 - DNA, 15 bp, Homo sapiens
ggcggggcccggggc

SEQ ID NO: 589462 - DNA, 15 bp, Homo sapiens
gcggggcccggggcg

SEQ ID NO: 589463 - DNA, 15 bp, Homo sapiens
cggggcccggggcgg

SEQ ID NO: 589464 - DNA, 15 bp, Homo sapiens
ggggcccggggcggg

SEQ ID NO: 589465 - DNA, 15 bp, Homo sapiens
gggcccggggcgggg

SEQ ID NO: 589466 - DNA, 15 bp, Homo sapiens
ggcccggggcggggc

SEQ ID NO: 589467 - DNA, 15 bp, Homo sapiens
gcccggggcggggca

SEQ ID NO: 589468 - DNA, 15 bp, Homo sapiens
cccggggcggggcac

SEQ ID NO: 589469 - DNA, 15 bp, Homo sapiens
ccggggcggggcaca

SEQ ID NO: 589470 - DNA, 15 bp, Homo sapiens
cggggcggggcacag

SEQ ID NO: 589471 - DNA, 15 bp, Homo sapiens
ggggcggggcacagg

SEQ ID NO: 589472 - DNA, 15 bp, Homo sapiens
gggcggggcacaggg

SEQ ID NO: 589473 - DNA, 15 bp, Homo sapiens
ggcggggcacagggg

SEQ ID NO: 589474 - DNA, 15 bp, Homo sapiens
gcggggcacaggggg

SEQ ID NO: 589475 - DNA, 15 bp, Homo sapiens
cggggcacagggggc

SEQ ID NO: 589476 - DNA, 15 bp, Homo sapiens
ggggcacagggggcg

SEQ ID NO: 589477 - DNA, 15 bp, Homo sapiens
gggcacagggggcgg

SEQ ID NO: 589478 - DNA, 15 bp, Homo sapiens
ggcacagggggcggg

SEQ ID NO: 589479 - DNA, 15 bp, Homo sapiens
gcacagggggcgggg

SEQ ID NO: 589480 - DNA, 15 bp, Homo sapiens
cacagggggcggggg

SEQ ID NO: 589481 - DNA, 15 bp, Homo sapiens
acagggggcggggga

SEQ ID NO: 589482 - DNA, 15 bp, Homo sapiens
cagggggcgggggag

SEQ ID NO: 589483 - DNA, 15 bp, Homo sapiens
agggggcgggggagt

SEQ ID NO: 589484 - DNA, 15 bp, Homo sapiens
gggggcgggggagtg

SEQ ID NO: 589485 - DNA, 15 bp, Homo sapiens
ggggcgggggagtgg

SEQ ID NO: 589486 - DNA, 15 bp, Homo sapiens
gggcgggggagtggg

SEQ ID NO: 589487 - DNA, 15 bp, Homo sapiens
ggcgggggagtgggc

SEQ ID NO: 589488 - DNA, 15 bp, Homo sapiens
gcgggggagtgggcg

SEQ ID NO: 589489 - DNA, 15 bp, Homo sapiens
cgggggagtgggcgg

SEQ ID NO: 589490 - DNA, 15 bp, Homo sapiens
gggggagtgggcggg

SEQ ID NO: 589491 - DNA, 15 bp, Homo sapiens
ggggagtgggcgggg

SEQ ID NO: 589492 - DNA, 15 bp, Homo sapiens
gggagtgggcggggc

SEQ ID NO: 589493 - DNA, 15 bp, Homo sapiens
ggagtgggcggggcc

SEQ ID NO: 589494 - DNA, 15 bp, Homo sapiens
gagtgggcggggccc

SEQ ID NO: 589495 - DNA, 15 bp, Homo sapiens
agtgggcggggcccg

SEQ ID NO: 589496 - DNA, 15 bp, Homo sapiens
gtgggcggggcccga

SEQ ID NO: 589497 - DNA, 15 bp, Homo sapiens
tgggcggggcccgag

SEQ ID NO: 589498 - DNA, 15 bp, Homo sapiens
gggcggggcccgagg

SEQ ID NO: 589499 - DNA, 15 bp, Homo sapiens
ggcggggcccgaggc

SEQ ID NO: 589500 - DNA, 15 bp, Homo sapiens
gcggggcccgaggcc

SEQ ID NO: 589501 - DNA, 15 bp, Homo sapiens
cggggcccgaggccg

SEQ ID NO: 589502 - DNA, 15 bp, Homo sapiens
ggggcccgaggccgg

SEQ ID NO: 589503 - DNA, 15 bp, Homo sapiens
gggcccgaggccggg

SEQ ID NO: 589504 - DNA, 15 bp, Homo sapiens
ggcccgaggccgggc

SEQ ID NO: 589505 - DNA, 15 bp, Homo sapiens
gcccgaggccgggcg

SEQ ID NO: 589506 - DNA, 15 bp, Homo sapiens
cccgaggccgggcgc

SEQ ID NO: 589507 - DNA, 15 bp, Homo sapiens
ccgaggccgggcgct

SEQ ID NO: 589508 - DNA, 15 bp, Homo sapiens
cgaggccgggcgctg

SEQ ID NO: 589509 - DNA, 15 bp, Homo sapiens
gaggccgggcgctgg

SEQ ID NO: 589510 - DNA, 15 bp, Homo sapiens
aggccgggcgctgga

SEQ ID NO: 589511 - DNA, 15 bp, Homo sapiens
ggccgggcgctggag

SEQ ID NO: 589512 - DNA, 15 bp, Homo sapiens
gccgggcgctggagg

SEQ ID NO: 589513 - DNA, 15 bp, Homo sapiens
ccgggcgctggaggc

SEQ ID NO: 589514 - DNA, 15 bp, Homo sapiens
cgggcgctggaggcg

SEQ ID NO: 589515 - DNA, 15 bp, Homo sapiens
gggcgctggaggcga

SEQ ID NO: 589516 - DNA, 15 bp, Homo sapiens
ggcgctggaggcgag

SEQ ID NO: 589517 - DNA, 15 bp, Homo sapiens
gcgctggaggcgagg

SEQ ID NO: 589518 - DNA, 15 bp, Homo sapiens
cgctggaggcgaggg

SEQ ID NO: 589519 - DNA, 15 bp, Homo sapiens
gctggaggcgagggc

SEQ ID NO: 589520 - DNA, 15 bp, Homo sapiens
ctggaggcgagggcg

SEQ ID NO: 589521 - DNA, 15 bp, Homo sapiens
tggaggcgagggcgg

SEQ ID NO: 589522 - DNA, 15 bp, Homo sapiens
ggaggcgagggcggg

SEQ ID NO: 589523 - DNA, 15 bp, Homo sapiens
gaggcgagggcgggg

SEQ ID NO: 589524 - DNA, 15 bp, Homo sapiens
aggcgagggcggggc

SEQ ID NO: 589525 - DNA, 15 bp, Homo sapiens
ggcgagggcggggca

SEQ ID NO: 589526 - DNA, 15 bp, Homo sapiens
gcgagggcggggcag

SEQ ID NO: 589527 - DNA, 15 bp, Homo sapiens
cgagggcggggcagg

SEQ ID NO: 589528 - DNA, 15 bp, Homo sapiens
gagggcggggcaggg

SEQ ID NO: 589529 - DNA, 15 bp, Homo sapiens
agggcggggcaggga

SEQ ID NO: 589530 - DNA, 15 bp, Homo sapiens
gggcggggcagggac

SEQ ID NO: 589531 - DNA, 15 bp, Homo sapiens
ggcggggcagggacg

SEQ ID NO: 589532 - DNA, 15 bp, Homo sapiens
gcggggcagggacgg

SEQ ID NO: 589533 - DNA, 15 bp, Homo sapiens
cggggcagggacggg

SEQ ID NO: 589534 - DNA, 15 bp, Homo sapiens
ggggcagggacgggt

SEQ ID NO: 589535 - DNA, 15 bp, Homo sapiens
gggcagggacgggtc

SEQ ID NO: 589536 - DNA, 15 bp, Homo sapiens
ggcagggacgggtcc

SEQ ID NO: 589537 - DNA, 15 bp, Homo sapiens
gcagggacgggtcca

SEQ ID NO: 589538 - DNA, 15 bp, Homo sapiens
cagggacgggtccaa

SEQ ID NO: 589539 - DNA, 15 bp, Homo sapiens
agggacgggtccaag

SEQ ID NO: 589540 - DNA, 15 bp, Homo sapiens
gggacgggtccaagg

SEQ ID NO: 589541 - DNA, 15 bp, Homo sapiens
ggacgggtccaaggg

SEQ ID NO: 589542 - DNA, 15 bp, Homo sapiens
gacgggtccaagggc

SEQ ID NO: 589543 - DNA, 15 bp, Homo sapiens
acgggtccaagggca

SEQ ID NO: 589544 - DNA, 15 bp, Homo sapiens
cgggtccaagggcag

SEQ ID NO: 589545 - DNA, 15 bp, Homo sapiens
gggtccaagggcagg

SEQ ID NO: 589546 - DNA, 15 bp, Homo sapiens
ggtccaagggcagga

SEQ ID NO: 589547 - DNA, 15 bp, Homo sapiens
gtccaagggcaggag

SEQ ID NO: 589548 - DNA, 15 bp, Homo sapiens
tccaagggcaggagg

SEQ ID NO: 589549 - DNA, 15 bp, Homo sapiens
ccaagggcaggaggc

SEQ ID NO: 589550 - DNA, 15 bp, Homo sapiens
caagggcaggaggct

SEQ ID NO: 589551 - DNA, 15 bp, Homo sapiens
aagggcaggaggctg

SEQ ID NO: 589552 - DNA, 15 bp, Homo sapiens
agggcaggaggctgg

SEQ ID NO: 589553 - DNA, 15 bp, Homo sapiens
gggcaggaggctggg

SEQ ID NO: 589554 - DNA, 15 bp, Homo sapiens
ggcaggaggctggga

SEQ ID NO: 589555 - DNA, 15 bp, Homo sapiens
gcaggaggctgggac

SEQ ID NO: 589556 - DNA, 15 bp, Homo sapiens
caggaggctgggaca

SEQ ID NO: 589557 - DNA, 15 bp, Homo sapiens
aggaggctgggacag

SEQ ID NO: 589558 - DNA, 15 bp, Homo sapiens
ggaggctgggacagg

SEQ ID NO: 589559 - DNA, 15 bp, Homo sapiens
gaggctgggacagga

SEQ ID NO: 589560 - DNA, 15 bp, Homo sapiens
aggctgggacaggac

SEQ ID NO: 589561 - DNA, 15 bp, Homo sapiens
ggctgggacaggacg

SEQ ID NO: 589562 - DNA, 15 bp, Homo sapiens
gctgggacaggacgg

SEQ ID NO: 589563 - DNA, 15 bp, Homo sapiens
ctgggacaggacggg

SEQ ID NO: 589564 - DNA, 15 bp, Homo sapiens
tgggacaggacgggg

SEQ ID NO: 589565 - DNA, 15 bp, Homo sapiens
gggacaggacgggga

SEQ ID NO: 589566 - DNA, 15 bp, Homo sapiens
ggacaggacggggat

SEQ ID NO: 589567 - DNA, 15 bp, Homo sapiens
gacaggacggggatg

SEQ ID NO: 589568 - DNA, 15 bp, Homo sapiens
acaggacggggatgc

SEQ ID NO: 589569 - DNA, 15 bp, Homo sapiens
caggacggggatgca

SEQ ID NO: 589570 - DNA, 15 bp, Homo sapiens
aggacggggatgcaa

SEQ ID NO: 589571 - DNA, 15 bp, Homo sapiens
ggacggggatgcaaa

SEQ ID NO: 589572 - DNA, 15 bp, Homo sapiens
gacggggatgcaaag

SEQ ID NO: 589573 - DNA, 15 bp, Homo sapiens
acggggatgcaaagg

SEQ ID NO: 589574 - DNA, 15 bp, Homo sapiens
cggggatgcaaaggg

SEQ ID NO: 589575 - DNA, 15 bp, Homo sapiens
ggggatgcaaaggga

SEQ ID NO: 589576 - DNA, 15 bp, Homo sapiens
gggatgcaaagggag

SEQ ID NO: 589577 - DNA, 15 bp, Homo sapiens
ggatgcaaagggagg

SEQ ID NO: 589578 - DNA, 15 bp, Homo sapiens
gatgcaaagggaggg

SEQ ID NO: 589579 - DNA, 15 bp, Homo sapiens
atgcaaagggagggg

SEQ ID NO: 589580 - DNA, 15 bp, Homo sapiens
tgcaaagggaggggc

SEQ ID NO: 589581 - DNA, 15 bp, Homo sapiens
gcaaagggaggggcg

SEQ ID NO: 589582 - DNA, 15 bp, Homo sapiens
caaagggaggggcgg

SEQ ID NO: 589583 - DNA, 15 bp, Homo sapiens
aaagggaggggcggg

SEQ ID NO: 589584 - DNA, 15 bp, Homo sapiens
aagggaggggcgggg

SEQ ID NO: 589585 - DNA, 15 bp, Homo sapiens
agggaggggcggggc

SEQ ID NO: 589586 - DNA, 15 bp, Homo sapiens
gggaggggcggggcc

SEQ ID NO: 589587 - DNA, 15 bp, Homo sapiens
ggaggggcggggccc

SEQ ID NO: 589588 - DNA, 15 bp, Homo sapiens
gaggggcggggcccg

SEQ ID NO: 589589 - DNA, 15 bp, Homo sapiens
aggggcggggcccga

SEQ ID NO: 589590 - DNA, 15 bp, Homo sapiens
ggggcggggcccgag

SEQ ID NO: 589591 - DNA, 15 bp, Homo sapiens
gggcggggcccgaga

SEQ ID NO: 589592 - DNA, 15 bp, Homo sapiens
ggcggggcccgagac

SEQ ID NO: 589593 - DNA, 15 bp, Homo sapiens
gcggggcccgagacg

SEQ ID NO: 589594 - DNA, 15 bp, Homo sapiens
cggggcccgagacgg

SEQ ID NO: 589595 - DNA, 15 bp, Homo sapiens
ggggcccgagacggg

SEQ ID NO: 589596 - DNA, 15 bp, Homo sapiens
gggcccgagacgggg

SEQ ID NO: 589597 - DNA, 15 bp, Homo sapiens
ggcccgagacgggga

SEQ ID NO: 589598 - DNA, 15 bp, Homo sapiens
gcccgagacggggag

SEQ ID NO: 589599 - DNA, 15 bp, Homo sapiens
cccgagacggggagg

SEQ ID NO: 589600 - DNA, 15 bp, Homo sapiens
ccgagacggggagga

SEQ ID NO: 589601 - DNA, 15 bp, Homo sapiens
cgagacggggaggag

SEQ ID NO: 589602 - DNA, 15 bp, Homo sapiens
gagacggggaggagg

SEQ ID NO: 589603 - DNA, 15 bp, Homo sapiens
agacggggaggaggg

SEQ ID NO: 589604 - DNA, 15 bp, Homo sapiens
gacggggaggagggg

SEQ ID NO: 589605 - DNA, 15 bp, Homo sapiens
acggggaggaggggg

SEQ ID NO: 589606 - DNA, 15 bp, Homo sapiens
cggggaggaggggga

SEQ ID NO: 589607 - DNA, 15 bp, Homo sapiens
ggggaggagggggag

SEQ ID NO: 589608 - DNA, 15 bp, Homo sapiens
gggaggagggggagg

SEQ ID NO: 589609 - DNA, 15 bp, Homo sapiens
ggaggagggggaggg

SEQ ID NO: 589610 - DNA, 15 bp, Homo sapiens
gaggagggggagggc

SEQ ID NO: 589611 - DNA, 15 bp, Homo sapiens
aggagggggagggcc

SEQ ID NO: 589612 - DNA, 15 bp, Homo sapiens
ggagggggagggccc

SEQ ID NO: 589613 - DNA, 15 bp, Homo sapiens
gagggggagggccca

SEQ ID NO: 589614 - DNA, 15 bp, Homo sapiens
agggggagggcccaa

SEQ ID NO: 589615 - DNA, 15 bp, Homo sapiens
gggggagggcccaag

SEQ ID NO: 589616 - DNA, 15 bp, Homo sapiens
ggggagggcccaagg

SEQ ID NO: 589617 - DNA, 15 bp, Homo sapiens
gggagggcccaaggg

SEQ ID NO: 589618 - DNA, 15 bp, Homo sapiens
ggagggcccaagggg

SEQ ID NO: 589619 - DNA, 15 bp, Homo sapiens
gagggcccaagggga

SEQ ID NO: 589620 - DNA, 15 bp, Homo sapiens
agggcccaaggggag

SEQ ID NO: 589621 - DNA, 15 bp, Homo sapiens
gggcccaaggggagg

SEQ ID NO: 589622 - DNA, 15 bp, Homo sapiens
ggcccaaggggagga

SEQ ID NO: 589623 - DNA, 15 bp, Homo sapiens
gcccaaggggaggag

SEQ ID NO: 589624 - DNA, 15 bp, Homo sapiens
cccaaggggaggagg

SEQ ID NO: 589625 - DNA, 15 bp, Homo sapiens
ccaaggggaggaggc

SEQ ID NO: 589626 - DNA, 15 bp, Homo sapiens
caaggggaggaggcg

SEQ ID NO: 589627 - DNA, 15 bp, Homo sapiens
aaggggaggaggcgg

SEQ ID NO: 589628 - DNA, 15 bp, Homo sapiens
aggggaggaggcggg

SEQ ID NO: 589629 - DNA, 15 bp, Homo sapiens
ggggaggaggcgggg

SEQ ID NO: 589630 - DNA, 15 bp, Homo sapiens
gggaggaggcggggt

SEQ ID NO: 589631 - DNA, 15 bp, Homo sapiens
ggaggaggcggggtc

SEQ ID NO: 589632 - DNA, 15 bp, Homo sapiens
gaggaggcggggtcc

SEQ ID NO: 589633 - DNA, 15 bp, Homo sapiens
aggaggcggggtccg

SEQ ID NO: 589634 - DNA, 15 bp, Homo sapiens
ggaggcggggtccgg

SEQ ID NO: 589635 - DNA, 15 bp, Homo sapiens
gaggcggggtccgga

SEQ ID NO: 589636 - DNA, 15 bp, Homo sapiens
aggcggggtccggac

SEQ ID NO: 589637 - DNA, 15 bp, Homo sapiens
ggcggggtccggacg

SEQ ID NO: 589638 - DNA, 15 bp, Homo sapiens
gcggggtccggacgg

SEQ ID NO: 589639 - DNA, 15 bp, Homo sapiens
cggggtccggacggg

SEQ ID NO: 589640 - DNA, 15 bp, Homo sapiens
ggggtccggacgggg

SEQ ID NO: 589641 - DNA, 15 bp, Homo sapiens
gggtccggacgggga

SEQ ID NO: 589642 - DNA, 15 bp, Homo sapiens
ggtccggacggggat

SEQ ID NO: 589643 - DNA, 15 bp, Homo sapiens
gtccggacggggatg

SEQ ID NO: 589644 - DNA, 15 bp, Homo sapiens
tccggacggggatgc

SEQ ID NO: 589645 - DNA, 15 bp, Homo sapiens
ccggacggggatgcc

SEQ ID NO: 589646 - DNA, 15 bp, Homo sapiens
cggacggggatgcca

SEQ ID NO: 589647 - DNA, 15 bp, Homo sapiens
ggacggggatgccaa

SEQ ID NO: 589648 - DNA, 15 bp, Homo sapiens
gacggggatgccaag

SEQ ID NO: 589649 - DNA, 15 bp, Homo sapiens
acggggatgccaaga

SEQ ID NO: 589650 - DNA, 15 bp, Homo sapiens
cggggatgccaagag

SEQ ID NO: 589651 - DNA, 15 bp, Homo sapiens
ggggatgccaagagc

SEQ ID NO: 589652 - DNA, 15 bp, Homo sapiens
gggatgccaagagca

SEQ ID NO: 589653 - DNA, 15 bp, Homo sapiens
ggatgccaagagcag

SEQ ID NO: 589654 - DNA, 15 bp, Homo sapiens
gatgccaagagcagg

SEQ ID NO: 589655 - DNA, 15 bp, Homo sapiens
atgccaagagcaggg

SEQ ID NO: 589656 - DNA, 15 bp, Homo sapiens
tgccaagagcaggga

SEQ ID NO: 589657 - DNA, 15 bp, Homo sapiens
gccaagagcagggat

SEQ ID NO: 589658 - DNA, 15 bp, Homo sapiens
ccaagagcagggatg

SEQ ID NO: 589659 - DNA, 15 bp, Homo sapiens
caagagcagggatgg

SEQ ID NO: 589660 - DNA, 15 bp, Homo sapiens
aagagcagggatggg

SEQ ID NO: 589661 - DNA, 15 bp, Homo sapiens
agagcagggatggga

SEQ ID NO: 589662 - DNA, 15 bp, Homo sapiens
gagcagggatgggag

SEQ ID NO: 589663 - DNA, 15 bp, Homo sapiens
agcagggatgggagc

SEQ ID NO: 589664 - DNA, 15 bp, Homo sapiens
gcagggatgggagcg

SEQ ID NO: 589665 - DNA, 15 bp, Homo sapiens
cagggatgggagcga

SEQ ID NO: 589666 - DNA, 15 bp, Homo sapiens
agggatgggagcgag

SEQ ID NO: 589667 - DNA, 15 bp, Homo sapiens
gggatgggagcgagc

SEQ ID NO: 589668 - DNA, 15 bp, Homo sapiens
ggatgggagcgagcc

SEQ ID NO: 589669 - DNA, 15 bp, Homo sapiens
gatgggagcgagcct

SEQ ID NO: 589670 - DNA, 15 bp, Homo sapiens
atgggagcgagcctg

SEQ ID NO: 589671 - DNA, 15 bp, Homo sapiens
tgggagcgagcctgc

SEQ ID NO: 589672 - DNA, 15 bp, Homo sapiens
gggagcgagcctgcg

SEQ ID NO: 589673 - DNA, 15 bp, Homo sapiens
ggagcgagcctgcgt

SEQ ID NO: 589674 - DNA, 15 bp, Homo sapiens
gagcgagcctgcgtc

SEQ ID NO: 589675 - DNA, 15 bp, Homo sapiens
agcgagcctgcgtcc

SEQ ID NO: 589676 - DNA, 15 bp, Homo sapiens
gcgagcctgcgtccg

SEQ ID NO: 589677 - DNA, 15 bp, Homo sapiens
cgagcctgcgtccgg

SEQ ID NO: 589678 - DNA, 15 bp, Homo sapiens
gagcctgcgtccggg

SEQ ID NO: 589679 - DNA, 15 bp, Homo sapiens
agcctgcgtccgggc

SEQ ID NO: 589680 - DNA, 15 bp, Homo sapiens
gcctgcgtccgggca

SEQ ID NO: 589681 - DNA, 15 bp, Homo sapiens
cctgcgtccgggcac

SEQ ID NO: 589682 - DNA, 15 bp, Homo sapiens
ctgcgtccgggcact

SEQ ID NO: 589683 - DNA, 15 bp, Homo sapiens
tgcgtccgggcactg

SEQ ID NO: 589684 - DNA, 15 bp, Homo sapiens
gcgtccgggcactgg

SEQ ID NO: 589685 - DNA, 15 bp, Homo sapiens
cgtccgggcactggt

SEQ ID NO: 589686 - DNA, 15 bp, Homo sapiens
gtccgggcactggtc

SEQ ID NO: 589687 - DNA, 15 bp, Homo sapiens
tccgggcactggtcc

SEQ ID NO: 589688 - DNA, 15 bp, Homo sapiens
ccgggcactggtccc

SEQ ID NO: 589689 - DNA, 15 bp, Homo sapiens
cgggcactggtcccc

SEQ ID NO: 589690 - DNA, 15 bp, Homo sapiens
gggcactggtcccca

SEQ ID NO: 589691 - DNA, 15 bp, Homo sapiens
ggcactggtccccat

SEQ ID NO: 589692 - DNA, 15 bp, Homo sapiens
gcactggtccccatc

SEQ ID NO: 589693 - DNA, 15 bp, Homo sapiens
cactggtccccatcc

SEQ ID NO: 589694 - DNA, 15 bp, Homo sapiens
actggtccccatccg

SEQ ID NO: 589695 - DNA, 15 bp, Homo sapiens
ctggtccccatccgt

SEQ ID NO: 589696 - DNA, 15 bp, Homo sapiens
tggtccccatccgtg

SEQ ID NO: 589697 - DNA, 15 bp, Homo sapiens
ggtccccatccgtga

SEQ ID NO: 589698 - DNA, 15 bp, Homo sapiens
gtccccatccgtgag

SEQ ID NO: 589699 - DNA, 15 bp, Homo sapiens
tccccatccgtgagt

SEQ ID NO: 589700 - DNA, 15 bp, Homo sapiens
ccccatccgtgagtc

SEQ ID NO: 589701 - DNA, 15 bp, Homo sapiens
cccatccgtgagtcc

SEQ ID NO: 589702 - DNA, 15 bp, Homo sapiens
ccatccgtgagtccc

SEQ ID NO: 589703 - DNA, 15 bp, Homo sapiens
catccgtgagtcccc

SEQ ID NO: 589704 - DNA, 15 bp, Homo sapiens
atccgtgagtcccct

SEQ ID NO: 589705 - DNA, 15 bp, Homo sapiens
tccgtgagtcccctc

SEQ ID NO: 589706 - DNA, 15 bp, Homo sapiens
ccgtgagtcccctcg

SEQ ID NO: 589707 - DNA, 15 bp, Homo sapiens
cgtgagtcccctcgg

SEQ ID NO: 589708 - DNA, 15 bp, Homo sapiens
gtgagtcccctcggt

SEQ ID NO: 589709 - DNA, 15 bp, Homo sapiens
tgagtcccctcggtg

SEQ ID NO: 589710 - DNA, 15 bp, Homo sapiens
gagtcccctcggtgc

SEQ ID NO: 589711 - DNA, 15 bp, Homo sapiens
agtcccctcggtgct

SEQ ID NO: 589712 - DNA, 15 bp, Homo sapiens
gtcccctcggtgctc

SEQ ID NO: 589713 - DNA, 15 bp, Homo sapiens
tcccctcggtgctcc

SEQ ID NO: 589714 - DNA, 15 bp, Homo sapiens
cccctcggtgctccc

SEQ ID NO: 589715 - DNA, 15 bp, Homo sapiens
ccctcggtgctccct

SEQ ID NO: 589716 - DNA, 15 bp, Homo sapiens
cctcggtgctccctg

SEQ ID NO: 589717 - DNA, 15 bp, Homo sapiens
ctcggtgctccctgc

SEQ ID NO: 589718 - DNA, 15 bp, Homo sapiens
tcggtgctccctgcc

SEQ ID NO: 589719 - DNA, 15 bp, Homo sapiens
cggtgctccctgccc

SEQ ID NO: 589720 - DNA, 15 bp, Homo sapiens
ggtgctccctgcccg

SEQ ID NO: 589721 - DNA, 15 bp, Homo sapiens
gtgctccctgcccgc

SEQ ID NO: 589722 - DNA, 15 bp, Homo sapiens
tgctccctgcccgcc

SEQ ID NO: 589723 - DNA, 15 bp, Homo sapiens
gctccctgcccgccg

SEQ ID NO: 589724 - DNA, 15 bp, Homo sapiens
ctccctgcccgccgt

SEQ ID NO: 589725 - DNA, 15 bp, Homo sapiens
tccctgcccgccgtg

SEQ ID NO: 589726 - DNA, 15 bp, Homo sapiens
ccctgcccgccgtgg

SEQ ID NO: 589727 - DNA, 15 bp, Homo sapiens
cctgcccgccgtggc

SEQ ID NO: 589728 - DNA, 15 bp, Homo sapiens
ctgcccgccgtggcc

SEQ ID NO: 589729 - DNA, 15 bp, Homo sapiens
tgcccgccgtggcca

SEQ ID NO: 589730 - DNA, 15 bp, Homo sapiens
gcccgccgtggccat

SEQ ID NO: 589731 - DNA, 15 bp, Homo sapiens
cccgccgtggccatc

SEQ ID NO: 589732 - DNA, 15 bp, Homo sapiens
ccgccgtggccatcc

SEQ ID NO: 589733 - DNA, 15 bp, Homo sapiens
cgccgtggccatcct

SEQ ID NO: 589734 - DNA, 15 bp, Homo sapiens
gccgtggccatcctc

SEQ ID NO: 589735 - DNA, 15 bp, Homo sapiens
ccgtggccatcctct

SEQ ID NO: 589736 - DNA, 15 bp, Homo sapiens
cgtggccatcctctc

SEQ ID NO: 589737 - DNA, 15 bp, Homo sapiens
gtggccatcctctca

SEQ ID NO: 589738 - DNA, 15 bp, Homo sapiens
tggccatcctctcac

SEQ ID NO: 589739 - DNA, 15 bp, Homo sapiens
ggccatcctctcaca

SEQ ID NO: 589740 - DNA, 15 bp, Homo sapiens
gccatcctctcacat

SEQ ID NO: 589741 - DNA, 15 bp, Homo sapiens
ccatcctctcacatc

SEQ ID NO: 589742 - DNA, 15 bp, Homo sapiens
catcctctcacatca

SEQ ID NO: 589743 - DNA, 15 bp, Homo sapiens
atcctctcacatcac

SEQ ID NO: 589744 - DNA, 15 bp, Homo sapiens
tcctctcacatcact

SEQ ID NO: 589745 - DNA, 15 bp, Homo sapiens
cctctcacatcactc

SEQ ID NO: 589746 - DNA, 15 bp, Homo sapiens
ctctcacatcactca

SEQ ID NO: 589747 - DNA, 15 bp, Homo sapiens
tctcacatcactcac

SEQ ID NO: 589748 - DNA, 15 bp, Homo sapiens
ctcacatcactcaca

SEQ ID NO: 589749 - DNA, 15 bp, Homo sapiens
tcacatcactcacaa

SEQ ID NO: 589750 - DNA, 15 bp, Homo sapiens
cacatcactcacaac

SEQ ID NO: 589751 - DNA, 15 bp, Homo sapiens
acatcactcacaacc

SEQ ID NO: 589752 - DNA, 15 bp, Homo sapiens
catcactcacaaccc

SEQ ID NO: 589753 - DNA, 15 bp, Homo sapiens
atcactcacaacccc

SEQ ID NO: 589754 - DNA, 15 bp, Homo sapiens
tcactcacaacccca

SEQ ID NO: 589755 - DNA, 15 bp, Homo sapiens
cactcacaaccccaa

SEQ ID NO: 589756 - DNA, 15 bp, Homo sapiens
actcacaaccccaag

SEQ ID NO: 589757 - DNA, 15 bp, Homo sapiens
ctcacaaccccaagg

SEQ ID NO: 589758 - DNA, 15 bp, Homo sapiens
tcacaaccccaaggc

SEQ ID NO: 589759 - DNA, 15 bp, Homo sapiens
cacaaccccaaggcg

SEQ ID NO: 589760 - DNA, 15 bp, Homo sapiens
acaaccccaaggcgc

SEQ ID NO: 589761 - DNA, 15 bp, Homo sapiens
caaccccaaggcgcg

SEQ ID NO: 589762 - DNA, 15 bp, Homo sapiens
aaccccaaggcgcgg

SEQ ID NO: 589763 - DNA, 15 bp, Homo sapiens
accccaaggcgcggc

SEQ ID NO: 589764 - DNA, 15 bp, Homo sapiens
ccccaaggcgcggca

SEQ ID NO: 589765 - DNA, 15 bp, Homo sapiens
cccaaggcgcggcat

SEQ ID NO: 589766 - DNA, 15 bp, Homo sapiens
ccaaggcgcggcatg

SEQ ID NO: 589767 - DNA, 15 bp, Homo sapiens
caaggcgcggcatgg

SEQ ID NO: 589768 - DNA, 15 bp, Homo sapiens
aaggcgcggcatggt

SEQ ID NO: 589769 - DNA, 15 bp, Homo sapiens
aggcgcggcatggtt

SEQ ID NO: 589770 - DNA, 15 bp, Homo sapiens
ggcgcggcatggttg

SEQ ID NO: 589771 - DNA, 15 bp, Homo sapiens
gcgcggcatggttga

SEQ ID NO: 589772 - DNA, 15 bp, Homo sapiens
cgcggcatggttgac

SEQ ID NO: 589773 - DNA, 15 bp, Homo sapiens
gcggcatggttgaca

SEQ ID NO: 589774 - DNA, 15 bp, Homo sapiens
cggcatggttgacac

SEQ ID NO: 589775 - DNA, 15 bp, Homo sapiens
ggcatggttgacacc

SEQ ID NO: 589776 - DNA, 15 bp, Homo sapiens
gcatggttgacaccc

SEQ ID NO: 589777 - DNA, 15 bp, Homo sapiens
catggttgacacccc

SEQ ID NO: 589778 - DNA, 15 bp, Homo sapiens
atggttgacaccccc

SEQ ID NO: 589779 - DNA, 15 bp, Homo sapiens
tggttgacaccccca

SEQ ID NO: 589780 - DNA, 15 bp, Homo sapiens
ggttgacacccccac

SEQ ID NO: 589781 - DNA, 15 bp, Homo sapiens
gttgacacccccacg

SEQ ID NO: 589782 - DNA, 15 bp, Homo sapiens
ttgacacccccacgt

SEQ ID NO: 589783 - DNA, 15 bp, Homo sapiens
tgacacccccacgtt

SEQ ID NO: 589784 - DNA, 15 bp, Homo sapiens
gacacccccacgtta

SEQ ID NO: 589785 - DNA, 15 bp, Homo sapiens
acacccccacgttag

SEQ ID NO: 589786 - DNA, 15 bp, Homo sapiens
cacccccacgttagg

SEQ ID NO: 589787 - DNA, 15 bp, Homo sapiens
acccccacgttagga

SEQ ID NO: 589788 - DNA, 15 bp, Homo sapiens
cccccacgttaggac

SEQ ID NO: 589789 - DNA, 15 bp, Homo sapiens
ccccacgttaggacg

SEQ ID NO: 589790 - DNA, 15 bp, Homo sapiens
cccacgttaggacgg

SEQ ID NO: 589791 - DNA, 15 bp, Homo sapiens
ccacgttaggacgga

SEQ ID NO: 589792 - DNA, 15 bp, Homo sapiens
cacgttaggacggag

SEQ ID NO: 589793 - DNA, 15 bp, Homo sapiens
acgttaggacggaga

SEQ ID NO: 589794 - DNA, 15 bp, Homo sapiens
cgttaggacggagac

SEQ ID NO: 589795 - DNA, 15 bp, Homo sapiens
gttaggacggagacc

SEQ ID NO: 589796 - DNA, 15 bp, Homo sapiens
ttaggacggagaccc

SEQ ID NO: 589797 - DNA, 15 bp, Homo sapiens
taggacggagaccct

SEQ ID NO: 589798 - DNA, 15 bp, Homo sapiens
aggacggagaccctg

SEQ ID NO: 589799 - DNA, 15 bp, Homo sapiens
ggacggagaccctgg

SEQ ID NO: 589800 - DNA, 15 bp, Homo sapiens
gacggagaccctggg

SEQ ID NO: 589801 - DNA, 15 bp, Homo sapiens
acggagaccctgggc

SEQ ID NO: 589802 - DNA, 15 bp, Homo sapiens
cggagaccctgggct

SEQ ID NO: 589803 - DNA, 15 bp, Homo sapiens
ggagaccctgggctt

SEQ ID NO: 589804 - DNA, 15 bp, Homo sapiens
gagaccctgggctta

SEQ ID NO: 589805 - DNA, 15 bp, Homo sapiens
agaccctgggcttag

SEQ ID NO: 589806 - DNA, 15 bp, Homo sapiens
gaccctgggcttagt

SEQ ID NO: 589807 - DNA, 15 bp, Homo sapiens
accctgggcttagtt

SEQ ID NO: 589808 - DNA, 15 bp, Homo sapiens
ccctgggcttagtta

SEQ ID NO: 589809 - DNA, 15 bp, Homo sapiens
cctgggcttagttag

SEQ ID NO: 589810 - DNA, 15 bp, Homo sapiens
ctgggcttagttaga

SEQ ID NO: 589811 - DNA, 15 bp, Homo sapiens
tgggcttagttagag

SEQ ID NO: 589812 - DNA, 15 bp, Homo sapiens
gggcttagttagagg

SEQ ID NO: 589813 - DNA, 15 bp, Homo sapiens
ggcttagttagaggg

SEQ ID NO: 589814 - DNA, 15 bp, Homo sapiens
gcttagttagagggg

SEQ ID NO: 589815 - DNA, 15 bp, Homo sapiens
cttagttagaggggg

SEQ ID NO: 589816 - DNA, 15 bp, Homo sapiens
ttagttagagggggc

SEQ ID NO: 589817 - DNA, 15 bp, Homo sapiens
tagttagagggggca

SEQ ID NO: 589818 - DNA, 15 bp, Homo sapiens
agttagagggggcag

SEQ ID NO: 589819 - DNA, 15 bp, Homo sapiens
gttagagggggcagt

SEQ ID NO: 589820 - DNA, 15 bp, Homo sapiens
ttagagggggcagta

SEQ ID NO: 589821 - DNA, 15 bp, Homo sapiens
tagagggggcagtac

SEQ ID NO: 589822 - DNA, 15 bp, Homo sapiens
agagggggcagtact

SEQ ID NO: 589823 - DNA, 15 bp, Homo sapiens
gagggggcagtacta

SEQ ID NO: 589824 - DNA, 15 bp, Homo sapiens
agggggcagtactaa

SEQ ID NO: 589825 - DNA, 15 bp, Homo sapiens
gggggcagtactaac

SEQ ID NO: 589826 - DNA, 15 bp, Homo sapiens
ggggcagtactaacc

SEQ ID NO: 589827 - DNA, 15 bp, Homo sapiens
gggcagtactaacca

SEQ ID NO: 589828 - DNA, 15 bp, Homo sapiens
ggcagtactaaccag

SEQ ID NO: 589829 - DNA, 15 bp, Homo sapiens
gcagtactaaccagt

SEQ ID NO: 589830 - DNA, 15 bp, Homo sapiens
cagtactaaccagtc

SEQ ID NO: 589831 - DNA, 15 bp, Homo sapiens
agtactaaccagtcc

SEQ ID NO: 589832 - DNA, 15 bp, Homo sapiens
gtactaaccagtccc

SEQ ID NO: 589833 - DNA, 15 bp, Homo sapiens
tactaaccagtccct

SEQ ID NO: 589834 - DNA, 15 bp, Homo sapiens
actaaccagtccctg

SEQ ID NO: 589835 - DNA, 15 bp, Homo sapiens
ctaaccagtccctgg

SEQ ID NO: 589836 - DNA, 15 bp, Homo sapiens
taaccagtccctggc

SEQ ID NO: 589837 - DNA, 15 bp, Homo sapiens
aaccagtccctggcg

SEQ ID NO: 589838 - DNA, 15 bp, Homo sapiens
accagtccctggcgg

SEQ ID NO: 589839 - DNA, 15 bp, Homo sapiens
ccagtccctggcgga

SEQ ID NO: 589840 - DNA, 15 bp, Homo sapiens
cagtccctggcggaa

SEQ ID NO: 589841 - DNA, 15 bp, Homo sapiens
agtccctggcggaaa

SEQ ID NO: 589842 - DNA, 15 bp, Homo sapiens
gtccctggcggaaac

SEQ ID NO: 589843 - DNA, 15 bp, Homo sapiens
tccctggcggaaacg

SEQ ID NO: 589844 - DNA, 15 bp, Homo sapiens
ccctggcggaaacgc

SEQ ID NO: 589845 - DNA, 15 bp, Homo sapiens
cctggcggaaacgct

SEQ ID NO: 589846 - DNA, 15 bp, Homo sapiens
ctggcggaaacgctt

SEQ ID NO: 589847 - DNA, 15 bp, Homo sapiens
tggcggaaacgcttt

SEQ ID NO: 589848 - DNA, 15 bp, Homo sapiens
ggcggaaacgctttg

SEQ ID NO: 589849 - DNA, 15 bp, Homo sapiens
gcggaaacgctttgg

SEQ ID NO: 589850 - DNA, 15 bp, Homo sapiens
cggaaacgctttggc

SEQ ID NO: 589851 - DNA, 15 bp, Homo sapiens
ggaaacgctttggct

SEQ ID NO: 589852 - DNA, 15 bp, Homo sapiens
gaaacgctttggctg

SEQ ID NO: 589853 - DNA, 15 bp, Homo sapiens
aaacgctttggctgg

SEQ ID NO: 589854 - DNA, 15 bp, Homo sapiens
aacgctttggctggg

SEQ ID NO: 589855 - DNA, 15 bp, Homo sapiens
acgctttggctgggt

SEQ ID NO: 589856 - DNA, 15 bp, Homo sapiens
cgctttggctgggtg

SEQ ID NO: 589857 - DNA, 15 bp, Homo sapiens
gctttggctgggtga

SEQ ID NO: 589858 - DNA, 15 bp, Homo sapiens
ctttggctgggtgag

SEQ ID NO: 589859 - DNA, 15 bp, Homo sapiens
tttggctgggtgagg

SEQ ID NO: 589860 - DNA, 15 bp, Homo sapiens
ttggctgggtgaggt

SEQ ID NO: 589861 - DNA, 15 bp, Homo sapiens
tggctgggtgaggtg

SEQ ID NO: 589862 - DNA, 15 bp, Homo sapiens
ggctgggtgaggtga

SEQ ID NO: 589863 - DNA, 15 bp, Homo sapiens
gctgggtgaggtgag

SEQ ID NO: 589864 - DNA, 15 bp, Homo sapiens
ctgggtgaggtgagc

SEQ ID NO: 589865 - DNA, 15 bp, Homo sapiens
tgggtgaggtgagcg

SEQ ID NO: 589866 - DNA, 15 bp, Homo sapiens
gggtgaggtgagcgg

SEQ ID NO: 589867 - DNA, 15 bp, Homo sapiens
ggtgaggtgagcggg

SEQ ID NO: 589868 - DNA, 15 bp, Homo sapiens
gtgaggtgagcggga

SEQ ID NO: 589869 - DNA, 15 bp, Homo sapiens
tgaggtgagcgggat

SEQ ID NO: 589870 - DNA, 15 bp, Homo sapiens
gaggtgagcgggatc

SEQ ID NO: 589871 - DNA, 15 bp, Homo sapiens
aggtgagcgggatcg

SEQ ID NO: 589872 - DNA, 15 bp, Homo sapiens
ggtgagcgggatcgc

SEQ ID NO: 589873 - DNA, 15 bp, Homo sapiens
gtgagcgggatcgcc

SEQ ID NO: 589874 - DNA, 15 bp, Homo sapiens
tgagcgggatcgccc

SEQ ID NO: 589875 - DNA, 15 bp, Homo sapiens
gagcgggatcgcccc

SEQ ID NO: 589876 - DNA, 15 bp, Homo sapiens
agcgggatcgccccc

SEQ ID NO: 589877 - DNA, 15 bp, Homo sapiens
gcgggatcgccccca

SEQ ID NO: 589878 - DNA, 15 bp, Homo sapiens
cgggatcgcccccat

SEQ ID NO: 589879 - DNA, 15 bp, Homo sapiens
gggatcgcccccatt

SEQ ID NO: 589880 - DNA, 15 bp, Homo sapiens
ggatcgcccccattt

SEQ ID NO: 589881 - DNA, 15 bp, Homo sapiens
gatcgcccccatttc

SEQ ID NO: 589882 - DNA, 15 bp, Homo sapiens
atcgcccccatttct

SEQ ID NO: 589883 - DNA, 15 bp, Homo sapiens
tcgcccccatttctc

SEQ ID NO: 589884 - DNA, 15 bp, Homo sapiens
cgcccccatttctcc

SEQ ID NO: 589885 - DNA, 15 bp, Homo sapiens
gcccccatttctcca

SEQ ID NO: 589886 - DNA, 15 bp, Homo sapiens
cccccatttctccag

SEQ ID NO: 589887 - DNA, 15 bp, Homo sapiens
ccccatttctccaga

SEQ ID NO: 589888 - DNA, 15 bp, Homo sapiens
cccatttctccagag

SEQ ID NO: 589889 - DNA, 15 bp, Homo sapiens
ccatttctccagaga

SEQ ID NO: 589890 - DNA, 15 bp, Homo sapiens
catttctccagagag

SEQ ID NO: 589891 - DNA, 15 bp, Homo sapiens
atttctccagagagg

SEQ ID NO: 589892 - DNA, 15 bp, Homo sapiens
tttctccagagaggg

SEQ ID NO: 589893 - DNA, 15 bp, Homo sapiens
ttctccagagagggg

SEQ ID NO: 589894 - DNA, 15 bp, Homo sapiens
tctccagagaggggt

SEQ ID NO: 589895 - DNA, 15 bp, Homo sapiens
ctccagagaggggtc

SEQ ID NO: 589896 - DNA, 15 bp, Homo sapiens
tccagagaggggtcc

SEQ ID NO: 589897 - DNA, 15 bp, Homo sapiens
ccagagaggggtccc

SEQ ID NO: 589898 - DNA, 15 bp, Homo sapiens
cagagaggggtcccg

SEQ ID NO: 589899 - DNA, 15 bp, Homo sapiens
agagaggggtcccgg

SEQ ID NO: 589900 - DNA, 15 bp, Homo sapiens
gagaggggtcccggc

SEQ ID NO: 589901 - DNA, 15 bp, Homo sapiens
agaggggtcccggct

SEQ ID NO: 589902 - DNA, 15 bp, Homo sapiens
gaggggtcccggctc

SEQ ID NO: 589903 - DNA, 15 bp, Homo sapiens
aggggtcccggctca

SEQ ID NO: 589904 - DNA, 15 bp, Homo sapiens
ggggtcccggctcag

SEQ ID NO: 589905 - DNA, 15 bp, Homo sapiens
gggtcccggctcagc

SEQ ID NO: 589906 - DNA, 15 bp, Homo sapiens
ggtcccggctcagcg

SEQ ID NO: 589907 - DNA, 15 bp, Homo sapiens
gtcccggctcagcga

SEQ ID NO: 589908 - DNA, 15 bp, Homo sapiens
tcccggctcagcgag

SEQ ID NO: 589909 - DNA, 15 bp, Homo sapiens
cccggctcagcgagg

SEQ ID NO: 589910 - DNA, 15 bp, Homo sapiens
ccggctcagcgaggg

SEQ ID NO: 589911 - DNA, 15 bp, Homo sapiens
cggctcagcgaggga

SEQ ID NO: 589912 - DNA, 15 bp, Homo sapiens
ggctcagcgagggaa

SEQ ID NO: 589913 - DNA, 15 bp, Homo sapiens
gctcagcgagggaaa

SEQ ID NO: 589914 - DNA, 15 bp, Homo sapiens
ctcagcgagggaaag

SEQ ID NO: 589915 - DNA, 15 bp, Homo sapiens
tcagcgagggaaaga

SEQ ID NO: 589916 - DNA, 15 bp, Homo sapiens
cagcgagggaaagag

SEQ ID NO: 589917 - DNA, 15 bp, Homo sapiens
agcgagggaaagagg

SEQ ID NO: 589918 - DNA, 15 bp, Homo sapiens
gcgagggaaagaggc

SEQ ID NO: 589919 - DNA, 15 bp, Homo sapiens
cgagggaaagaggcc

SEQ ID NO: 589920 - DNA, 15 bp, Homo sapiens
gagggaaagaggccg

SEQ ID NO: 589921 - DNA, 15 bp, Homo sapiens
agggaaagaggccgc

SEQ ID NO: 589922 - DNA, 15 bp, Homo sapiens
gggaaagaggccgcc

SEQ ID NO: 589923 - DNA, 15 bp, Homo sapiens
ggaaagaggccgccg

SEQ ID NO: 589924 - DNA, 15 bp, Homo sapiens
gaaagaggccgccgc

SEQ ID NO: 589925 - DNA, 15 bp, Homo sapiens
aaagaggccgccgct

SEQ ID NO: 589926 - DNA, 15 bp, Homo sapiens
aagaggccgccgctg

SEQ ID NO: 589927 - DNA, 15 bp, Homo sapiens
agaggccgccgctgg

SEQ ID NO: 589928 - DNA, 15 bp, Homo sapiens
gaggccgccgctggg

SEQ ID NO: 589929 - DNA, 15 bp, Homo sapiens
aggccgccgctgggg

SEQ ID NO: 589930 - DNA, 15 bp, Homo sapiens
ggccgccgctggggg

SEQ ID NO: 589931 - DNA, 15 bp, Homo sapiens
gccgccgctgggggg

SEQ ID NO: 589932 - DNA, 15 bp, Homo sapiens
ccgccgctgggggga

SEQ ID NO: 589933 - DNA, 15 bp, Homo sapiens
cgccgctggggggac

SEQ ID NO: 589934 - DNA, 15 bp, Homo sapiens
gccgctggggggacg

SEQ ID NO: 589935 - DNA, 15 bp, Homo sapiens
ccgctggggggacgg

SEQ ID NO: 589936 - DNA, 15 bp, Homo sapiens
cgctggggggacggc

SEQ ID NO: 589937 - DNA, 15 bp, Homo sapiens
gctggggggacggct

SEQ ID NO: 589938 - DNA, 15 bp, Homo sapiens
ctggggggacggctg

SEQ ID NO: 589939 - DNA, 15 bp, Homo sapiens
tggggggacggctgg

SEQ ID NO: 589940 - DNA, 15 bp, Homo sapiens
ggggggacggctggc

SEQ ID NO: 589941 - DNA, 15 bp, Homo sapiens
gggggacggctggcc

SEQ ID NO: 589942 - DNA, 15 bp, Homo sapiens
ggggacggctggccg

SEQ ID NO: 589943 - DNA, 15 bp, Homo sapiens
gggacggctggccgg

SEQ ID NO: 589944 - DNA, 15 bp, Homo sapiens
ggacggctggccggg

SEQ ID NO: 589945 - DNA, 15 bp, Homo sapiens
gacggctggccgggg

SEQ ID NO: 589946 - DNA, 15 bp, Homo sapiens
acggctggccggggc

SEQ ID NO: 589947 - DNA, 15 bp, Homo sapiens
cggctggccggggcc

SEQ ID NO: 589948 - DNA, 15 bp, Homo sapiens
ggctggccggggccc

SEQ ID NO: 589949 - DNA, 15 bp, Homo sapiens
gctggccggggcccc

SEQ ID NO: 589950 - DNA, 15 bp, Homo sapiens
ctggccggggcccct

SEQ ID NO: 589951 - DNA, 15 bp, Homo sapiens
tggccggggcccctc

SEQ ID NO: 589952 - DNA, 15 bp, Homo sapiens
ggccggggcccctcc

SEQ ID NO: 589953 - DNA, 15 bp, Homo sapiens
gccggggcccctccc

SEQ ID NO: 589954 - DNA, 15 bp, Homo sapiens
ccggggcccctccct

SEQ ID NO: 589955 - DNA, 15 bp, Homo sapiens
cggggcccctccctg

SEQ ID NO: 589956 - DNA, 15 bp, Homo sapiens
ggggcccctccctgg

SEQ ID NO: 589957 - DNA, 15 bp, Homo sapiens
gggcccctccctgga

SEQ ID NO: 589958 - DNA, 15 bp, Homo sapiens
ggcccctccctggag

SEQ ID NO: 589959 - DNA, 15 bp, Homo sapiens
gcccctccctggaga

SEQ ID NO: 589960 - DNA, 15 bp, Homo sapiens
cccctccctggagaa

SEQ ID NO: 589961 - DNA, 15 bp, Homo sapiens
ccctccctggagaac

SEQ ID NO: 589962 - DNA, 15 bp, Homo sapiens
cctccctggagaacg

SEQ ID NO: 589963 - DNA, 15 bp, Homo sapiens
ctccctggagaacga

SEQ ID NO: 589964 - DNA, 15 bp, Homo sapiens
tccctggagaacgag

SEQ ID NO: 589965 - DNA, 15 bp, Homo sapiens
ccctggagaacgaga

SEQ ID NO: 589966 - DNA, 15 bp, Homo sapiens
cctggagaacgagag

SEQ ID NO: 589967 - DNA, 15 bp, Homo sapiens
ctggagaacgagagg

SEQ ID NO: 589968 - DNA, 15 bp, Homo sapiens
tggagaacgagaggc

SEQ ID NO: 589969 - DNA, 15 bp, Homo sapiens
ggagaacgagaggcc

SEQ ID NO: 589970 - DNA, 15 bp, Homo sapiens
gagaacgagaggccg

SEQ ID NO: 589971 - DNA, 15 bp, Homo sapiens
agaacgagaggccgc

SEQ ID NO: 589972 - DNA, 15 bp, Homo sapiens
gaacgagaggccgcc

SEQ ID NO: 589973 - DNA, 15 bp, Homo sapiens
aacgagaggccgccg

SEQ ID NO: 589974 - DNA, 15 bp, Homo sapiens
acgagaggccgccgc

SEQ ID NO: 589975 - DNA, 15 bp, Homo sapiens
cgagaggccgccgct

SEQ ID NO: 589976 - DNA, 15 bp, Homo sapiens
gagaggccgccgctg

SEQ ID NO: 589977 - DNA, 15 bp, Homo sapiens
gaggccgccgctgga

SEQ ID NO: 589978 - DNA, 15 bp, Homo sapiens
aggccgccgctggag

SEQ ID NO: 589979 - DNA, 15 bp, Homo sapiens
ggccgccgctggagg

SEQ ID NO: 589980 - DNA, 15 bp, Homo sapiens
gccgccgctggaggg

SEQ ID NO: 589981 - DNA, 15 bp, Homo sapiens
ccgccgctggagggg

SEQ ID NO: 589982 - DNA, 15 bp, Homo sapiens
cgccgctggaggggg

SEQ ID NO: 589983 - DNA, 15 bp, Homo sapiens
gccgctggaggggga

SEQ ID NO: 589984 - DNA, 15 bp, Homo sapiens
ccgctggagggggat

SEQ ID NO: 589985 - DNA, 15 bp, Homo sapiens
cgctggagggggatg

SEQ ID NO: 589986 - DNA, 15 bp, Homo sapiens
gctggagggggatgg

SEQ ID NO: 589987 - DNA, 15 bp, Homo sapiens
ctggagggggatgga

SEQ ID NO: 589988 - DNA, 15 bp, Homo sapiens
tggagggggatggac

SEQ ID NO: 589989 - DNA, 15 bp, Homo sapiens
ggagggggatggact

SEQ ID NO: 589990 - DNA, 15 bp, Homo sapiens
gagggggatggactg

SEQ ID NO: 589991 - DNA, 15 bp, Homo sapiens
agggggatggactgt

SEQ ID NO: 589992 - DNA, 15 bp, Homo sapiens
gggggatggactgtc

SEQ ID NO: 589993 - DNA, 15 bp, Homo sapiens
ggggatggactgtcg

SEQ ID NO: 589994 - DNA, 15 bp, Homo sapiens
gggatggactgtcgg

SEQ ID NO: 589995 - DNA, 15 bp, Homo sapiens
ggatggactgtcgga

SEQ ID NO: 589996 - DNA, 15 bp, Homo sapiens
gatggactgtcggag

SEQ ID NO: 589997 - DNA, 15 bp, Homo sapiens
atggactgtcggagc

SEQ ID NO: 589998 - DNA, 15 bp, Homo sapiens
tggactgtcggagcg

SEQ ID NO: 589999 - DNA, 15 bp, Homo sapiens
ggactgtcggagcga

SEQ ID NO: 590000 - DNA, 15 bp, Homo sapiens
gactgtcggagcgac

SEQ ID NO: 590001 - DNA, 15 bp, Homo sapiens
actgtcggagcgaca

SEQ ID NO: 590002 - DNA, 15 bp, Homo sapiens
ctgtcggagcgacac

SEQ ID NO: 590003 - DNA, 15 bp, Homo sapiens
tgtcggagcgacact

SEQ ID NO: 590004 - DNA, 15 bp, Homo sapiens
gtcggagcgacactc

SEQ ID NO: 590005 - DNA, 15 bp, Homo sapiens
tcggagcgacactca

SEQ ID NO: 590006 - DNA, 15 bp, Homo sapiens
cggagcgacactcag

SEQ ID NO: 590007 - DNA, 15 bp, Homo sapiens
ggagcgacactcagc

SEQ ID NO: 590008 - DNA, 15 bp, Homo sapiens
gagcgacactcagcg

SEQ ID NO: 590009 - DNA, 15 bp, Homo sapiens
agcgacactcagcga

SEQ ID NO: 590010 - DNA, 15 bp, Homo sapiens
gcgacactcagcgac

SEQ ID NO: 590011 - DNA, 15 bp, Homo sapiens
cgacactcagcgacc

SEQ ID NO: 590012 - DNA, 15 bp, Homo sapiens
gacactcagcgaccg

SEQ ID NO: 590013 - DNA, 15 bp, Homo sapiens
acactcagcgaccgc

SEQ ID NO: 590014 - DNA, 15 bp, Homo sapiens
cactcagcgaccgcc

SEQ ID NO: 590015 - DNA, 15 bp, Homo sapiens
actcagcgaccgccc

SEQ ID NO: 590016 - DNA, 15 bp, Homo sapiens
ctcagcgaccgccct

SEQ ID NO: 590017 - DNA, 15 bp, Homo sapiens
tcagcgaccgcccta

SEQ ID NO: 590018 - DNA, 15 bp, Homo sapiens
cagcgaccgccctac

SEQ ID NO: 590019 - DNA, 15 bp, Homo sapiens
agcgaccgccctacc

SEQ ID NO: 590020 - DNA, 15 bp, Homo sapiens
gcgaccgccctacct

SEQ ID NO: 590021 - DNA, 15 bp, Homo sapiens
cgaccgccctacctc

SEQ ID NO: 590022 - DNA, 15 bp, Homo sapiens
gaccgccctacctcc

SEQ ID NO: 590023 - DNA, 15 bp, Homo sapiens
accgccctacctcct

SEQ ID NO: 590024 - DNA, 15 bp, Homo sapiens
ccgccctacctcctc

SEQ ID NO: 590025 - DNA, 15 bp, Homo sapiens
cgccctacctcctcc

SEQ ID NO: 590026 - DNA, 15 bp, Homo sapiens
gccctacctcctccc

SEQ ID NO: 590027 - DNA, 15 bp, Homo sapiens
ccctacctcctcccg

SEQ ID NO: 590028 - DNA, 15 bp, Homo sapiens
cctacctcctcccgc

SEQ ID NO: 590029 - DNA, 15 bp, Homo sapiens
ctacctcctcccgcc

SEQ ID NO: 590030 - DNA, 15 bp, Homo sapiens
tacctcctcccgccc

SEQ ID NO: 590031 - DNA, 15 bp, Homo sapiens
acctcctcccgcccc

SEQ ID NO: 590032 - DNA, 15 bp, Homo sapiens
cctcctcccgccccg

SEQ ID NO: 590033 - DNA, 15 bp, Homo sapiens
ctcctcccgccccgc

SEQ ID NO: 590034 - DNA, 15 bp, Homo sapiens
tcctcccgccccgca

SEQ ID NO: 590035 - DNA, 15 bp, Homo sapiens
cctcccgccccgcag

SEQ ID NO: 590036 - DNA, 15 bp, Homo sapiens
ctcccgccccgcagc

SEQ ID NO: 590037 - DNA, 15 bp, Homo sapiens
tcccgccccgcagcg

SEQ ID NO: 590038 - DNA, 15 bp, Homo sapiens
cccgccccgcagcga

SEQ ID NO: 590039 - DNA, 15 bp, Homo sapiens
ccgccccgcagcgac

SEQ ID NO: 590040 - DNA, 15 bp, Homo sapiens
cgccccgcagcgaca

SEQ ID NO: 590041 - DNA, 15 bp, Homo sapiens
gccccgcagcgacac

SEQ ID NO: 590042 - DNA, 15 bp, Homo sapiens
ccccgcagcgacacg

SEQ ID NO: 590043 - DNA, 15 bp, Homo sapiens
cccgcagcgacacgg

SEQ ID NO: 590044 - DNA, 15 bp, Homo sapiens
ccgcagcgacacggg

SEQ ID NO: 590045 - DNA, 15 bp, Homo sapiens
cgcagcgacacgggc

SEQ ID NO: 590046 - DNA, 15 bp, Homo sapiens
gcagcgacacgggcg

SEQ ID NO: 590047 - DNA, 15 bp, Homo sapiens
cagcgacacgggcga

SEQ ID NO: 590048 - DNA, 15 bp, Homo sapiens
agcgacacgggcgac

SEQ ID NO: 590049 - DNA, 15 bp, Homo sapiens
gcgacacgggcgacc

SEQ ID NO: 590050 - DNA, 15 bp, Homo sapiens
cgacacgggcgaccg

SEQ ID NO: 590051 - DNA, 15 bp, Homo sapiens
gacacgggcgaccgc

SEQ ID NO: 590052 - DNA, 15 bp, Homo sapiens
acacgggcgaccgca

SEQ ID NO: 590053 - DNA, 15 bp, Homo sapiens
cacgggcgaccgcaa

SEQ ID NO: 590054 - DNA, 15 bp, Homo sapiens
acgggcgaccgcaag

SEQ ID NO: 590055 - DNA, 15 bp, Homo sapiens
cgggcgaccgcaagc

SEQ ID NO: 590056 - DNA, 15 bp, Homo sapiens
gggcgaccgcaagca

SEQ ID NO: 590057 - DNA, 15 bp, Homo sapiens
ggcgaccgcaagcag

SEQ ID NO: 590058 - DNA, 15 bp, Homo sapiens
gcgaccgcaagcaga

SEQ ID NO: 590059 - DNA, 15 bp, Homo sapiens
cgaccgcaagcagat

SEQ ID NO: 590060 - DNA, 15 bp, Homo sapiens
gaccgcaagcagatc

SEQ ID NO: 590061 - DNA, 15 bp, Homo sapiens
accgcaagcagatct

SEQ ID NO: 590062 - DNA, 15 bp, Homo sapiens
ccgcaagcagatcta

SEQ ID NO: 590063 - DNA, 15 bp, Homo sapiens
cgcaagcagatctac

SEQ ID NO: 590064 - DNA, 15 bp, Homo sapiens
gcaagcagatctaca

SEQ ID NO: 590065 - DNA, 15 bp, Homo sapiens
caagcagatctacaa

SEQ ID NO: 590066 - DNA, 15 bp, Homo sapiens
aagcagatctacaac

SEQ ID NO: 590067 - DNA, 15 bp, Homo sapiens
agcagatctacaaca

SEQ ID NO: 590068 - DNA, 15 bp, Homo sapiens
gcagatctacaacat

SEQ ID NO: 590069 - DNA, 15 bp, Homo sapiens
cagatctacaacatc

SEQ ID NO: 590070 - DNA, 15 bp, Homo sapiens
agatctacaacatcc

SEQ ID NO: 590071 - DNA, 15 bp, Homo sapiens
gatctacaacatcct

SEQ ID NO: 590072 - DNA, 15 bp, Homo sapiens
atctacaacatcctg

SEQ ID NO: 590073 - DNA, 15 bp, Homo sapiens
tctacaacatcctga

SEQ ID NO: 590074 - DNA, 15 bp, Homo sapiens
ctacaacatcctgag

SEQ ID NO: 590075 - DNA, 15 bp, Homo sapiens
tacaacatcctgagc

SEQ ID NO: 590076 - DNA, 15 bp, Homo sapiens
acaacatcctgagca

SEQ ID NO: 590077 - DNA, 15 bp, Homo sapiens
caacatcctgagcac

SEQ ID NO: 590078 - DNA, 15 bp, Homo sapiens
aacatcctgagcacg

SEQ ID NO: 590079 - DNA, 15 bp, Homo sapiens
acatcctgagcacgc

SEQ ID NO: 590080 - DNA, 15 bp, Homo sapiens
catcctgagcacgct

SEQ ID NO: 590081 - DNA, 15 bp, Homo sapiens
atcctgagcacgctg

SEQ ID NO: 590082 - DNA, 15 bp, Homo sapiens
tcctgagcacgctgg

SEQ ID NO: 590083 - DNA, 15 bp, Homo sapiens
cctgagcacgctggg

SEQ ID NO: 590084 - DNA, 15 bp, Homo sapiens
ctgagcacgctgggg

SEQ ID NO: 590085 - DNA, 15 bp, Homo sapiens
tgagcacgctggggc

SEQ ID NO: 590086 - DNA, 15 bp, Homo sapiens
gagcacgctggggct

SEQ ID NO: 590087 - DNA, 15 bp, Homo sapiens
agcacgctggggctg

SEQ ID NO: 590088 - DNA, 15 bp, Homo sapiens
gcacgctggggctgc

SEQ ID NO: 590089 - DNA, 15 bp, Homo sapiens
cacgctggggctgcg

SEQ ID NO: 590090 - DNA, 15 bp, Homo sapiens
acgctggggctgcga

SEQ ID NO: 590091 - DNA, 15 bp, Homo sapiens
cgctggggctgcgac

SEQ ID NO: 590092 - DNA, 15 bp, Homo sapiens
gctggggctgcgacc

SEQ ID NO: 590093 - DNA, 15 bp, Homo sapiens
ctggggctgcgaccc

SEQ ID NO: 590094 - DNA, 15 bp, Homo sapiens
tggggctgcgaccct

SEQ ID NO: 590095 - DNA, 15 bp, Homo sapiens
ggggctgcgaccctc

SEQ ID NO: 590096 - DNA, 15 bp, Homo sapiens
gggctgcgaccctcg

SEQ ID NO: 590097 - DNA, 15 bp, Homo sapiens
ggctgcgaccctcga

SEQ ID NO: 590098 - DNA, 15 bp, Homo sapiens
gctgcgaccctcgac

SEQ ID NO: 590099 - DNA, 15 bp, Homo sapiens
ctgcgaccctcgacc

SEQ ID NO: 590100 - DNA, 15 bp, Homo sapiens
tgcgaccctcgacca

SEQ ID NO: 590101 - DNA, 15 bp, Homo sapiens
gcgaccctcgaccac

SEQ ID NO: 590102 - DNA, 15 bp, Homo sapiens
cgaccctcgaccacc

SEQ ID NO: 590103 - DNA, 15 bp, Homo sapiens
gaccctcgaccaccg

SEQ ID NO: 590104 - DNA, 15 bp, Homo sapiens
accctcgaccaccga

SEQ ID NO: 590105 - DNA, 15 bp, Homo sapiens
ccctcgaccaccgac

SEQ ID NO: 590106 - DNA, 15 bp, Homo sapiens
cctcgaccaccgact

SEQ ID NO: 590107 - DNA, 15 bp, Homo sapiens
ctcgaccaccgactg

SEQ ID NO: 590108 - DNA, 15 bp, Homo sapiens
tcgaccaccgactgc

SEQ ID NO: 590109 - DNA, 15 bp, Homo sapiens
cgaccaccgactgcg

SEQ ID NO: 590110 - DNA, 15 bp, Homo sapiens
gaccaccgactgcga

SEQ ID NO: 590111 - DNA, 15 bp, Homo sapiens
accaccgactgcgac

SEQ ID NO: 590112 - DNA, 15 bp, Homo sapiens
ccaccgactgcgaca

SEQ ID NO: 590113 - DNA, 15 bp, Homo sapiens
caccgactgcgacat

SEQ ID NO: 590114 - DNA, 15 bp, Homo sapiens
accgactgcgacatc

SEQ ID NO: 590115 - DNA, 15 bp, Homo sapiens
ccgactgcgacatcg

SEQ ID NO: 590116 - DNA, 15 bp, Homo sapiens
cgactgcgacatcgt

SEQ ID NO: 590117 - DNA, 15 bp, Homo sapiens
gactgcgacatcgtg

SEQ ID NO: 590118 - DNA, 15 bp, Homo sapiens
actgcgacatcgtgc

SEQ ID NO: 590119 - DNA, 15 bp, Homo sapiens
ctgcgacatcgtgcg

SEQ ID NO: 590120 - DNA, 15 bp, Homo sapiens
tgcgacatcgtgcgc

SEQ ID NO: 590121 - DNA, 15 bp, Homo sapiens
gcgacatcgtgcgcc

SEQ ID NO: 590122 - DNA, 15 bp, Homo sapiens
cgacatcgtgcgccg

SEQ ID NO: 590123 - DNA, 15 bp, Homo sapiens
gacatcgtgcgccgc

SEQ ID NO: 590124 - DNA, 15 bp, Homo sapiens
acatcgtgcgccgcg

SEQ ID NO: 590125 - DNA, 15 bp, Homo sapiens
catcgtgcgccgcgc

SEQ ID NO: 590126 - DNA, 15 bp, Homo sapiens
atcgtgcgccgcgcc

SEQ ID NO: 590127 - DNA, 15 bp, Homo sapiens
tcgtgcgccgcgcct

SEQ ID NO: 590128 - DNA, 15 bp, Homo sapiens
cgtgcgccgcgcctg

SEQ ID NO: 590129 - DNA, 15 bp, Homo sapiens
gtgcgccgcgcctgc

SEQ ID NO: 590130 - DNA, 15 bp, Homo sapiens
tgcgccgcgcctgcg

SEQ ID NO: 590131 - DNA, 15 bp, Homo sapiens
gcgccgcgcctgcga

SEQ ID NO: 590132 - DNA, 15 bp, Homo sapiens
cgccgcgcctgcgag

SEQ ID NO: 590133 - DNA, 15 bp, Homo sapiens
gccgcgcctgcgaga

SEQ ID NO: 590134 - DNA, 15 bp, Homo sapiens
ccgcgcctgcgagag

SEQ ID NO: 590135 - DNA, 15 bp, Homo sapiens
cgcgcctgcgagagc

SEQ ID NO: 590136 - DNA, 15 bp, Homo sapiens
gcgcctgcgagagcg

SEQ ID NO: 590137 - DNA, 15 bp, Homo sapiens
cgcctgcgagagcgt

SEQ ID NO: 590138 - DNA, 15 bp, Homo sapiens
gcctgcgagagcgtg

SEQ ID NO: 590139 - DNA, 15 bp, Homo sapiens
cctgcgagagcgtgt

SEQ ID NO: 590140 - DNA, 15 bp, Homo sapiens
ctgcgagagcgtgtc

SEQ ID NO: 590141 - DNA, 15 bp, Homo sapiens
tgcgagagcgtgtct

SEQ ID NO: 590142 - DNA, 15 bp, Homo sapiens
gcgagagcgtgtcta

SEQ ID NO: 590143 - DNA, 15 bp, Homo sapiens
cgagagcgtgtctac

SEQ ID NO: 590144 - DNA, 15 bp, Homo sapiens
gagagcgtgtctacg

SEQ ID NO: 590145 - DNA, 15 bp, Homo sapiens
agagcgtgtctacgc

SEQ ID NO: 590146 - DNA, 15 bp, Homo sapiens
gagcgtgtctacgcg

SEQ ID NO: 590147 - DNA, 15 bp, Homo sapiens
agcgtgtctacgcgc

SEQ ID NO: 590148 - DNA, 15 bp, Homo sapiens
gcgtgtctacgcgcg

SEQ ID NO: 590149 - DNA, 15 bp, Homo sapiens
cgtgtctacgcgcgc

SEQ ID NO: 590150 - DNA, 15 bp, Homo sapiens
gtgtctacgcgcgct

SEQ ID NO: 590151 - DNA, 15 bp, Homo sapiens
tgtctacgcgcgctg

SEQ ID NO: 590152 - DNA, 15 bp, Homo sapiens
gtctacgcgcgctgc

SEQ ID NO: 590153 - DNA, 15 bp, Homo sapiens
tctacgcgcgctgcg

SEQ ID NO: 590154 - DNA, 15 bp, Homo sapiens
ctacgcgcgctgcgc

SEQ ID NO: 590155 - DNA, 15 bp, Homo sapiens
tacgcgcgctgcgca

SEQ ID NO: 590156 - DNA, 15 bp, Homo sapiens
acgcgcgctgcgcac

SEQ ID NO: 590157 - DNA, 15 bp, Homo sapiens
cgcgcgctgcgcaca

SEQ ID NO: 590158 - DNA, 15 bp, Homo sapiens
gcgcgctgcgcacat

SEQ ID NO: 590159 - DNA, 15 bp, Homo sapiens
cgcgctgcgcacatg

SEQ ID NO: 590160 - DNA, 15 bp, Homo sapiens
gcgctgcgcacatgt

SEQ ID NO: 590161 - DNA, 15 bp, Homo sapiens
cgctgcgcacatgtg

SEQ ID NO: 590162 - DNA, 15 bp, Homo sapiens
gctgcgcacatgtgc

SEQ ID NO: 590163 - DNA, 15 bp, Homo sapiens
ctgcgcacatgtgct

SEQ ID NO: 590164 - DNA, 15 bp, Homo sapiens
tgcgcacatgtgctc

SEQ ID NO: 590165 - DNA, 15 bp, Homo sapiens
gcgcacatgtgctcg

SEQ ID NO: 590166 - DNA, 15 bp, Homo sapiens
cgcacatgtgctcgg

SEQ ID NO: 590167 - DNA, 15 bp, Homo sapiens
gcacatgtgctcggc

SEQ ID NO: 590168 - DNA, 15 bp, Homo sapiens
cacatgtgctcggcg

SEQ ID NO: 590169 - DNA, 15 bp, Homo sapiens
acatgtgctcggcgg

SEQ ID NO: 590170 - DNA, 15 bp, Homo sapiens
catgtgctcggcggg

SEQ ID NO: 590171 - DNA, 15 bp, Homo sapiens
atgtgctcggcgggg

SEQ ID NO: 590172 - DNA, 15 bp, Homo sapiens
tgtgctcggcggggc

SEQ ID NO: 590173 - DNA, 15 bp, Homo sapiens
gtgctcggcggggct

SEQ ID NO: 590174 - DNA, 15 bp, Homo sapiens
tgctcggcggggctg

SEQ ID NO: 590175 - DNA, 15 bp, Homo sapiens
gctcggcggggctgg

SEQ ID NO: 590176 - DNA, 15 bp, Homo sapiens
ctcggcggggctggc

SEQ ID NO: 590177 - DNA, 15 bp, Homo sapiens
tcggcggggctggcg

SEQ ID NO: 590178 - DNA, 15 bp, Homo sapiens
cggcggggctggcgg

SEQ ID NO: 590179 - DNA, 15 bp, Homo sapiens
ggcggggctggcggg

SEQ ID NO: 590180 - DNA, 15 bp, Homo sapiens
gcggggctggcgggc

SEQ ID NO: 590181 - DNA, 15 bp, Homo sapiens
cggggctggcgggcg

SEQ ID NO: 590182 - DNA, 15 bp, Homo sapiens
ggggctggcgggcgt

SEQ ID NO: 590183 - DNA, 15 bp, Homo sapiens
gggctggcgggcgtc

SEQ ID NO: 590184 - DNA, 15 bp, Homo sapiens
ggctggcgggcgtca

SEQ ID NO: 590185 - DNA, 15 bp, Homo sapiens
gctggcgggcgtcat

SEQ ID NO: 590186 - DNA, 15 bp, Homo sapiens
ctggcgggcgtcatc

SEQ ID NO: 590187 - DNA, 15 bp, Homo sapiens
tggcgggcgtcatca

SEQ ID NO: 590188 - DNA, 15 bp, Homo sapiens
ggcgggcgtcatcaa

SEQ ID NO: 590189 - DNA, 15 bp, Homo sapiens
gcgggcgtcatcaac

SEQ ID NO: 590190 - DNA, 15 bp, Homo sapiens
cgggcgtcatcaacc

SEQ ID NO: 590191 - DNA, 15 bp, Homo sapiens
gggcgtcatcaaccg

SEQ ID NO: 590192 - DNA, 15 bp, Homo sapiens
ggcgtcatcaaccgc

SEQ ID NO: 590193 - DNA, 15 bp, Homo sapiens
gcgtcatcaaccgca

SEQ ID NO: 590194 - DNA, 15 bp, Homo sapiens
cgtcatcaaccgcat

SEQ ID NO: 590195 - DNA, 15 bp, Homo sapiens
gtcatcaaccgcatg

SEQ ID NO: 590196 - DNA, 15 bp, Homo sapiens
tcatcaaccgcatgc

SEQ ID NO: 590197 - DNA, 15 bp, Homo sapiens
catcaaccgcatgcg

SEQ ID NO: 590198 - DNA, 15 bp, Homo sapiens
atcaaccgcatgcgc

SEQ ID NO: 590199 - DNA, 15 bp, Homo sapiens
tcaaccgcatgcgcg

SEQ ID NO: 590200 - DNA, 15 bp, Homo sapiens
caaccgcatgcgcga

SEQ ID NO: 590201 - DNA, 15 bp, Homo sapiens
aaccgcatgcgcgag

SEQ ID NO: 590202 - DNA, 15 bp, Homo sapiens
accgcatgcgcgaga

SEQ ID NO: 590203 - DNA, 15 bp, Homo sapiens
ccgcatgcgcgagag

SEQ ID NO: 590204 - DNA, 15 bp, Homo sapiens
cgcatgcgcgagagc

SEQ ID NO: 590205 - DNA, 15 bp, Homo sapiens
gcatgcgcgagagcc

SEQ ID NO: 590206 - DNA, 15 bp, Homo sapiens
catgcgcgagagccg

SEQ ID NO: 590207 - DNA, 15 bp, Homo sapiens
atgcgcgagagccgc

SEQ ID NO: 590208 - DNA, 15 bp, Homo sapiens
tgcgcgagagccgca

SEQ ID NO: 590209 - DNA, 15 bp, Homo sapiens
gcgcgagagccgcag

SEQ ID NO: 590210 - DNA, 15 bp, Homo sapiens
cgcgagagccgcagc

SEQ ID NO: 590211 - DNA, 15 bp, Homo sapiens
gcgagagccgcagcg

SEQ ID NO: 590212 - DNA, 15 bp, Homo sapiens
cgagagccgcagcga

SEQ ID NO: 590213 - DNA, 15 bp, Homo sapiens
gagagccgcagcgag

SEQ ID NO: 590214 - DNA, 15 bp, Homo sapiens
agagccgcagcgagg

SEQ ID NO: 590215 - DNA, 15 bp, Homo sapiens
gagccgcagcgagga

SEQ ID NO: 590216 - DNA, 15 bp, Homo sapiens
agccgcagcgaggac

SEQ ID NO: 590217 - DNA, 15 bp, Homo sapiens
gccgcagcgaggacg

SEQ ID NO: 590218 - DNA, 15 bp, Homo sapiens
ccgcagcgaggacgt

SEQ ID NO: 590219 - DNA, 15 bp, Homo sapiens
cgcagcgaggacgta

SEQ ID NO: 590220 - DNA, 15 bp, Homo sapiens
gcagcgaggacgtaa

SEQ ID NO: 590221 - DNA, 15 bp, Homo sapiens
cagcgaggacgtaat

SEQ ID NO: 590222 - DNA, 15 bp, Homo sapiens
agcgaggacgtaatg

SEQ ID NO: 590223 - DNA, 15 bp, Homo sapiens
gcgaggacgtaatgc

SEQ ID NO: 590224 - DNA, 15 bp, Homo sapiens
cgaggacgtaatgcg

SEQ ID NO: 590225 - DNA, 15 bp, Homo sapiens
gaggacgtaatgcgc

SEQ ID NO: 590226 - DNA, 15 bp, Homo sapiens
aggacgtaatgcgca

SEQ ID NO: 590227 - DNA, 15 bp, Homo sapiens
ggacgtaatgcgcat

SEQ ID NO: 590228 - DNA, 15 bp, Homo sapiens
gacgtaatgcgcatc

SEQ ID NO: 590229 - DNA, 15 bp, Homo sapiens
acgtaatgcgcatca

SEQ ID NO: 590230 - DNA, 15 bp, Homo sapiens
cgtaatgcgcatcac

SEQ ID NO: 590231 - DNA, 15 bp, Homo sapiens
gtaatgcgcatcact

SEQ ID NO: 590232 - DNA, 15 bp, Homo sapiens
taatgcgcatcactg

SEQ ID NO: 590233 - DNA, 15 bp, Homo sapiens
aatgcgcatcactgt

SEQ ID NO: 590234 - DNA, 15 bp, Homo sapiens
atgcgcatcactgtg

SEQ ID NO: 590235 - DNA, 15 bp, Homo sapiens
tgcgcatcactgtgg

SEQ ID NO: 590236 - DNA, 15 bp, Homo sapiens
gcgcatcactgtggg

SEQ ID NO: 590237 - DNA, 15 bp, Homo sapiens
cgcatcactgtgggc

SEQ ID NO: 590238 - DNA, 15 bp, Homo sapiens
gcatcactgtgggcg

SEQ ID NO: 590239 - DNA, 15 bp, Homo sapiens
catcactgtgggcgt

SEQ ID NO: 590240 - DNA, 15 bp, Homo sapiens
atcactgtgggcgtg

SEQ ID NO: 590241 - DNA, 15 bp, Homo sapiens
tcactgtgggcgtgg

SEQ ID NO: 590242 - DNA, 15 bp, Homo sapiens
cactgtgggcgtgga

SEQ ID NO: 590243 - DNA, 15 bp, Homo sapiens
actgtgggcgtggat

SEQ ID NO: 590244 - DNA, 15 bp, Homo sapiens
ctgtgggcgtggatg

SEQ ID NO: 590245 - DNA, 15 bp, Homo sapiens
tgtgggcgtggatgg

SEQ ID NO: 590246 - DNA, 15 bp, Homo sapiens
gtgggcgtggatggc

SEQ ID NO: 590247 - DNA, 15 bp, Homo sapiens
tgggcgtggatggct

SEQ ID NO: 590248 - DNA, 15 bp, Homo sapiens
gggcgtggatggctc

SEQ ID NO: 590249 - DNA, 15 bp, Homo sapiens
ggcgtggatggctcc

SEQ ID NO: 590250 - DNA, 15 bp, Homo sapiens
gcgtggatggctccg

SEQ ID NO: 590251 - DNA, 15 bp, Homo sapiens
cgtggatggctccgt

SEQ ID NO: 590252 - DNA, 15 bp, Homo sapiens
gtggatggctccgtg

SEQ ID NO: 590253 - DNA, 15 bp, Homo sapiens
tggatggctccgtgt

SEQ ID NO: 590254 - DNA, 15 bp, Homo sapiens
ggatggctccgtgta

SEQ ID NO: 590255 - DNA, 15 bp, Homo sapiens
gatggctccgtgtac

SEQ ID NO: 590256 - DNA, 15 bp, Homo sapiens
atggctccgtgtaca

SEQ ID NO: 590257 - DNA, 15 bp, Homo sapiens
tggctccgtgtacaa

SEQ ID NO: 590258 - DNA, 15 bp, Homo sapiens
ggctccgtgtacaag

SEQ ID NO: 590259 - DNA, 15 bp, Homo sapiens
gctccgtgtacaagc

SEQ ID NO: 590260 - DNA, 15 bp, Homo sapiens
ctccgtgtacaagct

SEQ ID NO: 590261 - DNA, 15 bp, Homo sapiens
tccgtgtacaagctg

SEQ ID NO: 590262 - DNA, 15 bp, Homo sapiens
ccgtgtacaagctgc

SEQ ID NO: 590263 - DNA, 15 bp, Homo sapiens
cgtgtacaagctgca

SEQ ID NO: 590264 - DNA, 15 bp, Homo sapiens
gtgtacaagctgcac

SEQ ID NO: 590265 - DNA, 15 bp, Homo sapiens
tgtacaagctgcacc

SEQ ID NO: 590266 - DNA, 15 bp, Homo sapiens
gtacaagctgcaccc

SEQ ID NO: 590267 - DNA, 15 bp, Homo sapiens
tacaagctgcacccc

SEQ ID NO: 590268 - DNA, 15 bp, Homo sapiens
acaagctgcacccca

SEQ ID NO: 590269 - DNA, 15 bp, Homo sapiens
caagctgcaccccag

SEQ ID NO: 590270 - DNA, 15 bp, Homo sapiens
aagctgcaccccagg

SEQ ID NO: 590271 - DNA, 15 bp, Homo sapiens
agctgcaccccaggt

SEQ ID NO: 590272 - DNA, 15 bp, Homo sapiens
gctgcaccccaggtg

SEQ ID NO: 590273 - DNA, 15 bp, Homo sapiens
ctgcaccccaggtga

SEQ ID NO: 590274 - DNA, 15 bp, Homo sapiens
tgcaccccaggtgag

SEQ ID NO: 590275 - DNA, 15 bp, Homo sapiens
gcaccccaggtgagc

SEQ ID NO: 590276 - DNA, 15 bp, Homo sapiens
caccccaggtgagcc

SEQ ID NO: 590277 - DNA, 15 bp, Homo sapiens
accccaggtgagccc

SEQ ID NO: 590278 - DNA, 15 bp, Homo sapiens
ccccaggtgagcccg

SEQ ID NO: 590279 - DNA, 15 bp, Homo sapiens
cccaggtgagcccgc

SEQ ID NO: 590280 - DNA, 15 bp, Homo sapiens
ccaggtgagcccgcc

SEQ ID NO: 590281 - DNA, 15 bp, Homo sapiens
caggtgagcccgccc

SEQ ID NO: 590282 - DNA, 15 bp, Homo sapiens
aggtgagcccgcccc

SEQ ID NO: 590283 - DNA, 15 bp, Homo sapiens
ggtgagcccgccccg

SEQ ID NO: 590284 - DNA, 15 bp, Homo sapiens
gtgagcccgccccgc

SEQ ID NO: 590285 - DNA, 15 bp, Homo sapiens
tgagcccgccccgct

SEQ ID NO: 590286 - DNA, 15 bp, Homo sapiens
gagcccgccccgctc

SEQ ID NO: 590287 - DNA, 15 bp, Homo sapiens
agcccgccccgctct

SEQ ID NO: 590288 - DNA, 15 bp, Homo sapiens
gcccgccccgctctc

SEQ ID NO: 590289 - DNA, 15 bp, Homo sapiens
cccgccccgctctct

SEQ ID NO: 590290 - DNA, 15 bp, Homo sapiens
ccgccccgctctctc

SEQ ID NO: 590291 - DNA, 15 bp, Homo sapiens
cgccccgctctctcc

SEQ ID NO: 590292 - DNA, 15 bp, Homo sapiens
gccccgctctctccc

SEQ ID NO: 590293 - DNA, 15 bp, Homo sapiens
ccccgctctctccct

SEQ ID NO: 590294 - DNA, 15 bp, Homo sapiens
cccgctctctccctg

SEQ ID NO: 590295 - DNA, 15 bp, Homo sapiens
ccgctctctccctgg

SEQ ID NO: 590296 - DNA, 15 bp, Homo sapiens
cgctctctccctggt

SEQ ID NO: 590297 - DNA, 15 bp, Homo sapiens
gctctctccctggta

SEQ ID NO: 590298 - DNA, 15 bp, Homo sapiens
ctctctccctggtaa

SEQ ID NO: 590299 - DNA, 15 bp, Homo sapiens
tctctccctggtaaa

SEQ ID NO: 590300 - DNA, 15 bp, Homo sapiens
ctctccctggtaaag

SEQ ID NO: 590301 - DNA, 15 bp, Homo sapiens
tctccctggtaaagt

SEQ ID NO: 590302 - DNA, 15 bp, Homo sapiens
ctccctggtaaagtg

SEQ ID NO: 590303 - DNA, 15 bp, Homo sapiens
tccctggtaaagtgg

SEQ ID NO: 590304 - DNA, 15 bp, Homo sapiens
ccctggtaaagtggg

SEQ ID NO: 590305 - DNA, 15 bp, Homo sapiens
cctggtaaagtgggg

SEQ ID NO: 590306 - DNA, 15 bp, Homo sapiens
ctggtaaagtggggc

SEQ ID NO: 590307 - DNA, 15 bp, Homo sapiens
tggtaaagtggggcc

SEQ ID NO: 590308 - DNA, 15 bp, Homo sapiens
ggtaaagtggggccc

SEQ ID NO: 590309 - DNA, 15 bp, Homo sapiens
gtaaagtggggccca

SEQ ID NO: 590310 - DNA, 15 bp, Homo sapiens
taaagtggggcccaa

SEQ ID NO: 590311 - DNA, 15 bp, Homo sapiens
aaagtggggcccaaa

SEQ ID NO: 590312 - DNA, 15 bp, Homo sapiens
aagtggggcccaaaa

SEQ ID NO: 590313 - DNA, 15 bp, Homo sapiens
agtggggcccaaaaa

SEQ ID NO: 590314 - DNA, 15 bp, Homo sapiens
gtggggcccaaaaag

SEQ ID NO: 590315 - DNA, 15 bp, Homo sapiens
tggggcccaaaaagc

SEQ ID NO: 590316 - DNA, 15 bp, Homo sapiens
ggggcccaaaaagcg

SEQ ID NO: 590317 - DNA, 15 bp, Homo sapiens
gggcccaaaaagcgc

SEQ ID NO: 590318 - DNA, 15 bp, Homo sapiens
ggcccaaaaagcgcg

SEQ ID NO: 590319 - DNA, 15 bp, Homo sapiens
gcccaaaaagcgcgc

SEQ ID NO: 590320 - DNA, 15 bp, Homo sapiens
cccaaaaagcgcgcg

SEQ ID NO: 590321 - DNA, 15 bp, Homo sapiens
ccaaaaagcgcgcgc

SEQ ID NO: 590322 - DNA, 15 bp, Homo sapiens
caaaaagcgcgcgct

SEQ ID NO: 590323 - DNA, 15 bp, Homo sapiens
aaaaagcgcgcgctc

SEQ ID NO: 590324 - DNA, 15 bp, Homo sapiens
aaaagcgcgcgctcc

SEQ ID NO: 590325 - DNA, 15 bp, Homo sapiens
aaagcgcgcgctcca

SEQ ID NO: 590326 - DNA, 15 bp, Homo sapiens
aagcgcgcgctccaa

SEQ ID NO: 590327 - DNA, 15 bp, Homo sapiens
agcgcgcgctccaag

SEQ ID NO: 590328 - DNA, 15 bp, Homo sapiens
gcgcgcgctccaagg

SEQ ID NO: 590329 - DNA, 15 bp, Homo sapiens
cgcgcgctccaaggt

SEQ ID NO: 590330 - DNA, 15 bp, Homo sapiens
gcgcgctccaaggtt

SEQ ID NO: 590331 - DNA, 15 bp, Homo sapiens
cgcgctccaaggttc

SEQ ID NO: 590332 - DNA, 15 bp, Homo sapiens
gcgctccaaggttcc

SEQ ID NO: 590333 - DNA, 15 bp, Homo sapiens
cgctccaaggttcct

SEQ ID NO: 590334 - DNA, 15 bp, Homo sapiens
gctccaaggttcctt

SEQ ID NO: 590335 - DNA, 15 bp, Homo sapiens
ctccaaggttccttg

SEQ ID NO: 590336 - DNA, 15 bp, Homo sapiens
tccaaggttccttgc

SEQ ID NO: 590337 - DNA, 15 bp, Homo sapiens
ccaaggttccttgcg

SEQ ID NO: 590338 - DNA, 15 bp, Homo sapiens
caaggttccttgcgg

SEQ ID NO: 590339 - DNA, 15 bp, Homo sapiens
aaggttccttgcggt

SEQ ID NO: 590340 - DNA, 15 bp, Homo sapiens
aggttccttgcggtt

SEQ ID NO: 590341 - DNA, 15 bp, Homo sapiens
ggttccttgcggttc

SEQ ID NO: 590342 - DNA, 15 bp, Homo sapiens
gttccttgcggttcc

SEQ ID NO: 590343 - DNA, 15 bp, Homo sapiens
ttccttgcggttccc

SEQ ID NO: 590344 - DNA, 15 bp, Homo sapiens
tccttgcggttccca

SEQ ID NO: 590345 - DNA, 15 bp, Homo sapiens
ccttgcggttcccaa

SEQ ID NO: 590346 - DNA, 15 bp, Homo sapiens
cttgcggttcccaag

SEQ ID NO: 590347 - DNA, 15 bp, Homo sapiens
ttgcggttcccaagc

SEQ ID NO: 590348 - DNA, 15 bp, Homo sapiens
tgcggttcccaagct

SEQ ID NO: 590349 - DNA, 15 bp, Homo sapiens
gcggttcccaagctc

SEQ ID NO: 590350 - DNA, 15 bp, Homo sapiens
cggttcccaagctcc

SEQ ID NO: 590351 - DNA, 15 bp, Homo sapiens
ggttcccaagctcca

SEQ ID NO: 590352 - DNA, 15 bp, Homo sapiens
gttcccaagctccaa

SEQ ID NO: 590353 - DNA, 15 bp, Homo sapiens
ttcccaagctccaag

SEQ ID NO: 590354 - DNA, 15 bp, Homo sapiens
tcccaagctccaaga

SEQ ID NO: 590355 - DNA, 15 bp, Homo sapiens
cccaagctccaagat

SEQ ID NO: 590356 - DNA, 15 bp, Homo sapiens
ccaagctccaagatt

SEQ ID NO: 590357 - DNA, 15 bp, Homo sapiens
caagctccaagattt

SEQ ID NO: 590358 - DNA, 15 bp, Homo sapiens
aagctccaagatttc

SEQ ID NO: 590359 - DNA, 15 bp, Homo sapiens
agctccaagatttcg

SEQ ID NO: 590360 - DNA, 15 bp, Homo sapiens
gctccaagatttcgt

SEQ ID NO: 590361 - DNA, 15 bp, Homo sapiens
ctccaagatttcgta

SEQ ID NO: 590362 - DNA, 15 bp, Homo sapiens
tccaagatttcgtag

SEQ ID NO: 590363 - DNA, 15 bp, Homo sapiens
ccaagatttcgtagt

SEQ ID NO: 590364 - DNA, 15 bp, Homo sapiens
caagatttcgtagtc

SEQ ID NO: 590365 - DNA, 15 bp, Homo sapiens
aagatttcgtagtcc

SEQ ID NO: 590366 - DNA, 15 bp, Homo sapiens
agatttcgtagtcct

SEQ ID NO: 590367 - DNA, 15 bp, Homo sapiens
gatttcgtagtcctc

SEQ ID NO: 590368 - DNA, 15 bp, Homo sapiens
atttcgtagtcctct

SEQ ID NO: 590369 - DNA, 15 bp, Homo sapiens
tttcgtagtcctctt

SEQ ID NO: 590370 - DNA, 15 bp, Homo sapiens
ttcgtagtcctcttc

SEQ ID NO: 590371 - DNA, 15 bp, Homo sapiens
tcgtagtcctcttct

SEQ ID NO: 590372 - DNA, 15 bp, Homo sapiens
cgtagtcctcttctc

SEQ ID NO: 590373 - DNA, 15 bp, Homo sapiens
gtagtcctcttctcg

SEQ ID NO: 590374 - DNA, 15 bp, Homo sapiens
tagtcctcttctcgt

SEQ ID NO: 590375 - DNA, 15 bp, Homo sapiens
agtcctcttctcgtc

SEQ ID NO: 590376 - DNA, 15 bp, Homo sapiens
gtcctcttctcgtcc

SEQ ID NO: 590377 - DNA, 15 bp, Homo sapiens
tcctcttctcgtccc

SEQ ID NO: 590378 - DNA, 15 bp, Homo sapiens
cctcttctcgtcccc

SEQ ID NO: 590379 - DNA, 15 bp, Homo sapiens
ctcttctcgtccccc

SEQ ID NO: 590380 - DNA, 15 bp, Homo sapiens
tcttctcgtccccct

SEQ ID NO: 590381 - DNA, 15 bp, Homo sapiens
cttctcgtccccctt

SEQ ID NO: 590382 - DNA, 15 bp, Homo sapiens
ttctcgtcccccttg

SEQ ID NO: 590383 - DNA, 15 bp, Homo sapiens
tctcgtcccccttgg

SEQ ID NO: 590384 - DNA, 15 bp, Homo sapiens
ctcgtcccccttggc

SEQ ID NO: 590385 - DNA, 15 bp, Homo sapiens
tcgtcccccttggcc

SEQ ID NO: 590386 - DNA, 15 bp, Homo sapiens
cgtcccccttggcct

SEQ ID NO: 590387 - DNA, 15 bp, Homo sapiens
gtcccccttggccta

SEQ ID NO: 590388 - DNA, 15 bp, Homo sapiens
tcccccttggcctag

SEQ ID NO: 590389 - DNA, 15 bp, Homo sapiens
cccccttggcctaga

SEQ ID NO: 590390 - DNA, 15 bp, Homo sapiens
ccccttggcctagat

SEQ ID NO: 590391 - DNA, 15 bp, Homo sapiens
cccttggcctagatt

SEQ ID NO: 590392 - DNA, 15 bp, Homo sapiens
ccttggcctagattt

SEQ ID NO: 590393 - DNA, 15 bp, Homo sapiens
cttggcctagatttg

SEQ ID NO: 590394 - DNA, 15 bp, Homo sapiens
ttggcctagatttgg

SEQ ID NO: 590395 - DNA, 15 bp, Homo sapiens
tggcctagatttggg

SEQ ID NO: 590396 - DNA, 15 bp, Homo sapiens
ggcctagatttgggg

SEQ ID NO: 590397 - DNA, 15 bp, Homo sapiens
gcctagatttggggg

SEQ ID NO: 590398 - DNA, 15 bp, Homo sapiens
cctagatttggggga

SEQ ID NO: 590399 - DNA, 15 bp, Homo sapiens
ctagatttgggggaa

SEQ ID NO: 590400 - DNA, 15 bp, Homo sapiens
tagatttgggggaag

SEQ ID NO: 590401 - DNA, 15 bp, Homo sapiens
agatttgggggaagg

SEQ ID NO: 590402 - DNA, 15 bp, Homo sapiens
gatttgggggaaggg

SEQ ID NO: 590403 - DNA, 15 bp, Homo sapiens
atttgggggaagggt

SEQ ID NO: 590404 - DNA, 15 bp, Homo sapiens
tttgggggaagggtc

SEQ ID NO: 590405 - DNA, 15 bp, Homo sapiens
ttgggggaagggtcg

SEQ ID NO: 590406 - DNA, 15 bp, Homo sapiens
tgggggaagggtcga

SEQ ID NO: 590407 - DNA, 15 bp, Homo sapiens
gggggaagggtcgac

SEQ ID NO: 590408 - DNA, 15 bp, Homo sapiens
ggggaagggtcgact

SEQ ID NO: 590409 - DNA, 15 bp, Homo sapiens
gggaagggtcgactg

SEQ ID NO: 590410 - DNA, 15 bp, Homo sapiens
ggaagggtcgactgc

SEQ ID NO: 590411 - DNA, 15 bp, Homo sapiens
gaagggtcgactgcg

SEQ ID NO: 590412 - DNA, 15 bp, Homo sapiens
aagggtcgactgcgt

SEQ ID NO: 590413 - DNA, 15 bp, Homo sapiens
agggtcgactgcgtg

SEQ ID NO: 590414 - DNA, 15 bp, Homo sapiens
gggtcgactgcgtgc

SEQ ID NO: 590415 - DNA, 15 bp, Homo sapiens
ggtcgactgcgtgca

SEQ ID NO: 590416 - DNA, 15 bp, Homo sapiens
gtcgactgcgtgcag

SEQ ID NO: 590417 - DNA, 15 bp, Homo sapiens
tcgactgcgtgcagg

SEQ ID NO: 590418 - DNA, 15 bp, Homo sapiens
cgactgcgtgcaggg

SEQ ID NO: 590419 - DNA, 15 bp, Homo sapiens
gactgcgtgcagggc

SEQ ID NO: 590420 - DNA, 15 bp, Homo sapiens
actgcgtgcagggcg

SEQ ID NO: 590421 - DNA, 15 bp, Homo sapiens
ctgcgtgcagggcgc

SEQ ID NO: 590422 - DNA, 15 bp, Homo sapiens
tgcgtgcagggcgcc

SEQ ID NO: 590423 - DNA, 15 bp, Homo sapiens
gcgtgcagggcgccc

SEQ ID NO: 590424 - DNA, 15 bp, Homo sapiens
cgtgcagggcgcccg

SEQ ID NO: 590425 - DNA, 15 bp, Homo sapiens
gtgcagggcgcccgg

SEQ ID NO: 590426 - DNA, 15 bp, Homo sapiens
tgcagggcgcccggt

SEQ ID NO: 590427 - DNA, 15 bp, Homo sapiens
gcagggcgcccggta

SEQ ID NO: 590428 - DNA, 15 bp, Homo sapiens
cagggcgcccggtaa

SEQ ID NO: 590429 - DNA, 15 bp, Homo sapiens
agggcgcccggtaat

SEQ ID NO: 590430 - DNA, 15 bp, Homo sapiens
gggcgcccggtaatg

SEQ ID NO: 590431 - DNA, 15 bp, Homo sapiens
ggcgcccggtaatga

SEQ ID NO: 590432 - DNA, 15 bp, Homo sapiens
gcgcccggtaatgaa

SEQ ID NO: 590433 - DNA, 15 bp, Homo sapiens
cgcccggtaatgaat

SEQ ID NO: 590434 - DNA, 15 bp, Homo sapiens
gcccggtaatgaatg

SEQ ID NO: 590435 - DNA, 15 bp, Homo sapiens
cccggtaatgaatgt

SEQ ID NO: 590436 - DNA, 15 bp, Homo sapiens
ccggtaatgaatgtg

SEQ ID NO: 590437 - DNA, 15 bp, Homo sapiens
cggtaatgaatgtgg

SEQ ID NO: 590438 - DNA, 15 bp, Homo sapiens
ggtaatgaatgtgga

SEQ ID NO: 590439 - DNA, 15 bp, Homo sapiens
gtaatgaatgtggag

SEQ ID NO: 590440 - DNA, 15 bp, Homo sapiens
taatgaatgtggagg

SEQ ID NO: 590441 - DNA, 15 bp, Homo sapiens
aatgaatgtggagga

SEQ ID NO: 590442 - DNA, 15 bp, Homo sapiens
atgaatgtggaggat

SEQ ID NO: 590443 - DNA, 15 bp, Homo sapiens
tgaatgtggaggatg

SEQ ID NO: 590444 - DNA, 15 bp, Homo sapiens
gaatgtggaggatga

SEQ ID NO: 590445 - DNA, 15 bp, Homo sapiens
aatgtggaggatgag

SEQ ID NO: 590446 - DNA, 15 bp, Homo sapiens
atgtggaggatgagg

SEQ ID NO: 590447 - DNA, 15 bp, Homo sapiens
tgtggaggatgaggt

SEQ ID NO: 590448 - DNA, 15 bp, Homo sapiens
gtggaggatgaggtg

SEQ ID NO: 590449 - DNA, 15 bp, Homo sapiens
tggaggatgaggtgg

SEQ ID NO: 590450 - DNA, 15 bp, Homo sapiens
ggaggatgaggtggg

SEQ ID NO: 590451 - DNA, 15 bp, Homo sapiens
gaggatgaggtggga

SEQ ID NO: 590452 - DNA, 15 bp, Homo sapiens
aggatgaggtgggag

SEQ ID NO: 590453 - DNA, 15 bp, Homo sapiens
ggatgaggtgggagg

SEQ ID NO: 590454 - DNA, 15 bp, Homo sapiens
gatgaggtgggagga

SEQ ID NO: 590455 - DNA, 15 bp, Homo sapiens
atgaggtgggaggag

SEQ ID NO: 590456 - DNA, 15 bp, Homo sapiens
tgaggtgggaggagg

SEQ ID NO: 590457 - DNA, 15 bp, Homo sapiens
gaggtgggaggaggg

SEQ ID NO: 590458 - DNA, 15 bp, Homo sapiens
aggtgggaggaggga

SEQ ID NO: 590459 - DNA, 15 bp, Homo sapiens
ggtgggaggagggac

SEQ ID NO: 590460 - DNA, 15 bp, Homo sapiens
gtgggaggagggacg

SEQ ID NO: 590461 - DNA, 15 bp, Homo sapiens
tgggaggagggacgg

SEQ ID NO: 590462 - DNA, 15 bp, Homo sapiens
gggaggagggacggc

SEQ ID NO: 590463 - DNA, 15 bp, Homo sapiens
ggaggagggacggca

SEQ ID NO: 590464 - DNA, 15 bp, Homo sapiens
gaggagggacggcag

SEQ ID NO: 590465 - DNA, 15 bp, Homo sapiens
aggagggacggcagc

SEQ ID NO: 590466 - DNA, 15 bp, Homo sapiens
ggagggacggcagcc

SEQ ID NO: 590467 - DNA, 15 bp, Homo sapiens
gagggacggcagccc

SEQ ID NO: 590468 - DNA, 15 bp, Homo sapiens
agggacggcagccct

SEQ ID NO: 590469 - DNA, 15 bp, Homo sapiens
gggacggcagccctg

SEQ ID NO: 590470 - DNA, 15 bp, Homo sapiens
ggacggcagccctgc

SEQ ID NO: 590471 - DNA, 15 bp, Homo sapiens
gacggcagccctgct

SEQ ID NO: 590472 - DNA, 15 bp, Homo sapiens
acggcagccctgctt

SEQ ID NO: 590473 - DNA, 15 bp, Homo sapiens
cggcagccctgcttc

SEQ ID NO: 590474 - DNA, 15 bp, Homo sapiens
ggcagccctgcttct

SEQ ID NO: 590475 - DNA, 15 bp, Homo sapiens
gcagccctgcttctc

SEQ ID NO: 590476 - DNA, 15 bp, Homo sapiens
cagccctgcttctct

SEQ ID NO: 590477 - DNA, 15 bp, Homo sapiens
agccctgcttctctt

SEQ ID NO: 590478 - DNA, 15 bp, Homo sapiens
gccctgcttctcttc

SEQ ID NO: 590479 - DNA, 15 bp, Homo sapiens
ccctgcttctcttct

SEQ ID NO: 590480 - DNA, 15 bp, Homo sapiens
cctgcttctcttctg

SEQ ID NO: 590481 - DNA, 15 bp, Homo sapiens
ctgcttctcttctgc

SEQ ID NO: 590482 - DNA, 15 bp, Homo sapiens
tgcttctcttctgcc

SEQ ID NO: 590483 - DNA, 15 bp, Homo sapiens
gcttctcttctgccc

SEQ ID NO: 590484 - DNA, 15 bp, Homo sapiens
cttctcttctgccca

SEQ ID NO: 590485 - DNA, 15 bp, Homo sapiens
ttctcttctgcccag

SEQ ID NO: 590486 - DNA, 15 bp, Homo sapiens
tctcttctgcccagc

SEQ ID NO: 590487 - DNA, 15 bp, Homo sapiens
ctcttctgcccagct

SEQ ID NO: 590488 - DNA, 15 bp, Homo sapiens
tcttctgcccagctt

SEQ ID NO: 590489 - DNA, 15 bp, Homo sapiens
cttctgcccagcttc

SEQ ID NO: 590490 - DNA, 15 bp, Homo sapiens
ttctgcccagcttca

SEQ ID NO: 590491 - DNA, 15 bp, Homo sapiens
tctgcccagcttcaa

SEQ ID NO: 590492 - DNA, 15 bp, Homo sapiens
ctgcccagcttcaag

SEQ ID NO: 590493 - DNA, 15 bp, Homo sapiens
tgcccagcttcaagg

SEQ ID NO: 590494 - DNA, 15 bp, Homo sapiens
gcccagcttcaagga

SEQ ID NO: 590495 - DNA, 15 bp, Homo sapiens
cccagcttcaaggag

SEQ ID NO: 590496 - DNA, 15 bp, Homo sapiens
ccagcttcaaggagc

SEQ ID NO: 590497 - DNA, 15 bp, Homo sapiens
cagcttcaaggagcg

SEQ ID NO: 590498 - DNA, 15 bp, Homo sapiens
agcttcaaggagcgg

SEQ ID NO: 590499 - DNA, 15 bp, Homo sapiens
gcttcaaggagcggt

SEQ ID NO: 590500 - DNA, 15 bp, Homo sapiens
cttcaaggagcggtt

SEQ ID NO: 590501 - DNA, 15 bp, Homo sapiens
ttcaaggagcggttc

SEQ ID NO: 590502 - DNA, 15 bp, Homo sapiens
tcaaggagcggttcc

SEQ ID NO: 590503 - DNA, 15 bp, Homo sapiens
caaggagcggttcca

SEQ ID NO: 590504 - DNA, 15 bp, Homo sapiens
aaggagcggttccat

SEQ ID NO: 590505 - DNA, 15 bp, Homo sapiens
aggagcggttccatg

SEQ ID NO: 590506 - DNA, 15 bp, Homo sapiens
ggagcggttccatgc

SEQ ID NO: 590507 - DNA, 15 bp, Homo sapiens
gagcggttccatgcc

SEQ ID NO: 590508 - DNA, 15 bp, Homo sapiens
agcggttccatgcca

SEQ ID NO: 590509 - DNA, 15 bp, Homo sapiens
gcggttccatgccag

SEQ ID NO: 590510 - DNA, 15 bp, Homo sapiens
cggttccatgccagc

SEQ ID NO: 590511 - DNA, 15 bp, Homo sapiens
ggttccatgccagcg

SEQ ID NO: 590512 - DNA, 15 bp, Homo sapiens
gttccatgccagcgt

SEQ ID NO: 590513 - DNA, 15 bp, Homo sapiens
ttccatgccagcgtg

SEQ ID NO: 590514 - DNA, 15 bp, Homo sapiens
tccatgccagcgtgc

SEQ ID NO: 590515 - DNA, 15 bp, Homo sapiens
ccatgccagcgtgcg

SEQ ID NO: 590516 - DNA, 15 bp, Homo sapiens
catgccagcgtgcgc

SEQ ID NO: 590517 - DNA, 15 bp, Homo sapiens
atgccagcgtgcgca

SEQ ID NO: 590518 - DNA, 15 bp, Homo sapiens
tgccagcgtgcgcag

SEQ ID NO: 590519 - DNA, 15 bp, Homo sapiens
gccagcgtgcgcagg

SEQ ID NO: 590520 - DNA, 15 bp, Homo sapiens
ccagcgtgcgcaggc

SEQ ID NO: 590521 - DNA, 15 bp, Homo sapiens
cagcgtgcgcaggct

SEQ ID NO: 590522 - DNA, 15 bp, Homo sapiens
agcgtgcgcaggctg

SEQ ID NO: 590523 - DNA, 15 bp, Homo sapiens
gcgtgcgcaggctga

SEQ ID NO: 590524 - DNA, 15 bp, Homo sapiens
cgtgcgcaggctgac

SEQ ID NO: 590525 - DNA, 15 bp, Homo sapiens
gtgcgcaggctgacg

SEQ ID NO: 590526 - DNA, 15 bp, Homo sapiens
tgcgcaggctgacgc

SEQ ID NO: 590527 - DNA, 15 bp, Homo sapiens
gcgcaggctgacgcc

SEQ ID NO: 590528 - DNA, 15 bp, Homo sapiens
cgcaggctgacgccc

SEQ ID NO: 590529 - DNA, 15 bp, Homo sapiens
gcaggctgacgccca

SEQ ID NO: 590530 - DNA, 15 bp, Homo sapiens
caggctgacgcccag

SEQ ID NO: 590531 - DNA, 15 bp, Homo sapiens
aggctgacgcccagc

SEQ ID NO: 590532 - DNA, 15 bp, Homo sapiens
ggctgacgcccagct

SEQ ID NO: 590533 - DNA, 15 bp, Homo sapiens
gctgacgcccagctg

SEQ ID NO: 590534 - DNA, 15 bp, Homo sapiens
ctgacgcccagctgc

SEQ ID NO: 590535 - DNA, 15 bp, Homo sapiens
tgacgcccagctgcg

SEQ ID NO: 590536 - DNA, 15 bp, Homo sapiens
gacgcccagctgcga

SEQ ID NO: 590537 - DNA, 15 bp, Homo sapiens
acgcccagctgcgag

SEQ ID NO: 590538 - DNA, 15 bp, Homo sapiens
cgcccagctgcgaga

SEQ ID NO: 590539 - DNA, 15 bp, Homo sapiens
gcccagctgcgagat

SEQ ID NO: 590540 - DNA, 15 bp, Homo sapiens
cccagctgcgagatc

SEQ ID NO: 590541 - DNA, 15 bp, Homo sapiens
ccagctgcgagatca

SEQ ID NO: 590542 - DNA, 15 bp, Homo sapiens
cagctgcgagatcac

SEQ ID NO: 590543 - DNA, 15 bp, Homo sapiens
agctgcgagatcacc

SEQ ID NO: 590544 - DNA, 15 bp, Homo sapiens
gctgcgagatcacct

SEQ ID NO: 590545 - DNA, 15 bp, Homo sapiens
ctgcgagatcacctt

SEQ ID NO: 590546 - DNA, 15 bp, Homo sapiens
tgcgagatcaccttc

SEQ ID NO: 590547 - DNA, 15 bp, Homo sapiens
gcgagatcaccttca

SEQ ID NO: 590548 - DNA, 15 bp, Homo sapiens
cgagatcaccttcat

SEQ ID NO: 590549 - DNA, 15 bp, Homo sapiens
gagatcaccttcatc

SEQ ID NO: 590550 - DNA, 15 bp, Homo sapiens
agatcaccttcatcg

SEQ ID NO: 590551 - DNA, 15 bp, Homo sapiens
gatcaccttcatcga

SEQ ID NO: 590552 - DNA, 15 bp, Homo sapiens
atcaccttcatcgag

SEQ ID NO: 590553 - DNA, 15 bp, Homo sapiens
tcaccttcatcgagt

SEQ ID NO: 590554 - DNA, 15 bp, Homo sapiens
caccttcatcgagtc

SEQ ID NO: 590555 - DNA, 15 bp, Homo sapiens
accttcatcgagtcg

SEQ ID NO: 590556 - DNA, 15 bp, Homo sapiens
ccttcatcgagtcgg

SEQ ID NO: 590557 - DNA, 15 bp, Homo sapiens
cttcatcgagtcgga

SEQ ID NO: 590558 - DNA, 15 bp, Homo sapiens
ttcatcgagtcggag

SEQ ID NO: 590559 - DNA, 15 bp, Homo sapiens
tcatcgagtcggagg

SEQ ID NO: 590560 - DNA, 15 bp, Homo sapiens
catcgagtcggagga

SEQ ID NO: 590561 - DNA, 15 bp, Homo sapiens
atcgagtcggaggag

SEQ ID NO: 590562 - DNA, 15 bp, Homo sapiens
tcgagtcggaggagg

SEQ ID NO: 590563 - DNA, 15 bp, Homo sapiens
cgagtcggaggaggg

SEQ ID NO: 590564 - DNA, 15 bp, Homo sapiens
gagtcggaggagggc

SEQ ID NO: 590565 - DNA, 15 bp, Homo sapiens
agtcggaggagggca

SEQ ID NO: 590566 - DNA, 15 bp, Homo sapiens
gtcggaggagggcag

SEQ ID NO: 590567 - DNA, 15 bp, Homo sapiens
tcggaggagggcagt

SEQ ID NO: 590568 - DNA, 15 bp, Homo sapiens
cggaggagggcagtg

SEQ ID NO: 590569 - DNA, 15 bp, Homo sapiens
ggaggagggcagtgg

SEQ ID NO: 590570 - DNA, 15 bp, Homo sapiens
gaggagggcagtggc

SEQ ID NO: 590571 - DNA, 15 bp, Homo sapiens
aggagggcagtggcc

SEQ ID NO: 590572 - DNA, 15 bp, Homo sapiens
ggagggcagtggccg

SEQ ID NO: 590573 - DNA, 15 bp, Homo sapiens
gagggcagtggccgg

SEQ ID NO: 590574 - DNA, 15 bp, Homo sapiens
agggcagtggccggg

SEQ ID NO: 590575 - DNA, 15 bp, Homo sapiens
gggcagtggccgggg

SEQ ID NO: 590576 - DNA, 15 bp, Homo sapiens
ggcagtggccggggc

SEQ ID NO: 590577 - DNA, 15 bp, Homo sapiens
gcagtggccggggcg

SEQ ID NO: 590578 - DNA, 15 bp, Homo sapiens
cagtggccggggcgc

SEQ ID NO: 590579 - DNA, 15 bp, Homo sapiens
agtggccggggcgcg

SEQ ID NO: 590580 - DNA, 15 bp, Homo sapiens
gtggccggggcgcgg

SEQ ID NO: 590581 - DNA, 15 bp, Homo sapiens
tggccggggcgcggc

SEQ ID NO: 590582 - DNA, 15 bp, Homo sapiens
ggccggggcgcggcc

SEQ ID NO: 590583 - DNA, 15 bp, Homo sapiens
gccggggcgcggccc

SEQ ID NO: 590584 - DNA, 15 bp, Homo sapiens
ccggggcgcggccct

SEQ ID NO: 590585 - DNA, 15 bp, Homo sapiens
cggggcgcggccctg

SEQ ID NO: 590586 - DNA, 15 bp, Homo sapiens
ggggcgcggccctgg

SEQ ID NO: 590587 - DNA, 15 bp, Homo sapiens
gggcgcggccctggt

SEQ ID NO: 590588 - DNA, 15 bp, Homo sapiens
ggcgcggccctggtc

SEQ ID NO: 590589 - DNA, 15 bp, Homo sapiens
gcgcggccctggtct

SEQ ID NO: 590590 - DNA, 15 bp, Homo sapiens
cgcggccctggtctc

SEQ ID NO: 590591 - DNA, 15 bp, Homo sapiens
gcggccctggtctcg

SEQ ID NO: 590592 - DNA, 15 bp, Homo sapiens
cggccctggtctcgg

SEQ ID NO: 590593 - DNA, 15 bp, Homo sapiens
ggccctggtctcggc

SEQ ID NO: 590594 - DNA, 15 bp, Homo sapiens
gccctggtctcggcg

SEQ ID NO: 590595 - DNA, 15 bp, Homo sapiens
ccctggtctcggcgg

SEQ ID NO: 590596 - DNA, 15 bp, Homo sapiens
cctggtctcggcggt

SEQ ID NO: 590597 - DNA, 15 bp, Homo sapiens
ctggtctcggcggtg

SEQ ID NO: 590598 - DNA, 15 bp, Homo sapiens
tggtctcggcggtgg

SEQ ID NO: 590599 - DNA, 15 bp, Homo sapiens
ggtctcggcggtggc

SEQ ID NO: 590600 - DNA, 15 bp, Homo sapiens
gtctcggcggtggcc

SEQ ID NO: 590601 - DNA, 15 bp, Homo sapiens
tctcggcggtggcct

SEQ ID NO: 590602 - DNA, 15 bp, Homo sapiens
ctcggcggtggcctg

SEQ ID NO: 590603 - DNA, 15 bp, Homo sapiens
tcggcggtggcctgt

SEQ ID NO: 590604 - DNA, 15 bp, Homo sapiens
cggcggtggcctgta

SEQ ID NO: 590605 - DNA, 15 bp, Homo sapiens
ggcggtggcctgtaa

SEQ ID NO: 590606 - DNA, 15 bp, Homo sapiens
gcggtggcctgtaag

SEQ ID NO: 590607 - DNA, 15 bp, Homo sapiens
cggtggcctgtaaga

SEQ ID NO: 590608 - DNA, 15 bp, Homo sapiens
ggtggcctgtaagaa

SEQ ID NO: 590609 - DNA, 15 bp, Homo sapiens
gtggcctgtaagaag

SEQ ID NO: 590610 - DNA, 15 bp, Homo sapiens
tggcctgtaagaagg

SEQ ID NO: 590611 - DNA, 15 bp, Homo sapiens
ggcctgtaagaaggc

SEQ ID NO: 590612 - DNA, 15 bp, Homo sapiens
gcctgtaagaaggcc

SEQ ID NO: 590613 - DNA, 15 bp, Homo sapiens
cctgtaagaaggcct

SEQ ID NO: 590614 - DNA, 15 bp, Homo sapiens
ctgtaagaaggcctg

SEQ ID NO: 590615 - DNA, 15 bp, Homo sapiens
tgtaagaaggcctgt

SEQ ID NO: 590616 - DNA, 15 bp, Homo sapiens
gtaagaaggcctgta

SEQ ID NO: 590617 - DNA, 15 bp, Homo sapiens
taagaaggcctgtat

SEQ ID NO: 590618 - DNA, 15 bp, Homo sapiens
aagaaggcctgtatg

SEQ ID NO: 590619 - DNA, 15 bp, Homo sapiens
agaaggcctgtatgc

SEQ ID NO: 590620 - DNA, 15 bp, Homo sapiens
gaaggcctgtatgct

SEQ ID NO: 590621 - DNA, 15 bp, Homo sapiens
aaggcctgtatgctg

SEQ ID NO: 590622 - DNA, 15 bp, Homo sapiens
aggcctgtatgctgg

SEQ ID NO: 590623 - DNA, 15 bp, Homo sapiens
ggcctgtatgctggg

SEQ ID NO: 590624 - DNA, 15 bp, Homo sapiens
gcctgtatgctgggc

SEQ ID NO: 590625 - DNA, 15 bp, Homo sapiens
cctgtatgctgggcc

SEQ ID NO: 590626 - DNA, 15 bp, Homo sapiens
ctgtatgctgggcca

SEQ ID NO: 590627 - DNA, 15 bp, Homo sapiens
tgtatgctgggccag

SEQ ID NO: 590628 - DNA, 15 bp, Homo sapiens
gtatgctgggccagt

SEQ ID NO: 590629 - DNA, 15 bp, Homo sapiens
tatgctgggccagtg

SEQ ID NO: 590630 - DNA, 15 bp, Homo sapiens
atgctgggccagtga

SEQ ID NO: 590631 - DNA, 15 bp, Homo sapiens
tgctgggccagtgag

SEQ ID NO: 590632 - DNA, 15 bp, Homo sapiens
gctgggccagtgaga

SEQ ID NO: 590633 - DNA, 15 bp, Homo sapiens
ctgggccagtgagag

SEQ ID NO: 590634 - DNA, 15 bp, Homo sapiens
tgggccagtgagagc

SEQ ID NO: 590635 - DNA, 15 bp, Homo sapiens
gggccagtgagagca

SEQ ID NO: 590636 - DNA, 15 bp, Homo sapiens
ggccagtgagagcag

SEQ ID NO: 590637 - DNA, 15 bp, Homo sapiens
gccagtgagagcagt

SEQ ID NO: 590638 - DNA, 15 bp, Homo sapiens
ccagtgagagcagtg

SEQ ID NO: 590639 - DNA, 15 bp, Homo sapiens
cagtgagagcagtgg

SEQ ID NO: 590640 - DNA, 15 bp, Homo sapiens
agtgagagcagtggc

SEQ ID NO: 590641 - DNA, 15 bp, Homo sapiens
gtgagagcagtggcc

SEQ ID NO: 590642 - DNA, 15 bp, Homo sapiens
tgagagcagtggccg

SEQ ID NO: 590643 - DNA, 15 bp, Homo sapiens
gagagcagtggccgc

SEQ ID NO: 590644 - DNA, 15 bp, Homo sapiens
agagcagtggccgca

SEQ ID NO: 590645 - DNA, 15 bp, Homo sapiens
gagcagtggccgcaa

SEQ ID NO: 590646 - DNA, 15 bp, Homo sapiens
agcagtggccgcaag

SEQ ID NO: 590647 - DNA, 15 bp, Homo sapiens
gcagtggccgcaagc

SEQ ID NO: 590648 - DNA, 15 bp, Homo sapiens
cagtggccgcaagcg

SEQ ID NO: 590649 - DNA, 15 bp, Homo sapiens
agtggccgcaagcgc

SEQ ID NO: 590650 - DNA, 15 bp, Homo sapiens
gtggccgcaagcgca

SEQ ID NO: 590651 - DNA, 15 bp, Homo sapiens
tggccgcaagcgcag

SEQ ID NO: 590652 - DNA, 15 bp, Homo sapiens
ggccgcaagcgcagg

SEQ ID NO: 590653 - DNA, 15 bp, Homo sapiens
gccgcaagcgcaggg

SEQ ID NO: 590654 - DNA, 15 bp, Homo sapiens
ccgcaagcgcaggga

SEQ ID NO: 590655 - DNA, 15 bp, Homo sapiens
cgcaagcgcagggag

SEQ ID NO: 590656 - DNA, 15 bp, Homo sapiens
gcaagcgcagggagg

SEQ ID NO: 590657 - DNA, 15 bp, Homo sapiens
caagcgcagggagga

SEQ ID NO: 590658 - DNA, 15 bp, Homo sapiens
aagcgcagggaggat

SEQ ID NO: 590659 - DNA, 15 bp, Homo sapiens
agcgcagggaggatg

SEQ ID NO: 590660 - DNA, 15 bp, Homo sapiens
gcgcagggaggatgc

SEQ ID NO: 590661 - DNA, 15 bp, Homo sapiens
cgcagggaggatgcc

SEQ ID NO: 590662 - DNA, 15 bp, Homo sapiens
gcagggaggatgcca

SEQ ID NO: 590663 - DNA, 15 bp, Homo sapiens
cagggaggatgccac

SEQ ID NO: 590664 - DNA, 15 bp, Homo sapiens
agggaggatgccaca

SEQ ID NO: 590665 - DNA, 15 bp, Homo sapiens
gggaggatgccacag

SEQ ID NO: 590666 - DNA, 15 bp, Homo sapiens
ggaggatgccacagc

SEQ ID NO: 590667 - DNA, 15 bp, Homo sapiens
gaggatgccacagcc

SEQ ID NO: 590668 - DNA, 15 bp, Homo sapiens
aggatgccacagccc

SEQ ID NO: 590669 - DNA, 15 bp, Homo sapiens
ggatgccacagcccc

SEQ ID NO: 590670 - DNA, 15 bp, Homo sapiens
gatgccacagcccca

SEQ ID NO: 590671 - DNA, 15 bp, Homo sapiens
atgccacagccccac

SEQ ID NO: 590672 - DNA, 15 bp, Homo sapiens
tgccacagccccaca

SEQ ID NO: 590673 - DNA, 15 bp, Homo sapiens
gccacagccccacag

SEQ ID NO: 590674 - DNA, 15 bp, Homo sapiens
ccacagccccacagc

SEQ ID NO: 590675 - DNA, 15 bp, Homo sapiens
cacagccccacagca

SEQ ID NO: 590676 - DNA, 15 bp, Homo sapiens
acagccccacagcac

SEQ ID NO: 590677 - DNA, 15 bp, Homo sapiens
cagccccacagcacc

SEQ ID NO: 590678 - DNA, 15 bp, Homo sapiens
agccccacagcaccc

SEQ ID NO: 590679 - DNA, 15 bp, Homo sapiens
gccccacagcaccca

SEQ ID NO: 590680 - DNA, 15 bp, Homo sapiens
ccccacagcacccag

SEQ ID NO: 590681 - DNA, 15 bp, Homo sapiens
cccacagcacccagg

SEQ ID NO: 590682 - DNA, 15 bp, Homo sapiens
ccacagcacccaggc

SEQ ID NO: 590683 - DNA, 15 bp, Homo sapiens
cacagcacccaggct

SEQ ID NO: 590684 - DNA, 15 bp, Homo sapiens
acagcacccaggctc

SEQ ID NO: 590685 - DNA, 15 bp, Homo sapiens
cagcacccaggctcc

SEQ ID NO: 590686 - DNA, 15 bp, Homo sapiens
agcacccaggctcca

SEQ ID NO: 590687 - DNA, 15 bp, Homo sapiens
gcacccaggctccat

SEQ ID NO: 590688 - DNA, 15 bp, Homo sapiens
cacccaggctccatg

SEQ ID NO: 590689 - DNA, 15 bp, Homo sapiens
acccaggctccatgg

SEQ ID NO: 590690 - DNA, 15 bp, Homo sapiens
cccaggctccatggg

SEQ ID NO: 590691 - DNA, 15 bp, Homo sapiens
ccaggctccatgggg

SEQ ID NO: 590692 - DNA, 15 bp, Homo sapiens
caggctccatgggga

SEQ ID NO: 590693 - DNA, 15 bp, Homo sapiens
aggctccatggggaa

SEQ ID NO: 590694 - DNA, 15 bp, Homo sapiens
ggctccatggggaag

SEQ ID NO: 590695 - DNA, 15 bp, Homo sapiens
gctccatggggaagt

SEQ ID NO: 590696 - DNA, 15 bp, Homo sapiens
ctccatggggaagtg

SEQ ID NO: 590697 - DNA, 15 bp, Homo sapiens
tccatggggaagtgc

SEQ ID NO: 590698 - DNA, 15 bp, Homo sapiens
ccatggggaagtgct

SEQ ID NO: 590699 - DNA, 15 bp, Homo sapiens
catggggaagtgctc

SEQ ID NO: 590700 - DNA, 15 bp, Homo sapiens
atggggaagtgctcc

SEQ ID NO: 590701 - DNA, 15 bp, Homo sapiens
tggggaagtgctccc

SEQ ID NO: 590702 - DNA, 15 bp, Homo sapiens
ggggaagtgctcccc

SEQ ID NO: 590703 - DNA, 15 bp, Homo sapiens
gggaagtgctcccca

SEQ ID NO: 590704 - DNA, 15 bp, Homo sapiens
ggaagtgctccccac

SEQ ID NO: 590705 - DNA, 15 bp, Homo sapiens
gaagtgctccccaca

SEQ ID NO: 590706 - DNA, 15 bp, Homo sapiens
aagtgctccccacac

SEQ ID NO: 590707 - DNA, 15 bp, Homo sapiens
agtgctccccacacg

SEQ ID NO: 590708 - DNA, 15 bp, Homo sapiens
gtgctccccacacgt

SEQ ID NO: 590709 - DNA, 15 bp, Homo sapiens
tgctccccacacgtg

SEQ ID NO: 590710 - DNA, 15 bp, Homo sapiens
gctccccacacgtgc

SEQ ID NO: 590711 - DNA, 15 bp, Homo sapiens
ctccccacacgtgct

SEQ ID NO: 590712 - DNA, 15 bp, Homo sapiens
tccccacacgtgctc

SEQ ID NO: 590713 - DNA, 15 bp, Homo sapiens
ccccacacgtgctcg

SEQ ID NO: 590714 - DNA, 15 bp, Homo sapiens
cccacacgtgctcgc

SEQ ID NO: 590715 - DNA, 15 bp, Homo sapiens
ccacacgtgctcgca

SEQ ID NO: 590716 - DNA, 15 bp, Homo sapiens
cacacgtgctcgcag

SEQ ID NO: 590717 - DNA, 15 bp, Homo sapiens
acacgtgctcgcagc

SEQ ID NO: 590718 - DNA, 15 bp, Homo sapiens
cacgtgctcgcagcc

SEQ ID NO: 590719 - DNA, 15 bp, Homo sapiens
acgtgctcgcagcct

SEQ ID NO: 590720 - DNA, 15 bp, Homo sapiens
cgtgctcgcagcctg

SEQ ID NO: 590721 - DNA, 15 bp, Homo sapiens
gtgctcgcagcctgg

SEQ ID NO: 590722 - DNA, 15 bp, Homo sapiens
tgctcgcagcctggc

SEQ ID NO: 590723 - DNA, 15 bp, Homo sapiens
gctcgcagcctggcg

SEQ ID NO: 590724 - DNA, 15 bp, Homo sapiens
ctcgcagcctggcgg

SEQ ID NO: 590725 - DNA, 15 bp, Homo sapiens
tcgcagcctggcggg

SEQ ID NO: 590726 - DNA, 15 bp, Homo sapiens
cgcagcctggcgggg

SEQ ID NO: 590727 - DNA, 15 bp, Homo sapiens
gcagcctggcggggc

SEQ ID NO: 590728 - DNA, 15 bp, Homo sapiens
cagcctggcggggca

SEQ ID NO: 590729 - DNA, 15 bp, Homo sapiens
agcctggcggggcag

SEQ ID NO: 590730 - DNA, 15 bp, Homo sapiens
gcctggcggggcagg

SEQ ID NO: 590731 - DNA, 15 bp, Homo sapiens
cctggcggggcagga

SEQ ID NO: 590732 - DNA, 15 bp, Homo sapiens
ctggcggggcaggag

SEQ ID NO: 590733 - DNA, 15 bp, Homo sapiens
tggcggggcaggagg

SEQ ID NO: 590734 - DNA, 15 bp, Homo sapiens
ggcggggcaggaggc

SEQ ID NO: 590735 - DNA, 15 bp, Homo sapiens
gcggggcaggaggcc

SEQ ID NO: 590736 - DNA, 15 bp, Homo sapiens
cggggcaggaggcct

SEQ ID NO: 590737 - DNA, 15 bp, Homo sapiens
ggggcaggaggcctg

SEQ ID NO: 590738 - DNA, 15 bp, Homo sapiens
gggcaggaggcctgg

SEQ ID NO: 590739 - DNA, 15 bp, Homo sapiens
ggcaggaggcctggc

SEQ ID NO: 590740 - DNA, 15 bp, Homo sapiens
gcaggaggcctggcc

SEQ ID NO: 590741 - DNA, 15 bp, Homo sapiens
caggaggcctggcct

SEQ ID NO: 590742 - DNA, 15 bp, Homo sapiens
aggaggcctggcctt

SEQ ID NO: 590743 - DNA, 15 bp, Homo sapiens
ggaggcctggccttg

SEQ ID NO: 590744 - DNA, 15 bp, Homo sapiens
gaggcctggccttgt

SEQ ID NO: 590745 - DNA, 15 bp, Homo sapiens
aggcctggccttgtc

SEQ ID NO: 590746 - DNA, 15 bp, Homo sapiens
ggcctggccttgtca

SEQ ID NO: 590747 - DNA, 15 bp, Homo sapiens
gcctggccttgtcag

SEQ ID NO: 590748 - DNA, 15 bp, Homo sapiens
cctggccttgtcagg

SEQ ID NO: 590749 - DNA, 15 bp, Homo sapiens
ctggccttgtcagga

SEQ ID NO: 590750 - DNA, 15 bp, Homo sapiens
tggccttgtcaggac

SEQ ID NO: 590751 - DNA, 15 bp, Homo sapiens
ggccttgtcaggacc

SEQ ID NO: 590752 - DNA, 15 bp, Homo sapiens
gccttgtcaggaccc

SEQ ID NO: 590753 - DNA, 15 bp, Homo sapiens
ccttgtcaggaccca

SEQ ID NO: 590754 - DNA, 15 bp, Homo sapiens
cttgtcaggacccag

SEQ ID NO: 590755 - DNA, 15 bp, Homo sapiens
ttgtcaggacccagg

SEQ ID NO: 590756 - DNA, 15 bp, Homo sapiens
tgtcaggacccaggc

SEQ ID NO: 590757 - DNA, 15 bp, Homo sapiens
gtcaggacccaggcc

SEQ ID NO: 590758 - DNA, 15 bp, Homo sapiens
tcaggacccaggccg

SEQ ID NO: 590759 - DNA, 15 bp, Homo sapiens
caggacccaggccgc

SEQ ID NO: 590760 - DNA, 15 bp, Homo sapiens
aggacccaggccgcc

SEQ ID NO: 590761 - DNA, 15 bp, Homo sapiens
ggacccaggccgcct

SEQ ID NO: 590762 - DNA, 15 bp, Homo sapiens
gacccaggccgcctg

SEQ ID NO: 590763 - DNA, 15 bp, Homo sapiens
acccaggccgcctgc

SEQ ID NO: 590764 - DNA, 15 bp, Homo sapiens
cccaggccgcctgcc

SEQ ID NO: 590765 - DNA, 15 bp, Homo sapiens
ccaggccgcctgcca

SEQ ID NO: 590766 - DNA, 15 bp, Homo sapiens
caggccgcctgccat

SEQ ID NO: 590767 - DNA, 15 bp, Homo sapiens
aggccgcctgccata

SEQ ID NO: 590768 - DNA, 15 bp, Homo sapiens
ggccgcctgccatac

SEQ ID NO: 590769 - DNA, 15 bp, Homo sapiens
gccgcctgccatacc

SEQ ID NO: 590770 - DNA, 15 bp, Homo sapiens
ccgcctgccataccg

SEQ ID NO: 590771 - DNA, 15 bp, Homo sapiens
cgcctgccataccgc

SEQ ID NO: 590772 - DNA, 15 bp, Homo sapiens
gcctgccataccgct

SEQ ID NO: 590773 - DNA, 15 bp, Homo sapiens
cctgccataccgctg

SEQ ID NO: 590774 - DNA, 15 bp, Homo sapiens
ctgccataccgctgg

SEQ ID NO: 590775 - DNA, 15 bp, Homo sapiens
tgccataccgctggg

SEQ ID NO: 590776 - DNA, 15 bp, Homo sapiens
gccataccgctgggg

SEQ ID NO: 590777 - DNA, 15 bp, Homo sapiens
ccataccgctgggga

SEQ ID NO: 590778 - DNA, 15 bp, Homo sapiens
cataccgctggggaa

SEQ ID NO: 590779 - DNA, 15 bp, Homo sapiens
ataccgctggggaac

SEQ ID NO: 590780 - DNA, 15 bp, Homo sapiens
taccgctggggaaca

SEQ ID NO: 590781 - DNA, 15 bp, Homo sapiens
accgctggggaacag

SEQ ID NO: 590782 - DNA, 15 bp, Homo sapiens
ccgctggggaacaga

SEQ ID NO: 590783 - DNA, 15 bp, Homo sapiens
cgctggggaacagag

SEQ ID NO: 590784 - DNA, 15 bp, Homo sapiens
gctggggaacagagc

SEQ ID NO: 590785 - DNA, 15 bp, Homo sapiens
ctggggaacagagcg

SEQ ID NO: 590786 - DNA, 15 bp, Homo sapiens
tggggaacagagcgg

SEQ ID NO: 590787 - DNA, 15 bp, Homo sapiens
ggggaacagagcggg

SEQ ID NO: 590788 - DNA, 15 bp, Homo sapiens
gggaacagagcgggc

SEQ ID NO: 590789 - DNA, 15 bp, Homo sapiens
ggaacagagcgggcc

SEQ ID NO: 590790 - DNA, 15 bp, Homo sapiens
gaacagagcgggcct

SEQ ID NO: 590791 - DNA, 15 bp, Homo sapiens
aacagagcgggcctc

SEQ ID NO: 590792 - DNA, 15 bp, Homo sapiens
acagagcgggcctct

SEQ ID NO: 590793 - DNA, 15 bp, Homo sapiens
cagagcgggcctctt

SEQ ID NO: 590794 - DNA, 15 bp, Homo sapiens
agagcgggcctcttc

SEQ ID NO: 590795 - DNA, 15 bp, Homo sapiens
gagcgggcctcttcc

SEQ ID NO: 590796 - DNA, 15 bp, Homo sapiens
agcgggcctcttccc

SEQ ID NO: 590797 - DNA, 15 bp, Homo sapiens
gcgggcctcttccct

SEQ ID NO: 590798 - DNA, 15 bp, Homo sapiens
cgggcctcttccctc

SEQ ID NO: 590799 - DNA, 15 bp, Homo sapiens
gggcctcttccctca

SEQ ID NO: 590800 - DNA, 15 bp, Homo sapiens
ggcctcttccctcag

SEQ ID NO: 590801 - DNA, 15 bp, Homo sapiens
gcctcttccctcagt

SEQ ID NO: 590802 - DNA, 15 bp, Homo sapiens
cctcttccctcagtt

SEQ ID NO: 590803 - DNA, 15 bp, Homo sapiens
ctcttccctcagttt

SEQ ID NO: 590804 - DNA, 15 bp, Homo sapiens
tcttccctcagtttt

SEQ ID NO: 590805 - DNA, 15 bp, Homo sapiens
cttccctcagttttt

SEQ ID NO: 590806 - DNA, 15 bp, Homo sapiens
ttccctcagtttttc

SEQ ID NO: 590807 - DNA, 15 bp, Homo sapiens
tccctcagtttttcg

SEQ ID NO: 590808 - DNA, 15 bp, Homo sapiens
ccctcagtttttcgg

SEQ ID NO: 590809 - DNA, 15 bp, Homo sapiens
cctcagtttttcggt

SEQ ID NO: 590810 - DNA, 15 bp, Homo sapiens
ctcagtttttcggtg

SEQ ID NO: 590811 - DNA, 15 bp, Homo sapiens
tcagtttttcggtgg

SEQ ID NO: 590812 - DNA, 15 bp, Homo sapiens
cagtttttcggtggg

SEQ ID NO: 590813 - DNA, 15 bp, Homo sapiens
agtttttcggtggga

SEQ ID NO: 590814 - DNA, 15 bp, Homo sapiens
gtttttcggtgggac

SEQ ID NO: 590815 - DNA, 15 bp, Homo sapiens
tttttcggtgggaca

SEQ ID NO: 590816 - DNA, 15 bp, Homo sapiens
ttttcggtgggacag

SEQ ID NO: 590817 - DNA, 15 bp, Homo sapiens
tttcggtgggacagc

SEQ ID NO: 590818 - DNA, 15 bp, Homo sapiens
ttcggtgggacagcc

SEQ ID NO: 590819 - DNA, 15 bp, Homo sapiens
tcggtgggacagccc

SEQ ID NO: 590820 - DNA, 15 bp, Homo sapiens
cggtgggacagcccc

SEQ ID NO: 590821 - DNA, 15 bp, Homo sapiens
ggtgggacagcccca

SEQ ID NO: 590822 - DNA, 15 bp, Homo sapiens
gtgggacagccccag

SEQ ID NO: 590823 - DNA, 15 bp, Homo sapiens
tgggacagccccagg

SEQ ID NO: 590824 - DNA, 15 bp, Homo sapiens
gggacagccccaggg

SEQ ID NO: 590825 - DNA, 15 bp, Homo sapiens
ggacagccccagggc

SEQ ID NO: 590826 - DNA, 15 bp, Homo sapiens
gacagccccagggcc

SEQ ID NO: 590827 - DNA, 15 bp, Homo sapiens
acagccccagggccc

SEQ ID NO: 590828 - DNA, 15 bp, Homo sapiens
cagccccagggccct

SEQ ID NO: 590829 - DNA, 15 bp, Homo sapiens
agccccagggcccta

SEQ ID NO: 590830 - DNA, 15 bp, Homo sapiens
gccccagggccctaa

SEQ ID NO: 590831 - DNA, 15 bp, Homo sapiens
ccccagggccctaac

SEQ ID NO: 590832 - DNA, 15 bp, Homo sapiens
cccagggccctaacg

SEQ ID NO: 590833 - DNA, 15 bp, Homo sapiens
ccagggccctaacgg

SEQ ID NO: 590834 - DNA, 15 bp, Homo sapiens
cagggccctaacggg

SEQ ID NO: 590835 - DNA, 15 bp, Homo sapiens
agggccctaacgggg

SEQ ID NO: 590836 - DNA, 15 bp, Homo sapiens
gggccctaacggggg

SEQ ID NO: 590837 - DNA, 15 bp, Homo sapiens
ggccctaacgggggt

SEQ ID NO: 590838 - DNA, 15 bp, Homo sapiens
gccctaacgggggtg

SEQ ID NO: 590839 - DNA, 15 bp, Homo sapiens
ccctaacgggggtgc

SEQ ID NO: 590840 - DNA, 15 bp, Homo sapiens
cctaacgggggtgcg

SEQ ID NO: 590841 - DNA, 15 bp, Homo sapiens
ctaacgggggtgcgg

SEQ ID NO: 590842 - DNA, 15 bp, Homo sapiens
taacgggggtgcggc

SEQ ID NO: 590843 - DNA, 15 bp, Homo sapiens
aacgggggtgcggca

SEQ ID NO: 590844 - DNA, 15 bp, Homo sapiens
acgggggtgcggcag

SEQ ID NO: 590845 - DNA, 15 bp, Homo sapiens
cgggggtgcggcagg

SEQ ID NO: 590846 - DNA, 15 bp, Homo sapiens
gggggtgcggcagga

SEQ ID NO: 590847 - DNA, 15 bp, Homo sapiens
ggggtgcggcaggag

SEQ ID NO: 590848 - DNA, 15 bp, Homo sapiens
gggtgcggcaggagc

SEQ ID NO: 590849 - DNA, 15 bp, Homo sapiens
ggtgcggcaggagca

SEQ ID NO: 590850 - DNA, 15 bp, Homo sapiens
gtgcggcaggagcag

SEQ ID NO: 590851 - DNA, 15 bp, Homo sapiens
tgcggcaggagcagg

SEQ ID NO: 590852 - DNA, 15 bp, Homo sapiens
gcggcaggagcagga

SEQ ID NO: 590853 - DNA, 15 bp, Homo sapiens
cggcaggagcaggaa

SEQ ID NO: 590854 - DNA, 15 bp, Homo sapiens
ggcaggagcaggaac

SEQ ID NO: 590855 - DNA, 15 bp, Homo sapiens
gcaggagcaggaaca

SEQ ID NO: 590856 - DNA, 15 bp, Homo sapiens
caggagcaggaacag

SEQ ID NO: 590857 - DNA, 15 bp, Homo sapiens
aggagcaggaacaga

SEQ ID NO: 590858 - DNA, 15 bp, Homo sapiens
ggagcaggaacagag

SEQ ID NO: 590859 - DNA, 15 bp, Homo sapiens
gagcaggaacagaga

SEQ ID NO: 590860 - DNA, 15 bp, Homo sapiens
agcaggaacagagac

SEQ ID NO: 590861 - DNA, 15 bp, Homo sapiens
gcaggaacagagact

SEQ ID NO: 590862 - DNA, 15 bp, Homo sapiens
caggaacagagactc

SEQ ID NO: 590863 - DNA, 15 bp, Homo sapiens
aggaacagagactct

SEQ ID NO: 590864 - DNA, 15 bp, Homo sapiens
ggaacagagactctg

SEQ ID NO: 590865 - DNA, 15 bp, Homo sapiens
gaacagagactctgg

SEQ ID NO: 590866 - DNA, 15 bp, Homo sapiens
aacagagactctgga

SEQ ID NO: 590867 - DNA, 15 bp, Homo sapiens
acagagactctggaa

SEQ ID NO: 590868 - DNA, 15 bp, Homo sapiens
cagagactctggaag

SEQ ID NO: 590869 - DNA, 15 bp, Homo sapiens
agagactctggaagc

SEQ ID NO: 590870 - DNA, 15 bp, Homo sapiens
gagactctggaagcc

SEQ ID NO: 590871 - DNA, 15 bp, Homo sapiens
agactctggaagccc

SEQ ID NO: 590872 - DNA, 15 bp, Homo sapiens
gactctggaagcccc

SEQ ID NO: 590873 - DNA, 15 bp, Homo sapiens
actctggaagccccc

SEQ ID NO: 590874 - DNA, 15 bp, Homo sapiens
ctctggaagcccccc

SEQ ID NO: 590875 - DNA, 15 bp, Homo sapiens
tctggaagcccccca

SEQ ID NO: 590876 - DNA, 15 bp, Homo sapiens
ctggaagccccccac

SEQ ID NO: 590877 - DNA, 15 bp, Homo sapiens
tggaagccccccacc

SEQ ID NO: 590878 - DNA, 15 bp, Homo sapiens
ggaagccccccacct

SEQ ID NO: 590879 - DNA, 15 bp, Homo sapiens
gaagccccccacctt

SEQ ID NO: 590880 - DNA, 15 bp, Homo sapiens
aagccccccaccttt

SEQ ID NO: 590881 - DNA, 15 bp, Homo sapiens
agccccccacctttc

SEQ ID NO: 590882 - DNA, 15 bp, Homo sapiens
gccccccacctttct

SEQ ID NO: 590883 - DNA, 15 bp, Homo sapiens
ccccccacctttctc

SEQ ID NO: 590884 - DNA, 15 bp, Homo sapiens
cccccacctttctcg

SEQ ID NO: 590885 - DNA, 15 bp, Homo sapiens
ccccacctttctcgc

SEQ ID NO: 590886 - DNA, 15 bp, Homo sapiens
cccacctttctcgct

SEQ ID NO: 590887 - DNA, 15 bp, Homo sapiens
ccacctttctcgctg

SEQ ID NO: 590888 - DNA, 15 bp, Homo sapiens
cacctttctcgctgg

SEQ ID NO: 590889 - DNA, 15 bp, Homo sapiens
acctttctcgctgga

SEQ ID NO: 590890 - DNA, 15 bp, Homo sapiens
cctttctcgctggaa

SEQ ID NO: 590891 - DNA, 15 bp, Homo sapiens
ctttctcgctggaat

SEQ ID NO: 590892 - DNA, 15 bp, Homo sapiens
tttctcgctggaatc

SEQ ID NO: 590893 - DNA, 15 bp, Homo sapiens
ttctcgctggaatca

SEQ ID NO: 590894 - DNA, 15 bp, Homo sapiens
tctcgctggaatcaa

SEQ ID NO: 590895 - DNA, 15 bp, Homo sapiens
ctcgctggaatcaat

SEQ ID NO: 590896 - DNA, 15 bp, Homo sapiens
tcgctggaatcaatt

SEQ ID NO: 590897 - DNA, 15 bp, Homo sapiens
cgctggaatcaattt

SEQ ID NO: 590898 - DNA, 15 bp, Homo sapiens
gctggaatcaatttc

SEQ ID NO: 590899 - DNA, 15 bp, Homo sapiens
ctggaatcaatttcc

SEQ ID NO: 590900 - DNA, 15 bp, Homo sapiens
tggaatcaatttccc

SEQ ID NO: 590901 - DNA, 15 bp, Homo sapiens
ggaatcaatttccca

SEQ ID NO: 590902 - DNA, 15 bp, Homo sapiens
gaatcaatttcccag

SEQ ID NO: 590903 - DNA, 15 bp, Homo sapiens
aatcaatttcccaga

SEQ ID NO: 590904 - DNA, 15 bp, Homo sapiens
atcaatttcccagaa

SEQ ID NO: 590905 - DNA, 15 bp, Homo sapiens
tcaatttcccagaag

SEQ ID NO: 590906 - DNA, 15 bp, Homo sapiens
caatttcccagaagg

SEQ ID NO: 590907 - DNA, 15 bp, Homo sapiens
aatttcccagaaggg

SEQ ID NO: 590908 - DNA, 15 bp, Homo sapiens
atttcccagaaggga

SEQ ID NO: 590909 - DNA, 15 bp, Homo sapiens
tttcccagaagggag

SEQ ID NO: 590910 - DNA, 15 bp, Homo sapiens
ttcccagaagggagt

SEQ ID NO: 590911 - DNA, 15 bp, Homo sapiens
tcccagaagggagtt

SEQ ID NO: 590912 - DNA, 15 bp, Homo sapiens
cccagaagggagttg

SEQ ID NO: 590913 - DNA, 15 bp, Homo sapiens
ccagaagggagttgc

SEQ ID NO: 590914 - DNA, 15 bp, Homo sapiens
cagaagggagttgct

SEQ ID NO: 590915 - DNA, 15 bp, Homo sapiens
agaagggagttgctc

SEQ ID NO: 590916 - DNA, 15 bp, Homo sapiens
gaagggagttgctca

SEQ ID NO: 590917 - DNA, 15 bp, Homo sapiens
aagggagttgctcac

SEQ ID NO: 590918 - DNA, 15 bp, Homo sapiens
agggagttgctcact

SEQ ID NO: 590919 - DNA, 15 bp, Homo sapiens
gggagttgctcactc

SEQ ID NO: 590920 - DNA, 15 bp, Homo sapiens
ggagttgctcactca

SEQ ID NO: 590921 - DNA, 15 bp, Homo sapiens
gagttgctcactcag

SEQ ID NO: 590922 - DNA, 15 bp, Homo sapiens
agttgctcactcagg

SEQ ID NO: 590923 - DNA, 15 bp, Homo sapiens
gttgctcactcagga

SEQ ID NO: 590924 - DNA, 15 bp, Homo sapiens
ttgctcactcaggac

SEQ ID NO: 590925 - DNA, 15 bp, Homo sapiens
tgctcactcaggact

SEQ ID NO: 590926 - DNA, 15 bp, Homo sapiens
gctcactcaggactt

SEQ ID NO: 590927 - DNA, 15 bp, Homo sapiens
ctcactcaggacttt

SEQ ID NO: 590928 - DNA, 15 bp, Homo sapiens
tcactcaggactttg

SEQ ID NO: 590929 - DNA, 15 bp, Homo sapiens
cactcaggactttga

SEQ ID NO: 590930 - DNA, 15 bp, Homo sapiens
actcaggactttgat

SEQ ID NO: 590931 - DNA, 15 bp, Homo sapiens
ctcaggactttgatg

SEQ ID NO: 590932 - DNA, 15 bp, Homo sapiens
tcaggactttgatgc

SEQ ID NO: 590933 - DNA, 15 bp, Homo sapiens
caggactttgatgca

SEQ ID NO: 590934 - DNA, 15 bp, Homo sapiens
aggactttgatgcat

SEQ ID NO: 590935 - DNA, 15 bp, Homo sapiens
ggactttgatgcatt

SEQ ID NO: 590936 - DNA, 15 bp, Homo sapiens
gactttgatgcattt

SEQ ID NO: 590937 - DNA, 15 bp, Homo sapiens
actttgatgcatttc

SEQ ID NO: 590938 - DNA, 15 bp, Homo sapiens
ctttgatgcatttcc

SEQ ID NO: 590939 - DNA, 15 bp, Homo sapiens
tttgatgcatttcca

SEQ ID NO: 590940 - DNA, 15 bp, Homo sapiens
ttgatgcatttccac

SEQ ID NO: 590941 - DNA, 15 bp, Homo sapiens
tgatgcatttccaca

SEQ ID NO: 590942 - DNA, 15 bp, Homo sapiens
gatgcatttccacac

SEQ ID NO: 590943 - DNA, 15 bp, Homo sapiens
atgcatttccacact

SEQ ID NO: 590944 - DNA, 15 bp, Homo sapiens
tgcatttccacactg

SEQ ID NO: 590945 - DNA, 15 bp, Homo sapiens
gcatttccacactgt

SEQ ID NO: 590946 - DNA, 15 bp, Homo sapiens
catttccacactgtc

SEQ ID NO: 590947 - DNA, 15 bp, Homo sapiens
atttccacactgtca

SEQ ID NO: 590948 - DNA, 15 bp, Homo sapiens
tttccacactgtcag

SEQ ID NO: 590949 - DNA, 15 bp, Homo sapiens
ttccacactgtcaga

SEQ ID NO: 590950 - DNA, 15 bp, Homo sapiens
tccacactgtcagag

SEQ ID NO: 590951 - DNA, 15 bp, Homo sapiens
ccacactgtcagagc

SEQ ID NO: 590952 - DNA, 15 bp, Homo sapiens
cacactgtcagagct

SEQ ID NO: 590953 - DNA, 15 bp, Homo sapiens
acactgtcagagctg

SEQ ID NO: 590954 - DNA, 15 bp, Homo sapiens
cactgtcagagctgt

SEQ ID NO: 590955 - DNA, 15 bp, Homo sapiens
actgtcagagctgtt

SEQ ID NO: 590956 - DNA, 15 bp, Homo sapiens
ctgtcagagctgttg

SEQ ID NO: 590957 - DNA, 15 bp, Homo sapiens
tgtcagagctgttgg

SEQ ID NO: 590958 - DNA, 15 bp, Homo sapiens
gtcagagctgttggc

SEQ ID NO: 590959 - DNA, 15 bp, Homo sapiens
tcagagctgttggcc

SEQ ID NO: 590960 - DNA, 15 bp, Homo sapiens
cagagctgttggcct

SEQ ID NO: 590961 - DNA, 15 bp, Homo sapiens
agagctgttggcctc

SEQ ID NO: 590962 - DNA, 15 bp, Homo sapiens
gagctgttggcctcg

SEQ ID NO: 590963 - DNA, 15 bp, Homo sapiens
agctgttggcctcgc

SEQ ID NO: 590964 - DNA, 15 bp, Homo sapiens
gctgttggcctcgcc

SEQ ID NO: 590965 - DNA, 15 bp, Homo sapiens
ctgttggcctcgcct

SEQ ID NO: 590966 - DNA, 15 bp, Homo sapiens
tgttggcctcgcctg

SEQ ID NO: 590967 - DNA, 15 bp, Homo sapiens
gttggcctcgcctgg

SEQ ID NO: 590968 - DNA, 15 bp, Homo sapiens
ttggcctcgcctggg

SEQ ID NO: 590969 - DNA, 15 bp, Homo sapiens
tggcctcgcctgggc

SEQ ID NO: 590970 - DNA, 15 bp, Homo sapiens
ggcctcgcctgggcc

SEQ ID NO: 590971 - DNA, 15 bp, Homo sapiens
gcctcgcctgggccc

SEQ ID NO: 590972 - DNA, 15 bp, Homo sapiens
cctcgcctgggccca

SEQ ID NO: 590973 - DNA, 15 bp, Homo sapiens
ctcgcctgggcccag

SEQ ID NO: 590974 - DNA, 15 bp, Homo sapiens
tcgcctgggcccagg

SEQ ID NO: 590975 - DNA, 15 bp, Homo sapiens
cgcctgggcccaggc

SEQ ID NO: 590976 - DNA, 15 bp, Homo sapiens
gcctgggcccaggct

SEQ ID NO: 590977 - DNA, 15 bp, Homo sapiens
cctgggcccaggctc

SEQ ID NO: 590978 - DNA, 15 bp, Homo sapiens
ctgggcccaggctct

SEQ ID NO: 590979 - DNA, 15 bp, Homo sapiens
tgggcccaggctctg

SEQ ID NO: 590980 - DNA, 15 bp, Homo sapiens
gggcccaggctctgg

SEQ ID NO: 590981 - DNA, 15 bp, Homo sapiens
ggcccaggctctggg

SEQ ID NO: 590982 - DNA, 15 bp, Homo sapiens
gcccaggctctggga

SEQ ID NO: 590983 - DNA, 15 bp, Homo sapiens
cccaggctctgggaa

SEQ ID NO: 590984 - DNA, 15 bp, Homo sapiens
ccaggctctgggaag

SEQ ID NO: 590985 - DNA, 15 bp, Homo sapiens
caggctctgggaagg

SEQ ID NO: 590986 - DNA, 15 bp, Homo sapiens
aggctctgggaaggg

SEQ ID NO: 590987 - DNA, 15 bp, Homo sapiens
ggctctgggaagggg

SEQ ID NO: 590988 - DNA, 15 bp, Homo sapiens
gctctgggaaggggt

SEQ ID NO: 590989 - DNA, 15 bp, Homo sapiens
ctctgggaaggggtg

SEQ ID NO: 590990 - DNA, 15 bp, Homo sapiens
tctgggaaggggtgc

SEQ ID NO: 590991 - DNA, 15 bp, Homo sapiens
ctgggaaggggtgcc

SEQ ID NO: 590992 - DNA, 15 bp, Homo sapiens
tgggaaggggtgccc

SEQ ID NO: 590993 - DNA, 15 bp, Homo sapiens
gggaaggggtgccct

SEQ ID NO: 590994 - DNA, 15 bp, Homo sapiens
ggaaggggtgccctc

SEQ ID NO: 590995 - DNA, 15 bp, Homo sapiens
gaaggggtgccctct

SEQ ID NO: 590996 - DNA, 15 bp, Homo sapiens
aaggggtgccctctg

SEQ ID NO: 590997 - DNA, 15 bp, Homo sapiens
aggggtgccctctgg

SEQ ID NO: 590998 - DNA, 15 bp, Homo sapiens
ggggtgccctctgga

SEQ ID NO: 590999 - DNA, 15 bp, Homo sapiens
gggtgccctctggat

SEQ ID NO: 591000 - DNA, 15 bp, Homo sapiens
ggtgccctctggatc

SEQ ID NO: 591001 - DNA, 15 bp, Homo sapiens
gtgccctctggatcc

SEQ ID NO: 591002 - DNA, 15 bp, Homo sapiens
tgccctctggatcct

SEQ ID NO: 591003 - DNA, 15 bp, Homo sapiens
gccctctggatcctg

SEQ ID NO: 591004 - DNA, 15 bp, Homo sapiens
ccctctggatcctgc

SEQ ID NO: 591005 - DNA, 15 bp, Homo sapiens
cctctggatcctgct

SEQ ID NO: 591006 - DNA, 15 bp, Homo sapiens
ctctggatcctgctg

SEQ ID NO: 591007 - DNA, 15 bp, Homo sapiens
tctggatcctgctgt

SEQ ID NO: 591008 - DNA, 15 bp, Homo sapiens
ctggatcctgctgtg

SEQ ID NO: 591009 - DNA, 15 bp, Homo sapiens
tggatcctgctgtgg

SEQ ID NO: 591010 - DNA, 15 bp, Homo sapiens
ggatcctgctgtggc

SEQ ID NO: 591011 - DNA, 15 bp, Homo sapiens
gatcctgctgtggcc

SEQ ID NO: 591012 - DNA, 15 bp, Homo sapiens
atcctgctgtggcct

SEQ ID NO: 591013 - DNA, 15 bp, Homo sapiens
tcctgctgtggcctc

SEQ ID NO: 591014 - DNA, 15 bp, Homo sapiens
cctgctgtggcctca

SEQ ID NO: 591015 - DNA, 15 bp, Homo sapiens
ctgctgtggcctcac

SEQ ID NO: 591016 - DNA, 15 bp, Homo sapiens
tgctgtggcctcact

SEQ ID NO: 591017 - DNA, 15 bp, Homo sapiens
gctgtggcctcactt

SEQ ID NO: 591018 - DNA, 15 bp, Homo sapiens
ctgtggcctcacttc

SEQ ID NO: 591019 - DNA, 15 bp, Homo sapiens
tgtggcctcacttcc

SEQ ID NO: 591020 - DNA, 15 bp, Homo sapiens
gtggcctcacttccc

SEQ ID NO: 591021 - DNA, 15 bp, Homo sapiens
tggcctcacttccct

SEQ ID NO: 591022 - DNA, 15 bp, Homo sapiens
ggcctcacttccctg

SEQ ID NO: 591023 - DNA, 15 bp, Homo sapiens
gcctcacttccctgg

SEQ ID NO: 591024 - DNA, 15 bp, Homo sapiens
cctcacttccctggg

SEQ ID NO: 591025 - DNA, 15 bp, Homo sapiens
ctcacttccctggga

SEQ ID NO: 591026 - DNA, 15 bp, Homo sapiens
tcacttccctgggaa

SEQ ID NO: 591027 - DNA, 15 bp, Homo sapiens
cacttccctgggaac

SEQ ID NO: 591028 - DNA, 15 bp, Homo sapiens
acttccctgggaact

SEQ ID NO: 591029 - DNA, 15 bp, Homo sapiens
cttccctgggaactc

SEQ ID NO: 591030 - DNA, 15 bp, Homo sapiens
ttccctgggaactca

SEQ ID NO: 591031 - DNA, 15 bp, Homo sapiens
tccctgggaactcat

SEQ ID NO: 591032 - DNA, 15 bp, Homo sapiens
ccctgggaactcatc

SEQ ID NO: 591033 - DNA, 15 bp, Homo sapiens
cctgggaactcatcc

SEQ ID NO: 591034 - DNA, 15 bp, Homo sapiens
ctgggaactcatcct

SEQ ID NO: 591035 - DNA, 15 bp, Homo sapiens
tgggaactcatcctg

SEQ ID NO: 591036 - DNA, 15 bp, Homo sapiens
gggaactcatcctgt

SEQ ID NO: 591037 - DNA, 15 bp, Homo sapiens
ggaactcatcctgtg

SEQ ID NO: 591038 - DNA, 15 bp, Homo sapiens
gaactcatcctgtgt

SEQ ID NO: 591039 - DNA, 15 bp, Homo sapiens
aactcatcctgtgtg

SEQ ID NO: 591040 - DNA, 15 bp, Homo sapiens
actcatcctgtgtgg

SEQ ID NO: 591041 - DNA, 15 bp, Homo sapiens
ctcatcctgtgtggg

SEQ ID NO: 591042 - DNA, 15 bp, Homo sapiens
tcatcctgtgtgggg

SEQ ID NO: 591043 - DNA, 15 bp, Homo sapiens
catcctgtgtgggga

SEQ ID NO: 591044 - DNA, 15 bp, Homo sapiens
atcctgtgtggggag

SEQ ID NO: 591045 - DNA, 15 bp, Homo sapiens
tcctgtgtggggagg

SEQ ID NO: 591046 - DNA, 15 bp, Homo sapiens
cctgtgtggggaggc

SEQ ID NO: 591047 - DNA, 15 bp, Homo sapiens
ctgtgtggggaggca

SEQ ID NO: 591048 - DNA, 15 bp, Homo sapiens
tgtgtggggaggcag

SEQ ID NO: 591049 - DNA, 15 bp, Homo sapiens
gtgtggggaggcagc

SEQ ID NO: 591050 - DNA, 15 bp, Homo sapiens
tgtggggaggcagct

SEQ ID NO: 591051 - DNA, 15 bp, Homo sapiens
gtggggaggcagctc

SEQ ID NO: 591052 - DNA, 15 bp, Homo sapiens
tggggaggcagctcc

SEQ ID NO: 591053 - DNA, 15 bp, Homo sapiens
ggggaggcagctcca

SEQ ID NO: 591054 - DNA, 15 bp, Homo sapiens
gggaggcagctccaa

SEQ ID NO: 591055 - DNA, 15 bp, Homo sapiens
ggaggcagctccaac

SEQ ID NO: 591056 - DNA, 15 bp, Homo sapiens
gaggcagctccaaca

SEQ ID NO: 591057 - DNA, 15 bp, Homo sapiens
aggcagctccaacag

SEQ ID NO: 591058 - DNA, 15 bp, Homo sapiens
ggcagctccaacagc

SEQ ID NO: 591059 - DNA, 15 bp, Homo sapiens
gcagctccaacagct

SEQ ID NO: 591060 - DNA, 15 bp, Homo sapiens
cagctccaacagctt

SEQ ID NO: 591061 - DNA, 15 bp, Homo sapiens
agctccaacagcttg

SEQ ID NO: 591062 - DNA, 15 bp, Homo sapiens
gctccaacagcttga

SEQ ID NO: 591063 - DNA, 15 bp, Homo sapiens
ctccaacagcttgac

SEQ ID NO: 591064 - DNA, 15 bp, Homo sapiens
tccaacagcttgacc

SEQ ID NO: 591065 - DNA, 15 bp, Homo sapiens
ccaacagcttgacca

SEQ ID NO: 591066 - DNA, 15 bp, Homo sapiens
caacagcttgaccag

SEQ ID NO: 591067 - DNA, 15 bp, Homo sapiens
aacagcttgaccaga

SEQ ID NO: 591068 - DNA, 15 bp, Homo sapiens
acagcttgaccagac

SEQ ID NO: 591069 - DNA, 15 bp, Homo sapiens
cagcttgaccagacc

SEQ ID NO: 591070 - DNA, 15 bp, Homo sapiens
agcttgaccagacct

SEQ ID NO: 591071 - DNA, 15 bp, Homo sapiens
gcttgaccagaccta

SEQ ID NO: 591072 - DNA, 15 bp, Homo sapiens
cttgaccagacctag

SEQ ID NO: 591073 - DNA, 15 bp, Homo sapiens
ttgaccagacctaga

SEQ ID NO: 591074 - DNA, 15 bp, Homo sapiens
tgaccagacctagac

SEQ ID NO: 591075 - DNA, 15 bp, Homo sapiens
gaccagacctagacc

SEQ ID NO: 591076 - DNA, 15 bp, Homo sapiens
accagacctagacct

SEQ ID NO: 591077 - DNA, 15 bp, Homo sapiens
ccagacctagacctg

SEQ ID NO: 591078 - DNA, 15 bp, Homo sapiens
cagacctagacctgg

SEQ ID NO: 591079 - DNA, 15 bp, Homo sapiens
agacctagacctggg

SEQ ID NO: 591080 - DNA, 15 bp, Homo sapiens
gacctagacctgggc

SEQ ID NO: 591081 - DNA, 15 bp, Homo sapiens
acctagacctgggcc

SEQ ID NO: 591082 - DNA, 15 bp, Homo sapiens
cctagacctgggcca

SEQ ID NO: 591083 - DNA, 15 bp, Homo sapiens
ctagacctgggccaa

SEQ ID NO: 591084 - DNA, 15 bp, Homo sapiens
tagacctgggccaaa

SEQ ID NO: 591085 - DNA, 15 bp, Homo sapiens
agacctgggccaaaa

SEQ ID NO: 591086 - DNA, 15 bp, Homo sapiens
gacctgggccaaaag

SEQ ID NO: 591087 - DNA, 15 bp, Homo sapiens
acctgggccaaaagg

SEQ ID NO: 591088 - DNA, 15 bp, Homo sapiens
cctgggccaaaaggg

SEQ ID NO: 591089 - DNA, 15 bp, Homo sapiens
ctgggccaaaagggc

SEQ ID NO: 591090 - DNA, 15 bp, Homo sapiens
tgggccaaaagggca

SEQ ID NO: 591091 - DNA, 15 bp, Homo sapiens
gggccaaaagggcag

SEQ ID NO: 591092 - DNA, 15 bp, Homo sapiens
ggccaaaagggcagc

SEQ ID NO: 591093 - DNA, 15 bp, Homo sapiens
gccaaaagggcagcc

SEQ ID NO: 591094 - DNA, 15 bp, Homo sapiens
ccaaaagggcagcca

SEQ ID NO: 591095 - DNA, 15 bp, Homo sapiens
caaaagggcagccag

SEQ ID NO: 591096 - DNA, 15 bp, Homo sapiens
aaaagggcagccagg

SEQ ID NO: 591097 - DNA, 15 bp, Homo sapiens
aaagggcagccaggg

SEQ ID NO: 591098 - DNA, 15 bp, Homo sapiens
aagggcagccagggg

SEQ ID NO: 591099 - DNA, 15 bp, Homo sapiens
agggcagccaggggc

SEQ ID NO: 591100 - DNA, 15 bp, Homo sapiens
gggcagccaggggct

SEQ ID NO: 591101 - DNA, 15 bp, Homo sapiens
ggcagccaggggctg

SEQ ID NO: 591102 - DNA, 15 bp, Homo sapiens
gcagccaggggctgc

SEQ ID NO: 591103 - DNA, 15 bp, Homo sapiens
cagccaggggctgct

SEQ ID NO: 591104 - DNA, 15 bp, Homo sapiens
agccaggggctgctc

SEQ ID NO: 591105 - DNA, 15 bp, Homo sapiens
gccaggggctgctca

SEQ ID NO: 591106 - DNA, 15 bp, Homo sapiens
ccaggggctgctcat

SEQ ID NO: 591107 - DNA, 15 bp, Homo sapiens
caggggctgctcatc

SEQ ID NO: 591108 - DNA, 15 bp, Homo sapiens
aggggctgctcatca

SEQ ID NO: 591109 - DNA, 15 bp, Homo sapiens
ggggctgctcatcac

SEQ ID NO: 591110 - DNA, 15 bp, Homo sapiens
gggctgctcatcacc

SEQ ID NO: 591111 - DNA, 15 bp, Homo sapiens
ggctgctcatcaccc

SEQ ID NO: 591112 - DNA, 15 bp, Homo sapiens
gctgctcatcaccca

SEQ ID NO: 591113 - DNA, 15 bp, Homo sapiens
ctgctcatcacccag

SEQ ID NO: 591114 - DNA, 15 bp, Homo sapiens
tgctcatcacccagt

SEQ ID NO: 591115 - DNA, 15 bp, Homo sapiens
gctcatcacccagtc

SEQ ID NO: 591116 - DNA, 15 bp, Homo sapiens
ctcatcacccagtcc

SEQ ID NO: 591117 - DNA, 15 bp, Homo sapiens
tcatcacccagtcct

SEQ ID NO: 591118 - DNA, 15 bp, Homo sapiens
catcacccagtcctg

SEQ ID NO: 591119 - DNA, 15 bp, Homo sapiens
atcacccagtcctgg

SEQ ID NO: 591120 - DNA, 15 bp, Homo sapiens
tcacccagtcctggc

SEQ ID NO: 591121 - DNA, 15 bp, Homo sapiens
cacccagtcctggcc

SEQ ID NO: 591122 - DNA, 15 bp, Homo sapiens
acccagtcctggcca

SEQ ID NO: 591123 - DNA, 15 bp, Homo sapiens
cccagtcctggccat

SEQ ID NO: 591124 - DNA, 15 bp, Homo sapiens
ccagtcctggccatt

SEQ ID NO: 591125 - DNA, 15 bp, Homo sapiens
cagtcctggccattt

SEQ ID NO: 591126 - DNA, 15 bp, Homo sapiens
agtcctggccatttt

SEQ ID NO: 591127 - DNA, 15 bp, Homo sapiens
gtcctggccattttc

SEQ ID NO: 591128 - DNA, 15 bp, Homo sapiens
tcctggccattttct

SEQ ID NO: 591129 - DNA, 15 bp, Homo sapiens
cctggccattttctt

SEQ ID NO: 591130 - DNA, 15 bp, Homo sapiens
ctggccattttcttg

SEQ ID NO: 591131 - DNA, 15 bp, Homo sapiens
tggccattttcttgc

SEQ ID NO: 591132 - DNA, 15 bp, Homo sapiens
ggccattttcttgcc

SEQ ID NO: 591133 - DNA, 15 bp, Homo sapiens
gccattttcttgcct

SEQ ID NO: 591134 - DNA, 15 bp, Homo sapiens
ccattttcttgcctg

SEQ ID NO: 591135 - DNA, 15 bp, Homo sapiens
cattttcttgcctga

SEQ ID NO: 591136 - DNA, 15 bp, Homo sapiens
attttcttgcctgag

SEQ ID NO: 591137 - DNA, 15 bp, Homo sapiens
ttttcttgcctgagg

SEQ ID NO: 591138 - DNA, 15 bp, Homo sapiens
tttcttgcctgaggc

SEQ ID NO: 591139 - DNA, 15 bp, Homo sapiens
ttcttgcctgaggct

SEQ ID NO: 591140 - DNA, 15 bp, Homo sapiens
tcttgcctgaggctc

SEQ ID NO: 591141 - DNA, 15 bp, Homo sapiens
cttgcctgaggctca

SEQ ID NO: 591142 - DNA, 15 bp, Homo sapiens
ttgcctgaggctcaa

SEQ ID NO: 591143 - DNA, 15 bp, Homo sapiens
tgcctgaggctcaag

SEQ ID NO: 591144 - DNA, 15 bp, Homo sapiens
gcctgaggctcaaga

SEQ ID NO: 591145 - DNA, 15 bp, Homo sapiens
cctgaggctcaagag

SEQ ID NO: 591146 - DNA, 15 bp, Homo sapiens
ctgaggctcaagagg

SEQ ID NO: 591147 - DNA, 15 bp, Homo sapiens
tgaggctcaagaggc

SEQ ID NO: 591148 - DNA, 15 bp, Homo sapiens
gaggctcaagaggcc

SEQ ID NO: 591149 - DNA, 15 bp, Homo sapiens
aggctcaagaggccc

SEQ ID NO: 591150 - DNA, 15 bp, Homo sapiens
ggctcaagaggccca

SEQ ID NO: 591151 - DNA, 15 bp, Homo sapiens
gctcaagaggcccag

SEQ ID NO: 591152 - DNA, 15 bp, Homo sapiens
ctcaagaggcccagg

SEQ ID NO: 591153 - DNA, 15 bp, Homo sapiens
tcaagaggcccaggg

SEQ ID NO: 591154 - DNA, 15 bp, Homo sapiens
caagaggcccaggga

SEQ ID NO: 591155 - DNA, 15 bp, Homo sapiens
aagaggcccagggag

SEQ ID NO: 591156 - DNA, 15 bp, Homo sapiens
agaggcccagggagc

SEQ ID NO: 591157 - DNA, 15 bp, Homo sapiens
gaggcccagggagca

SEQ ID NO: 591158 - DNA, 15 bp, Homo sapiens
aggcccagggagcaa

SEQ ID NO: 591159 - DNA, 15 bp, Homo sapiens
ggcccagggagcaat

SEQ ID NO: 591160 - DNA, 15 bp, Homo sapiens
gcccagggagcaatg

SEQ ID NO: 591161 - DNA, 15 bp, Homo sapiens
cccagggagcaatgg

SEQ ID NO: 591162 - DNA, 15 bp, Homo sapiens
ccagggagcaatggg

SEQ ID NO: 591163 - DNA, 15 bp, Homo sapiens
cagggagcaatggga

SEQ ID NO: 591164 - DNA, 15 bp, Homo sapiens
agggagcaatgggag

SEQ ID NO: 591165 - DNA, 15 bp, Homo sapiens
gggagcaatgggagg

SEQ ID NO: 591166 - DNA, 15 bp, Homo sapiens
ggagcaatgggaggg

SEQ ID NO: 591167 - DNA, 15 bp, Homo sapiens
gagcaatgggagggg

SEQ ID NO: 591168 - DNA, 15 bp, Homo sapiens
agcaatgggaggggg

SEQ ID NO: 591169 - DNA, 15 bp, Homo sapiens
gcaatgggagggggc

SEQ ID NO: 591170 - DNA, 15 bp, Homo sapiens
caatgggagggggct

SEQ ID NO: 591171 - DNA, 15 bp, Homo sapiens
aatgggagggggctc

SEQ ID NO: 591172 - DNA, 15 bp, Homo sapiens
atgggagggggctcc

SEQ ID NO: 591173 - DNA, 15 bp, Homo sapiens
tgggagggggctcca

SEQ ID NO: 591174 - DNA, 15 bp, Homo sapiens
gggagggggctccat

SEQ ID NO: 591175 - DNA, 15 bp, Homo sapiens
ggagggggctccatg

SEQ ID NO: 591176 - DNA, 15 bp, Homo sapiens
gagggggctccatgg

SEQ ID NO: 591177 - DNA, 15 bp, Homo sapiens
agggggctccatgga

SEQ ID NO: 591178 - DNA, 15 bp, Homo sapiens
gggggctccatggag

SEQ ID NO: 591179 - DNA, 15 bp, Homo sapiens
ggggctccatggagg

SEQ ID NO: 591180 - DNA, 15 bp, Homo sapiens
gggctccatggagga

SEQ ID NO: 591181 - DNA, 15 bp, Homo sapiens
ggctccatggaggag

SEQ ID NO: 591182 - DNA, 15 bp, Homo sapiens
gctccatggaggagg

SEQ ID NO: 591183 - DNA, 15 bp, Homo sapiens
ctccatggaggaggt

SEQ ID NO: 591184 - DNA, 15 bp, Homo sapiens
tccatggaggaggtg

SEQ ID NO: 591185 - DNA, 15 bp, Homo sapiens
ccatggaggaggtgt

SEQ ID NO: 591186 - DNA, 15 bp, Homo sapiens
catggaggaggtgtc

SEQ ID NO: 591187 - DNA, 15 bp, Homo sapiens
atggaggaggtgtcc

SEQ ID NO: 591188 - DNA, 15 bp, Homo sapiens
tggaggaggtgtccc

SEQ ID NO: 591189 - DNA, 15 bp, Homo sapiens
ggaggaggtgtccca

SEQ ID NO: 591190 - DNA, 15 bp, Homo sapiens
gaggaggtgtcccaa

SEQ ID NO: 591191 - DNA, 15 bp, Homo sapiens
aggaggtgtcccaag

SEQ ID NO: 591192 - DNA, 15 bp, Homo sapiens
ggaggtgtcccaagc

SEQ ID NO: 591193 - DNA, 15 bp, Homo sapiens
gaggtgtcccaagct

SEQ ID NO: 591194 - DNA, 15 bp, Homo sapiens
aggtgtcccaagctt

SEQ ID NO: 591195 - DNA, 15 bp, Homo sapiens
ggtgtcccaagcttt

SEQ ID NO: 591196 - DNA, 15 bp, Homo sapiens
gtgtcccaagctttg

SEQ ID NO: 591197 - DNA, 15 bp, Homo sapiens
tgtcccaagctttga

SEQ ID NO: 591198 - DNA, 15 bp, Homo sapiens
gtcccaagctttgaa

SEQ ID NO: 591199 - DNA, 15 bp, Homo sapiens
tcccaagctttgaat

SEQ ID NO: 591200 - DNA, 15 bp, Homo sapiens
cccaagctttgaata

SEQ ID NO: 591201 - DNA, 15 bp, Homo sapiens
ccaagctttgaatac

SEQ ID NO: 591202 - DNA, 15 bp, Homo sapiens
caagctttgaatacc

SEQ ID NO: 591203 - DNA, 15 bp, Homo sapiens
aagctttgaataccc

SEQ ID NO: 591204 - DNA, 15 bp, Homo sapiens
agctttgaatacccc

SEQ ID NO: 591205 - DNA, 15 bp, Homo sapiens
gctttgaataccccc

SEQ ID NO: 591206 - DNA, 15 bp, Homo sapiens
ctttgaataccccca

SEQ ID NO: 591207 - DNA, 15 bp, Homo sapiens
tttgaatacccccag

SEQ ID NO: 591208 - DNA, 15 bp, Homo sapiens
ttgaatacccccaga

SEQ ID NO: 591209 - DNA, 15 bp, Homo sapiens
tgaatacccccagag

SEQ ID NO: 591210 - DNA, 15 bp, Homo sapiens
gaatacccccagaga

SEQ ID NO: 591211 - DNA, 15 bp, Homo sapiens
aatacccccagagac

SEQ ID NO: 591212 - DNA, 15 bp, Homo sapiens
atacccccagagacc

SEQ ID NO: 591213 - DNA, 15 bp, Homo sapiens
tacccccagagacct

SEQ ID NO: 591214 - DNA, 15 bp, Homo sapiens
acccccagagacctt

SEQ ID NO: 591215 - DNA, 15 bp, Homo sapiens
cccccagagaccttt

SEQ ID NO: 591216 - DNA, 15 bp, Homo sapiens
ccccagagacctttt

SEQ ID NO: 591217 - DNA, 15 bp, Homo sapiens
cccagagaccttttc

SEQ ID NO: 591218 - DNA, 15 bp, Homo sapiens
ccagagaccttttct

SEQ ID NO: 591219 - DNA, 15 bp, Homo sapiens
cagagaccttttctc

SEQ ID NO: 591220 - DNA, 15 bp, Homo sapiens
agagaccttttctct

SEQ ID NO: 591221 - DNA, 15 bp, Homo sapiens
gagaccttttctctc

SEQ ID NO: 591222 - DNA, 15 bp, Homo sapiens
agaccttttctctcc

SEQ ID NO: 591223 - DNA, 15 bp, Homo sapiens
gaccttttctctccc

SEQ ID NO: 591224 - DNA, 15 bp, Homo sapiens
accttttctctccca

SEQ ID NO: 591225 - DNA, 15 bp, Homo sapiens
ccttttctctcccat

SEQ ID NO: 591226 - DNA, 15 bp, Homo sapiens
cttttctctcccata

SEQ ID NO: 591227 - DNA, 15 bp, Homo sapiens
ttttctctcccatac

SEQ ID NO: 591228 - DNA, 15 bp, Homo sapiens
tttctctcccatacc

SEQ ID NO: 591229 - DNA, 15 bp, Homo sapiens
ttctctcccatacca

SEQ ID NO: 591230 - DNA, 15 bp, Homo sapiens
tctctcccataccat

SEQ ID NO: 591231 - DNA, 15 bp, Homo sapiens
ctctcccataccatc

SEQ ID NO: 591232 - DNA, 15 bp, Homo sapiens
tctcccataccatca

SEQ ID NO: 591233 - DNA, 15 bp, Homo sapiens
ctcccataccatcac

SEQ ID NO: 591234 - DNA, 15 bp, Homo sapiens
tcccataccatcact

SEQ ID NO: 591235 - DNA, 15 bp, Homo sapiens
cccataccatcactg

SEQ ID NO: 591236 - DNA, 15 bp, Homo sapiens
ccataccatcactga

SEQ ID NO: 591237 - DNA, 15 bp, Homo sapiens
cataccatcactgag

SEQ ID NO: 591238 - DNA, 15 bp, Homo sapiens
ataccatcactgagt

SEQ ID NO: 591239 - DNA, 15 bp, Homo sapiens
taccatcactgagtg

SEQ ID NO: 591240 - DNA, 15 bp, Homo sapiens
accatcactgagtgg

SEQ ID NO: 591241 - DNA, 15 bp, Homo sapiens
ccatcactgagtggc

SEQ ID NO: 591242 - DNA, 15 bp, Homo sapiens
catcactgagtggct

SEQ ID NO: 591243 - DNA, 15 bp, Homo sapiens
atcactgagtggctt

SEQ ID NO: 591244 - DNA, 15 bp, Homo sapiens
tcactgagtggcttg

SEQ ID NO: 591245 - DNA, 15 bp, Homo sapiens
cactgagtggcttgt

SEQ ID NO: 591246 - DNA, 15 bp, Homo sapiens
actgagtggcttgtg

SEQ ID NO: 591247 - DNA, 15 bp, Homo sapiens
ctgagtggcttgtga

SEQ ID NO: 591248 - DNA, 15 bp, Homo sapiens
tgagtggcttgtgat

SEQ ID NO: 591249 - DNA, 15 bp, Homo sapiens
gagtggcttgtgatt

SEQ ID NO: 591250 - DNA, 15 bp, Homo sapiens
agtggcttgtgattc

SEQ ID NO: 591251 - DNA, 15 bp, Homo sapiens
gtggcttgtgattct

SEQ ID NO: 591252 - DNA, 15 bp, Homo sapiens
tggcttgtgattctg

SEQ ID NO: 591253 - DNA, 15 bp, Homo sapiens
ggcttgtgattctgg

SEQ ID NO: 591254 - DNA, 15 bp, Homo sapiens
gcttgtgattctggg

SEQ ID NO: 591255 - DNA, 15 bp, Homo sapiens
cttgtgattctggga

SEQ ID NO: 591256 - DNA, 15 bp, Homo sapiens
ttgtgattctgggat

SEQ ID NO: 591257 - DNA, 15 bp, Homo sapiens
tgtgattctgggatg

SEQ ID NO: 591258 - DNA, 15 bp, Homo sapiens
gtgattctgggatgg

SEQ ID NO: 591259 - DNA, 15 bp, Homo sapiens
tgattctgggatgga

SEQ ID NO: 591260 - DNA, 15 bp, Homo sapiens
gattctgggatggac

SEQ ID NO: 591261 - DNA, 15 bp, Homo sapiens
attctgggatggacc

SEQ ID NO: 591262 - DNA, 15 bp, Homo sapiens
ttctgggatggaccc

SEQ ID NO: 591263 - DNA, 15 bp, Homo sapiens
tctgggatggaccct

SEQ ID NO: 591264 - DNA, 15 bp, Homo sapiens
ctgggatggaccctc

SEQ ID NO: 591265 - DNA, 15 bp, Homo sapiens
tgggatggaccctcg

SEQ ID NO: 591266 - DNA, 15 bp, Homo sapiens
gggatggaccctcgc

SEQ ID NO: 591267 - DNA, 15 bp, Homo sapiens
ggatggaccctcgca

SEQ ID NO: 591268 - DNA, 15 bp, Homo sapiens
gatggaccctcgcag

SEQ ID NO: 591269 - DNA, 15 bp, Homo sapiens
atggaccctcgcagc

SEQ ID NO: 591270 - DNA, 15 bp, Homo sapiens
tggaccctcgcagca

SEQ ID NO: 591271 - DNA, 15 bp, Homo sapiens
ggaccctcgcagcag

SEQ ID NO: 591272 - DNA, 15 bp, Homo sapiens
gaccctcgcagcagg

SEQ ID NO: 591273 - DNA, 15 bp, Homo sapiens
accctcgcagcaggt

SEQ ID NO: 591274 - DNA, 15 bp, Homo sapiens
ccctcgcagcaggtg

SEQ ID NO: 591275 - DNA, 15 bp, Homo sapiens
cctcgcagcaggtgc

SEQ ID NO: 591276 - DNA, 15 bp, Homo sapiens
ctcgcagcaggtgca

SEQ ID NO: 591277 - DNA, 15 bp, Homo sapiens
tcgcagcaggtgcaa

SEQ ID NO: 591278 - DNA, 15 bp, Homo sapiens
cgcagcaggtgcaag

SEQ ID NO: 591279 - DNA, 15 bp, Homo sapiens
gcagcaggtgcaaga

SEQ ID NO: 591280 - DNA, 15 bp, Homo sapiens
cagcaggtgcaagag

SEQ ID NO: 591281 - DNA, 15 bp, Homo sapiens
agcaggtgcaagaga

SEQ ID NO: 591282 - DNA, 15 bp, Homo sapiens
gcaggtgcaagagac

SEQ ID NO: 591283 - DNA, 15 bp, Homo sapiens
caggtgcaagagaca

SEQ ID NO: 591284 - DNA, 15 bp, Homo sapiens
aggtgcaagagacag

SEQ ID NO: 591285 - DNA, 15 bp, Homo sapiens
ggtgcaagagacaga

SEQ ID NO: 591286 - DNA, 15 bp, Homo sapiens
gtgcaagagacagag

SEQ ID NO: 591287 - DNA, 15 bp, Homo sapiens
tgcaagagacagagc

SEQ ID NO: 591288 - DNA, 15 bp, Homo sapiens
gcaagagacagagcc

SEQ ID NO: 591289 - DNA, 15 bp, Homo sapiens
caagagacagagccc

SEQ ID NO: 591290 - DNA, 15 bp, Homo sapiens
aagagacagagcccc

SEQ ID NO: 591291 - DNA, 15 bp, Homo sapiens
agagacagagccccc

SEQ ID NO: 591292 - DNA, 15 bp, Homo sapiens
gagacagagccccca

SEQ ID NO: 591293 - DNA, 15 bp, Homo sapiens
agacagagcccccaa

SEQ ID NO: 591294 - DNA, 15 bp, Homo sapiens
gacagagcccccaag

SEQ ID NO: 591295 - DNA, 15 bp, Homo sapiens
acagagcccccaagc

SEQ ID NO: 591296 - DNA, 15 bp, Homo sapiens
cagagcccccaagcc

SEQ ID NO: 591297 - DNA, 15 bp, Homo sapiens
agagcccccaagcct

SEQ ID NO: 591298 - DNA, 15 bp, Homo sapiens
gagcccccaagcctc

SEQ ID NO: 591299 - DNA, 15 bp, Homo sapiens
agcccccaagcctct

SEQ ID NO: 591300 - DNA, 15 bp, Homo sapiens
gcccccaagcctctg

SEQ ID NO: 591301 - DNA, 15 bp, Homo sapiens
cccccaagcctctgc

SEQ ID NO: 591302 - DNA, 15 bp, Homo sapiens
ccccaagcctctgcc

SEQ ID NO: 591303 - DNA, 15 bp, Homo sapiens
cccaagcctctgccc

SEQ ID NO: 591304 - DNA, 15 bp, Homo sapiens
ccaagcctctgcccc

SEQ ID NO: 591305 - DNA, 15 bp, Homo sapiens
caagcctctgcccca

SEQ ID NO: 591306 - DNA, 15 bp, Homo sapiens
aagcctctgccccaa

SEQ ID NO: 591307 - DNA, 15 bp, Homo sapiens
agcctctgccccaag

SEQ ID NO: 591308 - DNA, 15 bp, Homo sapiens
gcctctgccccaagg

SEQ ID NO: 591309 - DNA, 15 bp, Homo sapiens
cctctgccccaaggg

SEQ ID NO: 591310 - DNA, 15 bp, Homo sapiens
ctctgccccaagggg

SEQ ID NO: 591311 - DNA, 15 bp, Homo sapiens
tctgccccaaggggc

SEQ ID NO: 591312 - DNA, 15 bp, Homo sapiens
ctgccccaaggggcc

SEQ ID NO: 591313 - DNA, 15 bp, Homo sapiens
tgccccaaggggccc

SEQ ID NO: 591314 - DNA, 15 bp, Homo sapiens
gccccaaggggccca

SEQ ID NO: 591315 - DNA, 15 bp, Homo sapiens
ccccaaggggcccac

SEQ ID NO: 591316 - DNA, 15 bp, Homo sapiens
cccaaggggcccaca

SEQ ID NO: 591317 - DNA, 15 bp, Homo sapiens
ccaaggggcccacaa

SEQ ID NO: 591318 - DNA, 15 bp, Homo sapiens
caaggggcccacaaa

SEQ ID NO: 591319 - DNA, 15 bp, Homo sapiens
aaggggcccacaaag

SEQ ID NO: 591320 - DNA, 15 bp, Homo sapiens
aggggcccacaaagg

SEQ ID NO: 591321 - DNA, 15 bp, Homo sapiens
ggggcccacaaaggg

SEQ ID NO: 591322 - DNA, 15 bp, Homo sapiens
gggcccacaaagggg

SEQ ID NO: 591323 - DNA, 15 bp, Homo sapiens
ggcccacaaagggga

SEQ ID NO: 591324 - DNA, 15 bp, Homo sapiens
gcccacaaaggggag

SEQ ID NO: 591325 - DNA, 15 bp, Homo sapiens
cccacaaaggggaga

SEQ ID NO: 591326 - DNA, 15 bp, Homo sapiens
ccacaaaggggagaa

SEQ ID NO: 591327 - DNA, 15 bp, Homo sapiens
cacaaaggggagaag

SEQ ID NO: 591328 - DNA, 15 bp, Homo sapiens
acaaaggggagaagg

SEQ ID NO: 591329 - DNA, 15 bp, Homo sapiens
caaaggggagaaggg

SEQ ID NO: 591330 - DNA, 15 bp, Homo sapiens
aaaggggagaagggc

SEQ ID NO: 591331 - DNA, 15 bp, Homo sapiens
aaggggagaagggcc

SEQ ID NO: 591332 - DNA, 15 bp, Homo sapiens
aggggagaagggcca

SEQ ID NO: 591333 - DNA, 15 bp, Homo sapiens
ggggagaagggccag

SEQ ID NO: 591334 - DNA, 15 bp, Homo sapiens
gggagaagggccagc

SEQ ID NO: 591335 - DNA, 15 bp, Homo sapiens
ggagaagggccagcc

SEQ ID NO: 591336 - DNA, 15 bp, Homo sapiens
gagaagggccagccc

SEQ ID NO: 591337 - DNA, 15 bp, Homo sapiens
agaagggccagccct

SEQ ID NO: 591338 - DNA, 15 bp, Homo sapiens
gaagggccagcccta

SEQ ID NO: 591339 - DNA, 15 bp, Homo sapiens
aagggccagccctac

SEQ ID NO: 591340 - DNA, 15 bp, Homo sapiens
agggccagccctaca

SEQ ID NO: 591341 - DNA, 15 bp, Homo sapiens
gggccagccctacat

SEQ ID NO: 591342 - DNA, 15 bp, Homo sapiens
ggccagccctacatc

SEQ ID NO: 591343 - DNA, 15 bp, Homo sapiens
gccagccctacatct

SEQ ID NO: 591344 - DNA, 15 bp, Homo sapiens
ccagccctacatctt

SEQ ID NO: 591345 - DNA, 15 bp, Homo sapiens
cagccctacatcttc

SEQ ID NO: 591346 - DNA, 15 bp, Homo sapiens
agccctacatcttca

SEQ ID NO: 591347 - DNA, 15 bp, Homo sapiens
gccctacatcttcag

SEQ ID NO: 591348 - DNA, 15 bp, Homo sapiens
ccctacatcttcagc

SEQ ID NO: 591349 - DNA, 15 bp, Homo sapiens
cctacatcttcagct

SEQ ID NO: 591350 - DNA, 15 bp, Homo sapiens
ctacatcttcagctc

SEQ ID NO: 591351 - DNA, 15 bp, Homo sapiens
tacatcttcagctcc

SEQ ID NO: 591352 - DNA, 15 bp, Homo sapiens
acatcttcagctccc

SEQ ID NO: 591353 - DNA, 15 bp, Homo sapiens
catcttcagctccca

SEQ ID NO: 591354 - DNA, 15 bp, Homo sapiens
atcttcagctcccat

SEQ ID NO: 591355 - DNA, 15 bp, Homo sapiens
tcttcagctcccata

SEQ ID NO: 591356 - DNA, 15 bp, Homo sapiens
cttcagctcccatag

SEQ ID NO: 591357 - DNA, 15 bp, Homo sapiens
ttcagctcccatagc

SEQ ID NO: 591358 - DNA, 15 bp, Homo sapiens
tcagctcccatagcg

SEQ ID NO: 591359 - DNA, 15 bp, Homo sapiens
cagctcccatagcgc

SEQ ID NO: 591360 - DNA, 15 bp, Homo sapiens
agctcccatagcgct

SEQ ID NO: 591361 - DNA, 15 bp, Homo sapiens
gctcccatagcgctg

SEQ ID NO: 591362 - DNA, 15 bp, Homo sapiens
ctcccatagcgctgg

SEQ ID NO: 591363 - DNA, 15 bp, Homo sapiens
tcccatagcgctggc

SEQ ID NO: 591364 - DNA, 15 bp, Homo sapiens
cccatagcgctggct

SEQ ID NO: 591365 - DNA, 15 bp, Homo sapiens
ccatagcgctggctc

SEQ ID NO: 591366 - DNA, 15 bp, Homo sapiens
catagcgctggctca

SEQ ID NO: 591367 - DNA, 15 bp, Homo sapiens
atagcgctggctcag

SEQ ID NO: 591368 - DNA, 15 bp, Homo sapiens
tagcgctggctcagg

SEQ ID NO: 591369 - DNA, 15 bp, Homo sapiens
agcgctggctcagga

SEQ ID NO: 591370 - DNA, 15 bp, Homo sapiens
gcgctggctcaggaa

SEQ ID NO: 591371 - DNA, 15 bp, Homo sapiens
cgctggctcaggaag

SEQ ID NO: 591372 - DNA, 15 bp, Homo sapiens
gctggctcaggaaga

SEQ ID NO: 591373 - DNA, 15 bp, Homo sapiens
ctggctcaggaagaa

SEQ ID NO: 591374 - DNA, 15 bp, Homo sapiens
tggctcaggaagaaa

SEQ ID NO: 591375 - DNA, 15 bp, Homo sapiens
ggctcaggaagaaac

SEQ ID NO: 591376 - DNA, 15 bp, Homo sapiens
gctcaggaagaaacc

SEQ ID NO: 591377 - DNA, 15 bp, Homo sapiens
ctcaggaagaaaccc

SEQ ID NO: 591378 - DNA, 15 bp, Homo sapiens
tcaggaagaaacccc

SEQ ID NO: 591379 - DNA, 15 bp, Homo sapiens
caggaagaaacccca

SEQ ID NO: 591380 - DNA, 15 bp, Homo sapiens
aggaagaaaccccaa

SEQ ID NO: 591381 - DNA, 15 bp, Homo sapiens
ggaagaaaccccaag

SEQ ID NO: 591382 - DNA, 15 bp, Homo sapiens
gaagaaaccccaagc

SEQ ID NO: 591383 - DNA, 15 bp, Homo sapiens
aagaaaccccaagca

SEQ ID NO: 591384 - DNA, 15 bp, Homo sapiens
agaaaccccaagcag

SEQ ID NO: 591385 - DNA, 15 bp, Homo sapiens
gaaaccccaagcagc

SEQ ID NO: 591386 - DNA, 15 bp, Homo sapiens
aaaccccaagcagca

SEQ ID NO: 591387 - DNA, 15 bp, Homo sapiens
aaccccaagcagcat

SEQ ID NO: 591388 - DNA, 15 bp, Homo sapiens
accccaagcagcatt

SEQ ID NO: 591389 - DNA, 15 bp, Homo sapiens
ccccaagcagcattc

SEQ ID NO: 591390 - DNA, 15 bp, Homo sapiens
cccaagcagcattca

SEQ ID NO: 591391 - DNA, 15 bp, Homo sapiens
ccaagcagcattcag

SEQ ID NO: 591392 - DNA, 15 bp, Homo sapiens
caagcagcattcagc

SEQ ID NO: 591393 - DNA, 15 bp, Homo sapiens
aagcagcattcagca

SEQ ID NO: 591394 - DNA, 15 bp, Homo sapiens
agcagcattcagcac

SEQ ID NO: 591395 - DNA, 15 bp, Homo sapiens
gcagcattcagcaca

SEQ ID NO: 591396 - DNA, 15 bp, Homo sapiens
cagcattcagcacac

SEQ ID NO: 591397 - DNA, 15 bp, Homo sapiens
agcattcagcacacc

SEQ ID NO: 591398 - DNA, 15 bp, Homo sapiens
gcattcagcacaccc

SEQ ID NO: 591399 - DNA, 15 bp, Homo sapiens
cattcagcacacccc

SEQ ID NO: 591400 - DNA, 15 bp, Homo sapiens
attcagcacacccca

SEQ ID NO: 591401 - DNA, 15 bp, Homo sapiens
ttcagcacaccccaa

SEQ ID NO: 591402 - DNA, 15 bp, Homo sapiens
tcagcacaccccaag

SEQ ID NO: 591403 - DNA, 15 bp, Homo sapiens
cagcacaccccaagg

SEQ ID NO: 591404 - DNA, 15 bp, Homo sapiens
agcacaccccaaggg

SEQ ID NO: 591405 - DNA, 15 bp, Homo sapiens
gcacaccccaaggga

SEQ ID NO: 591406 - DNA, 15 bp, Homo sapiens
cacaccccaagggac

SEQ ID NO: 591407 - DNA, 15 bp, Homo sapiens
acaccccaagggaca

SEQ ID NO: 591408 - DNA, 15 bp, Homo sapiens
caccccaagggacaa

SEQ ID NO: 591409 - DNA, 15 bp, Homo sapiens
accccaagggacaac

SEQ ID NO: 591410 - DNA, 15 bp, Homo sapiens
ccccaagggacaacc

SEQ ID NO: 591411 - DNA, 15 bp, Homo sapiens
cccaagggacaaccc

SEQ ID NO: 591412 - DNA, 15 bp, Homo sapiens
ccaagggacaacccc

SEQ ID NO: 591413 - DNA, 15 bp, Homo sapiens
caagggacaacccca

SEQ ID NO: 591414 - DNA, 15 bp, Homo sapiens
aagggacaaccccat

SEQ ID NO: 591415 - DNA, 15 bp, Homo sapiens
agggacaaccccatc

SEQ ID NO: 591416 - DNA, 15 bp, Homo sapiens
gggacaaccccatca

SEQ ID NO: 591417 - DNA, 15 bp, Homo sapiens
ggacaaccccatcat

SEQ ID NO: 591418 - DNA, 15 bp, Homo sapiens
gacaaccccatcata

SEQ ID NO: 591419 - DNA, 15 bp, Homo sapiens
acaaccccatcatat

SEQ ID NO: 591420 - DNA, 15 bp, Homo sapiens
caaccccatcatatg

SEQ ID NO: 591421 - DNA, 15 bp, Homo sapiens
aaccccatcatatga

SEQ ID NO: 591422 - DNA, 15 bp, Homo sapiens
accccatcatatgac

SEQ ID NO: 591423 - DNA, 15 bp, Homo sapiens
ccccatcatatgaca

SEQ ID NO: 591424 - DNA, 15 bp, Homo sapiens
cccatcatatgacat

SEQ ID NO: 591425 - DNA, 15 bp, Homo sapiens
ccatcatatgacatg

SEQ ID NO: 591426 - DNA, 15 bp, Homo sapiens
catcatatgacatgc

SEQ ID NO: 591427 - DNA, 15 bp, Homo sapiens
atcatatgacatgcc

SEQ ID NO: 591428 - DNA, 15 bp, Homo sapiens
tcatatgacatgcca

SEQ ID NO: 591429 - DNA, 15 bp, Homo sapiens
catatgacatgccac

SEQ ID NO: 591430 - DNA, 15 bp, Homo sapiens
atatgacatgccacc

SEQ ID NO: 591431 - DNA, 15 bp, Homo sapiens
tatgacatgccaccc

SEQ ID NO: 591432 - DNA, 15 bp, Homo sapiens
atgacatgccaccct

SEQ ID NO: 591433 - DNA, 15 bp, Homo sapiens
tgacatgccaccctc

SEQ ID NO: 591434 - DNA, 15 bp, Homo sapiens
gacatgccaccctct

SEQ ID NO: 591435 - DNA, 15 bp, Homo sapiens
acatgccaccctctc

SEQ ID NO: 591436 - DNA, 15 bp, Homo sapiens
catgccaccctctcc

SEQ ID NO: 591437 - DNA, 15 bp, Homo sapiens
atgccaccctctcca

SEQ ID NO: 591438 - DNA, 15 bp, Homo sapiens
tgccaccctctccat

SEQ ID NO: 591439 - DNA, 15 bp, Homo sapiens
gccaccctctccatg

SEQ ID NO: 591440 - DNA, 15 bp, Homo sapiens
ccaccctctccatgc

SEQ ID NO: 591441 - DNA, 15 bp, Homo sapiens
caccctctccatgcc

SEQ ID NO: 591442 - DNA, 15 bp, Homo sapiens
accctctccatgccc

SEQ ID NO: 591443 - DNA, 15 bp, Homo sapiens
ccctctccatgccca

SEQ ID NO: 591444 - DNA, 15 bp, Homo sapiens
cctctccatgcccaa

SEQ ID NO: 591445 - DNA, 15 bp, Homo sapiens
ctctccatgcccaac

SEQ ID NO: 591446 - DNA, 15 bp, Homo sapiens
tctccatgcccaacc

SEQ ID NO: 591447 - DNA, 15 bp, Homo sapiens
ctccatgcccaacct

SEQ ID NO: 591448 - DNA, 15 bp, Homo sapiens
tccatgcccaaccta

SEQ ID NO: 591449 - DNA, 15 bp, Homo sapiens
ccatgcccaacctaa

SEQ ID NO: 591450 - DNA, 15 bp, Homo sapiens
catgcccaacctaag

SEQ ID NO: 591451 - DNA, 15 bp, Homo sapiens
atgcccaacctaaga

SEQ ID NO: 591452 - DNA, 15 bp, Homo sapiens
tgcccaacctaagat

SEQ ID NO: 591453 - DNA, 15 bp, Homo sapiens
gcccaacctaagatt

SEQ ID NO: 591454 - DNA, 15 bp, Homo sapiens
cccaacctaagattg

SEQ ID NO: 591455 - DNA, 15 bp, Homo sapiens
ccaacctaagattgt

SEQ ID NO: 591456 - DNA, 15 bp, Homo sapiens
caacctaagattgtg

SEQ ID NO: 591457 - DNA, 15 bp, Homo sapiens
aacctaagattgtgt

SEQ ID NO: 591458 - DNA, 15 bp, Homo sapiens
acctaagattgtgtg

SEQ ID NO: 591459 - DNA, 15 bp, Homo sapiens
cctaagattgtgtgg

SEQ ID NO: 591460 - DNA, 15 bp, Homo sapiens
ctaagattgtgtggg

SEQ ID NO: 591461 - DNA, 15 bp, Homo sapiens
taagattgtgtgggt

SEQ ID NO: 591462 - DNA, 15 bp, Homo sapiens
aagattgtgtgggtt

SEQ ID NO: 591463 - DNA, 15 bp, Homo sapiens
agattgtgtgggttt

SEQ ID NO: 591464 - DNA, 15 bp, Homo sapiens
gattgtgtgggtttt

SEQ ID NO: 591465 - DNA, 15 bp, Homo sapiens
attgtgtgggttttt

SEQ ID NO: 591466 - DNA, 15 bp, Homo sapiens
ttgtgtgggtttttt

SEQ ID NO: 591467 - DNA, 15 bp, Homo sapiens
tgtgtgggtttttta

SEQ ID NO: 591468 - DNA, 15 bp, Homo sapiens
gtgtgggttttttaa

SEQ ID NO: 591469 - DNA, 15 bp, Homo sapiens
tgtgggttttttaat

SEQ ID NO: 591470 - DNA, 15 bp, Homo sapiens
gtgggttttttaatt

SEQ ID NO: 591471 - DNA, 15 bp, Homo sapiens
tgggttttttaatta

SEQ ID NO: 591472 - DNA, 15 bp, Homo sapiens
gggttttttaattaa

SEQ ID NO: 591473 - DNA, 15 bp, Homo sapiens
ggttttttaattaaa

SEQ ID NO: 591474 - DNA, 15 bp, Homo sapiens
gttttttaattaaaa

SEQ ID NO: 591475 - DNA, 15 bp, Homo sapiens
ttttttaattaaaaa

SEQ ID NO: 591476 - DNA, 15 bp, Homo sapiens
tttttaattaaaaat

SEQ ID NO: 591477 - DNA, 15 bp, Homo sapiens
ttttaattaaaaatg

SEQ ID NO: 591478 - DNA, 15 bp, Homo sapiens
tttaattaaaaatgt

SEQ ID NO: 591479 - DNA, 15 bp, Homo sapiens
ttaattaaaaatgtt

SEQ ID NO: 591480 - DNA, 15 bp, Homo sapiens
taattaaaaatgtta

SEQ ID NO: 591481 - DNA, 15 bp, Homo sapiens
aattaaaaatgttaa

SEQ ID NO: 591482 - DNA, 15 bp, Homo sapiens
attaaaaatgttaaa

SEQ ID NO: 591483 - DNA, 15 bp, Homo sapiens
ttaaaaatgttaaaa

SEQ ID NO: 591484 - DNA, 15 bp, Homo sapiens
taaaaatgttaaaag

SEQ ID NO: 591485 - DNA, 15 bp, Homo sapiens
aaaaatgttaaaagt

SEQ ID NO: 591486 - DNA, 15 bp, Homo sapiens
aaaatgttaaaagtt

SEQ ID NO: 591487 - DNA, 15 bp, Homo sapiens
aaatgttaaaagttt

SEQ ID NO: 591488 - DNA, 15 bp, Homo sapiens
aatgttaaaagtttt

SEQ ID NO: 591489 - DNA, 15 bp, Homo sapiens
atgttaaaagtttta

SEQ ID NO: 591490 - DNA, 15 bp, Homo sapiens
tgttaaaagttttaa

SEQ ID NO: 591491 - DNA, 15 bp, Homo sapiens
gttaaaagttttaaa

SEQ ID NO: 591492 - DNA, 15 bp, Homo sapiens
ttaaaagttttaaac

SEQ ID NO: 591493 - DNA, 15 bp, Homo sapiens
taaaagttttaaaca

SEQ ID NO: 591494 - DNA, 15 bp, Homo sapiens
aaaagttttaaacat

SEQ ID NO: 591495 - DNA, 15 bp, Homo sapiens
aaagttttaaacatg

SEQ ID NO: 591496 - DNA, 15 bp, Homo sapiens
ggtggcagtgagctg

SEQ ID NO: 591497 - DNA, 15 bp, Homo sapiens
gtggcagtgagctga

SEQ ID NO: 591498 - DNA, 15 bp, Homo sapiens
tggcagtgagctgag

SEQ ID NO: 591499 - DNA, 15 bp, Homo sapiens
ggcagtgagctgaga

SEQ ID NO: 591500 - DNA, 15 bp, Homo sapiens
tgagctgagatcgcg

SEQ ID NO: 591501 - DNA, 15 bp, Homo sapiens
gagctgagatcgcgc

SEQ ID NO: 591502 - DNA, 15 bp, Homo sapiens
agctgagatcgcgcc

SEQ ID NO: 591503 - DNA, 15 bp, Homo sapiens
gctgagatcgcgcca

SEQ ID NO: 591504 - DNA, 15 bp, Homo sapiens
ctgagatcgcgccac

SEQ ID NO: 591505 - DNA, 15 bp, Homo sapiens
tgagatcgcgccact

SEQ ID NO: 591506 - DNA, 15 bp, Homo sapiens
gagatcgcgccactg

SEQ ID NO: 591507 - DNA, 15 bp, Homo sapiens
agatcgcgccactgc

SEQ ID NO: 591508 - DNA, 15 bp, Homo sapiens
gatcgcgccactgca

SEQ ID NO: 591509 - DNA, 15 bp, Homo sapiens
tgcactccagcctgt

SEQ ID NO: 591510 - DNA, 15 bp, Homo sapiens
gcactccagcctgtg

SEQ ID NO: 591511 - DNA, 15 bp, Homo sapiens
cactccagcctgtgc

SEQ ID NO: 591512 - DNA, 15 bp, Homo sapiens
actccagcctgtgcg

SEQ ID NO: 591513 - DNA, 15 bp, Homo sapiens
ctccagcctgtgcga

SEQ ID NO: 591514 - DNA, 15 bp, Homo sapiens
tccagcctgtgcgag

SEQ ID NO: 591515 - DNA, 15 bp, Homo sapiens
ccagcctgtgcgaga

SEQ ID NO: 591516 - DNA, 15 bp, Homo sapiens
cagcctgtgcgagag

SEQ ID NO: 591517 - DNA, 15 bp, Homo sapiens
agcctgtgcgagagt

SEQ ID NO: 591518 - DNA, 15 bp, Homo sapiens
gcctgtgcgagagtg

SEQ ID NO: 591519 - DNA, 15 bp, Homo sapiens
cctgtgcgagagtga

SEQ ID NO: 591520 - DNA, 15 bp, Homo sapiens
ctgtgcgagagtgag

SEQ ID NO: 591521 - DNA, 15 bp, Homo sapiens
tgtgcgagagtgaga

SEQ ID NO: 591522 - DNA, 15 bp, Homo sapiens
gtgcgagagtgagac

SEQ ID NO: 591523 - DNA, 15 bp, Homo sapiens
tgcgagagtgagact

SEQ ID NO: 591524 - DNA, 15 bp, Homo sapiens
gcgagagtgagactc

SEQ ID NO: 591525 - DNA, 15 bp, Homo sapiens
cgagagtgagactct

SEQ ID NO: 591526 - DNA, 15 bp, Homo sapiens
gagagtgagactctg

SEQ ID NO: 591527 - DNA, 15 bp, Homo sapiens
agagtgagactctgt

SEQ ID NO: 591528 - DNA, 15 bp, Homo sapiens
tgagactctgtctca

SEQ ID NO: 591529 - DNA, 15 bp, Homo sapiens
gagactctgtctcaa

SEQ ID NO: 591530 - DNA, 15 bp, Homo sapiens
agactctgtctcaaa

SEQ ID NO: 591531 - DNA, 15 bp, Homo sapiens
gactctgtctcaaaa

SEQ ID NO: 591532 - DNA, 15 bp, Homo sapiens
ctctgtctcaaaaaa

SEQ ID NO: 591533 - DNA, 15 bp, Homo sapiens
tctgtctcaaaaaaa

SEQ ID NO: 591534 - DNA, 15 bp, Homo sapiens
ctgtctcaaaaaaaa

SEQ ID NO: 591535 - DNA, 15 bp, Homo sapiens
tgtctcaaaaaaaaa

SEQ ID NO: 591536 - DNA, 15 bp, Homo sapiens
tcaaaaaaaaaaaag

SEQ ID NO: 591537 - DNA, 15 bp, Homo sapiens
caaaaaaaaaaaagg

SEQ ID NO: 591538 - DNA, 15 bp, Homo sapiens
aaaaaaaaaaaaggg

SEQ ID NO: 591539 - DNA, 15 bp, Homo sapiens
aaaaaaaaaaaggga

SEQ ID NO: 591540 - DNA, 15 bp, Homo sapiens
aaaaaaaaaagggaa

SEQ ID NO: 591541 - DNA, 15 bp, Homo sapiens
aaaaaaaaagggaat

SEQ ID NO: 591542 - DNA, 15 bp, Homo sapiens
aaaaaaaagggaatt

SEQ ID NO: 591543 - DNA, 15 bp, Homo sapiens
aaaaaaagggaattt

SEQ ID NO: 591544 - DNA, 15 bp, Homo sapiens
aaaaaagggaattta

SEQ ID NO: 591545 - DNA, 15 bp, Homo sapiens
aaaaagggaatttaa

SEQ ID NO: 591546 - DNA, 15 bp, Homo sapiens
aaaagggaatttaag

SEQ ID NO: 591547 - DNA, 15 bp, Homo sapiens
aaagggaatttaaga

SEQ ID NO: 591548 - DNA, 15 bp, Homo sapiens
aagggaatttaagaa

SEQ ID NO: 591549 - DNA, 15 bp, Homo sapiens
agggaatttaagaaa

SEQ ID NO: 591550 - DNA, 15 bp, Homo sapiens
gggaatttaagaaat

SEQ ID NO: 591551 - DNA, 15 bp, Homo sapiens
ggaatttaagaaatt

SEQ ID NO: 591552 - DNA, 15 bp, Homo sapiens
gaatttaagaaattt

SEQ ID NO: 591553 - DNA, 15 bp, Homo sapiens
aatttaagaaattta

SEQ ID NO: 591554 - DNA, 15 bp, Homo sapiens
atttaagaaatttaa

SEQ ID NO: 591555 - DNA, 15 bp, Homo sapiens
tttaagaaatttaaa

SEQ ID NO: 591556 - DNA, 15 bp, Homo sapiens
ttaagaaatttaaaa

SEQ ID NO: 591557 - DNA, 15 bp, Homo sapiens
taagaaatttaaaag

SEQ ID NO: 591558 - DNA, 15 bp, Homo sapiens
aagaaatttaaaaga

SEQ ID NO: 591559 - DNA, 15 bp, Homo sapiens
agaaatttaaaagaa

SEQ ID NO: 591560 - DNA, 15 bp, Homo sapiens
gaaatttaaaagaaa

SEQ ID NO: 591561 - DNA, 15 bp, Homo sapiens
aaatttaaaagaaaa

SEQ ID NO: 591562 - DNA, 15 bp, Homo sapiens
aatttaaaagaaaac

SEQ ID NO: 591563 - DNA, 15 bp, Homo sapiens
atttaaaagaaaact

SEQ ID NO: 591564 - DNA, 15 bp, Homo sapiens
tttaaaagaaaactc

SEQ ID NO: 591565 - DNA, 15 bp, Homo sapiens
ttaaaagaaaactct

SEQ ID NO: 591566 - DNA, 15 bp, Homo sapiens
taaaagaaaactctt

SEQ ID NO: 591567 - DNA, 15 bp, Homo sapiens
aaaagaaaactcttg

SEQ ID NO: 591568 - DNA, 15 bp, Homo sapiens
aaagaaaactcttgt

SEQ ID NO: 591569 - DNA, 15 bp, Homo sapiens
aagaaaactcttgtt

SEQ ID NO: 591570 - DNA, 15 bp, Homo sapiens
agaaaactcttgtta

SEQ ID NO: 591571 - DNA, 15 bp, Homo sapiens
gaaaactcttgttat

SEQ ID NO: 591572 - DNA, 15 bp, Homo sapiens
aaaactcttgttata

SEQ ID NO: 591573 - DNA, 15 bp, Homo sapiens
aaactcttgttatat

SEQ ID NO: 591574 - DNA, 15 bp, Homo sapiens
aactcttgttatata

SEQ ID NO: 591575 - DNA, 15 bp, Homo sapiens
actcttgttatataa

SEQ ID NO: 591576 - DNA, 15 bp, Homo sapiens
ctcttgttatataaa

SEQ ID NO: 591577 - DNA, 15 bp, Homo sapiens
tcttgttatataaaa

SEQ ID NO: 591578 - DNA, 15 bp, Homo sapiens
cttgttatataaaaa

SEQ ID NO: 591579 - DNA, 15 bp, Homo sapiens
ttgttatataaaaag

SEQ ID NO: 591580 - DNA, 15 bp, Homo sapiens
tgttatataaaaagg

SEQ ID NO: 591581 - DNA, 15 bp, Homo sapiens
gttatataaaaaggg

SEQ ID NO: 591582 - DNA, 15 bp, Homo sapiens
ttatataaaaagggt

SEQ ID NO: 591583 - DNA, 15 bp, Homo sapiens
tatataaaaagggta

SEQ ID NO: 591584 - DNA, 15 bp, Homo sapiens
atataaaaagggtat

SEQ ID NO: 591585 - DNA, 15 bp, Homo sapiens
tataaaaagggtatt

SEQ ID NO: 591586 - DNA, 15 bp, Homo sapiens
ataaaaagggtattg

SEQ ID NO: 591587 - DNA, 15 bp, Homo sapiens
taaaaagggtattgg

SEQ ID NO: 591588 - DNA, 15 bp, Homo sapiens
aaaaagggtattggg

SEQ ID NO: 591589 - DNA, 15 bp, Homo sapiens
aaaagggtattgggt

SEQ ID NO: 591590 - DNA, 15 bp, Homo sapiens
aaagggtattgggtc

SEQ ID NO: 591591 - DNA, 15 bp, Homo sapiens
aagggtattgggtct

SEQ ID NO: 591592 - DNA, 15 bp, Homo sapiens
agggtattgggtctg

SEQ ID NO: 591593 - DNA, 15 bp, Homo sapiens
gggtattgggtctga

SEQ ID NO: 591594 - DNA, 15 bp, Homo sapiens
ggtattgggtctgac

SEQ ID NO: 591595 - DNA, 15 bp, Homo sapiens
gtattgggtctgaca

SEQ ID NO: 591596 - DNA, 15 bp, Homo sapiens
tattgggtctgacag

SEQ ID NO: 591597 - DNA, 15 bp, Homo sapiens
attgggtctgacaga

SEQ ID NO: 591598 - DNA, 15 bp, Homo sapiens
ttgggtctgacagat

SEQ ID NO: 591599 - DNA, 15 bp, Homo sapiens
tgggtctgacagata

SEQ ID NO: 591600 - DNA, 15 bp, Homo sapiens
gggtctgacagataa

SEQ ID NO: 591601 - DNA, 15 bp, Homo sapiens
ggtctgacagataag

SEQ ID NO: 591602 - DNA, 15 bp, Homo sapiens
gtctgacagataaga

SEQ ID NO: 591603 - DNA, 15 bp, Homo sapiens
tctgacagataagag

SEQ ID NO: 591604 - DNA, 15 bp, Homo sapiens
ctgacagataagagc

SEQ ID NO: 591605 - DNA, 15 bp, Homo sapiens
tgacagataagagct

SEQ ID NO: 591606 - DNA, 15 bp, Homo sapiens
gacagataagagctc

SEQ ID NO: 591607 - DNA, 15 bp, Homo sapiens
acagataagagctcc

SEQ ID NO: 591608 - DNA, 15 bp, Homo sapiens
cagataagagctcct

SEQ ID NO: 591609 - DNA, 15 bp, Homo sapiens
agataagagctcctg

SEQ ID NO: 591610 - DNA, 15 bp, Homo sapiens
gataagagctcctgc

SEQ ID NO: 591611 - DNA, 15 bp, Homo sapiens
ataagagctcctgca

SEQ ID NO: 591612 - DNA, 15 bp, Homo sapiens
taagagctcctgcac

SEQ ID NO: 591613 - DNA, 15 bp, Homo sapiens
aagagctcctgcact

SEQ ID NO: 591614 - DNA, 15 bp, Homo sapiens
agagctcctgcactc

SEQ ID NO: 591615 - DNA, 15 bp, Homo sapiens
gagctcctgcactct

SEQ ID NO: 591616 - DNA, 15 bp, Homo sapiens
agctcctgcactcta

SEQ ID NO: 591617 - DNA, 15 bp, Homo sapiens
gctcctgcactctac

SEQ ID NO: 591618 - DNA, 15 bp, Homo sapiens
ctcctgcactctacc

SEQ ID NO: 591619 - DNA, 15 bp, Homo sapiens
tcctgcactctacca

SEQ ID NO: 591620 - DNA, 15 bp, Homo sapiens
cctgcactctaccag

SEQ ID NO: 591621 - DNA, 15 bp, Homo sapiens
ctgcactctaccagc

SEQ ID NO: 591622 - DNA, 15 bp, Homo sapiens
tgcactctaccagcc

SEQ ID NO: 591623 - DNA, 15 bp, Homo sapiens
gcactctaccagcca

SEQ ID NO: 591624 - DNA, 15 bp, Homo sapiens
cactctaccagccag

SEQ ID NO: 591625 - DNA, 15 bp, Homo sapiens
actctaccagccagc

SEQ ID NO: 591626 - DNA, 15 bp, Homo sapiens
ctctaccagccagct

SEQ ID NO: 591627 - DNA, 15 bp, Homo sapiens
tctaccagccagcta

SEQ ID NO: 591628 - DNA, 15 bp, Homo sapiens
ctaccagccagctac

SEQ ID NO: 591629 - DNA, 15 bp, Homo sapiens
taccagccagctact

SEQ ID NO: 591630 - DNA, 15 bp, Homo sapiens
accagccagctactg

SEQ ID NO: 591631 - DNA, 15 bp, Homo sapiens
ccagccagctactga

SEQ ID NO: 591632 - DNA, 15 bp, Homo sapiens
cagccagctactgac

SEQ ID NO: 591633 - DNA, 15 bp, Homo sapiens
agccagctactgaca

SEQ ID NO: 591634 - DNA, 15 bp, Homo sapiens
gccagctactgacag

SEQ ID NO: 591635 - DNA, 15 bp, Homo sapiens
ccagctactgacaga

SEQ ID NO: 591636 - DNA, 15 bp, Homo sapiens
cagctactgacagac

SEQ ID NO: 591637 - DNA, 15 bp, Homo sapiens
agctactgacagaca

SEQ ID NO: 591638 - DNA, 15 bp, Homo sapiens
gctactgacagacat

SEQ ID NO: 591639 - DNA, 15 bp, Homo sapiens
ctactgacagacata

SEQ ID NO: 591640 - DNA, 15 bp, Homo sapiens
tactgacagacatag

SEQ ID NO: 591641 - DNA, 15 bp, Homo sapiens
actgacagacatagg

SEQ ID NO: 591642 - DNA, 15 bp, Homo sapiens
ctgacagacataggt

SEQ ID NO: 591643 - DNA, 15 bp, Homo sapiens
tgacagacataggtc

SEQ ID NO: 591644 - DNA, 15 bp, Homo sapiens
gacagacataggtct

SEQ ID NO: 591645 - DNA, 15 bp, Homo sapiens
acagacataggtctg

SEQ ID NO: 591646 - DNA, 15 bp, Homo sapiens
cagacataggtctgg

SEQ ID NO: 591647 - DNA, 15 bp, Homo sapiens
agacataggtctggc

SEQ ID NO: 591648 - DNA, 15 bp, Homo sapiens
gacataggtctggct

SEQ ID NO: 591649 - DNA, 15 bp, Homo sapiens
acataggtctggctc

SEQ ID NO: 591650 - DNA, 15 bp, Homo sapiens
cataggtctggctcc

SEQ ID NO: 591651 - DNA, 15 bp, Homo sapiens
ataggtctggctcca

SEQ ID NO: 591652 - DNA, 15 bp, Homo sapiens
taggtctggctccag

SEQ ID NO: 591653 - DNA, 15 bp, Homo sapiens
aggtctggctccagt

SEQ ID NO: 591654 - DNA, 15 bp, Homo sapiens
ggtctggctccagtg

SEQ ID NO: 591655 - DNA, 15 bp, Homo sapiens
gtctggctccagtgg

SEQ ID NO: 591656 - DNA, 15 bp, Homo sapiens
tctggctccagtgga

SEQ ID NO: 591657 - DNA, 15 bp, Homo sapiens
ctggctccagtggag

SEQ ID NO: 591658 - DNA, 15 bp, Homo sapiens
tggctccagtggagg

SEQ ID NO: 591659 - DNA, 15 bp, Homo sapiens
ggctccagtggaggg

SEQ ID NO: 591660 - DNA, 15 bp, Homo sapiens
gctccagtggagggg

SEQ ID NO: 591661 - DNA, 15 bp, Homo sapiens
ctccagtggaggggc

SEQ ID NO: 591662 - DNA, 15 bp, Homo sapiens
tccagtggaggggca

SEQ ID NO: 591663 - DNA, 15 bp, Homo sapiens
ccagtggaggggcag

SEQ ID NO: 591664 - DNA, 15 bp, Homo sapiens
cagtggaggggcagc

SEQ ID NO: 591665 - DNA, 15 bp, Homo sapiens
agtggaggggcagca

SEQ ID NO: 591666 - DNA, 15 bp, Homo sapiens
gtggaggggcagcag

SEQ ID NO: 591667 - DNA, 15 bp, Homo sapiens
tggaggggcagcagc

SEQ ID NO: 591668 - DNA, 15 bp, Homo sapiens
ggaggggcagcagcc

SEQ ID NO: 591669 - DNA, 15 bp, Homo sapiens
gaggggcagcagcca

SEQ ID NO: 591670 - DNA, 15 bp, Homo sapiens
aggggcagcagccag

SEQ ID NO: 591671 - DNA, 15 bp, Homo sapiens
ggggcagcagccagt

SEQ ID NO: 591672 - DNA, 15 bp, Homo sapiens
gggcagcagccagtg

SEQ ID NO: 591673 - DNA, 15 bp, Homo sapiens
ggcagcagccagtga

SEQ ID NO: 591674 - DNA, 15 bp, Homo sapiens
gcagcagccagtgag

SEQ ID NO: 591675 - DNA, 15 bp, Homo sapiens
cagcagccagtgagc

SEQ ID NO: 591676 - DNA, 15 bp, Homo sapiens
agcagccagtgagcc

SEQ ID NO: 591677 - DNA, 15 bp, Homo sapiens
gcagccagtgagccc

SEQ ID NO: 591678 - DNA, 15 bp, Homo sapiens
cagccagtgagccca

SEQ ID NO: 591679 - DNA, 15 bp, Homo sapiens
agccagtgagcccag

SEQ ID NO: 591680 - DNA, 15 bp, Homo sapiens
gccagtgagcccagc

SEQ ID NO: 591681 - DNA, 15 bp, Homo sapiens
ccagtgagcccagcc

SEQ ID NO: 591682 - DNA, 15 bp, Homo sapiens
cagtgagcccagcct

SEQ ID NO: 591683 - DNA, 15 bp, Homo sapiens
agtgagcccagcctg

SEQ ID NO: 591684 - DNA, 15 bp, Homo sapiens
gtgagcccagcctgg

SEQ ID NO: 591685 - DNA, 15 bp, Homo sapiens
tgagcccagcctggg

SEQ ID NO: 591686 - DNA, 15 bp, Homo sapiens
gagcccagcctgggg

SEQ ID NO: 591687 - DNA, 15 bp, Homo sapiens
agcccagcctggggt

SEQ ID NO: 591688 - DNA, 15 bp, Homo sapiens
gcccagcctggggtg

SEQ ID NO: 591689 - DNA, 15 bp, Homo sapiens
cccagcctggggtgg

SEQ ID NO: 591690 - DNA, 15 bp, Homo sapiens
ccagcctggggtggc

SEQ ID NO: 591691 - DNA, 15 bp, Homo sapiens
cagcctggggtggcc

SEQ ID NO: 591692 - DNA, 15 bp, Homo sapiens
agcctggggtggccc

SEQ ID NO: 591693 - DNA, 15 bp, Homo sapiens
gcctggggtggccca

SEQ ID NO: 591694 - DNA, 15 bp, Homo sapiens
cctggggtggcccac

SEQ ID NO: 591695 - DNA, 15 bp, Homo sapiens
ctggggtggcccact

SEQ ID NO: 591696 - DNA, 15 bp, Homo sapiens
tggggtggcccactc

SEQ ID NO: 591697 - DNA, 15 bp, Homo sapiens
ggggtggcccactcc

SEQ ID NO: 591698 - DNA, 15 bp, Homo sapiens
gggtggcccactcct

SEQ ID NO: 591699 - DNA, 15 bp, Homo sapiens
ggtggcccactcctg

SEQ ID NO: 591700 - DNA, 15 bp, Homo sapiens
gtggcccactcctgc

SEQ ID NO: 591701 - DNA, 15 bp, Homo sapiens
tggcccactcctgct

SEQ ID NO: 591702 - DNA, 15 bp, Homo sapiens
ggcccactcctgctg

SEQ ID NO: 591703 - DNA, 15 bp, Homo sapiens
gcccactcctgctgc

SEQ ID NO: 591704 - DNA, 15 bp, Homo sapiens
cccactcctgctgcc

SEQ ID NO: 591705 - DNA, 15 bp, Homo sapiens
ccactcctgctgcct

SEQ ID NO: 591706 - DNA, 15 bp, Homo sapiens
cactcctgctgcctc

SEQ ID NO: 591707 - DNA, 15 bp, Homo sapiens
actcctgctgcctcc

SEQ ID NO: 591708 - DNA, 15 bp, Homo sapiens
ctcctgctgcctcca

SEQ ID NO: 591709 - DNA, 15 bp, Homo sapiens
tcctgctgcctccag

SEQ ID NO: 591710 - DNA, 15 bp, Homo sapiens
cctgctgcctccagg

SEQ ID NO: 591711 - DNA, 15 bp, Homo sapiens
ctgctgcctccagga

SEQ ID NO: 591712 - DNA, 15 bp, Homo sapiens
tgctgcctccaggat

SEQ ID NO: 591713 - DNA, 15 bp, Homo sapiens
gctgcctccaggatg

SEQ ID NO: 591714 - DNA, 15 bp, Homo sapiens
ctgcctccaggatgt

SEQ ID NO: 591715 - DNA, 15 bp, Homo sapiens
tgcctccaggatgtc

SEQ ID NO: 591716 - DNA, 15 bp, Homo sapiens
gcctccaggatgtcc

SEQ ID NO: 591717 - DNA, 15 bp, Homo sapiens
cctccaggatgtccc

SEQ ID NO: 591718 - DNA, 15 bp, Homo sapiens
ctccaggatgtcccc

SEQ ID NO: 591719 - DNA, 15 bp, Homo sapiens
tccaggatgtcccct

SEQ ID NO: 591720 - DNA, 15 bp, Homo sapiens
ccaggatgtcccctg

SEQ ID NO: 591721 - DNA, 15 bp, Homo sapiens
caggatgtcccctgt

SEQ ID NO: 591722 - DNA, 15 bp, Homo sapiens
aggatgtcccctgtt

SEQ ID NO: 591723 - DNA, 15 bp, Homo sapiens
ggatgtcccctgttt

SEQ ID NO: 591724 - DNA, 15 bp, Homo sapiens
gatgtcccctgtttc

SEQ ID NO: 591725 - DNA, 15 bp, Homo sapiens
atgtcccctgtttcc

SEQ ID NO: 591726 - DNA, 15 bp, Homo sapiens
tgtcccctgtttccc

SEQ ID NO: 591727 - DNA, 15 bp, Homo sapiens
gtcccctgtttcccc

SEQ ID NO: 591728 - DNA, 15 bp, Homo sapiens
tcccctgtttcccca

SEQ ID NO: 591729 - DNA, 15 bp, Homo sapiens
cccctgtttccccag

SEQ ID NO: 591730 - DNA, 15 bp, Homo sapiens
ccctgtttccccagc

SEQ ID NO: 591731 - DNA, 15 bp, Homo sapiens
cctgtttccccagcc

SEQ ID NO: 591732 - DNA, 15 bp, Homo sapiens
ctgtttccccagccc

SEQ ID NO: 591733 - DNA, 15 bp, Homo sapiens
tgtttccccagcccc

SEQ ID NO: 591734 - DNA, 15 bp, Homo sapiens
gtttccccagcccct

SEQ ID NO: 591735 - DNA, 15 bp, Homo sapiens
tttccccagcccctc

SEQ ID NO: 591736 - DNA, 15 bp, Homo sapiens
ttccccagcccctct

SEQ ID NO: 591737 - DNA, 15 bp, Homo sapiens
tccccagcccctctg

SEQ ID NO: 591738 - DNA, 15 bp, Homo sapiens
ccccagcccctctgc

SEQ ID NO: 591739 - DNA, 15 bp, Homo sapiens
cccagcccctctgct

SEQ ID NO: 591740 - DNA, 15 bp, Homo sapiens
ccagcccctctgctg

SEQ ID NO: 591741 - DNA, 15 bp, Homo sapiens
cagcccctctgctgt

SEQ ID NO: 591742 - DNA, 15 bp, Homo sapiens
agcccctctgctgtg

SEQ ID NO: 591743 - DNA, 15 bp, Homo sapiens
gcccctctgctgtgc

SEQ ID NO: 591744 - DNA, 15 bp, Homo sapiens
cccctctgctgtgcc

SEQ ID NO: 591745 - DNA, 15 bp, Homo sapiens
ccctctgctgtgccc

SEQ ID NO: 591746 - DNA, 15 bp, Homo sapiens
cctctgctgtgccct

SEQ ID NO: 591747 - DNA, 15 bp, Homo sapiens
ctctgctgtgccctc

SEQ ID NO: 591748 - DNA, 15 bp, Homo sapiens
tctgctgtgccctcg

SEQ ID NO: 591749 - DNA, 15 bp, Homo sapiens
ctgctgtgccctcgg

SEQ ID NO: 591750 - DNA, 15 bp, Homo sapiens
tgctgtgccctcggc

SEQ ID NO: 591751 - DNA, 15 bp, Homo sapiens
gctgtgccctcggcc

SEQ ID NO: 591752 - DNA, 15 bp, Homo sapiens
ctgtgccctcggccc

SEQ ID NO: 591753 - DNA, 15 bp, Homo sapiens
tgtgccctcggcccc

SEQ ID NO: 591754 - DNA, 15 bp, Homo sapiens
gtgccctcggcccca

SEQ ID NO: 591755 - DNA, 15 bp, Homo sapiens
tgccctcggccccag

SEQ ID NO: 591756 - DNA, 15 bp, Homo sapiens
gccctcggccccaga

SEQ ID NO: 591757 - DNA, 15 bp, Homo sapiens
ccctcggccccagaa

SEQ ID NO: 591758 - DNA, 15 bp, Homo sapiens
cctcggccccagaag

SEQ ID NO: 591759 - DNA, 15 bp, Homo sapiens
ctcggccccagaagc

SEQ ID NO: 591760 - DNA, 15 bp, Homo sapiens
tcggccccagaagct

SEQ ID NO: 591761 - DNA, 15 bp, Homo sapiens
cggccccagaagctg

SEQ ID NO: 591762 - DNA, 15 bp, Homo sapiens
ggccccagaagctgg

SEQ ID NO: 591763 - DNA, 15 bp, Homo sapiens
gccccagaagctggc

SEQ ID NO: 591764 - DNA, 15 bp, Homo sapiens
ccccagaagctggcg

SEQ ID NO: 591765 - DNA, 15 bp, Homo sapiens
cccagaagctggcga

SEQ ID NO: 591766 - DNA, 15 bp, Homo sapiens
ccagaagctggcgag

SEQ ID NO: 591767 - DNA, 15 bp, Homo sapiens
cagaagctggcgaga

SEQ ID NO: 591768 - DNA, 15 bp, Homo sapiens
agaagctggcgagac

SEQ ID NO: 591769 - DNA, 15 bp, Homo sapiens
gaagctggcgagact

SEQ ID NO: 591770 - DNA, 15 bp, Homo sapiens
aagctggcgagactg

SEQ ID NO: 591771 - DNA, 15 bp, Homo sapiens
agctggcgagactgc

SEQ ID NO: 591772 - DNA, 15 bp, Homo sapiens
gctggcgagactgct

SEQ ID NO: 591773 - DNA, 15 bp, Homo sapiens
ctggcgagactgctt

SEQ ID NO: 591774 - DNA, 15 bp, Homo sapiens
tggcgagactgcttc

SEQ ID NO: 591775 - DNA, 15 bp, Homo sapiens
ggcgagactgcttct

SEQ ID NO: 591776 - DNA, 15 bp, Homo sapiens
gcgagactgcttctc

SEQ ID NO: 591777 - DNA, 15 bp, Homo sapiens
cgagactgcttctct

SEQ ID NO: 591778 - DNA, 15 bp, Homo sapiens
gagactgcttctctg

SEQ ID NO: 591779 - DNA, 15 bp, Homo sapiens
agactgcttctctgg

SEQ ID NO: 591780 - DNA, 15 bp, Homo sapiens
gactgcttctctgga

SEQ ID NO: 591781 - DNA, 15 bp, Homo sapiens
actgcttctctggaa

SEQ ID NO: 591782 - DNA, 15 bp, Homo sapiens
ctgcttctctggaac

SEQ ID NO: 591783 - DNA, 15 bp, Homo sapiens
tgcttctctggaaca

SEQ ID NO: 591784 - DNA, 15 bp, Homo sapiens
gcttctctggaacag

SEQ ID NO: 591785 - DNA, 15 bp, Homo sapiens
cttctctggaacagc

SEQ ID NO: 591786 - DNA, 15 bp, Homo sapiens
ttctctggaacagca

SEQ ID NO: 591787 - DNA, 15 bp, Homo sapiens
tctctggaacagcat

SEQ ID NO: 591788 - DNA, 15 bp, Homo sapiens
ctctggaacagcatc

SEQ ID NO: 591789 - DNA, 15 bp, Homo sapiens
tctggaacagcatca

SEQ ID NO: 591790 - DNA, 15 bp, Homo sapiens
ctggaacagcatcac

SEQ ID NO: 591791 - DNA, 15 bp, Homo sapiens
tggaacagcatcacg

SEQ ID NO: 591792 - DNA, 15 bp, Homo sapiens
ggaacagcatcacgc

SEQ ID NO: 591793 - DNA, 15 bp, Homo sapiens
gaacagcatcacgca

SEQ ID NO: 591794 - DNA, 15 bp, Homo sapiens
aacagcatcacgcag

SEQ ID NO: 591795 - DNA, 15 bp, Homo sapiens
acagcatcacgcagg

SEQ ID NO: 591796 - DNA, 15 bp, Homo sapiens
cagcatcacgcaggc

SEQ ID NO: 591797 - DNA, 15 bp, Homo sapiens
agcatcacgcaggcc

SEQ ID NO: 591798 - DNA, 15 bp, Homo sapiens
gcatcacgcaggcct

SEQ ID NO: 591799 - DNA, 15 bp, Homo sapiens
catcacgcaggcctg

SEQ ID NO: 591800 - DNA, 15 bp, Homo sapiens
atcacgcaggcctgc

SEQ ID NO: 591801 - DNA, 15 bp, Homo sapiens
tcacgcaggcctgcc

SEQ ID NO: 591802 - DNA, 15 bp, Homo sapiens
cacgcaggcctgccc

SEQ ID NO: 591803 - DNA, 15 bp, Homo sapiens
acgcaggcctgccca

SEQ ID NO: 591804 - DNA, 15 bp, Homo sapiens
cgcaggcctgcccat

SEQ ID NO: 591805 - DNA, 15 bp, Homo sapiens
gcaggcctgcccatc

SEQ ID NO: 591806 - DNA, 15 bp, Homo sapiens
caggcctgcccatcg

SEQ ID NO: 591807 - DNA, 15 bp, Homo sapiens
aggcctgcccatcgg

SEQ ID NO: 591808 - DNA, 15 bp, Homo sapiens
ggcctgcccatcggc

SEQ ID NO: 591809 - DNA, 15 bp, Homo sapiens
gcctgcccatcggcc

SEQ ID NO: 591810 - DNA, 15 bp, Homo sapiens
cctgcccatcggccc

SEQ ID NO: 591811 - DNA, 15 bp, Homo sapiens
ctgcccatcggccca

SEQ ID NO: 591812 - DNA, 15 bp, Homo sapiens
tgcccatcggcccac

SEQ ID NO: 591813 - DNA, 15 bp, Homo sapiens
gcccatcggcccact

SEQ ID NO: 591814 - DNA, 15 bp, Homo sapiens
cccatcggcccactg

SEQ ID NO: 591815 - DNA, 15 bp, Homo sapiens
ccatcggcccactgt

SEQ ID NO: 591816 - DNA, 15 bp, Homo sapiens
catcggcccactgtg

SEQ ID NO: 591817 - DNA, 15 bp, Homo sapiens
atcggcccactgtgc

SEQ ID NO: 591818 - DNA, 15 bp, Homo sapiens
tcggcccactgtgca

SEQ ID NO: 591819 - DNA, 15 bp, Homo sapiens
cggcccactgtgcac

SEQ ID NO: 591820 - DNA, 15 bp, Homo sapiens
ggcccactgtgcacc

SEQ ID NO: 591821 - DNA, 15 bp, Homo sapiens
gcccactgtgcacca

SEQ ID NO: 591822 - DNA, 15 bp, Homo sapiens
cccactgtgcaccag

SEQ ID NO: 591823 - DNA, 15 bp, Homo sapiens
ccactgtgcaccagg

SEQ ID NO: 591824 - DNA, 15 bp, Homo sapiens
cactgtgcaccaggc

SEQ ID NO: 591825 - DNA, 15 bp, Homo sapiens
actgtgcaccaggcc

SEQ ID NO: 591826 - DNA, 15 bp, Homo sapiens
ctgtgcaccaggcct

SEQ ID NO: 591827 - DNA, 15 bp, Homo sapiens
tgtgcaccaggcctt

SEQ ID NO: 591828 - DNA, 15 bp, Homo sapiens
gtgcaccaggccttc

SEQ ID NO: 591829 - DNA, 15 bp, Homo sapiens
tgcaccaggccttct

SEQ ID NO: 591830 - DNA, 15 bp, Homo sapiens
gcaccaggccttctg

SEQ ID NO: 591831 - DNA, 15 bp, Homo sapiens
caccaggccttctgg

SEQ ID NO: 591832 - DNA, 15 bp, Homo sapiens
accaggccttctggg

SEQ ID NO: 591833 - DNA, 15 bp, Homo sapiens
ccaggccttctgggg

SEQ ID NO: 591834 - DNA, 15 bp, Homo sapiens
caggccttctgggga

SEQ ID NO: 591835 - DNA, 15 bp, Homo sapiens
aggccttctggggat

SEQ ID NO: 591836 - DNA, 15 bp, Homo sapiens
ggccttctggggata

SEQ ID NO: 591837 - DNA, 15 bp, Homo sapiens
gccttctggggatac

SEQ ID NO: 591838 - DNA, 15 bp, Homo sapiens
ccttctggggataca

SEQ ID NO: 591839 - DNA, 15 bp, Homo sapiens
cttctggggatacag

SEQ ID NO: 591840 - DNA, 15 bp, Homo sapiens
ttctggggatacaga

SEQ ID NO: 591841 - DNA, 15 bp, Homo sapiens
tctggggatacagat

SEQ ID NO: 591842 - DNA, 15 bp, Homo sapiens
ctggggatacagatg

SEQ ID NO: 591843 - DNA, 15 bp, Homo sapiens
tggggatacagatgt

SEQ ID NO: 591844 - DNA, 15 bp, Homo sapiens
ggggatacagatgtc

SEQ ID NO: 591845 - DNA, 15 bp, Homo sapiens
gggatacagatgtca

SEQ ID NO: 591846 - DNA, 15 bp, Homo sapiens
ggatacagatgtcaa

SEQ ID NO: 591847 - DNA, 15 bp, Homo sapiens
gatacagatgtcaac

SEQ ID NO: 591848 - DNA, 15 bp, Homo sapiens
atacagatgtcaacc

SEQ ID NO: 591849 - DNA, 15 bp, Homo sapiens
tacagatgtcaacca

SEQ ID NO: 591850 - DNA, 15 bp, Homo sapiens
acagatgtcaaccag

SEQ ID NO: 591851 - DNA, 15 bp, Homo sapiens
cagatgtcaaccagg

SEQ ID NO: 591852 - DNA, 15 bp, Homo sapiens
agatgtcaaccaggt

SEQ ID NO: 591853 - DNA, 15 bp, Homo sapiens
gatgtcaaccaggtg

SEQ ID NO: 591854 - DNA, 15 bp, Homo sapiens
atgtcaaccaggtgg

SEQ ID NO: 591855 - DNA, 15 bp, Homo sapiens
tgtcaaccaggtggg

SEQ ID NO: 591856 - DNA, 15 bp, Homo sapiens
gtcaaccaggtgggg

SEQ ID NO: 591857 - DNA, 15 bp, Homo sapiens
tcaaccaggtggggt

SEQ ID NO: 591858 - DNA, 15 bp, Homo sapiens
caaccaggtggggtg

SEQ ID NO: 591859 - DNA, 15 bp, Homo sapiens
aaccaggtggggtgc

SEQ ID NO: 591860 - DNA, 15 bp, Homo sapiens
accaggtggggtgct

SEQ ID NO: 591861 - DNA, 15 bp, Homo sapiens
ccaggtggggtgctc

SEQ ID NO: 591862 - DNA, 15 bp, Homo sapiens
caggtggggtgctca

SEQ ID NO: 591863 - DNA, 15 bp, Homo sapiens
aggtggggtgctcag

SEQ ID NO: 591864 - DNA, 15 bp, Homo sapiens
ggtggggtgctcagg

SEQ ID NO: 591865 - DNA, 15 bp, Homo sapiens
gtggggtgctcagga

SEQ ID NO: 591866 - DNA, 15 bp, Homo sapiens
tggggtgctcaggag

SEQ ID NO: 591867 - DNA, 15 bp, Homo sapiens
ggggtgctcaggagg

SEQ ID NO: 591868 - DNA, 15 bp, Homo sapiens
gggtgctcaggaggg

SEQ ID NO: 591869 - DNA, 15 bp, Homo sapiens
ggtgctcaggagggg

SEQ ID NO: 591870 - DNA, 15 bp, Homo sapiens
gtgctcaggaggggc

SEQ ID NO: 591871 - DNA, 15 bp, Homo sapiens
tgctcaggaggggca

SEQ ID NO: 591872 - DNA, 15 bp, Homo sapiens
gctcaggaggggcac

SEQ ID NO: 591873 - DNA, 15 bp, Homo sapiens
ctcaggaggggcaca

SEQ ID NO: 591874 - DNA, 15 bp, Homo sapiens
tcaggaggggcacag

SEQ ID NO: 591875 - DNA, 15 bp, Homo sapiens
caggaggggcacaga

SEQ ID NO: 591876 - DNA, 15 bp, Homo sapiens
aggaggggcacagaa

SEQ ID NO: 591877 - DNA, 15 bp, Homo sapiens
ggaggggcacagaag

SEQ ID NO: 591878 - DNA, 15 bp, Homo sapiens
gaggggcacagaagc

SEQ ID NO: 591879 - DNA, 15 bp, Homo sapiens
aggggcacagaagcc

SEQ ID NO: 591880 - DNA, 15 bp, Homo sapiens
ggggcacagaagcca

SEQ ID NO: 591881 - DNA, 15 bp, Homo sapiens
gggcacagaagccag

SEQ ID NO: 591882 - DNA, 15 bp, Homo sapiens
ggcacagaagccagg

SEQ ID NO: 591883 - DNA, 15 bp, Homo sapiens
gcacagaagccagga

SEQ ID NO: 591884 - DNA, 15 bp, Homo sapiens
cacagaagccaggaa

SEQ ID NO: 591885 - DNA, 15 bp, Homo sapiens
acagaagccaggaat

SEQ ID NO: 591886 - DNA, 15 bp, Homo sapiens
cagaagccaggaatg

SEQ ID NO: 591887 - DNA, 15 bp, Homo sapiens
agaagccaggaatga

SEQ ID NO: 591888 - DNA, 15 bp, Homo sapiens
gaagccaggaatgac

SEQ ID NO: 591889 - DNA, 15 bp, Homo sapiens
aagccaggaatgaca

SEQ ID NO: 591890 - DNA, 15 bp, Homo sapiens
agccaggaatgacaa

SEQ ID NO: 591891 - DNA, 15 bp, Homo sapiens
gccaggaatgacaaa

SEQ ID NO: 591892 - DNA, 15 bp, Homo sapiens
ccaggaatgacaaac

SEQ ID NO: 591893 - DNA, 15 bp, Homo sapiens
caggaatgacaaaca

SEQ ID NO: 591894 - DNA, 15 bp, Homo sapiens
aggaatgacaaacac

SEQ ID NO: 591895 - DNA, 15 bp, Homo sapiens
ggaatgacaaacaca

SEQ ID NO: 591896 - DNA, 15 bp, Homo sapiens
gaatgacaaacacat

SEQ ID NO: 591897 - DNA, 15 bp, Homo sapiens
aatgacaaacacatc

SEQ ID NO: 591898 - DNA, 15 bp, Homo sapiens
atgacaaacacatca

SEQ ID NO: 591899 - DNA, 15 bp, Homo sapiens
tgacaaacacatcag

SEQ ID NO: 591900 - DNA, 15 bp, Homo sapiens
gacaaacacatcagc

SEQ ID NO: 591901 - DNA, 15 bp, Homo sapiens
acaaacacatcagcc

SEQ ID NO: 591902 - DNA, 15 bp, Homo sapiens
caaacacatcagcca

SEQ ID NO: 591903 - DNA, 15 bp, Homo sapiens
aaacacatcagccac

SEQ ID NO: 591904 - DNA, 15 bp, Homo sapiens
aacacatcagccacc

SEQ ID NO: 591905 - DNA, 15 bp, Homo sapiens
acacatcagccacca

SEQ ID NO: 591906 - DNA, 15 bp, Homo sapiens
cacatcagccaccag

SEQ ID NO: 591907 - DNA, 15 bp, Homo sapiens
acatcagccaccagg

SEQ ID NO: 591908 - DNA, 15 bp, Homo sapiens
catcagccaccaggc

SEQ ID NO: 591909 - DNA, 15 bp, Homo sapiens
atcagccaccaggca

SEQ ID NO: 591910 - DNA, 15 bp, Homo sapiens
tcagccaccaggcaa

SEQ ID NO: 591911 - DNA, 15 bp, Homo sapiens
cagccaccaggcaaa

SEQ ID NO: 591912 - DNA, 15 bp, Homo sapiens
agccaccaggcaaat

SEQ ID NO: 591913 - DNA, 15 bp, Homo sapiens
gccaccaggcaaatg

SEQ ID NO: 591914 - DNA, 15 bp, Homo sapiens
ccaccaggcaaatgg

SEQ ID NO: 591915 - DNA, 15 bp, Homo sapiens
caccaggcaaatggg

SEQ ID NO: 591916 - DNA, 15 bp, Homo sapiens
accaggcaaatggga

SEQ ID NO: 591917 - DNA, 15 bp, Homo sapiens
ccaggcaaatgggaa

SEQ ID NO: 591918 - DNA, 15 bp, Homo sapiens
caggcaaatgggaaa

SEQ ID NO: 591919 - DNA, 15 bp, Homo sapiens
aggcaaatgggaaat

SEQ ID NO: 591920 - DNA, 15 bp, Homo sapiens
ggcaaatgggaaatg

SEQ ID NO: 591921 - DNA, 15 bp, Homo sapiens
gcaaatgggaaatgt

SEQ ID NO: 591922 - DNA, 15 bp, Homo sapiens
caaatgggaaatgtg

SEQ ID NO: 591923 - DNA, 15 bp, Homo sapiens
aaatgggaaatgtgc

SEQ ID NO: 591924 - DNA, 15 bp, Homo sapiens
aatgggaaatgtgcc

SEQ ID NO: 591925 - DNA, 15 bp, Homo sapiens
atgggaaatgtgccc

SEQ ID NO: 591926 - DNA, 15 bp, Homo sapiens
tgggaaatgtgcccc

SEQ ID NO: 591927 - DNA, 15 bp, Homo sapiens
gggaaatgtgcccca

SEQ ID NO: 591928 - DNA, 15 bp, Homo sapiens
ggaaatgtgccccag

SEQ ID NO: 591929 - DNA, 15 bp, Homo sapiens
gaaatgtgccccaga

SEQ ID NO: 591930 - DNA, 15 bp, Homo sapiens
aaatgtgccccagaa

SEQ ID NO: 591931 - DNA, 15 bp, Homo sapiens
aatgtgccccagaag

SEQ ID NO: 591932 - DNA, 15 bp, Homo sapiens
atgtgccccagaagc

SEQ ID NO: 591933 - DNA, 15 bp, Homo sapiens
tgtgccccagaagct

SEQ ID NO: 591934 - DNA, 15 bp, Homo sapiens
gtgccccagaagctc

SEQ ID NO: 591935 - DNA, 15 bp, Homo sapiens
tgccccagaagctcc

SEQ ID NO: 591936 - DNA, 15 bp, Homo sapiens
gccccagaagctccc

SEQ ID NO: 591937 - DNA, 15 bp, Homo sapiens
ccccagaagctccct

SEQ ID NO: 591938 - DNA, 15 bp, Homo sapiens
cccagaagctccctg

SEQ ID NO: 591939 - DNA, 15 bp, Homo sapiens
ccagaagctccctgc

SEQ ID NO: 591940 - DNA, 15 bp, Homo sapiens
cagaagctccctgct

SEQ ID NO: 591941 - DNA, 15 bp, Homo sapiens
agaagctccctgctg

SEQ ID NO: 591942 - DNA, 15 bp, Homo sapiens
gaagctccctgctga

SEQ ID NO: 591943 - DNA, 15 bp, Homo sapiens
aagctccctgctgag

SEQ ID NO: 591944 - DNA, 15 bp, Homo sapiens
agctccctgctgagg

SEQ ID NO: 591945 - DNA, 15 bp, Homo sapiens
gctccctgctgagga

SEQ ID NO: 591946 - DNA, 15 bp, Homo sapiens
ctccctgctgaggat

SEQ ID NO: 591947 - DNA, 15 bp, Homo sapiens
tccctgctgaggatg

SEQ ID NO: 591948 - DNA, 15 bp, Homo sapiens
ccctgctgaggatgt

SEQ ID NO: 591949 - DNA, 15 bp, Homo sapiens
cctgctgaggatgtt

SEQ ID NO: 591950 - DNA, 15 bp, Homo sapiens
ctgctgaggatgtta

SEQ ID NO: 591951 - DNA, 15 bp, Homo sapiens
tgctgaggatgttag

SEQ ID NO: 591952 - DNA, 15 bp, Homo sapiens
gctgaggatgttagg

SEQ ID NO: 591953 - DNA, 15 bp, Homo sapiens
ctgaggatgttaggg

SEQ ID NO: 591954 - DNA, 15 bp, Homo sapiens
tgaggatgttaggga

SEQ ID NO: 591955 - DNA, 15 bp, Homo sapiens
gaggatgttagggag

SEQ ID NO: 591956 - DNA, 15 bp, Homo sapiens
aggatgttagggaga

SEQ ID NO: 591957 - DNA, 15 bp, Homo sapiens
ggatgttagggagag

SEQ ID NO: 591958 - DNA, 15 bp, Homo sapiens
gatgttagggagagc

SEQ ID NO: 591959 - DNA, 15 bp, Homo sapiens
atgttagggagagca

SEQ ID NO: 591960 - DNA, 15 bp, Homo sapiens
tgttagggagagcat

SEQ ID NO: 591961 - DNA, 15 bp, Homo sapiens
gttagggagagcatt

SEQ ID NO: 591962 - DNA, 15 bp, Homo sapiens
ttagggagagcattc

SEQ ID NO: 591963 - DNA, 15 bp, Homo sapiens
tagggagagcattct

SEQ ID NO: 591964 - DNA, 15 bp, Homo sapiens
agggagagcattctg

SEQ ID NO: 591965 - DNA, 15 bp, Homo sapiens
gggagagcattctga

SEQ ID NO: 591966 - DNA, 15 bp, Homo sapiens
ggagagcattctgaa

SEQ ID NO: 591967 - DNA, 15 bp, Homo sapiens
gagagcattctgaag

SEQ ID NO: 591968 - DNA, 15 bp, Homo sapiens
agagcattctgaagt

SEQ ID NO: 591969 - DNA, 15 bp, Homo sapiens
gagcattctgaagta

SEQ ID NO: 591970 - DNA, 15 bp, Homo sapiens
agcattctgaagtag

SEQ ID NO: 591971 - DNA, 15 bp, Homo sapiens
gcattctgaagtagt

SEQ ID NO: 591972 - DNA, 15 bp, Homo sapiens
cattctgaagtagtg

SEQ ID NO: 591973 - DNA, 15 bp, Homo sapiens
attctgaagtagtgt

SEQ ID NO: 591974 - DNA, 15 bp, Homo sapiens
ttctgaagtagtgtg

SEQ ID NO: 591975 - DNA, 15 bp, Homo sapiens
tctgaagtagtgtgg

SEQ ID NO: 591976 - DNA, 15 bp, Homo sapiens
ctgaagtagtgtggt

SEQ ID NO: 591977 - DNA, 15 bp, Homo sapiens
tgaagtagtgtggtt

SEQ ID NO: 591978 - DNA, 15 bp, Homo sapiens
gaagtagtgtggttg

SEQ ID NO: 591979 - DNA, 15 bp, Homo sapiens
aagtagtgtggttga

SEQ ID NO: 591980 - DNA, 15 bp, Homo sapiens
agtagtgtggttgag

SEQ ID NO: 591981 - DNA, 15 bp, Homo sapiens
gtagtgtggttgaga

SEQ ID NO: 591982 - DNA, 15 bp, Homo sapiens
tagtgtggttgagat

SEQ ID NO: 591983 - DNA, 15 bp, Homo sapiens
agtgtggttgagatg

SEQ ID NO: 591984 - DNA, 15 bp, Homo sapiens
gtgtggttgagatga

SEQ ID NO: 591985 - DNA, 15 bp, Homo sapiens
tgtggttgagatgag

SEQ ID NO: 591986 - DNA, 15 bp, Homo sapiens
gtggttgagatgagg

SEQ ID NO: 591987 - DNA, 15 bp, Homo sapiens
tggttgagatgaggc

SEQ ID NO: 591988 - DNA, 15 bp, Homo sapiens
ggttgagatgaggct

SEQ ID NO: 591989 - DNA, 15 bp, Homo sapiens
gttgagatgaggctt

SEQ ID NO: 591990 - DNA, 15 bp, Homo sapiens
ttgagatgaggcttg

SEQ ID NO: 591991 - DNA, 15 bp, Homo sapiens
tgagatgaggcttga

SEQ ID NO: 591992 - DNA, 15 bp, Homo sapiens
gagatgaggcttgag

SEQ ID NO: 591993 - DNA, 15 bp, Homo sapiens
agatgaggcttgagg

SEQ ID NO: 591994 - DNA, 15 bp, Homo sapiens
gatgaggcttgagga

SEQ ID NO: 591995 - DNA, 15 bp, Homo sapiens
atgaggcttgaggaa

SEQ ID NO: 591996 - DNA, 15 bp, Homo sapiens
tgaggcttgaggaag

SEQ ID NO: 591997 - DNA, 15 bp, Homo sapiens
gaggcttgaggaagg

SEQ ID NO: 591998 - DNA, 15 bp, Homo sapiens
aggcttgaggaaggc

SEQ ID NO: 591999 - DNA, 15 bp, Homo sapiens
ggcttgaggaaggca

SEQ ID NO: 592000 - DNA, 15 bp, Homo sapiens
gcttgaggaaggcaa

SEQ ID NO: 592001 - DNA, 15 bp, Homo sapiens
cttgaggaaggcaag

SEQ ID NO: 592002 - DNA, 15 bp, Homo sapiens
ttgaggaaggcaagg

SEQ ID NO: 592003 - DNA, 15 bp, Homo sapiens
tgaggaaggcaaggc

SEQ ID NO: 592004 - DNA, 15 bp, Homo sapiens
gaggaaggcaaggct

SEQ ID NO: 592005 - DNA, 15 bp, Homo sapiens
aggaaggcaaggctc

SEQ ID NO: 592006 - DNA, 15 bp, Homo sapiens
ggaaggcaaggctcc

SEQ ID NO: 592007 - DNA, 15 bp, Homo sapiens
gaaggcaaggctcca

SEQ ID NO: 592008 - DNA, 15 bp, Homo sapiens
aaggcaaggctccaa

SEQ ID NO: 592009 - DNA, 15 bp, Homo sapiens
aggcaaggctccaaa

SEQ ID NO: 592010 - DNA, 15 bp, Homo sapiens
ggcaaggctccaaac

SEQ ID NO: 592011 - DNA, 15 bp, Homo sapiens
gcaaggctccaaaca

SEQ ID NO: 592012 - DNA, 15 bp, Homo sapiens
caaggctccaaacag

SEQ ID NO: 592013 - DNA, 15 bp, Homo sapiens
aaggctccaaacagc

SEQ ID NO: 592014 - DNA, 15 bp, Homo sapiens
aggctccaaacagca

SEQ ID NO: 592015 - DNA, 15 bp, Homo sapiens
ggctccaaacagcag

SEQ ID NO: 592016 - DNA, 15 bp, Homo sapiens
gctccaaacagcagg

SEQ ID NO: 592017 - DNA, 15 bp, Homo sapiens
ctccaaacagcaggg

SEQ ID NO: 592018 - DNA, 15 bp, Homo sapiens
tccaaacagcagggc

SEQ ID NO: 592019 - DNA, 15 bp, Homo sapiens
ccaaacagcagggca

SEQ ID NO: 592020 - DNA, 15 bp, Homo sapiens
caaacagcagggcag

SEQ ID NO: 592021 - DNA, 15 bp, Homo sapiens
aaacagcagggcaga

SEQ ID NO: 592022 - DNA, 15 bp, Homo sapiens
aacagcagggcagac

SEQ ID NO: 592023 - DNA, 15 bp, Homo sapiens
acagcagggcagact

SEQ ID NO: 592024 - DNA, 15 bp, Homo sapiens
cagcagggcagactg

SEQ ID NO: 592025 - DNA, 15 bp, Homo sapiens
agcagggcagactgg

SEQ ID NO: 592026 - DNA, 15 bp, Homo sapiens
gcagggcagactggg

SEQ ID NO: 592027 - DNA, 15 bp, Homo sapiens
cagggcagactggga

SEQ ID NO: 592028 - DNA, 15 bp, Homo sapiens
agggcagactgggag

SEQ ID NO: 592029 - DNA, 15 bp, Homo sapiens
gggcagactgggagc

SEQ ID NO: 592030 - DNA, 15 bp, Homo sapiens
ggcagactgggagca

SEQ ID NO: 592031 - DNA, 15 bp, Homo sapiens
gcagactgggagcaa

SEQ ID NO: 592032 - DNA, 15 bp, Homo sapiens
cagactgggagcaag

SEQ ID NO: 592033 - DNA, 15 bp, Homo sapiens
agactgggagcaagg

SEQ ID NO: 592034 - DNA, 15 bp, Homo sapiens
gactgggagcaaggt

SEQ ID NO: 592035 - DNA, 15 bp, Homo sapiens
actgggagcaaggta

SEQ ID NO: 592036 - DNA, 15 bp, Homo sapiens
ctgggagcaaggtag

SEQ ID NO: 592037 - DNA, 15 bp, Homo sapiens
tgggagcaaggtaga

SEQ ID NO: 592038 - DNA, 15 bp, Homo sapiens
gggagcaaggtagac

SEQ ID NO: 592039 - DNA, 15 bp, Homo sapiens
ggagcaaggtagact

SEQ ID NO: 592040 - DNA, 15 bp, Homo sapiens
gagcaaggtagactg

SEQ ID NO: 592041 - DNA, 15 bp, Homo sapiens
agcaaggtagactgc

SEQ ID NO: 592042 - DNA, 15 bp, Homo sapiens
gcaaggtagactgca

SEQ ID NO: 592043 - DNA, 15 bp, Homo sapiens
caaggtagactgcat

SEQ ID NO: 592044 - DNA, 15 bp, Homo sapiens
aaggtagactgcatg

SEQ ID NO: 592045 - DNA, 15 bp, Homo sapiens
aggtagactgcatgg

SEQ ID NO: 592046 - DNA, 15 bp, Homo sapiens
ggtagactgcatggg

SEQ ID NO: 592047 - DNA, 15 bp, Homo sapiens
gtagactgcatggga

SEQ ID NO: 592048 - DNA, 15 bp, Homo sapiens
tagactgcatgggag

SEQ ID NO: 592049 - DNA, 15 bp, Homo sapiens
agactgcatgggagg

SEQ ID NO: 592050 - DNA, 15 bp, Homo sapiens
gactgcatgggaggg

SEQ ID NO: 592051 - DNA, 15 bp, Homo sapiens
actgcatgggagggc

SEQ ID NO: 592052 - DNA, 15 bp, Homo sapiens
ctgcatgggagggca

SEQ ID NO: 592053 - DNA, 15 bp, Homo sapiens
tgcatgggagggcag

SEQ ID NO: 592054 - DNA, 15 bp, Homo sapiens
gcatgggagggcagc

SEQ ID NO: 592055 - DNA, 15 bp, Homo sapiens
catgggagggcagct

SEQ ID NO: 592056 - DNA, 15 bp, Homo sapiens
atgggagggcagctg

SEQ ID NO: 592057 - DNA, 15 bp, Homo sapiens
tgggagggcagctga

SEQ ID NO: 592058 - DNA, 15 bp, Homo sapiens
gggagggcagctgat

SEQ ID NO: 592059 - DNA, 15 bp, Homo sapiens
ggagggcagctgatg

SEQ ID NO: 592060 - DNA, 15 bp, Homo sapiens
gagggcagctgatgg

SEQ ID NO: 592061 - DNA, 15 bp, Homo sapiens
agggcagctgatgga

SEQ ID NO: 592062 - DNA, 15 bp, Homo sapiens
gggcagctgatggag

SEQ ID NO: 592063 - DNA, 15 bp, Homo sapiens
ggcagctgatggagc

SEQ ID NO: 592064 - DNA, 15 bp, Homo sapiens
gcagctgatggagct

SEQ ID NO: 592065 - DNA, 15 bp, Homo sapiens
cagctgatggagctc

SEQ ID NO: 592066 - DNA, 15 bp, Homo sapiens
agctgatggagctcc

SEQ ID NO: 592067 - DNA, 15 bp, Homo sapiens
gctgatggagctcct

SEQ ID NO: 592068 - DNA, 15 bp, Homo sapiens
ctgatggagctcctt

SEQ ID NO: 592069 - DNA, 15 bp, Homo sapiens
tgatggagctcctta

SEQ ID NO: 592070 - DNA, 15 bp, Homo sapiens
gatggagctccttaa

SEQ ID NO: 592071 - DNA, 15 bp, Homo sapiens
atggagctccttaac

SEQ ID NO: 592072 - DNA, 15 bp, Homo sapiens
tggagctccttaacc

SEQ ID NO: 592073 - DNA, 15 bp, Homo sapiens
ggagctccttaaccc

SEQ ID NO: 592074 - DNA, 15 bp, Homo sapiens
gagctccttaaccct

SEQ ID NO: 592075 - DNA, 15 bp, Homo sapiens
agctccttaaccctc

SEQ ID NO: 592076 - DNA, 15 bp, Homo sapiens
gctccttaaccctct

SEQ ID NO: 592077 - DNA, 15 bp, Homo sapiens
ctccttaaccctctg

SEQ ID NO: 592078 - DNA, 15 bp, Homo sapiens
tccttaaccctctgg

SEQ ID NO: 592079 - DNA, 15 bp, Homo sapiens
ccttaaccctctgga

SEQ ID NO: 592080 - DNA, 15 bp, Homo sapiens
cttaaccctctggaa

SEQ ID NO: 592081 - DNA, 15 bp, Homo sapiens
ttaaccctctggaat

SEQ ID NO: 592082 - DNA, 15 bp, Homo sapiens
taaccctctggaatt

SEQ ID NO: 592083 - DNA, 15 bp, Homo sapiens
aaccctctggaattg

SEQ ID NO: 592084 - DNA, 15 bp, Homo sapiens
accctctggaattgc

SEQ ID NO: 592085 - DNA, 15 bp, Homo sapiens
ccctctggaattgcc

SEQ ID NO: 592086 - DNA, 15 bp, Homo sapiens
cctctggaattgccc

SEQ ID NO: 592087 - DNA, 15 bp, Homo sapiens
ctctggaattgcccc

SEQ ID NO: 592088 - DNA, 15 bp, Homo sapiens
tctggaattgcccca

SEQ ID NO: 592089 - DNA, 15 bp, Homo sapiens
ctggaattgccccaa

SEQ ID NO: 592090 - DNA, 15 bp, Homo sapiens
tggaattgccccaaa

SEQ ID NO: 592091 - DNA, 15 bp, Homo sapiens
ggaattgccccaaag

SEQ ID NO: 592092 - DNA, 15 bp, Homo sapiens
gaattgccccaaagc

SEQ ID NO: 592093 - DNA, 15 bp, Homo sapiens
aattgccccaaagcc

SEQ ID NO: 592094 - DNA, 15 bp, Homo sapiens
attgccccaaagcca

SEQ ID NO: 592095 - DNA, 15 bp, Homo sapiens
ttgccccaaagccaa

SEQ ID NO: 592096 - DNA, 15 bp, Homo sapiens
tgccccaaagccaag

SEQ ID NO: 592097 - DNA, 15 bp, Homo sapiens
gccccaaagccaagc

SEQ ID NO: 592098 - DNA, 15 bp, Homo sapiens
ccccaaagccaagca

SEQ ID NO: 592099 - DNA, 15 bp, Homo sapiens
cccaaagccaagcaa

SEQ ID NO: 592100 - DNA, 15 bp, Homo sapiens
ccaaagccaagcaaa

SEQ ID NO: 592101 - DNA, 15 bp, Homo sapiens
caaagccaagcaaag

SEQ ID NO: 592102 - DNA, 15 bp, Homo sapiens
aaagccaagcaaagt

SEQ ID NO: 592103 - DNA, 15 bp, Homo sapiens
aagccaagcaaagtg

SEQ ID NO: 592104 - DNA, 15 bp, Homo sapiens
agccaagcaaagtgt

SEQ ID NO: 592105 - DNA, 15 bp, Homo sapiens
gccaagcaaagtgtt

SEQ ID NO: 592106 - DNA, 15 bp, Homo sapiens
ccaagcaaagtgttc

SEQ ID NO: 592107 - DNA, 15 bp, Homo sapiens
caagcaaagtgttct

SEQ ID NO: 592108 - DNA, 15 bp, Homo sapiens
aagcaaagtgttctt

SEQ ID NO: 592109 - DNA, 15 bp, Homo sapiens
agcaaagtgttcttc

SEQ ID NO: 592110 - DNA, 15 bp, Homo sapiens
gcaaagtgttcttct

SEQ ID NO: 592111 - DNA, 15 bp, Homo sapiens
caaagtgttcttctt

SEQ ID NO: 592112 - DNA, 15 bp, Homo sapiens
aaagtgttcttcttg

SEQ ID NO: 592113 - DNA, 15 bp, Homo sapiens
aagtgttcttcttgg

SEQ ID NO: 592114 - DNA, 15 bp, Homo sapiens
agtgttcttcttggg

SEQ ID NO: 592115 - DNA, 15 bp, Homo sapiens
gtgttcttcttgggg

SEQ ID NO: 592116 - DNA, 15 bp, Homo sapiens
tgttcttcttggggt

SEQ ID NO: 592117 - DNA, 15 bp, Homo sapiens
gttcttcttggggtc

SEQ ID NO: 592118 - DNA, 15 bp, Homo sapiens
ttcttcttggggtca

SEQ ID NO: 592119 - DNA, 15 bp, Homo sapiens
tcttcttggggtcac

SEQ ID NO: 592120 - DNA, 15 bp, Homo sapiens
cttcttggggtcaca

SEQ ID NO: 592121 - DNA, 15 bp, Homo sapiens
ttcttggggtcacag

SEQ ID NO: 592122 - DNA, 15 bp, Homo sapiens
tcttggggtcacagc

SEQ ID NO: 592123 - DNA, 15 bp, Homo sapiens
cttggggtcacagct

SEQ ID NO: 592124 - DNA, 15 bp, Homo sapiens
ttggggtcacagcta

SEQ ID NO: 592125 - DNA, 15 bp, Homo sapiens
tggggtcacagctag

SEQ ID NO: 592126 - DNA, 15 bp, Homo sapiens
ggggtcacagctagc

SEQ ID NO: 592127 - DNA, 15 bp, Homo sapiens
gggtcacagctagct

SEQ ID NO: 592128 - DNA, 15 bp, Homo sapiens
ggtcacagctagctc

SEQ ID NO: 592129 - DNA, 15 bp, Homo sapiens
gtcacagctagctca

SEQ ID NO: 592130 - DNA, 15 bp, Homo sapiens
tcacagctagctcag

SEQ ID NO: 592131 - DNA, 15 bp, Homo sapiens
cacagctagctcagg

SEQ ID NO: 592132 - DNA, 15 bp, Homo sapiens
acagctagctcaggg

SEQ ID NO: 592133 - DNA, 15 bp, Homo sapiens
cagctagctcaggga

SEQ ID NO: 592134 - DNA, 15 bp, Homo sapiens
agctagctcagggat

SEQ ID NO: 592135 - DNA, 15 bp, Homo sapiens
gctagctcagggatg

SEQ ID NO: 592136 - DNA, 15 bp, Homo sapiens
ctagctcagggatgc

SEQ ID NO: 592137 - DNA, 15 bp, Homo sapiens
tagctcagggatgcc

SEQ ID NO: 592138 - DNA, 15 bp, Homo sapiens
agctcagggatgcct

SEQ ID NO: 592139 - DNA, 15 bp, Homo sapiens
gctcagggatgcctt

SEQ ID NO: 592140 - DNA, 15 bp, Homo sapiens
ctcagggatgccttc

SEQ ID NO: 592141 - DNA, 15 bp, Homo sapiens
tcagggatgccttct

SEQ ID NO: 592142 - DNA, 15 bp, Homo sapiens
cagggatgccttctg

SEQ ID NO: 592143 - DNA, 15 bp, Homo sapiens
agggatgccttctgc

SEQ ID NO: 592144 - DNA, 15 bp, Homo sapiens
gggatgccttctgcc

SEQ ID NO: 592145 - DNA, 15 bp, Homo sapiens
ggatgccttctgccc

SEQ ID NO: 592146 - DNA, 15 bp, Homo sapiens
gatgccttctgcccc

SEQ ID NO: 592147 - DNA, 15 bp, Homo sapiens
atgccttctgcccct

SEQ ID NO: 592148 - DNA, 15 bp, Homo sapiens
tgccttctgcccctt

SEQ ID NO: 592149 - DNA, 15 bp, Homo sapiens
gccttctgccccttg

SEQ ID NO: 592150 - DNA, 15 bp, Homo sapiens
ccttctgccccttgg

SEQ ID NO: 592151 - DNA, 15 bp, Homo sapiens
cttctgccccttggt

SEQ ID NO: 592152 - DNA, 15 bp, Homo sapiens
ttctgccccttggtc

SEQ ID NO: 592153 - DNA, 15 bp, Homo sapiens
tctgccccttggtca

SEQ ID NO: 592154 - DNA, 15 bp, Homo sapiens
ctgccccttggtcag

SEQ ID NO: 592155 - DNA, 15 bp, Homo sapiens
tgccccttggtcaga

SEQ ID NO: 592156 - DNA, 15 bp, Homo sapiens
gccccttggtcagag

SEQ ID NO: 592157 - DNA, 15 bp, Homo sapiens
ccccttggtcagagg

SEQ ID NO: 592158 - DNA, 15 bp, Homo sapiens
cccttggtcagaggg

SEQ ID NO: 592159 - DNA, 15 bp, Homo sapiens
ccttggtcagagggg

SEQ ID NO: 592160 - DNA, 15 bp, Homo sapiens
cttggtcagaggggc

SEQ ID NO: 592161 - DNA, 15 bp, Homo sapiens
ttggtcagaggggca

SEQ ID NO: 592162 - DNA, 15 bp, Homo sapiens
tggtcagaggggcaa

SEQ ID NO: 592163 - DNA, 15 bp, Homo sapiens
ggtcagaggggcaaa

SEQ ID NO: 592164 - DNA, 15 bp, Homo sapiens
gtcagaggggcaaaa

SEQ ID NO: 592165 - DNA, 15 bp, Homo sapiens
tcagaggggcaaaag

SEQ ID NO: 592166 - DNA, 15 bp, Homo sapiens
cagaggggcaaaagg

SEQ ID NO: 592167 - DNA, 15 bp, Homo sapiens
agaggggcaaaaggt

SEQ ID NO: 592168 - DNA, 15 bp, Homo sapiens
gaggggcaaaaggtc

SEQ ID NO: 592169 - DNA, 15 bp, Homo sapiens
aggggcaaaaggtca

SEQ ID NO: 592170 - DNA, 15 bp, Homo sapiens
ggggcaaaaggtcag

SEQ ID NO: 592171 - DNA, 15 bp, Homo sapiens
gggcaaaaggtcaga

SEQ ID NO: 592172 - DNA, 15 bp, Homo sapiens
ggcaaaaggtcagag

SEQ ID NO: 592173 - DNA, 15 bp, Homo sapiens
gcaaaaggtcagagc

SEQ ID NO: 592174 - DNA, 15 bp, Homo sapiens
caaaaggtcagagcc

SEQ ID NO: 592175 - DNA, 15 bp, Homo sapiens
aaaaggtcagagcct

SEQ ID NO: 592176 - DNA, 15 bp, Homo sapiens
aaaggtcagagccta

SEQ ID NO: 592177 - DNA, 15 bp, Homo sapiens
aaggtcagagcctag

SEQ ID NO: 592178 - DNA, 15 bp, Homo sapiens
aggtcagagcctagg

SEQ ID NO: 592179 - DNA, 15 bp, Homo sapiens
ggtcagagcctaggg

SEQ ID NO: 592180 - DNA, 15 bp, Homo sapiens
gtcagagcctagggt

SEQ ID NO: 592181 - DNA, 15 bp, Homo sapiens
tcagagcctagggtc

SEQ ID NO: 592182 - DNA, 15 bp, Homo sapiens
cagagcctagggtca

SEQ ID NO: 592183 - DNA, 15 bp, Homo sapiens
agagcctagggtcac

SEQ ID NO: 592184 - DNA, 15 bp, Homo sapiens
gagcctagggtcacc

SEQ ID NO: 592185 - DNA, 15 bp, Homo sapiens
agcctagggtcacca

SEQ ID NO: 592186 - DNA, 15 bp, Homo sapiens
gcctagggtcaccaa

SEQ ID NO: 592187 - DNA, 15 bp, Homo sapiens
cctagggtcaccaaa

SEQ ID NO: 592188 - DNA, 15 bp, Homo sapiens
ctagggtcaccaaaa

SEQ ID NO: 592189 - DNA, 15 bp, Homo sapiens
tagggtcaccaaaac

SEQ ID NO: 592190 - DNA, 15 bp, Homo sapiens
agggtcaccaaaacc

SEQ ID NO: 592191 - DNA, 15 bp, Homo sapiens
gggtcaccaaaacct

SEQ ID NO: 592192 - DNA, 15 bp, Homo sapiens
ggtcaccaaaacctc

SEQ ID NO: 592193 - DNA, 15 bp, Homo sapiens
gtcaccaaaacctct

SEQ ID NO: 592194 - DNA, 15 bp, Homo sapiens
tcaccaaaacctctg

SEQ ID NO: 592195 - DNA, 15 bp, Homo sapiens
caccaaaacctctgg

SEQ ID NO: 592196 - DNA, 15 bp, Homo sapiens
accaaaacctctggg

SEQ ID NO: 592197 - DNA, 15 bp, Homo sapiens
ccaaaacctctggga

SEQ ID NO: 592198 - DNA, 15 bp, Homo sapiens
caaaacctctgggaa

SEQ ID NO: 592199 - DNA, 15 bp, Homo sapiens
aaaacctctgggaag

SEQ ID NO: 592200 - DNA, 15 bp, Homo sapiens
aaacctctgggaagc

SEQ ID NO: 592201 - DNA, 15 bp, Homo sapiens
aacctctgggaagcc

SEQ ID NO: 592202 - DNA, 15 bp, Homo sapiens
acctctgggaagccc

SEQ ID NO: 592203 - DNA, 15 bp, Homo sapiens
cctctgggaagcccc

SEQ ID NO: 592204 - DNA, 15 bp, Homo sapiens
ctctgggaagccccg

SEQ ID NO: 592205 - DNA, 15 bp, Homo sapiens
tctgggaagccccgg

SEQ ID NO: 592206 - DNA, 15 bp, Homo sapiens
ctgggaagccccggg

SEQ ID NO: 592207 - DNA, 15 bp, Homo sapiens
tgggaagccccgggg

SEQ ID NO: 592208 - DNA, 15 bp, Homo sapiens
gggaagccccggggg

SEQ ID NO: 592209 - DNA, 15 bp, Homo sapiens
ggaagccccgggggt

SEQ ID NO: 592210 - DNA, 15 bp, Homo sapiens
gaagccccgggggtc

SEQ ID NO: 592211 - DNA, 15 bp, Homo sapiens
aagccccgggggtct

SEQ ID NO: 592212 - DNA, 15 bp, Homo sapiens
agccccgggggtctc

SEQ ID NO: 592213 - DNA, 15 bp, Homo sapiens
gccccgggggtctca

SEQ ID NO: 592214 - DNA, 15 bp, Homo sapiens
ccccgggggtctcag

SEQ ID NO: 592215 - DNA, 15 bp, Homo sapiens
cccgggggtctcagg

SEQ ID NO: 592216 - DNA, 15 bp, Homo sapiens
ccgggggtctcaggc

SEQ ID NO: 592217 - DNA, 15 bp, Homo sapiens
cgggggtctcaggcc

SEQ ID NO: 592218 - DNA, 15 bp, Homo sapiens
gggggtctcaggcca

SEQ ID NO: 592219 - DNA, 15 bp, Homo sapiens
ggggtctcaggccac

SEQ ID NO: 592220 - DNA, 15 bp, Homo sapiens
gggtctcaggccaca

SEQ ID NO: 592221 - DNA, 15 bp, Homo sapiens
ggtctcaggccacag

SEQ ID NO: 592222 - DNA, 15 bp, Homo sapiens
gtctcaggccacaga

SEQ ID NO: 592223 - DNA, 15 bp, Homo sapiens
tctcaggccacagac

SEQ ID NO: 592224 - DNA, 15 bp, Homo sapiens
ctcaggccacagacc

SEQ ID NO: 592225 - DNA, 15 bp, Homo sapiens
tcaggccacagacca

SEQ ID NO: 592226 - DNA, 15 bp, Homo sapiens
caggccacagaccat

SEQ ID NO: 592227 - DNA, 15 bp, Homo sapiens
aggccacagaccatc

SEQ ID NO: 592228 - DNA, 15 bp, Homo sapiens
ggccacagaccatcc

SEQ ID NO: 592229 - DNA, 15 bp, Homo sapiens
gccacagaccatcct

SEQ ID NO: 592230 - DNA, 15 bp, Homo sapiens
ccacagaccatcctc

SEQ ID NO: 592231 - DNA, 15 bp, Homo sapiens
cacagaccatcctca

SEQ ID NO: 592232 - DNA, 15 bp, Homo sapiens
acagaccatcctcag

SEQ ID NO: 592233 - DNA, 15 bp, Homo sapiens
cagaccatcctcaga

SEQ ID NO: 592234 - DNA, 15 bp, Homo sapiens
agaccatcctcagaa

SEQ ID NO: 592235 - DNA, 15 bp, Homo sapiens
gaccatcctcagaac

SEQ ID NO: 592236 - DNA, 15 bp, Homo sapiens
accatcctcagaact

SEQ ID NO: 592237 - DNA, 15 bp, Homo sapiens
ccatcctcagaacta

SEQ ID NO: 592238 - DNA, 15 bp, Homo sapiens
catcctcagaactac

SEQ ID NO: 592239 - DNA, 15 bp, Homo sapiens
atcctcagaactaca

SEQ ID NO: 592240 - DNA, 15 bp, Homo sapiens
tcctcagaactacac

SEQ ID NO: 592241 - DNA, 15 bp, Homo sapiens
cctcagaactacaca

SEQ ID NO: 592242 - DNA, 15 bp, Homo sapiens
ctcagaactacacac

SEQ ID NO: 592243 - DNA, 15 bp, Homo sapiens
tcagaactacacact

SEQ ID NO: 592244 - DNA, 15 bp, Homo sapiens
cagaactacacactg

SEQ ID NO: 592245 - DNA, 15 bp, Homo sapiens
agaactacacactgc

SEQ ID NO: 592246 - DNA, 15 bp, Homo sapiens
gaactacacactgcc

SEQ ID NO: 592247 - DNA, 15 bp, Homo sapiens
aactacacactgccc

SEQ ID NO: 592248 - DNA, 15 bp, Homo sapiens
actacacactgccct

SEQ ID NO: 592249 - DNA, 15 bp, Homo sapiens
ctacacactgccctc

SEQ ID NO: 592250 - DNA, 15 bp, Homo sapiens
tacacactgccctcc

SEQ ID NO: 592251 - DNA, 15 bp, Homo sapiens
acacactgccctccc

SEQ ID NO: 592252 - DNA, 15 bp, Homo sapiens
cacactgccctccca

SEQ ID NO: 592253 - DNA, 15 bp, Homo sapiens
acactgccctcccat

SEQ ID NO: 592254 - DNA, 15 bp, Homo sapiens
cactgccctcccatg

SEQ ID NO: 592255 - DNA, 15 bp, Homo sapiens
actgccctcccatgc

SEQ ID NO: 592256 - DNA, 15 bp, Homo sapiens
ctgccctcccatgcc

SEQ ID NO: 592257 - DNA, 15 bp, Homo sapiens
tgccctcccatgcct

SEQ ID NO: 592258 - DNA, 15 bp, Homo sapiens
gccctcccatgcctg

SEQ ID NO: 592259 - DNA, 15 bp, Homo sapiens
ccctcccatgcctgg

SEQ ID NO: 592260 - DNA, 15 bp, Homo sapiens
cctcccatgcctggc

SEQ ID NO: 592261 - DNA, 15 bp, Homo sapiens
ctcccatgcctggcg

SEQ ID NO: 592262 - DNA, 15 bp, Homo sapiens
tcccatgcctggcgg

SEQ ID NO: 592263 - DNA, 15 bp, Homo sapiens
cccatgcctggcggg

SEQ ID NO: 592264 - DNA, 15 bp, Homo sapiens
ccatgcctggcgggg

SEQ ID NO: 592265 - DNA, 15 bp, Homo sapiens
catgcctggcggggg

SEQ ID NO: 592266 - DNA, 15 bp, Homo sapiens
atgcctggcgggggc

SEQ ID NO: 592267 - DNA, 15 bp, Homo sapiens
tgcctggcgggggcc

SEQ ID NO: 592268 - DNA, 15 bp, Homo sapiens
gcctggcgggggccc

SEQ ID NO: 592269 - DNA, 15 bp, Homo sapiens
cctggcgggggccct

SEQ ID NO: 592270 - DNA, 15 bp, Homo sapiens
ctggcgggggccctg

SEQ ID NO: 592271 - DNA, 15 bp, Homo sapiens
tggcgggggccctgg

SEQ ID NO: 592272 - DNA, 15 bp, Homo sapiens
ggcgggggccctgga

SEQ ID NO: 592273 - DNA, 15 bp, Homo sapiens
gcgggggccctggac

SEQ ID NO: 592274 - DNA, 15 bp, Homo sapiens
cgggggccctggact

SEQ ID NO: 592275 - DNA, 15 bp, Homo sapiens
gggggccctggactg

SEQ ID NO: 592276 - DNA, 15 bp, Homo sapiens
ggggccctggactgg

SEQ ID NO: 592277 - DNA, 15 bp, Homo sapiens
gggccctggactggc

SEQ ID NO: 592278 - DNA, 15 bp, Homo sapiens
ggccctggactggcc

SEQ ID NO: 592279 - DNA, 15 bp, Homo sapiens
gccctggactggccc

SEQ ID NO: 592280 - DNA, 15 bp, Homo sapiens
ccctggactggccct

SEQ ID NO: 592281 - DNA, 15 bp, Homo sapiens
cctggactggccctc

SEQ ID NO: 592282 - DNA, 15 bp, Homo sapiens
ctggactggccctca

SEQ ID NO: 592283 - DNA, 15 bp, Homo sapiens
tggactggccctcac

SEQ ID NO: 592284 - DNA, 15 bp, Homo sapiens
ggactggccctcacc

SEQ ID NO: 592285 - DNA, 15 bp, Homo sapiens
gactggccctcacca

SEQ ID NO: 592286 - DNA, 15 bp, Homo sapiens
actggccctcaccag

SEQ ID NO: 592287 - DNA, 15 bp, Homo sapiens
ctggccctcaccagc

SEQ ID NO: 592288 - DNA, 15 bp, Homo sapiens
tggccctcaccagct

SEQ ID NO: 592289 - DNA, 15 bp, Homo sapiens
ggccctcaccagctg

SEQ ID NO: 592290 - DNA, 15 bp, Homo sapiens
gccctcaccagctgt

SEQ ID NO: 592291 - DNA, 15 bp, Homo sapiens
ccctcaccagctgtc

SEQ ID NO: 592292 - DNA, 15 bp, Homo sapiens
cctcaccagctgtct

SEQ ID NO: 592293 - DNA, 15 bp, Homo sapiens
ctcaccagctgtctt

SEQ ID NO: 592294 - DNA, 15 bp, Homo sapiens
tcaccagctgtcttc

SEQ ID NO: 592295 - DNA, 15 bp, Homo sapiens
caccagctgtcttct

SEQ ID NO: 592296 - DNA, 15 bp, Homo sapiens
accagctgtcttctt

SEQ ID NO: 592297 - DNA, 15 bp, Homo sapiens
ccagctgtcttcttg

SEQ ID NO: 592298 - DNA, 15 bp, Homo sapiens
cagctgtcttcttgc

SEQ ID NO: 592299 - DNA, 15 bp, Homo sapiens
agctgtcttcttgca

SEQ ID NO: 592300 - DNA, 15 bp, Homo sapiens
gctgtcttcttgcac

SEQ ID NO: 592301 - DNA, 15 bp, Homo sapiens
ctgtcttcttgcact

SEQ ID NO: 592302 - DNA, 15 bp, Homo sapiens
tgtcttcttgcactg

SEQ ID NO: 592303 - DNA, 15 bp, Homo sapiens
gtcttcttgcactgg

SEQ ID NO: 592304 - DNA, 15 bp, Homo sapiens
tcttcttgcactggc

SEQ ID NO: 592305 - DNA, 15 bp, Homo sapiens
cttcttgcactggcc

SEQ ID NO: 592306 - DNA, 15 bp, Homo sapiens
ttcttgcactggcca

SEQ ID NO: 592307 - DNA, 15 bp, Homo sapiens
tcttgcactggccag

SEQ ID NO: 592308 - DNA, 15 bp, Homo sapiens
cttgcactggccagg

SEQ ID NO: 592309 - DNA, 15 bp, Homo sapiens
ttgcactggccaggg

SEQ ID NO: 592310 - DNA, 15 bp, Homo sapiens
tgcactggccagggt

SEQ ID NO: 592311 - DNA, 15 bp, Homo sapiens
gcactggccagggtt

SEQ ID NO: 592312 - DNA, 15 bp, Homo sapiens
cactggccagggttc

SEQ ID NO: 592313 - DNA, 15 bp, Homo sapiens
actggccagggttct

SEQ ID NO: 592314 - DNA, 15 bp, Homo sapiens
ctggccagggttctg

SEQ ID NO: 592315 - DNA, 15 bp, Homo sapiens
tggccagggttctgg

SEQ ID NO: 592316 - DNA, 15 bp, Homo sapiens
ggccagggttctggc

SEQ ID NO: 592317 - DNA, 15 bp, Homo sapiens
gccagggttctggct

SEQ ID NO: 592318 - DNA, 15 bp, Homo sapiens
ccagggttctggctg

SEQ ID NO: 592319 - DNA, 15 bp, Homo sapiens
cagggttctggctgg

SEQ ID NO: 592320 - DNA, 15 bp, Homo sapiens
agggttctggctgga

SEQ ID NO: 592321 - DNA, 15 bp, Homo sapiens
gggttctggctggac

SEQ ID NO: 592322 - DNA, 15 bp, Homo sapiens
ggttctggctggact

SEQ ID NO: 592323 - DNA, 15 bp, Homo sapiens
gttctggctggactg

SEQ ID NO: 592324 - DNA, 15 bp, Homo sapiens
ttctggctggactgg

SEQ ID NO: 592325 - DNA, 15 bp, Homo sapiens
tctggctggactggc

SEQ ID NO: 592326 - DNA, 15 bp, Homo sapiens
ctggctggactggca

SEQ ID NO: 592327 - DNA, 15 bp, Homo sapiens
tggctggactggcaa

SEQ ID NO: 592328 - DNA, 15 bp, Homo sapiens
ggctggactggcaag

SEQ ID NO: 592329 - DNA, 15 bp, Homo sapiens
gctggactggcaagg

SEQ ID NO: 592330 - DNA, 15 bp, Homo sapiens
ctggactggcaagga

SEQ ID NO: 592331 - DNA, 15 bp, Homo sapiens
tggactggcaaggag

SEQ ID NO: 592332 - DNA, 15 bp, Homo sapiens
ggactggcaaggagg

SEQ ID NO: 592333 - DNA, 15 bp, Homo sapiens
gactggcaaggaggg

SEQ ID NO: 592334 - DNA, 15 bp, Homo sapiens
actggcaaggagggg

SEQ ID NO: 592335 - DNA, 15 bp, Homo sapiens
ctggcaaggaggggt

SEQ ID NO: 592336 - DNA, 15 bp, Homo sapiens
tggcaaggaggggtg

SEQ ID NO: 592337 - DNA, 15 bp, Homo sapiens
ggcaaggaggggtgg

SEQ ID NO: 592338 - DNA, 15 bp, Homo sapiens
gcaaggaggggtggt

SEQ ID NO: 592339 - DNA, 15 bp, Homo sapiens
caaggaggggtggtc

SEQ ID NO: 592340 - DNA, 15 bp, Homo sapiens
aaggaggggtggtca

SEQ ID NO: 592341 - DNA, 15 bp, Homo sapiens
aggaggggtggtcag

SEQ ID NO: 592342 - DNA, 15 bp, Homo sapiens
ggaggggtggtcaga

SEQ ID NO: 592343 - DNA, 15 bp, Homo sapiens
gaggggtggtcagat

SEQ ID NO: 592344 - DNA, 15 bp, Homo sapiens
aggggtggtcagata

SEQ ID NO: 592345 - DNA, 15 bp, Homo sapiens
ggggtggtcagatac

SEQ ID NO: 592346 - DNA, 15 bp, Homo sapiens
gggtggtcagataca

SEQ ID NO: 592347 - DNA, 15 bp, Homo sapiens
ggtggtcagatacag

SEQ ID NO: 592348 - DNA, 15 bp, Homo sapiens
gtggtcagatacagg

SEQ ID NO: 592349 - DNA, 15 bp, Homo sapiens
tggtcagatacagga

SEQ ID NO: 592350 - DNA, 15 bp, Homo sapiens
ggtcagatacaggag

SEQ ID NO: 592351 - DNA, 15 bp, Homo sapiens
gtcagatacaggagt

SEQ ID NO: 592352 - DNA, 15 bp, Homo sapiens
tcagatacaggagta

SEQ ID NO: 592353 - DNA, 15 bp, Homo sapiens
cagatacaggagtaa

SEQ ID NO: 592354 - DNA, 15 bp, Homo sapiens
agatacaggagtaac

SEQ ID NO: 592355 - DNA, 15 bp, Homo sapiens
gatacaggagtaact

SEQ ID NO: 592356 - DNA, 15 bp, Homo sapiens
atacaggagtaactg

SEQ ID NO: 592357 - DNA, 15 bp, Homo sapiens
tacaggagtaactgg

SEQ ID NO: 592358 - DNA, 15 bp, Homo sapiens
acaggagtaactgga

SEQ ID NO: 592359 - DNA, 15 bp, Homo sapiens
caggagtaactggat

SEQ ID NO: 592360 - DNA, 15 bp, Homo sapiens
aggagtaactggatc

SEQ ID NO: 592361 - DNA, 15 bp, Homo sapiens
ggagtaactggatcc

SEQ ID NO: 592362 - DNA, 15 bp, Homo sapiens
gagtaactggatccc

SEQ ID NO: 592363 - DNA, 15 bp, Homo sapiens
agtaactggatccct

SEQ ID NO: 592364 - DNA, 15 bp, Homo sapiens
gtaactggatccctt

SEQ ID NO: 592365 - DNA, 15 bp, Homo sapiens
taactggatcccttc

SEQ ID NO: 592366 - DNA, 15 bp, Homo sapiens
aactggatcccttca

SEQ ID NO: 592367 - DNA, 15 bp, Homo sapiens
actggatcccttcat

SEQ ID NO: 592368 - DNA, 15 bp, Homo sapiens
ctggatcccttcatc

SEQ ID NO: 592369 - DNA, 15 bp, Homo sapiens
tggatcccttcatca

SEQ ID NO: 592370 - DNA, 15 bp, Homo sapiens
ggatcccttcatcag

SEQ ID NO: 592371 - DNA, 15 bp, Homo sapiens
gatcccttcatcagg

SEQ ID NO: 592372 - DNA, 15 bp, Homo sapiens
atcccttcatcagga

SEQ ID NO: 592373 - DNA, 15 bp, Homo sapiens
tcccttcatcaggac

SEQ ID NO: 592374 - DNA, 15 bp, Homo sapiens
cccttcatcaggacc

SEQ ID NO: 592375 - DNA, 15 bp, Homo sapiens
ccttcatcaggacct

SEQ ID NO: 592376 - DNA, 15 bp, Homo sapiens
cttcatcaggaccta

SEQ ID NO: 592377 - DNA, 15 bp, Homo sapiens
ttcatcaggacctag

SEQ ID NO: 592378 - DNA, 15 bp, Homo sapiens
tcatcaggacctagg

SEQ ID NO: 592379 - DNA, 15 bp, Homo sapiens
catcaggacctaggg

SEQ ID NO: 592380 - DNA, 15 bp, Homo sapiens
atcaggacctagggt

SEQ ID NO: 592381 - DNA, 15 bp, Homo sapiens
tcaggacctagggtg

SEQ ID NO: 592382 - DNA, 15 bp, Homo sapiens
caggacctagggtgg

SEQ ID NO: 592383 - DNA, 15 bp, Homo sapiens
aggacctagggtggt

SEQ ID NO: 592384 - DNA, 15 bp, Homo sapiens
ggacctagggtggtg

SEQ ID NO: 592385 - DNA, 15 bp, Homo sapiens
gacctagggtggtga

SEQ ID NO: 592386 - DNA, 15 bp, Homo sapiens
acctagggtggtgag

SEQ ID NO: 592387 - DNA, 15 bp, Homo sapiens
cctagggtggtgaga

SEQ ID NO: 592388 - DNA, 15 bp, Homo sapiens
ctagggtggtgagag

SEQ ID NO: 592389 - DNA, 15 bp, Homo sapiens
tagggtggtgagagc

SEQ ID NO: 592390 - DNA, 15 bp, Homo sapiens
agggtggtgagagct

SEQ ID NO: 592391 - DNA, 15 bp, Homo sapiens
gggtggtgagagctt

SEQ ID NO: 592392 - DNA, 15 bp, Homo sapiens
ggtggtgagagcttt

SEQ ID NO: 592393 - DNA, 15 bp, Homo sapiens
gtggtgagagctttg

SEQ ID NO: 592394 - DNA, 15 bp, Homo sapiens
tggtgagagctttga

SEQ ID NO: 592395 - DNA, 15 bp, Homo sapiens
ggtgagagctttgag

SEQ ID NO: 592396 - DNA, 15 bp, Homo sapiens
gtgagagctttgagc

SEQ ID NO: 592397 - DNA, 15 bp, Homo sapiens
tgagagctttgagcc

SEQ ID NO: 592398 - DNA, 15 bp, Homo sapiens
gagagctttgagcct

SEQ ID NO: 592399 - DNA, 15 bp, Homo sapiens
agagctttgagcctg

SEQ ID NO: 592400 - DNA, 15 bp, Homo sapiens
gagctttgagcctgc

SEQ ID NO: 592401 - DNA, 15 bp, Homo sapiens
agctttgagcctgct

SEQ ID NO: 592402 - DNA, 15 bp, Homo sapiens
gctttgagcctgctc

SEQ ID NO: 592403 - DNA, 15 bp, Homo sapiens
ctttgagcctgctct

SEQ ID NO: 592404 - DNA, 15 bp, Homo sapiens
tttgagcctgctctg

SEQ ID NO: 592405 - DNA, 15 bp, Homo sapiens
ttgagcctgctctgc

SEQ ID NO: 592406 - DNA, 15 bp, Homo sapiens
tgagcctgctctgct

SEQ ID NO: 592407 - DNA, 15 bp, Homo sapiens
gagcctgctctgctc

SEQ ID NO: 592408 - DNA, 15 bp, Homo sapiens
agcctgctctgctcc

SEQ ID NO: 592409 - DNA, 15 bp, Homo sapiens
gcctgctctgctcca

SEQ ID NO: 592410 - DNA, 15 bp, Homo sapiens
cctgctctgctccag

SEQ ID NO: 592411 - DNA, 15 bp, Homo sapiens
ctgctctgctccagg

SEQ ID NO: 592412 - DNA, 15 bp, Homo sapiens
tgctctgctccaggc

SEQ ID NO: 592413 - DNA, 15 bp, Homo sapiens
gctctgctccaggca

SEQ ID NO: 592414 - DNA, 15 bp, Homo sapiens
ctctgctccaggcag

SEQ ID NO: 592415 - DNA, 15 bp, Homo sapiens
tctgctccaggcaga

SEQ ID NO: 592416 - DNA, 15 bp, Homo sapiens
ctgctccaggcagac

SEQ ID NO: 592417 - DNA, 15 bp, Homo sapiens
tgctccaggcagaca

SEQ ID NO: 592418 - DNA, 15 bp, Homo sapiens
gctccaggcagacat

SEQ ID NO: 592419 - DNA, 15 bp, Homo sapiens
ctccaggcagacatt

SEQ ID NO: 592420 - DNA, 15 bp, Homo sapiens
tccaggcagacattg

SEQ ID NO: 592421 - DNA, 15 bp, Homo sapiens
ccaggcagacattgt

SEQ ID NO: 592422 - DNA, 15 bp, Homo sapiens
caggcagacattgtg

SEQ ID NO: 592423 - DNA, 15 bp, Homo sapiens
aggcagacattgtgt

SEQ ID NO: 592424 - DNA, 15 bp, Homo sapiens
ggcagacattgtgtc

SEQ ID NO: 592425 - DNA, 15 bp, Homo sapiens
gcagacattgtgtct

SEQ ID NO: 592426 - DNA, 15 bp, Homo sapiens
cagacattgtgtctg

SEQ ID NO: 592427 - DNA, 15 bp, Homo sapiens
agacattgtgtctgg

SEQ ID NO: 592428 - DNA, 15 bp, Homo sapiens
gacattgtgtctggc

SEQ ID NO: 592429 - DNA, 15 bp, Homo sapiens
acattgtgtctggcc

SEQ ID NO: 592430 - DNA, 15 bp, Homo sapiens
cattgtgtctggccc

SEQ ID NO: 592431 - DNA, 15 bp, Homo sapiens
attgtgtctggccct

SEQ ID NO: 592432 - DNA, 15 bp, Homo sapiens
ttgtgtctggccctg

SEQ ID NO: 592433 - DNA, 15 bp, Homo sapiens
tgtgtctggccctgc

SEQ ID NO: 592434 - DNA, 15 bp, Homo sapiens
gtgtctggccctgcc

SEQ ID NO: 592435 - DNA, 15 bp, Homo sapiens
tgtctggccctgcca

SEQ ID NO: 592436 - DNA, 15 bp, Homo sapiens
gtctggccctgccag

SEQ ID NO: 592437 - DNA, 15 bp, Homo sapiens
tctggccctgccagg

SEQ ID NO: 592438 - DNA, 15 bp, Homo sapiens
ctggccctgccagga

SEQ ID NO: 592439 - DNA, 15 bp, Homo sapiens
tggccctgccaggat

SEQ ID NO: 592440 - DNA, 15 bp, Homo sapiens
ggccctgccaggatg

SEQ ID NO: 592441 - DNA, 15 bp, Homo sapiens
gccctgccaggatgg

SEQ ID NO: 592442 - DNA, 15 bp, Homo sapiens
ccctgccaggatgga

SEQ ID NO: 592443 - DNA, 15 bp, Homo sapiens
cctgccaggatggat

SEQ ID NO: 592444 - DNA, 15 bp, Homo sapiens
ctgccaggatggata

SEQ ID NO: 592445 - DNA, 15 bp, Homo sapiens
tgccaggatggatag

SEQ ID NO: 592446 - DNA, 15 bp, Homo sapiens
gccaggatggataga

SEQ ID NO: 592447 - DNA, 15 bp, Homo sapiens
ccaggatggatagac

SEQ ID NO: 592448 - DNA, 15 bp, Homo sapiens
caggatggatagaca

SEQ ID NO: 592449 - DNA, 15 bp, Homo sapiens
aggatggatagacag

SEQ ID NO: 592450 - DNA, 15 bp, Homo sapiens
ggatggatagacagc

SEQ ID NO: 592451 - DNA, 15 bp, Homo sapiens
gatggatagacagca

SEQ ID NO: 592452 - DNA, 15 bp, Homo sapiens
atggatagacagcag

SEQ ID NO: 592453 - DNA, 15 bp, Homo sapiens
tggatagacagcagg

SEQ ID NO: 592454 - DNA, 15 bp, Homo sapiens
ggatagacagcagga

SEQ ID NO: 592455 - DNA, 15 bp, Homo sapiens
gatagacagcaggat

SEQ ID NO: 592456 - DNA, 15 bp, Homo sapiens
atagacagcaggatg

SEQ ID NO: 592457 - DNA, 15 bp, Homo sapiens
tagacagcaggatgt

SEQ ID NO: 592458 - DNA, 15 bp, Homo sapiens
agacagcaggatgtt

SEQ ID NO: 592459 - DNA, 15 bp, Homo sapiens
gacagcaggatgtta

SEQ ID NO: 592460 - DNA, 15 bp, Homo sapiens
acagcaggatgttac

SEQ ID NO: 592461 - DNA, 15 bp, Homo sapiens
cagcaggatgttaca

SEQ ID NO: 592462 - DNA, 15 bp, Homo sapiens
agcaggatgttacac

SEQ ID NO: 592463 - DNA, 15 bp, Homo sapiens
gcaggatgttacacg

SEQ ID NO: 592464 - DNA, 15 bp, Homo sapiens
caggatgttacacgt

SEQ ID NO: 592465 - DNA, 15 bp, Homo sapiens
aggatgttacacgtt

SEQ ID NO: 592466 - DNA, 15 bp, Homo sapiens
ggatgttacacgttg

SEQ ID NO: 592467 - DNA, 15 bp, Homo sapiens
gatgttacacgttga

SEQ ID NO: 592468 - DNA, 15 bp, Homo sapiens
atgttacacgttgag

SEQ ID NO: 592469 - DNA, 15 bp, Homo sapiens
tgttacacgttgagg

SEQ ID NO: 592470 - DNA, 15 bp, Homo sapiens
gttacacgttgagga

SEQ ID NO: 592471 - DNA, 15 bp, Homo sapiens
ttacacgttgaggac

SEQ ID NO: 592472 - DNA, 15 bp, Homo sapiens
tacacgttgaggaca

SEQ ID NO: 592473 - DNA, 15 bp, Homo sapiens
acacgttgaggacat

SEQ ID NO: 592474 - DNA, 15 bp, Homo sapiens
cacgttgaggacatg

SEQ ID NO: 592475 - DNA, 15 bp, Homo sapiens
acgttgaggacatga

SEQ ID NO: 592476 - DNA, 15 bp, Homo sapiens
cgttgaggacatgaa

SEQ ID NO: 592477 - DNA, 15 bp, Homo sapiens
gttgaggacatgaag

SEQ ID NO: 592478 - DNA, 15 bp, Homo sapiens
ttgaggacatgaagg

SEQ ID NO: 592479 - DNA, 15 bp, Homo sapiens
tgaggacatgaaggt

SEQ ID NO: 592480 - DNA, 15 bp, Homo sapiens
gaggacatgaaggtc

SEQ ID NO: 592481 - DNA, 15 bp, Homo sapiens
aggacatgaaggtca

SEQ ID NO: 592482 - DNA, 15 bp, Homo sapiens
ggacatgaaggtcat

SEQ ID NO: 592483 - DNA, 15 bp, Homo sapiens
gacatgaaggtcatc

SEQ ID NO: 592484 - DNA, 15 bp, Homo sapiens
acatgaaggtcatca

SEQ ID NO: 592485 - DNA, 15 bp, Homo sapiens
catgaaggtcatcag

SEQ ID NO: 592486 - DNA, 15 bp, Homo sapiens
atgaaggtcatcagg

SEQ ID NO: 592487 - DNA, 15 bp, Homo sapiens
tgaaggtcatcagga

SEQ ID NO: 592488 - DNA, 15 bp, Homo sapiens
gaaggtcatcaggaa

SEQ ID NO: 592489 - DNA, 15 bp, Homo sapiens
aaggtcatcaggaat

SEQ ID NO: 592490 - DNA, 15 bp, Homo sapiens
aggtcatcaggaatg

SEQ ID NO: 592491 - DNA, 15 bp, Homo sapiens
ggtcatcaggaatgt

SEQ ID NO: 592492 - DNA, 15 bp, Homo sapiens
gtcatcaggaatgtg

SEQ ID NO: 592493 - DNA, 15 bp, Homo sapiens
tcatcaggaatgtgg

SEQ ID NO: 592494 - DNA, 15 bp, Homo sapiens
catcaggaatgtggc

SEQ ID NO: 592495 - DNA, 15 bp, Homo sapiens
atcaggaatgtggct

SEQ ID NO: 592496 - DNA, 15 bp, Homo sapiens
tcaggaatgtggctg

SEQ ID NO: 592497 - DNA, 15 bp, Homo sapiens
caggaatgtggctgg

SEQ ID NO: 592498 - DNA, 15 bp, Homo sapiens
aggaatgtggctgga

SEQ ID NO: 592499 - DNA, 15 bp, Homo sapiens
ggaatgtggctggaa

SEQ ID NO: 592500 - DNA, 15 bp, Homo sapiens
gaatgtggctggaat

SEQ ID NO: 592501 - DNA, 15 bp, Homo sapiens
aatgtggctggaatc

SEQ ID NO: 592502 - DNA, 15 bp, Homo sapiens
atgtggctggaatct

SEQ ID NO: 592503 - DNA, 15 bp, Homo sapiens
tgtggctggaatctg

SEQ ID NO: 592504 - DNA, 15 bp, Homo sapiens
gtggctggaatctgt

SEQ ID NO: 592505 - DNA, 15 bp, Homo sapiens
tggctggaatctgtt

SEQ ID NO: 592506 - DNA, 15 bp, Homo sapiens
ggctggaatctgtta

SEQ ID NO: 592507 - DNA, 15 bp, Homo sapiens
gctggaatctgttag

SEQ ID NO: 592508 - DNA, 15 bp, Homo sapiens
ctggaatctgttagg

SEQ ID NO: 592509 - DNA, 15 bp, Homo sapiens
tggaatctgttaggc

SEQ ID NO: 592510 - DNA, 15 bp, Homo sapiens
ggaatctgttaggcc

SEQ ID NO: 592511 - DNA, 15 bp, Homo sapiens
gaatctgttaggcct

SEQ ID NO: 592512 - DNA, 15 bp, Homo sapiens
aatctgttaggcctc

SEQ ID NO: 592513 - DNA, 15 bp, Homo sapiens
atctgttaggcctcc

SEQ ID NO: 592514 - DNA, 15 bp, Homo sapiens
tctgttaggcctccc

SEQ ID NO: 592515 - DNA, 15 bp, Homo sapiens
ctgttaggcctcccc

SEQ ID NO: 592516 - DNA, 15 bp, Homo sapiens
tgttaggcctccccc

SEQ ID NO: 592517 - DNA, 15 bp, Homo sapiens
gttaggcctccccca

SEQ ID NO: 592518 - DNA, 15 bp, Homo sapiens
ttaggcctcccccag

SEQ ID NO: 592519 - DNA, 15 bp, Homo sapiens
taggcctcccccagc

SEQ ID NO: 592520 - DNA, 15 bp, Homo sapiens
aggcctcccccagcc

SEQ ID NO: 592521 - DNA, 15 bp, Homo sapiens
ggcctcccccagccc

SEQ ID NO: 592522 - DNA, 15 bp, Homo sapiens
gcctcccccagccca

SEQ ID NO: 592523 - DNA, 15 bp, Homo sapiens
cctcccccagcccag

SEQ ID NO: 592524 - DNA, 15 bp, Homo sapiens
ctcccccagcccagg

SEQ ID NO: 592525 - DNA, 15 bp, Homo sapiens
tcccccagcccaggc

SEQ ID NO: 592526 - DNA, 15 bp, Homo sapiens
cccccagcccaggcg

SEQ ID NO: 592527 - DNA, 15 bp, Homo sapiens
ccccagcccaggcgg

SEQ ID NO: 592528 - DNA, 15 bp, Homo sapiens
cccagcccaggcggg

SEQ ID NO: 592529 - DNA, 15 bp, Homo sapiens
ccagcccaggcgggg

SEQ ID NO: 592530 - DNA, 15 bp, Homo sapiens
cagcccaggcggggg

SEQ ID NO: 592531 - DNA, 15 bp, Homo sapiens
agcccaggcgggggc

SEQ ID NO: 592532 - DNA, 15 bp, Homo sapiens
gcccaggcgggggct

SEQ ID NO: 592533 - DNA, 15 bp, Homo sapiens
cccaggcgggggctg

SEQ ID NO: 592534 - DNA, 15 bp, Homo sapiens
ccaggcgggggctgc

SEQ ID NO: 592535 - DNA, 15 bp, Homo sapiens
caggcgggggctgcc

SEQ ID NO: 592536 - DNA, 15 bp, Homo sapiens
aggcgggggctgcca

SEQ ID NO: 592537 - DNA, 15 bp, Homo sapiens
ggcgggggctgccaa

SEQ ID NO: 592538 - DNA, 15 bp, Homo sapiens
gcgggggctgccaag

SEQ ID NO: 592539 - DNA, 15 bp, Homo sapiens
cgggggctgccaagt

SEQ ID NO: 592540 - DNA, 15 bp, Homo sapiens
gggggctgccaagtt

SEQ ID NO: 592541 - DNA, 15 bp, Homo sapiens
ggggctgccaagttt

SEQ ID NO: 592542 - DNA, 15 bp, Homo sapiens
gggctgccaagtttg

SEQ ID NO: 592543 - DNA, 15 bp, Homo sapiens
ggctgccaagtttgg

SEQ ID NO: 592544 - DNA, 15 bp, Homo sapiens
gctgccaagtttggg

SEQ ID NO: 592545 - DNA, 15 bp, Homo sapiens
ctgccaagtttgggc

SEQ ID NO: 592546 - DNA, 15 bp, Homo sapiens
tgccaagtttgggcc

SEQ ID NO: 592547 - DNA, 15 bp, Homo sapiens
gccaagtttgggcct

SEQ ID NO: 592548 - DNA, 15 bp, Homo sapiens
ccaagtttgggccta

SEQ ID NO: 592549 - DNA, 15 bp, Homo sapiens
caagtttgggcctat

SEQ ID NO: 592550 - DNA, 15 bp, Homo sapiens
aagtttgggcctatc

SEQ ID NO: 592551 - DNA, 15 bp, Homo sapiens
agtttgggcctatcc

SEQ ID NO: 592552 - DNA, 15 bp, Homo sapiens
gtttgggcctatcct

SEQ ID NO: 592553 - DNA, 15 bp, Homo sapiens
tttgggcctatcctc

SEQ ID NO: 592554 - DNA, 15 bp, Homo sapiens
ttgggcctatcctct

SEQ ID NO: 592555 - DNA, 15 bp, Homo sapiens
tgggcctatcctctg

SEQ ID NO: 592556 - DNA, 15 bp, Homo sapiens
gggcctatcctctgt

SEQ ID NO: 592557 - DNA, 15 bp, Homo sapiens
ggcctatcctctgtt

SEQ ID NO: 592558 - DNA, 15 bp, Homo sapiens
gcctatcctctgttc

SEQ ID NO: 592559 - DNA, 15 bp, Homo sapiens
cctatcctctgttcc

SEQ ID NO: 592560 - DNA, 15 bp, Homo sapiens
ctatcctctgttcct

SEQ ID NO: 592561 - DNA, 15 bp, Homo sapiens
tatcctctgttcctc

SEQ ID NO: 592562 - DNA, 15 bp, Homo sapiens
atcctctgttcctct

SEQ ID NO: 592563 - DNA, 15 bp, Homo sapiens
tcctctgttcctctc

SEQ ID NO: 592564 - DNA, 15 bp, Homo sapiens
cctctgttcctctcc

SEQ ID NO: 592565 - DNA, 15 bp, Homo sapiens
ctctgttcctctcct

SEQ ID NO: 592566 - DNA, 15 bp, Homo sapiens
tctgttcctctcctt

SEQ ID NO: 592567 - DNA, 15 bp, Homo sapiens
ctgttcctctcctta

SEQ ID NO: 592568 - DNA, 15 bp, Homo sapiens
tgttcctctccttat

SEQ ID NO: 592569 - DNA, 15 bp, Homo sapiens
gttcctctccttatt

SEQ ID NO: 592570 - DNA, 15 bp, Homo sapiens
ttcctctccttattt

SEQ ID NO: 592571 - DNA, 15 bp, Homo sapiens
tcctctccttatttg

SEQ ID NO: 592572 - DNA, 15 bp, Homo sapiens
cctctccttatttgg

SEQ ID NO: 592573 - DNA, 15 bp, Homo sapiens
ctctccttatttgga

SEQ ID NO: 592574 - DNA, 15 bp, Homo sapiens
tctccttatttggac

SEQ ID NO: 592575 - DNA, 15 bp, Homo sapiens
ctccttatttggacc

SEQ ID NO: 592576 - DNA, 15 bp, Homo sapiens
tccttatttggacct

SEQ ID NO: 592577 - DNA, 15 bp, Homo sapiens
ccttatttggacctt

SEQ ID NO: 592578 - DNA, 15 bp, Homo sapiens
cttatttggaccttc

SEQ ID NO: 592579 - DNA, 15 bp, Homo sapiens
ttatttggaccttca

SEQ ID NO: 592580 - DNA, 15 bp, Homo sapiens
tatttggaccttcag

SEQ ID NO: 592581 - DNA, 15 bp, Homo sapiens
atttggaccttcagg

SEQ ID NO: 592582 - DNA, 15 bp, Homo sapiens
tttggaccttcaggt

SEQ ID NO: 592583 - DNA, 15 bp, Homo sapiens
ttggaccttcaggtg

SEQ ID NO: 592584 - DNA, 15 bp, Homo sapiens
tggaccttcaggtga

SEQ ID NO: 592585 - DNA, 15 bp, Homo sapiens
ggaccttcaggtgat

SEQ ID NO: 592586 - DNA, 15 bp, Homo sapiens
gaccttcaggtgata

SEQ ID NO: 592587 - DNA, 15 bp, Homo sapiens
accttcaggtgataa

SEQ ID NO: 592588 - DNA, 15 bp, Homo sapiens
ccttcaggtgataag

SEQ ID NO: 592589 - DNA, 15 bp, Homo sapiens
cttcaggtgataagg

SEQ ID NO: 592590 - DNA, 15 bp, Homo sapiens
ttcaggtgataaggc

SEQ ID NO: 592591 - DNA, 15 bp, Homo sapiens
tcaggtgataaggct

SEQ ID NO: 592592 - DNA, 15 bp, Homo sapiens
caggtgataaggctg

SEQ ID NO: 592593 - DNA, 15 bp, Homo sapiens
aggtgataaggctga

SEQ ID NO: 592594 - DNA, 15 bp, Homo sapiens
ggtgataaggctgag

SEQ ID NO: 592595 - DNA, 15 bp, Homo sapiens
gtgataaggctgaga

SEQ ID NO: 592596 - DNA, 15 bp, Homo sapiens
tgataaggctgagac

SEQ ID NO: 592597 - DNA, 15 bp, Homo sapiens
gataaggctgagaca

SEQ ID NO: 592598 - DNA, 15 bp, Homo sapiens
ataaggctgagacat

SEQ ID NO: 592599 - DNA, 15 bp, Homo sapiens
taaggctgagacata

SEQ ID NO: 592600 - DNA, 15 bp, Homo sapiens
aaggctgagacataa

SEQ ID NO: 592601 - DNA, 15 bp, Homo sapiens
aggctgagacataaa

SEQ ID NO: 592602 - DNA, 15 bp, Homo sapiens
ggctgagacataaag

SEQ ID NO: 592603 - DNA, 15 bp, Homo sapiens
gctgagacataaagg

SEQ ID NO: 592604 - DNA, 15 bp, Homo sapiens
ctgagacataaagga

SEQ ID NO: 592605 - DNA, 15 bp, Homo sapiens
tgagacataaaggag

SEQ ID NO: 592606 - DNA, 15 bp, Homo sapiens
gagacataaaggagg

SEQ ID NO: 592607 - DNA, 15 bp, Homo sapiens
agacataaaggaggc

SEQ ID NO: 592608 - DNA, 15 bp, Homo sapiens
gacataaaggaggct

SEQ ID NO: 592609 - DNA, 15 bp, Homo sapiens
acataaaggaggctg

SEQ ID NO: 592610 - DNA, 15 bp, Homo sapiens
cataaaggaggctgg

SEQ ID NO: 592611 - DNA, 15 bp, Homo sapiens
ataaaggaggctggg

SEQ ID NO: 592612 - DNA, 15 bp, Homo sapiens
taaaggaggctgggc

SEQ ID NO: 592613 - DNA, 15 bp, Homo sapiens
aaaggaggctgggcc

SEQ ID NO: 592614 - DNA, 15 bp, Homo sapiens
aaggaggctgggccc

SEQ ID NO: 592615 - DNA, 15 bp, Homo sapiens
aggaggctgggccct

SEQ ID NO: 592616 - DNA, 15 bp, Homo sapiens
ggaggctgggccctg

SEQ ID NO: 592617 - DNA, 15 bp, Homo sapiens
gaggctgggccctgc

SEQ ID NO: 592618 - DNA, 15 bp, Homo sapiens
aggctgggccctgcc

SEQ ID NO: 592619 - DNA, 15 bp, Homo sapiens
ggctgggccctgcca

SEQ ID NO: 592620 - DNA, 15 bp, Homo sapiens
gctgggccctgccac

SEQ ID NO: 592621 - DNA, 15 bp, Homo sapiens
ctgggccctgccacc

SEQ ID NO: 592622 - DNA, 15 bp, Homo sapiens
tgggccctgccacca

SEQ ID NO: 592623 - DNA, 15 bp, Homo sapiens
gggccctgccaccac

SEQ ID NO: 592624 - DNA, 15 bp, Homo sapiens
ggccctgccaccacg

SEQ ID NO: 592625 - DNA, 15 bp, Homo sapiens
gccctgccaccacga

SEQ ID NO: 592626 - DNA, 15 bp, Homo sapiens
ccctgccaccacgac

SEQ ID NO: 592627 - DNA, 15 bp, Homo sapiens
cctgccaccacgaca

SEQ ID NO: 592628 - DNA, 15 bp, Homo sapiens
ctgccaccacgacag

SEQ ID NO: 592629 - DNA, 15 bp, Homo sapiens
tgccaccacgacagc

SEQ ID NO: 592630 - DNA, 15 bp, Homo sapiens
gccaccacgacagca

SEQ ID NO: 592631 - DNA, 15 bp, Homo sapiens
ccaccacgacagcag

SEQ ID NO: 592632 - DNA, 15 bp, Homo sapiens
caccacgacagcagc

SEQ ID NO: 592633 - DNA, 15 bp, Homo sapiens
accacgacagcagcc

SEQ ID NO: 592634 - DNA, 15 bp, Homo sapiens
ccacgacagcagcca

SEQ ID NO: 592635 - DNA, 15 bp, Homo sapiens
cacgacagcagccac

SEQ ID NO: 592636 - DNA, 15 bp, Homo sapiens
acgacagcagccaca

SEQ ID NO: 592637 - DNA, 15 bp, Homo sapiens
cgacagcagccacac

SEQ ID NO: 592638 - DNA, 15 bp, Homo sapiens
gacagcagccacacc

SEQ ID NO: 592639 - DNA, 15 bp, Homo sapiens
acagcagccacacct

SEQ ID NO: 592640 - DNA, 15 bp, Homo sapiens
cagcagccacacctc

SEQ ID NO: 592641 - DNA, 15 bp, Homo sapiens
agcagccacacctct

SEQ ID NO: 592642 - DNA, 15 bp, Homo sapiens
gcagccacacctctg

SEQ ID NO: 592643 - DNA, 15 bp, Homo sapiens
cagccacacctctgc

SEQ ID NO: 592644 - DNA, 15 bp, Homo sapiens
agccacacctctgca

SEQ ID NO: 592645 - DNA, 15 bp, Homo sapiens
gccacacctctgcag

SEQ ID NO: 592646 - DNA, 15 bp, Homo sapiens
ccacacctctgcaga

SEQ ID NO: 592647 - DNA, 15 bp, Homo sapiens
cacacctctgcagag

SEQ ID NO: 592648 - DNA, 15 bp, Homo sapiens
acacctctgcagaga

SEQ ID NO: 592649 - DNA, 15 bp, Homo sapiens
cacctctgcagagag

SEQ ID NO: 592650 - DNA, 15 bp, Homo sapiens
acctctgcagagaga

SEQ ID NO: 592651 - DNA, 15 bp, Homo sapiens
cctctgcagagagaa

SEQ ID NO: 592652 - DNA, 15 bp, Homo sapiens
ctctgcagagagaat

SEQ ID NO: 592653 - DNA, 15 bp, Homo sapiens
tctgcagagagaatg

SEQ ID NO: 592654 - DNA, 15 bp, Homo sapiens
ctgcagagagaatgg

SEQ ID NO: 592655 - DNA, 15 bp, Homo sapiens
tgcagagagaatggt

SEQ ID NO: 592656 - DNA, 15 bp, Homo sapiens
gcagagagaatggtg

SEQ ID NO: 592657 - DNA, 15 bp, Homo sapiens
cagagagaatggtga

SEQ ID NO: 592658 - DNA, 15 bp, Homo sapiens
agagagaatggtgag

SEQ ID NO: 592659 - DNA, 15 bp, Homo sapiens
gagagaatggtgagt

SEQ ID NO: 592660 - DNA, 15 bp, Homo sapiens
agagaatggtgagtg

SEQ ID NO: 592661 - DNA, 15 bp, Homo sapiens
gagaatggtgagtgc

SEQ ID NO: 592662 - DNA, 15 bp, Homo sapiens
agaatggtgagtgcc

SEQ ID NO: 592663 - DNA, 15 bp, Homo sapiens
gaatggtgagtgcct

SEQ ID NO: 592664 - DNA, 15 bp, Homo sapiens
aatggtgagtgcctg

SEQ ID NO: 592665 - DNA, 15 bp, Homo sapiens
atggtgagtgcctgc

SEQ ID NO: 592666 - DNA, 15 bp, Homo sapiens
tggtgagtgcctgct

SEQ ID NO: 592667 - DNA, 15 bp, Homo sapiens
ggtgagtgcctgctg

SEQ ID NO: 592668 - DNA, 15 bp, Homo sapiens
gtgagtgcctgctgg

SEQ ID NO: 592669 - DNA, 15 bp, Homo sapiens
tgagtgcctgctggg

SEQ ID NO: 592670 - DNA, 15 bp, Homo sapiens
gagtgcctgctgggg

SEQ ID NO: 592671 - DNA, 15 bp, Homo sapiens
agtgcctgctgggga

SEQ ID NO: 592672 - DNA, 15 bp, Homo sapiens
gtgcctgctggggaa

SEQ ID NO: 592673 - DNA, 15 bp, Homo sapiens
tgcctgctggggaag

SEQ ID NO: 592674 - DNA, 15 bp, Homo sapiens
gcctgctggggaaga

SEQ ID NO: 592675 - DNA, 15 bp, Homo sapiens
cctgctggggaagaa

SEQ ID NO: 592676 - DNA, 15 bp, Homo sapiens
ctgctggggaagaaa

SEQ ID NO: 592677 - DNA, 15 bp, Homo sapiens
tgctggggaagaaag

SEQ ID NO: 592678 - DNA, 15 bp, Homo sapiens
gctggggaagaaagg

SEQ ID NO: 592679 - DNA, 15 bp, Homo sapiens
ctggggaagaaaggc

SEQ ID NO: 592680 - DNA, 15 bp, Homo sapiens
tggggaagaaaggct

SEQ ID NO: 592681 - DNA, 15 bp, Homo sapiens
ggggaagaaaggcta

SEQ ID NO: 592682 - DNA, 15 bp, Homo sapiens
gggaagaaaggctag

SEQ ID NO: 592683 - DNA, 15 bp, Homo sapiens
ggaagaaaggctagc

SEQ ID NO: 592684 - DNA, 15 bp, Homo sapiens
gaagaaaggctagcg

SEQ ID NO: 592685 - DNA, 15 bp, Homo sapiens
aagaaaggctagcgg

SEQ ID NO: 592686 - DNA, 15 bp, Homo sapiens
agaaaggctagcggt

SEQ ID NO: 592687 - DNA, 15 bp, Homo sapiens
gaaaggctagcggtc

SEQ ID NO: 592688 - DNA, 15 bp, Homo sapiens
aaaggctagcggtct

SEQ ID NO: 592689 - DNA, 15 bp, Homo sapiens
aaggctagcggtctc

SEQ ID NO: 592690 - DNA, 15 bp, Homo sapiens
aggctagcggtctcc

SEQ ID NO: 592691 - DNA, 15 bp, Homo sapiens
ggctagcggtctccc

SEQ ID NO: 592692 - DNA, 15 bp, Homo sapiens
gctagcggtctccca

SEQ ID NO: 592693 - DNA, 15 bp, Homo sapiens
ctagcggtctcccag

SEQ ID NO: 592694 - DNA, 15 bp, Homo sapiens
tagcggtctcccagg

SEQ ID NO: 592695 - DNA, 15 bp, Homo sapiens
agcggtctcccaggt

SEQ ID NO: 592696 - DNA, 15 bp, Homo sapiens
gcggtctcccaggtg

SEQ ID NO: 592697 - DNA, 15 bp, Homo sapiens
cggtctcccaggtgc

SEQ ID NO: 592698 - DNA, 15 bp, Homo sapiens
ggtctcccaggtgct

SEQ ID NO: 592699 - DNA, 15 bp, Homo sapiens
gtctcccaggtgctg

SEQ ID NO: 592700 - DNA, 15 bp, Homo sapiens
tctcccaggtgctgg

SEQ ID NO: 592701 - DNA, 15 bp, Homo sapiens
ctcccaggtgctggc

SEQ ID NO: 592702 - DNA, 15 bp, Homo sapiens
tcccaggtgctggcc

SEQ ID NO: 592703 - DNA, 15 bp, Homo sapiens
cccaggtgctggcct

SEQ ID NO: 592704 - DNA, 15 bp, Homo sapiens
ccaggtgctggcctt

SEQ ID NO: 592705 - DNA, 15 bp, Homo sapiens
caggtgctggccttt

SEQ ID NO: 592706 - DNA, 15 bp, Homo sapiens
aggtgctggcctttg

SEQ ID NO: 592707 - DNA, 15 bp, Homo sapiens
ggtgctggcctttgg

SEQ ID NO: 592708 - DNA, 15 bp, Homo sapiens
gtgctggcctttggg

SEQ ID NO: 592709 - DNA, 15 bp, Homo sapiens
tgctggcctttgggc

SEQ ID NO: 592710 - DNA, 15 bp, Homo sapiens
gctggcctttgggct

SEQ ID NO: 592711 - DNA, 15 bp, Homo sapiens
ctggcctttgggctg

SEQ ID NO: 592712 - DNA, 15 bp, Homo sapiens
tggcctttgggctgg

SEQ ID NO: 592713 - DNA, 15 bp, Homo sapiens
ggcctttgggctggg

SEQ ID NO: 592714 - DNA, 15 bp, Homo sapiens
gcctttgggctgggg

SEQ ID NO: 592715 - DNA, 15 bp, Homo sapiens
cctttgggctggggg

SEQ ID NO: 592716 - DNA, 15 bp, Homo sapiens
ctttgggctggggga

SEQ ID NO: 592717 - DNA, 15 bp, Homo sapiens
tttgggctgggggag

SEQ ID NO: 592718 - DNA, 15 bp, Homo sapiens
ttgggctgggggagc

SEQ ID NO: 592719 - DNA, 15 bp, Homo sapiens
tgggctgggggagca

SEQ ID NO: 592720 - DNA, 15 bp, Homo sapiens
gggctgggggagcag

SEQ ID NO: 592721 - DNA, 15 bp, Homo sapiens
ggctgggggagcaga

SEQ ID NO: 592722 - DNA, 15 bp, Homo sapiens
gctgggggagcagag

SEQ ID NO: 592723 - DNA, 15 bp, Homo sapiens
ctgggggagcagagt

SEQ ID NO: 592724 - DNA, 15 bp, Homo sapiens
tgggggagcagagtt

SEQ ID NO: 592725 - DNA, 15 bp, Homo sapiens
gggggagcagagttt

SEQ ID NO: 592726 - DNA, 15 bp, Homo sapiens
ggggagcagagtttt

SEQ ID NO: 592727 - DNA, 15 bp, Homo sapiens
gggagcagagttttc

SEQ ID NO: 592728 - DNA, 15 bp, Homo sapiens
ggagcagagttttct

SEQ ID NO: 592729 - DNA, 15 bp, Homo sapiens
gagcagagttttctg

SEQ ID NO: 592730 - DNA, 15 bp, Homo sapiens
agcagagttttctgt

SEQ ID NO: 592731 - DNA, 15 bp, Homo sapiens
gcagagttttctgtg

SEQ ID NO: 592732 - DNA, 15 bp, Homo sapiens
cagagttttctgtgc

SEQ ID NO: 592733 - DNA, 15 bp, Homo sapiens
agagttttctgtgct

SEQ ID NO: 592734 - DNA, 15 bp, Homo sapiens
gagttttctgtgctt

SEQ ID NO: 592735 - DNA, 15 bp, Homo sapiens
agttttctgtgcttg

SEQ ID NO: 592736 - DNA, 15 bp, Homo sapiens
gttttctgtgcttgt

SEQ ID NO: 592737 - DNA, 15 bp, Homo sapiens
ttttctgtgcttgtg

SEQ ID NO: 592738 - DNA, 15 bp, Homo sapiens
tttctgtgcttgtgt

SEQ ID NO: 592739 - DNA, 15 bp, Homo sapiens
ttctgtgcttgtgtt

SEQ ID NO: 592740 - DNA, 15 bp, Homo sapiens
tctgtgcttgtgttg

SEQ ID NO: 592741 - DNA, 15 bp, Homo sapiens
ctgtgcttgtgttgg

SEQ ID NO: 592742 - DNA, 15 bp, Homo sapiens
tgtgcttgtgttggg

SEQ ID NO: 592743 - DNA, 15 bp, Homo sapiens
gtgcttgtgttgggt

SEQ ID NO: 592744 - DNA, 15 bp, Homo sapiens
tgcttgtgttgggtt

SEQ ID NO: 592745 - DNA, 15 bp, Homo sapiens
gcttgtgttgggttg

SEQ ID NO: 592746 - DNA, 15 bp, Homo sapiens
cttgtgttgggttga

SEQ ID NO: 592747 - DNA, 15 bp, Homo sapiens
ttgtgttgggttgag

SEQ ID NO: 592748 - DNA, 15 bp, Homo sapiens
tgtgttgggttgagg

SEQ ID NO: 592749 - DNA, 15 bp, Homo sapiens
gtgttgggttgaggg

SEQ ID NO: 592750 - DNA, 15 bp, Homo sapiens
tgttgggttgagggt

SEQ ID NO: 592751 - DNA, 15 bp, Homo sapiens
gttgggttgagggtg

SEQ ID NO: 592752 - DNA, 15 bp, Homo sapiens
ttgggttgagggtgg

SEQ ID NO: 592753 - DNA, 15 bp, Homo sapiens
tgggttgagggtggt

SEQ ID NO: 592754 - DNA, 15 bp, Homo sapiens
gggttgagggtggtc

SEQ ID NO: 592755 - DNA, 15 bp, Homo sapiens
ggttgagggtggtcc

SEQ ID NO: 592756 - DNA, 15 bp, Homo sapiens
gttgagggtggtccc

SEQ ID NO: 592757 - DNA, 15 bp, Homo sapiens
ttgagggtggtcccc

SEQ ID NO: 592758 - DNA, 15 bp, Homo sapiens
tgagggtggtcccca

SEQ ID NO: 592759 - DNA, 15 bp, Homo sapiens
gagggtggtccccag

SEQ ID NO: 592760 - DNA, 15 bp, Homo sapiens
agggtggtccccagg

SEQ ID NO: 592761 - DNA, 15 bp, Homo sapiens
gggtggtccccaggg

SEQ ID NO: 592762 - DNA, 15 bp, Homo sapiens
ggtggtccccaggga

SEQ ID NO: 592763 - DNA, 15 bp, Homo sapiens
gtggtccccagggag

SEQ ID NO: 592764 - DNA, 15 bp, Homo sapiens
tggtccccagggaga

SEQ ID NO: 592765 - DNA, 15 bp, Homo sapiens
ggtccccagggagag

SEQ ID NO: 592766 - DNA, 15 bp, Homo sapiens
gtccccagggagagg

SEQ ID NO: 592767 - DNA, 15 bp, Homo sapiens
tccccagggagagga

SEQ ID NO: 592768 - DNA, 15 bp, Homo sapiens
ccccagggagaggaa

SEQ ID NO: 592769 - DNA, 15 bp, Homo sapiens
cccagggagaggaag

SEQ ID NO: 592770 - DNA, 15 bp, Homo sapiens
ccagggagaggaaga

SEQ ID NO: 592771 - DNA, 15 bp, Homo sapiens
cagggagaggaagag

SEQ ID NO: 592772 - DNA, 15 bp, Homo sapiens
agggagaggaagagg

SEQ ID NO: 592773 - DNA, 15 bp, Homo sapiens
gggagaggaagagga

SEQ ID NO: 592774 - DNA, 15 bp, Homo sapiens
ggagaggaagaggat

SEQ ID NO: 592775 - DNA, 15 bp, Homo sapiens
gagaggaagaggatc

SEQ ID NO: 592776 - DNA, 15 bp, Homo sapiens
agaggaagaggatcc

SEQ ID NO: 592777 - DNA, 15 bp, Homo sapiens
gaggaagaggatcct

SEQ ID NO: 592778 - DNA, 15 bp, Homo sapiens
aggaagaggatcctg

SEQ ID NO: 592779 - DNA, 15 bp, Homo sapiens
ggaagaggatcctgg

SEQ ID NO: 592780 - DNA, 15 bp, Homo sapiens
gaagaggatcctggc

SEQ ID NO: 592781 - DNA, 15 bp, Homo sapiens
aagaggatcctggcc

SEQ ID NO: 592782 - DNA, 15 bp, Homo sapiens
agaggatcctggccc

SEQ ID NO: 592783 - DNA, 15 bp, Homo sapiens
gaggatcctggccct

SEQ ID NO: 592784 - DNA, 15 bp, Homo sapiens
aggatcctggccctg

SEQ ID NO: 592785 - DNA, 15 bp, Homo sapiens
ggatcctggccctgg

SEQ ID NO: 592786 - DNA, 15 bp, Homo sapiens
gatcctggccctggc

SEQ ID NO: 592787 - DNA, 15 bp, Homo sapiens
atcctggccctggct

SEQ ID NO: 592788 - DNA, 15 bp, Homo sapiens
tcctggccctggctc

SEQ ID NO: 592789 - DNA, 15 bp, Homo sapiens
cctggccctggctct

SEQ ID NO: 592790 - DNA, 15 bp, Homo sapiens
ctggccctggctctc

SEQ ID NO: 592791 - DNA, 15 bp, Homo sapiens
tggccctggctctcc

SEQ ID NO: 592792 - DNA, 15 bp, Homo sapiens
ggccctggctctcct

SEQ ID NO: 592793 - DNA, 15 bp, Homo sapiens
gccctggctctcctg

SEQ ID NO: 592794 - DNA, 15 bp, Homo sapiens
ccctggctctcctgg

SEQ ID NO: 592795 - DNA, 15 bp, Homo sapiens
cctggctctcctggg

SEQ ID NO: 592796 - DNA, 15 bp, Homo sapiens
ctggctctcctggga

SEQ ID NO: 592797 - DNA, 15 bp, Homo sapiens
tggctctcctgggaa

SEQ ID NO: 592798 - DNA, 15 bp, Homo sapiens
ggctctcctgggaat

SEQ ID NO: 592799 - DNA, 15 bp, Homo sapiens
gctctcctgggaatg

SEQ ID NO: 592800 - DNA, 15 bp, Homo sapiens
ctctcctgggaatgc

SEQ ID NO: 592801 - DNA, 15 bp, Homo sapiens
tctcctgggaatgct

SEQ ID NO: 592802 - DNA, 15 bp, Homo sapiens
ctcctgggaatgctc

SEQ ID NO: 592803 - DNA, 15 bp, Homo sapiens
tcctgggaatgctct

SEQ ID NO: 592804 - DNA, 15 bp, Homo sapiens
cctgggaatgctctg

SEQ ID NO: 592805 - DNA, 15 bp, Homo sapiens
ctgggaatgctctgg

SEQ ID NO: 592806 - DNA, 15 bp, Homo sapiens
tgggaatgctctggg

SEQ ID NO: 592807 - DNA, 15 bp, Homo sapiens
gggaatgctctggga

SEQ ID NO: 592808 - DNA, 15 bp, Homo sapiens
ggaatgctctgggac

SEQ ID NO: 592809 - DNA, 15 bp, Homo sapiens
gaatgctctgggact

SEQ ID NO: 592810 - DNA, 15 bp, Homo sapiens
aatgctctgggactg

SEQ ID NO: 592811 - DNA, 15 bp, Homo sapiens
atgctctgggactgt

SEQ ID NO: 592812 - DNA, 15 bp, Homo sapiens
tgctctgggactgtg

SEQ ID NO: 592813 - DNA, 15 bp, Homo sapiens
gctctgggactgtgc

SEQ ID NO: 592814 - DNA, 15 bp, Homo sapiens
ctctgggactgtgca

SEQ ID NO: 592815 - DNA, 15 bp, Homo sapiens
tctgggactgtgcat

SEQ ID NO: 592816 - DNA, 15 bp, Homo sapiens
ctgggactgtgcatg

SEQ ID NO: 592817 - DNA, 15 bp, Homo sapiens
tgggactgtgcatga

SEQ ID NO: 592818 - DNA, 15 bp, Homo sapiens
gggactgtgcatgat

SEQ ID NO: 592819 - DNA, 15 bp, Homo sapiens
ggactgtgcatgatg

SEQ ID NO: 592820 - DNA, 15 bp, Homo sapiens
gactgtgcatgatgg

SEQ ID NO: 592821 - DNA, 15 bp, Homo sapiens
actgtgcatgatggg

SEQ ID NO: 592822 - DNA, 15 bp, Homo sapiens
ctgtgcatgatgggt

SEQ ID NO: 592823 - DNA, 15 bp, Homo sapiens
tgtgcatgatgggtg

SEQ ID NO: 592824 - DNA, 15 bp, Homo sapiens
gtgcatgatgggtgg

SEQ ID NO: 592825 - DNA, 15 bp, Homo sapiens
tgcatgatgggtggg

SEQ ID NO: 592826 - DNA, 15 bp, Homo sapiens
gcatgatgggtgggg

SEQ ID NO: 592827 - DNA, 15 bp, Homo sapiens
catgatgggtggggt

SEQ ID NO: 592828 - DNA, 15 bp, Homo sapiens
atgatgggtggggtg

SEQ ID NO: 592829 - DNA, 15 bp, Homo sapiens
tgatgggtggggtgg

SEQ ID NO: 592830 - DNA, 15 bp, Homo sapiens
gatgggtggggtggg

SEQ ID NO: 592831 - DNA, 15 bp, Homo sapiens
atgggtggggtgggg

SEQ ID NO: 592832 - DNA, 15 bp, Homo sapiens
tgggtggggtgggga

SEQ ID NO: 592833 - DNA, 15 bp, Homo sapiens
gggtggggtggggag

SEQ ID NO: 592834 - DNA, 15 bp, Homo sapiens
ggtggggtggggaga

SEQ ID NO: 592835 - DNA, 15 bp, Homo sapiens
gtggggtggggagac

SEQ ID NO: 592836 - DNA, 15 bp, Homo sapiens
tggggtggggagact

SEQ ID NO: 592837 - DNA, 15 bp, Homo sapiens
ggggtggggagactc

SEQ ID NO: 592838 - DNA, 15 bp, Homo sapiens
gggtggggagactct

SEQ ID NO: 592839 - DNA, 15 bp, Homo sapiens
ggtggggagactctg

SEQ ID NO: 592840 - DNA, 15 bp, Homo sapiens
gtggggagactctga

SEQ ID NO: 592841 - DNA, 15 bp, Homo sapiens
tggggagactctgag

SEQ ID NO: 592842 - DNA, 15 bp, Homo sapiens
ggggagactctgagg

SEQ ID NO: 592843 - DNA, 15 bp, Homo sapiens
gggagactctgagga

SEQ ID NO: 592844 - DNA, 15 bp, Homo sapiens
ggagactctgaggag

SEQ ID NO: 592845 - DNA, 15 bp, Homo sapiens
gagactctgaggagt

SEQ ID NO: 592846 - DNA, 15 bp, Homo sapiens
agactctgaggagtt

SEQ ID NO: 592847 - DNA, 15 bp, Homo sapiens
gactctgaggagttg

SEQ ID NO: 592848 - DNA, 15 bp, Homo sapiens
actctgaggagttgg

SEQ ID NO: 592849 - DNA, 15 bp, Homo sapiens
ctctgaggagttggg

SEQ ID NO: 592850 - DNA, 15 bp, Homo sapiens
tctgaggagttgggg

SEQ ID NO: 592851 - DNA, 15 bp, Homo sapiens
ctgaggagttgggga

SEQ ID NO: 592852 - DNA, 15 bp, Homo sapiens
tgaggagttggggag

SEQ ID NO: 592853 - DNA, 15 bp, Homo sapiens
gaggagttggggaga

SEQ ID NO: 592854 - DNA, 15 bp, Homo sapiens
aggagttggggagag

SEQ ID NO: 592855 - DNA, 15 bp, Homo sapiens
ggagttggggagagg

SEQ ID NO: 592856 - DNA, 15 bp, Homo sapiens
gagttggggagagga

SEQ ID NO: 592857 - DNA, 15 bp, Homo sapiens
agttggggagaggac

SEQ ID NO: 592858 - DNA, 15 bp, Homo sapiens
gttggggagaggacc

SEQ ID NO: 592859 - DNA, 15 bp, Homo sapiens
ttggggagaggaccc

SEQ ID NO: 592860 - DNA, 15 bp, Homo sapiens
tggggagaggacccc

SEQ ID NO: 592861 - DNA, 15 bp, Homo sapiens
ggggagaggacccct

SEQ ID NO: 592862 - DNA, 15 bp, Homo sapiens
gggagaggacccctc

SEQ ID NO: 592863 - DNA, 15 bp, Homo sapiens
ggagaggacccctcc

SEQ ID NO: 592864 - DNA, 15 bp, Homo sapiens
gagaggacccctccc

SEQ ID NO: 592865 - DNA, 15 bp, Homo sapiens
agaggacccctccct

SEQ ID NO: 592866 - DNA, 15 bp, Homo sapiens
gaggacccctcccta

SEQ ID NO: 592867 - DNA, 15 bp, Homo sapiens
aggacccctccctac

SEQ ID NO: 592868 - DNA, 15 bp, Homo sapiens
ggacccctccctact

SEQ ID NO: 592869 - DNA, 15 bp, Homo sapiens
gacccctccctactc

SEQ ID NO: 592870 - DNA, 15 bp, Homo sapiens
acccctccctactca

SEQ ID NO: 592871 - DNA, 15 bp, Homo sapiens
cccctccctactcac

SEQ ID NO: 592872 - DNA, 15 bp, Homo sapiens
ccctccctactcaca

SEQ ID NO: 592873 - DNA, 15 bp, Homo sapiens
cctccctactcacag

SEQ ID NO: 592874 - DNA, 15 bp, Homo sapiens
ctccctactcacagt

SEQ ID NO: 592875 - DNA, 15 bp, Homo sapiens
tccctactcacagtg

SEQ ID NO: 592876 - DNA, 15 bp, Homo sapiens
ccctactcacagtgt

SEQ ID NO: 592877 - DNA, 15 bp, Homo sapiens
cctactcacagtgtt

SEQ ID NO: 592878 - DNA, 15 bp, Homo sapiens
ctactcacagtgttg

SEQ ID NO: 592879 - DNA, 15 bp, Homo sapiens
tactcacagtgttgc

SEQ ID NO: 592880 - DNA, 15 bp, Homo sapiens
actcacagtgttgca

SEQ ID NO: 592881 - DNA, 15 bp, Homo sapiens
ctcacagtgttgcag

SEQ ID NO: 592882 - DNA, 15 bp, Homo sapiens
tcacagtgttgcagg

SEQ ID NO: 592883 - DNA, 15 bp, Homo sapiens
cacagtgttgcaggc

SEQ ID NO: 592884 - DNA, 15 bp, Homo sapiens
acagtgttgcaggcc

SEQ ID NO: 592885 - DNA, 15 bp, Homo sapiens
cagtgttgcaggcca

SEQ ID NO: 592886 - DNA, 15 bp, Homo sapiens
agtgttgcaggccag

SEQ ID NO: 592887 - DNA, 15 bp, Homo sapiens
gtgttgcaggccagc

SEQ ID NO: 592888 - DNA, 15 bp, Homo sapiens
tgttgcaggccagca

SEQ ID NO: 592889 - DNA, 15 bp, Homo sapiens
gttgcaggccagcag

SEQ ID NO: 592890 - DNA, 15 bp, Homo sapiens
ttgcaggccagcagg

SEQ ID NO: 592891 - DNA, 15 bp, Homo sapiens
tgcaggccagcagga

SEQ ID NO: 592892 - DNA, 15 bp, Homo sapiens
gcaggccagcaggaa

SEQ ID NO: 592893 - DNA, 15 bp, Homo sapiens
caggccagcaggaag

SEQ ID NO: 592894 - DNA, 15 bp, Homo sapiens
aggccagcaggaagg

SEQ ID NO: 592895 - DNA, 15 bp, Homo sapiens
ggccagcaggaaggc

SEQ ID NO: 592896 - DNA, 15 bp, Homo sapiens
gccagcaggaaggcg

SEQ ID NO: 592897 - DNA, 15 bp, Homo sapiens
ccagcaggaaggcgg

SEQ ID NO: 592898 - DNA, 15 bp, Homo sapiens
cagcaggaaggcggg

SEQ ID NO: 592899 - DNA, 15 bp, Homo sapiens
agcaggaaggcgggg

SEQ ID NO: 592900 - DNA, 15 bp, Homo sapiens
gcaggaaggcgggga

SEQ ID NO: 592901 - DNA, 15 bp, Homo sapiens
caggaaggcggggac

SEQ ID NO: 592902 - DNA, 15 bp, Homo sapiens
aggaaggcggggacc

SEQ ID NO: 592903 - DNA, 15 bp, Homo sapiens
ggaaggcggggaccc

SEQ ID NO: 592904 - DNA, 15 bp, Homo sapiens
gaaggcggggacccg

SEQ ID NO: 592905 - DNA, 15 bp, Homo sapiens
aaggcggggacccgg

SEQ ID NO: 592906 - DNA, 15 bp, Homo sapiens
aggcggggacccggg

SEQ ID NO: 592907 - DNA, 15 bp, Homo sapiens
ggcggggacccgggg

SEQ ID NO: 592908 - DNA, 15 bp, Homo sapiens
gcggggacccggggc

SEQ ID NO: 592909 - DNA, 15 bp, Homo sapiens
cggggacccggggca

SEQ ID NO: 592910 - DNA, 15 bp, Homo sapiens
ggggacccggggcaa

SEQ ID NO: 592911 - DNA, 15 bp, Homo sapiens
gggacccggggcaag

SEQ ID NO: 592912 - DNA, 15 bp, Homo sapiens
ggacccggggcaagg

SEQ ID NO: 592913 - DNA, 15 bp, Homo sapiens
gacccggggcaaggt

SEQ ID NO: 592914 - DNA, 15 bp, Homo sapiens
acccggggcaaggtg

SEQ ID NO: 592915 - DNA, 15 bp, Homo sapiens
cccggggcaaggtgg

SEQ ID NO: 592916 - DNA, 15 bp, Homo sapiens
ccggggcaaggtggc

SEQ ID NO: 592917 - DNA, 15 bp, Homo sapiens
cggggcaaggtggca

SEQ ID NO: 592918 - DNA, 15 bp, Homo sapiens
ggggcaaggtggcag

SEQ ID NO: 592919 - DNA, 15 bp, Homo sapiens
gggcaaggtggcagc

SEQ ID NO: 592920 - DNA, 15 bp, Homo sapiens
ggcaaggtggcagcc

SEQ ID NO: 592921 - DNA, 15 bp, Homo sapiens
gcaaggtggcagcca

SEQ ID NO: 592922 - DNA, 15 bp, Homo sapiens
caaggtggcagccac

SEQ ID NO: 592923 - DNA, 15 bp, Homo sapiens
aaggtggcagccacc

SEQ ID NO: 592924 - DNA, 15 bp, Homo sapiens
aggtggcagccacca

SEQ ID NO: 592925 - DNA, 15 bp, Homo sapiens
ggtggcagccaccaa

SEQ ID NO: 592926 - DNA, 15 bp, Homo sapiens
gtggcagccaccaag

SEQ ID NO: 592927 - DNA, 15 bp, Homo sapiens
tggcagccaccaagc

SEQ ID NO: 592928 - DNA, 15 bp, Homo sapiens
ggcagccaccaagca

SEQ ID NO: 592929 - DNA, 15 bp, Homo sapiens
gcagccaccaagcag

SEQ ID NO: 592930 - DNA, 15 bp, Homo sapiens
cagccaccaagcagg

SEQ ID NO: 592931 - DNA, 15 bp, Homo sapiens
agccaccaagcaggc

SEQ ID NO: 592932 - DNA, 15 bp, Homo sapiens
gccaccaagcaggcc

SEQ ID NO: 592933 - DNA, 15 bp, Homo sapiens
ccaccaagcaggccc

SEQ ID NO: 592934 - DNA, 15 bp, Homo sapiens
caccaagcaggccca

SEQ ID NO: 592935 - DNA, 15 bp, Homo sapiens
accaagcaggcccaa

SEQ ID NO: 592936 - DNA, 15 bp, Homo sapiens
ccaagcaggcccaac

SEQ ID NO: 592937 - DNA, 15 bp, Homo sapiens
caagcaggcccaacg

SEQ ID NO: 592938 - DNA, 15 bp, Homo sapiens
aagcaggcccaacgt

SEQ ID NO: 592939 - DNA, 15 bp, Homo sapiens
agcaggcccaacgtg

SEQ ID NO: 592940 - DNA, 15 bp, Homo sapiens
gcaggcccaacgtgg

SEQ ID NO: 592941 - DNA, 15 bp, Homo sapiens
caggcccaacgtggt

SEQ ID NO: 592942 - DNA, 15 bp, Homo sapiens
aggcccaacgtggtt

SEQ ID NO: 592943 - DNA, 15 bp, Homo sapiens
ggcccaacgtggttc

SEQ ID NO: 592944 - DNA, 15 bp, Homo sapiens
gcccaacgtggttct

SEQ ID NO: 592945 - DNA, 15 bp, Homo sapiens
cccaacgtggttctt

SEQ ID NO: 592946 - DNA, 15 bp, Homo sapiens
ccaacgtggttcttc

SEQ ID NO: 592947 - DNA, 15 bp, Homo sapiens
caacgtggttcttcc

SEQ ID NO: 592948 - DNA, 15 bp, Homo sapiens
aacgtggttcttcca

SEQ ID NO: 592949 - DNA, 15 bp, Homo sapiens
acgtggttcttccaa

SEQ ID NO: 592950 - DNA, 15 bp, Homo sapiens
cgtggttcttccaac

SEQ ID NO: 592951 - DNA, 15 bp, Homo sapiens
gtggttcttccaacg

SEQ ID NO: 592952 - DNA, 15 bp, Homo sapiens
tggttcttccaacgt

SEQ ID NO: 592953 - DNA, 15 bp, Homo sapiens
ggttcttccaacgtc

SEQ ID NO: 592954 - DNA, 15 bp, Homo sapiens
gttcttccaacgtct

SEQ ID NO: 592955 - DNA, 15 bp, Homo sapiens
ttcttccaacgtctt

SEQ ID NO: 592956 - DNA, 15 bp, Homo sapiens
tcttccaacgtcttt

SEQ ID NO: 592957 - DNA, 15 bp, Homo sapiens
cttccaacgtctttt

SEQ ID NO: 592958 - DNA, 15 bp, Homo sapiens
ttccaacgtcttttc

SEQ ID NO: 592959 - DNA, 15 bp, Homo sapiens
tccaacgtcttttcc

SEQ ID NO: 592960 - DNA, 15 bp, Homo sapiens
ccaacgtcttttcca

SEQ ID NO: 592961 - DNA, 15 bp, Homo sapiens
caacgtcttttccat

SEQ ID NO: 592962 - DNA, 15 bp, Homo sapiens
aacgtcttttccatg

SEQ ID NO: 592963 - DNA, 15 bp, Homo sapiens
acgtcttttccatgt

SEQ ID NO: 592964 - DNA, 15 bp, Homo sapiens
cgtcttttccatgtt

SEQ ID NO: 592965 - DNA, 15 bp, Homo sapiens
gtcttttccatgttt

SEQ ID NO: 592966 - DNA, 15 bp, Homo sapiens
tcttttccatgtttg

SEQ ID NO: 592967 - DNA, 15 bp, Homo sapiens
cttttccatgtttga

SEQ ID NO: 592968 - DNA, 15 bp, Homo sapiens
ttttccatgtttgaa

SEQ ID NO: 592969 - DNA, 15 bp, Homo sapiens
tttccatgtttgaac

SEQ ID NO: 592970 - DNA, 15 bp, Homo sapiens
ttccatgtttgaaca

SEQ ID NO: 592971 - DNA, 15 bp, Homo sapiens
tccatgtttgaacaa

SEQ ID NO: 592972 - DNA, 15 bp, Homo sapiens
ccatgtttgaacaag

SEQ ID NO: 592973 - DNA, 15 bp, Homo sapiens
catgtttgaacaagc

SEQ ID NO: 592974 - DNA, 15 bp, Homo sapiens
atgtttgaacaagcc

SEQ ID NO: 592975 - DNA, 15 bp, Homo sapiens
tgtttgaacaagccc

SEQ ID NO: 592976 - DNA, 15 bp, Homo sapiens
gtttgaacaagccca

SEQ ID NO: 592977 - DNA, 15 bp, Homo sapiens
tttgaacaagcccag

SEQ ID NO: 592978 - DNA, 15 bp, Homo sapiens
ttgaacaagcccaga

SEQ ID NO: 592979 - DNA, 15 bp, Homo sapiens
tgaacaagcccagat

SEQ ID NO: 592980 - DNA, 15 bp, Homo sapiens
gaacaagcccagata

SEQ ID NO: 592981 - DNA, 15 bp, Homo sapiens
aacaagcccagatac

SEQ ID NO: 592982 - DNA, 15 bp, Homo sapiens
acaagcccagataca

SEQ ID NO: 592983 - DNA, 15 bp, Homo sapiens
caagcccagatacag

SEQ ID NO: 592984 - DNA, 15 bp, Homo sapiens
aagcccagatacagg

SEQ ID NO: 592985 - DNA, 15 bp, Homo sapiens
agcccagatacagga

SEQ ID NO: 592986 - DNA, 15 bp, Homo sapiens
gcccagatacaggag

SEQ ID NO: 592987 - DNA, 15 bp, Homo sapiens
cccagatacaggagt

SEQ ID NO: 592988 - DNA, 15 bp, Homo sapiens
ccagatacaggagtt

SEQ ID NO: 592989 - DNA, 15 bp, Homo sapiens
cagatacaggagttc

SEQ ID NO: 592990 - DNA, 15 bp, Homo sapiens
agatacaggagttca

SEQ ID NO: 592991 - DNA, 15 bp, Homo sapiens
gatacaggagttcaa

SEQ ID NO: 592992 - DNA, 15 bp, Homo sapiens
atacaggagttcaaa

SEQ ID NO: 592993 - DNA, 15 bp, Homo sapiens
tacaggagttcaaag

SEQ ID NO: 592994 - DNA, 15 bp, Homo sapiens
acaggagttcaaaga

SEQ ID NO: 592995 - DNA, 15 bp, Homo sapiens
caggagttcaaagaa

SEQ ID NO: 592996 - DNA, 15 bp, Homo sapiens
aggagttcaaagaag

SEQ ID NO: 592997 - DNA, 15 bp, Homo sapiens
ggagttcaaagaagt

SEQ ID NO: 592998 - DNA, 15 bp, Homo sapiens
gagttcaaagaagtg

SEQ ID NO: 592999 - DNA, 15 bp, Homo sapiens
agttcaaagaagtga

SEQ ID NO: 593000 - DNA, 15 bp, Homo sapiens
gttcaaagaagtgag

SEQ ID NO: 593001 - DNA, 15 bp, Homo sapiens
ttcaaagaagtgagt

SEQ ID NO: 593002 - DNA, 15 bp, Homo sapiens
tcaaagaagtgagtg

SEQ ID NO: 593003 - DNA, 15 bp, Homo sapiens
caaagaagtgagtgc

SEQ ID NO: 593004 - DNA, 15 bp, Homo sapiens
aaagaagtgagtgcc

SEQ ID NO: 593005 - DNA, 15 bp, Homo sapiens
aagaagtgagtgccc

SEQ ID NO: 593006 - DNA, 15 bp, Homo sapiens
agaagtgagtgccca

SEQ ID NO: 593007 - DNA, 15 bp, Homo sapiens
gaagtgagtgcccac

SEQ ID NO: 593008 - DNA, 15 bp, Homo sapiens
aagtgagtgcccact

SEQ ID NO: 593009 - DNA, 15 bp, Homo sapiens
agtgagtgcccactc

SEQ ID NO: 593010 - DNA, 15 bp, Homo sapiens
gtgagtgcccactcc

SEQ ID NO: 593011 - DNA, 15 bp, Homo sapiens
tgagtgcccactccc

SEQ ID NO: 593012 - DNA, 15 bp, Homo sapiens
gagtgcccactccca

SEQ ID NO: 593013 - DNA, 15 bp, Homo sapiens
agtgcccactcccag

SEQ ID NO: 593014 - DNA, 15 bp, Homo sapiens
gtgcccactcccagt

SEQ ID NO: 593015 - DNA, 15 bp, Homo sapiens
tgcccactcccagta

SEQ ID NO: 593016 - DNA, 15 bp, Homo sapiens
gcccactcccagtag

SEQ ID NO: 593017 - DNA, 15 bp, Homo sapiens
cccactcccagtagc

SEQ ID NO: 593018 - DNA, 15 bp, Homo sapiens
ccactcccagtagcc

SEQ ID NO: 593019 - DNA, 15 bp, Homo sapiens
cactcccagtagcct

SEQ ID NO: 593020 - DNA, 15 bp, Homo sapiens
actcccagtagcctc

SEQ ID NO: 593021 - DNA, 15 bp, Homo sapiens
ctcccagtagcctca

SEQ ID NO: 593022 - DNA, 15 bp, Homo sapiens
tcccagtagcctcag

SEQ ID NO: 593023 - DNA, 15 bp, Homo sapiens
cccagtagcctcaga

SEQ ID NO: 593024 - DNA, 15 bp, Homo sapiens
ccagtagcctcagat

SEQ ID NO: 593025 - DNA, 15 bp, Homo sapiens
cagtagcctcagatc

SEQ ID NO: 593026 - DNA, 15 bp, Homo sapiens
agtagcctcagatcc

SEQ ID NO: 593027 - DNA, 15 bp, Homo sapiens
gtagcctcagatccc

SEQ ID NO: 593028 - DNA, 15 bp, Homo sapiens
tagcctcagatccca

SEQ ID NO: 593029 - DNA, 15 bp, Homo sapiens
agcctcagatcccat

SEQ ID NO: 593030 - DNA, 15 bp, Homo sapiens
gcctcagatcccatc

SEQ ID NO: 593031 - DNA, 15 bp, Homo sapiens
cctcagatcccatcc

SEQ ID NO: 593032 - DNA, 15 bp, Homo sapiens
ctcagatcccatcct

SEQ ID NO: 593033 - DNA, 15 bp, Homo sapiens
tcagatcccatcctg

SEQ ID NO: 593034 - DNA, 15 bp, Homo sapiens
cagatcccatcctgg

SEQ ID NO: 593035 - DNA, 15 bp, Homo sapiens
agatcccatcctggc

SEQ ID NO: 593036 - DNA, 15 bp, Homo sapiens
gatcccatcctggcc

SEQ ID NO: 593037 - DNA, 15 bp, Homo sapiens
atcccatcctggccc

SEQ ID NO: 593038 - DNA, 15 bp, Homo sapiens
tcccatcctggcccc

SEQ ID NO: 593039 - DNA, 15 bp, Homo sapiens
cccatcctggccccc

SEQ ID NO: 593040 - DNA, 15 bp, Homo sapiens
ccatcctggcccccc

SEQ ID NO: 593041 - DNA, 15 bp, Homo sapiens
catcctggccccccc

SEQ ID NO: 593042 - DNA, 15 bp, Homo sapiens
atcctggccccccca

SEQ ID NO: 593043 - DNA, 15 bp, Homo sapiens
tcctggcccccccac

SEQ ID NO: 593044 - DNA, 15 bp, Homo sapiens
cctggcccccccacc

SEQ ID NO: 593045 - DNA, 15 bp, Homo sapiens
ctggcccccccaccc

SEQ ID NO: 593046 - DNA, 15 bp, Homo sapiens
tggcccccccacccc

SEQ ID NO: 593047 - DNA, 15 bp, Homo sapiens
ggcccccccacccca

SEQ ID NO: 593048 - DNA, 15 bp, Homo sapiens
gcccccccaccccac

SEQ ID NO: 593049 - DNA, 15 bp, Homo sapiens
cccccccaccccacc

SEQ ID NO: 593050 - DNA, 15 bp, Homo sapiens
ccccccaccccaccc

SEQ ID NO: 593051 - DNA, 15 bp, Homo sapiens
cccccaccccacccc

SEQ ID NO: 593052 - DNA, 15 bp, Homo sapiens
ccccaccccacccca

SEQ ID NO: 593053 - DNA, 15 bp, Homo sapiens
cccaccccaccccac

SEQ ID NO: 593054 - DNA, 15 bp, Homo sapiens
ccaccccaccccaca

SEQ ID NO: 593055 - DNA, 15 bp, Homo sapiens
caccccaccccacat

SEQ ID NO: 593056 - DNA, 15 bp, Homo sapiens
accccaccccacata

SEQ ID NO: 593057 - DNA, 15 bp, Homo sapiens
ccccaccccacatac

SEQ ID NO: 593058 - DNA, 15 bp, Homo sapiens
cccaccccacataca

SEQ ID NO: 593059 - DNA, 15 bp, Homo sapiens
ccaccccacatacat

SEQ ID NO: 593060 - DNA, 15 bp, Homo sapiens
caccccacatacata

SEQ ID NO: 593061 - DNA, 15 bp, Homo sapiens
accccacatacatac

SEQ ID NO: 593062 - DNA, 15 bp, Homo sapiens
ccccacatacatacc

SEQ ID NO: 593063 - DNA, 15 bp, Homo sapiens
cccacatacataccc

SEQ ID NO: 593064 - DNA, 15 bp, Homo sapiens
ccacatacatacccc

SEQ ID NO: 593065 - DNA, 15 bp, Homo sapiens
cacatacataccccc

SEQ ID NO: 593066 - DNA, 15 bp, Homo sapiens
acatacatacccccc

SEQ ID NO: 593067 - DNA, 15 bp, Homo sapiens
catacatacccccct

SEQ ID NO: 593068 - DNA, 15 bp, Homo sapiens
atacatacccccctt

SEQ ID NO: 593069 - DNA, 15 bp, Homo sapiens
tacataccccccttc

SEQ ID NO: 593070 - DNA, 15 bp, Homo sapiens
acataccccccttct

SEQ ID NO: 593071 - DNA, 15 bp, Homo sapiens
cataccccccttcta

SEQ ID NO: 593072 - DNA, 15 bp, Homo sapiens
ataccccccttctac

SEQ ID NO: 593073 - DNA, 15 bp, Homo sapiens
taccccccttctacc

SEQ ID NO: 593074 - DNA, 15 bp, Homo sapiens
accccccttctaccc

SEQ ID NO: 593075 - DNA, 15 bp, Homo sapiens
ccccccttctaccct

SEQ ID NO: 593076 - DNA, 15 bp, Homo sapiens
cccccttctaccctg

SEQ ID NO: 593077 - DNA, 15 bp, Homo sapiens
ccccttctaccctga

SEQ ID NO: 593078 - DNA, 15 bp, Homo sapiens
cccttctaccctgac

SEQ ID NO: 593079 - DNA, 15 bp, Homo sapiens
ccttctaccctgacc

SEQ ID NO: 593080 - DNA, 15 bp, Homo sapiens
cttctaccctgacct

SEQ ID NO: 593081 - DNA, 15 bp, Homo sapiens
ttctaccctgacctt

SEQ ID NO: 593082 - DNA, 15 bp, Homo sapiens
tctaccctgaccttg

SEQ ID NO: 593083 - DNA, 15 bp, Homo sapiens
ctaccctgaccttgc

SEQ ID NO: 593084 - DNA, 15 bp, Homo sapiens
taccctgaccttgcc

SEQ ID NO: 593085 - DNA, 15 bp, Homo sapiens
accctgaccttgcct

SEQ ID NO: 593086 - DNA, 15 bp, Homo sapiens
ccctgaccttgcctc

SEQ ID NO: 593087 - DNA, 15 bp, Homo sapiens
cctgaccttgcctct

SEQ ID NO: 593088 - DNA, 15 bp, Homo sapiens
ctgaccttgcctctc

SEQ ID NO: 593089 - DNA, 15 bp, Homo sapiens
tgaccttgcctctca

SEQ ID NO: 593090 - DNA, 15 bp, Homo sapiens
gaccttgcctctcac

SEQ ID NO: 593091 - DNA, 15 bp, Homo sapiens
accttgcctctcaca

SEQ ID NO: 593092 - DNA, 15 bp, Homo sapiens
ccttgcctctcacac

SEQ ID NO: 593093 - DNA, 15 bp, Homo sapiens
cttgcctctcacacc

SEQ ID NO: 593094 - DNA, 15 bp, Homo sapiens
ttgcctctcacacca

SEQ ID NO: 593095 - DNA, 15 bp, Homo sapiens
tgcctctcacaccac

SEQ ID NO: 593096 - DNA, 15 bp, Homo sapiens
gcctctcacaccacc

SEQ ID NO: 593097 - DNA, 15 bp, Homo sapiens
cctctcacaccaccc

SEQ ID NO: 593098 - DNA, 15 bp, Homo sapiens
ctctcacaccaccca

SEQ ID NO: 593099 - DNA, 15 bp, Homo sapiens
tctcacaccacccag

SEQ ID NO: 593100 - DNA, 15 bp, Homo sapiens
ctcacaccacccagg

SEQ ID NO: 593101 - DNA, 15 bp, Homo sapiens
tcacaccacccaggt

SEQ ID NO: 593102 - DNA, 15 bp, Homo sapiens
cacaccacccaggtc

SEQ ID NO: 593103 - DNA, 15 bp, Homo sapiens
acaccacccaggtct

SEQ ID NO: 593104 - DNA, 15 bp, Homo sapiens
caccacccaggtctc

SEQ ID NO: 593105 - DNA, 15 bp, Homo sapiens
accacccaggtctct

SEQ ID NO: 593106 - DNA, 15 bp, Homo sapiens
ccacccaggtctctc

SEQ ID NO: 593107 - DNA, 15 bp, Homo sapiens
cacccaggtctctcc

SEQ ID NO: 593108 - DNA, 15 bp, Homo sapiens
acccaggtctctccc

SEQ ID NO: 593109 - DNA, 15 bp, Homo sapiens
cccaggtctctcccc

SEQ ID NO: 593110 - DNA, 15 bp, Homo sapiens
ccaggtctctccccc

SEQ ID NO: 593111 - DNA, 15 bp, Homo sapiens
caggtctctccccca

SEQ ID NO: 593112 - DNA, 15 bp, Homo sapiens
aggtctctcccccac

SEQ ID NO: 593113 - DNA, 15 bp, Homo sapiens
ggtctctcccccacc

SEQ ID NO: 593114 - DNA, 15 bp, Homo sapiens
gtctctcccccacct

SEQ ID NO: 593115 - DNA, 15 bp, Homo sapiens
tctctcccccacctc

SEQ ID NO: 593116 - DNA, 15 bp, Homo sapiens
ctctcccccacctcc

SEQ ID NO: 593117 - DNA, 15 bp, Homo sapiens
tctcccccacctccc

SEQ ID NO: 593118 - DNA, 15 bp, Homo sapiens
ctcccccacctccca

SEQ ID NO: 593119 - DNA, 15 bp, Homo sapiens
tcccccacctcccac

SEQ ID NO: 593120 - DNA, 15 bp, Homo sapiens
cccccacctcccacc

SEQ ID NO: 593121 - DNA, 15 bp, Homo sapiens
ccccacctcccacct

SEQ ID NO: 593122 - DNA, 15 bp, Homo sapiens
cccacctcccacctt

SEQ ID NO: 593123 - DNA, 15 bp, Homo sapiens
ccacctcccaccttc

SEQ ID NO: 593124 - DNA, 15 bp, Homo sapiens
cacctcccaccttcc

SEQ ID NO: 593125 - DNA, 15 bp, Homo sapiens
acctcccaccttccc

SEQ ID NO: 593126 - DNA, 15 bp, Homo sapiens
cctcccaccttccct

SEQ ID NO: 593127 - DNA, 15 bp, Homo sapiens
ctcccaccttcccta

SEQ ID NO: 593128 - DNA, 15 bp, Homo sapiens
tcccaccttccctag

SEQ ID NO: 593129 - DNA, 15 bp, Homo sapiens
cccaccttccctaga

SEQ ID NO: 593130 - DNA, 15 bp, Homo sapiens
ccaccttccctagag

SEQ ID NO: 593131 - DNA, 15 bp, Homo sapiens
caccttccctagagc

SEQ ID NO: 593132 - DNA, 15 bp, Homo sapiens
accttccctagagct

SEQ ID NO: 593133 - DNA, 15 bp, Homo sapiens
ccttccctagagctg

SEQ ID NO: 593134 - DNA, 15 bp, Homo sapiens
cttccctagagctgg

SEQ ID NO: 593135 - DNA, 15 bp, Homo sapiens
ttccctagagctggg

SEQ ID NO: 593136 - DNA, 15 bp, Homo sapiens
tccctagagctgggg

SEQ ID NO: 593137 - DNA, 15 bp, Homo sapiens
ccctagagctggggg

SEQ ID NO: 593138 - DNA, 15 bp, Homo sapiens
cctagagctgggggc

SEQ ID NO: 593139 - DNA, 15 bp, Homo sapiens
ctagagctgggggct

SEQ ID NO: 593140 - DNA, 15 bp, Homo sapiens
tagagctgggggctg

SEQ ID NO: 593141 - DNA, 15 bp, Homo sapiens
agagctgggggctgc

SEQ ID NO: 593142 - DNA, 15 bp, Homo sapiens
gagctgggggctgct

SEQ ID NO: 593143 - DNA, 15 bp, Homo sapiens
agctgggggctgctc

SEQ ID NO: 593144 - DNA, 15 bp, Homo sapiens
cttcctggccatgac

SEQ ID NO: 593145 - DNA, 15 bp, Homo sapiens
ttcctggccatgacc

SEQ ID NO: 593146 - DNA, 15 bp, Homo sapiens
tcctggccatgaccc

SEQ ID NO: 593147 - DNA, 15 bp, Homo sapiens
cctggccatgaccca

SEQ ID NO: 593148 - DNA, 15 bp, Homo sapiens
ctggccatgacccat

SEQ ID NO: 593149 - DNA, 15 bp, Homo sapiens
tggccatgacccatt

SEQ ID NO: 593150 - DNA, 15 bp, Homo sapiens
ggccatgacccattc

SEQ ID NO: 593151 - DNA, 15 bp, Homo sapiens
gccatgacccattcc

SEQ ID NO: 593152 - DNA, 15 bp, Homo sapiens
ccatgacccattcca

SEQ ID NO: 593153 - DNA, 15 bp, Homo sapiens
catgacccattccaa

SEQ ID NO: 593154 - DNA, 15 bp, Homo sapiens
atgacccattccaag

SEQ ID NO: 593155 - DNA, 15 bp, Homo sapiens
tgacccattccaagc

SEQ ID NO: 593156 - DNA, 15 bp, Homo sapiens
gacccattccaagca

SEQ ID NO: 593157 - DNA, 15 bp, Homo sapiens
acccattccaagcac

SEQ ID NO: 593158 - DNA, 15 bp, Homo sapiens
cccattccaagcaca

SEQ ID NO: 593159 - DNA, 15 bp, Homo sapiens
ccattccaagcacat

SEQ ID NO: 593160 - DNA, 15 bp, Homo sapiens
cattccaagcacatc

SEQ ID NO: 593161 - DNA, 15 bp, Homo sapiens
attccaagcacatcc

SEQ ID NO: 593162 - DNA, 15 bp, Homo sapiens
ttccaagcacatcct

SEQ ID NO: 593163 - DNA, 15 bp, Homo sapiens
tccaagcacatcctc

SEQ ID NO: 593164 - DNA, 15 bp, Homo sapiens
ccaagcacatcctct

SEQ ID NO: 593165 - DNA, 15 bp, Homo sapiens
caagcacatcctctg

SEQ ID NO: 593166 - DNA, 15 bp, Homo sapiens
aagcacatcctctgc

SEQ ID NO: 593167 - DNA, 15 bp, Homo sapiens
agcacatcctctgcc

SEQ ID NO: 593168 - DNA, 15 bp, Homo sapiens
gcacatcctctgccc

SEQ ID NO: 593169 - DNA, 15 bp, Homo sapiens
cacatcctctgcccc

SEQ ID NO: 593170 - DNA, 15 bp, Homo sapiens
acatcctctgcccca

SEQ ID NO: 593171 - DNA, 15 bp, Homo sapiens
catcctctgccccag

SEQ ID NO: 593172 - DNA, 15 bp, Homo sapiens
atcctctgccccaga

SEQ ID NO: 593173 - DNA, 15 bp, Homo sapiens
tcctctgccccagaa

SEQ ID NO: 593174 - DNA, 15 bp, Homo sapiens
cctctgccccagaat

SEQ ID NO: 593175 - DNA, 15 bp, Homo sapiens
ctctgccccagaatc

SEQ ID NO: 593176 - DNA, 15 bp, Homo sapiens
tctgccccagaatcc

SEQ ID NO: 593177 - DNA, 15 bp, Homo sapiens
ctgccccagaatccc

SEQ ID NO: 593178 - DNA, 15 bp, Homo sapiens
tgccccagaatccca

SEQ ID NO: 593179 - DNA, 15 bp, Homo sapiens
gccccagaatcccat

SEQ ID NO: 593180 - DNA, 15 bp, Homo sapiens
ccccagaatcccatg

SEQ ID NO: 593181 - DNA, 15 bp, Homo sapiens
cccagaatcccatgt

SEQ ID NO: 593182 - DNA, 15 bp, Homo sapiens
ccagaatcccatgtg

SEQ ID NO: 593183 - DNA, 15 bp, Homo sapiens
cagaatcccatgtgc

SEQ ID NO: 593184 - DNA, 15 bp, Homo sapiens
agaatcccatgtgca

SEQ ID NO: 593185 - DNA, 15 bp, Homo sapiens
gaatcccatgtgcac

SEQ ID NO: 593186 - DNA, 15 bp, Homo sapiens
aatcccatgtgcact

SEQ ID NO: 593187 - DNA, 15 bp, Homo sapiens
atcccatgtgcactg

SEQ ID NO: 593188 - DNA, 15 bp, Homo sapiens
tcccatgtgcactgg

SEQ ID NO: 593189 - DNA, 15 bp, Homo sapiens
cccatgtgcactggt

SEQ ID NO: 593190 - DNA, 15 bp, Homo sapiens
ccatgtgcactggtc

SEQ ID NO: 593191 - DNA, 15 bp, Homo sapiens
catgtgcactggtca

SEQ ID NO: 593192 - DNA, 15 bp, Homo sapiens
atgtgcactggtcac

SEQ ID NO: 593193 - DNA, 15 bp, Homo sapiens
tgtgcactggtcacc

SEQ ID NO: 593194 - DNA, 15 bp, Homo sapiens
gtgcactggtcaccc

SEQ ID NO: 593195 - DNA, 15 bp, Homo sapiens
tgcactggtcacccc

SEQ ID NO: 593196 - DNA, 15 bp, Homo sapiens
gcactggtcacccca

SEQ ID NO: 593197 - DNA, 15 bp, Homo sapiens
cactggtcaccccag

SEQ ID NO: 593198 - DNA, 15 bp, Homo sapiens
actggtcaccccagt

SEQ ID NO: 593199 - DNA, 15 bp, Homo sapiens
ctggtcaccccagtg

SEQ ID NO: 593200 - DNA, 15 bp, Homo sapiens
tggtcaccccagtgc

SEQ ID NO: 593201 - DNA, 15 bp, Homo sapiens
ggtcaccccagtgct

SEQ ID NO: 593202 - DNA, 15 bp, Homo sapiens
gtcaccccagtgctg

SEQ ID NO: 593203 - DNA, 15 bp, Homo sapiens
tcaccccagtgctga

SEQ ID NO: 593204 - DNA, 15 bp, Homo sapiens
caccccagtgctgac

SEQ ID NO: 593205 - DNA, 15 bp, Homo sapiens
accccagtgctgact

SEQ ID NO: 593206 - DNA, 15 bp, Homo sapiens
ccccagtgctgactt

SEQ ID NO: 593207 - DNA, 15 bp, Homo sapiens
cccagtgctgacttg

SEQ ID NO: 593208 - DNA, 15 bp, Homo sapiens
ccagtgctgacttgg

SEQ ID NO: 593209 - DNA, 15 bp, Homo sapiens
cagtgctgacttgga

SEQ ID NO: 593210 - DNA, 15 bp, Homo sapiens
agtgctgacttggag

SEQ ID NO: 593211 - DNA, 15 bp, Homo sapiens
gtgctgacttggagc

SEQ ID NO: 593212 - DNA, 15 bp, Homo sapiens
tgctgacttggagcc

SEQ ID NO: 593213 - DNA, 15 bp, Homo sapiens
gctgacttggagcca

SEQ ID NO: 593214 - DNA, 15 bp, Homo sapiens
ctgacttggagccag

SEQ ID NO: 593215 - DNA, 15 bp, Homo sapiens
tgacttggagccagg

SEQ ID NO: 593216 - DNA, 15 bp, Homo sapiens
gacttggagccagga

SEQ ID NO: 593217 - DNA, 15 bp, Homo sapiens
acttggagccaggaa

SEQ ID NO: 593218 - DNA, 15 bp, Homo sapiens
cttggagccaggaaa

SEQ ID NO: 593219 - DNA, 15 bp, Homo sapiens
ttggagccaggaaat

SEQ ID NO: 593220 - DNA, 15 bp, Homo sapiens
tggagccaggaaatg

SEQ ID NO: 593221 - DNA, 15 bp, Homo sapiens
ggagccaggaaatgt

SEQ ID NO: 593222 - DNA, 15 bp, Homo sapiens
gagccaggaaatgtg

SEQ ID NO: 593223 - DNA, 15 bp, Homo sapiens
agccaggaaatgtgc

SEQ ID NO: 593224 - DNA, 15 bp, Homo sapiens
gccaggaaatgtgcc

SEQ ID NO: 593225 - DNA, 15 bp, Homo sapiens
ccaggaaatgtgcct

SEQ ID NO: 593226 - DNA, 15 bp, Homo sapiens
caggaaatgtgcctt

SEQ ID NO: 593227 - DNA, 15 bp, Homo sapiens
aggaaatgtgccttc

SEQ ID NO: 593228 - DNA, 15 bp, Homo sapiens
ggaaatgtgccttca

SEQ ID NO: 593229 - DNA, 15 bp, Homo sapiens
gaaatgtgccttcag

SEQ ID NO: 593230 - DNA, 15 bp, Homo sapiens
aaatgtgccttcagc

SEQ ID NO: 593231 - DNA, 15 bp, Homo sapiens
aatgtgccttcagcc

SEQ ID NO: 593232 - DNA, 15 bp, Homo sapiens
atgtgccttcagccc

SEQ ID NO: 593233 - DNA, 15 bp, Homo sapiens
tgtgccttcagcccc

SEQ ID NO: 593234 - DNA, 15 bp, Homo sapiens
gtgccttcagccccc

SEQ ID NO: 593235 - DNA, 15 bp, Homo sapiens
tgccttcagccccca

SEQ ID NO: 593236 - DNA, 15 bp, Homo sapiens
gccttcagcccccac

SEQ ID NO: 593237 - DNA, 15 bp, Homo sapiens
ccttcagcccccacc

SEQ ID NO: 593238 - DNA, 15 bp, Homo sapiens
cttcagcccccaccc

SEQ ID NO: 593239 - DNA, 15 bp, Homo sapiens
ttcagcccccacccc

SEQ ID NO: 593240 - DNA, 15 bp, Homo sapiens
tcagcccccaccccc

SEQ ID NO: 593241 - DNA, 15 bp, Homo sapiens
cagcccccaccccca

SEQ ID NO: 593242 - DNA, 15 bp, Homo sapiens
agcccccacccccaa

SEQ ID NO: 593243 - DNA, 15 bp, Homo sapiens
gcccccacccccaaa

SEQ ID NO: 593244 - DNA, 15 bp, Homo sapiens
cccccacccccaaat

SEQ ID NO: 593245 - DNA, 15 bp, Homo sapiens
ccccacccccaaatt

SEQ ID NO: 593246 - DNA, 15 bp, Homo sapiens
cccacccccaaattc

SEQ ID NO: 593247 - DNA, 15 bp, Homo sapiens
ccacccccaaattcc

SEQ ID NO: 593248 - DNA, 15 bp, Homo sapiens
cacccccaaattcca

SEQ ID NO: 593249 - DNA, 15 bp, Homo sapiens
acccccaaattccag

SEQ ID NO: 593250 - DNA, 15 bp, Homo sapiens
cccccaaattccagt

SEQ ID NO: 593251 - DNA, 15 bp, Homo sapiens
ccccaaattccagtc

SEQ ID NO: 593252 - DNA, 15 bp, Homo sapiens
cccaaattccagtct

SEQ ID NO: 593253 - DNA, 15 bp, Homo sapiens
ccaaattccagtctc

SEQ ID NO: 593254 - DNA, 15 bp, Homo sapiens
caaattccagtctcc

SEQ ID NO: 593255 - DNA, 15 bp, Homo sapiens
aaattccagtctccc

SEQ ID NO: 593256 - DNA, 15 bp, Homo sapiens
aattccagtctccca

SEQ ID NO: 593257 - DNA, 15 bp, Homo sapiens
attccagtctcccag

SEQ ID NO: 593258 - DNA, 15 bp, Homo sapiens
ttccagtctcccagc

SEQ ID NO: 593259 - DNA, 15 bp, Homo sapiens
tccagtctcccagcc

SEQ ID NO: 593260 - DNA, 15 bp, Homo sapiens
ccagtctcccagcca

SEQ ID NO: 593261 - DNA, 15 bp, Homo sapiens
cagtctcccagccaa

SEQ ID NO: 593262 - DNA, 15 bp, Homo sapiens
agtctcccagccaag

SEQ ID NO: 593263 - DNA, 15 bp, Homo sapiens
gtctcccagccaagc

SEQ ID NO: 593264 - DNA, 15 bp, Homo sapiens
tctcccagccaagct

SEQ ID NO: 593265 - DNA, 15 bp, Homo sapiens
ctcccagccaagctg

SEQ ID NO: 593266 - DNA, 15 bp, Homo sapiens
tcccagccaagctgc

SEQ ID NO: 593267 - DNA, 15 bp, Homo sapiens
cccagccaagctgcc

SEQ ID NO: 593268 - DNA, 15 bp, Homo sapiens
ccagccaagctgccc

SEQ ID NO: 593269 - DNA, 15 bp, Homo sapiens
cagccaagctgcccg

SEQ ID NO: 593270 - DNA, 15 bp, Homo sapiens
agccaagctgcccgc

SEQ ID NO: 593271 - DNA, 15 bp, Homo sapiens
gccaagctgcccgcc

SEQ ID NO: 593272 - DNA, 15 bp, Homo sapiens
ccaagctgcccgcct

SEQ ID NO: 593273 - DNA, 15 bp, Homo sapiens
caagctgcccgcctc

SEQ ID NO: 593274 - DNA, 15 bp, Homo sapiens
aagctgcccgcctca

SEQ ID NO: 593275 - DNA, 15 bp, Homo sapiens
agctgcccgcctcag

SEQ ID NO: 593276 - DNA, 15 bp, Homo sapiens
gctgcccgcctcagg

SEQ ID NO: 593277 - DNA, 15 bp, Homo sapiens
ctgcccgcctcagga

SEQ ID NO: 593278 - DNA, 15 bp, Homo sapiens
tgcccgcctcaggag

SEQ ID NO: 593279 - DNA, 15 bp, Homo sapiens
gcccgcctcaggagg

SEQ ID NO: 593280 - DNA, 15 bp, Homo sapiens
cccgcctcaggagga

SEQ ID NO: 593281 - DNA, 15 bp, Homo sapiens
ccgcctcaggaggat

SEQ ID NO: 593282 - DNA, 15 bp, Homo sapiens
cgcctcaggaggatg

SEQ ID NO: 593283 - DNA, 15 bp, Homo sapiens
gcctcaggaggatga

SEQ ID NO: 593284 - DNA, 15 bp, Homo sapiens
cctcaggaggatgac

SEQ ID NO: 593285 - DNA, 15 bp, Homo sapiens
ctcaggaggatgacc

SEQ ID NO: 593286 - DNA, 15 bp, Homo sapiens
tcaggaggatgacca

SEQ ID NO: 593287 - DNA, 15 bp, Homo sapiens
caggaggatgaccat

SEQ ID NO: 593288 - DNA, 15 bp, Homo sapiens
aggaggatgaccatt

SEQ ID NO: 593289 - DNA, 15 bp, Homo sapiens
ggaggatgaccattc

SEQ ID NO: 593290 - DNA, 15 bp, Homo sapiens
gaggatgaccattcc

SEQ ID NO: 593291 - DNA, 15 bp, Homo sapiens
aggatgaccattccc

SEQ ID NO: 593292 - DNA, 15 bp, Homo sapiens
ggatgaccattccca

SEQ ID NO: 593293 - DNA, 15 bp, Homo sapiens
gatgaccattcccag

SEQ ID NO: 593294 - DNA, 15 bp, Homo sapiens
atgaccattcccagc

SEQ ID NO: 593295 - DNA, 15 bp, Homo sapiens
tgaccattcccagcc

SEQ ID NO: 593296 - DNA, 15 bp, Homo sapiens
gaccattcccagccc

SEQ ID NO: 593297 - DNA, 15 bp, Homo sapiens
accattcccagcccc

SEQ ID NO: 593298 - DNA, 15 bp, Homo sapiens
ccattcccagcccca

SEQ ID NO: 593299 - DNA, 15 bp, Homo sapiens
cattcccagccccac

SEQ ID NO: 593300 - DNA, 15 bp, Homo sapiens
attcccagccccact

SEQ ID NO: 593301 - DNA, 15 bp, Homo sapiens
ttcccagccccactg

SEQ ID NO: 593302 - DNA, 15 bp, Homo sapiens
tcccagccccactga

SEQ ID NO: 593303 - DNA, 15 bp, Homo sapiens
cccagccccactgat

SEQ ID NO: 593304 - DNA, 15 bp, Homo sapiens
ccagccccactgatc

SEQ ID NO: 593305 - DNA, 15 bp, Homo sapiens
cagccccactgatcc

SEQ ID NO: 593306 - DNA, 15 bp, Homo sapiens
agccccactgatccc

SEQ ID NO: 593307 - DNA, 15 bp, Homo sapiens
gccccactgatcccc

SEQ ID NO: 593308 - DNA, 15 bp, Homo sapiens
ccccactgatccccg

SEQ ID NO: 593309 - DNA, 15 bp, Homo sapiens
cccactgatccccga

SEQ ID NO: 593310 - DNA, 15 bp, Homo sapiens
ccactgatccccgag

SEQ ID NO: 593311 - DNA, 15 bp, Homo sapiens
cactgatccccgaga

SEQ ID NO: 593312 - DNA, 15 bp, Homo sapiens
actgatccccgagaa

SEQ ID NO: 593313 - DNA, 15 bp, Homo sapiens
ctgatccccgagaaa

SEQ ID NO: 593314 - DNA, 15 bp, Homo sapiens
tgatccccgagaaac

SEQ ID NO: 593315 - DNA, 15 bp, Homo sapiens
gatccccgagaaaca

SEQ ID NO: 593316 - DNA, 15 bp, Homo sapiens
atccccgagaaacat

SEQ ID NO: 593317 - DNA, 15 bp, Homo sapiens
tccccgagaaacatt

SEQ ID NO: 593318 - DNA, 15 bp, Homo sapiens
ccccgagaaacattt

SEQ ID NO: 593319 - DNA, 15 bp, Homo sapiens
cccgagaaacatttt

SEQ ID NO: 593320 - DNA, 15 bp, Homo sapiens
ccgagaaacatttta

SEQ ID NO: 593321 - DNA, 15 bp, Homo sapiens
cgagaaacattttat

SEQ ID NO: 593322 - DNA, 15 bp, Homo sapiens
gagaaacattttatg

SEQ ID NO: 593323 - DNA, 15 bp, Homo sapiens
agaaacattttatgt

SEQ ID NO: 593324 - DNA, 15 bp, Homo sapiens
gaaacattttatgtt

SEQ ID NO: 593325 - DNA, 15 bp, Homo sapiens
aaacattttatgtta

SEQ ID NO: 593326 - DNA, 15 bp, Homo sapiens
aacattttatgttag

SEQ ID NO: 593327 - DNA, 15 bp, Homo sapiens
acattttatgttagg

SEQ ID NO: 593328 - DNA, 15 bp, Homo sapiens
cattttatgttaggg

SEQ ID NO: 593329 - DNA, 15 bp, Homo sapiens
attttatgttaggga

SEQ ID NO: 593330 - DNA, 15 bp, Homo sapiens
ttttatgttagggaa

SEQ ID NO: 593331 - DNA, 15 bp, Homo sapiens
tttatgttagggaat

SEQ ID NO: 593332 - DNA, 15 bp, Homo sapiens
ttatgttagggaata

SEQ ID NO: 593333 - DNA, 15 bp, Homo sapiens
tatgttagggaatac

SEQ ID NO: 593334 - DNA, 15 bp, Homo sapiens
atgttagggaatacc

SEQ ID NO: 593335 - DNA, 15 bp, Homo sapiens
tgttagggaataccc

SEQ ID NO: 593336 - DNA, 15 bp, Homo sapiens
gttagggaatacccc

SEQ ID NO: 593337 - DNA, 15 bp, Homo sapiens
ttagggaataccccc

SEQ ID NO: 593338 - DNA, 15 bp, Homo sapiens
tagggaataccccca

SEQ ID NO: 593339 - DNA, 15 bp, Homo sapiens
agggaatacccccac

SEQ ID NO: 593340 - DNA, 15 bp, Homo sapiens
gggaatacccccacc

SEQ ID NO: 593341 - DNA, 15 bp, Homo sapiens
ggaatacccccacct

SEQ ID NO: 593342 - DNA, 15 bp, Homo sapiens
gaatacccccacctc

SEQ ID NO: 593343 - DNA, 15 bp, Homo sapiens
aatacccccacctct

SEQ ID NO: 593344 - DNA, 15 bp, Homo sapiens
atacccccacctctt

SEQ ID NO: 593345 - DNA, 15 bp, Homo sapiens
tacccccacctcttc

SEQ ID NO: 593346 - DNA, 15 bp, Homo sapiens
acccccacctcttct

SEQ ID NO: 593347 - DNA, 15 bp, Homo sapiens
cccccacctcttctg

SEQ ID NO: 593348 - DNA, 15 bp, Homo sapiens
ccccacctcttctgg

SEQ ID NO: 593349 - DNA, 15 bp, Homo sapiens
cccacctcttctggg

SEQ ID NO: 593350 - DNA, 15 bp, Homo sapiens
ccacctcttctggga

SEQ ID NO: 593351 - DNA, 15 bp, Homo sapiens
cacctcttctgggat

SEQ ID NO: 593352 - DNA, 15 bp, Homo sapiens
acctcttctgggatg

SEQ ID NO: 593353 - DNA, 15 bp, Homo sapiens
cctcttctgggatgt

SEQ ID NO: 593354 - DNA, 15 bp, Homo sapiens
ctcttctgggatgtg

SEQ ID NO: 593355 - DNA, 15 bp, Homo sapiens
tcttctgggatgtgg

SEQ ID NO: 593356 - DNA, 15 bp, Homo sapiens
cttctgggatgtggg

SEQ ID NO: 593357 - DNA, 15 bp, Homo sapiens
ttctgggatgtggga

SEQ ID NO: 593358 - DNA, 15 bp, Homo sapiens
tctgggatgtgggag

SEQ ID NO: 593359 - DNA, 15 bp, Homo sapiens
ctgggatgtgggagg

SEQ ID NO: 593360 - DNA, 15 bp, Homo sapiens
tgggatgtgggaggc

SEQ ID NO: 593361 - DNA, 15 bp, Homo sapiens
gggatgtgggaggct

SEQ ID NO: 593362 - DNA, 15 bp, Homo sapiens
ggatgtgggaggctc

SEQ ID NO: 593363 - DNA, 15 bp, Homo sapiens
gatgtgggaggctcc

SEQ ID NO: 593364 - DNA, 15 bp, Homo sapiens
atgtgggaggctcct

SEQ ID NO: 593365 - DNA, 15 bp, Homo sapiens
tgtgggaggctcctc

SEQ ID NO: 593366 - DNA, 15 bp, Homo sapiens
gtgggaggctcctca

SEQ ID NO: 593367 - DNA, 15 bp, Homo sapiens
tgggaggctcctcat

SEQ ID NO: 593368 - DNA, 15 bp, Homo sapiens
gggaggctcctcatg

SEQ ID NO: 593369 - DNA, 15 bp, Homo sapiens
ggaggctcctcatgc

SEQ ID NO: 593370 - DNA, 15 bp, Homo sapiens
gaggctcctcatgca

SEQ ID NO: 593371 - DNA, 15 bp, Homo sapiens
aggctcctcatgcag

SEQ ID NO: 593372 - DNA, 15 bp, Homo sapiens
ggctcctcatgcagc

SEQ ID NO: 593373 - DNA, 15 bp, Homo sapiens
gctcctcatgcagcc

SEQ ID NO: 593374 - DNA, 15 bp, Homo sapiens
ctcctcatgcagccc

SEQ ID NO: 593375 - DNA, 15 bp, Homo sapiens
tcctcatgcagccca

SEQ ID NO: 593376 - DNA, 15 bp, Homo sapiens
cctcatgcagcccag

SEQ ID NO: 593377 - DNA, 15 bp, Homo sapiens
ctcatgcagcccagt

SEQ ID NO: 593378 - DNA, 15 bp, Homo sapiens
tcatgcagcccagtt

SEQ ID NO: 593379 - DNA, 15 bp, Homo sapiens
catgcagcccagttc

SEQ ID NO: 593380 - DNA, 15 bp, Homo sapiens
atgcagcccagttcc

SEQ ID NO: 593381 - DNA, 15 bp, Homo sapiens
tgcagcccagttcct

SEQ ID NO: 593382 - DNA, 15 bp, Homo sapiens
gcagcccagttcctc

SEQ ID NO: 593383 - DNA, 15 bp, Homo sapiens
cagcccagttcctcc

SEQ ID NO: 593384 - DNA, 15 bp, Homo sapiens
agcccagttcctcct

SEQ ID NO: 593385 - DNA, 15 bp, Homo sapiens
gcccagttcctcctg

SEQ ID NO: 593386 - DNA, 15 bp, Homo sapiens
cccagttcctcctgc

SEQ ID NO: 593387 - DNA, 15 bp, Homo sapiens
ccagttcctcctgcg

SEQ ID NO: 593388 - DNA, 15 bp, Homo sapiens
cagttcctcctgcgg

SEQ ID NO: 593389 - DNA, 15 bp, Homo sapiens
agttcctcctgcggg

SEQ ID NO: 593390 - DNA, 15 bp, Homo sapiens
gttcctcctgcgggg

SEQ ID NO: 593391 - DNA, 15 bp, Homo sapiens
ttcctcctgcggggg

SEQ ID NO: 593392 - DNA, 15 bp, Homo sapiens
tcctcctgcggggga

SEQ ID NO: 593393 - DNA, 15 bp, Homo sapiens
cctcctgcgggggac

SEQ ID NO: 593394 - DNA, 15 bp, Homo sapiens
ctcctgcgggggacc

SEQ ID NO: 593395 - DNA, 15 bp, Homo sapiens
tcctgcgggggacct

SEQ ID NO: 593396 - DNA, 15 bp, Homo sapiens
cctgcgggggacctg

SEQ ID NO: 593397 - DNA, 15 bp, Homo sapiens
ctgcgggggacctgg

SEQ ID NO: 593398 - DNA, 15 bp, Homo sapiens
tgcgggggacctggg

SEQ ID NO: 593399 - DNA, 15 bp, Homo sapiens
gcgggggacctggga

SEQ ID NO: 593400 - DNA, 15 bp, Homo sapiens
cgggggacctgggat

SEQ ID NO: 593401 - DNA, 15 bp, Homo sapiens
gggggacctgggatg

SEQ ID NO: 593402 - DNA, 15 bp, Homo sapiens
ggggacctgggatgc

SEQ ID NO: 593403 - DNA, 15 bp, Homo sapiens
gggacctgggatgct

SEQ ID NO: 593404 - DNA, 15 bp, Homo sapiens
ggacctgggatgctg

SEQ ID NO: 593405 - DNA, 15 bp, Homo sapiens
gacctgggatgctgg

SEQ ID NO: 593406 - DNA, 15 bp, Homo sapiens
acctgggatgctgga

SEQ ID NO: 593407 - DNA, 15 bp, Homo sapiens
cctgggatgctggag

SEQ ID NO: 593408 - DNA, 15 bp, Homo sapiens
ctgggatgctggaga

SEQ ID NO: 593409 - DNA, 15 bp, Homo sapiens
tgggatgctggagac

SEQ ID NO: 593410 - DNA, 15 bp, Homo sapiens
gggatgctggagaca

SEQ ID NO: 593411 - DNA, 15 bp, Homo sapiens
ggatgctggagacat

SEQ ID NO: 593412 - DNA, 15 bp, Homo sapiens
gatgctggagacatg

SEQ ID NO: 593413 - DNA, 15 bp, Homo sapiens
atgctggagacatgg

SEQ ID NO: 593414 - DNA, 15 bp, Homo sapiens
tgctggagacatgga

SEQ ID NO: 593415 - DNA, 15 bp, Homo sapiens
gctggagacatggat

SEQ ID NO: 593416 - DNA, 15 bp, Homo sapiens
ctggagacatggatg

SEQ ID NO: 593417 - DNA, 15 bp, Homo sapiens
tggagacatggatgc

SEQ ID NO: 593418 - DNA, 15 bp, Homo sapiens
ggagacatggatgct

SEQ ID NO: 593419 - DNA, 15 bp, Homo sapiens
gagacatggatgctc

SEQ ID NO: 593420 - DNA, 15 bp, Homo sapiens
agacatggatgctca

SEQ ID NO: 593421 - DNA, 15 bp, Homo sapiens
gacatggatgctcac

SEQ ID NO: 593422 - DNA, 15 bp, Homo sapiens
acatggatgctcacc

SEQ ID NO: 593423 - DNA, 15 bp, Homo sapiens
catggatgctcacct

SEQ ID NO: 593424 - DNA, 15 bp, Homo sapiens
atggatgctcacctg

SEQ ID NO: 593425 - DNA, 15 bp, Homo sapiens
tggatgctcacctgg

SEQ ID NO: 593426 - DNA, 15 bp, Homo sapiens
ggatgctcacctggc

SEQ ID NO: 593427 - DNA, 15 bp, Homo sapiens
gatgctcacctggct

SEQ ID NO: 593428 - DNA, 15 bp, Homo sapiens
atgctcacctggctg

SEQ ID NO: 593429 - DNA, 15 bp, Homo sapiens
tgctcacctggctgc

SEQ ID NO: 593430 - DNA, 15 bp, Homo sapiens
gctcacctggctgcc

SEQ ID NO: 593431 - DNA, 15 bp, Homo sapiens
ctcacctggctgcct

SEQ ID NO: 593432 - DNA, 15 bp, Homo sapiens
tcacctggctgcctc

SEQ ID NO: 593433 - DNA, 15 bp, Homo sapiens
cacctggctgcctcg

SEQ ID NO: 593434 - DNA, 15 bp, Homo sapiens
acctggctgcctcgg

SEQ ID NO: 593435 - DNA, 15 bp, Homo sapiens
cctggctgcctcggc

SEQ ID NO: 593436 - DNA, 15 bp, Homo sapiens
ctggctgcctcggcc

SEQ ID NO: 593437 - DNA, 15 bp, Homo sapiens
tggctgcctcggcct

SEQ ID NO: 593438 - DNA, 15 bp, Homo sapiens
ggctgcctcggcctt

SEQ ID NO: 593439 - DNA, 15 bp, Homo sapiens
gctgcctcggccttc

SEQ ID NO: 593440 - DNA, 15 bp, Homo sapiens
ctgcctcggccttcc

SEQ ID NO: 593441 - DNA, 15 bp, Homo sapiens
tgcctcggccttcca

SEQ ID NO: 593442 - DNA, 15 bp, Homo sapiens
gcctcggccttccag

SEQ ID NO: 593443 - DNA, 15 bp, Homo sapiens
cctcggccttccagg

SEQ ID NO: 593444 - DNA, 15 bp, Homo sapiens
ctcggccttccaggg

SEQ ID NO: 593445 - DNA, 15 bp, Homo sapiens
tcggccttccaggga

SEQ ID NO: 593446 - DNA, 15 bp, Homo sapiens
cggccttccagggac

SEQ ID NO: 593447 - DNA, 15 bp, Homo sapiens
ggccttccagggaca

SEQ ID NO: 593448 - DNA, 15 bp, Homo sapiens
gccttccagggacag

SEQ ID NO: 593449 - DNA, 15 bp, Homo sapiens
ccttccagggacaga

SEQ ID NO: 593450 - DNA, 15 bp, Homo sapiens
cttccagggacagac

SEQ ID NO: 593451 - DNA, 15 bp, Homo sapiens
ttccagggacagacc

SEQ ID NO: 593452 - DNA, 15 bp, Homo sapiens
tccagggacagaccc

SEQ ID NO: 593453 - DNA, 15 bp, Homo sapiens
ccagggacagacccc

SEQ ID NO: 593454 - DNA, 15 bp, Homo sapiens
cagggacagaccccg

SEQ ID NO: 593455 - DNA, 15 bp, Homo sapiens
agggacagaccccga

SEQ ID NO: 593456 - DNA, 15 bp, Homo sapiens
gggacagaccccgag

SEQ ID NO: 593457 - DNA, 15 bp, Homo sapiens
ggacagaccccgagg

SEQ ID NO: 593458 - DNA, 15 bp, Homo sapiens
gacagaccccgagga

SEQ ID NO: 593459 - DNA, 15 bp, Homo sapiens
acagaccccgaggaa

SEQ ID NO: 593460 - DNA, 15 bp, Homo sapiens
cagaccccgaggaag

SEQ ID NO: 593461 - DNA, 15 bp, Homo sapiens
agaccccgaggaagc

SEQ ID NO: 593462 - DNA, 15 bp, Homo sapiens
gaccccgaggaagcc

SEQ ID NO: 593463 - DNA, 15 bp, Homo sapiens
accccgaggaagcca

SEQ ID NO: 593464 - DNA, 15 bp, Homo sapiens
ccccgaggaagccat

SEQ ID NO: 593465 - DNA, 15 bp, Homo sapiens
cccgaggaagccatc

SEQ ID NO: 593466 - DNA, 15 bp, Homo sapiens
ccgaggaagccatcc

SEQ ID NO: 593467 - DNA, 15 bp, Homo sapiens
cgaggaagccatcct

SEQ ID NO: 593468 - DNA, 15 bp, Homo sapiens
gaggaagccatcctg

SEQ ID NO: 593469 - DNA, 15 bp, Homo sapiens
aggaagccatcctga

SEQ ID NO: 593470 - DNA, 15 bp, Homo sapiens
ggaagccatcctgag

SEQ ID NO: 593471 - DNA, 15 bp, Homo sapiens
gaagccatcctgagt

SEQ ID NO: 593472 - DNA, 15 bp, Homo sapiens
aagccatcctgagtg

SEQ ID NO: 593473 - DNA, 15 bp, Homo sapiens
agccatcctgagtgc

SEQ ID NO: 593474 - DNA, 15 bp, Homo sapiens
gccatcctgagtgcc

SEQ ID NO: 593475 - DNA, 15 bp, Homo sapiens
ccatcctgagtgcct

SEQ ID NO: 593476 - DNA, 15 bp, Homo sapiens
catcctgagtgcctt

SEQ ID NO: 593477 - DNA, 15 bp, Homo sapiens
atcctgagtgccttc

SEQ ID NO: 593478 - DNA, 15 bp, Homo sapiens
tcctgagtgccttcc

SEQ ID NO: 593479 - DNA, 15 bp, Homo sapiens
cctgagtgccttccg

SEQ ID NO: 593480 - DNA, 15 bp, Homo sapiens
ctgagtgccttccgc

SEQ ID NO: 593481 - DNA, 15 bp, Homo sapiens
tgagtgccttccgca

SEQ ID NO: 593482 - DNA, 15 bp, Homo sapiens
gagtgccttccgcat

SEQ ID NO: 593483 - DNA, 15 bp, Homo sapiens
agtgccttccgcatg

SEQ ID NO: 593484 - DNA, 15 bp, Homo sapiens
gtgccttccgcatgt

SEQ ID NO: 593485 - DNA, 15 bp, Homo sapiens
tgccttccgcatgtt

SEQ ID NO: 593486 - DNA, 15 bp, Homo sapiens
gccttccgcatgttt

SEQ ID NO: 593487 - DNA, 15 bp, Homo sapiens
ccttccgcatgtttg

SEQ ID NO: 593488 - DNA, 15 bp, Homo sapiens
cttccgcatgtttga

SEQ ID NO: 593489 - DNA, 15 bp, Homo sapiens
ttccgcatgtttgac

SEQ ID NO: 593490 - DNA, 15 bp, Homo sapiens
tccgcatgtttgacc

SEQ ID NO: 593491 - DNA, 15 bp, Homo sapiens
ccgcatgtttgaccc

SEQ ID NO: 593492 - DNA, 15 bp, Homo sapiens
cgcatgtttgacccc

SEQ ID NO: 593493 - DNA, 15 bp, Homo sapiens
gcatgtttgacccca

SEQ ID NO: 593494 - DNA, 15 bp, Homo sapiens
catgtttgaccccag

SEQ ID NO: 593495 - DNA, 15 bp, Homo sapiens
atgtttgaccccagc

SEQ ID NO: 593496 - DNA, 15 bp, Homo sapiens
tgtttgaccccagcg

SEQ ID NO: 593497 - DNA, 15 bp, Homo sapiens
gtttgaccccagcgg

SEQ ID NO: 593498 - DNA, 15 bp, Homo sapiens
tttgaccccagcggc

SEQ ID NO: 593499 - DNA, 15 bp, Homo sapiens
ttgaccccagcggca

SEQ ID NO: 593500 - DNA, 15 bp, Homo sapiens
tgaccccagcggcaa

SEQ ID NO: 593501 - DNA, 15 bp, Homo sapiens
gaccccagcggcaaa

SEQ ID NO: 593502 - DNA, 15 bp, Homo sapiens
accccagcggcaaag

SEQ ID NO: 593503 - DNA, 15 bp, Homo sapiens
ccccagcggcaaagg

SEQ ID NO: 593504 - DNA, 15 bp, Homo sapiens
cccagcggcaaaggg

SEQ ID NO: 593505 - DNA, 15 bp, Homo sapiens
ccagcggcaaagggg

SEQ ID NO: 593506 - DNA, 15 bp, Homo sapiens
cagcggcaaaggggt

SEQ ID NO: 593507 - DNA, 15 bp, Homo sapiens
agcggcaaaggggtg

SEQ ID NO: 593508 - DNA, 15 bp, Homo sapiens
gcggcaaaggggtgg

SEQ ID NO: 593509 - DNA, 15 bp, Homo sapiens
cggcaaaggggtggt

SEQ ID NO: 593510 - DNA, 15 bp, Homo sapiens
ggcaaaggggtggtg

SEQ ID NO: 593511 - DNA, 15 bp, Homo sapiens
gcaaaggggtggtga

SEQ ID NO: 593512 - DNA, 15 bp, Homo sapiens
caaaggggtggtgaa

SEQ ID NO: 593513 - DNA, 15 bp, Homo sapiens
aaaggggtggtgaac

SEQ ID NO: 593514 - DNA, 15 bp, Homo sapiens
aaggggtggtgaaca

SEQ ID NO: 593515 - DNA, 15 bp, Homo sapiens
aggggtggtgaacaa

SEQ ID NO: 593516 - DNA, 15 bp, Homo sapiens
ggggtggtgaacaag

SEQ ID NO: 593517 - DNA, 15 bp, Homo sapiens
gggtggtgaacaagg

SEQ ID NO: 593518 - DNA, 15 bp, Homo sapiens
ggtggtgaacaagga

SEQ ID NO: 593519 - DNA, 15 bp, Homo sapiens
gtggtgaacaaggat

SEQ ID NO: 593520 - DNA, 15 bp, Homo sapiens
tggtgaacaaggatg

SEQ ID NO: 593521 - DNA, 15 bp, Homo sapiens
ggtgaacaaggatga

SEQ ID NO: 593522 - DNA, 15 bp, Homo sapiens
gtgaacaaggatgag

SEQ ID NO: 593523 - DNA, 15 bp, Homo sapiens
tgaacaaggatgagt

SEQ ID NO: 593524 - DNA, 15 bp, Homo sapiens
gaacaaggatgagta

SEQ ID NO: 593525 - DNA, 15 bp, Homo sapiens
aacaaggatgagtaa

SEQ ID NO: 593526 - DNA, 15 bp, Homo sapiens
acaaggatgagtaag

SEQ ID NO: 593527 - DNA, 15 bp, Homo sapiens
caaggatgagtaagt

SEQ ID NO: 593528 - DNA, 15 bp, Homo sapiens
aaggatgagtaagta

SEQ ID NO: 593529 - DNA, 15 bp, Homo sapiens
aggatgagtaagtat

SEQ ID NO: 593530 - DNA, 15 bp, Homo sapiens
ggatgagtaagtatg

SEQ ID NO: 593531 - DNA, 15 bp, Homo sapiens
gatgagtaagtatgg

SEQ ID NO: 593532 - DNA, 15 bp, Homo sapiens
atgagtaagtatggg

SEQ ID NO: 593533 - DNA, 15 bp, Homo sapiens
tgagtaagtatgggc

SEQ ID NO: 593534 - DNA, 15 bp, Homo sapiens
gagtaagtatgggcc

SEQ ID NO: 593535 - DNA, 15 bp, Homo sapiens
agtaagtatgggccc

SEQ ID NO: 593536 - DNA, 15 bp, Homo sapiens
gtaagtatgggccca

SEQ ID NO: 593537 - DNA, 15 bp, Homo sapiens
taagtatgggcccag

SEQ ID NO: 593538 - DNA, 15 bp, Homo sapiens
aagtatgggcccagc

SEQ ID NO: 593539 - DNA, 15 bp, Homo sapiens
agtatgggcccagcc

SEQ ID NO: 593540 - DNA, 15 bp, Homo sapiens
gtatgggcccagcca

SEQ ID NO: 593541 - DNA, 15 bp, Homo sapiens
tatgggcccagccag

SEQ ID NO: 593542 - DNA, 15 bp, Homo sapiens
atgggcccagccaga

SEQ ID NO: 593543 - DNA, 15 bp, Homo sapiens
tgggcccagccagat

SEQ ID NO: 593544 - DNA, 15 bp, Homo sapiens
gggcccagccagatg

SEQ ID NO: 593545 - DNA, 15 bp, Homo sapiens
ggcccagccagatga

SEQ ID NO: 593546 - DNA, 15 bp, Homo sapiens
gcccagccagatgag

SEQ ID NO: 593547 - DNA, 15 bp, Homo sapiens
cccagccagatgagg

SEQ ID NO: 593548 - DNA, 15 bp, Homo sapiens
ccagccagatgagga

SEQ ID NO: 593549 - DNA, 15 bp, Homo sapiens
cagccagatgaggag

SEQ ID NO: 593550 - DNA, 15 bp, Homo sapiens
agccagatgaggagc

SEQ ID NO: 593551 - DNA, 15 bp, Homo sapiens
gccagatgaggagca

SEQ ID NO: 593552 - DNA, 15 bp, Homo sapiens
ccagatgaggagcac

SEQ ID NO: 593553 - DNA, 15 bp, Homo sapiens
cagatgaggagcacc

SEQ ID NO: 593554 - DNA, 15 bp, Homo sapiens
agatgaggagcaccg

SEQ ID NO: 593555 - DNA, 15 bp, Homo sapiens
gatgaggagcaccgt

SEQ ID NO: 593556 - DNA, 15 bp, Homo sapiens
atgaggagcaccgtg

SEQ ID NO: 593557 - DNA, 15 bp, Homo sapiens
tgaggagcaccgtgg

SEQ ID NO: 593558 - DNA, 15 bp, Homo sapiens
gaggagcaccgtggt

SEQ ID NO: 593559 - DNA, 15 bp, Homo sapiens
aggagcaccgtggtg

SEQ ID NO: 593560 - DNA, 15 bp, Homo sapiens
ggagcaccgtggtgg

SEQ ID NO: 593561 - DNA, 15 bp, Homo sapiens
gagcaccgtggtgga

SEQ ID NO: 593562 - DNA, 15 bp, Homo sapiens
agcaccgtggtggaa

SEQ ID NO: 593563 - DNA, 15 bp, Homo sapiens
gcaccgtggtggaag

SEQ ID NO: 593564 - DNA, 15 bp, Homo sapiens
caccgtggtggaagc

SEQ ID NO: 593565 - DNA, 15 bp, Homo sapiens
accgtggtggaagca

SEQ ID NO: 593566 - DNA, 15 bp, Homo sapiens
ccgtggtggaagcag

SEQ ID NO: 593567 - DNA, 15 bp, Homo sapiens
cgtggtggaagcaga

SEQ ID NO: 593568 - DNA, 15 bp, Homo sapiens
gtggtggaagcagag

SEQ ID NO: 593569 - DNA, 15 bp, Homo sapiens
tggtggaagcagaga

SEQ ID NO: 593570 - DNA, 15 bp, Homo sapiens
ggtggaagcagagag

SEQ ID NO: 593571 - DNA, 15 bp, Homo sapiens
gtggaagcagagagc

SEQ ID NO: 593572 - DNA, 15 bp, Homo sapiens
tggaagcagagagcg

SEQ ID NO: 593573 - DNA, 15 bp, Homo sapiens
ggaagcagagagcgg

SEQ ID NO: 593574 - DNA, 15 bp, Homo sapiens
gaagcagagagcggg

SEQ ID NO: 593575 - DNA, 15 bp, Homo sapiens
aagcagagagcgggg

SEQ ID NO: 593576 - DNA, 15 bp, Homo sapiens
agcagagagcggggt

SEQ ID NO: 593577 - DNA, 15 bp, Homo sapiens
gcagagagcggggtg

SEQ ID NO: 593578 - DNA, 15 bp, Homo sapiens
cagagagcggggtga

SEQ ID NO: 593579 - DNA, 15 bp, Homo sapiens
agagagcggggtgag

SEQ ID NO: 593580 - DNA, 15 bp, Homo sapiens
gagagcggggtgagg

SEQ ID NO: 593581 - DNA, 15 bp, Homo sapiens
agagcggggtgaggc

SEQ ID NO: 593582 - DNA, 15 bp, Homo sapiens
gagcggggtgaggcc

SEQ ID NO: 593583 - DNA, 15 bp, Homo sapiens
agcggggtgaggccc

SEQ ID NO: 593584 - DNA, 15 bp, Homo sapiens
gcggggtgaggcccc

SEQ ID NO: 593585 - DNA, 15 bp, Homo sapiens
cggggtgaggcccct

SEQ ID NO: 593586 - DNA, 15 bp, Homo sapiens
ggggtgaggccccta

SEQ ID NO: 593587 - DNA, 15 bp, Homo sapiens
gggtgaggcccctag

SEQ ID NO: 593588 - DNA, 15 bp, Homo sapiens
ggtgaggcccctagt

SEQ ID NO: 593589 - DNA, 15 bp, Homo sapiens
gtgaggcccctagtg

SEQ ID NO: 593590 - DNA, 15 bp, Homo sapiens
tgaggcccctagtga

SEQ ID NO: 593591 - DNA, 15 bp, Homo sapiens
gaggcccctagtgag

SEQ ID NO: 593592 - DNA, 15 bp, Homo sapiens
aggcccctagtgagg

SEQ ID NO: 593593 - DNA, 15 bp, Homo sapiens
ggcccctagtgaggg

SEQ ID NO: 593594 - DNA, 15 bp, Homo sapiens
gcccctagtgagggg

SEQ ID NO: 593595 - DNA, 15 bp, Homo sapiens
cccctagtgaggggg

SEQ ID NO: 593596 - DNA, 15 bp, Homo sapiens
ccctagtgagggggg

SEQ ID NO: 593597 - DNA, 15 bp, Homo sapiens
cctagtgaggggggc

SEQ ID NO: 593598 - DNA, 15 bp, Homo sapiens
ctagtgaggggggct

SEQ ID NO: 593599 - DNA, 15 bp, Homo sapiens
tagtgaggggggctg

SEQ ID NO: 593600 - DNA, 15 bp, Homo sapiens
agtgaggggggctgc

SEQ ID NO: 593601 - DNA, 15 bp, Homo sapiens
gtgaggggggctgcc

SEQ ID NO: 593602 - DNA, 15 bp, Homo sapiens
tgaggggggctgcct

SEQ ID NO: 593603 - DNA, 15 bp, Homo sapiens
gaggggggctgcctg

SEQ ID NO: 593604 - DNA, 15 bp, Homo sapiens
aggggggctgcctgt

SEQ ID NO: 593605 - DNA, 15 bp, Homo sapiens
ggggggctgcctgtg

SEQ ID NO: 593606 - DNA, 15 bp, Homo sapiens
gggggctgcctgtgc

SEQ ID NO: 593607 - DNA, 15 bp, Homo sapiens
ggggctgcctgtgct

SEQ ID NO: 593608 - DNA, 15 bp, Homo sapiens
gggctgcctgtgctt

SEQ ID NO: 593609 - DNA, 15 bp, Homo sapiens
ggctgcctgtgcttc

SEQ ID NO: 593610 - DNA, 15 bp, Homo sapiens
gctgcctgtgcttcg

SEQ ID NO: 593611 - DNA, 15 bp, Homo sapiens
ctgcctgtgcttcgg

SEQ ID NO: 593612 - DNA, 15 bp, Homo sapiens
tgcctgtgcttcggg

SEQ ID NO: 593613 - DNA, 15 bp, Homo sapiens
gcctgtgcttcgggg

SEQ ID NO: 593614 - DNA, 15 bp, Homo sapiens
cctgtgcttcggggc

SEQ ID NO: 593615 - DNA, 15 bp, Homo sapiens
ctgtgcttcggggcc

SEQ ID NO: 593616 - DNA, 15 bp, Homo sapiens
tgtgcttcggggcct

SEQ ID NO: 593617 - DNA, 15 bp, Homo sapiens
gtgcttcggggcctt

SEQ ID NO: 593618 - DNA, 15 bp, Homo sapiens
tgcttcggggcctta

SEQ ID NO: 593619 - DNA, 15 bp, Homo sapiens
gcttcggggccttac

SEQ ID NO: 593620 - DNA, 15 bp, Homo sapiens
cttcggggccttaca

SEQ ID NO: 593621 - DNA, 15 bp, Homo sapiens
ttcggggccttacac

SEQ ID NO: 593622 - DNA, 15 bp, Homo sapiens
tcggggccttacact

SEQ ID NO: 593623 - DNA, 15 bp, Homo sapiens
cggggccttacactg

SEQ ID NO: 593624 - DNA, 15 bp, Homo sapiens
ggggccttacactgc

SEQ ID NO: 593625 - DNA, 15 bp, Homo sapiens
gggccttacactgct

SEQ ID NO: 593626 - DNA, 15 bp, Homo sapiens
ggccttacactgctc

SEQ ID NO: 593627 - DNA, 15 bp, Homo sapiens
gccttacactgctct

SEQ ID NO: 593628 - DNA, 15 bp, Homo sapiens
ccttacactgctctt

SEQ ID NO: 593629 - DNA, 15 bp, Homo sapiens
cttacactgctcttt

SEQ ID NO: 593630 - DNA, 15 bp, Homo sapiens
ttacactgctctttg

SEQ ID NO: 593631 - DNA, 15 bp, Homo sapiens
tacactgctctttgg

SEQ ID NO: 593632 - DNA, 15 bp, Homo sapiens
acactgctctttggg

SEQ ID NO: 593633 - DNA, 15 bp, Homo sapiens
cactgctctttgggg

SEQ ID NO: 593634 - DNA, 15 bp, Homo sapiens
actgctctttggggt

SEQ ID NO: 593635 - DNA, 15 bp, Homo sapiens
ctgctctttggggtg

SEQ ID NO: 593636 - DNA, 15 bp, Homo sapiens
tgctctttggggtgc

SEQ ID NO: 593637 - DNA, 15 bp, Homo sapiens
gctctttggggtgca

SEQ ID NO: 593638 - DNA, 15 bp, Homo sapiens
ctctttggggtgcag

SEQ ID NO: 593639 - DNA, 15 bp, Homo sapiens
tctttggggtgcagc

SEQ ID NO: 593640 - DNA, 15 bp, Homo sapiens
ctttggggtgcagcc

SEQ ID NO: 593641 - DNA, 15 bp, Homo sapiens
tttggggtgcagcca

SEQ ID NO: 593642 - DNA, 15 bp, Homo sapiens
ttggggtgcagccaa

SEQ ID NO: 593643 - DNA, 15 bp, Homo sapiens
tggggtgcagccaac

SEQ ID NO: 593644 - DNA, 15 bp, Homo sapiens
ggggtgcagccaacc

SEQ ID NO: 593645 - DNA, 15 bp, Homo sapiens
gggtgcagccaaccc

SEQ ID NO: 593646 - DNA, 15 bp, Homo sapiens
ggtgcagccaaccct

SEQ ID NO: 593647 - DNA, 15 bp, Homo sapiens
gtgcagccaaccctt

SEQ ID NO: 593648 - DNA, 15 bp, Homo sapiens
tgcagccaacccttc

SEQ ID NO: 593649 - DNA, 15 bp, Homo sapiens
gcagccaacccttcc

SEQ ID NO: 593650 - DNA, 15 bp, Homo sapiens
cagccaacccttccc

SEQ ID NO: 593651 - DNA, 15 bp, Homo sapiens
agccaacccttccct

SEQ ID NO: 593652 - DNA, 15 bp, Homo sapiens
gccaacccttccctg

SEQ ID NO: 593653 - DNA, 15 bp, Homo sapiens
ccaacccttccctgc

SEQ ID NO: 593654 - DNA, 15 bp, Homo sapiens
caacccttccctgcg

SEQ ID NO: 593655 - DNA, 15 bp, Homo sapiens
aacccttccctgcgc

SEQ ID NO: 593656 - DNA, 15 bp, Homo sapiens
acccttccctgcgcc

SEQ ID NO: 593657 - DNA, 15 bp, Homo sapiens
cccttccctgcgcca

SEQ ID NO: 593658 - DNA, 15 bp, Homo sapiens
ccttccctgcgccat

SEQ ID NO: 593659 - DNA, 15 bp, Homo sapiens
cttccctgcgccatg

SEQ ID NO: 593660 - DNA, 15 bp, Homo sapiens
ttccctgcgccatgg

SEQ ID NO: 593661 - DNA, 15 bp, Homo sapiens
tccctgcgccatggg

SEQ ID NO: 593662 - DNA, 15 bp, Homo sapiens
ccctgcgccatggga

SEQ ID NO: 593663 - DNA, 15 bp, Homo sapiens
cctgcgccatgggag

SEQ ID NO: 593664 - DNA, 15 bp, Homo sapiens
ctgcgccatgggagc

SEQ ID NO: 593665 - DNA, 15 bp, Homo sapiens
tgcgccatgggagcc

SEQ ID NO: 593666 - DNA, 15 bp, Homo sapiens
gcgccatgggagcct

SEQ ID NO: 593667 - DNA, 15 bp, Homo sapiens
cgccatgggagcctc

SEQ ID NO: 593668 - DNA, 15 bp, Homo sapiens
gccatgggagcctcc

SEQ ID NO: 593669 - DNA, 15 bp, Homo sapiens
ccatgggagcctccg

SEQ ID NO: 593670 - DNA, 15 bp, Homo sapiens
catgggagcctccgt

SEQ ID NO: 593671 - DNA, 15 bp, Homo sapiens
atgggagcctccgta

SEQ ID NO: 593672 - DNA, 15 bp, Homo sapiens
tgggagcctccgtac

SEQ ID NO: 593673 - DNA, 15 bp, Homo sapiens
gggagcctccgtacc

SEQ ID NO: 593674 - DNA, 15 bp, Homo sapiens
ggagcctccgtaccc

SEQ ID NO: 593675 - DNA, 15 bp, Homo sapiens
gagcctccgtaccca

SEQ ID NO: 593676 - DNA, 15 bp, Homo sapiens
agcctccgtacccac

SEQ ID NO: 593677 - DNA, 15 bp, Homo sapiens
gcctccgtacccacc

SEQ ID NO: 593678 - DNA, 15 bp, Homo sapiens
cctccgtacccacct

SEQ ID NO: 593679 - DNA, 15 bp, Homo sapiens
ctccgtacccacctt

SEQ ID NO: 593680 - DNA, 15 bp, Homo sapiens
tccgtacccaccttc

SEQ ID NO: 593681 - DNA, 15 bp, Homo sapiens
ccgtacccaccttcc

SEQ ID NO: 593682 - DNA, 15 bp, Homo sapiens
cgtacccaccttccc

SEQ ID NO: 593683 - DNA, 15 bp, Homo sapiens
gtacccaccttccct

SEQ ID NO: 593684 - DNA, 15 bp, Homo sapiens
tacccaccttccctg

SEQ ID NO: 593685 - DNA, 15 bp, Homo sapiens
acccaccttccctgt

SEQ ID NO: 593686 - DNA, 15 bp, Homo sapiens
cccaccttccctgtg

SEQ ID NO: 593687 - DNA, 15 bp, Homo sapiens
ccaccttccctgtgc

SEQ ID NO: 593688 - DNA, 15 bp, Homo sapiens
caccttccctgtgca

SEQ ID NO: 593689 - DNA, 15 bp, Homo sapiens
accttccctgtgcag

SEQ ID NO: 593690 - DNA, 15 bp, Homo sapiens
ccttccctgtgcagt

SEQ ID NO: 593691 - DNA, 15 bp, Homo sapiens
cttccctgtgcagtc

SEQ ID NO: 593692 - DNA, 15 bp, Homo sapiens
ttccctgtgcagtca

SEQ ID NO: 593693 - DNA, 15 bp, Homo sapiens
tccctgtgcagtcac

SEQ ID NO: 593694 - DNA, 15 bp, Homo sapiens
ccctgtgcagtcact

SEQ ID NO: 593695 - DNA, 15 bp, Homo sapiens
cctgtgcagtcactc

SEQ ID NO: 593696 - DNA, 15 bp, Homo sapiens
ctgtgcagtcactcc

SEQ ID NO: 593697 - DNA, 15 bp, Homo sapiens
tgtgcagtcactccc

SEQ ID NO: 593698 - DNA, 15 bp, Homo sapiens
gtgcagtcactcccc

SEQ ID NO: 593699 - DNA, 15 bp, Homo sapiens
tgcagtcactccccc

SEQ ID NO: 593700 - DNA, 15 bp, Homo sapiens
gcagtcactcccccg

SEQ ID NO: 593701 - DNA, 15 bp, Homo sapiens
cagtcactcccccgc

SEQ ID NO: 593702 - DNA, 15 bp, Homo sapiens
agtcactcccccgca

SEQ ID NO: 593703 - DNA, 15 bp, Homo sapiens
gtcactcccccgcag

SEQ ID NO: 593704 - DNA, 15 bp, Homo sapiens
tcactcccccgcagt

SEQ ID NO: 593705 - DNA, 15 bp, Homo sapiens
cactcccccgcagtc

SEQ ID NO: 593706 - DNA, 15 bp, Homo sapiens
actcccccgcagtct

SEQ ID NO: 593707 - DNA, 15 bp, Homo sapiens
ctcccccgcagtctc

SEQ ID NO: 593708 - DNA, 15 bp, Homo sapiens
tcccccgcagtctcc

SEQ ID NO: 593709 - DNA, 15 bp, Homo sapiens
cccccgcagtctcct

SEQ ID NO: 593710 - DNA, 15 bp, Homo sapiens
ccccgcagtctcctg

SEQ ID NO: 593711 - DNA, 15 bp, Homo sapiens
cccgcagtctcctgc

SEQ ID NO: 593712 - DNA, 15 bp, Homo sapiens
ccgcagtctcctgct

SEQ ID NO: 593713 - DNA, 15 bp, Homo sapiens
cgcagtctcctgctc

SEQ ID NO: 593714 - DNA, 15 bp, Homo sapiens
gcagtctcctgctca

SEQ ID NO: 593715 - DNA, 15 bp, Homo sapiens
cagtctcctgctcag

SEQ ID NO: 593716 - DNA, 15 bp, Homo sapiens
agtctcctgctcaga

SEQ ID NO: 593717 - DNA, 15 bp, Homo sapiens
gtctcctgctcagac

SEQ ID NO: 593718 - DNA, 15 bp, Homo sapiens
tctcctgctcagacc

SEQ ID NO: 593719 - DNA, 15 bp, Homo sapiens
ctcctgctcagaccc

SEQ ID NO: 593720 - DNA, 15 bp, Homo sapiens
tcctgctcagaccct

SEQ ID NO: 593721 - DNA, 15 bp, Homo sapiens
cctgctcagaccctc

SEQ ID NO: 593722 - DNA, 15 bp, Homo sapiens
ctgctcagaccctcc

SEQ ID NO: 593723 - DNA, 15 bp, Homo sapiens
tgctcagaccctcct

SEQ ID NO: 593724 - DNA, 15 bp, Homo sapiens
gctcagaccctcctc

SEQ ID NO: 593725 - DNA, 15 bp, Homo sapiens
ctcagaccctcctca

SEQ ID NO: 593726 - DNA, 15 bp, Homo sapiens
tcagaccctcctcac

SEQ ID NO: 593727 - DNA, 15 bp, Homo sapiens
cagaccctcctcacc

SEQ ID NO: 593728 - DNA, 15 bp, Homo sapiens
agaccctcctcaccc

SEQ ID NO: 593729 - DNA, 15 bp, Homo sapiens
gaccctcctcacccc

SEQ ID NO: 593730 - DNA, 15 bp, Homo sapiens
accctcctcaccccc

SEQ ID NO: 593731 - DNA, 15 bp, Homo sapiens
ccctcctcacccccc

SEQ ID NO: 593732 - DNA, 15 bp, Homo sapiens
cctcctcacccccca

SEQ ID NO: 593733 - DNA, 15 bp, Homo sapiens
ctcctcaccccccag

SEQ ID NO: 593734 - DNA, 15 bp, Homo sapiens
tcctcaccccccagg

SEQ ID NO: 593735 - DNA, 15 bp, Homo sapiens
cctcaccccccaggt

SEQ ID NO: 593736 - DNA, 15 bp, Homo sapiens
ctcaccccccaggtt

SEQ ID NO: 593737 - DNA, 15 bp, Homo sapiens
tcaccccccaggttc

SEQ ID NO: 593738 - DNA, 15 bp, Homo sapiens
caccccccaggttca

SEQ ID NO: 593739 - DNA, 15 bp, Homo sapiens
accccccaggttcaa

SEQ ID NO: 593740 - DNA, 15 bp, Homo sapiens
ccccccaggttcaag

SEQ ID NO: 593741 - DNA, 15 bp, Homo sapiens
cccccaggttcaagc

SEQ ID NO: 593742 - DNA, 15 bp, Homo sapiens
ccccaggttcaagca

SEQ ID NO: 593743 - DNA, 15 bp, Homo sapiens
cccaggttcaagcag

SEQ ID NO: 593744 - DNA, 15 bp, Homo sapiens
ccaggttcaagcagc

SEQ ID NO: 593745 - DNA, 15 bp, Homo sapiens
caggttcaagcagct

SEQ ID NO: 593746 - DNA, 15 bp, Homo sapiens
aggttcaagcagctt

SEQ ID NO: 593747 - DNA, 15 bp, Homo sapiens
ggttcaagcagcttc

SEQ ID NO: 593748 - DNA, 15 bp, Homo sapiens
gttcaagcagcttct

SEQ ID NO: 593749 - DNA, 15 bp, Homo sapiens
ttcaagcagcttctc

SEQ ID NO: 593750 - DNA, 15 bp, Homo sapiens
tcaagcagcttctcc

SEQ ID NO: 593751 - DNA, 15 bp, Homo sapiens
caagcagcttctcct

SEQ ID NO: 593752 - DNA, 15 bp, Homo sapiens
aagcagcttctcctg

SEQ ID NO: 593753 - DNA, 15 bp, Homo sapiens
agcagcttctcctga

SEQ ID NO: 593754 - DNA, 15 bp, Homo sapiens
gcagcttctcctgac

SEQ ID NO: 593755 - DNA, 15 bp, Homo sapiens
cagcttctcctgacc

SEQ ID NO: 593756 - DNA, 15 bp, Homo sapiens
agcttctcctgaccc

SEQ ID NO: 593757 - DNA, 15 bp, Homo sapiens
gcttctcctgaccca

SEQ ID NO: 593758 - DNA, 15 bp, Homo sapiens
cttctcctgacccag

SEQ ID NO: 593759 - DNA, 15 bp, Homo sapiens
ttctcctgacccagg

SEQ ID NO: 593760 - DNA, 15 bp, Homo sapiens
tctcctgacccaggc

SEQ ID NO: 593761 - DNA, 15 bp, Homo sapiens
ctcctgacccaggca

SEQ ID NO: 593762 - DNA, 15 bp, Homo sapiens
tcctgacccaggcag

SEQ ID NO: 593763 - DNA, 15 bp, Homo sapiens
cctgacccaggcaga

SEQ ID NO: 593764 - DNA, 15 bp, Homo sapiens
ctgacccaggcagac

SEQ ID NO: 593765 - DNA, 15 bp, Homo sapiens
tgacccaggcagaca

SEQ ID NO: 593766 - DNA, 15 bp, Homo sapiens
gacccaggcagacaa

SEQ ID NO: 593767 - DNA, 15 bp, Homo sapiens
acccaggcagacaag

SEQ ID NO: 593768 - DNA, 15 bp, Homo sapiens
cccaggcagacaagt

SEQ ID NO: 593769 - DNA, 15 bp, Homo sapiens
ccaggcagacaagtt

SEQ ID NO: 593770 - DNA, 15 bp, Homo sapiens
caggcagacaagttc

SEQ ID NO: 593771 - DNA, 15 bp, Homo sapiens
aggcagacaagttct

SEQ ID NO: 593772 - DNA, 15 bp, Homo sapiens
ggcagacaagttctc

SEQ ID NO: 593773 - DNA, 15 bp, Homo sapiens
gcagacaagttctct

SEQ ID NO: 593774 - DNA, 15 bp, Homo sapiens
cagacaagttctctc

SEQ ID NO: 593775 - DNA, 15 bp, Homo sapiens
agacaagttctctcc

SEQ ID NO: 593776 - DNA, 15 bp, Homo sapiens
gacaagttctctcca

SEQ ID NO: 593777 - DNA, 15 bp, Homo sapiens
acaagttctctccag

SEQ ID NO: 593778 - DNA, 15 bp, Homo sapiens
caagttctctccagc

SEQ ID NO: 593779 - DNA, 15 bp, Homo sapiens
aagttctctccagct

SEQ ID NO: 593780 - DNA, 15 bp, Homo sapiens
agttctctccagctg

SEQ ID NO: 593781 - DNA, 15 bp, Homo sapiens
gttctctccagctga

SEQ ID NO: 593782 - DNA, 15 bp, Homo sapiens
ttctctccagctgag

SEQ ID NO: 593783 - DNA, 15 bp, Homo sapiens
tctctccagctgagg

SEQ ID NO: 593784 - DNA, 15 bp, Homo sapiens
ctctccagctgaggt

SEQ ID NO: 593785 - DNA, 15 bp, Homo sapiens
tctccagctgaggtg

SEQ ID NO: 593786 - DNA, 15 bp, Homo sapiens
ctccagctgaggtga

SEQ ID NO: 593787 - DNA, 15 bp, Homo sapiens
tccagctgaggtgag

SEQ ID NO: 593788 - DNA, 15 bp, Homo sapiens
ccagctgaggtgagg

SEQ ID NO: 593789 - DNA, 15 bp, Homo sapiens
cagctgaggtgaggc

SEQ ID NO: 593790 - DNA, 15 bp, Homo sapiens
agctgaggtgaggct

SEQ ID NO: 593791 - DNA, 15 bp, Homo sapiens
gctgaggtgaggctg

SEQ ID NO: 593792 - DNA, 15 bp, Homo sapiens
ctgaggtgaggctgc

SEQ ID NO: 593793 - DNA, 15 bp, Homo sapiens
tgaggtgaggctgcc

SEQ ID NO: 593794 - DNA, 15 bp, Homo sapiens
gaggtgaggctgccc

SEQ ID NO: 593795 - DNA, 15 bp, Homo sapiens
aggtgaggctgccca

SEQ ID NO: 593796 - DNA, 15 bp, Homo sapiens
ggtgaggctgcccag

SEQ ID NO: 593797 - DNA, 15 bp, Homo sapiens
gtgaggctgcccagc

SEQ ID NO: 593798 - DNA, 15 bp, Homo sapiens
tgaggctgcccagcc

SEQ ID NO: 593799 - DNA, 15 bp, Homo sapiens
gaggctgcccagccc

SEQ ID NO: 593800 - DNA, 15 bp, Homo sapiens
aggctgcccagcccc

SEQ ID NO: 593801 - DNA, 15 bp, Homo sapiens
ggctgcccagcccct

SEQ ID NO: 593802 - DNA, 15 bp, Homo sapiens
gctgcccagcccctt

SEQ ID NO: 593803 - DNA, 15 bp, Homo sapiens
ctgcccagccccttc

SEQ ID NO: 593804 - DNA, 15 bp, Homo sapiens
tgcccagccccttca

SEQ ID NO: 593805 - DNA, 15 bp, Homo sapiens
gcccagccccttcaa

SEQ ID NO: 593806 - DNA, 15 bp, Homo sapiens
cccagccccttcaat

SEQ ID NO: 593807 - DNA, 15 bp, Homo sapiens
ccagccccttcaata

SEQ ID NO: 593808 - DNA, 15 bp, Homo sapiens
cagccccttcaatac

SEQ ID NO: 593809 - DNA, 15 bp, Homo sapiens
agccccttcaatact

SEQ ID NO: 593810 - DNA, 15 bp, Homo sapiens
gccccttcaatactc

SEQ ID NO: 593811 - DNA, 15 bp, Homo sapiens
ccccttcaatactca

SEQ ID NO: 593812 - DNA, 15 bp, Homo sapiens
cccttcaatactcat

SEQ ID NO: 593813 - DNA, 15 bp, Homo sapiens
ccttcaatactcatc

SEQ ID NO: 593814 - DNA, 15 bp, Homo sapiens
cttcaatactcatcc

SEQ ID NO: 593815 - DNA, 15 bp, Homo sapiens
ttcaatactcatccc

SEQ ID NO: 593816 - DNA, 15 bp, Homo sapiens
tcaatactcatcccc

SEQ ID NO: 593817 - DNA, 15 bp, Homo sapiens
caatactcatcccca

SEQ ID NO: 593818 - DNA, 15 bp, Homo sapiens
aatactcatccccag

SEQ ID NO: 593819 - DNA, 15 bp, Homo sapiens
atactcatccccagc

SEQ ID NO: 593820 - DNA, 15 bp, Homo sapiens
tactcatccccagca

SEQ ID NO: 593821 - DNA, 15 bp, Homo sapiens
actcatccccagcac

SEQ ID NO: 593822 - DNA, 15 bp, Homo sapiens
ctcatccccagcacc

SEQ ID NO: 593823 - DNA, 15 bp, Homo sapiens
tcatccccagcacct

SEQ ID NO: 593824 - DNA, 15 bp, Homo sapiens
catccccagcacctt

SEQ ID NO: 593825 - DNA, 15 bp, Homo sapiens
atccccagcaccttc

SEQ ID NO: 593826 - DNA, 15 bp, Homo sapiens
tccccagcaccttct

SEQ ID NO: 593827 - DNA, 15 bp, Homo sapiens
ccccagcaccttctc

SEQ ID NO: 593828 - DNA, 15 bp, Homo sapiens
cccagcaccttctct

SEQ ID NO: 593829 - DNA, 15 bp, Homo sapiens
ccagcaccttctctg

SEQ ID NO: 593830 - DNA, 15 bp, Homo sapiens
cagcaccttctctgg

SEQ ID NO: 593831 - DNA, 15 bp, Homo sapiens
agcaccttctctggg

SEQ ID NO: 593832 - DNA, 15 bp, Homo sapiens
gcaccttctctgggc

SEQ ID NO: 593833 - DNA, 15 bp, Homo sapiens
caccttctctgggcc

SEQ ID NO: 593834 - DNA, 15 bp, Homo sapiens
accttctctgggcct

SEQ ID NO: 593835 - DNA, 15 bp, Homo sapiens
ccttctctgggcctt

SEQ ID NO: 593836 - DNA, 15 bp, Homo sapiens
cttctctgggccttc

SEQ ID NO: 593837 - DNA, 15 bp, Homo sapiens
ttctctgggccttca

SEQ ID NO: 593838 - DNA, 15 bp, Homo sapiens
tctctgggccttcac

SEQ ID NO: 593839 - DNA, 15 bp, Homo sapiens
ctctgggccttcacc

SEQ ID NO: 593840 - DNA, 15 bp, Homo sapiens
tctgggccttcaccc

SEQ ID NO: 593841 - DNA, 15 bp, Homo sapiens
ctgggccttcaccca

SEQ ID NO: 593842 - DNA, 15 bp, Homo sapiens
tgggccttcacccat

SEQ ID NO: 593843 - DNA, 15 bp, Homo sapiens
gggccttcacccatg

SEQ ID NO: 593844 - DNA, 15 bp, Homo sapiens
ggccttcacccatga

SEQ ID NO: 593845 - DNA, 15 bp, Homo sapiens
gccttcacccatgac

SEQ ID NO: 593846 - DNA, 15 bp, Homo sapiens
ccttcacccatgacc

SEQ ID NO: 593847 - DNA, 15 bp, Homo sapiens
cttcacccatgaccc

SEQ ID NO: 593848 - DNA, 15 bp, Homo sapiens
ttcacccatgaccca

SEQ ID NO: 593849 - DNA, 15 bp, Homo sapiens
tcacccatgacccag

SEQ ID NO: 593850 - DNA, 15 bp, Homo sapiens
cacccatgacccaga

SEQ ID NO: 593851 - DNA, 15 bp, Homo sapiens
acccatgacccagag

SEQ ID NO: 593852 - DNA, 15 bp, Homo sapiens
cccatgacccagagc

SEQ ID NO: 593853 - DNA, 15 bp, Homo sapiens
ccatgacccagagcc

SEQ ID NO: 593854 - DNA, 15 bp, Homo sapiens
catgacccagagccc

SEQ ID NO: 593855 - DNA, 15 bp, Homo sapiens
atgacccagagccca

SEQ ID NO: 593856 - DNA, 15 bp, Homo sapiens
tgacccagagcccag

SEQ ID NO: 593857 - DNA, 15 bp, Homo sapiens
gacccagagcccagt

SEQ ID NO: 593858 - DNA, 15 bp, Homo sapiens
acccagagcccagta

SEQ ID NO: 593859 - DNA, 15 bp, Homo sapiens
cccagagcccagtac

SEQ ID NO: 593860 - DNA, 15 bp, Homo sapiens
ccagagcccagtacc

SEQ ID NO: 593861 - DNA, 15 bp, Homo sapiens
cagagcccagtacca

SEQ ID NO: 593862 - DNA, 15 bp, Homo sapiens
agagcccagtaccag

SEQ ID NO: 593863 - DNA, 15 bp, Homo sapiens
gagcccagtaccagt

SEQ ID NO: 593864 - DNA, 15 bp, Homo sapiens
agcccagtaccagtg

SEQ ID NO: 593865 - DNA, 15 bp, Homo sapiens
gcccagtaccagtga

SEQ ID NO: 593866 - DNA, 15 bp, Homo sapiens
cccagtaccagtgag

SEQ ID NO: 593867 - DNA, 15 bp, Homo sapiens
ccagtaccagtgagg

SEQ ID NO: 593868 - DNA, 15 bp, Homo sapiens
cagtaccagtgaggc

SEQ ID NO: 593869 - DNA, 15 bp, Homo sapiens
agtaccagtgaggca

SEQ ID NO: 593870 - DNA, 15 bp, Homo sapiens
gtaccagtgaggcag

SEQ ID NO: 593871 - DNA, 15 bp, Homo sapiens
taccagtgaggcagt

SEQ ID NO: 593872 - DNA, 15 bp, Homo sapiens
accagtgaggcagtt

SEQ ID NO: 593873 - DNA, 15 bp, Homo sapiens
ccagtgaggcagttg

SEQ ID NO: 593874 - DNA, 15 bp, Homo sapiens
cagtgaggcagttgc

SEQ ID NO: 593875 - DNA, 15 bp, Homo sapiens
agtgaggcagttgct

SEQ ID NO: 593876 - DNA, 15 bp, Homo sapiens
gtgaggcagttgctg

SEQ ID NO: 593877 - DNA, 15 bp, Homo sapiens
tgaggcagttgctgg

SEQ ID NO: 593878 - DNA, 15 bp, Homo sapiens
gaggcagttgctgga

SEQ ID NO: 593879 - DNA, 15 bp, Homo sapiens
aggcagttgctggaa

SEQ ID NO: 593880 - DNA, 15 bp, Homo sapiens
ggcagttgctggaag

SEQ ID NO: 593881 - DNA, 15 bp, Homo sapiens
gcagttgctggaagg

SEQ ID NO: 593882 - DNA, 15 bp, Homo sapiens
cagttgctggaaggg

SEQ ID NO: 593883 - DNA, 15 bp, Homo sapiens
agttgctggaagggt

SEQ ID NO: 593884 - DNA, 15 bp, Homo sapiens
gttgctggaagggtg

SEQ ID NO: 593885 - DNA, 15 bp, Homo sapiens
ttgctggaagggtga

SEQ ID NO: 593886 - DNA, 15 bp, Homo sapiens
tgctggaagggtgag

SEQ ID NO: 593887 - DNA, 15 bp, Homo sapiens
gctggaagggtgagc

SEQ ID NO: 593888 - DNA, 15 bp, Homo sapiens
ctggaagggtgagcc

SEQ ID NO: 593889 - DNA, 15 bp, Homo sapiens
tggaagggtgagccg

SEQ ID NO: 593890 - DNA, 15 bp, Homo sapiens
ggaagggtgagccga

SEQ ID NO: 593891 - DNA, 15 bp, Homo sapiens
gaagggtgagccgag

SEQ ID NO: 593892 - DNA, 15 bp, Homo sapiens
aagggtgagccgagg

SEQ ID NO: 593893 - DNA, 15 bp, Homo sapiens
agggtgagccgaggg

SEQ ID NO: 593894 - DNA, 15 bp, Homo sapiens
gggtgagccgagggc

SEQ ID NO: 593895 - DNA, 15 bp, Homo sapiens
ggtgagccgagggcc

SEQ ID NO: 593896 - DNA, 15 bp, Homo sapiens
gtgagccgagggccc

SEQ ID NO: 593897 - DNA, 15 bp, Homo sapiens
tgagccgagggccct

SEQ ID NO: 593898 - DNA, 15 bp, Homo sapiens
gagccgagggccctt

SEQ ID NO: 593899 - DNA, 15 bp, Homo sapiens
agccgagggcccttc

SEQ ID NO: 593900 - DNA, 15 bp, Homo sapiens
gccgagggcccttct

SEQ ID NO: 593901 - DNA, 15 bp, Homo sapiens
ccgagggcccttctg

SEQ ID NO: 593902 - DNA, 15 bp, Homo sapiens
cgagggcccttctgg

SEQ ID NO: 593903 - DNA, 15 bp, Homo sapiens
gagggcccttctgga

SEQ ID NO: 593904 - DNA, 15 bp, Homo sapiens
agggcccttctggag

SEQ ID NO: 593905 - DNA, 15 bp, Homo sapiens
gggcccttctggagg

SEQ ID NO: 593906 - DNA, 15 bp, Homo sapiens
ggcccttctggagga

SEQ ID NO: 593907 - DNA, 15 bp, Homo sapiens
gcccttctggaggag

SEQ ID NO: 593908 - DNA, 15 bp, Homo sapiens
cccttctggaggagg

SEQ ID NO: 593909 - DNA, 15 bp, Homo sapiens
ccttctggaggaggt

SEQ ID NO: 593910 - DNA, 15 bp, Homo sapiens
cttctggaggaggtg

SEQ ID NO: 593911 - DNA, 15 bp, Homo sapiens
ttctggaggaggtgc

SEQ ID NO: 593912 - DNA, 15 bp, Homo sapiens
tctggaggaggtgcc

SEQ ID NO: 593913 - DNA, 15 bp, Homo sapiens
ctggaggaggtgcca

SEQ ID NO: 593914 - DNA, 15 bp, Homo sapiens
tggaggaggtgccat

SEQ ID NO: 593915 - DNA, 15 bp, Homo sapiens
ggaggaggtgccatc

SEQ ID NO: 593916 - DNA, 15 bp, Homo sapiens
gaggaggtgccatct

SEQ ID NO: 593917 - DNA, 15 bp, Homo sapiens
aggaggtgccatctc

SEQ ID NO: 593918 - DNA, 15 bp, Homo sapiens
ggaggtgccatctct

SEQ ID NO: 593919 - DNA, 15 bp, Homo sapiens
gaggtgccatctctg

SEQ ID NO: 593920 - DNA, 15 bp, Homo sapiens
aggtgccatctctgt

SEQ ID NO: 593921 - DNA, 15 bp, Homo sapiens
ggtgccatctctgtt

SEQ ID NO: 593922 - DNA, 15 bp, Homo sapiens
gtgccatctctgttg

SEQ ID NO: 593923 - DNA, 15 bp, Homo sapiens
tgccatctctgttga

SEQ ID NO: 593924 - DNA, 15 bp, Homo sapiens
gccatctctgttgag

SEQ ID NO: 593925 - DNA, 15 bp, Homo sapiens
ccatctctgttgaga

SEQ ID NO: 593926 - DNA, 15 bp, Homo sapiens
catctctgttgagac

SEQ ID NO: 593927 - DNA, 15 bp, Homo sapiens
atctctgttgagacc

SEQ ID NO: 593928 - DNA, 15 bp, Homo sapiens
tctctgttgagacct

SEQ ID NO: 593929 - DNA, 15 bp, Homo sapiens
ctctgttgagaccta

SEQ ID NO: 593930 - DNA, 15 bp, Homo sapiens
tctgttgagacctag

SEQ ID NO: 593931 - DNA, 15 bp, Homo sapiens
ctgttgagacctaga

SEQ ID NO: 593932 - DNA, 15 bp, Homo sapiens
tgttgagacctagag

SEQ ID NO: 593933 - DNA, 15 bp, Homo sapiens
gttgagacctagagg

SEQ ID NO: 593934 - DNA, 15 bp, Homo sapiens
ttgagacctagaggg

SEQ ID NO: 593935 - DNA, 15 bp, Homo sapiens
tgagacctagagggt

SEQ ID NO: 593936 - DNA, 15 bp, Homo sapiens
gagacctagagggta

SEQ ID NO: 593937 - DNA, 15 bp, Homo sapiens
agacctagagggtaa

SEQ ID NO: 593938 - DNA, 15 bp, Homo sapiens
gacctagagggtaaa

SEQ ID NO: 593939 - DNA, 15 bp, Homo sapiens
acctagagggtaaag

SEQ ID NO: 593940 - DNA, 15 bp, Homo sapiens
cctagagggtaaaga

SEQ ID NO: 593941 - DNA, 15 bp, Homo sapiens
ctagagggtaaagat

SEQ ID NO: 593942 - DNA, 15 bp, Homo sapiens
tagagggtaaagatg

SEQ ID NO: 593943 - DNA, 15 bp, Homo sapiens
agagggtaaagatgt

SEQ ID NO: 593944 - DNA, 15 bp, Homo sapiens
gagggtaaagatgtg

SEQ ID NO: 593945 - DNA, 15 bp, Homo sapiens
agggtaaagatgtgg

SEQ ID NO: 593946 - DNA, 15 bp, Homo sapiens
gggtaaagatgtgga

SEQ ID NO: 593947 - DNA, 15 bp, Homo sapiens
ggtaaagatgtggag

SEQ ID NO: 593948 - DNA, 15 bp, Homo sapiens
gtaaagatgtggagt

SEQ ID NO: 593949 - DNA, 15 bp, Homo sapiens
taaagatgtggagtc

SEQ ID NO: 593950 - DNA, 15 bp, Homo sapiens
aaagatgtggagtca

SEQ ID NO: 593951 - DNA, 15 bp, Homo sapiens
aagatgtggagtcag

SEQ ID NO: 593952 - DNA, 15 bp, Homo sapiens
agatgtggagtcaga

SEQ ID NO: 593953 - DNA, 15 bp, Homo sapiens
gatgtggagtcagaa

SEQ ID NO: 593954 - DNA, 15 bp, Homo sapiens
atgtggagtcagaaa

SEQ ID NO: 593955 - DNA, 15 bp, Homo sapiens
tgtggagtcagaaaa

SEQ ID NO: 593956 - DNA, 15 bp, Homo sapiens
gtggagtcagaaaag

SEQ ID NO: 593957 - DNA, 15 bp, Homo sapiens
tggagtcagaaaaga

SEQ ID NO: 593958 - DNA, 15 bp, Homo sapiens
ggagtcagaaaagag

SEQ ID NO: 593959 - DNA, 15 bp, Homo sapiens
gagtcagaaaagagg

SEQ ID NO: 593960 - DNA, 15 bp, Homo sapiens
agtcagaaaagaggg

SEQ ID NO: 593961 - DNA, 15 bp, Homo sapiens
gtcagaaaagagggc

SEQ ID NO: 593962 - DNA, 15 bp, Homo sapiens
tcagaaaagagggca

SEQ ID NO: 593963 - DNA, 15 bp, Homo sapiens
cagaaaagagggcag

SEQ ID NO: 593964 - DNA, 15 bp, Homo sapiens
agaaaagagggcagg

SEQ ID NO: 593965 - DNA, 15 bp, Homo sapiens
gaaaagagggcaggg

SEQ ID NO: 593966 - DNA, 15 bp, Homo sapiens
aaaagagggcagggt

SEQ ID NO: 593967 - DNA, 15 bp, Homo sapiens
aaagagggcagggtg

SEQ ID NO: 593968 - DNA, 15 bp, Homo sapiens
aagagggcagggtgc

SEQ ID NO: 593969 - DNA, 15 bp, Homo sapiens
agagggcagggtgcg

SEQ ID NO: 593970 - DNA, 15 bp, Homo sapiens
gagggcagggtgcgc

SEQ ID NO: 593971 - DNA, 15 bp, Homo sapiens
agggcagggtgcgcc

SEQ ID NO: 593972 - DNA, 15 bp, Homo sapiens
gggcagggtgcgcca

SEQ ID NO: 593973 - DNA, 15 bp, Homo sapiens
ggcagggtgcgccag

SEQ ID NO: 593974 - DNA, 15 bp, Homo sapiens
gcagggtgcgccagg

SEQ ID NO: 593975 - DNA, 15 bp, Homo sapiens
cagggtgcgccaggc

SEQ ID NO: 593976 - DNA, 15 bp, Homo sapiens
agggtgcgccaggca

SEQ ID NO: 593977 - DNA, 15 bp, Homo sapiens
gggtgcgccaggcag

SEQ ID NO: 593978 - DNA, 15 bp, Homo sapiens
ggtgcgccaggcagg

SEQ ID NO: 593979 - DNA, 15 bp, Homo sapiens
gtgcgccaggcaggg

SEQ ID NO: 593980 - DNA, 15 bp, Homo sapiens
tgcgccaggcaggga

SEQ ID NO: 593981 - DNA, 15 bp, Homo sapiens
gcgccaggcagggag

SEQ ID NO: 593982 - DNA, 15 bp, Homo sapiens
cgccaggcagggaga

SEQ ID NO: 593983 - DNA, 15 bp, Homo sapiens
gccaggcagggagac

SEQ ID NO: 593984 - DNA, 15 bp, Homo sapiens
ccaggcagggagact

SEQ ID NO: 593985 - DNA, 15 bp, Homo sapiens
caggcagggagactg

SEQ ID NO: 593986 - DNA, 15 bp, Homo sapiens
aggcagggagactgt

SEQ ID NO: 593987 - DNA, 15 bp, Homo sapiens
ggcagggagactgtg

SEQ ID NO: 593988 - DNA, 15 bp, Homo sapiens
gcagggagactgtgc

SEQ ID NO: 593989 - DNA, 15 bp, Homo sapiens
cagggagactgtgca

SEQ ID NO: 593990 - DNA, 15 bp, Homo sapiens
agggagactgtgcac

SEQ ID NO: 593991 - DNA, 15 bp, Homo sapiens
gggagactgtgcaca

SEQ ID NO: 593992 - DNA, 15 bp, Homo sapiens
ggagactgtgcacag

SEQ ID NO: 593993 - DNA, 15 bp, Homo sapiens
gagactgtgcacaga

SEQ ID NO: 593994 - DNA, 15 bp, Homo sapiens
agactgtgcacagac

SEQ ID NO: 593995 - DNA, 15 bp, Homo sapiens
gactgtgcacagacc

SEQ ID NO: 593996 - DNA, 15 bp, Homo sapiens
actgtgcacagacct

SEQ ID NO: 593997 - DNA, 15 bp, Homo sapiens
ctgtgcacagacctg

SEQ ID NO: 593998 - DNA, 15 bp, Homo sapiens
tgtgcacagacctgg

SEQ ID NO: 593999 - DNA, 15 bp, Homo sapiens
gtgcacagacctggg

SEQ ID NO: 594000 - DNA, 15 bp, Homo sapiens
tgcacagacctgggg

SEQ ID NO: 594001 - DNA, 15 bp, Homo sapiens
gcacagacctggggg

SEQ ID NO: 594002 - DNA, 15 bp, Homo sapiens
cacagacctgggggg

SEQ ID NO: 594003 - DNA, 15 bp, Homo sapiens
acagacctgggggga

SEQ ID NO: 594004 - DNA, 15 bp, Homo sapiens
cagacctggggggaa

SEQ ID NO: 594005 - DNA, 15 bp, Homo sapiens
agacctggggggaag

SEQ ID NO: 594006 - DNA, 15 bp, Homo sapiens
gacctggggggaagt

SEQ ID NO: 594007 - DNA, 15 bp, Homo sapiens
acctggggggaagtg

SEQ ID NO: 594008 - DNA, 15 bp, Homo sapiens
cctggggggaagtgg

SEQ ID NO: 594009 - DNA, 15 bp, Homo sapiens
ctggggggaagtgga

SEQ ID NO: 594010 - DNA, 15 bp, Homo sapiens
tggggggaagtggat

SEQ ID NO: 594011 - DNA, 15 bp, Homo sapiens
ggggggaagtggata

SEQ ID NO: 594012 - DNA, 15 bp, Homo sapiens
gggggaagtggatag

SEQ ID NO: 594013 - DNA, 15 bp, Homo sapiens
ggggaagtggatagg

SEQ ID NO: 594014 - DNA, 15 bp, Homo sapiens
gggaagtggataggg

SEQ ID NO: 594015 - DNA, 15 bp, Homo sapiens
ggaagtggataggga

SEQ ID NO: 594016 - DNA, 15 bp, Homo sapiens
gaagtggatagggag

SEQ ID NO: 594017 - DNA, 15 bp, Homo sapiens
aagtggatagggaga

SEQ ID NO: 594018 - DNA, 15 bp, Homo sapiens
agtggatagggagag

SEQ ID NO: 594019 - DNA, 15 bp, Homo sapiens
gtggatagggagagg

SEQ ID NO: 594020 - DNA, 15 bp, Homo sapiens
tggatagggagaggt

SEQ ID NO: 594021 - DNA, 15 bp, Homo sapiens
ggatagggagaggtt

SEQ ID NO: 594022 - DNA, 15 bp, Homo sapiens
gatagggagaggttt

SEQ ID NO: 594023 - DNA, 15 bp, Homo sapiens
atagggagaggtttc

SEQ ID NO: 594024 - DNA, 15 bp, Homo sapiens
tagggagaggtttcg

SEQ ID NO: 594025 - DNA, 15 bp, Homo sapiens
agggagaggtttcgt

SEQ ID NO: 594026 - DNA, 15 bp, Homo sapiens
gggagaggtttcgta

SEQ ID NO: 594027 - DNA, 15 bp, Homo sapiens
ggagaggtttcgtac

SEQ ID NO: 594028 - DNA, 15 bp, Homo sapiens
gagaggtttcgtaca

SEQ ID NO: 594029 - DNA, 15 bp, Homo sapiens
agaggtttcgtacac

SEQ ID NO: 594030 - DNA, 15 bp, Homo sapiens
gaggtttcgtacact

SEQ ID NO: 594031 - DNA, 15 bp, Homo sapiens
aggtttcgtacactc

SEQ ID NO: 594032 - DNA, 15 bp, Homo sapiens
ggtttcgtacactcg

SEQ ID NO: 594033 - DNA, 15 bp, Homo sapiens
gtttcgtacactcgg

SEQ ID NO: 594034 - DNA, 15 bp, Homo sapiens
tttcgtacactcggg

SEQ ID NO: 594035 - DNA, 15 bp, Homo sapiens
ttcgtacactcgggg

SEQ ID NO: 594036 - DNA, 15 bp, Homo sapiens
tcgtacactcggggt

SEQ ID NO: 594037 - DNA, 15 bp, Homo sapiens
cgtacactcggggtg

SEQ ID NO: 594038 - DNA, 15 bp, Homo sapiens
gtacactcggggtgg

SEQ ID NO: 594039 - DNA, 15 bp, Homo sapiens
tacactcggggtggg

SEQ ID NO: 594040 - DNA, 15 bp, Homo sapiens
acactcggggtgggc

SEQ ID NO: 594041 - DNA, 15 bp, Homo sapiens
cactcggggtgggcc

SEQ ID NO: 594042 - DNA, 15 bp, Homo sapiens
actcggggtgggcct

SEQ ID NO: 594043 - DNA, 15 bp, Homo sapiens
ctcggggtgggcctg

SEQ ID NO: 594044 - DNA, 15 bp, Homo sapiens
tcggggtgggcctgt

SEQ ID NO: 594045 - DNA, 15 bp, Homo sapiens
cggggtgggcctgtg

SEQ ID NO: 594046 - DNA, 15 bp, Homo sapiens
ggggtgggcctgtgc

SEQ ID NO: 594047 - DNA, 15 bp, Homo sapiens
gggtgggcctgtgcc

SEQ ID NO: 594048 - DNA, 15 bp, Homo sapiens
ggtgggcctgtgcct

SEQ ID NO: 594049 - DNA, 15 bp, Homo sapiens
gtgggcctgtgcctg

SEQ ID NO: 594050 - DNA, 15 bp, Homo sapiens
tgggcctgtgcctgt

SEQ ID NO: 594051 - DNA, 15 bp, Homo sapiens
gggcctgtgcctgtg

SEQ ID NO: 594052 - DNA, 15 bp, Homo sapiens
ggcctgtgcctgtgg

SEQ ID NO: 594053 - DNA, 15 bp, Homo sapiens
gcctgtgcctgtggc

SEQ ID NO: 594054 - DNA, 15 bp, Homo sapiens
cctgtgcctgtggct

SEQ ID NO: 594055 - DNA, 15 bp, Homo sapiens
ctgtgcctgtggctg

SEQ ID NO: 594056 - DNA, 15 bp, Homo sapiens
tgtgcctgtggctgg

SEQ ID NO: 594057 - DNA, 15 bp, Homo sapiens
gtgcctgtggctgga

SEQ ID NO: 594058 - DNA, 15 bp, Homo sapiens
tgcctgtggctggag

SEQ ID NO: 594059 - DNA, 15 bp, Homo sapiens
gcctgtggctggagg

SEQ ID NO: 594060 - DNA, 15 bp, Homo sapiens
cctgtggctggaggg

SEQ ID NO: 594061 - DNA, 15 bp, Homo sapiens
ctgtggctggagggg

SEQ ID NO: 594062 - DNA, 15 bp, Homo sapiens
tgtggctggaggggc

SEQ ID NO: 594063 - DNA, 15 bp, Homo sapiens
gtggctggaggggcg

SEQ ID NO: 594064 - DNA, 15 bp, Homo sapiens
tggctggaggggcgt

SEQ ID NO: 594065 - DNA, 15 bp, Homo sapiens
ggctggaggggcgtc

SEQ ID NO: 594066 - DNA, 15 bp, Homo sapiens
gctggaggggcgtcc

SEQ ID NO: 594067 - DNA, 15 bp, Homo sapiens
ctggaggggcgtcct

SEQ ID NO: 594068 - DNA, 15 bp, Homo sapiens
tggaggggcgtcctt

SEQ ID NO: 594069 - DNA, 15 bp, Homo sapiens
ggaggggcgtccttt

SEQ ID NO: 594070 - DNA, 15 bp, Homo sapiens
gaggggcgtcctttg

SEQ ID NO: 594071 - DNA, 15 bp, Homo sapiens
aggggcgtcctttgc

SEQ ID NO: 594072 - DNA, 15 bp, Homo sapiens
ggggcgtcctttgcc

SEQ ID NO: 594073 - DNA, 15 bp, Homo sapiens
gggcgtcctttgcct

SEQ ID NO: 594074 - DNA, 15 bp, Homo sapiens
ggcgtcctttgcctc

SEQ ID NO: 594075 - DNA, 15 bp, Homo sapiens
gcgtcctttgcctct

SEQ ID NO: 594076 - DNA, 15 bp, Homo sapiens
cgtcctttgcctctt

SEQ ID NO: 594077 - DNA, 15 bp, Homo sapiens
gtcctttgcctcttg

SEQ ID NO: 594078 - DNA, 15 bp, Homo sapiens
tcctttgcctcttgg

SEQ ID NO: 594079 - DNA, 15 bp, Homo sapiens
cctttgcctcttggc

SEQ ID NO: 594080 - DNA, 15 bp, Homo sapiens
ctttgcctcttggcc

SEQ ID NO: 594081 - DNA, 15 bp, Homo sapiens
tttgcctcttggccc

SEQ ID NO: 594082 - DNA, 15 bp, Homo sapiens
ttgcctcttggccca

SEQ ID NO: 594083 - DNA, 15 bp, Homo sapiens
acccatctccttccc

SEQ ID NO: 594084 - DNA, 15 bp, Homo sapiens
cccatctccttccca

SEQ ID NO: 594085 - DNA, 15 bp, Homo sapiens
ccatctccttcccat

SEQ ID NO: 594086 - DNA, 15 bp, Homo sapiens
catctccttcccatt

SEQ ID NO: 594087 - DNA, 15 bp, Homo sapiens
atctccttcccattc

SEQ ID NO: 594088 - DNA, 15 bp, Homo sapiens
tctccttcccattcc

SEQ ID NO: 594089 - DNA, 15 bp, Homo sapiens
ctccttcccattcct

SEQ ID NO: 594090 - DNA, 15 bp, Homo sapiens
tccttcccattcctc

SEQ ID NO: 594091 - DNA, 15 bp, Homo sapiens
ccttcccattcctcc

SEQ ID NO: 594092 - DNA, 15 bp, Homo sapiens
cttcccattcctcct

SEQ ID NO: 594093 - DNA, 15 bp, Homo sapiens
ttcccattcctcctt

SEQ ID NO: 594094 - DNA, 15 bp, Homo sapiens
tcccattcctccttc

SEQ ID NO: 594095 - DNA, 15 bp, Homo sapiens
cccattcctccttcc

SEQ ID NO: 594096 - DNA, 15 bp, Homo sapiens
ccattcctccttcct

SEQ ID NO: 594097 - DNA, 15 bp, Homo sapiens
cattcctccttcctg

SEQ ID NO: 594098 - DNA, 15 bp, Homo sapiens
attcctccttcctgc

SEQ ID NO: 594099 - DNA, 15 bp, Homo sapiens
ttcctccttcctgct

SEQ ID NO: 594100 - DNA, 15 bp, Homo sapiens
tcctccttcctgctg

SEQ ID NO: 594101 - DNA, 15 bp, Homo sapiens
cctccttcctgctgg

SEQ ID NO: 594102 - DNA, 15 bp, Homo sapiens
ctccttcctgctggt

SEQ ID NO: 594103 - DNA, 15 bp, Homo sapiens
tccttcctgctggtt

SEQ ID NO: 594104 - DNA, 15 bp, Homo sapiens
ccttcctgctggttg

SEQ ID NO: 594105 - DNA, 15 bp, Homo sapiens
cttcctgctggttgg

SEQ ID NO: 594106 - DNA, 15 bp, Homo sapiens
ttcctgctggttgga

SEQ ID NO: 594107 - DNA, 15 bp, Homo sapiens
tcctgctggttggaa

SEQ ID NO: 594108 - DNA, 15 bp, Homo sapiens
cctgctggttggaat

SEQ ID NO: 594109 - DNA, 15 bp, Homo sapiens
ctgctggttggaatt

SEQ ID NO: 594110 - DNA, 15 bp, Homo sapiens
tgctggttggaattt

SEQ ID NO: 594111 - DNA, 15 bp, Homo sapiens
gctggttggaatttg

SEQ ID NO: 594112 - DNA, 15 bp, Homo sapiens
ctggttggaatttgg

SEQ ID NO: 594113 - DNA, 15 bp, Homo sapiens
tggttggaatttgga

SEQ ID NO: 594114 - DNA, 15 bp, Homo sapiens
ggttggaatttggat

SEQ ID NO: 594115 - DNA, 15 bp, Homo sapiens
gttggaatttggata

SEQ ID NO: 594116 - DNA, 15 bp, Homo sapiens
ttggaatttggatat

SEQ ID NO: 594117 - DNA, 15 bp, Homo sapiens
tggaatttggatatc

SEQ ID NO: 594118 - DNA, 15 bp, Homo sapiens
ggaatttggatatcg

SEQ ID NO: 594119 - DNA, 15 bp, Homo sapiens
gaatttggatatcgt

SEQ ID NO: 594120 - DNA, 15 bp, Homo sapiens
aatttggatatcgtg

SEQ ID NO: 594121 - DNA, 15 bp, Homo sapiens
atttggatatcgtgg

SEQ ID NO: 594122 - DNA, 15 bp, Homo sapiens
tttggatatcgtggc

SEQ ID NO: 594123 - DNA, 15 bp, Homo sapiens
ttggatatcgtggct

SEQ ID NO: 594124 - DNA, 15 bp, Homo sapiens
tggatatcgtggctg

SEQ ID NO: 594125 - DNA, 15 bp, Homo sapiens
ggatatcgtggctgg

SEQ ID NO: 594126 - DNA, 15 bp, Homo sapiens
gatatcgtggctgga

SEQ ID NO: 594127 - DNA, 15 bp, Homo sapiens
atatcgtggctggag

SEQ ID NO: 594128 - DNA, 15 bp, Homo sapiens
tatcgtggctggagc

SEQ ID NO: 594129 - DNA, 15 bp, Homo sapiens
atcgtggctggagca

SEQ ID NO: 594130 - DNA, 15 bp, Homo sapiens
tcgtggctggagcag

SEQ ID NO: 594131 - DNA, 15 bp, Homo sapiens
cgtggctggagcagc

SEQ ID NO: 594132 - DNA, 15 bp, Homo sapiens
gtggctggagcagcc

SEQ ID NO: 594133 - DNA, 15 bp, Homo sapiens
tggctggagcagcca

SEQ ID NO: 594134 - DNA, 15 bp, Homo sapiens
ggctggagcagccac

SEQ ID NO: 594135 - DNA, 15 bp, Homo sapiens
gctggagcagccacc

SEQ ID NO: 594136 - DNA, 15 bp, Homo sapiens
ctggagcagccacct

SEQ ID NO: 594137 - DNA, 15 bp, Homo sapiens
tggagcagccacctt

SEQ ID NO: 594138 - DNA, 15 bp, Homo sapiens
ggagcagccaccttg

SEQ ID NO: 594139 - DNA, 15 bp, Homo sapiens
gagcagccaccttgg

SEQ ID NO: 594140 - DNA, 15 bp, Homo sapiens
agcagccaccttgga

SEQ ID NO: 594141 - DNA, 15 bp, Homo sapiens
gcagccaccttggat

SEQ ID NO: 594142 - DNA, 15 bp, Homo sapiens
cagccaccttggatc

SEQ ID NO: 594143 - DNA, 15 bp, Homo sapiens
agccaccttggatca

SEQ ID NO: 594144 - DNA, 15 bp, Homo sapiens
gccaccttggatcat

SEQ ID NO: 594145 - DNA, 15 bp, Homo sapiens
ccaccttggatcatg

SEQ ID NO: 594146 - DNA, 15 bp, Homo sapiens
caccttggatcatga

SEQ ID NO: 594147 - DNA, 15 bp, Homo sapiens
accttggatcatgag

SEQ ID NO: 594148 - DNA, 15 bp, Homo sapiens
ccttggatcatgagg

SEQ ID NO: 594149 - DNA, 15 bp, Homo sapiens
cttggatcatgaggt

SEQ ID NO: 594150 - DNA, 15 bp, Homo sapiens
ttggatcatgaggtg

SEQ ID NO: 594151 - DNA, 15 bp, Homo sapiens
tggatcatgaggtgg

SEQ ID NO: 594152 - DNA, 15 bp, Homo sapiens
ggatcatgaggtgga

SEQ ID NO: 594153 - DNA, 15 bp, Homo sapiens
gatcatgaggtggaa

SEQ ID NO: 594154 - DNA, 15 bp, Homo sapiens
atcatgaggtggaaa

SEQ ID NO: 594155 - DNA, 15 bp, Homo sapiens
tcatgaggtggaaat

SEQ ID NO: 594156 - DNA, 15 bp, Homo sapiens
catgaggtggaaatc

SEQ ID NO: 594157 - DNA, 15 bp, Homo sapiens
atgaggtggaaatct

SEQ ID NO: 594158 - DNA, 15 bp, Homo sapiens
tgaggtggaaatctt

SEQ ID NO: 594159 - DNA, 15 bp, Homo sapiens
gaggtggaaatcttg

SEQ ID NO: 594160 - DNA, 15 bp, Homo sapiens
aggtggaaatcttgg

SEQ ID NO: 594161 - DNA, 15 bp, Homo sapiens
ggtggaaatcttgga

SEQ ID NO: 594162 - DNA, 15 bp, Homo sapiens
gtggaaatcttggac

SEQ ID NO: 594163 - DNA, 15 bp, Homo sapiens
tggaaatcttggacc

SEQ ID NO: 594164 - DNA, 15 bp, Homo sapiens
ggaaatcttggacca

SEQ ID NO: 594165 - DNA, 15 bp, Homo sapiens
gaaatcttggaccaa

SEQ ID NO: 594166 - DNA, 15 bp, Homo sapiens
aaatcttggaccaaa

SEQ ID NO: 594167 - DNA, 15 bp, Homo sapiens
aatcttggaccaaag

SEQ ID NO: 594168 - DNA, 15 bp, Homo sapiens
atcttggaccaaagg

SEQ ID NO: 594169 - DNA, 15 bp, Homo sapiens
tcttggaccaaagga

SEQ ID NO: 594170 - DNA, 15 bp, Homo sapiens
cttggaccaaaggat

SEQ ID NO: 594171 - DNA, 15 bp, Homo sapiens
ttggaccaaaggatg

SEQ ID NO: 594172 - DNA, 15 bp, Homo sapiens
tggaccaaaggatgg

SEQ ID NO: 594173 - DNA, 15 bp, Homo sapiens
ggaccaaaggatggt

SEQ ID NO: 594174 - DNA, 15 bp, Homo sapiens
gaccaaaggatggtg

SEQ ID NO: 594175 - DNA, 15 bp, Homo sapiens
accaaaggatggtgg

SEQ ID NO: 594176 - DNA, 15 bp, Homo sapiens
ccaaaggatggtgga

SEQ ID NO: 594177 - DNA, 15 bp, Homo sapiens
caaaggatggtggaa

SEQ ID NO: 594178 - DNA, 15 bp, Homo sapiens
aaaggatggtggaag

SEQ ID NO: 594179 - DNA, 15 bp, Homo sapiens
aaggatggtggaagc

SEQ ID NO: 594180 - DNA, 15 bp, Homo sapiens
aggatggtggaagct

SEQ ID NO: 594181 - DNA, 15 bp, Homo sapiens
ggatggtggaagcta

SEQ ID NO: 594182 - DNA, 15 bp, Homo sapiens
gatggtggaagctag

SEQ ID NO: 594183 - DNA, 15 bp, Homo sapiens
atggtggaagctaga

SEQ ID NO: 594184 - DNA, 15 bp, Homo sapiens
tggtggaagctagaa

SEQ ID NO: 594185 - DNA, 15 bp, Homo sapiens
ggtggaagctagaag

SEQ ID NO: 594186 - DNA, 15 bp, Homo sapiens
gtggaagctagaaga

SEQ ID NO: 594187 - DNA, 15 bp, Homo sapiens
tggaagctagaagac

SEQ ID NO: 594188 - DNA, 15 bp, Homo sapiens
ggaagctagaagacc

SEQ ID NO: 594189 - DNA, 15 bp, Homo sapiens
gaagctagaagaccc

SEQ ID NO: 594190 - DNA, 15 bp, Homo sapiens
aagctagaagaccca

SEQ ID NO: 594191 - DNA, 15 bp, Homo sapiens
agctagaagacccag

SEQ ID NO: 594192 - DNA, 15 bp, Homo sapiens
gctagaagacccagg

SEQ ID NO: 594193 - DNA, 15 bp, Homo sapiens
ctagaagacccaggc

SEQ ID NO: 594194 - DNA, 15 bp, Homo sapiens
tagaagacccaggca

SEQ ID NO: 594195 - DNA, 15 bp, Homo sapiens
agaagacccaggcac

SEQ ID NO: 594196 - DNA, 15 bp, Homo sapiens
gaagacccaggcacc

SEQ ID NO: 594197 - DNA, 15 bp, Homo sapiens
aagacccaggcaccc

SEQ ID NO: 594198 - DNA, 15 bp, Homo sapiens
agacccaggcaccct

SEQ ID NO: 594199 - DNA, 15 bp, Homo sapiens
gacccaggcaccctg

SEQ ID NO: 594200 - DNA, 15 bp, Homo sapiens
acccaggcaccctga

SEQ ID NO: 594201 - DNA, 15 bp, Homo sapiens
cccaggcaccctgat

SEQ ID NO: 594202 - DNA, 15 bp, Homo sapiens
ccaggcaccctgatg

SEQ ID NO: 594203 - DNA, 15 bp, Homo sapiens
caggcaccctgatga

SEQ ID NO: 594204 - DNA, 15 bp, Homo sapiens
aggcaccctgatgat

SEQ ID NO: 594205 - DNA, 15 bp, Homo sapiens
ggcaccctgatgatc

SEQ ID NO: 594206 - DNA, 15 bp, Homo sapiens
gcaccctgatgatca

SEQ ID NO: 594207 - DNA, 15 bp, Homo sapiens
caccctgatgatcag

SEQ ID NO: 594208 - DNA, 15 bp, Homo sapiens
accctgatgatcagg

SEQ ID NO: 594209 - DNA, 15 bp, Homo sapiens
ccctgatgatcaggg

SEQ ID NO: 594210 - DNA, 15 bp, Homo sapiens
cctgatgatcaggga

SEQ ID NO: 594211 - DNA, 15 bp, Homo sapiens
ctgatgatcagggag

SEQ ID NO: 594212 - DNA, 15 bp, Homo sapiens
tgatgatcagggagc

SEQ ID NO: 594213 - DNA, 15 bp, Homo sapiens
gatgatcagggagca

SEQ ID NO: 594214 - DNA, 15 bp, Homo sapiens
atgatcagggagcag

SEQ ID NO: 594215 - DNA, 15 bp, Homo sapiens
tgatcagggagcagc

SEQ ID NO: 594216 - DNA, 15 bp, Homo sapiens
gatcagggagcagcc

SEQ ID NO: 594217 - DNA, 15 bp, Homo sapiens
atcagggagcagcca

SEQ ID NO: 594218 - DNA, 15 bp, Homo sapiens
tcagggagcagccac

SEQ ID NO: 594219 - DNA, 15 bp, Homo sapiens
cagggagcagccact

SEQ ID NO: 594220 - DNA, 15 bp, Homo sapiens
agggagcagccactc

SEQ ID NO: 594221 - DNA, 15 bp, Homo sapiens
gggagcagccactcc

SEQ ID NO: 594222 - DNA, 15 bp, Homo sapiens
ggagcagccactcca

SEQ ID NO: 594223 - DNA, 15 bp, Homo sapiens
gagcagccactccaa

SEQ ID NO: 594224 - DNA, 15 bp, Homo sapiens
agcagccactccaac

SEQ ID NO: 594225 - DNA, 15 bp, Homo sapiens
gcagccactccaacc

SEQ ID NO: 594226 - DNA, 15 bp, Homo sapiens
cagccactccaacct

SEQ ID NO: 594227 - DNA, 15 bp, Homo sapiens
agccactccaacctt

SEQ ID NO: 594228 - DNA, 15 bp, Homo sapiens
gccactccaaccttg

SEQ ID NO: 594229 - DNA, 15 bp, Homo sapiens
ccactccaaccttgg

SEQ ID NO: 594230 - DNA, 15 bp, Homo sapiens
cactccaaccttggg

SEQ ID NO: 594231 - DNA, 15 bp, Homo sapiens
actccaaccttgggc

SEQ ID NO: 594232 - DNA, 15 bp, Homo sapiens
ctccaaccttgggct

SEQ ID NO: 594233 - DNA, 15 bp, Homo sapiens
tccaaccttgggctg

SEQ ID NO: 594234 - DNA, 15 bp, Homo sapiens
ccaaccttgggctga

SEQ ID NO: 594235 - DNA, 15 bp, Homo sapiens
caaccttgggctgaa

SEQ ID NO: 594236 - DNA, 15 bp, Homo sapiens
aaccttgggctgaac

SEQ ID NO: 594237 - DNA, 15 bp, Homo sapiens
accttgggctgaacc

SEQ ID NO: 594238 - DNA, 15 bp, Homo sapiens
ccttgggctgaacct

SEQ ID NO: 594239 - DNA, 15 bp, Homo sapiens
cttgggctgaacctc

SEQ ID NO: 594240 - DNA, 15 bp, Homo sapiens
ttgggctgaacctct

SEQ ID NO: 594241 - DNA, 15 bp, Homo sapiens
tgggctgaacctctg

SEQ ID NO: 594242 - DNA, 15 bp, Homo sapiens
gggctgaacctctgg

SEQ ID NO: 594243 - DNA, 15 bp, Homo sapiens
ggctgaacctctggc

SEQ ID NO: 594244 - DNA, 15 bp, Homo sapiens
gctgaacctctggcc

SEQ ID NO: 594245 - DNA, 15 bp, Homo sapiens
ctgaacctctggcct

SEQ ID NO: 594246 - DNA, 15 bp, Homo sapiens
tgaacctctggcctt

SEQ ID NO: 594247 - DNA, 15 bp, Homo sapiens
gaacctctggccttg

SEQ ID NO: 594248 - DNA, 15 bp, Homo sapiens
aacctctggccttgc

SEQ ID NO: 594249 - DNA, 15 bp, Homo sapiens
acctctggccttgct

SEQ ID NO: 594250 - DNA, 15 bp, Homo sapiens
cctctggccttgctt

SEQ ID NO: 594251 - DNA, 15 bp, Homo sapiens
ctctggccttgcttt

SEQ ID NO: 594252 - DNA, 15 bp, Homo sapiens
tctggccttgcttta

SEQ ID NO: 594253 - DNA, 15 bp, Homo sapiens
ctggccttgctttac

SEQ ID NO: 594254 - DNA, 15 bp, Homo sapiens
tggccttgctttaca

SEQ ID NO: 594255 - DNA, 15 bp, Homo sapiens
ggccttgctttacat

SEQ ID NO: 594256 - DNA, 15 bp, Homo sapiens
gccttgctttacatg

SEQ ID NO: 594257 - DNA, 15 bp, Homo sapiens
ccttgctttacatga

SEQ ID NO: 594258 - DNA, 15 bp, Homo sapiens
cttgctttacatgag

SEQ ID NO: 594259 - DNA, 15 bp, Homo sapiens
ttgctttacatgaga

SEQ ID NO: 594260 - DNA, 15 bp, Homo sapiens
tgctttacatgagag

SEQ ID NO: 594261 - DNA, 15 bp, Homo sapiens
gctttacatgagaga

SEQ ID NO: 594262 - DNA, 15 bp, Homo sapiens
ctttacatgagagag

SEQ ID NO: 594263 - DNA, 15 bp, Homo sapiens
tttacatgagagagc

SEQ ID NO: 594264 - DNA, 15 bp, Homo sapiens
ttacatgagagagcc

SEQ ID NO: 594265 - DNA, 15 bp, Homo sapiens
tacatgagagagccc

SEQ ID NO: 594266 - DNA, 15 bp, Homo sapiens
acatgagagagccct

SEQ ID NO: 594267 - DNA, 15 bp, Homo sapiens
catgagagagccctt

SEQ ID NO: 594268 - DNA, 15 bp, Homo sapiens
atgagagagcccttg

SEQ ID NO: 594269 - DNA, 15 bp, Homo sapiens
tgagagagcccttgg

SEQ ID NO: 594270 - DNA, 15 bp, Homo sapiens
gagagagcccttggt

SEQ ID NO: 594271 - DNA, 15 bp, Homo sapiens
agagagcccttggtt

SEQ ID NO: 594272 - DNA, 15 bp, Homo sapiens
gagagcccttggtta

SEQ ID NO: 594273 - DNA, 15 bp, Homo sapiens
agagcccttggttat

SEQ ID NO: 594274 - DNA, 15 bp, Homo sapiens
gagcccttggttatg

SEQ ID NO: 594275 - DNA, 15 bp, Homo sapiens
agcccttggttatgc

SEQ ID NO: 594276 - DNA, 15 bp, Homo sapiens
gcccttggttatgcc

SEQ ID NO: 594277 - DNA, 15 bp, Homo sapiens
cccttggttatgcca

SEQ ID NO: 594278 - DNA, 15 bp, Homo sapiens
ccttggttatgccat

SEQ ID NO: 594279 - DNA, 15 bp, Homo sapiens
cttggttatgccatt

SEQ ID NO: 594280 - DNA, 15 bp, Homo sapiens
ttggttatgccattg

SEQ ID NO: 594281 - DNA, 15 bp, Homo sapiens
tggttatgccattgt

SEQ ID NO: 594282 - DNA, 15 bp, Homo sapiens
ggttatgccattgtt

SEQ ID NO: 594283 - DNA, 15 bp, Homo sapiens
gttatgccattgttg

SEQ ID NO: 594284 - DNA, 15 bp, Homo sapiens
ttatgccattgttgt

SEQ ID NO: 594285 - DNA, 15 bp, Homo sapiens
tatgccattgttgtt

SEQ ID NO: 594286 - DNA, 15 bp, Homo sapiens
atgccattgttgttt

SEQ ID NO: 594287 - DNA, 15 bp, Homo sapiens
tgccattgttgtttg

SEQ ID NO: 594288 - DNA, 15 bp, Homo sapiens
gccattgttgtttgg

SEQ ID NO: 594289 - DNA, 15 bp, Homo sapiens
ccattgttgtttggg

SEQ ID NO: 594290 - DNA, 15 bp, Homo sapiens
cattgttgtttgggg

SEQ ID NO: 594291 - DNA, 15 bp, Homo sapiens
attgttgtttggggt

SEQ ID NO: 594292 - DNA, 15 bp, Homo sapiens
ttgttgtttggggtg

SEQ ID NO: 594293 - DNA, 15 bp, Homo sapiens
tgttgtttggggtgg

SEQ ID NO: 594294 - DNA, 15 bp, Homo sapiens
gttgtttggggtggg

SEQ ID NO: 594295 - DNA, 15 bp, Homo sapiens
ttgtttggggtggga

SEQ ID NO: 594296 - DNA, 15 bp, Homo sapiens
tgtttggggtgggat

SEQ ID NO: 594297 - DNA, 15 bp, Homo sapiens
gtttggggtgggatt

SEQ ID NO: 594298 - DNA, 15 bp, Homo sapiens
tttggggtgggattt

SEQ ID NO: 594299 - DNA, 15 bp, Homo sapiens
ttggggtgggatttt

SEQ ID NO: 594300 - DNA, 15 bp, Homo sapiens
tggggtgggattttc

SEQ ID NO: 594301 - DNA, 15 bp, Homo sapiens
ggggtgggattttct

SEQ ID NO: 594302 - DNA, 15 bp, Homo sapiens
gggtgggattttctg

SEQ ID NO: 594303 - DNA, 15 bp, Homo sapiens
ggtgggattttctgt

SEQ ID NO: 594304 - DNA, 15 bp, Homo sapiens
gtgggattttctgtc

SEQ ID NO: 594305 - DNA, 15 bp, Homo sapiens
tgggattttctgtca

SEQ ID NO: 594306 - DNA, 15 bp, Homo sapiens
gggattttctgtcac

SEQ ID NO: 594307 - DNA, 15 bp, Homo sapiens
ggattttctgtcact

SEQ ID NO: 594308 - DNA, 15 bp, Homo sapiens
gattttctgtcactc

SEQ ID NO: 594309 - DNA, 15 bp, Homo sapiens
attttctgtcactcc

SEQ ID NO: 594310 - DNA, 15 bp, Homo sapiens
ttttctgtcactccc

SEQ ID NO: 594311 - DNA, 15 bp, Homo sapiens
tttctgtcactccca

SEQ ID NO: 594312 - DNA, 15 bp, Homo sapiens
ttctgtcactcccag

SEQ ID NO: 594313 - DNA, 15 bp, Homo sapiens
tctgtcactcccagg

SEQ ID NO: 594314 - DNA, 15 bp, Homo sapiens
ctgtcactcccaggt

SEQ ID NO: 594315 - DNA, 15 bp, Homo sapiens
tgtcactcccaggtg

SEQ ID NO: 594316 - DNA, 15 bp, Homo sapiens
gtcactcccaggtga

SEQ ID NO: 594317 - DNA, 15 bp, Homo sapiens
tcactcccaggtgaa

SEQ ID NO: 594318 - DNA, 15 bp, Homo sapiens
cactcccaggtgaac

SEQ ID NO: 594319 - DNA, 15 bp, Homo sapiens
actcccaggtgaaca

SEQ ID NO: 594320 - DNA, 15 bp, Homo sapiens
ctcccaggtgaacaa

SEQ ID NO: 594321 - DNA, 15 bp, Homo sapiens
tcccaggtgaacaac

SEQ ID NO: 594322 - DNA, 15 bp, Homo sapiens
cccaggtgaacaacc

SEQ ID NO: 594323 - DNA, 15 bp, Homo sapiens
ccaggtgaacaacct

SEQ ID NO: 594324 - DNA, 15 bp, Homo sapiens
caggtgaacaaccta

SEQ ID NO: 594325 - DNA, 15 bp, Homo sapiens
aggtgaacaacctaa

SEQ ID NO: 594326 - DNA, 15 bp, Homo sapiens
ggtgaacaacctaat

SEQ ID NO: 594327 - DNA, 15 bp, Homo sapiens
gtgaacaacctaatc

SEQ ID NO: 594328 - DNA, 15 bp, Homo sapiens
tgaacaacctaatcc

SEQ ID NO: 594329 - DNA, 15 bp, Homo sapiens
gaacaacctaatcct

SEQ ID NO: 594330 - DNA, 15 bp, Homo sapiens
aacaacctaatccta

SEQ ID NO: 594331 - DNA, 15 bp, Homo sapiens
acaacctaatcctaa

SEQ ID NO: 594332 - DNA, 15 bp, Homo sapiens
caacctaatcctaag

SEQ ID NO: 594333 - DNA, 15 bp, Homo sapiens
aacctaatcctaagt

SEQ ID NO: 594334 - DNA, 15 bp, Homo sapiens
acctaatcctaagtg

SEQ ID NO: 594335 - DNA, 15 bp, Homo sapiens
cctaatcctaagtga

SEQ ID NO: 594336 - DNA, 15 bp, Homo sapiens
ctaatcctaagtgat

SEQ ID NO: 594337 - DNA, 15 bp, Homo sapiens
taatcctaagtgata

SEQ ID NO: 594338 - DNA, 15 bp, Homo sapiens
aatcctaagtgatac

SEQ ID NO: 594339 - DNA, 15 bp, Homo sapiens
atcctaagtgatacc

SEQ ID NO: 594340 - DNA, 15 bp, Homo sapiens
tcctaagtgatacct

SEQ ID NO: 594341 - DNA, 15 bp, Homo sapiens
cctaagtgataccta

SEQ ID NO: 594342 - DNA, 15 bp, Homo sapiens
ctaagtgatacctag

SEQ ID NO: 594343 - DNA, 15 bp, Homo sapiens
taagtgatacctaga

SEQ ID NO: 594344 - DNA, 15 bp, Homo sapiens
aagtgatacctagaa

SEQ ID NO: 594345 - DNA, 15 bp, Homo sapiens
agtgatacctagaag

SEQ ID NO: 594346 - DNA, 15 bp, Homo sapiens
gtgatacctagaagg

SEQ ID NO: 594347 - DNA, 15 bp, Homo sapiens
tgatacctagaaggt

SEQ ID NO: 594348 - DNA, 15 bp, Homo sapiens
gatacctagaaggtc

SEQ ID NO: 594349 - DNA, 15 bp, Homo sapiens
atacctagaaggtcc

SEQ ID NO: 594350 - DNA, 15 bp, Homo sapiens
tacctagaaggtccc

SEQ ID NO: 594351 - DNA, 15 bp, Homo sapiens
acctagaaggtccct

SEQ ID NO: 594352 - DNA, 15 bp, Homo sapiens
cctagaaggtccctg

SEQ ID NO: 594353 - DNA, 15 bp, Homo sapiens
ctagaaggtccctgc

SEQ ID NO: 594354 - DNA, 15 bp, Homo sapiens
tagaaggtccctgct

SEQ ID NO: 594355 - DNA, 15 bp, Homo sapiens
agaaggtccctgcta

SEQ ID NO: 594356 - DNA, 15 bp, Homo sapiens
gaaggtccctgctag

SEQ ID NO: 594357 - DNA, 15 bp, Homo sapiens
aaggtccctgctaga

SEQ ID NO: 594358 - DNA, 15 bp, Homo sapiens
aggtccctgctagac

SEQ ID NO: 594359 - DNA, 15 bp, Homo sapiens
ggtccctgctagact

SEQ ID NO: 594360 - DNA, 15 bp, Homo sapiens
gtccctgctagactg

SEQ ID NO: 594361 - DNA, 15 bp, Homo sapiens
tccctgctagactga

SEQ ID NO: 594362 - DNA, 15 bp, Homo sapiens
ccctgctagactgac

SEQ ID NO: 594363 - DNA, 15 bp, Homo sapiens
cctgctagactgacc

SEQ ID NO: 594364 - DNA, 15 bp, Homo sapiens
ctgctagactgacct

SEQ ID NO: 594365 - DNA, 15 bp, Homo sapiens
tgctagactgacctc

SEQ ID NO: 594366 - DNA, 15 bp, Homo sapiens
gctagactgacctct

SEQ ID NO: 594367 - DNA, 15 bp, Homo sapiens
ctagactgacctctt

SEQ ID NO: 594368 - DNA, 15 bp, Homo sapiens
tagactgacctcttg

SEQ ID NO: 594369 - DNA, 15 bp, Homo sapiens
agactgacctcttgg

SEQ ID NO: 594370 - DNA, 15 bp, Homo sapiens
gactgacctcttggg

SEQ ID NO: 594371 - DNA, 15 bp, Homo sapiens
actgacctcttggga

SEQ ID NO: 594372 - DNA, 15 bp, Homo sapiens
ctgacctcttgggag

SEQ ID NO: 594373 - DNA, 15 bp, Homo sapiens
tgacctcttgggagg

SEQ ID NO: 594374 - DNA, 15 bp, Homo sapiens
gacctcttgggaggg

SEQ ID NO: 594375 - DNA, 15 bp, Homo sapiens
acctcttgggagggg

SEQ ID NO: 594376 - DNA, 15 bp, Homo sapiens
cctcttgggagggga

SEQ ID NO: 594377 - DNA, 15 bp, Homo sapiens
ctcttgggaggggag

SEQ ID NO: 594378 - DNA, 15 bp, Homo sapiens
tcttgggaggggagg

SEQ ID NO: 594379 - DNA, 15 bp, Homo sapiens
cttgggaggggaggg

SEQ ID NO: 594380 - DNA, 15 bp, Homo sapiens
ttgggaggggaggga

SEQ ID NO: 594381 - DNA, 15 bp, Homo sapiens
tgggaggggagggaa

SEQ ID NO: 594382 - DNA, 15 bp, Homo sapiens
gggaggggagggaat

SEQ ID NO: 594383 - DNA, 15 bp, Homo sapiens
ggaggggagggaata

SEQ ID NO: 594384 - DNA, 15 bp, Homo sapiens
gaggggagggaataa

SEQ ID NO: 594385 - DNA, 15 bp, Homo sapiens
aggggagggaataaa

SEQ ID NO: 594386 - DNA, 15 bp, Homo sapiens
ggggagggaataaac

SEQ ID NO: 594387 - DNA, 15 bp, Homo sapiens
gggagggaataaacg

SEQ ID NO: 594388 - DNA, 15 bp, Homo sapiens
ggagggaataaacga

SEQ ID NO: 594389 - DNA, 15 bp, Homo sapiens
gagggaataaacgag

SEQ ID NO: 594390 - DNA, 15 bp, Homo sapiens
agggaataaacgagt

SEQ ID NO: 594391 - DNA, 15 bp, Homo sapiens
gggaataaacgagtc

SEQ ID NO: 594392 - DNA, 15 bp, Homo sapiens
ggaataaacgagtct

SEQ ID NO: 594393 - DNA, 15 bp, Homo sapiens
gaataaacgagtctc

SEQ ID NO: 594394 - DNA, 15 bp, Homo sapiens
aataaacgagtctca

SEQ ID NO: 594395 - DNA, 15 bp, Homo sapiens
ataaacgagtctcag

SEQ ID NO: 594396 - DNA, 15 bp, Homo sapiens
taaacgagtctcagg

SEQ ID NO: 594397 - DNA, 15 bp, Homo sapiens
aaacgagtctcaggt

SEQ ID NO: 594398 - DNA, 15 bp, Homo sapiens
aacgagtctcaggtg

SEQ ID NO: 594399 - DNA, 15 bp, Homo sapiens
acgagtctcaggtgg

SEQ ID NO: 594400 - DNA, 15 bp, Homo sapiens
cgagtctcaggtggt

SEQ ID NO: 594401 - DNA, 15 bp, Homo sapiens
gagtctcaggtggtg

SEQ ID NO: 594402 - DNA, 15 bp, Homo sapiens
agtctcaggtggtgg

SEQ ID NO: 594403 - DNA, 15 bp, Homo sapiens
gtctcaggtggtgga

SEQ ID NO: 594404 - DNA, 15 bp, Homo sapiens
tctcaggtggtggaa

SEQ ID NO: 594405 - DNA, 15 bp, Homo sapiens
ctcaggtggtggaac

SEQ ID NO: 594406 - DNA, 15 bp, Homo sapiens
tcaggtggtggaacc

SEQ ID NO: 594407 - DNA, 15 bp, Homo sapiens
caggtggtggaacca

SEQ ID NO: 594408 - DNA, 15 bp, Homo sapiens
aggtggtggaaccag

SEQ ID NO: 594409 - DNA, 15 bp, Homo sapiens
ggtggtggaaccaga

SEQ ID NO: 594410 - DNA, 15 bp, Homo sapiens
gtggtggaaccagag

SEQ ID NO: 594411 - DNA, 15 bp, Homo sapiens
tggtggaaccagagc

SEQ ID NO: 594412 - DNA, 15 bp, Homo sapiens
ggtggaaccagagct

SEQ ID NO: 594413 - DNA, 15 bp, Homo sapiens
gtggaaccagagctt

SEQ ID NO: 594414 - DNA, 15 bp, Homo sapiens
tggaaccagagcttg

SEQ ID NO: 594415 - DNA, 15 bp, Homo sapiens
ggaaccagagcttgc

SEQ ID NO: 594416 - DNA, 15 bp, Homo sapiens
gaaccagagcttgct

SEQ ID NO: 594417 - DNA, 15 bp, Homo sapiens
aaccagagcttgctg

SEQ ID NO: 594418 - DNA, 15 bp, Homo sapiens
accagagcttgctgg

SEQ ID NO: 594419 - DNA, 15 bp, Homo sapiens
ccagagcttgctgga

SEQ ID NO: 594420 - DNA, 15 bp, Homo sapiens
cagagcttgctggag

SEQ ID NO: 594421 - DNA, 15 bp, Homo sapiens
agagcttgctggaga

SEQ ID NO: 594422 - DNA, 15 bp, Homo sapiens
gagcttgctggagag

SEQ ID NO: 594423 - DNA, 15 bp, Homo sapiens
agcttgctggagagg

SEQ ID NO: 594424 - DNA, 15 bp, Homo sapiens
gcttgctggagagga

SEQ ID NO: 594425 - DNA, 15 bp, Homo sapiens
cttgctggagaggag

SEQ ID NO: 594426 - DNA, 15 bp, Homo sapiens
ttgctggagaggaga

SEQ ID NO: 594427 - DNA, 15 bp, Homo sapiens
tgctggagaggagag

SEQ ID NO: 594428 - DNA, 15 bp, Homo sapiens
gctggagaggagagt

SEQ ID NO: 594429 - DNA, 15 bp, Homo sapiens
ctggagaggagagtc

SEQ ID NO: 594430 - DNA, 15 bp, Homo sapiens
tggagaggagagtct

SEQ ID NO: 594431 - DNA, 15 bp, Homo sapiens
ggagaggagagtctc

SEQ ID NO: 594432 - DNA, 15 bp, Homo sapiens
gagaggagagtctct

SEQ ID NO: 594433 - DNA, 15 bp, Homo sapiens
agaggagagtctctc

SEQ ID NO: 594434 - DNA, 15 bp, Homo sapiens
gaggagagtctctcc

SEQ ID NO: 594435 - DNA, 15 bp, Homo sapiens
aggagagtctctcct

SEQ ID NO: 594436 - DNA, 15 bp, Homo sapiens
ggagagtctctcctg

SEQ ID NO: 594437 - DNA, 15 bp, Homo sapiens
gagagtctctcctgg

SEQ ID NO: 594438 - DNA, 15 bp, Homo sapiens
agagtctctcctggt

SEQ ID NO: 594439 - DNA, 15 bp, Homo sapiens
gagtctctcctggtg

SEQ ID NO: 594440 - DNA, 15 bp, Homo sapiens
agtctctcctggtga

SEQ ID NO: 594441 - DNA, 15 bp, Homo sapiens
gtctctcctggtgaa

SEQ ID NO: 594442 - DNA, 15 bp, Homo sapiens
tctctcctggtgaat

SEQ ID NO: 594443 - DNA, 15 bp, Homo sapiens
ctctcctggtgaatg

SEQ ID NO: 594444 - DNA, 15 bp, Homo sapiens
tctcctggtgaatgg

SEQ ID NO: 594445 - DNA, 15 bp, Homo sapiens
ctcctggtgaatgga

SEQ ID NO: 594446 - DNA, 15 bp, Homo sapiens
tcctggtgaatggaa

SEQ ID NO: 594447 - DNA, 15 bp, Homo sapiens
cctggtgaatggaag

SEQ ID NO: 594448 - DNA, 15 bp, Homo sapiens
ctggtgaatggaagc

SEQ ID NO: 594449 - DNA, 15 bp, Homo sapiens
tggtgaatggaagcc

SEQ ID NO: 594450 - DNA, 15 bp, Homo sapiens
ggtgaatggaagcca

SEQ ID NO: 594451 - DNA, 15 bp, Homo sapiens
gtgaatggaagccag

SEQ ID NO: 594452 - DNA, 15 bp, Homo sapiens
tgaatggaagccagg

SEQ ID NO: 594453 - DNA, 15 bp, Homo sapiens
gaatggaagccaggg

SEQ ID NO: 594454 - DNA, 15 bp, Homo sapiens
aatggaagccagggg

SEQ ID NO: 594455 - DNA, 15 bp, Homo sapiens
atggaagccaggggc

SEQ ID NO: 594456 - DNA, 15 bp, Homo sapiens
tggaagccaggggcc

SEQ ID NO: 594457 - DNA, 15 bp, Homo sapiens
ggaagccaggggccc

SEQ ID NO: 594458 - DNA, 15 bp, Homo sapiens
gaagccaggggcccc

SEQ ID NO: 594459 - DNA, 15 bp, Homo sapiens
aagccaggggcccct

SEQ ID NO: 594460 - DNA, 15 bp, Homo sapiens
agccaggggcccctc

SEQ ID NO: 594461 - DNA, 15 bp, Homo sapiens
gccaggggcccctcc

SEQ ID NO: 594462 - DNA, 15 bp, Homo sapiens
ccaggggcccctccc

SEQ ID NO: 594463 - DNA, 15 bp, Homo sapiens
caggggcccctccca

SEQ ID NO: 594464 - DNA, 15 bp, Homo sapiens
aggggcccctcccac

SEQ ID NO: 594465 - DNA, 15 bp, Homo sapiens
ggggcccctcccact

SEQ ID NO: 594466 - DNA, 15 bp, Homo sapiens
gggcccctcccactg

SEQ ID NO: 594467 - DNA, 15 bp, Homo sapiens
ggcccctcccactgg

SEQ ID NO: 594468 - DNA, 15 bp, Homo sapiens
gcccctcccactggc

SEQ ID NO: 594469 - DNA, 15 bp, Homo sapiens
cccctcccactggct

SEQ ID NO: 594470 - DNA, 15 bp, Homo sapiens
ccctcccactggctg

SEQ ID NO: 594471 - DNA, 15 bp, Homo sapiens
cctcccactggctgt

SEQ ID NO: 594472 - DNA, 15 bp, Homo sapiens
ctcccactggctgtc

SEQ ID NO: 594473 - DNA, 15 bp, Homo sapiens
tcccactggctgtct

SEQ ID NO: 594474 - DNA, 15 bp, Homo sapiens
cccactggctgtctc

SEQ ID NO: 594475 - DNA, 15 bp, Homo sapiens
ccactggctgtctcc

SEQ ID NO: 594476 - DNA, 15 bp, Homo sapiens
cactggctgtctcct

SEQ ID NO: 594477 - DNA, 15 bp, Homo sapiens
actggctgtctcctt

SEQ ID NO: 594478 - DNA, 15 bp, Homo sapiens
ctggctgtctccttc

SEQ ID NO: 594479 - DNA, 15 bp, Homo sapiens
tggctgtctccttcc

SEQ ID NO: 594480 - DNA, 15 bp, Homo sapiens
ggctgtctccttccc

SEQ ID NO: 594481 - DNA, 15 bp, Homo sapiens
gctgtctccttccct

SEQ ID NO: 594482 - DNA, 15 bp, Homo sapiens
ctgtctccttccctg

SEQ ID NO: 594483 - DNA, 15 bp, Homo sapiens
tgtctccttccctgg

SEQ ID NO: 594484 - DNA, 15 bp, Homo sapiens
gtctccttccctggg

SEQ ID NO: 594485 - DNA, 15 bp, Homo sapiens
tctccttccctgggc

SEQ ID NO: 594486 - DNA, 15 bp, Homo sapiens
ctccttccctgggct

SEQ ID NO: 594487 - DNA, 15 bp, Homo sapiens
tccttccctgggctc

SEQ ID NO: 594488 - DNA, 15 bp, Homo sapiens
ccttccctgggctca

SEQ ID NO: 594489 - DNA, 15 bp, Homo sapiens
cttccctgggctcag

SEQ ID NO: 594490 - DNA, 15 bp, Homo sapiens
ttccctgggctcagg

SEQ ID NO: 594491 - DNA, 15 bp, Homo sapiens
tccctgggctcaggc

SEQ ID NO: 594492 - DNA, 15 bp, Homo sapiens
ccctgggctcaggca

SEQ ID NO: 594493 - DNA, 15 bp, Homo sapiens
cctgggctcaggcag

SEQ ID NO: 594494 - DNA, 15 bp, Homo sapiens
ctgggctcaggcagg

SEQ ID NO: 594495 - DNA, 15 bp, Homo sapiens
tgggctcaggcaggt

SEQ ID NO: 594496 - DNA, 15 bp, Homo sapiens
gggctcaggcaggtc

SEQ ID NO: 594497 - DNA, 15 bp, Homo sapiens
ggctcaggcaggtcc

SEQ ID NO: 594498 - DNA, 15 bp, Homo sapiens
gctcaggcaggtcca

SEQ ID NO: 594499 - DNA, 15 bp, Homo sapiens
ctcaggcaggtccag

SEQ ID NO: 594500 - DNA, 15 bp, Homo sapiens
tcaggcaggtccagc

SEQ ID NO: 594501 - DNA, 15 bp, Homo sapiens
caggcaggtccagcc

SEQ ID NO: 594502 - DNA, 15 bp, Homo sapiens
aggcaggtccagcct

SEQ ID NO: 594503 - DNA, 15 bp, Homo sapiens
ggcaggtccagcctt

SEQ ID NO: 594504 - DNA, 15 bp, Homo sapiens
gcaggtccagccttc

SEQ ID NO: 594505 - DNA, 15 bp, Homo sapiens
caggtccagccttcc

SEQ ID NO: 594506 - DNA, 15 bp, Homo sapiens
aggtccagccttcct

SEQ ID NO: 594507 - DNA, 15 bp, Homo sapiens
ggtccagccttcctc

SEQ ID NO: 594508 - DNA, 15 bp, Homo sapiens
gtccagccttcctca

SEQ ID NO: 594509 - DNA, 15 bp, Homo sapiens
tccagccttcctcag

SEQ ID NO: 594510 - DNA, 15 bp, Homo sapiens
ccagccttcctcagg

SEQ ID NO: 594511 - DNA, 15 bp, Homo sapiens
cagccttcctcagga

SEQ ID NO: 594512 - DNA, 15 bp, Homo sapiens
agccttcctcaggac

SEQ ID NO: 594513 - DNA, 15 bp, Homo sapiens
gccttcctcaggact

SEQ ID NO: 594514 - DNA, 15 bp, Homo sapiens
ccttcctcaggactt

SEQ ID NO: 594515 - DNA, 15 bp, Homo sapiens
cttcctcaggacttt

SEQ ID NO: 594516 - DNA, 15 bp, Homo sapiens
ttcctcaggactttg

SEQ ID NO: 594517 - DNA, 15 bp, Homo sapiens
tcctcaggactttga

SEQ ID NO: 594518 - DNA, 15 bp, Homo sapiens
cctcaggactttgag

SEQ ID NO: 594519 - DNA, 15 bp, Homo sapiens
ctcaggactttgaga

SEQ ID NO: 594520 - DNA, 15 bp, Homo sapiens
tcaggactttgagaa

SEQ ID NO: 594521 - DNA, 15 bp, Homo sapiens
caggactttgagaag

SEQ ID NO: 594522 - DNA, 15 bp, Homo sapiens
aggactttgagaagt

SEQ ID NO: 594523 - DNA, 15 bp, Homo sapiens
ggactttgagaagtt

SEQ ID NO: 594524 - DNA, 15 bp, Homo sapiens
gactttgagaagttc

SEQ ID NO: 594525 - DNA, 15 bp, Homo sapiens
actttgagaagttca

SEQ ID NO: 594526 - DNA, 15 bp, Homo sapiens
ctttgagaagttcag

SEQ ID NO: 594527 - DNA, 15 bp, Homo sapiens
tttgagaagttcagt

SEQ ID NO: 594528 - DNA, 15 bp, Homo sapiens
ttgagaagttcagtt

SEQ ID NO: 594529 - DNA, 15 bp, Homo sapiens
tgagaagttcagttc

SEQ ID NO: 594530 - DNA, 15 bp, Homo sapiens
gagaagttcagttct

SEQ ID NO: 594531 - DNA, 15 bp, Homo sapiens
agaagttcagttctc

SEQ ID NO: 594532 - DNA, 15 bp, Homo sapiens
gaagttcagttctct

SEQ ID NO: 594533 - DNA, 15 bp, Homo sapiens
aagttcagttctctc

SEQ ID NO: 594534 - DNA, 15 bp, Homo sapiens
agttcagttctctcc

SEQ ID NO: 594535 - DNA, 15 bp, Homo sapiens
gttcagttctctccc

SEQ ID NO: 594536 - DNA, 15 bp, Homo sapiens
ttcagttctctcccc

SEQ ID NO: 594537 - DNA, 15 bp, Homo sapiens
tcagttctctcccca

SEQ ID NO: 594538 - DNA, 15 bp, Homo sapiens
cagttctctccccag

SEQ ID NO: 594539 - DNA, 15 bp, Homo sapiens
agttctctccccagg

SEQ ID NO: 594540 - DNA, 15 bp, Homo sapiens
gttctctccccagga

SEQ ID NO: 594541 - DNA, 15 bp, Homo sapiens
ttctctccccaggag

SEQ ID NO: 594542 - DNA, 15 bp, Homo sapiens
tctctccccaggagt

SEQ ID NO: 594543 - DNA, 15 bp, Homo sapiens
ctctccccaggagta

SEQ ID NO: 594544 - DNA, 15 bp, Homo sapiens
tctccccaggagtag

SEQ ID NO: 594545 - DNA, 15 bp, Homo sapiens
ctccccaggagtagc

SEQ ID NO: 594546 - DNA, 15 bp, Homo sapiens
tccccaggagtagct

SEQ ID NO: 594547 - DNA, 15 bp, Homo sapiens
ccccaggagtagcta

SEQ ID NO: 594548 - DNA, 15 bp, Homo sapiens
cccaggagtagctac

SEQ ID NO: 594549 - DNA, 15 bp, Homo sapiens
ccaggagtagctact

SEQ ID NO: 594550 - DNA, 15 bp, Homo sapiens
caggagtagctactt

SEQ ID NO: 594551 - DNA, 15 bp, Homo sapiens
aggagtagctacttt

SEQ ID NO: 594552 - DNA, 15 bp, Homo sapiens
ggagtagctactttc

SEQ ID NO: 594553 - DNA, 15 bp, Homo sapiens
gagtagctactttca

SEQ ID NO: 594554 - DNA, 15 bp, Homo sapiens
agtagctactttcac

SEQ ID NO: 594555 - DNA, 15 bp, Homo sapiens
gtagctactttcaca

SEQ ID NO: 594556 - DNA, 15 bp, Homo sapiens
tagctactttcacaa

SEQ ID NO: 594557 - DNA, 15 bp, Homo sapiens
agctactttcacaaa

SEQ ID NO: 594558 - DNA, 15 bp, Homo sapiens
gctactttcacaaac

SEQ ID NO: 594559 - DNA, 15 bp, Homo sapiens
ctactttcacaaact

SEQ ID NO: 594560 - DNA, 15 bp, Homo sapiens
tactttcacaaactt

SEQ ID NO: 594561 - DNA, 15 bp, Homo sapiens
actttcacaaacttc

SEQ ID NO: 594562 - DNA, 15 bp, Homo sapiens
ctttcacaaacttcc

SEQ ID NO: 594563 - DNA, 15 bp, Homo sapiens
tttcacaaacttcct

SEQ ID NO: 594564 - DNA, 15 bp, Homo sapiens
ttcacaaacttcctg

SEQ ID NO: 594565 - DNA, 15 bp, Homo sapiens
tcacaaacttcctgt

SEQ ID NO: 594566 - DNA, 15 bp, Homo sapiens
cacaaacttcctgtc

SEQ ID NO: 594567 - DNA, 15 bp, Homo sapiens
acaaacttcctgtcc

SEQ ID NO: 594568 - DNA, 15 bp, Homo sapiens
caaacttcctgtccc

SEQ ID NO: 594569 - DNA, 15 bp, Homo sapiens
aaacttcctgtccct

SEQ ID NO: 594570 - DNA, 15 bp, Homo sapiens
aacttcctgtccctt

SEQ ID NO: 594571 - DNA, 15 bp, Homo sapiens
acttcctgtcccttt

SEQ ID NO: 594572 - DNA, 15 bp, Homo sapiens
cttcctgtcccttta

SEQ ID NO: 594573 - DNA, 15 bp, Homo sapiens
ttcctgtccctttag

SEQ ID NO: 594574 - DNA, 15 bp, Homo sapiens
tcctgtccctttagt

SEQ ID NO: 594575 - DNA, 15 bp, Homo sapiens
cctgtccctttagtc

SEQ ID NO: 594576 - DNA, 15 bp, Homo sapiens
ctgtccctttagtcg

SEQ ID NO: 594577 - DNA, 15 bp, Homo sapiens
tgtccctttagtcga

SEQ ID NO: 594578 - DNA, 15 bp, Homo sapiens
gtccctttagtcgac

SEQ ID NO: 594579 - DNA, 15 bp, Homo sapiens
tccctttagtcgaca

SEQ ID NO: 594580 - DNA, 15 bp, Homo sapiens
ccctttagtcgacat

SEQ ID NO: 594581 - DNA, 15 bp, Homo sapiens
cctttagtcgacatg

SEQ ID NO: 594582 - DNA, 15 bp, Homo sapiens
ctttagtcgacatgc

SEQ ID NO: 594583 - DNA, 15 bp, Homo sapiens
tttagtcgacatgcc

SEQ ID NO: 594584 - DNA, 15 bp, Homo sapiens
ttagtcgacatgccc

SEQ ID NO: 594585 - DNA, 15 bp, Homo sapiens
tagtcgacatgcccc

SEQ ID NO: 594586 - DNA, 15 bp, Homo sapiens
agtcgacatgcccca

SEQ ID NO: 594587 - DNA, 15 bp, Homo sapiens
gtcgacatgccccac

SEQ ID NO: 594588 - DNA, 15 bp, Homo sapiens
tcgacatgccccacg

SEQ ID NO: 594589 - DNA, 15 bp, Homo sapiens
cgacatgccccacgg

SEQ ID NO: 594590 - DNA, 15 bp, Homo sapiens
gacatgccccacggc

SEQ ID NO: 594591 - DNA, 15 bp, Homo sapiens
acatgccccacggca

SEQ ID NO: 594592 - DNA, 15 bp, Homo sapiens
catgccccacggcag

SEQ ID NO: 594593 - DNA, 15 bp, Homo sapiens
atgccccacggcagg

SEQ ID NO: 594594 - DNA, 15 bp, Homo sapiens
tgccccacggcaggt

SEQ ID NO: 594595 - DNA, 15 bp, Homo sapiens
gccccacggcaggtc

SEQ ID NO: 594596 - DNA, 15 bp, Homo sapiens
ccccacggcaggtcc

SEQ ID NO: 594597 - DNA, 15 bp, Homo sapiens
cccacggcaggtccg

SEQ ID NO: 594598 - DNA, 15 bp, Homo sapiens
ccacggcaggtccga

SEQ ID NO: 594599 - DNA, 15 bp, Homo sapiens
cacggcaggtccgag

SEQ ID NO: 594600 - DNA, 15 bp, Homo sapiens
acggcaggtccgagg

SEQ ID NO: 594601 - DNA, 15 bp, Homo sapiens
cggcaggtccgaggc

SEQ ID NO: 594602 - DNA, 15 bp, Homo sapiens
ggcaggtccgaggct

SEQ ID NO: 594603 - DNA, 15 bp, Homo sapiens
gcaggtccgaggctg

SEQ ID NO: 594604 - DNA, 15 bp, Homo sapiens
caggtccgaggctgg

SEQ ID NO: 594605 - DNA, 15 bp, Homo sapiens
aggtccgaggctggg

SEQ ID NO: 594606 - DNA, 15 bp, Homo sapiens
ggtccgaggctgggc

SEQ ID NO: 594607 - DNA, 15 bp, Homo sapiens
gtccgaggctgggct

SEQ ID NO: 594608 - DNA, 15 bp, Homo sapiens
tccgaggctgggctc

SEQ ID NO: 594609 - DNA, 15 bp, Homo sapiens
ccgaggctgggctct

SEQ ID NO: 594610 - DNA, 15 bp, Homo sapiens
cgaggctgggctctg

SEQ ID NO: 594611 - DNA, 15 bp, Homo sapiens
gaggctgggctctgc

SEQ ID NO: 594612 - DNA, 15 bp, Homo sapiens
aggctgggctctgcc

SEQ ID NO: 594613 - DNA, 15 bp, Homo sapiens
ggctgggctctgcca

SEQ ID NO: 594614 - DNA, 15 bp, Homo sapiens
gctgggctctgccac

SEQ ID NO: 594615 - DNA, 15 bp, Homo sapiens
ctgggctctgccaca

SEQ ID NO: 594616 - DNA, 15 bp, Homo sapiens
tgggctctgccacaa

SEQ ID NO: 594617 - DNA, 15 bp, Homo sapiens
gggctctgccacaac

SEQ ID NO: 594618 - DNA, 15 bp, Homo sapiens
ggctctgccacaact

SEQ ID NO: 594619 - DNA, 15 bp, Homo sapiens
gctctgccacaactc

SEQ ID NO: 594620 - DNA, 15 bp, Homo sapiens
ctctgccacaactca

SEQ ID NO: 594621 - DNA, 15 bp, Homo sapiens
tctgccacaactcat

SEQ ID NO: 594622 - DNA, 15 bp, Homo sapiens
ctgccacaactcatc

SEQ ID NO: 594623 - DNA, 15 bp, Homo sapiens
tgccacaactcatct

SEQ ID NO: 594624 - DNA, 15 bp, Homo sapiens
gccacaactcatctt

SEQ ID NO: 594625 - DNA, 15 bp, Homo sapiens
ccacaactcatcttt

SEQ ID NO: 594626 - DNA, 15 bp, Homo sapiens
cacaactcatctttc

SEQ ID NO: 594627 - DNA, 15 bp, Homo sapiens
acaactcatctttcc

SEQ ID NO: 594628 - DNA, 15 bp, Homo sapiens
caactcatctttcct

SEQ ID NO: 594629 - DNA, 15 bp, Homo sapiens
aactcatctttccta

SEQ ID NO: 594630 - DNA, 15 bp, Homo sapiens
actcatctttcctaa

SEQ ID NO: 594631 - DNA, 15 bp, Homo sapiens
ctcatctttcctaag

SEQ ID NO: 594632 - DNA, 15 bp, Homo sapiens
tcatctttcctaaga

SEQ ID NO: 594633 - DNA, 15 bp, Homo sapiens
catctttcctaagag

SEQ ID NO: 594634 - DNA, 15 bp, Homo sapiens
atctttcctaagagt

SEQ ID NO: 594635 - DNA, 15 bp, Homo sapiens
tctttcctaagagtg

SEQ ID NO: 594636 - DNA, 15 bp, Homo sapiens
ctttcctaagagtgg

SEQ ID NO: 594637 - DNA, 15 bp, Homo sapiens
tttcctaagagtggc

SEQ ID NO: 594638 - DNA, 15 bp, Homo sapiens
ttcctaagagtggca

SEQ ID NO: 594639 - DNA, 15 bp, Homo sapiens
tcctaagagtggcat

SEQ ID NO: 594640 - DNA, 15 bp, Homo sapiens
cctaagagtggcatc

SEQ ID NO: 594641 - DNA, 15 bp, Homo sapiens
ctaagagtggcatca

SEQ ID NO: 594642 - DNA, 15 bp, Homo sapiens
taagagtggcatcaa

SEQ ID NO: 594643 - DNA, 15 bp, Homo sapiens
aagagtggcatcaag

SEQ ID NO: 594644 - DNA, 15 bp, Homo sapiens
agagtggcatcaagg

SEQ ID NO: 594645 - DNA, 15 bp, Homo sapiens
gagtggcatcaaggt

SEQ ID NO: 594646 - DNA, 15 bp, Homo sapiens
agtggcatcaaggtt

SEQ ID NO: 594647 - DNA, 15 bp, Homo sapiens
gtggcatcaaggttc

SEQ ID NO: 594648 - DNA, 15 bp, Homo sapiens
tggcatcaaggttct

SEQ ID NO: 594649 - DNA, 15 bp, Homo sapiens
ggcatcaaggttctt

SEQ ID NO: 594650 - DNA, 15 bp, Homo sapiens
gcatcaaggttcttt

SEQ ID NO: 594651 - DNA, 15 bp, Homo sapiens
catcaaggttctttg

SEQ ID NO: 594652 - DNA, 15 bp, Homo sapiens
atcaaggttctttgg

SEQ ID NO: 594653 - DNA, 15 bp, Homo sapiens
tcaaggttctttggt

SEQ ID NO: 594654 - DNA, 15 bp, Homo sapiens
caaggttctttggtg

SEQ ID NO: 594655 - DNA, 15 bp, Homo sapiens
aaggttctttggtgg

SEQ ID NO: 594656 - DNA, 15 bp, Homo sapiens
aggttctttggtggg

SEQ ID NO: 594657 - DNA, 15 bp, Homo sapiens
ggttctttggtgggg

SEQ ID NO: 594658 - DNA, 15 bp, Homo sapiens
gttctttggtggggg

SEQ ID NO: 594659 - DNA, 15 bp, Homo sapiens
ttctttggtggggga

SEQ ID NO: 594660 - DNA, 15 bp, Homo sapiens
tctttggtgggggat

SEQ ID NO: 594661 - DNA, 15 bp, Homo sapiens
ctttggtgggggatc

SEQ ID NO: 594662 - DNA, 15 bp, Homo sapiens
tttggtgggggatcc

SEQ ID NO: 594663 - DNA, 15 bp, Homo sapiens
ttggtgggggatcct

SEQ ID NO: 594664 - DNA, 15 bp, Homo sapiens
tggtgggggatcctc

SEQ ID NO: 594665 - DNA, 15 bp, Homo sapiens
ggtgggggatcctct

SEQ ID NO: 594666 - DNA, 15 bp, Homo sapiens
gtgggggatcctctt

SEQ ID NO: 594667 - DNA, 15 bp, Homo sapiens
tgggggatcctcttt

SEQ ID NO: 594668 - DNA, 15 bp, Homo sapiens
gggggatcctctttt

SEQ ID NO: 594669 - DNA, 15 bp, Homo sapiens
ggggatcctcttttc

SEQ ID NO: 594670 - DNA, 15 bp, Homo sapiens
gggatcctcttttcc

SEQ ID NO: 594671 - DNA, 15 bp, Homo sapiens
ggatcctcttttccc

SEQ ID NO: 594672 - DNA, 15 bp, Homo sapiens
gatcctcttttccca

SEQ ID NO: 594673 - DNA, 15 bp, Homo sapiens
atcctcttttcccat

SEQ ID NO: 594674 - DNA, 15 bp, Homo sapiens
tcctcttttcccatc

SEQ ID NO: 594675 - DNA, 15 bp, Homo sapiens
cctcttttcccatcc

SEQ ID NO: 594676 - DNA, 15 bp, Homo sapiens
ctcttttcccatccc

SEQ ID NO: 594677 - DNA, 15 bp, Homo sapiens
tcttttcccatcccc

SEQ ID NO: 594678 - DNA, 15 bp, Homo sapiens
cttttcccatcccca

SEQ ID NO: 594679 - DNA, 15 bp, Homo sapiens
ttttcccatccccac

SEQ ID NO: 594680 - DNA, 15 bp, Homo sapiens
tttcccatccccact

SEQ ID NO: 594681 - DNA, 15 bp, Homo sapiens
ttcccatccccactt

SEQ ID NO: 594682 - DNA, 15 bp, Homo sapiens
tcccatccccacttc

SEQ ID NO: 594683 - DNA, 15 bp, Homo sapiens
cccatccccacttct

SEQ ID NO: 594684 - DNA, 15 bp, Homo sapiens
ccatccccacttctc

SEQ ID NO: 594685 - DNA, 15 bp, Homo sapiens
catccccacttctca

SEQ ID NO: 594686 - DNA, 15 bp, Homo sapiens
atccccacttctcaa

SEQ ID NO: 594687 - DNA, 15 bp, Homo sapiens
tccccacttctcaag

SEQ ID NO: 594688 - DNA, 15 bp, Homo sapiens
ccccacttctcaaga

SEQ ID NO: 594689 - DNA, 15 bp, Homo sapiens
cccacttctcaagag

SEQ ID NO: 594690 - DNA, 15 bp, Homo sapiens
ccacttctcaagagc

SEQ ID NO: 594691 - DNA, 15 bp, Homo sapiens
cacttctcaagagca

SEQ ID NO: 594692 - DNA, 15 bp, Homo sapiens
acttctcaagagcat

SEQ ID NO: 594693 - DNA, 15 bp, Homo sapiens
cttctcaagagcatt

SEQ ID NO: 594694 - DNA, 15 bp, Homo sapiens
ttctcaagagcatta

SEQ ID NO: 594695 - DNA, 15 bp, Homo sapiens
tctcaagagcattag

SEQ ID NO: 594696 - DNA, 15 bp, Homo sapiens
ctcaagagcattagg

SEQ ID NO: 594697 - DNA, 15 bp, Homo sapiens
tcaagagcattaggg

SEQ ID NO: 594698 - DNA, 15 bp, Homo sapiens
caagagcattaggga

SEQ ID NO: 594699 - DNA, 15 bp, Homo sapiens
aagagcattagggaa

SEQ ID NO: 594700 - DNA, 15 bp, Homo sapiens
agagcattagggaag

SEQ ID NO: 594701 - DNA, 15 bp, Homo sapiens
gagcattagggaaga

SEQ ID NO: 594702 - DNA, 15 bp, Homo sapiens
agcattagggaagat

SEQ ID NO: 594703 - DNA, 15 bp, Homo sapiens
gcattagggaagata

SEQ ID NO: 594704 - DNA, 15 bp, Homo sapiens
cattagggaagatac

SEQ ID NO: 594705 - DNA, 15 bp, Homo sapiens
attagggaagataca

SEQ ID NO: 594706 - DNA, 15 bp, Homo sapiens
ttagggaagatacag

SEQ ID NO: 594707 - DNA, 15 bp, Homo sapiens
tagggaagatacagt

SEQ ID NO: 594708 - DNA, 15 bp, Homo sapiens
agggaagatacagtc

SEQ ID NO: 594709 - DNA, 15 bp, Homo sapiens
gggaagatacagtca

SEQ ID NO: 594710 - DNA, 15 bp, Homo sapiens
ggaagatacagtcag

SEQ ID NO: 594711 - DNA, 15 bp, Homo sapiens
gaagatacagtcagt

SEQ ID NO: 594712 - DNA, 15 bp, Homo sapiens
aagatacagtcagtg

SEQ ID NO: 594713 - DNA, 15 bp, Homo sapiens
agatacagtcagtgc

SEQ ID NO: 594714 - DNA, 15 bp, Homo sapiens
gatacagtcagtgcc

SEQ ID NO: 594715 - DNA, 15 bp, Homo sapiens
atacagtcagtgccc

SEQ ID NO: 594716 - DNA, 15 bp, Homo sapiens
tacagtcagtgccct

SEQ ID NO: 594717 - DNA, 15 bp, Homo sapiens
acagtcagtgccctc

SEQ ID NO: 594718 - DNA, 15 bp, Homo sapiens
cagtcagtgccctct

SEQ ID NO: 594719 - DNA, 15 bp, Homo sapiens
agtcagtgccctctt

SEQ ID NO: 594720 - DNA, 15 bp, Homo sapiens
gtcagtgccctctta

SEQ ID NO: 594721 - DNA, 15 bp, Homo sapiens
tcagtgccctcttag

SEQ ID NO: 594722 - DNA, 15 bp, Homo sapiens
cagtgccctcttagc

SEQ ID NO: 594723 - DNA, 15 bp, Homo sapiens
agtgccctcttagca

SEQ ID NO: 594724 - DNA, 15 bp, Homo sapiens
gtgccctcttagcat

SEQ ID NO: 594725 - DNA, 15 bp, Homo sapiens
tgccctcttagcatt

SEQ ID NO: 594726 - DNA, 15 bp, Homo sapiens
gccctcttagcattc

SEQ ID NO: 594727 - DNA, 15 bp, Homo sapiens
ccctcttagcattct

SEQ ID NO: 594728 - DNA, 15 bp, Homo sapiens
cctcttagcattctc

SEQ ID NO: 594729 - DNA, 15 bp, Homo sapiens
ctcttagcattctct

SEQ ID NO: 594730 - DNA, 15 bp, Homo sapiens
tcttagcattctctt

SEQ ID NO: 594731 - DNA, 15 bp, Homo sapiens
cttagcattctcttt

SEQ ID NO: 594732 - DNA, 15 bp, Homo sapiens
ttagcattctctttc

SEQ ID NO: 594733 - DNA, 15 bp, Homo sapiens
tagcattctctttcc

SEQ ID NO: 594734 - DNA, 15 bp, Homo sapiens
agcattctctttcca

SEQ ID NO: 594735 - DNA, 15 bp, Homo sapiens
gcattctctttccac

SEQ ID NO: 594736 - DNA, 15 bp, Homo sapiens
cattctctttccact

SEQ ID NO: 594737 - DNA, 15 bp, Homo sapiens
attctctttccactt

SEQ ID NO: 594738 - DNA, 15 bp, Homo sapiens
ttctctttccacttg

SEQ ID NO: 594739 - DNA, 15 bp, Homo sapiens
tctctttccacttgt

SEQ ID NO: 594740 - DNA, 15 bp, Homo sapiens
ctctttccacttgtt

SEQ ID NO: 594741 - DNA, 15 bp, Homo sapiens
tctttccacttgttg

SEQ ID NO: 594742 - DNA, 15 bp, Homo sapiens
ctttccacttgttgg

SEQ ID NO: 594743 - DNA, 15 bp, Homo sapiens
tttccacttgttggg

SEQ ID NO: 594744 - DNA, 15 bp, Homo sapiens
ttccacttgttgggt

SEQ ID NO: 594745 - DNA, 15 bp, Homo sapiens
tccacttgttgggtg

SEQ ID NO: 594746 - DNA, 15 bp, Homo sapiens
ccacttgttgggtgt

SEQ ID NO: 594747 - DNA, 15 bp, Homo sapiens
cacttgttgggtgta

SEQ ID NO: 594748 - DNA, 15 bp, Homo sapiens
acttgttgggtgtaa

SEQ ID NO: 594749 - DNA, 15 bp, Homo sapiens
cttgttgggtgtaag

SEQ ID NO: 594750 - DNA, 15 bp, Homo sapiens
ttgttgggtgtaaga

SEQ ID NO: 594751 - DNA, 15 bp, Homo sapiens
tgttgggtgtaagaa

SEQ ID NO: 594752 - DNA, 15 bp, Homo sapiens
gttgggtgtaagaag

SEQ ID NO: 594753 - DNA, 15 bp, Homo sapiens
ttgggtgtaagaagg

SEQ ID NO: 594754 - DNA, 15 bp, Homo sapiens
tgggtgtaagaaggg

SEQ ID NO: 594755 - DNA, 15 bp, Homo sapiens
gggtgtaagaaggga

SEQ ID NO: 594756 - DNA, 15 bp, Homo sapiens
ggtgtaagaagggaa

SEQ ID NO: 594757 - DNA, 15 bp, Homo sapiens
gtgtaagaagggaac

SEQ ID NO: 594758 - DNA, 15 bp, Homo sapiens
tgtaagaagggaacc

SEQ ID NO: 594759 - DNA, 15 bp, Homo sapiens
gtaagaagggaacct

SEQ ID NO: 594760 - DNA, 15 bp, Homo sapiens
taagaagggaacctg

SEQ ID NO: 594761 - DNA, 15 bp, Homo sapiens
aagaagggaacctga

SEQ ID NO: 594762 - DNA, 15 bp, Homo sapiens
agaagggaacctgag

SEQ ID NO: 594763 - DNA, 15 bp, Homo sapiens
gaagggaacctgagg

SEQ ID NO: 594764 - DNA, 15 bp, Homo sapiens
aagggaacctgaggg

SEQ ID NO: 594765 - DNA, 15 bp, Homo sapiens
agggaacctgagggc

SEQ ID NO: 594766 - DNA, 15 bp, Homo sapiens
gggaacctgagggcc

SEQ ID NO: 594767 - DNA, 15 bp, Homo sapiens
ggaacctgagggccc

SEQ ID NO: 594768 - DNA, 15 bp, Homo sapiens
gaacctgagggccct

SEQ ID NO: 594769 - DNA, 15 bp, Homo sapiens
aacctgagggccctg

SEQ ID NO: 594770 - DNA, 15 bp, Homo sapiens
acctgagggccctgc

SEQ ID NO: 594771 - DNA, 15 bp, Homo sapiens
cctgagggccctgca

SEQ ID NO: 594772 - DNA, 15 bp, Homo sapiens
ctgagggccctgcag

SEQ ID NO: 594773 - DNA, 15 bp, Homo sapiens
tgagggccctgcagt

SEQ ID NO: 594774 - DNA, 15 bp, Homo sapiens
gagggccctgcagtg

SEQ ID NO: 594775 - DNA, 15 bp, Homo sapiens
agggccctgcagtgt

SEQ ID NO: 594776 - DNA, 15 bp, Homo sapiens
gggccctgcagtgtt

SEQ ID NO: 594777 - DNA, 15 bp, Homo sapiens
ggccctgcagtgttt

SEQ ID NO: 594778 - DNA, 15 bp, Homo sapiens
gccctgcagtgttta

SEQ ID NO: 594779 - DNA, 15 bp, Homo sapiens
ccctgcagtgtttag

SEQ ID NO: 594780 - DNA, 15 bp, Homo sapiens
cctgcagtgtttagg

SEQ ID NO: 594781 - DNA, 15 bp, Homo sapiens
ctgcagtgtttaggg

SEQ ID NO: 594782 - DNA, 15 bp, Homo sapiens
tgcagtgtttagggg

SEQ ID NO: 594783 - DNA, 15 bp, Homo sapiens
gcagtgtttaggggt

SEQ ID NO: 594784 - DNA, 15 bp, Homo sapiens
cagtgtttaggggtg

SEQ ID NO: 594785 - DNA, 15 bp, Homo sapiens
agtgtttaggggtgg

SEQ ID NO: 594786 - DNA, 15 bp, Homo sapiens
gtgtttaggggtggg

SEQ ID NO: 594787 - DNA, 15 bp, Homo sapiens
tgtttaggggtggga

SEQ ID NO: 594788 - DNA, 15 bp, Homo sapiens
gtttaggggtgggag

SEQ ID NO: 594789 - DNA, 15 bp, Homo sapiens
tttaggggtgggagt

SEQ ID NO: 594790 - DNA, 15 bp, Homo sapiens
ttaggggtgggagtg

SEQ ID NO: 594791 - DNA, 15 bp, Homo sapiens
taggggtgggagtgg

SEQ ID NO: 594792 - DNA, 15 bp, Homo sapiens
aggggtgggagtgga

SEQ ID NO: 594793 - DNA, 15 bp, Homo sapiens
ggggtgggagtggaa

SEQ ID NO: 594794 - DNA, 15 bp, Homo sapiens
gggtgggagtggaaa

SEQ ID NO: 594795 - DNA, 15 bp, Homo sapiens
ggtgggagtggaaac

SEQ ID NO: 594796 - DNA, 15 bp, Homo sapiens
gtgggagtggaaaca

SEQ ID NO: 594797 - DNA, 15 bp, Homo sapiens
tgggagtggaaacag

SEQ ID NO: 594798 - DNA, 15 bp, Homo sapiens
gggagtggaaacaga

SEQ ID NO: 594799 - DNA, 15 bp, Homo sapiens
ggagtggaaacagac

SEQ ID NO: 594800 - DNA, 15 bp, Homo sapiens
gagtggaaacagaca

SEQ ID NO: 594801 - DNA, 15 bp, Homo sapiens
agtggaaacagacag

SEQ ID NO: 594802 - DNA, 15 bp, Homo sapiens
gtggaaacagacagg

SEQ ID NO: 594803 - DNA, 15 bp, Homo sapiens
tggaaacagacagga

SEQ ID NO: 594804 - DNA, 15 bp, Homo sapiens
ggaaacagacaggaa

SEQ ID NO: 594805 - DNA, 15 bp, Homo sapiens
gaaacagacaggaaa

SEQ ID NO: 594806 - DNA, 15 bp, Homo sapiens
aaacagacaggaaag

SEQ ID NO: 594807 - DNA, 15 bp, Homo sapiens
aacagacaggaaaga

SEQ ID NO: 594808 - DNA, 15 bp, Homo sapiens
acagacaggaaagat

SEQ ID NO: 594809 - DNA, 15 bp, Homo sapiens
cagacaggaaagatc

SEQ ID NO: 594810 - DNA, 15 bp, Homo sapiens
agacaggaaagatcc

SEQ ID NO: 594811 - DNA, 15 bp, Homo sapiens
gacaggaaagatcca

SEQ ID NO: 594812 - DNA, 15 bp, Homo sapiens
acaggaaagatccag

SEQ ID NO: 594813 - DNA, 15 bp, Homo sapiens
caggaaagatccaga

SEQ ID NO: 594814 - DNA, 15 bp, Homo sapiens
aggaaagatccagag

SEQ ID NO: 594815 - DNA, 15 bp, Homo sapiens
ggaaagatccagagt

SEQ ID NO: 594816 - DNA, 15 bp, Homo sapiens
gaaagatccagagtc

SEQ ID NO: 594817 - DNA, 15 bp, Homo sapiens
aaagatccagagtcc

SEQ ID NO: 594818 - DNA, 15 bp, Homo sapiens
aagatccagagtccc

SEQ ID NO: 594819 - DNA, 15 bp, Homo sapiens
agatccagagtcccc

SEQ ID NO: 594820 - DNA, 15 bp, Homo sapiens
gatccagagtcccca

SEQ ID NO: 594821 - DNA, 15 bp, Homo sapiens
atccagagtccccaa

SEQ ID NO: 594822 - DNA, 15 bp, Homo sapiens
tccagagtccccaag

SEQ ID NO: 594823 - DNA, 15 bp, Homo sapiens
ccagagtccccaaga

SEQ ID NO: 594824 - DNA, 15 bp, Homo sapiens
cagagtccccaagaa

SEQ ID NO: 594825 - DNA, 15 bp, Homo sapiens
agagtccccaagaag

SEQ ID NO: 594826 - DNA, 15 bp, Homo sapiens
gagtccccaagaagc

SEQ ID NO: 594827 - DNA, 15 bp, Homo sapiens
agtccccaagaagcg

SEQ ID NO: 594828 - DNA, 15 bp, Homo sapiens
gtccccaagaagcga

SEQ ID NO: 594829 - DNA, 15 bp, Homo sapiens
tccccaagaagcgaa

SEQ ID NO: 594830 - DNA, 15 bp, Homo sapiens
ccccaagaagcgaag

SEQ ID NO: 594831 - DNA, 15 bp, Homo sapiens
cccaagaagcgaagc

SEQ ID NO: 594832 - DNA, 15 bp, Homo sapiens
ccaagaagcgaagca

SEQ ID NO: 594833 - DNA, 15 bp, Homo sapiens
caagaagcgaagcag

SEQ ID NO: 594834 - DNA, 15 bp, Homo sapiens
aagaagcgaagcagg

SEQ ID NO: 594835 - DNA, 15 bp, Homo sapiens
agaagcgaagcaggg

SEQ ID NO: 594836 - DNA, 15 bp, Homo sapiens
gaagcgaagcaggga

SEQ ID NO: 594837 - DNA, 15 bp, Homo sapiens
aagcgaagcagggag

SEQ ID NO: 594838 - DNA, 15 bp, Homo sapiens
agcgaagcagggaga

SEQ ID NO: 594839 - DNA, 15 bp, Homo sapiens
gcgaagcagggagag

SEQ ID NO: 594840 - DNA, 15 bp, Homo sapiens
cgaagcagggagaga

SEQ ID NO: 594841 - DNA, 15 bp, Homo sapiens
gaagcagggagagag

SEQ ID NO: 594842 - DNA, 15 bp, Homo sapiens
aagcagggagagaga

SEQ ID NO: 594843 - DNA, 15 bp, Homo sapiens
agcagggagagagat

SEQ ID NO: 594844 - DNA, 15 bp, Homo sapiens
gcagggagagagata

SEQ ID NO: 594845 - DNA, 15 bp, Homo sapiens
cagggagagagataa

SEQ ID NO: 594846 - DNA, 15 bp, Homo sapiens
agggagagagataaa

SEQ ID NO: 594847 - DNA, 15 bp, Homo sapiens
gggagagagataaag

SEQ ID NO: 594848 - DNA, 15 bp, Homo sapiens
ggagagagataaaga

SEQ ID NO: 594849 - DNA, 15 bp, Homo sapiens
gagagagataaagaa

SEQ ID NO: 594850 - DNA, 15 bp, Homo sapiens
agagagataaagaag

SEQ ID NO: 594851 - DNA, 15 bp, Homo sapiens
gagagataaagaagg

SEQ ID NO: 594852 - DNA, 15 bp, Homo sapiens
agagataaagaaggc

SEQ ID NO: 594853 - DNA, 15 bp, Homo sapiens
gagataaagaaggca

SEQ ID NO: 594854 - DNA, 15 bp, Homo sapiens
agataaagaaggcag

SEQ ID NO: 594855 - DNA, 15 bp, Homo sapiens
gataaagaaggcagg

SEQ ID NO: 594856 - DNA, 15 bp, Homo sapiens
ataaagaaggcagga

SEQ ID NO: 594857 - DNA, 15 bp, Homo sapiens
taaagaaggcaggaa

SEQ ID NO: 594858 - DNA, 15 bp, Homo sapiens
aaagaaggcaggaac

SEQ ID NO: 594859 - DNA, 15 bp, Homo sapiens
aagaaggcaggaaca

SEQ ID NO: 594860 - DNA, 15 bp, Homo sapiens
agaaggcaggaacaa

SEQ ID NO: 594861 - DNA, 15 bp, Homo sapiens
gaaggcaggaacaac

SEQ ID NO: 594862 - DNA, 15 bp, Homo sapiens
aaggcaggaacaacc

SEQ ID NO: 594863 - DNA, 15 bp, Homo sapiens
aggcaggaacaacca

SEQ ID NO: 594864 - DNA, 15 bp, Homo sapiens
ggcaggaacaaccat

SEQ ID NO: 594865 - DNA, 15 bp, Homo sapiens
gcaggaacaaccatg

SEQ ID NO: 594866 - DNA, 15 bp, Homo sapiens
caggaacaaccatgg

SEQ ID NO: 594867 - DNA, 15 bp, Homo sapiens
aggaacaaccatgga

SEQ ID NO: 594868 - DNA, 15 bp, Homo sapiens
ggaacaaccatggac

SEQ ID NO: 594869 - DNA, 15 bp, Homo sapiens
gaacaaccatggaca

SEQ ID NO: 594870 - DNA, 15 bp, Homo sapiens
aacaaccatggacac

SEQ ID NO: 594871 - DNA, 15 bp, Homo sapiens
acaaccatggacaca

SEQ ID NO: 594872 - DNA, 15 bp, Homo sapiens
caaccatggacacac

SEQ ID NO: 594873 - DNA, 15 bp, Homo sapiens
aaccatggacacaca

SEQ ID NO: 594874 - DNA, 15 bp, Homo sapiens
accatggacacacat

SEQ ID NO: 594875 - DNA, 15 bp, Homo sapiens
ccatggacacacatt

SEQ ID NO: 594876 - DNA, 15 bp, Homo sapiens
catggacacacatta

SEQ ID NO: 594877 - DNA, 15 bp, Homo sapiens
atggacacacattat

SEQ ID NO: 594878 - DNA, 15 bp, Homo sapiens
tggacacacattatc

SEQ ID NO: 594879 - DNA, 15 bp, Homo sapiens
ggacacacattatca

SEQ ID NO: 594880 - DNA, 15 bp, Homo sapiens
gacacacattatcac

SEQ ID NO: 594881 - DNA, 15 bp, Homo sapiens
acacacattatcaca

SEQ ID NO: 594882 - DNA, 15 bp, Homo sapiens
cacacattatcacac

SEQ ID NO: 594883 - DNA, 15 bp, Homo sapiens
acacattatcacaca

SEQ ID NO: 594884 - DNA, 15 bp, Homo sapiens
cacattatcacacat

SEQ ID NO: 594885 - DNA, 15 bp, Homo sapiens
acattatcacacata

SEQ ID NO: 594886 - DNA, 15 bp, Homo sapiens
cattatcacacatac

SEQ ID NO: 594887 - DNA, 15 bp, Homo sapiens
attatcacacataca

SEQ ID NO: 594888 - DNA, 15 bp, Homo sapiens
ttatcacacatacac

SEQ ID NO: 594889 - DNA, 15 bp, Homo sapiens
tatcacacatacaca

SEQ ID NO: 594890 - DNA, 15 bp, Homo sapiens
atcacacatacacag

SEQ ID NO: 594891 - DNA, 15 bp, Homo sapiens
tcacacatacacagg

SEQ ID NO: 594892 - DNA, 15 bp, Homo sapiens
cacacatacacaggt

SEQ ID NO: 594893 - DNA, 15 bp, Homo sapiens
acacatacacaggtt

SEQ ID NO: 594894 - DNA, 15 bp, Homo sapiens
cacatacacaggtta

SEQ ID NO: 594895 - DNA, 15 bp, Homo sapiens
acatacacaggttac

SEQ ID NO: 594896 - DNA, 15 bp, Homo sapiens
catacacaggttaca

SEQ ID NO: 594897 - DNA, 15 bp, Homo sapiens
atacacaggttacaa

SEQ ID NO: 594898 - DNA, 15 bp, Homo sapiens
tacacaggttacaag

SEQ ID NO: 594899 - DNA, 15 bp, Homo sapiens
acacaggttacaaga

SEQ ID NO: 594900 - DNA, 15 bp, Homo sapiens
cacaggttacaagag

SEQ ID NO: 594901 - DNA, 15 bp, Homo sapiens
acaggttacaagagc

SEQ ID NO: 594902 - DNA, 15 bp, Homo sapiens
caggttacaagagca

SEQ ID NO: 594903 - DNA, 15 bp, Homo sapiens
aggttacaagagcag

SEQ ID NO: 594904 - DNA, 15 bp, Homo sapiens
ggttacaagagcagg

SEQ ID NO: 594905 - DNA, 15 bp, Homo sapiens
gttacaagagcagga

SEQ ID NO: 594906 - DNA, 15 bp, Homo sapiens
ttacaagagcaggag

SEQ ID NO: 594907 - DNA, 15 bp, Homo sapiens
tacaagagcaggagg

SEQ ID NO: 594908 - DNA, 15 bp, Homo sapiens
acaagagcaggaggc

SEQ ID NO: 594909 - DNA, 15 bp, Homo sapiens
caagagcaggaggct

SEQ ID NO: 594910 - DNA, 15 bp, Homo sapiens
aagagcaggaggctg

SEQ ID NO: 594911 - DNA, 15 bp, Homo sapiens
agagcaggaggctgg

SEQ ID NO: 594912 - DNA, 15 bp, Homo sapiens
gagcaggaggctgga

SEQ ID NO: 594913 - DNA, 15 bp, Homo sapiens
agcaggaggctggag

SEQ ID NO: 594914 - DNA, 15 bp, Homo sapiens
gcaggaggctggagc

SEQ ID NO: 594915 - DNA, 15 bp, Homo sapiens
caggaggctggagct

SEQ ID NO: 594916 - DNA, 15 bp, Homo sapiens
aggaggctggagctg

SEQ ID NO: 594917 - DNA, 15 bp, Homo sapiens
ggaggctggagctgc

SEQ ID NO: 594918 - DNA, 15 bp, Homo sapiens
gaggctggagctgca

SEQ ID NO: 594919 - DNA, 15 bp, Homo sapiens
aggctggagctgcaa

SEQ ID NO: 594920 - DNA, 15 bp, Homo sapiens
ggctggagctgcaag

SEQ ID NO: 594921 - DNA, 15 bp, Homo sapiens
gctggagctgcaaga

SEQ ID NO: 594922 - DNA, 15 bp, Homo sapiens
ctggagctgcaagag

SEQ ID NO: 594923 - DNA, 15 bp, Homo sapiens
tggagctgcaagagg

SEQ ID NO: 594924 - DNA, 15 bp, Homo sapiens
ggagctgcaagaggt

SEQ ID NO: 594925 - DNA, 15 bp, Homo sapiens
gagctgcaagaggtg

SEQ ID NO: 594926 - DNA, 15 bp, Homo sapiens
agctgcaagaggtgg

SEQ ID NO: 594927 - DNA, 15 bp, Homo sapiens
gctgcaagaggtggc

SEQ ID NO: 594928 - DNA, 15 bp, Homo sapiens
ctgcaagaggtggca

SEQ ID NO: 594929 - DNA, 15 bp, Homo sapiens
tgcaagaggtggcag

SEQ ID NO: 594930 - DNA, 15 bp, Homo sapiens
gcaagaggtggcagg

SEQ ID NO: 594931 - DNA, 15 bp, Homo sapiens
caagaggtggcaggg

SEQ ID NO: 594932 - DNA, 15 bp, Homo sapiens
aagaggtggcaggga

SEQ ID NO: 594933 - DNA, 15 bp, Homo sapiens
agaggtggcagggaa

SEQ ID NO: 594934 - DNA, 15 bp, Homo sapiens
gaggtggcagggaag

SEQ ID NO: 594935 - DNA, 15 bp, Homo sapiens
aggtggcagggaagc

SEQ ID NO: 594936 - DNA, 15 bp, Homo sapiens
ggtggcagggaagct

SEQ ID NO: 594937 - DNA, 15 bp, Homo sapiens
gtggcagggaagctt

SEQ ID NO: 594938 - DNA, 15 bp, Homo sapiens
tggcagggaagcttc

SEQ ID NO: 594939 - DNA, 15 bp, Homo sapiens
ggcagggaagcttcc

SEQ ID NO: 594940 - DNA, 15 bp, Homo sapiens
gcagggaagcttcca

SEQ ID NO: 594941 - DNA, 15 bp, Homo sapiens
cagggaagcttccag

SEQ ID NO: 594942 - DNA, 15 bp, Homo sapiens
agggaagcttccaga

SEQ ID NO: 594943 - DNA, 15 bp, Homo sapiens
gggaagcttccagaa

SEQ ID NO: 594944 - DNA, 15 bp, Homo sapiens
ggaagcttccagaaa

SEQ ID NO: 594945 - DNA, 15 bp, Homo sapiens
gaagcttccagaaag

SEQ ID NO: 594946 - DNA, 15 bp, Homo sapiens
aagcttccagaaagg

SEQ ID NO: 594947 - DNA, 15 bp, Homo sapiens
agcttccagaaaggc

SEQ ID NO: 594948 - DNA, 15 bp, Homo sapiens
gcttccagaaaggca

SEQ ID NO: 594949 - DNA, 15 bp, Homo sapiens
cttccagaaaggcag

SEQ ID NO: 594950 - DNA, 15 bp, Homo sapiens
ttccagaaaggcaga

SEQ ID NO: 594951 - DNA, 15 bp, Homo sapiens
tccagaaaggcagac

SEQ ID NO: 594952 - DNA, 15 bp, Homo sapiens
ccagaaaggcagacc

SEQ ID NO: 594953 - DNA, 15 bp, Homo sapiens
cagaaaggcagaccc

SEQ ID NO: 594954 - DNA, 15 bp, Homo sapiens
agaaaggcagacccc

SEQ ID NO: 594955 - DNA, 15 bp, Homo sapiens
gaaaggcagacccca

SEQ ID NO: 594956 - DNA, 15 bp, Homo sapiens
aaaggcagaccccag

SEQ ID NO: 594957 - DNA, 15 bp, Homo sapiens
aaggcagaccccagc

SEQ ID NO: 594958 - DNA, 15 bp, Homo sapiens
aggcagaccccagcc

SEQ ID NO: 594959 - DNA, 15 bp, Homo sapiens
ggcagaccccagcct

SEQ ID NO: 594960 - DNA, 15 bp, Homo sapiens
gcagaccccagcctc

SEQ ID NO: 594961 - DNA, 15 bp, Homo sapiens
cagaccccagcctca

SEQ ID NO: 594962 - DNA, 15 bp, Homo sapiens
agaccccagcctcat

SEQ ID NO: 594963 - DNA, 15 bp, Homo sapiens
gaccccagcctcatc

SEQ ID NO: 594964 - DNA, 15 bp, Homo sapiens
accccagcctcatcc

SEQ ID NO: 594965 - DNA, 15 bp, Homo sapiens
ccccagcctcatccc

SEQ ID NO: 594966 - DNA, 15 bp, Homo sapiens
cccagcctcatccct

SEQ ID NO: 594967 - DNA, 15 bp, Homo sapiens
ccagcctcatccctc

SEQ ID NO: 594968 - DNA, 15 bp, Homo sapiens
cagcctcatccctcc

SEQ ID NO: 594969 - DNA, 15 bp, Homo sapiens
agcctcatccctccc

SEQ ID NO: 594970 - DNA, 15 bp, Homo sapiens
gcctcatccctccct

SEQ ID NO: 594971 - DNA, 15 bp, Homo sapiens
cctcatccctccctg

SEQ ID NO: 594972 - DNA, 15 bp, Homo sapiens
ctcatccctccctgc

SEQ ID NO: 594973 - DNA, 15 bp, Homo sapiens
tcatccctccctgcc

SEQ ID NO: 594974 - DNA, 15 bp, Homo sapiens
catccctccctgccc

SEQ ID NO: 594975 - DNA, 15 bp, Homo sapiens
atccctccctgccct

SEQ ID NO: 594976 - DNA, 15 bp, Homo sapiens
tccctccctgccctg

SEQ ID NO: 594977 - DNA, 15 bp, Homo sapiens
ccctccctgccctgc

SEQ ID NO: 594978 - DNA, 15 bp, Homo sapiens
cctccctgccctgca

SEQ ID NO: 594979 - DNA, 15 bp, Homo sapiens
ctccctgccctgcaa

SEQ ID NO: 594980 - DNA, 15 bp, Homo sapiens
tccctgccctgcaat

SEQ ID NO: 594981 - DNA, 15 bp, Homo sapiens
ccctgccctgcaatg

SEQ ID NO: 594982 - DNA, 15 bp, Homo sapiens
cctgccctgcaatgc

SEQ ID NO: 594983 - DNA, 15 bp, Homo sapiens
ctgccctgcaatgct

SEQ ID NO: 594984 - DNA, 15 bp, Homo sapiens
tgccctgcaatgctg

SEQ ID NO: 594985 - DNA, 15 bp, Homo sapiens
gccctgcaatgctga

SEQ ID NO: 594986 - DNA, 15 bp, Homo sapiens
ccctgcaatgctgaa

SEQ ID NO: 594987 - DNA, 15 bp, Homo sapiens
cctgcaatgctgaag

SEQ ID NO: 594988 - DNA, 15 bp, Homo sapiens
ctgcaatgctgaagt

SEQ ID NO: 594989 - DNA, 15 bp, Homo sapiens
tgcaatgctgaagtt

SEQ ID NO: 594990 - DNA, 15 bp, Homo sapiens
gcaatgctgaagttt

SEQ ID NO: 594991 - DNA, 15 bp, Homo sapiens
caatgctgaagtttc

SEQ ID NO: 594992 - DNA, 15 bp, Homo sapiens
aatgctgaagtttcc

SEQ ID NO: 594993 - DNA, 15 bp, Homo sapiens
atgctgaagtttcca

SEQ ID NO: 594994 - DNA, 15 bp, Homo sapiens
tgctgaagtttccag

SEQ ID NO: 594995 - DNA, 15 bp, Homo sapiens
gctgaagtttccagg

SEQ ID NO: 594996 - DNA, 15 bp, Homo sapiens
ctgaagtttccaggt

SEQ ID NO: 594997 - DNA, 15 bp, Homo sapiens
tgaagtttccaggta

SEQ ID NO: 594998 - DNA, 15 bp, Homo sapiens
gaagtttccaggtag

SEQ ID NO: 594999 - DNA, 15 bp, Homo sapiens
aagtttccaggtaga

SEQ ID NO: 595000 - DNA, 15 bp, Homo sapiens
agtttccaggtagag

SEQ ID NO: 595001 - DNA, 15 bp, Homo sapiens
gtttccaggtagagg

SEQ ID NO: 595002 - DNA, 15 bp, Homo sapiens
tttccaggtagaggg

SEQ ID NO: 595003 - DNA, 15 bp, Homo sapiens
ttccaggtagagggg

SEQ ID NO: 595004 - DNA, 15 bp, Homo sapiens
tccaggtagagggga

SEQ ID NO: 595005 - DNA, 15 bp, Homo sapiens
ccaggtagaggggaa

SEQ ID NO: 595006 - DNA, 15 bp, Homo sapiens
caggtagaggggaac

SEQ ID NO: 595007 - DNA, 15 bp, Homo sapiens
aggtagaggggaacc

SEQ ID NO: 595008 - DNA, 15 bp, Homo sapiens
ggtagaggggaacct

SEQ ID NO: 595009 - DNA, 15 bp, Homo sapiens
gtagaggggaacctc

SEQ ID NO: 595010 - DNA, 15 bp, Homo sapiens
tagaggggaacctct

SEQ ID NO: 595011 - DNA, 15 bp, Homo sapiens
agaggggaacctcta

SEQ ID NO: 595012 - DNA, 15 bp, Homo sapiens
gaggggaacctctag

SEQ ID NO: 595013 - DNA, 15 bp, Homo sapiens
aggggaacctctaga

SEQ ID NO: 595014 - DNA, 15 bp, Homo sapiens
ggggaacctctagac

SEQ ID NO: 595015 - DNA, 15 bp, Homo sapiens
gggaacctctagacc

SEQ ID NO: 595016 - DNA, 15 bp, Homo sapiens
ggaacctctagaccc

SEQ ID NO: 595017 - DNA, 15 bp, Homo sapiens
gaacctctagaccct

SEQ ID NO: 595018 - DNA, 15 bp, Homo sapiens
aacctctagaccctt

SEQ ID NO: 595019 - DNA, 15 bp, Homo sapiens
acctctagacccttg

SEQ ID NO: 595020 - DNA, 15 bp, Homo sapiens
cctctagacccttgc

SEQ ID NO: 595021 - DNA, 15 bp, Homo sapiens
ctctagacccttgcg

SEQ ID NO: 595022 - DNA, 15 bp, Homo sapiens
tctagacccttgcga

SEQ ID NO: 595023 - DNA, 15 bp, Homo sapiens
ctagacccttgcgac

SEQ ID NO: 595024 - DNA, 15 bp, Homo sapiens
tagacccttgcgact

SEQ ID NO: 595025 - DNA, 15 bp, Homo sapiens
agacccttgcgactg

SEQ ID NO: 595026 - DNA, 15 bp, Homo sapiens
gacccttgcgactgt

SEQ ID NO: 595027 - DNA, 15 bp, Homo sapiens
acccttgcgactgtc

SEQ ID NO: 595028 - DNA, 15 bp, Homo sapiens
cccttgcgactgtca

SEQ ID NO: 595029 - DNA, 15 bp, Homo sapiens
ccttgcgactgtcag

SEQ ID NO: 595030 - DNA, 15 bp, Homo sapiens
cttgcgactgtcaga

SEQ ID NO: 595031 - DNA, 15 bp, Homo sapiens
ttgcgactgtcagag

SEQ ID NO: 595032 - DNA, 15 bp, Homo sapiens
tgcgactgtcagagt

SEQ ID NO: 595033 - DNA, 15 bp, Homo sapiens
gcgactgtcagagtt

SEQ ID NO: 595034 - DNA, 15 bp, Homo sapiens
cgactgtcagagttc

SEQ ID NO: 595035 - DNA, 15 bp, Homo sapiens
gactgtcagagttct

SEQ ID NO: 595036 - DNA, 15 bp, Homo sapiens
actgtcagagttctg

SEQ ID NO: 595037 - DNA, 15 bp, Homo sapiens
ctgtcagagttctgt

SEQ ID NO: 595038 - DNA, 15 bp, Homo sapiens
tgtcagagttctgtg

SEQ ID NO: 595039 - DNA, 15 bp, Homo sapiens
gtcagagttctgtgg

SEQ ID NO: 595040 - DNA, 15 bp, Homo sapiens
tcagagttctgtgga

SEQ ID NO: 595041 - DNA, 15 bp, Homo sapiens
cagagttctgtggat

SEQ ID NO: 595042 - DNA, 15 bp, Homo sapiens
agagttctgtggatc

SEQ ID NO: 595043 - DNA, 15 bp, Homo sapiens
gagttctgtggatcc

SEQ ID NO: 595044 - DNA, 15 bp, Homo sapiens
agttctgtggatcca

SEQ ID NO: 595045 - DNA, 15 bp, Homo sapiens
gttctgtggatccat

SEQ ID NO: 595046 - DNA, 15 bp, Homo sapiens
ttctgtggatccatt

SEQ ID NO: 595047 - DNA, 15 bp, Homo sapiens
tctgtggatccattt

SEQ ID NO: 595048 - DNA, 15 bp, Homo sapiens
ctgtggatccatttg

SEQ ID NO: 595049 - DNA, 15 bp, Homo sapiens
tgtggatccatttgt

SEQ ID NO: 595050 - DNA, 15 bp, Homo sapiens
gtggatccatttgtc

SEQ ID NO: 595051 - DNA, 15 bp, Homo sapiens
tggatccatttgtca

SEQ ID NO: 595052 - DNA, 15 bp, Homo sapiens
ggatccatttgtcag

SEQ ID NO: 595053 - DNA, 15 bp, Homo sapiens
gatccatttgtcagt

SEQ ID NO: 595054 - DNA, 15 bp, Homo sapiens
atccatttgtcagtc

SEQ ID NO: 595055 - DNA, 15 bp, Homo sapiens
tccatttgtcagtct

SEQ ID NO: 595056 - DNA, 15 bp, Homo sapiens
ccatttgtcagtctc

SEQ ID NO: 595057 - DNA, 15 bp, Homo sapiens
catttgtcagtctcc

SEQ ID NO: 595058 - DNA, 15 bp, Homo sapiens
atttgtcagtctccc

SEQ ID NO: 595059 - DNA, 15 bp, Homo sapiens
tttgtcagtctcccc

SEQ ID NO: 595060 - DNA, 15 bp, Homo sapiens
ttgtcagtctcccca

SEQ ID NO: 595061 - DNA, 15 bp, Homo sapiens
tgtcagtctccccac

SEQ ID NO: 595062 - DNA, 15 bp, Homo sapiens
gtcagtctccccacc

SEQ ID NO: 595063 - DNA, 15 bp, Homo sapiens
tcagtctccccaccc

SEQ ID NO: 595064 - DNA, 15 bp, Homo sapiens
cagtctccccacccc

SEQ ID NO: 595065 - DNA, 15 bp, Homo sapiens
agtctccccaccccc

SEQ ID NO: 595066 - DNA, 15 bp, Homo sapiens
gtctccccaccccca

SEQ ID NO: 595067 - DNA, 15 bp, Homo sapiens
tctccccacccccaa

SEQ ID NO: 595068 - DNA, 15 bp, Homo sapiens
ctccccacccccaac

SEQ ID NO: 595069 - DNA, 15 bp, Homo sapiens
tccccacccccaacc

SEQ ID NO: 595070 - DNA, 15 bp, Homo sapiens
ccccacccccaacct

SEQ ID NO: 595071 - DNA, 15 bp, Homo sapiens
cccacccccaacctt

SEQ ID NO: 595072 - DNA, 15 bp, Homo sapiens
ccacccccaaccttg

SEQ ID NO: 595073 - DNA, 15 bp, Homo sapiens
cacccccaaccttga

SEQ ID NO: 595074 - DNA, 15 bp, Homo sapiens
acccccaaccttgac

SEQ ID NO: 595075 - DNA, 15 bp, Homo sapiens
cccccaaccttgact

SEQ ID NO: 595076 - DNA, 15 bp, Homo sapiens
ccccaaccttgacta

SEQ ID NO: 595077 - DNA, 15 bp, Homo sapiens
cccaaccttgactat

SEQ ID NO: 595078 - DNA, 15 bp, Homo sapiens
ccaaccttgactatc

SEQ ID NO: 595079 - DNA, 15 bp, Homo sapiens
caaccttgactatcc

SEQ ID NO: 595080 - DNA, 15 bp, Homo sapiens
aaccttgactatcct

SEQ ID NO: 595081 - DNA, 15 bp, Homo sapiens
accttgactatcctg

SEQ ID NO: 595082 - DNA, 15 bp, Homo sapiens
ccttgactatcctgg

SEQ ID NO: 595083 - DNA, 15 bp, Homo sapiens
cttgactatcctggg

SEQ ID NO: 595084 - DNA, 15 bp, Homo sapiens
ttgactatcctgggc

SEQ ID NO: 595085 - DNA, 15 bp, Homo sapiens
tgactatcctgggcc

SEQ ID NO: 595086 - DNA, 15 bp, Homo sapiens
gactatcctgggcct

SEQ ID NO: 595087 - DNA, 15 bp, Homo sapiens
actatcctgggcctg

SEQ ID NO: 595088 - DNA, 15 bp, Homo sapiens
ctatcctgggcctgc

SEQ ID NO: 595089 - DNA, 15 bp, Homo sapiens
tatcctgggcctgcc

SEQ ID NO: 595090 - DNA, 15 bp, Homo sapiens
atcctgggcctgcct

SEQ ID NO: 595091 - DNA, 15 bp, Homo sapiens
tcctgggcctgcctt

SEQ ID NO: 595092 - DNA, 15 bp, Homo sapiens
cctgggcctgccttc

SEQ ID NO: 595093 - DNA, 15 bp, Homo sapiens
ctgggcctgccttca

SEQ ID NO: 595094 - DNA, 15 bp, Homo sapiens
tgggcctgccttcag

SEQ ID NO: 595095 - DNA, 15 bp, Homo sapiens
gggcctgccttcagg

SEQ ID NO: 595096 - DNA, 15 bp, Homo sapiens
ggcctgccttcagga

SEQ ID NO: 595097 - DNA, 15 bp, Homo sapiens
gcctgccttcaggac

SEQ ID NO: 595098 - DNA, 15 bp, Homo sapiens
cctgccttcaggaca

SEQ ID NO: 595099 - DNA, 15 bp, Homo sapiens
ctgccttcaggacag

SEQ ID NO: 595100 - DNA, 15 bp, Homo sapiens
tgccttcaggacaga

SEQ ID NO: 595101 - DNA, 15 bp, Homo sapiens
gccttcaggacagaa

SEQ ID NO: 595102 - DNA, 15 bp, Homo sapiens
ccttcaggacagaac

SEQ ID NO: 595103 - DNA, 15 bp, Homo sapiens
cttcaggacagaaca

SEQ ID NO: 595104 - DNA, 15 bp, Homo sapiens
ttcaggacagaacat

SEQ ID NO: 595105 - DNA, 15 bp, Homo sapiens
tcaggacagaacatg

SEQ ID NO: 595106 - DNA, 15 bp, Homo sapiens
caggacagaacatgg

SEQ ID NO: 595107 - DNA, 15 bp, Homo sapiens
aggacagaacatggg

SEQ ID NO: 595108 - DNA, 15 bp, Homo sapiens
ggacagaacatggga

SEQ ID NO: 595109 - DNA, 15 bp, Homo sapiens
gacagaacatgggaa

SEQ ID NO: 595110 - DNA, 15 bp, Homo sapiens
acagaacatgggaat

SEQ ID NO: 595111 - DNA, 15 bp, Homo sapiens
cagaacatgggaatg

SEQ ID NO: 595112 - DNA, 15 bp, Homo sapiens
agaacatgggaatga

SEQ ID NO: 595113 - DNA, 15 bp, Homo sapiens
gaacatgggaatgag

SEQ ID NO: 595114 - DNA, 15 bp, Homo sapiens
aacatgggaatgaga

SEQ ID NO: 595115 - DNA, 15 bp, Homo sapiens
acatgggaatgagaa

SEQ ID NO: 595116 - DNA, 15 bp, Homo sapiens
catgggaatgagaag

SEQ ID NO: 595117 - DNA, 15 bp, Homo sapiens
atgggaatgagaaga

SEQ ID NO: 595118 - DNA, 15 bp, Homo sapiens
tgggaatgagaagag

SEQ ID NO: 595119 - DNA, 15 bp, Homo sapiens
gggaatgagaagagg

SEQ ID NO: 595120 - DNA, 15 bp, Homo sapiens
ggaatgagaagagga

SEQ ID NO: 595121 - DNA, 15 bp, Homo sapiens
gaatgagaagaggac

SEQ ID NO: 595122 - DNA, 15 bp, Homo sapiens
aatgagaagaggacc

SEQ ID NO: 595123 - DNA, 15 bp, Homo sapiens
atgagaagaggacct

SEQ ID NO: 595124 - DNA, 15 bp, Homo sapiens
tgagaagaggacctg

SEQ ID NO: 595125 - DNA, 15 bp, Homo sapiens
gagaagaggacctgg

SEQ ID NO: 595126 - DNA, 15 bp, Homo sapiens
agaagaggacctggg

SEQ ID NO: 595127 - DNA, 15 bp, Homo sapiens
gaagaggacctggga

SEQ ID NO: 595128 - DNA, 15 bp, Homo sapiens
aagaggacctgggaa

SEQ ID NO: 595129 - DNA, 15 bp, Homo sapiens
agaggacctgggaag

SEQ ID NO: 595130 - DNA, 15 bp, Homo sapiens
gaggacctgggaagg

SEQ ID NO: 595131 - DNA, 15 bp, Homo sapiens
aggacctgggaaggg

SEQ ID NO: 595132 - DNA, 15 bp, Homo sapiens
ggacctgggaagggg

SEQ ID NO: 595133 - DNA, 15 bp, Homo sapiens
gacctgggaaggggt

SEQ ID NO: 595134 - DNA, 15 bp, Homo sapiens
acctgggaaggggta

SEQ ID NO: 595135 - DNA, 15 bp, Homo sapiens
cctgggaaggggtaa

SEQ ID NO: 595136 - DNA, 15 bp, Homo sapiens
ctgggaaggggtaat

SEQ ID NO: 595137 - DNA, 15 bp, Homo sapiens
tgggaaggggtaatc

SEQ ID NO: 595138 - DNA, 15 bp, Homo sapiens
gggaaggggtaatcc

SEQ ID NO: 595139 - DNA, 15 bp, Homo sapiens
ggaaggggtaatcct

SEQ ID NO: 595140 - DNA, 15 bp, Homo sapiens
gaaggggtaatcctg

SEQ ID NO: 595141 - DNA, 15 bp, Homo sapiens
aaggggtaatcctgg

SEQ ID NO: 595142 - DNA, 15 bp, Homo sapiens
aggggtaatcctggg

SEQ ID NO: 595143 - DNA, 15 bp, Homo sapiens
ggggtaatcctggga

SEQ ID NO: 595144 - DNA, 15 bp, Homo sapiens
gggtaatcctgggaa

SEQ ID NO: 595145 - DNA, 15 bp, Homo sapiens
ggtaatcctgggaaa

SEQ ID NO: 595146 - DNA, 15 bp, Homo sapiens
gtaatcctgggaaaa

SEQ ID NO: 595147 - DNA, 15 bp, Homo sapiens
taatcctgggaaaaa

SEQ ID NO: 595148 - DNA, 15 bp, Homo sapiens
aatcctgggaaaaaa

SEQ ID NO: 595149 - DNA, 15 bp, Homo sapiens
atcctgggaaaaaaa

SEQ ID NO: 595150 - DNA, 15 bp, Homo sapiens
tcctgggaaaaaaaa

SEQ ID NO: 595151 - DNA, 15 bp, Homo sapiens
cctgggaaaaaaaag

SEQ ID NO: 595152 - DNA, 15 bp, Homo sapiens
ctgggaaaaaaaagt

SEQ ID NO: 595153 - DNA, 15 bp, Homo sapiens
tgggaaaaaaaagtt

SEQ ID NO: 595154 - DNA, 15 bp, Homo sapiens
gggaaaaaaaagttc

SEQ ID NO: 595155 - DNA, 15 bp, Homo sapiens
ggaaaaaaaagttct

SEQ ID NO: 595156 - DNA, 15 bp, Homo sapiens
gaaaaaaaagttctt

SEQ ID NO: 595157 - DNA, 15 bp, Homo sapiens
aaaaaaaagttctta

SEQ ID NO: 595158 - DNA, 15 bp, Homo sapiens
aaaaaaagttcttat

SEQ ID NO: 595159 - DNA, 15 bp, Homo sapiens
aaaaaagttcttatt

SEQ ID NO: 595160 - DNA, 15 bp, Homo sapiens
aaaaagttcttatta

SEQ ID NO: 595161 - DNA, 15 bp, Homo sapiens
aaaagttcttattag

SEQ ID NO: 595162 - DNA, 15 bp, Homo sapiens
aaagttcttattagt

SEQ ID NO: 595163 - DNA, 15 bp, Homo sapiens
aagttcttattagtc

SEQ ID NO: 595164 - DNA, 15 bp, Homo sapiens
agttcttattagtca

SEQ ID NO: 595165 - DNA, 15 bp, Homo sapiens
gttcttattagtcac

SEQ ID NO: 595166 - DNA, 15 bp, Homo sapiens
ttcttattagtcacc

SEQ ID NO: 595167 - DNA, 15 bp, Homo sapiens
tcttattagtcaccc

SEQ ID NO: 595168 - DNA, 15 bp, Homo sapiens
cttattagtcacccc

SEQ ID NO: 595169 - DNA, 15 bp, Homo sapiens
ttattagtcacccct

SEQ ID NO: 595170 - DNA, 15 bp, Homo sapiens
tattagtcacccctg

SEQ ID NO: 595171 - DNA, 15 bp, Homo sapiens
attagtcacccctgg

SEQ ID NO: 595172 - DNA, 15 bp, Homo sapiens
ttagtcacccctggc

SEQ ID NO: 595173 - DNA, 15 bp, Homo sapiens
tagtcacccctggct

SEQ ID NO: 595174 - DNA, 15 bp, Homo sapiens
agtcacccctggctc

SEQ ID NO: 595175 - DNA, 15 bp, Homo sapiens
gtcacccctggctct

SEQ ID NO: 595176 - DNA, 15 bp, Homo sapiens
tcacccctggctctg

SEQ ID NO: 595177 - DNA, 15 bp, Homo sapiens
cacccctggctctga

SEQ ID NO: 595178 - DNA, 15 bp, Homo sapiens
acccctggctctgag

SEQ ID NO: 595179 - DNA, 15 bp, Homo sapiens
cccctggctctgagg

SEQ ID NO: 595180 - DNA, 15 bp, Homo sapiens
ccctggctctgagga

SEQ ID NO: 595181 - DNA, 15 bp, Homo sapiens
cctggctctgaggat

SEQ ID NO: 595182 - DNA, 15 bp, Homo sapiens
ctggctctgaggata

SEQ ID NO: 595183 - DNA, 15 bp, Homo sapiens
tggctctgaggatac

SEQ ID NO: 595184 - DNA, 15 bp, Homo sapiens
ggctctgaggatact

SEQ ID NO: 595185 - DNA, 15 bp, Homo sapiens
gctctgaggatactt

SEQ ID NO: 595186 - DNA, 15 bp, Homo sapiens
ctctgaggatacttt

SEQ ID NO: 595187 - DNA, 15 bp, Homo sapiens
tctgaggatactttc

SEQ ID NO: 595188 - DNA, 15 bp, Homo sapiens
ctgaggatactttcc

SEQ ID NO: 595189 - DNA, 15 bp, Homo sapiens
tgaggatactttcca

SEQ ID NO: 595190 - DNA, 15 bp, Homo sapiens
gaggatactttccag

SEQ ID NO: 595191 - DNA, 15 bp, Homo sapiens
aggatactttccagg

SEQ ID NO: 595192 - DNA, 15 bp, Homo sapiens
ggatactttccagga

SEQ ID NO: 595193 - DNA, 15 bp, Homo sapiens
gatactttccaggag

SEQ ID NO: 595194 - DNA, 15 bp, Homo sapiens
atactttccaggagt

SEQ ID NO: 595195 - DNA, 15 bp, Homo sapiens
tactttccaggagtg

SEQ ID NO: 595196 - DNA, 15 bp, Homo sapiens
actttccaggagtgg

SEQ ID NO: 595197 - DNA, 15 bp, Homo sapiens
ctttccaggagtggc

SEQ ID NO: 595198 - DNA, 15 bp, Homo sapiens
tttccaggagtggcc

SEQ ID NO: 595199 - DNA, 15 bp, Homo sapiens
ttccaggagtggcct

SEQ ID NO: 595200 - DNA, 15 bp, Homo sapiens
tccaggagtggcctg

SEQ ID NO: 595201 - DNA, 15 bp, Homo sapiens
ccaggagtggcctgc

SEQ ID NO: 595202 - DNA, 15 bp, Homo sapiens
caggagtggcctgcc

SEQ ID NO: 595203 - DNA, 15 bp, Homo sapiens
aggagtggcctgcca

SEQ ID NO: 595204 - DNA, 15 bp, Homo sapiens
ggagtggcctgccaa

SEQ ID NO: 595205 - DNA, 15 bp, Homo sapiens
gagtggcctgccaag

SEQ ID NO: 595206 - DNA, 15 bp, Homo sapiens
agtggcctgccaagc

SEQ ID NO: 595207 - DNA, 15 bp, Homo sapiens
gtggcctgccaagcc

SEQ ID NO: 595208 - DNA, 15 bp, Homo sapiens
tggcctgccaagccg

SEQ ID NO: 595209 - DNA, 15 bp, Homo sapiens
ggcctgccaagccgt

SEQ ID NO: 595210 - DNA, 15 bp, Homo sapiens
gcctgccaagccgtg

SEQ ID NO: 595211 - DNA, 15 bp, Homo sapiens
cctgccaagccgtgt

SEQ ID NO: 595212 - DNA, 15 bp, Homo sapiens
ctgccaagccgtgtg

SEQ ID NO: 595213 - DNA, 15 bp, Homo sapiens
tgccaagccgtgtga

SEQ ID NO: 595214 - DNA, 15 bp, Homo sapiens
gccaagccgtgtgac

SEQ ID NO: 595215 - DNA, 15 bp, Homo sapiens
ccaagccgtgtgacc

SEQ ID NO: 595216 - DNA, 15 bp, Homo sapiens
caagccgtgtgacct

SEQ ID NO: 595217 - DNA, 15 bp, Homo sapiens
aagccgtgtgacctt

SEQ ID NO: 595218 - DNA, 15 bp, Homo sapiens
agccgtgtgaccttg

SEQ ID NO: 595219 - DNA, 15 bp, Homo sapiens
gccgtgtgaccttgg

SEQ ID NO: 595220 - DNA, 15 bp, Homo sapiens
ccgtgtgaccttgga

SEQ ID NO: 595221 - DNA, 15 bp, Homo sapiens
cgtgtgaccttggac

SEQ ID NO: 595222 - DNA, 15 bp, Homo sapiens
gtgtgaccttggaca

SEQ ID NO: 595223 - DNA, 15 bp, Homo sapiens
tgtgaccttggacaa

SEQ ID NO: 595224 - DNA, 15 bp, Homo sapiens
gtgaccttggacaag

SEQ ID NO: 595225 - DNA, 15 bp, Homo sapiens
tgaccttggacaagt

SEQ ID NO: 595226 - DNA, 15 bp, Homo sapiens
gaccttggacaagtc

SEQ ID NO: 595227 - DNA, 15 bp, Homo sapiens
accttggacaagtcc

SEQ ID NO: 595228 - DNA, 15 bp, Homo sapiens
ccttggacaagtccc

SEQ ID NO: 595229 - DNA, 15 bp, Homo sapiens
cttggacaagtcccg

SEQ ID NO: 595230 - DNA, 15 bp, Homo sapiens
ttggacaagtcccgt

SEQ ID NO: 595231 - DNA, 15 bp, Homo sapiens
tggacaagtcccgtc

SEQ ID NO: 595232 - DNA, 15 bp, Homo sapiens
ggacaagtcccgtcc

SEQ ID NO: 595233 - DNA, 15 bp, Homo sapiens
gacaagtcccgtcca

SEQ ID NO: 595234 - DNA, 15 bp, Homo sapiens
acaagtcccgtccat

SEQ ID NO: 595235 - DNA, 15 bp, Homo sapiens
caagtcccgtccatt

SEQ ID NO: 595236 - DNA, 15 bp, Homo sapiens
aagtcccgtccattc

SEQ ID NO: 595237 - DNA, 15 bp, Homo sapiens
agtcccgtccattcc

SEQ ID NO: 595238 - DNA, 15 bp, Homo sapiens
gtcccgtccattcct

SEQ ID NO: 595239 - DNA, 15 bp, Homo sapiens
tcccgtccattcctc

SEQ ID NO: 595240 - DNA, 15 bp, Homo sapiens
cccgtccattcctca

SEQ ID NO: 595241 - DNA, 15 bp, Homo sapiens
ccgtccattcctcag

SEQ ID NO: 595242 - DNA, 15 bp, Homo sapiens
cgtccattcctcagg

SEQ ID NO: 595243 - DNA, 15 bp, Homo sapiens
gtccattcctcaggc

SEQ ID NO: 595244 - DNA, 15 bp, Homo sapiens
tccattcctcaggcc

SEQ ID NO: 595245 - DNA, 15 bp, Homo sapiens
ccattcctcaggcct

SEQ ID NO: 595246 - DNA, 15 bp, Homo sapiens
cattcctcaggcctc

SEQ ID NO: 595247 - DNA, 15 bp, Homo sapiens
attcctcaggcctca

SEQ ID NO: 595248 - DNA, 15 bp, Homo sapiens
ttcctcaggcctcag

SEQ ID NO: 595249 - DNA, 15 bp, Homo sapiens
tcctcaggcctcagt

SEQ ID NO: 595250 - DNA, 15 bp, Homo sapiens
cctcaggcctcagtt

SEQ ID NO: 595251 - DNA, 15 bp, Homo sapiens
ctcaggcctcagttt

SEQ ID NO: 595252 - DNA, 15 bp, Homo sapiens
tcaggcctcagtttc

SEQ ID NO: 595253 - DNA, 15 bp, Homo sapiens
caggcctcagtttcc

SEQ ID NO: 595254 - DNA, 15 bp, Homo sapiens
aggcctcagtttcct

SEQ ID NO: 595255 - DNA, 15 bp, Homo sapiens
ggcctcagtttcctt

SEQ ID NO: 595256 - DNA, 15 bp, Homo sapiens
gcctcagtttccttt

SEQ ID NO: 595257 - DNA, 15 bp, Homo sapiens
cctcagtttcctttg

SEQ ID NO: 595258 - DNA, 15 bp, Homo sapiens
ctcagtttcctttga

SEQ ID NO: 595259 - DNA, 15 bp, Homo sapiens
tcagtttcctttgag

SEQ ID NO: 595260 - DNA, 15 bp, Homo sapiens
cagtttcctttgagg

SEQ ID NO: 595261 - DNA, 15 bp, Homo sapiens
agtttcctttgaggg

SEQ ID NO: 595262 - DNA, 15 bp, Homo sapiens
gtttcctttgaggga

SEQ ID NO: 595263 - DNA, 15 bp, Homo sapiens
tttcctttgagggac

SEQ ID NO: 595264 - DNA, 15 bp, Homo sapiens
ttcctttgagggacc

SEQ ID NO: 595265 - DNA, 15 bp, Homo sapiens
tcctttgagggaccc

SEQ ID NO: 595266 - DNA, 15 bp, Homo sapiens
cctttgagggaccct

SEQ ID NO: 595267 - DNA, 15 bp, Homo sapiens
ctttgagggaccctg

SEQ ID NO: 595268 - DNA, 15 bp, Homo sapiens
tttgagggaccctga

SEQ ID NO: 595269 - DNA, 15 bp, Homo sapiens
ttgagggaccctgaa

SEQ ID NO: 595270 - DNA, 15 bp, Homo sapiens
tgagggaccctgaat

SEQ ID NO: 595271 - DNA, 15 bp, Homo sapiens
gagggaccctgaatg

SEQ ID NO: 595272 - DNA, 15 bp, Homo sapiens
agggaccctgaatgg

SEQ ID NO: 595273 - DNA, 15 bp, Homo sapiens
gggaccctgaatggg

SEQ ID NO: 595274 - DNA, 15 bp, Homo sapiens
ggaccctgaatgggc

SEQ ID NO: 595275 - DNA, 15 bp, Homo sapiens
gaccctgaatgggcg

SEQ ID NO: 595276 - DNA, 15 bp, Homo sapiens
accctgaatgggcgg

SEQ ID NO: 595277 - DNA, 15 bp, Homo sapiens
ccctgaatgggcggg

SEQ ID NO: 595278 - DNA, 15 bp, Homo sapiens
cctgaatgggcgggg

SEQ ID NO: 595279 - DNA, 15 bp, Homo sapiens
ctgaatgggcggggg

SEQ ID NO: 595280 - DNA, 15 bp, Homo sapiens
tgaatgggcgggggt

SEQ ID NO: 595281 - DNA, 15 bp, Homo sapiens
gaatgggcgggggtt

SEQ ID NO: 595282 - DNA, 15 bp, Homo sapiens
aatgggcgggggttg

SEQ ID NO: 595283 - DNA, 15 bp, Homo sapiens
atgggcgggggttgc

SEQ ID NO: 595284 - DNA, 15 bp, Homo sapiens
tgggcgggggttgct

SEQ ID NO: 595285 - DNA, 15 bp, Homo sapiens
gggcgggggttgctg

SEQ ID NO: 595286 - DNA, 15 bp, Homo sapiens
ggcgggggttgctgt

SEQ ID NO: 595287 - DNA, 15 bp, Homo sapiens
gcgggggttgctgta

SEQ ID NO: 595288 - DNA, 15 bp, Homo sapiens
cgggggttgctgtag

SEQ ID NO: 595289 - DNA, 15 bp, Homo sapiens
gggggttgctgtagc

SEQ ID NO: 595290 - DNA, 15 bp, Homo sapiens
ggggttgctgtagct

SEQ ID NO: 595291 - DNA, 15 bp, Homo sapiens
gggttgctgtagctt

SEQ ID NO: 595292 - DNA, 15 bp, Homo sapiens
ggttgctgtagcttt

SEQ ID NO: 595293 - DNA, 15 bp, Homo sapiens
gttgctgtagctttc

SEQ ID NO: 595294 - DNA, 15 bp, Homo sapiens
ttgctgtagctttcc

SEQ ID NO: 595295 - DNA, 15 bp, Homo sapiens
tgctgtagctttcct

SEQ ID NO: 595296 - DNA, 15 bp, Homo sapiens
gctgtagctttcctc

SEQ ID NO: 595297 - DNA, 15 bp, Homo sapiens
ctgtagctttcctca

SEQ ID NO: 595298 - DNA, 15 bp, Homo sapiens
tgtagctttcctcag

SEQ ID NO: 595299 - DNA, 15 bp, Homo sapiens
gtagctttcctcagc

SEQ ID NO: 595300 - DNA, 15 bp, Homo sapiens
tagctttcctcagct

SEQ ID NO: 595301 - DNA, 15 bp, Homo sapiens
agctttcctcagctg

SEQ ID NO: 595302 - DNA, 15 bp, Homo sapiens
gctttcctcagctgg

SEQ ID NO: 595303 - DNA, 15 bp, Homo sapiens
ctttcctcagctggg

SEQ ID NO: 595304 - DNA, 15 bp, Homo sapiens
tttcctcagctggga

SEQ ID NO: 595305 - DNA, 15 bp, Homo sapiens
ttcctcagctgggag

SEQ ID NO: 595306 - DNA, 15 bp, Homo sapiens
tcctcagctgggaga

SEQ ID NO: 595307 - DNA, 15 bp, Homo sapiens
cctcagctgggagac

SEQ ID NO: 595308 - DNA, 15 bp, Homo sapiens
ctcagctgggagacc

SEQ ID NO: 595309 - DNA, 15 bp, Homo sapiens
tcagctgggagaccc

SEQ ID NO: 595310 - DNA, 15 bp, Homo sapiens
cagctgggagacccg

SEQ ID NO: 595311 - DNA, 15 bp, Homo sapiens
agctgggagacccgg

SEQ ID NO: 595312 - DNA, 15 bp, Homo sapiens
gctgggagacccggg

SEQ ID NO: 595313 - DNA, 15 bp, Homo sapiens
ctgggagacccggga

SEQ ID NO: 595314 - DNA, 15 bp, Homo sapiens
tgggagacccgggag

SEQ ID NO: 595315 - DNA, 15 bp, Homo sapiens
gggagacccgggagg

SEQ ID NO: 595316 - DNA, 15 bp, Homo sapiens
ggagacccgggagga

SEQ ID NO: 595317 - DNA, 15 bp, Homo sapiens
gagacccgggaggag

SEQ ID NO: 595318 - DNA, 15 bp, Homo sapiens
agacccgggaggagg

SEQ ID NO: 595319 - DNA, 15 bp, Homo sapiens
gacccgggaggaggt

SEQ ID NO: 595320 - DNA, 15 bp, Homo sapiens
acccgggaggaggtc

SEQ ID NO: 595321 - DNA, 15 bp, Homo sapiens
cccgggaggaggtcc

SEQ ID NO: 595322 - DNA, 15 bp, Homo sapiens
ccgggaggaggtccg

SEQ ID NO: 595323 - DNA, 15 bp, Homo sapiens
cgggaggaggtccgg

SEQ ID NO: 595324 - DNA, 15 bp, Homo sapiens
gggaggaggtccggg

SEQ ID NO: 595325 - DNA, 15 bp, Homo sapiens
ggaggaggtccgggg

SEQ ID NO: 595326 - DNA, 15 bp, Homo sapiens
gaggaggtccggggt

SEQ ID NO: 595327 - DNA, 15 bp, Homo sapiens
aggaggtccggggtg

SEQ ID NO: 595328 - DNA, 15 bp, Homo sapiens
ggaggtccggggtgc

SEQ ID NO: 595329 - DNA, 15 bp, Homo sapiens
gaggtccggggtgcc

SEQ ID NO: 595330 - DNA, 15 bp, Homo sapiens
aggtccggggtgcca

SEQ ID NO: 595331 - DNA, 15 bp, Homo sapiens
ggtccggggtgccag

SEQ ID NO: 595332 - DNA, 15 bp, Homo sapiens
gtccggggtgccagg

SEQ ID NO: 595333 - DNA, 15 bp, Homo sapiens
tccggggtgccaggg

SEQ ID NO: 595334 - DNA, 15 bp, Homo sapiens
ccggggtgccagggt

SEQ ID NO: 595335 - DNA, 15 bp, Homo sapiens
cggggtgccagggtg

SEQ ID NO: 595336 - DNA, 15 bp, Homo sapiens
ggggtgccagggtgg

SEQ ID NO: 595337 - DNA, 15 bp, Homo sapiens
gggtgccagggtggg

SEQ ID NO: 595338 - DNA, 15 bp, Homo sapiens
ggtgccagggtggga

SEQ ID NO: 595339 - DNA, 15 bp, Homo sapiens
gtgccagggtgggag

SEQ ID NO: 595340 - DNA, 15 bp, Homo sapiens
tgccagggtgggagg

SEQ ID NO: 595341 - DNA, 15 bp, Homo sapiens
gccagggtgggagga

SEQ ID NO: 595342 - DNA, 15 bp, Homo sapiens
ccagggtgggaggag

SEQ ID NO: 595343 - DNA, 15 bp, Homo sapiens
cagggtgggaggagg

SEQ ID NO: 595344 - DNA, 15 bp, Homo sapiens
agggtgggaggaggg

SEQ ID NO: 595345 - DNA, 15 bp, Homo sapiens
gggtgggaggagggc

SEQ ID NO: 595346 - DNA, 15 bp, Homo sapiens
ggtgggaggagggcc

SEQ ID NO: 595347 - DNA, 15 bp, Homo sapiens
gtgggaggagggcct

SEQ ID NO: 595348 - DNA, 15 bp, Homo sapiens
tgggaggagggcctg

SEQ ID NO: 595349 - DNA, 15 bp, Homo sapiens
gggaggagggcctgg

SEQ ID NO: 595350 - DNA, 15 bp, Homo sapiens
ggaggagggcctggc

SEQ ID NO: 595351 - DNA, 15 bp, Homo sapiens
gaggagggcctggct

SEQ ID NO: 595352 - DNA, 15 bp, Homo sapiens
aggagggcctggctt

SEQ ID NO: 595353 - DNA, 15 bp, Homo sapiens
ggagggcctggcttg

SEQ ID NO: 595354 - DNA, 15 bp, Homo sapiens
gagggcctggcttgt

SEQ ID NO: 595355 - DNA, 15 bp, Homo sapiens
agggcctggcttgtc

SEQ ID NO: 595356 - DNA, 15 bp, Homo sapiens
gggcctggcttgtcg

SEQ ID NO: 595357 - DNA, 15 bp, Homo sapiens
ggcctggcttgtcgc

SEQ ID NO: 595358 - DNA, 15 bp, Homo sapiens
gcctggcttgtcgct

SEQ ID NO: 595359 - DNA, 15 bp, Homo sapiens
cctggcttgtcgctg

SEQ ID NO: 595360 - DNA, 15 bp, Homo sapiens
ctggcttgtcgctga

SEQ ID NO: 595361 - DNA, 15 bp, Homo sapiens
tggcttgtcgctgaa

SEQ ID NO: 595362 - DNA, 15 bp, Homo sapiens
ggcttgtcgctgaaa

SEQ ID NO: 595363 - DNA, 15 bp, Homo sapiens
gcttgtcgctgaaag

SEQ ID NO: 595364 - DNA, 15 bp, Homo sapiens
cttgtcgctgaaagc

SEQ ID NO: 595365 - DNA, 15 bp, Homo sapiens
ttgtcgctgaaagcc

SEQ ID NO: 595366 - DNA, 15 bp, Homo sapiens
tgtcgctgaaagccg

SEQ ID NO: 595367 - DNA, 15 bp, Homo sapiens
gtcgctgaaagccgg

SEQ ID NO: 595368 - DNA, 15 bp, Homo sapiens
tcgctgaaagccggc

SEQ ID NO: 595369 - DNA, 15 bp, Homo sapiens
cgctgaaagccggcc

SEQ ID NO: 595370 - DNA, 15 bp, Homo sapiens
gctgaaagccggcca

SEQ ID NO: 595371 - DNA, 15 bp, Homo sapiens
ctgaaagccggccag

SEQ ID NO: 595372 - DNA, 15 bp, Homo sapiens
tgaaagccggccagg

SEQ ID NO: 595373 - DNA, 15 bp, Homo sapiens
gaaagccggccaggc

SEQ ID NO: 595374 - DNA, 15 bp, Homo sapiens
aaagccggccaggcg

SEQ ID NO: 595375 - DNA, 15 bp, Homo sapiens
aagccggccaggcgc

SEQ ID NO: 595376 - DNA, 15 bp, Homo sapiens
agccggccaggcgca

SEQ ID NO: 595377 - DNA, 15 bp, Homo sapiens
gccggccaggcgcac

SEQ ID NO: 595378 - DNA, 15 bp, Homo sapiens
ccggccaggcgcact

SEQ ID NO: 595379 - DNA, 15 bp, Homo sapiens
cggccaggcgcactg

SEQ ID NO: 595380 - DNA, 15 bp, Homo sapiens
ggccaggcgcactgt

SEQ ID NO: 595381 - DNA, 15 bp, Homo sapiens
gccaggcgcactgtc

SEQ ID NO: 595382 - DNA, 15 bp, Homo sapiens
ccaggcgcactgtcg

SEQ ID NO: 595383 - DNA, 15 bp, Homo sapiens
caggcgcactgtcgg

SEQ ID NO: 595384 - DNA, 15 bp, Homo sapiens
aggcgcactgtcggc

SEQ ID NO: 595385 - DNA, 15 bp, Homo sapiens
ggcgcactgtcggcg

SEQ ID NO: 595386 - DNA, 15 bp, Homo sapiens
gcgcactgtcggcgc

SEQ ID NO: 595387 - DNA, 15 bp, Homo sapiens
cgcactgtcggcgct

SEQ ID NO: 595388 - DNA, 15 bp, Homo sapiens
gcactgtcggcgctc

SEQ ID NO: 595389 - DNA, 15 bp, Homo sapiens
cactgtcggcgctca

SEQ ID NO: 595390 - DNA, 15 bp, Homo sapiens
actgtcggcgctcag

SEQ ID NO: 595391 - DNA, 15 bp, Homo sapiens
ctgtcggcgctcaga

SEQ ID NO: 595392 - DNA, 15 bp, Homo sapiens
tgtcggcgctcagag

SEQ ID NO: 595393 - DNA, 15 bp, Homo sapiens
gtcggcgctcagagc

SEQ ID NO: 595394 - DNA, 15 bp, Homo sapiens
tcggcgctcagagct

SEQ ID NO: 595395 - DNA, 15 bp, Homo sapiens
cggcgctcagagctg

SEQ ID NO: 595396 - DNA, 15 bp, Homo sapiens
ggcgctcagagctgg

SEQ ID NO: 595397 - DNA, 15 bp, Homo sapiens
gcgctcagagctggt

SEQ ID NO: 595398 - DNA, 15 bp, Homo sapiens
cgctcagagctggtg

SEQ ID NO: 595399 - DNA, 15 bp, Homo sapiens
gctcagagctggtgg

SEQ ID NO: 595400 - DNA, 15 bp, Homo sapiens
ctcagagctggtggc

SEQ ID NO: 595401 - DNA, 15 bp, Homo sapiens
tcagagctggtggcc

SEQ ID NO: 595402 - DNA, 15 bp, Homo sapiens
cagagctggtggccg

SEQ ID NO: 595403 - DNA, 15 bp, Homo sapiens
agagctggtggccgc

SEQ ID NO: 595404 - DNA, 15 bp, Homo sapiens
gagctggtggccgcc

SEQ ID NO: 595405 - DNA, 15 bp, Homo sapiens
agctggtggccgcct

SEQ ID NO: 595406 - DNA, 15 bp, Homo sapiens
gctggtggccgcctc

SEQ ID NO: 595407 - DNA, 15 bp, Homo sapiens
ctggtggccgcctcc

SEQ ID NO: 595408 - DNA, 15 bp, Homo sapiens
tggtggccgcctcct

SEQ ID NO: 595409 - DNA, 15 bp, Homo sapiens
ggtggccgcctcctg

SEQ ID NO: 595410 - DNA, 15 bp, Homo sapiens
gtggccgcctcctgc

SEQ ID NO: 595411 - DNA, 15 bp, Homo sapiens
tggccgcctcctgcg

SEQ ID NO: 595412 - DNA, 15 bp, Homo sapiens
ggccgcctcctgcgc

SEQ ID NO: 595413 - DNA, 15 bp, Homo sapiens
gccgcctcctgcgct

SEQ ID NO: 595414 - DNA, 15 bp, Homo sapiens
ccgcctcctgcgctt

SEQ ID NO: 595415 - DNA, 15 bp, Homo sapiens
cgcctcctgcgcttc

SEQ ID NO: 595416 - DNA, 15 bp, Homo sapiens
gcctcctgcgcttcc

SEQ ID NO: 595417 - DNA, 15 bp, Homo sapiens
cctcctgcgcttcct

SEQ ID NO: 595418 - DNA, 15 bp, Homo sapiens
ctcctgcgcttcctg

SEQ ID NO: 595419 - DNA, 15 bp, Homo sapiens
tcctgcgcttcctga

SEQ ID NO: 595420 - DNA, 15 bp, Homo sapiens
cctgcgcttcctgat

SEQ ID NO: 595421 - DNA, 15 bp, Homo sapiens
ctgcgcttcctgatt

SEQ ID NO: 595422 - DNA, 15 bp, Homo sapiens
tgcgcttcctgattc

SEQ ID NO: 595423 - DNA, 15 bp, Homo sapiens
gcgcttcctgattcc

SEQ ID NO: 595424 - DNA, 15 bp, Homo sapiens
cgcttcctgattccc

SEQ ID NO: 595425 - DNA, 15 bp, Homo sapiens
gcttcctgattccca

SEQ ID NO: 595426 - DNA, 15 bp, Homo sapiens
cttcctgattcccag

SEQ ID NO: 595427 - DNA, 15 bp, Homo sapiens
ttcctgattcccagc

SEQ ID NO: 595428 - DNA, 15 bp, Homo sapiens
tcctgattcccagcc

SEQ ID NO: 595429 - DNA, 15 bp, Homo sapiens
cctgattcccagccg

SEQ ID NO: 595430 - DNA, 15 bp, Homo sapiens
ctgattcccagccgc

SEQ ID NO: 595431 - DNA, 15 bp, Homo sapiens
tgattcccagccgcg

SEQ ID NO: 595432 - DNA, 15 bp, Homo sapiens
gattcccagccgcgc

SEQ ID NO: 595433 - DNA, 15 bp, Homo sapiens
attcccagccgcgct

SEQ ID NO: 595434 - DNA, 15 bp, Homo sapiens
ttcccagccgcgctc

SEQ ID NO: 595435 - DNA, 15 bp, Homo sapiens
tcccagccgcgctcg

SEQ ID NO: 595436 - DNA, 15 bp, Homo sapiens
cccagccgcgctcgc

SEQ ID NO: 595437 - DNA, 15 bp, Homo sapiens
ccagccgcgctcgct

SEQ ID NO: 595438 - DNA, 15 bp, Homo sapiens
cagccgcgctcgctc

SEQ ID NO: 595439 - DNA, 15 bp, Homo sapiens
agccgcgctcgctcg

SEQ ID NO: 595440 - DNA, 15 bp, Homo sapiens
gccgcgctcgctcgg

SEQ ID NO: 595441 - DNA, 15 bp, Homo sapiens
ccgcgctcgctcgga

SEQ ID NO: 595442 - DNA, 15 bp, Homo sapiens
cgcgctcgctcggag

SEQ ID NO: 595443 - DNA, 15 bp, Homo sapiens
gcgctcgctcggaga

SEQ ID NO: 595444 - DNA, 15 bp, Homo sapiens
cgctcgctcggagag

SEQ ID NO: 595445 - DNA, 15 bp, Homo sapiens
gctcgctcggagagc

SEQ ID NO: 595446 - DNA, 15 bp, Homo sapiens
ctcgctcggagagca

SEQ ID NO: 595447 - DNA, 15 bp, Homo sapiens
tcgctcggagagcag

SEQ ID NO: 595448 - DNA, 15 bp, Homo sapiens
cgctcggagagcagt

SEQ ID NO: 595449 - DNA, 15 bp, Homo sapiens
gctcggagagcagtg

SEQ ID NO: 595450 - DNA, 15 bp, Homo sapiens
ctcggagagcagtgc

SEQ ID NO: 595451 - DNA, 15 bp, Homo sapiens
tcggagagcagtgcc

SEQ ID NO: 595452 - DNA, 15 bp, Homo sapiens
cggagagcagtgccc

SEQ ID NO: 595453 - DNA, 15 bp, Homo sapiens
ggagagcagtgcccg

SEQ ID NO: 595454 - DNA, 15 bp, Homo sapiens
gagagcagtgcccgc

SEQ ID NO: 595455 - DNA, 15 bp, Homo sapiens
agagcagtgcccgct

SEQ ID NO: 595456 - DNA, 15 bp, Homo sapiens
gagcagtgcccgcta

SEQ ID NO: 595457 - DNA, 15 bp, Homo sapiens
agcagtgcccgctat

SEQ ID NO: 595458 - DNA, 15 bp, Homo sapiens
gcagtgcccgctatc

SEQ ID NO: 595459 - DNA, 15 bp, Homo sapiens
cagtgcccgctatct

SEQ ID NO: 595460 - DNA, 15 bp, Homo sapiens
agtgcccgctatctc

SEQ ID NO: 595461 - DNA, 15 bp, Homo sapiens
gtgcccgctatctcc

SEQ ID NO: 595462 - DNA, 15 bp, Homo sapiens
tgcccgctatctcct

SEQ ID NO: 595463 - DNA, 15 bp, Homo sapiens
gcccgctatctcctg

SEQ ID NO: 595464 - DNA, 15 bp, Homo sapiens
cccgctatctcctgg

SEQ ID NO: 595465 - DNA, 15 bp, Homo sapiens
ccgctatctcctggc

SEQ ID NO: 595466 - DNA, 15 bp, Homo sapiens
cgctatctcctggcc

SEQ ID NO: 595467 - DNA, 15 bp, Homo sapiens
gctatctcctggccc

SEQ ID NO: 595468 - DNA, 15 bp, Homo sapiens
ctatctcctggcccg

SEQ ID NO: 595469 - DNA, 15 bp, Homo sapiens
tatctcctggcccgg

SEQ ID NO: 595470 - DNA, 15 bp, Homo sapiens
atctcctggcccggg

SEQ ID NO: 595471 - DNA, 15 bp, Homo sapiens
tctcctggcccggga

SEQ ID NO: 595472 - DNA, 15 bp, Homo sapiens
ctcctggcccgggac

SEQ ID NO: 595473 - DNA, 15 bp, Homo sapiens
tcctggcccgggacc

SEQ ID NO: 595474 - DNA, 15 bp, Homo sapiens
cctggcccgggaccg

SEQ ID NO: 595475 - DNA, 15 bp, Homo sapiens
ctggcccgggaccgg

SEQ ID NO: 595476 - DNA, 15 bp, Homo sapiens
tggcccgggaccggc

SEQ ID NO: 595477 - DNA, 15 bp, Homo sapiens
ggcccgggaccggca

SEQ ID NO: 595478 - DNA, 15 bp, Homo sapiens
gcccgggaccggcag

SEQ ID NO: 595479 - DNA, 15 bp, Homo sapiens
cccgggaccggcaga

SEQ ID NO: 595480 - DNA, 15 bp, Homo sapiens
ccgggaccggcagag

SEQ ID NO: 595481 - DNA, 15 bp, Homo sapiens
cgggaccggcagagg

SEQ ID NO: 595482 - DNA, 15 bp, Homo sapiens
gggaccggcagaggg

SEQ ID NO: 595483 - DNA, 15 bp, Homo sapiens
ggaccggcagagggg

SEQ ID NO: 595484 - DNA, 15 bp, Homo sapiens
gaccggcagaggggt

SEQ ID NO: 595485 - DNA, 15 bp, Homo sapiens
accggcagaggggtg

SEQ ID NO: 595486 - DNA, 15 bp, Homo sapiens
ccggcagaggggtgc

SEQ ID NO: 595487 - DNA, 15 bp, Homo sapiens
cggcagaggggtgcg

SEQ ID NO: 595488 - DNA, 15 bp, Homo sapiens
ggcagaggggtgcgg

SEQ ID NO: 595489 - DNA, 15 bp, Homo sapiens
gcagaggggtgcggc

SEQ ID NO: 595490 - DNA, 15 bp, Homo sapiens
cagaggggtgcggcg

SEQ ID NO: 595491 - DNA, 15 bp, Homo sapiens
agaggggtgcggcgg

SEQ ID NO: 595492 - DNA, 15 bp, Homo sapiens
gaggggtgcggcggg

SEQ ID NO: 595493 - DNA, 15 bp, Homo sapiens
aggggtgcggcgggg

SEQ ID NO: 595494 - DNA, 15 bp, Homo sapiens
ggggtgcggcggggc

SEQ ID NO: 595495 - DNA, 15 bp, Homo sapiens
gggtgcggcggggcg

SEQ ID NO: 595496 - DNA, 15 bp, Homo sapiens
ggtgcggcggggcgg

SEQ ID NO: 595497 - DNA, 15 bp, Homo sapiens
gtgcggcggggcggg

SEQ ID NO: 595498 - DNA, 15 bp, Homo sapiens
tgcggcggggcgggc

SEQ ID NO: 595499 - DNA, 15 bp, Homo sapiens
gcggcggggcgggcc

SEQ ID NO: 595500 - DNA, 15 bp, Homo sapiens
cggcggggcgggccc

SEQ ID NO: 595501 - DNA, 15 bp, Homo sapiens
ggcggggcgggccca

SEQ ID NO: 595502 - DNA, 15 bp, Homo sapiens
gcggggcgggcccag

SEQ ID NO: 595503 - DNA, 15 bp, Homo sapiens
cggggcgggcccagg

SEQ ID NO: 595504 - DNA, 15 bp, Homo sapiens
ggggcgggcccaggg

SEQ ID NO: 595505 - DNA, 15 bp, Homo sapiens
gggcgggcccagggg

SEQ ID NO: 595506 - DNA, 15 bp, Homo sapiens
ggcgggcccaggggt

SEQ ID NO: 595507 - DNA, 15 bp, Homo sapiens
gcgggcccaggggtc

SEQ ID NO: 595508 - DNA, 15 bp, Homo sapiens
cgggcccaggggtct

SEQ ID NO: 595509 - DNA, 15 bp, Homo sapiens
gggcccaggggtctc

SEQ ID NO: 595510 - DNA, 15 bp, Homo sapiens
ggcccaggggtctct

SEQ ID NO: 595511 - DNA, 15 bp, Homo sapiens
gcccaggggtctctg

SEQ ID NO: 595512 - DNA, 15 bp, Homo sapiens
cccaggggtctctgg

SEQ ID NO: 595513 - DNA, 15 bp, Homo sapiens
ccaggggtctctggc

SEQ ID NO: 595514 - DNA, 15 bp, Homo sapiens
caggggtctctggcg

SEQ ID NO: 595515 - DNA, 15 bp, Homo sapiens
aggggtctctggcgg

SEQ ID NO: 595516 - DNA, 15 bp, Homo sapiens
ggggtctctggcggc

SEQ ID NO: 595517 - DNA, 15 bp, Homo sapiens
gggtctctggcggcc

SEQ ID NO: 595518 - DNA, 15 bp, Homo sapiens
ggtctctggcggccg

SEQ ID NO: 595519 - DNA, 15 bp, Homo sapiens
gtctctggcggccgg

SEQ ID NO: 595520 - DNA, 15 bp, Homo sapiens
tctctggcggccgga

SEQ ID NO: 595521 - DNA, 15 bp, Homo sapiens
ctctggcggccggaa

SEQ ID NO: 595522 - DNA, 15 bp, Homo sapiens
tctggcggccggaag

SEQ ID NO: 595523 - DNA, 15 bp, Homo sapiens
ctggcggccggaaga

SEQ ID NO: 595524 - DNA, 15 bp, Homo sapiens
tggcggccggaagaa

SEQ ID NO: 595525 - DNA, 15 bp, Homo sapiens
ggcggccggaagaac

SEQ ID NO: 595526 - DNA, 15 bp, Homo sapiens
gcggccggaagaacc

SEQ ID NO: 595527 - DNA, 15 bp, Homo sapiens
cggccggaagaaccg

SEQ ID NO: 595528 - DNA, 15 bp, Homo sapiens
ggccggaagaaccgg

SEQ ID NO: 595529 - DNA, 15 bp, Homo sapiens
gccggaagaaccggg

SEQ ID NO: 595530 - DNA, 15 bp, Homo sapiens
ccggaagaaccggga

SEQ ID NO: 595531 - DNA, 15 bp, Homo sapiens
cggaagaaccgggac

SEQ ID NO: 595532 - DNA, 15 bp, Homo sapiens
ggaagaaccgggacc

SEQ ID NO: 595533 - DNA, 15 bp, Homo sapiens
gaagaaccgggaccc

SEQ ID NO: 595534 - DNA, 15 bp, Homo sapiens
aagaaccgggaccct

SEQ ID NO: 595535 - DNA, 15 bp, Homo sapiens
agaaccgggaccctg

SEQ ID NO: 595536 - DNA, 15 bp, Homo sapiens
gaaccgggaccctgc

SEQ ID NO: 595537 - DNA, 15 bp, Homo sapiens
aaccgggaccctgcc

SEQ ID NO: 595538 - DNA, 15 bp, Homo sapiens
accgggaccctgcca

SEQ ID NO: 595539 - DNA, 15 bp, Homo sapiens
ccgggaccctgccag

SEQ ID NO: 595540 - DNA, 15 bp, Homo sapiens
cgggaccctgccagg

SEQ ID NO: 595541 - DNA, 15 bp, Homo sapiens
gggaccctgccaggc

SEQ ID NO: 595542 - DNA, 15 bp, Homo sapiens
ggaccctgccaggcc

SEQ ID NO: 595543 - DNA, 15 bp, Homo sapiens
gaccctgccaggccc

SEQ ID NO: 595544 - DNA, 15 bp, Homo sapiens
accctgccaggcccc

SEQ ID NO: 595545 - DNA, 15 bp, Homo sapiens
ccctgccaggcccct

SEQ ID NO: 595546 - DNA, 15 bp, Homo sapiens
cctgccaggcccctc

SEQ ID NO: 595547 - DNA, 15 bp, Homo sapiens
ctgccaggcccctcc

SEQ ID NO: 595548 - DNA, 15 bp, Homo sapiens
tgccaggcccctccc

SEQ ID NO: 595549 - DNA, 15 bp, Homo sapiens
gccaggcccctcccg

SEQ ID NO: 595550 - DNA, 15 bp, Homo sapiens
ccaggcccctcccgc

SEQ ID NO: 595551 - DNA, 15 bp, Homo sapiens
caggcccctcccgcg

SEQ ID NO: 595552 - DNA, 15 bp, Homo sapiens
aggcccctcccgcgg

SEQ ID NO: 595553 - DNA, 15 bp, Homo sapiens
ggcccctcccgcggg

SEQ ID NO: 595554 - DNA, 15 bp, Homo sapiens
gcccctcccgcgggc

SEQ ID NO: 595555 - DNA, 15 bp, Homo sapiens
cccctcccgcgggca

SEQ ID NO: 595556 - DNA, 15 bp, Homo sapiens
ccctcccgcgggcag

SEQ ID NO: 595557 - DNA, 15 bp, Homo sapiens
cctcccgcgggcagg

SEQ ID NO: 595558 - DNA, 15 bp, Homo sapiens
ctcccgcgggcaggg

SEQ ID NO: 595559 - DNA, 15 bp, Homo sapiens
tcccgcgggcagggc

SEQ ID NO: 595560 - DNA, 15 bp, Homo sapiens
cccgcgggcagggcg

SEQ ID NO: 595561 - DNA, 15 bp, Homo sapiens
ccgcgggcagggcgg

SEQ ID NO: 595562 - DNA, 15 bp, Homo sapiens
cgcgggcagggcggc

SEQ ID NO: 595563 - DNA, 15 bp, Homo sapiens
gcgggcagggcggcc

SEQ ID NO: 595564 - DNA, 15 bp, Homo sapiens
cgggcagggcggccc

SEQ ID NO: 595565 - DNA, 15 bp, Homo sapiens
gggcagggcggcccc

SEQ ID NO: 595566 - DNA, 15 bp, Homo sapiens
ggcagggcggcccct

SEQ ID NO: 595567 - DNA, 15 bp, Homo sapiens
gcagggcggcccctc

SEQ ID NO: 595568 - DNA, 15 bp, Homo sapiens
cagggcggcccctcg

SEQ ID NO: 595569 - DNA, 15 bp, Homo sapiens
agggcggcccctcgc

SEQ ID NO: 595570 - DNA, 15 bp, Homo sapiens
gggcggcccctcgcc

SEQ ID NO: 595571 - DNA, 15 bp, Homo sapiens
ggcggcccctcgccg

SEQ ID NO: 595572 - DNA, 15 bp, Homo sapiens
gcggcccctcgccgg

SEQ ID NO: 595573 - DNA, 15 bp, Homo sapiens
cggcccctcgccggc

SEQ ID NO: 595574 - DNA, 15 bp, Homo sapiens
ggcccctcgccggct

SEQ ID NO: 595575 - DNA, 15 bp, Homo sapiens
gcccctcgccggctc

SEQ ID NO: 595576 - DNA, 15 bp, Homo sapiens
cccctcgccggctcc

SEQ ID NO: 595577 - DNA, 15 bp, Homo sapiens
ccctcgccggctcct

SEQ ID NO: 595578 - DNA, 15 bp, Homo sapiens
cctcgccggctcctc

SEQ ID NO: 595579 - DNA, 15 bp, Homo sapiens
ctcgccggctcctcc

SEQ ID NO: 595580 - DNA, 15 bp, Homo sapiens
tcgccggctcctccc

SEQ ID NO: 595581 - DNA, 15 bp, Homo sapiens
cgccggctcctcccc

SEQ ID NO: 595582 - DNA, 15 bp, Homo sapiens
gccggctcctccccc

SEQ ID NO: 595583 - DNA, 15 bp, Homo sapiens
ccggctcctccccca

SEQ ID NO: 595584 - DNA, 15 bp, Homo sapiens
cggctcctcccccac

SEQ ID NO: 595585 - DNA, 15 bp, Homo sapiens
ggctcctcccccacc

SEQ ID NO: 595586 - DNA, 15 bp, Homo sapiens
gctcctcccccaccg

SEQ ID NO: 595587 - DNA, 15 bp, Homo sapiens
ctcctcccccaccgc

SEQ ID NO: 595588 - DNA, 15 bp, Homo sapiens
tcctcccccaccgcc

SEQ ID NO: 595589 - DNA, 15 bp, Homo sapiens
cctcccccaccgccc

SEQ ID NO: 595590 - DNA, 15 bp, Homo sapiens
ctcccccaccgcccg

SEQ ID NO: 595591 - DNA, 15 bp, Homo sapiens
tcccccaccgcccgc

SEQ ID NO: 595592 - DNA, 15 bp, Homo sapiens
cccccaccgcccgcc

SEQ ID NO: 595593 - DNA, 15 bp, Homo sapiens
ccccaccgcccgcca

SEQ ID NO: 595594 - DNA, 15 bp, Homo sapiens
cccaccgcccgccac

SEQ ID NO: 595595 - DNA, 15 bp, Homo sapiens
ccaccgcccgccacc

SEQ ID NO: 595596 - DNA, 15 bp, Homo sapiens
caccgcccgccacca

SEQ ID NO: 595597 - DNA, 15 bp, Homo sapiens
accgcccgccaccag

SEQ ID NO: 595598 - DNA, 15 bp, Homo sapiens
ccgcccgccaccagc

SEQ ID NO: 595599 - DNA, 15 bp, Homo sapiens
cgcccgccaccagcc

SEQ ID NO: 595600 - DNA, 15 bp, Homo sapiens
gcccgccaccagccc

SEQ ID NO: 595601 - DNA, 15 bp, Homo sapiens
cccgccaccagcccg

SEQ ID NO: 595602 - DNA, 15 bp, Homo sapiens
ccgccaccagcccgg

SEQ ID NO: 595603 - DNA, 15 bp, Homo sapiens
cgccaccagcccggg

SEQ ID NO: 595604 - DNA, 15 bp, Homo sapiens
gccaccagcccggga

SEQ ID NO: 595605 - DNA, 15 bp, Homo sapiens
ccaccagcccgggat

SEQ ID NO: 595606 - DNA, 15 bp, Homo sapiens
caccagcccgggatc

SEQ ID NO: 595607 - DNA, 15 bp, Homo sapiens
accagcccgggatca

SEQ ID NO: 595608 - DNA, 15 bp, Homo sapiens
ccagcccgggatcag

SEQ ID NO: 595609 - DNA, 15 bp, Homo sapiens
cagcccgggatcagt

SEQ ID NO: 595610 - DNA, 15 bp, Homo sapiens
agcccgggatcagtc

SEQ ID NO: 595611 - DNA, 15 bp, Homo sapiens
gcccgggatcagtct

SEQ ID NO: 595612 - DNA, 15 bp, Homo sapiens
cccgggatcagtctc

SEQ ID NO: 595613 - DNA, 15 bp, Homo sapiens
ccgggatcagtctcc

SEQ ID NO: 595614 - DNA, 15 bp, Homo sapiens
cgggatcagtctccg

SEQ ID NO: 595615 - DNA, 15 bp, Homo sapiens
gggatcagtctccgc

SEQ ID NO: 595616 - DNA, 15 bp, Homo sapiens
ggatcagtctccgca

SEQ ID NO: 595617 - DNA, 15 bp, Homo sapiens
gatcagtctccgcac

SEQ ID NO: 595618 - DNA, 15 bp, Homo sapiens
atcagtctccgcacg

SEQ ID NO: 595619 - DNA, 15 bp, Homo sapiens
tcagtctccgcacgc

SEQ ID NO: 595620 - DNA, 15 bp, Homo sapiens
cagtctccgcacgcg

SEQ ID NO: 595621 - DNA, 15 bp, Homo sapiens
agtctccgcacgcgg

SEQ ID NO: 595622 - DNA, 15 bp, Homo sapiens
gtctccgcacgcggt

SEQ ID NO: 595623 - DNA, 15 bp, Homo sapiens
tctccgcacgcggtt

SEQ ID NO: 595624 - DNA, 15 bp, Homo sapiens
ctccgcacgcggttc

SEQ ID NO: 595625 - DNA, 15 bp, Homo sapiens
tccgcacgcggttcc

SEQ ID NO: 595626 - DNA, 15 bp, Homo sapiens
ccgcacgcggttccg

SEQ ID NO: 595627 - DNA, 15 bp, Homo sapiens
cgcacgcggttccgc

SEQ ID NO: 595628 - DNA, 15 bp, Homo sapiens
gcacgcggttccgca

SEQ ID NO: 595629 - DNA, 15 bp, Homo sapiens
cacgcggttccgcag

SEQ ID NO: 595630 - DNA, 15 bp, Homo sapiens
acgcggttccgcagg

SEQ ID NO: 595631 - DNA, 15 bp, Homo sapiens
cgcggttccgcaggt

SEQ ID NO: 595632 - DNA, 15 bp, Homo sapiens
gcggttccgcaggtg

SEQ ID NO: 595633 - DNA, 15 bp, Homo sapiens
cggttccgcaggtgg

SEQ ID NO: 595634 - DNA, 15 bp, Homo sapiens
ggttccgcaggtggc

SEQ ID NO: 595635 - DNA, 15 bp, Homo sapiens
gttccgcaggtggca

SEQ ID NO: 595636 - DNA, 15 bp, Homo sapiens
ttccgcaggtggcag

SEQ ID NO: 595637 - DNA, 15 bp, Homo sapiens
tccgcaggtggcagc

SEQ ID NO: 595638 - DNA, 15 bp, Homo sapiens
ccgcaggtggcagcg

SEQ ID NO: 595639 - DNA, 15 bp, Homo sapiens
cgcaggtggcagcga

SEQ ID NO: 595640 - DNA, 15 bp, Homo sapiens
gcaggtggcagcgat

SEQ ID NO: 595641 - DNA, 15 bp, Homo sapiens
caggtggcagcgatg

SEQ ID NO: 595642 - DNA, 15 bp, Homo sapiens
aggtggcagcgatgg

SEQ ID NO: 595643 - DNA, 15 bp, Homo sapiens
ggtggcagcgatggc

SEQ ID NO: 595644 - DNA, 15 bp, Homo sapiens
gtggcagcgatggcc

SEQ ID NO: 595645 - DNA, 15 bp, Homo sapiens
tggcagcgatggccc

SEQ ID NO: 595646 - DNA, 15 bp, Homo sapiens
ggcagcgatggccca

SEQ ID NO: 595647 - DNA, 15 bp, Homo sapiens
gcagcgatggcccag

SEQ ID NO: 595648 - DNA, 15 bp, Homo sapiens
cagcgatggcccagt

SEQ ID NO: 595649 - DNA, 15 bp, Homo sapiens
agcgatggcccagtc

SEQ ID NO: 595650 - DNA, 15 bp, Homo sapiens
gcgatggcccagtcc

SEQ ID NO: 595651 - DNA, 15 bp, Homo sapiens
cgatggcccagtcct

SEQ ID NO: 595652 - DNA, 15 bp, Homo sapiens
gatggcccagtcctg

SEQ ID NO: 595653 - DNA, 15 bp, Homo sapiens
atggcccagtcctga

SEQ ID NO: 595654 - DNA, 15 bp, Homo sapiens
tggcccagtcctgaa

SEQ ID NO: 595655 - DNA, 15 bp, Homo sapiens
ggcccagtcctgaac

SEQ ID NO: 595656 - DNA, 15 bp, Homo sapiens
gcccagtcctgaact

SEQ ID NO: 595657 - DNA, 15 bp, Homo sapiens
cccagtcctgaactc

SEQ ID NO: 595658 - DNA, 15 bp, Homo sapiens
ccagtcctgaactcc

SEQ ID NO: 595659 - DNA, 15 bp, Homo sapiens
cagtcctgaactccc

SEQ ID NO: 595660 - DNA, 15 bp, Homo sapiens
agtcctgaactcccc

SEQ ID NO: 595661 - DNA, 15 bp, Homo sapiens
gtcctgaactccccg

SEQ ID NO: 595662 - DNA, 15 bp, Homo sapiens
tcctgaactccccgc

SEQ ID NO: 595663 - DNA, 15 bp, Homo sapiens
cctgaactccccgcc

SEQ ID NO: 595664 - DNA, 15 bp, Homo sapiens
ctgaactccccgcca

SEQ ID NO: 595665 - DNA, 15 bp, Homo sapiens
tgaactccccgccat

SEQ ID NO: 595666 - DNA, 15 bp, Homo sapiens
gaactccccgccatg

SEQ ID NO: 595667 - DNA, 15 bp, Homo sapiens
aactccccgccatgg

SEQ ID NO: 595668 - DNA, 15 bp, Homo sapiens
actccccgccatggc

SEQ ID NO: 595669 - DNA, 15 bp, Homo sapiens
ctccccgccatggcc

SEQ ID NO: 595670 - DNA, 15 bp, Homo sapiens
tccccgccatggccg

SEQ ID NO: 595671 - DNA, 15 bp, Homo sapiens
ccccgccatggccgg

SEQ ID NO: 595672 - DNA, 15 bp, Homo sapiens
cccgccatggccggc

SEQ ID NO: 595673 - DNA, 15 bp, Homo sapiens
ccgccatggccggcg

SEQ ID NO: 595674 - DNA, 15 bp, Homo sapiens
cgccatggccggcgc

SEQ ID NO: 595675 - DNA, 15 bp, Homo sapiens
gccatggccggcgcc

SEQ ID NO: 595676 - DNA, 15 bp, Homo sapiens
ccatggccggcgccc

SEQ ID NO: 595677 - DNA, 15 bp, Homo sapiens
catggccggcgcccc

SEQ ID NO: 595678 - DNA, 15 bp, Homo sapiens
atggccggcgccccc

SEQ ID NO: 595679 - DNA, 15 bp, Homo sapiens
tggccggcgcccccg

SEQ ID NO: 595680 - DNA, 15 bp, Homo sapiens
ggccggcgcccccgg

SEQ ID NO: 595681 - DNA, 15 bp, Homo sapiens
gccggcgcccccggc

SEQ ID NO: 595682 - DNA, 15 bp, Homo sapiens
ccggcgcccccggcc

SEQ ID NO: 595683 - DNA, 15 bp, Homo sapiens
cggcgcccccggccc

SEQ ID NO: 595684 - DNA, 15 bp, Homo sapiens
ggcgcccccggcccg

SEQ ID NO: 595685 - DNA, 15 bp, Homo sapiens
gcgcccccggcccgc

SEQ ID NO: 595686 - DNA, 15 bp, Homo sapiens
cgcccccggcccgct

SEQ ID NO: 595687 - DNA, 15 bp, Homo sapiens
gcccccggcccgctg

SEQ ID NO: 595688 - DNA, 15 bp, Homo sapiens
cccccggcccgctgc

SEQ ID NO: 595689 - DNA, 15 bp, Homo sapiens
ccccggcccgctgcg

SEQ ID NO: 595690 - DNA, 15 bp, Homo sapiens
cccggcccgctgcgc

SEQ ID NO: 595691 - DNA, 15 bp, Homo sapiens
ccggcccgctgcgcc

SEQ ID NO: 595692 - DNA, 15 bp, Homo sapiens
cggcccgctgcgcct

SEQ ID NO: 595693 - DNA, 15 bp, Homo sapiens
ggcccgctgcgcctt

SEQ ID NO: 595694 - DNA, 15 bp, Homo sapiens
gcccgctgcgccttg

SEQ ID NO: 595695 - DNA, 15 bp, Homo sapiens
cccgctgcgccttgc

SEQ ID NO: 595696 - DNA, 15 bp, Homo sapiens
ccgctgcgccttgcg

SEQ ID NO: 595697 - DNA, 15 bp, Homo sapiens
cgctgcgccttgcgc

SEQ ID NO: 595698 - DNA, 15 bp, Homo sapiens
gctgcgccttgcgct

SEQ ID NO: 595699 - DNA, 15 bp, Homo sapiens
ctgcgccttgcgctg

SEQ ID NO: 595700 - DNA, 15 bp, Homo sapiens
tgcgccttgcgctgc

SEQ ID NO: 595701 - DNA, 15 bp, Homo sapiens
gcgccttgcgctgct

SEQ ID NO: 595702 - DNA, 15 bp, Homo sapiens
cgccttgcgctgctg

SEQ ID NO: 595703 - DNA, 15 bp, Homo sapiens
gccttgcgctgctgc

SEQ ID NO: 595704 - DNA, 15 bp, Homo sapiens
ccttgcgctgctgct

SEQ ID NO: 595705 - DNA, 15 bp, Homo sapiens
cttgcgctgctgctg

SEQ ID NO: 595706 - DNA, 15 bp, Homo sapiens
ttgcgctgctgctgc

SEQ ID NO: 595707 - DNA, 15 bp, Homo sapiens
tgcgctgctgctgct

SEQ ID NO: 595708 - DNA, 15 bp, Homo sapiens
gcgctgctgctgctc

SEQ ID NO: 595709 - DNA, 15 bp, Homo sapiens
cgctgctgctgctcg

SEQ ID NO: 595710 - DNA, 15 bp, Homo sapiens
gctgctgctgctcgg

SEQ ID NO: 595711 - DNA, 15 bp, Homo sapiens
ctgctgctgctcggg

SEQ ID NO: 595712 - DNA, 15 bp, Homo sapiens
tgctgctgctcggga

SEQ ID NO: 595713 - DNA, 15 bp, Homo sapiens
gctgctgctcgggat

SEQ ID NO: 595714 - DNA, 15 bp, Homo sapiens
ctgctgctcgggatg

SEQ ID NO: 595715 - DNA, 15 bp, Homo sapiens
tgctgctcgggatgg

SEQ ID NO: 595716 - DNA, 15 bp, Homo sapiens
gctgctcgggatggt

SEQ ID NO: 595717 - DNA, 15 bp, Homo sapiens
ctgctcgggatggtg

SEQ ID NO: 595718 - DNA, 15 bp, Homo sapiens
tgctcgggatggtgg

SEQ ID NO: 595719 - DNA, 15 bp, Homo sapiens
gctcgggatggtggg

SEQ ID NO: 595720 - DNA, 15 bp, Homo sapiens
ctcgggatggtgggc

SEQ ID NO: 595721 - DNA, 15 bp, Homo sapiens
tcgggatggtgggca

SEQ ID NO: 595722 - DNA, 15 bp, Homo sapiens
cgggatggtgggcag

SEQ ID NO: 595723 - DNA, 15 bp, Homo sapiens
gggatggtgggcagg

SEQ ID NO: 595724 - DNA, 15 bp, Homo sapiens
ggatggtgggcaggg

SEQ ID NO: 595725 - DNA, 15 bp, Homo sapiens
gatggtgggcagggc

SEQ ID NO: 595726 - DNA, 15 bp, Homo sapiens
atggtgggcagggcc

SEQ ID NO: 595727 - DNA, 15 bp, Homo sapiens
tggtgggcagggccg

SEQ ID NO: 595728 - DNA, 15 bp, Homo sapiens
ggtgggcagggccgg

SEQ ID NO: 595729 - DNA, 15 bp, Homo sapiens
gtgggcagggccggc

SEQ ID NO: 595730 - DNA, 15 bp, Homo sapiens
tgggcagggccggcc

SEQ ID NO: 595731 - DNA, 15 bp, Homo sapiens
gggcagggccggccc

SEQ ID NO: 595732 - DNA, 15 bp, Homo sapiens
ggcagggccggcccc

SEQ ID NO: 595733 - DNA, 15 bp, Homo sapiens
gcagggccggccccc

SEQ ID NO: 595734 - DNA, 15 bp, Homo sapiens
cagggccggcccccg

SEQ ID NO: 595735 - DNA, 15 bp, Homo sapiens
agggccggcccccgc

SEQ ID NO: 595736 - DNA, 15 bp, Homo sapiens
gggccggcccccgcc

SEQ ID NO: 595737 - DNA, 15 bp, Homo sapiens
ggccggcccccgccc

SEQ ID NO: 595738 - DNA, 15 bp, Homo sapiens
gccggcccccgcccc

SEQ ID NO: 595739 - DNA, 15 bp, Homo sapiens
ccggcccccgccccc

SEQ ID NO: 595740 - DNA, 15 bp, Homo sapiens
cggcccccgccccca

SEQ ID NO: 595741 - DNA, 15 bp, Homo sapiens
ggcccccgcccccag

SEQ ID NO: 595742 - DNA, 15 bp, Homo sapiens
gcccccgcccccagg

SEQ ID NO: 595743 - DNA, 15 bp, Homo sapiens
cccccgcccccaggt

SEQ ID NO: 595744 - DNA, 15 bp, Homo sapiens
ccccgcccccaggtg

SEQ ID NO: 595745 - DNA, 15 bp, Homo sapiens
cccgcccccaggtga

SEQ ID NO: 595746 - DNA, 15 bp, Homo sapiens
ccgcccccaggtgag

SEQ ID NO: 595747 - DNA, 15 bp, Homo sapiens
cgcccccaggtgaga

SEQ ID NO: 595748 - DNA, 15 bp, Homo sapiens
gcccccaggtgagat

SEQ ID NO: 595749 - DNA, 15 bp, Homo sapiens
cccccaggtgagatc

SEQ ID NO: 595750 - DNA, 15 bp, Homo sapiens
ccccaggtgagatcc

SEQ ID NO: 595751 - DNA, 15 bp, Homo sapiens
cccaggtgagatcca

SEQ ID NO: 595752 - DNA, 15 bp, Homo sapiens
ccaggtgagatccag

SEQ ID NO: 595753 - DNA, 15 bp, Homo sapiens
caggtgagatccagg

SEQ ID NO: 595754 - DNA, 15 bp, Homo sapiens
aggtgagatccaggg

SEQ ID NO: 595755 - DNA, 15 bp, Homo sapiens
ggtgagatccaggga

SEQ ID NO: 595756 - DNA, 15 bp, Homo sapiens
gtgagatccagggac

SEQ ID NO: 595757 - DNA, 15 bp, Homo sapiens
tgagatccagggacc

SEQ ID NO: 595758 - DNA, 15 bp, Homo sapiens
gagatccagggaccc

SEQ ID NO: 595759 - DNA, 15 bp, Homo sapiens
agatccagggacccc

SEQ ID NO: 595760 - DNA, 15 bp, Homo sapiens
gatccagggaccccg

SEQ ID NO: 595761 - DNA, 15 bp, Homo sapiens
atccagggaccccga

SEQ ID NO: 595762 - DNA, 15 bp, Homo sapiens
tccagggaccccgac

SEQ ID NO: 595763 - DNA, 15 bp, Homo sapiens
ccagggaccccgacg

SEQ ID NO: 595764 - DNA, 15 bp, Homo sapiens
cagggaccccgacga

SEQ ID NO: 595765 - DNA, 15 bp, Homo sapiens
agggaccccgacgac

SEQ ID NO: 595766 - DNA, 15 bp, Homo sapiens
gggaccccgacgaca

SEQ ID NO: 595767 - DNA, 15 bp, Homo sapiens
ggaccccgacgacac

SEQ ID NO: 595768 - DNA, 15 bp, Homo sapiens
gaccccgacgacacc

SEQ ID NO: 595769 - DNA, 15 bp, Homo sapiens
accccgacgacaccg

SEQ ID NO: 595770 - DNA, 15 bp, Homo sapiens
ccccgacgacaccgg

SEQ ID NO: 595771 - DNA, 15 bp, Homo sapiens
cccgacgacaccggg

SEQ ID NO: 595772 - DNA, 15 bp, Homo sapiens
ccgacgacaccgggg

SEQ ID NO: 595773 - DNA, 15 bp, Homo sapiens
cgacgacaccggggg

SEQ ID NO: 595774 - DNA, 15 bp, Homo sapiens
gacgacaccggggga

SEQ ID NO: 595775 - DNA, 15 bp, Homo sapiens
acgacaccgggggag

SEQ ID NO: 595776 - DNA, 15 bp, Homo sapiens
cgacaccgggggagg

SEQ ID NO: 595777 - DNA, 15 bp, Homo sapiens
gacaccgggggaggc

SEQ ID NO: 595778 - DNA, 15 bp, Homo sapiens
acaccgggggaggcg

SEQ ID NO: 595779 - DNA, 15 bp, Homo sapiens
caccgggggaggcgg

SEQ ID NO: 595780 - DNA, 15 bp, Homo sapiens
accgggggaggcggg

SEQ ID NO: 595781 - DNA, 15 bp, Homo sapiens
ccgggggaggcgggt

SEQ ID NO: 595782 - DNA, 15 bp, Homo sapiens
cgggggaggcgggtg

SEQ ID NO: 595783 - DNA, 15 bp, Homo sapiens
gggggaggcgggtgg

SEQ ID NO: 595784 - DNA, 15 bp, Homo sapiens
ggggaggcgggtggc

SEQ ID NO: 595785 - DNA, 15 bp, Homo sapiens
gggaggcgggtggct

SEQ ID NO: 595786 - DNA, 15 bp, Homo sapiens
ggaggcgggtggctc

SEQ ID NO: 595787 - DNA, 15 bp, Homo sapiens
gaggcgggtggctct

SEQ ID NO: 595788 - DNA, 15 bp, Homo sapiens
aggcgggtggctctg

SEQ ID NO: 595789 - DNA, 15 bp, Homo sapiens
ggcgggtggctctgc

SEQ ID NO: 595790 - DNA, 15 bp, Homo sapiens
gcgggtggctctgcg

SEQ ID NO: 595791 - DNA, 15 bp, Homo sapiens
cgggtggctctgcgg

SEQ ID NO: 595792 - DNA, 15 bp, Homo sapiens
gggtggctctgcggg

SEQ ID NO: 595793 - DNA, 15 bp, Homo sapiens
ggtggctctgcgggc

SEQ ID NO: 595794 - DNA, 15 bp, Homo sapiens
gtggctctgcgggct

SEQ ID NO: 595795 - DNA, 15 bp, Homo sapiens
tggctctgcgggctg

SEQ ID NO: 595796 - DNA, 15 bp, Homo sapiens
ggctctgcgggctgc

SEQ ID NO: 595797 - DNA, 15 bp, Homo sapiens
gctctgcgggctgca

SEQ ID NO: 595798 - DNA, 15 bp, Homo sapiens
ctctgcgggctgcag

SEQ ID NO: 595799 - DNA, 15 bp, Homo sapiens
tctgcgggctgcagg

SEQ ID NO: 595800 - DNA, 15 bp, Homo sapiens
ctgcgggctgcaggc

SEQ ID NO: 595801 - DNA, 15 bp, Homo sapiens
tgcgggctgcaggcg

SEQ ID NO: 595802 - DNA, 15 bp, Homo sapiens
gcgggctgcaggcgc

SEQ ID NO: 595803 - DNA, 15 bp, Homo sapiens
cgggctgcaggcgca

SEQ ID NO: 595804 - DNA, 15 bp, Homo sapiens
gggctgcaggcgcag

SEQ ID NO: 595805 - DNA, 15 bp, Homo sapiens
ggctgcaggcgcagt

SEQ ID NO: 595806 - DNA, 15 bp, Homo sapiens
gctgcaggcgcagtg

SEQ ID NO: 595807 - DNA, 15 bp, Homo sapiens
ctgcaggcgcagtgt

SEQ ID NO: 595808 - DNA, 15 bp, Homo sapiens
tgcaggcgcagtgtc

SEQ ID NO: 595809 - DNA, 15 bp, Homo sapiens
gcaggcgcagtgtcc

SEQ ID NO: 595810 - DNA, 15 bp, Homo sapiens
caggcgcagtgtcct

SEQ ID NO: 595811 - DNA, 15 bp, Homo sapiens
aggcgcagtgtcctg

SEQ ID NO: 595812 - DNA, 15 bp, Homo sapiens
ggcgcagtgtcctgg

SEQ ID NO: 595813 - DNA, 15 bp, Homo sapiens
gcgcagtgtcctggt

SEQ ID NO: 595814 - DNA, 15 bp, Homo sapiens
cgcagtgtcctggtg

SEQ ID NO: 595815 - DNA, 15 bp, Homo sapiens
gcagtgtcctggtgg

SEQ ID NO: 595816 - DNA, 15 bp, Homo sapiens
cagtgtcctggtgga

SEQ ID NO: 595817 - DNA, 15 bp, Homo sapiens
agtgtcctggtggag

SEQ ID NO: 595818 - DNA, 15 bp, Homo sapiens
gtgtcctggtggagg

SEQ ID NO: 595819 - DNA, 15 bp, Homo sapiens
tgtcctggtggaggg

SEQ ID NO: 595820 - DNA, 15 bp, Homo sapiens
gtcctggtggagggc

SEQ ID NO: 595821 - DNA, 15 bp, Homo sapiens
tcctggtggagggcc

SEQ ID NO: 595822 - DNA, 15 bp, Homo sapiens
cctggtggagggccc

SEQ ID NO: 595823 - DNA, 15 bp, Homo sapiens
ctggtggagggcccc

SEQ ID NO: 595824 - DNA, 15 bp, Homo sapiens
tggtggagggccccg

SEQ ID NO: 595825 - DNA, 15 bp, Homo sapiens
ggtggagggccccgg

SEQ ID NO: 595826 - DNA, 15 bp, Homo sapiens
gtggagggccccggg

SEQ ID NO: 595827 - DNA, 15 bp, Homo sapiens
tggagggccccggga

SEQ ID NO: 595828 - DNA, 15 bp, Homo sapiens
ggagggccccgggac

SEQ ID NO: 595829 - DNA, 15 bp, Homo sapiens
gagggccccgggact

SEQ ID NO: 595830 - DNA, 15 bp, Homo sapiens
agggccccgggactt

SEQ ID NO: 595831 - DNA, 15 bp, Homo sapiens
gggccccgggacttg

SEQ ID NO: 595832 - DNA, 15 bp, Homo sapiens
ggccccgggacttga

SEQ ID NO: 595833 - DNA, 15 bp, Homo sapiens
gccccgggacttgaa

SEQ ID NO: 595834 - DNA, 15 bp, Homo sapiens
ccccgggacttgaac

SEQ ID NO: 595835 - DNA, 15 bp, Homo sapiens
cccgggacttgaacg

SEQ ID NO: 595836 - DNA, 15 bp, Homo sapiens
ccgggacttgaacga

SEQ ID NO: 595837 - DNA, 15 bp, Homo sapiens
cgggacttgaacgaa

SEQ ID NO: 595838 - DNA, 15 bp, Homo sapiens
gggacttgaacgaaa

SEQ ID NO: 595839 - DNA, 15 bp, Homo sapiens
ggacttgaacgaaac

SEQ ID NO: 595840 - DNA, 15 bp, Homo sapiens
gacttgaacgaaact

SEQ ID NO: 595841 - DNA, 15 bp, Homo sapiens
acttgaacgaaactc

SEQ ID NO: 595842 - DNA, 15 bp, Homo sapiens
cttgaacgaaactcc

SEQ ID NO: 595843 - DNA, 15 bp, Homo sapiens
ttgaacgaaactccg

SEQ ID NO: 595844 - DNA, 15 bp, Homo sapiens
tgaacgaaactccga

SEQ ID NO: 595845 - DNA, 15 bp, Homo sapiens
gaacgaaactccgag

SEQ ID NO: 595846 - DNA, 15 bp, Homo sapiens
aacgaaactccgaga

SEQ ID NO: 595847 - DNA, 15 bp, Homo sapiens
acgaaactccgagac

SEQ ID NO: 595848 - DNA, 15 bp, Homo sapiens
cgaaactccgagacc

SEQ ID NO: 595849 - DNA, 15 bp, Homo sapiens
gaaactccgagaccg

SEQ ID NO: 595850 - DNA, 15 bp, Homo sapiens
aaactccgagaccgc

SEQ ID NO: 595851 - DNA, 15 bp, Homo sapiens
aactccgagaccgct

SEQ ID NO: 595852 - DNA, 15 bp, Homo sapiens
actccgagaccgctg

SEQ ID NO: 595853 - DNA, 15 bp, Homo sapiens
ctccgagaccgctgg

SEQ ID NO: 595854 - DNA, 15 bp, Homo sapiens
tccgagaccgctggc

SEQ ID NO: 595855 - DNA, 15 bp, Homo sapiens
ccgagaccgctggcg

SEQ ID NO: 595856 - DNA, 15 bp, Homo sapiens
cgagaccgctggcgg

SEQ ID NO: 595857 - DNA, 15 bp, Homo sapiens
gagaccgctggcggg

SEQ ID NO: 595858 - DNA, 15 bp, Homo sapiens
agaccgctggcgggg

SEQ ID NO: 595859 - DNA, 15 bp, Homo sapiens
gaccgctggcggggg

SEQ ID NO: 595860 - DNA, 15 bp, Homo sapiens
accgctggcgggggc

SEQ ID NO: 595861 - DNA, 15 bp, Homo sapiens
ccgctggcgggggca

SEQ ID NO: 595862 - DNA, 15 bp, Homo sapiens
cgctggcgggggcat

SEQ ID NO: 595863 - DNA, 15 bp, Homo sapiens
gctggcgggggcatc

SEQ ID NO: 595864 - DNA, 15 bp, Homo sapiens
ctggcgggggcatcc

SEQ ID NO: 595865 - DNA, 15 bp, Homo sapiens
tggcgggggcatccg

SEQ ID NO: 595866 - DNA, 15 bp, Homo sapiens
ggcgggggcatccga

SEQ ID NO: 595867 - DNA, 15 bp, Homo sapiens
gcgggggcatccgaa

SEQ ID NO: 595868 - DNA, 15 bp, Homo sapiens
cgggggcatccgaaa

SEQ ID NO: 595869 - DNA, 15 bp, Homo sapiens
gggggcatccgaaag

SEQ ID NO: 595870 - DNA, 15 bp, Homo sapiens
ggggcatccgaaagc

SEQ ID NO: 595871 - DNA, 15 bp, Homo sapiens
gggcatccgaaagcc

SEQ ID NO: 595872 - DNA, 15 bp, Homo sapiens
ggcatccgaaagcct

SEQ ID NO: 595873 - DNA, 15 bp, Homo sapiens
gcatccgaaagcctc

SEQ ID NO: 595874 - DNA, 15 bp, Homo sapiens
catccgaaagcctcg

SEQ ID NO: 595875 - DNA, 15 bp, Homo sapiens
atccgaaagcctcgg

SEQ ID NO: 595876 - DNA, 15 bp, Homo sapiens
tccgaaagcctcggg

SEQ ID NO: 595877 - DNA, 15 bp, Homo sapiens
ccgaaagcctcgggg

SEQ ID NO: 595878 - DNA, 15 bp, Homo sapiens
cgaaagcctcggggg

SEQ ID NO: 595879 - DNA, 15 bp, Homo sapiens
gaaagcctcgggggg

SEQ ID NO: 595880 - DNA, 15 bp, Homo sapiens
aaagcctcgggggga

SEQ ID NO: 595881 - DNA, 15 bp, Homo sapiens
aagcctcggggggag

SEQ ID NO: 595882 - DNA, 15 bp, Homo sapiens
agcctcggggggagt

SEQ ID NO: 595883 - DNA, 15 bp, Homo sapiens
gcctcggggggagta

SEQ ID NO: 595884 - DNA, 15 bp, Homo sapiens
cctcggggggagtag

SEQ ID NO: 595885 - DNA, 15 bp, Homo sapiens
ctcggggggagtagg

SEQ ID NO: 595886 - DNA, 15 bp, Homo sapiens
tcggggggagtaggg

SEQ ID NO: 595887 - DNA, 15 bp, Homo sapiens
cggggggagtaggga

SEQ ID NO: 595888 - DNA, 15 bp, Homo sapiens
ggggggagtagggac

SEQ ID NO: 595889 - DNA, 15 bp, Homo sapiens
gggggagtagggact

SEQ ID NO: 595890 - DNA, 15 bp, Homo sapiens
ggggagtagggactg

SEQ ID NO: 595891 - DNA, 15 bp, Homo sapiens
gggagtagggactgg

SEQ ID NO: 595892 - DNA, 15 bp, Homo sapiens
ggagtagggactgga

SEQ ID NO: 595893 - DNA, 15 bp, Homo sapiens
gagtagggactggag

SEQ ID NO: 595894 - DNA, 15 bp, Homo sapiens
agtagggactggaga

SEQ ID NO: 595895 - DNA, 15 bp, Homo sapiens
gtagggactggagac

SEQ ID NO: 595896 - DNA, 15 bp, Homo sapiens
tagggactggagact

SEQ ID NO: 595897 - DNA, 15 bp, Homo sapiens
agggactggagactt

SEQ ID NO: 595898 - DNA, 15 bp, Homo sapiens
gggactggagacttg

SEQ ID NO: 595899 - DNA, 15 bp, Homo sapiens
ggactggagacttgg

SEQ ID NO: 595900 - DNA, 15 bp, Homo sapiens
gactggagacttggt

SEQ ID NO: 595901 - DNA, 15 bp, Homo sapiens
actggagacttggtg

SEQ ID NO: 595902 - DNA, 15 bp, Homo sapiens
ctggagacttggtgc

SEQ ID NO: 595903 - DNA, 15 bp, Homo sapiens
tggagacttggtgcc

SEQ ID NO: 595904 - DNA, 15 bp, Homo sapiens
ggagacttggtgccc

SEQ ID NO: 595905 - DNA, 15 bp, Homo sapiens
gagacttggtgcccc

SEQ ID NO: 595906 - DNA, 15 bp, Homo sapiens
agacttggtgcccct

SEQ ID NO: 595907 - DNA, 15 bp, Homo sapiens
gacttggtgcccctg

SEQ ID NO: 595908 - DNA, 15 bp, Homo sapiens
acttggtgcccctgg

SEQ ID NO: 595909 - DNA, 15 bp, Homo sapiens
cttggtgcccctggg

SEQ ID NO: 595910 - DNA, 15 bp, Homo sapiens
ttggtgcccctgggc

SEQ ID NO: 595911 - DNA, 15 bp, Homo sapiens
tggtgcccctgggct

SEQ ID NO: 595912 - DNA, 15 bp, Homo sapiens
ggtgcccctgggctg

SEQ ID NO: 595913 - DNA, 15 bp, Homo sapiens
gtgcccctgggctgg

SEQ ID NO: 595914 - DNA, 15 bp, Homo sapiens
tgcccctgggctgga

SEQ ID NO: 595915 - DNA, 15 bp, Homo sapiens
gcccctgggctggaa

SEQ ID NO: 595916 - DNA, 15 bp, Homo sapiens
cccctgggctggaag

SEQ ID NO: 595917 - DNA, 15 bp, Homo sapiens
ccctgggctggaagg

SEQ ID NO: 595918 - DNA, 15 bp, Homo sapiens
cctgggctggaaggc

SEQ ID NO: 595919 - DNA, 15 bp, Homo sapiens
ctgggctggaaggcc

SEQ ID NO: 595920 - DNA, 15 bp, Homo sapiens
tgggctggaaggccc

SEQ ID NO: 595921 - DNA, 15 bp, Homo sapiens
gggctggaaggccca

SEQ ID NO: 595922 - DNA, 15 bp, Homo sapiens
ggctggaaggcccag

SEQ ID NO: 595923 - DNA, 15 bp, Homo sapiens
gctggaaggcccagg

SEQ ID NO: 595924 - DNA, 15 bp, Homo sapiens
ctggaaggcccaggt

SEQ ID NO: 595925 - DNA, 15 bp, Homo sapiens
tggaaggcccaggtg

SEQ ID NO: 595926 - DNA, 15 bp, Homo sapiens
ggaaggcccaggtga

SEQ ID NO: 595927 - DNA, 15 bp, Homo sapiens
gaaggcccaggtgag

SEQ ID NO: 595928 - DNA, 15 bp, Homo sapiens
aaggcccaggtgagg

SEQ ID NO: 595929 - DNA, 15 bp, Homo sapiens
aggcccaggtgaggg

SEQ ID NO: 595930 - DNA, 15 bp, Homo sapiens
ggcccaggtgagggc

SEQ ID NO: 595931 - DNA, 15 bp, Homo sapiens
gcccaggtgagggct

SEQ ID NO: 595932 - DNA, 15 bp, Homo sapiens
cccaggtgagggctt

SEQ ID NO: 595933 - DNA, 15 bp, Homo sapiens
ccaggtgagggcttg

SEQ ID NO: 595934 - DNA, 15 bp, Homo sapiens
caggtgagggcttgg

SEQ ID NO: 595935 - DNA, 15 bp, Homo sapiens
aggtgagggcttgga

SEQ ID NO: 595936 - DNA, 15 bp, Homo sapiens
ggtgagggcttggac

SEQ ID NO: 595937 - DNA, 15 bp, Homo sapiens
gtgagggcttggact

SEQ ID NO: 595938 - DNA, 15 bp, Homo sapiens
tgagggcttggacta

SEQ ID NO: 595939 - DNA, 15 bp, Homo sapiens
gagggcttggactac

SEQ ID NO: 595940 - DNA, 15 bp, Homo sapiens
agggcttggactaca

SEQ ID NO: 595941 - DNA, 15 bp, Homo sapiens
gggcttggactacag

SEQ ID NO: 595942 - DNA, 15 bp, Homo sapiens
ggcttggactacaga

SEQ ID NO: 595943 - DNA, 15 bp, Homo sapiens
gcttggactacagag

SEQ ID NO: 595944 - DNA, 15 bp, Homo sapiens
cttggactacagagg

SEQ ID NO: 595945 - DNA, 15 bp, Homo sapiens
ttggactacagagga

SEQ ID NO: 595946 - DNA, 15 bp, Homo sapiens
tggactacagaggat

SEQ ID NO: 595947 - DNA, 15 bp, Homo sapiens
ggactacagaggatt

SEQ ID NO: 595948 - DNA, 15 bp, Homo sapiens
gactacagaggattc

SEQ ID NO: 595949 - DNA, 15 bp, Homo sapiens
actacagaggattcc

SEQ ID NO: 595950 - DNA, 15 bp, Homo sapiens
ctacagaggattccc

SEQ ID NO: 595951 - DNA, 15 bp, Homo sapiens
tacagaggattcccc

SEQ ID NO: 595952 - DNA, 15 bp, Homo sapiens
acagaggattccccc

SEQ ID NO: 595953 - DNA, 15 bp, Homo sapiens
cagaggattcccccc

SEQ ID NO: 595954 - DNA, 15 bp, Homo sapiens
agaggattcccccca

SEQ ID NO: 595955 - DNA, 15 bp, Homo sapiens
gaggattccccccaa

SEQ ID NO: 595956 - DNA, 15 bp, Homo sapiens
aggattccccccaac

SEQ ID NO: 595957 - DNA, 15 bp, Homo sapiens
ggattccccccaacc

SEQ ID NO: 595958 - DNA, 15 bp, Homo sapiens
gattccccccaaccc

SEQ ID NO: 595959 - DNA, 15 bp, Homo sapiens
attccccccaacccc

SEQ ID NO: 595960 - DNA, 15 bp, Homo sapiens
ttccccccaacccca

SEQ ID NO: 595961 - DNA, 15 bp, Homo sapiens
tccccccaaccccag

SEQ ID NO: 595962 - DNA, 15 bp, Homo sapiens
ccccccaaccccagc

SEQ ID NO: 595963 - DNA, 15 bp, Homo sapiens
cccccaaccccagcg

SEQ ID NO: 595964 - DNA, 15 bp, Homo sapiens
ccccaaccccagcga

SEQ ID NO: 595965 - DNA, 15 bp, Homo sapiens
cccaaccccagcgag

SEQ ID NO: 595966 - DNA, 15 bp, Homo sapiens
ccaaccccagcgagg

SEQ ID NO: 595967 - DNA, 15 bp, Homo sapiens
caaccccagcgaggc

SEQ ID NO: 595968 - DNA, 15 bp, Homo sapiens
aaccccagcgaggcg

SEQ ID NO: 595969 - DNA, 15 bp, Homo sapiens
accccagcgaggcgc

SEQ ID NO: 595970 - DNA, 15 bp, Homo sapiens
ccccagcgaggcgcc

SEQ ID NO: 595971 - DNA, 15 bp, Homo sapiens
cccagcgaggcgccc

SEQ ID NO: 595972 - DNA, 15 bp, Homo sapiens
ccagcgaggcgccct

SEQ ID NO: 595973 - DNA, 15 bp, Homo sapiens
cagcgaggcgccctc

SEQ ID NO: 595974 - DNA, 15 bp, Homo sapiens
agcgaggcgccctct

SEQ ID NO: 595975 - DNA, 15 bp, Homo sapiens
gcgaggcgccctctt

SEQ ID NO: 595976 - DNA, 15 bp, Homo sapiens
cgaggcgccctcttc

SEQ ID NO: 595977 - DNA, 15 bp, Homo sapiens
gaggcgccctcttcc

SEQ ID NO: 595978 - DNA, 15 bp, Homo sapiens
aggcgccctcttcct

SEQ ID NO: 595979 - DNA, 15 bp, Homo sapiens
ggcgccctcttcctc

SEQ ID NO: 595980 - DNA, 15 bp, Homo sapiens
gcgccctcttcctcg

SEQ ID NO: 595981 - DNA, 15 bp, Homo sapiens
cgccctcttcctcgc

SEQ ID NO: 595982 - DNA, 15 bp, Homo sapiens
gccctcttcctcgcc

SEQ ID NO: 595983 - DNA, 15 bp, Homo sapiens
ccctcttcctcgcca

SEQ ID NO: 595984 - DNA, 15 bp, Homo sapiens
cctcttcctcgccac

SEQ ID NO: 595985 - DNA, 15 bp, Homo sapiens
ctcttcctcgccacc

SEQ ID NO: 595986 - DNA, 15 bp, Homo sapiens
tcttcctcgccaccc

SEQ ID NO: 595987 - DNA, 15 bp, Homo sapiens
cttcctcgccacccg

SEQ ID NO: 595988 - DNA, 15 bp, Homo sapiens
ttcctcgccacccgg

SEQ ID NO: 595989 - DNA, 15 bp, Homo sapiens
tcctcgccacccggg

SEQ ID NO: 595990 - DNA, 15 bp, Homo sapiens
cctcgccacccgggt

SEQ ID NO: 595991 - DNA, 15 bp, Homo sapiens
ctcgccacccgggtc

SEQ ID NO: 595992 - DNA, 15 bp, Homo sapiens
tcgccacccgggtcc

SEQ ID NO: 595993 - DNA, 15 bp, Homo sapiens
cgccacccgggtccc

SEQ ID NO: 595994 - DNA, 15 bp, Homo sapiens
gccacccgggtccct

SEQ ID NO: 595995 - DNA, 15 bp, Homo sapiens
ccacccgggtccctc

SEQ ID NO: 595996 - DNA, 15 bp, Homo sapiens
cacccgggtccctct

SEQ ID NO: 595997 - DNA, 15 bp, Homo sapiens
acccgggtccctctg

SEQ ID NO: 595998 - DNA, 15 bp, Homo sapiens
cccgggtccctctgc

SEQ ID NO: 595999 - DNA, 15 bp, Homo sapiens
ccgggtccctctgcc

SEQ ID NO: 596000 - DNA, 15 bp, Homo sapiens
cgggtccctctgccc

SEQ ID NO: 596001 - DNA, 15 bp, Homo sapiens
gggtccctctgcccg

SEQ ID NO: 596002 - DNA, 15 bp, Homo sapiens
ggtccctctgcccgg

SEQ ID NO: 596003 - DNA, 15 bp, Homo sapiens
gtccctctgcccggg

SEQ ID NO: 596004 - DNA, 15 bp, Homo sapiens
tccctctgcccgggc

SEQ ID NO: 596005 - DNA, 15 bp, Homo sapiens
ccctctgcccgggca

SEQ ID NO: 596006 - DNA, 15 bp, Homo sapiens
cctctgcccgggcac

SEQ ID NO: 596007 - DNA, 15 bp, Homo sapiens
ctctgcccgggcacc

SEQ ID NO: 596008 - DNA, 15 bp, Homo sapiens
tctgcccgggcaccc

SEQ ID NO: 596009 - DNA, 15 bp, Homo sapiens
ctgcccgggcacccg

SEQ ID NO: 596010 - DNA, 15 bp, Homo sapiens
tgcccgggcacccgc

SEQ ID NO: 596011 - DNA, 15 bp, Homo sapiens
gcccgggcacccgct

SEQ ID NO: 596012 - DNA, 15 bp, Homo sapiens
cccgggcacccgctg

SEQ ID NO: 596013 - DNA, 15 bp, Homo sapiens
ccgggcacccgctgc

SEQ ID NO: 596014 - DNA, 15 bp, Homo sapiens
cgggcacccgctgcc

SEQ ID NO: 596015 - DNA, 15 bp, Homo sapiens
gggcacccgctgccc

SEQ ID NO: 596016 - DNA, 15 bp, Homo sapiens
ggcacccgctgcccc

SEQ ID NO: 596017 - DNA, 15 bp, Homo sapiens
gcacccgctgccccg

SEQ ID NO: 596018 - DNA, 15 bp, Homo sapiens
cacccgctgccccgc

SEQ ID NO: 596019 - DNA, 15 bp, Homo sapiens
acccgctgccccgcg

SEQ ID NO: 596020 - DNA, 15 bp, Homo sapiens
cccgctgccccgcgg

SEQ ID NO: 596021 - DNA, 15 bp, Homo sapiens
ccgctgccccgcggc

SEQ ID NO: 596022 - DNA, 15 bp, Homo sapiens
cgctgccccgcggcc

SEQ ID NO: 596023 - DNA, 15 bp, Homo sapiens
gctgccccgcggccg

SEQ ID NO: 596024 - DNA, 15 bp, Homo sapiens
ctgccccgcggccgc

SEQ ID NO: 596025 - DNA, 15 bp, Homo sapiens
tgccccgcggccgcc

SEQ ID NO: 596026 - DNA, 15 bp, Homo sapiens
gccccgcggccgccc

SEQ ID NO: 596027 - DNA, 15 bp, Homo sapiens
ccccgcggccgccct

SEQ ID NO: 596028 - DNA, 15 bp, Homo sapiens
cccgcggccgccctg

SEQ ID NO: 596029 - DNA, 15 bp, Homo sapiens
ccgcggccgccctgc

SEQ ID NO: 596030 - DNA, 15 bp, Homo sapiens
cgcggccgccctgcg

SEQ ID NO: 596031 - DNA, 15 bp, Homo sapiens
gcggccgccctgcgc

SEQ ID NO: 596032 - DNA, 15 bp, Homo sapiens
cggccgccctgcgct

SEQ ID NO: 596033 - DNA, 15 bp, Homo sapiens
ggccgccctgcgctg

SEQ ID NO: 596034 - DNA, 15 bp, Homo sapiens
gccgccctgcgctga

SEQ ID NO: 596035 - DNA, 15 bp, Homo sapiens
ccgccctgcgctgac

SEQ ID NO: 596036 - DNA, 15 bp, Homo sapiens
cgccctgcgctgact

SEQ ID NO: 596037 - DNA, 15 bp, Homo sapiens
gccctgcgctgactt

SEQ ID NO: 596038 - DNA, 15 bp, Homo sapiens
ccctgcgctgacttc

SEQ ID NO: 596039 - DNA, 15 bp, Homo sapiens
cctgcgctgacttct

SEQ ID NO: 596040 - DNA, 15 bp, Homo sapiens
ctgcgctgacttctg

SEQ ID NO: 596041 - DNA, 15 bp, Homo sapiens
tgcgctgacttctgc

SEQ ID NO: 596042 - DNA, 15 bp, Homo sapiens
gcgctgacttctgct

SEQ ID NO: 596043 - DNA, 15 bp, Homo sapiens
cgctgacttctgctc

SEQ ID NO: 596044 - DNA, 15 bp, Homo sapiens
gctgacttctgctcc

SEQ ID NO: 596045 - DNA, 15 bp, Homo sapiens
ctgacttctgctccg

SEQ ID NO: 596046 - DNA, 15 bp, Homo sapiens
tgacttctgctccgc

SEQ ID NO: 596047 - DNA, 15 bp, Homo sapiens
gacttctgctccgct

SEQ ID NO: 596048 - DNA, 15 bp, Homo sapiens
acttctgctccgctt

SEQ ID NO: 596049 - DNA, 15 bp, Homo sapiens
cttctgctccgcttc

SEQ ID NO: 596050 - DNA, 15 bp, Homo sapiens
ttctgctccgcttct

SEQ ID NO: 596051 - DNA, 15 bp, Homo sapiens
tctgctccgcttctc

SEQ ID NO: 596052 - DNA, 15 bp, Homo sapiens
ctgctccgcttctcc

SEQ ID NO: 596053 - DNA, 15 bp, Homo sapiens
tgctccgcttctcct

SEQ ID NO: 596054 - DNA, 15 bp, Homo sapiens
gctccgcttctcctt

SEQ ID NO: 596055 - DNA, 15 bp, Homo sapiens
ctccgcttctccttt

SEQ ID NO: 596056 - DNA, 15 bp, Homo sapiens
tccgcttctcctttg

SEQ ID NO: 596057 - DNA, 15 bp, Homo sapiens
ccgcttctcctttgt

SEQ ID NO: 596058 - DNA, 15 bp, Homo sapiens
cgcttctcctttgtc

SEQ ID NO: 596059 - DNA, 15 bp, Homo sapiens
gcttctcctttgtcc

SEQ ID NO: 596060 - DNA, 15 bp, Homo sapiens
cttctcctttgtccc

SEQ ID NO: 596061 - DNA, 15 bp, Homo sapiens
ttctcctttgtcccc

SEQ ID NO: 596062 - DNA, 15 bp, Homo sapiens
tctcctttgtcccca

SEQ ID NO: 596063 - DNA, 15 bp, Homo sapiens
ctcctttgtccccag

SEQ ID NO: 596064 - DNA, 15 bp, Homo sapiens
tcctttgtccccagc

SEQ ID NO: 596065 - DNA, 15 bp, Homo sapiens
cctttgtccccagca

SEQ ID NO: 596066 - DNA, 15 bp, Homo sapiens
ctttgtccccagcac

SEQ ID NO: 596067 - DNA, 15 bp, Homo sapiens
tttgtccccagcact

SEQ ID NO: 596068 - DNA, 15 bp, Homo sapiens
ttgtccccagcactt

SEQ ID NO: 596069 - DNA, 15 bp, Homo sapiens
tgtccccagcacttt

SEQ ID NO: 596070 - DNA, 15 bp, Homo sapiens
gtccccagcactttc

SEQ ID NO: 596071 - DNA, 15 bp, Homo sapiens
tccccagcactttcc

SEQ ID NO: 596072 - DNA, 15 bp, Homo sapiens
ccccagcactttccc

SEQ ID NO: 596073 - DNA, 15 bp, Homo sapiens
cccagcactttccca

SEQ ID NO: 596074 - DNA, 15 bp, Homo sapiens
ccagcactttcccaa

SEQ ID NO: 596075 - DNA, 15 bp, Homo sapiens
cagcactttcccaac

SEQ ID NO: 596076 - DNA, 15 bp, Homo sapiens
agcactttcccaact

SEQ ID NO: 596077 - DNA, 15 bp, Homo sapiens
gcactttcccaactc

SEQ ID NO: 596078 - DNA, 15 bp, Homo sapiens
cactttcccaactcc

SEQ ID NO: 596079 - DNA, 15 bp, Homo sapiens
actttcccaactcct

SEQ ID NO: 596080 - DNA, 15 bp, Homo sapiens
ctttcccaactcctt

SEQ ID NO: 596081 - DNA, 15 bp, Homo sapiens
tttcccaactccttc

SEQ ID NO: 596082 - DNA, 15 bp, Homo sapiens
ttcccaactccttct

SEQ ID NO: 596083 - DNA, 15 bp, Homo sapiens
tcccaactccttcta

SEQ ID NO: 596084 - DNA, 15 bp, Homo sapiens
cccaactccttctaa

SEQ ID NO: 596085 - DNA, 15 bp, Homo sapiens
ccaactccttctaaa

SEQ ID NO: 596086 - DNA, 15 bp, Homo sapiens
caactccttctaaac

SEQ ID NO: 596087 - DNA, 15 bp, Homo sapiens
aactccttctaaacc

SEQ ID NO: 596088 - DNA, 15 bp, Homo sapiens
actccttctaaaccg

SEQ ID NO: 596089 - DNA, 15 bp, Homo sapiens
ctccttctaaaccgt

SEQ ID NO: 596090 - DNA, 15 bp, Homo sapiens
tccttctaaaccgtg

SEQ ID NO: 596091 - DNA, 15 bp, Homo sapiens
ccttctaaaccgtgt

SEQ ID NO: 596092 - DNA, 15 bp, Homo sapiens
cttctaaaccgtgtc

SEQ ID NO: 596093 - DNA, 15 bp, Homo sapiens
ttctaaaccgtgtca

SEQ ID NO: 596094 - DNA, 15 bp, Homo sapiens
tctaaaccgtgtcag

SEQ ID NO: 596095 - DNA, 15 bp, Homo sapiens
ctaaaccgtgtcagc

SEQ ID NO: 596096 - DNA, 15 bp, Homo sapiens
taaaccgtgtcagcg

SEQ ID NO: 596097 - DNA, 15 bp, Homo sapiens
aaaccgtgtcagcgg

SEQ ID NO: 596098 - DNA, 15 bp, Homo sapiens
aaccgtgtcagcggc

SEQ ID NO: 596099 - DNA, 15 bp, Homo sapiens
accgtgtcagcggcc

SEQ ID NO: 596100 - DNA, 15 bp, Homo sapiens
ccgtgtcagcggccc

SEQ ID NO: 596101 - DNA, 15 bp, Homo sapiens
cgtgtcagcggccct

SEQ ID NO: 596102 - DNA, 15 bp, Homo sapiens
gtgtcagcggccctg

SEQ ID NO: 596103 - DNA, 15 bp, Homo sapiens
tgtcagcggccctgg

SEQ ID NO: 596104 - DNA, 15 bp, Homo sapiens
gtcagcggccctggc

SEQ ID NO: 596105 - DNA, 15 bp, Homo sapiens
tcagcggccctggca

SEQ ID NO: 596106 - DNA, 15 bp, Homo sapiens
cagcggccctggcac

SEQ ID NO: 596107 - DNA, 15 bp, Homo sapiens
agcggccctggcaca

SEQ ID NO: 596108 - DNA, 15 bp, Homo sapiens
gcggccctggcacag

SEQ ID NO: 596109 - DNA, 15 bp, Homo sapiens
cggccctggcacagc

SEQ ID NO: 596110 - DNA, 15 bp, Homo sapiens
ggccctggcacagcc

SEQ ID NO: 596111 - DNA, 15 bp, Homo sapiens
gccctggcacagccc

SEQ ID NO: 596112 - DNA, 15 bp, Homo sapiens
ccctggcacagcccg

SEQ ID NO: 596113 - DNA, 15 bp, Homo sapiens
cctggcacagcccgg

SEQ ID NO: 596114 - DNA, 15 bp, Homo sapiens
ctggcacagcccggc

SEQ ID NO: 596115 - DNA, 15 bp, Homo sapiens
tggcacagcccggca

SEQ ID NO: 596116 - DNA, 15 bp, Homo sapiens
ggcacagcccggcat

SEQ ID NO: 596117 - DNA, 15 bp, Homo sapiens
gcacagcccggcatc

SEQ ID NO: 596118 - DNA, 15 bp, Homo sapiens
cacagcccggcatcc

SEQ ID NO: 596119 - DNA, 15 bp, Homo sapiens
acagcccggcatcct

SEQ ID NO: 596120 - DNA, 15 bp, Homo sapiens
cagcccggcatcctc

SEQ ID NO: 596121 - DNA, 15 bp, Homo sapiens
agcccggcatcctcc

SEQ ID NO: 596122 - DNA, 15 bp, Homo sapiens
gcccggcatcctccc

SEQ ID NO: 596123 - DNA, 15 bp, Homo sapiens
cccggcatcctcccg

SEQ ID NO: 596124 - DNA, 15 bp, Homo sapiens
ccggcatcctcccgg

SEQ ID NO: 596125 - DNA, 15 bp, Homo sapiens
cggcatcctcccgga

SEQ ID NO: 596126 - DNA, 15 bp, Homo sapiens
ggcatcctcccggac

SEQ ID NO: 596127 - DNA, 15 bp, Homo sapiens
gcatcctcccggact

SEQ ID NO: 596128 - DNA, 15 bp, Homo sapiens
catcctcccggactc

SEQ ID NO: 596129 - DNA, 15 bp, Homo sapiens
atcctcccggactcc

SEQ ID NO: 596130 - DNA, 15 bp, Homo sapiens
tcctcccggactccc

SEQ ID NO: 596131 - DNA, 15 bp, Homo sapiens
cctcccggactccct

SEQ ID NO: 596132 - DNA, 15 bp, Homo sapiens
ctcccggactccctc

SEQ ID NO: 596133 - DNA, 15 bp, Homo sapiens
tcccggactccctct

SEQ ID NO: 596134 - DNA, 15 bp, Homo sapiens
cccggactccctctg

SEQ ID NO: 596135 - DNA, 15 bp, Homo sapiens
ccggactccctctgc

SEQ ID NO: 596136 - DNA, 15 bp, Homo sapiens
cggactccctctgcc

SEQ ID NO: 596137 - DNA, 15 bp, Homo sapiens
ggactccctctgccc

SEQ ID NO: 596138 - DNA, 15 bp, Homo sapiens
gactccctctgcccc

SEQ ID NO: 596139 - DNA, 15 bp, Homo sapiens
actccctctgcccca

SEQ ID NO: 596140 - DNA, 15 bp, Homo sapiens
ctccctctgccccac

SEQ ID NO: 596141 - DNA, 15 bp, Homo sapiens
tccctctgccccaca

SEQ ID NO: 596142 - DNA, 15 bp, Homo sapiens
ccctctgccccacag

SEQ ID NO: 596143 - DNA, 15 bp, Homo sapiens
cctctgccccacagt

SEQ ID NO: 596144 - DNA, 15 bp, Homo sapiens
ctctgccccacagtc

SEQ ID NO: 596145 - DNA, 15 bp, Homo sapiens
tctgccccacagtct

SEQ ID NO: 596146 - DNA, 15 bp, Homo sapiens
ctgccccacagtctg

SEQ ID NO: 596147 - DNA, 15 bp, Homo sapiens
tgccccacagtctga

SEQ ID NO: 596148 - DNA, 15 bp, Homo sapiens
gccccacagtctgac

SEQ ID NO: 596149 - DNA, 15 bp, Homo sapiens
ccccacagtctgacc

SEQ ID NO: 596150 - DNA, 15 bp, Homo sapiens
cccacagtctgaccc

SEQ ID NO: 596151 - DNA, 15 bp, Homo sapiens
ccacagtctgaccca

SEQ ID NO: 596152 - DNA, 15 bp, Homo sapiens
cacagtctgacccag

SEQ ID NO: 596153 - DNA, 15 bp, Homo sapiens
acagtctgacccaga

SEQ ID NO: 596154 - DNA, 15 bp, Homo sapiens
cagtctgacccagac

SEQ ID NO: 596155 - DNA, 15 bp, Homo sapiens
agtctgacccagacc

SEQ ID NO: 596156 - DNA, 15 bp, Homo sapiens
gtctgacccagaccc

SEQ ID NO: 596157 - DNA, 15 bp, Homo sapiens
tctgacccagacccc

SEQ ID NO: 596158 - DNA, 15 bp, Homo sapiens
ctgacccagacccct

SEQ ID NO: 596159 - DNA, 15 bp, Homo sapiens
tgacccagacccctc

SEQ ID NO: 596160 - DNA, 15 bp, Homo sapiens
gacccagacccctct

SEQ ID NO: 596161 - DNA, 15 bp, Homo sapiens
acccagacccctctc

SEQ ID NO: 596162 - DNA, 15 bp, Homo sapiens
cccagacccctctcc

SEQ ID NO: 596163 - DNA, 15 bp, Homo sapiens
ccagacccctctccc

SEQ ID NO: 596164 - DNA, 15 bp, Homo sapiens
cagacccctctcccg

SEQ ID NO: 596165 - DNA, 15 bp, Homo sapiens
agacccctctcccgc

SEQ ID NO: 596166 - DNA, 15 bp, Homo sapiens
gacccctctcccgca

SEQ ID NO: 596167 - DNA, 15 bp, Homo sapiens
acccctctcccgcag

SEQ ID NO: 596168 - DNA, 15 bp, Homo sapiens
cccctctcccgcagt

SEQ ID NO: 596169 - DNA, 15 bp, Homo sapiens
ccctctcccgcagtg

SEQ ID NO: 596170 - DNA, 15 bp, Homo sapiens
cctctcccgcagtgc

SEQ ID NO: 596171 - DNA, 15 bp, Homo sapiens
ctctcccgcagtgcc

SEQ ID NO: 596172 - DNA, 15 bp, Homo sapiens
tctcccgcagtgcct

SEQ ID NO: 596173 - DNA, 15 bp, Homo sapiens
ctcccgcagtgcctc

SEQ ID NO: 596174 - DNA, 15 bp, Homo sapiens
tcccgcagtgcctcc

SEQ ID NO: 596175 - DNA, 15 bp, Homo sapiens
cccgcagtgcctccc

SEQ ID NO: 596176 - DNA, 15 bp, Homo sapiens
ccgcagtgcctcccc

SEQ ID NO: 596177 - DNA, 15 bp, Homo sapiens
cgcagtgcctcccca

SEQ ID NO: 596178 - DNA, 15 bp, Homo sapiens
gcagtgcctccccag

SEQ ID NO: 596179 - DNA, 15 bp, Homo sapiens
cagtgcctccccaga

SEQ ID NO: 596180 - DNA, 15 bp, Homo sapiens
agtgcctccccagac

SEQ ID NO: 596181 - DNA, 15 bp, Homo sapiens
gtgcctccccagaca

SEQ ID NO: 596182 - DNA, 15 bp, Homo sapiens
tgcctccccagacaa

SEQ ID NO: 596183 - DNA, 15 bp, Homo sapiens
gcctccccagacaat

SEQ ID NO: 596184 - DNA, 15 bp, Homo sapiens
cctccccagacaatc

SEQ ID NO: 596185 - DNA, 15 bp, Homo sapiens
ctccccagacaatcc

SEQ ID NO: 596186 - DNA, 15 bp, Homo sapiens
tccccagacaatcca

SEQ ID NO: 596187 - DNA, 15 bp, Homo sapiens
ccccagacaatccac

SEQ ID NO: 596188 - DNA, 15 bp, Homo sapiens
cccagacaatccacc

SEQ ID NO: 596189 - DNA, 15 bp, Homo sapiens
ccagacaatccacct

SEQ ID NO: 596190 - DNA, 15 bp, Homo sapiens
cagacaatccacctg

SEQ ID NO: 596191 - DNA, 15 bp, Homo sapiens
agacaatccacctgc

SEQ ID NO: 596192 - DNA, 15 bp, Homo sapiens
gacaatccacctgct

SEQ ID NO: 596193 - DNA, 15 bp, Homo sapiens
acaatccacctgctc

SEQ ID NO: 596194 - DNA, 15 bp, Homo sapiens
caatccacctgctca

SEQ ID NO: 596195 - DNA, 15 bp, Homo sapiens
aatccacctgctcaa

SEQ ID NO: 596196 - DNA, 15 bp, Homo sapiens
atccacctgctcaaa

SEQ ID NO: 596197 - DNA, 15 bp, Homo sapiens
tccacctgctcaaag

SEQ ID NO: 596198 - DNA, 15 bp, Homo sapiens
ccacctgctcaaaga

SEQ ID NO: 596199 - DNA, 15 bp, Homo sapiens
cacctgctcaaagac

SEQ ID NO: 596200 - DNA, 15 bp, Homo sapiens
acctgctcaaagacc

SEQ ID NO: 596201 - DNA, 15 bp, Homo sapiens
cctgctcaaagaccc

SEQ ID NO: 596202 - DNA, 15 bp, Homo sapiens
ctgctcaaagaccct

SEQ ID NO: 596203 - DNA, 15 bp, Homo sapiens
tgctcaaagaccctg

SEQ ID NO: 596204 - DNA, 15 bp, Homo sapiens
gctcaaagaccctga

SEQ ID NO: 596205 - DNA, 15 bp, Homo sapiens
ctcaaagaccctgag

SEQ ID NO: 596206 - DNA, 15 bp, Homo sapiens
tcaaagaccctgaga

SEQ ID NO: 596207 - DNA, 15 bp, Homo sapiens
caaagaccctgagaa

SEQ ID NO: 596208 - DNA, 15 bp, Homo sapiens
aaagaccctgagaag

SEQ ID NO: 596209 - DNA, 15 bp, Homo sapiens
aagaccctgagaaga

SEQ ID NO: 596210 - DNA, 15 bp, Homo sapiens
agaccctgagaagac

SEQ ID NO: 596211 - DNA, 15 bp, Homo sapiens
gaccctgagaagacc

SEQ ID NO: 596212 - DNA, 15 bp, Homo sapiens
accctgagaagaccc

SEQ ID NO: 596213 - DNA, 15 bp, Homo sapiens
ccctgagaagaccct

SEQ ID NO: 596214 - DNA, 15 bp, Homo sapiens
cctgagaagaccctg

SEQ ID NO: 596215 - DNA, 15 bp, Homo sapiens
ctgagaagaccctgg

SEQ ID NO: 596216 - DNA, 15 bp, Homo sapiens
tgagaagaccctggg

SEQ ID NO: 596217 - DNA, 15 bp, Homo sapiens
gagaagaccctggga

SEQ ID NO: 596218 - DNA, 15 bp, Homo sapiens
agaagaccctgggag

SEQ ID NO: 596219 - DNA, 15 bp, Homo sapiens
gaagaccctgggagg

SEQ ID NO: 596220 - DNA, 15 bp, Homo sapiens
aagaccctgggagga

SEQ ID NO: 596221 - DNA, 15 bp, Homo sapiens
agaccctgggaggag

SEQ ID NO: 596222 - DNA, 15 bp, Homo sapiens
gaccctgggaggagc

SEQ ID NO: 596223 - DNA, 15 bp, Homo sapiens
accctgggaggagct

SEQ ID NO: 596224 - DNA, 15 bp, Homo sapiens
ccctgggaggagctg

SEQ ID NO: 596225 - DNA, 15 bp, Homo sapiens
cctgggaggagctga

SEQ ID NO: 596226 - DNA, 15 bp, Homo sapiens
ctgggaggagctgag

SEQ ID NO: 596227 - DNA, 15 bp, Homo sapiens
tgggaggagctgaga

SEQ ID NO: 596228 - DNA, 15 bp, Homo sapiens
gggaggagctgagag

SEQ ID NO: 596229 - DNA, 15 bp, Homo sapiens
ggaggagctgagagg

SEQ ID NO: 596230 - DNA, 15 bp, Homo sapiens
gaggagctgagaggg

SEQ ID NO: 596231 - DNA, 15 bp, Homo sapiens
aggagctgagagggc

SEQ ID NO: 596232 - DNA, 15 bp, Homo sapiens
ggagctgagagggcc

SEQ ID NO: 596233 - DNA, 15 bp, Homo sapiens
gagctgagagggcca

SEQ ID NO: 596234 - DNA, 15 bp, Homo sapiens
agctgagagggccag

SEQ ID NO: 596235 - DNA, 15 bp, Homo sapiens
gctgagagggccagg

SEQ ID NO: 596236 - DNA, 15 bp, Homo sapiens
ctgagagggccaggg

SEQ ID NO: 596237 - DNA, 15 bp, Homo sapiens
tgagagggccagggt

SEQ ID NO: 596238 - DNA, 15 bp, Homo sapiens
gagagggccagggtg

SEQ ID NO: 596239 - DNA, 15 bp, Homo sapiens
agagggccagggtgc

SEQ ID NO: 596240 - DNA, 15 bp, Homo sapiens
gagggccagggtgcg

SEQ ID NO: 596241 - DNA, 15 bp, Homo sapiens
agggccagggtgcgg

SEQ ID NO: 596242 - DNA, 15 bp, Homo sapiens
gggccagggtgcgga

SEQ ID NO: 596243 - DNA, 15 bp, Homo sapiens
ggccagggtgcggag

SEQ ID NO: 596244 - DNA, 15 bp, Homo sapiens
gccagggtgcggaga

SEQ ID NO: 596245 - DNA, 15 bp, Homo sapiens
ccagggtgcggagac

SEQ ID NO: 596246 - DNA, 15 bp, Homo sapiens
cagggtgcggagacc

SEQ ID NO: 596247 - DNA, 15 bp, Homo sapiens
agggtgcggagaccc

SEQ ID NO: 596248 - DNA, 15 bp, Homo sapiens
gggtgcggagacccg

SEQ ID NO: 596249 - DNA, 15 bp, Homo sapiens
ggtgcggagacccgg

SEQ ID NO: 596250 - DNA, 15 bp, Homo sapiens
gtgcggagacccggc

SEQ ID NO: 596251 - DNA, 15 bp, Homo sapiens
tgcggagacccggct

SEQ ID NO: 596252 - DNA, 15 bp, Homo sapiens
gcggagacccggctc

SEQ ID NO: 596253 - DNA, 15 bp, Homo sapiens
cggagacccggctcc

SEQ ID NO: 596254 - DNA, 15 bp, Homo sapiens
ggagacccggctcct

SEQ ID NO: 596255 - DNA, 15 bp, Homo sapiens
gagacccggctcctc

SEQ ID NO: 596256 - DNA, 15 bp, Homo sapiens
agacccggctcctct

SEQ ID NO: 596257 - DNA, 15 bp, Homo sapiens
gacccggctcctctc

SEQ ID NO: 596258 - DNA, 15 bp, Homo sapiens
acccggctcctctcc

SEQ ID NO: 596259 - DNA, 15 bp, Homo sapiens
cccggctcctctccc

SEQ ID NO: 596260 - DNA, 15 bp, Homo sapiens
ccggctcctctccct

SEQ ID NO: 596261 - DNA, 15 bp, Homo sapiens
cggctcctctccctt

SEQ ID NO: 596262 - DNA, 15 bp, Homo sapiens
ggctcctctcccttt

SEQ ID NO: 596263 - DNA, 15 bp, Homo sapiens
gctcctctccctttc

SEQ ID NO: 596264 - DNA, 15 bp, Homo sapiens
ctcctctccctttct

SEQ ID NO: 596265 - DNA, 15 bp, Homo sapiens
tcctctccctttctc

SEQ ID NO: 596266 - DNA, 15 bp, Homo sapiens
cctctccctttctca

SEQ ID NO: 596267 - DNA, 15 bp, Homo sapiens
ctctccctttctcat

SEQ ID NO: 596268 - DNA, 15 bp, Homo sapiens
tctccctttctcatc

SEQ ID NO: 596269 - DNA, 15 bp, Homo sapiens
ctccctttctcatca

SEQ ID NO: 596270 - DNA, 15 bp, Homo sapiens
tccctttctcatcag

SEQ ID NO: 596271 - DNA, 15 bp, Homo sapiens
ccctttctcatcagc

SEQ ID NO: 596272 - DNA, 15 bp, Homo sapiens
cctttctcatcagcc

SEQ ID NO: 596273 - DNA, 15 bp, Homo sapiens
ctttctcatcagccc

SEQ ID NO: 596274 - DNA, 15 bp, Homo sapiens
tttctcatcagcccc

SEQ ID NO: 596275 - DNA, 15 bp, Homo sapiens
ttctcatcagccccc

SEQ ID NO: 596276 - DNA, 15 bp, Homo sapiens
tctcatcagccccca

SEQ ID NO: 596277 - DNA, 15 bp, Homo sapiens
ctcatcagcccccag

SEQ ID NO: 596278 - DNA, 15 bp, Homo sapiens
tcatcagcccccagc

SEQ ID NO: 596279 - DNA, 15 bp, Homo sapiens
catcagcccccagca

SEQ ID NO: 596280 - DNA, 15 bp, Homo sapiens
atcagcccccagcac

SEQ ID NO: 596281 - DNA, 15 bp, Homo sapiens
tcagcccccagcaca

SEQ ID NO: 596282 - DNA, 15 bp, Homo sapiens
cagcccccagcacag

SEQ ID NO: 596283 - DNA, 15 bp, Homo sapiens
agcccccagcacagc

SEQ ID NO: 596284 - DNA, 15 bp, Homo sapiens
gcccccagcacagcc

SEQ ID NO: 596285 - DNA, 15 bp, Homo sapiens
cccccagcacagcct

SEQ ID NO: 596286 - DNA, 15 bp, Homo sapiens
ccccagcacagcctt

SEQ ID NO: 596287 - DNA, 15 bp, Homo sapiens
cccagcacagccttt

SEQ ID NO: 596288 - DNA, 15 bp, Homo sapiens
ccagcacagcctttg

SEQ ID NO: 596289 - DNA, 15 bp, Homo sapiens
cagcacagcctttga

SEQ ID NO: 596290 - DNA, 15 bp, Homo sapiens
agcacagcctttgat

SEQ ID NO: 596291 - DNA, 15 bp, Homo sapiens
gcacagcctttgatt

SEQ ID NO: 596292 - DNA, 15 bp, Homo sapiens
cacagcctttgattc

SEQ ID NO: 596293 - DNA, 15 bp, Homo sapiens
acagcctttgattca

SEQ ID NO: 596294 - DNA, 15 bp, Homo sapiens
cagcctttgattcat

SEQ ID NO: 596295 - DNA, 15 bp, Homo sapiens
agcctttgattcatg

SEQ ID NO: 596296 - DNA, 15 bp, Homo sapiens
gcctttgattcatgg

SEQ ID NO: 596297 - DNA, 15 bp, Homo sapiens
cctttgattcatggc

SEQ ID NO: 596298 - DNA, 15 bp, Homo sapiens
ctttgattcatggct

SEQ ID NO: 596299 - DNA, 15 bp, Homo sapiens
tttgattcatggctc

SEQ ID NO: 596300 - DNA, 15 bp, Homo sapiens
ttgattcatggctcc

SEQ ID NO: 596301 - DNA, 15 bp, Homo sapiens
tgattcatggctcct

SEQ ID NO: 596302 - DNA, 15 bp, Homo sapiens
gattcatggctcctg

SEQ ID NO: 596303 - DNA, 15 bp, Homo sapiens
attcatggctcctgg

SEQ ID NO: 596304 - DNA, 15 bp, Homo sapiens
ttcatggctcctggg

SEQ ID NO: 596305 - DNA, 15 bp, Homo sapiens
tcatggctcctgggg

SEQ ID NO: 596306 - DNA, 15 bp, Homo sapiens
catggctcctggggc

SEQ ID NO: 596307 - DNA, 15 bp, Homo sapiens
atggctcctggggcc

SEQ ID NO: 596308 - DNA, 15 bp, Homo sapiens
tggctcctggggccc

SEQ ID NO: 596309 - DNA, 15 bp, Homo sapiens
ggctcctggggccct

SEQ ID NO: 596310 - DNA, 15 bp, Homo sapiens
gctcctggggccctg

SEQ ID NO: 596311 - DNA, 15 bp, Homo sapiens
ctcctggggccctgc

SEQ ID NO: 596312 - DNA, 15 bp, Homo sapiens
tcctggggccctgcg

SEQ ID NO: 596313 - DNA, 15 bp, Homo sapiens
cctggggccctgcgg

SEQ ID NO: 596314 - DNA, 15 bp, Homo sapiens
ctggggccctgcggt

SEQ ID NO: 596315 - DNA, 15 bp, Homo sapiens
tggggccctgcggtg

SEQ ID NO: 596316 - DNA, 15 bp, Homo sapiens
ggggccctgcggtgg

SEQ ID NO: 596317 - DNA, 15 bp, Homo sapiens
gggccctgcggtggc

SEQ ID NO: 596318 - DNA, 15 bp, Homo sapiens
ggccctgcggtggca

SEQ ID NO: 596319 - DNA, 15 bp, Homo sapiens
gccctgcggtggcag

SEQ ID NO: 596320 - DNA, 15 bp, Homo sapiens
ccctgcggtggcagc

SEQ ID NO: 596321 - DNA, 15 bp, Homo sapiens
cctgcggtggcagct

SEQ ID NO: 596322 - DNA, 15 bp, Homo sapiens
ctgcggtggcagctt

SEQ ID NO: 596323 - DNA, 15 bp, Homo sapiens
tgcggtggcagcttg

SEQ ID NO: 596324 - DNA, 15 bp, Homo sapiens
gcggtggcagcttgt

SEQ ID NO: 596325 - DNA, 15 bp, Homo sapiens
cggtggcagcttgtc

SEQ ID NO: 596326 - DNA, 15 bp, Homo sapiens
ggtggcagcttgtcc

SEQ ID NO: 596327 - DNA, 15 bp, Homo sapiens
gtggcagcttgtcct

SEQ ID NO: 596328 - DNA, 15 bp, Homo sapiens
tggcagcttgtcctt

SEQ ID NO: 596329 - DNA, 15 bp, Homo sapiens
ggcagcttgtccttc

SEQ ID NO: 596330 - DNA, 15 bp, Homo sapiens
gcagcttgtccttcc

SEQ ID NO: 596331 - DNA, 15 bp, Homo sapiens
cagcttgtccttccc

SEQ ID NO: 596332 - DNA, 15 bp, Homo sapiens
agcttgtccttccca

SEQ ID NO: 596333 - DNA, 15 bp, Homo sapiens
gcttgtccttcccag

SEQ ID NO: 596334 - DNA, 15 bp, Homo sapiens
cttgtccttcccagt

SEQ ID NO: 596335 - DNA, 15 bp, Homo sapiens
ttgtccttcccagtg

SEQ ID NO: 596336 - DNA, 15 bp, Homo sapiens
tgtccttcccagtga

SEQ ID NO: 596337 - DNA, 15 bp, Homo sapiens
gtccttcccagtgac

SEQ ID NO: 596338 - DNA, 15 bp, Homo sapiens
tccttcccagtgacc

SEQ ID NO: 596339 - DNA, 15 bp, Homo sapiens
ccttcccagtgacct

SEQ ID NO: 596340 - DNA, 15 bp, Homo sapiens
cttcccagtgacctc

SEQ ID NO: 596341 - DNA, 15 bp, Homo sapiens
ttcccagtgacctcc

SEQ ID NO: 596342 - DNA, 15 bp, Homo sapiens
tcccagtgacctccc

SEQ ID NO: 596343 - DNA, 15 bp, Homo sapiens
cccagtgacctccca

SEQ ID NO: 596344 - DNA, 15 bp, Homo sapiens
ccagtgacctcccag

SEQ ID NO: 596345 - DNA, 15 bp, Homo sapiens
cagtgacctcccaga

SEQ ID NO: 596346 - DNA, 15 bp, Homo sapiens
agtgacctcccagat

SEQ ID NO: 596347 - DNA, 15 bp, Homo sapiens
gtgacctcccagatg

SEQ ID NO: 596348 - DNA, 15 bp, Homo sapiens
tgacctcccagatgg

SEQ ID NO: 596349 - DNA, 15 bp, Homo sapiens
gacctcccagatgga

SEQ ID NO: 596350 - DNA, 15 bp, Homo sapiens
acctcccagatggaa

SEQ ID NO: 596351 - DNA, 15 bp, Homo sapiens
cctcccagatggaac

SEQ ID NO: 596352 - DNA, 15 bp, Homo sapiens
ctcccagatggaacc

SEQ ID NO: 596353 - DNA, 15 bp, Homo sapiens
tcccagatggaacct

SEQ ID NO: 596354 - DNA, 15 bp, Homo sapiens
cccagatggaaccta

SEQ ID NO: 596355 - DNA, 15 bp, Homo sapiens
ccagatggaacctac

SEQ ID NO: 596356 - DNA, 15 bp, Homo sapiens
cagatggaacctacc

SEQ ID NO: 596357 - DNA, 15 bp, Homo sapiens
agatggaacctaccc

SEQ ID NO: 596358 - DNA, 15 bp, Homo sapiens
gatggaacctacccc

SEQ ID NO: 596359 - DNA, 15 bp, Homo sapiens
atggaacctaccccc

SEQ ID NO: 596360 - DNA, 15 bp, Homo sapiens
tggaacctacccccc

SEQ ID NO: 596361 - DNA, 15 bp, Homo sapiens
ggaacctaccccccg

SEQ ID NO: 596362 - DNA, 15 bp, Homo sapiens
gaacctaccccccgt

SEQ ID NO: 596363 - DNA, 15 bp, Homo sapiens
aacctaccccccgtc

SEQ ID NO: 596364 - DNA, 15 bp, Homo sapiens
acctaccccccgtcc

SEQ ID NO: 596365 - DNA, 15 bp, Homo sapiens
cctaccccccgtccc

SEQ ID NO: 596366 - DNA, 15 bp, Homo sapiens
ctaccccccgtcccc

SEQ ID NO: 596367 - DNA, 15 bp, Homo sapiens
taccccccgtcccct

SEQ ID NO: 596368 - DNA, 15 bp, Homo sapiens
accccccgtccccta

SEQ ID NO: 596369 - DNA, 15 bp, Homo sapiens
ccccccgtcccctac

SEQ ID NO: 596370 - DNA, 15 bp, Homo sapiens
cccccgtcccctacc

SEQ ID NO: 596371 - DNA, 15 bp, Homo sapiens
ccccgtcccctacca

SEQ ID NO: 596372 - DNA, 15 bp, Homo sapiens
cccgtcccctaccag

SEQ ID NO: 596373 - DNA, 15 bp, Homo sapiens
ccgtcccctaccagc

SEQ ID NO: 596374 - DNA, 15 bp, Homo sapiens
cgtcccctaccagcc

SEQ ID NO: 596375 - DNA, 15 bp, Homo sapiens
gtcccctaccagcct

SEQ ID NO: 596376 - DNA, 15 bp, Homo sapiens
tcccctaccagcctc

SEQ ID NO: 596377 - DNA, 15 bp, Homo sapiens
cccctaccagcctct

SEQ ID NO: 596378 - DNA, 15 bp, Homo sapiens
ccctaccagcctctg

SEQ ID NO: 596379 - DNA, 15 bp, Homo sapiens
cctaccagcctctgt

SEQ ID NO: 596380 - DNA, 15 bp, Homo sapiens
ctaccagcctctgta

SEQ ID NO: 596381 - DNA, 15 bp, Homo sapiens
taccagcctctgtag

SEQ ID NO: 596382 - DNA, 15 bp, Homo sapiens
accagcctctgtagc

SEQ ID NO: 596383 - DNA, 15 bp, Homo sapiens
ccagcctctgtagca

SEQ ID NO: 596384 - DNA, 15 bp, Homo sapiens
cagcctctgtagcaa

SEQ ID NO: 596385 - DNA, 15 bp, Homo sapiens
agcctctgtagcaaa

SEQ ID NO: 596386 - DNA, 15 bp, Homo sapiens
gcctctgtagcaaac

SEQ ID NO: 596387 - DNA, 15 bp, Homo sapiens
cctctgtagcaaaca

SEQ ID NO: 596388 - DNA, 15 bp, Homo sapiens
ctctgtagcaaacag

SEQ ID NO: 596389 - DNA, 15 bp, Homo sapiens
tctgtagcaaacagg

SEQ ID NO: 596390 - DNA, 15 bp, Homo sapiens
ctgtagcaaacaggc

SEQ ID NO: 596391 - DNA, 15 bp, Homo sapiens
tgtagcaaacaggca

SEQ ID NO: 596392 - DNA, 15 bp, Homo sapiens
gtagcaaacaggcag

SEQ ID NO: 596393 - DNA, 15 bp, Homo sapiens
tagcaaacaggcaga

SEQ ID NO: 596394 - DNA, 15 bp, Homo sapiens
agcaaacaggcagaa

SEQ ID NO: 596395 - DNA, 15 bp, Homo sapiens
gcaaacaggcagaag

SEQ ID NO: 596396 - DNA, 15 bp, Homo sapiens
caaacaggcagaagg

SEQ ID NO: 596397 - DNA, 15 bp, Homo sapiens
aaacaggcagaaggc

SEQ ID NO: 596398 - DNA, 15 bp, Homo sapiens
aacaggcagaaggct

SEQ ID NO: 596399 - DNA, 15 bp, Homo sapiens
acaggcagaaggctc

SEQ ID NO: 596400 - DNA, 15 bp, Homo sapiens
caggcagaaggctca

SEQ ID NO: 596401 - DNA, 15 bp, Homo sapiens
aggcagaaggctcag

SEQ ID NO: 596402 - DNA, 15 bp, Homo sapiens
ggcagaaggctcagt

SEQ ID NO: 596403 - DNA, 15 bp, Homo sapiens
gcagaaggctcagtg

SEQ ID NO: 596404 - DNA, 15 bp, Homo sapiens
cagaaggctcagtgc

SEQ ID NO: 596405 - DNA, 15 bp, Homo sapiens
agaaggctcagtgcc

SEQ ID NO: 596406 - DNA, 15 bp, Homo sapiens
gaaggctcagtgccc

SEQ ID NO: 596407 - DNA, 15 bp, Homo sapiens
aaggctcagtgcccc

SEQ ID NO: 596408 - DNA, 15 bp, Homo sapiens
aggctcagtgccccc

SEQ ID NO: 596409 - DNA, 15 bp, Homo sapiens
ggctcagtgcccccc

SEQ ID NO: 596410 - DNA, 15 bp, Homo sapiens
gctcagtgcccccct

SEQ ID NO: 596411 - DNA, 15 bp, Homo sapiens
ctcagtgcccccctg

SEQ ID NO: 596412 - DNA, 15 bp, Homo sapiens
tcagtgcccccctgg

SEQ ID NO: 596413 - DNA, 15 bp, Homo sapiens
cagtgcccccctgga

SEQ ID NO: 596414 - DNA, 15 bp, Homo sapiens
agtgcccccctggaa

SEQ ID NO: 596415 - DNA, 15 bp, Homo sapiens
gtgcccccctggaag

SEQ ID NO: 596416 - DNA, 15 bp, Homo sapiens
tgcccccctggaagc

SEQ ID NO: 596417 - DNA, 15 bp, Homo sapiens
gcccccctggaagca

SEQ ID NO: 596418 - DNA, 15 bp, Homo sapiens
cccccctggaagcag

SEQ ID NO: 596419 - DNA, 15 bp, Homo sapiens
ccccctggaagcagc

SEQ ID NO: 596420 - DNA, 15 bp, Homo sapiens
cccctggaagcagcc

SEQ ID NO: 596421 - DNA, 15 bp, Homo sapiens
ccctggaagcagcca

SEQ ID NO: 596422 - DNA, 15 bp, Homo sapiens
cctggaagcagccag

SEQ ID NO: 596423 - DNA, 15 bp, Homo sapiens
ctggaagcagccagg

SEQ ID NO: 596424 - DNA, 15 bp, Homo sapiens
tggaagcagccaggc

SEQ ID NO: 596425 - DNA, 15 bp, Homo sapiens
ggaagcagccaggcg

SEQ ID NO: 596426 - DNA, 15 bp, Homo sapiens
gaagcagccaggcgc

SEQ ID NO: 596427 - DNA, 15 bp, Homo sapiens
aagcagccaggcgcc

SEQ ID NO: 596428 - DNA, 15 bp, Homo sapiens
agcagccaggcgccc

SEQ ID NO: 596429 - DNA, 15 bp, Homo sapiens
gcagccaggcgcccc

SEQ ID NO: 596430 - DNA, 15 bp, Homo sapiens
cagccaggcgccccc

SEQ ID NO: 596431 - DNA, 15 bp, Homo sapiens
agccaggcgccccca

SEQ ID NO: 596432 - DNA, 15 bp, Homo sapiens
gccaggcgcccccac

SEQ ID NO: 596433 - DNA, 15 bp, Homo sapiens
ccaggcgcccccact

SEQ ID NO: 596434 - DNA, 15 bp, Homo sapiens
caggcgcccccactc

SEQ ID NO: 596435 - DNA, 15 bp, Homo sapiens
aggcgcccccactca

SEQ ID NO: 596436 - DNA, 15 bp, Homo sapiens
ggcgcccccactcac

SEQ ID NO: 596437 - DNA, 15 bp, Homo sapiens
gcgcccccactcacc

SEQ ID NO: 596438 - DNA, 15 bp, Homo sapiens
cgcccccactcaccc

SEQ ID NO: 596439 - DNA, 15 bp, Homo sapiens
gcccccactcaccca

SEQ ID NO: 596440 - DNA, 15 bp, Homo sapiens
cccccactcacccac

SEQ ID NO: 596441 - DNA, 15 bp, Homo sapiens
ccccactcacccact

SEQ ID NO: 596442 - DNA, 15 bp, Homo sapiens
cccactcacccactc

SEQ ID NO: 596443 - DNA, 15 bp, Homo sapiens
ccactcacccactct

SEQ ID NO: 596444 - DNA, 15 bp, Homo sapiens
cactcacccactctg

SEQ ID NO: 596445 - DNA, 15 bp, Homo sapiens
actcacccactctgc

SEQ ID NO: 596446 - DNA, 15 bp, Homo sapiens
ctcacccactctgct

SEQ ID NO: 596447 - DNA, 15 bp, Homo sapiens
tcacccactctgctg

SEQ ID NO: 596448 - DNA, 15 bp, Homo sapiens
cacccactctgctga

SEQ ID NO: 596449 - DNA, 15 bp, Homo sapiens
acccactctgctgac

SEQ ID NO: 596450 - DNA, 15 bp, Homo sapiens
cccactctgctgacc

SEQ ID NO: 596451 - DNA, 15 bp, Homo sapiens
ccactctgctgacct

SEQ ID NO: 596452 - DNA, 15 bp, Homo sapiens
cactctgctgacctc

SEQ ID NO: 596453 - DNA, 15 bp, Homo sapiens
actctgctgacctcc

SEQ ID NO: 596454 - DNA, 15 bp, Homo sapiens
ctctgctgacctccc

SEQ ID NO: 596455 - DNA, 15 bp, Homo sapiens
tctgctgacctccca

SEQ ID NO: 596456 - DNA, 15 bp, Homo sapiens
ctgctgacctcccat

SEQ ID NO: 596457 - DNA, 15 bp, Homo sapiens
tgctgacctcccatt

SEQ ID NO: 596458 - DNA, 15 bp, Homo sapiens
gctgacctcccattc

SEQ ID NO: 596459 - DNA, 15 bp, Homo sapiens
ctgacctcccattct

SEQ ID NO: 596460 - DNA, 15 bp, Homo sapiens
tgacctcccattctc

SEQ ID NO: 596461 - DNA, 15 bp, Homo sapiens
gacctcccattctca

SEQ ID NO: 596462 - DNA, 15 bp, Homo sapiens
acctcccattctcat

SEQ ID NO: 596463 - DNA, 15 bp, Homo sapiens
cctcccattctcatc

SEQ ID NO: 596464 - DNA, 15 bp, Homo sapiens
ctcccattctcatcc

SEQ ID NO: 596465 - DNA, 15 bp, Homo sapiens
tcccattctcatcct

SEQ ID NO: 596466 - DNA, 15 bp, Homo sapiens
cccattctcatcctg

SEQ ID NO: 596467 - DNA, 15 bp, Homo sapiens
ccattctcatcctgc

SEQ ID NO: 596468 - DNA, 15 bp, Homo sapiens
cattctcatcctgca

SEQ ID NO: 596469 - DNA, 15 bp, Homo sapiens
attctcatcctgcac

SEQ ID NO: 596470 - DNA, 15 bp, Homo sapiens
ttctcatcctgcact

SEQ ID NO: 596471 - DNA, 15 bp, Homo sapiens
tctcatcctgcactg

SEQ ID NO: 596472 - DNA, 15 bp, Homo sapiens
ctcatcctgcactga

SEQ ID NO: 596473 - DNA, 15 bp, Homo sapiens
tcatcctgcactgac

SEQ ID NO: 596474 - DNA, 15 bp, Homo sapiens
catcctgcactgaca

SEQ ID NO: 596475 - DNA, 15 bp, Homo sapiens
atcctgcactgacag

SEQ ID NO: 596476 - DNA, 15 bp, Homo sapiens
tcctgcactgacagc

SEQ ID NO: 596477 - DNA, 15 bp, Homo sapiens
cctgcactgacagca

SEQ ID NO: 596478 - DNA, 15 bp, Homo sapiens
ctgcactgacagcag

SEQ ID NO: 596479 - DNA, 15 bp, Homo sapiens
tgcactgacagcagg

SEQ ID NO: 596480 - DNA, 15 bp, Homo sapiens
gcactgacagcaggc

SEQ ID NO: 596481 - DNA, 15 bp, Homo sapiens
cactgacagcaggcc

SEQ ID NO: 596482 - DNA, 15 bp, Homo sapiens
actgacagcaggccc

SEQ ID NO: 596483 - DNA, 15 bp, Homo sapiens
ctgacagcaggcccc

SEQ ID NO: 596484 - DNA, 15 bp, Homo sapiens
tgacagcaggcccca

SEQ ID NO: 596485 - DNA, 15 bp, Homo sapiens
gacagcaggccccaa

SEQ ID NO: 596486 - DNA, 15 bp, Homo sapiens
acagcaggccccaag

SEQ ID NO: 596487 - DNA, 15 bp, Homo sapiens
cagcaggccccaaga

SEQ ID NO: 596488 - DNA, 15 bp, Homo sapiens
agcaggccccaagag

SEQ ID NO: 596489 - DNA, 15 bp, Homo sapiens
gcaggccccaagaga

SEQ ID NO: 596490 - DNA, 15 bp, Homo sapiens
caggccccaagagaa

SEQ ID NO: 596491 - DNA, 15 bp, Homo sapiens
aggccccaagagaag

SEQ ID NO: 596492 - DNA, 15 bp, Homo sapiens
ggccccaagagaagg

SEQ ID NO: 596493 - DNA, 15 bp, Homo sapiens
gccccaagagaaggc

SEQ ID NO: 596494 - DNA, 15 bp, Homo sapiens
ccccaagagaaggca

SEQ ID NO: 596495 - DNA, 15 bp, Homo sapiens
cccaagagaaggcat

SEQ ID NO: 596496 - DNA, 15 bp, Homo sapiens
ccaagagaaggcata

SEQ ID NO: 596497 - DNA, 15 bp, Homo sapiens
caagagaaggcatac

SEQ ID NO: 596498 - DNA, 15 bp, Homo sapiens
aagagaaggcatact

SEQ ID NO: 596499 - DNA, 15 bp, Homo sapiens
agagaaggcatactg

SEQ ID NO: 596500 - DNA, 15 bp, Homo sapiens
gagaaggcatactgg

SEQ ID NO: 596501 - DNA, 15 bp, Homo sapiens
agaaggcatactggg

SEQ ID NO: 596502 - DNA, 15 bp, Homo sapiens
gaaggcatactggga

SEQ ID NO: 596503 - DNA, 15 bp, Homo sapiens
aaggcatactgggac

SEQ ID NO: 596504 - DNA, 15 bp, Homo sapiens
aggcatactgggaca

SEQ ID NO: 596505 - DNA, 15 bp, Homo sapiens
ggcatactgggacac

SEQ ID NO: 596506 - DNA, 15 bp, Homo sapiens
gcatactgggacacg

SEQ ID NO: 596507 - DNA, 15 bp, Homo sapiens
catactgggacacgc

SEQ ID NO: 596508 - DNA, 15 bp, Homo sapiens
atactgggacacgca

SEQ ID NO: 596509 - DNA, 15 bp, Homo sapiens
tactgggacacgcaa

SEQ ID NO: 596510 - DNA, 15 bp, Homo sapiens
actgggacacgcaag

SEQ ID NO: 596511 - DNA, 15 bp, Homo sapiens
ctgggacacgcaaga

SEQ ID NO: 596512 - DNA, 15 bp, Homo sapiens
tgggacacgcaagaa

SEQ ID NO: 596513 - DNA, 15 bp, Homo sapiens
gggacacgcaagaac

SEQ ID NO: 596514 - DNA, 15 bp, Homo sapiens
ggacacgcaagaaca

SEQ ID NO: 596515 - DNA, 15 bp, Homo sapiens
gacacgcaagaacac

SEQ ID NO: 596516 - DNA, 15 bp, Homo sapiens
acacgcaagaacacc

SEQ ID NO: 596517 - DNA, 15 bp, Homo sapiens
cacgcaagaacacct

SEQ ID NO: 596518 - DNA, 15 bp, Homo sapiens
acgcaagaacacctg

SEQ ID NO: 596519 - DNA, 15 bp, Homo sapiens
cgcaagaacacctgg

SEQ ID NO: 596520 - DNA, 15 bp, Homo sapiens
gcaagaacacctggg

SEQ ID NO: 596521 - DNA, 15 bp, Homo sapiens
caagaacacctgggc

SEQ ID NO: 596522 - DNA, 15 bp, Homo sapiens
aagaacacctgggct

SEQ ID NO: 596523 - DNA, 15 bp, Homo sapiens
agaacacctgggctc

SEQ ID NO: 596524 - DNA, 15 bp, Homo sapiens
gaacacctgggctcc

SEQ ID NO: 596525 - DNA, 15 bp, Homo sapiens
aacacctgggctcct

SEQ ID NO: 596526 - DNA, 15 bp, Homo sapiens
acacctgggctcctt

SEQ ID NO: 596527 - DNA, 15 bp, Homo sapiens
cacctgggctccttg

SEQ ID NO: 596528 - DNA, 15 bp, Homo sapiens
acctgggctccttgg

SEQ ID NO: 596529 - DNA, 15 bp, Homo sapiens
cctgggctccttggt

SEQ ID NO: 596530 - DNA, 15 bp, Homo sapiens
ctgggctccttggtg

SEQ ID NO: 596531 - DNA, 15 bp, Homo sapiens
tgggctccttggtgc

SEQ ID NO: 596532 - DNA, 15 bp, Homo sapiens
gggctccttggtgcc

SEQ ID NO: 596533 - DNA, 15 bp, Homo sapiens
ggctccttggtgcca

SEQ ID NO: 596534 - DNA, 15 bp, Homo sapiens
gctccttggtgccac

SEQ ID NO: 596535 - DNA, 15 bp, Homo sapiens
ctccttggtgccacc

SEQ ID NO: 596536 - DNA, 15 bp, Homo sapiens
tccttggtgccacca

SEQ ID NO: 596537 - DNA, 15 bp, Homo sapiens
ccttggtgccaccag

SEQ ID NO: 596538 - DNA, 15 bp, Homo sapiens
cttggtgccaccaga

SEQ ID NO: 596539 - DNA, 15 bp, Homo sapiens
ttggtgccaccagag

SEQ ID NO: 596540 - DNA, 15 bp, Homo sapiens
tggtgccaccagaga

SEQ ID NO: 596541 - DNA, 15 bp, Homo sapiens
ggtgccaccagagag

SEQ ID NO: 596542 - DNA, 15 bp, Homo sapiens
gtgccaccagagagc

SEQ ID NO: 596543 - DNA, 15 bp, Homo sapiens
tgccaccagagagca

SEQ ID NO: 596544 - DNA, 15 bp, Homo sapiens
gccaccagagagcag

SEQ ID NO: 596545 - DNA, 15 bp, Homo sapiens
ccaccagagagcagg

SEQ ID NO: 596546 - DNA, 15 bp, Homo sapiens
caccagagagcaggc

SEQ ID NO: 596547 - DNA, 15 bp, Homo sapiens
accagagagcaggcc

SEQ ID NO: 596548 - DNA, 15 bp, Homo sapiens
ccagagagcaggcca

SEQ ID NO: 596549 - DNA, 15 bp, Homo sapiens
cagagagcaggccac

SEQ ID NO: 596550 - DNA, 15 bp, Homo sapiens
agagagcaggccaca

SEQ ID NO: 596551 - DNA, 15 bp, Homo sapiens
gagagcaggccacag

SEQ ID NO: 596552 - DNA, 15 bp, Homo sapiens
agagcaggccacagg

SEQ ID NO: 596553 - DNA, 15 bp, Homo sapiens
gagcaggccacaggt

SEQ ID NO: 596554 - DNA, 15 bp, Homo sapiens
agcaggccacaggtg

SEQ ID NO: 596555 - DNA, 15 bp, Homo sapiens
gcaggccacaggtgg

SEQ ID NO: 596556 - DNA, 15 bp, Homo sapiens
caggccacaggtgga

SEQ ID NO: 596557 - DNA, 15 bp, Homo sapiens
aggccacaggtggac

SEQ ID NO: 596558 - DNA, 15 bp, Homo sapiens
ggccacaggtggacc

SEQ ID NO: 596559 - DNA, 15 bp, Homo sapiens
gccacaggtggacca

SEQ ID NO: 596560 - DNA, 15 bp, Homo sapiens
ccacaggtggaccac

SEQ ID NO: 596561 - DNA, 15 bp, Homo sapiens
cacaggtggaccacc

SEQ ID NO: 596562 - DNA, 15 bp, Homo sapiens
acaggtggaccaccg

SEQ ID NO: 596563 - DNA, 15 bp, Homo sapiens
caggtggaccaccgc

SEQ ID NO: 596564 - DNA, 15 bp, Homo sapiens
aggtggaccaccgca

SEQ ID NO: 596565 - DNA, 15 bp, Homo sapiens
ggtggaccaccgcag

SEQ ID NO: 596566 - DNA, 15 bp, Homo sapiens
gtggaccaccgcagc

SEQ ID NO: 596567 - DNA, 15 bp, Homo sapiens
tggaccaccgcagcc

SEQ ID NO: 596568 - DNA, 15 bp, Homo sapiens
ggaccaccgcagccc

SEQ ID NO: 596569 - DNA, 15 bp, Homo sapiens
gaccaccgcagcccc

SEQ ID NO: 596570 - DNA, 15 bp, Homo sapiens
accaccgcagcccct

SEQ ID NO: 596571 - DNA, 15 bp, Homo sapiens
ccaccgcagcccctc

SEQ ID NO: 596572 - DNA, 15 bp, Homo sapiens
caccgcagcccctct

SEQ ID NO: 596573 - DNA, 15 bp, Homo sapiens
accgcagcccctctc

SEQ ID NO: 596574 - DNA, 15 bp, Homo sapiens
ccgcagcccctctct

SEQ ID NO: 596575 - DNA, 15 bp, Homo sapiens
cgcagcccctctctc

SEQ ID NO: 596576 - DNA, 15 bp, Homo sapiens
gcagcccctctctct

SEQ ID NO: 596577 - DNA, 15 bp, Homo sapiens
cagcccctctctctt

SEQ ID NO: 596578 - DNA, 15 bp, Homo sapiens
agcccctctctcttg

SEQ ID NO: 596579 - DNA, 15 bp, Homo sapiens
gcccctctctcttgc

SEQ ID NO: 596580 - DNA, 15 bp, Homo sapiens
cccctctctcttgcc

SEQ ID NO: 596581 - DNA, 15 bp, Homo sapiens
ccctctctcttgccc

SEQ ID NO: 596582 - DNA, 15 bp, Homo sapiens
cctctctcttgccct

SEQ ID NO: 596583 - DNA, 15 bp, Homo sapiens
ctctctcttgccctt

SEQ ID NO: 596584 - DNA, 15 bp, Homo sapiens
tctctcttgcccttg

SEQ ID NO: 596585 - DNA, 15 bp, Homo sapiens
ctctcttgcccttgt

SEQ ID NO: 596586 - DNA, 15 bp, Homo sapiens
tctcttgcccttgtt

SEQ ID NO: 596587 - DNA, 15 bp, Homo sapiens
ctcttgcccttgttg

SEQ ID NO: 596588 - DNA, 15 bp, Homo sapiens
tcttgcccttgttgc

SEQ ID NO: 596589 - DNA, 15 bp, Homo sapiens
cttgcccttgttgct

SEQ ID NO: 596590 - DNA, 15 bp, Homo sapiens
ttgcccttgttgctt

SEQ ID NO: 596591 - DNA, 15 bp, Homo sapiens
tgcccttgttgcttt

SEQ ID NO: 596592 - DNA, 15 bp, Homo sapiens
gcccttgttgctttt

SEQ ID NO: 596593 - DNA, 15 bp, Homo sapiens
cccttgttgcttttc

SEQ ID NO: 596594 - DNA, 15 bp, Homo sapiens
ccttgttgcttttcc

SEQ ID NO: 596595 - DNA, 15 bp, Homo sapiens
cttgttgcttttcct

SEQ ID NO: 596596 - DNA, 15 bp, Homo sapiens
ttgttgcttttcctg

SEQ ID NO: 596597 - DNA, 15 bp, Homo sapiens
tgttgcttttcctgc

SEQ ID NO: 596598 - DNA, 15 bp, Homo sapiens
gttgcttttcctgcc

SEQ ID NO: 596599 - DNA, 15 bp, Homo sapiens
ttgcttttcctgccc

SEQ ID NO: 596600 - DNA, 15 bp, Homo sapiens
tgcttttcctgccct

SEQ ID NO: 596601 - DNA, 15 bp, Homo sapiens
gcttttcctgccctg

SEQ ID NO: 596602 - DNA, 15 bp, Homo sapiens
cttttcctgccctgg

SEQ ID NO: 596603 - DNA, 15 bp, Homo sapiens
ttttcctgccctggg

SEQ ID NO: 596604 - DNA, 15 bp, Homo sapiens
tttcctgccctggga

SEQ ID NO: 596605 - DNA, 15 bp, Homo sapiens
ttcctgccctgggat

SEQ ID NO: 596606 - DNA, 15 bp, Homo sapiens
tcctgccctgggatc

SEQ ID NO: 596607 - DNA, 15 bp, Homo sapiens
cctgccctgggatcc

SEQ ID NO: 596608 - DNA, 15 bp, Homo sapiens
ctgccctgggatcct

SEQ ID NO: 596609 - DNA, 15 bp, Homo sapiens
tgccctgggatcctg

SEQ ID NO: 596610 - DNA, 15 bp, Homo sapiens
gccctgggatcctgg

SEQ ID NO: 596611 - DNA, 15 bp, Homo sapiens
ccctgggatcctggg

SEQ ID NO: 596612 - DNA, 15 bp, Homo sapiens
cctgggatcctgggc

SEQ ID NO: 596613 - DNA, 15 bp, Homo sapiens
ctgggatcctgggct

SEQ ID NO: 596614 - DNA, 15 bp, Homo sapiens
tgggatcctgggcta

SEQ ID NO: 596615 - DNA, 15 bp, Homo sapiens
gggatcctgggctag

SEQ ID NO: 596616 - DNA, 15 bp, Homo sapiens
ggatcctgggctagg

SEQ ID NO: 596617 - DNA, 15 bp, Homo sapiens
gatcctgggctaggg

SEQ ID NO: 596618 - DNA, 15 bp, Homo sapiens
atcctgggctaggga

SEQ ID NO: 596619 - DNA, 15 bp, Homo sapiens
tcctgggctagggac

SEQ ID NO: 596620 - DNA, 15 bp, Homo sapiens
cctgggctagggaca

SEQ ID NO: 596621 - DNA, 15 bp, Homo sapiens
ctgggctagggacag

SEQ ID NO: 596622 - DNA, 15 bp, Homo sapiens
tgggctagggacagt

SEQ ID NO: 596623 - DNA, 15 bp, Homo sapiens
gggctagggacagtg

SEQ ID NO: 596624 - DNA, 15 bp, Homo sapiens
ggctagggacagtgg

SEQ ID NO: 596625 - DNA, 15 bp, Homo sapiens
gctagggacagtggt

SEQ ID NO: 596626 - DNA, 15 bp, Homo sapiens
ctagggacagtggtc

SEQ ID NO: 596627 - DNA, 15 bp, Homo sapiens
tagggacagtggtca

SEQ ID NO: 596628 - DNA, 15 bp, Homo sapiens
agggacagtggtcag

SEQ ID NO: 596629 - DNA, 15 bp, Homo sapiens
gggacagtggtcagc

SEQ ID NO: 596630 - DNA, 15 bp, Homo sapiens
ggacagtggtcagct

SEQ ID NO: 596631 - DNA, 15 bp, Homo sapiens
gacagtggtcagctg

SEQ ID NO: 596632 - DNA, 15 bp, Homo sapiens
acagtggtcagctgc

SEQ ID NO: 596633 - DNA, 15 bp, Homo sapiens
cagtggtcagctgct

SEQ ID NO: 596634 - DNA, 15 bp, Homo sapiens
agtggtcagctgctt

SEQ ID NO: 596635 - DNA, 15 bp, Homo sapiens
gtggtcagctgcttt

SEQ ID NO: 596636 - DNA, 15 bp, Homo sapiens
tggtcagctgctttt

SEQ ID NO: 596637 - DNA, 15 bp, Homo sapiens
ggtcagctgcttttg

SEQ ID NO: 596638 - DNA, 15 bp, Homo sapiens
gtcagctgcttttga

SEQ ID NO: 596639 - DNA, 15 bp, Homo sapiens
tcagctgcttttgaa

SEQ ID NO: 596640 - DNA, 15 bp, Homo sapiens
cagctgcttttgaag

SEQ ID NO: 596641 - DNA, 15 bp, Homo sapiens
agctgcttttgaaga

SEQ ID NO: 596642 - DNA, 15 bp, Homo sapiens
gctgcttttgaagag

SEQ ID NO: 596643 - DNA, 15 bp, Homo sapiens
ctgcttttgaagagg

SEQ ID NO: 596644 - DNA, 15 bp, Homo sapiens
tgcttttgaagaggg

SEQ ID NO: 596645 - DNA, 15 bp, Homo sapiens
gcttttgaagagggg

SEQ ID NO: 596646 - DNA, 15 bp, Homo sapiens
cttttgaagagggga

SEQ ID NO: 596647 - DNA, 15 bp, Homo sapiens
ttttgaagaggggag

SEQ ID NO: 596648 - DNA, 15 bp, Homo sapiens
tttgaagaggggagc

SEQ ID NO: 596649 - DNA, 15 bp, Homo sapiens
ttgaagaggggagct

SEQ ID NO: 596650 - DNA, 15 bp, Homo sapiens
tgaagaggggagctg

SEQ ID NO: 596651 - DNA, 15 bp, Homo sapiens
gaagaggggagctgt

SEQ ID NO: 596652 - DNA, 15 bp, Homo sapiens
aagaggggagctgtc

SEQ ID NO: 596653 - DNA, 15 bp, Homo sapiens
agaggggagctgtcc

SEQ ID NO: 596654 - DNA, 15 bp, Homo sapiens
gaggggagctgtcca

SEQ ID NO: 596655 - DNA, 15 bp, Homo sapiens
aggggagctgtccaa

SEQ ID NO: 596656 - DNA, 15 bp, Homo sapiens
ggggagctgtccaaa

SEQ ID NO: 596657 - DNA, 15 bp, Homo sapiens
gggagctgtccaaag

SEQ ID NO: 596658 - DNA, 15 bp, Homo sapiens
ggagctgtccaaaga

SEQ ID NO: 596659 - DNA, 15 bp, Homo sapiens
gagctgtccaaagat

SEQ ID NO: 596660 - DNA, 15 bp, Homo sapiens
agctgtccaaagatg

SEQ ID NO: 596661 - DNA, 15 bp, Homo sapiens
gctgtccaaagatgc

SEQ ID NO: 596662 - DNA, 15 bp, Homo sapiens
ctgtccaaagatgct

SEQ ID NO: 596663 - DNA, 15 bp, Homo sapiens
tgtccaaagatgctg

SEQ ID NO: 596664 - DNA, 15 bp, Homo sapiens
gtccaaagatgctgg

SEQ ID NO: 596665 - DNA, 15 bp, Homo sapiens
tccaaagatgctggg

SEQ ID NO: 596666 - DNA, 15 bp, Homo sapiens
ccaaagatgctggga

SEQ ID NO: 596667 - DNA, 15 bp, Homo sapiens
caaagatgctgggac

SEQ ID NO: 596668 - DNA, 15 bp, Homo sapiens
aaagatgctgggact

SEQ ID NO: 596669 - DNA, 15 bp, Homo sapiens
aagatgctgggactt

SEQ ID NO: 596670 - DNA, 15 bp, Homo sapiens
agatgctgggacttg

SEQ ID NO: 596671 - DNA, 15 bp, Homo sapiens
gatgctgggacttgc

SEQ ID NO: 596672 - DNA, 15 bp, Homo sapiens
atgctgggacttgct

SEQ ID NO: 596673 - DNA, 15 bp, Homo sapiens
tgctgggacttgctt

SEQ ID NO: 596674 - DNA, 15 bp, Homo sapiens
gctgggacttgcttg

SEQ ID NO: 596675 - DNA, 15 bp, Homo sapiens
ctgggacttgcttga

SEQ ID NO: 596676 - DNA, 15 bp, Homo sapiens
tgggacttgcttgag

SEQ ID NO: 596677 - DNA, 15 bp, Homo sapiens
gggacttgcttgagc

SEQ ID NO: 596678 - DNA, 15 bp, Homo sapiens
ggacttgcttgagca

SEQ ID NO: 596679 - DNA, 15 bp, Homo sapiens
gacttgcttgagcag

SEQ ID NO: 596680 - DNA, 15 bp, Homo sapiens
acttgcttgagcaga

SEQ ID NO: 596681 - DNA, 15 bp, Homo sapiens
cttgcttgagcagag

SEQ ID NO: 596682 - DNA, 15 bp, Homo sapiens
ttgcttgagcagaga

SEQ ID NO: 596683 - DNA, 15 bp, Homo sapiens
tgcttgagcagagag

SEQ ID NO: 596684 - DNA, 15 bp, Homo sapiens
gcttgagcagagagg

SEQ ID NO: 596685 - DNA, 15 bp, Homo sapiens
cttgagcagagagga

SEQ ID NO: 596686 - DNA, 15 bp, Homo sapiens
ttgagcagagaggag

SEQ ID NO: 596687 - DNA, 15 bp, Homo sapiens
tgagcagagaggaga

SEQ ID NO: 596688 - DNA, 15 bp, Homo sapiens
gagcagagaggagac

SEQ ID NO: 596689 - DNA, 15 bp, Homo sapiens
agcagagaggagaca

SEQ ID NO: 596690 - DNA, 15 bp, Homo sapiens
gcagagaggagacat

SEQ ID NO: 596691 - DNA, 15 bp, Homo sapiens
cagagaggagacata

SEQ ID NO: 596692 - DNA, 15 bp, Homo sapiens
agagaggagacatag

SEQ ID NO: 596693 - DNA, 15 bp, Homo sapiens
gagaggagacataga

SEQ ID NO: 596694 - DNA, 15 bp, Homo sapiens
agaggagacatagac

SEQ ID NO: 596695 - DNA, 15 bp, Homo sapiens
gaggagacatagact

SEQ ID NO: 596696 - DNA, 15 bp, Homo sapiens
aggagacatagactt

SEQ ID NO: 596697 - DNA, 15 bp, Homo sapiens
ggagacatagacttg

SEQ ID NO: 596698 - DNA, 15 bp, Homo sapiens
gagacatagacttgg

SEQ ID NO: 596699 - DNA, 15 bp, Homo sapiens
agacatagacttggg

SEQ ID NO: 596700 - DNA, 15 bp, Homo sapiens
gacatagacttgggt

SEQ ID NO: 596701 - DNA, 15 bp, Homo sapiens
acatagacttgggtg

SEQ ID NO: 596702 - DNA, 15 bp, Homo sapiens
catagacttgggtgg

SEQ ID NO: 596703 - DNA, 15 bp, Homo sapiens
atagacttgggtggc

SEQ ID NO: 596704 - DNA, 15 bp, Homo sapiens
tagacttgggtggcc

SEQ ID NO: 596705 - DNA, 15 bp, Homo sapiens
agacttgggtggcct

SEQ ID NO: 596706 - DNA, 15 bp, Homo sapiens
gacttgggtggcctg

SEQ ID NO: 596707 - DNA, 15 bp, Homo sapiens
acttgggtggcctgt

SEQ ID NO: 596708 - DNA, 15 bp, Homo sapiens
cttgggtggcctgtc

SEQ ID NO: 596709 - DNA, 15 bp, Homo sapiens
ttgggtggcctgtcc

SEQ ID NO: 596710 - DNA, 15 bp, Homo sapiens
tgggtggcctgtcct

SEQ ID NO: 596711 - DNA, 15 bp, Homo sapiens
gggtggcctgtcctg

SEQ ID NO: 596712 - DNA, 15 bp, Homo sapiens
ggtggcctgtcctgg

SEQ ID NO: 596713 - DNA, 15 bp, Homo sapiens
gtggcctgtcctggg

SEQ ID NO: 596714 - DNA, 15 bp, Homo sapiens
tggcctgtcctgggt

SEQ ID NO: 596715 - DNA, 15 bp, Homo sapiens
ggcctgtcctgggtc

SEQ ID NO: 596716 - DNA, 15 bp, Homo sapiens
gcctgtcctgggtca

SEQ ID NO: 596717 - DNA, 15 bp, Homo sapiens
cctgtcctgggtcag

SEQ ID NO: 596718 - DNA, 15 bp, Homo sapiens
ctgtcctgggtcagg

SEQ ID NO: 596719 - DNA, 15 bp, Homo sapiens
tgtcctgggtcagga

SEQ ID NO: 596720 - DNA, 15 bp, Homo sapiens
gtcctgggtcaggaa

SEQ ID NO: 596721 - DNA, 15 bp, Homo sapiens
tcctgggtcaggaaa

SEQ ID NO: 596722 - DNA, 15 bp, Homo sapiens
cctgggtcaggaaac

SEQ ID NO: 596723 - DNA, 15 bp, Homo sapiens
ctgggtcaggaaaca

SEQ ID NO: 596724 - DNA, 15 bp, Homo sapiens
tgggtcaggaaacag

SEQ ID NO: 596725 - DNA, 15 bp, Homo sapiens
gggtcaggaaacagg

SEQ ID NO: 596726 - DNA, 15 bp, Homo sapiens
ggtcaggaaacaggt

SEQ ID NO: 596727 - DNA, 15 bp, Homo sapiens
gtcaggaaacaggtt

SEQ ID NO: 596728 - DNA, 15 bp, Homo sapiens
tcaggaaacaggttc

SEQ ID NO: 596729 - DNA, 15 bp, Homo sapiens
caggaaacaggttct

SEQ ID NO: 596730 - DNA, 15 bp, Homo sapiens
aggaaacaggttctt

SEQ ID NO: 596731 - DNA, 15 bp, Homo sapiens
ggaaacaggttcttc

SEQ ID NO: 596732 - DNA, 15 bp, Homo sapiens
gaaacaggttcttcc

SEQ ID NO: 596733 - DNA, 15 bp, Homo sapiens
aaacaggttcttcct

SEQ ID NO: 596734 - DNA, 15 bp, Homo sapiens
aacaggttcttccta

SEQ ID NO: 596735 - DNA, 15 bp, Homo sapiens
acaggttcttcctat

SEQ ID NO: 596736 - DNA, 15 bp, Homo sapiens
caggttcttcctatc

SEQ ID NO: 596737 - DNA, 15 bp, Homo sapiens
aggttcttcctatca

SEQ ID NO: 596738 - DNA, 15 bp, Homo sapiens
ggttcttcctatcac

SEQ ID NO: 596739 - DNA, 15 bp, Homo sapiens
gttcttcctatcacc

SEQ ID NO: 596740 - DNA, 15 bp, Homo sapiens
ttcttcctatcacct

SEQ ID NO: 596741 - DNA, 15 bp, Homo sapiens
tcttcctatcacctc

SEQ ID NO: 596742 - DNA, 15 bp, Homo sapiens
cttcctatcacctcc

SEQ ID NO: 596743 - DNA, 15 bp, Homo sapiens
ttcctatcacctccc

SEQ ID NO: 596744 - DNA, 15 bp, Homo sapiens
tcctatcacctccca

SEQ ID NO: 596745 - DNA, 15 bp, Homo sapiens
cctatcacctcccac

SEQ ID NO: 596746 - DNA, 15 bp, Homo sapiens
ctatcacctcccact

SEQ ID NO: 596747 - DNA, 15 bp, Homo sapiens
tatcacctcccactg

SEQ ID NO: 596748 - DNA, 15 bp, Homo sapiens
atcacctcccactgc

SEQ ID NO: 596749 - DNA, 15 bp, Homo sapiens
tcacctcccactgct

SEQ ID NO: 596750 - DNA, 15 bp, Homo sapiens
cacctcccactgcta

SEQ ID NO: 596751 - DNA, 15 bp, Homo sapiens
acctcccactgctac

SEQ ID NO: 596752 - DNA, 15 bp, Homo sapiens
cctcccactgctacc

SEQ ID NO: 596753 - DNA, 15 bp, Homo sapiens
ctcccactgctaccc

SEQ ID NO: 596754 - DNA, 15 bp, Homo sapiens
tcccactgctacccc

SEQ ID NO: 596755 - DNA, 15 bp, Homo sapiens
cccactgctaccccc

SEQ ID NO: 596756 - DNA, 15 bp, Homo sapiens
ccactgctaccccca

SEQ ID NO: 596757 - DNA, 15 bp, Homo sapiens
cactgctacccccag

SEQ ID NO: 596758 - DNA, 15 bp, Homo sapiens
actgctacccccaga

SEQ ID NO: 596759 - DNA, 15 bp, Homo sapiens
ctgctacccccagac

SEQ ID NO: 596760 - DNA, 15 bp, Homo sapiens
tgctacccccagacc

SEQ ID NO: 596761 - DNA, 15 bp, Homo sapiens
gctacccccagacct

SEQ ID NO: 596762 - DNA, 15 bp, Homo sapiens
ctacccccagaccta

SEQ ID NO: 596763 - DNA, 15 bp, Homo sapiens
tacccccagacctaa

SEQ ID NO: 596764 - DNA, 15 bp, Homo sapiens
acccccagacctaaa

SEQ ID NO: 596765 - DNA, 15 bp, Homo sapiens
cccccagacctaaag

SEQ ID NO: 596766 - DNA, 15 bp, Homo sapiens
ccccagacctaaaga

SEQ ID NO: 596767 - DNA, 15 bp, Homo sapiens
cccagacctaaagaa

SEQ ID NO: 596768 - DNA, 15 bp, Homo sapiens
ccagacctaaagaac

SEQ ID NO: 596769 - DNA, 15 bp, Homo sapiens
cagacctaaagaact

SEQ ID NO: 596770 - DNA, 15 bp, Homo sapiens
agacctaaagaactg

SEQ ID NO: 596771 - DNA, 15 bp, Homo sapiens
gacctaaagaactga

SEQ ID NO: 596772 - DNA, 15 bp, Homo sapiens
acctaaagaactgag

SEQ ID NO: 596773 - DNA, 15 bp, Homo sapiens
cctaaagaactgaga

SEQ ID NO: 596774 - DNA, 15 bp, Homo sapiens
ctaaagaactgagat

SEQ ID NO: 596775 - DNA, 15 bp, Homo sapiens
taaagaactgagatc

SEQ ID NO: 596776 - DNA, 15 bp, Homo sapiens
aaagaactgagatct

SEQ ID NO: 596777 - DNA, 15 bp, Homo sapiens
aagaactgagatctg

SEQ ID NO: 596778 - DNA, 15 bp, Homo sapiens
agaactgagatctgt

SEQ ID NO: 596779 - DNA, 15 bp, Homo sapiens
gaactgagatctgtg

SEQ ID NO: 596780 - DNA, 15 bp, Homo sapiens
aactgagatctgtgg

SEQ ID NO: 596781 - DNA, 15 bp, Homo sapiens
actgagatctgtggg

SEQ ID NO: 596782 - DNA, 15 bp, Homo sapiens
ctgagatctgtgggg

SEQ ID NO: 596783 - DNA, 15 bp, Homo sapiens
tgagatctgtgggga

SEQ ID NO: 596784 - DNA, 15 bp, Homo sapiens
gagatctgtggggag

SEQ ID NO: 596785 - DNA, 15 bp, Homo sapiens
agatctgtggggagt

SEQ ID NO: 596786 - DNA, 15 bp, Homo sapiens
gatctgtggggagtg

SEQ ID NO: 596787 - DNA, 15 bp, Homo sapiens
atctgtggggagtgg

SEQ ID NO: 596788 - DNA, 15 bp, Homo sapiens
tctgtggggagtgga

SEQ ID NO: 596789 - DNA, 15 bp, Homo sapiens
ctgtggggagtggac

SEQ ID NO: 596790 - DNA, 15 bp, Homo sapiens
tgtggggagtggacc

SEQ ID NO: 596791 - DNA, 15 bp, Homo sapiens
gtggggagtggacct

SEQ ID NO: 596792 - DNA, 15 bp, Homo sapiens
tggggagtggacctg

SEQ ID NO: 596793 - DNA, 15 bp, Homo sapiens
ggggagtggacctga

SEQ ID NO: 596794 - DNA, 15 bp, Homo sapiens
gggagtggacctgaa

SEQ ID NO: 596795 - DNA, 15 bp, Homo sapiens
ggagtggacctgaac

SEQ ID NO: 596796 - DNA, 15 bp, Homo sapiens
gagtggacctgaacg

SEQ ID NO: 596797 - DNA, 15 bp, Homo sapiens
agtggacctgaacga

SEQ ID NO: 596798 - DNA, 15 bp, Homo sapiens
gtggacctgaacgaa

SEQ ID NO: 596799 - DNA, 15 bp, Homo sapiens
tggacctgaacgaac

SEQ ID NO: 596800 - DNA, 15 bp, Homo sapiens
ggacctgaacgaacc

SEQ ID NO: 596801 - DNA, 15 bp, Homo sapiens
gacctgaacgaacct

SEQ ID NO: 596802 - DNA, 15 bp, Homo sapiens
acctgaacgaacctt

SEQ ID NO: 596803 - DNA, 15 bp, Homo sapiens
cctgaacgaaccttg

SEQ ID NO: 596804 - DNA, 15 bp, Homo sapiens
ctgaacgaaccttga

SEQ ID NO: 596805 - DNA, 15 bp, Homo sapiens
tgaacgaaccttgaa

SEQ ID NO: 596806 - DNA, 15 bp, Homo sapiens
gaacgaaccttgaag

SEQ ID NO: 596807 - DNA, 15 bp, Homo sapiens
aacgaaccttgaagt

SEQ ID NO: 596808 - DNA, 15 bp, Homo sapiens
acgaaccttgaagtt

SEQ ID NO: 596809 - DNA, 15 bp, Homo sapiens
cgaaccttgaagttt

SEQ ID NO: 596810 - DNA, 15 bp, Homo sapiens
gaaccttgaagtttg

SEQ ID NO: 596811 - DNA, 15 bp, Homo sapiens
aaccttgaagtttgt

SEQ ID NO: 596812 - DNA, 15 bp, Homo sapiens
accttgaagtttgtc

SEQ ID NO: 596813 - DNA, 15 bp, Homo sapiens
ccttgaagtttgtcc

SEQ ID NO: 596814 - DNA, 15 bp, Homo sapiens
cttgaagtttgtccc

SEQ ID NO: 596815 - DNA, 15 bp, Homo sapiens
ttgaagtttgtccca

SEQ ID NO: 596816 - DNA, 15 bp, Homo sapiens
tgaagtttgtcccag

SEQ ID NO: 596817 - DNA, 15 bp, Homo sapiens
gaagtttgtcccaga

SEQ ID NO: 596818 - DNA, 15 bp, Homo sapiens
aagtttgtcccagaa

SEQ ID NO: 596819 - DNA, 15 bp, Homo sapiens
agtttgtcccagaac

SEQ ID NO: 596820 - DNA, 15 bp, Homo sapiens
gtttgtcccagaacc

SEQ ID NO: 596821 - DNA, 15 bp, Homo sapiens
tttgtcccagaacca

SEQ ID NO: 596822 - DNA, 15 bp, Homo sapiens
ttgtcccagaaccat

SEQ ID NO: 596823 - DNA, 15 bp, Homo sapiens
tgtcccagaaccatt

SEQ ID NO: 596824 - DNA, 15 bp, Homo sapiens
gtcccagaaccattg

SEQ ID NO: 596825 - DNA, 15 bp, Homo sapiens
tcccagaaccattgc

SEQ ID NO: 596826 - DNA, 15 bp, Homo sapiens
cccagaaccattgcc

SEQ ID NO: 596827 - DNA, 15 bp, Homo sapiens
ccagaaccattgcct

SEQ ID NO: 596828 - DNA, 15 bp, Homo sapiens
cagaaccattgcctt

SEQ ID NO: 596829 - DNA, 15 bp, Homo sapiens
agaaccattgccttg

SEQ ID NO: 596830 - DNA, 15 bp, Homo sapiens
gaaccattgccttgg

SEQ ID NO: 596831 - DNA, 15 bp, Homo sapiens
aaccattgccttggt

SEQ ID NO: 596832 - DNA, 15 bp, Homo sapiens
accattgccttggtg

SEQ ID NO: 596833 - DNA, 15 bp, Homo sapiens
ccattgccttggtga

SEQ ID NO: 596834 - DNA, 15 bp, Homo sapiens
cattgccttggtgag

SEQ ID NO: 596835 - DNA, 15 bp, Homo sapiens
attgccttggtgagg

SEQ ID NO: 596836 - DNA, 15 bp, Homo sapiens
ttgccttggtgaggg

SEQ ID NO: 596837 - DNA, 15 bp, Homo sapiens
tgccttggtgagggc

SEQ ID NO: 596838 - DNA, 15 bp, Homo sapiens
gccttggtgagggca

SEQ ID NO: 596839 - DNA, 15 bp, Homo sapiens
ccttggtgagggcag

SEQ ID NO: 596840 - DNA, 15 bp, Homo sapiens
cttggtgagggcaga

SEQ ID NO: 596841 - DNA, 15 bp, Homo sapiens
ttggtgagggcagac

SEQ ID NO: 596842 - DNA, 15 bp, Homo sapiens
tggtgagggcagact

SEQ ID NO: 596843 - DNA, 15 bp, Homo sapiens
ggtgagggcagactc

SEQ ID NO: 596844 - DNA, 15 bp, Homo sapiens
gtgagggcagactcc

SEQ ID NO: 596845 - DNA, 15 bp, Homo sapiens
tgagggcagactcca

SEQ ID NO: 596846 - DNA, 15 bp, Homo sapiens
gagggcagactccac

SEQ ID NO: 596847 - DNA, 15 bp, Homo sapiens
agggcagactccacc

SEQ ID NO: 596848 - DNA, 15 bp, Homo sapiens
gggcagactccacct

SEQ ID NO: 596849 - DNA, 15 bp, Homo sapiens
ggcagactccacctc

SEQ ID NO: 596850 - DNA, 15 bp, Homo sapiens
gcagactccacctcg

SEQ ID NO: 596851 - DNA, 15 bp, Homo sapiens
cagactccacctcgg

SEQ ID NO: 596852 - DNA, 15 bp, Homo sapiens
agactccacctcggc

SEQ ID NO: 596853 - DNA, 15 bp, Homo sapiens
gactccacctcggcg

SEQ ID NO: 596854 - DNA, 15 bp, Homo sapiens
actccacctcggcgg

SEQ ID NO: 596855 - DNA, 15 bp, Homo sapiens
ctccacctcggcgga

SEQ ID NO: 596856 - DNA, 15 bp, Homo sapiens
tccacctcggcggaa

SEQ ID NO: 596857 - DNA, 15 bp, Homo sapiens
ccacctcggcggaaa

SEQ ID NO: 596858 - DNA, 15 bp, Homo sapiens
cacctcggcggaaac

SEQ ID NO: 596859 - DNA, 15 bp, Homo sapiens
acctcggcggaaacc

SEQ ID NO: 596860 - DNA, 15 bp, Homo sapiens
cctcggcggaaaccc

SEQ ID NO: 596861 - DNA, 15 bp, Homo sapiens
ctcggcggaaacccc

SEQ ID NO: 596862 - DNA, 15 bp, Homo sapiens
tcggcggaaacccca

SEQ ID NO: 596863 - DNA, 15 bp, Homo sapiens
cggcggaaaccccag

SEQ ID NO: 596864 - DNA, 15 bp, Homo sapiens
ggcggaaaccccaga

SEQ ID NO: 596865 - DNA, 15 bp, Homo sapiens
gcggaaaccccagat

SEQ ID NO: 596866 - DNA, 15 bp, Homo sapiens
cggaaaccccagatg

SEQ ID NO: 596867 - DNA, 15 bp, Homo sapiens
ggaaaccccagatgt

SEQ ID NO: 596868 - DNA, 15 bp, Homo sapiens
gaaaccccagatgtg

SEQ ID NO: 596869 - DNA, 15 bp, Homo sapiens
aaaccccagatgtgg

SEQ ID NO: 596870 - DNA, 15 bp, Homo sapiens
aaccccagatgtgga

SEQ ID NO: 596871 - DNA, 15 bp, Homo sapiens
accccagatgtggac

SEQ ID NO: 596872 - DNA, 15 bp, Homo sapiens
ccccagatgtggaca

SEQ ID NO: 596873 - DNA, 15 bp, Homo sapiens
cccagatgtggacag

SEQ ID NO: 596874 - DNA, 15 bp, Homo sapiens
ccagatgtggacaga

SEQ ID NO: 596875 - DNA, 15 bp, Homo sapiens
cagatgtggacagac

SEQ ID NO: 596876 - DNA, 15 bp, Homo sapiens
agatgtggacagaca

SEQ ID NO: 596877 - DNA, 15 bp, Homo sapiens
gatgtggacagacat

SEQ ID NO: 596878 - DNA, 15 bp, Homo sapiens
atgtggacagacata

SEQ ID NO: 596879 - DNA, 15 bp, Homo sapiens
tgtggacagacatac

SEQ ID NO: 596880 - DNA, 15 bp, Homo sapiens
gtggacagacatacc

SEQ ID NO: 596881 - DNA, 15 bp, Homo sapiens
tggacagacatacct

SEQ ID NO: 596882 - DNA, 15 bp, Homo sapiens
ggacagacatacctc

SEQ ID NO: 596883 - DNA, 15 bp, Homo sapiens
gacagacatacctct

SEQ ID NO: 596884 - DNA, 15 bp, Homo sapiens
acagacatacctctc

SEQ ID NO: 596885 - DNA, 15 bp, Homo sapiens
cagacatacctctca

SEQ ID NO: 596886 - DNA, 15 bp, Homo sapiens
agacatacctctcag

SEQ ID NO: 596887 - DNA, 15 bp, Homo sapiens
gacatacctctcagc

SEQ ID NO: 596888 - DNA, 15 bp, Homo sapiens
acatacctctcagct

SEQ ID NO: 596889 - DNA, 15 bp, Homo sapiens
catacctctcagcta

SEQ ID NO: 596890 - DNA, 15 bp, Homo sapiens
atacctctcagctaa

SEQ ID NO: 596891 - DNA, 15 bp, Homo sapiens
tacctctcagctaag

SEQ ID NO: 596892 - DNA, 15 bp, Homo sapiens
acctctcagctaaga

SEQ ID NO: 596893 - DNA, 15 bp, Homo sapiens
cctctcagctaagat

SEQ ID NO: 596894 - DNA, 15 bp, Homo sapiens
ctctcagctaagatg

SEQ ID NO: 596895 - DNA, 15 bp, Homo sapiens
tctcagctaagatgc

SEQ ID NO: 596896 - DNA, 15 bp, Homo sapiens
ctcagctaagatgcc

SEQ ID NO: 596897 - DNA, 15 bp, Homo sapiens
tcagctaagatgcca

SEQ ID NO: 596898 - DNA, 15 bp, Homo sapiens
cagctaagatgccag

SEQ ID NO: 596899 - DNA, 15 bp, Homo sapiens
agctaagatgccagc

SEQ ID NO: 596900 - DNA, 15 bp, Homo sapiens
gctaagatgccagca

SEQ ID NO: 596901 - DNA, 15 bp, Homo sapiens
ctaagatgccagcac

SEQ ID NO: 596902 - DNA, 15 bp, Homo sapiens
taagatgccagcaca

SEQ ID NO: 596903 - DNA, 15 bp, Homo sapiens
aagatgccagcacat

SEQ ID NO: 596904 - DNA, 15 bp, Homo sapiens
agatgccagcacatt

SEQ ID NO: 596905 - DNA, 15 bp, Homo sapiens
gatgccagcacattt

SEQ ID NO: 596906 - DNA, 15 bp, Homo sapiens
atgccagcacatttt

SEQ ID NO: 596907 - DNA, 15 bp, Homo sapiens
tgccagcacattttt

SEQ ID NO: 596908 - DNA, 15 bp, Homo sapiens
gccagcacatttttc

SEQ ID NO: 596909 - DNA, 15 bp, Homo sapiens
ccagcacatttttca

SEQ ID NO: 596910 - DNA, 15 bp, Homo sapiens
cagcacatttttcag

SEQ ID NO: 596911 - DNA, 15 bp, Homo sapiens
agcacatttttcagc

SEQ ID NO: 596912 - DNA, 15 bp, Homo sapiens
gcacatttttcagcc

SEQ ID NO: 596913 - DNA, 15 bp, Homo sapiens
cacatttttcagccc

SEQ ID NO: 596914 - DNA, 15 bp, Homo sapiens
acatttttcagcccc

SEQ ID NO: 596915 - DNA, 15 bp, Homo sapiens
catttttcagccccc

SEQ ID NO: 596916 - DNA, 15 bp, Homo sapiens
atttttcagccccca

SEQ ID NO: 596917 - DNA, 15 bp, Homo sapiens
tttttcagcccccag

SEQ ID NO: 596918 - DNA, 15 bp, Homo sapiens
ttttcagcccccaga

SEQ ID NO: 596919 - DNA, 15 bp, Homo sapiens
tttcagcccccagat

SEQ ID NO: 596920 - DNA, 15 bp, Homo sapiens
ttcagcccccagatt

SEQ ID NO: 596921 - DNA, 15 bp, Homo sapiens
tcagcccccagatta

SEQ ID NO: 596922 - DNA, 15 bp, Homo sapiens
cagcccccagattat

SEQ ID NO: 596923 - DNA, 15 bp, Homo sapiens
agcccccagattatt

SEQ ID NO: 596924 - DNA, 15 bp, Homo sapiens
gcccccagattattt

SEQ ID NO: 596925 - DNA, 15 bp, Homo sapiens
cccccagattatttt

SEQ ID NO: 596926 - DNA, 15 bp, Homo sapiens
ccccagattattttc

SEQ ID NO: 596927 - DNA, 15 bp, Homo sapiens
cccagattattttcc

SEQ ID NO: 596928 - DNA, 15 bp, Homo sapiens
ccagattattttcca

SEQ ID NO: 596929 - DNA, 15 bp, Homo sapiens
cagattattttccag

SEQ ID NO: 596930 - DNA, 15 bp, Homo sapiens
agattattttccaga

SEQ ID NO: 596931 - DNA, 15 bp, Homo sapiens
gattattttccagac

SEQ ID NO: 596932 - DNA, 15 bp, Homo sapiens
attattttccagacg

SEQ ID NO: 596933 - DNA, 15 bp, Homo sapiens
ttattttccagacgc

SEQ ID NO: 596934 - DNA, 15 bp, Homo sapiens
tattttccagacgca

SEQ ID NO: 596935 - DNA, 15 bp, Homo sapiens
attttccagacgcat

SEQ ID NO: 596936 - DNA, 15 bp, Homo sapiens
ttttccagacgcatc

SEQ ID NO: 596937 - DNA, 15 bp, Homo sapiens
tttccagacgcatcc

SEQ ID NO: 596938 - DNA, 15 bp, Homo sapiens
ttccagacgcatcct

SEQ ID NO: 596939 - DNA, 15 bp, Homo sapiens
tccagacgcatcctc

SEQ ID NO: 596940 - DNA, 15 bp, Homo sapiens
ccagacgcatcctct

SEQ ID NO: 596941 - DNA, 15 bp, Homo sapiens
cagacgcatcctctc

SEQ ID NO: 596942 - DNA, 15 bp, Homo sapiens
agacgcatcctctcc

SEQ ID NO: 596943 - DNA, 15 bp, Homo sapiens
gacgcatcctctccc

SEQ ID NO: 596944 - DNA, 15 bp, Homo sapiens
acgcatcctctccct

SEQ ID NO: 596945 - DNA, 15 bp, Homo sapiens
cgcatcctctccctg

SEQ ID NO: 596946 - DNA, 15 bp, Homo sapiens
gcatcctctccctgc

SEQ ID NO: 596947 - DNA, 15 bp, Homo sapiens
catcctctccctgcc

SEQ ID NO: 596948 - DNA, 15 bp, Homo sapiens
atcctctccctgccc

SEQ ID NO: 596949 - DNA, 15 bp, Homo sapiens
tcctctccctgcccc

SEQ ID NO: 596950 - DNA, 15 bp, Homo sapiens
cctctccctgcccct

SEQ ID NO: 596951 - DNA, 15 bp, Homo sapiens
ctctccctgcccctg

SEQ ID NO: 596952 - DNA, 15 bp, Homo sapiens
tctccctgcccctgt

SEQ ID NO: 596953 - DNA, 15 bp, Homo sapiens
ctccctgcccctgtt

SEQ ID NO: 596954 - DNA, 15 bp, Homo sapiens
tccctgcccctgttc

SEQ ID NO: 596955 - DNA, 15 bp, Homo sapiens
ccctgcccctgttcc

SEQ ID NO: 596956 - DNA, 15 bp, Homo sapiens
cctgcccctgttccc

SEQ ID NO: 596957 - DNA, 15 bp, Homo sapiens
ctgcccctgttcccc

SEQ ID NO: 596958 - DNA, 15 bp, Homo sapiens
tgcccctgttcccca

SEQ ID NO: 596959 - DNA, 15 bp, Homo sapiens
gcccctgttccccag

SEQ ID NO: 596960 - DNA, 15 bp, Homo sapiens
cccctgttccccagc

SEQ ID NO: 596961 - DNA, 15 bp, Homo sapiens
ccctgttccccagcc

SEQ ID NO: 596962 - DNA, 15 bp, Homo sapiens
cctgttccccagccc

SEQ ID NO: 596963 - DNA, 15 bp, Homo sapiens
ctgttccccagccca

SEQ ID NO: 596964 - DNA, 15 bp, Homo sapiens
tgttccccagcccag

SEQ ID NO: 596965 - DNA, 15 bp, Homo sapiens
gttccccagcccagc

SEQ ID NO: 596966 - DNA, 15 bp, Homo sapiens
ttccccagcccagct

SEQ ID NO: 596967 - DNA, 15 bp, Homo sapiens
tccccagcccagctg

SEQ ID NO: 596968 - DNA, 15 bp, Homo sapiens
ccccagcccagctgc

SEQ ID NO: 596969 - DNA, 15 bp, Homo sapiens
cccagcccagctgct

SEQ ID NO: 596970 - DNA, 15 bp, Homo sapiens
ccagcccagctgctg

SEQ ID NO: 596971 - DNA, 15 bp, Homo sapiens
cagcccagctgctgt

SEQ ID NO: 596972 - DNA, 15 bp, Homo sapiens
agcccagctgctgtc

SEQ ID NO: 596973 - DNA, 15 bp, Homo sapiens
gcccagctgctgtcc

SEQ ID NO: 596974 - DNA, 15 bp, Homo sapiens
cccagctgctgtcct

SEQ ID NO: 596975 - DNA, 15 bp, Homo sapiens
ccagctgctgtcctg

SEQ ID NO: 596976 - DNA, 15 bp, Homo sapiens
cagctgctgtcctga

SEQ ID NO: 596977 - DNA, 15 bp, Homo sapiens
agctgctgtcctgag

SEQ ID NO: 596978 - DNA, 15 bp, Homo sapiens
gctgctgtcctgagc

SEQ ID NO: 596979 - DNA, 15 bp, Homo sapiens
ctgctgtcctgagcc

SEQ ID NO: 596980 - DNA, 15 bp, Homo sapiens
tgctgtcctgagccc

SEQ ID NO: 596981 - DNA, 15 bp, Homo sapiens
gctgtcctgagcccc

SEQ ID NO: 596982 - DNA, 15 bp, Homo sapiens
ctgtcctgagcccca

SEQ ID NO: 596983 - DNA, 15 bp, Homo sapiens
tgtcctgagccccag

SEQ ID NO: 596984 - DNA, 15 bp, Homo sapiens
gtcctgagccccagg

SEQ ID NO: 596985 - DNA, 15 bp, Homo sapiens
tcctgagccccagga

SEQ ID NO: 596986 - DNA, 15 bp, Homo sapiens
cctgagccccaggag

SEQ ID NO: 596987 - DNA, 15 bp, Homo sapiens
ctgagccccaggaga

SEQ ID NO: 596988 - DNA, 15 bp, Homo sapiens
tgagccccaggagac

SEQ ID NO: 596989 - DNA, 15 bp, Homo sapiens
gagccccaggagaca

SEQ ID NO: 596990 - DNA, 15 bp, Homo sapiens
agccccaggagacaa

SEQ ID NO: 596991 - DNA, 15 bp, Homo sapiens
gccccaggagacaac

SEQ ID NO: 596992 - DNA, 15 bp, Homo sapiens
ccccaggagacaacc

SEQ ID NO: 596993 - DNA, 15 bp, Homo sapiens
cccaggagacaacct

SEQ ID NO: 596994 - DNA, 15 bp, Homo sapiens
ccaggagacaacctc

SEQ ID NO: 596995 - DNA, 15 bp, Homo sapiens
caggagacaacctcc

SEQ ID NO: 596996 - DNA, 15 bp, Homo sapiens
aggagacaacctccc

SEQ ID NO: 596997 - DNA, 15 bp, Homo sapiens
ggagacaacctcccc

SEQ ID NO: 596998 - DNA, 15 bp, Homo sapiens
gagacaacctccccc

SEQ ID NO: 596999 - DNA, 15 bp, Homo sapiens
agacaacctccccct

SEQ ID NO: 597000 - DNA, 15 bp, Homo sapiens
gacaacctccccctt

SEQ ID NO: 597001 - DNA, 15 bp, Homo sapiens
acaacctcccccttc

SEQ ID NO: 597002 - DNA, 15 bp, Homo sapiens
caacctcccccttcc

SEQ ID NO: 597003 - DNA, 15 bp, Homo sapiens
aacctcccccttcca

SEQ ID NO: 597004 - DNA, 15 bp, Homo sapiens
acctcccccttccaa

SEQ ID NO: 597005 - DNA, 15 bp, Homo sapiens
cctcccccttccaag

SEQ ID NO: 597006 - DNA, 15 bp, Homo sapiens
ctcccccttccaaga

SEQ ID NO: 597007 - DNA, 15 bp, Homo sapiens
tcccccttccaagac

SEQ ID NO: 597008 - DNA, 15 bp, Homo sapiens
cccccttccaagaca

SEQ ID NO: 597009 - DNA, 15 bp, Homo sapiens
ccccttccaagacac

SEQ ID NO: 597010 - DNA, 15 bp, Homo sapiens
cccttccaagacacc

SEQ ID NO: 597011 - DNA, 15 bp, Homo sapiens
ccttccaagacacct

SEQ ID NO: 597012 - DNA, 15 bp, Homo sapiens
cttccaagacacctt

SEQ ID NO: 597013 - DNA, 15 bp, Homo sapiens
ttccaagacaccttc

SEQ ID NO: 597014 - DNA, 15 bp, Homo sapiens
tccaagacaccttcc

SEQ ID NO: 597015 - DNA, 15 bp, Homo sapiens
ccaagacaccttcct

SEQ ID NO: 597016 - DNA, 15 bp, Homo sapiens
caagacaccttcctc

SEQ ID NO: 597017 - DNA, 15 bp, Homo sapiens
aagacaccttcctca

SEQ ID NO: 597018 - DNA, 15 bp, Homo sapiens
agacaccttcctcac

SEQ ID NO: 597019 - DNA, 15 bp, Homo sapiens
gacaccttcctcaca

SEQ ID NO: 597020 - DNA, 15 bp, Homo sapiens
acaccttcctcacag

SEQ ID NO: 597021 - DNA, 15 bp, Homo sapiens
caccttcctcacagc

SEQ ID NO: 597022 - DNA, 15 bp, Homo sapiens
accttcctcacagcg

SEQ ID NO: 597023 - DNA, 15 bp, Homo sapiens
ccttcctcacagcgc

SEQ ID NO: 597024 - DNA, 15 bp, Homo sapiens
cttcctcacagcgcc

SEQ ID NO: 597025 - DNA, 15 bp, Homo sapiens
ttcctcacagcgccc

SEQ ID NO: 597026 - DNA, 15 bp, Homo sapiens
tcctcacagcgcccc

SEQ ID NO: 597027 - DNA, 15 bp, Homo sapiens
cctcacagcgccccc

SEQ ID NO: 597028 - DNA, 15 bp, Homo sapiens
ctcacagcgccccca

SEQ ID NO: 597029 - DNA, 15 bp, Homo sapiens
tcacagcgcccccag

SEQ ID NO: 597030 - DNA, 15 bp, Homo sapiens
cacagcgcccccagc

SEQ ID NO: 597031 - DNA, 15 bp, Homo sapiens
acagcgcccccagcc

SEQ ID NO: 597032 - DNA, 15 bp, Homo sapiens
cagcgcccccagcca

SEQ ID NO: 597033 - DNA, 15 bp, Homo sapiens
agcgcccccagccag

SEQ ID NO: 597034 - DNA, 15 bp, Homo sapiens
gcgcccccagccagg

SEQ ID NO: 597035 - DNA, 15 bp, Homo sapiens
cgcccccagccaggc

SEQ ID NO: 597036 - DNA, 15 bp, Homo sapiens
gcccccagccaggcc

SEQ ID NO: 597037 - DNA, 15 bp, Homo sapiens
cccccagccaggcct

SEQ ID NO: 597038 - DNA, 15 bp, Homo sapiens
ccccagccaggcctt

SEQ ID NO: 597039 - DNA, 15 bp, Homo sapiens
cccagccaggccttg

SEQ ID NO: 597040 - DNA, 15 bp, Homo sapiens
ccagccaggccttgg

SEQ ID NO: 597041 - DNA, 15 bp, Homo sapiens
cagccaggccttggt

SEQ ID NO: 597042 - DNA, 15 bp, Homo sapiens
agccaggccttggtt

SEQ ID NO: 597043 - DNA, 15 bp, Homo sapiens
gccaggccttggttt

SEQ ID NO: 597044 - DNA, 15 bp, Homo sapiens
ccaggccttggtttt

SEQ ID NO: 597045 - DNA, 15 bp, Homo sapiens
caggccttggttttc

SEQ ID NO: 597046 - DNA, 15 bp, Homo sapiens
aggccttggttttcc

SEQ ID NO: 597047 - DNA, 15 bp, Homo sapiens
ggccttggttttcct

SEQ ID NO: 597048 - DNA, 15 bp, Homo sapiens
gccttggttttcctg

SEQ ID NO: 597049 - DNA, 15 bp, Homo sapiens
ccttggttttcctgg

SEQ ID NO: 597050 - DNA, 15 bp, Homo sapiens
cttggttttcctggt

SEQ ID NO: 597051 - DNA, 15 bp, Homo sapiens
ttggttttcctggtg

SEQ ID NO: 597052 - DNA, 15 bp, Homo sapiens
tggttttcctggtgc

SEQ ID NO: 597053 - DNA, 15 bp, Homo sapiens
ggttttcctggtgcg

SEQ ID NO: 597054 - DNA, 15 bp, Homo sapiens
gttttcctggtgcgg

SEQ ID NO: 597055 - DNA, 15 bp, Homo sapiens
ttttcctggtgcggc

SEQ ID NO: 597056 - DNA, 15 bp, Homo sapiens
tttcctggtgcggct

SEQ ID NO: 597057 - DNA, 15 bp, Homo sapiens
ttcctggtgcggctg

SEQ ID NO: 597058 - DNA, 15 bp, Homo sapiens
tcctggtgcggctgg

SEQ ID NO: 597059 - DNA, 15 bp, Homo sapiens
cctggtgcggctggg

SEQ ID NO: 597060 - DNA, 15 bp, Homo sapiens
ctggtgcggctggga

SEQ ID NO: 597061 - DNA, 15 bp, Homo sapiens
tggtgcggctgggat

SEQ ID NO: 597062 - DNA, 15 bp, Homo sapiens
ggtgcggctgggatc

SEQ ID NO: 597063 - DNA, 15 bp, Homo sapiens
gtgcggctgggatct

SEQ ID NO: 597064 - DNA, 15 bp, Homo sapiens
tgcggctgggatctt

SEQ ID NO: 597065 - DNA, 15 bp, Homo sapiens
gcggctgggatcttt

SEQ ID NO: 597066 - DNA, 15 bp, Homo sapiens
cggctgggatctttc

SEQ ID NO: 597067 - DNA, 15 bp, Homo sapiens
ggctgggatctttca

SEQ ID NO: 597068 - DNA, 15 bp, Homo sapiens
gctgggatctttcag

SEQ ID NO: 597069 - DNA, 15 bp, Homo sapiens
ctgggatctttcagg

SEQ ID NO: 597070 - DNA, 15 bp, Homo sapiens
tgggatctttcaggg

SEQ ID NO: 597071 - DNA, 15 bp, Homo sapiens
gggatctttcagggg

SEQ ID NO: 597072 - DNA, 15 bp, Homo sapiens
ggatctttcaggggc

SEQ ID NO: 597073 - DNA, 15 bp, Homo sapiens
gatctttcaggggcc

SEQ ID NO: 597074 - DNA, 15 bp, Homo sapiens
atctttcaggggcca

SEQ ID NO: 597075 - DNA, 15 bp, Homo sapiens
tctttcaggggccag

SEQ ID NO: 597076 - DNA, 15 bp, Homo sapiens
ctttcaggggccagg

SEQ ID NO: 597077 - DNA, 15 bp, Homo sapiens
tttcaggggccaggg

SEQ ID NO: 597078 - DNA, 15 bp, Homo sapiens
ttcaggggccagggc

SEQ ID NO: 597079 - DNA, 15 bp, Homo sapiens
tcaggggccagggct

SEQ ID NO: 597080 - DNA, 15 bp, Homo sapiens
caggggccagggctg

SEQ ID NO: 597081 - DNA, 15 bp, Homo sapiens
aggggccagggctgc

SEQ ID NO: 597082 - DNA, 15 bp, Homo sapiens
ggggccagggctgca

SEQ ID NO: 597083 - DNA, 15 bp, Homo sapiens
gggccagggctgcag

SEQ ID NO: 597084 - DNA, 15 bp, Homo sapiens
ggccagggctgcaga

SEQ ID NO: 597085 - DNA, 15 bp, Homo sapiens
gccagggctgcagac

SEQ ID NO: 597086 - DNA, 15 bp, Homo sapiens
ccagggctgcagacc

SEQ ID NO: 597087 - DNA, 15 bp, Homo sapiens
cagggctgcagaccc

SEQ ID NO: 597088 - DNA, 15 bp, Homo sapiens
agggctgcagaccca

SEQ ID NO: 597089 - DNA, 15 bp, Homo sapiens
gggctgcagacccaa

SEQ ID NO: 597090 - DNA, 15 bp, Homo sapiens
ggctgcagacccaag

SEQ ID NO: 597091 - DNA, 15 bp, Homo sapiens
gctgcagacccaaga

SEQ ID NO: 597092 - DNA, 15 bp, Homo sapiens
ctgcagacccaagat

SEQ ID NO: 597093 - DNA, 15 bp, Homo sapiens
tgcagacccaagatg

SEQ ID NO: 597094 - DNA, 15 bp, Homo sapiens
gcagacccaagatgt

SEQ ID NO: 597095 - DNA, 15 bp, Homo sapiens
cagacccaagatgtg

SEQ ID NO: 597096 - DNA, 15 bp, Homo sapiens
agacccaagatgtgg

SEQ ID NO: 597097 - DNA, 15 bp, Homo sapiens
gacccaagatgtggt

SEQ ID NO: 597098 - DNA, 15 bp, Homo sapiens
acccaagatgtggtt

SEQ ID NO: 597099 - DNA, 15 bp, Homo sapiens
cccaagatgtggttc

SEQ ID NO: 597100 - DNA, 15 bp, Homo sapiens
ccaagatgtggttct

SEQ ID NO: 597101 - DNA, 15 bp, Homo sapiens
caagatgtggttctt

SEQ ID NO: 597102 - DNA, 15 bp, Homo sapiens
aagatgtggttcttg

SEQ ID NO: 597103 - DNA, 15 bp, Homo sapiens
agatgtggttcttgc

SEQ ID NO: 597104 - DNA, 15 bp, Homo sapiens
gatgtggttcttgcc

SEQ ID NO: 597105 - DNA, 15 bp, Homo sapiens
atgtggttcttgccc

SEQ ID NO: 597106 - DNA, 15 bp, Homo sapiens
tgtggttcttgccca

SEQ ID NO: 597107 - DNA, 15 bp, Homo sapiens
gtggttcttgcccat

SEQ ID NO: 597108 - DNA, 15 bp, Homo sapiens
tggttcttgcccatc

SEQ ID NO: 597109 - DNA, 15 bp, Homo sapiens
ggttcttgcccatcg

SEQ ID NO: 597110 - DNA, 15 bp, Homo sapiens
gttcttgcccatcgt

SEQ ID NO: 597111 - DNA, 15 bp, Homo sapiens
ttcttgcccatcgtt

SEQ ID NO: 597112 - DNA, 15 bp, Homo sapiens
tcttgcccatcgttc

SEQ ID NO: 597113 - DNA, 15 bp, Homo sapiens
cttgcccatcgttcc

SEQ ID NO: 597114 - DNA, 15 bp, Homo sapiens
ttgcccatcgttccc

SEQ ID NO: 597115 - DNA, 15 bp, Homo sapiens
tgcccatcgttccct

SEQ ID NO: 597116 - DNA, 15 bp, Homo sapiens
gcccatcgttccctc

SEQ ID NO: 597117 - DNA, 15 bp, Homo sapiens
cccatcgttccctcc

SEQ ID NO: 597118 - DNA, 15 bp, Homo sapiens
ccatcgttccctcct

SEQ ID NO: 597119 - DNA, 15 bp, Homo sapiens
catcgttccctcctc

SEQ ID NO: 597120 - DNA, 15 bp, Homo sapiens
atcgttccctcctct

SEQ ID NO: 597121 - DNA, 15 bp, Homo sapiens
tcgttccctcctctt

SEQ ID NO: 597122 - DNA, 15 bp, Homo sapiens
cgttccctcctctta

SEQ ID NO: 597123 - DNA, 15 bp, Homo sapiens
gttccctcctcttac

SEQ ID NO: 597124 - DNA, 15 bp, Homo sapiens
ttccctcctcttacg

SEQ ID NO: 597125 - DNA, 15 bp, Homo sapiens
tccctcctcttacgg

SEQ ID NO: 597126 - DNA, 15 bp, Homo sapiens
ccctcctcttacgga

SEQ ID NO: 597127 - DNA, 15 bp, Homo sapiens
cctcctcttacggac

SEQ ID NO: 597128 - DNA, 15 bp, Homo sapiens
ctcctcttacggact

SEQ ID NO: 597129 - DNA, 15 bp, Homo sapiens
tcctcttacggactg

SEQ ID NO: 597130 - DNA, 15 bp, Homo sapiens
cctcttacggactgg

SEQ ID NO: 597131 - DNA, 15 bp, Homo sapiens
ctcttacggactggg

SEQ ID NO: 597132 - DNA, 15 bp, Homo sapiens
tcttacggactgggt

SEQ ID NO: 597133 - DNA, 15 bp, Homo sapiens
cttacggactgggtt

SEQ ID NO: 597134 - DNA, 15 bp, Homo sapiens
ttacggactgggttg

SEQ ID NO: 597135 - DNA, 15 bp, Homo sapiens
tacggactgggttgg

SEQ ID NO: 597136 - DNA, 15 bp, Homo sapiens
acggactgggttggg

SEQ ID NO: 597137 - DNA, 15 bp, Homo sapiens
cggactgggttggga

SEQ ID NO: 597138 - DNA, 15 bp, Homo sapiens
ggactgggttgggat

SEQ ID NO: 597139 - DNA, 15 bp, Homo sapiens
gactgggttgggata

SEQ ID NO: 597140 - DNA, 15 bp, Homo sapiens
actgggttgggatag

SEQ ID NO: 597141 - DNA, 15 bp, Homo sapiens
ctgggttgggatagg

SEQ ID NO: 597142 - DNA, 15 bp, Homo sapiens
tgggttgggataggg

SEQ ID NO: 597143 - DNA, 15 bp, Homo sapiens
gggttgggatagggg

SEQ ID NO: 597144 - DNA, 15 bp, Homo sapiens
ggttgggataggggt

SEQ ID NO: 597145 - DNA, 15 bp, Homo sapiens
gttgggataggggtg

SEQ ID NO: 597146 - DNA, 15 bp, Homo sapiens
ttgggataggggtgg

SEQ ID NO: 597147 - DNA, 15 bp, Homo sapiens
tgggataggggtgga

SEQ ID NO: 597148 - DNA, 15 bp, Homo sapiens
gggataggggtggag

SEQ ID NO: 597149 - DNA, 15 bp, Homo sapiens
ggataggggtggagg

SEQ ID NO: 597150 - DNA, 15 bp, Homo sapiens
gataggggtggaggc

SEQ ID NO: 597151 - DNA, 15 bp, Homo sapiens
ataggggtggaggct

SEQ ID NO: 597152 - DNA, 15 bp, Homo sapiens
taggggtggaggctc

SEQ ID NO: 597153 - DNA, 15 bp, Homo sapiens
aggggtggaggctct

SEQ ID NO: 597154 - DNA, 15 bp, Homo sapiens
ggggtggaggctctg

SEQ ID NO: 597155 - DNA, 15 bp, Homo sapiens
gggtggaggctctgc

SEQ ID NO: 597156 - DNA, 15 bp, Homo sapiens
ggtggaggctctgct

SEQ ID NO: 597157 - DNA, 15 bp, Homo sapiens
gtggaggctctgctt

SEQ ID NO: 597158 - DNA, 15 bp, Homo sapiens
tggaggctctgcttc

SEQ ID NO: 597159 - DNA, 15 bp, Homo sapiens
ggaggctctgcttcc

SEQ ID NO: 597160 - DNA, 15 bp, Homo sapiens
gaggctctgcttcct

SEQ ID NO: 597161 - DNA, 15 bp, Homo sapiens
aggctctgcttcctg

SEQ ID NO: 597162 - DNA, 15 bp, Homo sapiens
ggctctgcttcctgg

SEQ ID NO: 597163 - DNA, 15 bp, Homo sapiens
gctctgcttcctggt

SEQ ID NO: 597164 - DNA, 15 bp, Homo sapiens
ctctgcttcctggtt

SEQ ID NO: 597165 - DNA, 15 bp, Homo sapiens
tctgcttcctggttc

SEQ ID NO: 597166 - DNA, 15 bp, Homo sapiens
ctgcttcctggttcc

SEQ ID NO: 597167 - DNA, 15 bp, Homo sapiens
tgcttcctggttcca

SEQ ID NO: 597168 - DNA, 15 bp, Homo sapiens
gcttcctggttccat

SEQ ID NO: 597169 - DNA, 15 bp, Homo sapiens
cttcctggttccatc

SEQ ID NO: 597170 - DNA, 15 bp, Homo sapiens
ttcctggttccatcc

SEQ ID NO: 597171 - DNA, 15 bp, Homo sapiens
tcctggttccatcct

SEQ ID NO: 597172 - DNA, 15 bp, Homo sapiens
cctggttccatcctc

SEQ ID NO: 597173 - DNA, 15 bp, Homo sapiens
ctggttccatcctcc

SEQ ID NO: 597174 - DNA, 15 bp, Homo sapiens
tggttccatcctcct

SEQ ID NO: 597175 - DNA, 15 bp, Homo sapiens
ggttccatcctcctc

SEQ ID NO: 597176 - DNA, 15 bp, Homo sapiens
gttccatcctcctcc

SEQ ID NO: 597177 - DNA, 15 bp, Homo sapiens
ttccatcctcctcca

SEQ ID NO: 597178 - DNA, 15 bp, Homo sapiens
tccatcctcctccag

SEQ ID NO: 597179 - DNA, 15 bp, Homo sapiens
ccatcctcctccagg

SEQ ID NO: 597180 - DNA, 15 bp, Homo sapiens
catcctcctccaggc

SEQ ID NO: 597181 - DNA, 15 bp, Homo sapiens
atcctcctccaggcc

SEQ ID NO: 597182 - DNA, 15 bp, Homo sapiens
tcctcctccaggcca

SEQ ID NO: 597183 - DNA, 15 bp, Homo sapiens
cctcctccaggccag

SEQ ID NO: 597184 - DNA, 15 bp, Homo sapiens
ctcctccaggccagg

SEQ ID NO: 597185 - DNA, 15 bp, Homo sapiens
tcctccaggccaggt

SEQ ID NO: 597186 - DNA, 15 bp, Homo sapiens
cctccaggccaggtt

SEQ ID NO: 597187 - DNA, 15 bp, Homo sapiens
ctccaggccaggttt

SEQ ID NO: 597188 - DNA, 15 bp, Homo sapiens
tccaggccaggttta

SEQ ID NO: 597189 - DNA, 15 bp, Homo sapiens
ccaggccaggtttac

SEQ ID NO: 597190 - DNA, 15 bp, Homo sapiens
caggccaggtttaca

SEQ ID NO: 597191 - DNA, 15 bp, Homo sapiens
aggccaggtttacag

SEQ ID NO: 597192 - DNA, 15 bp, Homo sapiens
ggccaggtttacagg

SEQ ID NO: 597193 - DNA, 15 bp, Homo sapiens
gccaggtttacaggt

SEQ ID NO: 597194 - DNA, 15 bp, Homo sapiens
ccaggtttacaggtc

SEQ ID NO: 597195 - DNA, 15 bp, Homo sapiens
caggtttacaggtct

SEQ ID NO: 597196 - DNA, 15 bp, Homo sapiens
aggtttacaggtctg

SEQ ID NO: 597197 - DNA, 15 bp, Homo sapiens
ggtttacaggtctgg

SEQ ID NO: 597198 - DNA, 15 bp, Homo sapiens
gtttacaggtctggt

SEQ ID NO: 597199 - DNA, 15 bp, Homo sapiens
tttacaggtctggtt

SEQ ID NO: 597200 - DNA, 15 bp, Homo sapiens
ttacaggtctggttt

SEQ ID NO: 597201 - DNA, 15 bp, Homo sapiens
tacaggtctggtttg

SEQ ID NO: 597202 - DNA, 15 bp, Homo sapiens
acaggtctggtttga

SEQ ID NO: 597203 - DNA, 15 bp, Homo sapiens
caggtctggtttgaa

SEQ ID NO: 597204 - DNA, 15 bp, Homo sapiens
aggtctggtttgaat

SEQ ID NO: 597205 - DNA, 15 bp, Homo sapiens
ggtctggtttgaatg

SEQ ID NO: 597206 - DNA, 15 bp, Homo sapiens
gtctggtttgaatga

SEQ ID NO: 597207 - DNA, 15 bp, Homo sapiens
tctggtttgaatgaa

SEQ ID NO: 597208 - DNA, 15 bp, Homo sapiens
ctggtttgaatgaag

SEQ ID NO: 597209 - DNA, 15 bp, Homo sapiens
tggtttgaatgaagg

SEQ ID NO: 597210 - DNA, 15 bp, Homo sapiens
ggtttgaatgaaggg

SEQ ID NO: 597211 - DNA, 15 bp, Homo sapiens
gtttgaatgaaggga

SEQ ID NO: 597212 - DNA, 15 bp, Homo sapiens
tttgaatgaagggaa

SEQ ID NO: 597213 - DNA, 15 bp, Homo sapiens
ttgaatgaagggaag

SEQ ID NO: 597214 - DNA, 15 bp, Homo sapiens
tgaatgaagggaaga

SEQ ID NO: 597215 - DNA, 15 bp, Homo sapiens
gaatgaagggaagaa

SEQ ID NO: 597216 - DNA, 15 bp, Homo sapiens
aatgaagggaagaaa

SEQ ID NO: 597217 - DNA, 15 bp, Homo sapiens
atgaagggaagaaag

SEQ ID NO: 597218 - DNA, 15 bp, Homo sapiens
tgaagggaagaaagc

SEQ ID NO: 597219 - DNA, 15 bp, Homo sapiens
gaagggaagaaagca

SEQ ID NO: 597220 - DNA, 15 bp, Homo sapiens
aagggaagaaagcaa

SEQ ID NO: 597221 - DNA, 15 bp, Homo sapiens
agggaagaaagcaaa

SEQ ID NO: 597222 - DNA, 15 bp, Homo sapiens
gggaagaaagcaaag

SEQ ID NO: 597223 - DNA, 15 bp, Homo sapiens
ggaagaaagcaaagg

SEQ ID NO: 597224 - DNA, 15 bp, Homo sapiens
gaagaaagcaaaggg

SEQ ID NO: 597225 - DNA, 15 bp, Homo sapiens
aagaaagcaaaggga

SEQ ID NO: 597226 - DNA, 15 bp, Homo sapiens
agaaagcaaagggaa

SEQ ID NO: 597227 - DNA, 15 bp, Homo sapiens
gaaagcaaagggaag

SEQ ID NO: 597228 - DNA, 15 bp, Homo sapiens
aaagcaaagggaaga

SEQ ID NO: 597229 - DNA, 15 bp, Homo sapiens
aagcaaagggaagag

SEQ ID NO: 597230 - DNA, 15 bp, Homo sapiens
agcaaagggaagagg

SEQ ID NO: 597231 - DNA, 15 bp, Homo sapiens
gcaaagggaagagga

SEQ ID NO: 597232 - DNA, 15 bp, Homo sapiens
caaagggaagaggaa

SEQ ID NO: 597233 - DNA, 15 bp, Homo sapiens
aaagggaagaggaaa

SEQ ID NO: 597234 - DNA, 15 bp, Homo sapiens
aagggaagaggaaag

SEQ ID NO: 597235 - DNA, 15 bp, Homo sapiens
agggaagaggaaagt

SEQ ID NO: 597236 - DNA, 15 bp, Homo sapiens
gggaagaggaaagtt

SEQ ID NO: 597237 - DNA, 15 bp, Homo sapiens
ggaagaggaaagttt

SEQ ID NO: 597238 - DNA, 15 bp, Homo sapiens
gaagaggaaagtttc

SEQ ID NO: 597239 - DNA, 15 bp, Homo sapiens
aagaggaaagtttct

SEQ ID NO: 597240 - DNA, 15 bp, Homo sapiens
agaggaaagtttctg

SEQ ID NO: 597241 - DNA, 15 bp, Homo sapiens
gaggaaagtttctgt

SEQ ID NO: 597242 - DNA, 15 bp, Homo sapiens
aggaaagtttctgtg

SEQ ID NO: 597243 - DNA, 15 bp, Homo sapiens
ggaaagtttctgtga

SEQ ID NO: 597244 - DNA, 15 bp, Homo sapiens
gaaagtttctgtgag

SEQ ID NO: 597245 - DNA, 15 bp, Homo sapiens
aaagtttctgtgagc

SEQ ID NO: 597246 - DNA, 15 bp, Homo sapiens
aagtttctgtgagct

SEQ ID NO: 597247 - DNA, 15 bp, Homo sapiens
agtttctgtgagctg

SEQ ID NO: 597248 - DNA, 15 bp, Homo sapiens
gtttctgtgagctgt

SEQ ID NO: 597249 - DNA, 15 bp, Homo sapiens
tttctgtgagctgtc

SEQ ID NO: 597250 - DNA, 15 bp, Homo sapiens
ttctgtgagctgtct

SEQ ID NO: 597251 - DNA, 15 bp, Homo sapiens
tctgtgagctgtctt

SEQ ID NO: 597252 - DNA, 15 bp, Homo sapiens
ctgtgagctgtcttc

SEQ ID NO: 597253 - DNA, 15 bp, Homo sapiens
tgtgagctgtcttcc

SEQ ID NO: 597254 - DNA, 15 bp, Homo sapiens
gtgagctgtcttccc

SEQ ID NO: 597255 - DNA, 15 bp, Homo sapiens
tgagctgtcttccca

SEQ ID NO: 597256 - DNA, 15 bp, Homo sapiens
gagctgtcttcccag

SEQ ID NO: 597257 - DNA, 15 bp, Homo sapiens
agctgtcttcccaga

SEQ ID NO: 597258 - DNA, 15 bp, Homo sapiens
gctgtcttcccagag

SEQ ID NO: 597259 - DNA, 15 bp, Homo sapiens
ctgtcttcccagagg

SEQ ID NO: 597260 - DNA, 15 bp, Homo sapiens
tgtcttcccagaggc

SEQ ID NO: 597261 - DNA, 15 bp, Homo sapiens
gtcttcccagaggcc

SEQ ID NO: 597262 - DNA, 15 bp, Homo sapiens
tcttcccagaggcct

SEQ ID NO: 597263 - DNA, 15 bp, Homo sapiens
cttcccagaggcctt

SEQ ID NO: 597264 - DNA, 15 bp, Homo sapiens
ttcccagaggcctta

SEQ ID NO: 597265 - DNA, 15 bp, Homo sapiens
tcccagaggccttat

SEQ ID NO: 597266 - DNA, 15 bp, Homo sapiens
cccagaggccttatt

SEQ ID NO: 597267 - DNA, 15 bp, Homo sapiens
ccagaggccttattc

SEQ ID NO: 597268 - DNA, 15 bp, Homo sapiens
cagaggccttattcc

SEQ ID NO: 597269 - DNA, 15 bp, Homo sapiens
agaggccttattccc

SEQ ID NO: 597270 - DNA, 15 bp, Homo sapiens
gaggccttattccca

SEQ ID NO: 597271 - DNA, 15 bp, Homo sapiens
aggccttattcccag

SEQ ID NO: 597272 - DNA, 15 bp, Homo sapiens
ggccttattcccaga

SEQ ID NO: 597273 - DNA, 15 bp, Homo sapiens
gccttattcccagaa

SEQ ID NO: 597274 - DNA, 15 bp, Homo sapiens
ccttattcccagaag

SEQ ID NO: 597275 - DNA, 15 bp, Homo sapiens
cttattcccagaagt

SEQ ID NO: 597276 - DNA, 15 bp, Homo sapiens
ttattcccagaagtg

SEQ ID NO: 597277 - DNA, 15 bp, Homo sapiens
tattcccagaagtgt

SEQ ID NO: 597278 - DNA, 15 bp, Homo sapiens
attcccagaagtgtc

SEQ ID NO: 597279 - DNA, 15 bp, Homo sapiens
ttcccagaagtgtca

SEQ ID NO: 597280 - DNA, 15 bp, Homo sapiens
tcccagaagtgtcag

SEQ ID NO: 597281 - DNA, 15 bp, Homo sapiens
cccagaagtgtcagg

SEQ ID NO: 597282 - DNA, 15 bp, Homo sapiens
ccagaagtgtcaggc

SEQ ID NO: 597283 - DNA, 15 bp, Homo sapiens
cagaagtgtcaggct

SEQ ID NO: 597284 - DNA, 15 bp, Homo sapiens
agaagtgtcaggctc

SEQ ID NO: 597285 - DNA, 15 bp, Homo sapiens
gaagtgtcaggctcc

SEQ ID NO: 597286 - DNA, 15 bp, Homo sapiens
aagtgtcaggctcct

SEQ ID NO: 597287 - DNA, 15 bp, Homo sapiens
agtgtcaggctcctg

SEQ ID NO: 597288 - DNA, 15 bp, Homo sapiens
gtgtcaggctcctga

SEQ ID NO: 597289 - DNA, 15 bp, Homo sapiens
tgtcaggctcctgaa

SEQ ID NO: 597290 - DNA, 15 bp, Homo sapiens
gtcaggctcctgaac

SEQ ID NO: 597291 - DNA, 15 bp, Homo sapiens
tcaggctcctgaacc

SEQ ID NO: 597292 - DNA, 15 bp, Homo sapiens
caggctcctgaaccc

SEQ ID NO: 597293 - DNA, 15 bp, Homo sapiens
aggctcctgaaccca

SEQ ID NO: 597294 - DNA, 15 bp, Homo sapiens
ggctcctgaacccac

SEQ ID NO: 597295 - DNA, 15 bp, Homo sapiens
gctcctgaacccaca

SEQ ID NO: 597296 - DNA, 15 bp, Homo sapiens
ctcctgaacccacac

SEQ ID NO: 597297 - DNA, 15 bp, Homo sapiens
tcctgaacccacact

SEQ ID NO: 597298 - DNA, 15 bp, Homo sapiens
cctgaacccacactt

SEQ ID NO: 597299 - DNA, 15 bp, Homo sapiens
ctgaacccacacttt

SEQ ID NO: 597300 - DNA, 15 bp, Homo sapiens
tgaacccacactttc

SEQ ID NO: 597301 - DNA, 15 bp, Homo sapiens
gaacccacactttcc

SEQ ID NO: 597302 - DNA, 15 bp, Homo sapiens
aacccacactttcct

SEQ ID NO: 597303 - DNA, 15 bp, Homo sapiens
acccacactttcctc

SEQ ID NO: 597304 - DNA, 15 bp, Homo sapiens
cccacactttcctct

SEQ ID NO: 597305 - DNA, 15 bp, Homo sapiens
ccacactttcctctg

SEQ ID NO: 597306 - DNA, 15 bp, Homo sapiens
cacactttcctctga

SEQ ID NO: 597307 - DNA, 15 bp, Homo sapiens
acactttcctctgat

SEQ ID NO: 597308 - DNA, 15 bp, Homo sapiens
cactttcctctgatc

SEQ ID NO: 597309 - DNA, 15 bp, Homo sapiens
actttcctctgatcc

SEQ ID NO: 597310 - DNA, 15 bp, Homo sapiens
ctttcctctgatccg

SEQ ID NO: 597311 - DNA, 15 bp, Homo sapiens
tttcctctgatccga

SEQ ID NO: 597312 - DNA, 15 bp, Homo sapiens
ttcctctgatccgat

SEQ ID NO: 597313 - DNA, 15 bp, Homo sapiens
tcctctgatccgatt

SEQ ID NO: 597314 - DNA, 15 bp, Homo sapiens
cctctgatccgattt

SEQ ID NO: 597315 - DNA, 15 bp, Homo sapiens
ctctgatccgatttt

SEQ ID NO: 597316 - DNA, 15 bp, Homo sapiens
tctgatccgatttta

SEQ ID NO: 597317 - DNA, 15 bp, Homo sapiens
ctgatccgattttac

SEQ ID NO: 597318 - DNA, 15 bp, Homo sapiens
tgatccgattttact

SEQ ID NO: 597319 - DNA, 15 bp, Homo sapiens
gatccgattttactc

SEQ ID NO: 597320 - DNA, 15 bp, Homo sapiens
atccgattttactcc

SEQ ID NO: 597321 - DNA, 15 bp, Homo sapiens
tccgattttactcct

SEQ ID NO: 597322 - DNA, 15 bp, Homo sapiens
ccgattttactcctt

SEQ ID NO: 597323 - DNA, 15 bp, Homo sapiens
cgattttactcctta

SEQ ID NO: 597324 - DNA, 15 bp, Homo sapiens
gattttactccttag

SEQ ID NO: 597325 - DNA, 15 bp, Homo sapiens
attttactccttagc

SEQ ID NO: 597326 - DNA, 15 bp, Homo sapiens
ttttactccttagcc

SEQ ID NO: 597327 - DNA, 15 bp, Homo sapiens
tttactccttagccc

SEQ ID NO: 597328 - DNA, 15 bp, Homo sapiens
ttactccttagcccc

SEQ ID NO: 597329 - DNA, 15 bp, Homo sapiens
tactccttagcccca

SEQ ID NO: 597330 - DNA, 15 bp, Homo sapiens
actccttagccccag

SEQ ID NO: 597331 - DNA, 15 bp, Homo sapiens
ctccttagccccagg

SEQ ID NO: 597332 - DNA, 15 bp, Homo sapiens
tccttagccccaggc

SEQ ID NO: 597333 - DNA, 15 bp, Homo sapiens
ccttagccccaggcc

SEQ ID NO: 597334 - DNA, 15 bp, Homo sapiens
cttagccccaggcct

SEQ ID NO: 597335 - DNA, 15 bp, Homo sapiens
ttagccccaggccta

SEQ ID NO: 597336 - DNA, 15 bp, Homo sapiens
tagccccaggcctaa

SEQ ID NO: 597337 - DNA, 15 bp, Homo sapiens
agccccaggcctaag

SEQ ID NO: 597338 - DNA, 15 bp, Homo sapiens
gccccaggcctaagg

SEQ ID NO: 597339 - DNA, 15 bp, Homo sapiens
ccccaggcctaaggc

SEQ ID NO: 597340 - DNA, 15 bp, Homo sapiens
cccaggcctaaggca

SEQ ID NO: 597341 - DNA, 15 bp, Homo sapiens
ccaggcctaaggcaa

SEQ ID NO: 597342 - DNA, 15 bp, Homo sapiens
caggcctaaggcaaa

SEQ ID NO: 597343 - DNA, 15 bp, Homo sapiens
aggcctaaggcaaaa

SEQ ID NO: 597344 - DNA, 15 bp, Homo sapiens
ggcctaaggcaaaag

SEQ ID NO: 597345 - DNA, 15 bp, Homo sapiens
gcctaaggcaaaagc

SEQ ID NO: 597346 - DNA, 15 bp, Homo sapiens
cctaaggcaaaagct

SEQ ID NO: 597347 - DNA, 15 bp, Homo sapiens
ctaaggcaaaagctg

SEQ ID NO: 597348 - DNA, 15 bp, Homo sapiens
taaggcaaaagctgg

SEQ ID NO: 597349 - DNA, 15 bp, Homo sapiens
aaggcaaaagctggg

SEQ ID NO: 597350 - DNA, 15 bp, Homo sapiens
aggcaaaagctgggc

SEQ ID NO: 597351 - DNA, 15 bp, Homo sapiens
ggcaaaagctgggca

SEQ ID NO: 597352 - DNA, 15 bp, Homo sapiens
gcaaaagctgggcat

SEQ ID NO: 597353 - DNA, 15 bp, Homo sapiens
caaaagctgggcatc

SEQ ID NO: 597354 - DNA, 15 bp, Homo sapiens
aaaagctgggcatcc

SEQ ID NO: 597355 - DNA, 15 bp, Homo sapiens
aaagctgggcatcct

SEQ ID NO: 597356 - DNA, 15 bp, Homo sapiens
aagctgggcatcctg

SEQ ID NO: 597357 - DNA, 15 bp, Homo sapiens
agctgggcatcctgg

SEQ ID NO: 597358 - DNA, 15 bp, Homo sapiens
gctgggcatcctggg

SEQ ID NO: 597359 - DNA, 15 bp, Homo sapiens
ctgggcatcctgggg

SEQ ID NO: 597360 - DNA, 15 bp, Homo sapiens
tgggcatcctggggg

SEQ ID NO: 597361 - DNA, 15 bp, Homo sapiens
gggcatcctgggggc

SEQ ID NO: 597362 - DNA, 15 bp, Homo sapiens
ggcatcctgggggca

SEQ ID NO: 597363 - DNA, 15 bp, Homo sapiens
gcatcctgggggcat

SEQ ID NO: 597364 - DNA, 15 bp, Homo sapiens
catcctgggggcata

SEQ ID NO: 597365 - DNA, 15 bp, Homo sapiens
atcctgggggcataa

SEQ ID NO: 597366 - DNA, 15 bp, Homo sapiens
tcctgggggcataac

SEQ ID NO: 597367 - DNA, 15 bp, Homo sapiens
cctgggggcataaca

SEQ ID NO: 597368 - DNA, 15 bp, Homo sapiens
ctgggggcataacag

SEQ ID NO: 597369 - DNA, 15 bp, Homo sapiens
tgggggcataacagg

SEQ ID NO: 597370 - DNA, 15 bp, Homo sapiens
gggggcataacagga

SEQ ID NO: 597371 - DNA, 15 bp, Homo sapiens
ggggcataacaggat

SEQ ID NO: 597372 - DNA, 15 bp, Homo sapiens
gggcataacaggatt

SEQ ID NO: 597373 - DNA, 15 bp, Homo sapiens
ggcataacaggattg

SEQ ID NO: 597374 - DNA, 15 bp, Homo sapiens
gcataacaggattgg

SEQ ID NO: 597375 - DNA, 15 bp, Homo sapiens
cataacaggattggg

SEQ ID NO: 597376 - DNA, 15 bp, Homo sapiens
ataacaggattgggg

SEQ ID NO: 597377 - DNA, 15 bp, Homo sapiens
taacaggattggggt

SEQ ID NO: 597378 - DNA, 15 bp, Homo sapiens
aacaggattggggtg

SEQ ID NO: 597379 - DNA, 15 bp, Homo sapiens
acaggattggggtgg

SEQ ID NO: 597380 - DNA, 15 bp, Homo sapiens
caggattggggtggt

SEQ ID NO: 597381 - DNA, 15 bp, Homo sapiens
aggattggggtggta

SEQ ID NO: 597382 - DNA, 15 bp, Homo sapiens
ggattggggtggtag

SEQ ID NO: 597383 - DNA, 15 bp, Homo sapiens
gattggggtggtaga

SEQ ID NO: 597384 - DNA, 15 bp, Homo sapiens
attggggtggtagag

SEQ ID NO: 597385 - DNA, 15 bp, Homo sapiens
ttggggtggtagaga

SEQ ID NO: 597386 - DNA, 15 bp, Homo sapiens
tggggtggtagagaa

SEQ ID NO: 597387 - DNA, 15 bp, Homo sapiens
ggggtggtagagaag

SEQ ID NO: 597388 - DNA, 15 bp, Homo sapiens
gggtggtagagaagg

SEQ ID NO: 597389 - DNA, 15 bp, Homo sapiens
ggtggtagagaagga

SEQ ID NO: 597390 - DNA, 15 bp, Homo sapiens
gtggtagagaaggat

SEQ ID NO: 597391 - DNA, 15 bp, Homo sapiens
tggtagagaaggata

SEQ ID NO: 597392 - DNA, 15 bp, Homo sapiens
ggtagagaaggatag

SEQ ID NO: 597393 - DNA, 15 bp, Homo sapiens
gtagagaaggatagg

SEQ ID NO: 597394 - DNA, 15 bp, Homo sapiens
tagagaaggatagga

SEQ ID NO: 597395 - DNA, 15 bp, Homo sapiens
agagaaggataggag

SEQ ID NO: 597396 - DNA, 15 bp, Homo sapiens
gagaaggataggagg

SEQ ID NO: 597397 - DNA, 15 bp, Homo sapiens
agaaggataggaggg

SEQ ID NO: 597398 - DNA, 15 bp, Homo sapiens
gaaggataggagggg

SEQ ID NO: 597399 - DNA, 15 bp, Homo sapiens
aaggataggagggga

SEQ ID NO: 597400 - DNA, 15 bp, Homo sapiens
aggataggaggggac

SEQ ID NO: 597401 - DNA, 15 bp, Homo sapiens
ggataggaggggaca

SEQ ID NO: 597402 - DNA, 15 bp, Homo sapiens
gataggaggggacag

SEQ ID NO: 597403 - DNA, 15 bp, Homo sapiens
ataggaggggacagg

SEQ ID NO: 597404 - DNA, 15 bp, Homo sapiens
taggaggggacaggt

SEQ ID NO: 597405 - DNA, 15 bp, Homo sapiens
aggaggggacaggtc

SEQ ID NO: 597406 - DNA, 15 bp, Homo sapiens
ggaggggacaggtcc

SEQ ID NO: 597407 - DNA, 15 bp, Homo sapiens
gaggggacaggtcct

SEQ ID NO: 597408 - DNA, 15 bp, Homo sapiens
aggggacaggtccta

SEQ ID NO: 597409 - DNA, 15 bp, Homo sapiens
ggggacaggtcctag

SEQ ID NO: 597410 - DNA, 15 bp, Homo sapiens
gggacaggtcctagc

SEQ ID NO: 597411 - DNA, 15 bp, Homo sapiens
ggacaggtcctagca

SEQ ID NO: 597412 - DNA, 15 bp, Homo sapiens
gacaggtcctagcag

SEQ ID NO: 597413 - DNA, 15 bp, Homo sapiens
acaggtcctagcagg

SEQ ID NO: 597414 - DNA, 15 bp, Homo sapiens
caggtcctagcaggg

SEQ ID NO: 597415 - DNA, 15 bp, Homo sapiens
aggtcctagcaggga

SEQ ID NO: 597416 - DNA, 15 bp, Homo sapiens
ggtcctagcagggag

SEQ ID NO: 597417 - DNA, 15 bp, Homo sapiens
gtcctagcagggagg

SEQ ID NO: 597418 - DNA, 15 bp, Homo sapiens
tcctagcagggaggg

SEQ ID NO: 597419 - DNA, 15 bp, Homo sapiens
cctagcagggagggg

SEQ ID NO: 597420 - DNA, 15 bp, Homo sapiens
ctagcagggagggga

SEQ ID NO: 597421 - DNA, 15 bp, Homo sapiens
tagcagggaggggag

SEQ ID NO: 597422 - DNA, 15 bp, Homo sapiens
agcagggaggggagc

SEQ ID NO: 597423 - DNA, 15 bp, Homo sapiens
gcagggaggggagct

SEQ ID NO: 597424 - DNA, 15 bp, Homo sapiens
cagggaggggagctt

SEQ ID NO: 597425 - DNA, 15 bp, Homo sapiens
agggaggggagcttt

SEQ ID NO: 597426 - DNA, 15 bp, Homo sapiens
gggaggggagctttg

SEQ ID NO: 597427 - DNA, 15 bp, Homo sapiens
ggaggggagctttga

SEQ ID NO: 597428 - DNA, 15 bp, Homo sapiens
gaggggagctttgag

SEQ ID NO: 597429 - DNA, 15 bp, Homo sapiens
aggggagctttgagg

SEQ ID NO: 597430 - DNA, 15 bp, Homo sapiens
ggggagctttgaggg

SEQ ID NO: 597431 - DNA, 15 bp, Homo sapiens
gggagctttgagggg

SEQ ID NO: 597432 - DNA, 15 bp, Homo sapiens
ggagctttgaggggg

SEQ ID NO: 597433 - DNA, 15 bp, Homo sapiens
gagctttgagggggt

SEQ ID NO: 597434 - DNA, 15 bp, Homo sapiens
agctttgagggggtg

SEQ ID NO: 597435 - DNA, 15 bp, Homo sapiens
gctttgagggggtgc

SEQ ID NO: 597436 - DNA, 15 bp, Homo sapiens
ctttgagggggtgct

SEQ ID NO: 597437 - DNA, 15 bp, Homo sapiens
tttgagggggtgctc

SEQ ID NO: 597438 - DNA, 15 bp, Homo sapiens
ttgagggggtgctct

SEQ ID NO: 597439 - DNA, 15 bp, Homo sapiens
tgagggggtgctctt

SEQ ID NO: 597440 - DNA, 15 bp, Homo sapiens
gagggggtgctcttg

SEQ ID NO: 597441 - DNA, 15 bp, Homo sapiens
agggggtgctcttgt

SEQ ID NO: 597442 - DNA, 15 bp, Homo sapiens
gggggtgctcttgtc

SEQ ID NO: 597443 - DNA, 15 bp, Homo sapiens
ggggtgctcttgtca

SEQ ID NO: 597444 - DNA, 15 bp, Homo sapiens
gggtgctcttgtcat

SEQ ID NO: 597445 - DNA, 15 bp, Homo sapiens
ggtgctcttgtcatg

SEQ ID NO: 597446 - DNA, 15 bp, Homo sapiens
gtgctcttgtcatgg

SEQ ID NO: 597447 - DNA, 15 bp, Homo sapiens
tgctcttgtcatggg

SEQ ID NO: 597448 - DNA, 15 bp, Homo sapiens
gctcttgtcatggga

SEQ ID NO: 597449 - DNA, 15 bp, Homo sapiens
ctcttgtcatgggaa

SEQ ID NO: 597450 - DNA, 15 bp, Homo sapiens
tcttgtcatgggaaa

SEQ ID NO: 597451 - DNA, 15 bp, Homo sapiens
cttgtcatgggaaac

SEQ ID NO: 597452 - DNA, 15 bp, Homo sapiens
ttgtcatgggaaact

SEQ ID NO: 597453 - DNA, 15 bp, Homo sapiens
tgtcatgggaaactg

SEQ ID NO: 597454 - DNA, 15 bp, Homo sapiens
gtcatgggaaactga

SEQ ID NO: 597455 - DNA, 15 bp, Homo sapiens
tcatgggaaactgag

SEQ ID NO: 597456 - DNA, 15 bp, Homo sapiens
catgggaaactgagc

SEQ ID NO: 597457 - DNA, 15 bp, Homo sapiens
atgggaaactgagct

SEQ ID NO: 597458 - DNA, 15 bp, Homo sapiens
tgggaaactgagctg

SEQ ID NO: 597459 - DNA, 15 bp, Homo sapiens
gggaaactgagctgc

SEQ ID NO: 597460 - DNA, 15 bp, Homo sapiens
ggaaactgagctgcc

SEQ ID NO: 597461 - DNA, 15 bp, Homo sapiens
gaaactgagctgcca

SEQ ID NO: 597462 - DNA, 15 bp, Homo sapiens
aaactgagctgccac

SEQ ID NO: 597463 - DNA, 15 bp, Homo sapiens
aactgagctgccaca

SEQ ID NO: 597464 - DNA, 15 bp, Homo sapiens
actgagctgccacag

SEQ ID NO: 597465 - DNA, 15 bp, Homo sapiens
ctgagctgccacaga

SEQ ID NO: 597466 - DNA, 15 bp, Homo sapiens
tgagctgccacagag

SEQ ID NO: 597467 - DNA, 15 bp, Homo sapiens
gagctgccacagaga

SEQ ID NO: 597468 - DNA, 15 bp, Homo sapiens
agctgccacagagat

SEQ ID NO: 597469 - DNA, 15 bp, Homo sapiens
gctgccacagagatc

SEQ ID NO: 597470 - DNA, 15 bp, Homo sapiens
ctgccacagagatct

SEQ ID NO: 597471 - DNA, 15 bp, Homo sapiens
tgccacagagatctg

SEQ ID NO: 597472 - DNA, 15 bp, Homo sapiens
gccacagagatctga

SEQ ID NO: 597473 - DNA, 15 bp, Homo sapiens
ccacagagatctgag

SEQ ID NO: 597474 - DNA, 15 bp, Homo sapiens
cacagagatctgagt

SEQ ID NO: 597475 - DNA, 15 bp, Homo sapiens
acagagatctgagtc

SEQ ID NO: 597476 - DNA, 15 bp, Homo sapiens
cagagatctgagtca

SEQ ID NO: 597477 - DNA, 15 bp, Homo sapiens
agagatctgagtcac

SEQ ID NO: 597478 - DNA, 15 bp, Homo sapiens
gagatctgagtcaca

SEQ ID NO: 597479 - DNA, 15 bp, Homo sapiens
agatctgagtcacag

SEQ ID NO: 597480 - DNA, 15 bp, Homo sapiens
gatctgagtcacagg

SEQ ID NO: 597481 - DNA, 15 bp, Homo sapiens
atctgagtcacagga

SEQ ID NO: 597482 - DNA, 15 bp, Homo sapiens
tctgagtcacaggag

SEQ ID NO: 597483 - DNA, 15 bp, Homo sapiens
ctgagtcacaggagg

SEQ ID NO: 597484 - DNA, 15 bp, Homo sapiens
tgagtcacaggaggt

SEQ ID NO: 597485 - DNA, 15 bp, Homo sapiens
gagtcacaggaggtg

SEQ ID NO: 597486 - DNA, 15 bp, Homo sapiens
agtcacaggaggtgt

SEQ ID NO: 597487 - DNA, 15 bp, Homo sapiens
gtcacaggaggtgtt

SEQ ID NO: 597488 - DNA, 15 bp, Homo sapiens
tcacaggaggtgtta

SEQ ID NO: 597489 - DNA, 15 bp, Homo sapiens
cacaggaggtgttaa

SEQ ID NO: 597490 - DNA, 15 bp, Homo sapiens
acaggaggtgttaag

SEQ ID NO: 597491 - DNA, 15 bp, Homo sapiens
caggaggtgttaagg

SEQ ID NO: 597492 - DNA, 15 bp, Homo sapiens
aggaggtgttaagga

SEQ ID NO: 597493 - DNA, 15 bp, Homo sapiens
ggaggtgttaaggat

SEQ ID NO: 597494 - DNA, 15 bp, Homo sapiens
gaggtgttaaggata

SEQ ID NO: 597495 - DNA, 15 bp, Homo sapiens
aggtgttaaggatag

SEQ ID NO: 597496 - DNA, 15 bp, Homo sapiens
ggtgttaaggataga

SEQ ID NO: 597497 - DNA, 15 bp, Homo sapiens
gtgttaaggatagat

SEQ ID NO: 597498 - DNA, 15 bp, Homo sapiens
tgttaaggatagatt

SEQ ID NO: 597499 - DNA, 15 bp, Homo sapiens
gttaaggatagattg

SEQ ID NO: 597500 - DNA, 15 bp, Homo sapiens
ttaaggatagattgc

SEQ ID NO: 597501 - DNA, 15 bp, Homo sapiens
taaggatagattgca

SEQ ID NO: 597502 - DNA, 15 bp, Homo sapiens
aaggatagattgcaa

SEQ ID NO: 597503 - DNA, 15 bp, Homo sapiens
aggatagattgcaac

SEQ ID NO: 597504 - DNA, 15 bp, Homo sapiens
ggatagattgcaaca

SEQ ID NO: 597505 - DNA, 15 bp, Homo sapiens
gatagattgcaacaa

SEQ ID NO: 597506 - DNA, 15 bp, Homo sapiens
atagattgcaacaat

SEQ ID NO: 597507 - DNA, 15 bp, Homo sapiens
tagattgcaacaatt

SEQ ID NO: 597508 - DNA, 15 bp, Homo sapiens
agattgcaacaatta

SEQ ID NO: 597509 - DNA, 15 bp, Homo sapiens
gattgcaacaattat

SEQ ID NO: 597510 - DNA, 15 bp, Homo sapiens
attgcaacaattatg

SEQ ID NO: 597511 - DNA, 15 bp, Homo sapiens
ttgcaacaattatga

SEQ ID NO: 597512 - DNA, 15 bp, Homo sapiens
tgcaacaattatgac

SEQ ID NO: 597513 - DNA, 15 bp, Homo sapiens
gcaacaattatgaca

SEQ ID NO: 597514 - DNA, 15 bp, Homo sapiens
caacaattatgacac

SEQ ID NO: 597515 - DNA, 15 bp, Homo sapiens
aacaattatgacaca

SEQ ID NO: 597516 - DNA, 15 bp, Homo sapiens
acaattatgacacaa

SEQ ID NO: 597517 - DNA, 15 bp, Homo sapiens
caattatgacacaac

SEQ ID NO: 597518 - DNA, 15 bp, Homo sapiens
aattatgacacaaca

SEQ ID NO: 597519 - DNA, 15 bp, Homo sapiens
attatgacacaacat

SEQ ID NO: 597520 - DNA, 15 bp, Homo sapiens
ttatgacacaacatc

SEQ ID NO: 597521 - DNA, 15 bp, Homo sapiens
tatgacacaacatca

SEQ ID NO: 597522 - DNA, 15 bp, Homo sapiens
atgacacaacatcat

SEQ ID NO: 597523 - DNA, 15 bp, Homo sapiens
tgacacaacatcatg

SEQ ID NO: 597524 - DNA, 15 bp, Homo sapiens
gacacaacatcatgc

SEQ ID NO: 597525 - DNA, 15 bp, Homo sapiens
acacaacatcatgcg

SEQ ID NO: 597526 - DNA, 15 bp, Homo sapiens
cacaacatcatgcgt

SEQ ID NO: 597527 - DNA, 15 bp, Homo sapiens
acaacatcatgcgtg

SEQ ID NO: 597528 - DNA, 15 bp, Homo sapiens
caacatcatgcgtgc

SEQ ID NO: 597529 - DNA, 15 bp, Homo sapiens
aacatcatgcgtgct

SEQ ID NO: 597530 - DNA, 15 bp, Homo sapiens
acatcatgcgtgctt

SEQ ID NO: 597531 - DNA, 15 bp, Homo sapiens
catcatgcgtgctta

SEQ ID NO: 597532 - DNA, 15 bp, Homo sapiens
atcatgcgtgcttat

SEQ ID NO: 597533 - DNA, 15 bp, Homo sapiens
tcatgcgtgcttata

SEQ ID NO: 597534 - DNA, 15 bp, Homo sapiens
catgcgtgcttataa

SEQ ID NO: 597535 - DNA, 15 bp, Homo sapiens
atgcgtgcttataag

SEQ ID NO: 597536 - DNA, 15 bp, Homo sapiens
tgcgtgcttataaga

SEQ ID NO: 597537 - DNA, 15 bp, Homo sapiens
gcgtgcttataagac

SEQ ID NO: 597538 - DNA, 15 bp, Homo sapiens
cgtgcttataagact

SEQ ID NO: 597539 - DNA, 15 bp, Homo sapiens
gtgcttataagacta

SEQ ID NO: 597540 - DNA, 15 bp, Homo sapiens
tgcttataagactaa

SEQ ID NO: 597541 - DNA, 15 bp, Homo sapiens
gcttataagactaaa

SEQ ID NO: 597542 - DNA, 15 bp, Homo sapiens
cttataagactaaaa

SEQ ID NO: 597543 - DNA, 15 bp, Homo sapiens
ttataagactaaaaa

SEQ ID NO: 597544 - DNA, 15 bp, Homo sapiens
tataagactaaaaaa

SEQ ID NO: 597545 - DNA, 15 bp, Homo sapiens
ataagactaaaaaat

SEQ ID NO: 597546 - DNA, 15 bp, Homo sapiens
taagactaaaaaata

SEQ ID NO: 597547 - DNA, 15 bp, Homo sapiens
aagactaaaaaatag

SEQ ID NO: 597548 - DNA, 15 bp, Homo sapiens
agactaaaaaatagt

SEQ ID NO: 597549 - DNA, 15 bp, Homo sapiens
gactaaaaaatagtg

SEQ ID NO: 597550 - DNA, 15 bp, Homo sapiens
actaaaaaatagtgt

SEQ ID NO: 597551 - DNA, 15 bp, Homo sapiens
ctaaaaaatagtgta

SEQ ID NO: 597552 - DNA, 15 bp, Homo sapiens
taaaaaatagtgtat

SEQ ID NO: 597553 - DNA, 15 bp, Homo sapiens
aaaaaatagtgtatt

SEQ ID NO: 597554 - DNA, 15 bp, Homo sapiens
aaaaatagtgtattt

SEQ ID NO: 597555 - DNA, 15 bp, Homo sapiens
aaaatagtgtatttt

SEQ ID NO: 597556 - DNA, 15 bp, Homo sapiens
aaatagtgtattttg

SEQ ID NO: 597557 - DNA, 15 bp, Homo sapiens
aatagtgtattttgc

SEQ ID NO: 597558 - DNA, 15 bp, Homo sapiens
atagtgtattttgca

SEQ ID NO: 597559 - DNA, 15 bp, Homo sapiens
tagtgtattttgcat

SEQ ID NO: 597560 - DNA, 15 bp, Homo sapiens
agtgtattttgcatt

SEQ ID NO: 597561 - DNA, 15 bp, Homo sapiens
gtgtattttgcattt

SEQ ID NO: 597562 - DNA, 15 bp, Homo sapiens
tgtattttgcatttt

SEQ ID NO: 597563 - DNA, 15 bp, Homo sapiens
gtattttgcattttg

SEQ ID NO: 597564 - DNA, 15 bp, Homo sapiens
tattttgcattttgt

SEQ ID NO: 597565 - DNA, 15 bp, Homo sapiens
attttgcattttgtt

SEQ ID NO: 597566 - DNA, 15 bp, Homo sapiens
ttttgcattttgttt

SEQ ID NO: 597567 - DNA, 15 bp, Homo sapiens
tttgcattttgtttt

SEQ ID NO: 597568 - DNA, 15 bp, Homo sapiens
ttgcattttgttttc

SEQ ID NO: 597569 - DNA, 15 bp, Homo sapiens
tgcattttgttttct

SEQ ID NO: 597570 - DNA, 15 bp, Homo sapiens
gcattttgttttctg

SEQ ID NO: 597571 - DNA, 15 bp, Homo sapiens
cattttgttttctgt

SEQ ID NO: 597572 - DNA, 15 bp, Homo sapiens
attttgttttctgtc

SEQ ID NO: 597573 - DNA, 15 bp, Homo sapiens
ttttgttttctgtct

SEQ ID NO: 597574 - DNA, 15 bp, Homo sapiens
tttgttttctgtcta

SEQ ID NO: 597575 - DNA, 15 bp, Homo sapiens
ttgttttctgtctat

SEQ ID NO: 597576 - DNA, 15 bp, Homo sapiens
tgttttctgtctatg

SEQ ID NO: 597577 - DNA, 15 bp, Homo sapiens
gttttctgtctatga

SEQ ID NO: 597578 - DNA, 15 bp, Homo sapiens
ttttctgtctatgaa

SEQ ID NO: 597579 - DNA, 15 bp, Homo sapiens
tttctgtctatgaag

SEQ ID NO: 597580 - DNA, 15 bp, Homo sapiens
ttctgtctatgaagt

SEQ ID NO: 597581 - DNA, 15 bp, Homo sapiens
tctgtctatgaagtc

SEQ ID NO: 597582 - DNA, 15 bp, Homo sapiens
ctgtctatgaagtca

SEQ ID NO: 597583 - DNA, 15 bp, Homo sapiens
tgtctatgaagtcaa

SEQ ID NO: 597584 - DNA, 15 bp, Homo sapiens
gtctatgaagtcaaa

SEQ ID NO: 597585 - DNA, 15 bp, Homo sapiens
tctatgaagtcaaaa

SEQ ID NO: 597586 - DNA, 15 bp, Homo sapiens
ctatgaagtcaaaag

SEQ ID NO: 597587 - DNA, 15 bp, Homo sapiens
tatgaagtcaaaagg

SEQ ID NO: 597588 - DNA, 15 bp, Homo sapiens
atgaagtcaaaaggg

SEQ ID NO: 597589 - DNA, 15 bp, Homo sapiens
tgaagtcaaaagggt

SEQ ID NO: 597590 - DNA, 15 bp, Homo sapiens
gaagtcaaaagggtt

SEQ ID NO: 597591 - DNA, 15 bp, Homo sapiens
aagtcaaaagggtta

SEQ ID NO: 597592 - DNA, 15 bp, Homo sapiens
agtcaaaagggttag

SEQ ID NO: 597593 - DNA, 15 bp, Homo sapiens
gtcaaaagggttaga

SEQ ID NO: 597594 - DNA, 15 bp, Homo sapiens
tcaaaagggttagag

SEQ ID NO: 597595 - DNA, 15 bp, Homo sapiens
caaaagggttagagt

SEQ ID NO: 597596 - DNA, 15 bp, Homo sapiens
aaaagggttagagtt

SEQ ID NO: 597597 - DNA, 15 bp, Homo sapiens
aaagggttagagtta

SEQ ID NO: 597598 - DNA, 15 bp, Homo sapiens
aagggttagagttac

SEQ ID NO: 597599 - DNA, 15 bp, Homo sapiens
agggttagagttact

SEQ ID NO: 597600 - DNA, 15 bp, Homo sapiens
gggttagagttactc

SEQ ID NO: 597601 - DNA, 15 bp, Homo sapiens
ggttagagttactcc

SEQ ID NO: 597602 - DNA, 15 bp, Homo sapiens
gttagagttactccc

SEQ ID NO: 597603 - DNA, 15 bp, Homo sapiens
ttagagttactcccc

SEQ ID NO: 597604 - DNA, 15 bp, Homo sapiens
tagagttactcccct

SEQ ID NO: 597605 - DNA, 15 bp, Homo sapiens
agagttactcccctc

SEQ ID NO: 597606 - DNA, 15 bp, Homo sapiens
gagttactcccctca

SEQ ID NO: 597607 - DNA, 15 bp, Homo sapiens
agttactcccctcat

SEQ ID NO: 597608 - DNA, 15 bp, Homo sapiens
gttactcccctcatg

SEQ ID NO: 597609 - DNA, 15 bp, Homo sapiens
ttactcccctcatgt

SEQ ID NO: 597610 - DNA, 15 bp, Homo sapiens
tactcccctcatgtt

SEQ ID NO: 597611 - DNA, 15 bp, Homo sapiens
actcccctcatgttg

SEQ ID NO: 597612 - DNA, 15 bp, Homo sapiens
ctcccctcatgttgc

SEQ ID NO: 597613 - DNA, 15 bp, Homo sapiens
tcccctcatgttgct

SEQ ID NO: 597614 - DNA, 15 bp, Homo sapiens
cccctcatgttgctg

SEQ ID NO: 597615 - DNA, 15 bp, Homo sapiens
ccctcatgttgctga

SEQ ID NO: 597616 - DNA, 15 bp, Homo sapiens
cctcatgttgctgat

SEQ ID NO: 597617 - DNA, 15 bp, Homo sapiens
ctcatgttgctgatg

SEQ ID NO: 597618 - DNA, 15 bp, Homo sapiens
tcatgttgctgatgg

SEQ ID NO: 597619 - DNA, 15 bp, Homo sapiens
catgttgctgatggg

SEQ ID NO: 597620 - DNA, 15 bp, Homo sapiens
atgttgctgatgggg

SEQ ID NO: 597621 - DNA, 15 bp, Homo sapiens
tgttgctgatggggg

SEQ ID NO: 597622 - DNA, 15 bp, Homo sapiens
gttgctgatggggga

SEQ ID NO: 597623 - DNA, 15 bp, Homo sapiens
ttgctgatgggggaa

SEQ ID NO: 597624 - DNA, 15 bp, Homo sapiens
tgctgatgggggaat

SEQ ID NO: 597625 - DNA, 15 bp, Homo sapiens
gctgatgggggaatg

SEQ ID NO: 597626 - DNA, 15 bp, Homo sapiens
ctgatgggggaatga

SEQ ID NO: 597627 - DNA, 15 bp, Homo sapiens
tgatgggggaatgaa

SEQ ID NO: 597628 - DNA, 15 bp, Homo sapiens
gatgggggaatgaaa

SEQ ID NO: 597629 - DNA, 15 bp, Homo sapiens
atgggggaatgaaag

SEQ ID NO: 597630 - DNA, 15 bp, Homo sapiens
tgggggaatgaaagc

SEQ ID NO: 597631 - DNA, 15 bp, Homo sapiens
gggggaatgaaagct

SEQ ID NO: 597632 - DNA, 15 bp, Homo sapiens
ggggaatgaaagctc

SEQ ID NO: 597633 - DNA, 15 bp, Homo sapiens
gggaatgaaagctca

SEQ ID NO: 597634 - DNA, 15 bp, Homo sapiens
ggaatgaaagctcag

SEQ ID NO: 597635 - DNA, 15 bp, Homo sapiens
gaatgaaagctcaga

SEQ ID NO: 597636 - DNA, 15 bp, Homo sapiens
aatgaaagctcagaa

SEQ ID NO: 597637 - DNA, 15 bp, Homo sapiens
atgaaagctcagaaa

SEQ ID NO: 597638 - DNA, 15 bp, Homo sapiens
tgaaagctcagaaaa

SEQ ID NO: 597639 - DNA, 15 bp, Homo sapiens
gaaagctcagaaaaa

SEQ ID NO: 597640 - DNA, 15 bp, Homo sapiens
aaagctcagaaaaag

SEQ ID NO: 597641 - DNA, 15 bp, Homo sapiens
aagctcagaaaaaga

SEQ ID NO: 597642 - DNA, 15 bp, Homo sapiens
agctcagaaaaagag

SEQ ID NO: 597643 - DNA, 15 bp, Homo sapiens
gctcagaaaaagagg

SEQ ID NO: 597644 - DNA, 15 bp, Homo sapiens
ctcagaaaaagaggg

SEQ ID NO: 597645 - DNA, 15 bp, Homo sapiens
tcagaaaaagagggt

SEQ ID NO: 597646 - DNA, 15 bp, Homo sapiens
cagaaaaagagggtc

SEQ ID NO: 597647 - DNA, 15 bp, Homo sapiens
agaaaaagagggtcc

SEQ ID NO: 597648 - DNA, 15 bp, Homo sapiens
gaaaaagagggtccc

SEQ ID NO: 597649 - DNA, 15 bp, Homo sapiens
aaaaagagggtcccc

SEQ ID NO: 597650 - DNA, 15 bp, Homo sapiens
aaaagagggtcccct

SEQ ID NO: 597651 - DNA, 15 bp, Homo sapiens
aaagagggtcccctg

SEQ ID NO: 597652 - DNA, 15 bp, Homo sapiens
aagagggtcccctgt

SEQ ID NO: 597653 - DNA, 15 bp, Homo sapiens
agagggtcccctgta

SEQ ID NO: 597654 - DNA, 15 bp, Homo sapiens
gagggtcccctgtat

SEQ ID NO: 597655 - DNA, 15 bp, Homo sapiens
agggtcccctgtata

SEQ ID NO: 597656 - DNA, 15 bp, Homo sapiens
gggtcccctgtataa

SEQ ID NO: 597657 - DNA, 15 bp, Homo sapiens
ggtcccctgtataaa

SEQ ID NO: 597658 - DNA, 15 bp, Homo sapiens
gtcccctgtataaag

SEQ ID NO: 597659 - DNA, 15 bp, Homo sapiens
tcccctgtataaagt

SEQ ID NO: 597660 - DNA, 15 bp, Homo sapiens
cccctgtataaagta

SEQ ID NO: 597661 - DNA, 15 bp, Homo sapiens
ccctgtataaagtag

SEQ ID NO: 597662 - DNA, 15 bp, Homo sapiens
cctgtataaagtagc

SEQ ID NO: 597663 - DNA, 15 bp, Homo sapiens
ctgtataaagtagcc

SEQ ID NO: 597664 - DNA, 15 bp, Homo sapiens
tgtataaagtagccc

SEQ ID NO: 597665 - DNA, 15 bp, Homo sapiens
gtataaagtagccca

SEQ ID NO: 597666 - DNA, 15 bp, Homo sapiens
tataaagtagcccag

SEQ ID NO: 597667 - DNA, 15 bp, Homo sapiens
ataaagtagcccagc

SEQ ID NO: 597668 - DNA, 15 bp, Homo sapiens
taaagtagcccagca

SEQ ID NO: 597669 - DNA, 15 bp, Homo sapiens
aaagtagcccagcag

SEQ ID NO: 597670 - DNA, 15 bp, Homo sapiens
aagtagcccagcagt

SEQ ID NO: 597671 - DNA, 15 bp, Homo sapiens
agtagcccagcagtt

SEQ ID NO: 597672 - DNA, 15 bp, Homo sapiens
gtagcccagcagttc

SEQ ID NO: 597673 - DNA, 15 bp, Homo sapiens
tagcccagcagttca

SEQ ID NO: 597674 - DNA, 15 bp, Homo sapiens
agcccagcagttcag

SEQ ID NO: 597675 - DNA, 15 bp, Homo sapiens
gcccagcagttcagg

SEQ ID NO: 597676 - DNA, 15 bp, Homo sapiens
cccagcagttcagga

SEQ ID NO: 597677 - DNA, 15 bp, Homo sapiens
ccagcagttcaggag

SEQ ID NO: 597678 - DNA, 15 bp, Homo sapiens
cagcagttcaggagc

SEQ ID NO: 597679 - DNA, 15 bp, Homo sapiens
agcagttcaggagca

SEQ ID NO: 597680 - DNA, 15 bp, Homo sapiens
gcagttcaggagcag

SEQ ID NO: 597681 - DNA, 15 bp, Homo sapiens
cagttcaggagcagg

SEQ ID NO: 597682 - DNA, 15 bp, Homo sapiens
agttcaggagcaggg

SEQ ID NO: 597683 - DNA, 15 bp, Homo sapiens
gttcaggagcaggga

SEQ ID NO: 597684 - DNA, 15 bp, Homo sapiens
ttcaggagcagggaa

SEQ ID NO: 597685 - DNA, 15 bp, Homo sapiens
tcaggagcagggaag

SEQ ID NO: 597686 - DNA, 15 bp, Homo sapiens
caggagcagggaaga

SEQ ID NO: 597687 - DNA, 15 bp, Homo sapiens
aggagcagggaagag

SEQ ID NO: 597688 - DNA, 15 bp, Homo sapiens
ggagcagggaagaga

SEQ ID NO: 597689 - DNA, 15 bp, Homo sapiens
gagcagggaagagaa

SEQ ID NO: 597690 - DNA, 15 bp, Homo sapiens
agcagggaagagaaa

SEQ ID NO: 597691 - DNA, 15 bp, Homo sapiens
gcagggaagagaaag

SEQ ID NO: 597692 - DNA, 15 bp, Homo sapiens
cagggaagagaaagg

SEQ ID NO: 597693 - DNA, 15 bp, Homo sapiens
agggaagagaaaggg

SEQ ID NO: 597694 - DNA, 15 bp, Homo sapiens
gggaagagaaagggg

SEQ ID NO: 597695 - DNA, 15 bp, Homo sapiens
ggaagagaaaggggt

SEQ ID NO: 597696 - DNA, 15 bp, Homo sapiens
gaagagaaaggggtg

SEQ ID NO: 597697 - DNA, 15 bp, Homo sapiens
aagagaaaggggtga

SEQ ID NO: 597698 - DNA, 15 bp, Homo sapiens
agagaaaggggtgaa

SEQ ID NO: 597699 - DNA, 15 bp, Homo sapiens
gagaaaggggtgaag

SEQ ID NO: 597700 - DNA, 15 bp, Homo sapiens
agaaaggggtgaagg

SEQ ID NO: 597701 - DNA, 15 bp, Homo sapiens
gaaaggggtgaaggg

SEQ ID NO: 597702 - DNA, 15 bp, Homo sapiens
aaaggggtgaagggc

SEQ ID NO: 597703 - DNA, 15 bp, Homo sapiens
aaggggtgaagggct

SEQ ID NO: 597704 - DNA, 15 bp, Homo sapiens
aggggtgaagggctg

SEQ ID NO: 597705 - DNA, 15 bp, Homo sapiens
ggggtgaagggctgg

SEQ ID NO: 597706 - DNA, 15 bp, Homo sapiens
gggtgaagggctggg

SEQ ID NO: 597707 - DNA, 15 bp, Homo sapiens
ggtgaagggctgggc

SEQ ID NO: 597708 - DNA, 15 bp, Homo sapiens
gtgaagggctgggct

SEQ ID NO: 597709 - DNA, 15 bp, Homo sapiens
tgaagggctgggctc

SEQ ID NO: 597710 - DNA, 15 bp, Homo sapiens
gaagggctgggctct

SEQ ID NO: 597711 - DNA, 15 bp, Homo sapiens
aagggctgggctctt

SEQ ID NO: 597712 - DNA, 15 bp, Homo sapiens
agggctgggctcttg

SEQ ID NO: 597713 - DNA, 15 bp, Homo sapiens
gggctgggctcttga

SEQ ID NO: 597714 - DNA, 15 bp, Homo sapiens
ggctgggctcttgac

SEQ ID NO: 597715 - DNA, 15 bp, Homo sapiens
gctgggctcttgacc

SEQ ID NO: 597716 - DNA, 15 bp, Homo sapiens
ctgggctcttgacct

SEQ ID NO: 597717 - DNA, 15 bp, Homo sapiens
tgggctcttgaccta

SEQ ID NO: 597718 - DNA, 15 bp, Homo sapiens
gggctcttgacctaa

SEQ ID NO: 597719 - DNA, 15 bp, Homo sapiens
ggctcttgacctaac

SEQ ID NO: 597720 - DNA, 15 bp, Homo sapiens
gctcttgacctaaca

SEQ ID NO: 597721 - DNA, 15 bp, Homo sapiens
ctcttgacctaacac

SEQ ID NO: 597722 - DNA, 15 bp, Homo sapiens
tcttgacctaacacc

SEQ ID NO: 597723 - DNA, 15 bp, Homo sapiens
cttgacctaacacct

SEQ ID NO: 597724 - DNA, 15 bp, Homo sapiens
ttgacctaacacctc

SEQ ID NO: 597725 - DNA, 15 bp, Homo sapiens
tgacctaacacctcc

SEQ ID NO: 597726 - DNA, 15 bp, Homo sapiens
gacctaacacctcct

SEQ ID NO: 597727 - DNA, 15 bp, Homo sapiens
acctaacacctccta

SEQ ID NO: 597728 - DNA, 15 bp, Homo sapiens
cctaacacctcctac

SEQ ID NO: 597729 - DNA, 15 bp, Homo sapiens
ctaacacctcctact

SEQ ID NO: 597730 - DNA, 15 bp, Homo sapiens
taacacctcctactc

SEQ ID NO: 597731 - DNA, 15 bp, Homo sapiens
aacacctcctactca

SEQ ID NO: 597732 - DNA, 15 bp, Homo sapiens
acacctcctactcag

SEQ ID NO: 597733 - DNA, 15 bp, Homo sapiens
cacctcctactcaga

SEQ ID NO: 597734 - DNA, 15 bp, Homo sapiens
acctcctactcagac

SEQ ID NO: 597735 - DNA, 15 bp, Homo sapiens
cctcctactcagacg

SEQ ID NO: 597736 - DNA, 15 bp, Homo sapiens
ctcctactcagacgg

SEQ ID NO: 597737 - DNA, 15 bp, Homo sapiens
tcctactcagacggg

SEQ ID NO: 597738 - DNA, 15 bp, Homo sapiens
cctactcagacggga

SEQ ID NO: 597739 - DNA, 15 bp, Homo sapiens
ctactcagacgggac

SEQ ID NO: 597740 - DNA, 15 bp, Homo sapiens
tactcagacgggact

SEQ ID NO: 597741 - DNA, 15 bp, Homo sapiens
actcagacgggactg

SEQ ID NO: 597742 - DNA, 15 bp, Homo sapiens
ctcagacgggactga

SEQ ID NO: 597743 - DNA, 15 bp, Homo sapiens
tcagacgggactgaa

SEQ ID NO: 597744 - DNA, 15 bp, Homo sapiens
cagacgggactgaag

SEQ ID NO: 597745 - DNA, 15 bp, Homo sapiens
agacgggactgaagg

SEQ ID NO: 597746 - DNA, 15 bp, Homo sapiens
gacgggactgaaggg

SEQ ID NO: 597747 - DNA, 15 bp, Homo sapiens
acgggactgaaggga

SEQ ID NO: 597748 - DNA, 15 bp, Homo sapiens
cgggactgaagggag

SEQ ID NO: 597749 - DNA, 15 bp, Homo sapiens
gggactgaagggaga

SEQ ID NO: 597750 - DNA, 15 bp, Homo sapiens
ggactgaagggagac

SEQ ID NO: 597751 - DNA, 15 bp, Homo sapiens
gactgaagggagacc

SEQ ID NO: 597752 - DNA, 15 bp, Homo sapiens
actgaagggagacct

SEQ ID NO: 597753 - DNA, 15 bp, Homo sapiens
ctgaagggagacctc

SEQ ID NO: 597754 - DNA, 15 bp, Homo sapiens
tgaagggagacctct

SEQ ID NO: 597755 - DNA, 15 bp, Homo sapiens
gaagggagacctctg

SEQ ID NO: 597756 - DNA, 15 bp, Homo sapiens
aagggagacctctga

SEQ ID NO: 597757 - DNA, 15 bp, Homo sapiens
agggagacctctgag

SEQ ID NO: 597758 - DNA, 15 bp, Homo sapiens
gggagacctctgaga

SEQ ID NO: 597759 - DNA, 15 bp, Homo sapiens
ggagacctctgagag

SEQ ID NO: 597760 - DNA, 15 bp, Homo sapiens
gagacctctgagagt

SEQ ID NO: 597761 - DNA, 15 bp, Homo sapiens
agacctctgagagtg

SEQ ID NO: 597762 - DNA, 15 bp, Homo sapiens
gacctctgagagtga

SEQ ID NO: 597763 - DNA, 15 bp, Homo sapiens
acctctgagagtgag

SEQ ID NO: 597764 - DNA, 15 bp, Homo sapiens
cctctgagagtgagc

SEQ ID NO: 597765 - DNA, 15 bp, Homo sapiens
ctctgagagtgagct

SEQ ID NO: 597766 - DNA, 15 bp, Homo sapiens
tctgagagtgagctg

SEQ ID NO: 597767 - DNA, 15 bp, Homo sapiens
ctgagagtgagctgc

SEQ ID NO: 597768 - DNA, 15 bp, Homo sapiens
tgagagtgagctgct

SEQ ID NO: 597769 - DNA, 15 bp, Homo sapiens
gagagtgagctgctc

SEQ ID NO: 597770 - DNA, 15 bp, Homo sapiens
agagtgagctgctca

SEQ ID NO: 597771 - DNA, 15 bp, Homo sapiens
gagtgagctgctcac

SEQ ID NO: 597772 - DNA, 15 bp, Homo sapiens
agtgagctgctcact

SEQ ID NO: 597773 - DNA, 15 bp, Homo sapiens
gtgagctgctcactg

SEQ ID NO: 597774 - DNA, 15 bp, Homo sapiens
tgagctgctcactgt

SEQ ID NO: 597775 - DNA, 15 bp, Homo sapiens
gagctgctcactgtc

SEQ ID NO: 597776 - DNA, 15 bp, Homo sapiens
agctgctcactgtca

SEQ ID NO: 597777 - DNA, 15 bp, Homo sapiens
gctgctcactgtcag

SEQ ID NO: 597778 - DNA, 15 bp, Homo sapiens
ctgctcactgtcagg

SEQ ID NO: 597779 - DNA, 15 bp, Homo sapiens
tgctcactgtcaggt

SEQ ID NO: 597780 - DNA, 15 bp, Homo sapiens
gctcactgtcaggtc

SEQ ID NO: 597781 - DNA, 15 bp, Homo sapiens
ctcactgtcaggtct

SEQ ID NO: 597782 - DNA, 15 bp, Homo sapiens
tcactgtcaggtctc

SEQ ID NO: 597783 - DNA, 15 bp, Homo sapiens
cactgtcaggtctcg

SEQ ID NO: 597784 - DNA, 15 bp, Homo sapiens
actgtcaggtctcgt

SEQ ID NO: 597785 - DNA, 15 bp, Homo sapiens
ctgtcaggtctcgtg

SEQ ID NO: 597786 - DNA, 15 bp, Homo sapiens
tgtcaggtctcgtga

SEQ ID NO: 597787 - DNA, 15 bp, Homo sapiens
gtcaggtctcgtgag

SEQ ID NO: 597788 - DNA, 15 bp, Homo sapiens
tcaggtctcgtgagg

SEQ ID NO: 597789 - DNA, 15 bp, Homo sapiens
caggtctcgtgaggc

SEQ ID NO: 597790 - DNA, 15 bp, Homo sapiens
aggtctcgtgaggct

SEQ ID NO: 597791 - DNA, 15 bp, Homo sapiens
ggtctcgtgaggctg

SEQ ID NO: 597792 - DNA, 15 bp, Homo sapiens
gtctcgtgaggctgg

SEQ ID NO: 597793 - DNA, 15 bp, Homo sapiens
tctcgtgaggctgga

SEQ ID NO: 597794 - DNA, 15 bp, Homo sapiens
ctcgtgaggctggaa

SEQ ID NO: 597795 - DNA, 15 bp, Homo sapiens
tcgtgaggctggaaa

SEQ ID NO: 597796 - DNA, 15 bp, Homo sapiens
cgtgaggctggaaac

SEQ ID NO: 597797 - DNA, 15 bp, Homo sapiens
gtgaggctggaaaca

SEQ ID NO: 597798 - DNA, 15 bp, Homo sapiens
tgaggctggaaacag

SEQ ID NO: 597799 - DNA, 15 bp, Homo sapiens
gaggctggaaacagc

SEQ ID NO: 597800 - DNA, 15 bp, Homo sapiens
aggctggaaacagca

SEQ ID NO: 597801 - DNA, 15 bp, Homo sapiens
ggctggaaacagcat

SEQ ID NO: 597802 - DNA, 15 bp, Homo sapiens
gctggaaacagcatc

SEQ ID NO: 597803 - DNA, 15 bp, Homo sapiens
ctggaaacagcatcc

SEQ ID NO: 597804 - DNA, 15 bp, Homo sapiens
tggaaacagcatccc

SEQ ID NO: 597805 - DNA, 15 bp, Homo sapiens
ggaaacagcatccct

SEQ ID NO: 597806 - DNA, 15 bp, Homo sapiens
gaaacagcatccctg

SEQ ID NO: 597807 - DNA, 15 bp, Homo sapiens
aaacagcatccctgc

SEQ ID NO: 597808 - DNA, 15 bp, Homo sapiens
aacagcatccctgca

SEQ ID NO: 597809 - DNA, 15 bp, Homo sapiens
acagcatccctgcag

SEQ ID NO: 597810 - DNA, 15 bp, Homo sapiens
cagcatccctgcagg

SEQ ID NO: 597811 - DNA, 15 bp, Homo sapiens
agcatccctgcaggt

SEQ ID NO: 597812 - DNA, 15 bp, Homo sapiens
gcatccctgcaggta

SEQ ID NO: 597813 - DNA, 15 bp, Homo sapiens
catccctgcaggtag

SEQ ID NO: 597814 - DNA, 15 bp, Homo sapiens
atccctgcaggtagg

SEQ ID NO: 597815 - DNA, 15 bp, Homo sapiens
tccctgcaggtaggg

SEQ ID NO: 597816 - DNA, 15 bp, Homo sapiens
ccctgcaggtagggg

SEQ ID NO: 597817 - DNA, 15 bp, Homo sapiens
cctgcaggtaggggg

SEQ ID NO: 597818 - DNA, 15 bp, Homo sapiens
ctgcaggtaggggga

SEQ ID NO: 597819 - DNA, 15 bp, Homo sapiens
tgcaggtagggggat

SEQ ID NO: 597820 - DNA, 15 bp, Homo sapiens
gcaggtagggggatg

SEQ ID NO: 597821 - DNA, 15 bp, Homo sapiens
caggtagggggatgg

SEQ ID NO: 597822 - DNA, 15 bp, Homo sapiens
aggtagggggatggc

SEQ ID NO: 597823 - DNA, 15 bp, Homo sapiens
ggtagggggatggct

SEQ ID NO: 597824 - DNA, 15 bp, Homo sapiens
gtagggggatggctg

SEQ ID NO: 597825 - DNA, 15 bp, Homo sapiens
tagggggatggctga

SEQ ID NO: 597826 - DNA, 15 bp, Homo sapiens
agggggatggctgag

SEQ ID NO: 597827 - DNA, 15 bp, Homo sapiens
gggggatggctgagt

SEQ ID NO: 597828 - DNA, 15 bp, Homo sapiens
ggggatggctgagtt

SEQ ID NO: 597829 - DNA, 15 bp, Homo sapiens
gggatggctgagttg

SEQ ID NO: 597830 - DNA, 15 bp, Homo sapiens
ggatggctgagttga

SEQ ID NO: 597831 - DNA, 15 bp, Homo sapiens
gatggctgagttgac

SEQ ID NO: 597832 - DNA, 15 bp, Homo sapiens
atggctgagttgact

SEQ ID NO: 597833 - DNA, 15 bp, Homo sapiens
tggctgagttgactt

SEQ ID NO: 597834 - DNA, 15 bp, Homo sapiens
ggctgagttgacttc

SEQ ID NO: 597835 - DNA, 15 bp, Homo sapiens
gctgagttgacttct

SEQ ID NO: 597836 - DNA, 15 bp, Homo sapiens
ctgagttgacttctg

SEQ ID NO: 597837 - DNA, 15 bp, Homo sapiens
tgagttgacttctga

SEQ ID NO: 597838 - DNA, 15 bp, Homo sapiens
gagttgacttctgaa

SEQ ID NO: 597839 - DNA, 15 bp, Homo sapiens
agttgacttctgaag

SEQ ID NO: 597840 - DNA, 15 bp, Homo sapiens
gttgacttctgaaga

SEQ ID NO: 597841 - DNA, 15 bp, Homo sapiens
ttgacttctgaagaa

SEQ ID NO: 597842 - DNA, 15 bp, Homo sapiens
tgacttctgaagaag

SEQ ID NO: 597843 - DNA, 15 bp, Homo sapiens
gacttctgaagaagg

SEQ ID NO: 597844 - DNA, 15 bp, Homo sapiens
acttctgaagaaggt

SEQ ID NO: 597845 - DNA, 15 bp, Homo sapiens
cttctgaagaaggtg

SEQ ID NO: 597846 - DNA, 15 bp, Homo sapiens
ttctgaagaaggtgc

SEQ ID NO: 597847 - DNA, 15 bp, Homo sapiens
tctgaagaaggtgcc

SEQ ID NO: 597848 - DNA, 15 bp, Homo sapiens
ctgaagaaggtgccc

SEQ ID NO: 597849 - DNA, 15 bp, Homo sapiens
tgaagaaggtgccct

SEQ ID NO: 597850 - DNA, 15 bp, Homo sapiens
gaagaaggtgcccta

SEQ ID NO: 597851 - DNA, 15 bp, Homo sapiens
aagaaggtgccctag

SEQ ID NO: 597852 - DNA, 15 bp, Homo sapiens
agaaggtgccctagg

SEQ ID NO: 597853 - DNA, 15 bp, Homo sapiens
gaaggtgccctaggc

SEQ ID NO: 597854 - DNA, 15 bp, Homo sapiens
aaggtgccctaggct

SEQ ID NO: 597855 - DNA, 15 bp, Homo sapiens
aggtgccctaggcta

SEQ ID NO: 597856 - DNA, 15 bp, Homo sapiens
ggtgccctaggctac

SEQ ID NO: 597857 - DNA, 15 bp, Homo sapiens
gtgccctaggctact

SEQ ID NO: 597858 - DNA, 15 bp, Homo sapiens
tgccctaggctactc

SEQ ID NO: 597859 - DNA, 15 bp, Homo sapiens
gccctaggctactct

SEQ ID NO: 597860 - DNA, 15 bp, Homo sapiens
ccctaggctactctt

SEQ ID NO: 597861 - DNA, 15 bp, Homo sapiens
cctaggctactcttt

SEQ ID NO: 597862 - DNA, 15 bp, Homo sapiens
ctaggctactctttc

SEQ ID NO: 597863 - DNA, 15 bp, Homo sapiens
taggctactctttca

SEQ ID NO: 597864 - DNA, 15 bp, Homo sapiens
aggctactctttcat

SEQ ID NO: 597865 - DNA, 15 bp, Homo sapiens
ggctactctttcatt

SEQ ID NO: 597866 - DNA, 15 bp, Homo sapiens
gctactctttcattg

SEQ ID NO: 597867 - DNA, 15 bp, Homo sapiens
ctactctttcattgc

SEQ ID NO: 597868 - DNA, 15 bp, Homo sapiens
tactctttcattgct

SEQ ID NO: 597869 - DNA, 15 bp, Homo sapiens
actctttcattgctg

SEQ ID NO: 597870 - DNA, 15 bp, Homo sapiens
ctctttcattgctgc

SEQ ID NO: 597871 - DNA, 15 bp, Homo sapiens
tctttcattgctgct

SEQ ID NO: 597872 - DNA, 15 bp, Homo sapiens
ctttcattgctgctg

SEQ ID NO: 597873 - DNA, 15 bp, Homo sapiens
tttcattgctgctgg

SEQ ID NO: 597874 - DNA, 15 bp, Homo sapiens
ttcattgctgctggg

SEQ ID NO: 597875 - DNA, 15 bp, Homo sapiens
tcattgctgctggga

SEQ ID NO: 597876 - DNA, 15 bp, Homo sapiens
cattgctgctgggaa

SEQ ID NO: 597877 - DNA, 15 bp, Homo sapiens
attgctgctgggaag

SEQ ID NO: 597878 - DNA, 15 bp, Homo sapiens
ttgctgctgggaagg

SEQ ID NO: 597879 - DNA, 15 bp, Homo sapiens
tgctgctgggaaggc

SEQ ID NO: 597880 - DNA, 15 bp, Homo sapiens
gctgctgggaaggct

SEQ ID NO: 597881 - DNA, 15 bp, Homo sapiens
ctgctgggaaggctc

SEQ ID NO: 597882 - DNA, 15 bp, Homo sapiens
tgctgggaaggctca

SEQ ID NO: 597883 - DNA, 15 bp, Homo sapiens
gctgggaaggctcat

SEQ ID NO: 597884 - DNA, 15 bp, Homo sapiens
ctgggaaggctcatt

SEQ ID NO: 597885 - DNA, 15 bp, Homo sapiens
tgggaaggctcattc

SEQ ID NO: 597886 - DNA, 15 bp, Homo sapiens
gggaaggctcattcc

SEQ ID NO: 597887 - DNA, 15 bp, Homo sapiens
ggaaggctcattccc

SEQ ID NO: 597888 - DNA, 15 bp, Homo sapiens
gaaggctcattcccc

SEQ ID NO: 597889 - DNA, 15 bp, Homo sapiens
aaggctcattcccct

SEQ ID NO: 597890 - DNA, 15 bp, Homo sapiens
aggctcattccccta

SEQ ID NO: 597891 - DNA, 15 bp, Homo sapiens
ggctcattcccctac

SEQ ID NO: 597892 - DNA, 15 bp, Homo sapiens
gatgccccttccttc

SEQ ID NO: 597893 - DNA, 15 bp, Homo sapiens
atgccccttccttct

SEQ ID NO: 597894 - DNA, 15 bp, Homo sapiens
tgccccttccttctt

SEQ ID NO: 597895 - DNA, 15 bp, Homo sapiens
gccccttccttcttg

SEQ ID NO: 597896 - DNA, 15 bp, Homo sapiens
ccccttccttcttgt

SEQ ID NO: 597897 - DNA, 15 bp, Homo sapiens
cccttccttcttgta

SEQ ID NO: 597898 - DNA, 15 bp, Homo sapiens
ccttccttcttgtaa

SEQ ID NO: 597899 - DNA, 15 bp, Homo sapiens
cttccttcttgtaac

SEQ ID NO: 597900 - DNA, 15 bp, Homo sapiens
ttccttcttgtaacc

SEQ ID NO: 597901 - DNA, 15 bp, Homo sapiens
tccttcttgtaacct

SEQ ID NO: 597902 - DNA, 15 bp, Homo sapiens
ccttcttgtaacctc

SEQ ID NO: 597903 - DNA, 15 bp, Homo sapiens
cttcttgtaacctcc

SEQ ID NO: 597904 - DNA, 15 bp, Homo sapiens
ttcttgtaacctcca

SEQ ID NO: 597905 - DNA, 15 bp, Homo sapiens
tcttgtaacctccaa

SEQ ID NO: 597906 - DNA, 15 bp, Homo sapiens
cttgtaacctccaac

SEQ ID NO: 597907 - DNA, 15 bp, Homo sapiens
ttgtaacctccaacc

SEQ ID NO: 597908 - DNA, 15 bp, Homo sapiens
tgtaacctccaaccc

SEQ ID NO: 597909 - DNA, 15 bp, Homo sapiens
gtaacctccaaccca

SEQ ID NO: 597910 - DNA, 15 bp, Homo sapiens
taacctccaacccag

SEQ ID NO: 597911 - DNA, 15 bp, Homo sapiens
aacctccaacccagg

SEQ ID NO: 597912 - DNA, 15 bp, Homo sapiens
acctccaacccaggt

SEQ ID NO: 597913 - DNA, 15 bp, Homo sapiens
cctccaacccaggtg

SEQ ID NO: 597914 - DNA, 15 bp, Homo sapiens
ctccaacccaggtgt

SEQ ID NO: 597915 - DNA, 15 bp, Homo sapiens
tccaacccaggtgtc

SEQ ID NO: 597916 - DNA, 15 bp, Homo sapiens
ccaacccaggtgtcg

SEQ ID NO: 597917 - DNA, 15 bp, Homo sapiens
caacccaggtgtcgt

SEQ ID NO: 597918 - DNA, 15 bp, Homo sapiens
aacccaggtgtcgtc

SEQ ID NO: 597919 - DNA, 15 bp, Homo sapiens
acccaggtgtcgtct

SEQ ID NO: 597920 - DNA, 15 bp, Homo sapiens
cccaggtgtcgtctc

SEQ ID NO: 597921 - DNA, 15 bp, Homo sapiens
ccaggtgtcgtctcc

SEQ ID NO: 597922 - DNA, 15 bp, Homo sapiens
caggtgtcgtctcca

SEQ ID NO: 597923 - DNA, 15 bp, Homo sapiens
aggtgtcgtctccac

SEQ ID NO: 597924 - DNA, 15 bp, Homo sapiens
ggtgtcgtctccacg

SEQ ID NO: 597925 - DNA, 15 bp, Homo sapiens
gtgtcgtctccacgt

SEQ ID NO: 597926 - DNA, 15 bp, Homo sapiens
tgtcgtctccacgtg

SEQ ID NO: 597927 - DNA, 15 bp, Homo sapiens
gtcgtctccacgtgc

SEQ ID NO: 597928 - DNA, 15 bp, Homo sapiens
tcgtctccacgtgcc

SEQ ID NO: 597929 - DNA, 15 bp, Homo sapiens
cgtctccacgtgcct

SEQ ID NO: 597930 - DNA, 15 bp, Homo sapiens
gtctccacgtgcctt

SEQ ID NO: 597931 - DNA, 15 bp, Homo sapiens
tctccacgtgccttc

SEQ ID NO: 597932 - DNA, 15 bp, Homo sapiens
ctccacgtgccttca

SEQ ID NO: 597933 - DNA, 15 bp, Homo sapiens
tccacgtgccttcat

SEQ ID NO: 597934 - DNA, 15 bp, Homo sapiens
ccacgtgccttcatc

SEQ ID NO: 597935 - DNA, 15 bp, Homo sapiens
cacgtgccttcatcc

SEQ ID NO: 597936 - DNA, 15 bp, Homo sapiens
acgtgccttcatcca

SEQ ID NO: 597937 - DNA, 15 bp, Homo sapiens
cgtgccttcatccac

SEQ ID NO: 597938 - DNA, 15 bp, Homo sapiens
gtgccttcatccacc

SEQ ID NO: 597939 - DNA, 15 bp, Homo sapiens
tgccttcatccacct

SEQ ID NO: 597940 - DNA, 15 bp, Homo sapiens
gccttcatccacctc

SEQ ID NO: 597941 - DNA, 15 bp, Homo sapiens
ccttcatccacctca

SEQ ID NO: 597942 - DNA, 15 bp, Homo sapiens
cttcatccacctcag

SEQ ID NO: 597943 - DNA, 15 bp, Homo sapiens
ttcatccacctcaga

SEQ ID NO: 597944 - DNA, 15 bp, Homo sapiens
tcatccacctcagag

SEQ ID NO: 597945 - DNA, 15 bp, Homo sapiens
catccacctcagaga

SEQ ID NO: 597946 - DNA, 15 bp, Homo sapiens
atccacctcagagag

SEQ ID NO: 597947 - DNA, 15 bp, Homo sapiens
tccacctcagagaga

SEQ ID NO: 597948 - DNA, 15 bp, Homo sapiens
ccacctcagagagat

SEQ ID NO: 597949 - DNA, 15 bp, Homo sapiens
cacctcagagagatc

SEQ ID NO: 597950 - DNA, 15 bp, Homo sapiens
acctcagagagatcc

SEQ ID NO: 597951 - DNA, 15 bp, Homo sapiens
cctcagagagatccc

SEQ ID NO: 597952 - DNA, 15 bp, Homo sapiens
ctcagagagatccca

SEQ ID NO: 597953 - DNA, 15 bp, Homo sapiens
tcagagagatcccat

SEQ ID NO: 597954 - DNA, 15 bp, Homo sapiens
cagagagatcccatg

SEQ ID NO: 597955 - DNA, 15 bp, Homo sapiens
agagagatcccatga

SEQ ID NO: 597956 - DNA, 15 bp, Homo sapiens
gagagatcccatgaa

SEQ ID NO: 597957 - DNA, 15 bp, Homo sapiens
agagatcccatgaag

SEQ ID NO: 597958 - DNA, 15 bp, Homo sapiens
gagatcccatgaagc

SEQ ID NO: 597959 - DNA, 15 bp, Homo sapiens
agatcccatgaagcc

SEQ ID NO: 597960 - DNA, 15 bp, Homo sapiens
gatcccatgaagcct

SEQ ID NO: 597961 - DNA, 15 bp, Homo sapiens
atcccatgaagcctg

SEQ ID NO: 597962 - DNA, 15 bp, Homo sapiens
tcccatgaagcctgt

SEQ ID NO: 597963 - DNA, 15 bp, Homo sapiens
cccatgaagcctgtc

SEQ ID NO: 597964 - DNA, 15 bp, Homo sapiens
ccatgaagcctgtca

SEQ ID NO: 597965 - DNA, 15 bp, Homo sapiens
catgaagcctgtcaa

SEQ ID NO: 597966 - DNA, 15 bp, Homo sapiens
atgaagcctgtcaag

SEQ ID NO: 597967 - DNA, 15 bp, Homo sapiens
tgaagcctgtcaagt

SEQ ID NO: 597968 - DNA, 15 bp, Homo sapiens
gaagcctgtcaagtc

SEQ ID NO: 597969 - DNA, 15 bp, Homo sapiens
aagcctgtcaagtct

SEQ ID NO: 597970 - DNA, 15 bp, Homo sapiens
agcctgtcaagtctt

SEQ ID NO: 597971 - DNA, 15 bp, Homo sapiens
gcctgtcaagtcttg

SEQ ID NO: 597972 - DNA, 15 bp, Homo sapiens
cctgtcaagtcttga

SEQ ID NO: 597973 - DNA, 15 bp, Homo sapiens
ctgtcaagtcttgat

SEQ ID NO: 597974 - DNA, 15 bp, Homo sapiens
tgtcaagtcttgatt

SEQ ID NO: 597975 - DNA, 15 bp, Homo sapiens
gtcaagtcttgattc

SEQ ID NO: 597976 - DNA, 15 bp, Homo sapiens
tcaagtcttgattct

SEQ ID NO: 597977 - DNA, 15 bp, Homo sapiens
caagtcttgattcta

SEQ ID NO: 597978 - DNA, 15 bp, Homo sapiens
aagtcttgattctag

SEQ ID NO: 597979 - DNA, 15 bp, Homo sapiens
agtcttgattctaga

SEQ ID NO: 597980 - DNA, 15 bp, Homo sapiens
gtcttgattctagaa

SEQ ID NO: 597981 - DNA, 15 bp, Homo sapiens
tcttgattctagaaa

SEQ ID NO: 597982 - DNA, 15 bp, Homo sapiens
cttgattctagaaac

SEQ ID NO: 597983 - DNA, 15 bp, Homo sapiens
ttgattctagaaact

SEQ ID NO: 597984 - DNA, 15 bp, Homo sapiens
tgattctagaaactg

SEQ ID NO: 597985 - DNA, 15 bp, Homo sapiens
gattctagaaactgc

SEQ ID NO: 597986 - DNA, 15 bp, Homo sapiens
attctagaaactgcc

SEQ ID NO: 597987 - DNA, 15 bp, Homo sapiens
ttctagaaactgcca

SEQ ID NO: 597988 - DNA, 15 bp, Homo sapiens
tctagaaactgccat

SEQ ID NO: 597989 - DNA, 15 bp, Homo sapiens
ctagaaactgccatc

SEQ ID NO: 597990 - DNA, 15 bp, Homo sapiens
tagaaactgccatcc

SEQ ID NO: 597991 - DNA, 15 bp, Homo sapiens
agaaactgccatcct

SEQ ID NO: 597992 - DNA, 15 bp, Homo sapiens
gaaactgccatcctg

SEQ ID NO: 597993 - DNA, 15 bp, Homo sapiens
aaactgccatcctgc

SEQ ID NO: 597994 - DNA, 15 bp, Homo sapiens
aactgccatcctgcc

SEQ ID NO: 597995 - DNA, 15 bp, Homo sapiens
actgccatcctgccc

SEQ ID NO: 597996 - DNA, 15 bp, Homo sapiens
ctgccatcctgccct

SEQ ID NO: 597997 - DNA, 15 bp, Homo sapiens
tgccatcctgccctt

SEQ ID NO: 597998 - DNA, 15 bp, Homo sapiens
gccatcctgcccttc

SEQ ID NO: 597999 - DNA, 15 bp, Homo sapiens
ccatcctgcccttcc

SEQ ID NO: 598000 - DNA, 15 bp, Homo sapiens
catcctgcccttccc

SEQ ID NO: 598001 - DNA, 15 bp, Homo sapiens
atcctgcccttccca

SEQ ID NO: 598002 - DNA, 15 bp, Homo sapiens
tcctgcccttcccat

SEQ ID NO: 598003 - DNA, 15 bp, Homo sapiens
cctgcccttcccatg

SEQ ID NO: 598004 - DNA, 15 bp, Homo sapiens
ctgcccttcccatgg

SEQ ID NO: 598005 - DNA, 15 bp, Homo sapiens
tgcccttcccatggc

SEQ ID NO: 598006 - DNA, 15 bp, Homo sapiens
gcccttcccatggcc

SEQ ID NO: 598007 - DNA, 15 bp, Homo sapiens
cccttcccatggccc

SEQ ID NO: 598008 - DNA, 15 bp, Homo sapiens
ccttcccatggccct

SEQ ID NO: 598009 - DNA, 15 bp, Homo sapiens
cttcccatggccctt

SEQ ID NO: 598010 - DNA, 15 bp, Homo sapiens
ttcccatggcccttt

SEQ ID NO: 598011 - DNA, 15 bp, Homo sapiens
tcccatggcccttta

SEQ ID NO: 598012 - DNA, 15 bp, Homo sapiens
cccatggccctttag

SEQ ID NO: 598013 - DNA, 15 bp, Homo sapiens
ccatggccctttaga

SEQ ID NO: 598014 - DNA, 15 bp, Homo sapiens
catggccctttagac

SEQ ID NO: 598015 - DNA, 15 bp, Homo sapiens
atggccctttagacc

SEQ ID NO: 598016 - DNA, 15 bp, Homo sapiens
tggccctttagaccc

SEQ ID NO: 598017 - DNA, 15 bp, Homo sapiens
ggccctttagacccc

SEQ ID NO: 598018 - DNA, 15 bp, Homo sapiens
gccctttagaccccc

SEQ ID NO: 598019 - DNA, 15 bp, Homo sapiens
ccctttagaccccct

SEQ ID NO: 598020 - DNA, 15 bp, Homo sapiens
cctttagaccccctc

SEQ ID NO: 598021 - DNA, 15 bp, Homo sapiens
ctttagaccccctct

SEQ ID NO: 598022 - DNA, 15 bp, Homo sapiens
tttagaccccctctg

SEQ ID NO: 598023 - DNA, 15 bp, Homo sapiens
ttagaccccctctga

SEQ ID NO: 598024 - DNA, 15 bp, Homo sapiens
tagaccccctctgac

SEQ ID NO: 598025 - DNA, 15 bp, Homo sapiens
agaccccctctgacc

SEQ ID NO: 598026 - DNA, 15 bp, Homo sapiens
gaccccctctgaccg

SEQ ID NO: 598027 - DNA, 15 bp, Homo sapiens
accccctctgaccgc

SEQ ID NO: 598028 - DNA, 15 bp, Homo sapiens
ccccctctgaccgct

SEQ ID NO: 598029 - DNA, 15 bp, Homo sapiens
cccctctgaccgctg

SEQ ID NO: 598030 - DNA, 15 bp, Homo sapiens
ccctctgaccgctgc

SEQ ID NO: 598031 - DNA, 15 bp, Homo sapiens
cctctgaccgctgct

SEQ ID NO: 598032 - DNA, 15 bp, Homo sapiens
ctctgaccgctgctt

SEQ ID NO: 598033 - DNA, 15 bp, Homo sapiens
tctgaccgctgcttt

SEQ ID NO: 598034 - DNA, 15 bp, Homo sapiens
ctgaccgctgctttg

SEQ ID NO: 598035 - DNA, 15 bp, Homo sapiens
tgaccgctgctttgc

SEQ ID NO: 598036 - DNA, 15 bp, Homo sapiens
gaccgctgctttgct

SEQ ID NO: 598037 - DNA, 15 bp, Homo sapiens
accgctgctttgctc

SEQ ID NO: 598038 - DNA, 15 bp, Homo sapiens
ccgctgctttgctct

SEQ ID NO: 598039 - DNA, 15 bp, Homo sapiens
cgctgctttgctctc

SEQ ID NO: 598040 - DNA, 15 bp, Homo sapiens
gctgctttgctctcc

SEQ ID NO: 598041 - DNA, 15 bp, Homo sapiens
ctgctttgctctcct

SEQ ID NO: 598042 - DNA, 15 bp, Homo sapiens
tgctttgctctcctg

SEQ ID NO: 598043 - DNA, 15 bp, Homo sapiens
gctttgctctcctgg

SEQ ID NO: 598044 - DNA, 15 bp, Homo sapiens
ctttgctctcctggt

SEQ ID NO: 598045 - DNA, 15 bp, Homo sapiens
tttgctctcctggtc

SEQ ID NO: 598046 - DNA, 15 bp, Homo sapiens
ttgctctcctggtca

SEQ ID NO: 598047 - DNA, 15 bp, Homo sapiens
tgctctcctggtcag

SEQ ID NO: 598048 - DNA, 15 bp, Homo sapiens
gctctcctggtcagc

SEQ ID NO: 598049 - DNA, 15 bp, Homo sapiens
ctctcctggtcagct

SEQ ID NO: 598050 - DNA, 15 bp, Homo sapiens
tctcctggtcagctc

SEQ ID NO: 598051 - DNA, 15 bp, Homo sapiens
ctcctggtcagctct

SEQ ID NO: 598052 - DNA, 15 bp, Homo sapiens
tcctggtcagctctg

SEQ ID NO: 598053 - DNA, 15 bp, Homo sapiens
cctggtcagctctgc

SEQ ID NO: 598054 - DNA, 15 bp, Homo sapiens
ctggtcagctctgct

SEQ ID NO: 598055 - DNA, 15 bp, Homo sapiens
tggtcagctctgctg

SEQ ID NO: 598056 - DNA, 15 bp, Homo sapiens
ggtcagctctgctgc

SEQ ID NO: 598057 - DNA, 15 bp, Homo sapiens
gtcagctctgctgcc

SEQ ID NO: 598058 - DNA, 15 bp, Homo sapiens
tcagctctgctgcct

SEQ ID NO: 598059 - DNA, 15 bp, Homo sapiens
cagctctgctgcctt

SEQ ID NO: 598060 - DNA, 15 bp, Homo sapiens
agctctgctgccttg

SEQ ID NO: 598061 - DNA, 15 bp, Homo sapiens
gctctgctgccttgt

SEQ ID NO: 598062 - DNA, 15 bp, Homo sapiens
ctctgctgccttgtg

SEQ ID NO: 598063 - DNA, 15 bp, Homo sapiens
tctgctgccttgtga

SEQ ID NO: 598064 - DNA, 15 bp, Homo sapiens
ctgctgccttgtgag

SEQ ID NO: 598065 - DNA, 15 bp, Homo sapiens
tgctgccttgtgagg

SEQ ID NO: 598066 - DNA, 15 bp, Homo sapiens
gctgccttgtgaggg

SEQ ID NO: 598067 - DNA, 15 bp, Homo sapiens
ctgccttgtgaggga

SEQ ID NO: 598068 - DNA, 15 bp, Homo sapiens
tgccttgtgagggac

SEQ ID NO: 598069 - DNA, 15 bp, Homo sapiens
gccttgtgagggaca

SEQ ID NO: 598070 - DNA, 15 bp, Homo sapiens
ccttgtgagggacag

SEQ ID NO: 598071 - DNA, 15 bp, Homo sapiens
cttgtgagggacagg

SEQ ID NO: 598072 - DNA, 15 bp, Homo sapiens
ttgtgagggacaggg

SEQ ID NO: 598073 - DNA, 15 bp, Homo sapiens
tgtgagggacaggga

SEQ ID NO: 598074 - DNA, 15 bp, Homo sapiens
gtgagggacagggac

SEQ ID NO: 598075 - DNA, 15 bp, Homo sapiens
tgagggacagggaca

SEQ ID NO: 598076 - DNA, 15 bp, Homo sapiens
gagggacagggacat

SEQ ID NO: 598077 - DNA, 15 bp, Homo sapiens
agggacagggacatc

SEQ ID NO: 598078 - DNA, 15 bp, Homo sapiens
gggacagggacatct

SEQ ID NO: 598079 - DNA, 15 bp, Homo sapiens
ggacagggacatctg

SEQ ID NO: 598080 - DNA, 15 bp, Homo sapiens
gacagggacatctgg

SEQ ID NO: 598081 - DNA, 15 bp, Homo sapiens
acagggacatctgga

SEQ ID NO: 598082 - DNA, 15 bp, Homo sapiens
cagggacatctggat

SEQ ID NO: 598083 - DNA, 15 bp, Homo sapiens
agggacatctggatt

SEQ ID NO: 598084 - DNA, 15 bp, Homo sapiens
gggacatctggattg

SEQ ID NO: 598085 - DNA, 15 bp, Homo sapiens
ggacatctggattgc

SEQ ID NO: 598086 - DNA, 15 bp, Homo sapiens
gacatctggattgca

SEQ ID NO: 598087 - DNA, 15 bp, Homo sapiens
acatctggattgcat

SEQ ID NO: 598088 - DNA, 15 bp, Homo sapiens
catctggattgcatc

SEQ ID NO: 598089 - DNA, 15 bp, Homo sapiens
atctggattgcatcc

SEQ ID NO: 598090 - DNA, 15 bp, Homo sapiens
tctggattgcatcct

SEQ ID NO: 598091 - DNA, 15 bp, Homo sapiens
ctggattgcatcctt

SEQ ID NO: 598092 - DNA, 15 bp, Homo sapiens
tggattgcatccttc

SEQ ID NO: 598093 - DNA, 15 bp, Homo sapiens
ggattgcatccttcc

SEQ ID NO: 598094 - DNA, 15 bp, Homo sapiens
gattgcatccttccc

SEQ ID NO: 598095 - DNA, 15 bp, Homo sapiens
attgcatccttcccg

SEQ ID NO: 598096 - DNA, 15 bp, Homo sapiens
ttgcatccttcccgc

SEQ ID NO: 598097 - DNA, 15 bp, Homo sapiens
tgcatccttcccgct

SEQ ID NO: 598098 - DNA, 15 bp, Homo sapiens
gcatccttcccgcta

SEQ ID NO: 598099 - DNA, 15 bp, Homo sapiens
catccttcccgctac

SEQ ID NO: 598100 - DNA, 15 bp, Homo sapiens
atccttcccgctacc

SEQ ID NO: 598101 - DNA, 15 bp, Homo sapiens
tccttcccgctaccc

SEQ ID NO: 598102 - DNA, 15 bp, Homo sapiens
ccttcccgctaccca

SEQ ID NO: 598103 - DNA, 15 bp, Homo sapiens
cttcccgctacccag

SEQ ID NO: 598104 - DNA, 15 bp, Homo sapiens
ttcccgctacccaga

SEQ ID NO: 598105 - DNA, 15 bp, Homo sapiens
tcccgctacccagaa

SEQ ID NO: 598106 - DNA, 15 bp, Homo sapiens
cccgctacccagaac

SEQ ID NO: 598107 - DNA, 15 bp, Homo sapiens
ccgctacccagaacc

SEQ ID NO: 598108 - DNA, 15 bp, Homo sapiens
cgctacccagaaccc

SEQ ID NO: 598109 - DNA, 15 bp, Homo sapiens
gctacccagaaccca

SEQ ID NO: 598110 - DNA, 15 bp, Homo sapiens
ctacccagaacccac

SEQ ID NO: 598111 - DNA, 15 bp, Homo sapiens
tacccagaacccaca

SEQ ID NO: 598112 - DNA, 15 bp, Homo sapiens
acccagaacccacag

SEQ ID NO: 598113 - DNA, 15 bp, Homo sapiens
cccagaacccacagc

SEQ ID NO: 598114 - DNA, 15 bp, Homo sapiens
ccagaacccacagcc

SEQ ID NO: 598115 - DNA, 15 bp, Homo sapiens
cagaacccacagccc

SEQ ID NO: 598116 - DNA, 15 bp, Homo sapiens
agaacccacagcccc

SEQ ID NO: 598117 - DNA, 15 bp, Homo sapiens
gaacccacagcccca

SEQ ID NO: 598118 - DNA, 15 bp, Homo sapiens
aacccacagccccac

SEQ ID NO: 598119 - DNA, 15 bp, Homo sapiens
acccacagccccacc

SEQ ID NO: 598120 - DNA, 15 bp, Homo sapiens
cccacagccccacct

SEQ ID NO: 598121 - DNA, 15 bp, Homo sapiens
ccacagccccacctt

SEQ ID NO: 598122 - DNA, 15 bp, Homo sapiens
cacagccccaccttg

SEQ ID NO: 598123 - DNA, 15 bp, Homo sapiens
acagccccaccttgt

SEQ ID NO: 598124 - DNA, 15 bp, Homo sapiens
cagccccaccttgtc

SEQ ID NO: 598125 - DNA, 15 bp, Homo sapiens
agccccaccttgtca

SEQ ID NO: 598126 - DNA, 15 bp, Homo sapiens
gccccaccttgtcag

SEQ ID NO: 598127 - DNA, 15 bp, Homo sapiens
ccccaccttgtcagg

SEQ ID NO: 598128 - DNA, 15 bp, Homo sapiens
cccaccttgtcaggc

SEQ ID NO: 598129 - DNA, 15 bp, Homo sapiens
ccaccttgtcaggct

SEQ ID NO: 598130 - DNA, 15 bp, Homo sapiens
caccttgtcaggctt

SEQ ID NO: 598131 - DNA, 15 bp, Homo sapiens
accttgtcaggcttg

SEQ ID NO: 598132 - DNA, 15 bp, Homo sapiens
ccttgtcaggcttgc

SEQ ID NO: 598133 - DNA, 15 bp, Homo sapiens
cttgtcaggcttgca

SEQ ID NO: 598134 - DNA, 15 bp, Homo sapiens
ttgtcaggcttgcag

SEQ ID NO: 598135 - DNA, 15 bp, Homo sapiens
tgtcaggcttgcagc

SEQ ID NO: 598136 - DNA, 15 bp, Homo sapiens
gtcaggcttgcagca

SEQ ID NO: 598137 - DNA, 15 bp, Homo sapiens
tcaggcttgcagcag

SEQ ID NO: 598138 - DNA, 15 bp, Homo sapiens
caggcttgcagcagg

SEQ ID NO: 598139 - DNA, 15 bp, Homo sapiens
aggcttgcagcaggg

SEQ ID NO: 598140 - DNA, 15 bp, Homo sapiens
ggcttgcagcaggga

SEQ ID NO: 598141 - DNA, 15 bp, Homo sapiens
gcttgcagcagggac

SEQ ID NO: 598142 - DNA, 15 bp, Homo sapiens
cttgcagcagggact

SEQ ID NO: 598143 - DNA, 15 bp, Homo sapiens
ttgcagcagggactt

SEQ ID NO: 598144 - DNA, 15 bp, Homo sapiens
tgcagcagggactta

SEQ ID NO: 598145 - DNA, 15 bp, Homo sapiens
gcagcagggacttat

SEQ ID NO: 598146 - DNA, 15 bp, Homo sapiens
cagcagggacttatg

SEQ ID NO: 598147 - DNA, 15 bp, Homo sapiens
agcagggacttatgt

SEQ ID NO: 598148 - DNA, 15 bp, Homo sapiens
gcagggacttatgtt

SEQ ID NO: 598149 - DNA, 15 bp, Homo sapiens
cagggacttatgttg

SEQ ID NO: 598150 - DNA, 15 bp, Homo sapiens
agggacttatgttgt

SEQ ID NO: 598151 - DNA, 15 bp, Homo sapiens
gggacttatgttgtg

SEQ ID NO: 598152 - DNA, 15 bp, Homo sapiens
ggacttatgttgtgg

SEQ ID NO: 598153 - DNA, 15 bp, Homo sapiens
gacttatgttgtggg

SEQ ID NO: 598154 - DNA, 15 bp, Homo sapiens
acttatgttgtggga

SEQ ID NO: 598155 - DNA, 15 bp, Homo sapiens
cttatgttgtgggag

SEQ ID NO: 598156 - DNA, 15 bp, Homo sapiens
ttatgttgtgggagg

SEQ ID NO: 598157 - DNA, 15 bp, Homo sapiens
tatgttgtgggagga

SEQ ID NO: 598158 - DNA, 15 bp, Homo sapiens
atgttgtgggaggat

SEQ ID NO: 598159 - DNA, 15 bp, Homo sapiens
tgttgtgggaggatg

SEQ ID NO: 598160 - DNA, 15 bp, Homo sapiens
gttgtgggaggatga

SEQ ID NO: 598161 - DNA, 15 bp, Homo sapiens
ttgtgggaggatgaa

SEQ ID NO: 598162 - DNA, 15 bp, Homo sapiens
tgtgggaggatgaaa

SEQ ID NO: 598163 - DNA, 15 bp, Homo sapiens
gtgggaggatgaaat

SEQ ID NO: 598164 - DNA, 15 bp, Homo sapiens
tgggaggatgaaatg

SEQ ID NO: 598165 - DNA, 15 bp, Homo sapiens
gggaggatgaaatgg

SEQ ID NO: 598166 - DNA, 15 bp, Homo sapiens
ggaggatgaaatgga

SEQ ID NO: 598167 - DNA, 15 bp, Homo sapiens
gaggatgaaatggag

SEQ ID NO: 598168 - DNA, 15 bp, Homo sapiens
aggatgaaatggagg

SEQ ID NO: 598169 - DNA, 15 bp, Homo sapiens
ggatgaaatggagga

SEQ ID NO: 598170 - DNA, 15 bp, Homo sapiens
gatgaaatggaggag

SEQ ID NO: 598171 - DNA, 15 bp, Homo sapiens
atgaaatggaggagt

SEQ ID NO: 598172 - DNA, 15 bp, Homo sapiens
tgaaatggaggagtg

SEQ ID NO: 598173 - DNA, 15 bp, Homo sapiens
gaaatggaggagtgg

SEQ ID NO: 598174 - DNA, 15 bp, Homo sapiens
aaatggaggagtggg

SEQ ID NO: 598175 - DNA, 15 bp, Homo sapiens
aatggaggagtgggg

SEQ ID NO: 598176 - DNA, 15 bp, Homo sapiens
atggaggagtggggg

SEQ ID NO: 598177 - DNA, 15 bp, Homo sapiens
tggaggagtggggga

SEQ ID NO: 598178 - DNA, 15 bp, Homo sapiens
ggaggagtgggggac

SEQ ID NO: 598179 - DNA, 15 bp, Homo sapiens
gaggagtgggggaca

SEQ ID NO: 598180 - DNA, 15 bp, Homo sapiens
aggagtgggggacac

SEQ ID NO: 598181 - DNA, 15 bp, Homo sapiens
ggagtgggggacact

SEQ ID NO: 598182 - DNA, 15 bp, Homo sapiens
gagtgggggacactg

SEQ ID NO: 598183 - DNA, 15 bp, Homo sapiens
agtgggggacactgg

SEQ ID NO: 598184 - DNA, 15 bp, Homo sapiens
gtgggggacactggt

SEQ ID NO: 598185 - DNA, 15 bp, Homo sapiens
tgggggacactggtg

SEQ ID NO: 598186 - DNA, 15 bp, Homo sapiens
gggggacactggtgg

SEQ ID NO: 598187 - DNA, 15 bp, Homo sapiens
ggggacactggtggg

SEQ ID NO: 598188 - DNA, 15 bp, Homo sapiens
gggacactggtgggc

SEQ ID NO: 598189 - DNA, 15 bp, Homo sapiens
ggacactggtgggca

SEQ ID NO: 598190 - DNA, 15 bp, Homo sapiens
gacactggtgggcag

SEQ ID NO: 598191 - DNA, 15 bp, Homo sapiens
acactggtgggcagg

SEQ ID NO: 598192 - DNA, 15 bp, Homo sapiens
cactggtgggcaggg

SEQ ID NO: 598193 - DNA, 15 bp, Homo sapiens
actggtgggcagggc

SEQ ID NO: 598194 - DNA, 15 bp, Homo sapiens
ctggtgggcagggcc

SEQ ID NO: 598195 - DNA, 15 bp, Homo sapiens
tggtgggcagggcct

SEQ ID NO: 598196 - DNA, 15 bp, Homo sapiens
ggtgggcagggcctt

SEQ ID NO: 598197 - DNA, 15 bp, Homo sapiens
gtgggcagggccttg

SEQ ID NO: 598198 - DNA, 15 bp, Homo sapiens
tgggcagggccttgc

SEQ ID NO: 598199 - DNA, 15 bp, Homo sapiens
gggcagggccttgcc

SEQ ID NO: 598200 - DNA, 15 bp, Homo sapiens
ggcagggccttgccc

SEQ ID NO: 598201 - DNA, 15 bp, Homo sapiens
gcagggccttgcccc

SEQ ID NO: 598202 - DNA, 15 bp, Homo sapiens
cagggccttgcccct

SEQ ID NO: 598203 - DNA, 15 bp, Homo sapiens
agggccttgcccctc

SEQ ID NO: 598204 - DNA, 15 bp, Homo sapiens
gggccttgcccctcc

SEQ ID NO: 598205 - DNA, 15 bp, Homo sapiens
ggccttgcccctcct

SEQ ID NO: 598206 - DNA, 15 bp, Homo sapiens
gccttgcccctcctc

SEQ ID NO: 598207 - DNA, 15 bp, Homo sapiens
ccttgcccctcctca

SEQ ID NO: 598208 - DNA, 15 bp, Homo sapiens
cttgcccctcctcac

SEQ ID NO: 598209 - DNA, 15 bp, Homo sapiens
ttgcccctcctcaca

SEQ ID NO: 598210 - DNA, 15 bp, Homo sapiens
tgcccctcctcacag

SEQ ID NO: 598211 - DNA, 15 bp, Homo sapiens
gcccctcctcacagg

SEQ ID NO: 598212 - DNA, 15 bp, Homo sapiens
cccctcctcacaggg

SEQ ID NO: 598213 - DNA, 15 bp, Homo sapiens
ccctcctcacagggc

SEQ ID NO: 598214 - DNA, 15 bp, Homo sapiens
cctcctcacagggca

SEQ ID NO: 598215 - DNA, 15 bp, Homo sapiens
ctcctcacagggcat

SEQ ID NO: 598216 - DNA, 15 bp, Homo sapiens
tcctcacagggcatg

SEQ ID NO: 598217 - DNA, 15 bp, Homo sapiens
cctcacagggcatgg

SEQ ID NO: 598218 - DNA, 15 bp, Homo sapiens
ctcacagggcatggg

SEQ ID NO: 598219 - DNA, 15 bp, Homo sapiens
tcacagggcatgggg

SEQ ID NO: 598220 - DNA, 15 bp, Homo sapiens
cacagggcatggggt

SEQ ID NO: 598221 - DNA, 15 bp, Homo sapiens
acagggcatggggtc

SEQ ID NO: 598222 - DNA, 15 bp, Homo sapiens
cagggcatggggtcc

SEQ ID NO: 598223 - DNA, 15 bp, Homo sapiens
agggcatggggtcca

SEQ ID NO: 598224 - DNA, 15 bp, Homo sapiens
gggcatggggtccaa

SEQ ID NO: 598225 - DNA, 15 bp, Homo sapiens
ggcatggggtccaaa

SEQ ID NO: 598226 - DNA, 15 bp, Homo sapiens
gcatggggtccaaag

SEQ ID NO: 598227 - DNA, 15 bp, Homo sapiens
catggggtccaaagc

SEQ ID NO: 598228 - DNA, 15 bp, Homo sapiens
atggggtccaaagct

SEQ ID NO: 598229 - DNA, 15 bp, Homo sapiens
tggggtccaaagctt

SEQ ID NO: 598230 - DNA, 15 bp, Homo sapiens
ggggtccaaagcttc

SEQ ID NO: 598231 - DNA, 15 bp, Homo sapiens
gggtccaaagcttcc

SEQ ID NO: 598232 - DNA, 15 bp, Homo sapiens
ggtccaaagcttcct

SEQ ID NO: 598233 - DNA, 15 bp, Homo sapiens
gtccaaagcttcctc

SEQ ID NO: 598234 - DNA, 15 bp, Homo sapiens
tccaaagcttcctcc

SEQ ID NO: 598235 - DNA, 15 bp, Homo sapiens
ccaaagcttcctccc

SEQ ID NO: 598236 - DNA, 15 bp, Homo sapiens
caaagcttcctccct

SEQ ID NO: 598237 - DNA, 15 bp, Homo sapiens
aaagcttcctccctg

SEQ ID NO: 598238 - DNA, 15 bp, Homo sapiens
aagcttcctccctgc

SEQ ID NO: 598239 - DNA, 15 bp, Homo sapiens
agcttcctccctgct

SEQ ID NO: 598240 - DNA, 15 bp, Homo sapiens
gcttcctccctgctt

SEQ ID NO: 598241 - DNA, 15 bp, Homo sapiens
cttcctccctgcttc

SEQ ID NO: 598242 - DNA, 15 bp, Homo sapiens
ttcctccctgcttca

SEQ ID NO: 598243 - DNA, 15 bp, Homo sapiens
tcctccctgcttcac

SEQ ID NO: 598244 - DNA, 15 bp, Homo sapiens
cctccctgcttcact

SEQ ID NO: 598245 - DNA, 15 bp, Homo sapiens
ctccctgcttcactt

SEQ ID NO: 598246 - DNA, 15 bp, Homo sapiens
tccctgcttcacttt

SEQ ID NO: 598247 - DNA, 15 bp, Homo sapiens
ccctgcttcactttg

SEQ ID NO: 598248 - DNA, 15 bp, Homo sapiens
cctgcttcactttgc

SEQ ID NO: 598249 - DNA, 15 bp, Homo sapiens
ctgcttcactttgcc

SEQ ID NO: 598250 - DNA, 15 bp, Homo sapiens
tgcttcactttgcca

SEQ ID NO: 598251 - DNA, 15 bp, Homo sapiens
gcttcactttgccat

SEQ ID NO: 598252 - DNA, 15 bp, Homo sapiens
cttcactttgccatt

SEQ ID NO: 598253 - DNA, 15 bp, Homo sapiens
ttcactttgccattg

SEQ ID NO: 598254 - DNA, 15 bp, Homo sapiens
tcactttgccattgg

SEQ ID NO: 598255 - DNA, 15 bp, Homo sapiens
cactttgccattggc

SEQ ID NO: 598256 - DNA, 15 bp, Homo sapiens
actttgccattggct

SEQ ID NO: 598257 - DNA, 15 bp, Homo sapiens
ctttgccattggctg

SEQ ID NO: 598258 - DNA, 15 bp, Homo sapiens
tttgccattggctgt

SEQ ID NO: 598259 - DNA, 15 bp, Homo sapiens
ttgccattggctgtg

SEQ ID NO: 598260 - DNA, 15 bp, Homo sapiens
tgccattggctgtgg

SEQ ID NO: 598261 - DNA, 15 bp, Homo sapiens
gccattggctgtggt

SEQ ID NO: 598262 - DNA, 15 bp, Homo sapiens
ccattggctgtggtt

SEQ ID NO: 598263 - DNA, 15 bp, Homo sapiens
cattggctgtggtta

SEQ ID NO: 598264 - DNA, 15 bp, Homo sapiens
attggctgtggttac

SEQ ID NO: 598265 - DNA, 15 bp, Homo sapiens
ttggctgtggttact

SEQ ID NO: 598266 - DNA, 15 bp, Homo sapiens
tggctgtggttactg

SEQ ID NO: 598267 - DNA, 15 bp, Homo sapiens
ggctgtggttactgc

SEQ ID NO: 598268 - DNA, 15 bp, Homo sapiens
gctgtggttactgct

SEQ ID NO: 598269 - DNA, 15 bp, Homo sapiens
ctgtggttactgctg

SEQ ID NO: 598270 - DNA, 15 bp, Homo sapiens
tgtggttactgctgg

SEQ ID NO: 598271 - DNA, 15 bp, Homo sapiens
gtggttactgctgga

SEQ ID NO: 598272 - DNA, 15 bp, Homo sapiens
tggttactgctggaa

SEQ ID NO: 598273 - DNA, 15 bp, Homo sapiens
ggttactgctggaag

SEQ ID NO: 598274 - DNA, 15 bp, Homo sapiens
gttactgctggaaga

SEQ ID NO: 598275 - DNA, 15 bp, Homo sapiens
ttactgctggaagat

SEQ ID NO: 598276 - DNA, 15 bp, Homo sapiens
tactgctggaagatc

SEQ ID NO: 598277 - DNA, 15 bp, Homo sapiens
actgctggaagatct

SEQ ID NO: 598278 - DNA, 15 bp, Homo sapiens
ctgctggaagatctc

SEQ ID NO: 598279 - DNA, 15 bp, Homo sapiens
tgctggaagatctca

SEQ ID NO: 598280 - DNA, 15 bp, Homo sapiens
gctggaagatctcac

SEQ ID NO: 598281 - DNA, 15 bp, Homo sapiens
ctggaagatctcaca

SEQ ID NO: 598282 - DNA, 15 bp, Homo sapiens
tggaagatctcacaa

SEQ ID NO: 598283 - DNA, 15 bp, Homo sapiens
ggaagatctcacaaa

SEQ ID NO: 598284 - DNA, 15 bp, Homo sapiens
gaagatctcacaaat

SEQ ID NO: 598285 - DNA, 15 bp, Homo sapiens
aagatctcacaaatt

SEQ ID NO: 598286 - DNA, 15 bp, Homo sapiens
agatctcacaaatta

SEQ ID NO: 598287 - DNA, 15 bp, Homo sapiens
gatctcacaaattaa

SEQ ID NO: 598288 - DNA, 15 bp, Homo sapiens
atctcacaaattaag

SEQ ID NO: 598289 - DNA, 15 bp, Homo sapiens
tctcacaaattaagc

SEQ ID NO: 598290 - DNA, 15 bp, Homo sapiens
ctcacaaattaagca

SEQ ID NO: 598291 - DNA, 15 bp, Homo sapiens
tcacaaattaagcag

SEQ ID NO: 598292 - DNA, 15 bp, Homo sapiens
cacaaattaagcaga

SEQ ID NO: 598293 - DNA, 15 bp, Homo sapiens
acaaattaagcagaa

SEQ ID NO: 598294 - DNA, 15 bp, Homo sapiens
caaattaagcagaat

SEQ ID NO: 598295 - DNA, 15 bp, Homo sapiens
aaattaagcagaatg

SEQ ID NO: 598296 - DNA, 15 bp, Homo sapiens
aattaagcagaatga

SEQ ID NO: 598297 - DNA, 15 bp, Homo sapiens
attaagcagaatgat

SEQ ID NO: 598298 - DNA, 15 bp, Homo sapiens
ttaagcagaatgatt

SEQ ID NO: 598299 - DNA, 15 bp, Homo sapiens
taagcagaatgattg

SEQ ID NO: 598300 - DNA, 15 bp, Homo sapiens
aagcagaatgattgg

SEQ ID NO: 598301 - DNA, 15 bp, Homo sapiens
agcagaatgattggt

SEQ ID NO: 598302 - DNA, 15 bp, Homo sapiens
gcagaatgattggtc

SEQ ID NO: 598303 - DNA, 15 bp, Homo sapiens
cagaatgattggtca

SEQ ID NO: 598304 - DNA, 15 bp, Homo sapiens
agaatgattggtcat

SEQ ID NO: 598305 - DNA, 15 bp, Homo sapiens
gaatgattggtcatt

SEQ ID NO: 598306 - DNA, 15 bp, Homo sapiens
aatgattggtcattg

SEQ ID NO: 598307 - DNA, 15 bp, Homo sapiens
atgattggtcattgg

SEQ ID NO: 598308 - DNA, 15 bp, Homo sapiens
tgattggtcattgga

SEQ ID NO: 598309 - DNA, 15 bp, Homo sapiens
gattggtcattggac

SEQ ID NO: 598310 - DNA, 15 bp, Homo sapiens
attggtcattggaca

SEQ ID NO: 598311 - DNA, 15 bp, Homo sapiens
ttggtcattggacat

SEQ ID NO: 598312 - DNA, 15 bp, Homo sapiens
tggtcattggacatg

SEQ ID NO: 598313 - DNA, 15 bp, Homo sapiens
ggtcattggacatga

SEQ ID NO: 598314 - DNA, 15 bp, Homo sapiens
gtcattggacatgaa

SEQ ID NO: 598315 - DNA, 15 bp, Homo sapiens
tcattggacatgaac

SEQ ID NO: 598316 - DNA, 15 bp, Homo sapiens
cattggacatgaaca

SEQ ID NO: 598317 - DNA, 15 bp, Homo sapiens
attggacatgaacat

SEQ ID NO: 598318 - DNA, 15 bp, Homo sapiens
ttggacatgaacata

SEQ ID NO: 598319 - DNA, 15 bp, Homo sapiens
tggacatgaacatat

SEQ ID NO: 598320 - DNA, 15 bp, Homo sapiens
ggacatgaacatata

SEQ ID NO: 598321 - DNA, 15 bp, Homo sapiens
gacatgaacatatat

SEQ ID NO: 598322 - DNA, 15 bp, Homo sapiens
acatgaacatatatt

SEQ ID NO: 598323 - DNA, 15 bp, Homo sapiens
catgaacatatattc

SEQ ID NO: 598324 - DNA, 15 bp, Homo sapiens
atgaacatatattca

SEQ ID NO: 598325 - DNA, 15 bp, Homo sapiens
tgaacatatattcat

SEQ ID NO: 598326 - DNA, 15 bp, Homo sapiens
gaacatatattcatt

SEQ ID NO: 598327 - DNA, 15 bp, Homo sapiens
aacatatattcattt

SEQ ID NO: 598328 - DNA, 15 bp, Homo sapiens
acatatattcatttc

SEQ ID NO: 598329 - DNA, 15 bp, Homo sapiens
catatattcatttcc

SEQ ID NO: 598330 - DNA, 15 bp, Homo sapiens
atatattcatttcct

SEQ ID NO: 598331 - DNA, 15 bp, Homo sapiens
tatattcatttcctc

SEQ ID NO: 598332 - DNA, 15 bp, Homo sapiens
atattcatttcctct

SEQ ID NO: 598333 - DNA, 15 bp, Homo sapiens
tattcatttcctctt

SEQ ID NO: 598334 - DNA, 15 bp, Homo sapiens
attcatttcctcttt

SEQ ID NO: 598335 - DNA, 15 bp, Homo sapiens
ttcatttcctctttc

SEQ ID NO: 598336 - DNA, 15 bp, Homo sapiens
tcatttcctctttct

SEQ ID NO: 598337 - DNA, 15 bp, Homo sapiens
catttcctctttctg

SEQ ID NO: 598338 - DNA, 15 bp, Homo sapiens
atttcctctttctgg

SEQ ID NO: 598339 - DNA, 15 bp, Homo sapiens
tttcctctttctggg

SEQ ID NO: 598340 - DNA, 15 bp, Homo sapiens
ttcctctttctggga

SEQ ID NO: 598341 - DNA, 15 bp, Homo sapiens
tcctctttctgggaa

SEQ ID NO: 598342 - DNA, 15 bp, Homo sapiens
cctctttctgggaat

SEQ ID NO: 598343 - DNA, 15 bp, Homo sapiens
ctctttctgggaata

SEQ ID NO: 598344 - DNA, 15 bp, Homo sapiens
tctttctgggaatat

SEQ ID NO: 598345 - DNA, 15 bp, Homo sapiens
ctttctgggaatatg

SEQ ID NO: 598346 - DNA, 15 bp, Homo sapiens
tttctgggaatatgt

SEQ ID NO: 598347 - DNA, 15 bp, Homo sapiens
ttctgggaatatgtt

SEQ ID NO: 598348 - DNA, 15 bp, Homo sapiens
tctgggaatatgttg

SEQ ID NO: 598349 - DNA, 15 bp, Homo sapiens
ctgggaatatgttga

SEQ ID NO: 598350 - DNA, 15 bp, Homo sapiens
tgggaatatgttgat

SEQ ID NO: 598351 - DNA, 15 bp, Homo sapiens
gggaatatgttgatc

SEQ ID NO: 598352 - DNA, 15 bp, Homo sapiens
ggaatatgttgatcc

SEQ ID NO: 598353 - DNA, 15 bp, Homo sapiens
gaatatgttgatcct

SEQ ID NO: 598354 - DNA, 15 bp, Homo sapiens
aatatgttgatccta

SEQ ID NO: 598355 - DNA, 15 bp, Homo sapiens
atatgttgatcctag

SEQ ID NO: 598356 - DNA, 15 bp, Homo sapiens
tatgttgatcctaga

SEQ ID NO: 598357 - DNA, 15 bp, Homo sapiens
atgttgatcctagaa

SEQ ID NO: 598358 - DNA, 15 bp, Homo sapiens
tgttgatcctagaag

SEQ ID NO: 598359 - DNA, 15 bp, Homo sapiens
gttgatcctagaagt

SEQ ID NO: 598360 - DNA, 15 bp, Homo sapiens
ttgatcctagaagtg

SEQ ID NO: 598361 - DNA, 15 bp, Homo sapiens
tgatcctagaagtga

SEQ ID NO: 598362 - DNA, 15 bp, Homo sapiens
gatcctagaagtgag

SEQ ID NO: 598363 - DNA, 15 bp, Homo sapiens
atcctagaagtgagg

SEQ ID NO: 598364 - DNA, 15 bp, Homo sapiens
tcctagaagtgagga

SEQ ID NO: 598365 - DNA, 15 bp, Homo sapiens
cctagaagtgaggaa

SEQ ID NO: 598366 - DNA, 15 bp, Homo sapiens
ctagaagtgaggaag

SEQ ID NO: 598367 - DNA, 15 bp, Homo sapiens
tagaagtgaggaagg

SEQ ID NO: 598368 - DNA, 15 bp, Homo sapiens
agaagtgaggaaggg

SEQ ID NO: 598369 - DNA, 15 bp, Homo sapiens
gaagtgaggaagggg

SEQ ID NO: 598370 - DNA, 15 bp, Homo sapiens
aagtgaggaaggggt

SEQ ID NO: 598371 - DNA, 15 bp, Homo sapiens
agtgaggaaggggtg

SEQ ID NO: 598372 - DNA, 15 bp, Homo sapiens
gtgaggaaggggtgg

SEQ ID NO: 598373 - DNA, 15 bp, Homo sapiens
tgaggaaggggtggg

SEQ ID NO: 598374 - DNA, 15 bp, Homo sapiens
gaggaaggggtgggg

SEQ ID NO: 598375 - DNA, 15 bp, Homo sapiens
aggaaggggtggggc

SEQ ID NO: 598376 - DNA, 15 bp, Homo sapiens
ggaaggggtggggcc

SEQ ID NO: 598377 - DNA, 15 bp, Homo sapiens
gaaggggtggggccc

SEQ ID NO: 598378 - DNA, 15 bp, Homo sapiens
aaggggtggggcccc

SEQ ID NO: 598379 - DNA, 15 bp, Homo sapiens
aggggtggggcccca

SEQ ID NO: 598380 - DNA, 15 bp, Homo sapiens
ggggtggggccccag

SEQ ID NO: 598381 - DNA, 15 bp, Homo sapiens
gggtggggccccagt

SEQ ID NO: 598382 - DNA, 15 bp, Homo sapiens
ggtggggccccagtc

SEQ ID NO: 598383 - DNA, 15 bp, Homo sapiens
gtggggccccagtcc

SEQ ID NO: 598384 - DNA, 15 bp, Homo sapiens
tggggccccagtccc

SEQ ID NO: 598385 - DNA, 15 bp, Homo sapiens
ggggccccagtcccc

SEQ ID NO: 598386 - DNA, 15 bp, Homo sapiens
gggccccagtcccca

SEQ ID NO: 598387 - DNA, 15 bp, Homo sapiens
ggccccagtccccag

SEQ ID NO: 598388 - DNA, 15 bp, Homo sapiens
gccccagtccccagg

SEQ ID NO: 598389 - DNA, 15 bp, Homo sapiens
ccccagtccccagga

SEQ ID NO: 598390 - DNA, 15 bp, Homo sapiens
cccagtccccaggaa

SEQ ID NO: 598391 - DNA, 15 bp, Homo sapiens
ccagtccccaggaag

SEQ ID NO: 598392 - DNA, 15 bp, Homo sapiens
cagtccccaggaagc

SEQ ID NO: 598393 - DNA, 15 bp, Homo sapiens
agtccccaggaagcc

SEQ ID NO: 598394 - DNA, 15 bp, Homo sapiens
gtccccaggaagcct

SEQ ID NO: 598395 - DNA, 15 bp, Homo sapiens
tccccaggaagcctg

SEQ ID NO: 598396 - DNA, 15 bp, Homo sapiens
ccccaggaagcctgg

SEQ ID NO: 598397 - DNA, 15 bp, Homo sapiens
cccaggaagcctggt

SEQ ID NO: 598398 - DNA, 15 bp, Homo sapiens
ccaggaagcctggtc

SEQ ID NO: 598399 - DNA, 15 bp, Homo sapiens
caggaagcctggtca

SEQ ID NO: 598400 - DNA, 15 bp, Homo sapiens
aggaagcctggtcac

SEQ ID NO: 598401 - DNA, 15 bp, Homo sapiens
ggaagcctggtcact

SEQ ID NO: 598402 - DNA, 15 bp, Homo sapiens
gaagcctggtcactc

SEQ ID NO: 598403 - DNA, 15 bp, Homo sapiens
aagcctggtcactcc

SEQ ID NO: 598404 - DNA, 15 bp, Homo sapiens
agcctggtcactccc

SEQ ID NO: 598405 - DNA, 15 bp, Homo sapiens
gcctggtcactccct

SEQ ID NO: 598406 - DNA, 15 bp, Homo sapiens
cctggtcactccctc

SEQ ID NO: 598407 - DNA, 15 bp, Homo sapiens
ctggtcactccctcc

SEQ ID NO: 598408 - DNA, 15 bp, Homo sapiens
tggtcactccctccc

SEQ ID NO: 598409 - DNA, 15 bp, Homo sapiens
ggtcactccctccca

SEQ ID NO: 598410 - DNA, 15 bp, Homo sapiens
gtcactccctcccac

SEQ ID NO: 598411 - DNA, 15 bp, Homo sapiens
tcactccctcccact

SEQ ID NO: 598412 - DNA, 15 bp, Homo sapiens
cactccctcccactc

SEQ ID NO: 598413 - DNA, 15 bp, Homo sapiens
actccctcccactct

SEQ ID NO: 598414 - DNA, 15 bp, Homo sapiens
ctccctcccactctg

SEQ ID NO: 598415 - DNA, 15 bp, Homo sapiens
tccctcccactctgc

SEQ ID NO: 598416 - DNA, 15 bp, Homo sapiens
ccctcccactctgcc

SEQ ID NO: 598417 - DNA, 15 bp, Homo sapiens
cctcccactctgccc

SEQ ID NO: 598418 - DNA, 15 bp, Homo sapiens
ctcccactctgccct

SEQ ID NO: 598419 - DNA, 15 bp, Homo sapiens
tcccactctgccctt

SEQ ID NO: 598420 - DNA, 15 bp, Homo sapiens
cccactctgcccttt

SEQ ID NO: 598421 - DNA, 15 bp, Homo sapiens
ccactctgccctttc

SEQ ID NO: 598422 - DNA, 15 bp, Homo sapiens
cactctgccctttcc

SEQ ID NO: 598423 - DNA, 15 bp, Homo sapiens
actctgccctttcca

SEQ ID NO: 598424 - DNA, 15 bp, Homo sapiens
ctctgccctttccac

SEQ ID NO: 598425 - DNA, 15 bp, Homo sapiens
tctgccctttccact

SEQ ID NO: 598426 - DNA, 15 bp, Homo sapiens
ctgccctttccacta

SEQ ID NO: 598427 - DNA, 15 bp, Homo sapiens
tgccctttccactaa

SEQ ID NO: 598428 - DNA, 15 bp, Homo sapiens
gccctttccactaaa

SEQ ID NO: 598429 - DNA, 15 bp, Homo sapiens
ccctttccactaaac

SEQ ID NO: 598430 - DNA, 15 bp, Homo sapiens
cctttccactaaaca

SEQ ID NO: 598431 - DNA, 15 bp, Homo sapiens
ctttccactaaacag

SEQ ID NO: 598432 - DNA, 15 bp, Homo sapiens
tttccactaaacagt

SEQ ID NO: 598433 - DNA, 15 bp, Homo sapiens
ttccactaaacagta

SEQ ID NO: 598434 - DNA, 15 bp, Homo sapiens
tccactaaacagtag

SEQ ID NO: 598435 - DNA, 15 bp, Homo sapiens
ccactaaacagtaga

SEQ ID NO: 598436 - DNA, 15 bp, Homo sapiens
cactaaacagtagaa

SEQ ID NO: 598437 - DNA, 15 bp, Homo sapiens
actaaacagtagaaa

SEQ ID NO: 598438 - DNA, 15 bp, Homo sapiens
ctaaacagtagaaat

SEQ ID NO: 598439 - DNA, 15 bp, Homo sapiens
taaacagtagaaatc

SEQ ID NO: 598440 - DNA, 15 bp, Homo sapiens
aaacagtagaaatca

SEQ ID NO: 598441 - DNA, 15 bp, Homo sapiens
aacagtagaaatcat

SEQ ID NO: 598442 - DNA, 15 bp, Homo sapiens
acagtagaaatcatg

SEQ ID NO: 598443 - DNA, 15 bp, Homo sapiens
cagtagaaatcatgg

SEQ ID NO: 598444 - DNA, 15 bp, Homo sapiens
agtagaaatcatggg

SEQ ID NO: 598445 - DNA, 15 bp, Homo sapiens
gtagaaatcatgggg

SEQ ID NO: 598446 - DNA, 15 bp, Homo sapiens
tagaaatcatgggga

SEQ ID NO: 598447 - DNA, 15 bp, Homo sapiens
agaaatcatggggat

SEQ ID NO: 598448 - DNA, 15 bp, Homo sapiens
gaaatcatggggatt

SEQ ID NO: 598449 - DNA, 15 bp, Homo sapiens
aaatcatggggattg

SEQ ID NO: 598450 - DNA, 15 bp, Homo sapiens
aatcatggggattgc

SEQ ID NO: 598451 - DNA, 15 bp, Homo sapiens
atcatggggattgct

SEQ ID NO: 598452 - DNA, 15 bp, Homo sapiens
tcatggggattgctg

SEQ ID NO: 598453 - DNA, 15 bp, Homo sapiens
catggggattgctgc

SEQ ID NO: 598454 - DNA, 15 bp, Homo sapiens
atggggattgctgcc

SEQ ID NO: 598455 - DNA, 15 bp, Homo sapiens
tggggattgctgcca

SEQ ID NO: 598456 - DNA, 15 bp, Homo sapiens
ggggattgctgccat

SEQ ID NO: 598457 - DNA, 15 bp, Homo sapiens
gggattgctgccatt

SEQ ID NO: 598458 - DNA, 15 bp, Homo sapiens
ggattgctgccattg

SEQ ID NO: 598459 - DNA, 15 bp, Homo sapiens
gattgctgccattga

SEQ ID NO: 598460 - DNA, 15 bp, Homo sapiens
attgctgccattgac

SEQ ID NO: 598461 - DNA, 15 bp, Homo sapiens
ttgctgccattgact

SEQ ID NO: 598462 - DNA, 15 bp, Homo sapiens
tgctgccattgactg

SEQ ID NO: 598463 - DNA, 15 bp, Homo sapiens
gctgccattgactga

SEQ ID NO: 598464 - DNA, 15 bp, Homo sapiens
ctgccattgactgag

SEQ ID NO: 598465 - DNA, 15 bp, Homo sapiens
tgccattgactgagc

SEQ ID NO: 598466 - DNA, 15 bp, Homo sapiens
gccattgactgagcc

SEQ ID NO: 598467 - DNA, 15 bp, Homo sapiens
ccattgactgagcct

SEQ ID NO: 598468 - DNA, 15 bp, Homo sapiens
cattgactgagcctt

SEQ ID NO: 598469 - DNA, 15 bp, Homo sapiens
attgactgagccttc

SEQ ID NO: 598470 - DNA, 15 bp, Homo sapiens
ttgactgagccttct

SEQ ID NO: 598471 - DNA, 15 bp, Homo sapiens
tgactgagccttctc

SEQ ID NO: 598472 - DNA, 15 bp, Homo sapiens
gactgagccttctcc

SEQ ID NO: 598473 - DNA, 15 bp, Homo sapiens
actgagccttctcca

SEQ ID NO: 598474 - DNA, 15 bp, Homo sapiens
ctgagccttctccat

SEQ ID NO: 598475 - DNA, 15 bp, Homo sapiens
tgagccttctccatg

SEQ ID NO: 598476 - DNA, 15 bp, Homo sapiens
gagccttctccatgt

SEQ ID NO: 598477 - DNA, 15 bp, Homo sapiens
agccttctccatgtg

SEQ ID NO: 598478 - DNA, 15 bp, Homo sapiens
gccttctccatgtgc

SEQ ID NO: 598479 - DNA, 15 bp, Homo sapiens
ccttctccatgtgcc

SEQ ID NO: 598480 - DNA, 15 bp, Homo sapiens
cttctccatgtgccc

SEQ ID NO: 598481 - DNA, 15 bp, Homo sapiens
ttctccatgtgccca

SEQ ID NO: 598482 - DNA, 15 bp, Homo sapiens
tctccatgtgcccac

SEQ ID NO: 598483 - DNA, 15 bp, Homo sapiens
ctccatgtgcccacc

SEQ ID NO: 598484 - DNA, 15 bp, Homo sapiens
tccatgtgcccacca

SEQ ID NO: 598485 - DNA, 15 bp, Homo sapiens
ccatgtgcccaccat

SEQ ID NO: 598486 - DNA, 15 bp, Homo sapiens
catgtgcccaccatc

SEQ ID NO: 598487 - DNA, 15 bp, Homo sapiens
atgtgcccaccatcc

SEQ ID NO: 598488 - DNA, 15 bp, Homo sapiens
tgtgcccaccatcct

SEQ ID NO: 598489 - DNA, 15 bp, Homo sapiens
gtgcccaccatccta

SEQ ID NO: 598490 - DNA, 15 bp, Homo sapiens
tgcccaccatcctaa

SEQ ID NO: 598491 - DNA, 15 bp, Homo sapiens
gcccaccatcctaag

SEQ ID NO: 598492 - DNA, 15 bp, Homo sapiens
cccaccatcctaagc

SEQ ID NO: 598493 - DNA, 15 bp, Homo sapiens
ccaccatcctaagca

SEQ ID NO: 598494 - DNA, 15 bp, Homo sapiens
caccatcctaagcat

SEQ ID NO: 598495 - DNA, 15 bp, Homo sapiens
accatcctaagcatt

SEQ ID NO: 598496 - DNA, 15 bp, Homo sapiens
ccatcctaagcatta

SEQ ID NO: 598497 - DNA, 15 bp, Homo sapiens
catcctaagcattaa

SEQ ID NO: 598498 - DNA, 15 bp, Homo sapiens
atcctaagcattaac

SEQ ID NO: 598499 - DNA, 15 bp, Homo sapiens
tcctaagcattaact

SEQ ID NO: 598500 - DNA, 15 bp, Homo sapiens
cctaagcattaactc

SEQ ID NO: 598501 - DNA, 15 bp, Homo sapiens
ctaagcattaactca

SEQ ID NO: 598502 - DNA, 15 bp, Homo sapiens
taagcattaactcag

SEQ ID NO: 598503 - DNA, 15 bp, Homo sapiens
aagcattaactcagt

SEQ ID NO: 598504 - DNA, 15 bp, Homo sapiens
agcattaactcagtc

SEQ ID NO: 598505 - DNA, 15 bp, Homo sapiens
gcattaactcagtcc

SEQ ID NO: 598506 - DNA, 15 bp, Homo sapiens
cattaactcagtccc

SEQ ID NO: 598507 - DNA, 15 bp, Homo sapiens
attaactcagtcccc

SEQ ID NO: 598508 - DNA, 15 bp, Homo sapiens
ttaactcagtcccca

SEQ ID NO: 598509 - DNA, 15 bp, Homo sapiens
taactcagtccccac

SEQ ID NO: 598510 - DNA, 15 bp, Homo sapiens
aactcagtccccaca

SEQ ID NO: 598511 - DNA, 15 bp, Homo sapiens
actcagtccccacag

SEQ ID NO: 598512 - DNA, 15 bp, Homo sapiens
ctcagtccccacagc

SEQ ID NO: 598513 - DNA, 15 bp, Homo sapiens
tcagtccccacagcc

SEQ ID NO: 598514 - DNA, 15 bp, Homo sapiens
cagtccccacagcca

SEQ ID NO: 598515 - DNA, 15 bp, Homo sapiens
agtccccacagccat

SEQ ID NO: 598516 - DNA, 15 bp, Homo sapiens
gtccccacagccatc

SEQ ID NO: 598517 - DNA, 15 bp, Homo sapiens
tccccacagccatcc

SEQ ID NO: 598518 - DNA, 15 bp, Homo sapiens
ccccacagccatccc

SEQ ID NO: 598519 - DNA, 15 bp, Homo sapiens
cccacagccatccca

SEQ ID NO: 598520 - DNA, 15 bp, Homo sapiens
ccacagccatcccat

SEQ ID NO: 598521 - DNA, 15 bp, Homo sapiens
cacagccatcccatg

SEQ ID NO: 598522 - DNA, 15 bp, Homo sapiens
acagccatcccatgg

SEQ ID NO: 598523 - DNA, 15 bp, Homo sapiens
cagccatcccatggg

SEQ ID NO: 598524 - DNA, 15 bp, Homo sapiens
agccatcccatgggg

SEQ ID NO: 598525 - DNA, 15 bp, Homo sapiens
gccatcccatggggg

SEQ ID NO: 598526 - DNA, 15 bp, Homo sapiens
ccatcccatggggga

SEQ ID NO: 598527 - DNA, 15 bp, Homo sapiens
catcccatgggggag

SEQ ID NO: 598528 - DNA, 15 bp, Homo sapiens
atcccatgggggagg

SEQ ID NO: 598529 - DNA, 15 bp, Homo sapiens
tcccatgggggaggg

SEQ ID NO: 598530 - DNA, 15 bp, Homo sapiens
cccatgggggagggg

SEQ ID NO: 598531 - DNA, 15 bp, Homo sapiens
ccatgggggaggggc

SEQ ID NO: 598532 - DNA, 15 bp, Homo sapiens
catgggggaggggct

SEQ ID NO: 598533 - DNA, 15 bp, Homo sapiens
atgggggaggggctg

SEQ ID NO: 598534 - DNA, 15 bp, Homo sapiens
tgggggaggggctgc

SEQ ID NO: 598535 - DNA, 15 bp, Homo sapiens
gggggaggggctgct

SEQ ID NO: 598536 - DNA, 15 bp, Homo sapiens
ggggaggggctgctg

SEQ ID NO: 598537 - DNA, 15 bp, Homo sapiens
gggaggggctgctgt

SEQ ID NO: 598538 - DNA, 15 bp, Homo sapiens
ggaggggctgctgtt

SEQ ID NO: 598539 - DNA, 15 bp, Homo sapiens
gaggggctgctgttc

SEQ ID NO: 598540 - DNA, 15 bp, Homo sapiens
aggggctgctgttcc

SEQ ID NO: 598541 - DNA, 15 bp, Homo sapiens
ggggctgctgttccc

SEQ ID NO: 598542 - DNA, 15 bp, Homo sapiens
gggctgctgttccct

SEQ ID NO: 598543 - DNA, 15 bp, Homo sapiens
ggctgctgttccctt

SEQ ID NO: 598544 - DNA, 15 bp, Homo sapiens
gctgctgttcccttt

SEQ ID NO: 598545 - DNA, 15 bp, Homo sapiens
ctgctgttccctttt

SEQ ID NO: 598546 - DNA, 15 bp, Homo sapiens
tgctgttcccttttg

SEQ ID NO: 598547 - DNA, 15 bp, Homo sapiens
gctgttcccttttgc

SEQ ID NO: 598548 - DNA, 15 bp, Homo sapiens
ctgttcccttttgca

SEQ ID NO: 598549 - DNA, 15 bp, Homo sapiens
tgttcccttttgcac

SEQ ID NO: 598550 - DNA, 15 bp, Homo sapiens
gttcccttttgcaca

SEQ ID NO: 598551 - DNA, 15 bp, Homo sapiens
ttcccttttgcacaa

SEQ ID NO: 598552 - DNA, 15 bp, Homo sapiens
tcccttttgcacaag

SEQ ID NO: 598553 - DNA, 15 bp, Homo sapiens
cccttttgcacaagt

SEQ ID NO: 598554 - DNA, 15 bp, Homo sapiens
ccttttgcacaagtg

SEQ ID NO: 598555 - DNA, 15 bp, Homo sapiens
cttttgcacaagtgt

SEQ ID NO: 598556 - DNA, 15 bp, Homo sapiens
ttttgcacaagtgta

SEQ ID NO: 598557 - DNA, 15 bp, Homo sapiens
tttgcacaagtgtaa

SEQ ID NO: 598558 - DNA, 15 bp, Homo sapiens
ttgcacaagtgtaag

SEQ ID NO: 598559 - DNA, 15 bp, Homo sapiens
tgcacaagtgtaagc

SEQ ID NO: 598560 - DNA, 15 bp, Homo sapiens
gcacaagtgtaagct

SEQ ID NO: 598561 - DNA, 15 bp, Homo sapiens
cacaagtgtaagctg

SEQ ID NO: 598562 - DNA, 15 bp, Homo sapiens
acaagtgtaagctga

SEQ ID NO: 598563 - DNA, 15 bp, Homo sapiens
caagtgtaagctgag

SEQ ID NO: 598564 - DNA, 15 bp, Homo sapiens
aagtgtaagctgagc

SEQ ID NO: 598565 - DNA, 15 bp, Homo sapiens
agtgtaagctgagcc

SEQ ID NO: 598566 - DNA, 15 bp, Homo sapiens
gtgtaagctgagcct

SEQ ID NO: 598567 - DNA, 15 bp, Homo sapiens
tgtaagctgagccta

SEQ ID NO: 598568 - DNA, 15 bp, Homo sapiens
gtaagctgagcctaa

SEQ ID NO: 598569 - DNA, 15 bp, Homo sapiens
taagctgagcctaaa

SEQ ID NO: 598570 - DNA, 15 bp, Homo sapiens
aagctgagcctaaaa

SEQ ID NO: 598571 - DNA, 15 bp, Homo sapiens
agctgagcctaaaac

SEQ ID NO: 598572 - DNA, 15 bp, Homo sapiens
gctgagcctaaaaca

SEQ ID NO: 598573 - DNA, 15 bp, Homo sapiens
ctgagcctaaaacat

SEQ ID NO: 598574 - DNA, 15 bp, Homo sapiens
tgagcctaaaacata

SEQ ID NO: 598575 - DNA, 15 bp, Homo sapiens
gagcctaaaacatac

SEQ ID NO: 598576 - DNA, 15 bp, Homo sapiens
agcctaaaacataca

SEQ ID NO: 598577 - DNA, 15 bp, Homo sapiens
gcctaaaacatacaa

SEQ ID NO: 598578 - DNA, 15 bp, Homo sapiens
cctaaaacatacaac

SEQ ID NO: 598579 - DNA, 15 bp, Homo sapiens
ctaaaacatacaact

SEQ ID NO: 598580 - DNA, 15 bp, Homo sapiens
taaaacatacaactc

SEQ ID NO: 598581 - DNA, 15 bp, Homo sapiens
aaaacatacaactct

SEQ ID NO: 598582 - DNA, 15 bp, Homo sapiens
aaacatacaactctt

SEQ ID NO: 598583 - DNA, 15 bp, Homo sapiens
aacatacaactcttg

SEQ ID NO: 598584 - DNA, 15 bp, Homo sapiens
acatacaactcttgc

SEQ ID NO: 598585 - DNA, 15 bp, Homo sapiens
catacaactcttgca

SEQ ID NO: 598586 - DNA, 15 bp, Homo sapiens
atacaactcttgcac

SEQ ID NO: 598587 - DNA, 15 bp, Homo sapiens
tacaactcttgcact

SEQ ID NO: 598588 - DNA, 15 bp, Homo sapiens
acaactcttgcactc

SEQ ID NO: 598589 - DNA, 15 bp, Homo sapiens
caactcttgcactcg

SEQ ID NO: 598590 - DNA, 15 bp, Homo sapiens
aactcttgcactcgg

SEQ ID NO: 598591 - DNA, 15 bp, Homo sapiens
actcttgcactcggt

SEQ ID NO: 598592 - DNA, 15 bp, Homo sapiens
ctcttgcactcggtt

SEQ ID NO: 598593 - DNA, 15 bp, Homo sapiens
tcttgcactcggttg

SEQ ID NO: 598594 - DNA, 15 bp, Homo sapiens
cttgcactcggttgc

SEQ ID NO: 598595 - DNA, 15 bp, Homo sapiens
ttgcactcggttgca

SEQ ID NO: 598596 - DNA, 15 bp, Homo sapiens
tgcactcggttgcaa

SEQ ID NO: 598597 - DNA, 15 bp, Homo sapiens
gcactcggttgcaaa

SEQ ID NO: 598598 - DNA, 15 bp, Homo sapiens
cactcggttgcaaac

SEQ ID NO: 598599 - DNA, 15 bp, Homo sapiens
actcggttgcaaacc

SEQ ID NO: 598600 - DNA, 15 bp, Homo sapiens
ctcggttgcaaacct

SEQ ID NO: 598601 - DNA, 15 bp, Homo sapiens
tcggttgcaaaccta

SEQ ID NO: 598602 - DNA, 15 bp, Homo sapiens
cggttgcaaacctaa

SEQ ID NO: 598603 - DNA, 15 bp, Homo sapiens
ggttgcaaacctaat

SEQ ID NO: 598604 - DNA, 15 bp, Homo sapiens
gttgcaaacctaata

SEQ ID NO: 598605 - DNA, 15 bp, Homo sapiens
ttgcaaacctaatat

SEQ ID NO: 598606 - DNA, 15 bp, Homo sapiens
tgcaaacctaatatc

SEQ ID NO: 598607 - DNA, 15 bp, Homo sapiens
gcaaacctaatatct

SEQ ID NO: 598608 - DNA, 15 bp, Homo sapiens
caaacctaatatctg

SEQ ID NO: 598609 - DNA, 15 bp, Homo sapiens
aaacctaatatctgg

SEQ ID NO: 598610 - DNA, 15 bp, Homo sapiens
aacctaatatctggg

SEQ ID NO: 598611 - DNA, 15 bp, Homo sapiens
acctaatatctgggt

SEQ ID NO: 598612 - DNA, 15 bp, Homo sapiens
cctaatatctgggtg

SEQ ID NO: 598613 - DNA, 15 bp, Homo sapiens
ctaatatctgggtga

SEQ ID NO: 598614 - DNA, 15 bp, Homo sapiens
taatatctgggtgac

SEQ ID NO: 598615 - DNA, 15 bp, Homo sapiens
aatatctgggtgacc

SEQ ID NO: 598616 - DNA, 15 bp, Homo sapiens
atatctgggtgaccc

SEQ ID NO: 598617 - DNA, 15 bp, Homo sapiens
tatctgggtgaccca

SEQ ID NO: 598618 - DNA, 15 bp, Homo sapiens
atctgggtgacccag

SEQ ID NO: 598619 - DNA, 15 bp, Homo sapiens
tctgggtgacccagg

SEQ ID NO: 598620 - DNA, 15 bp, Homo sapiens
ctgggtgacccaggt

SEQ ID NO: 598621 - DNA, 15 bp, Homo sapiens
tgggtgacccaggtc

SEQ ID NO: 598622 - DNA, 15 bp, Homo sapiens
gggtgacccaggtcc

SEQ ID NO: 598623 - DNA, 15 bp, Homo sapiens
ggtgacccaggtcca

SEQ ID NO: 598624 - DNA, 15 bp, Homo sapiens
gtgacccaggtccag

SEQ ID NO: 598625 - DNA, 15 bp, Homo sapiens
tgacccaggtccagg

SEQ ID NO: 598626 - DNA, 15 bp, Homo sapiens
gacccaggtccaggc

SEQ ID NO: 598627 - DNA, 15 bp, Homo sapiens
acccaggtccaggcc

SEQ ID NO: 598628 - DNA, 15 bp, Homo sapiens
cccaggtccaggccc

SEQ ID NO: 598629 - DNA, 15 bp, Homo sapiens
ccaggtccaggccca

SEQ ID NO: 598630 - DNA, 15 bp, Homo sapiens
caggtccaggcccag

SEQ ID NO: 598631 - DNA, 15 bp, Homo sapiens
aggtccaggcccaga

SEQ ID NO: 598632 - DNA, 15 bp, Homo sapiens
ggtccaggcccagat

SEQ ID NO: 598633 - DNA, 15 bp, Homo sapiens
gtccaggcccagatc

SEQ ID NO: 598634 - DNA, 15 bp, Homo sapiens
tccaggcccagatct

SEQ ID NO: 598635 - DNA, 15 bp, Homo sapiens
ccaggcccagatctg

SEQ ID NO: 598636 - DNA, 15 bp, Homo sapiens
caggcccagatctga

SEQ ID NO: 598637 - DNA, 15 bp, Homo sapiens
aggcccagatctgag

SEQ ID NO: 598638 - DNA, 15 bp, Homo sapiens
ggcccagatctgagc

SEQ ID NO: 598639 - DNA, 15 bp, Homo sapiens
gcccagatctgagcc

SEQ ID NO: 598640 - DNA, 15 bp, Homo sapiens
cccagatctgagccc

SEQ ID NO: 598641 - DNA, 15 bp, Homo sapiens
ccagatctgagccca

SEQ ID NO: 598642 - DNA, 15 bp, Homo sapiens
cagatctgagcccaa

SEQ ID NO: 598643 - DNA, 15 bp, Homo sapiens
agatctgagcccaag

SEQ ID NO: 598644 - DNA, 15 bp, Homo sapiens
gatctgagcccaagg

SEQ ID NO: 598645 - DNA, 15 bp, Homo sapiens
atctgagcccaaggc

SEQ ID NO: 598646 - DNA, 15 bp, Homo sapiens
tctgagcccaaggcc

SEQ ID NO: 598647 - DNA, 15 bp, Homo sapiens
ctgagcccaaggcca

SEQ ID NO: 598648 - DNA, 15 bp, Homo sapiens
tgagcccaaggccag

SEQ ID NO: 598649 - DNA, 15 bp, Homo sapiens
gagcccaaggccagg

SEQ ID NO: 598650 - DNA, 15 bp, Homo sapiens
agcccaaggccaggg

SEQ ID NO: 598651 - DNA, 15 bp, Homo sapiens
gcccaaggccagggt

SEQ ID NO: 598652 - DNA, 15 bp, Homo sapiens
cccaaggccagggtt

SEQ ID NO: 598653 - DNA, 15 bp, Homo sapiens
ccaaggccagggttg

SEQ ID NO: 598654 - DNA, 15 bp, Homo sapiens
caaggccagggttgt

SEQ ID NO: 598655 - DNA, 15 bp, Homo sapiens
aaggccagggttgtt

SEQ ID NO: 598656 - DNA, 15 bp, Homo sapiens
aggccagggttgttc

SEQ ID NO: 598657 - DNA, 15 bp, Homo sapiens
ggccagggttgttca

SEQ ID NO: 598658 - DNA, 15 bp, Homo sapiens
gccagggttgttcag

SEQ ID NO: 598659 - DNA, 15 bp, Homo sapiens
ccagggttgttcagc

SEQ ID NO: 598660 - DNA, 15 bp, Homo sapiens
cagggttgttcagcc

SEQ ID NO: 598661 - DNA, 15 bp, Homo sapiens
agggttgttcagcct

SEQ ID NO: 598662 - DNA, 15 bp, Homo sapiens
gggttgttcagcctc

SEQ ID NO: 598663 - DNA, 15 bp, Homo sapiens
ggttgttcagcctcc

SEQ ID NO: 598664 - DNA, 15 bp, Homo sapiens
gttgttcagcctcca

SEQ ID NO: 598665 - DNA, 15 bp, Homo sapiens
ttgttcagcctccac

SEQ ID NO: 598666 - DNA, 15 bp, Homo sapiens
tgttcagcctccact

SEQ ID NO: 598667 - DNA, 15 bp, Homo sapiens
gttcagcctccacta

SEQ ID NO: 598668 - DNA, 15 bp, Homo sapiens
ttcagcctccactat

SEQ ID NO: 598669 - DNA, 15 bp, Homo sapiens
tcagcctccactatg

SEQ ID NO: 598670 - DNA, 15 bp, Homo sapiens
cagcctccactatgt

SEQ ID NO: 598671 - DNA, 15 bp, Homo sapiens
agcctccactatgtt

SEQ ID NO: 598672 - DNA, 15 bp, Homo sapiens
gcctccactatgtta

SEQ ID NO: 598673 - DNA, 15 bp, Homo sapiens
cctccactatgttac

SEQ ID NO: 598674 - DNA, 15 bp, Homo sapiens
ctccactatgttacc

SEQ ID NO: 598675 - DNA, 15 bp, Homo sapiens
tccactatgttacct

SEQ ID NO: 598676 - DNA, 15 bp, Homo sapiens
ccactatgttacctg

SEQ ID NO: 598677 - DNA, 15 bp, Homo sapiens
cactatgttacctgg

SEQ ID NO: 598678 - DNA, 15 bp, Homo sapiens
actatgttacctggg

SEQ ID NO: 598679 - DNA, 15 bp, Homo sapiens
ctatgttacctgggc

SEQ ID NO: 598680 - DNA, 15 bp, Homo sapiens
tatgttacctgggca

SEQ ID NO: 598681 - DNA, 15 bp, Homo sapiens
atgttacctgggcac

SEQ ID NO: 598682 - DNA, 15 bp, Homo sapiens
tgttacctgggcacc

SEQ ID NO: 598683 - DNA, 15 bp, Homo sapiens
gttacctgggcaccc

SEQ ID NO: 598684 - DNA, 15 bp, Homo sapiens
ttacctgggcaccca

SEQ ID NO: 598685 - DNA, 15 bp, Homo sapiens
tacctgggcacccag

SEQ ID NO: 598686 - DNA, 15 bp, Homo sapiens
acctgggcacccagg

SEQ ID NO: 598687 - DNA, 15 bp, Homo sapiens
cctgggcacccaggc

SEQ ID NO: 598688 - DNA, 15 bp, Homo sapiens
ctgggcacccaggcc

SEQ ID NO: 598689 - DNA, 15 bp, Homo sapiens
tgggcacccaggccc

SEQ ID NO: 598690 - DNA, 15 bp, Homo sapiens
gggcacccaggccct

SEQ ID NO: 598691 - DNA, 15 bp, Homo sapiens
ggcacccaggcccta

SEQ ID NO: 598692 - DNA, 15 bp, Homo sapiens
gcacccaggccctat

SEQ ID NO: 598693 - DNA, 15 bp, Homo sapiens
cacccaggccctatg

SEQ ID NO: 598694 - DNA, 15 bp, Homo sapiens
acccaggccctatgg

SEQ ID NO: 598695 - DNA, 15 bp, Homo sapiens
cccaggccctatggc

SEQ ID NO: 598696 - DNA, 15 bp, Homo sapiens
ccaggccctatggca

SEQ ID NO: 598697 - DNA, 15 bp, Homo sapiens
caggccctatggcac

SEQ ID NO: 598698 - DNA, 15 bp, Homo sapiens
aggccctatggcact

SEQ ID NO: 598699 - DNA, 15 bp, Homo sapiens
ggccctatggcactg

SEQ ID NO: 598700 - DNA, 15 bp, Homo sapiens
gccctatggcactgg

SEQ ID NO: 598701 - DNA, 15 bp, Homo sapiens
ccctatggcactggg

SEQ ID NO: 598702 - DNA, 15 bp, Homo sapiens
cctatggcactgggt

SEQ ID NO: 598703 - DNA, 15 bp, Homo sapiens
ctatggcactgggtg

SEQ ID NO: 598704 - DNA, 15 bp, Homo sapiens
tatggcactgggtgg

SEQ ID NO: 598705 - DNA, 15 bp, Homo sapiens
atggcactgggtggc

SEQ ID NO: 598706 - DNA, 15 bp, Homo sapiens
tggcactgggtggcc

SEQ ID NO: 598707 - DNA, 15 bp, Homo sapiens
ggcactgggtggccc

SEQ ID NO: 598708 - DNA, 15 bp, Homo sapiens
gcactgggtggccct

SEQ ID NO: 598709 - DNA, 15 bp, Homo sapiens
cactgggtggcccta

SEQ ID NO: 598710 - DNA, 15 bp, Homo sapiens
actgggtggccctag

SEQ ID NO: 598711 - DNA, 15 bp, Homo sapiens
ctgggtggccctagc

SEQ ID NO: 598712 - DNA, 15 bp, Homo sapiens
tgggtggccctagcc

SEQ ID NO: 598713 - DNA, 15 bp, Homo sapiens
gggtggccctagcct

SEQ ID NO: 598714 - DNA, 15 bp, Homo sapiens
ggtggccctagcctc

SEQ ID NO: 598715 - DNA, 15 bp, Homo sapiens
gtggccctagcctca

SEQ ID NO: 598716 - DNA, 15 bp, Homo sapiens
tggccctagcctcat

SEQ ID NO: 598717 - DNA, 15 bp, Homo sapiens
ggccctagcctcatt

SEQ ID NO: 598718 - DNA, 15 bp, Homo sapiens
gccctagcctcattt

SEQ ID NO: 598719 - DNA, 15 bp, Homo sapiens
ccctagcctcattta

SEQ ID NO: 598720 - DNA, 15 bp, Homo sapiens
cctagcctcatttac

SEQ ID NO: 598721 - DNA, 15 bp, Homo sapiens
ctagcctcatttact

SEQ ID NO: 598722 - DNA, 15 bp, Homo sapiens
tagcctcatttactc

SEQ ID NO: 598723 - DNA, 15 bp, Homo sapiens
agcctcatttactca

SEQ ID NO: 598724 - DNA, 15 bp, Homo sapiens
gcctcatttactcag

SEQ ID NO: 598725 - DNA, 15 bp, Homo sapiens
cctcatttactcagt

SEQ ID NO: 598726 - DNA, 15 bp, Homo sapiens
ctcatttactcagtc

SEQ ID NO: 598727 - DNA, 15 bp, Homo sapiens
tcatttactcagtct

SEQ ID NO: 598728 - DNA, 15 bp, Homo sapiens
catttactcagtctt

SEQ ID NO: 598729 - DNA, 15 bp, Homo sapiens
atttactcagtcttt

SEQ ID NO: 598730 - DNA, 15 bp, Homo sapiens
tttactcagtctttc

SEQ ID NO: 598731 - DNA, 15 bp, Homo sapiens
ttactcagtctttcc

SEQ ID NO: 598732 - DNA, 15 bp, Homo sapiens
tactcagtctttccc

SEQ ID NO: 598733 - DNA, 15 bp, Homo sapiens
actcagtctttcccc

SEQ ID NO: 598734 - DNA, 15 bp, Homo sapiens
ctcagtctttcccca

SEQ ID NO: 598735 - DNA, 15 bp, Homo sapiens
tcagtctttccccag

SEQ ID NO: 598736 - DNA, 15 bp, Homo sapiens
cagtctttccccaga

SEQ ID NO: 598737 - DNA, 15 bp, Homo sapiens
agtctttccccagac

SEQ ID NO: 598738 - DNA, 15 bp, Homo sapiens
gtctttccccagacc

SEQ ID NO: 598739 - DNA, 15 bp, Homo sapiens
tctttccccagacca

SEQ ID NO: 598740 - DNA, 15 bp, Homo sapiens
ctttccccagaccag

SEQ ID NO: 598741 - DNA, 15 bp, Homo sapiens
tttccccagaccaga

SEQ ID NO: 598742 - DNA, 15 bp, Homo sapiens
ttccccagaccagaa

SEQ ID NO: 598743 - DNA, 15 bp, Homo sapiens
tccccagaccagaac

SEQ ID NO: 598744 - DNA, 15 bp, Homo sapiens
ccccagaccagaacc

SEQ ID NO: 598745 - DNA, 15 bp, Homo sapiens
cccagaccagaacct

SEQ ID NO: 598746 - DNA, 15 bp, Homo sapiens
ccagaccagaacctc

SEQ ID NO: 598747 - DNA, 15 bp, Homo sapiens
cagaccagaacctcc

SEQ ID NO: 598748 - DNA, 15 bp, Homo sapiens
agaccagaacctccc

SEQ ID NO: 598749 - DNA, 15 bp, Homo sapiens
gaccagaacctccca

SEQ ID NO: 598750 - DNA, 15 bp, Homo sapiens
accagaacctcccat

SEQ ID NO: 598751 - DNA, 15 bp, Homo sapiens
ccagaacctcccatc

SEQ ID NO: 598752 - DNA, 15 bp, Homo sapiens
cagaacctcccatct

SEQ ID NO: 598753 - DNA, 15 bp, Homo sapiens
agaacctcccatctg

SEQ ID NO: 598754 - DNA, 15 bp, Homo sapiens
gaacctcccatctgt

SEQ ID NO: 598755 - DNA, 15 bp, Homo sapiens
aacctcccatctgtc

SEQ ID NO: 598756 - DNA, 15 bp, Homo sapiens
acctcccatctgtcc

SEQ ID NO: 598757 - DNA, 15 bp, Homo sapiens
cctcccatctgtccc

SEQ ID NO: 598758 - DNA, 15 bp, Homo sapiens
ctcccatctgtccca

SEQ ID NO: 598759 - DNA, 15 bp, Homo sapiens
tcccatctgtcccag

SEQ ID NO: 598760 - DNA, 15 bp, Homo sapiens
cccatctgtcccagg

SEQ ID NO: 598761 - DNA, 15 bp, Homo sapiens
ccatctgtcccaggg

SEQ ID NO: 598762 - DNA, 15 bp, Homo sapiens
catctgtcccagggc

SEQ ID NO: 598763 - DNA, 15 bp, Homo sapiens
atctgtcccagggcc

SEQ ID NO: 598764 - DNA, 15 bp, Homo sapiens
tctgtcccagggccc

SEQ ID NO: 598765 - DNA, 15 bp, Homo sapiens
ctgtcccagggccca

SEQ ID NO: 598766 - DNA, 15 bp, Homo sapiens
tgtcccagggcccac

SEQ ID NO: 598767 - DNA, 15 bp, Homo sapiens
gtcccagggcccacc

SEQ ID NO: 598768 - DNA, 15 bp, Homo sapiens
tcccagggcccacca

SEQ ID NO: 598769 - DNA, 15 bp, Homo sapiens
cccagggcccaccac

SEQ ID NO: 598770 - DNA, 15 bp, Homo sapiens
ccagggcccaccacc

SEQ ID NO: 598771 - DNA, 15 bp, Homo sapiens
cagggcccaccacca

SEQ ID NO: 598772 - DNA, 15 bp, Homo sapiens
agggcccaccaccac

SEQ ID NO: 598773 - DNA, 15 bp, Homo sapiens
gggcccaccaccact

SEQ ID NO: 598774 - DNA, 15 bp, Homo sapiens
ggcccaccaccactc

SEQ ID NO: 598775 - DNA, 15 bp, Homo sapiens
gcccaccaccactct

SEQ ID NO: 598776 - DNA, 15 bp, Homo sapiens
cccaccaccactctc

SEQ ID NO: 598777 - DNA, 15 bp, Homo sapiens
ccaccaccactctct

SEQ ID NO: 598778 - DNA, 15 bp, Homo sapiens
caccaccactctctc

SEQ ID NO: 598779 - DNA, 15 bp, Homo sapiens
accaccactctctcc

SEQ ID NO: 598780 - DNA, 15 bp, Homo sapiens
ccaccactctctccc

SEQ ID NO: 598781 - DNA, 15 bp, Homo sapiens
caccactctctccct

SEQ ID NO: 598782 - DNA, 15 bp, Homo sapiens
accactctctccctg

SEQ ID NO: 598783 - DNA, 15 bp, Homo sapiens
ccactctctccctgc

SEQ ID NO: 598784 - DNA, 15 bp, Homo sapiens
cactctctccctgcc

SEQ ID NO: 598785 - DNA, 15 bp, Homo sapiens
actctctccctgccc

SEQ ID NO: 598786 - DNA, 15 bp, Homo sapiens
ctctctccctgcccc

SEQ ID NO: 598787 - DNA, 15 bp, Homo sapiens
tctctccctgcccca

SEQ ID NO: 598788 - DNA, 15 bp, Homo sapiens
ctctccctgccccaa

SEQ ID NO: 598789 - DNA, 15 bp, Homo sapiens
tctccctgccccaaa

SEQ ID NO: 598790 - DNA, 15 bp, Homo sapiens
ctccctgccccaaaa

SEQ ID NO: 598791 - DNA, 15 bp, Homo sapiens
tccctgccccaaaaa

SEQ ID NO: 598792 - DNA, 15 bp, Homo sapiens
ccctgccccaaaaaa

SEQ ID NO: 598793 - DNA, 15 bp, Homo sapiens
cctgccccaaaaaat

SEQ ID NO: 598794 - DNA, 15 bp, Homo sapiens
ctgccccaaaaaatc

SEQ ID NO: 598795 - DNA, 15 bp, Homo sapiens
tgccccaaaaaatcc

SEQ ID NO: 598796 - DNA, 15 bp, Homo sapiens
gccccaaaaaatcct

SEQ ID NO: 598797 - DNA, 15 bp, Homo sapiens
ccccaaaaaatcctc

SEQ ID NO: 598798 - DNA, 15 bp, Homo sapiens
cccaaaaaatcctcc

SEQ ID NO: 598799 - DNA, 15 bp, Homo sapiens
ccaaaaaatcctcct

SEQ ID NO: 598800 - DNA, 15 bp, Homo sapiens
caaaaaatcctcctg

SEQ ID NO: 598801 - DNA, 15 bp, Homo sapiens
aaaaaatcctcctga

SEQ ID NO: 598802 - DNA, 15 bp, Homo sapiens
aaaaatcctcctgat

SEQ ID NO: 598803 - DNA, 15 bp, Homo sapiens
aaaatcctcctgata

SEQ ID NO: 598804 - DNA, 15 bp, Homo sapiens
aaatcctcctgataa

SEQ ID NO: 598805 - DNA, 15 bp, Homo sapiens
aatcctcctgataac

SEQ ID NO: 598806 - DNA, 15 bp, Homo sapiens
atcctcctgataaca

SEQ ID NO: 598807 - DNA, 15 bp, Homo sapiens
tcctcctgataacag

SEQ ID NO: 598808 - DNA, 15 bp, Homo sapiens
cctcctgataacagt

SEQ ID NO: 598809 - DNA, 15 bp, Homo sapiens
ctcctgataacagtc

SEQ ID NO: 598810 - DNA, 15 bp, Homo sapiens
tcctgataacagtcc

SEQ ID NO: 598811 - DNA, 15 bp, Homo sapiens
cctgataacagtcca

SEQ ID NO: 598812 - DNA, 15 bp, Homo sapiens
ctgataacagtccac

SEQ ID NO: 598813 - DNA, 15 bp, Homo sapiens
tgataacagtccaca

SEQ ID NO: 598814 - DNA, 15 bp, Homo sapiens
gataacagtccacag

SEQ ID NO: 598815 - DNA, 15 bp, Homo sapiens
ataacagtccacagc

SEQ ID NO: 598816 - DNA, 15 bp, Homo sapiens
taacagtccacagct

SEQ ID NO: 598817 - DNA, 15 bp, Homo sapiens
aacagtccacagctc

SEQ ID NO: 598818 - DNA, 15 bp, Homo sapiens
acagtccacagctct

SEQ ID NO: 598819 - DNA, 15 bp, Homo sapiens
cagtccacagctctc

SEQ ID NO: 598820 - DNA, 15 bp, Homo sapiens
agtccacagctctcc

SEQ ID NO: 598821 - DNA, 15 bp, Homo sapiens
gtccacagctctcct

SEQ ID NO: 598822 - DNA, 15 bp, Homo sapiens
tccacagctctcctc

SEQ ID NO: 598823 - DNA, 15 bp, Homo sapiens
ccacagctctcctct

SEQ ID NO: 598824 - DNA, 15 bp, Homo sapiens
cacagctctcctctg

SEQ ID NO: 598825 - DNA, 15 bp, Homo sapiens
acagctctcctctgc

SEQ ID NO: 598826 - DNA, 15 bp, Homo sapiens
cagctctcctctgct

SEQ ID NO: 598827 - DNA, 15 bp, Homo sapiens
agctctcctctgctc

SEQ ID NO: 598828 - DNA, 15 bp, Homo sapiens
gctctcctctgctct

SEQ ID NO: 598829 - DNA, 15 bp, Homo sapiens
ctctcctctgctctc

SEQ ID NO: 598830 - DNA, 15 bp, Homo sapiens
tctcctctgctctcc

SEQ ID NO: 598831 - DNA, 15 bp, Homo sapiens
ctcctctgctctccg

SEQ ID NO: 598832 - DNA, 15 bp, Homo sapiens
tcctctgctctccgg

SEQ ID NO: 598833 - DNA, 15 bp, Homo sapiens
cctctgctctccgga

SEQ ID NO: 598834 - DNA, 15 bp, Homo sapiens
ctctgctctccggag

SEQ ID NO: 598835 - DNA, 15 bp, Homo sapiens
tctgctctccggagc

SEQ ID NO: 598836 - DNA, 15 bp, Homo sapiens
ctgctctccggagca

SEQ ID NO: 598837 - DNA, 15 bp, Homo sapiens
tgctctccggagcac

SEQ ID NO: 598838 - DNA, 15 bp, Homo sapiens
gctctccggagcact

SEQ ID NO: 598839 - DNA, 15 bp, Homo sapiens
ctctccggagcactg

SEQ ID NO: 598840 - DNA, 15 bp, Homo sapiens
tctccggagcactga

SEQ ID NO: 598841 - DNA, 15 bp, Homo sapiens
ctccggagcactgat

SEQ ID NO: 598842 - DNA, 15 bp, Homo sapiens
tccggagcactgatg

SEQ ID NO: 598843 - DNA, 15 bp, Homo sapiens
ccggagcactgatgt

SEQ ID NO: 598844 - DNA, 15 bp, Homo sapiens
cggagcactgatgtc

SEQ ID NO: 598845 - DNA, 15 bp, Homo sapiens
ggagcactgatgtcc

SEQ ID NO: 598846 - DNA, 15 bp, Homo sapiens
gagcactgatgtccc

SEQ ID NO: 598847 - DNA, 15 bp, Homo sapiens
agcactgatgtcccc

SEQ ID NO: 598848 - DNA, 15 bp, Homo sapiens
gcactgatgtcccca

SEQ ID NO: 598849 - DNA, 15 bp, Homo sapiens
cactgatgtccccac

SEQ ID NO: 598850 - DNA, 15 bp, Homo sapiens
actgatgtccccacc

SEQ ID NO: 598851 - DNA, 15 bp, Homo sapiens
ctgatgtccccacct

SEQ ID NO: 598852 - DNA, 15 bp, Homo sapiens
tgatgtccccacctt

SEQ ID NO: 598853 - DNA, 15 bp, Homo sapiens
gatgtccccaccttt

SEQ ID NO: 598854 - DNA, 15 bp, Homo sapiens
atgtccccacctttg

SEQ ID NO: 598855 - DNA, 15 bp, Homo sapiens
tgtccccacctttgt

SEQ ID NO: 598856 - DNA, 15 bp, Homo sapiens
gtccccacctttgta

SEQ ID NO: 598857 - DNA, 15 bp, Homo sapiens
tccccacctttgtac

SEQ ID NO: 598858 - DNA, 15 bp, Homo sapiens
ccccacctttgtacc

SEQ ID NO: 598859 - DNA, 15 bp, Homo sapiens
cccacctttgtacct

SEQ ID NO: 598860 - DNA, 15 bp, Homo sapiens
ccacctttgtacctt

SEQ ID NO: 598861 - DNA, 15 bp, Homo sapiens
cacctttgtaccttt

SEQ ID NO: 598862 - DNA, 15 bp, Homo sapiens
acctttgtacctttt

SEQ ID NO: 598863 - DNA, 15 bp, Homo sapiens
cctttgtaccttttc

SEQ ID NO: 598864 - DNA, 15 bp, Homo sapiens
ctttgtaccttttcc

SEQ ID NO: 598865 - DNA, 15 bp, Homo sapiens
tttgtaccttttccc

SEQ ID NO: 598866 - DNA, 15 bp, Homo sapiens
ttgtaccttttccct

SEQ ID NO: 598867 - DNA, 15 bp, Homo sapiens
tgtaccttttccctg

SEQ ID NO: 598868 - DNA, 15 bp, Homo sapiens
gtaccttttccctgc

SEQ ID NO: 598869 - DNA, 15 bp, Homo sapiens
taccttttccctgct

SEQ ID NO: 598870 - DNA, 15 bp, Homo sapiens
accttttccctgctg

SEQ ID NO: 598871 - DNA, 15 bp, Homo sapiens
ccttttccctgctgt

SEQ ID NO: 598872 - DNA, 15 bp, Homo sapiens
cttttccctgctgtg

SEQ ID NO: 598873 - DNA, 15 bp, Homo sapiens
ttttccctgctgtgc

SEQ ID NO: 598874 - DNA, 15 bp, Homo sapiens
tttccctgctgtgcc

SEQ ID NO: 598875 - DNA, 15 bp, Homo sapiens
ttccctgctgtgccc

SEQ ID NO: 598876 - DNA, 15 bp, Homo sapiens
tccctgctgtgccct

SEQ ID NO: 598877 - DNA, 15 bp, Homo sapiens
ccctgctgtgccctc

SEQ ID NO: 598878 - DNA, 15 bp, Homo sapiens
cctgctgtgccctcc

SEQ ID NO: 598879 - DNA, 15 bp, Homo sapiens
ctgctgtgccctcct

SEQ ID NO: 598880 - DNA, 15 bp, Homo sapiens
tgctgtgccctcctg

SEQ ID NO: 598881 - DNA, 15 bp, Homo sapiens
gctgtgccctcctgc

SEQ ID NO: 598882 - DNA, 15 bp, Homo sapiens
ctgtgccctcctgct

SEQ ID NO: 598883 - DNA, 15 bp, Homo sapiens
tgtgccctcctgctg

SEQ ID NO: 598884 - DNA, 15 bp, Homo sapiens
gtgccctcctgctga

SEQ ID NO: 598885 - DNA, 15 bp, Homo sapiens
tgccctcctgctgaa

SEQ ID NO: 598886 - DNA, 15 bp, Homo sapiens
gccctcctgctgaag

SEQ ID NO: 598887 - DNA, 15 bp, Homo sapiens
ccctcctgctgaagt

SEQ ID NO: 598888 - DNA, 15 bp, Homo sapiens
cctcctgctgaagtg

SEQ ID NO: 598889 - DNA, 15 bp, Homo sapiens
ctcctgctgaagtgc

SEQ ID NO: 598890 - DNA, 15 bp, Homo sapiens
tcctgctgaagtgcc

SEQ ID NO: 598891 - DNA, 15 bp, Homo sapiens
cctgctgaagtgccc

SEQ ID NO: 598892 - DNA, 15 bp, Homo sapiens
ctgctgaagtgcccg

SEQ ID NO: 598893 - DNA, 15 bp, Homo sapiens
tgctgaagtgcccgc

SEQ ID NO: 598894 - DNA, 15 bp, Homo sapiens
gctgaagtgcccgcc

SEQ ID NO: 598895 - DNA, 15 bp, Homo sapiens
ctgaagtgcccgccc

SEQ ID NO: 598896 - DNA, 15 bp, Homo sapiens
tgaagtgcccgccct

SEQ ID NO: 598897 - DNA, 15 bp, Homo sapiens
gaagtgcccgccctc

SEQ ID NO: 598898 - DNA, 15 bp, Homo sapiens
aagtgcccgccctcc

SEQ ID NO: 598899 - DNA, 15 bp, Homo sapiens
agtgcccgccctcct

SEQ ID NO: 598900 - DNA, 15 bp, Homo sapiens
gtgcccgccctcctc

SEQ ID NO: 598901 - DNA, 15 bp, Homo sapiens
tgcccgccctcctcc

SEQ ID NO: 598902 - DNA, 15 bp, Homo sapiens
gcccgccctcctcct

SEQ ID NO: 598903 - DNA, 15 bp, Homo sapiens
cccgccctcctcctt

SEQ ID NO: 598904 - DNA, 15 bp, Homo sapiens
ccgccctcctccttg

SEQ ID NO: 598905 - DNA, 15 bp, Homo sapiens
cgccctcctccttgc

SEQ ID NO: 598906 - DNA, 15 bp, Homo sapiens
gccctcctccttgct

SEQ ID NO: 598907 - DNA, 15 bp, Homo sapiens
ccctcctccttgcta

SEQ ID NO: 598908 - DNA, 15 bp, Homo sapiens
cctcctccttgctag

SEQ ID NO: 598909 - DNA, 15 bp, Homo sapiens
ctcctccttgctagc

SEQ ID NO: 598910 - DNA, 15 bp, Homo sapiens
tcctccttgctagcc

SEQ ID NO: 598911 - DNA, 15 bp, Homo sapiens
cctccttgctagccc

SEQ ID NO: 598912 - DNA, 15 bp, Homo sapiens
ctccttgctagccca

SEQ ID NO: 598913 - DNA, 15 bp, Homo sapiens
tccttgctagcccag

SEQ ID NO: 598914 - DNA, 15 bp, Homo sapiens
ccttgctagcccagt

SEQ ID NO: 598915 - DNA, 15 bp, Homo sapiens
cttgctagcccagtc

SEQ ID NO: 598916 - DNA, 15 bp, Homo sapiens
ttgctagcccagtct

SEQ ID NO: 598917 - DNA, 15 bp, Homo sapiens
tgctagcccagtctg

SEQ ID NO: 598918 - DNA, 15 bp, Homo sapiens
gctagcccagtctgc

SEQ ID NO: 598919 - DNA, 15 bp, Homo sapiens
ctagcccagtctgcc

SEQ ID NO: 598920 - DNA, 15 bp, Homo sapiens
tagcccagtctgcct

SEQ ID NO: 598921 - DNA, 15 bp, Homo sapiens
agcccagtctgcctc

SEQ ID NO: 598922 - DNA, 15 bp, Homo sapiens
gcccagtctgcctcc

SEQ ID NO: 598923 - DNA, 15 bp, Homo sapiens
cccagtctgcctcca

SEQ ID NO: 598924 - DNA, 15 bp, Homo sapiens
ccagtctgcctccaa

SEQ ID NO: 598925 - DNA, 15 bp, Homo sapiens
cagtctgcctccaac

SEQ ID NO: 598926 - DNA, 15 bp, Homo sapiens
agtctgcctccaacc

SEQ ID NO: 598927 - DNA, 15 bp, Homo sapiens
gtctgcctccaaccc

SEQ ID NO: 598928 - DNA, 15 bp, Homo sapiens
tctgcctccaacccc

SEQ ID NO: 598929 - DNA, 15 bp, Homo sapiens
ctgcctccaaccccc

SEQ ID NO: 598930 - DNA, 15 bp, Homo sapiens
tgcctccaaccccct

SEQ ID NO: 598931 - DNA, 15 bp, Homo sapiens
gcctccaaccccctt

SEQ ID NO: 598932 - DNA, 15 bp, Homo sapiens
cctccaacccccttc

SEQ ID NO: 598933 - DNA, 15 bp, Homo sapiens
ctccaacccccttca

SEQ ID NO: 598934 - DNA, 15 bp, Homo sapiens
tccaacccccttcac

SEQ ID NO: 598935 - DNA, 15 bp, Homo sapiens
ccaacccccttcacc

SEQ ID NO: 598936 - DNA, 15 bp, Homo sapiens
caacccccttcaccc

SEQ ID NO: 598937 - DNA, 15 bp, Homo sapiens
aacccccttcacccc

SEQ ID NO: 598938 - DNA, 15 bp, Homo sapiens
acccccttcacccca

SEQ ID NO: 598939 - DNA, 15 bp, Homo sapiens
cccccttcaccccag

SEQ ID NO: 598940 - DNA, 15 bp, Homo sapiens
ccccttcaccccagc

SEQ ID NO: 598941 - DNA, 15 bp, Homo sapiens
cccttcaccccagcc

SEQ ID NO: 598942 - DNA, 15 bp, Homo sapiens
ccttcaccccagccc

SEQ ID NO: 598943 - DNA, 15 bp, Homo sapiens
cttcaccccagcccc

SEQ ID NO: 598944 - DNA, 15 bp, Homo sapiens
ttcaccccagcccca

SEQ ID NO: 598945 - DNA, 15 bp, Homo sapiens
tcaccccagccccac

SEQ ID NO: 598946 - DNA, 15 bp, Homo sapiens
caccccagccccacc

SEQ ID NO: 598947 - DNA, 15 bp, Homo sapiens
accccagccccacct

SEQ ID NO: 598948 - DNA, 15 bp, Homo sapiens
ccccagccccacctc

SEQ ID NO: 598949 - DNA, 15 bp, Homo sapiens
cccagccccacctca

SEQ ID NO: 598950 - DNA, 15 bp, Homo sapiens
ccagccccacctcac

SEQ ID NO: 598951 - DNA, 15 bp, Homo sapiens
cagccccacctcaca

SEQ ID NO: 598952 - DNA, 15 bp, Homo sapiens
agccccacctcacag

SEQ ID NO: 598953 - DNA, 15 bp, Homo sapiens
gccccacctcacagt

SEQ ID NO: 598954 - DNA, 15 bp, Homo sapiens
ccccacctcacagtc

SEQ ID NO: 598955 - DNA, 15 bp, Homo sapiens
cccacctcacagtcc

SEQ ID NO: 598956 - DNA, 15 bp, Homo sapiens
ccacctcacagtccc

SEQ ID NO: 598957 - DNA, 15 bp, Homo sapiens
cacctcacagtcccc

SEQ ID NO: 598958 - DNA, 15 bp, Homo sapiens
acctcacagtcccca

SEQ ID NO: 598959 - DNA, 15 bp, Homo sapiens
cctcacagtccccaa

SEQ ID NO: 598960 - DNA, 15 bp, Homo sapiens
ctcacagtccccaat

SEQ ID NO: 598961 - DNA, 15 bp, Homo sapiens
tcacagtccccaatc

SEQ ID NO: 598962 - DNA, 15 bp, Homo sapiens
cacagtccccaatcc

SEQ ID NO: 598963 - DNA, 15 bp, Homo sapiens
acagtccccaatccc

SEQ ID NO: 598964 - DNA, 15 bp, Homo sapiens
cagtccccaatccct

SEQ ID NO: 598965 - DNA, 15 bp, Homo sapiens
agtccccaatccctc

SEQ ID NO: 598966 - DNA, 15 bp, Homo sapiens
gtccccaatccctca

SEQ ID NO: 598967 - DNA, 15 bp, Homo sapiens
tccccaatccctcag

SEQ ID NO: 598968 - DNA, 15 bp, Homo sapiens
ccccaatccctcagg

SEQ ID NO: 598969 - DNA, 15 bp, Homo sapiens
cccaatccctcaggc

SEQ ID NO: 598970 - DNA, 15 bp, Homo sapiens
ccaatccctcaggcc

SEQ ID NO: 598971 - DNA, 15 bp, Homo sapiens
caatccctcaggcct

SEQ ID NO: 598972 - DNA, 15 bp, Homo sapiens
aatccctcaggcctc

SEQ ID NO: 598973 - DNA, 15 bp, Homo sapiens
atccctcaggcctct

SEQ ID NO: 598974 - DNA, 15 bp, Homo sapiens
tccctcaggcctctt

SEQ ID NO: 598975 - DNA, 15 bp, Homo sapiens
ccctcaggcctcttg

SEQ ID NO: 598976 - DNA, 15 bp, Homo sapiens
cctcaggcctcttga

SEQ ID NO: 598977 - DNA, 15 bp, Homo sapiens
ctcaggcctcttgag

SEQ ID NO: 598978 - DNA, 15 bp, Homo sapiens
tcaggcctcttgagt

SEQ ID NO: 598979 - DNA, 15 bp, Homo sapiens
caggcctcttgagtc

SEQ ID NO: 598980 - DNA, 15 bp, Homo sapiens
aggcctcttgagtct

SEQ ID NO: 598981 - DNA, 15 bp, Homo sapiens
ggcctcttgagtctg

SEQ ID NO: 598982 - DNA, 15 bp, Homo sapiens
gcctcttgagtctgc

SEQ ID NO: 598983 - DNA, 15 bp, Homo sapiens
cctcttgagtctgca

SEQ ID NO: 598984 - DNA, 15 bp, Homo sapiens
ctcttgagtctgcac

SEQ ID NO: 598985 - DNA, 15 bp, Homo sapiens
tcttgagtctgcact

SEQ ID NO: 598986 - DNA, 15 bp, Homo sapiens
cttgagtctgcactg

SEQ ID NO: 598987 - DNA, 15 bp, Homo sapiens
ttgagtctgcactga

SEQ ID NO: 598988 - DNA, 15 bp, Homo sapiens
tgagtctgcactgaa

SEQ ID NO: 598989 - DNA, 15 bp, Homo sapiens
gagtctgcactgaac

SEQ ID NO: 598990 - DNA, 15 bp, Homo sapiens
agtctgcactgaacc

SEQ ID NO: 598991 - DNA, 15 bp, Homo sapiens
gtctgcactgaaccc

SEQ ID NO: 598992 - DNA, 15 bp, Homo sapiens
tctgcactgaaccct

SEQ ID NO: 598993 - DNA, 15 bp, Homo sapiens
ctgcactgaaccctg

SEQ ID NO: 598994 - DNA, 15 bp, Homo sapiens
tgcactgaaccctgc

SEQ ID NO: 598995 - DNA, 15 bp, Homo sapiens
gcactgaaccctgcc

SEQ ID NO: 598996 - DNA, 15 bp, Homo sapiens
cactgaaccctgccc

SEQ ID NO: 598997 - DNA, 15 bp, Homo sapiens
actgaaccctgcccc

SEQ ID NO: 598998 - DNA, 15 bp, Homo sapiens
ctgaaccctgcccca

SEQ ID NO: 598999 - DNA, 15 bp, Homo sapiens
tgaaccctgccccaa

SEQ ID NO: 599000 - DNA, 15 bp, Homo sapiens
gaaccctgccccaac

SEQ ID NO: 599001 - DNA, 15 bp, Homo sapiens
aaccctgccccaacc

SEQ ID NO: 599002 - DNA, 15 bp, Homo sapiens
accctgccccaacca

SEQ ID NO: 599003 - DNA, 15 bp, Homo sapiens
ccctgccccaaccac

SEQ ID NO: 599004 - DNA, 15 bp, Homo sapiens
cctgccccaaccact

SEQ ID NO: 599005 - DNA, 15 bp, Homo sapiens
ctgccccaaccactc

SEQ ID NO: 599006 - DNA, 15 bp, Homo sapiens
tgccccaaccactcc

SEQ ID NO: 599007 - DNA, 15 bp, Homo sapiens
gccccaaccactccc

SEQ ID NO: 599008 - DNA, 15 bp, Homo sapiens
ccccaaccactccct

SEQ ID NO: 599009 - DNA, 15 bp, Homo sapiens
cccaaccactccctg

SEQ ID NO: 599010 - DNA, 15 bp, Homo sapiens
ccaaccactccctga

SEQ ID NO: 599011 - DNA, 15 bp, Homo sapiens
caaccactccctgaa

SEQ ID NO: 599012 - DNA, 15 bp, Homo sapiens
aaccactccctgaac

SEQ ID NO: 599013 - DNA, 15 bp, Homo sapiens
accactccctgaaca

SEQ ID NO: 599014 - DNA, 15 bp, Homo sapiens
ccactccctgaacac

SEQ ID NO: 599015 - DNA, 15 bp, Homo sapiens
cactccctgaacact

SEQ ID NO: 599016 - DNA, 15 bp, Homo sapiens
actccctgaacactt

SEQ ID NO: 599017 - DNA, 15 bp, Homo sapiens
ctccctgaacacttt

SEQ ID NO: 599018 - DNA, 15 bp, Homo sapiens
tccctgaacactttc

SEQ ID NO: 599019 - DNA, 15 bp, Homo sapiens
ccctgaacactttca

SEQ ID NO: 599020 - DNA, 15 bp, Homo sapiens
cctgaacactttcac

SEQ ID NO: 599021 - DNA, 15 bp, Homo sapiens
ctgaacactttcacc

SEQ ID NO: 599022 - DNA, 15 bp, Homo sapiens
tgaacactttcaccc

SEQ ID NO: 599023 - DNA, 15 bp, Homo sapiens
gaacactttcaccca

SEQ ID NO: 599024 - DNA, 15 bp, Homo sapiens
aacactttcacccac

SEQ ID NO: 599025 - DNA, 15 bp, Homo sapiens
acactttcacccact

SEQ ID NO: 599026 - DNA, 15 bp, Homo sapiens
cactttcacccactg

SEQ ID NO: 599027 - DNA, 15 bp, Homo sapiens
actttcacccactgc

SEQ ID NO: 599028 - DNA, 15 bp, Homo sapiens
ctttcacccactgcc

SEQ ID NO: 599029 - DNA, 15 bp, Homo sapiens
tttcacccactgcct

SEQ ID NO: 599030 - DNA, 15 bp, Homo sapiens
ttcacccactgcctt

SEQ ID NO: 599031 - DNA, 15 bp, Homo sapiens
tcacccactgccttc

SEQ ID NO: 599032 - DNA, 15 bp, Homo sapiens
cacccactgccttcc

SEQ ID NO: 599033 - DNA, 15 bp, Homo sapiens
acccactgccttccc

SEQ ID NO: 599034 - DNA, 15 bp, Homo sapiens
cccactgccttccct

SEQ ID NO: 599035 - DNA, 15 bp, Homo sapiens
ccactgccttccctg

SEQ ID NO: 599036 - DNA, 15 bp, Homo sapiens
cactgccttccctgt

SEQ ID NO: 599037 - DNA, 15 bp, Homo sapiens
actgccttccctgtt

SEQ ID NO: 599038 - DNA, 15 bp, Homo sapiens
ctgccttccctgtta

SEQ ID NO: 599039 - DNA, 15 bp, Homo sapiens
tgccttccctgttat

SEQ ID NO: 599040 - DNA, 15 bp, Homo sapiens
gccttccctgttatg

SEQ ID NO: 599041 - DNA, 15 bp, Homo sapiens
ccttccctgttatgt

SEQ ID NO: 599042 - DNA, 15 bp, Homo sapiens
cttccctgttatgtc

SEQ ID NO: 599043 - DNA, 15 bp, Homo sapiens
ttccctgttatgtca

SEQ ID NO: 599044 - DNA, 15 bp, Homo sapiens
tccctgttatgtcac

SEQ ID NO: 599045 - DNA, 15 bp, Homo sapiens
ccctgttatgtcact

SEQ ID NO: 599046 - DNA, 15 bp, Homo sapiens
cctgttatgtcactt

SEQ ID NO: 599047 - DNA, 15 bp, Homo sapiens
ctgttatgtcacttg

SEQ ID NO: 599048 - DNA, 15 bp, Homo sapiens
tgttatgtcacttgt

SEQ ID NO: 599049 - DNA, 15 bp, Homo sapiens
gttatgtcacttgtc

SEQ ID NO: 599050 - DNA, 15 bp, Homo sapiens
ttatgtcacttgtcc

SEQ ID NO: 599051 - DNA, 15 bp, Homo sapiens
tatgtcacttgtcct

SEQ ID NO: 599052 - DNA, 15 bp, Homo sapiens
atgtcacttgtcctg

SEQ ID NO: 599053 - DNA, 15 bp, Homo sapiens
tgtcacttgtcctgt

SEQ ID NO: 599054 - DNA, 15 bp, Homo sapiens
gtcacttgtcctgta

SEQ ID NO: 599055 - DNA, 15 bp, Homo sapiens
tcacttgtcctgtaa

SEQ ID NO: 599056 - DNA, 15 bp, Homo sapiens
cacttgtcctgtaaa

SEQ ID NO: 599057 - DNA, 15 bp, Homo sapiens
acttgtcctgtaaag

SEQ ID NO: 599058 - DNA, 15 bp, Homo sapiens
cttgtcctgtaaagc

SEQ ID NO: 599059 - DNA, 15 bp, Homo sapiens
ttgtcctgtaaagca

SEQ ID NO: 599060 - DNA, 15 bp, Homo sapiens
tgtcctgtaaagcat

SEQ ID NO: 599061 - DNA, 15 bp, Homo sapiens
gtcctgtaaagcatt

SEQ ID NO: 599062 - DNA, 15 bp, Homo sapiens
tcctgtaaagcattg

SEQ ID NO: 599063 - DNA, 15 bp, Homo sapiens
cctgtaaagcattga

SEQ ID NO: 599064 - DNA, 15 bp, Homo sapiens
ctgtaaagcattgac

SEQ ID NO: 599065 - DNA, 15 bp, Homo sapiens
tgtaaagcattgacc

SEQ ID NO: 599066 - DNA, 15 bp, Homo sapiens
gtaaagcattgaccc

SEQ ID NO: 599067 - DNA, 15 bp, Homo sapiens
taaagcattgacccc

SEQ ID NO: 599068 - DNA, 15 bp, Homo sapiens
aaagcattgaccccc

SEQ ID NO: 599069 - DNA, 15 bp, Homo sapiens
aagcattgacccccg

SEQ ID NO: 599070 - DNA, 15 bp, Homo sapiens
agcattgacccccga

SEQ ID NO: 599071 - DNA, 15 bp, Homo sapiens
gcattgacccccgag

SEQ ID NO: 599072 - DNA, 15 bp, Homo sapiens
cattgacccccgagt

SEQ ID NO: 599073 - DNA, 15 bp, Homo sapiens
attgacccccgagta

SEQ ID NO: 599074 - DNA, 15 bp, Homo sapiens
ttgacccccgagtag

SEQ ID NO: 599075 - DNA, 15 bp, Homo sapiens
tgacccccgagtagc

SEQ ID NO: 599076 - DNA, 15 bp, Homo sapiens
gacccccgagtagcc

SEQ ID NO: 599077 - DNA, 15 bp, Homo sapiens
acccccgagtagcct

SEQ ID NO: 599078 - DNA, 15 bp, Homo sapiens
cccccgagtagcctg

SEQ ID NO: 599079 - DNA, 15 bp, Homo sapiens
ccccgagtagcctga

SEQ ID NO: 599080 - DNA, 15 bp, Homo sapiens
cccgagtagcctgaa

SEQ ID NO: 599081 - DNA, 15 bp, Homo sapiens
ccgagtagcctgaag

SEQ ID NO: 599082 - DNA, 15 bp, Homo sapiens
cgagtagcctgaaga

SEQ ID NO: 599083 - DNA, 15 bp, Homo sapiens
gagtagcctgaagac

SEQ ID NO: 599084 - DNA, 15 bp, Homo sapiens
agtagcctgaagact

SEQ ID NO: 599085 - DNA, 15 bp, Homo sapiens
gtagcctgaagactc

SEQ ID NO: 599086 - DNA, 15 bp, Homo sapiens
tagcctgaagactct

SEQ ID NO: 599087 - DNA, 15 bp, Homo sapiens
agcctgaagactctc

SEQ ID NO: 599088 - DNA, 15 bp, Homo sapiens
gcctgaagactctct

SEQ ID NO: 599089 - DNA, 15 bp, Homo sapiens
cctgaagactctctc

SEQ ID NO: 599090 - DNA, 15 bp, Homo sapiens
ctgaagactctctca

SEQ ID NO: 599091 - DNA, 15 bp, Homo sapiens
tgaagactctctcag

SEQ ID NO: 599092 - DNA, 15 bp, Homo sapiens
gaagactctctcagg

SEQ ID NO: 599093 - DNA, 15 bp, Homo sapiens
aagactctctcaggc

SEQ ID NO: 599094 - DNA, 15 bp, Homo sapiens
agactctctcaggca

SEQ ID NO: 599095 - DNA, 15 bp, Homo sapiens
gactctctcaggcag

SEQ ID NO: 599096 - DNA, 15 bp, Homo sapiens
actctctcaggcagg

SEQ ID NO: 599097 - DNA, 15 bp, Homo sapiens
ctctctcaggcaggg

SEQ ID NO: 599098 - DNA, 15 bp, Homo sapiens
tctctcaggcagggc

SEQ ID NO: 599099 - DNA, 15 bp, Homo sapiens
ctctcaggcagggct

SEQ ID NO: 599100 - DNA, 15 bp, Homo sapiens
tctcaggcagggctc

SEQ ID NO: 599101 - DNA, 15 bp, Homo sapiens
ctcaggcagggctcc

SEQ ID NO: 599102 - DNA, 15 bp, Homo sapiens
tcaggcagggctcct

SEQ ID NO: 599103 - DNA, 15 bp, Homo sapiens
caggcagggctcctg

SEQ ID NO: 599104 - DNA, 15 bp, Homo sapiens
aggcagggctcctgc

SEQ ID NO: 599105 - DNA, 15 bp, Homo sapiens
ggcagggctcctgca

SEQ ID NO: 599106 - DNA, 15 bp, Homo sapiens
gcagggctcctgcag

SEQ ID NO: 599107 - DNA, 15 bp, Homo sapiens
cagggctcctgcagt

SEQ ID NO: 599108 - DNA, 15 bp, Homo sapiens
agggctcctgcagtc

SEQ ID NO: 599109 - DNA, 15 bp, Homo sapiens
gggctcctgcagtca

SEQ ID NO: 599110 - DNA, 15 bp, Homo sapiens
ggctcctgcagtcac

SEQ ID NO: 599111 - DNA, 15 bp, Homo sapiens
gctcctgcagtcacc

SEQ ID NO: 599112 - DNA, 15 bp, Homo sapiens
ctcctgcagtcacct

SEQ ID NO: 599113 - DNA, 15 bp, Homo sapiens
tcctgcagtcacctt

SEQ ID NO: 599114 - DNA, 15 bp, Homo sapiens
cctgcagtcaccttt

SEQ ID NO: 599115 - DNA, 15 bp, Homo sapiens
ctgcagtcaccttta

SEQ ID NO: 599116 - DNA, 15 bp, Homo sapiens
tgcagtcacctttat

SEQ ID NO: 599117 - DNA, 15 bp, Homo sapiens
gcagtcacctttata

SEQ ID NO: 599118 - DNA, 15 bp, Homo sapiens
cagtcacctttatac

SEQ ID NO: 599119 - DNA, 15 bp, Homo sapiens
agtcacctttatact

SEQ ID NO: 599120 - DNA, 15 bp, Homo sapiens
gtcacctttatactc

SEQ ID NO: 599121 - DNA, 15 bp, Homo sapiens
tcacctttatactcc

SEQ ID NO: 599122 - DNA, 15 bp, Homo sapiens
cacctttatactccc

SEQ ID NO: 599123 - DNA, 15 bp, Homo sapiens
acctttatactccct

SEQ ID NO: 599124 - DNA, 15 bp, Homo sapiens
cctttatactccctg

SEQ ID NO: 599125 - DNA, 15 bp, Homo sapiens
ctttatactccctgc

SEQ ID NO: 599126 - DNA, 15 bp, Homo sapiens
tttatactccctgca

SEQ ID NO: 599127 - DNA, 15 bp, Homo sapiens
ttatactccctgcat

SEQ ID NO: 599128 - DNA, 15 bp, Homo sapiens
tatactccctgcatt

SEQ ID NO: 599129 - DNA, 15 bp, Homo sapiens
atactccctgcattc

SEQ ID NO: 599130 - DNA, 15 bp, Homo sapiens
tactccctgcattcc

SEQ ID NO: 599131 - DNA, 15 bp, Homo sapiens
actccctgcattccc

SEQ ID NO: 599132 - DNA, 15 bp, Homo sapiens
ctccctgcattcccc

SEQ ID NO: 599133 - DNA, 15 bp, Homo sapiens
tccctgcattcccct

SEQ ID NO: 599134 - DNA, 15 bp, Homo sapiens
ccctgcattcccctc

SEQ ID NO: 599135 - DNA, 15 bp, Homo sapiens
cctgcattcccctcc

SEQ ID NO: 599136 - DNA, 15 bp, Homo sapiens
ctgcattcccctcca

SEQ ID NO: 599137 - DNA, 15 bp, Homo sapiens
tgcattcccctccac

SEQ ID NO: 599138 - DNA, 15 bp, Homo sapiens
gcattcccctccacc

SEQ ID NO: 599139 - DNA, 15 bp, Homo sapiens
cattcccctccaccc

SEQ ID NO: 599140 - DNA, 15 bp, Homo sapiens
attcccctccaccca

SEQ ID NO: 599141 - DNA, 15 bp, Homo sapiens
ttcccctccacccac

SEQ ID NO: 599142 - DNA, 15 bp, Homo sapiens
tcccctccacccacg

SEQ ID NO: 599143 - DNA, 15 bp, Homo sapiens
cccctccacccacga

SEQ ID NO: 599144 - DNA, 15 bp, Homo sapiens
ccctccacccacgac

SEQ ID NO: 599145 - DNA, 15 bp, Homo sapiens
cctccacccacgacc

SEQ ID NO: 599146 - DNA, 15 bp, Homo sapiens
ctccacccacgacca

SEQ ID NO: 599147 - DNA, 15 bp, Homo sapiens
tccacccacgaccac

SEQ ID NO: 599148 - DNA, 15 bp, Homo sapiens
ccacccacgaccacc

SEQ ID NO: 599149 - DNA, 15 bp, Homo sapiens
cacccacgaccaccc

SEQ ID NO: 599150 - DNA, 15 bp, Homo sapiens
acccacgaccaccca

SEQ ID NO: 599151 - DNA, 15 bp, Homo sapiens
cccacgaccacccag

SEQ ID NO: 599152 - DNA, 15 bp, Homo sapiens
ccacgaccacccaga

SEQ ID NO: 599153 - DNA, 15 bp, Homo sapiens
cacgaccacccagaa

SEQ ID NO: 599154 - DNA, 15 bp, Homo sapiens
acgaccacccagaac

SEQ ID NO: 599155 - DNA, 15 bp, Homo sapiens
cgaccacccagaacc

SEQ ID NO: 599156 - DNA, 15 bp, Homo sapiens
gaccacccagaacct

SEQ ID NO: 599157 - DNA, 15 bp, Homo sapiens
accacccagaacctg

SEQ ID NO: 599158 - DNA, 15 bp, Homo sapiens
ccacccagaacctgg

SEQ ID NO: 599159 - DNA, 15 bp, Homo sapiens
cacccagaacctggc

SEQ ID NO: 599160 - DNA, 15 bp, Homo sapiens
acccagaacctggca

SEQ ID NO: 599161 - DNA, 15 bp, Homo sapiens
cccagaacctggcac

SEQ ID NO: 599162 - DNA, 15 bp, Homo sapiens
ccagaacctggcaca

SEQ ID NO: 599163 - DNA, 15 bp, Homo sapiens
cagaacctggcacag

SEQ ID NO: 599164 - DNA, 15 bp, Homo sapiens
agaacctggcacagt

SEQ ID NO: 599165 - DNA, 15 bp, Homo sapiens
gaacctggcacagtt

SEQ ID NO: 599166 - DNA, 15 bp, Homo sapiens
aacctggcacagtta

SEQ ID NO: 599167 - DNA, 15 bp, Homo sapiens
acctggcacagttat

SEQ ID NO: 599168 - DNA, 15 bp, Homo sapiens
cctggcacagttatg

SEQ ID NO: 599169 - DNA, 15 bp, Homo sapiens
ctggcacagttatgg

SEQ ID NO: 599170 - DNA, 15 bp, Homo sapiens
tggcacagttatggt

SEQ ID NO: 599171 - DNA, 15 bp, Homo sapiens
ggcacagttatggtt

SEQ ID NO: 599172 - DNA, 15 bp, Homo sapiens
gcacagttatggttt

SEQ ID NO: 599173 - DNA, 15 bp, Homo sapiens
cacagttatggtttc

SEQ ID NO: 599174 - DNA, 15 bp, Homo sapiens
acagttatggtttct

SEQ ID NO: 599175 - DNA, 15 bp, Homo sapiens
cagttatggtttctg

SEQ ID NO: 599176 - DNA, 15 bp, Homo sapiens
agttatggtttctgt

SEQ ID NO: 599177 - DNA, 15 bp, Homo sapiens
gttatggtttctgta

SEQ ID NO: 599178 - DNA, 15 bp, Homo sapiens
ttatggtttctgtaa

SEQ ID NO: 599179 - DNA, 15 bp, Homo sapiens
tatggtttctgtaaa

SEQ ID NO: 599180 - DNA, 15 bp, Homo sapiens
atggtttctgtaaat

SEQ ID NO: 599181 - DNA, 15 bp, Homo sapiens
tggtttctgtaaata

SEQ ID NO: 599182 - DNA, 15 bp, Homo sapiens
ggtttctgtaaatac

SEQ ID NO: 599183 - DNA, 15 bp, Homo sapiens
gtttctgtaaatacg

SEQ ID NO: 599184 - DNA, 15 bp, Homo sapiens
tttctgtaaatacga

SEQ ID NO: 599185 - DNA, 15 bp, Homo sapiens
ttctgtaaatacgag

SEQ ID NO: 599186 - DNA, 15 bp, Homo sapiens
tctgtaaatacgagg

SEQ ID NO: 599187 - DNA, 15 bp, Homo sapiens
ctgtaaatacgaggc

SEQ ID NO: 599188 - DNA, 15 bp, Homo sapiens
tgtaaatacgaggcg

SEQ ID NO: 599189 - DNA, 15 bp, Homo sapiens
gtaaatacgaggcgt

SEQ ID NO: 599190 - DNA, 15 bp, Homo sapiens
taaatacgaggcgtg

SEQ ID NO: 599191 - DNA, 15 bp, Homo sapiens
aaatacgaggcgtgg

SEQ ID NO: 599192 - DNA, 15 bp, Homo sapiens
aatacgaggcgtggg

SEQ ID NO: 599193 - DNA, 15 bp, Homo sapiens
atacgaggcgtggga

SEQ ID NO: 599194 - DNA, 15 bp, Homo sapiens
tacgaggcgtgggag

SEQ ID NO: 599195 - DNA, 15 bp, Homo sapiens
acgaggcgtgggaga

SEQ ID NO: 599196 - DNA, 15 bp, Homo sapiens
cgaggcgtgggagag

SEQ ID NO: 599197 - DNA, 15 bp, Homo sapiens
gaggcgtgggagagg

SEQ ID NO: 599198 - DNA, 15 bp, Homo sapiens
aggcgtgggagaggc

SEQ ID NO: 599199 - DNA, 15 bp, Homo sapiens
ggcgtgggagaggcc

SEQ ID NO: 599200 - DNA, 15 bp, Homo sapiens
gcgtgggagaggcca

SEQ ID NO: 599201 - DNA, 15 bp, Homo sapiens
cgtgggagaggccag

SEQ ID NO: 599202 - DNA, 15 bp, Homo sapiens
gtgggagaggccaga

SEQ ID NO: 599203 - DNA, 15 bp, Homo sapiens
tgggagaggccagaa

SEQ ID NO: 599204 - DNA, 15 bp, Homo sapiens
gggagaggccagaag

SEQ ID NO: 599205 - DNA, 15 bp, Homo sapiens
ggagaggccagaagt

SEQ ID NO: 599206 - DNA, 15 bp, Homo sapiens
gagaggccagaagtc

SEQ ID NO: 599207 - DNA, 15 bp, Homo sapiens
agaggccagaagtct

SEQ ID NO: 599208 - DNA, 15 bp, Homo sapiens
gaggccagaagtctg

SEQ ID NO: 599209 - DNA, 15 bp, Homo sapiens
aggccagaagtctgg

SEQ ID NO: 599210 - DNA, 15 bp, Homo sapiens
ggccagaagtctggg

SEQ ID NO: 599211 - DNA, 15 bp, Homo sapiens
gccagaagtctgggt

SEQ ID NO: 599212 - DNA, 15 bp, Homo sapiens
ccagaagtctgggta

SEQ ID NO: 599213 - DNA, 15 bp, Homo sapiens
cagaagtctgggtag

SEQ ID NO: 599214 - DNA, 15 bp, Homo sapiens
agaagtctgggtagt

SEQ ID NO: 599215 - DNA, 15 bp, Homo sapiens
gaagtctgggtagtt

SEQ ID NO: 599216 - DNA, 15 bp, Homo sapiens
aagtctgggtagttt

SEQ ID NO: 599217 - DNA, 15 bp, Homo sapiens
agtctgggtagtttg

SEQ ID NO: 599218 - DNA, 15 bp, Homo sapiens
gtctgggtagtttgc

SEQ ID NO: 599219 - DNA, 15 bp, Homo sapiens
tctgggtagtttgca

SEQ ID NO: 599220 - DNA, 15 bp, Homo sapiens
ctgggtagtttgcac

SEQ ID NO: 599221 - DNA, 15 bp, Homo sapiens
tgggtagtttgcact

SEQ ID NO: 599222 - DNA, 15 bp, Homo sapiens
gggtagtttgcactg

SEQ ID NO: 599223 - DNA, 15 bp, Homo sapiens
ggtagtttgcactgt

SEQ ID NO: 599224 - DNA, 15 bp, Homo sapiens
gtagtttgcactgtg

SEQ ID NO: 599225 - DNA, 15 bp, Homo sapiens
tagtttgcactgtgt

SEQ ID NO: 599226 - DNA, 15 bp, Homo sapiens
agtttgcactgtgtg

SEQ ID NO: 599227 - DNA, 15 bp, Homo sapiens
gtttgcactgtgtgt

SEQ ID NO: 599228 - DNA, 15 bp, Homo sapiens
tttgcactgtgtgtg

SEQ ID NO: 599229 - DNA, 15 bp, Homo sapiens
ttgcactgtgtgtgc

SEQ ID NO: 599230 - DNA, 15 bp, Homo sapiens
tgcactgtgtgtgcc

SEQ ID NO: 599231 - DNA, 15 bp, Homo sapiens
gcactgtgtgtgcct

SEQ ID NO: 599232 - DNA, 15 bp, Homo sapiens
cactgtgtgtgcctg

SEQ ID NO: 599233 - DNA, 15 bp, Homo sapiens
actgtgtgtgcctgc

SEQ ID NO: 599234 - DNA, 15 bp, Homo sapiens
ctgtgtgtgcctgca

SEQ ID NO: 599235 - DNA, 15 bp, Homo sapiens
tgtgtgtgcctgcag

SEQ ID NO: 599236 - DNA, 15 bp, Homo sapiens
gtgtgtgcctgcagg

SEQ ID NO: 599237 - DNA, 15 bp, Homo sapiens
tgtgtgcctgcaggg

SEQ ID NO: 599238 - DNA, 15 bp, Homo sapiens
gtgtgcctgcagggg

SEQ ID NO: 599239 - DNA, 15 bp, Homo sapiens
tgtgcctgcaggggt

SEQ ID NO: 599240 - DNA, 15 bp, Homo sapiens
gtgcctgcaggggtg

SEQ ID NO: 599241 - DNA, 15 bp, Homo sapiens
tgcctgcaggggtgg

SEQ ID NO: 599242 - DNA, 15 bp, Homo sapiens
gcctgcaggggtggg

SEQ ID NO: 599243 - DNA, 15 bp, Homo sapiens
cctgcaggggtggga

SEQ ID NO: 599244 - DNA, 15 bp, Homo sapiens
ctgcaggggtgggat

SEQ ID NO: 599245 - DNA, 15 bp, Homo sapiens
tgcaggggtgggatg

SEQ ID NO: 599246 - DNA, 15 bp, Homo sapiens
gcaggggtgggatga

SEQ ID NO: 599247 - DNA, 15 bp, Homo sapiens
caggggtgggatgaa

SEQ ID NO: 599248 - DNA, 15 bp, Homo sapiens
aggggtgggatgaag

SEQ ID NO: 599249 - DNA, 15 bp, Homo sapiens
ggggtgggatgaagg

SEQ ID NO: 599250 - DNA, 15 bp, Homo sapiens
gggtgggatgaaggc

SEQ ID NO: 599251 - DNA, 15 bp, Homo sapiens
ggtgggatgaaggct

SEQ ID NO: 599252 - DNA, 15 bp, Homo sapiens
gtgggatgaaggctc

SEQ ID NO: 599253 - DNA, 15 bp, Homo sapiens
tgggatgaaggctcg

SEQ ID NO: 599254 - DNA, 15 bp, Homo sapiens
gggatgaaggctcga

SEQ ID NO: 599255 - DNA, 15 bp, Homo sapiens
ggatgaaggctcgaa

SEQ ID NO: 599256 - DNA, 15 bp, Homo sapiens
gatgaaggctcgaag

SEQ ID NO: 599257 - DNA, 15 bp, Homo sapiens
atgaaggctcgaagg

SEQ ID NO: 599258 - DNA, 15 bp, Homo sapiens
tgaaggctcgaaggt

SEQ ID NO: 599259 - DNA, 15 bp, Homo sapiens
gaaggctcgaaggta

SEQ ID NO: 599260 - DNA, 15 bp, Homo sapiens
aaggctcgaaggtat

SEQ ID NO: 599261 - DNA, 15 bp, Homo sapiens
aggctcgaaggtatt

SEQ ID NO: 599262 - DNA, 15 bp, Homo sapiens
ggctcgaaggtattt

SEQ ID NO: 599263 - DNA, 15 bp, Homo sapiens
gctcgaaggtattta

SEQ ID NO: 599264 - DNA, 15 bp, Homo sapiens
ctcgaaggtatttag

SEQ ID NO: 599265 - DNA, 15 bp, Homo sapiens
tcgaaggtatttaga

SEQ ID NO: 599266 - DNA, 15 bp, Homo sapiens
cgaaggtatttagaa

SEQ ID NO: 599267 - DNA, 15 bp, Homo sapiens
gaaggtatttagaag

SEQ ID NO: 599268 - DNA, 15 bp, Homo sapiens
aaggtatttagaagc

SEQ ID NO: 599269 - DNA, 15 bp, Homo sapiens
aggtatttagaagcc

SEQ ID NO: 599270 - DNA, 15 bp, Homo sapiens
ggtatttagaagccc

SEQ ID NO: 599271 - DNA, 15 bp, Homo sapiens
gtatttagaagccct

SEQ ID NO: 599272 - DNA, 15 bp, Homo sapiens
tatttagaagccctg

SEQ ID NO: 599273 - DNA, 15 bp, Homo sapiens
atttagaagccctga

SEQ ID NO: 599274 - DNA, 15 bp, Homo sapiens
tttagaagccctgat

SEQ ID NO: 599275 - DNA, 15 bp, Homo sapiens
ttagaagccctgatc

SEQ ID NO: 599276 - DNA, 15 bp, Homo sapiens
tagaagccctgatct

SEQ ID NO: 599277 - DNA, 15 bp, Homo sapiens
agaagccctgatctg

SEQ ID NO: 599278 - DNA, 15 bp, Homo sapiens
gaagccctgatctgg

SEQ ID NO: 599279 - DNA, 15 bp, Homo sapiens
aagccctgatctggt

SEQ ID NO: 599280 - DNA, 15 bp, Homo sapiens
agccctgatctggtg

SEQ ID NO: 599281 - DNA, 15 bp, Homo sapiens
gccctgatctggtgt

SEQ ID NO: 599282 - DNA, 15 bp, Homo sapiens
ccctgatctggtgta

SEQ ID NO: 599283 - DNA, 15 bp, Homo sapiens
cctgatctggtgtag

SEQ ID NO: 599284 - DNA, 15 bp, Homo sapiens
ctgatctggtgtagg

SEQ ID NO: 599285 - DNA, 15 bp, Homo sapiens
tgatctggtgtaggg

SEQ ID NO: 599286 - DNA, 15 bp, Homo sapiens
gatctggtgtaggga

SEQ ID NO: 599287 - DNA, 15 bp, Homo sapiens
atctggtgtagggag

SEQ ID NO: 599288 - DNA, 15 bp, Homo sapiens
tctggtgtagggagg

SEQ ID NO: 599289 - DNA, 15 bp, Homo sapiens
ctggtgtagggaggg

SEQ ID NO: 599290 - DNA, 15 bp, Homo sapiens
tggtgtagggagggg

SEQ ID NO: 599291 - DNA, 15 bp, Homo sapiens
ggtgtagggagggga

SEQ ID NO: 599292 - DNA, 15 bp, Homo sapiens
gtgtagggaggggac

SEQ ID NO: 599293 - DNA, 15 bp, Homo sapiens
tgtagggaggggaca

SEQ ID NO: 599294 - DNA, 15 bp, Homo sapiens
gtagggaggggacaa

SEQ ID NO: 599295 - DNA, 15 bp, Homo sapiens
tagggaggggacaag

SEQ ID NO: 599296 - DNA, 15 bp, Homo sapiens
agggaggggacaaga

SEQ ID NO: 599297 - DNA, 15 bp, Homo sapiens
gggaggggacaagat

SEQ ID NO: 599298 - DNA, 15 bp, Homo sapiens
ggaggggacaagata

SEQ ID NO: 599299 - DNA, 15 bp, Homo sapiens
gaggggacaagatac

SEQ ID NO: 599300 - DNA, 15 bp, Homo sapiens
aggggacaagatact

SEQ ID NO: 599301 - DNA, 15 bp, Homo sapiens
ggggacaagatactc

SEQ ID NO: 599302 - DNA, 15 bp, Homo sapiens
gggacaagatactct

SEQ ID NO: 599303 - DNA, 15 bp, Homo sapiens
ggacaagatactctt

SEQ ID NO: 599304 - DNA, 15 bp, Homo sapiens
gacaagatactctta

SEQ ID NO: 599305 - DNA, 15 bp, Homo sapiens
acaagatactcttac

SEQ ID NO: 599306 - DNA, 15 bp, Homo sapiens
caagatactcttact

SEQ ID NO: 599307 - DNA, 15 bp, Homo sapiens
aagatactcttactg

SEQ ID NO: 599308 - DNA, 15 bp, Homo sapiens
agatactcttactgt

SEQ ID NO: 599309 - DNA, 15 bp, Homo sapiens
gatactcttactgtc

SEQ ID NO: 599310 - DNA, 15 bp, Homo sapiens
atactcttactgtca

SEQ ID NO: 599311 - DNA, 15 bp, Homo sapiens
tactcttactgtcag

SEQ ID NO: 599312 - DNA, 15 bp, Homo sapiens
actcttactgtcagg

SEQ ID NO: 599313 - DNA, 15 bp, Homo sapiens
ctcttactgtcagga

SEQ ID NO: 599314 - DNA, 15 bp, Homo sapiens
tcttactgtcaggaa

SEQ ID NO: 599315 - DNA, 15 bp, Homo sapiens
cttactgtcaggaat

SEQ ID NO: 599316 - DNA, 15 bp, Homo sapiens
ttactgtcaggaatc

SEQ ID NO: 599317 - DNA, 15 bp, Homo sapiens
tactgtcaggaatcc

SEQ ID NO: 599318 - DNA, 15 bp, Homo sapiens
actgtcaggaatccc

SEQ ID NO: 599319 - DNA, 15 bp, Homo sapiens
ctgtcaggaatccct

SEQ ID NO: 599320 - DNA, 15 bp, Homo sapiens
tgtcaggaatccctc

SEQ ID NO: 599321 - DNA, 15 bp, Homo sapiens
gtcaggaatccctca

SEQ ID NO: 599322 - DNA, 15 bp, Homo sapiens
tcaggaatccctcac

SEQ ID NO: 599323 - DNA, 15 bp, Homo sapiens
caggaatccctcacc

SEQ ID NO: 599324 - DNA, 15 bp, Homo sapiens
aggaatccctcacct

SEQ ID NO: 599325 - DNA, 15 bp, Homo sapiens
ggaatccctcaccta

SEQ ID NO: 599326 - DNA, 15 bp, Homo sapiens
gaatccctcacctaa

SEQ ID NO: 599327 - DNA, 15 bp, Homo sapiens
aatccctcacctaag

SEQ ID NO: 599328 - DNA, 15 bp, Homo sapiens
atccctcacctaagg

SEQ ID NO: 599329 - DNA, 15 bp, Homo sapiens
tccctcacctaaggg

SEQ ID NO: 599330 - DNA, 15 bp, Homo sapiens
ccctcacctaagggg

SEQ ID NO: 599331 - DNA, 15 bp, Homo sapiens
cctcacctaaggggg

SEQ ID NO: 599332 - DNA, 15 bp, Homo sapiens
ctcacctaaggggga

SEQ ID NO: 599333 - DNA, 15 bp, Homo sapiens
tcacctaagggggag

SEQ ID NO: 599334 - DNA, 15 bp, Homo sapiens
cacctaagggggagc

SEQ ID NO: 599335 - DNA, 15 bp, Homo sapiens
acctaagggggagcc

SEQ ID NO: 599336 - DNA, 15 bp, Homo sapiens
cctaagggggagcca

SEQ ID NO: 599337 - DNA, 15 bp, Homo sapiens
ctaagggggagccac

SEQ ID NO: 599338 - DNA, 15 bp, Homo sapiens
taagggggagccaca

SEQ ID NO: 599339 - DNA, 15 bp, Homo sapiens
aagggggagccacag

SEQ ID NO: 599340 - DNA, 15 bp, Homo sapiens
agggggagccacagc

SEQ ID NO: 599341 - DNA, 15 bp, Homo sapiens
gggggagccacagcc

SEQ ID NO: 599342 - DNA, 15 bp, Homo sapiens
ggggagccacagccc

SEQ ID NO: 599343 - DNA, 15 bp, Homo sapiens
gggagccacagcccc

SEQ ID NO: 599344 - DNA, 15 bp, Homo sapiens
ggagccacagcccca

SEQ ID NO: 599345 - DNA, 15 bp, Homo sapiens
gagccacagccccat

SEQ ID NO: 599346 - DNA, 15 bp, Homo sapiens
agccacagccccatc

SEQ ID NO: 599347 - DNA, 15 bp, Homo sapiens
gccacagccccatcc

SEQ ID NO: 599348 - DNA, 15 bp, Homo sapiens
ccacagccccatcct

SEQ ID NO: 599349 - DNA, 15 bp, Homo sapiens
cacagccccatcctc

SEQ ID NO: 599350 - DNA, 15 bp, Homo sapiens
acagccccatcctca

SEQ ID NO: 599351 - DNA, 15 bp, Homo sapiens
cagccccatcctcag

SEQ ID NO: 599352 - DNA, 15 bp, Homo sapiens
agccccatcctcagg

SEQ ID NO: 599353 - DNA, 15 bp, Homo sapiens
gccccatcctcagga

SEQ ID NO: 599354 - DNA, 15 bp, Homo sapiens
ccccatcctcaggaa

SEQ ID NO: 599355 - DNA, 15 bp, Homo sapiens
cccatcctcaggaag

SEQ ID NO: 599356 - DNA, 15 bp, Homo sapiens
ccatcctcaggaagc

SEQ ID NO: 599357 - DNA, 15 bp, Homo sapiens
catcctcaggaagct

SEQ ID NO: 599358 - DNA, 15 bp, Homo sapiens
atcctcaggaagctc

SEQ ID NO: 599359 - DNA, 15 bp, Homo sapiens
tcctcaggaagctcc

SEQ ID NO: 599360 - DNA, 15 bp, Homo sapiens
cctcaggaagctcca

SEQ ID NO: 599361 - DNA, 15 bp, Homo sapiens
ctcaggaagctccag

SEQ ID NO: 599362 - DNA, 15 bp, Homo sapiens
tcaggaagctccagt

SEQ ID NO: 599363 - DNA, 15 bp, Homo sapiens
caggaagctccagtc

SEQ ID NO: 599364 - DNA, 15 bp, Homo sapiens
aggaagctccagtct

SEQ ID NO: 599365 - DNA, 15 bp, Homo sapiens
ggaagctccagtctg

SEQ ID NO: 599366 - DNA, 15 bp, Homo sapiens
gaagctccagtctga

SEQ ID NO: 599367 - DNA, 15 bp, Homo sapiens
aagctccagtctgag

SEQ ID NO: 599368 - DNA, 15 bp, Homo sapiens
agctccagtctgagg

SEQ ID NO: 599369 - DNA, 15 bp, Homo sapiens
gctccagtctgaggg

SEQ ID NO: 599370 - DNA, 15 bp, Homo sapiens
ctccagtctgagggg

SEQ ID NO: 599371 - DNA, 15 bp, Homo sapiens
tccagtctgagggga

SEQ ID NO: 599372 - DNA, 15 bp, Homo sapiens
ccagtctgaggggag

SEQ ID NO: 599373 - DNA, 15 bp, Homo sapiens
cagtctgaggggaga

SEQ ID NO: 599374 - DNA, 15 bp, Homo sapiens
agtctgaggggagac

SEQ ID NO: 599375 - DNA, 15 bp, Homo sapiens
gtctgaggggagaca

SEQ ID NO: 599376 - DNA, 15 bp, Homo sapiens
tctgaggggagacac

SEQ ID NO: 599377 - DNA, 15 bp, Homo sapiens
ctgaggggagacaca

SEQ ID NO: 599378 - DNA, 15 bp, Homo sapiens
tgaggggagacacag

SEQ ID NO: 599379 - DNA, 15 bp, Homo sapiens
gaggggagacacagc

SEQ ID NO: 599380 - DNA, 15 bp, Homo sapiens
aggggagacacagcc

SEQ ID NO: 599381 - DNA, 15 bp, Homo sapiens
ggggagacacagccc

SEQ ID NO: 599382 - DNA, 15 bp, Homo sapiens
gggagacacagcccc

SEQ ID NO: 599383 - DNA, 15 bp, Homo sapiens
ggagacacagccccg

SEQ ID NO: 599384 - DNA, 15 bp, Homo sapiens
gagacacagccccgt

SEQ ID NO: 599385 - DNA, 15 bp, Homo sapiens
agacacagccccgtc

SEQ ID NO: 599386 - DNA, 15 bp, Homo sapiens
gacacagccccgtcc

SEQ ID NO: 599387 - DNA, 15 bp, Homo sapiens
acacagccccgtcct

SEQ ID NO: 599388 - DNA, 15 bp, Homo sapiens
cacagccccgtcctc

SEQ ID NO: 599389 - DNA, 15 bp, Homo sapiens
acagccccgtcctca

SEQ ID NO: 599390 - DNA, 15 bp, Homo sapiens
cagccccgtcctcag

SEQ ID NO: 599391 - DNA, 15 bp, Homo sapiens
agccccgtcctcagg

SEQ ID NO: 599392 - DNA, 15 bp, Homo sapiens
gccccgtcctcaggg

SEQ ID NO: 599393 - DNA, 15 bp, Homo sapiens
ccccgtcctcaggga

SEQ ID NO: 599394 - DNA, 15 bp, Homo sapiens
cccgtcctcagggag

SEQ ID NO: 599395 - DNA, 15 bp, Homo sapiens
ccgtcctcagggagc

SEQ ID NO: 599396 - DNA, 15 bp, Homo sapiens
cgtcctcagggagcc

SEQ ID NO: 599397 - DNA, 15 bp, Homo sapiens
gtcctcagggagccc

SEQ ID NO: 599398 - DNA, 15 bp, Homo sapiens
tcctcagggagcccc

SEQ ID NO: 599399 - DNA, 15 bp, Homo sapiens
cctcagggagcccca

SEQ ID NO: 599400 - DNA, 15 bp, Homo sapiens
ctcagggagccccag

SEQ ID NO: 599401 - DNA, 15 bp, Homo sapiens
tcagggagccccagt

SEQ ID NO: 599402 - DNA, 15 bp, Homo sapiens
cagggagccccagtc

SEQ ID NO: 599403 - DNA, 15 bp, Homo sapiens
agggagccccagtct

SEQ ID NO: 599404 - DNA, 15 bp, Homo sapiens
gggagccccagtctg

SEQ ID NO: 599405 - DNA, 15 bp, Homo sapiens
ggagccccagtctga

SEQ ID NO: 599406 - DNA, 15 bp, Homo sapiens
gagccccagtctgaa

SEQ ID NO: 599407 - DNA, 15 bp, Homo sapiens
agccccagtctgaat

SEQ ID NO: 599408 - DNA, 15 bp, Homo sapiens
gccccagtctgaata

SEQ ID NO: 599409 - DNA, 15 bp, Homo sapiens
ccccagtctgaatat

SEQ ID NO: 599410 - DNA, 15 bp, Homo sapiens
cccagtctgaatata

SEQ ID NO: 599411 - DNA, 15 bp, Homo sapiens
ccagtctgaatatag

SEQ ID NO: 599412 - DNA, 15 bp, Homo sapiens
cagtctgaatatagt

SEQ ID NO: 599413 - DNA, 15 bp, Homo sapiens
agtctgaatatagtt

SEQ ID NO: 599414 - DNA, 15 bp, Homo sapiens
gtctgaatatagttt

SEQ ID NO: 599415 - DNA, 15 bp, Homo sapiens
tctgaatatagtttt

SEQ ID NO: 599416 - DNA, 15 bp, Homo sapiens
ctgaatatagtttta

SEQ ID NO: 599417 - DNA, 15 bp, Homo sapiens
tgaatatagttttat

SEQ ID NO: 599418 - DNA, 15 bp, Homo sapiens
gaatatagttttatg

SEQ ID NO: 599419 - DNA, 15 bp, Homo sapiens
aatatagttttatgt

SEQ ID NO: 599420 - DNA, 15 bp, Homo sapiens
atatagttttatgtc

SEQ ID NO: 599421 - DNA, 15 bp, Homo sapiens
tatagttttatgtcc

SEQ ID NO: 599422 - DNA, 15 bp, Homo sapiens
atagttttatgtcca

SEQ ID NO: 599423 - DNA, 15 bp, Homo sapiens
tagttttatgtccac

SEQ ID NO: 599424 - DNA, 15 bp, Homo sapiens
agttttatgtccaca

SEQ ID NO: 599425 - DNA, 15 bp, Homo sapiens
gttttatgtccacag

SEQ ID NO: 599426 - DNA, 15 bp, Homo sapiens
ttttatgtccacagc

SEQ ID NO: 599427 - DNA, 15 bp, Homo sapiens
tttatgtccacagct

SEQ ID NO: 599428 - DNA, 15 bp, Homo sapiens
ttatgtccacagctc

SEQ ID NO: 599429 - DNA, 15 bp, Homo sapiens
tatgtccacagctct

SEQ ID NO: 599430 - DNA, 15 bp, Homo sapiens
atgtccacagctctg

SEQ ID NO: 599431 - DNA, 15 bp, Homo sapiens
tgtccacagctctgc

SEQ ID NO: 599432 - DNA, 15 bp, Homo sapiens
gtccacagctctgct

SEQ ID NO: 599433 - DNA, 15 bp, Homo sapiens
tccacagctctgctc

SEQ ID NO: 599434 - DNA, 15 bp, Homo sapiens
ccacagctctgctca

SEQ ID NO: 599435 - DNA, 15 bp, Homo sapiens
cacagctctgctcag

SEQ ID NO: 599436 - DNA, 15 bp, Homo sapiens
acagctctgctcaga

SEQ ID NO: 599437 - DNA, 15 bp, Homo sapiens
cagctctgctcagag

SEQ ID NO: 599438 - DNA, 15 bp, Homo sapiens
agctctgctcagagt

SEQ ID NO: 599439 - DNA, 15 bp, Homo sapiens
gctctgctcagagta

SEQ ID NO: 599440 - DNA, 15 bp, Homo sapiens
ctctgctcagagtag

SEQ ID NO: 599441 - DNA, 15 bp, Homo sapiens
tctgctcagagtagg

SEQ ID NO: 599442 - DNA, 15 bp, Homo sapiens
ctgctcagagtaggt

SEQ ID NO: 599443 - DNA, 15 bp, Homo sapiens
tgctcagagtaggtg

SEQ ID NO: 599444 - DNA, 15 bp, Homo sapiens
gctcagagtaggtga

SEQ ID NO: 599445 - DNA, 15 bp, Homo sapiens
ctcagagtaggtgac

SEQ ID NO: 599446 - DNA, 15 bp, Homo sapiens
tcagagtaggtgaca

SEQ ID NO: 599447 - DNA, 15 bp, Homo sapiens
cagagtaggtgacag

SEQ ID NO: 599448 - DNA, 15 bp, Homo sapiens
agagtaggtgacagc

SEQ ID NO: 599449 - DNA, 15 bp, Homo sapiens
gagtaggtgacagcg

SEQ ID NO: 599450 - DNA, 15 bp, Homo sapiens
agtaggtgacagcgc

SEQ ID NO: 599451 - DNA, 15 bp, Homo sapiens
gtaggtgacagcgct

SEQ ID NO: 599452 - DNA, 15 bp, Homo sapiens
taggtgacagcgctg

SEQ ID NO: 599453 - DNA, 15 bp, Homo sapiens
aggtgacagcgctgc

SEQ ID NO: 599454 - DNA, 15 bp, Homo sapiens
ggtgacagcgctgcc

SEQ ID NO: 599455 - DNA, 15 bp, Homo sapiens
gtgacagcgctgccc

SEQ ID NO: 599456 - DNA, 15 bp, Homo sapiens
tgacagcgctgccct

SEQ ID NO: 599457 - DNA, 15 bp, Homo sapiens
gacagcgctgccctg

SEQ ID NO: 599458 - DNA, 15 bp, Homo sapiens
acagcgctgccctgg

SEQ ID NO: 599459 - DNA, 15 bp, Homo sapiens
cagcgctgccctggg

SEQ ID NO: 599460 - DNA, 15 bp, Homo sapiens
agcgctgccctgggg

SEQ ID NO: 599461 - DNA, 15 bp, Homo sapiens
gcgctgccctggggt

SEQ ID NO: 599462 - DNA, 15 bp, Homo sapiens
cgctgccctggggtg

SEQ ID NO: 599463 - DNA, 15 bp, Homo sapiens
gctgccctggggtgc

SEQ ID NO: 599464 - DNA, 15 bp, Homo sapiens
ctgccctggggtgca

SEQ ID NO: 599465 - DNA, 15 bp, Homo sapiens
tgccctggggtgcag

SEQ ID NO: 599466 - DNA, 15 bp, Homo sapiens
gccctggggtgcagg

SEQ ID NO: 599467 - DNA, 15 bp, Homo sapiens
ccctggggtgcagga

SEQ ID NO: 599468 - DNA, 15 bp, Homo sapiens
cctggggtgcaggag

SEQ ID NO: 599469 - DNA, 15 bp, Homo sapiens
ctggggtgcaggagg

SEQ ID NO: 599470 - DNA, 15 bp, Homo sapiens
tggggtgcaggaggc

SEQ ID NO: 599471 - DNA, 15 bp, Homo sapiens
ggggtgcaggaggcc

SEQ ID NO: 599472 - DNA, 15 bp, Homo sapiens
gggtgcaggaggcca

SEQ ID NO: 599473 - DNA, 15 bp, Homo sapiens
ggtgcaggaggccag

SEQ ID NO: 599474 - DNA, 15 bp, Homo sapiens
gtgcaggaggccaga

SEQ ID NO: 599475 - DNA, 15 bp, Homo sapiens
tgcaggaggccagat

SEQ ID NO: 599476 - DNA, 15 bp, Homo sapiens
gcaggaggccagatt

SEQ ID NO: 599477 - DNA, 15 bp, Homo sapiens
caggaggccagattg

SEQ ID NO: 599478 - DNA, 15 bp, Homo sapiens
aggaggccagattgg

SEQ ID NO: 599479 - DNA, 15 bp, Homo sapiens
ggaggccagattggc

SEQ ID NO: 599480 - DNA, 15 bp, Homo sapiens
gaggccagattggcc

SEQ ID NO: 599481 - DNA, 15 bp, Homo sapiens
aggccagattggcct

SEQ ID NO: 599482 - DNA, 15 bp, Homo sapiens
ggccagattggcctt

SEQ ID NO: 599483 - DNA, 15 bp, Homo sapiens
gccagattggccttc

SEQ ID NO: 599484 - DNA, 15 bp, Homo sapiens
ccagattggccttca

SEQ ID NO: 599485 - DNA, 15 bp, Homo sapiens
cagattggccttcat

SEQ ID NO: 599486 - DNA, 15 bp, Homo sapiens
agattggccttcatg

SEQ ID NO: 599487 - DNA, 15 bp, Homo sapiens
gattggccttcatgg

SEQ ID NO: 599488 - DNA, 15 bp, Homo sapiens
attggccttcatggc

SEQ ID NO: 599489 - DNA, 15 bp, Homo sapiens
ttggccttcatggcg

SEQ ID NO: 599490 - DNA, 15 bp, Homo sapiens
tggccttcatggcgc

SEQ ID NO: 599491 - DNA, 15 bp, Homo sapiens
ggccttcatggcgct

SEQ ID NO: 599492 - DNA, 15 bp, Homo sapiens
gccttcatggcgctg

SEQ ID NO: 599493 - DNA, 15 bp, Homo sapiens
ccttcatggcgctgt

SEQ ID NO: 599494 - DNA, 15 bp, Homo sapiens
cttcatggcgctgtc

SEQ ID NO: 599495 - DNA, 15 bp, Homo sapiens
ttcatggcgctgtcg

SEQ ID NO: 599496 - DNA, 15 bp, Homo sapiens
tcatggcgctgtcgt

SEQ ID NO: 599497 - DNA, 15 bp, Homo sapiens
catggcgctgtcgtt

SEQ ID NO: 599498 - DNA, 15 bp, Homo sapiens
atggcgctgtcgtta

SEQ ID NO: 599499 - DNA, 15 bp, Homo sapiens
tggcgctgtcgttaa

SEQ ID NO: 599500 - DNA, 15 bp, Homo sapiens
ggcgctgtcgttaac

SEQ ID NO: 599501 - DNA, 15 bp, Homo sapiens
gcgctgtcgttaacc

SEQ ID NO: 599502 - DNA, 15 bp, Homo sapiens
cgctgtcgttaaccc

SEQ ID NO: 599503 - DNA, 15 bp, Homo sapiens
gctgtcgttaacccc

SEQ ID NO: 599504 - DNA, 15 bp, Homo sapiens
ctgtcgttaacccct

SEQ ID NO: 599505 - DNA, 15 bp, Homo sapiens
tgtcgttaacccctc

SEQ ID NO: 599506 - DNA, 15 bp, Homo sapiens
gtcgttaacccctcc

SEQ ID NO: 599507 - DNA, 15 bp, Homo sapiens
tcgttaacccctccc

SEQ ID NO: 599508 - DNA, 15 bp, Homo sapiens
cgttaacccctcccc

SEQ ID NO: 599509 - DNA, 15 bp, Homo sapiens
gttaacccctccccc

SEQ ID NO: 599510 - DNA, 15 bp, Homo sapiens
ttaacccctcccccc

SEQ ID NO: 599511 - DNA, 15 bp, Homo sapiens
taacccctccccccg

SEQ ID NO: 599512 - DNA, 15 bp, Homo sapiens
aacccctccccccgc

SEQ ID NO: 599513 - DNA, 15 bp, Homo sapiens
acccctccccccgcc

SEQ ID NO: 599514 - DNA, 15 bp, Homo sapiens
cccctccccccgcct

SEQ ID NO: 599515 - DNA, 15 bp, Homo sapiens
ccctccccccgcctc

SEQ ID NO: 599516 - DNA, 15 bp, Homo sapiens
cctccccccgcctct

SEQ ID NO: 599517 - DNA, 15 bp, Homo sapiens
ctccccccgcctctg

SEQ ID NO: 599518 - DNA, 15 bp, Homo sapiens
tccccccgcctctgg

SEQ ID NO: 599519 - DNA, 15 bp, Homo sapiens
ccccccgcctctggg

SEQ ID NO: 599520 - DNA, 15 bp, Homo sapiens
cccccgcctctggga

SEQ ID NO: 599521 - DNA, 15 bp, Homo sapiens
ccccgcctctgggaa

SEQ ID NO: 599522 - DNA, 15 bp, Homo sapiens
cccgcctctgggaag

SEQ ID NO: 599523 - DNA, 15 bp, Homo sapiens
ccgcctctgggaaga

SEQ ID NO: 599524 - DNA, 15 bp, Homo sapiens
cgcctctgggaagaa

SEQ ID NO: 599525 - DNA, 15 bp, Homo sapiens
gcctctgggaagaac

SEQ ID NO: 599526 - DNA, 15 bp, Homo sapiens
cctctgggaagaact

SEQ ID NO: 599527 - DNA, 15 bp, Homo sapiens
ctctgggaagaactg

SEQ ID NO: 599528 - DNA, 15 bp, Homo sapiens
tctgggaagaactgg

SEQ ID NO: 599529 - DNA, 15 bp, Homo sapiens
ctgggaagaactggc

SEQ ID NO: 599530 - DNA, 15 bp, Homo sapiens
tgggaagaactggct

SEQ ID NO: 599531 - DNA, 15 bp, Homo sapiens
gggaagaactggctt

SEQ ID NO: 599532 - DNA, 15 bp, Homo sapiens
ggaagaactggcttc

SEQ ID NO: 599533 - DNA, 15 bp, Homo sapiens
gaagaactggcttcc

SEQ ID NO: 599534 - DNA, 15 bp, Homo sapiens
aagaactggcttcca

SEQ ID NO: 599535 - DNA, 15 bp, Homo sapiens
agaactggcttccat

SEQ ID NO: 599536 - DNA, 15 bp, Homo sapiens
gaactggcttccata

SEQ ID NO: 599537 - DNA, 15 bp, Homo sapiens
aactggcttccatac

SEQ ID NO: 599538 - DNA, 15 bp, Homo sapiens
actggcttccatacc

SEQ ID NO: 599539 - DNA, 15 bp, Homo sapiens
ctggcttccatacct

SEQ ID NO: 599540 - DNA, 15 bp, Homo sapiens
tggcttccatacctc

SEQ ID NO: 599541 - DNA, 15 bp, Homo sapiens
ggcttccatacctct

SEQ ID NO: 599542 - DNA, 15 bp, Homo sapiens
gcttccatacctctc

SEQ ID NO: 599543 - DNA, 15 bp, Homo sapiens
cttccatacctctct

SEQ ID NO: 599544 - DNA, 15 bp, Homo sapiens
ttccatacctctctg

SEQ ID NO: 599545 - DNA, 15 bp, Homo sapiens
tccatacctctctgc

SEQ ID NO: 599546 - DNA, 15 bp, Homo sapiens
ccatacctctctgcc

SEQ ID NO: 599547 - DNA, 15 bp, Homo sapiens
catacctctctgcct

SEQ ID NO: 599548 - DNA, 15 bp, Homo sapiens
atacctctctgcctg

SEQ ID NO: 599549 - DNA, 15 bp, Homo sapiens
tacctctctgcctgc

SEQ ID NO: 599550 - DNA, 15 bp, Homo sapiens
acctctctgcctgcc

SEQ ID NO: 599551 - DNA, 15 bp, Homo sapiens
cctctctgcctgccc

SEQ ID NO: 599552 - DNA, 15 bp, Homo sapiens
ctctctgcctgcccc

SEQ ID NO: 599553 - DNA, 15 bp, Homo sapiens
tctctgcctgcccca

SEQ ID NO: 599554 - DNA, 15 bp, Homo sapiens
ctctgcctgccccag

SEQ ID NO: 599555 - DNA, 15 bp, Homo sapiens
tctgcctgccccaga

SEQ ID NO: 599556 - DNA, 15 bp, Homo sapiens
ctgcctgccccagac

SEQ ID NO: 599557 - DNA, 15 bp, Homo sapiens
tgcctgccccagaca

SEQ ID NO: 599558 - DNA, 15 bp, Homo sapiens
gcctgccccagacac

SEQ ID NO: 599559 - DNA, 15 bp, Homo sapiens
cctgccccagacaca

SEQ ID NO: 599560 - DNA, 15 bp, Homo sapiens
ctgccccagacacac

SEQ ID NO: 599561 - DNA, 15 bp, Homo sapiens
tgccccagacacacc

SEQ ID NO: 599562 - DNA, 15 bp, Homo sapiens
gccccagacacacct

SEQ ID NO: 599563 - DNA, 15 bp, Homo sapiens
ccccagacacacctt

SEQ ID NO: 599564 - DNA, 15 bp, Homo sapiens
cccagacacaccttc

SEQ ID NO: 599565 - DNA, 15 bp, Homo sapiens
ccagacacaccttct

SEQ ID NO: 599566 - DNA, 15 bp, Homo sapiens
cagacacaccttctg

SEQ ID NO: 599567 - DNA, 15 bp, Homo sapiens
agacacaccttctgc

SEQ ID NO: 599568 - DNA, 15 bp, Homo sapiens
gacacaccttctgcc

SEQ ID NO: 599569 - DNA, 15 bp, Homo sapiens
acacaccttctgccc

SEQ ID NO: 599570 - DNA, 15 bp, Homo sapiens
cacaccttctgcccc

SEQ ID NO: 599571 - DNA, 15 bp, Homo sapiens
acaccttctgcccca

SEQ ID NO: 599572 - DNA, 15 bp, Homo sapiens
caccttctgccccag

SEQ ID NO: 599573 - DNA, 15 bp, Homo sapiens
accttctgccccagt

SEQ ID NO: 599574 - DNA, 15 bp, Homo sapiens
ccttctgccccagtt

SEQ ID NO: 599575 - DNA, 15 bp, Homo sapiens
cttctgccccagttc

SEQ ID NO: 599576 - DNA, 15 bp, Homo sapiens
ttctgccccagttcc

SEQ ID NO: 599577 - DNA, 15 bp, Homo sapiens
tctgccccagttccc

SEQ ID NO: 599578 - DNA, 15 bp, Homo sapiens
ctgccccagttccca

SEQ ID NO: 599579 - DNA, 15 bp, Homo sapiens
tgccccagttcccag

SEQ ID NO: 599580 - DNA, 15 bp, Homo sapiens
gccccagttcccagc

SEQ ID NO: 599581 - DNA, 15 bp, Homo sapiens
ccccagttcccagca

SEQ ID NO: 599582 - DNA, 15 bp, Homo sapiens
cccagttcccagcag

SEQ ID NO: 599583 - DNA, 15 bp, Homo sapiens
ccagttcccagcagt

SEQ ID NO: 599584 - DNA, 15 bp, Homo sapiens
cagttcccagcagtg

SEQ ID NO: 599585 - DNA, 15 bp, Homo sapiens
agttcccagcagtga

SEQ ID NO: 599586 - DNA, 15 bp, Homo sapiens
gttcccagcagtgac

SEQ ID NO: 599587 - DNA, 15 bp, Homo sapiens
ttcccagcagtgacc

SEQ ID NO: 599588 - DNA, 15 bp, Homo sapiens
tcccagcagtgacct

SEQ ID NO: 599589 - DNA, 15 bp, Homo sapiens
cccagcagtgacctt

SEQ ID NO: 599590 - DNA, 15 bp, Homo sapiens
ccagcagtgaccttg

SEQ ID NO: 599591 - DNA, 15 bp, Homo sapiens
cagcagtgaccttgt

SEQ ID NO: 599592 - DNA, 15 bp, Homo sapiens
agcagtgaccttgtg

SEQ ID NO: 599593 - DNA, 15 bp, Homo sapiens
gcagtgaccttgtgt

SEQ ID NO: 599594 - DNA, 15 bp, Homo sapiens
cagtgaccttgtgtg

SEQ ID NO: 599595 - DNA, 15 bp, Homo sapiens
agtgaccttgtgtgt

SEQ ID NO: 599596 - DNA, 15 bp, Homo sapiens
gtgaccttgtgtgtg

SEQ ID NO: 599597 - DNA, 15 bp, Homo sapiens
tgaccttgtgtgtgg

SEQ ID NO: 599598 - DNA, 15 bp, Homo sapiens
gaccttgtgtgtggt

SEQ ID NO: 599599 - DNA, 15 bp, Homo sapiens
accttgtgtgtggtc

SEQ ID NO: 599600 - DNA, 15 bp, Homo sapiens
ccttgtgtgtggtct

SEQ ID NO: 599601 - DNA, 15 bp, Homo sapiens
cttgtgtgtggtctg

SEQ ID NO: 599602 - DNA, 15 bp, Homo sapiens
ttgtgtgtggtctgc

SEQ ID NO: 599603 - DNA, 15 bp, Homo sapiens
tgtgtgtggtctgct

SEQ ID NO: 599604 - DNA, 15 bp, Homo sapiens
gtgtgtggtctgctt

SEQ ID NO: 599605 - DNA, 15 bp, Homo sapiens
tgtgtggtctgcttt

SEQ ID NO: 599606 - DNA, 15 bp, Homo sapiens
gtgtggtctgctttc

SEQ ID NO: 599607 - DNA, 15 bp, Homo sapiens
tgtggtctgctttca

SEQ ID NO: 599608 - DNA, 15 bp, Homo sapiens
gtggtctgctttcat

SEQ ID NO: 599609 - DNA, 15 bp, Homo sapiens
tggtctgctttcatt

SEQ ID NO: 599610 - DNA, 15 bp, Homo sapiens
ggtctgctttcattc

SEQ ID NO: 599611 - DNA, 15 bp, Homo sapiens
gtctgctttcattct

SEQ ID NO: 599612 - DNA, 15 bp, Homo sapiens
tctgctttcattcta

SEQ ID NO: 599613 - DNA, 15 bp, Homo sapiens
ctgctttcattctag

SEQ ID NO: 599614 - DNA, 15 bp, Homo sapiens
tgctttcattctaga

SEQ ID NO: 599615 - DNA, 15 bp, Homo sapiens
gctttcattctagaa

SEQ ID NO: 599616 - DNA, 15 bp, Homo sapiens
ctttcattctagaaa

SEQ ID NO: 599617 - DNA, 15 bp, Homo sapiens
tttcattctagaaac

SEQ ID NO: 599618 - DNA, 15 bp, Homo sapiens
ttcattctagaaaca

SEQ ID NO: 599619 - DNA, 15 bp, Homo sapiens
tcattctagaaacag

SEQ ID NO: 599620 - DNA, 15 bp, Homo sapiens
cattctagaaacaga

SEQ ID NO: 599621 - DNA, 15 bp, Homo sapiens
attctagaaacagaa

SEQ ID NO: 599622 - DNA, 15 bp, Homo sapiens
ttctagaaacagaaa

SEQ ID NO: 599623 - DNA, 15 bp, Homo sapiens
tctagaaacagaaac

SEQ ID NO: 599624 - DNA, 15 bp, Homo sapiens
ctagaaacagaaacc

SEQ ID NO: 599625 - DNA, 15 bp, Homo sapiens
tagaaacagaaacca

SEQ ID NO: 599626 - DNA, 15 bp, Homo sapiens
agaaacagaaaccaa

SEQ ID NO: 599627 - DNA, 15 bp, Homo sapiens
gaaacagaaaccaag

SEQ ID NO: 599628 - DNA, 15 bp, Homo sapiens
aaacagaaaccaagg

SEQ ID NO: 599629 - DNA, 15 bp, Homo sapiens
aacagaaaccaaggg

SEQ ID NO: 599630 - DNA, 15 bp, Homo sapiens
acagaaaccaagggg

SEQ ID NO: 599631 - DNA, 15 bp, Homo sapiens
cagaaaccaaggggg

SEQ ID NO: 599632 - DNA, 15 bp, Homo sapiens
agaaaccaaggggga

SEQ ID NO: 599633 - DNA, 15 bp, Homo sapiens
gaaaccaagggggat

SEQ ID NO: 599634 - DNA, 15 bp, Homo sapiens
aaaccaagggggatt

SEQ ID NO: 599635 - DNA, 15 bp, Homo sapiens
aaccaagggggattt

SEQ ID NO: 599636 - DNA, 15 bp, Homo sapiens
accaagggggatttc

SEQ ID NO: 599637 - DNA, 15 bp, Homo sapiens
ccaagggggatttct

SEQ ID NO: 599638 - DNA, 15 bp, Homo sapiens
caagggggatttctc

SEQ ID NO: 599639 - DNA, 15 bp, Homo sapiens
aagggggatttctcc

SEQ ID NO: 599640 - DNA, 15 bp, Homo sapiens
agggggatttctccg

SEQ ID NO: 599641 - DNA, 15 bp, Homo sapiens
gggggatttctccgt

SEQ ID NO: 599642 - DNA, 15 bp, Homo sapiens
ggggatttctccgtc

SEQ ID NO: 599643 - DNA, 15 bp, Homo sapiens
gggatttctccgtct

SEQ ID NO: 599644 - DNA, 15 bp, Homo sapiens
ggatttctccgtctc

SEQ ID NO: 599645 - DNA, 15 bp, Homo sapiens
gatttctccgtctct

SEQ ID NO: 599646 - DNA, 15 bp, Homo sapiens
atttctccgtctctc

SEQ ID NO: 599647 - DNA, 15 bp, Homo sapiens
tttctccgtctctct

SEQ ID NO: 599648 - DNA, 15 bp, Homo sapiens
ttctccgtctctctg

SEQ ID NO: 599649 - DNA, 15 bp, Homo sapiens
tctccgtctctctgc

SEQ ID NO: 599650 - DNA, 15 bp, Homo sapiens
ctccgtctctctgcc

SEQ ID NO: 599651 - DNA, 15 bp, Homo sapiens
tccgtctctctgccc

SEQ ID NO: 599652 - DNA, 15 bp, Homo sapiens
ccgtctctctgccct

SEQ ID NO: 599653 - DNA, 15 bp, Homo sapiens
cgtctctctgccctc

SEQ ID NO: 599654 - DNA, 15 bp, Homo sapiens
gtctctctgccctcc

SEQ ID NO: 599655 - DNA, 15 bp, Homo sapiens
tctctctgccctcca

SEQ ID NO: 599656 - DNA, 15 bp, Homo sapiens
ctctctgccctccac

SEQ ID NO: 599657 - DNA, 15 bp, Homo sapiens
tctctgccctccacc

SEQ ID NO: 599658 - DNA, 15 bp, Homo sapiens
ctctgccctccaccc

SEQ ID NO: 599659 - DNA, 15 bp, Homo sapiens
tctgccctccacccc

SEQ ID NO: 599660 - DNA, 15 bp, Homo sapiens
ctgccctccaccccc

SEQ ID NO: 599661 - DNA, 15 bp, Homo sapiens
tgccctccaccccca

SEQ ID NO: 599662 - DNA, 15 bp, Homo sapiens
gccctccacccccag

SEQ ID NO: 599663 - DNA, 15 bp, Homo sapiens
ccctccacccccagc

SEQ ID NO: 599664 - DNA, 15 bp, Homo sapiens
cctccacccccagca

SEQ ID NO: 599665 - DNA, 15 bp, Homo sapiens
ctccacccccagcag

SEQ ID NO: 599666 - DNA, 15 bp, Homo sapiens
tccacccccagcagc

SEQ ID NO: 599667 - DNA, 15 bp, Homo sapiens
ccacccccagcagct

SEQ ID NO: 599668 - DNA, 15 bp, Homo sapiens
cacccccagcagctg

SEQ ID NO: 599669 - DNA, 15 bp, Homo sapiens
acccccagcagctgc

SEQ ID NO: 599670 - DNA, 15 bp, Homo sapiens
cccccagcagctgct

SEQ ID NO: 599671 - DNA, 15 bp, Homo sapiens
ccccagcagctgctg

SEQ ID NO: 599672 - DNA, 15 bp, Homo sapiens
cccagcagctgctgc

SEQ ID NO: 599673 - DNA, 15 bp, Homo sapiens
ccagcagctgctgca

SEQ ID NO: 599674 - DNA, 15 bp, Homo sapiens
cagcagctgctgcat

SEQ ID NO: 599675 - DNA, 15 bp, Homo sapiens
agcagctgctgcatt

SEQ ID NO: 599676 - DNA, 15 bp, Homo sapiens
gcagctgctgcattt

SEQ ID NO: 599677 - DNA, 15 bp, Homo sapiens
cagctgctgcattta

SEQ ID NO: 599678 - DNA, 15 bp, Homo sapiens
agctgctgcatttag

SEQ ID NO: 599679 - DNA, 15 bp, Homo sapiens
gctgctgcatttagg

SEQ ID NO: 599680 - DNA, 15 bp, Homo sapiens
ctgctgcatttaggg

SEQ ID NO: 599681 - DNA, 15 bp, Homo sapiens
tgctgcatttagggg

SEQ ID NO: 599682 - DNA, 15 bp, Homo sapiens
gctgcatttaggggc

SEQ ID NO: 599683 - DNA, 15 bp, Homo sapiens
ctgcatttaggggca

SEQ ID NO: 599684 - DNA, 15 bp, Homo sapiens
tgcatttaggggcag

SEQ ID NO: 599685 - DNA, 15 bp, Homo sapiens
gcatttaggggcagc

SEQ ID NO: 599686 - DNA, 15 bp, Homo sapiens
catttaggggcagca

SEQ ID NO: 599687 - DNA, 15 bp, Homo sapiens
atttaggggcagcat

SEQ ID NO: 599688 - DNA, 15 bp, Homo sapiens
tttaggggcagcatg

SEQ ID NO: 599689 - DNA, 15 bp, Homo sapiens
ttaggggcagcatgg

SEQ ID NO: 599690 - DNA, 15 bp, Homo sapiens
taggggcagcatgga

SEQ ID NO: 599691 - DNA, 15 bp, Homo sapiens
aggggcagcatggaa

SEQ ID NO: 599692 - DNA, 15 bp, Homo sapiens
ggggcagcatggaag

SEQ ID NO: 599693 - DNA, 15 bp, Homo sapiens
gggcagcatggaaga

SEQ ID NO: 599694 - DNA, 15 bp, Homo sapiens
ggcagcatggaagag

SEQ ID NO: 599695 - DNA, 15 bp, Homo sapiens
gcagcatggaagagc

SEQ ID NO: 599696 - DNA, 15 bp, Homo sapiens
cagcatggaagagcc

SEQ ID NO: 599697 - DNA, 15 bp, Homo sapiens
agcatggaagagccc

SEQ ID NO: 599698 - DNA, 15 bp, Homo sapiens
gcatggaagagccct

SEQ ID NO: 599699 - DNA, 15 bp, Homo sapiens
catggaagagccctt

SEQ ID NO: 599700 - DNA, 15 bp, Homo sapiens
atggaagagcccttt

SEQ ID NO: 599701 - DNA, 15 bp, Homo sapiens
tggaagagcccttta

SEQ ID NO: 599702 - DNA, 15 bp, Homo sapiens
ggaagagccctttac

SEQ ID NO: 599703 - DNA, 15 bp, Homo sapiens
gaagagccctttacc

SEQ ID NO: 599704 - DNA, 15 bp, Homo sapiens
aagagccctttaccc

SEQ ID NO: 599705 - DNA, 15 bp, Homo sapiens
agagccctttacccg

SEQ ID NO: 599706 - DNA, 15 bp, Homo sapiens
gagccctttacccgg

SEQ ID NO: 599707 - DNA, 15 bp, Homo sapiens
agccctttacccgga

SEQ ID NO: 599708 - DNA, 15 bp, Homo sapiens
gccctttacccggag

SEQ ID NO: 599709 - DNA, 15 bp, Homo sapiens
ccctttacccggaga

SEQ ID NO: 599710 - DNA, 15 bp, Homo sapiens
cctttacccggagaa

SEQ ID NO: 599711 - DNA, 15 bp, Homo sapiens
ctttacccggagaag

SEQ ID NO: 599712 - DNA, 15 bp, Homo sapiens
tttacccggagaaga

SEQ ID NO: 599713 - DNA, 15 bp, Homo sapiens
ttacccggagaagag

SEQ ID NO: 599714 - DNA, 15 bp, Homo sapiens
tacccggagaagagg

SEQ ID NO: 599715 - DNA, 15 bp, Homo sapiens
acccggagaagaggg

SEQ ID NO: 599716 - DNA, 15 bp, Homo sapiens
cccggagaagaggga

SEQ ID NO: 599717 - DNA, 15 bp, Homo sapiens
ccggagaagagggaa

SEQ ID NO: 599718 - DNA, 15 bp, Homo sapiens
cggagaagagggaag

SEQ ID NO: 599719 - DNA, 15 bp, Homo sapiens
ggagaagagggaaga

SEQ ID NO: 599720 - DNA, 15 bp, Homo sapiens
gagaagagggaagaa

SEQ ID NO: 599721 - DNA, 15 bp, Homo sapiens
agaagagggaagaag

SEQ ID NO: 599722 - DNA, 15 bp, Homo sapiens
gaagagggaagaagt

SEQ ID NO: 599723 - DNA, 15 bp, Homo sapiens
aagagggaagaagtg

SEQ ID NO: 599724 - DNA, 15 bp, Homo sapiens
agagggaagaagtga

SEQ ID NO: 599725 - DNA, 15 bp, Homo sapiens
gagggaagaagtgag

SEQ ID NO: 599726 - DNA, 15 bp, Homo sapiens
agggaagaagtgaga

SEQ ID NO: 599727 - DNA, 15 bp, Homo sapiens
gggaagaagtgagaa

SEQ ID NO: 599728 - DNA, 15 bp, Homo sapiens
ggaagaagtgagaag

SEQ ID NO: 599729 - DNA, 15 bp, Homo sapiens
gaagaagtgagaagg

SEQ ID NO: 599730 - DNA, 15 bp, Homo sapiens
aagaagtgagaaggg

SEQ ID NO: 599731 - DNA, 15 bp, Homo sapiens
agaagtgagaaggga

SEQ ID NO: 599732 - DNA, 15 bp, Homo sapiens
gaagtgagaagggaa

SEQ ID NO: 599733 - DNA, 15 bp, Homo sapiens
aagtgagaagggaaa

SEQ ID NO: 599734 - DNA, 15 bp, Homo sapiens
agtgagaagggaaac

SEQ ID NO: 599735 - DNA, 15 bp, Homo sapiens
gtgagaagggaaacg

SEQ ID NO: 599736 - DNA, 15 bp, Homo sapiens
tgagaagggaaacgg

SEQ ID NO: 599737 - DNA, 15 bp, Homo sapiens
gagaagggaaacggg

SEQ ID NO: 599738 - DNA, 15 bp, Homo sapiens
agaagggaaacgggg

SEQ ID NO: 599739 - DNA, 15 bp, Homo sapiens
gaagggaaacggggc

SEQ ID NO: 599740 - DNA, 15 bp, Homo sapiens
aagggaaacggggcg

SEQ ID NO: 599741 - DNA, 15 bp, Homo sapiens
agggaaacggggcgg

SEQ ID NO: 599742 - DNA, 15 bp, Homo sapiens
gggaaacggggcggt

SEQ ID NO: 599743 - DNA, 15 bp, Homo sapiens
ggaaacggggcggtg

SEQ ID NO: 599744 - DNA, 15 bp, Homo sapiens
gaaacggggcggtgg

SEQ ID NO: 599745 - DNA, 15 bp, Homo sapiens
aaacggggcggtggg

SEQ ID NO: 599746 - DNA, 15 bp, Homo sapiens
aacggggcggtgggg

SEQ ID NO: 599747 - DNA, 15 bp, Homo sapiens
acggggcggtggggg

SEQ ID NO: 599748 - DNA, 15 bp, Homo sapiens
cggggcggtgggggt

SEQ ID NO: 599749 - DNA, 15 bp, Homo sapiens
ggggcggtgggggtt

SEQ ID NO: 599750 - DNA, 15 bp, Homo sapiens
gggcggtgggggttg

SEQ ID NO: 599751 - DNA, 15 bp, Homo sapiens
ggcggtgggggttga

SEQ ID NO: 599752 - DNA, 15 bp, Homo sapiens
gcggtgggggttgat

SEQ ID NO: 599753 - DNA, 15 bp, Homo sapiens
cggtgggggttgatc

SEQ ID NO: 599754 - DNA, 15 bp, Homo sapiens
ggtgggggttgatcc

SEQ ID NO: 599755 - DNA, 15 bp, Homo sapiens
gtgggggttgatcca

SEQ ID NO: 599756 - DNA, 15 bp, Homo sapiens
tgggggttgatccac

SEQ ID NO: 599757 - DNA, 15 bp, Homo sapiens
gggggttgatccacc

SEQ ID NO: 599758 - DNA, 15 bp, Homo sapiens
ggggttgatccacca

SEQ ID NO: 599759 - DNA, 15 bp, Homo sapiens
gggttgatccaccag

SEQ ID NO: 599760 - DNA, 15 bp, Homo sapiens
ggttgatccaccagg

SEQ ID NO: 599761 - DNA, 15 bp, Homo sapiens
gttgatccaccagga

SEQ ID NO: 599762 - DNA, 15 bp, Homo sapiens
ttgatccaccaggac

SEQ ID NO: 599763 - DNA, 15 bp, Homo sapiens
tgatccaccaggact

SEQ ID NO: 599764 - DNA, 15 bp, Homo sapiens
gatccaccaggactt

SEQ ID NO: 599765 - DNA, 15 bp, Homo sapiens
atccaccaggacttg

SEQ ID NO: 599766 - DNA, 15 bp, Homo sapiens
tccaccaggacttgc

SEQ ID NO: 599767 - DNA, 15 bp, Homo sapiens
ccaccaggacttgct

SEQ ID NO: 599768 - DNA, 15 bp, Homo sapiens
caccaggacttgctc

SEQ ID NO: 599769 - DNA, 15 bp, Homo sapiens
accaggacttgctct

SEQ ID NO: 599770 - DNA, 15 bp, Homo sapiens
ccaggacttgctctg

SEQ ID NO: 599771 - DNA, 15 bp, Homo sapiens
caggacttgctctga

SEQ ID NO: 599772 - DNA, 15 bp, Homo sapiens
aggacttgctctgat

SEQ ID NO: 599773 - DNA, 15 bp, Homo sapiens
ggacttgctctgatg

SEQ ID NO: 599774 - DNA, 15 bp, Homo sapiens
gacttgctctgatga

SEQ ID NO: 599775 - DNA, 15 bp, Homo sapiens
acttgctctgatgaa

SEQ ID NO: 599776 - DNA, 15 bp, Homo sapiens
cttgctctgatgaaa

SEQ ID NO: 599777 - DNA, 15 bp, Homo sapiens
ttgctctgatgaaaa

SEQ ID NO: 599778 - DNA, 15 bp, Homo sapiens
tgctctgatgaaaac

SEQ ID NO: 599779 - DNA, 15 bp, Homo sapiens
gctctgatgaaaact

SEQ ID NO: 599780 - DNA, 15 bp, Homo sapiens
ctctgatgaaaactg

SEQ ID NO: 599781 - DNA, 15 bp, Homo sapiens
tctgatgaaaactgt

SEQ ID NO: 599782 - DNA, 15 bp, Homo sapiens
ctgatgaaaactgtg

SEQ ID NO: 599783 - DNA, 15 bp, Homo sapiens
tgatgaaaactgtgc

SEQ ID NO: 599784 - DNA, 15 bp, Homo sapiens
gatgaaaactgtgcc

SEQ ID NO: 599785 - DNA, 15 bp, Homo sapiens
atgaaaactgtgcca

SEQ ID NO: 599786 - DNA, 15 bp, Homo sapiens
tgaaaactgtgccac

SEQ ID NO: 599787 - DNA, 15 bp, Homo sapiens
gaaaactgtgccacc

SEQ ID NO: 599788 - DNA, 15 bp, Homo sapiens
aaaactgtgccacct

SEQ ID NO: 599789 - DNA, 15 bp, Homo sapiens
aaactgtgccacctc

SEQ ID NO: 599790 - DNA, 15 bp, Homo sapiens
aactgtgccacctcc

SEQ ID NO: 599791 - DNA, 15 bp, Homo sapiens
actgtgccacctcct

SEQ ID NO: 599792 - DNA, 15 bp, Homo sapiens
ctgtgccacctcctc

SEQ ID NO: 599793 - DNA, 15 bp, Homo sapiens
tgtgccacctcctca

SEQ ID NO: 599794 - DNA, 15 bp, Homo sapiens
gtgccacctcctcag

SEQ ID NO: 599795 - DNA, 15 bp, Homo sapiens
tgccacctcctcagc

SEQ ID NO: 599796 - DNA, 15 bp, Homo sapiens
gccacctcctcagct

SEQ ID NO: 599797 - DNA, 15 bp, Homo sapiens
ccacctcctcagctg

SEQ ID NO: 599798 - DNA, 15 bp, Homo sapiens
cacctcctcagctgt

SEQ ID NO: 599799 - DNA, 15 bp, Homo sapiens
acctcctcagctgtg

SEQ ID NO: 599800 - DNA, 15 bp, Homo sapiens
cctcctcagctgtgg

SEQ ID NO: 599801 - DNA, 15 bp, Homo sapiens
ctcctcagctgtggc

SEQ ID NO: 599802 - DNA, 15 bp, Homo sapiens
tcctcagctgtggct

SEQ ID NO: 599803 - DNA, 15 bp, Homo sapiens
cctcagctgtggcta

SEQ ID NO: 599804 - DNA, 15 bp, Homo sapiens
ctcagctgtggctaa

SEQ ID NO: 599805 - DNA, 15 bp, Homo sapiens
tcagctgtggctaat

SEQ ID NO: 599806 - DNA, 15 bp, Homo sapiens
cagctgtggctaata

SEQ ID NO: 599807 - DNA, 15 bp, Homo sapiens
agctgtggctaatat

SEQ ID NO: 599808 - DNA, 15 bp, Homo sapiens
gctgtggctaatatc

SEQ ID NO: 599809 - DNA, 15 bp, Homo sapiens
ctgtggctaatatca

SEQ ID NO: 599810 - DNA, 15 bp, Homo sapiens
tgtggctaatatcat

SEQ ID NO: 599811 - DNA, 15 bp, Homo sapiens
gtggctaatatcatg

SEQ ID NO: 599812 - DNA, 15 bp, Homo sapiens
tggctaatatcatgg

SEQ ID NO: 599813 - DNA, 15 bp, Homo sapiens
ggctaatatcatgga

SEQ ID NO: 599814 - DNA, 15 bp, Homo sapiens
gctaatatcatggac

SEQ ID NO: 599815 - DNA, 15 bp, Homo sapiens
ctaatatcatggaca

SEQ ID NO: 599816 - DNA, 15 bp, Homo sapiens
taatatcatggacaa

SEQ ID NO: 599817 - DNA, 15 bp, Homo sapiens
aatatcatggacaac

SEQ ID NO: 599818 - DNA, 15 bp, Homo sapiens
atatcatggacaaca

SEQ ID NO: 599819 - DNA, 15 bp, Homo sapiens
tatcatggacaacac

SEQ ID NO: 599820 - DNA, 15 bp, Homo sapiens
atcatggacaacacc

SEQ ID NO: 599821 - DNA, 15 bp, Homo sapiens
tcatggacaacacct

SEQ ID NO: 599822 - DNA, 15 bp, Homo sapiens
catggacaacacctt

SEQ ID NO: 599823 - DNA, 15 bp, Homo sapiens
atggacaacaccttt

SEQ ID NO: 599824 - DNA, 15 bp, Homo sapiens
tggacaacacctttg

SEQ ID NO: 599825 - DNA, 15 bp, Homo sapiens
ggacaacacctttgc

SEQ ID NO: 599826 - DNA, 15 bp, Homo sapiens
gacaacacctttgca

SEQ ID NO: 599827 - DNA, 15 bp, Homo sapiens
acaacacctttgcag

SEQ ID NO: 599828 - DNA, 15 bp, Homo sapiens
caacacctttgcagc

SEQ ID NO: 599829 - DNA, 15 bp, Homo sapiens
aacacctttgcagct

SEQ ID NO: 599830 - DNA, 15 bp, Homo sapiens
acacctttgcagctg

SEQ ID NO: 599831 - DNA, 15 bp, Homo sapiens
cacctttgcagctgt

SEQ ID NO: 599832 - DNA, 15 bp, Homo sapiens
acctttgcagctgtt

SEQ ID NO: 599833 - DNA, 15 bp, Homo sapiens
cctttgcagctgtta

SEQ ID NO: 599834 - DNA, 15 bp, Homo sapiens
ctttgcagctgttat

SEQ ID NO: 599835 - DNA, 15 bp, Homo sapiens
tttgcagctgttatg

SEQ ID NO: 599836 - DNA, 15 bp, Homo sapiens
ttgcagctgttatgt

SEQ ID NO: 599837 - DNA, 15 bp, Homo sapiens
tgcagctgttatgtt

SEQ ID NO: 599838 - DNA, 15 bp, Homo sapiens
gcagctgttatgttt

SEQ ID NO: 599839 - DNA, 15 bp, Homo sapiens
cagctgttatgtttg

SEQ ID NO: 599840 - DNA, 15 bp, Homo sapiens
agctgttatgtttga

SEQ ID NO: 599841 - DNA, 15 bp, Homo sapiens
gctgttatgtttgat

SEQ ID NO: 599842 - DNA, 15 bp, Homo sapiens
ctgttatgtttgatt

SEQ ID NO: 599843 - DNA, 15 bp, Homo sapiens
tgttatgtttgattt

SEQ ID NO: 599844 - DNA, 15 bp, Homo sapiens
gttatgtttgatttc

SEQ ID NO: 599845 - DNA, 15 bp, Homo sapiens
ttatgtttgatttct

SEQ ID NO: 599846 - DNA, 15 bp, Homo sapiens
tatgtttgatttctt

SEQ ID NO: 599847 - DNA, 15 bp, Homo sapiens
atgtttgatttcttg

SEQ ID NO: 599848 - DNA, 15 bp, Homo sapiens
tgtttgatttcttgt

SEQ ID NO: 599849 - DNA, 15 bp, Homo sapiens
gtttgatttcttgtt

SEQ ID NO: 599850 - DNA, 15 bp, Homo sapiens
tttgatttcttgttc

SEQ ID NO: 599851 - DNA, 15 bp, Homo sapiens
ttgatttcttgttct

SEQ ID NO: 599852 - DNA, 15 bp, Homo sapiens
tgatttcttgttctt

SEQ ID NO: 599853 - DNA, 15 bp, Homo sapiens
gatttcttgttcttt

SEQ ID NO: 599854 - DNA, 15 bp, Homo sapiens
atttcttgttctttt

SEQ ID NO: 599855 - DNA, 15 bp, Homo sapiens
tttcttgttcttttt

SEQ ID NO: 599856 - DNA, 15 bp, Homo sapiens
ttcttgttctttttt

SEQ ID NO: 599857 - DNA, 15 bp, Homo sapiens
tcttgttcttttttt

SEQ ID NO: 599858 - DNA, 15 bp, Homo sapiens
cttgttctttttttc

SEQ ID NO: 599859 - DNA, 15 bp, Homo sapiens
ttgttctttttttcc

SEQ ID NO: 599860 - DNA, 15 bp, Homo sapiens
tgttctttttttccc

SEQ ID NO: 599861 - DNA, 15 bp, Homo sapiens
gttctttttttcccc

SEQ ID NO: 599862 - DNA, 15 bp, Homo sapiens
ttctttttttcccca

SEQ ID NO: 599863 - DNA, 15 bp, Homo sapiens
tctttttttccccaa

SEQ ID NO: 599864 - DNA, 15 bp, Homo sapiens
ctttttttccccaag

SEQ ID NO: 599865 - DNA, 15 bp, Homo sapiens
tttttttccccaagc

SEQ ID NO: 599866 - DNA, 15 bp, Homo sapiens
ttttttccccaagca

SEQ ID NO: 599867 - DNA, 15 bp, Homo sapiens
tttttccccaagcaa

SEQ ID NO: 599868 - DNA, 15 bp, Homo sapiens
ttttccccaagcaaa

SEQ ID NO: 599869 - DNA, 15 bp, Homo sapiens
tttccccaagcaaat

SEQ ID NO: 599870 - DNA, 15 bp, Homo sapiens
ttccccaagcaaata

SEQ ID NO: 599871 - DNA, 15 bp, Homo sapiens
tccccaagcaaatac

SEQ ID NO: 599872 - DNA, 15 bp, Homo sapiens
ccccaagcaaataca

SEQ ID NO: 599873 - DNA, 15 bp, Homo sapiens
cccaagcaaatacag

SEQ ID NO: 599874 - DNA, 15 bp, Homo sapiens
ccaagcaaatacagt

SEQ ID NO: 599875 - DNA, 15 bp, Homo sapiens
caagcaaatacagtt

SEQ ID NO: 599876 - DNA, 15 bp, Homo sapiens
aagcaaatacagttg

SEQ ID NO: 599877 - DNA, 15 bp, Homo sapiens
agcaaatacagttga

SEQ ID NO: 599878 - DNA, 15 bp, Homo sapiens
gcaaatacagttgac

SEQ ID NO: 599879 - DNA, 15 bp, Homo sapiens
caaatacagttgacc

SEQ ID NO: 599880 - DNA, 15 bp, Homo sapiens
aaatacagttgacct

SEQ ID NO: 599881 - DNA, 15 bp, Homo sapiens
aatacagttgacctt

SEQ ID NO: 599882 - DNA, 15 bp, Homo sapiens
atacagttgaccttt

SEQ ID NO: 599883 - DNA, 15 bp, Homo sapiens
tacagttgacctttg

SEQ ID NO: 599884 - DNA, 15 bp, Homo sapiens
acagttgacctttgc

SEQ ID NO: 599885 - DNA, 15 bp, Homo sapiens
cagttgacctttgcc

SEQ ID NO: 599886 - DNA, 15 bp, Homo sapiens
agttgacctttgccc

SEQ ID NO: 599887 - DNA, 15 bp, Homo sapiens
gttgacctttgccct

SEQ ID NO: 599888 - DNA, 15 bp, Homo sapiens
ttgacctttgccctc

SEQ ID NO: 599889 - DNA, 15 bp, Homo sapiens
tgacctttgccctca

SEQ ID NO: 599890 - DNA, 15 bp, Homo sapiens
gacctttgccctcag

SEQ ID NO: 599891 - DNA, 15 bp, Homo sapiens
acctttgccctcaga

SEQ ID NO: 599892 - DNA, 15 bp, Homo sapiens
cctttgccctcagaa

SEQ ID NO: 599893 - DNA, 15 bp, Homo sapiens
ctttgccctcagaag

SEQ ID NO: 599894 - DNA, 15 bp, Homo sapiens
tttgccctcagaaga

SEQ ID NO: 599895 - DNA, 15 bp, Homo sapiens
ttgccctcagaagag

SEQ ID NO: 599896 - DNA, 15 bp, Homo sapiens
tgccctcagaagagc

SEQ ID NO: 599897 - DNA, 15 bp, Homo sapiens
gccctcagaagagct

SEQ ID NO: 599898 - DNA, 15 bp, Homo sapiens
ccctcagaagagctc

SEQ ID NO: 599899 - DNA, 15 bp, Homo sapiens
cctcagaagagctct

SEQ ID NO: 599900 - DNA, 15 bp, Homo sapiens
ctcagaagagctctg

SEQ ID NO: 599901 - DNA, 15 bp, Homo sapiens
tcagaagagctctgt

SEQ ID NO: 599902 - DNA, 15 bp, Homo sapiens
cagaagagctctgtc

SEQ ID NO: 599903 - DNA, 15 bp, Homo sapiens
agaagagctctgtcc

SEQ ID NO: 599904 - DNA, 15 bp, Homo sapiens
gaagagctctgtcct

SEQ ID NO: 599905 - DNA, 15 bp, Homo sapiens
aagagctctgtcctt

SEQ ID NO: 599906 - DNA, 15 bp, Homo sapiens
agagctctgtccttc

SEQ ID NO: 599907 - DNA, 15 bp, Homo sapiens
gagctctgtccttca

SEQ ID NO: 599908 - DNA, 15 bp, Homo sapiens
agctctgtccttcag

SEQ ID NO: 599909 - DNA, 15 bp, Homo sapiens
gctctgtccttcagg

SEQ ID NO: 599910 - DNA, 15 bp, Homo sapiens
ctctgtccttcaggg

SEQ ID NO: 599911 - DNA, 15 bp, Homo sapiens
tctgtccttcagggt

SEQ ID NO: 599912 - DNA, 15 bp, Homo sapiens
ctgtccttcagggta

SEQ ID NO: 599913 - DNA, 15 bp, Homo sapiens
tgtccttcagggtag

SEQ ID NO: 599914 - DNA, 15 bp, Homo sapiens
gtccttcagggtagc

SEQ ID NO: 599915 - DNA, 15 bp, Homo sapiens
tccttcagggtagcc

SEQ ID NO: 599916 - DNA, 15 bp, Homo sapiens
ccttcagggtagccc

SEQ ID NO: 599917 - DNA, 15 bp, Homo sapiens
cttcagggtagcccc

SEQ ID NO: 599918 - DNA, 15 bp, Homo sapiens
ttcagggtagcccct

SEQ ID NO: 599919 - DNA, 15 bp, Homo sapiens
tcagggtagcccctg

SEQ ID NO: 599920 - DNA, 15 bp, Homo sapiens
cagggtagcccctgc

SEQ ID NO: 599921 - DNA, 15 bp, Homo sapiens
agggtagcccctgcc

SEQ ID NO: 599922 - DNA, 15 bp, Homo sapiens
gggtagcccctgccg

SEQ ID NO: 599923 - DNA, 15 bp, Homo sapiens
ggtagcccctgccgc

SEQ ID NO: 599924 - DNA, 15 bp, Homo sapiens
gtagcccctgccgcc

SEQ ID NO: 599925 - DNA, 15 bp, Homo sapiens
tagcccctgccgcct

SEQ ID NO: 599926 - DNA, 15 bp, Homo sapiens
agcccctgccgcctt

SEQ ID NO: 599927 - DNA, 15 bp, Homo sapiens
gcccctgccgccttg

SEQ ID NO: 599928 - DNA, 15 bp, Homo sapiens
cccctgccgccttgg

SEQ ID NO: 599929 - DNA, 15 bp, Homo sapiens
ccctgccgccttggc

SEQ ID NO: 599930 - DNA, 15 bp, Homo sapiens
cctgccgccttggca

SEQ ID NO: 599931 - DNA, 15 bp, Homo sapiens
ctgccgccttggcac

SEQ ID NO: 599932 - DNA, 15 bp, Homo sapiens
tgccgccttggcaca

SEQ ID NO: 599933 - DNA, 15 bp, Homo sapiens
gccgccttggcacac

SEQ ID NO: 599934 - DNA, 15 bp, Homo sapiens
ccgccttggcacact

SEQ ID NO: 599935 - DNA, 15 bp, Homo sapiens
cgccttggcacactt

SEQ ID NO: 599936 - DNA, 15 bp, Homo sapiens
gccttggcacactta

SEQ ID NO: 599937 - DNA, 15 bp, Homo sapiens
ccttggcacacttat

SEQ ID NO: 599938 - DNA, 15 bp, Homo sapiens
cttggcacacttatg

SEQ ID NO: 599939 - DNA, 15 bp, Homo sapiens
ttggcacacttatgc

SEQ ID NO: 599940 - DNA, 15 bp, Homo sapiens
tggcacacttatgcc

SEQ ID NO: 599941 - DNA, 15 bp, Homo sapiens
ggcacacttatgcca

SEQ ID NO: 599942 - DNA, 15 bp, Homo sapiens
gcacacttatgccaa

SEQ ID NO: 599943 - DNA, 15 bp, Homo sapiens
cacacttatgccaag

SEQ ID NO: 599944 - DNA, 15 bp, Homo sapiens
acacttatgccaagg

SEQ ID NO: 599945 - DNA, 15 bp, Homo sapiens
cacttatgccaagga

SEQ ID NO: 599946 - DNA, 15 bp, Homo sapiens
acttatgccaaggat

SEQ ID NO: 599947 - DNA, 15 bp, Homo sapiens
cttatgccaaggatg

SEQ ID NO: 599948 - DNA, 15 bp, Homo sapiens
ttatgccaaggatgc

SEQ ID NO: 599949 - DNA, 15 bp, Homo sapiens
tatgccaaggatgct

SEQ ID NO: 599950 - DNA, 15 bp, Homo sapiens
atgccaaggatgctg

SEQ ID NO: 599951 - DNA, 15 bp, Homo sapiens
tgccaaggatgctgc

SEQ ID NO: 599952 - DNA, 15 bp, Homo sapiens
gccaaggatgctgct

SEQ ID NO: 599953 - DNA, 15 bp, Homo sapiens
ccaaggatgctgctg

SEQ ID NO: 599954 - DNA, 15 bp, Homo sapiens
caaggatgctgctgg

SEQ ID NO: 599955 - DNA, 15 bp, Homo sapiens
aaggatgctgctggg

SEQ ID NO: 599956 - DNA, 15 bp, Homo sapiens
aggatgctgctgggg

SEQ ID NO: 599957 - DNA, 15 bp, Homo sapiens
ggatgctgctggggc

SEQ ID NO: 599958 - DNA, 15 bp, Homo sapiens
gatgctgctggggct

SEQ ID NO: 599959 - DNA, 15 bp, Homo sapiens
atgctgctggggctt

SEQ ID NO: 599960 - DNA, 15 bp, Homo sapiens
tgctgctggggctta

SEQ ID NO: 599961 - DNA, 15 bp, Homo sapiens
gctgctggggcttaa

SEQ ID NO: 599962 - DNA, 15 bp, Homo sapiens
ctgctggggcttaaa

SEQ ID NO: 599963 - DNA, 15 bp, Homo sapiens
tgctggggcttaaag

SEQ ID NO: 599964 - DNA, 15 bp, Homo sapiens
gctggggcttaaagt

SEQ ID NO: 599965 - DNA, 15 bp, Homo sapiens
ctggggcttaaagtg

SEQ ID NO: 599966 - DNA, 15 bp, Homo sapiens
tggggcttaaagtga

SEQ ID NO: 599967 - DNA, 15 bp, Homo sapiens
ggggcttaaagtgag

SEQ ID NO: 599968 - DNA, 15 bp, Homo sapiens
gggcttaaagtgagc

SEQ ID NO: 599969 - DNA, 15 bp, Homo sapiens
ggcttaaagtgagct

SEQ ID NO: 599970 - DNA, 15 bp, Homo sapiens
gcttaaagtgagctg

SEQ ID NO: 599971 - DNA, 15 bp, Homo sapiens
cttaaagtgagctgg

SEQ ID NO: 599972 - DNA, 15 bp, Homo sapiens
ttaaagtgagctggg

SEQ ID NO: 599973 - DNA, 15 bp, Homo sapiens
taaagtgagctgggc

SEQ ID NO: 599974 - DNA, 15 bp, Homo sapiens
aaagtgagctgggcc

SEQ ID NO: 599975 - DNA, 15 bp, Homo sapiens
aagtgagctgggccc

SEQ ID NO: 599976 - DNA, 15 bp, Homo sapiens
agtgagctgggccct

SEQ ID NO: 599977 - DNA, 15 bp, Homo sapiens
gtgagctgggccctt

SEQ ID NO: 599978 - DNA, 15 bp, Homo sapiens
tgagctgggcccttc

SEQ ID NO: 599979 - DNA, 15 bp, Homo sapiens
gagctgggcccttcc

SEQ ID NO: 599980 - DNA, 15 bp, Homo sapiens
agctgggcccttcca

SEQ ID NO: 599981 - DNA, 15 bp, Homo sapiens
gctgggcccttccat

SEQ ID NO: 599982 - DNA, 15 bp, Homo sapiens
ctgggcccttccatg

SEQ ID NO: 599983 - DNA, 15 bp, Homo sapiens
tgggcccttccatgg

SEQ ID NO: 599984 - DNA, 15 bp, Homo sapiens
gggcccttccatggg

SEQ ID NO: 599985 - DNA, 15 bp, Homo sapiens
ggcccttccatgggg

SEQ ID NO: 599986 - DNA, 15 bp, Homo sapiens
gcccttccatggggc

SEQ ID NO: 599987 - DNA, 15 bp, Homo sapiens
cccttccatggggcc

SEQ ID NO: 599988 - DNA, 15 bp, Homo sapiens
ccttccatggggcct

SEQ ID NO: 599989 - DNA, 15 bp, Homo sapiens
cttccatggggcctc

SEQ ID NO: 599990 - DNA, 15 bp, Homo sapiens
ttccatggggcctcc

SEQ ID NO: 599991 - DNA, 15 bp, Homo sapiens
tccatggggcctccg

SEQ ID NO: 599992 - DNA, 15 bp, Homo sapiens
ccatggggcctccga

SEQ ID NO: 599993 - DNA, 15 bp, Homo sapiens
catggggcctccgag

SEQ ID NO: 599994 - DNA, 15 bp, Homo sapiens
atggggcctccgagg

SEQ ID NO: 599995 - DNA, 15 bp, Homo sapiens
tggggcctccgaggc

SEQ ID NO: 599996 - DNA, 15 bp, Homo sapiens
ggggcctccgaggca

SEQ ID NO: 599997 - DNA, 15 bp, Homo sapiens
gggcctccgaggcag

SEQ ID NO: 599998 - DNA, 15 bp, Homo sapiens
ggcctccgaggcagc

SEQ ID NO: 599999 - DNA, 15 bp, Homo sapiens
gcctccgaggcagca

SEQ ID NO: 600000 - DNA, 15 bp, Homo sapiens
cctccgaggcagcaa

SEQ ID NO: 600001 - DNA, 15 bp, Homo sapiens
ctccgaggcagcaag

SEQ ID NO: 600002 - DNA, 15 bp, Homo sapiens
tccgaggcagcaagg

SEQ ID NO: 600003 - DNA, 15 bp, Homo sapiens
ccgaggcagcaaggg

SEQ ID NO: 600004 - DNA, 15 bp, Homo sapiens
cgaggcagcaagggg

SEQ ID NO: 600005 - DNA, 15 bp, Homo sapiens
gaggcagcaaggggt

SEQ ID NO: 600006 - DNA, 15 bp, Homo sapiens
aggcagcaaggggtg

SEQ ID NO: 600007 - DNA, 15 bp, Homo sapiens
ggcagcaaggggtga

SEQ ID NO: 600008 - DNA, 15 bp, Homo sapiens
gcagcaaggggtgag

SEQ ID NO: 600009 - DNA, 15 bp, Homo sapiens
cagcaaggggtgagc

SEQ ID NO: 600010 - DNA, 15 bp, Homo sapiens
agcaaggggtgagca

SEQ ID NO: 600011 - DNA, 15 bp, Homo sapiens
gcaaggggtgagcaa

SEQ ID NO: 600012 - DNA, 15 bp, Homo sapiens
caaggggtgagcaag

SEQ ID NO: 600013 - DNA, 15 bp, Homo sapiens
aaggggtgagcaagg

SEQ ID NO: 600014 - DNA, 15 bp, Homo sapiens
aggggtgagcaaggc

SEQ ID NO: 600015 - DNA, 15 bp, Homo sapiens
ggggtgagcaaggca

SEQ ID NO: 600016 - DNA, 15 bp, Homo sapiens
gggtgagcaaggcaa

SEQ ID NO: 600017 - DNA, 15 bp, Homo sapiens
ggtgagcaaggcaac

SEQ ID NO: 600018 - DNA, 15 bp, Homo sapiens
gtgagcaaggcaacc

SEQ ID NO: 600019 - DNA, 15 bp, Homo sapiens
tgagcaaggcaaccc

SEQ ID NO: 600020 - DNA, 15 bp, Homo sapiens
gagcaaggcaaccca

SEQ ID NO: 600021 - DNA, 15 bp, Homo sapiens
agcaaggcaacccaa

SEQ ID NO: 600022 - DNA, 15 bp, Homo sapiens
gcaaggcaacccaag

SEQ ID NO: 600023 - DNA, 15 bp, Homo sapiens
caaggcaacccaagt

SEQ ID NO: 600024 - DNA, 15 bp, Homo sapiens
aaggcaacccaagtc

SEQ ID NO: 600025 - DNA, 15 bp, Homo sapiens
aggcaacccaagtct

SEQ ID NO: 600026 - DNA, 15 bp, Homo sapiens
ggcaacccaagtctc

SEQ ID NO: 600027 - DNA, 15 bp, Homo sapiens
gcaacccaagtctct

SEQ ID NO: 600028 - DNA, 15 bp, Homo sapiens
caacccaagtctctc

SEQ ID NO: 600029 - DNA, 15 bp, Homo sapiens
aacccaagtctctca

SEQ ID NO: 600030 - DNA, 15 bp, Homo sapiens
acccaagtctctcag

SEQ ID NO: 600031 - DNA, 15 bp, Homo sapiens
cccaagtctctcagg

SEQ ID NO: 600032 - DNA, 15 bp, Homo sapiens
ccaagtctctcaggg

SEQ ID NO: 600033 - DNA, 15 bp, Homo sapiens
caagtctctcaggga

SEQ ID NO: 600034 - DNA, 15 bp, Homo sapiens
aagtctctcagggag

SEQ ID NO: 600035 - DNA, 15 bp, Homo sapiens
agtctctcagggagg

SEQ ID NO: 600036 - DNA, 15 bp, Homo sapiens
gtctctcagggaggt

SEQ ID NO: 600037 - DNA, 15 bp, Homo sapiens
tctctcagggaggtg

SEQ ID NO: 600038 - DNA, 15 bp, Homo sapiens
ctctcagggaggtgt

SEQ ID NO: 600039 - DNA, 15 bp, Homo sapiens
tctcagggaggtgtg

SEQ ID NO: 600040 - DNA, 15 bp, Homo sapiens
ctcagggaggtgtgt

SEQ ID NO: 600041 - DNA, 15 bp, Homo sapiens
tcagggaggtgtgtg

SEQ ID NO: 600042 - DNA, 15 bp, Homo sapiens
cagggaggtgtgtga

SEQ ID NO: 600043 - DNA, 15 bp, Homo sapiens
agggaggtgtgtgat

SEQ ID NO: 600044 - DNA, 15 bp, Homo sapiens
gggaggtgtgtgata

SEQ ID NO: 600045 - DNA, 15 bp, Homo sapiens
ggaggtgtgtgataa

SEQ ID NO: 600046 - DNA, 15 bp, Homo sapiens
gaggtgtgtgataag

SEQ ID NO: 600047 - DNA, 15 bp, Homo sapiens
aggtgtgtgataagc

SEQ ID NO: 600048 - DNA, 15 bp, Homo sapiens
ggtgtgtgataagcc

SEQ ID NO: 600049 - DNA, 15 bp, Homo sapiens
gtgtgtgataagcca

SEQ ID NO: 600050 - DNA, 15 bp, Homo sapiens
tgtgtgataagccag

SEQ ID NO: 600051 - DNA, 15 bp, Homo sapiens
gtgtgataagccagc

SEQ ID NO: 600052 - DNA, 15 bp, Homo sapiens
tgtgataagccagct

SEQ ID NO: 600053 - DNA, 15 bp, Homo sapiens
gtgataagccagcta

SEQ ID NO: 600054 - DNA, 15 bp, Homo sapiens
tgataagccagctag

SEQ ID NO: 600055 - DNA, 15 bp, Homo sapiens
gataagccagctaga

SEQ ID NO: 600056 - DNA, 15 bp, Homo sapiens
ataagccagctagaa

SEQ ID NO: 600057 - DNA, 15 bp, Homo sapiens
taagccagctagaac

SEQ ID NO: 600058 - DNA, 15 bp, Homo sapiens
aagccagctagaacc

SEQ ID NO: 600059 - DNA, 15 bp, Homo sapiens
agccagctagaaccc

SEQ ID NO: 600060 - DNA, 15 bp, Homo sapiens
gccagctagaacccg

SEQ ID NO: 600061 - DNA, 15 bp, Homo sapiens
ccagctagaacccga

SEQ ID NO: 600062 - DNA, 15 bp, Homo sapiens
cagctagaacccgag

SEQ ID NO: 600063 - DNA, 15 bp, Homo sapiens
agctagaacccgaga

SEQ ID NO: 600064 - DNA, 15 bp, Homo sapiens
gctagaacccgagac

SEQ ID NO: 600065 - DNA, 15 bp, Homo sapiens
ctagaacccgagact

SEQ ID NO: 600066 - DNA, 15 bp, Homo sapiens
tagaacccgagactg

SEQ ID NO: 600067 - DNA, 15 bp, Homo sapiens
agaacccgagactgg

SEQ ID NO: 600068 - DNA, 15 bp, Homo sapiens
gaacccgagactgga

SEQ ID NO: 600069 - DNA, 15 bp, Homo sapiens
aacccgagactggat

SEQ ID NO: 600070 - DNA, 15 bp, Homo sapiens
acccgagactggatc

SEQ ID NO: 600071 - DNA, 15 bp, Homo sapiens
cccgagactggatcc

SEQ ID NO: 600072 - DNA, 15 bp, Homo sapiens
ccgagactggatcca

SEQ ID NO: 600073 - DNA, 15 bp, Homo sapiens
cgagactggatccag

SEQ ID NO: 600074 - DNA, 15 bp, Homo sapiens
gagactggatccagc

SEQ ID NO: 600075 - DNA, 15 bp, Homo sapiens
agactggatccagca

SEQ ID NO: 600076 - DNA, 15 bp, Homo sapiens
gactggatccagcat

SEQ ID NO: 600077 - DNA, 15 bp, Homo sapiens
actggatccagcatg

SEQ ID NO: 600078 - DNA, 15 bp, Homo sapiens
ctggatccagcatgt

SEQ ID NO: 600079 - DNA, 15 bp, Homo sapiens
tggatccagcatgtg

SEQ ID NO: 600080 - DNA, 15 bp, Homo sapiens
ggatccagcatgtgc

SEQ ID NO: 600081 - DNA, 15 bp, Homo sapiens
gatccagcatgtgcc

SEQ ID NO: 600082 - DNA, 15 bp, Homo sapiens
atccagcatgtgccc

SEQ ID NO: 600083 - DNA, 15 bp, Homo sapiens
tccagcatgtgccca

SEQ ID NO: 600084 - DNA, 15 bp, Homo sapiens
ccagcatgtgcccag

SEQ ID NO: 600085 - DNA, 15 bp, Homo sapiens
cagcatgtgcccagc

SEQ ID NO: 600086 - DNA, 15 bp, Homo sapiens
agcatgtgcccagca

SEQ ID NO: 600087 - DNA, 15 bp, Homo sapiens
gcatgtgcccagcac

SEQ ID NO: 600088 - DNA, 15 bp, Homo sapiens
catgtgcccagcacg

SEQ ID NO: 600089 - DNA, 15 bp, Homo sapiens
atgtgcccagcacgc

SEQ ID NO: 600090 - DNA, 15 bp, Homo sapiens
tgtgcccagcacgct

SEQ ID NO: 600091 - DNA, 15 bp, Homo sapiens
gtgcccagcacgcta

SEQ ID NO: 600092 - DNA, 15 bp, Homo sapiens
tgcccagcacgctac

SEQ ID NO: 600093 - DNA, 15 bp, Homo sapiens
gcccagcacgctaca

SEQ ID NO: 600094 - DNA, 15 bp, Homo sapiens
cccagcacgctacaa

SEQ ID NO: 600095 - DNA, 15 bp, Homo sapiens
ccagcacgctacaag

SEQ ID NO: 600096 - DNA, 15 bp, Homo sapiens
cagcacgctacaagg

SEQ ID NO: 600097 - DNA, 15 bp, Homo sapiens
agcacgctacaaggc

SEQ ID NO: 600098 - DNA, 15 bp, Homo sapiens
gcacgctacaaggca

SEQ ID NO: 600099 - DNA, 15 bp, Homo sapiens
cacgctacaaggcaa

SEQ ID NO: 600100 - DNA, 15 bp, Homo sapiens
acgctacaaggcaag

SEQ ID NO: 600101 - DNA, 15 bp, Homo sapiens
cgctacaaggcaagg

SEQ ID NO: 600102 - DNA, 15 bp, Homo sapiens
gctacaaggcaaggg

SEQ ID NO: 600103 - DNA, 15 bp, Homo sapiens
ctacaaggcaagggg

SEQ ID NO: 600104 - DNA, 15 bp, Homo sapiens
tacaaggcaaggggg

SEQ ID NO: 600105 - DNA, 15 bp, Homo sapiens
acaaggcaagggggc

SEQ ID NO: 600106 - DNA, 15 bp, Homo sapiens
caaggcaagggggca

SEQ ID NO: 600107 - DNA, 15 bp, Homo sapiens
aaggcaagggggcaa

SEQ ID NO: 600108 - DNA, 15 bp, Homo sapiens
aggcaagggggcaag

SEQ ID NO: 600109 - DNA, 15 bp, Homo sapiens
ggcaagggggcaagc

SEQ ID NO: 600110 - DNA, 15 bp, Homo sapiens
gcaagggggcaagct

SEQ ID NO: 600111 - DNA, 15 bp, Homo sapiens
caagggggcaagctt

SEQ ID NO: 600112 - DNA, 15 bp, Homo sapiens
aagggggcaagcttc

SEQ ID NO: 600113 - DNA, 15 bp, Homo sapiens
agggggcaagcttct

SEQ ID NO: 600114 - DNA, 15 bp, Homo sapiens
gggggcaagcttcta

SEQ ID NO: 600115 - DNA, 15 bp, Homo sapiens
ggggcaagcttctaa

SEQ ID NO: 600116 - DNA, 15 bp, Homo sapiens
gggcaagcttctaaa

SEQ ID NO: 600117 - DNA, 15 bp, Homo sapiens
ggcaagcttctaaaa

SEQ ID NO: 600118 - DNA, 15 bp, Homo sapiens
gcaagcttctaaaaa

SEQ ID NO: 600119 - DNA, 15 bp, Homo sapiens
caagcttctaaaaag

SEQ ID NO: 600120 - DNA, 15 bp, Homo sapiens
aagcttctaaaaaga

SEQ ID NO: 600121 - DNA, 15 bp, Homo sapiens
agcttctaaaaagaa

SEQ ID NO: 600122 - DNA, 15 bp, Homo sapiens
gcttctaaaaagaag

SEQ ID NO: 600123 - DNA, 15 bp, Homo sapiens
cttctaaaaagaagc

SEQ ID NO: 600124 - DNA, 15 bp, Homo sapiens
ttctaaaaagaagct

SEQ ID NO: 600125 - DNA, 15 bp, Homo sapiens
tctaaaaagaagcta

SEQ ID NO: 600126 - DNA, 15 bp, Homo sapiens
ctaaaaagaagctat

SEQ ID NO: 600127 - DNA, 15 bp, Homo sapiens
taaaaagaagctatt

SEQ ID NO: 600128 - DNA, 15 bp, Homo sapiens
aaaaagaagctattt

SEQ ID NO: 600129 - DNA, 15 bp, Homo sapiens
aaaagaagctatttt

SEQ ID NO: 600130 - DNA, 15 bp, Homo sapiens
aaagaagctatttta

SEQ ID NO: 600131 - DNA, 15 bp, Homo sapiens
aagaagctattttaa

SEQ ID NO: 600132 - DNA, 15 bp, Homo sapiens
agaagctattttaat

SEQ ID NO: 600133 - DNA, 15 bp, Homo sapiens
gaagctattttaatt

SEQ ID NO: 600134 - DNA, 15 bp, Homo sapiens
aagctattttaattt

SEQ ID NO: 600135 - DNA, 15 bp, Homo sapiens
agctattttaatttc

SEQ ID NO: 600136 - DNA, 15 bp, Homo sapiens
gctattttaatttca

SEQ ID NO: 600137 - DNA, 15 bp, Homo sapiens
ctattttaatttcag

SEQ ID NO: 600138 - DNA, 15 bp, Homo sapiens
tattttaatttcagc

SEQ ID NO: 600139 - DNA, 15 bp, Homo sapiens
attttaatttcagca

SEQ ID NO: 600140 - DNA, 15 bp, Homo sapiens
ttttaatttcagcac

SEQ ID NO: 600141 - DNA, 15 bp, Homo sapiens
tttaatttcagcaca

SEQ ID NO: 600142 - DNA, 15 bp, Homo sapiens
ttaatttcagcacac

SEQ ID NO: 600143 - DNA, 15 bp, Homo sapiens
taatttcagcacacg

SEQ ID NO: 600144 - DNA, 15 bp, Homo sapiens
aatttcagcacacgt

SEQ ID NO: 600145 - DNA, 15 bp, Homo sapiens
atttcagcacacgtg

SEQ ID NO: 600146 - DNA, 15 bp, Homo sapiens
tttcagcacacgtgg

SEQ ID NO: 600147 - DNA, 15 bp, Homo sapiens
ttcagcacacgtgga

SEQ ID NO: 600148 - DNA, 15 bp, Homo sapiens
tcagcacacgtggac

SEQ ID NO: 600149 - DNA, 15 bp, Homo sapiens
cagcacacgtggaca

SEQ ID NO: 600150 - DNA, 15 bp, Homo sapiens
agcacacgtggacat

SEQ ID NO: 600151 - DNA, 15 bp, Homo sapiens
gcacacgtggacatt

SEQ ID NO: 600152 - DNA, 15 bp, Homo sapiens
cacacgtggacattt

SEQ ID NO: 600153 - DNA, 15 bp, Homo sapiens
acacgtggacatttt

SEQ ID NO: 600154 - DNA, 15 bp, Homo sapiens
cacgtggacattttt

SEQ ID NO: 600155 - DNA, 15 bp, Homo sapiens
acgtggacatttttg

SEQ ID NO: 600156 - DNA, 15 bp, Homo sapiens
cgtggacatttttgt

SEQ ID NO: 600157 - DNA, 15 bp, Homo sapiens
gtggacatttttgtg

SEQ ID NO: 600158 - DNA, 15 bp, Homo sapiens
tggacatttttgtga

SEQ ID NO: 600159 - DNA, 15 bp, Homo sapiens
ggacatttttgtgat

SEQ ID NO: 600160 - DNA, 15 bp, Homo sapiens
gacatttttgtgatt

SEQ ID NO: 600161 - DNA, 15 bp, Homo sapiens
acatttttgtgattt

SEQ ID NO: 600162 - DNA, 15 bp, Homo sapiens
catttttgtgatttc

SEQ ID NO: 600163 - DNA, 15 bp, Homo sapiens
atttttgtgatttca

SEQ ID NO: 600164 - DNA, 15 bp, Homo sapiens
tttttgtgatttcaa

SEQ ID NO: 600165 - DNA, 15 bp, Homo sapiens
ttttgtgatttcaaa

SEQ ID NO: 600166 - DNA, 15 bp, Homo sapiens
tttgtgatttcaaaa

SEQ ID NO: 600167 - DNA, 15 bp, Homo sapiens
ttgtgatttcaaaaa

SEQ ID NO: 600168 - DNA, 15 bp, Homo sapiens
tgtgatttcaaaaag

SEQ ID NO: 600169 - DNA, 15 bp, Homo sapiens
gtgatttcaaaaagc

SEQ ID NO: 600170 - DNA, 15 bp, Homo sapiens
tgatttcaaaaagca

SEQ ID NO: 600171 - DNA, 15 bp, Homo sapiens
gatttcaaaaagcaa

SEQ ID NO: 600172 - DNA, 15 bp, Homo sapiens
atttcaaaaagcaaa

SEQ ID NO: 600173 - DNA, 15 bp, Homo sapiens
tttcaaaaagcaaaa

SEQ ID NO: 600174 - DNA, 15 bp, Homo sapiens
ttcaaaaagcaaaat

SEQ ID NO: 600175 - DNA, 15 bp, Homo sapiens
tcaaaaagcaaaatg

SEQ ID NO: 600176 - DNA, 15 bp, Homo sapiens
caaaaagcaaaatgt

SEQ ID NO: 600177 - DNA, 15 bp, Homo sapiens
aaaaagcaaaatgtt

SEQ ID NO: 600178 - DNA, 15 bp, Homo sapiens
aaaagcaaaatgttg

SEQ ID NO: 600179 - DNA, 15 bp, Homo sapiens
aaagcaaaatgttgt

SEQ ID NO: 600180 - DNA, 15 bp, Homo sapiens
aagcaaaatgttgtt

SEQ ID NO: 600181 - DNA, 15 bp, Homo sapiens
agcaaaatgttgttt

SEQ ID NO: 600182 - DNA, 15 bp, Homo sapiens
gcaaaatgttgtttt

SEQ ID NO: 600183 - DNA, 15 bp, Homo sapiens
caaaatgttgtttta

SEQ ID NO: 600184 - DNA, 15 bp, Homo sapiens
aaaatgttgttttaa

SEQ ID NO: 600185 - DNA, 15 bp, Homo sapiens
aaatgttgttttaaa

SEQ ID NO: 600186 - DNA, 15 bp, Homo sapiens
aatgttgttttaaat

SEQ ID NO: 600187 - DNA, 15 bp, Homo sapiens
atgttgttttaaatt

SEQ ID NO: 600188 - DNA, 15 bp, Homo sapiens
tgttgttttaaatta

SEQ ID NO: 600189 - DNA, 15 bp, Homo sapiens
gttgttttaaattat

SEQ ID NO: 600190 - DNA, 15 bp, Homo sapiens
ttgttttaaattatg

SEQ ID NO: 600191 - DNA, 15 bp, Homo sapiens
tgttttaaattatgt

SEQ ID NO: 600192 - DNA, 15 bp, Homo sapiens
gttttaaattatgta

SEQ ID NO: 600193 - DNA, 15 bp, Homo sapiens
ttttaaattatgtat

SEQ ID NO: 600194 - DNA, 15 bp, Homo sapiens
tttaaattatgtatg

SEQ ID NO: 600195 - DNA, 15 bp, Homo sapiens
ttaaattatgtatgg

SEQ ID NO: 600196 - DNA, 15 bp, Homo sapiens
taaattatgtatggg

SEQ ID NO: 600197 - DNA, 15 bp, Homo sapiens
aaattatgtatgggt

SEQ ID NO: 600198 - DNA, 15 bp, Homo sapiens
aattatgtatgggtc

SEQ ID NO: 600199 - DNA, 15 bp, Homo sapiens
attatgtatgggtcc

SEQ ID NO: 600200 - DNA, 15 bp, Homo sapiens
ttatgtatgggtcct

SEQ ID NO: 600201 - DNA, 15 bp, Homo sapiens
tatgtatgggtccta

SEQ ID NO: 600202 - DNA, 15 bp, Homo sapiens
atgtatgggtcctac

SEQ ID NO: 600203 - DNA, 15 bp, Homo sapiens
tgtatgggtcctaca

SEQ ID NO: 600204 - DNA, 15 bp, Homo sapiens
gtatgggtcctacat

SEQ ID NO: 600205 - DNA, 15 bp, Homo sapiens
tatgggtcctacatt

SEQ ID NO: 600206 - DNA, 15 bp, Homo sapiens
atgggtcctacattt

SEQ ID NO: 600207 - DNA, 15 bp, Homo sapiens
tgggtcctacatttt

SEQ ID NO: 600208 - DNA, 15 bp, Homo sapiens
gggtcctacatttta

SEQ ID NO: 600209 - DNA, 15 bp, Homo sapiens
ggtcctacattttat

SEQ ID NO: 600210 - DNA, 15 bp, Homo sapiens
gtcctacattttata

SEQ ID NO: 600211 - DNA, 15 bp, Homo sapiens
tcctacattttatac

SEQ ID NO: 600212 - DNA, 15 bp, Homo sapiens
cctacattttataca

SEQ ID NO: 600213 - DNA, 15 bp, Homo sapiens
ctacattttatacat

SEQ ID NO: 600214 - DNA, 15 bp, Homo sapiens
tacattttatacatg

SEQ ID NO: 600215 - DNA, 15 bp, Homo sapiens
acattttatacatgg

SEQ ID NO: 600216 - DNA, 15 bp, Homo sapiens
cattttatacatggg

SEQ ID NO: 600217 - DNA, 15 bp, Homo sapiens
attttatacatgggg

SEQ ID NO: 600218 - DNA, 15 bp, Homo sapiens
ttttatacatggggc

SEQ ID NO: 600219 - DNA, 15 bp, Homo sapiens
tttatacatggggct

SEQ ID NO: 600220 - DNA, 15 bp, Homo sapiens
ttatacatggggctc

SEQ ID NO: 600221 - DNA, 15 bp, Homo sapiens
tatacatggggctct

SEQ ID NO: 600222 - DNA, 15 bp, Homo sapiens
atacatggggctctt

SEQ ID NO: 600223 - DNA, 15 bp, Homo sapiens
tacatggggctcttg

SEQ ID NO: 600224 - DNA, 15 bp, Homo sapiens
acatggggctcttgg

SEQ ID NO: 600225 - DNA, 15 bp, Homo sapiens
catggggctcttggg

SEQ ID NO: 600226 - DNA, 15 bp, Homo sapiens
atggggctcttgggt

SEQ ID NO: 600227 - DNA, 15 bp, Homo sapiens
tggggctcttgggtc

SEQ ID NO: 600228 - DNA, 15 bp, Homo sapiens
ggggctcttgggtca

SEQ ID NO: 600229 - DNA, 15 bp, Homo sapiens
gggctcttgggtcat

SEQ ID NO: 600230 - DNA, 15 bp, Homo sapiens
ggctcttgggtcatt

SEQ ID NO: 600231 - DNA, 15 bp, Homo sapiens
gctcttgggtcattt

SEQ ID NO: 600232 - DNA, 15 bp, Homo sapiens
ctcttgggtcatttc

SEQ ID NO: 600233 - DNA, 15 bp, Homo sapiens
tcttgggtcatttca

SEQ ID NO: 600234 - DNA, 15 bp, Homo sapiens
cttgggtcatttcag

SEQ ID NO: 600235 - DNA, 15 bp, Homo sapiens
ttgggtcatttcagc

SEQ ID NO: 600236 - DNA, 15 bp, Homo sapiens
tgggtcatttcagca

SEQ ID NO: 600237 - DNA, 15 bp, Homo sapiens
gggtcatttcagcat

SEQ ID NO: 600238 - DNA, 15 bp, Homo sapiens
ggtcatttcagcatc

SEQ ID NO: 600239 - DNA, 15 bp, Homo sapiens
gtcatttcagcatct

SEQ ID NO: 600240 - DNA, 15 bp, Homo sapiens
tcatttcagcatctg

SEQ ID NO: 600241 - DNA, 15 bp, Homo sapiens
catttcagcatctgc

SEQ ID NO: 600242 - DNA, 15 bp, Homo sapiens
atttcagcatctgca

SEQ ID NO: 600243 - DNA, 15 bp, Homo sapiens
tttcagcatctgcag

SEQ ID NO: 600244 - DNA, 15 bp, Homo sapiens
ttcagcatctgcagc

SEQ ID NO: 600245 - DNA, 15 bp, Homo sapiens
tcagcatctgcagcc

SEQ ID NO: 600246 - DNA, 15 bp, Homo sapiens
cagcatctgcagcct

SEQ ID NO: 600247 - DNA, 15 bp, Homo sapiens
agcatctgcagcctc

SEQ ID NO: 600248 - DNA, 15 bp, Homo sapiens
gcatctgcagcctct

SEQ ID NO: 600249 - DNA, 15 bp, Homo sapiens
catctgcagcctctg

SEQ ID NO: 600250 - DNA, 15 bp, Homo sapiens
atctgcagcctctga

SEQ ID NO: 600251 - DNA, 15 bp, Homo sapiens
tctgcagcctctgaa

SEQ ID NO: 600252 - DNA, 15 bp, Homo sapiens
ctgcagcctctgaag

SEQ ID NO: 600253 - DNA, 15 bp, Homo sapiens
tgcagcctctgaagg

SEQ ID NO: 600254 - DNA, 15 bp, Homo sapiens
gcagcctctgaagga

SEQ ID NO: 600255 - DNA, 15 bp, Homo sapiens
cagcctctgaaggac

SEQ ID NO: 600256 - DNA, 15 bp, Homo sapiens
agcctctgaaggacg

SEQ ID NO: 600257 - DNA, 15 bp, Homo sapiens
gcctctgaaggacga

SEQ ID NO: 600258 - DNA, 15 bp, Homo sapiens
cctctgaaggacgaa

SEQ ID NO: 600259 - DNA, 15 bp, Homo sapiens
ctctgaaggacgaat

SEQ ID NO: 600260 - DNA, 15 bp, Homo sapiens
tctgaaggacgaata

SEQ ID NO: 600261 - DNA, 15 bp, Homo sapiens
ctgaaggacgaatat

SEQ ID NO: 600262 - DNA, 15 bp, Homo sapiens
tgaaggacgaatatt

SEQ ID NO: 600263 - DNA, 15 bp, Homo sapiens
gaaggacgaatattt

SEQ ID NO: 600264 - DNA, 15 bp, Homo sapiens
aaggacgaatattta

SEQ ID NO: 600265 - DNA, 15 bp, Homo sapiens
aggacgaatatttat

SEQ ID NO: 600266 - DNA, 15 bp, Homo sapiens
ggacgaatatttata

SEQ ID NO: 600267 - DNA, 15 bp, Homo sapiens
gacgaatatttataa

SEQ ID NO: 600268 - DNA, 15 bp, Homo sapiens
acgaatatttataat

SEQ ID NO: 600269 - DNA, 15 bp, Homo sapiens
cgaatatttataatt

SEQ ID NO: 600270 - DNA, 15 bp, Homo sapiens
gaatatttataattt

SEQ ID NO: 600271 - DNA, 15 bp, Homo sapiens
aatatttataatttt

SEQ ID NO: 600272 - DNA, 15 bp, Homo sapiens
atatttataattttt

SEQ ID NO: 600273 - DNA, 15 bp, Homo sapiens
tatttataattttta

SEQ ID NO: 600274 - DNA, 15 bp, Homo sapiens
atttataatttttaa

SEQ ID NO: 600275 - DNA, 15 bp, Homo sapiens
tttataatttttaag

SEQ ID NO: 600276 - DNA, 15 bp, Homo sapiens
ttataatttttaagg

SEQ ID NO: 600277 - DNA, 15 bp, Homo sapiens
tataatttttaaggc

SEQ ID NO: 600278 - DNA, 15 bp, Homo sapiens
ataatttttaaggct

SEQ ID NO: 600279 - DNA, 15 bp, Homo sapiens
taatttttaaggctg

SEQ ID NO: 600280 - DNA, 15 bp, Homo sapiens
aatttttaaggctgt

SEQ ID NO: 600281 - DNA, 15 bp, Homo sapiens
atttttaaggctgtt

SEQ ID NO: 600282 - DNA, 15 bp, Homo sapiens
tttttaaggctgttc

SEQ ID NO: 600283 - DNA, 15 bp, Homo sapiens
ttttaaggctgttca

SEQ ID NO: 600284 - DNA, 15 bp, Homo sapiens
tttaaggctgttcag

SEQ ID NO: 600285 - DNA, 15 bp, Homo sapiens
ttaaggctgttcagg

SEQ ID NO: 600286 - DNA, 15 bp, Homo sapiens
taaggctgttcagga

SEQ ID NO: 600287 - DNA, 15 bp, Homo sapiens
aaggctgttcaggaa

SEQ ID NO: 600288 - DNA, 15 bp, Homo sapiens
aggctgttcaggaaa

SEQ ID NO: 600289 - DNA, 15 bp, Homo sapiens
ggctgttcaggaaaa

SEQ ID NO: 600290 - DNA, 15 bp, Homo sapiens
gctgttcaggaaaaa

SEQ ID NO: 600291 - DNA, 15 bp, Homo sapiens
ctgttcaggaaaaaa

SEQ ID NO: 600292 - DNA, 15 bp, Homo sapiens
tgttcaggaaaaaac

SEQ ID NO: 600293 - DNA, 15 bp, Homo sapiens
gttcaggaaaaaact

SEQ ID NO: 600294 - DNA, 15 bp, Homo sapiens
ttcaggaaaaaacta

SEQ ID NO: 600295 - DNA, 15 bp, Homo sapiens
tcaggaaaaaactaa

SEQ ID NO: 600296 - DNA, 15 bp, Homo sapiens
caggaaaaaactaaa

SEQ ID NO: 600297 - DNA, 15 bp, Homo sapiens
aggaaaaaactaaaa

SEQ ID NO: 600298 - DNA, 15 bp, Homo sapiens
ggaaaaaactaaaaa

SEQ ID NO: 600299 - DNA, 15 bp, Homo sapiens
gaaaaaactaaaaag

SEQ ID NO: 600300 - DNA, 15 bp, Homo sapiens
aaaaaactaaaaaga

SEQ ID NO: 600301 - DNA, 15 bp, Homo sapiens
aaaaactaaaaagaa

SEQ ID NO: 600302 - DNA, 15 bp, Homo sapiens
aaaactaaaaagaac

SEQ ID NO: 600303 - DNA, 15 bp, Homo sapiens
aaactaaaaagaacg

SEQ ID NO: 600304 - DNA, 15 bp, Homo sapiens
aactaaaaagaacga

SEQ ID NO: 600305 - DNA, 15 bp, Homo sapiens
actaaaaagaacgac

SEQ ID NO: 600306 - DNA, 15 bp, Homo sapiens
ctaaaaagaacgaca

SEQ ID NO: 600307 - DNA, 15 bp, Homo sapiens
taaaaagaacgacaa

SEQ ID NO: 600308 - DNA, 15 bp, Homo sapiens
aaaaagaacgacaac

SEQ ID NO: 600309 - DNA, 15 bp, Homo sapiens
aaaagaacgacaacc

SEQ ID NO: 600310 - DNA, 15 bp, Homo sapiens
aaagaacgacaaccc

SEQ ID NO: 600311 - DNA, 15 bp, Homo sapiens
aagaacgacaacccc

SEQ ID NO: 600312 - DNA, 15 bp, Homo sapiens
agaacgacaacccca

SEQ ID NO: 600313 - DNA, 15 bp, Homo sapiens
gaacgacaaccccaa

SEQ ID NO: 600314 - DNA, 15 bp, Homo sapiens
aacgacaaccccaag

SEQ ID NO: 600315 - DNA, 15 bp, Homo sapiens
acgacaaccccaaga

SEQ ID NO: 600316 - DNA, 15 bp, Homo sapiens
cgacaaccccaagac

SEQ ID NO: 600317 - DNA, 15 bp, Homo sapiens
gacaaccccaagaca

SEQ ID NO: 600318 - DNA, 15 bp, Homo sapiens
acaaccccaagacat

SEQ ID NO: 600319 - DNA, 15 bp, Homo sapiens
caaccccaagacata

SEQ ID NO: 600320 - DNA, 15 bp, Homo sapiens
aaccccaagacatag

SEQ ID NO: 600321 - DNA, 15 bp, Homo sapiens
accccaagacatagc

SEQ ID NO: 600322 - DNA, 15 bp, Homo sapiens
ccccaagacatagct

SEQ ID NO: 600323 - DNA, 15 bp, Homo sapiens
cccaagacatagctg

SEQ ID NO: 600324 - DNA, 15 bp, Homo sapiens
ccaagacatagctga

SEQ ID NO: 600325 - DNA, 15 bp, Homo sapiens
caagacatagctgaa

SEQ ID NO: 600326 - DNA, 15 bp, Homo sapiens
aagacatagctgaag

SEQ ID NO: 600327 - DNA, 15 bp, Homo sapiens
agacatagctgaagg

SEQ ID NO: 600328 - DNA, 15 bp, Homo sapiens
gacatagctgaagga

SEQ ID NO: 600329 - DNA, 15 bp, Homo sapiens
acatagctgaaggaa

SEQ ID NO: 600330 - DNA, 15 bp, Homo sapiens
catagctgaaggaag

SEQ ID NO: 600331 - DNA, 15 bp, Homo sapiens
atagctgaaggaagt

SEQ ID NO: 600332 - DNA, 15 bp, Homo sapiens
tagctgaaggaagtg

SEQ ID NO: 600333 - DNA, 15 bp, Homo sapiens
agctgaaggaagtgc

SEQ ID NO: 600334 - DNA, 15 bp, Homo sapiens
gctgaaggaagtgca

SEQ ID NO: 600335 - DNA, 15 bp, Homo sapiens
ctgaaggaagtgcac

SEQ ID NO: 600336 - DNA, 15 bp, Homo sapiens
tgaaggaagtgcaca

SEQ ID NO: 600337 - DNA, 15 bp, Homo sapiens
gaaggaagtgcacaa

SEQ ID NO: 600338 - DNA, 15 bp, Homo sapiens
aaggaagtgcacaaa

SEQ ID NO: 600339 - DNA, 15 bp, Homo sapiens
aggaagtgcacaaaa

SEQ ID NO: 600340 - DNA, 15 bp, Homo sapiens
ggaagtgcacaaaaa

SEQ ID NO: 600341 - DNA, 15 bp, Homo sapiens
gaagtgcacaaaaac

SEQ ID NO: 600342 - DNA, 15 bp, Homo sapiens
aagtgcacaaaaaca

SEQ ID NO: 600343 - DNA, 15 bp, Homo sapiens
agtgcacaaaaacac

SEQ ID NO: 600344 - DNA, 15 bp, Homo sapiens
gtgcacaaaaacact

SEQ ID NO: 600345 - DNA, 15 bp, Homo sapiens
tgcacaaaaacactc

SEQ ID NO: 600346 - DNA, 15 bp, Homo sapiens
gcacaaaaacactca

SEQ ID NO: 600347 - DNA, 15 bp, Homo sapiens
cacaaaaacactcag

SEQ ID NO: 600348 - DNA, 15 bp, Homo sapiens
acaaaaacactcaga

SEQ ID NO: 600349 - DNA, 15 bp, Homo sapiens
caaaaacactcagaa

SEQ ID NO: 600350 - DNA, 15 bp, Homo sapiens
aaaaacactcagaag

SEQ ID NO: 600351 - DNA, 15 bp, Homo sapiens
aaaacactcagaagg

SEQ ID NO: 600352 - DNA, 15 bp, Homo sapiens
aaacactcagaagga

SEQ ID NO: 600353 - DNA, 15 bp, Homo sapiens
aacactcagaaggaa

SEQ ID NO: 600354 - DNA, 15 bp, Homo sapiens
acactcagaaggaat

SEQ ID NO: 600355 - DNA, 15 bp, Homo sapiens
cactcagaaggaatg

SEQ ID NO: 600356 - DNA, 15 bp, Homo sapiens
actcagaaggaatgg

SEQ ID NO: 600357 - DNA, 15 bp, Homo sapiens
ctcagaaggaatggt

SEQ ID NO: 600358 - DNA, 15 bp, Homo sapiens
tcagaaggaatggtg

SEQ ID NO: 600359 - DNA, 15 bp, Homo sapiens
cagaaggaatggtgg

SEQ ID NO: 600360 - DNA, 15 bp, Homo sapiens
agaaggaatggtgga

SEQ ID NO: 600361 - DNA, 15 bp, Homo sapiens
gaaggaatggtggat

SEQ ID NO: 600362 - DNA, 15 bp, Homo sapiens
aaggaatggtggatt

SEQ ID NO: 600363 - DNA, 15 bp, Homo sapiens
aggaatggtggattc

SEQ ID NO: 600364 - DNA, 15 bp, Homo sapiens
ggaatggtggattct

SEQ ID NO: 600365 - DNA, 15 bp, Homo sapiens
gaatggtggattctc

SEQ ID NO: 600366 - DNA, 15 bp, Homo sapiens
aatggtggattctca

SEQ ID NO: 600367 - DNA, 15 bp, Homo sapiens
atggtggattctcag

SEQ ID NO: 600368 - DNA, 15 bp, Homo sapiens
tggtggattctcagt

SEQ ID NO: 600369 - DNA, 15 bp, Homo sapiens
ggtggattctcagtg

SEQ ID NO: 600370 - DNA, 15 bp, Homo sapiens
gtggattctcagtgg

SEQ ID NO: 600371 - DNA, 15 bp, Homo sapiens
tggattctcagtggg

SEQ ID NO: 600372 - DNA, 15 bp, Homo sapiens
ggattctcagtggga

SEQ ID NO: 600373 - DNA, 15 bp, Homo sapiens
gattctcagtgggat

SEQ ID NO: 600374 - DNA, 15 bp, Homo sapiens
attctcagtgggatg

SEQ ID NO: 600375 - DNA, 15 bp, Homo sapiens
ttctcagtgggatgg

SEQ ID NO: 600376 - DNA, 15 bp, Homo sapiens
tctcagtgggatggg

SEQ ID NO: 600377 - DNA, 15 bp, Homo sapiens
ctcagtgggatgggt

SEQ ID NO: 600378 - DNA, 15 bp, Homo sapiens
tcagtgggatgggtc

SEQ ID NO: 600379 - DNA, 15 bp, Homo sapiens
cagtgggatgggtct

SEQ ID NO: 600380 - DNA, 15 bp, Homo sapiens
agtgggatgggtctg

SEQ ID NO: 600381 - DNA, 15 bp, Homo sapiens
gtgggatgggtctgt

SEQ ID NO: 600382 - DNA, 15 bp, Homo sapiens
tgggatgggtctgtt

SEQ ID NO: 600383 - DNA, 15 bp, Homo sapiens
gggatgggtctgttt

SEQ ID NO: 600384 - DNA, 15 bp, Homo sapiens
ggatgggtctgtttg

SEQ ID NO: 600385 - DNA, 15 bp, Homo sapiens
gatgggtctgtttgg

SEQ ID NO: 600386 - DNA, 15 bp, Homo sapiens
atgggtctgtttggg

SEQ ID NO: 600387 - DNA, 15 bp, Homo sapiens
tgggtctgtttgggt

SEQ ID NO: 600388 - DNA, 15 bp, Homo sapiens
gggtctgtttgggtc

SEQ ID NO: 600389 - DNA, 15 bp, Homo sapiens
ggtctgtttgggtct

SEQ ID NO: 600390 - DNA, 15 bp, Homo sapiens
gtctgtttgggtctg

SEQ ID NO: 600391 - DNA, 15 bp, Homo sapiens
tctgtttgggtctgt

SEQ ID NO: 600392 - DNA, 15 bp, Homo sapiens
ctgtttgggtctgtg

SEQ ID NO: 600393 - DNA, 15 bp, Homo sapiens
tgtttgggtctgtgt

SEQ ID NO: 600394 - DNA, 15 bp, Homo sapiens
gtttgggtctgtgtg

SEQ ID NO: 600395 - DNA, 15 bp, Homo sapiens
tttgggtctgtgtgc

SEQ ID NO: 600396 - DNA, 15 bp, Homo sapiens
ttgggtctgtgtgct

SEQ ID NO: 600397 - DNA, 15 bp, Homo sapiens
tgggtctgtgtgctg

SEQ ID NO: 600398 - DNA, 15 bp, Homo sapiens
gggtctgtgtgctga

SEQ ID NO: 600399 - DNA, 15 bp, Homo sapiens
ggtctgtgtgctgaa

SEQ ID NO: 600400 - DNA, 15 bp, Homo sapiens
gtctgtgtgctgaaa

SEQ ID NO: 600401 - DNA, 15 bp, Homo sapiens
tctgtgtgctgaaaa

SEQ ID NO: 600402 - DNA, 15 bp, Homo sapiens
ctgtgtgctgaaaag

SEQ ID NO: 600403 - DNA, 15 bp, Homo sapiens
tgtgtgctgaaaagc

SEQ ID NO: 600404 - DNA, 15 bp, Homo sapiens
gtgtgctgaaaagcc

SEQ ID NO: 600405 - DNA, 15 bp, Homo sapiens
tgtgctgaaaagcca

SEQ ID NO: 600406 - DNA, 15 bp, Homo sapiens
gtgctgaaaagccat

SEQ ID NO: 600407 - DNA, 15 bp, Homo sapiens
tgctgaaaagccatt

SEQ ID NO: 600408 - DNA, 15 bp, Homo sapiens
gctgaaaagccattt

SEQ ID NO: 600409 - DNA, 15 bp, Homo sapiens
ctgaaaagccatttc

SEQ ID NO: 600410 - DNA, 15 bp, Homo sapiens
tgaaaagccatttcg

SEQ ID NO: 600411 - DNA, 15 bp, Homo sapiens
gaaaagccatttcgg

SEQ ID NO: 600412 - DNA, 15 bp, Homo sapiens
aaaagccatttcggt

SEQ ID NO: 600413 - DNA, 15 bp, Homo sapiens
aaagccatttcggtg

SEQ ID NO: 600414 - DNA, 15 bp, Homo sapiens
aagccatttcggtga

SEQ ID NO: 600415 - DNA, 15 bp, Homo sapiens
agccatttcggtgac

SEQ ID NO: 600416 - DNA, 15 bp, Homo sapiens
gccatttcggtgacc

SEQ ID NO: 600417 - DNA, 15 bp, Homo sapiens
ccatttcggtgacct

SEQ ID NO: 600418 - DNA, 15 bp, Homo sapiens
catttcggtgacctc

SEQ ID NO: 600419 - DNA, 15 bp, Homo sapiens
atttcggtgacctca

SEQ ID NO: 600420 - DNA, 15 bp, Homo sapiens
tttcggtgacctcac

SEQ ID NO: 600421 - DNA, 15 bp, Homo sapiens
ttcggtgacctcact

SEQ ID NO: 600422 - DNA, 15 bp, Homo sapiens
tcggtgacctcactg

SEQ ID NO: 600423 - DNA, 15 bp, Homo sapiens
cggtgacctcactgg

SEQ ID NO: 600424 - DNA, 15 bp, Homo sapiens
ggtgacctcactgga

SEQ ID NO: 600425 - DNA, 15 bp, Homo sapiens
gtgacctcactggaa

SEQ ID NO: 600426 - DNA, 15 bp, Homo sapiens
tgacctcactggaag

SEQ ID NO: 600427 - DNA, 15 bp, Homo sapiens
gacctcactggaagt

SEQ ID NO: 600428 - DNA, 15 bp, Homo sapiens
acctcactggaagtg

SEQ ID NO: 600429 - DNA, 15 bp, Homo sapiens
cctcactggaagtgg

SEQ ID NO: 600430 - DNA, 15 bp, Homo sapiens
ctcactggaagtgga

SEQ ID NO: 600431 - DNA, 15 bp, Homo sapiens
tcactggaagtggag

SEQ ID NO: 600432 - DNA, 15 bp, Homo sapiens
cactggaagtggagg

SEQ ID NO: 600433 - DNA, 15 bp, Homo sapiens
actggaagtggaggc

SEQ ID NO: 600434 - DNA, 15 bp, Homo sapiens
ctggaagtggaggct

SEQ ID NO: 600435 - DNA, 15 bp, Homo sapiens
tggaagtggaggctc

SEQ ID NO: 600436 - DNA, 15 bp, Homo sapiens
ggaagtggaggctca

SEQ ID NO: 600437 - DNA, 15 bp, Homo sapiens
gaagtggaggctcag

SEQ ID NO: 600438 - DNA, 15 bp, Homo sapiens
aagtggaggctcagc

SEQ ID NO: 600439 - DNA, 15 bp, Homo sapiens
agtggaggctcagct

SEQ ID NO: 600440 - DNA, 15 bp, Homo sapiens
gtggaggctcagctc

SEQ ID NO: 600441 - DNA, 15 bp, Homo sapiens
tggaggctcagctct

SEQ ID NO: 600442 - DNA, 15 bp, Homo sapiens
ggaggctcagctctc

SEQ ID NO: 600443 - DNA, 15 bp, Homo sapiens
gaggctcagctctcc

SEQ ID NO: 600444 - DNA, 15 bp, Homo sapiens
aggctcagctctccc

SEQ ID NO: 600445 - DNA, 15 bp, Homo sapiens
ggctcagctctccct

SEQ ID NO: 600446 - DNA, 15 bp, Homo sapiens
gctcagctctcccta

SEQ ID NO: 600447 - DNA, 15 bp, Homo sapiens
ctcagctctccctac

SEQ ID NO: 600448 - DNA, 15 bp, Homo sapiens
tcagctctccctact

SEQ ID NO: 600449 - DNA, 15 bp, Homo sapiens
cagctctccctactc

SEQ ID NO: 600450 - DNA, 15 bp, Homo sapiens
agctctccctactca

SEQ ID NO: 600451 - DNA, 15 bp, Homo sapiens
gctctccctactcac

SEQ ID NO: 600452 - DNA, 15 bp, Homo sapiens
ctctccctactcaca

SEQ ID NO: 600453 - DNA, 15 bp, Homo sapiens
tctccctactcacag

SEQ ID NO: 600454 - DNA, 15 bp, Homo sapiens
ctccctactcacagg

SEQ ID NO: 600455 - DNA, 15 bp, Homo sapiens
tccctactcacaggt

SEQ ID NO: 600456 - DNA, 15 bp, Homo sapiens
ccctactcacaggtg

SEQ ID NO: 600457 - DNA, 15 bp, Homo sapiens
cctactcacaggtga

SEQ ID NO: 600458 - DNA, 15 bp, Homo sapiens
ctactcacaggtgag

SEQ ID NO: 600459 - DNA, 15 bp, Homo sapiens
tactcacaggtgaga

SEQ ID NO: 600460 - DNA, 15 bp, Homo sapiens
actcacaggtgagag

SEQ ID NO: 600461 - DNA, 15 bp, Homo sapiens
ctcacaggtgagagg

SEQ ID NO: 600462 - DNA, 15 bp, Homo sapiens
tcacaggtgagaggg

SEQ ID NO: 600463 - DNA, 15 bp, Homo sapiens
cacaggtgagaggga

SEQ ID NO: 600464 - DNA, 15 bp, Homo sapiens
acaggtgagagggat

SEQ ID NO: 600465 - DNA, 15 bp, Homo sapiens
caggtgagagggatc

SEQ ID NO: 600466 - DNA, 15 bp, Homo sapiens
aggtgagagggatcc

SEQ ID NO: 600467 - DNA, 15 bp, Homo sapiens
ggtgagagggatccc

SEQ ID NO: 600468 - DNA, 15 bp, Homo sapiens
gtgagagggatccct

SEQ ID NO: 600469 - DNA, 15 bp, Homo sapiens
tgagagggatccctc

SEQ ID NO: 600470 - DNA, 15 bp, Homo sapiens
gagagggatccctcc

SEQ ID NO: 600471 - DNA, 15 bp, Homo sapiens
agagggatccctccc

SEQ ID NO: 600472 - DNA, 15 bp, Homo sapiens
gagggatccctccca

SEQ ID NO: 600473 - DNA, 15 bp, Homo sapiens
agggatccctcccat

SEQ ID NO: 600474 - DNA, 15 bp, Homo sapiens
gggatccctcccatt

SEQ ID NO: 600475 - DNA, 15 bp, Homo sapiens
ggatccctcccattg

SEQ ID NO: 600476 - DNA, 15 bp, Homo sapiens
gatccctcccattgc

SEQ ID NO: 600477 - DNA, 15 bp, Homo sapiens
atccctcccattgca

SEQ ID NO: 600478 - DNA, 15 bp, Homo sapiens
tccctcccattgcac

SEQ ID NO: 600479 - DNA, 15 bp, Homo sapiens
ccctcccattgcacg

SEQ ID NO: 600480 - DNA, 15 bp, Homo sapiens
cctcccattgcacgt

SEQ ID NO: 600481 - DNA, 15 bp, Homo sapiens
ctcccattgcacgtg

SEQ ID NO: 600482 - DNA, 15 bp, Homo sapiens
tcccattgcacgtgt

SEQ ID NO: 600483 - DNA, 15 bp, Homo sapiens
cccattgcacgtgtg

SEQ ID NO: 600484 - DNA, 15 bp, Homo sapiens
ccattgcacgtgtga

SEQ ID NO: 600485 - DNA, 15 bp, Homo sapiens
cattgcacgtgtgac

SEQ ID NO: 600486 - DNA, 15 bp, Homo sapiens
attgcacgtgtgact

SEQ ID NO: 600487 - DNA, 15 bp, Homo sapiens
ttgcacgtgtgactt

SEQ ID NO: 600488 - DNA, 15 bp, Homo sapiens
tgcacgtgtgacttc

SEQ ID NO: 600489 - DNA, 15 bp, Homo sapiens
gcacgtgtgacttca

SEQ ID NO: 600490 - DNA, 15 bp, Homo sapiens
cacgtgtgacttcag

SEQ ID NO: 600491 - DNA, 15 bp, Homo sapiens
acgtgtgacttcagt

SEQ ID NO: 600492 - DNA, 15 bp, Homo sapiens
cgtgtgacttcagtg

SEQ ID NO: 600493 - DNA, 15 bp, Homo sapiens
gtgtgacttcagtgt

SEQ ID NO: 600494 - DNA, 15 bp, Homo sapiens
tgtgacttcagtgtt

SEQ ID NO: 600495 - DNA, 15 bp, Homo sapiens
gtgacttcagtgttc

SEQ ID NO: 600496 - DNA, 15 bp, Homo sapiens
tgacttcagtgttct

SEQ ID NO: 600497 - DNA, 15 bp, Homo sapiens
gacttcagtgttctg

SEQ ID NO: 600498 - DNA, 15 bp, Homo sapiens
acttcagtgttctgg

SEQ ID NO: 600499 - DNA, 15 bp, Homo sapiens
cttcagtgttctgga

SEQ ID NO: 600500 - DNA, 15 bp, Homo sapiens
ttcagtgttctggaa

SEQ ID NO: 600501 - DNA, 15 bp, Homo sapiens
tcagtgttctggaac

SEQ ID NO: 600502 - DNA, 15 bp, Homo sapiens
cagtgttctggaacc

SEQ ID NO: 600503 - DNA, 15 bp, Homo sapiens
agtgttctggaacct

SEQ ID NO: 600504 - DNA, 15 bp, Homo sapiens
gtgttctggaacctc

SEQ ID NO: 600505 - DNA, 15 bp, Homo sapiens
tgttctggaacctcc

SEQ ID NO: 600506 - DNA, 15 bp, Homo sapiens
gttctggaacctccc

SEQ ID NO: 600507 - DNA, 15 bp, Homo sapiens
ttctggaacctccct

SEQ ID NO: 600508 - DNA, 15 bp, Homo sapiens
tctggaacctccctg

SEQ ID NO: 600509 - DNA, 15 bp, Homo sapiens
ctggaacctccctga

SEQ ID NO: 600510 - DNA, 15 bp, Homo sapiens
tggaacctccctgac

SEQ ID NO: 600511 - DNA, 15 bp, Homo sapiens
ggaacctccctgacc

SEQ ID NO: 600512 - DNA, 15 bp, Homo sapiens
gaacctccctgaccc

SEQ ID NO: 600513 - DNA, 15 bp, Homo sapiens
aacctccctgacccc

SEQ ID NO: 600514 - DNA, 15 bp, Homo sapiens
acctccctgacccct

SEQ ID NO: 600515 - DNA, 15 bp, Homo sapiens
cctccctgacccctt

SEQ ID NO: 600516 - DNA, 15 bp, Homo sapiens
ctccctgaccccttc

SEQ ID NO: 600517 - DNA, 15 bp, Homo sapiens
tccctgaccccttca

SEQ ID NO: 600518 - DNA, 15 bp, Homo sapiens
ccctgaccccttcac

SEQ ID NO: 600519 - DNA, 15 bp, Homo sapiens
cctgaccccttcacc

SEQ ID NO: 600520 - DNA, 15 bp, Homo sapiens
ctgaccccttcacct

SEQ ID NO: 600521 - DNA, 15 bp, Homo sapiens
tgaccccttcacctc

SEQ ID NO: 600522 - DNA, 15 bp, Homo sapiens
gaccccttcacctca

SEQ ID NO: 600523 - DNA, 15 bp, Homo sapiens
accccttcacctcat

SEQ ID NO: 600524 - DNA, 15 bp, Homo sapiens
ccccttcacctcatg

SEQ ID NO: 600525 - DNA, 15 bp, Homo sapiens
cccttcacctcatgt

SEQ ID NO: 600526 - DNA, 15 bp, Homo sapiens
ccttcacctcatgtc

SEQ ID NO: 600527 - DNA, 15 bp, Homo sapiens
cttcacctcatgtcc

SEQ ID NO: 600528 - DNA, 15 bp, Homo sapiens
ttcacctcatgtcct

SEQ ID NO: 600529 - DNA, 15 bp, Homo sapiens
tcacctcatgtcctc

SEQ ID NO: 600530 - DNA, 15 bp, Homo sapiens
cacctcatgtcctca

SEQ ID NO: 600531 - DNA, 15 bp, Homo sapiens
acctcatgtcctcag

SEQ ID NO: 600532 - DNA, 15 bp, Homo sapiens
cctcatgtcctcagg

SEQ ID NO: 600533 - DNA, 15 bp, Homo sapiens
ctcatgtcctcagga

SEQ ID NO: 600534 - DNA, 15 bp, Homo sapiens
tcatgtcctcaggac

SEQ ID NO: 600535 - DNA, 15 bp, Homo sapiens
catgtcctcaggact

SEQ ID NO: 600536 - DNA, 15 bp, Homo sapiens
atgtcctcaggactc

SEQ ID NO: 600537 - DNA, 15 bp, Homo sapiens
tgtcctcaggactct

SEQ ID NO: 600538 - DNA, 15 bp, Homo sapiens
gtcctcaggactctt

SEQ ID NO: 600539 - DNA, 15 bp, Homo sapiens
tcctcaggactcttc

SEQ ID NO: 600540 - DNA, 15 bp, Homo sapiens
cctcaggactcttcc

SEQ ID NO: 600541 - DNA, 15 bp, Homo sapiens
ctcaggactcttcct

SEQ ID NO: 600542 - DNA, 15 bp, Homo sapiens
tcaggactcttcctt

SEQ ID NO: 600543 - DNA, 15 bp, Homo sapiens
caggactcttccttt

SEQ ID NO: 600544 - DNA, 15 bp, Homo sapiens
aggactcttcctttg

SEQ ID NO: 600545 - DNA, 15 bp, Homo sapiens
ggactcttcctttgg

SEQ ID NO: 600546 - DNA, 15 bp, Homo sapiens
gactcttcctttggg

SEQ ID NO: 600547 - DNA, 15 bp, Homo sapiens
actcttcctttgggt

SEQ ID NO: 600548 - DNA, 15 bp, Homo sapiens
ctcttcctttgggtg

SEQ ID NO: 600549 - DNA, 15 bp, Homo sapiens
tcttcctttgggtgg

SEQ ID NO: 600550 - DNA, 15 bp, Homo sapiens
cttcctttgggtgga

SEQ ID NO: 600551 - DNA, 15 bp, Homo sapiens
ttcctttgggtggat

SEQ ID NO: 600552 - DNA, 15 bp, Homo sapiens
tcctttgggtggata

SEQ ID NO: 600553 - DNA, 15 bp, Homo sapiens
cctttgggtggatag

SEQ ID NO: 600554 - DNA, 15 bp, Homo sapiens
ctttgggtggataga

SEQ ID NO: 600555 - DNA, 15 bp, Homo sapiens
tttgggtggatagaa

SEQ ID NO: 600556 - DNA, 15 bp, Homo sapiens
ttgggtggatagaag

SEQ ID NO: 600557 - DNA, 15 bp, Homo sapiens
tgggtggatagaagc

SEQ ID NO: 600558 - DNA, 15 bp, Homo sapiens
gggtggatagaagct

SEQ ID NO: 600559 - DNA, 15 bp, Homo sapiens
ggtggatagaagctg

SEQ ID NO: 600560 - DNA, 15 bp, Homo sapiens
gtggatagaagctgg

SEQ ID NO: 600561 - DNA, 15 bp, Homo sapiens
tggatagaagctggg

SEQ ID NO: 600562 - DNA, 15 bp, Homo sapiens
ggatagaagctgggt

SEQ ID NO: 600563 - DNA, 15 bp, Homo sapiens
gatagaagctgggtt

SEQ ID NO: 600564 - DNA, 15 bp, Homo sapiens
atagaagctgggttg

SEQ ID NO: 600565 - DNA, 15 bp, Homo sapiens
tagaagctgggttga

SEQ ID NO: 600566 - DNA, 15 bp, Homo sapiens
agaagctgggttgaa

SEQ ID NO: 600567 - DNA, 15 bp, Homo sapiens
gaagctgggttgaat

SEQ ID NO: 600568 - DNA, 15 bp, Homo sapiens
aagctgggttgaata

SEQ ID NO: 600569 - DNA, 15 bp, Homo sapiens
agctgggttgaatat

SEQ ID NO: 600570 - DNA, 15 bp, Homo sapiens
gctgggttgaatatt

SEQ ID NO: 600571 - DNA, 15 bp, Homo sapiens
ctgggttgaatatta

SEQ ID NO: 600572 - DNA, 15 bp, Homo sapiens
tgggttgaatattag

SEQ ID NO: 600573 - DNA, 15 bp, Homo sapiens
gggttgaatattaga

SEQ ID NO: 600574 - DNA, 15 bp, Homo sapiens
ggttgaatattagat

SEQ ID NO: 600575 - DNA, 15 bp, Homo sapiens
gttgaatattagatt

SEQ ID NO: 600576 - DNA, 15 bp, Homo sapiens
ttgaatattagattt

SEQ ID NO: 600577 - DNA, 15 bp, Homo sapiens
tgaatattagatttg

SEQ ID NO: 600578 - DNA, 15 bp, Homo sapiens
gaatattagatttgg

SEQ ID NO: 600579 - DNA, 15 bp, Homo sapiens
aatattagatttggt

SEQ ID NO: 600580 - DNA, 15 bp, Homo sapiens
atattagatttggtt

SEQ ID NO: 600581 - DNA, 15 bp, Homo sapiens
tattagatttggttg

SEQ ID NO: 600582 - DNA, 15 bp, Homo sapiens
attagatttggttgc

SEQ ID NO: 600583 - DNA, 15 bp, Homo sapiens
ttagatttggttgct

SEQ ID NO: 600584 - DNA, 15 bp, Homo sapiens
tagatttggttgctg

SEQ ID NO: 600585 - DNA, 15 bp, Homo sapiens
agatttggttgctgt

SEQ ID NO: 600586 - DNA, 15 bp, Homo sapiens
gatttggttgctgtg

SEQ ID NO: 600587 - DNA, 15 bp, Homo sapiens
atttggttgctgtgt

SEQ ID NO: 600588 - DNA, 15 bp, Homo sapiens
tttggttgctgtgtc

SEQ ID NO: 600589 - DNA, 15 bp, Homo sapiens
ttggttgctgtgtca

SEQ ID NO: 600590 - DNA, 15 bp, Homo sapiens
tggttgctgtgtcag

SEQ ID NO: 600591 - DNA, 15 bp, Homo sapiens
ggttgctgtgtcaga

SEQ ID NO: 600592 - DNA, 15 bp, Homo sapiens
gttgctgtgtcagag

SEQ ID NO: 600593 - DNA, 15 bp, Homo sapiens
ttgctgtgtcagagg

SEQ ID NO: 600594 - DNA, 15 bp, Homo sapiens
tgctgtgtcagaggg

SEQ ID NO: 600595 - DNA, 15 bp, Homo sapiens
gctgtgtcagagggg

SEQ ID NO: 600596 - DNA, 15 bp, Homo sapiens
ctgtgtcagagggga

SEQ ID NO: 600597 - DNA, 15 bp, Homo sapiens
tgtgtcagaggggag

SEQ ID NO: 600598 - DNA, 15 bp, Homo sapiens
gtgtcagaggggagc

SEQ ID NO: 600599 - DNA, 15 bp, Homo sapiens
tgtcagaggggagca

SEQ ID NO: 600600 - DNA, 15 bp, Homo sapiens
gtcagaggggagcac

SEQ ID NO: 600601 - DNA, 15 bp, Homo sapiens
tcagaggggagcacg

SEQ ID NO: 600602 - DNA, 15 bp, Homo sapiens
cagaggggagcacgg

SEQ ID NO: 600603 - DNA, 15 bp, Homo sapiens
agaggggagcacggg

SEQ ID NO: 600604 - DNA, 15 bp, Homo sapiens
gaggggagcacgggg

SEQ ID NO: 600605 - DNA, 15 bp, Homo sapiens
aggggagcacgggga

SEQ ID NO: 600606 - DNA, 15 bp, Homo sapiens
ggggagcacggggag

SEQ ID NO: 600607 - DNA, 15 bp, Homo sapiens
gggagcacggggagg

SEQ ID NO: 600608 - DNA, 15 bp, Homo sapiens
ggagcacggggaggg

SEQ ID NO: 600609 - DNA, 15 bp, Homo sapiens
gagcacggggagggg

SEQ ID NO: 600610 - DNA, 15 bp, Homo sapiens
agcacggggaggggg

SEQ ID NO: 600611 - DNA, 15 bp, Homo sapiens
gcacggggagggggt

SEQ ID NO: 600612 - DNA, 15 bp, Homo sapiens
cacggggagggggtg

SEQ ID NO: 600613 - DNA, 15 bp, Homo sapiens
acggggagggggtgg

SEQ ID NO: 600614 - DNA, 15 bp, Homo sapiens
cggggagggggtggg

SEQ ID NO: 600615 - DNA, 15 bp, Homo sapiens
ggggagggggtgggg

SEQ ID NO: 600616 - DNA, 15 bp, Homo sapiens
gggagggggtggggg

SEQ ID NO: 600617 - DNA, 15 bp, Homo sapiens
ggagggggtgggggg

SEQ ID NO: 600618 - DNA, 15 bp, Homo sapiens
gagggggtggggggt

SEQ ID NO: 600619 - DNA, 15 bp, Homo sapiens
agggggtggggggtg

SEQ ID NO: 600620 - DNA, 15 bp, Homo sapiens
gggggtggggggtgc

SEQ ID NO: 600621 - DNA, 15 bp, Homo sapiens
ggggtggggggtgct

SEQ ID NO: 600622 - DNA, 15 bp, Homo sapiens
gggtggggggtgctg

SEQ ID NO: 600623 - DNA, 15 bp, Homo sapiens
ggtggggggtgctgt

SEQ ID NO: 600624 - DNA, 15 bp, Homo sapiens
gtggggggtgctgtg

SEQ ID NO: 600625 - DNA, 15 bp, Homo sapiens
tggggggtgctgtgt

SEQ ID NO: 600626 - DNA, 15 bp, Homo sapiens
ggggggtgctgtgtt

SEQ ID NO: 600627 - DNA, 15 bp, Homo sapiens
gggggtgctgtgttg

SEQ ID NO: 600628 - DNA, 15 bp, Homo sapiens
ggggtgctgtgttga

SEQ ID NO: 600629 - DNA, 15 bp, Homo sapiens
gggtgctgtgttgag

SEQ ID NO: 600630 - DNA, 15 bp, Homo sapiens
ggtgctgtgttgagt

SEQ ID NO: 600631 - DNA, 15 bp, Homo sapiens
gtgctgtgttgagtg

SEQ ID NO: 600632 - DNA, 15 bp, Homo sapiens
tgctgtgttgagtgc

SEQ ID NO: 600633 - DNA, 15 bp, Homo sapiens
gctgtgttgagtgca

SEQ ID NO: 600634 - DNA, 15 bp, Homo sapiens
ctgtgttgagtgcat

SEQ ID NO: 600635 - DNA, 15 bp, Homo sapiens
tgtgttgagtgcatc

SEQ ID NO: 600636 - DNA, 15 bp, Homo sapiens
gtgttgagtgcatct

SEQ ID NO: 600637 - DNA, 15 bp, Homo sapiens
tgttgagtgcatctg

SEQ ID NO: 600638 - DNA, 15 bp, Homo sapiens
gttgagtgcatctgt

SEQ ID NO: 600639 - DNA, 15 bp, Homo sapiens
ttgagtgcatctgta

SEQ ID NO: 600640 - DNA, 15 bp, Homo sapiens
tgagtgcatctgtaa

SEQ ID NO: 600641 - DNA, 15 bp, Homo sapiens
gagtgcatctgtaag

SEQ ID NO: 600642 - DNA, 15 bp, Homo sapiens
agtgcatctgtaagt

SEQ ID NO: 600643 - DNA, 15 bp, Homo sapiens
gtgcatctgtaagtg

SEQ ID NO: 600644 - DNA, 15 bp, Homo sapiens
tgcatctgtaagtga

SEQ ID NO: 600645 - DNA, 15 bp, Homo sapiens
gcatctgtaagtgag

SEQ ID NO: 600646 - DNA, 15 bp, Homo sapiens
catctgtaagtgagt

SEQ ID NO: 600647 - DNA, 15 bp, Homo sapiens
atctgtaagtgagtg

SEQ ID NO: 600648 - DNA, 15 bp, Homo sapiens
tctgtaagtgagtgc

SEQ ID NO: 600649 - DNA, 15 bp, Homo sapiens
ctgtaagtgagtgcg

SEQ ID NO: 600650 - DNA, 15 bp, Homo sapiens
tgtaagtgagtgcgt

SEQ ID NO: 600651 - DNA, 15 bp, Homo sapiens
gtaagtgagtgcgtt

SEQ ID NO: 600652 - DNA, 15 bp, Homo sapiens
taagtgagtgcgttt

SEQ ID NO: 600653 - DNA, 15 bp, Homo sapiens
aagtgagtgcgtttt

SEQ ID NO: 600654 - DNA, 15 bp, Homo sapiens
agtgagtgcgttttg

SEQ ID NO: 600655 - DNA, 15 bp, Homo sapiens
gtgagtgcgttttgg

SEQ ID NO: 600656 - DNA, 15 bp, Homo sapiens
tgagtgcgttttgga

SEQ ID NO: 600657 - DNA, 15 bp, Homo sapiens
gagtgcgttttggag

SEQ ID NO: 600658 - DNA, 15 bp, Homo sapiens
agtgcgttttggagg

SEQ ID NO: 600659 - DNA, 15 bp, Homo sapiens
gtgcgttttggagga

SEQ ID NO: 600660 - DNA, 15 bp, Homo sapiens
tgcgttttggaggag

SEQ ID NO: 600661 - DNA, 15 bp, Homo sapiens
gcgttttggaggagg

SEQ ID NO: 600662 - DNA, 15 bp, Homo sapiens
cgttttggaggagga

SEQ ID NO: 600663 - DNA, 15 bp, Homo sapiens
gttttggaggaggaa

SEQ ID NO: 600664 - DNA, 15 bp, Homo sapiens
ttttggaggaggaat

SEQ ID NO: 600665 - DNA, 15 bp, Homo sapiens
tttggaggaggaatg

SEQ ID NO: 600666 - DNA, 15 bp, Homo sapiens
ttggaggaggaatgc

SEQ ID NO: 600667 - DNA, 15 bp, Homo sapiens
tggaggaggaatgct

SEQ ID NO: 600668 - DNA, 15 bp, Homo sapiens
ggaggaggaatgcta

SEQ ID NO: 600669 - DNA, 15 bp, Homo sapiens
gaggaggaatgctaa

SEQ ID NO: 600670 - DNA, 15 bp, Homo sapiens
aggaggaatgctaat

SEQ ID NO: 600671 - DNA, 15 bp, Homo sapiens
ggaggaatgctaatg

SEQ ID NO: 600672 - DNA, 15 bp, Homo sapiens
gaggaatgctaatgg

SEQ ID NO: 600673 - DNA, 15 bp, Homo sapiens
aggaatgctaatggc

SEQ ID NO: 600674 - DNA, 15 bp, Homo sapiens
ggaatgctaatggca

SEQ ID NO: 600675 - DNA, 15 bp, Homo sapiens
gaatgctaatggcag

SEQ ID NO: 600676 - DNA, 15 bp, Homo sapiens
aatgctaatggcaga

SEQ ID NO: 600677 - DNA, 15 bp, Homo sapiens
atgctaatggcagac

SEQ ID NO: 600678 - DNA, 15 bp, Homo sapiens
tgctaatggcagaca

SEQ ID NO: 600679 - DNA, 15 bp, Homo sapiens
gctaatggcagacat

SEQ ID NO: 600680 - DNA, 15 bp, Homo sapiens
ctaatggcagacatc

SEQ ID NO: 600681 - DNA, 15 bp, Homo sapiens
taatggcagacatcc

SEQ ID NO: 600682 - DNA, 15 bp, Homo sapiens
aatggcagacatccc

SEQ ID NO: 600683 - DNA, 15 bp, Homo sapiens
atggcagacatccca

SEQ ID NO: 600684 - DNA, 15 bp, Homo sapiens
tggcagacatcccag

SEQ ID NO: 600685 - DNA, 15 bp, Homo sapiens
ggcagacatcccagc

SEQ ID NO: 600686 - DNA, 15 bp, Homo sapiens
gcagacatcccagct

SEQ ID NO: 600687 - DNA, 15 bp, Homo sapiens
cagacatcccagctc

SEQ ID NO: 600688 - DNA, 15 bp, Homo sapiens
agacatcccagctct

SEQ ID NO: 600689 - DNA, 15 bp, Homo sapiens
gacatcccagctctt

SEQ ID NO: 600690 - DNA, 15 bp, Homo sapiens
acatcccagctcttt

SEQ ID NO: 600691 - DNA, 15 bp, Homo sapiens
catcccagctctttg

SEQ ID NO: 600692 - DNA, 15 bp, Homo sapiens
atcccagctctttgt

SEQ ID NO: 600693 - DNA, 15 bp, Homo sapiens
tcccagctctttgta

SEQ ID NO: 600694 - DNA, 15 bp, Homo sapiens
cccagctctttgtag

SEQ ID NO: 600695 - DNA, 15 bp, Homo sapiens
ccagctctttgtagc

SEQ ID NO: 600696 - DNA, 15 bp, Homo sapiens
cagctctttgtagcc

SEQ ID NO: 600697 - DNA, 15 bp, Homo sapiens
agctctttgtagccc

SEQ ID NO: 600698 - DNA, 15 bp, Homo sapiens
gctctttgtagccct

SEQ ID NO: 600699 - DNA, 15 bp, Homo sapiens
ctctttgtagccctg

SEQ ID NO: 600700 - DNA, 15 bp, Homo sapiens
tctttgtagccctga

SEQ ID NO: 600701 - DNA, 15 bp, Homo sapiens
ctttgtagccctgaa

SEQ ID NO: 600702 - DNA, 15 bp, Homo sapiens
tttgtagccctgaac

SEQ ID NO: 600703 - DNA, 15 bp, Homo sapiens
ttgtagccctgaacg

SEQ ID NO: 600704 - DNA, 15 bp, Homo sapiens
tgtagccctgaacgc

SEQ ID NO: 600705 - DNA, 15 bp, Homo sapiens
gtagccctgaacgcc

SEQ ID NO: 600706 - DNA, 15 bp, Homo sapiens
tagccctgaacgcca

SEQ ID NO: 600707 - DNA, 15 bp, Homo sapiens
agccctgaacgccac

SEQ ID NO: 600708 - DNA, 15 bp, Homo sapiens
gccctgaacgccact

SEQ ID NO: 600709 - DNA, 15 bp, Homo sapiens
ccctgaacgccacta

SEQ ID NO: 600710 - DNA, 15 bp, Homo sapiens
cctgaacgccactac

SEQ ID NO: 600711 - DNA, 15 bp, Homo sapiens
ctgaacgccactact

SEQ ID NO: 600712 - DNA, 15 bp, Homo sapiens
tgaacgccactactc

SEQ ID NO: 600713 - DNA, 15 bp, Homo sapiens
gaacgccactactct

SEQ ID NO: 600714 - DNA, 15 bp, Homo sapiens
aacgccactactctc

SEQ ID NO: 600715 - DNA, 15 bp, Homo sapiens
acgccactactctcc

SEQ ID NO: 600716 - DNA, 15 bp, Homo sapiens
cgccactactctccc

SEQ ID NO: 600717 - DNA, 15 bp, Homo sapiens
gccactactctcccc

SEQ ID NO: 600718 - DNA, 15 bp, Homo sapiens
ccactactctccccg

SEQ ID NO: 600719 - DNA, 15 bp, Homo sapiens
cactactctccccgg

SEQ ID NO: 600720 - DNA, 15 bp, Homo sapiens
actactctccccggc

SEQ ID NO: 600721 - DNA, 15 bp, Homo sapiens
ctactctccccggcc

SEQ ID NO: 600722 - DNA, 15 bp, Homo sapiens
tactctccccggccc

SEQ ID NO: 600723 - DNA, 15 bp, Homo sapiens
actctccccggcccc

SEQ ID NO: 600724 - DNA, 15 bp, Homo sapiens
ctctccccggccccc

SEQ ID NO: 600725 - DNA, 15 bp, Homo sapiens
tctccccggcccccg

SEQ ID NO: 600726 - DNA, 15 bp, Homo sapiens
ctccccggcccccgc

SEQ ID NO: 600727 - DNA, 15 bp, Homo sapiens
tccccggcccccgca

SEQ ID NO: 600728 - DNA, 15 bp, Homo sapiens
ccccggcccccgcac

SEQ ID NO: 600729 - DNA, 15 bp, Homo sapiens
cccggcccccgcaca

SEQ ID NO: 600730 - DNA, 15 bp, Homo sapiens
ccggcccccgcacac

SEQ ID NO: 600731 - DNA, 15 bp, Homo sapiens
cggcccccgcacacc

SEQ ID NO: 600732 - DNA, 15 bp, Homo sapiens
ggcccccgcacacct

SEQ ID NO: 600733 - DNA, 15 bp, Homo sapiens
gcccccgcacacctt

SEQ ID NO: 600734 - DNA, 15 bp, Homo sapiens
cccccgcacaccttg

SEQ ID NO: 600735 - DNA, 15 bp, Homo sapiens
ccccgcacaccttgc

SEQ ID NO: 600736 - DNA, 15 bp, Homo sapiens
cccgcacaccttgcg

SEQ ID NO: 600737 - DNA, 15 bp, Homo sapiens
ccgcacaccttgcga

SEQ ID NO: 600738 - DNA, 15 bp, Homo sapiens
cgcacaccttgcgat

SEQ ID NO: 600739 - DNA, 15 bp, Homo sapiens
gcacaccttgcgata

SEQ ID NO: 600740 - DNA, 15 bp, Homo sapiens
cacaccttgcgatat

SEQ ID NO: 600741 - DNA, 15 bp, Homo sapiens
acaccttgcgatatt

SEQ ID NO: 600742 - DNA, 15 bp, Homo sapiens
caccttgcgatattc

SEQ ID NO: 600743 - DNA, 15 bp, Homo sapiens
accttgcgatattct

SEQ ID NO: 600744 - DNA, 15 bp, Homo sapiens
ccttgcgatattcta

SEQ ID NO: 600745 - DNA, 15 bp, Homo sapiens
cttgcgatattctac

SEQ ID NO: 600746 - DNA, 15 bp, Homo sapiens
ttgcgatattctacc

SEQ ID NO: 600747 - DNA, 15 bp, Homo sapiens
tgcgatattctacca

SEQ ID NO: 600748 - DNA, 15 bp, Homo sapiens
gcgatattctaccat

SEQ ID NO: 600749 - DNA, 15 bp, Homo sapiens
cgatattctaccatg

SEQ ID NO: 600750 - DNA, 15 bp, Homo sapiens
gatattctaccatgg

SEQ ID NO: 600751 - DNA, 15 bp, Homo sapiens
atattctaccatggt

SEQ ID NO: 600752 - DNA, 15 bp, Homo sapiens
tattctaccatggtc

SEQ ID NO: 600753 - DNA, 15 bp, Homo sapiens
attctaccatggtca

SEQ ID NO: 600754 - DNA, 15 bp, Homo sapiens
ttctaccatggtcac

SEQ ID NO: 600755 - DNA, 15 bp, Homo sapiens
tctaccatggtcact

SEQ ID NO: 600756 - DNA, 15 bp, Homo sapiens
ctaccatggtcactg

SEQ ID NO: 600757 - DNA, 15 bp, Homo sapiens
taccatggtcactga

SEQ ID NO: 600758 - DNA, 15 bp, Homo sapiens
accatggtcactgat

SEQ ID NO: 600759 - DNA, 15 bp, Homo sapiens
ccatggtcactgatc

SEQ ID NO: 600760 - DNA, 15 bp, Homo sapiens
catggtcactgatct

SEQ ID NO: 600761 - DNA, 15 bp, Homo sapiens
atggtcactgatctg

SEQ ID NO: 600762 - DNA, 15 bp, Homo sapiens
tggtcactgatctga

SEQ ID NO: 600763 - DNA, 15 bp, Homo sapiens
ggtcactgatctgaa

SEQ ID NO: 600764 - DNA, 15 bp, Homo sapiens
gtcactgatctgaag

SEQ ID NO: 600765 - DNA, 15 bp, Homo sapiens
tcactgatctgaagg

SEQ ID NO: 600766 - DNA, 15 bp, Homo sapiens
cactgatctgaagga

SEQ ID NO: 600767 - DNA, 15 bp, Homo sapiens
actgatctgaaggac

SEQ ID NO: 600768 - DNA, 15 bp, Homo sapiens
ctgatctgaaggact

SEQ ID NO: 600769 - DNA, 15 bp, Homo sapiens
tgatctgaaggactc

SEQ ID NO: 600770 - DNA, 15 bp, Homo sapiens
gatctgaaggactcc

SEQ ID NO: 600771 - DNA, 15 bp, Homo sapiens
atctgaaggactcca

SEQ ID NO: 600772 - DNA, 15 bp, Homo sapiens
tctgaaggactccag

SEQ ID NO: 600773 - DNA, 15 bp, Homo sapiens
ctgaaggactccaga

SEQ ID NO: 600774 - DNA, 15 bp, Homo sapiens
tgaaggactccagat

SEQ ID NO: 600775 - DNA, 15 bp, Homo sapiens
gaaggactccagatt

SEQ ID NO: 600776 - DNA, 15 bp, Homo sapiens
aaggactccagattc

SEQ ID NO: 600777 - DNA, 15 bp, Homo sapiens
aggactccagattct

SEQ ID NO: 600778 - DNA, 15 bp, Homo sapiens
ggactccagattcta

SEQ ID NO: 600779 - DNA, 15 bp, Homo sapiens
gactccagattctag

SEQ ID NO: 600780 - DNA, 15 bp, Homo sapiens
actccagattctagc

SEQ ID NO: 600781 - DNA, 15 bp, Homo sapiens
ctccagattctagcc

SEQ ID NO: 600782 - DNA, 15 bp, Homo sapiens
tccagattctagcct

SEQ ID NO: 600783 - DNA, 15 bp, Homo sapiens
ccagattctagcctt

SEQ ID NO: 600784 - DNA, 15 bp, Homo sapiens
cagattctagcctta

SEQ ID NO: 600785 - DNA, 15 bp, Homo sapiens
agattctagccttaa

SEQ ID NO: 600786 - DNA, 15 bp, Homo sapiens
gattctagccttaac

SEQ ID NO: 600787 - DNA, 15 bp, Homo sapiens
attctagccttaact

SEQ ID NO: 600788 - DNA, 15 bp, Homo sapiens
ttctagccttaactc

SEQ ID NO: 600789 - DNA, 15 bp, Homo sapiens
tctagccttaactct

SEQ ID NO: 600790 - DNA, 15 bp, Homo sapiens
ctagccttaactctg

SEQ ID NO: 600791 - DNA, 15 bp, Homo sapiens
tagccttaactctgc

SEQ ID NO: 600792 - DNA, 15 bp, Homo sapiens
agccttaactctgct

SEQ ID NO: 600793 - DNA, 15 bp, Homo sapiens
gccttaactctgctt

SEQ ID NO: 600794 - DNA, 15 bp, Homo sapiens
ccttaactctgcttc

SEQ ID NO: 600795 - DNA, 15 bp, Homo sapiens
cttaactctgcttcc

SEQ ID NO: 600796 - DNA, 15 bp, Homo sapiens
ttaactctgcttcct

SEQ ID NO: 600797 - DNA, 15 bp, Homo sapiens
taactctgcttcctg

SEQ ID NO: 600798 - DNA, 15 bp, Homo sapiens
aactctgcttcctgg

SEQ ID NO: 600799 - DNA, 15 bp, Homo sapiens
actctgcttcctggg

SEQ ID NO: 600800 - DNA, 15 bp, Homo sapiens
ctctgcttcctgggg

SEQ ID NO: 600801 - DNA, 15 bp, Homo sapiens
tctgcttcctggggg

SEQ ID NO: 600802 - DNA, 15 bp, Homo sapiens
ctgcttcctgggggg

SEQ ID NO: 600803 - DNA, 15 bp, Homo sapiens
tgcttcctggggggg

SEQ ID NO: 600804 - DNA, 15 bp, Homo sapiens
gcttcctgggggggc

SEQ ID NO: 600805 - DNA, 15 bp, Homo sapiens
cttcctgggggggct

SEQ ID NO: 600806 - DNA, 15 bp, Homo sapiens
ttcctgggggggctg

SEQ ID NO: 600807 - DNA, 15 bp, Homo sapiens
tcctgggggggctgt

SEQ ID NO: 600808 - DNA, 15 bp, Homo sapiens
cctgggggggctgtg

SEQ ID NO: 600809 - DNA, 15 bp, Homo sapiens
ctgggggggctgtgc

SEQ ID NO: 600810 - DNA, 15 bp, Homo sapiens
tgggggggctgtgca

SEQ ID NO: 600811 - DNA, 15 bp, Homo sapiens
gggggggctgtgcac

SEQ ID NO: 600812 - DNA, 15 bp, Homo sapiens
ggggggctgtgcacc

SEQ ID NO: 600813 - DNA, 15 bp, Homo sapiens
gggggctgtgcaccc

SEQ ID NO: 600814 - DNA, 15 bp, Homo sapiens
ggggctgtgcaccct

SEQ ID NO: 600815 - DNA, 15 bp, Homo sapiens
gggctgtgcaccctt

SEQ ID NO: 600816 - DNA, 15 bp, Homo sapiens
ggctgtgcacccttg

SEQ ID NO: 600817 - DNA, 15 bp, Homo sapiens
gctgtgcacccttga

SEQ ID NO: 600818 - DNA, 15 bp, Homo sapiens
ctgtgcacccttgat

SEQ ID NO: 600819 - DNA, 15 bp, Homo sapiens
tgtgcacccttgatt

SEQ ID NO: 600820 - DNA, 15 bp, Homo sapiens
gtgcacccttgattc

SEQ ID NO: 600821 - DNA, 15 bp, Homo sapiens
tgcacccttgattca

SEQ ID NO: 600822 - DNA, 15 bp, Homo sapiens
gcacccttgattcag

SEQ ID NO: 600823 - DNA, 15 bp, Homo sapiens
cacccttgattcagt

SEQ ID NO: 600824 - DNA, 15 bp, Homo sapiens
acccttgattcagtt

SEQ ID NO: 600825 - DNA, 15 bp, Homo sapiens
cccttgattcagttc

SEQ ID NO: 600826 - DNA, 15 bp, Homo sapiens
ccttgattcagttcc

SEQ ID NO: 600827 - DNA, 15 bp, Homo sapiens
cttgattcagttcct

SEQ ID NO: 600828 - DNA, 15 bp, Homo sapiens
ttgattcagttcctc

SEQ ID NO: 600829 - DNA, 15 bp, Homo sapiens
tgattcagttcctct

SEQ ID NO: 600830 - DNA, 15 bp, Homo sapiens
gattcagttcctctc

SEQ ID NO: 600831 - DNA, 15 bp, Homo sapiens
attcagttcctctcc

SEQ ID NO: 600832 - DNA, 15 bp, Homo sapiens
ttcagttcctctccc

SEQ ID NO: 600833 - DNA, 15 bp, Homo sapiens
tcagttcctctccca

SEQ ID NO: 600834 - DNA, 15 bp, Homo sapiens
cagttcctctcccac

SEQ ID NO: 600835 - DNA, 15 bp, Homo sapiens
agttcctctcccact

SEQ ID NO: 600836 - DNA, 15 bp, Homo sapiens
gttcctctcccactc

SEQ ID NO: 600837 - DNA, 15 bp, Homo sapiens
ttcctctcccactct

SEQ ID NO: 600838 - DNA, 15 bp, Homo sapiens
tcctctcccactctg

SEQ ID NO: 600839 - DNA, 15 bp, Homo sapiens
cctctcccactctgg

SEQ ID NO: 600840 - DNA, 15 bp, Homo sapiens
ctctcccactctggc

SEQ ID NO: 600841 - DNA, 15 bp, Homo sapiens
tctcccactctggcc

SEQ ID NO: 600842 - DNA, 15 bp, Homo sapiens
ctcccactctggcct

SEQ ID NO: 600843 - DNA, 15 bp, Homo sapiens
tcccactctggcctg

SEQ ID NO: 600844 - DNA, 15 bp, Homo sapiens
cccactctggcctgt

SEQ ID NO: 600845 - DNA, 15 bp, Homo sapiens
ccactctggcctgtg

SEQ ID NO: 600846 - DNA, 15 bp, Homo sapiens
cactctggcctgtgt

SEQ ID NO: 600847 - DNA, 15 bp, Homo sapiens
actctggcctgtgtg

SEQ ID NO: 600848 - DNA, 15 bp, Homo sapiens
ctctggcctgtgtgt

SEQ ID NO: 600849 - DNA, 15 bp, Homo sapiens
tctggcctgtgtgtc

SEQ ID NO: 600850 - DNA, 15 bp, Homo sapiens
ctggcctgtgtgtct

SEQ ID NO: 600851 - DNA, 15 bp, Homo sapiens
tggcctgtgtgtctt

SEQ ID NO: 600852 - DNA, 15 bp, Homo sapiens
ggcctgtgtgtcttc

SEQ ID NO: 600853 - DNA, 15 bp, Homo sapiens
gcctgtgtgtcttct

SEQ ID NO: 600854 - DNA, 15 bp, Homo sapiens
cctgtgtgtcttctt

SEQ ID NO: 600855 - DNA, 15 bp, Homo sapiens
ctgtgtgtcttcttc

SEQ ID NO: 600856 - DNA, 15 bp, Homo sapiens
tgtgtgtcttcttct

SEQ ID NO: 600857 - DNA, 15 bp, Homo sapiens
gtgtgtcttcttcta

SEQ ID NO: 600858 - DNA, 15 bp, Homo sapiens
tgtgtcttcttctag

SEQ ID NO: 600859 - DNA, 15 bp, Homo sapiens
gtgtcttcttctaga

SEQ ID NO: 600860 - DNA, 15 bp, Homo sapiens
tgtcttcttctagaa

SEQ ID NO: 600861 - DNA, 15 bp, Homo sapiens
gtcttcttctagaat

SEQ ID NO: 600862 - DNA, 15 bp, Homo sapiens
tcttcttctagaatg

SEQ ID NO: 600863 - DNA, 15 bp, Homo sapiens
cttcttctagaatgg

SEQ ID NO: 600864 - DNA, 15 bp, Homo sapiens
ttcttctagaatggt

SEQ ID NO: 600865 - DNA, 15 bp, Homo sapiens
tcttctagaatggtt

SEQ ID NO: 600866 - DNA, 15 bp, Homo sapiens
cttctagaatggttg

SEQ ID NO: 600867 - DNA, 15 bp, Homo sapiens
ttctagaatggttga

SEQ ID NO: 600868 - DNA, 15 bp, Homo sapiens
tctagaatggttgaa

SEQ ID NO: 600869 - DNA, 15 bp, Homo sapiens
ctagaatggttgaaa

SEQ ID NO: 600870 - DNA, 15 bp, Homo sapiens
tagaatggttgaaag

SEQ ID NO: 600871 - DNA, 15 bp, Homo sapiens
agaatggttgaaagt

SEQ ID NO: 600872 - DNA, 15 bp, Homo sapiens
gaatggttgaaagtg

SEQ ID NO: 600873 - DNA, 15 bp, Homo sapiens
aatggttgaaagtgc

SEQ ID NO: 600874 - DNA, 15 bp, Homo sapiens
atggttgaaagtgca

SEQ ID NO: 600875 - DNA, 15 bp, Homo sapiens
tggttgaaagtgcaa

SEQ ID NO: 600876 - DNA, 15 bp, Homo sapiens
ggttgaaagtgcaag

SEQ ID NO: 600877 - DNA, 15 bp, Homo sapiens
gttgaaagtgcaaga

SEQ ID NO: 600878 - DNA, 15 bp, Homo sapiens
ttgaaagtgcaagaa

SEQ ID NO: 600879 - DNA, 15 bp, Homo sapiens
tgaaagtgcaagaag

SEQ ID NO: 600880 - DNA, 15 bp, Homo sapiens
gaaagtgcaagaagc

SEQ ID NO: 600881 - DNA, 15 bp, Homo sapiens
aaagtgcaagaagcc

SEQ ID NO: 600882 - DNA, 15 bp, Homo sapiens
aagtgcaagaagccc

SEQ ID NO: 600883 - DNA, 15 bp, Homo sapiens
agtgcaagaagccct

SEQ ID NO: 600884 - DNA, 15 bp, Homo sapiens
gtgcaagaagccctc

SEQ ID NO: 600885 - DNA, 15 bp, Homo sapiens
tgcaagaagccctca

SEQ ID NO: 600886 - DNA, 15 bp, Homo sapiens
gcaagaagccctcag

SEQ ID NO: 600887 - DNA, 15 bp, Homo sapiens
caagaagccctcagg

SEQ ID NO: 600888 - DNA, 15 bp, Homo sapiens
aagaagccctcaggc

SEQ ID NO: 600889 - DNA, 15 bp, Homo sapiens
agaagccctcaggca

SEQ ID NO: 600890 - DNA, 15 bp, Homo sapiens
gaagccctcaggcag

SEQ ID NO: 600891 - DNA, 15 bp, Homo sapiens
aagccctcaggcagg

SEQ ID NO: 600892 - DNA, 15 bp, Homo sapiens
agccctcaggcaggc

SEQ ID NO: 600893 - DNA, 15 bp, Homo sapiens
gccctcaggcaggct

SEQ ID NO: 600894 - DNA, 15 bp, Homo sapiens
ccctcaggcaggctg

SEQ ID NO: 600895 - DNA, 15 bp, Homo sapiens
cctcaggcaggctga

SEQ ID NO: 600896 - DNA, 15 bp, Homo sapiens
ctcaggcaggctgac

SEQ ID NO: 600897 - DNA, 15 bp, Homo sapiens
tcaggcaggctgact

SEQ ID NO: 600898 - DNA, 15 bp, Homo sapiens
caggcaggctgacta

SEQ ID NO: 600899 - DNA, 15 bp, Homo sapiens
aggcaggctgactag

SEQ ID NO: 600900 - DNA, 15 bp, Homo sapiens
ggcaggctgactagg

SEQ ID NO: 600901 - DNA, 15 bp, Homo sapiens
gcaggctgactaggc

SEQ ID NO: 600902 - DNA, 15 bp, Homo sapiens
caggctgactaggcg

SEQ ID NO: 600903 - DNA, 15 bp, Homo sapiens
aggctgactaggcgc

SEQ ID NO: 600904 - DNA, 15 bp, Homo sapiens
ggctgactaggcgcc

SEQ ID NO: 600905 - DNA, 15 bp, Homo sapiens
gctgactaggcgcca

SEQ ID NO: 600906 - DNA, 15 bp, Homo sapiens
ctgactaggcgccag

SEQ ID NO: 600907 - DNA, 15 bp, Homo sapiens
tgactaggcgccaga

SEQ ID NO: 600908 - DNA, 15 bp, Homo sapiens
gactaggcgccagaa

SEQ ID NO: 600909 - DNA, 15 bp, Homo sapiens
actaggcgccagaag

SEQ ID NO: 600910 - DNA, 15 bp, Homo sapiens
ctaggcgccagaagg

SEQ ID NO: 600911 - DNA, 15 bp, Homo sapiens
taggcgccagaagga

SEQ ID NO: 600912 - DNA, 15 bp, Homo sapiens
aggcgccagaaggag

SEQ ID NO: 600913 - DNA, 15 bp, Homo sapiens
ggcgccagaaggagc

SEQ ID NO: 600914 - DNA, 15 bp, Homo sapiens
gcgccagaaggagct

SEQ ID NO: 600915 - DNA, 15 bp, Homo sapiens
cgccagaaggagctt

SEQ ID NO: 600916 - DNA, 15 bp, Homo sapiens
gccagaaggagctta

SEQ ID NO: 600917 - DNA, 15 bp, Homo sapiens
ccagaaggagcttag

SEQ ID NO: 600918 - DNA, 15 bp, Homo sapiens
cagaaggagcttaga

SEQ ID NO: 600919 - DNA, 15 bp, Homo sapiens
agaaggagcttagag

SEQ ID NO: 600920 - DNA, 15 bp, Homo sapiens
gaaggagcttagagt

SEQ ID NO: 600921 - DNA, 15 bp, Homo sapiens
aaggagcttagagtc

SEQ ID NO: 600922 - DNA, 15 bp, Homo sapiens
aggagcttagagtcc

SEQ ID NO: 600923 - DNA, 15 bp, Homo sapiens
ggagcttagagtcct

SEQ ID NO: 600924 - DNA, 15 bp, Homo sapiens
gagcttagagtcctg

SEQ ID NO: 600925 - DNA, 15 bp, Homo sapiens
agcttagagtcctgg

SEQ ID NO: 600926 - DNA, 15 bp, Homo sapiens
gcttagagtcctggg

SEQ ID NO: 600927 - DNA, 15 bp, Homo sapiens
cttagagtcctgggc

SEQ ID NO: 600928 - DNA, 15 bp, Homo sapiens
ttagagtcctgggcc

SEQ ID NO: 600929 - DNA, 15 bp, Homo sapiens
tagagtcctgggccc

SEQ ID NO: 600930 - DNA, 15 bp, Homo sapiens
agagtcctgggccct

SEQ ID NO: 600931 - DNA, 15 bp, Homo sapiens
gagtcctgggccctc

SEQ ID NO: 600932 - DNA, 15 bp, Homo sapiens
agtcctgggccctca

SEQ ID NO: 600933 - DNA, 15 bp, Homo sapiens
gtcctgggccctcag

SEQ ID NO: 600934 - DNA, 15 bp, Homo sapiens
tcctgggccctcaga

SEQ ID NO: 600935 - DNA, 15 bp, Homo sapiens
cctgggccctcagaa

SEQ ID NO: 600936 - DNA, 15 bp, Homo sapiens
ctgggccctcagaaa

SEQ ID NO: 600937 - DNA, 15 bp, Homo sapiens
tgggccctcagaaag

SEQ ID NO: 600938 - DNA, 15 bp, Homo sapiens
gggccctcagaaagt

SEQ ID NO: 600939 - DNA, 15 bp, Homo sapiens
ggccctcagaaagtc

SEQ ID NO: 600940 - DNA, 15 bp, Homo sapiens
gccctcagaaagtct

SEQ ID NO: 600941 - DNA, 15 bp, Homo sapiens
ccctcagaaagtctc

SEQ ID NO: 600942 - DNA, 15 bp, Homo sapiens
cctcagaaagtctct

SEQ ID NO: 600943 - DNA, 15 bp, Homo sapiens
ctcagaaagtctctc

SEQ ID NO: 600944 - DNA, 15 bp, Homo sapiens
tcagaaagtctctct

SEQ ID NO: 600945 - DNA, 15 bp, Homo sapiens
cagaaagtctctctc

SEQ ID NO: 600946 - DNA, 15 bp, Homo sapiens
agaaagtctctctcc

SEQ ID NO: 600947 - DNA, 15 bp, Homo sapiens
gaaagtctctctcct

SEQ ID NO: 600948 - DNA, 15 bp, Homo sapiens
aaagtctctctccta

SEQ ID NO: 600949 - DNA, 15 bp, Homo sapiens
aagtctctctcctaa

SEQ ID NO: 600950 - DNA, 15 bp, Homo sapiens
agtctctctcctaag

SEQ ID NO: 600951 - DNA, 15 bp, Homo sapiens
gtctctctcctaagt

SEQ ID NO: 600952 - DNA, 15 bp, Homo sapiens
tctctctcctaagtg

SEQ ID NO: 600953 - DNA, 15 bp, Homo sapiens
ctctctcctaagtga

SEQ ID NO: 600954 - DNA, 15 bp, Homo sapiens
tctctcctaagtgag

SEQ ID NO: 600955 - DNA, 15 bp, Homo sapiens
ctctcctaagtgaga

SEQ ID NO: 600956 - DNA, 15 bp, Homo sapiens
tctcctaagtgagat

SEQ ID NO: 600957 - DNA, 15 bp, Homo sapiens
ctcctaagtgagatc

SEQ ID NO: 600958 - DNA, 15 bp, Homo sapiens
tcctaagtgagatca

SEQ ID NO: 600959 - DNA, 15 bp, Homo sapiens
cctaagtgagatcag

SEQ ID NO: 600960 - DNA, 15 bp, Homo sapiens
ctaagtgagatcaga

SEQ ID NO: 600961 - DNA, 15 bp, Homo sapiens
taagtgagatcagag

SEQ ID NO: 600962 - DNA, 15 bp, Homo sapiens
aagtgagatcagaga

SEQ ID NO: 600963 - DNA, 15 bp, Homo sapiens
agtgagatcagagat

SEQ ID NO: 600964 - DNA, 15 bp, Homo sapiens
gtgagatcagagatc

SEQ ID NO: 600965 - DNA, 15 bp, Homo sapiens
tgagatcagagatca

SEQ ID NO: 600966 - DNA, 15 bp, Homo sapiens
gagatcagagatcac

SEQ ID NO: 600967 - DNA, 15 bp, Homo sapiens
agatcagagatcaca

SEQ ID NO: 600968 - DNA, 15 bp, Homo sapiens
gatcagagatcacaa

SEQ ID NO: 600969 - DNA, 15 bp, Homo sapiens
atcagagatcacaaa

SEQ ID NO: 600970 - DNA, 15 bp, Homo sapiens
tcagagatcacaaat

SEQ ID NO: 600971 - DNA, 15 bp, Homo sapiens
cagagatcacaaatg

SEQ ID NO: 600972 - DNA, 15 bp, Homo sapiens
agagatcacaaatga

SEQ ID NO: 600973 - DNA, 15 bp, Homo sapiens
gagatcacaaatgag

SEQ ID NO: 600974 - DNA, 15 bp, Homo sapiens
agatcacaaatgaga

SEQ ID NO: 600975 - DNA, 15 bp, Homo sapiens
gatcacaaatgagac

SEQ ID NO: 600976 - DNA, 15 bp, Homo sapiens
atcacaaatgagaca

SEQ ID NO: 600977 - DNA, 15 bp, Homo sapiens
tcacaaatgagacac

SEQ ID NO: 600978 - DNA, 15 bp, Homo sapiens
cacaaatgagacaca

SEQ ID NO: 600979 - DNA, 15 bp, Homo sapiens
acaaatgagacacac

SEQ ID NO: 600980 - DNA, 15 bp, Homo sapiens
caaatgagacacaca

SEQ ID NO: 600981 - DNA, 15 bp, Homo sapiens
aaatgagacacacac

SEQ ID NO: 600982 - DNA, 15 bp, Homo sapiens
aatgagacacacacg

SEQ ID NO: 600983 - DNA, 15 bp, Homo sapiens
atgagacacacacgc

SEQ ID NO: 600984 - DNA, 15 bp, Homo sapiens
tgagacacacacgct

SEQ ID NO: 600985 - DNA, 15 bp, Homo sapiens
gagacacacacgctc

SEQ ID NO: 600986 - DNA, 15 bp, Homo sapiens
agacacacacgctcc

SEQ ID NO: 600987 - DNA, 15 bp, Homo sapiens
gacacacacgctcct

SEQ ID NO: 600988 - DNA, 15 bp, Homo sapiens
acacacacgctcctt

SEQ ID NO: 600989 - DNA, 15 bp, Homo sapiens
cacacacgctccttt

SEQ ID NO: 600990 - DNA, 15 bp, Homo sapiens
acacacgctcctttc

SEQ ID NO: 600991 - DNA, 15 bp, Homo sapiens
cacacgctcctttcc

SEQ ID NO: 600992 - DNA, 15 bp, Homo sapiens
acacgctcctttcct

SEQ ID NO: 600993 - DNA, 15 bp, Homo sapiens
cacgctcctttcctc

SEQ ID NO: 600994 - DNA, 15 bp, Homo sapiens
acgctcctttcctcc

SEQ ID NO: 600995 - DNA, 15 bp, Homo sapiens
cgctcctttcctcct

SEQ ID NO: 600996 - DNA, 15 bp, Homo sapiens
gctcctttcctcctt

SEQ ID NO: 600997 - DNA, 15 bp, Homo sapiens
ctcctttcctccttc

SEQ ID NO: 600998 - DNA, 15 bp, Homo sapiens
tcctttcctccttca

SEQ ID NO: 600999 - DNA, 15 bp, Homo sapiens
cctttcctccttcac

SEQ ID NO: 601000 - DNA, 15 bp, Homo sapiens
ctttcctccttcacc

SEQ ID NO: 601001 - DNA, 15 bp, Homo sapiens
tttcctccttcaccc

SEQ ID NO: 601002 - DNA, 15 bp, Homo sapiens
ttcctccttcaccca

SEQ ID NO: 601003 - DNA, 15 bp, Homo sapiens
tcctccttcacccac

SEQ ID NO: 601004 - DNA, 15 bp, Homo sapiens
cctccttcacccacc

SEQ ID NO: 601005 - DNA, 15 bp, Homo sapiens
ctccttcacccaccc

SEQ ID NO: 601006 - DNA, 15 bp, Homo sapiens
tccttcacccaccca

SEQ ID NO: 601007 - DNA, 15 bp, Homo sapiens
ccttcacccacccac

SEQ ID NO: 601008 - DNA, 15 bp, Homo sapiens
cttcacccacccacc

SEQ ID NO: 601009 - DNA, 15 bp, Homo sapiens
ttcacccacccacct

SEQ ID NO: 601010 - DNA, 15 bp, Homo sapiens
tcacccacccacctc

SEQ ID NO: 601011 - DNA, 15 bp, Homo sapiens
cacccacccacctcc

SEQ ID NO: 601012 - DNA, 15 bp, Homo sapiens
acccacccacctccc

SEQ ID NO: 601013 - DNA, 15 bp, Homo sapiens
cccacccacctcccc

SEQ ID NO: 601014 - DNA, 15 bp, Homo sapiens
ccacccacctcccca

SEQ ID NO: 601015 - DNA, 15 bp, Homo sapiens
cacccacctccccaa

SEQ ID NO: 601016 - DNA, 15 bp, Homo sapiens
acccacctccccaaa

SEQ ID NO: 601017 - DNA, 15 bp, Homo sapiens
cccacctccccaaaa

SEQ ID NO: 601018 - DNA, 15 bp, Homo sapiens
ccacctccccaaaag

SEQ ID NO: 601019 - DNA, 15 bp, Homo sapiens
cacctccccaaaagc

SEQ ID NO: 601020 - DNA, 15 bp, Homo sapiens
acctccccaaaagca

SEQ ID NO: 601021 - DNA, 15 bp, Homo sapiens
cctccccaaaagcat

SEQ ID NO: 601022 - DNA, 15 bp, Homo sapiens
ctccccaaaagcatc

SEQ ID NO: 601023 - DNA, 15 bp, Homo sapiens
tccccaaaagcatca

SEQ ID NO: 601024 - DNA, 15 bp, Homo sapiens
ccccaaaagcatcaa

SEQ ID NO: 601025 - DNA, 15 bp, Homo sapiens
cccaaaagcatcaat

SEQ ID NO: 601026 - DNA, 15 bp, Homo sapiens
ccaaaagcatcaatt

SEQ ID NO: 601027 - DNA, 15 bp, Homo sapiens
caaaagcatcaattt

SEQ ID NO: 601028 - DNA, 15 bp, Homo sapiens
aaaagcatcaattta

SEQ ID NO: 601029 - DNA, 15 bp, Homo sapiens
aaagcatcaatttag

SEQ ID NO: 601030 - DNA, 15 bp, Homo sapiens
aagcatcaatttagc

SEQ ID NO: 601031 - DNA, 15 bp, Homo sapiens
agcatcaatttagca

SEQ ID NO: 601032 - DNA, 15 bp, Homo sapiens
gcatcaatttagcag

SEQ ID NO: 601033 - DNA, 15 bp, Homo sapiens
catcaatttagcaga

SEQ ID NO: 601034 - DNA, 15 bp, Homo sapiens
atcaatttagcagac

SEQ ID NO: 601035 - DNA, 15 bp, Homo sapiens
tcaatttagcagaca

SEQ ID NO: 601036 - DNA, 15 bp, Homo sapiens
caatttagcagacat

SEQ ID NO: 601037 - DNA, 15 bp, Homo sapiens
aatttagcagacatt

SEQ ID NO: 601038 - DNA, 15 bp, Homo sapiens
atttagcagacattt

SEQ ID NO: 601039 - DNA, 15 bp, Homo sapiens
tttagcagacatttg

SEQ ID NO: 601040 - DNA, 15 bp, Homo sapiens
ttagcagacatttgc

SEQ ID NO: 601041 - DNA, 15 bp, Homo sapiens
tagcagacatttgct

SEQ ID NO: 601042 - DNA, 15 bp, Homo sapiens
agcagacatttgctg

SEQ ID NO: 601043 - DNA, 15 bp, Homo sapiens
gcagacatttgctgg

SEQ ID NO: 601044 - DNA, 15 bp, Homo sapiens
cagacatttgctggg

SEQ ID NO: 601045 - DNA, 15 bp, Homo sapiens
agacatttgctgggt

SEQ ID NO: 601046 - DNA, 15 bp, Homo sapiens
gacatttgctgggtg

SEQ ID NO: 601047 - DNA, 15 bp, Homo sapiens
acatttgctgggtgc

SEQ ID NO: 601048 - DNA, 15 bp, Homo sapiens
catttgctgggtgct

SEQ ID NO: 601049 - DNA, 15 bp, Homo sapiens
atttgctgggtgctc

SEQ ID NO: 601050 - DNA, 15 bp, Homo sapiens
tttgctgggtgctcg

SEQ ID NO: 601051 - DNA, 15 bp, Homo sapiens
ttgctgggtgctcgt

SEQ ID NO: 601052 - DNA, 15 bp, Homo sapiens
tgctgggtgctcgtg

SEQ ID NO: 601053 - DNA, 15 bp, Homo sapiens
gctgggtgctcgtga

SEQ ID NO: 601054 - DNA, 15 bp, Homo sapiens
ctgggtgctcgtgac

SEQ ID NO: 601055 - DNA, 15 bp, Homo sapiens
tgggtgctcgtgaca

SEQ ID NO: 601056 - DNA, 15 bp, Homo sapiens
gggtgctcgtgacac

SEQ ID NO: 601057 - DNA, 15 bp, Homo sapiens
ggtgctcgtgacaca

SEQ ID NO: 601058 - DNA, 15 bp, Homo sapiens
gtgctcgtgacacat

SEQ ID NO: 601059 - DNA, 15 bp, Homo sapiens
tgctcgtgacacatc

SEQ ID NO: 601060 - DNA, 15 bp, Homo sapiens
gctcgtgacacatca

SEQ ID NO: 601061 - DNA, 15 bp, Homo sapiens
ctcgtgacacatcaa

SEQ ID NO: 601062 - DNA, 15 bp, Homo sapiens
tcgtgacacatcaag

SEQ ID NO: 601063 - DNA, 15 bp, Homo sapiens
cgtgacacatcaagc

SEQ ID NO: 601064 - DNA, 15 bp, Homo sapiens
gtgacacatcaagct

SEQ ID NO: 601065 - DNA, 15 bp, Homo sapiens
tgacacatcaagcta

SEQ ID NO: 601066 - DNA, 15 bp, Homo sapiens
gacacatcaagctat

SEQ ID NO: 601067 - DNA, 15 bp, Homo sapiens
acacatcaagctatg

SEQ ID NO: 601068 - DNA, 15 bp, Homo sapiens
cacatcaagctatgc

SEQ ID NO: 601069 - DNA, 15 bp, Homo sapiens
acatcaagctatgca

SEQ ID NO: 601070 - DNA, 15 bp, Homo sapiens
catcaagctatgcac

SEQ ID NO: 601071 - DNA, 15 bp, Homo sapiens
atcaagctatgcacc

SEQ ID NO: 601072 - DNA, 15 bp, Homo sapiens
tcaagctatgcaccc

SEQ ID NO: 601073 - DNA, 15 bp, Homo sapiens
caagctatgcaccct

SEQ ID NO: 601074 - DNA, 15 bp, Homo sapiens
aagctatgcaccctg

SEQ ID NO: 601075 - DNA, 15 bp, Homo sapiens
agctatgcaccctgg

SEQ ID NO: 601076 - DNA, 15 bp, Homo sapiens
gctatgcaccctggg

SEQ ID NO: 601077 - DNA, 15 bp, Homo sapiens
ctatgcaccctggga

SEQ ID NO: 601078 - DNA, 15 bp, Homo sapiens
tatgcaccctgggag

SEQ ID NO: 601079 - DNA, 15 bp, Homo sapiens
atgcaccctgggagg

SEQ ID NO: 601080 - DNA, 15 bp, Homo sapiens
tgcaccctgggagga

SEQ ID NO: 601081 - DNA, 15 bp, Homo sapiens
gcaccctgggaggaa

SEQ ID NO: 601082 - DNA, 15 bp, Homo sapiens
caccctgggaggaat

SEQ ID NO: 601083 - DNA, 15 bp, Homo sapiens
accctgggaggaatg

SEQ ID NO: 601084 - DNA, 15 bp, Homo sapiens
ccctgggaggaatga

SEQ ID NO: 601085 - DNA, 15 bp, Homo sapiens
cctgggaggaatgaa

SEQ ID NO: 601086 - DNA, 15 bp, Homo sapiens
ctgggaggaatgaag

SEQ ID NO: 601087 - DNA, 15 bp, Homo sapiens
tgggaggaatgaaga

SEQ ID NO: 601088 - DNA, 15 bp, Homo sapiens
gggaggaatgaagat

SEQ ID NO: 601089 - DNA, 15 bp, Homo sapiens
ggaggaatgaagatg

SEQ ID NO: 601090 - DNA, 15 bp, Homo sapiens
gaggaatgaagatgt

SEQ ID NO: 601091 - DNA, 15 bp, Homo sapiens
aggaatgaagatgtc

SEQ ID NO: 601092 - DNA, 15 bp, Homo sapiens
ggaatgaagatgtca

SEQ ID NO: 601093 - DNA, 15 bp, Homo sapiens
gaatgaagatgtcaa

SEQ ID NO: 601094 - DNA, 15 bp, Homo sapiens
aatgaagatgtcaaa

SEQ ID NO: 601095 - DNA, 15 bp, Homo sapiens
atgaagatgtcaaac

SEQ ID NO: 601096 - DNA, 15 bp, Homo sapiens
tgaagatgtcaaacc

SEQ ID NO: 601097 - DNA, 15 bp, Homo sapiens
gaagatgtcaaacca

SEQ ID NO: 601098 - DNA, 15 bp, Homo sapiens
aagatgtcaaaccat

SEQ ID NO: 601099 - DNA, 15 bp, Homo sapiens
agatgtcaaaccatc

SEQ ID NO: 601100 - DNA, 15 bp, Homo sapiens
gatgtcaaaccatcc

SEQ ID NO: 601101 - DNA, 15 bp, Homo sapiens
atgtcaaaccatcca

SEQ ID NO: 601102 - DNA, 15 bp, Homo sapiens
tgtcaaaccatccac

SEQ ID NO: 601103 - DNA, 15 bp, Homo sapiens
gtcaaaccatccacc

SEQ ID NO: 601104 - DNA, 15 bp, Homo sapiens
tcaaaccatccacct

SEQ ID NO: 601105 - DNA, 15 bp, Homo sapiens
caaaccatccacctg

SEQ ID NO: 601106 - DNA, 15 bp, Homo sapiens
aaaccatccacctgg

SEQ ID NO: 601107 - DNA, 15 bp, Homo sapiens
aaccatccacctggg

SEQ ID NO: 601108 - DNA, 15 bp, Homo sapiens
accatccacctgggg

SEQ ID NO: 601109 - DNA, 15 bp, Homo sapiens
ccatccacctggggc

SEQ ID NO: 601110 - DNA, 15 bp, Homo sapiens
catccacctggggcc

SEQ ID NO: 601111 - DNA, 15 bp, Homo sapiens
atccacctggggccc

SEQ ID NO: 601112 - DNA, 15 bp, Homo sapiens
tccacctggggcccc

SEQ ID NO: 601113 - DNA, 15 bp, Homo sapiens
ccacctggggcccct

SEQ ID NO: 601114 - DNA, 15 bp, Homo sapiens
cacctggggcccctg

SEQ ID NO: 601115 - DNA, 15 bp, Homo sapiens
acctggggcccctgg

SEQ ID NO: 601116 - DNA, 15 bp, Homo sapiens
cctggggcccctggg

SEQ ID NO: 601117 - DNA, 15 bp, Homo sapiens
ctggggcccctgggt

SEQ ID NO: 601118 - DNA, 15 bp, Homo sapiens
tggggcccctgggtg

SEQ ID NO: 601119 - DNA, 15 bp, Homo sapiens
ggggcccctgggtgg

SEQ ID NO: 601120 - DNA, 15 bp, Homo sapiens
gggcccctgggtggc

SEQ ID NO: 601121 - DNA, 15 bp, Homo sapiens
ggcccctgggtggca

SEQ ID NO: 601122 - DNA, 15 bp, Homo sapiens
gcccctgggtggcag

SEQ ID NO: 601123 - DNA, 15 bp, Homo sapiens
cccctgggtggcagt

SEQ ID NO: 601124 - DNA, 15 bp, Homo sapiens
ccctgggtggcagtg

SEQ ID NO: 601125 - DNA, 15 bp, Homo sapiens
cctgggtggcagtga

SEQ ID NO: 601126 - DNA, 15 bp, Homo sapiens
ctgggtggcagtgac

SEQ ID NO: 601127 - DNA, 15 bp, Homo sapiens
tgggtggcagtgact

SEQ ID NO: 601128 - DNA, 15 bp, Homo sapiens
gggtggcagtgactt

SEQ ID NO: 601129 - DNA, 15 bp, Homo sapiens
ggtggcagtgactta

SEQ ID NO: 601130 - DNA, 15 bp, Homo sapiens
gtggcagtgacttat

SEQ ID NO: 601131 - DNA, 15 bp, Homo sapiens
tggcagtgacttatt

SEQ ID NO: 601132 - DNA, 15 bp, Homo sapiens
ggcagtgacttattc

SEQ ID NO: 601133 - DNA, 15 bp, Homo sapiens
gcagtgacttattct

SEQ ID NO: 601134 - DNA, 15 bp, Homo sapiens
cagtgacttattctc

SEQ ID NO: 601135 - DNA, 15 bp, Homo sapiens
agtgacttattctca

SEQ ID NO: 601136 - DNA, 15 bp, Homo sapiens
gtgacttattctcac

SEQ ID NO: 601137 - DNA, 15 bp, Homo sapiens
tgacttattctcact

SEQ ID NO: 601138 - DNA, 15 bp, Homo sapiens
gacttattctcactc

SEQ ID NO: 601139 - DNA, 15 bp, Homo sapiens
acttattctcactct

SEQ ID NO: 601140 - DNA, 15 bp, Homo sapiens
cttattctcactctc

SEQ ID NO: 601141 - DNA, 15 bp, Homo sapiens
ttattctcactctct

SEQ ID NO: 601142 - DNA, 15 bp, Homo sapiens
tattctcactctctt

SEQ ID NO: 601143 - DNA, 15 bp, Homo sapiens
attctcactctcttt

SEQ ID NO: 601144 - DNA, 15 bp, Homo sapiens
ttctcactctctttc

SEQ ID NO: 601145 - DNA, 15 bp, Homo sapiens
tctcactctctttca

SEQ ID NO: 601146 - DNA, 15 bp, Homo sapiens
ctcactctctttcag

SEQ ID NO: 601147 - DNA, 15 bp, Homo sapiens
tcactctctttcaga

SEQ ID NO: 601148 - DNA, 15 bp, Homo sapiens
cactctctttcagag

SEQ ID NO: 601149 - DNA, 15 bp, Homo sapiens
actctctttcagagg

SEQ ID NO: 601150 - DNA, 15 bp, Homo sapiens
ctctctttcagaggt

SEQ ID NO: 601151 - DNA, 15 bp, Homo sapiens
tctctttcagaggtg

SEQ ID NO: 601152 - DNA, 15 bp, Homo sapiens
ctctttcagaggtgg

SEQ ID NO: 601153 - DNA, 15 bp, Homo sapiens
tctttcagaggtggc

SEQ ID NO: 601154 - DNA, 15 bp, Homo sapiens
ctttcagaggtggct

SEQ ID NO: 601155 - DNA, 15 bp, Homo sapiens
tttcagaggtggctg

SEQ ID NO: 601156 - DNA, 15 bp, Homo sapiens
ttcagaggtggctga

SEQ ID NO: 601157 - DNA, 15 bp, Homo sapiens
tcagaggtggctgat

SEQ ID NO: 601158 - DNA, 15 bp, Homo sapiens
cagaggtggctgatg

SEQ ID NO: 601159 - DNA, 15 bp, Homo sapiens
agaggtggctgatgc

SEQ ID NO: 601160 - DNA, 15 bp, Homo sapiens
gaggtggctgatgcc

SEQ ID NO: 601161 - DNA, 15 bp, Homo sapiens
aggtggctgatgcct

SEQ ID NO: 601162 - DNA, 15 bp, Homo sapiens
ggtggctgatgcctg

SEQ ID NO: 601163 - DNA, 15 bp, Homo sapiens
gtggctgatgcctgg

SEQ ID NO: 601164 - DNA, 15 bp, Homo sapiens
tggctgatgcctggc

SEQ ID NO: 601165 - DNA, 15 bp, Homo sapiens
ggctgatgcctggca

SEQ ID NO: 601166 - DNA, 15 bp, Homo sapiens
gctgatgcctggcag

SEQ ID NO: 601167 - DNA, 15 bp, Homo sapiens
ctgatgcctggcaga

SEQ ID NO: 601168 - DNA, 15 bp, Homo sapiens
tgatgcctggcagaa

SEQ ID NO: 601169 - DNA, 15 bp, Homo sapiens
gatgcctggcagaat

SEQ ID NO: 601170 - DNA, 15 bp, Homo sapiens
atgcctggcagaatt

SEQ ID NO: 601171 - DNA, 15 bp, Homo sapiens
tgcctggcagaattt

SEQ ID NO: 601172 - DNA, 15 bp, Homo sapiens
gcctggcagaatttg

SEQ ID NO: 601173 - DNA, 15 bp, Homo sapiens
cctggcagaatttgg

SEQ ID NO: 601174 - DNA, 15 bp, Homo sapiens
ctggcagaatttggg

SEQ ID NO: 601175 - DNA, 15 bp, Homo sapiens
tggcagaatttgggg

SEQ ID NO: 601176 - DNA, 15 bp, Homo sapiens
ggcagaatttggggc

SEQ ID NO: 601177 - DNA, 15 bp, Homo sapiens
gcagaatttggggct

SEQ ID NO: 601178 - DNA, 15 bp, Homo sapiens
cagaatttggggctt

SEQ ID NO: 601179 - DNA, 15 bp, Homo sapiens
agaatttggggcttt

SEQ ID NO: 601180 - DNA, 15 bp, Homo sapiens
gaatttggggctttg

SEQ ID NO: 601181 - DNA, 15 bp, Homo sapiens
aatttggggctttga

SEQ ID NO: 601182 - DNA, 15 bp, Homo sapiens
atttggggctttgag

SEQ ID NO: 601183 - DNA, 15 bp, Homo sapiens
tttggggctttgagg

SEQ ID NO: 601184 - DNA, 15 bp, Homo sapiens
ttggggctttgaggt

SEQ ID NO: 601185 - DNA, 15 bp, Homo sapiens
tggggctttgaggtt

SEQ ID NO: 601186 - DNA, 15 bp, Homo sapiens
ggggctttgaggttt

SEQ ID NO: 601187 - DNA, 15 bp, Homo sapiens
gggctttgaggtttc

SEQ ID NO: 601188 - DNA, 15 bp, Homo sapiens
ggctttgaggtttca

SEQ ID NO: 601189 - DNA, 15 bp, Homo sapiens
gctttgaggtttcat

SEQ ID NO: 601190 - DNA, 15 bp, Homo sapiens
ctttgaggtttcatg

SEQ ID NO: 601191 - DNA, 15 bp, Homo sapiens
tttgaggtttcatgg

SEQ ID NO: 601192 - DNA, 15 bp, Homo sapiens
ttgaggtttcatgga

SEQ ID NO: 601193 - DNA, 15 bp, Homo sapiens
tgaggtttcatggag

SEQ ID NO: 601194 - DNA, 15 bp, Homo sapiens
gaggtttcatggaga

SEQ ID NO: 601195 - DNA, 15 bp, Homo sapiens
aggtttcatggagat

SEQ ID NO: 601196 - DNA, 15 bp, Homo sapiens
ggtttcatggagatt

SEQ ID NO: 601197 - DNA, 15 bp, Homo sapiens
gtttcatggagattg

SEQ ID NO: 601198 - DNA, 15 bp, Homo sapiens
tttcatggagattga

SEQ ID NO: 601199 - DNA, 15 bp, Homo sapiens
ttcatggagattgag

SEQ ID NO: 601200 - DNA, 15 bp, Homo sapiens
tcatggagattgaga

SEQ ID NO: 601201 - DNA, 15 bp, Homo sapiens
catggagattgagaa

SEQ ID NO: 601202 - DNA, 15 bp, Homo sapiens
atggagattgagaaa

SEQ ID NO: 601203 - DNA, 15 bp, Homo sapiens
tggagattgagaaac

SEQ ID NO: 601204 - DNA, 15 bp, Homo sapiens
ggagattgagaaacc

SEQ ID NO: 601205 - DNA, 15 bp, Homo sapiens
gagattgagaaacca

SEQ ID NO: 601206 - DNA, 15 bp, Homo sapiens
agattgagaaaccaa

SEQ ID NO: 601207 - DNA, 15 bp, Homo sapiens
gattgagaaaccaag

SEQ ID NO: 601208 - DNA, 15 bp, Homo sapiens
attgagaaaccaagt

SEQ ID NO: 601209 - DNA, 15 bp, Homo sapiens
ttgagaaaccaagtg

SEQ ID NO: 601210 - DNA, 15 bp, Homo sapiens
tgagaaaccaagtgt

SEQ ID NO: 601211 - DNA, 15 bp, Homo sapiens
gagaaaccaagtgtg

SEQ ID NO: 601212 - DNA, 15 bp, Homo sapiens
agaaaccaagtgtgt

SEQ ID NO: 601213 - DNA, 15 bp, Homo sapiens
gaaaccaagtgtgtt

SEQ ID NO: 601214 - DNA, 15 bp, Homo sapiens
aaaccaagtgtgtta

SEQ ID NO: 601215 - DNA, 15 bp, Homo sapiens
aaccaagtgtgttag

SEQ ID NO: 601216 - DNA, 15 bp, Homo sapiens
accaagtgtgttagg

SEQ ID NO: 601217 - DNA, 15 bp, Homo sapiens
ccaagtgtgttaggg

SEQ ID NO: 601218 - DNA, 15 bp, Homo sapiens
caagtgtgttagggg

SEQ ID NO: 601219 - DNA, 15 bp, Homo sapiens
aagtgtgttaggggg

SEQ ID NO: 601220 - DNA, 15 bp, Homo sapiens
agtgtgttagggggt

SEQ ID NO: 601221 - DNA, 15 bp, Homo sapiens
gtgtgttagggggtg

SEQ ID NO: 601222 - DNA, 15 bp, Homo sapiens
tgtgttagggggtga

SEQ ID NO: 601223 - DNA, 15 bp, Homo sapiens
gtgttagggggtgag

SEQ ID NO: 601224 - DNA, 15 bp, Homo sapiens
tgttagggggtgagg

SEQ ID NO: 601225 - DNA, 15 bp, Homo sapiens
gttagggggtgaggg

SEQ ID NO: 601226 - DNA, 15 bp, Homo sapiens
ttagggggtgagggg

SEQ ID NO: 601227 - DNA, 15 bp, Homo sapiens
tagggggtgaggggg

SEQ ID NO: 601228 - DNA, 15 bp, Homo sapiens
agggggtgagggggc

SEQ ID NO: 601229 - DNA, 15 bp, Homo sapiens
gggggtgagggggca

SEQ ID NO: 601230 - DNA, 15 bp, Homo sapiens
ggggtgagggggcag

SEQ ID NO: 601231 - DNA, 15 bp, Homo sapiens
gggtgagggggcagg

SEQ ID NO: 601232 - DNA, 15 bp, Homo sapiens
ggtgagggggcagga

SEQ ID NO: 601233 - DNA, 15 bp, Homo sapiens
gtgagggggcaggag

SEQ ID NO: 601234 - DNA, 15 bp, Homo sapiens
tgagggggcaggaga

SEQ ID NO: 601235 - DNA, 15 bp, Homo sapiens
gagggggcaggagag

SEQ ID NO: 601236 - DNA, 15 bp, Homo sapiens
agggggcaggagagg

SEQ ID NO: 601237 - DNA, 15 bp, Homo sapiens
gggggcaggagaggg

SEQ ID NO: 601238 - DNA, 15 bp, Homo sapiens
ggggcaggagagggg

SEQ ID NO: 601239 - DNA, 15 bp, Homo sapiens
gggcaggagaggggc

SEQ ID NO: 601240 - DNA, 15 bp, Homo sapiens
ggcaggagaggggct

SEQ ID NO: 601241 - DNA, 15 bp, Homo sapiens
gcaggagaggggctg

SEQ ID NO: 601242 - DNA, 15 bp, Homo sapiens
caggagaggggctgg

SEQ ID NO: 601243 - DNA, 15 bp, Homo sapiens
aggagaggggctggc

SEQ ID NO: 601244 - DNA, 15 bp, Homo sapiens
ggagaggggctggct

SEQ ID NO: 601245 - DNA, 15 bp, Homo sapiens
gagaggggctggctg

SEQ ID NO: 601246 - DNA, 15 bp, Homo sapiens
agaggggctggctga

SEQ ID NO: 601247 - DNA, 15 bp, Homo sapiens
gaggggctggctgaa

SEQ ID NO: 601248 - DNA, 15 bp, Homo sapiens
aggggctggctgaac

SEQ ID NO: 601249 - DNA, 15 bp, Homo sapiens
ggggctggctgaacc

SEQ ID NO: 601250 - DNA, 15 bp, Homo sapiens
gggctggctgaaccc

SEQ ID NO: 601251 - DNA, 15 bp, Homo sapiens
ggctggctgaaccca

SEQ ID NO: 601252 - DNA, 15 bp, Homo sapiens
gctggctgaacccac

SEQ ID NO: 601253 - DNA, 15 bp, Homo sapiens
ctggctgaacccaca

SEQ ID NO: 601254 - DNA, 15 bp, Homo sapiens
tggctgaacccacag

SEQ ID NO: 601255 - DNA, 15 bp, Homo sapiens
ggctgaacccacagg

SEQ ID NO: 601256 - DNA, 15 bp, Homo sapiens
gctgaacccacaggc

SEQ ID NO: 601257 - DNA, 15 bp, Homo sapiens
ctgaacccacaggcc

SEQ ID NO: 601258 - DNA, 15 bp, Homo sapiens
tgaacccacaggcct

SEQ ID NO: 601259 - DNA, 15 bp, Homo sapiens
gaacccacaggcctc

SEQ ID NO: 601260 - DNA, 15 bp, Homo sapiens
aacccacaggcctcc

SEQ ID NO: 601261 - DNA, 15 bp, Homo sapiens
acccacaggcctccc

SEQ ID NO: 601262 - DNA, 15 bp, Homo sapiens
cccacaggcctccca

SEQ ID NO: 601263 - DNA, 15 bp, Homo sapiens
ccacaggcctcccat

SEQ ID NO: 601264 - DNA, 15 bp, Homo sapiens
cacaggcctcccata

SEQ ID NO: 601265 - DNA, 15 bp, Homo sapiens
acaggcctcccatat

SEQ ID NO: 601266 - DNA, 15 bp, Homo sapiens
caggcctcccatata

SEQ ID NO: 601267 - DNA, 15 bp, Homo sapiens
aggcctcccatatat

SEQ ID NO: 601268 - DNA, 15 bp, Homo sapiens
ggcctcccatatatg

SEQ ID NO: 601269 - DNA, 15 bp, Homo sapiens
gcctcccatatatgc

SEQ ID NO: 601270 - DNA, 15 bp, Homo sapiens
cctcccatatatgcc

SEQ ID NO: 601271 - DNA, 15 bp, Homo sapiens
ctcccatatatgccc

SEQ ID NO: 601272 - DNA, 15 bp, Homo sapiens
tcccatatatgccct

SEQ ID NO: 601273 - DNA, 15 bp, Homo sapiens
cccatatatgccctc

SEQ ID NO: 601274 - DNA, 15 bp, Homo sapiens
ccatatatgccctcc

SEQ ID NO: 601275 - DNA, 15 bp, Homo sapiens
catatatgccctccc

SEQ ID NO: 601276 - DNA, 15 bp, Homo sapiens
atatatgccctcccc

SEQ ID NO: 601277 - DNA, 15 bp, Homo sapiens
tatatgccctccccc

SEQ ID NO: 601278 - DNA, 15 bp, Homo sapiens
atatgccctcccccc

SEQ ID NO: 601279 - DNA, 15 bp, Homo sapiens
tatgccctcccccca

SEQ ID NO: 601280 - DNA, 15 bp, Homo sapiens
atgccctccccccag

SEQ ID NO: 601281 - DNA, 15 bp, Homo sapiens
tgccctccccccagg

SEQ ID NO: 601282 - DNA, 15 bp, Homo sapiens
gccctccccccaggg

SEQ ID NO: 601283 - DNA, 15 bp, Homo sapiens
ccctccccccagggt

SEQ ID NO: 601284 - DNA, 15 bp, Homo sapiens
cctccccccagggtg

SEQ ID NO: 601285 - DNA, 15 bp, Homo sapiens
ctccccccagggtgc

SEQ ID NO: 601286 - DNA, 15 bp, Homo sapiens
tccccccagggtgcc

SEQ ID NO: 601287 - DNA, 15 bp, Homo sapiens
ccccccagggtgcca

SEQ ID NO: 601288 - DNA, 15 bp, Homo sapiens
cccccagggtgccac

SEQ ID NO: 601289 - DNA, 15 bp, Homo sapiens
ccccagggtgccact

SEQ ID NO: 601290 - DNA, 15 bp, Homo sapiens
cccagggtgccactg

SEQ ID NO: 601291 - DNA, 15 bp, Homo sapiens
ccagggtgccactgt

SEQ ID NO: 601292 - DNA, 15 bp, Homo sapiens
cagggtgccactgtg

SEQ ID NO: 601293 - DNA, 15 bp, Homo sapiens
agggtgccactgtgt

SEQ ID NO: 601294 - DNA, 15 bp, Homo sapiens
gggtgccactgtgtc

SEQ ID NO: 601295 - DNA, 15 bp, Homo sapiens
ggtgccactgtgtcc

SEQ ID NO: 601296 - DNA, 15 bp, Homo sapiens
gtgccactgtgtccc

SEQ ID NO: 601297 - DNA, 15 bp, Homo sapiens
tgccactgtgtccct

SEQ ID NO: 601298 - DNA, 15 bp, Homo sapiens
gccactgtgtccctc

SEQ ID NO: 601299 - DNA, 15 bp, Homo sapiens
ccactgtgtccctct

SEQ ID NO: 601300 - DNA, 15 bp, Homo sapiens
cactgtgtccctctg

SEQ ID NO: 601301 - DNA, 15 bp, Homo sapiens
actgtgtccctctgg

SEQ ID NO: 601302 - DNA, 15 bp, Homo sapiens
ctgtgtccctctggg

SEQ ID NO: 601303 - DNA, 15 bp, Homo sapiens
tgtgtccctctggga

SEQ ID NO: 601304 - DNA, 15 bp, Homo sapiens
gtgtccctctgggag

SEQ ID NO: 601305 - DNA, 15 bp, Homo sapiens
tgtccctctgggaga

SEQ ID NO: 601306 - DNA, 15 bp, Homo sapiens
gtccctctgggagac

SEQ ID NO: 601307 - DNA, 15 bp, Homo sapiens
tccctctgggagacg

SEQ ID NO: 601308 - DNA, 15 bp, Homo sapiens
ccctctgggagacgg

SEQ ID NO: 601309 - DNA, 15 bp, Homo sapiens
cctctgggagacggt

SEQ ID NO: 601310 - DNA, 15 bp, Homo sapiens
ctctgggagacggtg

SEQ ID NO: 601311 - DNA, 15 bp, Homo sapiens
tctgggagacggtgc

SEQ ID NO: 601312 - DNA, 15 bp, Homo sapiens
ctgggagacggtgca

SEQ ID NO: 601313 - DNA, 15 bp, Homo sapiens
tgggagacggtgcag

SEQ ID NO: 601314 - DNA, 15 bp, Homo sapiens
gggagacggtgcaga

SEQ ID NO: 601315 - DNA, 15 bp, Homo sapiens
ggagacggtgcagaa

SEQ ID NO: 601316 - DNA, 15 bp, Homo sapiens
gagacggtgcagaaa

SEQ ID NO: 601317 - DNA, 15 bp, Homo sapiens
agacggtgcagaaat

SEQ ID NO: 601318 - DNA, 15 bp, Homo sapiens
gacggtgcagaaatg

SEQ ID NO: 601319 - DNA, 15 bp, Homo sapiens
acggtgcagaaatgg

SEQ ID NO: 601320 - DNA, 15 bp, Homo sapiens
cggtgcagaaatggc

SEQ ID NO: 601321 - DNA, 15 bp, Homo sapiens
ggtgcagaaatggcg

SEQ ID NO: 601322 - DNA, 15 bp, Homo sapiens
gtgcagaaatggcga

SEQ ID NO: 601323 - DNA, 15 bp, Homo sapiens
tgcagaaatggcgag

SEQ ID NO: 601324 - DNA, 15 bp, Homo sapiens
gcagaaatggcgaga

SEQ ID NO: 601325 - DNA, 15 bp, Homo sapiens
cagaaatggcgagaa

SEQ ID NO: 601326 - DNA, 15 bp, Homo sapiens
agaaatggcgagaat

SEQ ID NO: 601327 - DNA, 15 bp, Homo sapiens
gaaatggcgagaata

SEQ ID NO: 601328 - DNA, 15 bp, Homo sapiens
aaatggcgagaatac

SEQ ID NO: 601329 - DNA, 15 bp, Homo sapiens
aatggcgagaatacc

SEQ ID NO: 601330 - DNA, 15 bp, Homo sapiens
atggcgagaataccg

SEQ ID NO: 601331 - DNA, 15 bp, Homo sapiens
tggcgagaataccga

SEQ ID NO: 601332 - DNA, 15 bp, Homo sapiens
ggcgagaataccgac

SEQ ID NO: 601333 - DNA, 15 bp, Homo sapiens
gcgagaataccgacg

SEQ ID NO: 601334 - DNA, 15 bp, Homo sapiens
cgagaataccgacgc

SEQ ID NO: 601335 - DNA, 15 bp, Homo sapiens
gagaataccgacgcc

SEQ ID NO: 601336 - DNA, 15 bp, Homo sapiens
agaataccgacgcca

SEQ ID NO: 601337 - DNA, 15 bp, Homo sapiens
gaataccgacgccag

SEQ ID NO: 601338 - DNA, 15 bp, Homo sapiens
aataccgacgccagt

SEQ ID NO: 601339 - DNA, 15 bp, Homo sapiens
ataccgacgccagtg

SEQ ID NO: 601340 - DNA, 15 bp, Homo sapiens
taccgacgccagtgc

SEQ ID NO: 601341 - DNA, 15 bp, Homo sapiens
accgacgccagtgcc

SEQ ID NO: 601342 - DNA, 15 bp, Homo sapiens
ccgacgccagtgcca

SEQ ID NO: 601343 - DNA, 15 bp, Homo sapiens
cgacgccagtgccag

SEQ ID NO: 601344 - DNA, 15 bp, Homo sapiens
gacgccagtgccagc

SEQ ID NO: 601345 - DNA, 15 bp, Homo sapiens
acgccagtgccagcg

SEQ ID NO: 601346 - DNA, 15 bp, Homo sapiens
cgccagtgccagcgc

SEQ ID NO: 601347 - DNA, 15 bp, Homo sapiens
gccagtgccagcgct

SEQ ID NO: 601348 - DNA, 15 bp, Homo sapiens
ccagtgccagcgctc

SEQ ID NO: 601349 - DNA, 15 bp, Homo sapiens
cagtgccagcgctcc

SEQ ID NO: 601350 - DNA, 15 bp, Homo sapiens
agtgccagcgctccc

SEQ ID NO: 601351 - DNA, 15 bp, Homo sapiens
gtgccagcgctccct

SEQ ID NO: 601352 - DNA, 15 bp, Homo sapiens
tgccagcgctccctg

SEQ ID NO: 601353 - DNA, 15 bp, Homo sapiens
gccagcgctccctga

SEQ ID NO: 601354 - DNA, 15 bp, Homo sapiens
ccagcgctccctgac

SEQ ID NO: 601355 - DNA, 15 bp, Homo sapiens
cagcgctccctgact

SEQ ID NO: 601356 - DNA, 15 bp, Homo sapiens
agcgctccctgactg

SEQ ID NO: 601357 - DNA, 15 bp, Homo sapiens
gcgctccctgactga

SEQ ID NO: 601358 - DNA, 15 bp, Homo sapiens
cgctccctgactgag

SEQ ID NO: 601359 - DNA, 15 bp, Homo sapiens
gctccctgactgagg

SEQ ID NO: 601360 - DNA, 15 bp, Homo sapiens
ctccctgactgagga

SEQ ID NO: 601361 - DNA, 15 bp, Homo sapiens
tccctgactgaggat

SEQ ID NO: 601362 - DNA, 15 bp, Homo sapiens
ccctgactgaggatc

SEQ ID NO: 601363 - DNA, 15 bp, Homo sapiens
cctgactgaggatcc

SEQ ID NO: 601364 - DNA, 15 bp, Homo sapiens
ctgactgaggatcca

SEQ ID NO: 601365 - DNA, 15 bp, Homo sapiens
tgactgaggatccac

SEQ ID NO: 601366 - DNA, 15 bp, Homo sapiens
gactgaggatccacc

SEQ ID NO: 601367 - DNA, 15 bp, Homo sapiens
actgaggatccacct

SEQ ID NO: 601368 - DNA, 15 bp, Homo sapiens
ctgaggatccacctc

SEQ ID NO: 601369 - DNA, 15 bp, Homo sapiens
tgaggatccacctcc

SEQ ID NO: 601370 - DNA, 15 bp, Homo sapiens
gaggatccacctcct

SEQ ID NO: 601371 - DNA, 15 bp, Homo sapiens
aggatccacctcctg

SEQ ID NO: 601372 - DNA, 15 bp, Homo sapiens
ggatccacctcctgc

SEQ ID NO: 601373 - DNA, 15 bp, Homo sapiens
gatccacctcctgcc

SEQ ID NO: 601374 - DNA, 15 bp, Homo sapiens
atccacctcctgcca

SEQ ID NO: 601375 - DNA, 15 bp, Homo sapiens
tccacctcctgccac

SEQ ID NO: 601376 - DNA, 15 bp, Homo sapiens
ccacctcctgccaca

SEQ ID NO: 601377 - DNA, 15 bp, Homo sapiens
cacctcctgccacag

SEQ ID NO: 601378 - DNA, 15 bp, Homo sapiens
acctcctgccacagg

SEQ ID NO: 601379 - DNA, 15 bp, Homo sapiens
cctcctgccacaggt

SEQ ID NO: 601380 - DNA, 15 bp, Homo sapiens
ctcctgccacaggtg

SEQ ID NO: 601381 - DNA, 15 bp, Homo sapiens
tcctgccacaggtga

SEQ ID NO: 601382 - DNA, 15 bp, Homo sapiens
cctgccacaggtgag

SEQ ID NO: 601383 - DNA, 15 bp, Homo sapiens
ctgccacaggtgagt

SEQ ID NO: 601384 - DNA, 15 bp, Homo sapiens
tgccacaggtgagtc

SEQ ID NO: 601385 - DNA, 15 bp, Homo sapiens
gccacaggtgagtcc

SEQ ID NO: 601386 - DNA, 15 bp, Homo sapiens
ccacaggtgagtcca

SEQ ID NO: 601387 - DNA, 15 bp, Homo sapiens
cacaggtgagtccat

SEQ ID NO: 601388 - DNA, 15 bp, Homo sapiens
acaggtgagtccatg

SEQ ID NO: 601389 - DNA, 15 bp, Homo sapiens
caggtgagtccatgt

SEQ ID NO: 601390 - DNA, 15 bp, Homo sapiens
aggtgagtccatgta

SEQ ID NO: 601391 - DNA, 15 bp, Homo sapiens
ggtgagtccatgtag

SEQ ID NO: 601392 - DNA, 15 bp, Homo sapiens
gtgagtccatgtagg

SEQ ID NO: 601393 - DNA, 15 bp, Homo sapiens
tgagtccatgtaggc

SEQ ID NO: 601394 - DNA, 15 bp, Homo sapiens
gagtccatgtaggct

SEQ ID NO: 601395 - DNA, 15 bp, Homo sapiens
agtccatgtaggctc

SEQ ID NO: 601396 - DNA, 15 bp, Homo sapiens
gtccatgtaggctcc

SEQ ID NO: 601397 - DNA, 15 bp, Homo sapiens
tccatgtaggctccc

SEQ ID NO: 601398 - DNA, 15 bp, Homo sapiens
ccatgtaggctcccc

SEQ ID NO: 601399 - DNA, 15 bp, Homo sapiens
catgtaggctcccca

SEQ ID NO: 601400 - DNA, 15 bp, Homo sapiens
atgtaggctccccac

SEQ ID NO: 601401 - DNA, 15 bp, Homo sapiens
tgtaggctccccacc

SEQ ID NO: 601402 - DNA, 15 bp, Homo sapiens
gtaggctccccacct

SEQ ID NO: 601403 - DNA, 15 bp, Homo sapiens
taggctccccacctt

SEQ ID NO: 601404 - DNA, 15 bp, Homo sapiens
aggctccccaccttt

SEQ ID NO: 601405 - DNA, 15 bp, Homo sapiens
ggctccccaccttta

SEQ ID NO: 601406 - DNA, 15 bp, Homo sapiens
gctccccacctttag

SEQ ID NO: 601407 - DNA, 15 bp, Homo sapiens
ctccccacctttagt

SEQ ID NO: 601408 - DNA, 15 bp, Homo sapiens
tccccacctttagtg

SEQ ID NO: 601409 - DNA, 15 bp, Homo sapiens
ccccacctttagtgc

SEQ ID NO: 601410 - DNA, 15 bp, Homo sapiens
cccacctttagtgct

SEQ ID NO: 601411 - DNA, 15 bp, Homo sapiens
ccacctttagtgctc

SEQ ID NO: 601412 - DNA, 15 bp, Homo sapiens
cacctttagtgctcc

SEQ ID NO: 601413 - DNA, 15 bp, Homo sapiens
acctttagtgctccc

SEQ ID NO: 601414 - DNA, 15 bp, Homo sapiens
cctttagtgctcccc

SEQ ID NO: 601415 - DNA, 15 bp, Homo sapiens
ctttagtgctcccca

SEQ ID NO: 601416 - DNA, 15 bp, Homo sapiens
tttagtgctccccac

SEQ ID NO: 601417 - DNA, 15 bp, Homo sapiens
ttagtgctccccacc

SEQ ID NO: 601418 - DNA, 15 bp, Homo sapiens
tagtgctccccaccc

SEQ ID NO: 601419 - DNA, 15 bp, Homo sapiens
agtgctccccaccca

SEQ ID NO: 601420 - DNA, 15 bp, Homo sapiens
gtgctccccacccaa

SEQ ID NO: 601421 - DNA, 15 bp, Homo sapiens
tgctccccacccaac

SEQ ID NO: 601422 - DNA, 15 bp, Homo sapiens
gctccccacccaacc

SEQ ID NO: 601423 - DNA, 15 bp, Homo sapiens
ctccccacccaacca

SEQ ID NO: 601424 - DNA, 15 bp, Homo sapiens
tccccacccaaccaa

SEQ ID NO: 601425 - DNA, 15 bp, Homo sapiens
ccccacccaaccaac

SEQ ID NO: 601426 - DNA, 15 bp, Homo sapiens
cccacccaaccaact

SEQ ID NO: 601427 - DNA, 15 bp, Homo sapiens
ccacccaaccaactt

SEQ ID NO: 601428 - DNA, 15 bp, Homo sapiens
cacccaaccaacttc

SEQ ID NO: 601429 - DNA, 15 bp, Homo sapiens
acccaaccaacttct

SEQ ID NO: 601430 - DNA, 15 bp, Homo sapiens
cccaaccaacttctg

SEQ ID NO: 601431 - DNA, 15 bp, Homo sapiens
ccaaccaacttctgg

SEQ ID NO: 601432 - DNA, 15 bp, Homo sapiens
caaccaacttctgga

SEQ ID NO: 601433 - DNA, 15 bp, Homo sapiens
aaccaacttctggag

SEQ ID NO: 601434 - DNA, 15 bp, Homo sapiens
accaacttctggagg

SEQ ID NO: 601435 - DNA, 15 bp, Homo sapiens
ccaacttctggagga

SEQ ID NO: 601436 - DNA, 15 bp, Homo sapiens
caacttctggaggac

SEQ ID NO: 601437 - DNA, 15 bp, Homo sapiens
aacttctggaggact

SEQ ID NO: 601438 - DNA, 15 bp, Homo sapiens
acttctggaggactt

SEQ ID NO: 601439 - DNA, 15 bp, Homo sapiens
cttctggaggacttt

SEQ ID NO: 601440 - DNA, 15 bp, Homo sapiens
ttctggaggactttg

SEQ ID NO: 601441 - DNA, 15 bp, Homo sapiens
tctggaggactttga

SEQ ID NO: 601442 - DNA, 15 bp, Homo sapiens
ctggaggactttgat

SEQ ID NO: 601443 - DNA, 15 bp, Homo sapiens
tggaggactttgatg

SEQ ID NO: 601444 - DNA, 15 bp, Homo sapiens
ggaggactttgatga

SEQ ID NO: 601445 - DNA, 15 bp, Homo sapiens
gaggactttgatgaa

SEQ ID NO: 601446 - DNA, 15 bp, Homo sapiens
aggactttgatgaac

SEQ ID NO: 601447 - DNA, 15 bp, Homo sapiens
ggactttgatgaact

SEQ ID NO: 601448 - DNA, 15 bp, Homo sapiens
gactttgatgaactc

SEQ ID NO: 601449 - DNA, 15 bp, Homo sapiens
actttgatgaactca

SEQ ID NO: 601450 - DNA, 15 bp, Homo sapiens
ctttgatgaactcaa

SEQ ID NO: 601451 - DNA, 15 bp, Homo sapiens
tttgatgaactcaat

SEQ ID NO: 601452 - DNA, 15 bp, Homo sapiens
ttgatgaactcaatg

SEQ ID NO: 601453 - DNA, 15 bp, Homo sapiens
tgatgaactcaatgt

SEQ ID NO: 601454 - DNA, 15 bp, Homo sapiens
gatgaactcaatgtc

SEQ ID NO: 601455 - DNA, 15 bp, Homo sapiens
atgaactcaatgtcc

SEQ ID NO: 601456 - DNA, 15 bp, Homo sapiens
tgaactcaatgtcca

SEQ ID NO: 601457 - DNA, 15 bp, Homo sapiens
gaactcaatgtccat

SEQ ID NO: 601458 - DNA, 15 bp, Homo sapiens
aactcaatgtccatg

SEQ ID NO: 601459 - DNA, 15 bp, Homo sapiens
actcaatgtccatgg

SEQ ID NO: 601460 - DNA, 15 bp, Homo sapiens
ctcaatgtccatggc

SEQ ID NO: 601461 - DNA, 15 bp, Homo sapiens
tcaatgtccatggct

SEQ ID NO: 601462 - DNA, 15 bp, Homo sapiens
caatgtccatggctg

SEQ ID NO: 601463 - DNA, 15 bp, Homo sapiens
aatgtccatggctgg

SEQ ID NO: 601464 - DNA, 15 bp, Homo sapiens
atgtccatggctggg

SEQ ID NO: 601465 - DNA, 15 bp, Homo sapiens
tgtccatggctggga

SEQ ID NO: 601466 - DNA, 15 bp, Homo sapiens
gtccatggctgggag

SEQ ID NO: 601467 - DNA, 15 bp, Homo sapiens
tccatggctgggagc

SEQ ID NO: 601468 - DNA, 15 bp, Homo sapiens
ccatggctgggagcc

SEQ ID NO: 601469 - DNA, 15 bp, Homo sapiens
catggctgggagcca

SEQ ID NO: 601470 - DNA, 15 bp, Homo sapiens
atggctgggagccat

SEQ ID NO: 601471 - DNA, 15 bp, Homo sapiens
tggctgggagccatt

SEQ ID NO: 601472 - DNA, 15 bp, Homo sapiens
ggctgggagccattt

SEQ ID NO: 601473 - DNA, 15 bp, Homo sapiens
gctgggagccatttg

SEQ ID NO: 601474 - DNA, 15 bp, Homo sapiens
ctgggagccatttgc

SEQ ID NO: 601475 - DNA, 15 bp, Homo sapiens
tgggagccatttgcc

SEQ ID NO: 601476 - DNA, 15 bp, Homo sapiens
gggagccatttgcct

SEQ ID NO: 601477 - DNA, 15 bp, Homo sapiens
ggagccatttgcctc

SEQ ID NO: 601478 - DNA, 15 bp, Homo sapiens
gagccatttgcctct

SEQ ID NO: 601479 - DNA, 15 bp, Homo sapiens
agccatttgcctcta

SEQ ID NO: 601480 - DNA, 15 bp, Homo sapiens
gccatttgcctctat

SEQ ID NO: 601481 - DNA, 15 bp, Homo sapiens
ccatttgcctctata

SEQ ID NO: 601482 - DNA, 15 bp, Homo sapiens
catttgcctctatag

SEQ ID NO: 601483 - DNA, 15 bp, Homo sapiens
atttgcctctatagg

SEQ ID NO: 601484 - DNA, 15 bp, Homo sapiens
tttgcctctatagga

SEQ ID NO: 601485 - DNA, 15 bp, Homo sapiens
ttgcctctataggat

SEQ ID NO: 601486 - DNA, 15 bp, Homo sapiens
tgcctctataggatg

SEQ ID NO: 601487 - DNA, 15 bp, Homo sapiens
gcctctataggatgc

SEQ ID NO: 601488 - DNA, 15 bp, Homo sapiens
cctctataggatgcc

SEQ ID NO: 601489 - DNA, 15 bp, Homo sapiens
ctctataggatgcca

SEQ ID NO: 601490 - DNA, 15 bp, Homo sapiens
tctataggatgccac

SEQ ID NO: 601491 - DNA, 15 bp, Homo sapiens
ctataggatgccacc

SEQ ID NO: 601492 - DNA, 15 bp, Homo sapiens
tataggatgccaccc

SEQ ID NO: 601493 - DNA, 15 bp, Homo sapiens
ataggatgccacccc

SEQ ID NO: 601494 - DNA, 15 bp, Homo sapiens
taggatgccacccct

SEQ ID NO: 601495 - DNA, 15 bp, Homo sapiens
aggatgccacccctg

SEQ ID NO: 601496 - DNA, 15 bp, Homo sapiens
ggatgccacccctgc

SEQ ID NO: 601497 - DNA, 15 bp, Homo sapiens
gatgccacccctgcc

SEQ ID NO: 601498 - DNA, 15 bp, Homo sapiens
atgccacccctgccc

SEQ ID NO: 601499 - DNA, 15 bp, Homo sapiens
tgccacccctgccct

SEQ ID NO: 601500 - DNA, 15 bp, Homo sapiens
gccacccctgccctc

SEQ ID NO: 601501 - DNA, 15 bp, Homo sapiens
ccacccctgccctct

SEQ ID NO: 601502 - DNA, 15 bp, Homo sapiens
tggtagctgttaatt

SEQ ID NO: 601503 - DNA, 15 bp, Homo sapiens
ggtagctgttaattt

SEQ ID NO: 601504 - DNA, 15 bp, Homo sapiens
gtagctgttaatttt

SEQ ID NO: 601505 - DNA, 15 bp, Homo sapiens
tagctgttaattttt

SEQ ID NO: 601506 - DNA, 15 bp, Homo sapiens
agctgttaatttttc

SEQ ID NO: 601507 - DNA, 15 bp, Homo sapiens
gctgttaatttttcc

SEQ ID NO: 601508 - DNA, 15 bp, Homo sapiens
ctgttaatttttccc

SEQ ID NO: 601509 - DNA, 15 bp, Homo sapiens
tgttaatttttccca

SEQ ID NO: 601510 - DNA, 15 bp, Homo sapiens
gttaatttttcccac

SEQ ID NO: 601511 - DNA, 15 bp, Homo sapiens
ttaatttttcccacc

SEQ ID NO: 601512 - DNA, 15 bp, Homo sapiens
taatttttcccacct

SEQ ID NO: 601513 - DNA, 15 bp, Homo sapiens
aatttttcccacctc

SEQ ID NO: 601514 - DNA, 15 bp, Homo sapiens
atttttcccacctcc

SEQ ID NO: 601515 - DNA, 15 bp, Homo sapiens
tttttcccacctccc

SEQ ID NO: 601516 - DNA, 15 bp, Homo sapiens
ttttcccacctccct

SEQ ID NO: 601517 - DNA, 15 bp, Homo sapiens
tttcccacctcccta

SEQ ID NO: 601518 - DNA, 15 bp, Homo sapiens
ttcccacctccctac

SEQ ID NO: 601519 - DNA, 15 bp, Homo sapiens
tcccacctccctaca

SEQ ID NO: 601520 - DNA, 15 bp, Homo sapiens
cccacctccctacat

SEQ ID NO: 601521 - DNA, 15 bp, Homo sapiens
ccacctccctacata

SEQ ID NO: 601522 - DNA, 15 bp, Homo sapiens
cacctccctacatac

SEQ ID NO: 601523 - DNA, 15 bp, Homo sapiens
acctccctacatacc

SEQ ID NO: 601524 - DNA, 15 bp, Homo sapiens
cctccctacatacct

SEQ ID NO: 601525 - DNA, 15 bp, Homo sapiens
ctccctacatacctc

SEQ ID NO: 601526 - DNA, 15 bp, Homo sapiens
tccctacatacctcc

SEQ ID NO: 601527 - DNA, 15 bp, Homo sapiens
ccctacatacctccc

SEQ ID NO: 601528 - DNA, 15 bp, Homo sapiens
cctacatacctccct

SEQ ID NO: 601529 - DNA, 15 bp, Homo sapiens
ctacatacctccctg

SEQ ID NO: 601530 - DNA, 15 bp, Homo sapiens
tacatacctccctga

SEQ ID NO: 601531 - DNA, 15 bp, Homo sapiens
acatacctccctgac

SEQ ID NO: 601532 - DNA, 15 bp, Homo sapiens
catacctccctgact

SEQ ID NO: 601533 - DNA, 15 bp, Homo sapiens
atacctccctgactt

SEQ ID NO: 601534 - DNA, 15 bp, Homo sapiens
tacctccctgacttc

SEQ ID NO: 601535 - DNA, 15 bp, Homo sapiens
acctccctgacttcc

SEQ ID NO: 601536 - DNA, 15 bp, Homo sapiens
cctccctgacttcct

SEQ ID NO: 601537 - DNA, 15 bp, Homo sapiens
ctccctgacttcctg

SEQ ID NO: 601538 - DNA, 15 bp, Homo sapiens
tccctgacttcctgc

SEQ ID NO: 601539 - DNA, 15 bp, Homo sapiens
ccctgacttcctgca

SEQ ID NO: 601540 - DNA, 15 bp, Homo sapiens
cctgacttcctgcaa

SEQ ID NO: 601541 - DNA, 15 bp, Homo sapiens
ctgacttcctgcaat

SEQ ID NO: 601542 - DNA, 15 bp, Homo sapiens
tgacttcctgcaata

SEQ ID NO: 601543 - DNA, 15 bp, Homo sapiens
gacttcctgcaatac

SEQ ID NO: 601544 - DNA, 15 bp, Homo sapiens
acttcctgcaataca

SEQ ID NO: 601545 - DNA, 15 bp, Homo sapiens
cttcctgcaatacac

SEQ ID NO: 601546 - DNA, 15 bp, Homo sapiens
ttcctgcaatacaca

SEQ ID NO: 601547 - DNA, 15 bp, Homo sapiens
tcctgcaatacacac

SEQ ID NO: 601548 - DNA, 15 bp, Homo sapiens
cctgcaatacacaca

SEQ ID NO: 601549 - DNA, 15 bp, Homo sapiens
ctgcaatacacacac

SEQ ID NO: 601550 - DNA, 15 bp, Homo sapiens
tgcaatacacacact

SEQ ID NO: 601551 - DNA, 15 bp, Homo sapiens
gcaatacacacactt

SEQ ID NO: 601552 - DNA, 15 bp, Homo sapiens
caatacacacacttt

SEQ ID NO: 601553 - DNA, 15 bp, Homo sapiens
aatacacacactttc

SEQ ID NO: 601554 - DNA, 15 bp, Homo sapiens
atacacacactttct

SEQ ID NO: 601555 - DNA, 15 bp, Homo sapiens
tacacacactttctc

SEQ ID NO: 601556 - DNA, 15 bp, Homo sapiens
acacacactttctct

SEQ ID NO: 601557 - DNA, 15 bp, Homo sapiens
cacacactttctctg

SEQ ID NO: 601558 - DNA, 15 bp, Homo sapiens
acacactttctctgc

SEQ ID NO: 601559 - DNA, 15 bp, Homo sapiens
cacactttctctgcc

SEQ ID NO: 601560 - DNA, 15 bp, Homo sapiens
acactttctctgcct

SEQ ID NO: 601561 - DNA, 15 bp, Homo sapiens
cactttctctgcctc

SEQ ID NO: 601562 - DNA, 15 bp, Homo sapiens
actttctctgcctcc

SEQ ID NO: 601563 - DNA, 15 bp, Homo sapiens
ctttctctgcctccc

SEQ ID NO: 601564 - DNA, 15 bp, Homo sapiens
tttctctgcctccca

SEQ ID NO: 601565 - DNA, 15 bp, Homo sapiens
ttctctgcctcccat

SEQ ID NO: 601566 - DNA, 15 bp, Homo sapiens
tctctgcctcccata

SEQ ID NO: 601567 - DNA, 15 bp, Homo sapiens
ctctgcctcccatag

SEQ ID NO: 601568 - DNA, 15 bp, Homo sapiens
tctgcctcccataga

SEQ ID NO: 601569 - DNA, 15 bp, Homo sapiens
ctgcctcccatagat

SEQ ID NO: 601570 - DNA, 15 bp, Homo sapiens
tgcctcccatagatt

SEQ ID NO: 601571 - DNA, 15 bp, Homo sapiens
gcctcccatagattt

SEQ ID NO: 601572 - DNA, 15 bp, Homo sapiens
cctcccatagatttg

SEQ ID NO: 601573 - DNA, 15 bp, Homo sapiens
ctcccatagatttga

SEQ ID NO: 601574 - DNA, 15 bp, Homo sapiens
tcccatagatttgag

SEQ ID NO: 601575 - DNA, 15 bp, Homo sapiens
cccatagatttgaga

SEQ ID NO: 601576 - DNA, 15 bp, Homo sapiens
ccatagatttgagac

SEQ ID NO: 601577 - DNA, 15 bp, Homo sapiens
catagatttgagact

SEQ ID NO: 601578 - DNA, 15 bp, Homo sapiens
atagatttgagactg

SEQ ID NO: 601579 - DNA, 15 bp, Homo sapiens
tagatttgagactgg

SEQ ID NO: 601580 - DNA, 15 bp, Homo sapiens
agatttgagactggc

SEQ ID NO: 601581 - DNA, 15 bp, Homo sapiens
gatttgagactggca

SEQ ID NO: 601582 - DNA, 15 bp, Homo sapiens
atttgagactggcag

SEQ ID NO: 601583 - DNA, 15 bp, Homo sapiens
tttgagactggcagc

SEQ ID NO: 601584 - DNA, 15 bp, Homo sapiens
ttgagactggcagct

SEQ ID NO: 601585 - DNA, 15 bp, Homo sapiens
tgagactggcagctt

SEQ ID NO: 601586 - DNA, 15 bp, Homo sapiens
gagactggcagcttg

SEQ ID NO: 601587 - DNA, 15 bp, Homo sapiens
agactggcagcttgg

SEQ ID NO: 601588 - DNA, 15 bp, Homo sapiens
gactggcagcttggc

SEQ ID NO: 601589 - DNA, 15 bp, Homo sapiens
actggcagcttggcc

SEQ ID NO: 601590 - DNA, 15 bp, Homo sapiens
ctggcagcttggcca

SEQ ID NO: 601591 - DNA, 15 bp, Homo sapiens
tggcagcttggccag

SEQ ID NO: 601592 - DNA, 15 bp, Homo sapiens
ggcagcttggccagc

SEQ ID NO: 601593 - DNA, 15 bp, Homo sapiens
gcagcttggccagcg

SEQ ID NO: 601594 - DNA, 15 bp, Homo sapiens
cagcttggccagcgt

SEQ ID NO: 601595 - DNA, 15 bp, Homo sapiens
agcttggccagcgtc

SEQ ID NO: 601596 - DNA, 15 bp, Homo sapiens
gcttggccagcgtct

SEQ ID NO: 601597 - DNA, 15 bp, Homo sapiens
cttggccagcgtctg

SEQ ID NO: 601598 - DNA, 15 bp, Homo sapiens
ttggccagcgtctgc

SEQ ID NO: 601599 - DNA, 15 bp, Homo sapiens
tggccagcgtctgct

SEQ ID NO: 601600 - DNA, 15 bp, Homo sapiens
ggccagcgtctgctg

SEQ ID NO: 601601 - DNA, 15 bp, Homo sapiens
gccagcgtctgctgg

SEQ ID NO: 601602 - DNA, 15 bp, Homo sapiens
ccagcgtctgctggg

SEQ ID NO: 601603 - DNA, 15 bp, Homo sapiens
cagcgtctgctgggc

SEQ ID NO: 601604 - DNA, 15 bp, Homo sapiens
agcgtctgctgggcc

SEQ ID NO: 601605 - DNA, 15 bp, Homo sapiens
gcgtctgctgggcct

SEQ ID NO: 601606 - DNA, 15 bp, Homo sapiens
cgtctgctgggcctc

SEQ ID NO: 601607 - DNA, 15 bp, Homo sapiens
gtctgctgggcctct

SEQ ID NO: 601608 - DNA, 15 bp, Homo sapiens
tctgctgggcctcta

SEQ ID NO: 601609 - DNA, 15 bp, Homo sapiens
ctgctgggcctctag

SEQ ID NO: 601610 - DNA, 15 bp, Homo sapiens
tgctgggcctctaga

SEQ ID NO: 601611 - DNA, 15 bp, Homo sapiens
gctgggcctctagac

SEQ ID NO: 601612 - DNA, 15 bp, Homo sapiens
ctgggcctctagacc

SEQ ID NO: 601613 - DNA, 15 bp, Homo sapiens
tgggcctctagaccc

SEQ ID NO: 601614 - DNA, 15 bp, Homo sapiens
gggcctctagacccc

SEQ ID NO: 601615 - DNA, 15 bp, Homo sapiens
ggcctctagacccca

SEQ ID NO: 601616 - DNA, 15 bp, Homo sapiens
gcctctagaccccag

SEQ ID NO: 601617 - DNA, 15 bp, Homo sapiens
cctctagaccccagg

SEQ ID NO: 601618 - DNA, 15 bp, Homo sapiens
ctctagaccccaggg

SEQ ID NO: 601619 - DNA, 15 bp, Homo sapiens
tctagaccccaggga

SEQ ID NO: 601620 - DNA, 15 bp, Homo sapiens
ctagaccccagggag

SEQ ID NO: 601621 - DNA, 15 bp, Homo sapiens
tagaccccagggagc

SEQ ID NO: 601622 - DNA, 15 bp, Homo sapiens
agaccccagggagcc

SEQ ID NO: 601623 - DNA, 15 bp, Homo sapiens
gaccccagggagcca

SEQ ID NO: 601624 - DNA, 15 bp, Homo sapiens
accccagggagccag

SEQ ID NO: 601625 - DNA, 15 bp, Homo sapiens
ccccagggagccagg

SEQ ID NO: 601626 - DNA, 15 bp, Homo sapiens
cccagggagccaggc

SEQ ID NO: 601627 - DNA, 15 bp, Homo sapiens
ccagggagccaggcg

SEQ ID NO: 601628 - DNA, 15 bp, Homo sapiens
cagggagccaggcgt

SEQ ID NO: 601629 - DNA, 15 bp, Homo sapiens
agggagccaggcgta

SEQ ID NO: 601630 - DNA, 15 bp, Homo sapiens
gggagccaggcgtag

SEQ ID NO: 601631 - DNA, 15 bp, Homo sapiens
ggagccaggcgtagg

SEQ ID NO: 601632 - DNA, 15 bp, Homo sapiens
gagccaggcgtagga

SEQ ID NO: 601633 - DNA, 15 bp, Homo sapiens
agccaggcgtaggac

SEQ ID NO: 601634 - DNA, 15 bp, Homo sapiens
gccaggcgtaggaca

SEQ ID NO: 601635 - DNA, 15 bp, Homo sapiens
ccaggcgtaggacag

SEQ ID NO: 601636 - DNA, 15 bp, Homo sapiens
caggcgtaggacagg

SEQ ID NO: 601637 - DNA, 15 bp, Homo sapiens
aggcgtaggacaggg

SEQ ID NO: 601638 - DNA, 15 bp, Homo sapiens
ggcgtaggacagggc

SEQ ID NO: 601639 - DNA, 15 bp, Homo sapiens
gcgtaggacagggcc

SEQ ID NO: 601640 - DNA, 15 bp, Homo sapiens
cgtaggacagggccc

SEQ ID NO: 601641 - DNA, 15 bp, Homo sapiens
gtaggacagggccca

SEQ ID NO: 601642 - DNA, 15 bp, Homo sapiens
taggacagggcccat

SEQ ID NO: 601643 - DNA, 15 bp, Homo sapiens
aggacagggcccatc

SEQ ID NO: 601644 - DNA, 15 bp, Homo sapiens
ggacagggcccatca

SEQ ID NO: 601645 - DNA, 15 bp, Homo sapiens
gacagggcccatcac

SEQ ID NO: 601646 - DNA, 15 bp, Homo sapiens
acagggcccatcact

SEQ ID NO: 601647 - DNA, 15 bp, Homo sapiens
cagggcccatcactc

SEQ ID NO: 601648 - DNA, 15 bp, Homo sapiens
agggcccatcactca

SEQ ID NO: 601649 - DNA, 15 bp, Homo sapiens
gggcccatcactcag

SEQ ID NO: 601650 - DNA, 15 bp, Homo sapiens
ggcccatcactcagc

SEQ ID NO: 601651 - DNA, 15 bp, Homo sapiens
gcccatcactcagca

SEQ ID NO: 601652 - DNA, 15 bp, Homo sapiens
cccatcactcagcac

SEQ ID NO: 601653 - DNA, 15 bp, Homo sapiens
ccatcactcagcact

SEQ ID NO: 601654 - DNA, 15 bp, Homo sapiens
catcactcagcacta

SEQ ID NO: 601655 - DNA, 15 bp, Homo sapiens
atcactcagcactaa

SEQ ID NO: 601656 - DNA, 15 bp, Homo sapiens
tcactcagcactaag

SEQ ID NO: 601657 - DNA, 15 bp, Homo sapiens
cactcagcactaagc

SEQ ID NO: 601658 - DNA, 15 bp, Homo sapiens
actcagcactaagcc

SEQ ID NO: 601659 - DNA, 15 bp, Homo sapiens
ctcagcactaagcca

SEQ ID NO: 601660 - DNA, 15 bp, Homo sapiens
tcagcactaagccac

SEQ ID NO: 601661 - DNA, 15 bp, Homo sapiens
cagcactaagccacc

SEQ ID NO: 601662 - DNA, 15 bp, Homo sapiens
agcactaagccaccc

SEQ ID NO: 601663 - DNA, 15 bp, Homo sapiens
gcactaagccacccc

SEQ ID NO: 601664 - DNA, 15 bp, Homo sapiens
cactaagccaccccc

SEQ ID NO: 601665 - DNA, 15 bp, Homo sapiens
actaagccaccccca

SEQ ID NO: 601666 - DNA, 15 bp, Homo sapiens
ctaagccacccccag

SEQ ID NO: 601667 - DNA, 15 bp, Homo sapiens
taagccacccccagc

SEQ ID NO: 601668 - DNA, 15 bp, Homo sapiens
aagccacccccagct

SEQ ID NO: 601669 - DNA, 15 bp, Homo sapiens
agccacccccagctc

SEQ ID NO: 601670 - DNA, 15 bp, Homo sapiens
gccacccccagctct

SEQ ID NO: 601671 - DNA, 15 bp, Homo sapiens
ccacccccagctctg

SEQ ID NO: 601672 - DNA, 15 bp, Homo sapiens
cacccccagctctgc

SEQ ID NO: 601673 - DNA, 15 bp, Homo sapiens
acccccagctctgcc

SEQ ID NO: 601674 - DNA, 15 bp, Homo sapiens
cccccagctctgcct

SEQ ID NO: 601675 - DNA, 15 bp, Homo sapiens
ccccagctctgcctg

SEQ ID NO: 601676 - DNA, 15 bp, Homo sapiens
cccagctctgcctgc

SEQ ID NO: 601677 - DNA, 15 bp, Homo sapiens
ccagctctgcctgcc

SEQ ID NO: 601678 - DNA, 15 bp, Homo sapiens
cagctctgcctgccg

SEQ ID NO: 601679 - DNA, 15 bp, Homo sapiens
agctctgcctgccgc

SEQ ID NO: 601680 - DNA, 15 bp, Homo sapiens
gctctgcctgccgct

SEQ ID NO: 601681 - DNA, 15 bp, Homo sapiens
ctctgcctgccgctt

SEQ ID NO: 601682 - DNA, 15 bp, Homo sapiens
tctgcctgccgcttg

SEQ ID NO: 601683 - DNA, 15 bp, Homo sapiens
ctgcctgccgcttgc

SEQ ID NO: 601684 - DNA, 15 bp, Homo sapiens
tgcctgccgcttgca

SEQ ID NO: 601685 - DNA, 15 bp, Homo sapiens
gcctgccgcttgcag

SEQ ID NO: 601686 - DNA, 15 bp, Homo sapiens
cctgccgcttgcagc

SEQ ID NO: 601687 - DNA, 15 bp, Homo sapiens
ctgccgcttgcagct

SEQ ID NO: 601688 - DNA, 15 bp, Homo sapiens
tgccgcttgcagctc

SEQ ID NO: 601689 - DNA, 15 bp, Homo sapiens
gccgcttgcagctcc

SEQ ID NO: 601690 - DNA, 15 bp, Homo sapiens
ccgcttgcagctcca

SEQ ID NO: 601691 - DNA, 15 bp, Homo sapiens
cgcttgcagctccat

SEQ ID NO: 601692 - DNA, 15 bp, Homo sapiens
gcttgcagctccatc

SEQ ID NO: 601693 - DNA, 15 bp, Homo sapiens
cttgcagctccatcc

SEQ ID NO: 601694 - DNA, 15 bp, Homo sapiens
ttgcagctccatcca

SEQ ID NO: 601695 - DNA, 15 bp, Homo sapiens
tgcagctccatccat

SEQ ID NO: 601696 - DNA, 15 bp, Homo sapiens
gcagctccatccatc

SEQ ID NO: 601697 - DNA, 15 bp, Homo sapiens
cagctccatccatca

SEQ ID NO: 601698 - DNA, 15 bp, Homo sapiens
agctccatccatcac

SEQ ID NO: 601699 - DNA, 15 bp, Homo sapiens
gctccatccatcacc

SEQ ID NO: 601700 - DNA, 15 bp, Homo sapiens
ctccatccatcacct

SEQ ID NO: 601701 - DNA, 15 bp, Homo sapiens
tccatccatcacctt

SEQ ID NO: 601702 - DNA, 15 bp, Homo sapiens
ccatccatcaccttt

SEQ ID NO: 601703 - DNA, 15 bp, Homo sapiens
catccatcaccttta

SEQ ID NO: 601704 - DNA, 15 bp, Homo sapiens
atccatcacctttaa

SEQ ID NO: 601705 - DNA, 15 bp, Homo sapiens
tccatcacctttaat

SEQ ID NO: 601706 - DNA, 15 bp, Homo sapiens
ccatcacctttaatt

SEQ ID NO: 601707 - DNA, 15 bp, Homo sapiens
catcacctttaattt

SEQ ID NO: 601708 - DNA, 15 bp, Homo sapiens
atcacctttaatttt

SEQ ID NO: 601709 - DNA, 15 bp, Homo sapiens
tcacctttaatttta

SEQ ID NO: 601710 - DNA, 15 bp, Homo sapiens
cacctttaattttat

SEQ ID NO: 601711 - DNA, 15 bp, Homo sapiens
acctttaattttatt

SEQ ID NO: 601712 - DNA, 15 bp, Homo sapiens
cctttaattttattt

SEQ ID NO: 601713 - DNA, 15 bp, Homo sapiens
ctttaattttatttg

SEQ ID NO: 601714 - DNA, 15 bp, Homo sapiens
tttaattttatttga

SEQ ID NO: 601715 - DNA, 15 bp, Homo sapiens
ttaattttatttgag

SEQ ID NO: 601716 - DNA, 15 bp, Homo sapiens
taattttatttgagc

SEQ ID NO: 601717 - DNA, 15 bp, Homo sapiens
aattttatttgagca

SEQ ID NO: 601718 - DNA, 15 bp, Homo sapiens
attttatttgagcag

SEQ ID NO: 601719 - DNA, 15 bp, Homo sapiens
ttttatttgagcagg

SEQ ID NO: 601720 - DNA, 15 bp, Homo sapiens
tttatttgagcagga

SEQ ID NO: 601721 - DNA, 15 bp, Homo sapiens
ttatttgagcaggaa

SEQ ID NO: 601722 - DNA, 15 bp, Homo sapiens
tatttgagcaggaaa

SEQ ID NO: 601723 - DNA, 15 bp, Homo sapiens
atttgagcaggaaat

SEQ ID NO: 601724 - DNA, 15 bp, Homo sapiens
tttgagcaggaaata

SEQ ID NO: 601725 - DNA, 15 bp, Homo sapiens
ttgagcaggaaatag

SEQ ID NO: 601726 - DNA, 15 bp, Homo sapiens
tgagcaggaaatagg

SEQ ID NO: 601727 - DNA, 15 bp, Homo sapiens
gagcaggaaataggt

SEQ ID NO: 601728 - DNA, 15 bp, Homo sapiens
agcaggaaataggtc

SEQ ID NO: 601729 - DNA, 15 bp, Homo sapiens
gcaggaaataggtcc

SEQ ID NO: 601730 - DNA, 15 bp, Homo sapiens
caggaaataggtcct

SEQ ID NO: 601731 - DNA, 15 bp, Homo sapiens
aggaaataggtcctg

SEQ ID NO: 601732 - DNA, 15 bp, Homo sapiens
ggaaataggtcctgg

SEQ ID NO: 601733 - DNA, 15 bp, Homo sapiens
gaaataggtcctggt

SEQ ID NO: 601734 - DNA, 15 bp, Homo sapiens
aaataggtcctggtg

SEQ ID NO: 601735 - DNA, 15 bp, Homo sapiens
aataggtcctggtgg

SEQ ID NO: 601736 - DNA, 15 bp, Homo sapiens
ataggtcctggtggt

SEQ ID NO: 601737 - DNA, 15 bp, Homo sapiens
taggtcctggtggtg

SEQ ID NO: 601738 - DNA, 15 bp, Homo sapiens
aggtcctggtggtgc

SEQ ID NO: 601739 - DNA, 15 bp, Homo sapiens
ggtcctggtggtgcc

SEQ ID NO: 601740 - DNA, 15 bp, Homo sapiens
gtcctggtggtgccc

SEQ ID NO: 601741 - DNA, 15 bp, Homo sapiens
tcctggtggtgcccg

SEQ ID NO: 601742 - DNA, 15 bp, Homo sapiens
cctggtggtgcccgt

SEQ ID NO: 601743 - DNA, 15 bp, Homo sapiens
ctggtggtgcccgtt

SEQ ID NO: 601744 - DNA, 15 bp, Homo sapiens
tggtggtgcccgttt

SEQ ID NO: 601745 - DNA, 15 bp, Homo sapiens
ggtggtgcccgttta

SEQ ID NO: 601746 - DNA, 15 bp, Homo sapiens
gtggtgcccgtttat

SEQ ID NO: 601747 - DNA, 15 bp, Homo sapiens
tggtgcccgtttatg

SEQ ID NO: 601748 - DNA, 15 bp, Homo sapiens
ggtgcccgtttatga

SEQ ID NO: 601749 - DNA, 15 bp, Homo sapiens
gtgcccgtttatgag

SEQ ID NO: 601750 - DNA, 15 bp, Homo sapiens
tgcccgtttatgagc

SEQ ID NO: 601751 - DNA, 15 bp, Homo sapiens
gcccgtttatgagca

SEQ ID NO: 601752 - DNA, 15 bp, Homo sapiens
cccgtttatgagcaa

SEQ ID NO: 601753 - DNA, 15 bp, Homo sapiens
ccgtttatgagcaaa

SEQ ID NO: 601754 - DNA, 15 bp, Homo sapiens
cgtttatgagcaaac

SEQ ID NO: 601755 - DNA, 15 bp, Homo sapiens
gtttatgagcaaaca

SEQ ID NO: 601756 - DNA, 15 bp, Homo sapiens
tttatgagcaaacat

SEQ ID NO: 601757 - DNA, 15 bp, Homo sapiens
ttatgagcaaacatg

SEQ ID NO: 601758 - DNA, 15 bp, Homo sapiens
tatgagcaaacatgg

SEQ ID NO: 601759 - DNA, 15 bp, Homo sapiens
atgagcaaacatggt

SEQ ID NO: 601760 - DNA, 15 bp, Homo sapiens
tgagcaaacatggtt

SEQ ID NO: 601761 - DNA, 15 bp, Homo sapiens
gagcaaacatggttt

SEQ ID NO: 601762 - DNA, 15 bp, Homo sapiens
agcaaacatggtttt

SEQ ID NO: 601763 - DNA, 15 bp, Homo sapiens
gcaaacatggtttta

SEQ ID NO: 601764 - DNA, 15 bp, Homo sapiens
caaacatggttttat

SEQ ID NO: 601765 - DNA, 15 bp, Homo sapiens
aaacatggttttatt

SEQ ID NO: 601766 - DNA, 15 bp, Homo sapiens
aacatggttttattg

SEQ ID NO: 601767 - DNA, 15 bp, Homo sapiens
acatggttttattgc

SEQ ID NO: 601768 - DNA, 15 bp, Homo sapiens
catggttttattgct

SEQ ID NO: 601769 - DNA, 15 bp, Homo sapiens
atggttttattgctt

SEQ ID NO: 601770 - DNA, 15 bp, Homo sapiens
tggttttattgcttt

SEQ ID NO: 601771 - DNA, 15 bp, Homo sapiens
ggttttattgctttc

SEQ ID NO: 601772 - DNA, 15 bp, Homo sapiens
gttttattgctttct

SEQ ID NO: 601773 - DNA, 15 bp, Homo sapiens
ttttattgctttctc

SEQ ID NO: 601774 - DNA, 15 bp, Homo sapiens
tttattgctttctcc

SEQ ID NO: 601775 - DNA, 15 bp, Homo sapiens
ttattgctttctcca

SEQ ID NO: 601776 - DNA, 15 bp, Homo sapiens
tattgctttctccat

SEQ ID NO: 601777 - DNA, 15 bp, Homo sapiens
attgctttctccatg

SEQ ID NO: 601778 - DNA, 15 bp, Homo sapiens
ttgctttctccatga

SEQ ID NO: 601779 - DNA, 15 bp, Homo sapiens
tgctttctccatgaa

SEQ ID NO: 601780 - DNA, 15 bp, Homo sapiens
gctttctccatgaag

SEQ ID NO: 601781 - DNA, 15 bp, Homo sapiens
ctttctccatgaaga

SEQ ID NO: 601782 - DNA, 15 bp, Homo sapiens
tttctccatgaagat

SEQ ID NO: 601783 - DNA, 15 bp, Homo sapiens
ttctccatgaagata

SEQ ID NO: 601784 - DNA, 15 bp, Homo sapiens
tctccatgaagataa

SEQ ID NO: 601785 - DNA, 15 bp, Homo sapiens
ctccatgaagataac

SEQ ID NO: 601786 - DNA, 15 bp, Homo sapiens
tccatgaagataacg

SEQ ID NO: 601787 - DNA, 15 bp, Homo sapiens
ccatgaagataacgg

SEQ ID NO: 601788 - DNA, 15 bp, Homo sapiens
catgaagataacggc

SEQ ID NO: 601789 - DNA, 15 bp, Homo sapiens
atgaagataacggcc

SEQ ID NO: 601790 - DNA, 15 bp, Homo sapiens
tgaagataacggcca

SEQ ID NO: 601791 - DNA, 15 bp, Homo sapiens
gaagataacggccac

SEQ ID NO: 601792 - DNA, 15 bp, Homo sapiens
aagataacggccact

SEQ ID NO: 601793 - DNA, 15 bp, Homo sapiens
agataacggccactg

SEQ ID NO: 601794 - DNA, 15 bp, Homo sapiens
gataacggccactgc

SEQ ID NO: 601795 - DNA, 15 bp, Homo sapiens
ataacggccactgca

SEQ ID NO: 601796 - DNA, 15 bp, Homo sapiens
taacggccactgcac

SEQ ID NO: 601797 - DNA, 15 bp, Homo sapiens
aacggccactgcaca

SEQ ID NO: 601798 - DNA, 15 bp, Homo sapiens
acggccactgcacag

SEQ ID NO: 601799 - DNA, 15 bp, Homo sapiens
cggccactgcacagg

SEQ ID NO: 601800 - DNA, 15 bp, Homo sapiens
ggccactgcacaggc

SEQ ID NO: 601801 - DNA, 15 bp, Homo sapiens
gccactgcacaggcc

SEQ ID NO: 601802 - DNA, 15 bp, Homo sapiens
ccactgcacaggccc

SEQ ID NO: 601803 - DNA, 15 bp, Homo sapiens
cactgcacaggcccc

SEQ ID NO: 601804 - DNA, 15 bp, Homo sapiens
actgcacaggccccc

SEQ ID NO: 601805 - DNA, 15 bp, Homo sapiens
ctgcacaggccccct

SEQ ID NO: 601806 - DNA, 15 bp, Homo sapiens
tgcacaggccccctg

SEQ ID NO: 601807 - DNA, 15 bp, Homo sapiens
gcacaggccccctgc

SEQ ID NO: 601808 - DNA, 15 bp, Homo sapiens
cacaggccccctgcc

SEQ ID NO: 601809 - DNA, 15 bp, Homo sapiens
acaggccccctgcca

SEQ ID NO: 601810 - DNA, 15 bp, Homo sapiens
caggccccctgccag

SEQ ID NO: 601811 - DNA, 15 bp, Homo sapiens
aggccccctgccagc

SEQ ID NO: 601812 - DNA, 15 bp, Homo sapiens
ggccccctgccagcc

SEQ ID NO: 601813 - DNA, 15 bp, Homo sapiens
gccccctgccagcct

SEQ ID NO: 601814 - DNA, 15 bp, Homo sapiens
ccccctgccagcctt

SEQ ID NO: 601815 - DNA, 15 bp, Homo sapiens
cccctgccagccttt

SEQ ID NO: 601816 - DNA, 15 bp, Homo sapiens
ccctgccagcctttc

SEQ ID NO: 601817 - DNA, 15 bp, Homo sapiens
cctgccagcctttcc

SEQ ID NO: 601818 - DNA, 15 bp, Homo sapiens
ctgccagcctttccc

SEQ ID NO: 601819 - DNA, 15 bp, Homo sapiens
tgccagcctttcccc

SEQ ID NO: 601820 - DNA, 15 bp, Homo sapiens
gccagcctttcccca

SEQ ID NO: 601821 - DNA, 15 bp, Homo sapiens
ccagcctttccccaa

SEQ ID NO: 601822 - DNA, 15 bp, Homo sapiens
cagcctttccccaac

SEQ ID NO: 601823 - DNA, 15 bp, Homo sapiens
agcctttccccaacc

SEQ ID NO: 601824 - DNA, 15 bp, Homo sapiens
gcctttccccaaccc

SEQ ID NO: 601825 - DNA, 15 bp, Homo sapiens
cctttccccaacccc

SEQ ID NO: 601826 - DNA, 15 bp, Homo sapiens
ctttccccaaccccg

SEQ ID NO: 601827 - DNA, 15 bp, Homo sapiens
tttccccaaccccgt

SEQ ID NO: 601828 - DNA, 15 bp, Homo sapiens
ttccccaaccccgtc

SEQ ID NO: 601829 - DNA, 15 bp, Homo sapiens
tccccaaccccgtcc

SEQ ID NO: 601830 - DNA, 15 bp, Homo sapiens
ccccaaccccgtccc

SEQ ID NO: 601831 - DNA, 15 bp, Homo sapiens
cccaaccccgtcccc

SEQ ID NO: 601832 - DNA, 15 bp, Homo sapiens
ccaaccccgtccccc

SEQ ID NO: 601833 - DNA, 15 bp, Homo sapiens
caaccccgtccccct

SEQ ID NO: 601834 - DNA, 15 bp, Homo sapiens
aaccccgtccccctg

SEQ ID NO: 601835 - DNA, 15 bp, Homo sapiens
accccgtccccctgc

SEQ ID NO: 601836 - DNA, 15 bp, Homo sapiens
ccccgtccccctgcc

SEQ ID NO: 601837 - DNA, 15 bp, Homo sapiens
cccgtccccctgcca

SEQ ID NO: 601838 - DNA, 15 bp, Homo sapiens
ccgtccccctgccac

SEQ ID NO: 601839 - DNA, 15 bp, Homo sapiens
cgtccccctgccact

SEQ ID NO: 601840 - DNA, 15 bp, Homo sapiens
gtccccctgccactc

SEQ ID NO: 601841 - DNA, 15 bp, Homo sapiens
tccccctgccactca

SEQ ID NO: 601842 - DNA, 15 bp, Homo sapiens
ccccctgccactcac

SEQ ID NO: 601843 - DNA, 15 bp, Homo sapiens
cccctgccactcacc

SEQ ID NO: 601844 - DNA, 15 bp, Homo sapiens
ccctgccactcacca

SEQ ID NO: 601845 - DNA, 15 bp, Homo sapiens
cctgccactcaccag

SEQ ID NO: 601846 - DNA, 15 bp, Homo sapiens
ctgccactcaccagg

SEQ ID NO: 601847 - DNA, 15 bp, Homo sapiens
tgccactcaccaggc

SEQ ID NO: 601848 - DNA, 15 bp, Homo sapiens
gccactcaccaggct

SEQ ID NO: 601849 - DNA, 15 bp, Homo sapiens
ccactcaccaggcta

SEQ ID NO: 601850 - DNA, 15 bp, Homo sapiens
cactcaccaggctaa

SEQ ID NO: 601851 - DNA, 15 bp, Homo sapiens
actcaccaggctaat

SEQ ID NO: 601852 - DNA, 15 bp, Homo sapiens
ctcaccaggctaatt

SEQ ID NO: 601853 - DNA, 15 bp, Homo sapiens
tcaccaggctaattt

SEQ ID NO: 601854 - DNA, 15 bp, Homo sapiens
caccaggctaattta

SEQ ID NO: 601855 - DNA, 15 bp, Homo sapiens
accaggctaatttac

SEQ ID NO: 601856 - DNA, 15 bp, Homo sapiens
ccaggctaatttact

SEQ ID NO: 601857 - DNA, 15 bp, Homo sapiens
caggctaatttactc

SEQ ID NO: 601858 - DNA, 15 bp, Homo sapiens
aggctaatttactcc

SEQ ID NO: 601859 - DNA, 15 bp, Homo sapiens
ggctaatttactccc

SEQ ID NO: 601860 - DNA, 15 bp, Homo sapiens
gctaatttactccct

SEQ ID NO: 601861 - DNA, 15 bp, Homo sapiens
ctaatttactccctt

SEQ ID NO: 601862 - DNA, 15 bp, Homo sapiens
taatttactcccttt

SEQ ID NO: 601863 - DNA, 15 bp, Homo sapiens
aatttactccctttt

SEQ ID NO: 601864 - DNA, 15 bp, Homo sapiens
atttactcccttttt

SEQ ID NO: 601865 - DNA, 15 bp, Homo sapiens
tttactccctttttt

SEQ ID NO: 601866 - DNA, 15 bp, Homo sapiens
ttactcccttttttg

SEQ ID NO: 601867 - DNA, 15 bp, Homo sapiens
tactcccttttttga

SEQ ID NO: 601868 - DNA, 15 bp, Homo sapiens
actcccttttttgac

SEQ ID NO: 601869 - DNA, 15 bp, Homo sapiens
ctcccttttttgaca

SEQ ID NO: 601870 - DNA, 15 bp, Homo sapiens
tcccttttttgacac

SEQ ID NO: 601871 - DNA, 15 bp, Homo sapiens
cccttttttgacact

SEQ ID NO: 601872 - DNA, 15 bp, Homo sapiens
ccttttttgacactt

SEQ ID NO: 601873 - DNA, 15 bp, Homo sapiens
cttttttgacacttg

SEQ ID NO: 601874 - DNA, 15 bp, Homo sapiens
ttttttgacacttgg

SEQ ID NO: 601875 - DNA, 15 bp, Homo sapiens
tttttgacacttgga

SEQ ID NO: 601876 - DNA, 15 bp, Homo sapiens
ttttgacacttggaa

SEQ ID NO: 601877 - DNA, 15 bp, Homo sapiens
tttgacacttggaat

SEQ ID NO: 601878 - DNA, 15 bp, Homo sapiens
ttgacacttggaatc

SEQ ID NO: 601879 - DNA, 15 bp, Homo sapiens
tgacacttggaatca

SEQ ID NO: 601880 - DNA, 15 bp, Homo sapiens
gacacttggaatcac

SEQ ID NO: 601881 - DNA, 15 bp, Homo sapiens
acacttggaatcacc

SEQ ID NO: 601882 - DNA, 15 bp, Homo sapiens
cacttggaatcaccg

SEQ ID NO: 601883 - DNA, 15 bp, Homo sapiens
acttggaatcaccga

SEQ ID NO: 601884 - DNA, 15 bp, Homo sapiens
cttggaatcaccgac

SEQ ID NO: 601885 - DNA, 15 bp, Homo sapiens
ttggaatcaccgact

SEQ ID NO: 601886 - DNA, 15 bp, Homo sapiens
tggaatcaccgactc

SEQ ID NO: 601887 - DNA, 15 bp, Homo sapiens
ggaatcaccgactct

SEQ ID NO: 601888 - DNA, 15 bp, Homo sapiens
gaatcaccgactctg

SEQ ID NO: 601889 - DNA, 15 bp, Homo sapiens
aatcaccgactctgc

SEQ ID NO: 601890 - DNA, 15 bp, Homo sapiens
atcaccgactctgct

SEQ ID NO: 601891 - DNA, 15 bp, Homo sapiens
tcaccgactctgctg

SEQ ID NO: 601892 - DNA, 15 bp, Homo sapiens
caccgactctgctgc

SEQ ID NO: 601893 - DNA, 15 bp, Homo sapiens
accgactctgctgcc

SEQ ID NO: 601894 - DNA, 15 bp, Homo sapiens
ctactttctagttga

SEQ ID NO: 601895 - DNA, 15 bp, Homo sapiens
tactttctagttgat

SEQ ID NO: 601896 - DNA, 15 bp, Homo sapiens
actttctagttgatg

SEQ ID NO: 601897 - DNA, 15 bp, Homo sapiens
ctttctagttgatga

SEQ ID NO: 601898 - DNA, 15 bp, Homo sapiens
tttctagttgatgat

SEQ ID NO: 601899 - DNA, 15 bp, Homo sapiens
ttctagttgatgatc

SEQ ID NO: 601900 - DNA, 15 bp, Homo sapiens
tctagttgatgatct

SEQ ID NO: 601901 - DNA, 15 bp, Homo sapiens
ctagttgatgatctt

SEQ ID NO: 601902 - DNA, 15 bp, Homo sapiens
tagttgatgatctta

SEQ ID NO: 601903 - DNA, 15 bp, Homo sapiens
agttgatgatcttag

SEQ ID NO: 601904 - DNA, 15 bp, Homo sapiens
gttgatgatcttagg

SEQ ID NO: 601905 - DNA, 15 bp, Homo sapiens
ttgatgatcttaggc

SEQ ID NO: 601906 - DNA, 15 bp, Homo sapiens
tgatgatcttaggca

SEQ ID NO: 601907 - DNA, 15 bp, Homo sapiens
gatgatcttaggcaa

SEQ ID NO: 601908 - DNA, 15 bp, Homo sapiens
atgatcttaggcaag

SEQ ID NO: 601909 - DNA, 15 bp, Homo sapiens
tgatcttaggcaagt

SEQ ID NO: 601910 - DNA, 15 bp, Homo sapiens
gatcttaggcaagtt

SEQ ID NO: 601911 - DNA, 15 bp, Homo sapiens
atcttaggcaagttg

SEQ ID NO: 601912 - DNA, 15 bp, Homo sapiens
tcttaggcaagttgt

SEQ ID NO: 601913 - DNA, 15 bp, Homo sapiens
cttaggcaagttgtt

SEQ ID NO: 601914 - DNA, 15 bp, Homo sapiens
ttaggcaagttgttt

SEQ ID NO: 601915 - DNA, 15 bp, Homo sapiens
taggcaagttgtttg

SEQ ID NO: 601916 - DNA, 15 bp, Homo sapiens
aggcaagttgtttgg

SEQ ID NO: 601917 - DNA, 15 bp, Homo sapiens
ggcaagttgtttggc

SEQ ID NO: 601918 - DNA, 15 bp, Homo sapiens
gcaagttgtttggct

SEQ ID NO: 601919 - DNA, 15 bp, Homo sapiens
caagttgtttggctt

SEQ ID NO: 601920 - DNA, 15 bp, Homo sapiens
aagttgtttggcttc

SEQ ID NO: 601921 - DNA, 15 bp, Homo sapiens
agttgtttggcttct

SEQ ID NO: 601922 - DNA, 15 bp, Homo sapiens
gttgtttggcttctc

SEQ ID NO: 601923 - DNA, 15 bp, Homo sapiens
ttgtttggcttctca

SEQ ID NO: 601924 - DNA, 15 bp, Homo sapiens
tgtttggcttctcag

SEQ ID NO: 601925 - DNA, 15 bp, Homo sapiens
gtttggcttctcaga

SEQ ID NO: 601926 - DNA, 15 bp, Homo sapiens
tttggcttctcagag

SEQ ID NO: 601927 - DNA, 15 bp, Homo sapiens
ttggcttctcagagg

SEQ ID NO: 601928 - DNA, 15 bp, Homo sapiens
tggcttctcagaggc

SEQ ID NO: 601929 - DNA, 15 bp, Homo sapiens
ggcttctcagaggct

SEQ ID NO: 601930 - DNA, 15 bp, Homo sapiens
gcttctcagaggctc

SEQ ID NO: 601931 - DNA, 15 bp, Homo sapiens
cttctcagaggctca

SEQ ID NO: 601932 - DNA, 15 bp, Homo sapiens
ttctcagaggctcag

SEQ ID NO: 601933 - DNA, 15 bp, Homo sapiens
tctcagaggctcagt

SEQ ID NO: 601934 - DNA, 15 bp, Homo sapiens
ctcagaggctcagtt

SEQ ID NO: 601935 - DNA, 15 bp, Homo sapiens
tcagaggctcagttt

SEQ ID NO: 601936 - DNA, 15 bp, Homo sapiens
cagaggctcagtttc

SEQ ID NO: 601937 - DNA, 15 bp, Homo sapiens
agaggctcagtttct

SEQ ID NO: 601938 - DNA, 15 bp, Homo sapiens
gaggctcagtttctt

SEQ ID NO: 601939 - DNA, 15 bp, Homo sapiens
aggctcagtttcttc

SEQ ID NO: 601940 - DNA, 15 bp, Homo sapiens
ggctcagtttcttca

SEQ ID NO: 601941 - DNA, 15 bp, Homo sapiens
gctcagtttcttcat

SEQ ID NO: 601942 - DNA, 15 bp, Homo sapiens
ctcagtttcttcata

SEQ ID NO: 601943 - DNA, 15 bp, Homo sapiens
tcagtttcttcatat

SEQ ID NO: 601944 - DNA, 15 bp, Homo sapiens
cagtttcttcatatg

SEQ ID NO: 601945 - DNA, 15 bp, Homo sapiens
agtttcttcatatgt

SEQ ID NO: 601946 - DNA, 15 bp, Homo sapiens
gtttcttcatatgta

SEQ ID NO: 601947 - DNA, 15 bp, Homo sapiens
tttcttcatatgtac

SEQ ID NO: 601948 - DNA, 15 bp, Homo sapiens
ttcttcatatgtaca

SEQ ID NO: 601949 - DNA, 15 bp, Homo sapiens
tcttcatatgtacaa

SEQ ID NO: 601950 - DNA, 15 bp, Homo sapiens
cttcatatgtacaat

SEQ ID NO: 601951 - DNA, 15 bp, Homo sapiens
ttcatatgtacaatg

SEQ ID NO: 601952 - DNA, 15 bp, Homo sapiens
tcatatgtacaatgg

SEQ ID NO: 601953 - DNA, 15 bp, Homo sapiens
catatgtacaatggg

SEQ ID NO: 601954 - DNA, 15 bp, Homo sapiens
atatgtacaatggga

SEQ ID NO: 601955 - DNA, 15 bp, Homo sapiens
tatgtacaatgggac

SEQ ID NO: 601956 - DNA, 15 bp, Homo sapiens
atgtacaatgggact

SEQ ID NO: 601957 - DNA, 15 bp, Homo sapiens
tgtacaatgggacta

SEQ ID NO: 601958 - DNA, 15 bp, Homo sapiens
gtacaatgggactaa

SEQ ID NO: 601959 - DNA, 15 bp, Homo sapiens
tacaatgggactaac

SEQ ID NO: 601960 - DNA, 15 bp, Homo sapiens
acaatgggactaact

SEQ ID NO: 601961 - DNA, 15 bp, Homo sapiens
caatgggactaactg

SEQ ID NO: 601962 - DNA, 15 bp, Homo sapiens
aatgggactaactgt

SEQ ID NO: 601963 - DNA, 15 bp, Homo sapiens
atgggactaactgtt

SEQ ID NO: 601964 - DNA, 15 bp, Homo sapiens
tgggactaactgttc

SEQ ID NO: 601965 - DNA, 15 bp, Homo sapiens
gggactaactgttcc

SEQ ID NO: 601966 - DNA, 15 bp, Homo sapiens
ggactaactgttcct

SEQ ID NO: 601967 - DNA, 15 bp, Homo sapiens
gactaactgttccta

SEQ ID NO: 601968 - DNA, 15 bp, Homo sapiens
actaactgttcctac

SEQ ID NO: 601969 - DNA, 15 bp, Homo sapiens
ctaactgttcctacc

SEQ ID NO: 601970 - DNA, 15 bp, Homo sapiens
taactgttcctacct

SEQ ID NO: 601971 - DNA, 15 bp, Homo sapiens
aactgttcctacctt

SEQ ID NO: 601972 - DNA, 15 bp, Homo sapiens
actgttcctaccttg

SEQ ID NO: 601973 - DNA, 15 bp, Homo sapiens
ctgttcctaccttga

SEQ ID NO: 601974 - DNA, 15 bp, Homo sapiens
tgttcctaccttgaa

SEQ ID NO: 601975 - DNA, 15 bp, Homo sapiens
gttcctaccttgaaa

SEQ ID NO: 601976 - DNA, 15 bp, Homo sapiens
ttcctaccttgaaag

SEQ ID NO: 601977 - DNA, 15 bp, Homo sapiens
tcctaccttgaaagg

SEQ ID NO: 601978 - DNA, 15 bp, Homo sapiens
cctaccttgaaaggt

SEQ ID NO: 601979 - DNA, 15 bp, Homo sapiens
ctaccttgaaaggtg

SEQ ID NO: 601980 - DNA, 15 bp, Homo sapiens
taccttgaaaggtgg

SEQ ID NO: 601981 - DNA, 15 bp, Homo sapiens
accttgaaaggtggt

SEQ ID NO: 601982 - DNA, 15 bp, Homo sapiens
ccttgaaaggtggtt

SEQ ID NO: 601983 - DNA, 15 bp, Homo sapiens
cttgaaaggtggttc

SEQ ID NO: 601984 - DNA, 15 bp, Homo sapiens
ttgaaaggtggttct

SEQ ID NO: 601985 - DNA, 15 bp, Homo sapiens
tgaaaggtggttcta

SEQ ID NO: 601986 - DNA, 15 bp, Homo sapiens
gaaaggtggttctaa

SEQ ID NO: 601987 - DNA, 15 bp, Homo sapiens
aaaggtggttctaat

SEQ ID NO: 601988 - DNA, 15 bp, Homo sapiens
aaggtggttctaatg

SEQ ID NO: 601989 - DNA, 15 bp, Homo sapiens
aggtggttctaatgt

SEQ ID NO: 601990 - DNA, 15 bp, Homo sapiens
ggtggttctaatgtc

SEQ ID NO: 601991 - DNA, 15 bp, Homo sapiens
gtggttctaatgtcc

SEQ ID NO: 601992 - DNA, 15 bp, Homo sapiens
tggttctaatgtcca

SEQ ID NO: 601993 - DNA, 15 bp, Homo sapiens
ggttctaatgtccaa

SEQ ID NO: 601994 - DNA, 15 bp, Homo sapiens
gttctaatgtccaaa

SEQ ID NO: 601995 - DNA, 15 bp, Homo sapiens
ttctaatgtccaaag

SEQ ID NO: 601996 - DNA, 15 bp, Homo sapiens
tctaatgtccaaagg

SEQ ID NO: 601997 - DNA, 15 bp, Homo sapiens
ctaatgtccaaaggt

SEQ ID NO: 601998 - DNA, 15 bp, Homo sapiens
taatgtccaaaggtg

SEQ ID NO: 601999 - DNA, 15 bp, Homo sapiens
aatgtccaaaggtgt

SEQ ID NO: 602000 - DNA, 15 bp, Homo sapiens
atgtccaaaggtgtc

SEQ ID NO: 602001 - DNA, 15 bp, Homo sapiens
tgtccaaaggtgtca

SEQ ID NO: 602002 - DNA, 15 bp, Homo sapiens
gtccaaaggtgtcag

SEQ ID NO: 602003 - DNA, 15 bp, Homo sapiens
tccaaaggtgtcagg

SEQ ID NO: 602004 - DNA, 15 bp, Homo sapiens
ccaaaggtgtcaggt

SEQ ID NO: 602005 - DNA, 15 bp, Homo sapiens
caaaggtgtcaggtg

SEQ ID NO: 602006 - DNA, 15 bp, Homo sapiens
aaaggtgtcaggtgt

SEQ ID NO: 602007 - DNA, 15 bp, Homo sapiens
aaggtgtcaggtgta

SEQ ID NO: 602008 - DNA, 15 bp, Homo sapiens
aggtgtcaggtgtac

SEQ ID NO: 602009 - DNA, 15 bp, Homo sapiens
ggtgtcaggtgtaca

SEQ ID NO: 602010 - DNA, 15 bp, Homo sapiens
gtgtcaggtgtacag

SEQ ID NO: 602011 - DNA, 15 bp, Homo sapiens
tgtcaggtgtacagt

SEQ ID NO: 602012 - DNA, 15 bp, Homo sapiens
gtcaggtgtacagta

SEQ ID NO: 602013 - DNA, 15 bp, Homo sapiens
tcaggtgtacagtag

SEQ ID NO: 602014 - DNA, 15 bp, Homo sapiens
caggtgtacagtagg

SEQ ID NO: 602015 - DNA, 15 bp, Homo sapiens
aggtgtacagtaggt

SEQ ID NO: 602016 - DNA, 15 bp, Homo sapiens
ggtgtacagtaggtg

SEQ ID NO: 602017 - DNA, 15 bp, Homo sapiens
gtgtacagtaggtgt

SEQ ID NO: 602018 - DNA, 15 bp, Homo sapiens
tgtacagtaggtgtt

SEQ ID NO: 602019 - DNA, 15 bp, Homo sapiens
gtacagtaggtgttc

SEQ ID NO: 602020 - DNA, 15 bp, Homo sapiens
tacagtaggtgttca

SEQ ID NO: 602021 - DNA, 15 bp, Homo sapiens
acagtaggtgttcaa

SEQ ID NO: 602022 - DNA, 15 bp, Homo sapiens
cagtaggtgttcaaa

SEQ ID NO: 602023 - DNA, 15 bp, Homo sapiens
agtaggtgttcaaaa

SEQ ID NO: 602024 - DNA, 15 bp, Homo sapiens
gtaggtgttcaaaaa

SEQ ID NO: 602025 - DNA, 15 bp, Homo sapiens
taggtgttcaaaaac

SEQ ID NO: 602026 - DNA, 15 bp, Homo sapiens
aggtgttcaaaaact

SEQ ID NO: 602027 - DNA, 15 bp, Homo sapiens
ggtgttcaaaaactg

SEQ ID NO: 602028 - DNA, 15 bp, Homo sapiens
gtgttcaaaaactga

SEQ ID NO: 602029 - DNA, 15 bp, Homo sapiens
tgttcaaaaactgat

SEQ ID NO: 602030 - DNA, 15 bp, Homo sapiens
gttcaaaaactgatt

SEQ ID NO: 602031 - DNA, 15 bp, Homo sapiens
ttcaaaaactgattc

SEQ ID NO: 602032 - DNA, 15 bp, Homo sapiens
tcaaaaactgattct

SEQ ID NO: 602033 - DNA, 15 bp, Homo sapiens
caaaaactgattctg

SEQ ID NO: 602034 - DNA, 15 bp, Homo sapiens
aaaaactgattctgt

SEQ ID NO: 602035 - DNA, 15 bp, Homo sapiens
aaaactgattctgtg

SEQ ID NO: 602036 - DNA, 15 bp, Homo sapiens
aaactgattctgtga

SEQ ID NO: 602037 - DNA, 15 bp, Homo sapiens
aactgattctgtgaa

SEQ ID NO: 602038 - DNA, 15 bp, Homo sapiens
actgattctgtgaag

SEQ ID NO: 602039 - DNA, 15 bp, Homo sapiens
ctgattctgtgaagg

SEQ ID NO: 602040 - DNA, 15 bp, Homo sapiens
tgattctgtgaaggc

SEQ ID NO: 602041 - DNA, 15 bp, Homo sapiens
gattctgtgaaggca

SEQ ID NO: 602042 - DNA, 15 bp, Homo sapiens
attctgtgaaggcac

SEQ ID NO: 602043 - DNA, 15 bp, Homo sapiens
ttctgtgaaggcaca

SEQ ID NO: 602044 - DNA, 15 bp, Homo sapiens
tctgtgaaggcacag

SEQ ID NO: 602045 - DNA, 15 bp, Homo sapiens
ctgtgaaggcacagc

SEQ ID NO: 602046 - DNA, 15 bp, Homo sapiens
tgtgaaggcacagcc

SEQ ID NO: 602047 - DNA, 15 bp, Homo sapiens
gtgaaggcacagcct

SEQ ID NO: 602048 - DNA, 15 bp, Homo sapiens
tgaaggcacagccta

SEQ ID NO: 602049 - DNA, 15 bp, Homo sapiens
gaaggcacagcctat

SEQ ID NO: 602050 - DNA, 15 bp, Homo sapiens
aaggcacagcctatg

SEQ ID NO: 602051 - DNA, 15 bp, Homo sapiens
aggcacagcctatgg

SEQ ID NO: 602052 - DNA, 15 bp, Homo sapiens
ggcacagcctatgga

SEQ ID NO: 602053 - DNA, 15 bp, Homo sapiens
gcacagcctatggaa

SEQ ID NO: 602054 - DNA, 15 bp, Homo sapiens
cacagcctatggaaa

SEQ ID NO: 602055 - DNA, 15 bp, Homo sapiens
acagcctatggaaag

SEQ ID NO: 602056 - DNA, 15 bp, Homo sapiens
cagcctatggaaaga

SEQ ID NO: 602057 - DNA, 15 bp, Homo sapiens
agcctatggaaagag

SEQ ID NO: 602058 - DNA, 15 bp, Homo sapiens
gcctatggaaagagc

SEQ ID NO: 602059 - DNA, 15 bp, Homo sapiens
cctatggaaagagca

SEQ ID NO: 602060 - DNA, 15 bp, Homo sapiens
ctatggaaagagcaa

SEQ ID NO: 602061 - DNA, 15 bp, Homo sapiens
tatggaaagagcaag

SEQ ID NO: 602062 - DNA, 15 bp, Homo sapiens
atggaaagagcaagt

SEQ ID NO: 602063 - DNA, 15 bp, Homo sapiens
tggaaagagcaagta

SEQ ID NO: 602064 - DNA, 15 bp, Homo sapiens
ggaaagagcaagtaa

SEQ ID NO: 602065 - DNA, 15 bp, Homo sapiens
gaaagagcaagtaag

SEQ ID NO: 602066 - DNA, 15 bp, Homo sapiens
aaagagcaagtaagg

SEQ ID NO: 602067 - DNA, 15 bp, Homo sapiens
aagagcaagtaagga

SEQ ID NO: 602068 - DNA, 15 bp, Homo sapiens
agagcaagtaaggag

SEQ ID NO: 602069 - DNA, 15 bp, Homo sapiens
gagcaagtaaggagc

SEQ ID NO: 602070 - DNA, 15 bp, Homo sapiens
agcaagtaaggagca

SEQ ID NO: 602071 - DNA, 15 bp, Homo sapiens
gcaagtaaggagcat

SEQ ID NO: 602072 - DNA, 15 bp, Homo sapiens
caagtaaggagcatg

SEQ ID NO: 602073 - DNA, 15 bp, Homo sapiens
aagtaaggagcatgt

SEQ ID NO: 602074 - DNA, 15 bp, Homo sapiens
agtaaggagcatgtt

SEQ ID NO: 602075 - DNA, 15 bp, Homo sapiens
gtaaggagcatgttg

SEQ ID NO: 602076 - DNA, 15 bp, Homo sapiens
taaggagcatgttgt

SEQ ID NO: 602077 - DNA, 15 bp, Homo sapiens
aaggagcatgttgtg

SEQ ID NO: 602078 - DNA, 15 bp, Homo sapiens
aggagcatgttgtga

SEQ ID NO: 602079 - DNA, 15 bp, Homo sapiens
ggagcatgttgtgaa

SEQ ID NO: 602080 - DNA, 15 bp, Homo sapiens
gagcatgttgtgaag

SEQ ID NO: 602081 - DNA, 15 bp, Homo sapiens
agcatgttgtgaagg

SEQ ID NO: 602082 - DNA, 15 bp, Homo sapiens
gcatgttgtgaagga

SEQ ID NO: 602083 - DNA, 15 bp, Homo sapiens
catgttgtgaaggaa

SEQ ID NO: 602084 - DNA, 15 bp, Homo sapiens
atgttgtgaaggaat

SEQ ID NO: 602085 - DNA, 15 bp, Homo sapiens
tgttgtgaaggaatc

SEQ ID NO: 602086 - DNA, 15 bp, Homo sapiens
gttgtgaaggaatct

SEQ ID NO: 602087 - DNA, 15 bp, Homo sapiens
ttgtgaaggaatctg

SEQ ID NO: 602088 - DNA, 15 bp, Homo sapiens
tgtgaaggaatctgc

SEQ ID NO: 602089 - DNA, 15 bp, Homo sapiens
gtgaaggaatctgca

SEQ ID NO: 602090 - DNA, 15 bp, Homo sapiens
tgaaggaatctgcaa

SEQ ID NO: 602091 - DNA, 15 bp, Homo sapiens
gaaggaatctgcaac

SEQ ID NO: 602092 - DNA, 15 bp, Homo sapiens
aaggaatctgcaaca

SEQ ID NO: 602093 - DNA, 15 bp, Homo sapiens
aggaatctgcaacaa

SEQ ID NO: 602094 - DNA, 15 bp, Homo sapiens
ggaatctgcaacaag

SEQ ID NO: 602095 - DNA, 15 bp, Homo sapiens
gaatctgcaacaagg

SEQ ID NO: 602096 - DNA, 15 bp, Homo sapiens
aatctgcaacaaggc

SEQ ID NO: 602097 - DNA, 15 bp, Homo sapiens
atctgcaacaaggca

SEQ ID NO: 602098 - DNA, 15 bp, Homo sapiens
tctgcaacaaggcag

SEQ ID NO: 602099 - DNA, 15 bp, Homo sapiens
ctgcaacaaggcagt

SEQ ID NO: 602100 - DNA, 15 bp, Homo sapiens
tgcaacaaggcagtg

SEQ ID NO: 602101 - DNA, 15 bp, Homo sapiens
gcaacaaggcagtgc

SEQ ID NO: 602102 - DNA, 15 bp, Homo sapiens
caacaaggcagtgcc

SEQ ID NO: 602103 - DNA, 15 bp, Homo sapiens
aacaaggcagtgcct

SEQ ID NO: 602104 - DNA, 15 bp, Homo sapiens
acaaggcagtgccta

SEQ ID NO: 602105 - DNA, 15 bp, Homo sapiens
caaggcagtgcctac

SEQ ID NO: 602106 - DNA, 15 bp, Homo sapiens
aaggcagtgcctact

SEQ ID NO: 602107 - DNA, 15 bp, Homo sapiens
aggcagtgcctactg

SEQ ID NO: 602108 - DNA, 15 bp, Homo sapiens
ggcagtgcctactgt

SEQ ID NO: 602109 - DNA, 15 bp, Homo sapiens
gcagtgcctactgta

SEQ ID NO: 602110 - DNA, 15 bp, Homo sapiens
cagtgcctactgtat

SEQ ID NO: 602111 - DNA, 15 bp, Homo sapiens
agtgcctactgtatg

SEQ ID NO: 602112 - DNA, 15 bp, Homo sapiens
gtgcctactgtatgc

SEQ ID NO: 602113 - DNA, 15 bp, Homo sapiens
tgcctactgtatgcc

SEQ ID NO: 602114 - DNA, 15 bp, Homo sapiens
gcctactgtatgcca

SEQ ID NO: 602115 - DNA, 15 bp, Homo sapiens
cctactgtatgccag

SEQ ID NO: 602116 - DNA, 15 bp, Homo sapiens
ctactgtatgccagg

SEQ ID NO: 602117 - DNA, 15 bp, Homo sapiens
tactgtatgccaggc

SEQ ID NO: 602118 - DNA, 15 bp, Homo sapiens
actgtatgccaggcc

SEQ ID NO: 602119 - DNA, 15 bp, Homo sapiens
ctgtatgccaggccc

SEQ ID NO: 602120 - DNA, 15 bp, Homo sapiens
tgtatgccaggccct

SEQ ID NO: 602121 - DNA, 15 bp, Homo sapiens
gtatgccaggccctg

SEQ ID NO: 602122 - DNA, 15 bp, Homo sapiens
tatgccaggccctgt

SEQ ID NO: 602123 - DNA, 15 bp, Homo sapiens
atgccaggccctgtg

SEQ ID NO: 602124 - DNA, 15 bp, Homo sapiens
tgccaggccctgtgc

SEQ ID NO: 602125 - DNA, 15 bp, Homo sapiens
gccaggccctgtgcc

SEQ ID NO: 602126 - DNA, 15 bp, Homo sapiens
ccaggccctgtgcca

SEQ ID NO: 602127 - DNA, 15 bp, Homo sapiens
caggccctgtgccag

SEQ ID NO: 602128 - DNA, 15 bp, Homo sapiens
aggccctgtgccagc

SEQ ID NO: 602129 - DNA, 15 bp, Homo sapiens
ggccctgtgccagct

SEQ ID NO: 602130 - DNA, 15 bp, Homo sapiens
gccctgtgccagctg

SEQ ID NO: 602131 - DNA, 15 bp, Homo sapiens
ccctgtgccagctgt

SEQ ID NO: 602132 - DNA, 15 bp, Homo sapiens
cctgtgccagctgtg

SEQ ID NO: 602133 - DNA, 15 bp, Homo sapiens
ctgtgccagctgtgg

SEQ ID NO: 602134 - DNA, 15 bp, Homo sapiens
tgtgccagctgtggg

SEQ ID NO: 602135 - DNA, 15 bp, Homo sapiens
gtgccagctgtggga

SEQ ID NO: 602136 - DNA, 15 bp, Homo sapiens
tgccagctgtgggaa

SEQ ID NO: 602137 - DNA, 15 bp, Homo sapiens
gccagctgtgggaag

SEQ ID NO: 602138 - DNA, 15 bp, Homo sapiens
ccagctgtgggaagt

SEQ ID NO: 602139 - DNA, 15 bp, Homo sapiens
cagctgtgggaagtg

SEQ ID NO: 602140 - DNA, 15 bp, Homo sapiens
agctgtgggaagtgc

SEQ ID NO: 602141 - DNA, 15 bp, Homo sapiens
gctgtgggaagtgca

SEQ ID NO: 602142 - DNA, 15 bp, Homo sapiens
ctgtgggaagtgcat

SEQ ID NO: 602143 - DNA, 15 bp, Homo sapiens
tgtgggaagtgcatc

SEQ ID NO: 602144 - DNA, 15 bp, Homo sapiens
gtgggaagtgcatct

SEQ ID NO: 602145 - DNA, 15 bp, Homo sapiens
tgggaagtgcatctt

SEQ ID NO: 602146 - DNA, 15 bp, Homo sapiens
gggaagtgcatctta

SEQ ID NO: 602147 - DNA, 15 bp, Homo sapiens
ggaagtgcatcttac

SEQ ID NO: 602148 - DNA, 15 bp, Homo sapiens
gaagtgcatcttact

SEQ ID NO: 602149 - DNA, 15 bp, Homo sapiens
aagtgcatcttacta

SEQ ID NO: 602150 - DNA, 15 bp, Homo sapiens
agtgcatcttactag

SEQ ID NO: 602151 - DNA, 15 bp, Homo sapiens
gtgcatcttactagc

SEQ ID NO: 602152 - DNA, 15 bp, Homo sapiens
tgcatcttactagca

SEQ ID NO: 602153 - DNA, 15 bp, Homo sapiens
gcatcttactagcat

SEQ ID NO: 602154 - DNA, 15 bp, Homo sapiens
catcttactagcatc

SEQ ID NO: 602155 - DNA, 15 bp, Homo sapiens
atcttactagcatca

SEQ ID NO: 602156 - DNA, 15 bp, Homo sapiens
tcttactagcatcac

SEQ ID NO: 602157 - DNA, 15 bp, Homo sapiens
cttactagcatcaca

SEQ ID NO: 602158 - DNA, 15 bp, Homo sapiens
ttactagcatcacac

SEQ ID NO: 602159 - DNA, 15 bp, Homo sapiens
tactagcatcacacg

SEQ ID NO: 602160 - DNA, 15 bp, Homo sapiens
actagcatcacacgg

SEQ ID NO: 602161 - DNA, 15 bp, Homo sapiens
ctagcatcacacggt

SEQ ID NO: 602162 - DNA, 15 bp, Homo sapiens
tagcatcacacggtt

SEQ ID NO: 602163 - DNA, 15 bp, Homo sapiens
agcatcacacggttg

SEQ ID NO: 602164 - DNA, 15 bp, Homo sapiens
gcatcacacggttgc

SEQ ID NO: 602165 - DNA, 15 bp, Homo sapiens
catcacacggttgca

SEQ ID NO: 602166 - DNA, 15 bp, Homo sapiens
atcacacggttgcag

SEQ ID NO: 602167 - DNA, 15 bp, Homo sapiens
tcacacggttgcagg

SEQ ID NO: 602168 - DNA, 15 bp, Homo sapiens
cacacggttgcaggc

SEQ ID NO: 602169 - DNA, 15 bp, Homo sapiens
acacggttgcaggct

SEQ ID NO: 602170 - DNA, 15 bp, Homo sapiens
cacggttgcaggctg

SEQ ID NO: 602171 - DNA, 15 bp, Homo sapiens
acggttgcaggctga

SEQ ID NO: 602172 - DNA, 15 bp, Homo sapiens
cggttgcaggctgag

SEQ ID NO: 602173 - DNA, 15 bp, Homo sapiens
ggttgcaggctgagt

SEQ ID NO: 602174 - DNA, 15 bp, Homo sapiens
gttgcaggctgagtc

SEQ ID NO: 602175 - DNA, 15 bp, Homo sapiens
ttgcaggctgagtcc

SEQ ID NO: 602176 - DNA, 15 bp, Homo sapiens
tgcaggctgagtcct

SEQ ID NO: 602177 - DNA, 15 bp, Homo sapiens
gcaggctgagtcctg

SEQ ID NO: 602178 - DNA, 15 bp, Homo sapiens
caggctgagtcctgg

SEQ ID NO: 602179 - DNA, 15 bp, Homo sapiens
aggctgagtcctggg

SEQ ID NO: 602180 - DNA, 15 bp, Homo sapiens
ggctgagtcctgggt

SEQ ID NO: 602181 - DNA, 15 bp, Homo sapiens
gctgagtcctgggta

SEQ ID NO: 602182 - DNA, 15 bp, Homo sapiens
ctgagtcctgggtat

SEQ ID NO: 602183 - DNA, 15 bp, Homo sapiens
tgagtcctgggtatg

SEQ ID NO: 602184 - DNA, 15 bp, Homo sapiens
gagtcctgggtatgc

SEQ ID NO: 602185 - DNA, 15 bp, Homo sapiens
agtcctgggtatgcg

SEQ ID NO: 602186 - DNA, 15 bp, Homo sapiens
gtcctgggtatgcgg

SEQ ID NO: 602187 - DNA, 15 bp, Homo sapiens
tcctgggtatgcggg

SEQ ID NO: 602188 - DNA, 15 bp, Homo sapiens
cctgggtatgcgggt

SEQ ID NO: 602189 - DNA, 15 bp, Homo sapiens
ctgggtatgcgggtc

SEQ ID NO: 602190 - DNA, 15 bp, Homo sapiens
tgggtatgcgggtct

SEQ ID NO: 602191 - DNA, 15 bp, Homo sapiens
gggtatgcgggtctt

SEQ ID NO: 602192 - DNA, 15 bp, Homo sapiens
ggtatgcgggtcttt

SEQ ID NO: 602193 - DNA, 15 bp, Homo sapiens
gtatgcgggtcttta

SEQ ID NO: 602194 - DNA, 15 bp, Homo sapiens
tatgcgggtctttag

SEQ ID NO: 602195 - DNA, 15 bp, Homo sapiens
atgcgggtctttaga

SEQ ID NO: 602196 - DNA, 15 bp, Homo sapiens
tgcgggtctttagat

SEQ ID NO: 602197 - DNA, 15 bp, Homo sapiens
gcgggtctttagatg

SEQ ID NO: 602198 - DNA, 15 bp, Homo sapiens
cgggtctttagatgg

SEQ ID NO: 602199 - DNA, 15 bp, Homo sapiens
gggtctttagatggt

SEQ ID NO: 602200 - DNA, 15 bp, Homo sapiens
ggtctttagatggtt

SEQ ID NO: 602201 - DNA, 15 bp, Homo sapiens
gtctttagatggttt

SEQ ID NO: 602202 - DNA, 15 bp, Homo sapiens
tctttagatggtttg

SEQ ID NO: 602203 - DNA, 15 bp, Homo sapiens
ctttagatggtttgt

SEQ ID NO: 602204 - DNA, 15 bp, Homo sapiens
tttagatggtttgtg

SEQ ID NO: 602205 - DNA, 15 bp, Homo sapiens
ttagatggtttgtgt

SEQ ID NO: 602206 - DNA, 15 bp, Homo sapiens
tagatggtttgtgtg

SEQ ID NO: 602207 - DNA, 15 bp, Homo sapiens
agatggtttgtgtgc

SEQ ID NO: 602208 - DNA, 15 bp, Homo sapiens
gatggtttgtgtgcc

SEQ ID NO: 602209 - DNA, 15 bp, Homo sapiens
atggtttgtgtgcct

SEQ ID NO: 602210 - DNA, 15 bp, Homo sapiens
tggtttgtgtgcctg

SEQ ID NO: 602211 - DNA, 15 bp, Homo sapiens
ggtttgtgtgcctgt

SEQ ID NO: 602212 - DNA, 15 bp, Homo sapiens
gtttgtgtgcctgtg

SEQ ID NO: 602213 - DNA, 15 bp, Homo sapiens
tttgtgtgcctgtgg

SEQ ID NO: 602214 - DNA, 15 bp, Homo sapiens
ttgtgtgcctgtggt

SEQ ID NO: 602215 - DNA, 15 bp, Homo sapiens
tgtgtgcctgtggtt

SEQ ID NO: 602216 - DNA, 15 bp, Homo sapiens
gtgtgcctgtggttc

SEQ ID NO: 602217 - DNA, 15 bp, Homo sapiens
tgtgcctgtggttcc

SEQ ID NO: 602218 - DNA, 15 bp, Homo sapiens
gtgcctgtggttcca

SEQ ID NO: 602219 - DNA, 15 bp, Homo sapiens
tgcctgtggttccat

SEQ ID NO: 602220 - DNA, 15 bp, Homo sapiens
gcctgtggttccatg

SEQ ID NO: 602221 - DNA, 15 bp, Homo sapiens
cctgtggttccatgg

SEQ ID NO: 602222 - DNA, 15 bp, Homo sapiens
ctgtggttccatggc

SEQ ID NO: 602223 - DNA, 15 bp, Homo sapiens
tgtggttccatggct

SEQ ID NO: 602224 - DNA, 15 bp, Homo sapiens
gtggttccatggctg

SEQ ID NO: 602225 - DNA, 15 bp, Homo sapiens
tggttccatggctgt

SEQ ID NO: 602226 - DNA, 15 bp, Homo sapiens
ggttccatggctgtg

SEQ ID NO: 602227 - DNA, 15 bp, Homo sapiens
gttccatggctgtgt

SEQ ID NO: 602228 - DNA, 15 bp, Homo sapiens
ttccatggctgtgtc

SEQ ID NO: 602229 - DNA, 15 bp, Homo sapiens
tccatggctgtgtct

SEQ ID NO: 602230 - DNA, 15 bp, Homo sapiens
ccatggctgtgtctt

SEQ ID NO: 602231 - DNA, 15 bp, Homo sapiens
catggctgtgtcttc

SEQ ID NO: 602232 - DNA, 15 bp, Homo sapiens
atggctgtgtcttct

SEQ ID NO: 602233 - DNA, 15 bp, Homo sapiens
tggctgtgtcttctt

SEQ ID NO: 602234 - DNA, 15 bp, Homo sapiens
ggctgtgtcttcttt

SEQ ID NO: 602235 - DNA, 15 bp, Homo sapiens
gctgtgtcttctttt

SEQ ID NO: 602236 - DNA, 15 bp, Homo sapiens
ctgtgtcttcttttc

SEQ ID NO: 602237 - DNA, 15 bp, Homo sapiens
tgtgtcttcttttct

SEQ ID NO: 602238 - DNA, 15 bp, Homo sapiens
gtgtcttcttttctc

SEQ ID NO: 602239 - DNA, 15 bp, Homo sapiens
tgtcttcttttctct

SEQ ID NO: 602240 - DNA, 15 bp, Homo sapiens
gtcttcttttctctg

SEQ ID NO: 602241 - DNA, 15 bp, Homo sapiens
tcttcttttctctgg

SEQ ID NO: 602242 - DNA, 15 bp, Homo sapiens
cttcttttctctggt

SEQ ID NO: 602243 - DNA, 15 bp, Homo sapiens
ttcttttctctggtc

SEQ ID NO: 602244 - DNA, 15 bp, Homo sapiens
tcttttctctggtcc

SEQ ID NO: 602245 - DNA, 15 bp, Homo sapiens
cttttctctggtccc

SEQ ID NO: 602246 - DNA, 15 bp, Homo sapiens
ttttctctggtccct

SEQ ID NO: 602247 - DNA, 15 bp, Homo sapiens
tttctctggtccctc

SEQ ID NO: 602248 - DNA, 15 bp, Homo sapiens
ttctctggtccctca

SEQ ID NO: 602249 - DNA, 15 bp, Homo sapiens
tctctggtccctcaa

SEQ ID NO: 602250 - DNA, 15 bp, Homo sapiens
ctctggtccctcaac

SEQ ID NO: 602251 - DNA, 15 bp, Homo sapiens
tctggtccctcaacc

SEQ ID NO: 602252 - DNA, 15 bp, Homo sapiens
ctggtccctcaacct

SEQ ID NO: 602253 - DNA, 15 bp, Homo sapiens
tggtccctcaacctt

SEQ ID NO: 602254 - DNA, 15 bp, Homo sapiens
ggtccctcaaccttc

SEQ ID NO: 602255 - DNA, 15 bp, Homo sapiens
gtccctcaaccttct

SEQ ID NO: 602256 - DNA, 15 bp, Homo sapiens
tccctcaaccttctt

SEQ ID NO: 602257 - DNA, 15 bp, Homo sapiens
ccctcaaccttcttc

SEQ ID NO: 602258 - DNA, 15 bp, Homo sapiens
cctcaaccttcttcc

SEQ ID NO: 602259 - DNA, 15 bp, Homo sapiens
ctcaaccttcttcct

SEQ ID NO: 602260 - DNA, 15 bp, Homo sapiens
tcaaccttcttcctt

SEQ ID NO: 602261 - DNA, 15 bp, Homo sapiens
caaccttcttccttt

SEQ ID NO: 602262 - DNA, 15 bp, Homo sapiens
aaccttcttcctttc

SEQ ID NO: 602263 - DNA, 15 bp, Homo sapiens
accttcttcctttct

SEQ ID NO: 602264 - DNA, 15 bp, Homo sapiens
ccttcttcctttctc

SEQ ID NO: 602265 - DNA, 15 bp, Homo sapiens
cttcttcctttctcc

SEQ ID NO: 602266 - DNA, 15 bp, Homo sapiens
ttcttcctttctccc

SEQ ID NO: 602267 - DNA, 15 bp, Homo sapiens
tcttcctttctcccc

SEQ ID NO: 602268 - DNA, 15 bp, Homo sapiens
cttcctttctcccca

SEQ ID NO: 602269 - DNA, 15 bp, Homo sapiens
ttcctttctccccat

SEQ ID NO: 602270 - DNA, 15 bp, Homo sapiens
tcctttctccccatt

SEQ ID NO: 602271 - DNA, 15 bp, Homo sapiens
cctttctccccattt

SEQ ID NO: 602272 - DNA, 15 bp, Homo sapiens
ctttctccccatttc

SEQ ID NO: 602273 - DNA, 15 bp, Homo sapiens
tttctccccatttcc

SEQ ID NO: 602274 - DNA, 15 bp, Homo sapiens
ttctccccatttcct

SEQ ID NO: 602275 - DNA, 15 bp, Homo sapiens
tctccccatttcctc

SEQ ID NO: 602276 - DNA, 15 bp, Homo sapiens
ctccccatttcctcc

SEQ ID NO: 602277 - DNA, 15 bp, Homo sapiens
tccccatttcctccc

SEQ ID NO: 602278 - DNA, 15 bp, Homo sapiens
ccccatttcctccca

SEQ ID NO: 602279 - DNA, 15 bp, Homo sapiens
cccatttcctcccat

SEQ ID NO: 602280 - DNA, 15 bp, Homo sapiens
ccatttcctcccatc

SEQ ID NO: 602281 - DNA, 15 bp, Homo sapiens
catttcctcccatca

SEQ ID NO: 602282 - DNA, 15 bp, Homo sapiens
atttcctcccatcaa

SEQ ID NO: 602283 - DNA, 15 bp, Homo sapiens
tttcctcccatcaaa

SEQ ID NO: 602284 - DNA, 15 bp, Homo sapiens
ttcctcccatcaaag

SEQ ID NO: 602285 - DNA, 15 bp, Homo sapiens
tcctcccatcaaagc

SEQ ID NO: 602286 - DNA, 15 bp, Homo sapiens
cctcccatcaaagca

SEQ ID NO: 602287 - DNA, 15 bp, Homo sapiens
ctcccatcaaagcag

SEQ ID NO: 602288 - DNA, 15 bp, Homo sapiens
tcccatcaaagcagg

SEQ ID NO: 602289 - DNA, 15 bp, Homo sapiens
cccatcaaagcaggc

SEQ ID NO: 602290 - DNA, 15 bp, Homo sapiens
ccatcaaagcaggct

SEQ ID NO: 602291 - DNA, 15 bp, Homo sapiens
catcaaagcaggctg

SEQ ID NO: 602292 - DNA, 15 bp, Homo sapiens
atcaaagcaggctgc

SEQ ID NO: 602293 - DNA, 15 bp, Homo sapiens
tcaaagcaggctgct

SEQ ID NO: 602294 - DNA, 15 bp, Homo sapiens
caaagcaggctgcta

SEQ ID NO: 602295 - DNA, 15 bp, Homo sapiens
aaagcaggctgctag

SEQ ID NO: 602296 - DNA, 15 bp, Homo sapiens
aagcaggctgctagt

SEQ ID NO: 602297 - DNA, 15 bp, Homo sapiens
agcaggctgctagtg

SEQ ID NO: 602298 - DNA, 15 bp, Homo sapiens
gcaggctgctagtgc

SEQ ID NO: 602299 - DNA, 15 bp, Homo sapiens
caggctgctagtgca

SEQ ID NO: 602300 - DNA, 15 bp, Homo sapiens
aggctgctagtgcag

SEQ ID NO: 602301 - DNA, 15 bp, Homo sapiens
ggctgctagtgcagg

SEQ ID NO: 602302 - DNA, 15 bp, Homo sapiens
gctgctagtgcaggc

SEQ ID NO: 602303 - DNA, 15 bp, Homo sapiens
ctgctagtgcaggct

SEQ ID NO: 602304 - DNA, 15 bp, Homo sapiens
tgctagtgcaggctc

SEQ ID NO: 602305 - DNA, 15 bp, Homo sapiens
gctagtgcaggctct

SEQ ID NO: 602306 - DNA, 15 bp, Homo sapiens
ctagtgcaggctctg

SEQ ID NO: 602307 - DNA, 15 bp, Homo sapiens
tagtgcaggctctga

SEQ ID NO: 602308 - DNA, 15 bp, Homo sapiens
agtgcaggctctgac

SEQ ID NO: 602309 - DNA, 15 bp, Homo sapiens
gtgcaggctctgaca

SEQ ID NO: 602310 - DNA, 15 bp, Homo sapiens
tgcaggctctgacac

SEQ ID NO: 602311 - DNA, 15 bp, Homo sapiens
gcaggctctgacacc

SEQ ID NO: 602312 - DNA, 15 bp, Homo sapiens
caggctctgacacca

SEQ ID NO: 602313 - DNA, 15 bp, Homo sapiens
aggctctgacaccat

SEQ ID NO: 602314 - DNA, 15 bp, Homo sapiens
ggctctgacaccatc

SEQ ID NO: 602315 - DNA, 15 bp, Homo sapiens
gctctgacaccatct

SEQ ID NO: 602316 - DNA, 15 bp, Homo sapiens
ctctgacaccatctc

SEQ ID NO: 602317 - DNA, 15 bp, Homo sapiens
tctgacaccatctca

SEQ ID NO: 602318 - DNA, 15 bp, Homo sapiens
ctgacaccatctcat

SEQ ID NO: 602319 - DNA, 15 bp, Homo sapiens
tgacaccatctcatt

SEQ ID NO: 602320 - DNA, 15 bp, Homo sapiens
gacaccatctcattc

SEQ ID NO: 602321 - DNA, 15 bp, Homo sapiens
acaccatctcattcc

SEQ ID NO: 602322 - DNA, 15 bp, Homo sapiens
caccatctcattccg

SEQ ID NO: 602323 - DNA, 15 bp, Homo sapiens
accatctcattccgc

SEQ ID NO: 602324 - DNA, 15 bp, Homo sapiens
ccatctcattccgca

SEQ ID NO: 602325 - DNA, 15 bp, Homo sapiens
catctcattccgcat

SEQ ID NO: 602326 - DNA, 15 bp, Homo sapiens
atctcattccgcatg

SEQ ID NO: 602327 - DNA, 15 bp, Homo sapiens
tctcattccgcatgg

SEQ ID NO: 602328 - DNA, 15 bp, Homo sapiens
ctcattccgcatgga

SEQ ID NO: 602329 - DNA, 15 bp, Homo sapiens
tcattccgcatggag

SEQ ID NO: 602330 - DNA, 15 bp, Homo sapiens
cattccgcatggagt

SEQ ID NO: 602331 - DNA, 15 bp, Homo sapiens
attccgcatggagtc

SEQ ID NO: 602332 - DNA, 15 bp, Homo sapiens
ttccgcatggagtca

SEQ ID NO: 602333 - DNA, 15 bp, Homo sapiens
tccgcatggagtcag

SEQ ID NO: 602334 - DNA, 15 bp, Homo sapiens
ccgcatggagtcagc

SEQ ID NO: 602335 - DNA, 15 bp, Homo sapiens
cgcatggagtcagct

SEQ ID NO: 602336 - DNA, 15 bp, Homo sapiens
gcatggagtcagctc

SEQ ID NO: 602337 - DNA, 15 bp, Homo sapiens
catggagtcagctca

SEQ ID NO: 602338 - DNA, 15 bp, Homo sapiens
atggagtcagctcag

SEQ ID NO: 602339 - DNA, 15 bp, Homo sapiens
tggagtcagctcagg

SEQ ID NO: 602340 - DNA, 15 bp, Homo sapiens
ggagtcagctcaggt

SEQ ID NO: 602341 - DNA, 15 bp, Homo sapiens
gagtcagctcaggtc

SEQ ID NO: 602342 - DNA, 15 bp, Homo sapiens
agtcagctcaggtcc

SEQ ID NO: 602343 - DNA, 15 bp, Homo sapiens
gtcagctcaggtccc

SEQ ID NO: 602344 - DNA, 15 bp, Homo sapiens
tcagctcaggtcccc

SEQ ID NO: 602345 - DNA, 15 bp, Homo sapiens
cagctcaggtcccca

SEQ ID NO: 602346 - DNA, 15 bp, Homo sapiens
agctcaggtccccat

SEQ ID NO: 602347 - DNA, 15 bp, Homo sapiens
gctcaggtccccatc

SEQ ID NO: 602348 - DNA, 15 bp, Homo sapiens
ctcaggtccccatca

SEQ ID NO: 602349 - DNA, 15 bp, Homo sapiens
tcaggtccccatcac

SEQ ID NO: 602350 - DNA, 15 bp, Homo sapiens
caggtccccatcact

SEQ ID NO: 602351 - DNA, 15 bp, Homo sapiens
aggtccccatcactg

SEQ ID NO: 602352 - DNA, 15 bp, Homo sapiens
ggtccccatcactgc

SEQ ID NO: 602353 - DNA, 15 bp, Homo sapiens
gtccccatcactgct

SEQ ID NO: 602354 - DNA, 15 bp, Homo sapiens
tccccatcactgctt

SEQ ID NO: 602355 - DNA, 15 bp, Homo sapiens
ccccatcactgcttt

SEQ ID NO: 602356 - DNA, 15 bp, Homo sapiens
cccatcactgctttt

SEQ ID NO: 602357 - DNA, 15 bp, Homo sapiens
ccatcactgcttttg

SEQ ID NO: 602358 - DNA, 15 bp, Homo sapiens
catcactgcttttgg

SEQ ID NO: 602359 - DNA, 15 bp, Homo sapiens
atcactgcttttggg

SEQ ID NO: 602360 - DNA, 15 bp, Homo sapiens
tcactgcttttgggg

SEQ ID NO: 602361 - DNA, 15 bp, Homo sapiens
cactgcttttggggg

SEQ ID NO: 602362 - DNA, 15 bp, Homo sapiens
actgcttttgggggt

SEQ ID NO: 602363 - DNA, 15 bp, Homo sapiens
ctgcttttgggggta

SEQ ID NO: 602364 - DNA, 15 bp, Homo sapiens
tgcttttgggggtat

SEQ ID NO: 602365 - DNA, 15 bp, Homo sapiens
gcttttgggggtatc

SEQ ID NO: 602366 - DNA, 15 bp, Homo sapiens
cttttgggggtatct

SEQ ID NO: 602367 - DNA, 15 bp, Homo sapiens
ttttgggggtatcta

SEQ ID NO: 602368 - DNA, 15 bp, Homo sapiens
tttgggggtatctac

SEQ ID NO: 602369 - DNA, 15 bp, Homo sapiens
ttgggggtatctaca

SEQ ID NO: 602370 - DNA, 15 bp, Homo sapiens
tgggggtatctacag

SEQ ID NO: 602371 - DNA, 15 bp, Homo sapiens
gggggtatctacagg

SEQ ID NO: 602372 - DNA, 15 bp, Homo sapiens
ggggtatctacagga

SEQ ID NO: 602373 - DNA, 15 bp, Homo sapiens
gggtatctacaggaa

SEQ ID NO: 602374 - DNA, 15 bp, Homo sapiens
ggtatctacaggaaa

SEQ ID NO: 602375 - DNA, 15 bp, Homo sapiens
gtatctacaggaaaa

SEQ ID NO: 602376 - DNA, 15 bp, Homo sapiens
tatctacaggaaaac

SEQ ID NO: 602377 - DNA, 15 bp, Homo sapiens
atctacaggaaaaca

SEQ ID NO: 602378 - DNA, 15 bp, Homo sapiens
tctacaggaaaacac

SEQ ID NO: 602379 - DNA, 15 bp, Homo sapiens
ctacaggaaaacact

SEQ ID NO: 602380 - DNA, 15 bp, Homo sapiens
tacaggaaaacactg

SEQ ID NO: 602381 - DNA, 15 bp, Homo sapiens
acaggaaaacactga

SEQ ID NO: 602382 - DNA, 15 bp, Homo sapiens
caggaaaacactgat

SEQ ID NO: 602383 - DNA, 15 bp, Homo sapiens
aggaaaacactgatt

SEQ ID NO: 602384 - DNA, 15 bp, Homo sapiens
ggaaaacactgattt

SEQ ID NO: 602385 - DNA, 15 bp, Homo sapiens
gaaaacactgatttt

SEQ ID NO: 602386 - DNA, 15 bp, Homo sapiens
aaaacactgattttg

SEQ ID NO: 602387 - DNA, 15 bp, Homo sapiens
aaacactgattttgc

SEQ ID NO: 602388 - DNA, 15 bp, Homo sapiens
aacactgattttgcc

SEQ ID NO: 602389 - DNA, 15 bp, Homo sapiens
acactgattttgcct

SEQ ID NO: 602390 - DNA, 15 bp, Homo sapiens
cactgattttgcctc

SEQ ID NO: 602391 - DNA, 15 bp, Homo sapiens
actgattttgcctca

SEQ ID NO: 602392 - DNA, 15 bp, Homo sapiens
ctgattttgcctcac

SEQ ID NO: 602393 - DNA, 15 bp, Homo sapiens
tgattttgcctcacg

SEQ ID NO: 602394 - DNA, 15 bp, Homo sapiens
gattttgcctcacgt

SEQ ID NO: 602395 - DNA, 15 bp, Homo sapiens
attttgcctcacgtc

SEQ ID NO: 602396 - DNA, 15 bp, Homo sapiens
ttttgcctcacgtca

SEQ ID NO: 602397 - DNA, 15 bp, Homo sapiens
tttgcctcacgtcag

SEQ ID NO: 602398 - DNA, 15 bp, Homo sapiens
ttgcctcacgtcaga

SEQ ID NO: 602399 - DNA, 15 bp, Homo sapiens
tgcctcacgtcagaa

SEQ ID NO: 602400 - DNA, 15 bp, Homo sapiens
gcctcacgtcagaag

SEQ ID NO: 602401 - DNA, 15 bp, Homo sapiens
cctcacgtcagaaga

SEQ ID NO: 602402 - DNA, 15 bp, Homo sapiens
ctcacgtcagaagac

SEQ ID NO: 602403 - DNA, 15 bp, Homo sapiens
tcacgtcagaagact

SEQ ID NO: 602404 - DNA, 15 bp, Homo sapiens
cacgtcagaagactt

SEQ ID NO: 602405 - DNA, 15 bp, Homo sapiens
acgtcagaagacttg

SEQ ID NO: 602406 - DNA, 15 bp, Homo sapiens
cgtcagaagacttgg

SEQ ID NO: 602407 - DNA, 15 bp, Homo sapiens
gtcagaagacttggc

SEQ ID NO: 602408 - DNA, 15 bp, Homo sapiens
tcagaagacttggcc

SEQ ID NO: 602409 - DNA, 15 bp, Homo sapiens
cagaagacttggccc

SEQ ID NO: 602410 - DNA, 15 bp, Homo sapiens
agaagacttggcccc

SEQ ID NO: 602411 - DNA, 15 bp, Homo sapiens
gaagacttggcccca

SEQ ID NO: 602412 - DNA, 15 bp, Homo sapiens
aagacttggccccag

SEQ ID NO: 602413 - DNA, 15 bp, Homo sapiens
agacttggccccagt

SEQ ID NO: 602414 - DNA, 15 bp, Homo sapiens
gacttggccccagtg

SEQ ID NO: 602415 - DNA, 15 bp, Homo sapiens
acttggccccagtga

SEQ ID NO: 602416 - DNA, 15 bp, Homo sapiens
cttggccccagtgaa

SEQ ID NO: 602417 - DNA, 15 bp, Homo sapiens
ttggccccagtgaag

SEQ ID NO: 602418 - DNA, 15 bp, Homo sapiens
tggccccagtgaaga

SEQ ID NO: 602419 - DNA, 15 bp, Homo sapiens
ggccccagtgaagaa

SEQ ID NO: 602420 - DNA, 15 bp, Homo sapiens
gccccagtgaagaat

SEQ ID NO: 602421 - DNA, 15 bp, Homo sapiens
ccccagtgaagaatc

SEQ ID NO: 602422 - DNA, 15 bp, Homo sapiens
cccagtgaagaatct

SEQ ID NO: 602423 - DNA, 15 bp, Homo sapiens
ccagtgaagaatctc

SEQ ID NO: 602424 - DNA, 15 bp, Homo sapiens
cagtgaagaatctca

SEQ ID NO: 602425 - DNA, 15 bp, Homo sapiens
agtgaagaatctcag

SEQ ID NO: 602426 - DNA, 15 bp, Homo sapiens
gtgaagaatctcagg

SEQ ID NO: 602427 - DNA, 15 bp, Homo sapiens
tgaagaatctcaggc

SEQ ID NO: 602428 - DNA, 15 bp, Homo sapiens
gaagaatctcaggca

SEQ ID NO: 602429 - DNA, 15 bp, Homo sapiens
aagaatctcaggcat

SEQ ID NO: 602430 - DNA, 15 bp, Homo sapiens
agaatctcaggcatc

SEQ ID NO: 602431 - DNA, 15 bp, Homo sapiens
gaatctcaggcatcc

SEQ ID NO: 602432 - DNA, 15 bp, Homo sapiens
aatctcaggcatcca

SEQ ID NO: 602433 - DNA, 15 bp, Homo sapiens
atctcaggcatccat

SEQ ID NO: 602434 - DNA, 15 bp, Homo sapiens
tctcaggcatccatg

SEQ ID NO: 602435 - DNA, 15 bp, Homo sapiens
ctcaggcatccatgc

SEQ ID NO: 602436 - DNA, 15 bp, Homo sapiens
tcaggcatccatgca

SEQ ID NO: 602437 - DNA, 15 bp, Homo sapiens
caggcatccatgcag

SEQ ID NO: 602438 - DNA, 15 bp, Homo sapiens
aggcatccatgcagc

SEQ ID NO: 602439 - DNA, 15 bp, Homo sapiens
ggcatccatgcagca

SEQ ID NO: 602440 - DNA, 15 bp, Homo sapiens
gcatccatgcagcag

SEQ ID NO: 602441 - DNA, 15 bp, Homo sapiens
catccatgcagcaga

SEQ ID NO: 602442 - DNA, 15 bp, Homo sapiens
atccatgcagcagat

SEQ ID NO: 602443 - DNA, 15 bp, Homo sapiens
tccatgcagcagata

SEQ ID NO: 602444 - DNA, 15 bp, Homo sapiens
ccatgcagcagataa

SEQ ID NO: 602445 - DNA, 15 bp, Homo sapiens
catgcagcagataag

SEQ ID NO: 602446 - DNA, 15 bp, Homo sapiens
atgcagcagataaga

SEQ ID NO: 602447 - DNA, 15 bp, Homo sapiens
tgcagcagataagag

SEQ ID NO: 602448 - DNA, 15 bp, Homo sapiens
gcagcagataagaga

SEQ ID NO: 602449 - DNA, 15 bp, Homo sapiens
cagcagataagagag

SEQ ID NO: 602450 - DNA, 15 bp, Homo sapiens
agcagataagagagg

SEQ ID NO: 602451 - DNA, 15 bp, Homo sapiens
gcagataagagaggc

SEQ ID NO: 602452 - DNA, 15 bp, Homo sapiens
cagataagagaggca

SEQ ID NO: 602453 - DNA, 15 bp, Homo sapiens
agataagagaggcat

SEQ ID NO: 602454 - DNA, 15 bp, Homo sapiens
gataagagaggcatt

SEQ ID NO: 602455 - DNA, 15 bp, Homo sapiens
ataagagaggcattt

SEQ ID NO: 602456 - DNA, 15 bp, Homo sapiens
taagagaggcatttg

SEQ ID NO: 602457 - DNA, 15 bp, Homo sapiens
aagagaggcatttgt

SEQ ID NO: 602458 - DNA, 15 bp, Homo sapiens
agagaggcatttgtg

SEQ ID NO: 602459 - DNA, 15 bp, Homo sapiens
gagaggcatttgtgg

SEQ ID NO: 602460 - DNA, 15 bp, Homo sapiens
agaggcatttgtggg

SEQ ID NO: 602461 - DNA, 15 bp, Homo sapiens
gaggcatttgtgggc

SEQ ID NO: 602462 - DNA, 15 bp, Homo sapiens
aggcatttgtgggct

SEQ ID NO: 602463 - DNA, 15 bp, Homo sapiens
ggcatttgtgggctt

SEQ ID NO: 602464 - DNA, 15 bp, Homo sapiens
gcatttgtgggcttg

SEQ ID NO: 602465 - DNA, 15 bp, Homo sapiens
catttgtgggcttga

SEQ ID NO: 602466 - DNA, 15 bp, Homo sapiens
atttgtgggcttgag

SEQ ID NO: 602467 - DNA, 15 bp, Homo sapiens
tttgtgggcttgaga

SEQ ID NO: 602468 - DNA, 15 bp, Homo sapiens
ttgtgggcttgagag

SEQ ID NO: 602469 - DNA, 15 bp, Homo sapiens
tgtgggcttgagagg

SEQ ID NO: 602470 - DNA, 15 bp, Homo sapiens
gtgggcttgagaggg

SEQ ID NO: 602471 - DNA, 15 bp, Homo sapiens
tgggcttgagagggg

SEQ ID NO: 602472 - DNA, 15 bp, Homo sapiens
gggcttgagaggggc

SEQ ID NO: 602473 - DNA, 15 bp, Homo sapiens
ggcttgagaggggcc

SEQ ID NO: 602474 - DNA, 15 bp, Homo sapiens
gcttgagaggggccc

SEQ ID NO: 602475 - DNA, 15 bp, Homo sapiens
cttgagaggggccct

SEQ ID NO: 602476 - DNA, 15 bp, Homo sapiens
ttgagaggggccctt

SEQ ID NO: 602477 - DNA, 15 bp, Homo sapiens
tgagaggggcccttc

SEQ ID NO: 602478 - DNA, 15 bp, Homo sapiens
gagaggggcccttcg

SEQ ID NO: 602479 - DNA, 15 bp, Homo sapiens
agaggggcccttcgc

SEQ ID NO: 602480 - DNA, 15 bp, Homo sapiens
gaggggcccttcgcg

SEQ ID NO: 602481 - DNA, 15 bp, Homo sapiens
aggggcccttcgcgt

SEQ ID NO: 602482 - DNA, 15 bp, Homo sapiens
ggggcccttcgcgtt

SEQ ID NO: 602483 - DNA, 15 bp, Homo sapiens
gggcccttcgcgttg

SEQ ID NO: 602484 - DNA, 15 bp, Homo sapiens
ggcccttcgcgttgc

SEQ ID NO: 602485 - DNA, 15 bp, Homo sapiens
gcccttcgcgttgct

SEQ ID NO: 602486 - DNA, 15 bp, Homo sapiens
cccttcgcgttgcta

SEQ ID NO: 602487 - DNA, 15 bp, Homo sapiens
ccttcgcgttgctaa

SEQ ID NO: 602488 - DNA, 15 bp, Homo sapiens
cttcgcgttgctaaa

SEQ ID NO: 602489 - DNA, 15 bp, Homo sapiens
ttcgcgttgctaaaa

SEQ ID NO: 602490 - DNA, 15 bp, Homo sapiens
tcgcgttgctaaaat

SEQ ID NO: 602491 - DNA, 15 bp, Homo sapiens
cgcgttgctaaaatc

SEQ ID NO: 602492 - DNA, 15 bp, Homo sapiens
gcgttgctaaaatca

SEQ ID NO: 602493 - DNA, 15 bp, Homo sapiens
cgttgctaaaatcag

SEQ ID NO: 602494 - DNA, 15 bp, Homo sapiens
gttgctaaaatcaga

SEQ ID NO: 602495 - DNA, 15 bp, Homo sapiens
ttgctaaaatcagac

SEQ ID NO: 602496 - DNA, 15 bp, Homo sapiens
tgctaaaatcagacc

SEQ ID NO: 602497 - DNA, 15 bp, Homo sapiens
gctaaaatcagacca

SEQ ID NO: 602498 - DNA, 15 bp, Homo sapiens
ctaaaatcagaccac

SEQ ID NO: 602499 - DNA, 15 bp, Homo sapiens
taaaatcagaccacg

SEQ ID NO: 602500 - DNA, 15 bp, Homo sapiens
aaaatcagaccacgt

SEQ ID NO: 602501 - DNA, 15 bp, Homo sapiens
aaatcagaccacgtg

SEQ ID NO: 602502 - DNA, 15 bp, Homo sapiens
aatcagaccacgtgc

SEQ ID NO: 602503 - DNA, 15 bp, Homo sapiens
atcagaccacgtgcc

SEQ ID NO: 602504 - DNA, 15 bp, Homo sapiens
tcagaccacgtgcct

SEQ ID NO: 602505 - DNA, 15 bp, Homo sapiens
cagaccacgtgcctc

SEQ ID NO: 602506 - DNA, 15 bp, Homo sapiens
agaccacgtgcctcc

SEQ ID NO: 602507 - DNA, 15 bp, Homo sapiens
gaccacgtgcctccc

SEQ ID NO: 602508 - DNA, 15 bp, Homo sapiens
accacgtgcctcccc

SEQ ID NO: 602509 - DNA, 15 bp, Homo sapiens
ccacgtgcctcccct

SEQ ID NO: 602510 - DNA, 15 bp, Homo sapiens
cacgtgcctcccctt

SEQ ID NO: 602511 - DNA, 15 bp, Homo sapiens
acgtgcctccccttc

SEQ ID NO: 602512 - DNA, 15 bp, Homo sapiens
cgtgcctccccttct

SEQ ID NO: 602513 - DNA, 15 bp, Homo sapiens
gtgcctccccttctc

SEQ ID NO: 602514 - DNA, 15 bp, Homo sapiens
tgcctccccttctct

SEQ ID NO: 602515 - DNA, 15 bp, Homo sapiens
gcctccccttctctg

SEQ ID NO: 602516 - DNA, 15 bp, Homo sapiens
cctccccttctctgc

SEQ ID NO: 602517 - DNA, 15 bp, Homo sapiens
ctccccttctctgcc

SEQ ID NO: 602518 - DNA, 15 bp, Homo sapiens
tccccttctctgccg

SEQ ID NO: 602519 - DNA, 15 bp, Homo sapiens
ccccttctctgccgt

SEQ ID NO: 602520 - DNA, 15 bp, Homo sapiens
cccttctctgccgtt

SEQ ID NO: 602521 - DNA, 15 bp, Homo sapiens
ccttctctgccgttg

SEQ ID NO: 602522 - DNA, 15 bp, Homo sapiens
cttctctgccgttgg

SEQ ID NO: 602523 - DNA, 15 bp, Homo sapiens
ttctctgccgttggg

SEQ ID NO: 602524 - DNA, 15 bp, Homo sapiens
tctctgccgttgggg

SEQ ID NO: 602525 - DNA, 15 bp, Homo sapiens
ctctgccgttggggg

SEQ ID NO: 602526 - DNA, 15 bp, Homo sapiens
tctgccgttgggggt

SEQ ID NO: 602527 - DNA, 15 bp, Homo sapiens
ctgccgttgggggta

SEQ ID NO: 602528 - DNA, 15 bp, Homo sapiens
tgccgttgggggtac

SEQ ID NO: 602529 - DNA, 15 bp, Homo sapiens
gccgttgggggtaca

SEQ ID NO: 602530 - DNA, 15 bp, Homo sapiens
ccgttgggggtacac

SEQ ID NO: 602531 - DNA, 15 bp, Homo sapiens
cgttgggggtacacc

SEQ ID NO: 602532 - DNA, 15 bp, Homo sapiens
gttgggggtacacct

SEQ ID NO: 602533 - DNA, 15 bp, Homo sapiens
ttgggggtacacctg

SEQ ID NO: 602534 - DNA, 15 bp, Homo sapiens
tgggggtacacctga

SEQ ID NO: 602535 - DNA, 15 bp, Homo sapiens
gggggtacacctgat

SEQ ID NO: 602536 - DNA, 15 bp, Homo sapiens
ggggtacacctgatt

SEQ ID NO: 602537 - DNA, 15 bp, Homo sapiens
gggtacacctgattt

SEQ ID NO: 602538 - DNA, 15 bp, Homo sapiens
ggtacacctgatttt

SEQ ID NO: 602539 - DNA, 15 bp, Homo sapiens
gtacacctgattttg

SEQ ID NO: 602540 - DNA, 15 bp, Homo sapiens
tacacctgattttgt

SEQ ID NO: 602541 - DNA, 15 bp, Homo sapiens
acacctgattttgtt

SEQ ID NO: 602542 - DNA, 15 bp, Homo sapiens
cacctgattttgttc

SEQ ID NO: 602543 - DNA, 15 bp, Homo sapiens
acctgattttgttca

SEQ ID NO: 602544 - DNA, 15 bp, Homo sapiens
cctgattttgttcat

SEQ ID NO: 602545 - DNA, 15 bp, Homo sapiens
ctgattttgttcata

SEQ ID NO: 602546 - DNA, 15 bp, Homo sapiens
tgattttgttcataa

SEQ ID NO: 602547 - DNA, 15 bp, Homo sapiens
gattttgttcataaa

SEQ ID NO: 602548 - DNA, 15 bp, Homo sapiens
attttgttcataaat

SEQ ID NO: 602549 - DNA, 15 bp, Homo sapiens
ttttgttcataaatg

SEQ ID NO: 602550 - DNA, 15 bp, Homo sapiens
tttgttcataaatgc

SEQ ID NO: 602551 - DNA, 15 bp, Homo sapiens
ttgttcataaatgcg

SEQ ID NO: 602552 - DNA, 15 bp, Homo sapiens
tgttcataaatgcgt

SEQ ID NO: 602553 - DNA, 15 bp, Homo sapiens
gttcataaatgcgtt

SEQ ID NO: 602554 - DNA, 15 bp, Homo sapiens
ttcataaatgcgttc

SEQ ID NO: 602555 - DNA, 15 bp, Homo sapiens
tcataaatgcgttcg

SEQ ID NO: 602556 - DNA, 15 bp, Homo sapiens
cataaatgcgttcga

SEQ ID NO: 602557 - DNA, 15 bp, Homo sapiens
ataaatgcgttcgaa

SEQ ID NO: 602558 - DNA, 15 bp, Homo sapiens
taaatgcgttcgaag

SEQ ID NO: 602559 - DNA, 15 bp, Homo sapiens
aaatgcgttcgaagg

SEQ ID NO: 602560 - DNA, 15 bp, Homo sapiens
aatgcgttcgaaggg

SEQ ID NO: 602561 - DNA, 15 bp, Homo sapiens
atgcgttcgaagggt

SEQ ID NO: 602562 - DNA, 15 bp, Homo sapiens
tgcgttcgaagggta

SEQ ID NO: 602563 - DNA, 15 bp, Homo sapiens
gcgttcgaagggtat

SEQ ID NO: 602564 - DNA, 15 bp, Homo sapiens
cgttcgaagggtatt

SEQ ID NO: 602565 - DNA, 15 bp, Homo sapiens
gttcgaagggtattg

SEQ ID NO: 602566 - DNA, 15 bp, Homo sapiens
ttcgaagggtattgg

SEQ ID NO: 602567 - DNA, 15 bp, Homo sapiens
tcgaagggtattgga

SEQ ID NO: 602568 - DNA, 15 bp, Homo sapiens
cgaagggtattggaa

SEQ ID NO: 602569 - DNA, 15 bp, Homo sapiens
gaagggtattggaac

SEQ ID NO: 602570 - DNA, 15 bp, Homo sapiens
aagggtattggaaca

SEQ ID NO: 602571 - DNA, 15 bp, Homo sapiens
agggtattggaacac

SEQ ID NO: 602572 - DNA, 15 bp, Homo sapiens
gggtattggaacacc

SEQ ID NO: 602573 - DNA, 15 bp, Homo sapiens
ggtattggaacacca

SEQ ID NO: 602574 - DNA, 15 bp, Homo sapiens
gtattggaacaccat

SEQ ID NO: 602575 - DNA, 15 bp, Homo sapiens
tattggaacaccatc

SEQ ID NO: 602576 - DNA, 15 bp, Homo sapiens
attggaacaccatcg

SEQ ID NO: 602577 - DNA, 15 bp, Homo sapiens
ttggaacaccatcgt

SEQ ID NO: 602578 - DNA, 15 bp, Homo sapiens
tggaacaccatcgtt

SEQ ID NO: 602579 - DNA, 15 bp, Homo sapiens
ggaacaccatcgttc

SEQ ID NO: 602580 - DNA, 15 bp, Homo sapiens
gaacaccatcgttcc

SEQ ID NO: 602581 - DNA, 15 bp, Homo sapiens
aacaccatcgttccc

SEQ ID NO: 602582 - DNA, 15 bp, Homo sapiens
acaccatcgttccca

SEQ ID NO: 602583 - DNA, 15 bp, Homo sapiens
caccatcgttcccac

SEQ ID NO: 602584 - DNA, 15 bp, Homo sapiens
accatcgttcccact

SEQ ID NO: 602585 - DNA, 15 bp, Homo sapiens
ccatcgttcccactg

SEQ ID NO: 602586 - DNA, 15 bp, Homo sapiens
catcgttcccactgc

SEQ ID NO: 602587 - DNA, 15 bp, Homo sapiens
atcgttcccactgct

SEQ ID NO: 602588 - DNA, 15 bp, Homo sapiens
tcgttcccactgctg

SEQ ID NO: 602589 - DNA, 15 bp, Homo sapiens
cgttcccactgctgt

SEQ ID NO: 602590 - DNA, 15 bp, Homo sapiens
gttcccactgctgtc

SEQ ID NO: 602591 - DNA, 15 bp, Homo sapiens
ttcccactgctgtca

SEQ ID NO: 602592 - DNA, 15 bp, Homo sapiens
tcccactgctgtcag

SEQ ID NO: 602593 - DNA, 15 bp, Homo sapiens
cccactgctgtcagt

SEQ ID NO: 602594 - DNA, 15 bp, Homo sapiens
ccactgctgtcagtt

SEQ ID NO: 602595 - DNA, 15 bp, Homo sapiens
cactgctgtcagttt

SEQ ID NO: 602596 - DNA, 15 bp, Homo sapiens
actgctgtcagtttc

SEQ ID NO: 602597 - DNA, 15 bp, Homo sapiens
ctgctgtcagtttca

SEQ ID NO: 602598 - DNA, 15 bp, Homo sapiens
tgctgtcagtttcac

SEQ ID NO: 602599 - DNA, 15 bp, Homo sapiens
gctgtcagtttcacc

SEQ ID NO: 602600 - DNA, 15 bp, Homo sapiens
ctgtcagtttcacca

SEQ ID NO: 602601 - DNA, 15 bp, Homo sapiens
tgtcagtttcaccat

SEQ ID NO: 602602 - DNA, 15 bp, Homo sapiens
gtcagtttcaccatt

SEQ ID NO: 602603 - DNA, 15 bp, Homo sapiens
tcagtttcaccatta

SEQ ID NO: 602604 - DNA, 15 bp, Homo sapiens
cagtttcaccattag

SEQ ID NO: 602605 - DNA, 15 bp, Homo sapiens
agtttcaccattaga

SEQ ID NO: 602606 - DNA, 15 bp, Homo sapiens
gtttcaccattagat

SEQ ID NO: 602607 - DNA, 15 bp, Homo sapiens
tttcaccattagatt

SEQ ID NO: 602608 - DNA, 15 bp, Homo sapiens
ttcaccattagattt

SEQ ID NO: 602609 - DNA, 15 bp, Homo sapiens
tcaccattagatttt

SEQ ID NO: 602610 - DNA, 15 bp, Homo sapiens
caccattagattttc

SEQ ID NO: 602611 - DNA, 15 bp, Homo sapiens
accattagattttca

SEQ ID NO: 602612 - DNA, 15 bp, Homo sapiens
ccattagattttcag

SEQ ID NO: 602613 - DNA, 15 bp, Homo sapiens
cattagattttcagg

SEQ ID NO: 602614 - DNA, 15 bp, Homo sapiens
attagattttcaggt

SEQ ID NO: 602615 - DNA, 15 bp, Homo sapiens
ttagattttcaggtt

SEQ ID NO: 602616 - DNA, 15 bp, Homo sapiens
tagattttcaggttt

SEQ ID NO: 602617 - DNA, 15 bp, Homo sapiens
agattttcaggtttt

SEQ ID NO: 602618 - DNA, 15 bp, Homo sapiens
gattttcaggttttt

SEQ ID NO: 602619 - DNA, 15 bp, Homo sapiens
attttcaggtttttg

SEQ ID NO: 602620 - DNA, 15 bp, Homo sapiens
ttttcaggtttttgt

SEQ ID NO: 602621 - DNA, 15 bp, Homo sapiens
tttcaggtttttgtt

SEQ ID NO: 602622 - DNA, 15 bp, Homo sapiens
ttcaggtttttgttt

SEQ ID NO: 602623 - DNA, 15 bp, Homo sapiens
tcaggtttttgtttt

SEQ ID NO: 602624 - DNA, 15 bp, Homo sapiens
caggtttttgttttt

SEQ ID NO: 602625 - DNA, 15 bp, Homo sapiens
aggtttttgtttttc

SEQ ID NO: 602626 - DNA, 15 bp, Homo sapiens
ggtttttgtttttct

SEQ ID NO: 602627 - DNA, 15 bp, Homo sapiens
gtttttgtttttctc

SEQ ID NO: 602628 - DNA, 15 bp, Homo sapiens
tttttgtttttctcc

SEQ ID NO: 602629 - DNA, 15 bp, Homo sapiens
ttttgtttttctccc

SEQ ID NO: 602630 - DNA, 15 bp, Homo sapiens
tttgtttttctccca

SEQ ID NO: 602631 - DNA, 15 bp, Homo sapiens
ttgtttttctcccag

SEQ ID NO: 602632 - DNA, 15 bp, Homo sapiens
tgtttttctcccagg

SEQ ID NO: 602633 - DNA, 15 bp, Homo sapiens
gtttttctcccaggt

SEQ ID NO: 602634 - DNA, 15 bp, Homo sapiens
tttttctcccaggtg

SEQ ID NO: 602635 - DNA, 15 bp, Homo sapiens
ttttctcccaggtga

SEQ ID NO: 602636 - DNA, 15 bp, Homo sapiens
tttctcccaggtgaa

SEQ ID NO: 602637 - DNA, 15 bp, Homo sapiens
ttctcccaggtgaag

SEQ ID NO: 602638 - DNA, 15 bp, Homo sapiens
tctcccaggtgaagt

SEQ ID NO: 602639 - DNA, 15 bp, Homo sapiens
ctcccaggtgaagta

SEQ ID NO: 602640 - DNA, 15 bp, Homo sapiens
tcccaggtgaagtat

SEQ ID NO: 602641 - DNA, 15 bp, Homo sapiens
cccaggtgaagtatc

SEQ ID NO: 602642 - DNA, 15 bp, Homo sapiens
ccaggtgaagtatct

SEQ ID NO: 602643 - DNA, 15 bp, Homo sapiens
caggtgaagtatctt

SEQ ID NO: 602644 - DNA, 15 bp, Homo sapiens
aggtgaagtatcttt

SEQ ID NO: 602645 - DNA, 15 bp, Homo sapiens
ggtgaagtatctttt

SEQ ID NO: 602646 - DNA, 15 bp, Homo sapiens
gtgaagtatctttta

SEQ ID NO: 602647 - DNA, 15 bp, Homo sapiens
tgaagtatcttttaa

SEQ ID NO: 602648 - DNA, 15 bp, Homo sapiens
gaagtatcttttaaa

SEQ ID NO: 602649 - DNA, 15 bp, Homo sapiens
aagtatcttttaaaa

SEQ ID NO: 602650 - DNA, 15 bp, Homo sapiens
agtatcttttaaaat

SEQ ID NO: 602651 - DNA, 15 bp, Homo sapiens
gtatcttttaaaatg

SEQ ID NO: 602652 - DNA, 15 bp, Homo sapiens
tatcttttaaaatgc

SEQ ID NO: 602653 - DNA, 15 bp, Homo sapiens
atcttttaaaatgca

SEQ ID NO: 602654 - DNA, 15 bp, Homo sapiens
tcttttaaaatgcag

SEQ ID NO: 602655 - DNA, 15 bp, Homo sapiens
cttttaaaatgcagg

SEQ ID NO: 602656 - DNA, 15 bp, Homo sapiens
ttttaaaatgcaggt

SEQ ID NO: 602657 - DNA, 15 bp, Homo sapiens
tttaaaatgcaggtt

SEQ ID NO: 602658 - DNA, 15 bp, Homo sapiens
ttaaaatgcaggttc

SEQ ID NO: 602659 - DNA, 15 bp, Homo sapiens
taaaatgcaggttct

SEQ ID NO: 602660 - DNA, 15 bp, Homo sapiens
aaaatgcaggttctt

SEQ ID NO: 602661 - DNA, 15 bp, Homo sapiens
aaatgcaggttcttc

SEQ ID NO: 602662 - DNA, 15 bp, Homo sapiens
aatgcaggttcttcc

SEQ ID NO: 602663 - DNA, 15 bp, Homo sapiens
atgcaggttcttcca

SEQ ID NO: 602664 - DNA, 15 bp, Homo sapiens
tgcaggttcttccag

SEQ ID NO: 602665 - DNA, 15 bp, Homo sapiens
gcaggttcttccaga

SEQ ID NO: 602666 - DNA, 15 bp, Homo sapiens
caggttcttccagaa

SEQ ID NO: 602667 - DNA, 15 bp, Homo sapiens
aggttcttccagaag

SEQ ID NO: 602668 - DNA, 15 bp, Homo sapiens
ggttcttccagaagg

SEQ ID NO: 602669 - DNA, 15 bp, Homo sapiens
gttcttccagaagga

SEQ ID NO: 602670 - DNA, 15 bp, Homo sapiens
ttcttccagaaggag

SEQ ID NO: 602671 - DNA, 15 bp, Homo sapiens
tcttccagaaggagt

SEQ ID NO: 602672 - DNA, 15 bp, Homo sapiens
cttccagaaggagtc

SEQ ID NO: 602673 - DNA, 15 bp, Homo sapiens
ttccagaaggagtca

SEQ ID NO: 602674 - DNA, 15 bp, Homo sapiens
tccagaaggagtcat

SEQ ID NO: 602675 - DNA, 15 bp, Homo sapiens
ccagaaggagtcatg

SEQ ID NO: 602676 - DNA, 15 bp, Homo sapiens
cagaaggagtcatgc

SEQ ID NO: 602677 - DNA, 15 bp, Homo sapiens
agaaggagtcatgct

SEQ ID NO: 602678 - DNA, 15 bp, Homo sapiens
gaaggagtcatgctg

SEQ ID NO: 602679 - DNA, 15 bp, Homo sapiens
aaggagtcatgctgc

SEQ ID NO: 602680 - DNA, 15 bp, Homo sapiens
aggagtcatgctgca

SEQ ID NO: 602681 - DNA, 15 bp, Homo sapiens
ggagtcatgctgcaa

SEQ ID NO: 602682 - DNA, 15 bp, Homo sapiens
gagtcatgctgcaag

SEQ ID NO: 602683 - DNA, 15 bp, Homo sapiens
agtcatgctgcaagc

SEQ ID NO: 602684 - DNA, 15 bp, Homo sapiens
gtcatgctgcaagct

SEQ ID NO: 602685 - DNA, 15 bp, Homo sapiens
tcatgctgcaagctg

SEQ ID NO: 602686 - DNA, 15 bp, Homo sapiens
catgctgcaagctga

SEQ ID NO: 602687 - DNA, 15 bp, Homo sapiens
atgctgcaagctgac

SEQ ID NO: 602688 - DNA, 15 bp, Homo sapiens
tgctgcaagctgact

SEQ ID NO: 602689 - DNA, 15 bp, Homo sapiens
gctgcaagctgactt

SEQ ID NO: 602690 - DNA, 15 bp, Homo sapiens
ctgcaagctgacttg

SEQ ID NO: 602691 - DNA, 15 bp, Homo sapiens
tgcaagctgacttgc

SEQ ID NO: 602692 - DNA, 15 bp, Homo sapiens
gcaagctgacttgcc

SEQ ID NO: 602693 - DNA, 15 bp, Homo sapiens
caagctgacttgccc

SEQ ID NO: 602694 - DNA, 15 bp, Homo sapiens
aagctgacttgcccc

SEQ ID NO: 602695 - DNA, 15 bp, Homo sapiens
agctgacttgcccca

SEQ ID NO: 602696 - DNA, 15 bp, Homo sapiens
gctgacttgccccac

SEQ ID NO: 602697 - DNA, 15 bp, Homo sapiens
ctgacttgccccact

SEQ ID NO: 602698 - DNA, 15 bp, Homo sapiens
tgacttgccccactg

SEQ ID NO: 602699 - DNA, 15 bp, Homo sapiens
gacttgccccactgt

SEQ ID NO: 602700 - DNA, 15 bp, Homo sapiens
acttgccccactgtg

SEQ ID NO: 602701 - DNA, 15 bp, Homo sapiens
cttgccccactgtgt

SEQ ID NO: 602702 - DNA, 15 bp, Homo sapiens
ttgccccactgtgtt

SEQ ID NO: 602703 - DNA, 15 bp, Homo sapiens
tgccccactgtgtta

SEQ ID NO: 602704 - DNA, 15 bp, Homo sapiens
gccccactgtgttac

SEQ ID NO: 602705 - DNA, 15 bp, Homo sapiens
ccccactgtgttacc

SEQ ID NO: 602706 - DNA, 15 bp, Homo sapiens
cccactgtgttacca

SEQ ID NO: 602707 - DNA, 15 bp, Homo sapiens
ccactgtgttaccag

SEQ ID NO: 602708 - DNA, 15 bp, Homo sapiens
cactgtgttaccaga

SEQ ID NO: 602709 - DNA, 15 bp, Homo sapiens
actgtgttaccagat

SEQ ID NO: 602710 - DNA, 15 bp, Homo sapiens
ctgtgttaccagata

SEQ ID NO: 602711 - DNA, 15 bp, Homo sapiens
tgtgttaccagataa

SEQ ID NO: 602712 - DNA, 15 bp, Homo sapiens
gtgttaccagataat

SEQ ID NO: 602713 - DNA, 15 bp, Homo sapiens
tgttaccagataatt

SEQ ID NO: 602714 - DNA, 15 bp, Homo sapiens
gttaccagataattt

SEQ ID NO: 602715 - DNA, 15 bp, Homo sapiens
ttaccagataatttc

SEQ ID NO: 602716 - DNA, 15 bp, Homo sapiens
taccagataatttct

SEQ ID NO: 602717 - DNA, 15 bp, Homo sapiens
accagataatttctg

SEQ ID NO: 602718 - DNA, 15 bp, Homo sapiens
ccagataatttctgt

SEQ ID NO: 602719 - DNA, 15 bp, Homo sapiens
cagataatttctgtg

SEQ ID NO: 602720 - DNA, 15 bp, Homo sapiens
agataatttctgtgt

SEQ ID NO: 602721 - DNA, 15 bp, Homo sapiens
gataatttctgtgtc

SEQ ID NO: 602722 - DNA, 15 bp, Homo sapiens
ataatttctgtgtct

SEQ ID NO: 602723 - DNA, 15 bp, Homo sapiens
taatttctgtgtctt

SEQ ID NO: 602724 - DNA, 15 bp, Homo sapiens
aatttctgtgtcttg

SEQ ID NO: 602725 - DNA, 15 bp, Homo sapiens
atttctgtgtcttga

SEQ ID NO: 602726 - DNA, 15 bp, Homo sapiens
tttctgtgtcttgaa

SEQ ID NO: 602727 - DNA, 15 bp, Homo sapiens
ttctgtgtcttgaag

SEQ ID NO: 602728 - DNA, 15 bp, Homo sapiens
tctgtgtcttgaagg

SEQ ID NO: 602729 - DNA, 15 bp, Homo sapiens
ctgtgtcttgaaggg

SEQ ID NO: 602730 - DNA, 15 bp, Homo sapiens
tgtgtcttgaagggg

SEQ ID NO: 602731 - DNA, 15 bp, Homo sapiens
gtgtcttgaaggggg

SEQ ID NO: 602732 - DNA, 15 bp, Homo sapiens
tgtcttgaaggggga

SEQ ID NO: 602733 - DNA, 15 bp, Homo sapiens
gtcttgaagggggac

SEQ ID NO: 602734 - DNA, 15 bp, Homo sapiens
tcttgaagggggacc

SEQ ID NO: 602735 - DNA, 15 bp, Homo sapiens
cttgaagggggacct

SEQ ID NO: 602736 - DNA, 15 bp, Homo sapiens
ttgaagggggacctg

SEQ ID NO: 602737 - DNA, 15 bp, Homo sapiens
tgaagggggacctgg

SEQ ID NO: 602738 - DNA, 15 bp, Homo sapiens
gaagggggacctggt

SEQ ID NO: 602739 - DNA, 15 bp, Homo sapiens
aagggggacctggtt

SEQ ID NO: 602740 - DNA, 15 bp, Homo sapiens
agggggacctggttc

SEQ ID NO: 602741 - DNA, 15 bp, Homo sapiens
gggggacctggttca

SEQ ID NO: 602742 - DNA, 15 bp, Homo sapiens
ggggacctggttcag

SEQ ID NO: 602743 - DNA, 15 bp, Homo sapiens
gggacctggttcagg

SEQ ID NO: 602744 - DNA, 15 bp, Homo sapiens
ggacctggttcaggg

SEQ ID NO: 602745 - DNA, 15 bp, Homo sapiens
gacctggttcagggt

SEQ ID NO: 602746 - DNA, 15 bp, Homo sapiens
acctggttcagggtt

SEQ ID NO: 602747 - DNA, 15 bp, Homo sapiens
cctggttcagggttt

SEQ ID NO: 602748 - DNA, 15 bp, Homo sapiens
ctggttcagggtttg

SEQ ID NO: 602749 - DNA, 15 bp, Homo sapiens
tggttcagggtttgt

SEQ ID NO: 602750 - DNA, 15 bp, Homo sapiens
ggttcagggtttgtt

SEQ ID NO: 602751 - DNA, 15 bp, Homo sapiens
gttcagggtttgttt

SEQ ID NO: 602752 - DNA, 15 bp, Homo sapiens
ttcagggtttgtttg

SEQ ID NO: 602753 - DNA, 15 bp, Homo sapiens
tcagggtttgtttgg

SEQ ID NO: 602754 - DNA, 15 bp, Homo sapiens
cagggtttgtttggg

SEQ ID NO: 602755 - DNA, 15 bp, Homo sapiens
agggtttgtttggga

SEQ ID NO: 602756 - DNA, 15 bp, Homo sapiens
gggtttgtttgggaa

SEQ ID NO: 602757 - DNA, 15 bp, Homo sapiens
ggtttgtttgggaaa

SEQ ID NO: 602758 - DNA, 15 bp, Homo sapiens
gtttgtttgggaaag

SEQ ID NO: 602759 - DNA, 15 bp, Homo sapiens
tttgtttgggaaagg

SEQ ID NO: 602760 - DNA, 15 bp, Homo sapiens
ttgtttgggaaagga

SEQ ID NO: 602761 - DNA, 15 bp, Homo sapiens
tgtttgggaaaggag

SEQ ID NO: 602762 - DNA, 15 bp, Homo sapiens
gtttgggaaaggagc

SEQ ID NO: 602763 - DNA, 15 bp, Homo sapiens
tttgggaaaggagct

SEQ ID NO: 602764 - DNA, 15 bp, Homo sapiens
ttgggaaaggagctg

SEQ ID NO: 602765 - DNA, 15 bp, Homo sapiens
tgggaaaggagctgg

SEQ ID NO: 602766 - DNA, 15 bp, Homo sapiens
gggaaaggagctggg

SEQ ID NO: 602767 - DNA, 15 bp, Homo sapiens
ggaaaggagctggga

SEQ ID NO: 602768 - DNA, 15 bp, Homo sapiens
gaaaggagctgggaa

SEQ ID NO: 602769 - DNA, 15 bp, Homo sapiens
aaaggagctgggaag

SEQ ID NO: 602770 - DNA, 15 bp, Homo sapiens
aaggagctgggaagg

SEQ ID NO: 602771 - DNA, 15 bp, Homo sapiens
aggagctgggaagga

SEQ ID NO: 602772 - DNA, 15 bp, Homo sapiens
ggagctgggaaggag

SEQ ID NO: 602773 - DNA, 15 bp, Homo sapiens
gagctgggaaggagg

SEQ ID NO: 602774 - DNA, 15 bp, Homo sapiens
agctgggaaggagga

SEQ ID NO: 602775 - DNA, 15 bp, Homo sapiens
gctgggaaggaggag

SEQ ID NO: 602776 - DNA, 15 bp, Homo sapiens
ctgggaaggaggaga

SEQ ID NO: 602777 - DNA, 15 bp, Homo sapiens
tgggaaggaggagaa

SEQ ID NO: 602778 - DNA, 15 bp, Homo sapiens
gggaaggaggagaag

SEQ ID NO: 602779 - DNA, 15 bp, Homo sapiens
ggaaggaggagaaga

SEQ ID NO: 602780 - DNA, 15 bp, Homo sapiens
gaaggaggagaagaa

SEQ ID NO: 602781 - DNA, 15 bp, Homo sapiens
aaggaggagaagaaa

SEQ ID NO: 602782 - DNA, 15 bp, Homo sapiens
aggaggagaagaaag

SEQ ID NO: 602783 - DNA, 15 bp, Homo sapiens
ggaggagaagaaaga

SEQ ID NO: 602784 - DNA, 15 bp, Homo sapiens
gaggagaagaaagag

SEQ ID NO: 602785 - DNA, 15 bp, Homo sapiens
aggagaagaaagagc

SEQ ID NO: 602786 - DNA, 15 bp, Homo sapiens
ggagaagaaagagca

SEQ ID NO: 602787 - DNA, 15 bp, Homo sapiens
gagaagaaagagcag

SEQ ID NO: 602788 - DNA, 15 bp, Homo sapiens
agaagaaagagcagg

SEQ ID NO: 602789 - DNA, 15 bp, Homo sapiens
gaagaaagagcaggg

SEQ ID NO: 602790 - DNA, 15 bp, Homo sapiens
aagaaagagcaggga

SEQ ID NO: 602791 - DNA, 15 bp, Homo sapiens
agaaagagcagggag

SEQ ID NO: 602792 - DNA, 15 bp, Homo sapiens
gaaagagcagggagg

SEQ ID NO: 602793 - DNA, 15 bp, Homo sapiens
aaagagcagggaggc

SEQ ID NO: 602794 - DNA, 15 bp, Homo sapiens
aagagcagggaggct

SEQ ID NO: 602795 - DNA, 15 bp, Homo sapiens
agagcagggaggctg

SEQ ID NO: 602796 - DNA, 15 bp, Homo sapiens
gagcagggaggctgt

SEQ ID NO: 602797 - DNA, 15 bp, Homo sapiens
agcagggaggctgtc

SEQ ID NO: 602798 - DNA, 15 bp, Homo sapiens
gcagggaggctgtcc

SEQ ID NO: 602799 - DNA, 15 bp, Homo sapiens
cagggaggctgtcct

SEQ ID NO: 602800 - DNA, 15 bp, Homo sapiens
agggaggctgtcctg

SEQ ID NO: 602801 - DNA, 15 bp, Homo sapiens
gggaggctgtcctgg

SEQ ID NO: 602802 - DNA, 15 bp, Homo sapiens
ggaggctgtcctggt

SEQ ID NO: 602803 - DNA, 15 bp, Homo sapiens
gaggctgtcctggtg

SEQ ID NO: 602804 - DNA, 15 bp, Homo sapiens
aggctgtcctggtgt

SEQ ID NO: 602805 - DNA, 15 bp, Homo sapiens
ggctgtcctggtgtc

SEQ ID NO: 602806 - DNA, 15 bp, Homo sapiens
gctgtcctggtgtct

SEQ ID NO: 602807 - DNA, 15 bp, Homo sapiens
ctgtcctggtgtctg

SEQ ID NO: 602808 - DNA, 15 bp, Homo sapiens
tgtcctggtgtctgg

SEQ ID NO: 602809 - DNA, 15 bp, Homo sapiens
gtcctggtgtctggg

SEQ ID NO: 602810 - DNA, 15 bp, Homo sapiens
tcctggtgtctggga

SEQ ID NO: 602811 - DNA, 15 bp, Homo sapiens
cctggtgtctgggat

SEQ ID NO: 602812 - DNA, 15 bp, Homo sapiens
ctggtgtctgggatc

SEQ ID NO: 602813 - DNA, 15 bp, Homo sapiens
tggtgtctgggatca

SEQ ID NO: 602814 - DNA, 15 bp, Homo sapiens
ggtgtctgggatcag

SEQ ID NO: 602815 - DNA, 15 bp, Homo sapiens
gtgtctgggatcagg

SEQ ID NO: 602816 - DNA, 15 bp, Homo sapiens
tgtctgggatcaggg

SEQ ID NO: 602817 - DNA, 15 bp, Homo sapiens
gtctgggatcagggt

SEQ ID NO: 602818 - DNA, 15 bp, Homo sapiens
tctgggatcagggtt

SEQ ID NO: 602819 - DNA, 15 bp, Homo sapiens
ctgggatcagggtta

SEQ ID NO: 602820 - DNA, 15 bp, Homo sapiens
tgggatcagggttag

SEQ ID NO: 602821 - DNA, 15 bp, Homo sapiens
gggatcagggttagg

SEQ ID NO: 602822 - DNA, 15 bp, Homo sapiens
ggatcagggttaggg

SEQ ID NO: 602823 - DNA, 15 bp, Homo sapiens
gatcagggttagggg

SEQ ID NO: 602824 - DNA, 15 bp, Homo sapiens
atcagggttagggga

SEQ ID NO: 602825 - DNA, 15 bp, Homo sapiens
tcagggttaggggag

SEQ ID NO: 602826 - DNA, 15 bp, Homo sapiens
cagggttaggggagg

SEQ ID NO: 602827 - DNA, 15 bp, Homo sapiens
agggttaggggaggg

SEQ ID NO: 602828 - DNA, 15 bp, Homo sapiens
gggttaggggagggc

SEQ ID NO: 602829 - DNA, 15 bp, Homo sapiens
ggttaggggagggca

SEQ ID NO: 602830 - DNA, 15 bp, Homo sapiens
gttaggggagggcaa

SEQ ID NO: 602831 - DNA, 15 bp, Homo sapiens
ttaggggagggcaag

SEQ ID NO: 602832 - DNA, 15 bp, Homo sapiens
taggggagggcaagg

SEQ ID NO: 602833 - DNA, 15 bp, Homo sapiens
aggggagggcaaggt

SEQ ID NO: 602834 - DNA, 15 bp, Homo sapiens
ggggagggcaaggtc

SEQ ID NO: 602835 - DNA, 15 bp, Homo sapiens
gggagggcaaggtcc

SEQ ID NO: 602836 - DNA, 15 bp, Homo sapiens
ggagggcaaggtcca

SEQ ID NO: 602837 - DNA, 15 bp, Homo sapiens
gagggcaaggtccat

SEQ ID NO: 602838 - DNA, 15 bp, Homo sapiens
agggcaaggtccatt

SEQ ID NO: 602839 - DNA, 15 bp, Homo sapiens
gggcaaggtccattg

SEQ ID NO: 602840 - DNA, 15 bp, Homo sapiens
ggcaaggtccattgg

SEQ ID NO: 602841 - DNA, 15 bp, Homo sapiens
gcaaggtccattggc

SEQ ID NO: 602842 - DNA, 15 bp, Homo sapiens
caaggtccattggca

SEQ ID NO: 602843 - DNA, 15 bp, Homo sapiens
aaggtccattggcag

SEQ ID NO: 602844 - DNA, 15 bp, Homo sapiens
aggtccattggcagg

SEQ ID NO: 602845 - DNA, 15 bp, Homo sapiens
ggtccattggcaggc

SEQ ID NO: 602846 - DNA, 15 bp, Homo sapiens
gtccattggcaggcc

SEQ ID NO: 602847 - DNA, 15 bp, Homo sapiens
tccattggcaggcct

SEQ ID NO: 602848 - DNA, 15 bp, Homo sapiens
ccattggcaggcctt

SEQ ID NO: 602849 - DNA, 15 bp, Homo sapiens
cattggcaggccttg

SEQ ID NO: 602850 - DNA, 15 bp, Homo sapiens
attggcaggccttgc

SEQ ID NO: 602851 - DNA, 15 bp, Homo sapiens
ttggcaggccttgct

SEQ ID NO: 602852 - DNA, 15 bp, Homo sapiens
tggcaggccttgctg

SEQ ID NO: 602853 - DNA, 15 bp, Homo sapiens
ggcaggccttgctga

SEQ ID NO: 602854 - DNA, 15 bp, Homo sapiens
gcaggccttgctgac

SEQ ID NO: 602855 - DNA, 15 bp, Homo sapiens
caggccttgctgaca

SEQ ID NO: 602856 - DNA, 15 bp, Homo sapiens
aggccttgctgacag

SEQ ID NO: 602857 - DNA, 15 bp, Homo sapiens
ggccttgctgacagt

SEQ ID NO: 602858 - DNA, 15 bp, Homo sapiens
gccttgctgacagtg

SEQ ID NO: 602859 - DNA, 15 bp, Homo sapiens
ccttgctgacagtgc

SEQ ID NO: 602860 - DNA, 15 bp, Homo sapiens
cttgctgacagtgct

SEQ ID NO: 602861 - DNA, 15 bp, Homo sapiens
ttgctgacagtgctg

SEQ ID NO: 602862 - DNA, 15 bp, Homo sapiens
tgctgacagtgctgg

SEQ ID NO: 602863 - DNA, 15 bp, Homo sapiens
gctgacagtgctgga

SEQ ID NO: 602864 - DNA, 15 bp, Homo sapiens
ctgacagtgctggaa

SEQ ID NO: 602865 - DNA, 15 bp, Homo sapiens
tgacagtgctggaag

SEQ ID NO: 602866 - DNA, 15 bp, Homo sapiens
gacagtgctggaaga

SEQ ID NO: 602867 - DNA, 15 bp, Homo sapiens
acagtgctggaagag

SEQ ID NO: 602868 - DNA, 15 bp, Homo sapiens
cagtgctggaagagg

SEQ ID NO: 602869 - DNA, 15 bp, Homo sapiens
agtgctggaagaggc

SEQ ID NO: 602870 - DNA, 15 bp, Homo sapiens
gtgctggaagaggct

SEQ ID NO: 602871 - DNA, 15 bp, Homo sapiens
tgctggaagaggctg

SEQ ID NO: 602872 - DNA, 15 bp, Homo sapiens
gctggaagaggctgt

SEQ ID NO: 602873 - DNA, 15 bp, Homo sapiens
ctggaagaggctgtc

SEQ ID NO: 602874 - DNA, 15 bp, Homo sapiens
tggaagaggctgtca

SEQ ID NO: 602875 - DNA, 15 bp, Homo sapiens
ggaagaggctgtcac

SEQ ID NO: 602876 - DNA, 15 bp, Homo sapiens
gaagaggctgtcacc

SEQ ID NO: 602877 - DNA, 15 bp, Homo sapiens
aagaggctgtcacca

SEQ ID NO: 602878 - DNA, 15 bp, Homo sapiens
agaggctgtcaccag

SEQ ID NO: 602879 - DNA, 15 bp, Homo sapiens
gaggctgtcaccaga

SEQ ID NO: 602880 - DNA, 15 bp, Homo sapiens
aggctgtcaccagac

SEQ ID NO: 602881 - DNA, 15 bp, Homo sapiens
ggctgtcaccagact

SEQ ID NO: 602882 - DNA, 15 bp, Homo sapiens
gctgtcaccagactc

SEQ ID NO: 602883 - DNA, 15 bp, Homo sapiens
ctgtcaccagactct

SEQ ID NO: 602884 - DNA, 15 bp, Homo sapiens
tgtcaccagactctg

SEQ ID NO: 602885 - DNA, 15 bp, Homo sapiens
gtcaccagactctgc

SEQ ID NO: 602886 - DNA, 15 bp, Homo sapiens
tcaccagactctgca

SEQ ID NO: 602887 - DNA, 15 bp, Homo sapiens
caccagactctgcag

SEQ ID NO: 602888 - DNA, 15 bp, Homo sapiens
accagactctgcagt

SEQ ID NO: 602889 - DNA, 15 bp, Homo sapiens
ccagactctgcagta

SEQ ID NO: 602890 - DNA, 15 bp, Homo sapiens
cagactctgcagtaa

SEQ ID NO: 602891 - DNA, 15 bp, Homo sapiens
agactctgcagtaaa

SEQ ID NO: 602892 - DNA, 15 bp, Homo sapiens
gactctgcagtaaag

SEQ ID NO: 602893 - DNA, 15 bp, Homo sapiens
actctgcagtaaagt

SEQ ID NO: 602894 - DNA, 15 bp, Homo sapiens
ctctgcagtaaagtt

SEQ ID NO: 602895 - DNA, 15 bp, Homo sapiens
tctgcagtaaagttg

SEQ ID NO: 602896 - DNA, 15 bp, Homo sapiens
ctgcagtaaagttgt

SEQ ID NO: 602897 - DNA, 15 bp, Homo sapiens
tgcagtaaagttgtc

SEQ ID NO: 602898 - DNA, 15 bp, Homo sapiens
gcagtaaagttgtcc

SEQ ID NO: 602899 - DNA, 15 bp, Homo sapiens
cagtaaagttgtccc

SEQ ID NO: 602900 - DNA, 15 bp, Homo sapiens
agtaaagttgtccct

SEQ ID NO: 602901 - DNA, 15 bp, Homo sapiens
gtaaagttgtccctg

SEQ ID NO: 602902 - DNA, 15 bp, Homo sapiens
taaagttgtccctgc

SEQ ID NO: 602903 - DNA, 15 bp, Homo sapiens
aaagttgtccctgcc

SEQ ID NO: 602904 - DNA, 15 bp, Homo sapiens
aagttgtccctgcca

SEQ ID NO: 602905 - DNA, 15 bp, Homo sapiens
agttgtccctgccac

SEQ ID NO: 602906 - DNA, 15 bp, Homo sapiens
gttgtccctgccaca

SEQ ID NO: 602907 - DNA, 15 bp, Homo sapiens
ttgtccctgccacat

SEQ ID NO: 602908 - DNA, 15 bp, Homo sapiens
tgtccctgccacatt

SEQ ID NO: 602909 - DNA, 15 bp, Homo sapiens
gtccctgccacattt

SEQ ID NO: 602910 - DNA, 15 bp, Homo sapiens
tccctgccacatttt

SEQ ID NO: 602911 - DNA, 15 bp, Homo sapiens
ccctgccacattttt

SEQ ID NO: 602912 - DNA, 15 bp, Homo sapiens
cctgccacatttttt

SEQ ID NO: 602913 - DNA, 15 bp, Homo sapiens
ctgccacattttttg

SEQ ID NO: 602914 - DNA, 15 bp, Homo sapiens
tgccacattttttgc

SEQ ID NO: 602915 - DNA, 15 bp, Homo sapiens
gccacattttttgct

SEQ ID NO: 602916 - DNA, 15 bp, Homo sapiens
ccacattttttgcta

SEQ ID NO: 602917 - DNA, 15 bp, Homo sapiens
cacattttttgctag

SEQ ID NO: 602918 - DNA, 15 bp, Homo sapiens
acattttttgctagg

SEQ ID NO: 602919 - DNA, 15 bp, Homo sapiens
cattttttgctaggg

SEQ ID NO: 602920 - DNA, 15 bp, Homo sapiens
attttttgctagggt

SEQ ID NO: 602921 - DNA, 15 bp, Homo sapiens
ttttttgctagggtg

SEQ ID NO: 602922 - DNA, 15 bp, Homo sapiens
tttttgctagggtga

SEQ ID NO: 602923 - DNA, 15 bp, Homo sapiens
ttttgctagggtgaa

SEQ ID NO: 602924 - DNA, 15 bp, Homo sapiens
tttgctagggtgaaa

SEQ ID NO: 602925 - DNA, 15 bp, Homo sapiens
ttgctagggtgaaaa

SEQ ID NO: 602926 - DNA, 15 bp, Homo sapiens
tgctagggtgaaaaa

SEQ ID NO: 602927 - DNA, 15 bp, Homo sapiens
gctagggtgaaaaat

SEQ ID NO: 602928 - DNA, 15 bp, Homo sapiens
ctagggtgaaaaata

SEQ ID NO: 602929 - DNA, 15 bp, Homo sapiens
tagggtgaaaaatag

SEQ ID NO: 602930 - DNA, 15 bp, Homo sapiens
agggtgaaaaataga

SEQ ID NO: 602931 - DNA, 15 bp, Homo sapiens
gggtgaaaaatagaa

SEQ ID NO: 602932 - DNA, 15 bp, Homo sapiens
ggtgaaaaatagaac

SEQ ID NO: 602933 - DNA, 15 bp, Homo sapiens
gtgaaaaatagaact

SEQ ID NO: 602934 - DNA, 15 bp, Homo sapiens
tgaaaaatagaactc

SEQ ID NO: 602935 - DNA, 15 bp, Homo sapiens
gaaaaatagaactcc

SEQ ID NO: 602936 - DNA, 15 bp, Homo sapiens
aaaaatagaactccc

SEQ ID NO: 602937 - DNA, 15 bp, Homo sapiens
aaaatagaactccca

SEQ ID NO: 602938 - DNA, 15 bp, Homo sapiens
aaatagaactcccag

SEQ ID NO: 602939 - DNA, 15 bp, Homo sapiens
aatagaactcccaga

SEQ ID NO: 602940 - DNA, 15 bp, Homo sapiens
atagaactcccagac

SEQ ID NO: 602941 - DNA, 15 bp, Homo sapiens
tagaactcccagact

SEQ ID NO: 602942 - DNA, 15 bp, Homo sapiens
agaactcccagacta

SEQ ID NO: 602943 - DNA, 15 bp, Homo sapiens
gaactcccagactag

SEQ ID NO: 602944 - DNA, 15 bp, Homo sapiens
aactcccagactaga

SEQ ID NO: 602945 - DNA, 15 bp, Homo sapiens
actcccagactagat

SEQ ID NO: 602946 - DNA, 15 bp, Homo sapiens
ctcccagactagatg

SEQ ID NO: 602947 - DNA, 15 bp, Homo sapiens
tcccagactagatgg

SEQ ID NO: 602948 - DNA, 15 bp, Homo sapiens
cccagactagatggt

SEQ ID NO: 602949 - DNA, 15 bp, Homo sapiens
ccagactagatggtt

SEQ ID NO: 602950 - DNA, 15 bp, Homo sapiens
cagactagatggttg

SEQ ID NO: 602951 - DNA, 15 bp, Homo sapiens
agactagatggttgc

SEQ ID NO: 602952 - DNA, 15 bp, Homo sapiens
gactagatggttgcc

SEQ ID NO: 602953 - DNA, 15 bp, Homo sapiens
actagatggttgccc

SEQ ID NO: 602954 - DNA, 15 bp, Homo sapiens
ctagatggttgcccc

SEQ ID NO: 602955 - DNA, 15 bp, Homo sapiens
tagatggttgcccct

SEQ ID NO: 602956 - DNA, 15 bp, Homo sapiens
agatggttgcccctg

SEQ ID NO: 602957 - DNA, 15 bp, Homo sapiens
gatggttgcccctgt

SEQ ID NO: 602958 - DNA, 15 bp, Homo sapiens
atggttgcccctgtc

SEQ ID NO: 602959 - DNA, 15 bp, Homo sapiens
tggttgcccctgtcc

SEQ ID NO: 602960 - DNA, 15 bp, Homo sapiens
ggttgcccctgtcct

SEQ ID NO: 602961 - DNA, 15 bp, Homo sapiens
gttgcccctgtcctg

SEQ ID NO: 602962 - DNA, 15 bp, Homo sapiens
ttgcccctgtcctgc

SEQ ID NO: 602963 - DNA, 15 bp, Homo sapiens
tgcccctgtcctgca

SEQ ID NO: 602964 - DNA, 15 bp, Homo sapiens
gcccctgtcctgcac

SEQ ID NO: 602965 - DNA, 15 bp, Homo sapiens
cccctgtcctgcacc

SEQ ID NO: 602966 - DNA, 15 bp, Homo sapiens
ccctgtcctgcaccc

SEQ ID NO: 602967 - DNA, 15 bp, Homo sapiens
cctgtcctgcacccc

SEQ ID NO: 602968 - DNA, 15 bp, Homo sapiens
ctgtcctgcacccct

SEQ ID NO: 602969 - DNA, 15 bp, Homo sapiens
tgtcctgcacccctg

SEQ ID NO: 602970 - DNA, 15 bp, Homo sapiens
gtcctgcacccctga

SEQ ID NO: 602971 - DNA, 15 bp, Homo sapiens
tcctgcacccctgag

SEQ ID NO: 602972 - DNA, 15 bp, Homo sapiens
cctgcacccctgagg

SEQ ID NO: 602973 - DNA, 15 bp, Homo sapiens
ctgcacccctgaggg

SEQ ID NO: 602974 - DNA, 15 bp, Homo sapiens
tgcacccctgagggt

SEQ ID NO: 602975 - DNA, 15 bp, Homo sapiens
gcacccctgagggtc

SEQ ID NO: 602976 - DNA, 15 bp, Homo sapiens
cacccctgagggtca

SEQ ID NO: 602977 - DNA, 15 bp, Homo sapiens
acccctgagggtcag

SEQ ID NO: 602978 - DNA, 15 bp, Homo sapiens
cccctgagggtcagg

SEQ ID NO: 602979 - DNA, 15 bp, Homo sapiens
ccctgagggtcaggc

SEQ ID NO: 602980 - DNA, 15 bp, Homo sapiens
cctgagggtcaggcc

SEQ ID NO: 602981 - DNA, 15 bp, Homo sapiens
ctgagggtcaggccc

SEQ ID NO: 602982 - DNA, 15 bp, Homo sapiens
tgagggtcaggccct

SEQ ID NO: 602983 - DNA, 15 bp, Homo sapiens
gagggtcaggccctg

SEQ ID NO: 602984 - DNA, 15 bp, Homo sapiens
agggtcaggccctgg

SEQ ID NO: 602985 - DNA, 15 bp, Homo sapiens
gggtcaggccctggg

SEQ ID NO: 602986 - DNA, 15 bp, Homo sapiens
ggtcaggccctgggg

SEQ ID NO: 602987 - DNA, 15 bp, Homo sapiens
gtcaggccctggggc

SEQ ID NO: 602988 - DNA, 15 bp, Homo sapiens
tcaggccctggggct

SEQ ID NO: 602989 - DNA, 15 bp, Homo sapiens
caggccctggggctg

SEQ ID NO: 602990 - DNA, 15 bp, Homo sapiens
aggccctggggctgc

SEQ ID NO: 602991 - DNA, 15 bp, Homo sapiens
ggccctggggctgcc

SEQ ID NO: 602992 - DNA, 15 bp, Homo sapiens
gccctggggctgcca

SEQ ID NO: 602993 - DNA, 15 bp, Homo sapiens
ccctggggctgccac

SEQ ID NO: 602994 - DNA, 15 bp, Homo sapiens
cctggggctgccaca

SEQ ID NO: 602995 - DNA, 15 bp, Homo sapiens
ctggggctgccacag

SEQ ID NO: 602996 - DNA, 15 bp, Homo sapiens
tggggctgccacagt

SEQ ID NO: 602997 - DNA, 15 bp, Homo sapiens
ggggctgccacagtc

SEQ ID NO: 602998 - DNA, 15 bp, Homo sapiens
gggctgccacagtcc

SEQ ID NO: 602999 - DNA, 15 bp, Homo sapiens
ggctgccacagtccc

SEQ ID NO: 603000 - DNA, 15 bp, Homo sapiens
gctgccacagtcccc

SEQ ID NO: 603001 - DNA, 15 bp, Homo sapiens
ctgccacagtcccca

SEQ ID NO: 603002 - DNA, 15 bp, Homo sapiens
tgccacagtccccat

SEQ ID NO: 603003 - DNA, 15 bp, Homo sapiens
gccacagtccccatc

SEQ ID NO: 603004 - DNA, 15 bp, Homo sapiens
ccacagtccccatcg

SEQ ID NO: 603005 - DNA, 15 bp, Homo sapiens
cacagtccccatcgt

SEQ ID NO: 603006 - DNA, 15 bp, Homo sapiens
acagtccccatcgtg

SEQ ID NO: 603007 - DNA, 15 bp, Homo sapiens
cagtccccatcgtgt

SEQ ID NO: 603008 - DNA, 15 bp, Homo sapiens
agtccccatcgtgta

SEQ ID NO: 603009 - DNA, 15 bp, Homo sapiens
gtccccatcgtgtac

SEQ ID NO: 603010 - DNA, 15 bp, Homo sapiens
tccccatcgtgtaca

SEQ ID NO: 603011 - DNA, 15 bp, Homo sapiens
ccccatcgtgtacac

SEQ ID NO: 603012 - DNA, 15 bp, Homo sapiens
cccatcgtgtacaca

SEQ ID NO: 603013 - DNA, 15 bp, Homo sapiens
ccatcgtgtacacac

SEQ ID NO: 603014 - DNA, 15 bp, Homo sapiens
catcgtgtacacaca

SEQ ID NO: 603015 - DNA, 15 bp, Homo sapiens
atcgtgtacacacac

SEQ ID NO: 603016 - DNA, 15 bp, Homo sapiens
tcgtgtacacacaca

SEQ ID NO: 603017 - DNA, 15 bp, Homo sapiens
cgtgtacacacacac

SEQ ID NO: 603018 - DNA, 15 bp, Homo sapiens
gtgtacacacacaca

SEQ ID NO: 603019 - DNA, 15 bp, Homo sapiens
tgtacacacacacac

SEQ ID NO: 603020 - DNA, 15 bp, Homo sapiens
gtacacacacacaca

SEQ ID NO: 603021 - DNA, 15 bp, Homo sapiens
tacacacacacacac

SEQ ID NO: 603022 - DNA, 15 bp, Homo sapiens
acacacacacacaca

SEQ ID NO: 603023 - DNA, 15 bp, Homo sapiens
cacacacacacacac

SEQ ID NO: 603024 - DNA, 15 bp, Homo sapiens
cacacacacacacag

SEQ ID NO: 603025 - DNA, 15 bp, Homo sapiens
acacacacacacaga

SEQ ID NO: 603026 - DNA, 15 bp, Homo sapiens
cacacacacacagac

SEQ ID NO: 603027 - DNA, 15 bp, Homo sapiens
acacacacacagaca

SEQ ID NO: 603028 - DNA, 15 bp, Homo sapiens
cacacacacagacac

SEQ ID NO: 603029 - DNA, 15 bp, Homo sapiens
acacacacagacaca

SEQ ID NO: 603030 - DNA, 15 bp, Homo sapiens
cacacacagacacat

SEQ ID NO: 603031 - DNA, 15 bp, Homo sapiens
acacacagacacata

SEQ ID NO: 603032 - DNA, 15 bp, Homo sapiens
cacacagacacataa

SEQ ID NO: 603033 - DNA, 15 bp, Homo sapiens
acacagacacataac

SEQ ID NO: 603034 - DNA, 15 bp, Homo sapiens
cacagacacataaca

SEQ ID NO: 603035 - DNA, 15 bp, Homo sapiens
acagacacataacac

SEQ ID NO: 603036 - DNA, 15 bp, Homo sapiens
cagacacataacaca

SEQ ID NO: 603037 - DNA, 15 bp, Homo sapiens
agacacataacacac

SEQ ID NO: 603038 - DNA, 15 bp, Homo sapiens
gacacataacacaca

SEQ ID NO: 603039 - DNA, 15 bp, Homo sapiens
acacataacacacac

SEQ ID NO: 603040 - DNA, 15 bp, Homo sapiens
cacataacacacaca

SEQ ID NO: 603041 - DNA, 15 bp, Homo sapiens
acataacacacacac

SEQ ID NO: 603042 - DNA, 15 bp, Homo sapiens
cataacacacacaca

SEQ ID NO: 603043 - DNA, 15 bp, Homo sapiens
ataacacacacacac

SEQ ID NO: 603044 - DNA, 15 bp, Homo sapiens
taacacacacacaca

SEQ ID NO: 603045 - DNA, 15 bp, Homo sapiens
aacacacacacacac

SEQ ID NO: 603046 - DNA, 15 bp, Homo sapiens
acacacacacacacc

SEQ ID NO: 603047 - DNA, 15 bp, Homo sapiens
cacacacacacaccc

SEQ ID NO: 603048 - DNA, 15 bp, Homo sapiens
acacacacacacccc

SEQ ID NO: 603049 - DNA, 15 bp, Homo sapiens
cacacacacacccca

SEQ ID NO: 603050 - DNA, 15 bp, Homo sapiens
acacacacaccccac

SEQ ID NO: 603051 - DNA, 15 bp, Homo sapiens
cacacacaccccaca

SEQ ID NO: 603052 - DNA, 15 bp, Homo sapiens
acacacaccccacat

SEQ ID NO: 603053 - DNA, 15 bp, Homo sapiens
cacacaccccacatt

SEQ ID NO: 603054 - DNA, 15 bp, Homo sapiens
acacaccccacatta

SEQ ID NO: 603055 - DNA, 15 bp, Homo sapiens
cacaccccacattaa

SEQ ID NO: 603056 - DNA, 15 bp, Homo sapiens
acaccccacattaat

SEQ ID NO: 603057 - DNA, 15 bp, Homo sapiens
caccccacattaatg

SEQ ID NO: 603058 - DNA, 15 bp, Homo sapiens
accccacattaatga

SEQ ID NO: 603059 - DNA, 15 bp, Homo sapiens
ccccacattaatgaa

SEQ ID NO: 603060 - DNA, 15 bp, Homo sapiens
cccacattaatgaag

SEQ ID NO: 603061 - DNA, 15 bp, Homo sapiens
ccacattaatgaagc

SEQ ID NO: 603062 - DNA, 15 bp, Homo sapiens
cacattaatgaagcc

SEQ ID NO: 603063 - DNA, 15 bp, Homo sapiens
acattaatgaagcct

SEQ ID NO: 603064 - DNA, 15 bp, Homo sapiens
cattaatgaagcctc

SEQ ID NO: 603065 - DNA, 15 bp, Homo sapiens
attaatgaagcctct

SEQ ID NO: 603066 - DNA, 15 bp, Homo sapiens
ttaatgaagcctctt

SEQ ID NO: 603067 - DNA, 15 bp, Homo sapiens
taatgaagcctcttc

SEQ ID NO: 603068 - DNA, 15 bp, Homo sapiens
aatgaagcctcttct

SEQ ID NO: 603069 - DNA, 15 bp, Homo sapiens
atgaagcctcttctc

SEQ ID NO: 603070 - DNA, 15 bp, Homo sapiens
tgaagcctcttctca

SEQ ID NO: 603071 - DNA, 15 bp, Homo sapiens
gaagcctcttctcag

SEQ ID NO: 603072 - DNA, 15 bp, Homo sapiens
aagcctcttctcagg

SEQ ID NO: 603073 - DNA, 15 bp, Homo sapiens
agcctcttctcagga

SEQ ID NO: 603074 - DNA, 15 bp, Homo sapiens
gcctcttctcaggag

SEQ ID NO: 603075 - DNA, 15 bp, Homo sapiens
cctcttctcaggaga

SEQ ID NO: 603076 - DNA, 15 bp, Homo sapiens
ctcttctcaggagac

SEQ ID NO: 603077 - DNA, 15 bp, Homo sapiens
tcttctcaggagact

SEQ ID NO: 603078 - DNA, 15 bp, Homo sapiens
cttctcaggagactc

SEQ ID NO: 603079 - DNA, 15 bp, Homo sapiens
ttctcaggagactca

SEQ ID NO: 603080 - DNA, 15 bp, Homo sapiens
tctcaggagactcag

SEQ ID NO: 603081 - DNA, 15 bp, Homo sapiens
ctcaggagactcagt

SEQ ID NO: 603082 - DNA, 15 bp, Homo sapiens
tcaggagactcagtt

SEQ ID NO: 603083 - DNA, 15 bp, Homo sapiens
caggagactcagttc

SEQ ID NO: 603084 - DNA, 15 bp, Homo sapiens
aggagactcagttct

SEQ ID NO: 603085 - DNA, 15 bp, Homo sapiens
ggagactcagttctt

SEQ ID NO: 603086 - DNA, 15 bp, Homo sapiens
gagactcagttcttt

SEQ ID NO: 603087 - DNA, 15 bp, Homo sapiens
agactcagttctttt

SEQ ID NO: 603088 - DNA, 15 bp, Homo sapiens
gactcagttcttttt

SEQ ID NO: 603089 - DNA, 15 bp, Homo sapiens
actcagttctttttt

SEQ ID NO: 603090 - DNA, 15 bp, Homo sapiens
ctcagttcttttttt

SEQ ID NO: 603091 - DNA, 15 bp, Homo sapiens
tcagttctttttttt

SEQ ID NO: 603092 - DNA, 15 bp, Homo sapiens
cagttcttttttttt

SEQ ID NO: 603093 - DNA, 15 bp, Homo sapiens
agttctttttttttt

SEQ ID NO: 603094 - DNA, 15 bp, Homo sapiens
gttcttttttttttt

SEQ ID NO: 603095 - DNA, 15 bp, Homo sapiens
ttctttttttttttt

SEQ ID NO: 603096 - DNA, 15 bp, Homo sapiens
tcttttttttttttt

SEQ ID NO: 603097 - DNA, 15 bp, Homo sapiens
ctttttttttttttt

SEQ ID NO: 603098 - DNA, 15 bp, Homo sapiens
ttttttttttttttt

SEQ ID NO: 603099 - DNA, 15 bp, Homo sapiens
ttttttttttttttg

SEQ ID NO: 603100 - DNA, 15 bp, Homo sapiens
tttttttttttttga

SEQ ID NO: 603101 - DNA, 15 bp, Homo sapiens
ttttttttttttgag

SEQ ID NO: 603102 - DNA, 15 bp, Homo sapiens
tttttttttttgagg

SEQ ID NO: 603103 - DNA, 15 bp, Homo sapiens
ttttttttttgaggc

SEQ ID NO: 603104 - DNA, 15 bp, Homo sapiens
tttttttttgaggca

SEQ ID NO: 603105 - DNA, 15 bp, Homo sapiens
ttttttttgaggcag

SEQ ID NO: 603106 - DNA, 15 bp, Homo sapiens
tttttttgaggcaga

SEQ ID NO: 603107 - DNA, 15 bp, Homo sapiens
ttttttgaggcagag

SEQ ID NO: 603108 - DNA, 15 bp, Homo sapiens
tttttgaggcagagt

SEQ ID NO: 603109 - DNA, 15 bp, Homo sapiens
ttttgaggcagagtc

SEQ ID NO: 603110 - DNA, 15 bp, Homo sapiens
tttgaggcagagtct

SEQ ID NO: 603111 - DNA, 15 bp, Homo sapiens
ttgaggcagagtctc

SEQ ID NO: 603112 - DNA, 15 bp, Homo sapiens
tgaggcagagtctca

SEQ ID NO: 603113 - DNA, 15 bp, Homo sapiens
gaggcagagtctcac

SEQ ID NO: 603114 - DNA, 15 bp, Homo sapiens
aggcagagtctcact

SEQ ID NO: 603115 - DNA, 15 bp, Homo sapiens
ggcagagtctcactc

SEQ ID NO: 603116 - DNA, 15 bp, Homo sapiens
gcagagtctcactct

SEQ ID NO: 603117 - DNA, 15 bp, Homo sapiens
cagagtctcactctg

SEQ ID NO: 603118 - DNA, 15 bp, Homo sapiens
agagtctcactctgt

SEQ ID NO: 603119 - DNA, 15 bp, Homo sapiens
gagtctcactctgtc

SEQ ID NO: 603120 - DNA, 15 bp, Homo sapiens
agtctcactctgtcg

SEQ ID NO: 603121 - DNA, 15 bp, Homo sapiens
gtctcactctgtcgc

SEQ ID NO: 603122 - DNA, 15 bp, Homo sapiens
tctcactctgtcgcc

SEQ ID NO: 603123 - DNA, 15 bp, Homo sapiens
ctcactctgtcgcct

SEQ ID NO: 603124 - DNA, 15 bp, Homo sapiens
tcactctgtcgccta

SEQ ID NO: 603125 - DNA, 15 bp, Homo sapiens
cactctgtcgcctag

SEQ ID NO: 603126 - DNA, 15 bp, Homo sapiens
actctgtcgcctagg

SEQ ID NO: 603127 - DNA, 15 bp, Homo sapiens
ctctgtcgcctaggc

SEQ ID NO: 603128 - DNA, 15 bp, Homo sapiens
tctgtcgcctaggct

SEQ ID NO: 603129 - DNA, 15 bp, Homo sapiens
ctgtcgcctaggctg

SEQ ID NO: 603130 - DNA, 15 bp, Homo sapiens
tgtcgcctaggctgg

SEQ ID NO: 603131 - DNA, 15 bp, Homo sapiens
gtcgcctaggctgga

SEQ ID NO: 603132 - DNA, 15 bp, Homo sapiens
tcgcctaggctggag

SEQ ID NO: 603133 - DNA, 15 bp, Homo sapiens
cgcctaggctggagt

SEQ ID NO: 603134 - DNA, 15 bp, Homo sapiens
gcctaggctggagta

SEQ ID NO: 603135 - DNA, 15 bp, Homo sapiens
cctaggctggagtag

SEQ ID NO: 603136 - DNA, 15 bp, Homo sapiens
ctaggctggagtagt

SEQ ID NO: 603137 - DNA, 15 bp, Homo sapiens
taggctggagtagtt

SEQ ID NO: 603138 - DNA, 15 bp, Homo sapiens
aggctggagtagtta

SEQ ID NO: 603139 - DNA, 15 bp, Homo sapiens
ggctggagtagttag

SEQ ID NO: 603140 - DNA, 15 bp, Homo sapiens
gctggagtagttagt

SEQ ID NO: 603141 - DNA, 15 bp, Homo sapiens
ctggagtagttagtg

SEQ ID NO: 603142 - DNA, 15 bp, Homo sapiens
tggagtagttagtgg

SEQ ID NO: 603143 - DNA, 15 bp, Homo sapiens
ggagtagttagtggc

SEQ ID NO: 603144 - DNA, 15 bp, Homo sapiens
gagtagttagtggct

SEQ ID NO: 603145 - DNA, 15 bp, Homo sapiens
agtagttagtggctt

SEQ ID NO: 603146 - DNA, 15 bp, Homo sapiens
gtagttagtggcttg

SEQ ID NO: 603147 - DNA, 15 bp, Homo sapiens
tagttagtggcttga

SEQ ID NO: 603148 - DNA, 15 bp, Homo sapiens
agttagtggcttgat

SEQ ID NO: 603149 - DNA, 15 bp, Homo sapiens
gttagtggcttgatc

SEQ ID NO: 603150 - DNA, 15 bp, Homo sapiens
ttagtggcttgatct

SEQ ID NO: 603151 - DNA, 15 bp, Homo sapiens
tagtggcttgatctt

SEQ ID NO: 603152 - DNA, 15 bp, Homo sapiens
agtggcttgatctta

SEQ ID NO: 603153 - DNA, 15 bp, Homo sapiens
gtggcttgatcttaa

SEQ ID NO: 603154 - DNA, 15 bp, Homo sapiens
tggcttgatcttaac

SEQ ID NO: 603155 - DNA, 15 bp, Homo sapiens
ggcttgatcttaact

SEQ ID NO: 603156 - DNA, 15 bp, Homo sapiens
gcttgatcttaactc

SEQ ID NO: 603157 - DNA, 15 bp, Homo sapiens
cttgatcttaactca

SEQ ID NO: 603158 - DNA, 15 bp, Homo sapiens
ttgatcttaactcac

SEQ ID NO: 603159 - DNA, 15 bp, Homo sapiens
tgatcttaactcact

SEQ ID NO: 603160 - DNA, 15 bp, Homo sapiens
gatcttaactcacta

SEQ ID NO: 603161 - DNA, 15 bp, Homo sapiens
atcttaactcactac

SEQ ID NO: 603162 - DNA, 15 bp, Homo sapiens
tcttaactcactaca

SEQ ID NO: 603163 - DNA, 15 bp, Homo sapiens
cttaactcactacaa

SEQ ID NO: 603164 - DNA, 15 bp, Homo sapiens
ttaactcactacaac

SEQ ID NO: 603165 - DNA, 15 bp, Homo sapiens
taactcactacaacc

SEQ ID NO: 603166 - DNA, 15 bp, Homo sapiens
aactcactacaacct

SEQ ID NO: 603167 - DNA, 15 bp, Homo sapiens
actcactacaacctc

SEQ ID NO: 603168 - DNA, 15 bp, Homo sapiens
ctcactacaacctcc

SEQ ID NO: 603169 - DNA, 15 bp, Homo sapiens
tcactacaacctcct

SEQ ID NO: 603170 - DNA, 15 bp, Homo sapiens
cactacaacctcctc

SEQ ID NO: 603171 - DNA, 15 bp, Homo sapiens
actacaacctcctcc

SEQ ID NO: 603172 - DNA, 15 bp, Homo sapiens
ctacaacctcctcct

SEQ ID NO: 603173 - DNA, 15 bp, Homo sapiens
tacaacctcctcctc

SEQ ID NO: 603174 - DNA, 15 bp, Homo sapiens
acaacctcctcctcc

SEQ ID NO: 603175 - DNA, 15 bp, Homo sapiens
caacctcctcctccc

SEQ ID NO: 603176 - DNA, 15 bp, Homo sapiens
aacctcctcctccca

SEQ ID NO: 603177 - DNA, 15 bp, Homo sapiens
acctcctcctcccaa

SEQ ID NO: 603178 - DNA, 15 bp, Homo sapiens
cctcctcctcccaag

SEQ ID NO: 603179 - DNA, 15 bp, Homo sapiens
ctcctcctcccaagt

SEQ ID NO: 603180 - DNA, 15 bp, Homo sapiens
tcctcctcccaagtt

SEQ ID NO: 603181 - DNA, 15 bp, Homo sapiens
cctcctcccaagttc

SEQ ID NO: 603182 - DNA, 15 bp, Homo sapiens
ctcctcccaagttca

SEQ ID NO: 603183 - DNA, 15 bp, Homo sapiens
tcctcccaagttcaa

SEQ ID NO: 603184 - DNA, 15 bp, Homo sapiens
cctcccaagttcaag

SEQ ID NO: 603185 - DNA, 15 bp, Homo sapiens
ctcccaagttcaagt

SEQ ID NO: 603186 - DNA, 15 bp, Homo sapiens
tcccaagttcaagtg

SEQ ID NO: 603187 - DNA, 15 bp, Homo sapiens
cccaagttcaagtga

SEQ ID NO: 603188 - DNA, 15 bp, Homo sapiens
ccaagttcaagtgat

SEQ ID NO: 603189 - DNA, 15 bp, Homo sapiens
caagttcaagtgatt

SEQ ID NO: 603190 - DNA, 15 bp, Homo sapiens
aagttcaagtgattt

SEQ ID NO: 603191 - DNA, 15 bp, Homo sapiens
agttcaagtgatttt

SEQ ID NO: 603192 - DNA, 15 bp, Homo sapiens
gttcaagtgattttc

SEQ ID NO: 603193 - DNA, 15 bp, Homo sapiens
ttcaagtgattttcg

SEQ ID NO: 603194 - DNA, 15 bp, Homo sapiens
tcaagtgattttcgt

SEQ ID NO: 603195 - DNA, 15 bp, Homo sapiens
caagtgattttcgtg

SEQ ID NO: 603196 - DNA, 15 bp, Homo sapiens
aagtgattttcgtgc

SEQ ID NO: 603197 - DNA, 15 bp, Homo sapiens
agtgattttcgtgcc

SEQ ID NO: 603198 - DNA, 15 bp, Homo sapiens
gtgattttcgtgcct

SEQ ID NO: 603199 - DNA, 15 bp, Homo sapiens
tgattttcgtgcctc

SEQ ID NO: 603200 - DNA, 15 bp, Homo sapiens
gattttcgtgcctca

SEQ ID NO: 603201 - DNA, 15 bp, Homo sapiens
attttcgtgcctcag

SEQ ID NO: 603202 - DNA, 15 bp, Homo sapiens
ttttcgtgcctcagc

SEQ ID NO: 603203 - DNA, 15 bp, Homo sapiens
tttcgtgcctcagct

SEQ ID NO: 603204 - DNA, 15 bp, Homo sapiens
ttcgtgcctcagctt

SEQ ID NO: 603205 - DNA, 15 bp, Homo sapiens
tcgtgcctcagcttc

SEQ ID NO: 603206 - DNA, 15 bp, Homo sapiens
cgtgcctcagcttcc

SEQ ID NO: 603207 - DNA, 15 bp, Homo sapiens
gtgcctcagcttcct

SEQ ID NO: 603208 - DNA, 15 bp, Homo sapiens
tgcctcagcttcctg

SEQ ID NO: 603209 - DNA, 15 bp, Homo sapiens
gcctcagcttcctga

SEQ ID NO: 603210 - DNA, 15 bp, Homo sapiens
cctcagcttcctgag

SEQ ID NO: 603211 - DNA, 15 bp, Homo sapiens
ctcagcttcctgagt

SEQ ID NO: 603212 - DNA, 15 bp, Homo sapiens
tcagcttcctgagta

SEQ ID NO: 603213 - DNA, 15 bp, Homo sapiens
cagcttcctgagtag

SEQ ID NO: 603214 - DNA, 15 bp, Homo sapiens
agcttcctgagtagc

SEQ ID NO: 603215 - DNA, 15 bp, Homo sapiens
gcttcctgagtagct

SEQ ID NO: 603216 - DNA, 15 bp, Homo sapiens
cttcctgagtagctg

SEQ ID NO: 603217 - DNA, 15 bp, Homo sapiens
ttcctgagtagctgg

SEQ ID NO: 603218 - DNA, 15 bp, Homo sapiens
tcctgagtagctggg

SEQ ID NO: 603219 - DNA, 15 bp, Homo sapiens
cctgagtagctggga

SEQ ID NO: 603220 - DNA, 15 bp, Homo sapiens
ctgagtagctgggac

SEQ ID NO: 603221 - DNA, 15 bp, Homo sapiens
tgagtagctgggact

SEQ ID NO: 603222 - DNA, 15 bp, Homo sapiens
gagtagctgggacta

SEQ ID NO: 603223 - DNA, 15 bp, Homo sapiens
agtagctgggactac

SEQ ID NO: 603224 - DNA, 15 bp, Homo sapiens
gtagctgggactaca

SEQ ID NO: 603225 - DNA, 15 bp, Homo sapiens
tagctgggactacag

SEQ ID NO: 603226 - DNA, 15 bp, Homo sapiens
agctgggactacagg

SEQ ID NO: 603227 - DNA, 15 bp, Homo sapiens
gctgggactacaggc

SEQ ID NO: 603228 - DNA, 15 bp, Homo sapiens
ctgggactacaggcg

SEQ ID NO: 603229 - DNA, 15 bp, Homo sapiens
tgggactacaggcgc

SEQ ID NO: 603230 - DNA, 15 bp, Homo sapiens
gggactacaggcgca

SEQ ID NO: 603231 - DNA, 15 bp, Homo sapiens
ggactacaggcgcac

SEQ ID NO: 603232 - DNA, 15 bp, Homo sapiens
gactacaggcgcacg

SEQ ID NO: 603233 - DNA, 15 bp, Homo sapiens
actacaggcgcacgc

SEQ ID NO: 603234 - DNA, 15 bp, Homo sapiens
ctacaggcgcacgcc

SEQ ID NO: 603235 - DNA, 15 bp, Homo sapiens
tacaggcgcacgcca

SEQ ID NO: 603236 - DNA, 15 bp, Homo sapiens
acaggcgcacgccac

SEQ ID NO: 603237 - DNA, 15 bp, Homo sapiens
caggcgcacgccacc

SEQ ID NO: 603238 - DNA, 15 bp, Homo sapiens
aggcgcacgccacca

SEQ ID NO: 603239 - DNA, 15 bp, Homo sapiens
ggcgcacgccaccat

SEQ ID NO: 603240 - DNA, 15 bp, Homo sapiens
gcgcacgccaccatg

SEQ ID NO: 603241 - DNA, 15 bp, Homo sapiens
cgcacgccaccatgc

SEQ ID NO: 603242 - DNA, 15 bp, Homo sapiens
gcacgccaccatgcc

SEQ ID NO: 603243 - DNA, 15 bp, Homo sapiens
cacgccaccatgcct

SEQ ID NO: 603244 - DNA, 15 bp, Homo sapiens
acgccaccatgcctg

SEQ ID NO: 603245 - DNA, 15 bp, Homo sapiens
cgccaccatgcctgg

SEQ ID NO: 603246 - DNA, 15 bp, Homo sapiens
gccaccatgcctggc

SEQ ID NO: 603247 - DNA, 15 bp, Homo sapiens
ccaccatgcctggct

SEQ ID NO: 603248 - DNA, 15 bp, Homo sapiens
caccatgcctggcta

SEQ ID NO: 603249 - DNA, 15 bp, Homo sapiens
accatgcctggctaa

SEQ ID NO: 603250 - DNA, 15 bp, Homo sapiens
ccatgcctggctaat

SEQ ID NO: 603251 - DNA, 15 bp, Homo sapiens
catgcctggctaatt

SEQ ID NO: 603252 - DNA, 15 bp, Homo sapiens
atgcctggctaattt

SEQ ID NO: 603253 - DNA, 15 bp, Homo sapiens
tgcctggctaatttt

SEQ ID NO: 603254 - DNA, 15 bp, Homo sapiens
gcctggctaattttt

SEQ ID NO: 603255 - DNA, 15 bp, Homo sapiens
cctggctaatttttt

SEQ ID NO: 603256 - DNA, 15 bp, Homo sapiens
ctggctaattttttg

SEQ ID NO: 603257 - DNA, 15 bp, Homo sapiens
tggctaattttttgt

SEQ ID NO: 603258 - DNA, 15 bp, Homo sapiens
ggctaattttttgta

SEQ ID NO: 603259 - DNA, 15 bp, Homo sapiens
gctaattttttgtat

SEQ ID NO: 603260 - DNA, 15 bp, Homo sapiens
ctaattttttgtatt

SEQ ID NO: 603261 - DNA, 15 bp, Homo sapiens
taattttttgtattt

SEQ ID NO: 603262 - DNA, 15 bp, Homo sapiens
aattttttgtatttt

SEQ ID NO: 603263 - DNA, 15 bp, Homo sapiens
attttttgtattttt

SEQ ID NO: 603264 - DNA, 15 bp, Homo sapiens
ttttttgtattttta

SEQ ID NO: 603265 - DNA, 15 bp, Homo sapiens
tttttgtatttttag

SEQ ID NO: 603266 - DNA, 15 bp, Homo sapiens
agagatggggtttca

SEQ ID NO: 603267 - DNA, 15 bp, Homo sapiens
gagatggggtttcac

SEQ ID NO: 603268 - DNA, 15 bp, Homo sapiens
agatggggtttcacc

SEQ ID NO: 603269 - DNA, 15 bp, Homo sapiens
gatggggtttcacca

SEQ ID NO: 603270 - DNA, 15 bp, Homo sapiens
atggggtttcaccat

SEQ ID NO: 603271 - DNA, 15 bp, Homo sapiens
tggggtttcaccatg

SEQ ID NO: 603272 - DNA, 15 bp, Homo sapiens
ggggtttcaccatgt

SEQ ID NO: 603273 - DNA, 15 bp, Homo sapiens
gggtttcaccatgtt

SEQ ID NO: 603274 - DNA, 15 bp, Homo sapiens
ggtttcaccatgttg

SEQ ID NO: 603275 - DNA, 15 bp, Homo sapiens
gtttcaccatgttgc

SEQ ID NO: 603276 - DNA, 15 bp, Homo sapiens
tttcaccatgttgcc

SEQ ID NO: 603277 - DNA, 15 bp, Homo sapiens
ttcaccatgttgccc

SEQ ID NO: 603278 - DNA, 15 bp, Homo sapiens
tcaccatgttgccca

SEQ ID NO: 603279 - DNA, 15 bp, Homo sapiens
caccatgttgcccag

SEQ ID NO: 603280 - DNA, 15 bp, Homo sapiens
accatgttgcccagg

SEQ ID NO: 603281 - DNA, 15 bp, Homo sapiens
ccatgttgcccaggc

SEQ ID NO: 603282 - DNA, 15 bp, Homo sapiens
catgttgcccaggct

SEQ ID NO: 603283 - DNA, 15 bp, Homo sapiens
atgttgcccaggctg

SEQ ID NO: 603284 - DNA, 15 bp, Homo sapiens
gttgcccaggctggt

SEQ ID NO: 603285 - DNA, 15 bp, Homo sapiens
ttgcccaggctggtc

SEQ ID NO: 603286 - DNA, 15 bp, Homo sapiens
tgcccaggctggtct

SEQ ID NO: 603287 - DNA, 15 bp, Homo sapiens
cccaggctggtctcg

SEQ ID NO: 603288 - DNA, 15 bp, Homo sapiens
ccaggctggtctcga

SEQ ID NO: 603289 - DNA, 15 bp, Homo sapiens
ctggtctcgaactct

SEQ ID NO: 603290 - DNA, 15 bp, Homo sapiens
tggtctcgaactctt

SEQ ID NO: 603291 - DNA, 15 bp, Homo sapiens
ggtctcgaactcttg

SEQ ID NO: 603292 - DNA, 15 bp, Homo sapiens
gtctcgaactcttga

SEQ ID NO: 603293 - DNA, 15 bp, Homo sapiens
tctcgaactcttgag

SEQ ID NO: 603294 - DNA, 15 bp, Homo sapiens
ctcgaactcttgagc

SEQ ID NO: 603295 - DNA, 15 bp, Homo sapiens
tcgaactcttgagct

SEQ ID NO: 603296 - DNA, 15 bp, Homo sapiens
cgaactcttgagctc

SEQ ID NO: 603297 - DNA, 15 bp, Homo sapiens
gaactcttgagctca

SEQ ID NO: 603298 - DNA, 15 bp, Homo sapiens
aactcttgagctcag

SEQ ID NO: 603299 - DNA, 15 bp, Homo sapiens
actcttgagctcagg

SEQ ID NO: 603300 - DNA, 15 bp, Homo sapiens
ctcttgagctcaggc

SEQ ID NO: 603301 - DNA, 15 bp, Homo sapiens
tcttgagctcaggca

SEQ ID NO: 603302 - DNA, 15 bp, Homo sapiens
cttgagctcaggcaa

SEQ ID NO: 603303 - DNA, 15 bp, Homo sapiens
ttgagctcaggcaat

SEQ ID NO: 603304 - DNA, 15 bp, Homo sapiens
tgagctcaggcaatc

SEQ ID NO: 603305 - DNA, 15 bp, Homo sapiens
gagctcaggcaatcc

SEQ ID NO: 603306 - DNA, 15 bp, Homo sapiens
agctcaggcaatcca

SEQ ID NO: 603307 - DNA, 15 bp, Homo sapiens
gctcaggcaatccac

SEQ ID NO: 603308 - DNA, 15 bp, Homo sapiens
ctcaggcaatccacc

SEQ ID NO: 603309 - DNA, 15 bp, Homo sapiens
tcaggcaatccacct

SEQ ID NO: 603310 - DNA, 15 bp, Homo sapiens
caggcaatccacctg

SEQ ID NO: 603311 - DNA, 15 bp, Homo sapiens
aggcaatccacctgc

SEQ ID NO: 603312 - DNA, 15 bp, Homo sapiens
ggcaatccacctgcc

SEQ ID NO: 603313 - DNA, 15 bp, Homo sapiens
gcaatccacctgcct

SEQ ID NO: 603314 - DNA, 15 bp, Homo sapiens
caatccacctgcctc

SEQ ID NO: 603315 - DNA, 15 bp, Homo sapiens
aatccacctgcctcg

SEQ ID NO: 603316 - DNA, 15 bp, Homo sapiens
atccacctgcctcgg

SEQ ID NO: 603317 - DNA, 15 bp, Homo sapiens
tccacctgcctcggc

SEQ ID NO: 603318 - DNA, 15 bp, Homo sapiens
ccacctgcctcggcc

SEQ ID NO: 603319 - DNA, 15 bp, Homo sapiens
cacctgcctcggcct

SEQ ID NO: 603320 - DNA, 15 bp, Homo sapiens
acctgcctcggcctc

SEQ ID NO: 603321 - DNA, 15 bp, Homo sapiens
cctgcctcggcctcc

SEQ ID NO: 603322 - DNA, 15 bp, Homo sapiens
ctgcctcggcctccc

SEQ ID NO: 603323 - DNA, 15 bp, Homo sapiens
tgcctcggcctccca

SEQ ID NO: 603324 - DNA, 15 bp, Homo sapiens
gcctcggcctcccag

SEQ ID NO: 603325 - DNA, 15 bp, Homo sapiens
cctcggcctcccaga

SEQ ID NO: 603326 - DNA, 15 bp, Homo sapiens
ctcggcctcccagag

SEQ ID NO: 603327 - DNA, 15 bp, Homo sapiens
tcggcctcccagagt

SEQ ID NO: 603328 - DNA, 15 bp, Homo sapiens
cggcctcccagagtg

SEQ ID NO: 603329 - DNA, 15 bp, Homo sapiens
ggcctcccagagtgc

SEQ ID NO: 603330 - DNA, 15 bp, Homo sapiens
gcctcccagagtgct

SEQ ID NO: 603331 - DNA, 15 bp, Homo sapiens
cctcccagagtgcta

SEQ ID NO: 603332 - DNA, 15 bp, Homo sapiens
ctcccagagtgctag

SEQ ID NO: 603333 - DNA, 15 bp, Homo sapiens
tcccagagtgctagg

SEQ ID NO: 603334 - DNA, 15 bp, Homo sapiens
cccagagtgctagga

SEQ ID NO: 603335 - DNA, 15 bp, Homo sapiens
ccagagtgctaggat

SEQ ID NO: 603336 - DNA, 15 bp, Homo sapiens
cagagtgctaggatt

SEQ ID NO: 603337 - DNA, 15 bp, Homo sapiens
agagtgctaggatta

SEQ ID NO: 603338 - DNA, 15 bp, Homo sapiens
gagtgctaggattac

SEQ ID NO: 603339 - DNA, 15 bp, Homo sapiens
agtgctaggattaca

SEQ ID NO: 603340 - DNA, 15 bp, Homo sapiens
gtgctaggattacag

SEQ ID NO: 603341 - DNA, 15 bp, Homo sapiens
tgctaggattacagg

SEQ ID NO: 603342 - DNA, 15 bp, Homo sapiens
gctaggattacaggc

SEQ ID NO: 603343 - DNA, 15 bp, Homo sapiens
ctaggattacaggca

SEQ ID NO: 603344 - DNA, 15 bp, Homo sapiens
taggattacaggcat

SEQ ID NO: 603345 - DNA, 15 bp, Homo sapiens
aggattacaggcatg

SEQ ID NO: 603346 - DNA, 15 bp, Homo sapiens
ggattacaggcatga

SEQ ID NO: 603347 - DNA, 15 bp, Homo sapiens
gattacaggcatgag

SEQ ID NO: 603348 - DNA, 15 bp, Homo sapiens
attacaggcatgagc

SEQ ID NO: 603349 - DNA, 15 bp, Homo sapiens
ttacaggcatgagcc

SEQ ID NO: 603350 - DNA, 15 bp, Homo sapiens
tacaggcatgagcca

SEQ ID NO: 603351 - DNA, 15 bp, Homo sapiens
acaggcatgagccac

SEQ ID NO: 603352 - DNA, 15 bp, Homo sapiens
caggcatgagccacc

SEQ ID NO: 603353 - DNA, 15 bp, Homo sapiens
aggcatgagccacca

SEQ ID NO: 603354 - DNA, 15 bp, Homo sapiens
ggcatgagccaccac

SEQ ID NO: 603355 - DNA, 15 bp, Homo sapiens
gcatgagccaccaca

SEQ ID NO: 603356 - DNA, 15 bp, Homo sapiens
catgagccaccacac

SEQ ID NO: 603357 - DNA, 15 bp, Homo sapiens
atgagccaccacacc

SEQ ID NO: 603358 - DNA, 15 bp, Homo sapiens
tgagccaccacaccc

SEQ ID NO: 603359 - DNA, 15 bp, Homo sapiens
gagccaccacaccca

SEQ ID NO: 603360 - DNA, 15 bp, Homo sapiens
agccaccacacccag

SEQ ID NO: 603361 - DNA, 15 bp, Homo sapiens
gccaccacacccagc

SEQ ID NO: 603362 - DNA, 15 bp, Homo sapiens
ccaccacacccagcc

SEQ ID NO: 603363 - DNA, 15 bp, Homo sapiens
caccacacccagccg

SEQ ID NO: 603364 - DNA, 15 bp, Homo sapiens
accacacccagccga

SEQ ID NO: 603365 - DNA, 15 bp, Homo sapiens
ccacacccagccgag

SEQ ID NO: 603366 - DNA, 15 bp, Homo sapiens
cacacccagccgaga

SEQ ID NO: 603367 - DNA, 15 bp, Homo sapiens
acacccagccgagac

SEQ ID NO: 603368 - DNA, 15 bp, Homo sapiens
cacccagccgagacc

SEQ ID NO: 603369 - DNA, 15 bp, Homo sapiens
acccagccgagaccc

SEQ ID NO: 603370 - DNA, 15 bp, Homo sapiens
cccagccgagaccca

SEQ ID NO: 603371 - DNA, 15 bp, Homo sapiens
ccagccgagacccag

SEQ ID NO: 603372 - DNA, 15 bp, Homo sapiens
cagccgagacccagt

SEQ ID NO: 603373 - DNA, 15 bp, Homo sapiens
agccgagacccagtt

SEQ ID NO: 603374 - DNA, 15 bp, Homo sapiens
gccgagacccagttc

SEQ ID NO: 603375 - DNA, 15 bp, Homo sapiens
ccgagacccagttct

SEQ ID NO: 603376 - DNA, 15 bp, Homo sapiens
cgagacccagttctg

SEQ ID NO: 603377 - DNA, 15 bp, Homo sapiens
gagacccagttctga

SEQ ID NO: 603378 - DNA, 15 bp, Homo sapiens
agacccagttctgac

SEQ ID NO: 603379 - DNA, 15 bp, Homo sapiens
gacccagttctgact

SEQ ID NO: 603380 - DNA, 15 bp, Homo sapiens
acccagttctgactg

SEQ ID NO: 603381 - DNA, 15 bp, Homo sapiens
cccagttctgactgc

SEQ ID NO: 603382 - DNA, 15 bp, Homo sapiens
ccagttctgactgct

SEQ ID NO: 603383 - DNA, 15 bp, Homo sapiens
cagttctgactgctg

SEQ ID NO: 603384 - DNA, 15 bp, Homo sapiens
agttctgactgctgt

SEQ ID NO: 603385 - DNA, 15 bp, Homo sapiens
gttctgactgctgtc

SEQ ID NO: 603386 - DNA, 15 bp, Homo sapiens
ttctgactgctgtct

SEQ ID NO: 603387 - DNA, 15 bp, Homo sapiens
tctgactgctgtctc

SEQ ID NO: 603388 - DNA, 15 bp, Homo sapiens
ctgactgctgtctct

SEQ ID NO: 603389 - DNA, 15 bp, Homo sapiens
tgactgctgtctctc

SEQ ID NO: 603390 - DNA, 15 bp, Homo sapiens
gactgctgtctctcc

SEQ ID NO: 603391 - DNA, 15 bp, Homo sapiens
actgctgtctctcca

SEQ ID NO: 603392 - DNA, 15 bp, Homo sapiens
ctgctgtctctccac

SEQ ID NO: 603393 - DNA, 15 bp, Homo sapiens
tgctgtctctccaca

SEQ ID NO: 603394 - DNA, 15 bp, Homo sapiens
gctgtctctccacat

SEQ ID NO: 603395 - DNA, 15 bp, Homo sapiens
ctgtctctccacatg

SEQ ID NO: 603396 - DNA, 15 bp, Homo sapiens
tgtctctccacatga

SEQ ID NO: 603397 - DNA, 15 bp, Homo sapiens
gtctctccacatgaa

SEQ ID NO: 603398 - DNA, 15 bp, Homo sapiens
tctctccacatgaac

SEQ ID NO: 603399 - DNA, 15 bp, Homo sapiens
ctctccacatgaaca

SEQ ID NO: 603400 - DNA, 15 bp, Homo sapiens
tctccacatgaacac

SEQ ID NO: 603401 - DNA, 15 bp, Homo sapiens
ctccacatgaacact

SEQ ID NO: 603402 - DNA, 15 bp, Homo sapiens
tccacatgaacactg

SEQ ID NO: 603403 - DNA, 15 bp, Homo sapiens
ccacatgaacactga

SEQ ID NO: 603404 - DNA, 15 bp, Homo sapiens
cacatgaacactgag

SEQ ID NO: 603405 - DNA, 15 bp, Homo sapiens
acatgaacactgagc

SEQ ID NO: 603406 - DNA, 15 bp, Homo sapiens
catgaacactgagca

SEQ ID NO: 603407 - DNA, 15 bp, Homo sapiens
atgaacactgagcag

SEQ ID NO: 603408 - DNA, 15 bp, Homo sapiens
tgaacactgagcagc

SEQ ID NO: 603409 - DNA, 15 bp, Homo sapiens
gaacactgagcagcc

SEQ ID NO: 603410 - DNA, 15 bp, Homo sapiens
aacactgagcagcca

SEQ ID NO: 603411 - DNA, 15 bp, Homo sapiens
acactgagcagccac

SEQ ID NO: 603412 - DNA, 15 bp, Homo sapiens
cactgagcagccact

SEQ ID NO: 603413 - DNA, 15 bp, Homo sapiens
actgagcagccactg

SEQ ID NO: 603414 - DNA, 15 bp, Homo sapiens
ctgagcagccactgc

SEQ ID NO: 603415 - DNA, 15 bp, Homo sapiens
tgagcagccactgcc

SEQ ID NO: 603416 - DNA, 15 bp, Homo sapiens
gagcagccactgccc

SEQ ID NO: 603417 - DNA, 15 bp, Homo sapiens
agcagccactgcccc

SEQ ID NO: 603418 - DNA, 15 bp, Homo sapiens
gcagccactgccccc

SEQ ID NO: 603419 - DNA, 15 bp, Homo sapiens
cagccactgccccca

SEQ ID NO: 603420 - DNA, 15 bp, Homo sapiens
agccactgcccccag

SEQ ID NO: 603421 - DNA, 15 bp, Homo sapiens
gccactgcccccagt

SEQ ID NO: 603422 - DNA, 15 bp, Homo sapiens
ccactgcccccagtg

SEQ ID NO: 603423 - DNA, 15 bp, Homo sapiens
cactgcccccagtgg

SEQ ID NO: 603424 - DNA, 15 bp, Homo sapiens
actgcccccagtggg

SEQ ID NO: 603425 - DNA, 15 bp, Homo sapiens
ctgcccccagtgggc

SEQ ID NO: 603426 - DNA, 15 bp, Homo sapiens
tgcccccagtgggcc

SEQ ID NO: 603427 - DNA, 15 bp, Homo sapiens
gcccccagtgggcct

SEQ ID NO: 603428 - DNA, 15 bp, Homo sapiens
cccccagtgggcctc

SEQ ID NO: 603429 - DNA, 15 bp, Homo sapiens
ccccagtgggcctct

SEQ ID NO: 603430 - DNA, 15 bp, Homo sapiens
cccagtgggcctctg

SEQ ID NO: 603431 - DNA, 15 bp, Homo sapiens
ccagtgggcctctgg

SEQ ID NO: 603432 - DNA, 15 bp, Homo sapiens
cagtgggcctctggt

SEQ ID NO: 603433 - DNA, 15 bp, Homo sapiens
agtgggcctctggtg

SEQ ID NO: 603434 - DNA, 15 bp, Homo sapiens
gtgggcctctggtgc

SEQ ID NO: 603435 - DNA, 15 bp, Homo sapiens
tgggcctctggtgcc

SEQ ID NO: 603436 - DNA, 15 bp, Homo sapiens
gggcctctggtgcct

SEQ ID NO: 603437 - DNA, 15 bp, Homo sapiens
ggcctctggtgcctt

SEQ ID NO: 603438 - DNA, 15 bp, Homo sapiens
gcctctggtgccttc

SEQ ID NO: 603439 - DNA, 15 bp, Homo sapiens
cctctggtgccttct

SEQ ID NO: 603440 - DNA, 15 bp, Homo sapiens
ctctggtgccttctc

SEQ ID NO: 603441 - DNA, 15 bp, Homo sapiens
tctggtgccttctcc

SEQ ID NO: 603442 - DNA, 15 bp, Homo sapiens
ctggtgccttctcca

SEQ ID NO: 603443 - DNA, 15 bp, Homo sapiens
tggtgccttctccat

SEQ ID NO: 603444 - DNA, 15 bp, Homo sapiens
ggtgccttctccatt

SEQ ID NO: 603445 - DNA, 15 bp, Homo sapiens
gtgccttctccattc

SEQ ID NO: 603446 - DNA, 15 bp, Homo sapiens
tgccttctccattct

SEQ ID NO: 603447 - DNA, 15 bp, Homo sapiens
gccttctccattctc

SEQ ID NO: 603448 - DNA, 15 bp, Homo sapiens
ccttctccattctct

SEQ ID NO: 603449 - DNA, 15 bp, Homo sapiens
cttctccattctctg

SEQ ID NO: 603450 - DNA, 15 bp, Homo sapiens
ttctccattctctgg

SEQ ID NO: 603451 - DNA, 15 bp, Homo sapiens
tctccattctctggc

SEQ ID NO: 603452 - DNA, 15 bp, Homo sapiens
ctccattctctggcc

SEQ ID NO: 603453 - DNA, 15 bp, Homo sapiens
tccattctctggcct

SEQ ID NO: 603454 - DNA, 15 bp, Homo sapiens
ccattctctggcctt

SEQ ID NO: 603455 - DNA, 15 bp, Homo sapiens
cattctctggccttc

SEQ ID NO: 603456 - DNA, 15 bp, Homo sapiens
attctctggccttca

SEQ ID NO: 603457 - DNA, 15 bp, Homo sapiens
ttctctggccttcac

SEQ ID NO: 603458 - DNA, 15 bp, Homo sapiens
tctctggccttcact

SEQ ID NO: 603459 - DNA, 15 bp, Homo sapiens
ctctggccttcactc

SEQ ID NO: 603460 - DNA, 15 bp, Homo sapiens
tctggccttcactcc

SEQ ID NO: 603461 - DNA, 15 bp, Homo sapiens
ctggccttcactccc

SEQ ID NO: 603462 - DNA, 15 bp, Homo sapiens
tggccttcactccct

SEQ ID NO: 603463 - DNA, 15 bp, Homo sapiens
ggccttcactccctc

SEQ ID NO: 603464 - DNA, 15 bp, Homo sapiens
gccttcactccctcc

SEQ ID NO: 603465 - DNA, 15 bp, Homo sapiens
ccttcactccctcct

SEQ ID NO: 603466 - DNA, 15 bp, Homo sapiens
cttcactccctcctt

SEQ ID NO: 603467 - DNA, 15 bp, Homo sapiens
ttcactccctccttc

SEQ ID NO: 603468 - DNA, 15 bp, Homo sapiens
tcactccctccttcc

SEQ ID NO: 603469 - DNA, 15 bp, Homo sapiens
cactccctccttcct

SEQ ID NO: 603470 - DNA, 15 bp, Homo sapiens
actccctccttcctc

SEQ ID NO: 603471 - DNA, 15 bp, Homo sapiens
ctccctccttcctcc

SEQ ID NO: 603472 - DNA, 15 bp, Homo sapiens
tccctccttcctccc

SEQ ID NO: 603473 - DNA, 15 bp, Homo sapiens
ccctccttcctccca

SEQ ID NO: 603474 - DNA, 15 bp, Homo sapiens
cctccttcctcccac

SEQ ID NO: 603475 - DNA, 15 bp, Homo sapiens
ctccttcctcccaca

SEQ ID NO: 603476 - DNA, 15 bp, Homo sapiens
tccttcctcccacag

SEQ ID NO: 603477 - DNA, 15 bp, Homo sapiens
ccttcctcccacagc

SEQ ID NO: 603478 - DNA, 15 bp, Homo sapiens
cttcctcccacagct

SEQ ID NO: 603479 - DNA, 15 bp, Homo sapiens
ttcctcccacagctg

SEQ ID NO: 603480 - DNA, 15 bp, Homo sapiens
tcctcccacagctgg

SEQ ID NO: 603481 - DNA, 15 bp, Homo sapiens
cctcccacagctggg

SEQ ID NO: 603482 - DNA, 15 bp, Homo sapiens
ctcccacagctggga

SEQ ID NO: 603483 - DNA, 15 bp, Homo sapiens
tcccacagctgggaa

SEQ ID NO: 603484 - DNA, 15 bp, Homo sapiens
cccacagctgggaaa

SEQ ID NO: 603485 - DNA, 15 bp, Homo sapiens
ccacagctgggaaaa

SEQ ID NO: 603486 - DNA, 15 bp, Homo sapiens
cacagctgggaaaac

SEQ ID NO: 603487 - DNA, 15 bp, Homo sapiens
acagctgggaaaact

SEQ ID NO: 603488 - DNA, 15 bp, Homo sapiens
cagctgggaaaactg

SEQ ID NO: 603489 - DNA, 15 bp, Homo sapiens
agctgggaaaactgg

SEQ ID NO: 603490 - DNA, 15 bp, Homo sapiens
gctgggaaaactggt

SEQ ID NO: 603491 - DNA, 15 bp, Homo sapiens
ctgggaaaactggtc

SEQ ID NO: 603492 - DNA, 15 bp, Homo sapiens
tgggaaaactggtct

SEQ ID NO: 603493 - DNA, 15 bp, Homo sapiens
gggaaaactggtctt

SEQ ID NO: 603494 - DNA, 15 bp, Homo sapiens
ggaaaactggtcttt

SEQ ID NO: 603495 - DNA, 15 bp, Homo sapiens
gaaaactggtcttta

SEQ ID NO: 603496 - DNA, 15 bp, Homo sapiens
aaaactggtctttaa

SEQ ID NO: 603497 - DNA, 15 bp, Homo sapiens
aaactggtctttaaa

SEQ ID NO: 603498 - DNA, 15 bp, Homo sapiens
aactggtctttaaaa

SEQ ID NO: 603499 - DNA, 15 bp, Homo sapiens
actggtctttaaaat

SEQ ID NO: 603500 - DNA, 15 bp, Homo sapiens
ctggtctttaaaatc

SEQ ID NO: 603501 - DNA, 15 bp, Homo sapiens
tggtctttaaaatct

SEQ ID NO: 603502 - DNA, 15 bp, Homo sapiens
ggtctttaaaatctt

SEQ ID NO: 603503 - DNA, 15 bp, Homo sapiens
gtctttaaaatcttc

SEQ ID NO: 603504 - DNA, 15 bp, Homo sapiens
tctttaaaatcttct

SEQ ID NO: 603505 - DNA, 15 bp, Homo sapiens
ctttaaaatcttcta

SEQ ID NO: 603506 - DNA, 15 bp, Homo sapiens
tttaaaatcttctag

SEQ ID NO: 603507 - DNA, 15 bp, Homo sapiens
ttaaaatcttctagt

SEQ ID NO: 603508 - DNA, 15 bp, Homo sapiens
taaaatcttctagtc

SEQ ID NO: 603509 - DNA, 15 bp, Homo sapiens
aaaatcttctagtct

SEQ ID NO: 603510 - DNA, 15 bp, Homo sapiens
aaatcttctagtctt

SEQ ID NO: 603511 - DNA, 15 bp, Homo sapiens
aatcttctagtcttt

SEQ ID NO: 603512 - DNA, 15 bp, Homo sapiens
atcttctagtctttt

SEQ ID NO: 603513 - DNA, 15 bp, Homo sapiens
tcttctagtctttta

SEQ ID NO: 603514 - DNA, 15 bp, Homo sapiens
cttctagtcttttag

SEQ ID NO: 603515 - DNA, 15 bp, Homo sapiens
ttctagtcttttaga

SEQ ID NO: 603516 - DNA, 15 bp, Homo sapiens
tctagtcttttagaa

SEQ ID NO: 603517 - DNA, 15 bp, Homo sapiens
ctagtcttttagaat

SEQ ID NO: 603518 - DNA, 15 bp, Homo sapiens
tagtcttttagaatg

SEQ ID NO: 603519 - DNA, 15 bp, Homo sapiens
agtcttttagaatgt

SEQ ID NO: 603520 - DNA, 15 bp, Homo sapiens
gtcttttagaatgtt

SEQ ID NO: 603521 - DNA, 15 bp, Homo sapiens
tcttttagaatgttg

SEQ ID NO: 603522 - DNA, 15 bp, Homo sapiens
cttttagaatgttga

SEQ ID NO: 603523 - DNA, 15 bp, Homo sapiens
ttttagaatgttgaa

SEQ ID NO: 603524 - DNA, 15 bp, Homo sapiens
tttagaatgttgaac

SEQ ID NO: 603525 - DNA, 15 bp, Homo sapiens
ttagaatgttgaact

SEQ ID NO: 603526 - DNA, 15 bp, Homo sapiens
tagaatgttgaactc

SEQ ID NO: 603527 - DNA, 15 bp, Homo sapiens
agaatgttgaactct

SEQ ID NO: 603528 - DNA, 15 bp, Homo sapiens
gaatgttgaactctt

SEQ ID NO: 603529 - DNA, 15 bp, Homo sapiens
aatgttgaactcttt

SEQ ID NO: 603530 - DNA, 15 bp, Homo sapiens
atgttgaactctttt

SEQ ID NO: 603531 - DNA, 15 bp, Homo sapiens
tgttgaactctttta

SEQ ID NO: 603532 - DNA, 15 bp, Homo sapiens
gttgaactcttttaa

SEQ ID NO: 603533 - DNA, 15 bp, Homo sapiens
ttgaactcttttaaa

SEQ ID NO: 603534 - DNA, 15 bp, Homo sapiens
tgaactcttttaaag

SEQ ID NO: 603535 - DNA, 15 bp, Homo sapiens
gaactcttttaaagt

SEQ ID NO: 603536 - DNA, 15 bp, Homo sapiens
aactcttttaaagtt

SEQ ID NO: 603537 - DNA, 15 bp, Homo sapiens
actcttttaaagttt

SEQ ID NO: 603538 - DNA, 15 bp, Homo sapiens
ctcttttaaagtttg

SEQ ID NO: 603539 - DNA, 15 bp, Homo sapiens
tcttttaaagtttgt

SEQ ID NO: 603540 - DNA, 15 bp, Homo sapiens
cttttaaagtttgtc

SEQ ID NO: 603541 - DNA, 15 bp, Homo sapiens
ttttaaagtttgtcc

SEQ ID NO: 603542 - DNA, 15 bp, Homo sapiens
tttaaagtttgtcct

SEQ ID NO: 603543 - DNA, 15 bp, Homo sapiens
ttaaagtttgtcctg

SEQ ID NO: 603544 - DNA, 15 bp, Homo sapiens
taaagtttgtcctgg

SEQ ID NO: 603545 - DNA, 15 bp, Homo sapiens
aaagtttgtcctggc

SEQ ID NO: 603546 - DNA, 15 bp, Homo sapiens
aagtttgtcctggct

SEQ ID NO: 603547 - DNA, 15 bp, Homo sapiens
agtttgtcctggctg

SEQ ID NO: 603548 - DNA, 15 bp, Homo sapiens
gtttgtcctggctgc

SEQ ID NO: 603549 - DNA, 15 bp, Homo sapiens
tttgtcctggctgca

SEQ ID NO: 603550 - DNA, 15 bp, Homo sapiens
ttgtcctggctgcag

SEQ ID NO: 603551 - DNA, 15 bp, Homo sapiens
tgtcctggctgcagc

SEQ ID NO: 603552 - DNA, 15 bp, Homo sapiens
gtcctggctgcagct

SEQ ID NO: 603553 - DNA, 15 bp, Homo sapiens
tcctggctgcagctt

SEQ ID NO: 603554 - DNA, 15 bp, Homo sapiens
cctggctgcagcttc

SEQ ID NO: 603555 - DNA, 15 bp, Homo sapiens
ctggctgcagcttct

SEQ ID NO: 603556 - DNA, 15 bp, Homo sapiens
tggctgcagcttctc

SEQ ID NO: 603557 - DNA, 15 bp, Homo sapiens
ggctgcagcttctct

SEQ ID NO: 603558 - DNA, 15 bp, Homo sapiens
gctgcagcttctctc

SEQ ID NO: 603559 - DNA, 15 bp, Homo sapiens
ctgcagcttctctcc

SEQ ID NO: 603560 - DNA, 15 bp, Homo sapiens
tgcagcttctctcct

SEQ ID NO: 603561 - DNA, 15 bp, Homo sapiens
gcagcttctctcctt

SEQ ID NO: 603562 - DNA, 15 bp, Homo sapiens
cagcttctctccttg

SEQ ID NO: 603563 - DNA, 15 bp, Homo sapiens
agcttctctccttgg

SEQ ID NO: 603564 - DNA, 15 bp, Homo sapiens
gcttctctccttggt

SEQ ID NO: 603565 - DNA, 15 bp, Homo sapiens
cttctctccttggtc

SEQ ID NO: 603566 - DNA, 15 bp, Homo sapiens
ttctctccttggtcc

SEQ ID NO: 603567 - DNA, 15 bp, Homo sapiens
tctctccttggtccc

SEQ ID NO: 603568 - DNA, 15 bp, Homo sapiens
ctctccttggtcccc

SEQ ID NO: 603569 - DNA, 15 bp, Homo sapiens
tctccttggtccccc

SEQ ID NO: 603570 - DNA, 15 bp, Homo sapiens
ctccttggtccccct

SEQ ID NO: 603571 - DNA, 15 bp, Homo sapiens
tccttggtccccctg

SEQ ID NO: 603572 - DNA, 15 bp, Homo sapiens
ccttggtccccctgt

SEQ ID NO: 603573 - DNA, 15 bp, Homo sapiens
cttggtccccctgtt

SEQ ID NO: 603574 - DNA, 15 bp, Homo sapiens
ttggtccccctgttc

SEQ ID NO: 603575 - DNA, 15 bp, Homo sapiens
tggtccccctgttct

SEQ ID NO: 603576 - DNA, 15 bp, Homo sapiens
ggtccccctgttctt

SEQ ID NO: 603577 - DNA, 15 bp, Homo sapiens
gtccccctgttcttc

SEQ ID NO: 603578 - DNA, 15 bp, Homo sapiens
tccccctgttcttcc

SEQ ID NO: 603579 - DNA, 15 bp, Homo sapiens
ccccctgttcttcct

SEQ ID NO: 603580 - DNA, 15 bp, Homo sapiens
cccctgttcttccta

SEQ ID NO: 603581 - DNA, 15 bp, Homo sapiens
ccctgttcttcctac

SEQ ID NO: 603582 - DNA, 15 bp, Homo sapiens
cctgttcttcctaca

SEQ ID NO: 603583 - DNA, 15 bp, Homo sapiens
ctgttcttcctacag

SEQ ID NO: 603584 - DNA, 15 bp, Homo sapiens
tgttcttcctacagg

SEQ ID NO: 603585 - DNA, 15 bp, Homo sapiens
gttcttcctacaggt

SEQ ID NO: 603586 - DNA, 15 bp, Homo sapiens
ttcttcctacaggtc

SEQ ID NO: 603587 - DNA, 15 bp, Homo sapiens
tcttcctacaggtca

SEQ ID NO: 603588 - DNA, 15 bp, Homo sapiens
cttcctacaggtcaa

SEQ ID NO: 603589 - DNA, 15 bp, Homo sapiens
ttcctacaggtcaat

SEQ ID NO: 603590 - DNA, 15 bp, Homo sapiens
tcctacaggtcaata

SEQ ID NO: 603591 - DNA, 15 bp, Homo sapiens
cctacaggtcaatat

SEQ ID NO: 603592 - DNA, 15 bp, Homo sapiens
ctacaggtcaatatc

SEQ ID NO: 603593 - DNA, 15 bp, Homo sapiens
tacaggtcaatatcc

SEQ ID NO: 603594 - DNA, 15 bp, Homo sapiens
acaggtcaatatccc

SEQ ID NO: 603595 - DNA, 15 bp, Homo sapiens
caggtcaatatcccc

SEQ ID NO: 603596 - DNA, 15 bp, Homo sapiens
aggtcaatatccccc

SEQ ID NO: 603597 - DNA, 15 bp, Homo sapiens
ggtcaatatcccccc

SEQ ID NO: 603598 - DNA, 15 bp, Homo sapiens
gtcaatatcccccca

SEQ ID NO: 603599 - DNA, 15 bp, Homo sapiens
tcaatatccccccac

SEQ ID NO: 603600 - DNA, 15 bp, Homo sapiens
caatatccccccacc

SEQ ID NO: 603601 - DNA, 15 bp, Homo sapiens
aatatccccccaccc

SEQ ID NO: 603602 - DNA, 15 bp, Homo sapiens
atatccccccaccct

SEQ ID NO: 603603 - DNA, 15 bp, Homo sapiens
tatccccccaccctc

SEQ ID NO: 603604 - DNA, 15 bp, Homo sapiens
atccccccaccctct

SEQ ID NO: 603605 - DNA, 15 bp, Homo sapiens
tccccccaccctctc

SEQ ID NO: 603606 - DNA, 15 bp, Homo sapiens
ccccccaccctctca

SEQ ID NO: 603607 - DNA, 15 bp, Homo sapiens
cccccaccctctcat

SEQ ID NO: 603608 - DNA, 15 bp, Homo sapiens
ccccaccctctcatt

SEQ ID NO: 603609 - DNA, 15 bp, Homo sapiens
cccaccctctcattg

SEQ ID NO: 603610 - DNA, 15 bp, Homo sapiens
ccaccctctcattgt

SEQ ID NO: 603611 - DNA, 15 bp, Homo sapiens
caccctctcattgtg

SEQ ID NO: 603612 - DNA, 15 bp, Homo sapiens
accctctcattgtgc

SEQ ID NO: 603613 - DNA, 15 bp, Homo sapiens
ccctctcattgtgcc

SEQ ID NO: 603614 - DNA, 15 bp, Homo sapiens
cctctcattgtgccc

SEQ ID NO: 603615 - DNA, 15 bp, Homo sapiens
ctctcattgtgccct

SEQ ID NO: 603616 - DNA, 15 bp, Homo sapiens
tctcattgtgccctt

SEQ ID NO: 603617 - DNA, 15 bp, Homo sapiens
ctcattgtgcccttt

SEQ ID NO: 603618 - DNA, 15 bp, Homo sapiens
tcattgtgccctttt

SEQ ID NO: 603619 - DNA, 15 bp, Homo sapiens
cattgtgcccttttg

SEQ ID NO: 603620 - DNA, 15 bp, Homo sapiens
attgtgcccttttgt

SEQ ID NO: 603621 - DNA, 15 bp, Homo sapiens
ttgtgcccttttgtc

SEQ ID NO: 603622 - DNA, 15 bp, Homo sapiens
tgtgcccttttgtcc

SEQ ID NO: 603623 - DNA, 15 bp, Homo sapiens
gtgcccttttgtccc

SEQ ID NO: 603624 - DNA, 15 bp, Homo sapiens
tgcccttttgtccca

SEQ ID NO: 603625 - DNA, 15 bp, Homo sapiens
gcccttttgtcccaa

SEQ ID NO: 603626 - DNA, 15 bp, Homo sapiens
cccttttgtcccaag

SEQ ID NO: 603627 - DNA, 15 bp, Homo sapiens
ccttttgtcccaagt

SEQ ID NO: 603628 - DNA, 15 bp, Homo sapiens
cttttgtcccaagtt

SEQ ID NO: 603629 - DNA, 15 bp, Homo sapiens
ttttgtcccaagttc

SEQ ID NO: 603630 - DNA, 15 bp, Homo sapiens
tttgtcccaagttca

SEQ ID NO: 603631 - DNA, 15 bp, Homo sapiens
ttgtcccaagttcat

SEQ ID NO: 603632 - DNA, 15 bp, Homo sapiens
tgtcccaagttcatt

SEQ ID NO: 603633 - DNA, 15 bp, Homo sapiens
gtcccaagttcattg

SEQ ID NO: 603634 - DNA, 15 bp, Homo sapiens
tcccaagttcattgg

SEQ ID NO: 603635 - DNA, 15 bp, Homo sapiens
cccaagttcattggc

SEQ ID NO: 603636 - DNA, 15 bp, Homo sapiens
ccaagttcattggcc

SEQ ID NO: 603637 - DNA, 15 bp, Homo sapiens
caagttcattggccc

SEQ ID NO: 603638 - DNA, 15 bp, Homo sapiens
aagttcattggccct

SEQ ID NO: 603639 - DNA, 15 bp, Homo sapiens
agttcattggccctg

SEQ ID NO: 603640 - DNA, 15 bp, Homo sapiens
gttcattggccctgg

SEQ ID NO: 603641 - DNA, 15 bp, Homo sapiens
ttcattggccctggt

SEQ ID NO: 603642 - DNA, 15 bp, Homo sapiens
tcattggccctggtg

SEQ ID NO: 603643 - DNA, 15 bp, Homo sapiens
cattggccctggtgt

SEQ ID NO: 603644 - DNA, 15 bp, Homo sapiens
attggccctggtgtc

SEQ ID NO: 603645 - DNA, 15 bp, Homo sapiens
ttggccctggtgtca

SEQ ID NO: 603646 - DNA, 15 bp, Homo sapiens
tggccctggtgtcaa

SEQ ID NO: 603647 - DNA, 15 bp, Homo sapiens
ggccctggtgtcaaa

SEQ ID NO: 603648 - DNA, 15 bp, Homo sapiens
gccctggtgtcaaac

SEQ ID NO: 603649 - DNA, 15 bp, Homo sapiens
ccctggtgtcaaact

SEQ ID NO: 603650 - DNA, 15 bp, Homo sapiens
cctggtgtcaaactt

SEQ ID NO: 603651 - DNA, 15 bp, Homo sapiens
ctggtgtcaaactta

SEQ ID NO: 603652 - DNA, 15 bp, Homo sapiens
tggtgtcaaacttaa

SEQ ID NO: 603653 - DNA, 15 bp, Homo sapiens
ggtgtcaaacttaag

SEQ ID NO: 603654 - DNA, 15 bp, Homo sapiens
gtgtcaaacttaagt

SEQ ID NO: 603655 - DNA, 15 bp, Homo sapiens
tgtcaaacttaagtt

SEQ ID NO: 603656 - DNA, 15 bp, Homo sapiens
gtcaaacttaagttc

SEQ ID NO: 603657 - DNA, 15 bp, Homo sapiens
tcaaacttaagttcc

SEQ ID NO: 603658 - DNA, 15 bp, Homo sapiens
caaacttaagttccc

SEQ ID NO: 603659 - DNA, 15 bp, Homo sapiens
aaacttaagttcccc

SEQ ID NO: 603660 - DNA, 15 bp, Homo sapiens
aacttaagttcccct

SEQ ID NO: 603661 - DNA, 15 bp, Homo sapiens
acttaagttccccta

SEQ ID NO: 603662 - DNA, 15 bp, Homo sapiens
cttaagttcccctac

SEQ ID NO: 603663 - DNA, 15 bp, Homo sapiens
ttaagttcccctaca

SEQ ID NO: 603664 - DNA, 15 bp, Homo sapiens
taagttcccctacag

SEQ ID NO: 603665 - DNA, 15 bp, Homo sapiens
aagttcccctacaga

SEQ ID NO: 603666 - DNA, 15 bp, Homo sapiens
agttcccctacagag

SEQ ID NO: 603667 - DNA, 15 bp, Homo sapiens
gttcccctacagaga

SEQ ID NO: 603668 - DNA, 15 bp, Homo sapiens
ttcccctacagagag

SEQ ID NO: 603669 - DNA, 15 bp, Homo sapiens
tcccctacagagagg

SEQ ID NO: 603670 - DNA, 15 bp, Homo sapiens
cccctacagagaggc

SEQ ID NO: 603671 - DNA, 15 bp, Homo sapiens
ccctacagagaggcc

SEQ ID NO: 603672 - DNA, 15 bp, Homo sapiens
cctacagagaggcca

SEQ ID NO: 603673 - DNA, 15 bp, Homo sapiens
ctacagagaggccag

SEQ ID NO: 603674 - DNA, 15 bp, Homo sapiens
tacagagaggccagg

SEQ ID NO: 603675 - DNA, 15 bp, Homo sapiens
acagagaggccagga

SEQ ID NO: 603676 - DNA, 15 bp, Homo sapiens
cagagaggccaggaa

SEQ ID NO: 603677 - DNA, 15 bp, Homo sapiens
agagaggccaggaat

SEQ ID NO: 603678 - DNA, 15 bp, Homo sapiens
gagaggccaggaatg

SEQ ID NO: 603679 - DNA, 15 bp, Homo sapiens
agaggccaggaatga

SEQ ID NO: 603680 - DNA, 15 bp, Homo sapiens
gaggccaggaatgaa

SEQ ID NO: 603681 - DNA, 15 bp, Homo sapiens
aggccaggaatgaac

SEQ ID NO: 603682 - DNA, 15 bp, Homo sapiens
ggccaggaatgaacc

SEQ ID NO: 603683 - DNA, 15 bp, Homo sapiens
gccaggaatgaacca

SEQ ID NO: 603684 - DNA, 15 bp, Homo sapiens
ccaggaatgaaccat

SEQ ID NO: 603685 - DNA, 15 bp, Homo sapiens
caggaatgaaccatt

SEQ ID NO: 603686 - DNA, 15 bp, Homo sapiens
aggaatgaaccattt

SEQ ID NO: 603687 - DNA, 15 bp, Homo sapiens
ggaatgaaccatttc

SEQ ID NO: 603688 - DNA, 15 bp, Homo sapiens
gaatgaaccatttcc

SEQ ID NO: 603689 - DNA, 15 bp, Homo sapiens
aatgaaccatttcct

SEQ ID NO: 603690 - DNA, 15 bp, Homo sapiens
atgaaccatttcctc

SEQ ID NO: 603691 - DNA, 15 bp, Homo sapiens
tgaaccatttcctcc

SEQ ID NO: 603692 - DNA, 15 bp, Homo sapiens
gaaccatttcctcct

SEQ ID NO: 603693 - DNA, 15 bp, Homo sapiens
aaccatttcctcctg

SEQ ID NO: 603694 - DNA, 15 bp, Homo sapiens
accatttcctcctgg

SEQ ID NO: 603695 - DNA, 15 bp, Homo sapiens
ccatttcctcctgga

SEQ ID NO: 603696 - DNA, 15 bp, Homo sapiens
catttcctcctggac

SEQ ID NO: 603697 - DNA, 15 bp, Homo sapiens
atttcctcctggaca

SEQ ID NO: 603698 - DNA, 15 bp, Homo sapiens
tttcctcctggacac

SEQ ID NO: 603699 - DNA, 15 bp, Homo sapiens
ttcctcctggacaca

SEQ ID NO: 603700 - DNA, 15 bp, Homo sapiens
tcctcctggacacaa

SEQ ID NO: 603701 - DNA, 15 bp, Homo sapiens
cctcctggacacaag

SEQ ID NO: 603702 - DNA, 15 bp, Homo sapiens
ctcctggacacaagt

SEQ ID NO: 603703 - DNA, 15 bp, Homo sapiens
tcctggacacaagta

SEQ ID NO: 603704 - DNA, 15 bp, Homo sapiens
cctggacacaagtaa

SEQ ID NO: 603705 - DNA, 15 bp, Homo sapiens
ctggacacaagtaag

SEQ ID NO: 603706 - DNA, 15 bp, Homo sapiens
tggacacaagtaagc

SEQ ID NO: 603707 - DNA, 15 bp, Homo sapiens
ggacacaagtaagca

SEQ ID NO: 603708 - DNA, 15 bp, Homo sapiens
gacacaagtaagcag

SEQ ID NO: 603709 - DNA, 15 bp, Homo sapiens
acacaagtaagcagt

SEQ ID NO: 603710 - DNA, 15 bp, Homo sapiens
cacaagtaagcagtg

SEQ ID NO: 603711 - DNA, 15 bp, Homo sapiens
acaagtaagcagtgg

SEQ ID NO: 603712 - DNA, 15 bp, Homo sapiens
caagtaagcagtggc

SEQ ID NO: 603713 - DNA, 15 bp, Homo sapiens
aagtaagcagtggcc

SEQ ID NO: 603714 - DNA, 15 bp, Homo sapiens
agtaagcagtggcct

SEQ ID NO: 603715 - DNA, 15 bp, Homo sapiens
gtaagcagtggcctc

SEQ ID NO: 603716 - DNA, 15 bp, Homo sapiens
taagcagtggcctct

SEQ ID NO: 603717 - DNA, 15 bp, Homo sapiens
aagcagtggcctcta

SEQ ID NO: 603718 - DNA, 15 bp, Homo sapiens
agcagtggcctctat

SEQ ID NO: 603719 - DNA, 15 bp, Homo sapiens
gcagtggcctctatc

SEQ ID NO: 603720 - DNA, 15 bp, Homo sapiens
cagtggcctctatca

SEQ ID NO: 603721 - DNA, 15 bp, Homo sapiens
agtggcctctatcag

SEQ ID NO: 603722 - DNA, 15 bp, Homo sapiens
gtggcctctatcagc

SEQ ID NO: 603723 - DNA, 15 bp, Homo sapiens
tggcctctatcagcc

SEQ ID NO: 603724 - DNA, 15 bp, Homo sapiens
ggcctctatcagcct

SEQ ID NO: 603725 - DNA, 15 bp, Homo sapiens
gcctctatcagcctc

SEQ ID NO: 603726 - DNA, 15 bp, Homo sapiens
cctctatcagcctca

SEQ ID NO: 603727 - DNA, 15 bp, Homo sapiens
ctctatcagcctcac

SEQ ID NO: 603728 - DNA, 15 bp, Homo sapiens
tctatcagcctcaca

SEQ ID NO: 603729 - DNA, 15 bp, Homo sapiens
ctatcagcctcacat

SEQ ID NO: 603730 - DNA, 15 bp, Homo sapiens
tatcagcctcacatc

SEQ ID NO: 603731 - DNA, 15 bp, Homo sapiens
atcagcctcacatca

SEQ ID NO: 603732 - DNA, 15 bp, Homo sapiens
tcagcctcacatcaa

SEQ ID NO: 603733 - DNA, 15 bp, Homo sapiens
cagcctcacatcaaa

SEQ ID NO: 603734 - DNA, 15 bp, Homo sapiens
agcctcacatcaaac

SEQ ID NO: 603735 - DNA, 15 bp, Homo sapiens
gcctcacatcaaacc

SEQ ID NO: 603736 - DNA, 15 bp, Homo sapiens
cctcacatcaaacct

SEQ ID NO: 603737 - DNA, 15 bp, Homo sapiens
ctcacatcaaacctg

SEQ ID NO: 603738 - DNA, 15 bp, Homo sapiens
tcacatcaaacctga

SEQ ID NO: 603739 - DNA, 15 bp, Homo sapiens
cacatcaaacctgag

SEQ ID NO: 603740 - DNA, 15 bp, Homo sapiens
acatcaaacctgagg

SEQ ID NO: 603741 - DNA, 15 bp, Homo sapiens
catcaaacctgaggc

SEQ ID NO: 603742 - DNA, 15 bp, Homo sapiens
atcaaacctgaggcc

SEQ ID NO: 603743 - DNA, 15 bp, Homo sapiens
tcaaacctgaggcca

SEQ ID NO: 603744 - DNA, 15 bp, Homo sapiens
caaacctgaggccac

SEQ ID NO: 603745 - DNA, 15 bp, Homo sapiens
aaacctgaggccaca

SEQ ID NO: 603746 - DNA, 15 bp, Homo sapiens
aacctgaggccacag

SEQ ID NO: 603747 - DNA, 15 bp, Homo sapiens
acctgaggccacagg

SEQ ID NO: 603748 - DNA, 15 bp, Homo sapiens
cctgaggccacaggc

SEQ ID NO: 603749 - DNA, 15 bp, Homo sapiens
ctgaggccacaggcc

SEQ ID NO: 603750 - DNA, 15 bp, Homo sapiens
tgaggccacaggcca

SEQ ID NO: 603751 - DNA, 15 bp, Homo sapiens
gaggccacaggccag

SEQ ID NO: 603752 - DNA, 15 bp, Homo sapiens
aggccacaggccagc

SEQ ID NO: 603753 - DNA, 15 bp, Homo sapiens
ggccacaggccagcc

SEQ ID NO: 603754 - DNA, 15 bp, Homo sapiens
gccacaggccagcca

SEQ ID NO: 603755 - DNA, 15 bp, Homo sapiens
ccacaggccagccat

SEQ ID NO: 603756 - DNA, 15 bp, Homo sapiens
cacaggccagccatc

SEQ ID NO: 603757 - DNA, 15 bp, Homo sapiens
acaggccagccatct

SEQ ID NO: 603758 - DNA, 15 bp, Homo sapiens
caggccagccatctc

SEQ ID NO: 603759 - DNA, 15 bp, Homo sapiens
aggccagccatctcc

SEQ ID NO: 603760 - DNA, 15 bp, Homo sapiens
ggccagccatctccc

SEQ ID NO: 603761 - DNA, 15 bp, Homo sapiens
gccagccatctccct

SEQ ID NO: 603762 - DNA, 15 bp, Homo sapiens
ccagccatctccctg

SEQ ID NO: 603763 - DNA, 15 bp, Homo sapiens
cagccatctccctgg

SEQ ID NO: 603764 - DNA, 15 bp, Homo sapiens
agccatctccctggt

SEQ ID NO: 603765 - DNA, 15 bp, Homo sapiens
gccatctccctggta

SEQ ID NO: 603766 - DNA, 15 bp, Homo sapiens
ccatctccctggtag

SEQ ID NO: 603767 - DNA, 15 bp, Homo sapiens
catctccctggtagg

SEQ ID NO: 603768 - DNA, 15 bp, Homo sapiens
atctccctggtaggt

SEQ ID NO: 603769 - DNA, 15 bp, Homo sapiens
tctccctggtaggtg

SEQ ID NO: 603770 - DNA, 15 bp, Homo sapiens
ctccctggtaggtgg

SEQ ID NO: 603771 - DNA, 15 bp, Homo sapiens
tccctggtaggtgga

SEQ ID NO: 603772 - DNA, 15 bp, Homo sapiens
ccctggtaggtggac

SEQ ID NO: 603773 - DNA, 15 bp, Homo sapiens
cctggtaggtggaca

SEQ ID NO: 603774 - DNA, 15 bp, Homo sapiens
ctggtaggtggacat

SEQ ID NO: 603775 - DNA, 15 bp, Homo sapiens
tggtaggtggacatg

SEQ ID NO: 603776 - DNA, 15 bp, Homo sapiens
ggtaggtggacatgg

SEQ ID NO: 603777 - DNA, 15 bp, Homo sapiens
gtaggtggacatggg

SEQ ID NO: 603778 - DNA, 15 bp, Homo sapiens
taggtggacatgggg

SEQ ID NO: 603779 - DNA, 15 bp, Homo sapiens
aggtggacatggggc

SEQ ID NO: 603780 - DNA, 15 bp, Homo sapiens
ggtggacatggggca

SEQ ID NO: 603781 - DNA, 15 bp, Homo sapiens
gtggacatggggcat

SEQ ID NO: 603782 - DNA, 15 bp, Homo sapiens
tggacatggggcatg

SEQ ID NO: 603783 - DNA, 15 bp, Homo sapiens
ggacatggggcatgg

SEQ ID NO: 603784 - DNA, 15 bp, Homo sapiens
gacatggggcatggt

SEQ ID NO: 603785 - DNA, 15 bp, Homo sapiens
acatggggcatggtg

SEQ ID NO: 603786 - DNA, 15 bp, Homo sapiens
catggggcatggtgg

SEQ ID NO: 603787 - DNA, 15 bp, Homo sapiens
atggggcatggtggg

SEQ ID NO: 603788 - DNA, 15 bp, Homo sapiens
tggggcatggtgggg

SEQ ID NO: 603789 - DNA, 15 bp, Homo sapiens
ggggcatggtggggg

SEQ ID NO: 603790 - DNA, 15 bp, Homo sapiens
gggcatggtggggga

SEQ ID NO: 603791 - DNA, 15 bp, Homo sapiens
ggcatggtgggggac

SEQ ID NO: 603792 - DNA, 15 bp, Homo sapiens
gcatggtgggggaca

SEQ ID NO: 603793 - DNA, 15 bp, Homo sapiens
catggtgggggacag

SEQ ID NO: 603794 - DNA, 15 bp, Homo sapiens
atggtgggggacagc

SEQ ID NO: 603795 - DNA, 15 bp, Homo sapiens
tggtgggggacagcc

SEQ ID NO: 603796 - DNA, 15 bp, Homo sapiens
ggtgggggacagcct

SEQ ID NO: 603797 - DNA, 15 bp, Homo sapiens
gtgggggacagcctc

SEQ ID NO: 603798 - DNA, 15 bp, Homo sapiens
tgggggacagcctct

SEQ ID NO: 603799 - DNA, 15 bp, Homo sapiens
gggggacagcctctg

SEQ ID NO: 603800 - DNA, 15 bp, Homo sapiens
ggggacagcctctgc

SEQ ID NO: 603801 - DNA, 15 bp, Homo sapiens
gggacagcctctgct

SEQ ID NO: 603802 - DNA, 15 bp, Homo sapiens
ggacagcctctgctg

SEQ ID NO: 603803 - DNA, 15 bp, Homo sapiens
gacagcctctgctgg

SEQ ID NO: 603804 - DNA, 15 bp, Homo sapiens
acagcctctgctggg

SEQ ID NO: 603805 - DNA, 15 bp, Homo sapiens
cagcctctgctggga

SEQ ID NO: 603806 - DNA, 15 bp, Homo sapiens
agcctctgctgggat

SEQ ID NO: 603807 - DNA, 15 bp, Homo sapiens
gcctctgctgggatg

SEQ ID NO: 603808 - DNA, 15 bp, Homo sapiens
cctctgctgggatgt

SEQ ID NO: 603809 - DNA, 15 bp, Homo sapiens
ctctgctgggatgtg

SEQ ID NO: 603810 - DNA, 15 bp, Homo sapiens
tctgctgggatgtga

SEQ ID NO: 603811 - DNA, 15 bp, Homo sapiens
ctgctgggatgtgaa

SEQ ID NO: 603812 - DNA, 15 bp, Homo sapiens
tgctgggatgtgaat

SEQ ID NO: 603813 - DNA, 15 bp, Homo sapiens
gctgggatgtgaatg

SEQ ID NO: 603814 - DNA, 15 bp, Homo sapiens
ctgggatgtgaatgg

SEQ ID NO: 603815 - DNA, 15 bp, Homo sapiens
tgggatgtgaatggg

SEQ ID NO: 603816 - DNA, 15 bp, Homo sapiens
gggatgtgaatgggc

SEQ ID NO: 603817 - DNA, 15 bp, Homo sapiens
ggatgtgaatgggca

SEQ ID NO: 603818 - DNA, 15 bp, Homo sapiens
gatgtgaatgggcac

SEQ ID NO: 603819 - DNA, 15 bp, Homo sapiens
atgtgaatgggcaca

SEQ ID NO: 603820 - DNA, 15 bp, Homo sapiens
tgtgaatgggcacag

SEQ ID NO: 603821 - DNA, 15 bp, Homo sapiens
gtgaatgggcacagg

SEQ ID NO: 603822 - DNA, 15 bp, Homo sapiens
tgaatgggcacaggc

SEQ ID NO: 603823 - DNA, 15 bp, Homo sapiens
gaatgggcacaggca

SEQ ID NO: 603824 - DNA, 15 bp, Homo sapiens
aatgggcacaggcaa

SEQ ID NO: 603825 - DNA, 15 bp, Homo sapiens
atgggcacaggcaat

SEQ ID NO: 603826 - DNA, 15 bp, Homo sapiens
tgggcacaggcaatg

SEQ ID NO: 603827 - DNA, 15 bp, Homo sapiens
gggcacaggcaatgc

SEQ ID NO: 603828 - DNA, 15 bp, Homo sapiens
ggcacaggcaatgcc

SEQ ID NO: 603829 - DNA, 15 bp, Homo sapiens
gcacaggcaatgccc

SEQ ID NO: 603830 - DNA, 15 bp, Homo sapiens
cacaggcaatgcccc

SEQ ID NO: 603831 - DNA, 15 bp, Homo sapiens
acaggcaatgccccg

SEQ ID NO: 603832 - DNA, 15 bp, Homo sapiens
caggcaatgccccgc

SEQ ID NO: 603833 - DNA, 15 bp, Homo sapiens
aggcaatgccccgcc

SEQ ID NO: 603834 - DNA, 15 bp, Homo sapiens
ggcaatgccccgcct

SEQ ID NO: 603835 - DNA, 15 bp, Homo sapiens
gcaatgccccgcctt

SEQ ID NO: 603836 - DNA, 15 bp, Homo sapiens
caatgccccgccttg

SEQ ID NO: 603837 - DNA, 15 bp, Homo sapiens
aatgccccgccttgc

SEQ ID NO: 603838 - DNA, 15 bp, Homo sapiens
atgccccgccttgcc

SEQ ID NO: 603839 - DNA, 15 bp, Homo sapiens
tgccccgccttgcct

SEQ ID NO: 603840 - DNA, 15 bp, Homo sapiens
gccccgccttgcctc

SEQ ID NO: 603841 - DNA, 15 bp, Homo sapiens
ccccgccttgcctct

SEQ ID NO: 603842 - DNA, 15 bp, Homo sapiens
cccgccttgcctctg

SEQ ID NO: 603843 - DNA, 15 bp, Homo sapiens
ccgccttgcctctgc

SEQ ID NO: 603844 - DNA, 15 bp, Homo sapiens
cgccttgcctctgca

SEQ ID NO: 603845 - DNA, 15 bp, Homo sapiens
gccttgcctctgcag

SEQ ID NO: 603846 - DNA, 15 bp, Homo sapiens
ccttgcctctgcagg

SEQ ID NO: 603847 - DNA, 15 bp, Homo sapiens
cttgcctctgcaggg

SEQ ID NO: 603848 - DNA, 15 bp, Homo sapiens
ttgcctctgcagggc

SEQ ID NO: 603849 - DNA, 15 bp, Homo sapiens
tgcctctgcagggcc

SEQ ID NO: 603850 - DNA, 15 bp, Homo sapiens
gcctctgcagggcct

SEQ ID NO: 603851 - DNA, 15 bp, Homo sapiens
cctctgcagggcctg

SEQ ID NO: 603852 - DNA, 15 bp, Homo sapiens
ctctgcagggcctgt

SEQ ID NO: 603853 - DNA, 15 bp, Homo sapiens
tctgcagggcctgtg

SEQ ID NO: 603854 - DNA, 15 bp, Homo sapiens
ctgcagggcctgtgt

SEQ ID NO: 603855 - DNA, 15 bp, Homo sapiens
tgcagggcctgtgtt

SEQ ID NO: 603856 - DNA, 15 bp, Homo sapiens
gcagggcctgtgttt

SEQ ID NO: 603857 - DNA, 15 bp, Homo sapiens
cagggcctgtgtttg

SEQ ID NO: 603858 - DNA, 15 bp, Homo sapiens
agggcctgtgtttga

SEQ ID NO: 603859 - DNA, 15 bp, Homo sapiens
gggcctgtgtttgat

SEQ ID NO: 603860 - DNA, 15 bp, Homo sapiens
ggcctgtgtttgatc

SEQ ID NO: 603861 - DNA, 15 bp, Homo sapiens
gcctgtgtttgatct

SEQ ID NO: 603862 - DNA, 15 bp, Homo sapiens
cctgtgtttgatctc

SEQ ID NO: 603863 - DNA, 15 bp, Homo sapiens
ctgtgtttgatctct

SEQ ID NO: 603864 - DNA, 15 bp, Homo sapiens
tgtgtttgatctctg

SEQ ID NO: 603865 - DNA, 15 bp, Homo sapiens
gtgtttgatctctgt

SEQ ID NO: 603866 - DNA, 15 bp, Homo sapiens
tgtttgatctctgtt

SEQ ID NO: 603867 - DNA, 15 bp, Homo sapiens
gtttgatctctgtta

SEQ ID NO: 603868 - DNA, 15 bp, Homo sapiens
tttgatctctgttag

SEQ ID NO: 603869 - DNA, 15 bp, Homo sapiens
ttgatctctgttagt

SEQ ID NO: 603870 - DNA, 15 bp, Homo sapiens
tgatctctgttagtt

SEQ ID NO: 603871 - DNA, 15 bp, Homo sapiens
gatctctgttagttt

SEQ ID NO: 603872 - DNA, 15 bp, Homo sapiens
atctctgttagtttc

SEQ ID NO: 603873 - DNA, 15 bp, Homo sapiens
tctctgttagtttcc

SEQ ID NO: 603874 - DNA, 15 bp, Homo sapiens
ctctgttagtttcca

SEQ ID NO: 603875 - DNA, 15 bp, Homo sapiens
tctgttagtttccat

SEQ ID NO: 603876 - DNA, 15 bp, Homo sapiens
ctgttagtttccatc

SEQ ID NO: 603877 - DNA, 15 bp, Homo sapiens
tgttagtttccatct

SEQ ID NO: 603878 - DNA, 15 bp, Homo sapiens
gttagtttccatcta

SEQ ID NO: 603879 - DNA, 15 bp, Homo sapiens
ttagtttccatctat

SEQ ID NO: 603880 - DNA, 15 bp, Homo sapiens
tagtttccatctatg

SEQ ID NO: 603881 - DNA, 15 bp, Homo sapiens
agtttccatctatgc

SEQ ID NO: 603882 - DNA, 15 bp, Homo sapiens
gtttccatctatgct

SEQ ID NO: 603883 - DNA, 15 bp, Homo sapiens
tttccatctatgctc

SEQ ID NO: 603884 - DNA, 15 bp, Homo sapiens
ttccatctatgctct

SEQ ID NO: 603885 - DNA, 15 bp, Homo sapiens
tccatctatgctctt

SEQ ID NO: 603886 - DNA, 15 bp, Homo sapiens
ccatctatgctcttc

SEQ ID NO: 603887 - DNA, 15 bp, Homo sapiens
catctatgctcttcc

SEQ ID NO: 603888 - DNA, 15 bp, Homo sapiens
atctatgctcttcct

SEQ ID NO: 603889 - DNA, 15 bp, Homo sapiens
tctatgctcttcctt

SEQ ID NO: 603890 - DNA, 15 bp, Homo sapiens
ctatgctcttccttt

SEQ ID NO: 603891 - DNA, 15 bp, Homo sapiens
tatgctcttcctttc

SEQ ID NO: 603892 - DNA, 15 bp, Homo sapiens
atgctcttcctttct

SEQ ID NO: 603893 - DNA, 15 bp, Homo sapiens
tgctcttcctttctc

SEQ ID NO: 603894 - DNA, 15 bp, Homo sapiens
gctcttcctttctca

SEQ ID NO: 603895 - DNA, 15 bp, Homo sapiens
ctcttcctttctcag

SEQ ID NO: 603896 - DNA, 15 bp, Homo sapiens
tcttcctttctcagg

SEQ ID NO: 603897 - DNA, 15 bp, Homo sapiens
cttcctttctcaggt

SEQ ID NO: 603898 - DNA, 15 bp, Homo sapiens
ttcctttctcaggtc

SEQ ID NO: 603899 - DNA, 15 bp, Homo sapiens
tcctttctcaggtct

SEQ ID NO: 603900 - DNA, 15 bp, Homo sapiens
cctttctcaggtctt

SEQ ID NO: 603901 - DNA, 15 bp, Homo sapiens
ctttctcaggtcttt

SEQ ID NO: 603902 - DNA, 15 bp, Homo sapiens
tttctcaggtctttt

SEQ ID NO: 603903 - DNA, 15 bp, Homo sapiens
ttctcaggtcttttt

SEQ ID NO: 603904 - DNA, 15 bp, Homo sapiens
tctcaggtctttttt

SEQ ID NO: 603905 - DNA, 15 bp, Homo sapiens
ctcaggtcttttttg

SEQ ID NO: 603906 - DNA, 15 bp, Homo sapiens
tcaggtcttttttgt

SEQ ID NO: 603907 - DNA, 15 bp, Homo sapiens
caggtcttttttgtt

SEQ ID NO: 603908 - DNA, 15 bp, Homo sapiens
aggtcttttttgttt

SEQ ID NO: 603909 - DNA, 15 bp, Homo sapiens
ggtcttttttgtttt

SEQ ID NO: 603910 - DNA, 15 bp, Homo sapiens
gtcttttttgttttt

SEQ ID NO: 603911 - DNA, 15 bp, Homo sapiens
tcttttttgtttttt

SEQ ID NO: 603912 - DNA, 15 bp, Homo sapiens
cttttttgttttttc

SEQ ID NO: 603913 - DNA, 15 bp, Homo sapiens
ttttttgttttttct

SEQ ID NO: 603914 - DNA, 15 bp, Homo sapiens
tttttgttttttctg

SEQ ID NO: 603915 - DNA, 15 bp, Homo sapiens
ttttgttttttctgt

SEQ ID NO: 603916 - DNA, 15 bp, Homo sapiens
tttgttttttctgtg

SEQ ID NO: 603917 - DNA, 15 bp, Homo sapiens
ttgttttttctgtgt

SEQ ID NO: 603918 - DNA, 15 bp, Homo sapiens
tgttttttctgtgtg

SEQ ID NO: 603919 - DNA, 15 bp, Homo sapiens
gttttttctgtgtga

SEQ ID NO: 603920 - DNA, 15 bp, Homo sapiens
ttttttctgtgtgag

SEQ ID NO: 603921 - DNA, 15 bp, Homo sapiens
tttttctgtgtgagt

SEQ ID NO: 603922 - DNA, 15 bp, Homo sapiens
ttttctgtgtgagtc

SEQ ID NO: 603923 - DNA, 15 bp, Homo sapiens
tttctgtgtgagtct

SEQ ID NO: 603924 - DNA, 15 bp, Homo sapiens
ttctgtgtgagtctt

SEQ ID NO: 603925 - DNA, 15 bp, Homo sapiens
tctgtgtgagtcttg

SEQ ID NO: 603926 - DNA, 15 bp, Homo sapiens
ctgtgtgagtcttga

SEQ ID NO: 603927 - DNA, 15 bp, Homo sapiens
tgtgtgagtcttgat

SEQ ID NO: 603928 - DNA, 15 bp, Homo sapiens
gtgtgagtcttgatt

SEQ ID NO: 603929 - DNA, 15 bp, Homo sapiens
tgtgagtcttgattc

SEQ ID NO: 603930 - DNA, 15 bp, Homo sapiens
gtgagtcttgattct

SEQ ID NO: 603931 - DNA, 15 bp, Homo sapiens
tgagtcttgattctc

SEQ ID NO: 603932 - DNA, 15 bp, Homo sapiens
gagtcttgattctct

SEQ ID NO: 603933 - DNA, 15 bp, Homo sapiens
agtcttgattctctg

SEQ ID NO: 603934 - DNA, 15 bp, Homo sapiens
gtcttgattctctga

SEQ ID NO: 603935 - DNA, 15 bp, Homo sapiens
tcttgattctctgaa

SEQ ID NO: 603936 - DNA, 15 bp, Homo sapiens
cttgattctctgaag

SEQ ID NO: 603937 - DNA, 15 bp, Homo sapiens
ttgattctctgaaga

SEQ ID NO: 603938 - DNA, 15 bp, Homo sapiens
tgattctctgaagac

SEQ ID NO: 603939 - DNA, 15 bp, Homo sapiens
gattctctgaagaca

SEQ ID NO: 603940 - DNA, 15 bp, Homo sapiens
attctctgaagacag

SEQ ID NO: 603941 - DNA, 15 bp, Homo sapiens
ttctctgaagacagg

SEQ ID NO: 603942 - DNA, 15 bp, Homo sapiens
tctctgaagacaggg

SEQ ID NO: 603943 - DNA, 15 bp, Homo sapiens
ctctgaagacaggga

SEQ ID NO: 603944 - DNA, 15 bp, Homo sapiens
tctgaagacagggac

SEQ ID NO: 603945 - DNA, 15 bp, Homo sapiens
ctgaagacagggacg

SEQ ID NO: 603946 - DNA, 15 bp, Homo sapiens
tgaagacagggacgg

SEQ ID NO: 603947 - DNA, 15 bp, Homo sapiens
gaagacagggacggt

SEQ ID NO: 603948 - DNA, 15 bp, Homo sapiens
aagacagggacggtg

SEQ ID NO: 603949 - DNA, 15 bp, Homo sapiens
agacagggacggtgc

SEQ ID NO: 603950 - DNA, 15 bp, Homo sapiens
gacagggacggtgcc

SEQ ID NO: 603951 - DNA, 15 bp, Homo sapiens
acagggacggtgcca

SEQ ID NO: 603952 - DNA, 15 bp, Homo sapiens
cagggacggtgccac

SEQ ID NO: 603953 - DNA, 15 bp, Homo sapiens
agggacggtgccacc

SEQ ID NO: 603954 - DNA, 15 bp, Homo sapiens
gggacggtgccacca

SEQ ID NO: 603955 - DNA, 15 bp, Homo sapiens
ggacggtgccaccat

SEQ ID NO: 603956 - DNA, 15 bp, Homo sapiens
gacggtgccaccatc

SEQ ID NO: 603957 - DNA, 15 bp, Homo sapiens
acggtgccaccatcc

SEQ ID NO: 603958 - DNA, 15 bp, Homo sapiens
cggtgccaccatcct

SEQ ID NO: 603959 - DNA, 15 bp, Homo sapiens
ggtgccaccatcctc

SEQ ID NO: 603960 - DNA, 15 bp, Homo sapiens
gtgccaccatcctca

SEQ ID NO: 603961 - DNA, 15 bp, Homo sapiens
tgccaccatcctcag

SEQ ID NO: 603962 - DNA, 15 bp, Homo sapiens
gccaccatcctcaga

SEQ ID NO: 603963 - DNA, 15 bp, Homo sapiens
ccaccatcctcagac

SEQ ID NO: 603964 - DNA, 15 bp, Homo sapiens
caccatcctcagaca

SEQ ID NO: 603965 - DNA, 15 bp, Homo sapiens
accatcctcagacag

SEQ ID NO: 603966 - DNA, 15 bp, Homo sapiens
ccatcctcagacagg

SEQ ID NO: 603967 - DNA, 15 bp, Homo sapiens
catcctcagacaggg

SEQ ID NO: 603968 - DNA, 15 bp, Homo sapiens
atcctcagacagggg

SEQ ID NO: 603969 - DNA, 15 bp, Homo sapiens
tcctcagacagggga

SEQ ID NO: 603970 - DNA, 15 bp, Homo sapiens
cctcagacaggggag

SEQ ID NO: 603971 - DNA, 15 bp, Homo sapiens
ctcagacaggggagc

SEQ ID NO: 603972 - DNA, 15 bp, Homo sapiens
tcagacaggggagct

SEQ ID NO: 603973 - DNA, 15 bp, Homo sapiens
cagacaggggagctc

SEQ ID NO: 603974 - DNA, 15 bp, Homo sapiens
agacaggggagctcc

SEQ ID NO: 603975 - DNA, 15 bp, Homo sapiens
gacaggggagctccc

SEQ ID NO: 603976 - DNA, 15 bp, Homo sapiens
acaggggagctccct

SEQ ID NO: 603977 - DNA, 15 bp, Homo sapiens
caggggagctccctg

SEQ ID NO: 603978 - DNA, 15 bp, Homo sapiens
aggggagctccctga

SEQ ID NO: 603979 - DNA, 15 bp, Homo sapiens
ggggagctccctgag

SEQ ID NO: 603980 - DNA, 15 bp, Homo sapiens
gggagctccctgagg

SEQ ID NO: 603981 - DNA, 15 bp, Homo sapiens
ggagctccctgagga

SEQ ID NO: 603982 - DNA, 15 bp, Homo sapiens
gagctccctgaggac

SEQ ID NO: 603983 - DNA, 15 bp, Homo sapiens
agctccctgaggacg

SEQ ID NO: 603984 - DNA, 15 bp, Homo sapiens
gctccctgaggacgg

SEQ ID NO: 603985 - DNA, 15 bp, Homo sapiens
ctccctgaggacggg

SEQ ID NO: 603986 - DNA, 15 bp, Homo sapiens
tccctgaggacgggg

SEQ ID NO: 603987 - DNA, 15 bp, Homo sapiens
ccctgaggacggggg

SEQ ID NO: 603988 - DNA, 15 bp, Homo sapiens
cctgaggacgggggc

SEQ ID NO: 603989 - DNA, 15 bp, Homo sapiens
ctgaggacgggggct

SEQ ID NO: 603990 - DNA, 15 bp, Homo sapiens
tgaggacgggggctg

SEQ ID NO: 603991 - DNA, 15 bp, Homo sapiens
gaggacgggggctgg

SEQ ID NO: 603992 - DNA, 15 bp, Homo sapiens
aggacgggggctgga

SEQ ID NO: 603993 - DNA, 15 bp, Homo sapiens
ggacgggggctggat

SEQ ID NO: 603994 - DNA, 15 bp, Homo sapiens
gacgggggctggatc

SEQ ID NO: 603995 - DNA, 15 bp, Homo sapiens
acgggggctggatcc

SEQ ID NO: 603996 - DNA, 15 bp, Homo sapiens
cgggggctggatccc

SEQ ID NO: 603997 - DNA, 15 bp, Homo sapiens
gggggctggatccct

SEQ ID NO: 603998 - DNA, 15 bp, Homo sapiens
ggggctggatccctt

SEQ ID NO: 603999 - DNA, 15 bp, Homo sapiens
gggctggatcccttt

SEQ ID NO: 604000 - DNA, 15 bp, Homo sapiens
ggctggatccctttc

SEQ ID NO: 604001 - DNA, 15 bp, Homo sapiens
gctggatccctttcc

SEQ ID NO: 604002 - DNA, 15 bp, Homo sapiens
ctggatccctttcct

SEQ ID NO: 604003 - DNA, 15 bp, Homo sapiens
tggatccctttcctc

SEQ ID NO: 604004 - DNA, 15 bp, Homo sapiens
ggatccctttcctct

SEQ ID NO: 604005 - DNA, 15 bp, Homo sapiens
gatccctttcctctc

SEQ ID NO: 604006 - DNA, 15 bp, Homo sapiens
atccctttcctctct

SEQ ID NO: 604007 - DNA, 15 bp, Homo sapiens
tccctttcctctctc

SEQ ID NO: 604008 - DNA, 15 bp, Homo sapiens
ccctttcctctctcc

SEQ ID NO: 604009 - DNA, 15 bp, Homo sapiens
cctttcctctctcca

SEQ ID NO: 604010 - DNA, 15 bp, Homo sapiens
ctttcctctctccaa

SEQ ID NO: 604011 - DNA, 15 bp, Homo sapiens
tttcctctctccaag

SEQ ID NO: 604012 - DNA, 15 bp, Homo sapiens
ttcctctctccaagg

SEQ ID NO: 604013 - DNA, 15 bp, Homo sapiens
tcctctctccaaggg

SEQ ID NO: 604014 - DNA, 15 bp, Homo sapiens
cctctctccaagggc

SEQ ID NO: 604015 - DNA, 15 bp, Homo sapiens
ctctctccaagggct

SEQ ID NO: 604016 - DNA, 15 bp, Homo sapiens
tctctccaagggcta

SEQ ID NO: 604017 - DNA, 15 bp, Homo sapiens
ctctccaagggctat

SEQ ID NO: 604018 - DNA, 15 bp, Homo sapiens
tctccaagggctatc

SEQ ID NO: 604019 - DNA, 15 bp, Homo sapiens
ctccaagggctatct

SEQ ID NO: 604020 - DNA, 15 bp, Homo sapiens
tccaagggctatctc

SEQ ID NO: 604021 - DNA, 15 bp, Homo sapiens
ccaagggctatctcc

SEQ ID NO: 604022 - DNA, 15 bp, Homo sapiens
caagggctatctcca

SEQ ID NO: 604023 - DNA, 15 bp, Homo sapiens
aagggctatctccat

SEQ ID NO: 604024 - DNA, 15 bp, Homo sapiens
agggctatctccatt

SEQ ID NO: 604025 - DNA, 15 bp, Homo sapiens
gggctatctccattt

SEQ ID NO: 604026 - DNA, 15 bp, Homo sapiens
ggctatctccatttc

SEQ ID NO: 604027 - DNA, 15 bp, Homo sapiens
gctatctccatttcc

SEQ ID NO: 604028 - DNA, 15 bp, Homo sapiens
ctatctccatttcca

SEQ ID NO: 604029 - DNA, 15 bp, Homo sapiens
tatctccatttccaa

SEQ ID NO: 604030 - DNA, 15 bp, Homo sapiens
atctccatttccaac

SEQ ID NO: 604031 - DNA, 15 bp, Homo sapiens
tctccatttccaacc

SEQ ID NO: 604032 - DNA, 15 bp, Homo sapiens
ctccatttccaacct

SEQ ID NO: 604033 - DNA, 15 bp, Homo sapiens
tccatttccaaccta

SEQ ID NO: 604034 - DNA, 15 bp, Homo sapiens
ccatttccaacctat

SEQ ID NO: 604035 - DNA, 15 bp, Homo sapiens
catttccaacctata

SEQ ID NO: 604036 - DNA, 15 bp, Homo sapiens
atttccaacctataa

SEQ ID NO: 604037 - DNA, 15 bp, Homo sapiens
tttccaacctataat

SEQ ID NO: 604038 - DNA, 15 bp, Homo sapiens
ttccaacctataatt

SEQ ID NO: 604039 - DNA, 15 bp, Homo sapiens
tccaacctataatta

SEQ ID NO: 604040 - DNA, 15 bp, Homo sapiens
ccaacctataattag

SEQ ID NO: 604041 - DNA, 15 bp, Homo sapiens
caacctataattaga

SEQ ID NO: 604042 - DNA, 15 bp, Homo sapiens
aacctataattagag

SEQ ID NO: 604043 - DNA, 15 bp, Homo sapiens
acctataattagagt

SEQ ID NO: 604044 - DNA, 15 bp, Homo sapiens
cctataattagagtc

SEQ ID NO: 604045 - DNA, 15 bp, Homo sapiens
ctataattagagtct

SEQ ID NO: 604046 - DNA, 15 bp, Homo sapiens
tataattagagtcta

SEQ ID NO: 604047 - DNA, 15 bp, Homo sapiens
ataattagagtctat

SEQ ID NO: 604048 - DNA, 15 bp, Homo sapiens
taattagagtctatg

SEQ ID NO: 604049 - DNA, 15 bp, Homo sapiens
aattagagtctatgt

SEQ ID NO: 604050 - DNA, 15 bp, Homo sapiens
attagagtctatgtg

SEQ ID NO: 604051 - DNA, 15 bp, Homo sapiens
ttagagtctatgtga

SEQ ID NO: 604052 - DNA, 15 bp, Homo sapiens
tagagtctatgtgaa

SEQ ID NO: 604053 - DNA, 15 bp, Homo sapiens
agagtctatgtgaag

SEQ ID NO: 604054 - DNA, 15 bp, Homo sapiens
gagtctatgtgaagg

SEQ ID NO: 604055 - DNA, 15 bp, Homo sapiens
agtctatgtgaaggt

SEQ ID NO: 604056 - DNA, 15 bp, Homo sapiens
gtctatgtgaaggta

SEQ ID NO: 604057 - DNA, 15 bp, Homo sapiens
tctatgtgaaggtag

SEQ ID NO: 604058 - DNA, 15 bp, Homo sapiens
ctatgtgaaggtagg

SEQ ID NO: 604059 - DNA, 15 bp, Homo sapiens
tatgtgaaggtagga

SEQ ID NO: 604060 - DNA, 15 bp, Homo sapiens
atgtgaaggtaggag

SEQ ID NO: 604061 - DNA, 15 bp, Homo sapiens
tgtgaaggtaggagc

SEQ ID NO: 604062 - DNA, 15 bp, Homo sapiens
gtgaaggtaggagct

SEQ ID NO: 604063 - DNA, 15 bp, Homo sapiens
tgaaggtaggagctg

SEQ ID NO: 604064 - DNA, 15 bp, Homo sapiens
gaaggtaggagctgg

SEQ ID NO: 604065 - DNA, 15 bp, Homo sapiens
aaggtaggagctggg

SEQ ID NO: 604066 - DNA, 15 bp, Homo sapiens
aggtaggagctgggt

SEQ ID NO: 604067 - DNA, 15 bp, Homo sapiens
ggtaggagctgggta

SEQ ID NO: 604068 - DNA, 15 bp, Homo sapiens
gtaggagctgggtat

SEQ ID NO: 604069 - DNA, 15 bp, Homo sapiens
taggagctgggtatt

SEQ ID NO: 604070 - DNA, 15 bp, Homo sapiens
aggagctgggtattc

SEQ ID NO: 604071 - DNA, 15 bp, Homo sapiens
ggagctgggtattcc

SEQ ID NO: 604072 - DNA, 15 bp, Homo sapiens
gagctgggtattccc

SEQ ID NO: 604073 - DNA, 15 bp, Homo sapiens
agctgggtattccct

SEQ ID NO: 604074 - DNA, 15 bp, Homo sapiens
gctgggtattccctt

SEQ ID NO: 604075 - DNA, 15 bp, Homo sapiens
ctgggtattcccttt

SEQ ID NO: 604076 - DNA, 15 bp, Homo sapiens
tgggtattccctttt

SEQ ID NO: 604077 - DNA, 15 bp, Homo sapiens
gggtattcccttttt

SEQ ID NO: 604078 - DNA, 15 bp, Homo sapiens
ggtattccctttttc

SEQ ID NO: 604079 - DNA, 15 bp, Homo sapiens
gtattccctttttct

SEQ ID NO: 604080 - DNA, 15 bp, Homo sapiens
tattccctttttcta

SEQ ID NO: 604081 - DNA, 15 bp, Homo sapiens
attccctttttctat

SEQ ID NO: 604082 - DNA, 15 bp, Homo sapiens
ttccctttttctatg

SEQ ID NO: 604083 - DNA, 15 bp, Homo sapiens
tccctttttctatgg

SEQ ID NO: 604084 - DNA, 15 bp, Homo sapiens
ccctttttctatggg

SEQ ID NO: 604085 - DNA, 15 bp, Homo sapiens
cctttttctatgggg

SEQ ID NO: 604086 - DNA, 15 bp, Homo sapiens
ctttttctatggggg

SEQ ID NO: 604087 - DNA, 15 bp, Homo sapiens
tttttctatggggga

SEQ ID NO: 604088 - DNA, 15 bp, Homo sapiens
ttttctatgggggat

SEQ ID NO: 604089 - DNA, 15 bp, Homo sapiens
tttctatgggggatc

SEQ ID NO: 604090 - DNA, 15 bp, Homo sapiens
ttctatgggggatct

SEQ ID NO: 604091 - DNA, 15 bp, Homo sapiens
tctatgggggatctc

SEQ ID NO: 604092 - DNA, 15 bp, Homo sapiens
ctatgggggatctcc

SEQ ID NO: 604093 - DNA, 15 bp, Homo sapiens
tatgggggatctcca

SEQ ID NO: 604094 - DNA, 15 bp, Homo sapiens
atgggggatctccaa

SEQ ID NO: 604095 - DNA, 15 bp, Homo sapiens
tgggggatctccaaa

SEQ ID NO: 604096 - DNA, 15 bp, Homo sapiens
gggggatctccaaag

SEQ ID NO: 604097 - DNA, 15 bp, Homo sapiens
ggggatctccaaagg

SEQ ID NO: 604098 - DNA, 15 bp, Homo sapiens
gggatctccaaaggc

SEQ ID NO: 604099 - DNA, 15 bp, Homo sapiens
ggatctccaaaggcc

SEQ ID NO: 604100 - DNA, 15 bp, Homo sapiens
gatctccaaaggcca

SEQ ID NO: 604101 - DNA, 15 bp, Homo sapiens
atctccaaaggccaa

SEQ ID NO: 604102 - DNA, 15 bp, Homo sapiens
tctccaaaggccaag

SEQ ID NO: 604103 - DNA, 15 bp, Homo sapiens
ctccaaaggccaagg

SEQ ID NO: 604104 - DNA, 15 bp, Homo sapiens
tccaaaggccaaggc

SEQ ID NO: 604105 - DNA, 15 bp, Homo sapiens
ccaaaggccaaggct

SEQ ID NO: 604106 - DNA, 15 bp, Homo sapiens
caaaggccaaggctg

SEQ ID NO: 604107 - DNA, 15 bp, Homo sapiens
aaaggccaaggctgc

SEQ ID NO: 604108 - DNA, 15 bp, Homo sapiens
aaggccaaggctgca

SEQ ID NO: 604109 - DNA, 15 bp, Homo sapiens
aggccaaggctgcat

SEQ ID NO: 604110 - DNA, 15 bp, Homo sapiens
ggccaaggctgcata

SEQ ID NO: 604111 - DNA, 15 bp, Homo sapiens
gccaaggctgcatac

SEQ ID NO: 604112 - DNA, 15 bp, Homo sapiens
ccaaggctgcatacg

SEQ ID NO: 604113 - DNA, 15 bp, Homo sapiens
caaggctgcatacga

SEQ ID NO: 604114 - DNA, 15 bp, Homo sapiens
aaggctgcatacgac

SEQ ID NO: 604115 - DNA, 15 bp, Homo sapiens
aggctgcatacgacc

SEQ ID NO: 604116 - DNA, 15 bp, Homo sapiens
ggctgcatacgacca

SEQ ID NO: 604117 - DNA, 15 bp, Homo sapiens
gctgcatacgaccaa

SEQ ID NO: 604118 - DNA, 15 bp, Homo sapiens
ctgcatacgaccaag

SEQ ID NO: 604119 - DNA, 15 bp, Homo sapiens
tgcatacgaccaaga

SEQ ID NO: 604120 - DNA, 15 bp, Homo sapiens
gcatacgaccaagag

SEQ ID NO: 604121 - DNA, 15 bp, Homo sapiens
catacgaccaagagg

SEQ ID NO: 604122 - DNA, 15 bp, Homo sapiens
atacgaccaagaggc

SEQ ID NO: 604123 - DNA, 15 bp, Homo sapiens
tacgaccaagaggcc

SEQ ID NO: 604124 - DNA, 15 bp, Homo sapiens
acgaccaagaggccg

SEQ ID NO: 604125 - DNA, 15 bp, Homo sapiens
cgaccaagaggccgt

SEQ ID NO: 604126 - DNA, 15 bp, Homo sapiens
gaccaagaggccgtg

SEQ ID NO: 604127 - DNA, 15 bp, Homo sapiens
accaagaggccgtgt

SEQ ID NO: 604128 - DNA, 15 bp, Homo sapiens
ccaagaggccgtgta

SEQ ID NO: 604129 - DNA, 15 bp, Homo sapiens
caagaggccgtgtac

SEQ ID NO: 604130 - DNA, 15 bp, Homo sapiens
aagaggccgtgtact

SEQ ID NO: 604131 - DNA, 15 bp, Homo sapiens
agaggccgtgtactc

SEQ ID NO: 604132 - DNA, 15 bp, Homo sapiens
gaggccgtgtactcc

SEQ ID NO: 604133 - DNA, 15 bp, Homo sapiens
aggccgtgtactcct

SEQ ID NO: 604134 - DNA, 15 bp, Homo sapiens
ggccgtgtactcctt

SEQ ID NO: 604135 - DNA, 15 bp, Homo sapiens
gccgtgtactccttt

SEQ ID NO: 604136 - DNA, 15 bp, Homo sapiens
ccgtgtactcctttt

SEQ ID NO: 604137 - DNA, 15 bp, Homo sapiens
cgtgtactcctttta

SEQ ID NO: 604138 - DNA, 15 bp, Homo sapiens
gtgtactccttttag

SEQ ID NO: 604139 - DNA, 15 bp, Homo sapiens
tgtactccttttaga

SEQ ID NO: 604140 - DNA, 15 bp, Homo sapiens
gtactccttttagac

SEQ ID NO: 604141 - DNA, 15 bp, Homo sapiens
tactccttttagacc

SEQ ID NO: 604142 - DNA, 15 bp, Homo sapiens
actccttttagacca

SEQ ID NO: 604143 - DNA, 15 bp, Homo sapiens
ctccttttagaccag

SEQ ID NO: 604144 - DNA, 15 bp, Homo sapiens
tccttttagaccagg

SEQ ID NO: 604145 - DNA, 15 bp, Homo sapiens
ccttttagaccaggg

SEQ ID NO: 604146 - DNA, 15 bp, Homo sapiens
cttttagaccagggg

SEQ ID NO: 604147 - DNA, 15 bp, Homo sapiens
ttttagaccaggggg

SEQ ID NO: 604148 - DNA, 15 bp, Homo sapiens
tttagaccagggggt

SEQ ID NO: 604149 - DNA, 15 bp, Homo sapiens
ttagaccagggggtc

SEQ ID NO: 604150 - DNA, 15 bp, Homo sapiens
tagaccagggggtcc

SEQ ID NO: 604151 - DNA, 15 bp, Homo sapiens
agaccagggggtcct

SEQ ID NO: 604152 - DNA, 15 bp, Homo sapiens
gaccagggggtcctt

SEQ ID NO: 604153 - DNA, 15 bp, Homo sapiens
accagggggtccttg

SEQ ID NO: 604154 - DNA, 15 bp, Homo sapiens
ccagggggtccttgc

SEQ ID NO: 604155 - DNA, 15 bp, Homo sapiens
cagggggtccttgca

SEQ ID NO: 604156 - DNA, 15 bp, Homo sapiens
agggggtccttgcag

SEQ ID NO: 604157 - DNA, 15 bp, Homo sapiens
gggggtccttgcagg

SEQ ID NO: 604158 - DNA, 15 bp, Homo sapiens
ggggtccttgcaggt

SEQ ID NO: 604159 - DNA, 15 bp, Homo sapiens
gggtccttgcaggta

SEQ ID NO: 604160 - DNA, 15 bp, Homo sapiens
ggtccttgcaggtag

SEQ ID NO: 604161 - DNA, 15 bp, Homo sapiens
gtccttgcaggtagg

SEQ ID NO: 604162 - DNA, 15 bp, Homo sapiens
tccttgcaggtaggt

SEQ ID NO: 604163 - DNA, 15 bp, Homo sapiens
ccttgcaggtaggtc

SEQ ID NO: 604164 - DNA, 15 bp, Homo sapiens
cttgcaggtaggtct

SEQ ID NO: 604165 - DNA, 15 bp, Homo sapiens
ttgcaggtaggtctg

SEQ ID NO: 604166 - DNA, 15 bp, Homo sapiens
tgcaggtaggtctgt

SEQ ID NO: 604167 - DNA, 15 bp, Homo sapiens
gcaggtaggtctgtg

SEQ ID NO: 604168 - DNA, 15 bp, Homo sapiens
caggtaggtctgtgt

SEQ ID NO: 604169 - DNA, 15 bp, Homo sapiens
aggtaggtctgtgtc

SEQ ID NO: 604170 - DNA, 15 bp, Homo sapiens
ggtaggtctgtgtct

SEQ ID NO: 604171 - DNA, 15 bp, Homo sapiens
gtaggtctgtgtctc

SEQ ID NO: 604172 - DNA, 15 bp, Homo sapiens
taggtctgtgtctcc

SEQ ID NO: 604173 - DNA, 15 bp, Homo sapiens
aggtctgtgtctcct

SEQ ID NO: 604174 - DNA, 15 bp, Homo sapiens
ggtctgtgtctcctc

SEQ ID NO: 604175 - DNA, 15 bp, Homo sapiens
gtctgtgtctcctcc

SEQ ID NO: 604176 - DNA, 15 bp, Homo sapiens
tctgtgtctcctcca

SEQ ID NO: 604177 - DNA, 15 bp, Homo sapiens
ctgtgtctcctccat

SEQ ID NO: 604178 - DNA, 15 bp, Homo sapiens
tgtgtctcctccatc

SEQ ID NO: 604179 - DNA, 15 bp, Homo sapiens
gtgtctcctccatca

SEQ ID NO: 604180 - DNA, 15 bp, Homo sapiens
tgtctcctccatcag

SEQ ID NO: 604181 - DNA, 15 bp, Homo sapiens
gtctcctccatcaga

SEQ ID NO: 604182 - DNA, 15 bp, Homo sapiens
tctcctccatcagat

SEQ ID NO: 604183 - DNA, 15 bp, Homo sapiens
ctcctccatcagatt

SEQ ID NO: 604184 - DNA, 15 bp, Homo sapiens
tcctccatcagatta

SEQ ID NO: 604185 - DNA, 15 bp, Homo sapiens
cctccatcagattag

SEQ ID NO: 604186 - DNA, 15 bp, Homo sapiens
ctccatcagattaga

SEQ ID NO: 604187 - DNA, 15 bp, Homo sapiens
tccatcagattagaa

SEQ ID NO: 604188 - DNA, 15 bp, Homo sapiens
ccatcagattagaac

SEQ ID NO: 604189 - DNA, 15 bp, Homo sapiens
catcagattagaact

SEQ ID NO: 604190 - DNA, 15 bp, Homo sapiens
atcagattagaactt

SEQ ID NO: 604191 - DNA, 15 bp, Homo sapiens
tcagattagaacttc

SEQ ID NO: 604192 - DNA, 15 bp, Homo sapiens
cagattagaacttct

SEQ ID NO: 604193 - DNA, 15 bp, Homo sapiens
agattagaacttctt

SEQ ID NO: 604194 - DNA, 15 bp, Homo sapiens
gattagaacttctta

SEQ ID NO: 604195 - DNA, 15 bp, Homo sapiens
attagaacttcttat

SEQ ID NO: 604196 - DNA, 15 bp, Homo sapiens
ttagaacttcttatg

SEQ ID NO: 604197 - DNA, 15 bp, Homo sapiens
tagaacttcttatgg

SEQ ID NO: 604198 - DNA, 15 bp, Homo sapiens
agaacttcttatggg

SEQ ID NO: 604199 - DNA, 15 bp, Homo sapiens
gaacttcttatgggc

SEQ ID NO: 604200 - DNA, 15 bp, Homo sapiens
aacttcttatgggca

SEQ ID NO: 604201 - DNA, 15 bp, Homo sapiens
acttcttatgggcag

SEQ ID NO: 604202 - DNA, 15 bp, Homo sapiens
cttcttatgggcagg

SEQ ID NO: 604203 - DNA, 15 bp, Homo sapiens
ttcttatgggcaggg

SEQ ID NO: 604204 - DNA, 15 bp, Homo sapiens
tcttatgggcagggc

SEQ ID NO: 604205 - DNA, 15 bp, Homo sapiens
cttatgggcagggct

SEQ ID NO: 604206 - DNA, 15 bp, Homo sapiens
ttatgggcagggctg

SEQ ID NO: 604207 - DNA, 15 bp, Homo sapiens
tatgggcagggctgt

SEQ ID NO: 604208 - DNA, 15 bp, Homo sapiens
atgggcagggctgtg

SEQ ID NO: 604209 - DNA, 15 bp, Homo sapiens
tgggcagggctgtgt

SEQ ID NO: 604210 - DNA, 15 bp, Homo sapiens
gggcagggctgtgtc

SEQ ID NO: 604211 - DNA, 15 bp, Homo sapiens
ggcagggctgtgtct

SEQ ID NO: 604212 - DNA, 15 bp, Homo sapiens
gcagggctgtgtctc

SEQ ID NO: 604213 - DNA, 15 bp, Homo sapiens
cagggctgtgtctct

SEQ ID NO: 604214 - DNA, 15 bp, Homo sapiens
agggctgtgtctctc

SEQ ID NO: 604215 - DNA, 15 bp, Homo sapiens
gggctgtgtctctct

SEQ ID NO: 604216 - DNA, 15 bp, Homo sapiens
ggctgtgtctctctc

SEQ ID NO: 604217 - DNA, 15 bp, Homo sapiens
gctgtgtctctctct

SEQ ID NO: 604218 - DNA, 15 bp, Homo sapiens
ctgtgtctctctctc

SEQ ID NO: 604219 - DNA, 15 bp, Homo sapiens
tgtgtctctctctct

SEQ ID NO: 604220 - DNA, 15 bp, Homo sapiens
gtgtctctctctctc

SEQ ID NO: 604221 - DNA, 15 bp, Homo sapiens
tgtctctctctctct

SEQ ID NO: 604222 - DNA, 15 bp, Homo sapiens
gtctctctctctctc

SEQ ID NO: 604223 - DNA, 15 bp, Homo sapiens
tctctctctctctca

SEQ ID NO: 604224 - DNA, 15 bp, Homo sapiens
ctctctctctctcag

SEQ ID NO: 604225 - DNA, 15 bp, Homo sapiens
tctctctctctcaga

SEQ ID NO: 604226 - DNA, 15 bp, Homo sapiens
ctctctctctcagat

SEQ ID NO: 604227 - DNA, 15 bp, Homo sapiens
tctctctctcagatc

SEQ ID NO: 604228 - DNA, 15 bp, Homo sapiens
ctctctctcagatca

SEQ ID NO: 604229 - DNA, 15 bp, Homo sapiens
tctctctcagatcag

SEQ ID NO: 604230 - DNA, 15 bp, Homo sapiens
ctctctcagatcagt

SEQ ID NO: 604231 - DNA, 15 bp, Homo sapiens
tctctcagatcagtg

SEQ ID NO: 604232 - DNA, 15 bp, Homo sapiens
ctctcagatcagtgc

SEQ ID NO: 604233 - DNA, 15 bp, Homo sapiens
tctcagatcagtgct

SEQ ID NO: 604234 - DNA, 15 bp, Homo sapiens
ctcagatcagtgctc

SEQ ID NO: 604235 - DNA, 15 bp, Homo sapiens
tcagatcagtgctct

SEQ ID NO: 604236 - DNA, 15 bp, Homo sapiens
cagatcagtgctctg

SEQ ID NO: 604237 - DNA, 15 bp, Homo sapiens
agatcagtgctctgt

SEQ ID NO: 604238 - DNA, 15 bp, Homo sapiens
gatcagtgctctgtc

SEQ ID NO: 604239 - DNA, 15 bp, Homo sapiens
atcagtgctctgtct

SEQ ID NO: 604240 - DNA, 15 bp, Homo sapiens
tcagtgctctgtctt

SEQ ID NO: 604241 - DNA, 15 bp, Homo sapiens
cagtgctctgtcttc

SEQ ID NO: 604242 - DNA, 15 bp, Homo sapiens
agtgctctgtcttcc

SEQ ID NO: 604243 - DNA, 15 bp, Homo sapiens
gtgctctgtcttcct

SEQ ID NO: 604244 - DNA, 15 bp, Homo sapiens
tgctctgtcttcctt

SEQ ID NO: 604245 - DNA, 15 bp, Homo sapiens
gctctgtcttccttc

SEQ ID NO: 604246 - DNA, 15 bp, Homo sapiens
ctctgtcttccttcc

SEQ ID NO: 604247 - DNA, 15 bp, Homo sapiens
tctgtcttccttccc

SEQ ID NO: 604248 - DNA, 15 bp, Homo sapiens
ctgtcttccttccct

SEQ ID NO: 604249 - DNA, 15 bp, Homo sapiens
tgtcttccttccctt

SEQ ID NO: 604250 - DNA, 15 bp, Homo sapiens
gtcttccttcccttc

SEQ ID NO: 604251 - DNA, 15 bp, Homo sapiens
tcttccttcccttct

SEQ ID NO: 604252 - DNA, 15 bp, Homo sapiens
cttccttcccttctc

SEQ ID NO: 604253 - DNA, 15 bp, Homo sapiens
ttccttcccttctct

SEQ ID NO: 604254 - DNA, 15 bp, Homo sapiens
tccttcccttctctt

SEQ ID NO: 604255 - DNA, 15 bp, Homo sapiens
ccttcccttctcttg

SEQ ID NO: 604256 - DNA, 15 bp, Homo sapiens
cttcccttctcttgg

SEQ ID NO: 604257 - DNA, 15 bp, Homo sapiens
ttcccttctcttggg

SEQ ID NO: 604258 - DNA, 15 bp, Homo sapiens
tcccttctcttggga

SEQ ID NO: 604259 - DNA, 15 bp, Homo sapiens
cccttctcttgggaa

SEQ ID NO: 604260 - DNA, 15 bp, Homo sapiens
ccttctcttgggaac

SEQ ID NO: 604261 - DNA, 15 bp, Homo sapiens
cttctcttgggaact

SEQ ID NO: 604262 - DNA, 15 bp, Homo sapiens
ttctcttgggaactc

SEQ ID NO: 604263 - DNA, 15 bp, Homo sapiens
tctcttgggaactca

SEQ ID NO: 604264 - DNA, 15 bp, Homo sapiens
ctcttgggaactcag

SEQ ID NO: 604265 - DNA, 15 bp, Homo sapiens
tcttgggaactcagt

SEQ ID NO: 604266 - DNA, 15 bp, Homo sapiens
cttgggaactcagtg

SEQ ID NO: 604267 - DNA, 15 bp, Homo sapiens
ttgggaactcagtgc

SEQ ID NO: 604268 - DNA, 15 bp, Homo sapiens
tgggaactcagtgcc

SEQ ID NO: 604269 - DNA, 15 bp, Homo sapiens
gggaactcagtgcca

SEQ ID NO: 604270 - DNA, 15 bp, Homo sapiens
ggaactcagtgccaa

SEQ ID NO: 604271 - DNA, 15 bp, Homo sapiens
gaactcagtgccaac

SEQ ID NO: 604272 - DNA, 15 bp, Homo sapiens
aactcagtgccaacc

SEQ ID NO: 604273 - DNA, 15 bp, Homo sapiens
actcagtgccaacct

SEQ ID NO: 604274 - DNA, 15 bp, Homo sapiens
ctcagtgccaacctt

SEQ ID NO: 604275 - DNA, 15 bp, Homo sapiens
tcagtgccaaccttg

SEQ ID NO: 604276 - DNA, 15 bp, Homo sapiens
cagtgccaaccttgt

SEQ ID NO: 604277 - DNA, 15 bp, Homo sapiens
agtgccaaccttgtt

SEQ ID NO: 604278 - DNA, 15 bp, Homo sapiens
gtgccaaccttgttc

SEQ ID NO: 604279 - DNA, 15 bp, Homo sapiens
tgccaaccttgttcc

SEQ ID NO: 604280 - DNA, 15 bp, Homo sapiens
gccaaccttgttccc

SEQ ID NO: 604281 - DNA, 15 bp, Homo sapiens
ccaaccttgttccca

SEQ ID NO: 604282 - DNA, 15 bp, Homo sapiens
caaccttgttcccag

SEQ ID NO: 604283 - DNA, 15 bp, Homo sapiens
aaccttgttcccagg

SEQ ID NO: 604284 - DNA, 15 bp, Homo sapiens
accttgttcccaggg

SEQ ID NO: 604285 - DNA, 15 bp, Homo sapiens
ccttgttcccagggt

SEQ ID NO: 604286 - DNA, 15 bp, Homo sapiens
cttgttcccagggtc

SEQ ID NO: 604287 - DNA, 15 bp, Homo sapiens
ttgttcccagggtct

SEQ ID NO: 604288 - DNA, 15 bp, Homo sapiens
tgttcccagggtctg

SEQ ID NO: 604289 - DNA, 15 bp, Homo sapiens
gttcccagggtctgc

SEQ ID NO: 604290 - DNA, 15 bp, Homo sapiens
ttcccagggtctgct

SEQ ID NO: 604291 - DNA, 15 bp, Homo sapiens
tcccagggtctgctc

SEQ ID NO: 604292 - DNA, 15 bp, Homo sapiens
cccagggtctgctct

SEQ ID NO: 604293 - DNA, 15 bp, Homo sapiens
ccagggtctgctctc

SEQ ID NO: 604294 - DNA, 15 bp, Homo sapiens
cagggtctgctctcc

SEQ ID NO: 604295 - DNA, 15 bp, Homo sapiens
agggtctgctctccc

SEQ ID NO: 604296 - DNA, 15 bp, Homo sapiens
gggtctgctctcccc

SEQ ID NO: 604297 - DNA, 15 bp, Homo sapiens
ggtctgctctcccca

SEQ ID NO: 604298 - DNA, 15 bp, Homo sapiens
gtctgctctccccaa

SEQ ID NO: 604299 - DNA, 15 bp, Homo sapiens
tctgctctccccaag

SEQ ID NO: 604300 - DNA, 15 bp, Homo sapiens
ctgctctccccaagg

SEQ ID NO: 604301 - DNA, 15 bp, Homo sapiens
tgctctccccaagga

SEQ ID NO: 604302 - DNA, 15 bp, Homo sapiens
gctctccccaaggag

SEQ ID NO: 604303 - DNA, 15 bp, Homo sapiens
ctctccccaaggagt

SEQ ID NO: 604304 - DNA, 15 bp, Homo sapiens
tctccccaaggagtg

SEQ ID NO: 604305 - DNA, 15 bp, Homo sapiens
ctccccaaggagtgt

SEQ ID NO: 604306 - DNA, 15 bp, Homo sapiens
tccccaaggagtgtg

SEQ ID NO: 604307 - DNA, 15 bp, Homo sapiens
ccccaaggagtgtgg

SEQ ID NO: 604308 - DNA, 15 bp, Homo sapiens
cccaaggagtgtggg

SEQ ID NO: 604309 - DNA, 15 bp, Homo sapiens
ccaaggagtgtggga

SEQ ID NO: 604310 - DNA, 15 bp, Homo sapiens
caaggagtgtgggag

SEQ ID NO: 604311 - DNA, 15 bp, Homo sapiens
aaggagtgtgggagg

SEQ ID NO: 604312 - DNA, 15 bp, Homo sapiens
aggagtgtgggaggg

SEQ ID NO: 604313 - DNA, 15 bp, Homo sapiens
ggagtgtgggaggga

SEQ ID NO: 604314 - DNA, 15 bp, Homo sapiens
gagtgtgggagggag

SEQ ID NO: 604315 - DNA, 15 bp, Homo sapiens
agtgtgggagggagg

SEQ ID NO: 604316 - DNA, 15 bp, Homo sapiens
gtgtgggagggaggt

SEQ ID NO: 604317 - DNA, 15 bp, Homo sapiens
tgtgggagggaggtg

SEQ ID NO: 604318 - DNA, 15 bp, Homo sapiens
gtgggagggaggtgg

SEQ ID NO: 604319 - DNA, 15 bp, Homo sapiens
tgggagggaggtggg

SEQ ID NO: 604320 - DNA, 15 bp, Homo sapiens
gggagggaggtgggc

SEQ ID NO: 604321 - DNA, 15 bp, Homo sapiens
ggagggaggtgggca

SEQ ID NO: 604322 - DNA, 15 bp, Homo sapiens
gagggaggtgggcac

SEQ ID NO: 604323 - DNA, 15 bp, Homo sapiens
agggaggtgggcact

SEQ ID NO: 604324 - DNA, 15 bp, Homo sapiens
gggaggtgggcactg

SEQ ID NO: 604325 - DNA, 15 bp, Homo sapiens
ggaggtgggcactga

SEQ ID NO: 604326 - DNA, 15 bp, Homo sapiens
gaggtgggcactgag

SEQ ID NO: 604327 - DNA, 15 bp, Homo sapiens
aggtgggcactgagt

SEQ ID NO: 604328 - DNA, 15 bp, Homo sapiens
ggtgggcactgagtc

SEQ ID NO: 604329 - DNA, 15 bp, Homo sapiens
gtgggcactgagtcc

SEQ ID NO: 604330 - DNA, 15 bp, Homo sapiens
tgggcactgagtcct

SEQ ID NO: 604331 - DNA, 15 bp, Homo sapiens
gggcactgagtccta

SEQ ID NO: 604332 - DNA, 15 bp, Homo sapiens
ggcactgagtcctaa

SEQ ID NO: 604333 - DNA, 15 bp, Homo sapiens
gcactgagtcctaaa

SEQ ID NO: 604334 - DNA, 15 bp, Homo sapiens
cactgagtcctaaaa

SEQ ID NO: 604335 - DNA, 15 bp, Homo sapiens
actgagtcctaaaaa

SEQ ID NO: 604336 - DNA, 15 bp, Homo sapiens
ctgagtcctaaaaat

SEQ ID NO: 604337 - DNA, 15 bp, Homo sapiens
tgagtcctaaaaatc

SEQ ID NO: 604338 - DNA, 15 bp, Homo sapiens
gagtcctaaaaatca

SEQ ID NO: 604339 - DNA, 15 bp, Homo sapiens
agtcctaaaaatcag

SEQ ID NO: 604340 - DNA, 15 bp, Homo sapiens
gtcctaaaaatcaga

SEQ ID NO: 604341 - DNA, 15 bp, Homo sapiens
tcctaaaaatcagaa

SEQ ID NO: 604342 - DNA, 15 bp, Homo sapiens
cctaaaaatcagaaa

SEQ ID NO: 604343 - DNA, 15 bp, Homo sapiens
ctaaaaatcagaaat

SEQ ID NO: 604344 - DNA, 15 bp, Homo sapiens
taaaaatcagaaata

SEQ ID NO: 604345 - DNA, 15 bp, Homo sapiens
aaaaatcagaaatag

SEQ ID NO: 604346 - DNA, 15 bp, Homo sapiens
aaaatcagaaatagc

SEQ ID NO: 604347 - DNA, 15 bp, Homo sapiens
aaatcagaaatagcg

SEQ ID NO: 604348 - DNA, 15 bp, Homo sapiens
aatcagaaatagcga

SEQ ID NO: 604349 - DNA, 15 bp, Homo sapiens
atcagaaatagcgag

SEQ ID NO: 604350 - DNA, 15 bp, Homo sapiens
tcagaaatagcgagt

SEQ ID NO: 604351 - DNA, 15 bp, Homo sapiens
cagaaatagcgagtg

SEQ ID NO: 604352 - DNA, 15 bp, Homo sapiens
agaaatagcgagtga

SEQ ID NO: 604353 - DNA, 15 bp, Homo sapiens
gaaatagcgagtgac

SEQ ID NO: 604354 - DNA, 15 bp, Homo sapiens
aaatagcgagtgact

SEQ ID NO: 604355 - DNA, 15 bp, Homo sapiens
aatagcgagtgactg

SEQ ID NO: 604356 - DNA, 15 bp, Homo sapiens
atagcgagtgactgc

SEQ ID NO: 604357 - DNA, 15 bp, Homo sapiens
tagcgagtgactgcg

SEQ ID NO: 604358 - DNA, 15 bp, Homo sapiens
agcgagtgactgcgg

SEQ ID NO: 604359 - DNA, 15 bp, Homo sapiens
gcgagtgactgcggg

SEQ ID NO: 604360 - DNA, 15 bp, Homo sapiens
cgagtgactgcgggg

SEQ ID NO: 604361 - DNA, 15 bp, Homo sapiens
gagtgactgcggggc

SEQ ID NO: 604362 - DNA, 15 bp, Homo sapiens
agtgactgcggggca

SEQ ID NO: 604363 - DNA, 15 bp, Homo sapiens
gtgactgcggggcag

SEQ ID NO: 604364 - DNA, 15 bp, Homo sapiens
tgactgcggggcagg

SEQ ID NO: 604365 - DNA, 15 bp, Homo sapiens
gactgcggggcaggc

SEQ ID NO: 604366 - DNA, 15 bp, Homo sapiens
actgcggggcaggca

SEQ ID NO: 604367 - DNA, 15 bp, Homo sapiens
ctgcggggcaggcac

SEQ ID NO: 604368 - DNA, 15 bp, Homo sapiens
tgcggggcaggcacg

SEQ ID NO: 604369 - DNA, 15 bp, Homo sapiens
gcggggcaggcacgg

SEQ ID NO: 604370 - DNA, 15 bp, Homo sapiens
cggggcaggcacggc

SEQ ID NO: 604371 - DNA, 15 bp, Homo sapiens
ggggcaggcacggct

SEQ ID NO: 604372 - DNA, 15 bp, Homo sapiens
gggcaggcacggctg

SEQ ID NO: 604373 - DNA, 15 bp, Homo sapiens
ggcaggcacggctgc

SEQ ID NO: 604374 - DNA, 15 bp, Homo sapiens
gcaggcacggctgct

SEQ ID NO: 604375 - DNA, 15 bp, Homo sapiens
caggcacggctgctg

SEQ ID NO: 604376 - DNA, 15 bp, Homo sapiens
aggcacggctgctgc

SEQ ID NO: 604377 - DNA, 15 bp, Homo sapiens
ggcacggctgctgct

SEQ ID NO: 604378 - DNA, 15 bp, Homo sapiens
gcacggctgctgctg

SEQ ID NO: 604379 - DNA, 15 bp, Homo sapiens
cacggctgctgctgg

SEQ ID NO: 604380 - DNA, 15 bp, Homo sapiens
acggctgctgctggt

SEQ ID NO: 604381 - DNA, 15 bp, Homo sapiens
cggctgctgctggtc

SEQ ID NO: 604382 - DNA, 15 bp, Homo sapiens
ggctgctgctggtcg

SEQ ID NO: 604383 - DNA, 15 bp, Homo sapiens
gctgctgctggtcgg

SEQ ID NO: 604384 - DNA, 15 bp, Homo sapiens
ctgctgctggtcggt

SEQ ID NO: 604385 - DNA, 15 bp, Homo sapiens
tgctgctggtcggtg

SEQ ID NO: 604386 - DNA, 15 bp, Homo sapiens
gctgctggtcggtgc

SEQ ID NO: 604387 - DNA, 15 bp, Homo sapiens
ctgctggtcggtgcc

SEQ ID NO: 604388 - DNA, 15 bp, Homo sapiens
tgctggtcggtgcca

SEQ ID NO: 604389 - DNA, 15 bp, Homo sapiens
gctggtcggtgccag

SEQ ID NO: 604390 - DNA, 15 bp, Homo sapiens
ctggtcggtgccaga

SEQ ID NO: 604391 - DNA, 15 bp, Homo sapiens
tggtcggtgccagac

SEQ ID NO: 604392 - DNA, 15 bp, Homo sapiens
ggtcggtgccagacc

SEQ ID NO: 604393 - DNA, 15 bp, Homo sapiens
gtcggtgccagacct

SEQ ID NO: 604394 - DNA, 15 bp, Homo sapiens
tcggtgccagacctt

SEQ ID NO: 604395 - DNA, 15 bp, Homo sapiens
cggtgccagaccttg

SEQ ID NO: 604396 - DNA, 15 bp, Homo sapiens
ggtgccagaccttgt

SEQ ID NO: 604397 - DNA, 15 bp, Homo sapiens
gtgccagaccttgtc

SEQ ID NO: 604398 - DNA, 15 bp, Homo sapiens
tgccagaccttgtca

SEQ ID NO: 604399 - DNA, 15 bp, Homo sapiens
gccagaccttgtcag

SEQ ID NO: 604400 - DNA, 15 bp, Homo sapiens
ccagaccttgtcagt

SEQ ID NO: 604401 - DNA, 15 bp, Homo sapiens
cagaccttgtcagta

SEQ ID NO: 604402 - DNA, 15 bp, Homo sapiens
agaccttgtcagtag

SEQ ID NO: 604403 - DNA, 15 bp, Homo sapiens
gaccttgtcagtagt

SEQ ID NO: 604404 - DNA, 15 bp, Homo sapiens
accttgtcagtagtg

SEQ ID NO: 604405 - DNA, 15 bp, Homo sapiens
ccttgtcagtagtgt

SEQ ID NO: 604406 - DNA, 15 bp, Homo sapiens
cttgtcagtagtgtg

SEQ ID NO: 604407 - DNA, 15 bp, Homo sapiens
ttgtcagtagtgtga

SEQ ID NO: 604408 - DNA, 15 bp, Homo sapiens
tgtcagtagtgtgat

SEQ ID NO: 604409 - DNA, 15 bp, Homo sapiens
gtcagtagtgtgatt

SEQ ID NO: 604410 - DNA, 15 bp, Homo sapiens
tcagtagtgtgattt

SEQ ID NO: 604411 - DNA, 15 bp, Homo sapiens
cagtagtgtgatttg

SEQ ID NO: 604412 - DNA, 15 bp, Homo sapiens
agtagtgtgatttga

SEQ ID NO: 604413 - DNA, 15 bp, Homo sapiens
gtagtgtgatttgag

SEQ ID NO: 604414 - DNA, 15 bp, Homo sapiens
tagtgtgatttgagg

SEQ ID NO: 604415 - DNA, 15 bp, Homo sapiens
agtgtgatttgaggc

SEQ ID NO: 604416 - DNA, 15 bp, Homo sapiens
gtgtgatttgaggct

SEQ ID NO: 604417 - DNA, 15 bp, Homo sapiens
tgtgatttgaggctg

SEQ ID NO: 604418 - DNA, 15 bp, Homo sapiens
gtgatttgaggctgg

SEQ ID NO: 604419 - DNA, 15 bp, Homo sapiens
tgatttgaggctgga

SEQ ID NO: 604420 - DNA, 15 bp, Homo sapiens
gatttgaggctggag

SEQ ID NO: 604421 - DNA, 15 bp, Homo sapiens
atttgaggctggagg

SEQ ID NO: 604422 - DNA, 15 bp, Homo sapiens
tttgaggctggaggc

SEQ ID NO: 604423 - DNA, 15 bp, Homo sapiens
ttgaggctggaggca

SEQ ID NO: 604424 - DNA, 15 bp, Homo sapiens
tgaggctggaggcag

SEQ ID NO: 604425 - DNA, 15 bp, Homo sapiens
gaggctggaggcagg

SEQ ID NO: 604426 - DNA, 15 bp, Homo sapiens
aggctggaggcaggg

SEQ ID NO: 604427 - DNA, 15 bp, Homo sapiens
ggctggaggcaggga

SEQ ID NO: 604428 - DNA, 15 bp, Homo sapiens
gctggaggcagggac

SEQ ID NO: 604429 - DNA, 15 bp, Homo sapiens
ctggaggcagggaca

SEQ ID NO: 604430 - DNA, 15 bp, Homo sapiens
tggaggcagggacat

SEQ ID NO: 604431 - DNA, 15 bp, Homo sapiens
ggaggcagggacatg

SEQ ID NO: 604432 - DNA, 15 bp, Homo sapiens
gaggcagggacatgg

SEQ ID NO: 604433 - DNA, 15 bp, Homo sapiens
aggcagggacatgga

SEQ ID NO: 604434 - DNA, 15 bp, Homo sapiens
ggcagggacatggaa

SEQ ID NO: 604435 - DNA, 15 bp, Homo sapiens
gcagggacatggaac

SEQ ID NO: 604436 - DNA, 15 bp, Homo sapiens
cagggacatggaact

SEQ ID NO: 604437 - DNA, 15 bp, Homo sapiens
agggacatggaactg

SEQ ID NO: 604438 - DNA, 15 bp, Homo sapiens
gggacatggaactga

SEQ ID NO: 604439 - DNA, 15 bp, Homo sapiens
ggacatggaactgag

SEQ ID NO: 604440 - DNA, 15 bp, Homo sapiens
gacatggaactgagc

SEQ ID NO: 604441 - DNA, 15 bp, Homo sapiens
acatggaactgagct

SEQ ID NO: 604442 - DNA, 15 bp, Homo sapiens
catggaactgagcta

SEQ ID NO: 604443 - DNA, 15 bp, Homo sapiens
atggaactgagctaa

SEQ ID NO: 604444 - DNA, 15 bp, Homo sapiens
tggaactgagctaaa

SEQ ID NO: 604445 - DNA, 15 bp, Homo sapiens
ggaactgagctaaac

SEQ ID NO: 604446 - DNA, 15 bp, Homo sapiens
gaactgagctaaact

SEQ ID NO: 604447 - DNA, 15 bp, Homo sapiens
aactgagctaaactc

SEQ ID NO: 604448 - DNA, 15 bp, Homo sapiens
actgagctaaactcc

SEQ ID NO: 604449 - DNA, 15 bp, Homo sapiens
ctgagctaaactcct

SEQ ID NO: 604450 - DNA, 15 bp, Homo sapiens
tgagctaaactcctg

SEQ ID NO: 604451 - DNA, 15 bp, Homo sapiens
gagctaaactcctgt

SEQ ID NO: 604452 - DNA, 15 bp, Homo sapiens
agctaaactcctgtc

SEQ ID NO: 604453 - DNA, 15 bp, Homo sapiens
gctaaactcctgtca

SEQ ID NO: 604454 - DNA, 15 bp, Homo sapiens
ctaaactcctgtcat

SEQ ID NO: 604455 - DNA, 15 bp, Homo sapiens
taaactcctgtcatc

SEQ ID NO: 604456 - DNA, 15 bp, Homo sapiens
aaactcctgtcatct

SEQ ID NO: 604457 - DNA, 15 bp, Homo sapiens
aactcctgtcatctc

SEQ ID NO: 604458 - DNA, 15 bp, Homo sapiens
actcctgtcatctca

SEQ ID NO: 604459 - DNA, 15 bp, Homo sapiens
ctcctgtcatctcaa

SEQ ID NO: 604460 - DNA, 15 bp, Homo sapiens
tcctgtcatctcaaa

SEQ ID NO: 604461 - DNA, 15 bp, Homo sapiens
cctgtcatctcaaag

SEQ ID NO: 604462 - DNA, 15 bp, Homo sapiens
ctgtcatctcaaagg

SEQ ID NO: 604463 - DNA, 15 bp, Homo sapiens
tgtcatctcaaaggc

SEQ ID NO: 604464 - DNA, 15 bp, Homo sapiens
gtcatctcaaaggca

SEQ ID NO: 604465 - DNA, 15 bp, Homo sapiens
tcatctcaaaggcat

SEQ ID NO: 604466 - DNA, 15 bp, Homo sapiens
catctcaaaggcatg

SEQ ID NO: 604467 - DNA, 15 bp, Homo sapiens
atctcaaaggcatga

SEQ ID NO: 604468 - DNA, 15 bp, Homo sapiens
tctcaaaggcatgaa

SEQ ID NO: 604469 - DNA, 15 bp, Homo sapiens
ctcaaaggcatgaat

SEQ ID NO: 604470 - DNA, 15 bp, Homo sapiens
tcaaaggcatgaatt

SEQ ID NO: 604471 - DNA, 15 bp, Homo sapiens
caaaggcatgaattc

SEQ ID NO: 604472 - DNA, 15 bp, Homo sapiens
aaaggcatgaattca

SEQ ID NO: 604473 - DNA, 15 bp, Homo sapiens
aaggcatgaattcat

SEQ ID NO: 604474 - DNA, 15 bp, Homo sapiens
aggcatgaattcatt

SEQ ID NO: 604475 - DNA, 15 bp, Homo sapiens
ggcatgaattcatta

SEQ ID NO: 604476 - DNA, 15 bp, Homo sapiens
gcatgaattcattaa

SEQ ID NO: 604477 - DNA, 15 bp, Homo sapiens
catgaattcattaaa

SEQ ID NO: 604478 - DNA, 15 bp, Homo sapiens
atgaattcattaaac

SEQ ID NO: 604479 - DNA, 15 bp, Homo sapiens
tgaattcattaaact

SEQ ID NO: 604480 - DNA, 15 bp, Homo sapiens
gaattcattaaactg

SEQ ID NO: 604481 - DNA, 15 bp, Homo sapiens
aattcattaaactgt

SEQ ID NO: 604482 - DNA, 15 bp, Homo sapiens
attcattaaactgtg

SEQ ID NO: 604483 - DNA, 15 bp, Homo sapiens
ttcattaaactgtgt

SEQ ID NO: 604484 - DNA, 15 bp, Homo sapiens
tcattaaactgtgtc

SEQ ID NO: 604485 - DNA, 15 bp, Homo sapiens
cattaaactgtgtcc

SEQ ID NO: 604486 - DNA, 15 bp, Homo sapiens
attaaactgtgtcct

SEQ ID NO: 604487 - DNA, 15 bp, Homo sapiens
ttaaactgtgtccta

SEQ ID NO: 604488 - DNA, 15 bp, Homo sapiens
taaactgtgtcctag

SEQ ID NO: 604489 - DNA, 15 bp, Homo sapiens
aaactgtgtcctagg

SEQ ID NO: 604490 - DNA, 15 bp, Homo sapiens
aactgtgtcctaggg

SEQ ID NO: 604491 - DNA, 15 bp, Homo sapiens
actgtgtcctagggt

SEQ ID NO: 604492 - DNA, 15 bp, Homo sapiens
ctgtgtcctagggtt

SEQ ID NO: 604493 - DNA, 15 bp, Homo sapiens
tgtgtcctagggttg

SEQ ID NO: 604494 - DNA, 15 bp, Homo sapiens
gtgtcctagggttgc

SEQ ID NO: 604495 - DNA, 15 bp, Homo sapiens
tgtcctagggttgcc

SEQ ID NO: 604496 - DNA, 15 bp, Homo sapiens
gtcctagggttgccg

SEQ ID NO: 604497 - DNA, 15 bp, Homo sapiens
tcctagggttgccga

SEQ ID NO: 604498 - DNA, 15 bp, Homo sapiens
cctagggttgccgag

SEQ ID NO: 604499 - DNA, 15 bp, Homo sapiens
ctagggttgccgaga

SEQ ID NO: 604500 - DNA, 15 bp, Homo sapiens
tagggttgccgagag

SEQ ID NO: 604501 - DNA, 15 bp, Homo sapiens
agggttgccgagagg

SEQ ID NO: 604502 - DNA, 15 bp, Homo sapiens
gggttgccgagaggc

SEQ ID NO: 604503 - DNA, 15 bp, Homo sapiens
ggttgccgagaggca

SEQ ID NO: 604504 - DNA, 15 bp, Homo sapiens
gttgccgagaggcag

SEQ ID NO: 604505 - DNA, 15 bp, Homo sapiens
ttgccgagaggcagg

SEQ ID NO: 604506 - DNA, 15 bp, Homo sapiens
tgccgagaggcaggg

SEQ ID NO: 604507 - DNA, 15 bp, Homo sapiens
gccgagaggcagggc

SEQ ID NO: 604508 - DNA, 15 bp, Homo sapiens
ccgagaggcagggct

SEQ ID NO: 604509 - DNA, 15 bp, Homo sapiens
cgagaggcagggctg

SEQ ID NO: 604510 - DNA, 15 bp, Homo sapiens
gagaggcagggctga

SEQ ID NO: 604511 - DNA, 15 bp, Homo sapiens
agaggcagggctgag

SEQ ID NO: 604512 - DNA, 15 bp, Homo sapiens
gaggcagggctgagg

SEQ ID NO: 604513 - DNA, 15 bp, Homo sapiens
aggcagggctgaggg

SEQ ID NO: 604514 - DNA, 15 bp, Homo sapiens
ggcagggctgagggt

SEQ ID NO: 604515 - DNA, 15 bp, Homo sapiens
gcagggctgagggtg

SEQ ID NO: 604516 - DNA, 15 bp, Homo sapiens
cagggctgagggtgg

SEQ ID NO: 604517 - DNA, 15 bp, Homo sapiens
agggctgagggtgga

SEQ ID NO: 604518 - DNA, 15 bp, Homo sapiens
gggctgagggtggag

SEQ ID NO: 604519 - DNA, 15 bp, Homo sapiens
ggctgagggtggagc

SEQ ID NO: 604520 - DNA, 15 bp, Homo sapiens
gctgagggtggagct

SEQ ID NO: 604521 - DNA, 15 bp, Homo sapiens
ctgagggtggagctg

SEQ ID NO: 604522 - DNA, 15 bp, Homo sapiens
tgagggtggagctga

SEQ ID NO: 604523 - DNA, 15 bp, Homo sapiens
gagggtggagctgag

SEQ ID NO: 604524 - DNA, 15 bp, Homo sapiens
agggtggagctgagg

SEQ ID NO: 604525 - DNA, 15 bp, Homo sapiens
gggtggagctgagga

SEQ ID NO: 604526 - DNA, 15 bp, Homo sapiens
ggtggagctgaggag

SEQ ID NO: 604527 - DNA, 15 bp, Homo sapiens
gtggagctgaggagc

SEQ ID NO: 604528 - DNA, 15 bp, Homo sapiens
tggagctgaggagcc

SEQ ID NO: 604529 - DNA, 15 bp, Homo sapiens
ggagctgaggagccc

SEQ ID NO: 604530 - DNA, 15 bp, Homo sapiens
gagctgaggagcccc

SEQ ID NO: 604531 - DNA, 15 bp, Homo sapiens
agctgaggagcccct

SEQ ID NO: 604532 - DNA, 15 bp, Homo sapiens
gctgaggagcccctg

SEQ ID NO: 604533 - DNA, 15 bp, Homo sapiens
ctgaggagcccctgc

SEQ ID NO: 604534 - DNA, 15 bp, Homo sapiens
tgaggagcccctgcc

SEQ ID NO: 604535 - DNA, 15 bp, Homo sapiens
gaggagcccctgcct

SEQ ID NO: 604536 - DNA, 15 bp, Homo sapiens
aggagcccctgcctt

SEQ ID NO: 604537 - DNA, 15 bp, Homo sapiens
ggagcccctgccttg

SEQ ID NO: 604538 - DNA, 15 bp, Homo sapiens
gagcccctgccttgg

SEQ ID NO: 604539 - DNA, 15 bp, Homo sapiens
agcccctgccttggt

SEQ ID NO: 604540 - DNA, 15 bp, Homo sapiens
gcccctgccttggtg

SEQ ID NO: 604541 - DNA, 15 bp, Homo sapiens
cccctgccttggtgg

SEQ ID NO: 604542 - DNA, 15 bp, Homo sapiens
ccctgccttggtggc

SEQ ID NO: 604543 - DNA, 15 bp, Homo sapiens
cctgccttggtggcc

SEQ ID NO: 604544 - DNA, 15 bp, Homo sapiens
ctgccttggtggccc

SEQ ID NO: 604545 - DNA, 15 bp, Homo sapiens
tgccttggtggcccc

SEQ ID NO: 604546 - DNA, 15 bp, Homo sapiens
gccttggtggccccc

SEQ ID NO: 604547 - DNA, 15 bp, Homo sapiens
ccttggtggccccct

SEQ ID NO: 604548 - DNA, 15 bp, Homo sapiens
cttggtggccccctg

SEQ ID NO: 604549 - DNA, 15 bp, Homo sapiens
ttggtggccccctgt

SEQ ID NO: 604550 - DNA, 15 bp, Homo sapiens
tggtggccccctgtc

SEQ ID NO: 604551 - DNA, 15 bp, Homo sapiens
ggtggccccctgtct

SEQ ID NO: 604552 - DNA, 15 bp, Homo sapiens
gtggccccctgtctt

SEQ ID NO: 604553 - DNA, 15 bp, Homo sapiens
tggccccctgtcttg

SEQ ID NO: 604554 - DNA, 15 bp, Homo sapiens
ggccccctgtcttgt

SEQ ID NO: 604555 - DNA, 15 bp, Homo sapiens
gccccctgtcttgtc

SEQ ID NO: 604556 - DNA, 15 bp, Homo sapiens
ccccctgtcttgtcc

SEQ ID NO: 604557 - DNA, 15 bp, Homo sapiens
cccctgtcttgtccc

SEQ ID NO: 604558 - DNA, 15 bp, Homo sapiens
ccctgtcttgtccct

SEQ ID NO: 604559 - DNA, 15 bp, Homo sapiens
cctgtcttgtccctg

SEQ ID NO: 604560 - DNA, 15 bp, Homo sapiens
ctgtcttgtccctgg

SEQ ID NO: 604561 - DNA, 15 bp, Homo sapiens
tgtcttgtccctgga

SEQ ID NO: 604562 - DNA, 15 bp, Homo sapiens
gtcttgtccctggac

SEQ ID NO: 604563 - DNA, 15 bp, Homo sapiens
tcttgtccctggacc

SEQ ID NO: 604564 - DNA, 15 bp, Homo sapiens
cttgtccctggacca

SEQ ID NO: 604565 - DNA, 15 bp, Homo sapiens
ttgtccctggaccaa

SEQ ID NO: 604566 - DNA, 15 bp, Homo sapiens
tgtccctggaccaac

SEQ ID NO: 604567 - DNA, 15 bp, Homo sapiens
gtccctggaccaaca

SEQ ID NO: 604568 - DNA, 15 bp, Homo sapiens
tccctggaccaacag

SEQ ID NO: 604569 - DNA, 15 bp, Homo sapiens
ccctggaccaacagc

SEQ ID NO: 604570 - DNA, 15 bp, Homo sapiens
cctggaccaacagcg

SEQ ID NO: 604571 - DNA, 15 bp, Homo sapiens
ctggaccaacagcgt

SEQ ID NO: 604572 - DNA, 15 bp, Homo sapiens
tggaccaacagcgta

SEQ ID NO: 604573 - DNA, 15 bp, Homo sapiens
ggaccaacagcgtat

SEQ ID NO: 604574 - DNA, 15 bp, Homo sapiens
gaccaacagcgtata

SEQ ID NO: 604575 - DNA, 15 bp, Homo sapiens
accaacagcgtatat

SEQ ID NO: 604576 - DNA, 15 bp, Homo sapiens
ccaacagcgtatatg

SEQ ID NO: 604577 - DNA, 15 bp, Homo sapiens
caacagcgtatatgt

SEQ ID NO: 604578 - DNA, 15 bp, Homo sapiens
aacagcgtatatgtc

SEQ ID NO: 604579 - DNA, 15 bp, Homo sapiens
acagcgtatatgtca

SEQ ID NO: 604580 - DNA, 15 bp, Homo sapiens
cagcgtatatgtcag

SEQ ID NO: 604581 - DNA, 15 bp, Homo sapiens
agcgtatatgtcagg

SEQ ID NO: 604582 - DNA, 15 bp, Homo sapiens
gcgtatatgtcaggg

SEQ ID NO: 604583 - DNA, 15 bp, Homo sapiens
cgtatatgtcagggg

SEQ ID NO: 604584 - DNA, 15 bp, Homo sapiens
gtatatgtcagggga

SEQ ID NO: 604585 - DNA, 15 bp, Homo sapiens
tatatgtcaggggag

SEQ ID NO: 604586 - DNA, 15 bp, Homo sapiens
atatgtcaggggagg

SEQ ID NO: 604587 - DNA, 15 bp, Homo sapiens
tatgtcaggggagga

SEQ ID NO: 604588 - DNA, 15 bp, Homo sapiens
atgtcaggggaggaa

SEQ ID NO: 604589 - DNA, 15 bp, Homo sapiens
tgtcaggggaggaag

SEQ ID NO: 604590 - DNA, 15 bp, Homo sapiens
gtcaggggaggaagg

SEQ ID NO: 604591 - DNA, 15 bp, Homo sapiens
tcaggggaggaaggt

SEQ ID NO: 604592 - DNA, 15 bp, Homo sapiens
caggggaggaaggtc

SEQ ID NO: 604593 - DNA, 15 bp, Homo sapiens
aggggaggaaggtcc

SEQ ID NO: 604594 - DNA, 15 bp, Homo sapiens
ggggaggaaggtcca

SEQ ID NO: 604595 - DNA, 15 bp, Homo sapiens
gggaggaaggtccag

SEQ ID NO: 604596 - DNA, 15 bp, Homo sapiens
ggaggaaggtccagg

SEQ ID NO: 604597 - DNA, 15 bp, Homo sapiens
gaggaaggtccaggt

SEQ ID NO: 604598 - DNA, 15 bp, Homo sapiens
aggaaggtccaggtg

SEQ ID NO: 604599 - DNA, 15 bp, Homo sapiens
ggaaggtccaggtgt

SEQ ID NO: 604600 - DNA, 15 bp, Homo sapiens
gaaggtccaggtgtg

SEQ ID NO: 604601 - DNA, 15 bp, Homo sapiens
aaggtccaggtgtgt

SEQ ID NO: 604602 - DNA, 15 bp, Homo sapiens
aggtccaggtgtgtg

SEQ ID NO: 604603 - DNA, 15 bp, Homo sapiens
ggtccaggtgtgtgt

SEQ ID NO: 604604 - DNA, 15 bp, Homo sapiens
gtccaggtgtgtgtg

SEQ ID NO: 604605 - DNA, 15 bp, Homo sapiens
tccaggtgtgtgtgt

SEQ ID NO: 604606 - DNA, 15 bp, Homo sapiens
ccaggtgtgtgtgtg

SEQ ID NO: 604607 - DNA, 15 bp, Homo sapiens
caggtgtgtgtgtgt

SEQ ID NO: 604608 - DNA, 15 bp, Homo sapiens
aggtgtgtgtgtgtg

SEQ ID NO: 604609 - DNA, 15 bp, Homo sapiens
ggtgtgtgtgtgtgt

SEQ ID NO: 604610 - DNA, 15 bp, Homo sapiens
gtgtgtgtgtgtgtg

SEQ ID NO: 604611 - DNA, 15 bp, Homo sapiens
tgtgtgtgtgtgtgt

SEQ ID NO: 604612 - DNA, 15 bp, Homo sapiens
gtgtgtgtgtgtgtt

SEQ ID NO: 604613 - DNA, 15 bp, Homo sapiens
tgtgtgtgtgtgttt

SEQ ID NO: 604614 - DNA, 15 bp, Homo sapiens
gtgtgtgtgtgtttg

SEQ ID NO: 604615 - DNA, 15 bp, Homo sapiens
tgtgtgtgtgtttgt

SEQ ID NO: 604616 - DNA, 15 bp, Homo sapiens
gtgtgtgtgtttgtg

SEQ ID NO: 604617 - DNA, 15 bp, Homo sapiens
tgtgtgtgtttgtgt

SEQ ID NO: 604618 - DNA, 15 bp, Homo sapiens
gtgtgtgtttgtgtg

SEQ ID NO: 604619 - DNA, 15 bp, Homo sapiens
tgtgtgtttgtgtgt

SEQ ID NO: 604620 - DNA, 15 bp, Homo sapiens
gtgtgtttgtgtgta

SEQ ID NO: 604621 - DNA, 15 bp, Homo sapiens
tgtgtttgtgtgtaa

SEQ ID NO: 604622 - DNA, 15 bp, Homo sapiens
gtgtttgtgtgtaaa

SEQ ID NO: 604623 - DNA, 15 bp, Homo sapiens
tgtttgtgtgtaaag

SEQ ID NO: 604624 - DNA, 15 bp, Homo sapiens
gtttgtgtgtaaaga

SEQ ID NO: 604625 - DNA, 15 bp, Homo sapiens
tttgtgtgtaaagaa

SEQ ID NO: 604626 - DNA, 15 bp, Homo sapiens
ttgtgtgtaaagaag

SEQ ID NO: 604627 - DNA, 15 bp, Homo sapiens
tgtgtgtaaagaagg

SEQ ID NO: 604628 - DNA, 15 bp, Homo sapiens
gtgtgtaaagaaggg

SEQ ID NO: 604629 - DNA, 15 bp, Homo sapiens
tgtgtaaagaaggga

SEQ ID NO: 604630 - DNA, 15 bp, Homo sapiens
gtgtaaagaagggaa

SEQ ID NO: 604631 - DNA, 15 bp, Homo sapiens
tgtaaagaagggaaa

SEQ ID NO: 604632 - DNA, 15 bp, Homo sapiens
gtaaagaagggaaaa

SEQ ID NO: 604633 - DNA, 15 bp, Homo sapiens
taaagaagggaaaag

SEQ ID NO: 604634 - DNA, 15 bp, Homo sapiens
aaagaagggaaaagg

SEQ ID NO: 604635 - DNA, 15 bp, Homo sapiens
aagaagggaaaagga

SEQ ID NO: 604636 - DNA, 15 bp, Homo sapiens
agaagggaaaaggat

SEQ ID NO: 604637 - DNA, 15 bp, Homo sapiens
gaagggaaaaggatg

SEQ ID NO: 604638 - DNA, 15 bp, Homo sapiens
aagggaaaaggatgt

SEQ ID NO: 604639 - DNA, 15 bp, Homo sapiens
agggaaaaggatgtc

SEQ ID NO: 604640 - DNA, 15 bp, Homo sapiens
gggaaaaggatgtca

SEQ ID NO: 604641 - DNA, 15 bp, Homo sapiens
ggaaaaggatgtcac

SEQ ID NO: 604642 - DNA, 15 bp, Homo sapiens
gaaaaggatgtcact

SEQ ID NO: 604643 - DNA, 15 bp, Homo sapiens
aaaaggatgtcacta

SEQ ID NO: 604644 - DNA, 15 bp, Homo sapiens
aaaggatgtcactaa

SEQ ID NO: 604645 - DNA, 15 bp, Homo sapiens
aaggatgtcactaac

SEQ ID NO: 604646 - DNA, 15 bp, Homo sapiens
aggatgtcactaact

SEQ ID NO: 604647 - DNA, 15 bp, Homo sapiens
ggatgtcactaactc

SEQ ID NO: 604648 - DNA, 15 bp, Homo sapiens
gatgtcactaactca

SEQ ID NO: 604649 - DNA, 15 bp, Homo sapiens
atgtcactaactcag

SEQ ID NO: 604650 - DNA, 15 bp, Homo sapiens
tgtcactaactcaga

SEQ ID NO: 604651 - DNA, 15 bp, Homo sapiens
gtcactaactcagag

SEQ ID NO: 604652 - DNA, 15 bp, Homo sapiens
tcactaactcagagt

SEQ ID NO: 604653 - DNA, 15 bp, Homo sapiens
cactaactcagagta

SEQ ID NO: 604654 - DNA, 15 bp, Homo sapiens
actaactcagagtag

SEQ ID NO: 604655 - DNA, 15 bp, Homo sapiens
ctaactcagagtagt

SEQ ID NO: 604656 - DNA, 15 bp, Homo sapiens
taactcagagtagtc

SEQ ID NO: 604657 - DNA, 15 bp, Homo sapiens
aactcagagtagtcc

SEQ ID NO: 604658 - DNA, 15 bp, Homo sapiens
actcagagtagtcca

SEQ ID NO: 604659 - DNA, 15 bp, Homo sapiens
ctcagagtagtccat

SEQ ID NO: 604660 - DNA, 15 bp, Homo sapiens
tcagagtagtccatt

SEQ ID NO: 604661 - DNA, 15 bp, Homo sapiens
cagagtagtccattc

SEQ ID NO: 604662 - DNA, 15 bp, Homo sapiens
agagtagtccattct

SEQ ID NO: 604663 - DNA, 15 bp, Homo sapiens
gagtagtccattctg

SEQ ID NO: 604664 - DNA, 15 bp, Homo sapiens
agtagtccattctgg

SEQ ID NO: 604665 - DNA, 15 bp, Homo sapiens
gtagtccattctggg

SEQ ID NO: 604666 - DNA, 15 bp, Homo sapiens
tagtccattctgggg

SEQ ID NO: 604667 - DNA, 15 bp, Homo sapiens
agtccattctggggg

SEQ ID NO: 604668 - DNA, 15 bp, Homo sapiens
gtccattctggggga

SEQ ID NO: 604669 - DNA, 15 bp, Homo sapiens
tccattctgggggag

SEQ ID NO: 604670 - DNA, 15 bp, Homo sapiens
ccattctgggggagc

SEQ ID NO: 604671 - DNA, 15 bp, Homo sapiens
cattctgggggagca

SEQ ID NO: 604672 - DNA, 15 bp, Homo sapiens
attctgggggagcag

SEQ ID NO: 604673 - DNA, 15 bp, Homo sapiens
ttctgggggagcagg

SEQ ID NO: 604674 - DNA, 15 bp, Homo sapiens
tctgggggagcaggg

SEQ ID NO: 604675 - DNA, 15 bp, Homo sapiens
ctgggggagcaggga

SEQ ID NO: 604676 - DNA, 15 bp, Homo sapiens
tgggggagcagggat

SEQ ID NO: 604677 - DNA, 15 bp, Homo sapiens
gggggagcagggata

SEQ ID NO: 604678 - DNA, 15 bp, Homo sapiens
ggggagcagggatag

SEQ ID NO: 604679 - DNA, 15 bp, Homo sapiens
gggagcagggatagc

SEQ ID NO: 604680 - DNA, 15 bp, Homo sapiens
ggagcagggatagcc

SEQ ID NO: 604681 - DNA, 15 bp, Homo sapiens
gagcagggatagccc

SEQ ID NO: 604682 - DNA, 15 bp, Homo sapiens
agcagggatagccct

SEQ ID NO: 604683 - DNA, 15 bp, Homo sapiens
gcagggatagccctc

SEQ ID NO: 604684 - DNA, 15 bp, Homo sapiens
cagggatagccctca

SEQ ID NO: 604685 - DNA, 15 bp, Homo sapiens
agggatagccctcag

SEQ ID NO: 604686 - DNA, 15 bp, Homo sapiens
gggatagccctcaga

SEQ ID NO: 604687 - DNA, 15 bp, Homo sapiens
ggatagccctcagaa

SEQ ID NO: 604688 - DNA, 15 bp, Homo sapiens
gatagccctcagaat

SEQ ID NO: 604689 - DNA, 15 bp, Homo sapiens
atagccctcagaatg

SEQ ID NO: 604690 - DNA, 15 bp, Homo sapiens
tagccctcagaatgg

SEQ ID NO: 604691 - DNA, 15 bp, Homo sapiens
agccctcagaatggg

SEQ ID NO: 604692 - DNA, 15 bp, Homo sapiens
gccctcagaatgggg

SEQ ID NO: 604693 - DNA, 15 bp, Homo sapiens
ccctcagaatgggga

SEQ ID NO: 604694 - DNA, 15 bp, Homo sapiens
cctcagaatggggag

SEQ ID NO: 604695 - DNA, 15 bp, Homo sapiens
ctcagaatggggagg

SEQ ID NO: 604696 - DNA, 15 bp, Homo sapiens
tcagaatggggagga

SEQ ID NO: 604697 - DNA, 15 bp, Homo sapiens
cagaatggggaggaa

SEQ ID NO: 604698 - DNA, 15 bp, Homo sapiens
agaatggggaggaag

SEQ ID NO: 604699 - DNA, 15 bp, Homo sapiens
gaatggggaggaagg

SEQ ID NO: 604700 - DNA, 15 bp, Homo sapiens
aatggggaggaaggg

SEQ ID NO: 604701 - DNA, 15 bp, Homo sapiens
atggggaggaagggg

SEQ ID NO: 604702 - DNA, 15 bp, Homo sapiens
tggggaggaagggga

SEQ ID NO: 604703 - DNA, 15 bp, Homo sapiens
ggggaggaaggggag

SEQ ID NO: 604704 - DNA, 15 bp, Homo sapiens
gggaggaaggggagc

SEQ ID NO: 604705 - DNA, 15 bp, Homo sapiens
ggaggaaggggagca

SEQ ID NO: 604706 - DNA, 15 bp, Homo sapiens
gaggaaggggagcat

SEQ ID NO: 604707 - DNA, 15 bp, Homo sapiens
aggaaggggagcatc

SEQ ID NO: 604708 - DNA, 15 bp, Homo sapiens
ggaaggggagcatct

SEQ ID NO: 604709 - DNA, 15 bp, Homo sapiens
gaaggggagcatcta

SEQ ID NO: 604710 - DNA, 15 bp, Homo sapiens
aaggggagcatctag

SEQ ID NO: 604711 - DNA, 15 bp, Homo sapiens
aggggagcatctagc

SEQ ID NO: 604712 - DNA, 15 bp, Homo sapiens
ggggagcatctagca

SEQ ID NO: 604713 - DNA, 15 bp, Homo sapiens
gggagcatctagcac

SEQ ID NO: 604714 - DNA, 15 bp, Homo sapiens
ggagcatctagcact

SEQ ID NO: 604715 - DNA, 15 bp, Homo sapiens
gagcatctagcactg

SEQ ID NO: 604716 - DNA, 15 bp, Homo sapiens
agcatctagcactgg

SEQ ID NO: 604717 - DNA, 15 bp, Homo sapiens
gcatctagcactggg

SEQ ID NO: 604718 - DNA, 15 bp, Homo sapiens
catctagcactgggc

SEQ ID NO: 604719 - DNA, 15 bp, Homo sapiens
atctagcactgggca

SEQ ID NO: 604720 - DNA, 15 bp, Homo sapiens
tctagcactgggcag

SEQ ID NO: 604721 - DNA, 15 bp, Homo sapiens
ctagcactgggcagg

SEQ ID NO: 604722 - DNA, 15 bp, Homo sapiens
tagcactgggcaggc

SEQ ID NO: 604723 - DNA, 15 bp, Homo sapiens
agcactgggcaggct

SEQ ID NO: 604724 - DNA, 15 bp, Homo sapiens
gcactgggcaggctg

SEQ ID NO: 604725 - DNA, 15 bp, Homo sapiens
cactgggcaggctgc

SEQ ID NO: 604726 - DNA, 15 bp, Homo sapiens
actgggcaggctgcc

SEQ ID NO: 604727 - DNA, 15 bp, Homo sapiens
ctgggcaggctgccc

SEQ ID NO: 604728 - DNA, 15 bp, Homo sapiens
tgggcaggctgccct

SEQ ID NO: 604729 - DNA, 15 bp, Homo sapiens
gggcaggctgcccta

SEQ ID NO: 604730 - DNA, 15 bp, Homo sapiens
ggcaggctgccctat

SEQ ID NO: 604731 - DNA, 15 bp, Homo sapiens
gcaggctgccctatt

SEQ ID NO: 604732 - DNA, 15 bp, Homo sapiens
caggctgccctattc

SEQ ID NO: 604733 - DNA, 15 bp, Homo sapiens
aggctgccctattct

SEQ ID NO: 604734 - DNA, 15 bp, Homo sapiens
ggctgccctattctg

SEQ ID NO: 604735 - DNA, 15 bp, Homo sapiens
gctgccctattctgg

SEQ ID NO: 604736 - DNA, 15 bp, Homo sapiens
ctgccctattctggg

SEQ ID NO: 604737 - DNA, 15 bp, Homo sapiens
tgccctattctgggc

SEQ ID NO: 604738 - DNA, 15 bp, Homo sapiens
gccctattctgggct

SEQ ID NO: 604739 - DNA, 15 bp, Homo sapiens
ccctattctgggctg

SEQ ID NO: 604740 - DNA, 15 bp, Homo sapiens
cctattctgggctga

SEQ ID NO: 604741 - DNA, 15 bp, Homo sapiens
ctattctgggctgag

SEQ ID NO: 604742 - DNA, 15 bp, Homo sapiens
tattctgggctgagg

SEQ ID NO: 604743 - DNA, 15 bp, Homo sapiens
attctgggctgaggc

SEQ ID NO: 604744 - DNA, 15 bp, Homo sapiens
ttctgggctgaggct

SEQ ID NO: 604745 - DNA, 15 bp, Homo sapiens
tctgggctgaggctc

SEQ ID NO: 604746 - DNA, 15 bp, Homo sapiens
ctgggctgaggctca

SEQ ID NO: 604747 - DNA, 15 bp, Homo sapiens
tgggctgaggctcag

SEQ ID NO: 604748 - DNA, 15 bp, Homo sapiens
gggctgaggctcagg

SEQ ID NO: 604749 - DNA, 15 bp, Homo sapiens
ggctgaggctcaggg

SEQ ID NO: 604750 - DNA, 15 bp, Homo sapiens
gctgaggctcagggc

SEQ ID NO: 604751 - DNA, 15 bp, Homo sapiens
ctgaggctcagggcc

SEQ ID NO: 604752 - DNA, 15 bp, Homo sapiens
tgaggctcagggcca

SEQ ID NO: 604753 - DNA, 15 bp, Homo sapiens
gaggctcagggccag

SEQ ID NO: 604754 - DNA, 15 bp, Homo sapiens
aggctcagggccagg

SEQ ID NO: 604755 - DNA, 15 bp, Homo sapiens
ggctcagggccaggt

SEQ ID NO: 604756 - DNA, 15 bp, Homo sapiens
gctcagggccaggtc

SEQ ID NO: 604757 - DNA, 15 bp, Homo sapiens
ctcagggccaggtct

SEQ ID NO: 604758 - DNA, 15 bp, Homo sapiens
tcagggccaggtctc

SEQ ID NO: 604759 - DNA, 15 bp, Homo sapiens
cagggccaggtctcc

SEQ ID NO: 604760 - DNA, 15 bp, Homo sapiens
agggccaggtctccc

SEQ ID NO: 604761 - DNA, 15 bp, Homo sapiens
gggccaggtctcccc

SEQ ID NO: 604762 - DNA, 15 bp, Homo sapiens
ggccaggtctcccca

SEQ ID NO: 604763 - DNA, 15 bp, Homo sapiens
gccaggtctccccac

SEQ ID NO: 604764 - DNA, 15 bp, Homo sapiens
ccaggtctccccacc

SEQ ID NO: 604765 - DNA, 15 bp, Homo sapiens
caggtctccccaccc

SEQ ID NO: 604766 - DNA, 15 bp, Homo sapiens
aggtctccccacccc

SEQ ID NO: 604767 - DNA, 15 bp, Homo sapiens
ggtctccccacccca

SEQ ID NO: 604768 - DNA, 15 bp, Homo sapiens
gtctccccaccccag

SEQ ID NO: 604769 - DNA, 15 bp, Homo sapiens
tctccccaccccagt

SEQ ID NO: 604770 - DNA, 15 bp, Homo sapiens
ctccccaccccagtg

SEQ ID NO: 604771 - DNA, 15 bp, Homo sapiens
tccccaccccagtgc

SEQ ID NO: 604772 - DNA, 15 bp, Homo sapiens
ccccaccccagtgcc

SEQ ID NO: 604773 - DNA, 15 bp, Homo sapiens
cccaccccagtgccg

SEQ ID NO: 604774 - DNA, 15 bp, Homo sapiens
ccaccccagtgccgc

SEQ ID NO: 604775 - DNA, 15 bp, Homo sapiens
caccccagtgccgca

SEQ ID NO: 604776 - DNA, 15 bp, Homo sapiens
accccagtgccgcag

SEQ ID NO: 604777 - DNA, 15 bp, Homo sapiens
ccccagtgccgcagg

SEQ ID NO: 604778 - DNA, 15 bp, Homo sapiens
cccagtgccgcaggg

SEQ ID NO: 604779 - DNA, 15 bp, Homo sapiens
ccagtgccgcagggc

SEQ ID NO: 604780 - DNA, 15 bp, Homo sapiens
cagtgccgcagggcc

SEQ ID NO: 604781 - DNA, 15 bp, Homo sapiens
agtgccgcagggcca

SEQ ID NO: 604782 - DNA, 15 bp, Homo sapiens
gtgccgcagggccac

SEQ ID NO: 604783 - DNA, 15 bp, Homo sapiens
tgccgcagggccacg

SEQ ID NO: 604784 - DNA, 15 bp, Homo sapiens
gccgcagggccacgt

SEQ ID NO: 604785 - DNA, 15 bp, Homo sapiens
ccgcagggccacgtg

SEQ ID NO: 604786 - DNA, 15 bp, Homo sapiens
cgcagggccacgtgt

SEQ ID NO: 604787 - DNA, 15 bp, Homo sapiens
gcagggccacgtgta

SEQ ID NO: 604788 - DNA, 15 bp, Homo sapiens
cagggccacgtgtac

SEQ ID NO: 604789 - DNA, 15 bp, Homo sapiens
agggccacgtgtacc

SEQ ID NO: 604790 - DNA, 15 bp, Homo sapiens
gggccacgtgtaccg

SEQ ID NO: 604791 - DNA, 15 bp, Homo sapiens
ggccacgtgtaccgg

SEQ ID NO: 604792 - DNA, 15 bp, Homo sapiens
gccacgtgtaccggt

SEQ ID NO: 604793 - DNA, 15 bp, Homo sapiens
ccacgtgtaccggtt

SEQ ID NO: 604794 - DNA, 15 bp, Homo sapiens
cacgtgtaccggttc

SEQ ID NO: 604795 - DNA, 15 bp, Homo sapiens
acgtgtaccggttct

SEQ ID NO: 604796 - DNA, 15 bp, Homo sapiens
cgtgtaccggttctg

SEQ ID NO: 604797 - DNA, 15 bp, Homo sapiens
gtgtaccggttctgc

SEQ ID NO: 604798 - DNA, 15 bp, Homo sapiens
tgtaccggttctgca

SEQ ID NO: 604799 - DNA, 15 bp, Homo sapiens
gtaccggttctgcac

SEQ ID NO: 604800 - DNA, 15 bp, Homo sapiens
taccggttctgcaca

SEQ ID NO: 604801 - DNA, 15 bp, Homo sapiens
accggttctgcacag

SEQ ID NO: 604802 - DNA, 15 bp, Homo sapiens
ccggttctgcacagc

SEQ ID NO: 604803 - DNA, 15 bp, Homo sapiens
cggttctgcacagct

SEQ ID NO: 604804 - DNA, 15 bp, Homo sapiens
ggttctgcacagctg

SEQ ID NO: 604805 - DNA, 15 bp, Homo sapiens
gttctgcacagctga

SEQ ID NO: 604806 - DNA, 15 bp, Homo sapiens
ttctgcacagctgaa

SEQ ID NO: 604807 - DNA, 15 bp, Homo sapiens
tctgcacagctgaag

SEQ ID NO: 604808 - DNA, 15 bp, Homo sapiens
ctgcacagctgaagg

SEQ ID NO: 604809 - DNA, 15 bp, Homo sapiens
tgcacagctgaaggc

SEQ ID NO: 604810 - DNA, 15 bp, Homo sapiens
gcacagctgaaggcc

SEQ ID NO: 604811 - DNA, 15 bp, Homo sapiens
cacagctgaaggcct

SEQ ID NO: 604812 - DNA, 15 bp, Homo sapiens
acagctgaaggcctc

SEQ ID NO: 604813 - DNA, 15 bp, Homo sapiens
cagctgaaggcctct

SEQ ID NO: 604814 - DNA, 15 bp, Homo sapiens
agctgaaggcctctg

SEQ ID NO: 604815 - DNA, 15 bp, Homo sapiens
gctgaaggcctctgg

SEQ ID NO: 604816 - DNA, 15 bp, Homo sapiens
ctgaaggcctctggc

SEQ ID NO: 604817 - DNA, 15 bp, Homo sapiens
tgaaggcctctggct

SEQ ID NO: 604818 - DNA, 15 bp, Homo sapiens
gaaggcctctggctg

SEQ ID NO: 604819 - DNA, 15 bp, Homo sapiens
aaggcctctggctgc

SEQ ID NO: 604820 - DNA, 15 bp, Homo sapiens
aggcctctggctgca

SEQ ID NO: 604821 - DNA, 15 bp, Homo sapiens
ggcctctggctgcag

SEQ ID NO: 604822 - DNA, 15 bp, Homo sapiens
gcctctggctgcaga

SEQ ID NO: 604823 - DNA, 15 bp, Homo sapiens
cctctggctgcagaa

SEQ ID NO: 604824 - DNA, 15 bp, Homo sapiens
ctctggctgcagaag

SEQ ID NO: 604825 - DNA, 15 bp, Homo sapiens
tctggctgcagaagg

SEQ ID NO: 604826 - DNA, 15 bp, Homo sapiens
ctggctgcagaagga

SEQ ID NO: 604827 - DNA, 15 bp, Homo sapiens
tggctgcagaaggac

SEQ ID NO: 604828 - DNA, 15 bp, Homo sapiens
ggctgcagaaggaca

SEQ ID NO: 604829 - DNA, 15 bp, Homo sapiens
gctgcagaaggacaa

SEQ ID NO: 604830 - DNA, 15 bp, Homo sapiens
ctgcagaaggacaac

SEQ ID NO: 604831 - DNA, 15 bp, Homo sapiens
tgcagaaggacaact

SEQ ID NO: 604832 - DNA, 15 bp, Homo sapiens
gcagaaggacaactc

SEQ ID NO: 604833 - DNA, 15 bp, Homo sapiens
cagaaggacaactcc

SEQ ID NO: 604834 - DNA, 15 bp, Homo sapiens
agaaggacaactcca

SEQ ID NO: 604835 - DNA, 15 bp, Homo sapiens
gaaggacaactccag

SEQ ID NO: 604836 - DNA, 15 bp, Homo sapiens
aaggacaactccagc

SEQ ID NO: 604837 - DNA, 15 bp, Homo sapiens
aggacaactccagcc

SEQ ID NO: 604838 - DNA, 15 bp, Homo sapiens
ggacaactccagcct

SEQ ID NO: 604839 - DNA, 15 bp, Homo sapiens
gacaactccagcctg

SEQ ID NO: 604840 - DNA, 15 bp, Homo sapiens
acaactccagcctgc

SEQ ID NO: 604841 - DNA, 15 bp, Homo sapiens
caactccagcctgcc

SEQ ID NO: 604842 - DNA, 15 bp, Homo sapiens
aactccagcctgccc

SEQ ID NO: 604843 - DNA, 15 bp, Homo sapiens
actccagcctgccct

SEQ ID NO: 604844 - DNA, 15 bp, Homo sapiens
ctccagcctgccctg

SEQ ID NO: 604845 - DNA, 15 bp, Homo sapiens
tccagcctgccctgg

SEQ ID NO: 604846 - DNA, 15 bp, Homo sapiens
ccagcctgccctgga

SEQ ID NO: 604847 - DNA, 15 bp, Homo sapiens
cagcctgccctggag

SEQ ID NO: 604848 - DNA, 15 bp, Homo sapiens
agcctgccctggagg

SEQ ID NO: 604849 - DNA, 15 bp, Homo sapiens
gcctgccctggaggg

SEQ ID NO: 604850 - DNA, 15 bp, Homo sapiens
cctgccctggaggga

SEQ ID NO: 604851 - DNA, 15 bp, Homo sapiens
ctgccctggagggac

SEQ ID NO: 604852 - DNA, 15 bp, Homo sapiens
tgccctggagggact

SEQ ID NO: 604853 - DNA, 15 bp, Homo sapiens
gccctggagggactt

SEQ ID NO: 604854 - DNA, 15 bp, Homo sapiens
ccctggagggacttg

SEQ ID NO: 604855 - DNA, 15 bp, Homo sapiens
cctggagggacttgt

SEQ ID NO: 604856 - DNA, 15 bp, Homo sapiens
ctggagggacttgtc

SEQ ID NO: 604857 - DNA, 15 bp, Homo sapiens
tggagggacttgtcg

SEQ ID NO: 604858 - DNA, 15 bp, Homo sapiens
ggagggacttgtcgg

SEQ ID NO: 604859 - DNA, 15 bp, Homo sapiens
gagggacttgtcgga

SEQ ID NO: 604860 - DNA, 15 bp, Homo sapiens
agggacttgtcggag

SEQ ID NO: 604861 - DNA, 15 bp, Homo sapiens
gggacttgtcggagt

SEQ ID NO: 604862 - DNA, 15 bp, Homo sapiens
ggacttgtcggagtg

SEQ ID NO: 604863 - DNA, 15 bp, Homo sapiens
gacttgtcggagtgc

SEQ ID NO: 604864 - DNA, 15 bp, Homo sapiens
acttgtcggagtgcg

SEQ ID NO: 604865 - DNA, 15 bp, Homo sapiens
cttgtcggagtgcga

SEQ ID NO: 604866 - DNA, 15 bp, Homo sapiens
ttgtcggagtgcgag

SEQ ID NO: 604867 - DNA, 15 bp, Homo sapiens
tgtcggagtgcgagg

SEQ ID NO: 604868 - DNA, 15 bp, Homo sapiens
gtcggagtgcgagga

SEQ ID NO: 604869 - DNA, 15 bp, Homo sapiens
tcggagtgcgaggag

SEQ ID NO: 604870 - DNA, 15 bp, Homo sapiens
cggagtgcgaggagt

SEQ ID NO: 604871 - DNA, 15 bp, Homo sapiens
ggagtgcgaggagtc

SEQ ID NO: 604872 - DNA, 15 bp, Homo sapiens
gagtgcgaggagtcc

SEQ ID NO: 604873 - DNA, 15 bp, Homo sapiens
agtgcgaggagtcca

SEQ ID NO: 604874 - DNA, 15 bp, Homo sapiens
gtgcgaggagtccaa

SEQ ID NO: 604875 - DNA, 15 bp, Homo sapiens
tgcgaggagtccaag

SEQ ID NO: 604876 - DNA, 15 bp, Homo sapiens
gcgaggagtccaagc

SEQ ID NO: 604877 - DNA, 15 bp, Homo sapiens
cgaggagtccaagcg

SEQ ID NO: 604878 - DNA, 15 bp, Homo sapiens
gaggagtccaagcga

SEQ ID NO: 604879 - DNA, 15 bp, Homo sapiens
aggagtccaagcgag

SEQ ID NO: 604880 - DNA, 15 bp, Homo sapiens
ggagtccaagcgagg

SEQ ID NO: 604881 - DNA, 15 bp, Homo sapiens
gagtccaagcgaggg

SEQ ID NO: 604882 - DNA, 15 bp, Homo sapiens
agtccaagcgagggg

SEQ ID NO: 604883 - DNA, 15 bp, Homo sapiens
gtccaagcgagggga

SEQ ID NO: 604884 - DNA, 15 bp, Homo sapiens
tccaagcgaggggaa

SEQ ID NO: 604885 - DNA, 15 bp, Homo sapiens
ccaagcgaggggaaa

SEQ ID NO: 604886 - DNA, 15 bp, Homo sapiens
caagcgaggggaaag

SEQ ID NO: 604887 - DNA, 15 bp, Homo sapiens
aagcgaggggaaaga

SEQ ID NO: 604888 - DNA, 15 bp, Homo sapiens
agcgaggggaaagag

SEQ ID NO: 604889 - DNA, 15 bp, Homo sapiens
gcgaggggaaagagt

SEQ ID NO: 604890 - DNA, 15 bp, Homo sapiens
cgaggggaaagagtg

SEQ ID NO: 604891 - DNA, 15 bp, Homo sapiens
gaggggaaagagtga

SEQ ID NO: 604892 - DNA, 15 bp, Homo sapiens
aggggaaagagtgag

SEQ ID NO: 604893 - DNA, 15 bp, Homo sapiens
ggggaaagagtgagt

SEQ ID NO: 604894 - DNA, 15 bp, Homo sapiens
gggaaagagtgagtt

SEQ ID NO: 604895 - DNA, 15 bp, Homo sapiens
ggaaagagtgagttg

SEQ ID NO: 604896 - DNA, 15 bp, Homo sapiens
gaaagagtgagttga

SEQ ID NO: 604897 - DNA, 15 bp, Homo sapiens
aaagagtgagttgag

SEQ ID NO: 604898 - DNA, 15 bp, Homo sapiens
aagagtgagttgagg

SEQ ID NO: 604899 - DNA, 15 bp, Homo sapiens
agagtgagttgaggc

SEQ ID NO: 604900 - DNA, 15 bp, Homo sapiens
gagtgagttgaggcg

SEQ ID NO: 604901 - DNA, 15 bp, Homo sapiens
agtgagttgaggcgg

SEQ ID NO: 604902 - DNA, 15 bp, Homo sapiens
gtgagttgaggcggg

SEQ ID NO: 604903 - DNA, 15 bp, Homo sapiens
tgagttgaggcgggg

SEQ ID NO: 604904 - DNA, 15 bp, Homo sapiens
gagttgaggcggggt

SEQ ID NO: 604905 - DNA, 15 bp, Homo sapiens
agttgaggcggggtt

SEQ ID NO: 604906 - DNA, 15 bp, Homo sapiens
gttgaggcggggttc

SEQ ID NO: 604907 - DNA, 15 bp, Homo sapiens
ttgaggcggggttct

SEQ ID NO: 604908 - DNA, 15 bp, Homo sapiens
tgaggcggggttctg

SEQ ID NO: 604909 - DNA, 15 bp, Homo sapiens
gaggcggggttctga

SEQ ID NO: 604910 - DNA, 15 bp, Homo sapiens
aggcggggttctgag

SEQ ID NO: 604911 - DNA, 15 bp, Homo sapiens
ggcggggttctgagc

SEQ ID NO: 604912 - DNA, 15 bp, Homo sapiens
gcggggttctgagcc

SEQ ID NO: 604913 - DNA, 15 bp, Homo sapiens
cggggttctgagcca

SEQ ID NO: 604914 - DNA, 15 bp, Homo sapiens
ggggttctgagccag

SEQ ID NO: 604915 - DNA, 15 bp, Homo sapiens
gggttctgagccagg

SEQ ID NO: 604916 - DNA, 15 bp, Homo sapiens
ggttctgagccaggg

SEQ ID NO: 604917 - DNA, 15 bp, Homo sapiens
gttctgagccaggga

SEQ ID NO: 604918 - DNA, 15 bp, Homo sapiens
ttctgagccagggag

SEQ ID NO: 604919 - DNA, 15 bp, Homo sapiens
tctgagccagggagc

SEQ ID NO: 604920 - DNA, 15 bp, Homo sapiens
ctgagccagggagcg

SEQ ID NO: 604921 - DNA, 15 bp, Homo sapiens
tgagccagggagcgg

SEQ ID NO: 604922 - DNA, 15 bp, Homo sapiens
gagccagggagcggg

SEQ ID NO: 604923 - DNA, 15 bp, Homo sapiens
agccagggagcgggg

SEQ ID NO: 604924 - DNA, 15 bp, Homo sapiens
gccagggagcgggga

SEQ ID NO: 604925 - DNA, 15 bp, Homo sapiens
ccagggagcggggag

SEQ ID NO: 604926 - DNA, 15 bp, Homo sapiens
cagggagcggggagc

SEQ ID NO: 604927 - DNA, 15 bp, Homo sapiens
agggagcggggagcc

SEQ ID NO: 604928 - DNA, 15 bp, Homo sapiens
gggagcggggagcca

SEQ ID NO: 604929 - DNA, 15 bp, Homo sapiens
ggagcggggagccat

SEQ ID NO: 604930 - DNA, 15 bp, Homo sapiens
gagcggggagccatg

SEQ ID NO: 604931 - DNA, 15 bp, Homo sapiens
agcggggagccatgt

SEQ ID NO: 604932 - DNA, 15 bp, Homo sapiens
gcggggagccatgtc

SEQ ID NO: 604933 - DNA, 15 bp, Homo sapiens
cggggagccatgtct

SEQ ID NO: 604934 - DNA, 15 bp, Homo sapiens
ggggagccatgtctt

SEQ ID NO: 604935 - DNA, 15 bp, Homo sapiens
gggagccatgtcttg

SEQ ID NO: 604936 - DNA, 15 bp, Homo sapiens
ggagccatgtcttgg

SEQ ID NO: 604937 - DNA, 15 bp, Homo sapiens
gagccatgtcttgga

SEQ ID NO: 604938 - DNA, 15 bp, Homo sapiens
agccatgtcttggag

SEQ ID NO: 604939 - DNA, 15 bp, Homo sapiens
gccatgtcttggagc

SEQ ID NO: 604940 - DNA, 15 bp, Homo sapiens
ccatgtcttggagca

SEQ ID NO: 604941 - DNA, 15 bp, Homo sapiens
catgtcttggagcac

SEQ ID NO: 604942 - DNA, 15 bp, Homo sapiens
atgtcttggagcact

SEQ ID NO: 604943 - DNA, 15 bp, Homo sapiens
tgtcttggagcactt

SEQ ID NO: 604944 - DNA, 15 bp, Homo sapiens
gtcttggagcacttc

SEQ ID NO: 604945 - DNA, 15 bp, Homo sapiens
tcttggagcacttca

SEQ ID NO: 604946 - DNA, 15 bp, Homo sapiens
cttggagcacttcac

SEQ ID NO: 604947 - DNA, 15 bp, Homo sapiens
ttggagcacttcact

SEQ ID NO: 604948 - DNA, 15 bp, Homo sapiens
tggagcacttcactg

SEQ ID NO: 604949 - DNA, 15 bp, Homo sapiens
ggagcacttcactgg

SEQ ID NO: 604950 - DNA, 15 bp, Homo sapiens
gagcacttcactgga

SEQ ID NO: 604951 - DNA, 15 bp, Homo sapiens
agcacttcactggag

SEQ ID NO: 604952 - DNA, 15 bp, Homo sapiens
gcacttcactggagc

SEQ ID NO: 604953 - DNA, 15 bp, Homo sapiens
cacttcactggagca

SEQ ID NO: 604954 - DNA, 15 bp, Homo sapiens
acttcactggagcaa

SEQ ID NO: 604955 - DNA, 15 bp, Homo sapiens
cttcactggagcaaa

SEQ ID NO: 604956 - DNA, 15 bp, Homo sapiens
ttcactggagcaaag

SEQ ID NO: 604957 - DNA, 15 bp, Homo sapiens
tcactggagcaaaga

SEQ ID NO: 604958 - DNA, 15 bp, Homo sapiens
cactggagcaaagac

SEQ ID NO: 604959 - DNA, 15 bp, Homo sapiens
actggagcaaagacc

SEQ ID NO: 604960 - DNA, 15 bp, Homo sapiens
ctggagcaaagaccc

SEQ ID NO: 604961 - DNA, 15 bp, Homo sapiens
tggagcaaagaccct

SEQ ID NO: 604962 - DNA, 15 bp, Homo sapiens
ggagcaaagaccctt

SEQ ID NO: 604963 - DNA, 15 bp, Homo sapiens
gagcaaagacccttg

SEQ ID NO: 604964 - DNA, 15 bp, Homo sapiens
agcaaagacccttgg

SEQ ID NO: 604965 - DNA, 15 bp, Homo sapiens
gcaaagacccttggc

SEQ ID NO: 604966 - DNA, 15 bp, Homo sapiens
caaagacccttggct

SEQ ID NO: 604967 - DNA, 15 bp, Homo sapiens
aaagacccttggctt

SEQ ID NO: 604968 - DNA, 15 bp, Homo sapiens
aagacccttggcttt

SEQ ID NO: 604969 - DNA, 15 bp, Homo sapiens
agacccttggctttg

SEQ ID NO: 604970 - DNA, 15 bp, Homo sapiens
gacccttggctttga

SEQ ID NO: 604971 - DNA, 15 bp, Homo sapiens
acccttggctttgat

SEQ ID NO: 604972 - DNA, 15 bp, Homo sapiens
cccttggctttgatg

SEQ ID NO: 604973 - DNA, 15 bp, Homo sapiens
ccttggctttgatgg

SEQ ID NO: 604974 - DNA, 15 bp, Homo sapiens
cttggctttgatggg

SEQ ID NO: 604975 - DNA, 15 bp, Homo sapiens
ttggctttgatgggg

SEQ ID NO: 604976 - DNA, 15 bp, Homo sapiens
tggctttgatggggg

SEQ ID NO: 604977 - DNA, 15 bp, Homo sapiens
ggctttgatgggggc

SEQ ID NO: 604978 - DNA, 15 bp, Homo sapiens
gctttgatgggggca

SEQ ID NO: 604979 - DNA, 15 bp, Homo sapiens
ctttgatgggggcat

SEQ ID NO: 604980 - DNA, 15 bp, Homo sapiens
tttgatgggggcatc

SEQ ID NO: 604981 - DNA, 15 bp, Homo sapiens
ttgatgggggcatct

SEQ ID NO: 604982 - DNA, 15 bp, Homo sapiens
tgatgggggcatctg

SEQ ID NO: 604983 - DNA, 15 bp, Homo sapiens
gatgggggcatctgt

SEQ ID NO: 604984 - DNA, 15 bp, Homo sapiens
atgggggcatctgtg

SEQ ID NO: 604985 - DNA, 15 bp, Homo sapiens
tgggggcatctgtgg

SEQ ID NO: 604986 - DNA, 15 bp, Homo sapiens
gggggcatctgtggt

SEQ ID NO: 604987 - DNA, 15 bp, Homo sapiens
ggggcatctgtggtc

SEQ ID NO: 604988 - DNA, 15 bp, Homo sapiens
gggcatctgtggtca

SEQ ID NO: 604989 - DNA, 15 bp, Homo sapiens
ggcatctgtggtcat

SEQ ID NO: 604990 - DNA, 15 bp, Homo sapiens
gcatctgtggtcatt

SEQ ID NO: 604991 - DNA, 15 bp, Homo sapiens
catctgtggtcattt

SEQ ID NO: 604992 - DNA, 15 bp, Homo sapiens
atctgtggtcatttc

SEQ ID NO: 604993 - DNA, 15 bp, Homo sapiens
tctgtggtcatttca

SEQ ID NO: 604994 - DNA, 15 bp, Homo sapiens
ctgtggtcatttcat

SEQ ID NO: 604995 - DNA, 15 bp, Homo sapiens
tgtggtcatttcatc

SEQ ID NO: 604996 - DNA, 15 bp, Homo sapiens
gtggtcatttcatcc

SEQ ID NO: 604997 - DNA, 15 bp, Homo sapiens
tggtcatttcatcca

SEQ ID NO: 604998 - DNA, 15 bp, Homo sapiens
ggtcatttcatccat

SEQ ID NO: 604999 - DNA, 15 bp, Homo sapiens
gtcatttcatccatc

SEQ ID NO: 605000 - DNA, 15 bp, Homo sapiens
tcatttcatccatct

SEQ ID NO: 605001 - DNA, 15 bp, Homo sapiens
catttcatccatctc

SEQ ID NO: 605002 - DNA, 15 bp, Homo sapiens
atttcatccatctcc

SEQ ID NO: 605003 - DNA, 15 bp, Homo sapiens
tttcatccatctcct

SEQ ID NO: 605004 - DNA, 15 bp, Homo sapiens
ttcatccatctcctt

SEQ ID NO: 605005 - DNA, 15 bp, Homo sapiens
tcatccatctccttg

SEQ ID NO: 605006 - DNA, 15 bp, Homo sapiens
catccatctccttgc

SEQ ID NO: 605007 - DNA, 15 bp, Homo sapiens
atccatctccttgcc

SEQ ID NO: 605008 - DNA, 15 bp, Homo sapiens
tccatctccttgcct

SEQ ID NO: 605009 - DNA, 15 bp, Homo sapiens
ccatctccttgcctc

SEQ ID NO: 605010 - DNA, 15 bp, Homo sapiens
catctccttgcctct

SEQ ID NO: 605011 - DNA, 15 bp, Homo sapiens
atctccttgcctctg

SEQ ID NO: 605012 - DNA, 15 bp, Homo sapiens
tctccttgcctctgg

SEQ ID NO: 605013 - DNA, 15 bp, Homo sapiens
ctccttgcctctggg

SEQ ID NO: 605014 - DNA, 15 bp, Homo sapiens
tccttgcctctgggg

SEQ ID NO: 605015 - DNA, 15 bp, Homo sapiens
ccttgcctctggggg

SEQ ID NO: 605016 - DNA, 15 bp, Homo sapiens
cttgcctctgggggc

SEQ ID NO: 605017 - DNA, 15 bp, Homo sapiens
ttgcctctgggggct

SEQ ID NO: 605018 - DNA, 15 bp, Homo sapiens
tgcctctgggggctt

SEQ ID NO: 605019 - DNA, 15 bp, Homo sapiens
gcctctgggggcttt

SEQ ID NO: 605020 - DNA, 15 bp, Homo sapiens
cctctgggggctttg

SEQ ID NO: 605021 - DNA, 15 bp, Homo sapiens
ctctgggggctttgc

SEQ ID NO: 605022 - DNA, 15 bp, Homo sapiens
tctgggggctttgca

SEQ ID NO: 605023 - DNA, 15 bp, Homo sapiens
ctgggggctttgcac

SEQ ID NO: 605024 - DNA, 15 bp, Homo sapiens
tgggggctttgcaca

SEQ ID NO: 605025 - DNA, 15 bp, Homo sapiens
gggggctttgcacac

SEQ ID NO: 605026 - DNA, 15 bp, Homo sapiens
ggggctttgcacacc

SEQ ID NO: 605027 - DNA, 15 bp, Homo sapiens
gggctttgcacacca

SEQ ID NO: 605028 - DNA, 15 bp, Homo sapiens
ggctttgcacaccat

SEQ ID NO: 605029 - DNA, 15 bp, Homo sapiens
gctttgcacaccatg

SEQ ID NO: 605030 - DNA, 15 bp, Homo sapiens
ctttgcacaccatgc

SEQ ID NO: 605031 - DNA, 15 bp, Homo sapiens
tttgcacaccatgct

SEQ ID NO: 605032 - DNA, 15 bp, Homo sapiens
ttgcacaccatgctt

SEQ ID NO: 605033 - DNA, 15 bp, Homo sapiens
tgcacaccatgcttt

SEQ ID NO: 605034 - DNA, 15 bp, Homo sapiens
gcacaccatgctttc

SEQ ID NO: 605035 - DNA, 15 bp, Homo sapiens
cacaccatgctttct

SEQ ID NO: 605036 - DNA, 15 bp, Homo sapiens
acaccatgctttctg

SEQ ID NO: 605037 - DNA, 15 bp, Homo sapiens
caccatgctttctgg

SEQ ID NO: 605038 - DNA, 15 bp, Homo sapiens
accatgctttctgga

SEQ ID NO: 605039 - DNA, 15 bp, Homo sapiens
ccatgctttctggac

SEQ ID NO: 605040 - DNA, 15 bp, Homo sapiens
catgctttctggaca

SEQ ID NO: 605041 - DNA, 15 bp, Homo sapiens
atgctttctggacaa

SEQ ID NO: 605042 - DNA, 15 bp, Homo sapiens
tgctttctggacaaa

SEQ ID NO: 605043 - DNA, 15 bp, Homo sapiens
gctttctggacaaag

SEQ ID NO: 605044 - DNA, 15 bp, Homo sapiens
ctttctggacaaagg

SEQ ID NO: 605045 - DNA, 15 bp, Homo sapiens
tttctggacaaaggt

SEQ ID NO: 605046 - DNA, 15 bp, Homo sapiens
ttctggacaaaggtg

SEQ ID NO: 605047 - DNA, 15 bp, Homo sapiens
tctggacaaaggtgg

SEQ ID NO: 605048 - DNA, 15 bp, Homo sapiens
ctggacaaaggtggt

SEQ ID NO: 605049 - DNA, 15 bp, Homo sapiens
tggacaaaggtggtg

SEQ ID NO: 605050 - DNA, 15 bp, Homo sapiens
ggacaaaggtggtgt

SEQ ID NO: 605051 - DNA, 15 bp, Homo sapiens
gacaaaggtggtgtg

SEQ ID NO: 605052 - DNA, 15 bp, Homo sapiens
acaaaggtggtgtgt

SEQ ID NO: 605053 - DNA, 15 bp, Homo sapiens
caaaggtggtgtgta

SEQ ID NO: 605054 - DNA, 15 bp, Homo sapiens
aaaggtggtgtgtat

SEQ ID NO: 605055 - DNA, 15 bp, Homo sapiens
aaggtggtgtgtatt

SEQ ID NO: 605056 - DNA, 15 bp, Homo sapiens
aggtggtgtgtattc

SEQ ID NO: 605057 - DNA, 15 bp, Homo sapiens
ggtggtgtgtattca

SEQ ID NO: 605058 - DNA, 15 bp, Homo sapiens
gtggtgtgtattcac

SEQ ID NO: 605059 - DNA, 15 bp, Homo sapiens
tggtgtgtattcacc

SEQ ID NO: 605060 - DNA, 15 bp, Homo sapiens
ggtgtgtattcacct

SEQ ID NO: 605061 - DNA, 15 bp, Homo sapiens
gtgtgtattcacctc

SEQ ID NO: 605062 - DNA, 15 bp, Homo sapiens
tgtgtattcacctct

SEQ ID NO: 605063 - DNA, 15 bp, Homo sapiens
gtgtattcacctctc

SEQ ID NO: 605064 - DNA, 15 bp, Homo sapiens
tgtattcacctctct

SEQ ID NO: 605065 - DNA, 15 bp, Homo sapiens
gtattcacctctctg

SEQ ID NO: 605066 - DNA, 15 bp, Homo sapiens
tattcacctctctgg

SEQ ID NO: 605067 - DNA, 15 bp, Homo sapiens
attcacctctctggc

SEQ ID NO: 605068 - DNA, 15 bp, Homo sapiens
ttcacctctctggcc

SEQ ID NO: 605069 - DNA, 15 bp, Homo sapiens
tcacctctctggcct

SEQ ID NO: 605070 - DNA, 15 bp, Homo sapiens
cacctctctggcctt

SEQ ID NO: 605071 - DNA, 15 bp, Homo sapiens
acctctctggccttg

SEQ ID NO: 605072 - DNA, 15 bp, Homo sapiens
cctctctggccttgg

SEQ ID NO: 605073 - DNA, 15 bp, Homo sapiens
ctctctggccttgga

SEQ ID NO: 605074 - DNA, 15 bp, Homo sapiens
tctctggccttggaa

SEQ ID NO: 605075 - DNA, 15 bp, Homo sapiens
ctctggccttggaac

SEQ ID NO: 605076 - DNA, 15 bp, Homo sapiens
tctggccttggaaca

SEQ ID NO: 605077 - DNA, 15 bp, Homo sapiens
ctggccttggaacag

SEQ ID NO: 605078 - DNA, 15 bp, Homo sapiens
tggccttggaacagg

SEQ ID NO: 605079 - DNA, 15 bp, Homo sapiens
ggccttggaacaggg

SEQ ID NO: 605080 - DNA, 15 bp, Homo sapiens
gccttggaacagggc

SEQ ID NO: 605081 - DNA, 15 bp, Homo sapiens
ccttggaacagggcc

SEQ ID NO: 605082 - DNA, 15 bp, Homo sapiens
cttggaacagggccc

SEQ ID NO: 605083 - DNA, 15 bp, Homo sapiens
ttggaacagggccca

SEQ ID NO: 605084 - DNA, 15 bp, Homo sapiens
tggaacagggcccaa

SEQ ID NO: 605085 - DNA, 15 bp, Homo sapiens
ggaacagggcccaag

SEQ ID NO: 605086 - DNA, 15 bp, Homo sapiens
gaacagggcccaaga

SEQ ID NO: 605087 - DNA, 15 bp, Homo sapiens
aacagggcccaagat

SEQ ID NO: 605088 - DNA, 15 bp, Homo sapiens
acagggcccaagata

SEQ ID NO: 605089 - DNA, 15 bp, Homo sapiens
cagggcccaagatat

SEQ ID NO: 605090 - DNA, 15 bp, Homo sapiens
agggcccaagatatc

SEQ ID NO: 605091 - DNA, 15 bp, Homo sapiens
gggcccaagatatcc

SEQ ID NO: 605092 - DNA, 15 bp, Homo sapiens
ggcccaagatatcca

SEQ ID NO: 605093 - DNA, 15 bp, Homo sapiens
gcccaagatatccaa

SEQ ID NO: 605094 - DNA, 15 bp, Homo sapiens
cccaagatatccaag

SEQ ID NO: 605095 - DNA, 15 bp, Homo sapiens
ccaagatatccaaga

SEQ ID NO: 605096 - DNA, 15 bp, Homo sapiens
caagatatccaagaa

SEQ ID NO: 605097 - DNA, 15 bp, Homo sapiens
aagatatccaagaac

SEQ ID NO: 605098 - DNA, 15 bp, Homo sapiens
agatatccaagaacc

SEQ ID NO: 605099 - DNA, 15 bp, Homo sapiens
gatatccaagaacca

SEQ ID NO: 605100 - DNA, 15 bp, Homo sapiens
atatccaagaaccat

SEQ ID NO: 605101 - DNA, 15 bp, Homo sapiens
tatccaagaaccatc

SEQ ID NO: 605102 - DNA, 15 bp, Homo sapiens
atccaagaaccatcg

SEQ ID NO: 605103 - DNA, 15 bp, Homo sapiens
tccaagaaccatcgc

SEQ ID NO: 605104 - DNA, 15 bp, Homo sapiens
ccaagaaccatcgcc

SEQ ID NO: 605105 - DNA, 15 bp, Homo sapiens
caagaaccatcgccg

SEQ ID NO: 605106 - DNA, 15 bp, Homo sapiens
aagaaccatcgccgt

SEQ ID NO: 605107 - DNA, 15 bp, Homo sapiens
agaaccatcgccgta

SEQ ID NO: 605108 - DNA, 15 bp, Homo sapiens
gaaccatcgccgtag

SEQ ID NO: 605109 - DNA, 15 bp, Homo sapiens
aaccatcgccgtagg

SEQ ID NO: 605110 - DNA, 15 bp, Homo sapiens
accatcgccgtaggt

SEQ ID NO: 605111 - DNA, 15 bp, Homo sapiens
ccatcgccgtaggtt

SEQ ID NO: 605112 - DNA, 15 bp, Homo sapiens
catcgccgtaggtta

SEQ ID NO: 605113 - DNA, 15 bp, Homo sapiens
atcgccgtaggttac

SEQ ID NO: 605114 - DNA, 15 bp, Homo sapiens
tcgccgtaggttacg

SEQ ID NO: 605115 - DNA, 15 bp, Homo sapiens
cgccgtaggttacgg

SEQ ID NO: 605116 - DNA, 15 bp, Homo sapiens
gccgtaggttacggt

SEQ ID NO: 605117 - DNA, 15 bp, Homo sapiens
ccgtaggttacggtt

SEQ ID NO: 605118 - DNA, 15 bp, Homo sapiens
cgtaggttacggtta

SEQ ID NO: 605119 - DNA, 15 bp, Homo sapiens
gtaggttacggttat

SEQ ID NO: 605120 - DNA, 15 bp, Homo sapiens
taggttacggttatt

SEQ ID NO: 605121 - DNA, 15 bp, Homo sapiens
aggttacggttattc

SEQ ID NO: 605122 - DNA, 15 bp, Homo sapiens
ggttacggttattct

SEQ ID NO: 605123 - DNA, 15 bp, Homo sapiens
gttacggttattctc

SEQ ID NO: 605124 - DNA, 15 bp, Homo sapiens
ttacggttattctct

SEQ ID NO: 605125 - DNA, 15 bp, Homo sapiens
tacggttattctctt

SEQ ID NO: 605126 - DNA, 15 bp, Homo sapiens
acggttattctcttt

SEQ ID NO: 605127 - DNA, 15 bp, Homo sapiens
cggttattctctttc

SEQ ID NO: 605128 - DNA, 15 bp, Homo sapiens
ggttattctctttct

SEQ ID NO: 605129 - DNA, 15 bp, Homo sapiens
gttattctctttctt

SEQ ID NO: 605130 - DNA, 15 bp, Homo sapiens
ttattctctttcttg

SEQ ID NO: 605131 - DNA, 15 bp, Homo sapiens
tattctctttcttgg

SEQ ID NO: 605132 - DNA, 15 bp, Homo sapiens
attctctttcttggt

SEQ ID NO: 605133 - DNA, 15 bp, Homo sapiens
ttctctttcttggtc

SEQ ID NO: 605134 - DNA, 15 bp, Homo sapiens
tctctttcttggtct

SEQ ID NO: 605135 - DNA, 15 bp, Homo sapiens
ctctttcttggtctt

SEQ ID NO: 605136 - DNA, 15 bp, Homo sapiens
tctttcttggtcttg

SEQ ID NO: 605137 - DNA, 15 bp, Homo sapiens
ctttcttggtcttgg

SEQ ID NO: 605138 - DNA, 15 bp, Homo sapiens
tttcttggtcttggt

SEQ ID NO: 605139 - DNA, 15 bp, Homo sapiens
ttcttggtcttggta

SEQ ID NO: 605140 - DNA, 15 bp, Homo sapiens
tcttggtcttggtat

SEQ ID NO: 605141 - DNA, 15 bp, Homo sapiens
cttggtcttggtatc

SEQ ID NO: 605142 - DNA, 15 bp, Homo sapiens
ttggtcttggtatcc

SEQ ID NO: 605143 - DNA, 15 bp, Homo sapiens
tggtcttggtatccc

SEQ ID NO: 605144 - DNA, 15 bp, Homo sapiens
ggtcttggtatcccc

SEQ ID NO: 605145 - DNA, 15 bp, Homo sapiens
gtcttggtatccccg

SEQ ID NO: 605146 - DNA, 15 bp, Homo sapiens
tcttggtatccccgg

SEQ ID NO: 605147 - DNA, 15 bp, Homo sapiens
cttggtatccccggt

SEQ ID NO: 605148 - DNA, 15 bp, Homo sapiens
ttggtatccccggtg

SEQ ID NO: 605149 - DNA, 15 bp, Homo sapiens
tggtatccccggtga

SEQ ID NO: 605150 - DNA, 15 bp, Homo sapiens
ggtatccccggtgag

SEQ ID NO: 605151 - DNA, 15 bp, Homo sapiens
gtatccccggtgagt

SEQ ID NO: 605152 - DNA, 15 bp, Homo sapiens
tatccccggtgagtc

SEQ ID NO: 605153 - DNA, 15 bp, Homo sapiens
atccccggtgagtcc

SEQ ID NO: 605154 - DNA, 15 bp, Homo sapiens
tccccggtgagtcct

SEQ ID NO: 605155 - DNA, 15 bp, Homo sapiens
ccccggtgagtcctg

SEQ ID NO: 605156 - DNA, 15 bp, Homo sapiens
cccggtgagtcctga

SEQ ID NO: 605157 - DNA, 15 bp, Homo sapiens
ccggtgagtcctgac

SEQ ID NO: 605158 - DNA, 15 bp, Homo sapiens
cggtgagtcctgact

SEQ ID NO: 605159 - DNA, 15 bp, Homo sapiens
ggtgagtcctgactt

SEQ ID NO: 605160 - DNA, 15 bp, Homo sapiens
gtgagtcctgacttg

SEQ ID NO: 605161 - DNA, 15 bp, Homo sapiens
tgagtcctgacttgg

SEQ ID NO: 605162 - DNA, 15 bp, Homo sapiens
gagtcctgacttggg

SEQ ID NO: 605163 - DNA, 15 bp, Homo sapiens
agtcctgacttgggg

SEQ ID NO: 605164 - DNA, 15 bp, Homo sapiens
gtcctgacttggggc

SEQ ID NO: 605165 - DNA, 15 bp, Homo sapiens
tcctgacttggggcc

SEQ ID NO: 605166 - DNA, 15 bp, Homo sapiens
cctgacttggggccc

SEQ ID NO: 605167 - DNA, 15 bp, Homo sapiens
ctgacttggggcccc

SEQ ID NO: 605168 - DNA, 15 bp, Homo sapiens
tgacttggggcccca

SEQ ID NO: 605169 - DNA, 15 bp, Homo sapiens
gacttggggccccag

SEQ ID NO: 605170 - DNA, 15 bp, Homo sapiens
acttggggccccagc

SEQ ID NO: 605171 - DNA, 15 bp, Homo sapiens
cttggggccccagct

SEQ ID NO: 605172 - DNA, 15 bp, Homo sapiens
ttggggccccagctc

SEQ ID NO: 605173 - DNA, 15 bp, Homo sapiens
tggggccccagctct

SEQ ID NO: 605174 - DNA, 15 bp, Homo sapiens
ggggccccagctctg

SEQ ID NO: 605175 - DNA, 15 bp, Homo sapiens
gggccccagctctgt

SEQ ID NO: 605176 - DNA, 15 bp, Homo sapiens
ggccccagctctgtc

SEQ ID NO: 605177 - DNA, 15 bp, Homo sapiens
gccccagctctgtct

SEQ ID NO: 605178 - DNA, 15 bp, Homo sapiens
ccccagctctgtctc

SEQ ID NO: 605179 - DNA, 15 bp, Homo sapiens
cccagctctgtctct

SEQ ID NO: 605180 - DNA, 15 bp, Homo sapiens
ccagctctgtctctg

SEQ ID NO: 605181 - DNA, 15 bp, Homo sapiens
cagctctgtctctgt

SEQ ID NO: 605182 - DNA, 15 bp, Homo sapiens
agctctgtctctgtg

SEQ ID NO: 605183 - DNA, 15 bp, Homo sapiens
gctctgtctctgtgc

SEQ ID NO: 605184 - DNA, 15 bp, Homo sapiens
ctctgtctctgtgcc

SEQ ID NO: 605185 - DNA, 15 bp, Homo sapiens
tctgtctctgtgcca

SEQ ID NO: 605186 - DNA, 15 bp, Homo sapiens
ctgtctctgtgccat

SEQ ID NO: 605187 - DNA, 15 bp, Homo sapiens
tgtctctgtgccatg

SEQ ID NO: 605188 - DNA, 15 bp, Homo sapiens
gtctctgtgccatgg

SEQ ID NO: 605189 - DNA, 15 bp, Homo sapiens
tctctgtgccatggg

SEQ ID NO: 605190 - DNA, 15 bp, Homo sapiens
ctctgtgccatggga

SEQ ID NO: 605191 - DNA, 15 bp, Homo sapiens
tctgtgccatgggaa

SEQ ID NO: 605192 - DNA, 15 bp, Homo sapiens
ctgtgccatgggaag

SEQ ID NO: 605193 - DNA, 15 bp, Homo sapiens
tgtgccatgggaagg

SEQ ID NO: 605194 - DNA, 15 bp, Homo sapiens
gtgccatgggaagga

SEQ ID NO: 605195 - DNA, 15 bp, Homo sapiens
tgccatgggaaggaa

SEQ ID NO: 605196 - DNA, 15 bp, Homo sapiens
gccatgggaaggaag

SEQ ID NO: 605197 - DNA, 15 bp, Homo sapiens
ccatgggaaggaaga

SEQ ID NO: 605198 - DNA, 15 bp, Homo sapiens
catgggaaggaagat

SEQ ID NO: 605199 - DNA, 15 bp, Homo sapiens
atgggaaggaagatt

SEQ ID NO: 605200 - DNA, 15 bp, Homo sapiens
tgggaaggaagattg

SEQ ID NO: 605201 - DNA, 15 bp, Homo sapiens
gggaaggaagattgt

SEQ ID NO: 605202 - DNA, 15 bp, Homo sapiens
ggaaggaagattgtg

SEQ ID NO: 605203 - DNA, 15 bp, Homo sapiens
gaaggaagattgtgg

SEQ ID NO: 605204 - DNA, 15 bp, Homo sapiens
aaggaagattgtggg

SEQ ID NO: 605205 - DNA, 15 bp, Homo sapiens
aggaagattgtggga

SEQ ID NO: 605206 - DNA, 15 bp, Homo sapiens
ggaagattgtgggaa

SEQ ID NO: 605207 - DNA, 15 bp, Homo sapiens
gaagattgtgggaag

SEQ ID NO: 605208 - DNA, 15 bp, Homo sapiens
aagattgtgggaaga

SEQ ID NO: 605209 - DNA, 15 bp, Homo sapiens
agattgtgggaagag

SEQ ID NO: 605210 - DNA, 15 bp, Homo sapiens
gattgtgggaagagg

SEQ ID NO: 605211 - DNA, 15 bp, Homo sapiens
attgtgggaagaggg

SEQ ID NO: 605212 - DNA, 15 bp, Homo sapiens
ttgtgggaagagggc

SEQ ID NO: 605213 - DNA, 15 bp, Homo sapiens
tgtgggaagagggcc

SEQ ID NO: 605214 - DNA, 15 bp, Homo sapiens
gtgggaagagggcca

SEQ ID NO: 605215 - DNA, 15 bp, Homo sapiens
tgggaagagggccat

SEQ ID NO: 605216 - DNA, 15 bp, Homo sapiens
gggaagagggccatg

SEQ ID NO: 605217 - DNA, 15 bp, Homo sapiens
ggaagagggccatgg

SEQ ID NO: 605218 - DNA, 15 bp, Homo sapiens
gaagagggccatggg

SEQ ID NO: 605219 - DNA, 15 bp, Homo sapiens
aagagggccatgggc

SEQ ID NO: 605220 - DNA, 15 bp, Homo sapiens
agagggccatgggct

SEQ ID NO: 605221 - DNA, 15 bp, Homo sapiens
gagggccatgggctg

SEQ ID NO: 605222 - DNA, 15 bp, Homo sapiens
agggccatgggctgc

SEQ ID NO: 605223 - DNA, 15 bp, Homo sapiens
gggccatgggctgcc

SEQ ID NO: 605224 - DNA, 15 bp, Homo sapiens
ggccatgggctgccc

SEQ ID NO: 605225 - DNA, 15 bp, Homo sapiens
gccatgggctgccca

SEQ ID NO: 605226 - DNA, 15 bp, Homo sapiens
ccatgggctgcccat

SEQ ID NO: 605227 - DNA, 15 bp, Homo sapiens
catgggctgcccatg

SEQ ID NO: 605228 - DNA, 15 bp, Homo sapiens
atgggctgcccatgt

SEQ ID NO: 605229 - DNA, 15 bp, Homo sapiens
tgggctgcccatgta

SEQ ID NO: 605230 - DNA, 15 bp, Homo sapiens
gggctgcccatgtac

SEQ ID NO: 605231 - DNA, 15 bp, Homo sapiens
ggctgcccatgtaca

SEQ ID NO: 605232 - DNA, 15 bp, Homo sapiens
gctgcccatgtacac

SEQ ID NO: 605233 - DNA, 15 bp, Homo sapiens
ctgcccatgtacacg

SEQ ID NO: 605234 - DNA, 15 bp, Homo sapiens
tgcccatgtacacgt

SEQ ID NO: 605235 - DNA, 15 bp, Homo sapiens
gcccatgtacacgta

SEQ ID NO: 605236 - DNA, 15 bp, Homo sapiens
cccatgtacacgtat

SEQ ID NO: 605237 - DNA, 15 bp, Homo sapiens
ccatgtacacgtatg

SEQ ID NO: 605238 - DNA, 15 bp, Homo sapiens
catgtacacgtatgt

SEQ ID NO: 605239 - DNA, 15 bp, Homo sapiens
atgtacacgtatgtc

SEQ ID NO: 605240 - DNA, 15 bp, Homo sapiens
tgtacacgtatgtcc

SEQ ID NO: 605241 - DNA, 15 bp, Homo sapiens
gtacacgtatgtccc

SEQ ID NO: 605242 - DNA, 15 bp, Homo sapiens
tacacgtatgtcccc

SEQ ID NO: 605243 - DNA, 15 bp, Homo sapiens
acacgtatgtccccc

SEQ ID NO: 605244 - DNA, 15 bp, Homo sapiens
cacgtatgtcccccg

SEQ ID NO: 605245 - DNA, 15 bp, Homo sapiens
acgtatgtcccccgt

SEQ ID NO: 605246 - DNA, 15 bp, Homo sapiens
cgtatgtcccccgtg

SEQ ID NO: 605247 - DNA, 15 bp, Homo sapiens
gtatgtcccccgtgt

SEQ ID NO: 605248 - DNA, 15 bp, Homo sapiens
tatgtcccccgtgtg

SEQ ID NO: 605249 - DNA, 15 bp, Homo sapiens
atgtcccccgtgtgc

SEQ ID NO: 605250 - DNA, 15 bp, Homo sapiens
tgtcccccgtgtgcc

SEQ ID NO: 605251 - DNA, 15 bp, Homo sapiens
gtcccccgtgtgcca

SEQ ID NO: 605252 - DNA, 15 bp, Homo sapiens
tcccccgtgtgccac

SEQ ID NO: 605253 - DNA, 15 bp, Homo sapiens
cccccgtgtgccaca

SEQ ID NO: 605254 - DNA, 15 bp, Homo sapiens
ccccgtgtgccacag

SEQ ID NO: 605255 - DNA, 15 bp, Homo sapiens
cccgtgtgccacaga

SEQ ID NO: 605256 - DNA, 15 bp, Homo sapiens
ccgtgtgccacagag

SEQ ID NO: 605257 - DNA, 15 bp, Homo sapiens
cgtgtgccacagagc

SEQ ID NO: 605258 - DNA, 15 bp, Homo sapiens
gtgtgccacagagct

SEQ ID NO: 605259 - DNA, 15 bp, Homo sapiens
tgtgccacagagctc

SEQ ID NO: 605260 - DNA, 15 bp, Homo sapiens
gtgccacagagctcc

SEQ ID NO: 605261 - DNA, 15 bp, Homo sapiens
tgccacagagctccc

SEQ ID NO: 605262 - DNA, 15 bp, Homo sapiens
gccacagagctcccc

SEQ ID NO: 605263 - DNA, 15 bp, Homo sapiens
ccacagagctccccg

SEQ ID NO: 605264 - DNA, 15 bp, Homo sapiens
cacagagctccccgg

SEQ ID NO: 605265 - DNA, 15 bp, Homo sapiens
acagagctccccgga

SEQ ID NO: 605266 - DNA, 15 bp, Homo sapiens
cagagctccccggag

SEQ ID NO: 605267 - DNA, 15 bp, Homo sapiens
agagctccccggagg

SEQ ID NO: 605268 - DNA, 15 bp, Homo sapiens
gagctccccggagga

SEQ ID NO: 605269 - DNA, 15 bp, Homo sapiens
agctccccggaggag

SEQ ID NO: 605270 - DNA, 15 bp, Homo sapiens
gctccccggaggagc

SEQ ID NO: 605271 - DNA, 15 bp, Homo sapiens
ctccccggaggagca

SEQ ID NO: 605272 - DNA, 15 bp, Homo sapiens
tccccggaggagcag

SEQ ID NO: 605273 - DNA, 15 bp, Homo sapiens
ccccggaggagcagc

SEQ ID NO: 605274 - DNA, 15 bp, Homo sapiens
cccggaggagcagct

SEQ ID NO: 605275 - DNA, 15 bp, Homo sapiens
ccggaggagcagctc

SEQ ID NO: 605276 - DNA, 15 bp, Homo sapiens
cggaggagcagctcc

SEQ ID NO: 605277 - DNA, 15 bp, Homo sapiens
ggaggagcagctcct

SEQ ID NO: 605278 - DNA, 15 bp, Homo sapiens
gaggagcagctcctg

SEQ ID NO: 605279 - DNA, 15 bp, Homo sapiens
aggagcagctcctgt

SEQ ID NO: 605280 - DNA, 15 bp, Homo sapiens
ggagcagctcctgtt

SEQ ID NO: 605281 - DNA, 15 bp, Homo sapiens
gagcagctcctgttc

SEQ ID NO: 605282 - DNA, 15 bp, Homo sapiens
agcagctcctgttcc

SEQ ID NO: 605283 - DNA, 15 bp, Homo sapiens
gcagctcctgttcct

SEQ ID NO: 605284 - DNA, 15 bp, Homo sapiens
cagctcctgttcctc

SEQ ID NO: 605285 - DNA, 15 bp, Homo sapiens
agctcctgttcctct

SEQ ID NO: 605286 - DNA, 15 bp, Homo sapiens
gctcctgttcctcta

SEQ ID NO: 605287 - DNA, 15 bp, Homo sapiens
ctcctgttcctctac

SEQ ID NO: 605288 - DNA, 15 bp, Homo sapiens
tcctgttcctctaca

SEQ ID NO: 605289 - DNA, 15 bp, Homo sapiens
cctgttcctctacat

SEQ ID NO: 605290 - DNA, 15 bp, Homo sapiens
ctgttcctctacatc

SEQ ID NO: 605291 - DNA, 15 bp, Homo sapiens
tgttcctctacatca

SEQ ID NO: 605292 - DNA, 15 bp, Homo sapiens
gttcctctacatcat

SEQ ID NO: 605293 - DNA, 15 bp, Homo sapiens
ttcctctacatcatc

SEQ ID NO: 605294 - DNA, 15 bp, Homo sapiens
tcctctacatcatct

SEQ ID NO: 605295 - DNA, 15 bp, Homo sapiens
cctctacatcatcta

SEQ ID NO: 605296 - DNA, 15 bp, Homo sapiens
ctctacatcatctac

SEQ ID NO: 605297 - DNA, 15 bp, Homo sapiens
tctacatcatctaca

SEQ ID NO: 605298 - DNA, 15 bp, Homo sapiens
ctacatcatctacac

SEQ ID NO: 605299 - DNA, 15 bp, Homo sapiens
tacatcatctacacg

SEQ ID NO: 605300 - DNA, 15 bp, Homo sapiens
acatcatctacacgg

SEQ ID NO: 605301 - DNA, 15 bp, Homo sapiens
catcatctacacggt

SEQ ID NO: 605302 - DNA, 15 bp, Homo sapiens
atcatctacacggtg

SEQ ID NO: 605303 - DNA, 15 bp, Homo sapiens
tcatctacacggtgg

SEQ ID NO: 605304 - DNA, 15 bp, Homo sapiens
catctacacggtggg

SEQ ID NO: 605305 - DNA, 15 bp, Homo sapiens
atctacacggtgggc

SEQ ID NO: 605306 - DNA, 15 bp, Homo sapiens
tctacacggtgggct

SEQ ID NO: 605307 - DNA, 15 bp, Homo sapiens
ctacacggtgggcta

SEQ ID NO: 605308 - DNA, 15 bp, Homo sapiens
tacacggtgggctac

SEQ ID NO: 605309 - DNA, 15 bp, Homo sapiens
acacggtgggctacg

SEQ ID NO: 605310 - DNA, 15 bp, Homo sapiens
cacggtgggctacgc

SEQ ID NO: 605311 - DNA, 15 bp, Homo sapiens
acggtgggctacgca

SEQ ID NO: 605312 - DNA, 15 bp, Homo sapiens
cggtgggctacgcac

SEQ ID NO: 605313 - DNA, 15 bp, Homo sapiens
ggtgggctacgcact

SEQ ID NO: 605314 - DNA, 15 bp, Homo sapiens
gtgggctacgcactc

SEQ ID NO: 605315 - DNA, 15 bp, Homo sapiens
tgggctacgcactct

SEQ ID NO: 605316 - DNA, 15 bp, Homo sapiens
gggctacgcactctc

SEQ ID NO: 605317 - DNA, 15 bp, Homo sapiens
ggctacgcactctcc

SEQ ID NO: 605318 - DNA, 15 bp, Homo sapiens
gctacgcactctcct

SEQ ID NO: 605319 - DNA, 15 bp, Homo sapiens
ctacgcactctcctt

SEQ ID NO: 605320 - DNA, 15 bp, Homo sapiens
tacgcactctccttc

SEQ ID NO: 605321 - DNA, 15 bp, Homo sapiens
acgcactctccttct

SEQ ID NO: 605322 - DNA, 15 bp, Homo sapiens
cgcactctccttctc

SEQ ID NO: 605323 - DNA, 15 bp, Homo sapiens
gcactctccttctct

SEQ ID NO: 605324 - DNA, 15 bp, Homo sapiens
cactctccttctctg

SEQ ID NO: 605325 - DNA, 15 bp, Homo sapiens
actctccttctctgc

SEQ ID NO: 605326 - DNA, 15 bp, Homo sapiens
ctctccttctctgct

SEQ ID NO: 605327 - DNA, 15 bp, Homo sapiens
tctccttctctgctc

SEQ ID NO: 605328 - DNA, 15 bp, Homo sapiens
ctccttctctgctct

SEQ ID NO: 605329 - DNA, 15 bp, Homo sapiens
tccttctctgctctg

SEQ ID NO: 605330 - DNA, 15 bp, Homo sapiens
ccttctctgctctgg

SEQ ID NO: 605331 - DNA, 15 bp, Homo sapiens
cttctctgctctggt

SEQ ID NO: 605332 - DNA, 15 bp, Homo sapiens
ttctctgctctggtt

SEQ ID NO: 605333 - DNA, 15 bp, Homo sapiens
tctctgctctggtta

SEQ ID NO: 605334 - DNA, 15 bp, Homo sapiens
ctctgctctggttat

SEQ ID NO: 605335 - DNA, 15 bp, Homo sapiens
tctgctctggttatc

SEQ ID NO: 605336 - DNA, 15 bp, Homo sapiens
ctgctctggttatcg

SEQ ID NO: 605337 - DNA, 15 bp, Homo sapiens
tgctctggttatcgc

SEQ ID NO: 605338 - DNA, 15 bp, Homo sapiens
gctctggttatcgcc

SEQ ID NO: 605339 - DNA, 15 bp, Homo sapiens
ctctggttatcgcct

SEQ ID NO: 605340 - DNA, 15 bp, Homo sapiens
tctggttatcgcctc

SEQ ID NO: 605341 - DNA, 15 bp, Homo sapiens
ctggttatcgcctct

SEQ ID NO: 605342 - DNA, 15 bp, Homo sapiens
tggttatcgcctctg

SEQ ID NO: 605343 - DNA, 15 bp, Homo sapiens
ggttatcgcctctgc

SEQ ID NO: 605344 - DNA, 15 bp, Homo sapiens
gttatcgcctctgcg

SEQ ID NO: 605345 - DNA, 15 bp, Homo sapiens
ttatcgcctctgcga

SEQ ID NO: 605346 - DNA, 15 bp, Homo sapiens
tatcgcctctgcgat

SEQ ID NO: 605347 - DNA, 15 bp, Homo sapiens
atcgcctctgcgatc

SEQ ID NO: 605348 - DNA, 15 bp, Homo sapiens
tcgcctctgcgatcc

SEQ ID NO: 605349 - DNA, 15 bp, Homo sapiens
cgcctctgcgatcct

SEQ ID NO: 605350 - DNA, 15 bp, Homo sapiens
gcctctgcgatcctc

SEQ ID NO: 605351 - DNA, 15 bp, Homo sapiens
cctctgcgatcctcc

SEQ ID NO: 605352 - DNA, 15 bp, Homo sapiens
ctctgcgatcctcct

SEQ ID NO: 605353 - DNA, 15 bp, Homo sapiens
tctgcgatcctcctc

SEQ ID NO: 605354 - DNA, 15 bp, Homo sapiens
ctgcgatcctcctcg

SEQ ID NO: 605355 - DNA, 15 bp, Homo sapiens
tgcgatcctcctcgg

SEQ ID NO: 605356 - DNA, 15 bp, Homo sapiens
gcgatcctcctcggc

SEQ ID NO: 605357 - DNA, 15 bp, Homo sapiens
cgatcctcctcggct

SEQ ID NO: 605358 - DNA, 15 bp, Homo sapiens
gatcctcctcggctt

SEQ ID NO: 605359 - DNA, 15 bp, Homo sapiens
atcctcctcggcttc

SEQ ID NO: 605360 - DNA, 15 bp, Homo sapiens
tcctcctcggcttca

SEQ ID NO: 605361 - DNA, 15 bp, Homo sapiens
cctcctcggcttcag

SEQ ID NO: 605362 - DNA, 15 bp, Homo sapiens
ctcctcggcttcagg

SEQ ID NO: 605363 - DNA, 15 bp, Homo sapiens
tcctcggcttcaggt

SEQ ID NO: 605364 - DNA, 15 bp, Homo sapiens
cctcggcttcaggta

SEQ ID NO: 605365 - DNA, 15 bp, Homo sapiens
ctcggcttcaggtaa

SEQ ID NO: 605366 - DNA, 15 bp, Homo sapiens
tcggcttcaggtaag

SEQ ID NO: 605367 - DNA, 15 bp, Homo sapiens
cggcttcaggtaagg

SEQ ID NO: 605368 - DNA, 15 bp, Homo sapiens
ggcttcaggtaaggt

SEQ ID NO: 605369 - DNA, 15 bp, Homo sapiens
gcttcaggtaaggtg

SEQ ID NO: 605370 - DNA, 15 bp, Homo sapiens
cttcaggtaaggtgg

SEQ ID NO: 605371 - DNA, 15 bp, Homo sapiens
ttcaggtaaggtggc

SEQ ID NO: 605372 - DNA, 15 bp, Homo sapiens
tcaggtaaggtggcc

SEQ ID NO: 605373 - DNA, 15 bp, Homo sapiens
caggtaaggtggccc

SEQ ID NO: 605374 - DNA, 15 bp, Homo sapiens
aggtaaggtggcccg

SEQ ID NO: 605375 - DNA, 15 bp, Homo sapiens
ggtaaggtggcccgg

SEQ ID NO: 605376 - DNA, 15 bp, Homo sapiens
gtaaggtggcccgga

SEQ ID NO: 605377 - DNA, 15 bp, Homo sapiens
taaggtggcccggac

SEQ ID NO: 605378 - DNA, 15 bp, Homo sapiens
aaggtggcccggacc

SEQ ID NO: 605379 - DNA, 15 bp, Homo sapiens
aggtggcccggaccc

SEQ ID NO: 605380 - DNA, 15 bp, Homo sapiens
ggtggcccggaccct

SEQ ID NO: 605381 - DNA, 15 bp, Homo sapiens
gtggcccggaccctg

SEQ ID NO: 605382 - DNA, 15 bp, Homo sapiens
tggcccggaccctgg

SEQ ID NO: 605383 - DNA, 15 bp, Homo sapiens
ggcccggaccctggg

SEQ ID NO: 605384 - DNA, 15 bp, Homo sapiens
gcccggaccctggga

SEQ ID NO: 605385 - DNA, 15 bp, Homo sapiens
cccggaccctgggag

SEQ ID NO: 605386 - DNA, 15 bp, Homo sapiens
ccggaccctgggagg

SEQ ID NO: 605387 - DNA, 15 bp, Homo sapiens
cggaccctgggaggg

SEQ ID NO: 605388 - DNA, 15 bp, Homo sapiens
ggaccctgggagggg

SEQ ID NO: 605389 - DNA, 15 bp, Homo sapiens
gaccctgggaggggg

SEQ ID NO: 605390 - DNA, 15 bp, Homo sapiens
accctgggagggggc

SEQ ID NO: 605391 - DNA, 15 bp, Homo sapiens
ccctgggagggggct

SEQ ID NO: 605392 - DNA, 15 bp, Homo sapiens
cctgggagggggctg

SEQ ID NO: 605393 - DNA, 15 bp, Homo sapiens
ctgggagggggctgc

SEQ ID NO: 605394 - DNA, 15 bp, Homo sapiens
tgggagggggctgct

SEQ ID NO: 605395 - DNA, 15 bp, Homo sapiens
gggagggggctgctt

SEQ ID NO: 605396 - DNA, 15 bp, Homo sapiens
ggagggggctgcttc

SEQ ID NO: 605397 - DNA, 15 bp, Homo sapiens
gagggggctgcttca

SEQ ID NO: 605398 - DNA, 15 bp, Homo sapiens
agggggctgcttcat

SEQ ID NO: 605399 - DNA, 15 bp, Homo sapiens
gggggctgcttcatc

SEQ ID NO: 605400 - DNA, 15 bp, Homo sapiens
ggggctgcttcatcc

SEQ ID NO: 605401 - DNA, 15 bp, Homo sapiens
gggctgcttcatcct

SEQ ID NO: 605402 - DNA, 15 bp, Homo sapiens
ggctgcttcatccta

SEQ ID NO: 605403 - DNA, 15 bp, Homo sapiens
gctgcttcatcctaa

SEQ ID NO: 605404 - DNA, 15 bp, Homo sapiens
ctgcttcatcctaac

SEQ ID NO: 605405 - DNA, 15 bp, Homo sapiens
tgcttcatcctaact

SEQ ID NO: 605406 - DNA, 15 bp, Homo sapiens
gcttcatcctaactc

SEQ ID NO: 605407 - DNA, 15 bp, Homo sapiens
cttcatcctaactcc

SEQ ID NO: 605408 - DNA, 15 bp, Homo sapiens
ttcatcctaactccc

SEQ ID NO: 605409 - DNA, 15 bp, Homo sapiens
tcatcctaactcccc

SEQ ID NO: 605410 - DNA, 15 bp, Homo sapiens
catcctaactccccc

SEQ ID NO: 605411 - DNA, 15 bp, Homo sapiens
atcctaactccccca

SEQ ID NO: 605412 - DNA, 15 bp, Homo sapiens
tcctaactcccccag

SEQ ID NO: 605413 - DNA, 15 bp, Homo sapiens
cctaactcccccaga

SEQ ID NO: 605414 - DNA, 15 bp, Homo sapiens
ctaactcccccagat

SEQ ID NO: 605415 - DNA, 15 bp, Homo sapiens
taactcccccagata

SEQ ID NO: 605416 - DNA, 15 bp, Homo sapiens
aactcccccagatag

SEQ ID NO: 605417 - DNA, 15 bp, Homo sapiens
actcccccagataga

SEQ ID NO: 605418 - DNA, 15 bp, Homo sapiens
ctcccccagatagag

SEQ ID NO: 605419 - DNA, 15 bp, Homo sapiens
tcccccagatagagg

SEQ ID NO: 605420 - DNA, 15 bp, Homo sapiens
cccccagatagagga

SEQ ID NO: 605421 - DNA, 15 bp, Homo sapiens
ccccagatagaggaa

SEQ ID NO: 605422 - DNA, 15 bp, Homo sapiens
cccagatagaggaat

SEQ ID NO: 605423 - DNA, 15 bp, Homo sapiens
ccagatagaggaatg

SEQ ID NO: 605424 - DNA, 15 bp, Homo sapiens
cagatagaggaatga

SEQ ID NO: 605425 - DNA, 15 bp, Homo sapiens
agatagaggaatgaa

SEQ ID NO: 605426 - DNA, 15 bp, Homo sapiens
gatagaggaatgaag

SEQ ID NO: 605427 - DNA, 15 bp, Homo sapiens
atagaggaatgaagc

SEQ ID NO: 605428 - DNA, 15 bp, Homo sapiens
tagaggaatgaagca

SEQ ID NO: 605429 - DNA, 15 bp, Homo sapiens
agaggaatgaagcag

SEQ ID NO: 605430 - DNA, 15 bp, Homo sapiens
gaggaatgaagcagc

SEQ ID NO: 605431 - DNA, 15 bp, Homo sapiens
aggaatgaagcagcc

SEQ ID NO: 605432 - DNA, 15 bp, Homo sapiens
ggaatgaagcagccc

SEQ ID NO: 605433 - DNA, 15 bp, Homo sapiens
gaatgaagcagccca

SEQ ID NO: 605434 - DNA, 15 bp, Homo sapiens
aatgaagcagcccaa

SEQ ID NO: 605435 - DNA, 15 bp, Homo sapiens
atgaagcagcccaac

SEQ ID NO: 605436 - DNA, 15 bp, Homo sapiens
tgaagcagcccaaca

SEQ ID NO: 605437 - DNA, 15 bp, Homo sapiens
gaagcagcccaacac

SEQ ID NO: 605438 - DNA, 15 bp, Homo sapiens
aagcagcccaacacc

SEQ ID NO: 605439 - DNA, 15 bp, Homo sapiens
agcagcccaacacca

SEQ ID NO: 605440 - DNA, 15 bp, Homo sapiens
gcagcccaacaccaa

SEQ ID NO: 605441 - DNA, 15 bp, Homo sapiens
cagcccaacaccaaa

SEQ ID NO: 605442 - DNA, 15 bp, Homo sapiens
agcccaacaccaaat

SEQ ID NO: 605443 - DNA, 15 bp, Homo sapiens
gcccaacaccaaatc

SEQ ID NO: 605444 - DNA, 15 bp, Homo sapiens
cccaacaccaaatca

SEQ ID NO: 605445 - DNA, 15 bp, Homo sapiens
ccaacaccaaatcaa

SEQ ID NO: 605446 - DNA, 15 bp, Homo sapiens
caacaccaaatcaaa

SEQ ID NO: 605447 - DNA, 15 bp, Homo sapiens
aacaccaaatcaaag

SEQ ID NO: 605448 - DNA, 15 bp, Homo sapiens
acaccaaatcaaagc

SEQ ID NO: 605449 - DNA, 15 bp, Homo sapiens
caccaaatcaaagca

SEQ ID NO: 605450 - DNA, 15 bp, Homo sapiens
accaaatcaaagcaa

SEQ ID NO: 605451 - DNA, 15 bp, Homo sapiens
ccaaatcaaagcaac

SEQ ID NO: 605452 - DNA, 15 bp, Homo sapiens
caaatcaaagcaaca

SEQ ID NO: 605453 - DNA, 15 bp, Homo sapiens
aaatcaaagcaacag

SEQ ID NO: 605454 - DNA, 15 bp, Homo sapiens
aatcaaagcaacagt

SEQ ID NO: 605455 - DNA, 15 bp, Homo sapiens
atcaaagcaacagtg

SEQ ID NO: 605456 - DNA, 15 bp, Homo sapiens
tcaaagcaacagtgc

SEQ ID NO: 605457 - DNA, 15 bp, Homo sapiens
caaagcaacagtgca

SEQ ID NO: 605458 - DNA, 15 bp, Homo sapiens
aaagcaacagtgcag

SEQ ID NO: 605459 - DNA, 15 bp, Homo sapiens
aagcaacagtgcagc

SEQ ID NO: 605460 - DNA, 15 bp, Homo sapiens
agcaacagtgcagca

SEQ ID NO: 605461 - DNA, 15 bp, Homo sapiens
gcaacagtgcagcac

SEQ ID NO: 605462 - DNA, 15 bp, Homo sapiens
caacagtgcagcaca

SEQ ID NO: 605463 - DNA, 15 bp, Homo sapiens
aacagtgcagcacat

SEQ ID NO: 605464 - DNA, 15 bp, Homo sapiens
acagtgcagcacatt

SEQ ID NO: 605465 - DNA, 15 bp, Homo sapiens
cagtgcagcacattc

SEQ ID NO: 605466 - DNA, 15 bp, Homo sapiens
agtgcagcacattcg

SEQ ID NO: 605467 - DNA, 15 bp, Homo sapiens
gtgcagcacattcgt

SEQ ID NO: 605468 - DNA, 15 bp, Homo sapiens
tgcagcacattcgtc

SEQ ID NO: 605469 - DNA, 15 bp, Homo sapiens
gcagcacattcgtcc

SEQ ID NO: 605470 - DNA, 15 bp, Homo sapiens
cagcacattcgtcct

SEQ ID NO: 605471 - DNA, 15 bp, Homo sapiens
agcacattcgtcctt

SEQ ID NO: 605472 - DNA, 15 bp, Homo sapiens
gcacattcgtccttc

SEQ ID NO: 605473 - DNA, 15 bp, Homo sapiens
cacattcgtccttct

SEQ ID NO: 605474 - DNA, 15 bp, Homo sapiens
acattcgtccttctc

SEQ ID NO: 605475 - DNA, 15 bp, Homo sapiens
cattcgtccttctct

SEQ ID NO: 605476 - DNA, 15 bp, Homo sapiens
attcgtccttctctc

SEQ ID NO: 605477 - DNA, 15 bp, Homo sapiens
ttcgtccttctctca

SEQ ID NO: 605478 - DNA, 15 bp, Homo sapiens
tcgtccttctctcaa

SEQ ID NO: 605479 - DNA, 15 bp, Homo sapiens
cgtccttctctcaag

SEQ ID NO: 605480 - DNA, 15 bp, Homo sapiens
gtccttctctcaaga

SEQ ID NO: 605481 - DNA, 15 bp, Homo sapiens
tccttctctcaagag

SEQ ID NO: 605482 - DNA, 15 bp, Homo sapiens
ccttctctcaagagc

SEQ ID NO: 605483 - DNA, 15 bp, Homo sapiens
cttctctcaagagct

SEQ ID NO: 605484 - DNA, 15 bp, Homo sapiens
ttctctcaagagctc

SEQ ID NO: 605485 - DNA, 15 bp, Homo sapiens
tctctcaagagctct

SEQ ID NO: 605486 - DNA, 15 bp, Homo sapiens
ctctcaagagctctc

SEQ ID NO: 605487 - DNA, 15 bp, Homo sapiens
tctcaagagctctct

SEQ ID NO: 605488 - DNA, 15 bp, Homo sapiens
ctcaagagctctcta

SEQ ID NO: 605489 - DNA, 15 bp, Homo sapiens
tcaagagctctctac

SEQ ID NO: 605490 - DNA, 15 bp, Homo sapiens
caagagctctctaca

SEQ ID NO: 605491 - DNA, 15 bp, Homo sapiens
aagagctctctacag

SEQ ID NO: 605492 - DNA, 15 bp, Homo sapiens
agagctctctacaga

SEQ ID NO: 605493 - DNA, 15 bp, Homo sapiens
gagctctctacagag

SEQ ID NO: 605494 - DNA, 15 bp, Homo sapiens
agctctctacagagc

SEQ ID NO: 605495 - DNA, 15 bp, Homo sapiens
gctctctacagagcc

SEQ ID NO: 605496 - DNA, 15 bp, Homo sapiens
ctctctacagagccc

SEQ ID NO: 605497 - DNA, 15 bp, Homo sapiens
tctctacagagccct

SEQ ID NO: 605498 - DNA, 15 bp, Homo sapiens
ctctacagagccctg

SEQ ID NO: 605499 - DNA, 15 bp, Homo sapiens
tctacagagccctga

SEQ ID NO: 605500 - DNA, 15 bp, Homo sapiens
ctacagagccctgac

SEQ ID NO: 605501 - DNA, 15 bp, Homo sapiens
tacagagccctgacc

SEQ ID NO: 605502 - DNA, 15 bp, Homo sapiens
acagagccctgaccg

SEQ ID NO: 605503 - DNA, 15 bp, Homo sapiens
cagagccctgaccgt

SEQ ID NO: 605504 - DNA, 15 bp, Homo sapiens
agagccctgaccgta

SEQ ID NO: 605505 - DNA, 15 bp, Homo sapiens
gagccctgaccgtag

SEQ ID NO: 605506 - DNA, 15 bp, Homo sapiens
agccctgaccgtaga

SEQ ID NO: 605507 - DNA, 15 bp, Homo sapiens
gccctgaccgtagaa

SEQ ID NO: 605508 - DNA, 15 bp, Homo sapiens
ccctgaccgtagaat

SEQ ID NO: 605509 - DNA, 15 bp, Homo sapiens
cctgaccgtagaata

SEQ ID NO: 605510 - DNA, 15 bp, Homo sapiens
ctgaccgtagaatat

SEQ ID NO: 605511 - DNA, 15 bp, Homo sapiens
tgaccgtagaatatg

SEQ ID NO: 605512 - DNA, 15 bp, Homo sapiens
gaccgtagaatatga

SEQ ID NO: 605513 - DNA, 15 bp, Homo sapiens
accgtagaatatgag

SEQ ID NO: 605514 - DNA, 15 bp, Homo sapiens
ccgtagaatatgagg

SEQ ID NO: 605515 - DNA, 15 bp, Homo sapiens
cgtagaatatgaggt

SEQ ID NO: 605516 - DNA, 15 bp, Homo sapiens
gtagaatatgaggtt

SEQ ID NO: 605517 - DNA, 15 bp, Homo sapiens
tagaatatgaggttg

SEQ ID NO: 605518 - DNA, 15 bp, Homo sapiens
agaatatgaggttga

SEQ ID NO: 605519 - DNA, 15 bp, Homo sapiens
gaatatgaggttgaa

SEQ ID NO: 605520 - DNA, 15 bp, Homo sapiens
aatatgaggttgaaa

SEQ ID NO: 605521 - DNA, 15 bp, Homo sapiens
atatgaggttgaaaa

SEQ ID NO: 605522 - DNA, 15 bp, Homo sapiens
tatgaggttgaaaac

SEQ ID NO: 605523 - DNA, 15 bp, Homo sapiens
atgaggttgaaaaca

SEQ ID NO: 605524 - DNA, 15 bp, Homo sapiens
tgaggttgaaaacac

SEQ ID NO: 605525 - DNA, 15 bp, Homo sapiens
gaggttgaaaacaca

SEQ ID NO: 605526 - DNA, 15 bp, Homo sapiens
aggttgaaaacacag

SEQ ID NO: 605527 - DNA, 15 bp, Homo sapiens
ggttgaaaacacagg

SEQ ID NO: 605528 - DNA, 15 bp, Homo sapiens
gttgaaaacacagga

SEQ ID NO: 605529 - DNA, 15 bp, Homo sapiens
ttgaaaacacaggat

SEQ ID NO: 605530 - DNA, 15 bp, Homo sapiens
tgaaaacacaggatg

SEQ ID NO: 605531 - DNA, 15 bp, Homo sapiens
gaaaacacaggatgt

SEQ ID NO: 605532 - DNA, 15 bp, Homo sapiens
aaaacacaggatgtg

SEQ ID NO: 605533 - DNA, 15 bp, Homo sapiens
aaacacaggatgtga

SEQ ID NO: 605534 - DNA, 15 bp, Homo sapiens
aacacaggatgtgat

SEQ ID NO: 605535 - DNA, 15 bp, Homo sapiens
acacaggatgtgata

SEQ ID NO: 605536 - DNA, 15 bp, Homo sapiens
cacaggatgtgatac

SEQ ID NO: 605537 - DNA, 15 bp, Homo sapiens
acaggatgtgatact

SEQ ID NO: 605538 - DNA, 15 bp, Homo sapiens
caggatgtgatactg

SEQ ID NO: 605539 - DNA, 15 bp, Homo sapiens
aggatgtgatactgt

SEQ ID NO: 605540 - DNA, 15 bp, Homo sapiens
ggatgtgatactgtg

SEQ ID NO: 605541 - DNA, 15 bp, Homo sapiens
gatgtgatactgtgt

SEQ ID NO: 605542 - DNA, 15 bp, Homo sapiens
atgtgatactgtgtt

SEQ ID NO: 605543 - DNA, 15 bp, Homo sapiens
tgtgatactgtgttc

SEQ ID NO: 605544 - DNA, 15 bp, Homo sapiens
gtgatactgtgttct

SEQ ID NO: 605545 - DNA, 15 bp, Homo sapiens
tgatactgtgttctt

SEQ ID NO: 605546 - DNA, 15 bp, Homo sapiens
gatactgtgttcttg

SEQ ID NO: 605547 - DNA, 15 bp, Homo sapiens
atactgtgttcttgg

SEQ ID NO: 605548 - DNA, 15 bp, Homo sapiens
tactgtgttcttggt

SEQ ID NO: 605549 - DNA, 15 bp, Homo sapiens
actgtgttcttggtc

SEQ ID NO: 605550 - DNA, 15 bp, Homo sapiens
ctgtgttcttggtct

SEQ ID NO: 605551 - DNA, 15 bp, Homo sapiens
tgtgttcttggtcta

SEQ ID NO: 605552 - DNA, 15 bp, Homo sapiens
gtgttcttggtctag

SEQ ID NO: 605553 - DNA, 15 bp, Homo sapiens
tgttcttggtctagt

SEQ ID NO: 605554 - DNA, 15 bp, Homo sapiens
gttcttggtctagtc

SEQ ID NO: 605555 - DNA, 15 bp, Homo sapiens
ttcttggtctagtct

SEQ ID NO: 605556 - DNA, 15 bp, Homo sapiens
tcttggtctagtctc

SEQ ID NO: 605557 - DNA, 15 bp, Homo sapiens
cttggtctagtctcc

SEQ ID NO: 605558 - DNA, 15 bp, Homo sapiens
ttggtctagtctcca

SEQ ID NO: 605559 - DNA, 15 bp, Homo sapiens
tggtctagtctccac

SEQ ID NO: 605560 - DNA, 15 bp, Homo sapiens
ggtctagtctccacg

SEQ ID NO: 605561 - DNA, 15 bp, Homo sapiens
gtctagtctccacgg

SEQ ID NO: 605562 - DNA, 15 bp, Homo sapiens
tctagtctccacggt

SEQ ID NO: 605563 - DNA, 15 bp, Homo sapiens
ctagtctccacggtg

SEQ ID NO: 605564 - DNA, 15 bp, Homo sapiens
tagtctccacggtgt

SEQ ID NO: 605565 - DNA, 15 bp, Homo sapiens
agtctccacggtgta

SEQ ID NO: 605566 - DNA, 15 bp, Homo sapiens
gtctccacggtgtaa

SEQ ID NO: 605567 - DNA, 15 bp, Homo sapiens
tctccacggtgtaaa

SEQ ID NO: 605568 - DNA, 15 bp, Homo sapiens
ctccacggtgtaaaa

SEQ ID NO: 605569 - DNA, 15 bp, Homo sapiens
tccacggtgtaaaag

SEQ ID NO: 605570 - DNA, 15 bp, Homo sapiens
ccacggtgtaaaagt

SEQ ID NO: 605571 - DNA, 15 bp, Homo sapiens
cacggtgtaaaagtg

SEQ ID NO: 605572 - DNA, 15 bp, Homo sapiens
acggtgtaaaagtgt

SEQ ID NO: 605573 - DNA, 15 bp, Homo sapiens
cggtgtaaaagtgtg

SEQ ID NO: 605574 - DNA, 15 bp, Homo sapiens
ggtgtaaaagtgtgc

SEQ ID NO: 605575 - DNA, 15 bp, Homo sapiens
gtgtaaaagtgtgcg

SEQ ID NO: 605576 - DNA, 15 bp, Homo sapiens
tgtaaaagtgtgcgt

SEQ ID NO: 605577 - DNA, 15 bp, Homo sapiens
gtaaaagtgtgcgta

SEQ ID NO: 605578 - DNA, 15 bp, Homo sapiens
taaaagtgtgcgtat

SEQ ID NO: 605579 - DNA, 15 bp, Homo sapiens
aaaagtgtgcgtatg

SEQ ID NO: 605580 - DNA, 15 bp, Homo sapiens
aaagtgtgcgtatgt

SEQ ID NO: 605581 - DNA, 15 bp, Homo sapiens
aagtgtgcgtatgta

SEQ ID NO: 605582 - DNA, 15 bp, Homo sapiens
agtgtgcgtatgtac

SEQ ID NO: 605583 - DNA, 15 bp, Homo sapiens
gtgtgcgtatgtact

SEQ ID NO: 605584 - DNA, 15 bp, Homo sapiens
tgtgcgtatgtactg

SEQ ID NO: 605585 - DNA, 15 bp, Homo sapiens
gtgcgtatgtactgc

SEQ ID NO: 605586 - DNA, 15 bp, Homo sapiens
tgcgtatgtactgca

SEQ ID NO: 605587 - DNA, 15 bp, Homo sapiens
gcgtatgtactgcaa

SEQ ID NO: 605588 - DNA, 15 bp, Homo sapiens
cgtatgtactgcaaa

SEQ ID NO: 605589 - DNA, 15 bp, Homo sapiens
gtatgtactgcaaaa

SEQ ID NO: 605590 - DNA, 15 bp, Homo sapiens
tatgtactgcaaaaa

SEQ ID NO: 605591 - DNA, 15 bp, Homo sapiens
atgtactgcaaaaaa

SEQ ID NO: 605592 - DNA, 15 bp, Homo sapiens
tgtactgcaaaaaag

SEQ ID NO: 605593 - DNA, 15 bp, Homo sapiens
gtactgcaaaaaaga

SEQ ID NO: 605594 - DNA, 15 bp, Homo sapiens
tactgcaaaaaagaa

SEQ ID NO: 605595 - DNA, 15 bp, Homo sapiens
actgcaaaaaagaac

SEQ ID NO: 605596 - DNA, 15 bp, Homo sapiens
ctgcaaaaaagaaca

SEQ ID NO: 605597 - DNA, 15 bp, Homo sapiens
tgcaaaaaagaacaa

SEQ ID NO: 605598 - DNA, 15 bp, Homo sapiens
gcaaaaaagaacaaa

SEQ ID NO: 605599 - DNA, 15 bp, Homo sapiens
caaaaaagaacaaaa

SEQ ID NO: 605600 - DNA, 15 bp, Homo sapiens
aaaaaagaacaaaaa

SEQ ID NO: 605601 - DNA, 15 bp, Homo sapiens
aaaaagaacaaaaat

SEQ ID NO: 605602 - DNA, 15 bp, Homo sapiens
aaaagaacaaaaata

SEQ ID NO: 605603 - DNA, 15 bp, Homo sapiens
aaagaacaaaaatac

SEQ ID NO: 605604 - DNA, 15 bp, Homo sapiens
aagaacaaaaatacc

SEQ ID NO: 605605 - DNA, 15 bp, Homo sapiens
agaacaaaaatacca

SEQ ID NO: 605606 - DNA, 15 bp, Homo sapiens
gaacaaaaataccac

SEQ ID NO: 605607 - DNA, 15 bp, Homo sapiens
aacaaaaataccacg

SEQ ID NO: 605608 - DNA, 15 bp, Homo sapiens
acaaaaataccacgc

SEQ ID NO: 605609 - DNA, 15 bp, Homo sapiens
caaaaataccacgca

SEQ ID NO: 605610 - DNA, 15 bp, Homo sapiens
aaaaataccacgcaa

SEQ ID NO: 605611 - DNA, 15 bp, Homo sapiens
aaaataccacgcaag

SEQ ID NO: 605612 - DNA, 15 bp, Homo sapiens
aaataccacgcaagc

SEQ ID NO: 605613 - DNA, 15 bp, Homo sapiens
aataccacgcaagca

SEQ ID NO: 605614 - DNA, 15 bp, Homo sapiens
ataccacgcaagcac

SEQ ID NO: 605615 - DNA, 15 bp, Homo sapiens
taccacgcaagcacc

SEQ ID NO: 605616 - DNA, 15 bp, Homo sapiens
accacgcaagcacca

SEQ ID NO: 605617 - DNA, 15 bp, Homo sapiens
ccacgcaagcaccac

SEQ ID NO: 605618 - DNA, 15 bp, Homo sapiens
cacgcaagcaccacc

SEQ ID NO: 605619 - DNA, 15 bp, Homo sapiens
ttaaatttttttaac

SEQ ID NO: 605620 - DNA, 15 bp, Homo sapiens
taaatttttttaacg

SEQ ID NO: 605621 - DNA, 15 bp, Homo sapiens
aaatttttttaacgc

SEQ ID NO: 605622 - DNA, 15 bp, Homo sapiens
aatttttttaacgca

SEQ ID NO: 605623 - DNA, 15 bp, Homo sapiens
atttttttaacgcag

SEQ ID NO: 605624 - DNA, 15 bp, Homo sapiens
tttttttaacgcagg

SEQ ID NO: 605625 - DNA, 15 bp, Homo sapiens
ttttttaacgcaggc

SEQ ID NO: 605626 - DNA, 15 bp, Homo sapiens
tttttaacgcaggca

SEQ ID NO: 605627 - DNA, 15 bp, Homo sapiens
ttttaacgcaggcat

SEQ ID NO: 605628 - DNA, 15 bp, Homo sapiens
tttaacgcaggcata

SEQ ID NO: 605629 - DNA, 15 bp, Homo sapiens
ttaacgcaggcatat

SEQ ID NO: 605630 - DNA, 15 bp, Homo sapiens
taacgcaggcatata

SEQ ID NO: 605631 - DNA, 15 bp, Homo sapiens
aacgcaggcatatac

SEQ ID NO: 605632 - DNA, 15 bp, Homo sapiens
acgcaggcatataca

SEQ ID NO: 605633 - DNA, 15 bp, Homo sapiens
cgcaggcatatacaa

SEQ ID NO: 605634 - DNA, 15 bp, Homo sapiens
gcaggcatatacaaa

SEQ ID NO: 605635 - DNA, 15 bp, Homo sapiens
caggcatatacaaac

SEQ ID NO: 605636 - DNA, 15 bp, Homo sapiens
aggcatatacaaaca

SEQ ID NO: 605637 - DNA, 15 bp, Homo sapiens
ggcatatacaaacat

SEQ ID NO: 605638 - DNA, 15 bp, Homo sapiens
gcatatacaaacata

SEQ ID NO: 605639 - DNA, 15 bp, Homo sapiens
catatacaaacatac

SEQ ID NO: 605640 - DNA, 15 bp, Homo sapiens
atatacaaacatact

SEQ ID NO: 605641 - DNA, 15 bp, Homo sapiens
tatacaaacatactt

SEQ ID NO: 605642 - DNA, 15 bp, Homo sapiens
atacaaacatactta

SEQ ID NO: 605643 - DNA, 15 bp, Homo sapiens
tacaaacatacttat

SEQ ID NO: 605644 - DNA, 15 bp, Homo sapiens
acaaacatacttatc

SEQ ID NO: 605645 - DNA, 15 bp, Homo sapiens
caaacatacttatca

SEQ ID NO: 605646 - DNA, 15 bp, Homo sapiens
aaacatacttatcag

SEQ ID NO: 605647 - DNA, 15 bp, Homo sapiens
aacatacttatcagc

SEQ ID NO: 605648 - DNA, 15 bp, Homo sapiens
acatacttatcagca

SEQ ID NO: 605649 - DNA, 15 bp, Homo sapiens
catacttatcagcaa

SEQ ID NO: 605650 - DNA, 15 bp, Homo sapiens
atacttatcagcaac

SEQ ID NO: 605651 - DNA, 15 bp, Homo sapiens
tacttatcagcaacc

SEQ ID NO: 605652 - DNA, 15 bp, Homo sapiens
acttatcagcaacct

SEQ ID NO: 605653 - DNA, 15 bp, Homo sapiens
cttatcagcaacctt

SEQ ID NO: 605654 - DNA, 15 bp, Homo sapiens
ttatcagcaaccttg

SEQ ID NO: 605655 - DNA, 15 bp, Homo sapiens
tatcagcaaccttgc

SEQ ID NO: 605656 - DNA, 15 bp, Homo sapiens
atcagcaaccttgct

SEQ ID NO: 605657 - DNA, 15 bp, Homo sapiens
tcagcaaccttgcta

SEQ ID NO: 605658 - DNA, 15 bp, Homo sapiens
cagcaaccttgctaa

SEQ ID NO: 605659 - DNA, 15 bp, Homo sapiens
agcaaccttgctaaa

SEQ ID NO: 605660 - DNA, 15 bp, Homo sapiens
gcaaccttgctaaac

SEQ ID NO: 605661 - DNA, 15 bp, Homo sapiens
caaccttgctaaact

SEQ ID NO: 605662 - DNA, 15 bp, Homo sapiens
aaccttgctaaactg

SEQ ID NO: 605663 - DNA, 15 bp, Homo sapiens
accttgctaaactgt

SEQ ID NO: 605664 - DNA, 15 bp, Homo sapiens
ccttgctaaactgtc

SEQ ID NO: 605665 - DNA, 15 bp, Homo sapiens
cttgctaaactgtct

SEQ ID NO: 605666 - DNA, 15 bp, Homo sapiens
ttgctaaactgtctt

SEQ ID NO: 605667 - DNA, 15 bp, Homo sapiens
tgctaaactgtctta

SEQ ID NO: 605668 - DNA, 15 bp, Homo sapiens
gctaaactgtcttat

SEQ ID NO: 605669 - DNA, 15 bp, Homo sapiens
ctaaactgtcttatt

SEQ ID NO: 605670 - DNA, 15 bp, Homo sapiens
taaactgtcttatta

SEQ ID NO: 605671 - DNA, 15 bp, Homo sapiens
aaactgtcttattag

SEQ ID NO: 605672 - DNA, 15 bp, Homo sapiens
aactgtcttattagt

SEQ ID NO: 605673 - DNA, 15 bp, Homo sapiens
actgtcttattagtt

SEQ ID NO: 605674 - DNA, 15 bp, Homo sapiens
ctgtcttattagttc

SEQ ID NO: 605675 - DNA, 15 bp, Homo sapiens
tgtcttattagttct

SEQ ID NO: 605676 - DNA, 15 bp, Homo sapiens
gtcttattagttcta

SEQ ID NO: 605677 - DNA, 15 bp, Homo sapiens
tcttattagttctaa

SEQ ID NO: 605678 - DNA, 15 bp, Homo sapiens
cttattagttctaat

SEQ ID NO: 605679 - DNA, 15 bp, Homo sapiens
ttattagttctaata

SEQ ID NO: 605680 - DNA, 15 bp, Homo sapiens
tattagttctaataa

SEQ ID NO: 605681 - DNA, 15 bp, Homo sapiens
attagttctaataat

SEQ ID NO: 605682 - DNA, 15 bp, Homo sapiens
ttagttctaataatt

SEQ ID NO: 605683 - DNA, 15 bp, Homo sapiens
tagttctaataattt

SEQ ID NO: 605684 - DNA, 15 bp, Homo sapiens
agttctaataatttg

SEQ ID NO: 605685 - DNA, 15 bp, Homo sapiens
gttctaataatttgt

SEQ ID NO: 605686 - DNA, 15 bp, Homo sapiens
ttctaataatttgtc

SEQ ID NO: 605687 - DNA, 15 bp, Homo sapiens
tctaataatttgtcc

SEQ ID NO: 605688 - DNA, 15 bp, Homo sapiens
ctaataatttgtcca

SEQ ID NO: 605689 - DNA, 15 bp, Homo sapiens
taataatttgtccat

SEQ ID NO: 605690 - DNA, 15 bp, Homo sapiens
aataatttgtccata

SEQ ID NO: 605691 - DNA, 15 bp, Homo sapiens
ataatttgtccatag

SEQ ID NO: 605692 - DNA, 15 bp, Homo sapiens
taatttgtccataga

SEQ ID NO: 605693 - DNA, 15 bp, Homo sapiens
aatttgtccatagat

SEQ ID NO: 605694 - DNA, 15 bp, Homo sapiens
atttgtccatagatt

SEQ ID NO: 605695 - DNA, 15 bp, Homo sapiens
tttgtccatagattt

SEQ ID NO: 605696 - DNA, 15 bp, Homo sapiens
ttgtccatagatttc

SEQ ID NO: 605697 - DNA, 15 bp, Homo sapiens
tgtccatagatttct

SEQ ID NO: 605698 - DNA, 15 bp, Homo sapiens
gtccatagatttctt

SEQ ID NO: 605699 - DNA, 15 bp, Homo sapiens
tccatagatttcttg

SEQ ID NO: 605700 - DNA, 15 bp, Homo sapiens
ccatagatttcttga

SEQ ID NO: 605701 - DNA, 15 bp, Homo sapiens
catagatttcttgaa

SEQ ID NO: 605702 - DNA, 15 bp, Homo sapiens
atagatttcttgaat

SEQ ID NO: 605703 - DNA, 15 bp, Homo sapiens
tagatttcttgaatt

SEQ ID NO: 605704 - DNA, 15 bp, Homo sapiens
agatttcttgaattt

SEQ ID NO: 605705 - DNA, 15 bp, Homo sapiens
gatttcttgaatttt

SEQ ID NO: 605706 - DNA, 15 bp, Homo sapiens
atttcttgaattttc

SEQ ID NO: 605707 - DNA, 15 bp, Homo sapiens
tttcttgaattttct

SEQ ID NO: 605708 - DNA, 15 bp, Homo sapiens
ttcttgaattttcta

SEQ ID NO: 605709 - DNA, 15 bp, Homo sapiens
tcttgaattttctat

SEQ ID NO: 605710 - DNA, 15 bp, Homo sapiens
cttgaattttctatg

SEQ ID NO: 605711 - DNA, 15 bp, Homo sapiens
ttgaattttctatga

SEQ ID NO: 605712 - DNA, 15 bp, Homo sapiens
tgaattttctatgaa

SEQ ID NO: 605713 - DNA, 15 bp, Homo sapiens
gaattttctatgaag

SEQ ID NO: 605714 - DNA, 15 bp, Homo sapiens
aattttctatgaaga

SEQ ID NO: 605715 - DNA, 15 bp, Homo sapiens
attttctatgaagat

SEQ ID NO: 605716 - DNA, 15 bp, Homo sapiens
ttttctatgaagata

SEQ ID NO: 605717 - DNA, 15 bp, Homo sapiens
tttctatgaagataa

SEQ ID NO: 605718 - DNA, 15 bp, Homo sapiens
ttctatgaagataat

SEQ ID NO: 605719 - DNA, 15 bp, Homo sapiens
tctatgaagataatc

SEQ ID NO: 605720 - DNA, 15 bp, Homo sapiens
ctatgaagataatct

SEQ ID NO: 605721 - DNA, 15 bp, Homo sapiens
tatgaagataatcta

SEQ ID NO: 605722 - DNA, 15 bp, Homo sapiens
atgaagataatctac

SEQ ID NO: 605723 - DNA, 15 bp, Homo sapiens
tgaagataatctacc

SEQ ID NO: 605724 - DNA, 15 bp, Homo sapiens
gaagataatctacca

SEQ ID NO: 605725 - DNA, 15 bp, Homo sapiens
aagataatctaccat

SEQ ID NO: 605726 - DNA, 15 bp, Homo sapiens
agataatctaccatc

SEQ ID NO: 605727 - DNA, 15 bp, Homo sapiens
gataatctaccatct

SEQ ID NO: 605728 - DNA, 15 bp, Homo sapiens
ataatctaccatcta

SEQ ID NO: 605729 - DNA, 15 bp, Homo sapiens
taatctaccatctac

SEQ ID NO: 605730 - DNA, 15 bp, Homo sapiens
aatctaccatctaca

SEQ ID NO: 605731 - DNA, 15 bp, Homo sapiens
atctaccatctacaa

SEQ ID NO: 605732 - DNA, 15 bp, Homo sapiens
tctaccatctacaaa

SEQ ID NO: 605733 - DNA, 15 bp, Homo sapiens
ctaccatctacaaat

SEQ ID NO: 605734 - DNA, 15 bp, Homo sapiens
taccatctacaaata

SEQ ID NO: 605735 - DNA, 15 bp, Homo sapiens
accatctacaaataa

SEQ ID NO: 605736 - DNA, 15 bp, Homo sapiens
ccatctacaaataat

SEQ ID NO: 605737 - DNA, 15 bp, Homo sapiens
catctacaaataata

SEQ ID NO: 605738 - DNA, 15 bp, Homo sapiens
atctacaaataataa

SEQ ID NO: 605739 - DNA, 15 bp, Homo sapiens
tctacaaataataac

SEQ ID NO: 605740 - DNA, 15 bp, Homo sapiens
ctacaaataataact

SEQ ID NO: 605741 - DNA, 15 bp, Homo sapiens
tacaaataataacta

SEQ ID NO: 605742 - DNA, 15 bp, Homo sapiens
acaaataataactat

SEQ ID NO: 605743 - DNA, 15 bp, Homo sapiens
caaataataactatt

SEQ ID NO: 605744 - DNA, 15 bp, Homo sapiens
aaataataactattt

SEQ ID NO: 605745 - DNA, 15 bp, Homo sapiens
aataataactatttt

SEQ ID NO: 605746 - DNA, 15 bp, Homo sapiens
ataataactattttg

SEQ ID NO: 605747 - DNA, 15 bp, Homo sapiens
taataactattttgt

SEQ ID NO: 605748 - DNA, 15 bp, Homo sapiens
aataactattttgtt

SEQ ID NO: 605749 - DNA, 15 bp, Homo sapiens
ataactattttgttt

SEQ ID NO: 605750 - DNA, 15 bp, Homo sapiens
taactattttgttta

SEQ ID NO: 605751 - DNA, 15 bp, Homo sapiens
aactattttgtttac

SEQ ID NO: 605752 - DNA, 15 bp, Homo sapiens
actattttgtttact

SEQ ID NO: 605753 - DNA, 15 bp, Homo sapiens
ctattttgtttactt

SEQ ID NO: 605754 - DNA, 15 bp, Homo sapiens
tattttgtttacttc

SEQ ID NO: 605755 - DNA, 15 bp, Homo sapiens
attttgtttacttct

SEQ ID NO: 605756 - DNA, 15 bp, Homo sapiens
ttttgtttacttctg

SEQ ID NO: 605757 - DNA, 15 bp, Homo sapiens
tttgtttacttctga

SEQ ID NO: 605758 - DNA, 15 bp, Homo sapiens
ttgtttacttctgat

SEQ ID NO: 605759 - DNA, 15 bp, Homo sapiens
tgtttacttctgatt

SEQ ID NO: 605760 - DNA, 15 bp, Homo sapiens
gtttacttctgattc

SEQ ID NO: 605761 - DNA, 15 bp, Homo sapiens
tttacttctgattct

SEQ ID NO: 605762 - DNA, 15 bp, Homo sapiens
ttacttctgattctt

SEQ ID NO: 605763 - DNA, 15 bp, Homo sapiens
tacttctgattcttg

SEQ ID NO: 605764 - DNA, 15 bp, Homo sapiens
acttctgattcttgt

SEQ ID NO: 605765 - DNA, 15 bp, Homo sapiens
cttctgattcttgta

SEQ ID NO: 605766 - DNA, 15 bp, Homo sapiens
ttctgattcttgtac

SEQ ID NO: 605767 - DNA, 15 bp, Homo sapiens
tctgattcttgtaca

SEQ ID NO: 605768 - DNA, 15 bp, Homo sapiens
ctgattcttgtacat

SEQ ID NO: 605769 - DNA, 15 bp, Homo sapiens
tgattcttgtacatt

SEQ ID NO: 605770 - DNA, 15 bp, Homo sapiens
gattcttgtacattt

SEQ ID NO: 605771 - DNA, 15 bp, Homo sapiens
attcttgtacatttt

SEQ ID NO: 605772 - DNA, 15 bp, Homo sapiens
ttcttgtacattttt

SEQ ID NO: 605773 - DNA, 15 bp, Homo sapiens
tcttgtacatttttc

SEQ ID NO: 605774 - DNA, 15 bp, Homo sapiens
cttgtacatttttcc

SEQ ID NO: 605775 - DNA, 15 bp, Homo sapiens
ttgtacatttttccc

SEQ ID NO: 605776 - DNA, 15 bp, Homo sapiens
tgtacatttttccct

SEQ ID NO: 605777 - DNA, 15 bp, Homo sapiens
gtacatttttccctt

SEQ ID NO: 605778 - DNA, 15 bp, Homo sapiens
tacatttttcccttg

SEQ ID NO: 605779 - DNA, 15 bp, Homo sapiens
acatttttcccttgc

SEQ ID NO: 605780 - DNA, 15 bp, Homo sapiens
catttttcccttgcc

SEQ ID NO: 605781 - DNA, 15 bp, Homo sapiens
atttttcccttgcct

SEQ ID NO: 605782 - DNA, 15 bp, Homo sapiens
tttttcccttgcctt

SEQ ID NO: 605783 - DNA, 15 bp, Homo sapiens
ttttcccttgcctta

SEQ ID NO: 605784 - DNA, 15 bp, Homo sapiens
tttcccttgccttat

SEQ ID NO: 605785 - DNA, 15 bp, Homo sapiens
ttcccttgccttatt

SEQ ID NO: 605786 - DNA, 15 bp, Homo sapiens
tcccttgccttatta

SEQ ID NO: 605787 - DNA, 15 bp, Homo sapiens
cccttgccttattat

SEQ ID NO: 605788 - DNA, 15 bp, Homo sapiens
ccttgccttattata

SEQ ID NO: 605789 - DNA, 15 bp, Homo sapiens
cttgccttattatag

SEQ ID NO: 605790 - DNA, 15 bp, Homo sapiens
ttgccttattatagt

SEQ ID NO: 605791 - DNA, 15 bp, Homo sapiens
tgccttattatagtg

SEQ ID NO: 605792 - DNA, 15 bp, Homo sapiens
gccttattatagtgg

SEQ ID NO: 605793 - DNA, 15 bp, Homo sapiens
ccttattatagtggg

SEQ ID NO: 605794 - DNA, 15 bp, Homo sapiens
cttattatagtgggc

SEQ ID NO: 605795 - DNA, 15 bp, Homo sapiens
ttattatagtgggca

SEQ ID NO: 605796 - DNA, 15 bp, Homo sapiens
tattatagtgggcag

SEQ ID NO: 605797 - DNA, 15 bp, Homo sapiens
attatagtgggcagg

SEQ ID NO: 605798 - DNA, 15 bp, Homo sapiens
ttatagtgggcagga

SEQ ID NO: 605799 - DNA, 15 bp, Homo sapiens
tatagtgggcaggat

SEQ ID NO: 605800 - DNA, 15 bp, Homo sapiens
atagtgggcaggatc

SEQ ID NO: 605801 - DNA, 15 bp, Homo sapiens
tagtgggcaggatct

SEQ ID NO: 605802 - DNA, 15 bp, Homo sapiens
agtgggcaggatctg

SEQ ID NO: 605803 - DNA, 15 bp, Homo sapiens
gtgggcaggatctgt

SEQ ID NO: 605804 - DNA, 15 bp, Homo sapiens
tgggcaggatctgta

SEQ ID NO: 605805 - DNA, 15 bp, Homo sapiens
gggcaggatctgtag

SEQ ID NO: 605806 - DNA, 15 bp, Homo sapiens
ggcaggatctgtagt

SEQ ID NO: 605807 - DNA, 15 bp, Homo sapiens
gcaggatctgtagtt

SEQ ID NO: 605808 - DNA, 15 bp, Homo sapiens
caggatctgtagtta

SEQ ID NO: 605809 - DNA, 15 bp, Homo sapiens
aggatctgtagttac

SEQ ID NO: 605810 - DNA, 15 bp, Homo sapiens
ggatctgtagttaca

SEQ ID NO: 605811 - DNA, 15 bp, Homo sapiens
gatctgtagttacaa

SEQ ID NO: 605812 - DNA, 15 bp, Homo sapiens
atctgtagttacaat

SEQ ID NO: 605813 - DNA, 15 bp, Homo sapiens
tctgtagttacaatg

SEQ ID NO: 605814 - DNA, 15 bp, Homo sapiens
ctgtagttacaatgt

SEQ ID NO: 605815 - DNA, 15 bp, Homo sapiens
tgtagttacaatgtt

SEQ ID NO: 605816 - DNA, 15 bp, Homo sapiens
gtagttacaatgttg

SEQ ID NO: 605817 - DNA, 15 bp, Homo sapiens
tagttacaatgttga

SEQ ID NO: 605818 - DNA, 15 bp, Homo sapiens
agttacaatgttgac

SEQ ID NO: 605819 - DNA, 15 bp, Homo sapiens
gttacaatgttgact

SEQ ID NO: 605820 - DNA, 15 bp, Homo sapiens
ttacaatgttgacta

SEQ ID NO: 605821 - DNA, 15 bp, Homo sapiens
tacaatgttgactag

SEQ ID NO: 605822 - DNA, 15 bp, Homo sapiens
acaatgttgactaga

SEQ ID NO: 605823 - DNA, 15 bp, Homo sapiens
caatgttgactagaa

SEQ ID NO: 605824 - DNA, 15 bp, Homo sapiens
aatgttgactagaag

SEQ ID NO: 605825 - DNA, 15 bp, Homo sapiens
atgttgactagaagc

SEQ ID NO: 605826 - DNA, 15 bp, Homo sapiens
tgttgactagaagca

SEQ ID NO: 605827 - DNA, 15 bp, Homo sapiens
gttgactagaagcag

SEQ ID NO: 605828 - DNA, 15 bp, Homo sapiens
ttgactagaagcagt

SEQ ID NO: 605829 - DNA, 15 bp, Homo sapiens
tgactagaagcagtg

SEQ ID NO: 605830 - DNA, 15 bp, Homo sapiens
gactagaagcagtga

SEQ ID NO: 605831 - DNA, 15 bp, Homo sapiens
actagaagcagtgat

SEQ ID NO: 605832 - DNA, 15 bp, Homo sapiens
ctagaagcagtgata

SEQ ID NO: 605833 - DNA, 15 bp, Homo sapiens
tagaagcagtgataa

SEQ ID NO: 605834 - DNA, 15 bp, Homo sapiens
agaagcagtgataac

SEQ ID NO: 605835 - DNA, 15 bp, Homo sapiens
gaagcagtgataaca

SEQ ID NO: 605836 - DNA, 15 bp, Homo sapiens
aagcagtgataacag

SEQ ID NO: 605837 - DNA, 15 bp, Homo sapiens
agcagtgataacaga

SEQ ID NO: 605838 - DNA, 15 bp, Homo sapiens
gcagtgataacagac

SEQ ID NO: 605839 - DNA, 15 bp, Homo sapiens
cagtgataacagaca

SEQ ID NO: 605840 - DNA, 15 bp, Homo sapiens
agtgataacagacat

SEQ ID NO: 605841 - DNA, 15 bp, Homo sapiens
gtgataacagacatc

SEQ ID NO: 605842 - DNA, 15 bp, Homo sapiens
tgataacagacatcc

SEQ ID NO: 605843 - DNA, 15 bp, Homo sapiens
gataacagacatcct

SEQ ID NO: 605844 - DNA, 15 bp, Homo sapiens
ataacagacatcctt

SEQ ID NO: 605845 - DNA, 15 bp, Homo sapiens
taacagacatcctta

SEQ ID NO: 605846 - DNA, 15 bp, Homo sapiens
aacagacatccttat

SEQ ID NO: 605847 - DNA, 15 bp, Homo sapiens
acagacatccttatt

SEQ ID NO: 605848 - DNA, 15 bp, Homo sapiens
cagacatccttattt

SEQ ID NO: 605849 - DNA, 15 bp, Homo sapiens
agacatccttatttt

SEQ ID NO: 605850 - DNA, 15 bp, Homo sapiens
gacatccttattttg

SEQ ID NO: 605851 - DNA, 15 bp, Homo sapiens
acatccttattttgt

SEQ ID NO: 605852 - DNA, 15 bp, Homo sapiens
catccttattttgtt

SEQ ID NO: 605853 - DNA, 15 bp, Homo sapiens
atccttattttgttc

SEQ ID NO: 605854 - DNA, 15 bp, Homo sapiens
tccttattttgttcc

SEQ ID NO: 605855 - DNA, 15 bp, Homo sapiens
ccttattttgttcct

SEQ ID NO: 605856 - DNA, 15 bp, Homo sapiens
cttattttgttcctg

SEQ ID NO: 605857 - DNA, 15 bp, Homo sapiens
ttattttgttcctga

SEQ ID NO: 605858 - DNA, 15 bp, Homo sapiens
tattttgttcctgat

SEQ ID NO: 605859 - DNA, 15 bp, Homo sapiens
attttgttcctgatt

SEQ ID NO: 605860 - DNA, 15 bp, Homo sapiens
ttttgttcctgattt

SEQ ID NO: 605861 - DNA, 15 bp, Homo sapiens
tttgttcctgatttc

SEQ ID NO: 605862 - DNA, 15 bp, Homo sapiens
ttgttcctgatttca

SEQ ID NO: 605863 - DNA, 15 bp, Homo sapiens
tgttcctgatttcaa

SEQ ID NO: 605864 - DNA, 15 bp, Homo sapiens
gttcctgatttcaaa

SEQ ID NO: 605865 - DNA, 15 bp, Homo sapiens
ttcctgatttcaaag

SEQ ID NO: 605866 - DNA, 15 bp, Homo sapiens
tcctgatttcaaagg

SEQ ID NO: 605867 - DNA, 15 bp, Homo sapiens
cctgatttcaaagga

SEQ ID NO: 605868 - DNA, 15 bp, Homo sapiens
ctgatttcaaaggaa

SEQ ID NO: 605869 - DNA, 15 bp, Homo sapiens
tgatttcaaaggaaa

SEQ ID NO: 605870 - DNA, 15 bp, Homo sapiens
gatttcaaaggaaat

SEQ ID NO: 605871 - DNA, 15 bp, Homo sapiens
atttcaaaggaaatg

SEQ ID NO: 605872 - DNA, 15 bp, Homo sapiens
tttcaaaggaaatgc

SEQ ID NO: 605873 - DNA, 15 bp, Homo sapiens
ttcaaaggaaatgct

SEQ ID NO: 605874 - DNA, 15 bp, Homo sapiens
tcaaaggaaatgctc

SEQ ID NO: 605875 - DNA, 15 bp, Homo sapiens
caaaggaaatgctcc

SEQ ID NO: 605876 - DNA, 15 bp, Homo sapiens
aaaggaaatgctccc

SEQ ID NO: 605877 - DNA, 15 bp, Homo sapiens
aaggaaatgctccca

SEQ ID NO: 605878 - DNA, 15 bp, Homo sapiens
aggaaatgctcccac

SEQ ID NO: 605879 - DNA, 15 bp, Homo sapiens
ggaaatgctcccaca

SEQ ID NO: 605880 - DNA, 15 bp, Homo sapiens
gaaatgctcccacag

SEQ ID NO: 605881 - DNA, 15 bp, Homo sapiens
aaatgctcccacagt

SEQ ID NO: 605882 - DNA, 15 bp, Homo sapiens
aatgctcccacagtt

SEQ ID NO: 605883 - DNA, 15 bp, Homo sapiens
atgctcccacagttt

SEQ ID NO: 605884 - DNA, 15 bp, Homo sapiens
tgctcccacagtttc

SEQ ID NO: 605885 - DNA, 15 bp, Homo sapiens
gctcccacagtttct

SEQ ID NO: 605886 - DNA, 15 bp, Homo sapiens
ctcccacagtttctc

SEQ ID NO: 605887 - DNA, 15 bp, Homo sapiens
tcccacagtttctca

SEQ ID NO: 605888 - DNA, 15 bp, Homo sapiens
cccacagtttctcag

SEQ ID NO: 605889 - DNA, 15 bp, Homo sapiens
ccacagtttctcagt

SEQ ID NO: 605890 - DNA, 15 bp, Homo sapiens
cacagtttctcagtt

SEQ ID NO: 605891 - DNA, 15 bp, Homo sapiens
acagtttctcagtta

SEQ ID NO: 605892 - DNA, 15 bp, Homo sapiens
cagtttctcagttaa

SEQ ID NO: 605893 - DNA, 15 bp, Homo sapiens
agtttctcagttaag

SEQ ID NO: 605894 - DNA, 15 bp, Homo sapiens
gtttctcagttaaga

SEQ ID NO: 605895 - DNA, 15 bp, Homo sapiens
tttctcagttaagat

SEQ ID NO: 605896 - DNA, 15 bp, Homo sapiens
ttctcagttaagatt

SEQ ID NO: 605897 - DNA, 15 bp, Homo sapiens
tctcagttaagattg

SEQ ID NO: 605898 - DNA, 15 bp, Homo sapiens
ctcagttaagattga

SEQ ID NO: 605899 - DNA, 15 bp, Homo sapiens
tcagttaagattgat

SEQ ID NO: 605900 - DNA, 15 bp, Homo sapiens
cagttaagattgata

SEQ ID NO: 605901 - DNA, 15 bp, Homo sapiens
agttaagattgatat

SEQ ID NO: 605902 - DNA, 15 bp, Homo sapiens
gttaagattgatatt

SEQ ID NO: 605903 - DNA, 15 bp, Homo sapiens
ttaagattgatattt

SEQ ID NO: 605904 - DNA, 15 bp, Homo sapiens
taagattgatatttg

SEQ ID NO: 605905 - DNA, 15 bp, Homo sapiens
aagattgatatttgc

SEQ ID NO: 605906 - DNA, 15 bp, Homo sapiens
agattgatatttgcc

SEQ ID NO: 605907 - DNA, 15 bp, Homo sapiens
gattgatatttgccc

SEQ ID NO: 605908 - DNA, 15 bp, Homo sapiens
attgatatttgcccc

SEQ ID NO: 605909 - DNA, 15 bp, Homo sapiens
ttgatatttgcccct

SEQ ID NO: 605910 - DNA, 15 bp, Homo sapiens
tgatatttgcccctg

SEQ ID NO: 605911 - DNA, 15 bp, Homo sapiens
gatatttgcccctgg

SEQ ID NO: 605912 - DNA, 15 bp, Homo sapiens
atatttgcccctggt

SEQ ID NO: 605913 - DNA, 15 bp, Homo sapiens
tatttgcccctggtt

SEQ ID NO: 605914 - DNA, 15 bp, Homo sapiens
atttgcccctggtta

SEQ ID NO: 605915 - DNA, 15 bp, Homo sapiens
tttgcccctggttag

SEQ ID NO: 605916 - DNA, 15 bp, Homo sapiens
ttgcccctggttagg

SEQ ID NO: 605917 - DNA, 15 bp, Homo sapiens
tgcccctggttaggt

SEQ ID NO: 605918 - DNA, 15 bp, Homo sapiens
gcccctggttaggta

SEQ ID NO: 605919 - DNA, 15 bp, Homo sapiens
cccctggttaggtaa

SEQ ID NO: 605920 - DNA, 15 bp, Homo sapiens
ccctggttaggtaaa

SEQ ID NO: 605921 - DNA, 15 bp, Homo sapiens
cctggttaggtaaat

SEQ ID NO: 605922 - DNA, 15 bp, Homo sapiens
ctggttaggtaaata

SEQ ID NO: 605923 - DNA, 15 bp, Homo sapiens
tggttaggtaaatag

SEQ ID NO: 605924 - DNA, 15 bp, Homo sapiens
ggttaggtaaatagc

SEQ ID NO: 605925 - DNA, 15 bp, Homo sapiens
gttaggtaaatagcc

SEQ ID NO: 605926 - DNA, 15 bp, Homo sapiens
ttaggtaaatagcct

SEQ ID NO: 605927 - DNA, 15 bp, Homo sapiens
taggtaaatagcctt

SEQ ID NO: 605928 - DNA, 15 bp, Homo sapiens
aggtaaatagccttc

SEQ ID NO: 605929 - DNA, 15 bp, Homo sapiens
ggtaaatagccttca

SEQ ID NO: 605930 - DNA, 15 bp, Homo sapiens
gtaaatagccttcat

SEQ ID NO: 605931 - DNA, 15 bp, Homo sapiens
taaatagccttcatt

SEQ ID NO: 605932 - DNA, 15 bp, Homo sapiens
aaatagccttcatta

SEQ ID NO: 605933 - DNA, 15 bp, Homo sapiens
aatagccttcattag

SEQ ID NO: 605934 - DNA, 15 bp, Homo sapiens
atagccttcattagg

SEQ ID NO: 605935 - DNA, 15 bp, Homo sapiens
tagccttcattaggt

SEQ ID NO: 605936 - DNA, 15 bp, Homo sapiens
agccttcattaggtt

SEQ ID NO: 605937 - DNA, 15 bp, Homo sapiens
gccttcattaggtta

SEQ ID NO: 605938 - DNA, 15 bp, Homo sapiens
ccttcattaggttaa

SEQ ID NO: 605939 - DNA, 15 bp, Homo sapiens
cttcattaggttaag

SEQ ID NO: 605940 - DNA, 15 bp, Homo sapiens
ttcattaggttaaga

SEQ ID NO: 605941 - DNA, 15 bp, Homo sapiens
tcattaggttaagaa

SEQ ID NO: 605942 - DNA, 15 bp, Homo sapiens
cattaggttaagaaa

SEQ ID NO: 605943 - DNA, 15 bp, Homo sapiens
attaggttaagaaat

SEQ ID NO: 605944 - DNA, 15 bp, Homo sapiens
ttaggttaagaaatg

SEQ ID NO: 605945 - DNA, 15 bp, Homo sapiens
taggttaagaaatgc

SEQ ID NO: 605946 - DNA, 15 bp, Homo sapiens
aggttaagaaatgcc

SEQ ID NO: 605947 - DNA, 15 bp, Homo sapiens
ggttaagaaatgccc

SEQ ID NO: 605948 - DNA, 15 bp, Homo sapiens
gttaagaaatgcccc

SEQ ID NO: 605949 - DNA, 15 bp, Homo sapiens
ttaagaaatgcccct

SEQ ID NO: 605950 - DNA, 15 bp, Homo sapiens
taagaaatgcccctg

SEQ ID NO: 605951 - DNA, 15 bp, Homo sapiens
aagaaatgcccctgt

SEQ ID NO: 605952 - DNA, 15 bp, Homo sapiens
agaaatgcccctgta

SEQ ID NO: 605953 - DNA, 15 bp, Homo sapiens
gaaatgcccctgtac

SEQ ID NO: 605954 - DNA, 15 bp, Homo sapiens
aaatgcccctgtact

SEQ ID NO: 605955 - DNA, 15 bp, Homo sapiens
aatgcccctgtactt

SEQ ID NO: 605956 - DNA, 15 bp, Homo sapiens
atgcccctgtacttt

SEQ ID NO: 605957 - DNA, 15 bp, Homo sapiens
tgcccctgtactttc

SEQ ID NO: 605958 - DNA, 15 bp, Homo sapiens
gcccctgtactttca

SEQ ID NO: 605959 - DNA, 15 bp, Homo sapiens
cccctgtactttcaa

SEQ ID NO: 605960 - DNA, 15 bp, Homo sapiens
ccctgtactttcaat

SEQ ID NO: 605961 - DNA, 15 bp, Homo sapiens
cctgtactttcaatt

SEQ ID NO: 605962 - DNA, 15 bp, Homo sapiens
ctgtactttcaattt

SEQ ID NO: 605963 - DNA, 15 bp, Homo sapiens
tgtactttcaatttg

SEQ ID NO: 605964 - DNA, 15 bp, Homo sapiens
gtactttcaatttgc

SEQ ID NO: 605965 - DNA, 15 bp, Homo sapiens
tactttcaatttgct

SEQ ID NO: 605966 - DNA, 15 bp, Homo sapiens
actttcaatttgcta

SEQ ID NO: 605967 - DNA, 15 bp, Homo sapiens
ctttcaatttgctac

SEQ ID NO: 605968 - DNA, 15 bp, Homo sapiens
tttcaatttgctaca

SEQ ID NO: 605969 - DNA, 15 bp, Homo sapiens
ttcaatttgctacac

SEQ ID NO: 605970 - DNA, 15 bp, Homo sapiens
tcaatttgctacaca

SEQ ID NO: 605971 - DNA, 15 bp, Homo sapiens
caatttgctacacat

SEQ ID NO: 605972 - DNA, 15 bp, Homo sapiens
aatttgctacacatt

SEQ ID NO: 605973 - DNA, 15 bp, Homo sapiens
atttgctacacattt

SEQ ID NO: 605974 - DNA, 15 bp, Homo sapiens
tttgctacacatttt

SEQ ID NO: 605975 - DNA, 15 bp, Homo sapiens
ttgctacacattttc

SEQ ID NO: 605976 - DNA, 15 bp, Homo sapiens
tgctacacattttca

SEQ ID NO: 605977 - DNA, 15 bp, Homo sapiens
gctacacattttcac

SEQ ID NO: 605978 - DNA, 15 bp, Homo sapiens
ctacacattttcaca

SEQ ID NO: 605979 - DNA, 15 bp, Homo sapiens
tacacattttcacat

SEQ ID NO: 605980 - DNA, 15 bp, Homo sapiens
acacattttcacatg

SEQ ID NO: 605981 - DNA, 15 bp, Homo sapiens
cacattttcacatga

SEQ ID NO: 605982 - DNA, 15 bp, Homo sapiens
acattttcacatgaa

SEQ ID NO: 605983 - DNA, 15 bp, Homo sapiens
cattttcacatgaaa

SEQ ID NO: 605984 - DNA, 15 bp, Homo sapiens
attttcacatgaaag

SEQ ID NO: 605985 - DNA, 15 bp, Homo sapiens
ttttcacatgaaagg

SEQ ID NO: 605986 - DNA, 15 bp, Homo sapiens
tttcacatgaaagga

SEQ ID NO: 605987 - DNA, 15 bp, Homo sapiens
ttcacatgaaaggat

SEQ ID NO: 605988 - DNA, 15 bp, Homo sapiens
tcacatgaaaggata

SEQ ID NO: 605989 - DNA, 15 bp, Homo sapiens
cacatgaaaggatat

SEQ ID NO: 605990 - DNA, 15 bp, Homo sapiens
acatgaaaggatatt

SEQ ID NO: 605991 - DNA, 15 bp, Homo sapiens
catgaaaggatatta

SEQ ID NO: 605992 - DNA, 15 bp, Homo sapiens
atgaaaggatattaa

SEQ ID NO: 605993 - DNA, 15 bp, Homo sapiens
tgaaaggatattaaa

SEQ ID NO: 605994 - DNA, 15 bp, Homo sapiens
gaaaggatattaaaa

SEQ ID NO: 605995 - DNA, 15 bp, Homo sapiens
aaaggatattaaaac

SEQ ID NO: 605996 - DNA, 15 bp, Homo sapiens
aaggatattaaaact

SEQ ID NO: 605997 - DNA, 15 bp, Homo sapiens
aggatattaaaactc

SEQ ID NO: 605998 - DNA, 15 bp, Homo sapiens
ggatattaaaactct

SEQ ID NO: 605999 - DNA, 15 bp, Homo sapiens
gatattaaaactcta

SEQ ID NO: 606000 - DNA, 15 bp, Homo sapiens
atattaaaactctat

SEQ ID NO: 606001 - DNA, 15 bp, Homo sapiens
tattaaaactctatc

SEQ ID NO: 606002 - DNA, 15 bp, Homo sapiens
attaaaactctatcc

SEQ ID NO: 606003 - DNA, 15 bp, Homo sapiens
ttaaaactctatcca

SEQ ID NO: 606004 - DNA, 15 bp, Homo sapiens
taaaactctatccaa

SEQ ID NO: 606005 - DNA, 15 bp, Homo sapiens
aaaactctatccaat

SEQ ID NO: 606006 - DNA, 15 bp, Homo sapiens
aaactctatccaata

SEQ ID NO: 606007 - DNA, 15 bp, Homo sapiens
aactctatccaatag

SEQ ID NO: 606008 - DNA, 15 bp, Homo sapiens
actctatccaatagt

SEQ ID NO: 606009 - DNA, 15 bp, Homo sapiens
ctctatccaatagtt

SEQ ID NO: 606010 - DNA, 15 bp, Homo sapiens
tctatccaatagttt

SEQ ID NO: 606011 - DNA, 15 bp, Homo sapiens
ctatccaatagtttc

SEQ ID NO: 606012 - DNA, 15 bp, Homo sapiens
tatccaatagtttct

SEQ ID NO: 606013 - DNA, 15 bp, Homo sapiens
atccaatagtttctg

SEQ ID NO: 606014 - DNA, 15 bp, Homo sapiens
tccaatagtttctga

SEQ ID NO: 606015 - DNA, 15 bp, Homo sapiens
ccaatagtttctgaa

SEQ ID NO: 606016 - DNA, 15 bp, Homo sapiens
caatagtttctgaat

SEQ ID NO: 606017 - DNA, 15 bp, Homo sapiens
aatagtttctgaatt

SEQ ID NO: 606018 - DNA, 15 bp, Homo sapiens
atagtttctgaattc

SEQ ID NO: 606019 - DNA, 15 bp, Homo sapiens
tagtttctgaattcc

SEQ ID NO: 606020 - DNA, 15 bp, Homo sapiens
agtttctgaattcct

SEQ ID NO: 606021 - DNA, 15 bp, Homo sapiens
gtttctgaattccta

SEQ ID NO: 606022 - DNA, 15 bp, Homo sapiens
tttctgaattcctac

SEQ ID NO: 606023 - DNA, 15 bp, Homo sapiens
ttctgaattcctacc

SEQ ID NO: 606024 - DNA, 15 bp, Homo sapiens
tctgaattcctacca

SEQ ID NO: 606025 - DNA, 15 bp, Homo sapiens
ctgaattcctaccaa

SEQ ID NO: 606026 - DNA, 15 bp, Homo sapiens
tgaattcctaccaag

SEQ ID NO: 606027 - DNA, 15 bp, Homo sapiens
gaattcctaccaagt

SEQ ID NO: 606028 - DNA, 15 bp, Homo sapiens
aattcctaccaagtg

SEQ ID NO: 606029 - DNA, 15 bp, Homo sapiens
attcctaccaagtgc

SEQ ID NO: 606030 - DNA, 15 bp, Homo sapiens
ttcctaccaagtgcc

SEQ ID NO: 606031 - DNA, 15 bp, Homo sapiens
tcctaccaagtgcct

SEQ ID NO: 606032 - DNA, 15 bp, Homo sapiens
cctaccaagtgccta

SEQ ID NO: 606033 - DNA, 15 bp, Homo sapiens
ctaccaagtgcctag

SEQ ID NO: 606034 - DNA, 15 bp, Homo sapiens
taccaagtgcctagt

SEQ ID NO: 606035 - DNA, 15 bp, Homo sapiens
accaagtgcctagtc

SEQ ID NO: 606036 - DNA, 15 bp, Homo sapiens
ccaagtgcctagtcc

SEQ ID NO: 606037 - DNA, 15 bp, Homo sapiens
caagtgcctagtcct

SEQ ID NO: 606038 - DNA, 15 bp, Homo sapiens
aagtgcctagtcctg

SEQ ID NO: 606039 - DNA, 15 bp, Homo sapiens
agtgcctagtcctgc

SEQ ID NO: 606040 - DNA, 15 bp, Homo sapiens
gtgcctagtcctgct

SEQ ID NO: 606041 - DNA, 15 bp, Homo sapiens
tgcctagtcctgctc

SEQ ID NO: 606042 - DNA, 15 bp, Homo sapiens
gcctagtcctgctct

SEQ ID NO: 606043 - DNA, 15 bp, Homo sapiens
cctagtcctgctctg

SEQ ID NO: 606044 - DNA, 15 bp, Homo sapiens
ctagtcctgctctgc

SEQ ID NO: 606045 - DNA, 15 bp, Homo sapiens
tagtcctgctctgcc

SEQ ID NO: 606046 - DNA, 15 bp, Homo sapiens
agtcctgctctgcct

SEQ ID NO: 606047 - DNA, 15 bp, Homo sapiens
gtcctgctctgcctc

SEQ ID NO: 606048 - DNA, 15 bp, Homo sapiens
tcctgctctgcctct

SEQ ID NO: 606049 - DNA, 15 bp, Homo sapiens
cctgctctgcctctg

SEQ ID NO: 606050 - DNA, 15 bp, Homo sapiens
ctgctctgcctctgt

SEQ ID NO: 606051 - DNA, 15 bp, Homo sapiens
tgctctgcctctgtg

SEQ ID NO: 606052 - DNA, 15 bp, Homo sapiens
gctctgcctctgtga

SEQ ID NO: 606053 - DNA, 15 bp, Homo sapiens
ctctgcctctgtgag

SEQ ID NO: 606054 - DNA, 15 bp, Homo sapiens
tctgcctctgtgagg

SEQ ID NO: 606055 - DNA, 15 bp, Homo sapiens
ctgcctctgtgaggc

SEQ ID NO: 606056 - DNA, 15 bp, Homo sapiens
tgcctctgtgaggca

SEQ ID NO: 606057 - DNA, 15 bp, Homo sapiens
gcctctgtgaggcat

SEQ ID NO: 606058 - DNA, 15 bp, Homo sapiens
cctctgtgaggcatt

SEQ ID NO: 606059 - DNA, 15 bp, Homo sapiens
ctctgtgaggcattt

SEQ ID NO: 606060 - DNA, 15 bp, Homo sapiens
tctgtgaggcattta

SEQ ID NO: 606061 - DNA, 15 bp, Homo sapiens
ctgtgaggcatttag

SEQ ID NO: 606062 - DNA, 15 bp, Homo sapiens
tgtgaggcatttagg

SEQ ID NO: 606063 - DNA, 15 bp, Homo sapiens
gtgaggcatttagga

SEQ ID NO: 606064 - DNA, 15 bp, Homo sapiens
tgaggcatttaggat

SEQ ID NO: 606065 - DNA, 15 bp, Homo sapiens
gaggcatttaggatg

SEQ ID NO: 606066 - DNA, 15 bp, Homo sapiens
aggcatttaggatgt

SEQ ID NO: 606067 - DNA, 15 bp, Homo sapiens
ggcatttaggatgtg

SEQ ID NO: 606068 - DNA, 15 bp, Homo sapiens
gcatttaggatgtgg

SEQ ID NO: 606069 - DNA, 15 bp, Homo sapiens
catttaggatgtggg

SEQ ID NO: 606070 - DNA, 15 bp, Homo sapiens
atttaggatgtgggc

SEQ ID NO: 606071 - DNA, 15 bp, Homo sapiens
tttaggatgtgggcc

SEQ ID NO: 606072 - DNA, 15 bp, Homo sapiens
ttaggatgtgggccc

SEQ ID NO: 606073 - DNA, 15 bp, Homo sapiens
taggatgtgggccct

SEQ ID NO: 606074 - DNA, 15 bp, Homo sapiens
aggatgtgggccctg

SEQ ID NO: 606075 - DNA, 15 bp, Homo sapiens
ggatgtgggccctgt

SEQ ID NO: 606076 - DNA, 15 bp, Homo sapiens
gatgtgggccctgtc

SEQ ID NO: 606077 - DNA, 15 bp, Homo sapiens
atgtgggccctgtca

SEQ ID NO: 606078 - DNA, 15 bp, Homo sapiens
tgtgggccctgtcaa

SEQ ID NO: 606079 - DNA, 15 bp, Homo sapiens
gtgggccctgtcaac

SEQ ID NO: 606080 - DNA, 15 bp, Homo sapiens
tgggccctgtcaaca

SEQ ID NO: 606081 - DNA, 15 bp, Homo sapiens
gggccctgtcaacaa

SEQ ID NO: 606082 - DNA, 15 bp, Homo sapiens
ggccctgtcaacaag

SEQ ID NO: 606083 - DNA, 15 bp, Homo sapiens
gccctgtcaacaaga

SEQ ID NO: 606084 - DNA, 15 bp, Homo sapiens
ccctgtcaacaagaa

SEQ ID NO: 606085 - DNA, 15 bp, Homo sapiens
cctgtcaacaagaag

SEQ ID NO: 606086 - DNA, 15 bp, Homo sapiens
ctgtcaacaagaagc

SEQ ID NO: 606087 - DNA, 15 bp, Homo sapiens
tgtcaacaagaagca

SEQ ID NO: 606088 - DNA, 15 bp, Homo sapiens
gtcaacaagaagcag

SEQ ID NO: 606089 - DNA, 15 bp, Homo sapiens
tcaacaagaagcagt

SEQ ID NO: 606090 - DNA, 15 bp, Homo sapiens
caacaagaagcagtg

SEQ ID NO: 606091 - DNA, 15 bp, Homo sapiens
aacaagaagcagtgt

SEQ ID NO: 606092 - DNA, 15 bp, Homo sapiens
acaagaagcagtgtt

SEQ ID NO: 606093 - DNA, 15 bp, Homo sapiens
caagaagcagtgttc

SEQ ID NO: 606094 - DNA, 15 bp, Homo sapiens
aagaagcagtgttcc

SEQ ID NO: 606095 - DNA, 15 bp, Homo sapiens
agaagcagtgttccc

SEQ ID NO: 606096 - DNA, 15 bp, Homo sapiens
gaagcagtgttccca

SEQ ID NO: 606097 - DNA, 15 bp, Homo sapiens
aagcagtgttcccac

SEQ ID NO: 606098 - DNA, 15 bp, Homo sapiens
agcagtgttcccact

SEQ ID NO: 606099 - DNA, 15 bp, Homo sapiens
gcagtgttcccactg

SEQ ID NO: 606100 - DNA, 15 bp, Homo sapiens
cagtgttcccactgg

SEQ ID NO: 606101 - DNA, 15 bp, Homo sapiens
agtgttcccactggg

SEQ ID NO: 606102 - DNA, 15 bp, Homo sapiens
gtgttcccactgggg

SEQ ID NO: 606103 - DNA, 15 bp, Homo sapiens
tgttcccactgggga

SEQ ID NO: 606104 - DNA, 15 bp, Homo sapiens
gttcccactggggaa

SEQ ID NO: 606105 - DNA, 15 bp, Homo sapiens
ttcccactggggaaa

SEQ ID NO: 606106 - DNA, 15 bp, Homo sapiens
tcccactggggaaac

SEQ ID NO: 606107 - DNA, 15 bp, Homo sapiens
cccactggggaaact

SEQ ID NO: 606108 - DNA, 15 bp, Homo sapiens
ccactggggaaactg

SEQ ID NO: 606109 - DNA, 15 bp, Homo sapiens
cactggggaaactga

SEQ ID NO: 606110 - DNA, 15 bp, Homo sapiens
actggggaaactgat

SEQ ID NO: 606111 - DNA, 15 bp, Homo sapiens
ctggggaaactgatc

SEQ ID NO: 606112 - DNA, 15 bp, Homo sapiens
tggggaaactgatcc

SEQ ID NO: 606113 - DNA, 15 bp, Homo sapiens
ggggaaactgatcct

SEQ ID NO: 606114 - DNA, 15 bp, Homo sapiens
gggaaactgatcctc

SEQ ID NO: 606115 - DNA, 15 bp, Homo sapiens
ggaaactgatcctca

SEQ ID NO: 606116 - DNA, 15 bp, Homo sapiens
gaaactgatcctcat

SEQ ID NO: 606117 - DNA, 15 bp, Homo sapiens
aaactgatcctcatg

SEQ ID NO: 606118 - DNA, 15 bp, Homo sapiens
aactgatcctcatgc

SEQ ID NO: 606119 - DNA, 15 bp, Homo sapiens
actgatcctcatgca

SEQ ID NO: 606120 - DNA, 15 bp, Homo sapiens
ctgatcctcatgcat

SEQ ID NO: 606121 - DNA, 15 bp, Homo sapiens
tgatcctcatgcata

SEQ ID NO: 606122 - DNA, 15 bp, Homo sapiens
gatcctcatgcataa

SEQ ID NO: 606123 - DNA, 15 bp, Homo sapiens
atcctcatgcataaa

SEQ ID NO: 606124 - DNA, 15 bp, Homo sapiens
tcctcatgcataaat

SEQ ID NO: 606125 - DNA, 15 bp, Homo sapiens
cctcatgcataaatc

SEQ ID NO: 606126 - DNA, 15 bp, Homo sapiens
ctcatgcataaatct

SEQ ID NO: 606127 - DNA, 15 bp, Homo sapiens
tcatgcataaatctc

SEQ ID NO: 606128 - DNA, 15 bp, Homo sapiens
catgcataaatctct

SEQ ID NO: 606129 - DNA, 15 bp, Homo sapiens
atgcataaatctctt

SEQ ID NO: 606130 - DNA, 15 bp, Homo sapiens
tgcataaatctcttt

SEQ ID NO: 606131 - DNA, 15 bp, Homo sapiens
gcataaatctctttg

SEQ ID NO: 606132 - DNA, 15 bp, Homo sapiens
cataaatctctttgg

SEQ ID NO: 606133 - DNA, 15 bp, Homo sapiens
ataaatctctttggt

SEQ ID NO: 606134 - DNA, 15 bp, Homo sapiens
taaatctctttggtt

SEQ ID NO: 606135 - DNA, 15 bp, Homo sapiens
aaatctctttggtta

SEQ ID NO: 606136 - DNA, 15 bp, Homo sapiens
aatctctttggttat

SEQ ID NO: 606137 - DNA, 15 bp, Homo sapiens
atctctttggttatg

SEQ ID NO: 606138 - DNA, 15 bp, Homo sapiens
tctctttggttatgc

SEQ ID NO: 606139 - DNA, 15 bp, Homo sapiens
ctctttggttatgca

SEQ ID NO: 606140 - DNA, 15 bp, Homo sapiens
tctttggttatgcaa

SEQ ID NO: 606141 - DNA, 15 bp, Homo sapiens
ctttggttatgcaag

SEQ ID NO: 606142 - DNA, 15 bp, Homo sapiens
tttggttatgcaaga

SEQ ID NO: 606143 - DNA, 15 bp, Homo sapiens
ttggttatgcaagac

SEQ ID NO: 606144 - DNA, 15 bp, Homo sapiens
tggttatgcaagact

SEQ ID NO: 606145 - DNA, 15 bp, Homo sapiens
ggttatgcaagactt

SEQ ID NO: 606146 - DNA, 15 bp, Homo sapiens
gttatgcaagacttt

SEQ ID NO: 606147 - DNA, 15 bp, Homo sapiens
ttatgcaagactttg

SEQ ID NO: 606148 - DNA, 15 bp, Homo sapiens
tatgcaagactttgt

SEQ ID NO: 606149 - DNA, 15 bp, Homo sapiens
atgcaagactttgtg

SEQ ID NO: 606150 - DNA, 15 bp, Homo sapiens
tgcaagactttgtgt

SEQ ID NO: 606151 - DNA, 15 bp, Homo sapiens
gcaagactttgtgtc

SEQ ID NO: 606152 - DNA, 15 bp, Homo sapiens
caagactttgtgtca

SEQ ID NO: 606153 - DNA, 15 bp, Homo sapiens
aagactttgtgtcaa

SEQ ID NO: 606154 - DNA, 15 bp, Homo sapiens
agactttgtgtcaaa

SEQ ID NO: 606155 - DNA, 15 bp, Homo sapiens
gactttgtgtcaaag

SEQ ID NO: 606156 - DNA, 15 bp, Homo sapiens
actttgtgtcaaaga

SEQ ID NO: 606157 - DNA, 15 bp, Homo sapiens
ctttgtgtcaaagaa

SEQ ID NO: 606158 - DNA, 15 bp, Homo sapiens
tttgtgtcaaagaag

SEQ ID NO: 606159 - DNA, 15 bp, Homo sapiens
ttgtgtcaaagaaga

SEQ ID NO: 606160 - DNA, 15 bp, Homo sapiens
tgtgtcaaagaagat

SEQ ID NO: 606161 - DNA, 15 bp, Homo sapiens
gtgtcaaagaagatg

SEQ ID NO: 606162 - DNA, 15 bp, Homo sapiens
tgtcaaagaagatgc

SEQ ID NO: 606163 - DNA, 15 bp, Homo sapiens
gtcaaagaagatgct

SEQ ID NO: 606164 - DNA, 15 bp, Homo sapiens
tcaaagaagatgctg

SEQ ID NO: 606165 - DNA, 15 bp, Homo sapiens
caaagaagatgctgc

SEQ ID NO: 606166 - DNA, 15 bp, Homo sapiens
aaagaagatgctgca

SEQ ID NO: 606167 - DNA, 15 bp, Homo sapiens
aagaagatgctgcag

SEQ ID NO: 606168 - DNA, 15 bp, Homo sapiens
agaagatgctgcaga

SEQ ID NO: 606169 - DNA, 15 bp, Homo sapiens
gaagatgctgcagag

SEQ ID NO: 606170 - DNA, 15 bp, Homo sapiens
aagatgctgcagaga

SEQ ID NO: 606171 - DNA, 15 bp, Homo sapiens
agatgctgcagagag

SEQ ID NO: 606172 - DNA, 15 bp, Homo sapiens
gatgctgcagagaga

SEQ ID NO: 606173 - DNA, 15 bp, Homo sapiens
atgctgcagagagaa

SEQ ID NO: 606174 - DNA, 15 bp, Homo sapiens
tgctgcagagagaag

SEQ ID NO: 606175 - DNA, 15 bp, Homo sapiens
gctgcagagagaagg

SEQ ID NO: 606176 - DNA, 15 bp, Homo sapiens
ctgcagagagaagga

SEQ ID NO: 606177 - DNA, 15 bp, Homo sapiens
tgcagagagaaggat

SEQ ID NO: 606178 - DNA, 15 bp, Homo sapiens
gcagagagaaggata

SEQ ID NO: 606179 - DNA, 15 bp, Homo sapiens
cagagagaaggatag

SEQ ID NO: 606180 - DNA, 15 bp, Homo sapiens
agagagaaggataga

SEQ ID NO: 606181 - DNA, 15 bp, Homo sapiens
gagagaaggatagaa

SEQ ID NO: 606182 - DNA, 15 bp, Homo sapiens
agagaaggatagaat

SEQ ID NO: 606183 - DNA, 15 bp, Homo sapiens
gagaaggatagaatg

SEQ ID NO: 606184 - DNA, 15 bp, Homo sapiens
agaaggatagaatgt

SEQ ID NO: 606185 - DNA, 15 bp, Homo sapiens
gaaggatagaatgtg

SEQ ID NO: 606186 - DNA, 15 bp, Homo sapiens
aaggatagaatgtgg

SEQ ID NO: 606187 - DNA, 15 bp, Homo sapiens
aggatagaatgtgga

SEQ ID NO: 606188 - DNA, 15 bp, Homo sapiens
ggatagaatgtggat

SEQ ID NO: 606189 - DNA, 15 bp, Homo sapiens
gatagaatgtggatg

SEQ ID NO: 606190 - DNA, 15 bp, Homo sapiens
atagaatgtggatgg

SEQ ID NO: 606191 - DNA, 15 bp, Homo sapiens
tagaatgtggatggg

SEQ ID NO: 606192 - DNA, 15 bp, Homo sapiens
agaatgtggatggga

SEQ ID NO: 606193 - DNA, 15 bp, Homo sapiens
gaatgtggatgggag

SEQ ID NO: 606194 - DNA, 15 bp, Homo sapiens
aatgtggatgggagg

SEQ ID NO: 606195 - DNA, 15 bp, Homo sapiens
atgtggatgggagga

SEQ ID NO: 606196 - DNA, 15 bp, Homo sapiens
tgtggatgggaggag

SEQ ID NO: 606197 - DNA, 15 bp, Homo sapiens
gtggatgggaggagg

SEQ ID NO: 606198 - DNA, 15 bp, Homo sapiens
tggatgggaggaggg

SEQ ID NO: 606199 - DNA, 15 bp, Homo sapiens
ggatgggaggagggg

SEQ ID NO: 606200 - DNA, 15 bp, Homo sapiens
gatgggaggaggggg

SEQ ID NO: 606201 - DNA, 15 bp, Homo sapiens
atgggaggagggggc

SEQ ID NO: 606202 - DNA, 15 bp, Homo sapiens
tgggaggagggggca

SEQ ID NO: 606203 - DNA, 15 bp, Homo sapiens
gggaggagggggcag

SEQ ID NO: 606204 - DNA, 15 bp, Homo sapiens
ggaggagggggcagt

SEQ ID NO: 606205 - DNA, 15 bp, Homo sapiens
gaggagggggcagtg

SEQ ID NO: 606206 - DNA, 15 bp, Homo sapiens
aggagggggcagtga

SEQ ID NO: 606207 - DNA, 15 bp, Homo sapiens
ggagggggcagtgac

SEQ ID NO: 606208 - DNA, 15 bp, Homo sapiens
gagggggcagtgact

SEQ ID NO: 606209 - DNA, 15 bp, Homo sapiens
agggggcagtgacta

SEQ ID NO: 606210 - DNA, 15 bp, Homo sapiens
gggggcagtgactac

SEQ ID NO: 606211 - DNA, 15 bp, Homo sapiens
ggggcagtgactaca

SEQ ID NO: 606212 - DNA, 15 bp, Homo sapiens
gggcagtgactacat

SEQ ID NO: 606213 - DNA, 15 bp, Homo sapiens
ggcagtgactacata

SEQ ID NO: 606214 - DNA, 15 bp, Homo sapiens
gcagtgactacatag

SEQ ID NO: 606215 - DNA, 15 bp, Homo sapiens
cagtgactacatagc

SEQ ID NO: 606216 - DNA, 15 bp, Homo sapiens
agtgactacatagcg

SEQ ID NO: 606217 - DNA, 15 bp, Homo sapiens
gtgactacatagcgg

SEQ ID NO: 606218 - DNA, 15 bp, Homo sapiens
tgactacatagcgga

SEQ ID NO: 606219 - DNA, 15 bp, Homo sapiens
gactacatagcggaa

SEQ ID NO: 606220 - DNA, 15 bp, Homo sapiens
actacatagcggaag

SEQ ID NO: 606221 - DNA, 15 bp, Homo sapiens
ctacatagcggaagc

SEQ ID NO: 606222 - DNA, 15 bp, Homo sapiens
tacatagcggaagcc

SEQ ID NO: 606223 - DNA, 15 bp, Homo sapiens
acatagcggaagcct

SEQ ID NO: 606224 - DNA, 15 bp, Homo sapiens
catagcggaagcctt

SEQ ID NO: 606225 - DNA, 15 bp, Homo sapiens
atagcggaagccttc

SEQ ID NO: 606226 - DNA, 15 bp, Homo sapiens
tagcggaagccttca

SEQ ID NO: 606227 - DNA, 15 bp, Homo sapiens
agcggaagccttcat

SEQ ID NO: 606228 - DNA, 15 bp, Homo sapiens
gcggaagccttcatg

SEQ ID NO: 606229 - DNA, 15 bp, Homo sapiens
cggaagccttcatgg

SEQ ID NO: 606230 - DNA, 15 bp, Homo sapiens
ggaagccttcatgga

SEQ ID NO: 606231 - DNA, 15 bp, Homo sapiens
gaagccttcatggag

SEQ ID NO: 606232 - DNA, 15 bp, Homo sapiens
aagccttcatggaga

SEQ ID NO: 606233 - DNA, 15 bp, Homo sapiens
agccttcatggagag

SEQ ID NO: 606234 - DNA, 15 bp, Homo sapiens
gccttcatggagagg

SEQ ID NO: 606235 - DNA, 15 bp, Homo sapiens
ccttcatggagaggc

SEQ ID NO: 606236 - DNA, 15 bp, Homo sapiens
cttcatggagaggca

SEQ ID NO: 606237 - DNA, 15 bp, Homo sapiens
ttcatggagaggcag

SEQ ID NO: 606238 - DNA, 15 bp, Homo sapiens
tcatggagaggcagg

SEQ ID NO: 606239 - DNA, 15 bp, Homo sapiens
catggagaggcagga

SEQ ID NO: 606240 - DNA, 15 bp, Homo sapiens
atggagaggcaggat

SEQ ID NO: 606241 - DNA, 15 bp, Homo sapiens
tggagaggcaggatt

SEQ ID NO: 606242 - DNA, 15 bp, Homo sapiens
ggagaggcaggattt

SEQ ID NO: 606243 - DNA, 15 bp, Homo sapiens
gagaggcaggatttg

SEQ ID NO: 606244 - DNA, 15 bp, Homo sapiens
agaggcaggatttga

SEQ ID NO: 606245 - DNA, 15 bp, Homo sapiens
gaggcaggatttgag

SEQ ID NO: 606246 - DNA, 15 bp, Homo sapiens
aggcaggatttgagt

SEQ ID NO: 606247 - DNA, 15 bp, Homo sapiens
ggcaggatttgagtt

SEQ ID NO: 606248 - DNA, 15 bp, Homo sapiens
gcaggatttgagttg

SEQ ID NO: 606249 - DNA, 15 bp, Homo sapiens
caggatttgagttgg

SEQ ID NO: 606250 - DNA, 15 bp, Homo sapiens
aggatttgagttgga

SEQ ID NO: 606251 - DNA, 15 bp, Homo sapiens
ggatttgagttggac

SEQ ID NO: 606252 - DNA, 15 bp, Homo sapiens
gatttgagttggaca

SEQ ID NO: 606253 - DNA, 15 bp, Homo sapiens
atttgagttggacag

SEQ ID NO: 606254 - DNA, 15 bp, Homo sapiens
tttgagttggacaga

SEQ ID NO: 606255 - DNA, 15 bp, Homo sapiens
ttgagttggacagaa

SEQ ID NO: 606256 - DNA, 15 bp, Homo sapiens
tgagttggacagaag

SEQ ID NO: 606257 - DNA, 15 bp, Homo sapiens
gagttggacagaagg

SEQ ID NO: 606258 - DNA, 15 bp, Homo sapiens
agttggacagaagga

SEQ ID NO: 606259 - DNA, 15 bp, Homo sapiens
gttggacagaaggat

SEQ ID NO: 606260 - DNA, 15 bp, Homo sapiens
ttggacagaaggatt

SEQ ID NO: 606261 - DNA, 15 bp, Homo sapiens
tggacagaaggattt

SEQ ID NO: 606262 - DNA, 15 bp, Homo sapiens
ggacagaaggatttt

SEQ ID NO: 606263 - DNA, 15 bp, Homo sapiens
gacagaaggattttc

SEQ ID NO: 606264 - DNA, 15 bp, Homo sapiens
acagaaggattttca

SEQ ID NO: 606265 - DNA, 15 bp, Homo sapiens
cagaaggattttcac

SEQ ID NO: 606266 - DNA, 15 bp, Homo sapiens
agaaggattttcacg

SEQ ID NO: 606267 - DNA, 15 bp, Homo sapiens
gaaggattttcacga

SEQ ID NO: 606268 - DNA, 15 bp, Homo sapiens
aaggattttcacgat

SEQ ID NO: 606269 - DNA, 15 bp, Homo sapiens
aggattttcacgatg

SEQ ID NO: 606270 - DNA, 15 bp, Homo sapiens
ggattttcacgatga

SEQ ID NO: 606271 - DNA, 15 bp, Homo sapiens
gattttcacgatgat

SEQ ID NO: 606272 - DNA, 15 bp, Homo sapiens
attttcacgatgatg

SEQ ID NO: 606273 - DNA, 15 bp, Homo sapiens
ttttcacgatgatga

SEQ ID NO: 606274 - DNA, 15 bp, Homo sapiens
tttcacgatgatgag

SEQ ID NO: 606275 - DNA, 15 bp, Homo sapiens
ttcacgatgatgagg

SEQ ID NO: 606276 - DNA, 15 bp, Homo sapiens
tcacgatgatgagga

SEQ ID NO: 606277 - DNA, 15 bp, Homo sapiens
cacgatgatgaggaa

SEQ ID NO: 606278 - DNA, 15 bp, Homo sapiens
acgatgatgaggaag

SEQ ID NO: 606279 - DNA, 15 bp, Homo sapiens
cgatgatgaggaaga

SEQ ID NO: 606280 - DNA, 15 bp, Homo sapiens
gatgatgaggaagaa

SEQ ID NO: 606281 - DNA, 15 bp, Homo sapiens
atgatgaggaagaag

SEQ ID NO: 606282 - DNA, 15 bp, Homo sapiens
tgatgaggaagaagg

SEQ ID NO: 606283 - DNA, 15 bp, Homo sapiens
gatgaggaagaaggg

SEQ ID NO: 606284 - DNA, 15 bp, Homo sapiens
atgaggaagaagggt

SEQ ID NO: 606285 - DNA, 15 bp, Homo sapiens
tgaggaagaagggta

SEQ ID NO: 606286 - DNA, 15 bp, Homo sapiens
gaggaagaagggtat

SEQ ID NO: 606287 - DNA, 15 bp, Homo sapiens
aggaagaagggtatt

SEQ ID NO: 606288 - DNA, 15 bp, Homo sapiens
ggaagaagggtattc

SEQ ID NO: 606289 - DNA, 15 bp, Homo sapiens
gaagaagggtattca

SEQ ID NO: 606290 - DNA, 15 bp, Homo sapiens
aagaagggtattcat

SEQ ID NO: 606291 - DNA, 15 bp, Homo sapiens
agaagggtattcata

SEQ ID NO: 606292 - DNA, 15 bp, Homo sapiens
gaagggtattcatag

SEQ ID NO: 606293 - DNA, 15 bp, Homo sapiens
aagggtattcataga

SEQ ID NO: 606294 - DNA, 15 bp, Homo sapiens
agggtattcatagaa

SEQ ID NO: 606295 - DNA, 15 bp, Homo sapiens
gggtattcatagaag

SEQ ID NO: 606296 - DNA, 15 bp, Homo sapiens
ggtattcatagaaga

SEQ ID NO: 606297 - DNA, 15 bp, Homo sapiens
gtattcatagaagaa

SEQ ID NO: 606298 - DNA, 15 bp, Homo sapiens
tattcatagaagaag

SEQ ID NO: 606299 - DNA, 15 bp, Homo sapiens
attcatagaagaaga

SEQ ID NO: 606300 - DNA, 15 bp, Homo sapiens
ttcatagaagaagac

SEQ ID NO: 606301 - DNA, 15 bp, Homo sapiens
tcatagaagaagaca

SEQ ID NO: 606302 - DNA, 15 bp, Homo sapiens
catagaagaagacac

SEQ ID NO: 606303 - DNA, 15 bp, Homo sapiens
atagaagaagacaca

SEQ ID NO: 606304 - DNA, 15 bp, Homo sapiens
tagaagaagacacac

SEQ ID NO: 606305 - DNA, 15 bp, Homo sapiens
agaagaagacacacg

SEQ ID NO: 606306 - DNA, 15 bp, Homo sapiens
gaagaagacacacgc

SEQ ID NO: 606307 - DNA, 15 bp, Homo sapiens
aagaagacacacgca

SEQ ID NO: 606308 - DNA, 15 bp, Homo sapiens
agaagacacacgcac

SEQ ID NO: 606309 - DNA, 15 bp, Homo sapiens
gaagacacacgcaca

SEQ ID NO: 606310 - DNA, 15 bp, Homo sapiens
aagacacacgcacag

SEQ ID NO: 606311 - DNA, 15 bp, Homo sapiens
agacacacgcacagt

SEQ ID NO: 606312 - DNA, 15 bp, Homo sapiens
gacacacgcacagtc

SEQ ID NO: 606313 - DNA, 15 bp, Homo sapiens
acacacgcacagtcc

SEQ ID NO: 606314 - DNA, 15 bp, Homo sapiens
cacacgcacagtccc

SEQ ID NO: 606315 - DNA, 15 bp, Homo sapiens
acacgcacagtccca

SEQ ID NO: 606316 - DNA, 15 bp, Homo sapiens
cacgcacagtcccag

SEQ ID NO: 606317 - DNA, 15 bp, Homo sapiens
acgcacagtcccagg

SEQ ID NO: 606318 - DNA, 15 bp, Homo sapiens
cgcacagtcccaggg

SEQ ID NO: 606319 - DNA, 15 bp, Homo sapiens
gcacagtcccagggc

SEQ ID NO: 606320 - DNA, 15 bp, Homo sapiens
cacagtcccagggct

SEQ ID NO: 606321 - DNA, 15 bp, Homo sapiens
acagtcccagggctg

SEQ ID NO: 606322 - DNA, 15 bp, Homo sapiens
cagtcccagggctgg

SEQ ID NO: 606323 - DNA, 15 bp, Homo sapiens
agtcccagggctgga

SEQ ID NO: 606324 - DNA, 15 bp, Homo sapiens
gtcccagggctggaa

SEQ ID NO: 606325 - DNA, 15 bp, Homo sapiens
tcccagggctggaaa

SEQ ID NO: 606326 - DNA, 15 bp, Homo sapiens
cccagggctggaaac

SEQ ID NO: 606327 - DNA, 15 bp, Homo sapiens
ccagggctggaaaca

SEQ ID NO: 606328 - DNA, 15 bp, Homo sapiens
cagggctggaaacat

SEQ ID NO: 606329 - DNA, 15 bp, Homo sapiens
agggctggaaacatg

SEQ ID NO: 606330 - DNA, 15 bp, Homo sapiens
gggctggaaacatgc

SEQ ID NO: 606331 - DNA, 15 bp, Homo sapiens
ggctggaaacatgcc

SEQ ID NO: 606332 - DNA, 15 bp, Homo sapiens
gctggaaacatgcct

SEQ ID NO: 606333 - DNA, 15 bp, Homo sapiens
ctggaaacatgccta

SEQ ID NO: 606334 - DNA, 15 bp, Homo sapiens
tggaaacatgcctaa

SEQ ID NO: 606335 - DNA, 15 bp, Homo sapiens
ggaaacatgcctaat

SEQ ID NO: 606336 - DNA, 15 bp, Homo sapiens
gaaacatgcctaatg

SEQ ID NO: 606337 - DNA, 15 bp, Homo sapiens
aaacatgcctaatgt

SEQ ID NO: 606338 - DNA, 15 bp, Homo sapiens
aacatgcctaatgtg

SEQ ID NO: 606339 - DNA, 15 bp, Homo sapiens
acatgcctaatgtgt

SEQ ID NO: 606340 - DNA, 15 bp, Homo sapiens
catgcctaatgtgtg

SEQ ID NO: 606341 - DNA, 15 bp, Homo sapiens
atgcctaatgtgtgt

SEQ ID NO: 606342 - DNA, 15 bp, Homo sapiens
tgcctaatgtgtgtg

SEQ ID NO: 606343 - DNA, 15 bp, Homo sapiens
gcctaatgtgtgtgt

SEQ ID NO: 606344 - DNA, 15 bp, Homo sapiens
cctaatgtgtgtgtt

SEQ ID NO: 606345 - DNA, 15 bp, Homo sapiens
ctaatgtgtgtgtta

SEQ ID NO: 606346 - DNA, 15 bp, Homo sapiens
taatgtgtgtgttag

SEQ ID NO: 606347 - DNA, 15 bp, Homo sapiens
aatgtgtgtgttagc

SEQ ID NO: 606348 - DNA, 15 bp, Homo sapiens
atgtgtgtgttagct

SEQ ID NO: 606349 - DNA, 15 bp, Homo sapiens
tgtgtgtgttagctt

SEQ ID NO: 606350 - DNA, 15 bp, Homo sapiens
gtgtgtgttagcttg

SEQ ID NO: 606351 - DNA, 15 bp, Homo sapiens
tgtgtgttagcttga

SEQ ID NO: 606352 - DNA, 15 bp, Homo sapiens
gtgtgttagcttgag

SEQ ID NO: 606353 - DNA, 15 bp, Homo sapiens
tgtgttagcttgaga

SEQ ID NO: 606354 - DNA, 15 bp, Homo sapiens
gtgttagcttgagag

SEQ ID NO: 606355 - DNA, 15 bp, Homo sapiens
tgttagcttgagagc

SEQ ID NO: 606356 - DNA, 15 bp, Homo sapiens
gttagcttgagagcc

SEQ ID NO: 606357 - DNA, 15 bp, Homo sapiens
ttagcttgagagcct

SEQ ID NO: 606358 - DNA, 15 bp, Homo sapiens
tagcttgagagcctg

SEQ ID NO: 606359 - DNA, 15 bp, Homo sapiens
agcttgagagcctgg

SEQ ID NO: 606360 - DNA, 15 bp, Homo sapiens
gcttgagagcctggg

SEQ ID NO: 606361 - DNA, 15 bp, Homo sapiens
cttgagagcctgggg

SEQ ID NO: 606362 - DNA, 15 bp, Homo sapiens
ttgagagcctggggt

SEQ ID NO: 606363 - DNA, 15 bp, Homo sapiens
tgagagcctggggtt

SEQ ID NO: 606364 - DNA, 15 bp, Homo sapiens
gagagcctggggttg

SEQ ID NO: 606365 - DNA, 15 bp, Homo sapiens
agagcctggggttgt

SEQ ID NO: 606366 - DNA, 15 bp, Homo sapiens
gagcctggggttgta

SEQ ID NO: 606367 - DNA, 15 bp, Homo sapiens
agcctggggttgtag

SEQ ID NO: 606368 - DNA, 15 bp, Homo sapiens
gcctggggttgtaga

SEQ ID NO: 606369 - DNA, 15 bp, Homo sapiens
cctggggttgtagag

SEQ ID NO: 606370 - DNA, 15 bp, Homo sapiens
ctggggttgtagagc

SEQ ID NO: 606371 - DNA, 15 bp, Homo sapiens
tggggttgtagagca

SEQ ID NO: 606372 - DNA, 15 bp, Homo sapiens
ggggttgtagagcag

SEQ ID NO: 606373 - DNA, 15 bp, Homo sapiens
gggttgtagagcaga

SEQ ID NO: 606374 - DNA, 15 bp, Homo sapiens
ggttgtagagcagaa

SEQ ID NO: 606375 - DNA, 15 bp, Homo sapiens
gttgtagagcagaac

SEQ ID NO: 606376 - DNA, 15 bp, Homo sapiens
ttgtagagcagaact

SEQ ID NO: 606377 - DNA, 15 bp, Homo sapiens
tgtagagcagaactg

SEQ ID NO: 606378 - DNA, 15 bp, Homo sapiens
gtagagcagaactgt

SEQ ID NO: 606379 - DNA, 15 bp, Homo sapiens
tagagcagaactgtt

SEQ ID NO: 606380 - DNA, 15 bp, Homo sapiens
agagcagaactgttg

SEQ ID NO: 606381 - DNA, 15 bp, Homo sapiens
gagcagaactgttgg

SEQ ID NO: 606382 - DNA, 15 bp, Homo sapiens
agcagaactgttggc

SEQ ID NO: 606383 - DNA, 15 bp, Homo sapiens
gcagaactgttggct

SEQ ID NO: 606384 - DNA, 15 bp, Homo sapiens
cagaactgttggctg

SEQ ID NO: 606385 - DNA, 15 bp, Homo sapiens
agaactgttggctgc

SEQ ID NO: 606386 - DNA, 15 bp, Homo sapiens
gaactgttggctgcc

SEQ ID NO: 606387 - DNA, 15 bp, Homo sapiens
aactgttggctgcct

SEQ ID NO: 606388 - DNA, 15 bp, Homo sapiens
actgttggctgcctt

SEQ ID NO: 606389 - DNA, 15 bp, Homo sapiens
ctgttggctgccttg

SEQ ID NO: 606390 - DNA, 15 bp, Homo sapiens
tgttggctgccttgc

SEQ ID NO: 606391 - DNA, 15 bp, Homo sapiens
gttggctgccttgcc

SEQ ID NO: 606392 - DNA, 15 bp, Homo sapiens
ttggctgccttgcca

SEQ ID NO: 606393 - DNA, 15 bp, Homo sapiens
tggctgccttgccag

SEQ ID NO: 606394 - DNA, 15 bp, Homo sapiens
ggctgccttgccagg

SEQ ID NO: 606395 - DNA, 15 bp, Homo sapiens
gctgccttgccaggg

SEQ ID NO: 606396 - DNA, 15 bp, Homo sapiens
ctgccttgccaggga

SEQ ID NO: 606397 - DNA, 15 bp, Homo sapiens
tgccttgccagggaa

SEQ ID NO: 606398 - DNA, 15 bp, Homo sapiens
gccttgccagggaaa

SEQ ID NO: 606399 - DNA, 15 bp, Homo sapiens
ccttgccagggaaag

SEQ ID NO: 606400 - DNA, 15 bp, Homo sapiens
cttgccagggaaagg

SEQ ID NO: 606401 - DNA, 15 bp, Homo sapiens
ttgccagggaaaggc

SEQ ID NO: 606402 - DNA, 15 bp, Homo sapiens
tgccagggaaaggcc

SEQ ID NO: 606403 - DNA, 15 bp, Homo sapiens
gccagggaaaggccc

SEQ ID NO: 606404 - DNA, 15 bp, Homo sapiens
ccagggaaaggccct

SEQ ID NO: 606405 - DNA, 15 bp, Homo sapiens
cagggaaaggccctg

SEQ ID NO: 606406 - DNA, 15 bp, Homo sapiens
agggaaaggccctgc

SEQ ID NO: 606407 - DNA, 15 bp, Homo sapiens
gggaaaggccctgct

SEQ ID NO: 606408 - DNA, 15 bp, Homo sapiens
ggaaaggccctgctt

SEQ ID NO: 606409 - DNA, 15 bp, Homo sapiens
gaaaggccctgcttt

SEQ ID NO: 606410 - DNA, 15 bp, Homo sapiens
aaaggccctgctttc

SEQ ID NO: 606411 - DNA, 15 bp, Homo sapiens
aaggccctgctttct

SEQ ID NO: 606412 - DNA, 15 bp, Homo sapiens
aggccctgctttctc

SEQ ID NO: 606413 - DNA, 15 bp, Homo sapiens
ggccctgctttctcc

SEQ ID NO: 606414 - DNA, 15 bp, Homo sapiens
gccctgctttctccc

SEQ ID NO: 606415 - DNA, 15 bp, Homo sapiens
ccctgctttctccct

SEQ ID NO: 606416 - DNA, 15 bp, Homo sapiens
cctgctttctccctc

SEQ ID NO: 606417 - DNA, 15 bp, Homo sapiens
ctgctttctccctca

SEQ ID NO: 606418 - DNA, 15 bp, Homo sapiens
tgctttctccctcag

SEQ ID NO: 606419 - DNA, 15 bp, Homo sapiens
gctttctccctcaga

SEQ ID NO: 606420 - DNA, 15 bp, Homo sapiens
ctttctccctcagac

SEQ ID NO: 606421 - DNA, 15 bp, Homo sapiens
tttctccctcagaca

SEQ ID NO: 606422 - DNA, 15 bp, Homo sapiens
ttctccctcagacac

SEQ ID NO: 606423 - DNA, 15 bp, Homo sapiens
tctccctcagacacc

SEQ ID NO: 606424 - DNA, 15 bp, Homo sapiens
ctccctcagacacct

SEQ ID NO: 606425 - DNA, 15 bp, Homo sapiens
tccctcagacacctg

SEQ ID NO: 606426 - DNA, 15 bp, Homo sapiens
ccctcagacacctgc

SEQ ID NO: 606427 - DNA, 15 bp, Homo sapiens
cctcagacacctgca

SEQ ID NO: 606428 - DNA, 15 bp, Homo sapiens
ctcagacacctgcac

SEQ ID NO: 606429 - DNA, 15 bp, Homo sapiens
tcagacacctgcact

SEQ ID NO: 606430 - DNA, 15 bp, Homo sapiens
cagacacctgcactg

SEQ ID NO: 606431 - DNA, 15 bp, Homo sapiens
agacacctgcactgc

SEQ ID NO: 606432 - DNA, 15 bp, Homo sapiens
gacacctgcactgca

SEQ ID NO: 606433 - DNA, 15 bp, Homo sapiens
acacctgcactgcac

SEQ ID NO: 606434 - DNA, 15 bp, Homo sapiens
cacctgcactgcacc

SEQ ID NO: 606435 - DNA, 15 bp, Homo sapiens
acctgcactgcacca

SEQ ID NO: 606436 - DNA, 15 bp, Homo sapiens
cctgcactgcaccag

SEQ ID NO: 606437 - DNA, 15 bp, Homo sapiens
ctgcactgcaccagg

SEQ ID NO: 606438 - DNA, 15 bp, Homo sapiens
tgcactgcaccagga

SEQ ID NO: 606439 - DNA, 15 bp, Homo sapiens
gcactgcaccaggaa

SEQ ID NO: 606440 - DNA, 15 bp, Homo sapiens
cactgcaccaggaac

SEQ ID NO: 606441 - DNA, 15 bp, Homo sapiens
actgcaccaggaact

SEQ ID NO: 606442 - DNA, 15 bp, Homo sapiens
ctgcaccaggaacta

SEQ ID NO: 606443 - DNA, 15 bp, Homo sapiens
tgcaccaggaactac

SEQ ID NO: 606444 - DNA, 15 bp, Homo sapiens
gcaccaggaactaca

SEQ ID NO: 606445 - DNA, 15 bp, Homo sapiens
caccaggaactacat

SEQ ID NO: 606446 - DNA, 15 bp, Homo sapiens
accaggaactacatc

SEQ ID NO: 606447 - DNA, 15 bp, Homo sapiens
ccaggaactacatcc

SEQ ID NO: 606448 - DNA, 15 bp, Homo sapiens
caggaactacatcca

SEQ ID NO: 606449 - DNA, 15 bp, Homo sapiens
aggaactacatccac

SEQ ID NO: 606450 - DNA, 15 bp, Homo sapiens
ggaactacatccacc

SEQ ID NO: 606451 - DNA, 15 bp, Homo sapiens
gaactacatccacct

SEQ ID NO: 606452 - DNA, 15 bp, Homo sapiens
aactacatccacctg

SEQ ID NO: 606453 - DNA, 15 bp, Homo sapiens
actacatccacctga

SEQ ID NO: 606454 - DNA, 15 bp, Homo sapiens
ctacatccacctgaa

SEQ ID NO: 606455 - DNA, 15 bp, Homo sapiens
tacatccacctgaac

SEQ ID NO: 606456 - DNA, 15 bp, Homo sapiens
acatccacctgaacc

SEQ ID NO: 606457 - DNA, 15 bp, Homo sapiens
catccacctgaacct

SEQ ID NO: 606458 - DNA, 15 bp, Homo sapiens
atccacctgaacctg

SEQ ID NO: 606459 - DNA, 15 bp, Homo sapiens
tccacctgaacctgt

SEQ ID NO: 606460 - DNA, 15 bp, Homo sapiens
ccacctgaacctgtt

SEQ ID NO: 606461 - DNA, 15 bp, Homo sapiens
cacctgaacctgttt

SEQ ID NO: 606462 - DNA, 15 bp, Homo sapiens
acctgaacctgtttg

SEQ ID NO: 606463 - DNA, 15 bp, Homo sapiens
cctgaacctgtttgc

SEQ ID NO: 606464 - DNA, 15 bp, Homo sapiens
ctgaacctgtttgca

SEQ ID NO: 606465 - DNA, 15 bp, Homo sapiens
tgaacctgtttgcat

SEQ ID NO: 606466 - DNA, 15 bp, Homo sapiens
gaacctgtttgcatc

SEQ ID NO: 606467 - DNA, 15 bp, Homo sapiens
aacctgtttgcatcc

SEQ ID NO: 606468 - DNA, 15 bp, Homo sapiens
acctgtttgcatcct

SEQ ID NO: 606469 - DNA, 15 bp, Homo sapiens
cctgtttgcatcctt

SEQ ID NO: 606470 - DNA, 15 bp, Homo sapiens
ctgtttgcatccttc

SEQ ID NO: 606471 - DNA, 15 bp, Homo sapiens
tgtttgcatccttca

SEQ ID NO: 606472 - DNA, 15 bp, Homo sapiens
gtttgcatccttcat

SEQ ID NO: 606473 - DNA, 15 bp, Homo sapiens
tttgcatccttcatc

SEQ ID NO: 606474 - DNA, 15 bp, Homo sapiens
ttgcatccttcatcc

SEQ ID NO: 606475 - DNA, 15 bp, Homo sapiens
tgcatccttcatcct

SEQ ID NO: 606476 - DNA, 15 bp, Homo sapiens
gcatccttcatcctg

SEQ ID NO: 606477 - DNA, 15 bp, Homo sapiens
catccttcatcctgc

SEQ ID NO: 606478 - DNA, 15 bp, Homo sapiens
atccttcatcctgcg

SEQ ID NO: 606479 - DNA, 15 bp, Homo sapiens
tccttcatcctgcga

SEQ ID NO: 606480 - DNA, 15 bp, Homo sapiens
ccttcatcctgcgag

SEQ ID NO: 606481 - DNA, 15 bp, Homo sapiens
cttcatcctgcgagc

SEQ ID NO: 606482 - DNA, 15 bp, Homo sapiens
ttcatcctgcgagca

SEQ ID NO: 606483 - DNA, 15 bp, Homo sapiens
tcatcctgcgagcat

SEQ ID NO: 606484 - DNA, 15 bp, Homo sapiens
catcctgcgagcatt

SEQ ID NO: 606485 - DNA, 15 bp, Homo sapiens
atcctgcgagcattg

SEQ ID NO: 606486 - DNA, 15 bp, Homo sapiens
tcctgcgagcattgt

SEQ ID NO: 606487 - DNA, 15 bp, Homo sapiens
cctgcgagcattgtc

SEQ ID NO: 606488 - DNA, 15 bp, Homo sapiens
ctgcgagcattgtcc

SEQ ID NO: 606489 - DNA, 15 bp, Homo sapiens
tgcgagcattgtccg

SEQ ID NO: 606490 - DNA, 15 bp, Homo sapiens
gcgagcattgtccgt

SEQ ID NO: 606491 - DNA, 15 bp, Homo sapiens
cgagcattgtccgtc

SEQ ID NO: 606492 - DNA, 15 bp, Homo sapiens
gagcattgtccgtct

SEQ ID NO: 606493 - DNA, 15 bp, Homo sapiens
agcattgtccgtctt

SEQ ID NO: 606494 - DNA, 15 bp, Homo sapiens
gcattgtccgtcttc

SEQ ID NO: 606495 - DNA, 15 bp, Homo sapiens
cattgtccgtcttca

SEQ ID NO: 606496 - DNA, 15 bp, Homo sapiens
attgtccgtcttcat

SEQ ID NO: 606497 - DNA, 15 bp, Homo sapiens
ttgtccgtcttcatc

SEQ ID NO: 606498 - DNA, 15 bp, Homo sapiens
tgtccgtcttcatca

SEQ ID NO: 606499 - DNA, 15 bp, Homo sapiens
gtccgtcttcatcaa

SEQ ID NO: 606500 - DNA, 15 bp, Homo sapiens
tccgtcttcatcaag

SEQ ID NO: 606501 - DNA, 15 bp, Homo sapiens
ccgtcttcatcaagg

SEQ ID NO: 606502 - DNA, 15 bp, Homo sapiens
cgtcttcatcaagga

SEQ ID NO: 606503 - DNA, 15 bp, Homo sapiens
gtcttcatcaaggac

SEQ ID NO: 606504 - DNA, 15 bp, Homo sapiens
tcttcatcaaggacg

SEQ ID NO: 606505 - DNA, 15 bp, Homo sapiens
cttcatcaaggacgc

SEQ ID NO: 606506 - DNA, 15 bp, Homo sapiens
ttcatcaaggacgca

SEQ ID NO: 606507 - DNA, 15 bp, Homo sapiens
tcatcaaggacgcag

SEQ ID NO: 606508 - DNA, 15 bp, Homo sapiens
catcaaggacgcagc

SEQ ID NO: 606509 - DNA, 15 bp, Homo sapiens
atcaaggacgcagcc

SEQ ID NO: 606510 - DNA, 15 bp, Homo sapiens
tcaaggacgcagccc

SEQ ID NO: 606511 - DNA, 15 bp, Homo sapiens
caaggacgcagccct

SEQ ID NO: 606512 - DNA, 15 bp, Homo sapiens
aaggacgcagccctg

SEQ ID NO: 606513 - DNA, 15 bp, Homo sapiens
aggacgcagccctga

SEQ ID NO: 606514 - DNA, 15 bp, Homo sapiens
ggacgcagccctgaa

SEQ ID NO: 606515 - DNA, 15 bp, Homo sapiens
gacgcagccctgaag

SEQ ID NO: 606516 - DNA, 15 bp, Homo sapiens
acgcagccctgaagt

SEQ ID NO: 606517 - DNA, 15 bp, Homo sapiens
cgcagccctgaagtg

SEQ ID NO: 606518 - DNA, 15 bp, Homo sapiens
gcagccctgaagtgg

SEQ ID NO: 606519 - DNA, 15 bp, Homo sapiens
cagccctgaagtgga

SEQ ID NO: 606520 - DNA, 15 bp, Homo sapiens
agccctgaagtggat

SEQ ID NO: 606521 - DNA, 15 bp, Homo sapiens
gccctgaagtggatg

SEQ ID NO: 606522 - DNA, 15 bp, Homo sapiens
ccctgaagtggatgt

SEQ ID NO: 606523 - DNA, 15 bp, Homo sapiens
cctgaagtggatgta

SEQ ID NO: 606524 - DNA, 15 bp, Homo sapiens
ctgaagtggatgtat

SEQ ID NO: 606525 - DNA, 15 bp, Homo sapiens
tgaagtggatgtata

SEQ ID NO: 606526 - DNA, 15 bp, Homo sapiens
gaagtggatgtatag

SEQ ID NO: 606527 - DNA, 15 bp, Homo sapiens
aagtggatgtatagc

SEQ ID NO: 606528 - DNA, 15 bp, Homo sapiens
agtggatgtatagca

SEQ ID NO: 606529 - DNA, 15 bp, Homo sapiens
gtggatgtatagcac

SEQ ID NO: 606530 - DNA, 15 bp, Homo sapiens
tggatgtatagcaca

SEQ ID NO: 606531 - DNA, 15 bp, Homo sapiens
ggatgtatagcacag

SEQ ID NO: 606532 - DNA, 15 bp, Homo sapiens
gatgtatagcacagc

SEQ ID NO: 606533 - DNA, 15 bp, Homo sapiens
atgtatagcacagcc

SEQ ID NO: 606534 - DNA, 15 bp, Homo sapiens
tgtatagcacagccg

SEQ ID NO: 606535 - DNA, 15 bp, Homo sapiens
gtatagcacagccgc

SEQ ID NO: 606536 - DNA, 15 bp, Homo sapiens
tatagcacagccgcc

SEQ ID NO: 606537 - DNA, 15 bp, Homo sapiens
atagcacagccgccc

SEQ ID NO: 606538 - DNA, 15 bp, Homo sapiens
tagcacagccgccca

SEQ ID NO: 606539 - DNA, 15 bp, Homo sapiens
agcacagccgcccag

SEQ ID NO: 606540 - DNA, 15 bp, Homo sapiens
gcacagccgcccagc

SEQ ID NO: 606541 - DNA, 15 bp, Homo sapiens
cacagccgcccagca

SEQ ID NO: 606542 - DNA, 15 bp, Homo sapiens
acagccgcccagcag

SEQ ID NO: 606543 - DNA, 15 bp, Homo sapiens
cagccgcccagcagc

SEQ ID NO: 606544 - DNA, 15 bp, Homo sapiens
agccgcccagcagca

SEQ ID NO: 606545 - DNA, 15 bp, Homo sapiens
gccgcccagcagcac

SEQ ID NO: 606546 - DNA, 15 bp, Homo sapiens
ccgcccagcagcacc

SEQ ID NO: 606547 - DNA, 15 bp, Homo sapiens
cgcccagcagcacca

SEQ ID NO: 606548 - DNA, 15 bp, Homo sapiens
gcccagcagcaccag

SEQ ID NO: 606549 - DNA, 15 bp, Homo sapiens
cccagcagcaccagt

SEQ ID NO: 606550 - DNA, 15 bp, Homo sapiens
ccagcagcaccagtg

SEQ ID NO: 606551 - DNA, 15 bp, Homo sapiens
cagcagcaccagtgg

SEQ ID NO: 606552 - DNA, 15 bp, Homo sapiens
agcagcaccagtggg

SEQ ID NO: 606553 - DNA, 15 bp, Homo sapiens
gcagcaccagtggga

SEQ ID NO: 606554 - DNA, 15 bp, Homo sapiens
cagcaccagtgggat

SEQ ID NO: 606555 - DNA, 15 bp, Homo sapiens
agcaccagtgggatg

SEQ ID NO: 606556 - DNA, 15 bp, Homo sapiens
gcaccagtgggatgg

SEQ ID NO: 606557 - DNA, 15 bp, Homo sapiens
caccagtgggatggg

SEQ ID NO: 606558 - DNA, 15 bp, Homo sapiens
accagtgggatgggc

SEQ ID NO: 606559 - DNA, 15 bp, Homo sapiens
ccagtgggatgggct

SEQ ID NO: 606560 - DNA, 15 bp, Homo sapiens
cagtgggatgggctc

SEQ ID NO: 606561 - DNA, 15 bp, Homo sapiens
agtgggatgggctcc

SEQ ID NO: 606562 - DNA, 15 bp, Homo sapiens
gtgggatgggctcct

SEQ ID NO: 606563 - DNA, 15 bp, Homo sapiens
tgggatgggctcctc

SEQ ID NO: 606564 - DNA, 15 bp, Homo sapiens
gggatgggctcctct

SEQ ID NO: 606565 - DNA, 15 bp, Homo sapiens
ggatgggctcctctc

SEQ ID NO: 606566 - DNA, 15 bp, Homo sapiens
gatgggctcctctcc

SEQ ID NO: 606567 - DNA, 15 bp, Homo sapiens
atgggctcctctcct

SEQ ID NO: 606568 - DNA, 15 bp, Homo sapiens
tgggctcctctccta

SEQ ID NO: 606569 - DNA, 15 bp, Homo sapiens
gggctcctctcctac

SEQ ID NO: 606570 - DNA, 15 bp, Homo sapiens
ggctcctctcctacc

SEQ ID NO: 606571 - DNA, 15 bp, Homo sapiens
gctcctctcctacca

SEQ ID NO: 606572 - DNA, 15 bp, Homo sapiens
ctcctctcctaccag

SEQ ID NO: 606573 - DNA, 15 bp, Homo sapiens
tcctctcctaccagg

SEQ ID NO: 606574 - DNA, 15 bp, Homo sapiens
cctctcctaccaggt

SEQ ID NO: 606575 - DNA, 15 bp, Homo sapiens
ctctcctaccaggtg

SEQ ID NO: 606576 - DNA, 15 bp, Homo sapiens
tctcctaccaggtgt

SEQ ID NO: 606577 - DNA, 15 bp, Homo sapiens
ctcctaccaggtgtg

SEQ ID NO: 606578 - DNA, 15 bp, Homo sapiens
tcctaccaggtgtgt

SEQ ID NO: 606579 - DNA, 15 bp, Homo sapiens
cctaccaggtgtgtg

SEQ ID NO: 606580 - DNA, 15 bp, Homo sapiens
ctaccaggtgtgtgg

SEQ ID NO: 606581 - DNA, 15 bp, Homo sapiens
taccaggtgtgtggt

SEQ ID NO: 606582 - DNA, 15 bp, Homo sapiens
accaggtgtgtggtg

SEQ ID NO: 606583 - DNA, 15 bp, Homo sapiens
ccaggtgtgtggtgc

SEQ ID NO: 606584 - DNA, 15 bp, Homo sapiens
caggtgtgtggtgca

SEQ ID NO: 606585 - DNA, 15 bp, Homo sapiens
aggtgtgtggtgcat

SEQ ID NO: 606586 - DNA, 15 bp, Homo sapiens
ggtgtgtggtgcatc

SEQ ID NO: 606587 - DNA, 15 bp, Homo sapiens
gtgtgtggtgcatcc

SEQ ID NO: 606588 - DNA, 15 bp, Homo sapiens
tgtgtggtgcatcca

SEQ ID NO: 606589 - DNA, 15 bp, Homo sapiens
gtgtggtgcatccag

SEQ ID NO: 606590 - DNA, 15 bp, Homo sapiens
tgtggtgcatccagg

SEQ ID NO: 606591 - DNA, 15 bp, Homo sapiens
gtggtgcatccagga

SEQ ID NO: 606592 - DNA, 15 bp, Homo sapiens
tggtgcatccaggac

SEQ ID NO: 606593 - DNA, 15 bp, Homo sapiens
ggtgcatccaggacc

SEQ ID NO: 606594 - DNA, 15 bp, Homo sapiens
gtgcatccaggaccg

SEQ ID NO: 606595 - DNA, 15 bp, Homo sapiens
tgcatccaggaccgc

SEQ ID NO: 606596 - DNA, 15 bp, Homo sapiens
gcatccaggaccgcc

SEQ ID NO: 606597 - DNA, 15 bp, Homo sapiens
catccaggaccgcct

SEQ ID NO: 606598 - DNA, 15 bp, Homo sapiens
atccaggaccgcctc

SEQ ID NO: 606599 - DNA, 15 bp, Homo sapiens
tccaggaccgcctca

SEQ ID NO: 606600 - DNA, 15 bp, Homo sapiens
ccaggaccgcctcag

SEQ ID NO: 606601 - DNA, 15 bp, Homo sapiens
caggaccgcctcagg

SEQ ID NO: 606602 - DNA, 15 bp, Homo sapiens
aggaccgcctcagga

SEQ ID NO: 606603 - DNA, 15 bp, Homo sapiens
ggaccgcctcaggag

SEQ ID NO: 606604 - DNA, 15 bp, Homo sapiens
gaccgcctcaggagg

SEQ ID NO: 606605 - DNA, 15 bp, Homo sapiens
accgcctcaggaggg

SEQ ID NO: 606606 - DNA, 15 bp, Homo sapiens
ccgcctcaggaggga

SEQ ID NO: 606607 - DNA, 15 bp, Homo sapiens
cgcctcaggagggat

SEQ ID NO: 606608 - DNA, 15 bp, Homo sapiens
gcctcaggagggatg

SEQ ID NO: 606609 - DNA, 15 bp, Homo sapiens
cctcaggagggatgg

SEQ ID NO: 606610 - DNA, 15 bp, Homo sapiens
ctcaggagggatggg

SEQ ID NO: 606611 - DNA, 15 bp, Homo sapiens
tcaggagggatgggc

SEQ ID NO: 606612 - DNA, 15 bp, Homo sapiens
caggagggatgggcg

SEQ ID NO: 606613 - DNA, 15 bp, Homo sapiens
aggagggatgggcgg

SEQ ID NO: 606614 - DNA, 15 bp, Homo sapiens
ggagggatgggcggt

SEQ ID NO: 606615 - DNA, 15 bp, Homo sapiens
gagggatgggcggtt

SEQ ID NO: 606616 - DNA, 15 bp, Homo sapiens
agggatgggcggttg

SEQ ID NO: 606617 - DNA, 15 bp, Homo sapiens
gggatgggcggttgg

SEQ ID NO: 606618 - DNA, 15 bp, Homo sapiens
ggatgggcggttgga

SEQ ID NO: 606619 - DNA, 15 bp, Homo sapiens
gatgggcggttggag

SEQ ID NO: 606620 - DNA, 15 bp, Homo sapiens
atgggcggttggagg

SEQ ID NO: 606621 - DNA, 15 bp, Homo sapiens
tgggcggttggagga

SEQ ID NO: 606622 - DNA, 15 bp, Homo sapiens
gggcggttggaggag

SEQ ID NO: 606623 - DNA, 15 bp, Homo sapiens
ggcggttggaggagg

SEQ ID NO: 606624 - DNA, 15 bp, Homo sapiens
gcggttggaggaggc

SEQ ID NO: 606625 - DNA, 15 bp, Homo sapiens
cggttggaggaggcc

SEQ ID NO: 606626 - DNA, 15 bp, Homo sapiens
ggttggaggaggcct

SEQ ID NO: 606627 - DNA, 15 bp, Homo sapiens
gttggaggaggcctg

SEQ ID NO: 606628 - DNA, 15 bp, Homo sapiens
ttggaggaggcctgc

SEQ ID NO: 606629 - DNA, 15 bp, Homo sapiens
tggaggaggcctgcc

SEQ ID NO: 606630 - DNA, 15 bp, Homo sapiens
ggaggaggcctgcct

SEQ ID NO: 606631 - DNA, 15 bp, Homo sapiens
gaggaggcctgcctc

SEQ ID NO: 606632 - DNA, 15 bp, Homo sapiens
aggaggcctgcctct

SEQ ID NO: 606633 - DNA, 15 bp, Homo sapiens
ggaggcctgcctctg

SEQ ID NO: 606634 - DNA, 15 bp, Homo sapiens
gaggcctgcctctgc

SEQ ID NO: 606635 - DNA, 15 bp, Homo sapiens
aggcctgcctctgcc

SEQ ID NO: 606636 - DNA, 15 bp, Homo sapiens
ggcctgcctctgcca

SEQ ID NO: 606637 - DNA, 15 bp, Homo sapiens
gcctgcctctgccac

SEQ ID NO: 606638 - DNA, 15 bp, Homo sapiens
cctgcctctgccacc

SEQ ID NO: 606639 - DNA, 15 bp, Homo sapiens
ctgcctctgccaccc

SEQ ID NO: 606640 - DNA, 15 bp, Homo sapiens
tgcctctgccaccct

SEQ ID NO: 606641 - DNA, 15 bp, Homo sapiens
gcctctgccacccta

SEQ ID NO: 606642 - DNA, 15 bp, Homo sapiens
cctctgccaccctag

SEQ ID NO: 606643 - DNA, 15 bp, Homo sapiens
ctctgccaccctaga

SEQ ID NO: 606644 - DNA, 15 bp, Homo sapiens
tctgccaccctagac

SEQ ID NO: 606645 - DNA, 15 bp, Homo sapiens
ctgccaccctagaca

SEQ ID NO: 606646 - DNA, 15 bp, Homo sapiens
tgccaccctagacag

SEQ ID NO: 606647 - DNA, 15 bp, Homo sapiens
gccaccctagacagg

SEQ ID NO: 606648 - DNA, 15 bp, Homo sapiens
ccaccctagacaggc

SEQ ID NO: 606649 - DNA, 15 bp, Homo sapiens
caccctagacaggcc

SEQ ID NO: 606650 - DNA, 15 bp, Homo sapiens
accctagacaggcct

SEQ ID NO: 606651 - DNA, 15 bp, Homo sapiens
ccctagacaggcctg

SEQ ID NO: 606652 - DNA, 15 bp, Homo sapiens
cctagacaggcctgg

SEQ ID NO: 606653 - DNA, 15 bp, Homo sapiens
ctagacaggcctggg

SEQ ID NO: 606654 - DNA, 15 bp, Homo sapiens
tagacaggcctggga

SEQ ID NO: 606655 - DNA, 15 bp, Homo sapiens
agacaggcctgggac

SEQ ID NO: 606656 - DNA, 15 bp, Homo sapiens
gacaggcctgggaca

SEQ ID NO: 606657 - DNA, 15 bp, Homo sapiens
acaggcctgggacag

SEQ ID NO: 606658 - DNA, 15 bp, Homo sapiens
caggcctgggacagg

SEQ ID NO: 606659 - DNA, 15 bp, Homo sapiens
aggcctgggacagga

SEQ ID NO: 606660 - DNA, 15 bp, Homo sapiens
ggcctgggacaggag

SEQ ID NO: 606661 - DNA, 15 bp, Homo sapiens
gcctgggacaggaga

SEQ ID NO: 606662 - DNA, 15 bp, Homo sapiens
cctgggacaggagaa

SEQ ID NO: 606663 - DNA, 15 bp, Homo sapiens
ctgggacaggagaag

SEQ ID NO: 606664 - DNA, 15 bp, Homo sapiens
tgggacaggagaaga

SEQ ID NO: 606665 - DNA, 15 bp, Homo sapiens
gggacaggagaagac

SEQ ID NO: 606666 - DNA, 15 bp, Homo sapiens
ggacaggagaagaca

SEQ ID NO: 606667 - DNA, 15 bp, Homo sapiens
gacaggagaagacaa

SEQ ID NO: 606668 - DNA, 15 bp, Homo sapiens
acaggagaagacaag

SEQ ID NO: 606669 - DNA, 15 bp, Homo sapiens
caggagaagacaaga

SEQ ID NO: 606670 - DNA, 15 bp, Homo sapiens
aggagaagacaagag

SEQ ID NO: 606671 - DNA, 15 bp, Homo sapiens
ggagaagacaagagc

SEQ ID NO: 606672 - DNA, 15 bp, Homo sapiens
gagaagacaagagcc

SEQ ID NO: 606673 - DNA, 15 bp, Homo sapiens
agaagacaagagccg

SEQ ID NO: 606674 - DNA, 15 bp, Homo sapiens
gaagacaagagccga

SEQ ID NO: 606675 - DNA, 15 bp, Homo sapiens
aagacaagagccgaa

SEQ ID NO: 606676 - DNA, 15 bp, Homo sapiens
agacaagagccgaac

SEQ ID NO: 606677 - DNA, 15 bp, Homo sapiens
gacaagagccgaaca

SEQ ID NO: 606678 - DNA, 15 bp, Homo sapiens
acaagagccgaacag

SEQ ID NO: 606679 - DNA, 15 bp, Homo sapiens
caagagccgaacagt

SEQ ID NO: 606680 - DNA, 15 bp, Homo sapiens
aagagccgaacagtc

SEQ ID NO: 606681 - DNA, 15 bp, Homo sapiens
agagccgaacagtcc

SEQ ID NO: 606682 - DNA, 15 bp, Homo sapiens
gagccgaacagtcct

SEQ ID NO: 606683 - DNA, 15 bp, Homo sapiens
agccgaacagtcctg

SEQ ID NO: 606684 - DNA, 15 bp, Homo sapiens
gccgaacagtcctgg

SEQ ID NO: 606685 - DNA, 15 bp, Homo sapiens
ccgaacagtcctggc

SEQ ID NO: 606686 - DNA, 15 bp, Homo sapiens
cgaacagtcctggcc

SEQ ID NO: 606687 - DNA, 15 bp, Homo sapiens
gaacagtcctggccc

SEQ ID NO: 606688 - DNA, 15 bp, Homo sapiens
aacagtcctggccct

SEQ ID NO: 606689 - DNA, 15 bp, Homo sapiens
acagtcctggccctt

SEQ ID NO: 606690 - DNA, 15 bp, Homo sapiens
cagtcctggcccttc

SEQ ID NO: 606691 - DNA, 15 bp, Homo sapiens
agtcctggcccttcg

SEQ ID NO: 606692 - DNA, 15 bp, Homo sapiens
gtcctggcccttcgg

SEQ ID NO: 606693 - DNA, 15 bp, Homo sapiens
tcctggcccttcggg

SEQ ID NO: 606694 - DNA, 15 bp, Homo sapiens
cctggcccttcggga

SEQ ID NO: 606695 - DNA, 15 bp, Homo sapiens
ctggcccttcgggag

SEQ ID NO: 606696 - DNA, 15 bp, Homo sapiens
tggcccttcgggagc

SEQ ID NO: 606697 - DNA, 15 bp, Homo sapiens
ggcccttcgggagcc

SEQ ID NO: 606698 - DNA, 15 bp, Homo sapiens
gcccttcgggagccc

SEQ ID NO: 606699 - DNA, 15 bp, Homo sapiens
cccttcgggagcccc

SEQ ID NO: 606700 - DNA, 15 bp, Homo sapiens
ccttcgggagccccc

SEQ ID NO: 606701 - DNA, 15 bp, Homo sapiens
cttcgggagccccca

SEQ ID NO: 606702 - DNA, 15 bp, Homo sapiens
ttcgggagcccccag

SEQ ID NO: 606703 - DNA, 15 bp, Homo sapiens
tcgggagcccccagt

SEQ ID NO: 606704 - DNA, 15 bp, Homo sapiens
cgggagcccccagtc

SEQ ID NO: 606705 - DNA, 15 bp, Homo sapiens
gggagcccccagtct

SEQ ID NO: 606706 - DNA, 15 bp, Homo sapiens
ggagcccccagtctg

SEQ ID NO: 606707 - DNA, 15 bp, Homo sapiens
gagcccccagtctga

SEQ ID NO: 606708 - DNA, 15 bp, Homo sapiens
agcccccagtctgat

SEQ ID NO: 606709 - DNA, 15 bp, Homo sapiens
gcccccagtctgatg

SEQ ID NO: 606710 - DNA, 15 bp, Homo sapiens
cccccagtctgatgg

SEQ ID NO: 606711 - DNA, 15 bp, Homo sapiens
ccccagtctgatggg

SEQ ID NO: 606712 - DNA, 15 bp, Homo sapiens
cccagtctgatggga

SEQ ID NO: 606713 - DNA, 15 bp, Homo sapiens
ccagtctgatgggag

SEQ ID NO: 606714 - DNA, 15 bp, Homo sapiens
cagtctgatgggaga

SEQ ID NO: 606715 - DNA, 15 bp, Homo sapiens
agtctgatgggagag

SEQ ID NO: 606716 - DNA, 15 bp, Homo sapiens
gtctgatgggagagg

SEQ ID NO: 606717 - DNA, 15 bp, Homo sapiens
tctgatgggagaggc

SEQ ID NO: 606718 - DNA, 15 bp, Homo sapiens
ctgatgggagaggca

SEQ ID NO: 606719 - DNA, 15 bp, Homo sapiens
tgatgggagaggcag

SEQ ID NO: 606720 - DNA, 15 bp, Homo sapiens
gatgggagaggcagt

SEQ ID NO: 606721 - DNA, 15 bp, Homo sapiens
atgggagaggcagtt

SEQ ID NO: 606722 - DNA, 15 bp, Homo sapiens
tgggagaggcagttc

SEQ ID NO: 606723 - DNA, 15 bp, Homo sapiens
gggagaggcagttcg

SEQ ID NO: 606724 - DNA, 15 bp, Homo sapiens
ggagaggcagttcgc

SEQ ID NO: 606725 - DNA, 15 bp, Homo sapiens
gagaggcagttcgcc

SEQ ID NO: 606726 - DNA, 15 bp, Homo sapiens
agaggcagttcgcct

SEQ ID NO: 606727 - DNA, 15 bp, Homo sapiens
gaggcagttcgcctt

SEQ ID NO: 606728 - DNA, 15 bp, Homo sapiens
aggcagttcgccttg

SEQ ID NO: 606729 - DNA, 15 bp, Homo sapiens
ggcagttcgccttgg

SEQ ID NO: 606730 - DNA, 15 bp, Homo sapiens
gcagttcgccttggg

SEQ ID NO: 606731 - DNA, 15 bp, Homo sapiens
cagttcgccttggga

SEQ ID NO: 606732 - DNA, 15 bp, Homo sapiens
agttcgccttgggac

SEQ ID NO: 606733 - DNA, 15 bp, Homo sapiens
gttcgccttgggacc

SEQ ID NO: 606734 - DNA, 15 bp, Homo sapiens
ttcgccttgggaccc

SEQ ID NO: 606735 - DNA, 15 bp, Homo sapiens
tcgccttgggaccct

SEQ ID NO: 606736 - DNA, 15 bp, Homo sapiens
cgccttgggaccctc

SEQ ID NO: 606737 - DNA, 15 bp, Homo sapiens
gccttgggaccctcc

SEQ ID NO: 606738 - DNA, 15 bp, Homo sapiens
ccttgggaccctcca

SEQ ID NO: 606739 - DNA, 15 bp, Homo sapiens
cttgggaccctccag

SEQ ID NO: 606740 - DNA, 15 bp, Homo sapiens
ttgggaccctccagt

SEQ ID NO: 606741 - DNA, 15 bp, Homo sapiens
tgggaccctccagtc

SEQ ID NO: 606742 - DNA, 15 bp, Homo sapiens
gggaccctccagtct

SEQ ID NO: 606743 - DNA, 15 bp, Homo sapiens
ggaccctccagtctg

SEQ ID NO: 606744 - DNA, 15 bp, Homo sapiens
gaccctccagtctgc

SEQ ID NO: 606745 - DNA, 15 bp, Homo sapiens
accctccagtctgct

SEQ ID NO: 606746 - DNA, 15 bp, Homo sapiens
ccctccagtctgctg

SEQ ID NO: 606747 - DNA, 15 bp, Homo sapiens
cctccagtctgctga

SEQ ID NO: 606748 - DNA, 15 bp, Homo sapiens
ctccagtctgctgag

SEQ ID NO: 606749 - DNA, 15 bp, Homo sapiens
tccagtctgctgaga

SEQ ID NO: 606750 - DNA, 15 bp, Homo sapiens
ccagtctgctgagag

SEQ ID NO: 606751 - DNA, 15 bp, Homo sapiens
cagtctgctgagaga

SEQ ID NO: 606752 - DNA, 15 bp, Homo sapiens
agtctgctgagagag

SEQ ID NO: 606753 - DNA, 15 bp, Homo sapiens
gtctgctgagagagg

SEQ ID NO: 606754 - DNA, 15 bp, Homo sapiens
tctgctgagagaggc

SEQ ID NO: 606755 - DNA, 15 bp, Homo sapiens
ctgctgagagaggca

SEQ ID NO: 606756 - DNA, 15 bp, Homo sapiens
tgctgagagaggcag

SEQ ID NO: 606757 - DNA, 15 bp, Homo sapiens
gctgagagaggcagt

SEQ ID NO: 606758 - DNA, 15 bp, Homo sapiens
ctgagagaggcagtc

SEQ ID NO: 606759 - DNA, 15 bp, Homo sapiens
tgagagaggcagtct

SEQ ID NO: 606760 - DNA, 15 bp, Homo sapiens
gagagaggcagtcta

SEQ ID NO: 606761 - DNA, 15 bp, Homo sapiens
agagaggcagtctac

SEQ ID NO: 606762 - DNA, 15 bp, Homo sapiens
gagaggcagtctacc

SEQ ID NO: 606763 - DNA, 15 bp, Homo sapiens
agaggcagtctacct

SEQ ID NO: 606764 - DNA, 15 bp, Homo sapiens
gaggcagtctacctt

SEQ ID NO: 606765 - DNA, 15 bp, Homo sapiens
aggcagtctacctta

SEQ ID NO: 606766 - DNA, 15 bp, Homo sapiens
ggcagtctaccttag

SEQ ID NO: 606767 - DNA, 15 bp, Homo sapiens
gcagtctaccttagg

SEQ ID NO: 606768 - DNA, 15 bp, Homo sapiens
cagtctaccttaggg

SEQ ID NO: 606769 - DNA, 15 bp, Homo sapiens
agtctaccttaggga

SEQ ID NO: 606770 - DNA, 15 bp, Homo sapiens
gtctaccttagggag

SEQ ID NO: 606771 - DNA, 15 bp, Homo sapiens
tctaccttagggagc

SEQ ID NO: 606772 - DNA, 15 bp, Homo sapiens
ctaccttagggagct

SEQ ID NO: 606773 - DNA, 15 bp, Homo sapiens
taccttagggagctc

SEQ ID NO: 606774 - DNA, 15 bp, Homo sapiens
accttagggagctcc

SEQ ID NO: 606775 - DNA, 15 bp, Homo sapiens
ccttagggagctccc

SEQ ID NO: 606776 - DNA, 15 bp, Homo sapiens
cttagggagctccca

SEQ ID NO: 606777 - DNA, 15 bp, Homo sapiens
ttagggagctcccaa

SEQ ID NO: 606778 - DNA, 15 bp, Homo sapiens
tagggagctcccaat

SEQ ID NO: 606779 - DNA, 15 bp, Homo sapiens
agggagctcccaatc

SEQ ID NO: 606780 - DNA, 15 bp, Homo sapiens
gggagctcccaatct

SEQ ID NO: 606781 - DNA, 15 bp, Homo sapiens
ggagctcccaatcta

SEQ ID NO: 606782 - DNA, 15 bp, Homo sapiens
gagctcccaatctaa

SEQ ID NO: 606783 - DNA, 15 bp, Homo sapiens
agctcccaatctaag

SEQ ID NO: 606784 - DNA, 15 bp, Homo sapiens
gctcccaatctaagg

SEQ ID NO: 606785 - DNA, 15 bp, Homo sapiens
ctcccaatctaaggg

SEQ ID NO: 606786 - DNA, 15 bp, Homo sapiens
tcccaatctaaggga

SEQ ID NO: 606787 - DNA, 15 bp, Homo sapiens
cccaatctaagggag

SEQ ID NO: 606788 - DNA, 15 bp, Homo sapiens
ccaatctaagggagg

SEQ ID NO: 606789 - DNA, 15 bp, Homo sapiens
caatctaagggagga

SEQ ID NO: 606790 - DNA, 15 bp, Homo sapiens
aatctaagggaggag

SEQ ID NO: 606791 - DNA, 15 bp, Homo sapiens
atctaagggaggaga

SEQ ID NO: 606792 - DNA, 15 bp, Homo sapiens
tctaagggaggagac

SEQ ID NO: 606793 - DNA, 15 bp, Homo sapiens
ctaagggaggagaca

SEQ ID NO: 606794 - DNA, 15 bp, Homo sapiens
taagggaggagacac

SEQ ID NO: 606795 - DNA, 15 bp, Homo sapiens
aagggaggagacact

SEQ ID NO: 606796 - DNA, 15 bp, Homo sapiens
agggaggagacactg

SEQ ID NO: 606797 - DNA, 15 bp, Homo sapiens
gggaggagacactgc

SEQ ID NO: 606798 - DNA, 15 bp, Homo sapiens
ggaggagacactgcc

SEQ ID NO: 606799 - DNA, 15 bp, Homo sapiens
gaggagacactgccc

SEQ ID NO: 606800 - DNA, 15 bp, Homo sapiens
aggagacactgccct

SEQ ID NO: 606801 - DNA, 15 bp, Homo sapiens
ggagacactgcccta

SEQ ID NO: 606802 - DNA, 15 bp, Homo sapiens
gagacactgccctag

SEQ ID NO: 606803 - DNA, 15 bp, Homo sapiens
agacactgccctagg

SEQ ID NO: 606804 - DNA, 15 bp, Homo sapiens
gacactgccctaggg

SEQ ID NO: 606805 - DNA, 15 bp, Homo sapiens
acactgccctaggga

SEQ ID NO: 606806 - DNA, 15 bp, Homo sapiens
cactgccctagggaa

SEQ ID NO: 606807 - DNA, 15 bp, Homo sapiens
actgccctagggaat

SEQ ID NO: 606808 - DNA, 15 bp, Homo sapiens
ctgccctagggaatt

SEQ ID NO: 606809 - DNA, 15 bp, Homo sapiens
tgccctagggaattc

SEQ ID NO: 606810 - DNA, 15 bp, Homo sapiens
gccctagggaattct

SEQ ID NO: 606811 - DNA, 15 bp, Homo sapiens
ccctagggaattctc

SEQ ID NO: 606812 - DNA, 15 bp, Homo sapiens
cctagggaattctca

SEQ ID NO: 606813 - DNA, 15 bp, Homo sapiens
ctagggaattctcag

SEQ ID NO: 606814 - DNA, 15 bp, Homo sapiens
tagggaattctcagt

SEQ ID NO: 606815 - DNA, 15 bp, Homo sapiens
agggaattctcagtc

SEQ ID NO: 606816 - DNA, 15 bp, Homo sapiens
gggaattctcagtct

SEQ ID NO: 606817 - DNA, 15 bp, Homo sapiens
ggaattctcagtctg

SEQ ID NO: 606818 - DNA, 15 bp, Homo sapiens
gaattctcagtctga

SEQ ID NO: 606819 - DNA, 15 bp, Homo sapiens
aattctcagtctgac

SEQ ID NO: 606820 - DNA, 15 bp, Homo sapiens
attctcagtctgaca

SEQ ID NO: 606821 - DNA, 15 bp, Homo sapiens
ttctcagtctgacac

SEQ ID NO: 606822 - DNA, 15 bp, Homo sapiens
tctcagtctgacaca

SEQ ID NO: 606823 - DNA, 15 bp, Homo sapiens
ctcagtctgacacaa

SEQ ID NO: 606824 - DNA, 15 bp, Homo sapiens
tcagtctgacacaaa

SEQ ID NO: 606825 - DNA, 15 bp, Homo sapiens
cagtctgacacaaaa

SEQ ID NO: 606826 - DNA, 15 bp, Homo sapiens
agtctgacacaaaag

SEQ ID NO: 606827 - DNA, 15 bp, Homo sapiens
gtctgacacaaaaga

SEQ ID NO: 606828 - DNA, 15 bp, Homo sapiens
tctgacacaaaagag

SEQ ID NO: 606829 - DNA, 15 bp, Homo sapiens
ctgacacaaaagagt

SEQ ID NO: 606830 - DNA, 15 bp, Homo sapiens
tgacacaaaagagta

SEQ ID NO: 606831 - DNA, 15 bp, Homo sapiens
gacacaaaagagtag

SEQ ID NO: 606832 - DNA, 15 bp, Homo sapiens
acacaaaagagtagt

SEQ ID NO: 606833 - DNA, 15 bp, Homo sapiens
cacaaaagagtagtc

SEQ ID NO: 606834 - DNA, 15 bp, Homo sapiens
acaaaagagtagtct

SEQ ID NO: 606835 - DNA, 15 bp, Homo sapiens
caaaagagtagtctt

SEQ ID NO: 606836 - DNA, 15 bp, Homo sapiens
aaaagagtagtcttt

SEQ ID NO: 606837 - DNA, 15 bp, Homo sapiens
aaagagtagtctttg

SEQ ID NO: 606838 - DNA, 15 bp, Homo sapiens
aagagtagtctttgg

SEQ ID NO: 606839 - DNA, 15 bp, Homo sapiens
agagtagtctttgga

SEQ ID NO: 606840 - DNA, 15 bp, Homo sapiens
gagtagtctttggag

SEQ ID NO: 606841 - DNA, 15 bp, Homo sapiens
agtagtctttggaga

SEQ ID NO: 606842 - DNA, 15 bp, Homo sapiens
gtagtctttggagac

SEQ ID NO: 606843 - DNA, 15 bp, Homo sapiens
tagtctttggagaca

SEQ ID NO: 606844 - DNA, 15 bp, Homo sapiens
agtctttggagacac

SEQ ID NO: 606845 - DNA, 15 bp, Homo sapiens
gtctttggagacaca

SEQ ID NO: 606846 - DNA, 15 bp, Homo sapiens
tctttggagacacac

SEQ ID NO: 606847 - DNA, 15 bp, Homo sapiens
ctttggagacacact

SEQ ID NO: 606848 - DNA, 15 bp, Homo sapiens
tttggagacacactt

SEQ ID NO: 606849 - DNA, 15 bp, Homo sapiens
ttggagacacacttg

SEQ ID NO: 606850 - DNA, 15 bp, Homo sapiens
tggagacacacttga

SEQ ID NO: 606851 - DNA, 15 bp, Homo sapiens
ggagacacacttgag

SEQ ID NO: 606852 - DNA, 15 bp, Homo sapiens
gagacacacttgagt

SEQ ID NO: 606853 - DNA, 15 bp, Homo sapiens
agacacacttgagtt

SEQ ID NO: 606854 - DNA, 15 bp, Homo sapiens
gacacacttgagttt

SEQ ID NO: 606855 - DNA, 15 bp, Homo sapiens
acacacttgagtttg

SEQ ID NO: 606856 - DNA, 15 bp, Homo sapiens
cacacttgagtttga

SEQ ID NO: 606857 - DNA, 15 bp, Homo sapiens
acacttgagtttgaa

SEQ ID NO: 606858 - DNA, 15 bp, Homo sapiens
cacttgagtttgaat

SEQ ID NO: 606859 - DNA, 15 bp, Homo sapiens
acttgagtttgaatg

SEQ ID NO: 606860 - DNA, 15 bp, Homo sapiens
cttgagtttgaatgt

SEQ ID NO: 606861 - DNA, 15 bp, Homo sapiens
ttgagtttgaatgtc

SEQ ID NO: 606862 - DNA, 15 bp, Homo sapiens
tgagtttgaatgtca

SEQ ID NO: 606863 - DNA, 15 bp, Homo sapiens
gagtttgaatgtcag

SEQ ID NO: 606864 - DNA, 15 bp, Homo sapiens
agtttgaatgtcagc

SEQ ID NO: 606865 - DNA, 15 bp, Homo sapiens
gtttgaatgtcagct

SEQ ID NO: 606866 - DNA, 15 bp, Homo sapiens
tttgaatgtcagctc

SEQ ID NO: 606867 - DNA, 15 bp, Homo sapiens
ttgaatgtcagctct

SEQ ID NO: 606868 - DNA, 15 bp, Homo sapiens
tgaatgtcagctctg

SEQ ID NO: 606869 - DNA, 15 bp, Homo sapiens
gaatgtcagctctgt

SEQ ID NO: 606870 - DNA, 15 bp, Homo sapiens
aatgtcagctctgtc

SEQ ID NO: 606871 - DNA, 15 bp, Homo sapiens
atgtcagctctgtca

SEQ ID NO: 606872 - DNA, 15 bp, Homo sapiens
tgtcagctctgtcac

SEQ ID NO: 606873 - DNA, 15 bp, Homo sapiens
gtcagctctgtcact

SEQ ID NO: 606874 - DNA, 15 bp, Homo sapiens
tcagctctgtcactt

SEQ ID NO: 606875 - DNA, 15 bp, Homo sapiens
cagctctgtcactta

SEQ ID NO: 606876 - DNA, 15 bp, Homo sapiens
agctctgtcacttac

SEQ ID NO: 606877 - DNA, 15 bp, Homo sapiens
gctctgtcacttact

SEQ ID NO: 606878 - DNA, 15 bp, Homo sapiens
ctctgtcacttacta

SEQ ID NO: 606879 - DNA, 15 bp, Homo sapiens
tctgtcacttactat

SEQ ID NO: 606880 - DNA, 15 bp, Homo sapiens
ctgtcacttactatc

SEQ ID NO: 606881 - DNA, 15 bp, Homo sapiens
tgtcacttactatct

SEQ ID NO: 606882 - DNA, 15 bp, Homo sapiens
gtcacttactatctg

SEQ ID NO: 606883 - DNA, 15 bp, Homo sapiens
tcacttactatctgt

SEQ ID NO: 606884 - DNA, 15 bp, Homo sapiens
cacttactatctgta

SEQ ID NO: 606885 - DNA, 15 bp, Homo sapiens
acttactatctgtac

SEQ ID NO: 606886 - DNA, 15 bp, Homo sapiens
cttactatctgtaca

SEQ ID NO: 606887 - DNA, 15 bp, Homo sapiens
ttactatctgtacac

SEQ ID NO: 606888 - DNA, 15 bp, Homo sapiens
tactatctgtacact

SEQ ID NO: 606889 - DNA, 15 bp, Homo sapiens
actatctgtacactt

SEQ ID NO: 606890 - DNA, 15 bp, Homo sapiens
ctatctgtacacttt

SEQ ID NO: 606891 - DNA, 15 bp, Homo sapiens
tatctgtacactttt

SEQ ID NO: 606892 - DNA, 15 bp, Homo sapiens
atctgtacactttta

SEQ ID NO: 606893 - DNA, 15 bp, Homo sapiens
tctgtacacttttag

SEQ ID NO: 606894 - DNA, 15 bp, Homo sapiens
ctgtacacttttagg

SEQ ID NO: 606895 - DNA, 15 bp, Homo sapiens
tgtacacttttaggc

SEQ ID NO: 606896 - DNA, 15 bp, Homo sapiens
gtacacttttaggca

SEQ ID NO: 606897 - DNA, 15 bp, Homo sapiens
tacacttttaggcaa

SEQ ID NO: 606898 - DNA, 15 bp, Homo sapiens
acacttttaggcaag

SEQ ID NO: 606899 - DNA, 15 bp, Homo sapiens
cacttttaggcaagt

SEQ ID NO: 606900 - DNA, 15 bp, Homo sapiens
acttttaggcaagtc

SEQ ID NO: 606901 - DNA, 15 bp, Homo sapiens
cttttaggcaagtca

SEQ ID NO: 606902 - DNA, 15 bp, Homo sapiens
ttttaggcaagtcac

SEQ ID NO: 606903 - DNA, 15 bp, Homo sapiens
tttaggcaagtcact

SEQ ID NO: 606904 - DNA, 15 bp, Homo sapiens
ttaggcaagtcactt

SEQ ID NO: 606905 - DNA, 15 bp, Homo sapiens
taggcaagtcactta

SEQ ID NO: 606906 - DNA, 15 bp, Homo sapiens
aggcaagtcacttac

SEQ ID NO: 606907 - DNA, 15 bp, Homo sapiens
ggcaagtcacttact

SEQ ID NO: 606908 - DNA, 15 bp, Homo sapiens
gcaagtcacttactt

SEQ ID NO: 606909 - DNA, 15 bp, Homo sapiens
caagtcacttacttc

SEQ ID NO: 606910 - DNA, 15 bp, Homo sapiens
aagtcacttacttct

SEQ ID NO: 606911 - DNA, 15 bp, Homo sapiens
agtcacttacttctc

SEQ ID NO: 606912 - DNA, 15 bp, Homo sapiens
gtcacttacttctct

SEQ ID NO: 606913 - DNA, 15 bp, Homo sapiens
tcacttacttctctg

SEQ ID NO: 606914 - DNA, 15 bp, Homo sapiens
cacttacttctctga

SEQ ID NO: 606915 - DNA, 15 bp, Homo sapiens
acttacttctctgag

SEQ ID NO: 606916 - DNA, 15 bp, Homo sapiens
cttacttctctgagg

SEQ ID NO: 606917 - DNA, 15 bp, Homo sapiens
ttacttctctgaggc

SEQ ID NO: 606918 - DNA, 15 bp, Homo sapiens
tacttctctgaggct

SEQ ID NO: 606919 - DNA, 15 bp, Homo sapiens
acttctctgaggctg

SEQ ID NO: 606920 - DNA, 15 bp, Homo sapiens
cttctctgaggctga

SEQ ID NO: 606921 - DNA, 15 bp, Homo sapiens
ttctctgaggctgag

SEQ ID NO: 606922 - DNA, 15 bp, Homo sapiens
tctctgaggctgaga

SEQ ID NO: 606923 - DNA, 15 bp, Homo sapiens
ctctgaggctgagaa

SEQ ID NO: 606924 - DNA, 15 bp, Homo sapiens
tctgaggctgagaaa

SEQ ID NO: 606925 - DNA, 15 bp, Homo sapiens
ctgaggctgagaaat

SEQ ID NO: 606926 - DNA, 15 bp, Homo sapiens
tgaggctgagaaata

SEQ ID NO: 606927 - DNA, 15 bp, Homo sapiens
gaggctgagaaatag

SEQ ID NO: 606928 - DNA, 15 bp, Homo sapiens
aggctgagaaatagg

SEQ ID NO: 606929 - DNA, 15 bp, Homo sapiens
ggctgagaaataggt

SEQ ID NO: 606930 - DNA, 15 bp, Homo sapiens
gctgagaaataggtg

SEQ ID NO: 606931 - DNA, 15 bp, Homo sapiens
ctgagaaataggtga

SEQ ID NO: 606932 - DNA, 15 bp, Homo sapiens
tgagaaataggtgag

SEQ ID NO: 606933 - DNA, 15 bp, Homo sapiens
gagaaataggtgaga

SEQ ID NO: 606934 - DNA, 15 bp, Homo sapiens
agaaataggtgagaa

SEQ ID NO: 606935 - DNA, 15 bp, Homo sapiens
gaaataggtgagaag

SEQ ID NO: 606936 - DNA, 15 bp, Homo sapiens
aaataggtgagaagt

SEQ ID NO: 606937 - DNA, 15 bp, Homo sapiens
aataggtgagaagtc

SEQ ID NO: 606938 - DNA, 15 bp, Homo sapiens
ataggtgagaagtca

SEQ ID NO: 606939 - DNA, 15 bp, Homo sapiens
taggtgagaagtcac

SEQ ID NO: 606940 - DNA, 15 bp, Homo sapiens
aggtgagaagtcact

SEQ ID NO: 606941 - DNA, 15 bp, Homo sapiens
ggtgagaagtcactt

SEQ ID NO: 606942 - DNA, 15 bp, Homo sapiens
gtgagaagtcactta

SEQ ID NO: 606943 - DNA, 15 bp, Homo sapiens
tgagaagtcacttac

SEQ ID NO: 606944 - DNA, 15 bp, Homo sapiens
gagaagtcacttact

SEQ ID NO: 606945 - DNA, 15 bp, Homo sapiens
agaagtcacttactt

SEQ ID NO: 606946 - DNA, 15 bp, Homo sapiens
gaagtcacttacttc

SEQ ID NO: 606947 - DNA, 15 bp, Homo sapiens
gtcacttacttctca

SEQ ID NO: 606948 - DNA, 15 bp, Homo sapiens
tcacttacttctcac

SEQ ID NO: 606949 - DNA, 15 bp, Homo sapiens
cacttacttctcacc

SEQ ID NO: 606950 - DNA, 15 bp, Homo sapiens
acttacttctcacct

SEQ ID NO: 606951 - DNA, 15 bp, Homo sapiens
cttacttctcacctg

SEQ ID NO: 606952 - DNA, 15 bp, Homo sapiens
ttacttctcacctgc

SEQ ID NO: 606953 - DNA, 15 bp, Homo sapiens
tacttctcacctgca

SEQ ID NO: 606954 - DNA, 15 bp, Homo sapiens
acttctcacctgcag

SEQ ID NO: 606955 - DNA, 15 bp, Homo sapiens
cttctcacctgcagg

SEQ ID NO: 606956 - DNA, 15 bp, Homo sapiens
ttctcacctgcaggg

SEQ ID NO: 606957 - DNA, 15 bp, Homo sapiens
tctcacctgcagggg

SEQ ID NO: 606958 - DNA, 15 bp, Homo sapiens
ctcacctgcaggggg

SEQ ID NO: 606959 - DNA, 15 bp, Homo sapiens
tcacctgcaggggga

SEQ ID NO: 606960 - DNA, 15 bp, Homo sapiens
cacctgcagggggat

SEQ ID NO: 606961 - DNA, 15 bp, Homo sapiens
acctgcagggggata

SEQ ID NO: 606962 - DNA, 15 bp, Homo sapiens
cctgcagggggatac

SEQ ID NO: 606963 - DNA, 15 bp, Homo sapiens
ctgcagggggataca

SEQ ID NO: 606964 - DNA, 15 bp, Homo sapiens
tgcagggggatacat

SEQ ID NO: 606965 - DNA, 15 bp, Homo sapiens
gcagggggatacatt

SEQ ID NO: 606966 - DNA, 15 bp, Homo sapiens
cagggggatacatta

SEQ ID NO: 606967 - DNA, 15 bp, Homo sapiens
agggggatacattac

SEQ ID NO: 606968 - DNA, 15 bp, Homo sapiens
gggggatacattact

SEQ ID NO: 606969 - DNA, 15 bp, Homo sapiens
ggggatacattactt

SEQ ID NO: 606970 - DNA, 15 bp, Homo sapiens
gggatacattacttt

SEQ ID NO: 606971 - DNA, 15 bp, Homo sapiens
ggatacattactttc

SEQ ID NO: 606972 - DNA, 15 bp, Homo sapiens
gatacattactttct

SEQ ID NO: 606973 - DNA, 15 bp, Homo sapiens
atacattactttctt

SEQ ID NO: 606974 - DNA, 15 bp, Homo sapiens
tacattactttcttc

SEQ ID NO: 606975 - DNA, 15 bp, Homo sapiens
acattactttcttcc

SEQ ID NO: 606976 - DNA, 15 bp, Homo sapiens
cattactttcttcca

SEQ ID NO: 606977 - DNA, 15 bp, Homo sapiens
attactttcttccaa

SEQ ID NO: 606978 - DNA, 15 bp, Homo sapiens
ttactttcttccaat

SEQ ID NO: 606979 - DNA, 15 bp, Homo sapiens
tactttcttccaatc

SEQ ID NO: 606980 - DNA, 15 bp, Homo sapiens
actttcttccaatca

SEQ ID NO: 606981 - DNA, 15 bp, Homo sapiens
ctttcttccaatcag

SEQ ID NO: 606982 - DNA, 15 bp, Homo sapiens
tttcttccaatcagg

SEQ ID NO: 606983 - DNA, 15 bp, Homo sapiens
ttcttccaatcagga

SEQ ID NO: 606984 - DNA, 15 bp, Homo sapiens
tcttccaatcaggat

SEQ ID NO: 606985 - DNA, 15 bp, Homo sapiens
cttccaatcaggata

SEQ ID NO: 606986 - DNA, 15 bp, Homo sapiens
ttccaatcaggatag

SEQ ID NO: 606987 - DNA, 15 bp, Homo sapiens
tccaatcaggatagt

SEQ ID NO: 606988 - DNA, 15 bp, Homo sapiens
ccaatcaggatagtg

SEQ ID NO: 606989 - DNA, 15 bp, Homo sapiens
caatcaggatagtga

SEQ ID NO: 606990 - DNA, 15 bp, Homo sapiens
aatcaggatagtgag

SEQ ID NO: 606991 - DNA, 15 bp, Homo sapiens
atcaggatagtgagg

SEQ ID NO: 606992 - DNA, 15 bp, Homo sapiens
tcaggatagtgagga

SEQ ID NO: 606993 - DNA, 15 bp, Homo sapiens
caggatagtgaggat

SEQ ID NO: 606994 - DNA, 15 bp, Homo sapiens
aggatagtgaggatt

SEQ ID NO: 606995 - DNA, 15 bp, Homo sapiens
ggatagtgaggattc

SEQ ID NO: 606996 - DNA, 15 bp, Homo sapiens
gatagtgaggattca

SEQ ID NO: 606997 - DNA, 15 bp, Homo sapiens
atagtgaggattcaa

SEQ ID NO: 606998 - DNA, 15 bp, Homo sapiens
tagtgaggattcaat

SEQ ID NO: 606999 - DNA, 15 bp, Homo sapiens
agtgaggattcaatg

SEQ ID NO: 607000 - DNA, 15 bp, Homo sapiens
gtgaggattcaatga

SEQ ID NO: 607001 - DNA, 15 bp, Homo sapiens
tgaggattcaatgag

SEQ ID NO: 607002 - DNA, 15 bp, Homo sapiens
gaggattcaatgagc

SEQ ID NO: 607003 - DNA, 15 bp, Homo sapiens
aggattcaatgagct

SEQ ID NO: 607004 - DNA, 15 bp, Homo sapiens
ggattcaatgagcta

SEQ ID NO: 607005 - DNA, 15 bp, Homo sapiens
gattcaatgagctaa

SEQ ID NO: 607006 - DNA, 15 bp, Homo sapiens
attcaatgagctaaa

SEQ ID NO: 607007 - DNA, 15 bp, Homo sapiens
ttcaatgagctaaag

SEQ ID NO: 607008 - DNA, 15 bp, Homo sapiens
tcaatgagctaaagc

SEQ ID NO: 607009 - DNA, 15 bp, Homo sapiens
caatgagctaaagca

SEQ ID NO: 607010 - DNA, 15 bp, Homo sapiens
aatgagctaaagcag

SEQ ID NO: 607011 - DNA, 15 bp, Homo sapiens
atgagctaaagcaga

SEQ ID NO: 607012 - DNA, 15 bp, Homo sapiens
tgagctaaagcagat

SEQ ID NO: 607013 - DNA, 15 bp, Homo sapiens
gagctaaagcagata

SEQ ID NO: 607014 - DNA, 15 bp, Homo sapiens
agctaaagcagataa

SEQ ID NO: 607015 - DNA, 15 bp, Homo sapiens
gctaaagcagataaa

SEQ ID NO: 607016 - DNA, 15 bp, Homo sapiens
ctaaagcagataaag

SEQ ID NO: 607017 - DNA, 15 bp, Homo sapiens
taaagcagataaagt

SEQ ID NO: 607018 - DNA, 15 bp, Homo sapiens
aaagcagataaagtc

SEQ ID NO: 607019 - DNA, 15 bp, Homo sapiens
aagcagataaagtcc

SEQ ID NO: 607020 - DNA, 15 bp, Homo sapiens
agcagataaagtcct

SEQ ID NO: 607021 - DNA, 15 bp, Homo sapiens
gcagataaagtcctt

SEQ ID NO: 607022 - DNA, 15 bp, Homo sapiens
cagataaagtcctta

SEQ ID NO: 607023 - DNA, 15 bp, Homo sapiens
agataaagtccttag

SEQ ID NO: 607024 - DNA, 15 bp, Homo sapiens
gataaagtccttagc

SEQ ID NO: 607025 - DNA, 15 bp, Homo sapiens
ataaagtccttagca

SEQ ID NO: 607026 - DNA, 15 bp, Homo sapiens
taaagtccttagcac

SEQ ID NO: 607027 - DNA, 15 bp, Homo sapiens
aaagtccttagcact

SEQ ID NO: 607028 - DNA, 15 bp, Homo sapiens
aagtccttagcacta

SEQ ID NO: 607029 - DNA, 15 bp, Homo sapiens
agtccttagcactag

SEQ ID NO: 607030 - DNA, 15 bp, Homo sapiens
gtccttagcactagc

SEQ ID NO: 607031 - DNA, 15 bp, Homo sapiens
tccttagcactagcc

SEQ ID NO: 607032 - DNA, 15 bp, Homo sapiens
ccttagcactagccc

SEQ ID NO: 607033 - DNA, 15 bp, Homo sapiens
cttagcactagccct

SEQ ID NO: 607034 - DNA, 15 bp, Homo sapiens
ttagcactagcccta

SEQ ID NO: 607035 - DNA, 15 bp, Homo sapiens
tagcactagccctag

SEQ ID NO: 607036 - DNA, 15 bp, Homo sapiens
agcactagccctagc

SEQ ID NO: 607037 - DNA, 15 bp, Homo sapiens
gcactagccctagcc

SEQ ID NO: 607038 - DNA, 15 bp, Homo sapiens
cactagccctagcca

SEQ ID NO: 607039 - DNA, 15 bp, Homo sapiens
actagccctagccag

SEQ ID NO: 607040 - DNA, 15 bp, Homo sapiens
ctagccctagccaga

SEQ ID NO: 607041 - DNA, 15 bp, Homo sapiens
tagccctagccagag

SEQ ID NO: 607042 - DNA, 15 bp, Homo sapiens
agccctagccagaga

SEQ ID NO: 607043 - DNA, 15 bp, Homo sapiens
gccctagccagagat

SEQ ID NO: 607044 - DNA, 15 bp, Homo sapiens
ccctagccagagatg

SEQ ID NO: 607045 - DNA, 15 bp, Homo sapiens
cctagccagagatgt

SEQ ID NO: 607046 - DNA, 15 bp, Homo sapiens
ctagccagagatgtg

SEQ ID NO: 607047 - DNA, 15 bp, Homo sapiens
tagccagagatgtga

SEQ ID NO: 607048 - DNA, 15 bp, Homo sapiens
agccagagatgtgag

SEQ ID NO: 607049 - DNA, 15 bp, Homo sapiens
gccagagatgtgagc

SEQ ID NO: 607050 - DNA, 15 bp, Homo sapiens
ccagagatgtgagct

SEQ ID NO: 607051 - DNA, 15 bp, Homo sapiens
cagagatgtgagctc

SEQ ID NO: 607052 - DNA, 15 bp, Homo sapiens
agagatgtgagctct

SEQ ID NO: 607053 - DNA, 15 bp, Homo sapiens
gagatgtgagctctc

SEQ ID NO: 607054 - DNA, 15 bp, Homo sapiens
agatgtgagctctct

SEQ ID NO: 607055 - DNA, 15 bp, Homo sapiens
gatgtgagctctctc

SEQ ID NO: 607056 - DNA, 15 bp, Homo sapiens
atgtgagctctctcc

SEQ ID NO: 607057 - DNA, 15 bp, Homo sapiens
tgtgagctctctcct

SEQ ID NO: 607058 - DNA, 15 bp, Homo sapiens
gtgagctctctcctc

SEQ ID NO: 607059 - DNA, 15 bp, Homo sapiens
tgagctctctcctcc

SEQ ID NO: 607060 - DNA, 15 bp, Homo sapiens
gagctctctcctcct

SEQ ID NO: 607061 - DNA, 15 bp, Homo sapiens
agctctctcctcctg

SEQ ID NO: 607062 - DNA, 15 bp, Homo sapiens
gctctctcctcctgc

SEQ ID NO: 607063 - DNA, 15 bp, Homo sapiens
ctctctcctcctgca

SEQ ID NO: 607064 - DNA, 15 bp, Homo sapiens
tctctcctcctgcat

SEQ ID NO: 607065 - DNA, 15 bp, Homo sapiens
ctctcctcctgcatt

SEQ ID NO: 607066 - DNA, 15 bp, Homo sapiens
tctcctcctgcatta

SEQ ID NO: 607067 - DNA, 15 bp, Homo sapiens
ctcctcctgcattaa

SEQ ID NO: 607068 - DNA, 15 bp, Homo sapiens
tcctcctgcattaac

SEQ ID NO: 607069 - DNA, 15 bp, Homo sapiens
cctcctgcattaacc

SEQ ID NO: 607070 - DNA, 15 bp, Homo sapiens
ctcctgcattaacca

SEQ ID NO: 607071 - DNA, 15 bp, Homo sapiens
tcctgcattaaccat

SEQ ID NO: 607072 - DNA, 15 bp, Homo sapiens
cctgcattaaccatg

SEQ ID NO: 607073 - DNA, 15 bp, Homo sapiens
ctgcattaaccatgg

SEQ ID NO: 607074 - DNA, 15 bp, Homo sapiens
tgcattaaccatggc

SEQ ID NO: 607075 - DNA, 15 bp, Homo sapiens
gcattaaccatggca

SEQ ID NO: 607076 - DNA, 15 bp, Homo sapiens
cattaaccatggcag

SEQ ID NO: 607077 - DNA, 15 bp, Homo sapiens
attaaccatggcagg

SEQ ID NO: 607078 - DNA, 15 bp, Homo sapiens
ttaaccatggcagga

SEQ ID NO: 607079 - DNA, 15 bp, Homo sapiens
taaccatggcaggat

SEQ ID NO: 607080 - DNA, 15 bp, Homo sapiens
aaccatggcaggata

SEQ ID NO: 607081 - DNA, 15 bp, Homo sapiens
accatggcaggatag

SEQ ID NO: 607082 - DNA, 15 bp, Homo sapiens
ccatggcaggatagt

SEQ ID NO: 607083 - DNA, 15 bp, Homo sapiens
catggcaggatagtg

SEQ ID NO: 607084 - DNA, 15 bp, Homo sapiens
atggcaggatagtgg

SEQ ID NO: 607085 - DNA, 15 bp, Homo sapiens
tggcaggatagtggc

SEQ ID NO: 607086 - DNA, 15 bp, Homo sapiens
ggcaggatagtggct

SEQ ID NO: 607087 - DNA, 15 bp, Homo sapiens
gcaggatagtggctg

SEQ ID NO: 607088 - DNA, 15 bp, Homo sapiens
caggatagtggctgg

SEQ ID NO: 607089 - DNA, 15 bp, Homo sapiens
aggatagtggctgga

SEQ ID NO: 607090 - DNA, 15 bp, Homo sapiens
ggatagtggctggag

SEQ ID NO: 607091 - DNA, 15 bp, Homo sapiens
gatagtggctggagc

SEQ ID NO: 607092 - DNA, 15 bp, Homo sapiens
atagtggctggagca

SEQ ID NO: 607093 - DNA, 15 bp, Homo sapiens
tagtggctggagcag

SEQ ID NO: 607094 - DNA, 15 bp, Homo sapiens
agtggctggagcagg

SEQ ID NO: 607095 - DNA, 15 bp, Homo sapiens
gtggctggagcagga

SEQ ID NO: 607096 - DNA, 15 bp, Homo sapiens
tggctggagcaggac

SEQ ID NO: 607097 - DNA, 15 bp, Homo sapiens
ggctggagcaggacg

SEQ ID NO: 607098 - DNA, 15 bp, Homo sapiens
gctggagcaggacgg

SEQ ID NO: 607099 - DNA, 15 bp, Homo sapiens
ctggagcaggacggg

SEQ ID NO: 607100 - DNA, 15 bp, Homo sapiens
tggagcaggacgggg

SEQ ID NO: 607101 - DNA, 15 bp, Homo sapiens
ggagcaggacgggga

SEQ ID NO: 607102 - DNA, 15 bp, Homo sapiens
gagcaggacggggag

SEQ ID NO: 607103 - DNA, 15 bp, Homo sapiens
agcaggacggggagt

SEQ ID NO: 607104 - DNA, 15 bp, Homo sapiens
gcaggacggggagtg

SEQ ID NO: 607105 - DNA, 15 bp, Homo sapiens
caggacggggagtgg

SEQ ID NO: 607106 - DNA, 15 bp, Homo sapiens
aggacggggagtggt

SEQ ID NO: 607107 - DNA, 15 bp, Homo sapiens
ggacggggagtggta

SEQ ID NO: 607108 - DNA, 15 bp, Homo sapiens
gacggggagtggtat

SEQ ID NO: 607109 - DNA, 15 bp, Homo sapiens
acggggagtggtatc

SEQ ID NO: 607110 - DNA, 15 bp, Homo sapiens
cggggagtggtatca

SEQ ID NO: 607111 - DNA, 15 bp, Homo sapiens
ggggagtggtatcaa

SEQ ID NO: 607112 - DNA, 15 bp, Homo sapiens
gggagtggtatcaag

SEQ ID NO: 607113 - DNA, 15 bp, Homo sapiens
ggagtggtatcaaga

SEQ ID NO: 607114 - DNA, 15 bp, Homo sapiens
gagtggtatcaagag

SEQ ID NO: 607115 - DNA, 15 bp, Homo sapiens
agtggtatcaagaga

SEQ ID NO: 607116 - DNA, 15 bp, Homo sapiens
gtggtatcaagagag

SEQ ID NO: 607117 - DNA, 15 bp, Homo sapiens
tggtatcaagagagg

SEQ ID NO: 607118 - DNA, 15 bp, Homo sapiens
ggtatcaagagaggc

SEQ ID NO: 607119 - DNA, 15 bp, Homo sapiens
gtatcaagagaggca

SEQ ID NO: 607120 - DNA, 15 bp, Homo sapiens
tatcaagagaggcag

SEQ ID NO: 607121 - DNA, 15 bp, Homo sapiens
atcaagagaggcaga

SEQ ID NO: 607122 - DNA, 15 bp, Homo sapiens
tcaagagaggcagag

SEQ ID NO: 607123 - DNA, 15 bp, Homo sapiens
caagagaggcagagg

SEQ ID NO: 607124 - DNA, 15 bp, Homo sapiens
aagagaggcagaggg

SEQ ID NO: 607125 - DNA, 15 bp, Homo sapiens
agagaggcagagggc

SEQ ID NO: 607126 - DNA, 15 bp, Homo sapiens
gagaggcagagggca

SEQ ID NO: 607127 - DNA, 15 bp, Homo sapiens
agaggcagagggcag

SEQ ID NO: 607128 - DNA, 15 bp, Homo sapiens
gaggcagagggcaga

SEQ ID NO: 607129 - DNA, 15 bp, Homo sapiens
aggcagagggcagag

SEQ ID NO: 607130 - DNA, 15 bp, Homo sapiens
ggcagagggcagagc

SEQ ID NO: 607131 - DNA, 15 bp, Homo sapiens
gcagagggcagagct

SEQ ID NO: 607132 - DNA, 15 bp, Homo sapiens
cagagggcagagctg

SEQ ID NO: 607133 - DNA, 15 bp, Homo sapiens
agagggcagagctgt

SEQ ID NO: 607134 - DNA, 15 bp, Homo sapiens
gagggcagagctgtt

SEQ ID NO: 607135 - DNA, 15 bp, Homo sapiens
agggcagagctgttg

SEQ ID NO: 607136 - DNA, 15 bp, Homo sapiens
gggcagagctgttgt

SEQ ID NO: 607137 - DNA, 15 bp, Homo sapiens
ggcagagctgttgtc

SEQ ID NO: 607138 - DNA, 15 bp, Homo sapiens
gcagagctgttgtcc

SEQ ID NO: 607139 - DNA, 15 bp, Homo sapiens
cagagctgttgtccc

SEQ ID NO: 607140 - DNA, 15 bp, Homo sapiens
agagctgttgtcccc

SEQ ID NO: 607141 - DNA, 15 bp, Homo sapiens
gagctgttgtcccca

SEQ ID NO: 607142 - DNA, 15 bp, Homo sapiens
agctgttgtccccat

SEQ ID NO: 607143 - DNA, 15 bp, Homo sapiens
gctgttgtccccatg

SEQ ID NO: 607144 - DNA, 15 bp, Homo sapiens
ctgttgtccccatga

SEQ ID NO: 607145 - DNA, 15 bp, Homo sapiens
tgttgtccccatgac

SEQ ID NO: 607146 - DNA, 15 bp, Homo sapiens
gttgtccccatgaca

SEQ ID NO: 607147 - DNA, 15 bp, Homo sapiens
ttgtccccatgacac

SEQ ID NO: 607148 - DNA, 15 bp, Homo sapiens
tgtccccatgacacc

SEQ ID NO: 607149 - DNA, 15 bp, Homo sapiens
gtccccatgacaccc

SEQ ID NO: 607150 - DNA, 15 bp, Homo sapiens
tccccatgacaccct

SEQ ID NO: 607151 - DNA, 15 bp, Homo sapiens
ccccatgacaccctt

SEQ ID NO: 607152 - DNA, 15 bp, Homo sapiens
cccatgacacccttc

SEQ ID NO: 607153 - DNA, 15 bp, Homo sapiens
ccatgacacccttcc

SEQ ID NO: 607154 - DNA, 15 bp, Homo sapiens
catgacacccttcct

SEQ ID NO: 607155 - DNA, 15 bp, Homo sapiens
atgacacccttcctc

SEQ ID NO: 607156 - DNA, 15 bp, Homo sapiens
tgacacccttcctct

SEQ ID NO: 607157 - DNA, 15 bp, Homo sapiens
gacacccttcctcta

SEQ ID NO: 607158 - DNA, 15 bp, Homo sapiens
acacccttcctctac

SEQ ID NO: 607159 - DNA, 15 bp, Homo sapiens
cacccttcctctacc

SEQ ID NO: 607160 - DNA, 15 bp, Homo sapiens
acccttcctctaccc

SEQ ID NO: 607161 - DNA, 15 bp, Homo sapiens
cccttcctctacccc

SEQ ID NO: 607162 - DNA, 15 bp, Homo sapiens
ccttcctctaccccc

SEQ ID NO: 607163 - DNA, 15 bp, Homo sapiens
cttcctctaccccca

SEQ ID NO: 607164 - DNA, 15 bp, Homo sapiens
ttcctctacccccag

SEQ ID NO: 607165 - DNA, 15 bp, Homo sapiens
tcctctacccccagg

SEQ ID NO: 607166 - DNA, 15 bp, Homo sapiens
cctctacccccagga

SEQ ID NO: 607167 - DNA, 15 bp, Homo sapiens
ctctacccccaggac

SEQ ID NO: 607168 - DNA, 15 bp, Homo sapiens
tctacccccaggact

SEQ ID NO: 607169 - DNA, 15 bp, Homo sapiens
ctacccccaggactc

SEQ ID NO: 607170 - DNA, 15 bp, Homo sapiens
tacccccaggactct

SEQ ID NO: 607171 - DNA, 15 bp, Homo sapiens
acccccaggactctc

SEQ ID NO: 607172 - DNA, 15 bp, Homo sapiens
cccccaggactctct

SEQ ID NO: 607173 - DNA, 15 bp, Homo sapiens
ccccaggactctctg

SEQ ID NO: 607174 - DNA, 15 bp, Homo sapiens
cccaggactctctga

SEQ ID NO: 607175 - DNA, 15 bp, Homo sapiens
ccaggactctctgag

SEQ ID NO: 607176 - DNA, 15 bp, Homo sapiens
caggactctctgagc

SEQ ID NO: 607177 - DNA, 15 bp, Homo sapiens
aggactctctgagct

SEQ ID NO: 607178 - DNA, 15 bp, Homo sapiens
ggactctctgagctg

SEQ ID NO: 607179 - DNA, 15 bp, Homo sapiens
gactctctgagctgc

SEQ ID NO: 607180 - DNA, 15 bp, Homo sapiens
actctctgagctgcc

SEQ ID NO: 607181 - DNA, 15 bp, Homo sapiens
ctctctgagctgccg

SEQ ID NO: 607182 - DNA, 15 bp, Homo sapiens
tctctgagctgccgc

SEQ ID NO: 607183 - DNA, 15 bp, Homo sapiens
ctctgagctgccgcc

SEQ ID NO: 607184 - DNA, 15 bp, Homo sapiens
tctgagctgccgcct

SEQ ID NO: 607185 - DNA, 15 bp, Homo sapiens
ctgagctgccgcctg

SEQ ID NO: 607186 - DNA, 15 bp, Homo sapiens
tgagctgccgcctgg

SEQ ID NO: 607187 - DNA, 15 bp, Homo sapiens
gagctgccgcctggt

SEQ ID NO: 607188 - DNA, 15 bp, Homo sapiens
agctgccgcctggtg

SEQ ID NO: 607189 - DNA, 15 bp, Homo sapiens
gctgccgcctggtgt

SEQ ID NO: 607190 - DNA, 15 bp, Homo sapiens
ctgccgcctggtgtt

SEQ ID NO: 607191 - DNA, 15 bp, Homo sapiens
tgccgcctggtgttt

SEQ ID NO: 607192 - DNA, 15 bp, Homo sapiens
gccgcctggtgtttc

SEQ ID NO: 607193 - DNA, 15 bp, Homo sapiens
ccgcctggtgtttct

SEQ ID NO: 607194 - DNA, 15 bp, Homo sapiens
cgcctggtgtttctg

SEQ ID NO: 607195 - DNA, 15 bp, Homo sapiens
gcctggtgtttctgc

SEQ ID NO: 607196 - DNA, 15 bp, Homo sapiens
cctggtgtttctgct

SEQ ID NO: 607197 - DNA, 15 bp, Homo sapiens
ctggtgtttctgctc

SEQ ID NO: 607198 - DNA, 15 bp, Homo sapiens
tggtgtttctgctca

SEQ ID NO: 607199 - DNA, 15 bp, Homo sapiens
ggtgtttctgctcat

SEQ ID NO: 607200 - DNA, 15 bp, Homo sapiens
gtgtttctgctcatg

SEQ ID NO: 607201 - DNA, 15 bp, Homo sapiens
tgtttctgctcatgc

SEQ ID NO: 607202 - DNA, 15 bp, Homo sapiens
gtttctgctcatgca

SEQ ID NO: 607203 - DNA, 15 bp, Homo sapiens
tttctgctcatgcag

SEQ ID NO: 607204 - DNA, 15 bp, Homo sapiens
ttctgctcatgcagt

SEQ ID NO: 607205 - DNA, 15 bp, Homo sapiens
tctgctcatgcagta

SEQ ID NO: 607206 - DNA, 15 bp, Homo sapiens
ctgctcatgcagtac

SEQ ID NO: 607207 - DNA, 15 bp, Homo sapiens
tgctcatgcagtact

SEQ ID NO: 607208 - DNA, 15 bp, Homo sapiens
gctcatgcagtactg

SEQ ID NO: 607209 - DNA, 15 bp, Homo sapiens
ctcatgcagtactgt

SEQ ID NO: 607210 - DNA, 15 bp, Homo sapiens
tcatgcagtactgtg

SEQ ID NO: 607211 - DNA, 15 bp, Homo sapiens
catgcagtactgtgt

SEQ ID NO: 607212 - DNA, 15 bp, Homo sapiens
atgcagtactgtgtg

SEQ ID NO: 607213 - DNA, 15 bp, Homo sapiens
tgcagtactgtgtgg

SEQ ID NO: 607214 - DNA, 15 bp, Homo sapiens
gcagtactgtgtggc

SEQ ID NO: 607215 - DNA, 15 bp, Homo sapiens
cagtactgtgtggcg

SEQ ID NO: 607216 - DNA, 15 bp, Homo sapiens
agtactgtgtggcgg

SEQ ID NO: 607217 - DNA, 15 bp, Homo sapiens
gtactgtgtggcggc

SEQ ID NO: 607218 - DNA, 15 bp, Homo sapiens
tactgtgtggcggcc

SEQ ID NO: 607219 - DNA, 15 bp, Homo sapiens
actgtgtggcggcca

SEQ ID NO: 607220 - DNA, 15 bp, Homo sapiens
ctgtgtggcggccaa

SEQ ID NO: 607221 - DNA, 15 bp, Homo sapiens
tgtgtggcggccaat

SEQ ID NO: 607222 - DNA, 15 bp, Homo sapiens
gtgtggcggccaatt

SEQ ID NO: 607223 - DNA, 15 bp, Homo sapiens
tgtggcggccaatta

SEQ ID NO: 607224 - DNA, 15 bp, Homo sapiens
gtggcggccaattac

SEQ ID NO: 607225 - DNA, 15 bp, Homo sapiens
tggcggccaattact

SEQ ID NO: 607226 - DNA, 15 bp, Homo sapiens
ggcggccaattacta

SEQ ID NO: 607227 - DNA, 15 bp, Homo sapiens
gcggccaattactac

SEQ ID NO: 607228 - DNA, 15 bp, Homo sapiens
cggccaattactact

SEQ ID NO: 607229 - DNA, 15 bp, Homo sapiens
ggccaattactactg

SEQ ID NO: 607230 - DNA, 15 bp, Homo sapiens
gccaattactactgg

SEQ ID NO: 607231 - DNA, 15 bp, Homo sapiens
ccaattactactggc

SEQ ID NO: 607232 - DNA, 15 bp, Homo sapiens
caattactactggct

SEQ ID NO: 607233 - DNA, 15 bp, Homo sapiens
aattactactggctc

SEQ ID NO: 607234 - DNA, 15 bp, Homo sapiens
attactactggctct

SEQ ID NO: 607235 - DNA, 15 bp, Homo sapiens
ttactactggctctt

SEQ ID NO: 607236 - DNA, 15 bp, Homo sapiens
tactactggctcttg

SEQ ID NO: 607237 - DNA, 15 bp, Homo sapiens
actactggctcttgg

SEQ ID NO: 607238 - DNA, 15 bp, Homo sapiens
ctactggctcttggt

SEQ ID NO: 607239 - DNA, 15 bp, Homo sapiens
tactggctcttggtg

SEQ ID NO: 607240 - DNA, 15 bp, Homo sapiens
actggctcttggtgg

SEQ ID NO: 607241 - DNA, 15 bp, Homo sapiens
ctggctcttggtgga

SEQ ID NO: 607242 - DNA, 15 bp, Homo sapiens
tggctcttggtggag

SEQ ID NO: 607243 - DNA, 15 bp, Homo sapiens
ggctcttggtggagg

SEQ ID NO: 607244 - DNA, 15 bp, Homo sapiens
gctcttggtggaggg

SEQ ID NO: 607245 - DNA, 15 bp, Homo sapiens
ctcttggtggagggc

SEQ ID NO: 607246 - DNA, 15 bp, Homo sapiens
tcttggtggagggcg

SEQ ID NO: 607247 - DNA, 15 bp, Homo sapiens
cttggtggagggcgt

SEQ ID NO: 607248 - DNA, 15 bp, Homo sapiens
ttggtggagggcgtg

SEQ ID NO: 607249 - DNA, 15 bp, Homo sapiens
tggtggagggcgtgt

SEQ ID NO: 607250 - DNA, 15 bp, Homo sapiens
ggtggagggcgtgta

SEQ ID NO: 607251 - DNA, 15 bp, Homo sapiens
gtggagggcgtgtac

SEQ ID NO: 607252 - DNA, 15 bp, Homo sapiens
tggagggcgtgtacc

SEQ ID NO: 607253 - DNA, 15 bp, Homo sapiens
ggagggcgtgtacct

SEQ ID NO: 607254 - DNA, 15 bp, Homo sapiens
gagggcgtgtacctg

SEQ ID NO: 607255 - DNA, 15 bp, Homo sapiens
agggcgtgtacctgt

SEQ ID NO: 607256 - DNA, 15 bp, Homo sapiens
gggcgtgtacctgta

SEQ ID NO: 607257 - DNA, 15 bp, Homo sapiens
ggcgtgtacctgtac

SEQ ID NO: 607258 - DNA, 15 bp, Homo sapiens
gcgtgtacctgtaca

SEQ ID NO: 607259 - DNA, 15 bp, Homo sapiens
cgtgtacctgtacac

SEQ ID NO: 607260 - DNA, 15 bp, Homo sapiens
gtgtacctgtacaca

SEQ ID NO: 607261 - DNA, 15 bp, Homo sapiens
tgtacctgtacacac

SEQ ID NO: 607262 - DNA, 15 bp, Homo sapiens
gtacctgtacacact

SEQ ID NO: 607263 - DNA, 15 bp, Homo sapiens
tacctgtacacactg

SEQ ID NO: 607264 - DNA, 15 bp, Homo sapiens
acctgtacacactgc

SEQ ID NO: 607265 - DNA, 15 bp, Homo sapiens
cctgtacacactgct

SEQ ID NO: 607266 - DNA, 15 bp, Homo sapiens
ctgtacacactgctg

SEQ ID NO: 607267 - DNA, 15 bp, Homo sapiens
tgtacacactgctgg

SEQ ID NO: 607268 - DNA, 15 bp, Homo sapiens
gtacacactgctggc

SEQ ID NO: 607269 - DNA, 15 bp, Homo sapiens
tacacactgctggcc

SEQ ID NO: 607270 - DNA, 15 bp, Homo sapiens
acacactgctggcct

SEQ ID NO: 607271 - DNA, 15 bp, Homo sapiens
cacactgctggcctt

SEQ ID NO: 607272 - DNA, 15 bp, Homo sapiens
acactgctggccttc

SEQ ID NO: 607273 - DNA, 15 bp, Homo sapiens
cactgctggccttct

SEQ ID NO: 607274 - DNA, 15 bp, Homo sapiens
actgctggccttctc

SEQ ID NO: 607275 - DNA, 15 bp, Homo sapiens
ctgctggccttctcg

SEQ ID NO: 607276 - DNA, 15 bp, Homo sapiens
tgctggccttctcgg

SEQ ID NO: 607277 - DNA, 15 bp, Homo sapiens
gctggccttctcggt

SEQ ID NO: 607278 - DNA, 15 bp, Homo sapiens
ctggccttctcggtc

SEQ ID NO: 607279 - DNA, 15 bp, Homo sapiens
tggccttctcggtct

SEQ ID NO: 607280 - DNA, 15 bp, Homo sapiens
ggccttctcggtctt

SEQ ID NO: 607281 - DNA, 15 bp, Homo sapiens
gccttctcggtctta

SEQ ID NO: 607282 - DNA, 15 bp, Homo sapiens
ccttctcggtcttat

SEQ ID NO: 607283 - DNA, 15 bp, Homo sapiens
cttctcggtcttatc

SEQ ID NO: 607284 - DNA, 15 bp, Homo sapiens
ttctcggtcttatct

SEQ ID NO: 607285 - DNA, 15 bp, Homo sapiens
tctcggtcttatctg

SEQ ID NO: 607286 - DNA, 15 bp, Homo sapiens
ctcggtcttatctga

SEQ ID NO: 607287 - DNA, 15 bp, Homo sapiens
tcggtcttatctgag

SEQ ID NO: 607288 - DNA, 15 bp, Homo sapiens
cggtcttatctgagc

SEQ ID NO: 607289 - DNA, 15 bp, Homo sapiens
ggtcttatctgagca

SEQ ID NO: 607290 - DNA, 15 bp, Homo sapiens
gtcttatctgagcaa

SEQ ID NO: 607291 - DNA, 15 bp, Homo sapiens
tcttatctgagcaat

SEQ ID NO: 607292 - DNA, 15 bp, Homo sapiens
cttatctgagcaatg

SEQ ID NO: 607293 - DNA, 15 bp, Homo sapiens
ttatctgagcaatgg

SEQ ID NO: 607294 - DNA, 15 bp, Homo sapiens
tatctgagcaatgga

SEQ ID NO: 607295 - DNA, 15 bp, Homo sapiens
atctgagcaatggat

SEQ ID NO: 607296 - DNA, 15 bp, Homo sapiens
tctgagcaatggatc

SEQ ID NO: 607297 - DNA, 15 bp, Homo sapiens
ctgagcaatggatct

SEQ ID NO: 607298 - DNA, 15 bp, Homo sapiens
tgagcaatggatctt

SEQ ID NO: 607299 - DNA, 15 bp, Homo sapiens
gagcaatggatcttc

SEQ ID NO: 607300 - DNA, 15 bp, Homo sapiens
agcaatggatcttca

SEQ ID NO: 607301 - DNA, 15 bp, Homo sapiens
gcaatggatcttcag

SEQ ID NO: 607302 - DNA, 15 bp, Homo sapiens
caatggatcttcagg

SEQ ID NO: 607303 - DNA, 15 bp, Homo sapiens
aatggatcttcaggc

SEQ ID NO: 607304 - DNA, 15 bp, Homo sapiens
atggatcttcaggct

SEQ ID NO: 607305 - DNA, 15 bp, Homo sapiens
tggatcttcaggctc

SEQ ID NO: 607306 - DNA, 15 bp, Homo sapiens
ggatcttcaggctct

SEQ ID NO: 607307 - DNA, 15 bp, Homo sapiens
gatcttcaggctcta

SEQ ID NO: 607308 - DNA, 15 bp, Homo sapiens
atcttcaggctctac

SEQ ID NO: 607309 - DNA, 15 bp, Homo sapiens
tcttcaggctctacg

SEQ ID NO: 607310 - DNA, 15 bp, Homo sapiens
cttcaggctctacgt

SEQ ID NO: 607311 - DNA, 15 bp, Homo sapiens
ttcaggctctacgtg

SEQ ID NO: 607312 - DNA, 15 bp, Homo sapiens
tcaggctctacgtga

SEQ ID NO: 607313 - DNA, 15 bp, Homo sapiens
caggctctacgtgag

SEQ ID NO: 607314 - DNA, 15 bp, Homo sapiens
aggctctacgtgagc

SEQ ID NO: 607315 - DNA, 15 bp, Homo sapiens
ggctctacgtgagca

SEQ ID NO: 607316 - DNA, 15 bp, Homo sapiens
gctctacgtgagcat

SEQ ID NO: 607317 - DNA, 15 bp, Homo sapiens
ctctacgtgagcata

SEQ ID NO: 607318 - DNA, 15 bp, Homo sapiens
tctacgtgagcatag

SEQ ID NO: 607319 - DNA, 15 bp, Homo sapiens
ctacgtgagcatagg

SEQ ID NO: 607320 - DNA, 15 bp, Homo sapiens
tacgtgagcataggc

SEQ ID NO: 607321 - DNA, 15 bp, Homo sapiens
acgtgagcataggct

SEQ ID NO: 607322 - DNA, 15 bp, Homo sapiens
cgtgagcataggctg

SEQ ID NO: 607323 - DNA, 15 bp, Homo sapiens
gtgagcataggctgg

SEQ ID NO: 607324 - DNA, 15 bp, Homo sapiens
tgagcataggctggg

SEQ ID NO: 607325 - DNA, 15 bp, Homo sapiens
gagcataggctgggg

SEQ ID NO: 607326 - DNA, 15 bp, Homo sapiens
agcataggctggggt

SEQ ID NO: 607327 - DNA, 15 bp, Homo sapiens
gcataggctggggta

SEQ ID NO: 607328 - DNA, 15 bp, Homo sapiens
cataggctggggtaa

SEQ ID NO: 607329 - DNA, 15 bp, Homo sapiens
ataggctggggtaag

SEQ ID NO: 607330 - DNA, 15 bp, Homo sapiens
taggctggggtaaga

SEQ ID NO: 607331 - DNA, 15 bp, Homo sapiens
aggctggggtaagaa

SEQ ID NO: 607332 - DNA, 15 bp, Homo sapiens
ggctggggtaagaac

SEQ ID NO: 607333 - DNA, 15 bp, Homo sapiens
gctggggtaagaacc

SEQ ID NO: 607334 - DNA, 15 bp, Homo sapiens
ctggggtaagaaccg

SEQ ID NO: 607335 - DNA, 15 bp, Homo sapiens
tggggtaagaaccgc

SEQ ID NO: 607336 - DNA, 15 bp, Homo sapiens
ggggtaagaaccgcc

SEQ ID NO: 607337 - DNA, 15 bp, Homo sapiens
gggtaagaaccgcca

SEQ ID NO: 607338 - DNA, 15 bp, Homo sapiens
ggtaagaaccgccat

SEQ ID NO: 607339 - DNA, 15 bp, Homo sapiens
gtaagaaccgccatc

SEQ ID NO: 607340 - DNA, 15 bp, Homo sapiens
taagaaccgccatca

SEQ ID NO: 607341 - DNA, 15 bp, Homo sapiens
aagaaccgccatcac

SEQ ID NO: 607342 - DNA, 15 bp, Homo sapiens
agaaccgccatcacc

SEQ ID NO: 607343 - DNA, 15 bp, Homo sapiens
gaaccgccatcaccc

SEQ ID NO: 607344 - DNA, 15 bp, Homo sapiens
aaccgccatcaccca

SEQ ID NO: 607345 - DNA, 15 bp, Homo sapiens
accgccatcacccac

SEQ ID NO: 607346 - DNA, 15 bp, Homo sapiens
ccgccatcacccacc

SEQ ID NO: 607347 - DNA, 15 bp, Homo sapiens
cgccatcacccaccc

SEQ ID NO: 607348 - DNA, 15 bp, Homo sapiens
gccatcacccaccct

SEQ ID NO: 607349 - DNA, 15 bp, Homo sapiens
ccatcacccaccctg

SEQ ID NO: 607350 - DNA, 15 bp, Homo sapiens
catcacccaccctgg

SEQ ID NO: 607351 - DNA, 15 bp, Homo sapiens
atcacccaccctgga

SEQ ID NO: 607352 - DNA, 15 bp, Homo sapiens
tcacccaccctggac

SEQ ID NO: 607353 - DNA, 15 bp, Homo sapiens
cacccaccctggacc

SEQ ID NO: 607354 - DNA, 15 bp, Homo sapiens
acccaccctggacct

SEQ ID NO: 607355 - DNA, 15 bp, Homo sapiens
cccaccctggacctg

SEQ ID NO: 607356 - DNA, 15 bp, Homo sapiens
ccaccctggacctgt

SEQ ID NO: 607357 - DNA, 15 bp, Homo sapiens
caccctggacctgtg

SEQ ID NO: 607358 - DNA, 15 bp, Homo sapiens
accctggacctgtgg

SEQ ID NO: 607359 - DNA, 15 bp, Homo sapiens
ccctggacctgtggc

SEQ ID NO: 607360 - DNA, 15 bp, Homo sapiens
cctggacctgtggca

SEQ ID NO: 607361 - DNA, 15 bp, Homo sapiens
ctggacctgtggcac

SEQ ID NO: 607362 - DNA, 15 bp, Homo sapiens
tggacctgtggcacg

SEQ ID NO: 607363 - DNA, 15 bp, Homo sapiens
ggacctgtggcacgg

SEQ ID NO: 607364 - DNA, 15 bp, Homo sapiens
gacctgtggcacggg

SEQ ID NO: 607365 - DNA, 15 bp, Homo sapiens
acctgtggcacgggg

SEQ ID NO: 607366 - DNA, 15 bp, Homo sapiens
cctgtggcacggggg

SEQ ID NO: 607367 - DNA, 15 bp, Homo sapiens
ctgtggcacgggggt

SEQ ID NO: 607368 - DNA, 15 bp, Homo sapiens
tgtggcacgggggtg

SEQ ID NO: 607369 - DNA, 15 bp, Homo sapiens
gtggcacgggggtgg

SEQ ID NO: 607370 - DNA, 15 bp, Homo sapiens
tggcacgggggtggg

SEQ ID NO: 607371 - DNA, 15 bp, Homo sapiens
ggcacgggggtggga

SEQ ID NO: 607372 - DNA, 15 bp, Homo sapiens
gcacgggggtgggag

SEQ ID NO: 607373 - DNA, 15 bp, Homo sapiens
cacgggggtgggaga

SEQ ID NO: 607374 - DNA, 15 bp, Homo sapiens
acgggggtgggagac

SEQ ID NO: 607375 - DNA, 15 bp, Homo sapiens
cgggggtgggagacc

SEQ ID NO: 607376 - DNA, 15 bp, Homo sapiens
gggggtgggagacct

SEQ ID NO: 607377 - DNA, 15 bp, Homo sapiens
ggggtgggagacctt

SEQ ID NO: 607378 - DNA, 15 bp, Homo sapiens
gggtgggagaccttg

SEQ ID NO: 607379 - DNA, 15 bp, Homo sapiens
ggtgggagaccttga

SEQ ID NO: 607380 - DNA, 15 bp, Homo sapiens
gtgggagaccttgac

SEQ ID NO: 607381 - DNA, 15 bp, Homo sapiens
tgggagaccttgacc

SEQ ID NO: 607382 - DNA, 15 bp, Homo sapiens
gggagaccttgaccc

SEQ ID NO: 607383 - DNA, 15 bp, Homo sapiens
ggagaccttgacccc

SEQ ID NO: 607384 - DNA, 15 bp, Homo sapiens
gagaccttgacccct

SEQ ID NO: 607385 - DNA, 15 bp, Homo sapiens
agaccttgacccctc

SEQ ID NO: 607386 - DNA, 15 bp, Homo sapiens
gaccttgacccctct

SEQ ID NO: 607387 - DNA, 15 bp, Homo sapiens
accttgacccctctt

SEQ ID NO: 607388 - DNA, 15 bp, Homo sapiens
ccttgacccctcttc

SEQ ID NO: 607389 - DNA, 15 bp, Homo sapiens
cttgacccctcttct

SEQ ID NO: 607390 - DNA, 15 bp, Homo sapiens
ttgacccctcttcta

SEQ ID NO: 607391 - DNA, 15 bp, Homo sapiens
tgacccctcttctaa

SEQ ID NO: 607392 - DNA, 15 bp, Homo sapiens
gacccctcttctaac

SEQ ID NO: 607393 - DNA, 15 bp, Homo sapiens
acccctcttctaaca

SEQ ID NO: 607394 - DNA, 15 bp, Homo sapiens
cccctcttctaacat

SEQ ID NO: 607395 - DNA, 15 bp, Homo sapiens
ccctcttctaacatg

SEQ ID NO: 607396 - DNA, 15 bp, Homo sapiens
cctcttctaacatgg

SEQ ID NO: 607397 - DNA, 15 bp, Homo sapiens
ctcttctaacatggt

SEQ ID NO: 607398 - DNA, 15 bp, Homo sapiens
tcttctaacatggta

SEQ ID NO: 607399 - DNA, 15 bp, Homo sapiens
cttctaacatggtac

SEQ ID NO: 607400 - DNA, 15 bp, Homo sapiens
ttctaacatggtact

SEQ ID NO: 607401 - DNA, 15 bp, Homo sapiens
tctaacatggtactt

SEQ ID NO: 607402 - DNA, 15 bp, Homo sapiens
ctaacatggtacttg

SEQ ID NO: 607403 - DNA, 15 bp, Homo sapiens
taacatggtacttgg

SEQ ID NO: 607404 - DNA, 15 bp, Homo sapiens
aacatggtacttgga

SEQ ID NO: 607405 - DNA, 15 bp, Homo sapiens
acatggtacttggaa

SEQ ID NO: 607406 - DNA, 15 bp, Homo sapiens
catggtacttggaac

SEQ ID NO: 607407 - DNA, 15 bp, Homo sapiens
atggtacttggaacg

SEQ ID NO: 607408 - DNA, 15 bp, Homo sapiens
tggtacttggaacgc

SEQ ID NO: 607409 - DNA, 15 bp, Homo sapiens
ggtacttggaacgca

SEQ ID NO: 607410 - DNA, 15 bp, Homo sapiens
gtacttggaacgcac

SEQ ID NO: 607411 - DNA, 15 bp, Homo sapiens
tacttggaacgcact

SEQ ID NO: 607412 - DNA, 15 bp, Homo sapiens
acttggaacgcactg

SEQ ID NO: 607413 - DNA, 15 bp, Homo sapiens
cttggaacgcactgc

SEQ ID NO: 607414 - DNA, 15 bp, Homo sapiens
ttggaacgcactgct

SEQ ID NO: 607415 - DNA, 15 bp, Homo sapiens
tggaacgcactgctg

SEQ ID NO: 607416 - DNA, 15 bp, Homo sapiens
ggaacgcactgctga

SEQ ID NO: 607417 - DNA, 15 bp, Homo sapiens
gaacgcactgctgag

SEQ ID NO: 607418 - DNA, 15 bp, Homo sapiens
aacgcactgctgagc

SEQ ID NO: 607419 - DNA, 15 bp, Homo sapiens
acgcactgctgagca

SEQ ID NO: 607420 - DNA, 15 bp, Homo sapiens
cgcactgctgagcaa

SEQ ID NO: 607421 - DNA, 15 bp, Homo sapiens
gcactgctgagcaag

SEQ ID NO: 607422 - DNA, 15 bp, Homo sapiens
cactgctgagcaagg

SEQ ID NO: 607423 - DNA, 15 bp, Homo sapiens
actgctgagcaaggg

SEQ ID NO: 607424 - DNA, 15 bp, Homo sapiens
ctgctgagcaagggg

SEQ ID NO: 607425 - DNA, 15 bp, Homo sapiens
tgctgagcaaggggc

SEQ ID NO: 607426 - DNA, 15 bp, Homo sapiens
gctgagcaaggggca

SEQ ID NO: 607427 - DNA, 15 bp, Homo sapiens
ctgagcaaggggcaa

SEQ ID NO: 607428 - DNA, 15 bp, Homo sapiens
tgagcaaggggcaag

SEQ ID NO: 607429 - DNA, 15 bp, Homo sapiens
gagcaaggggcaagg

SEQ ID NO: 607430 - DNA, 15 bp, Homo sapiens
agcaaggggcaaggc

SEQ ID NO: 607431 - DNA, 15 bp, Homo sapiens
gcaaggggcaaggcc

SEQ ID NO: 607432 - DNA, 15 bp, Homo sapiens
caaggggcaaggccc

SEQ ID NO: 607433 - DNA, 15 bp, Homo sapiens
aaggggcaaggccca

SEQ ID NO: 607434 - DNA, 15 bp, Homo sapiens
aggggcaaggcccac

SEQ ID NO: 607435 - DNA, 15 bp, Homo sapiens
ggggcaaggcccact

SEQ ID NO: 607436 - DNA, 15 bp, Homo sapiens
gggcaaggcccactg

SEQ ID NO: 607437 - DNA, 15 bp, Homo sapiens
ggcaaggcccactgg

SEQ ID NO: 607438 - DNA, 15 bp, Homo sapiens
gcaaggcccactggg

SEQ ID NO: 607439 - DNA, 15 bp, Homo sapiens
caaggcccactgggt

SEQ ID NO: 607440 - DNA, 15 bp, Homo sapiens
aaggcccactgggta

SEQ ID NO: 607441 - DNA, 15 bp, Homo sapiens
aggcccactgggtaa

SEQ ID NO: 607442 - DNA, 15 bp, Homo sapiens
ggcccactgggtaac

SEQ ID NO: 607443 - DNA, 15 bp, Homo sapiens
gcccactgggtaacc

SEQ ID NO: 607444 - DNA, 15 bp, Homo sapiens
cccactgggtaaccc

SEQ ID NO: 607445 - DNA, 15 bp, Homo sapiens
ccactgggtaaccct

SEQ ID NO: 607446 - DNA, 15 bp, Homo sapiens
cactgggtaaccctc

SEQ ID NO: 607447 - DNA, 15 bp, Homo sapiens
actgggtaaccctct

SEQ ID NO: 607448 - DNA, 15 bp, Homo sapiens
ctgggtaaccctctt

SEQ ID NO: 607449 - DNA, 15 bp, Homo sapiens
tgggtaaccctcttc

SEQ ID NO: 607450 - DNA, 15 bp, Homo sapiens
gggtaaccctcttcc

SEQ ID NO: 607451 - DNA, 15 bp, Homo sapiens
ggtaaccctcttcct

SEQ ID NO: 607452 - DNA, 15 bp, Homo sapiens
gtaaccctcttcctg

SEQ ID NO: 607453 - DNA, 15 bp, Homo sapiens
taaccctcttcctgg

SEQ ID NO: 607454 - DNA, 15 bp, Homo sapiens
aaccctcttcctggg

SEQ ID NO: 607455 - DNA, 15 bp, Homo sapiens
accctcttcctgggc

SEQ ID NO: 607456 - DNA, 15 bp, Homo sapiens
ccctcttcctgggca

SEQ ID NO: 607457 - DNA, 15 bp, Homo sapiens
cctcttcctgggcac

SEQ ID NO: 607458 - DNA, 15 bp, Homo sapiens
ctcttcctgggcaca

SEQ ID NO: 607459 - DNA, 15 bp, Homo sapiens
tcttcctgggcacag

SEQ ID NO: 607460 - DNA, 15 bp, Homo sapiens
cttcctgggcacagg

SEQ ID NO: 607461 - DNA, 15 bp, Homo sapiens
ttcctgggcacagga

SEQ ID NO: 607462 - DNA, 15 bp, Homo sapiens
tcctgggcacaggac

SEQ ID NO: 607463 - DNA, 15 bp, Homo sapiens
cctgggcacaggacc

SEQ ID NO: 607464 - DNA, 15 bp, Homo sapiens
ctgggcacaggacct

SEQ ID NO: 607465 - DNA, 15 bp, Homo sapiens
tgggcacaggacctt

SEQ ID NO: 607466 - DNA, 15 bp, Homo sapiens
gggcacaggaccttc

SEQ ID NO: 607467 - DNA, 15 bp, Homo sapiens
ggcacaggaccttct

SEQ ID NO: 607468 - DNA, 15 bp, Homo sapiens
gcacaggaccttctg

SEQ ID NO: 607469 - DNA, 15 bp, Homo sapiens
cacaggaccttctgc

SEQ ID NO: 607470 - DNA, 15 bp, Homo sapiens
acaggaccttctgcc

SEQ ID NO: 607471 - DNA, 15 bp, Homo sapiens
caggaccttctgccc

SEQ ID NO: 607472 - DNA, 15 bp, Homo sapiens
aggaccttctgcccc

SEQ ID NO: 607473 - DNA, 15 bp, Homo sapiens
ggaccttctgccccg

SEQ ID NO: 607474 - DNA, 15 bp, Homo sapiens
gaccttctgccccgg

SEQ ID NO: 607475 - DNA, 15 bp, Homo sapiens
accttctgccccggt

SEQ ID NO: 607476 - DNA, 15 bp, Homo sapiens
ccttctgccccggtg

SEQ ID NO: 607477 - DNA, 15 bp, Homo sapiens
cttctgccccggtgc

SEQ ID NO: 607478 - DNA, 15 bp, Homo sapiens
ttctgccccggtgct

SEQ ID NO: 607479 - DNA, 15 bp, Homo sapiens
tctgccccggtgctg

SEQ ID NO: 607480 - DNA, 15 bp, Homo sapiens
ctgccccggtgctgt

SEQ ID NO: 607481 - DNA, 15 bp, Homo sapiens
tgccccggtgctgtt

SEQ ID NO: 607482 - DNA, 15 bp, Homo sapiens
gccccggtgctgtta

SEQ ID NO: 607483 - DNA, 15 bp, Homo sapiens
ccccggtgctgttaa

SEQ ID NO: 607484 - DNA, 15 bp, Homo sapiens
cccggtgctgttaag

SEQ ID NO: 607485 - DNA, 15 bp, Homo sapiens
ccggtgctgttaaga

SEQ ID NO: 607486 - DNA, 15 bp, Homo sapiens
cggtgctgttaagat

SEQ ID NO: 607487 - DNA, 15 bp, Homo sapiens
ggtgctgttaagatg

SEQ ID NO: 607488 - DNA, 15 bp, Homo sapiens
gtgctgttaagatgc

SEQ ID NO: 607489 - DNA, 15 bp, Homo sapiens
tgctgttaagatgcc

SEQ ID NO: 607490 - DNA, 15 bp, Homo sapiens
gctgttaagatgccg

SEQ ID NO: 607491 - DNA, 15 bp, Homo sapiens
ctgttaagatgccgt

SEQ ID NO: 607492 - DNA, 15 bp, Homo sapiens
tgttaagatgccgta

SEQ ID NO: 607493 - DNA, 15 bp, Homo sapiens
gttaagatgccgtag

SEQ ID NO: 607494 - DNA, 15 bp, Homo sapiens
ttaagatgccgtagg

SEQ ID NO: 607495 - DNA, 15 bp, Homo sapiens
taagatgccgtaggg

SEQ ID NO: 607496 - DNA, 15 bp, Homo sapiens
aagatgccgtagggg

SEQ ID NO: 607497 - DNA, 15 bp, Homo sapiens
agatgccgtaggggg

SEQ ID NO: 607498 - DNA, 15 bp, Homo sapiens
gatgccgtagggggt

SEQ ID NO: 607499 - DNA, 15 bp, Homo sapiens
atgccgtagggggtt

SEQ ID NO: 607500 - DNA, 15 bp, Homo sapiens
tgccgtagggggtta

SEQ ID NO: 607501 - DNA, 15 bp, Homo sapiens
gccgtagggggttat

SEQ ID NO: 607502 - DNA, 15 bp, Homo sapiens
ccgtagggggttatg

SEQ ID NO: 607503 - DNA, 15 bp, Homo sapiens
cgtagggggttatgg

SEQ ID NO: 607504 - DNA, 15 bp, Homo sapiens
gtagggggttatggt

SEQ ID NO: 607505 - DNA, 15 bp, Homo sapiens
tagggggttatggtc

SEQ ID NO: 607506 - DNA, 15 bp, Homo sapiens
agggggttatggtcc

SEQ ID NO: 607507 - DNA, 15 bp, Homo sapiens
gggggttatggtcct

SEQ ID NO: 607508 - DNA, 15 bp, Homo sapiens
ggggttatggtcctc

SEQ ID NO: 607509 - DNA, 15 bp, Homo sapiens
gggttatggtcctcc

SEQ ID NO: 607510 - DNA, 15 bp, Homo sapiens
ggttatggtcctccc

SEQ ID NO: 607511 - DNA, 15 bp, Homo sapiens
gttatggtcctcccc

SEQ ID NO: 607512 - DNA, 15 bp, Homo sapiens
ttatggtcctcccct

SEQ ID NO: 607513 - DNA, 15 bp, Homo sapiens
tatggtcctcccctc

SEQ ID NO: 607514 - DNA, 15 bp, Homo sapiens
atggtcctcccctcc

SEQ ID NO: 607515 - DNA, 15 bp, Homo sapiens
tggtcctcccctcct

SEQ ID NO: 607516 - DNA, 15 bp, Homo sapiens
ggtcctcccctcctc

SEQ ID NO: 607517 - DNA, 15 bp, Homo sapiens
gtcctcccctcctct

SEQ ID NO: 607518 - DNA, 15 bp, Homo sapiens
tcctcccctcctctg

SEQ ID NO: 607519 - DNA, 15 bp, Homo sapiens
cctcccctcctctgc

SEQ ID NO: 607520 - DNA, 15 bp, Homo sapiens
ctcccctcctctgca

SEQ ID NO: 607521 - DNA, 15 bp, Homo sapiens
tcccctcctctgcat

SEQ ID NO: 607522 - DNA, 15 bp, Homo sapiens
cccctcctctgcata

SEQ ID NO: 607523 - DNA, 15 bp, Homo sapiens
ccctcctctgcataa

SEQ ID NO: 607524 - DNA, 15 bp, Homo sapiens
cctcctctgcataac

SEQ ID NO: 607525 - DNA, 15 bp, Homo sapiens
ctcctctgcataact

SEQ ID NO: 607526 - DNA, 15 bp, Homo sapiens
tcctctgcataactc

SEQ ID NO: 607527 - DNA, 15 bp, Homo sapiens
cctctgcataactct

SEQ ID NO: 607528 - DNA, 15 bp, Homo sapiens
ctctgcataactctc

SEQ ID NO: 607529 - DNA, 15 bp, Homo sapiens
tctgcataactctcc

SEQ ID NO: 607530 - DNA, 15 bp, Homo sapiens
ctgcataactctcct

SEQ ID NO: 607531 - DNA, 15 bp, Homo sapiens
tgcataactctcctc

SEQ ID NO: 607532 - DNA, 15 bp, Homo sapiens
gcataactctcctcc

SEQ ID NO: 607533 - DNA, 15 bp, Homo sapiens
cataactctcctccc

SEQ ID NO: 607534 - DNA, 15 bp, Homo sapiens
ataactctcctccct

SEQ ID NO: 607535 - DNA, 15 bp, Homo sapiens
taactctcctccctt

SEQ ID NO: 607536 - DNA, 15 bp, Homo sapiens
aactctcctccctta

SEQ ID NO: 607537 - DNA, 15 bp, Homo sapiens
actctcctcccttaa

SEQ ID NO: 607538 - DNA, 15 bp, Homo sapiens
ctctcctcccttaat

SEQ ID NO: 607539 - DNA, 15 bp, Homo sapiens
tctcctcccttaatg

SEQ ID NO: 607540 - DNA, 15 bp, Homo sapiens
ctcctcccttaatgg

SEQ ID NO: 607541 - DNA, 15 bp, Homo sapiens
tcctcccttaatgga

SEQ ID NO: 607542 - DNA, 15 bp, Homo sapiens
cctcccttaatggaa

SEQ ID NO: 607543 - DNA, 15 bp, Homo sapiens
ctcccttaatggaag

SEQ ID NO: 607544 - DNA, 15 bp, Homo sapiens
tcccttaatggaagc

SEQ ID NO: 607545 - DNA, 15 bp, Homo sapiens
cccttaatggaagcc

SEQ ID NO: 607546 - DNA, 15 bp, Homo sapiens
ccttaatggaagcct

SEQ ID NO: 607547 - DNA, 15 bp, Homo sapiens
cttaatggaagcctc

SEQ ID NO: 607548 - DNA, 15 bp, Homo sapiens
ttaatggaagcctcc

SEQ ID NO: 607549 - DNA, 15 bp, Homo sapiens
taatggaagcctcca

SEQ ID NO: 607550 - DNA, 15 bp, Homo sapiens
aatggaagcctccac

SEQ ID NO: 607551 - DNA, 15 bp, Homo sapiens
atggaagcctccacc

SEQ ID NO: 607552 - DNA, 15 bp, Homo sapiens
tggaagcctccaccg

SEQ ID NO: 607553 - DNA, 15 bp, Homo sapiens
ggaagcctccaccgc

SEQ ID NO: 607554 - DNA, 15 bp, Homo sapiens
gaagcctccaccgca

SEQ ID NO: 607555 - DNA, 15 bp, Homo sapiens
aagcctccaccgcat

SEQ ID NO: 607556 - DNA, 15 bp, Homo sapiens
agcctccaccgcatg

SEQ ID NO: 607557 - DNA, 15 bp, Homo sapiens
gcctccaccgcatgt

SEQ ID NO: 607558 - DNA, 15 bp, Homo sapiens
cctccaccgcatgtg

SEQ ID NO: 607559 - DNA, 15 bp, Homo sapiens
ctccaccgcatgtgg

SEQ ID NO: 607560 - DNA, 15 bp, Homo sapiens
tccaccgcatgtggc

SEQ ID NO: 607561 - DNA, 15 bp, Homo sapiens
ccaccgcatgtggcc

SEQ ID NO: 607562 - DNA, 15 bp, Homo sapiens
caccgcatgtggcca

SEQ ID NO: 607563 - DNA, 15 bp, Homo sapiens
accgcatgtggccaa

SEQ ID NO: 607564 - DNA, 15 bp, Homo sapiens
ccgcatgtggccaaa

SEQ ID NO: 607565 - DNA, 15 bp, Homo sapiens
cgcatgtggccaaac

SEQ ID NO: 607566 - DNA, 15 bp, Homo sapiens
gcatgtggccaaaca

SEQ ID NO: 607567 - DNA, 15 bp, Homo sapiens
catgtggccaaacac

SEQ ID NO: 607568 - DNA, 15 bp, Homo sapiens
atgtggccaaacacc

SEQ ID NO: 607569 - DNA, 15 bp, Homo sapiens
tgtggccaaacacca

SEQ ID NO: 607570 - DNA, 15 bp, Homo sapiens
gtggccaaacaccac

SEQ ID NO: 607571 - DNA, 15 bp, Homo sapiens
tggccaaacaccacc

SEQ ID NO: 607572 - DNA, 15 bp, Homo sapiens
ggccaaacaccaccc

SEQ ID NO: 607573 - DNA, 15 bp, Homo sapiens
gccaaacaccaccct

SEQ ID NO: 607574 - DNA, 15 bp, Homo sapiens
ccaaacaccaccctc

SEQ ID NO: 607575 - DNA, 15 bp, Homo sapiens
caaacaccaccctct

SEQ ID NO: 607576 - DNA, 15 bp, Homo sapiens
aaacaccaccctcta

SEQ ID NO: 607577 - DNA, 15 bp, Homo sapiens
aacaccaccctctac

SEQ ID NO: 607578 - DNA, 15 bp, Homo sapiens
acaccaccctctacc

SEQ ID NO: 607579 - DNA, 15 bp, Homo sapiens
caccaccctctacca

SEQ ID NO: 607580 - DNA, 15 bp, Homo sapiens
accaccctctaccac

SEQ ID NO: 607581 - DNA, 15 bp, Homo sapiens
ccaccctctaccact

SEQ ID NO: 607582 - DNA, 15 bp, Homo sapiens
caccctctaccacta

SEQ ID NO: 607583 - DNA, 15 bp, Homo sapiens
accctctaccactat

SEQ ID NO: 607584 - DNA, 15 bp, Homo sapiens
ccctctaccactatc

SEQ ID NO: 607585 - DNA, 15 bp, Homo sapiens
cctctaccactatca

SEQ ID NO: 607586 - DNA, 15 bp, Homo sapiens
ctctaccactatcat

SEQ ID NO: 607587 - DNA, 15 bp, Homo sapiens
tctaccactatcatg

SEQ ID NO: 607588 - DNA, 15 bp, Homo sapiens
ctaccactatcatgc

SEQ ID NO: 607589 - DNA, 15 bp, Homo sapiens
taccactatcatgca

SEQ ID NO: 607590 - DNA, 15 bp, Homo sapiens
accactatcatgcac

SEQ ID NO: 607591 - DNA, 15 bp, Homo sapiens
ccactatcatgcaca

SEQ ID NO: 607592 - DNA, 15 bp, Homo sapiens
cactatcatgcacac

SEQ ID NO: 607593 - DNA, 15 bp, Homo sapiens
actatcatgcacacc

SEQ ID NO: 607594 - DNA, 15 bp, Homo sapiens
ctatcatgcacacca

SEQ ID NO: 607595 - DNA, 15 bp, Homo sapiens
tatcatgcacaccac

SEQ ID NO: 607596 - DNA, 15 bp, Homo sapiens
atcatgcacaccact

SEQ ID NO: 607597 - DNA, 15 bp, Homo sapiens
tcatgcacaccactg

SEQ ID NO: 607598 - DNA, 15 bp, Homo sapiens
catgcacaccactgg

SEQ ID NO: 607599 - DNA, 15 bp, Homo sapiens
atgcacaccactgga

SEQ ID NO: 607600 - DNA, 15 bp, Homo sapiens
tgcacaccactggag

SEQ ID NO: 607601 - DNA, 15 bp, Homo sapiens
gcacaccactggagg

SEQ ID NO: 607602 - DNA, 15 bp, Homo sapiens
cacaccactggaggt

SEQ ID NO: 607603 - DNA, 15 bp, Homo sapiens
acaccactggaggtc

SEQ ID NO: 607604 - DNA, 15 bp, Homo sapiens
caccactggaggtca

SEQ ID NO: 607605 - DNA, 15 bp, Homo sapiens
accactggaggtcat

SEQ ID NO: 607606 - DNA, 15 bp, Homo sapiens
ccactggaggtcatg

SEQ ID NO: 607607 - DNA, 15 bp, Homo sapiens
cactggaggtcatgg

SEQ ID NO: 607608 - DNA, 15 bp, Homo sapiens
actggaggtcatggc

SEQ ID NO: 607609 - DNA, 15 bp, Homo sapiens
ctggaggtcatggca

SEQ ID NO: 607610 - DNA, 15 bp, Homo sapiens
tggaggtcatggcac

SEQ ID NO: 607611 - DNA, 15 bp, Homo sapiens
ggaggtcatggcact

SEQ ID NO: 607612 - DNA, 15 bp, Homo sapiens
gaggtcatggcactg

SEQ ID NO: 607613 - DNA, 15 bp, Homo sapiens
aggtcatggcactgt

SEQ ID NO: 607614 - DNA, 15 bp, Homo sapiens
ggtcatggcactgtt

SEQ ID NO: 607615 - DNA, 15 bp, Homo sapiens
gtcatggcactgttc

SEQ ID NO: 607616 - DNA, 15 bp, Homo sapiens
tcatggcactgttct

SEQ ID NO: 607617 - DNA, 15 bp, Homo sapiens
catggcactgttctc

SEQ ID NO: 607618 - DNA, 15 bp, Homo sapiens
atggcactgttctct

SEQ ID NO: 607619 - DNA, 15 bp, Homo sapiens
tggcactgttctctt

SEQ ID NO: 607620 - DNA, 15 bp, Homo sapiens
ggcactgttctctta

SEQ ID NO: 607621 - DNA, 15 bp, Homo sapiens
gcactgttctcttaa

SEQ ID NO: 607622 - DNA, 15 bp, Homo sapiens
cactgttctcttaag

SEQ ID NO: 607623 - DNA, 15 bp, Homo sapiens
actgttctcttaaga

SEQ ID NO: 607624 - DNA, 15 bp, Homo sapiens
ctgttctcttaagac

SEQ ID NO: 607625 - DNA, 15 bp, Homo sapiens
tgttctcttaagacc

SEQ ID NO: 607626 - DNA, 15 bp, Homo sapiens
gttctcttaagacca

SEQ ID NO: 607627 - DNA, 15 bp, Homo sapiens
ttctcttaagaccac

SEQ ID NO: 607628 - DNA, 15 bp, Homo sapiens
tctcttaagaccaca

SEQ ID NO: 607629 - DNA, 15 bp, Homo sapiens
ctcttaagaccacat

SEQ ID NO: 607630 - DNA, 15 bp, Homo sapiens
tcttaagaccacatg

SEQ ID NO: 607631 - DNA, 15 bp, Homo sapiens
cttaagaccacatgg

SEQ ID NO: 607632 - DNA, 15 bp, Homo sapiens
ttaagaccacatggg

SEQ ID NO: 607633 - DNA, 15 bp, Homo sapiens
taagaccacatgggg

SEQ ID NO: 607634 - DNA, 15 bp, Homo sapiens
aagaccacatgggga

SEQ ID NO: 607635 - DNA, 15 bp, Homo sapiens
agaccacatggggac

SEQ ID NO: 607636 - DNA, 15 bp, Homo sapiens
gaccacatggggaca

SEQ ID NO: 607637 - DNA, 15 bp, Homo sapiens
accacatggggacat

SEQ ID NO: 607638 - DNA, 15 bp, Homo sapiens
ccacatggggacata

SEQ ID NO: 607639 - DNA, 15 bp, Homo sapiens
cacatggggacataa

SEQ ID NO: 607640 - DNA, 15 bp, Homo sapiens
acatggggacataag

SEQ ID NO: 607641 - DNA, 15 bp, Homo sapiens
catggggacataagt

SEQ ID NO: 607642 - DNA, 15 bp, Homo sapiens
atggggacataagtt

SEQ ID NO: 607643 - DNA, 15 bp, Homo sapiens
tggggacataagttc

SEQ ID NO: 607644 - DNA, 15 bp, Homo sapiens
ggggacataagttca

SEQ ID NO: 607645 - DNA, 15 bp, Homo sapiens
gggacataagttcac

SEQ ID NO: 607646 - DNA, 15 bp, Homo sapiens
ggacataagttcaca

SEQ ID NO: 607647 - DNA, 15 bp, Homo sapiens
gacataagttcacac

SEQ ID NO: 607648 - DNA, 15 bp, Homo sapiens
acataagttcacacc

SEQ ID NO: 607649 - DNA, 15 bp, Homo sapiens
cataagttcacaccc

SEQ ID NO: 607650 - DNA, 15 bp, Homo sapiens
ataagttcacaccca

SEQ ID NO: 607651 - DNA, 15 bp, Homo sapiens
taagttcacacccag

SEQ ID NO: 607652 - DNA, 15 bp, Homo sapiens
aagttcacacccagt

SEQ ID NO: 607653 - DNA, 15 bp, Homo sapiens
agttcacacccagtc

SEQ ID NO: 607654 - DNA, 15 bp, Homo sapiens
gttcacacccagtcc

SEQ ID NO: 607655 - DNA, 15 bp, Homo sapiens
ttcacacccagtccc

SEQ ID NO: 607656 - DNA, 15 bp, Homo sapiens
tcacacccagtcccg

SEQ ID NO: 607657 - DNA, 15 bp, Homo sapiens
cacacccagtcccgg

SEQ ID NO: 607658 - DNA, 15 bp, Homo sapiens
acacccagtcccggg

SEQ ID NO: 607659 - DNA, 15 bp, Homo sapiens
cacccagtcccgggc

SEQ ID NO: 607660 - DNA, 15 bp, Homo sapiens
acccagtcccgggca

SEQ ID NO: 607661 - DNA, 15 bp, Homo sapiens
cccagtcccgggcag

SEQ ID NO: 607662 - DNA, 15 bp, Homo sapiens
ccagtcccgggcagc

SEQ ID NO: 607663 - DNA, 15 bp, Homo sapiens
cagtcccgggcagcc

SEQ ID NO: 607664 - DNA, 15 bp, Homo sapiens
agtcccgggcagccc

SEQ ID NO: 607665 - DNA, 15 bp, Homo sapiens
gtcccgggcagcccg

SEQ ID NO: 607666 - DNA, 15 bp, Homo sapiens
tcccgggcagcccga

SEQ ID NO: 607667 - DNA, 15 bp, Homo sapiens
cccgggcagcccgag

SEQ ID NO: 607668 - DNA, 15 bp, Homo sapiens
ccgggcagcccgagg

SEQ ID NO: 607669 - DNA, 15 bp, Homo sapiens
cgggcagcccgaggg

SEQ ID NO: 607670 - DNA, 15 bp, Homo sapiens
gggcagcccgagggc

SEQ ID NO: 607671 - DNA, 15 bp, Homo sapiens
ggcagcccgagggcc

SEQ ID NO: 607672 - DNA, 15 bp, Homo sapiens
gcagcccgagggcct

SEQ ID NO: 607673 - DNA, 15 bp, Homo sapiens
cagcccgagggcctg

SEQ ID NO: 607674 - DNA, 15 bp, Homo sapiens
agcccgagggcctga

SEQ ID NO: 607675 - DNA, 15 bp, Homo sapiens
gcccgagggcctgag

SEQ ID NO: 607676 - DNA, 15 bp, Homo sapiens
cccgagggcctgagg

SEQ ID NO: 607677 - DNA, 15 bp, Homo sapiens
ccgagggcctgaggg

SEQ ID NO: 607678 - DNA, 15 bp, Homo sapiens
cgagggcctgaggga

SEQ ID NO: 607679 - DNA, 15 bp, Homo sapiens
gagggcctgagggaa

SEQ ID NO: 607680 - DNA, 15 bp, Homo sapiens
agggcctgagggaaa

SEQ ID NO: 607681 - DNA, 15 bp, Homo sapiens
gggcctgagggaaat

SEQ ID NO: 607682 - DNA, 15 bp, Homo sapiens
ggcctgagggaaatg

SEQ ID NO: 607683 - DNA, 15 bp, Homo sapiens
gcctgagggaaatgg

SEQ ID NO: 607684 - DNA, 15 bp, Homo sapiens
cctgagggaaatggt

SEQ ID NO: 607685 - DNA, 15 bp, Homo sapiens
ctgagggaaatggtg

SEQ ID NO: 607686 - DNA, 15 bp, Homo sapiens
tgagggaaatggtga

SEQ ID NO: 607687 - DNA, 15 bp, Homo sapiens
gagggaaatggtgag

SEQ ID NO: 607688 - DNA, 15 bp, Homo sapiens
agggaaatggtgagt

SEQ ID NO: 607689 - DNA, 15 bp, Homo sapiens
gggaaatggtgagtc

SEQ ID NO: 607690 - DNA, 15 bp, Homo sapiens
ggaaatggtgagtcc

SEQ ID NO: 607691 - DNA, 15 bp, Homo sapiens
gaaatggtgagtcct

SEQ ID NO: 607692 - DNA, 15 bp, Homo sapiens
aaatggtgagtcctg

SEQ ID NO: 607693 - DNA, 15 bp, Homo sapiens
aatggtgagtcctgg

SEQ ID NO: 607694 - DNA, 15 bp, Homo sapiens
atggtgagtcctggg

SEQ ID NO: 607695 - DNA, 15 bp, Homo sapiens
tggtgagtcctgggc

SEQ ID NO: 607696 - DNA, 15 bp, Homo sapiens
ggtgagtcctgggcc

SEQ ID NO: 607697 - DNA, 15 bp, Homo sapiens
gtgagtcctgggcct

SEQ ID NO: 607698 - DNA, 15 bp, Homo sapiens
tgagtcctgggcctc

SEQ ID NO: 607699 - DNA, 15 bp, Homo sapiens
gagtcctgggcctca

SEQ ID NO: 607700 - DNA, 15 bp, Homo sapiens
agtcctgggcctcaa

SEQ ID NO: 607701 - DNA, 15 bp, Homo sapiens
gtcctgggcctcaag

SEQ ID NO: 607702 - DNA, 15 bp, Homo sapiens
tcctgggcctcaagg

SEQ ID NO: 607703 - DNA, 15 bp, Homo sapiens
cctgggcctcaaggt

SEQ ID NO: 607704 - DNA, 15 bp, Homo sapiens
ctgggcctcaaggtg

SEQ ID NO: 607705 - DNA, 15 bp, Homo sapiens
tgggcctcaaggtgg

SEQ ID NO: 607706 - DNA, 15 bp, Homo sapiens
gggcctcaaggtggg

SEQ ID NO: 607707 - DNA, 15 bp, Homo sapiens
ggcctcaaggtgggg

SEQ ID NO: 607708 - DNA, 15 bp, Homo sapiens
gcctcaaggtgggga

SEQ ID NO: 607709 - DNA, 15 bp, Homo sapiens
cctcaaggtggggag

SEQ ID NO: 607710 - DNA, 15 bp, Homo sapiens
ctcaaggtggggagg

SEQ ID NO: 607711 - DNA, 15 bp, Homo sapiens
tcaaggtggggaggg

SEQ ID NO: 607712 - DNA, 15 bp, Homo sapiens
caaggtggggagggg

SEQ ID NO: 607713 - DNA, 15 bp, Homo sapiens
aaggtggggagggga

SEQ ID NO: 607714 - DNA, 15 bp, Homo sapiens
aggtggggaggggat

SEQ ID NO: 607715 - DNA, 15 bp, Homo sapiens
ggtggggaggggatc

SEQ ID NO: 607716 - DNA, 15 bp, Homo sapiens
gtggggaggggatca

SEQ ID NO: 607717 - DNA, 15 bp, Homo sapiens
tggggaggggatcaa

SEQ ID NO: 607718 - DNA, 15 bp, Homo sapiens
ggggaggggatcaag

SEQ ID NO: 607719 - DNA, 15 bp, Homo sapiens
gggaggggatcaaga

SEQ ID NO: 607720 - DNA, 15 bp, Homo sapiens
ggaggggatcaagag

SEQ ID NO: 607721 - DNA, 15 bp, Homo sapiens
gaggggatcaagagg

SEQ ID NO: 607722 - DNA, 15 bp, Homo sapiens
aggggatcaagaggg

SEQ ID NO: 607723 - DNA, 15 bp, Homo sapiens
ggggatcaagagggt

SEQ ID NO: 607724 - DNA, 15 bp, Homo sapiens
gggatcaagagggta

SEQ ID NO: 607725 - DNA, 15 bp, Homo sapiens
ggatcaagagggtag

SEQ ID NO: 607726 - DNA, 15 bp, Homo sapiens
gatcaagagggtagg

SEQ ID NO: 607727 - DNA, 15 bp, Homo sapiens
atcaagagggtaggg

SEQ ID NO: 607728 - DNA, 15 bp, Homo sapiens
tcaagagggtagggg

SEQ ID NO: 607729 - DNA, 15 bp, Homo sapiens
caagagggtaggggg

SEQ ID NO: 607730 - DNA, 15 bp, Homo sapiens
aagagggtagggggc

SEQ ID NO: 607731 - DNA, 15 bp, Homo sapiens
agagggtagggggct

SEQ ID NO: 607732 - DNA, 15 bp, Homo sapiens
gagggtagggggctg

SEQ ID NO: 607733 - DNA, 15 bp, Homo sapiens
agggtagggggctgg

SEQ ID NO: 607734 - DNA, 15 bp, Homo sapiens
gggtagggggctggc

SEQ ID NO: 607735 - DNA, 15 bp, Homo sapiens
ggtagggggctggct

SEQ ID NO: 607736 - DNA, 15 bp, Homo sapiens
gtagggggctggctg

SEQ ID NO: 607737 - DNA, 15 bp, Homo sapiens
tagggggctggctgg

SEQ ID NO: 607738 - DNA, 15 bp, Homo sapiens
agggggctggctggg

SEQ ID NO: 607739 - DNA, 15 bp, Homo sapiens
gggggctggctgggg

SEQ ID NO: 607740 - DNA, 15 bp, Homo sapiens
ggggctggctggggg

SEQ ID NO: 607741 - DNA, 15 bp, Homo sapiens
gggctggctgggggg

SEQ ID NO: 607742 - DNA, 15 bp, Homo sapiens
ggctggctgggggga

SEQ ID NO: 607743 - DNA, 15 bp, Homo sapiens
gctggctggggggag

SEQ ID NO: 607744 - DNA, 15 bp, Homo sapiens
ctggctggggggagc

SEQ ID NO: 607745 - DNA, 15 bp, Homo sapiens
tggctggggggagcc

SEQ ID NO: 607746 - DNA, 15 bp, Homo sapiens
ggctggggggagcct

SEQ ID NO: 607747 - DNA, 15 bp, Homo sapiens
gctggggggagcctg

SEQ ID NO: 607748 - DNA, 15 bp, Homo sapiens
ctggggggagcctgc

SEQ ID NO: 607749 - DNA, 15 bp, Homo sapiens
tggggggagcctgct

SEQ ID NO: 607750 - DNA, 15 bp, Homo sapiens
ggggggagcctgctg

SEQ ID NO: 607751 - DNA, 15 bp, Homo sapiens
gggggagcctgctgg

SEQ ID NO: 607752 - DNA, 15 bp, Homo sapiens
ggggagcctgctggt

SEQ ID NO: 607753 - DNA, 15 bp, Homo sapiens
gggagcctgctggtg

SEQ ID NO: 607754 - DNA, 15 bp, Homo sapiens
ggagcctgctggtgc

SEQ ID NO: 607755 - DNA, 15 bp, Homo sapiens
gagcctgctggtgct

SEQ ID NO: 607756 - DNA, 15 bp, Homo sapiens
agcctgctggtgctc

SEQ ID NO: 607757 - DNA, 15 bp, Homo sapiens
gcctgctggtgctct

SEQ ID NO: 607758 - DNA, 15 bp, Homo sapiens
cctgctggtgctctg

SEQ ID NO: 607759 - DNA, 15 bp, Homo sapiens
ctgctggtgctctgt

SEQ ID NO: 607760 - DNA, 15 bp, Homo sapiens
tgctggtgctctgtc

SEQ ID NO: 607761 - DNA, 15 bp, Homo sapiens
gctggtgctctgtca

SEQ ID NO: 607762 - DNA, 15 bp, Homo sapiens
ctggtgctctgtcac

SEQ ID NO: 607763 - DNA, 15 bp, Homo sapiens
tggtgctctgtcaca

SEQ ID NO: 607764 - DNA, 15 bp, Homo sapiens
ggtgctctgtcacat

SEQ ID NO: 607765 - DNA, 15 bp, Homo sapiens
gtgctctgtcacatg

SEQ ID NO: 607766 - DNA, 15 bp, Homo sapiens
tgctctgtcacatga

SEQ ID NO: 607767 - DNA, 15 bp, Homo sapiens
gctctgtcacatgac

SEQ ID NO: 607768 - DNA, 15 bp, Homo sapiens
ctctgtcacatgacg

SEQ ID NO: 607769 - DNA, 15 bp, Homo sapiens
tctgtcacatgacga

SEQ ID NO: 607770 - DNA, 15 bp, Homo sapiens
ctgtcacatgacgat

SEQ ID NO: 607771 - DNA, 15 bp, Homo sapiens
tgtcacatgacgatg

SEQ ID NO: 607772 - DNA, 15 bp, Homo sapiens
gtcacatgacgatga

SEQ ID NO: 607773 - DNA, 15 bp, Homo sapiens
tcacatgacgatgaa

SEQ ID NO: 607774 - DNA, 15 bp, Homo sapiens
cacatgacgatgaag

SEQ ID NO: 607775 - DNA, 15 bp, Homo sapiens
acatgacgatgaaga

SEQ ID NO: 607776 - DNA, 15 bp, Homo sapiens
catgacgatgaagag

SEQ ID NO: 607777 - DNA, 15 bp, Homo sapiens
atgacgatgaagagg

SEQ ID NO: 607778 - DNA, 15 bp, Homo sapiens
tgacgatgaagagga

SEQ ID NO: 607779 - DNA, 15 bp, Homo sapiens
gacgatgaagaggag

SEQ ID NO: 607780 - DNA, 15 bp, Homo sapiens
acgatgaagaggagg

SEQ ID NO: 607781 - DNA, 15 bp, Homo sapiens
cgatgaagaggaggg

SEQ ID NO: 607782 - DNA, 15 bp, Homo sapiens
gatgaagaggagggc

SEQ ID NO: 607783 - DNA, 15 bp, Homo sapiens
atgaagaggagggct

SEQ ID NO: 607784 - DNA, 15 bp, Homo sapiens
tgaagaggagggctc

SEQ ID NO: 607785 - DNA, 15 bp, Homo sapiens
gaagaggagggctca

SEQ ID NO: 607786 - DNA, 15 bp, Homo sapiens
aagaggagggctcag

SEQ ID NO: 607787 - DNA, 15 bp, Homo sapiens
agaggagggctcaga

SEQ ID NO: 607788 - DNA, 15 bp, Homo sapiens
gaggagggctcagag

SEQ ID NO: 607789 - DNA, 15 bp, Homo sapiens
aggagggctcagagg

SEQ ID NO: 607790 - DNA, 15 bp, Homo sapiens
ggagggctcagagga

SEQ ID NO: 607791 - DNA, 15 bp, Homo sapiens
gagggctcagaggag

SEQ ID NO: 607792 - DNA, 15 bp, Homo sapiens
agggctcagaggaga

SEQ ID NO: 607793 - DNA, 15 bp, Homo sapiens
gggctcagaggagag

SEQ ID NO: 607794 - DNA, 15 bp, Homo sapiens
ggctcagaggagagc

SEQ ID NO: 607795 - DNA, 15 bp, Homo sapiens
gctcagaggagagcc

SEQ ID NO: 607796 - DNA, 15 bp, Homo sapiens
ctcagaggagagcca

SEQ ID NO: 607797 - DNA, 15 bp, Homo sapiens
tcagaggagagccaa

SEQ ID NO: 607798 - DNA, 15 bp, Homo sapiens
cagaggagagccaag

SEQ ID NO: 607799 - DNA, 15 bp, Homo sapiens
agaggagagccaagt

SEQ ID NO: 607800 - DNA, 15 bp, Homo sapiens
gaggagagccaagta

SEQ ID NO: 607801 - DNA, 15 bp, Homo sapiens
aggagagccaagtac

SEQ ID NO: 607802 - DNA, 15 bp, Homo sapiens
ggagagccaagtaca

SEQ ID NO: 607803 - DNA, 15 bp, Homo sapiens
gagagccaagtacag

SEQ ID NO: 607804 - DNA, 15 bp, Homo sapiens
agagccaagtacagt

SEQ ID NO: 607805 - DNA, 15 bp, Homo sapiens
gagccaagtacagtg

SEQ ID NO: 607806 - DNA, 15 bp, Homo sapiens
agccaagtacagtgg

SEQ ID NO: 607807 - DNA, 15 bp, Homo sapiens
gccaagtacagtggg

SEQ ID NO: 607808 - DNA, 15 bp, Homo sapiens
ccaagtacagtgggg

SEQ ID NO: 607809 - DNA, 15 bp, Homo sapiens
caagtacagtggggc

SEQ ID NO: 607810 - DNA, 15 bp, Homo sapiens
aagtacagtggggca

SEQ ID NO: 607811 - DNA, 15 bp, Homo sapiens
agtacagtggggcag

SEQ ID NO: 607812 - DNA, 15 bp, Homo sapiens
gtacagtggggcagg

SEQ ID NO: 607813 - DNA, 15 bp, Homo sapiens
tacagtggggcaggg

SEQ ID NO: 607814 - DNA, 15 bp, Homo sapiens
acagtggggcagggg

SEQ ID NO: 607815 - DNA, 15 bp, Homo sapiens
cagtggggcaggggg

SEQ ID NO: 607816 - DNA, 15 bp, Homo sapiens
agtggggcagggggg

SEQ ID NO: 607817 - DNA, 15 bp, Homo sapiens
gtggggcaggggggc

SEQ ID NO: 607818 - DNA, 15 bp, Homo sapiens
tggggcaggggggcc

SEQ ID NO: 607819 - DNA, 15 bp, Homo sapiens
ggggcaggggggcca

SEQ ID NO: 607820 - DNA, 15 bp, Homo sapiens
gggcaggggggccag

SEQ ID NO: 607821 - DNA, 15 bp, Homo sapiens
ggcaggggggccaga

SEQ ID NO: 607822 - DNA, 15 bp, Homo sapiens
gcaggggggccagag

SEQ ID NO: 607823 - DNA, 15 bp, Homo sapiens
caggggggccagagg

SEQ ID NO: 607824 - DNA, 15 bp, Homo sapiens
aggggggccagaggc

SEQ ID NO: 607825 - DNA, 15 bp, Homo sapiens
ggggggccagaggcc

SEQ ID NO: 607826 - DNA, 15 bp, Homo sapiens
gggggccagaggcca

SEQ ID NO: 607827 - DNA, 15 bp, Homo sapiens
ggggccagaggccag

SEQ ID NO: 607828 - DNA, 15 bp, Homo sapiens
gggccagaggccagc

SEQ ID NO: 607829 - DNA, 15 bp, Homo sapiens
ggccagaggccagcc

SEQ ID NO: 607830 - DNA, 15 bp, Homo sapiens
gccagaggccagcca

SEQ ID NO: 607831 - DNA, 15 bp, Homo sapiens
ccagaggccagccaa

SEQ ID NO: 607832 - DNA, 15 bp, Homo sapiens
cagaggccagccaag

SEQ ID NO: 607833 - DNA, 15 bp, Homo sapiens
agaggccagccaagg

SEQ ID NO: 607834 - DNA, 15 bp, Homo sapiens
gaggccagccaagga

SEQ ID NO: 607835 - DNA, 15 bp, Homo sapiens
aggccagccaaggaa

SEQ ID NO: 607836 - DNA, 15 bp, Homo sapiens
ggccagccaaggaaa

SEQ ID NO: 607837 - DNA, 15 bp, Homo sapiens
gccagccaaggaaag

SEQ ID NO: 607838 - DNA, 15 bp, Homo sapiens
ccagccaaggaaagg

SEQ ID NO: 607839 - DNA, 15 bp, Homo sapiens
cagccaaggaaaggg

SEQ ID NO: 607840 - DNA, 15 bp, Homo sapiens
agccaaggaaagggt

SEQ ID NO: 607841 - DNA, 15 bp, Homo sapiens
gccaaggaaagggtg

SEQ ID NO: 607842 - DNA, 15 bp, Homo sapiens
ccaaggaaagggtgg

SEQ ID NO: 607843 - DNA, 15 bp, Homo sapiens
caaggaaagggtgga

SEQ ID NO: 607844 - DNA, 15 bp, Homo sapiens
aaggaaagggtggac

SEQ ID NO: 607845 - DNA, 15 bp, Homo sapiens
aggaaagggtggacg

SEQ ID NO: 607846 - DNA, 15 bp, Homo sapiens
ggaaagggtggacgg

SEQ ID NO: 607847 - DNA, 15 bp, Homo sapiens
gaaagggtggacggc

SEQ ID NO: 607848 - DNA, 15 bp, Homo sapiens
aaagggtggacggcg

SEQ ID NO: 607849 - DNA, 15 bp, Homo sapiens
aagggtggacggcgg

SEQ ID NO: 607850 - DNA, 15 bp, Homo sapiens
agggtggacggcgga

SEQ ID NO: 607851 - DNA, 15 bp, Homo sapiens
gggtggacggcggat

SEQ ID NO: 607852 - DNA, 15 bp, Homo sapiens
ggtggacggcggatg

SEQ ID NO: 607853 - DNA, 15 bp, Homo sapiens
gtggacggcggatgt

SEQ ID NO: 607854 - DNA, 15 bp, Homo sapiens
tggacggcggatgtg

SEQ ID NO: 607855 - DNA, 15 bp, Homo sapiens
ggacggcggatgtgc

SEQ ID NO: 607856 - DNA, 15 bp, Homo sapiens
gacggcggatgtgcc

SEQ ID NO: 607857 - DNA, 15 bp, Homo sapiens
acggcggatgtgcct

SEQ ID NO: 607858 - DNA, 15 bp, Homo sapiens
cggcggatgtgcctg

SEQ ID NO: 607859 - DNA, 15 bp, Homo sapiens
ggcggatgtgcctgg

SEQ ID NO: 607860 - DNA, 15 bp, Homo sapiens
gcggatgtgcctgga

SEQ ID NO: 607861 - DNA, 15 bp, Homo sapiens
cggatgtgcctggag

SEQ ID NO: 607862 - DNA, 15 bp, Homo sapiens
ggatgtgcctggagc

SEQ ID NO: 607863 - DNA, 15 bp, Homo sapiens
gatgtgcctggagcc

SEQ ID NO: 607864 - DNA, 15 bp, Homo sapiens
atgtgcctggagccc

SEQ ID NO: 607865 - DNA, 15 bp, Homo sapiens
tgtgcctggagccca

SEQ ID NO: 607866 - DNA, 15 bp, Homo sapiens
gtgcctggagcccag

SEQ ID NO: 607867 - DNA, 15 bp, Homo sapiens
tgcctggagcccagc

SEQ ID NO: 607868 - DNA, 15 bp, Homo sapiens
gcctggagcccagct

SEQ ID NO: 607869 - DNA, 15 bp, Homo sapiens
cctggagcccagctg

SEQ ID NO: 607870 - DNA, 15 bp, Homo sapiens
ctggagcccagctgg

SEQ ID NO: 607871 - DNA, 15 bp, Homo sapiens
tggagcccagctgga

SEQ ID NO: 607872 - DNA, 15 bp, Homo sapiens
ggagcccagctggaa

SEQ ID NO: 607873 - DNA, 15 bp, Homo sapiens
gagcccagctggaaa

SEQ ID NO: 607874 - DNA, 15 bp, Homo sapiens
agcccagctggaaat

SEQ ID NO: 607875 - DNA, 15 bp, Homo sapiens
gcccagctggaaatg

SEQ ID NO: 607876 - DNA, 15 bp, Homo sapiens
cccagctggaaatgt

SEQ ID NO: 607877 - DNA, 15 bp, Homo sapiens
ccagctggaaatgtt

SEQ ID NO: 607878 - DNA, 15 bp, Homo sapiens
cagctggaaatgttc

SEQ ID NO: 607879 - DNA, 15 bp, Homo sapiens
agctggaaatgttct

SEQ ID NO: 607880 - DNA, 15 bp, Homo sapiens
gctggaaatgttcta

SEQ ID NO: 607881 - DNA, 15 bp, Homo sapiens
ctggaaatgttctag

SEQ ID NO: 607882 - DNA, 15 bp, Homo sapiens
tggaaatgttctagc

SEQ ID NO: 607883 - DNA, 15 bp, Homo sapiens
ggaaatgttctagcc

SEQ ID NO: 607884 - DNA, 15 bp, Homo sapiens
gaaatgttctagcca

SEQ ID NO: 607885 - DNA, 15 bp, Homo sapiens
aaatgttctagccaa

SEQ ID NO: 607886 - DNA, 15 bp, Homo sapiens
aatgttctagccaaa

SEQ ID NO: 607887 - DNA, 15 bp, Homo sapiens
atgttctagccaaaa

SEQ ID NO: 607888 - DNA, 15 bp, Homo sapiens
tgttctagccaaaaa

SEQ ID NO: 607889 - DNA, 15 bp, Homo sapiens
gttctagccaaaaaa

SEQ ID NO: 607890 - DNA, 15 bp, Homo sapiens
ttctagccaaaaaag

SEQ ID NO: 607891 - DNA, 15 bp, Homo sapiens
tctagccaaaaaagt

SEQ ID NO: 607892 - DNA, 15 bp, Homo sapiens
ctagccaaaaaagtt

SEQ ID NO: 607893 - DNA, 15 bp, Homo sapiens
tagccaaaaaagttt

SEQ ID NO: 607894 - DNA, 15 bp, Homo sapiens
agccaaaaaagtttg

SEQ ID NO: 607895 - DNA, 15 bp, Homo sapiens
gccaaaaaagtttgc

SEQ ID NO: 607896 - DNA, 15 bp, Homo sapiens
ccaaaaaagtttgcc

SEQ ID NO: 607897 - DNA, 15 bp, Homo sapiens
caaaaaagtttgcca

SEQ ID NO: 607898 - DNA, 15 bp, Homo sapiens
aaaaaagtttgccaa

SEQ ID NO: 607899 - DNA, 15 bp, Homo sapiens
aaaaagtttgccaag

SEQ ID NO: 607900 - DNA, 15 bp, Homo sapiens
aaaagtttgccaaga

SEQ ID NO: 607901 - DNA, 15 bp, Homo sapiens
aaagtttgccaagaa

SEQ ID NO: 607902 - DNA, 15 bp, Homo sapiens
aagtttgccaagaac

SEQ ID NO: 607903 - DNA, 15 bp, Homo sapiens
agtttgccaagaacc

SEQ ID NO: 607904 - DNA, 15 bp, Homo sapiens
gtttgccaagaacca

SEQ ID NO: 607905 - DNA, 15 bp, Homo sapiens
tttgccaagaaccat

SEQ ID NO: 607906 - DNA, 15 bp, Homo sapiens
ttgccaagaaccatt

SEQ ID NO: 607907 - DNA, 15 bp, Homo sapiens
tgccaagaaccattg

SEQ ID NO: 607908 - DNA, 15 bp, Homo sapiens
gccaagaaccattgt

SEQ ID NO: 607909 - DNA, 15 bp, Homo sapiens
ccaagaaccattgtg

SEQ ID NO: 607910 - DNA, 15 bp, Homo sapiens
caagaaccattgtgt

SEQ ID NO: 607911 - DNA, 15 bp, Homo sapiens
aagaaccattgtgtc

SEQ ID NO: 607912 - DNA, 15 bp, Homo sapiens
agaaccattgtgtct

SEQ ID NO: 607913 - DNA, 15 bp, Homo sapiens
gaaccattgtgtctt

SEQ ID NO: 607914 - DNA, 15 bp, Homo sapiens
aaccattgtgtcttt

SEQ ID NO: 607915 - DNA, 15 bp, Homo sapiens
accattgtgtctttt

SEQ ID NO: 607916 - DNA, 15 bp, Homo sapiens
ccattgtgtcttttt

SEQ ID NO: 607917 - DNA, 15 bp, Homo sapiens
cattgtgtctttttt

SEQ ID NO: 607918 - DNA, 15 bp, Homo sapiens
attgtgtcttttttt

SEQ ID NO: 607919 - DNA, 15 bp, Homo sapiens
ttgtgtctttttttt

SEQ ID NO: 607920 - DNA, 15 bp, Homo sapiens
tgtgtcttttttttt

SEQ ID NO: 607921 - DNA, 15 bp, Homo sapiens
gtgtctttttttttg

SEQ ID NO: 607922 - DNA, 15 bp, Homo sapiens
tgtctttttttttgc

SEQ ID NO: 607923 - DNA, 15 bp, Homo sapiens
gtctttttttttgct

SEQ ID NO: 607924 - DNA, 15 bp, Homo sapiens
tctttttttttgctg

SEQ ID NO: 607925 - DNA, 15 bp, Homo sapiens
ctttttttttgctgg

SEQ ID NO: 607926 - DNA, 15 bp, Homo sapiens
tttttttttgctgga

SEQ ID NO: 607927 - DNA, 15 bp, Homo sapiens
ttttttttgctggaa

SEQ ID NO: 607928 - DNA, 15 bp, Homo sapiens
tttttttgctggaac

SEQ ID NO: 607929 - DNA, 15 bp, Homo sapiens
ttttttgctggaaca

SEQ ID NO: 607930 - DNA, 15 bp, Homo sapiens
tttttgctggaacat

SEQ ID NO: 607931 - DNA, 15 bp, Homo sapiens
ttttgctggaacatt

SEQ ID NO: 607932 - DNA, 15 bp, Homo sapiens
tttgctggaacattt

SEQ ID NO: 607933 - DNA, 15 bp, Homo sapiens
ttgctggaacatttc

SEQ ID NO: 607934 - DNA, 15 bp, Homo sapiens
tgctggaacatttct

SEQ ID NO: 607935 - DNA, 15 bp, Homo sapiens
gctggaacatttctg

SEQ ID NO: 607936 - DNA, 15 bp, Homo sapiens
ctggaacatttctgg

SEQ ID NO: 607937 - DNA, 15 bp, Homo sapiens
tggaacatttctggt

SEQ ID NO: 607938 - DNA, 15 bp, Homo sapiens
ggaacatttctggtt

SEQ ID NO: 607939 - DNA, 15 bp, Homo sapiens
gaacatttctggttg

SEQ ID NO: 607940 - DNA, 15 bp, Homo sapiens
aacatttctggttgt

SEQ ID NO: 607941 - DNA, 15 bp, Homo sapiens
acatttctggttgtg

SEQ ID NO: 607942 - DNA, 15 bp, Homo sapiens
catttctggttgtgc

SEQ ID NO: 607943 - DNA, 15 bp, Homo sapiens
atttctggttgtgct

SEQ ID NO: 607944 - DNA, 15 bp, Homo sapiens
tttctggttgtgctt

SEQ ID NO: 607945 - DNA, 15 bp, Homo sapiens
ttctggttgtgcttc

SEQ ID NO: 607946 - DNA, 15 bp, Homo sapiens
tctggttgtgcttct

SEQ ID NO: 607947 - DNA, 15 bp, Homo sapiens
ctggttgtgcttctg

SEQ ID NO: 607948 - DNA, 15 bp, Homo sapiens
tggttgtgcttctgc

SEQ ID NO: 607949 - DNA, 15 bp, Homo sapiens
ggttgtgcttctgcc

SEQ ID NO: 607950 - DNA, 15 bp, Homo sapiens
gttgtgcttctgcct

SEQ ID NO: 607951 - DNA, 15 bp, Homo sapiens
ttgtgcttctgcctc

SEQ ID NO: 607952 - DNA, 15 bp, Homo sapiens
tgtgcttctgcctct

SEQ ID NO: 607953 - DNA, 15 bp, Homo sapiens
gtgcttctgcctctc

SEQ ID NO: 607954 - DNA, 15 bp, Homo sapiens
tgcttctgcctctca

SEQ ID NO: 607955 - DNA, 15 bp, Homo sapiens
gcttctgcctctcac

SEQ ID NO: 607956 - DNA, 15 bp, Homo sapiens
cttctgcctctcacc

SEQ ID NO: 607957 - DNA, 15 bp, Homo sapiens
ttctgcctctcacca

SEQ ID NO: 607958 - DNA, 15 bp, Homo sapiens
tctgcctctcaccac

SEQ ID NO: 607959 - DNA, 15 bp, Homo sapiens
ctgcctctcaccacg

SEQ ID NO: 607960 - DNA, 15 bp, Homo sapiens
tgcctctcaccacgt

SEQ ID NO: 607961 - DNA, 15 bp, Homo sapiens
gcctctcaccacgtg

SEQ ID NO: 607962 - DNA, 15 bp, Homo sapiens
cctctcaccacgtgg

SEQ ID NO: 607963 - DNA, 15 bp, Homo sapiens
ctctcaccacgtggg

SEQ ID NO: 607964 - DNA, 15 bp, Homo sapiens
tctcaccacgtggga

SEQ ID NO: 607965 - DNA, 15 bp, Homo sapiens
ctcaccacgtgggat

SEQ ID NO: 607966 - DNA, 15 bp, Homo sapiens
tcaccacgtgggatt

SEQ ID NO: 607967 - DNA, 15 bp, Homo sapiens
caccacgtgggattg

SEQ ID NO: 607968 - DNA, 15 bp, Homo sapiens
accacgtgggattgt

SEQ ID NO: 607969 - DNA, 15 bp, Homo sapiens
ccacgtgggattgta

SEQ ID NO: 607970 - DNA, 15 bp, Homo sapiens
cacgtgggattgtaa

SEQ ID NO: 607971 - DNA, 15 bp, Homo sapiens
acgtgggattgtaat

SEQ ID NO: 607972 - DNA, 15 bp, Homo sapiens
cgtgggattgtaatg

SEQ ID NO: 607973 - DNA, 15 bp, Homo sapiens
gtgggattgtaatga

SEQ ID NO: 607974 - DNA, 15 bp, Homo sapiens
tgggattgtaatgag

SEQ ID NO: 607975 - DNA, 15 bp, Homo sapiens
gggattgtaatgagg

SEQ ID NO: 607976 - DNA, 15 bp, Homo sapiens
ggattgtaatgaggg

SEQ ID NO: 607977 - DNA, 15 bp, Homo sapiens
gattgtaatgagggg

SEQ ID NO: 607978 - DNA, 15 bp, Homo sapiens
attgtaatgaggggc

SEQ ID NO: 607979 - DNA, 15 bp, Homo sapiens
ttgtaatgaggggca

SEQ ID NO: 607980 - DNA, 15 bp, Homo sapiens
tgtaatgaggggcag

SEQ ID NO: 607981 - DNA, 15 bp, Homo sapiens
gtaatgaggggcagc

SEQ ID NO: 607982 - DNA, 15 bp, Homo sapiens
taatgaggggcagca

SEQ ID NO: 607983 - DNA, 15 bp, Homo sapiens
aatgaggggcagcat

SEQ ID NO: 607984 - DNA, 15 bp, Homo sapiens
atgaggggcagcatt

SEQ ID NO: 607985 - DNA, 15 bp, Homo sapiens
tgaggggcagcattg

SEQ ID NO: 607986 - DNA, 15 bp, Homo sapiens
gaggggcagcattgg

SEQ ID NO: 607987 - DNA, 15 bp, Homo sapiens
aggggcagcattggg

SEQ ID NO: 607988 - DNA, 15 bp, Homo sapiens
ggggcagcattgggg

SEQ ID NO: 607989 - DNA, 15 bp, Homo sapiens
gggcagcattggggt

SEQ ID NO: 607990 - DNA, 15 bp, Homo sapiens
ggcagcattggggtt

SEQ ID NO: 607991 - DNA, 15 bp, Homo sapiens
gcagcattggggttg

SEQ ID NO: 607992 - DNA, 15 bp, Homo sapiens
cagcattggggttgg

SEQ ID NO: 607993 - DNA, 15 bp, Homo sapiens
agcattggggttggg

SEQ ID NO: 607994 - DNA, 15 bp, Homo sapiens
gcattggggttggga

SEQ ID NO: 607995 - DNA, 15 bp, Homo sapiens
cattggggttgggaa

SEQ ID NO: 607996 - DNA, 15 bp, Homo sapiens
attggggttgggaag

SEQ ID NO: 607997 - DNA, 15 bp, Homo sapiens
ttggggttgggaagg

SEQ ID NO: 607998 - DNA, 15 bp, Homo sapiens
tggggttgggaaggg

SEQ ID NO: 607999 - DNA, 15 bp, Homo sapiens
ggggttgggaagggg

SEQ ID NO: 608000 - DNA, 15 bp, Homo sapiens
gggttgggaaggggg

SEQ ID NO: 608001 - DNA, 15 bp, Homo sapiens
ggttgggaagggggc

SEQ ID NO: 608002 - DNA, 15 bp, Homo sapiens
gttgggaagggggct

SEQ ID NO: 608003 - DNA, 15 bp, Homo sapiens
ttgggaagggggctg

SEQ ID NO: 608004 - DNA, 15 bp, Homo sapiens
tgggaagggggctgg

SEQ ID NO: 608005 - DNA, 15 bp, Homo sapiens
gggaagggggctggg

SEQ ID NO: 608006 - DNA, 15 bp, Homo sapiens
ggaagggggctggga

SEQ ID NO: 608007 - DNA, 15 bp, Homo sapiens
gaagggggctgggat

SEQ ID NO: 608008 - DNA, 15 bp, Homo sapiens
aagggggctgggatc

SEQ ID NO: 608009 - DNA, 15 bp, Homo sapiens
agggggctgggatcc

SEQ ID NO: 608010 - DNA, 15 bp, Homo sapiens
gggggctgggatccc

SEQ ID NO: 608011 - DNA, 15 bp, Homo sapiens
ggggctgggatcccc

SEQ ID NO: 608012 - DNA, 15 bp, Homo sapiens
gggctgggatcccct

SEQ ID NO: 608013 - DNA, 15 bp, Homo sapiens
ggctgggatcccctt

SEQ ID NO: 608014 - DNA, 15 bp, Homo sapiens
gctgggatccccttc

SEQ ID NO: 608015 - DNA, 15 bp, Homo sapiens
ctgggatccccttca

SEQ ID NO: 608016 - DNA, 15 bp, Homo sapiens
tgggatccccttcac

SEQ ID NO: 608017 - DNA, 15 bp, Homo sapiens
gggatccccttcacc

SEQ ID NO: 608018 - DNA, 15 bp, Homo sapiens
ggatccccttcaccc

SEQ ID NO: 608019 - DNA, 15 bp, Homo sapiens
gatccccttcacccc

SEQ ID NO: 608020 - DNA, 15 bp, Homo sapiens
atccccttcacccct

SEQ ID NO: 608021 - DNA, 15 bp, Homo sapiens
tccccttcacccctg

SEQ ID NO: 608022 - DNA, 15 bp, Homo sapiens
ccccttcacccctgg

SEQ ID NO: 608023 - DNA, 15 bp, Homo sapiens
cccttcacccctggg

SEQ ID NO: 608024 - DNA, 15 bp, Homo sapiens
ccttcacccctggga

SEQ ID NO: 608025 - DNA, 15 bp, Homo sapiens
cttcacccctgggaa

SEQ ID NO: 608026 - DNA, 15 bp, Homo sapiens
ttcacccctgggaaa

SEQ ID NO: 608027 - DNA, 15 bp, Homo sapiens
tcacccctgggaaaa

SEQ ID NO: 608028 - DNA, 15 bp, Homo sapiens
cacccctgggaaaac

SEQ ID NO: 608029 - DNA, 15 bp, Homo sapiens
acccctgggaaaaca

SEQ ID NO: 608030 - DNA, 15 bp, Homo sapiens
cccctgggaaaacat

SEQ ID NO: 608031 - DNA, 15 bp, Homo sapiens
ccctgggaaaacatg

SEQ ID NO: 608032 - DNA, 15 bp, Homo sapiens
cctgggaaaacatgc

SEQ ID NO: 608033 - DNA, 15 bp, Homo sapiens
ctgggaaaacatgca

SEQ ID NO: 608034 - DNA, 15 bp, Homo sapiens
tgggaaaacatgcaa

SEQ ID NO: 608035 - DNA, 15 bp, Homo sapiens
gggaaaacatgcaac

SEQ ID NO: 608036 - DNA, 15 bp, Homo sapiens
ggaaaacatgcaaca

SEQ ID NO: 608037 - DNA, 15 bp, Homo sapiens
gaaaacatgcaacag

SEQ ID NO: 608038 - DNA, 15 bp, Homo sapiens
aaaacatgcaacagg

SEQ ID NO: 608039 - DNA, 15 bp, Homo sapiens
aaacatgcaacaggc

SEQ ID NO: 608040 - DNA, 15 bp, Homo sapiens
aacatgcaacaggcc

SEQ ID NO: 608041 - DNA, 15 bp, Homo sapiens
acatgcaacaggcct

SEQ ID NO: 608042 - DNA, 15 bp, Homo sapiens
catgcaacaggcctt

SEQ ID NO: 608043 - DNA, 15 bp, Homo sapiens
atgcaacaggccttt

SEQ ID NO: 608044 - DNA, 15 bp, Homo sapiens
tgcaacaggcctttc

SEQ ID NO: 608045 - DNA, 15 bp, Homo sapiens
gcaacaggcctttct

SEQ ID NO: 608046 - DNA, 15 bp, Homo sapiens
caacaggcctttctg

SEQ ID NO: 608047 - DNA, 15 bp, Homo sapiens
aacaggcctttctgg

SEQ ID NO: 608048 - DNA, 15 bp, Homo sapiens
acaggcctttctgga

SEQ ID NO: 608049 - DNA, 15 bp, Homo sapiens
caggcctttctggag

SEQ ID NO: 608050 - DNA, 15 bp, Homo sapiens
aggcctttctggagg

SEQ ID NO: 608051 - DNA, 15 bp, Homo sapiens
ggcctttctggaggg

SEQ ID NO: 608052 - DNA, 15 bp, Homo sapiens
gcctttctggaggga

SEQ ID NO: 608053 - DNA, 15 bp, Homo sapiens
cctttctggagggac

SEQ ID NO: 608054 - DNA, 15 bp, Homo sapiens
ctttctggagggacc

SEQ ID NO: 608055 - DNA, 15 bp, Homo sapiens
tttctggagggaccc

SEQ ID NO: 608056 - DNA, 15 bp, Homo sapiens
ttctggagggaccca

SEQ ID NO: 608057 - DNA, 15 bp, Homo sapiens
tctggagggacccac

SEQ ID NO: 608058 - DNA, 15 bp, Homo sapiens
ctggagggacccacg

SEQ ID NO: 608059 - DNA, 15 bp, Homo sapiens
tggagggacccacgg

SEQ ID NO: 608060 - DNA, 15 bp, Homo sapiens
ggagggacccacggt

SEQ ID NO: 608061 - DNA, 15 bp, Homo sapiens
gagggacccacggta

SEQ ID NO: 608062 - DNA, 15 bp, Homo sapiens
agggacccacggtac

SEQ ID NO: 608063 - DNA, 15 bp, Homo sapiens
gggacccacggtacc

SEQ ID NO: 608064 - DNA, 15 bp, Homo sapiens
ggacccacggtaccc

SEQ ID NO: 608065 - DNA, 15 bp, Homo sapiens
gacccacggtaccca

SEQ ID NO: 608066 - DNA, 15 bp, Homo sapiens
acccacggtacccag

SEQ ID NO: 608067 - DNA, 15 bp, Homo sapiens
cccacggtacccaga

SEQ ID NO: 608068 - DNA, 15 bp, Homo sapiens
ccacggtacccagag

SEQ ID NO: 608069 - DNA, 15 bp, Homo sapiens
cacggtacccagaga

SEQ ID NO: 608070 - DNA, 15 bp, Homo sapiens
acggtacccagagaa

SEQ ID NO: 608071 - DNA, 15 bp, Homo sapiens
cggtacccagagaat

SEQ ID NO: 608072 - DNA, 15 bp, Homo sapiens
ggtacccagagaata

SEQ ID NO: 608073 - DNA, 15 bp, Homo sapiens
gtacccagagaatag

SEQ ID NO: 608074 - DNA, 15 bp, Homo sapiens
tacccagagaatagg

SEQ ID NO: 608075 - DNA, 15 bp, Homo sapiens
acccagagaataggc

SEQ ID NO: 608076 - DNA, 15 bp, Homo sapiens
cccagagaataggcc

SEQ ID NO: 608077 - DNA, 15 bp, Homo sapiens
ccagagaataggccc

SEQ ID NO: 608078 - DNA, 15 bp, Homo sapiens
cagagaataggccct

SEQ ID NO: 608079 - DNA, 15 bp, Homo sapiens
agagaataggccctg

SEQ ID NO: 608080 - DNA, 15 bp, Homo sapiens
gagaataggccctgc

SEQ ID NO: 608081 - DNA, 15 bp, Homo sapiens
agaataggccctgcc

SEQ ID NO: 608082 - DNA, 15 bp, Homo sapiens
gaataggccctgccc

SEQ ID NO: 608083 - DNA, 15 bp, Homo sapiens
aataggccctgccct

SEQ ID NO: 608084 - DNA, 15 bp, Homo sapiens
ataggccctgccctc

SEQ ID NO: 608085 - DNA, 15 bp, Homo sapiens
taggccctgccctct

SEQ ID NO: 608086 - DNA, 15 bp, Homo sapiens
aggccctgccctctg

SEQ ID NO: 608087 - DNA, 15 bp, Homo sapiens
ggccctgccctctgt

SEQ ID NO: 608088 - DNA, 15 bp, Homo sapiens
gccctgccctctgtc

SEQ ID NO: 608089 - DNA, 15 bp, Homo sapiens
ccctgccctctgtcc

SEQ ID NO: 608090 - DNA, 15 bp, Homo sapiens
cctgccctctgtcct

SEQ ID NO: 608091 - DNA, 15 bp, Homo sapiens
ctgccctctgtcctc

SEQ ID NO: 608092 - DNA, 15 bp, Homo sapiens
tgccctctgtcctcc

SEQ ID NO: 608093 - DNA, 15 bp, Homo sapiens
gccctctgtcctccc

SEQ ID NO: 608094 - DNA, 15 bp, Homo sapiens
ccctctgtcctccct

SEQ ID NO: 608095 - DNA, 15 bp, Homo sapiens
cctctgtcctcccta

SEQ ID NO: 608096 - DNA, 15 bp, Homo sapiens
ctctgtcctccctaa

SEQ ID NO: 608097 - DNA, 15 bp, Homo sapiens
tctgtcctccctaat

SEQ ID NO: 608098 - DNA, 15 bp, Homo sapiens
ctgtcctccctaatc

SEQ ID NO: 608099 - DNA, 15 bp, Homo sapiens
tgtcctccctaatct

SEQ ID NO: 608100 - DNA, 15 bp, Homo sapiens
gtcctccctaatctg

SEQ ID NO: 608101 - DNA, 15 bp, Homo sapiens
tcctccctaatctgc

SEQ ID NO: 608102 - DNA, 15 bp, Homo sapiens
cctccctaatctgcc

SEQ ID NO: 608103 - DNA, 15 bp, Homo sapiens
ctccctaatctgcca

SEQ ID NO: 608104 - DNA, 15 bp, Homo sapiens
tccctaatctgccat

SEQ ID NO: 608105 - DNA, 15 bp, Homo sapiens
ccctaatctgccatt

SEQ ID NO: 608106 - DNA, 15 bp, Homo sapiens
cctaatctgccattg

SEQ ID NO: 608107 - DNA, 15 bp, Homo sapiens
ctaatctgccattga

SEQ ID NO: 608108 - DNA, 15 bp, Homo sapiens
taatctgccattgaa

SEQ ID NO: 608109 - DNA, 15 bp, Homo sapiens
aatctgccattgaat

SEQ ID NO: 608110 - DNA, 15 bp, Homo sapiens
atctgccattgaatc

SEQ ID NO: 608111 - DNA, 15 bp, Homo sapiens
tctgccattgaatcc

SEQ ID NO: 608112 - DNA, 15 bp, Homo sapiens
ctgccattgaatcca

SEQ ID NO: 608113 - DNA, 15 bp, Homo sapiens
tgccattgaatccat

SEQ ID NO: 608114 - DNA, 15 bp, Homo sapiens
gccattgaatccatg

SEQ ID NO: 608115 - DNA, 15 bp, Homo sapiens
ccattgaatccatga

SEQ ID NO: 608116 - DNA, 15 bp, Homo sapiens
cattgaatccatgag

SEQ ID NO: 608117 - DNA, 15 bp, Homo sapiens
attgaatccatgagt

SEQ ID NO: 608118 - DNA, 15 bp, Homo sapiens
ttgaatccatgagtt

SEQ ID NO: 608119 - DNA, 15 bp, Homo sapiens
tgaatccatgagttt

SEQ ID NO: 608120 - DNA, 15 bp, Homo sapiens
gaatccatgagtttt

SEQ ID NO: 608121 - DNA, 15 bp, Homo sapiens
aatccatgagttttc

SEQ ID NO: 608122 - DNA, 15 bp, Homo sapiens
atccatgagttttcc

SEQ ID NO: 608123 - DNA, 15 bp, Homo sapiens
tccatgagttttcct

SEQ ID NO: 608124 - DNA, 15 bp, Homo sapiens
ccatgagttttcctg

SEQ ID NO: 608125 - DNA, 15 bp, Homo sapiens
catgagttttcctgt

SEQ ID NO: 608126 - DNA, 15 bp, Homo sapiens
atgagttttcctgtt

SEQ ID NO: 608127 - DNA, 15 bp, Homo sapiens
tgagttttcctgttc

SEQ ID NO: 608128 - DNA, 15 bp, Homo sapiens
gagttttcctgttcc

SEQ ID NO: 608129 - DNA, 15 bp, Homo sapiens
agttttcctgttcca

SEQ ID NO: 608130 - DNA, 15 bp, Homo sapiens
gttttcctgttccac

SEQ ID NO: 608131 - DNA, 15 bp, Homo sapiens
ttttcctgttccaca

SEQ ID NO: 608132 - DNA, 15 bp, Homo sapiens
tttcctgttccacac

SEQ ID NO: 608133 - DNA, 15 bp, Homo sapiens
ttcctgttccacacc

SEQ ID NO: 608134 - DNA, 15 bp, Homo sapiens
tcctgttccacacca

SEQ ID NO: 608135 - DNA, 15 bp, Homo sapiens
cctgttccacaccat

SEQ ID NO: 608136 - DNA, 15 bp, Homo sapiens
ctgttccacaccatc

SEQ ID NO: 608137 - DNA, 15 bp, Homo sapiens
tgttccacaccatcc

SEQ ID NO: 608138 - DNA, 15 bp, Homo sapiens
gttccacaccatccc

SEQ ID NO: 608139 - DNA, 15 bp, Homo sapiens
ttccacaccatcccc

SEQ ID NO: 608140 - DNA, 15 bp, Homo sapiens
tccacaccatccccc

SEQ ID NO: 608141 - DNA, 15 bp, Homo sapiens
ccacaccatcccccg

SEQ ID NO: 608142 - DNA, 15 bp, Homo sapiens
cacaccatcccccgc

SEQ ID NO: 608143 - DNA, 15 bp, Homo sapiens
acaccatcccccgcc

SEQ ID NO: 608144 - DNA, 15 bp, Homo sapiens
caccatcccccgccc

SEQ ID NO: 608145 - DNA, 15 bp, Homo sapiens
accatcccccgccct

SEQ ID NO: 608146 - DNA, 15 bp, Homo sapiens
ccatcccccgccctg

SEQ ID NO: 608147 - DNA, 15 bp, Homo sapiens
catcccccgccctgc

SEQ ID NO: 608148 - DNA, 15 bp, Homo sapiens
atcccccgccctgct

SEQ ID NO: 608149 - DNA, 15 bp, Homo sapiens
tcccccgccctgctt

SEQ ID NO: 608150 - DNA, 15 bp, Homo sapiens
cccccgccctgcttg

SEQ ID NO: 608151 - DNA, 15 bp, Homo sapiens
ccccgccctgcttgc

SEQ ID NO: 608152 - DNA, 15 bp, Homo sapiens
cccgccctgcttgcc

SEQ ID NO: 608153 - DNA, 15 bp, Homo sapiens
ccgccctgcttgcca

SEQ ID NO: 608154 - DNA, 15 bp, Homo sapiens
cgccctgcttgccac

SEQ ID NO: 608155 - DNA, 15 bp, Homo sapiens
gccctgcttgccact

SEQ ID NO: 608156 - DNA, 15 bp, Homo sapiens
ccctgcttgccactc

SEQ ID NO: 608157 - DNA, 15 bp, Homo sapiens
cctgcttgccactcc

SEQ ID NO: 608158 - DNA, 15 bp, Homo sapiens
ctgcttgccactcct

SEQ ID NO: 608159 - DNA, 15 bp, Homo sapiens
tgcttgccactcctt

SEQ ID NO: 608160 - DNA, 15 bp, Homo sapiens
gcttgccactccttc

SEQ ID NO: 608161 - DNA, 15 bp, Homo sapiens
cttgccactccttca

SEQ ID NO: 608162 - DNA, 15 bp, Homo sapiens
ttgccactccttcat

SEQ ID NO: 608163 - DNA, 15 bp, Homo sapiens
tgccactccttcatt

SEQ ID NO: 608164 - DNA, 15 bp, Homo sapiens
gccactccttcattc

SEQ ID NO: 608165 - DNA, 15 bp, Homo sapiens
ccactccttcattca

SEQ ID NO: 608166 - DNA, 15 bp, Homo sapiens
cactccttcattcac

SEQ ID NO: 608167 - DNA, 15 bp, Homo sapiens
actccttcattcact

SEQ ID NO: 608168 - DNA, 15 bp, Homo sapiens
ctccttcattcactc

SEQ ID NO: 608169 - DNA, 15 bp, Homo sapiens
tccttcattcactcc

SEQ ID NO: 608170 - DNA, 15 bp, Homo sapiens
ccttcattcactcct

SEQ ID NO: 608171 - DNA, 15 bp, Homo sapiens
cttcattcactcctc

SEQ ID NO: 608172 - DNA, 15 bp, Homo sapiens
ttcattcactcctcc

SEQ ID NO: 608173 - DNA, 15 bp, Homo sapiens
tcattcactcctcct

SEQ ID NO: 608174 - DNA, 15 bp, Homo sapiens
cattcactcctcctt

SEQ ID NO: 608175 - DNA, 15 bp, Homo sapiens
attcactcctccttc

SEQ ID NO: 608176 - DNA, 15 bp, Homo sapiens
ttcactcctccttcc

SEQ ID NO: 608177 - DNA, 15 bp, Homo sapiens
tcactcctccttcct

SEQ ID NO: 608178 - DNA, 15 bp, Homo sapiens
cactcctccttcctt

SEQ ID NO: 608179 - DNA, 15 bp, Homo sapiens
actcctccttccttc

SEQ ID NO: 608180 - DNA, 15 bp, Homo sapiens
ctcctccttccttca

SEQ ID NO: 608181 - DNA, 15 bp, Homo sapiens
tcctccttccttcat

SEQ ID NO: 608182 - DNA, 15 bp, Homo sapiens
cctccttccttcatg

SEQ ID NO: 608183 - DNA, 15 bp, Homo sapiens
ctccttccttcatgc

SEQ ID NO: 608184 - DNA, 15 bp, Homo sapiens
tccttccttcatgcg

SEQ ID NO: 608185 - DNA, 15 bp, Homo sapiens
ccttccttcatgcgc

SEQ ID NO: 608186 - DNA, 15 bp, Homo sapiens
cttccttcatgcgcc

SEQ ID NO: 608187 - DNA, 15 bp, Homo sapiens
ttccttcatgcgccc

SEQ ID NO: 608188 - DNA, 15 bp, Homo sapiens
tccttcatgcgccca

SEQ ID NO: 608189 - DNA, 15 bp, Homo sapiens
ccttcatgcgcccac

SEQ ID NO: 608190 - DNA, 15 bp, Homo sapiens
cttcatgcgcccacc

SEQ ID NO: 608191 - DNA, 15 bp, Homo sapiens
ttcatgcgcccacct

SEQ ID NO: 608192 - DNA, 15 bp, Homo sapiens
tcatgcgcccacctc

SEQ ID NO: 608193 - DNA, 15 bp, Homo sapiens
catgcgcccacctca

SEQ ID NO: 608194 - DNA, 15 bp, Homo sapiens
atgcgcccacctcac

SEQ ID NO: 608195 - DNA, 15 bp, Homo sapiens
tgcgcccacctcacg

SEQ ID NO: 608196 - DNA, 15 bp, Homo sapiens
gcgcccacctcacgc

SEQ ID NO: 608197 - DNA, 15 bp, Homo sapiens
cgcccacctcacgct

SEQ ID NO: 608198 - DNA, 15 bp, Homo sapiens
gcccacctcacgctg

SEQ ID NO: 608199 - DNA, 15 bp, Homo sapiens
cccacctcacgctgc

SEQ ID NO: 608200 - DNA, 15 bp, Homo sapiens
ccacctcacgctgct

SEQ ID NO: 608201 - DNA, 15 bp, Homo sapiens
cacctcacgctgctc

SEQ ID NO: 608202 - DNA, 15 bp, Homo sapiens
acctcacgctgctct

SEQ ID NO: 608203 - DNA, 15 bp, Homo sapiens
cctcacgctgctctg

SEQ ID NO: 608204 - DNA, 15 bp, Homo sapiens
ctcacgctgctctga

SEQ ID NO: 608205 - DNA, 15 bp, Homo sapiens
tcacgctgctctgac

SEQ ID NO: 608206 - DNA, 15 bp, Homo sapiens
cacgctgctctgacc

SEQ ID NO: 608207 - DNA, 15 bp, Homo sapiens
acgctgctctgacca

SEQ ID NO: 608208 - DNA, 15 bp, Homo sapiens
cgctgctctgaccac

SEQ ID NO: 608209 - DNA, 15 bp, Homo sapiens
gctgctctgaccacg

SEQ ID NO: 608210 - DNA, 15 bp, Homo sapiens
ctgctctgaccacgg

SEQ ID NO: 608211 - DNA, 15 bp, Homo sapiens
tgctctgaccacggc

SEQ ID NO: 608212 - DNA, 15 bp, Homo sapiens
gctctgaccacggct

SEQ ID NO: 608213 - DNA, 15 bp, Homo sapiens
ctctgaccacggctg

SEQ ID NO: 608214 - DNA, 15 bp, Homo sapiens
tctgaccacggctgc

SEQ ID NO: 608215 - DNA, 15 bp, Homo sapiens
ctgaccacggctgcc

SEQ ID NO: 608216 - DNA, 15 bp, Homo sapiens
tgaccacggctgccc

SEQ ID NO: 608217 - DNA, 15 bp, Homo sapiens
gaccacggctgcccc

SEQ ID NO: 608218 - DNA, 15 bp, Homo sapiens
accacggctgcccct

SEQ ID NO: 608219 - DNA, 15 bp, Homo sapiens
ccacggctgcccctg

SEQ ID NO: 608220 - DNA, 15 bp, Homo sapiens
cacggctgcccctgc

SEQ ID NO: 608221 - DNA, 15 bp, Homo sapiens
acggctgcccctgcc

SEQ ID NO: 608222 - DNA, 15 bp, Homo sapiens
cggctgcccctgcca

SEQ ID NO: 608223 - DNA, 15 bp, Homo sapiens
ggctgcccctgccac

SEQ ID NO: 608224 - DNA, 15 bp, Homo sapiens
gctgcccctgccacg

SEQ ID NO: 608225 - DNA, 15 bp, Homo sapiens
ctgcccctgccacgg

SEQ ID NO: 608226 - DNA, 15 bp, Homo sapiens
tgcccctgccacgga

SEQ ID NO: 608227 - DNA, 15 bp, Homo sapiens
gcccctgccacggac

SEQ ID NO: 608228 - DNA, 15 bp, Homo sapiens
cccctgccacggacc

SEQ ID NO: 608229 - DNA, 15 bp, Homo sapiens
ccctgccacggacct

SEQ ID NO: 608230 - DNA, 15 bp, Homo sapiens
cctgccacggacctc

SEQ ID NO: 608231 - DNA, 15 bp, Homo sapiens
ctgccacggacctcc

SEQ ID NO: 608232 - DNA, 15 bp, Homo sapiens
tgccacggacctccg

SEQ ID NO: 608233 - DNA, 15 bp, Homo sapiens
gccacggacctccgg

SEQ ID NO: 608234 - DNA, 15 bp, Homo sapiens
ccacggacctccggg

SEQ ID NO: 608235 - DNA, 15 bp, Homo sapiens
cacggacctccgggg

SEQ ID NO: 608236 - DNA, 15 bp, Homo sapiens
acggacctccgggga

SEQ ID NO: 608237 - DNA, 15 bp, Homo sapiens
cggacctccggggac

SEQ ID NO: 608238 - DNA, 15 bp, Homo sapiens
ggacctccggggact

SEQ ID NO: 608239 - DNA, 15 bp, Homo sapiens
gacctccggggactt

SEQ ID NO: 608240 - DNA, 15 bp, Homo sapiens
acctccggggacttt

SEQ ID NO: 608241 - DNA, 15 bp, Homo sapiens
cctccggggactttc

SEQ ID NO: 608242 - DNA, 15 bp, Homo sapiens
ctccggggactttcc

SEQ ID NO: 608243 - DNA, 15 bp, Homo sapiens
tccggggactttcca

SEQ ID NO: 608244 - DNA, 15 bp, Homo sapiens
ccggggactttccag

SEQ ID NO: 608245 - DNA, 15 bp, Homo sapiens
cggggactttccagc

SEQ ID NO: 608246 - DNA, 15 bp, Homo sapiens
ggggactttccagct

SEQ ID NO: 608247 - DNA, 15 bp, Homo sapiens
gggactttccagctc

SEQ ID NO: 608248 - DNA, 15 bp, Homo sapiens
ggactttccagctca

SEQ ID NO: 608249 - DNA, 15 bp, Homo sapiens
gactttccagctcag

SEQ ID NO: 608250 - DNA, 15 bp, Homo sapiens
actttccagctcagt

SEQ ID NO: 608251 - DNA, 15 bp, Homo sapiens
ctttccagctcagtc

SEQ ID NO: 608252 - DNA, 15 bp, Homo sapiens
tttccagctcagtca

SEQ ID NO: 608253 - DNA, 15 bp, Homo sapiens
ttccagctcagtcac

SEQ ID NO: 608254 - DNA, 15 bp, Homo sapiens
tccagctcagtcaca

SEQ ID NO: 608255 - DNA, 15 bp, Homo sapiens
ccagctcagtcacat

SEQ ID NO: 608256 - DNA, 15 bp, Homo sapiens
cagctcagtcacatc

SEQ ID NO: 608257 - DNA, 15 bp, Homo sapiens
agctcagtcacatcc

SEQ ID NO: 608258 - DNA, 15 bp, Homo sapiens
gctcagtcacatcca

SEQ ID NO: 608259 - DNA, 15 bp, Homo sapiens
ctcagtcacatccag

SEQ ID NO: 608260 - DNA, 15 bp, Homo sapiens
tcagtcacatccaga

SEQ ID NO: 608261 - DNA, 15 bp, Homo sapiens
cagtcacatccagac

SEQ ID NO: 608262 - DNA, 15 bp, Homo sapiens
agtcacatccagact

SEQ ID NO: 608263 - DNA, 15 bp, Homo sapiens
gtcacatccagactc

SEQ ID NO: 608264 - DNA, 15 bp, Homo sapiens
tcacatccagactcc

SEQ ID NO: 608265 - DNA, 15 bp, Homo sapiens
cacatccagactcct

SEQ ID NO: 608266 - DNA, 15 bp, Homo sapiens
acatccagactcctc

SEQ ID NO: 608267 - DNA, 15 bp, Homo sapiens
catccagactcctct

SEQ ID NO: 608268 - DNA, 15 bp, Homo sapiens
atccagactcctctt

SEQ ID NO: 608269 - DNA, 15 bp, Homo sapiens
tccagactcctcttc

SEQ ID NO: 608270 - DNA, 15 bp, Homo sapiens
ccagactcctcttcc

SEQ ID NO: 608271 - DNA, 15 bp, Homo sapiens
cagactcctcttccc

SEQ ID NO: 608272 - DNA, 15 bp, Homo sapiens
agactcctcttccct

SEQ ID NO: 608273 - DNA, 15 bp, Homo sapiens
gactcctcttccctg

SEQ ID NO: 608274 - DNA, 15 bp, Homo sapiens
actcctcttccctga

SEQ ID NO: 608275 - DNA, 15 bp, Homo sapiens
ctcctcttccctgac

SEQ ID NO: 608276 - DNA, 15 bp, Homo sapiens
tcctcttccctgaca

SEQ ID NO: 608277 - DNA, 15 bp, Homo sapiens
cctcttccctgacaa

SEQ ID NO: 608278 - DNA, 15 bp, Homo sapiens
ctcttccctgacaat

SEQ ID NO: 608279 - DNA, 15 bp, Homo sapiens
tcttccctgacaatg

SEQ ID NO: 608280 - DNA, 15 bp, Homo sapiens
cttccctgacaatgg

SEQ ID NO: 608281 - DNA, 15 bp, Homo sapiens
ttccctgacaatggt

SEQ ID NO: 608282 - DNA, 15 bp, Homo sapiens
tccctgacaatggtc

SEQ ID NO: 608283 - DNA, 15 bp, Homo sapiens
ccctgacaatggtcc

SEQ ID NO: 608284 - DNA, 15 bp, Homo sapiens
cctgacaatggtcct

SEQ ID NO: 608285 - DNA, 15 bp, Homo sapiens
ctgacaatggtcctg

SEQ ID NO: 608286 - DNA, 15 bp, Homo sapiens
tgacaatggtcctgt

SEQ ID NO: 608287 - DNA, 15 bp, Homo sapiens
gacaatggtcctgtc

SEQ ID NO: 608288 - DNA, 15 bp, Homo sapiens
acaatggtcctgtcc

SEQ ID NO: 608289 - DNA, 15 bp, Homo sapiens
caatggtcctgtccc

SEQ ID NO: 608290 - DNA, 15 bp, Homo sapiens
aatggtcctgtccct

SEQ ID NO: 608291 - DNA, 15 bp, Homo sapiens
atggtcctgtccctg

SEQ ID NO: 608292 - DNA, 15 bp, Homo sapiens
tggtcctgtccctga

SEQ ID NO: 608293 - DNA, 15 bp, Homo sapiens
ggtcctgtccctgag

SEQ ID NO: 608294 - DNA, 15 bp, Homo sapiens
gtcctgtccctgagc

SEQ ID NO: 608295 - DNA, 15 bp, Homo sapiens
tcctgtccctgagcc

SEQ ID NO: 608296 - DNA, 15 bp, Homo sapiens
cctgtccctgagcct

SEQ ID NO: 608297 - DNA, 15 bp, Homo sapiens
ctgtccctgagcctt

SEQ ID NO: 608298 - DNA, 15 bp, Homo sapiens
tgtccctgagccttt

SEQ ID NO: 608299 - DNA, 15 bp, Homo sapiens
gtccctgagcctttg

SEQ ID NO: 608300 - DNA, 15 bp, Homo sapiens
tccctgagcctttgc

SEQ ID NO: 608301 - DNA, 15 bp, Homo sapiens
ccctgagcctttgca

SEQ ID NO: 608302 - DNA, 15 bp, Homo sapiens
cctgagcctttgcaa

SEQ ID NO: 608303 - DNA, 15 bp, Homo sapiens
ctgagcctttgcaag

SEQ ID NO: 608304 - DNA, 15 bp, Homo sapiens
tgagcctttgcaagg

SEQ ID NO: 608305 - DNA, 15 bp, Homo sapiens
gagcctttgcaaggc

SEQ ID NO: 608306 - DNA, 15 bp, Homo sapiens
agcctttgcaaggct

SEQ ID NO: 608307 - DNA, 15 bp, Homo sapiens
gcctttgcaaggctg

SEQ ID NO: 608308 - DNA, 15 bp, Homo sapiens
cctttgcaaggctgt

SEQ ID NO: 608309 - DNA, 15 bp, Homo sapiens
ctttgcaaggctgtt

SEQ ID NO: 608310 - DNA, 15 bp, Homo sapiens
tttgcaaggctgttc

SEQ ID NO: 608311 - DNA, 15 bp, Homo sapiens
ttgcaaggctgttct

SEQ ID NO: 608312 - DNA, 15 bp, Homo sapiens
tgcaaggctgttctc

SEQ ID NO: 608313 - DNA, 15 bp, Homo sapiens
gcaaggctgttctcc

SEQ ID NO: 608314 - DNA, 15 bp, Homo sapiens
caaggctgttctcca

SEQ ID NO: 608315 - DNA, 15 bp, Homo sapiens
aaggctgttctccat

SEQ ID NO: 608316 - DNA, 15 bp, Homo sapiens
aggctgttctccatg

SEQ ID NO: 608317 - DNA, 15 bp, Homo sapiens
ggctgttctccatgc

SEQ ID NO: 608318 - DNA, 15 bp, Homo sapiens
gctgttctccatgca

SEQ ID NO: 608319 - DNA, 15 bp, Homo sapiens
ctgttctccatgcag

SEQ ID NO: 608320 - DNA, 15 bp, Homo sapiens
tgttctccatgcagg

SEQ ID NO: 608321 - DNA, 15 bp, Homo sapiens
gttctccatgcagga

SEQ ID NO: 608322 - DNA, 15 bp, Homo sapiens
ttctccatgcaggaa

SEQ ID NO: 608323 - DNA, 15 bp, Homo sapiens
tctccatgcaggaat

SEQ ID NO: 608324 - DNA, 15 bp, Homo sapiens
ctccatgcaggaatg

SEQ ID NO: 608325 - DNA, 15 bp, Homo sapiens
tccatgcaggaatgt

SEQ ID NO: 608326 - DNA, 15 bp, Homo sapiens
ccatgcaggaatgtt

SEQ ID NO: 608327 - DNA, 15 bp, Homo sapiens
catgcaggaatgttc

SEQ ID NO: 608328 - DNA, 15 bp, Homo sapiens
atgcaggaatgttca

SEQ ID NO: 608329 - DNA, 15 bp, Homo sapiens
tgcaggaatgttcag

SEQ ID NO: 608330 - DNA, 15 bp, Homo sapiens
gcaggaatgttcagg

SEQ ID NO: 608331 - DNA, 15 bp, Homo sapiens
caggaatgttcaggg

SEQ ID NO: 608332 - DNA, 15 bp, Homo sapiens
aggaatgttcaggga

SEQ ID NO: 608333 - DNA, 15 bp, Homo sapiens
ggaatgttcagggag

SEQ ID NO: 608334 - DNA, 15 bp, Homo sapiens
gaatgttcagggagc

SEQ ID NO: 608335 - DNA, 15 bp, Homo sapiens
aatgttcagggagca

SEQ ID NO: 608336 - DNA, 15 bp, Homo sapiens
atgttcagggagcat

SEQ ID NO: 608337 - DNA, 15 bp, Homo sapiens
tgttcagggagcatc

SEQ ID NO: 608338 - DNA, 15 bp, Homo sapiens
gttcagggagcatcc

SEQ ID NO: 608339 - DNA, 15 bp, Homo sapiens
ttcagggagcatcct

SEQ ID NO: 608340 - DNA, 15 bp, Homo sapiens
tcagggagcatcctt

SEQ ID NO: 608341 - DNA, 15 bp, Homo sapiens
cagggagcatccttc

SEQ ID NO: 608342 - DNA, 15 bp, Homo sapiens
agggagcatccttcc

SEQ ID NO: 608343 - DNA, 15 bp, Homo sapiens
gggagcatccttccc

SEQ ID NO: 608344 - DNA, 15 bp, Homo sapiens
ggagcatccttccca

SEQ ID NO: 608345 - DNA, 15 bp, Homo sapiens
gagcatccttcccac

SEQ ID NO: 608346 - DNA, 15 bp, Homo sapiens
agcatccttcccaca

SEQ ID NO: 608347 - DNA, 15 bp, Homo sapiens
gcatccttcccacac

SEQ ID NO: 608348 - DNA, 15 bp, Homo sapiens
catccttcccacacc

SEQ ID NO: 608349 - DNA, 15 bp, Homo sapiens
atccttcccacacca

SEQ ID NO: 608350 - DNA, 15 bp, Homo sapiens
tccttcccacaccag

SEQ ID NO: 608351 - DNA, 15 bp, Homo sapiens
ccttcccacaccagg

SEQ ID NO: 608352 - DNA, 15 bp, Homo sapiens
cttcccacaccaggg

SEQ ID NO: 608353 - DNA, 15 bp, Homo sapiens
ttcccacaccagggt

SEQ ID NO: 608354 - DNA, 15 bp, Homo sapiens
tcccacaccagggtg

SEQ ID NO: 608355 - DNA, 15 bp, Homo sapiens
cccacaccagggtgt

SEQ ID NO: 608356 - DNA, 15 bp, Homo sapiens
ccacaccagggtgtc

SEQ ID NO: 608357 - DNA, 15 bp, Homo sapiens
cacaccagggtgtcc

SEQ ID NO: 608358 - DNA, 15 bp, Homo sapiens
acaccagggtgtccg

SEQ ID NO: 608359 - DNA, 15 bp, Homo sapiens
caccagggtgtccgc

SEQ ID NO: 608360 - DNA, 15 bp, Homo sapiens
accagggtgtccgct

SEQ ID NO: 608361 - DNA, 15 bp, Homo sapiens
ccagggtgtccgctg

SEQ ID NO: 608362 - DNA, 15 bp, Homo sapiens
cagggtgtccgctgc

SEQ ID NO: 608363 - DNA, 15 bp, Homo sapiens
agggtgtccgctgcc

SEQ ID NO: 608364 - DNA, 15 bp, Homo sapiens
gggtgtccgctgcct

SEQ ID NO: 608365 - DNA, 15 bp, Homo sapiens
ggtgtccgctgcctc

SEQ ID NO: 608366 - DNA, 15 bp, Homo sapiens
gtgtccgctgcctct

SEQ ID NO: 608367 - DNA, 15 bp, Homo sapiens
tgtccgctgcctctt

SEQ ID NO: 608368 - DNA, 15 bp, Homo sapiens
gtccgctgcctcttc

SEQ ID NO: 608369 - DNA, 15 bp, Homo sapiens
tccgctgcctcttca

SEQ ID NO: 608370 - DNA, 15 bp, Homo sapiens
ccgctgcctcttcag

SEQ ID NO: 608371 - DNA, 15 bp, Homo sapiens
cgctgcctcttcagg

SEQ ID NO: 608372 - DNA, 15 bp, Homo sapiens
gctgcctcttcagga

SEQ ID NO: 608373 - DNA, 15 bp, Homo sapiens
ctgcctcttcaggaa

SEQ ID NO: 608374 - DNA, 15 bp, Homo sapiens
tgcctcttcaggaag

SEQ ID NO: 608375 - DNA, 15 bp, Homo sapiens
gcctcttcaggaagc

SEQ ID NO: 608376 - DNA, 15 bp, Homo sapiens
cctcttcaggaagct

SEQ ID NO: 608377 - DNA, 15 bp, Homo sapiens
ctcttcaggaagctg

SEQ ID NO: 608378 - DNA, 15 bp, Homo sapiens
tcttcaggaagctgc

SEQ ID NO: 608379 - DNA, 15 bp, Homo sapiens
cttcaggaagctgcc

SEQ ID NO: 608380 - DNA, 15 bp, Homo sapiens
ttcaggaagctgcct

SEQ ID NO: 608381 - DNA, 15 bp, Homo sapiens
tcaggaagctgcctc

SEQ ID NO: 608382 - DNA, 15 bp, Homo sapiens
caggaagctgcctca

SEQ ID NO: 608383 - DNA, 15 bp, Homo sapiens
aggaagctgcctcag

SEQ ID NO: 608384 - DNA, 15 bp, Homo sapiens
ggaagctgcctcagg

SEQ ID NO: 608385 - DNA, 15 bp, Homo sapiens
gaagctgcctcaggc

SEQ ID NO: 608386 - DNA, 15 bp, Homo sapiens
aagctgcctcaggcc

SEQ ID NO: 608387 - DNA, 15 bp, Homo sapiens
agctgcctcaggcca

SEQ ID NO: 608388 - DNA, 15 bp, Homo sapiens
gctgcctcaggccac

SEQ ID NO: 608389 - DNA, 15 bp, Homo sapiens
ctgcctcaggccacc

SEQ ID NO: 608390 - DNA, 15 bp, Homo sapiens
tgcctcaggccacca

SEQ ID NO: 608391 - DNA, 15 bp, Homo sapiens
gcctcaggccaccag

SEQ ID NO: 608392 - DNA, 15 bp, Homo sapiens
cctcaggccaccagt

SEQ ID NO: 608393 - DNA, 15 bp, Homo sapiens
ctcaggccaccagtc

SEQ ID NO: 608394 - DNA, 15 bp, Homo sapiens
tcaggccaccagtcc

SEQ ID NO: 608395 - DNA, 15 bp, Homo sapiens
caggccaccagtcct

SEQ ID NO: 608396 - DNA, 15 bp, Homo sapiens
aggccaccagtcctc

SEQ ID NO: 608397 - DNA, 15 bp, Homo sapiens
ggccaccagtcctcg

SEQ ID NO: 608398 - DNA, 15 bp, Homo sapiens
gccaccagtcctcgt

SEQ ID NO: 608399 - DNA, 15 bp, Homo sapiens
ccaccagtcctcgtg

SEQ ID NO: 608400 - DNA, 15 bp, Homo sapiens
caccagtcctcgtgg

SEQ ID NO: 608401 - DNA, 15 bp, Homo sapiens
accagtcctcgtggt

SEQ ID NO: 608402 - DNA, 15 bp, Homo sapiens
ccagtcctcgtggtt

SEQ ID NO: 608403 - DNA, 15 bp, Homo sapiens
cagtcctcgtggttc

SEQ ID NO: 608404 - DNA, 15 bp, Homo sapiens
agtcctcgtggttct

SEQ ID NO: 608405 - DNA, 15 bp, Homo sapiens
gtcctcgtggttctg

SEQ ID NO: 608406 - DNA, 15 bp, Homo sapiens
tcctcgtggttctgt

SEQ ID NO: 608407 - DNA, 15 bp, Homo sapiens
cctcgtggttctgtg

SEQ ID NO: 608408 - DNA, 15 bp, Homo sapiens
ctcgtggttctgtgc

SEQ ID NO: 608409 - DNA, 15 bp, Homo sapiens
tcgtggttctgtgct

SEQ ID NO: 608410 - DNA, 15 bp, Homo sapiens
cgtggttctgtgctc

SEQ ID NO: 608411 - DNA, 15 bp, Homo sapiens
gtggttctgtgctct

SEQ ID NO: 608412 - DNA, 15 bp, Homo sapiens
tggttctgtgctctc

SEQ ID NO: 608413 - DNA, 15 bp, Homo sapiens
ggttctgtgctctct

SEQ ID NO: 608414 - DNA, 15 bp, Homo sapiens
gttctgtgctctctg

SEQ ID NO: 608415 - DNA, 15 bp, Homo sapiens
ttctgtgctctctgc

SEQ ID NO: 608416 - DNA, 15 bp, Homo sapiens
tctgtgctctctgcc

SEQ ID NO: 608417 - DNA, 15 bp, Homo sapiens
ctgtgctctctgccc

SEQ ID NO: 608418 - DNA, 15 bp, Homo sapiens
tgtgctctctgccct

SEQ ID NO: 608419 - DNA, 15 bp, Homo sapiens
gtgctctctgccctc

SEQ ID NO: 608420 - DNA, 15 bp, Homo sapiens
tgctctctgccctct

SEQ ID NO: 608421 - DNA, 15 bp, Homo sapiens
gctctctgccctctc

SEQ ID NO: 608422 - DNA, 15 bp, Homo sapiens
ctctctgccctctca

SEQ ID NO: 608423 - DNA, 15 bp, Homo sapiens
tctctgccctctcaa

SEQ ID NO: 608424 - DNA, 15 bp, Homo sapiens
ctctgccctctcaag

SEQ ID NO: 608425 - DNA, 15 bp, Homo sapiens
tctgccctctcaagc

SEQ ID NO: 608426 - DNA, 15 bp, Homo sapiens
ctgccctctcaagct

SEQ ID NO: 608427 - DNA, 15 bp, Homo sapiens
tgccctctcaagctc

SEQ ID NO: 608428 - DNA, 15 bp, Homo sapiens
gccctctcaagctct

SEQ ID NO: 608429 - DNA, 15 bp, Homo sapiens
ccctctcaagctctc

SEQ ID NO: 608430 - DNA, 15 bp, Homo sapiens
cctctcaagctctcc

SEQ ID NO: 608431 - DNA, 15 bp, Homo sapiens
ctctcaagctctcca

SEQ ID NO: 608432 - DNA, 15 bp, Homo sapiens
tctcaagctctccat

SEQ ID NO: 608433 - DNA, 15 bp, Homo sapiens
ctcaagctctccatc

SEQ ID NO: 608434 - DNA, 15 bp, Homo sapiens
tcaagctctccatcc

SEQ ID NO: 608435 - DNA, 15 bp, Homo sapiens
caagctctccatccc

SEQ ID NO: 608436 - DNA, 15 bp, Homo sapiens
aagctctccatcccc

SEQ ID NO: 608437 - DNA, 15 bp, Homo sapiens
agctctccatcccct

SEQ ID NO: 608438 - DNA, 15 bp, Homo sapiens
gctctccatcccctg

SEQ ID NO: 608439 - DNA, 15 bp, Homo sapiens
ctctccatcccctgt

SEQ ID NO: 608440 - DNA, 15 bp, Homo sapiens
tctccatcccctgtc

SEQ ID NO: 608441 - DNA, 15 bp, Homo sapiens
ctccatcccctgtcc

SEQ ID NO: 608442 - DNA, 15 bp, Homo sapiens
tccatcccctgtcct

SEQ ID NO: 608443 - DNA, 15 bp, Homo sapiens
ccatcccctgtcctt

SEQ ID NO: 608444 - DNA, 15 bp, Homo sapiens
catcccctgtccttg

SEQ ID NO: 608445 - DNA, 15 bp, Homo sapiens
atcccctgtccttgc

SEQ ID NO: 608446 - DNA, 15 bp, Homo sapiens
tcccctgtccttgca

SEQ ID NO: 608447 - DNA, 15 bp, Homo sapiens
cccctgtccttgcac

SEQ ID NO: 608448 - DNA, 15 bp, Homo sapiens
ccctgtccttgcact

SEQ ID NO: 608449 - DNA, 15 bp, Homo sapiens
cctgtccttgcactt

SEQ ID NO: 608450 - DNA, 15 bp, Homo sapiens
ctgtccttgcacttc

SEQ ID NO: 608451 - DNA, 15 bp, Homo sapiens
tgtccttgcacttca

SEQ ID NO: 608452 - DNA, 15 bp, Homo sapiens
gtccttgcacttcat

SEQ ID NO: 608453 - DNA, 15 bp, Homo sapiens
tccttgcacttcatt

SEQ ID NO: 608454 - DNA, 15 bp, Homo sapiens
ccttgcacttcattt

SEQ ID NO: 608455 - DNA, 15 bp, Homo sapiens
cttgcacttcattta

SEQ ID NO: 608456 - DNA, 15 bp, Homo sapiens
ttgcacttcatttat

SEQ ID NO: 608457 - DNA, 15 bp, Homo sapiens
tgcacttcatttatt

SEQ ID NO: 608458 - DNA, 15 bp, Homo sapiens
gcacttcatttattt

SEQ ID NO: 608459 - DNA, 15 bp, Homo sapiens
cacttcatttatttt

SEQ ID NO: 608460 - DNA, 15 bp, Homo sapiens
acttcatttattttt

SEQ ID NO: 608461 - DNA, 15 bp, Homo sapiens
cttcatttattttta

SEQ ID NO: 608462 - DNA, 15 bp, Homo sapiens
ttcatttatttttac

SEQ ID NO: 608463 - DNA, 15 bp, Homo sapiens
tcatttatttttact

SEQ ID NO: 608464 - DNA, 15 bp, Homo sapiens
catttatttttactg

SEQ ID NO: 608465 - DNA, 15 bp, Homo sapiens
atttatttttactgg

SEQ ID NO: 608466 - DNA, 15 bp, Homo sapiens
tttatttttactggt

SEQ ID NO: 608467 - DNA, 15 bp, Homo sapiens
ttatttttactggtg

SEQ ID NO: 608468 - DNA, 15 bp, Homo sapiens
tatttttactggtgt

SEQ ID NO: 608469 - DNA, 15 bp, Homo sapiens
atttttactggtgtt

SEQ ID NO: 608470 - DNA, 15 bp, Homo sapiens
tttttactggtgttc

SEQ ID NO: 608471 - DNA, 15 bp, Homo sapiens
ttttactggtgttcc

SEQ ID NO: 608472 - DNA, 15 bp, Homo sapiens
tttactggtgttcct

SEQ ID NO: 608473 - DNA, 15 bp, Homo sapiens
ttactggtgttcctc

SEQ ID NO: 608474 - DNA, 15 bp, Homo sapiens
tactggtgttcctca

SEQ ID NO: 608475 - DNA, 15 bp, Homo sapiens
actggtgttcctcag

SEQ ID NO: 608476 - DNA, 15 bp, Homo sapiens
ctggtgttcctcagc

SEQ ID NO: 608477 - DNA, 15 bp, Homo sapiens
tggtgttcctcagcc

SEQ ID NO: 608478 - DNA, 15 bp, Homo sapiens
ggtgttcctcagcca

SEQ ID NO: 608479 - DNA, 15 bp, Homo sapiens
gtgttcctcagccat

SEQ ID NO: 608480 - DNA, 15 bp, Homo sapiens
tgttcctcagccatt

SEQ ID NO: 608481 - DNA, 15 bp, Homo sapiens
gttcctcagccattt

SEQ ID NO: 608482 - DNA, 15 bp, Homo sapiens
ttcctcagccatttt

SEQ ID NO: 608483 - DNA, 15 bp, Homo sapiens
tcctcagccattttt

SEQ ID NO: 608484 - DNA, 15 bp, Homo sapiens
cctcagccatttttc

SEQ ID NO: 608485 - DNA, 15 bp, Homo sapiens
ctcagccatttttct

SEQ ID NO: 608486 - DNA, 15 bp, Homo sapiens
tcagccatttttctc

SEQ ID NO: 608487 - DNA, 15 bp, Homo sapiens
cagccatttttctct

SEQ ID NO: 608488 - DNA, 15 bp, Homo sapiens
agccatttttctcta

SEQ ID NO: 608489 - DNA, 15 bp, Homo sapiens
gccatttttctctat

SEQ ID NO: 608490 - DNA, 15 bp, Homo sapiens
ccatttttctctata

SEQ ID NO: 608491 - DNA, 15 bp, Homo sapiens
catttttctctatac

SEQ ID NO: 608492 - DNA, 15 bp, Homo sapiens
atttttctctataca

SEQ ID NO: 608493 - DNA, 15 bp, Homo sapiens
tttttctctatacag

SEQ ID NO: 608494 - DNA, 15 bp, Homo sapiens
ttttctctatacagc

SEQ ID NO: 608495 - DNA, 15 bp, Homo sapiens
tttctctatacagct

SEQ ID NO: 608496 - DNA, 15 bp, Homo sapiens
ttctctatacagctc

SEQ ID NO: 608497 - DNA, 15 bp, Homo sapiens
tctctatacagctcc

SEQ ID NO: 608498 - DNA, 15 bp, Homo sapiens
ctctatacagctccc

SEQ ID NO: 608499 - DNA, 15 bp, Homo sapiens
tctatacagctcccc

SEQ ID NO: 608500 - DNA, 15 bp, Homo sapiens
ctatacagctccccc

SEQ ID NO: 608501 - DNA, 15 bp, Homo sapiens
tatacagctcccccc

SEQ ID NO: 608502 - DNA, 15 bp, Homo sapiens
atacagctcccccca

SEQ ID NO: 608503 - DNA, 15 bp, Homo sapiens
tacagctccccccac

SEQ ID NO: 608504 - DNA, 15 bp, Homo sapiens
acagctccccccacc

SEQ ID NO: 608505 - DNA, 15 bp, Homo sapiens
cagctccccccaccc

SEQ ID NO: 608506 - DNA, 15 bp, Homo sapiens
agctccccccacccc

SEQ ID NO: 608507 - DNA, 15 bp, Homo sapiens
gctccccccaccccc

SEQ ID NO: 608508 - DNA, 15 bp, Homo sapiens
ctccccccacccccc

SEQ ID NO: 608509 - DNA, 15 bp, Homo sapiens
tccccccacccccca

SEQ ID NO: 608510 - DNA, 15 bp, Homo sapiens
ccccccaccccccag

SEQ ID NO: 608511 - DNA, 15 bp, Homo sapiens
cccccaccccccagg

SEQ ID NO: 608512 - DNA, 15 bp, Homo sapiens
ccccaccccccagga

SEQ ID NO: 608513 - DNA, 15 bp, Homo sapiens
cccaccccccaggag

SEQ ID NO: 608514 - DNA, 15 bp, Homo sapiens
ccaccccccaggaga

SEQ ID NO: 608515 - DNA, 15 bp, Homo sapiens
caccccccaggagaa

SEQ ID NO: 608516 - DNA, 15 bp, Homo sapiens
accccccaggagaag

SEQ ID NO: 608517 - DNA, 15 bp, Homo sapiens
ccccccaggagaaga

SEQ ID NO: 608518 - DNA, 15 bp, Homo sapiens
cccccaggagaagag

SEQ ID NO: 608519 - DNA, 15 bp, Homo sapiens
ccccaggagaagagt

SEQ ID NO: 608520 - DNA, 15 bp, Homo sapiens
cccaggagaagagta

SEQ ID NO: 608521 - DNA, 15 bp, Homo sapiens
ccaggagaagagtag

SEQ ID NO: 608522 - DNA, 15 bp, Homo sapiens
caggagaagagtagc

SEQ ID NO: 608523 - DNA, 15 bp, Homo sapiens
aggagaagagtagcc

SEQ ID NO: 608524 - DNA, 15 bp, Homo sapiens
ggagaagagtagcct

SEQ ID NO: 608525 - DNA, 15 bp, Homo sapiens
gagaagagtagcctg

SEQ ID NO: 608526 - DNA, 15 bp, Homo sapiens
agaagagtagcctga

SEQ ID NO: 608527 - DNA, 15 bp, Homo sapiens
gaagagtagcctgag

SEQ ID NO: 608528 - DNA, 15 bp, Homo sapiens
aagagtagcctgaga

SEQ ID NO: 608529 - DNA, 15 bp, Homo sapiens
agagtagcctgagag

SEQ ID NO: 608530 - DNA, 15 bp, Homo sapiens
gagtagcctgagaga

SEQ ID NO: 608531 - DNA, 15 bp, Homo sapiens
agtagcctgagagat

SEQ ID NO: 608532 - DNA, 15 bp, Homo sapiens
gtagcctgagagatt

SEQ ID NO: 608533 - DNA, 15 bp, Homo sapiens
tagcctgagagattt

SEQ ID NO: 608534 - DNA, 15 bp, Homo sapiens
agcctgagagatttt

SEQ ID NO: 608535 - DNA, 15 bp, Homo sapiens
gcctgagagatttta

SEQ ID NO: 608536 - DNA, 15 bp, Homo sapiens
cctgagagattttaa

SEQ ID NO: 608537 - DNA, 15 bp, Homo sapiens
ctgagagattttaat

SEQ ID NO: 608538 - DNA, 15 bp, Homo sapiens
tgagagattttaatg

SEQ ID NO: 608539 - DNA, 15 bp, Homo sapiens
gagagattttaatgt

SEQ ID NO: 608540 - DNA, 15 bp, Homo sapiens
agagattttaatgtg

SEQ ID NO: 608541 - DNA, 15 bp, Homo sapiens
gagattttaatgtga

SEQ ID NO: 608542 - DNA, 15 bp, Homo sapiens
agattttaatgtgac

SEQ ID NO: 608543 - DNA, 15 bp, Homo sapiens
gattttaatgtgacc

SEQ ID NO: 608544 - DNA, 15 bp, Homo sapiens
attttaatgtgacca

SEQ ID NO: 608545 - DNA, 15 bp, Homo sapiens
ttttaatgtgaccag

SEQ ID NO: 608546 - DNA, 15 bp, Homo sapiens
tttaatgtgaccagt

SEQ ID NO: 608547 - DNA, 15 bp, Homo sapiens
ttaatgtgaccagtg

SEQ ID NO: 608548 - DNA, 15 bp, Homo sapiens
taatgtgaccagtgt

SEQ ID NO: 608549 - DNA, 15 bp, Homo sapiens
aatgtgaccagtgtc

SEQ ID NO: 608550 - DNA, 15 bp, Homo sapiens
atgtgaccagtgtct

SEQ ID NO: 608551 - DNA, 15 bp, Homo sapiens
tgtgaccagtgtctt

SEQ ID NO: 608552 - DNA, 15 bp, Homo sapiens
gtgaccagtgtcttg

SEQ ID NO: 608553 - DNA, 15 bp, Homo sapiens
tgaccagtgtcttga

SEQ ID NO: 608554 - DNA, 15 bp, Homo sapiens
gaccagtgtcttgag

SEQ ID NO: 608555 - DNA, 15 bp, Homo sapiens
accagtgtcttgagg

SEQ ID NO: 608556 - DNA, 15 bp, Homo sapiens
ccagtgtcttgagga

SEQ ID NO: 608557 - DNA, 15 bp, Homo sapiens
cagtgtcttgaggac

SEQ ID NO: 608558 - DNA, 15 bp, Homo sapiens
agtgtcttgaggaca

SEQ ID NO: 608559 - DNA, 15 bp, Homo sapiens
gtgtcttgaggacac

SEQ ID NO: 608560 - DNA, 15 bp, Homo sapiens
tgtcttgaggacacc

SEQ ID NO: 608561 - DNA, 15 bp, Homo sapiens
gtcttgaggacacca

SEQ ID NO: 608562 - DNA, 15 bp, Homo sapiens
tcttgaggacaccaa

SEQ ID NO: 608563 - DNA, 15 bp, Homo sapiens
cttgaggacaccaag

SEQ ID NO: 608564 - DNA, 15 bp, Homo sapiens
ttgaggacaccaagg

SEQ ID NO: 608565 - DNA, 15 bp, Homo sapiens
tgaggacaccaaggc

SEQ ID NO: 608566 - DNA, 15 bp, Homo sapiens
gaggacaccaaggcc

SEQ ID NO: 608567 - DNA, 15 bp, Homo sapiens
aggacaccaaggccc

SEQ ID NO: 608568 - DNA, 15 bp, Homo sapiens
ggacaccaaggccca

SEQ ID NO: 608569 - DNA, 15 bp, Homo sapiens
gacaccaaggcccag

SEQ ID NO: 608570 - DNA, 15 bp, Homo sapiens
acaccaaggcccaga

SEQ ID NO: 608571 - DNA, 15 bp, Homo sapiens
caccaaggcccagag

SEQ ID NO: 608572 - DNA, 15 bp, Homo sapiens
accaaggcccagagc

SEQ ID NO: 608573 - DNA, 15 bp, Homo sapiens
ccaaggcccagagct

SEQ ID NO: 608574 - DNA, 15 bp, Homo sapiens
caaggcccagagctg

SEQ ID NO: 608575 - DNA, 15 bp, Homo sapiens
aaggcccagagctgg

SEQ ID NO: 608576 - DNA, 15 bp, Homo sapiens
aggcccagagctggc

SEQ ID NO: 608577 - DNA, 15 bp, Homo sapiens
ggcccagagctggca

SEQ ID NO: 608578 - DNA, 15 bp, Homo sapiens
gcccagagctggcag

SEQ ID NO: 608579 - DNA, 15 bp, Homo sapiens
cccagagctggcagg

SEQ ID NO: 608580 - DNA, 15 bp, Homo sapiens
ccagagctggcaggg

SEQ ID NO: 608581 - DNA, 15 bp, Homo sapiens
cagagctggcagggc

SEQ ID NO: 608582 - DNA, 15 bp, Homo sapiens
agagctggcagggcc

SEQ ID NO: 608583 - DNA, 15 bp, Homo sapiens
gagctggcagggcct

SEQ ID NO: 608584 - DNA, 15 bp, Homo sapiens
agctggcagggcctt

SEQ ID NO: 608585 - DNA, 15 bp, Homo sapiens
gctggcagggcctta

SEQ ID NO: 608586 - DNA, 15 bp, Homo sapiens
ctggcagggccttac

SEQ ID NO: 608587 - DNA, 15 bp, Homo sapiens
tggcagggccttaca

SEQ ID NO: 608588 - DNA, 15 bp, Homo sapiens
ggcagggccttacag

SEQ ID NO: 608589 - DNA, 15 bp, Homo sapiens
gcagggccttacagg

SEQ ID NO: 608590 - DNA, 15 bp, Homo sapiens
cagggccttacaggc

SEQ ID NO: 608591 - DNA, 15 bp, Homo sapiens
agggccttacaggca

SEQ ID NO: 608592 - DNA, 15 bp, Homo sapiens
gggccttacaggcag

SEQ ID NO: 608593 - DNA, 15 bp, Homo sapiens
ggccttacaggcaga

SEQ ID NO: 608594 - DNA, 15 bp, Homo sapiens
gccttacaggcagag

SEQ ID NO: 608595 - DNA, 15 bp, Homo sapiens
ccttacaggcagagc

SEQ ID NO: 608596 - DNA, 15 bp, Homo sapiens
cttacaggcagagca

SEQ ID NO: 608597 - DNA, 15 bp, Homo sapiens
ttacaggcagagcag

SEQ ID NO: 608598 - DNA, 15 bp, Homo sapiens
tacaggcagagcagg

SEQ ID NO: 608599 - DNA, 15 bp, Homo sapiens
acaggcagagcaggc

SEQ ID NO: 608600 - DNA, 15 bp, Homo sapiens
caggcagagcaggcc

SEQ ID NO: 608601 - DNA, 15 bp, Homo sapiens
aggcagagcaggccc

SEQ ID NO: 608602 - DNA, 15 bp, Homo sapiens
ggcagagcaggccct

SEQ ID NO: 608603 - DNA, 15 bp, Homo sapiens
gcagagcaggccctg

SEQ ID NO: 608604 - DNA, 15 bp, Homo sapiens
cagagcaggccctgg

SEQ ID NO: 608605 - DNA, 15 bp, Homo sapiens
agagcaggccctgga

SEQ ID NO: 608606 - DNA, 15 bp, Homo sapiens
gagcaggccctggaa

SEQ ID NO: 608607 - DNA, 15 bp, Homo sapiens
agcaggccctggaac

SEQ ID NO: 608608 - DNA, 15 bp, Homo sapiens
gcaggccctggaacc

SEQ ID NO: 608609 - DNA, 15 bp, Homo sapiens
caggccctggaaccc

SEQ ID NO: 608610 - DNA, 15 bp, Homo sapiens
aggccctggaaccca

SEQ ID NO: 608611 - DNA, 15 bp, Homo sapiens
ggccctggaacccag

SEQ ID NO: 608612 - DNA, 15 bp, Homo sapiens
gccctggaacccagg

SEQ ID NO: 608613 - DNA, 15 bp, Homo sapiens
ccctggaacccaggc

SEQ ID NO: 608614 - DNA, 15 bp, Homo sapiens
cctggaacccaggcc

SEQ ID NO: 608615 - DNA, 15 bp, Homo sapiens
ctggaacccaggcct

SEQ ID NO: 608616 - DNA, 15 bp, Homo sapiens
tggaacccaggcctc

SEQ ID NO: 608617 - DNA, 15 bp, Homo sapiens
ggaacccaggcctcc

SEQ ID NO: 608618 - DNA, 15 bp, Homo sapiens
gaacccaggcctcct

SEQ ID NO: 608619 - DNA, 15 bp, Homo sapiens
aacccaggcctcctg

SEQ ID NO: 608620 - DNA, 15 bp, Homo sapiens
acccaggcctcctga

SEQ ID NO: 608621 - DNA, 15 bp, Homo sapiens
cccaggcctcctgac

SEQ ID NO: 608622 - DNA, 15 bp, Homo sapiens
ccaggcctcctgact

SEQ ID NO: 608623 - DNA, 15 bp, Homo sapiens
caggcctcctgactc

SEQ ID NO: 608624 - DNA, 15 bp, Homo sapiens
aggcctcctgactcc

SEQ ID NO: 608625 - DNA, 15 bp, Homo sapiens
ggcctcctgactccc

SEQ ID NO: 608626 - DNA, 15 bp, Homo sapiens
gcctcctgactccca

SEQ ID NO: 608627 - DNA, 15 bp, Homo sapiens
cctcctgactcccag

SEQ ID NO: 608628 - DNA, 15 bp, Homo sapiens
ctcctgactcccagg

SEQ ID NO: 608629 - DNA, 15 bp, Homo sapiens
tcctgactcccaggc

SEQ ID NO: 608630 - DNA, 15 bp, Homo sapiens
cctgactcccaggct

SEQ ID NO: 608631 - DNA, 15 bp, Homo sapiens
ctgactcccaggctc

SEQ ID NO: 608632 - DNA, 15 bp, Homo sapiens
tgactcccaggctct

SEQ ID NO: 608633 - DNA, 15 bp, Homo sapiens
gactcccaggctctg

SEQ ID NO: 608634 - DNA, 15 bp, Homo sapiens
actcccaggctctgg

SEQ ID NO: 608635 - DNA, 15 bp, Homo sapiens
ctcccaggctctggg

SEQ ID NO: 608636 - DNA, 15 bp, Homo sapiens
tcccaggctctgggc

SEQ ID NO: 608637 - DNA, 15 bp, Homo sapiens
cccaggctctgggcc

SEQ ID NO: 608638 - DNA, 15 bp, Homo sapiens
ccaggctctgggcct

SEQ ID NO: 608639 - DNA, 15 bp, Homo sapiens
caggctctgggcctg

SEQ ID NO: 608640 - DNA, 15 bp, Homo sapiens
aggctctgggcctgc

SEQ ID NO: 608641 - DNA, 15 bp, Homo sapiens
ggctctgggcctgcg

SEQ ID NO: 608642 - DNA, 15 bp, Homo sapiens
gctctgggcctgcgg

SEQ ID NO: 608643 - DNA, 15 bp, Homo sapiens
ctctgggcctgcggc

SEQ ID NO: 608644 - DNA, 15 bp, Homo sapiens
tctgggcctgcggcc

SEQ ID NO: 608645 - DNA, 15 bp, Homo sapiens
ctgggcctgcggcca

SEQ ID NO: 608646 - DNA, 15 bp, Homo sapiens
tgggcctgcggccat

SEQ ID NO: 608647 - DNA, 15 bp, Homo sapiens
gggcctgcggccatc

SEQ ID NO: 608648 - DNA, 15 bp, Homo sapiens
ggcctgcggccatca

SEQ ID NO: 608649 - DNA, 15 bp, Homo sapiens
gcctgcggccatcat

SEQ ID NO: 608650 - DNA, 15 bp, Homo sapiens
cctgcggccatcatg

SEQ ID NO: 608651 - DNA, 15 bp, Homo sapiens
ctgcggccatcatgc

SEQ ID NO: 608652 - DNA, 15 bp, Homo sapiens
tgcggccatcatgcc

SEQ ID NO: 608653 - DNA, 15 bp, Homo sapiens
gcggccatcatgccc

SEQ ID NO: 608654 - DNA, 15 bp, Homo sapiens
cggccatcatgccct

SEQ ID NO: 608655 - DNA, 15 bp, Homo sapiens
ggccatcatgccctg

SEQ ID NO: 608656 - DNA, 15 bp, Homo sapiens
gccatcatgccctgt

SEQ ID NO: 608657 - DNA, 15 bp, Homo sapiens
ccatcatgccctgtt

SEQ ID NO: 608658 - DNA, 15 bp, Homo sapiens
catcatgccctgttc

SEQ ID NO: 608659 - DNA, 15 bp, Homo sapiens
atcatgccctgttct

SEQ ID NO: 608660 - DNA, 15 bp, Homo sapiens
tcatgccctgttctc

SEQ ID NO: 608661 - DNA, 15 bp, Homo sapiens
catgccctgttctct

SEQ ID NO: 608662 - DNA, 15 bp, Homo sapiens
atgccctgttctctt

SEQ ID NO: 608663 - DNA, 15 bp, Homo sapiens
tgccctgttctcttg

SEQ ID NO: 608664 - DNA, 15 bp, Homo sapiens
gccctgttctcttgc

SEQ ID NO: 608665 - DNA, 15 bp, Homo sapiens
ccctgttctcttgcc

SEQ ID NO: 608666 - DNA, 15 bp, Homo sapiens
cctgttctcttgcct

SEQ ID NO: 608667 - DNA, 15 bp, Homo sapiens
ctgttctcttgcctg

SEQ ID NO: 608668 - DNA, 15 bp, Homo sapiens
tgttctcttgcctgg

SEQ ID NO: 608669 - DNA, 15 bp, Homo sapiens
gttctcttgcctggg

SEQ ID NO: 608670 - DNA, 15 bp, Homo sapiens
ttctcttgcctgggc

SEQ ID NO: 608671 - DNA, 15 bp, Homo sapiens
tctcttgcctgggct

SEQ ID NO: 608672 - DNA, 15 bp, Homo sapiens
ctcttgcctgggctg

SEQ ID NO: 608673 - DNA, 15 bp, Homo sapiens
tcttgcctgggctgc

SEQ ID NO: 608674 - DNA, 15 bp, Homo sapiens
cttgcctgggctgca

SEQ ID NO: 608675 - DNA, 15 bp, Homo sapiens
ttgcctgggctgcat

SEQ ID NO: 608676 - DNA, 15 bp, Homo sapiens
tgcctgggctgcatc

SEQ ID NO: 608677 - DNA, 15 bp, Homo sapiens
gcctgggctgcatcc

SEQ ID NO: 608678 - DNA, 15 bp, Homo sapiens
cctgggctgcatccc

SEQ ID NO: 608679 - DNA, 15 bp, Homo sapiens
ctgggctgcatccct

SEQ ID NO: 608680 - DNA, 15 bp, Homo sapiens
tgggctgcatccctt

SEQ ID NO: 608681 - DNA, 15 bp, Homo sapiens
gggctgcatcccttc

SEQ ID NO: 608682 - DNA, 15 bp, Homo sapiens
ggctgcatcccttca

SEQ ID NO: 608683 - DNA, 15 bp, Homo sapiens
gctgcatcccttcag

SEQ ID NO: 608684 - DNA, 15 bp, Homo sapiens
ctgcatcccttcagt

SEQ ID NO: 608685 - DNA, 15 bp, Homo sapiens
tgcatcccttcagtc

SEQ ID NO: 608686 - DNA, 15 bp, Homo sapiens
gcatcccttcagtcc

SEQ ID NO: 608687 - DNA, 15 bp, Homo sapiens
catcccttcagtccc

SEQ ID NO: 608688 - DNA, 15 bp, Homo sapiens
atcccttcagtcccc

SEQ ID NO: 608689 - DNA, 15 bp, Homo sapiens
tcccttcagtcccct

SEQ ID NO: 608690 - DNA, 15 bp, Homo sapiens
cccttcagtcccctg

SEQ ID NO: 608691 - DNA, 15 bp, Homo sapiens
ccttcagtcccctgc

SEQ ID NO: 608692 - DNA, 15 bp, Homo sapiens
cttcagtcccctgca

SEQ ID NO: 608693 - DNA, 15 bp, Homo sapiens
ttcagtcccctgcag

SEQ ID NO: 608694 - DNA, 15 bp, Homo sapiens
tcagtcccctgcagc

SEQ ID NO: 608695 - DNA, 15 bp, Homo sapiens
cagtcccctgcagca

SEQ ID NO: 608696 - DNA, 15 bp, Homo sapiens
agtcccctgcagcac

SEQ ID NO: 608697 - DNA, 15 bp, Homo sapiens
gtcccctgcagcacc

SEQ ID NO: 608698 - DNA, 15 bp, Homo sapiens
tcccctgcagcaccc

SEQ ID NO: 608699 - DNA, 15 bp, Homo sapiens
cccctgcagcacccc

SEQ ID NO: 608700 - DNA, 15 bp, Homo sapiens
ccctgcagcacccct

SEQ ID NO: 608701 - DNA, 15 bp, Homo sapiens
cctgcagcacccctg

SEQ ID NO: 608702 - DNA, 15 bp, Homo sapiens
ctgcagcacccctga

SEQ ID NO: 608703 - DNA, 15 bp, Homo sapiens
tgcagcacccctgag

SEQ ID NO: 608704 - DNA, 15 bp, Homo sapiens
gcagcacccctgagc

SEQ ID NO: 608705 - DNA, 15 bp, Homo sapiens
cagcacccctgagca

SEQ ID NO: 608706 - DNA, 15 bp, Homo sapiens
agcacccctgagcag

SEQ ID NO: 608707 - DNA, 15 bp, Homo sapiens
gcacccctgagcagg

SEQ ID NO: 608708 - DNA, 15 bp, Homo sapiens
cacccctgagcaggc

SEQ ID NO: 608709 - DNA, 15 bp, Homo sapiens
acccctgagcaggct

SEQ ID NO: 608710 - DNA, 15 bp, Homo sapiens
cccctgagcaggctc

SEQ ID NO: 608711 - DNA, 15 bp, Homo sapiens
ccctgagcaggctca

SEQ ID NO: 608712 - DNA, 15 bp, Homo sapiens
cctgagcaggctcag

SEQ ID NO: 608713 - DNA, 15 bp, Homo sapiens
ctgagcaggctcagg

SEQ ID NO: 608714 - DNA, 15 bp, Homo sapiens
tgagcaggctcaggc

SEQ ID NO: 608715 - DNA, 15 bp, Homo sapiens
gagcaggctcaggcc

SEQ ID NO: 608716 - DNA, 15 bp, Homo sapiens
agcaggctcaggcct

SEQ ID NO: 608717 - DNA, 15 bp, Homo sapiens
gcaggctcaggcctc

SEQ ID NO: 608718 - DNA, 15 bp, Homo sapiens
caggctcaggcctct

SEQ ID NO: 608719 - DNA, 15 bp, Homo sapiens
aggctcaggcctctg

SEQ ID NO: 608720 - DNA, 15 bp, Homo sapiens
ggctcaggcctctgc

SEQ ID NO: 608721 - DNA, 15 bp, Homo sapiens
gctcaggcctctgca

SEQ ID NO: 608722 - DNA, 15 bp, Homo sapiens
ctcaggcctctgcac

SEQ ID NO: 608723 - DNA, 15 bp, Homo sapiens
tcaggcctctgcaca

SEQ ID NO: 608724 - DNA, 15 bp, Homo sapiens
caggcctctgcacag

SEQ ID NO: 608725 - DNA, 15 bp, Homo sapiens
aggcctctgcacagg

SEQ ID NO: 608726 - DNA, 15 bp, Homo sapiens
ggcctctgcacaggt

SEQ ID NO: 608727 - DNA, 15 bp, Homo sapiens
gcctctgcacaggtg

SEQ ID NO: 608728 - DNA, 15 bp, Homo sapiens
cctctgcacaggtgg

SEQ ID NO: 608729 - DNA, 15 bp, Homo sapiens
ctctgcacaggtggg

SEQ ID NO: 608730 - DNA, 15 bp, Homo sapiens
tctgcacaggtgggc

SEQ ID NO: 608731 - DNA, 15 bp, Homo sapiens
ctgcacaggtgggca

SEQ ID NO: 608732 - DNA, 15 bp, Homo sapiens
tgcacaggtgggcag

SEQ ID NO: 608733 - DNA, 15 bp, Homo sapiens
gcacaggtgggcagg

SEQ ID NO: 608734 - DNA, 15 bp, Homo sapiens
cacaggtgggcaggt

SEQ ID NO: 608735 - DNA, 15 bp, Homo sapiens
acaggtgggcaggta

SEQ ID NO: 608736 - DNA, 15 bp, Homo sapiens
caggtgggcaggtag

SEQ ID NO: 608737 - DNA, 15 bp, Homo sapiens
aggtgggcaggtagg

SEQ ID NO: 608738 - DNA, 15 bp, Homo sapiens
ggtgggcaggtaggc

SEQ ID NO: 608739 - DNA, 15 bp, Homo sapiens
gtgggcaggtaggcc

SEQ ID NO: 608740 - DNA, 15 bp, Homo sapiens
tgggcaggtaggcct

SEQ ID NO: 608741 - DNA, 15 bp, Homo sapiens
gggcaggtaggcctg

SEQ ID NO: 608742 - DNA, 15 bp, Homo sapiens
ggcaggtaggcctgg

SEQ ID NO: 608743 - DNA, 15 bp, Homo sapiens
gcaggtaggcctggc

SEQ ID NO: 608744 - DNA, 15 bp, Homo sapiens
caggtaggcctggct

SEQ ID NO: 608745 - DNA, 15 bp, Homo sapiens
aggtaggcctggctc

SEQ ID NO: 608746 - DNA, 15 bp, Homo sapiens
ggtaggcctggctcc

SEQ ID NO: 608747 - DNA, 15 bp, Homo sapiens
gtaggcctggctcct

SEQ ID NO: 608748 - DNA, 15 bp, Homo sapiens
taggcctggctcctg

SEQ ID NO: 608749 - DNA, 15 bp, Homo sapiens
aggcctggctcctgc

SEQ ID NO: 608750 - DNA, 15 bp, Homo sapiens
ggcctggctcctgct

SEQ ID NO: 608751 - DNA, 15 bp, Homo sapiens
gcctggctcctgctc

SEQ ID NO: 608752 - DNA, 15 bp, Homo sapiens
cctggctcctgctca

SEQ ID NO: 608753 - DNA, 15 bp, Homo sapiens
ctggctcctgctcac

SEQ ID NO: 608754 - DNA, 15 bp, Homo sapiens
tggctcctgctcaca

SEQ ID NO: 608755 - DNA, 15 bp, Homo sapiens
ggctcctgctcacag

SEQ ID NO: 608756 - DNA, 15 bp, Homo sapiens
gctcctgctcacaga

SEQ ID NO: 608757 - DNA, 15 bp, Homo sapiens
ctcctgctcacagat

SEQ ID NO: 608758 - DNA, 15 bp, Homo sapiens
tcctgctcacagatc

SEQ ID NO: 608759 - DNA, 15 bp, Homo sapiens
cctgctcacagatcc

SEQ ID NO: 608760 - DNA, 15 bp, Homo sapiens
ctgctcacagatccc

SEQ ID NO: 608761 - DNA, 15 bp, Homo sapiens
tgctcacagatccct

SEQ ID NO: 608762 - DNA, 15 bp, Homo sapiens
gctcacagatccctg

SEQ ID NO: 608763 - DNA, 15 bp, Homo sapiens
ctcacagatccctgc

SEQ ID NO: 608764 - DNA, 15 bp, Homo sapiens
tcacagatccctgct

SEQ ID NO: 608765 - DNA, 15 bp, Homo sapiens
cacagatccctgctc

SEQ ID NO: 608766 - DNA, 15 bp, Homo sapiens
acagatccctgctcc

SEQ ID NO: 608767 - DNA, 15 bp, Homo sapiens
cagatccctgctcct

SEQ ID NO: 608768 - DNA, 15 bp, Homo sapiens
agatccctgctcctc

SEQ ID NO: 608769 - DNA, 15 bp, Homo sapiens
gatccctgctcctca

SEQ ID NO: 608770 - DNA, 15 bp, Homo sapiens
atccctgctcctcac

SEQ ID NO: 608771 - DNA, 15 bp, Homo sapiens
tccctgctcctcacc

SEQ ID NO: 608772 - DNA, 15 bp, Homo sapiens
ccctgctcctcacct

SEQ ID NO: 608773 - DNA, 15 bp, Homo sapiens
cctgctcctcacctg

SEQ ID NO: 608774 - DNA, 15 bp, Homo sapiens
ctgctcctcacctgc

SEQ ID NO: 608775 - DNA, 15 bp, Homo sapiens
tgctcctcacctgcc

SEQ ID NO: 608776 - DNA, 15 bp, Homo sapiens
gctcctcacctgcct

SEQ ID NO: 608777 - DNA, 15 bp, Homo sapiens
ctcctcacctgcctc

SEQ ID NO: 608778 - DNA, 15 bp, Homo sapiens
tcctcacctgcctcc

SEQ ID NO: 608779 - DNA, 15 bp, Homo sapiens
cctcacctgcctcct

SEQ ID NO: 608780 - DNA, 15 bp, Homo sapiens
ctcacctgcctcctc

SEQ ID NO: 608781 - DNA, 15 bp, Homo sapiens
tcacctgcctcctcc

SEQ ID NO: 608782 - DNA, 15 bp, Homo sapiens
cacctgcctcctcca

SEQ ID NO: 608783 - DNA, 15 bp, Homo sapiens
acctgcctcctccac

SEQ ID NO: 608784 - DNA, 15 bp, Homo sapiens
cctgcctcctccact

SEQ ID NO: 608785 - DNA, 15 bp, Homo sapiens
ctgcctcctccactc

SEQ ID NO: 608786 - DNA, 15 bp, Homo sapiens
tgcctcctccactcc

SEQ ID NO: 608787 - DNA, 15 bp, Homo sapiens
gcctcctccactccc

SEQ ID NO: 608788 - DNA, 15 bp, Homo sapiens
cctcctccactccca

SEQ ID NO: 608789 - DNA, 15 bp, Homo sapiens
ctcctccactcccag

SEQ ID NO: 608790 - DNA, 15 bp, Homo sapiens
tcctccactcccaga

SEQ ID NO: 608791 - DNA, 15 bp, Homo sapiens
cctccactcccagaa

SEQ ID NO: 608792 - DNA, 15 bp, Homo sapiens
ctccactcccagaac

SEQ ID NO: 608793 - DNA, 15 bp, Homo sapiens
tccactcccagaacc

SEQ ID NO: 608794 - DNA, 15 bp, Homo sapiens
ccactcccagaaccc

SEQ ID NO: 608795 - DNA, 15 bp, Homo sapiens
cactcccagaaccca

SEQ ID NO: 608796 - DNA, 15 bp, Homo sapiens
actcccagaacccag

SEQ ID NO: 608797 - DNA, 15 bp, Homo sapiens
ctcccagaacccagt

SEQ ID NO: 608798 - DNA, 15 bp, Homo sapiens
tcccagaacccagtc

SEQ ID NO: 608799 - DNA, 15 bp, Homo sapiens
cccagaacccagtcc

SEQ ID NO: 608800 - DNA, 15 bp, Homo sapiens
ccagaacccagtccc

SEQ ID NO: 608801 - DNA, 15 bp, Homo sapiens
cagaacccagtccct

SEQ ID NO: 608802 - DNA, 15 bp, Homo sapiens
agaacccagtccctt

SEQ ID NO: 608803 - DNA, 15 bp, Homo sapiens
gaacccagtcccttc

SEQ ID NO: 608804 - DNA, 15 bp, Homo sapiens
aacccagtcccttcc

SEQ ID NO: 608805 - DNA, 15 bp, Homo sapiens
acccagtcccttcct

SEQ ID NO: 608806 - DNA, 15 bp, Homo sapiens
cccagtcccttcctt

SEQ ID NO: 608807 - DNA, 15 bp, Homo sapiens
ccagtcccttccttg

SEQ ID NO: 608808 - DNA, 15 bp, Homo sapiens
cagtcccttccttgg

SEQ ID NO: 608809 - DNA, 15 bp, Homo sapiens
agtcccttccttggc

SEQ ID NO: 608810 - DNA, 15 bp, Homo sapiens
gtcccttccttggcc

SEQ ID NO: 608811 - DNA, 15 bp, Homo sapiens
tcccttccttggcct

SEQ ID NO: 608812 - DNA, 15 bp, Homo sapiens
cccttccttggcctt

SEQ ID NO: 608813 - DNA, 15 bp, Homo sapiens
ccttccttggccttt

SEQ ID NO: 608814 - DNA, 15 bp, Homo sapiens
cttccttggcctttt

SEQ ID NO: 608815 - DNA, 15 bp, Homo sapiens
ttccttggccttttc

SEQ ID NO: 608816 - DNA, 15 bp, Homo sapiens
tccttggccttttct

SEQ ID NO: 608817 - DNA, 15 bp, Homo sapiens
ccttggccttttctc

SEQ ID NO: 608818 - DNA, 15 bp, Homo sapiens
cttggccttttctcc

SEQ ID NO: 608819 - DNA, 15 bp, Homo sapiens
ttggccttttctccc

SEQ ID NO: 608820 - DNA, 15 bp, Homo sapiens
tggccttttctcccc

SEQ ID NO: 608821 - DNA, 15 bp, Homo sapiens
ggccttttctccccg

SEQ ID NO: 608822 - DNA, 15 bp, Homo sapiens
gccttttctccccga

SEQ ID NO: 608823 - DNA, 15 bp, Homo sapiens
ccttttctccccgag

SEQ ID NO: 608824 - DNA, 15 bp, Homo sapiens
cttttctccccgagg

SEQ ID NO: 608825 - DNA, 15 bp, Homo sapiens
ttttctccccgaggc

SEQ ID NO: 608826 - DNA, 15 bp, Homo sapiens
tttctccccgaggct

SEQ ID NO: 608827 - DNA, 15 bp, Homo sapiens
ttctccccgaggctt

SEQ ID NO: 608828 - DNA, 15 bp, Homo sapiens
tctccccgaggcttc

SEQ ID NO: 608829 - DNA, 15 bp, Homo sapiens
ctccccgaggcttct

SEQ ID NO: 608830 - DNA, 15 bp, Homo sapiens
tccccgaggcttctt

SEQ ID NO: 608831 - DNA, 15 bp, Homo sapiens
ccccgaggcttcttc

SEQ ID NO: 608832 - DNA, 15 bp, Homo sapiens
cccgaggcttcttcc

SEQ ID NO: 608833 - DNA, 15 bp, Homo sapiens
ccgaggcttcttcct

SEQ ID NO: 608834 - DNA, 15 bp, Homo sapiens
cgaggcttcttcctc

SEQ ID NO: 608835 - DNA, 15 bp, Homo sapiens
gaggcttcttcctcc

SEQ ID NO: 608836 - DNA, 15 bp, Homo sapiens
aggcttcttcctcct

SEQ ID NO: 608837 - DNA, 15 bp, Homo sapiens
ggcttcttcctcctg

SEQ ID NO: 608838 - DNA, 15 bp, Homo sapiens
gcttcttcctcctgc

SEQ ID NO: 608839 - DNA, 15 bp, Homo sapiens
cttcttcctcctgct

SEQ ID NO: 608840 - DNA, 15 bp, Homo sapiens
ttcttcctcctgcta

SEQ ID NO: 608841 - DNA, 15 bp, Homo sapiens
tcttcctcctgctag

SEQ ID NO: 608842 - DNA, 15 bp, Homo sapiens
cttcctcctgctaga

SEQ ID NO: 608843 - DNA, 15 bp, Homo sapiens
ttcctcctgctagag

SEQ ID NO: 608844 - DNA, 15 bp, Homo sapiens
tcctcctgctagagc

SEQ ID NO: 608845 - DNA, 15 bp, Homo sapiens
cctcctgctagagca

SEQ ID NO: 608846 - DNA, 15 bp, Homo sapiens
ctcctgctagagcag

SEQ ID NO: 608847 - DNA, 15 bp, Homo sapiens
tcctgctagagcagg

SEQ ID NO: 608848 - DNA, 15 bp, Homo sapiens
cctgctagagcagga

SEQ ID NO: 608849 - DNA, 15 bp, Homo sapiens
ctgctagagcaggag

SEQ ID NO: 608850 - DNA, 15 bp, Homo sapiens
tgctagagcaggagg

SEQ ID NO: 608851 - DNA, 15 bp, Homo sapiens
gctagagcaggagga

SEQ ID NO: 608852 - DNA, 15 bp, Homo sapiens
ctagagcaggaggag

SEQ ID NO: 608853 - DNA, 15 bp, Homo sapiens
tagagcaggaggagg

SEQ ID NO: 608854 - DNA, 15 bp, Homo sapiens
agagcaggaggaggg

SEQ ID NO: 608855 - DNA, 15 bp, Homo sapiens
gagcaggaggaggga

SEQ ID NO: 608856 - DNA, 15 bp, Homo sapiens
agcaggaggagggag

SEQ ID NO: 608857 - DNA, 15 bp, Homo sapiens
gcaggaggagggagg

SEQ ID NO: 608858 - DNA, 15 bp, Homo sapiens
caggaggagggaggc

SEQ ID NO: 608859 - DNA, 15 bp, Homo sapiens
aggaggagggaggcc

SEQ ID NO: 608860 - DNA, 15 bp, Homo sapiens
ggaggagggaggcca

SEQ ID NO: 608861 - DNA, 15 bp, Homo sapiens
gaggagggaggccat

SEQ ID NO: 608862 - DNA, 15 bp, Homo sapiens
aggagggaggccatc

SEQ ID NO: 608863 - DNA, 15 bp, Homo sapiens
ggagggaggccatcg

SEQ ID NO: 608864 - DNA, 15 bp, Homo sapiens
gagggaggccatcga

SEQ ID NO: 608865 - DNA, 15 bp, Homo sapiens
agggaggccatcgag

SEQ ID NO: 608866 - DNA, 15 bp, Homo sapiens
gggaggccatcgagg

SEQ ID NO: 608867 - DNA, 15 bp, Homo sapiens
ggaggccatcgaggg

SEQ ID NO: 608868 - DNA, 15 bp, Homo sapiens
gaggccatcgagggc

SEQ ID NO: 608869 - DNA, 15 bp, Homo sapiens
aggccatcgagggca

SEQ ID NO: 608870 - DNA, 15 bp, Homo sapiens
ggccatcgagggcag

SEQ ID NO: 608871 - DNA, 15 bp, Homo sapiens
gccatcgagggcagc

SEQ ID NO: 608872 - DNA, 15 bp, Homo sapiens
ccatcgagggcagct

SEQ ID NO: 608873 - DNA, 15 bp, Homo sapiens
catcgagggcagctc

SEQ ID NO: 608874 - DNA, 15 bp, Homo sapiens
atcgagggcagctca

SEQ ID NO: 608875 - DNA, 15 bp, Homo sapiens
tcgagggcagctcag

SEQ ID NO: 608876 - DNA, 15 bp, Homo sapiens
cgagggcagctcagg

SEQ ID NO: 608877 - DNA, 15 bp, Homo sapiens
gagggcagctcaggg

SEQ ID NO: 608878 - DNA, 15 bp, Homo sapiens
agggcagctcaggga

SEQ ID NO: 608879 - DNA, 15 bp, Homo sapiens
gggcagctcagggaa

SEQ ID NO: 608880 - DNA, 15 bp, Homo sapiens
ggcagctcagggaag

SEQ ID NO: 608881 - DNA, 15 bp, Homo sapiens
gcagctcagggaagg

SEQ ID NO: 608882 - DNA, 15 bp, Homo sapiens
cagctcagggaaggc

SEQ ID NO: 608883 - DNA, 15 bp, Homo sapiens
agctcagggaaggct

SEQ ID NO: 608884 - DNA, 15 bp, Homo sapiens
gctcagggaaggctg

SEQ ID NO: 608885 - DNA, 15 bp, Homo sapiens
ctcagggaaggctgt

SEQ ID NO: 608886 - DNA, 15 bp, Homo sapiens
tcagggaaggctgtc

SEQ ID NO: 608887 - DNA, 15 bp, Homo sapiens
cagggaaggctgtct

SEQ ID NO: 608888 - DNA, 15 bp, Homo sapiens
agggaaggctgtctt

SEQ ID NO: 608889 - DNA, 15 bp, Homo sapiens
gggaaggctgtcttc

SEQ ID NO: 608890 - DNA, 15 bp, Homo sapiens
ggaaggctgtcttca

SEQ ID NO: 608891 - DNA, 15 bp, Homo sapiens
gaaggctgtcttcag

SEQ ID NO: 608892 - DNA, 15 bp, Homo sapiens
aaggctgtcttcagg

SEQ ID NO: 608893 - DNA, 15 bp, Homo sapiens
aggctgtcttcaggg

SEQ ID NO: 608894 - DNA, 15 bp, Homo sapiens
ggctgtcttcagggt

SEQ ID NO: 608895 - DNA, 15 bp, Homo sapiens
gctgtcttcagggtg

SEQ ID NO: 608896 - DNA, 15 bp, Homo sapiens
ctgtcttcagggtgg

SEQ ID NO: 608897 - DNA, 15 bp, Homo sapiens
tgtcttcagggtggg

SEQ ID NO: 608898 - DNA, 15 bp, Homo sapiens
gtcttcagggtgggg

SEQ ID NO: 608899 - DNA, 15 bp, Homo sapiens
tcttcagggtggggg

SEQ ID NO: 608900 - DNA, 15 bp, Homo sapiens
cttcagggtggggga

SEQ ID NO: 608901 - DNA, 15 bp, Homo sapiens
ttcagggtgggggac

SEQ ID NO: 608902 - DNA, 15 bp, Homo sapiens
tcagggtgggggacg

SEQ ID NO: 608903 - DNA, 15 bp, Homo sapiens
cagggtgggggacgg

SEQ ID NO: 608904 - DNA, 15 bp, Homo sapiens
agggtgggggacggt

SEQ ID NO: 608905 - DNA, 15 bp, Homo sapiens
gggtgggggacggtg

SEQ ID NO: 608906 - DNA, 15 bp, Homo sapiens
ggtgggggacggtgt

SEQ ID NO: 608907 - DNA, 15 bp, Homo sapiens
gtgggggacggtgtc

SEQ ID NO: 608908 - DNA, 15 bp, Homo sapiens
tgggggacggtgtct

SEQ ID NO: 608909 - DNA, 15 bp, Homo sapiens
gggggacggtgtctg

SEQ ID NO: 608910 - DNA, 15 bp, Homo sapiens
ggggacggtgtctgt

SEQ ID NO: 608911 - DNA, 15 bp, Homo sapiens
gggacggtgtctgtc

SEQ ID NO: 608912 - DNA, 15 bp, Homo sapiens
ggacggtgtctgtcc

SEQ ID NO: 608913 - DNA, 15 bp, Homo sapiens
gacggtgtctgtcca

SEQ ID NO: 608914 - DNA, 15 bp, Homo sapiens
acggtgtctgtccat

SEQ ID NO: 608915 - DNA, 15 bp, Homo sapiens
cggtgtctgtccatt

SEQ ID NO: 608916 - DNA, 15 bp, Homo sapiens
ggtgtctgtccattc

SEQ ID NO: 608917 - DNA, 15 bp, Homo sapiens
gtgtctgtccattct

SEQ ID NO: 608918 - DNA, 15 bp, Homo sapiens
tgtctgtccattcta

SEQ ID NO: 608919 - DNA, 15 bp, Homo sapiens
gtctgtccattctag

SEQ ID NO: 608920 - DNA, 15 bp, Homo sapiens
tctgtccattctagg

SEQ ID NO: 608921 - DNA, 15 bp, Homo sapiens
ctgtccattctagga

SEQ ID NO: 608922 - DNA, 15 bp, Homo sapiens
tgtccattctaggaa

SEQ ID NO: 608923 - DNA, 15 bp, Homo sapiens
gtccattctaggaaa

SEQ ID NO: 608924 - DNA, 15 bp, Homo sapiens
tccattctaggaaat

SEQ ID NO: 608925 - DNA, 15 bp, Homo sapiens
ccattctaggaaata

SEQ ID NO: 608926 - DNA, 15 bp, Homo sapiens
cattctaggaaatag

SEQ ID NO: 608927 - DNA, 15 bp, Homo sapiens
attctaggaaatagc

SEQ ID NO: 608928 - DNA, 15 bp, Homo sapiens
ttctaggaaatagca

SEQ ID NO: 608929 - DNA, 15 bp, Homo sapiens
tctaggaaatagcat

SEQ ID NO: 608930 - DNA, 15 bp, Homo sapiens
ctaggaaatagcatc

SEQ ID NO: 608931 - DNA, 15 bp, Homo sapiens
taggaaatagcatca

SEQ ID NO: 608932 - DNA, 15 bp, Homo sapiens
aggaaatagcatcag

SEQ ID NO: 608933 - DNA, 15 bp, Homo sapiens
ggaaatagcatcagc

SEQ ID NO: 608934 - DNA, 15 bp, Homo sapiens
gaaatagcatcagcg

SEQ ID NO: 608935 - DNA, 15 bp, Homo sapiens
aaatagcatcagcgc

SEQ ID NO: 608936 - DNA, 15 bp, Homo sapiens
aatagcatcagcgct

SEQ ID NO: 608937 - DNA, 15 bp, Homo sapiens
atagcatcagcgctg

SEQ ID NO: 608938 - DNA, 15 bp, Homo sapiens
tagcatcagcgctgt

SEQ ID NO: 608939 - DNA, 15 bp, Homo sapiens
agcatcagcgctgtt

SEQ ID NO: 608940 - DNA, 15 bp, Homo sapiens
gcatcagcgctgtta

SEQ ID NO: 608941 - DNA, 15 bp, Homo sapiens
catcagcgctgttag

SEQ ID NO: 608942 - DNA, 15 bp, Homo sapiens
atcagcgctgttagt

SEQ ID NO: 608943 - DNA, 15 bp, Homo sapiens
tcagcgctgttagtg

SEQ ID NO: 608944 - DNA, 15 bp, Homo sapiens
cagcgctgttagtgc

SEQ ID NO: 608945 - DNA, 15 bp, Homo sapiens
agcgctgttagtgcc

SEQ ID NO: 608946 - DNA, 15 bp, Homo sapiens
gcgctgttagtgcct

SEQ ID NO: 608947 - DNA, 15 bp, Homo sapiens
cgctgttagtgcctg

SEQ ID NO: 608948 - DNA, 15 bp, Homo sapiens
gctgttagtgcctgt

SEQ ID NO: 608949 - DNA, 15 bp, Homo sapiens
ctgttagtgcctgtc

SEQ ID NO: 608950 - DNA, 15 bp, Homo sapiens
tgttagtgcctgtca

SEQ ID NO: 608951 - DNA, 15 bp, Homo sapiens
gttagtgcctgtcac

SEQ ID NO: 608952 - DNA, 15 bp, Homo sapiens
ttagtgcctgtcacc

SEQ ID NO: 608953 - DNA, 15 bp, Homo sapiens
tagtgcctgtcacca

SEQ ID NO: 608954 - DNA, 15 bp, Homo sapiens
agtgcctgtcaccat

SEQ ID NO: 608955 - DNA, 15 bp, Homo sapiens
gtgcctgtcaccatg

SEQ ID NO: 608956 - DNA, 15 bp, Homo sapiens
tgcctgtcaccatgg

SEQ ID NO: 608957 - DNA, 15 bp, Homo sapiens
gcctgtcaccatggc

SEQ ID NO: 608958 - DNA, 15 bp, Homo sapiens
cctgtcaccatggcg

SEQ ID NO: 608959 - DNA, 15 bp, Homo sapiens
ctgtcaccatggcga

SEQ ID NO: 608960 - DNA, 15 bp, Homo sapiens
tgtcaccatggcgac

SEQ ID NO: 608961 - DNA, 15 bp, Homo sapiens
gtcaccatggcgacc

SEQ ID NO: 608962 - DNA, 15 bp, Homo sapiens
tcaccatggcgaccc

SEQ ID NO: 608963 - DNA, 15 bp, Homo sapiens
caccatggcgacccg

SEQ ID NO: 608964 - DNA, 15 bp, Homo sapiens
accatggcgacccga

SEQ ID NO: 608965 - DNA, 15 bp, Homo sapiens
ccatggcgacccgag

SEQ ID NO: 608966 - DNA, 15 bp, Homo sapiens
catggcgacccgagg

SEQ ID NO: 608967 - DNA, 15 bp, Homo sapiens
atggcgacccgaggg

SEQ ID NO: 608968 - DNA, 15 bp, Homo sapiens
tggcgacccgagggc

SEQ ID NO: 608969 - DNA, 15 bp, Homo sapiens
ggcgacccgagggca

SEQ ID NO: 608970 - DNA, 15 bp, Homo sapiens
gcgacccgagggcag

SEQ ID NO: 608971 - DNA, 15 bp, Homo sapiens
cgacccgagggcagg

SEQ ID NO: 608972 - DNA, 15 bp, Homo sapiens
gacccgagggcagga

SEQ ID NO: 608973 - DNA, 15 bp, Homo sapiens
acccgagggcaggaa

SEQ ID NO: 608974 - DNA, 15 bp, Homo sapiens
cccgagggcaggaac

SEQ ID NO: 608975 - DNA, 15 bp, Homo sapiens
ccgagggcaggaaca

SEQ ID NO: 608976 - DNA, 15 bp, Homo sapiens
cgagggcaggaacaa

SEQ ID NO: 608977 - DNA, 15 bp, Homo sapiens
gagggcaggaacaat

SEQ ID NO: 608978 - DNA, 15 bp, Homo sapiens
agggcaggaacaatc

SEQ ID NO: 608979 - DNA, 15 bp, Homo sapiens
gggcaggaacaatca

SEQ ID NO: 608980 - DNA, 15 bp, Homo sapiens
ggcaggaacaatcaa

SEQ ID NO: 608981 - DNA, 15 bp, Homo sapiens
gcaggaacaatcaag

SEQ ID NO: 608982 - DNA, 15 bp, Homo sapiens
caggaacaatcaagg

SEQ ID NO: 608983 - DNA, 15 bp, Homo sapiens
aggaacaatcaaggg

SEQ ID NO: 608984 - DNA, 15 bp, Homo sapiens
ggaacaatcaaggga

SEQ ID NO: 608985 - DNA, 15 bp, Homo sapiens
gaacaatcaagggac

SEQ ID NO: 608986 - DNA, 15 bp, Homo sapiens
aacaatcaagggacg

SEQ ID NO: 608987 - DNA, 15 bp, Homo sapiens
acaatcaagggacgt

SEQ ID NO: 608988 - DNA, 15 bp, Homo sapiens
caatcaagggacgtg

SEQ ID NO: 608989 - DNA, 15 bp, Homo sapiens
aatcaagggacgtgt

SEQ ID NO: 608990 - DNA, 15 bp, Homo sapiens
atcaagggacgtgtg

SEQ ID NO: 608991 - DNA, 15 bp, Homo sapiens
tcaagggacgtgtgt

SEQ ID NO: 608992 - DNA, 15 bp, Homo sapiens
caagggacgtgtgtg

SEQ ID NO: 608993 - DNA, 15 bp, Homo sapiens
aagggacgtgtgtga

SEQ ID NO: 608994 - DNA, 15 bp, Homo sapiens
agggacgtgtgtgat

SEQ ID NO: 608995 - DNA, 15 bp, Homo sapiens
gggacgtgtgtgatg

SEQ ID NO: 608996 - DNA, 15 bp, Homo sapiens
ggacgtgtgtgatgt

SEQ ID NO: 608997 - DNA, 15 bp, Homo sapiens
gacgtgtgtgatgtg

SEQ ID NO: 608998 - DNA, 15 bp, Homo sapiens
acgtgtgtgatgtgt

SEQ ID NO: 608999 - DNA, 15 bp, Homo sapiens
cgtgtgtgatgtgtg

SEQ ID NO: 609000 - DNA, 15 bp, Homo sapiens
gtgtgtgatgtgtgc

SEQ ID NO: 609001 - DNA, 15 bp, Homo sapiens
tgtgtgatgtgtgca

SEQ ID NO: 609002 - DNA, 15 bp, Homo sapiens
gtgtgatgtgtgcag

SEQ ID NO: 609003 - DNA, 15 bp, Homo sapiens
tgtgatgtgtgcaga

SEQ ID NO: 609004 - DNA, 15 bp, Homo sapiens
gtgatgtgtgcagag

SEQ ID NO: 609005 - DNA, 15 bp, Homo sapiens
tgatgtgtgcagagg

SEQ ID NO: 609006 - DNA, 15 bp, Homo sapiens
gatgtgtgcagagga

SEQ ID NO: 609007 - DNA, 15 bp, Homo sapiens
atgtgtgcagaggag

SEQ ID NO: 609008 - DNA, 15 bp, Homo sapiens
tgtgtgcagaggagc

SEQ ID NO: 609009 - DNA, 15 bp, Homo sapiens
gtgtgcagaggagcg

SEQ ID NO: 609010 - DNA, 15 bp, Homo sapiens
tgtgcagaggagcgg

SEQ ID NO: 609011 - DNA, 15 bp, Homo sapiens
gtgcagaggagcggg

SEQ ID NO: 609012 - DNA, 15 bp, Homo sapiens
tgcagaggagcgggg

SEQ ID NO: 609013 - DNA, 15 bp, Homo sapiens
gcagaggagcggggg

SEQ ID NO: 609014 - DNA, 15 bp, Homo sapiens
cagaggagcgggggt

SEQ ID NO: 609015 - DNA, 15 bp, Homo sapiens
agaggagcgggggtg

SEQ ID NO: 609016 - DNA, 15 bp, Homo sapiens
gaggagcgggggtgg

SEQ ID NO: 609017 - DNA, 15 bp, Homo sapiens
aggagcgggggtggc

SEQ ID NO: 609018 - DNA, 15 bp, Homo sapiens
ggagcgggggtggct

SEQ ID NO: 609019 - DNA, 15 bp, Homo sapiens
gagcgggggtggctg

SEQ ID NO: 609020 - DNA, 15 bp, Homo sapiens
agcgggggtggctgg

SEQ ID NO: 609021 - DNA, 15 bp, Homo sapiens
gcgggggtggctgga

SEQ ID NO: 609022 - DNA, 15 bp, Homo sapiens
cgggggtggctggag

SEQ ID NO: 609023 - DNA, 15 bp, Homo sapiens
gggggtggctggagt

SEQ ID NO: 609024 - DNA, 15 bp, Homo sapiens
ggggtggctggagtt

SEQ ID NO: 609025 - DNA, 15 bp, Homo sapiens
gggtggctggagttt

SEQ ID NO: 609026 - DNA, 15 bp, Homo sapiens
ggtggctggagtttg

SEQ ID NO: 609027 - DNA, 15 bp, Homo sapiens
gtggctggagtttgg

SEQ ID NO: 609028 - DNA, 15 bp, Homo sapiens
tggctggagtttggt

SEQ ID NO: 609029 - DNA, 15 bp, Homo sapiens
ggctggagtttggtg

SEQ ID NO: 609030 - DNA, 15 bp, Homo sapiens
gctggagtttggtgg

SEQ ID NO: 609031 - DNA, 15 bp, Homo sapiens
ctggagtttggtggg

SEQ ID NO: 609032 - DNA, 15 bp, Homo sapiens
tggagtttggtgggg

SEQ ID NO: 609033 - DNA, 15 bp, Homo sapiens
ggagtttggtgggga

SEQ ID NO: 609034 - DNA, 15 bp, Homo sapiens
gagtttggtggggac

SEQ ID NO: 609035 - DNA, 15 bp, Homo sapiens
agtttggtggggaca

SEQ ID NO: 609036 - DNA, 15 bp, Homo sapiens
gtttggtggggacac

SEQ ID NO: 609037 - DNA, 15 bp, Homo sapiens
tttggtggggacaca

SEQ ID NO: 609038 - DNA, 15 bp, Homo sapiens
ttggtggggacacac

SEQ ID NO: 609039 - DNA, 15 bp, Homo sapiens
tggtggggacacact

SEQ ID NO: 609040 - DNA, 15 bp, Homo sapiens
ggtggggacacactg

SEQ ID NO: 609041 - DNA, 15 bp, Homo sapiens
gtggggacacactgc

SEQ ID NO: 609042 - DNA, 15 bp, Homo sapiens
tggggacacactgcc

SEQ ID NO: 609043 - DNA, 15 bp, Homo sapiens
ggggacacactgccc

SEQ ID NO: 609044 - DNA, 15 bp, Homo sapiens
gggacacactgccct

SEQ ID NO: 609045 - DNA, 15 bp, Homo sapiens
ggacacactgcccta

SEQ ID NO: 609046 - DNA, 15 bp, Homo sapiens
gacacactgccctag

SEQ ID NO: 609047 - DNA, 15 bp, Homo sapiens
acacactgccctaga

SEQ ID NO: 609048 - DNA, 15 bp, Homo sapiens
cacactgccctagag

SEQ ID NO: 609049 - DNA, 15 bp, Homo sapiens
acactgccctagagg

SEQ ID NO: 609050 - DNA, 15 bp, Homo sapiens
cactgccctagaggt

SEQ ID NO: 609051 - DNA, 15 bp, Homo sapiens
actgccctagaggtc

SEQ ID NO: 609052 - DNA, 15 bp, Homo sapiens
ctgccctagaggtct

SEQ ID NO: 609053 - DNA, 15 bp, Homo sapiens
tgccctagaggtctc

SEQ ID NO: 609054 - DNA, 15 bp, Homo sapiens
gccctagaggtctct

SEQ ID NO: 609055 - DNA, 15 bp, Homo sapiens
ccctagaggtctctg

SEQ ID NO: 609056 - DNA, 15 bp, Homo sapiens
cctagaggtctctga

SEQ ID NO: 609057 - DNA, 15 bp, Homo sapiens
ctagaggtctctgag

SEQ ID NO: 609058 - DNA, 15 bp, Homo sapiens
tagaggtctctgagt

SEQ ID NO: 609059 - DNA, 15 bp, Homo sapiens
agaggtctctgagtg

SEQ ID NO: 609060 - DNA, 15 bp, Homo sapiens
gaggtctctgagtgg

SEQ ID NO: 609061 - DNA, 15 bp, Homo sapiens
aggtctctgagtggg

SEQ ID NO: 609062 - DNA, 15 bp, Homo sapiens
ggtctctgagtggga

SEQ ID NO: 609063 - DNA, 15 bp, Homo sapiens
gtctctgagtgggag

SEQ ID NO: 609064 - DNA, 15 bp, Homo sapiens
tctctgagtgggaga

SEQ ID NO: 609065 - DNA, 15 bp, Homo sapiens
ctctgagtgggagat

SEQ ID NO: 609066 - DNA, 15 bp, Homo sapiens
tctgagtgggagatg

SEQ ID NO: 609067 - DNA, 15 bp, Homo sapiens
ctgagtgggagatgg

SEQ ID NO: 609068 - DNA, 15 bp, Homo sapiens
tgagtgggagatggg

SEQ ID NO: 609069 - DNA, 15 bp, Homo sapiens
gagtgggagatgggg

SEQ ID NO: 609070 - DNA, 15 bp, Homo sapiens
agtgggagatggggg

SEQ ID NO: 609071 - DNA, 15 bp, Homo sapiens
gtgggagatggggga

SEQ ID NO: 609072 - DNA, 15 bp, Homo sapiens
tgggagatgggggag

SEQ ID NO: 609073 - DNA, 15 bp, Homo sapiens
gggagatgggggagg

SEQ ID NO: 609074 - DNA, 15 bp, Homo sapiens
ggagatgggggaggg

SEQ ID NO: 609075 - DNA, 15 bp, Homo sapiens
gagatgggggaggga

SEQ ID NO: 609076 - DNA, 15 bp, Homo sapiens
agatgggggagggag

SEQ ID NO: 609077 - DNA, 15 bp, Homo sapiens
gatgggggagggagt

SEQ ID NO: 609078 - DNA, 15 bp, Homo sapiens
atgggggagggagtg

SEQ ID NO: 609079 - DNA, 15 bp, Homo sapiens
tgggggagggagtgc

SEQ ID NO: 609080 - DNA, 15 bp, Homo sapiens
gggggagggagtgcc

SEQ ID NO: 609081 - DNA, 15 bp, Homo sapiens
ggggagggagtgcca

SEQ ID NO: 609082 - DNA, 15 bp, Homo sapiens
gggagggagtgccaa

SEQ ID NO: 609083 - DNA, 15 bp, Homo sapiens
ggagggagtgccaag

SEQ ID NO: 609084 - DNA, 15 bp, Homo sapiens
gagggagtgccaagt

SEQ ID NO: 609085 - DNA, 15 bp, Homo sapiens
agggagtgccaagtc

SEQ ID NO: 609086 - DNA, 15 bp, Homo sapiens
gggagtgccaagtcc

SEQ ID NO: 609087 - DNA, 15 bp, Homo sapiens
ggagtgccaagtcct

SEQ ID NO: 609088 - DNA, 15 bp, Homo sapiens
gagtgccaagtcctt

SEQ ID NO: 609089 - DNA, 15 bp, Homo sapiens
agtgccaagtccttt

SEQ ID NO: 609090 - DNA, 15 bp, Homo sapiens
gtgccaagtcctttt

SEQ ID NO: 609091 - DNA, 15 bp, Homo sapiens
tgccaagtccttttc

SEQ ID NO: 609092 - DNA, 15 bp, Homo sapiens
gccaagtccttttcc

SEQ ID NO: 609093 - DNA, 15 bp, Homo sapiens
ccaagtccttttcct

SEQ ID NO: 609094 - DNA, 15 bp, Homo sapiens
caagtccttttccta

SEQ ID NO: 609095 - DNA, 15 bp, Homo sapiens
aagtccttttcctac

SEQ ID NO: 609096 - DNA, 15 bp, Homo sapiens
agtccttttcctacc

SEQ ID NO: 609097 - DNA, 15 bp, Homo sapiens
gtccttttcctacca

SEQ ID NO: 609098 - DNA, 15 bp, Homo sapiens
tccttttcctaccac

SEQ ID NO: 609099 - DNA, 15 bp, Homo sapiens
ccttttcctaccacc

SEQ ID NO: 609100 - DNA, 15 bp, Homo sapiens
cttttcctaccacct

SEQ ID NO: 609101 - DNA, 15 bp, Homo sapiens
ttttcctaccacctc

SEQ ID NO: 609102 - DNA, 15 bp, Homo sapiens
tttcctaccacctca

SEQ ID NO: 609103 - DNA, 15 bp, Homo sapiens
ttcctaccacctcac

SEQ ID NO: 609104 - DNA, 15 bp, Homo sapiens
tcctaccacctcaca

SEQ ID NO: 609105 - DNA, 15 bp, Homo sapiens
cctaccacctcacac

SEQ ID NO: 609106 - DNA, 15 bp, Homo sapiens
ctaccacctcacacc

SEQ ID NO: 609107 - DNA, 15 bp, Homo sapiens
taccacctcacaccc

SEQ ID NO: 609108 - DNA, 15 bp, Homo sapiens
accacctcacaccct

SEQ ID NO: 609109 - DNA, 15 bp, Homo sapiens
ccacctcacacccta

SEQ ID NO: 609110 - DNA, 15 bp, Homo sapiens
cacctcacaccctag

SEQ ID NO: 609111 - DNA, 15 bp, Homo sapiens
acctcacaccctagc

SEQ ID NO: 609112 - DNA, 15 bp, Homo sapiens
cctcacaccctagct

SEQ ID NO: 609113 - DNA, 15 bp, Homo sapiens
ctcacaccctagctc

SEQ ID NO: 609114 - DNA, 15 bp, Homo sapiens
tcacaccctagctca

SEQ ID NO: 609115 - DNA, 15 bp, Homo sapiens
cacaccctagctcag

SEQ ID NO: 609116 - DNA, 15 bp, Homo sapiens
acaccctagctcagg

SEQ ID NO: 609117 - DNA, 15 bp, Homo sapiens
caccctagctcaggg

SEQ ID NO: 609118 - DNA, 15 bp, Homo sapiens
accctagctcagggc

SEQ ID NO: 609119 - DNA, 15 bp, Homo sapiens
ccctagctcagggct

SEQ ID NO: 609120 - DNA, 15 bp, Homo sapiens
cctagctcagggctc

SEQ ID NO: 609121 - DNA, 15 bp, Homo sapiens
ctagctcagggctcg

SEQ ID NO: 609122 - DNA, 15 bp, Homo sapiens
tagctcagggctcgg

SEQ ID NO: 609123 - DNA, 15 bp, Homo sapiens
agctcagggctcggg

SEQ ID NO: 609124 - DNA, 15 bp, Homo sapiens
gctcagggctcgggg

SEQ ID NO: 609125 - DNA, 15 bp, Homo sapiens
ctcagggctcggggt

SEQ ID NO: 609126 - DNA, 15 bp, Homo sapiens
tcagggctcggggtc

SEQ ID NO: 609127 - DNA, 15 bp, Homo sapiens
cagggctcggggtct

SEQ ID NO: 609128 - DNA, 15 bp, Homo sapiens
agggctcggggtctg

SEQ ID NO: 609129 - DNA, 15 bp, Homo sapiens
gggctcggggtctgt

SEQ ID NO: 609130 - DNA, 15 bp, Homo sapiens
ggctcggggtctgtg

SEQ ID NO: 609131 - DNA, 15 bp, Homo sapiens
gctcggggtctgtgg

SEQ ID NO: 609132 - DNA, 15 bp, Homo sapiens
ctcggggtctgtggg

SEQ ID NO: 609133 - DNA, 15 bp, Homo sapiens
tcggggtctgtggga

SEQ ID NO: 609134 - DNA, 15 bp, Homo sapiens
cggggtctgtgggag

SEQ ID NO: 609135 - DNA, 15 bp, Homo sapiens
ggggtctgtgggagc

SEQ ID NO: 609136 - DNA, 15 bp, Homo sapiens
gggtctgtgggagca

SEQ ID NO: 609137 - DNA, 15 bp, Homo sapiens
ggtctgtgggagcac

SEQ ID NO: 609138 - DNA, 15 bp, Homo sapiens
gtctgtgggagcaca

SEQ ID NO: 609139 - DNA, 15 bp, Homo sapiens
tctgtgggagcacaa

SEQ ID NO: 609140 - DNA, 15 bp, Homo sapiens
ctgtgggagcacaag

SEQ ID NO: 609141 - DNA, 15 bp, Homo sapiens
tgtgggagcacaagg

SEQ ID NO: 609142 - DNA, 15 bp, Homo sapiens
gtgggagcacaaggg

SEQ ID NO: 609143 - DNA, 15 bp, Homo sapiens
tgggagcacaagggc

SEQ ID NO: 609144 - DNA, 15 bp, Homo sapiens
gggagcacaagggca

SEQ ID NO: 609145 - DNA, 15 bp, Homo sapiens
ggagcacaagggcaa

SEQ ID NO: 609146 - DNA, 15 bp, Homo sapiens
gagcacaagggcaag

SEQ ID NO: 609147 - DNA, 15 bp, Homo sapiens
agcacaagggcaaga

SEQ ID NO: 609148 - DNA, 15 bp, Homo sapiens
gcacaagggcaagac

SEQ ID NO: 609149 - DNA, 15 bp, Homo sapiens
cacaagggcaagacc

SEQ ID NO: 609150 - DNA, 15 bp, Homo sapiens
acaagggcaagaccc

SEQ ID NO: 609151 - DNA, 15 bp, Homo sapiens
caagggcaagacccg

SEQ ID NO: 609152 - DNA, 15 bp, Homo sapiens
aagggcaagacccgg

SEQ ID NO: 609153 - DNA, 15 bp, Homo sapiens
agggcaagacccgga

SEQ ID NO: 609154 - DNA, 15 bp, Homo sapiens
gggcaagacccggag

SEQ ID NO: 609155 - DNA, 15 bp, Homo sapiens
ggcaagacccggagg

SEQ ID NO: 609156 - DNA, 15 bp, Homo sapiens
gcaagacccggagga

SEQ ID NO: 609157 - DNA, 15 bp, Homo sapiens
caagacccggaggac

SEQ ID NO: 609158 - DNA, 15 bp, Homo sapiens
aagacccggaggaca

SEQ ID NO: 609159 - DNA, 15 bp, Homo sapiens
agacccggaggacac

SEQ ID NO: 609160 - DNA, 15 bp, Homo sapiens
gacccggaggacacc

SEQ ID NO: 609161 - DNA, 15 bp, Homo sapiens
acccggaggacaccc

SEQ ID NO: 609162 - DNA, 15 bp, Homo sapiens
cccggaggacaccct

SEQ ID NO: 609163 - DNA, 15 bp, Homo sapiens
ccggaggacaccctg

SEQ ID NO: 609164 - DNA, 15 bp, Homo sapiens
cggaggacaccctgc

SEQ ID NO: 609165 - DNA, 15 bp, Homo sapiens
ggaggacaccctgct

SEQ ID NO: 609166 - DNA, 15 bp, Homo sapiens
gaggacaccctgctc

SEQ ID NO: 609167 - DNA, 15 bp, Homo sapiens
aggacaccctgctct

SEQ ID NO: 609168 - DNA, 15 bp, Homo sapiens
ggacaccctgctcta

SEQ ID NO: 609169 - DNA, 15 bp, Homo sapiens
gacaccctgctctaa

SEQ ID NO: 609170 - DNA, 15 bp, Homo sapiens
acaccctgctctaat

SEQ ID NO: 609171 - DNA, 15 bp, Homo sapiens
caccctgctctaatc

SEQ ID NO: 609172 - DNA, 15 bp, Homo sapiens
accctgctctaatca

SEQ ID NO: 609173 - DNA, 15 bp, Homo sapiens
ccctgctctaatcag

SEQ ID NO: 609174 - DNA, 15 bp, Homo sapiens
cctgctctaatcaga

SEQ ID NO: 609175 - DNA, 15 bp, Homo sapiens
ctgctctaatcagaa

SEQ ID NO: 609176 - DNA, 15 bp, Homo sapiens
tgctctaatcagaac

SEQ ID NO: 609177 - DNA, 15 bp, Homo sapiens
gctctaatcagaaca

SEQ ID NO: 609178 - DNA, 15 bp, Homo sapiens
ctctaatcagaacac

SEQ ID NO: 609179 - DNA, 15 bp, Homo sapiens
tctaatcagaacacc

SEQ ID NO: 609180 - DNA, 15 bp, Homo sapiens
ctaatcagaacacct

SEQ ID NO: 609181 - DNA, 15 bp, Homo sapiens
taatcagaacacctt

SEQ ID NO: 609182 - DNA, 15 bp, Homo sapiens
aatcagaacaccttt

SEQ ID NO: 609183 - DNA, 15 bp, Homo sapiens
atcagaacacctttt

SEQ ID NO: 609184 - DNA, 15 bp, Homo sapiens
tcagaacaccttttt

SEQ ID NO: 609185 - DNA, 15 bp, Homo sapiens
cagaacacctttttc

SEQ ID NO: 609186 - DNA, 15 bp, Homo sapiens
agaacacctttttct

SEQ ID NO: 609187 - DNA, 15 bp, Homo sapiens
gaacacctttttctt

SEQ ID NO: 609188 - DNA, 15 bp, Homo sapiens
aacacctttttcttg

SEQ ID NO: 609189 - DNA, 15 bp, Homo sapiens
acacctttttcttga

SEQ ID NO: 609190 - DNA, 15 bp, Homo sapiens
cacctttttcttgag

SEQ ID NO: 609191 - DNA, 15 bp, Homo sapiens
acctttttcttgagg

SEQ ID NO: 609192 - DNA, 15 bp, Homo sapiens
cctttttcttgagga

SEQ ID NO: 609193 - DNA, 15 bp, Homo sapiens
ctttttcttgaggat

SEQ ID NO: 609194 - DNA, 15 bp, Homo sapiens
tttttcttgaggatt

SEQ ID NO: 609195 - DNA, 15 bp, Homo sapiens
ttttcttgaggattg

SEQ ID NO: 609196 - DNA, 15 bp, Homo sapiens
tttcttgaggattgg

SEQ ID NO: 609197 - DNA, 15 bp, Homo sapiens
ttcttgaggattggg

SEQ ID NO: 609198 - DNA, 15 bp, Homo sapiens
tcttgaggattgggg

SEQ ID NO: 609199 - DNA, 15 bp, Homo sapiens
cttgaggattggggt

SEQ ID NO: 609200 - DNA, 15 bp, Homo sapiens
ttgaggattggggtg

SEQ ID NO: 609201 - DNA, 15 bp, Homo sapiens
tgaggattggggtgg

SEQ ID NO: 609202 - DNA, 15 bp, Homo sapiens
gaggattggggtggg

SEQ ID NO: 609203 - DNA, 15 bp, Homo sapiens
aggattggggtgggg

SEQ ID NO: 609204 - DNA, 15 bp, Homo sapiens
ggattggggtggggg

SEQ ID NO: 609205 - DNA, 15 bp, Homo sapiens
gattggggtggggga

SEQ ID NO: 609206 - DNA, 15 bp, Homo sapiens
attggggtgggggag

SEQ ID NO: 609207 - DNA, 15 bp, Homo sapiens
ttggggtgggggaga

SEQ ID NO: 609208 - DNA, 15 bp, Homo sapiens
tggggtgggggagac

SEQ ID NO: 609209 - DNA, 15 bp, Homo sapiens
ggggtgggggagacg

SEQ ID NO: 609210 - DNA, 15 bp, Homo sapiens
gggtgggggagacgg

SEQ ID NO: 609211 - DNA, 15 bp, Homo sapiens
ggtgggggagacgga

SEQ ID NO: 609212 - DNA, 15 bp, Homo sapiens
gtgggggagacggag

SEQ ID NO: 609213 - DNA, 15 bp, Homo sapiens
tgggggagacggaga

SEQ ID NO: 609214 - DNA, 15 bp, Homo sapiens
gggggagacggagag

SEQ ID NO: 609215 - DNA, 15 bp, Homo sapiens
ggggagacggagaga

SEQ ID NO: 609216 - DNA, 15 bp, Homo sapiens
gggagacggagagag

SEQ ID NO: 609217 - DNA, 15 bp, Homo sapiens
ggagacggagagaga

SEQ ID NO: 609218 - DNA, 15 bp, Homo sapiens
gagacggagagagat

SEQ ID NO: 609219 - DNA, 15 bp, Homo sapiens
agacggagagagatt

SEQ ID NO: 609220 - DNA, 15 bp, Homo sapiens
gacggagagagattc

SEQ ID NO: 609221 - DNA, 15 bp, Homo sapiens
acggagagagattca

SEQ ID NO: 609222 - DNA, 15 bp, Homo sapiens
cggagagagattcac

SEQ ID NO: 609223 - DNA, 15 bp, Homo sapiens
ggagagagattcaca

SEQ ID NO: 609224 - DNA, 15 bp, Homo sapiens
gagagagattcacag

SEQ ID NO: 609225 - DNA, 15 bp, Homo sapiens
agagagattcacagg

SEQ ID NO: 609226 - DNA, 15 bp, Homo sapiens
gagagattcacaggt

SEQ ID NO: 609227 - DNA, 15 bp, Homo sapiens
agagattcacaggtt

SEQ ID NO: 609228 - DNA, 15 bp, Homo sapiens
gagattcacaggttg

SEQ ID NO: 609229 - DNA, 15 bp, Homo sapiens
agattcacaggttgc

SEQ ID NO: 609230 - DNA, 15 bp, Homo sapiens
gattcacaggttgct

SEQ ID NO: 609231 - DNA, 15 bp, Homo sapiens
attcacaggttgcta

SEQ ID NO: 609232 - DNA, 15 bp, Homo sapiens
ttcacaggttgctag

SEQ ID NO: 609233 - DNA, 15 bp, Homo sapiens
tcacaggttgctagg

SEQ ID NO: 609234 - DNA, 15 bp, Homo sapiens
cacaggttgctagga

SEQ ID NO: 609235 - DNA, 15 bp, Homo sapiens
acaggttgctaggag

SEQ ID NO: 609236 - DNA, 15 bp, Homo sapiens
caggttgctaggagc

SEQ ID NO: 609237 - DNA, 15 bp, Homo sapiens
aggttgctaggagct

SEQ ID NO: 609238 - DNA, 15 bp, Homo sapiens
ggttgctaggagctc

SEQ ID NO: 609239 - DNA, 15 bp, Homo sapiens
gttgctaggagctca

SEQ ID NO: 609240 - DNA, 15 bp, Homo sapiens
ttgctaggagctcag

SEQ ID NO: 609241 - DNA, 15 bp, Homo sapiens
tgctaggagctcaga

SEQ ID NO: 609242 - DNA, 15 bp, Homo sapiens
gctaggagctcagac

SEQ ID NO: 609243 - DNA, 15 bp, Homo sapiens
ctaggagctcagacg

SEQ ID NO: 609244 - DNA, 15 bp, Homo sapiens
taggagctcagacgt

SEQ ID NO: 609245 - DNA, 15 bp, Homo sapiens
aggagctcagacgtg

SEQ ID NO: 609246 - DNA, 15 bp, Homo sapiens
ggagctcagacgtga

SEQ ID NO: 609247 - DNA, 15 bp, Homo sapiens
gagctcagacgtgat

SEQ ID NO: 609248 - DNA, 15 bp, Homo sapiens
agctcagacgtgatg

SEQ ID NO: 609249 - DNA, 15 bp, Homo sapiens
gctcagacgtgatgc

SEQ ID NO: 609250 - DNA, 15 bp, Homo sapiens
ctcagacgtgatgcc

SEQ ID NO: 609251 - DNA, 15 bp, Homo sapiens
tcagacgtgatgcca

SEQ ID NO: 609252 - DNA, 15 bp, Homo sapiens
cagacgtgatgccag

SEQ ID NO: 609253 - DNA, 15 bp, Homo sapiens
agacgtgatgccagg

SEQ ID NO: 609254 - DNA, 15 bp, Homo sapiens
gacgtgatgccagga

SEQ ID NO: 609255 - DNA, 15 bp, Homo sapiens
acgtgatgccaggag

SEQ ID NO: 609256 - DNA, 15 bp, Homo sapiens
cgtgatgccaggagg

SEQ ID NO: 609257 - DNA, 15 bp, Homo sapiens
gtgatgccaggaggc

SEQ ID NO: 609258 - DNA, 15 bp, Homo sapiens
tgatgccaggaggcc

SEQ ID NO: 609259 - DNA, 15 bp, Homo sapiens
gatgccaggaggcct

SEQ ID NO: 609260 - DNA, 15 bp, Homo sapiens
atgccaggaggcctt

SEQ ID NO: 609261 - DNA, 15 bp, Homo sapiens
tgccaggaggccttg

SEQ ID NO: 609262 - DNA, 15 bp, Homo sapiens
gccaggaggccttgc

SEQ ID NO: 609263 - DNA, 15 bp, Homo sapiens
ccaggaggccttgcc

SEQ ID NO: 609264 - DNA, 15 bp, Homo sapiens
caggaggccttgccc

SEQ ID NO: 609265 - DNA, 15 bp, Homo sapiens
aggaggccttgccca

SEQ ID NO: 609266 - DNA, 15 bp, Homo sapiens
ggaggccttgcccaa

SEQ ID NO: 609267 - DNA, 15 bp, Homo sapiens
gaggccttgcccaag

SEQ ID NO: 609268 - DNA, 15 bp, Homo sapiens
aggccttgcccaagc

SEQ ID NO: 609269 - DNA, 15 bp, Homo sapiens
ggccttgcccaagct

SEQ ID NO: 609270 - DNA, 15 bp, Homo sapiens
gccttgcccaagctg

SEQ ID NO: 609271 - DNA, 15 bp, Homo sapiens
ccttgcccaagctgg

SEQ ID NO: 609272 - DNA, 15 bp, Homo sapiens
cttgcccaagctggg

SEQ ID NO: 609273 - DNA, 15 bp, Homo sapiens
ttgcccaagctggga

SEQ ID NO: 609274 - DNA, 15 bp, Homo sapiens
tgcccaagctgggat

SEQ ID NO: 609275 - DNA, 15 bp, Homo sapiens
gcccaagctgggata

SEQ ID NO: 609276 - DNA, 15 bp, Homo sapiens
cccaagctgggatac

SEQ ID NO: 609277 - DNA, 15 bp, Homo sapiens
ccaagctgggatact

SEQ ID NO: 609278 - DNA, 15 bp, Homo sapiens
caagctgggatactt

SEQ ID NO: 609279 - DNA, 15 bp, Homo sapiens
aagctgggatacttg

SEQ ID NO: 609280 - DNA, 15 bp, Homo sapiens
agctgggatacttgg

SEQ ID NO: 609281 - DNA, 15 bp, Homo sapiens
gctgggatacttggg

SEQ ID NO: 609282 - DNA, 15 bp, Homo sapiens
ctgggatacttggga

SEQ ID NO: 609283 - DNA, 15 bp, Homo sapiens
tgggatacttgggaa

SEQ ID NO: 609284 - DNA, 15 bp, Homo sapiens
gggatacttgggaaa

SEQ ID NO: 609285 - DNA, 15 bp, Homo sapiens
ggatacttgggaaac

SEQ ID NO: 609286 - DNA, 15 bp, Homo sapiens
gatacttgggaaaca

SEQ ID NO: 609287 - DNA, 15 bp, Homo sapiens
atacttgggaaacaa

SEQ ID NO: 609288 - DNA, 15 bp, Homo sapiens
tacttgggaaacaac

SEQ ID NO: 609289 - DNA, 15 bp, Homo sapiens
acttgggaaacaact

SEQ ID NO: 609290 - DNA, 15 bp, Homo sapiens
cttgggaaacaactt

SEQ ID NO: 609291 - DNA, 15 bp, Homo sapiens
ttgggaaacaacttt

SEQ ID NO: 609292 - DNA, 15 bp, Homo sapiens
tgggaaacaactttc

SEQ ID NO: 609293 - DNA, 15 bp, Homo sapiens
gggaaacaactttca

SEQ ID NO: 609294 - DNA, 15 bp, Homo sapiens
ggaaacaactttcag

SEQ ID NO: 609295 - DNA, 15 bp, Homo sapiens
gaaacaactttcagc

SEQ ID NO: 609296 - DNA, 15 bp, Homo sapiens
aaacaactttcagct

SEQ ID NO: 609297 - DNA, 15 bp, Homo sapiens
aacaactttcagctt

SEQ ID NO: 609298 - DNA, 15 bp, Homo sapiens
acaactttcagcttc

SEQ ID NO: 609299 - DNA, 15 bp, Homo sapiens
caactttcagcttca

SEQ ID NO: 609300 - DNA, 15 bp, Homo sapiens
aactttcagcttcat

SEQ ID NO: 609301 - DNA, 15 bp, Homo sapiens
actttcagcttcatg

SEQ ID NO: 609302 - DNA, 15 bp, Homo sapiens
ctttcagcttcatgt

SEQ ID NO: 609303 - DNA, 15 bp, Homo sapiens
tttcagcttcatgtg

SEQ ID NO: 609304 - DNA, 15 bp, Homo sapiens
ttcagcttcatgtgc

SEQ ID NO: 609305 - DNA, 15 bp, Homo sapiens
tcagcttcatgtgca

SEQ ID NO: 609306 - DNA, 15 bp, Homo sapiens
cagcttcatgtgcaa

SEQ ID NO: 609307 - DNA, 15 bp, Homo sapiens
agcttcatgtgcaag

SEQ ID NO: 609308 - DNA, 15 bp, Homo sapiens
gcttcatgtgcaagt

SEQ ID NO: 609309 - DNA, 15 bp, Homo sapiens
cttcatgtgcaagtg

SEQ ID NO: 609310 - DNA, 15 bp, Homo sapiens
ttcatgtgcaagtgg

SEQ ID NO: 609311 - DNA, 15 bp, Homo sapiens
tcatgtgcaagtgga

SEQ ID NO: 609312 - DNA, 15 bp, Homo sapiens
catgtgcaagtggaa

SEQ ID NO: 609313 - DNA, 15 bp, Homo sapiens
atgtgcaagtggaag

SEQ ID NO: 609314 - DNA, 15 bp, Homo sapiens
tgtgcaagtggaaga

SEQ ID NO: 609315 - DNA, 15 bp, Homo sapiens
gtgcaagtggaagaa

SEQ ID NO: 609316 - DNA, 15 bp, Homo sapiens
tgcaagtggaagaat

SEQ ID NO: 609317 - DNA, 15 bp, Homo sapiens
gcaagtggaagaatt

SEQ ID NO: 609318 - DNA, 15 bp, Homo sapiens
caagtggaagaatta

SEQ ID NO: 609319 - DNA, 15 bp, Homo sapiens
aagtggaagaattaa

SEQ ID NO: 609320 - DNA, 15 bp, Homo sapiens
agtggaagaattaaa

SEQ ID NO: 609321 - DNA, 15 bp, Homo sapiens
gtggaagaattaaaa

SEQ ID NO: 609322 - DNA, 15 bp, Homo sapiens
tggaagaattaaaat

SEQ ID NO: 609323 - DNA, 15 bp, Homo sapiens
ggaagaattaaaatt

SEQ ID NO: 609324 - DNA, 15 bp, Homo sapiens
gaagaattaaaatta

SEQ ID NO: 609325 - DNA, 15 bp, Homo sapiens
aagaattaaaattag

SEQ ID NO: 609326 - DNA, 15 bp, Homo sapiens
agaattaaaattagg

SEQ ID NO: 609327 - DNA, 15 bp, Homo sapiens
gaattaaaattagga

SEQ ID NO: 609328 - DNA, 15 bp, Homo sapiens
aattaaaattaggac

SEQ ID NO: 609329 - DNA, 15 bp, Homo sapiens
attaaaattaggact

SEQ ID NO: 609330 - DNA, 15 bp, Homo sapiens
ttaaaattaggactc

SEQ ID NO: 609331 - DNA, 15 bp, Homo sapiens
taaaattaggactct

SEQ ID NO: 609332 - DNA, 15 bp, Homo sapiens
aaaattaggactctg

SEQ ID NO: 609333 - DNA, 15 bp, Homo sapiens
aaattaggactctga

SEQ ID NO: 609334 - DNA, 15 bp, Homo sapiens
aattaggactctgac

SEQ ID NO: 609335 - DNA, 15 bp, Homo sapiens
attaggactctgaca

SEQ ID NO: 609336 - DNA, 15 bp, Homo sapiens
ttaggactctgacac

SEQ ID NO: 609337 - DNA, 15 bp, Homo sapiens
taggactctgacaca

SEQ ID NO: 609338 - DNA, 15 bp, Homo sapiens
aggactctgacacag

SEQ ID NO: 609339 - DNA, 15 bp, Homo sapiens
ggactctgacacagt

SEQ ID NO: 609340 - DNA, 15 bp, Homo sapiens
gactctgacacagtt

SEQ ID NO: 609341 - DNA, 15 bp, Homo sapiens
actctgacacagttg

SEQ ID NO: 609342 - DNA, 15 bp, Homo sapiens
ctctgacacagttgg

SEQ ID NO: 609343 - DNA, 15 bp, Homo sapiens
tctgacacagttgga

SEQ ID NO: 609344 - DNA, 15 bp, Homo sapiens
ctgacacagttggag

SEQ ID NO: 609345 - DNA, 15 bp, Homo sapiens
tgacacagttggaga

SEQ ID NO: 609346 - DNA, 15 bp, Homo sapiens
gacacagttggagag

SEQ ID NO: 609347 - DNA, 15 bp, Homo sapiens
acacagttggagagg

SEQ ID NO: 609348 - DNA, 15 bp, Homo sapiens
cacagttggagaggt

SEQ ID NO: 609349 - DNA, 15 bp, Homo sapiens
acagttggagaggtc

SEQ ID NO: 609350 - DNA, 15 bp, Homo sapiens
cagttggagaggtcc

SEQ ID NO: 609351 - DNA, 15 bp, Homo sapiens
agttggagaggtccc

SEQ ID NO: 609352 - DNA, 15 bp, Homo sapiens
gttggagaggtcccc

SEQ ID NO: 609353 - DNA, 15 bp, Homo sapiens
ttggagaggtccccc

SEQ ID NO: 609354 - DNA, 15 bp, Homo sapiens
tggagaggtccccca

SEQ ID NO: 609355 - DNA, 15 bp, Homo sapiens
ggagaggtcccccaa

SEQ ID NO: 609356 - DNA, 15 bp, Homo sapiens
gagaggtcccccaaa

SEQ ID NO: 609357 - DNA, 15 bp, Homo sapiens
agaggtcccccaaag

SEQ ID NO: 609358 - DNA, 15 bp, Homo sapiens
gaggtcccccaaagg

SEQ ID NO: 609359 - DNA, 15 bp, Homo sapiens
aggtcccccaaaggg

SEQ ID NO: 609360 - DNA, 15 bp, Homo sapiens
ggtcccccaaagggc

SEQ ID NO: 609361 - DNA, 15 bp, Homo sapiens
gtcccccaaagggca

SEQ ID NO: 609362 - DNA, 15 bp, Homo sapiens
tcccccaaagggcat

SEQ ID NO: 609363 - DNA, 15 bp, Homo sapiens
cccccaaagggcatg

SEQ ID NO: 609364 - DNA, 15 bp, Homo sapiens
ccccaaagggcatgg

SEQ ID NO: 609365 - DNA, 15 bp, Homo sapiens
cccaaagggcatggc

SEQ ID NO: 609366 - DNA, 15 bp, Homo sapiens
ccaaagggcatggca

SEQ ID NO: 609367 - DNA, 15 bp, Homo sapiens
caaagggcatggcag

SEQ ID NO: 609368 - DNA, 15 bp, Homo sapiens
aaagggcatggcagc

SEQ ID NO: 609369 - DNA, 15 bp, Homo sapiens
aagggcatggcagct

SEQ ID NO: 609370 - DNA, 15 bp, Homo sapiens
agggcatggcagctt

SEQ ID NO: 609371 - DNA, 15 bp, Homo sapiens
gggcatggcagcttc

SEQ ID NO: 609372 - DNA, 15 bp, Homo sapiens
ggcatggcagcttct

SEQ ID NO: 609373 - DNA, 15 bp, Homo sapiens
gcatggcagcttctg

SEQ ID NO: 609374 - DNA, 15 bp, Homo sapiens
catggcagcttctgc

SEQ ID NO: 609375 - DNA, 15 bp, Homo sapiens
atggcagcttctgct

SEQ ID NO: 609376 - DNA, 15 bp, Homo sapiens
tggcagcttctgctg

SEQ ID NO: 609377 - DNA, 15 bp, Homo sapiens
ggcagcttctgctgc

SEQ ID NO: 609378 - DNA, 15 bp, Homo sapiens
gcagcttctgctgca

SEQ ID NO: 609379 - DNA, 15 bp, Homo sapiens
cagcttctgctgcag

SEQ ID NO: 609380 - DNA, 15 bp, Homo sapiens
agcttctgctgcagt

SEQ ID NO: 609381 - DNA, 15 bp, Homo sapiens
gcttctgctgcagtc

SEQ ID NO: 609382 - DNA, 15 bp, Homo sapiens
cttctgctgcagtcc

SEQ ID NO: 609383 - DNA, 15 bp, Homo sapiens
ttctgctgcagtccc

SEQ ID NO: 609384 - DNA, 15 bp, Homo sapiens
tctgctgcagtcccc

SEQ ID NO: 609385 - DNA, 15 bp, Homo sapiens
ctgctgcagtcccca

SEQ ID NO: 609386 - DNA, 15 bp, Homo sapiens
tgctgcagtccccag

SEQ ID NO: 609387 - DNA, 15 bp, Homo sapiens
gctgcagtccccagg

SEQ ID NO: 609388 - DNA, 15 bp, Homo sapiens
ctgcagtccccaggc

SEQ ID NO: 609389 - DNA, 15 bp, Homo sapiens
tgcagtccccaggca

SEQ ID NO: 609390 - DNA, 15 bp, Homo sapiens
gcagtccccaggcag

SEQ ID NO: 609391 - DNA, 15 bp, Homo sapiens
cagtccccaggcagt

SEQ ID NO: 609392 - DNA, 15 bp, Homo sapiens
agtccccaggcagtt

SEQ ID NO: 609393 - DNA, 15 bp, Homo sapiens
gtccccaggcagttg

SEQ ID NO: 609394 - DNA, 15 bp, Homo sapiens
tccccaggcagttgg

SEQ ID NO: 609395 - DNA, 15 bp, Homo sapiens
ccccaggcagttggg

SEQ ID NO: 609396 - DNA, 15 bp, Homo sapiens
cccaggcagttgggg

SEQ ID NO: 609397 - DNA, 15 bp, Homo sapiens
ccaggcagttggggg

SEQ ID NO: 609398 - DNA, 15 bp, Homo sapiens
caggcagttgggggc

SEQ ID NO: 609399 - DNA, 15 bp, Homo sapiens
aggcagttgggggcc

SEQ ID NO: 609400 - DNA, 15 bp, Homo sapiens
ggcagttgggggcct

SEQ ID NO: 609401 - DNA, 15 bp, Homo sapiens
gcagttgggggcctg

SEQ ID NO: 609402 - DNA, 15 bp, Homo sapiens
cagttgggggcctgt

SEQ ID NO: 609403 - DNA, 15 bp, Homo sapiens
agttgggggcctgta

SEQ ID NO: 609404 - DNA, 15 bp, Homo sapiens
gttgggggcctgtag

SEQ ID NO: 609405 - DNA, 15 bp, Homo sapiens
ttgggggcctgtaga

SEQ ID NO: 609406 - DNA, 15 bp, Homo sapiens
tgggggcctgtagaa

SEQ ID NO: 609407 - DNA, 15 bp, Homo sapiens
gggggcctgtagaaa

SEQ ID NO: 609408 - DNA, 15 bp, Homo sapiens
ggggcctgtagaaac

SEQ ID NO: 609409 - DNA, 15 bp, Homo sapiens
gggcctgtagaaacc

SEQ ID NO: 609410 - DNA, 15 bp, Homo sapiens
ggcctgtagaaaccc

SEQ ID NO: 609411 - DNA, 15 bp, Homo sapiens
gcctgtagaaaccca

SEQ ID NO: 609412 - DNA, 15 bp, Homo sapiens
cctgtagaaacccac

SEQ ID NO: 609413 - DNA, 15 bp, Homo sapiens
ctgtagaaacccaca

SEQ ID NO: 609414 - DNA, 15 bp, Homo sapiens
tgtagaaacccacat

SEQ ID NO: 609415 - DNA, 15 bp, Homo sapiens
gtagaaacccacatg

SEQ ID NO: 609416 - DNA, 15 bp, Homo sapiens
tagaaacccacatgg

SEQ ID NO: 609417 - DNA, 15 bp, Homo sapiens
agaaacccacatgga

SEQ ID NO: 609418 - DNA, 15 bp, Homo sapiens
gaaacccacatggag

SEQ ID NO: 609419 - DNA, 15 bp, Homo sapiens
aaacccacatggagg

SEQ ID NO: 609420 - DNA, 15 bp, Homo sapiens
aacccacatggaggc

SEQ ID NO: 609421 - DNA, 15 bp, Homo sapiens
acccacatggaggct

SEQ ID NO: 609422 - DNA, 15 bp, Homo sapiens
cccacatggaggctg

SEQ ID NO: 609423 - DNA, 15 bp, Homo sapiens
ccacatggaggctgt

SEQ ID NO: 609424 - DNA, 15 bp, Homo sapiens
cacatggaggctgtg

SEQ ID NO: 609425 - DNA, 15 bp, Homo sapiens
acatggaggctgtgc

SEQ ID NO: 609426 - DNA, 15 bp, Homo sapiens
catggaggctgtgca

SEQ ID NO: 609427 - DNA, 15 bp, Homo sapiens
atggaggctgtgcaa

SEQ ID NO: 609428 - DNA, 15 bp, Homo sapiens
tggaggctgtgcaag

SEQ ID NO: 609429 - DNA, 15 bp, Homo sapiens
ggaggctgtgcaaga

SEQ ID NO: 609430 - DNA, 15 bp, Homo sapiens
gaggctgtgcaagag

SEQ ID NO: 609431 - DNA, 15 bp, Homo sapiens
aggctgtgcaagagg

SEQ ID NO: 609432 - DNA, 15 bp, Homo sapiens
ggctgtgcaagaggg

SEQ ID NO: 609433 - DNA, 15 bp, Homo sapiens
gctgtgcaagaggga

SEQ ID NO: 609434 - DNA, 15 bp, Homo sapiens
ctgtgcaagagggag

SEQ ID NO: 609435 - DNA, 15 bp, Homo sapiens
tgtgcaagagggagg

SEQ ID NO: 609436 - DNA, 15 bp, Homo sapiens
gtgcaagagggaggc

SEQ ID NO: 609437 - DNA, 15 bp, Homo sapiens
tgcaagagggaggca

SEQ ID NO: 609438 - DNA, 15 bp, Homo sapiens
gcaagagggaggcaa

SEQ ID NO: 609439 - DNA, 15 bp, Homo sapiens
caagagggaggcaaa

SEQ ID NO: 609440 - DNA, 15 bp, Homo sapiens
aagagggaggcaaat

SEQ ID NO: 609441 - DNA, 15 bp, Homo sapiens
agagggaggcaaatg

SEQ ID NO: 609442 - DNA, 15 bp, Homo sapiens
gagggaggcaaatga

SEQ ID NO: 609443 - DNA, 15 bp, Homo sapiens
agggaggcaaatgat

SEQ ID NO: 609444 - DNA, 15 bp, Homo sapiens
gggaggcaaatgatg

SEQ ID NO: 609445 - DNA, 15 bp, Homo sapiens
ggaggcaaatgatgg

SEQ ID NO: 609446 - DNA, 15 bp, Homo sapiens
gaggcaaatgatggt

SEQ ID NO: 609447 - DNA, 15 bp, Homo sapiens
aggcaaatgatggtt

SEQ ID NO: 609448 - DNA, 15 bp, Homo sapiens
ggcaaatgatggttg

SEQ ID NO: 609449 - DNA, 15 bp, Homo sapiens
gcaaatgatggttga

SEQ ID NO: 609450 - DNA, 15 bp, Homo sapiens
caaatgatggttgag

SEQ ID NO: 609451 - DNA, 15 bp, Homo sapiens
aaatgatggttgagg

SEQ ID NO: 609452 - DNA, 15 bp, Homo sapiens
aatgatggttgaggg

SEQ ID NO: 609453 - DNA, 15 bp, Homo sapiens
atgatggttgaggga

SEQ ID NO: 609454 - DNA, 15 bp, Homo sapiens
tgatggttgagggaa

SEQ ID NO: 609455 - DNA, 15 bp, Homo sapiens
gatggttgagggaat

SEQ ID NO: 609456 - DNA, 15 bp, Homo sapiens
atggttgagggaatc

SEQ ID NO: 609457 - DNA, 15 bp, Homo sapiens
tggttgagggaatca

SEQ ID NO: 609458 - DNA, 15 bp, Homo sapiens
ggttgagggaatcat

SEQ ID NO: 609459 - DNA, 15 bp, Homo sapiens
gttgagggaatcatt

SEQ ID NO: 609460 - DNA, 15 bp, Homo sapiens
ttgagggaatcatta

SEQ ID NO: 609461 - DNA, 15 bp, Homo sapiens
tgagggaatcattac

SEQ ID NO: 609462 - DNA, 15 bp, Homo sapiens
gagggaatcattact

SEQ ID NO: 609463 - DNA, 15 bp, Homo sapiens
agggaatcattactt

SEQ ID NO: 609464 - DNA, 15 bp, Homo sapiens
gggaatcattacttc

SEQ ID NO: 609465 - DNA, 15 bp, Homo sapiens
ggaatcattacttcc

SEQ ID NO: 609466 - DNA, 15 bp, Homo sapiens
gaatcattacttcct

SEQ ID NO: 609467 - DNA, 15 bp, Homo sapiens
aatcattacttcctg

SEQ ID NO: 609468 - DNA, 15 bp, Homo sapiens
atcattacttcctgg

SEQ ID NO: 609469 - DNA, 15 bp, Homo sapiens
tcattacttcctgga

SEQ ID NO: 609470 - DNA, 15 bp, Homo sapiens
cattacttcctggag

SEQ ID NO: 609471 - DNA, 15 bp, Homo sapiens
attacttcctggagc

SEQ ID NO: 609472 - DNA, 15 bp, Homo sapiens
ttacttcctggagcc

SEQ ID NO: 609473 - DNA, 15 bp, Homo sapiens
tacttcctggagcca

SEQ ID NO: 609474 - DNA, 15 bp, Homo sapiens
acttcctggagccag

SEQ ID NO: 609475 - DNA, 15 bp, Homo sapiens
cttcctggagccagt

SEQ ID NO: 609476 - DNA, 15 bp, Homo sapiens
ttcctggagccagtt

SEQ ID NO: 609477 - DNA, 15 bp, Homo sapiens
tcctggagccagttg

SEQ ID NO: 609478 - DNA, 15 bp, Homo sapiens
cctggagccagttgt

SEQ ID NO: 609479 - DNA, 15 bp, Homo sapiens
ctggagccagttgtg

SEQ ID NO: 609480 - DNA, 15 bp, Homo sapiens
tggagccagttgtgt

SEQ ID NO: 609481 - DNA, 15 bp, Homo sapiens
ggagccagttgtgtg

SEQ ID NO: 609482 - DNA, 15 bp, Homo sapiens
gagccagttgtgtgt

SEQ ID NO: 609483 - DNA, 15 bp, Homo sapiens
agccagttgtgtgtg

SEQ ID NO: 609484 - DNA, 15 bp, Homo sapiens
gccagttgtgtgtgt

SEQ ID NO: 609485 - DNA, 15 bp, Homo sapiens
ccagttgtgtgtgtc

SEQ ID NO: 609486 - DNA, 15 bp, Homo sapiens
cagttgtgtgtgtct

SEQ ID NO: 609487 - DNA, 15 bp, Homo sapiens
agttgtgtgtgtctt

SEQ ID NO: 609488 - DNA, 15 bp, Homo sapiens
gttgtgtgtgtctta

SEQ ID NO: 609489 - DNA, 15 bp, Homo sapiens
ttgtgtgtgtcttaa

SEQ ID NO: 609490 - DNA, 15 bp, Homo sapiens
tgtgtgtgtcttaat

SEQ ID NO: 609491 - DNA, 15 bp, Homo sapiens
gtgtgtgtcttaatt

SEQ ID NO: 609492 - DNA, 15 bp, Homo sapiens
tgtgtgtcttaattt

SEQ ID NO: 609493 - DNA, 15 bp, Homo sapiens
gtgtgtcttaatttg

SEQ ID NO: 609494 - DNA, 15 bp, Homo sapiens
tgtgtcttaatttga

SEQ ID NO: 609495 - DNA, 15 bp, Homo sapiens
gtgtcttaatttgag

SEQ ID NO: 609496 - DNA, 15 bp, Homo sapiens
tgtcttaatttgagc

SEQ ID NO: 609497 - DNA, 15 bp, Homo sapiens
gtcttaatttgagct

SEQ ID NO: 609498 - DNA, 15 bp, Homo sapiens
tcttaatttgagctt

SEQ ID NO: 609499 - DNA, 15 bp, Homo sapiens
cttaatttgagcttt

SEQ ID NO: 609500 - DNA, 15 bp, Homo sapiens
ttaatttgagctttt

SEQ ID NO: 609501 - DNA, 15 bp, Homo sapiens
taatttgagcttttt

SEQ ID NO: 609502 - DNA, 15 bp, Homo sapiens
aatttgagctttttt

SEQ ID NO: 609503 - DNA, 15 bp, Homo sapiens
atttgagcttttttc

SEQ ID NO: 609504 - DNA, 15 bp, Homo sapiens
tttgagcttttttct

SEQ ID NO: 609505 - DNA, 15 bp, Homo sapiens
ttgagcttttttctc

SEQ ID NO: 609506 - DNA, 15 bp, Homo sapiens
tgagcttttttctcc

SEQ ID NO: 609507 - DNA, 15 bp, Homo sapiens
gagcttttttctcca

SEQ ID NO: 609508 - DNA, 15 bp, Homo sapiens
agcttttttctccaa

SEQ ID NO: 609509 - DNA, 15 bp, Homo sapiens
gcttttttctccaac

SEQ ID NO: 609510 - DNA, 15 bp, Homo sapiens
cttttttctccaacc

SEQ ID NO: 609511 - DNA, 15 bp, Homo sapiens
ttttttctccaacct

SEQ ID NO: 609512 - DNA, 15 bp, Homo sapiens
tttttctccaacctg

SEQ ID NO: 609513 - DNA, 15 bp, Homo sapiens
ttttctccaacctgt

SEQ ID NO: 609514 - DNA, 15 bp, Homo sapiens
tttctccaacctgtc

SEQ ID NO: 609515 - DNA, 15 bp, Homo sapiens
ttctccaacctgtct

SEQ ID NO: 609516 - DNA, 15 bp, Homo sapiens
tctccaacctgtctt

SEQ ID NO: 609517 - DNA, 15 bp, Homo sapiens
ctccaacctgtcttg

SEQ ID NO: 609518 - DNA, 15 bp, Homo sapiens
tccaacctgtcttgc

SEQ ID NO: 609519 - DNA, 15 bp, Homo sapiens
ccaacctgtcttgct

SEQ ID NO: 609520 - DNA, 15 bp, Homo sapiens
caacctgtcttgctc

SEQ ID NO: 609521 - DNA, 15 bp, Homo sapiens
aacctgtcttgctcg

SEQ ID NO: 609522 - DNA, 15 bp, Homo sapiens
acctgtcttgctcgt

SEQ ID NO: 609523 - DNA, 15 bp, Homo sapiens
cctgtcttgctcgtt

SEQ ID NO: 609524 - DNA, 15 bp, Homo sapiens
ctgtcttgctcgttt

SEQ ID NO: 609525 - DNA, 15 bp, Homo sapiens
tgtcttgctcgtttt

SEQ ID NO: 609526 - DNA, 15 bp, Homo sapiens
gtcttgctcgttttc

SEQ ID NO: 609527 - DNA, 15 bp, Homo sapiens
tcttgctcgttttct

SEQ ID NO: 609528 - DNA, 15 bp, Homo sapiens
cttgctcgttttcta

SEQ ID NO: 609529 - DNA, 15 bp, Homo sapiens
ttgctcgttttctaa

SEQ ID NO: 609530 - DNA, 15 bp, Homo sapiens
tgctcgttttctaaa

SEQ ID NO: 609531 - DNA, 15 bp, Homo sapiens
gctcgttttctaaat

SEQ ID NO: 609532 - DNA, 15 bp, Homo sapiens
ctcgttttctaaatg

SEQ ID NO: 609533 - DNA, 15 bp, Homo sapiens
tcgttttctaaatgg

SEQ ID NO: 609534 - DNA, 15 bp, Homo sapiens
cgttttctaaatggg

SEQ ID NO: 609535 - DNA, 15 bp, Homo sapiens
gttttctaaatggga

SEQ ID NO: 609536 - DNA, 15 bp, Homo sapiens
ttttctaaatgggag

SEQ ID NO: 609537 - DNA, 15 bp, Homo sapiens
tttctaaatgggaga

SEQ ID NO: 609538 - DNA, 15 bp, Homo sapiens
ttctaaatgggagaa

SEQ ID NO: 609539 - DNA, 15 bp, Homo sapiens
tctaaatgggagaaa

SEQ ID NO: 609540 - DNA, 15 bp, Homo sapiens
ctaaatgggagaaag

SEQ ID NO: 609541 - DNA, 15 bp, Homo sapiens
taaatgggagaaaga

SEQ ID NO: 609542 - DNA, 15 bp, Homo sapiens
aaatgggagaaagat

SEQ ID NO: 609543 - DNA, 15 bp, Homo sapiens
aatgggagaaagatg

SEQ ID NO: 609544 - DNA, 15 bp, Homo sapiens
atgggagaaagatga

SEQ ID NO: 609545 - DNA, 15 bp, Homo sapiens
tgggagaaagatgaa

SEQ ID NO: 609546 - DNA, 15 bp, Homo sapiens
gggagaaagatgaag

SEQ ID NO: 609547 - DNA, 15 bp, Homo sapiens
ggagaaagatgaagc

SEQ ID NO: 609548 - DNA, 15 bp, Homo sapiens
gagaaagatgaagcc

SEQ ID NO: 609549 - DNA, 15 bp, Homo sapiens
agaaagatgaagcca

SEQ ID NO: 609550 - DNA, 15 bp, Homo sapiens
gaaagatgaagccag

SEQ ID NO: 609551 - DNA, 15 bp, Homo sapiens
aaagatgaagccagc

SEQ ID NO: 609552 - DNA, 15 bp, Homo sapiens
aagatgaagccagca

SEQ ID NO: 609553 - DNA, 15 bp, Homo sapiens
agatgaagccagcag

SEQ ID NO: 609554 - DNA, 15 bp, Homo sapiens
gatgaagccagcagg

SEQ ID NO: 609555 - DNA, 15 bp, Homo sapiens
atgaagccagcaggg

SEQ ID NO: 609556 - DNA, 15 bp, Homo sapiens
tgaagccagcaggga

SEQ ID NO: 609557 - DNA, 15 bp, Homo sapiens
gaagccagcagggag

SEQ ID NO: 609558 - DNA, 15 bp, Homo sapiens
aagccagcagggagt

SEQ ID NO: 609559 - DNA, 15 bp, Homo sapiens
agccagcagggagtg

SEQ ID NO: 609560 - DNA, 15 bp, Homo sapiens
gccagcagggagtgc

SEQ ID NO: 609561 - DNA, 15 bp, Homo sapiens
ccagcagggagtgcg

SEQ ID NO: 609562 - DNA, 15 bp, Homo sapiens
cagcagggagtgcgt

SEQ ID NO: 609563 - DNA, 15 bp, Homo sapiens
agcagggagtgcgta

SEQ ID NO: 609564 - DNA, 15 bp, Homo sapiens
gcagggagtgcgtaa

SEQ ID NO: 609565 - DNA, 15 bp, Homo sapiens
cagggagtgcgtaat

SEQ ID NO: 609566 - DNA, 15 bp, Homo sapiens
agggagtgcgtaatg

SEQ ID NO: 609567 - DNA, 15 bp, Homo sapiens
gggagtgcgtaatgt

SEQ ID NO: 609568 - DNA, 15 bp, Homo sapiens
ggagtgcgtaatgtt

SEQ ID NO: 609569 - DNA, 15 bp, Homo sapiens
gagtgcgtaatgttt

SEQ ID NO: 609570 - DNA, 15 bp, Homo sapiens
agtgcgtaatgtttg

SEQ ID NO: 609571 - DNA, 15 bp, Homo sapiens
gtgcgtaatgtttgc

SEQ ID NO: 609572 - DNA, 15 bp, Homo sapiens
tgcgtaatgtttgca

SEQ ID NO: 609573 - DNA, 15 bp, Homo sapiens
gcgtaatgtttgcat

SEQ ID NO: 609574 - DNA, 15 bp, Homo sapiens
cgtaatgtttgcatg

SEQ ID NO: 609575 - DNA, 15 bp, Homo sapiens
gtaatgtttgcatgc

SEQ ID NO: 609576 - DNA, 15 bp, Homo sapiens
taatgtttgcatgca

SEQ ID NO: 609577 - DNA, 15 bp, Homo sapiens
aatgtttgcatgcag

SEQ ID NO: 609578 - DNA, 15 bp, Homo sapiens
atgtttgcatgcagc

SEQ ID NO: 609579 - DNA, 15 bp, Homo sapiens
tgtttgcatgcagca

SEQ ID NO: 609580 - DNA, 15 bp, Homo sapiens
gtttgcatgcagcag

SEQ ID NO: 609581 - DNA, 15 bp, Homo sapiens
tttgcatgcagcagg

SEQ ID NO: 609582 - DNA, 15 bp, Homo sapiens
ttgcatgcagcaggg

SEQ ID NO: 609583 - DNA, 15 bp, Homo sapiens
tgcatgcagcagggc

SEQ ID NO: 609584 - DNA, 15 bp, Homo sapiens
gcatgcagcagggct

SEQ ID NO: 609585 - DNA, 15 bp, Homo sapiens
catgcagcagggctt

SEQ ID NO: 609586 - DNA, 15 bp, Homo sapiens
atgcagcagggcttt

SEQ ID NO: 609587 - DNA, 15 bp, Homo sapiens
tgcagcagggctttc

SEQ ID NO: 609588 - DNA, 15 bp, Homo sapiens
gcagcagggctttcg

SEQ ID NO: 609589 - DNA, 15 bp, Homo sapiens
cagcagggctttcgt

SEQ ID NO: 609590 - DNA, 15 bp, Homo sapiens
agcagggctttcgtg

SEQ ID NO: 609591 - DNA, 15 bp, Homo sapiens
gcagggctttcgtga

SEQ ID NO: 609592 - DNA, 15 bp, Homo sapiens
cagggctttcgtgac

SEQ ID NO: 609593 - DNA, 15 bp, Homo sapiens
agggctttcgtgact

SEQ ID NO: 609594 - DNA, 15 bp, Homo sapiens
gggctttcgtgactg

SEQ ID NO: 609595 - DNA, 15 bp, Homo sapiens
ggctttcgtgactgt

SEQ ID NO: 609596 - DNA, 15 bp, Homo sapiens
gctttcgtgactgtg

SEQ ID NO: 609597 - DNA, 15 bp, Homo sapiens
ctttcgtgactgtgt

SEQ ID NO: 609598 - DNA, 15 bp, Homo sapiens
tttcgtgactgtgtt

SEQ ID NO: 609599 - DNA, 15 bp, Homo sapiens
ttcgtgactgtgttt

SEQ ID NO: 609600 - DNA, 15 bp, Homo sapiens
tcgtgactgtgtttt

SEQ ID NO: 609601 - DNA, 15 bp, Homo sapiens
cgtgactgtgttttt

SEQ ID NO: 609602 - DNA, 15 bp, Homo sapiens
gtgactgtgtttttt

SEQ ID NO: 609603 - DNA, 15 bp, Homo sapiens
tgactgtgttttttg

SEQ ID NO: 609604 - DNA, 15 bp, Homo sapiens
gactgtgttttttga

SEQ ID NO: 609605 - DNA, 15 bp, Homo sapiens
actgtgttttttgaa

SEQ ID NO: 609606 - DNA, 15 bp, Homo sapiens
ctgtgttttttgaaa

SEQ ID NO: 609607 - DNA, 15 bp, Homo sapiens
tgtgttttttgaaaa

SEQ ID NO: 609608 - DNA, 15 bp, Homo sapiens
gtgttttttgaaaag

SEQ ID NO: 609609 - DNA, 15 bp, Homo sapiens
tgttttttgaaaagg

SEQ ID NO: 609610 - DNA, 15 bp, Homo sapiens
gttttttgaaaaggc

SEQ ID NO: 609611 - DNA, 15 bp, Homo sapiens
ttttttgaaaaggcc

SEQ ID NO: 609612 - DNA, 15 bp, Homo sapiens
tttttgaaaaggcct

SEQ ID NO: 609613 - DNA, 15 bp, Homo sapiens
ttttgaaaaggcctt

SEQ ID NO: 609614 - DNA, 15 bp, Homo sapiens
tttgaaaaggccttg

SEQ ID NO: 609615 - DNA, 15 bp, Homo sapiens
ttgaaaaggccttgt

SEQ ID NO: 609616 - DNA, 15 bp, Homo sapiens
tgaaaaggccttgtt

SEQ ID NO: 609617 - DNA, 15 bp, Homo sapiens
gaaaaggccttgtta

SEQ ID NO: 609618 - DNA, 15 bp, Homo sapiens
aaaaggccttgttaa

SEQ ID NO: 609619 - DNA, 15 bp, Homo sapiens
aaaggccttgttaag

SEQ ID NO: 609620 - DNA, 15 bp, Homo sapiens
aaggccttgttaagg

SEQ ID NO: 609621 - DNA, 15 bp, Homo sapiens
aggccttgttaagga

SEQ ID NO: 609622 - DNA, 15 bp, Homo sapiens
ggccttgttaaggaa

SEQ ID NO: 609623 - DNA, 15 bp, Homo sapiens
gccttgttaaggaaa

SEQ ID NO: 609624 - DNA, 15 bp, Homo sapiens
ccttgttaaggaaat

SEQ ID NO: 609625 - DNA, 15 bp, Homo sapiens
cttgttaaggaaatg

SEQ ID NO: 609626 - DNA, 15 bp, Homo sapiens
ttgttaaggaaatgc

SEQ ID NO: 609627 - DNA, 15 bp, Homo sapiens
tgttaaggaaatgct

SEQ ID NO: 609628 - DNA, 15 bp, Homo sapiens
gttaaggaaatgctg

SEQ ID NO: 609629 - DNA, 15 bp, Homo sapiens
ttaaggaaatgctga

SEQ ID NO: 609630 - DNA, 15 bp, Homo sapiens
taaggaaatgctgac

SEQ ID NO: 609631 - DNA, 15 bp, Homo sapiens
aaggaaatgctgacg

SEQ ID NO: 609632 - DNA, 15 bp, Homo sapiens
aggaaatgctgacga

SEQ ID NO: 609633 - DNA, 15 bp, Homo sapiens
ggaaatgctgacgat

SEQ ID NO: 609634 - DNA, 15 bp, Homo sapiens
gaaatgctgacgatg

SEQ ID NO: 609635 - DNA, 15 bp, Homo sapiens
aaatgctgacgatga

SEQ ID NO: 609636 - DNA, 15 bp, Homo sapiens
aatgctgacgatgag

SEQ ID NO: 609637 - DNA, 15 bp, Homo sapiens
atgctgacgatgagt

SEQ ID NO: 609638 - DNA, 15 bp, Homo sapiens
tgctgacgatgagtg

SEQ ID NO: 609639 - DNA, 15 bp, Homo sapiens
gctgacgatgagtga

SEQ ID NO: 609640 - DNA, 15 bp, Homo sapiens
ctgacgatgagtgaa

SEQ ID NO: 609641 - DNA, 15 bp, Homo sapiens
tgacgatgagtgaaa

SEQ ID NO: 609642 - DNA, 15 bp, Homo sapiens
gacgatgagtgaaac

SEQ ID NO: 609643 - DNA, 15 bp, Homo sapiens
acgatgagtgaaact

SEQ ID NO: 609644 - DNA, 15 bp, Homo sapiens
cgatgagtgaaactt

SEQ ID NO: 609645 - DNA, 15 bp, Homo sapiens
gatgagtgaaacttg

SEQ ID NO: 609646 - DNA, 15 bp, Homo sapiens
atgagtgaaacttgc

SEQ ID NO: 609647 - DNA, 15 bp, Homo sapiens
tgagtgaaacttgcc

SEQ ID NO: 609648 - DNA, 15 bp, Homo sapiens
gagtgaaacttgcca

SEQ ID NO: 609649 - DNA, 15 bp, Homo sapiens
agtgaaacttgccag

SEQ ID NO: 609650 - DNA, 15 bp, Homo sapiens
gtgaaacttgccagg

SEQ ID NO: 609651 - DNA, 15 bp, Homo sapiens
tgaaacttgccaggt

SEQ ID NO: 609652 - DNA, 15 bp, Homo sapiens
gaaacttgccaggtc

SEQ ID NO: 609653 - DNA, 15 bp, Homo sapiens
aaacttgccaggtct

SEQ ID NO: 609654 - DNA, 15 bp, Homo sapiens
aacttgccaggtctg

SEQ ID NO: 609655 - DNA, 15 bp, Homo sapiens
acttgccaggtctgg

SEQ ID NO: 609656 - DNA, 15 bp, Homo sapiens
cttgccaggtctggc

SEQ ID NO: 609657 - DNA, 15 bp, Homo sapiens
ttgccaggtctggct

SEQ ID NO: 609658 - DNA, 15 bp, Homo sapiens
tgccaggtctggctg

SEQ ID NO: 609659 - DNA, 15 bp, Homo sapiens
gccaggtctggctga

SEQ ID NO: 609660 - DNA, 15 bp, Homo sapiens
ccaggtctggctgat

SEQ ID NO: 609661 - DNA, 15 bp, Homo sapiens
caggtctggctgata

SEQ ID NO: 609662 - DNA, 15 bp, Homo sapiens
aggtctggctgataa

SEQ ID NO: 609663 - DNA, 15 bp, Homo sapiens
ggtctggctgataac

SEQ ID NO: 609664 - DNA, 15 bp, Homo sapiens
gtctggctgataaca

SEQ ID NO: 609665 - DNA, 15 bp, Homo sapiens
tctggctgataacat

SEQ ID NO: 609666 - DNA, 15 bp, Homo sapiens
ctggctgataacatg

SEQ ID NO: 609667 - DNA, 15 bp, Homo sapiens
tggctgataacatgg

SEQ ID NO: 609668 - DNA, 15 bp, Homo sapiens
ggctgataacatggg

SEQ ID NO: 609669 - DNA, 15 bp, Homo sapiens
gctgataacatgggt

SEQ ID NO: 609670 - DNA, 15 bp, Homo sapiens
ctgataacatgggtg

SEQ ID NO: 609671 - DNA, 15 bp, Homo sapiens
tgataacatgggtga

SEQ ID NO: 609672 - DNA, 15 bp, Homo sapiens
gataacatgggtgag

SEQ ID NO: 609673 - DNA, 15 bp, Homo sapiens
ataacatgggtgagt

SEQ ID NO: 609674 - DNA, 15 bp, Homo sapiens
taacatgggtgagtg

SEQ ID NO: 609675 - DNA, 15 bp, Homo sapiens
aacatgggtgagtgc

SEQ ID NO: 609676 - DNA, 15 bp, Homo sapiens
acatgggtgagtgcc

SEQ ID NO: 609677 - DNA, 15 bp, Homo sapiens
catgggtgagtgccc

SEQ ID NO: 609678 - DNA, 15 bp, Homo sapiens
ggggagaggctagct

SEQ ID NO: 609679 - DNA, 15 bp, Homo sapiens
gggagaggctagctg

SEQ ID NO: 609680 - DNA, 15 bp, Homo sapiens
ggagaggctagctgg

SEQ ID NO: 609681 - DNA, 15 bp, Homo sapiens
gagaggctagctggg

SEQ ID NO: 609682 - DNA, 15 bp, Homo sapiens
agaggctagctgggg

SEQ ID NO: 609683 - DNA, 15 bp, Homo sapiens
gaggctagctggggc

SEQ ID NO: 609684 - DNA, 15 bp, Homo sapiens
aggctagctggggcc

SEQ ID NO: 609685 - DNA, 15 bp, Homo sapiens
ggctagctggggcct

SEQ ID NO: 609686 - DNA, 15 bp, Homo sapiens
gctagctggggcctg

SEQ ID NO: 609687 - DNA, 15 bp, Homo sapiens
ctagctggggcctgt

SEQ ID NO: 609688 - DNA, 15 bp, Homo sapiens
tagctggggcctgta

SEQ ID NO: 609689 - DNA, 15 bp, Homo sapiens
agctggggcctgtag

SEQ ID NO: 609690 - DNA, 15 bp, Homo sapiens
gctggggcctgtagc

SEQ ID NO: 609691 - DNA, 15 bp, Homo sapiens
ctggggcctgtagcc

SEQ ID NO: 609692 - DNA, 15 bp, Homo sapiens
tggggcctgtagcca

SEQ ID NO: 609693 - DNA, 15 bp, Homo sapiens
ggggcctgtagccag

SEQ ID NO: 609694 - DNA, 15 bp, Homo sapiens
gggcctgtagccagg

SEQ ID NO: 609695 - DNA, 15 bp, Homo sapiens
ggcctgtagccaggc

SEQ ID NO: 609696 - DNA, 15 bp, Homo sapiens
gcctgtagccaggcc

SEQ ID NO: 609697 - DNA, 15 bp, Homo sapiens
cctgtagccaggcct

SEQ ID NO: 609698 - DNA, 15 bp, Homo sapiens
ctgtagccaggccta

SEQ ID NO: 609699 - DNA, 15 bp, Homo sapiens
tgtagccaggcctag

SEQ ID NO: 609700 - DNA, 15 bp, Homo sapiens
gtagccaggcctagt

SEQ ID NO: 609701 - DNA, 15 bp, Homo sapiens
tagccaggcctagtc

SEQ ID NO: 609702 - DNA, 15 bp, Homo sapiens
agccaggcctagtcg

SEQ ID NO: 609703 - DNA, 15 bp, Homo sapiens
gccaggcctagtcgc

SEQ ID NO: 609704 - DNA, 15 bp, Homo sapiens
ccaggcctagtcgca

SEQ ID NO: 609705 - DNA, 15 bp, Homo sapiens
caggcctagtcgcag

SEQ ID NO: 609706 - DNA, 15 bp, Homo sapiens
aggcctagtcgcaga

SEQ ID NO: 609707 - DNA, 15 bp, Homo sapiens
ggcctagtcgcagag

SEQ ID NO: 609708 - DNA, 15 bp, Homo sapiens
gcctagtcgcagagg

SEQ ID NO: 609709 - DNA, 15 bp, Homo sapiens
cctagtcgcagaggt

SEQ ID NO: 609710 - DNA, 15 bp, Homo sapiens
ctagtcgcagaggtg

SEQ ID NO: 609711 - DNA, 15 bp, Homo sapiens
tagtcgcagaggtgc

SEQ ID NO: 609712 - DNA, 15 bp, Homo sapiens
agtcgcagaggtgca

SEQ ID NO: 609713 - DNA, 15 bp, Homo sapiens
gtcgcagaggtgcaa

SEQ ID NO: 609714 - DNA, 15 bp, Homo sapiens
tcgcagaggtgcaac

SEQ ID NO: 609715 - DNA, 15 bp, Homo sapiens
cgcagaggtgcaacc

SEQ ID NO: 609716 - DNA, 15 bp, Homo sapiens
gcagaggtgcaaccc

SEQ ID NO: 609717 - DNA, 15 bp, Homo sapiens
cagaggtgcaaccct

SEQ ID NO: 609718 - DNA, 15 bp, Homo sapiens
agaggtgcaaccctg

SEQ ID NO: 609719 - DNA, 15 bp, Homo sapiens
gaggtgcaaccctgg

SEQ ID NO: 609720 - DNA, 15 bp, Homo sapiens
aggtgcaaccctggt

SEQ ID NO: 609721 - DNA, 15 bp, Homo sapiens
ggtgcaaccctggtg

SEQ ID NO: 609722 - DNA, 15 bp, Homo sapiens
gtgcaaccctggtgt

SEQ ID NO: 609723 - DNA, 15 bp, Homo sapiens
tgcaaccctggtgtt

SEQ ID NO: 609724 - DNA, 15 bp, Homo sapiens
gcaaccctggtgttc

SEQ ID NO: 609725 - DNA, 15 bp, Homo sapiens
caaccctggtgttcc

SEQ ID NO: 609726 - DNA, 15 bp, Homo sapiens
aaccctggtgttcct

SEQ ID NO: 609727 - DNA, 15 bp, Homo sapiens
accctggtgttcctt

SEQ ID NO: 609728 - DNA, 15 bp, Homo sapiens
ccctggtgttccttc

SEQ ID NO: 609729 - DNA, 15 bp, Homo sapiens
cctggtgttccttca

SEQ ID NO: 609730 - DNA, 15 bp, Homo sapiens
ctggtgttccttcag

SEQ ID NO: 609731 - DNA, 15 bp, Homo sapiens
tggtgttccttcaga

SEQ ID NO: 609732 - DNA, 15 bp, Homo sapiens
ggtgttccttcagaa

SEQ ID NO: 609733 - DNA, 15 bp, Homo sapiens
gtgttccttcagaaa

SEQ ID NO: 609734 - DNA, 15 bp, Homo sapiens
tgttccttcagaaag

SEQ ID NO: 609735 - DNA, 15 bp, Homo sapiens
gttccttcagaaagg

SEQ ID NO: 609736 - DNA, 15 bp, Homo sapiens
ttccttcagaaagga

SEQ ID NO: 609737 - DNA, 15 bp, Homo sapiens
tccttcagaaaggaa

SEQ ID NO: 609738 - DNA, 15 bp, Homo sapiens
ccttcagaaaggaaa

SEQ ID NO: 609739 - DNA, 15 bp, Homo sapiens
cttcagaaaggaaat

SEQ ID NO: 609740 - DNA, 15 bp, Homo sapiens
ttcagaaaggaaatg

SEQ ID NO: 609741 - DNA, 15 bp, Homo sapiens
tcagaaaggaaatga

SEQ ID NO: 609742 - DNA, 15 bp, Homo sapiens
cagaaaggaaatgag

SEQ ID NO: 609743 - DNA, 15 bp, Homo sapiens
agaaaggaaatgaga

SEQ ID NO: 609744 - DNA, 15 bp, Homo sapiens
gaaaggaaatgagag

SEQ ID NO: 609745 - DNA, 15 bp, Homo sapiens
aaaggaaatgagagg

SEQ ID NO: 609746 - DNA, 15 bp, Homo sapiens
aaggaaatgagaggg

SEQ ID NO: 609747 - DNA, 15 bp, Homo sapiens
aggaaatgagaggga

SEQ ID NO: 609748 - DNA, 15 bp, Homo sapiens
ggaaatgagagggaa

SEQ ID NO: 609749 - DNA, 15 bp, Homo sapiens
gaaatgagagggaag

SEQ ID NO: 609750 - DNA, 15 bp, Homo sapiens
aaatgagagggaagc

SEQ ID NO: 609751 - DNA, 15 bp, Homo sapiens
aatgagagggaagcc

SEQ ID NO: 609752 - DNA, 15 bp, Homo sapiens
atgagagggaagcca

SEQ ID NO: 609753 - DNA, 15 bp, Homo sapiens
tgagagggaagccac

SEQ ID NO: 609754 - DNA, 15 bp, Homo sapiens
gagagggaagccact

SEQ ID NO: 609755 - DNA, 15 bp, Homo sapiens
agagggaagccactg

SEQ ID NO: 609756 - DNA, 15 bp, Homo sapiens
gagggaagccactgc

SEQ ID NO: 609757 - DNA, 15 bp, Homo sapiens
agggaagccactgcc

SEQ ID NO: 609758 - DNA, 15 bp, Homo sapiens
gggaagccactgccc

SEQ ID NO: 609759 - DNA, 15 bp, Homo sapiens
ggaagccactgcccc

SEQ ID NO: 609760 - DNA, 15 bp, Homo sapiens
gaagccactgcccca

SEQ ID NO: 609761 - DNA, 15 bp, Homo sapiens
aagccactgccccat

SEQ ID NO: 609762 - DNA, 15 bp, Homo sapiens
agccactgccccatt

SEQ ID NO: 609763 - DNA, 15 bp, Homo sapiens
gccactgccccattc

SEQ ID NO: 609764 - DNA, 15 bp, Homo sapiens
ccactgccccattcc

SEQ ID NO: 609765 - DNA, 15 bp, Homo sapiens
cactgccccattcct

SEQ ID NO: 609766 - DNA, 15 bp, Homo sapiens
actgccccattcctg

SEQ ID NO: 609767 - DNA, 15 bp, Homo sapiens
ctgccccattcctgg

SEQ ID NO: 609768 - DNA, 15 bp, Homo sapiens
tgccccattcctgga

SEQ ID NO: 609769 - DNA, 15 bp, Homo sapiens
gccccattcctggat

SEQ ID NO: 609770 - DNA, 15 bp, Homo sapiens
ccccattcctggatc

SEQ ID NO: 609771 - DNA, 15 bp, Homo sapiens
cccattcctggatct

SEQ ID NO: 609772 - DNA, 15 bp, Homo sapiens
ccattcctggatctg

SEQ ID NO: 609773 - DNA, 15 bp, Homo sapiens
cattcctggatctgc

SEQ ID NO: 609774 - DNA, 15 bp, Homo sapiens
attcctggatctgcc

SEQ ID NO: 609775 - DNA, 15 bp, Homo sapiens
ttcctggatctgcct

SEQ ID NO: 609776 - DNA, 15 bp, Homo sapiens
tcctggatctgcctg

SEQ ID NO: 609777 - DNA, 15 bp, Homo sapiens
cctggatctgcctgg

SEQ ID NO: 609778 - DNA, 15 bp, Homo sapiens
ctggatctgcctggg

SEQ ID NO: 609779 - DNA, 15 bp, Homo sapiens
tggatctgcctgggc

SEQ ID NO: 609780 - DNA, 15 bp, Homo sapiens
ggatctgcctgggcc

SEQ ID NO: 609781 - DNA, 15 bp, Homo sapiens
gatctgcctgggccg

SEQ ID NO: 609782 - DNA, 15 bp, Homo sapiens
atctgcctgggccgc

SEQ ID NO: 609783 - DNA, 15 bp, Homo sapiens
tctgcctgggccgct

SEQ ID NO: 609784 - DNA, 15 bp, Homo sapiens
ctgcctgggccgctg

SEQ ID NO: 609785 - DNA, 15 bp, Homo sapiens
tgcctgggccgctgg

SEQ ID NO: 609786 - DNA, 15 bp, Homo sapiens
gcctgggccgctgga

SEQ ID NO: 609787 - DNA, 15 bp, Homo sapiens
cctgggccgctggat

SEQ ID NO: 609788 - DNA, 15 bp, Homo sapiens
ctgggccgctggatt

SEQ ID NO: 609789 - DNA, 15 bp, Homo sapiens
tgggccgctggattt

SEQ ID NO: 609790 - DNA, 15 bp, Homo sapiens
gggccgctggatttg

SEQ ID NO: 609791 - DNA, 15 bp, Homo sapiens
ggccgctggatttgg

SEQ ID NO: 609792 - DNA, 15 bp, Homo sapiens
gccgctggatttggg

SEQ ID NO: 609793 - DNA, 15 bp, Homo sapiens
ccgctggatttgggg

SEQ ID NO: 609794 - DNA, 15 bp, Homo sapiens
cgctggatttgggga

SEQ ID NO: 609795 - DNA, 15 bp, Homo sapiens
gctggatttggggag

SEQ ID NO: 609796 - DNA, 15 bp, Homo sapiens
ctggatttggggagg

SEQ ID NO: 609797 - DNA, 15 bp, Homo sapiens
tggatttggggaggg

SEQ ID NO: 609798 - DNA, 15 bp, Homo sapiens
ggatttggggagggg

SEQ ID NO: 609799 - DNA, 15 bp, Homo sapiens
gatttggggaggggg

SEQ ID NO: 609800 - DNA, 15 bp, Homo sapiens
atttggggagggggt

SEQ ID NO: 609801 - DNA, 15 bp, Homo sapiens
tttggggagggggtt

SEQ ID NO: 609802 - DNA, 15 bp, Homo sapiens
ttggggagggggttg

SEQ ID NO: 609803 - DNA, 15 bp, Homo sapiens
tggggagggggttgt

SEQ ID NO: 609804 - DNA, 15 bp, Homo sapiens
ggggagggggttgtt

SEQ ID NO: 609805 - DNA, 15 bp, Homo sapiens
gggagggggttgttg

SEQ ID NO: 609806 - DNA, 15 bp, Homo sapiens
ggagggggttgttga

SEQ ID NO: 609807 - DNA, 15 bp, Homo sapiens
gagggggttgttgag

SEQ ID NO: 609808 - DNA, 15 bp, Homo sapiens
agggggttgttgagg

SEQ ID NO: 609809 - DNA, 15 bp, Homo sapiens
gggggttgttgagga

SEQ ID NO: 609810 - DNA, 15 bp, Homo sapiens
ggggttgttgaggat

SEQ ID NO: 609811 - DNA, 15 bp, Homo sapiens
gggttgttgaggatg

SEQ ID NO: 609812 - DNA, 15 bp, Homo sapiens
ggttgttgaggatgg

SEQ ID NO: 609813 - DNA, 15 bp, Homo sapiens
gttgttgaggatgga

SEQ ID NO: 609814 - DNA, 15 bp, Homo sapiens
ttgttgaggatggag

SEQ ID NO: 609815 - DNA, 15 bp, Homo sapiens
tgttgaggatggagt

SEQ ID NO: 609816 - DNA, 15 bp, Homo sapiens
gttgaggatggagtc

SEQ ID NO: 609817 - DNA, 15 bp, Homo sapiens
ttgaggatggagtcc

SEQ ID NO: 609818 - DNA, 15 bp, Homo sapiens
tgaggatggagtccc

SEQ ID NO: 609819 - DNA, 15 bp, Homo sapiens
gaggatggagtccca

SEQ ID NO: 609820 - DNA, 15 bp, Homo sapiens
aggatggagtcccaa

SEQ ID NO: 609821 - DNA, 15 bp, Homo sapiens
ggatggagtcccaaa

SEQ ID NO: 609822 - DNA, 15 bp, Homo sapiens
gatggagtcccaaag

SEQ ID NO: 609823 - DNA, 15 bp, Homo sapiens
atggagtcccaaagt

SEQ ID NO: 609824 - DNA, 15 bp, Homo sapiens
tggagtcccaaagtg

SEQ ID NO: 609825 - DNA, 15 bp, Homo sapiens
ggagtcccaaagtgc

SEQ ID NO: 609826 - DNA, 15 bp, Homo sapiens
gagtcccaaagtgct

SEQ ID NO: 609827 - DNA, 15 bp, Homo sapiens
agtcccaaagtgctt

SEQ ID NO: 609828 - DNA, 15 bp, Homo sapiens
gtcccaaagtgcttc

SEQ ID NO: 609829 - DNA, 15 bp, Homo sapiens
tcccaaagtgcttcc

SEQ ID NO: 609830 - DNA, 15 bp, Homo sapiens
cccaaagtgcttccg

SEQ ID NO: 609831 - DNA, 15 bp, Homo sapiens
ccaaagtgcttccga

SEQ ID NO: 609832 - DNA, 15 bp, Homo sapiens
caaagtgcttccgac

SEQ ID NO: 609833 - DNA, 15 bp, Homo sapiens
aaagtgcttccgacc

SEQ ID NO: 609834 - DNA, 15 bp, Homo sapiens
aagtgcttccgacca

SEQ ID NO: 609835 - DNA, 15 bp, Homo sapiens
agtgcttccgaccag

SEQ ID NO: 609836 - DNA, 15 bp, Homo sapiens
gtgcttccgaccagg

SEQ ID NO: 609837 - DNA, 15 bp, Homo sapiens
tgcttccgaccaggg

SEQ ID NO: 609838 - DNA, 15 bp, Homo sapiens
gcttccgaccagggc

SEQ ID NO: 609839 - DNA, 15 bp, Homo sapiens
cttccgaccagggcc

SEQ ID NO: 609840 - DNA, 15 bp, Homo sapiens
ttccgaccagggcca

SEQ ID NO: 609841 - DNA, 15 bp, Homo sapiens
tccgaccagggccag

SEQ ID NO: 609842 - DNA, 15 bp, Homo sapiens
ccgaccagggccagt

SEQ ID NO: 609843 - DNA, 15 bp, Homo sapiens
cgaccagggccagtc

SEQ ID NO: 609844 - DNA, 15 bp, Homo sapiens
gaccagggccagtct

SEQ ID NO: 609845 - DNA, 15 bp, Homo sapiens
accagggccagtctg

SEQ ID NO: 609846 - DNA, 15 bp, Homo sapiens
ccagggccagtctgc

SEQ ID NO: 609847 - DNA, 15 bp, Homo sapiens
cagggccagtctgca

SEQ ID NO: 609848 - DNA, 15 bp, Homo sapiens
agggccagtctgcag

SEQ ID NO: 609849 - DNA, 15 bp, Homo sapiens
gggccagtctgcagg

SEQ ID NO: 609850 - DNA, 15 bp, Homo sapiens
ggccagtctgcaggg

SEQ ID NO: 609851 - DNA, 15 bp, Homo sapiens
gccagtctgcagggc

SEQ ID NO: 609852 - DNA, 15 bp, Homo sapiens
ccagtctgcagggca

SEQ ID NO: 609853 - DNA, 15 bp, Homo sapiens
cagtctgcagggcac

SEQ ID NO: 609854 - DNA, 15 bp, Homo sapiens
agtctgcagggcacc

SEQ ID NO: 609855 - DNA, 15 bp, Homo sapiens
gtctgcagggcacct

SEQ ID NO: 609856 - DNA, 15 bp, Homo sapiens
tctgcagggcacctc

SEQ ID NO: 609857 - DNA, 15 bp, Homo sapiens
ctgcagggcacctcc

SEQ ID NO: 609858 - DNA, 15 bp, Homo sapiens
tgcagggcacctccc

SEQ ID NO: 609859 - DNA, 15 bp, Homo sapiens
gcagggcacctccct

SEQ ID NO: 609860 - DNA, 15 bp, Homo sapiens
cagggcacctccctc

SEQ ID NO: 609861 - DNA, 15 bp, Homo sapiens
agggcacctccctcc

SEQ ID NO: 609862 - DNA, 15 bp, Homo sapiens
gggcacctccctcct

SEQ ID NO: 609863 - DNA, 15 bp, Homo sapiens
ggcacctccctcctg

SEQ ID NO: 609864 - DNA, 15 bp, Homo sapiens
gcacctccctcctgc

SEQ ID NO: 609865 - DNA, 15 bp, Homo sapiens
cacctccctcctgct

SEQ ID NO: 609866 - DNA, 15 bp, Homo sapiens
acctccctcctgctt

SEQ ID NO: 609867 - DNA, 15 bp, Homo sapiens
cctccctcctgcttc

SEQ ID NO: 609868 - DNA, 15 bp, Homo sapiens
ctccctcctgcttcc

SEQ ID NO: 609869 - DNA, 15 bp, Homo sapiens
tccctcctgcttcct

SEQ ID NO: 609870 - DNA, 15 bp, Homo sapiens
ccctcctgcttcctc

SEQ ID NO: 609871 - DNA, 15 bp, Homo sapiens
cctcctgcttcctcc

SEQ ID NO: 609872 - DNA, 15 bp, Homo sapiens
ctcctgcttcctccc

SEQ ID NO: 609873 - DNA, 15 bp, Homo sapiens
tcctgcttcctccct

SEQ ID NO: 609874 - DNA, 15 bp, Homo sapiens
cctgcttcctccctc

SEQ ID NO: 609875 - DNA, 15 bp, Homo sapiens
ctgcttcctccctct

SEQ ID NO: 609876 - DNA, 15 bp, Homo sapiens
tgcttcctccctctt

SEQ ID NO: 609877 - DNA, 15 bp, Homo sapiens
gcttcctccctcttg

SEQ ID NO: 609878 - DNA, 15 bp, Homo sapiens
cttcctccctcttga

SEQ ID NO: 609879 - DNA, 15 bp, Homo sapiens
ttcctccctcttgat

SEQ ID NO: 609880 - DNA, 15 bp, Homo sapiens
tcctccctcttgatg

SEQ ID NO: 609881 - DNA, 15 bp, Homo sapiens
cctccctcttgatgt

SEQ ID NO: 609882 - DNA, 15 bp, Homo sapiens
ctccctcttgatgtg

SEQ ID NO: 609883 - DNA, 15 bp, Homo sapiens
tccctcttgatgtga

SEQ ID NO: 609884 - DNA, 15 bp, Homo sapiens
ccctcttgatgtgac

SEQ ID NO: 609885 - DNA, 15 bp, Homo sapiens
cctcttgatgtgact

SEQ ID NO: 609886 - DNA, 15 bp, Homo sapiens
ctcttgatgtgactc

SEQ ID NO: 609887 - DNA, 15 bp, Homo sapiens
tcttgatgtgactct

SEQ ID NO: 609888 - DNA, 15 bp, Homo sapiens
cttgatgtgactctt

SEQ ID NO: 609889 - DNA, 15 bp, Homo sapiens
ttgatgtgactcttg

SEQ ID NO: 609890 - DNA, 15 bp, Homo sapiens
tgatgtgactcttgt

SEQ ID NO: 609891 - DNA, 15 bp, Homo sapiens
gatgtgactcttgtt

SEQ ID NO: 609892 - DNA, 15 bp, Homo sapiens
atgtgactcttgttt

SEQ ID NO: 609893 - DNA, 15 bp, Homo sapiens
tgtgactcttgtttc

SEQ ID NO: 609894 - DNA, 15 bp, Homo sapiens
gtgactcttgtttcc

SEQ ID NO: 609895 - DNA, 15 bp, Homo sapiens
tgactcttgtttcca

SEQ ID NO: 609896 - DNA, 15 bp, Homo sapiens
gactcttgtttccag

SEQ ID NO: 609897 - DNA, 15 bp, Homo sapiens
actcttgtttccagg

SEQ ID NO: 609898 - DNA, 15 bp, Homo sapiens
ctcttgtttccaggg

SEQ ID NO: 609899 - DNA, 15 bp, Homo sapiens
tcttgtttccagggg

SEQ ID NO: 609900 - DNA, 15 bp, Homo sapiens
cttgtttccaggggc

SEQ ID NO: 609901 - DNA, 15 bp, Homo sapiens
ttgtttccaggggct

SEQ ID NO: 609902 - DNA, 15 bp, Homo sapiens
tgtttccaggggctg

SEQ ID NO: 609903 - DNA, 15 bp, Homo sapiens
gtttccaggggctga

SEQ ID NO: 609904 - DNA, 15 bp, Homo sapiens
tttccaggggctgat

SEQ ID NO: 609905 - DNA, 15 bp, Homo sapiens
ttccaggggctgatg

SEQ ID NO: 609906 - DNA, 15 bp, Homo sapiens
tccaggggctgatgg

SEQ ID NO: 609907 - DNA, 15 bp, Homo sapiens
ccaggggctgatggt

SEQ ID NO: 609908 - DNA, 15 bp, Homo sapiens
caggggctgatggtg

SEQ ID NO: 609909 - DNA, 15 bp, Homo sapiens
aggggctgatggtgg

SEQ ID NO: 609910 - DNA, 15 bp, Homo sapiens
ggggctgatggtggc

SEQ ID NO: 609911 - DNA, 15 bp, Homo sapiens
gggctgatggtggcc

SEQ ID NO: 609912 - DNA, 15 bp, Homo sapiens
ggctgatggtggcca

SEQ ID NO: 609913 - DNA, 15 bp, Homo sapiens
gctgatggtggccat

SEQ ID NO: 609914 - DNA, 15 bp, Homo sapiens
ctgatggtggccata

SEQ ID NO: 609915 - DNA, 15 bp, Homo sapiens
tgatggtggccatat

SEQ ID NO: 609916 - DNA, 15 bp, Homo sapiens
gatggtggccatatt

SEQ ID NO: 609917 - DNA, 15 bp, Homo sapiens
atggtggccatatta

SEQ ID NO: 609918 - DNA, 15 bp, Homo sapiens
tggtggccatattat

SEQ ID NO: 609919 - DNA, 15 bp, Homo sapiens
ggtggccatattata

SEQ ID NO: 609920 - DNA, 15 bp, Homo sapiens
gtggccatattatac

SEQ ID NO: 609921 - DNA, 15 bp, Homo sapiens
tggccatattatact

SEQ ID NO: 609922 - DNA, 15 bp, Homo sapiens
ggccatattatactg

SEQ ID NO: 609923 - DNA, 15 bp, Homo sapiens
gccatattatactgc

SEQ ID NO: 609924 - DNA, 15 bp, Homo sapiens
ccatattatactgct

SEQ ID NO: 609925 - DNA, 15 bp, Homo sapiens
catattatactgctt

SEQ ID NO: 609926 - DNA, 15 bp, Homo sapiens
atattatactgcttt

SEQ ID NO: 609927 - DNA, 15 bp, Homo sapiens
tattatactgctttg

SEQ ID NO: 609928 - DNA, 15 bp, Homo sapiens
attatactgctttgt

SEQ ID NO: 609929 - DNA, 15 bp, Homo sapiens
ttatactgctttgtc

SEQ ID NO: 609930 - DNA, 15 bp, Homo sapiens
tatactgctttgtca

SEQ ID NO: 609931 - DNA, 15 bp, Homo sapiens
atactgctttgtcaa

SEQ ID NO: 609932 - DNA, 15 bp, Homo sapiens
tactgctttgtcaac

SEQ ID NO: 609933 - DNA, 15 bp, Homo sapiens
actgctttgtcaaca

SEQ ID NO: 609934 - DNA, 15 bp, Homo sapiens
ctgctttgtcaacaa

SEQ ID NO: 609935 - DNA, 15 bp, Homo sapiens
tgctttgtcaacaat

SEQ ID NO: 609936 - DNA, 15 bp, Homo sapiens
gctttgtcaacaatg

SEQ ID NO: 609937 - DNA, 15 bp, Homo sapiens
ctttgtcaacaatga

SEQ ID NO: 609938 - DNA, 15 bp, Homo sapiens
tttgtcaacaatgag

SEQ ID NO: 609939 - DNA, 15 bp, Homo sapiens
ttgtcaacaatgagg

SEQ ID NO: 609940 - DNA, 15 bp, Homo sapiens
tgtcaacaatgaggt

SEQ ID NO: 609941 - DNA, 15 bp, Homo sapiens
gtcaacaatgaggta

SEQ ID NO: 609942 - DNA, 15 bp, Homo sapiens
tcaacaatgaggtaa

SEQ ID NO: 609943 - DNA, 15 bp, Homo sapiens
caacaatgaggtaag

SEQ ID NO: 609944 - DNA, 15 bp, Homo sapiens
aacaatgaggtaagc

SEQ ID NO: 609945 - DNA, 15 bp, Homo sapiens
acaatgaggtaagct

SEQ ID NO: 609946 - DNA, 15 bp, Homo sapiens
caatgaggtaagctc

SEQ ID NO: 609947 - DNA, 15 bp, Homo sapiens
aatgaggtaagctct

SEQ ID NO: 609948 - DNA, 15 bp, Homo sapiens
atgaggtaagctctg

SEQ ID NO: 609949 - DNA, 15 bp, Homo sapiens
tgaggtaagctctga

SEQ ID NO: 609950 - DNA, 15 bp, Homo sapiens
gaggtaagctctgag

SEQ ID NO: 609951 - DNA, 15 bp, Homo sapiens
aggtaagctctgagg

SEQ ID NO: 609952 - DNA, 15 bp, Homo sapiens
ggtaagctctgagga

SEQ ID NO: 609953 - DNA, 15 bp, Homo sapiens
gtaagctctgaggag

SEQ ID NO: 609954 - DNA, 15 bp, Homo sapiens
taagctctgaggagg

SEQ ID NO: 609955 - DNA, 15 bp, Homo sapiens
aagctctgaggaggg

SEQ ID NO: 609956 - DNA, 15 bp, Homo sapiens
agctctgaggaggga

SEQ ID NO: 609957 - DNA, 15 bp, Homo sapiens
gctctgaggagggac

SEQ ID NO: 609958 - DNA, 15 bp, Homo sapiens
ctctgaggagggacg

SEQ ID NO: 609959 - DNA, 15 bp, Homo sapiens
tctgaggagggacgg

SEQ ID NO: 609960 - DNA, 15 bp, Homo sapiens
ctgaggagggacggt

SEQ ID NO: 609961 - DNA, 15 bp, Homo sapiens
tgaggagggacggtg

SEQ ID NO: 609962 - DNA, 15 bp, Homo sapiens
gaggagggacggtgg

SEQ ID NO: 609963 - DNA, 15 bp, Homo sapiens
aggagggacggtggg

SEQ ID NO: 609964 - DNA, 15 bp, Homo sapiens
ggagggacggtgggg

SEQ ID NO: 609965 - DNA, 15 bp, Homo sapiens
gagggacggtgggga

SEQ ID NO: 609966 - DNA, 15 bp, Homo sapiens
agggacggtggggac

SEQ ID NO: 609967 - DNA, 15 bp, Homo sapiens
gggacggtggggacc

SEQ ID NO: 609968 - DNA, 15 bp, Homo sapiens
ggacggtggggaccc

SEQ ID NO: 609969 - DNA, 15 bp, Homo sapiens
gacggtggggaccct

SEQ ID NO: 609970 - DNA, 15 bp, Homo sapiens
acggtggggaccctg

SEQ ID NO: 609971 - DNA, 15 bp, Homo sapiens
cggtggggaccctgg

SEQ ID NO: 609972 - DNA, 15 bp, Homo sapiens
ggtggggaccctggt

SEQ ID NO: 609973 - DNA, 15 bp, Homo sapiens
gtggggaccctggtg

SEQ ID NO: 609974 - DNA, 15 bp, Homo sapiens
tggggaccctggtgg

SEQ ID NO: 609975 - DNA, 15 bp, Homo sapiens
ggggaccctggtggg

SEQ ID NO: 609976 - DNA, 15 bp, Homo sapiens
gggaccctggtgggt

SEQ ID NO: 609977 - DNA, 15 bp, Homo sapiens
ggaccctggtgggtg

SEQ ID NO: 609978 - DNA, 15 bp, Homo sapiens
gaccctggtgggtgg

SEQ ID NO: 609979 - DNA, 15 bp, Homo sapiens
accctggtgggtggg

SEQ ID NO: 609980 - DNA, 15 bp, Homo sapiens
ccctggtgggtgggt

SEQ ID NO: 609981 - DNA, 15 bp, Homo sapiens
cctggtgggtgggta

SEQ ID NO: 609982 - DNA, 15 bp, Homo sapiens
ctggtgggtgggtac

SEQ ID NO: 609983 - DNA, 15 bp, Homo sapiens
tggtgggtgggtacc

SEQ ID NO: 609984 - DNA, 15 bp, Homo sapiens
ggtgggtgggtacca

SEQ ID NO: 609985 - DNA, 15 bp, Homo sapiens
gtgggtgggtaccat

SEQ ID NO: 609986 - DNA, 15 bp, Homo sapiens
tgggtgggtaccatc

SEQ ID NO: 609987 - DNA, 15 bp, Homo sapiens
gggtgggtaccatca

SEQ ID NO: 609988 - DNA, 15 bp, Homo sapiens
ggtgggtaccatcag

SEQ ID NO: 609989 - DNA, 15 bp, Homo sapiens
gtgggtaccatcagc

SEQ ID NO: 609990 - DNA, 15 bp, Homo sapiens
tgggtaccatcagcc

SEQ ID NO: 609991 - DNA, 15 bp, Homo sapiens
gggtaccatcagccc

SEQ ID NO: 609992 - DNA, 15 bp, Homo sapiens
ggtaccatcagcccg

SEQ ID NO: 609993 - DNA, 15 bp, Homo sapiens
gtaccatcagcccgt

SEQ ID NO: 609994 - DNA, 15 bp, Homo sapiens
taccatcagcccgtc

SEQ ID NO: 609995 - DNA, 15 bp, Homo sapiens
accatcagcccgtct

SEQ ID NO: 609996 - DNA, 15 bp, Homo sapiens
ccatcagcccgtctg

SEQ ID NO: 609997 - DNA, 15 bp, Homo sapiens
catcagcccgtctgg

SEQ ID NO: 609998 - DNA, 15 bp, Homo sapiens
atcagcccgtctgga

SEQ ID NO: 609999 - DNA, 15 bp, Homo sapiens
tcagcccgtctggag

SEQ ID NO: 610000 - DNA, 15 bp, Homo sapiens
cagcccgtctggagt

SEQ ID NO: 610001 - DNA, 15 bp, Homo sapiens
agcccgtctggagta

SEQ ID NO: 610002 - DNA, 15 bp, Homo sapiens
gcccgtctggagtag

SEQ ID NO: 610003 - DNA, 15 bp, Homo sapiens
cccgtctggagtagt

SEQ ID NO: 610004 - DNA, 15 bp, Homo sapiens
ccgtctggagtagta

SEQ ID NO: 610005 - DNA, 15 bp, Homo sapiens
cgtctggagtagtac

SEQ ID NO: 610006 - DNA, 15 bp, Homo sapiens
gtctggagtagtaca

SEQ ID NO: 610007 - DNA, 15 bp, Homo sapiens
tctggagtagtacaa

SEQ ID NO: 610008 - DNA, 15 bp, Homo sapiens
ctggagtagtacaat

SEQ ID NO: 610009 - DNA, 15 bp, Homo sapiens
tggagtagtacaatg

SEQ ID NO: 610010 - DNA, 15 bp, Homo sapiens
ggagtagtacaatgg

SEQ ID NO: 610011 - DNA, 15 bp, Homo sapiens
gagtagtacaatggg

SEQ ID NO: 610012 - DNA, 15 bp, Homo sapiens
agtagtacaatgggg

SEQ ID NO: 610013 - DNA, 15 bp, Homo sapiens
gtagtacaatgggga

SEQ ID NO: 610014 - DNA, 15 bp, Homo sapiens
tagtacaatggggac

SEQ ID NO: 610015 - DNA, 15 bp, Homo sapiens
agtacaatggggact

SEQ ID NO: 610016 - DNA, 15 bp, Homo sapiens
gtacaatggggactc

SEQ ID NO: 610017 - DNA, 15 bp, Homo sapiens
tacaatggggactcc

SEQ ID NO: 610018 - DNA, 15 bp, Homo sapiens
acaatggggactccc

SEQ ID NO: 610019 - DNA, 15 bp, Homo sapiens
caatggggactccca

SEQ ID NO: 610020 - DNA, 15 bp, Homo sapiens
aatggggactcccat

SEQ ID NO: 610021 - DNA, 15 bp, Homo sapiens
atggggactcccatc

SEQ ID NO: 610022 - DNA, 15 bp, Homo sapiens
tggggactcccatca

SEQ ID NO: 610023 - DNA, 15 bp, Homo sapiens
ggggactcccatcaa

SEQ ID NO: 610024 - DNA, 15 bp, Homo sapiens
gggactcccatcaat

SEQ ID NO: 610025 - DNA, 15 bp, Homo sapiens
ggactcccatcaatc

SEQ ID NO: 610026 - DNA, 15 bp, Homo sapiens
gactcccatcaatct

SEQ ID NO: 610027 - DNA, 15 bp, Homo sapiens
actcccatcaatctt

SEQ ID NO: 610028 - DNA, 15 bp, Homo sapiens
ctcccatcaatcttg

SEQ ID NO: 610029 - DNA, 15 bp, Homo sapiens
tcccatcaatcttgc

SEQ ID NO: 610030 - DNA, 15 bp, Homo sapiens
cccatcaatcttgcc

SEQ ID NO: 610031 - DNA, 15 bp, Homo sapiens
ccatcaatcttgcca

SEQ ID NO: 610032 - DNA, 15 bp, Homo sapiens
catcaatcttgccag

SEQ ID NO: 610033 - DNA, 15 bp, Homo sapiens
atcaatcttgccagc

SEQ ID NO: 610034 - DNA, 15 bp, Homo sapiens
tcaatcttgccagct

SEQ ID NO: 610035 - DNA, 15 bp, Homo sapiens
caatcttgccagctg

SEQ ID NO: 610036 - DNA, 15 bp, Homo sapiens
aatcttgccagctga

SEQ ID NO: 610037 - DNA, 15 bp, Homo sapiens
atcttgccagctgaa

SEQ ID NO: 610038 - DNA, 15 bp, Homo sapiens
tcttgccagctgaaa

SEQ ID NO: 610039 - DNA, 15 bp, Homo sapiens
cttgccagctgaaac

SEQ ID NO: 610040 - DNA, 15 bp, Homo sapiens
ttgccagctgaaacc

SEQ ID NO: 610041 - DNA, 15 bp, Homo sapiens
tgccagctgaaaccc

SEQ ID NO: 610042 - DNA, 15 bp, Homo sapiens
gccagctgaaacccc

SEQ ID NO: 610043 - DNA, 15 bp, Homo sapiens
ccagctgaaaccccc

SEQ ID NO: 610044 - DNA, 15 bp, Homo sapiens
cagctgaaaccccct

SEQ ID NO: 610045 - DNA, 15 bp, Homo sapiens
agctgaaacccccta

SEQ ID NO: 610046 - DNA, 15 bp, Homo sapiens
gctgaaaccccctac

SEQ ID NO: 610047 - DNA, 15 bp, Homo sapiens
ctgaaaccccctact

SEQ ID NO: 610048 - DNA, 15 bp, Homo sapiens
tgaaaccccctactc

SEQ ID NO: 610049 - DNA, 15 bp, Homo sapiens
gaaaccccctactca

SEQ ID NO: 610050 - DNA, 15 bp, Homo sapiens
aaaccccctactcac

SEQ ID NO: 610051 - DNA, 15 bp, Homo sapiens
aaccccctactcacc

SEQ ID NO: 610052 - DNA, 15 bp, Homo sapiens
accccctactcacct

SEQ ID NO: 610053 - DNA, 15 bp, Homo sapiens
ccccctactcacctc

SEQ ID NO: 610054 - DNA, 15 bp, Homo sapiens
cccctactcacctca

SEQ ID NO: 610055 - DNA, 15 bp, Homo sapiens
ccctactcacctcac

SEQ ID NO: 610056 - DNA, 15 bp, Homo sapiens
cctactcacctcact

SEQ ID NO: 610057 - DNA, 15 bp, Homo sapiens
ctactcacctcactg

SEQ ID NO: 610058 - DNA, 15 bp, Homo sapiens
tactcacctcactga

SEQ ID NO: 610059 - DNA, 15 bp, Homo sapiens
actcacctcactgag

SEQ ID NO: 610060 - DNA, 15 bp, Homo sapiens
ctcacctcactgagg

SEQ ID NO: 610061 - DNA, 15 bp, Homo sapiens
tcacctcactgaggc

SEQ ID NO: 610062 - DNA, 15 bp, Homo sapiens
cacctcactgaggca

SEQ ID NO: 610063 - DNA, 15 bp, Homo sapiens
acctcactgaggcac

SEQ ID NO: 610064 - DNA, 15 bp, Homo sapiens
cctcactgaggcact

SEQ ID NO: 610065 - DNA, 15 bp, Homo sapiens
ctcactgaggcacta

SEQ ID NO: 610066 - DNA, 15 bp, Homo sapiens
tcactgaggcactag

SEQ ID NO: 610067 - DNA, 15 bp, Homo sapiens
cactgaggcactagg

SEQ ID NO: 610068 - DNA, 15 bp, Homo sapiens
actgaggcactaggg

SEQ ID NO: 610069 - DNA, 15 bp, Homo sapiens
ctgaggcactagggt

SEQ ID NO: 610070 - DNA, 15 bp, Homo sapiens
tgaggcactagggtt

SEQ ID NO: 610071 - DNA, 15 bp, Homo sapiens
gaggcactagggttg

SEQ ID NO: 610072 - DNA, 15 bp, Homo sapiens
aggcactagggttga

SEQ ID NO: 610073 - DNA, 15 bp, Homo sapiens
ggcactagggttgag

SEQ ID NO: 610074 - DNA, 15 bp, Homo sapiens
gcactagggttgaga

SEQ ID NO: 610075 - DNA, 15 bp, Homo sapiens
cactagggttgagaa

SEQ ID NO: 610076 - DNA, 15 bp, Homo sapiens
actagggttgagaag

SEQ ID NO: 610077 - DNA, 15 bp, Homo sapiens
ctagggttgagaagc

SEQ ID NO: 610078 - DNA, 15 bp, Homo sapiens
tagggttgagaagcc

SEQ ID NO: 610079 - DNA, 15 bp, Homo sapiens
agggttgagaagcca

SEQ ID NO: 610080 - DNA, 15 bp, Homo sapiens
gggttgagaagccat

SEQ ID NO: 610081 - DNA, 15 bp, Homo sapiens
ggttgagaagccatc

SEQ ID NO: 610082 - DNA, 15 bp, Homo sapiens
gttgagaagccatct

SEQ ID NO: 610083 - DNA, 15 bp, Homo sapiens
ttgagaagccatctt

SEQ ID NO: 610084 - DNA, 15 bp, Homo sapiens
tgagaagccatcttg

SEQ ID NO: 610085 - DNA, 15 bp, Homo sapiens
gagaagccatcttgt

SEQ ID NO: 610086 - DNA, 15 bp, Homo sapiens
agaagccatcttgtc

SEQ ID NO: 610087 - DNA, 15 bp, Homo sapiens
gaagccatcttgtcc

SEQ ID NO: 610088 - DNA, 15 bp, Homo sapiens
aagccatcttgtcca

SEQ ID NO: 610089 - DNA, 15 bp, Homo sapiens
agccatcttgtccac

SEQ ID NO: 610090 - DNA, 15 bp, Homo sapiens
gccatcttgtccaca

SEQ ID NO: 610091 - DNA, 15 bp, Homo sapiens
ccatcttgtccacag

SEQ ID NO: 610092 - DNA, 15 bp, Homo sapiens
catcttgtccacaga

SEQ ID NO: 610093 - DNA, 15 bp, Homo sapiens
atcttgtccacagat

SEQ ID NO: 610094 - DNA, 15 bp, Homo sapiens
tcttgtccacagatt

SEQ ID NO: 610095 - DNA, 15 bp, Homo sapiens
cttgtccacagattt

SEQ ID NO: 610096 - DNA, 15 bp, Homo sapiens
ttgtccacagatttg

SEQ ID NO: 610097 - DNA, 15 bp, Homo sapiens
tgtccacagatttgg

SEQ ID NO: 610098 - DNA, 15 bp, Homo sapiens
gtccacagatttggt

SEQ ID NO: 610099 - DNA, 15 bp, Homo sapiens
tccacagatttggtt

SEQ ID NO: 610100 - DNA, 15 bp, Homo sapiens
ccacagatttggttt

SEQ ID NO: 610101 - DNA, 15 bp, Homo sapiens
cacagatttggtttt

SEQ ID NO: 610102 - DNA, 15 bp, Homo sapiens
acagatttggttttc

SEQ ID NO: 610103 - DNA, 15 bp, Homo sapiens
cagatttggttttct

SEQ ID NO: 610104 - DNA, 15 bp, Homo sapiens
agatttggttttctg

SEQ ID NO: 610105 - DNA, 15 bp, Homo sapiens
gatttggttttctgt

SEQ ID NO: 610106 - DNA, 15 bp, Homo sapiens
atttggttttctgtg

SEQ ID NO: 610107 - DNA, 15 bp, Homo sapiens
tttggttttctgtgc

SEQ ID NO: 610108 - DNA, 15 bp, Homo sapiens
ttggttttctgtgca

SEQ ID NO: 610109 - DNA, 15 bp, Homo sapiens
tggttttctgtgcat

SEQ ID NO: 610110 - DNA, 15 bp, Homo sapiens
ggttttctgtgcatg

SEQ ID NO: 610111 - DNA, 15 bp, Homo sapiens
gttttctgtgcatgg

SEQ ID NO: 610112 - DNA, 15 bp, Homo sapiens
ttttctgtgcatggt

SEQ ID NO: 610113 - DNA, 15 bp, Homo sapiens
tttctgtgcatggtc

SEQ ID NO: 610114 - DNA, 15 bp, Homo sapiens
ttctgtgcatggtct

SEQ ID NO: 610115 - DNA, 15 bp, Homo sapiens
tctgtgcatggtctc

SEQ ID NO: 610116 - DNA, 15 bp, Homo sapiens
ctgtgcatggtctct

SEQ ID NO: 610117 - DNA, 15 bp, Homo sapiens
tgtgcatggtctctc

SEQ ID NO: 610118 - DNA, 15 bp, Homo sapiens
gtgcatggtctctct

SEQ ID NO: 610119 - DNA, 15 bp, Homo sapiens
tgcatggtctctctc

SEQ ID NO: 610120 - DNA, 15 bp, Homo sapiens
gcatggtctctctca

SEQ ID NO: 610121 - DNA, 15 bp, Homo sapiens
catggtctctctcac

SEQ ID NO: 610122 - DNA, 15 bp, Homo sapiens
atggtctctctcaca

SEQ ID NO: 610123 - DNA, 15 bp, Homo sapiens
tggtctctctcacac

SEQ ID NO: 610124 - DNA, 15 bp, Homo sapiens
ggtctctctcacaca

SEQ ID NO: 610125 - DNA, 15 bp, Homo sapiens
gtctctctcacacat

SEQ ID NO: 610126 - DNA, 15 bp, Homo sapiens
tctctctcacacatg

SEQ ID NO: 610127 - DNA, 15 bp, Homo sapiens
ctctctcacacatga

SEQ ID NO: 610128 - DNA, 15 bp, Homo sapiens
tctctcacacatgaa

SEQ ID NO: 610129 - DNA, 15 bp, Homo sapiens
ctctcacacatgaac

SEQ ID NO: 610130 - DNA, 15 bp, Homo sapiens
tctcacacatgaaca

SEQ ID NO: 610131 - DNA, 15 bp, Homo sapiens
ctcacacatgaacac

SEQ ID NO: 610132 - DNA, 15 bp, Homo sapiens
tcacacatgaacaca

SEQ ID NO: 610133 - DNA, 15 bp, Homo sapiens
cacacatgaacacac

SEQ ID NO: 610134 - DNA, 15 bp, Homo sapiens
acacatgaacacaca

SEQ ID NO: 610135 - DNA, 15 bp, Homo sapiens
cacatgaacacacac

SEQ ID NO: 610136 - DNA, 15 bp, Homo sapiens
acatgaacacacaca

SEQ ID NO: 610137 - DNA, 15 bp, Homo sapiens
catgaacacacacac

SEQ ID NO: 610138 - DNA, 15 bp, Homo sapiens
atgaacacacacaca

SEQ ID NO: 610139 - DNA, 15 bp, Homo sapiens
tgaacacacacacac

SEQ ID NO: 610140 - DNA, 15 bp, Homo sapiens
gaacacacacacaca

SEQ ID NO: 610141 - DNA, 15 bp, Homo sapiens
aacacacacacacaa

SEQ ID NO: 610142 - DNA, 15 bp, Homo sapiens
acacacacacacaag

SEQ ID NO: 610143 - DNA, 15 bp, Homo sapiens
cacacacacacaagt

SEQ ID NO: 610144 - DNA, 15 bp, Homo sapiens
acacacacacaagta

SEQ ID NO: 610145 - DNA, 15 bp, Homo sapiens
cacacacacaagtac

SEQ ID NO: 610146 - DNA, 15 bp, Homo sapiens
acacacacaagtaca

SEQ ID NO: 610147 - DNA, 15 bp, Homo sapiens
cacacacaagtacat

SEQ ID NO: 610148 - DNA, 15 bp, Homo sapiens
acacacaagtacatg

SEQ ID NO: 610149 - DNA, 15 bp, Homo sapiens
cacacaagtacatgt

SEQ ID NO: 610150 - DNA, 15 bp, Homo sapiens
acacaagtacatgta

SEQ ID NO: 610151 - DNA, 15 bp, Homo sapiens
cacaagtacatgtac

SEQ ID NO: 610152 - DNA, 15 bp, Homo sapiens
acaagtacatgtaca

SEQ ID NO: 610153 - DNA, 15 bp, Homo sapiens
caagtacatgtacag

SEQ ID NO: 610154 - DNA, 15 bp, Homo sapiens
aagtacatgtacagg

SEQ ID NO: 610155 - DNA, 15 bp, Homo sapiens
agtacatgtacaggt

SEQ ID NO: 610156 - DNA, 15 bp, Homo sapiens
gtacatgtacaggta

SEQ ID NO: 610157 - DNA, 15 bp, Homo sapiens
tacatgtacaggtat

SEQ ID NO: 610158 - DNA, 15 bp, Homo sapiens
acatgtacaggtata

SEQ ID NO: 610159 - DNA, 15 bp, Homo sapiens
catgtacaggtatac

SEQ ID NO: 610160 - DNA, 15 bp, Homo sapiens
atgtacaggtatacc

SEQ ID NO: 610161 - DNA, 15 bp, Homo sapiens
tgtacaggtataccc

SEQ ID NO: 610162 - DNA, 15 bp, Homo sapiens
gtacaggtataccct

SEQ ID NO: 610163 - DNA, 15 bp, Homo sapiens
tacaggtatacccta

SEQ ID NO: 610164 - DNA, 15 bp, Homo sapiens
acaggtataccctaa

SEQ ID NO: 610165 - DNA, 15 bp, Homo sapiens
caggtataccctaat

SEQ ID NO: 610166 - DNA, 15 bp, Homo sapiens
aggtataccctaatg

SEQ ID NO: 610167 - DNA, 15 bp, Homo sapiens
ggtataccctaatgg

SEQ ID NO: 610168 - DNA, 15 bp, Homo sapiens
gtataccctaatggc

SEQ ID NO: 610169 - DNA, 15 bp, Homo sapiens
tataccctaatggca

SEQ ID NO: 610170 - DNA, 15 bp, Homo sapiens
ataccctaatggcat

SEQ ID NO: 610171 - DNA, 15 bp, Homo sapiens
taccctaatggcatg

SEQ ID NO: 610172 - DNA, 15 bp, Homo sapiens
accctaatggcatgt

SEQ ID NO: 610173 - DNA, 15 bp, Homo sapiens
ccctaatggcatgtg

SEQ ID NO: 610174 - DNA, 15 bp, Homo sapiens
cctaatggcatgtga

SEQ ID NO: 610175 - DNA, 15 bp, Homo sapiens
ctaatggcatgtgac

SEQ ID NO: 610176 - DNA, 15 bp, Homo sapiens
taatggcatgtgacc

SEQ ID NO: 610177 - DNA, 15 bp, Homo sapiens
aatggcatgtgaccc

SEQ ID NO: 610178 - DNA, 15 bp, Homo sapiens
atggcatgtgaccct

SEQ ID NO: 610179 - DNA, 15 bp, Homo sapiens
tggcatgtgacccta

SEQ ID NO: 610180 - DNA, 15 bp, Homo sapiens
ggcatgtgaccctaa

SEQ ID NO: 610181 - DNA, 15 bp, Homo sapiens
gcatgtgaccctaag

SEQ ID NO: 610182 - DNA, 15 bp, Homo sapiens
catgtgaccctaagg

SEQ ID NO: 610183 - DNA, 15 bp, Homo sapiens
atgtgaccctaagga

SEQ ID NO: 610184 - DNA, 15 bp, Homo sapiens
tgtgaccctaaggaa

SEQ ID NO: 610185 - DNA, 15 bp, Homo sapiens
gtgaccctaaggaag

SEQ ID NO: 610186 - DNA, 15 bp, Homo sapiens
tgaccctaaggaaga

SEQ ID NO: 610187 - DNA, 15 bp, Homo sapiens
gaccctaaggaagac

SEQ ID NO: 610188 - DNA, 15 bp, Homo sapiens
accctaaggaagacc

SEQ ID NO: 610189 - DNA, 15 bp, Homo sapiens
ccctaaggaagaccc

SEQ ID NO: 610190 - DNA, 15 bp, Homo sapiens
cctaaggaagaccca

SEQ ID NO: 610191 - DNA, 15 bp, Homo sapiens
ctaaggaagacccag

SEQ ID NO: 610192 - DNA, 15 bp, Homo sapiens
taaggaagacccaga

SEQ ID NO: 610193 - DNA, 15 bp, Homo sapiens
aaggaagacccagac

SEQ ID NO: 610194 - DNA, 15 bp, Homo sapiens
aggaagacccagact

SEQ ID NO: 610195 - DNA, 15 bp, Homo sapiens
ggaagacccagactc

SEQ ID NO: 610196 - DNA, 15 bp, Homo sapiens
gaagacccagactca

SEQ ID NO: 610197 - DNA, 15 bp, Homo sapiens
aagacccagactcat

SEQ ID NO: 610198 - DNA, 15 bp, Homo sapiens
agacccagactcatg

SEQ ID NO: 610199 - DNA, 15 bp, Homo sapiens
gacccagactcatgt

SEQ ID NO: 610200 - DNA, 15 bp, Homo sapiens
acccagactcatgtt

SEQ ID NO: 610201 - DNA, 15 bp, Homo sapiens
cccagactcatgtta

SEQ ID NO: 610202 - DNA, 15 bp, Homo sapiens
ccagactcatgttaa

SEQ ID NO: 610203 - DNA, 15 bp, Homo sapiens
cagactcatgttaag

SEQ ID NO: 610204 - DNA, 15 bp, Homo sapiens
agactcatgttaagg

SEQ ID NO: 610205 - DNA, 15 bp, Homo sapiens
gactcatgttaaggg

SEQ ID NO: 610206 - DNA, 15 bp, Homo sapiens
actcatgttaagggg

SEQ ID NO: 610207 - DNA, 15 bp, Homo sapiens
ctcatgttaagggga

SEQ ID NO: 610208 - DNA, 15 bp, Homo sapiens
tcatgttaaggggat

SEQ ID NO: 610209 - DNA, 15 bp, Homo sapiens
catgttaaggggatc

SEQ ID NO: 610210 - DNA, 15 bp, Homo sapiens
atgttaaggggatcc

SEQ ID NO: 610211 - DNA, 15 bp, Homo sapiens
tgttaaggggatcct

SEQ ID NO: 610212 - DNA, 15 bp, Homo sapiens
gttaaggggatcctg

SEQ ID NO: 610213 - DNA, 15 bp, Homo sapiens
ttaaggggatcctga

SEQ ID NO: 610214 - DNA, 15 bp, Homo sapiens
taaggggatcctgaa

SEQ ID NO: 610215 - DNA, 15 bp, Homo sapiens
aaggggatcctgaat

SEQ ID NO: 610216 - DNA, 15 bp, Homo sapiens
aggggatcctgaatg

SEQ ID NO: 610217 - DNA, 15 bp, Homo sapiens
ggggatcctgaatga

SEQ ID NO: 610218 - DNA, 15 bp, Homo sapiens
gggatcctgaatgac

SEQ ID NO: 610219 - DNA, 15 bp, Homo sapiens
ggatcctgaatgacc

SEQ ID NO: 610220 - DNA, 15 bp, Homo sapiens
gatcctgaatgaccc

SEQ ID NO: 610221 - DNA, 15 bp, Homo sapiens
atcctgaatgaccct

SEQ ID NO: 610222 - DNA, 15 bp, Homo sapiens
tcctgaatgaccctc

SEQ ID NO: 610223 - DNA, 15 bp, Homo sapiens
cctgaatgaccctct

SEQ ID NO: 610224 - DNA, 15 bp, Homo sapiens
ctgaatgaccctctt

SEQ ID NO: 610225 - DNA, 15 bp, Homo sapiens
tgaatgaccctcttt

SEQ ID NO: 610226 - DNA, 15 bp, Homo sapiens
gaatgaccctctttg

SEQ ID NO: 610227 - DNA, 15 bp, Homo sapiens
aatgaccctctttgc

SEQ ID NO: 610228 - DNA, 15 bp, Homo sapiens
atgaccctctttgct

SEQ ID NO: 610229 - DNA, 15 bp, Homo sapiens
tgaccctctttgctt

SEQ ID NO: 610230 - DNA, 15 bp, Homo sapiens
gaccctctttgcttg

SEQ ID NO: 610231 - DNA, 15 bp, Homo sapiens
accctctttgcttgg

SEQ ID NO: 610232 - DNA, 15 bp, Homo sapiens
ccctctttgcttggt

SEQ ID NO: 610233 - DNA, 15 bp, Homo sapiens
cctctttgcttggtg

SEQ ID NO: 610234 - DNA, 15 bp, Homo sapiens
ctctttgcttggtgg

SEQ ID NO: 610235 - DNA, 15 bp, Homo sapiens
tctttgcttggtggt

SEQ ID NO: 610236 - DNA, 15 bp, Homo sapiens
ctttgcttggtggta

SEQ ID NO: 610237 - DNA, 15 bp, Homo sapiens
tttgcttggtggtag

SEQ ID NO: 610238 - DNA, 15 bp, Homo sapiens
ttgcttggtggtagt

SEQ ID NO: 610239 - DNA, 15 bp, Homo sapiens
tgcttggtggtagtg

SEQ ID NO: 610240 - DNA, 15 bp, Homo sapiens
gcttggtggtagtga

SEQ ID NO: 610241 - DNA, 15 bp, Homo sapiens
cttggtggtagtgac

SEQ ID NO: 610242 - DNA, 15 bp, Homo sapiens
ttggtggtagtgact

SEQ ID NO: 610243 - DNA, 15 bp, Homo sapiens
tggtggtagtgactg

SEQ ID NO: 610244 - DNA, 15 bp, Homo sapiens
ggtggtagtgactgt

SEQ ID NO: 610245 - DNA, 15 bp, Homo sapiens
gtggtagtgactgtc

SEQ ID NO: 610246 - DNA, 15 bp, Homo sapiens
tggtagtgactgtca

SEQ ID NO: 610247 - DNA, 15 bp, Homo sapiens
ggtagtgactgtcac

SEQ ID NO: 610248 - DNA, 15 bp, Homo sapiens
gtagtgactgtcact

SEQ ID NO: 610249 - DNA, 15 bp, Homo sapiens
tagtgactgtcactt

SEQ ID NO: 610250 - DNA, 15 bp, Homo sapiens
agtgactgtcactta

SEQ ID NO: 610251 - DNA, 15 bp, Homo sapiens
gtgactgtcacttac

SEQ ID NO: 610252 - DNA, 15 bp, Homo sapiens
tgactgtcacttaca

SEQ ID NO: 610253 - DNA, 15 bp, Homo sapiens
gactgtcacttacaa

SEQ ID NO: 610254 - DNA, 15 bp, Homo sapiens
actgtcacttacaaa

SEQ ID NO: 610255 - DNA, 15 bp, Homo sapiens
ctgtcacttacaaag

SEQ ID NO: 610256 - DNA, 15 bp, Homo sapiens
tgtcacttacaaagt

SEQ ID NO: 610257 - DNA, 15 bp, Homo sapiens
gtcacttacaaagtg

SEQ ID NO: 610258 - DNA, 15 bp, Homo sapiens
tcacttacaaagtga

SEQ ID NO: 610259 - DNA, 15 bp, Homo sapiens
cacttacaaagtgat

SEQ ID NO: 610260 - DNA, 15 bp, Homo sapiens
acttacaaagtgatt

SEQ ID NO: 610261 - DNA, 15 bp, Homo sapiens
cttacaaagtgattc

SEQ ID NO: 610262 - DNA, 15 bp, Homo sapiens
ttacaaagtgattca

SEQ ID NO: 610263 - DNA, 15 bp, Homo sapiens
tacaaagtgattcaa

SEQ ID NO: 610264 - DNA, 15 bp, Homo sapiens
acaaagtgattcaac

SEQ ID NO: 610265 - DNA, 15 bp, Homo sapiens
caaagtgattcaaca

SEQ ID NO: 610266 - DNA, 15 bp, Homo sapiens
aaagtgattcaacac

SEQ ID NO: 610267 - DNA, 15 bp, Homo sapiens
aagtgattcaacaca

SEQ ID NO: 610268 - DNA, 15 bp, Homo sapiens
agtgattcaacacac

SEQ ID NO: 610269 - DNA, 15 bp, Homo sapiens
gtgattcaacacaca

SEQ ID NO: 610270 - DNA, 15 bp, Homo sapiens
tgattcaacacacac

SEQ ID NO: 610271 - DNA, 15 bp, Homo sapiens
gattcaacacacaca

SEQ ID NO: 610272 - DNA, 15 bp, Homo sapiens
attcaacacacacat

SEQ ID NO: 610273 - DNA, 15 bp, Homo sapiens
ttcaacacacacata

SEQ ID NO: 610274 - DNA, 15 bp, Homo sapiens
tcaacacacacatac

SEQ ID NO: 610275 - DNA, 15 bp, Homo sapiens
caacacacacatacc

SEQ ID NO: 610276 - DNA, 15 bp, Homo sapiens
aacacacacataccc

SEQ ID NO: 610277 - DNA, 15 bp, Homo sapiens
acacacacataccca

SEQ ID NO: 610278 - DNA, 15 bp, Homo sapiens
cacacacatacccaa

SEQ ID NO: 610279 - DNA, 15 bp, Homo sapiens
acacacatacccaag

SEQ ID NO: 610280 - DNA, 15 bp, Homo sapiens
cacacatacccaagc

SEQ ID NO: 610281 - DNA, 15 bp, Homo sapiens
acacatacccaagcc

SEQ ID NO: 610282 - DNA, 15 bp, Homo sapiens
cacatacccaagcca

SEQ ID NO: 610283 - DNA, 15 bp, Homo sapiens
acatacccaagccac

SEQ ID NO: 610284 - DNA, 15 bp, Homo sapiens
catacccaagccaca

SEQ ID NO: 610285 - DNA, 15 bp, Homo sapiens
atacccaagccacat

SEQ ID NO: 610286 - DNA, 15 bp, Homo sapiens
tacccaagccacatg

SEQ ID NO: 610287 - DNA, 15 bp, Homo sapiens
acccaagccacatgc

SEQ ID NO: 610288 - DNA, 15 bp, Homo sapiens
cccaagccacatgct

SEQ ID NO: 610289 - DNA, 15 bp, Homo sapiens
ccaagccacatgctt

SEQ ID NO: 610290 - DNA, 15 bp, Homo sapiens
caagccacatgcttg

SEQ ID NO: 610291 - DNA, 15 bp, Homo sapiens
aagccacatgcttgg

SEQ ID NO: 610292 - DNA, 15 bp, Homo sapiens
agccacatgcttggg

SEQ ID NO: 610293 - DNA, 15 bp, Homo sapiens
gccacatgcttgggg

SEQ ID NO: 610294 - DNA, 15 bp, Homo sapiens
ccacatgcttggggc

SEQ ID NO: 610295 - DNA, 15 bp, Homo sapiens
cacatgcttggggct

SEQ ID NO: 610296 - DNA, 15 bp, Homo sapiens
acatgcttggggctt

SEQ ID NO: 610297 - DNA, 15 bp, Homo sapiens
catgcttggggcttt

SEQ ID NO: 610298 - DNA, 15 bp, Homo sapiens
atgcttggggcttta

SEQ ID NO: 610299 - DNA, 15 bp, Homo sapiens
tgcttggggctttaa

SEQ ID NO: 610300 - DNA, 15 bp, Homo sapiens
gcttggggctttaat

SEQ ID NO: 610301 - DNA, 15 bp, Homo sapiens
cttggggctttaata

SEQ ID NO: 610302 - DNA, 15 bp, Homo sapiens
ttggggctttaataa

SEQ ID NO: 610303 - DNA, 15 bp, Homo sapiens
tggggctttaataat

SEQ ID NO: 610304 - DNA, 15 bp, Homo sapiens
ggggctttaataatc

SEQ ID NO: 610305 - DNA, 15 bp, Homo sapiens
gggctttaataatca

SEQ ID NO: 610306 - DNA, 15 bp, Homo sapiens
ggctttaataatcac

SEQ ID NO: 610307 - DNA, 15 bp, Homo sapiens
gctttaataatcact

SEQ ID NO: 610308 - DNA, 15 bp, Homo sapiens
ctttaataatcacta

SEQ ID NO: 610309 - DNA, 15 bp, Homo sapiens
tttaataatcactat

SEQ ID NO: 610310 - DNA, 15 bp, Homo sapiens
ttaataatcactatc

SEQ ID NO: 610311 - DNA, 15 bp, Homo sapiens
taataatcactatct

SEQ ID NO: 610312 - DNA, 15 bp, Homo sapiens
aataatcactatctc

SEQ ID NO: 610313 - DNA, 15 bp, Homo sapiens
ataatcactatctca

SEQ ID NO: 610314 - DNA, 15 bp, Homo sapiens
taatcactatctcat

SEQ ID NO: 610315 - DNA, 15 bp, Homo sapiens
aatcactatctcatt

SEQ ID NO: 610316 - DNA, 15 bp, Homo sapiens
atcactatctcattt

SEQ ID NO: 610317 - DNA, 15 bp, Homo sapiens
tcactatctcattta

SEQ ID NO: 610318 - DNA, 15 bp, Homo sapiens
cactatctcatttaa

SEQ ID NO: 610319 - DNA, 15 bp, Homo sapiens
actatctcatttaat

SEQ ID NO: 610320 - DNA, 15 bp, Homo sapiens
ctatctcatttaatt

SEQ ID NO: 610321 - DNA, 15 bp, Homo sapiens
tatctcatttaatta

SEQ ID NO: 610322 - DNA, 15 bp, Homo sapiens
atctcatttaattat

SEQ ID NO: 610323 - DNA, 15 bp, Homo sapiens
tctcatttaattatg

SEQ ID NO: 610324 - DNA, 15 bp, Homo sapiens
ctcatttaattatga

SEQ ID NO: 610325 - DNA, 15 bp, Homo sapiens
tcatttaattatgac

SEQ ID NO: 610326 - DNA, 15 bp, Homo sapiens
catttaattatgacc

SEQ ID NO: 610327 - DNA, 15 bp, Homo sapiens
atttaattatgaccc

SEQ ID NO: 610328 - DNA, 15 bp, Homo sapiens
tttaattatgacccc

SEQ ID NO: 610329 - DNA, 15 bp, Homo sapiens
ttaattatgaccccc

SEQ ID NO: 610330 - DNA, 15 bp, Homo sapiens
taattatgaccccca

SEQ ID NO: 610331 - DNA, 15 bp, Homo sapiens
aattatgacccccac

SEQ ID NO: 610332 - DNA, 15 bp, Homo sapiens
attatgacccccaca

SEQ ID NO: 610333 - DNA, 15 bp, Homo sapiens
ttatgacccccacat

SEQ ID NO: 610334 - DNA, 15 bp, Homo sapiens
tatgacccccacatc

SEQ ID NO: 610335 - DNA, 15 bp, Homo sapiens
atgacccccacatcc

SEQ ID NO: 610336 - DNA, 15 bp, Homo sapiens
tgacccccacatccc

SEQ ID NO: 610337 - DNA, 15 bp, Homo sapiens
gacccccacatccct

SEQ ID NO: 610338 - DNA, 15 bp, Homo sapiens
acccccacatccctc

SEQ ID NO: 610339 - DNA, 15 bp, Homo sapiens
cccccacatccctca

SEQ ID NO: 610340 - DNA, 15 bp, Homo sapiens
ccccacatccctcaa

SEQ ID NO: 610341 - DNA, 15 bp, Homo sapiens
cccacatccctcaaa

SEQ ID NO: 610342 - DNA, 15 bp, Homo sapiens
ccacatccctcaaaa

SEQ ID NO: 610343 - DNA, 15 bp, Homo sapiens
cacatccctcaaaaa

SEQ ID NO: 610344 - DNA, 15 bp, Homo sapiens
acatccctcaaaaaa

SEQ ID NO: 610345 - DNA, 15 bp, Homo sapiens
catccctcaaaaaaa

SEQ ID NO: 610346 - DNA, 15 bp, Homo sapiens
atccctcaaaaaaaa

SEQ ID NO: 610347 - DNA, 15 bp, Homo sapiens
tccctcaaaaaaaaa

SEQ ID NO: 610348 - DNA, 15 bp, Homo sapiens
ccctcaaaaaaaaac

SEQ ID NO: 610349 - DNA, 15 bp, Homo sapiens
cctcaaaaaaaaacc

SEQ ID NO: 610350 - DNA, 15 bp, Homo sapiens
ctcaaaaaaaaaccc

SEQ ID NO: 610351 - DNA, 15 bp, Homo sapiens
tcaaaaaaaaaccct

SEQ ID NO: 610352 - DNA, 15 bp, Homo sapiens
caaaaaaaaaccctg

SEQ ID NO: 610353 - DNA, 15 bp, Homo sapiens
aaaaaaaaaccctgc

SEQ ID NO: 610354 - DNA, 15 bp, Homo sapiens
aaaaaaaaccctgct

SEQ ID NO: 610355 - DNA, 15 bp, Homo sapiens
aaaaaaaccctgcta

SEQ ID NO: 610356 - DNA, 15 bp, Homo sapiens
aaaaaaccctgctaa

SEQ ID NO: 610357 - DNA, 15 bp, Homo sapiens
aaaaaccctgctaaa

SEQ ID NO: 610358 - DNA, 15 bp, Homo sapiens
aaaaccctgctaaaa

SEQ ID NO: 610359 - DNA, 15 bp, Homo sapiens
aaaccctgctaaaat

SEQ ID NO: 610360 - DNA, 15 bp, Homo sapiens
aaccctgctaaaatt

SEQ ID NO: 610361 - DNA, 15 bp, Homo sapiens
accctgctaaaattc

SEQ ID NO: 610362 - DNA, 15 bp, Homo sapiens
ccctgctaaaattct

SEQ ID NO: 610363 - DNA, 15 bp, Homo sapiens
cctgctaaaattctt

SEQ ID NO: 610364 - DNA, 15 bp, Homo sapiens
ctgctaaaattctta

SEQ ID NO: 610365 - DNA, 15 bp, Homo sapiens
tgctaaaattcttat

SEQ ID NO: 610366 - DNA, 15 bp, Homo sapiens
gctaaaattcttatt

SEQ ID NO: 610367 - DNA, 15 bp, Homo sapiens
ctaaaattcttattt

SEQ ID NO: 610368 - DNA, 15 bp, Homo sapiens
taaaattcttatttc

SEQ ID NO: 610369 - DNA, 15 bp, Homo sapiens
aaaattcttatttca

SEQ ID NO: 610370 - DNA, 15 bp, Homo sapiens
aaattcttatttcat

SEQ ID NO: 610371 - DNA, 15 bp, Homo sapiens
aattcttatttcata

SEQ ID NO: 610372 - DNA, 15 bp, Homo sapiens
attcttatttcatat

SEQ ID NO: 610373 - DNA, 15 bp, Homo sapiens
ttcttatttcatatt

SEQ ID NO: 610374 - DNA, 15 bp, Homo sapiens
tcttatttcatattc

SEQ ID NO: 610375 - DNA, 15 bp, Homo sapiens
cttatttcatattcc

SEQ ID NO: 610376 - DNA, 15 bp, Homo sapiens
ttatttcatattccc

SEQ ID NO: 610377 - DNA, 15 bp, Homo sapiens
tatttcatattccca

SEQ ID NO: 610378 - DNA, 15 bp, Homo sapiens
atttcatattcccat

SEQ ID NO: 610379 - DNA, 15 bp, Homo sapiens
tttcatattcccatt

SEQ ID NO: 610380 - DNA, 15 bp, Homo sapiens
ttcatattcccattt

SEQ ID NO: 610381 - DNA, 15 bp, Homo sapiens
tcatattcccatttt

SEQ ID NO: 610382 - DNA, 15 bp, Homo sapiens
catattcccattttt

SEQ ID NO: 610383 - DNA, 15 bp, Homo sapiens
atattcccatttttt

SEQ ID NO: 610384 - DNA, 15 bp, Homo sapiens
tattcccatttttta

SEQ ID NO: 610385 - DNA, 15 bp, Homo sapiens
attcccattttttat

SEQ ID NO: 610386 - DNA, 15 bp, Homo sapiens
ttcccattttttata

SEQ ID NO: 610387 - DNA, 15 bp, Homo sapiens
tcccattttttatat

SEQ ID NO: 610388 - DNA, 15 bp, Homo sapiens
cccattttttatata

SEQ ID NO: 610389 - DNA, 15 bp, Homo sapiens
ccattttttatatat

SEQ ID NO: 610390 - DNA, 15 bp, Homo sapiens
cattttttatatata

SEQ ID NO: 610391 - DNA, 15 bp, Homo sapiens
attttttatatatac

SEQ ID NO: 610392 - DNA, 15 bp, Homo sapiens
ttttttatatataca

SEQ ID NO: 610393 - DNA, 15 bp, Homo sapiens
tttttatatatacat

SEQ ID NO: 610394 - DNA, 15 bp, Homo sapiens
ttttatatatacatg

SEQ ID NO: 610395 - DNA, 15 bp, Homo sapiens
tttatatatacatga

SEQ ID NO: 610396 - DNA, 15 bp, Homo sapiens
ttatatatacatgaa

SEQ ID NO: 610397 - DNA, 15 bp, Homo sapiens
tatatatacatgaaa

SEQ ID NO: 610398 - DNA, 15 bp, Homo sapiens
atatatacatgaaaa

SEQ ID NO: 610399 - DNA, 15 bp, Homo sapiens
tatatacatgaaaac

SEQ ID NO: 610400 - DNA, 15 bp, Homo sapiens
atatacatgaaaaca

SEQ ID NO: 610401 - DNA, 15 bp, Homo sapiens
tatacatgaaaacac

SEQ ID NO: 610402 - DNA, 15 bp, Homo sapiens
atacatgaaaacact

SEQ ID NO: 610403 - DNA, 15 bp, Homo sapiens
tacatgaaaacactg

SEQ ID NO: 610404 - DNA, 15 bp, Homo sapiens
acatgaaaacactga

SEQ ID NO: 610405 - DNA, 15 bp, Homo sapiens
catgaaaacactgaa

SEQ ID NO: 610406 - DNA, 15 bp, Homo sapiens
atgaaaacactgaag

SEQ ID NO: 610407 - DNA, 15 bp, Homo sapiens
tgaaaacactgaaga

SEQ ID NO: 610408 - DNA, 15 bp, Homo sapiens
gaaaacactgaagat

SEQ ID NO: 610409 - DNA, 15 bp, Homo sapiens
aaaacactgaagatc

SEQ ID NO: 610410 - DNA, 15 bp, Homo sapiens
aaacactgaagatca

SEQ ID NO: 610411 - DNA, 15 bp, Homo sapiens
aacactgaagatcag

SEQ ID NO: 610412 - DNA, 15 bp, Homo sapiens
acactgaagatcaga

SEQ ID NO: 610413 - DNA, 15 bp, Homo sapiens
cactgaagatcagaa

SEQ ID NO: 610414 - DNA, 15 bp, Homo sapiens
actgaagatcagaaa

SEQ ID NO: 610415 - DNA, 15 bp, Homo sapiens
ctgaagatcagaaag

SEQ ID NO: 610416 - DNA, 15 bp, Homo sapiens
tgaagatcagaaaga

SEQ ID NO: 610417 - DNA, 15 bp, Homo sapiens
gaagatcagaaagag

SEQ ID NO: 610418 - DNA, 15 bp, Homo sapiens
aagatcagaaagagt

SEQ ID NO: 610419 - DNA, 15 bp, Homo sapiens
agatcagaaagagtc

SEQ ID NO: 610420 - DNA, 15 bp, Homo sapiens
gatcagaaagagtca

SEQ ID NO: 610421 - DNA, 15 bp, Homo sapiens
atcagaaagagtcag

SEQ ID NO: 610422 - DNA, 15 bp, Homo sapiens
tcagaaagagtcagg

SEQ ID NO: 610423 - DNA, 15 bp, Homo sapiens
cagaaagagtcagga

SEQ ID NO: 610424 - DNA, 15 bp, Homo sapiens
agaaagagtcaggaa

SEQ ID NO: 610425 - DNA, 15 bp, Homo sapiens
gaaagagtcaggaac

SEQ ID NO: 610426 - DNA, 15 bp, Homo sapiens
aaagagtcaggaacc

SEQ ID NO: 610427 - DNA, 15 bp, Homo sapiens
aagagtcaggaacct

SEQ ID NO: 610428 - DNA, 15 bp, Homo sapiens
agagtcaggaacctg

SEQ ID NO: 610429 - DNA, 15 bp, Homo sapiens
gagtcaggaacctgc

SEQ ID NO: 610430 - DNA, 15 bp, Homo sapiens
agtcaggaacctgcc

SEQ ID NO: 610431 - DNA, 15 bp, Homo sapiens
gtcaggaacctgccc

SEQ ID NO: 610432 - DNA, 15 bp, Homo sapiens
tcaggaacctgccct

SEQ ID NO: 610433 - DNA, 15 bp, Homo sapiens
caggaacctgcccta

SEQ ID NO: 610434 - DNA, 15 bp, Homo sapiens
aggaacctgccctag

SEQ ID NO: 610435 - DNA, 15 bp, Homo sapiens
ggaacctgccctagg

SEQ ID NO: 610436 - DNA, 15 bp, Homo sapiens
gaacctgccctaggt

SEQ ID NO: 610437 - DNA, 15 bp, Homo sapiens
aacctgccctaggtt

SEQ ID NO: 610438 - DNA, 15 bp, Homo sapiens
acctgccctaggttt

SEQ ID NO: 610439 - DNA, 15 bp, Homo sapiens
cctgccctaggtttg

SEQ ID NO: 610440 - DNA, 15 bp, Homo sapiens
ctgccctaggtttgg

SEQ ID NO: 610441 - DNA, 15 bp, Homo sapiens
tgccctaggtttgga

SEQ ID NO: 610442 - DNA, 15 bp, Homo sapiens
gccctaggtttggaa

SEQ ID NO: 610443 - DNA, 15 bp, Homo sapiens
ccctaggtttggaaa

SEQ ID NO: 610444 - DNA, 15 bp, Homo sapiens
cctaggtttggaaat

SEQ ID NO: 610445 - DNA, 15 bp, Homo sapiens
ctaggtttggaaata

SEQ ID NO: 610446 - DNA, 15 bp, Homo sapiens
taggtttggaaatag

SEQ ID NO: 610447 - DNA, 15 bp, Homo sapiens
aggtttggaaatagt

SEQ ID NO: 610448 - DNA, 15 bp, Homo sapiens
ggtttggaaatagtg

SEQ ID NO: 610449 - DNA, 15 bp, Homo sapiens
gtttggaaatagtgg

SEQ ID NO: 610450 - DNA, 15 bp, Homo sapiens
tttggaaatagtggc

SEQ ID NO: 610451 - DNA, 15 bp, Homo sapiens
ttggaaatagtggca

SEQ ID NO: 610452 - DNA, 15 bp, Homo sapiens
tggaaatagtggcac

SEQ ID NO: 610453 - DNA, 15 bp, Homo sapiens
ggaaatagtggcaca

SEQ ID NO: 610454 - DNA, 15 bp, Homo sapiens
gaaatagtggcacac

SEQ ID NO: 610455 - DNA, 15 bp, Homo sapiens
aaatagtggcacaca

SEQ ID NO: 610456 - DNA, 15 bp, Homo sapiens
aatagtggcacacat

SEQ ID NO: 610457 - DNA, 15 bp, Homo sapiens
atagtggcacacatc

SEQ ID NO: 610458 - DNA, 15 bp, Homo sapiens
tagtggcacacatcg

SEQ ID NO: 610459 - DNA, 15 bp, Homo sapiens
agtggcacacatcgc

SEQ ID NO: 610460 - DNA, 15 bp, Homo sapiens
gtggcacacatcgct

SEQ ID NO: 610461 - DNA, 15 bp, Homo sapiens
tggcacacatcgctt

SEQ ID NO: 610462 - DNA, 15 bp, Homo sapiens
ggcacacatcgcttc

SEQ ID NO: 610463 - DNA, 15 bp, Homo sapiens
gcacacatcgcttct

SEQ ID NO: 610464 - DNA, 15 bp, Homo sapiens
cacacatcgcttctt

SEQ ID NO: 610465 - DNA, 15 bp, Homo sapiens
acacatcgcttctta

SEQ ID NO: 610466 - DNA, 15 bp, Homo sapiens
cacatcgcttcttag

SEQ ID NO: 610467 - DNA, 15 bp, Homo sapiens
acatcgcttcttagc

SEQ ID NO: 610468 - DNA, 15 bp, Homo sapiens
catcgcttcttagcc

SEQ ID NO: 610469 - DNA, 15 bp, Homo sapiens
atcgcttcttagcct

SEQ ID NO: 610470 - DNA, 15 bp, Homo sapiens
tcgcttcttagcctt

SEQ ID NO: 610471 - DNA, 15 bp, Homo sapiens
cgcttcttagccttt

SEQ ID NO: 610472 - DNA, 15 bp, Homo sapiens
gcttcttagcctttt

SEQ ID NO: 610473 - DNA, 15 bp, Homo sapiens
cttcttagccttttg

SEQ ID NO: 610474 - DNA, 15 bp, Homo sapiens
ttcttagccttttgg

SEQ ID NO: 610475 - DNA, 15 bp, Homo sapiens
tcttagccttttggc

SEQ ID NO: 610476 - DNA, 15 bp, Homo sapiens
cttagccttttggct

SEQ ID NO: 610477 - DNA, 15 bp, Homo sapiens
ttagccttttggcta

SEQ ID NO: 610478 - DNA, 15 bp, Homo sapiens
tagccttttggctaa

SEQ ID NO: 610479 - DNA, 15 bp, Homo sapiens
agccttttggctaag

SEQ ID NO: 610480 - DNA, 15 bp, Homo sapiens
gccttttggctaagg

SEQ ID NO: 610481 - DNA, 15 bp, Homo sapiens
ccttttggctaaggt

SEQ ID NO: 610482 - DNA, 15 bp, Homo sapiens
cttttggctaaggtg

SEQ ID NO: 610483 - DNA, 15 bp, Homo sapiens
ttttggctaaggtga

SEQ ID NO: 610484 - DNA, 15 bp, Homo sapiens
tttggctaaggtgaa

SEQ ID NO: 610485 - DNA, 15 bp, Homo sapiens
ttggctaaggtgaag

SEQ ID NO: 610486 - DNA, 15 bp, Homo sapiens
tggctaaggtgaagt

SEQ ID NO: 610487 - DNA, 15 bp, Homo sapiens
ggctaaggtgaagtg

SEQ ID NO: 610488 - DNA, 15 bp, Homo sapiens
gctaaggtgaagtgt

SEQ ID NO: 610489 - DNA, 15 bp, Homo sapiens
ctaaggtgaagtgtg

SEQ ID NO: 610490 - DNA, 15 bp, Homo sapiens
taaggtgaagtgtgg

SEQ ID NO: 610491 - DNA, 15 bp, Homo sapiens
aaggtgaagtgtgga

SEQ ID NO: 610492 - DNA, 15 bp, Homo sapiens
aggtgaagtgtggaa

SEQ ID NO: 610493 - DNA, 15 bp, Homo sapiens
ggtgaagtgtggaaa

SEQ ID NO: 610494 - DNA, 15 bp, Homo sapiens
gtgaagtgtggaaat

SEQ ID NO: 610495 - DNA, 15 bp, Homo sapiens
tgaagtgtggaaata

SEQ ID NO: 610496 - DNA, 15 bp, Homo sapiens
gaagtgtggaaatag

SEQ ID NO: 610497 - DNA, 15 bp, Homo sapiens
aagtgtggaaatagt

SEQ ID NO: 610498 - DNA, 15 bp, Homo sapiens
agtgtggaaatagtg

SEQ ID NO: 610499 - DNA, 15 bp, Homo sapiens
gtgtggaaatagtgg

SEQ ID NO: 610500 - DNA, 15 bp, Homo sapiens
tgtggaaatagtggc

SEQ ID NO: 610501 - DNA, 15 bp, Homo sapiens
gtggaaatagtggca

SEQ ID NO: 610502 - DNA, 15 bp, Homo sapiens
tggaaatagtggcat

SEQ ID NO: 610503 - DNA, 15 bp, Homo sapiens
ggaaatagtggcatg

SEQ ID NO: 610504 - DNA, 15 bp, Homo sapiens
gaaatagtggcatgg

SEQ ID NO: 610505 - DNA, 15 bp, Homo sapiens
aaatagtggcatggc

SEQ ID NO: 610506 - DNA, 15 bp, Homo sapiens
aatagtggcatggca

SEQ ID NO: 610507 - DNA, 15 bp, Homo sapiens
atagtggcatggcag

SEQ ID NO: 610508 - DNA, 15 bp, Homo sapiens
tagtggcatggcaga

SEQ ID NO: 610509 - DNA, 15 bp, Homo sapiens
agtggcatggcagag

SEQ ID NO: 610510 - DNA, 15 bp, Homo sapiens
gtggcatggcagagc

SEQ ID NO: 610511 - DNA, 15 bp, Homo sapiens
tggcatggcagagcc

SEQ ID NO: 610512 - DNA, 15 bp, Homo sapiens
ggcatggcagagcca

SEQ ID NO: 610513 - DNA, 15 bp, Homo sapiens
gcatggcagagccag

SEQ ID NO: 610514 - DNA, 15 bp, Homo sapiens
catggcagagccagg

SEQ ID NO: 610515 - DNA, 15 bp, Homo sapiens
gcagagccaggattc

SEQ ID NO: 610516 - DNA, 15 bp, Homo sapiens
cagagccaggattca

SEQ ID NO: 610517 - DNA, 15 bp, Homo sapiens
agagccaggattcaa

SEQ ID NO: 610518 - DNA, 15 bp, Homo sapiens
gagccaggattcaaa

SEQ ID NO: 610519 - DNA, 15 bp, Homo sapiens
agccaggattcaaat

SEQ ID NO: 610520 - DNA, 15 bp, Homo sapiens
gccaggattcaaatt

SEQ ID NO: 610521 - DNA, 15 bp, Homo sapiens
ccaggattcaaatta

SEQ ID NO: 610522 - DNA, 15 bp, Homo sapiens
caggattcaaattaa

SEQ ID NO: 610523 - DNA, 15 bp, Homo sapiens
aggattcaaattaat

SEQ ID NO: 610524 - DNA, 15 bp, Homo sapiens
ggattcaaattaatt

SEQ ID NO: 610525 - DNA, 15 bp, Homo sapiens
gattcaaattaattc

SEQ ID NO: 610526 - DNA, 15 bp, Homo sapiens
attcaaattaattct

SEQ ID NO: 610527 - DNA, 15 bp, Homo sapiens
ttcaaattaattctg

SEQ ID NO: 610528 - DNA, 15 bp, Homo sapiens
tcaaattaattctgc

SEQ ID NO: 610529 - DNA, 15 bp, Homo sapiens
caaattaattctgca

SEQ ID NO: 610530 - DNA, 15 bp, Homo sapiens
aaattaattctgcat

SEQ ID NO: 610531 - DNA, 15 bp, Homo sapiens
aattaattctgcatt

SEQ ID NO: 610532 - DNA, 15 bp, Homo sapiens
attaattctgcatta

SEQ ID NO: 610533 - DNA, 15 bp, Homo sapiens
ttaattctgcattaa

SEQ ID NO: 610534 - DNA, 15 bp, Homo sapiens
taattctgcattaaa

SEQ ID NO: 610535 - DNA, 15 bp, Homo sapiens
aattctgcattaaag

SEQ ID NO: 610536 - DNA, 15 bp, Homo sapiens
attctgcattaaagc

SEQ ID NO: 610537 - DNA, 15 bp, Homo sapiens
ttctgcattaaagca

SEQ ID NO: 610538 - DNA, 15 bp, Homo sapiens
tctgcattaaagcag

SEQ ID NO: 610539 - DNA, 15 bp, Homo sapiens
ctgcattaaagcaga

SEQ ID NO: 610540 - DNA, 15 bp, Homo sapiens
tgcattaaagcagaa

SEQ ID NO: 610541 - DNA, 15 bp, Homo sapiens
gcattaaagcagaaa

SEQ ID NO: 610542 - DNA, 15 bp, Homo sapiens
cattaaagcagaaag

SEQ ID NO: 610543 - DNA, 15 bp, Homo sapiens
attaaagcagaaagt

SEQ ID NO: 610544 - DNA, 15 bp, Homo sapiens
ttaaagcagaaagta

SEQ ID NO: 610545 - DNA, 15 bp, Homo sapiens
taaagcagaaagtac

SEQ ID NO: 610546 - DNA, 15 bp, Homo sapiens
aaagcagaaagtacc

SEQ ID NO: 610547 - DNA, 15 bp, Homo sapiens
aagcagaaagtaccc

SEQ ID NO: 610548 - DNA, 15 bp, Homo sapiens
agcagaaagtacccc

SEQ ID NO: 610549 - DNA, 15 bp, Homo sapiens
gcagaaagtacccca

SEQ ID NO: 610550 - DNA, 15 bp, Homo sapiens
cagaaagtaccccat

SEQ ID NO: 610551 - DNA, 15 bp, Homo sapiens
agaaagtaccccatt

SEQ ID NO: 610552 - DNA, 15 bp, Homo sapiens
gaaagtaccccattc

SEQ ID NO: 610553 - DNA, 15 bp, Homo sapiens
aaagtaccccattct

SEQ ID NO: 610554 - DNA, 15 bp, Homo sapiens
aagtaccccattctt

SEQ ID NO: 610555 - DNA, 15 bp, Homo sapiens
agtaccccattcttc

SEQ ID NO: 610556 - DNA, 15 bp, Homo sapiens
gtaccccattcttca

SEQ ID NO: 610557 - DNA, 15 bp, Homo sapiens
taccccattcttcat

SEQ ID NO: 610558 - DNA, 15 bp, Homo sapiens
accccattcttcata

SEQ ID NO: 610559 - DNA, 15 bp, Homo sapiens
ccccattcttcatac

SEQ ID NO: 610560 - DNA, 15 bp, Homo sapiens
cccattcttcataca

SEQ ID NO: 610561 - DNA, 15 bp, Homo sapiens
ccattcttcatacac

SEQ ID NO: 610562 - DNA, 15 bp, Homo sapiens
cattcttcatacaca

SEQ ID NO: 610563 - DNA, 15 bp, Homo sapiens
attcttcatacacac

SEQ ID NO: 610564 - DNA, 15 bp, Homo sapiens
ttcttcatacacaca

SEQ ID NO: 610565 - DNA, 15 bp, Homo sapiens
tcttcatacacacag

SEQ ID NO: 610566 - DNA, 15 bp, Homo sapiens
cttcatacacacagg

SEQ ID NO: 610567 - DNA, 15 bp, Homo sapiens
ttcatacacacaggc

SEQ ID NO: 610568 - DNA, 15 bp, Homo sapiens
tcatacacacaggca

SEQ ID NO: 610569 - DNA, 15 bp, Homo sapiens
catacacacaggcaa

SEQ ID NO: 610570 - DNA, 15 bp, Homo sapiens
atacacacaggcaag

SEQ ID NO: 610571 - DNA, 15 bp, Homo sapiens
tacacacaggcaaga

SEQ ID NO: 610572 - DNA, 15 bp, Homo sapiens
acacacaggcaagag

SEQ ID NO: 610573 - DNA, 15 bp, Homo sapiens
cacacaggcaagagc

SEQ ID NO: 610574 - DNA, 15 bp, Homo sapiens
acacaggcaagagcc

SEQ ID NO: 610575 - DNA, 15 bp, Homo sapiens
cacaggcaagagccc

SEQ ID NO: 610576 - DNA, 15 bp, Homo sapiens
acaggcaagagccct

SEQ ID NO: 610577 - DNA, 15 bp, Homo sapiens
caggcaagagccctg

SEQ ID NO: 610578 - DNA, 15 bp, Homo sapiens
aggcaagagccctgg

SEQ ID NO: 610579 - DNA, 15 bp, Homo sapiens
ggcaagagccctggc

SEQ ID NO: 610580 - DNA, 15 bp, Homo sapiens
gcaagagccctggct

SEQ ID NO: 610581 - DNA, 15 bp, Homo sapiens
caagagccctggctc

SEQ ID NO: 610582 - DNA, 15 bp, Homo sapiens
aagagccctggctca

SEQ ID NO: 610583 - DNA, 15 bp, Homo sapiens
agagccctggctcac

SEQ ID NO: 610584 - DNA, 15 bp, Homo sapiens
gagccctggctcact

SEQ ID NO: 610585 - DNA, 15 bp, Homo sapiens
agccctggctcactg

SEQ ID NO: 610586 - DNA, 15 bp, Homo sapiens
gccctggctcactgt

SEQ ID NO: 610587 - DNA, 15 bp, Homo sapiens
ccctggctcactgtg

SEQ ID NO: 610588 - DNA, 15 bp, Homo sapiens
cctggctcactgtgg

SEQ ID NO: 610589 - DNA, 15 bp, Homo sapiens
ctggctcactgtggg

SEQ ID NO: 610590 - DNA, 15 bp, Homo sapiens
tggctcactgtgggg

SEQ ID NO: 610591 - DNA, 15 bp, Homo sapiens
ggctcactgtgggga

SEQ ID NO: 610592 - DNA, 15 bp, Homo sapiens
gctcactgtggggaa

SEQ ID NO: 610593 - DNA, 15 bp, Homo sapiens
ctcactgtggggaag

SEQ ID NO: 610594 - DNA, 15 bp, Homo sapiens
tcactgtggggaagg

SEQ ID NO: 610595 - DNA, 15 bp, Homo sapiens
cactgtggggaaggg

SEQ ID NO: 610596 - DNA, 15 bp, Homo sapiens
actgtggggaagggg

SEQ ID NO: 610597 - DNA, 15 bp, Homo sapiens
ctgtggggaaggggg

SEQ ID NO: 610598 - DNA, 15 bp, Homo sapiens
tgtggggaagggggt

SEQ ID NO: 610599 - DNA, 15 bp, Homo sapiens
gtggggaagggggtg

SEQ ID NO: 610600 - DNA, 15 bp, Homo sapiens
tggggaagggggtgg

SEQ ID NO: 610601 - DNA, 15 bp, Homo sapiens
ggggaagggggtggc

SEQ ID NO: 610602 - DNA, 15 bp, Homo sapiens
gggaagggggtggct

SEQ ID NO: 610603 - DNA, 15 bp, Homo sapiens
ggaagggggtggctt

SEQ ID NO: 610604 - DNA, 15 bp, Homo sapiens
gaagggggtggcttt

SEQ ID NO: 610605 - DNA, 15 bp, Homo sapiens
aagggggtggctttc

SEQ ID NO: 610606 - DNA, 15 bp, Homo sapiens
agggggtggctttct

SEQ ID NO: 610607 - DNA, 15 bp, Homo sapiens
gggggtggctttctg

SEQ ID NO: 610608 - DNA, 15 bp, Homo sapiens
ggggtggctttctgg

SEQ ID NO: 610609 - DNA, 15 bp, Homo sapiens
gggtggctttctggt

SEQ ID NO: 610610 - DNA, 15 bp, Homo sapiens
ggtggctttctggtg

SEQ ID NO: 610611 - DNA, 15 bp, Homo sapiens
gtggctttctggtgc

SEQ ID NO: 610612 - DNA, 15 bp, Homo sapiens
tggctttctggtgct

SEQ ID NO: 610613 - DNA, 15 bp, Homo sapiens
ggctttctggtgcta

SEQ ID NO: 610614 - DNA, 15 bp, Homo sapiens
gctttctggtgctag

SEQ ID NO: 610615 - DNA, 15 bp, Homo sapiens
ctttctggtgctagg

SEQ ID NO: 610616 - DNA, 15 bp, Homo sapiens
tttctggtgctagga

SEQ ID NO: 610617 - DNA, 15 bp, Homo sapiens
ttctggtgctaggat

SEQ ID NO: 610618 - DNA, 15 bp, Homo sapiens
tctggtgctaggatg

SEQ ID NO: 610619 - DNA, 15 bp, Homo sapiens
ctggtgctaggatgg

SEQ ID NO: 610620 - DNA, 15 bp, Homo sapiens
tggtgctaggatggg

SEQ ID NO: 610621 - DNA, 15 bp, Homo sapiens
ggtgctaggatggga

SEQ ID NO: 610622 - DNA, 15 bp, Homo sapiens
gtgctaggatgggag

SEQ ID NO: 610623 - DNA, 15 bp, Homo sapiens
tgctaggatgggaga

SEQ ID NO: 610624 - DNA, 15 bp, Homo sapiens
gctaggatgggagaa

SEQ ID NO: 610625 - DNA, 15 bp, Homo sapiens
ctaggatgggagaag

SEQ ID NO: 610626 - DNA, 15 bp, Homo sapiens
taggatgggagaagg

SEQ ID NO: 610627 - DNA, 15 bp, Homo sapiens
aggatgggagaaggg

SEQ ID NO: 610628 - DNA, 15 bp, Homo sapiens
ggatgggagaagggg

SEQ ID NO: 610629 - DNA, 15 bp, Homo sapiens
gatgggagaaggggg

SEQ ID NO: 610630 - DNA, 15 bp, Homo sapiens
atgggagaagggggt

SEQ ID NO: 610631 - DNA, 15 bp, Homo sapiens
tgggagaagggggtt

SEQ ID NO: 610632 - DNA, 15 bp, Homo sapiens
gggagaagggggttc

SEQ ID NO: 610633 - DNA, 15 bp, Homo sapiens
ggagaagggggttct

SEQ ID NO: 610634 - DNA, 15 bp, Homo sapiens
gagaagggggttctc

SEQ ID NO: 610635 - DNA, 15 bp, Homo sapiens
agaagggggttctcg

SEQ ID NO: 610636 - DNA, 15 bp, Homo sapiens
gaagggggttctcgc

SEQ ID NO: 610637 - DNA, 15 bp, Homo sapiens
aagggggttctcgct

SEQ ID NO: 610638 - DNA, 15 bp, Homo sapiens
agggggttctcgctg

SEQ ID NO: 610639 - DNA, 15 bp, Homo sapiens
gggggttctcgctgg

SEQ ID NO: 610640 - DNA, 15 bp, Homo sapiens
ggggttctcgctggc

SEQ ID NO: 610641 - DNA, 15 bp, Homo sapiens
gggttctcgctggcc

SEQ ID NO: 610642 - DNA, 15 bp, Homo sapiens
ggttctcgctggccc

SEQ ID NO: 610643 - DNA, 15 bp, Homo sapiens
gttctcgctggcccc

SEQ ID NO: 610644 - DNA, 15 bp, Homo sapiens
ttctcgctggcccca

SEQ ID NO: 610645 - DNA, 15 bp, Homo sapiens
tctcgctggccccac

SEQ ID NO: 610646 - DNA, 15 bp, Homo sapiens
ctcgctggccccaca

SEQ ID NO: 610647 - DNA, 15 bp, Homo sapiens
tcgctggccccacac

SEQ ID NO: 610648 - DNA, 15 bp, Homo sapiens
cgctggccccacaca

SEQ ID NO: 610649 - DNA, 15 bp, Homo sapiens
gctggccccacacac

SEQ ID NO: 610650 - DNA, 15 bp, Homo sapiens
ctggccccacacact

SEQ ID NO: 610651 - DNA, 15 bp, Homo sapiens
tggccccacacactc

SEQ ID NO: 610652 - DNA, 15 bp, Homo sapiens
ggccccacacactct

SEQ ID NO: 610653 - DNA, 15 bp, Homo sapiens
gccccacacactctc

SEQ ID NO: 610654 - DNA, 15 bp, Homo sapiens
ccccacacactctcc

SEQ ID NO: 610655 - DNA, 15 bp, Homo sapiens
cccacacactctcct

SEQ ID NO: 610656 - DNA, 15 bp, Homo sapiens
ccacacactctcctg

SEQ ID NO: 610657 - DNA, 15 bp, Homo sapiens
cacacactctcctga

SEQ ID NO: 610658 - DNA, 15 bp, Homo sapiens
acacactctcctgaa

SEQ ID NO: 610659 - DNA, 15 bp, Homo sapiens
cacactctcctgaaa

SEQ ID NO: 610660 - DNA, 15 bp, Homo sapiens
acactctcctgaaaa

SEQ ID NO: 610661 - DNA, 15 bp, Homo sapiens
cactctcctgaaaat

SEQ ID NO: 610662 - DNA, 15 bp, Homo sapiens
actctcctgaaaatg

SEQ ID NO: 610663 - DNA, 15 bp, Homo sapiens
ctctcctgaaaatgt

SEQ ID NO: 610664 - DNA, 15 bp, Homo sapiens
tctcctgaaaatgtc

SEQ ID NO: 610665 - DNA, 15 bp, Homo sapiens
ctcctgaaaatgtct

SEQ ID NO: 610666 - DNA, 15 bp, Homo sapiens
tcctgaaaatgtctg

SEQ ID NO: 610667 - DNA, 15 bp, Homo sapiens
cctgaaaatgtctgc

SEQ ID NO: 610668 - DNA, 15 bp, Homo sapiens
ctgaaaatgtctgca

SEQ ID NO: 610669 - DNA, 15 bp, Homo sapiens
tgaaaatgtctgcag

SEQ ID NO: 610670 - DNA, 15 bp, Homo sapiens
gaaaatgtctgcagg

SEQ ID NO: 610671 - DNA, 15 bp, Homo sapiens
aaaatgtctgcagga

SEQ ID NO: 610672 - DNA, 15 bp, Homo sapiens
aaatgtctgcaggac

SEQ ID NO: 610673 - DNA, 15 bp, Homo sapiens
aatgtctgcaggaca

SEQ ID NO: 610674 - DNA, 15 bp, Homo sapiens
atgtctgcaggacag

SEQ ID NO: 610675 - DNA, 15 bp, Homo sapiens
tgtctgcaggacagc

SEQ ID NO: 610676 - DNA, 15 bp, Homo sapiens
gtctgcaggacagca

SEQ ID NO: 610677 - DNA, 15 bp, Homo sapiens
tctgcaggacagcag

SEQ ID NO: 610678 - DNA, 15 bp, Homo sapiens
ctgcaggacagcagg

SEQ ID NO: 610679 - DNA, 15 bp, Homo sapiens
tgcaggacagcaggc

SEQ ID NO: 610680 - DNA, 15 bp, Homo sapiens
gcaggacagcaggcc

SEQ ID NO: 610681 - DNA, 15 bp, Homo sapiens
caggacagcaggcct

SEQ ID NO: 610682 - DNA, 15 bp, Homo sapiens
aggacagcaggcctc

SEQ ID NO: 610683 - DNA, 15 bp, Homo sapiens
ggacagcaggcctcc

SEQ ID NO: 610684 - DNA, 15 bp, Homo sapiens
gacagcaggcctccc

SEQ ID NO: 610685 - DNA, 15 bp, Homo sapiens
acagcaggcctccct

SEQ ID NO: 610686 - DNA, 15 bp, Homo sapiens
cagcaggcctccctc

SEQ ID NO: 610687 - DNA, 15 bp, Homo sapiens
agcaggcctccctcc

SEQ ID NO: 610688 - DNA, 15 bp, Homo sapiens
gcaggcctccctccc

SEQ ID NO: 610689 - DNA, 15 bp, Homo sapiens
caggcctccctccca

SEQ ID NO: 610690 - DNA, 15 bp, Homo sapiens
aggcctccctcccat

SEQ ID NO: 610691 - DNA, 15 bp, Homo sapiens
ggcctccctcccatc

SEQ ID NO: 610692 - DNA, 15 bp, Homo sapiens
gcctccctcccatcc

SEQ ID NO: 610693 - DNA, 15 bp, Homo sapiens
cctccctcccatccc

SEQ ID NO: 610694 - DNA, 15 bp, Homo sapiens
ctccctcccatccct

SEQ ID NO: 610695 - DNA, 15 bp, Homo sapiens
tccctcccatccctg

SEQ ID NO: 610696 - DNA, 15 bp, Homo sapiens
ccctcccatccctga

SEQ ID NO: 610697 - DNA, 15 bp, Homo sapiens
cctcccatccctgag

SEQ ID NO: 610698 - DNA, 15 bp, Homo sapiens
ctcccatccctgaga

SEQ ID NO: 610699 - DNA, 15 bp, Homo sapiens
tcccatccctgagat

SEQ ID NO: 610700 - DNA, 15 bp, Homo sapiens
cccatccctgagatg

SEQ ID NO: 610701 - DNA, 15 bp, Homo sapiens
ccatccctgagatgg

SEQ ID NO: 610702 - DNA, 15 bp, Homo sapiens
catccctgagatggt

SEQ ID NO: 610703 - DNA, 15 bp, Homo sapiens
atccctgagatggtc

SEQ ID NO: 610704 - DNA, 15 bp, Homo sapiens
tccctgagatggtca

SEQ ID NO: 610705 - DNA, 15 bp, Homo sapiens
ccctgagatggtcag

SEQ ID NO: 610706 - DNA, 15 bp, Homo sapiens
cctgagatggtcagc

SEQ ID NO: 610707 - DNA, 15 bp, Homo sapiens
ctgagatggtcagct

SEQ ID NO: 610708 - DNA, 15 bp, Homo sapiens
tgagatggtcagctc

SEQ ID NO: 610709 - DNA, 15 bp, Homo sapiens
gagatggtcagctcc

SEQ ID NO: 610710 - DNA, 15 bp, Homo sapiens
agatggtcagctcct

SEQ ID NO: 610711 - DNA, 15 bp, Homo sapiens
gatggtcagctcctg

SEQ ID NO: 610712 - DNA, 15 bp, Homo sapiens
atggtcagctcctgg

SEQ ID NO: 610713 - DNA, 15 bp, Homo sapiens
tggtcagctcctggg

SEQ ID NO: 610714 - DNA, 15 bp, Homo sapiens
ggtcagctcctggga

SEQ ID NO: 610715 - DNA, 15 bp, Homo sapiens
gtcagctcctgggag

SEQ ID NO: 610716 - DNA, 15 bp, Homo sapiens
tcagctcctgggagg

SEQ ID NO: 610717 - DNA, 15 bp, Homo sapiens
cagctcctgggagga

SEQ ID NO: 610718 - DNA, 15 bp, Homo sapiens
agctcctgggaggag

SEQ ID NO: 610719 - DNA, 15 bp, Homo sapiens
gctcctgggaggagg

SEQ ID NO: 610720 - DNA, 15 bp, Homo sapiens
ctcctgggaggaggg

SEQ ID NO: 610721 - DNA, 15 bp, Homo sapiens
tcctgggaggagggc

SEQ ID NO: 610722 - DNA, 15 bp, Homo sapiens
cctgggaggagggca

SEQ ID NO: 610723 - DNA, 15 bp, Homo sapiens
ctgggaggagggcat

SEQ ID NO: 610724 - DNA, 15 bp, Homo sapiens
tgggaggagggcatg

SEQ ID NO: 610725 - DNA, 15 bp, Homo sapiens
gggaggagggcatgg

SEQ ID NO: 610726 - DNA, 15 bp, Homo sapiens
ggaggagggcatggc

SEQ ID NO: 610727 - DNA, 15 bp, Homo sapiens
gaggagggcatggct

SEQ ID NO: 610728 - DNA, 15 bp, Homo sapiens
aggagggcatggctg

SEQ ID NO: 610729 - DNA, 15 bp, Homo sapiens
ggagggcatggctgt

SEQ ID NO: 610730 - DNA, 15 bp, Homo sapiens
gagggcatggctgtg

SEQ ID NO: 610731 - DNA, 15 bp, Homo sapiens
agggcatggctgtgt

SEQ ID NO: 610732 - DNA, 15 bp, Homo sapiens
gggcatggctgtgtt

SEQ ID NO: 610733 - DNA, 15 bp, Homo sapiens
ggcatggctgtgttc

SEQ ID NO: 610734 - DNA, 15 bp, Homo sapiens
gcatggctgtgttca

SEQ ID NO: 610735 - DNA, 15 bp, Homo sapiens
catggctgtgttcat

SEQ ID NO: 610736 - DNA, 15 bp, Homo sapiens
atggctgtgttcatg

SEQ ID NO: 610737 - DNA, 15 bp, Homo sapiens
tggctgtgttcatgg

SEQ ID NO: 610738 - DNA, 15 bp, Homo sapiens
ggctgtgttcatggg

SEQ ID NO: 610739 - DNA, 15 bp, Homo sapiens
gctgtgttcatgggc

SEQ ID NO: 610740 - DNA, 15 bp, Homo sapiens
ctgtgttcatgggca

SEQ ID NO: 610741 - DNA, 15 bp, Homo sapiens
tgtgttcatgggcac

SEQ ID NO: 610742 - DNA, 15 bp, Homo sapiens
gtgttcatgggcacc

SEQ ID NO: 610743 - DNA, 15 bp, Homo sapiens
tgttcatgggcacct

SEQ ID NO: 610744 - DNA, 15 bp, Homo sapiens
gttcatgggcacctg

SEQ ID NO: 610745 - DNA, 15 bp, Homo sapiens
ttcatgggcacctgg

SEQ ID NO: 610746 - DNA, 15 bp, Homo sapiens
tcatgggcacctgga

SEQ ID NO: 610747 - DNA, 15 bp, Homo sapiens
catgggcacctggaa

SEQ ID NO: 610748 - DNA, 15 bp, Homo sapiens
atgggcacctggaaa

SEQ ID NO: 610749 - DNA, 15 bp, Homo sapiens
tgggcacctggaaaa

SEQ ID NO: 610750 - DNA, 15 bp, Homo sapiens
gggcacctggaaaag

SEQ ID NO: 610751 - DNA, 15 bp, Homo sapiens
ggcacctggaaaagg

SEQ ID NO: 610752 - DNA, 15 bp, Homo sapiens
gcacctggaaaaggc

SEQ ID NO: 610753 - DNA, 15 bp, Homo sapiens
cacctggaaaaggcc

SEQ ID NO: 610754 - DNA, 15 bp, Homo sapiens
acctggaaaaggccc

SEQ ID NO: 610755 - DNA, 15 bp, Homo sapiens
cctggaaaaggcccc

SEQ ID NO: 610756 - DNA, 15 bp, Homo sapiens
ctggaaaaggcccct

SEQ ID NO: 610757 - DNA, 15 bp, Homo sapiens
tggaaaaggcccctt

SEQ ID NO: 610758 - DNA, 15 bp, Homo sapiens
ggaaaaggccccttc

SEQ ID NO: 610759 - DNA, 15 bp, Homo sapiens
gaaaaggccccttcc

SEQ ID NO: 610760 - DNA, 15 bp, Homo sapiens
aaaaggccccttcca

SEQ ID NO: 610761 - DNA, 15 bp, Homo sapiens
aaaggccccttccac

SEQ ID NO: 610762 - DNA, 15 bp, Homo sapiens
aaggccccttccacc

SEQ ID NO: 610763 - DNA, 15 bp, Homo sapiens
aggccccttccacca

SEQ ID NO: 610764 - DNA, 15 bp, Homo sapiens
ggccccttccaccaa

SEQ ID NO: 610765 - DNA, 15 bp, Homo sapiens
gccccttccaccaag

SEQ ID NO: 610766 - DNA, 15 bp, Homo sapiens
ccccttccaccaagg

SEQ ID NO: 610767 - DNA, 15 bp, Homo sapiens
cccttccaccaaggt

SEQ ID NO: 610768 - DNA, 15 bp, Homo sapiens
ccttccaccaaggta

SEQ ID NO: 610769 - DNA, 15 bp, Homo sapiens
cttccaccaaggtac

SEQ ID NO: 610770 - DNA, 15 bp, Homo sapiens
ttccaccaaggtact

SEQ ID NO: 610771 - DNA, 15 bp, Homo sapiens
tccaccaaggtactc

SEQ ID NO: 610772 - DNA, 15 bp, Homo sapiens
ccaccaaggtactca

SEQ ID NO: 610773 - DNA, 15 bp, Homo sapiens
caccaaggtactcag

SEQ ID NO: 610774 - DNA, 15 bp, Homo sapiens
accaaggtactcagc

SEQ ID NO: 610775 - DNA, 15 bp, Homo sapiens
ccaaggtactcagct

SEQ ID NO: 610776 - DNA, 15 bp, Homo sapiens
caaggtactcagctt

SEQ ID NO: 610777 - DNA, 15 bp, Homo sapiens
aaggtactcagcttt

SEQ ID NO: 610778 - DNA, 15 bp, Homo sapiens
aggtactcagctttg

SEQ ID NO: 610779 - DNA, 15 bp, Homo sapiens
ggtactcagctttgg

SEQ ID NO: 610780 - DNA, 15 bp, Homo sapiens
gtactcagctttgga

SEQ ID NO: 610781 - DNA, 15 bp, Homo sapiens
tactcagctttggaa

SEQ ID NO: 610782 - DNA, 15 bp, Homo sapiens
actcagctttggaat

SEQ ID NO: 610783 - DNA, 15 bp, Homo sapiens
ctcagctttggaatc

SEQ ID NO: 610784 - DNA, 15 bp, Homo sapiens
tcagctttggaatcc

SEQ ID NO: 610785 - DNA, 15 bp, Homo sapiens
cagctttggaatccc

SEQ ID NO: 610786 - DNA, 15 bp, Homo sapiens
agctttggaatccca

SEQ ID NO: 610787 - DNA, 15 bp, Homo sapiens
gctttggaatcccag

SEQ ID NO: 610788 - DNA, 15 bp, Homo sapiens
ctttggaatcccaga

SEQ ID NO: 610789 - DNA, 15 bp, Homo sapiens
tttggaatcccagag

SEQ ID NO: 610790 - DNA, 15 bp, Homo sapiens
ttggaatcccagagc

SEQ ID NO: 610791 - DNA, 15 bp, Homo sapiens
tggaatcccagagct

SEQ ID NO: 610792 - DNA, 15 bp, Homo sapiens
ggaatcccagagctc

SEQ ID NO: 610793 - DNA, 15 bp, Homo sapiens
gaatcccagagctca

SEQ ID NO: 610794 - DNA, 15 bp, Homo sapiens
aatcccagagctcag

SEQ ID NO: 610795 - DNA, 15 bp, Homo sapiens
atcccagagctcagg

SEQ ID NO: 610796 - DNA, 15 bp, Homo sapiens
tcccagagctcaggg

SEQ ID NO: 610797 - DNA, 15 bp, Homo sapiens
cccagagctcaggga

SEQ ID NO: 610798 - DNA, 15 bp, Homo sapiens
ccagagctcagggat

SEQ ID NO: 610799 - DNA, 15 bp, Homo sapiens
cagagctcagggatg

SEQ ID NO: 610800 - DNA, 15 bp, Homo sapiens
agagctcagggatgt

SEQ ID NO: 610801 - DNA, 15 bp, Homo sapiens
gagctcagggatgtt

SEQ ID NO: 610802 - DNA, 15 bp, Homo sapiens
agctcagggatgttg

SEQ ID NO: 610803 - DNA, 15 bp, Homo sapiens
gctcagggatgttgg

SEQ ID NO: 610804 - DNA, 15 bp, Homo sapiens
ctcagggatgttgga

SEQ ID NO: 610805 - DNA, 15 bp, Homo sapiens
tcagggatgttggag

SEQ ID NO: 610806 - DNA, 15 bp, Homo sapiens
cagggatgttggagt

SEQ ID NO: 610807 - DNA, 15 bp, Homo sapiens
agggatgttggagtc

SEQ ID NO: 610808 - DNA, 15 bp, Homo sapiens
gggatgttggagtca

SEQ ID NO: 610809 - DNA, 15 bp, Homo sapiens
ggatgttggagtcag

SEQ ID NO: 610810 - DNA, 15 bp, Homo sapiens
gatgttggagtcagc

SEQ ID NO: 610811 - DNA, 15 bp, Homo sapiens
atgttggagtcagca

SEQ ID NO: 610812 - DNA, 15 bp, Homo sapiens
tgttggagtcagcac

SEQ ID NO: 610813 - DNA, 15 bp, Homo sapiens
gttggagtcagcaca

SEQ ID NO: 610814 - DNA, 15 bp, Homo sapiens
ttggagtcagcacat

SEQ ID NO: 610815 - DNA, 15 bp, Homo sapiens
tggagtcagcacatt

SEQ ID NO: 610816 - DNA, 15 bp, Homo sapiens
ggagtcagcacatta

SEQ ID NO: 610817 - DNA, 15 bp, Homo sapiens
gagtcagcacattaa

SEQ ID NO: 610818 - DNA, 15 bp, Homo sapiens
agtcagcacattaat

SEQ ID NO: 610819 - DNA, 15 bp, Homo sapiens
gtcagcacattaata

SEQ ID NO: 610820 - DNA, 15 bp, Homo sapiens
tcagcacattaatag

SEQ ID NO: 610821 - DNA, 15 bp, Homo sapiens
cagcacattaatagg

SEQ ID NO: 610822 - DNA, 15 bp, Homo sapiens
agcacattaataggc

SEQ ID NO: 610823 - DNA, 15 bp, Homo sapiens
gcacattaataggct

SEQ ID NO: 610824 - DNA, 15 bp, Homo sapiens
cacattaataggctt

SEQ ID NO: 610825 - DNA, 15 bp, Homo sapiens
acattaataggcttg

SEQ ID NO: 610826 - DNA, 15 bp, Homo sapiens
cattaataggcttgt

SEQ ID NO: 610827 - DNA, 15 bp, Homo sapiens
attaataggcttgtc

SEQ ID NO: 610828 - DNA, 15 bp, Homo sapiens
ttaataggcttgtct

SEQ ID NO: 610829 - DNA, 15 bp, Homo sapiens
taataggcttgtctt

SEQ ID NO: 610830 - DNA, 15 bp, Homo sapiens
aataggcttgtcttt

SEQ ID NO: 610831 - DNA, 15 bp, Homo sapiens
ataggcttgtctttt

SEQ ID NO: 610832 - DNA, 15 bp, Homo sapiens
taggcttgtcttttt

SEQ ID NO: 610833 - DNA, 15 bp, Homo sapiens
aggcttgtctttttc

SEQ ID NO: 610834 - DNA, 15 bp, Homo sapiens
ggcttgtctttttct

SEQ ID NO: 610835 - DNA, 15 bp, Homo sapiens
gcttgtctttttcta

SEQ ID NO: 610836 - DNA, 15 bp, Homo sapiens
cttgtctttttctat

SEQ ID NO: 610837 - DNA, 15 bp, Homo sapiens
ttgtctttttctatg

SEQ ID NO: 610838 - DNA, 15 bp, Homo sapiens
tgtctttttctatgg

SEQ ID NO: 610839 - DNA, 15 bp, Homo sapiens
gtctttttctatggg

SEQ ID NO: 610840 - DNA, 15 bp, Homo sapiens
tctttttctatgggt

SEQ ID NO: 610841 - DNA, 15 bp, Homo sapiens
ctttttctatgggtg

SEQ ID NO: 610842 - DNA, 15 bp, Homo sapiens
tttttctatgggtgt

SEQ ID NO: 610843 - DNA, 15 bp, Homo sapiens
ttttctatgggtgtg

SEQ ID NO: 610844 - DNA, 15 bp, Homo sapiens
tttctatgggtgtgg

SEQ ID NO: 610845 - DNA, 15 bp, Homo sapiens
ttctatgggtgtggg

SEQ ID NO: 610846 - DNA, 15 bp, Homo sapiens
tctatgggtgtgggg

SEQ ID NO: 610847 - DNA, 15 bp, Homo sapiens
ctatgggtgtggggg

SEQ ID NO: 610848 - DNA, 15 bp, Homo sapiens
tatgggtgtggggga

SEQ ID NO: 610849 - DNA, 15 bp, Homo sapiens
atgggtgtgggggat

SEQ ID NO: 610850 - DNA, 15 bp, Homo sapiens
tgggtgtgggggatg

SEQ ID NO: 610851 - DNA, 15 bp, Homo sapiens
gggtgtgggggatgc

SEQ ID NO: 610852 - DNA, 15 bp, Homo sapiens
ggtgtgggggatgca

SEQ ID NO: 610853 - DNA, 15 bp, Homo sapiens
gtgtgggggatgcag

SEQ ID NO: 610854 - DNA, 15 bp, Homo sapiens
tgtgggggatgcaga

SEQ ID NO: 610855 - DNA, 15 bp, Homo sapiens
gtgggggatgcagaa

SEQ ID NO: 610856 - DNA, 15 bp, Homo sapiens
tgggggatgcagaaa

SEQ ID NO: 610857 - DNA, 15 bp, Homo sapiens
gggggatgcagaaag

SEQ ID NO: 610858 - DNA, 15 bp, Homo sapiens
ggggatgcagaaagg

SEQ ID NO: 610859 - DNA, 15 bp, Homo sapiens
gggatgcagaaagga

SEQ ID NO: 610860 - DNA, 15 bp, Homo sapiens
ggatgcagaaaggac

SEQ ID NO: 610861 - DNA, 15 bp, Homo sapiens
gatgcagaaaggaca

SEQ ID NO: 610862 - DNA, 15 bp, Homo sapiens
atgcagaaaggacag

SEQ ID NO: 610863 - DNA, 15 bp, Homo sapiens
tgcagaaaggacagt

SEQ ID NO: 610864 - DNA, 15 bp, Homo sapiens
gcagaaaggacagtg

SEQ ID NO: 610865 - DNA, 15 bp, Homo sapiens
cagaaaggacagtgg

SEQ ID NO: 610866 - DNA, 15 bp, Homo sapiens
agaaaggacagtggg

SEQ ID NO: 610867 - DNA, 15 bp, Homo sapiens
gaaaggacagtgggt

SEQ ID NO: 610868 - DNA, 15 bp, Homo sapiens
aaaggacagtgggtg

SEQ ID NO: 610869 - DNA, 15 bp, Homo sapiens
aaggacagtgggtgg

SEQ ID NO: 610870 - DNA, 15 bp, Homo sapiens
aggacagtgggtggg

SEQ ID NO: 610871 - DNA, 15 bp, Homo sapiens
ggacagtgggtgggg

SEQ ID NO: 610872 - DNA, 15 bp, Homo sapiens
gacagtgggtgggga

SEQ ID NO: 610873 - DNA, 15 bp, Homo sapiens
acagtgggtggggac

SEQ ID NO: 610874 - DNA, 15 bp, Homo sapiens
cagtgggtggggacc

SEQ ID NO: 610875 - DNA, 15 bp, Homo sapiens
agtgggtggggacct

SEQ ID NO: 610876 - DNA, 15 bp, Homo sapiens
gtgggtggggacctg

SEQ ID NO: 610877 - DNA, 15 bp, Homo sapiens
tgggtggggacctgg

SEQ ID NO: 610878 - DNA, 15 bp, Homo sapiens
gggtggggacctggg

SEQ ID NO: 610879 - DNA, 15 bp, Homo sapiens
ggtggggacctgggt

SEQ ID NO: 610880 - DNA, 15 bp, Homo sapiens
gtggggacctgggtg

SEQ ID NO: 610881 - DNA, 15 bp, Homo sapiens
tggggacctgggtgt

SEQ ID NO: 610882 - DNA, 15 bp, Homo sapiens
ggggacctgggtgtt

SEQ ID NO: 610883 - DNA, 15 bp, Homo sapiens
gggacctgggtgttt

SEQ ID NO: 610884 - DNA, 15 bp, Homo sapiens
ggacctgggtgtttc

SEQ ID NO: 610885 - DNA, 15 bp, Homo sapiens
gacctgggtgtttca

SEQ ID NO: 610886 - DNA, 15 bp, Homo sapiens
acctgggtgtttcaa

SEQ ID NO: 610887 - DNA, 15 bp, Homo sapiens
cctgggtgtttcaag

SEQ ID NO: 610888 - DNA, 15 bp, Homo sapiens
ctgggtgtttcaagg

SEQ ID NO: 610889 - DNA, 15 bp, Homo sapiens
tgggtgtttcaagga

SEQ ID NO: 610890 - DNA, 15 bp, Homo sapiens
gggtgtttcaaggag

SEQ ID NO: 610891 - DNA, 15 bp, Homo sapiens
ggtgtttcaaggagc

SEQ ID NO: 610892 - DNA, 15 bp, Homo sapiens
gtgtttcaaggagct

SEQ ID NO: 610893 - DNA, 15 bp, Homo sapiens
tgtttcaaggagcta

SEQ ID NO: 610894 - DNA, 15 bp, Homo sapiens
gtttcaaggagctat

SEQ ID NO: 610895 - DNA, 15 bp, Homo sapiens
tttcaaggagctatg

SEQ ID NO: 610896 - DNA, 15 bp, Homo sapiens
ttcaaggagctatga

SEQ ID NO: 610897 - DNA, 15 bp, Homo sapiens
tcaaggagctatgag

SEQ ID NO: 610898 - DNA, 15 bp, Homo sapiens
caaggagctatgaga

SEQ ID NO: 610899 - DNA, 15 bp, Homo sapiens
aaggagctatgagat

SEQ ID NO: 610900 - DNA, 15 bp, Homo sapiens
aggagctatgagatg

SEQ ID NO: 610901 - DNA, 15 bp, Homo sapiens
ggagctatgagatgg

SEQ ID NO: 610902 - DNA, 15 bp, Homo sapiens
gagctatgagatggc

SEQ ID NO: 610903 - DNA, 15 bp, Homo sapiens
agctatgagatggct

SEQ ID NO: 610904 - DNA, 15 bp, Homo sapiens
gctatgagatggctc

SEQ ID NO: 610905 - DNA, 15 bp, Homo sapiens
ctatgagatggctca

SEQ ID NO: 610906 - DNA, 15 bp, Homo sapiens
tatgagatggctcaa

SEQ ID NO: 610907 - DNA, 15 bp, Homo sapiens
atgagatggctcaaa

SEQ ID NO: 610908 - DNA, 15 bp, Homo sapiens
tgagatggctcaaag

SEQ ID NO: 610909 - DNA, 15 bp, Homo sapiens
gagatggctcaaaga

SEQ ID NO: 610910 - DNA, 15 bp, Homo sapiens
agatggctcaaagaa

SEQ ID NO: 610911 - DNA, 15 bp, Homo sapiens
gatggctcaaagaag

SEQ ID NO: 610912 - DNA, 15 bp, Homo sapiens
atggctcaaagaagc

SEQ ID NO: 610913 - DNA, 15 bp, Homo sapiens
tggctcaaagaagca

SEQ ID NO: 610914 - DNA, 15 bp, Homo sapiens
ggctcaaagaagcaa

SEQ ID NO: 610915 - DNA, 15 bp, Homo sapiens
gctcaaagaagcaat

SEQ ID NO: 610916 - DNA, 15 bp, Homo sapiens
ctcaaagaagcaatg

SEQ ID NO: 610917 - DNA, 15 bp, Homo sapiens
tcaaagaagcaatgt

SEQ ID NO: 610918 - DNA, 15 bp, Homo sapiens
caaagaagcaatgtg

SEQ ID NO: 610919 - DNA, 15 bp, Homo sapiens
aaagaagcaatgtga

SEQ ID NO: 610920 - DNA, 15 bp, Homo sapiens
aagaagcaatgtgat

SEQ ID NO: 610921 - DNA, 15 bp, Homo sapiens
agaagcaatgtgatg

SEQ ID NO: 610922 - DNA, 15 bp, Homo sapiens
gaagcaatgtgatgt

SEQ ID NO: 610923 - DNA, 15 bp, Homo sapiens
aagcaatgtgatgta

SEQ ID NO: 610924 - DNA, 15 bp, Homo sapiens
agcaatgtgatgtag

SEQ ID NO: 610925 - DNA, 15 bp, Homo sapiens
gcaatgtgatgtagc

SEQ ID NO: 610926 - DNA, 15 bp, Homo sapiens
caatgtgatgtagca

SEQ ID NO: 610927 - DNA, 15 bp, Homo sapiens
aatgtgatgtagcag

SEQ ID NO: 610928 - DNA, 15 bp, Homo sapiens
atgtgatgtagcaga

SEQ ID NO: 610929 - DNA, 15 bp, Homo sapiens
tgtgatgtagcagaa

SEQ ID NO: 610930 - DNA, 15 bp, Homo sapiens
gtgatgtagcagaaa

SEQ ID NO: 610931 - DNA, 15 bp, Homo sapiens
tgatgtagcagaaaa

SEQ ID NO: 610932 - DNA, 15 bp, Homo sapiens
gatgtagcagaaaag

SEQ ID NO: 610933 - DNA, 15 bp, Homo sapiens
atgtagcagaaaaga

SEQ ID NO: 610934 - DNA, 15 bp, Homo sapiens
tgtagcagaaaagat

SEQ ID NO: 610935 - DNA, 15 bp, Homo sapiens
gtagcagaaaagatg

SEQ ID NO: 610936 - DNA, 15 bp, Homo sapiens
tagcagaaaagatgc

SEQ ID NO: 610937 - DNA, 15 bp, Homo sapiens
agcagaaaagatgca

SEQ ID NO: 610938 - DNA, 15 bp, Homo sapiens
gcagaaaagatgcaa

SEQ ID NO: 610939 - DNA, 15 bp, Homo sapiens
cagaaaagatgcaag

SEQ ID NO: 610940 - DNA, 15 bp, Homo sapiens
agaaaagatgcaagg

SEQ ID NO: 610941 - DNA, 15 bp, Homo sapiens
gaaaagatgcaagga

SEQ ID NO: 610942 - DNA, 15 bp, Homo sapiens
aaaagatgcaaggat

SEQ ID NO: 610943 - DNA, 15 bp, Homo sapiens
aaagatgcaaggatg

SEQ ID NO: 610944 - DNA, 15 bp, Homo sapiens
aagatgcaaggatgc

SEQ ID NO: 610945 - DNA, 15 bp, Homo sapiens
agatgcaaggatgca

SEQ ID NO: 610946 - DNA, 15 bp, Homo sapiens
gatgcaaggatgcag

SEQ ID NO: 610947 - DNA, 15 bp, Homo sapiens
atgcaaggatgcagg

SEQ ID NO: 610948 - DNA, 15 bp, Homo sapiens
tgcaaggatgcaggc

SEQ ID NO: 610949 - DNA, 15 bp, Homo sapiens
gcaaggatgcaggct

SEQ ID NO: 610950 - DNA, 15 bp, Homo sapiens
caaggatgcaggctt

SEQ ID NO: 610951 - DNA, 15 bp, Homo sapiens
aaggatgcaggcttt

SEQ ID NO: 610952 - DNA, 15 bp, Homo sapiens
aggatgcaggctttg

SEQ ID NO: 610953 - DNA, 15 bp, Homo sapiens
ggatgcaggctttgg

SEQ ID NO: 610954 - DNA, 15 bp, Homo sapiens
gatgcaggctttggc

SEQ ID NO: 610955 - DNA, 15 bp, Homo sapiens
atgcaggctttggca

SEQ ID NO: 610956 - DNA, 15 bp, Homo sapiens
tgcaggctttggcat

SEQ ID NO: 610957 - DNA, 15 bp, Homo sapiens
gcaggctttggcatc

SEQ ID NO: 610958 - DNA, 15 bp, Homo sapiens
caggctttggcatct

SEQ ID NO: 610959 - DNA, 15 bp, Homo sapiens
aggctttggcatctt

SEQ ID NO: 610960 - DNA, 15 bp, Homo sapiens
ggctttggcatctta

SEQ ID NO: 610961 - DNA, 15 bp, Homo sapiens
gctttggcatcttat

SEQ ID NO: 610962 - DNA, 15 bp, Homo sapiens
ctttggcatcttatt

SEQ ID NO: 610963 - DNA, 15 bp, Homo sapiens
tttggcatcttattt

SEQ ID NO: 610964 - DNA, 15 bp, Homo sapiens
ttggcatcttatttg

SEQ ID NO: 610965 - DNA, 15 bp, Homo sapiens
tggcatcttatttgg

SEQ ID NO: 610966 - DNA, 15 bp, Homo sapiens
ggcatcttatttggt

SEQ ID NO: 610967 - DNA, 15 bp, Homo sapiens
gcatcttatttggtc

SEQ ID NO: 610968 - DNA, 15 bp, Homo sapiens
catcttatttggtct

SEQ ID NO: 610969 - DNA, 15 bp, Homo sapiens
atcttatttggtctg

SEQ ID NO: 610970 - DNA, 15 bp, Homo sapiens
tcttatttggtctga

SEQ ID NO: 610971 - DNA, 15 bp, Homo sapiens
cttatttggtctgat

SEQ ID NO: 610972 - DNA, 15 bp, Homo sapiens
ttatttggtctgatc

SEQ ID NO: 610973 - DNA, 15 bp, Homo sapiens
tatttggtctgatct

SEQ ID NO: 610974 - DNA, 15 bp, Homo sapiens
atttggtctgatctg

SEQ ID NO: 610975 - DNA, 15 bp, Homo sapiens
tttggtctgatctgg

SEQ ID NO: 610976 - DNA, 15 bp, Homo sapiens
ttggtctgatctggg

SEQ ID NO: 610977 - DNA, 15 bp, Homo sapiens
tggtctgatctgggc

SEQ ID NO: 610978 - DNA, 15 bp, Homo sapiens
ggtctgatctgggcc

SEQ ID NO: 610979 - DNA, 15 bp, Homo sapiens
gtctgatctgggccc

SEQ ID NO: 610980 - DNA, 15 bp, Homo sapiens
tctgatctgggcccc

SEQ ID NO: 610981 - DNA, 15 bp, Homo sapiens
ctgatctgggcccca

SEQ ID NO: 610982 - DNA, 15 bp, Homo sapiens
tgatctgggccccat

SEQ ID NO: 610983 - DNA, 15 bp, Homo sapiens
gatctgggccccatc

SEQ ID NO: 610984 - DNA, 15 bp, Homo sapiens
atctgggccccatca

SEQ ID NO: 610985 - DNA, 15 bp, Homo sapiens
tctgggccccatcac

SEQ ID NO: 610986 - DNA, 15 bp, Homo sapiens
ctgggccccatcact

SEQ ID NO: 610987 - DNA, 15 bp, Homo sapiens
tgggccccatcactt

SEQ ID NO: 610988 - DNA, 15 bp, Homo sapiens
gggccccatcactta

SEQ ID NO: 610989 - DNA, 15 bp, Homo sapiens
ggccccatcacttaa

SEQ ID NO: 610990 - DNA, 15 bp, Homo sapiens
gccccatcacttaat

SEQ ID NO: 610991 - DNA, 15 bp, Homo sapiens
ccccatcacttaatg

SEQ ID NO: 610992 - DNA, 15 bp, Homo sapiens
cccatcacttaatga

SEQ ID NO: 610993 - DNA, 15 bp, Homo sapiens
ccatcacttaatgag

SEQ ID NO: 610994 - DNA, 15 bp, Homo sapiens
catcacttaatgagc

SEQ ID NO: 610995 - DNA, 15 bp, Homo sapiens
atcacttaatgagct

SEQ ID NO: 610996 - DNA, 15 bp, Homo sapiens
tcacttaatgagctg

SEQ ID NO: 610997 - DNA, 15 bp, Homo sapiens
cacttaatgagctgt

SEQ ID NO: 610998 - DNA, 15 bp, Homo sapiens
acttaatgagctgtg

SEQ ID NO: 610999 - DNA, 15 bp, Homo sapiens
cttaatgagctgtgt

SEQ ID NO: 611000 - DNA, 15 bp, Homo sapiens
ttaatgagctgtgtg

SEQ ID NO: 611001 - DNA, 15 bp, Homo sapiens
taatgagctgtgtga

SEQ ID NO: 611002 - DNA, 15 bp, Homo sapiens
aatgagctgtgtgac

SEQ ID NO: 611003 - DNA, 15 bp, Homo sapiens
atgagctgtgtgact

SEQ ID NO: 611004 - DNA, 15 bp, Homo sapiens
tgagctgtgtgactt

SEQ ID NO: 611005 - DNA, 15 bp, Homo sapiens
gagctgtgtgacttt

SEQ ID NO: 611006 - DNA, 15 bp, Homo sapiens
agctgtgtgactttg

SEQ ID NO: 611007 - DNA, 15 bp, Homo sapiens
gctgtgtgactttgc

SEQ ID NO: 611008 - DNA, 15 bp, Homo sapiens
ctgtgtgactttgcc

SEQ ID NO: 611009 - DNA, 15 bp, Homo sapiens
tgtgtgactttgcct

SEQ ID NO: 611010 - DNA, 15 bp, Homo sapiens
gtgtgactttgccta

SEQ ID NO: 611011 - DNA, 15 bp, Homo sapiens
tgtgactttgcctaa

SEQ ID NO: 611012 - DNA, 15 bp, Homo sapiens
gtgactttgcctaag

SEQ ID NO: 611013 - DNA, 15 bp, Homo sapiens
tgactttgcctaagt

SEQ ID NO: 611014 - DNA, 15 bp, Homo sapiens
gactttgcctaagtt

SEQ ID NO: 611015 - DNA, 15 bp, Homo sapiens
actttgcctaagtta

SEQ ID NO: 611016 - DNA, 15 bp, Homo sapiens
ctttgcctaagttac

SEQ ID NO: 611017 - DNA, 15 bp, Homo sapiens
tttgcctaagttacc

SEQ ID NO: 611018 - DNA, 15 bp, Homo sapiens
ttgcctaagttacct

SEQ ID NO: 611019 - DNA, 15 bp, Homo sapiens
tgcctaagttacctg

SEQ ID NO: 611020 - DNA, 15 bp, Homo sapiens
gcctaagttacctgc

SEQ ID NO: 611021 - DNA, 15 bp, Homo sapiens
cctaagttacctgcc

SEQ ID NO: 611022 - DNA, 15 bp, Homo sapiens
ctaagttacctgccc

SEQ ID NO: 611023 - DNA, 15 bp, Homo sapiens
taagttacctgccca

SEQ ID NO: 611024 - DNA, 15 bp, Homo sapiens
aagttacctgcccac

SEQ ID NO: 611025 - DNA, 15 bp, Homo sapiens
agttacctgcccact

SEQ ID NO: 611026 - DNA, 15 bp, Homo sapiens
gttacctgcccactc

SEQ ID NO: 611027 - DNA, 15 bp, Homo sapiens
ttacctgcccactct

SEQ ID NO: 611028 - DNA, 15 bp, Homo sapiens
tacctgcccactctg

SEQ ID NO: 611029 - DNA, 15 bp, Homo sapiens
acctgcccactctga

SEQ ID NO: 611030 - DNA, 15 bp, Homo sapiens
cctgcccactctgaa

SEQ ID NO: 611031 - DNA, 15 bp, Homo sapiens
ctgcccactctgaaa

SEQ ID NO: 611032 - DNA, 15 bp, Homo sapiens
tgcccactctgaaac

SEQ ID NO: 611033 - DNA, 15 bp, Homo sapiens
gcccactctgaaact

SEQ ID NO: 611034 - DNA, 15 bp, Homo sapiens
cccactctgaaactt

SEQ ID NO: 611035 - DNA, 15 bp, Homo sapiens
ccactctgaaactta

SEQ ID NO: 611036 - DNA, 15 bp, Homo sapiens
cactctgaaacttag

SEQ ID NO: 611037 - DNA, 15 bp, Homo sapiens
actctgaaacttagt

SEQ ID NO: 611038 - DNA, 15 bp, Homo sapiens
ctctgaaacttagtt

SEQ ID NO: 611039 - DNA, 15 bp, Homo sapiens
tctgaaacttagttt

SEQ ID NO: 611040 - DNA, 15 bp, Homo sapiens
ctgaaacttagtttg

SEQ ID NO: 611041 - DNA, 15 bp, Homo sapiens
tgaaacttagtttgc

SEQ ID NO: 611042 - DNA, 15 bp, Homo sapiens
gaaacttagtttgct

SEQ ID NO: 611043 - DNA, 15 bp, Homo sapiens
aaacttagtttgctc

SEQ ID NO: 611044 - DNA, 15 bp, Homo sapiens
aacttagtttgctca

SEQ ID NO: 611045 - DNA, 15 bp, Homo sapiens
acttagtttgctcat

SEQ ID NO: 611046 - DNA, 15 bp, Homo sapiens
cttagtttgctcatt

SEQ ID NO: 611047 - DNA, 15 bp, Homo sapiens
ttagtttgctcattt

SEQ ID NO: 611048 - DNA, 15 bp, Homo sapiens
tagtttgctcattta

SEQ ID NO: 611049 - DNA, 15 bp, Homo sapiens
agtttgctcatttac

SEQ ID NO: 611050 - DNA, 15 bp, Homo sapiens
gtttgctcatttaca

SEQ ID NO: 611051 - DNA, 15 bp, Homo sapiens
tttgctcatttacaa

SEQ ID NO: 611052 - DNA, 15 bp, Homo sapiens
ttgctcatttacaaa

SEQ ID NO: 611053 - DNA, 15 bp, Homo sapiens
tgctcatttacaaag

SEQ ID NO: 611054 - DNA, 15 bp, Homo sapiens
gctcatttacaaagt

SEQ ID NO: 611055 - DNA, 15 bp, Homo sapiens
ctcatttacaaagtg

SEQ ID NO: 611056 - DNA, 15 bp, Homo sapiens
tcatttacaaagtgg

SEQ ID NO: 611057 - DNA, 15 bp, Homo sapiens
catttacaaagtggg

SEQ ID NO: 611058 - DNA, 15 bp, Homo sapiens
atttacaaagtgggg

SEQ ID NO: 611059 - DNA, 15 bp, Homo sapiens
tttacaaagtgggga

SEQ ID NO: 611060 - DNA, 15 bp, Homo sapiens
ttacaaagtggggat

SEQ ID NO: 611061 - DNA, 15 bp, Homo sapiens
tacaaagtggggata

SEQ ID NO: 611062 - DNA, 15 bp, Homo sapiens
acaaagtggggataa

SEQ ID NO: 611063 - DNA, 15 bp, Homo sapiens
caaagtggggataat

SEQ ID NO: 611064 - DNA, 15 bp, Homo sapiens
aaagtggggataatc

SEQ ID NO: 611065 - DNA, 15 bp, Homo sapiens
aagtggggataatcc

SEQ ID NO: 611066 - DNA, 15 bp, Homo sapiens
agtggggataatcct

SEQ ID NO: 611067 - DNA, 15 bp, Homo sapiens
gtggggataatcctg

SEQ ID NO: 611068 - DNA, 15 bp, Homo sapiens
tggggataatcctgt

SEQ ID NO: 611069 - DNA, 15 bp, Homo sapiens
ggggataatcctgtg

SEQ ID NO: 611070 - DNA, 15 bp, Homo sapiens
gggataatcctgtga

SEQ ID NO: 611071 - DNA, 15 bp, Homo sapiens
ggataatcctgtgag

SEQ ID NO: 611072 - DNA, 15 bp, Homo sapiens
gataatcctgtgagg

SEQ ID NO: 611073 - DNA, 15 bp, Homo sapiens
ataatcctgtgagga

SEQ ID NO: 611074 - DNA, 15 bp, Homo sapiens
taatcctgtgaggat

SEQ ID NO: 611075 - DNA, 15 bp, Homo sapiens
aatcctgtgaggatt

SEQ ID NO: 611076 - DNA, 15 bp, Homo sapiens
atcctgtgaggatta

SEQ ID NO: 611077 - DNA, 15 bp, Homo sapiens
tcctgtgaggattaa

SEQ ID NO: 611078 - DNA, 15 bp, Homo sapiens
cctgtgaggattaag

SEQ ID NO: 611079 - DNA, 15 bp, Homo sapiens
ctgtgaggattaaga

SEQ ID NO: 611080 - DNA, 15 bp, Homo sapiens
tgtgaggattaagaa

SEQ ID NO: 611081 - DNA, 15 bp, Homo sapiens
gtgaggattaagaaa

SEQ ID NO: 611082 - DNA, 15 bp, Homo sapiens
tgaggattaagaaag

SEQ ID NO: 611083 - DNA, 15 bp, Homo sapiens
gaggattaagaaagt

SEQ ID NO: 611084 - DNA, 15 bp, Homo sapiens
aggattaagaaagtc

SEQ ID NO: 611085 - DNA, 15 bp, Homo sapiens
ggattaagaaagtct

SEQ ID NO: 611086 - DNA, 15 bp, Homo sapiens
gattaagaaagtctg

SEQ ID NO: 611087 - DNA, 15 bp, Homo sapiens
attaagaaagtctga

SEQ ID NO: 611088 - DNA, 15 bp, Homo sapiens
ttaagaaagtctgaa

SEQ ID NO: 611089 - DNA, 15 bp, Homo sapiens
taagaaagtctgaaa

SEQ ID NO: 611090 - DNA, 15 bp, Homo sapiens
aagaaagtctgaaaa

SEQ ID NO: 611091 - DNA, 15 bp, Homo sapiens
agaaagtctgaaaaa

SEQ ID NO: 611092 - DNA, 15 bp, Homo sapiens
gaaagtctgaaaaag

SEQ ID NO: 611093 - DNA, 15 bp, Homo sapiens
aaagtctgaaaaagg

SEQ ID NO: 611094 - DNA, 15 bp, Homo sapiens
aagtctgaaaaaggt

SEQ ID NO: 611095 - DNA, 15 bp, Homo sapiens
agtctgaaaaaggtg

SEQ ID NO: 611096 - DNA, 15 bp, Homo sapiens
gtctgaaaaaggtgc

SEQ ID NO: 611097 - DNA, 15 bp, Homo sapiens
tctgaaaaaggtgcg

SEQ ID NO: 611098 - DNA, 15 bp, Homo sapiens
ctgaaaaaggtgcga

SEQ ID NO: 611099 - DNA, 15 bp, Homo sapiens
tgaaaaaggtgcgaa

SEQ ID NO: 611100 - DNA, 15 bp, Homo sapiens
gaaaaaggtgcgaaa

SEQ ID NO: 611101 - DNA, 15 bp, Homo sapiens
aaaaaggtgcgaaag

SEQ ID NO: 611102 - DNA, 15 bp, Homo sapiens
aaaaggtgcgaaagg

SEQ ID NO: 611103 - DNA, 15 bp, Homo sapiens
aaaggtgcgaaaggg

SEQ ID NO: 611104 - DNA, 15 bp, Homo sapiens
aaggtgcgaaagggg

SEQ ID NO: 611105 - DNA, 15 bp, Homo sapiens
aggtgcgaaagggga

SEQ ID NO: 611106 - DNA, 15 bp, Homo sapiens
ggtgcgaaaggggaa

SEQ ID NO: 611107 - DNA, 15 bp, Homo sapiens
gtgcgaaaggggaac

SEQ ID NO: 611108 - DNA, 15 bp, Homo sapiens
tgcgaaaggggaaca

SEQ ID NO: 611109 - DNA, 15 bp, Homo sapiens
gcgaaaggggaacag

SEQ ID NO: 611110 - DNA, 15 bp, Homo sapiens
cgaaaggggaacaga

SEQ ID NO: 611111 - DNA, 15 bp, Homo sapiens
gaaaggggaacagag

SEQ ID NO: 611112 - DNA, 15 bp, Homo sapiens
aaaggggaacagaga

SEQ ID NO: 611113 - DNA, 15 bp, Homo sapiens
aaggggaacagagaa

SEQ ID NO: 611114 - DNA, 15 bp, Homo sapiens
aggggaacagagaac

SEQ ID NO: 611115 - DNA, 15 bp, Homo sapiens
ggggaacagagaaca

SEQ ID NO: 611116 - DNA, 15 bp, Homo sapiens
gggaacagagaacaa

SEQ ID NO: 611117 - DNA, 15 bp, Homo sapiens
ggaacagagaacaag

SEQ ID NO: 611118 - DNA, 15 bp, Homo sapiens
gaacagagaacaagt

SEQ ID NO: 611119 - DNA, 15 bp, Homo sapiens
aacagagaacaagtc

SEQ ID NO: 611120 - DNA, 15 bp, Homo sapiens
acagagaacaagtcc

SEQ ID NO: 611121 - DNA, 15 bp, Homo sapiens
cagagaacaagtcct

SEQ ID NO: 611122 - DNA, 15 bp, Homo sapiens
agagaacaagtcctt

SEQ ID NO: 611123 - DNA, 15 bp, Homo sapiens
gagaacaagtccttc

SEQ ID NO: 611124 - DNA, 15 bp, Homo sapiens
agaacaagtccttcc

SEQ ID NO: 611125 - DNA, 15 bp, Homo sapiens
gaacaagtccttcct

SEQ ID NO: 611126 - DNA, 15 bp, Homo sapiens
aacaagtccttcctt

SEQ ID NO: 611127 - DNA, 15 bp, Homo sapiens
acaagtccttccttc

SEQ ID NO: 611128 - DNA, 15 bp, Homo sapiens
caagtccttccttca

SEQ ID NO: 611129 - DNA, 15 bp, Homo sapiens
aagtccttccttcaa

SEQ ID NO: 611130 - DNA, 15 bp, Homo sapiens
agtccttccttcaag

SEQ ID NO: 611131 - DNA, 15 bp, Homo sapiens
gtccttccttcaagg

SEQ ID NO: 611132 - DNA, 15 bp, Homo sapiens
tccttccttcaaggt

SEQ ID NO: 611133 - DNA, 15 bp, Homo sapiens
ccttccttcaaggtg

SEQ ID NO: 611134 - DNA, 15 bp, Homo sapiens
cttccttcaaggtgg

SEQ ID NO: 611135 - DNA, 15 bp, Homo sapiens
ttccttcaaggtggg

SEQ ID NO: 611136 - DNA, 15 bp, Homo sapiens
tccttcaaggtggga

SEQ ID NO: 611137 - DNA, 15 bp, Homo sapiens
ccttcaaggtgggat

SEQ ID NO: 611138 - DNA, 15 bp, Homo sapiens
cttcaaggtgggatg

SEQ ID NO: 611139 - DNA, 15 bp, Homo sapiens
ttcaaggtgggatgc

SEQ ID NO: 611140 - DNA, 15 bp, Homo sapiens
tcaaggtgggatgct

SEQ ID NO: 611141 - DNA, 15 bp, Homo sapiens
caaggtgggatgctg

SEQ ID NO: 611142 - DNA, 15 bp, Homo sapiens
aaggtgggatgctga

SEQ ID NO: 611143 - DNA, 15 bp, Homo sapiens
aggtgggatgctgaa

SEQ ID NO: 611144 - DNA, 15 bp, Homo sapiens
ggtgggatgctgaag

SEQ ID NO: 611145 - DNA, 15 bp, Homo sapiens
gtgggatgctgaagg

SEQ ID NO: 611146 - DNA, 15 bp, Homo sapiens
tgggatgctgaaggc

SEQ ID NO: 611147 - DNA, 15 bp, Homo sapiens
gggatgctgaaggcc

SEQ ID NO: 611148 - DNA, 15 bp, Homo sapiens
ggatgctgaaggccc

SEQ ID NO: 611149 - DNA, 15 bp, Homo sapiens
gatgctgaaggccca

SEQ ID NO: 611150 - DNA, 15 bp, Homo sapiens
atgctgaaggcccat

SEQ ID NO: 611151 - DNA, 15 bp, Homo sapiens
tgctgaaggcccatc

SEQ ID NO: 611152 - DNA, 15 bp, Homo sapiens
gctgaaggcccatcc

SEQ ID NO: 611153 - DNA, 15 bp, Homo sapiens
ctgaaggcccatcct

SEQ ID NO: 611154 - DNA, 15 bp, Homo sapiens
tgaaggcccatccta

SEQ ID NO: 611155 - DNA, 15 bp, Homo sapiens
gaaggcccatcctag

SEQ ID NO: 611156 - DNA, 15 bp, Homo sapiens
aaggcccatcctagc

SEQ ID NO: 611157 - DNA, 15 bp, Homo sapiens
aggcccatcctagct

SEQ ID NO: 611158 - DNA, 15 bp, Homo sapiens
ggcccatcctagctc

SEQ ID NO: 611159 - DNA, 15 bp, Homo sapiens
gcccatcctagctcc

SEQ ID NO: 611160 - DNA, 15 bp, Homo sapiens
cccatcctagctcct

SEQ ID NO: 611161 - DNA, 15 bp, Homo sapiens
ccatcctagctcctc

SEQ ID NO: 611162 - DNA, 15 bp, Homo sapiens
catcctagctcctca

SEQ ID NO: 611163 - DNA, 15 bp, Homo sapiens
atcctagctcctcac

SEQ ID NO: 611164 - DNA, 15 bp, Homo sapiens
tcctagctcctcaca

SEQ ID NO: 611165 - DNA, 15 bp, Homo sapiens
cctagctcctcacag

SEQ ID NO: 611166 - DNA, 15 bp, Homo sapiens
ctagctcctcacagg

SEQ ID NO: 611167 - DNA, 15 bp, Homo sapiens
tagctcctcacaggt

SEQ ID NO: 611168 - DNA, 15 bp, Homo sapiens
agctcctcacaggtg

SEQ ID NO: 611169 - DNA, 15 bp, Homo sapiens
gctcctcacaggtgc

SEQ ID NO: 611170 - DNA, 15 bp, Homo sapiens
ctcctcacaggtgct

SEQ ID NO: 611171 - DNA, 15 bp, Homo sapiens
tcctcacaggtgctg

SEQ ID NO: 611172 - DNA, 15 bp, Homo sapiens
cctcacaggtgctgc

SEQ ID NO: 611173 - DNA, 15 bp, Homo sapiens
ctcacaggtgctgct

SEQ ID NO: 611174 - DNA, 15 bp, Homo sapiens
tcacaggtgctgctt

SEQ ID NO: 611175 - DNA, 15 bp, Homo sapiens
cacaggtgctgcttg

SEQ ID NO: 611176 - DNA, 15 bp, Homo sapiens
acaggtgctgcttgg

SEQ ID NO: 611177 - DNA, 15 bp, Homo sapiens
caggtgctgcttggc

SEQ ID NO: 611178 - DNA, 15 bp, Homo sapiens
aggtgctgcttggca

SEQ ID NO: 611179 - DNA, 15 bp, Homo sapiens
ggtgctgcttggcat

SEQ ID NO: 611180 - DNA, 15 bp, Homo sapiens
gtgctgcttggcatg

SEQ ID NO: 611181 - DNA, 15 bp, Homo sapiens
tgctgcttggcatgg

SEQ ID NO: 611182 - DNA, 15 bp, Homo sapiens
gctgcttggcatgga

SEQ ID NO: 611183 - DNA, 15 bp, Homo sapiens
ctgcttggcatggag

SEQ ID NO: 611184 - DNA, 15 bp, Homo sapiens
tgcttggcatggaga

SEQ ID NO: 611185 - DNA, 15 bp, Homo sapiens
gcttggcatggagaa

SEQ ID NO: 611186 - DNA, 15 bp, Homo sapiens
cttggcatggagaaa

SEQ ID NO: 611187 - DNA, 15 bp, Homo sapiens
ttggcatggagaaac

SEQ ID NO: 611188 - DNA, 15 bp, Homo sapiens
tggcatggagaaaca

SEQ ID NO: 611189 - DNA, 15 bp, Homo sapiens
ggcatggagaaacac

SEQ ID NO: 611190 - DNA, 15 bp, Homo sapiens
gcatggagaaacaca

SEQ ID NO: 611191 - DNA, 15 bp, Homo sapiens
catggagaaacacac

SEQ ID NO: 611192 - DNA, 15 bp, Homo sapiens
atggagaaacacaca

SEQ ID NO: 611193 - DNA, 15 bp, Homo sapiens
tggagaaacacacac

SEQ ID NO: 611194 - DNA, 15 bp, Homo sapiens
ggagaaacacacacc

SEQ ID NO: 611195 - DNA, 15 bp, Homo sapiens
gagaaacacacacca

SEQ ID NO: 611196 - DNA, 15 bp, Homo sapiens
agaaacacacaccat

SEQ ID NO: 611197 - DNA, 15 bp, Homo sapiens
gaaacacacaccatt

SEQ ID NO: 611198 - DNA, 15 bp, Homo sapiens
aaacacacaccatta

SEQ ID NO: 611199 - DNA, 15 bp, Homo sapiens
aacacacaccattat

SEQ ID NO: 611200 - DNA, 15 bp, Homo sapiens
acacacaccattatc

SEQ ID NO: 611201 - DNA, 15 bp, Homo sapiens
cacacaccattatct

SEQ ID NO: 611202 - DNA, 15 bp, Homo sapiens
acacaccattatctc

SEQ ID NO: 611203 - DNA, 15 bp, Homo sapiens
cacaccattatctcc

SEQ ID NO: 611204 - DNA, 15 bp, Homo sapiens
acaccattatctcca

SEQ ID NO: 611205 - DNA, 15 bp, Homo sapiens
caccattatctccag

SEQ ID NO: 611206 - DNA, 15 bp, Homo sapiens
accattatctccaga

SEQ ID NO: 611207 - DNA, 15 bp, Homo sapiens
ccattatctccagat

SEQ ID NO: 611208 - DNA, 15 bp, Homo sapiens
cattatctccagatg

SEQ ID NO: 611209 - DNA, 15 bp, Homo sapiens
attatctccagatgc

SEQ ID NO: 611210 - DNA, 15 bp, Homo sapiens
ttatctccagatgct

SEQ ID NO: 611211 - DNA, 15 bp, Homo sapiens
tatctccagatgctc

SEQ ID NO: 611212 - DNA, 15 bp, Homo sapiens
atctccagatgctca

SEQ ID NO: 611213 - DNA, 15 bp, Homo sapiens
tctccagatgctcag

SEQ ID NO: 611214 - DNA, 15 bp, Homo sapiens
ctccagatgctcagt

SEQ ID NO: 611215 - DNA, 15 bp, Homo sapiens
tccagatgctcagta

SEQ ID NO: 611216 - DNA, 15 bp, Homo sapiens
ccagatgctcagtaa

SEQ ID NO: 611217 - DNA, 15 bp, Homo sapiens
cagatgctcagtaag

SEQ ID NO: 611218 - DNA, 15 bp, Homo sapiens
agatgctcagtaagc

SEQ ID NO: 611219 - DNA, 15 bp, Homo sapiens
gatgctcagtaagca

SEQ ID NO: 611220 - DNA, 15 bp, Homo sapiens
atgctcagtaagcaa

SEQ ID NO: 611221 - DNA, 15 bp, Homo sapiens
tgctcagtaagcaat

SEQ ID NO: 611222 - DNA, 15 bp, Homo sapiens
gctcagtaagcaatc

SEQ ID NO: 611223 - DNA, 15 bp, Homo sapiens
ctcagtaagcaatca

SEQ ID NO: 611224 - DNA, 15 bp, Homo sapiens
tcagtaagcaatcac

SEQ ID NO: 611225 - DNA, 15 bp, Homo sapiens
cagtaagcaatcact

SEQ ID NO: 611226 - DNA, 15 bp, Homo sapiens
agtaagcaatcacta

SEQ ID NO: 611227 - DNA, 15 bp, Homo sapiens
gtaagcaatcactat

SEQ ID NO: 611228 - DNA, 15 bp, Homo sapiens
taagcaatcactatt

SEQ ID NO: 611229 - DNA, 15 bp, Homo sapiens
aagcaatcactatta

SEQ ID NO: 611230 - DNA, 15 bp, Homo sapiens
agcaatcactattag

SEQ ID NO: 611231 - DNA, 15 bp, Homo sapiens
gcaatcactattaga

SEQ ID NO: 611232 - DNA, 15 bp, Homo sapiens
caatcactattagat

SEQ ID NO: 611233 - DNA, 15 bp, Homo sapiens
aatcactattagatc

SEQ ID NO: 611234 - DNA, 15 bp, Homo sapiens
atcactattagatca

SEQ ID NO: 611235 - DNA, 15 bp, Homo sapiens
tcactattagatcag

SEQ ID NO: 611236 - DNA, 15 bp, Homo sapiens
cactattagatcagt

SEQ ID NO: 611237 - DNA, 15 bp, Homo sapiens
actattagatcagta

SEQ ID NO: 611238 - DNA, 15 bp, Homo sapiens
ctattagatcagtat

SEQ ID NO: 611239 - DNA, 15 bp, Homo sapiens
tattagatcagtatt

SEQ ID NO: 611240 - DNA, 15 bp, Homo sapiens
attagatcagtattc

SEQ ID NO: 611241 - DNA, 15 bp, Homo sapiens
ttagatcagtattca

SEQ ID NO: 611242 - DNA, 15 bp, Homo sapiens
tagatcagtattcag

SEQ ID NO: 611243 - DNA, 15 bp, Homo sapiens
agatcagtattcagt

SEQ ID NO: 611244 - DNA, 15 bp, Homo sapiens
gatcagtattcagtg

SEQ ID NO: 611245 - DNA, 15 bp, Homo sapiens
atcagtattcagtga

SEQ ID NO: 611246 - DNA, 15 bp, Homo sapiens
tcagtattcagtgat

SEQ ID NO: 611247 - DNA, 15 bp, Homo sapiens
cagtattcagtgatt

SEQ ID NO: 611248 - DNA, 15 bp, Homo sapiens
agtattcagtgattc

SEQ ID NO: 611249 - DNA, 15 bp, Homo sapiens
gtattcagtgattcc

SEQ ID NO: 611250 - DNA, 15 bp, Homo sapiens
tattcagtgattccc

SEQ ID NO: 611251 - DNA, 15 bp, Homo sapiens
attcagtgattccca

SEQ ID NO: 611252 - DNA, 15 bp, Homo sapiens
ttcagtgattcccag

SEQ ID NO: 611253 - DNA, 15 bp, Homo sapiens
tcagtgattcccaga

SEQ ID NO: 611254 - DNA, 15 bp, Homo sapiens
cagtgattcccagag

SEQ ID NO: 611255 - DNA, 15 bp, Homo sapiens
agtgattcccagaga

SEQ ID NO: 611256 - DNA, 15 bp, Homo sapiens
gtgattcccagagac

SEQ ID NO: 611257 - DNA, 15 bp, Homo sapiens
tgattcccagagaca

SEQ ID NO: 611258 - DNA, 15 bp, Homo sapiens
gattcccagagacag

SEQ ID NO: 611259 - DNA, 15 bp, Homo sapiens
attcccagagacagg

SEQ ID NO: 611260 - DNA, 15 bp, Homo sapiens
ttcccagagacaggg

SEQ ID NO: 611261 - DNA, 15 bp, Homo sapiens
tcccagagacagggg

SEQ ID NO: 611262 - DNA, 15 bp, Homo sapiens
cccagagacaggggc

SEQ ID NO: 611263 - DNA, 15 bp, Homo sapiens
ccagagacaggggcc

SEQ ID NO: 611264 - DNA, 15 bp, Homo sapiens
cagagacaggggcct

SEQ ID NO: 611265 - DNA, 15 bp, Homo sapiens
agagacaggggccta

SEQ ID NO: 611266 - DNA, 15 bp, Homo sapiens
gagacaggggcctaa

SEQ ID NO: 611267 - DNA, 15 bp, Homo sapiens
agacaggggcctaag

SEQ ID NO: 611268 - DNA, 15 bp, Homo sapiens
gacaggggcctaagg

SEQ ID NO: 611269 - DNA, 15 bp, Homo sapiens
acaggggcctaagga

SEQ ID NO: 611270 - DNA, 15 bp, Homo sapiens
caggggcctaaggaa

SEQ ID NO: 611271 - DNA, 15 bp, Homo sapiens
aggggcctaaggaat

SEQ ID NO: 611272 - DNA, 15 bp, Homo sapiens
ggggcctaaggaatt

SEQ ID NO: 611273 - DNA, 15 bp, Homo sapiens
gggcctaaggaattt

SEQ ID NO: 611274 - DNA, 15 bp, Homo sapiens
ggcctaaggaatttc

SEQ ID NO: 611275 - DNA, 15 bp, Homo sapiens
gcctaaggaatttca

SEQ ID NO: 611276 - DNA, 15 bp, Homo sapiens
cctaaggaatttcag

SEQ ID NO: 611277 - DNA, 15 bp, Homo sapiens
ctaaggaatttcaga

SEQ ID NO: 611278 - DNA, 15 bp, Homo sapiens
taaggaatttcagag

SEQ ID NO: 611279 - DNA, 15 bp, Homo sapiens
aaggaatttcagagg

SEQ ID NO: 611280 - DNA, 15 bp, Homo sapiens
aggaatttcagagga

SEQ ID NO: 611281 - DNA, 15 bp, Homo sapiens
ggaatttcagaggat

SEQ ID NO: 611282 - DNA, 15 bp, Homo sapiens
gaatttcagaggatg

SEQ ID NO: 611283 - DNA, 15 bp, Homo sapiens
aatttcagaggatgc

SEQ ID NO: 611284 - DNA, 15 bp, Homo sapiens
atttcagaggatgcc

SEQ ID NO: 611285 - DNA, 15 bp, Homo sapiens
tttcagaggatgccg

SEQ ID NO: 611286 - DNA, 15 bp, Homo sapiens
ttcagaggatgccgt

SEQ ID NO: 611287 - DNA, 15 bp, Homo sapiens
tcagaggatgccgtg

SEQ ID NO: 611288 - DNA, 15 bp, Homo sapiens
cagaggatgccgtgc

SEQ ID NO: 611289 - DNA, 15 bp, Homo sapiens
agaggatgccgtgca

SEQ ID NO: 611290 - DNA, 15 bp, Homo sapiens
gaggatgccgtgcag

SEQ ID NO: 611291 - DNA, 15 bp, Homo sapiens
aggatgccgtgcaga

SEQ ID NO: 611292 - DNA, 15 bp, Homo sapiens
ggatgccgtgcagag

SEQ ID NO: 611293 - DNA, 15 bp, Homo sapiens
gatgccgtgcagaga

SEQ ID NO: 611294 - DNA, 15 bp, Homo sapiens
atgccgtgcagagaa

SEQ ID NO: 611295 - DNA, 15 bp, Homo sapiens
tgccgtgcagagaaa

SEQ ID NO: 611296 - DNA, 15 bp, Homo sapiens
gccgtgcagagaaaa

SEQ ID NO: 611297 - DNA, 15 bp, Homo sapiens
ccgtgcagagaaaat

SEQ ID NO: 611298 - DNA, 15 bp, Homo sapiens
cgtgcagagaaaatg

SEQ ID NO: 611299 - DNA, 15 bp, Homo sapiens
gtgcagagaaaatga

SEQ ID NO: 611300 - DNA, 15 bp, Homo sapiens
tgcagagaaaatgag

SEQ ID NO: 611301 - DNA, 15 bp, Homo sapiens
gcagagaaaatgagg

SEQ ID NO: 611302 - DNA, 15 bp, Homo sapiens
cagagaaaatgaggc

SEQ ID NO: 611303 - DNA, 15 bp, Homo sapiens
agagaaaatgaggct

SEQ ID NO: 611304 - DNA, 15 bp, Homo sapiens
gagaaaatgaggctg

SEQ ID NO: 611305 - DNA, 15 bp, Homo sapiens
agaaaatgaggctgg

SEQ ID NO: 611306 - DNA, 15 bp, Homo sapiens
gaaaatgaggctggg

SEQ ID NO: 611307 - DNA, 15 bp, Homo sapiens
aaaatgaggctgggt

SEQ ID NO: 611308 - DNA, 15 bp, Homo sapiens
aaatgaggctgggtg

SEQ ID NO: 611309 - DNA, 15 bp, Homo sapiens
aatgaggctgggtga

SEQ ID NO: 611310 - DNA, 15 bp, Homo sapiens
atgaggctgggtgaa

SEQ ID NO: 611311 - DNA, 15 bp, Homo sapiens
tgaggctgggtgaaa

SEQ ID NO: 611312 - DNA, 15 bp, Homo sapiens
gaggctgggtgaaag

SEQ ID NO: 611313 - DNA, 15 bp, Homo sapiens
aggctgggtgaaagg

SEQ ID NO: 611314 - DNA, 15 bp, Homo sapiens
ggctgggtgaaaggg

SEQ ID NO: 611315 - DNA, 15 bp, Homo sapiens
gctgggtgaaaggga

SEQ ID NO: 611316 - DNA, 15 bp, Homo sapiens
ctgggtgaaagggaa

SEQ ID NO: 611317 - DNA, 15 bp, Homo sapiens
tgggtgaaagggaag

SEQ ID NO: 611318 - DNA, 15 bp, Homo sapiens
gggtgaaagggaagg

SEQ ID NO: 611319 - DNA, 15 bp, Homo sapiens
ggtgaaagggaaggg

SEQ ID NO: 611320 - DNA, 15 bp, Homo sapiens
gtgaaagggaaggga

SEQ ID NO: 611321 - DNA, 15 bp, Homo sapiens
tgaaagggaagggag

SEQ ID NO: 611322 - DNA, 15 bp, Homo sapiens
gaaagggaagggagg

SEQ ID NO: 611323 - DNA, 15 bp, Homo sapiens
aaagggaagggaggg

SEQ ID NO: 611324 - DNA, 15 bp, Homo sapiens
aagggaagggagggg

SEQ ID NO: 611325 - DNA, 15 bp, Homo sapiens
agggaagggagggga

SEQ ID NO: 611326 - DNA, 15 bp, Homo sapiens
gggaagggaggggaa

SEQ ID NO: 611327 - DNA, 15 bp, Homo sapiens
ggaagggaggggaat

SEQ ID NO: 611328 - DNA, 15 bp, Homo sapiens
gaagggaggggaatg

SEQ ID NO: 611329 - DNA, 15 bp, Homo sapiens
aagggaggggaatgt

SEQ ID NO: 611330 - DNA, 15 bp, Homo sapiens
agggaggggaatgtt

SEQ ID NO: 611331 - DNA, 15 bp, Homo sapiens
gggaggggaatgttc

SEQ ID NO: 611332 - DNA, 15 bp, Homo sapiens
ggaggggaatgttcc

SEQ ID NO: 611333 - DNA, 15 bp, Homo sapiens
gaggggaatgttccc

SEQ ID NO: 611334 - DNA, 15 bp, Homo sapiens
aggggaatgttccct

SEQ ID NO: 611335 - DNA, 15 bp, Homo sapiens
ggggaatgttccctt

SEQ ID NO: 611336 - DNA, 15 bp, Homo sapiens
gggaatgttcccttg

SEQ ID NO: 611337 - DNA, 15 bp, Homo sapiens
ggaatgttcccttgt

SEQ ID NO: 611338 - DNA, 15 bp, Homo sapiens
gaatgttcccttgtc

SEQ ID NO: 611339 - DNA, 15 bp, Homo sapiens
aatgttcccttgtcc

SEQ ID NO: 611340 - DNA, 15 bp, Homo sapiens
atgttcccttgtccc

SEQ ID NO: 611341 - DNA, 15 bp, Homo sapiens
tgttcccttgtccct

SEQ ID NO: 611342 - DNA, 15 bp, Homo sapiens
gttcccttgtccctg

SEQ ID NO: 611343 - DNA, 15 bp, Homo sapiens
ttcccttgtccctga

SEQ ID NO: 611344 - DNA, 15 bp, Homo sapiens
tcccttgtccctgag

SEQ ID NO: 611345 - DNA, 15 bp, Homo sapiens
cccttgtccctgagg

SEQ ID NO: 611346 - DNA, 15 bp, Homo sapiens
ccttgtccctgaggc

SEQ ID NO: 611347 - DNA, 15 bp, Homo sapiens
cttgtccctgaggcc

SEQ ID NO: 611348 - DNA, 15 bp, Homo sapiens
ttgtccctgaggcct

SEQ ID NO: 611349 - DNA, 15 bp, Homo sapiens
tgtccctgaggcctc

SEQ ID NO: 611350 - DNA, 15 bp, Homo sapiens
gtccctgaggcctcc

SEQ ID NO: 611351 - DNA, 15 bp, Homo sapiens
tccctgaggcctccc

SEQ ID NO: 611352 - DNA, 15 bp, Homo sapiens
ccctgaggcctcccc

SEQ ID NO: 611353 - DNA, 15 bp, Homo sapiens
cctgaggcctccccc

SEQ ID NO: 611354 - DNA, 15 bp, Homo sapiens
ctgaggcctccccct

SEQ ID NO: 611355 - DNA, 15 bp, Homo sapiens
tgaggcctccccctg

SEQ ID NO: 611356 - DNA, 15 bp, Homo sapiens
gaggcctccccctgc

SEQ ID NO: 611357 - DNA, 15 bp, Homo sapiens
aggcctccccctgct

SEQ ID NO: 611358 - DNA, 15 bp, Homo sapiens
ggcctccccctgctt

SEQ ID NO: 611359 - DNA, 15 bp, Homo sapiens
gcctccccctgcttc

SEQ ID NO: 611360 - DNA, 15 bp, Homo sapiens
cctccccctgcttct

SEQ ID NO: 611361 - DNA, 15 bp, Homo sapiens
ctccccctgcttctg

SEQ ID NO: 611362 - DNA, 15 bp, Homo sapiens
tccccctgcttctgc

SEQ ID NO: 611363 - DNA, 15 bp, Homo sapiens
ccccctgcttctgct

SEQ ID NO: 611364 - DNA, 15 bp, Homo sapiens
cccctgcttctgctg

SEQ ID NO: 611365 - DNA, 15 bp, Homo sapiens
ccctgcttctgctga

SEQ ID NO: 611366 - DNA, 15 bp, Homo sapiens
cctgcttctgctgaa

SEQ ID NO: 611367 - DNA, 15 bp, Homo sapiens
ctgcttctgctgaac

SEQ ID NO: 611368 - DNA, 15 bp, Homo sapiens
tgcttctgctgaact

SEQ ID NO: 611369 - DNA, 15 bp, Homo sapiens
gcttctgctgaactg

SEQ ID NO: 611370 - DNA, 15 bp, Homo sapiens
cttctgctgaactgg

SEQ ID NO: 611371 - DNA, 15 bp, Homo sapiens
ttctgctgaactggc

SEQ ID NO: 611372 - DNA, 15 bp, Homo sapiens
tctgctgaactggct

SEQ ID NO: 611373 - DNA, 15 bp, Homo sapiens
ctgctgaactggcta

SEQ ID NO: 611374 - DNA, 15 bp, Homo sapiens
tgctgaactggctac

SEQ ID NO: 611375 - DNA, 15 bp, Homo sapiens
gctgaactggctacc

SEQ ID NO: 611376 - DNA, 15 bp, Homo sapiens
ctgaactggctacct

SEQ ID NO: 611377 - DNA, 15 bp, Homo sapiens
tgaactggctacctg

SEQ ID NO: 611378 - DNA, 15 bp, Homo sapiens
gaactggctacctgt

SEQ ID NO: 611379 - DNA, 15 bp, Homo sapiens
aactggctacctgtg

SEQ ID NO: 611380 - DNA, 15 bp, Homo sapiens
actggctacctgtgg

SEQ ID NO: 611381 - DNA, 15 bp, Homo sapiens
ctggctacctgtggg

SEQ ID NO: 611382 - DNA, 15 bp, Homo sapiens
tggctacctgtggga

SEQ ID NO: 611383 - DNA, 15 bp, Homo sapiens
ggctacctgtgggaa

SEQ ID NO: 611384 - DNA, 15 bp, Homo sapiens
gctacctgtgggaag

SEQ ID NO: 611385 - DNA, 15 bp, Homo sapiens
ctacctgtgggaagt

SEQ ID NO: 611386 - DNA, 15 bp, Homo sapiens
tacctgtgggaagtg

SEQ ID NO: 611387 - DNA, 15 bp, Homo sapiens
acctgtgggaagtgt

SEQ ID NO: 611388 - DNA, 15 bp, Homo sapiens
cctgtgggaagtgtg

SEQ ID NO: 611389 - DNA, 15 bp, Homo sapiens
ctgtgggaagtgtgg

SEQ ID NO: 611390 - DNA, 15 bp, Homo sapiens
tgtgggaagtgtggc

SEQ ID NO: 611391 - DNA, 15 bp, Homo sapiens
gtgggaagtgtggcc

SEQ ID NO: 611392 - DNA, 15 bp, Homo sapiens
tgggaagtgtggccc

SEQ ID NO: 611393 - DNA, 15 bp, Homo sapiens
gggaagtgtggccct

SEQ ID NO: 611394 - DNA, 15 bp, Homo sapiens
ggaagtgtggccctc

SEQ ID NO: 611395 - DNA, 15 bp, Homo sapiens
gaagtgtggccctca

SEQ ID NO: 611396 - DNA, 15 bp, Homo sapiens
aagtgtggccctcag

SEQ ID NO: 611397 - DNA, 15 bp, Homo sapiens
agtgtggccctcaga

SEQ ID NO: 611398 - DNA, 15 bp, Homo sapiens
gtgtggccctcagat

SEQ ID NO: 611399 - DNA, 15 bp, Homo sapiens
tgtggccctcagatc

SEQ ID NO: 611400 - DNA, 15 bp, Homo sapiens
gtggccctcagatct

SEQ ID NO: 611401 - DNA, 15 bp, Homo sapiens
tggccctcagatctc

SEQ ID NO: 611402 - DNA, 15 bp, Homo sapiens
ggccctcagatctct

SEQ ID NO: 611403 - DNA, 15 bp, Homo sapiens
gccctcagatctcta

SEQ ID NO: 611404 - DNA, 15 bp, Homo sapiens
ccctcagatctctaa

SEQ ID NO: 611405 - DNA, 15 bp, Homo sapiens
cctcagatctctaaa

SEQ ID NO: 611406 - DNA, 15 bp, Homo sapiens
ctcagatctctaaat

SEQ ID NO: 611407 - DNA, 15 bp, Homo sapiens
tcagatctctaaatg

SEQ ID NO: 611408 - DNA, 15 bp, Homo sapiens
cagatctctaaatgg

SEQ ID NO: 611409 - DNA, 15 bp, Homo sapiens
agatctctaaatggg

SEQ ID NO: 611410 - DNA, 15 bp, Homo sapiens
gatctctaaatggga

SEQ ID NO: 611411 - DNA, 15 bp, Homo sapiens
atctctaaatgggag

SEQ ID NO: 611412 - DNA, 15 bp, Homo sapiens
tctctaaatgggagg

SEQ ID NO: 611413 - DNA, 15 bp, Homo sapiens
ctctaaatgggaggg

SEQ ID NO: 611414 - DNA, 15 bp, Homo sapiens
tctaaatgggaggga

SEQ ID NO: 611415 - DNA, 15 bp, Homo sapiens
ctaaatgggagggaa

SEQ ID NO: 611416 - DNA, 15 bp, Homo sapiens
taaatgggagggaaa

SEQ ID NO: 611417 - DNA, 15 bp, Homo sapiens
aaatgggagggaaac

SEQ ID NO: 611418 - DNA, 15 bp, Homo sapiens
aatgggagggaaacc

SEQ ID NO: 611419 - DNA, 15 bp, Homo sapiens
atgggagggaaacca

SEQ ID NO: 611420 - DNA, 15 bp, Homo sapiens
tgggagggaaaccaa

SEQ ID NO: 611421 - DNA, 15 bp, Homo sapiens
gggagggaaaccaag

SEQ ID NO: 611422 - DNA, 15 bp, Homo sapiens
ggagggaaaccaagg

SEQ ID NO: 611423 - DNA, 15 bp, Homo sapiens
gagggaaaccaaggt

SEQ ID NO: 611424 - DNA, 15 bp, Homo sapiens
agggaaaccaaggtc

SEQ ID NO: 611425 - DNA, 15 bp, Homo sapiens
gggaaaccaaggtct

SEQ ID NO: 611426 - DNA, 15 bp, Homo sapiens
ggaaaccaaggtctc

SEQ ID NO: 611427 - DNA, 15 bp, Homo sapiens
gaaaccaaggtctct

SEQ ID NO: 611428 - DNA, 15 bp, Homo sapiens
aaaccaaggtctctt

SEQ ID NO: 611429 - DNA, 15 bp, Homo sapiens
aaccaaggtctctta

SEQ ID NO: 611430 - DNA, 15 bp, Homo sapiens
accaaggtctcttaa

SEQ ID NO: 611431 - DNA, 15 bp, Homo sapiens
ccaaggtctcttaag

SEQ ID NO: 611432 - DNA, 15 bp, Homo sapiens
caaggtctcttaagg

SEQ ID NO: 611433 - DNA, 15 bp, Homo sapiens
aaggtctcttaaggg

SEQ ID NO: 611434 - DNA, 15 bp, Homo sapiens
aggtctcttaagggt

SEQ ID NO: 611435 - DNA, 15 bp, Homo sapiens
ggtctcttaagggtt

SEQ ID NO: 611436 - DNA, 15 bp, Homo sapiens
gtctcttaagggttt

SEQ ID NO: 611437 - DNA, 15 bp, Homo sapiens
tctcttaagggttta

SEQ ID NO: 611438 - DNA, 15 bp, Homo sapiens
ctcttaagggtttac

SEQ ID NO: 611439 - DNA, 15 bp, Homo sapiens
tcttaagggtttact

SEQ ID NO: 611440 - DNA, 15 bp, Homo sapiens
cttaagggtttactg

SEQ ID NO: 611441 - DNA, 15 bp, Homo sapiens
ttaagggtttactgc

SEQ ID NO: 611442 - DNA, 15 bp, Homo sapiens
taagggtttactgca

SEQ ID NO: 611443 - DNA, 15 bp, Homo sapiens
aagggtttactgcat

SEQ ID NO: 611444 - DNA, 15 bp, Homo sapiens
agggtttactgcata

SEQ ID NO: 611445 - DNA, 15 bp, Homo sapiens
gggtttactgcatat

SEQ ID NO: 611446 - DNA, 15 bp, Homo sapiens
ggtttactgcatata

SEQ ID NO: 611447 - DNA, 15 bp, Homo sapiens
gtttactgcatataa

SEQ ID NO: 611448 - DNA, 15 bp, Homo sapiens
tttactgcatataag

SEQ ID NO: 611449 - DNA, 15 bp, Homo sapiens
ttactgcatataagg

SEQ ID NO: 611450 - DNA, 15 bp, Homo sapiens
tactgcatataaggt

SEQ ID NO: 611451 - DNA, 15 bp, Homo sapiens
actgcatataaggtg

SEQ ID NO: 611452 - DNA, 15 bp, Homo sapiens
ctgcatataaggtgc

SEQ ID NO: 611453 - DNA, 15 bp, Homo sapiens
tgcatataaggtgct

SEQ ID NO: 611454 - DNA, 15 bp, Homo sapiens
gcatataaggtgctc

SEQ ID NO: 611455 - DNA, 15 bp, Homo sapiens
catataaggtgctca

SEQ ID NO: 611456 - DNA, 15 bp, Homo sapiens
atataaggtgctcag

SEQ ID NO: 611457 - DNA, 15 bp, Homo sapiens
tataaggtgctcaga

SEQ ID NO: 611458 - DNA, 15 bp, Homo sapiens
ataaggtgctcagag

SEQ ID NO: 611459 - DNA, 15 bp, Homo sapiens
taaggtgctcagagt

SEQ ID NO: 611460 - DNA, 15 bp, Homo sapiens
aaggtgctcagagtg

SEQ ID NO: 611461 - DNA, 15 bp, Homo sapiens
aggtgctcagagtgt

SEQ ID NO: 611462 - DNA, 15 bp, Homo sapiens
ggtgctcagagtgtc

SEQ ID NO: 611463 - DNA, 15 bp, Homo sapiens
gtgctcagagtgtct

SEQ ID NO: 611464 - DNA, 15 bp, Homo sapiens
tgctcagagtgtctc

SEQ ID NO: 611465 - DNA, 15 bp, Homo sapiens
gctcagagtgtctca

SEQ ID NO: 611466 - DNA, 15 bp, Homo sapiens
ctcagagtgtctcat

SEQ ID NO: 611467 - DNA, 15 bp, Homo sapiens
tcagagtgtctcatt

SEQ ID NO: 611468 - DNA, 15 bp, Homo sapiens
cagagtgtctcatta

SEQ ID NO: 611469 - DNA, 15 bp, Homo sapiens
agagtgtctcattac

SEQ ID NO: 611470 - DNA, 15 bp, Homo sapiens
gagtgtctcattaca

SEQ ID NO: 611471 - DNA, 15 bp, Homo sapiens
agtgtctcattacat

SEQ ID NO: 611472 - DNA, 15 bp, Homo sapiens
gtgtctcattacatc

SEQ ID NO: 611473 - DNA, 15 bp, Homo sapiens
tgtctcattacatcc

SEQ ID NO: 611474 - DNA, 15 bp, Homo sapiens
gtctcattacatcca

SEQ ID NO: 611475 - DNA, 15 bp, Homo sapiens
tctcattacatccaa

SEQ ID NO: 611476 - DNA, 15 bp, Homo sapiens
ctcattacatccaat

SEQ ID NO: 611477 - DNA, 15 bp, Homo sapiens
tcattacatccaatg

SEQ ID NO: 611478 - DNA, 15 bp, Homo sapiens
cattacatccaatgc

SEQ ID NO: 611479 - DNA, 15 bp, Homo sapiens
attacatccaatgct

SEQ ID NO: 611480 - DNA, 15 bp, Homo sapiens
ttacatccaatgctg

SEQ ID NO: 611481 - DNA, 15 bp, Homo sapiens
tacatccaatgctgt

SEQ ID NO: 611482 - DNA, 15 bp, Homo sapiens
acatccaatgctgtg

SEQ ID NO: 611483 - DNA, 15 bp, Homo sapiens
catccaatgctgtgc

SEQ ID NO: 611484 - DNA, 15 bp, Homo sapiens
atccaatgctgtgca

SEQ ID NO: 611485 - DNA, 15 bp, Homo sapiens
tccaatgctgtgcag

SEQ ID NO: 611486 - DNA, 15 bp, Homo sapiens
ccaatgctgtgcagc

SEQ ID NO: 611487 - DNA, 15 bp, Homo sapiens
caatgctgtgcagca

SEQ ID NO: 611488 - DNA, 15 bp, Homo sapiens
aatgctgtgcagcag

SEQ ID NO: 611489 - DNA, 15 bp, Homo sapiens
atgctgtgcagcaga

SEQ ID NO: 611490 - DNA, 15 bp, Homo sapiens
tgctgtgcagcagat

SEQ ID NO: 611491 - DNA, 15 bp, Homo sapiens
gctgtgcagcagatg

SEQ ID NO: 611492 - DNA, 15 bp, Homo sapiens
ctgtgcagcagatgg

SEQ ID NO: 611493 - DNA, 15 bp, Homo sapiens
tgtgcagcagatggt

SEQ ID NO: 611494 - DNA, 15 bp, Homo sapiens
gtgcagcagatggta

SEQ ID NO: 611495 - DNA, 15 bp, Homo sapiens
tgcagcagatggtat

SEQ ID NO: 611496 - DNA, 15 bp, Homo sapiens
gcagcagatggtatc

SEQ ID NO: 611497 - DNA, 15 bp, Homo sapiens
cagcagatggtatcc

SEQ ID NO: 611498 - DNA, 15 bp, Homo sapiens
agcagatggtatccc

SEQ ID NO: 611499 - DNA, 15 bp, Homo sapiens
gcagatggtatcccc

SEQ ID NO: 611500 - DNA, 15 bp, Homo sapiens
cagatggtatcccca

SEQ ID NO: 611501 - DNA, 15 bp, Homo sapiens
agatggtatccccaa

SEQ ID NO: 611502 - DNA, 15 bp, Homo sapiens
gatggtatccccaat

SEQ ID NO: 611503 - DNA, 15 bp, Homo sapiens
atggtatccccaatt

SEQ ID NO: 611504 - DNA, 15 bp, Homo sapiens
tggtatccccaattc

SEQ ID NO: 611505 - DNA, 15 bp, Homo sapiens
ggtatccccaattca

SEQ ID NO: 611506 - DNA, 15 bp, Homo sapiens
gtatccccaattcac

SEQ ID NO: 611507 - DNA, 15 bp, Homo sapiens
tatccccaattcaca

SEQ ID NO: 611508 - DNA, 15 bp, Homo sapiens
atccccaattcacag

SEQ ID NO: 611509 - DNA, 15 bp, Homo sapiens
tccccaattcacagc

SEQ ID NO: 611510 - DNA, 15 bp, Homo sapiens
ccccaattcacagct

SEQ ID NO: 611511 - DNA, 15 bp, Homo sapiens
cccaattcacagcta

SEQ ID NO: 611512 - DNA, 15 bp, Homo sapiens
ccaattcacagctaa

SEQ ID NO: 611513 - DNA, 15 bp, Homo sapiens
caattcacagctaag

SEQ ID NO: 611514 - DNA, 15 bp, Homo sapiens
aattcacagctaaga

SEQ ID NO: 611515 - DNA, 15 bp, Homo sapiens
attcacagctaagaa

SEQ ID NO: 611516 - DNA, 15 bp, Homo sapiens
ttcacagctaagaac

SEQ ID NO: 611517 - DNA, 15 bp, Homo sapiens
tcacagctaagaacg

SEQ ID NO: 611518 - DNA, 15 bp, Homo sapiens
cacagctaagaacgt

SEQ ID NO: 611519 - DNA, 15 bp, Homo sapiens
acagctaagaacgtt

SEQ ID NO: 611520 - DNA, 15 bp, Homo sapiens
cagctaagaacgtta

SEQ ID NO: 611521 - DNA, 15 bp, Homo sapiens
agctaagaacgttaa

SEQ ID NO: 611522 - DNA, 15 bp, Homo sapiens
gctaagaacgttaag

SEQ ID NO: 611523 - DNA, 15 bp, Homo sapiens
ctaagaacgttaagc

SEQ ID NO: 611524 - DNA, 15 bp, Homo sapiens
taagaacgttaagcc

SEQ ID NO: 611525 - DNA, 15 bp, Homo sapiens
aagaacgttaagcct

SEQ ID NO: 611526 - DNA, 15 bp, Homo sapiens
agaacgttaagcctc

SEQ ID NO: 611527 - DNA, 15 bp, Homo sapiens
gaacgttaagcctca

SEQ ID NO: 611528 - DNA, 15 bp, Homo sapiens
aacgttaagcctcag

SEQ ID NO: 611529 - DNA, 15 bp, Homo sapiens
acgttaagcctcagc

SEQ ID NO: 611530 - DNA, 15 bp, Homo sapiens
cgttaagcctcagca

SEQ ID NO: 611531 - DNA, 15 bp, Homo sapiens
gttaagcctcagcaa

SEQ ID NO: 611532 - DNA, 15 bp, Homo sapiens
ttaagcctcagcaaa

SEQ ID NO: 611533 - DNA, 15 bp, Homo sapiens
taagcctcagcaaaa

SEQ ID NO: 611534 - DNA, 15 bp, Homo sapiens
aagcctcagcaaaat

SEQ ID NO: 611535 - DNA, 15 bp, Homo sapiens
agcctcagcaaaatg

SEQ ID NO: 611536 - DNA, 15 bp, Homo sapiens
gcctcagcaaaatga

SEQ ID NO: 611537 - DNA, 15 bp, Homo sapiens
cctcagcaaaatgaa

SEQ ID NO: 611538 - DNA, 15 bp, Homo sapiens
ctcagcaaaatgaaa

SEQ ID NO: 611539 - DNA, 15 bp, Homo sapiens
tcagcaaaatgaaat

SEQ ID NO: 611540 - DNA, 15 bp, Homo sapiens
cagcaaaatgaaatg

SEQ ID NO: 611541 - DNA, 15 bp, Homo sapiens
agcaaaatgaaatga

SEQ ID NO: 611542 - DNA, 15 bp, Homo sapiens
gcaaaatgaaatgag

SEQ ID NO: 611543 - DNA, 15 bp, Homo sapiens
caaaatgaaatgagt

SEQ ID NO: 611544 - DNA, 15 bp, Homo sapiens
aaaatgaaatgagta

SEQ ID NO: 611545 - DNA, 15 bp, Homo sapiens
aaatgaaatgagtag

SEQ ID NO: 611546 - DNA, 15 bp, Homo sapiens
aatgaaatgagtagc

SEQ ID NO: 611547 - DNA, 15 bp, Homo sapiens
atgaaatgagtagcc

SEQ ID NO: 611548 - DNA, 15 bp, Homo sapiens
tgaaatgagtagcct

SEQ ID NO: 611549 - DNA, 15 bp, Homo sapiens
gaaatgagtagccta

SEQ ID NO: 611550 - DNA, 15 bp, Homo sapiens
aaatgagtagcctaa

SEQ ID NO: 611551 - DNA, 15 bp, Homo sapiens
aatgagtagcctaat

SEQ ID NO: 611552 - DNA, 15 bp, Homo sapiens
atgagtagcctaatt

SEQ ID NO: 611553 - DNA, 15 bp, Homo sapiens
tgagtagcctaattc

SEQ ID NO: 611554 - DNA, 15 bp, Homo sapiens
gagtagcctaattca

SEQ ID NO: 611555 - DNA, 15 bp, Homo sapiens
agtagcctaattcaa

SEQ ID NO: 611556 - DNA, 15 bp, Homo sapiens
gtagcctaattcaat

SEQ ID NO: 611557 - DNA, 15 bp, Homo sapiens
tagcctaattcaata

SEQ ID NO: 611558 - DNA, 15 bp, Homo sapiens
agcctaattcaatag

SEQ ID NO: 611559 - DNA, 15 bp, Homo sapiens
gcctaattcaataga

SEQ ID NO: 611560 - DNA, 15 bp, Homo sapiens
cctaattcaatagac

SEQ ID NO: 611561 - DNA, 15 bp, Homo sapiens
ctaattcaatagaca

SEQ ID NO: 611562 - DNA, 15 bp, Homo sapiens
taattcaatagacag

SEQ ID NO: 611563 - DNA, 15 bp, Homo sapiens
aattcaatagacaga

SEQ ID NO: 611564 - DNA, 15 bp, Homo sapiens
attcaatagacagaa

SEQ ID NO: 611565 - DNA, 15 bp, Homo sapiens
ttcaatagacagaag

SEQ ID NO: 611566 - DNA, 15 bp, Homo sapiens
tcaatagacagaaga

SEQ ID NO: 611567 - DNA, 15 bp, Homo sapiens
caatagacagaagat

SEQ ID NO: 611568 - DNA, 15 bp, Homo sapiens
aatagacagaagatg

SEQ ID NO: 611569 - DNA, 15 bp, Homo sapiens
atagacagaagatgg

SEQ ID NO: 611570 - DNA, 15 bp, Homo sapiens
tagacagaagatggt

SEQ ID NO: 611571 - DNA, 15 bp, Homo sapiens
agacagaagatggta

SEQ ID NO: 611572 - DNA, 15 bp, Homo sapiens
gacagaagatggtag

SEQ ID NO: 611573 - DNA, 15 bp, Homo sapiens
acagaagatggtaga

SEQ ID NO: 611574 - DNA, 15 bp, Homo sapiens
cagaagatggtagag

SEQ ID NO: 611575 - DNA, 15 bp, Homo sapiens
agaagatggtagagc

SEQ ID NO: 611576 - DNA, 15 bp, Homo sapiens
gaagatggtagagct

SEQ ID NO: 611577 - DNA, 15 bp, Homo sapiens
aagatggtagagcta

SEQ ID NO: 611578 - DNA, 15 bp, Homo sapiens
agatggtagagctag

SEQ ID NO: 611579 - DNA, 15 bp, Homo sapiens
gatggtagagctagt

SEQ ID NO: 611580 - DNA, 15 bp, Homo sapiens
atggtagagctagtg

SEQ ID NO: 611581 - DNA, 15 bp, Homo sapiens
tggtagagctagtgg

SEQ ID NO: 611582 - DNA, 15 bp, Homo sapiens
ggtagagctagtggg

SEQ ID NO: 611583 - DNA, 15 bp, Homo sapiens
gtagagctagtgggc

SEQ ID NO: 611584 - DNA, 15 bp, Homo sapiens
tagagctagtgggct

SEQ ID NO: 611585 - DNA, 15 bp, Homo sapiens
agagctagtgggctg

SEQ ID NO: 611586 - DNA, 15 bp, Homo sapiens
gagctagtgggctgt

SEQ ID NO: 611587 - DNA, 15 bp, Homo sapiens
agctagtgggctgtg

SEQ ID NO: 611588 - DNA, 15 bp, Homo sapiens
gctagtgggctgtgg

SEQ ID NO: 611589 - DNA, 15 bp, Homo sapiens
ctagtgggctgtggc

SEQ ID NO: 611590 - DNA, 15 bp, Homo sapiens
tagtgggctgtggcg

SEQ ID NO: 611591 - DNA, 15 bp, Homo sapiens
agtgggctgtggcgg

SEQ ID NO: 611592 - DNA, 15 bp, Homo sapiens
gtgggctgtggcggg

SEQ ID NO: 611593 - DNA, 15 bp, Homo sapiens
tgggctgtggcgggg

SEQ ID NO: 611594 - DNA, 15 bp, Homo sapiens
gggctgtggcggggg

SEQ ID NO: 611595 - DNA, 15 bp, Homo sapiens
ggctgtggcgggggc

SEQ ID NO: 611596 - DNA, 15 bp, Homo sapiens
gctgtggcgggggca

SEQ ID NO: 611597 - DNA, 15 bp, Homo sapiens
ctgtggcgggggcaa

SEQ ID NO: 611598 - DNA, 15 bp, Homo sapiens
tgtggcgggggcaag

SEQ ID NO: 611599 - DNA, 15 bp, Homo sapiens
gtggcgggggcaaga

SEQ ID NO: 611600 - DNA, 15 bp, Homo sapiens
tggcgggggcaagat

SEQ ID NO: 611601 - DNA, 15 bp, Homo sapiens
ggcgggggcaagatc

SEQ ID NO: 611602 - DNA, 15 bp, Homo sapiens
gcgggggcaagatcc

SEQ ID NO: 611603 - DNA, 15 bp, Homo sapiens
cgggggcaagatccc

SEQ ID NO: 611604 - DNA, 15 bp, Homo sapiens
gggggcaagatccca

SEQ ID NO: 611605 - DNA, 15 bp, Homo sapiens
ggggcaagatcccac

SEQ ID NO: 611606 - DNA, 15 bp, Homo sapiens
gggcaagatcccact

SEQ ID NO: 611607 - DNA, 15 bp, Homo sapiens
ggcaagatcccactt

SEQ ID NO: 611608 - DNA, 15 bp, Homo sapiens
gcaagatcccactta

SEQ ID NO: 611609 - DNA, 15 bp, Homo sapiens
caagatcccacttaa

SEQ ID NO: 611610 - DNA, 15 bp, Homo sapiens
aagatcccacttaat

SEQ ID NO: 611611 - DNA, 15 bp, Homo sapiens
agatcccacttaatg

SEQ ID NO: 611612 - DNA, 15 bp, Homo sapiens
gatcccacttaatgc

SEQ ID NO: 611613 - DNA, 15 bp, Homo sapiens
atcccacttaatgcc

SEQ ID NO: 611614 - DNA, 15 bp, Homo sapiens
tcccacttaatgcct

SEQ ID NO: 611615 - DNA, 15 bp, Homo sapiens
cccacttaatgcctc

SEQ ID NO: 611616 - DNA, 15 bp, Homo sapiens
ccacttaatgcctca

SEQ ID NO: 611617 - DNA, 15 bp, Homo sapiens
cacttaatgcctcag

SEQ ID NO: 611618 - DNA, 15 bp, Homo sapiens
acttaatgcctcagg

SEQ ID NO: 611619 - DNA, 15 bp, Homo sapiens
cttaatgcctcaggg

SEQ ID NO: 611620 - DNA, 15 bp, Homo sapiens
ttaatgcctcaggga

SEQ ID NO: 611621 - DNA, 15 bp, Homo sapiens
taatgcctcagggaa

SEQ ID NO: 611622 - DNA, 15 bp, Homo sapiens
aatgcctcagggaag

SEQ ID NO: 611623 - DNA, 15 bp, Homo sapiens
atgcctcagggaagc

SEQ ID NO: 611624 - DNA, 15 bp, Homo sapiens
tgcctcagggaagca

SEQ ID NO: 611625 - DNA, 15 bp, Homo sapiens
gcctcagggaagcag

SEQ ID NO: 611626 - DNA, 15 bp, Homo sapiens
cctcagggaagcagg

SEQ ID NO: 611627 - DNA, 15 bp, Homo sapiens
ctcagggaagcaggt

SEQ ID NO: 611628 - DNA, 15 bp, Homo sapiens
tcagggaagcaggtg

SEQ ID NO: 611629 - DNA, 15 bp, Homo sapiens
cagggaagcaggtgc

SEQ ID NO: 611630 - DNA, 15 bp, Homo sapiens
agggaagcaggtgct

SEQ ID NO: 611631 - DNA, 15 bp, Homo sapiens
gggaagcaggtgctg

SEQ ID NO: 611632 - DNA, 15 bp, Homo sapiens
ggaagcaggtgctgg

SEQ ID NO: 611633 - DNA, 15 bp, Homo sapiens
gaagcaggtgctggg

SEQ ID NO: 611634 - DNA, 15 bp, Homo sapiens
aagcaggtgctgggg

SEQ ID NO: 611635 - DNA, 15 bp, Homo sapiens
agcaggtgctgggga

SEQ ID NO: 611636 - DNA, 15 bp, Homo sapiens
gcaggtgctggggag

SEQ ID NO: 611637 - DNA, 15 bp, Homo sapiens
caggtgctggggagg

SEQ ID NO: 611638 - DNA, 15 bp, Homo sapiens
aggtgctggggaggt

SEQ ID NO: 611639 - DNA, 15 bp, Homo sapiens
ggtgctggggaggtg

SEQ ID NO: 611640 - DNA, 15 bp, Homo sapiens
gtgctggggaggtga

SEQ ID NO: 611641 - DNA, 15 bp, Homo sapiens
tgctggggaggtgaa

SEQ ID NO: 611642 - DNA, 15 bp, Homo sapiens
gctggggaggtgaag

SEQ ID NO: 611643 - DNA, 15 bp, Homo sapiens
ctggggaggtgaagg

SEQ ID NO: 611644 - DNA, 15 bp, Homo sapiens
tggggaggtgaaggc

SEQ ID NO: 611645 - DNA, 15 bp, Homo sapiens
ggggaggtgaaggca

SEQ ID NO: 611646 - DNA, 15 bp, Homo sapiens
gggaggtgaaggcag

SEQ ID NO: 611647 - DNA, 15 bp, Homo sapiens
ggaggtgaaggcagc

SEQ ID NO: 611648 - DNA, 15 bp, Homo sapiens
gaggtgaaggcagcg

SEQ ID NO: 611649 - DNA, 15 bp, Homo sapiens
aggtgaaggcagcgc

SEQ ID NO: 611650 - DNA, 15 bp, Homo sapiens
ggtgaaggcagcgcc

SEQ ID NO: 611651 - DNA, 15 bp, Homo sapiens
gtgaaggcagcgcca

SEQ ID NO: 611652 - DNA, 15 bp, Homo sapiens
tgaaggcagcgccag

SEQ ID NO: 611653 - DNA, 15 bp, Homo sapiens
gaaggcagcgccagg

SEQ ID NO: 611654 - DNA, 15 bp, Homo sapiens
aaggcagcgccaggc

SEQ ID NO: 611655 - DNA, 15 bp, Homo sapiens
aggcagcgccaggca

SEQ ID NO: 611656 - DNA, 15 bp, Homo sapiens
ggcagcgccaggcaa

SEQ ID NO: 611657 - DNA, 15 bp, Homo sapiens
gcagcgccaggcaaa

SEQ ID NO: 611658 - DNA, 15 bp, Homo sapiens
cagcgccaggcaaag

SEQ ID NO: 611659 - DNA, 15 bp, Homo sapiens
agcgccaggcaaaga

SEQ ID NO: 611660 - DNA, 15 bp, Homo sapiens
gcgccaggcaaagag

SEQ ID NO: 611661 - DNA, 15 bp, Homo sapiens
cgccaggcaaagagt

SEQ ID NO: 611662 - DNA, 15 bp, Homo sapiens
gccaggcaaagagtg

SEQ ID NO: 611663 - DNA, 15 bp, Homo sapiens
ccaggcaaagagtgg

SEQ ID NO: 611664 - DNA, 15 bp, Homo sapiens
caggcaaagagtggc

SEQ ID NO: 611665 - DNA, 15 bp, Homo sapiens
aggcaaagagtggcc

SEQ ID NO: 611666 - DNA, 15 bp, Homo sapiens
ggcaaagagtggccc

SEQ ID NO: 611667 - DNA, 15 bp, Homo sapiens
gcaaagagtggccca

SEQ ID NO: 611668 - DNA, 15 bp, Homo sapiens
caaagagtggcccat

SEQ ID NO: 611669 - DNA, 15 bp, Homo sapiens
aaagagtggcccata

SEQ ID NO: 611670 - DNA, 15 bp, Homo sapiens
aagagtggcccataa

SEQ ID NO: 611671 - DNA, 15 bp, Homo sapiens
agagtggcccataaa

SEQ ID NO: 611672 - DNA, 15 bp, Homo sapiens
gagtggcccataaat

SEQ ID NO: 611673 - DNA, 15 bp, Homo sapiens
agtggcccataaatg

SEQ ID NO: 611674 - DNA, 15 bp, Homo sapiens
gtggcccataaatgg

SEQ ID NO: 611675 - DNA, 15 bp, Homo sapiens
tggcccataaatggg

SEQ ID NO: 611676 - DNA, 15 bp, Homo sapiens
ggcccataaatggga

SEQ ID NO: 611677 - DNA, 15 bp, Homo sapiens
gcccataaatgggat

SEQ ID NO: 611678 - DNA, 15 bp, Homo sapiens
cccataaatgggatt

SEQ ID NO: 611679 - DNA, 15 bp, Homo sapiens
ccataaatgggattc

SEQ ID NO: 611680 - DNA, 15 bp, Homo sapiens
cataaatgggattct

SEQ ID NO: 611681 - DNA, 15 bp, Homo sapiens
ataaatgggattctg

SEQ ID NO: 611682 - DNA, 15 bp, Homo sapiens
taaatgggattctgg

SEQ ID NO: 611683 - DNA, 15 bp, Homo sapiens
aaatgggattctggc

SEQ ID NO: 611684 - DNA, 15 bp, Homo sapiens
aatgggattctggct

SEQ ID NO: 611685 - DNA, 15 bp, Homo sapiens
atgggattctggctg

SEQ ID NO: 611686 - DNA, 15 bp, Homo sapiens
tgggattctggctgc

SEQ ID NO: 611687 - DNA, 15 bp, Homo sapiens
gggattctggctgct

SEQ ID NO: 611688 - DNA, 15 bp, Homo sapiens
ggattctggctgctc

SEQ ID NO: 611689 - DNA, 15 bp, Homo sapiens
gattctggctgctcc

SEQ ID NO: 611690 - DNA, 15 bp, Homo sapiens
attctggctgctcct

SEQ ID NO: 611691 - DNA, 15 bp, Homo sapiens
ttctggctgctcctg

SEQ ID NO: 611692 - DNA, 15 bp, Homo sapiens
tctggctgctcctgg

SEQ ID NO: 611693 - DNA, 15 bp, Homo sapiens
ctggctgctcctggg

SEQ ID NO: 611694 - DNA, 15 bp, Homo sapiens
tggctgctcctggga

SEQ ID NO: 611695 - DNA, 15 bp, Homo sapiens
ggctgctcctgggac

SEQ ID NO: 611696 - DNA, 15 bp, Homo sapiens
gctgctcctgggaca

SEQ ID NO: 611697 - DNA, 15 bp, Homo sapiens
ctgctcctgggacag

SEQ ID NO: 611698 - DNA, 15 bp, Homo sapiens
tgctcctgggacagg

SEQ ID NO: 611699 - DNA, 15 bp, Homo sapiens
gctcctgggacaggt

SEQ ID NO: 611700 - DNA, 15 bp, Homo sapiens
ctcctgggacaggtc

SEQ ID NO: 611701 - DNA, 15 bp, Homo sapiens
tcctgggacaggtct

SEQ ID NO: 611702 - DNA, 15 bp, Homo sapiens
cctgggacaggtctt

SEQ ID NO: 611703 - DNA, 15 bp, Homo sapiens
ctgggacaggtctta

SEQ ID NO: 611704 - DNA, 15 bp, Homo sapiens
tgggacaggtcttag

SEQ ID NO: 611705 - DNA, 15 bp, Homo sapiens
gggacaggtcttaga

SEQ ID NO: 611706 - DNA, 15 bp, Homo sapiens
ggacaggtcttagag

SEQ ID NO: 611707 - DNA, 15 bp, Homo sapiens
gacaggtcttagagg

SEQ ID NO: 611708 - DNA, 15 bp, Homo sapiens
acaggtcttagagga

SEQ ID NO: 611709 - DNA, 15 bp, Homo sapiens
caggtcttagaggac

SEQ ID NO: 611710 - DNA, 15 bp, Homo sapiens
aggtcttagaggacc

SEQ ID NO: 611711 - DNA, 15 bp, Homo sapiens
ggtcttagaggaccc

SEQ ID NO: 611712 - DNA, 15 bp, Homo sapiens
gtcttagaggaccca

SEQ ID NO: 611713 - DNA, 15 bp, Homo sapiens
tcttagaggacccag

SEQ ID NO: 611714 - DNA, 15 bp, Homo sapiens
cttagaggacccagc

SEQ ID NO: 611715 - DNA, 15 bp, Homo sapiens
ttagaggacccagcg

SEQ ID NO: 611716 - DNA, 15 bp, Homo sapiens
tagaggacccagcgg

SEQ ID NO: 611717 - DNA, 15 bp, Homo sapiens
agaggacccagcggc

SEQ ID NO: 611718 - DNA, 15 bp, Homo sapiens
gaggacccagcggct

SEQ ID NO: 611719 - DNA, 15 bp, Homo sapiens
aggacccagcggctc

SEQ ID NO: 611720 - DNA, 15 bp, Homo sapiens
ggacccagcggctcc

SEQ ID NO: 611721 - DNA, 15 bp, Homo sapiens
gacccagcggctccg

SEQ ID NO: 611722 - DNA, 15 bp, Homo sapiens
acccagcggctccgt

SEQ ID NO: 611723 - DNA, 15 bp, Homo sapiens
cccagcggctccgtt

SEQ ID NO: 611724 - DNA, 15 bp, Homo sapiens
ccagcggctccgttt

SEQ ID NO: 611725 - DNA, 15 bp, Homo sapiens
cagcggctccgtttg

SEQ ID NO: 611726 - DNA, 15 bp, Homo sapiens
agcggctccgtttgg

SEQ ID NO: 611727 - DNA, 15 bp, Homo sapiens
gcggctccgtttgga

SEQ ID NO: 611728 - DNA, 15 bp, Homo sapiens
cggctccgtttggag

SEQ ID NO: 611729 - DNA, 15 bp, Homo sapiens
ggctccgtttggagg

SEQ ID NO: 611730 - DNA, 15 bp, Homo sapiens
gctccgtttggaggg

SEQ ID NO: 611731 - DNA, 15 bp, Homo sapiens
ctccgtttggagggt

SEQ ID NO: 611732 - DNA, 15 bp, Homo sapiens
tccgtttggagggta

SEQ ID NO: 611733 - DNA, 15 bp, Homo sapiens
ccgtttggagggtag

SEQ ID NO: 611734 - DNA, 15 bp, Homo sapiens
cgtttggagggtagg

SEQ ID NO: 611735 - DNA, 15 bp, Homo sapiens
gtttggagggtaggg

SEQ ID NO: 611736 - DNA, 15 bp, Homo sapiens
tttggagggtagggc

SEQ ID NO: 611737 - DNA, 15 bp, Homo sapiens
ttggagggtagggca

SEQ ID NO: 611738 - DNA, 15 bp, Homo sapiens
tggagggtagggcag

SEQ ID NO: 611739 - DNA, 15 bp, Homo sapiens
ggagggtagggcagg

SEQ ID NO: 611740 - DNA, 15 bp, Homo sapiens
gagggtagggcaggg

SEQ ID NO: 611741 - DNA, 15 bp, Homo sapiens
agggtagggcaggga

SEQ ID NO: 611742 - DNA, 15 bp, Homo sapiens
gggtagggcagggaa

SEQ ID NO: 611743 - DNA, 15 bp, Homo sapiens
ggtagggcagggaac

SEQ ID NO: 611744 - DNA, 15 bp, Homo sapiens
gtagggcagggaaca

SEQ ID NO: 611745 - DNA, 15 bp, Homo sapiens
tagggcagggaacag

SEQ ID NO: 611746 - DNA, 15 bp, Homo sapiens
agggcagggaacagg

SEQ ID NO: 611747 - DNA, 15 bp, Homo sapiens
gggcagggaacaggc

SEQ ID NO: 611748 - DNA, 15 bp, Homo sapiens
ggcagggaacaggct

SEQ ID NO: 611749 - DNA, 15 bp, Homo sapiens
gcagggaacaggctc

SEQ ID NO: 611750 - DNA, 15 bp, Homo sapiens
cagggaacaggctcg

SEQ ID NO: 611751 - DNA, 15 bp, Homo sapiens
agggaacaggctcgt

SEQ ID NO: 611752 - DNA, 15 bp, Homo sapiens
gggaacaggctcgtg

SEQ ID NO: 611753 - DNA, 15 bp, Homo sapiens
ggaacaggctcgtga

SEQ ID NO: 611754 - DNA, 15 bp, Homo sapiens
gaacaggctcgtgac

SEQ ID NO: 611755 - DNA, 15 bp, Homo sapiens
aacaggctcgtgacc

SEQ ID NO: 611756 - DNA, 15 bp, Homo sapiens
acaggctcgtgaccc

SEQ ID NO: 611757 - DNA, 15 bp, Homo sapiens
caggctcgtgaccca

SEQ ID NO: 611758 - DNA, 15 bp, Homo sapiens
aggctcgtgacccac

SEQ ID NO: 611759 - DNA, 15 bp, Homo sapiens
ggctcgtgacccaca

SEQ ID NO: 611760 - DNA, 15 bp, Homo sapiens
gctcgtgacccacag

SEQ ID NO: 611761 - DNA, 15 bp, Homo sapiens
ctcgtgacccacagg

SEQ ID NO: 611762 - DNA, 15 bp, Homo sapiens
tcgtgacccacagga

SEQ ID NO: 611763 - DNA, 15 bp, Homo sapiens
cgtgacccacaggag

SEQ ID NO: 611764 - DNA, 15 bp, Homo sapiens
gtgacccacaggagg

SEQ ID NO: 611765 - DNA, 15 bp, Homo sapiens
tgacccacaggaggc

SEQ ID NO: 611766 - DNA, 15 bp, Homo sapiens
gacccacaggaggca

SEQ ID NO: 611767 - DNA, 15 bp, Homo sapiens
acccacaggaggcag

SEQ ID NO: 611768 - DNA, 15 bp, Homo sapiens
cccacaggaggcagt

SEQ ID NO: 611769 - DNA, 15 bp, Homo sapiens
ccacaggaggcagtc

SEQ ID NO: 611770 - DNA, 15 bp, Homo sapiens
cacaggaggcagtcc

SEQ ID NO: 611771 - DNA, 15 bp, Homo sapiens
acaggaggcagtcct

SEQ ID NO: 611772 - DNA, 15 bp, Homo sapiens
caggaggcagtcctg

SEQ ID NO: 611773 - DNA, 15 bp, Homo sapiens
aggaggcagtcctgg

SEQ ID NO: 611774 - DNA, 15 bp, Homo sapiens
ggaggcagtcctggt

SEQ ID NO: 611775 - DNA, 15 bp, Homo sapiens
gaggcagtcctggtc

SEQ ID NO: 611776 - DNA, 15 bp, Homo sapiens
aggcagtcctggtcc

SEQ ID NO: 611777 - DNA, 15 bp, Homo sapiens
ggcagtcctggtcct

SEQ ID NO: 611778 - DNA, 15 bp, Homo sapiens
gcagtcctggtcctc

SEQ ID NO: 611779 - DNA, 15 bp, Homo sapiens
cagtcctggtcctcc

SEQ ID NO: 611780 - DNA, 15 bp, Homo sapiens
agtcctggtcctcct

SEQ ID NO: 611781 - DNA, 15 bp, Homo sapiens
gtcctggtcctcctc

SEQ ID NO: 611782 - DNA, 15 bp, Homo sapiens
tcctggtcctcctcc

SEQ ID NO: 611783 - DNA, 15 bp, Homo sapiens
cctggtcctcctcca

SEQ ID NO: 611784 - DNA, 15 bp, Homo sapiens
ctggtcctcctccac

SEQ ID NO: 611785 - DNA, 15 bp, Homo sapiens
tggtcctcctccact

SEQ ID NO: 611786 - DNA, 15 bp, Homo sapiens
ggtcctcctccactg

SEQ ID NO: 611787 - DNA, 15 bp, Homo sapiens
gtcctcctccactgc

SEQ ID NO: 611788 - DNA, 15 bp, Homo sapiens
tcctcctccactgcc

SEQ ID NO: 611789 - DNA, 15 bp, Homo sapiens
cctcctccactgcca

SEQ ID NO: 611790 - DNA, 15 bp, Homo sapiens
ctcctccactgccat

SEQ ID NO: 611791 - DNA, 15 bp, Homo sapiens
tcctccactgccata

SEQ ID NO: 611792 - DNA, 15 bp, Homo sapiens
cctccactgccatat

SEQ ID NO: 611793 - DNA, 15 bp, Homo sapiens
ctccactgccatatc

SEQ ID NO: 611794 - DNA, 15 bp, Homo sapiens
tccactgccatatcc

SEQ ID NO: 611795 - DNA, 15 bp, Homo sapiens
ccactgccatatcct

SEQ ID NO: 611796 - DNA, 15 bp, Homo sapiens
cactgccatatcctc

SEQ ID NO: 611797 - DNA, 15 bp, Homo sapiens
actgccatatcctca

SEQ ID NO: 611798 - DNA, 15 bp, Homo sapiens
ctgccatatcctcaa

SEQ ID NO: 611799 - DNA, 15 bp, Homo sapiens
tgccatatcctcaaa

SEQ ID NO: 611800 - DNA, 15 bp, Homo sapiens
gccatatcctcaaaa

SEQ ID NO: 611801 - DNA, 15 bp, Homo sapiens
ccatatcctcaaaat

SEQ ID NO: 611802 - DNA, 15 bp, Homo sapiens
catatcctcaaaatg

SEQ ID NO: 611803 - DNA, 15 bp, Homo sapiens
atatcctcaaaatga

SEQ ID NO: 611804 - DNA, 15 bp, Homo sapiens
tatcctcaaaatgag

SEQ ID NO: 611805 - DNA, 15 bp, Homo sapiens
atcctcaaaatgagt

SEQ ID NO: 611806 - DNA, 15 bp, Homo sapiens
tcctcaaaatgagtt

SEQ ID NO: 611807 - DNA, 15 bp, Homo sapiens
cctcaaaatgagttt

SEQ ID NO: 611808 - DNA, 15 bp, Homo sapiens
ctcaaaatgagtttc

SEQ ID NO: 611809 - DNA, 15 bp, Homo sapiens
tcaaaatgagtttct

SEQ ID NO: 611810 - DNA, 15 bp, Homo sapiens
caaaatgagtttctt

SEQ ID NO: 611811 - DNA, 15 bp, Homo sapiens
aaaatgagtttcttt

SEQ ID NO: 611812 - DNA, 15 bp, Homo sapiens
aaatgagtttcttta

SEQ ID NO: 611813 - DNA, 15 bp, Homo sapiens
aatgagtttctttaa

SEQ ID NO: 611814 - DNA, 15 bp, Homo sapiens
atgagtttctttaaa

SEQ ID NO: 611815 - DNA, 15 bp, Homo sapiens
tgagtttctttaaaa

SEQ ID NO: 611816 - DNA, 15 bp, Homo sapiens
gagtttctttaaaac

SEQ ID NO: 611817 - DNA, 15 bp, Homo sapiens
agtttctttaaaact

SEQ ID NO: 611818 - DNA, 15 bp, Homo sapiens
gtttctttaaaactg

SEQ ID NO: 611819 - DNA, 15 bp, Homo sapiens
tttctttaaaactga

SEQ ID NO: 611820 - DNA, 15 bp, Homo sapiens
ttctttaaaactgat

SEQ ID NO: 611821 - DNA, 15 bp, Homo sapiens
tctttaaaactgatg

SEQ ID NO: 611822 - DNA, 15 bp, Homo sapiens
ctttaaaactgatgc

SEQ ID NO: 611823 - DNA, 15 bp, Homo sapiens
tttaaaactgatgca

SEQ ID NO: 611824 - DNA, 15 bp, Homo sapiens
ttaaaactgatgcaa

SEQ ID NO: 611825 - DNA, 15 bp, Homo sapiens
taaaactgatgcaaa

SEQ ID NO: 611826 - DNA, 15 bp, Homo sapiens
aaaactgatgcaaac

SEQ ID NO: 611827 - DNA, 15 bp, Homo sapiens
aaactgatgcaaacg

SEQ ID NO: 611828 - DNA, 15 bp, Homo sapiens
aactgatgcaaacga

SEQ ID NO: 611829 - DNA, 15 bp, Homo sapiens
actgatgcaaacgag

SEQ ID NO: 611830 - DNA, 15 bp, Homo sapiens
ctgatgcaaacgagg

SEQ ID NO: 611831 - DNA, 15 bp, Homo sapiens
tgatgcaaacgagga

SEQ ID NO: 611832 - DNA, 15 bp, Homo sapiens
gatgcaaacgaggaa

SEQ ID NO: 611833 - DNA, 15 bp, Homo sapiens
atgcaaacgaggaag

SEQ ID NO: 611834 - DNA, 15 bp, Homo sapiens
tgcaaacgaggaagt

SEQ ID NO: 611835 - DNA, 15 bp, Homo sapiens
gcaaacgaggaagtg

SEQ ID NO: 611836 - DNA, 15 bp, Homo sapiens
caaacgaggaagtgc

SEQ ID NO: 611837 - DNA, 15 bp, Homo sapiens
aaacgaggaagtgca

SEQ ID NO: 611838 - DNA, 15 bp, Homo sapiens
aacgaggaagtgcaa

SEQ ID NO: 611839 - DNA, 15 bp, Homo sapiens
acgaggaagtgcaaa

SEQ ID NO: 611840 - DNA, 15 bp, Homo sapiens
cgaggaagtgcaaaa

SEQ ID NO: 611841 - DNA, 15 bp, Homo sapiens
gaggaagtgcaaaaa

SEQ ID NO: 611842 - DNA, 15 bp, Homo sapiens
aggaagtgcaaaaac

SEQ ID NO: 611843 - DNA, 15 bp, Homo sapiens
ggaagtgcaaaaacc

SEQ ID NO: 611844 - DNA, 15 bp, Homo sapiens
gaagtgcaaaaacct

SEQ ID NO: 611845 - DNA, 15 bp, Homo sapiens
aagtgcaaaaaccta

SEQ ID NO: 611846 - DNA, 15 bp, Homo sapiens
agtgcaaaaacctaa

SEQ ID NO: 611847 - DNA, 15 bp, Homo sapiens
gtgcaaaaacctaag

SEQ ID NO: 611848 - DNA, 15 bp, Homo sapiens
tgcaaaaacctaagc

SEQ ID NO: 611849 - DNA, 15 bp, Homo sapiens
gcaaaaacctaagct

SEQ ID NO: 611850 - DNA, 15 bp, Homo sapiens
caaaaacctaagctc

SEQ ID NO: 611851 - DNA, 15 bp, Homo sapiens
aaaaacctaagctct

SEQ ID NO: 611852 - DNA, 15 bp, Homo sapiens
aaaacctaagctctg

SEQ ID NO: 611853 - DNA, 15 bp, Homo sapiens
aaacctaagctctgt

SEQ ID NO: 611854 - DNA, 15 bp, Homo sapiens
aacctaagctctgtg

SEQ ID NO: 611855 - DNA, 15 bp, Homo sapiens
acctaagctctgtgg

SEQ ID NO: 611856 - DNA, 15 bp, Homo sapiens
cctaagctctgtggg

SEQ ID NO: 611857 - DNA, 15 bp, Homo sapiens
ctaagctctgtgggt

SEQ ID NO: 611858 - DNA, 15 bp, Homo sapiens
taagctctgtgggtg

SEQ ID NO: 611859 - DNA, 15 bp, Homo sapiens
aagctctgtgggtgg

SEQ ID NO: 611860 - DNA, 15 bp, Homo sapiens
agctctgtgggtggc

SEQ ID NO: 611861 - DNA, 15 bp, Homo sapiens
gctctgtgggtggcc

SEQ ID NO: 611862 - DNA, 15 bp, Homo sapiens
ctctgtgggtggcct

SEQ ID NO: 611863 - DNA, 15 bp, Homo sapiens
tctgtgggtggcctc

SEQ ID NO: 611864 - DNA, 15 bp, Homo sapiens
ctgtgggtggcctcc

SEQ ID NO: 611865 - DNA, 15 bp, Homo sapiens
tgtgggtggcctccc

SEQ ID NO: 611866 - DNA, 15 bp, Homo sapiens
gtgggtggcctcccc

SEQ ID NO: 611867 - DNA, 15 bp, Homo sapiens
tgggtggcctcccct

SEQ ID NO: 611868 - DNA, 15 bp, Homo sapiens
gggtggcctcccctc

SEQ ID NO: 611869 - DNA, 15 bp, Homo sapiens
ggtggcctcccctcc

SEQ ID NO: 611870 - DNA, 15 bp, Homo sapiens
gtggcctcccctcca

SEQ ID NO: 611871 - DNA, 15 bp, Homo sapiens
tggcctcccctccag

SEQ ID NO: 611872 - DNA, 15 bp, Homo sapiens
ggcctcccctccagg

SEQ ID NO: 611873 - DNA, 15 bp, Homo sapiens
gcctcccctccagga

SEQ ID NO: 611874 - DNA, 15 bp, Homo sapiens
cctcccctccaggaa

SEQ ID NO: 611875 - DNA, 15 bp, Homo sapiens
ctcccctccaggaat

SEQ ID NO: 611876 - DNA, 15 bp, Homo sapiens
tcccctccaggaatg

SEQ ID NO: 611877 - DNA, 15 bp, Homo sapiens
cccctccaggaatgc

SEQ ID NO: 611878 - DNA, 15 bp, Homo sapiens
ccctccaggaatgct

SEQ ID NO: 611879 - DNA, 15 bp, Homo sapiens
cctccaggaatgctc

SEQ ID NO: 611880 - DNA, 15 bp, Homo sapiens
ctccaggaatgctct

SEQ ID NO: 611881 - DNA, 15 bp, Homo sapiens
tccaggaatgctctc

SEQ ID NO: 611882 - DNA, 15 bp, Homo sapiens
ccaggaatgctctca

SEQ ID NO: 611883 - DNA, 15 bp, Homo sapiens
caggaatgctctcag

SEQ ID NO: 611884 - DNA, 15 bp, Homo sapiens
aggaatgctctcagc

SEQ ID NO: 611885 - DNA, 15 bp, Homo sapiens
ggaatgctctcagcc

SEQ ID NO: 611886 - DNA, 15 bp, Homo sapiens
gaatgctctcagcca

SEQ ID NO: 611887 - DNA, 15 bp, Homo sapiens
aatgctctcagccag

SEQ ID NO: 611888 - DNA, 15 bp, Homo sapiens
atgctctcagccagc

SEQ ID NO: 611889 - DNA, 15 bp, Homo sapiens
tgctctcagccagct

SEQ ID NO: 611890 - DNA, 15 bp, Homo sapiens
gctctcagccagctg

SEQ ID NO: 611891 - DNA, 15 bp, Homo sapiens
ctctcagccagctgg

SEQ ID NO: 611892 - DNA, 15 bp, Homo sapiens
tctcagccagctggg

SEQ ID NO: 611893 - DNA, 15 bp, Homo sapiens
ctcagccagctgggt

SEQ ID NO: 611894 - DNA, 15 bp, Homo sapiens
tcagccagctgggtg

SEQ ID NO: 611895 - DNA, 15 bp, Homo sapiens
cagccagctgggtga

SEQ ID NO: 611896 - DNA, 15 bp, Homo sapiens
agccagctgggtgat

SEQ ID NO: 611897 - DNA, 15 bp, Homo sapiens
gccagctgggtgatg

SEQ ID NO: 611898 - DNA, 15 bp, Homo sapiens
ccagctgggtgatgc

SEQ ID NO: 611899 - DNA, 15 bp, Homo sapiens
cagctgggtgatgcg

SEQ ID NO: 611900 - DNA, 15 bp, Homo sapiens
agctgggtgatgcgc

SEQ ID NO: 611901 - DNA, 15 bp, Homo sapiens
gctgggtgatgcgct

SEQ ID NO: 611902 - DNA, 15 bp, Homo sapiens
ctgggtgatgcgcta

SEQ ID NO: 611903 - DNA, 15 bp, Homo sapiens
tgggtgatgcgctac

SEQ ID NO: 611904 - DNA, 15 bp, Homo sapiens
gggtgatgcgctacc

SEQ ID NO: 611905 - DNA, 15 bp, Homo sapiens
ggtgatgcgctaccc

SEQ ID NO: 611906 - DNA, 15 bp, Homo sapiens
gtgatgcgctaccca

SEQ ID NO: 611907 - DNA, 15 bp, Homo sapiens
tgatgcgctacccag

SEQ ID NO: 611908 - DNA, 15 bp, Homo sapiens
gatgcgctacccagc

SEQ ID NO: 611909 - DNA, 15 bp, Homo sapiens
atgcgctacccagcc

SEQ ID NO: 611910 - DNA, 15 bp, Homo sapiens
tgcgctacccagccc

SEQ ID NO: 611911 - DNA, 15 bp, Homo sapiens
gcgctacccagccct

SEQ ID NO: 611912 - DNA, 15 bp, Homo sapiens
cgctacccagccctg

SEQ ID NO: 611913 - DNA, 15 bp, Homo sapiens
gctacccagccctga

SEQ ID NO: 611914 - DNA, 15 bp, Homo sapiens
ctacccagccctgag

SEQ ID NO: 611915 - DNA, 15 bp, Homo sapiens
tacccagccctgagc

SEQ ID NO: 611916 - DNA, 15 bp, Homo sapiens
acccagccctgagct

SEQ ID NO: 611917 - DNA, 15 bp, Homo sapiens
cccagccctgagctc

SEQ ID NO: 611918 - DNA, 15 bp, Homo sapiens
ccagccctgagctct

SEQ ID NO: 611919 - DNA, 15 bp, Homo sapiens
cagccctgagctctg

SEQ ID NO: 611920 - DNA, 15 bp, Homo sapiens
agccctgagctctgc

SEQ ID NO: 611921 - DNA, 15 bp, Homo sapiens
gccctgagctctgct

SEQ ID NO: 611922 - DNA, 15 bp, Homo sapiens
ccctgagctctgctg

SEQ ID NO: 611923 - DNA, 15 bp, Homo sapiens
cctgagctctgctgc

SEQ ID NO: 611924 - DNA, 15 bp, Homo sapiens
ctgagctctgctgct

SEQ ID NO: 611925 - DNA, 15 bp, Homo sapiens
tgagctctgctgctt

SEQ ID NO: 611926 - DNA, 15 bp, Homo sapiens
gagctctgctgcttt

SEQ ID NO: 611927 - DNA, 15 bp, Homo sapiens
agctctgctgctttc

SEQ ID NO: 611928 - DNA, 15 bp, Homo sapiens
gctctgctgctttcc

SEQ ID NO: 611929 - DNA, 15 bp, Homo sapiens
ctctgctgctttcca

SEQ ID NO: 611930 - DNA, 15 bp, Homo sapiens
tctgctgctttccat

SEQ ID NO: 611931 - DNA, 15 bp, Homo sapiens
ctgctgctttccatt

SEQ ID NO: 611932 - DNA, 15 bp, Homo sapiens
tgctgctttccattc

SEQ ID NO: 611933 - DNA, 15 bp, Homo sapiens
gctgctttccattcc

SEQ ID NO: 611934 - DNA, 15 bp, Homo sapiens
ctgctttccattcca

SEQ ID NO: 611935 - DNA, 15 bp, Homo sapiens
tgctttccattccag

SEQ ID NO: 611936 - DNA, 15 bp, Homo sapiens
gctttccattccagc

SEQ ID NO: 611937 - DNA, 15 bp, Homo sapiens
ctttccattccagcc

SEQ ID NO: 611938 - DNA, 15 bp, Homo sapiens
tttccattccagccc

SEQ ID NO: 611939 - DNA, 15 bp, Homo sapiens
ttccattccagccca

SEQ ID NO: 611940 - DNA, 15 bp, Homo sapiens
tccattccagcccag

SEQ ID NO: 611941 - DNA, 15 bp, Homo sapiens
ccattccagcccagt

SEQ ID NO: 611942 - DNA, 15 bp, Homo sapiens
cattccagcccagtg

SEQ ID NO: 611943 - DNA, 15 bp, Homo sapiens
attccagcccagtgg

SEQ ID NO: 611944 - DNA, 15 bp, Homo sapiens
ttccagcccagtggt

SEQ ID NO: 611945 - DNA, 15 bp, Homo sapiens
tccagcccagtggtg

SEQ ID NO: 611946 - DNA, 15 bp, Homo sapiens
ccagcccagtggtga

SEQ ID NO: 611947 - DNA, 15 bp, Homo sapiens
cagcccagtggtgat

SEQ ID NO: 611948 - DNA, 15 bp, Homo sapiens
agcccagtggtgatg

SEQ ID NO: 611949 - DNA, 15 bp, Homo sapiens
gcccagtggtgatgg

SEQ ID NO: 611950 - DNA, 15 bp, Homo sapiens
cccagtggtgatggg

SEQ ID NO: 611951 - DNA, 15 bp, Homo sapiens
ccagtggtgatgggg

SEQ ID NO: 611952 - DNA, 15 bp, Homo sapiens
cagtggtgatggggg

SEQ ID NO: 611953 - DNA, 15 bp, Homo sapiens
agtggtgatgggggc

SEQ ID NO: 611954 - DNA, 15 bp, Homo sapiens
gtggtgatgggggca

SEQ ID NO: 611955 - DNA, 15 bp, Homo sapiens
tggtgatgggggcaa

SEQ ID NO: 611956 - DNA, 15 bp, Homo sapiens
ggtgatgggggcaag

SEQ ID NO: 611957 - DNA, 15 bp, Homo sapiens
gtgatgggggcaaga

SEQ ID NO: 611958 - DNA, 15 bp, Homo sapiens
tgatgggggcaagac

SEQ ID NO: 611959 - DNA, 15 bp, Homo sapiens
gatgggggcaagaca

SEQ ID NO: 611960 - DNA, 15 bp, Homo sapiens
atgggggcaagacag

SEQ ID NO: 611961 - DNA, 15 bp, Homo sapiens
tgggggcaagacagg

SEQ ID NO: 611962 - DNA, 15 bp, Homo sapiens
gggggcaagacaggg

SEQ ID NO: 611963 - DNA, 15 bp, Homo sapiens
ggggcaagacagggt

SEQ ID NO: 611964 - DNA, 15 bp, Homo sapiens
gggcaagacagggtg

SEQ ID NO: 611965 - DNA, 15 bp, Homo sapiens
ggcaagacagggtgg

SEQ ID NO: 611966 - DNA, 15 bp, Homo sapiens
gcaagacagggtggc

SEQ ID NO: 611967 - DNA, 15 bp, Homo sapiens
caagacagggtggca

SEQ ID NO: 611968 - DNA, 15 bp, Homo sapiens
aagacagggtggcat

SEQ ID NO: 611969 - DNA, 15 bp, Homo sapiens
agacagggtggcatg

SEQ ID NO: 611970 - DNA, 15 bp, Homo sapiens
gacagggtggcatgt

SEQ ID NO: 611971 - DNA, 15 bp, Homo sapiens
acagggtggcatgta

SEQ ID NO: 611972 - DNA, 15 bp, Homo sapiens
cagggtggcatgtat

SEQ ID NO: 611973 - DNA, 15 bp, Homo sapiens
agggtggcatgtatc

SEQ ID NO: 611974 - DNA, 15 bp, Homo sapiens
gggtggcatgtatcc

SEQ ID NO: 611975 - DNA, 15 bp, Homo sapiens
ggtggcatgtatcct

SEQ ID NO: 611976 - DNA, 15 bp, Homo sapiens
gtggcatgtatcctg

SEQ ID NO: 611977 - DNA, 15 bp, Homo sapiens
tggcatgtatcctgt

SEQ ID NO: 611978 - DNA, 15 bp, Homo sapiens
ggcatgtatcctgtg

SEQ ID NO: 611979 - DNA, 15 bp, Homo sapiens
gcatgtatcctgtgt

SEQ ID NO: 611980 - DNA, 15 bp, Homo sapiens
catgtatcctgtgtg

SEQ ID NO: 611981 - DNA, 15 bp, Homo sapiens
atgtatcctgtgtgg

SEQ ID NO: 611982 - DNA, 15 bp, Homo sapiens
tgtatcctgtgtggg

SEQ ID NO: 611983 - DNA, 15 bp, Homo sapiens
gtatcctgtgtgggg

SEQ ID NO: 611984 - DNA, 15 bp, Homo sapiens
tatcctgtgtgggga

SEQ ID NO: 611985 - DNA, 15 bp, Homo sapiens
atcctgtgtggggat

SEQ ID NO: 611986 - DNA, 15 bp, Homo sapiens
tcctgtgtggggatg

SEQ ID NO: 611987 - DNA, 15 bp, Homo sapiens
cctgtgtggggatga

SEQ ID NO: 611988 - DNA, 15 bp, Homo sapiens
ctgtgtggggatgag

SEQ ID NO: 611989 - DNA, 15 bp, Homo sapiens
tgtgtggggatgagg

SEQ ID NO: 611990 - DNA, 15 bp, Homo sapiens
gtgtggggatgagga

SEQ ID NO: 611991 - DNA, 15 bp, Homo sapiens
tgtggggatgaggag

SEQ ID NO: 611992 - DNA, 15 bp, Homo sapiens
gtggggatgaggagc

SEQ ID NO: 611993 - DNA, 15 bp, Homo sapiens
tggggatgaggagca

SEQ ID NO: 611994 - DNA, 15 bp, Homo sapiens
ggggatgaggagcag

SEQ ID NO: 611995 - DNA, 15 bp, Homo sapiens
gggatgaggagcaga

SEQ ID NO: 611996 - DNA, 15 bp, Homo sapiens
ggatgaggagcagag

SEQ ID NO: 611997 - DNA, 15 bp, Homo sapiens
gatgaggagcagagg

SEQ ID NO: 611998 - DNA, 15 bp, Homo sapiens
atgaggagcagaggc

SEQ ID NO: 611999 - DNA, 15 bp, Homo sapiens
tgaggagcagaggcc

SEQ ID NO: 612000 - DNA, 15 bp, Homo sapiens
gaggagcagaggcct

SEQ ID NO: 612001 - DNA, 15 bp, Homo sapiens
aggagcagaggcctg

SEQ ID NO: 612002 - DNA, 15 bp, Homo sapiens
ggagcagaggcctgt

SEQ ID NO: 612003 - DNA, 15 bp, Homo sapiens
gagcagaggcctgta

SEQ ID NO: 612004 - DNA, 15 bp, Homo sapiens
agcagaggcctgtag

SEQ ID NO: 612005 - DNA, 15 bp, Homo sapiens
gcagaggcctgtagg

SEQ ID NO: 612006 - DNA, 15 bp, Homo sapiens
cagaggcctgtaggg

SEQ ID NO: 612007 - DNA, 15 bp, Homo sapiens
agaggcctgtaggga

SEQ ID NO: 612008 - DNA, 15 bp, Homo sapiens
gaggcctgtagggag

SEQ ID NO: 612009 - DNA, 15 bp, Homo sapiens
aggcctgtagggaga

SEQ ID NO: 612010 - DNA, 15 bp, Homo sapiens
ggcctgtagggagag

SEQ ID NO: 612011 - DNA, 15 bp, Homo sapiens
gcctgtagggagaga

SEQ ID NO: 612012 - DNA, 15 bp, Homo sapiens
cctgtagggagagac

SEQ ID NO: 612013 - DNA, 15 bp, Homo sapiens
ctgtagggagagact

SEQ ID NO: 612014 - DNA, 15 bp, Homo sapiens
tgtagggagagactg

SEQ ID NO: 612015 - DNA, 15 bp, Homo sapiens
gtagggagagactga

SEQ ID NO: 612016 - DNA, 15 bp, Homo sapiens
tagggagagactgag

SEQ ID NO: 612017 - DNA, 15 bp, Homo sapiens
agggagagactgagg

SEQ ID NO: 612018 - DNA, 15 bp, Homo sapiens
gggagagactgaggc

SEQ ID NO: 612019 - DNA, 15 bp, Homo sapiens
ggagagactgaggct

SEQ ID NO: 612020 - DNA, 15 bp, Homo sapiens
gagagactgaggctc

SEQ ID NO: 612021 - DNA, 15 bp, Homo sapiens
agagactgaggctcc

SEQ ID NO: 612022 - DNA, 15 bp, Homo sapiens
gagactgaggctccc

SEQ ID NO: 612023 - DNA, 15 bp, Homo sapiens
agactgaggctccct

SEQ ID NO: 612024 - DNA, 15 bp, Homo sapiens
gactgaggctccctg

SEQ ID NO: 612025 - DNA, 15 bp, Homo sapiens
actgaggctccctgc

SEQ ID NO: 612026 - DNA, 15 bp, Homo sapiens
ctgaggctccctgct

SEQ ID NO: 612027 - DNA, 15 bp, Homo sapiens
tgaggctccctgctg

SEQ ID NO: 612028 - DNA, 15 bp, Homo sapiens
gaggctccctgctgc

SEQ ID NO: 612029 - DNA, 15 bp, Homo sapiens
aggctccctgctgcc

SEQ ID NO: 612030 - DNA, 15 bp, Homo sapiens
ggctccctgctgcca

SEQ ID NO: 612031 - DNA, 15 bp, Homo sapiens
gctccctgctgccac

SEQ ID NO: 612032 - DNA, 15 bp, Homo sapiens
ctccctgctgccacc

SEQ ID NO: 612033 - DNA, 15 bp, Homo sapiens
tccctgctgccacct

SEQ ID NO: 612034 - DNA, 15 bp, Homo sapiens
ccctgctgccacctt

SEQ ID NO: 612035 - DNA, 15 bp, Homo sapiens
cctgctgccaccttg

SEQ ID NO: 612036 - DNA, 15 bp, Homo sapiens
ctgctgccaccttgt

SEQ ID NO: 612037 - DNA, 15 bp, Homo sapiens
tgctgccaccttgtc

SEQ ID NO: 612038 - DNA, 15 bp, Homo sapiens
gctgccaccttgtca

SEQ ID NO: 612039 - DNA, 15 bp, Homo sapiens
ctgccaccttgtcat

SEQ ID NO: 612040 - DNA, 15 bp, Homo sapiens
tgccaccttgtcatc

SEQ ID NO: 612041 - DNA, 15 bp, Homo sapiens
gccaccttgtcatct

SEQ ID NO: 612042 - DNA, 15 bp, Homo sapiens
ccaccttgtcatctt

SEQ ID NO: 612043 - DNA, 15 bp, Homo sapiens
caccttgtcatcttg

SEQ ID NO: 612044 - DNA, 15 bp, Homo sapiens
accttgtcatcttga

SEQ ID NO: 612045 - DNA, 15 bp, Homo sapiens
ccttgtcatcttgac

SEQ ID NO: 612046 - DNA, 15 bp, Homo sapiens
cttgtcatcttgacc

SEQ ID NO: 612047 - DNA, 15 bp, Homo sapiens
ttgtcatcttgaccc

SEQ ID NO: 612048 - DNA, 15 bp, Homo sapiens
tgtcatcttgacccc

SEQ ID NO: 612049 - DNA, 15 bp, Homo sapiens
gtcatcttgaccccc

SEQ ID NO: 612050 - DNA, 15 bp, Homo sapiens
tcatcttgacccccc

SEQ ID NO: 612051 - DNA, 15 bp, Homo sapiens
catcttgaccccccc

SEQ ID NO: 612052 - DNA, 15 bp, Homo sapiens
atcttgaccccccca

SEQ ID NO: 612053 - DNA, 15 bp, Homo sapiens
tcttgacccccccac

SEQ ID NO: 612054 - DNA, 15 bp, Homo sapiens
cttgacccccccacg

SEQ ID NO: 612055 - DNA, 15 bp, Homo sapiens
ttgacccccccacgt

SEQ ID NO: 612056 - DNA, 15 bp, Homo sapiens
tgacccccccacgtc

SEQ ID NO: 612057 - DNA, 15 bp, Homo sapiens
gacccccccacgtcc

SEQ ID NO: 612058 - DNA, 15 bp, Homo sapiens
acccccccacgtccc

SEQ ID NO: 612059 - DNA, 15 bp, Homo sapiens
cccccccacgtcccc

SEQ ID NO: 612060 - DNA, 15 bp, Homo sapiens
ccccccacgtccccg

SEQ ID NO: 612061 - DNA, 15 bp, Homo sapiens
cccccacgtccccgt

SEQ ID NO: 612062 - DNA, 15 bp, Homo sapiens
ccccacgtccccgtt

SEQ ID NO: 612063 - DNA, 15 bp, Homo sapiens
cccacgtccccgttt

SEQ ID NO: 612064 - DNA, 15 bp, Homo sapiens
ccacgtccccgtttc

SEQ ID NO: 612065 - DNA, 15 bp, Homo sapiens
cacgtccccgtttct

SEQ ID NO: 612066 - DNA, 15 bp, Homo sapiens
acgtccccgtttctc

SEQ ID NO: 612067 - DNA, 15 bp, Homo sapiens
cgtccccgtttctca

SEQ ID NO: 612068 - DNA, 15 bp, Homo sapiens
gtccccgtttctcac

SEQ ID NO: 612069 - DNA, 15 bp, Homo sapiens
tccccgtttctcact

SEQ ID NO: 612070 - DNA, 15 bp, Homo sapiens
ccccgtttctcactt

SEQ ID NO: 612071 - DNA, 15 bp, Homo sapiens
cccgtttctcacttc

SEQ ID NO: 612072 - DNA, 15 bp, Homo sapiens
ccgtttctcacttct

SEQ ID NO: 612073 - DNA, 15 bp, Homo sapiens
cgtttctcacttctc

SEQ ID NO: 612074 - DNA, 15 bp, Homo sapiens
gtttctcacttctct

SEQ ID NO: 612075 - DNA, 15 bp, Homo sapiens
tttctcacttctcta

SEQ ID NO: 612076 - DNA, 15 bp, Homo sapiens
ttctcacttctctat

SEQ ID NO: 612077 - DNA, 15 bp, Homo sapiens
tctcacttctctatc

SEQ ID NO: 612078 - DNA, 15 bp, Homo sapiens
ctcacttctctatcc

SEQ ID NO: 612079 - DNA, 15 bp, Homo sapiens
tcacttctctatcct

SEQ ID NO: 612080 - DNA, 15 bp, Homo sapiens
cacttctctatcctc

SEQ ID NO: 612081 - DNA, 15 bp, Homo sapiens
acttctctatcctct

SEQ ID NO: 612082 - DNA, 15 bp, Homo sapiens
cttctctatcctctg

SEQ ID NO: 612083 - DNA, 15 bp, Homo sapiens
ttctctatcctctga

SEQ ID NO: 612084 - DNA, 15 bp, Homo sapiens
tctctatcctctgac

SEQ ID NO: 612085 - DNA, 15 bp, Homo sapiens
ctctatcctctgaca

SEQ ID NO: 612086 - DNA, 15 bp, Homo sapiens
tctatcctctgacac

SEQ ID NO: 612087 - DNA, 15 bp, Homo sapiens
ctatcctctgacact

SEQ ID NO: 612088 - DNA, 15 bp, Homo sapiens
tatcctctgacactg

SEQ ID NO: 612089 - DNA, 15 bp, Homo sapiens
atcctctgacactgt

SEQ ID NO: 612090 - DNA, 15 bp, Homo sapiens
tcctctgacactgtc

SEQ ID NO: 612091 - DNA, 15 bp, Homo sapiens
cctctgacactgtca

SEQ ID NO: 612092 - DNA, 15 bp, Homo sapiens
ctctgacactgtcac

SEQ ID NO: 612093 - DNA, 15 bp, Homo sapiens
tctgacactgtcact

SEQ ID NO: 612094 - DNA, 15 bp, Homo sapiens
ctgacactgtcactg

SEQ ID NO: 612095 - DNA, 15 bp, Homo sapiens
tgacactgtcactgc

SEQ ID NO: 612096 - DNA, 15 bp, Homo sapiens
gacactgtcactgca

SEQ ID NO: 612097 - DNA, 15 bp, Homo sapiens
acactgtcactgcag

SEQ ID NO: 612098 - DNA, 15 bp, Homo sapiens
cactgtcactgcagc

SEQ ID NO: 612099 - DNA, 15 bp, Homo sapiens
actgtcactgcagcc

SEQ ID NO: 612100 - DNA, 15 bp, Homo sapiens
ctgtcactgcagccc

SEQ ID NO: 612101 - DNA, 15 bp, Homo sapiens
tgtcactgcagccct

SEQ ID NO: 612102 - DNA, 15 bp, Homo sapiens
gtcactgcagcccta

SEQ ID NO: 612103 - DNA, 15 bp, Homo sapiens
tcactgcagccctac

SEQ ID NO: 612104 - DNA, 15 bp, Homo sapiens
cactgcagccctact

SEQ ID NO: 612105 - DNA, 15 bp, Homo sapiens
actgcagccctacta

SEQ ID NO: 612106 - DNA, 15 bp, Homo sapiens
ctgcagccctactag

SEQ ID NO: 612107 - DNA, 15 bp, Homo sapiens
tgcagccctactagc

SEQ ID NO: 612108 - DNA, 15 bp, Homo sapiens
gcagccctactagca

SEQ ID NO: 612109 - DNA, 15 bp, Homo sapiens
cagccctactagcag

SEQ ID NO: 612110 - DNA, 15 bp, Homo sapiens
agccctactagcaga

SEQ ID NO: 612111 - DNA, 15 bp, Homo sapiens
gccctactagcagac

SEQ ID NO: 612112 - DNA, 15 bp, Homo sapiens
ccctactagcagaca

SEQ ID NO: 612113 - DNA, 15 bp, Homo sapiens
cctactagcagacac

SEQ ID NO: 612114 - DNA, 15 bp, Homo sapiens
ctactagcagacacg

SEQ ID NO: 612115 - DNA, 15 bp, Homo sapiens
tactagcagacacgt

SEQ ID NO: 612116 - DNA, 15 bp, Homo sapiens
actagcagacacgtg

SEQ ID NO: 612117 - DNA, 15 bp, Homo sapiens
ctagcagacacgtgt

SEQ ID NO: 612118 - DNA, 15 bp, Homo sapiens
tagcagacacgtgtg

SEQ ID NO: 612119 - DNA, 15 bp, Homo sapiens
agcagacacgtgtgc

SEQ ID NO: 612120 - DNA, 15 bp, Homo sapiens
gcagacacgtgtgct

SEQ ID NO: 612121 - DNA, 15 bp, Homo sapiens
cagacacgtgtgctt

SEQ ID NO: 612122 - DNA, 15 bp, Homo sapiens
agacacgtgtgcttg

SEQ ID NO: 612123 - DNA, 15 bp, Homo sapiens
gacacgtgtgcttgg

SEQ ID NO: 612124 - DNA, 15 bp, Homo sapiens
acacgtgtgcttggc

SEQ ID NO: 612125 - DNA, 15 bp, Homo sapiens
cacgtgtgcttggct

SEQ ID NO: 612126 - DNA, 15 bp, Homo sapiens
acgtgtgcttggctt

SEQ ID NO: 612127 - DNA, 15 bp, Homo sapiens
cgtgtgcttggcttc

SEQ ID NO: 612128 - DNA, 15 bp, Homo sapiens
gtgtgcttggcttcc

SEQ ID NO: 612129 - DNA, 15 bp, Homo sapiens
tgtgcttggcttccc

SEQ ID NO: 612130 - DNA, 15 bp, Homo sapiens
gtgcttggcttcccc

SEQ ID NO: 612131 - DNA, 15 bp, Homo sapiens
tgcttggcttccccc

SEQ ID NO: 612132 - DNA, 15 bp, Homo sapiens
gcttggcttcccccc

SEQ ID NO: 612133 - DNA, 15 bp, Homo sapiens
cttggcttccccccc

SEQ ID NO: 612134 - DNA, 15 bp, Homo sapiens
ttggcttcccccccg

SEQ ID NO: 612135 - DNA, 15 bp, Homo sapiens
tggcttcccccccgc

SEQ ID NO: 612136 - DNA, 15 bp, Homo sapiens
ggcttcccccccgcc

SEQ ID NO: 612137 - DNA, 15 bp, Homo sapiens
gcttcccccccgcca

SEQ ID NO: 612138 - DNA, 15 bp, Homo sapiens
cttcccccccgccat

SEQ ID NO: 612139 - DNA, 15 bp, Homo sapiens
ttcccccccgccatt

SEQ ID NO: 612140 - DNA, 15 bp, Homo sapiens
tcccccccgccattg

SEQ ID NO: 612141 - DNA, 15 bp, Homo sapiens
cccccccgccattgt

SEQ ID NO: 612142 - DNA, 15 bp, Homo sapiens
ccccccgccattgtg

SEQ ID NO: 612143 - DNA, 15 bp, Homo sapiens
cccccgccattgtga

SEQ ID NO: 612144 - DNA, 15 bp, Homo sapiens
ccccgccattgtgaa

SEQ ID NO: 612145 - DNA, 15 bp, Homo sapiens
cccgccattgtgaac

SEQ ID NO: 612146 - DNA, 15 bp, Homo sapiens
ccgccattgtgaaca

SEQ ID NO: 612147 - DNA, 15 bp, Homo sapiens
cgccattgtgaacag

SEQ ID NO: 612148 - DNA, 15 bp, Homo sapiens
gccattgtgaacagt

SEQ ID NO: 612149 - DNA, 15 bp, Homo sapiens
ccattgtgaacagtc

SEQ ID NO: 612150 - DNA, 15 bp, Homo sapiens
cattgtgaacagtct

SEQ ID NO: 612151 - DNA, 15 bp, Homo sapiens
attgtgaacagtctc

SEQ ID NO: 612152 - DNA, 15 bp, Homo sapiens
ttgtgaacagtctcc

SEQ ID NO: 612153 - DNA, 15 bp, Homo sapiens
tgtgaacagtctccc

SEQ ID NO: 612154 - DNA, 15 bp, Homo sapiens
gtgaacagtctcccc

SEQ ID NO: 612155 - DNA, 15 bp, Homo sapiens
tgaacagtctcccct

SEQ ID NO: 612156 - DNA, 15 bp, Homo sapiens
gaacagtctcccctg

SEQ ID NO: 612157 - DNA, 15 bp, Homo sapiens
aacagtctcccctga

SEQ ID NO: 612158 - DNA, 15 bp, Homo sapiens
acagtctcccctgac

SEQ ID NO: 612159 - DNA, 15 bp, Homo sapiens
cagtctcccctgacc

SEQ ID NO: 612160 - DNA, 15 bp, Homo sapiens
agtctcccctgaccc

SEQ ID NO: 612161 - DNA, 15 bp, Homo sapiens
gtctcccctgacccc

SEQ ID NO: 612162 - DNA, 15 bp, Homo sapiens
tctcccctgacccct

SEQ ID NO: 612163 - DNA, 15 bp, Homo sapiens
ctcccctgacccctg

SEQ ID NO: 612164 - DNA, 15 bp, Homo sapiens
tcccctgacccctgg

SEQ ID NO: 612165 - DNA, 15 bp, Homo sapiens
cccctgacccctggc

SEQ ID NO: 612166 - DNA, 15 bp, Homo sapiens
ccctgacccctggct

SEQ ID NO: 612167 - DNA, 15 bp, Homo sapiens
cctgacccctggctc

SEQ ID NO: 612168 - DNA, 15 bp, Homo sapiens
ctgacccctggctca

SEQ ID NO: 612169 - DNA, 15 bp, Homo sapiens
tgacccctggctcag

SEQ ID NO: 612170 - DNA, 15 bp, Homo sapiens
gacccctggctcagc

SEQ ID NO: 612171 - DNA, 15 bp, Homo sapiens
acccctggctcagct

SEQ ID NO: 612172 - DNA, 15 bp, Homo sapiens
cccctggctcagctg

SEQ ID NO: 612173 - DNA, 15 bp, Homo sapiens
ccctggctcagctgc

SEQ ID NO: 612174 - DNA, 15 bp, Homo sapiens
cctggctcagctgcc

SEQ ID NO: 612175 - DNA, 15 bp, Homo sapiens
ctggctcagctgcct

SEQ ID NO: 612176 - DNA, 15 bp, Homo sapiens
tggctcagctgcctc

SEQ ID NO: 612177 - DNA, 15 bp, Homo sapiens
ggctcagctgcctct

SEQ ID NO: 612178 - DNA, 15 bp, Homo sapiens
gctcagctgcctctc

SEQ ID NO: 612179 - DNA, 15 bp, Homo sapiens
ctcagctgcctctcc

SEQ ID NO: 612180 - DNA, 15 bp, Homo sapiens
tcagctgcctctcca

SEQ ID NO: 612181 - DNA, 15 bp, Homo sapiens
cagctgcctctccag

SEQ ID NO: 612182 - DNA, 15 bp, Homo sapiens
agctgcctctccaga

SEQ ID NO: 612183 - DNA, 15 bp, Homo sapiens
gctgcctctccagat

SEQ ID NO: 612184 - DNA, 15 bp, Homo sapiens
ctgcctctccagatt

SEQ ID NO: 612185 - DNA, 15 bp, Homo sapiens
tgcctctccagattc

SEQ ID NO: 612186 - DNA, 15 bp, Homo sapiens
gcctctccagattcc

SEQ ID NO: 612187 - DNA, 15 bp, Homo sapiens
cctctccagattcca

SEQ ID NO: 612188 - DNA, 15 bp, Homo sapiens
tcatctagggacacg

SEQ ID NO: 612189 - DNA, 15 bp, Homo sapiens
catctagggacacgt

SEQ ID NO: 612190 - DNA, 15 bp, Homo sapiens
atctagggacacgtt

SEQ ID NO: 612191 - DNA, 15 bp, Homo sapiens
tctagggacacgtta

SEQ ID NO: 612192 - DNA, 15 bp, Homo sapiens
ctagggacacgttag

SEQ ID NO: 612193 - DNA, 15 bp, Homo sapiens
tagggacacgttagg

SEQ ID NO: 612194 - DNA, 15 bp, Homo sapiens
agggacacgttagga

SEQ ID NO: 612195 - DNA, 15 bp, Homo sapiens
gggacacgttaggaa

SEQ ID NO: 612196 - DNA, 15 bp, Homo sapiens
ggacacgttaggaat

SEQ ID NO: 612197 - DNA, 15 bp, Homo sapiens
gacacgttaggaatg

SEQ ID NO: 612198 - DNA, 15 bp, Homo sapiens
acacgttaggaatgt

SEQ ID NO: 612199 - DNA, 15 bp, Homo sapiens
cacgttaggaatgtc

SEQ ID NO: 612200 - DNA, 15 bp, Homo sapiens
acgttaggaatgtcc

SEQ ID NO: 612201 - DNA, 15 bp, Homo sapiens
cgttaggaatgtcca

SEQ ID NO: 612202 - DNA, 15 bp, Homo sapiens
gttaggaatgtccag

SEQ ID NO: 612203 - DNA, 15 bp, Homo sapiens
ttaggaatgtccaga

SEQ ID NO: 612204 - DNA, 15 bp, Homo sapiens
taggaatgtccagac

SEQ ID NO: 612205 - DNA, 15 bp, Homo sapiens
aggaatgtccagact

SEQ ID NO: 612206 - DNA, 15 bp, Homo sapiens
ggaatgtccagactg

SEQ ID NO: 612207 - DNA, 15 bp, Homo sapiens
gaatgtccagactgt

SEQ ID NO: 612208 - DNA, 15 bp, Homo sapiens
aatgtccagactgtg

SEQ ID NO: 612209 - DNA, 15 bp, Homo sapiens
atgtccagactgtgg

SEQ ID NO: 612210 - DNA, 15 bp, Homo sapiens
tgtccagactgtggg

SEQ ID NO: 612211 - DNA, 15 bp, Homo sapiens
gtccagactgtgggt

SEQ ID NO: 612212 - DNA, 15 bp, Homo sapiens
tccagactgtgggtg

SEQ ID NO: 612213 - DNA, 15 bp, Homo sapiens
ccagactgtgggtgt

SEQ ID NO: 612214 - DNA, 15 bp, Homo sapiens
cagactgtgggtgta

SEQ ID NO: 612215 - DNA, 15 bp, Homo sapiens
agactgtgggtgtag

SEQ ID NO: 612216 - DNA, 15 bp, Homo sapiens
gactgtgggtgtaga

SEQ ID NO: 612217 - DNA, 15 bp, Homo sapiens
actgtgggtgtagat

SEQ ID NO: 612218 - DNA, 15 bp, Homo sapiens
ctgtgggtgtagatt

SEQ ID NO: 612219 - DNA, 15 bp, Homo sapiens
tgtgggtgtagatta

SEQ ID NO: 612220 - DNA, 15 bp, Homo sapiens
gtgggtgtagattac

SEQ ID NO: 612221 - DNA, 15 bp, Homo sapiens
tgggtgtagattacc

SEQ ID NO: 612222 - DNA, 15 bp, Homo sapiens
gggtgtagattacct

SEQ ID NO: 612223 - DNA, 15 bp, Homo sapiens
ggtgtagattacctg

SEQ ID NO: 612224 - DNA, 15 bp, Homo sapiens
gtgtagattacctgc

SEQ ID NO: 612225 - DNA, 15 bp, Homo sapiens
tgtagattacctgcc

SEQ ID NO: 612226 - DNA, 15 bp, Homo sapiens
gtagattacctgcca

SEQ ID NO: 612227 - DNA, 15 bp, Homo sapiens
tagattacctgccac

SEQ ID NO: 612228 - DNA, 15 bp, Homo sapiens
agattacctgccact

SEQ ID NO: 612229 - DNA, 15 bp, Homo sapiens
gattacctgccactt

SEQ ID NO: 612230 - DNA, 15 bp, Homo sapiens
attacctgccacttc

SEQ ID NO: 612231 - DNA, 15 bp, Homo sapiens
ttacctgccacttcc

SEQ ID NO: 612232 - DNA, 15 bp, Homo sapiens
tacctgccacttcca

SEQ ID NO: 612233 - DNA, 15 bp, Homo sapiens
acctgccacttccag

SEQ ID NO: 612234 - DNA, 15 bp, Homo sapiens
cctgccacttccagg

SEQ ID NO: 612235 - DNA, 15 bp, Homo sapiens
ctgccacttccagga

SEQ ID NO: 612236 - DNA, 15 bp, Homo sapiens
tgccacttccaggag

SEQ ID NO: 612237 - DNA, 15 bp, Homo sapiens
gccacttccaggagc

SEQ ID NO: 612238 - DNA, 15 bp, Homo sapiens
ccacttccaggagcc

SEQ ID NO: 612239 - DNA, 15 bp, Homo sapiens
cacttccaggagccc

SEQ ID NO: 612240 - DNA, 15 bp, Homo sapiens
acttccaggagccca

SEQ ID NO: 612241 - DNA, 15 bp, Homo sapiens
cttccaggagcccag

SEQ ID NO: 612242 - DNA, 15 bp, Homo sapiens
ttccaggagcccaga

SEQ ID NO: 612243 - DNA, 15 bp, Homo sapiens
tccaggagcccagag

SEQ ID NO: 612244 - DNA, 15 bp, Homo sapiens
ccaggagcccagagg

SEQ ID NO: 612245 - DNA, 15 bp, Homo sapiens
caggagcccagaggg

SEQ ID NO: 612246 - DNA, 15 bp, Homo sapiens
aggagcccagagggc

SEQ ID NO: 612247 - DNA, 15 bp, Homo sapiens
ggagcccagagggcc

SEQ ID NO: 612248 - DNA, 15 bp, Homo sapiens
gagcccagagggcca

SEQ ID NO: 612249 - DNA, 15 bp, Homo sapiens
agcccagagggccaa

SEQ ID NO: 612250 - DNA, 15 bp, Homo sapiens
gcccagagggccaag

SEQ ID NO: 612251 - DNA, 15 bp, Homo sapiens
cccagagggccaaga

SEQ ID NO: 612252 - DNA, 15 bp, Homo sapiens
ccagagggccaagag

SEQ ID NO: 612253 - DNA, 15 bp, Homo sapiens
cagagggccaagaga

SEQ ID NO: 612254 - DNA, 15 bp, Homo sapiens
agagggccaagagag

SEQ ID NO: 612255 - DNA, 15 bp, Homo sapiens
gagggccaagagaga

SEQ ID NO: 612256 - DNA, 15 bp, Homo sapiens
agggccaagagagac

SEQ ID NO: 612257 - DNA, 15 bp, Homo sapiens
gggccaagagagaca

SEQ ID NO: 612258 - DNA, 15 bp, Homo sapiens
ggccaagagagacat

SEQ ID NO: 612259 - DNA, 15 bp, Homo sapiens
gccaagagagacatt

SEQ ID NO: 612260 - DNA, 15 bp, Homo sapiens
ccaagagagacattg

SEQ ID NO: 612261 - DNA, 15 bp, Homo sapiens
caagagagacattgc

SEQ ID NO: 612262 - DNA, 15 bp, Homo sapiens
aagagagacattgcc

SEQ ID NO: 612263 - DNA, 15 bp, Homo sapiens
agagagacattgcct

SEQ ID NO: 612264 - DNA, 15 bp, Homo sapiens
gagagacattgcctc

SEQ ID NO: 612265 - DNA, 15 bp, Homo sapiens
agagacattgcctcc

SEQ ID NO: 612266 - DNA, 15 bp, Homo sapiens
gagacattgcctcca

SEQ ID NO: 612267 - DNA, 15 bp, Homo sapiens
agacattgcctccac

SEQ ID NO: 612268 - DNA, 15 bp, Homo sapiens
gacattgcctccacc

SEQ ID NO: 612269 - DNA, 15 bp, Homo sapiens
acattgcctccacct

SEQ ID NO: 612270 - DNA, 15 bp, Homo sapiens
cattgcctccacctc

SEQ ID NO: 612271 - DNA, 15 bp, Homo sapiens
attgcctccacctct

SEQ ID NO: 612272 - DNA, 15 bp, Homo sapiens
ttgcctccacctctc

SEQ ID NO: 612273 - DNA, 15 bp, Homo sapiens
tgcctccacctctcc

SEQ ID NO: 612274 - DNA, 15 bp, Homo sapiens
gcctccacctctcct

SEQ ID NO: 612275 - DNA, 15 bp, Homo sapiens
cctccacctctcctt

SEQ ID NO: 612276 - DNA, 15 bp, Homo sapiens
ctccacctctccttg

SEQ ID NO: 612277 - DNA, 15 bp, Homo sapiens
tccacctctccttgg

SEQ ID NO: 612278 - DNA, 15 bp, Homo sapiens
ccacctctccttgga

SEQ ID NO: 612279 - DNA, 15 bp, Homo sapiens
cacctctccttggaa

SEQ ID NO: 612280 - DNA, 15 bp, Homo sapiens
acctctccttggaaa

SEQ ID NO: 612281 - DNA, 15 bp, Homo sapiens
cctctccttggaaat

SEQ ID NO: 612282 - DNA, 15 bp, Homo sapiens
ctctccttggaaata

SEQ ID NO: 612283 - DNA, 15 bp, Homo sapiens
tctccttggaaatac

SEQ ID NO: 612284 - DNA, 15 bp, Homo sapiens
ctccttggaaatact

SEQ ID NO: 612285 - DNA, 15 bp, Homo sapiens
tccttggaaatactt

SEQ ID NO: 612286 - DNA, 15 bp, Homo sapiens
ccttggaaatacttt

SEQ ID NO: 612287 - DNA, 15 bp, Homo sapiens
cttggaaatacttta

SEQ ID NO: 612288 - DNA, 15 bp, Homo sapiens
ttggaaatactttat

SEQ ID NO: 612289 - DNA, 15 bp, Homo sapiens
tggaaatactttatc

SEQ ID NO: 612290 - DNA, 15 bp, Homo sapiens
ggaaatactttatct

SEQ ID NO: 612291 - DNA, 15 bp, Homo sapiens
gaaatactttatctg

SEQ ID NO: 612292 - DNA, 15 bp, Homo sapiens
aaatactttatctgt

SEQ ID NO: 612293 - DNA, 15 bp, Homo sapiens
aatactttatctgtg

SEQ ID NO: 612294 - DNA, 15 bp, Homo sapiens
atactttatctgtga

SEQ ID NO: 612295 - DNA, 15 bp, Homo sapiens
tactttatctgtgac

SEQ ID NO: 612296 - DNA, 15 bp, Homo sapiens
actttatctgtgacc

SEQ ID NO: 612297 - DNA, 15 bp, Homo sapiens
ctttatctgtgacca

SEQ ID NO: 612298 - DNA, 15 bp, Homo sapiens
tttatctgtgaccac

SEQ ID NO: 612299 - DNA, 15 bp, Homo sapiens
ttatctgtgaccaca

SEQ ID NO: 612300 - DNA, 15 bp, Homo sapiens
tatctgtgaccacac

SEQ ID NO: 612301 - DNA, 15 bp, Homo sapiens
atctgtgaccacacg

SEQ ID NO: 612302 - DNA, 15 bp, Homo sapiens
tctgtgaccacacgc

SEQ ID NO: 612303 - DNA, 15 bp, Homo sapiens
ctgtgaccacacgct

SEQ ID NO: 612304 - DNA, 15 bp, Homo sapiens
tgtgaccacacgctg

SEQ ID NO: 612305 - DNA, 15 bp, Homo sapiens
gtgaccacacgctgt

SEQ ID NO: 612306 - DNA, 15 bp, Homo sapiens
tgaccacacgctgtc

SEQ ID NO: 612307 - DNA, 15 bp, Homo sapiens
gaccacacgctgtct

SEQ ID NO: 612308 - DNA, 15 bp, Homo sapiens
accacacgctgtctc

SEQ ID NO: 612309 - DNA, 15 bp, Homo sapiens
ccacacgctgtctct

SEQ ID NO: 612310 - DNA, 15 bp, Homo sapiens
cacacgctgtctctt

SEQ ID NO: 612311 - DNA, 15 bp, Homo sapiens
acacgctgtctcttg

SEQ ID NO: 612312 - DNA, 15 bp, Homo sapiens
cacgctgtctcttga

SEQ ID NO: 612313 - DNA, 15 bp, Homo sapiens
acgctgtctcttgag

SEQ ID NO: 612314 - DNA, 15 bp, Homo sapiens
cgctgtctcttgaga

SEQ ID NO: 612315 - DNA, 15 bp, Homo sapiens
gctgtctcttgagaa

SEQ ID NO: 612316 - DNA, 15 bp, Homo sapiens
ctgtctcttgagaat

SEQ ID NO: 612317 - DNA, 15 bp, Homo sapiens
tgtctcttgagaatt

SEQ ID NO: 612318 - DNA, 15 bp, Homo sapiens
gtctcttgagaattt

SEQ ID NO: 612319 - DNA, 15 bp, Homo sapiens
tctcttgagaatttg

SEQ ID NO: 612320 - DNA, 15 bp, Homo sapiens
ctcttgagaatttgg

SEQ ID NO: 612321 - DNA, 15 bp, Homo sapiens
tcttgagaatttgga

SEQ ID NO: 612322 - DNA, 15 bp, Homo sapiens
cttgagaatttggat

SEQ ID NO: 612323 - DNA, 15 bp, Homo sapiens
ttgagaatttggata

SEQ ID NO: 612324 - DNA, 15 bp, Homo sapiens
tgagaatttggatac

SEQ ID NO: 612325 - DNA, 15 bp, Homo sapiens
gagaatttggataca

SEQ ID NO: 612326 - DNA, 15 bp, Homo sapiens
agaatttggatacac

SEQ ID NO: 612327 - DNA, 15 bp, Homo sapiens
gaatttggatacact

SEQ ID NO: 612328 - DNA, 15 bp, Homo sapiens
aatttggatacactc

SEQ ID NO: 612329 - DNA, 15 bp, Homo sapiens
atttggatacactct

SEQ ID NO: 612330 - DNA, 15 bp, Homo sapiens
tttggatacactctc

SEQ ID NO: 612331 - DNA, 15 bp, Homo sapiens
ttggatacactctct

SEQ ID NO: 612332 - DNA, 15 bp, Homo sapiens
tggatacactctcta

SEQ ID NO: 612333 - DNA, 15 bp, Homo sapiens
ggatacactctctag

SEQ ID NO: 612334 - DNA, 15 bp, Homo sapiens
gatacactctctagc

SEQ ID NO: 612335 - DNA, 15 bp, Homo sapiens
atacactctctagct

SEQ ID NO: 612336 - DNA, 15 bp, Homo sapiens
tacactctctagctt

SEQ ID NO: 612337 - DNA, 15 bp, Homo sapiens
acactctctagcttt

SEQ ID NO: 612338 - DNA, 15 bp, Homo sapiens
cactctctagcttta

SEQ ID NO: 612339 - DNA, 15 bp, Homo sapiens
actctctagctttag

SEQ ID NO: 612340 - DNA, 15 bp, Homo sapiens
ctctctagctttagg

SEQ ID NO: 612341 - DNA, 15 bp, Homo sapiens
tctctagctttaggg

SEQ ID NO: 612342 - DNA, 15 bp, Homo sapiens
ctctagctttagggg

SEQ ID NO: 612343 - DNA, 15 bp, Homo sapiens
tctagctttagggga

SEQ ID NO: 612344 - DNA, 15 bp, Homo sapiens
ctagctttaggggac

SEQ ID NO: 612345 - DNA, 15 bp, Homo sapiens
tagctttaggggacc

SEQ ID NO: 612346 - DNA, 15 bp, Homo sapiens
agctttaggggacca

SEQ ID NO: 612347 - DNA, 15 bp, Homo sapiens
gctttaggggaccat

SEQ ID NO: 612348 - DNA, 15 bp, Homo sapiens
ctttaggggaccatg

SEQ ID NO: 612349 - DNA, 15 bp, Homo sapiens
tttaggggaccatga

SEQ ID NO: 612350 - DNA, 15 bp, Homo sapiens
ttaggggaccatgaa

SEQ ID NO: 612351 - DNA, 15 bp, Homo sapiens
taggggaccatgaag

SEQ ID NO: 612352 - DNA, 15 bp, Homo sapiens
aggggaccatgaaga

SEQ ID NO: 612353 - DNA, 15 bp, Homo sapiens
ggggaccatgaagag

SEQ ID NO: 612354 - DNA, 15 bp, Homo sapiens
gggaccatgaagaga

SEQ ID NO: 612355 - DNA, 15 bp, Homo sapiens
ggaccatgaagagac

SEQ ID NO: 612356 - DNA, 15 bp, Homo sapiens
gaccatgaagagact

SEQ ID NO: 612357 - DNA, 15 bp, Homo sapiens
accatgaagagactc

SEQ ID NO: 612358 - DNA, 15 bp, Homo sapiens
ccatgaagagactct

SEQ ID NO: 612359 - DNA, 15 bp, Homo sapiens
catgaagagactctc

SEQ ID NO: 612360 - DNA, 15 bp, Homo sapiens
atgaagagactctct

SEQ ID NO: 612361 - DNA, 15 bp, Homo sapiens
tgaagagactctctt

SEQ ID NO: 612362 - DNA, 15 bp, Homo sapiens
gaagagactctctta

SEQ ID NO: 612363 - DNA, 15 bp, Homo sapiens
aagagactctcttag

SEQ ID NO: 612364 - DNA, 15 bp, Homo sapiens
agagactctcttagg

SEQ ID NO: 612365 - DNA, 15 bp, Homo sapiens
gagactctcttaggg

SEQ ID NO: 612366 - DNA, 15 bp, Homo sapiens
agactctcttaggga

SEQ ID NO: 612367 - DNA, 15 bp, Homo sapiens
gactctcttagggaa

SEQ ID NO: 612368 - DNA, 15 bp, Homo sapiens
actctcttagggaaa

SEQ ID NO: 612369 - DNA, 15 bp, Homo sapiens
ctctcttagggaaac

SEQ ID NO: 612370 - DNA, 15 bp, Homo sapiens
tctcttagggaaacc

SEQ ID NO: 612371 - DNA, 15 bp, Homo sapiens
ctcttagggaaacca

SEQ ID NO: 612372 - DNA, 15 bp, Homo sapiens
tcttagggaaaccaa

SEQ ID NO: 612373 - DNA, 15 bp, Homo sapiens
cttagggaaaccaat

SEQ ID NO: 612374 - DNA, 15 bp, Homo sapiens
ttagggaaaccaata

SEQ ID NO: 612375 - DNA, 15 bp, Homo sapiens
tagggaaaccaatag

SEQ ID NO: 612376 - DNA, 15 bp, Homo sapiens
agggaaaccaatagt

SEQ ID NO: 612377 - DNA, 15 bp, Homo sapiens
gggaaaccaatagtc

SEQ ID NO: 612378 - DNA, 15 bp, Homo sapiens
ggaaaccaatagtcc

SEQ ID NO: 612379 - DNA, 15 bp, Homo sapiens
gaaaccaatagtccc

SEQ ID NO: 612380 - DNA, 15 bp, Homo sapiens
aaaccaatagtcccc

SEQ ID NO: 612381 - DNA, 15 bp, Homo sapiens
aaccaatagtcccca

SEQ ID NO: 612382 - DNA, 15 bp, Homo sapiens
accaatagtccccat

SEQ ID NO: 612383 - DNA, 15 bp, Homo sapiens
ccaatagtccccatc

SEQ ID NO: 612384 - DNA, 15 bp, Homo sapiens
caatagtccccatca

SEQ ID NO: 612385 - DNA, 15 bp, Homo sapiens
aatagtccccatcag

SEQ ID NO: 612386 - DNA, 15 bp, Homo sapiens
atagtccccatcagc

SEQ ID NO: 612387 - DNA, 15 bp, Homo sapiens
tagtccccatcagca

SEQ ID NO: 612388 - DNA, 15 bp, Homo sapiens
agtccccatcagcac

SEQ ID NO: 612389 - DNA, 15 bp, Homo sapiens
gtccccatcagcacc

SEQ ID NO: 612390 - DNA, 15 bp, Homo sapiens
tccccatcagcacca

SEQ ID NO: 612391 - DNA, 15 bp, Homo sapiens
ccccatcagcaccat

SEQ ID NO: 612392 - DNA, 15 bp, Homo sapiens
cccatcagcaccatg

SEQ ID NO: 612393 - DNA, 15 bp, Homo sapiens
ccatcagcaccatgg

SEQ ID NO: 612394 - DNA, 15 bp, Homo sapiens
catcagcaccatgga

SEQ ID NO: 612395 - DNA, 15 bp, Homo sapiens
atcagcaccatggag

SEQ ID NO: 612396 - DNA, 15 bp, Homo sapiens
tcagcaccatggagg

SEQ ID NO: 612397 - DNA, 15 bp, Homo sapiens
cagcaccatggaggc

SEQ ID NO: 612398 - DNA, 15 bp, Homo sapiens
agcaccatggaggca

SEQ ID NO: 612399 - DNA, 15 bp, Homo sapiens
gcaccatggaggcag

SEQ ID NO: 612400 - DNA, 15 bp, Homo sapiens
caccatggaggcagg

SEQ ID NO: 612401 - DNA, 15 bp, Homo sapiens
accatggaggcaggc

SEQ ID NO: 612402 - DNA, 15 bp, Homo sapiens
ccatggaggcaggct

SEQ ID NO: 612403 - DNA, 15 bp, Homo sapiens
catggaggcaggctc

SEQ ID NO: 612404 - DNA, 15 bp, Homo sapiens
atggaggcaggctcc

SEQ ID NO: 612405 - DNA, 15 bp, Homo sapiens
tggaggcaggctccc

SEQ ID NO: 612406 - DNA, 15 bp, Homo sapiens
ggaggcaggctcccc

SEQ ID NO: 612407 - DNA, 15 bp, Homo sapiens
gaggcaggctccccc

SEQ ID NO: 612408 - DNA, 15 bp, Homo sapiens
aggcaggctccccct

SEQ ID NO: 612409 - DNA, 15 bp, Homo sapiens
ggcaggctccccctg

SEQ ID NO: 612410 - DNA, 15 bp, Homo sapiens
gcaggctccccctgc

SEQ ID NO: 612411 - DNA, 15 bp, Homo sapiens
caggctccccctgcc

SEQ ID NO: 612412 - DNA, 15 bp, Homo sapiens
aggctccccctgcct

SEQ ID NO: 612413 - DNA, 15 bp, Homo sapiens
ggctccccctgcctt

SEQ ID NO: 612414 - DNA, 15 bp, Homo sapiens
gctccccctgccttt

SEQ ID NO: 612415 - DNA, 15 bp, Homo sapiens
ctccccctgcctttg

SEQ ID NO: 612416 - DNA, 15 bp, Homo sapiens
tccccctgcctttga

SEQ ID NO: 612417 - DNA, 15 bp, Homo sapiens
ccccctgcctttgaa

SEQ ID NO: 612418 - DNA, 15 bp, Homo sapiens
cccctgcctttgaaa

SEQ ID NO: 612419 - DNA, 15 bp, Homo sapiens
ccctgcctttgaaat

SEQ ID NO: 612420 - DNA, 15 bp, Homo sapiens
cctgcctttgaaatt

SEQ ID NO: 612421 - DNA, 15 bp, Homo sapiens
ctgcctttgaaattc

SEQ ID NO: 612422 - DNA, 15 bp, Homo sapiens
tgcctttgaaattcc

SEQ ID NO: 612423 - DNA, 15 bp, Homo sapiens
gcctttgaaattccc

SEQ ID NO: 612424 - DNA, 15 bp, Homo sapiens
cctttgaaattcccc

SEQ ID NO: 612425 - DNA, 15 bp, Homo sapiens
ctttgaaattccccc

SEQ ID NO: 612426 - DNA, 15 bp, Homo sapiens
tttgaaattccccca

SEQ ID NO: 612427 - DNA, 15 bp, Homo sapiens
ttgaaattcccccac

SEQ ID NO: 612428 - DNA, 15 bp, Homo sapiens
tgaaattcccccact

SEQ ID NO: 612429 - DNA, 15 bp, Homo sapiens
gaaattcccccactt

SEQ ID NO: 612430 - DNA, 15 bp, Homo sapiens
aaattcccccacttg

SEQ ID NO: 612431 - DNA, 15 bp, Homo sapiens
aattcccccacttgg

SEQ ID NO: 612432 - DNA, 15 bp, Homo sapiens
attcccccacttggg

SEQ ID NO: 612433 - DNA, 15 bp, Homo sapiens
ttcccccacttggga

SEQ ID NO: 612434 - DNA, 15 bp, Homo sapiens
tcccccacttgggag

SEQ ID NO: 612435 - DNA, 15 bp, Homo sapiens
cccccacttgggagc

SEQ ID NO: 612436 - DNA, 15 bp, Homo sapiens
ccccacttgggagct

SEQ ID NO: 612437 - DNA, 15 bp, Homo sapiens
cccacttgggagctt

SEQ ID NO: 612438 - DNA, 15 bp, Homo sapiens
ccacttgggagcttg

SEQ ID NO: 612439 - DNA, 15 bp, Homo sapiens
cacttgggagcttgt

SEQ ID NO: 612440 - DNA, 15 bp, Homo sapiens
acttgggagcttgta

SEQ ID NO: 612441 - DNA, 15 bp, Homo sapiens
cttgggagcttgtat

SEQ ID NO: 612442 - DNA, 15 bp, Homo sapiens
ttgggagcttgtata

SEQ ID NO: 612443 - DNA, 15 bp, Homo sapiens
tgggagcttgtatat

SEQ ID NO: 612444 - DNA, 15 bp, Homo sapiens
gggagcttgtatata

SEQ ID NO: 612445 - DNA, 15 bp, Homo sapiens
ggagcttgtatatac

SEQ ID NO: 612446 - DNA, 15 bp, Homo sapiens
gagcttgtatatact

SEQ ID NO: 612447 - DNA, 15 bp, Homo sapiens
agcttgtatatactt

SEQ ID NO: 612448 - DNA, 15 bp, Homo sapiens
gcttgtatatacttc

SEQ ID NO: 612449 - DNA, 15 bp, Homo sapiens
cttgtatatacttca

SEQ ID NO: 612450 - DNA, 15 bp, Homo sapiens
ttgtatatacttcac

SEQ ID NO: 612451 - DNA, 15 bp, Homo sapiens
tgtatatacttcact

SEQ ID NO: 612452 - DNA, 15 bp, Homo sapiens
gtatatacttcactc

SEQ ID NO: 612453 - DNA, 15 bp, Homo sapiens
tatatacttcactca

SEQ ID NO: 612454 - DNA, 15 bp, Homo sapiens
atatacttcactcac

SEQ ID NO: 612455 - DNA, 15 bp, Homo sapiens
tatacttcactcact

SEQ ID NO: 612456 - DNA, 15 bp, Homo sapiens
atacttcactcactt

SEQ ID NO: 612457 - DNA, 15 bp, Homo sapiens
tacttcactcacttt

SEQ ID NO: 612458 - DNA, 15 bp, Homo sapiens
acttcactcactttt

SEQ ID NO: 612459 - DNA, 15 bp, Homo sapiens
cttcactcacttttc

SEQ ID NO: 612460 - DNA, 15 bp, Homo sapiens
ttcactcacttttct

SEQ ID NO: 612461 - DNA, 15 bp, Homo sapiens
tcactcacttttctt

SEQ ID NO: 612462 - DNA, 15 bp, Homo sapiens
cactcacttttcttt

SEQ ID NO: 612463 - DNA, 15 bp, Homo sapiens
actcacttttcttta

SEQ ID NO: 612464 - DNA, 15 bp, Homo sapiens
ctcacttttctttat

SEQ ID NO: 612465 - DNA, 15 bp, Homo sapiens
tcacttttctttatt

SEQ ID NO: 612466 - DNA, 15 bp, Homo sapiens
cacttttctttattg

SEQ ID NO: 612467 - DNA, 15 bp, Homo sapiens
acttttctttattgc

SEQ ID NO: 612468 - DNA, 15 bp, Homo sapiens
cttttctttattgct

SEQ ID NO: 612469 - DNA, 15 bp, Homo sapiens
ttttctttattgctg

SEQ ID NO: 612470 - DNA, 15 bp, Homo sapiens
tttctttattgctgt

SEQ ID NO: 612471 - DNA, 15 bp, Homo sapiens
ttctttattgctgtg

SEQ ID NO: 612472 - DNA, 15 bp, Homo sapiens
tctttattgctgtga

SEQ ID NO: 612473 - DNA, 15 bp, Homo sapiens
ctttattgctgtgaa

SEQ ID NO: 612474 - DNA, 15 bp, Homo sapiens
tttattgctgtgaat

SEQ ID NO: 612475 - DNA, 15 bp, Homo sapiens
ttattgctgtgaata

SEQ ID NO: 612476 - DNA, 15 bp, Homo sapiens
tattgctgtgaatag

SEQ ID NO: 612477 - DNA, 15 bp, Homo sapiens
attgctgtgaatagt

SEQ ID NO: 612478 - DNA, 15 bp, Homo sapiens
ttgctgtgaatagtc

SEQ ID NO: 612479 - DNA, 15 bp, Homo sapiens
tgctgtgaatagtct

SEQ ID NO: 612480 - DNA, 15 bp, Homo sapiens
gctgtgaatagtctg

SEQ ID NO: 612481 - DNA, 15 bp, Homo sapiens
ctgtgaatagtctgt

SEQ ID NO: 612482 - DNA, 15 bp, Homo sapiens
tgtgaatagtctgtg

SEQ ID NO: 612483 - DNA, 15 bp, Homo sapiens
gtgaatagtctgtgt

SEQ ID NO: 612484 - DNA, 15 bp, Homo sapiens
tgaatagtctgtgtg

SEQ ID NO: 612485 - DNA, 15 bp, Homo sapiens
gaatagtctgtgtgc

SEQ ID NO: 612486 - DNA, 15 bp, Homo sapiens
aatagtctgtgtgca

SEQ ID NO: 612487 - DNA, 15 bp, Homo sapiens
atagtctgtgtgcac

SEQ ID NO: 612488 - DNA, 15 bp, Homo sapiens
tagtctgtgtgcaca

SEQ ID NO: 612489 - DNA, 15 bp, Homo sapiens
agtctgtgtgcacaa

SEQ ID NO: 612490 - DNA, 15 bp, Homo sapiens
gtctgtgtgcacaat

SEQ ID NO: 612491 - DNA, 15 bp, Homo sapiens
tctgtgtgcacaatg

SEQ ID NO: 612492 - DNA, 15 bp, Homo sapiens
ctgtgtgcacaatgg

SEQ ID NO: 612493 - DNA, 15 bp, Homo sapiens
tgtgtgcacaatggg

SEQ ID NO: 612494 - DNA, 15 bp, Homo sapiens
gtgtgcacaatgggc

SEQ ID NO: 612495 - DNA, 15 bp, Homo sapiens
tgtgcacaatgggca

SEQ ID NO: 612496 - DNA, 15 bp, Homo sapiens
gtgcacaatgggcaa

SEQ ID NO: 612497 - DNA, 15 bp, Homo sapiens
tgcacaatgggcaat

SEQ ID NO: 612498 - DNA, 15 bp, Homo sapiens
gcacaatgggcaatt

SEQ ID NO: 612499 - DNA, 15 bp, Homo sapiens
cacaatgggcaattc

SEQ ID NO: 612500 - DNA, 15 bp, Homo sapiens
acaatgggcaattct

SEQ ID NO: 612501 - DNA, 15 bp, Homo sapiens
caatgggcaattctg

SEQ ID NO: 612502 - DNA, 15 bp, Homo sapiens
aatgggcaattctga

SEQ ID NO: 612503 - DNA, 15 bp, Homo sapiens
atgggcaattctgac

SEQ ID NO: 612504 - DNA, 15 bp, Homo sapiens
tgggcaattctgact

SEQ ID NO: 612505 - DNA, 15 bp, Homo sapiens
gggcaattctgactt

SEQ ID NO: 612506 - DNA, 15 bp, Homo sapiens
ggcaattctgacttc

SEQ ID NO: 612507 - DNA, 15 bp, Homo sapiens
gcaattctgacttct

SEQ ID NO: 612508 - DNA, 15 bp, Homo sapiens
caattctgacttctc

SEQ ID NO: 612509 - DNA, 15 bp, Homo sapiens
aattctgacttctcc

SEQ ID NO: 612510 - DNA, 15 bp, Homo sapiens
attctgacttctccc

SEQ ID NO: 612511 - DNA, 15 bp, Homo sapiens
ttctgacttctccca

SEQ ID NO: 612512 - DNA, 15 bp, Homo sapiens
tctgacttctcccat

SEQ ID NO: 612513 - DNA, 15 bp, Homo sapiens
ctgacttctcccatc

SEQ ID NO: 612514 - DNA, 15 bp, Homo sapiens
tgacttctcccatct

SEQ ID NO: 612515 - DNA, 15 bp, Homo sapiens
gacttctcccatcta

SEQ ID NO: 612516 - DNA, 15 bp, Homo sapiens
acttctcccatctag

SEQ ID NO: 612517 - DNA, 15 bp, Homo sapiens
cttctcccatctagt

SEQ ID NO: 612518 - DNA, 15 bp, Homo sapiens
ttctcccatctagtg

SEQ ID NO: 612519 - DNA, 15 bp, Homo sapiens
tctcccatctagtgg

SEQ ID NO: 612520 - DNA, 15 bp, Homo sapiens
ctcccatctagtgga

SEQ ID NO: 612521 - DNA, 15 bp, Homo sapiens
tcccatctagtggaa

SEQ ID NO: 612522 - DNA, 15 bp, Homo sapiens
cccatctagtggaaa

SEQ ID NO: 612523 - DNA, 15 bp, Homo sapiens
ccatctagtggaaat

SEQ ID NO: 612524 - DNA, 15 bp, Homo sapiens
catctagtggaaatg

SEQ ID NO: 612525 - DNA, 15 bp, Homo sapiens
atctagtggaaatga

SEQ ID NO: 612526 - DNA, 15 bp, Homo sapiens
tctagtggaaatgag

SEQ ID NO: 612527 - DNA, 15 bp, Homo sapiens
ctagtggaaatgagc

SEQ ID NO: 612528 - DNA, 15 bp, Homo sapiens
tagtggaaatgagcg

SEQ ID NO: 612529 - DNA, 15 bp, Homo sapiens
agtggaaatgagcga

SEQ ID NO: 612530 - DNA, 15 bp, Homo sapiens
gtggaaatgagcgaa

SEQ ID NO: 612531 - DNA, 15 bp, Homo sapiens
tggaaatgagcgaaa

SEQ ID NO: 612532 - DNA, 15 bp, Homo sapiens
ggaaatgagcgaaat

SEQ ID NO: 612533 - DNA, 15 bp, Homo sapiens
gaaatgagcgaaatc

SEQ ID NO: 612534 - DNA, 15 bp, Homo sapiens
aaatgagcgaaatca

SEQ ID NO: 612535 - DNA, 15 bp, Homo sapiens
aatgagcgaaatcat

SEQ ID NO: 612536 - DNA, 15 bp, Homo sapiens
atgagcgaaatcatg

SEQ ID NO: 612537 - DNA, 15 bp, Homo sapiens
tgagcgaaatcatgg

SEQ ID NO: 612538 - DNA, 15 bp, Homo sapiens
gagcgaaatcatggt

SEQ ID NO: 612539 - DNA, 15 bp, Homo sapiens
agcgaaatcatggtt

SEQ ID NO: 612540 - DNA, 15 bp, Homo sapiens
gcgaaatcatggttg

SEQ ID NO: 612541 - DNA, 15 bp, Homo sapiens
cgaaatcatggttgt

SEQ ID NO: 612542 - DNA, 15 bp, Homo sapiens
gaaatcatggttgta

SEQ ID NO: 612543 - DNA, 15 bp, Homo sapiens
aaatcatggttgtag

SEQ ID NO: 612544 - DNA, 15 bp, Homo sapiens
aatcatggttgtagt

SEQ ID NO: 612545 - DNA, 15 bp, Homo sapiens
atcatggttgtagtg

SEQ ID NO: 612546 - DNA, 15 bp, Homo sapiens
tcatggttgtagtga

SEQ ID NO: 612547 - DNA, 15 bp, Homo sapiens
catggttgtagtgat

SEQ ID NO: 612548 - DNA, 15 bp, Homo sapiens
atggttgtagtgatg

SEQ ID NO: 612549 - DNA, 15 bp, Homo sapiens
tggttgtagtgatgt

SEQ ID NO: 612550 - DNA, 15 bp, Homo sapiens
ggttgtagtgatgtt

SEQ ID NO: 612551 - DNA, 15 bp, Homo sapiens
gttgtagtgatgttg

SEQ ID NO: 612552 - DNA, 15 bp, Homo sapiens
ttgtagtgatgttgt

SEQ ID NO: 612553 - DNA, 15 bp, Homo sapiens
tgtagtgatgttgtt

SEQ ID NO: 612554 - DNA, 15 bp, Homo sapiens
gtagtgatgttgttt

SEQ ID NO: 612555 - DNA, 15 bp, Homo sapiens
tagtgatgttgtttg

SEQ ID NO: 612556 - DNA, 15 bp, Homo sapiens
agtgatgttgtttgg

SEQ ID NO: 612557 - DNA, 15 bp, Homo sapiens
gtgatgttgtttggg

SEQ ID NO: 612558 - DNA, 15 bp, Homo sapiens
tgatgttgtttggga

SEQ ID NO: 612559 - DNA, 15 bp, Homo sapiens
gatgttgtttgggag

SEQ ID NO: 612560 - DNA, 15 bp, Homo sapiens
atgttgtttgggaga

SEQ ID NO: 612561 - DNA, 15 bp, Homo sapiens
tgttgtttgggagag

SEQ ID NO: 612562 - DNA, 15 bp, Homo sapiens
gttgtttgggagagt

SEQ ID NO: 612563 - DNA, 15 bp, Homo sapiens
ttgtttgggagagtg

SEQ ID NO: 612564 - DNA, 15 bp, Homo sapiens
tgtttgggagagtgc

SEQ ID NO: 612565 - DNA, 15 bp, Homo sapiens
gtttgggagagtgca

SEQ ID NO: 612566 - DNA, 15 bp, Homo sapiens
tttgggagagtgcag

SEQ ID NO: 612567 - DNA, 15 bp, Homo sapiens
ttgggagagtgcagt

SEQ ID NO: 612568 - DNA, 15 bp, Homo sapiens
tgggagagtgcagta

SEQ ID NO: 612569 - DNA, 15 bp, Homo sapiens
gggagagtgcagtag

SEQ ID NO: 612570 - DNA, 15 bp, Homo sapiens
ggagagtgcagtagt

SEQ ID NO: 612571 - DNA, 15 bp, Homo sapiens
gagagtgcagtagta

SEQ ID NO: 612572 - DNA, 15 bp, Homo sapiens
agagtgcagtagtaa

SEQ ID NO: 612573 - DNA, 15 bp, Homo sapiens
gagtgcagtagtaat

SEQ ID NO: 612574 - DNA, 15 bp, Homo sapiens
agtgcagtagtaatt

SEQ ID NO: 612575 - DNA, 15 bp, Homo sapiens
gtgcagtagtaattg

SEQ ID NO: 612576 - DNA, 15 bp, Homo sapiens
tgcagtagtaattga

SEQ ID NO: 612577 - DNA, 15 bp, Homo sapiens
gcagtagtaattgat

SEQ ID NO: 612578 - DNA, 15 bp, Homo sapiens
cagtagtaattgatt

SEQ ID NO: 612579 - DNA, 15 bp, Homo sapiens
agtagtaattgattt

SEQ ID NO: 612580 - DNA, 15 bp, Homo sapiens
gtagtaattgatttg

SEQ ID NO: 612581 - DNA, 15 bp, Homo sapiens
tagtaattgatttga

SEQ ID NO: 612582 - DNA, 15 bp, Homo sapiens
agtaattgatttgac

SEQ ID NO: 612583 - DNA, 15 bp, Homo sapiens
gtaattgatttgacc

SEQ ID NO: 612584 - DNA, 15 bp, Homo sapiens
taattgatttgaccc

SEQ ID NO: 612585 - DNA, 15 bp, Homo sapiens
aattgatttgaccca

SEQ ID NO: 612586 - DNA, 15 bp, Homo sapiens
attgatttgacccac

SEQ ID NO: 612587 - DNA, 15 bp, Homo sapiens
ttgatttgacccact

SEQ ID NO: 612588 - DNA, 15 bp, Homo sapiens
tgatttgacccactc

SEQ ID NO: 612589 - DNA, 15 bp, Homo sapiens
gatttgacccactca

SEQ ID NO: 612590 - DNA, 15 bp, Homo sapiens
atttgacccactcac

SEQ ID NO: 612591 - DNA, 15 bp, Homo sapiens
tttgacccactcaca

SEQ ID NO: 612592 - DNA, 15 bp, Homo sapiens
ttgacccactcacac

SEQ ID NO: 612593 - DNA, 15 bp, Homo sapiens
tgacccactcacact

SEQ ID NO: 612594 - DNA, 15 bp, Homo sapiens
gacccactcacactt

SEQ ID NO: 612595 - DNA, 15 bp, Homo sapiens
acccactcacacttg

SEQ ID NO: 612596 - DNA, 15 bp, Homo sapiens
cccactcacacttgg

SEQ ID NO: 612597 - DNA, 15 bp, Homo sapiens
ccactcacacttgga

SEQ ID NO: 612598 - DNA, 15 bp, Homo sapiens
cactcacacttggag

SEQ ID NO: 612599 - DNA, 15 bp, Homo sapiens
actcacacttggagc

SEQ ID NO: 612600 - DNA, 15 bp, Homo sapiens
ctcacacttggagct

SEQ ID NO: 612601 - DNA, 15 bp, Homo sapiens
tcacacttggagcta

SEQ ID NO: 612602 - DNA, 15 bp, Homo sapiens
cacacttggagctaa

SEQ ID NO: 612603 - DNA, 15 bp, Homo sapiens
acacttggagctaat

SEQ ID NO: 612604 - DNA, 15 bp, Homo sapiens
cacttggagctaatt

SEQ ID NO: 612605 - DNA, 15 bp, Homo sapiens
acttggagctaatta

SEQ ID NO: 612606 - DNA, 15 bp, Homo sapiens
cttggagctaattaa

SEQ ID NO: 612607 - DNA, 15 bp, Homo sapiens
ttggagctaattaag

SEQ ID NO: 612608 - DNA, 15 bp, Homo sapiens
tggagctaattaagg

SEQ ID NO: 612609 - DNA, 15 bp, Homo sapiens
ggagctaattaaggt

SEQ ID NO: 612610 - DNA, 15 bp, Homo sapiens
gagctaattaaggtt

SEQ ID NO: 612611 - DNA, 15 bp, Homo sapiens
agctaattaaggttt

SEQ ID NO: 612612 - DNA, 15 bp, Homo sapiens
gctaattaaggtttg

SEQ ID NO: 612613 - DNA, 15 bp, Homo sapiens
ctaattaaggtttgc

SEQ ID NO: 612614 - DNA, 15 bp, Homo sapiens
taattaaggtttgcc

SEQ ID NO: 612615 - DNA, 15 bp, Homo sapiens
aattaaggtttgccc

SEQ ID NO: 612616 - DNA, 15 bp, Homo sapiens
attaaggtttgccct

SEQ ID NO: 612617 - DNA, 15 bp, Homo sapiens
ttaaggtttgccctg

SEQ ID NO: 612618 - DNA, 15 bp, Homo sapiens
taaggtttgccctgc

SEQ ID NO: 612619 - DNA, 15 bp, Homo sapiens
aaggtttgccctgcc

SEQ ID NO: 612620 - DNA, 15 bp, Homo sapiens
aggtttgccctgcct

SEQ ID NO: 612621 - DNA, 15 bp, Homo sapiens
ggtttgccctgcctg

SEQ ID NO: 612622 - DNA, 15 bp, Homo sapiens
gtttgccctgcctgc

SEQ ID NO: 612623 - DNA, 15 bp, Homo sapiens
tttgccctgcctgca

SEQ ID NO: 612624 - DNA, 15 bp, Homo sapiens
ttgccctgcctgcag

SEQ ID NO: 612625 - DNA, 15 bp, Homo sapiens
tgccctgcctgcagc

SEQ ID NO: 612626 - DNA, 15 bp, Homo sapiens
gccctgcctgcagcc

SEQ ID NO: 612627 - DNA, 15 bp, Homo sapiens
ccctgcctgcagcct

SEQ ID NO: 612628 - DNA, 15 bp, Homo sapiens
cctgcctgcagcctc

SEQ ID NO: 612629 - DNA, 15 bp, Homo sapiens
ctgcctgcagcctcc

SEQ ID NO: 612630 - DNA, 15 bp, Homo sapiens
tgcctgcagcctccc

SEQ ID NO: 612631 - DNA, 15 bp, Homo sapiens
gcctgcagcctcccc

SEQ ID NO: 612632 - DNA, 15 bp, Homo sapiens
cctgcagcctccccc

SEQ ID NO: 612633 - DNA, 15 bp, Homo sapiens
ctgcagcctccccca

SEQ ID NO: 612634 - DNA, 15 bp, Homo sapiens
tgcagcctcccccac

SEQ ID NO: 612635 - DNA, 15 bp, Homo sapiens
gcagcctcccccaca

SEQ ID NO: 612636 - DNA, 15 bp, Homo sapiens
cagcctcccccacaa

SEQ ID NO: 612637 - DNA, 15 bp, Homo sapiens
agcctcccccacaaa

SEQ ID NO: 612638 - DNA, 15 bp, Homo sapiens
gcctcccccacaaat

SEQ ID NO: 612639 - DNA, 15 bp, Homo sapiens
cctcccccacaaata

SEQ ID NO: 612640 - DNA, 15 bp, Homo sapiens
ctcccccacaaataa

SEQ ID NO: 612641 - DNA, 15 bp, Homo sapiens
tcccccacaaataat

SEQ ID NO: 612642 - DNA, 15 bp, Homo sapiens
cccccacaaataatg

SEQ ID NO: 612643 - DNA, 15 bp, Homo sapiens
ccccacaaataatga

SEQ ID NO: 612644 - DNA, 15 bp, Homo sapiens
cccacaaataatgaa

SEQ ID NO: 612645 - DNA, 15 bp, Homo sapiens
ccacaaataatgaac

SEQ ID NO: 612646 - DNA, 15 bp, Homo sapiens
cacaaataatgaaca

SEQ ID NO: 612647 - DNA, 15 bp, Homo sapiens
acaaataatgaacag

SEQ ID NO: 612648 - DNA, 15 bp, Homo sapiens
caaataatgaacagc

SEQ ID NO: 612649 - DNA, 15 bp, Homo sapiens
aaataatgaacagca

SEQ ID NO: 612650 - DNA, 15 bp, Homo sapiens
aataatgaacagcag

SEQ ID NO: 612651 - DNA, 15 bp, Homo sapiens
ataatgaacagcaga

SEQ ID NO: 612652 - DNA, 15 bp, Homo sapiens
taatgaacagcagaa

SEQ ID NO: 612653 - DNA, 15 bp, Homo sapiens
aatgaacagcagaaa

SEQ ID NO: 612654 - DNA, 15 bp, Homo sapiens
atgaacagcagaaag

SEQ ID NO: 612655 - DNA, 15 bp, Homo sapiens
tgaacagcagaaaga

SEQ ID NO: 612656 - DNA, 15 bp, Homo sapiens
gaacagcagaaagac

SEQ ID NO: 612657 - DNA, 15 bp, Homo sapiens
aacagcagaaagact

SEQ ID NO: 612658 - DNA, 15 bp, Homo sapiens
acagcagaaagactg

SEQ ID NO: 612659 - DNA, 15 bp, Homo sapiens
cagcagaaagactgg

SEQ ID NO: 612660 - DNA, 15 bp, Homo sapiens
agcagaaagactgga

SEQ ID NO: 612661 - DNA, 15 bp, Homo sapiens
gcagaaagactggac

SEQ ID NO: 612662 - DNA, 15 bp, Homo sapiens
cagaaagactggacg

SEQ ID NO: 612663 - DNA, 15 bp, Homo sapiens
agaaagactggacgg

SEQ ID NO: 612664 - DNA, 15 bp, Homo sapiens
gaaagactggacggg

SEQ ID NO: 612665 - DNA, 15 bp, Homo sapiens
aaagactggacgggg

SEQ ID NO: 612666 - DNA, 15 bp, Homo sapiens
aagactggacgggga

SEQ ID NO: 612667 - DNA, 15 bp, Homo sapiens
agactggacggggaa

SEQ ID NO: 612668 - DNA, 15 bp, Homo sapiens
gactggacggggaaa

SEQ ID NO: 612669 - DNA, 15 bp, Homo sapiens
actggacggggaaac

SEQ ID NO: 612670 - DNA, 15 bp, Homo sapiens
ctggacggggaaacc

SEQ ID NO: 612671 - DNA, 15 bp, Homo sapiens
tggacggggaaacct

SEQ ID NO: 612672 - DNA, 15 bp, Homo sapiens
ggacggggaaaccta

SEQ ID NO: 612673 - DNA, 15 bp, Homo sapiens
gacggggaaacctat

SEQ ID NO: 612674 - DNA, 15 bp, Homo sapiens
acggggaaacctatc

SEQ ID NO: 612675 - DNA, 15 bp, Homo sapiens
cggggaaacctatca

SEQ ID NO: 612676 - DNA, 15 bp, Homo sapiens
ggggaaacctatcaa

SEQ ID NO: 612677 - DNA, 15 bp, Homo sapiens
gggaaacctatcaat

SEQ ID NO: 612678 - DNA, 15 bp, Homo sapiens
ggaaacctatcaatc

SEQ ID NO: 612679 - DNA, 15 bp, Homo sapiens
gaaacctatcaatcc

SEQ ID NO: 612680 - DNA, 15 bp, Homo sapiens
aaacctatcaatcct

SEQ ID NO: 612681 - DNA, 15 bp, Homo sapiens
aacctatcaatcctg

SEQ ID NO: 612682 - DNA, 15 bp, Homo sapiens
acctatcaatcctgc

SEQ ID NO: 612683 - DNA, 15 bp, Homo sapiens
cctatcaatcctgcc

SEQ ID NO: 612684 - DNA, 15 bp, Homo sapiens
ctatcaatcctgccc

SEQ ID NO: 612685 - DNA, 15 bp, Homo sapiens
tatcaatcctgcccc

SEQ ID NO: 612686 - DNA, 15 bp, Homo sapiens
atcaatcctgccccc

SEQ ID NO: 612687 - DNA, 15 bp, Homo sapiens
tcaatcctgccccca

SEQ ID NO: 612688 - DNA, 15 bp, Homo sapiens
caatcctgcccccag

SEQ ID NO: 612689 - DNA, 15 bp, Homo sapiens
aatcctgcccccagc

SEQ ID NO: 612690 - DNA, 15 bp, Homo sapiens
atcctgcccccagcc

SEQ ID NO: 612691 - DNA, 15 bp, Homo sapiens
tcctgcccccagcca

SEQ ID NO: 612692 - DNA, 15 bp, Homo sapiens
cctgcccccagccat

SEQ ID NO: 612693 - DNA, 15 bp, Homo sapiens
ctgcccccagccatg

SEQ ID NO: 612694 - DNA, 15 bp, Homo sapiens
tgcccccagccatgg

SEQ ID NO: 612695 - DNA, 15 bp, Homo sapiens
gcccccagccatggt

SEQ ID NO: 612696 - DNA, 15 bp, Homo sapiens
cccccagccatggtg

SEQ ID NO: 612697 - DNA, 15 bp, Homo sapiens
ccccagccatggtga

SEQ ID NO: 612698 - DNA, 15 bp, Homo sapiens
cccagccatggtgag

SEQ ID NO: 612699 - DNA, 15 bp, Homo sapiens
ccagccatggtgagg

SEQ ID NO: 612700 - DNA, 15 bp, Homo sapiens
cagccatggtgagga

SEQ ID NO: 612701 - DNA, 15 bp, Homo sapiens
agccatggtgaggaa

SEQ ID NO: 612702 - DNA, 15 bp, Homo sapiens
gccatggtgaggaag

SEQ ID NO: 612703 - DNA, 15 bp, Homo sapiens
ccatggtgaggaagc

SEQ ID NO: 612704 - DNA, 15 bp, Homo sapiens
catggtgaggaagcc

SEQ ID NO: 612705 - DNA, 15 bp, Homo sapiens
atggtgaggaagccc

SEQ ID NO: 612706 - DNA, 15 bp, Homo sapiens
tggtgaggaagcccc

SEQ ID NO: 612707 - DNA, 15 bp, Homo sapiens
ggtgaggaagcccca

SEQ ID NO: 612708 - DNA, 15 bp, Homo sapiens
gtgaggaagccccaa

SEQ ID NO: 612709 - DNA, 15 bp, Homo sapiens
tgaggaagccccaag

SEQ ID NO: 612710 - DNA, 15 bp, Homo sapiens
gaggaagccccaagc

SEQ ID NO: 612711 - DNA, 15 bp, Homo sapiens
aggaagccccaagcc

SEQ ID NO: 612712 - DNA, 15 bp, Homo sapiens
ggaagccccaagcca

SEQ ID NO: 612713 - DNA, 15 bp, Homo sapiens
gaagccccaagccat

SEQ ID NO: 612714 - DNA, 15 bp, Homo sapiens
aagccccaagccatg

SEQ ID NO: 612715 - DNA, 15 bp, Homo sapiens
agccccaagccatgg

SEQ ID NO: 612716 - DNA, 15 bp, Homo sapiens
gccccaagccatggt

SEQ ID NO: 612717 - DNA, 15 bp, Homo sapiens
ccccaagccatggtg

SEQ ID NO: 612718 - DNA, 15 bp, Homo sapiens
cccaagccatggtga

SEQ ID NO: 612719 - DNA, 15 bp, Homo sapiens
ccaagccatggtgac

SEQ ID NO: 612720 - DNA, 15 bp, Homo sapiens
caagccatggtgaca

SEQ ID NO: 612721 - DNA, 15 bp, Homo sapiens
aagccatggtgacac

SEQ ID NO: 612722 - DNA, 15 bp, Homo sapiens
agccatggtgacaca

SEQ ID NO: 612723 - DNA, 15 bp, Homo sapiens
gccatggtgacacac

SEQ ID NO: 612724 - DNA, 15 bp, Homo sapiens
ccatggtgacacaca

SEQ ID NO: 612725 - DNA, 15 bp, Homo sapiens
catggtgacacacag

SEQ ID NO: 612726 - DNA, 15 bp, Homo sapiens
atggtgacacacagc

SEQ ID NO: 612727 - DNA, 15 bp, Homo sapiens
tggtgacacacagca

SEQ ID NO: 612728 - DNA, 15 bp, Homo sapiens
ggtgacacacagcag

SEQ ID NO: 612729 - DNA, 15 bp, Homo sapiens
gtgacacacagcagc

SEQ ID NO: 612730 - DNA, 15 bp, Homo sapiens
tgacacacagcagca

SEQ ID NO: 612731 - DNA, 15 bp, Homo sapiens
gacacacagcagcac

SEQ ID NO: 612732 - DNA, 15 bp, Homo sapiens
acacacagcagcact

SEQ ID NO: 612733 - DNA, 15 bp, Homo sapiens
cacacagcagcactg

SEQ ID NO: 612734 - DNA, 15 bp, Homo sapiens
acacagcagcactgc

SEQ ID NO: 612735 - DNA, 15 bp, Homo sapiens
cacagcagcactgca

SEQ ID NO: 612736 - DNA, 15 bp, Homo sapiens
acagcagcactgcag

SEQ ID NO: 612737 - DNA, 15 bp, Homo sapiens
cagcagcactgcaga

SEQ ID NO: 612738 - DNA, 15 bp, Homo sapiens
agcagcactgcagat

SEQ ID NO: 612739 - DNA, 15 bp, Homo sapiens
gcagcactgcagata

SEQ ID NO: 612740 - DNA, 15 bp, Homo sapiens
cagcactgcagatag

SEQ ID NO: 612741 - DNA, 15 bp, Homo sapiens
agcactgcagatagc

SEQ ID NO: 612742 - DNA, 15 bp, Homo sapiens
gcactgcagatagcc

SEQ ID NO: 612743 - DNA, 15 bp, Homo sapiens
cactgcagatagcca

SEQ ID NO: 612744 - DNA, 15 bp, Homo sapiens
actgcagatagccag

SEQ ID NO: 612745 - DNA, 15 bp, Homo sapiens
ctgcagatagccaga

SEQ ID NO: 612746 - DNA, 15 bp, Homo sapiens
tgcagatagccagac

SEQ ID NO: 612747 - DNA, 15 bp, Homo sapiens
gcagatagccagaca

SEQ ID NO: 612748 - DNA, 15 bp, Homo sapiens
cagatagccagacac

SEQ ID NO: 612749 - DNA, 15 bp, Homo sapiens
agatagccagacaca

SEQ ID NO: 612750 - DNA, 15 bp, Homo sapiens
gatagccagacacat

SEQ ID NO: 612751 - DNA, 15 bp, Homo sapiens
atagccagacacatg

SEQ ID NO: 612752 - DNA, 15 bp, Homo sapiens
tagccagacacatgg

SEQ ID NO: 612753 - DNA, 15 bp, Homo sapiens
agccagacacatggc

SEQ ID NO: 612754 - DNA, 15 bp, Homo sapiens
gccagacacatggct

SEQ ID NO: 612755 - DNA, 15 bp, Homo sapiens
ccagacacatggcta

SEQ ID NO: 612756 - DNA, 15 bp, Homo sapiens
cagacacatggctat

SEQ ID NO: 612757 - DNA, 15 bp, Homo sapiens
agacacatggctatc

SEQ ID NO: 612758 - DNA, 15 bp, Homo sapiens
gacacatggctatcc

SEQ ID NO: 612759 - DNA, 15 bp, Homo sapiens
acacatggctatcct

SEQ ID NO: 612760 - DNA, 15 bp, Homo sapiens
cacatggctatccta

SEQ ID NO: 612761 - DNA, 15 bp, Homo sapiens
acatggctatcctag

SEQ ID NO: 612762 - DNA, 15 bp, Homo sapiens
catggctatcctaga

SEQ ID NO: 612763 - DNA, 15 bp, Homo sapiens
atggctatcctagag

SEQ ID NO: 612764 - DNA, 15 bp, Homo sapiens
tggctatcctagaga

SEQ ID NO: 612765 - DNA, 15 bp, Homo sapiens
ggctatcctagagag

SEQ ID NO: 612766 - DNA, 15 bp, Homo sapiens
gctatcctagagagg

SEQ ID NO: 612767 - DNA, 15 bp, Homo sapiens
ctatcctagagaggc

SEQ ID NO: 612768 - DNA, 15 bp, Homo sapiens
tatcctagagaggct

SEQ ID NO: 612769 - DNA, 15 bp, Homo sapiens
atcctagagaggctg

SEQ ID NO: 612770 - DNA, 15 bp, Homo sapiens
tcctagagaggctgg

SEQ ID NO: 612771 - DNA, 15 bp, Homo sapiens
cctagagaggctggc

SEQ ID NO: 612772 - DNA, 15 bp, Homo sapiens
ctagagaggctggca

SEQ ID NO: 612773 - DNA, 15 bp, Homo sapiens
tagagaggctggcaa

SEQ ID NO: 612774 - DNA, 15 bp, Homo sapiens
agagaggctggcaag

SEQ ID NO: 612775 - DNA, 15 bp, Homo sapiens
gagaggctggcaagg

SEQ ID NO: 612776 - DNA, 15 bp, Homo sapiens
agaggctggcaagga

SEQ ID NO: 612777 - DNA, 15 bp, Homo sapiens
gaggctggcaaggag

SEQ ID NO: 612778 - DNA, 15 bp, Homo sapiens
aggctggcaaggagt

SEQ ID NO: 612779 - DNA, 15 bp, Homo sapiens
ggctggcaaggagtt

SEQ ID NO: 612780 - DNA, 15 bp, Homo sapiens
gctggcaaggagttc

SEQ ID NO: 612781 - DNA, 15 bp, Homo sapiens
ctggcaaggagttcg

SEQ ID NO: 612782 - DNA, 15 bp, Homo sapiens
tggcaaggagttcgt

SEQ ID NO: 612783 - DNA, 15 bp, Homo sapiens
ggcaaggagttcgtg

SEQ ID NO: 612784 - DNA, 15 bp, Homo sapiens
gcaaggagttcgtgg

SEQ ID NO: 612785 - DNA, 15 bp, Homo sapiens
caaggagttcgtggc

SEQ ID NO: 612786 - DNA, 15 bp, Homo sapiens
aaggagttcgtggct

SEQ ID NO: 612787 - DNA, 15 bp, Homo sapiens
aggagttcgtggctg

SEQ ID NO: 612788 - DNA, 15 bp, Homo sapiens
ggagttcgtggctgc

SEQ ID NO: 612789 - DNA, 15 bp, Homo sapiens
gagttcgtggctgca

SEQ ID NO: 612790 - DNA, 15 bp, Homo sapiens
agttcgtggctgcaa

SEQ ID NO: 612791 - DNA, 15 bp, Homo sapiens
gttcgtggctgcaaa

SEQ ID NO: 612792 - DNA, 15 bp, Homo sapiens
ttcgtggctgcaaaa

SEQ ID NO: 612793 - DNA, 15 bp, Homo sapiens
tcgtggctgcaaaag

SEQ ID NO: 612794 - DNA, 15 bp, Homo sapiens
cgtggctgcaaaaga

SEQ ID NO: 612795 - DNA, 15 bp, Homo sapiens
gtggctgcaaaagaa

SEQ ID NO: 612796 - DNA, 15 bp, Homo sapiens
tggctgcaaaagaag

SEQ ID NO: 612797 - DNA, 15 bp, Homo sapiens
ggctgcaaaagaagt

SEQ ID NO: 612798 - DNA, 15 bp, Homo sapiens
gctgcaaaagaagtt

SEQ ID NO: 612799 - DNA, 15 bp, Homo sapiens
ctgcaaaagaagttt

SEQ ID NO: 612800 - DNA, 15 bp, Homo sapiens
tgcaaaagaagtttc

SEQ ID NO: 612801 - DNA, 15 bp, Homo sapiens
gcaaaagaagtttct

SEQ ID NO: 612802 - DNA, 15 bp, Homo sapiens
caaaagaagtttctg

SEQ ID NO: 612803 - DNA, 15 bp, Homo sapiens
aaaagaagtttctgg

SEQ ID NO: 612804 - DNA, 15 bp, Homo sapiens
aaagaagtttctgga

SEQ ID NO: 612805 - DNA, 15 bp, Homo sapiens
aagaagtttctggag

SEQ ID NO: 612806 - DNA, 15 bp, Homo sapiens
agaagtttctggagc

SEQ ID NO: 612807 - DNA, 15 bp, Homo sapiens
gaagtttctggagca

SEQ ID NO: 612808 - DNA, 15 bp, Homo sapiens
aagtttctggagcaa

SEQ ID NO: 612809 - DNA, 15 bp, Homo sapiens
agtttctggagcaag

SEQ ID NO: 612810 - DNA, 15 bp, Homo sapiens
gtttctggagcaaga

SEQ ID NO: 612811 - DNA, 15 bp, Homo sapiens
tttctggagcaagag

SEQ ID NO: 612812 - DNA, 15 bp, Homo sapiens
ttctggagcaagaga

SEQ ID NO: 612813 - DNA, 15 bp, Homo sapiens
tctggagcaagagag

SEQ ID NO: 612814 - DNA, 15 bp, Homo sapiens
ctggagcaagagaga

SEQ ID NO: 612815 - DNA, 15 bp, Homo sapiens
tggagcaagagagag

SEQ ID NO: 612816 - DNA, 15 bp, Homo sapiens
ggagcaagagagagc

SEQ ID NO: 612817 - DNA, 15 bp, Homo sapiens
gagcaagagagagct

SEQ ID NO: 612818 - DNA, 15 bp, Homo sapiens
agcaagagagagctc

SEQ ID NO: 612819 - DNA, 15 bp, Homo sapiens
gcaagagagagctcg

SEQ ID NO: 612820 - DNA, 15 bp, Homo sapiens
caagagagagctcgc

SEQ ID NO: 612821 - DNA, 15 bp, Homo sapiens
aagagagagctcgct

SEQ ID NO: 612822 - DNA, 15 bp, Homo sapiens
agagagagctcgctc

SEQ ID NO: 612823 - DNA, 15 bp, Homo sapiens
gagagagctcgctct

SEQ ID NO: 612824 - DNA, 15 bp, Homo sapiens
agagagctcgctctt

SEQ ID NO: 612825 - DNA, 15 bp, Homo sapiens
gagagctcgctcttg

SEQ ID NO: 612826 - DNA, 15 bp, Homo sapiens
agagctcgctcttgg

SEQ ID NO: 612827 - DNA, 15 bp, Homo sapiens
gagctcgctcttggg

SEQ ID NO: 612828 - DNA, 15 bp, Homo sapiens
agctcgctcttggga

SEQ ID NO: 612829 - DNA, 15 bp, Homo sapiens
gctcgctcttgggag

SEQ ID NO: 612830 - DNA, 15 bp, Homo sapiens
ctcgctcttgggagt

SEQ ID NO: 612831 - DNA, 15 bp, Homo sapiens
tcgctcttgggagtc

SEQ ID NO: 612832 - DNA, 15 bp, Homo sapiens
cgctcttgggagtca

SEQ ID NO: 612833 - DNA, 15 bp, Homo sapiens
gctcttgggagtcag

SEQ ID NO: 612834 - DNA, 15 bp, Homo sapiens
ctcttgggagtcagg

SEQ ID NO: 612835 - DNA, 15 bp, Homo sapiens
tcttgggagtcagga

SEQ ID NO: 612836 - DNA, 15 bp, Homo sapiens
cttgggagtcaggac

SEQ ID NO: 612837 - DNA, 15 bp, Homo sapiens
ttgggagtcaggacc

SEQ ID NO: 612838 - DNA, 15 bp, Homo sapiens
tgggagtcaggacct

SEQ ID NO: 612839 - DNA, 15 bp, Homo sapiens
gggagtcaggacctc

SEQ ID NO: 612840 - DNA, 15 bp, Homo sapiens
ggagtcaggacctcc

SEQ ID NO: 612841 - DNA, 15 bp, Homo sapiens
gagtcaggacctccg

SEQ ID NO: 612842 - DNA, 15 bp, Homo sapiens
agtcaggacctccgg

SEQ ID NO: 612843 - DNA, 15 bp, Homo sapiens
gtcaggacctccggg

SEQ ID NO: 612844 - DNA, 15 bp, Homo sapiens
tcaggacctccgggg

SEQ ID NO: 612845 - DNA, 15 bp, Homo sapiens
caggacctccgggga

SEQ ID NO: 612846 - DNA, 15 bp, Homo sapiens
aggacctccggggag

SEQ ID NO: 612847 - DNA, 15 bp, Homo sapiens
ggacctccggggaga

SEQ ID NO: 612848 - DNA, 15 bp, Homo sapiens
gacctccggggagag

SEQ ID NO: 612849 - DNA, 15 bp, Homo sapiens
acctccggggagagc

SEQ ID NO: 612850 - DNA, 15 bp, Homo sapiens
cctccggggagagca

SEQ ID NO: 612851 - DNA, 15 bp, Homo sapiens
ctccggggagagcag

SEQ ID NO: 612852 - DNA, 15 bp, Homo sapiens
tccggggagagcaga

SEQ ID NO: 612853 - DNA, 15 bp, Homo sapiens
ccggggagagcagag

SEQ ID NO: 612854 - DNA, 15 bp, Homo sapiens
cggggagagcagagg

SEQ ID NO: 612855 - DNA, 15 bp, Homo sapiens
ggggagagcagaggg

SEQ ID NO: 612856 - DNA, 15 bp, Homo sapiens
gggagagcagagggt

SEQ ID NO: 612857 - DNA, 15 bp, Homo sapiens
ggagagcagagggtt

SEQ ID NO: 612858 - DNA, 15 bp, Homo sapiens
gagagcagagggttc

SEQ ID NO: 612859 - DNA, 15 bp, Homo sapiens
agagcagagggttcc

SEQ ID NO: 612860 - DNA, 15 bp, Homo sapiens
gagcagagggttccg

SEQ ID NO: 612861 - DNA, 15 bp, Homo sapiens
agcagagggttccga

SEQ ID NO: 612862 - DNA, 15 bp, Homo sapiens
gcagagggttccgac

SEQ ID NO: 612863 - DNA, 15 bp, Homo sapiens
cagagggttccgacg

SEQ ID NO: 612864 - DNA, 15 bp, Homo sapiens
agagggttccgacgg

SEQ ID NO: 612865 - DNA, 15 bp, Homo sapiens
gagggttccgacgga

SEQ ID NO: 612866 - DNA, 15 bp, Homo sapiens
agggttccgacggat

SEQ ID NO: 612867 - DNA, 15 bp, Homo sapiens
gggttccgacggatt

SEQ ID NO: 612868 - DNA, 15 bp, Homo sapiens
ggttccgacggattc

SEQ ID NO: 612869 - DNA, 15 bp, Homo sapiens
gttccgacggattcc

SEQ ID NO: 612870 - DNA, 15 bp, Homo sapiens
ttccgacggattcct

SEQ ID NO: 612871 - DNA, 15 bp, Homo sapiens
tccgacggattcctt

SEQ ID NO: 612872 - DNA, 15 bp, Homo sapiens
ccgacggattccttt

SEQ ID NO: 612873 - DNA, 15 bp, Homo sapiens
cgacggattccttta

SEQ ID NO: 612874 - DNA, 15 bp, Homo sapiens
gacggattcctttat

SEQ ID NO: 612875 - DNA, 15 bp, Homo sapiens
acggattcctttatg

SEQ ID NO: 612876 - DNA, 15 bp, Homo sapiens
cggattcctttatga

SEQ ID NO: 612877 - DNA, 15 bp, Homo sapiens
ggattcctttatgag

SEQ ID NO: 612878 - DNA, 15 bp, Homo sapiens
gattcctttatgagt

SEQ ID NO: 612879 - DNA, 15 bp, Homo sapiens
attcctttatgagtc

SEQ ID NO: 612880 - DNA, 15 bp, Homo sapiens
ttcctttatgagtca

SEQ ID NO: 612881 - DNA, 15 bp, Homo sapiens
tcctttatgagtcag

SEQ ID NO: 612882 - DNA, 15 bp, Homo sapiens
cctttatgagtcagt

SEQ ID NO: 612883 - DNA, 15 bp, Homo sapiens
ctttatgagtcagtc

SEQ ID NO: 612884 - DNA, 15 bp, Homo sapiens
tttatgagtcagtct

SEQ ID NO: 612885 - DNA, 15 bp, Homo sapiens
ttatgagtcagtctc

SEQ ID NO: 612886 - DNA, 15 bp, Homo sapiens
tatgagtcagtctct

SEQ ID NO: 612887 - DNA, 15 bp, Homo sapiens
atgagtcagtctctc

SEQ ID NO: 612888 - DNA, 15 bp, Homo sapiens
tgagtcagtctctct

SEQ ID NO: 612889 - DNA, 15 bp, Homo sapiens
gagtcagtctctctc

SEQ ID NO: 612890 - DNA, 15 bp, Homo sapiens
agtcagtctctctct

SEQ ID NO: 612891 - DNA, 15 bp, Homo sapiens
gtcagtctctctctc

SEQ ID NO: 612892 - DNA, 15 bp, Homo sapiens
tcagtctctctctcc

SEQ ID NO: 612893 - DNA, 15 bp, Homo sapiens
cagtctctctctccc

SEQ ID NO: 612894 - DNA, 15 bp, Homo sapiens
agtctctctctccct

SEQ ID NO: 612895 - DNA, 15 bp, Homo sapiens
gtctctctctccctt

SEQ ID NO: 612896 - DNA, 15 bp, Homo sapiens
tctctctctcccttt

SEQ ID NO: 612897 - DNA, 15 bp, Homo sapiens
ctctctctccctttt

SEQ ID NO: 612898 - DNA, 15 bp, Homo sapiens
tctctctccctttta

SEQ ID NO: 612899 - DNA, 15 bp, Homo sapiens
ctctctcccttttaa

SEQ ID NO: 612900 - DNA, 15 bp, Homo sapiens
tctctcccttttaaa

SEQ ID NO: 612901 - DNA, 15 bp, Homo sapiens
ctctcccttttaaat

SEQ ID NO: 612902 - DNA, 15 bp, Homo sapiens
tctcccttttaaatg

SEQ ID NO: 612903 - DNA, 15 bp, Homo sapiens
ctcccttttaaatgg

SEQ ID NO: 612904 - DNA, 15 bp, Homo sapiens
tcccttttaaatggt

SEQ ID NO: 612905 - DNA, 15 bp, Homo sapiens
cccttttaaatggtg

SEQ ID NO: 612906 - DNA, 15 bp, Homo sapiens
ccttttaaatggtgg

SEQ ID NO: 612907 - DNA, 15 bp, Homo sapiens
cttttaaatggtggg

SEQ ID NO: 612908 - DNA, 15 bp, Homo sapiens
ttttaaatggtggga

SEQ ID NO: 612909 - DNA, 15 bp, Homo sapiens
tttaaatggtgggaa

SEQ ID NO: 612910 - DNA, 15 bp, Homo sapiens
ttaaatggtgggaac

SEQ ID NO: 612911 - DNA, 15 bp, Homo sapiens
taaatggtgggaacc

SEQ ID NO: 612912 - DNA, 15 bp, Homo sapiens
aaatggtgggaaccc

SEQ ID NO: 612913 - DNA, 15 bp, Homo sapiens
aatggtgggaaccct

SEQ ID NO: 612914 - DNA, 15 bp, Homo sapiens
atggtgggaaccctc

SEQ ID NO: 612915 - DNA, 15 bp, Homo sapiens
tggtgggaaccctcc

SEQ ID NO: 612916 - DNA, 15 bp, Homo sapiens
ggtgggaaccctccc

SEQ ID NO: 612917 - DNA, 15 bp, Homo sapiens
gtgggaaccctcccc

SEQ ID NO: 612918 - DNA, 15 bp, Homo sapiens
tgggaaccctcccca

SEQ ID NO: 612919 - DNA, 15 bp, Homo sapiens
gggaaccctccccaa

SEQ ID NO: 612920 - DNA, 15 bp, Homo sapiens
ggaaccctccccaaa

SEQ ID NO: 612921 - DNA, 15 bp, Homo sapiens
gaaccctccccaaaa

SEQ ID NO: 612922 - DNA, 15 bp, Homo sapiens
aaccctccccaaaac

SEQ ID NO: 612923 - DNA, 15 bp, Homo sapiens
accctccccaaaacc

SEQ ID NO: 612924 - DNA, 15 bp, Homo sapiens
ccctccccaaaacct

SEQ ID NO: 612925 - DNA, 15 bp, Homo sapiens
cctccccaaaacctt

SEQ ID NO: 612926 - DNA, 15 bp, Homo sapiens
ctccccaaaaccttt

SEQ ID NO: 612927 - DNA, 15 bp, Homo sapiens
tccccaaaacctttc

SEQ ID NO: 612928 - DNA, 15 bp, Homo sapiens
ccccaaaacctttcc

SEQ ID NO: 612929 - DNA, 15 bp, Homo sapiens
cccaaaacctttccc

SEQ ID NO: 612930 - DNA, 15 bp, Homo sapiens
ccaaaacctttcccc

SEQ ID NO: 612931 - DNA, 15 bp, Homo sapiens
caaaacctttcccca

SEQ ID NO: 612932 - DNA, 15 bp, Homo sapiens
aaaacctttccccag

SEQ ID NO: 612933 - DNA, 15 bp, Homo sapiens
aaacctttccccaga

SEQ ID NO: 612934 - DNA, 15 bp, Homo sapiens
aacctttccccagac

SEQ ID NO: 612935 - DNA, 15 bp, Homo sapiens
acctttccccagaca

SEQ ID NO: 612936 - DNA, 15 bp, Homo sapiens
cctttccccagacac

SEQ ID NO: 612937 - DNA, 15 bp, Homo sapiens
ctttccccagacaca

SEQ ID NO: 612938 - DNA, 15 bp, Homo sapiens
tttccccagacacat

SEQ ID NO: 612939 - DNA, 15 bp, Homo sapiens
ttccccagacacatt

SEQ ID NO: 612940 - DNA, 15 bp, Homo sapiens
tccccagacacattc

SEQ ID NO: 612941 - DNA, 15 bp, Homo sapiens
ccccagacacattct

SEQ ID NO: 612942 - DNA, 15 bp, Homo sapiens
cccagacacattctc

SEQ ID NO: 612943 - DNA, 15 bp, Homo sapiens
ccagacacattctcc

SEQ ID NO: 612944 - DNA, 15 bp, Homo sapiens
cagacacattctcct

SEQ ID NO: 612945 - DNA, 15 bp, Homo sapiens
agacacattctcctg

SEQ ID NO: 612946 - DNA, 15 bp, Homo sapiens
gacacattctcctgt

SEQ ID NO: 612947 - DNA, 15 bp, Homo sapiens
acacattctcctgtg

SEQ ID NO: 612948 - DNA, 15 bp, Homo sapiens
cacattctcctgtgc

SEQ ID NO: 612949 - DNA, 15 bp, Homo sapiens
acattctcctgtgcc

SEQ ID NO: 612950 - DNA, 15 bp, Homo sapiens
cattctcctgtgccc

SEQ ID NO: 612951 - DNA, 15 bp, Homo sapiens
attctcctgtgcccc

SEQ ID NO: 612952 - DNA, 15 bp, Homo sapiens
ttctcctgtgcccct

SEQ ID NO: 612953 - DNA, 15 bp, Homo sapiens
tctcctgtgcccctc

SEQ ID NO: 612954 - DNA, 15 bp, Homo sapiens
ctcctgtgcccctca

SEQ ID NO: 612955 - DNA, 15 bp, Homo sapiens
tcctgtgcccctcag

SEQ ID NO: 612956 - DNA, 15 bp, Homo sapiens
cctgtgcccctcaga

SEQ ID NO: 612957 - DNA, 15 bp, Homo sapiens
ctgtgcccctcagag

SEQ ID NO: 612958 - DNA, 15 bp, Homo sapiens
tgtgcccctcagaga

SEQ ID NO: 612959 - DNA, 15 bp, Homo sapiens
gtgcccctcagagag

SEQ ID NO: 612960 - DNA, 15 bp, Homo sapiens
tgcccctcagagagg

SEQ ID NO: 612961 - DNA, 15 bp, Homo sapiens
gcccctcagagaggc

SEQ ID NO: 612962 - DNA, 15 bp, Homo sapiens
cccctcagagaggca

SEQ ID NO: 612963 - DNA, 15 bp, Homo sapiens
ccctcagagaggcat

SEQ ID NO: 612964 - DNA, 15 bp, Homo sapiens
cctcagagaggcatg

SEQ ID NO: 612965 - DNA, 15 bp, Homo sapiens
ctcagagaggcatgt

SEQ ID NO: 612966 - DNA, 15 bp, Homo sapiens
tcagagaggcatgtg

SEQ ID NO: 612967 - DNA, 15 bp, Homo sapiens
cagagaggcatgtga

SEQ ID NO: 612968 - DNA, 15 bp, Homo sapiens
agagaggcatgtgat

SEQ ID NO: 612969 - DNA, 15 bp, Homo sapiens
gagaggcatgtgatg

SEQ ID NO: 612970 - DNA, 15 bp, Homo sapiens
agaggcatgtgatgt

SEQ ID NO: 612971 - DNA, 15 bp, Homo sapiens
gaggcatgtgatgtg

SEQ ID NO: 612972 - DNA, 15 bp, Homo sapiens
aggcatgtgatgtgc

SEQ ID NO: 612973 - DNA, 15 bp, Homo sapiens
ggcatgtgatgtgca

SEQ ID NO: 612974 - DNA, 15 bp, Homo sapiens
gcatgtgatgtgcaa

SEQ ID NO: 612975 - DNA, 15 bp, Homo sapiens
catgtgatgtgcaag

SEQ ID NO: 612976 - DNA, 15 bp, Homo sapiens
atgtgatgtgcaagg

SEQ ID NO: 612977 - DNA, 15 bp, Homo sapiens
tgtgatgtgcaagga

SEQ ID NO: 612978 - DNA, 15 bp, Homo sapiens
gtgatgtgcaaggaa

SEQ ID NO: 612979 - DNA, 15 bp, Homo sapiens
tgatgtgcaaggaaa

SEQ ID NO: 612980 - DNA, 15 bp, Homo sapiens
gatgtgcaaggaaaa

SEQ ID NO: 612981 - DNA, 15 bp, Homo sapiens
atgtgcaaggaaaat

SEQ ID NO: 612982 - DNA, 15 bp, Homo sapiens
tgtgcaaggaaaata

SEQ ID NO: 612983 - DNA, 15 bp, Homo sapiens
gtgcaaggaaaataa

SEQ ID NO: 612984 - DNA, 15 bp, Homo sapiens
tgcaaggaaaataat

SEQ ID NO: 612985 - DNA, 15 bp, Homo sapiens
gcaaggaaaataata

SEQ ID NO: 612986 - DNA, 15 bp, Homo sapiens
caaggaaaataatag

SEQ ID NO: 612987 - DNA, 15 bp, Homo sapiens
aaggaaaataatagg

SEQ ID NO: 612988 - DNA, 15 bp, Homo sapiens
aggaaaataatagga

SEQ ID NO: 612989 - DNA, 15 bp, Homo sapiens
ggaaaataataggat

SEQ ID NO: 612990 - DNA, 15 bp, Homo sapiens
gaaaataataggata

SEQ ID NO: 612991 - DNA, 15 bp, Homo sapiens
aaaataataggatat

SEQ ID NO: 612992 - DNA, 15 bp, Homo sapiens
aaataataggatata

SEQ ID NO: 612993 - DNA, 15 bp, Homo sapiens
aataataggatataa

SEQ ID NO: 612994 - DNA, 15 bp, Homo sapiens
ataataggatataaa

SEQ ID NO: 612995 - DNA, 15 bp, Homo sapiens
taataggatataaaa

SEQ ID NO: 612996 - DNA, 15 bp, Homo sapiens
aataggatataaaac

SEQ ID NO: 612997 - DNA, 15 bp, Homo sapiens
ataggatataaaaca

SEQ ID NO: 612998 - DNA, 15 bp, Homo sapiens
taggatataaaacac

SEQ ID NO: 612999 - DNA, 15 bp, Homo sapiens
aggatataaaacaca

SEQ ID NO: 613000 - DNA, 15 bp, Homo sapiens
ggatataaaacacat

SEQ ID NO: 613001 - DNA, 15 bp, Homo sapiens
gatataaaacacatc

SEQ ID NO: 613002 - DNA, 15 bp, Homo sapiens
atataaaacacatca

SEQ ID NO: 613003 - DNA, 15 bp, Homo sapiens
tataaaacacatcaa

SEQ ID NO: 613004 - DNA, 15 bp, Homo sapiens
ataaaacacatcaag

SEQ ID NO: 613005 - DNA, 15 bp, Homo sapiens
taaaacacatcaagt

SEQ ID NO: 613006 - DNA, 15 bp, Homo sapiens
aaaacacatcaagta

SEQ ID NO: 613007 - DNA, 15 bp, Homo sapiens
aaacacatcaagtag

SEQ ID NO: 613008 - DNA, 15 bp, Homo sapiens
aacacatcaagtaga

SEQ ID NO: 613009 - DNA, 15 bp, Homo sapiens
acacatcaagtagaa

SEQ ID NO: 613010 - DNA, 15 bp, Homo sapiens
cacatcaagtagaaa

SEQ ID NO: 613011 - DNA, 15 bp, Homo sapiens
acatcaagtagaaaa

SEQ ID NO: 613012 - DNA, 15 bp, Homo sapiens
catcaagtagaaaat

SEQ ID NO: 613013 - DNA, 15 bp, Homo sapiens
atcaagtagaaaatt

SEQ ID NO: 613014 - DNA, 15 bp, Homo sapiens
tcaagtagaaaattt

SEQ ID NO: 613015 - DNA, 15 bp, Homo sapiens
caagtagaaaatttc

SEQ ID NO: 613016 - DNA, 15 bp, Homo sapiens
aagtagaaaatttct

SEQ ID NO: 613017 - DNA, 15 bp, Homo sapiens
agtagaaaatttctt

SEQ ID NO: 613018 - DNA, 15 bp, Homo sapiens
gtagaaaatttctta

SEQ ID NO: 613019 - DNA, 15 bp, Homo sapiens
tagaaaatttcttat

SEQ ID NO: 613020 - DNA, 15 bp, Homo sapiens
agaaaatttcttata

SEQ ID NO: 613021 - DNA, 15 bp, Homo sapiens
gaaaatttcttatac

SEQ ID NO: 613022 - DNA, 15 bp, Homo sapiens
aaaatttcttatact

SEQ ID NO: 613023 - DNA, 15 bp, Homo sapiens
aaatttcttatactt

SEQ ID NO: 613024 - DNA, 15 bp, Homo sapiens
aatttcttatacttc

SEQ ID NO: 613025 - DNA, 15 bp, Homo sapiens
atttcttatacttca

SEQ ID NO: 613026 - DNA, 15 bp, Homo sapiens
tttcttatacttcag

SEQ ID NO: 613027 - DNA, 15 bp, Homo sapiens
ttcttatacttcagc

SEQ ID NO: 613028 - DNA, 15 bp, Homo sapiens
tcttatacttcagct

SEQ ID NO: 613029 - DNA, 15 bp, Homo sapiens
cttatacttcagctt

SEQ ID NO: 613030 - DNA, 15 bp, Homo sapiens
ttatacttcagcttc

SEQ ID NO: 613031 - DNA, 15 bp, Homo sapiens
tatacttcagcttca

SEQ ID NO: 613032 - DNA, 15 bp, Homo sapiens
atacttcagcttcag

SEQ ID NO: 613033 - DNA, 15 bp, Homo sapiens
tacttcagcttcagt

SEQ ID NO: 613034 - DNA, 15 bp, Homo sapiens
acttcagcttcagtg

SEQ ID NO: 613035 - DNA, 15 bp, Homo sapiens
cttcagcttcagtga

SEQ ID NO: 613036 - DNA, 15 bp, Homo sapiens
ttcagcttcagtgaa

SEQ ID NO: 613037 - DNA, 15 bp, Homo sapiens
tcagcttcagtgaag

SEQ ID NO: 613038 - DNA, 15 bp, Homo sapiens
cagcttcagtgaagt

SEQ ID NO: 613039 - DNA, 15 bp, Homo sapiens
agcttcagtgaagtg

SEQ ID NO: 613040 - DNA, 15 bp, Homo sapiens
gcttcagtgaagtgt

SEQ ID NO: 613041 - DNA, 15 bp, Homo sapiens
cttcagtgaagtgtt

SEQ ID NO: 613042 - DNA, 15 bp, Homo sapiens
ttcagtgaagtgttg

SEQ ID NO: 613043 - DNA, 15 bp, Homo sapiens
tcagtgaagtgttgt

SEQ ID NO: 613044 - DNA, 15 bp, Homo sapiens
cagtgaagtgttgtc

SEQ ID NO: 613045 - DNA, 15 bp, Homo sapiens
agtgaagtgttgtct

SEQ ID NO: 613046 - DNA, 15 bp, Homo sapiens
gtgaagtgttgtcta

SEQ ID NO: 613047 - DNA, 15 bp, Homo sapiens
tgaagtgttgtctat

SEQ ID NO: 613048 - DNA, 15 bp, Homo sapiens
gaagtgttgtctatg

SEQ ID NO: 613049 - DNA, 15 bp, Homo sapiens
aagtgttgtctatgt

SEQ ID NO: 613050 - DNA, 15 bp, Homo sapiens
agtgttgtctatgtt

SEQ ID NO: 613051 - DNA, 15 bp, Homo sapiens
gtgttgtctatgtta

SEQ ID NO: 613052 - DNA, 15 bp, Homo sapiens
tgttgtctatgttaa

SEQ ID NO: 613053 - DNA, 15 bp, Homo sapiens
gttgtctatgttaat

SEQ ID NO: 613054 - DNA, 15 bp, Homo sapiens
ttgtctatgttaata

SEQ ID NO: 613055 - DNA, 15 bp, Homo sapiens
tgtctatgttaatag

SEQ ID NO: 613056 - DNA, 15 bp, Homo sapiens
gtctatgttaatagg

SEQ ID NO: 613057 - DNA, 15 bp, Homo sapiens
tctatgttaataggc

SEQ ID NO: 613058 - DNA, 15 bp, Homo sapiens
ctatgttaataggca

SEQ ID NO: 613059 - DNA, 15 bp, Homo sapiens
tatgttaataggcaa

SEQ ID NO: 613060 - DNA, 15 bp, Homo sapiens
atgttaataggcaag

SEQ ID NO: 613061 - DNA, 15 bp, Homo sapiens
tgttaataggcaagt

SEQ ID NO: 613062 - DNA, 15 bp, Homo sapiens
gttaataggcaagtt

SEQ ID NO: 613063 - DNA, 15 bp, Homo sapiens
ttaataggcaagttg

SEQ ID NO: 613064 - DNA, 15 bp, Homo sapiens
taataggcaagttga

SEQ ID NO: 613065 - DNA, 15 bp, Homo sapiens
aataggcaagttgaa

SEQ ID NO: 613066 - DNA, 15 bp, Homo sapiens
ataggcaagttgaac

SEQ ID NO: 613067 - DNA, 15 bp, Homo sapiens
taggcaagttgaacc

SEQ ID NO: 613068 - DNA, 15 bp, Homo sapiens
aggcaagttgaacct

SEQ ID NO: 613069 - DNA, 15 bp, Homo sapiens
ggcaagttgaacctc

SEQ ID NO: 613070 - DNA, 15 bp, Homo sapiens
gcaagttgaacctcg

SEQ ID NO: 613071 - DNA, 15 bp, Homo sapiens
caagttgaacctcgg

SEQ ID NO: 613072 - DNA, 15 bp, Homo sapiens
aagttgaacctcggg

SEQ ID NO: 613073 - DNA, 15 bp, Homo sapiens
agttgaacctcgggc

SEQ ID NO: 613074 - DNA, 15 bp, Homo sapiens
gttgaacctcgggct

SEQ ID NO: 613075 - DNA, 15 bp, Homo sapiens
ttgaacctcgggcta

SEQ ID NO: 613076 - DNA, 15 bp, Homo sapiens
tgaacctcgggctaa

SEQ ID NO: 613077 - DNA, 15 bp, Homo sapiens
gaacctcgggctaaa

SEQ ID NO: 613078 - DNA, 15 bp, Homo sapiens
aacctcgggctaaag

SEQ ID NO: 613079 - DNA, 15 bp, Homo sapiens
acctcgggctaaaga

SEQ ID NO: 613080 - DNA, 15 bp, Homo sapiens
cctcgggctaaagaa

SEQ ID NO: 613081 - DNA, 15 bp, Homo sapiens
ctcgggctaaagaaa

SEQ ID NO: 613082 - DNA, 15 bp, Homo sapiens
tcgggctaaagaaag

SEQ ID NO: 613083 - DNA, 15 bp, Homo sapiens
cgggctaaagaaagg

SEQ ID NO: 613084 - DNA, 15 bp, Homo sapiens
gggctaaagaaagga

SEQ ID NO: 613085 - DNA, 15 bp, Homo sapiens
ggctaaagaaaggaa

SEQ ID NO: 613086 - DNA, 15 bp, Homo sapiens
gctaaagaaaggaat

SEQ ID NO: 613087 - DNA, 15 bp, Homo sapiens
ctaaagaaaggaatt

SEQ ID NO: 613088 - DNA, 15 bp, Homo sapiens
taaagaaaggaattg

SEQ ID NO: 613089 - DNA, 15 bp, Homo sapiens
aaagaaaggaattgt

SEQ ID NO: 613090 - DNA, 15 bp, Homo sapiens
aagaaaggaattgtg

SEQ ID NO: 613091 - DNA, 15 bp, Homo sapiens
agaaaggaattgtgt

SEQ ID NO: 613092 - DNA, 15 bp, Homo sapiens
gaaaggaattgtgtg

SEQ ID NO: 613093 - DNA, 15 bp, Homo sapiens
aaaggaattgtgtgg

SEQ ID NO: 613094 - DNA, 15 bp, Homo sapiens
aaggaattgtgtgga

SEQ ID NO: 613095 - DNA, 15 bp, Homo sapiens
aggaattgtgtggat

SEQ ID NO: 613096 - DNA, 15 bp, Homo sapiens
ggaattgtgtggatg

SEQ ID NO: 613097 - DNA, 15 bp, Homo sapiens
gaattgtgtggatgg

SEQ ID NO: 613098 - DNA, 15 bp, Homo sapiens
aattgtgtggatggc

SEQ ID NO: 613099 - DNA, 15 bp, Homo sapiens
attgtgtggatggct

SEQ ID NO: 613100 - DNA, 15 bp, Homo sapiens
ttgtgtggatggctg

SEQ ID NO: 613101 - DNA, 15 bp, Homo sapiens
tgtgtggatggctgc

SEQ ID NO: 613102 - DNA, 15 bp, Homo sapiens
gtgtggatggctgcc

SEQ ID NO: 613103 - DNA, 15 bp, Homo sapiens
tgtggatggctgcct

SEQ ID NO: 613104 - DNA, 15 bp, Homo sapiens
gtggatggctgcctt

SEQ ID NO: 613105 - DNA, 15 bp, Homo sapiens
tggatggctgccttg

SEQ ID NO: 613106 - DNA, 15 bp, Homo sapiens
ggatggctgccttga

SEQ ID NO: 613107 - DNA, 15 bp, Homo sapiens
gatggctgccttgac

SEQ ID NO: 613108 - DNA, 15 bp, Homo sapiens
atggctgccttgact

SEQ ID NO: 613109 - DNA, 15 bp, Homo sapiens
tggctgccttgactg

SEQ ID NO: 613110 - DNA, 15 bp, Homo sapiens
ggctgccttgactga

SEQ ID NO: 613111 - DNA, 15 bp, Homo sapiens
gctgccttgactgag

SEQ ID NO: 613112 - DNA, 15 bp, Homo sapiens
ctgccttgactgaga

SEQ ID NO: 613113 - DNA, 15 bp, Homo sapiens
tgccttgactgagac

SEQ ID NO: 613114 - DNA, 15 bp, Homo sapiens
gccttgactgagaca

SEQ ID NO: 613115 - DNA, 15 bp, Homo sapiens
ccttgactgagacaa

SEQ ID NO: 613116 - DNA, 15 bp, Homo sapiens
cttgactgagacaat

SEQ ID NO: 613117 - DNA, 15 bp, Homo sapiens
ttgactgagacaata

SEQ ID NO: 613118 - DNA, 15 bp, Homo sapiens
tgactgagacaatat

SEQ ID NO: 613119 - DNA, 15 bp, Homo sapiens
gactgagacaatatg

SEQ ID NO: 613120 - DNA, 15 bp, Homo sapiens
actgagacaatatgg

SEQ ID NO: 613121 - DNA, 15 bp, Homo sapiens
ctgagacaatatggg

SEQ ID NO: 613122 - DNA, 15 bp, Homo sapiens
tgagacaatatgggc

SEQ ID NO: 613123 - DNA, 15 bp, Homo sapiens
gagacaatatgggca

SEQ ID NO: 613124 - DNA, 15 bp, Homo sapiens
agacaatatgggcag

SEQ ID NO: 613125 - DNA, 15 bp, Homo sapiens
gacaatatgggcagg

SEQ ID NO: 613126 - DNA, 15 bp, Homo sapiens
acaatatgggcaggg

SEQ ID NO: 613127 - DNA, 15 bp, Homo sapiens
caatatgggcagggg

SEQ ID NO: 613128 - DNA, 15 bp, Homo sapiens
aatatgggcaggggg

SEQ ID NO: 613129 - DNA, 15 bp, Homo sapiens
atatgggcagggggg

SEQ ID NO: 613130 - DNA, 15 bp, Homo sapiens
tatgggcaggggggc

SEQ ID NO: 613131 - DNA, 15 bp, Homo sapiens
atgggcaggggggcg

SEQ ID NO: 613132 - DNA, 15 bp, Homo sapiens
tgggcaggggggcgt

SEQ ID NO: 613133 - DNA, 15 bp, Homo sapiens
gggcaggggggcgtt

SEQ ID NO: 613134 - DNA, 15 bp, Homo sapiens
ggcaggggggcgttc

SEQ ID NO: 613135 - DNA, 15 bp, Homo sapiens
gcaggggggcgttcc

SEQ ID NO: 613136 - DNA, 15 bp, Homo sapiens
caggggggcgttcct

SEQ ID NO: 613137 - DNA, 15 bp, Homo sapiens
aggggggcgttcctg

SEQ ID NO: 613138 - DNA, 15 bp, Homo sapiens
ggggggcgttcctgc

SEQ ID NO: 613139 - DNA, 15 bp, Homo sapiens
gggggcgttcctgct

SEQ ID NO: 613140 - DNA, 15 bp, Homo sapiens
ggggcgttcctgctt

SEQ ID NO: 613141 - DNA, 15 bp, Homo sapiens
gggcgttcctgcttc

SEQ ID NO: 613142 - DNA, 15 bp, Homo sapiens
ggcgttcctgcttcc

SEQ ID NO: 613143 - DNA, 15 bp, Homo sapiens
gcgttcctgcttccc

SEQ ID NO: 613144 - DNA, 15 bp, Homo sapiens
cgttcctgcttcccc

SEQ ID NO: 613145 - DNA, 15 bp, Homo sapiens
gttcctgcttcccca

SEQ ID NO: 613146 - DNA, 15 bp, Homo sapiens
ttcctgcttccccag

SEQ ID NO: 613147 - DNA, 15 bp, Homo sapiens
tcctgcttccccaga

SEQ ID NO: 613148 - DNA, 15 bp, Homo sapiens
cctgcttccccagaa

SEQ ID NO: 613149 - DNA, 15 bp, Homo sapiens
ctgcttccccagaac

SEQ ID NO: 613150 - DNA, 15 bp, Homo sapiens
tgcttccccagaaca

SEQ ID NO: 613151 - DNA, 15 bp, Homo sapiens
gcttccccagaacaa

SEQ ID NO: 613152 - DNA, 15 bp, Homo sapiens
cttccccagaacaag

SEQ ID NO: 613153 - DNA, 15 bp, Homo sapiens
ttccccagaacaagg

SEQ ID NO: 613154 - DNA, 15 bp, Homo sapiens
tccccagaacaaggg

SEQ ID NO: 613155 - DNA, 15 bp, Homo sapiens
ccccagaacaagggc

SEQ ID NO: 613156 - DNA, 15 bp, Homo sapiens
cccagaacaagggca

SEQ ID NO: 613157 - DNA, 15 bp, Homo sapiens
ccagaacaagggcag

SEQ ID NO: 613158 - DNA, 15 bp, Homo sapiens
cagaacaagggcagg

SEQ ID NO: 613159 - DNA, 15 bp, Homo sapiens
agaacaagggcaggc

SEQ ID NO: 613160 - DNA, 15 bp, Homo sapiens
gaacaagggcaggct

SEQ ID NO: 613161 - DNA, 15 bp, Homo sapiens
aacaagggcaggctt

SEQ ID NO: 613162 - DNA, 15 bp, Homo sapiens
acaagggcaggcttc

SEQ ID NO: 613163 - DNA, 15 bp, Homo sapiens
caagggcaggcttcc

SEQ ID NO: 613164 - DNA, 15 bp, Homo sapiens
aagggcaggcttccc

SEQ ID NO: 613165 - DNA, 15 bp, Homo sapiens
agggcaggcttccca

SEQ ID NO: 613166 - DNA, 15 bp, Homo sapiens
gggcaggcttcccaa

SEQ ID NO: 613167 - DNA, 15 bp, Homo sapiens
ggcaggcttcccaaa

SEQ ID NO: 613168 - DNA, 15 bp, Homo sapiens
gcaggcttcccaaag

SEQ ID NO: 613169 - DNA, 15 bp, Homo sapiens
caggcttcccaaagg

SEQ ID NO: 613170 - DNA, 15 bp, Homo sapiens
aggcttcccaaaggc

SEQ ID NO: 613171 - DNA, 15 bp, Homo sapiens
ggcttcccaaaggca

SEQ ID NO: 613172 - DNA, 15 bp, Homo sapiens
gcttcccaaaggcac

SEQ ID NO: 613173 - DNA, 15 bp, Homo sapiens
cttcccaaaggcacc

SEQ ID NO: 613174 - DNA, 15 bp, Homo sapiens
ttcccaaaggcaccc

SEQ ID NO: 613175 - DNA, 15 bp, Homo sapiens
tcccaaaggcacccc

SEQ ID NO: 613176 - DNA, 15 bp, Homo sapiens
cccaaaggcacccct

SEQ ID NO: 613177 - DNA, 15 bp, Homo sapiens
ccaaaggcacccctt

SEQ ID NO: 613178 - DNA, 15 bp, Homo sapiens
caaaggcacccctta

SEQ ID NO: 613179 - DNA, 15 bp, Homo sapiens
aaaggcaccccttat

SEQ ID NO: 613180 - DNA, 15 bp, Homo sapiens
aaggcaccccttatt

SEQ ID NO: 613181 - DNA, 15 bp, Homo sapiens
aggcaccccttattt

SEQ ID NO: 613182 - DNA, 15 bp, Homo sapiens
ggcaccccttatttg

SEQ ID NO: 613183 - DNA, 15 bp, Homo sapiens
gcaccccttatttgc

SEQ ID NO: 613184 - DNA, 15 bp, Homo sapiens
caccccttatttgct

SEQ ID NO: 613185 - DNA, 15 bp, Homo sapiens
accccttatttgctg

SEQ ID NO: 613186 - DNA, 15 bp, Homo sapiens
ccccttatttgctgt

SEQ ID NO: 613187 - DNA, 15 bp, Homo sapiens
cccttatttgctgtc

SEQ ID NO: 613188 - DNA, 15 bp, Homo sapiens
ccttatttgctgtct

SEQ ID NO: 613189 - DNA, 15 bp, Homo sapiens
cttatttgctgtctc

SEQ ID NO: 613190 - DNA, 15 bp, Homo sapiens
ttatttgctgtctct

SEQ ID NO: 613191 - DNA, 15 bp, Homo sapiens
tatttgctgtctctt

SEQ ID NO: 613192 - DNA, 15 bp, Homo sapiens
atttgctgtctcttc

SEQ ID NO: 613193 - DNA, 15 bp, Homo sapiens
tttgctgtctcttcg

SEQ ID NO: 613194 - DNA, 15 bp, Homo sapiens
ttgctgtctcttcgt

SEQ ID NO: 613195 - DNA, 15 bp, Homo sapiens
tgctgtctcttcgta

SEQ ID NO: 613196 - DNA, 15 bp, Homo sapiens
gctgtctcttcgtaa

SEQ ID NO: 613197 - DNA, 15 bp, Homo sapiens
ctgtctcttcgtaag

SEQ ID NO: 613198 - DNA, 15 bp, Homo sapiens
tgtctcttcgtaagc

SEQ ID NO: 613199 - DNA, 15 bp, Homo sapiens
gtctcttcgtaagcg

SEQ ID NO: 613200 - DNA, 15 bp, Homo sapiens
tctcttcgtaagcgt

SEQ ID NO: 613201 - DNA, 15 bp, Homo sapiens
ctcttcgtaagcgtg

SEQ ID NO: 613202 - DNA, 15 bp, Homo sapiens
tcttcgtaagcgtgg

SEQ ID NO: 613203 - DNA, 15 bp, Homo sapiens
cttcgtaagcgtggg

SEQ ID NO: 613204 - DNA, 15 bp, Homo sapiens
ttcgtaagcgtgggc

SEQ ID NO: 613205 - DNA, 15 bp, Homo sapiens
tcgtaagcgtgggca

SEQ ID NO: 613206 - DNA, 15 bp, Homo sapiens
cgtaagcgtgggcac

SEQ ID NO: 613207 - DNA, 15 bp, Homo sapiens
gtaagcgtgggcacc

SEQ ID NO: 613208 - DNA, 15 bp, Homo sapiens
taagcgtgggcacca

SEQ ID NO: 613209 - DNA, 15 bp, Homo sapiens
aagcgtgggcaccag

SEQ ID NO: 613210 - DNA, 15 bp, Homo sapiens
agcgtgggcaccagt

SEQ ID NO: 613211 - DNA, 15 bp, Homo sapiens
gcgtgggcaccagtg

SEQ ID NO: 613212 - DNA, 15 bp, Homo sapiens
cgtgggcaccagtgg

SEQ ID NO: 613213 - DNA, 15 bp, Homo sapiens
gtgggcaccagtggg

SEQ ID NO: 613214 - DNA, 15 bp, Homo sapiens
tgggcaccagtgggt

SEQ ID NO: 613215 - DNA, 15 bp, Homo sapiens
gggcaccagtgggtt

SEQ ID NO: 613216 - DNA, 15 bp, Homo sapiens
ggcaccagtgggttg

SEQ ID NO: 613217 - DNA, 15 bp, Homo sapiens
gcaccagtgggttga

SEQ ID NO: 613218 - DNA, 15 bp, Homo sapiens
caccagtgggttgat

SEQ ID NO: 613219 - DNA, 15 bp, Homo sapiens
accagtgggttgatg

SEQ ID NO: 613220 - DNA, 15 bp, Homo sapiens
ccagtgggttgatgt

SEQ ID NO: 613221 - DNA, 15 bp, Homo sapiens
cagtgggttgatgtg

SEQ ID NO: 613222 - DNA, 15 bp, Homo sapiens
agtgggttgatgtgg

SEQ ID NO: 613223 - DNA, 15 bp, Homo sapiens
gtgggttgatgtggg

SEQ ID NO: 613224 - DNA, 15 bp, Homo sapiens
tgggttgatgtggga

SEQ ID NO: 613225 - DNA, 15 bp, Homo sapiens
gggttgatgtgggaa

SEQ ID NO: 613226 - DNA, 15 bp, Homo sapiens
ggttgatgtgggaaa

SEQ ID NO: 613227 - DNA, 15 bp, Homo sapiens
gttgatgtgggaaac

SEQ ID NO: 613228 - DNA, 15 bp, Homo sapiens
ttgatgtgggaaaca

SEQ ID NO: 613229 - DNA, 15 bp, Homo sapiens
tgatgtgggaaacag

SEQ ID NO: 613230 - DNA, 15 bp, Homo sapiens
gatgtgggaaacagt

SEQ ID NO: 613231 - DNA, 15 bp, Homo sapiens
atgtgggaaacagtg

SEQ ID NO: 613232 - DNA, 15 bp, Homo sapiens
tgtgggaaacagtgc

SEQ ID NO: 613233 - DNA, 15 bp, Homo sapiens
gtgggaaacagtgct

SEQ ID NO: 613234 - DNA, 15 bp, Homo sapiens
tgggaaacagtgctg

SEQ ID NO: 613235 - DNA, 15 bp, Homo sapiens
gggaaacagtgctgg

SEQ ID NO: 613236 - DNA, 15 bp, Homo sapiens
ggaaacagtgctggt

SEQ ID NO: 613237 - DNA, 15 bp, Homo sapiens
gaaacagtgctggtg

SEQ ID NO: 613238 - DNA, 15 bp, Homo sapiens
aaacagtgctggtgc

SEQ ID NO: 613239 - DNA, 15 bp, Homo sapiens
aacagtgctggtgca

SEQ ID NO: 613240 - DNA, 15 bp, Homo sapiens
acagtgctggtgcaa

SEQ ID NO: 613241 - DNA, 15 bp, Homo sapiens
cagtgctggtgcaag

SEQ ID NO: 613242 - DNA, 15 bp, Homo sapiens
agtgctggtgcaagt

SEQ ID NO: 613243 - DNA, 15 bp, Homo sapiens
gtgctggtgcaagtg

SEQ ID NO: 613244 - DNA, 15 bp, Homo sapiens
tgctggtgcaagtgt

SEQ ID NO: 613245 - DNA, 15 bp, Homo sapiens
gctggtgcaagtgtt

SEQ ID NO: 613246 - DNA, 15 bp, Homo sapiens
ctggtgcaagtgttt

SEQ ID NO: 613247 - DNA, 15 bp, Homo sapiens
tggtgcaagtgttta

SEQ ID NO: 613248 - DNA, 15 bp, Homo sapiens
ggtgcaagtgtttaa

SEQ ID NO: 613249 - DNA, 15 bp, Homo sapiens
gtgcaagtgtttaag

SEQ ID NO: 613250 - DNA, 15 bp, Homo sapiens
tgcaagtgtttaagt

SEQ ID NO: 613251 - DNA, 15 bp, Homo sapiens
gcaagtgtttaagtt

SEQ ID NO: 613252 - DNA, 15 bp, Homo sapiens
caagtgtttaagttt

SEQ ID NO: 613253 - DNA, 15 bp, Homo sapiens
aagtgtttaagtttt

SEQ ID NO: 613254 - DNA, 15 bp, Homo sapiens
agtgtttaagttttg

SEQ ID NO: 613255 - DNA, 15 bp, Homo sapiens
gtgtttaagttttgg

SEQ ID NO: 613256 - DNA, 15 bp, Homo sapiens
tgtttaagttttgga

SEQ ID NO: 613257 - DNA, 15 bp, Homo sapiens
gtttaagttttggat

SEQ ID NO: 613258 - DNA, 15 bp, Homo sapiens
tttaagttttggata

SEQ ID NO: 613259 - DNA, 15 bp, Homo sapiens
ttaagttttggataa

SEQ ID NO: 613260 - DNA, 15 bp, Homo sapiens
taagttttggataaa

SEQ ID NO: 613261 - DNA, 15 bp, Homo sapiens
aagttttggataaac

SEQ ID NO: 613262 - DNA, 15 bp, Homo sapiens
agttttggataaact

SEQ ID NO: 613263 - DNA, 15 bp, Homo sapiens
gttttggataaactg

SEQ ID NO: 613264 - DNA, 15 bp, Homo sapiens
ttttggataaactga

SEQ ID NO: 613265 - DNA, 15 bp, Homo sapiens
tttggataaactgag

SEQ ID NO: 613266 - DNA, 15 bp, Homo sapiens
ttggataaactgagg

SEQ ID NO: 613267 - DNA, 15 bp, Homo sapiens
tggataaactgagga

SEQ ID NO: 613268 - DNA, 15 bp, Homo sapiens
ggataaactgaggat

SEQ ID NO: 613269 - DNA, 15 bp, Homo sapiens
gataaactgaggatt

SEQ ID NO: 613270 - DNA, 15 bp, Homo sapiens
ataaactgaggattt

SEQ ID NO: 613271 - DNA, 15 bp, Homo sapiens
taaactgaggatttt

SEQ ID NO: 613272 - DNA, 15 bp, Homo sapiens
aaactgaggattttg

SEQ ID NO: 613273 - DNA, 15 bp, Homo sapiens
aactgaggattttga

SEQ ID NO: 613274 - DNA, 15 bp, Homo sapiens
actgaggattttgag

SEQ ID NO: 613275 - DNA, 15 bp, Homo sapiens
ctgaggattttgaga

SEQ ID NO: 613276 - DNA, 15 bp, Homo sapiens
tgaggattttgagaa

SEQ ID NO: 613277 - DNA, 15 bp, Homo sapiens
gaggattttgagaat

SEQ ID NO: 613278 - DNA, 15 bp, Homo sapiens
aggattttgagaatc

SEQ ID NO: 613279 - DNA, 15 bp, Homo sapiens
ggattttgagaatca

SEQ ID NO: 613280 - DNA, 15 bp, Homo sapiens
gattttgagaatcat

SEQ ID NO: 613281 - DNA, 15 bp, Homo sapiens
attttgagaatcatt

SEQ ID NO: 613282 - DNA, 15 bp, Homo sapiens
ttttgagaatcatta

SEQ ID NO: 613283 - DNA, 15 bp, Homo sapiens
tttgagaatcattat

SEQ ID NO: 613284 - DNA, 15 bp, Homo sapiens
ttgagaatcattatt

SEQ ID NO: 613285 - DNA, 15 bp, Homo sapiens
tgagaatcattatta

SEQ ID NO: 613286 - DNA, 15 bp, Homo sapiens
gagaatcattattac

SEQ ID NO: 613287 - DNA, 15 bp, Homo sapiens
agaatcattattaca

SEQ ID NO: 613288 - DNA, 15 bp, Homo sapiens
gaatcattattacat

SEQ ID NO: 613289 - DNA, 15 bp, Homo sapiens
aatcattattacatt

SEQ ID NO: 613290 - DNA, 15 bp, Homo sapiens
atcattattacatta

SEQ ID NO: 613291 - DNA, 15 bp, Homo sapiens
tcattattacattac

SEQ ID NO: 613292 - DNA, 15 bp, Homo sapiens
cattattacattaca

SEQ ID NO: 613293 - DNA, 15 bp, Homo sapiens
attattacattacat

SEQ ID NO: 613294 - DNA, 15 bp, Homo sapiens
ttattacattacata

SEQ ID NO: 613295 - DNA, 15 bp, Homo sapiens
tattacattacatag

SEQ ID NO: 613296 - DNA, 15 bp, Homo sapiens
attacattacatagc

SEQ ID NO: 613297 - DNA, 15 bp, Homo sapiens
ttacattacatagca

SEQ ID NO: 613298 - DNA, 15 bp, Homo sapiens
tacattacatagcaa

SEQ ID NO: 613299 - DNA, 15 bp, Homo sapiens
acattacatagcaac

SEQ ID NO: 613300 - DNA, 15 bp, Homo sapiens
cattacatagcaaca

SEQ ID NO: 613301 - DNA, 15 bp, Homo sapiens
attacatagcaacaa

SEQ ID NO: 613302 - DNA, 15 bp, Homo sapiens
ttacatagcaacaaa

SEQ ID NO: 613303 - DNA, 15 bp, Homo sapiens
tacatagcaacaaag

SEQ ID NO: 613304 - DNA, 15 bp, Homo sapiens
acatagcaacaaaga

SEQ ID NO: 613305 - DNA, 15 bp, Homo sapiens
catagcaacaaagaa

SEQ ID NO: 613306 - DNA, 15 bp, Homo sapiens
atagcaacaaagaaa

SEQ ID NO: 613307 - DNA, 15 bp, Homo sapiens
tagcaacaaagaaac

SEQ ID NO: 613308 - DNA, 15 bp, Homo sapiens
agcaacaaagaaaca

SEQ ID NO: 613309 - DNA, 15 bp, Homo sapiens
gcaacaaagaaacag

SEQ ID NO: 613310 - DNA, 15 bp, Homo sapiens
caacaaagaaacaga

SEQ ID NO: 613311 - DNA, 15 bp, Homo sapiens
aacaaagaaacagat

SEQ ID NO: 613312 - DNA, 15 bp, Homo sapiens
acaaagaaacagatt

SEQ ID NO: 613313 - DNA, 15 bp, Homo sapiens
caaagaaacagattg

SEQ ID NO: 613314 - DNA, 15 bp, Homo sapiens
aaagaaacagattga

SEQ ID NO: 613315 - DNA, 15 bp, Homo sapiens
aagaaacagattgat

SEQ ID NO: 613316 - DNA, 15 bp, Homo sapiens
agaaacagattgata

SEQ ID NO: 613317 - DNA, 15 bp, Homo sapiens
gaaacagattgatat

SEQ ID NO: 613318 - DNA, 15 bp, Homo sapiens
aaacagattgatata

SEQ ID NO: 613319 - DNA, 15 bp, Homo sapiens
aacagattgatataa

SEQ ID NO: 613320 - DNA, 15 bp, Homo sapiens
acagattgatataat

SEQ ID NO: 613321 - DNA, 15 bp, Homo sapiens
cagattgatataatc

SEQ ID NO: 613322 - DNA, 15 bp, Homo sapiens
agattgatataatct

SEQ ID NO: 613323 - DNA, 15 bp, Homo sapiens
gattgatataatctg

SEQ ID NO: 613324 - DNA, 15 bp, Homo sapiens
attgatataatctgt

SEQ ID NO: 613325 - DNA, 15 bp, Homo sapiens
ttgatataatctgtg

SEQ ID NO: 613326 - DNA, 15 bp, Homo sapiens
tgatataatctgtgt

SEQ ID NO: 613327 - DNA, 15 bp, Homo sapiens
gatataatctgtgtg

SEQ ID NO: 613328 - DNA, 15 bp, Homo sapiens
atataatctgtgtga

SEQ ID NO: 613329 - DNA, 15 bp, Homo sapiens
tataatctgtgtgaa

SEQ ID NO: 613330 - DNA, 15 bp, Homo sapiens
ataatctgtgtgaaa

SEQ ID NO: 613331 - DNA, 15 bp, Homo sapiens
taatctgtgtgaaat

SEQ ID NO: 613332 - DNA, 15 bp, Homo sapiens
aatctgtgtgaaata

SEQ ID NO: 613333 - DNA, 15 bp, Homo sapiens
atctgtgtgaaataa

SEQ ID NO: 613334 - DNA, 15 bp, Homo sapiens
tctgtgtgaaataaa

SEQ ID NO: 613335 - DNA, 15 bp, Homo sapiens
ctgtgtgaaataaat

SEQ ID NO: 613336 - DNA, 15 bp, Homo sapiens
tgtgtgaaataaatt

SEQ ID NO: 613337 - DNA, 15 bp, Homo sapiens
gtgtgaaataaattg

SEQ ID NO: 613338 - DNA, 15 bp, Homo sapiens
tgtgaaataaattgc

SEQ ID NO: 613339 - DNA, 15 bp, Homo sapiens
gtgaaataaattgct

SEQ ID NO: 613340 - DNA, 15 bp, Homo sapiens
tgaaataaattgctg

SEQ ID NO: 613341 - DNA, 15 bp, Homo sapiens
gaaataaattgctga

SEQ ID NO: 613342 - DNA, 15 bp, Homo sapiens
aaataaattgctgag

SEQ ID NO: 613343 - DNA, 15 bp, Homo sapiens
aataaattgctgagg

SEQ ID NO: 613344 - DNA, 15 bp, Homo sapiens
ataaattgctgagga

SEQ ID NO: 613345 - DNA, 15 bp, Homo sapiens
taaattgctgaggag

SEQ ID NO: 613346 - DNA, 15 bp, Homo sapiens
aaattgctgaggaga

SEQ ID NO: 613347 - DNA, 15 bp, Homo sapiens
aattgctgaggagag

SEQ ID NO: 613348 - DNA, 15 bp, Homo sapiens
attgctgaggagagg

SEQ ID NO: 613349 - DNA, 15 bp, Homo sapiens
ttgctgaggagaggg

SEQ ID NO: 613350 - DNA, 15 bp, Homo sapiens
tgctgaggagaggga

SEQ ID NO: 613351 - DNA, 15 bp, Homo sapiens
gctgaggagagggat

SEQ ID NO: 613352 - DNA, 15 bp, Homo sapiens
ctgaggagagggatt

SEQ ID NO: 613353 - DNA, 15 bp, Homo sapiens
tgaggagagggattg

SEQ ID NO: 613354 - DNA, 15 bp, Homo sapiens
gaggagagggattgt

SEQ ID NO: 613355 - DNA, 15 bp, Homo sapiens
aggagagggattgta

SEQ ID NO: 613356 - DNA, 15 bp, Homo sapiens
ggagagggattgtag

SEQ ID NO: 613357 - DNA, 15 bp, Homo sapiens
gagagggattgtagg

SEQ ID NO: 613358 - DNA, 15 bp, Homo sapiens
agagggattgtaggg

SEQ ID NO: 613359 - DNA, 15 bp, Homo sapiens
gagggattgtaggga

SEQ ID NO: 613360 - DNA, 15 bp, Homo sapiens
agggattgtagggaa

SEQ ID NO: 613361 - DNA, 15 bp, Homo sapiens
gggattgtagggaag

SEQ ID NO: 613362 - DNA, 15 bp, Homo sapiens
ggattgtagggaaga

SEQ ID NO: 613363 - DNA, 15 bp, Homo sapiens
gattgtagggaagaa

SEQ ID NO: 613364 - DNA, 15 bp, Homo sapiens
attgtagggaagaag

SEQ ID NO: 613365 - DNA, 15 bp, Homo sapiens
ttgtagggaagaagt

SEQ ID NO: 613366 - DNA, 15 bp, Homo sapiens
tgtagggaagaagtt

SEQ ID NO: 613367 - DNA, 15 bp, Homo sapiens
gtagggaagaagttg

SEQ ID NO: 613368 - DNA, 15 bp, Homo sapiens
tagggaagaagttgc

SEQ ID NO: 613369 - DNA, 15 bp, Homo sapiens
agggaagaagttgct

SEQ ID NO: 613370 - DNA, 15 bp, Homo sapiens
gggaagaagttgctt

SEQ ID NO: 613371 - DNA, 15 bp, Homo sapiens
ggaagaagttgctta

SEQ ID NO: 613372 - DNA, 15 bp, Homo sapiens
gaagaagttgcttag

SEQ ID NO: 613373 - DNA, 15 bp, Homo sapiens
aagaagttgcttagt

SEQ ID NO: 613374 - DNA, 15 bp, Homo sapiens
agaagttgcttagtt

SEQ ID NO: 613375 - DNA, 15 bp, Homo sapiens
gaagttgcttagtta

SEQ ID NO: 613376 - DNA, 15 bp, Homo sapiens
aagttgcttagttag

SEQ ID NO: 613377 - DNA, 15 bp, Homo sapiens
agttgcttagttagg

SEQ ID NO: 613378 - DNA, 15 bp, Homo sapiens
gttgcttagttaggc

SEQ ID NO: 613379 - DNA, 15 bp, Homo sapiens
ttgcttagttaggca

SEQ ID NO: 613380 - DNA, 15 bp, Homo sapiens
tgcttagttaggcac

SEQ ID NO: 613381 - DNA, 15 bp, Homo sapiens
gcttagttaggcacc

SEQ ID NO: 613382 - DNA, 15 bp, Homo sapiens
cttagttaggcacct

SEQ ID NO: 613383 - DNA, 15 bp, Homo sapiens
ttagttaggcacctg

SEQ ID NO: 613384 - DNA, 15 bp, Homo sapiens
tagttaggcacctgg

SEQ ID NO: 613385 - DNA, 15 bp, Homo sapiens
agttaggcacctggg

SEQ ID NO: 613386 - DNA, 15 bp, Homo sapiens
gttaggcacctggga

SEQ ID NO: 613387 - DNA, 15 bp, Homo sapiens
ttaggcacctgggaa

SEQ ID NO: 613388 - DNA, 15 bp, Homo sapiens
taggcacctgggaag

SEQ ID NO: 613389 - DNA, 15 bp, Homo sapiens
aggcacctgggaagc

SEQ ID NO: 613390 - DNA, 15 bp, Homo sapiens
ggcacctgggaagct

SEQ ID NO: 613391 - DNA, 15 bp, Homo sapiens
gcacctgggaagctc

SEQ ID NO: 613392 - DNA, 15 bp, Homo sapiens
cacctgggaagctca

SEQ ID NO: 613393 - DNA, 15 bp, Homo sapiens
acctgggaagctcaa

SEQ ID NO: 613394 - DNA, 15 bp, Homo sapiens
cctgggaagctcaaa

SEQ ID NO: 613395 - DNA, 15 bp, Homo sapiens
ctgggaagctcaaat

SEQ ID NO: 613396 - DNA, 15 bp, Homo sapiens
tgggaagctcaaatc

SEQ ID NO: 613397 - DNA, 15 bp, Homo sapiens
gggaagctcaaatca

SEQ ID NO: 613398 - DNA, 15 bp, Homo sapiens
ggaagctcaaatcat

SEQ ID NO: 613399 - DNA, 15 bp, Homo sapiens
gaagctcaaatcatt

SEQ ID NO: 613400 - DNA, 15 bp, Homo sapiens
aagctcaaatcattt

SEQ ID NO: 613401 - DNA, 15 bp, Homo sapiens
agctcaaatcattta

SEQ ID NO: 613402 - DNA, 15 bp, Homo sapiens
gctcaaatcatttag

SEQ ID NO: 613403 - DNA, 15 bp, Homo sapiens
ctcaaatcatttagt

SEQ ID NO: 613404 - DNA, 15 bp, Homo sapiens
tcaaatcatttagtt

SEQ ID NO: 613405 - DNA, 15 bp, Homo sapiens
caaatcatttagttt

SEQ ID NO: 613406 - DNA, 15 bp, Homo sapiens
aaatcatttagttta

SEQ ID NO: 613407 - DNA, 15 bp, Homo sapiens
aatcatttagtttaa

SEQ ID NO: 613408 - DNA, 15 bp, Homo sapiens
atcatttagtttaaa

SEQ ID NO: 613409 - DNA, 15 bp, Homo sapiens
tcatttagtttaaac

SEQ ID NO: 613410 - DNA, 15 bp, Homo sapiens
catttagtttaaact

SEQ ID NO: 613411 - DNA, 15 bp, Homo sapiens
atttagtttaaactg

SEQ ID NO: 613412 - DNA, 15 bp, Homo sapiens
tttagtttaaactgt

SEQ ID NO: 613413 - DNA, 15 bp, Homo sapiens
ttagtttaaactgta

SEQ ID NO: 613414 - DNA, 15 bp, Homo sapiens
tagtttaaactgtaa

SEQ ID NO: 613415 - DNA, 15 bp, Homo sapiens
agtttaaactgtaag

SEQ ID NO: 613416 - DNA, 15 bp, Homo sapiens
gtttaaactgtaagt

SEQ ID NO: 613417 - DNA, 15 bp, Homo sapiens
tttaaactgtaagta

SEQ ID NO: 613418 - DNA, 15 bp, Homo sapiens
ttaaactgtaagtag

SEQ ID NO: 613419 - DNA, 15 bp, Homo sapiens
taaactgtaagtaga

SEQ ID NO: 613420 - DNA, 15 bp, Homo sapiens
aaactgtaagtagag

SEQ ID NO: 613421 - DNA, 15 bp, Homo sapiens
aactgtaagtagagt

SEQ ID NO: 613422 - DNA, 15 bp, Homo sapiens
actgtaagtagagtt

SEQ ID NO: 613423 - DNA, 15 bp, Homo sapiens
ctgtaagtagagttg

SEQ ID NO: 613424 - DNA, 15 bp, Homo sapiens
tgtaagtagagttgt

SEQ ID NO: 613425 - DNA, 15 bp, Homo sapiens
gtaagtagagttgtc

SEQ ID NO: 613426 - DNA, 15 bp, Homo sapiens
taagtagagttgtct

SEQ ID NO: 613427 - DNA, 15 bp, Homo sapiens
aagtagagttgtctt

SEQ ID NO: 613428 - DNA, 15 bp, Homo sapiens
agtagagttgtcttc

SEQ ID NO: 613429 - DNA, 15 bp, Homo sapiens
gtagagttgtcttcc

SEQ ID NO: 613430 - DNA, 15 bp, Homo sapiens
tagagttgtcttccc

SEQ ID NO: 613431 - DNA, 15 bp, Homo sapiens
agagttgtcttccca

SEQ ID NO: 613432 - DNA, 15 bp, Homo sapiens
gagttgtcttcccaa

SEQ ID NO: 613433 - DNA, 15 bp, Homo sapiens
agttgtcttcccaac

SEQ ID NO: 613434 - DNA, 15 bp, Homo sapiens
gttgtcttcccaacg

SEQ ID NO: 613435 - DNA, 15 bp, Homo sapiens
ttgtcttcccaacga

SEQ ID NO: 613436 - DNA, 15 bp, Homo sapiens
tgtcttcccaacgag

SEQ ID NO: 613437 - DNA, 15 bp, Homo sapiens
gtcttcccaacgaga

SEQ ID NO: 613438 - DNA, 15 bp, Homo sapiens
tcttcccaacgagaa

SEQ ID NO: 613439 - DNA, 15 bp, Homo sapiens
cttcccaacgagaac

SEQ ID NO: 613440 - DNA, 15 bp, Homo sapiens
ttcccaacgagaact

SEQ ID NO: 613441 - DNA, 15 bp, Homo sapiens
tcccaacgagaactg

SEQ ID NO: 613442 - DNA, 15 bp, Homo sapiens
cccaacgagaactgg

SEQ ID NO: 613443 - DNA, 15 bp, Homo sapiens
ccaacgagaactggt

SEQ ID NO: 613444 - DNA, 15 bp, Homo sapiens
caacgagaactggtg

SEQ ID NO: 613445 - DNA, 15 bp, Homo sapiens
aacgagaactggtga

SEQ ID NO: 613446 - DNA, 15 bp, Homo sapiens
acgagaactggtgat

SEQ ID NO: 613447 - DNA, 15 bp, Homo sapiens
cgagaactggtgatt

SEQ ID NO: 613448 - DNA, 15 bp, Homo sapiens
gagaactggtgattc

SEQ ID NO: 613449 - DNA, 15 bp, Homo sapiens
agaactggtgattcc

SEQ ID NO: 613450 - DNA, 15 bp, Homo sapiens
gaactggtgattcct

SEQ ID NO: 613451 - DNA, 15 bp, Homo sapiens
aactggtgattcctg

SEQ ID NO: 613452 - DNA, 15 bp, Homo sapiens
actggtgattcctga

SEQ ID NO: 613453 - DNA, 15 bp, Homo sapiens
ctggtgattcctgat

SEQ ID NO: 613454 - DNA, 15 bp, Homo sapiens
tggtgattcctgatt

SEQ ID NO: 613455 - DNA, 15 bp, Homo sapiens
ggtgattcctgattt

SEQ ID NO: 613456 - DNA, 15 bp, Homo sapiens
gtgattcctgatttc

SEQ ID NO: 613457 - DNA, 15 bp, Homo sapiens
tgattcctgatttca

SEQ ID NO: 613458 - DNA, 15 bp, Homo sapiens
gattcctgatttcag

SEQ ID NO: 613459 - DNA, 15 bp, Homo sapiens
attcctgatttcaga

SEQ ID NO: 613460 - DNA, 15 bp, Homo sapiens
ttcctgatttcagaa

SEQ ID NO: 613461 - DNA, 15 bp, Homo sapiens
tcctgatttcagaag

SEQ ID NO: 613462 - DNA, 15 bp, Homo sapiens
cctgatttcagaagg

SEQ ID NO: 613463 - DNA, 15 bp, Homo sapiens
ctgatttcagaaggc

SEQ ID NO: 613464 - DNA, 15 bp, Homo sapiens
tgatttcagaaggct

SEQ ID NO: 613465 - DNA, 15 bp, Homo sapiens
gatttcagaaggctc

SEQ ID NO: 613466 - DNA, 15 bp, Homo sapiens
atttcagaaggctca

SEQ ID NO: 613467 - DNA, 15 bp, Homo sapiens
tttcagaaggctcat

SEQ ID NO: 613468 - DNA, 15 bp, Homo sapiens
ttcagaaggctcatc

SEQ ID NO: 613469 - DNA, 15 bp, Homo sapiens
tcagaaggctcatca

SEQ ID NO: 613470 - DNA, 15 bp, Homo sapiens
cagaaggctcatcag

SEQ ID NO: 613471 - DNA, 15 bp, Homo sapiens
agaaggctcatcaga

SEQ ID NO: 613472 - DNA, 15 bp, Homo sapiens
gaaggctcatcagac

SEQ ID NO: 613473 - DNA, 15 bp, Homo sapiens
aaggctcatcagacc

SEQ ID NO: 613474 - DNA, 15 bp, Homo sapiens
aggctcatcagaccc

SEQ ID NO: 613475 - DNA, 15 bp, Homo sapiens
ggctcatcagacccc

SEQ ID NO: 613476 - DNA, 15 bp, Homo sapiens
gctcatcagacccct

SEQ ID NO: 613477 - DNA, 15 bp, Homo sapiens
ctcatcagaccccta

SEQ ID NO: 613478 - DNA, 15 bp, Homo sapiens
tcatcagacccctac

SEQ ID NO: 613479 - DNA, 15 bp, Homo sapiens
catcagacccctaca

SEQ ID NO: 613480 - DNA, 15 bp, Homo sapiens
atcagacccctacac

SEQ ID NO: 613481 - DNA, 15 bp, Homo sapiens
tcagacccctacacc

SEQ ID NO: 613482 - DNA, 15 bp, Homo sapiens
cagacccctacaccc

SEQ ID NO: 613483 - DNA, 15 bp, Homo sapiens
agacccctacaccca

SEQ ID NO: 613484 - DNA, 15 bp, Homo sapiens
gacccctacacccaa

SEQ ID NO: 613485 - DNA, 15 bp, Homo sapiens
acccctacacccaag

SEQ ID NO: 613486 - DNA, 15 bp, Homo sapiens
cccctacacccaagt

SEQ ID NO: 613487 - DNA, 15 bp, Homo sapiens
ccctacacccaagtc

SEQ ID NO: 613488 - DNA, 15 bp, Homo sapiens
cctacacccaagtct

SEQ ID NO: 613489 - DNA, 15 bp, Homo sapiens
ctacacccaagtctt

SEQ ID NO: 613490 - DNA, 15 bp, Homo sapiens
tacacccaagtcttt

SEQ ID NO: 613491 - DNA, 15 bp, Homo sapiens
acacccaagtctttt

SEQ ID NO: 613492 - DNA, 15 bp, Homo sapiens
cacccaagtctttta

SEQ ID NO: 613493 - DNA, 15 bp, Homo sapiens
acccaagtcttttaa

SEQ ID NO: 613494 - DNA, 15 bp, Homo sapiens
cccaagtcttttaac

SEQ ID NO: 613495 - DNA, 15 bp, Homo sapiens
ccaagtcttttaaca

SEQ ID NO: 613496 - DNA, 15 bp, Homo sapiens
caagtcttttaacac

SEQ ID NO: 613497 - DNA, 15 bp, Homo sapiens
aagtcttttaacacg

SEQ ID NO: 613498 - DNA, 15 bp, Homo sapiens
agtcttttaacacgg

SEQ ID NO: 613499 - DNA, 15 bp, Homo sapiens
gtcttttaacacgga

SEQ ID NO: 613500 - DNA, 15 bp, Homo sapiens
tcttttaacacggag

SEQ ID NO: 613501 - DNA, 15 bp, Homo sapiens
cttttaacacggagg

SEQ ID NO: 613502 - DNA, 15 bp, Homo sapiens
ttttaacacggagga

SEQ ID NO: 613503 - DNA, 15 bp, Homo sapiens
tttaacacggaggaa

SEQ ID NO: 613504 - DNA, 15 bp, Homo sapiens
ttaacacggaggaag

SEQ ID NO: 613505 - DNA, 15 bp, Homo sapiens
taacacggaggaagt

SEQ ID NO: 613506 - DNA, 15 bp, Homo sapiens
aacacggaggaagtt

SEQ ID NO: 613507 - DNA, 15 bp, Homo sapiens
acacggaggaagttt

SEQ ID NO: 613508 - DNA, 15 bp, Homo sapiens
cacggaggaagtttt

SEQ ID NO: 613509 - DNA, 15 bp, Homo sapiens
acggaggaagttttt

SEQ ID NO: 613510 - DNA, 15 bp, Homo sapiens
cggaggaagtttttc

SEQ ID NO: 613511 - DNA, 15 bp, Homo sapiens
ggaggaagtttttcc

SEQ ID NO: 613512 - DNA, 15 bp, Homo sapiens
gaggaagtttttcct

SEQ ID NO: 613513 - DNA, 15 bp, Homo sapiens
aggaagtttttcctt

SEQ ID NO: 613514 - DNA, 15 bp, Homo sapiens
ggaagtttttccttc

SEQ ID NO: 613515 - DNA, 15 bp, Homo sapiens
gaagtttttccttca

SEQ ID NO: 613516 - DNA, 15 bp, Homo sapiens
aagtttttccttcat

SEQ ID NO: 613517 - DNA, 15 bp, Homo sapiens
agtttttccttcatg

SEQ ID NO: 613518 - DNA, 15 bp, Homo sapiens
gtttttccttcatga

SEQ ID NO: 613519 - DNA, 15 bp, Homo sapiens
tttttccttcatgaa

SEQ ID NO: 613520 - DNA, 15 bp, Homo sapiens
ttttccttcatgaat

SEQ ID NO: 613521 - DNA, 15 bp, Homo sapiens
tttccttcatgaata

SEQ ID NO: 613522 - DNA, 15 bp, Homo sapiens
ttccttcatgaatac

SEQ ID NO: 613523 - DNA, 15 bp, Homo sapiens
tccttcatgaataca

SEQ ID NO: 613524 - DNA, 15 bp, Homo sapiens
ccttcatgaatacat

SEQ ID NO: 613525 - DNA, 15 bp, Homo sapiens
cttcatgaatacata

SEQ ID NO: 613526 - DNA, 15 bp, Homo sapiens
ttcatgaatacatac

SEQ ID NO: 613527 - DNA, 15 bp, Homo sapiens
tcatgaatacataca

SEQ ID NO: 613528 - DNA, 15 bp, Homo sapiens
catgaatacatacaa

SEQ ID NO: 613529 - DNA, 15 bp, Homo sapiens
atgaatacatacaag

SEQ ID NO: 613530 - DNA, 15 bp, Homo sapiens
tgaatacatacaaga

SEQ ID NO: 613531 - DNA, 15 bp, Homo sapiens
gaatacatacaagat

SEQ ID NO: 613532 - DNA, 15 bp, Homo sapiens
aatacatacaagata

SEQ ID NO: 613533 - DNA, 15 bp, Homo sapiens
atacatacaagatac

SEQ ID NO: 613534 - DNA, 15 bp, Homo sapiens
tacatacaagatacc

SEQ ID NO: 613535 - DNA, 15 bp, Homo sapiens
acatacaagataccg

SEQ ID NO: 613536 - DNA, 15 bp, Homo sapiens
catacaagataccga

SEQ ID NO: 613537 - DNA, 15 bp, Homo sapiens
atacaagataccgaa

SEQ ID NO: 613538 - DNA, 15 bp, Homo sapiens
tacaagataccgaac

SEQ ID NO: 613539 - DNA, 15 bp, Homo sapiens
acaagataccgaact

SEQ ID NO: 613540 - DNA, 15 bp, Homo sapiens
caagataccgaactg

SEQ ID NO: 613541 - DNA, 15 bp, Homo sapiens
aagataccgaactga

SEQ ID NO: 613542 - DNA, 15 bp, Homo sapiens
agataccgaactgaa

SEQ ID NO: 613543 - DNA, 15 bp, Homo sapiens
gataccgaactgaag

SEQ ID NO: 613544 - DNA, 15 bp, Homo sapiens
ataccgaactgaaga

SEQ ID NO: 613545 - DNA, 15 bp, Homo sapiens
taccgaactgaagaa

SEQ ID NO: 613546 - DNA, 15 bp, Homo sapiens
accgaactgaagaaa

SEQ ID NO: 613547 - DNA, 15 bp, Homo sapiens
ccgaactgaagaaat

SEQ ID NO: 613548 - DNA, 15 bp, Homo sapiens
cgaactgaagaaatc

SEQ ID NO: 613549 - DNA, 15 bp, Homo sapiens
gaactgaagaaatct

SEQ ID NO: 613550 - DNA, 15 bp, Homo sapiens
aactgaagaaatctt

SEQ ID NO: 613551 - DNA, 15 bp, Homo sapiens
actgaagaaatcttt

SEQ ID NO: 613552 - DNA, 15 bp, Homo sapiens
ctgaagaaatctttt

SEQ ID NO: 613553 - DNA, 15 bp, Homo sapiens
tgaagaaatcttttc

SEQ ID NO: 613554 - DNA, 15 bp, Homo sapiens
gaagaaatcttttct

SEQ ID NO: 613555 - DNA, 15 bp, Homo sapiens
aagaaatcttttctt

SEQ ID NO: 613556 - DNA, 15 bp, Homo sapiens
agaaatcttttcttt

SEQ ID NO: 613557 - DNA, 15 bp, Homo sapiens
gaaatcttttctttg

SEQ ID NO: 613558 - DNA, 15 bp, Homo sapiens
aaatcttttctttgc

SEQ ID NO: 613559 - DNA, 15 bp, Homo sapiens
aatcttttctttgct

SEQ ID NO: 613560 - DNA, 15 bp, Homo sapiens
atcttttctttgctc

SEQ ID NO: 613561 - DNA, 15 bp, Homo sapiens
tcttttctttgctcc

SEQ ID NO: 613562 - DNA, 15 bp, Homo sapiens
cttttctttgctcca

SEQ ID NO: 613563 - DNA, 15 bp, Homo sapiens
ttttctttgctccaa

SEQ ID NO: 613564 - DNA, 15 bp, Homo sapiens
tttctttgctccaac

SEQ ID NO: 613565 - DNA, 15 bp, Homo sapiens
ttctttgctccaacc

SEQ ID NO: 613566 - DNA, 15 bp, Homo sapiens
tctttgctccaaccc

SEQ ID NO: 613567 - DNA, 15 bp, Homo sapiens
ctttgctccaacccc

SEQ ID NO: 613568 - DNA, 15 bp, Homo sapiens
tttgctccaaccccc

SEQ ID NO: 613569 - DNA, 15 bp, Homo sapiens
ttgctccaacccccg

SEQ ID NO: 613570 - DNA, 15 bp, Homo sapiens
tgctccaacccccgc

SEQ ID NO: 613571 - DNA, 15 bp, Homo sapiens
gctccaacccccgct

SEQ ID NO: 613572 - DNA, 15 bp, Homo sapiens
ctccaacccccgctc

SEQ ID NO: 613573 - DNA, 15 bp, Homo sapiens
tccaacccccgctcc

SEQ ID NO: 613574 - DNA, 15 bp, Homo sapiens
ccaacccccgctccc

SEQ ID NO: 613575 - DNA, 15 bp, Homo sapiens
caacccccgctcccc

SEQ ID NO: 613576 - DNA, 15 bp, Homo sapiens
aacccccgctccccc

SEQ ID NO: 613577 - DNA, 15 bp, Homo sapiens
acccccgctcccccg

SEQ ID NO: 613578 - DNA, 15 bp, Homo sapiens
cccccgctcccccgg

SEQ ID NO: 613579 - DNA, 15 bp, Homo sapiens
ccccgctcccccggc

SEQ ID NO: 613580 - DNA, 15 bp, Homo sapiens
cccgctcccccggcc

SEQ ID NO: 613581 - DNA, 15 bp, Homo sapiens
ccgctcccccggccc

SEQ ID NO: 613582 - DNA, 15 bp, Homo sapiens
cgctcccccggcccc

SEQ ID NO: 613583 - DNA, 15 bp, Homo sapiens
gctcccccggccccc

SEQ ID NO: 613584 - DNA, 15 bp, Homo sapiens
ctcccccggcccccc

SEQ ID NO: 613585 - DNA, 15 bp, Homo sapiens
tcccccggccccccg

SEQ ID NO: 613586 - DNA, 15 bp, Homo sapiens
cccccggccccccga

SEQ ID NO: 613587 - DNA, 15 bp, Homo sapiens
ccccggccccccgaa

SEQ ID NO: 613588 - DNA, 15 bp, Homo sapiens
cccggccccccgaag

SEQ ID NO: 613589 - DNA, 15 bp, Homo sapiens
ccggccccccgaagc

SEQ ID NO: 613590 - DNA, 15 bp, Homo sapiens
cggccccccgaagct

SEQ ID NO: 613591 - DNA, 15 bp, Homo sapiens
ggccccccgaagcta

SEQ ID NO: 613592 - DNA, 15 bp, Homo sapiens
gccccccgaagctat

SEQ ID NO: 613593 - DNA, 15 bp, Homo sapiens
ccccccgaagctatt

SEQ ID NO: 613594 - DNA, 15 bp, Homo sapiens
cccccgaagctatta

SEQ ID NO: 613595 - DNA, 15 bp, Homo sapiens
ccccgaagctattaa

SEQ ID NO: 613596 - DNA, 15 bp, Homo sapiens
cccgaagctattaat

SEQ ID NO: 613597 - DNA, 15 bp, Homo sapiens
ccgaagctattaata

SEQ ID NO: 613598 - DNA, 15 bp, Homo sapiens
cgaagctattaatag

SEQ ID NO: 613599 - DNA, 15 bp, Homo sapiens
gaagctattaatagt

SEQ ID NO: 613600 - DNA, 15 bp, Homo sapiens
aagctattaatagtc

SEQ ID NO: 613601 - DNA, 15 bp, Homo sapiens
agctattaatagtca

SEQ ID NO: 613602 - DNA, 15 bp, Homo sapiens
gctattaatagtcat

SEQ ID NO: 613603 - DNA, 15 bp, Homo sapiens
ctattaatagtcatt

SEQ ID NO: 613604 - DNA, 15 bp, Homo sapiens
tattaatagtcattc

SEQ ID NO: 613605 - DNA, 15 bp, Homo sapiens
attaatagtcattca

SEQ ID NO: 613606 - DNA, 15 bp, Homo sapiens
ttaatagtcattcaa

SEQ ID NO: 613607 - DNA, 15 bp, Homo sapiens
taatagtcattcaaa

SEQ ID NO: 613608 - DNA, 15 bp, Homo sapiens
aatagtcattcaaat

SEQ ID NO: 613609 - DNA, 15 bp, Homo sapiens
atagtcattcaaatg

SEQ ID NO: 613610 - DNA, 15 bp, Homo sapiens
tagtcattcaaatgg

SEQ ID NO: 613611 - DNA, 15 bp, Homo sapiens
agtcattcaaatggc

SEQ ID NO: 613612 - DNA, 15 bp, Homo sapiens
gtcattcaaatggca

SEQ ID NO: 613613 - DNA, 15 bp, Homo sapiens
tcattcaaatggcac

SEQ ID NO: 613614 - DNA, 15 bp, Homo sapiens
cattcaaatggcact

SEQ ID NO: 613615 - DNA, 15 bp, Homo sapiens
attcaaatggcactg

SEQ ID NO: 613616 - DNA, 15 bp, Homo sapiens
ttcaaatggcactgc

SEQ ID NO: 613617 - DNA, 15 bp, Homo sapiens
tcaaatggcactgca

SEQ ID NO: 613618 - DNA, 15 bp, Homo sapiens
caaatggcactgcac

SEQ ID NO: 613619 - DNA, 15 bp, Homo sapiens
aaatggcactgcact

SEQ ID NO: 613620 - DNA, 15 bp, Homo sapiens
aatggcactgcactc

SEQ ID NO: 613621 - DNA, 15 bp, Homo sapiens
atggcactgcactct

SEQ ID NO: 613622 - DNA, 15 bp, Homo sapiens
tggcactgcactctt

SEQ ID NO: 613623 - DNA, 15 bp, Homo sapiens
ggcactgcactcttt

SEQ ID NO: 613624 - DNA, 15 bp, Homo sapiens
gcactgcactctttc

SEQ ID NO: 613625 - DNA, 15 bp, Homo sapiens
cactgcactctttcc

SEQ ID NO: 613626 - DNA, 15 bp, Homo sapiens
actgcactctttcca

SEQ ID NO: 613627 - DNA, 15 bp, Homo sapiens
ctgcactctttccaa

SEQ ID NO: 613628 - DNA, 15 bp, Homo sapiens
tgcactctttccaag

SEQ ID NO: 613629 - DNA, 15 bp, Homo sapiens
gcactctttccaagc

SEQ ID NO: 613630 - DNA, 15 bp, Homo sapiens
cactctttccaagct

SEQ ID NO: 613631 - DNA, 15 bp, Homo sapiens
actctttccaagctt

SEQ ID NO: 613632 - DNA, 15 bp, Homo sapiens
ctctttccaagcttt

SEQ ID NO: 613633 - DNA, 15 bp, Homo sapiens
tctttccaagctttc

SEQ ID NO: 613634 - DNA, 15 bp, Homo sapiens
ctttccaagctttcc

SEQ ID NO: 613635 - DNA, 15 bp, Homo sapiens
tttccaagctttcct

SEQ ID NO: 613636 - DNA, 15 bp, Homo sapiens
ttccaagctttccta

SEQ ID NO: 613637 - DNA, 15 bp, Homo sapiens
tccaagctttcctaa

SEQ ID NO: 613638 - DNA, 15 bp, Homo sapiens
ccaagctttcctaag

SEQ ID NO: 613639 - DNA, 15 bp, Homo sapiens
caagctttcctaagc

SEQ ID NO: 613640 - DNA, 15 bp, Homo sapiens
aagctttcctaagct

SEQ ID NO: 613641 - DNA, 15 bp, Homo sapiens
agctttcctaagcta

SEQ ID NO: 613642 - DNA, 15 bp, Homo sapiens
gctttcctaagctaa

SEQ ID NO: 613643 - DNA, 15 bp, Homo sapiens
ctttcctaagctaaa

SEQ ID NO: 613644 - DNA, 15 bp, Homo sapiens
tttcctaagctaaat

SEQ ID NO: 613645 - DNA, 15 bp, Homo sapiens
ttcctaagctaaata

SEQ ID NO: 613646 - DNA, 15 bp, Homo sapiens
tcctaagctaaatat

SEQ ID NO: 613647 - DNA, 15 bp, Homo sapiens
cctaagctaaatatg

SEQ ID NO: 613648 - DNA, 15 bp, Homo sapiens
ctaagctaaatatgg

SEQ ID NO: 613649 - DNA, 15 bp, Homo sapiens
taagctaaatatggc

SEQ ID NO: 613650 - DNA, 15 bp, Homo sapiens
aagctaaatatggct

SEQ ID NO: 613651 - DNA, 15 bp, Homo sapiens
agctaaatatggctc

SEQ ID NO: 613652 - DNA, 15 bp, Homo sapiens
gctaaatatggctcc

SEQ ID NO: 613653 - DNA, 15 bp, Homo sapiens
ctaaatatggctcca

SEQ ID NO: 613654 - DNA, 15 bp, Homo sapiens
taaatatggctccaa

SEQ ID NO: 613655 - DNA, 15 bp, Homo sapiens
aaatatggctccaac

SEQ ID NO: 613656 - DNA, 15 bp, Homo sapiens
aatatggctccaaca

SEQ ID NO: 613657 - DNA, 15 bp, Homo sapiens
atatggctccaacag

SEQ ID NO: 613658 - DNA, 15 bp, Homo sapiens
tatggctccaacagg

SEQ ID NO: 613659 - DNA, 15 bp, Homo sapiens
atggctccaacaggt

SEQ ID NO: 613660 - DNA, 15 bp, Homo sapiens
tggctccaacaggtc

SEQ ID NO: 613661 - DNA, 15 bp, Homo sapiens
ggctccaacaggtct

SEQ ID NO: 613662 - DNA, 15 bp, Homo sapiens
gctccaacaggtctg

SEQ ID NO: 613663 - DNA, 15 bp, Homo sapiens
ctccaacaggtctgg

SEQ ID NO: 613664 - DNA, 15 bp, Homo sapiens
tccaacaggtctggg

SEQ ID NO: 613665 - DNA, 15 bp, Homo sapiens
ccaacaggtctggga

SEQ ID NO: 613666 - DNA, 15 bp, Homo sapiens
caacaggtctgggaa

SEQ ID NO: 613667 - DNA, 15 bp, Homo sapiens
aacaggtctgggaac

SEQ ID NO: 613668 - DNA, 15 bp, Homo sapiens
acaggtctgggaact

SEQ ID NO: 613669 - DNA, 15 bp, Homo sapiens
caggtctgggaacta

SEQ ID NO: 613670 - DNA, 15 bp, Homo sapiens
aggtctgggaactat

SEQ ID NO: 613671 - DNA, 15 bp, Homo sapiens
ggtctgggaactatt

SEQ ID NO: 613672 - DNA, 15 bp, Homo sapiens
gtctgggaactattg

SEQ ID NO: 613673 - DNA, 15 bp, Homo sapiens
tctgggaactattga

SEQ ID NO: 613674 - DNA, 15 bp, Homo sapiens
ctgggaactattgaa

SEQ ID NO: 613675 - DNA, 15 bp, Homo sapiens
tgggaactattgaat

SEQ ID NO: 613676 - DNA, 15 bp, Homo sapiens
gggaactattgaatg

SEQ ID NO: 613677 - DNA, 15 bp, Homo sapiens
ggaactattgaatgc

SEQ ID NO: 613678 - DNA, 15 bp, Homo sapiens
gaactattgaatgca

SEQ ID NO: 613679 - DNA, 15 bp, Homo sapiens
aactattgaatgcaa

SEQ ID NO: 613680 - DNA, 15 bp, Homo sapiens
actattgaatgcaat

SEQ ID NO: 613681 - DNA, 15 bp, Homo sapiens
ctattgaatgcaatg

SEQ ID NO: 613682 - DNA, 15 bp, Homo sapiens
tattgaatgcaatgt

SEQ ID NO: 613683 - DNA, 15 bp, Homo sapiens
attgaatgcaatgta

SEQ ID NO: 613684 - DNA, 15 bp, Homo sapiens
ttgaatgcaatgtac

SEQ ID NO: 613685 - DNA, 15 bp, Homo sapiens
tgaatgcaatgtact

SEQ ID NO: 613686 - DNA, 15 bp, Homo sapiens
gaatgcaatgtactc

SEQ ID NO: 613687 - DNA, 15 bp, Homo sapiens
aatgcaatgtactct

SEQ ID NO: 613688 - DNA, 15 bp, Homo sapiens
atgcaatgtactctg

SEQ ID NO: 613689 - DNA, 15 bp, Homo sapiens
tgcaatgtactctga

SEQ ID NO: 613690 - DNA, 15 bp, Homo sapiens
gcaatgtactctgaa

SEQ ID NO: 613691 - DNA, 15 bp, Homo sapiens
caatgtactctgaaa

SEQ ID NO: 613692 - DNA, 15 bp, Homo sapiens
aatgtactctgaaat

SEQ ID NO: 613693 - DNA, 15 bp, Homo sapiens
atgtactctgaaatt

SEQ ID NO: 613694 - DNA, 15 bp, Homo sapiens
tgtactctgaaattc

SEQ ID NO: 613695 - DNA, 15 bp, Homo sapiens
gtactctgaaattcc

SEQ ID NO: 613696 - DNA, 15 bp, Homo sapiens
tactctgaaattcca

SEQ ID NO: 613697 - DNA, 15 bp, Homo sapiens
actctgaaattccag

SEQ ID NO: 613698 - DNA, 15 bp, Homo sapiens
ctctgaaattccagc

SEQ ID NO: 613699 - DNA, 15 bp, Homo sapiens
tctgaaattccagca

SEQ ID NO: 613700 - DNA, 15 bp, Homo sapiens
ctgaaattccagcag

SEQ ID NO: 613701 - DNA, 15 bp, Homo sapiens
tgaaattccagcagc

SEQ ID NO: 613702 - DNA, 15 bp, Homo sapiens
gaaattccagcagct

SEQ ID NO: 613703 - DNA, 15 bp, Homo sapiens
aaattccagcagctg

SEQ ID NO: 613704 - DNA, 15 bp, Homo sapiens
aattccagcagctgt

SEQ ID NO: 613705 - DNA, 15 bp, Homo sapiens
attccagcagctgtt

SEQ ID NO: 613706 - DNA, 15 bp, Homo sapiens
ttccagcagctgttt

SEQ ID NO: 613707 - DNA, 15 bp, Homo sapiens
tccagcagctgttta

SEQ ID NO: 613708 - DNA, 15 bp, Homo sapiens
ccagcagctgtttac

SEQ ID NO: 613709 - DNA, 15 bp, Homo sapiens
cagcagctgtttaca

SEQ ID NO: 613710 - DNA, 15 bp, Homo sapiens
agcagctgtttacat

SEQ ID NO: 613711 - DNA, 15 bp, Homo sapiens
gcagctgtttacatg

SEQ ID NO: 613712 - DNA, 15 bp, Homo sapiens
cagctgtttacatgc

SEQ ID NO: 613713 - DNA, 15 bp, Homo sapiens
agctgtttacatgcc

SEQ ID NO: 613714 - DNA, 15 bp, Homo sapiens
gctgtttacatgcct

SEQ ID NO: 613715 - DNA, 15 bp, Homo sapiens
ctgtttacatgcctg

SEQ ID NO: 613716 - DNA, 15 bp, Homo sapiens
tgtttacatgcctga

SEQ ID NO: 613717 - DNA, 15 bp, Homo sapiens
gtttacatgcctgat

SEQ ID NO: 613718 - DNA, 15 bp, Homo sapiens
tttacatgcctgatg

SEQ ID NO: 613719 - DNA, 15 bp, Homo sapiens
ttacatgcctgatgc

SEQ ID NO: 613720 - DNA, 15 bp, Homo sapiens
tacatgcctgatgcc

SEQ ID NO: 613721 - DNA, 15 bp, Homo sapiens
acatgcctgatgcct

SEQ ID NO: 613722 - DNA, 15 bp, Homo sapiens
catgcctgatgccta

SEQ ID NO: 613723 - DNA, 15 bp, Homo sapiens
atgcctgatgcctaa

SEQ ID NO: 613724 - DNA, 15 bp, Homo sapiens
tgcctgatgcctaat

SEQ ID NO: 613725 - DNA, 15 bp, Homo sapiens
gcctgatgcctaatg

SEQ ID NO: 613726 - DNA, 15 bp, Homo sapiens
cctgatgcctaatgc

SEQ ID NO: 613727 - DNA, 15 bp, Homo sapiens
ctgatgcctaatgcc

SEQ ID NO: 613728 - DNA, 15 bp, Homo sapiens
tgatgcctaatgcca

SEQ ID NO: 613729 - DNA, 15 bp, Homo sapiens
gatgcctaatgccat

SEQ ID NO: 613730 - DNA, 15 bp, Homo sapiens
atgcctaatgccata

SEQ ID NO: 613731 - DNA, 15 bp, Homo sapiens
tgcctaatgccatac

SEQ ID NO: 613732 - DNA, 15 bp, Homo sapiens
gcctaatgccatacg

SEQ ID NO: 613733 - DNA, 15 bp, Homo sapiens
cctaatgccatacgc

SEQ ID NO: 613734 - DNA, 15 bp, Homo sapiens
ctaatgccatacgcc

SEQ ID NO: 613735 - DNA, 15 bp, Homo sapiens
taatgccatacgcct

SEQ ID NO: 613736 - DNA, 15 bp, Homo sapiens
aatgccatacgcctg

SEQ ID NO: 613737 - DNA, 15 bp, Homo sapiens
atgccatacgcctgg

SEQ ID NO: 613738 - DNA, 15 bp, Homo sapiens
tgccatacgcctgga

SEQ ID NO: 613739 - DNA, 15 bp, Homo sapiens
gccatacgcctggaa

SEQ ID NO: 613740 - DNA, 15 bp, Homo sapiens
ccatacgcctggaac

SEQ ID NO: 613741 - DNA, 15 bp, Homo sapiens
catacgcctggaact

SEQ ID NO: 613742 - DNA, 15 bp, Homo sapiens
atacgcctggaactt

SEQ ID NO: 613743 - DNA, 15 bp, Homo sapiens
tacgcctggaacttg

SEQ ID NO: 613744 - DNA, 15 bp, Homo sapiens
acgcctggaacttgc

SEQ ID NO: 613745 - DNA, 15 bp, Homo sapiens
cgcctggaacttgct

SEQ ID NO: 613746 - DNA, 15 bp, Homo sapiens
gcctggaacttgctg

SEQ ID NO: 613747 - DNA, 15 bp, Homo sapiens
cctggaacttgctga

SEQ ID NO: 613748 - DNA, 15 bp, Homo sapiens
ctggaacttgctgag

SEQ ID NO: 613749 - DNA, 15 bp, Homo sapiens
tggaacttgctgaga

SEQ ID NO: 613750 - DNA, 15 bp, Homo sapiens
ggaacttgctgagaa

SEQ ID NO: 613751 - DNA, 15 bp, Homo sapiens
gaacttgctgagaac

SEQ ID NO: 613752 - DNA, 15 bp, Homo sapiens
aacttgctgagaact

SEQ ID NO: 613753 - DNA, 15 bp, Homo sapiens
acttgctgagaactc

SEQ ID NO: 613754 - DNA, 15 bp, Homo sapiens
cttgctgagaactct

SEQ ID NO: 613755 - DNA, 15 bp, Homo sapiens
ttgctgagaactctc

SEQ ID NO: 613756 - DNA, 15 bp, Homo sapiens
tgctgagaactctcg

SEQ ID NO: 613757 - DNA, 15 bp, Homo sapiens
gctgagaactctcgg

SEQ ID NO: 613758 - DNA, 15 bp, Homo sapiens
ctgagaactctcggc

SEQ ID NO: 613759 - DNA, 15 bp, Homo sapiens
tgagaactctcggct

SEQ ID NO: 613760 - DNA, 15 bp, Homo sapiens
gagaactctcggctg

SEQ ID NO: 613761 - DNA, 15 bp, Homo sapiens
agaactctcggctgc

SEQ ID NO: 613762 - DNA, 15 bp, Homo sapiens
gaactctcggctgcc

SEQ ID NO: 613763 - DNA, 15 bp, Homo sapiens
aactctcggctgcct

SEQ ID NO: 613764 - DNA, 15 bp, Homo sapiens
actctcggctgcctc

SEQ ID NO: 613765 - DNA, 15 bp, Homo sapiens
ctctcggctgcctct

SEQ ID NO: 613766 - DNA, 15 bp, Homo sapiens
tctcggctgcctctg

SEQ ID NO: 613767 - DNA, 15 bp, Homo sapiens
ctcggctgcctctgt

SEQ ID NO: 613768 - DNA, 15 bp, Homo sapiens
tcggctgcctctgtc

SEQ ID NO: 613769 - DNA, 15 bp, Homo sapiens
cggctgcctctgtcc

SEQ ID NO: 613770 - DNA, 15 bp, Homo sapiens
ggctgcctctgtcct

SEQ ID NO: 613771 - DNA, 15 bp, Homo sapiens
gctgcctctgtcctg

SEQ ID NO: 613772 - DNA, 15 bp, Homo sapiens
ctgcctctgtcctgg

SEQ ID NO: 613773 - DNA, 15 bp, Homo sapiens
tgcctctgtcctggg

SEQ ID NO: 613774 - DNA, 15 bp, Homo sapiens
gcctctgtcctgggg

SEQ ID NO: 613775 - DNA, 15 bp, Homo sapiens
cctctgtcctggggt

SEQ ID NO: 613776 - DNA, 15 bp, Homo sapiens
ctctgtcctggggta

SEQ ID NO: 613777 - DNA, 15 bp, Homo sapiens
tctgtcctggggtac

SEQ ID NO: 613778 - DNA, 15 bp, Homo sapiens
ctgtcctggggtact

SEQ ID NO: 613779 - DNA, 15 bp, Homo sapiens
tgtcctggggtacta

SEQ ID NO: 613780 - DNA, 15 bp, Homo sapiens
gtcctggggtactat

SEQ ID NO: 613781 - DNA, 15 bp, Homo sapiens
tcctggggtactatt

SEQ ID NO: 613782 - DNA, 15 bp, Homo sapiens
cctggggtactattg

SEQ ID NO: 613783 - DNA, 15 bp, Homo sapiens
acgcgtggtggctca

SEQ ID NO: 613784 - DNA, 15 bp, Homo sapiens
cgcgtggtggctcac

SEQ ID NO: 613785 - DNA, 15 bp, Homo sapiens
gcgtggtggctcacg

SEQ ID NO: 613786 - DNA, 15 bp, Homo sapiens
cgtggtggctcacgc

SEQ ID NO: 613787 - DNA, 15 bp, Homo sapiens
ggtggctcacgcctg

SEQ ID NO: 613788 - DNA, 15 bp, Homo sapiens
gtggctcacgcctgt

SEQ ID NO: 613789 - DNA, 15 bp, Homo sapiens
tcacgcctgtaatcc

SEQ ID NO: 613790 - DNA, 15 bp, Homo sapiens
cacgcctgtaatccc

SEQ ID NO: 613791 - DNA, 15 bp, Homo sapiens
acgcctgtaatccca

SEQ ID NO: 613792 - DNA, 15 bp, Homo sapiens
cgcctgtaatcccag

SEQ ID NO: 613793 - DNA, 15 bp, Homo sapiens
gcctgtaatcccagc

SEQ ID NO: 613794 - DNA, 15 bp, Homo sapiens
cctgtaatcccagca

SEQ ID NO: 613795 - DNA, 15 bp, Homo sapiens
ctgtaatcccagcag

SEQ ID NO: 613796 - DNA, 15 bp, Homo sapiens
tgtaatcccagcagt

SEQ ID NO: 613797 - DNA, 15 bp, Homo sapiens
gtaatcccagcagtc

SEQ ID NO: 613798 - DNA, 15 bp, Homo sapiens
taatcccagcagtct

SEQ ID NO: 613799 - DNA, 15 bp, Homo sapiens
aatcccagcagtctg

SEQ ID NO: 613800 - DNA, 15 bp, Homo sapiens
atcccagcagtctgg

SEQ ID NO: 613801 - DNA, 15 bp, Homo sapiens
tcccagcagtctggg

SEQ ID NO: 613802 - DNA, 15 bp, Homo sapiens
cccagcagtctggga

SEQ ID NO: 613803 - DNA, 15 bp, Homo sapiens
ccagcagtctgggag

SEQ ID NO: 613804 - DNA, 15 bp, Homo sapiens
cagcagtctgggaga

SEQ ID NO: 613805 - DNA, 15 bp, Homo sapiens
agcagtctgggagat

SEQ ID NO: 613806 - DNA, 15 bp, Homo sapiens
gcagtctgggagatt

SEQ ID NO: 613807 - DNA, 15 bp, Homo sapiens
cagtctgggagattg

SEQ ID NO: 613808 - DNA, 15 bp, Homo sapiens
agtctgggagattga

SEQ ID NO: 613809 - DNA, 15 bp, Homo sapiens
gtctgggagattgag

SEQ ID NO: 613810 - DNA, 15 bp, Homo sapiens
tctgggagattgagg

SEQ ID NO: 613811 - DNA, 15 bp, Homo sapiens
ctgggagattgaggt

SEQ ID NO: 613812 - DNA, 15 bp, Homo sapiens
tgggagattgaggtg

SEQ ID NO: 613813 - DNA, 15 bp, Homo sapiens
gggagattgaggtgg

SEQ ID NO: 613814 - DNA, 15 bp, Homo sapiens
ggagattgaggtggg

SEQ ID NO: 613815 - DNA, 15 bp, Homo sapiens
gagattgaggtgggt

SEQ ID NO: 613816 - DNA, 15 bp, Homo sapiens
agattgaggtgggtg

SEQ ID NO: 613817 - DNA, 15 bp, Homo sapiens
gattgaggtgggtgg

SEQ ID NO: 613818 - DNA, 15 bp, Homo sapiens
attgaggtgggtgga

SEQ ID NO: 613819 - DNA, 15 bp, Homo sapiens
ttgaggtgggtggat

SEQ ID NO: 613820 - DNA, 15 bp, Homo sapiens
tgaggtgggtggatc

SEQ ID NO: 613821 - DNA, 15 bp, Homo sapiens
gaggtgggtggatca

SEQ ID NO: 613822 - DNA, 15 bp, Homo sapiens
aggtgggtggatcac

SEQ ID NO: 613823 - DNA, 15 bp, Homo sapiens
ggtgggtggatcact

SEQ ID NO: 613824 - DNA, 15 bp, Homo sapiens
gtgggtggatcactt

SEQ ID NO: 613825 - DNA, 15 bp, Homo sapiens
tgggtggatcacttg

SEQ ID NO: 613826 - DNA, 15 bp, Homo sapiens
gggtggatcacttga

SEQ ID NO: 613827 - DNA, 15 bp, Homo sapiens
ggtggatcacttgag

SEQ ID NO: 613828 - DNA, 15 bp, Homo sapiens
gtggatcacttgagg

SEQ ID NO: 613829 - DNA, 15 bp, Homo sapiens
tggatcacttgaggt

SEQ ID NO: 613830 - DNA, 15 bp, Homo sapiens
ggatcacttgaggtc

SEQ ID NO: 613831 - DNA, 15 bp, Homo sapiens
gatcacttgaggtca

SEQ ID NO: 613832 - DNA, 15 bp, Homo sapiens
atcacttgaggtcag

SEQ ID NO: 613833 - DNA, 15 bp, Homo sapiens
tcacttgaggtcagg

SEQ ID NO: 613834 - DNA, 15 bp, Homo sapiens
cacttgaggtcagga

SEQ ID NO: 613835 - DNA, 15 bp, Homo sapiens
acttgaggtcaggag

SEQ ID NO: 613836 - DNA, 15 bp, Homo sapiens
cttgaggtcaggagt

SEQ ID NO: 613837 - DNA, 15 bp, Homo sapiens
ttgaggtcaggagtt

SEQ ID NO: 613838 - DNA, 15 bp, Homo sapiens
tgaggtcaggagttc

SEQ ID NO: 613839 - DNA, 15 bp, Homo sapiens
gaggtcaggagttcg

SEQ ID NO: 613840 - DNA, 15 bp, Homo sapiens
aggtcaggagttcga

SEQ ID NO: 613841 - DNA, 15 bp, Homo sapiens
ggtcaggagttcgag

SEQ ID NO: 613842 - DNA, 15 bp, Homo sapiens
gtcaggagttcgaga

SEQ ID NO: 613843 - DNA, 15 bp, Homo sapiens
tcaggagttcgagac

SEQ ID NO: 613844 - DNA, 15 bp, Homo sapiens
tcgagaccagcctgg

SEQ ID NO: 613845 - DNA, 15 bp, Homo sapiens
cgagaccagcctggt

SEQ ID NO: 613846 - DNA, 15 bp, Homo sapiens
gagaccagcctggtc

SEQ ID NO: 613847 - DNA, 15 bp, Homo sapiens
agaccagcctggtca

SEQ ID NO: 613848 - DNA, 15 bp, Homo sapiens
gaccagcctggtcaa

SEQ ID NO: 613849 - DNA, 15 bp, Homo sapiens
accagcctggtcaac

SEQ ID NO: 613850 - DNA, 15 bp, Homo sapiens
ccagcctggtcaaca

SEQ ID NO: 613851 - DNA, 15 bp, Homo sapiens
cagcctggtcaacat

SEQ ID NO: 613852 - DNA, 15 bp, Homo sapiens
agcctggtcaacatg

SEQ ID NO: 613853 - DNA, 15 bp, Homo sapiens
gcctggtcaacatgg

SEQ ID NO: 613854 - DNA, 15 bp, Homo sapiens
cctggtcaacatggc

SEQ ID NO: 613855 - DNA, 15 bp, Homo sapiens
ctggtcaacatggcg

SEQ ID NO: 613856 - DNA, 15 bp, Homo sapiens
tggtcaacatggcgg

SEQ ID NO: 613857 - DNA, 15 bp, Homo sapiens
ggtcaacatggcgga

SEQ ID NO: 613858 - DNA, 15 bp, Homo sapiens
gtcaacatggcggaa

SEQ ID NO: 613859 - DNA, 15 bp, Homo sapiens
tcaacatggcggaac

SEQ ID NO: 613860 - DNA, 15 bp, Homo sapiens
caacatggcggaacc

SEQ ID NO: 613861 - DNA, 15 bp, Homo sapiens
aacatggcggaaccc

SEQ ID NO: 613862 - DNA, 15 bp, Homo sapiens
acatggcggaaccct

SEQ ID NO: 613863 - DNA, 15 bp, Homo sapiens
catggcggaaccctg

SEQ ID NO: 613864 - DNA, 15 bp, Homo sapiens
atggcggaaccctgt

SEQ ID NO: 613865 - DNA, 15 bp, Homo sapiens
tggcggaaccctgtc

SEQ ID NO: 613866 - DNA, 15 bp, Homo sapiens
ggcggaaccctgtct

SEQ ID NO: 613867 - DNA, 15 bp, Homo sapiens
gcggaaccctgtctc

SEQ ID NO: 613868 - DNA, 15 bp, Homo sapiens
cggaaccctgtctct

SEQ ID NO: 613869 - DNA, 15 bp, Homo sapiens
ggaaccctgtctcta

SEQ ID NO: 613870 - DNA, 15 bp, Homo sapiens
gaaccctgtctctac

SEQ ID NO: 613871 - DNA, 15 bp, Homo sapiens
aaccctgtctctact

SEQ ID NO: 613872 - DNA, 15 bp, Homo sapiens
accctgtctctacta

SEQ ID NO: 613873 - DNA, 15 bp, Homo sapiens
ccctgtctctactaa

SEQ ID NO: 613874 - DNA, 15 bp, Homo sapiens
cctgtctctactaaa

SEQ ID NO: 613875 - DNA, 15 bp, Homo sapiens
ctgtctctactaaaa

SEQ ID NO: 613876 - DNA, 15 bp, Homo sapiens
tgtctctactaaaat

SEQ ID NO: 613877 - DNA, 15 bp, Homo sapiens
gtctctactaaaata

SEQ ID NO: 613878 - DNA, 15 bp, Homo sapiens
tctctactaaaatac

SEQ ID NO: 613879 - DNA, 15 bp, Homo sapiens
ctctactaaaataca

SEQ ID NO: 613880 - DNA, 15 bp, Homo sapiens
tctactaaaatacaa

SEQ ID NO: 613881 - DNA, 15 bp, Homo sapiens
ctactaaaatacaaa

SEQ ID NO: 613882 - DNA, 15 bp, Homo sapiens
tactaaaatacaaaa

SEQ ID NO: 613883 - DNA, 15 bp, Homo sapiens
actaaaatacaaaaa

SEQ ID NO: 613884 - DNA, 15 bp, Homo sapiens
ctaaaatacaaaaat

SEQ ID NO: 613885 - DNA, 15 bp, Homo sapiens
taaaatacaaaaatt

SEQ ID NO: 613886 - DNA, 15 bp, Homo sapiens
aattagctgggcatc

SEQ ID NO: 613887 - DNA, 15 bp, Homo sapiens
attagctgggcatca

SEQ ID NO: 613888 - DNA, 15 bp, Homo sapiens
ttagctgggcatcat

SEQ ID NO: 613889 - DNA, 15 bp, Homo sapiens
tagctgggcatcatg

SEQ ID NO: 613890 - DNA, 15 bp, Homo sapiens
agctgggcatcatgg

SEQ ID NO: 613891 - DNA, 15 bp, Homo sapiens
gctgggcatcatggc

SEQ ID NO: 613892 - DNA, 15 bp, Homo sapiens
ctgggcatcatggca

SEQ ID NO: 613893 - DNA, 15 bp, Homo sapiens
tgggcatcatggcac

SEQ ID NO: 613894 - DNA, 15 bp, Homo sapiens
gggcatcatggcaca

SEQ ID NO: 613895 - DNA, 15 bp, Homo sapiens
ggcatcatggcacat

SEQ ID NO: 613896 - DNA, 15 bp, Homo sapiens
gcatcatggcacatg

SEQ ID NO: 613897 - DNA, 15 bp, Homo sapiens
catcatggcacatgc

SEQ ID NO: 613898 - DNA, 15 bp, Homo sapiens
atcatggcacatgct

SEQ ID NO: 613899 - DNA, 15 bp, Homo sapiens
tcatggcacatgctt

SEQ ID NO: 613900 - DNA, 15 bp, Homo sapiens
catggcacatgcttg

SEQ ID NO: 613901 - DNA, 15 bp, Homo sapiens
atggcacatgcttgt

SEQ ID NO: 613902 - DNA, 15 bp, Homo sapiens
tggcacatgcttgta

SEQ ID NO: 613903 - DNA, 15 bp, Homo sapiens
ggcacatgcttgtaa

SEQ ID NO: 613904 - DNA, 15 bp, Homo sapiens
gcacatgcttgtaat

SEQ ID NO: 613905 - DNA, 15 bp, Homo sapiens
cacatgcttgtaatc

SEQ ID NO: 613906 - DNA, 15 bp, Homo sapiens
acatgcttgtaatcc

SEQ ID NO: 613907 - DNA, 15 bp, Homo sapiens
catgcttgtaatccc

SEQ ID NO: 613908 - DNA, 15 bp, Homo sapiens
atgcttgtaatccca

SEQ ID NO: 613909 - DNA, 15 bp, Homo sapiens
tgcttgtaatcccag

SEQ ID NO: 613910 - DNA, 15 bp, Homo sapiens
cttgtaatcccagct

SEQ ID NO: 613911 - DNA, 15 bp, Homo sapiens
ttgtaatcccagcta

SEQ ID NO: 613912 - DNA, 15 bp, Homo sapiens
tgtaatcccagctat

SEQ ID NO: 613913 - DNA, 15 bp, Homo sapiens
gtaatcccagctatc

SEQ ID NO: 613914 - DNA, 15 bp, Homo sapiens
taatcccagctatcc

SEQ ID NO: 613915 - DNA, 15 bp, Homo sapiens
aatcccagctatccg

SEQ ID NO: 613916 - DNA, 15 bp, Homo sapiens
atcccagctatccgg

SEQ ID NO: 613917 - DNA, 15 bp, Homo sapiens
tcccagctatccggg

SEQ ID NO: 613918 - DNA, 15 bp, Homo sapiens
cccagctatccggga

SEQ ID NO: 613919 - DNA, 15 bp, Homo sapiens
ccagctatccgggag

SEQ ID NO: 613920 - DNA, 15 bp, Homo sapiens
cagctatccgggagg

SEQ ID NO: 613921 - DNA, 15 bp, Homo sapiens
agctatccgggaggc

SEQ ID NO: 613922 - DNA, 15 bp, Homo sapiens
gctatccgggaggct

SEQ ID NO: 613923 - DNA, 15 bp, Homo sapiens
ctatccgggaggctg

SEQ ID NO: 613924 - DNA, 15 bp, Homo sapiens
tatccgggaggctga

SEQ ID NO: 613925 - DNA, 15 bp, Homo sapiens
atccgggaggctgag

SEQ ID NO: 613926 - DNA, 15 bp, Homo sapiens
tccgggaggctgaga

SEQ ID NO: 613927 - DNA, 15 bp, Homo sapiens
ccgggaggctgagac

SEQ ID NO: 613928 - DNA, 15 bp, Homo sapiens
cgggaggctgagaca

SEQ ID NO: 613929 - DNA, 15 bp, Homo sapiens
gggaggctgagacag

SEQ ID NO: 613930 - DNA, 15 bp, Homo sapiens
ggaggctgagacagg

SEQ ID NO: 613931 - DNA, 15 bp, Homo sapiens
gaggctgagacagga

SEQ ID NO: 613932 - DNA, 15 bp, Homo sapiens
aggctgagacaggag

SEQ ID NO: 613933 - DNA, 15 bp, Homo sapiens
ggctgagacaggaga

SEQ ID NO: 613934 - DNA, 15 bp, Homo sapiens
gctgagacaggagaa

SEQ ID NO: 613935 - DNA, 15 bp, Homo sapiens
ctgagacaggagaat

SEQ ID NO: 613936 - DNA, 15 bp, Homo sapiens
tgagacaggagaatt

SEQ ID NO: 613937 - DNA, 15 bp, Homo sapiens
gagacaggagaattg

SEQ ID NO: 613938 - DNA, 15 bp, Homo sapiens
agacaggagaattgc

SEQ ID NO: 613939 - DNA, 15 bp, Homo sapiens
gacaggagaattgct

SEQ ID NO: 613940 - DNA, 15 bp, Homo sapiens
acaggagaattgctt

SEQ ID NO: 613941 - DNA, 15 bp, Homo sapiens
caggagaattgcttg

SEQ ID NO: 613942 - DNA, 15 bp, Homo sapiens
aggagaattgcttga

SEQ ID NO: 613943 - DNA, 15 bp, Homo sapiens
ggagaattgcttgaa

SEQ ID NO: 613944 - DNA, 15 bp, Homo sapiens
gagaattgcttgaac

SEQ ID NO: 613945 - DNA, 15 bp, Homo sapiens
agaattgcttgaacc

SEQ ID NO: 613946 - DNA, 15 bp, Homo sapiens
gaattgcttgaaccc

SEQ ID NO: 613947 - DNA, 15 bp, Homo sapiens
aattgcttgaaccca

SEQ ID NO: 613948 - DNA, 15 bp, Homo sapiens
attgcttgaacccag

SEQ ID NO: 613949 - DNA, 15 bp, Homo sapiens
ttgcttgaacccagg

SEQ ID NO: 613950 - DNA, 15 bp, Homo sapiens
tgcttgaacccagga

SEQ ID NO: 613951 - DNA, 15 bp, Homo sapiens
gcttgaacccaggag

SEQ ID NO: 613952 - DNA, 15 bp, Homo sapiens
tgaacccaggaggca

SEQ ID NO: 613953 - DNA, 15 bp, Homo sapiens
gaacccaggaggcag

SEQ ID NO: 613954 - DNA, 15 bp, Homo sapiens
aacccaggaggcaga

SEQ ID NO: 613955 - DNA, 15 bp, Homo sapiens
acccaggaggcagag

SEQ ID NO: 613956 - DNA, 15 bp, Homo sapiens
aggttgcagtgagcc

SEQ ID NO: 613957 - DNA, 15 bp, Homo sapiens
ggttgcagtgagcca

SEQ ID NO: 613958 - DNA, 15 bp, Homo sapiens
gttgcagtgagccaa

SEQ ID NO: 613959 - DNA, 15 bp, Homo sapiens
ttgcagtgagccaag

SEQ ID NO: 613960 - DNA, 15 bp, Homo sapiens
tgcagtgagccaaga

SEQ ID NO: 613961 - DNA, 15 bp, Homo sapiens
gcagtgagccaagat

SEQ ID NO: 613962 - DNA, 15 bp, Homo sapiens
cagtgagccaagatc

SEQ ID NO: 613963 - DNA, 15 bp, Homo sapiens
agtgagccaagatcg

SEQ ID NO: 613964 - DNA, 15 bp, Homo sapiens
gtgagccaagatcgt

SEQ ID NO: 613965 - DNA, 15 bp, Homo sapiens
tgagccaagatcgtg

SEQ ID NO: 613966 - DNA, 15 bp, Homo sapiens
gagccaagatcgtgc

SEQ ID NO: 613967 - DNA, 15 bp, Homo sapiens
agccaagatcgtgcc

SEQ ID NO: 613968 - DNA, 15 bp, Homo sapiens
gccaagatcgtgcca

SEQ ID NO: 613969 - DNA, 15 bp, Homo sapiens
ccaagatcgtgccac

SEQ ID NO: 613970 - DNA, 15 bp, Homo sapiens
caagatcgtgccact

SEQ ID NO: 613971 - DNA, 15 bp, Homo sapiens
aagatcgtgccactg

SEQ ID NO: 613972 - DNA, 15 bp, Homo sapiens
agatcgtgccactgc

SEQ ID NO: 613973 - DNA, 15 bp, Homo sapiens
gatcgtgccactgca

SEQ ID NO: 613974 - DNA, 15 bp, Homo sapiens
atcgtgccactgcac

SEQ ID NO: 613975 - DNA, 15 bp, Homo sapiens
tcgtgccactgcact

SEQ ID NO: 613976 - DNA, 15 bp, Homo sapiens
cgtgccactgcactc

SEQ ID NO: 613977 - DNA, 15 bp, Homo sapiens
gtgccactgcactcc

SEQ ID NO: 613978 - DNA, 15 bp, Homo sapiens
tgccactgcactcca

SEQ ID NO: 613979 - DNA, 15 bp, Homo sapiens
cactgcactccagct

SEQ ID NO: 613980 - DNA, 15 bp, Homo sapiens
actgcactccagctt

SEQ ID NO: 613981 - DNA, 15 bp, Homo sapiens
ctgcactccagcttg

SEQ ID NO: 613982 - DNA, 15 bp, Homo sapiens
tgcactccagcttga

SEQ ID NO: 613983 - DNA, 15 bp, Homo sapiens
gcactccagcttgag

SEQ ID NO: 613984 - DNA, 15 bp, Homo sapiens
cactccagcttgagt

SEQ ID NO: 613985 - DNA, 15 bp, Homo sapiens
actccagcttgagtg

SEQ ID NO: 613986 - DNA, 15 bp, Homo sapiens
ctccagcttgagtgt

SEQ ID NO: 613987 - DNA, 15 bp, Homo sapiens
tccagcttgagtgtt

SEQ ID NO: 613988 - DNA, 15 bp, Homo sapiens
ccagcttgagtgttg

SEQ ID NO: 613989 - DNA, 15 bp, Homo sapiens
cagcttgagtgttgg

SEQ ID NO: 613990 - DNA, 15 bp, Homo sapiens
agcttgagtgttgga

SEQ ID NO: 613991 - DNA, 15 bp, Homo sapiens
gcttgagtgttggag

SEQ ID NO: 613992 - DNA, 15 bp, Homo sapiens
cttgagtgttggagt

SEQ ID NO: 613993 - DNA, 15 bp, Homo sapiens
ttgagtgttggagtg

SEQ ID NO: 613994 - DNA, 15 bp, Homo sapiens
tgagtgttggagtga

SEQ ID NO: 613995 - DNA, 15 bp, Homo sapiens
gagtgttggagtgag

SEQ ID NO: 613996 - DNA, 15 bp, Homo sapiens
agtgttggagtgaga

SEQ ID NO: 613997 - DNA, 15 bp, Homo sapiens
gtgttggagtgagac

SEQ ID NO: 613998 - DNA, 15 bp, Homo sapiens
tgttggagtgagact

SEQ ID NO: 613999 - DNA, 15 bp, Homo sapiens
gttggagtgagactc

SEQ ID NO: 614000 - DNA, 15 bp, Homo sapiens
ttggagtgagactct

SEQ ID NO: 614001 - DNA, 15 bp, Homo sapiens
tggagtgagactctg

SEQ ID NO: 614002 - DNA, 15 bp, Homo sapiens
ggagtgagactctgt

SEQ ID NO: 614003 - DNA, 15 bp, Homo sapiens
gagtgagactctgtc

SEQ ID NO: 614004 - DNA, 15 bp, Homo sapiens
agtgagactctgtct

SEQ ID NO: 614005 - DNA, 15 bp, Homo sapiens
gtgagactctgtctc

SEQ ID NO: 614006 - DNA, 15 bp, Homo sapiens
tgagactctgtctca

SEQ ID NO: 614007 - DNA, 15 bp, Homo sapiens
gagactctgtctcaa

SEQ ID NO: 614008 - DNA, 15 bp, Homo sapiens
agactctgtctcaaa

SEQ ID NO: 614009 - DNA, 15 bp, Homo sapiens
gactctgtctcaaac

SEQ ID NO: 614010 - DNA, 15 bp, Homo sapiens
actctgtctcaaaca

SEQ ID NO: 614011 - DNA, 15 bp, Homo sapiens
ctctgtctcaaacaa

SEQ ID NO: 614012 - DNA, 15 bp, Homo sapiens
tctgtctcaaacaaa

SEQ ID NO: 614013 - DNA, 15 bp, Homo sapiens
ctgtctcaaacaaat

SEQ ID NO: 614014 - DNA, 15 bp, Homo sapiens
tgtctcaaacaaatg

SEQ ID NO: 614015 - DNA, 15 bp, Homo sapiens
gtctcaaacaaatga

SEQ ID NO: 614016 - DNA, 15 bp, Homo sapiens
tctcaaacaaatgaa

SEQ ID NO: 614017 - DNA, 15 bp, Homo sapiens
ctcaaacaaatgaaa

SEQ ID NO: 614018 - DNA, 15 bp, Homo sapiens
tcaaacaaatgaaaa

SEQ ID NO: 614019 - DNA, 15 bp, Homo sapiens
caaacaaatgaaaag

SEQ ID NO: 614020 - DNA, 15 bp, Homo sapiens
aaacaaatgaaaaga

SEQ ID NO: 614021 - DNA, 15 bp, Homo sapiens
aacaaatgaaaagaa

SEQ ID NO: 614022 - DNA, 15 bp, Homo sapiens
acaaatgaaaagaaa

SEQ ID NO: 614023 - DNA, 15 bp, Homo sapiens
caaatgaaaagaaac

SEQ ID NO: 614024 - DNA, 15 bp, Homo sapiens
aaatgaaaagaaaca

SEQ ID NO: 614025 - DNA, 15 bp, Homo sapiens
aatgaaaagaaacaa

SEQ ID NO: 614026 - DNA, 15 bp, Homo sapiens
atgaaaagaaacaaa

SEQ ID NO: 614027 - DNA, 15 bp, Homo sapiens
tgaaaagaaacaaac

SEQ ID NO: 614028 - DNA, 15 bp, Homo sapiens
gaaaagaaacaaaca

SEQ ID NO: 614029 - DNA, 15 bp, Homo sapiens
aaaagaaacaaacaa

SEQ ID NO: 614030 - DNA, 15 bp, Homo sapiens
gaaacaaacaaaaaa

SEQ ID NO: 614031 - DNA, 15 bp, Homo sapiens
aaacaaacaaaaaag

SEQ ID NO: 614032 - DNA, 15 bp, Homo sapiens
aacaaacaaaaaaga

SEQ ID NO: 614033 - DNA, 15 bp, Homo sapiens
acaaacaaaaaagaa

SEQ ID NO: 614034 - DNA, 15 bp, Homo sapiens
caaacaaaaaagaaa

SEQ ID NO: 614035 - DNA, 15 bp, Homo sapiens
aaacaaaaaagaaat

SEQ ID NO: 614036 - DNA, 15 bp, Homo sapiens
aacaaaaaagaaatg

SEQ ID NO: 614037 - DNA, 15 bp, Homo sapiens
acaaaaaagaaatga

SEQ ID NO: 614038 - DNA, 15 bp, Homo sapiens
caaaaaagaaatgag

SEQ ID NO: 614039 - DNA, 15 bp, Homo sapiens
aaaaaagaaatgaga

SEQ ID NO: 614040 - DNA, 15 bp, Homo sapiens
aaaaagaaatgagat

SEQ ID NO: 614041 - DNA, 15 bp, Homo sapiens
aaaagaaatgagata

SEQ ID NO: 614042 - DNA, 15 bp, Homo sapiens
aaagaaatgagatac

SEQ ID NO: 614043 - DNA, 15 bp, Homo sapiens
aagaaatgagatact

SEQ ID NO: 614044 - DNA, 15 bp, Homo sapiens
agaaatgagatactg

SEQ ID NO: 614045 - DNA, 15 bp, Homo sapiens
gaaatgagatactga

SEQ ID NO: 614046 - DNA, 15 bp, Homo sapiens
aaatgagatactgat

SEQ ID NO: 614047 - DNA, 15 bp, Homo sapiens
aatgagatactgata

SEQ ID NO: 614048 - DNA, 15 bp, Homo sapiens
atgagatactgatac

SEQ ID NO: 614049 - DNA, 15 bp, Homo sapiens
tgagatactgatacc

SEQ ID NO: 614050 - DNA, 15 bp, Homo sapiens
gagatactgatacct

SEQ ID NO: 614051 - DNA, 15 bp, Homo sapiens
agatactgatacctg

SEQ ID NO: 614052 - DNA, 15 bp, Homo sapiens
gatactgatacctgc

SEQ ID NO: 614053 - DNA, 15 bp, Homo sapiens
atactgatacctgct

SEQ ID NO: 614054 - DNA, 15 bp, Homo sapiens
tactgatacctgcta

SEQ ID NO: 614055 - DNA, 15 bp, Homo sapiens
actgatacctgctat

SEQ ID NO: 614056 - DNA, 15 bp, Homo sapiens
ctgatacctgctatg

SEQ ID NO: 614057 - DNA, 15 bp, Homo sapiens
tgatacctgctatgt

SEQ ID NO: 614058 - DNA, 15 bp, Homo sapiens
gatacctgctatgtg

SEQ ID NO: 614059 - DNA, 15 bp, Homo sapiens
atacctgctatgtga

SEQ ID NO: 614060 - DNA, 15 bp, Homo sapiens
tacctgctatgtgat

SEQ ID NO: 614061 - DNA, 15 bp, Homo sapiens
acctgctatgtgata

SEQ ID NO: 614062 - DNA, 15 bp, Homo sapiens
cctgctatgtgataa

SEQ ID NO: 614063 - DNA, 15 bp, Homo sapiens
ctgctatgtgataag

SEQ ID NO: 614064 - DNA, 15 bp, Homo sapiens
tgctatgtgataagc

SEQ ID NO: 614065 - DNA, 15 bp, Homo sapiens
gctatgtgataagct

SEQ ID NO: 614066 - DNA, 15 bp, Homo sapiens
ctatgtgataagctt

SEQ ID NO: 614067 - DNA, 15 bp, Homo sapiens
tatgtgataagcttt

SEQ ID NO: 614068 - DNA, 15 bp, Homo sapiens
atgtgataagctttg

SEQ ID NO: 614069 - DNA, 15 bp, Homo sapiens
tgtgataagctttga

SEQ ID NO: 614070 - DNA, 15 bp, Homo sapiens
gtgataagctttgaa

SEQ ID NO: 614071 - DNA, 15 bp, Homo sapiens
tgataagctttgaaa

SEQ ID NO: 614072 - DNA, 15 bp, Homo sapiens
gataagctttgaaaa

SEQ ID NO: 614073 - DNA, 15 bp, Homo sapiens
ataagctttgaaaac

SEQ ID NO: 614074 - DNA, 15 bp, Homo sapiens
taagctttgaaaaca

SEQ ID NO: 614075 - DNA, 15 bp, Homo sapiens
aagctttgaaaacat

SEQ ID NO: 614076 - DNA, 15 bp, Homo sapiens
agctttgaaaacatt

SEQ ID NO: 614077 - DNA, 15 bp, Homo sapiens
gctttgaaaacatta

SEQ ID NO: 614078 - DNA, 15 bp, Homo sapiens
ctttgaaaacattat

SEQ ID NO: 614079 - DNA, 15 bp, Homo sapiens
tttgaaaacattatg

SEQ ID NO: 614080 - DNA, 15 bp, Homo sapiens
ttgaaaacattatgc

SEQ ID NO: 614081 - DNA, 15 bp, Homo sapiens
tgaaaacattatgct

SEQ ID NO: 614082 - DNA, 15 bp, Homo sapiens
gaaaacattatgcta

SEQ ID NO: 614083 - DNA, 15 bp, Homo sapiens
aaaacattatgctaa

SEQ ID NO: 614084 - DNA, 15 bp, Homo sapiens
aaacattatgctaag

SEQ ID NO: 614085 - DNA, 15 bp, Homo sapiens
aacattatgctaagt

SEQ ID NO: 614086 - DNA, 15 bp, Homo sapiens
acattatgctaagtg

SEQ ID NO: 614087 - DNA, 15 bp, Homo sapiens
cattatgctaagtga

SEQ ID NO: 614088 - DNA, 15 bp, Homo sapiens
attatgctaagtgaa

SEQ ID NO: 614089 - DNA, 15 bp, Homo sapiens
ttatgctaagtgaaa

SEQ ID NO: 614090 - DNA, 15 bp, Homo sapiens
tatgctaagtgaaag

SEQ ID NO: 614091 - DNA, 15 bp, Homo sapiens
atgctaagtgaaaga

SEQ ID NO: 614092 - DNA, 15 bp, Homo sapiens
tgctaagtgaaagaa

SEQ ID NO: 614093 - DNA, 15 bp, Homo sapiens
gctaagtgaaagaag

SEQ ID NO: 614094 - DNA, 15 bp, Homo sapiens
ctaagtgaaagaagc

SEQ ID NO: 614095 - DNA, 15 bp, Homo sapiens
taagtgaaagaagcc

SEQ ID NO: 614096 - DNA, 15 bp, Homo sapiens
aagtgaaagaagcca

SEQ ID NO: 614097 - DNA, 15 bp, Homo sapiens
agtgaaagaagccag

SEQ ID NO: 614098 - DNA, 15 bp, Homo sapiens
gtgaaagaagccagt

SEQ ID NO: 614099 - DNA, 15 bp, Homo sapiens
tgaaagaagccagtt

SEQ ID NO: 614100 - DNA, 15 bp, Homo sapiens
gaaagaagccagttg

SEQ ID NO: 614101 - DNA, 15 bp, Homo sapiens
aaagaagccagttgc

SEQ ID NO: 614102 - DNA, 15 bp, Homo sapiens
aagaagccagttgca

SEQ ID NO: 614103 - DNA, 15 bp, Homo sapiens
agaagccagttgcag

SEQ ID NO: 614104 - DNA, 15 bp, Homo sapiens
gaagccagttgcaga

SEQ ID NO: 614105 - DNA, 15 bp, Homo sapiens
aagccagttgcagat

SEQ ID NO: 614106 - DNA, 15 bp, Homo sapiens
agccagttgcagatc

SEQ ID NO: 614107 - DNA, 15 bp, Homo sapiens
gccagttgcagatca

SEQ ID NO: 614108 - DNA, 15 bp, Homo sapiens
ccagttgcagatcac

SEQ ID NO: 614109 - DNA, 15 bp, Homo sapiens
cagttgcagatcaca

SEQ ID NO: 614110 - DNA, 15 bp, Homo sapiens
agttgcagatcacat

SEQ ID NO: 614111 - DNA, 15 bp, Homo sapiens
gttgcagatcacata

SEQ ID NO: 614112 - DNA, 15 bp, Homo sapiens
ttgcagatcacatat

SEQ ID NO: 614113 - DNA, 15 bp, Homo sapiens
tgcagatcacatatt

SEQ ID NO: 614114 - DNA, 15 bp, Homo sapiens
gcagatcacatatta

SEQ ID NO: 614115 - DNA, 15 bp, Homo sapiens
cagatcacatattat

SEQ ID NO: 614116 - DNA, 15 bp, Homo sapiens
agatcacatattata

SEQ ID NO: 614117 - DNA, 15 bp, Homo sapiens
gatcacatattataa

SEQ ID NO: 614118 - DNA, 15 bp, Homo sapiens
atcacatattataaa

SEQ ID NO: 614119 - DNA, 15 bp, Homo sapiens
tcacatattataaaa

SEQ ID NO: 614120 - DNA, 15 bp, Homo sapiens
cacatattataaaat

SEQ ID NO: 614121 - DNA, 15 bp, Homo sapiens
acatattataaaatt

SEQ ID NO: 614122 - DNA, 15 bp, Homo sapiens
catattataaaattt

SEQ ID NO: 614123 - DNA, 15 bp, Homo sapiens
atattataaaatttc

SEQ ID NO: 614124 - DNA, 15 bp, Homo sapiens
tattataaaatttca

SEQ ID NO: 614125 - DNA, 15 bp, Homo sapiens
attataaaatttcat

SEQ ID NO: 614126 - DNA, 15 bp, Homo sapiens
ttataaaatttcatt

SEQ ID NO: 614127 - DNA, 15 bp, Homo sapiens
tataaaatttcattt

SEQ ID NO: 614128 - DNA, 15 bp, Homo sapiens
ataaaatttcattta

SEQ ID NO: 614129 - DNA, 15 bp, Homo sapiens
taaaatttcatttat

SEQ ID NO: 614130 - DNA, 15 bp, Homo sapiens
aaaatttcatttata

SEQ ID NO: 614131 - DNA, 15 bp, Homo sapiens
aaatttcatttatat

SEQ ID NO: 614132 - DNA, 15 bp, Homo sapiens
aatttcatttatatg

SEQ ID NO: 614133 - DNA, 15 bp, Homo sapiens
atttcatttatatgg

SEQ ID NO: 614134 - DNA, 15 bp, Homo sapiens
tttcatttatatgga

SEQ ID NO: 614135 - DNA, 15 bp, Homo sapiens
ttcatttatatggaa

SEQ ID NO: 614136 - DNA, 15 bp, Homo sapiens
tcatttatatggaat

SEQ ID NO: 614137 - DNA, 15 bp, Homo sapiens
catttatatggaata

SEQ ID NO: 614138 - DNA, 15 bp, Homo sapiens
atttatatggaatat

SEQ ID NO: 614139 - DNA, 15 bp, Homo sapiens
tttatatggaatatc

SEQ ID NO: 614140 - DNA, 15 bp, Homo sapiens
ttatatggaatatcc

SEQ ID NO: 614141 - DNA, 15 bp, Homo sapiens
tatatggaatatcca

SEQ ID NO: 614142 - DNA, 15 bp, Homo sapiens
atatggaatatccaa

SEQ ID NO: 614143 - DNA, 15 bp, Homo sapiens
tatggaatatccaaa

SEQ ID NO: 614144 - DNA, 15 bp, Homo sapiens
atggaatatccaaat

SEQ ID NO: 614145 - DNA, 15 bp, Homo sapiens
tggaatatccaaatc

SEQ ID NO: 614146 - DNA, 15 bp, Homo sapiens
ggaatatccaaatct

SEQ ID NO: 614147 - DNA, 15 bp, Homo sapiens
gaatatccaaatcta

SEQ ID NO: 614148 - DNA, 15 bp, Homo sapiens
aatatccaaatctat

SEQ ID NO: 614149 - DNA, 15 bp, Homo sapiens
atatccaaatctata

SEQ ID NO: 614150 - DNA, 15 bp, Homo sapiens
tatccaaatctatag

SEQ ID NO: 614151 - DNA, 15 bp, Homo sapiens
atccaaatctataga

SEQ ID NO: 614152 - DNA, 15 bp, Homo sapiens
tccaaatctatagag

SEQ ID NO: 614153 - DNA, 15 bp, Homo sapiens
ccaaatctatagagg

SEQ ID NO: 614154 - DNA, 15 bp, Homo sapiens
caaatctatagaggt

SEQ ID NO: 614155 - DNA, 15 bp, Homo sapiens
aaatctatagaggta

SEQ ID NO: 614156 - DNA, 15 bp, Homo sapiens
aatctatagaggtag

SEQ ID NO: 614157 - DNA, 15 bp, Homo sapiens
atctatagaggtaga

SEQ ID NO: 614158 - DNA, 15 bp, Homo sapiens
tctatagaggtagaa

SEQ ID NO: 614159 - DNA, 15 bp, Homo sapiens
ctatagaggtagaaa

SEQ ID NO: 614160 - DNA, 15 bp, Homo sapiens
tatagaggtagaaag

SEQ ID NO: 614161 - DNA, 15 bp, Homo sapiens
atagaggtagaaagt

SEQ ID NO: 614162 - DNA, 15 bp, Homo sapiens
tagaggtagaaagta

SEQ ID NO: 614163 - DNA, 15 bp, Homo sapiens
agaggtagaaagtag

SEQ ID NO: 614164 - DNA, 15 bp, Homo sapiens
gaggtagaaagtaga

SEQ ID NO: 614165 - DNA, 15 bp, Homo sapiens
aggtagaaagtagat

SEQ ID NO: 614166 - DNA, 15 bp, Homo sapiens
ggtagaaagtagatc

SEQ ID NO: 614167 - DNA, 15 bp, Homo sapiens
gtagaaagtagatca

SEQ ID NO: 614168 - DNA, 15 bp, Homo sapiens
tagaaagtagatcag

SEQ ID NO: 614169 - DNA, 15 bp, Homo sapiens
agaaagtagatcagt

SEQ ID NO: 614170 - DNA, 15 bp, Homo sapiens
gaaagtagatcagtg

SEQ ID NO: 614171 - DNA, 15 bp, Homo sapiens
aaagtagatcagtgg

SEQ ID NO: 614172 - DNA, 15 bp, Homo sapiens
aagtagatcagtggt

SEQ ID NO: 614173 - DNA, 15 bp, Homo sapiens
agtagatcagtggtt

SEQ ID NO: 614174 - DNA, 15 bp, Homo sapiens
gtagatcagtggttg

SEQ ID NO: 614175 - DNA, 15 bp, Homo sapiens
tagatcagtggttgc

SEQ ID NO: 614176 - DNA, 15 bp, Homo sapiens
agatcagtggttgcc

SEQ ID NO: 614177 - DNA, 15 bp, Homo sapiens
gatcagtggttgcct

SEQ ID NO: 614178 - DNA, 15 bp, Homo sapiens
atcagtggttgccta

SEQ ID NO: 614179 - DNA, 15 bp, Homo sapiens
tcagtggttgcctag

SEQ ID NO: 614180 - DNA, 15 bp, Homo sapiens
cagtggttgcctagg

SEQ ID NO: 614181 - DNA, 15 bp, Homo sapiens
agtggttgcctaggg

SEQ ID NO: 614182 - DNA, 15 bp, Homo sapiens
gtggttgcctagggt

SEQ ID NO: 614183 - DNA, 15 bp, Homo sapiens
tggttgcctagggtt

SEQ ID NO: 614184 - DNA, 15 bp, Homo sapiens
ggttgcctagggtta

SEQ ID NO: 614185 - DNA, 15 bp, Homo sapiens
gttgcctagggttag

SEQ ID NO: 614186 - DNA, 15 bp, Homo sapiens
ttgcctagggttagg

SEQ ID NO: 614187 - DNA, 15 bp, Homo sapiens
tgcctagggttaggg

SEQ ID NO: 614188 - DNA, 15 bp, Homo sapiens
gcctagggttaggga

SEQ ID NO: 614189 - DNA, 15 bp, Homo sapiens
cctagggttagggag

SEQ ID NO: 614190 - DNA, 15 bp, Homo sapiens
ctagggttagggagg

SEQ ID NO: 614191 - DNA, 15 bp, Homo sapiens
tagggttagggaggg

SEQ ID NO: 614192 - DNA, 15 bp, Homo sapiens
agggttagggagggt

SEQ ID NO: 614193 - DNA, 15 bp, Homo sapiens
gggttagggagggtg

SEQ ID NO: 614194 - DNA, 15 bp, Homo sapiens
ggttagggagggtga

SEQ ID NO: 614195 - DNA, 15 bp, Homo sapiens
gttagggagggtgac

SEQ ID NO: 614196 - DNA, 15 bp, Homo sapiens
ttagggagggtgact

SEQ ID NO: 614197 - DNA, 15 bp, Homo sapiens
tagggagggtgactg

SEQ ID NO: 614198 - DNA, 15 bp, Homo sapiens
agggagggtgactgc

SEQ ID NO: 614199 - DNA, 15 bp, Homo sapiens
gggagggtgactgct

SEQ ID NO: 614200 - DNA, 15 bp, Homo sapiens
ggagggtgactgcta

SEQ ID NO: 614201 - DNA, 15 bp, Homo sapiens
gagggtgactgctaa

SEQ ID NO: 614202 - DNA, 15 bp, Homo sapiens
agggtgactgctaaa

SEQ ID NO: 614203 - DNA, 15 bp, Homo sapiens
gggtgactgctaaag

SEQ ID NO: 614204 - DNA, 15 bp, Homo sapiens
ggtgactgctaaagg

SEQ ID NO: 614205 - DNA, 15 bp, Homo sapiens
gtgactgctaaagga

SEQ ID NO: 614206 - DNA, 15 bp, Homo sapiens
tgactgctaaaggac

SEQ ID NO: 614207 - DNA, 15 bp, Homo sapiens
gactgctaaaggaca

SEQ ID NO: 614208 - DNA, 15 bp, Homo sapiens
actgctaaaggacat

SEQ ID NO: 614209 - DNA, 15 bp, Homo sapiens
ctgctaaaggacata

SEQ ID NO: 614210 - DNA, 15 bp, Homo sapiens
tgctaaaggacataa

SEQ ID NO: 614211 - DNA, 15 bp, Homo sapiens
gctaaaggacataag

SEQ ID NO: 614212 - DNA, 15 bp, Homo sapiens
ctaaaggacataagg

SEQ ID NO: 614213 - DNA, 15 bp, Homo sapiens
taaaggacataaggc

SEQ ID NO: 614214 - DNA, 15 bp, Homo sapiens
aaaggacataaggct

SEQ ID NO: 614215 - DNA, 15 bp, Homo sapiens
aaggacataaggctg

SEQ ID NO: 614216 - DNA, 15 bp, Homo sapiens
aggacataaggctgc

SEQ ID NO: 614217 - DNA, 15 bp, Homo sapiens
ggacataaggctgcc

SEQ ID NO: 614218 - DNA, 15 bp, Homo sapiens
gacataaggctgcct

SEQ ID NO: 614219 - DNA, 15 bp, Homo sapiens
acataaggctgcctt

SEQ ID NO: 614220 - DNA, 15 bp, Homo sapiens
cataaggctgccttc

SEQ ID NO: 614221 - DNA, 15 bp, Homo sapiens
ataaggctgccttct

SEQ ID NO: 614222 - DNA, 15 bp, Homo sapiens
taaggctgccttctg

SEQ ID NO: 614223 - DNA, 15 bp, Homo sapiens
aaggctgccttctgt

SEQ ID NO: 614224 - DNA, 15 bp, Homo sapiens
aggctgccttctgtg

SEQ ID NO: 614225 - DNA, 15 bp, Homo sapiens
ggctgccttctgtgg

SEQ ID NO: 614226 - DNA, 15 bp, Homo sapiens
gctgccttctgtggt

SEQ ID NO: 614227 - DNA, 15 bp, Homo sapiens
ctgccttctgtggtg

SEQ ID NO: 614228 - DNA, 15 bp, Homo sapiens
tgccttctgtggtga

SEQ ID NO: 614229 - DNA, 15 bp, Homo sapiens
gccttctgtggtgat

SEQ ID NO: 614230 - DNA, 15 bp, Homo sapiens
ccttctgtggtgata

SEQ ID NO: 614231 - DNA, 15 bp, Homo sapiens
cttctgtggtgataa

SEQ ID NO: 614232 - DNA, 15 bp, Homo sapiens
ttctgtggtgataaa

SEQ ID NO: 614233 - DNA, 15 bp, Homo sapiens
tctgtggtgataaaa

SEQ ID NO: 614234 - DNA, 15 bp, Homo sapiens
ctgtggtgataaaaa

SEQ ID NO: 614235 - DNA, 15 bp, Homo sapiens
tgtggtgataaaaat

SEQ ID NO: 614236 - DNA, 15 bp, Homo sapiens
gtggtgataaaaatg

SEQ ID NO: 614237 - DNA, 15 bp, Homo sapiens
tggtgataaaaatgg

SEQ ID NO: 614238 - DNA, 15 bp, Homo sapiens
ggtgataaaaatggt

SEQ ID NO: 614239 - DNA, 15 bp, Homo sapiens
gtgataaaaatggtc

SEQ ID NO: 614240 - DNA, 15 bp, Homo sapiens
tgataaaaatggtct

SEQ ID NO: 614241 - DNA, 15 bp, Homo sapiens
gataaaaatggtctt

SEQ ID NO: 614242 - DNA, 15 bp, Homo sapiens
ataaaaatggtctta

SEQ ID NO: 614243 - DNA, 15 bp, Homo sapiens
taaaaatggtcttaa

SEQ ID NO: 614244 - DNA, 15 bp, Homo sapiens
aaaaatggtcttaaa

SEQ ID NO: 614245 - DNA, 15 bp, Homo sapiens
aaaatggtcttaaac

SEQ ID NO: 614246 - DNA, 15 bp, Homo sapiens
aaatggtcttaaact

SEQ ID NO: 614247 - DNA, 15 bp, Homo sapiens
aatggtcttaaactg

SEQ ID NO: 614248 - DNA, 15 bp, Homo sapiens
atggtcttaaactga

SEQ ID NO: 614249 - DNA, 15 bp, Homo sapiens
tggtcttaaactgat

SEQ ID NO: 614250 - DNA, 15 bp, Homo sapiens
ggtcttaaactgatt

SEQ ID NO: 614251 - DNA, 15 bp, Homo sapiens
gtcttaaactgattg

SEQ ID NO: 614252 - DNA, 15 bp, Homo sapiens
tcttaaactgattgt

SEQ ID NO: 614253 - DNA, 15 bp, Homo sapiens
cttaaactgattgta

SEQ ID NO: 614254 - DNA, 15 bp, Homo sapiens
ttaaactgattgtaa

SEQ ID NO: 614255 - DNA, 15 bp, Homo sapiens
taaactgattgtaat

SEQ ID NO: 614256 - DNA, 15 bp, Homo sapiens
aaactgattgtaatg

SEQ ID NO: 614257 - DNA, 15 bp, Homo sapiens
aactgattgtaatga

SEQ ID NO: 614258 - DNA, 15 bp, Homo sapiens
actgattgtaatgat

SEQ ID NO: 614259 - DNA, 15 bp, Homo sapiens
ctgattgtaatgatg

SEQ ID NO: 614260 - DNA, 15 bp, Homo sapiens
tgattgtaatgatgc

SEQ ID NO: 614261 - DNA, 15 bp, Homo sapiens
gattgtaatgatgct

SEQ ID NO: 614262 - DNA, 15 bp, Homo sapiens
attgtaatgatgctg

SEQ ID NO: 614263 - DNA, 15 bp, Homo sapiens
ttgtaatgatgctgc

SEQ ID NO: 614264 - DNA, 15 bp, Homo sapiens
tgtaatgatgctgca

SEQ ID NO: 614265 - DNA, 15 bp, Homo sapiens
gtaatgatgctgcat

SEQ ID NO: 614266 - DNA, 15 bp, Homo sapiens
taatgatgctgcata

SEQ ID NO: 614267 - DNA, 15 bp, Homo sapiens
aatgatgctgcataa

SEQ ID NO: 614268 - DNA, 15 bp, Homo sapiens
atgatgctgcataac

SEQ ID NO: 614269 - DNA, 15 bp, Homo sapiens
tgatgctgcataact

SEQ ID NO: 614270 - DNA, 15 bp, Homo sapiens
gatgctgcataactc

SEQ ID NO: 614271 - DNA, 15 bp, Homo sapiens
atgctgcataactct

SEQ ID NO: 614272 - DNA, 15 bp, Homo sapiens
tgctgcataactctc

SEQ ID NO: 614273 - DNA, 15 bp, Homo sapiens
gctgcataactctct

SEQ ID NO: 614274 - DNA, 15 bp, Homo sapiens
ctgcataactctctt

SEQ ID NO: 614275 - DNA, 15 bp, Homo sapiens
tgcataactctctta

SEQ ID NO: 614276 - DNA, 15 bp, Homo sapiens
gcataactctcttaa

SEQ ID NO: 614277 - DNA, 15 bp, Homo sapiens
cataactctcttaag

SEQ ID NO: 614278 - DNA, 15 bp, Homo sapiens
ataactctcttaaga

SEQ ID NO: 614279 - DNA, 15 bp, Homo sapiens
taactctcttaagac

SEQ ID NO: 614280 - DNA, 15 bp, Homo sapiens
aactctcttaagaca

SEQ ID NO: 614281 - DNA, 15 bp, Homo sapiens
actctcttaagacac

SEQ ID NO: 614282 - DNA, 15 bp, Homo sapiens
ctctcttaagacact

SEQ ID NO: 614283 - DNA, 15 bp, Homo sapiens
tctcttaagacacta

SEQ ID NO: 614284 - DNA, 15 bp, Homo sapiens
ctcttaagacactaa

SEQ ID NO: 614285 - DNA, 15 bp, Homo sapiens
tcttaagacactaaa

SEQ ID NO: 614286 - DNA, 15 bp, Homo sapiens
cttaagacactaaaa

SEQ ID NO: 614287 - DNA, 15 bp, Homo sapiens
ttaagacactaaaaa

SEQ ID NO: 614288 - DNA, 15 bp, Homo sapiens
taagacactaaaaac

SEQ ID NO: 614289 - DNA, 15 bp, Homo sapiens
aagacactaaaaacc

SEQ ID NO: 614290 - DNA, 15 bp, Homo sapiens
agacactaaaaacca

SEQ ID NO: 614291 - DNA, 15 bp, Homo sapiens
gacactaaaaaccat

SEQ ID NO: 614292 - DNA, 15 bp, Homo sapiens
acactaaaaaccatt

SEQ ID NO: 614293 - DNA, 15 bp, Homo sapiens
cactaaaaaccattg

SEQ ID NO: 614294 - DNA, 15 bp, Homo sapiens
actaaaaaccattga

SEQ ID NO: 614295 - DNA, 15 bp, Homo sapiens
ctaaaaaccattgag

SEQ ID NO: 614296 - DNA, 15 bp, Homo sapiens
taaaaaccattgagt

SEQ ID NO: 614297 - DNA, 15 bp, Homo sapiens
aaaaaccattgagtt

SEQ ID NO: 614298 - DNA, 15 bp, Homo sapiens
aaaaccattgagttg

SEQ ID NO: 614299 - DNA, 15 bp, Homo sapiens
aaaccattgagttgt

SEQ ID NO: 614300 - DNA, 15 bp, Homo sapiens
aaccattgagttgta

SEQ ID NO: 614301 - DNA, 15 bp, Homo sapiens
accattgagttgtac

SEQ ID NO: 614302 - DNA, 15 bp, Homo sapiens
ccattgagttgtaca

SEQ ID NO: 614303 - DNA, 15 bp, Homo sapiens
cattgagttgtacac

SEQ ID NO: 614304 - DNA, 15 bp, Homo sapiens
attgagttgtacact

SEQ ID NO: 614305 - DNA, 15 bp, Homo sapiens
ttgagttgtacactt

SEQ ID NO: 614306 - DNA, 15 bp, Homo sapiens
tgagttgtacacttt

SEQ ID NO: 614307 - DNA, 15 bp, Homo sapiens
gagttgtacacttta

SEQ ID NO: 614308 - DNA, 15 bp, Homo sapiens
agttgtacactttaa

SEQ ID NO: 614309 - DNA, 15 bp, Homo sapiens
gttgtacactttaat

SEQ ID NO: 614310 - DNA, 15 bp, Homo sapiens
ttgtacactttaatt

SEQ ID NO: 614311 - DNA, 15 bp, Homo sapiens
tgtacactttaattt

SEQ ID NO: 614312 - DNA, 15 bp, Homo sapiens
gtacactttaatttt

SEQ ID NO: 614313 - DNA, 15 bp, Homo sapiens
tacactttaattttt

SEQ ID NO: 614314 - DNA, 15 bp, Homo sapiens
acactttaatttttt

SEQ ID NO: 614315 - DNA, 15 bp, Homo sapiens
cactttaattttttt

SEQ ID NO: 614316 - DNA, 15 bp, Homo sapiens
actttaatttttttg

SEQ ID NO: 614317 - DNA, 15 bp, Homo sapiens
ctttaatttttttgt

SEQ ID NO: 614318 - DNA, 15 bp, Homo sapiens
tttaatttttttgtg

SEQ ID NO: 614319 - DNA, 15 bp, Homo sapiens
ttaatttttttgtgt

SEQ ID NO: 614320 - DNA, 15 bp, Homo sapiens
taatttttttgtgtt

SEQ ID NO: 614321 - DNA, 15 bp, Homo sapiens
aatttttttgtgttg

SEQ ID NO: 614322 - DNA, 15 bp, Homo sapiens
atttttttgtgttgg

SEQ ID NO: 614323 - DNA, 15 bp, Homo sapiens
tttttttgtgttggc

SEQ ID NO: 614324 - DNA, 15 bp, Homo sapiens
ttttttgtgttggcg

SEQ ID NO: 614325 - DNA, 15 bp, Homo sapiens
tttttgtgttggcgg

SEQ ID NO: 614326 - DNA, 15 bp, Homo sapiens
ttttgtgttggcggg

SEQ ID NO: 614327 - DNA, 15 bp, Homo sapiens
tttgtgttggcgggg

SEQ ID NO: 614328 - DNA, 15 bp, Homo sapiens
ttgtgttggcggggg

SEQ ID NO: 614329 - DNA, 15 bp, Homo sapiens
tgtgttggcgggggt

SEQ ID NO: 614330 - DNA, 15 bp, Homo sapiens
gtgttggcgggggtg

SEQ ID NO: 614331 - DNA, 15 bp, Homo sapiens
tgttggcgggggtgg

SEQ ID NO: 614332 - DNA, 15 bp, Homo sapiens
gttggcgggggtgga

SEQ ID NO: 614333 - DNA, 15 bp, Homo sapiens
ttggcgggggtggat

SEQ ID NO: 614334 - DNA, 15 bp, Homo sapiens
tggcgggggtggatg

SEQ ID NO: 614335 - DNA, 15 bp, Homo sapiens
ggcgggggtggatgg

SEQ ID NO: 614336 - DNA, 15 bp, Homo sapiens
gcgggggtggatgga

SEQ ID NO: 614337 - DNA, 15 bp, Homo sapiens
cgggggtggatggag

SEQ ID NO: 614338 - DNA, 15 bp, Homo sapiens
gggggtggatggagt

SEQ ID NO: 614339 - DNA, 15 bp, Homo sapiens
ggggtggatggagtc

SEQ ID NO: 614340 - DNA, 15 bp, Homo sapiens
gggtggatggagtct

SEQ ID NO: 614341 - DNA, 15 bp, Homo sapiens
ggtggatggagtctc

SEQ ID NO: 614342 - DNA, 15 bp, Homo sapiens
gtggatggagtctcg

SEQ ID NO: 614343 - DNA, 15 bp, Homo sapiens
tggatggagtctcgc

SEQ ID NO: 614344 - DNA, 15 bp, Homo sapiens
ggatggagtctcgct

SEQ ID NO: 614345 - DNA, 15 bp, Homo sapiens
gatggagtctcgctc

SEQ ID NO: 614346 - DNA, 15 bp, Homo sapiens
atggagtctcgctct

SEQ ID NO: 614347 - DNA, 15 bp, Homo sapiens
tggagtctcgctctg

SEQ ID NO: 614348 - DNA, 15 bp, Homo sapiens
ggagtctcgctctgt

SEQ ID NO: 614349 - DNA, 15 bp, Homo sapiens
gtctcgctctgttgt

SEQ ID NO: 614350 - DNA, 15 bp, Homo sapiens
tctcgctctgttgtc

SEQ ID NO: 614351 - DNA, 15 bp, Homo sapiens
ctcgctctgttgtcc

SEQ ID NO: 614352 - DNA, 15 bp, Homo sapiens
tcgctctgttgtcca

SEQ ID NO: 614353 - DNA, 15 bp, Homo sapiens
cgctctgttgtccag

SEQ ID NO: 614354 - DNA, 15 bp, Homo sapiens
gctctgttgtccagg

SEQ ID NO: 614355 - DNA, 15 bp, Homo sapiens
ctctgttgtccaggc

SEQ ID NO: 614356 - DNA, 15 bp, Homo sapiens
tctgttgtccaggct

SEQ ID NO: 614357 - DNA, 15 bp, Homo sapiens
ctgttgtccaggctg

SEQ ID NO: 614358 - DNA, 15 bp, Homo sapiens
tgttgtccaggctgg

SEQ ID NO: 614359 - DNA, 15 bp, Homo sapiens
gttgtccaggctgga

SEQ ID NO: 614360 - DNA, 15 bp, Homo sapiens
ttgtccaggctggaa

SEQ ID NO: 614361 - DNA, 15 bp, Homo sapiens
tgtccaggctggaat

SEQ ID NO: 614362 - DNA, 15 bp, Homo sapiens
gtccaggctggaatg

SEQ ID NO: 614363 - DNA, 15 bp, Homo sapiens
tccaggctggaatgc

SEQ ID NO: 614364 - DNA, 15 bp, Homo sapiens
ccaggctggaatgca

SEQ ID NO: 614365 - DNA, 15 bp, Homo sapiens
caggctggaatgcag

SEQ ID NO: 614366 - DNA, 15 bp, Homo sapiens
aggctggaatgcagt

SEQ ID NO: 614367 - DNA, 15 bp, Homo sapiens
ggctggaatgcagtg

SEQ ID NO: 614368 - DNA, 15 bp, Homo sapiens
gctggaatgcagtgg

SEQ ID NO: 614369 - DNA, 15 bp, Homo sapiens
ctggaatgcagtggc

SEQ ID NO: 614370 - DNA, 15 bp, Homo sapiens
tggaatgcagtggca

SEQ ID NO: 614371 - DNA, 15 bp, Homo sapiens
ggaatgcagtggcac

SEQ ID NO: 614372 - DNA, 15 bp, Homo sapiens
gaatgcagtggcacg

SEQ ID NO: 614373 - DNA, 15 bp, Homo sapiens
aatgcagtggcacga

SEQ ID NO: 614374 - DNA, 15 bp, Homo sapiens
atgcagtggcacgat

SEQ ID NO: 614375 - DNA, 15 bp, Homo sapiens
tgcagtggcacgatc

SEQ ID NO: 614376 - DNA, 15 bp, Homo sapiens
gcagtggcacgatct

SEQ ID NO: 614377 - DNA, 15 bp, Homo sapiens
cagtggcacgatctc

SEQ ID NO: 614378 - DNA, 15 bp, Homo sapiens
agtggcacgatctcg

SEQ ID NO: 614379 - DNA, 15 bp, Homo sapiens
gtggcacgatctcgg

SEQ ID NO: 614380 - DNA, 15 bp, Homo sapiens
tggcacgatctcggt

SEQ ID NO: 614381 - DNA, 15 bp, Homo sapiens
ggcacgatctcggtt

SEQ ID NO: 614382 - DNA, 15 bp, Homo sapiens
gcacgatctcggttt

SEQ ID NO: 614383 - DNA, 15 bp, Homo sapiens
cacgatctcggttta

SEQ ID NO: 614384 - DNA, 15 bp, Homo sapiens
acgatctcggtttac

SEQ ID NO: 614385 - DNA, 15 bp, Homo sapiens
cgatctcggtttact

SEQ ID NO: 614386 - DNA, 15 bp, Homo sapiens
gatctcggtttactg

SEQ ID NO: 614387 - DNA, 15 bp, Homo sapiens
atctcggtttactgc

SEQ ID NO: 614388 - DNA, 15 bp, Homo sapiens
tctcggtttactgca

SEQ ID NO: 614389 - DNA, 15 bp, Homo sapiens
ctcggtttactgcaa

SEQ ID NO: 614390 - DNA, 15 bp, Homo sapiens
tcggtttactgcaac

SEQ ID NO: 614391 - DNA, 15 bp, Homo sapiens
cggtttactgcaacc

SEQ ID NO: 614392 - DNA, 15 bp, Homo sapiens
ggtttactgcaacct

SEQ ID NO: 614393 - DNA, 15 bp, Homo sapiens
gtttactgcaacctc

SEQ ID NO: 614394 - DNA, 15 bp, Homo sapiens
tttactgcaacctct

SEQ ID NO: 614395 - DNA, 15 bp, Homo sapiens
ttactgcaacctctg

SEQ ID NO: 614396 - DNA, 15 bp, Homo sapiens
tactgcaacctctgc

SEQ ID NO: 614397 - DNA, 15 bp, Homo sapiens
actgcaacctctgca

SEQ ID NO: 614398 - DNA, 15 bp, Homo sapiens
ctgcaacctctgcat

SEQ ID NO: 614399 - DNA, 15 bp, Homo sapiens
tgcaacctctgcatc

SEQ ID NO: 614400 - DNA, 15 bp, Homo sapiens
gcaacctctgcatcc

SEQ ID NO: 614401 - DNA, 15 bp, Homo sapiens
caacctctgcatccc

SEQ ID NO: 614402 - DNA, 15 bp, Homo sapiens
aacctctgcatcccg

SEQ ID NO: 614403 - DNA, 15 bp, Homo sapiens
acctctgcatcccgg

SEQ ID NO: 614404 - DNA, 15 bp, Homo sapiens
cctctgcatcccggg

SEQ ID NO: 614405 - DNA, 15 bp, Homo sapiens
ctctgcatcccgggt

SEQ ID NO: 614406 - DNA, 15 bp, Homo sapiens
tctgcatcccgggtt

SEQ ID NO: 614407 - DNA, 15 bp, Homo sapiens
ctgcatcccgggttc

SEQ ID NO: 614408 - DNA, 15 bp, Homo sapiens
tgcatcccgggttca

SEQ ID NO: 614409 - DNA, 15 bp, Homo sapiens
gcatcccgggttcaa

SEQ ID NO: 614410 - DNA, 15 bp, Homo sapiens
catcccgggttcaag

SEQ ID NO: 614411 - DNA, 15 bp, Homo sapiens
atcccgggttcaagc

SEQ ID NO: 614412 - DNA, 15 bp, Homo sapiens
tcccgggttcaagcg

SEQ ID NO: 614413 - DNA, 15 bp, Homo sapiens
cccgggttcaagcga

SEQ ID NO: 614414 - DNA, 15 bp, Homo sapiens
ccgggttcaagcgat

SEQ ID NO: 614415 - DNA, 15 bp, Homo sapiens
cgggttcaagcgatt

SEQ ID NO: 614416 - DNA, 15 bp, Homo sapiens
gggttcaagcgattc

SEQ ID NO: 614417 - DNA, 15 bp, Homo sapiens
ggttcaagcgattct

SEQ ID NO: 614418 - DNA, 15 bp, Homo sapiens
gttcaagcgattctc

SEQ ID NO: 614419 - DNA, 15 bp, Homo sapiens
ttcaagcgattctcc

SEQ ID NO: 614420 - DNA, 15 bp, Homo sapiens
tcaagcgattctcct

SEQ ID NO: 614421 - DNA, 15 bp, Homo sapiens
caagcgattctcctg

SEQ ID NO: 614422 - DNA, 15 bp, Homo sapiens
aagcgattctcctgc

SEQ ID NO: 614423 - DNA, 15 bp, Homo sapiens
agcgattctcctgcc

SEQ ID NO: 614424 - DNA, 15 bp, Homo sapiens
gcgattctcctgcct

SEQ ID NO: 614425 - DNA, 15 bp, Homo sapiens
cgattctcctgcctc

SEQ ID NO: 614426 - DNA, 15 bp, Homo sapiens
gattctcctgcctcg

SEQ ID NO: 614427 - DNA, 15 bp, Homo sapiens
attctcctgcctcgg

SEQ ID NO: 614428 - DNA, 15 bp, Homo sapiens
ttctcctgcctcggc

SEQ ID NO: 614429 - DNA, 15 bp, Homo sapiens
tctcctgcctcggcc

SEQ ID NO: 614430 - DNA, 15 bp, Homo sapiens
ctcctgcctcggcct

SEQ ID NO: 614431 - DNA, 15 bp, Homo sapiens
tcctgcctcggcctc

SEQ ID NO: 614432 - DNA, 15 bp, Homo sapiens
cctgcctcggcctcc

SEQ ID NO: 614433 - DNA, 15 bp, Homo sapiens
ctgcctcggcctcct

SEQ ID NO: 614434 - DNA, 15 bp, Homo sapiens
tgcctcggcctcctg

SEQ ID NO: 614435 - DNA, 15 bp, Homo sapiens
gcctcggcctcctga

SEQ ID NO: 614436 - DNA, 15 bp, Homo sapiens
cctcggcctcctgag

SEQ ID NO: 614437 - DNA, 15 bp, Homo sapiens
ctcggcctcctgagt

SEQ ID NO: 614438 - DNA, 15 bp, Homo sapiens
tcggcctcctgagta

SEQ ID NO: 614439 - DNA, 15 bp, Homo sapiens
cggcctcctgagtag

SEQ ID NO: 614440 - DNA, 15 bp, Homo sapiens
ggcctcctgagtagg

SEQ ID NO: 614441 - DNA, 15 bp, Homo sapiens
gcctcctgagtaggg

SEQ ID NO: 614442 - DNA, 15 bp, Homo sapiens
cctcctgagtaggga

SEQ ID NO: 614443 - DNA, 15 bp, Homo sapiens
ctcctgagtagggaa

SEQ ID NO: 614444 - DNA, 15 bp, Homo sapiens
tcctgagtagggaat

SEQ ID NO: 614445 - DNA, 15 bp, Homo sapiens
cctgagtagggaatt

SEQ ID NO: 614446 - DNA, 15 bp, Homo sapiens
ctgagtagggaatta

SEQ ID NO: 614447 - DNA, 15 bp, Homo sapiens
tgagtagggaattac

SEQ ID NO: 614448 - DNA, 15 bp, Homo sapiens
gagtagggaattaca

SEQ ID NO: 614449 - DNA, 15 bp, Homo sapiens
agtagggaattacag

SEQ ID NO: 614450 - DNA, 15 bp, Homo sapiens
gtagggaattacaga

SEQ ID NO: 614451 - DNA, 15 bp, Homo sapiens
tagggaattacagac

SEQ ID NO: 614452 - DNA, 15 bp, Homo sapiens
agggaattacagacc

SEQ ID NO: 614453 - DNA, 15 bp, Homo sapiens
gggaattacagacct

SEQ ID NO: 614454 - DNA, 15 bp, Homo sapiens
ggaattacagacctc

SEQ ID NO: 614455 - DNA, 15 bp, Homo sapiens
gaattacagacctcg

SEQ ID NO: 614456 - DNA, 15 bp, Homo sapiens
aattacagacctcgt

SEQ ID NO: 614457 - DNA, 15 bp, Homo sapiens
attacagacctcgtt

SEQ ID NO: 614458 - DNA, 15 bp, Homo sapiens
ttacagacctcgtta

SEQ ID NO: 614459 - DNA, 15 bp, Homo sapiens
tacagacctcgttat

SEQ ID NO: 614460 - DNA, 15 bp, Homo sapiens
acagacctcgttatc

SEQ ID NO: 614461 - DNA, 15 bp, Homo sapiens
cagacctcgttatcg

SEQ ID NO: 614462 - DNA, 15 bp, Homo sapiens
agacctcgttatcgt

SEQ ID NO: 614463 - DNA, 15 bp, Homo sapiens
gacctcgttatcgtg

SEQ ID NO: 614464 - DNA, 15 bp, Homo sapiens
acctcgttatcgtgg

SEQ ID NO: 614465 - DNA, 15 bp, Homo sapiens
cctcgttatcgtggc

SEQ ID NO: 614466 - DNA, 15 bp, Homo sapiens
ctcgttatcgtggca

SEQ ID NO: 614467 - DNA, 15 bp, Homo sapiens
tcgttatcgtggcac

SEQ ID NO: 614468 - DNA, 15 bp, Homo sapiens
cgttatcgtggcacc

SEQ ID NO: 614469 - DNA, 15 bp, Homo sapiens
gttatcgtggcacct

SEQ ID NO: 614470 - DNA, 15 bp, Homo sapiens
ttatcgtggcacctt

SEQ ID NO: 614471 - DNA, 15 bp, Homo sapiens
tatcgtggcacctta

SEQ ID NO: 614472 - DNA, 15 bp, Homo sapiens
atcgtggcaccttac

SEQ ID NO: 614473 - DNA, 15 bp, Homo sapiens
tcgtggcaccttacc

SEQ ID NO: 614474 - DNA, 15 bp, Homo sapiens
cgtggcaccttaccc

SEQ ID NO: 614475 - DNA, 15 bp, Homo sapiens
gtggcaccttaccct

SEQ ID NO: 614476 - DNA, 15 bp, Homo sapiens
tggcaccttaccctt

SEQ ID NO: 614477 - DNA, 15 bp, Homo sapiens
ggcaccttacccttc

SEQ ID NO: 614478 - DNA, 15 bp, Homo sapiens
gcaccttacccttct

SEQ ID NO: 614479 - DNA, 15 bp, Homo sapiens
caccttacccttctg

SEQ ID NO: 614480 - DNA, 15 bp, Homo sapiens
accttacccttctga

SEQ ID NO: 614481 - DNA, 15 bp, Homo sapiens
ccttacccttctgat

SEQ ID NO: 614482 - DNA, 15 bp, Homo sapiens
cttacccttctgatg

SEQ ID NO: 614483 - DNA, 15 bp, Homo sapiens
ttacccttctgatgt

SEQ ID NO: 614484 - DNA, 15 bp, Homo sapiens
tacccttctgatgtt

SEQ ID NO: 614485 - DNA, 15 bp, Homo sapiens
acccttctgatgtta

SEQ ID NO: 614486 - DNA, 15 bp, Homo sapiens
cccttctgatgttaa

SEQ ID NO: 614487 - DNA, 15 bp, Homo sapiens
ccttctgatgttaaa

SEQ ID NO: 614488 - DNA, 15 bp, Homo sapiens
cttctgatgttaaaa

SEQ ID NO: 614489 - DNA, 15 bp, Homo sapiens
ttctgatgttaaaaa

SEQ ID NO: 614490 - DNA, 15 bp, Homo sapiens
tctgatgttaaaaaa

SEQ ID NO: 614491 - DNA, 15 bp, Homo sapiens
ctgatgttaaaaaaa

SEQ ID NO: 614492 - DNA, 15 bp, Homo sapiens
tgatgttaaaaaaaa

SEQ ID NO: 614493 - DNA, 15 bp, Homo sapiens
gatgttaaaaaaaaa

SEQ ID NO: 614494 - DNA, 15 bp, Homo sapiens
atgttaaaaaaaaaa

SEQ ID NO: 614495 - DNA, 15 bp, Homo sapiens
tgttaaaaaaaaaaa

SEQ ID NO: 614496 - DNA, 15 bp, Homo sapiens
gttaaaaaaaaaaaa

SEQ ID NO: 614497 - DNA, 15 bp, Homo sapiens
ttaaaaaaaaaaaaa

SEQ ID NO: 614498 - DNA, 15 bp, Homo sapiens
aaaaaaaaaaaaaga

SEQ ID NO: 614499 - DNA, 15 bp, Homo sapiens
aaaaaaaaaaaagag

SEQ ID NO: 614500 - DNA, 15 bp, Homo sapiens
aaaaaaaaaaagagc

SEQ ID NO: 614501 - DNA, 15 bp, Homo sapiens
aaaaaaaaaagagcg

SEQ ID NO: 614502 - DNA, 15 bp, Homo sapiens
aaaaaaaaagagcga

SEQ ID NO: 614503 - DNA, 15 bp, Homo sapiens
aaaaaaaagagcgag

SEQ ID NO: 614504 - DNA, 15 bp, Homo sapiens
aaaaaaagagcgaga

SEQ ID NO: 614505 - DNA, 15 bp, Homo sapiens
aaaaaagagcgagag

SEQ ID NO: 614506 - DNA, 15 bp, Homo sapiens
aaaaagagcgagaga

SEQ ID NO: 614507 - DNA, 15 bp, Homo sapiens
aaaagagcgagagag

SEQ ID NO: 614508 - DNA, 15 bp, Homo sapiens
aaagagcgagagaga

SEQ ID NO: 614509 - DNA, 15 bp, Homo sapiens
aagagcgagagagag

SEQ ID NO: 614510 - DNA, 15 bp, Homo sapiens
agagcgagagagaga

SEQ ID NO: 614511 - DNA, 15 bp, Homo sapiens
gagcgagagagagag

SEQ ID NO: 614512 - DNA, 15 bp, Homo sapiens
agcgagagagagaga

SEQ ID NO: 614513 - DNA, 15 bp, Homo sapiens
gcgagagagagagag

SEQ ID NO: 614514 - DNA, 15 bp, Homo sapiens
cgagagagagagaga

SEQ ID NO: 614515 - DNA, 15 bp, Homo sapiens
gagagagagagagag

SEQ ID NO: 614516 - DNA, 15 bp, Homo sapiens
agagagagagagaga

SEQ ID NO: 614517 - DNA, 15 bp, Homo sapiens
gagagagagagagaa

SEQ ID NO: 614518 - DNA, 15 bp, Homo sapiens
agagagagagagaaa

SEQ ID NO: 614519 - DNA, 15 bp, Homo sapiens
gagagagagagaaac

SEQ ID NO: 614520 - DNA, 15 bp, Homo sapiens
agagagagagaaaca

SEQ ID NO: 614521 - DNA, 15 bp, Homo sapiens
gagagagagaaacat

SEQ ID NO: 614522 - DNA, 15 bp, Homo sapiens
agagagagaaacatt

SEQ ID NO: 614523 - DNA, 15 bp, Homo sapiens
gagagagaaacattt

SEQ ID NO: 614524 - DNA, 15 bp, Homo sapiens
agagagaaacatttg

SEQ ID NO: 614525 - DNA, 15 bp, Homo sapiens
gagagaaacatttgt

SEQ ID NO: 614526 - DNA, 15 bp, Homo sapiens
agagaaacatttgtg

SEQ ID NO: 614527 - DNA, 15 bp, Homo sapiens
gagaaacatttgtga

SEQ ID NO: 614528 - DNA, 15 bp, Homo sapiens
agaaacatttgtgaa

SEQ ID NO: 614529 - DNA, 15 bp, Homo sapiens
gaaacatttgtgaag

SEQ ID NO: 614530 - DNA, 15 bp, Homo sapiens
aaacatttgtgaagt

SEQ ID NO: 614531 - DNA, 15 bp, Homo sapiens
aacatttgtgaagta

SEQ ID NO: 614532 - DNA, 15 bp, Homo sapiens
acatttgtgaagtag

SEQ ID NO: 614533 - DNA, 15 bp, Homo sapiens
catttgtgaagtagg

SEQ ID NO: 614534 - DNA, 15 bp, Homo sapiens
atttgtgaagtaggt

SEQ ID NO: 614535 - DNA, 15 bp, Homo sapiens
tttgtgaagtaggtt

SEQ ID NO: 614536 - DNA, 15 bp, Homo sapiens
ttgtgaagtaggttg

SEQ ID NO: 614537 - DNA, 15 bp, Homo sapiens
tgtgaagtaggttgt

SEQ ID NO: 614538 - DNA, 15 bp, Homo sapiens
gtgaagtaggttgtt

SEQ ID NO: 614539 - DNA, 15 bp, Homo sapiens
tgaagtaggttgttg

SEQ ID NO: 614540 - DNA, 15 bp, Homo sapiens
gaagtaggttgttga

SEQ ID NO: 614541 - DNA, 15 bp, Homo sapiens
aagtaggttgttgag

SEQ ID NO: 614542 - DNA, 15 bp, Homo sapiens
agtaggttgttgagt

SEQ ID NO: 614543 - DNA, 15 bp, Homo sapiens
gtaggttgttgagtc

SEQ ID NO: 614544 - DNA, 15 bp, Homo sapiens
taggttgttgagtct

SEQ ID NO: 614545 - DNA, 15 bp, Homo sapiens
aggttgttgagtctc

SEQ ID NO: 614546 - DNA, 15 bp, Homo sapiens
ggttgttgagtctca

SEQ ID NO: 614547 - DNA, 15 bp, Homo sapiens
gttgttgagtctcag

SEQ ID NO: 614548 - DNA, 15 bp, Homo sapiens
ttgttgagtctcagc

SEQ ID NO: 614549 - DNA, 15 bp, Homo sapiens
tgttgagtctcagca

SEQ ID NO: 614550 - DNA, 15 bp, Homo sapiens
gttgagtctcagcac

SEQ ID NO: 614551 - DNA, 15 bp, Homo sapiens
ttgagtctcagcact

SEQ ID NO: 614552 - DNA, 15 bp, Homo sapiens
tgagtctcagcacta

SEQ ID NO: 614553 - DNA, 15 bp, Homo sapiens
gagtctcagcactat

SEQ ID NO: 614554 - DNA, 15 bp, Homo sapiens
agtctcagcactatt

SEQ ID NO: 614555 - DNA, 15 bp, Homo sapiens
gtctcagcactattg

SEQ ID NO: 614556 - DNA, 15 bp, Homo sapiens
tctcagcactattga

SEQ ID NO: 614557 - DNA, 15 bp, Homo sapiens
ctcagcactattgac

SEQ ID NO: 614558 - DNA, 15 bp, Homo sapiens
tcagcactattgacc

SEQ ID NO: 614559 - DNA, 15 bp, Homo sapiens
cagcactattgacct

SEQ ID NO: 614560 - DNA, 15 bp, Homo sapiens
agcactattgacctt

SEQ ID NO: 614561 - DNA, 15 bp, Homo sapiens
gcactattgaccttt

SEQ ID NO: 614562 - DNA, 15 bp, Homo sapiens
cactattgacctttt

SEQ ID NO: 614563 - DNA, 15 bp, Homo sapiens
actattgaccttttg

SEQ ID NO: 614564 - DNA, 15 bp, Homo sapiens
ctattgaccttttgg

SEQ ID NO: 614565 - DNA, 15 bp, Homo sapiens
tattgaccttttggg

SEQ ID NO: 614566 - DNA, 15 bp, Homo sapiens
attgaccttttgggc

SEQ ID NO: 614567 - DNA, 15 bp, Homo sapiens
ttgaccttttgggca

SEQ ID NO: 614568 - DNA, 15 bp, Homo sapiens
tgaccttttgggcag

SEQ ID NO: 614569 - DNA, 15 bp, Homo sapiens
gaccttttgggcagg

SEQ ID NO: 614570 - DNA, 15 bp, Homo sapiens
accttttgggcagga

SEQ ID NO: 614571 - DNA, 15 bp, Homo sapiens
ccttttgggcaggat

SEQ ID NO: 614572 - DNA, 15 bp, Homo sapiens
cttttgggcaggata

SEQ ID NO: 614573 - DNA, 15 bp, Homo sapiens
ttttgggcaggatac

SEQ ID NO: 614574 - DNA, 15 bp, Homo sapiens
tttgggcaggatact

SEQ ID NO: 614575 - DNA, 15 bp, Homo sapiens
ttgggcaggatactt

SEQ ID NO: 614576 - DNA, 15 bp, Homo sapiens
tgggcaggatacttc

SEQ ID NO: 614577 - DNA, 15 bp, Homo sapiens
gggcaggatacttct

SEQ ID NO: 614578 - DNA, 15 bp, Homo sapiens
ggcaggatacttctt

SEQ ID NO: 614579 - DNA, 15 bp, Homo sapiens
gcaggatacttcttt

SEQ ID NO: 614580 - DNA, 15 bp, Homo sapiens
caggatacttctttg

SEQ ID NO: 614581 - DNA, 15 bp, Homo sapiens
aggatacttctttgt

SEQ ID NO: 614582 - DNA, 15 bp, Homo sapiens
ggatacttctttgtt

SEQ ID NO: 614583 - DNA, 15 bp, Homo sapiens
gatacttctttgttg

SEQ ID NO: 614584 - DNA, 15 bp, Homo sapiens
atacttctttgttgt

SEQ ID NO: 614585 - DNA, 15 bp, Homo sapiens
tacttctttgttgtg

SEQ ID NO: 614586 - DNA, 15 bp, Homo sapiens
acttctttgttgtgg

SEQ ID NO: 614587 - DNA, 15 bp, Homo sapiens
cttctttgttgtggg

SEQ ID NO: 614588 - DNA, 15 bp, Homo sapiens
ttctttgttgtgggg

SEQ ID NO: 614589 - DNA, 15 bp, Homo sapiens
tctttgttgtggggg

SEQ ID NO: 614590 - DNA, 15 bp, Homo sapiens
ctttgttgtggggga

SEQ ID NO: 614591 - DNA, 15 bp, Homo sapiens
tttgttgtgggggat

SEQ ID NO: 614592 - DNA, 15 bp, Homo sapiens
ttgttgtgggggatt

SEQ ID NO: 614593 - DNA, 15 bp, Homo sapiens
tgttgtgggggattg

SEQ ID NO: 614594 - DNA, 15 bp, Homo sapiens
gttgtgggggattgt

SEQ ID NO: 614595 - DNA, 15 bp, Homo sapiens
ttgtgggggattgtt

SEQ ID NO: 614596 - DNA, 15 bp, Homo sapiens
tgtgggggattgttc

SEQ ID NO: 614597 - DNA, 15 bp, Homo sapiens
gtgggggattgttct

SEQ ID NO: 614598 - DNA, 15 bp, Homo sapiens
tgggggattgttctg

SEQ ID NO: 614599 - DNA, 15 bp, Homo sapiens
gggggattgttctgt

SEQ ID NO: 614600 - DNA, 15 bp, Homo sapiens
ggggattgttctgtg

SEQ ID NO: 614601 - DNA, 15 bp, Homo sapiens
gggattgttctgtgt

SEQ ID NO: 614602 - DNA, 15 bp, Homo sapiens
ggattgttctgtgtg

SEQ ID NO: 614603 - DNA, 15 bp, Homo sapiens
gattgttctgtgtgt

SEQ ID NO: 614604 - DNA, 15 bp, Homo sapiens
attgttctgtgtgtc

SEQ ID NO: 614605 - DNA, 15 bp, Homo sapiens
ttgttctgtgtgtcg

SEQ ID NO: 614606 - DNA, 15 bp, Homo sapiens
tgttctgtgtgtcgt

SEQ ID NO: 614607 - DNA, 15 bp, Homo sapiens
gttctgtgtgtcgtg

SEQ ID NO: 614608 - DNA, 15 bp, Homo sapiens
ttctgtgtgtcgtgt

SEQ ID NO: 614609 - DNA, 15 bp, Homo sapiens
tctgtgtgtcgtgtg

SEQ ID NO: 614610 - DNA, 15 bp, Homo sapiens
ctgtgtgtcgtgtga

SEQ ID NO: 614611 - DNA, 15 bp, Homo sapiens
tgtgtgtcgtgtgat

SEQ ID NO: 614612 - DNA, 15 bp, Homo sapiens
gtgtgtcgtgtgatg

SEQ ID NO: 614613 - DNA, 15 bp, Homo sapiens
tgtgtcgtgtgatgt

SEQ ID NO: 614614 - DNA, 15 bp, Homo sapiens
gtgtcgtgtgatgtt

SEQ ID NO: 614615 - DNA, 15 bp, Homo sapiens
tgtcgtgtgatgttt

SEQ ID NO: 614616 - DNA, 15 bp, Homo sapiens
gtcgtgtgatgttta

SEQ ID NO: 614617 - DNA, 15 bp, Homo sapiens
tcgtgtgatgtttag

SEQ ID NO: 614618 - DNA, 15 bp, Homo sapiens
cgtgtgatgtttagt

SEQ ID NO: 614619 - DNA, 15 bp, Homo sapiens
gtgtgatgtttagtg

SEQ ID NO: 614620 - DNA, 15 bp, Homo sapiens
tgtgatgtttagtgg

SEQ ID NO: 614621 - DNA, 15 bp, Homo sapiens
gtgatgtttagtggg

SEQ ID NO: 614622 - DNA, 15 bp, Homo sapiens
tgatgtttagtggga

SEQ ID NO: 614623 - DNA, 15 bp, Homo sapiens
gatgtttagtgggat

SEQ ID NO: 614624 - DNA, 15 bp, Homo sapiens
atgtttagtgggatt

SEQ ID NO: 614625 - DNA, 15 bp, Homo sapiens
tgtttagtgggattg

SEQ ID NO: 614626 - DNA, 15 bp, Homo sapiens
gtttagtgggattgc

SEQ ID NO: 614627 - DNA, 15 bp, Homo sapiens
tttagtgggattgct

SEQ ID NO: 614628 - DNA, 15 bp, Homo sapiens
ttagtgggattgctg

SEQ ID NO: 614629 - DNA, 15 bp, Homo sapiens
tagtgggattgctgg

SEQ ID NO: 614630 - DNA, 15 bp, Homo sapiens
agtgggattgctggc

SEQ ID NO: 614631 - DNA, 15 bp, Homo sapiens
gtgggattgctggcc

SEQ ID NO: 614632 - DNA, 15 bp, Homo sapiens
tgggattgctggccc

SEQ ID NO: 614633 - DNA, 15 bp, Homo sapiens
gggattgctggccct

SEQ ID NO: 614634 - DNA, 15 bp, Homo sapiens
ggattgctggccctt

SEQ ID NO: 614635 - DNA, 15 bp, Homo sapiens
gattgctggccctta

SEQ ID NO: 614636 - DNA, 15 bp, Homo sapiens
attgctggcccttac

SEQ ID NO: 614637 - DNA, 15 bp, Homo sapiens
ttgctggcccttacc

SEQ ID NO: 614638 - DNA, 15 bp, Homo sapiens
tgctggcccttacct

SEQ ID NO: 614639 - DNA, 15 bp, Homo sapiens
gctggcccttaccta

SEQ ID NO: 614640 - DNA, 15 bp, Homo sapiens
ctggcccttacctac

SEQ ID NO: 614641 - DNA, 15 bp, Homo sapiens
tggcccttacctacc

SEQ ID NO: 614642 - DNA, 15 bp, Homo sapiens
ggcccttacctacca

SEQ ID NO: 614643 - DNA, 15 bp, Homo sapiens
gcccttacctaccag

SEQ ID NO: 614644 - DNA, 15 bp, Homo sapiens
cccttacctaccaga

SEQ ID NO: 614645 - DNA, 15 bp, Homo sapiens
ccttacctaccagat

SEQ ID NO: 614646 - DNA, 15 bp, Homo sapiens
cttacctaccagatg

SEQ ID NO: 614647 - DNA, 15 bp, Homo sapiens
ttacctaccagatgc

SEQ ID NO: 614648 - DNA, 15 bp, Homo sapiens
tacctaccagatgcc

SEQ ID NO: 614649 - DNA, 15 bp, Homo sapiens
acctaccagatgcca

SEQ ID NO: 614650 - DNA, 15 bp, Homo sapiens
cctaccagatgccag

SEQ ID NO: 614651 - DNA, 15 bp, Homo sapiens
ctaccagatgccagt

SEQ ID NO: 614652 - DNA, 15 bp, Homo sapiens
taccagatgccagtg

SEQ ID NO: 614653 - DNA, 15 bp, Homo sapiens
accagatgccagtgt

SEQ ID NO: 614654 - DNA, 15 bp, Homo sapiens
ccagatgccagtgtc

SEQ ID NO: 614655 - DNA, 15 bp, Homo sapiens
cagatgccagtgtcc

SEQ ID NO: 614656 - DNA, 15 bp, Homo sapiens
agatgccagtgtccc

SEQ ID NO: 614657 - DNA, 15 bp, Homo sapiens
gatgccagtgtccct

SEQ ID NO: 614658 - DNA, 15 bp, Homo sapiens
atgccagtgtccctc

SEQ ID NO: 614659 - DNA, 15 bp, Homo sapiens
tgccagtgtccctcc

SEQ ID NO: 614660 - DNA, 15 bp, Homo sapiens
gccagtgtccctcca

SEQ ID NO: 614661 - DNA, 15 bp, Homo sapiens
ccagtgtccctccac

SEQ ID NO: 614662 - DNA, 15 bp, Homo sapiens
cagtgtccctccacc

SEQ ID NO: 614663 - DNA, 15 bp, Homo sapiens
agtgtccctccaccc

SEQ ID NO: 614664 - DNA, 15 bp, Homo sapiens
gtgtccctccaccct

SEQ ID NO: 614665 - DNA, 15 bp, Homo sapiens
tgtccctccaccctg

SEQ ID NO: 614666 - DNA, 15 bp, Homo sapiens
gtccctccaccctga

SEQ ID NO: 614667 - DNA, 15 bp, Homo sapiens
tccctccaccctgag

SEQ ID NO: 614668 - DNA, 15 bp, Homo sapiens
ccctccaccctgagt

SEQ ID NO: 614669 - DNA, 15 bp, Homo sapiens
cctccaccctgagtt

SEQ ID NO: 614670 - DNA, 15 bp, Homo sapiens
ctccaccctgagttg

SEQ ID NO: 614671 - DNA, 15 bp, Homo sapiens
tccaccctgagttgt

SEQ ID NO: 614672 - DNA, 15 bp, Homo sapiens
ccaccctgagttgtg

SEQ ID NO: 614673 - DNA, 15 bp, Homo sapiens
caccctgagttgtga

SEQ ID NO: 614674 - DNA, 15 bp, Homo sapiens
accctgagttgtgac

SEQ ID NO: 614675 - DNA, 15 bp, Homo sapiens
ccctgagttgtgaca

SEQ ID NO: 614676 - DNA, 15 bp, Homo sapiens
cctgagttgtgacaa

SEQ ID NO: 614677 - DNA, 15 bp, Homo sapiens
ctgagttgtgacaac

SEQ ID NO: 614678 - DNA, 15 bp, Homo sapiens
tgagttgtgacaacc

SEQ ID NO: 614679 - DNA, 15 bp, Homo sapiens
gagttgtgacaaccc

SEQ ID NO: 614680 - DNA, 15 bp, Homo sapiens
agttgtgacaaccca

SEQ ID NO: 614681 - DNA, 15 bp, Homo sapiens
gttgtgacaacccag

SEQ ID NO: 614682 - DNA, 15 bp, Homo sapiens
ttgtgacaacccaga

SEQ ID NO: 614683 - DNA, 15 bp, Homo sapiens
tgtgacaacccagat

SEQ ID NO: 614684 - DNA, 15 bp, Homo sapiens
gtgacaacccagatt

SEQ ID NO: 614685 - DNA, 15 bp, Homo sapiens
tgacaacccagattg

SEQ ID NO: 614686 - DNA, 15 bp, Homo sapiens
gacaacccagattgt

SEQ ID NO: 614687 - DNA, 15 bp, Homo sapiens
acaacccagattgtc

SEQ ID NO: 614688 - DNA, 15 bp, Homo sapiens
caacccagattgtct

SEQ ID NO: 614689 - DNA, 15 bp, Homo sapiens
aacccagattgtctc

SEQ ID NO: 614690 - DNA, 15 bp, Homo sapiens
acccagattgtctcc

SEQ ID NO: 614691 - DNA, 15 bp, Homo sapiens
cccagattgtctcca

SEQ ID NO: 614692 - DNA, 15 bp, Homo sapiens
ccagattgtctccag

SEQ ID NO: 614693 - DNA, 15 bp, Homo sapiens
cagattgtctccaga

SEQ ID NO: 614694 - DNA, 15 bp, Homo sapiens
agattgtctccagac

SEQ ID NO: 614695 - DNA, 15 bp, Homo sapiens
gattgtctccagaca

SEQ ID NO: 614696 - DNA, 15 bp, Homo sapiens
attgtctccagacac

SEQ ID NO: 614697 - DNA, 15 bp, Homo sapiens
ttgtctccagacact

SEQ ID NO: 614698 - DNA, 15 bp, Homo sapiens
tgtctccagacactc

SEQ ID NO: 614699 - DNA, 15 bp, Homo sapiens
gtctccagacactcc

SEQ ID NO: 614700 - DNA, 15 bp, Homo sapiens
tctccagacactcct

SEQ ID NO: 614701 - DNA, 15 bp, Homo sapiens
ctccagacactccta

SEQ ID NO: 614702 - DNA, 15 bp, Homo sapiens
tccagacactcctaa

SEQ ID NO: 614703 - DNA, 15 bp, Homo sapiens
ccagacactcctaaa

SEQ ID NO: 614704 - DNA, 15 bp, Homo sapiens
cagacactcctaaat

SEQ ID NO: 614705 - DNA, 15 bp, Homo sapiens
agacactcctaaatg

SEQ ID NO: 614706 - DNA, 15 bp, Homo sapiens
gacactcctaaatgt

SEQ ID NO: 614707 - DNA, 15 bp, Homo sapiens
acactcctaaatgtc

SEQ ID NO: 614708 - DNA, 15 bp, Homo sapiens
cactcctaaatgtcc

SEQ ID NO: 614709 - DNA, 15 bp, Homo sapiens
actcctaaatgtccc

SEQ ID NO: 614710 - DNA, 15 bp, Homo sapiens
ctcctaaatgtccct

SEQ ID NO: 614711 - DNA, 15 bp, Homo sapiens
tcctaaatgtccctg

SEQ ID NO: 614712 - DNA, 15 bp, Homo sapiens
cctaaatgtccctgg

SEQ ID NO: 614713 - DNA, 15 bp, Homo sapiens
ctaaatgtccctggc

SEQ ID NO: 614714 - DNA, 15 bp, Homo sapiens
taaatgtccctggcc

SEQ ID NO: 614715 - DNA, 15 bp, Homo sapiens
aaatgtccctggccg

SEQ ID NO: 614716 - DNA, 15 bp, Homo sapiens
aatgtccctggccgg

SEQ ID NO: 614717 - DNA, 15 bp, Homo sapiens
atgtccctggccggc

SEQ ID NO: 614718 - DNA, 15 bp, Homo sapiens
tgtccctggccggca

SEQ ID NO: 614719 - DNA, 15 bp, Homo sapiens
gtccctggccggcaa

SEQ ID NO: 614720 - DNA, 15 bp, Homo sapiens
tccctggccggcaaa

SEQ ID NO: 614721 - DNA, 15 bp, Homo sapiens
ccctggccggcaaaa

SEQ ID NO: 614722 - DNA, 15 bp, Homo sapiens
cctggccggcaaaat

SEQ ID NO: 614723 - DNA, 15 bp, Homo sapiens
ctggccggcaaaatt

SEQ ID NO: 614724 - DNA, 15 bp, Homo sapiens
tggccggcaaaattg

SEQ ID NO: 614725 - DNA, 15 bp, Homo sapiens
ggccggcaaaattgc

SEQ ID NO: 614726 - DNA, 15 bp, Homo sapiens
gccggcaaaattgcc

SEQ ID NO: 614727 - DNA, 15 bp, Homo sapiens
ccggcaaaattgccg

SEQ ID NO: 614728 - DNA, 15 bp, Homo sapiens
cggcaaaattgccgc

SEQ ID NO: 614729 - DNA, 15 bp, Homo sapiens
ggcaaaattgccgct

SEQ ID NO: 614730 - DNA, 15 bp, Homo sapiens
gcaaaattgccgctg

SEQ ID NO: 614731 - DNA, 15 bp, Homo sapiens
caaaattgccgctgc

SEQ ID NO: 614732 - DNA, 15 bp, Homo sapiens
aaaattgccgctgct

SEQ ID NO: 614733 - DNA, 15 bp, Homo sapiens
aaattgccgctgctc

SEQ ID NO: 614734 - DNA, 15 bp, Homo sapiens
aattgccgctgctca

SEQ ID NO: 614735 - DNA, 15 bp, Homo sapiens
attgccgctgctcaa

SEQ ID NO: 614736 - DNA, 15 bp, Homo sapiens
ttgccgctgctcaag

SEQ ID NO: 614737 - DNA, 15 bp, Homo sapiens
tgccgctgctcaaga

SEQ ID NO: 614738 - DNA, 15 bp, Homo sapiens
gccgctgctcaagaa

SEQ ID NO: 614739 - DNA, 15 bp, Homo sapiens
ccgctgctcaagaat

SEQ ID NO: 614740 - DNA, 15 bp, Homo sapiens
cgctgctcaagaatc

SEQ ID NO: 614741 - DNA, 15 bp, Homo sapiens
gctgctcaagaatca

SEQ ID NO: 614742 - DNA, 15 bp, Homo sapiens
ctgctcaagaatcac

SEQ ID NO: 614743 - DNA, 15 bp, Homo sapiens
tgctcaagaatcacg

SEQ ID NO: 614744 - DNA, 15 bp, Homo sapiens
gctcaagaatcacgg

SEQ ID NO: 614745 - DNA, 15 bp, Homo sapiens
ctcaagaatcacggc

SEQ ID NO: 614746 - DNA, 15 bp, Homo sapiens
tcaagaatcacggct

SEQ ID NO: 614747 - DNA, 15 bp, Homo sapiens
caagaatcacggctt

SEQ ID NO: 614748 - DNA, 15 bp, Homo sapiens
aagaatcacggcttt

SEQ ID NO: 614749 - DNA, 15 bp, Homo sapiens
agaatcacggctttg

SEQ ID NO: 614750 - DNA, 15 bp, Homo sapiens
gaatcacggctttga

SEQ ID NO: 614751 - DNA, 15 bp, Homo sapiens
aatcacggctttgac

SEQ ID NO: 614752 - DNA, 15 bp, Homo sapiens
atcacggctttgacg

SEQ ID NO: 614753 - DNA, 15 bp, Homo sapiens
tcacggctttgacga

SEQ ID NO: 614754 - DNA, 15 bp, Homo sapiens
cacggctttgacgat

SEQ ID NO: 614755 - DNA, 15 bp, Homo sapiens
acggctttgacgatt

SEQ ID NO: 614756 - DNA, 15 bp, Homo sapiens
cggctttgacgatta

SEQ ID NO: 614757 - DNA, 15 bp, Homo sapiens
ggctttgacgattag

SEQ ID NO: 614758 - DNA, 15 bp, Homo sapiens
gctttgacgattaga

SEQ ID NO: 614759 - DNA, 15 bp, Homo sapiens
ctttgacgattagac

SEQ ID NO: 614760 - DNA, 15 bp, Homo sapiens
tttgacgattagact

SEQ ID NO: 614761 - DNA, 15 bp, Homo sapiens
ttgacgattagactt

SEQ ID NO: 614762 - DNA, 15 bp, Homo sapiens
tgacgattagacttt

SEQ ID NO: 614763 - DNA, 15 bp, Homo sapiens
gacgattagactttg

SEQ ID NO: 614764 - DNA, 15 bp, Homo sapiens
acgattagactttgt

SEQ ID NO: 614765 - DNA, 15 bp, Homo sapiens
cgattagactttgtg

SEQ ID NO: 614766 - DNA, 15 bp, Homo sapiens
gattagactttgtga

SEQ ID NO: 614767 - DNA, 15 bp, Homo sapiens
attagactttgtgat

SEQ ID NO: 614768 - DNA, 15 bp, Homo sapiens
ttagactttgtgata

SEQ ID NO: 614769 - DNA, 15 bp, Homo sapiens
tagactttgtgatat

SEQ ID NO: 614770 - DNA, 15 bp, Homo sapiens
agactttgtgatatt

SEQ ID NO: 614771 - DNA, 15 bp, Homo sapiens
gactttgtgatattt

SEQ ID NO: 614772 - DNA, 15 bp, Homo sapiens
actttgtgatatttg

SEQ ID NO: 614773 - DNA, 15 bp, Homo sapiens
ctttgtgatatttgt

SEQ ID NO: 614774 - DNA, 15 bp, Homo sapiens
tttgtgatatttgtt

SEQ ID NO: 614775 - DNA, 15 bp, Homo sapiens
ttgtgatatttgttt

SEQ ID NO: 614776 - DNA, 15 bp, Homo sapiens
tgtgatatttgtttc

SEQ ID NO: 614777 - DNA, 15 bp, Homo sapiens
gtgatatttgtttca

SEQ ID NO: 614778 - DNA, 15 bp, Homo sapiens
tgatatttgtttcag

SEQ ID NO: 614779 - DNA, 15 bp, Homo sapiens
gatatttgtttcagt

SEQ ID NO: 614780 - DNA, 15 bp, Homo sapiens
atatttgtttcagtc

SEQ ID NO: 614781 - DNA, 15 bp, Homo sapiens
tatttgtttcagtct

SEQ ID NO: 614782 - DNA, 15 bp, Homo sapiens
atttgtttcagtctg

SEQ ID NO: 614783 - DNA, 15 bp, Homo sapiens
tttgtttcagtctgt

SEQ ID NO: 614784 - DNA, 15 bp, Homo sapiens
ttgtttcagtctgtt

SEQ ID NO: 614785 - DNA, 15 bp, Homo sapiens
tgtttcagtctgttt

SEQ ID NO: 614786 - DNA, 15 bp, Homo sapiens
gtttcagtctgttta

SEQ ID NO: 614787 - DNA, 15 bp, Homo sapiens
tttcagtctgtttag

SEQ ID NO: 614788 - DNA, 15 bp, Homo sapiens
ttcagtctgtttagg

SEQ ID NO: 614789 - DNA, 15 bp, Homo sapiens
tcagtctgtttaggt

SEQ ID NO: 614790 - DNA, 15 bp, Homo sapiens
cagtctgtttaggtt

SEQ ID NO: 614791 - DNA, 15 bp, Homo sapiens
agtctgtttaggttt

SEQ ID NO: 614792 - DNA, 15 bp, Homo sapiens
gtctgtttaggtttt

SEQ ID NO: 614793 - DNA, 15 bp, Homo sapiens
tctgtttaggttttt

SEQ ID NO: 614794 - DNA, 15 bp, Homo sapiens
ctgtttaggtttttt

SEQ ID NO: 614795 - DNA, 15 bp, Homo sapiens
tgtttaggttttttt

SEQ ID NO: 614796 - DNA, 15 bp, Homo sapiens
gtttaggtttttttt

SEQ ID NO: 614797 - DNA, 15 bp, Homo sapiens
tttaggttttttttc

SEQ ID NO: 614798 - DNA, 15 bp, Homo sapiens
ttaggttttttttct

SEQ ID NO: 614799 - DNA, 15 bp, Homo sapiens
taggttttttttctt

SEQ ID NO: 614800 - DNA, 15 bp, Homo sapiens
aggttttttttcttc

SEQ ID NO: 614801 - DNA, 15 bp, Homo sapiens
ggttttttttcttct

SEQ ID NO: 614802 - DNA, 15 bp, Homo sapiens
gttttttttcttcta

SEQ ID NO: 614803 - DNA, 15 bp, Homo sapiens
ttttttttcttctac

SEQ ID NO: 614804 - DNA, 15 bp, Homo sapiens
tttttttcttctacc

SEQ ID NO: 614805 - DNA, 15 bp, Homo sapiens
ttttttcttctacct

SEQ ID NO: 614806 - DNA, 15 bp, Homo sapiens
tttttcttctacctg

SEQ ID NO: 614807 - DNA, 15 bp, Homo sapiens
ttttcttctacctgt

SEQ ID NO: 614808 - DNA, 15 bp, Homo sapiens
tttcttctacctgta

SEQ ID NO: 614809 - DNA, 15 bp, Homo sapiens
ttcttctacctgtat

SEQ ID NO: 614810 - DNA, 15 bp, Homo sapiens
tcttctacctgtatt

SEQ ID NO: 614811 - DNA, 15 bp, Homo sapiens
cttctacctgtattt

SEQ ID NO: 614812 - DNA, 15 bp, Homo sapiens
ttctacctgtatttt

SEQ ID NO: 614813 - DNA, 15 bp, Homo sapiens
tctacctgtattttt

SEQ ID NO: 614814 - DNA, 15 bp, Homo sapiens
ctacctgtatttttt

SEQ ID NO: 614815 - DNA, 15 bp, Homo sapiens
tacctgtattttttt

SEQ ID NO: 614816 - DNA, 15 bp, Homo sapiens
acctgtatttttttc

SEQ ID NO: 614817 - DNA, 15 bp, Homo sapiens
cctgtatttttttct

SEQ ID NO: 614818 - DNA, 15 bp, Homo sapiens
ctgtatttttttctg

SEQ ID NO: 614819 - DNA, 15 bp, Homo sapiens
tgtatttttttctgg

SEQ ID NO: 614820 - DNA, 15 bp, Homo sapiens
gtatttttttctggt

SEQ ID NO: 614821 - DNA, 15 bp, Homo sapiens
tatttttttctggtt

SEQ ID NO: 614822 - DNA, 15 bp, Homo sapiens
atttttttctggttc

SEQ ID NO: 614823 - DNA, 15 bp, Homo sapiens
tttttttctggttct

SEQ ID NO: 614824 - DNA, 15 bp, Homo sapiens
ttttttctggttctg

SEQ ID NO: 614825 - DNA, 15 bp, Homo sapiens
tttttctggttctgg

SEQ ID NO: 614826 - DNA, 15 bp, Homo sapiens
ttttctggttctggg

SEQ ID NO: 614827 - DNA, 15 bp, Homo sapiens
tttctggttctgggt

SEQ ID NO: 614828 - DNA, 15 bp, Homo sapiens
ttctggttctgggtg

SEQ ID NO: 614829 - DNA, 15 bp, Homo sapiens
tctggttctgggtgg

SEQ ID NO: 614830 - DNA, 15 bp, Homo sapiens
ctggttctgggtggt

SEQ ID NO: 614831 - DNA, 15 bp, Homo sapiens
tggttctgggtggtt

SEQ ID NO: 614832 - DNA, 15 bp, Homo sapiens
ggttctgggtggttg

SEQ ID NO: 614833 - DNA, 15 bp, Homo sapiens
gttctgggtggttgt

SEQ ID NO: 614834 - DNA, 15 bp, Homo sapiens
ttctgggtggttgta

SEQ ID NO: 614835 - DNA, 15 bp, Homo sapiens
tctgggtggttgtaa

SEQ ID NO: 614836 - DNA, 15 bp, Homo sapiens
ctgggtggttgtaat

SEQ ID NO: 614837 - DNA, 15 bp, Homo sapiens
tgggtggttgtaatt

SEQ ID NO: 614838 - DNA, 15 bp, Homo sapiens
gggtggttgtaatta

SEQ ID NO: 614839 - DNA, 15 bp, Homo sapiens
ggtggttgtaattag

SEQ ID NO: 614840 - DNA, 15 bp, Homo sapiens
gtggttgtaattagt

SEQ ID NO: 614841 - DNA, 15 bp, Homo sapiens
tggttgtaattagta

SEQ ID NO: 614842 - DNA, 15 bp, Homo sapiens
ggttgtaattagtag

SEQ ID NO: 614843 - DNA, 15 bp, Homo sapiens
gttgtaattagtagg

SEQ ID NO: 614844 - DNA, 15 bp, Homo sapiens
ttgtaattagtaggt

SEQ ID NO: 614845 - DNA, 15 bp, Homo sapiens
tgtaattagtaggtt

SEQ ID NO: 614846 - DNA, 15 bp, Homo sapiens
gtaattagtaggtta

SEQ ID NO: 614847 - DNA, 15 bp, Homo sapiens
taattagtaggttat

SEQ ID NO: 614848 - DNA, 15 bp, Homo sapiens
aattagtaggttatt

SEQ ID NO: 614849 - DNA, 15 bp, Homo sapiens
attagtaggttattg

SEQ ID NO: 614850 - DNA, 15 bp, Homo sapiens
ttagtaggttattga

SEQ ID NO: 614851 - DNA, 15 bp, Homo sapiens
tagtaggttattgat

SEQ ID NO: 614852 - DNA, 15 bp, Homo sapiens
agtaggttattgatc

SEQ ID NO: 614853 - DNA, 15 bp, Homo sapiens
gtaggttattgatcg

SEQ ID NO: 614854 - DNA, 15 bp, Homo sapiens
taggttattgatcga

SEQ ID NO: 614855 - DNA, 15 bp, Homo sapiens
aggttattgatcgat

SEQ ID NO: 614856 - DNA, 15 bp, Homo sapiens
ggttattgatcgatt

SEQ ID NO: 614857 - DNA, 15 bp, Homo sapiens
gttattgatcgattc

SEQ ID NO: 614858 - DNA, 15 bp, Homo sapiens
ttattgatcgattca

SEQ ID NO: 614859 - DNA, 15 bp, Homo sapiens
tattgatcgattcac

SEQ ID NO: 614860 - DNA, 15 bp, Homo sapiens
attgatcgattcacc

SEQ ID NO: 614861 - DNA, 15 bp, Homo sapiens
ttgatcgattcacct

SEQ ID NO: 614862 - DNA, 15 bp, Homo sapiens
tgatcgattcaccta

SEQ ID NO: 614863 - DNA, 15 bp, Homo sapiens
gatcgattcacctaa

SEQ ID NO: 614864 - DNA, 15 bp, Homo sapiens
atcgattcacctaac

SEQ ID NO: 614865 - DNA, 15 bp, Homo sapiens
tcgattcacctaaca

SEQ ID NO: 614866 - DNA, 15 bp, Homo sapiens
cgattcacctaacat

SEQ ID NO: 614867 - DNA, 15 bp, Homo sapiens
gattcacctaacatt

SEQ ID NO: 614868 - DNA, 15 bp, Homo sapiens
attcacctaacattt

SEQ ID NO: 614869 - DNA, 15 bp, Homo sapiens
ttcacctaacatttc

SEQ ID NO: 614870 - DNA, 15 bp, Homo sapiens
tcacctaacatttca

SEQ ID NO: 614871 - DNA, 15 bp, Homo sapiens
cacctaacatttcat

SEQ ID NO: 614872 - DNA, 15 bp, Homo sapiens
acctaacatttcatg

SEQ ID NO: 614873 - DNA, 15 bp, Homo sapiens
cctaacatttcatga

SEQ ID NO: 614874 - DNA, 15 bp, Homo sapiens
ctaacatttcatgaa

SEQ ID NO: 614875 - DNA, 15 bp, Homo sapiens
taacatttcatgaaa

SEQ ID NO: 614876 - DNA, 15 bp, Homo sapiens
aacatttcatgaaag

SEQ ID NO: 614877 - DNA, 15 bp, Homo sapiens
acatttcatgaaagt

SEQ ID NO: 614878 - DNA, 15 bp, Homo sapiens
catttcatgaaagtt

SEQ ID NO: 614879 - DNA, 15 bp, Homo sapiens
atttcatgaaagttt

SEQ ID NO: 614880 - DNA, 15 bp, Homo sapiens
tttcatgaaagtttc

SEQ ID NO: 614881 - DNA, 15 bp, Homo sapiens
ttcatgaaagtttca

SEQ ID NO: 614882 - DNA, 15 bp, Homo sapiens
tcatgaaagtttcat

SEQ ID NO: 614883 - DNA, 15 bp, Homo sapiens
catgaaagtttcatg

SEQ ID NO: 614884 - DNA, 15 bp, Homo sapiens
atgaaagtttcatgt

SEQ ID NO: 614885 - DNA, 15 bp, Homo sapiens
tgaaagtttcatgtg

SEQ ID NO: 614886 - DNA, 15 bp, Homo sapiens
gaaagtttcatgtgt

SEQ ID NO: 614887 - DNA, 15 bp, Homo sapiens
aaagtttcatgtgtg

SEQ ID NO: 614888 - DNA, 15 bp, Homo sapiens
aagtttcatgtgtgt

SEQ ID NO: 614889 - DNA, 15 bp, Homo sapiens
agtttcatgtgtgtg

SEQ ID NO: 614890 - DNA, 15 bp, Homo sapiens
gtttcatgtgtgtgt

SEQ ID NO: 614891 - DNA, 15 bp, Homo sapiens
tttcatgtgtgtgtg

SEQ ID NO: 614892 - DNA, 15 bp, Homo sapiens
ttcatgtgtgtgtgt

SEQ ID NO: 614893 - DNA, 15 bp, Homo sapiens
tcatgtgtgtgtgtg

SEQ ID NO: 614894 - DNA, 15 bp, Homo sapiens
catgtgtgtgtgtgt

SEQ ID NO: 614895 - DNA, 15 bp, Homo sapiens
atgtgtgtgtgtgtt

SEQ ID NO: 614896 - DNA, 15 bp, Homo sapiens
tgtgtgtgtgtgttt

SEQ ID NO: 614897 - DNA, 15 bp, Homo sapiens
gtgtgtgtgtgtttc

SEQ ID NO: 614898 - DNA, 15 bp, Homo sapiens
tgtgtgtgtgtttca

SEQ ID NO: 614899 - DNA, 15 bp, Homo sapiens
gtgtgtgtgtttcaa

SEQ ID NO: 614900 - DNA, 15 bp, Homo sapiens
tgtgtgtgtttcaat

SEQ ID NO: 614901 - DNA, 15 bp, Homo sapiens
gtgtgtgtttcaata

SEQ ID NO: 614902 - DNA, 15 bp, Homo sapiens
tgtgtgtttcaatag

SEQ ID NO: 614903 - DNA, 15 bp, Homo sapiens
gtgtgtttcaataga

SEQ ID NO: 614904 - DNA, 15 bp, Homo sapiens
tgtgtttcaatagaa

SEQ ID NO: 614905 - DNA, 15 bp, Homo sapiens
gtgtttcaatagaag

SEQ ID NO: 614906 - DNA, 15 bp, Homo sapiens
tgtttcaatagaagc

SEQ ID NO: 614907 - DNA, 15 bp, Homo sapiens
gtttcaatagaagca

SEQ ID NO: 614908 - DNA, 15 bp, Homo sapiens
tttcaatagaagcat

SEQ ID NO: 614909 - DNA, 15 bp, Homo sapiens
ttcaatagaagcata

SEQ ID NO: 614910 - DNA, 15 bp, Homo sapiens
tcaatagaagcataa

SEQ ID NO: 614911 - DNA, 15 bp, Homo sapiens
caatagaagcataaa

SEQ ID NO: 614912 - DNA, 15 bp, Homo sapiens
aatagaagcataaac

SEQ ID NO: 614913 - DNA, 15 bp, Homo sapiens
atagaagcataaact

SEQ ID NO: 614914 - DNA, 15 bp, Homo sapiens
tagaagcataaacta

SEQ ID NO: 614915 - DNA, 15 bp, Homo sapiens
agaagcataaactat

SEQ ID NO: 614916 - DNA, 15 bp, Homo sapiens
gaagcataaactata

SEQ ID NO: 614917 - DNA, 15 bp, Homo sapiens
aagcataaactatac

SEQ ID NO: 614918 - DNA, 15 bp, Homo sapiens
agcataaactatact

SEQ ID NO: 614919 - DNA, 15 bp, Homo sapiens
gcataaactatactc

SEQ ID NO: 614920 - DNA, 15 bp, Homo sapiens
cataaactatactcc

SEQ ID NO: 614921 - DNA, 15 bp, Homo sapiens
ataaactatactccc

SEQ ID NO: 614922 - DNA, 15 bp, Homo sapiens
taaactatactccct

SEQ ID NO: 614923 - DNA, 15 bp, Homo sapiens
aaactatactcccta

SEQ ID NO: 614924 - DNA, 15 bp, Homo sapiens
aactatactccctag

SEQ ID NO: 614925 - DNA, 15 bp, Homo sapiens
actatactccctagt

SEQ ID NO: 614926 - DNA, 15 bp, Homo sapiens
ctatactccctagtc

SEQ ID NO: 614927 - DNA, 15 bp, Homo sapiens
tatactccctagtct

SEQ ID NO: 614928 - DNA, 15 bp, Homo sapiens
atactccctagtctc

SEQ ID NO: 614929 - DNA, 15 bp, Homo sapiens
tactccctagtctca

SEQ ID NO: 614930 - DNA, 15 bp, Homo sapiens
actccctagtctcaa

SEQ ID NO: 614931 - DNA, 15 bp, Homo sapiens
ctccctagtctcaag

SEQ ID NO: 614932 - DNA, 15 bp, Homo sapiens
tccctagtctcaaga

SEQ ID NO: 614933 - DNA, 15 bp, Homo sapiens
ccctagtctcaagat

SEQ ID NO: 614934 - DNA, 15 bp, Homo sapiens
cctagtctcaagata

SEQ ID NO: 614935 - DNA, 15 bp, Homo sapiens
ctagtctcaagatac

SEQ ID NO: 614936 - DNA, 15 bp, Homo sapiens
tagtctcaagataca

SEQ ID NO: 614937 - DNA, 15 bp, Homo sapiens
agtctcaagatacac

SEQ ID NO: 614938 - DNA, 15 bp, Homo sapiens
gtctcaagatacaca

SEQ ID NO: 614939 - DNA, 15 bp, Homo sapiens
tctcaagatacacag

SEQ ID NO: 614940 - DNA, 15 bp, Homo sapiens
ctcaagatacacagg

SEQ ID NO: 614941 - DNA, 15 bp, Homo sapiens
tcaagatacacagga

SEQ ID NO: 614942 - DNA, 15 bp, Homo sapiens
caagatacacaggaa

SEQ ID NO: 614943 - DNA, 15 bp, Homo sapiens
aagatacacaggaag

SEQ ID NO: 614944 - DNA, 15 bp, Homo sapiens
agatacacaggaagg

SEQ ID NO: 614945 - DNA, 15 bp, Homo sapiens
gatacacaggaagga

SEQ ID NO: 614946 - DNA, 15 bp, Homo sapiens
atacacaggaaggaa

SEQ ID NO: 614947 - DNA, 15 bp, Homo sapiens
tacacaggaaggaaa

SEQ ID NO: 614948 - DNA, 15 bp, Homo sapiens
acacaggaaggaaaa

SEQ ID NO: 614949 - DNA, 15 bp, Homo sapiens
cacaggaaggaaaat

SEQ ID NO: 614950 - DNA, 15 bp, Homo sapiens
acaggaaggaaaata

SEQ ID NO: 614951 - DNA, 15 bp, Homo sapiens
caggaaggaaaataa

SEQ ID NO: 614952 - DNA, 15 bp, Homo sapiens
aggaaggaaaataag

SEQ ID NO: 614953 - DNA, 15 bp, Homo sapiens
ggaaggaaaataagc

SEQ ID NO: 614954 - DNA, 15 bp, Homo sapiens
gaaggaaaataagca

SEQ ID NO: 614955 - DNA, 15 bp, Homo sapiens
aaggaaaataagcac

SEQ ID NO: 614956 - DNA, 15 bp, Homo sapiens
aggaaaataagcaca

SEQ ID NO: 614957 - DNA, 15 bp, Homo sapiens
ggaaaataagcacaa

SEQ ID NO: 614958 - DNA, 15 bp, Homo sapiens
gaaaataagcacaaa

SEQ ID NO: 614959 - DNA, 15 bp, Homo sapiens
aaaataagcacaaat

SEQ ID NO: 614960 - DNA, 15 bp, Homo sapiens
aaataagcacaaatg

SEQ ID NO: 614961 - DNA, 15 bp, Homo sapiens
aataagcacaaatgt

SEQ ID NO: 614962 - DNA, 15 bp, Homo sapiens
ataagcacaaatgtg

SEQ ID NO: 614963 - DNA, 15 bp, Homo sapiens
taagcacaaatgtgt

SEQ ID NO: 614964 - DNA, 15 bp, Homo sapiens
aagcacaaatgtgtc

SEQ ID NO: 614965 - DNA, 15 bp, Homo sapiens
agcacaaatgtgtca

SEQ ID NO: 614966 - DNA, 15 bp, Homo sapiens
gcacaaatgtgtcac

SEQ ID NO: 614967 - DNA, 15 bp, Homo sapiens
cacaaatgtgtcacc

SEQ ID NO: 614968 - DNA, 15 bp, Homo sapiens
acaaatgtgtcacca

SEQ ID NO: 614969 - DNA, 15 bp, Homo sapiens
caaatgtgtcaccag

SEQ ID NO: 614970 - DNA, 15 bp, Homo sapiens
aaatgtgtcaccagg

SEQ ID NO: 614971 - DNA, 15 bp, Homo sapiens
aatgtgtcaccaggg

SEQ ID NO: 614972 - DNA, 15 bp, Homo sapiens
atgtgtcaccagggc

SEQ ID NO: 614973 - DNA, 15 bp, Homo sapiens
tgtgtcaccagggca

SEQ ID NO: 614974 - DNA, 15 bp, Homo sapiens
gtgtcaccagggcac

SEQ ID NO: 614975 - DNA, 15 bp, Homo sapiens
tgtcaccagggcaca

SEQ ID NO: 614976 - DNA, 15 bp, Homo sapiens
gtcaccagggcacag

SEQ ID NO: 614977 - DNA, 15 bp, Homo sapiens
tcaccagggcacaga

SEQ ID NO: 614978 - DNA, 15 bp, Homo sapiens
caccagggcacagac

SEQ ID NO: 614979 - DNA, 15 bp, Homo sapiens
accagggcacagact

SEQ ID NO: 614980 - DNA, 15 bp, Homo sapiens
ccagggcacagacta

SEQ ID NO: 614981 - DNA, 15 bp, Homo sapiens
cagggcacagactag

SEQ ID NO: 614982 - DNA, 15 bp, Homo sapiens
agggcacagactagt

SEQ ID NO: 614983 - DNA, 15 bp, Homo sapiens
gggcacagactagta

SEQ ID NO: 614984 - DNA, 15 bp, Homo sapiens
ggcacagactagtac

SEQ ID NO: 614985 - DNA, 15 bp, Homo sapiens
gcacagactagtact

SEQ ID NO: 614986 - DNA, 15 bp, Homo sapiens
cacagactagtacta

SEQ ID NO: 614987 - DNA, 15 bp, Homo sapiens
acagactagtactag

SEQ ID NO: 614988 - DNA, 15 bp, Homo sapiens
cagactagtactagg

SEQ ID NO: 614989 - DNA, 15 bp, Homo sapiens
agactagtactaggt

SEQ ID NO: 614990 - DNA, 15 bp, Homo sapiens
gactagtactaggtc

SEQ ID NO: 614991 - DNA, 15 bp, Homo sapiens
actagtactaggtcc

SEQ ID NO: 614992 - DNA, 15 bp, Homo sapiens
ctagtactaggtcct

SEQ ID NO: 614993 - DNA, 15 bp, Homo sapiens
tagtactaggtcctc

SEQ ID NO: 614994 - DNA, 15 bp, Homo sapiens
agtactaggtcctca

SEQ ID NO: 614995 - DNA, 15 bp, Homo sapiens
gtactaggtcctcag

SEQ ID NO: 614996 - DNA, 15 bp, Homo sapiens
tactaggtcctcagc

SEQ ID NO: 614997 - DNA, 15 bp, Homo sapiens
actaggtcctcagca

SEQ ID NO: 614998 - DNA, 15 bp, Homo sapiens
ctaggtcctcagcag

SEQ ID NO: 614999 - DNA, 15 bp, Homo sapiens
taggtcctcagcagg

SEQ ID NO: 615000 - DNA, 15 bp, Homo sapiens
aggtcctcagcaggc

SEQ ID NO: 615001 - DNA, 15 bp, Homo sapiens
ggtcctcagcaggcc

SEQ ID NO: 615002 - DNA, 15 bp, Homo sapiens
gtcctcagcaggcca

SEQ ID NO: 615003 - DNA, 15 bp, Homo sapiens
tcctcagcaggccag

SEQ ID NO: 615004 - DNA, 15 bp, Homo sapiens
cctcagcaggccagg

SEQ ID NO: 615005 - DNA, 15 bp, Homo sapiens
ctcagcaggccaggt

SEQ ID NO: 615006 - DNA, 15 bp, Homo sapiens
tcagcaggccaggtg

SEQ ID NO: 615007 - DNA, 15 bp, Homo sapiens
cagcaggccaggtgt

SEQ ID NO: 615008 - DNA, 15 bp, Homo sapiens
agcaggccaggtgtc

SEQ ID NO: 615009 - DNA, 15 bp, Homo sapiens
gcaggccaggtgtct

SEQ ID NO: 615010 - DNA, 15 bp, Homo sapiens
caggccaggtgtctt

SEQ ID NO: 615011 - DNA, 15 bp, Homo sapiens
aggccaggtgtctta

SEQ ID NO: 615012 - DNA, 15 bp, Homo sapiens
ggccaggtgtcttat

SEQ ID NO: 615013 - DNA, 15 bp, Homo sapiens
gccaggtgtcttatc

SEQ ID NO: 615014 - DNA, 15 bp, Homo sapiens
ccaggtgtcttatcc

SEQ ID NO: 615015 - DNA, 15 bp, Homo sapiens
caggtgtcttatccg

SEQ ID NO: 615016 - DNA, 15 bp, Homo sapiens
aggtgtcttatccgc

SEQ ID NO: 615017 - DNA, 15 bp, Homo sapiens
ggtgtcttatccgct

SEQ ID NO: 615018 - DNA, 15 bp, Homo sapiens
gtgtcttatccgctg

SEQ ID NO: 615019 - DNA, 15 bp, Homo sapiens
tgtcttatccgctgt

SEQ ID NO: 615020 - DNA, 15 bp, Homo sapiens
gtcttatccgctgtc

SEQ ID NO: 615021 - DNA, 15 bp, Homo sapiens
tcttatccgctgtct

SEQ ID NO: 615022 - DNA, 15 bp, Homo sapiens
cttatccgctgtctg

SEQ ID NO: 615023 - DNA, 15 bp, Homo sapiens
ttatccgctgtctgg

SEQ ID NO: 615024 - DNA, 15 bp, Homo sapiens
tatccgctgtctggg

SEQ ID NO: 615025 - DNA, 15 bp, Homo sapiens
atccgctgtctgggt

SEQ ID NO: 615026 - DNA, 15 bp, Homo sapiens
tccgctgtctgggtc

SEQ ID NO: 615027 - DNA, 15 bp, Homo sapiens
ccgctgtctgggtct

SEQ ID NO: 615028 - DNA, 15 bp, Homo sapiens
cgctgtctgggtctg

SEQ ID NO: 615029 - DNA, 15 bp, Homo sapiens
gctgtctgggtctgc

SEQ ID NO: 615030 - DNA, 15 bp, Homo sapiens
ctgtctgggtctgct

SEQ ID NO: 615031 - DNA, 15 bp, Homo sapiens
tgtctgggtctgctc

SEQ ID NO: 615032 - DNA, 15 bp, Homo sapiens
gtctgggtctgctct

SEQ ID NO: 615033 - DNA, 15 bp, Homo sapiens
tctgggtctgctcta

SEQ ID NO: 615034 - DNA, 15 bp, Homo sapiens
ctgggtctgctctag

SEQ ID NO: 615035 - DNA, 15 bp, Homo sapiens
tgggtctgctctagc

SEQ ID NO: 615036 - DNA, 15 bp, Homo sapiens
gggtctgctctagct

SEQ ID NO: 615037 - DNA, 15 bp, Homo sapiens
ggtctgctctagctc

SEQ ID NO: 615038 - DNA, 15 bp, Homo sapiens
gtctgctctagctcc

SEQ ID NO: 615039 - DNA, 15 bp, Homo sapiens
tctgctctagctcca

SEQ ID NO: 615040 - DNA, 15 bp, Homo sapiens
ctgctctagctccag

SEQ ID NO: 615041 - DNA, 15 bp, Homo sapiens
tgctctagctccagg

SEQ ID NO: 615042 - DNA, 15 bp, Homo sapiens
gctctagctccaggc

SEQ ID NO: 615043 - DNA, 15 bp, Homo sapiens
ctctagctccaggct

SEQ ID NO: 615044 - DNA, 15 bp, Homo sapiens
tctagctccaggctt

SEQ ID NO: 615045 - DNA, 15 bp, Homo sapiens
ctagctccaggctta

SEQ ID NO: 615046 - DNA, 15 bp, Homo sapiens
tagctccaggcttag

SEQ ID NO: 615047 - DNA, 15 bp, Homo sapiens
agctccaggcttaga

SEQ ID NO: 615048 - DNA, 15 bp, Homo sapiens
gctccaggcttagaa

SEQ ID NO: 615049 - DNA, 15 bp, Homo sapiens
ctccaggcttagaac

SEQ ID NO: 615050 - DNA, 15 bp, Homo sapiens
tccaggcttagaacc

SEQ ID NO: 615051 - DNA, 15 bp, Homo sapiens
ccaggcttagaaccc

SEQ ID NO: 615052 - DNA, 15 bp, Homo sapiens
caggcttagaacccc

SEQ ID NO: 615053 - DNA, 15 bp, Homo sapiens
aggcttagaacccct

SEQ ID NO: 615054 - DNA, 15 bp, Homo sapiens
ggcttagaacccctg

SEQ ID NO: 615055 - DNA, 15 bp, Homo sapiens
gcttagaacccctgc

SEQ ID NO: 615056 - DNA, 15 bp, Homo sapiens
cttagaacccctgcc

SEQ ID NO: 615057 - DNA, 15 bp, Homo sapiens
ttagaacccctgcca

SEQ ID NO: 615058 - DNA, 15 bp, Homo sapiens
tagaacccctgccac

SEQ ID NO: 615059 - DNA, 15 bp, Homo sapiens
agaacccctgccaca

SEQ ID NO: 615060 - DNA, 15 bp, Homo sapiens
gaacccctgccacac

SEQ ID NO: 615061 - DNA, 15 bp, Homo sapiens
aacccctgccacacg

SEQ ID NO: 615062 - DNA, 15 bp, Homo sapiens
acccctgccacacga

SEQ ID NO: 615063 - DNA, 15 bp, Homo sapiens
cccctgccacacgac

SEQ ID NO: 615064 - DNA, 15 bp, Homo sapiens
ccctgccacacgact

SEQ ID NO: 615065 - DNA, 15 bp, Homo sapiens
cctgccacacgactc

SEQ ID NO: 615066 - DNA, 15 bp, Homo sapiens
ctgccacacgactcc

SEQ ID NO: 615067 - DNA, 15 bp, Homo sapiens
tgccacacgactcca

SEQ ID NO: 615068 - DNA, 15 bp, Homo sapiens
gccacacgactccac

SEQ ID NO: 615069 - DNA, 15 bp, Homo sapiens
ccacacgactccaca

SEQ ID NO: 615070 - DNA, 15 bp, Homo sapiens
cacacgactccacag

SEQ ID NO: 615071 - DNA, 15 bp, Homo sapiens
acacgactccacagc

SEQ ID NO: 615072 - DNA, 15 bp, Homo sapiens
cacgactccacagct

SEQ ID NO: 615073 - DNA, 15 bp, Homo sapiens
acgactccacagctc

SEQ ID NO: 615074 - DNA, 15 bp, Homo sapiens
cgactccacagctcg

SEQ ID NO: 615075 - DNA, 15 bp, Homo sapiens
gactccacagctcgg

SEQ ID NO: 615076 - DNA, 15 bp, Homo sapiens
actccacagctcggt

SEQ ID NO: 615077 - DNA, 15 bp, Homo sapiens
ctccacagctcggtt

SEQ ID NO: 615078 - DNA, 15 bp, Homo sapiens
tccacagctcggttg

SEQ ID NO: 615079 - DNA, 15 bp, Homo sapiens
ccacagctcggttgg

SEQ ID NO: 615080 - DNA, 15 bp, Homo sapiens
cacagctcggttggc

SEQ ID NO: 615081 - DNA, 15 bp, Homo sapiens
acagctcggttggca

SEQ ID NO: 615082 - DNA, 15 bp, Homo sapiens
cagctcggttggcac

SEQ ID NO: 615083 - DNA, 15 bp, Homo sapiens
agctcggttggcacc

SEQ ID NO: 615084 - DNA, 15 bp, Homo sapiens
gctcggttggcaccc

SEQ ID NO: 615085 - DNA, 15 bp, Homo sapiens
ctcggttggcaccct

SEQ ID NO: 615086 - DNA, 15 bp, Homo sapiens
tcggttggcaccctt

SEQ ID NO: 615087 - DNA, 15 bp, Homo sapiens
cggttggcacccttt

SEQ ID NO: 615088 - DNA, 15 bp, Homo sapiens
ggttggcaccctttc

SEQ ID NO: 615089 - DNA, 15 bp, Homo sapiens
gttggcaccctttcc

SEQ ID NO: 615090 - DNA, 15 bp, Homo sapiens
ttggcaccctttccc

SEQ ID NO: 615091 - DNA, 15 bp, Homo sapiens
tggcaccctttccct

SEQ ID NO: 615092 - DNA, 15 bp, Homo sapiens
ggcaccctttccctc

SEQ ID NO: 615093 - DNA, 15 bp, Homo sapiens
gcaccctttccctcc

SEQ ID NO: 615094 - DNA, 15 bp, Homo sapiens
caccctttccctcct

SEQ ID NO: 615095 - DNA, 15 bp, Homo sapiens
accctttccctcctc

SEQ ID NO: 615096 - DNA, 15 bp, Homo sapiens
ccctttccctcctcc

SEQ ID NO: 615097 - DNA, 15 bp, Homo sapiens
cctttccctcctccg

SEQ ID NO: 615098 - DNA, 15 bp, Homo sapiens
ctttccctcctccga

SEQ ID NO: 615099 - DNA, 15 bp, Homo sapiens
tttccctcctccgac

SEQ ID NO: 615100 - DNA, 15 bp, Homo sapiens
ttccctcctccgact

SEQ ID NO: 615101 - DNA, 15 bp, Homo sapiens
tccctcctccgactt

SEQ ID NO: 615102 - DNA, 15 bp, Homo sapiens
ccctcctccgacttc

SEQ ID NO: 615103 - DNA, 15 bp, Homo sapiens
cctcctccgacttct

SEQ ID NO: 615104 - DNA, 15 bp, Homo sapiens
ctcctccgacttctg

SEQ ID NO: 615105 - DNA, 15 bp, Homo sapiens
tcctccgacttctgc

SEQ ID NO: 615106 - DNA, 15 bp, Homo sapiens
cctccgacttctgct

SEQ ID NO: 615107 - DNA, 15 bp, Homo sapiens
ctccgacttctgctg

SEQ ID NO: 615108 - DNA, 15 bp, Homo sapiens
tccgacttctgctgc

SEQ ID NO: 615109 - DNA, 15 bp, Homo sapiens
ccgacttctgctgcc

SEQ ID NO: 615110 - DNA, 15 bp, Homo sapiens
cgacttctgctgcct

SEQ ID NO: 615111 - DNA, 15 bp, Homo sapiens
gacttctgctgcctc

SEQ ID NO: 615112 - DNA, 15 bp, Homo sapiens
acttctgctgcctcg

SEQ ID NO: 615113 - DNA, 15 bp, Homo sapiens
cttctgctgcctcga

SEQ ID NO: 615114 - DNA, 15 bp, Homo sapiens
ttctgctgcctcgag

SEQ ID NO: 615115 - DNA, 15 bp, Homo sapiens
tctgctgcctcgagc

SEQ ID NO: 615116 - DNA, 15 bp, Homo sapiens
ctgctgcctcgagct

SEQ ID NO: 615117 - DNA, 15 bp, Homo sapiens
tgctgcctcgagctt

SEQ ID NO: 615118 - DNA, 15 bp, Homo sapiens
gctgcctcgagcttg

SEQ ID NO: 615119 - DNA, 15 bp, Homo sapiens
ctgcctcgagcttgg

SEQ ID NO: 615120 - DNA, 15 bp, Homo sapiens
tgcctcgagcttggt

SEQ ID NO: 615121 - DNA, 15 bp, Homo sapiens
gcctcgagcttggtt

SEQ ID NO: 615122 - DNA, 15 bp, Homo sapiens
cctcgagcttggtta

SEQ ID NO: 615123 - DNA, 15 bp, Homo sapiens
ctcgagcttggttag

SEQ ID NO: 615124 - DNA, 15 bp, Homo sapiens
tcgagcttggttagc

SEQ ID NO: 615125 - DNA, 15 bp, Homo sapiens
cgagcttggttagcc

SEQ ID NO: 615126 - DNA, 15 bp, Homo sapiens
gagcttggttagcca

SEQ ID NO: 615127 - DNA, 15 bp, Homo sapiens
agcttggttagccat

SEQ ID NO: 615128 - DNA, 15 bp, Homo sapiens
gcttggttagccatc

SEQ ID NO: 615129 - DNA, 15 bp, Homo sapiens
cttggttagccatcc

SEQ ID NO: 615130 - DNA, 15 bp, Homo sapiens
ttggttagccatccc

SEQ ID NO: 615131 - DNA, 15 bp, Homo sapiens
tggttagccatcccc

SEQ ID NO: 615132 - DNA, 15 bp, Homo sapiens
ggttagccatccccc

SEQ ID NO: 615133 - DNA, 15 bp, Homo sapiens
gttagccatccccct

SEQ ID NO: 615134 - DNA, 15 bp, Homo sapiens
ttagccatccccctg

SEQ ID NO: 615135 - DNA, 15 bp, Homo sapiens
tagccatccccctgc

SEQ ID NO: 615136 - DNA, 15 bp, Homo sapiens
agccatccccctgcc

SEQ ID NO: 615137 - DNA, 15 bp, Homo sapiens
gccatccccctgccc

SEQ ID NO: 615138 - DNA, 15 bp, Homo sapiens
ccatccccctgcccc

SEQ ID NO: 615139 - DNA, 15 bp, Homo sapiens
catccccctgcccct

SEQ ID NO: 615140 - DNA, 15 bp, Homo sapiens
atccccctgcccctg

SEQ ID NO: 615141 - DNA, 15 bp, Homo sapiens
tccccctgcccctgc

SEQ ID NO: 615142 - DNA, 15 bp, Homo sapiens
ccccctgcccctgcc

SEQ ID NO: 615143 - DNA, 15 bp, Homo sapiens
cccctgcccctgcct

SEQ ID NO: 615144 - DNA, 15 bp, Homo sapiens
ccctgcccctgcctc

SEQ ID NO: 615145 - DNA, 15 bp, Homo sapiens
cctgcccctgcctca

SEQ ID NO: 615146 - DNA, 15 bp, Homo sapiens
ctgcccctgcctcat

SEQ ID NO: 615147 - DNA, 15 bp, Homo sapiens
tgcccctgcctcatc

SEQ ID NO: 615148 - DNA, 15 bp, Homo sapiens
gcccctgcctcatcc

SEQ ID NO: 615149 - DNA, 15 bp, Homo sapiens
cccctgcctcatcct

SEQ ID NO: 615150 - DNA, 15 bp, Homo sapiens
ccctgcctcatcctc

SEQ ID NO: 615151 - DNA, 15 bp, Homo sapiens
cctgcctcatcctca

SEQ ID NO: 615152 - DNA, 15 bp, Homo sapiens
ctgcctcatcctcag

SEQ ID NO: 615153 - DNA, 15 bp, Homo sapiens
tgcctcatcctcagc

SEQ ID NO: 615154 - DNA, 15 bp, Homo sapiens
gcctcatcctcagct

SEQ ID NO: 615155 - DNA, 15 bp, Homo sapiens
cctcatcctcagctc

SEQ ID NO: 615156 - DNA, 15 bp, Homo sapiens
ctcatcctcagctcc

SEQ ID NO: 615157 - DNA, 15 bp, Homo sapiens
tcatcctcagctcca

SEQ ID NO: 615158 - DNA, 15 bp, Homo sapiens
catcctcagctccag

SEQ ID NO: 615159 - DNA, 15 bp, Homo sapiens
atcctcagctccagt

SEQ ID NO: 615160 - DNA, 15 bp, Homo sapiens
tcctcagctccagtt

SEQ ID NO: 615161 - DNA, 15 bp, Homo sapiens
cctcagctccagttc

SEQ ID NO: 615162 - DNA, 15 bp, Homo sapiens
ctcagctccagttcc

SEQ ID NO: 615163 - DNA, 15 bp, Homo sapiens
tcagctccagttcct

SEQ ID NO: 615164 - DNA, 15 bp, Homo sapiens
cagctccagttcctt

SEQ ID NO: 615165 - DNA, 15 bp, Homo sapiens
agctccagttccttg

SEQ ID NO: 615166 - DNA, 15 bp, Homo sapiens
gctccagttccttgc

SEQ ID NO: 615167 - DNA, 15 bp, Homo sapiens
ctccagttccttgct

SEQ ID NO: 615168 - DNA, 15 bp, Homo sapiens
tccagttccttgctc

SEQ ID NO: 615169 - DNA, 15 bp, Homo sapiens
ccagttccttgctca

SEQ ID NO: 615170 - DNA, 15 bp, Homo sapiens
cagttccttgctcag

SEQ ID NO: 615171 - DNA, 15 bp, Homo sapiens
agttccttgctcagg

SEQ ID NO: 615172 - DNA, 15 bp, Homo sapiens
gttccttgctcaggc

SEQ ID NO: 615173 - DNA, 15 bp, Homo sapiens
ttccttgctcaggct

SEQ ID NO: 615174 - DNA, 15 bp, Homo sapiens
tccttgctcaggctg

SEQ ID NO: 615175 - DNA, 15 bp, Homo sapiens
ccttgctcaggctgc

SEQ ID NO: 615176 - DNA, 15 bp, Homo sapiens
cttgctcaggctgca

SEQ ID NO: 615177 - DNA, 15 bp, Homo sapiens
ttgctcaggctgcag

SEQ ID NO: 615178 - DNA, 15 bp, Homo sapiens
tgctcaggctgcagc

SEQ ID NO: 615179 - DNA, 15 bp, Homo sapiens
gctcaggctgcagca

SEQ ID NO: 615180 - DNA, 15 bp, Homo sapiens
ctcaggctgcagcag

SEQ ID NO: 615181 - DNA, 15 bp, Homo sapiens
tcaggctgcagcagt

SEQ ID NO: 615182 - DNA, 15 bp, Homo sapiens
caggctgcagcagtc

SEQ ID NO: 615183 - DNA, 15 bp, Homo sapiens
aggctgcagcagtct

SEQ ID NO: 615184 - DNA, 15 bp, Homo sapiens
ggctgcagcagtctc

SEQ ID NO: 615185 - DNA, 15 bp, Homo sapiens
gctgcagcagtctcc

SEQ ID NO: 615186 - DNA, 15 bp, Homo sapiens
ctgcagcagtctcca

SEQ ID NO: 615187 - DNA, 15 bp, Homo sapiens
tgcagcagtctccat

SEQ ID NO: 615188 - DNA, 15 bp, Homo sapiens
gcagcagtctccatc

SEQ ID NO: 615189 - DNA, 15 bp, Homo sapiens
cagcagtctccatcc

SEQ ID NO: 615190 - DNA, 15 bp, Homo sapiens
agcagtctccatccc

SEQ ID NO: 615191 - DNA, 15 bp, Homo sapiens
gcagtctccatcccc

SEQ ID NO: 615192 - DNA, 15 bp, Homo sapiens
cagtctccatcccct

SEQ ID NO: 615193 - DNA, 15 bp, Homo sapiens
agtctccatcccctg

SEQ ID NO: 615194 - DNA, 15 bp, Homo sapiens
gtctccatcccctgt

SEQ ID NO: 615195 - DNA, 15 bp, Homo sapiens
tctccatcccctgtg

SEQ ID NO: 615196 - DNA, 15 bp, Homo sapiens
ctccatcccctgtgc

SEQ ID NO: 615197 - DNA, 15 bp, Homo sapiens
tccatcccctgtgca

SEQ ID NO: 615198 - DNA, 15 bp, Homo sapiens
ccatcccctgtgcag

SEQ ID NO: 615199 - DNA, 15 bp, Homo sapiens
catcccctgtgcaga

SEQ ID NO: 615200 - DNA, 15 bp, Homo sapiens
atcccctgtgcagac

SEQ ID NO: 615201 - DNA, 15 bp, Homo sapiens
tcccctgtgcagaca

SEQ ID NO: 615202 - DNA, 15 bp, Homo sapiens
cccctgtgcagacac

SEQ ID NO: 615203 - DNA, 15 bp, Homo sapiens
ccctgtgcagacact

SEQ ID NO: 615204 - DNA, 15 bp, Homo sapiens
cctgtgcagacactg

SEQ ID NO: 615205 - DNA, 15 bp, Homo sapiens
ctgtgcagacactgc

SEQ ID NO: 615206 - DNA, 15 bp, Homo sapiens
tgtgcagacactgcc

SEQ ID NO: 615207 - DNA, 15 bp, Homo sapiens
gtgcagacactgccg

SEQ ID NO: 615208 - DNA, 15 bp, Homo sapiens
tgcagacactgccgt

SEQ ID NO: 615209 - DNA, 15 bp, Homo sapiens
gcagacactgccgtt

SEQ ID NO: 615210 - DNA, 15 bp, Homo sapiens
cagacactgccgttc

SEQ ID NO: 615211 - DNA, 15 bp, Homo sapiens
agacactgccgttcc

SEQ ID NO: 615212 - DNA, 15 bp, Homo sapiens
gacactgccgttcct

SEQ ID NO: 615213 - DNA, 15 bp, Homo sapiens
acactgccgttcctc

SEQ ID NO: 615214 - DNA, 15 bp, Homo sapiens
cactgccgttcctcc

SEQ ID NO: 615215 - DNA, 15 bp, Homo sapiens
actgccgttcctcca

SEQ ID NO: 615216 - DNA, 15 bp, Homo sapiens
ctgccgttcctccac

SEQ ID NO: 615217 - DNA, 15 bp, Homo sapiens
tgccgttcctccacg

SEQ ID NO: 615218 - DNA, 15 bp, Homo sapiens
gccgttcctccacgg

SEQ ID NO: 615219 - DNA, 15 bp, Homo sapiens
ccgttcctccacggc

SEQ ID NO: 615220 - DNA, 15 bp, Homo sapiens
cgttcctccacggcc

SEQ ID NO: 615221 - DNA, 15 bp, Homo sapiens
gttcctccacggccc

SEQ ID NO: 615222 - DNA, 15 bp, Homo sapiens
ttcctccacggccca

SEQ ID NO: 615223 - DNA, 15 bp, Homo sapiens
tcctccacggcccag

SEQ ID NO: 615224 - DNA, 15 bp, Homo sapiens
cctccacggcccagt

SEQ ID NO: 615225 - DNA, 15 bp, Homo sapiens
ctccacggcccagta

SEQ ID NO: 615226 - DNA, 15 bp, Homo sapiens
tccacggcccagtat

SEQ ID NO: 615227 - DNA, 15 bp, Homo sapiens
ccacggcccagtatc

SEQ ID NO: 615228 - DNA, 15 bp, Homo sapiens
cacggcccagtatca

SEQ ID NO: 615229 - DNA, 15 bp, Homo sapiens
acggcccagtatcag

SEQ ID NO: 615230 - DNA, 15 bp, Homo sapiens
cggcccagtatcagg

SEQ ID NO: 615231 - DNA, 15 bp, Homo sapiens
ggcccagtatcaggc

SEQ ID NO: 615232 - DNA, 15 bp, Homo sapiens
gcccagtatcaggct

SEQ ID NO: 615233 - DNA, 15 bp, Homo sapiens
cccagtatcaggctt

SEQ ID NO: 615234 - DNA, 15 bp, Homo sapiens
ccagtatcaggcttt

SEQ ID NO: 615235 - DNA, 15 bp, Homo sapiens
cagtatcaggctttc

SEQ ID NO: 615236 - DNA, 15 bp, Homo sapiens
agtatcaggctttcc

SEQ ID NO: 615237 - DNA, 15 bp, Homo sapiens
gtatcaggctttccc

SEQ ID NO: 615238 - DNA, 15 bp, Homo sapiens
tatcaggctttccct

SEQ ID NO: 615239 - DNA, 15 bp, Homo sapiens
atcaggctttccctg

SEQ ID NO: 615240 - DNA, 15 bp, Homo sapiens
tcaggctttccctgg

SEQ ID NO: 615241 - DNA, 15 bp, Homo sapiens
caggctttccctggg

SEQ ID NO: 615242 - DNA, 15 bp, Homo sapiens
aggctttccctgggc

SEQ ID NO: 615243 - DNA, 15 bp, Homo sapiens
ggctttccctgggcc

SEQ ID NO: 615244 - DNA, 15 bp, Homo sapiens
gctttccctgggcct

SEQ ID NO: 615245 - DNA, 15 bp, Homo sapiens
ctttccctgggcctc

SEQ ID NO: 615246 - DNA, 15 bp, Homo sapiens
tttccctgggcctct

SEQ ID NO: 615247 - DNA, 15 bp, Homo sapiens
ttccctgggcctctc

SEQ ID NO: 615248 - DNA, 15 bp, Homo sapiens
tccctgggcctctcc

SEQ ID NO: 615249 - DNA, 15 bp, Homo sapiens
ccctgggcctctcct

SEQ ID NO: 615250 - DNA, 15 bp, Homo sapiens
cctgggcctctcctc

SEQ ID NO: 615251 - DNA, 15 bp, Homo sapiens
ctgggcctctcctct

SEQ ID NO: 615252 - DNA, 15 bp, Homo sapiens
tgggcctctcctctc

SEQ ID NO: 615253 - DNA, 15 bp, Homo sapiens
gggcctctcctctct

SEQ ID NO: 615254 - DNA, 15 bp, Homo sapiens
ggcctctcctctctc

SEQ ID NO: 615255 - DNA, 15 bp, Homo sapiens
gcctctcctctctcc

SEQ ID NO: 615256 - DNA, 15 bp, Homo sapiens
cctctcctctctcct

SEQ ID NO: 615257 - DNA, 15 bp, Homo sapiens
ctctcctctctcctg

SEQ ID NO: 615258 - DNA, 15 bp, Homo sapiens
tctcctctctcctgg

SEQ ID NO: 615259 - DNA, 15 bp, Homo sapiens
ctcctctctcctggc

SEQ ID NO: 615260 - DNA, 15 bp, Homo sapiens
tcctctctcctggcc

SEQ ID NO: 615261 - DNA, 15 bp, Homo sapiens
cctctctcctggccc

SEQ ID NO: 615262 - DNA, 15 bp, Homo sapiens
ctctctcctggccca

SEQ ID NO: 615263 - DNA, 15 bp, Homo sapiens
tctctcctggcccat

SEQ ID NO: 615264 - DNA, 15 bp, Homo sapiens
ctctcctggcccatc

SEQ ID NO: 615265 - DNA, 15 bp, Homo sapiens
tctcctggcccatct

SEQ ID NO: 615266 - DNA, 15 bp, Homo sapiens
ctcctggcccatctc

SEQ ID NO: 615267 - DNA, 15 bp, Homo sapiens
tcctggcccatctcc

SEQ ID NO: 615268 - DNA, 15 bp, Homo sapiens
cctggcccatctccc

SEQ ID NO: 615269 - DNA, 15 bp, Homo sapiens
ctggcccatctccca

SEQ ID NO: 615270 - DNA, 15 bp, Homo sapiens
tggcccatctcccat

SEQ ID NO: 615271 - DNA, 15 bp, Homo sapiens
ggcccatctcccatc

SEQ ID NO: 615272 - DNA, 15 bp, Homo sapiens
gcccatctcccatca

SEQ ID NO: 615273 - DNA, 15 bp, Homo sapiens
cccatctcccatcat

SEQ ID NO: 615274 - DNA, 15 bp, Homo sapiens
ccatctcccatcatc

SEQ ID NO: 615275 - DNA, 15 bp, Homo sapiens
catctcccatcatcc

SEQ ID NO: 615276 - DNA, 15 bp, Homo sapiens
atctcccatcatcca

SEQ ID NO: 615277 - DNA, 15 bp, Homo sapiens
tctcccatcatccat

SEQ ID NO: 615278 - DNA, 15 bp, Homo sapiens
ctcccatcatccatc

SEQ ID NO: 615279 - DNA, 15 bp, Homo sapiens
tcccatcatccatct

SEQ ID NO: 615280 - DNA, 15 bp, Homo sapiens
cccatcatccatctc

SEQ ID NO: 615281 - DNA, 15 bp, Homo sapiens
ccatcatccatctct

SEQ ID NO: 615282 - DNA, 15 bp, Homo sapiens
catcatccatctctg

SEQ ID NO: 615283 - DNA, 15 bp, Homo sapiens
atcatccatctctgc

SEQ ID NO: 615284 - DNA, 15 bp, Homo sapiens
tcatccatctctgcc

SEQ ID NO: 615285 - DNA, 15 bp, Homo sapiens
catccatctctgcct

SEQ ID NO: 615286 - DNA, 15 bp, Homo sapiens
atccatctctgcctg

SEQ ID NO: 615287 - DNA, 15 bp, Homo sapiens
tccatctctgcctgg

SEQ ID NO: 615288 - DNA, 15 bp, Homo sapiens
ccatctctgcctggc

SEQ ID NO: 615289 - DNA, 15 bp, Homo sapiens
catctctgcctggcc

SEQ ID NO: 615290 - DNA, 15 bp, Homo sapiens
atctctgcctggccc

SEQ ID NO: 615291 - DNA, 15 bp, Homo sapiens
tctctgcctggccca

SEQ ID NO: 615292 - DNA, 15 bp, Homo sapiens
ctctgcctggcccag

SEQ ID NO: 615293 - DNA, 15 bp, Homo sapiens
tctgcctggcccagg

SEQ ID NO: 615294 - DNA, 15 bp, Homo sapiens
ctgcctggcccaggc

SEQ ID NO: 615295 - DNA, 15 bp, Homo sapiens
tgcctggcccaggcc

SEQ ID NO: 615296 - DNA, 15 bp, Homo sapiens
gcctggcccaggccc

SEQ ID NO: 615297 - DNA, 15 bp, Homo sapiens
cctggcccaggccct

SEQ ID NO: 615298 - DNA, 15 bp, Homo sapiens
ctggcccaggccctt

SEQ ID NO: 615299 - DNA, 15 bp, Homo sapiens
tggcccaggcccttt

SEQ ID NO: 615300 - DNA, 15 bp, Homo sapiens
ggcccaggccctttg

SEQ ID NO: 615301 - DNA, 15 bp, Homo sapiens
gcccaggccctttgg

SEQ ID NO: 615302 - DNA, 15 bp, Homo sapiens
cccaggccctttggc

SEQ ID NO: 615303 - DNA, 15 bp, Homo sapiens
ccaggccctttggca

SEQ ID NO: 615304 - DNA, 15 bp, Homo sapiens
caggccctttggcac

SEQ ID NO: 615305 - DNA, 15 bp, Homo sapiens
aggccctttggcacc

SEQ ID NO: 615306 - DNA, 15 bp, Homo sapiens
ggccctttggcacca

SEQ ID NO: 615307 - DNA, 15 bp, Homo sapiens
gccctttggcaccaa

SEQ ID NO: 615308 - DNA, 15 bp, Homo sapiens
ccctttggcaccaag

SEQ ID NO: 615309 - DNA, 15 bp, Homo sapiens
cctttggcaccaagc

SEQ ID NO: 615310 - DNA, 15 bp, Homo sapiens
ctttggcaccaagca

SEQ ID NO: 615311 - DNA, 15 bp, Homo sapiens
tttggcaccaagcag

SEQ ID NO: 615312 - DNA, 15 bp, Homo sapiens
ttggcaccaagcagg

SEQ ID NO: 615313 - DNA, 15 bp, Homo sapiens
tggcaccaagcaggc

SEQ ID NO: 615314 - DNA, 15 bp, Homo sapiens
ggcaccaagcaggct

SEQ ID NO: 615315 - DNA, 15 bp, Homo sapiens
gcaccaagcaggctg

SEQ ID NO: 615316 - DNA, 15 bp, Homo sapiens
caccaagcaggctga

SEQ ID NO: 615317 - DNA, 15 bp, Homo sapiens
accaagcaggctgac

SEQ ID NO: 615318 - DNA, 15 bp, Homo sapiens
ccaagcaggctgact

SEQ ID NO: 615319 - DNA, 15 bp, Homo sapiens
caagcaggctgactc

SEQ ID NO: 615320 - DNA, 15 bp, Homo sapiens
aagcaggctgactct

SEQ ID NO: 615321 - DNA, 15 bp, Homo sapiens
agcaggctgactctt

SEQ ID NO: 615322 - DNA, 15 bp, Homo sapiens
gcaggctgactcttg

SEQ ID NO: 615323 - DNA, 15 bp, Homo sapiens
caggctgactcttgt

SEQ ID NO: 615324 - DNA, 15 bp, Homo sapiens
aggctgactcttgtc

SEQ ID NO: 615325 - DNA, 15 bp, Homo sapiens
ggctgactcttgtca

SEQ ID NO: 615326 - DNA, 15 bp, Homo sapiens
gctgactcttgtcac

SEQ ID NO: 615327 - DNA, 15 bp, Homo sapiens
ctgactcttgtcact

SEQ ID NO: 615328 - DNA, 15 bp, Homo sapiens
tgactcttgtcactg

SEQ ID NO: 615329 - DNA, 15 bp, Homo sapiens
gactcttgtcactgg

SEQ ID NO: 615330 - DNA, 15 bp, Homo sapiens
actcttgtcactggc

SEQ ID NO: 615331 - DNA, 15 bp, Homo sapiens
ctcttgtcactggct

SEQ ID NO: 615332 - DNA, 15 bp, Homo sapiens
tcttgtcactggcta

SEQ ID NO: 615333 - DNA, 15 bp, Homo sapiens
cttgtcactggctaa

SEQ ID NO: 615334 - DNA, 15 bp, Homo sapiens
ttgtcactggctaat

SEQ ID NO: 615335 - DNA, 15 bp, Homo sapiens
tgtcactggctaatc

SEQ ID NO: 615336 - DNA, 15 bp, Homo sapiens
gtcactggctaatct

SEQ ID NO: 615337 - DNA, 15 bp, Homo sapiens
tcactggctaatctg

SEQ ID NO: 615338 - DNA, 15 bp, Homo sapiens
cactggctaatctgt

SEQ ID NO: 615339 - DNA, 15 bp, Homo sapiens
actggctaatctgtt

SEQ ID NO: 615340 - DNA, 15 bp, Homo sapiens
ctggctaatctgttc

SEQ ID NO: 615341 - DNA, 15 bp, Homo sapiens
tggctaatctgttct

SEQ ID NO: 615342 - DNA, 15 bp, Homo sapiens
ggctaatctgttctg

SEQ ID NO: 615343 - DNA, 15 bp, Homo sapiens
gctaatctgttctgt

SEQ ID NO: 615344 - DNA, 15 bp, Homo sapiens
ctaatctgttctgtg

SEQ ID NO: 615345 - DNA, 15 bp, Homo sapiens
taatctgttctgtgg

SEQ ID NO: 615346 - DNA, 15 bp, Homo sapiens
aatctgttctgtggt

SEQ ID NO: 615347 - DNA, 15 bp, Homo sapiens
atctgttctgtggta

SEQ ID NO: 615348 - DNA, 15 bp, Homo sapiens
tctgttctgtggtac

SEQ ID NO: 615349 - DNA, 15 bp, Homo sapiens
ctgttctgtggtaca

SEQ ID NO: 615350 - DNA, 15 bp, Homo sapiens
tgttctgtggtacat

SEQ ID NO: 615351 - DNA, 15 bp, Homo sapiens
gttctgtggtacatt

SEQ ID NO: 615352 - DNA, 15 bp, Homo sapiens
ttctgtggtacattt

SEQ ID NO: 615353 - DNA, 15 bp, Homo sapiens
tctgtggtacatttt

SEQ ID NO: 615354 - DNA, 15 bp, Homo sapiens
ctgtggtacattttc

SEQ ID NO: 615355 - DNA, 15 bp, Homo sapiens
tgtggtacattttct

SEQ ID NO: 615356 - DNA, 15 bp, Homo sapiens
gtggtacattttctc

SEQ ID NO: 615357 - DNA, 15 bp, Homo sapiens
tggtacattttctct

SEQ ID NO: 615358 - DNA, 15 bp, Homo sapiens
ggtacattttctctc

SEQ ID NO: 615359 - DNA, 15 bp, Homo sapiens
gtacattttctctcc

SEQ ID NO: 615360 - DNA, 15 bp, Homo sapiens
tacattttctctcct

SEQ ID NO: 615361 - DNA, 15 bp, Homo sapiens
acattttctctcctc

SEQ ID NO: 615362 - DNA, 15 bp, Homo sapiens
cattttctctcctca

SEQ ID NO: 615363 - DNA, 15 bp, Homo sapiens
attttctctcctcac

SEQ ID NO: 615364 - DNA, 15 bp, Homo sapiens
ttttctctcctcacc

SEQ ID NO: 615365 - DNA, 15 bp, Homo sapiens
tttctctcctcaccc

SEQ ID NO: 615366 - DNA, 15 bp, Homo sapiens
ttctctcctcaccct

SEQ ID NO: 615367 - DNA, 15 bp, Homo sapiens
tctctcctcaccctc

SEQ ID NO: 615368 - DNA, 15 bp, Homo sapiens
ctctcctcaccctcc

SEQ ID NO: 615369 - DNA, 15 bp, Homo sapiens
tctcctcaccctccc

SEQ ID NO: 615370 - DNA, 15 bp, Homo sapiens
ctcctcaccctccca

SEQ ID NO: 615371 - DNA, 15 bp, Homo sapiens
tcctcaccctcccat

SEQ ID NO: 615372 - DNA, 15 bp, Homo sapiens
cctcaccctcccata

SEQ ID NO: 615373 - DNA, 15 bp, Homo sapiens
ctcaccctcccatat

SEQ ID NO: 615374 - DNA, 15 bp, Homo sapiens
tcaccctcccatatc

SEQ ID NO: 615375 - DNA, 15 bp, Homo sapiens
caccctcccatatca

SEQ ID NO: 615376 - DNA, 15 bp, Homo sapiens
accctcccatatcaa

SEQ ID NO: 615377 - DNA, 15 bp, Homo sapiens
ccctcccatatcaat

SEQ ID NO: 615378 - DNA, 15 bp, Homo sapiens
cctcccatatcaatt

SEQ ID NO: 615379 - DNA, 15 bp, Homo sapiens
ctcccatatcaattc

SEQ ID NO: 615380 - DNA, 15 bp, Homo sapiens
tcccatatcaattcc

SEQ ID NO: 615381 - DNA, 15 bp, Homo sapiens
cccatatcaattcct

SEQ ID NO: 615382 - DNA, 15 bp, Homo sapiens
ccatatcaattcctc

SEQ ID NO: 615383 - DNA, 15 bp, Homo sapiens
catatcaattcctcg

SEQ ID NO: 615384 - DNA, 15 bp, Homo sapiens
atatcaattcctcga

SEQ ID NO: 615385 - DNA, 15 bp, Homo sapiens
tatcaattcctcgaa

SEQ ID NO: 615386 - DNA, 15 bp, Homo sapiens
atcaattcctcgaag

SEQ ID NO: 615387 - DNA, 15 bp, Homo sapiens
tcaattcctcgaagg

SEQ ID NO: 615388 - DNA, 15 bp, Homo sapiens
caattcctcgaaggc

SEQ ID NO: 615389 - DNA, 15 bp, Homo sapiens
aattcctcgaaggca

SEQ ID NO: 615390 - DNA, 15 bp, Homo sapiens
attcctcgaaggcag

SEQ ID NO: 615391 - DNA, 15 bp, Homo sapiens
ttcctcgaaggcagg

SEQ ID NO: 615392 - DNA, 15 bp, Homo sapiens
tcctcgaaggcaggg

SEQ ID NO: 615393 - DNA, 15 bp, Homo sapiens
cctcgaaggcagggc

SEQ ID NO: 615394 - DNA, 15 bp, Homo sapiens
ctcgaaggcagggcc

SEQ ID NO: 615395 - DNA, 15 bp, Homo sapiens
tcgaaggcagggccg

SEQ ID NO: 615396 - DNA, 15 bp, Homo sapiens
cgaaggcagggccga

SEQ ID NO: 615397 - DNA, 15 bp, Homo sapiens
gaaggcagggccgat

SEQ ID NO: 615398 - DNA, 15 bp, Homo sapiens
aaggcagggccgatc

SEQ ID NO: 615399 - DNA, 15 bp, Homo sapiens
aggcagggccgatct

SEQ ID NO: 615400 - DNA, 15 bp, Homo sapiens
ggcagggccgatctg

SEQ ID NO: 615401 - DNA, 15 bp, Homo sapiens
gcagggccgatctgg

SEQ ID NO: 615402 - DNA, 15 bp, Homo sapiens
cagggccgatctgga

SEQ ID NO: 615403 - DNA, 15 bp, Homo sapiens
agggccgatctggag

SEQ ID NO: 615404 - DNA, 15 bp, Homo sapiens
gggccgatctggaga

SEQ ID NO: 615405 - DNA, 15 bp, Homo sapiens
ggccgatctggagac

SEQ ID NO: 615406 - DNA, 15 bp, Homo sapiens
gccgatctggagact

SEQ ID NO: 615407 - DNA, 15 bp, Homo sapiens
ccgatctggagacta

SEQ ID NO: 615408 - DNA, 15 bp, Homo sapiens
cgatctggagactag

SEQ ID NO: 615409 - DNA, 15 bp, Homo sapiens
gatctggagactagg

SEQ ID NO: 615410 - DNA, 15 bp, Homo sapiens
atctggagactagga

SEQ ID NO: 615411 - DNA, 15 bp, Homo sapiens
tctggagactaggaa

SEQ ID NO: 615412 - DNA, 15 bp, Homo sapiens
ctggagactaggaag

SEQ ID NO: 615413 - DNA, 15 bp, Homo sapiens
tggagactaggaagc

SEQ ID NO: 615414 - DNA, 15 bp, Homo sapiens
ggagactaggaagcc

SEQ ID NO: 615415 - DNA, 15 bp, Homo sapiens
gagactaggaagcca

SEQ ID NO: 615416 - DNA, 15 bp, Homo sapiens
agactaggaagccac

SEQ ID NO: 615417 - DNA, 15 bp, Homo sapiens
gactaggaagccact

SEQ ID NO: 615418 - DNA, 15 bp, Homo sapiens
actaggaagccactt

SEQ ID NO: 615419 - DNA, 15 bp, Homo sapiens
ctaggaagccacttc

SEQ ID NO: 615420 - DNA, 15 bp, Homo sapiens
taggaagccacttct

SEQ ID NO: 615421 - DNA, 15 bp, Homo sapiens
aggaagccacttctc

SEQ ID NO: 615422 - DNA, 15 bp, Homo sapiens
ggaagccacttctct

SEQ ID NO: 615423 - DNA, 15 bp, Homo sapiens
gaagccacttctctt

SEQ ID NO: 615424 - DNA, 15 bp, Homo sapiens
aagccacttctcttt

SEQ ID NO: 615425 - DNA, 15 bp, Homo sapiens
agccacttctctttc

SEQ ID NO: 615426 - DNA, 15 bp, Homo sapiens
gccacttctctttcg

SEQ ID NO: 615427 - DNA, 15 bp, Homo sapiens
ccacttctctttcga

SEQ ID NO: 615428 - DNA, 15 bp, Homo sapiens
cacttctctttcgac

SEQ ID NO: 615429 - DNA, 15 bp, Homo sapiens
acttctctttcgaca

SEQ ID NO: 615430 - DNA, 15 bp, Homo sapiens
cttctctttcgacag

SEQ ID NO: 615431 - DNA, 15 bp, Homo sapiens
ttctctttcgacagc

SEQ ID NO: 615432 - DNA, 15 bp, Homo sapiens
tctctttcgacagcc

SEQ ID NO: 615433 - DNA, 15 bp, Homo sapiens
ctctttcgacagccc

SEQ ID NO: 615434 - DNA, 15 bp, Homo sapiens
tctttcgacagcccc

SEQ ID NO: 615435 - DNA, 15 bp, Homo sapiens
ctttcgacagccccc

SEQ ID NO: 615436 - DNA, 15 bp, Homo sapiens
tttcgacagccccca

SEQ ID NO: 615437 - DNA, 15 bp, Homo sapiens
ttcgacagcccccac

SEQ ID NO: 615438 - DNA, 15 bp, Homo sapiens
tcgacagcccccacc

SEQ ID NO: 615439 - DNA, 15 bp, Homo sapiens
cgacagcccccacca

SEQ ID NO: 615440 - DNA, 15 bp, Homo sapiens
gacagcccccaccac

SEQ ID NO: 615441 - DNA, 15 bp, Homo sapiens
acagcccccaccaca

SEQ ID NO: 615442 - DNA, 15 bp, Homo sapiens
cagcccccaccacag

SEQ ID NO: 615443 - DNA, 15 bp, Homo sapiens
agcccccaccacagc

SEQ ID NO: 615444 - DNA, 15 bp, Homo sapiens
gcccccaccacagcc

SEQ ID NO: 615445 - DNA, 15 bp, Homo sapiens
cccccaccacagccc

SEQ ID NO: 615446 - DNA, 15 bp, Homo sapiens
ccccaccacagccca

SEQ ID NO: 615447 - DNA, 15 bp, Homo sapiens
cccaccacagcccag

SEQ ID NO: 615448 - DNA, 15 bp, Homo sapiens
ccaccacagcccagc

SEQ ID NO: 615449 - DNA, 15 bp, Homo sapiens
caccacagcccagcc

SEQ ID NO: 615450 - DNA, 15 bp, Homo sapiens
accacagcccagccc

SEQ ID NO: 615451 - DNA, 15 bp, Homo sapiens
ccacagcccagcccg

SEQ ID NO: 615452 - DNA, 15 bp, Homo sapiens
cacagcccagcccgt

SEQ ID NO: 615453 - DNA, 15 bp, Homo sapiens
acagcccagcccgtg

SEQ ID NO: 615454 - DNA, 15 bp, Homo sapiens
cagcccagcccgtgc

SEQ ID NO: 615455 - DNA, 15 bp, Homo sapiens
agcccagcccgtgcc

SEQ ID NO: 615456 - DNA, 15 bp, Homo sapiens
gcccagcccgtgcca

SEQ ID NO: 615457 - DNA, 15 bp, Homo sapiens
cccagcccgtgccag

SEQ ID NO: 615458 - DNA, 15 bp, Homo sapiens
ccagcccgtgccagg

SEQ ID NO: 615459 - DNA, 15 bp, Homo sapiens
cagcccgtgccaggc

SEQ ID NO: 615460 - DNA, 15 bp, Homo sapiens
agcccgtgccaggca

SEQ ID NO: 615461 - DNA, 15 bp, Homo sapiens
gcccgtgccaggcac

SEQ ID NO: 615462 - DNA, 15 bp, Homo sapiens
cccgtgccaggcacc

SEQ ID NO: 615463 - DNA, 15 bp, Homo sapiens
ccgtgccaggcaccc

SEQ ID NO: 615464 - DNA, 15 bp, Homo sapiens
cgtgccaggcaccca

SEQ ID NO: 615465 - DNA, 15 bp, Homo sapiens
gtgccaggcacccag

SEQ ID NO: 615466 - DNA, 15 bp, Homo sapiens
tgccaggcacccagc

SEQ ID NO: 615467 - DNA, 15 bp, Homo sapiens
gccaggcacccagca

SEQ ID NO: 615468 - DNA, 15 bp, Homo sapiens
ccaggcacccagcag

SEQ ID NO: 615469 - DNA, 15 bp, Homo sapiens
caggcacccagcagc

SEQ ID NO: 615470 - DNA, 15 bp, Homo sapiens
aggcacccagcagct

SEQ ID NO: 615471 - DNA, 15 bp, Homo sapiens
ggcacccagcagctc

SEQ ID NO: 615472 - DNA, 15 bp, Homo sapiens
gcacccagcagctcc

SEQ ID NO: 615473 - DNA, 15 bp, Homo sapiens
cacccagcagctcct

SEQ ID NO: 615474 - DNA, 15 bp, Homo sapiens
acccagcagctcctg

SEQ ID NO: 615475 - DNA, 15 bp, Homo sapiens
cccagcagctcctga

SEQ ID NO: 615476 - DNA, 15 bp, Homo sapiens
ccagcagctcctgaa

SEQ ID NO: 615477 - DNA, 15 bp, Homo sapiens
cagcagctcctgaag

SEQ ID NO: 615478 - DNA, 15 bp, Homo sapiens
agcagctcctgaagc

SEQ ID NO: 615479 - DNA, 15 bp, Homo sapiens
gcagctcctgaagcc

SEQ ID NO: 615480 - DNA, 15 bp, Homo sapiens
cagctcctgaagccc

SEQ ID NO: 615481 - DNA, 15 bp, Homo sapiens
agctcctgaagccca

SEQ ID NO: 615482 - DNA, 15 bp, Homo sapiens
gctcctgaagcccac

SEQ ID NO: 615483 - DNA, 15 bp, Homo sapiens
ctcctgaagcccact

SEQ ID NO: 615484 - DNA, 15 bp, Homo sapiens
tcctgaagcccactg

SEQ ID NO: 615485 - DNA, 15 bp, Homo sapiens
cctgaagcccactgg

SEQ ID NO: 615486 - DNA, 15 bp, Homo sapiens
ctgaagcccactggc

SEQ ID NO: 615487 - DNA, 15 bp, Homo sapiens
tgaagcccactggca

SEQ ID NO: 615488 - DNA, 15 bp, Homo sapiens
gaagcccactggcat

SEQ ID NO: 615489 - DNA, 15 bp, Homo sapiens
aagcccactggcatt

SEQ ID NO: 615490 - DNA, 15 bp, Homo sapiens
agcccactggcattg

SEQ ID NO: 615491 - DNA, 15 bp, Homo sapiens
gcccactggcattga

SEQ ID NO: 615492 - DNA, 15 bp, Homo sapiens
cccactggcattgaa

SEQ ID NO: 615493 - DNA, 15 bp, Homo sapiens
ccactggcattgaac

SEQ ID NO: 615494 - DNA, 15 bp, Homo sapiens
cactggcattgaaca

SEQ ID NO: 615495 - DNA, 15 bp, Homo sapiens
actggcattgaacat

SEQ ID NO: 615496 - DNA, 15 bp, Homo sapiens
ctggcattgaacatg

SEQ ID NO: 615497 - DNA, 15 bp, Homo sapiens
tggcattgaacatgg

SEQ ID NO: 615498 - DNA, 15 bp, Homo sapiens
ggcattgaacatggc

SEQ ID NO: 615499 - DNA, 15 bp, Homo sapiens
gcattgaacatggca

SEQ ID NO: 615500 - DNA, 15 bp, Homo sapiens
cattgaacatggcat

SEQ ID NO: 615501 - DNA, 15 bp, Homo sapiens
attgaacatggcatt

SEQ ID NO: 615502 - DNA, 15 bp, Homo sapiens
ttgaacatggcattc

SEQ ID NO: 615503 - DNA, 15 bp, Homo sapiens
tgaacatggcattca

SEQ ID NO: 615504 - DNA, 15 bp, Homo sapiens
gaacatggcattcaa

SEQ ID NO: 615505 - DNA, 15 bp, Homo sapiens
aacatggcattcaat

SEQ ID NO: 615506 - DNA, 15 bp, Homo sapiens
acatggcattcaatc

SEQ ID NO: 615507 - DNA, 15 bp, Homo sapiens
catggcattcaatcc

SEQ ID NO: 615508 - DNA, 15 bp, Homo sapiens
atggcattcaatccc

SEQ ID NO: 615509 - DNA, 15 bp, Homo sapiens
tggcattcaatccct

SEQ ID NO: 615510 - DNA, 15 bp, Homo sapiens
ggcattcaatccctg

SEQ ID NO: 615511 - DNA, 15 bp, Homo sapiens
gcattcaatccctgc

SEQ ID NO: 615512 - DNA, 15 bp, Homo sapiens
cattcaatccctgcc

SEQ ID NO: 615513 - DNA, 15 bp, Homo sapiens
attcaatccctgcca

SEQ ID NO: 615514 - DNA, 15 bp, Homo sapiens
ttcaatccctgccaa

SEQ ID NO: 615515 - DNA, 15 bp, Homo sapiens
tcaatccctgccaag

SEQ ID NO: 615516 - DNA, 15 bp, Homo sapiens
caatccctgccaagc

SEQ ID NO: 615517 - DNA, 15 bp, Homo sapiens
aatccctgccaagcc

SEQ ID NO: 615518 - DNA, 15 bp, Homo sapiens
atccctgccaagcct

SEQ ID NO: 615519 - DNA, 15 bp, Homo sapiens
tccctgccaagcctg

SEQ ID NO: 615520 - DNA, 15 bp, Homo sapiens
ccctgccaagcctgc

SEQ ID NO: 615521 - DNA, 15 bp, Homo sapiens
cctgccaagcctgcc

SEQ ID NO: 615522 - DNA, 15 bp, Homo sapiens
ctgccaagcctgccc

SEQ ID NO: 615523 - DNA, 15 bp, Homo sapiens
tgccaagcctgccct

SEQ ID NO: 615524 - DNA, 15 bp, Homo sapiens
gccaagcctgccctt

SEQ ID NO: 615525 - DNA, 15 bp, Homo sapiens
ccaagcctgcccttc

SEQ ID NO: 615526 - DNA, 15 bp, Homo sapiens
caagcctgcccttcc

SEQ ID NO: 615527 - DNA, 15 bp, Homo sapiens
aagcctgcccttccc

SEQ ID NO: 615528 - DNA, 15 bp, Homo sapiens
agcctgcccttccca

SEQ ID NO: 615529 - DNA, 15 bp, Homo sapiens
gcctgcccttcccat

SEQ ID NO: 615530 - DNA, 15 bp, Homo sapiens
cctgcccttcccatc

SEQ ID NO: 615531 - DNA, 15 bp, Homo sapiens
ctgcccttcccatct

SEQ ID NO: 615532 - DNA, 15 bp, Homo sapiens
tgcccttcccatctg

SEQ ID NO: 615533 - DNA, 15 bp, Homo sapiens
gcccttcccatctgg

SEQ ID NO: 615534 - DNA, 15 bp, Homo sapiens
cccttcccatctggt

SEQ ID NO: 615535 - DNA, 15 bp, Homo sapiens
ccttcccatctggtt

SEQ ID NO: 615536 - DNA, 15 bp, Homo sapiens
cttcccatctggttt

SEQ ID NO: 615537 - DNA, 15 bp, Homo sapiens
ttcccatctggtttc

SEQ ID NO: 615538 - DNA, 15 bp, Homo sapiens
tcccatctggtttcc

SEQ ID NO: 615539 - DNA, 15 bp, Homo sapiens
cccatctggtttccc

SEQ ID NO: 615540 - DNA, 15 bp, Homo sapiens
ccatctggtttccca

SEQ ID NO: 615541 - DNA, 15 bp, Homo sapiens
catctggtttcccag

SEQ ID NO: 615542 - DNA, 15 bp, Homo sapiens
atctggtttcccagg

SEQ ID NO: 615543 - DNA, 15 bp, Homo sapiens
tctggtttcccaggg

SEQ ID NO: 615544 - DNA, 15 bp, Homo sapiens
ctggtttcccagggc

SEQ ID NO: 615545 - DNA, 15 bp, Homo sapiens
tggtttcccagggct

SEQ ID NO: 615546 - DNA, 15 bp, Homo sapiens
ggtttcccagggctc

SEQ ID NO: 615547 - DNA, 15 bp, Homo sapiens
gtttcccagggctct

SEQ ID NO: 615548 - DNA, 15 bp, Homo sapiens
tttcccagggctctt

SEQ ID NO: 615549 - DNA, 15 bp, Homo sapiens
ttcccagggctcttc

SEQ ID NO: 615550 - DNA, 15 bp, Homo sapiens
tcccagggctcttcc

SEQ ID NO: 615551 - DNA, 15 bp, Homo sapiens
cccagggctcttccc

SEQ ID NO: 615552 - DNA, 15 bp, Homo sapiens
ccagggctcttccca

SEQ ID NO: 615553 - DNA, 15 bp, Homo sapiens
cagggctcttcccaa

SEQ ID NO: 615554 - DNA, 15 bp, Homo sapiens
agggctcttcccaac

SEQ ID NO: 615555 - DNA, 15 bp, Homo sapiens
gggctcttcccaaca

SEQ ID NO: 615556 - DNA, 15 bp, Homo sapiens
ggctcttcccaacac

SEQ ID NO: 615557 - DNA, 15 bp, Homo sapiens
gctcttcccaacacc

SEQ ID NO: 615558 - DNA, 15 bp, Homo sapiens
ctcttcccaacacct

SEQ ID NO: 615559 - DNA, 15 bp, Homo sapiens
tcttcccaacacctc

SEQ ID NO: 615560 - DNA, 15 bp, Homo sapiens
cttcccaacacctcc

SEQ ID NO: 615561 - DNA, 15 bp, Homo sapiens
ttcccaacacctcct

SEQ ID NO: 615562 - DNA, 15 bp, Homo sapiens
tcccaacacctcctc

SEQ ID NO: 615563 - DNA, 15 bp, Homo sapiens
cccaacacctcctcc

SEQ ID NO: 615564 - DNA, 15 bp, Homo sapiens
ccaacacctcctcct

SEQ ID NO: 615565 - DNA, 15 bp, Homo sapiens
caacacctcctcctc

SEQ ID NO: 615566 - DNA, 15 bp, Homo sapiens
aacacctcctcctcc

SEQ ID NO: 615567 - DNA, 15 bp, Homo sapiens
acacctcctcctcca

SEQ ID NO: 615568 - DNA, 15 bp, Homo sapiens
cacctcctcctccac

SEQ ID NO: 615569 - DNA, 15 bp, Homo sapiens
acctcctcctccacc

SEQ ID NO: 615570 - DNA, 15 bp, Homo sapiens
cctcctcctccacct

SEQ ID NO: 615571 - DNA, 15 bp, Homo sapiens
ctcctcctccacctg

SEQ ID NO: 615572 - DNA, 15 bp, Homo sapiens
tcctcctccacctgc

SEQ ID NO: 615573 - DNA, 15 bp, Homo sapiens
cctcctccacctgcc

SEQ ID NO: 615574 - DNA, 15 bp, Homo sapiens
ctcctccacctgcca

SEQ ID NO: 615575 - DNA, 15 bp, Homo sapiens
tcctccacctgccag

SEQ ID NO: 615576 - DNA, 15 bp, Homo sapiens
cctccacctgccagt

SEQ ID NO: 615577 - DNA, 15 bp, Homo sapiens
ctccacctgccagtt

SEQ ID NO: 615578 - DNA, 15 bp, Homo sapiens
tccacctgccagtta

SEQ ID NO: 615579 - DNA, 15 bp, Homo sapiens
ccacctgccagttaa

SEQ ID NO: 615580 - DNA, 15 bp, Homo sapiens
cacctgccagttaaa

SEQ ID NO: 615581 - DNA, 15 bp, Homo sapiens
acctgccagttaaaa

SEQ ID NO: 615582 - DNA, 15 bp, Homo sapiens
cctgccagttaaaat

SEQ ID NO: 615583 - DNA, 15 bp, Homo sapiens
ctgccagttaaaatc

SEQ ID NO: 615584 - DNA, 15 bp, Homo sapiens
tgccagttaaaatct

SEQ ID NO: 615585 - DNA, 15 bp, Homo sapiens
gccagttaaaatctt

SEQ ID NO: 615586 - DNA, 15 bp, Homo sapiens
ccagttaaaatcttc

SEQ ID NO: 615587 - DNA, 15 bp, Homo sapiens
cagttaaaatcttcc

SEQ ID NO: 615588 - DNA, 15 bp, Homo sapiens
agttaaaatcttccc

SEQ ID NO: 615589 - DNA, 15 bp, Homo sapiens
gttaaaatcttccca

SEQ ID NO: 615590 - DNA, 15 bp, Homo sapiens
ttaaaatcttcccag

SEQ ID NO: 615591 - DNA, 15 bp, Homo sapiens
taaaatcttcccaga

SEQ ID NO: 615592 - DNA, 15 bp, Homo sapiens
aaaatcttcccagac

SEQ ID NO: 615593 - DNA, 15 bp, Homo sapiens
aaatcttcccagact

SEQ ID NO: 615594 - DNA, 15 bp, Homo sapiens
aatcttcccagactc

SEQ ID NO: 615595 - DNA, 15 bp, Homo sapiens
atcttcccagactca

SEQ ID NO: 615596 - DNA, 15 bp, Homo sapiens
tcttcccagactcag

SEQ ID NO: 615597 - DNA, 15 bp, Homo sapiens
cttcccagactcagc

SEQ ID NO: 615598 - DNA, 15 bp, Homo sapiens
ttcccagactcagct

SEQ ID NO: 615599 - DNA, 15 bp, Homo sapiens
tcccagactcagctc

SEQ ID NO: 615600 - DNA, 15 bp, Homo sapiens
cccagactcagctca

SEQ ID NO: 615601 - DNA, 15 bp, Homo sapiens
ccagactcagctcaa

SEQ ID NO: 615602 - DNA, 15 bp, Homo sapiens
cagactcagctcaag

SEQ ID NO: 615603 - DNA, 15 bp, Homo sapiens
agactcagctcaagg

SEQ ID NO: 615604 - DNA, 15 bp, Homo sapiens
gactcagctcaagga

SEQ ID NO: 615605 - DNA, 15 bp, Homo sapiens
actcagctcaaggag

SEQ ID NO: 615606 - DNA, 15 bp, Homo sapiens
ctcagctcaaggaga

SEQ ID NO: 615607 - DNA, 15 bp, Homo sapiens
tcagctcaaggagat

SEQ ID NO: 615608 - DNA, 15 bp, Homo sapiens
cagctcaaggagatg

SEQ ID NO: 615609 - DNA, 15 bp, Homo sapiens
agctcaaggagatgc

SEQ ID NO: 615610 - DNA, 15 bp, Homo sapiens
gctcaaggagatgct

SEQ ID NO: 615611 - DNA, 15 bp, Homo sapiens
ctcaaggagatgctc

SEQ ID NO: 615612 - DNA, 15 bp, Homo sapiens
tcaaggagatgctcc

SEQ ID NO: 615613 - DNA, 15 bp, Homo sapiens
caaggagatgctcct

SEQ ID NO: 615614 - DNA, 15 bp, Homo sapiens
aaggagatgctccta

SEQ ID NO: 615615 - DNA, 15 bp, Homo sapiens
aggagatgctcctaa

SEQ ID NO: 615616 - DNA, 15 bp, Homo sapiens
ggagatgctcctaag

SEQ ID NO: 615617 - DNA, 15 bp, Homo sapiens
gagatgctcctaagg

SEQ ID NO: 615618 - DNA, 15 bp, Homo sapiens
agatgctcctaaggt

SEQ ID NO: 615619 - DNA, 15 bp, Homo sapiens
gatgctcctaaggtg

SEQ ID NO: 615620 - DNA, 15 bp, Homo sapiens
atgctcctaaggtgg

SEQ ID NO: 615621 - DNA, 15 bp, Homo sapiens
tgctcctaaggtgga

SEQ ID NO: 615622 - DNA, 15 bp, Homo sapiens
gctcctaaggtggaa

SEQ ID NO: 615623 - DNA, 15 bp, Homo sapiens
ctcctaaggtggaat

SEQ ID NO: 615624 - DNA, 15 bp, Homo sapiens
tcctaaggtggaatg

SEQ ID NO: 615625 - DNA, 15 bp, Homo sapiens
cctaaggtggaatga

SEQ ID NO: 615626 - DNA, 15 bp, Homo sapiens
ctaaggtggaatgaa

SEQ ID NO: 615627 - DNA, 15 bp, Homo sapiens
taaggtggaatgaaa

SEQ ID NO: 615628 - DNA, 15 bp, Homo sapiens
aaggtggaatgaaat

SEQ ID NO: 615629 - DNA, 15 bp, Homo sapiens
aggtggaatgaaatc

SEQ ID NO: 615630 - DNA, 15 bp, Homo sapiens
ggtggaatgaaatct

SEQ ID NO: 615631 - DNA, 15 bp, Homo sapiens
gtggaatgaaatctc

SEQ ID NO: 615632 - DNA, 15 bp, Homo sapiens
tggaatgaaatctct

SEQ ID NO: 615633 - DNA, 15 bp, Homo sapiens
ggaatgaaatctctt

SEQ ID NO: 615634 - DNA, 15 bp, Homo sapiens
gaatgaaatctcttc

SEQ ID NO: 615635 - DNA, 15 bp, Homo sapiens
aatgaaatctcttct

SEQ ID NO: 615636 - DNA, 15 bp, Homo sapiens
atgaaatctcttctt

SEQ ID NO: 615637 - DNA, 15 bp, Homo sapiens
tgaaatctcttcttc

SEQ ID NO: 615638 - DNA, 15 bp, Homo sapiens
gaaatctcttcttcc

SEQ ID NO: 615639 - DNA, 15 bp, Homo sapiens
aaatctcttcttccc

SEQ ID NO: 615640 - DNA, 15 bp, Homo sapiens
aatctcttcttcccc

SEQ ID NO: 615641 - DNA, 15 bp, Homo sapiens
atctcttcttcccca

SEQ ID NO: 615642 - DNA, 15 bp, Homo sapiens
tctcttcttccccac

SEQ ID NO: 615643 - DNA, 15 bp, Homo sapiens
ctcttcttccccacc

SEQ ID NO: 615644 - DNA, 15 bp, Homo sapiens
tcttcttccccacct

SEQ ID NO: 615645 - DNA, 15 bp, Homo sapiens
cttcttccccacctg

SEQ ID NO: 615646 - DNA, 15 bp, Homo sapiens
ttcttccccacctgg

SEQ ID NO: 615647 - DNA, 15 bp, Homo sapiens
tcttccccacctgga

SEQ ID NO: 615648 - DNA, 15 bp, Homo sapiens
cttccccacctggag

SEQ ID NO: 615649 - DNA, 15 bp, Homo sapiens
ttccccacctggaga

SEQ ID NO: 615650 - DNA, 15 bp, Homo sapiens
tccccacctggagac

SEQ ID NO: 615651 - DNA, 15 bp, Homo sapiens
ccccacctggagaca

SEQ ID NO: 615652 - DNA, 15 bp, Homo sapiens
cccacctggagacaa

SEQ ID NO: 615653 - DNA, 15 bp, Homo sapiens
ccacctggagacaat

SEQ ID NO: 615654 - DNA, 15 bp, Homo sapiens
cacctggagacaatc

SEQ ID NO: 615655 - DNA, 15 bp, Homo sapiens
acctggagacaatct

SEQ ID NO: 615656 - DNA, 15 bp, Homo sapiens
cctggagacaatcta

SEQ ID NO: 615657 - DNA, 15 bp, Homo sapiens
ctggagacaatctac

SEQ ID NO: 615658 - DNA, 15 bp, Homo sapiens
tggagacaatctact

SEQ ID NO: 615659 - DNA, 15 bp, Homo sapiens
ggagacaatctactt

SEQ ID NO: 615660 - DNA, 15 bp, Homo sapiens
gagacaatctacttc

SEQ ID NO: 615661 - DNA, 15 bp, Homo sapiens
agacaatctacttcc

SEQ ID NO: 615662 - DNA, 15 bp, Homo sapiens
gacaatctacttcct

SEQ ID NO: 615663 - DNA, 15 bp, Homo sapiens
acaatctacttcctc

SEQ ID NO: 615664 - DNA, 15 bp, Homo sapiens
caatctacttcctct

SEQ ID NO: 615665 - DNA, 15 bp, Homo sapiens
aatctacttcctctc

SEQ ID NO: 615666 - DNA, 15 bp, Homo sapiens
atctacttcctctcc

SEQ ID NO: 615667 - DNA, 15 bp, Homo sapiens
tctacttcctctccc

SEQ ID NO: 615668 - DNA, 15 bp, Homo sapiens
ctacttcctctccct

SEQ ID NO: 615669 - DNA, 15 bp, Homo sapiens
tacttcctctcccta

SEQ ID NO: 615670 - DNA, 15 bp, Homo sapiens
acttcctctccctac

SEQ ID NO: 615671 - DNA, 15 bp, Homo sapiens
cttcctctccctaca

SEQ ID NO: 615672 - DNA, 15 bp, Homo sapiens
ttcctctccctacac

SEQ ID NO: 615673 - DNA, 15 bp, Homo sapiens
tcctctccctacacc

SEQ ID NO: 615674 - DNA, 15 bp, Homo sapiens
cctctccctacacct

SEQ ID NO: 615675 - DNA, 15 bp, Homo sapiens
ctctccctacacctg

SEQ ID NO: 615676 - DNA, 15 bp, Homo sapiens
tctccctacacctgg

SEQ ID NO: 615677 - DNA, 15 bp, Homo sapiens
ctccctacacctggc

SEQ ID NO: 615678 - DNA, 15 bp, Homo sapiens
tccctacacctggca

SEQ ID NO: 615679 - DNA, 15 bp, Homo sapiens
ccctacacctggcaa

SEQ ID NO: 615680 - DNA, 15 bp, Homo sapiens
cctacacctggcaac

SEQ ID NO: 615681 - DNA, 15 bp, Homo sapiens
ctacacctggcaact

SEQ ID NO: 615682 - DNA, 15 bp, Homo sapiens
tacacctggcaactg

SEQ ID NO: 615683 - DNA, 15 bp, Homo sapiens
acacctggcaactgg

SEQ ID NO: 615684 - DNA, 15 bp, Homo sapiens
cacctggcaactggc

SEQ ID NO: 615685 - DNA, 15 bp, Homo sapiens
acctggcaactggcg

SEQ ID NO: 615686 - DNA, 15 bp, Homo sapiens
cctggcaactggcgc

SEQ ID NO: 615687 - DNA, 15 bp, Homo sapiens
ctggcaactggcgca

SEQ ID NO: 615688 - DNA, 15 bp, Homo sapiens
tggcaactggcgcac

SEQ ID NO: 615689 - DNA, 15 bp, Homo sapiens
ggcaactggcgcaca

SEQ ID NO: 615690 - DNA, 15 bp, Homo sapiens
gcaactggcgcacaa

SEQ ID NO: 615691 - DNA, 15 bp, Homo sapiens
caactggcgcacaac

SEQ ID NO: 615692 - DNA, 15 bp, Homo sapiens
aactggcgcacaacc

SEQ ID NO: 615693 - DNA, 15 bp, Homo sapiens
actggcgcacaacct

SEQ ID NO: 615694 - DNA, 15 bp, Homo sapiens
ctggcgcacaacctt

SEQ ID NO: 615695 - DNA, 15 bp, Homo sapiens
tggcgcacaaccttg

SEQ ID NO: 615696 - DNA, 15 bp, Homo sapiens
ggcgcacaaccttgt

SEQ ID NO: 615697 - DNA, 15 bp, Homo sapiens
gcgcacaaccttgta

SEQ ID NO: 615698 - DNA, 15 bp, Homo sapiens
cgcacaaccttgtat

SEQ ID NO: 615699 - DNA, 15 bp, Homo sapiens
gcacaaccttgtatc

SEQ ID NO: 615700 - DNA, 15 bp, Homo sapiens
cacaaccttgtatct

SEQ ID NO: 615701 - DNA, 15 bp, Homo sapiens
acaaccttgtatctt

SEQ ID NO: 615702 - DNA, 15 bp, Homo sapiens
caaccttgtatctta

SEQ ID NO: 615703 - DNA, 15 bp, Homo sapiens
aaccttgtatcttaa

SEQ ID NO: 615704 - DNA, 15 bp, Homo sapiens
accttgtatcttaaa

SEQ ID NO: 615705 - DNA, 15 bp, Homo sapiens
ccttgtatcttaaat

SEQ ID NO: 615706 - DNA, 15 bp, Homo sapiens
cttgtatcttaaatt

SEQ ID NO: 615707 - DNA, 15 bp, Homo sapiens
ttgtatcttaaatta

SEQ ID NO: 615708 - DNA, 15 bp, Homo sapiens
tgtatcttaaattag

SEQ ID NO: 615709 - DNA, 15 bp, Homo sapiens
gtatcttaaattaga

SEQ ID NO: 615710 - DNA, 15 bp, Homo sapiens
tatcttaaattagat

SEQ ID NO: 615711 - DNA, 15 bp, Homo sapiens
atcttaaattagatt

SEQ ID NO: 615712 - DNA, 15 bp, Homo sapiens
tcttaaattagattc

SEQ ID NO: 615713 - DNA, 15 bp, Homo sapiens
cttaaattagattca

SEQ ID NO: 615714 - DNA, 15 bp, Homo sapiens
ttaaattagattcag

SEQ ID NO: 615715 - DNA, 15 bp, Homo sapiens
taaattagattcagc

SEQ ID NO: 615716 - DNA, 15 bp, Homo sapiens
aaattagattcagcc

SEQ ID NO: 615717 - DNA, 15 bp, Homo sapiens
aattagattcagcct

SEQ ID NO: 615718 - DNA, 15 bp, Homo sapiens
attagattcagcctg

SEQ ID NO: 615719 - DNA, 15 bp, Homo sapiens
ttagattcagcctga

SEQ ID NO: 615720 - DNA, 15 bp, Homo sapiens
tagattcagcctgag

SEQ ID NO: 615721 - DNA, 15 bp, Homo sapiens
agattcagcctgaga

SEQ ID NO: 615722 - DNA, 15 bp, Homo sapiens
gattcagcctgagac

SEQ ID NO: 615723 - DNA, 15 bp, Homo sapiens
attcagcctgagact

SEQ ID NO: 615724 - DNA, 15 bp, Homo sapiens
ttcagcctgagactg

SEQ ID NO: 615725 - DNA, 15 bp, Homo sapiens
tcagcctgagactgt

SEQ ID NO: 615726 - DNA, 15 bp, Homo sapiens
cagcctgagactgtc

SEQ ID NO: 615727 - DNA, 15 bp, Homo sapiens
agcctgagactgtct

SEQ ID NO: 615728 - DNA, 15 bp, Homo sapiens
gcctgagactgtctc

SEQ ID NO: 615729 - DNA, 15 bp, Homo sapiens
cctgagactgtctcc

SEQ ID NO: 615730 - DNA, 15 bp, Homo sapiens
ctgagactgtctccc

SEQ ID NO: 615731 - DNA, 15 bp, Homo sapiens
tgagactgtctccca

SEQ ID NO: 615732 - DNA, 15 bp, Homo sapiens
gagactgtctcccac

SEQ ID NO: 615733 - DNA, 15 bp, Homo sapiens
agactgtctcccacc

SEQ ID NO: 615734 - DNA, 15 bp, Homo sapiens
gactgtctcccacca

SEQ ID NO: 615735 - DNA, 15 bp, Homo sapiens
actgtctcccaccaa

SEQ ID NO: 615736 - DNA, 15 bp, Homo sapiens
ctgtctcccaccaat

SEQ ID NO: 615737 - DNA, 15 bp, Homo sapiens
tgtctcccaccaatc

SEQ ID NO: 615738 - DNA, 15 bp, Homo sapiens
gtctcccaccaatcc

SEQ ID NO: 615739 - DNA, 15 bp, Homo sapiens
tctcccaccaatccc

SEQ ID NO: 615740 - DNA, 15 bp, Homo sapiens
ctcccaccaatccct

SEQ ID NO: 615741 - DNA, 15 bp, Homo sapiens
tcccaccaatccctg

SEQ ID NO: 615742 - DNA, 15 bp, Homo sapiens
cccaccaatccctgc

SEQ ID NO: 615743 - DNA, 15 bp, Homo sapiens
ccaccaatccctgct

SEQ ID NO: 615744 - DNA, 15 bp, Homo sapiens
caccaatccctgctc

SEQ ID NO: 615745 - DNA, 15 bp, Homo sapiens
accaatccctgctcc

SEQ ID NO: 615746 - DNA, 15 bp, Homo sapiens
ccaatccctgctccc

SEQ ID NO: 615747 - DNA, 15 bp, Homo sapiens
caatccctgctccct

SEQ ID NO: 615748 - DNA, 15 bp, Homo sapiens
aatccctgctccctg

SEQ ID NO: 615749 - DNA, 15 bp, Homo sapiens
atccctgctccctgt

SEQ ID NO: 615750 - DNA, 15 bp, Homo sapiens
tccctgctccctgtc

SEQ ID NO: 615751 - DNA, 15 bp, Homo sapiens
ccctgctccctgtcc

SEQ ID NO: 615752 - DNA, 15 bp, Homo sapiens
cctgctccctgtcct

SEQ ID NO: 615753 - DNA, 15 bp, Homo sapiens
ctgctccctgtcctg

SEQ ID NO: 615754 - DNA, 15 bp, Homo sapiens
tgctccctgtcctgc

SEQ ID NO: 615755 - DNA, 15 bp, Homo sapiens
gctccctgtcctgct

SEQ ID NO: 615756 - DNA, 15 bp, Homo sapiens
ctccctgtcctgctg

SEQ ID NO: 615757 - DNA, 15 bp, Homo sapiens
tccctgtcctgctga

SEQ ID NO: 615758 - DNA, 15 bp, Homo sapiens
ccctgtcctgctgag

SEQ ID NO: 615759 - DNA, 15 bp, Homo sapiens
cctgtcctgctgagc

SEQ ID NO: 615760 - DNA, 15 bp, Homo sapiens
ctgtcctgctgagca

SEQ ID NO: 615761 - DNA, 15 bp, Homo sapiens
tgtcctgctgagcac

SEQ ID NO: 615762 - DNA, 15 bp, Homo sapiens
gtcctgctgagcacc

SEQ ID NO: 615763 - DNA, 15 bp, Homo sapiens
tcctgctgagcacct

SEQ ID NO: 615764 - DNA, 15 bp, Homo sapiens
cctgctgagcacctt

SEQ ID NO: 615765 - DNA, 15 bp, Homo sapiens
ctgctgagcaccttg

SEQ ID NO: 615766 - DNA, 15 bp, Homo sapiens
tgctgagcaccttga

SEQ ID NO: 615767 - DNA, 15 bp, Homo sapiens
gctgagcaccttgag

SEQ ID NO: 615768 - DNA, 15 bp, Homo sapiens
ctgagcaccttgagg

SEQ ID NO: 615769 - DNA, 15 bp, Homo sapiens
tgagcaccttgagga

SEQ ID NO: 615770 - DNA, 15 bp, Homo sapiens
gagcaccttgaggaa

SEQ ID NO: 615771 - DNA, 15 bp, Homo sapiens
agcaccttgaggaaa

SEQ ID NO: 615772 - DNA, 15 bp, Homo sapiens
gcaccttgaggaaag

SEQ ID NO: 615773 - DNA, 15 bp, Homo sapiens
caccttgaggaaagg

SEQ ID NO: 615774 - DNA, 15 bp, Homo sapiens
accttgaggaaaggg

SEQ ID NO: 615775 - DNA, 15 bp, Homo sapiens
ccttgaggaaagggc

SEQ ID NO: 615776 - DNA, 15 bp, Homo sapiens
cttgaggaaagggct

SEQ ID NO: 615777 - DNA, 15 bp, Homo sapiens
ttgaggaaagggctt

SEQ ID NO: 615778 - DNA, 15 bp, Homo sapiens
tgaggaaagggcttt

SEQ ID NO: 615779 - DNA, 15 bp, Homo sapiens
gaggaaagggctttg

SEQ ID NO: 615780 - DNA, 15 bp, Homo sapiens
aggaaagggctttgg

SEQ ID NO: 615781 - DNA, 15 bp, Homo sapiens
ggaaagggctttggg

SEQ ID NO: 615782 - DNA, 15 bp, Homo sapiens
gaaagggctttgggg

SEQ ID NO: 615783 - DNA, 15 bp, Homo sapiens
aaagggctttggggc

SEQ ID NO: 615784 - DNA, 15 bp, Homo sapiens
aagggctttggggct

SEQ ID NO: 615785 - DNA, 15 bp, Homo sapiens
agggctttggggctg

SEQ ID NO: 615786 - DNA, 15 bp, Homo sapiens
gggctttggggctgt

SEQ ID NO: 615787 - DNA, 15 bp, Homo sapiens
ggctttggggctgtt

SEQ ID NO: 615788 - DNA, 15 bp, Homo sapiens
gctttggggctgttt

SEQ ID NO: 615789 - DNA, 15 bp, Homo sapiens
ctttggggctgttta

SEQ ID NO: 615790 - DNA, 15 bp, Homo sapiens
tttggggctgtttat

SEQ ID NO: 615791 - DNA, 15 bp, Homo sapiens
ttggggctgtttatc

SEQ ID NO: 615792 - DNA, 15 bp, Homo sapiens
tggggctgtttatct

SEQ ID NO: 615793 - DNA, 15 bp, Homo sapiens
ggggctgtttatctt

SEQ ID NO: 615794 - DNA, 15 bp, Homo sapiens
gggctgtttatcttt

SEQ ID NO: 615795 - DNA, 15 bp, Homo sapiens
ggctgtttatctttg

SEQ ID NO: 615796 - DNA, 15 bp, Homo sapiens
gctgtttatctttgt

SEQ ID NO: 615797 - DNA, 15 bp, Homo sapiens
ctgtttatctttgtc

SEQ ID NO: 615798 - DNA, 15 bp, Homo sapiens
tgtttatctttgtcc

SEQ ID NO: 615799 - DNA, 15 bp, Homo sapiens
gtttatctttgtcct

SEQ ID NO: 615800 - DNA, 15 bp, Homo sapiens
tttatctttgtcctg

SEQ ID NO: 615801 - DNA, 15 bp, Homo sapiens
ttatctttgtcctgg

SEQ ID NO: 615802 - DNA, 15 bp, Homo sapiens
tatctttgtcctgga

SEQ ID NO: 615803 - DNA, 15 bp, Homo sapiens
atctttgtcctggaa

SEQ ID NO: 615804 - DNA, 15 bp, Homo sapiens
tctttgtcctggaaa

SEQ ID NO: 615805 - DNA, 15 bp, Homo sapiens
ctttgtcctggaaac

SEQ ID NO: 615806 - DNA, 15 bp, Homo sapiens
tttgtcctggaaacc

SEQ ID NO: 615807 - DNA, 15 bp, Homo sapiens
ttgtcctggaaacca

SEQ ID NO: 615808 - DNA, 15 bp, Homo sapiens
tgtcctggaaaccat

SEQ ID NO: 615809 - DNA, 15 bp, Homo sapiens
gtcctggaaaccatc

SEQ ID NO: 615810 - DNA, 15 bp, Homo sapiens
tcctggaaaccatcc

SEQ ID NO: 615811 - DNA, 15 bp, Homo sapiens
cctggaaaccatcct

SEQ ID NO: 615812 - DNA, 15 bp, Homo sapiens
ctggaaaccatcctt

SEQ ID NO: 615813 - DNA, 15 bp, Homo sapiens
tggaaaccatccttc

SEQ ID NO: 615814 - DNA, 15 bp, Homo sapiens
ggaaaccatccttca

SEQ ID NO: 615815 - DNA, 15 bp, Homo sapiens
gaaaccatccttcaa

SEQ ID NO: 615816 - DNA, 15 bp, Homo sapiens
aaaccatccttcaac

SEQ ID NO: 615817 - DNA, 15 bp, Homo sapiens
aaccatccttcaact

SEQ ID NO: 615818 - DNA, 15 bp, Homo sapiens
accatccttcaactc

SEQ ID NO: 615819 - DNA, 15 bp, Homo sapiens
ccatccttcaactca

SEQ ID NO: 615820 - DNA, 15 bp, Homo sapiens
catccttcaactcac

SEQ ID NO: 615821 - DNA, 15 bp, Homo sapiens
atccttcaactcact

SEQ ID NO: 615822 - DNA, 15 bp, Homo sapiens
tccttcaactcactc

SEQ ID NO: 615823 - DNA, 15 bp, Homo sapiens
ccttcaactcactct

SEQ ID NO: 615824 - DNA, 15 bp, Homo sapiens
cttcaactcactctg

SEQ ID NO: 615825 - DNA, 15 bp, Homo sapiens
ttcaactcactctgg

SEQ ID NO: 615826 - DNA, 15 bp, Homo sapiens
tcaactcactctggg

SEQ ID NO: 615827 - DNA, 15 bp, Homo sapiens
caactcactctgggg

SEQ ID NO: 615828 - DNA, 15 bp, Homo sapiens
aactcactctggggc

SEQ ID NO: 615829 - DNA, 15 bp, Homo sapiens
actcactctggggcc

SEQ ID NO: 615830 - DNA, 15 bp, Homo sapiens
ctcactctggggcct

SEQ ID NO: 615831 - DNA, 15 bp, Homo sapiens
tcactctggggcctg

SEQ ID NO: 615832 - DNA, 15 bp, Homo sapiens
cactctggggcctgc

SEQ ID NO: 615833 - DNA, 15 bp, Homo sapiens
actctggggcctgcc

SEQ ID NO: 615834 - DNA, 15 bp, Homo sapiens
ctctggggcctgcct

SEQ ID NO: 615835 - DNA, 15 bp, Homo sapiens
tctggggcctgccta

SEQ ID NO: 615836 - DNA, 15 bp, Homo sapiens
ctggggcctgcctag

SEQ ID NO: 615837 - DNA, 15 bp, Homo sapiens
tggggcctgcctagc

SEQ ID NO: 615838 - DNA, 15 bp, Homo sapiens
ggggcctgcctagca

SEQ ID NO: 615839 - DNA, 15 bp, Homo sapiens
gggcctgcctagcat

SEQ ID NO: 615840 - DNA, 15 bp, Homo sapiens
ggcctgcctagcatg

SEQ ID NO: 615841 - DNA, 15 bp, Homo sapiens
gcctgcctagcatgt

SEQ ID NO: 615842 - DNA, 15 bp, Homo sapiens
cctgcctagcatgtc

SEQ ID NO: 615843 - DNA, 15 bp, Homo sapiens
ctgcctagcatgtca

SEQ ID NO: 615844 - DNA, 15 bp, Homo sapiens
tgcctagcatgtcaa

SEQ ID NO: 615845 - DNA, 15 bp, Homo sapiens
gcctagcatgtcaac

SEQ ID NO: 615846 - DNA, 15 bp, Homo sapiens
cctagcatgtcaacc

SEQ ID NO: 615847 - DNA, 15 bp, Homo sapiens
ctagcatgtcaaccg

SEQ ID NO: 615848 - DNA, 15 bp, Homo sapiens
tagcatgtcaaccga

SEQ ID NO: 615849 - DNA, 15 bp, Homo sapiens
agcatgtcaaccgag

SEQ ID NO: 615850 - DNA, 15 bp, Homo sapiens
gcatgtcaaccgagt

SEQ ID NO: 615851 - DNA, 15 bp, Homo sapiens
catgtcaaccgagtt

SEQ ID NO: 615852 - DNA, 15 bp, Homo sapiens
atgtcaaccgagttt

SEQ ID NO: 615853 - DNA, 15 bp, Homo sapiens
tgtcaaccgagtttg

SEQ ID NO: 615854 - DNA, 15 bp, Homo sapiens
gtcaaccgagtttgg

SEQ ID NO: 615855 - DNA, 15 bp, Homo sapiens
tcaaccgagtttgga

SEQ ID NO: 615856 - DNA, 15 bp, Homo sapiens
caaccgagtttggag

SEQ ID NO: 615857 - DNA, 15 bp, Homo sapiens
aaccgagtttggaga

SEQ ID NO: 615858 - DNA, 15 bp, Homo sapiens
accgagtttggagaa

SEQ ID NO: 615859 - DNA, 15 bp, Homo sapiens
ccgagtttggagaat

SEQ ID NO: 615860 - DNA, 15 bp, Homo sapiens
cgagtttggagaata

SEQ ID NO: 615861 - DNA, 15 bp, Homo sapiens
gagtttggagaatag

SEQ ID NO: 615862 - DNA, 15 bp, Homo sapiens
agtttggagaatagg

SEQ ID NO: 615863 - DNA, 15 bp, Homo sapiens
gtttggagaataggg

SEQ ID NO: 615864 - DNA, 15 bp, Homo sapiens
tttggagaatagggc

SEQ ID NO: 615865 - DNA, 15 bp, Homo sapiens
ttggagaatagggca

SEQ ID NO: 615866 - DNA, 15 bp, Homo sapiens
tggagaatagggcag

SEQ ID NO: 615867 - DNA, 15 bp, Homo sapiens
ggagaatagggcaga

SEQ ID NO: 615868 - DNA, 15 bp, Homo sapiens
gagaatagggcagaa

SEQ ID NO: 615869 - DNA, 15 bp, Homo sapiens
agaatagggcagaat

SEQ ID NO: 615870 - DNA, 15 bp, Homo sapiens
gaatagggcagaata

SEQ ID NO: 615871 - DNA, 15 bp, Homo sapiens
aatagggcagaatag

SEQ ID NO: 615872 - DNA, 15 bp, Homo sapiens
atagggcagaatagg

SEQ ID NO: 615873 - DNA, 15 bp, Homo sapiens
tagggcagaataggg

SEQ ID NO: 615874 - DNA, 15 bp, Homo sapiens
agggcagaatagggc

SEQ ID NO: 615875 - DNA, 15 bp, Homo sapiens
gggcagaatagggca

SEQ ID NO: 615876 - DNA, 15 bp, Homo sapiens
ggcagaatagggcag

SEQ ID NO: 615877 - DNA, 15 bp, Homo sapiens
gcagaatagggcagg

SEQ ID NO: 615878 - DNA, 15 bp, Homo sapiens
cagaatagggcagga

SEQ ID NO: 615879 - DNA, 15 bp, Homo sapiens
agaatagggcaggac

SEQ ID NO: 615880 - DNA, 15 bp, Homo sapiens
gaatagggcaggaca

SEQ ID NO: 615881 - DNA, 15 bp, Homo sapiens
aatagggcaggacag

SEQ ID NO: 615882 - DNA, 15 bp, Homo sapiens
atagggcaggacagg

SEQ ID NO: 615883 - DNA, 15 bp, Homo sapiens
tagggcaggacagga

SEQ ID NO: 615884 - DNA, 15 bp, Homo sapiens
agggcaggacaggac

SEQ ID NO: 615885 - DNA, 15 bp, Homo sapiens
gggcaggacaggaca

SEQ ID NO: 615886 - DNA, 15 bp, Homo sapiens
ggcaggacaggacag

SEQ ID NO: 615887 - DNA, 15 bp, Homo sapiens
gcaggacaggacagg

SEQ ID NO: 615888 - DNA, 15 bp, Homo sapiens
caggacaggacagga

SEQ ID NO: 615889 - DNA, 15 bp, Homo sapiens
aggacaggacaggac

SEQ ID NO: 615890 - DNA, 15 bp, Homo sapiens
ggacaggacaggaca

SEQ ID NO: 615891 - DNA, 15 bp, Homo sapiens
gacaggacaggacaa

SEQ ID NO: 615892 - DNA, 15 bp, Homo sapiens
acaggacaggacaag

SEQ ID NO: 615893 - DNA, 15 bp, Homo sapiens
caggacaggacaaga

SEQ ID NO: 615894 - DNA, 15 bp, Homo sapiens
aggacaggacaagac

SEQ ID NO: 615895 - DNA, 15 bp, Homo sapiens
ggacaggacaagaca

SEQ ID NO: 615896 - DNA, 15 bp, Homo sapiens
gacaggacaagacag

SEQ ID NO: 615897 - DNA, 15 bp, Homo sapiens
acaggacaagacagg

SEQ ID NO: 615898 - DNA, 15 bp, Homo sapiens
caggacaagacaggg

SEQ ID NO: 615899 - DNA, 15 bp, Homo sapiens
aggacaagacagggc

SEQ ID NO: 615900 - DNA, 15 bp, Homo sapiens
ggacaagacagggca

SEQ ID NO: 615901 - DNA, 15 bp, Homo sapiens
gacaagacagggcag

SEQ ID NO: 615902 - DNA, 15 bp, Homo sapiens
acaagacagggcagg

SEQ ID NO: 615903 - DNA, 15 bp, Homo sapiens
caagacagggcagga

SEQ ID NO: 615904 - DNA, 15 bp, Homo sapiens
aagacagggcaggat

SEQ ID NO: 615905 - DNA, 15 bp, Homo sapiens
agacagggcaggata

SEQ ID NO: 615906 - DNA, 15 bp, Homo sapiens
gacagggcaggatag

SEQ ID NO: 615907 - DNA, 15 bp, Homo sapiens
acagggcaggatagg

SEQ ID NO: 615908 - DNA, 15 bp, Homo sapiens
cagggcaggatagga

SEQ ID NO: 615909 - DNA, 15 bp, Homo sapiens
agggcaggataggat

SEQ ID NO: 615910 - DNA, 15 bp, Homo sapiens
gggcaggataggata

SEQ ID NO: 615911 - DNA, 15 bp, Homo sapiens
ggcaggataggatag

SEQ ID NO: 615912 - DNA, 15 bp, Homo sapiens
gcaggataggatagg

SEQ ID NO: 615913 - DNA, 15 bp, Homo sapiens
caggataggatagga

SEQ ID NO: 615914 - DNA, 15 bp, Homo sapiens
aggataggataggag

SEQ ID NO: 615915 - DNA, 15 bp, Homo sapiens
ggataggataggagc

SEQ ID NO: 615916 - DNA, 15 bp, Homo sapiens
gataggataggagcg

SEQ ID NO: 615917 - DNA, 15 bp, Homo sapiens
ataggataggagcga

SEQ ID NO: 615918 - DNA, 15 bp, Homo sapiens
taggataggagcgag

SEQ ID NO: 615919 - DNA, 15 bp, Homo sapiens
aggataggagcgagc

SEQ ID NO: 615920 - DNA, 15 bp, Homo sapiens
ggataggagcgagcc

SEQ ID NO: 615921 - DNA, 15 bp, Homo sapiens
gataggagcgagcca

SEQ ID NO: 615922 - DNA, 15 bp, Homo sapiens
ataggagcgagccag

SEQ ID NO: 615923 - DNA, 15 bp, Homo sapiens
taggagcgagccagc

SEQ ID NO: 615924 - DNA, 15 bp, Homo sapiens
aggagcgagccagct

SEQ ID NO: 615925 - DNA, 15 bp, Homo sapiens
ggagcgagccagctc

SEQ ID NO: 615926 - DNA, 15 bp, Homo sapiens
gagcgagccagctca

SEQ ID NO: 615927 - DNA, 15 bp, Homo sapiens
agcgagccagctcag

SEQ ID NO: 615928 - DNA, 15 bp, Homo sapiens
gcgagccagctcagt

SEQ ID NO: 615929 - DNA, 15 bp, Homo sapiens
cgagccagctcagta

SEQ ID NO: 615930 - DNA, 15 bp, Homo sapiens
gagccagctcagtag

SEQ ID NO: 615931 - DNA, 15 bp, Homo sapiens
agccagctcagtagc

SEQ ID NO: 615932 - DNA, 15 bp, Homo sapiens
gccagctcagtagct

SEQ ID NO: 615933 - DNA, 15 bp, Homo sapiens
ccagctcagtagctc

SEQ ID NO: 615934 - DNA, 15 bp, Homo sapiens
cagctcagtagctca

SEQ ID NO: 615935 - DNA, 15 bp, Homo sapiens
agctcagtagctcac

SEQ ID NO: 615936 - DNA, 15 bp, Homo sapiens
gctcagtagctcaca

SEQ ID NO: 615937 - DNA, 15 bp, Homo sapiens
ctcagtagctcacat

SEQ ID NO: 615938 - DNA, 15 bp, Homo sapiens
tcagtagctcacatt

SEQ ID NO: 615939 - DNA, 15 bp, Homo sapiens
cagtagctcacattt

SEQ ID NO: 615940 - DNA, 15 bp, Homo sapiens
agtagctcacatttg

SEQ ID NO: 615941 - DNA, 15 bp, Homo sapiens
gtagctcacatttgt

SEQ ID NO: 615942 - DNA, 15 bp, Homo sapiens
tagctcacatttgta

SEQ ID NO: 615943 - DNA, 15 bp, Homo sapiens
agctcacatttgtaa

SEQ ID NO: 615944 - DNA, 15 bp, Homo sapiens
gctcacatttgtaat

SEQ ID NO: 615945 - DNA, 15 bp, Homo sapiens
ctcacatttgtaatc

SEQ ID NO: 615946 - DNA, 15 bp, Homo sapiens
tcacatttgtaatcc

SEQ ID NO: 615947 - DNA, 15 bp, Homo sapiens
cacatttgtaatccc

SEQ ID NO: 615948 - DNA, 15 bp, Homo sapiens
acatttgtaatccca

SEQ ID NO: 615949 - DNA, 15 bp, Homo sapiens
catttgtaatcccag

SEQ ID NO: 615950 - DNA, 15 bp, Homo sapiens
atttgtaatcccagc

SEQ ID NO: 615951 - DNA, 15 bp, Homo sapiens
tttgtaatcccagcg

SEQ ID NO: 615952 - DNA, 15 bp, Homo sapiens
ttgtaatcccagcgc

SEQ ID NO: 615953 - DNA, 15 bp, Homo sapiens
tgtaatcccagcgcc

SEQ ID NO: 615954 - DNA, 15 bp, Homo sapiens
gtaatcccagcgcct

SEQ ID NO: 615955 - DNA, 15 bp, Homo sapiens
taatcccagcgcctt

SEQ ID NO: 615956 - DNA, 15 bp, Homo sapiens
aatcccagcgccttg

SEQ ID NO: 615957 - DNA, 15 bp, Homo sapiens
atcccagcgccttgg

SEQ ID NO: 615958 - DNA, 15 bp, Homo sapiens
tcccagcgccttggg

SEQ ID NO: 615959 - DNA, 15 bp, Homo sapiens
cccagcgccttgggg

SEQ ID NO: 615960 - DNA, 15 bp, Homo sapiens
ccagcgccttggggg

SEQ ID NO: 615961 - DNA, 15 bp, Homo sapiens
cagcgccttgggggg

SEQ ID NO: 615962 - DNA, 15 bp, Homo sapiens
agcgccttggggggc

SEQ ID NO: 615963 - DNA, 15 bp, Homo sapiens
gcgccttggggggct

SEQ ID NO: 615964 - DNA, 15 bp, Homo sapiens
cgccttggggggctg

SEQ ID NO: 615965 - DNA, 15 bp, Homo sapiens
gccttggggggctgc

SEQ ID NO: 615966 - DNA, 15 bp, Homo sapiens
ccttggggggctgcg

SEQ ID NO: 615967 - DNA, 15 bp, Homo sapiens
cttggggggctgcgg

SEQ ID NO: 615968 - DNA, 15 bp, Homo sapiens
ttggggggctgcggt

SEQ ID NO: 615969 - DNA, 15 bp, Homo sapiens
tggggggctgcggta

SEQ ID NO: 615970 - DNA, 15 bp, Homo sapiens
ggggggctgcggtag

SEQ ID NO: 615971 - DNA, 15 bp, Homo sapiens
gggggctgcggtagg

SEQ ID NO: 615972 - DNA, 15 bp, Homo sapiens
ggggctgcggtagga

SEQ ID NO: 615973 - DNA, 15 bp, Homo sapiens
gggctgcggtaggag

SEQ ID NO: 615974 - DNA, 15 bp, Homo sapiens
ggctgcggtaggaga

SEQ ID NO: 615975 - DNA, 15 bp, Homo sapiens
gctgcggtaggagaa

SEQ ID NO: 615976 - DNA, 15 bp, Homo sapiens
ctgcggtaggagaat

SEQ ID NO: 615977 - DNA, 15 bp, Homo sapiens
tgcggtaggagaatc

SEQ ID NO: 615978 - DNA, 15 bp, Homo sapiens
gcggtaggagaatcg

SEQ ID NO: 615979 - DNA, 15 bp, Homo sapiens
cggtaggagaatcgc

SEQ ID NO: 615980 - DNA, 15 bp, Homo sapiens
ggtaggagaatcgct

SEQ ID NO: 615981 - DNA, 15 bp, Homo sapiens
gtaggagaatcgctt

SEQ ID NO: 615982 - DNA, 15 bp, Homo sapiens
taggagaatcgcttt

SEQ ID NO: 615983 - DNA, 15 bp, Homo sapiens
aggagaatcgctttg

SEQ ID NO: 615984 - DNA, 15 bp, Homo sapiens
ggagaatcgctttgg

SEQ ID NO: 615985 - DNA, 15 bp, Homo sapiens
gagaatcgctttggg

SEQ ID NO: 615986 - DNA, 15 bp, Homo sapiens
agaatcgctttggga

SEQ ID NO: 615987 - DNA, 15 bp, Homo sapiens
gaatcgctttgggag

SEQ ID NO: 615988 - DNA, 15 bp, Homo sapiens
aatcgctttgggagc

SEQ ID NO: 615989 - DNA, 15 bp, Homo sapiens
atcgctttgggagca

SEQ ID NO: 615990 - DNA, 15 bp, Homo sapiens
tcgctttgggagcag

SEQ ID NO: 615991 - DNA, 15 bp, Homo sapiens
cgctttgggagcagg

SEQ ID NO: 615992 - DNA, 15 bp, Homo sapiens
gctttgggagcagga

SEQ ID NO: 615993 - DNA, 15 bp, Homo sapiens
ctttgggagcaggag

SEQ ID NO: 615994 - DNA, 15 bp, Homo sapiens
tttgggagcaggagt

SEQ ID NO: 615995 - DNA, 15 bp, Homo sapiens
ttgggagcaggagtt

SEQ ID NO: 615996 - DNA, 15 bp, Homo sapiens
tgggagcaggagttg

SEQ ID NO: 615997 - DNA, 15 bp, Homo sapiens
gggagcaggagttgc

SEQ ID NO: 615998 - DNA, 15 bp, Homo sapiens
ggagcaggagttgca

SEQ ID NO: 615999 - DNA, 15 bp, Homo sapiens
gagcaggagttgcag

SEQ ID NO: 616000 - DNA, 15 bp, Homo sapiens
agcaggagttgcagg

SEQ ID NO: 616001 - DNA, 15 bp, Homo sapiens
gcaggagttgcaggc

SEQ ID NO: 616002 - DNA, 15 bp, Homo sapiens
caggagttgcaggcc

SEQ ID NO: 616003 - DNA, 15 bp, Homo sapiens
aggagttgcaggccg

SEQ ID NO: 616004 - DNA, 15 bp, Homo sapiens
ggagttgcaggccgc

SEQ ID NO: 616005 - DNA, 15 bp, Homo sapiens
gagttgcaggccgca

SEQ ID NO: 616006 - DNA, 15 bp, Homo sapiens
agttgcaggccgcag

SEQ ID NO: 616007 - DNA, 15 bp, Homo sapiens
gttgcaggccgcagt

SEQ ID NO: 616008 - DNA, 15 bp, Homo sapiens
ttgcaggccgcagtg

SEQ ID NO: 616009 - DNA, 15 bp, Homo sapiens
tgcaggccgcagtga

SEQ ID NO: 616010 - DNA, 15 bp, Homo sapiens
gcaggccgcagtgag

SEQ ID NO: 616011 - DNA, 15 bp, Homo sapiens
caggccgcagtgagc

SEQ ID NO: 616012 - DNA, 15 bp, Homo sapiens
aggccgcagtgagct

SEQ ID NO: 616013 - DNA, 15 bp, Homo sapiens
ggccgcagtgagcta

SEQ ID NO: 616014 - DNA, 15 bp, Homo sapiens
gccgcagtgagctat

SEQ ID NO: 616015 - DNA, 15 bp, Homo sapiens
ccgcagtgagctatg

SEQ ID NO: 616016 - DNA, 15 bp, Homo sapiens
cgcagtgagctatga

SEQ ID NO: 616017 - DNA, 15 bp, Homo sapiens
gcagtgagctatgat

SEQ ID NO: 616018 - DNA, 15 bp, Homo sapiens
cagtgagctatgatc

SEQ ID NO: 616019 - DNA, 15 bp, Homo sapiens
agtgagctatgatca

SEQ ID NO: 616020 - DNA, 15 bp, Homo sapiens
gtgagctatgatcag

SEQ ID NO: 616021 - DNA, 15 bp, Homo sapiens
tgagctatgatcagc

SEQ ID NO: 616022 - DNA, 15 bp, Homo sapiens
gagctatgatcagct

SEQ ID NO: 616023 - DNA, 15 bp, Homo sapiens
agctatgatcagctt

SEQ ID NO: 616024 - DNA, 15 bp, Homo sapiens
gctatgatcagcttg

SEQ ID NO: 616025 - DNA, 15 bp, Homo sapiens
ctatgatcagcttgg

SEQ ID NO: 616026 - DNA, 15 bp, Homo sapiens
tatgatcagcttggg

SEQ ID NO: 616027 - DNA, 15 bp, Homo sapiens
atgatcagcttgggc

SEQ ID NO: 616028 - DNA, 15 bp, Homo sapiens
tgatcagcttgggcg

SEQ ID NO: 616029 - DNA, 15 bp, Homo sapiens
gatcagcttgggcga

SEQ ID NO: 616030 - DNA, 15 bp, Homo sapiens
atcagcttgggcgac

SEQ ID NO: 616031 - DNA, 15 bp, Homo sapiens
tcagcttgggcgact

SEQ ID NO: 616032 - DNA, 15 bp, Homo sapiens
cagcttgggcgactg

SEQ ID NO: 616033 - DNA, 15 bp, Homo sapiens
agcttgggcgactga

SEQ ID NO: 616034 - DNA, 15 bp, Homo sapiens
gcttgggcgactgag

SEQ ID NO: 616035 - DNA, 15 bp, Homo sapiens
cttgggcgactgagc

SEQ ID NO: 616036 - DNA, 15 bp, Homo sapiens
ttgggcgactgagcg

SEQ ID NO: 616037 - DNA, 15 bp, Homo sapiens
tgggcgactgagcga

SEQ ID NO: 616038 - DNA, 15 bp, Homo sapiens
gggcgactgagcgag

SEQ ID NO: 616039 - DNA, 15 bp, Homo sapiens
ggcgactgagcgaga

SEQ ID NO: 616040 - DNA, 15 bp, Homo sapiens
gcgactgagcgagac

SEQ ID NO: 616041 - DNA, 15 bp, Homo sapiens
cgactgagcgagacc

SEQ ID NO: 616042 - DNA, 15 bp, Homo sapiens
gactgagcgagaccc

SEQ ID NO: 616043 - DNA, 15 bp, Homo sapiens
actgagcgagaccct

SEQ ID NO: 616044 - DNA, 15 bp, Homo sapiens
ctgagcgagaccctg

SEQ ID NO: 616045 - DNA, 15 bp, Homo sapiens
tgagcgagaccctgt

SEQ ID NO: 616046 - DNA, 15 bp, Homo sapiens
gagcgagaccctgtc

SEQ ID NO: 616047 - DNA, 15 bp, Homo sapiens
agcgagaccctgtct

SEQ ID NO: 616048 - DNA, 15 bp, Homo sapiens
gcgagaccctgtctc

SEQ ID NO: 616049 - DNA, 15 bp, Homo sapiens
cgagaccctgtctct

SEQ ID NO: 616050 - DNA, 15 bp, Homo sapiens
gagaccctgtctcta

SEQ ID NO: 616051 - DNA, 15 bp, Homo sapiens
agaccctgtctctaa

SEQ ID NO: 616052 - DNA, 15 bp, Homo sapiens
gaccctgtctctaaa

SEQ ID NO: 616053 - DNA, 15 bp, Homo sapiens
accctgtctctaaaa

SEQ ID NO: 616054 - DNA, 15 bp, Homo sapiens
ccctgtctctaaaac

SEQ ID NO: 616055 - DNA, 15 bp, Homo sapiens
cctgtctctaaaaca

SEQ ID NO: 616056 - DNA, 15 bp, Homo sapiens
ctgtctctaaaacaa

SEQ ID NO: 616057 - DNA, 15 bp, Homo sapiens
tgtctctaaaacaaa

SEQ ID NO: 616058 - DNA, 15 bp, Homo sapiens
gtctctaaaacaaac

SEQ ID NO: 616059 - DNA, 15 bp, Homo sapiens
tctctaaaacaaaca

SEQ ID NO: 616060 - DNA, 15 bp, Homo sapiens
ctctaaaacaaacac

SEQ ID NO: 616061 - DNA, 15 bp, Homo sapiens
tctaaaacaaacaca

SEQ ID NO: 616062 - DNA, 15 bp, Homo sapiens
ctaaaacaaacacac

SEQ ID NO: 616063 - DNA, 15 bp, Homo sapiens
taaaacaaacacaca

SEQ ID NO: 616064 - DNA, 15 bp, Homo sapiens
aaaacaaacacacaa

SEQ ID NO: 616065 - DNA, 15 bp, Homo sapiens
aaacaaacacacaag

SEQ ID NO: 616066 - DNA, 15 bp, Homo sapiens
aacaaacacacaagt

SEQ ID NO: 616067 - DNA, 15 bp, Homo sapiens
acaaacacacaagtc

SEQ ID NO: 616068 - DNA, 15 bp, Homo sapiens
caaacacacaagtcc

SEQ ID NO: 616069 - DNA, 15 bp, Homo sapiens
aaacacacaagtccg

SEQ ID NO: 616070 - DNA, 15 bp, Homo sapiens
aacacacaagtccgg

SEQ ID NO: 616071 - DNA, 15 bp, Homo sapiens
acacacaagtccggg

SEQ ID NO: 616072 - DNA, 15 bp, Homo sapiens
cacacaagtccgggc

SEQ ID NO: 616073 - DNA, 15 bp, Homo sapiens
acacaagtccgggcg

SEQ ID NO: 616074 - DNA, 15 bp, Homo sapiens
cacaagtccgggcgc

SEQ ID NO: 616075 - DNA, 15 bp, Homo sapiens
acaagtccgggcgcg

SEQ ID NO: 616076 - DNA, 15 bp, Homo sapiens
caagtccgggcgcgg

SEQ ID NO: 616077 - DNA, 15 bp, Homo sapiens
aagtccgggcgcggt

SEQ ID NO: 616078 - DNA, 15 bp, Homo sapiens
agtccgggcgcggtg

SEQ ID NO: 616079 - DNA, 15 bp, Homo sapiens
gtccgggcgcggtgg

SEQ ID NO: 616080 - DNA, 15 bp, Homo sapiens
tccgggcgcggtggc

SEQ ID NO: 616081 - DNA, 15 bp, Homo sapiens
tggctcatgcctgta

SEQ ID NO: 616082 - DNA, 15 bp, Homo sapiens
ggctcatgcctgtaa

SEQ ID NO: 616083 - DNA, 15 bp, Homo sapiens
gctcatgcctgtaat

SEQ ID NO: 616084 - DNA, 15 bp, Homo sapiens
ctcatgcctgtaatc

SEQ ID NO: 616085 - DNA, 15 bp, Homo sapiens
tcatgcctgtaatct

SEQ ID NO: 616086 - DNA, 15 bp, Homo sapiens
catgcctgtaatctt

SEQ ID NO: 616087 - DNA, 15 bp, Homo sapiens
atgcctgtaatctta

SEQ ID NO: 616088 - DNA, 15 bp, Homo sapiens
tgcctgtaatcttag

SEQ ID NO: 616089 - DNA, 15 bp, Homo sapiens
gcctgtaatcttagc

SEQ ID NO: 616090 - DNA, 15 bp, Homo sapiens
cctgtaatcttagca

SEQ ID NO: 616091 - DNA, 15 bp, Homo sapiens
ctgtaatcttagcac

SEQ ID NO: 616092 - DNA, 15 bp, Homo sapiens
tgtaatcttagcact

SEQ ID NO: 616093 - DNA, 15 bp, Homo sapiens
gtaatcttagcactt

SEQ ID NO: 616094 - DNA, 15 bp, Homo sapiens
taatcttagcacttt

SEQ ID NO: 616095 - DNA, 15 bp, Homo sapiens
aatcttagcactttg

SEQ ID NO: 616096 - DNA, 15 bp, Homo sapiens
atcttagcactttgg

SEQ ID NO: 616097 - DNA, 15 bp, Homo sapiens
tcttagcactttggg

SEQ ID NO: 616098 - DNA, 15 bp, Homo sapiens
cttagcactttggga

SEQ ID NO: 616099 - DNA, 15 bp, Homo sapiens
ttagcactttgggag

SEQ ID NO: 616100 - DNA, 15 bp, Homo sapiens
tagcactttgggagg

SEQ ID NO: 616101 - DNA, 15 bp, Homo sapiens
gcactttgggaggcc

SEQ ID NO: 616102 - DNA, 15 bp, Homo sapiens
cactttgggaggccg

SEQ ID NO: 616103 - DNA, 15 bp, Homo sapiens
actttgggaggccga

SEQ ID NO: 616104 - DNA, 15 bp, Homo sapiens
ctttgggaggccgag

SEQ ID NO: 616105 - DNA, 15 bp, Homo sapiens
tttgggaggccgagg

SEQ ID NO: 616106 - DNA, 15 bp, Homo sapiens
ttgggaggccgaggt

SEQ ID NO: 616107 - DNA, 15 bp, Homo sapiens
tgggaggccgaggtg

SEQ ID NO: 616108 - DNA, 15 bp, Homo sapiens
gggaggccgaggtgg

SEQ ID NO: 616109 - DNA, 15 bp, Homo sapiens
ggaggccgaggtggg

SEQ ID NO: 616110 - DNA, 15 bp, Homo sapiens
gaggccgaggtgggc

SEQ ID NO: 616111 - DNA, 15 bp, Homo sapiens
aggccgaggtgggcg

SEQ ID NO: 616112 - DNA, 15 bp, Homo sapiens
ggccgaggtgggcgg

SEQ ID NO: 616113 - DNA, 15 bp, Homo sapiens
gccgaggtgggcgga

SEQ ID NO: 616114 - DNA, 15 bp, Homo sapiens
ccgaggtgggcggat

SEQ ID NO: 616115 - DNA, 15 bp, Homo sapiens
cgaggtgggcggatc

SEQ ID NO: 616116 - DNA, 15 bp, Homo sapiens
gaggtgggcggatca

SEQ ID NO: 616117 - DNA, 15 bp, Homo sapiens
aggtgggcggatcac

SEQ ID NO: 616118 - DNA, 15 bp, Homo sapiens
ggtgggcggatcacg

SEQ ID NO: 616119 - DNA, 15 bp, Homo sapiens
gtgggcggatcacga

SEQ ID NO: 616120 - DNA, 15 bp, Homo sapiens
tgggcggatcacgag

SEQ ID NO: 616121 - DNA, 15 bp, Homo sapiens
gggcggatcacgagg

SEQ ID NO: 616122 - DNA, 15 bp, Homo sapiens
ggcggatcacgaggt

SEQ ID NO: 616123 - DNA, 15 bp, Homo sapiens
gcggatcacgaggtc

SEQ ID NO: 616124 - DNA, 15 bp, Homo sapiens
cggatcacgaggtca

SEQ ID NO: 616125 - DNA, 15 bp, Homo sapiens
ggatcacgaggtcaa

SEQ ID NO: 616126 - DNA, 15 bp, Homo sapiens
gatcacgaggtcaag

SEQ ID NO: 616127 - DNA, 15 bp, Homo sapiens
atcacgaggtcaaga

SEQ ID NO: 616128 - DNA, 15 bp, Homo sapiens
tcacgaggtcaagaa

SEQ ID NO: 616129 - DNA, 15 bp, Homo sapiens
cacgaggtcaagaaa

SEQ ID NO: 616130 - DNA, 15 bp, Homo sapiens
acgaggtcaagaaat

SEQ ID NO: 616131 - DNA, 15 bp, Homo sapiens
cgaggtcaagaaatc

SEQ ID NO: 616132 - DNA, 15 bp, Homo sapiens
gaggtcaagaaatcg

SEQ ID NO: 616133 - DNA, 15 bp, Homo sapiens
aggtcaagaaatcga

SEQ ID NO: 616134 - DNA, 15 bp, Homo sapiens
ggtcaagaaatcgag

SEQ ID NO: 616135 - DNA, 15 bp, Homo sapiens
gtcaagaaatcgaga

SEQ ID NO: 616136 - DNA, 15 bp, Homo sapiens
tcaagaaatcgagac

SEQ ID NO: 616137 - DNA, 15 bp, Homo sapiens
caagaaatcgagacc

SEQ ID NO: 616138 - DNA, 15 bp, Homo sapiens
aagaaatcgagacca

SEQ ID NO: 616139 - DNA, 15 bp, Homo sapiens
agaaatcgagaccat

SEQ ID NO: 616140 - DNA, 15 bp, Homo sapiens
gaaatcgagaccatc

SEQ ID NO: 616141 - DNA, 15 bp, Homo sapiens
aaatcgagaccatcc

SEQ ID NO: 616142 - DNA, 15 bp, Homo sapiens
aatcgagaccatcct

SEQ ID NO: 616143 - DNA, 15 bp, Homo sapiens
atcgagaccatcctg

SEQ ID NO: 616144 - DNA, 15 bp, Homo sapiens
tcgagaccatcctgg

SEQ ID NO: 616145 - DNA, 15 bp, Homo sapiens
cgagaccatcctggc

SEQ ID NO: 616146 - DNA, 15 bp, Homo sapiens
gagaccatcctggcc

SEQ ID NO: 616147 - DNA, 15 bp, Homo sapiens
agaccatcctggcca

SEQ ID NO: 616148 - DNA, 15 bp, Homo sapiens
gaccatcctggccaa

SEQ ID NO: 616149 - DNA, 15 bp, Homo sapiens
accatcctggccaac

SEQ ID NO: 616150 - DNA, 15 bp, Homo sapiens
ccatcctggccaaca

SEQ ID NO: 616151 - DNA, 15 bp, Homo sapiens
catcctggccaacat

SEQ ID NO: 616152 - DNA, 15 bp, Homo sapiens
atcctggccaacatg

SEQ ID NO: 616153 - DNA, 15 bp, Homo sapiens
tcctggccaacatgg

SEQ ID NO: 616154 - DNA, 15 bp, Homo sapiens
cctggccaacatggt

SEQ ID NO: 616155 - DNA, 15 bp, Homo sapiens
ctggccaacatggtg

SEQ ID NO: 616156 - DNA, 15 bp, Homo sapiens
tggccaacatggtga

SEQ ID NO: 616157 - DNA, 15 bp, Homo sapiens
ggccaacatggtgaa

SEQ ID NO: 616158 - DNA, 15 bp, Homo sapiens
gccaacatggtgaaa

SEQ ID NO: 616159 - DNA, 15 bp, Homo sapiens
ccaacatggtgaaac

SEQ ID NO: 616160 - DNA, 15 bp, Homo sapiens
catggtgaaaccccg

SEQ ID NO: 616161 - DNA, 15 bp, Homo sapiens
atggtgaaaccccgt

SEQ ID NO: 616162 - DNA, 15 bp, Homo sapiens
tggtgaaaccccgtc

SEQ ID NO: 616163 - DNA, 15 bp, Homo sapiens
ggtgaaaccccgtct

SEQ ID NO: 616164 - DNA, 15 bp, Homo sapiens
gtgaaaccccgtctc

SEQ ID NO: 616165 - DNA, 15 bp, Homo sapiens
tgaaaccccgtctct

SEQ ID NO: 616166 - DNA, 15 bp, Homo sapiens
gaaaccccgtctcta

SEQ ID NO: 616167 - DNA, 15 bp, Homo sapiens
aaaccccgtctctac

SEQ ID NO: 616168 - DNA, 15 bp, Homo sapiens
aaccccgtctctact

SEQ ID NO: 616169 - DNA, 15 bp, Homo sapiens
accccgtctctacta

SEQ ID NO: 616170 - DNA, 15 bp, Homo sapiens
ccccgtctctactaa

SEQ ID NO: 616171 - DNA, 15 bp, Homo sapiens
gggcgtggtggtgcg

SEQ ID NO: 616172 - DNA, 15 bp, Homo sapiens
ggcgtggtggtgcgc

SEQ ID NO: 616173 - DNA, 15 bp, Homo sapiens
gcgtggtggtgcgcg

SEQ ID NO: 616174 - DNA, 15 bp, Homo sapiens
cgtggtggtgcgcgc

SEQ ID NO: 616175 - DNA, 15 bp, Homo sapiens
gtggtggtgcgcgcc

SEQ ID NO: 616176 - DNA, 15 bp, Homo sapiens
tggtggtgcgcgcct

SEQ ID NO: 616177 - DNA, 15 bp, Homo sapiens
ggtggtgcgcgcctg

SEQ ID NO: 616178 - DNA, 15 bp, Homo sapiens
gtggtgcgcgcctgt

SEQ ID NO: 616179 - DNA, 15 bp, Homo sapiens
tggtgcgcgcctgta

SEQ ID NO: 616180 - DNA, 15 bp, Homo sapiens
ggtgcgcgcctgtag

SEQ ID NO: 616181 - DNA, 15 bp, Homo sapiens
gtgcgcgcctgtagt

SEQ ID NO: 616182 - DNA, 15 bp, Homo sapiens
tgcgcgcctgtagtc

SEQ ID NO: 616183 - DNA, 15 bp, Homo sapiens
gcgcgcctgtagtcc

SEQ ID NO: 616184 - DNA, 15 bp, Homo sapiens
cgcgcctgtagtccc

SEQ ID NO: 616185 - DNA, 15 bp, Homo sapiens
gcgcctgtagtccca

SEQ ID NO: 616186 - DNA, 15 bp, Homo sapiens
cgcctgtagtcccag

SEQ ID NO: 616187 - DNA, 15 bp, Homo sapiens
gcctgtagtcccagc

SEQ ID NO: 616188 - DNA, 15 bp, Homo sapiens
agtcccagctactcg

SEQ ID NO: 616189 - DNA, 15 bp, Homo sapiens
gtcccagctactcgg

SEQ ID NO: 616190 - DNA, 15 bp, Homo sapiens
tcccagctactcggg

SEQ ID NO: 616191 - DNA, 15 bp, Homo sapiens
cccagctactcggga

SEQ ID NO: 616192 - DNA, 15 bp, Homo sapiens
ccagctactcgggag

SEQ ID NO: 616193 - DNA, 15 bp, Homo sapiens
cagctactcgggagg

SEQ ID NO: 616194 - DNA, 15 bp, Homo sapiens
agctactcgggaggc

SEQ ID NO: 616195 - DNA, 15 bp, Homo sapiens
gctactcgggaggct

SEQ ID NO: 616196 - DNA, 15 bp, Homo sapiens
ctactcgggaggctg

SEQ ID NO: 616197 - DNA, 15 bp, Homo sapiens
tactcgggaggctga

SEQ ID NO: 616198 - DNA, 15 bp, Homo sapiens
actcgggaggctgag

SEQ ID NO: 616199 - DNA, 15 bp, Homo sapiens
ctcgggaggctgagg

SEQ ID NO: 616200 - DNA, 15 bp, Homo sapiens
tcgggaggctgaggc

SEQ ID NO: 616201 - DNA, 15 bp, Homo sapiens
cgggaggctgaggca

SEQ ID NO: 616202 - DNA, 15 bp, Homo sapiens
ctgaggcaggagaat

SEQ ID NO: 616203 - DNA, 15 bp, Homo sapiens
tgaggcaggagaatc

SEQ ID NO: 616204 - DNA, 15 bp, Homo sapiens
gaggcaggagaatcg

SEQ ID NO: 616205 - DNA, 15 bp, Homo sapiens
aggcaggagaatcgc

SEQ ID NO: 616206 - DNA, 15 bp, Homo sapiens
ggcaggagaatcgct

SEQ ID NO: 616207 - DNA, 15 bp, Homo sapiens
gcaggagaatcgctt

SEQ ID NO: 616208 - DNA, 15 bp, Homo sapiens
caggagaatcgcttg

SEQ ID NO: 616209 - DNA, 15 bp, Homo sapiens
aggagaatcgcttga

SEQ ID NO: 616210 - DNA, 15 bp, Homo sapiens
ggagaatcgcttgaa

SEQ ID NO: 616211 - DNA, 15 bp, Homo sapiens
gagaatcgcttgaac

SEQ ID NO: 616212 - DNA, 15 bp, Homo sapiens
gaatcgcttgaaccc

SEQ ID NO: 616213 - DNA, 15 bp, Homo sapiens
aatcgcttgaacccg

SEQ ID NO: 616214 - DNA, 15 bp, Homo sapiens
atcgcttgaacccgg

SEQ ID NO: 616215 - DNA, 15 bp, Homo sapiens
tcgcttgaacccggg

SEQ ID NO: 616216 - DNA, 15 bp, Homo sapiens
cgcttgaacccggga

SEQ ID NO: 616217 - DNA, 15 bp, Homo sapiens
gcttgaacccgggag

SEQ ID NO: 616218 - DNA, 15 bp, Homo sapiens
cttgaacccgggagg

SEQ ID NO: 616219 - DNA, 15 bp, Homo sapiens
ttgaacccgggaggc

SEQ ID NO: 616220 - DNA, 15 bp, Homo sapiens
tgaacccgggaggca

SEQ ID NO: 616221 - DNA, 15 bp, Homo sapiens
gaacccgggaggcag

SEQ ID NO: 616222 - DNA, 15 bp, Homo sapiens
aacccgggaggcaga

SEQ ID NO: 616223 - DNA, 15 bp, Homo sapiens
acccgggaggcagag

SEQ ID NO: 616224 - DNA, 15 bp, Homo sapiens
cccgggaggcagagg

SEQ ID NO: 616225 - DNA, 15 bp, Homo sapiens
ccgggaggcagaggt

SEQ ID NO: 616226 - DNA, 15 bp, Homo sapiens
cgggaggcagaggtt

SEQ ID NO: 616227 - DNA, 15 bp, Homo sapiens
gggaggcagaggttg

SEQ ID NO: 616228 - DNA, 15 bp, Homo sapiens
ggttgcagtgagccg

SEQ ID NO: 616229 - DNA, 15 bp, Homo sapiens
gttgcagtgagccga

SEQ ID NO: 616230 - DNA, 15 bp, Homo sapiens
ttgcagtgagccgag

SEQ ID NO: 616231 - DNA, 15 bp, Homo sapiens
tgcagtgagccgaga

SEQ ID NO: 616232 - DNA, 15 bp, Homo sapiens
gcagtgagccgagat

SEQ ID NO: 616233 - DNA, 15 bp, Homo sapiens
cagtgagccgagatc

SEQ ID NO: 616234 - DNA, 15 bp, Homo sapiens
agtgagccgagatcg

SEQ ID NO: 616235 - DNA, 15 bp, Homo sapiens
gtgagccgagatcgt

SEQ ID NO: 616236 - DNA, 15 bp, Homo sapiens
tgagccgagatcgtg

SEQ ID NO: 616237 - DNA, 15 bp, Homo sapiens
gagccgagatcgtgc

SEQ ID NO: 616238 - DNA, 15 bp, Homo sapiens
agccgagatcgtgcc

SEQ ID NO: 616239 - DNA, 15 bp, Homo sapiens
gccgagatcgtgcca

SEQ ID NO: 616240 - DNA, 15 bp, Homo sapiens
ccgagatcgtgccac

SEQ ID NO: 616241 - DNA, 15 bp, Homo sapiens
cgagatcgtgccact

SEQ ID NO: 616242 - DNA, 15 bp, Homo sapiens
gagatcgtgccactg

SEQ ID NO: 616243 - DNA, 15 bp, Homo sapiens
gcactccagcctggc

SEQ ID NO: 616244 - DNA, 15 bp, Homo sapiens
cactccagcctggcg

SEQ ID NO: 616245 - DNA, 15 bp, Homo sapiens
actccagcctggcga

SEQ ID NO: 616246 - DNA, 15 bp, Homo sapiens
ctccagcctggcgac

SEQ ID NO: 616247 - DNA, 15 bp, Homo sapiens
tccagcctggcgaca

SEQ ID NO: 616248 - DNA, 15 bp, Homo sapiens
ccagcctggcgacag

SEQ ID NO: 616249 - DNA, 15 bp, Homo sapiens
cagcctggcgacaga

SEQ ID NO: 616250 - DNA, 15 bp, Homo sapiens
agcctggcgacagag

SEQ ID NO: 616251 - DNA, 15 bp, Homo sapiens
gcctggcgacagagt

SEQ ID NO: 616252 - DNA, 15 bp, Homo sapiens
cctggcgacagagtg

SEQ ID NO: 616253 - DNA, 15 bp, Homo sapiens
ctggcgacagagtga

SEQ ID NO: 616254 - DNA, 15 bp, Homo sapiens
tggcgacagagtgag

SEQ ID NO: 616255 - DNA, 15 bp, Homo sapiens
ggcgacagagtgaga

SEQ ID NO: 616256 - DNA, 15 bp, Homo sapiens
gcgacagagtgagac

SEQ ID NO: 616257 - DNA, 15 bp, Homo sapiens
cgacagagtgagact

SEQ ID NO: 616258 - DNA, 15 bp, Homo sapiens
gacagagtgagactc

SEQ ID NO: 616259 - DNA, 15 bp, Homo sapiens
acagagtgagactcc

SEQ ID NO: 616260 - DNA, 15 bp, Homo sapiens
cagagtgagactccg

SEQ ID NO: 616261 - DNA, 15 bp, Homo sapiens
agagtgagactccgt

SEQ ID NO: 616262 - DNA, 15 bp, Homo sapiens
gagtgagactccgtc

SEQ ID NO: 616263 - DNA, 15 bp, Homo sapiens
agtgagactccgtct

SEQ ID NO: 616264 - DNA, 15 bp, Homo sapiens
gtgagactccgtctc

SEQ ID NO: 616265 - DNA, 15 bp, Homo sapiens
tgagactccgtctca

SEQ ID NO: 616266 - DNA, 15 bp, Homo sapiens
gagactccgtctcag

SEQ ID NO: 616267 - DNA, 15 bp, Homo sapiens
agactccgtctcaga

SEQ ID NO: 616268 - DNA, 15 bp, Homo sapiens
gactccgtctcagaa

SEQ ID NO: 616269 - DNA, 15 bp, Homo sapiens
actccgtctcagaac

SEQ ID NO: 616270 - DNA, 15 bp, Homo sapiens
ctccgtctcagaaca

SEQ ID NO: 616271 - DNA, 15 bp, Homo sapiens
tccgtctcagaacaa

SEQ ID NO: 616272 - DNA, 15 bp, Homo sapiens
ccgtctcagaacaaa

SEQ ID NO: 616273 - DNA, 15 bp, Homo sapiens
cgtctcagaacaaac

SEQ ID NO: 616274 - DNA, 15 bp, Homo sapiens
gtctcagaacaaaca

SEQ ID NO: 616275 - DNA, 15 bp, Homo sapiens
tctcagaacaaacaa

SEQ ID NO: 616276 - DNA, 15 bp, Homo sapiens
ctcagaacaaacaaa

SEQ ID NO: 616277 - DNA, 15 bp, Homo sapiens
tcagaacaaacaaac

SEQ ID NO: 616278 - DNA, 15 bp, Homo sapiens
cagaacaaacaaaca

SEQ ID NO: 616279 - DNA, 15 bp, Homo sapiens
agaacaaacaaacaa

SEQ ID NO: 616280 - DNA, 15 bp, Homo sapiens
gaacaaacaaacaaa

SEQ ID NO: 616281 - DNA, 15 bp, Homo sapiens
aacaaacaaacaaaa

SEQ ID NO: 616282 - DNA, 15 bp, Homo sapiens
acaaacaaacaaaag

SEQ ID NO: 616283 - DNA, 15 bp, Homo sapiens
caaacaaacaaaagg

SEQ ID NO: 616284 - DNA, 15 bp, Homo sapiens
aaacaaacaaaagga

SEQ ID NO: 616285 - DNA, 15 bp, Homo sapiens
aacaaacaaaaggat

SEQ ID NO: 616286 - DNA, 15 bp, Homo sapiens
acaaacaaaaggata

SEQ ID NO: 616287 - DNA, 15 bp, Homo sapiens
caaacaaaaggatag

SEQ ID NO: 616288 - DNA, 15 bp, Homo sapiens
aaacaaaaggataga

SEQ ID NO: 616289 - DNA, 15 bp, Homo sapiens
aacaaaaggatagaa

SEQ ID NO: 616290 - DNA, 15 bp, Homo sapiens
acaaaaggatagaaa

SEQ ID NO: 616291 - DNA, 15 bp, Homo sapiens
caaaaggatagaaag

SEQ ID NO: 616292 - DNA, 15 bp, Homo sapiens
aaaaggatagaaagg

SEQ ID NO: 616293 - DNA, 15 bp, Homo sapiens
aaaggatagaaaggc

SEQ ID NO: 616294 - DNA, 15 bp, Homo sapiens
aaggatagaaaggcg

SEQ ID NO: 616295 - DNA, 15 bp, Homo sapiens
aggatagaaaggcga

SEQ ID NO: 616296 - DNA, 15 bp, Homo sapiens
ggatagaaaggcgag

SEQ ID NO: 616297 - DNA, 15 bp, Homo sapiens
gatagaaaggcgagc

SEQ ID NO: 616298 - DNA, 15 bp, Homo sapiens
atagaaaggcgagca

SEQ ID NO: 616299 - DNA, 15 bp, Homo sapiens
tagaaaggcgagcac

SEQ ID NO: 616300 - DNA, 15 bp, Homo sapiens
agaaaggcgagcaca

SEQ ID NO: 616301 - DNA, 15 bp, Homo sapiens
gaaaggcgagcacaa

SEQ ID NO: 616302 - DNA, 15 bp, Homo sapiens
aaaggcgagcacaaa

SEQ ID NO: 616303 - DNA, 15 bp, Homo sapiens
aaggcgagcacaaat

SEQ ID NO: 616304 - DNA, 15 bp, Homo sapiens
aggcgagcacaaata

SEQ ID NO: 616305 - DNA, 15 bp, Homo sapiens
ggcgagcacaaatat

SEQ ID NO: 616306 - DNA, 15 bp, Homo sapiens
gcgagcacaaatatt

SEQ ID NO: 616307 - DNA, 15 bp, Homo sapiens
cgagcacaaatattc

SEQ ID NO: 616308 - DNA, 15 bp, Homo sapiens
gagcacaaatattcc

SEQ ID NO: 616309 - DNA, 15 bp, Homo sapiens
agcacaaatattccc

SEQ ID NO: 616310 - DNA, 15 bp, Homo sapiens
gcacaaatattccca

SEQ ID NO: 616311 - DNA, 15 bp, Homo sapiens
cacaaatattcccaa

SEQ ID NO: 616312 - DNA, 15 bp, Homo sapiens
acaaatattcccaat

SEQ ID NO: 616313 - DNA, 15 bp, Homo sapiens
caaatattcccaatt

SEQ ID NO: 616314 - DNA, 15 bp, Homo sapiens
aaatattcccaattc

SEQ ID NO: 616315 - DNA, 15 bp, Homo sapiens
aatattcccaattca

SEQ ID NO: 616316 - DNA, 15 bp, Homo sapiens
atattcccaattcat

SEQ ID NO: 616317 - DNA, 15 bp, Homo sapiens
tattcccaattcata

SEQ ID NO: 616318 - DNA, 15 bp, Homo sapiens
attcccaattcataa

SEQ ID NO: 616319 - DNA, 15 bp, Homo sapiens
ttcccaattcataac

SEQ ID NO: 616320 - DNA, 15 bp, Homo sapiens
tcccaattcataaca

SEQ ID NO: 616321 - DNA, 15 bp, Homo sapiens
cccaattcataacac

SEQ ID NO: 616322 - DNA, 15 bp, Homo sapiens
ccaattcataacact

SEQ ID NO: 616323 - DNA, 15 bp, Homo sapiens
caattcataacactc

SEQ ID NO: 616324 - DNA, 15 bp, Homo sapiens
aattcataacactcc

SEQ ID NO: 616325 - DNA, 15 bp, Homo sapiens
attcataacactccc

SEQ ID NO: 616326 - DNA, 15 bp, Homo sapiens
ttcataacactccct

SEQ ID NO: 616327 - DNA, 15 bp, Homo sapiens
tcataacactccctc

SEQ ID NO: 616328 - DNA, 15 bp, Homo sapiens
cataacactccctcg

SEQ ID NO: 616329 - DNA, 15 bp, Homo sapiens
ataacactccctcgc

SEQ ID NO: 616330 - DNA, 15 bp, Homo sapiens
taacactccctcgca

SEQ ID NO: 616331 - DNA, 15 bp, Homo sapiens
aacactccctcgcac

SEQ ID NO: 616332 - DNA, 15 bp, Homo sapiens
acactccctcgcact

SEQ ID NO: 616333 - DNA, 15 bp, Homo sapiens
cactccctcgcactg

SEQ ID NO: 616334 - DNA, 15 bp, Homo sapiens
actccctcgcactgt

SEQ ID NO: 616335 - DNA, 15 bp, Homo sapiens
ctccctcgcactgtc

SEQ ID NO: 616336 - DNA, 15 bp, Homo sapiens
tccctcgcactgtca

SEQ ID NO: 616337 - DNA, 15 bp, Homo sapiens
ccctcgcactgtcaa

SEQ ID NO: 616338 - DNA, 15 bp, Homo sapiens
cctcgcactgtcaat

SEQ ID NO: 616339 - DNA, 15 bp, Homo sapiens
ctcgcactgtcaatg

SEQ ID NO: 616340 - DNA, 15 bp, Homo sapiens
tcgcactgtcaatgc

SEQ ID NO: 616341 - DNA, 15 bp, Homo sapiens
cgcactgtcaatgcc

SEQ ID NO: 616342 - DNA, 15 bp, Homo sapiens
gcactgtcaatgccc

SEQ ID NO: 616343 - DNA, 15 bp, Homo sapiens
cactgtcaatgcccc

SEQ ID NO: 616344 - DNA, 15 bp, Homo sapiens
actgtcaatgcccca

SEQ ID NO: 616345 - DNA, 15 bp, Homo sapiens
ctgtcaatgccccag

SEQ ID NO: 616346 - DNA, 15 bp, Homo sapiens
tgtcaatgccccaga

SEQ ID NO: 616347 - DNA, 15 bp, Homo sapiens
gtcaatgccccagac

SEQ ID NO: 616348 - DNA, 15 bp, Homo sapiens
tcaatgccccagaca

SEQ ID NO: 616349 - DNA, 15 bp, Homo sapiens
caatgccccagacac

SEQ ID NO: 616350 - DNA, 15 bp, Homo sapiens
aatgccccagacacg

SEQ ID NO: 616351 - DNA, 15 bp, Homo sapiens
atgccccagacacgc

SEQ ID NO: 616352 - DNA, 15 bp, Homo sapiens
tgccccagacacgcg

SEQ ID NO: 616353 - DNA, 15 bp, Homo sapiens
gccccagacacgcgc

SEQ ID NO: 616354 - DNA, 15 bp, Homo sapiens
ccccagacacgcgct

SEQ ID NO: 616355 - DNA, 15 bp, Homo sapiens
cccagacacgcgcta

SEQ ID NO: 616356 - DNA, 15 bp, Homo sapiens
ccagacacgcgctat

SEQ ID NO: 616357 - DNA, 15 bp, Homo sapiens
cagacacgcgctatc

SEQ ID NO: 616358 - DNA, 15 bp, Homo sapiens
agacacgcgctatca

SEQ ID NO: 616359 - DNA, 15 bp, Homo sapiens
gacacgcgctatcat

SEQ ID NO: 616360 - DNA, 15 bp, Homo sapiens
acacgcgctatcatc

SEQ ID NO: 616361 - DNA, 15 bp, Homo sapiens
cacgcgctatcatct

SEQ ID NO: 616362 - DNA, 15 bp, Homo sapiens
acgcgctatcatctc

SEQ ID NO: 616363 - DNA, 15 bp, Homo sapiens
cgcgctatcatctct

SEQ ID NO: 616364 - DNA, 15 bp, Homo sapiens
gcgctatcatctcta

SEQ ID NO: 616365 - DNA, 15 bp, Homo sapiens
cgctatcatctctag

SEQ ID NO: 616366 - DNA, 15 bp, Homo sapiens
gctatcatctctagc

SEQ ID NO: 616367 - DNA, 15 bp, Homo sapiens
ctatcatctctagca

SEQ ID NO: 616368 - DNA, 15 bp, Homo sapiens
tatcatctctagcaa

SEQ ID NO: 616369 - DNA, 15 bp, Homo sapiens
atcatctctagcaaa

SEQ ID NO: 616370 - DNA, 15 bp, Homo sapiens
tcatctctagcaaac

SEQ ID NO: 616371 - DNA, 15 bp, Homo sapiens
catctctagcaaact

SEQ ID NO: 616372 - DNA, 15 bp, Homo sapiens
atctctagcaaactc

SEQ ID NO: 616373 - DNA, 15 bp, Homo sapiens
tctctagcaaactcc

SEQ ID NO: 616374 - DNA, 15 bp, Homo sapiens
ctctagcaaactccc

SEQ ID NO: 616375 - DNA, 15 bp, Homo sapiens
tctagcaaactcccc

SEQ ID NO: 616376 - DNA, 15 bp, Homo sapiens
ctagcaaactccccc

SEQ ID NO: 616377 - DNA, 15 bp, Homo sapiens
tagcaaactccccca

SEQ ID NO: 616378 - DNA, 15 bp, Homo sapiens
agcaaactcccccag

SEQ ID NO: 616379 - DNA, 15 bp, Homo sapiens
gcaaactcccccagg

SEQ ID NO: 616380 - DNA, 15 bp, Homo sapiens
caaactcccccaggc

SEQ ID NO: 616381 - DNA, 15 bp, Homo sapiens
aaactcccccaggcg

SEQ ID NO: 616382 - DNA, 15 bp, Homo sapiens
aactcccccaggcgc

SEQ ID NO: 616383 - DNA, 15 bp, Homo sapiens
actcccccaggcgcc

SEQ ID NO: 616384 - DNA, 15 bp, Homo sapiens
ctcccccaggcgcct

SEQ ID NO: 616385 - DNA, 15 bp, Homo sapiens
tcccccaggcgcctg

SEQ ID NO: 616386 - DNA, 15 bp, Homo sapiens
cccccaggcgcctgc

SEQ ID NO: 616387 - DNA, 15 bp, Homo sapiens
ccccaggcgcctgca

SEQ ID NO: 616388 - DNA, 15 bp, Homo sapiens
cccaggcgcctgcag

SEQ ID NO: 616389 - DNA, 15 bp, Homo sapiens
ccaggcgcctgcagg

SEQ ID NO: 616390 - DNA, 15 bp, Homo sapiens
caggcgcctgcagga

SEQ ID NO: 616391 - DNA, 15 bp, Homo sapiens
aggcgcctgcaggat

SEQ ID NO: 616392 - DNA, 15 bp, Homo sapiens
ggcgcctgcaggatg

SEQ ID NO: 616393 - DNA, 15 bp, Homo sapiens
gcgcctgcaggatgg

SEQ ID NO: 616394 - DNA, 15 bp, Homo sapiens
cgcctgcaggatggg

SEQ ID NO: 616395 - DNA, 15 bp, Homo sapiens
gcctgcaggatgggt

SEQ ID NO: 616396 - DNA, 15 bp, Homo sapiens
cctgcaggatgggtt

SEQ ID NO: 616397 - DNA, 15 bp, Homo sapiens
ctgcaggatgggtta

SEQ ID NO: 616398 - DNA, 15 bp, Homo sapiens
tgcaggatgggttaa

SEQ ID NO: 616399 - DNA, 15 bp, Homo sapiens
gcaggatgggttaag

SEQ ID NO: 616400 - DNA, 15 bp, Homo sapiens
caggatgggttaagg

SEQ ID NO: 616401 - DNA, 15 bp, Homo sapiens
aggatgggttaagga

SEQ ID NO: 616402 - DNA, 15 bp, Homo sapiens
ggatgggttaaggaa

SEQ ID NO: 616403 - DNA, 15 bp, Homo sapiens
gatgggttaaggaag

SEQ ID NO: 616404 - DNA, 15 bp, Homo sapiens
atgggttaaggaagg

SEQ ID NO: 616405 - DNA, 15 bp, Homo sapiens
tgggttaaggaaggc

SEQ ID NO: 616406 - DNA, 15 bp, Homo sapiens
gggttaaggaaggcg

SEQ ID NO: 616407 - DNA, 15 bp, Homo sapiens
ggttaaggaaggcga

SEQ ID NO: 616408 - DNA, 15 bp, Homo sapiens
gttaaggaaggcgac

SEQ ID NO: 616409 - DNA, 15 bp, Homo sapiens
ttaaggaaggcgacg

SEQ ID NO: 616410 - DNA, 15 bp, Homo sapiens
taaggaaggcgacga

SEQ ID NO: 616411 - DNA, 15 bp, Homo sapiens
aaggaaggcgacgag

SEQ ID NO: 616412 - DNA, 15 bp, Homo sapiens
aggaaggcgacgagc

SEQ ID NO: 616413 - DNA, 15 bp, Homo sapiens
ggaaggcgacgagca

SEQ ID NO: 616414 - DNA, 15 bp, Homo sapiens
gaaggcgacgagcac

SEQ ID NO: 616415 - DNA, 15 bp, Homo sapiens
aaggcgacgagcacc

SEQ ID NO: 616416 - DNA, 15 bp, Homo sapiens
aggcgacgagcacca

SEQ ID NO: 616417 - DNA, 15 bp, Homo sapiens
ggcgacgagcaccag

SEQ ID NO: 616418 - DNA, 15 bp, Homo sapiens
gcgacgagcaccagc

SEQ ID NO: 616419 - DNA, 15 bp, Homo sapiens
cgacgagcaccagct

SEQ ID NO: 616420 - DNA, 15 bp, Homo sapiens
gacgagcaccagctg

SEQ ID NO: 616421 - DNA, 15 bp, Homo sapiens
acgagcaccagctgc

SEQ ID NO: 616422 - DNA, 15 bp, Homo sapiens
cgagcaccagctgcc

SEQ ID NO: 616423 - DNA, 15 bp, Homo sapiens
gagcaccagctgccc

SEQ ID NO: 616424 - DNA, 15 bp, Homo sapiens
agcaccagctgccct

SEQ ID NO: 616425 - DNA, 15 bp, Homo sapiens
gcaccagctgccctg

SEQ ID NO: 616426 - DNA, 15 bp, Homo sapiens
caccagctgccctgc

SEQ ID NO: 616427 - DNA, 15 bp, Homo sapiens
accagctgccctgct

SEQ ID NO: 616428 - DNA, 15 bp, Homo sapiens
ccagctgccctgctg

SEQ ID NO: 616429 - DNA, 15 bp, Homo sapiens
cagctgccctgctga

SEQ ID NO: 616430 - DNA, 15 bp, Homo sapiens
agctgccctgctgag

SEQ ID NO: 616431 - DNA, 15 bp, Homo sapiens
gctgccctgctgagg

SEQ ID NO: 616432 - DNA, 15 bp, Homo sapiens
ctgccctgctgaggc

SEQ ID NO: 616433 - DNA, 15 bp, Homo sapiens
tgccctgctgaggct

SEQ ID NO: 616434 - DNA, 15 bp, Homo sapiens
gccctgctgaggctg

SEQ ID NO: 616435 - DNA, 15 bp, Homo sapiens
ccctgctgaggctgt

SEQ ID NO: 616436 - DNA, 15 bp, Homo sapiens
cctgctgaggctgtc

SEQ ID NO: 616437 - DNA, 15 bp, Homo sapiens
ctgctgaggctgtcc

SEQ ID NO: 616438 - DNA, 15 bp, Homo sapiens
tgctgaggctgtccc

SEQ ID NO: 616439 - DNA, 15 bp, Homo sapiens
gctgaggctgtcccg

SEQ ID NO: 616440 - DNA, 15 bp, Homo sapiens
ctgaggctgtcccga

SEQ ID NO: 616441 - DNA, 15 bp, Homo sapiens
tgaggctgtcccgac

SEQ ID NO: 616442 - DNA, 15 bp, Homo sapiens
gaggctgtcccgacg

SEQ ID NO: 616443 - DNA, 15 bp, Homo sapiens
aggctgtcccgacgt

SEQ ID NO: 616444 - DNA, 15 bp, Homo sapiens
ggctgtcccgacgtc

SEQ ID NO: 616445 - DNA, 15 bp, Homo sapiens
gctgtcccgacgtca

SEQ ID NO: 616446 - DNA, 15 bp, Homo sapiens
ctgtcccgacgtcac

SEQ ID NO: 616447 - DNA, 15 bp, Homo sapiens
tgtcccgacgtcaca

SEQ ID NO: 616448 - DNA, 15 bp, Homo sapiens
gtcccgacgtcacat

SEQ ID NO: 616449 - DNA, 15 bp, Homo sapiens
tcccgacgtcacatg

SEQ ID NO: 616450 - DNA, 15 bp, Homo sapiens
cccgacgtcacatga

SEQ ID NO: 616451 - DNA, 15 bp, Homo sapiens
ccgacgtcacatgat

SEQ ID NO: 616452 - DNA, 15 bp, Homo sapiens
cgacgtcacatgatt

SEQ ID NO: 616453 - DNA, 15 bp, Homo sapiens
gacgtcacatgattc

SEQ ID NO: 616454 - DNA, 15 bp, Homo sapiens
acgtcacatgattct

SEQ ID NO: 616455 - DNA, 15 bp, Homo sapiens
cgtcacatgattctc

SEQ ID NO: 616456 - DNA, 15 bp, Homo sapiens
gtcacatgattctcc

SEQ ID NO: 616457 - DNA, 15 bp, Homo sapiens
tcacatgattctcca

SEQ ID NO: 616458 - DNA, 15 bp, Homo sapiens
cacatgattctccaa

SEQ ID NO: 616459 - DNA, 15 bp, Homo sapiens
acatgattctccaat

SEQ ID NO: 616460 - DNA, 15 bp, Homo sapiens
catgattctccaatc

SEQ ID NO: 616461 - DNA, 15 bp, Homo sapiens
atgattctccaatca

SEQ ID NO: 616462 - DNA, 15 bp, Homo sapiens
tgattctccaatcac

SEQ ID NO: 616463 - DNA, 15 bp, Homo sapiens
gattctccaatcaca

SEQ ID NO: 616464 - DNA, 15 bp, Homo sapiens
attctccaatcacat

SEQ ID NO: 616465 - DNA, 15 bp, Homo sapiens
ttctccaatcacatg

SEQ ID NO: 616466 - DNA, 15 bp, Homo sapiens
tctccaatcacatga

SEQ ID NO: 616467 - DNA, 15 bp, Homo sapiens
ctccaatcacatgat

SEQ ID NO: 616468 - DNA, 15 bp, Homo sapiens
tccaatcacatgatc

SEQ ID NO: 616469 - DNA, 15 bp, Homo sapiens
ccaatcacatgatcc

SEQ ID NO: 616470 - DNA, 15 bp, Homo sapiens
caatcacatgatccc

SEQ ID NO: 616471 - DNA, 15 bp, Homo sapiens
aatcacatgatccct

SEQ ID NO: 616472 - DNA, 15 bp, Homo sapiens
atcacatgatcccta

SEQ ID NO: 616473 - DNA, 15 bp, Homo sapiens
tcacatgatccctag

SEQ ID NO: 616474 - DNA, 15 bp, Homo sapiens
cacatgatccctaga

SEQ ID NO: 616475 - DNA, 15 bp, Homo sapiens
acatgatccctagaa

SEQ ID NO: 616476 - DNA, 15 bp, Homo sapiens
catgatccctagaaa

SEQ ID NO: 616477 - DNA, 15 bp, Homo sapiens
atgatccctagaaat

SEQ ID NO: 616478 - DNA, 15 bp, Homo sapiens
tgatccctagaaatg

SEQ ID NO: 616479 - DNA, 15 bp, Homo sapiens
gatccctagaaatgg

SEQ ID NO: 616480 - DNA, 15 bp, Homo sapiens
atccctagaaatggg

SEQ ID NO: 616481 - DNA, 15 bp, Homo sapiens
tccctagaaatgggg

SEQ ID NO: 616482 - DNA, 15 bp, Homo sapiens
ccctagaaatggggt

SEQ ID NO: 616483 - DNA, 15 bp, Homo sapiens
cctagaaatggggtg

SEQ ID NO: 616484 - DNA, 15 bp, Homo sapiens
ctagaaatggggtgt

SEQ ID NO: 616485 - DNA, 15 bp, Homo sapiens
tagaaatggggtgtg

SEQ ID NO: 616486 - DNA, 15 bp, Homo sapiens
agaaatggggtgtgg

SEQ ID NO: 616487 - DNA, 15 bp, Homo sapiens
gaaatggggtgtggg

SEQ ID NO: 616488 - DNA, 15 bp, Homo sapiens
aaatggggtgtgggg

SEQ ID NO: 616489 - DNA, 15 bp, Homo sapiens
aatggggtgtggggc

SEQ ID NO: 616490 - DNA, 15 bp, Homo sapiens
atggggtgtggggcg

SEQ ID NO: 616491 - DNA, 15 bp, Homo sapiens
tggggtgtggggcga

SEQ ID NO: 616492 - DNA, 15 bp, Homo sapiens
ggggtgtggggcgag

SEQ ID NO: 616493 - DNA, 15 bp, Homo sapiens
gggtgtggggcgaga

SEQ ID NO: 616494 - DNA, 15 bp, Homo sapiens
ggtgtggggcgagag

SEQ ID NO: 616495 - DNA, 15 bp, Homo sapiens
gtgtggggcgagagg

SEQ ID NO: 616496 - DNA, 15 bp, Homo sapiens
tgtggggcgagagga

SEQ ID NO: 616497 - DNA, 15 bp, Homo sapiens
gtggggcgagaggaa

SEQ ID NO: 616498 - DNA, 15 bp, Homo sapiens
tggggcgagaggaag

SEQ ID NO: 616499 - DNA, 15 bp, Homo sapiens
ggggcgagaggaagc

SEQ ID NO: 616500 - DNA, 15 bp, Homo sapiens
gggcgagaggaagca

SEQ ID NO: 616501 - DNA, 15 bp, Homo sapiens
ggcgagaggaagcag

SEQ ID NO: 616502 - DNA, 15 bp, Homo sapiens
gcgagaggaagcagg

SEQ ID NO: 616503 - DNA, 15 bp, Homo sapiens
cgagaggaagcaggg

SEQ ID NO: 616504 - DNA, 15 bp, Homo sapiens
gagaggaagcaggga

SEQ ID NO: 616505 - DNA, 15 bp, Homo sapiens
agaggaagcagggag

SEQ ID NO: 616506 - DNA, 15 bp, Homo sapiens
gaggaagcagggagg

SEQ ID NO: 616507 - DNA, 15 bp, Homo sapiens
aggaagcagggagga

SEQ ID NO: 616508 - DNA, 15 bp, Homo sapiens
ggaagcagggaggag

SEQ ID NO: 616509 - DNA, 15 bp, Homo sapiens
gaagcagggaggaga

SEQ ID NO: 616510 - DNA, 15 bp, Homo sapiens
aagcagggaggagag

SEQ ID NO: 616511 - DNA, 15 bp, Homo sapiens
agcagggaggagagt

SEQ ID NO: 616512 - DNA, 15 bp, Homo sapiens
gcagggaggagagtg

SEQ ID NO: 616513 - DNA, 15 bp, Homo sapiens
cagggaggagagtga

SEQ ID NO: 616514 - DNA, 15 bp, Homo sapiens
agggaggagagtgat

SEQ ID NO: 616515 - DNA, 15 bp, Homo sapiens
gggaggagagtgatt

SEQ ID NO: 616516 - DNA, 15 bp, Homo sapiens
ggaggagagtgattt

SEQ ID NO: 616517 - DNA, 15 bp, Homo sapiens
gaggagagtgatttg

SEQ ID NO: 616518 - DNA, 15 bp, Homo sapiens
aggagagtgatttga

SEQ ID NO: 616519 - DNA, 15 bp, Homo sapiens
ggagagtgatttgag

SEQ ID NO: 616520 - DNA, 15 bp, Homo sapiens
gagagtgatttgagt

SEQ ID NO: 616521 - DNA, 15 bp, Homo sapiens
agagtgatttgagta

SEQ ID NO: 616522 - DNA, 15 bp, Homo sapiens
gagtgatttgagtag

SEQ ID NO: 616523 - DNA, 15 bp, Homo sapiens
agtgatttgagtaga

SEQ ID NO: 616524 - DNA, 15 bp, Homo sapiens
gtgatttgagtagaa

SEQ ID NO: 616525 - DNA, 15 bp, Homo sapiens
tgatttgagtagaaa

SEQ ID NO: 616526 - DNA, 15 bp, Homo sapiens
gatttgagtagaaaa

SEQ ID NO: 616527 - DNA, 15 bp, Homo sapiens
atttgagtagaaaag

SEQ ID NO: 616528 - DNA, 15 bp, Homo sapiens
tttgagtagaaaaga

SEQ ID NO: 616529 - DNA, 15 bp, Homo sapiens
ttgagtagaaaagaa

SEQ ID NO: 616530 - DNA, 15 bp, Homo sapiens
tgagtagaaaagaaa

SEQ ID NO: 616531 - DNA, 15 bp, Homo sapiens
gagtagaaaagaaac

SEQ ID NO: 616532 - DNA, 15 bp, Homo sapiens
agtagaaaagaaaca

SEQ ID NO: 616533 - DNA, 15 bp, Homo sapiens
gtagaaaagaaacac

SEQ ID NO: 616534 - DNA, 15 bp, Homo sapiens
tagaaaagaaacaca

SEQ ID NO: 616535 - DNA, 15 bp, Homo sapiens
agaaaagaaacacag

SEQ ID NO: 616536 - DNA, 15 bp, Homo sapiens
gaaaagaaacacagc

SEQ ID NO: 616537 - DNA, 15 bp, Homo sapiens
aaaagaaacacagca

SEQ ID NO: 616538 - DNA, 15 bp, Homo sapiens
aaagaaacacagcat

SEQ ID NO: 616539 - DNA, 15 bp, Homo sapiens
aagaaacacagcatt

SEQ ID NO: 616540 - DNA, 15 bp, Homo sapiens
agaaacacagcattc

SEQ ID NO: 616541 - DNA, 15 bp, Homo sapiens
gaaacacagcattcc

SEQ ID NO: 616542 - DNA, 15 bp, Homo sapiens
aaacacagcattcca

SEQ ID NO: 616543 - DNA, 15 bp, Homo sapiens
aacacagcattccag

SEQ ID NO: 616544 - DNA, 15 bp, Homo sapiens
acacagcattccagg

SEQ ID NO: 616545 - DNA, 15 bp, Homo sapiens
cacagcattccaggc

SEQ ID NO: 616546 - DNA, 15 bp, Homo sapiens
acagcattccaggct

SEQ ID NO: 616547 - DNA, 15 bp, Homo sapiens
cagcattccaggctg

SEQ ID NO: 616548 - DNA, 15 bp, Homo sapiens
agcattccaggctgg

SEQ ID NO: 616549 - DNA, 15 bp, Homo sapiens
gcattccaggctggc

SEQ ID NO: 616550 - DNA, 15 bp, Homo sapiens
cattccaggctggcc

SEQ ID NO: 616551 - DNA, 15 bp, Homo sapiens
attccaggctggccc

SEQ ID NO: 616552 - DNA, 15 bp, Homo sapiens
ttccaggctggcccc

SEQ ID NO: 616553 - DNA, 15 bp, Homo sapiens
tccaggctggcccca

SEQ ID NO: 616554 - DNA, 15 bp, Homo sapiens
ccaggctggccccac

SEQ ID NO: 616555 - DNA, 15 bp, Homo sapiens
caggctggccccacc

SEQ ID NO: 616556 - DNA, 15 bp, Homo sapiens
aggctggccccacct

SEQ ID NO: 616557 - DNA, 15 bp, Homo sapiens
ggctggccccacctc

SEQ ID NO: 616558 - DNA, 15 bp, Homo sapiens
gctggccccacctct

SEQ ID NO: 616559 - DNA, 15 bp, Homo sapiens
ctggccccacctcta

SEQ ID NO: 616560 - DNA, 15 bp, Homo sapiens
tggccccacctctat

SEQ ID NO: 616561 - DNA, 15 bp, Homo sapiens
ggccccacctctata

SEQ ID NO: 616562 - DNA, 15 bp, Homo sapiens
gccccacctctatat

SEQ ID NO: 616563 - DNA, 15 bp, Homo sapiens
ccccacctctatatt

SEQ ID NO: 616564 - DNA, 15 bp, Homo sapiens
cccacctctatattg

SEQ ID NO: 616565 - DNA, 15 bp, Homo sapiens
ccacctctatattga

SEQ ID NO: 616566 - DNA, 15 bp, Homo sapiens
cacctctatattgat

SEQ ID NO: 616567 - DNA, 15 bp, Homo sapiens
acctctatattgata

SEQ ID NO: 616568 - DNA, 15 bp, Homo sapiens
cctctatattgataa

SEQ ID NO: 616569 - DNA, 15 bp, Homo sapiens
ctctatattgataag

SEQ ID NO: 616570 - DNA, 15 bp, Homo sapiens
tctatattgataagt

SEQ ID NO: 616571 - DNA, 15 bp, Homo sapiens
ctatattgataagta

SEQ ID NO: 616572 - DNA, 15 bp, Homo sapiens
tatattgataagtag

SEQ ID NO: 616573 - DNA, 15 bp, Homo sapiens
atattgataagtagc

SEQ ID NO: 616574 - DNA, 15 bp, Homo sapiens
tattgataagtagcc

SEQ ID NO: 616575 - DNA, 15 bp, Homo sapiens
attgataagtagcca

SEQ ID NO: 616576 - DNA, 15 bp, Homo sapiens
ttgataagtagccaa

SEQ ID NO: 616577 - DNA, 15 bp, Homo sapiens
tgataagtagccaat

SEQ ID NO: 616578 - DNA, 15 bp, Homo sapiens
gataagtagccaatg

SEQ ID NO: 616579 - DNA, 15 bp, Homo sapiens
ataagtagccaatgg

SEQ ID NO: 616580 - DNA, 15 bp, Homo sapiens
taagtagccaatggg

SEQ ID NO: 616581 - DNA, 15 bp, Homo sapiens
aagtagccaatggga

SEQ ID NO: 616582 - DNA, 15 bp, Homo sapiens
agtagccaatgggag

SEQ ID NO: 616583 - DNA, 15 bp, Homo sapiens
gtagccaatgggagc

SEQ ID NO: 616584 - DNA, 15 bp, Homo sapiens
tagccaatgggagcg

SEQ ID NO: 616585 - DNA, 15 bp, Homo sapiens
agccaatgggagcgg

SEQ ID NO: 616586 - DNA, 15 bp, Homo sapiens
gccaatgggagcggg

SEQ ID NO: 616587 - DNA, 15 bp, Homo sapiens
ccaatgggagcgggt

SEQ ID NO: 616588 - DNA, 15 bp, Homo sapiens
caatgggagcgggta

SEQ ID NO: 616589 - DNA, 15 bp, Homo sapiens
aatgggagcgggtag

SEQ ID NO: 616590 - DNA, 15 bp, Homo sapiens
atgggagcgggtagc

SEQ ID NO: 616591 - DNA, 15 bp, Homo sapiens
tgggagcgggtagcc

SEQ ID NO: 616592 - DNA, 15 bp, Homo sapiens
gggagcgggtagccc

SEQ ID NO: 616593 - DNA, 15 bp, Homo sapiens
ggagcgggtagccct

SEQ ID NO: 616594 - DNA, 15 bp, Homo sapiens
gagcgggtagccctg

SEQ ID NO: 616595 - DNA, 15 bp, Homo sapiens
agcgggtagccctga

SEQ ID NO: 616596 - DNA, 15 bp, Homo sapiens
gcgggtagccctgat

SEQ ID NO: 616597 - DNA, 15 bp, Homo sapiens
cgggtagccctgatc

SEQ ID NO: 616598 - DNA, 15 bp, Homo sapiens
gggtagccctgatcc

SEQ ID NO: 616599 - DNA, 15 bp, Homo sapiens
ggtagccctgatccc

SEQ ID NO: 616600 - DNA, 15 bp, Homo sapiens
gtagccctgatccct

SEQ ID NO: 616601 - DNA, 15 bp, Homo sapiens
tagccctgatccctg

SEQ ID NO: 616602 - DNA, 15 bp, Homo sapiens
agccctgatccctgg

SEQ ID NO: 616603 - DNA, 15 bp, Homo sapiens
gccctgatccctggc

SEQ ID NO: 616604 - DNA, 15 bp, Homo sapiens
ccctgatccctggcc

SEQ ID NO: 616605 - DNA, 15 bp, Homo sapiens
cctgatccctggcca

SEQ ID NO: 616606 - DNA, 15 bp, Homo sapiens
ctgatccctggccaa

SEQ ID NO: 616607 - DNA, 15 bp, Homo sapiens
tgatccctggccaat

SEQ ID NO: 616608 - DNA, 15 bp, Homo sapiens
gatccctggccaatg

SEQ ID NO: 616609 - DNA, 15 bp, Homo sapiens
atccctggccaatgg

SEQ ID NO: 616610 - DNA, 15 bp, Homo sapiens
tccctggccaatgga

SEQ ID NO: 616611 - DNA, 15 bp, Homo sapiens
ccctggccaatggaa

SEQ ID NO: 616612 - DNA, 15 bp, Homo sapiens
cctggccaatggaaa

SEQ ID NO: 616613 - DNA, 15 bp, Homo sapiens
ctggccaatggaaac

SEQ ID NO: 616614 - DNA, 15 bp, Homo sapiens
tggccaatggaaact

SEQ ID NO: 616615 - DNA, 15 bp, Homo sapiens
ggccaatggaaactg

SEQ ID NO: 616616 - DNA, 15 bp, Homo sapiens
gccaatggaaactga

SEQ ID NO: 616617 - DNA, 15 bp, Homo sapiens
ccaatggaaactgag

SEQ ID NO: 616618 - DNA, 15 bp, Homo sapiens
caatggaaactgagg

SEQ ID NO: 616619 - DNA, 15 bp, Homo sapiens
aatggaaactgaggt

SEQ ID NO: 616620 - DNA, 15 bp, Homo sapiens
atggaaactgaggta

SEQ ID NO: 616621 - DNA, 15 bp, Homo sapiens
tggaaactgaggtag

SEQ ID NO: 616622 - DNA, 15 bp, Homo sapiens
ggaaactgaggtagg

SEQ ID NO: 616623 - DNA, 15 bp, Homo sapiens
gaaactgaggtaggc

SEQ ID NO: 616624 - DNA, 15 bp, Homo sapiens
aaactgaggtaggcg

SEQ ID NO: 616625 - DNA, 15 bp, Homo sapiens
aactgaggtaggcgg

SEQ ID NO: 616626 - DNA, 15 bp, Homo sapiens
actgaggtaggcggg

SEQ ID NO: 616627 - DNA, 15 bp, Homo sapiens
ctgaggtaggcgggt

SEQ ID NO: 616628 - DNA, 15 bp, Homo sapiens
tgaggtaggcgggtc

SEQ ID NO: 616629 - DNA, 15 bp, Homo sapiens
gaggtaggcgggtca

SEQ ID NO: 616630 - DNA, 15 bp, Homo sapiens
aggtaggcgggtcat

SEQ ID NO: 616631 - DNA, 15 bp, Homo sapiens
ggtaggcgggtcatc

SEQ ID NO: 616632 - DNA, 15 bp, Homo sapiens
gtaggcgggtcatcg

SEQ ID NO: 616633 - DNA, 15 bp, Homo sapiens
taggcgggtcatcgc

SEQ ID NO: 616634 - DNA, 15 bp, Homo sapiens
aggcgggtcatcgcg

SEQ ID NO: 616635 - DNA, 15 bp, Homo sapiens
ggcgggtcatcgcgc

SEQ ID NO: 616636 - DNA, 15 bp, Homo sapiens
gcgggtcatcgcgct

SEQ ID NO: 616637 - DNA, 15 bp, Homo sapiens
cgggtcatcgcgctg

SEQ ID NO: 616638 - DNA, 15 bp, Homo sapiens
gggtcatcgcgctgg

SEQ ID NO: 616639 - DNA, 15 bp, Homo sapiens
ggtcatcgcgctggg

SEQ ID NO: 616640 - DNA, 15 bp, Homo sapiens
gtcatcgcgctgggg

SEQ ID NO: 616641 - DNA, 15 bp, Homo sapiens
tcatcgcgctggggt

SEQ ID NO: 616642 - DNA, 15 bp, Homo sapiens
catcgcgctggggtc

SEQ ID NO: 616643 - DNA, 15 bp, Homo sapiens
atcgcgctggggtct

SEQ ID NO: 616644 - DNA, 15 bp, Homo sapiens
tcgcgctggggtctg

SEQ ID NO: 616645 - DNA, 15 bp, Homo sapiens
cgcgctggggtctgt

SEQ ID NO: 616646 - DNA, 15 bp, Homo sapiens
gcgctggggtctgta

SEQ ID NO: 616647 - DNA, 15 bp, Homo sapiens
cgctggggtctgtag

SEQ ID NO: 616648 - DNA, 15 bp, Homo sapiens
gctggggtctgtagt

SEQ ID NO: 616649 - DNA, 15 bp, Homo sapiens
ctggggtctgtagtc

SEQ ID NO: 616650 - DNA, 15 bp, Homo sapiens
tggggtctgtagtct

SEQ ID NO: 616651 - DNA, 15 bp, Homo sapiens
ggggtctgtagtctg

SEQ ID NO: 616652 - DNA, 15 bp, Homo sapiens
gggtctgtagtctga

SEQ ID NO: 616653 - DNA, 15 bp, Homo sapiens
ggtctgtagtctgag

SEQ ID NO: 616654 - DNA, 15 bp, Homo sapiens
gtctgtagtctgagc

SEQ ID NO: 616655 - DNA, 15 bp, Homo sapiens
tctgtagtctgagcg

SEQ ID NO: 616656 - DNA, 15 bp, Homo sapiens
ctgtagtctgagcgc

SEQ ID NO: 616657 - DNA, 15 bp, Homo sapiens
tgtagtctgagcgct

SEQ ID NO: 616658 - DNA, 15 bp, Homo sapiens
gtagtctgagcgcta

SEQ ID NO: 616659 - DNA, 15 bp, Homo sapiens
tagtctgagcgctac

SEQ ID NO: 616660 - DNA, 15 bp, Homo sapiens
agtctgagcgctacc

SEQ ID NO: 616661 - DNA, 15 bp, Homo sapiens
gtctgagcgctaccc

SEQ ID NO: 616662 - DNA, 15 bp, Homo sapiens
tctgagcgctacccg

SEQ ID NO: 616663 - DNA, 15 bp, Homo sapiens
ctgagcgctacccgg

SEQ ID NO: 616664 - DNA, 15 bp, Homo sapiens
tgagcgctacccggt

SEQ ID NO: 616665 - DNA, 15 bp, Homo sapiens
gagcgctacccggtt

SEQ ID NO: 616666 - DNA, 15 bp, Homo sapiens
agcgctacccggttg

SEQ ID NO: 616667 - DNA, 15 bp, Homo sapiens
gcgctacccggttgc

SEQ ID NO: 616668 - DNA, 15 bp, Homo sapiens
cgctacccggttgct

SEQ ID NO: 616669 - DNA, 15 bp, Homo sapiens
gctacccggttgctg

SEQ ID NO: 616670 - DNA, 15 bp, Homo sapiens
ctacccggttgctgc

SEQ ID NO: 616671 - DNA, 15 bp, Homo sapiens
tacccggttgctgct

SEQ ID NO: 616672 - DNA, 15 bp, Homo sapiens
acccggttgctgctg

SEQ ID NO: 616673 - DNA, 15 bp, Homo sapiens
cccggttgctgctgc

SEQ ID NO: 616674 - DNA, 15 bp, Homo sapiens
ccggttgctgctgcc

SEQ ID NO: 616675 - DNA, 15 bp, Homo sapiens
cggttgctgctgccc

SEQ ID NO: 616676 - DNA, 15 bp, Homo sapiens
ggttgctgctgccca

SEQ ID NO: 616677 - DNA, 15 bp, Homo sapiens
gttgctgctgcccaa

SEQ ID NO: 616678 - DNA, 15 bp, Homo sapiens
ttgctgctgcccaag

SEQ ID NO: 616679 - DNA, 15 bp, Homo sapiens
tgctgctgcccaagg

SEQ ID NO: 616680 - DNA, 15 bp, Homo sapiens
gctgctgcccaagga

SEQ ID NO: 616681 - DNA, 15 bp, Homo sapiens
ctgctgcccaaggac

SEQ ID NO: 616682 - DNA, 15 bp, Homo sapiens
tgctgcccaaggacc

SEQ ID NO: 616683 - DNA, 15 bp, Homo sapiens
gctgcccaaggaccg

SEQ ID NO: 616684 - DNA, 15 bp, Homo sapiens
ctgcccaaggaccgc

SEQ ID NO: 616685 - DNA, 15 bp, Homo sapiens
tgcccaaggaccgcg

SEQ ID NO: 616686 - DNA, 15 bp, Homo sapiens
gcccaaggaccgcgg

SEQ ID NO: 616687 - DNA, 15 bp, Homo sapiens
cccaaggaccgcgga

SEQ ID NO: 616688 - DNA, 15 bp, Homo sapiens
ccaaggaccgcggag

SEQ ID NO: 616689 - DNA, 15 bp, Homo sapiens
caaggaccgcggagt

SEQ ID NO: 616690 - DNA, 15 bp, Homo sapiens
aaggaccgcggagtc

SEQ ID NO: 616691 - DNA, 15 bp, Homo sapiens
aggaccgcggagtcg

SEQ ID NO: 616692 - DNA, 15 bp, Homo sapiens
ggaccgcggagtcgg

SEQ ID NO: 616693 - DNA, 15 bp, Homo sapiens
gaccgcggagtcgga

SEQ ID NO: 616694 - DNA, 15 bp, Homo sapiens
accgcggagtcggac

SEQ ID NO: 616695 - DNA, 15 bp, Homo sapiens
ccgcggagtcggacg

SEQ ID NO: 616696 - DNA, 15 bp, Homo sapiens
cgcggagtcggacgc

SEQ ID NO: 616697 - DNA, 15 bp, Homo sapiens
gcggagtcggacgca

SEQ ID NO: 616698 - DNA, 15 bp, Homo sapiens
cggagtcggacgcag

SEQ ID NO: 616699 - DNA, 15 bp, Homo sapiens
ggagtcggacgcagg

SEQ ID NO: 616700 - DNA, 15 bp, Homo sapiens
gagtcggacgcaggt

SEQ ID NO: 616701 - DNA, 15 bp, Homo sapiens
agtcggacgcaggta

SEQ ID NO: 616702 - DNA, 15 bp, Homo sapiens
gtcggacgcaggtag

SEQ ID NO: 616703 - DNA, 15 bp, Homo sapiens
tcggacgcaggtagg

SEQ ID NO: 616704 - DNA, 15 bp, Homo sapiens
cggacgcaggtagga

SEQ ID NO: 616705 - DNA, 15 bp, Homo sapiens
ggacgcaggtaggag

SEQ ID NO: 616706 - DNA, 15 bp, Homo sapiens
gacgcaggtaggaga

SEQ ID NO: 616707 - DNA, 15 bp, Homo sapiens
acgcaggtaggagag

SEQ ID NO: 616708 - DNA, 15 bp, Homo sapiens
cgcaggtaggagagc

SEQ ID NO: 616709 - DNA, 15 bp, Homo sapiens
gcaggtaggagagcg

SEQ ID NO: 616710 - DNA, 15 bp, Homo sapiens
caggtaggagagcgg

SEQ ID NO: 616711 - DNA, 15 bp, Homo sapiens
aggtaggagagcggc

SEQ ID NO: 616712 - DNA, 15 bp, Homo sapiens
ggtaggagagcggcc

SEQ ID NO: 616713 - DNA, 15 bp, Homo sapiens
gtaggagagcggccg

SEQ ID NO: 616714 - DNA, 15 bp, Homo sapiens
taggagagcggccgc

SEQ ID NO: 616715 - DNA, 15 bp, Homo sapiens
aggagagcggccgcg

SEQ ID NO: 616716 - DNA, 15 bp, Homo sapiens
ggagagcggccgcgc

SEQ ID NO: 616717 - DNA, 15 bp, Homo sapiens
gagagcggccgcgca

SEQ ID NO: 616718 - DNA, 15 bp, Homo sapiens
agagcggccgcgcag

SEQ ID NO: 616719 - DNA, 15 bp, Homo sapiens
gagcggccgcgcaga

SEQ ID NO: 616720 - DNA, 15 bp, Homo sapiens
agcggccgcgcagac

SEQ ID NO: 616721 - DNA, 15 bp, Homo sapiens
gcggccgcgcagacc

SEQ ID NO: 616722 - DNA, 15 bp, Homo sapiens
cggccgcgcagacct

SEQ ID NO: 616723 - DNA, 15 bp, Homo sapiens
ggccgcgcagacctc

SEQ ID NO: 616724 - DNA, 15 bp, Homo sapiens
gccgcgcagacctct

SEQ ID NO: 616725 - DNA, 15 bp, Homo sapiens
ccgcgcagacctctc

SEQ ID NO: 616726 - DNA, 15 bp, Homo sapiens
cgcgcagacctctcg

SEQ ID NO: 616727 - DNA, 15 bp, Homo sapiens
gcgcagacctctcgc

SEQ ID NO: 616728 - DNA, 15 bp, Homo sapiens
cgcagacctctcgcc

SEQ ID NO: 616729 - DNA, 15 bp, Homo sapiens
gcagacctctcgcct

SEQ ID NO: 616730 - DNA, 15 bp, Homo sapiens
cagacctctcgcctg

SEQ ID NO: 616731 - DNA, 15 bp, Homo sapiens
agacctctcgcctgc

SEQ ID NO: 616732 - DNA, 15 bp, Homo sapiens
gacctctcgcctgct

SEQ ID NO: 616733 - DNA, 15 bp, Homo sapiens
acctctcgcctgctc

SEQ ID NO: 616734 - DNA, 15 bp, Homo sapiens
cctctcgcctgctcc

SEQ ID NO: 616735 - DNA, 15 bp, Homo sapiens
ctctcgcctgctcct

SEQ ID NO: 616736 - DNA, 15 bp, Homo sapiens
tctcgcctgctcctg

SEQ ID NO: 616737 - DNA, 15 bp, Homo sapiens
ctcgcctgctcctgc

SEQ ID NO: 616738 - DNA, 15 bp, Homo sapiens
tcgcctgctcctgcc

SEQ ID NO: 616739 - DNA, 15 bp, Homo sapiens
cgcctgctcctgccc

SEQ ID NO: 616740 - DNA, 15 bp, Homo sapiens
gcctgctcctgccca

SEQ ID NO: 616741 - DNA, 15 bp, Homo sapiens
cctgctcctgcccag

SEQ ID NO: 616742 - DNA, 15 bp, Homo sapiens
ctgctcctgcccagg

SEQ ID NO: 616743 - DNA, 15 bp, Homo sapiens
tgctcctgcccaggg

SEQ ID NO: 616744 - DNA, 15 bp, Homo sapiens
gctcctgcccagggg

SEQ ID NO: 616745 - DNA, 15 bp, Homo sapiens
ctcctgcccaggggc

SEQ ID NO: 616746 - DNA, 15 bp, Homo sapiens
tcctgcccaggggcc

SEQ ID NO: 616747 - DNA, 15 bp, Homo sapiens
cctgcccaggggccc

SEQ ID NO: 616748 - DNA, 15 bp, Homo sapiens
ctgcccaggggcccg

SEQ ID NO: 616749 - DNA, 15 bp, Homo sapiens
tgcccaggggcccgc

SEQ ID NO: 616750 - DNA, 15 bp, Homo sapiens
gcccaggggcccgcc

SEQ ID NO: 616751 - DNA, 15 bp, Homo sapiens
cccaggggcccgcca

SEQ ID NO: 616752 - DNA, 15 bp, Homo sapiens
ccaggggcccgccag

SEQ ID NO: 616753 - DNA, 15 bp, Homo sapiens
caggggcccgccagg

SEQ ID NO: 616754 - DNA, 15 bp, Homo sapiens
aggggcccgccaggg

SEQ ID NO: 616755 - DNA, 15 bp, Homo sapiens
ggggcccgccagggc

SEQ ID NO: 616756 - DNA, 15 bp, Homo sapiens
gggcccgccagggcc

SEQ ID NO: 616757 - DNA, 15 bp, Homo sapiens
ggcccgccagggcca

SEQ ID NO: 616758 - DNA, 15 bp, Homo sapiens
gcccgccagggccat

SEQ ID NO: 616759 - DNA, 15 bp, Homo sapiens
cccgccagggccatg

SEQ ID NO: 616760 - DNA, 15 bp, Homo sapiens
ccgccagggccatgt

SEQ ID NO: 616761 - DNA, 15 bp, Homo sapiens
cgccagggccatgtg

SEQ ID NO: 616762 - DNA, 15 bp, Homo sapiens
gccagggccatgtga

SEQ ID NO: 616763 - DNA, 15 bp, Homo sapiens
ccagggccatgtgag

SEQ ID NO: 616764 - DNA, 15 bp, Homo sapiens
cagggccatgtgagc

SEQ ID NO: 616765 - DNA, 15 bp, Homo sapiens
agggccatgtgagct

SEQ ID NO: 616766 - DNA, 15 bp, Homo sapiens
gggccatgtgagctt

SEQ ID NO: 616767 - DNA, 15 bp, Homo sapiens
ggccatgtgagcttg

SEQ ID NO: 616768 - DNA, 15 bp, Homo sapiens
gccatgtgagcttga

SEQ ID NO: 616769 - DNA, 15 bp, Homo sapiens
ccatgtgagcttgag

SEQ ID NO: 616770 - DNA, 15 bp, Homo sapiens
catgtgagcttgagg

SEQ ID NO: 616771 - DNA, 15 bp, Homo sapiens
atgtgagcttgaggt

SEQ ID NO: 616772 - DNA, 15 bp, Homo sapiens
tgtgagcttgaggtt

SEQ ID NO: 616773 - DNA, 15 bp, Homo sapiens
gtgagcttgaggttc

SEQ ID NO: 616774 - DNA, 15 bp, Homo sapiens
tgagcttgaggttcc

SEQ ID NO: 616775 - DNA, 15 bp, Homo sapiens
gagcttgaggttccc

SEQ ID NO: 616776 - DNA, 15 bp, Homo sapiens
agcttgaggttcccc

SEQ ID NO: 616777 - DNA, 15 bp, Homo sapiens
gcttgaggttcccct

SEQ ID NO: 616778 - DNA, 15 bp, Homo sapiens
cttgaggttcccctg

SEQ ID NO: 616779 - DNA, 15 bp, Homo sapiens
ttgaggttcccctgg

SEQ ID NO: 616780 - DNA, 15 bp, Homo sapiens
tgaggttcccctgga

SEQ ID NO: 616781 - DNA, 15 bp, Homo sapiens
gaggttcccctggag

SEQ ID NO: 616782 - DNA, 15 bp, Homo sapiens
aggttcccctggagt

SEQ ID NO: 616783 - DNA, 15 bp, Homo sapiens
ggttcccctggagtc

SEQ ID NO: 616784 - DNA, 15 bp, Homo sapiens
gttcccctggagtct

SEQ ID NO: 616785 - DNA, 15 bp, Homo sapiens
ttcccctggagtctc

SEQ ID NO: 616786 - DNA, 15 bp, Homo sapiens
tcccctggagtctca

SEQ ID NO: 616787 - DNA, 15 bp, Homo sapiens
cccctggagtctcag

SEQ ID NO: 616788 - DNA, 15 bp, Homo sapiens
ccctggagtctcagc

SEQ ID NO: 616789 - DNA, 15 bp, Homo sapiens
cctggagtctcagcc

SEQ ID NO: 616790 - DNA, 15 bp, Homo sapiens
ctggagtctcagccg

SEQ ID NO: 616791 - DNA, 15 bp, Homo sapiens
tggagtctcagccgg

SEQ ID NO: 616792 - DNA, 15 bp, Homo sapiens
ggagtctcagccgga

SEQ ID NO: 616793 - DNA, 15 bp, Homo sapiens
gagtctcagccggag

SEQ ID NO: 616794 - DNA, 15 bp, Homo sapiens
agtctcagccggaga

SEQ ID NO: 616795 - DNA, 15 bp, Homo sapiens
gtctcagccggagac

SEQ ID NO: 616796 - DNA, 15 bp, Homo sapiens
tctcagccggagaca

SEQ ID NO: 616797 - DNA, 15 bp, Homo sapiens
ctcagccggagacaa

SEQ ID NO: 616798 - DNA, 15 bp, Homo sapiens
tcagccggagacaac

SEQ ID NO: 616799 - DNA, 15 bp, Homo sapiens
cagccggagacaaca

SEQ ID NO: 616800 - DNA, 15 bp, Homo sapiens
agccggagacaacag

SEQ ID NO: 616801 - DNA, 15 bp, Homo sapiens
gccggagacaacaga

SEQ ID NO: 616802 - DNA, 15 bp, Homo sapiens
ccggagacaacagaa

SEQ ID NO: 616803 - DNA, 15 bp, Homo sapiens
cggagacaacagaag

SEQ ID NO: 616804 - DNA, 15 bp, Homo sapiens
ggagacaacagaaga

SEQ ID NO: 616805 - DNA, 15 bp, Homo sapiens
gagacaacagaagaa

SEQ ID NO: 616806 - DNA, 15 bp, Homo sapiens
agacaacagaagaac

SEQ ID NO: 616807 - DNA, 15 bp, Homo sapiens
gacaacagaagaacc

SEQ ID NO: 616808 - DNA, 15 bp, Homo sapiens
acaacagaagaaccg

SEQ ID NO: 616809 - DNA, 15 bp, Homo sapiens
caacagaagaaccgc

SEQ ID NO: 616810 - DNA, 15 bp, Homo sapiens
aacagaagaaccgct

SEQ ID NO: 616811 - DNA, 15 bp, Homo sapiens
acagaagaaccgctt

SEQ ID NO: 616812 - DNA, 15 bp, Homo sapiens
cagaagaaccgctta

SEQ ID NO: 616813 - DNA, 15 bp, Homo sapiens
agaagaaccgcttac

SEQ ID NO: 616814 - DNA, 15 bp, Homo sapiens
gaagaaccgcttact

SEQ ID NO: 616815 - DNA, 15 bp, Homo sapiens
aagaaccgcttactg

SEQ ID NO: 616816 - DNA, 15 bp, Homo sapiens
agaaccgcttactga

SEQ ID NO: 616817 - DNA, 15 bp, Homo sapiens
gaaccgcttactgaa

SEQ ID NO: 616818 - DNA, 15 bp, Homo sapiens
aaccgcttactgaaa

SEQ ID NO: 616819 - DNA, 15 bp, Homo sapiens
accgcttactgaaac

SEQ ID NO: 616820 - DNA, 15 bp, Homo sapiens
ccgcttactgaaact

SEQ ID NO: 616821 - DNA, 15 bp, Homo sapiens
cgcttactgaaactc

SEQ ID NO: 616822 - DNA, 15 bp, Homo sapiens
gcttactgaaactcc

SEQ ID NO: 616823 - DNA, 15 bp, Homo sapiens
cttactgaaactcct

SEQ ID NO: 616824 - DNA, 15 bp, Homo sapiens
ttactgaaactcctt

SEQ ID NO: 616825 - DNA, 15 bp, Homo sapiens
tactgaaactccttg

SEQ ID NO: 616826 - DNA, 15 bp, Homo sapiens
actgaaactccttgg

SEQ ID NO: 616827 - DNA, 15 bp, Homo sapiens
ctgaaactccttggg

SEQ ID NO: 616828 - DNA, 15 bp, Homo sapiens
tgaaactccttgggg

SEQ ID NO: 616829 - DNA, 15 bp, Homo sapiens
gaaactccttggggg

SEQ ID NO: 616830 - DNA, 15 bp, Homo sapiens
aaactccttgggggt

SEQ ID NO: 616831 - DNA, 15 bp, Homo sapiens
aactccttgggggtt

SEQ ID NO: 616832 - DNA, 15 bp, Homo sapiens
actccttgggggttc

SEQ ID NO: 616833 - DNA, 15 bp, Homo sapiens
ctccttgggggttct

SEQ ID NO: 616834 - DNA, 15 bp, Homo sapiens
tccttgggggttctg

SEQ ID NO: 616835 - DNA, 15 bp, Homo sapiens
ccttgggggttctga

SEQ ID NO: 616836 - DNA, 15 bp, Homo sapiens
cttgggggttctgat

SEQ ID NO: 616837 - DNA, 15 bp, Homo sapiens
ttgggggttctgata

SEQ ID NO: 616838 - DNA, 15 bp, Homo sapiens
tgggggttctgatac

SEQ ID NO: 616839 - DNA, 15 bp, Homo sapiens
gggggttctgataca

SEQ ID NO: 616840 - DNA, 15 bp, Homo sapiens
ggggttctgatacac

SEQ ID NO: 616841 - DNA, 15 bp, Homo sapiens
gggttctgatacact

SEQ ID NO: 616842 - DNA, 15 bp, Homo sapiens
ggttctgatacacta

SEQ ID NO: 616843 - DNA, 15 bp, Homo sapiens
gttctgatacactag

SEQ ID NO: 616844 - DNA, 15 bp, Homo sapiens
ttctgatacactagg

SEQ ID NO: 616845 - DNA, 15 bp, Homo sapiens
tctgatacactaggg

SEQ ID NO: 616846 - DNA, 15 bp, Homo sapiens
ctgatacactagggg

SEQ ID NO: 616847 - DNA, 15 bp, Homo sapiens
tgatacactaggggg

SEQ ID NO: 616848 - DNA, 15 bp, Homo sapiens
gatacactaggggga

SEQ ID NO: 616849 - DNA, 15 bp, Homo sapiens
atacactagggggag

SEQ ID NO: 616850 - DNA, 15 bp, Homo sapiens
tacactagggggagt

SEQ ID NO: 616851 - DNA, 15 bp, Homo sapiens
acactagggggagtt

SEQ ID NO: 616852 - DNA, 15 bp, Homo sapiens
cactagggggagttt

SEQ ID NO: 616853 - DNA, 15 bp, Homo sapiens
actagggggagtttt

SEQ ID NO: 616854 - DNA, 15 bp, Homo sapiens
ctagggggagtttta

SEQ ID NO: 616855 - DNA, 15 bp, Homo sapiens
tagggggagttttat

SEQ ID NO: 616856 - DNA, 15 bp, Homo sapiens
agggggagttttatg

SEQ ID NO: 616857 - DNA, 15 bp, Homo sapiens
gggggagttttatgg

SEQ ID NO: 616858 - DNA, 15 bp, Homo sapiens
ggggagttttatggg

SEQ ID NO: 616859 - DNA, 15 bp, Homo sapiens
gggagttttatggga

SEQ ID NO: 616860 - DNA, 15 bp, Homo sapiens
ggagttttatgggaa

SEQ ID NO: 616861 - DNA, 15 bp, Homo sapiens
gagttttatgggaaa

SEQ ID NO: 616862 - DNA, 15 bp, Homo sapiens
agttttatgggaaag

SEQ ID NO: 616863 - DNA, 15 bp, Homo sapiens
gttttatgggaaaga

SEQ ID NO: 616864 - DNA, 15 bp, Homo sapiens
ttttatgggaaagag

SEQ ID NO: 616865 - DNA, 15 bp, Homo sapiens
tttatgggaaagagg

SEQ ID NO: 616866 - DNA, 15 bp, Homo sapiens
ttatgggaaagagga

SEQ ID NO: 616867 - DNA, 15 bp, Homo sapiens
tatgggaaagaggaa

SEQ ID NO: 616868 - DNA, 15 bp, Homo sapiens
atgggaaagaggaag

SEQ ID NO: 616869 - DNA, 15 bp, Homo sapiens
tgggaaagaggaagc

SEQ ID NO: 616870 - DNA, 15 bp, Homo sapiens
gggaaagaggaagca

SEQ ID NO: 616871 - DNA, 15 bp, Homo sapiens
ggaaagaggaagcag

SEQ ID NO: 616872 - DNA, 15 bp, Homo sapiens
gaaagaggaagcagt

SEQ ID NO: 616873 - DNA, 15 bp, Homo sapiens
aaagaggaagcagta

SEQ ID NO: 616874 - DNA, 15 bp, Homo sapiens
aagaggaagcagtaa

SEQ ID NO: 616875 - DNA, 15 bp, Homo sapiens
agaggaagcagtaat

SEQ ID NO: 616876 - DNA, 15 bp, Homo sapiens
gaggaagcagtaatt

SEQ ID NO: 616877 - DNA, 15 bp, Homo sapiens
aggaagcagtaattg

SEQ ID NO: 616878 - DNA, 15 bp, Homo sapiens
ggaagcagtaattgc

SEQ ID NO: 616879 - DNA, 15 bp, Homo sapiens
gaagcagtaattgca

SEQ ID NO: 616880 - DNA, 15 bp, Homo sapiens
aagcagtaattgcag

SEQ ID NO: 616881 - DNA, 15 bp, Homo sapiens
agcagtaattgcagt

SEQ ID NO: 616882 - DNA, 15 bp, Homo sapiens
gcagtaattgcagtg

SEQ ID NO: 616883 - DNA, 15 bp, Homo sapiens
cagtaattgcagtga

SEQ ID NO: 616884 - DNA, 15 bp, Homo sapiens
agtaattgcagtgac

SEQ ID NO: 616885 - DNA, 15 bp, Homo sapiens
gtaattgcagtgacg

SEQ ID NO: 616886 - DNA, 15 bp, Homo sapiens
taattgcagtgacgc

SEQ ID NO: 616887 - DNA, 15 bp, Homo sapiens
aattgcagtgacgcc

SEQ ID NO: 616888 - DNA, 15 bp, Homo sapiens
attgcagtgacgccc

SEQ ID NO: 616889 - DNA, 15 bp, Homo sapiens
ttgcagtgacgcccc

SEQ ID NO: 616890 - DNA, 15 bp, Homo sapiens
tgcagtgacgccccg

SEQ ID NO: 616891 - DNA, 15 bp, Homo sapiens
gcagtgacgccccgt

SEQ ID NO: 616892 - DNA, 15 bp, Homo sapiens
cagtgacgccccgtt

SEQ ID NO: 616893 - DNA, 15 bp, Homo sapiens
agtgacgccccgtta

SEQ ID NO: 616894 - DNA, 15 bp, Homo sapiens
gtgacgccccgttag

SEQ ID NO: 616895 - DNA, 15 bp, Homo sapiens
tgacgccccgttaga

SEQ ID NO: 616896 - DNA, 15 bp, Homo sapiens
gacgccccgttagaa

SEQ ID NO: 616897 - DNA, 15 bp, Homo sapiens
acgccccgttagaag

SEQ ID NO: 616898 - DNA, 15 bp, Homo sapiens
cgccccgttagaagg

SEQ ID NO: 616899 - DNA, 15 bp, Homo sapiens
gccccgttagaaggg

SEQ ID NO: 616900 - DNA, 15 bp, Homo sapiens
ccccgttagaagggg

SEQ ID NO: 616901 - DNA, 15 bp, Homo sapiens
cccgttagaaggggc

SEQ ID NO: 616902 - DNA, 15 bp, Homo sapiens
ccgttagaaggggct

SEQ ID NO: 616903 - DNA, 15 bp, Homo sapiens
cgttagaaggggctt

SEQ ID NO: 616904 - DNA, 15 bp, Homo sapiens
gttagaaggggcttt

SEQ ID NO: 616905 - DNA, 15 bp, Homo sapiens
ttagaaggggctttc

SEQ ID NO: 616906 - DNA, 15 bp, Homo sapiens
tagaaggggctttct

SEQ ID NO: 616907 - DNA, 15 bp, Homo sapiens
agaaggggctttcta

SEQ ID NO: 616908 - DNA, 15 bp, Homo sapiens
gaaggggctttctac

SEQ ID NO: 616909 - DNA, 15 bp, Homo sapiens
aaggggctttctacc

SEQ ID NO: 616910 - DNA, 15 bp, Homo sapiens
aggggctttctacct

SEQ ID NO: 616911 - DNA, 15 bp, Homo sapiens
ggggctttctacctc

SEQ ID NO: 616912 - DNA, 15 bp, Homo sapiens
gggctttctacctcc

SEQ ID NO: 616913 - DNA, 15 bp, Homo sapiens
ggctttctacctccc

SEQ ID NO: 616914 - DNA, 15 bp, Homo sapiens
gctttctacctcccc

SEQ ID NO: 616915 - DNA, 15 bp, Homo sapiens
ctttctacctcccca

SEQ ID NO: 616916 - DNA, 15 bp, Homo sapiens
tttctacctccccag

SEQ ID NO: 616917 - DNA, 15 bp, Homo sapiens
ttctacctccccagc

SEQ ID NO: 616918 - DNA, 15 bp, Homo sapiens
tctacctccccagca

SEQ ID NO: 616919 - DNA, 15 bp, Homo sapiens
ctacctccccagcat

SEQ ID NO: 616920 - DNA, 15 bp, Homo sapiens
tacctccccagcatt

SEQ ID NO: 616921 - DNA, 15 bp, Homo sapiens
acctccccagcattc

SEQ ID NO: 616922 - DNA, 15 bp, Homo sapiens
cctccccagcattcc

SEQ ID NO: 616923 - DNA, 15 bp, Homo sapiens
ctccccagcattccc

SEQ ID NO: 616924 - DNA, 15 bp, Homo sapiens
tccccagcattcccc

SEQ ID NO: 616925 - DNA, 15 bp, Homo sapiens
ccccagcattccccc

SEQ ID NO: 616926 - DNA, 15 bp, Homo sapiens
cccagcattccccca

SEQ ID NO: 616927 - DNA, 15 bp, Homo sapiens
ccagcattcccccaa

SEQ ID NO: 616928 - DNA, 15 bp, Homo sapiens
cagcattcccccaaa

SEQ ID NO: 616929 - DNA, 15 bp, Homo sapiens
agcattcccccaaag

SEQ ID NO: 616930 - DNA, 15 bp, Homo sapiens
gcattcccccaaagc

SEQ ID NO: 616931 - DNA, 15 bp, Homo sapiens
cattcccccaaagca

SEQ ID NO: 616932 - DNA, 15 bp, Homo sapiens
attcccccaaagcag

SEQ ID NO: 616933 - DNA, 15 bp, Homo sapiens
ttcccccaaagcagg

SEQ ID NO: 616934 - DNA, 15 bp, Homo sapiens
tcccccaaagcaggg

SEQ ID NO: 616935 - DNA, 15 bp, Homo sapiens
cccccaaagcaggga

SEQ ID NO: 616936 - DNA, 15 bp, Homo sapiens
ccccaaagcagggac

SEQ ID NO: 616937 - DNA, 15 bp, Homo sapiens
cccaaagcagggacc

SEQ ID NO: 616938 - DNA, 15 bp, Homo sapiens
ccaaagcagggacca

SEQ ID NO: 616939 - DNA, 15 bp, Homo sapiens
caaagcagggaccac

SEQ ID NO: 616940 - DNA, 15 bp, Homo sapiens
aaagcagggaccaca

SEQ ID NO: 616941 - DNA, 15 bp, Homo sapiens
aagcagggaccacac

SEQ ID NO: 616942 - DNA, 15 bp, Homo sapiens
agcagggaccacacc

SEQ ID NO: 616943 - DNA, 15 bp, Homo sapiens
gcagggaccacacca

SEQ ID NO: 616944 - DNA, 15 bp, Homo sapiens
cagggaccacaccat

SEQ ID NO: 616945 - DNA, 15 bp, Homo sapiens
agggaccacaccatt

SEQ ID NO: 616946 - DNA, 15 bp, Homo sapiens
gggaccacaccattc

SEQ ID NO: 616947 - DNA, 15 bp, Homo sapiens
ggaccacaccattct

SEQ ID NO: 616948 - DNA, 15 bp, Homo sapiens
gaccacaccattctt

SEQ ID NO: 616949 - DNA, 15 bp, Homo sapiens
accacaccattcttg

SEQ ID NO: 616950 - DNA, 15 bp, Homo sapiens
ccacaccattcttga

SEQ ID NO: 616951 - DNA, 15 bp, Homo sapiens
cacaccattcttgac

SEQ ID NO: 616952 - DNA, 15 bp, Homo sapiens
acaccattcttgacc

SEQ ID NO: 616953 - DNA, 15 bp, Homo sapiens
caccattcttgaccc

SEQ ID NO: 616954 - DNA, 15 bp, Homo sapiens
accattcttgaccca

SEQ ID NO: 616955 - DNA, 15 bp, Homo sapiens
ccattcttgacccag

SEQ ID NO: 616956 - DNA, 15 bp, Homo sapiens
cattcttgacccagc

SEQ ID NO: 616957 - DNA, 15 bp, Homo sapiens
attcttgacccagct

SEQ ID NO: 616958 - DNA, 15 bp, Homo sapiens
ttcttgacccagctc

SEQ ID NO: 616959 - DNA, 15 bp, Homo sapiens
tcttgacccagctcc

SEQ ID NO: 616960 - DNA, 15 bp, Homo sapiens
cttgacccagctcca

SEQ ID NO: 616961 - DNA, 15 bp, Homo sapiens
ttgacccagctccac

SEQ ID NO: 616962 - DNA, 15 bp, Homo sapiens
tgacccagctccacc

SEQ ID NO: 616963 - DNA, 15 bp, Homo sapiens
gacccagctccaccc

SEQ ID NO: 616964 - DNA, 15 bp, Homo sapiens
acccagctccacccc

SEQ ID NO: 616965 - DNA, 15 bp, Homo sapiens
cccagctccacccct

SEQ ID NO: 616966 - DNA, 15 bp, Homo sapiens
ccagctccacccctg

SEQ ID NO: 616967 - DNA, 15 bp, Homo sapiens
cagctccacccctgt

SEQ ID NO: 616968 - DNA, 15 bp, Homo sapiens
agctccacccctgtc

SEQ ID NO: 616969 - DNA, 15 bp, Homo sapiens
gctccacccctgtcg

SEQ ID NO: 616970 - DNA, 15 bp, Homo sapiens
ctccacccctgtcgg

SEQ ID NO: 616971 - DNA, 15 bp, Homo sapiens
tccacccctgtcggt

SEQ ID NO: 616972 - DNA, 15 bp, Homo sapiens
ccacccctgtcggta

SEQ ID NO: 616973 - DNA, 15 bp, Homo sapiens
cacccctgtcggtag

SEQ ID NO: 616974 - DNA, 15 bp, Homo sapiens
acccctgtcggtagg

SEQ ID NO: 616975 - DNA, 15 bp, Homo sapiens
cccctgtcggtaggt

SEQ ID NO: 616976 - DNA, 15 bp, Homo sapiens
ccctgtcggtaggtg

SEQ ID NO: 616977 - DNA, 15 bp, Homo sapiens
cctgtcggtaggtgc

SEQ ID NO: 616978 - DNA, 15 bp, Homo sapiens
ctgtcggtaggtgct

SEQ ID NO: 616979 - DNA, 15 bp, Homo sapiens
tgtcggtaggtgctg

SEQ ID NO: 616980 - DNA, 15 bp, Homo sapiens
gtcggtaggtgctgg

SEQ ID NO: 616981 - DNA, 15 bp, Homo sapiens
tcggtaggtgctggc

SEQ ID NO: 616982 - DNA, 15 bp, Homo sapiens
cggtaggtgctggct

SEQ ID NO: 616983 - DNA, 15 bp, Homo sapiens
ggtaggtgctggctt

SEQ ID NO: 616984 - DNA, 15 bp, Homo sapiens
gtaggtgctggcttc

SEQ ID NO: 616985 - DNA, 15 bp, Homo sapiens
taggtgctggcttct

SEQ ID NO: 616986 - DNA, 15 bp, Homo sapiens
aggtgctggcttctt

SEQ ID NO: 616987 - DNA, 15 bp, Homo sapiens
ggtgctggcttcttc

SEQ ID NO: 616988 - DNA, 15 bp, Homo sapiens
gtgctggcttcttcc

SEQ ID NO: 616989 - DNA, 15 bp, Homo sapiens
tgctggcttcttccc

SEQ ID NO: 616990 - DNA, 15 bp, Homo sapiens
gctggcttcttcccc

SEQ ID NO: 616991 - DNA, 15 bp, Homo sapiens
ctggcttcttcccct

SEQ ID NO: 616992 - DNA, 15 bp, Homo sapiens
tggcttcttcccctc

SEQ ID NO: 616993 - DNA, 15 bp, Homo sapiens
ggcttcttcccctct

SEQ ID NO: 616994 - DNA, 15 bp, Homo sapiens
gcttcttcccctctc

SEQ ID NO: 616995 - DNA, 15 bp, Homo sapiens
cttcttcccctctcc

SEQ ID NO: 616996 - DNA, 15 bp, Homo sapiens
ttcttcccctctcct

SEQ ID NO: 616997 - DNA, 15 bp, Homo sapiens
tcttcccctctcctg

SEQ ID NO: 616998 - DNA, 15 bp, Homo sapiens
cttcccctctcctgg

SEQ ID NO: 616999 - DNA, 15 bp, Homo sapiens
ttcccctctcctggt

SEQ ID NO: 617000 - DNA, 15 bp, Homo sapiens
tcccctctcctggtg

SEQ ID NO: 617001 - DNA, 15 bp, Homo sapiens
cccctctcctggtgg

SEQ ID NO: 617002 - DNA, 15 bp, Homo sapiens
ccctctcctggtggt

SEQ ID NO: 617003 - DNA, 15 bp, Homo sapiens
cctctcctggtggtg

SEQ ID NO: 617004 - DNA, 15 bp, Homo sapiens
ctctcctggtggtgg

SEQ ID NO: 617005 - DNA, 15 bp, Homo sapiens
tctcctggtggtggt

SEQ ID NO: 617006 - DNA, 15 bp, Homo sapiens
ctcctggtggtggtg

SEQ ID NO: 617007 - DNA, 15 bp, Homo sapiens
tcctggtggtggtgg

SEQ ID NO: 617008 - DNA, 15 bp, Homo sapiens
cctggtggtggtggg

SEQ ID NO: 617009 - DNA, 15 bp, Homo sapiens
ctggtggtggtgggt

SEQ ID NO: 617010 - DNA, 15 bp, Homo sapiens
tggtggtggtgggtg

SEQ ID NO: 617011 - DNA, 15 bp, Homo sapiens
ggtggtggtgggtgg

SEQ ID NO: 617012 - DNA, 15 bp, Homo sapiens
gtggtggtgggtggt

SEQ ID NO: 617013 - DNA, 15 bp, Homo sapiens
tggtggtgggtggtt

SEQ ID NO: 617014 - DNA, 15 bp, Homo sapiens
ggtggtgggtggttc

SEQ ID NO: 617015 - DNA, 15 bp, Homo sapiens
gtggtgggtggttcc

SEQ ID NO: 617016 - DNA, 15 bp, Homo sapiens
tggtgggtggttccc

SEQ ID NO: 617017 - DNA, 15 bp, Homo sapiens
ggtgggtggttcccg

SEQ ID NO: 617018 - DNA, 15 bp, Homo sapiens
gtgggtggttcccgc

SEQ ID NO: 617019 - DNA, 15 bp, Homo sapiens
tgggtggttcccgcg

SEQ ID NO: 617020 - DNA, 15 bp, Homo sapiens
gggtggttcccgcgg

SEQ ID NO: 617021 - DNA, 15 bp, Homo sapiens
ggtggttcccgcggc

SEQ ID NO: 617022 - DNA, 15 bp, Homo sapiens
gtggttcccgcggcg

SEQ ID NO: 617023 - DNA, 15 bp, Homo sapiens
tggttcccgcggcgg

SEQ ID NO: 617024 - DNA, 15 bp, Homo sapiens
ggttcccgcggcggc

SEQ ID NO: 617025 - DNA, 15 bp, Homo sapiens
gttcccgcggcggcc

SEQ ID NO: 617026 - DNA, 15 bp, Homo sapiens
ttcccgcggcggcct

SEQ ID NO: 617027 - DNA, 15 bp, Homo sapiens
tcccgcggcggcctg

SEQ ID NO: 617028 - DNA, 15 bp, Homo sapiens
cccgcggcggcctgg

SEQ ID NO: 617029 - DNA, 15 bp, Homo sapiens
ccgcggcggcctgga

SEQ ID NO: 617030 - DNA, 15 bp, Homo sapiens
cgcggcggcctggag

SEQ ID NO: 617031 - DNA, 15 bp, Homo sapiens
gcggcggcctggagc

SEQ ID NO: 617032 - DNA, 15 bp, Homo sapiens
cggcggcctggagcc

SEQ ID NO: 617033 - DNA, 15 bp, Homo sapiens
ggcggcctggagccg

SEQ ID NO: 617034 - DNA, 15 bp, Homo sapiens
gcggcctggagccgg

SEQ ID NO: 617035 - DNA, 15 bp, Homo sapiens
cggcctggagccgga

SEQ ID NO: 617036 - DNA, 15 bp, Homo sapiens
ggcctggagccggag

SEQ ID NO: 617037 - DNA, 15 bp, Homo sapiens
gcctggagccggagg

SEQ ID NO: 617038 - DNA, 15 bp, Homo sapiens
cctggagccggaggg

SEQ ID NO: 617039 - DNA, 15 bp, Homo sapiens
ctggagccggagggg

SEQ ID NO: 617040 - DNA, 15 bp, Homo sapiens
tggagccggaggggc

SEQ ID NO: 617041 - DNA, 15 bp, Homo sapiens
ggagccggaggggcg

SEQ ID NO: 617042 - DNA, 15 bp, Homo sapiens
gagccggaggggcgc

SEQ ID NO: 617043 - DNA, 15 bp, Homo sapiens
agccggaggggcgcg

SEQ ID NO: 617044 - DNA, 15 bp, Homo sapiens
gccggaggggcgcgc

SEQ ID NO: 617045 - DNA, 15 bp, Homo sapiens
ccggaggggcgcgcg

SEQ ID NO: 617046 - DNA, 15 bp, Homo sapiens
cggaggggcgcgcga

SEQ ID NO: 617047 - DNA, 15 bp, Homo sapiens
ggaggggcgcgcgac

SEQ ID NO: 617048 - DNA, 15 bp, Homo sapiens
gaggggcgcgcgacc

SEQ ID NO: 617049 - DNA, 15 bp, Homo sapiens
aggggcgcgcgaccc

SEQ ID NO: 617050 - DNA, 15 bp, Homo sapiens
ggggcgcgcgaccct

SEQ ID NO: 617051 - DNA, 15 bp, Homo sapiens
gggcgcgcgaccctg

SEQ ID NO: 617052 - DNA, 15 bp, Homo sapiens
ggcgcgcgaccctgg

SEQ ID NO: 617053 - DNA, 15 bp, Homo sapiens
gcgcgcgaccctggg

SEQ ID NO: 617054 - DNA, 15 bp, Homo sapiens
cgcgcgaccctgggc

SEQ ID NO: 617055 - DNA, 15 bp, Homo sapiens
gcgcgaccctgggct

SEQ ID NO: 617056 - DNA, 15 bp, Homo sapiens
cgcgaccctgggctg

SEQ ID NO: 617057 - DNA, 15 bp, Homo sapiens
gcgaccctgggctgg

SEQ ID NO: 617058 - DNA, 15 bp, Homo sapiens
cgaccctgggctggg

SEQ ID NO: 617059 - DNA, 15 bp, Homo sapiens
gaccctgggctggga

SEQ ID NO: 617060 - DNA, 15 bp, Homo sapiens
accctgggctgggag

SEQ ID NO: 617061 - DNA, 15 bp, Homo sapiens
ccctgggctgggagc

SEQ ID NO: 617062 - DNA, 15 bp, Homo sapiens
cctgggctgggagct

SEQ ID NO: 617063 - DNA, 15 bp, Homo sapiens
ctgggctgggagctc

SEQ ID NO: 617064 - DNA, 15 bp, Homo sapiens
tgggctgggagctcc

SEQ ID NO: 617065 - DNA, 15 bp, Homo sapiens
gggctgggagctccg

SEQ ID NO: 617066 - DNA, 15 bp, Homo sapiens
ggctgggagctccga

SEQ ID NO: 617067 - DNA, 15 bp, Homo sapiens
gctgggagctccgag

SEQ ID NO: 617068 - DNA, 15 bp, Homo sapiens
ctgggagctccgagg

SEQ ID NO: 617069 - DNA, 15 bp, Homo sapiens
tgggagctccgaggg

SEQ ID NO: 617070 - DNA, 15 bp, Homo sapiens
gggagctccgagggc

SEQ ID NO: 617071 - DNA, 15 bp, Homo sapiens
ggagctccgagggcc

SEQ ID NO: 617072 - DNA, 15 bp, Homo sapiens
gagctccgagggcct

SEQ ID NO: 617073 - DNA, 15 bp, Homo sapiens
agctccgagggcctg

SEQ ID NO: 617074 - DNA, 15 bp, Homo sapiens
gctccgagggcctgg

SEQ ID NO: 617075 - DNA, 15 bp, Homo sapiens
ctccgagggcctggg

SEQ ID NO: 617076 - DNA, 15 bp, Homo sapiens
tccgagggcctggga

SEQ ID NO: 617077 - DNA, 15 bp, Homo sapiens
ccgagggcctgggaa

SEQ ID NO: 617078 - DNA, 15 bp, Homo sapiens
cgagggcctgggaac

SEQ ID NO: 617079 - DNA, 15 bp, Homo sapiens
gagggcctgggaacg

SEQ ID NO: 617080 - DNA, 15 bp, Homo sapiens
agggcctgggaacga

SEQ ID NO: 617081 - DNA, 15 bp, Homo sapiens
gggcctgggaacgag

SEQ ID NO: 617082 - DNA, 15 bp, Homo sapiens
ggcctgggaacgaga

SEQ ID NO: 617083 - DNA, 15 bp, Homo sapiens
gcctgggaacgagac

SEQ ID NO: 617084 - DNA, 15 bp, Homo sapiens
cctgggaacgagacc

SEQ ID NO: 617085 - DNA, 15 bp, Homo sapiens
ctgggaacgagacct

SEQ ID NO: 617086 - DNA, 15 bp, Homo sapiens
tgggaacgagacctg

SEQ ID NO: 617087 - DNA, 15 bp, Homo sapiens
gggaacgagacctga

SEQ ID NO: 617088 - DNA, 15 bp, Homo sapiens
ggaacgagacctgag

SEQ ID NO: 617089 - DNA, 15 bp, Homo sapiens
gaacgagacctgaga

SEQ ID NO: 617090 - DNA, 15 bp, Homo sapiens
aacgagacctgagac

SEQ ID NO: 617091 - DNA, 15 bp, Homo sapiens
acgagacctgagacc

SEQ ID NO: 617092 - DNA, 15 bp, Homo sapiens
cgagacctgagacct

SEQ ID NO: 617093 - DNA, 15 bp, Homo sapiens
gagacctgagacctt

SEQ ID NO: 617094 - DNA, 15 bp, Homo sapiens
agacctgagaccttg

SEQ ID NO: 617095 - DNA, 15 bp, Homo sapiens
gacctgagaccttgg

SEQ ID NO: 617096 - DNA, 15 bp, Homo sapiens
acctgagaccttggc

SEQ ID NO: 617097 - DNA, 15 bp, Homo sapiens
cctgagaccttggct

SEQ ID NO: 617098 - DNA, 15 bp, Homo sapiens
ctgagaccttggctt

SEQ ID NO: 617099 - DNA, 15 bp, Homo sapiens
tgagaccttggcttc

SEQ ID NO: 617100 - DNA, 15 bp, Homo sapiens
gagaccttggcttct

SEQ ID NO: 617101 - DNA, 15 bp, Homo sapiens
agaccttggcttctc

SEQ ID NO: 617102 - DNA, 15 bp, Homo sapiens
gaccttggcttctcg

SEQ ID NO: 617103 - DNA, 15 bp, Homo sapiens
accttggcttctcga

SEQ ID NO: 617104 - DNA, 15 bp, Homo sapiens
ccttggcttctcgaa

SEQ ID NO: 617105 - DNA, 15 bp, Homo sapiens
cttggcttctcgaag

SEQ ID NO: 617106 - DNA, 15 bp, Homo sapiens
ttggcttctcgaagg

SEQ ID NO: 617107 - DNA, 15 bp, Homo sapiens
tggcttctcgaaggt

SEQ ID NO: 617108 - DNA, 15 bp, Homo sapiens
ggcttctcgaaggta

SEQ ID NO: 617109 - DNA, 15 bp, Homo sapiens
gcttctcgaaggtag

SEQ ID NO: 617110 - DNA, 15 bp, Homo sapiens
cttctcgaaggtagt

SEQ ID NO: 617111 - DNA, 15 bp, Homo sapiens
ttctcgaaggtagta

SEQ ID NO: 617112 - DNA, 15 bp, Homo sapiens
tctcgaaggtagtag

SEQ ID NO: 617113 - DNA, 15 bp, Homo sapiens
ctcgaaggtagtagg

SEQ ID NO: 617114 - DNA, 15 bp, Homo sapiens
tcgaaggtagtaggg

SEQ ID NO: 617115 - DNA, 15 bp, Homo sapiens
cgaaggtagtaggga

SEQ ID NO: 617116 - DNA, 15 bp, Homo sapiens
gaaggtagtagggac

SEQ ID NO: 617117 - DNA, 15 bp, Homo sapiens
aaggtagtagggact

SEQ ID NO: 617118 - DNA, 15 bp, Homo sapiens
aggtagtagggactt

SEQ ID NO: 617119 - DNA, 15 bp, Homo sapiens
ggtagtagggacttg

SEQ ID NO: 617120 - DNA, 15 bp, Homo sapiens
gtagtagggacttgg

SEQ ID NO: 617121 - DNA, 15 bp, Homo sapiens
tagtagggacttggg

SEQ ID NO: 617122 - DNA, 15 bp, Homo sapiens
agtagggacttggga

SEQ ID NO: 617123 - DNA, 15 bp, Homo sapiens
gtagggacttgggag

SEQ ID NO: 617124 - DNA, 15 bp, Homo sapiens
tagggacttgggagt

SEQ ID NO: 617125 - DNA, 15 bp, Homo sapiens
agggacttgggagtg

SEQ ID NO: 617126 - DNA, 15 bp, Homo sapiens
gggacttgggagtgg

SEQ ID NO: 617127 - DNA, 15 bp, Homo sapiens
ggacttgggagtggt

SEQ ID NO: 617128 - DNA, 15 bp, Homo sapiens
gacttgggagtggtg

SEQ ID NO: 617129 - DNA, 15 bp, Homo sapiens
acttgggagtggtga

SEQ ID NO: 617130 - DNA, 15 bp, Homo sapiens
cttgggagtggtgac

SEQ ID NO: 617131 - DNA, 15 bp, Homo sapiens
ttgggagtggtgact

SEQ ID NO: 617132 - DNA, 15 bp, Homo sapiens
tgggagtggtgactg

SEQ ID NO: 617133 - DNA, 15 bp, Homo sapiens
gggagtggtgactga

SEQ ID NO: 617134 - DNA, 15 bp, Homo sapiens
ggagtggtgactgaa

SEQ ID NO: 617135 - DNA, 15 bp, Homo sapiens
gagtggtgactgaac

SEQ ID NO: 617136 - DNA, 15 bp, Homo sapiens
agtggtgactgaacc

SEQ ID NO: 617137 - DNA, 15 bp, Homo sapiens
gtggtgactgaacct

SEQ ID NO: 617138 - DNA, 15 bp, Homo sapiens
tggtgactgaacctg

SEQ ID NO: 617139 - DNA, 15 bp, Homo sapiens
ggtgactgaacctgg

SEQ ID NO: 617140 - DNA, 15 bp, Homo sapiens
gtgactgaacctggt

SEQ ID NO: 617141 - DNA, 15 bp, Homo sapiens
tgactgaacctggtc

SEQ ID NO: 617142 - DNA, 15 bp, Homo sapiens
gactgaacctggtct

SEQ ID NO: 617143 - DNA, 15 bp, Homo sapiens
actgaacctggtctg

SEQ ID NO: 617144 - DNA, 15 bp, Homo sapiens
ctgaacctggtctgg

SEQ ID NO: 617145 - DNA, 15 bp, Homo sapiens
tgaacctggtctggc

SEQ ID NO: 617146 - DNA, 15 bp, Homo sapiens
gaacctggtctggct

SEQ ID NO: 617147 - DNA, 15 bp, Homo sapiens
aacctggtctggctc

SEQ ID NO: 617148 - DNA, 15 bp, Homo sapiens
acctggtctggctcc

SEQ ID NO: 617149 - DNA, 15 bp, Homo sapiens
cctggtctggctcct

SEQ ID NO: 617150 - DNA, 15 bp, Homo sapiens
ctggtctggctcctc

SEQ ID NO: 617151 - DNA, 15 bp, Homo sapiens
tggtctggctcctcc

SEQ ID NO: 617152 - DNA, 15 bp, Homo sapiens
ggtctggctcctcct

SEQ ID NO: 617153 - DNA, 15 bp, Homo sapiens
gtctggctcctcctt

SEQ ID NO: 617154 - DNA, 15 bp, Homo sapiens
tctggctcctcctta

SEQ ID NO: 617155 - DNA, 15 bp, Homo sapiens
ctggctcctccttac

SEQ ID NO: 617156 - DNA, 15 bp, Homo sapiens
tggctcctccttact

SEQ ID NO: 617157 - DNA, 15 bp, Homo sapiens
ggctcctccttactt

SEQ ID NO: 617158 - DNA, 15 bp, Homo sapiens
gctcctccttacttc

SEQ ID NO: 617159 - DNA, 15 bp, Homo sapiens
ctcctccttacttcc

SEQ ID NO: 617160 - DNA, 15 bp, Homo sapiens
tcctccttacttcct

SEQ ID NO: 617161 - DNA, 15 bp, Homo sapiens
cctccttacttcctc

SEQ ID NO: 617162 - DNA, 15 bp, Homo sapiens
ctccttacttcctct

SEQ ID NO: 617163 - DNA, 15 bp, Homo sapiens
tccttacttcctctt

SEQ ID NO: 617164 - DNA, 15 bp, Homo sapiens
ccttacttcctcttg

SEQ ID NO: 617165 - DNA, 15 bp, Homo sapiens
cttacttcctcttgt

SEQ ID NO: 617166 - DNA, 15 bp, Homo sapiens
ttacttcctcttgtt

SEQ ID NO: 617167 - DNA, 15 bp, Homo sapiens
tacttcctcttgttg

SEQ ID NO: 617168 - DNA, 15 bp, Homo sapiens
acttcctcttgttgc

SEQ ID NO: 617169 - DNA, 15 bp, Homo sapiens
cttcctcttgttgcg

SEQ ID NO: 617170 - DNA, 15 bp, Homo sapiens
ttcctcttgttgcgg

SEQ ID NO: 617171 - DNA, 15 bp, Homo sapiens
tcctcttgttgcggg

SEQ ID NO: 617172 - DNA, 15 bp, Homo sapiens
cctcttgttgcgggt

SEQ ID NO: 617173 - DNA, 15 bp, Homo sapiens
ctcttgttgcgggtg

SEQ ID NO: 617174 - DNA, 15 bp, Homo sapiens
tcttgttgcgggtgg

SEQ ID NO: 617175 - DNA, 15 bp, Homo sapiens
cttgttgcgggtggg

SEQ ID NO: 617176 - DNA, 15 bp, Homo sapiens
ttgttgcgggtggga

SEQ ID NO: 617177 - DNA, 15 bp, Homo sapiens
tgttgcgggtgggac

SEQ ID NO: 617178 - DNA, 15 bp, Homo sapiens
gttgcgggtgggacg

SEQ ID NO: 617179 - DNA, 15 bp, Homo sapiens
ttgcgggtgggacga

SEQ ID NO: 617180 - DNA, 15 bp, Homo sapiens
tgcgggtgggacgag

SEQ ID NO: 617181 - DNA, 15 bp, Homo sapiens
gcgggtgggacgagc

SEQ ID NO: 617182 - DNA, 15 bp, Homo sapiens
cgggtgggacgagct

SEQ ID NO: 617183 - DNA, 15 bp, Homo sapiens
gggtgggacgagcta

SEQ ID NO: 617184 - DNA, 15 bp, Homo sapiens
ggtgggacgagctag

SEQ ID NO: 617185 - DNA, 15 bp, Homo sapiens
gtgggacgagctagc

SEQ ID NO: 617186 - DNA, 15 bp, Homo sapiens
tgggacgagctagct

SEQ ID NO: 617187 - DNA, 15 bp, Homo sapiens
gggacgagctagctt

SEQ ID NO: 617188 - DNA, 15 bp, Homo sapiens
ggacgagctagcttc

SEQ ID NO: 617189 - DNA, 15 bp, Homo sapiens
gacgagctagcttcc

SEQ ID NO: 617190 - DNA, 15 bp, Homo sapiens
acgagctagcttccg

SEQ ID NO: 617191 - DNA, 15 bp, Homo sapiens
cgagctagcttccgc

SEQ ID NO: 617192 - DNA, 15 bp, Homo sapiens
gagctagcttccgcc

SEQ ID NO: 617193 - DNA, 15 bp, Homo sapiens
agctagcttccgcct

SEQ ID NO: 617194 - DNA, 15 bp, Homo sapiens
gctagcttccgcctc

SEQ ID NO: 617195 - DNA, 15 bp, Homo sapiens
ctagcttccgcctct

SEQ ID NO: 617196 - DNA, 15 bp, Homo sapiens
tagcttccgcctctc

SEQ ID NO: 617197 - DNA, 15 bp, Homo sapiens
agcttccgcctctcc

SEQ ID NO: 617198 - DNA, 15 bp, Homo sapiens
gcttccgcctctccc

SEQ ID NO: 617199 - DNA, 15 bp, Homo sapiens
cttccgcctctccca

SEQ ID NO: 617200 - DNA, 15 bp, Homo sapiens
ttccgcctctcccag

SEQ ID NO: 617201 - DNA, 15 bp, Homo sapiens
tccgcctctcccagc

SEQ ID NO: 617202 - DNA, 15 bp, Homo sapiens
ccgcctctcccagcc

SEQ ID NO: 617203 - DNA, 15 bp, Homo sapiens
cgcctctcccagcca

SEQ ID NO: 617204 - DNA, 15 bp, Homo sapiens
gcctctcccagccac

SEQ ID NO: 617205 - DNA, 15 bp, Homo sapiens
cctctcccagccact

SEQ ID NO: 617206 - DNA, 15 bp, Homo sapiens
ctctcccagccactt

SEQ ID NO: 617207 - DNA, 15 bp, Homo sapiens
tctcccagccacttt

SEQ ID NO: 617208 - DNA, 15 bp, Homo sapiens
ctcccagccactttt

SEQ ID NO: 617209 - DNA, 15 bp, Homo sapiens
tcccagccacttttt

SEQ ID NO: 617210 - DNA, 15 bp, Homo sapiens
cccagccactttttc

SEQ ID NO: 617211 - DNA, 15 bp, Homo sapiens
ccagccactttttcc

SEQ ID NO: 617212 - DNA, 15 bp, Homo sapiens
cagccactttttcct

SEQ ID NO: 617213 - DNA, 15 bp, Homo sapiens
agccactttttcctg

SEQ ID NO: 617214 - DNA, 15 bp, Homo sapiens
gccactttttcctgc

SEQ ID NO: 617215 - DNA, 15 bp, Homo sapiens
ccactttttcctgct

SEQ ID NO: 617216 - DNA, 15 bp, Homo sapiens
cactttttcctgctc

SEQ ID NO: 617217 - DNA, 15 bp, Homo sapiens
actttttcctgctca

SEQ ID NO: 617218 - DNA, 15 bp, Homo sapiens
ctttttcctgctcat

SEQ ID NO: 617219 - DNA, 15 bp, Homo sapiens
tttttcctgctcatt

SEQ ID NO: 617220 - DNA, 15 bp, Homo sapiens
ttttcctgctcattt

SEQ ID NO: 617221 - DNA, 15 bp, Homo sapiens
tttcctgctcatttg

SEQ ID NO: 617222 - DNA, 15 bp, Homo sapiens
ttcctgctcatttgc

SEQ ID NO: 617223 - DNA, 15 bp, Homo sapiens
tcctgctcatttgca

SEQ ID NO: 617224 - DNA, 15 bp, Homo sapiens
cctgctcatttgcag

SEQ ID NO: 617225 - DNA, 15 bp, Homo sapiens
ctgctcatttgcagc

SEQ ID NO: 617226 - DNA, 15 bp, Homo sapiens
tgctcatttgcagct

SEQ ID NO: 617227 - DNA, 15 bp, Homo sapiens
gctcatttgcagcta

SEQ ID NO: 617228 - DNA, 15 bp, Homo sapiens
ctcatttgcagctag

SEQ ID NO: 617229 - DNA, 15 bp, Homo sapiens
tcatttgcagctagg

SEQ ID NO: 617230 - DNA, 15 bp, Homo sapiens
catttgcagctaggt

SEQ ID NO: 617231 - DNA, 15 bp, Homo sapiens
atttgcagctaggtt

SEQ ID NO: 617232 - DNA, 15 bp, Homo sapiens
tttgcagctaggttg

SEQ ID NO: 617233 - DNA, 15 bp, Homo sapiens
ttgcagctaggttgg

SEQ ID NO: 617234 - DNA, 15 bp, Homo sapiens
tgcagctaggttggc

SEQ ID NO: 617235 - DNA, 15 bp, Homo sapiens
gcagctaggttggct

SEQ ID NO: 617236 - DNA, 15 bp, Homo sapiens
cagctaggttggctc

SEQ ID NO: 617237 - DNA, 15 bp, Homo sapiens
agctaggttggctcc

SEQ ID NO: 617238 - DNA, 15 bp, Homo sapiens
gctaggttggctccc

SEQ ID NO: 617239 - DNA, 15 bp, Homo sapiens
ctaggttggctcccc

SEQ ID NO: 617240 - DNA, 15 bp, Homo sapiens
taggttggctcccct

SEQ ID NO: 617241 - DNA, 15 bp, Homo sapiens
aggttggctcccctt

SEQ ID NO: 617242 - DNA, 15 bp, Homo sapiens
ggttggctccccttt

SEQ ID NO: 617243 - DNA, 15 bp, Homo sapiens
gttggctcccctttt

SEQ ID NO: 617244 - DNA, 15 bp, Homo sapiens
ttggctccccttttg

SEQ ID NO: 617245 - DNA, 15 bp, Homo sapiens
tggctccccttttgg

SEQ ID NO: 617246 - DNA, 15 bp, Homo sapiens
ggctccccttttggg

SEQ ID NO: 617247 - DNA, 15 bp, Homo sapiens
gctccccttttggga

SEQ ID NO: 617248 - DNA, 15 bp, Homo sapiens
ctccccttttgggaa

SEQ ID NO: 617249 - DNA, 15 bp, Homo sapiens
tccccttttgggaat

SEQ ID NO: 617250 - DNA, 15 bp, Homo sapiens
ccccttttgggaatt

SEQ ID NO: 617251 - DNA, 15 bp, Homo sapiens
cccttttgggaattt

SEQ ID NO: 617252 - DNA, 15 bp, Homo sapiens
ccttttgggaatttc

SEQ ID NO: 617253 - DNA, 15 bp, Homo sapiens
cttttgggaatttcc

SEQ ID NO: 617254 - DNA, 15 bp, Homo sapiens
ttttgggaatttcct

SEQ ID NO: 617255 - DNA, 15 bp, Homo sapiens
tttgggaatttcctc

SEQ ID NO: 617256 - DNA, 15 bp, Homo sapiens
ttgggaatttcctct

SEQ ID NO: 617257 - DNA, 15 bp, Homo sapiens
tgggaatttcctctc

SEQ ID NO: 617258 - DNA, 15 bp, Homo sapiens
gggaatttcctctcc

SEQ ID NO: 617259 - DNA, 15 bp, Homo sapiens
ggaatttcctctccc

SEQ ID NO: 617260 - DNA, 15 bp, Homo sapiens
gaatttcctctcccc

SEQ ID NO: 617261 - DNA, 15 bp, Homo sapiens
aatttcctctcccct

SEQ ID NO: 617262 - DNA, 15 bp, Homo sapiens
atttcctctcccctt

SEQ ID NO: 617263 - DNA, 15 bp, Homo sapiens
tttcctctccccttg

SEQ ID NO: 617264 - DNA, 15 bp, Homo sapiens
ttcctctccccttgg

SEQ ID NO: 617265 - DNA, 15 bp, Homo sapiens
tcctctccccttggc

SEQ ID NO: 617266 - DNA, 15 bp, Homo sapiens
cctctccccttggca

SEQ ID NO: 617267 - DNA, 15 bp, Homo sapiens
ctctccccttggcac

SEQ ID NO: 617268 - DNA, 15 bp, Homo sapiens
tctccccttggcact

SEQ ID NO: 617269 - DNA, 15 bp, Homo sapiens
ctccccttggcactc

SEQ ID NO: 617270 - DNA, 15 bp, Homo sapiens
tccccttggcactcg

SEQ ID NO: 617271 - DNA, 15 bp, Homo sapiens
ccccttggcactcgg

SEQ ID NO: 617272 - DNA, 15 bp, Homo sapiens
cccttggcactcgga

SEQ ID NO: 617273 - DNA, 15 bp, Homo sapiens
ccttggcactcggag

SEQ ID NO: 617274 - DNA, 15 bp, Homo sapiens
cttggcactcggagt

SEQ ID NO: 617275 - DNA, 15 bp, Homo sapiens
ttggcactcggagtt

SEQ ID NO: 617276 - DNA, 15 bp, Homo sapiens
tggcactcggagttg

SEQ ID NO: 617277 - DNA, 15 bp, Homo sapiens
ggcactcggagttgg

SEQ ID NO: 617278 - DNA, 15 bp, Homo sapiens
gcactcggagttggg

SEQ ID NO: 617279 - DNA, 15 bp, Homo sapiens
cactcggagttgggg

SEQ ID NO: 617280 - DNA, 15 bp, Homo sapiens
actcggagttggggg

SEQ ID NO: 617281 - DNA, 15 bp, Homo sapiens
ctcggagttgggggg

SEQ ID NO: 617282 - DNA, 15 bp, Homo sapiens
tcggagttggggggt

SEQ ID NO: 617283 - DNA, 15 bp, Homo sapiens
cggagttggggggtg

SEQ ID NO: 617284 - DNA, 15 bp, Homo sapiens
ggagttggggggtgc

SEQ ID NO: 617285 - DNA, 15 bp, Homo sapiens
gagttggggggtgcc

SEQ ID NO: 617286 - DNA, 15 bp, Homo sapiens
agttggggggtgcca

SEQ ID NO: 617287 - DNA, 15 bp, Homo sapiens
gttggggggtgccac

SEQ ID NO: 617288 - DNA, 15 bp, Homo sapiens
ttggggggtgccacc

SEQ ID NO: 617289 - DNA, 15 bp, Homo sapiens
tggggggtgccacct

SEQ ID NO: 617290 - DNA, 15 bp, Homo sapiens
ggggggtgccaccta

SEQ ID NO: 617291 - DNA, 15 bp, Homo sapiens
gggggtgccacctag

SEQ ID NO: 617292 - DNA, 15 bp, Homo sapiens
ggggtgccacctagt

SEQ ID NO: 617293 - DNA, 15 bp, Homo sapiens
gggtgccacctagtg

SEQ ID NO: 617294 - DNA, 15 bp, Homo sapiens
ggtgccacctagtgg

SEQ ID NO: 617295 - DNA, 15 bp, Homo sapiens
gtgccacctagtgga

SEQ ID NO: 617296 - DNA, 15 bp, Homo sapiens
tgccacctagtggaa

SEQ ID NO: 617297 - DNA, 15 bp, Homo sapiens
gccacctagtggaag

SEQ ID NO: 617298 - DNA, 15 bp, Homo sapiens
ccacctagtggaaga

SEQ ID NO: 617299 - DNA, 15 bp, Homo sapiens
cacctagtggaagat

SEQ ID NO: 617300 - DNA, 15 bp, Homo sapiens
acctagtggaagata

SEQ ID NO: 617301 - DNA, 15 bp, Homo sapiens
cctagtggaagataa

SEQ ID NO: 617302 - DNA, 15 bp, Homo sapiens
ctagtggaagataac

SEQ ID NO: 617303 - DNA, 15 bp, Homo sapiens
tagtggaagataacg

SEQ ID NO: 617304 - DNA, 15 bp, Homo sapiens
agtggaagataacgg

SEQ ID NO: 617305 - DNA, 15 bp, Homo sapiens
gtggaagataacgga

SEQ ID NO: 617306 - DNA, 15 bp, Homo sapiens
tggaagataacggag

SEQ ID NO: 617307 - DNA, 15 bp, Homo sapiens
ggaagataacggagc

SEQ ID NO: 617308 - DNA, 15 bp, Homo sapiens
gaagataacggagct

SEQ ID NO: 617309 - DNA, 15 bp, Homo sapiens
aagataacggagcta

SEQ ID NO: 617310 - DNA, 15 bp, Homo sapiens
agataacggagctag

SEQ ID NO: 617311 - DNA, 15 bp, Homo sapiens
gataacggagctagg

SEQ ID NO: 617312 - DNA, 15 bp, Homo sapiens
ataacggagctaggg

SEQ ID NO: 617313 - DNA, 15 bp, Homo sapiens
taacggagctagggt

SEQ ID NO: 617314 - DNA, 15 bp, Homo sapiens
aacggagctagggtc

SEQ ID NO: 617315 - DNA, 15 bp, Homo sapiens
acggagctagggtct

SEQ ID NO: 617316 - DNA, 15 bp, Homo sapiens
cggagctagggtctt

SEQ ID NO: 617317 - DNA, 15 bp, Homo sapiens
ggagctagggtcttg

SEQ ID NO: 617318 - DNA, 15 bp, Homo sapiens
gagctagggtcttga

SEQ ID NO: 617319 - DNA, 15 bp, Homo sapiens
agctagggtcttgaa

SEQ ID NO: 617320 - DNA, 15 bp, Homo sapiens
gctagggtcttgaag

SEQ ID NO: 617321 - DNA, 15 bp, Homo sapiens
ctagggtcttgaaga

SEQ ID NO: 617322 - DNA, 15 bp, Homo sapiens
tagggtcttgaagag

SEQ ID NO: 617323 - DNA, 15 bp, Homo sapiens
agggtcttgaagagg

SEQ ID NO: 617324 - DNA, 15 bp, Homo sapiens
gggtcttgaagaggc

SEQ ID NO: 617325 - DNA, 15 bp, Homo sapiens
ggtcttgaagaggct

SEQ ID NO: 617326 - DNA, 15 bp, Homo sapiens
gtcttgaagaggctg

SEQ ID NO: 617327 - DNA, 15 bp, Homo sapiens
tcttgaagaggctgc

SEQ ID NO: 617328 - DNA, 15 bp, Homo sapiens
cttgaagaggctgct

SEQ ID NO: 617329 - DNA, 15 bp, Homo sapiens
ttgaagaggctgctg

SEQ ID NO: 617330 - DNA, 15 bp, Homo sapiens
tgaagaggctgctgt

SEQ ID NO: 617331 - DNA, 15 bp, Homo sapiens
gaagaggctgctgtc

SEQ ID NO: 617332 - DNA, 15 bp, Homo sapiens
aagaggctgctgtcc

SEQ ID NO: 617333 - DNA, 15 bp, Homo sapiens
agaggctgctgtccc

SEQ ID NO: 617334 - DNA, 15 bp, Homo sapiens
gaggctgctgtcccc

SEQ ID NO: 617335 - DNA, 15 bp, Homo sapiens
aggctgctgtcccct

SEQ ID NO: 617336 - DNA, 15 bp, Homo sapiens
ggctgctgtcccctc

SEQ ID NO: 617337 - DNA, 15 bp, Homo sapiens
gctgctgtcccctct

SEQ ID NO: 617338 - DNA, 15 bp, Homo sapiens
ctgctgtcccctctg

SEQ ID NO: 617339 - DNA, 15 bp, Homo sapiens
tgctgtcccctctgg

SEQ ID NO: 617340 - DNA, 15 bp, Homo sapiens
gctgtcccctctggc

SEQ ID NO: 617341 - DNA, 15 bp, Homo sapiens
ctgtcccctctggct

SEQ ID NO: 617342 - DNA, 15 bp, Homo sapiens
tgtcccctctggctg

SEQ ID NO: 617343 - DNA, 15 bp, Homo sapiens
gtcccctctggctgt

SEQ ID NO: 617344 - DNA, 15 bp, Homo sapiens
tcccctctggctgtt

SEQ ID NO: 617345 - DNA, 15 bp, Homo sapiens
cccctctggctgttt

SEQ ID NO: 617346 - DNA, 15 bp, Homo sapiens
ccctctggctgtttt

SEQ ID NO: 617347 - DNA, 15 bp, Homo sapiens
cctctggctgttttg

SEQ ID NO: 617348 - DNA, 15 bp, Homo sapiens
ctctggctgttttgg

SEQ ID NO: 617349 - DNA, 15 bp, Homo sapiens
tctggctgttttggc

SEQ ID NO: 617350 - DNA, 15 bp, Homo sapiens
ctggctgttttggcg

SEQ ID NO: 617351 - DNA, 15 bp, Homo sapiens
tggctgttttggcgg

SEQ ID NO: 617352 - DNA, 15 bp, Homo sapiens
ggctgttttggcggt

SEQ ID NO: 617353 - DNA, 15 bp, Homo sapiens
gctgttttggcggtg

SEQ ID NO: 617354 - DNA, 15 bp, Homo sapiens
ctgttttggcggtgt

SEQ ID NO: 617355 - DNA, 15 bp, Homo sapiens
tgttttggcggtgta

SEQ ID NO: 617356 - DNA, 15 bp, Homo sapiens
gttttggcggtgtag

SEQ ID NO: 617357 - DNA, 15 bp, Homo sapiens
ttttggcggtgtagg

SEQ ID NO: 617358 - DNA, 15 bp, Homo sapiens
tttggcggtgtaggg

SEQ ID NO: 617359 - DNA, 15 bp, Homo sapiens
ttggcggtgtagggt

SEQ ID NO: 617360 - DNA, 15 bp, Homo sapiens
tggcggtgtagggtg

SEQ ID NO: 617361 - DNA, 15 bp, Homo sapiens
ggcggtgtagggtgg

SEQ ID NO: 617362 - DNA, 15 bp, Homo sapiens
gcggtgtagggtggc

SEQ ID NO: 617363 - DNA, 15 bp, Homo sapiens
cggtgtagggtggca

SEQ ID NO: 617364 - DNA, 15 bp, Homo sapiens
ggtgtagggtggcat

SEQ ID NO: 617365 - DNA, 15 bp, Homo sapiens
gtgtagggtggcatg

SEQ ID NO: 617366 - DNA, 15 bp, Homo sapiens
tgtagggtggcatga

SEQ ID NO: 617367 - DNA, 15 bp, Homo sapiens
gtagggtggcatgag

SEQ ID NO: 617368 - DNA, 15 bp, Homo sapiens
tagggtggcatgaga

SEQ ID NO: 617369 - DNA, 15 bp, Homo sapiens
agggtggcatgagag

SEQ ID NO: 617370 - DNA, 15 bp, Homo sapiens
gggtggcatgagaga

SEQ ID NO: 617371 - DNA, 15 bp, Homo sapiens
ggtggcatgagagac

SEQ ID NO: 617372 - DNA, 15 bp, Homo sapiens
gtggcatgagagact

SEQ ID NO: 617373 - DNA, 15 bp, Homo sapiens
tggcatgagagactg

SEQ ID NO: 617374 - DNA, 15 bp, Homo sapiens
ggcatgagagactgc

SEQ ID NO: 617375 - DNA, 15 bp, Homo sapiens
gcatgagagactgcg

SEQ ID NO: 617376 - DNA, 15 bp, Homo sapiens
catgagagactgcga

SEQ ID NO: 617377 - DNA, 15 bp, Homo sapiens
atgagagactgcgac

SEQ ID NO: 617378 - DNA, 15 bp, Homo sapiens
tgagagactgcgact

SEQ ID NO: 617379 - DNA, 15 bp, Homo sapiens
gagagactgcgactc

SEQ ID NO: 617380 - DNA, 15 bp, Homo sapiens
agagactgcgactcg

SEQ ID NO: 617381 - DNA, 15 bp, Homo sapiens
gagactgcgactcgc

SEQ ID NO: 617382 - DNA, 15 bp, Homo sapiens
agactgcgactcgcc

SEQ ID NO: 617383 - DNA, 15 bp, Homo sapiens
gactgcgactcgcct

SEQ ID NO: 617384 - DNA, 15 bp, Homo sapiens
actgcgactcgcctc

SEQ ID NO: 617385 - DNA, 15 bp, Homo sapiens
ctgcgactcgcctcc

SEQ ID NO: 617386 - DNA, 15 bp, Homo sapiens
tgcgactcgcctcct

SEQ ID NO: 617387 - DNA, 15 bp, Homo sapiens
gcgactcgcctcctc

SEQ ID NO: 617388 - DNA, 15 bp, Homo sapiens
cgactcgcctcctca

SEQ ID NO: 617389 - DNA, 15 bp, Homo sapiens
gactcgcctcctcat

SEQ ID NO: 617390 - DNA, 15 bp, Homo sapiens
actcgcctcctcatc

SEQ ID NO: 617391 - DNA, 15 bp, Homo sapiens
ctcgcctcctcatcc

SEQ ID NO: 617392 - DNA, 15 bp, Homo sapiens
tcgcctcctcatccc

SEQ ID NO: 617393 - DNA, 15 bp, Homo sapiens
cgcctcctcatccct

SEQ ID NO: 617394 - DNA, 15 bp, Homo sapiens
gcctcctcatccctg

SEQ ID NO: 617395 - DNA, 15 bp, Homo sapiens
cctcctcatccctgt

SEQ ID NO: 617396 - DNA, 15 bp, Homo sapiens
ctcctcatccctgtt

SEQ ID NO: 617397 - DNA, 15 bp, Homo sapiens
tcctcatccctgttt

SEQ ID NO: 617398 - DNA, 15 bp, Homo sapiens
cctcatccctgtttc

SEQ ID NO: 617399 - DNA, 15 bp, Homo sapiens
ctcatccctgtttct

SEQ ID NO: 617400 - DNA, 15 bp, Homo sapiens
tcatccctgtttctg

SEQ ID NO: 617401 - DNA, 15 bp, Homo sapiens
catccctgtttctgt

SEQ ID NO: 617402 - DNA, 15 bp, Homo sapiens
atccctgtttctgta

SEQ ID NO: 617403 - DNA, 15 bp, Homo sapiens
tccctgtttctgtat

SEQ ID NO: 617404 - DNA, 15 bp, Homo sapiens
ccctgtttctgtatg

SEQ ID NO: 617405 - DNA, 15 bp, Homo sapiens
cctgtttctgtatgc

SEQ ID NO: 617406 - DNA, 15 bp, Homo sapiens
ctgtttctgtatgcg

SEQ ID NO: 617407 - DNA, 15 bp, Homo sapiens
tgtttctgtatgcga

SEQ ID NO: 617408 - DNA, 15 bp, Homo sapiens
gtttctgtatgcgag

SEQ ID NO: 617409 - DNA, 15 bp, Homo sapiens
tttctgtatgcgagt

SEQ ID NO: 617410 - DNA, 15 bp, Homo sapiens
ttctgtatgcgagtg

SEQ ID NO: 617411 - DNA, 15 bp, Homo sapiens
tctgtatgcgagtgc

SEQ ID NO: 617412 - DNA, 15 bp, Homo sapiens
ctgtatgcgagtgct

SEQ ID NO: 617413 - DNA, 15 bp, Homo sapiens
tgtatgcgagtgctt

SEQ ID NO: 617414 - DNA, 15 bp, Homo sapiens
gtatgcgagtgcttg

SEQ ID NO: 617415 - DNA, 15 bp, Homo sapiens
tatgcgagtgcttgt

SEQ ID NO: 617416 - DNA, 15 bp, Homo sapiens
atgcgagtgcttgta

SEQ ID NO: 617417 - DNA, 15 bp, Homo sapiens
tgcgagtgcttgtat

SEQ ID NO: 617418 - DNA, 15 bp, Homo sapiens
gcgagtgcttgtatt

SEQ ID NO: 617419 - DNA, 15 bp, Homo sapiens
cgagtgcttgtattc

SEQ ID NO: 617420 - DNA, 15 bp, Homo sapiens
gagtgcttgtattca

SEQ ID NO: 617421 - DNA, 15 bp, Homo sapiens
agtgcttgtattcag

SEQ ID NO: 617422 - DNA, 15 bp, Homo sapiens
gtgcttgtattcagt

SEQ ID NO: 617423 - DNA, 15 bp, Homo sapiens
tgcttgtattcagta

SEQ ID NO: 617424 - DNA, 15 bp, Homo sapiens
gcttgtattcagtag

SEQ ID NO: 617425 - DNA, 15 bp, Homo sapiens
cttgtattcagtaga

SEQ ID NO: 617426 - DNA, 15 bp, Homo sapiens
ttgtattcagtagaa

SEQ ID NO: 617427 - DNA, 15 bp, Homo sapiens
tgtattcagtagaag

SEQ ID NO: 617428 - DNA, 15 bp, Homo sapiens
gtattcagtagaagc

SEQ ID NO: 617429 - DNA, 15 bp, Homo sapiens
tattcagtagaagca

SEQ ID NO: 617430 - DNA, 15 bp, Homo sapiens
attcagtagaagcat

SEQ ID NO: 617431 - DNA, 15 bp, Homo sapiens
ttcagtagaagcata

SEQ ID NO: 617432 - DNA, 15 bp, Homo sapiens
tcagtagaagcatac

SEQ ID NO: 617433 - DNA, 15 bp, Homo sapiens
cagtagaagcataca

SEQ ID NO: 617434 - DNA, 15 bp, Homo sapiens
agtagaagcatacac

SEQ ID NO: 617435 - DNA, 15 bp, Homo sapiens
gtagaagcatacact

SEQ ID NO: 617436 - DNA, 15 bp, Homo sapiens
tagaagcatacacta

SEQ ID NO: 617437 - DNA, 15 bp, Homo sapiens
agaagcatacactat

SEQ ID NO: 617438 - DNA, 15 bp, Homo sapiens
gaagcatacactata

SEQ ID NO: 617439 - DNA, 15 bp, Homo sapiens
aagcatacactatac

SEQ ID NO: 617440 - DNA, 15 bp, Homo sapiens
agcatacactatact

SEQ ID NO: 617441 - DNA, 15 bp, Homo sapiens
gcatacactatactc

SEQ ID NO: 617442 - DNA, 15 bp, Homo sapiens
catacactatactcc

SEQ ID NO: 617443 - DNA, 15 bp, Homo sapiens
atacactatactccc

SEQ ID NO: 617444 - DNA, 15 bp, Homo sapiens
tacactatactccct

SEQ ID NO: 617445 - DNA, 15 bp, Homo sapiens
acactatactccctc

SEQ ID NO: 617446 - DNA, 15 bp, Homo sapiens
cactatactccctca

SEQ ID NO: 617447 - DNA, 15 bp, Homo sapiens
actatactccctcaa

SEQ ID NO: 617448 - DNA, 15 bp, Homo sapiens
ctatactccctcaat

SEQ ID NO: 617449 - DNA, 15 bp, Homo sapiens
tatactccctcaatt

SEQ ID NO: 617450 - DNA, 15 bp, Homo sapiens
atactccctcaattt

SEQ ID NO: 617451 - DNA, 15 bp, Homo sapiens
tactccctcaattta

SEQ ID NO: 617452 - DNA, 15 bp, Homo sapiens
actccctcaatttag

SEQ ID NO: 617453 - DNA, 15 bp, Homo sapiens
ctccctcaatttagg

SEQ ID NO: 617454 - DNA, 15 bp, Homo sapiens
tccctcaatttaggg

SEQ ID NO: 617455 - DNA, 15 bp, Homo sapiens
ccctcaatttagggt

SEQ ID NO: 617456 - DNA, 15 bp, Homo sapiens
cctcaatttagggta

SEQ ID NO: 617457 - DNA, 15 bp, Homo sapiens
ctcaatttagggtaa

SEQ ID NO: 617458 - DNA, 15 bp, Homo sapiens
tcaatttagggtaaa

SEQ ID NO: 617459 - DNA, 15 bp, Homo sapiens
caatttagggtaaac

SEQ ID NO: 617460 - DNA, 15 bp, Homo sapiens
aatttagggtaaaca

SEQ ID NO: 617461 - DNA, 15 bp, Homo sapiens
atttagggtaaacag

SEQ ID NO: 617462 - DNA, 15 bp, Homo sapiens
tttagggtaaacagg

SEQ ID NO: 617463 - DNA, 15 bp, Homo sapiens
ttagggtaaacagga

SEQ ID NO: 617464 - DNA, 15 bp, Homo sapiens
tagggtaaacaggag

SEQ ID NO: 617465 - DNA, 15 bp, Homo sapiens
agggtaaacaggagg

SEQ ID NO: 617466 - DNA, 15 bp, Homo sapiens
gggtaaacaggaggg

SEQ ID NO: 617467 - DNA, 15 bp, Homo sapiens
ggtaaacaggagggg

SEQ ID NO: 617468 - DNA, 15 bp, Homo sapiens
gtaaacaggaggggc

SEQ ID NO: 617469 - DNA, 15 bp, Homo sapiens
taaacaggaggggcc

SEQ ID NO: 617470 - DNA, 15 bp, Homo sapiens
aaacaggaggggcca

SEQ ID NO: 617471 - DNA, 15 bp, Homo sapiens
aacaggaggggccac

SEQ ID NO: 617472 - DNA, 15 bp, Homo sapiens
acaggaggggccaca

SEQ ID NO: 617473 - DNA, 15 bp, Homo sapiens
caggaggggccacat

SEQ ID NO: 617474 - DNA, 15 bp, Homo sapiens
aggaggggccacatg

SEQ ID NO: 617475 - DNA, 15 bp, Homo sapiens
ggaggggccacatgc

SEQ ID NO: 617476 - DNA, 15 bp, Homo sapiens
gaggggccacatgca

SEQ ID NO: 617477 - DNA, 15 bp, Homo sapiens
aggggccacatgcac

SEQ ID NO: 617478 - DNA, 15 bp, Homo sapiens
ggggccacatgcaca

SEQ ID NO: 617479 - DNA, 15 bp, Homo sapiens
gggccacatgcacag

SEQ ID NO: 617480 - DNA, 15 bp, Homo sapiens
ggccacatgcacagg

SEQ ID NO: 617481 - DNA, 15 bp, Homo sapiens
gccacatgcacaggt

SEQ ID NO: 617482 - DNA, 15 bp, Homo sapiens
ccacatgcacaggta

SEQ ID NO: 617483 - DNA, 15 bp, Homo sapiens
cacatgcacaggtaa

SEQ ID NO: 617484 - DNA, 15 bp, Homo sapiens
acatgcacaggtaat

SEQ ID NO: 617485 - DNA, 15 bp, Homo sapiens
catgcacaggtaatt

SEQ ID NO: 617486 - DNA, 15 bp, Homo sapiens
atgcacaggtaattc

SEQ ID NO: 617487 - DNA, 15 bp, Homo sapiens
tgcacaggtaattca

SEQ ID NO: 617488 - DNA, 15 bp, Homo sapiens
gcacaggtaattcac

SEQ ID NO: 617489 - DNA, 15 bp, Homo sapiens
cacaggtaattcacc

SEQ ID NO: 617490 - DNA, 15 bp, Homo sapiens
acaggtaattcacca

SEQ ID NO: 617491 - DNA, 15 bp, Homo sapiens
caggtaattcaccag

SEQ ID NO: 617492 - DNA, 15 bp, Homo sapiens
aggtaattcaccagg

SEQ ID NO: 617493 - DNA, 15 bp, Homo sapiens
ggtaattcaccaggg

SEQ ID NO: 617494 - DNA, 15 bp, Homo sapiens
gtaattcaccaggga

SEQ ID NO: 617495 - DNA, 15 bp, Homo sapiens
taattcaccagggag

SEQ ID NO: 617496 - DNA, 15 bp, Homo sapiens
aattcaccagggagc

SEQ ID NO: 617497 - DNA, 15 bp, Homo sapiens
attcaccagggagcc

SEQ ID NO: 617498 - DNA, 15 bp, Homo sapiens
ttcaccagggagccg

SEQ ID NO: 617499 - DNA, 15 bp, Homo sapiens
tcaccagggagccga

SEQ ID NO: 617500 - DNA, 15 bp, Homo sapiens
caccagggagccgaa

SEQ ID NO: 617501 - DNA, 15 bp, Homo sapiens
accagggagccgaac

SEQ ID NO: 617502 - DNA, 15 bp, Homo sapiens
ccagggagccgaaca

SEQ ID NO: 617503 - DNA, 15 bp, Homo sapiens
cagggagccgaacac

SEQ ID NO: 617504 - DNA, 15 bp, Homo sapiens
agggagccgaacact

SEQ ID NO: 617505 - DNA, 15 bp, Homo sapiens
gggagccgaacactc

SEQ ID NO: 617506 - DNA, 15 bp, Homo sapiens
ggagccgaacactcc

SEQ ID NO: 617507 - DNA, 15 bp, Homo sapiens
gagccgaacactcct

SEQ ID NO: 617508 - DNA, 15 bp, Homo sapiens
agccgaacactcctg

SEQ ID NO: 617509 - DNA, 15 bp, Homo sapiens
gccgaacactcctgt

SEQ ID NO: 617510 - DNA, 15 bp, Homo sapiens
ccgaacactcctgtg

SEQ ID NO: 617511 - DNA, 15 bp, Homo sapiens
cgaacactcctgtgc

SEQ ID NO: 617512 - DNA, 15 bp, Homo sapiens
gaacactcctgtgca

SEQ ID NO: 617513 - DNA, 15 bp, Homo sapiens
aacactcctgtgcag

SEQ ID NO: 617514 - DNA, 15 bp, Homo sapiens
acactcctgtgcaga

SEQ ID NO: 617515 - DNA, 15 bp, Homo sapiens
cactcctgtgcagac

SEQ ID NO: 617516 - DNA, 15 bp, Homo sapiens
actcctgtgcagaca

SEQ ID NO: 617517 - DNA, 15 bp, Homo sapiens
ctcctgtgcagacag

SEQ ID NO: 617518 - DNA, 15 bp, Homo sapiens
tcctgtgcagacaga

SEQ ID NO: 617519 - DNA, 15 bp, Homo sapiens
cctgtgcagacagac

SEQ ID NO: 617520 - DNA, 15 bp, Homo sapiens
ctgtgcagacagact

SEQ ID NO: 617521 - DNA, 15 bp, Homo sapiens
tgtgcagacagactc

SEQ ID NO: 617522 - DNA, 15 bp, Homo sapiens
gtgcagacagactcc

SEQ ID NO: 617523 - DNA, 15 bp, Homo sapiens
tgcagacagactccc

SEQ ID NO: 617524 - DNA, 15 bp, Homo sapiens
gcagacagactcccc

SEQ ID NO: 617525 - DNA, 15 bp, Homo sapiens
cagacagactcccct

SEQ ID NO: 617526 - DNA, 15 bp, Homo sapiens
agacagactcccctt

SEQ ID NO: 617527 - DNA, 15 bp, Homo sapiens
gacagactccccttc

SEQ ID NO: 617528 - DNA, 15 bp, Homo sapiens
acagactccccttcc

SEQ ID NO: 617529 - DNA, 15 bp, Homo sapiens
cagactccccttccc

SEQ ID NO: 617530 - DNA, 15 bp, Homo sapiens
agactccccttccca

SEQ ID NO: 617531 - DNA, 15 bp, Homo sapiens
gactccccttcccag

SEQ ID NO: 617532 - DNA, 15 bp, Homo sapiens
actccccttcccagc

SEQ ID NO: 617533 - DNA, 15 bp, Homo sapiens
ctccccttcccagca

SEQ ID NO: 617534 - DNA, 15 bp, Homo sapiens
tccccttcccagcaa

SEQ ID NO: 617535 - DNA, 15 bp, Homo sapiens
ccccttcccagcaag

SEQ ID NO: 617536 - DNA, 15 bp, Homo sapiens
cccttcccagcaagc

SEQ ID NO: 617537 - DNA, 15 bp, Homo sapiens
ccttcccagcaagcc

SEQ ID NO: 617538 - DNA, 15 bp, Homo sapiens
cttcccagcaagcca

SEQ ID NO: 617539 - DNA, 15 bp, Homo sapiens
ttcccagcaagccat

SEQ ID NO: 617540 - DNA, 15 bp, Homo sapiens
tcccagcaagccatg

SEQ ID NO: 617541 - DNA, 15 bp, Homo sapiens
cccagcaagccatgg

SEQ ID NO: 617542 - DNA, 15 bp, Homo sapiens
ccagcaagccatggc

SEQ ID NO: 617543 - DNA, 15 bp, Homo sapiens
cagcaagccatggca

SEQ ID NO: 617544 - DNA, 15 bp, Homo sapiens
agcaagccatggcag

SEQ ID NO: 617545 - DNA, 15 bp, Homo sapiens
gcaagccatggcagc

SEQ ID NO: 617546 - DNA, 15 bp, Homo sapiens
caagccatggcagcg

SEQ ID NO: 617547 - DNA, 15 bp, Homo sapiens
aagccatggcagcgg

SEQ ID NO: 617548 - DNA, 15 bp, Homo sapiens
agccatggcagcgga

SEQ ID NO: 617549 - DNA, 15 bp, Homo sapiens
gccatggcagcggac

SEQ ID NO: 617550 - DNA, 15 bp, Homo sapiens
ccatggcagcggaca

SEQ ID NO: 617551 - DNA, 15 bp, Homo sapiens
catggcagcggacag

SEQ ID NO: 617552 - DNA, 15 bp, Homo sapiens
atggcagcggacagc

SEQ ID NO: 617553 - DNA, 15 bp, Homo sapiens
tggcagcggacagcc

SEQ ID NO: 617554 - DNA, 15 bp, Homo sapiens
ggcagcggacagcct

SEQ ID NO: 617555 - DNA, 15 bp, Homo sapiens
gcagcggacagcctg

SEQ ID NO: 617556 - DNA, 15 bp, Homo sapiens
cagcggacagcctgc

SEQ ID NO: 617557 - DNA, 15 bp, Homo sapiens
agcggacagcctgct

SEQ ID NO: 617558 - DNA, 15 bp, Homo sapiens
gcggacagcctgctg

SEQ ID NO: 617559 - DNA, 15 bp, Homo sapiens
cggacagcctgctga

SEQ ID NO: 617560 - DNA, 15 bp, Homo sapiens
ggacagcctgctgag

SEQ ID NO: 617561 - DNA, 15 bp, Homo sapiens
gacagcctgctgaga

SEQ ID NO: 617562 - DNA, 15 bp, Homo sapiens
acagcctgctgagaa

SEQ ID NO: 617563 - DNA, 15 bp, Homo sapiens
cagcctgctgagaac

SEQ ID NO: 617564 - DNA, 15 bp, Homo sapiens
agcctgctgagaaca

SEQ ID NO: 617565 - DNA, 15 bp, Homo sapiens
gcctgctgagaacac

SEQ ID NO: 617566 - DNA, 15 bp, Homo sapiens
cctgctgagaacacc

SEQ ID NO: 617567 - DNA, 15 bp, Homo sapiens
ctgctgagaacaccc

SEQ ID NO: 617568 - DNA, 15 bp, Homo sapiens
tgctgagaacaccca

SEQ ID NO: 617569 - DNA, 15 bp, Homo sapiens
gctgagaacacccag

SEQ ID NO: 617570 - DNA, 15 bp, Homo sapiens
ctgagaacacccagg

SEQ ID NO: 617571 - DNA, 15 bp, Homo sapiens
tgagaacacccagga

SEQ ID NO: 617572 - DNA, 15 bp, Homo sapiens
gagaacacccaggaa

SEQ ID NO: 617573 - DNA, 15 bp, Homo sapiens
agaacacccaggaag

SEQ ID NO: 617574 - DNA, 15 bp, Homo sapiens
gaacacccaggaagc

SEQ ID NO: 617575 - DNA, 15 bp, Homo sapiens
aacacccaggaagca

SEQ ID NO: 617576 - DNA, 15 bp, Homo sapiens
acacccaggaagcag

SEQ ID NO: 617577 - DNA, 15 bp, Homo sapiens
cacccaggaagcagg

SEQ ID NO: 617578 - DNA, 15 bp, Homo sapiens
acccaggaagcaggc

SEQ ID NO: 617579 - DNA, 15 bp, Homo sapiens
cccaggaagcaggcg

SEQ ID NO: 617580 - DNA, 15 bp, Homo sapiens
ccaggaagcaggcgg

SEQ ID NO: 617581 - DNA, 15 bp, Homo sapiens
caggaagcaggcggt

SEQ ID NO: 617582 - DNA, 15 bp, Homo sapiens
aggaagcaggcggtg

SEQ ID NO: 617583 - DNA, 15 bp, Homo sapiens
ggaagcaggcggtgc

SEQ ID NO: 617584 - DNA, 15 bp, Homo sapiens
gaagcaggcggtgcc

SEQ ID NO: 617585 - DNA, 15 bp, Homo sapiens
aagcaggcggtgcca

SEQ ID NO: 617586 - DNA, 15 bp, Homo sapiens
agcaggcggtgccag

SEQ ID NO: 617587 - DNA, 15 bp, Homo sapiens
gcaggcggtgccagc

SEQ ID NO: 617588 - DNA, 15 bp, Homo sapiens
caggcggtgccagct

SEQ ID NO: 617589 - DNA, 15 bp, Homo sapiens
aggcggtgccagctg

SEQ ID NO: 617590 - DNA, 15 bp, Homo sapiens
ggcggtgccagctgc

SEQ ID NO: 617591 - DNA, 15 bp, Homo sapiens
gcggtgccagctgca

SEQ ID NO: 617592 - DNA, 15 bp, Homo sapiens
cggtgccagctgcag

SEQ ID NO: 617593 - DNA, 15 bp, Homo sapiens
ggtgccagctgcagg

SEQ ID NO: 617594 - DNA, 15 bp, Homo sapiens
gtgccagctgcaggt

SEQ ID NO: 617595 - DNA, 15 bp, Homo sapiens
tgccagctgcaggtg

SEQ ID NO: 617596 - DNA, 15 bp, Homo sapiens
gccagctgcaggtgc

SEQ ID NO: 617597 - DNA, 15 bp, Homo sapiens
ccagctgcaggtgct

SEQ ID NO: 617598 - DNA, 15 bp, Homo sapiens
cagctgcaggtgctt

SEQ ID NO: 617599 - DNA, 15 bp, Homo sapiens
agctgcaggtgcttt

SEQ ID NO: 617600 - DNA, 15 bp, Homo sapiens
gctgcaggtgctttg

SEQ ID NO: 617601 - DNA, 15 bp, Homo sapiens
ctgcaggtgctttgc

SEQ ID NO: 617602 - DNA, 15 bp, Homo sapiens
tgcaggtgctttgcc

SEQ ID NO: 617603 - DNA, 15 bp, Homo sapiens
gcaggtgctttgcct

SEQ ID NO: 617604 - DNA, 15 bp, Homo sapiens
caggtgctttgcctg

SEQ ID NO: 617605 - DNA, 15 bp, Homo sapiens
aggtgctttgcctgg

SEQ ID NO: 617606 - DNA, 15 bp, Homo sapiens
ggtgctttgcctggg

SEQ ID NO: 617607 - DNA, 15 bp, Homo sapiens
gtgctttgcctggga

SEQ ID NO: 617608 - DNA, 15 bp, Homo sapiens
tgctttgcctgggag

SEQ ID NO: 617609 - DNA, 15 bp, Homo sapiens
gctttgcctgggagc

SEQ ID NO: 617610 - DNA, 15 bp, Homo sapiens
ctttgcctgggagct

SEQ ID NO: 617611 - DNA, 15 bp, Homo sapiens
tttgcctgggagctg

SEQ ID NO: 617612 - DNA, 15 bp, Homo sapiens
ttgcctgggagctgt

SEQ ID NO: 617613 - DNA, 15 bp, Homo sapiens
tgcctgggagctgtg

SEQ ID NO: 617614 - DNA, 15 bp, Homo sapiens
gcctgggagctgtgg

SEQ ID NO: 617615 - DNA, 15 bp, Homo sapiens
cctgggagctgtggg

SEQ ID NO: 617616 - DNA, 15 bp, Homo sapiens
ctgggagctgtgggg

SEQ ID NO: 617617 - DNA, 15 bp, Homo sapiens
tgggagctgtggggc

SEQ ID NO: 617618 - DNA, 15 bp, Homo sapiens
gggagctgtggggct

SEQ ID NO: 617619 - DNA, 15 bp, Homo sapiens
ggagctgtggggctg

SEQ ID NO: 617620 - DNA, 15 bp, Homo sapiens
gagctgtggggctga

SEQ ID NO: 617621 - DNA, 15 bp, Homo sapiens
agctgtggggctgag

SEQ ID NO: 617622 - DNA, 15 bp, Homo sapiens
gctgtggggctgagg

SEQ ID NO: 617623 - DNA, 15 bp, Homo sapiens
ctgtggggctgagga

SEQ ID NO: 617624 - DNA, 15 bp, Homo sapiens
tgtggggctgaggag

SEQ ID NO: 617625 - DNA, 15 bp, Homo sapiens
gtggggctgaggaga

SEQ ID NO: 617626 - DNA, 15 bp, Homo sapiens
tggggctgaggagag

SEQ ID NO: 617627 - DNA, 15 bp, Homo sapiens
ggggctgaggagagg

SEQ ID NO: 617628 - DNA, 15 bp, Homo sapiens
gggctgaggagaggg

SEQ ID NO: 617629 - DNA, 15 bp, Homo sapiens
ggctgaggagagggt

SEQ ID NO: 617630 - DNA, 15 bp, Homo sapiens
gctgaggagagggtc

SEQ ID NO: 617631 - DNA, 15 bp, Homo sapiens
ctgaggagagggtcc

SEQ ID NO: 617632 - DNA, 15 bp, Homo sapiens
tgaggagagggtcca

SEQ ID NO: 617633 - DNA, 15 bp, Homo sapiens
gaggagagggtccac

SEQ ID NO: 617634 - DNA, 15 bp, Homo sapiens
aggagagggtccact

SEQ ID NO: 617635 - DNA, 15 bp, Homo sapiens
ggagagggtccactg

SEQ ID NO: 617636 - DNA, 15 bp, Homo sapiens
gagagggtccactgt

SEQ ID NO: 617637 - DNA, 15 bp, Homo sapiens
agagggtccactgtc

SEQ ID NO: 617638 - DNA, 15 bp, Homo sapiens
gagggtccactgtcc

SEQ ID NO: 617639 - DNA, 15 bp, Homo sapiens
agggtccactgtcca

SEQ ID NO: 617640 - DNA, 15 bp, Homo sapiens
gggtccactgtccag

SEQ ID NO: 617641 - DNA, 15 bp, Homo sapiens
ggtccactgtccagg

SEQ ID NO: 617642 - DNA, 15 bp, Homo sapiens
gtccactgtccagga

SEQ ID NO: 617643 - DNA, 15 bp, Homo sapiens
tccactgtccaggac

SEQ ID NO: 617644 - DNA, 15 bp, Homo sapiens
ccactgtccaggacc

SEQ ID NO: 617645 - DNA, 15 bp, Homo sapiens
cactgtccaggacca

SEQ ID NO: 617646 - DNA, 15 bp, Homo sapiens
actgtccaggaccag

SEQ ID NO: 617647 - DNA, 15 bp, Homo sapiens
ctgtccaggaccagt

SEQ ID NO: 617648 - DNA, 15 bp, Homo sapiens
tgtccaggaccagtg

SEQ ID NO: 617649 - DNA, 15 bp, Homo sapiens
gtccaggaccagtga

SEQ ID NO: 617650 - DNA, 15 bp, Homo sapiens
tccaggaccagtgaa

SEQ ID NO: 617651 - DNA, 15 bp, Homo sapiens
ccaggaccagtgaac

SEQ ID NO: 617652 - DNA, 15 bp, Homo sapiens
caggaccagtgaact

SEQ ID NO: 617653 - DNA, 15 bp, Homo sapiens
aggaccagtgaactt

SEQ ID NO: 617654 - DNA, 15 bp, Homo sapiens
ggaccagtgaacttc

SEQ ID NO: 617655 - DNA, 15 bp, Homo sapiens
gaccagtgaacttca

SEQ ID NO: 617656 - DNA, 15 bp, Homo sapiens
accagtgaacttcat

SEQ ID NO: 617657 - DNA, 15 bp, Homo sapiens
ccagtgaacttcatc

SEQ ID NO: 617658 - DNA, 15 bp, Homo sapiens
cagtgaacttcatcc

SEQ ID NO: 617659 - DNA, 15 bp, Homo sapiens
agtgaacttcatcct

SEQ ID NO: 617660 - DNA, 15 bp, Homo sapiens
gtgaacttcatcctt

SEQ ID NO: 617661 - DNA, 15 bp, Homo sapiens
tgaacttcatcctta

SEQ ID NO: 617662 - DNA, 15 bp, Homo sapiens
gaacttcatccttat

SEQ ID NO: 617663 - DNA, 15 bp, Homo sapiens
aacttcatccttatc

SEQ ID NO: 617664 - DNA, 15 bp, Homo sapiens
acttcatccttatct

SEQ ID NO: 617665 - DNA, 15 bp, Homo sapiens
cttcatccttatctg

SEQ ID NO: 617666 - DNA, 15 bp, Homo sapiens
ttcatccttatctgt

SEQ ID NO: 617667 - DNA, 15 bp, Homo sapiens
tcatccttatctgtc

SEQ ID NO: 617668 - DNA, 15 bp, Homo sapiens
catccttatctgtcc

SEQ ID NO: 617669 - DNA, 15 bp, Homo sapiens
atccttatctgtcca

SEQ ID NO: 617670 - DNA, 15 bp, Homo sapiens
tccttatctgtccag

SEQ ID NO: 617671 - DNA, 15 bp, Homo sapiens
ccttatctgtccagg

SEQ ID NO: 617672 - DNA, 15 bp, Homo sapiens
cttatctgtccagga

SEQ ID NO: 617673 - DNA, 15 bp, Homo sapiens
ttatctgtccaggag

SEQ ID NO: 617674 - DNA, 15 bp, Homo sapiens
tatctgtccaggagg

SEQ ID NO: 617675 - DNA, 15 bp, Homo sapiens
atctgtccaggaggt

SEQ ID NO: 617676 - DNA, 15 bp, Homo sapiens
tctgtccaggaggtg

SEQ ID NO: 617677 - DNA, 15 bp, Homo sapiens
ctgtccaggaggtgg

SEQ ID NO: 617678 - DNA, 15 bp, Homo sapiens
tgtccaggaggtggc

SEQ ID NO: 617679 - DNA, 15 bp, Homo sapiens
gtccaggaggtggcc

SEQ ID NO: 617680 - DNA, 15 bp, Homo sapiens
tccaggaggtggcct

SEQ ID NO: 617681 - DNA, 15 bp, Homo sapiens
ccaggaggtggcctc

SEQ ID NO: 617682 - DNA, 15 bp, Homo sapiens
caggaggtggcctct

SEQ ID NO: 617683 - DNA, 15 bp, Homo sapiens
aggaggtggcctctt

SEQ ID NO: 617684 - DNA, 15 bp, Homo sapiens
ggaggtggcctcttg

SEQ ID NO: 617685 - DNA, 15 bp, Homo sapiens
gaggtggcctcttgg

SEQ ID NO: 617686 - DNA, 15 bp, Homo sapiens
aggtggcctcttggg

SEQ ID NO: 617687 - DNA, 15 bp, Homo sapiens
ggtggcctcttgggg

SEQ ID NO: 617688 - DNA, 15 bp, Homo sapiens
gtggcctcttgggga

SEQ ID NO: 617689 - DNA, 15 bp, Homo sapiens
tggcctcttggggat

SEQ ID NO: 617690 - DNA, 15 bp, Homo sapiens
ggcctcttggggatg

SEQ ID NO: 617691 - DNA, 15 bp, Homo sapiens
gcctcttggggatgc

SEQ ID NO: 617692 - DNA, 15 bp, Homo sapiens
cctcttggggatgct

SEQ ID NO: 617693 - DNA, 15 bp, Homo sapiens
ctcttggggatgctg

SEQ ID NO: 617694 - DNA, 15 bp, Homo sapiens
tcttggggatgctga

SEQ ID NO: 617695 - DNA, 15 bp, Homo sapiens
cttggggatgctgag

SEQ ID NO: 617696 - DNA, 15 bp, Homo sapiens
ttggggatgctgagt

SEQ ID NO: 617697 - DNA, 15 bp, Homo sapiens
tggggatgctgagtt

SEQ ID NO: 617698 - DNA, 15 bp, Homo sapiens
ggggatgctgagtta

SEQ ID NO: 617699 - DNA, 15 bp, Homo sapiens
gggatgctgagttag

SEQ ID NO: 617700 - DNA, 15 bp, Homo sapiens
ggatgctgagttagg

SEQ ID NO: 617701 - DNA, 15 bp, Homo sapiens
gatgctgagttaggg

SEQ ID NO: 617702 - DNA, 15 bp, Homo sapiens
atgctgagttagggg

SEQ ID NO: 617703 - DNA, 15 bp, Homo sapiens
tgctgagttagggga

SEQ ID NO: 617704 - DNA, 15 bp, Homo sapiens
gctgagttaggggag

SEQ ID NO: 617705 - DNA, 15 bp, Homo sapiens
ctgagttaggggagg

SEQ ID NO: 617706 - DNA, 15 bp, Homo sapiens
tgagttaggggaggg

SEQ ID NO: 617707 - DNA, 15 bp, Homo sapiens
gagttaggggagggg

SEQ ID NO: 617708 - DNA, 15 bp, Homo sapiens
agttaggggaggggc

SEQ ID NO: 617709 - DNA, 15 bp, Homo sapiens
gttaggggaggggca

SEQ ID NO: 617710 - DNA, 15 bp, Homo sapiens
ttaggggaggggcac

SEQ ID NO: 617711 - DNA, 15 bp, Homo sapiens
taggggaggggcact

SEQ ID NO: 617712 - DNA, 15 bp, Homo sapiens
aggggaggggcactt

SEQ ID NO: 617713 - DNA, 15 bp, Homo sapiens
ggggaggggcacttg

SEQ ID NO: 617714 - DNA, 15 bp, Homo sapiens
gggaggggcacttga

SEQ ID NO: 617715 - DNA, 15 bp, Homo sapiens
ggaggggcacttgag

SEQ ID NO: 617716 - DNA, 15 bp, Homo sapiens
gaggggcacttgagg

SEQ ID NO: 617717 - DNA, 15 bp, Homo sapiens
aggggcacttgagga

SEQ ID NO: 617718 - DNA, 15 bp, Homo sapiens
ggggcacttgaggaa

SEQ ID NO: 617719 - DNA, 15 bp, Homo sapiens
gggcacttgaggaaa

SEQ ID NO: 617720 - DNA, 15 bp, Homo sapiens
ggcacttgaggaaag

SEQ ID NO: 617721 - DNA, 15 bp, Homo sapiens
gcacttgaggaaagc

SEQ ID NO: 617722 - DNA, 15 bp, Homo sapiens
cacttgaggaaagcc

SEQ ID NO: 617723 - DNA, 15 bp, Homo sapiens
acttgaggaaagcca

SEQ ID NO: 617724 - DNA, 15 bp, Homo sapiens
cttgaggaaagccag

SEQ ID NO: 617725 - DNA, 15 bp, Homo sapiens
ttgaggaaagccagg

SEQ ID NO: 617726 - DNA, 15 bp, Homo sapiens
tgaggaaagccaggt

SEQ ID NO: 617727 - DNA, 15 bp, Homo sapiens
gaggaaagccaggtg

SEQ ID NO: 617728 - DNA, 15 bp, Homo sapiens
aggaaagccaggtgg

SEQ ID NO: 617729 - DNA, 15 bp, Homo sapiens
ggaaagccaggtgga

SEQ ID NO: 617730 - DNA, 15 bp, Homo sapiens
gaaagccaggtggag

SEQ ID NO: 617731 - DNA, 15 bp, Homo sapiens
aaagccaggtggagc

SEQ ID NO: 617732 - DNA, 15 bp, Homo sapiens
aagccaggtggagca

SEQ ID NO: 617733 - DNA, 15 bp, Homo sapiens
agccaggtggagcag

SEQ ID NO: 617734 - DNA, 15 bp, Homo sapiens
gccaggtggagcaga

SEQ ID NO: 617735 - DNA, 15 bp, Homo sapiens
ccaggtggagcagag

SEQ ID NO: 617736 - DNA, 15 bp, Homo sapiens
caggtggagcagaga

SEQ ID NO: 617737 - DNA, 15 bp, Homo sapiens
aggtggagcagagag

SEQ ID NO: 617738 - DNA, 15 bp, Homo sapiens
ggtggagcagagagg

SEQ ID NO: 617739 - DNA, 15 bp, Homo sapiens
gtggagcagagagga

SEQ ID NO: 617740 - DNA, 15 bp, Homo sapiens
tggagcagagaggat

SEQ ID NO: 617741 - DNA, 15 bp, Homo sapiens
ggagcagagaggatg

SEQ ID NO: 617742 - DNA, 15 bp, Homo sapiens
gagcagagaggatgt

SEQ ID NO: 617743 - DNA, 15 bp, Homo sapiens
agcagagaggatgtg

SEQ ID NO: 617744 - DNA, 15 bp, Homo sapiens
gcagagaggatgtga

SEQ ID NO: 617745 - DNA, 15 bp, Homo sapiens
cagagaggatgtgag

SEQ ID NO: 617746 - DNA, 15 bp, Homo sapiens
agagaggatgtgagt

SEQ ID NO: 617747 - DNA, 15 bp, Homo sapiens
gtccttttctctggg

SEQ ID NO: 617748 - DNA, 15 bp, Homo sapiens
tccttttctctgggt

SEQ ID NO: 617749 - DNA, 15 bp, Homo sapiens
ccttttctctgggtg

SEQ ID NO: 617750 - DNA, 15 bp, Homo sapiens
cttttctctgggtga

SEQ ID NO: 617751 - DNA, 15 bp, Homo sapiens
ttttctctgggtgag

SEQ ID NO: 617752 - DNA, 15 bp, Homo sapiens
tttctctgggtgagg

SEQ ID NO: 617753 - DNA, 15 bp, Homo sapiens
ttctctgggtgagga

SEQ ID NO: 617754 - DNA, 15 bp, Homo sapiens
tctctgggtgaggag

SEQ ID NO: 617755 - DNA, 15 bp, Homo sapiens
ctctgggtgaggagg

SEQ ID NO: 617756 - DNA, 15 bp, Homo sapiens
tctgggtgaggaggg

SEQ ID NO: 617757 - DNA, 15 bp, Homo sapiens
ctgggtgaggagggg

SEQ ID NO: 617758 - DNA, 15 bp, Homo sapiens
tgggtgaggagggga

SEQ ID NO: 617759 - DNA, 15 bp, Homo sapiens
gggtgaggaggggac

SEQ ID NO: 617760 - DNA, 15 bp, Homo sapiens
ggtgaggaggggaca

SEQ ID NO: 617761 - DNA, 15 bp, Homo sapiens
gtgaggaggggacat

SEQ ID NO: 617762 - DNA, 15 bp, Homo sapiens
tgaggaggggacatt

SEQ ID NO: 617763 - DNA, 15 bp, Homo sapiens
gaggaggggacattc

SEQ ID NO: 617764 - DNA, 15 bp, Homo sapiens
aggaggggacattca

SEQ ID NO: 617765 - DNA, 15 bp, Homo sapiens
ggaggggacattcat

SEQ ID NO: 617766 - DNA, 15 bp, Homo sapiens
gaggggacattcatg

SEQ ID NO: 617767 - DNA, 15 bp, Homo sapiens
aggggacattcatgg

SEQ ID NO: 617768 - DNA, 15 bp, Homo sapiens
ggggacattcatggg

SEQ ID NO: 617769 - DNA, 15 bp, Homo sapiens
gggacattcatgggc

SEQ ID NO: 617770 - DNA, 15 bp, Homo sapiens
ggacattcatgggca

SEQ ID NO: 617771 - DNA, 15 bp, Homo sapiens
gacattcatgggcag

SEQ ID NO: 617772 - DNA, 15 bp, Homo sapiens
acattcatgggcaga

SEQ ID NO: 617773 - DNA, 15 bp, Homo sapiens
cattcatgggcagat

SEQ ID NO: 617774 - DNA, 15 bp, Homo sapiens
attcatgggcagatg

SEQ ID NO: 617775 - DNA, 15 bp, Homo sapiens
ttcatgggcagatgg

SEQ ID NO: 617776 - DNA, 15 bp, Homo sapiens
tcatgggcagatggt

SEQ ID NO: 617777 - DNA, 15 bp, Homo sapiens
catgggcagatggtg

SEQ ID NO: 617778 - DNA, 15 bp, Homo sapiens
atgggcagatggtga

SEQ ID NO: 617779 - DNA, 15 bp, Homo sapiens
tgggcagatggtgac

SEQ ID NO: 617780 - DNA, 15 bp, Homo sapiens
gggcagatggtgacc

SEQ ID NO: 617781 - DNA, 15 bp, Homo sapiens
ggcagatggtgacct

SEQ ID NO: 617782 - DNA, 15 bp, Homo sapiens
gcagatggtgacctc

SEQ ID NO: 617783 - DNA, 15 bp, Homo sapiens
cagatggtgacctct

SEQ ID NO: 617784 - DNA, 15 bp, Homo sapiens
agatggtgacctctg

SEQ ID NO: 617785 - DNA, 15 bp, Homo sapiens
gatggtgacctctgg

SEQ ID NO: 617786 - DNA, 15 bp, Homo sapiens
atggtgacctctggg

SEQ ID NO: 617787 - DNA, 15 bp, Homo sapiens
tggtgacctctgggg

SEQ ID NO: 617788 - DNA, 15 bp, Homo sapiens
ggtgacctctgggga

SEQ ID NO: 617789 - DNA, 15 bp, Homo sapiens
gtgacctctggggaa

SEQ ID NO: 617790 - DNA, 15 bp, Homo sapiens
tgacctctggggaag

SEQ ID NO: 617791 - DNA, 15 bp, Homo sapiens
gacctctggggaagg

SEQ ID NO: 617792 - DNA, 15 bp, Homo sapiens
acctctggggaaggc

SEQ ID NO: 617793 - DNA, 15 bp, Homo sapiens
cctctggggaaggca

SEQ ID NO: 617794 - DNA, 15 bp, Homo sapiens
ctctggggaaggcag

SEQ ID NO: 617795 - DNA, 15 bp, Homo sapiens
tctggggaaggcagc

SEQ ID NO: 617796 - DNA, 15 bp, Homo sapiens
ctggggaaggcagcc

SEQ ID NO: 617797 - DNA, 15 bp, Homo sapiens
tggggaaggcagccc

SEQ ID NO: 617798 - DNA, 15 bp, Homo sapiens
ggggaaggcagccca

SEQ ID NO: 617799 - DNA, 15 bp, Homo sapiens
gggaaggcagcccag

SEQ ID NO: 617800 - DNA, 15 bp, Homo sapiens
ggaaggcagcccaga

SEQ ID NO: 617801 - DNA, 15 bp, Homo sapiens
gaaggcagcccagac

SEQ ID NO: 617802 - DNA, 15 bp, Homo sapiens
aaggcagcccagact

SEQ ID NO: 617803 - DNA, 15 bp, Homo sapiens
aggcagcccagactc

SEQ ID NO: 617804 - DNA, 15 bp, Homo sapiens
ggcagcccagactcc

SEQ ID NO: 617805 - DNA, 15 bp, Homo sapiens
gcagcccagactcca

SEQ ID NO: 617806 - DNA, 15 bp, Homo sapiens
cagcccagactccac

SEQ ID NO: 617807 - DNA, 15 bp, Homo sapiens
agcccagactccact

SEQ ID NO: 617808 - DNA, 15 bp, Homo sapiens
gcccagactccactg

SEQ ID NO: 617809 - DNA, 15 bp, Homo sapiens
cccagactccactgg

SEQ ID NO: 617810 - DNA, 15 bp, Homo sapiens
ccagactccactggc

SEQ ID NO: 617811 - DNA, 15 bp, Homo sapiens
cagactccactggcc

SEQ ID NO: 617812 - DNA, 15 bp, Homo sapiens
agactccactggcca

SEQ ID NO: 617813 - DNA, 15 bp, Homo sapiens
gactccactggccac

SEQ ID NO: 617814 - DNA, 15 bp, Homo sapiens
actccactggccacc

SEQ ID NO: 617815 - DNA, 15 bp, Homo sapiens
ctccactggccacca

SEQ ID NO: 617816 - DNA, 15 bp, Homo sapiens
tccactggccaccat

SEQ ID NO: 617817 - DNA, 15 bp, Homo sapiens
ccactggccaccata

SEQ ID NO: 617818 - DNA, 15 bp, Homo sapiens
cactggccaccatat

SEQ ID NO: 617819 - DNA, 15 bp, Homo sapiens
actggccaccatatt

SEQ ID NO: 617820 - DNA, 15 bp, Homo sapiens
ctggccaccatattt

SEQ ID NO: 617821 - DNA, 15 bp, Homo sapiens
tggccaccatatttc

SEQ ID NO: 617822 - DNA, 15 bp, Homo sapiens
ggccaccatatttcc

SEQ ID NO: 617823 - DNA, 15 bp, Homo sapiens
gccaccatatttcct

SEQ ID NO: 617824 - DNA, 15 bp, Homo sapiens
ccaccatatttcctt

SEQ ID NO: 617825 - DNA, 15 bp, Homo sapiens
caccatatttccttt

SEQ ID NO: 617826 - DNA, 15 bp, Homo sapiens
accatatttcctttt

SEQ ID NO: 617827 - DNA, 15 bp, Homo sapiens
ccatatttccttttt

SEQ ID NO: 617828 - DNA, 15 bp, Homo sapiens
catatttcctttttc

SEQ ID NO: 617829 - DNA, 15 bp, Homo sapiens
atatttcctttttca

SEQ ID NO: 617830 - DNA, 15 bp, Homo sapiens
tatttcctttttcac

SEQ ID NO: 617831 - DNA, 15 bp, Homo sapiens
atttcctttttcaca

SEQ ID NO: 617832 - DNA, 15 bp, Homo sapiens
tttcctttttcacaa

SEQ ID NO: 617833 - DNA, 15 bp, Homo sapiens
ttcctttttcacaac

SEQ ID NO: 617834 - DNA, 15 bp, Homo sapiens
tcctttttcacaact

SEQ ID NO: 617835 - DNA, 15 bp, Homo sapiens
cctttttcacaactt

SEQ ID NO: 617836 - DNA, 15 bp, Homo sapiens
ctttttcacaacttt

SEQ ID NO: 617837 - DNA, 15 bp, Homo sapiens
tttttcacaactttc

SEQ ID NO: 617838 - DNA, 15 bp, Homo sapiens
ttttcacaactttct

SEQ ID NO: 617839 - DNA, 15 bp, Homo sapiens
tttcacaactttctc

SEQ ID NO: 617840 - DNA, 15 bp, Homo sapiens
ttcacaactttctca

SEQ ID NO: 617841 - DNA, 15 bp, Homo sapiens
tcacaactttctcac

SEQ ID NO: 617842 - DNA, 15 bp, Homo sapiens
cacaactttctcacc

SEQ ID NO: 617843 - DNA, 15 bp, Homo sapiens
acaactttctcaccc

SEQ ID NO: 617844 - DNA, 15 bp, Homo sapiens
caactttctcacccc

SEQ ID NO: 617845 - DNA, 15 bp, Homo sapiens
aactttctcacccct

SEQ ID NO: 617846 - DNA, 15 bp, Homo sapiens
actttctcacccctg

SEQ ID NO: 617847 - DNA, 15 bp, Homo sapiens
ctttctcacccctgt

SEQ ID NO: 617848 - DNA, 15 bp, Homo sapiens
tttctcacccctgtg

SEQ ID NO: 617849 - DNA, 15 bp, Homo sapiens
ttctcacccctgtgg

SEQ ID NO: 617850 - DNA, 15 bp, Homo sapiens
tctcacccctgtggt

SEQ ID NO: 617851 - DNA, 15 bp, Homo sapiens
ctcacccctgtggtt

SEQ ID NO: 617852 - DNA, 15 bp, Homo sapiens
tcacccctgtggttt

SEQ ID NO: 617853 - DNA, 15 bp, Homo sapiens
cacccctgtggtttc

SEQ ID NO: 617854 - DNA, 15 bp, Homo sapiens
acccctgtggtttcc

SEQ ID NO: 617855 - DNA, 15 bp, Homo sapiens
cccctgtggtttccc

SEQ ID NO: 617856 - DNA, 15 bp, Homo sapiens
ccctgtggtttccca

SEQ ID NO: 617857 - DNA, 15 bp, Homo sapiens
cctgtggtttcccat

SEQ ID NO: 617858 - DNA, 15 bp, Homo sapiens
ctgtggtttcccatg

SEQ ID NO: 617859 - DNA, 15 bp, Homo sapiens
tgtggtttcccatgt

SEQ ID NO: 617860 - DNA, 15 bp, Homo sapiens
gtggtttcccatgtc

SEQ ID NO: 617861 - DNA, 15 bp, Homo sapiens
tggtttcccatgtca

SEQ ID NO: 617862 - DNA, 15 bp, Homo sapiens
ggtttcccatgtcat

SEQ ID NO: 617863 - DNA, 15 bp, Homo sapiens
gtttcccatgtcatc

SEQ ID NO: 617864 - DNA, 15 bp, Homo sapiens
tttcccatgtcatca

SEQ ID NO: 617865 - DNA, 15 bp, Homo sapiens
ttcccatgtcatcat

SEQ ID NO: 617866 - DNA, 15 bp, Homo sapiens
tcccatgtcatcatg

SEQ ID NO: 617867 - DNA, 15 bp, Homo sapiens
cccatgtcatcatgt

SEQ ID NO: 617868 - DNA, 15 bp, Homo sapiens
ccatgtcatcatgtg

SEQ ID NO: 617869 - DNA, 15 bp, Homo sapiens
catgtcatcatgtgg

SEQ ID NO: 617870 - DNA, 15 bp, Homo sapiens
atgtcatcatgtggc

SEQ ID NO: 617871 - DNA, 15 bp, Homo sapiens
tgtcatcatgtggcc

SEQ ID NO: 617872 - DNA, 15 bp, Homo sapiens
gtcatcatgtggccg

SEQ ID NO: 617873 - DNA, 15 bp, Homo sapiens
tcatcatgtggccgc

SEQ ID NO: 617874 - DNA, 15 bp, Homo sapiens
catcatgtggccgct

SEQ ID NO: 617875 - DNA, 15 bp, Homo sapiens
atcatgtggccgctt

SEQ ID NO: 617876 - DNA, 15 bp, Homo sapiens
tcatgtggccgcttc

SEQ ID NO: 617877 - DNA, 15 bp, Homo sapiens
catgtggccgcttcc

SEQ ID NO: 617878 - DNA, 15 bp, Homo sapiens
atgtggccgcttccc

SEQ ID NO: 617879 - DNA, 15 bp, Homo sapiens
tgtggccgcttcccg

SEQ ID NO: 617880 - DNA, 15 bp, Homo sapiens
gtggccgcttcccgc

SEQ ID NO: 617881 - DNA, 15 bp, Homo sapiens
tggccgcttcccgca

SEQ ID NO: 617882 - DNA, 15 bp, Homo sapiens
ggccgcttcccgcaa

SEQ ID NO: 617883 - DNA, 15 bp, Homo sapiens
gccgcttcccgcaag

SEQ ID NO: 617884 - DNA, 15 bp, Homo sapiens
ccgcttcccgcaagg

SEQ ID NO: 617885 - DNA, 15 bp, Homo sapiens
cgcttcccgcaaggc

SEQ ID NO: 617886 - DNA, 15 bp, Homo sapiens
gcttcccgcaaggcc

SEQ ID NO: 617887 - DNA, 15 bp, Homo sapiens
cttcccgcaaggcct

SEQ ID NO: 617888 - DNA, 15 bp, Homo sapiens
ttcccgcaaggcctt

SEQ ID NO: 617889 - DNA, 15 bp, Homo sapiens
tcccgcaaggcctta

SEQ ID NO: 617890 - DNA, 15 bp, Homo sapiens
cccgcaaggccttag

SEQ ID NO: 617891 - DNA, 15 bp, Homo sapiens
ccgcaaggccttagc

SEQ ID NO: 617892 - DNA, 15 bp, Homo sapiens
cgcaaggccttagcg

SEQ ID NO: 617893 - DNA, 15 bp, Homo sapiens
gcaaggccttagcgg

SEQ ID NO: 617894 - DNA, 15 bp, Homo sapiens
caaggccttagcggg

SEQ ID NO: 617895 - DNA, 15 bp, Homo sapiens
aaggccttagcgggg

SEQ ID NO: 617896 - DNA, 15 bp, Homo sapiens
aggccttagcggggt

SEQ ID NO: 617897 - DNA, 15 bp, Homo sapiens
ggccttagcggggtg

SEQ ID NO: 617898 - DNA, 15 bp, Homo sapiens
gccttagcggggtgc

SEQ ID NO: 617899 - DNA, 15 bp, Homo sapiens
ccttagcggggtgca

SEQ ID NO: 617900 - DNA, 15 bp, Homo sapiens
cttagcggggtgcag

SEQ ID NO: 617901 - DNA, 15 bp, Homo sapiens
ttagcggggtgcagg

SEQ ID NO: 617902 - DNA, 15 bp, Homo sapiens
tagcggggtgcaggt

SEQ ID NO: 617903 - DNA, 15 bp, Homo sapiens
agcggggtgcaggta

SEQ ID NO: 617904 - DNA, 15 bp, Homo sapiens
gcggggtgcaggtat

SEQ ID NO: 617905 - DNA, 15 bp, Homo sapiens
cggggtgcaggtatg

SEQ ID NO: 617906 - DNA, 15 bp, Homo sapiens
ggggtgcaggtatga

SEQ ID NO: 617907 - DNA, 15 bp, Homo sapiens
gggtgcaggtatgaa

SEQ ID NO: 617908 - DNA, 15 bp, Homo sapiens
ggtgcaggtatgaac

SEQ ID NO: 617909 - DNA, 15 bp, Homo sapiens
gtgcaggtatgaaca

SEQ ID NO: 617910 - DNA, 15 bp, Homo sapiens
tgcaggtatgaacat

SEQ ID NO: 617911 - DNA, 15 bp, Homo sapiens
gcaggtatgaacata

SEQ ID NO: 617912 - DNA, 15 bp, Homo sapiens
caggtatgaacatag

SEQ ID NO: 617913 - DNA, 15 bp, Homo sapiens
aggtatgaacatagt

SEQ ID NO: 617914 - DNA, 15 bp, Homo sapiens
ggtatgaacatagtg

SEQ ID NO: 617915 - DNA, 15 bp, Homo sapiens
gtatgaacatagtgt

SEQ ID NO: 617916 - DNA, 15 bp, Homo sapiens
tatgaacatagtgtc

SEQ ID NO: 617917 - DNA, 15 bp, Homo sapiens
atgaacatagtgtca

SEQ ID NO: 617918 - DNA, 15 bp, Homo sapiens
tgaacatagtgtcag

SEQ ID NO: 617919 - DNA, 15 bp, Homo sapiens
gaacatagtgtcagg

SEQ ID NO: 617920 - DNA, 15 bp, Homo sapiens
aacatagtgtcaggc

SEQ ID NO: 617921 - DNA, 15 bp, Homo sapiens
acatagtgtcaggca

SEQ ID NO: 617922 - DNA, 15 bp, Homo sapiens
catagtgtcaggcaa

SEQ ID NO: 617923 - DNA, 15 bp, Homo sapiens
atagtgtcaggcaag

SEQ ID NO: 617924 - DNA, 15 bp, Homo sapiens
tagtgtcaggcaagg

SEQ ID NO: 617925 - DNA, 15 bp, Homo sapiens
agtgtcaggcaagga

SEQ ID NO: 617926 - DNA, 15 bp, Homo sapiens
gtgtcaggcaaggag

SEQ ID NO: 617927 - DNA, 15 bp, Homo sapiens
tgtcaggcaaggagg

SEQ ID NO: 617928 - DNA, 15 bp, Homo sapiens
gtcaggcaaggaggc

SEQ ID NO: 617929 - DNA, 15 bp, Homo sapiens
tcaggcaaggaggca

SEQ ID NO: 617930 - DNA, 15 bp, Homo sapiens
caggcaaggaggcat

SEQ ID NO: 617931 - DNA, 15 bp, Homo sapiens
aggcaaggaggcatc

SEQ ID NO: 617932 - DNA, 15 bp, Homo sapiens
ggcaaggaggcatct

SEQ ID NO: 617933 - DNA, 15 bp, Homo sapiens
gcaaggaggcatctg

SEQ ID NO: 617934 - DNA, 15 bp, Homo sapiens
caaggaggcatctgg

SEQ ID NO: 617935 - DNA, 15 bp, Homo sapiens
aaggaggcatctgga

SEQ ID NO: 617936 - DNA, 15 bp, Homo sapiens
aggaggcatctggag

SEQ ID NO: 617937 - DNA, 15 bp, Homo sapiens
ggaggcatctggagg

SEQ ID NO: 617938 - DNA, 15 bp, Homo sapiens
gaggcatctggaggg

SEQ ID NO: 617939 - DNA, 15 bp, Homo sapiens
aggcatctggagggg

SEQ ID NO: 617940 - DNA, 15 bp, Homo sapiens
ggcatctggagggga

SEQ ID NO: 617941 - DNA, 15 bp, Homo sapiens
gcatctggaggggaa

SEQ ID NO: 617942 - DNA, 15 bp, Homo sapiens
catctggaggggaac

SEQ ID NO: 617943 - DNA, 15 bp, Homo sapiens
atctggaggggaacc

SEQ ID NO: 617944 - DNA, 15 bp, Homo sapiens
tctggaggggaaccc

SEQ ID NO: 617945 - DNA, 15 bp, Homo sapiens
ctggaggggaaccct

SEQ ID NO: 617946 - DNA, 15 bp, Homo sapiens
tggaggggaaccctg

SEQ ID NO: 617947 - DNA, 15 bp, Homo sapiens
ggaggggaaccctgg

SEQ ID NO: 617948 - DNA, 15 bp, Homo sapiens
gaggggaaccctggc

SEQ ID NO: 617949 - DNA, 15 bp, Homo sapiens
aggggaaccctggct

SEQ ID NO: 617950 - DNA, 15 bp, Homo sapiens
ggggaaccctggctt

SEQ ID NO: 617951 - DNA, 15 bp, Homo sapiens
gggaaccctggcttt

SEQ ID NO: 617952 - DNA, 15 bp, Homo sapiens
ggaaccctggctttt

SEQ ID NO: 617953 - DNA, 15 bp, Homo sapiens
gaaccctggcttttc

SEQ ID NO: 617954 - DNA, 15 bp, Homo sapiens
aaccctggcttttcc

SEQ ID NO: 617955 - DNA, 15 bp, Homo sapiens
accctggcttttcct

SEQ ID NO: 617956 - DNA, 15 bp, Homo sapiens
ccctggcttttcctg

SEQ ID NO: 617957 - DNA, 15 bp, Homo sapiens
cctggcttttcctgg

SEQ ID NO: 617958 - DNA, 15 bp, Homo sapiens
ctggcttttcctggg

SEQ ID NO: 617959 - DNA, 15 bp, Homo sapiens
tggcttttcctgggg

SEQ ID NO: 617960 - DNA, 15 bp, Homo sapiens
ggcttttcctggggg

SEQ ID NO: 617961 - DNA, 15 bp, Homo sapiens
gcttttcctgggggg

SEQ ID NO: 617962 - DNA, 15 bp, Homo sapiens
cttttcctgggggga

SEQ ID NO: 617963 - DNA, 15 bp, Homo sapiens
ttttcctggggggac

SEQ ID NO: 617964 - DNA, 15 bp, Homo sapiens
tttcctggggggact

SEQ ID NO: 617965 - DNA, 15 bp, Homo sapiens
ttcctggggggactc

SEQ ID NO: 617966 - DNA, 15 bp, Homo sapiens
tcctggggggactcc

SEQ ID NO: 617967 - DNA, 15 bp, Homo sapiens
cctggggggactccc

SEQ ID NO: 617968 - DNA, 15 bp, Homo sapiens
ctggggggactccct

SEQ ID NO: 617969 - DNA, 15 bp, Homo sapiens
tggggggactccctc

SEQ ID NO: 617970 - DNA, 15 bp, Homo sapiens
ggggggactccctcc

SEQ ID NO: 617971 - DNA, 15 bp, Homo sapiens
gggggactccctccc

SEQ ID NO: 617972 - DNA, 15 bp, Homo sapiens
ggggactccctccct

SEQ ID NO: 617973 - DNA, 15 bp, Homo sapiens
gggactccctccctg

SEQ ID NO: 617974 - DNA, 15 bp, Homo sapiens
ggactccctccctgc

SEQ ID NO: 617975 - DNA, 15 bp, Homo sapiens
gactccctccctgca

SEQ ID NO: 617976 - DNA, 15 bp, Homo sapiens
actccctccctgcac

SEQ ID NO: 617977 - DNA, 15 bp, Homo sapiens
ctccctccctgcacc

SEQ ID NO: 617978 - DNA, 15 bp, Homo sapiens
tccctccctgcaccc

SEQ ID NO: 617979 - DNA, 15 bp, Homo sapiens
ccctccctgcaccct

SEQ ID NO: 617980 - DNA, 15 bp, Homo sapiens
cctccctgcacccta

SEQ ID NO: 617981 - DNA, 15 bp, Homo sapiens
ctccctgcaccctag

SEQ ID NO: 617982 - DNA, 15 bp, Homo sapiens
tccctgcaccctagc

SEQ ID NO: 617983 - DNA, 15 bp, Homo sapiens
ccctgcaccctagcc

SEQ ID NO: 617984 - DNA, 15 bp, Homo sapiens
cctgcaccctagccc

SEQ ID NO: 617985 - DNA, 15 bp, Homo sapiens
ctgcaccctagccct

SEQ ID NO: 617986 - DNA, 15 bp, Homo sapiens
tgcaccctagccctg

SEQ ID NO: 617987 - DNA, 15 bp, Homo sapiens
gcaccctagccctgt

SEQ ID NO: 617988 - DNA, 15 bp, Homo sapiens
caccctagccctgtc

SEQ ID NO: 617989 - DNA, 15 bp, Homo sapiens
accctagccctgtcc

SEQ ID NO: 617990 - DNA, 15 bp, Homo sapiens
ccctagccctgtcct

SEQ ID NO: 617991 - DNA, 15 bp, Homo sapiens
cctagccctgtcctc

SEQ ID NO: 617992 - DNA, 15 bp, Homo sapiens
ctagccctgtcctct

SEQ ID NO: 617993 - DNA, 15 bp, Homo sapiens
tagccctgtcctctc

SEQ ID NO: 617994 - DNA, 15 bp, Homo sapiens
agccctgtcctctcc

SEQ ID NO: 617995 - DNA, 15 bp, Homo sapiens
gccctgtcctctccc

SEQ ID NO: 617996 - DNA, 15 bp, Homo sapiens
ccctgtcctctccca

SEQ ID NO: 617997 - DNA, 15 bp, Homo sapiens
cctgtcctctcccat

SEQ ID NO: 617998 - DNA, 15 bp, Homo sapiens
ctgtcctctcccatg

SEQ ID NO: 617999 - DNA, 15 bp, Homo sapiens
tgtcctctcccatgg

SEQ ID NO: 618000 - DNA, 15 bp, Homo sapiens
gtcctctcccatggc

SEQ ID NO: 618001 - DNA, 15 bp, Homo sapiens
tcctctcccatggct

SEQ ID NO: 618002 - DNA, 15 bp, Homo sapiens
cctctcccatggcta

SEQ ID NO: 618003 - DNA, 15 bp, Homo sapiens
ctctcccatggctac

SEQ ID NO: 618004 - DNA, 15 bp, Homo sapiens
tctcccatggctact

SEQ ID NO: 618005 - DNA, 15 bp, Homo sapiens
ctcccatggctactg

SEQ ID NO: 618006 - DNA, 15 bp, Homo sapiens
tcccatggctactga

SEQ ID NO: 618007 - DNA, 15 bp, Homo sapiens
cccatggctactgat

SEQ ID NO: 618008 - DNA, 15 bp, Homo sapiens
ccatggctactgatg

SEQ ID NO: 618009 - DNA, 15 bp, Homo sapiens
catggctactgatgc

SEQ ID NO: 618010 - DNA, 15 bp, Homo sapiens
atggctactgatgcc

SEQ ID NO: 618011 - DNA, 15 bp, Homo sapiens
tggctactgatgcct

SEQ ID NO: 618012 - DNA, 15 bp, Homo sapiens
ggctactgatgcctt

SEQ ID NO: 618013 - DNA, 15 bp, Homo sapiens
gctactgatgccttc

SEQ ID NO: 618014 - DNA, 15 bp, Homo sapiens
ctactgatgccttcc

SEQ ID NO: 618015 - DNA, 15 bp, Homo sapiens
tactgatgccttccc

SEQ ID NO: 618016 - DNA, 15 bp, Homo sapiens
actgatgccttcccc

SEQ ID NO: 618017 - DNA, 15 bp, Homo sapiens
ctgatgccttcccct

SEQ ID NO: 618018 - DNA, 15 bp, Homo sapiens
tgatgccttcccctc

SEQ ID NO: 618019 - DNA, 15 bp, Homo sapiens
gatgccttcccctca

SEQ ID NO: 618020 - DNA, 15 bp, Homo sapiens
atgccttcccctcac

SEQ ID NO: 618021 - DNA, 15 bp, Homo sapiens
tgccttcccctcacc

SEQ ID NO: 618022 - DNA, 15 bp, Homo sapiens
gccttcccctcaccc

SEQ ID NO: 618023 - DNA, 15 bp, Homo sapiens
ccttcccctcacccc

SEQ ID NO: 618024 - DNA, 15 bp, Homo sapiens
cttcccctcacccca

SEQ ID NO: 618025 - DNA, 15 bp, Homo sapiens
ttcccctcaccccag

SEQ ID NO: 618026 - DNA, 15 bp, Homo sapiens
tcccctcaccccaga

SEQ ID NO: 618027 - DNA, 15 bp, Homo sapiens
cccctcaccccagag

SEQ ID NO: 618028 - DNA, 15 bp, Homo sapiens
ccctcaccccagagg

SEQ ID NO: 618029 - DNA, 15 bp, Homo sapiens
cctcaccccagaggt

SEQ ID NO: 618030 - DNA, 15 bp, Homo sapiens
ctcaccccagaggtg

SEQ ID NO: 618031 - DNA, 15 bp, Homo sapiens
tcaccccagaggtgg

SEQ ID NO: 618032 - DNA, 15 bp, Homo sapiens
caccccagaggtggc

SEQ ID NO: 618033 - DNA, 15 bp, Homo sapiens
accccagaggtggcc

SEQ ID NO: 618034 - DNA, 15 bp, Homo sapiens
ccccagaggtggccc

SEQ ID NO: 618035 - DNA, 15 bp, Homo sapiens
cccagaggtggccca

SEQ ID NO: 618036 - DNA, 15 bp, Homo sapiens
ccagaggtggcccac

SEQ ID NO: 618037 - DNA, 15 bp, Homo sapiens
cagaggtggcccaca

SEQ ID NO: 618038 - DNA, 15 bp, Homo sapiens
agaggtggcccacat

SEQ ID NO: 618039 - DNA, 15 bp, Homo sapiens
gaggtggcccacatc

SEQ ID NO: 618040 - DNA, 15 bp, Homo sapiens
aggtggcccacatct

SEQ ID NO: 618041 - DNA, 15 bp, Homo sapiens
ggtggcccacatctg

SEQ ID NO: 618042 - DNA, 15 bp, Homo sapiens
gtggcccacatctgc

SEQ ID NO: 618043 - DNA, 15 bp, Homo sapiens
tggcccacatctgca

SEQ ID NO: 618044 - DNA, 15 bp, Homo sapiens
ggcccacatctgcac

SEQ ID NO: 618045 - DNA, 15 bp, Homo sapiens
gcccacatctgcaca

SEQ ID NO: 618046 - DNA, 15 bp, Homo sapiens
cccacatctgcacag

SEQ ID NO: 618047 - DNA, 15 bp, Homo sapiens
ccacatctgcacaga

SEQ ID NO: 618048 - DNA, 15 bp, Homo sapiens
cacatctgcacagat

SEQ ID NO: 618049 - DNA, 15 bp, Homo sapiens
acatctgcacagatc

SEQ ID NO: 618050 - DNA, 15 bp, Homo sapiens
catctgcacagatca

SEQ ID NO: 618051 - DNA, 15 bp, Homo sapiens
atctgcacagatcag

SEQ ID NO: 618052 - DNA, 15 bp, Homo sapiens
tctgcacagatcaga

SEQ ID NO: 618053 - DNA, 15 bp, Homo sapiens
ctgcacagatcagac

SEQ ID NO: 618054 - DNA, 15 bp, Homo sapiens
tgcacagatcagacc

SEQ ID NO: 618055 - DNA, 15 bp, Homo sapiens
gcacagatcagaccc

SEQ ID NO: 618056 - DNA, 15 bp, Homo sapiens
cacagatcagaccca

SEQ ID NO: 618057 - DNA, 15 bp, Homo sapiens
acagatcagacccac

SEQ ID NO: 618058 - DNA, 15 bp, Homo sapiens
cagatcagacccaca

SEQ ID NO: 618059 - DNA, 15 bp, Homo sapiens
agatcagacccacaa

SEQ ID NO: 618060 - DNA, 15 bp, Homo sapiens
gatcagacccacaaa

SEQ ID NO: 618061 - DNA, 15 bp, Homo sapiens
atcagacccacaaaa

SEQ ID NO: 618062 - DNA, 15 bp, Homo sapiens
tcagacccacaaaaa

SEQ ID NO: 618063 - DNA, 15 bp, Homo sapiens
cagacccacaaaaat

SEQ ID NO: 618064 - DNA, 15 bp, Homo sapiens
agacccacaaaaatc

SEQ ID NO: 618065 - DNA, 15 bp, Homo sapiens
gacccacaaaaatca

SEQ ID NO: 618066 - DNA, 15 bp, Homo sapiens
acccacaaaaatcac

SEQ ID NO: 618067 - DNA, 15 bp, Homo sapiens
cccacaaaaatcacg

SEQ ID NO: 618068 - DNA, 15 bp, Homo sapiens
ccacaaaaatcacgt

SEQ ID NO: 618069 - DNA, 15 bp, Homo sapiens
cacaaaaatcacgtc

SEQ ID NO: 618070 - DNA, 15 bp, Homo sapiens
acaaaaatcacgtct

SEQ ID NO: 618071 - DNA, 15 bp, Homo sapiens
caaaaatcacgtctt

SEQ ID NO: 618072 - DNA, 15 bp, Homo sapiens
aaaaatcacgtcttc

SEQ ID NO: 618073 - DNA, 15 bp, Homo sapiens
aaaatcacgtcttcc

SEQ ID NO: 618074 - DNA, 15 bp, Homo sapiens
aaatcacgtcttcct

SEQ ID NO: 618075 - DNA, 15 bp, Homo sapiens
aatcacgtcttcctg

SEQ ID NO: 618076 - DNA, 15 bp, Homo sapiens
atcacgtcttcctga

SEQ ID NO: 618077 - DNA, 15 bp, Homo sapiens
tcacgtcttcctgac

SEQ ID NO: 618078 - DNA, 15 bp, Homo sapiens
cacgtcttcctgact

SEQ ID NO: 618079 - DNA, 15 bp, Homo sapiens
acgtcttcctgactc

SEQ ID NO: 618080 - DNA, 15 bp, Homo sapiens
cgtcttcctgactct

SEQ ID NO: 618081 - DNA, 15 bp, Homo sapiens
gtcttcctgactctc

SEQ ID NO: 618082 - DNA, 15 bp, Homo sapiens
tcttcctgactctca

SEQ ID NO: 618083 - DNA, 15 bp, Homo sapiens
cttcctgactctcat

SEQ ID NO: 618084 - DNA, 15 bp, Homo sapiens
ttcctgactctcata

SEQ ID NO: 618085 - DNA, 15 bp, Homo sapiens
tcctgactctcataa

SEQ ID NO: 618086 - DNA, 15 bp, Homo sapiens
cctgactctcataag

SEQ ID NO: 618087 - DNA, 15 bp, Homo sapiens
ctgactctcataagc

SEQ ID NO: 618088 - DNA, 15 bp, Homo sapiens
tgactctcataagcc

SEQ ID NO: 618089 - DNA, 15 bp, Homo sapiens
gactctcataagcct

SEQ ID NO: 618090 - DNA, 15 bp, Homo sapiens
actctcataagcctg

SEQ ID NO: 618091 - DNA, 15 bp, Homo sapiens
ctctcataagcctgc

SEQ ID NO: 618092 - DNA, 15 bp, Homo sapiens
tctcataagcctgcc

SEQ ID NO: 618093 - DNA, 15 bp, Homo sapiens
ctcataagcctgccc

SEQ ID NO: 618094 - DNA, 15 bp, Homo sapiens
tcataagcctgccca

SEQ ID NO: 618095 - DNA, 15 bp, Homo sapiens
cataagcctgcccag

SEQ ID NO: 618096 - DNA, 15 bp, Homo sapiens
ataagcctgcccagt

SEQ ID NO: 618097 - DNA, 15 bp, Homo sapiens
taagcctgcccagtg

SEQ ID NO: 618098 - DNA, 15 bp, Homo sapiens
aagcctgcccagtga

SEQ ID NO: 618099 - DNA, 15 bp, Homo sapiens
agcctgcccagtgag

SEQ ID NO: 618100 - DNA, 15 bp, Homo sapiens
gcctgcccagtgagg

SEQ ID NO: 618101 - DNA, 15 bp, Homo sapiens
cctgcccagtgaggc

SEQ ID NO: 618102 - DNA, 15 bp, Homo sapiens
ctgcccagtgaggcc

SEQ ID NO: 618103 - DNA, 15 bp, Homo sapiens
tgcccagtgaggccc

SEQ ID NO: 618104 - DNA, 15 bp, Homo sapiens
gcccagtgaggccca

SEQ ID NO: 618105 - DNA, 15 bp, Homo sapiens
cccagtgaggcccag

SEQ ID NO: 618106 - DNA, 15 bp, Homo sapiens
ccagtgaggcccagg

SEQ ID NO: 618107 - DNA, 15 bp, Homo sapiens
cagtgaggcccaggc

SEQ ID NO: 618108 - DNA, 15 bp, Homo sapiens
agtgaggcccaggca

SEQ ID NO: 618109 - DNA, 15 bp, Homo sapiens
gtgaggcccaggcat

SEQ ID NO: 618110 - DNA, 15 bp, Homo sapiens
tgaggcccaggcatt

SEQ ID NO: 618111 - DNA, 15 bp, Homo sapiens
gaggcccaggcatta

SEQ ID NO: 618112 - DNA, 15 bp, Homo sapiens
aggcccaggcattag

SEQ ID NO: 618113 - DNA, 15 bp, Homo sapiens
ggcccaggcattagg

SEQ ID NO: 618114 - DNA, 15 bp, Homo sapiens
gcccaggcattaggc

SEQ ID NO: 618115 - DNA, 15 bp, Homo sapiens
cccaggcattaggcc

SEQ ID NO: 618116 - DNA, 15 bp, Homo sapiens
ccaggcattaggcca

SEQ ID NO: 618117 - DNA, 15 bp, Homo sapiens
caggcattaggccat

SEQ ID NO: 618118 - DNA, 15 bp, Homo sapiens
aggcattaggccatg

SEQ ID NO: 618119 - DNA, 15 bp, Homo sapiens
ggcattaggccatgt

SEQ ID NO: 618120 - DNA, 15 bp, Homo sapiens
gcattaggccatgtg

SEQ ID NO: 618121 - DNA, 15 bp, Homo sapiens
cattaggccatgtgc

SEQ ID NO: 618122 - DNA, 15 bp, Homo sapiens
attaggccatgtgct

SEQ ID NO: 618123 - DNA, 15 bp, Homo sapiens
ttaggccatgtgctg

SEQ ID NO: 618124 - DNA, 15 bp, Homo sapiens
taggccatgtgctgg

SEQ ID NO: 618125 - DNA, 15 bp, Homo sapiens
aggccatgtgctggg

SEQ ID NO: 618126 - DNA, 15 bp, Homo sapiens
ggccatgtgctgggg

SEQ ID NO: 618127 - DNA, 15 bp, Homo sapiens
gccatgtgctgggga

SEQ ID NO: 618128 - DNA, 15 bp, Homo sapiens
ccatgtgctggggac

SEQ ID NO: 618129 - DNA, 15 bp, Homo sapiens
catgtgctggggact

SEQ ID NO: 618130 - DNA, 15 bp, Homo sapiens
atgtgctggggactc

SEQ ID NO: 618131 - DNA, 15 bp, Homo sapiens
tgtgctggggactca

SEQ ID NO: 618132 - DNA, 15 bp, Homo sapiens
gtgctggggactcag

SEQ ID NO: 618133 - DNA, 15 bp, Homo sapiens
tgctggggactcaga

SEQ ID NO: 618134 - DNA, 15 bp, Homo sapiens
gctggggactcagac

SEQ ID NO: 618135 - DNA, 15 bp, Homo sapiens
ctggggactcagacc

SEQ ID NO: 618136 - DNA, 15 bp, Homo sapiens
tggggactcagaccc

SEQ ID NO: 618137 - DNA, 15 bp, Homo sapiens
ggggactcagaccca

SEQ ID NO: 618138 - DNA, 15 bp, Homo sapiens
gggactcagacccac

SEQ ID NO: 618139 - DNA, 15 bp, Homo sapiens
ggactcagacccaca

SEQ ID NO: 618140 - DNA, 15 bp, Homo sapiens
gactcagacccacac

SEQ ID NO: 618141 - DNA, 15 bp, Homo sapiens
actcagacccacaca

SEQ ID NO: 618142 - DNA, 15 bp, Homo sapiens
ctcagacccacacat

SEQ ID NO: 618143 - DNA, 15 bp, Homo sapiens
tcagacccacacata

SEQ ID NO: 618144 - DNA, 15 bp, Homo sapiens
cagacccacacatat

SEQ ID NO: 618145 - DNA, 15 bp, Homo sapiens
agacccacacatata

SEQ ID NO: 618146 - DNA, 15 bp, Homo sapiens
gacccacacatatac

SEQ ID NO: 618147 - DNA, 15 bp, Homo sapiens
acccacacatatacg

SEQ ID NO: 618148 - DNA, 15 bp, Homo sapiens
cccacacatatacgc

SEQ ID NO: 618149 - DNA, 15 bp, Homo sapiens
ccacacatatacgca

SEQ ID NO: 618150 - DNA, 15 bp, Homo sapiens
cacacatatacgcat

SEQ ID NO: 618151 - DNA, 15 bp, Homo sapiens
acacatatacgcatg

SEQ ID NO: 618152 - DNA, 15 bp, Homo sapiens
cacatatacgcatgt

SEQ ID NO: 618153 - DNA, 15 bp, Homo sapiens
acatatacgcatgtc

SEQ ID NO: 618154 - DNA, 15 bp, Homo sapiens
catatacgcatgtca

SEQ ID NO: 618155 - DNA, 15 bp, Homo sapiens
atatacgcatgtcag

SEQ ID NO: 618156 - DNA, 15 bp, Homo sapiens
tatacgcatgtcagc

SEQ ID NO: 618157 - DNA, 15 bp, Homo sapiens
atacgcatgtcagca

SEQ ID NO: 618158 - DNA, 15 bp, Homo sapiens
tacgcatgtcagcat

SEQ ID NO: 618159 - DNA, 15 bp, Homo sapiens
acgcatgtcagcatt

SEQ ID NO: 618160 - DNA, 15 bp, Homo sapiens
cgcatgtcagcattc

SEQ ID NO: 618161 - DNA, 15 bp, Homo sapiens
gcatgtcagcattca

SEQ ID NO: 618162 - DNA, 15 bp, Homo sapiens
catgtcagcattcat

SEQ ID NO: 618163 - DNA, 15 bp, Homo sapiens
atgtcagcattcatg

SEQ ID NO: 618164 - DNA, 15 bp, Homo sapiens
tgtcagcattcatgc

SEQ ID NO: 618165 - DNA, 15 bp, Homo sapiens
gtcagcattcatgct

SEQ ID NO: 618166 - DNA, 15 bp, Homo sapiens
tcagcattcatgctt

SEQ ID NO: 618167 - DNA, 15 bp, Homo sapiens
cagcattcatgctta

SEQ ID NO: 618168 - DNA, 15 bp, Homo sapiens
agcattcatgcttac

SEQ ID NO: 618169 - DNA, 15 bp, Homo sapiens
gcattcatgcttaca

SEQ ID NO: 618170 - DNA, 15 bp, Homo sapiens
cattcatgcttacag

SEQ ID NO: 618171 - DNA, 15 bp, Homo sapiens
attcatgcttacagg

SEQ ID NO: 618172 - DNA, 15 bp, Homo sapiens
ttcatgcttacaggt

SEQ ID NO: 618173 - DNA, 15 bp, Homo sapiens
tcatgcttacaggtc

SEQ ID NO: 618174 - DNA, 15 bp, Homo sapiens
catgcttacaggtcc

SEQ ID NO: 618175 - DNA, 15 bp, Homo sapiens
atgcttacaggtccg

SEQ ID NO: 618176 - DNA, 15 bp, Homo sapiens
tgcttacaggtccgc

SEQ ID NO: 618177 - DNA, 15 bp, Homo sapiens
gcttacaggtccgca

SEQ ID NO: 618178 - DNA, 15 bp, Homo sapiens
cttacaggtccgcac

SEQ ID NO: 618179 - DNA, 15 bp, Homo sapiens
ttacaggtccgcaca

SEQ ID NO: 618180 - DNA, 15 bp, Homo sapiens
tacaggtccgcacat

SEQ ID NO: 618181 - DNA, 15 bp, Homo sapiens
acaggtccgcacatg

SEQ ID NO: 618182 - DNA, 15 bp, Homo sapiens
caggtccgcacatgc

SEQ ID NO: 618183 - DNA, 15 bp, Homo sapiens
aggtccgcacatgct

SEQ ID NO: 618184 - DNA, 15 bp, Homo sapiens
ggtccgcacatgctg

SEQ ID NO: 618185 - DNA, 15 bp, Homo sapiens
gtccgcacatgctgg

SEQ ID NO: 618186 - DNA, 15 bp, Homo sapiens
tccgcacatgctggg

SEQ ID NO: 618187 - DNA, 15 bp, Homo sapiens
ccgcacatgctgggg

SEQ ID NO: 618188 - DNA, 15 bp, Homo sapiens
cgcacatgctggggc

SEQ ID NO: 618189 - DNA, 15 bp, Homo sapiens
gcacatgctggggca

SEQ ID NO: 618190 - DNA, 15 bp, Homo sapiens
cacatgctggggcaa

SEQ ID NO: 618191 - DNA, 15 bp, Homo sapiens
acatgctggggcaag

SEQ ID NO: 618192 - DNA, 15 bp, Homo sapiens
catgctggggcaagt

SEQ ID NO: 618193 - DNA, 15 bp, Homo sapiens
atgctggggcaagtg

SEQ ID NO: 618194 - DNA, 15 bp, Homo sapiens
tgctggggcaagtgt

SEQ ID NO: 618195 - DNA, 15 bp, Homo sapiens
gctggggcaagtgtc

SEQ ID NO: 618196 - DNA, 15 bp, Homo sapiens
ctggggcaagtgtca

SEQ ID NO: 618197 - DNA, 15 bp, Homo sapiens
tggggcaagtgtcac

SEQ ID NO: 618198 - DNA, 15 bp, Homo sapiens
ggggcaagtgtcaca

SEQ ID NO: 618199 - DNA, 15 bp, Homo sapiens
gggcaagtgtcacac

SEQ ID NO: 618200 - DNA, 15 bp, Homo sapiens
ggcaagtgtcacaca

SEQ ID NO: 618201 - DNA, 15 bp, Homo sapiens
gcaagtgtcacacac

SEQ ID NO: 618202 - DNA, 15 bp, Homo sapiens
caagtgtcacacacg

SEQ ID NO: 618203 - DNA, 15 bp, Homo sapiens
aagtgtcacacacgg

SEQ ID NO: 618204 - DNA, 15 bp, Homo sapiens
agtgtcacacacggg

SEQ ID NO: 618205 - DNA, 15 bp, Homo sapiens
gtgtcacacacgggg

SEQ ID NO: 618206 - DNA, 15 bp, Homo sapiens
tgtcacacacggggc

SEQ ID NO: 618207 - DNA, 15 bp, Homo sapiens
gtcacacacggggcg

SEQ ID NO: 618208 - DNA, 15 bp, Homo sapiens
tcacacacggggcgc

SEQ ID NO: 618209 - DNA, 15 bp, Homo sapiens
cacacacggggcgct

SEQ ID NO: 618210 - DNA, 15 bp, Homo sapiens
acacacggggcgctg

SEQ ID NO: 618211 - DNA, 15 bp, Homo sapiens
cacacggggcgctgt

SEQ ID NO: 618212 - DNA, 15 bp, Homo sapiens
acacggggcgctgta

SEQ ID NO: 618213 - DNA, 15 bp, Homo sapiens
cacggggcgctgtag

SEQ ID NO: 618214 - DNA, 15 bp, Homo sapiens
acggggcgctgtagg

SEQ ID NO: 618215 - DNA, 15 bp, Homo sapiens
cggggcgctgtagga

SEQ ID NO: 618216 - DNA, 15 bp, Homo sapiens
ggggcgctgtaggaa

SEQ ID NO: 618217 - DNA, 15 bp, Homo sapiens
gggcgctgtaggaag

SEQ ID NO: 618218 - DNA, 15 bp, Homo sapiens
ggcgctgtaggaagc

SEQ ID NO: 618219 - DNA, 15 bp, Homo sapiens
gcgctgtaggaagct

SEQ ID NO: 618220 - DNA, 15 bp, Homo sapiens
cgctgtaggaagctg

SEQ ID NO: 618221 - DNA, 15 bp, Homo sapiens
gctgtaggaagctga

SEQ ID NO: 618222 - DNA, 15 bp, Homo sapiens
ctgtaggaagctgac

SEQ ID NO: 618223 - DNA, 15 bp, Homo sapiens
tgtaggaagctgact

SEQ ID NO: 618224 - DNA, 15 bp, Homo sapiens
gtaggaagctgactc

SEQ ID NO: 618225 - DNA, 15 bp, Homo sapiens
taggaagctgactct

SEQ ID NO: 618226 - DNA, 15 bp, Homo sapiens
aggaagctgactctc

SEQ ID NO: 618227 - DNA, 15 bp, Homo sapiens
ggaagctgactctca

SEQ ID NO: 618228 - DNA, 15 bp, Homo sapiens
gaagctgactctcag

SEQ ID NO: 618229 - DNA, 15 bp, Homo sapiens
aagctgactctcagc

SEQ ID NO: 618230 - DNA, 15 bp, Homo sapiens
agctgactctcagcc

SEQ ID NO: 618231 - DNA, 15 bp, Homo sapiens
gctgactctcagccc

SEQ ID NO: 618232 - DNA, 15 bp, Homo sapiens
ctgactctcagcccc

SEQ ID NO: 618233 - DNA, 15 bp, Homo sapiens
tgactctcagcccct

SEQ ID NO: 618234 - DNA, 15 bp, Homo sapiens
gactctcagcccctg

SEQ ID NO: 618235 - DNA, 15 bp, Homo sapiens
actctcagcccctgc

SEQ ID NO: 618236 - DNA, 15 bp, Homo sapiens
ctctcagcccctgca

SEQ ID NO: 618237 - DNA, 15 bp, Homo sapiens
tctcagcccctgcag

SEQ ID NO: 618238 - DNA, 15 bp, Homo sapiens
ctcagcccctgcaga

SEQ ID NO: 618239 - DNA, 15 bp, Homo sapiens
tcagcccctgcagat

SEQ ID NO: 618240 - DNA, 15 bp, Homo sapiens
cagcccctgcagatt

SEQ ID NO: 618241 - DNA, 15 bp, Homo sapiens
agcccctgcagattt

SEQ ID NO: 618242 - DNA, 15 bp, Homo sapiens
gcccctgcagatttc

SEQ ID NO: 618243 - DNA, 15 bp, Homo sapiens
cccctgcagatttct

SEQ ID NO: 618244 - DNA, 15 bp, Homo sapiens
ccctgcagatttctg

SEQ ID NO: 618245 - DNA, 15 bp, Homo sapiens
cctgcagatttctgc

SEQ ID NO: 618246 - DNA, 15 bp, Homo sapiens
ctgcagatttctgcc

SEQ ID NO: 618247 - DNA, 15 bp, Homo sapiens
tgcagatttctgcct

SEQ ID NO: 618248 - DNA, 15 bp, Homo sapiens
gcagatttctgcctg

SEQ ID NO: 618249 - DNA, 15 bp, Homo sapiens
cagatttctgcctgc

SEQ ID NO: 618250 - DNA, 15 bp, Homo sapiens
agatttctgcctgcc

SEQ ID NO: 618251 - DNA, 15 bp, Homo sapiens
gatttctgcctgcct

SEQ ID NO: 618252 - DNA, 15 bp, Homo sapiens
atttctgcctgcctg

SEQ ID NO: 618253 - DNA, 15 bp, Homo sapiens
tttctgcctgcctgg

SEQ ID NO: 618254 - DNA, 15 bp, Homo sapiens
ttctgcctgcctgga

SEQ ID NO: 618255 - DNA, 15 bp, Homo sapiens
tctgcctgcctggac

SEQ ID NO: 618256 - DNA, 15 bp, Homo sapiens
ctgcctgcctggaca

SEQ ID NO: 618257 - DNA, 15 bp, Homo sapiens
tgcctgcctggacag

SEQ ID NO: 618258 - DNA, 15 bp, Homo sapiens
gcctgcctggacagg

SEQ ID NO: 618259 - DNA, 15 bp, Homo sapiens
cctgcctggacaggg

SEQ ID NO: 618260 - DNA, 15 bp, Homo sapiens
ctgcctggacaggga

SEQ ID NO: 618261 - DNA, 15 bp, Homo sapiens
tgcctggacagggag

SEQ ID NO: 618262 - DNA, 15 bp, Homo sapiens
gcctggacagggagg

SEQ ID NO: 618263 - DNA, 15 bp, Homo sapiens
cctggacagggaggt

SEQ ID NO: 618264 - DNA, 15 bp, Homo sapiens
ctggacagggaggtg

SEQ ID NO: 618265 - DNA, 15 bp, Homo sapiens
tggacagggaggtgt

SEQ ID NO: 618266 - DNA, 15 bp, Homo sapiens
ggacagggaggtgtt

SEQ ID NO: 618267 - DNA, 15 bp, Homo sapiens
gacagggaggtgttg

SEQ ID NO: 618268 - DNA, 15 bp, Homo sapiens
acagggaggtgttga

SEQ ID NO: 618269 - DNA, 15 bp, Homo sapiens
cagggaggtgttgag

SEQ ID NO: 618270 - DNA, 15 bp, Homo sapiens
agggaggtgttgaga

SEQ ID NO: 618271 - DNA, 15 bp, Homo sapiens
gggaggtgttgagaa

SEQ ID NO: 618272 - DNA, 15 bp, Homo sapiens
ggaggtgttgagaag

SEQ ID NO: 618273 - DNA, 15 bp, Homo sapiens
gaggtgttgagaagg

SEQ ID NO: 618274 - DNA, 15 bp, Homo sapiens
aggtgttgagaaggc

SEQ ID NO: 618275 - DNA, 15 bp, Homo sapiens
ggtgttgagaaggct

SEQ ID NO: 618276 - DNA, 15 bp, Homo sapiens
gtgttgagaaggctc

SEQ ID NO: 618277 - DNA, 15 bp, Homo sapiens
tgttgagaaggctca

SEQ ID NO: 618278 - DNA, 15 bp, Homo sapiens
gttgagaaggctcag

SEQ ID NO: 618279 - DNA, 15 bp, Homo sapiens
ttgagaaggctcagg

SEQ ID NO: 618280 - DNA, 15 bp, Homo sapiens
tgagaaggctcaggc

SEQ ID NO: 618281 - DNA, 15 bp, Homo sapiens
gagaaggctcaggca

SEQ ID NO: 618282 - DNA, 15 bp, Homo sapiens
agaaggctcaggcag

SEQ ID NO: 618283 - DNA, 15 bp, Homo sapiens
gaaggctcaggcagt

SEQ ID NO: 618284 - DNA, 15 bp, Homo sapiens
aaggctcaggcagtc

SEQ ID NO: 618285 - DNA, 15 bp, Homo sapiens
aggctcaggcagtcc

SEQ ID NO: 618286 - DNA, 15 bp, Homo sapiens
ggctcaggcagtcct

SEQ ID NO: 618287 - DNA, 15 bp, Homo sapiens
gctcaggcagtcctg

SEQ ID NO: 618288 - DNA, 15 bp, Homo sapiens
ctcaggcagtcctgg

SEQ ID NO: 618289 - DNA, 15 bp, Homo sapiens
tcaggcagtcctggg

SEQ ID NO: 618290 - DNA, 15 bp, Homo sapiens
caggcagtcctgggc

SEQ ID NO: 618291 - DNA, 15 bp, Homo sapiens
aggcagtcctgggcc

SEQ ID NO: 618292 - DNA, 15 bp, Homo sapiens
ggcagtcctgggcca

SEQ ID NO: 618293 - DNA, 15 bp, Homo sapiens
gcagtcctgggccag

SEQ ID NO: 618294 - DNA, 15 bp, Homo sapiens
cagtcctgggccagg

SEQ ID NO: 618295 - DNA, 15 bp, Homo sapiens
agtcctgggccagga

SEQ ID NO: 618296 - DNA, 15 bp, Homo sapiens
gtcctgggccaggac

SEQ ID NO: 618297 - DNA, 15 bp, Homo sapiens
tcctgggccaggacc

SEQ ID NO: 618298 - DNA, 15 bp, Homo sapiens
cctgggccaggacct

SEQ ID NO: 618299 - DNA, 15 bp, Homo sapiens
ctgggccaggacctt

SEQ ID NO: 618300 - DNA, 15 bp, Homo sapiens
tgggccaggaccttg

SEQ ID NO: 618301 - DNA, 15 bp, Homo sapiens
gggccaggaccttgg

SEQ ID NO: 618302 - DNA, 15 bp, Homo sapiens
ggccaggaccttggc

SEQ ID NO: 618303 - DNA, 15 bp, Homo sapiens
gccaggaccttggcc

SEQ ID NO: 618304 - DNA, 15 bp, Homo sapiens
ccaggaccttggcct

SEQ ID NO: 618305 - DNA, 15 bp, Homo sapiens
caggaccttggcctg

SEQ ID NO: 618306 - DNA, 15 bp, Homo sapiens
aggaccttggcctgg

SEQ ID NO: 618307 - DNA, 15 bp, Homo sapiens
ggaccttggcctggg

SEQ ID NO: 618308 - DNA, 15 bp, Homo sapiens
gaccttggcctgggg

SEQ ID NO: 618309 - DNA, 15 bp, Homo sapiens
accttggcctggggc

SEQ ID NO: 618310 - DNA, 15 bp, Homo sapiens
ccttggcctggggct

SEQ ID NO: 618311 - DNA, 15 bp, Homo sapiens
cttggcctggggcta

SEQ ID NO: 618312 - DNA, 15 bp, Homo sapiens
ttggcctggggctag

SEQ ID NO: 618313 - DNA, 15 bp, Homo sapiens
tggcctggggctagg

SEQ ID NO: 618314 - DNA, 15 bp, Homo sapiens
ggcctggggctaggg

SEQ ID NO: 618315 - DNA, 15 bp, Homo sapiens
gcctggggctagggt

SEQ ID NO: 618316 - DNA, 15 bp, Homo sapiens
cctggggctagggta

SEQ ID NO: 618317 - DNA, 15 bp, Homo sapiens
ctggggctagggtac

SEQ ID NO: 618318 - DNA, 15 bp, Homo sapiens
tggggctagggtact

SEQ ID NO: 618319 - DNA, 15 bp, Homo sapiens
ggggctagggtactg

SEQ ID NO: 618320 - DNA, 15 bp, Homo sapiens
gggctagggtactga

SEQ ID NO: 618321 - DNA, 15 bp, Homo sapiens
ggctagggtactgag

SEQ ID NO: 618322 - DNA, 15 bp, Homo sapiens
gctagggtactgagt

SEQ ID NO: 618323 - DNA, 15 bp, Homo sapiens
ctagggtactgagtg

SEQ ID NO: 618324 - DNA, 15 bp, Homo sapiens
tagggtactgagtga

SEQ ID NO: 618325 - DNA, 15 bp, Homo sapiens
agggtactgagtgac

SEQ ID NO: 618326 - DNA, 15 bp, Homo sapiens
gggtactgagtgacc

SEQ ID NO: 618327 - DNA, 15 bp, Homo sapiens
ggtactgagtgaccc

SEQ ID NO: 618328 - DNA, 15 bp, Homo sapiens
gtactgagtgaccct

SEQ ID NO: 618329 - DNA, 15 bp, Homo sapiens
tactgagtgacccta

SEQ ID NO: 618330 - DNA, 15 bp, Homo sapiens
actgagtgaccctag

SEQ ID NO: 618331 - DNA, 15 bp, Homo sapiens
ctgagtgaccctaga

SEQ ID NO: 618332 - DNA, 15 bp, Homo sapiens
tgagtgaccctagaa

SEQ ID NO: 618333 - DNA, 15 bp, Homo sapiens
gagtgaccctagaat

SEQ ID NO: 618334 - DNA, 15 bp, Homo sapiens
agtgaccctagaatc

SEQ ID NO: 618335 - DNA, 15 bp, Homo sapiens
gtgaccctagaatca

SEQ ID NO: 618336 - DNA, 15 bp, Homo sapiens
tgaccctagaatcaa

SEQ ID NO: 618337 - DNA, 15 bp, Homo sapiens
gaccctagaatcaag

SEQ ID NO: 618338 - DNA, 15 bp, Homo sapiens
accctagaatcaagg

SEQ ID NO: 618339 - DNA, 15 bp, Homo sapiens
ccctagaatcaaggg

SEQ ID NO: 618340 - DNA, 15 bp, Homo sapiens
cctagaatcaagggt

SEQ ID NO: 618341 - DNA, 15 bp, Homo sapiens
ctagaatcaagggtg

SEQ ID NO: 618342 - DNA, 15 bp, Homo sapiens
tagaatcaagggtgg

SEQ ID NO: 618343 - DNA, 15 bp, Homo sapiens
agaatcaagggtggc

SEQ ID NO: 618344 - DNA, 15 bp, Homo sapiens
gaatcaagggtggcg

SEQ ID NO: 618345 - DNA, 15 bp, Homo sapiens
aatcaagggtggcgt

SEQ ID NO: 618346 - DNA, 15 bp, Homo sapiens
atcaagggtggcgtg

SEQ ID NO: 618347 - DNA, 15 bp, Homo sapiens
tcaagggtggcgtgg

SEQ ID NO: 618348 - DNA, 15 bp, Homo sapiens
caagggtggcgtggg

SEQ ID NO: 618349 - DNA, 15 bp, Homo sapiens
aagggtggcgtgggc

SEQ ID NO: 618350 - DNA, 15 bp, Homo sapiens
agggtggcgtgggct

SEQ ID NO: 618351 - DNA, 15 bp, Homo sapiens
gggtggcgtgggctt

SEQ ID NO: 618352 - DNA, 15 bp, Homo sapiens
ggtggcgtgggctta

SEQ ID NO: 618353 - DNA, 15 bp, Homo sapiens
gtggcgtgggcttaa

SEQ ID NO: 618354 - DNA, 15 bp, Homo sapiens
tggcgtgggcttaag

SEQ ID NO: 618355 - DNA, 15 bp, Homo sapiens
ggcgtgggcttaagc

SEQ ID NO: 618356 - DNA, 15 bp, Homo sapiens
gcgtgggcttaagca

SEQ ID NO: 618357 - DNA, 15 bp, Homo sapiens
cgtgggcttaagcag

SEQ ID NO: 618358 - DNA, 15 bp, Homo sapiens
gtgggcttaagcagt

SEQ ID NO: 618359 - DNA, 15 bp, Homo sapiens
tgggcttaagcagtt

SEQ ID NO: 618360 - DNA, 15 bp, Homo sapiens
gggcttaagcagttg

SEQ ID NO: 618361 - DNA, 15 bp, Homo sapiens
ggcttaagcagttgc

SEQ ID NO: 618362 - DNA, 15 bp, Homo sapiens
gcttaagcagttgcc

SEQ ID NO: 618363 - DNA, 15 bp, Homo sapiens
cttaagcagttgcca

SEQ ID NO: 618364 - DNA, 15 bp, Homo sapiens
ttaagcagttgccag

SEQ ID NO: 618365 - DNA, 15 bp, Homo sapiens
taagcagttgccaga

SEQ ID NO: 618366 - DNA, 15 bp, Homo sapiens
aagcagttgccagac

SEQ ID NO: 618367 - DNA, 15 bp, Homo sapiens
agcagttgccagacg

SEQ ID NO: 618368 - DNA, 15 bp, Homo sapiens
gcagttgccagacgt

SEQ ID NO: 618369 - DNA, 15 bp, Homo sapiens
cagttgccagacgtt

SEQ ID NO: 618370 - DNA, 15 bp, Homo sapiens
agttgccagacgttc

SEQ ID NO: 618371 - DNA, 15 bp, Homo sapiens
gttgccagacgttcc

SEQ ID NO: 618372 - DNA, 15 bp, Homo sapiens
ttgccagacgttcct

SEQ ID NO: 618373 - DNA, 15 bp, Homo sapiens
tgccagacgttcctt

SEQ ID NO: 618374 - DNA, 15 bp, Homo sapiens
gccagacgttccttg

SEQ ID NO: 618375 - DNA, 15 bp, Homo sapiens
ccagacgttccttgg

SEQ ID NO: 618376 - DNA, 15 bp, Homo sapiens
cagacgttccttggt

SEQ ID NO: 618377 - DNA, 15 bp, Homo sapiens
agacgttccttggta

SEQ ID NO: 618378 - DNA, 15 bp, Homo sapiens
gacgttccttggtac

SEQ ID NO: 618379 - DNA, 15 bp, Homo sapiens
acgttccttggtact

SEQ ID NO: 618380 - DNA, 15 bp, Homo sapiens
cgttccttggtactt

SEQ ID NO: 618381 - DNA, 15 bp, Homo sapiens
gttccttggtacttt

SEQ ID NO: 618382 - DNA, 15 bp, Homo sapiens
ttccttggtactttg

SEQ ID NO: 618383 - DNA, 15 bp, Homo sapiens
tccttggtactttgc

SEQ ID NO: 618384 - DNA, 15 bp, Homo sapiens
ccttggtactttgca

SEQ ID NO: 618385 - DNA, 15 bp, Homo sapiens
cttggtactttgcag

SEQ ID NO: 618386 - DNA, 15 bp, Homo sapiens
ttggtactttgcagg

SEQ ID NO: 618387 - DNA, 15 bp, Homo sapiens
tggtactttgcaggc

SEQ ID NO: 618388 - DNA, 15 bp, Homo sapiens
ggtactttgcaggca

SEQ ID NO: 618389 - DNA, 15 bp, Homo sapiens
gtactttgcaggcag

SEQ ID NO: 618390 - DNA, 15 bp, Homo sapiens
tactttgcaggcaga

SEQ ID NO: 618391 - DNA, 15 bp, Homo sapiens
actttgcaggcagac

SEQ ID NO: 618392 - DNA, 15 bp, Homo sapiens
ctttgcaggcagacc

SEQ ID NO: 618393 - DNA, 15 bp, Homo sapiens
tttgcaggcagacca

SEQ ID NO: 618394 - DNA, 15 bp, Homo sapiens
ttgcaggcagaccat

SEQ ID NO: 618395 - DNA, 15 bp, Homo sapiens
tgcaggcagaccatg

SEQ ID NO: 618396 - DNA, 15 bp, Homo sapiens
gcaggcagaccatgt

SEQ ID NO: 618397 - DNA, 15 bp, Homo sapiens
caggcagaccatgtg

SEQ ID NO: 618398 - DNA, 15 bp, Homo sapiens
aggcagaccatgtgg

SEQ ID NO: 618399 - DNA, 15 bp, Homo sapiens
ggcagaccatgtgga

SEQ ID NO: 618400 - DNA, 15 bp, Homo sapiens
gcagaccatgtggac

SEQ ID NO: 618401 - DNA, 15 bp, Homo sapiens
cagaccatgtggacc

SEQ ID NO: 618402 - DNA, 15 bp, Homo sapiens
agaccatgtggaccc

SEQ ID NO: 618403 - DNA, 15 bp, Homo sapiens
gaccatgtggaccct

SEQ ID NO: 618404 - DNA, 15 bp, Homo sapiens
accatgtggaccctg

SEQ ID NO: 618405 - DNA, 15 bp, Homo sapiens
ccatgtggaccctgg

SEQ ID NO: 618406 - DNA, 15 bp, Homo sapiens
catgtggaccctggt

SEQ ID NO: 618407 - DNA, 15 bp, Homo sapiens
atgtggaccctggtg

SEQ ID NO: 618408 - DNA, 15 bp, Homo sapiens
tgtggaccctggtga

SEQ ID NO: 618409 - DNA, 15 bp, Homo sapiens
gtggaccctggtgag

SEQ ID NO: 618410 - DNA, 15 bp, Homo sapiens
tggaccctggtgagc

SEQ ID NO: 618411 - DNA, 15 bp, Homo sapiens
ggaccctggtgagct

SEQ ID NO: 618412 - DNA, 15 bp, Homo sapiens
gaccctggtgagctg

SEQ ID NO: 618413 - DNA, 15 bp, Homo sapiens
accctggtgagctgg

SEQ ID NO: 618414 - DNA, 15 bp, Homo sapiens
ccctggtgagctggg

SEQ ID NO: 618415 - DNA, 15 bp, Homo sapiens
cctggtgagctgggt

SEQ ID NO: 618416 - DNA, 15 bp, Homo sapiens
ctggtgagctgggtg

SEQ ID NO: 618417 - DNA, 15 bp, Homo sapiens
tggtgagctgggtgg

SEQ ID NO: 618418 - DNA, 15 bp, Homo sapiens
ggtgagctgggtggc

SEQ ID NO: 618419 - DNA, 15 bp, Homo sapiens
gtgagctgggtggcc

SEQ ID NO: 618420 - DNA, 15 bp, Homo sapiens
tgagctgggtggcct

SEQ ID NO: 618421 - DNA, 15 bp, Homo sapiens
gagctgggtggcctt

SEQ ID NO: 618422 - DNA, 15 bp, Homo sapiens
agctgggtggcctta

SEQ ID NO: 618423 - DNA, 15 bp, Homo sapiens
gctgggtggccttaa

SEQ ID NO: 618424 - DNA, 15 bp, Homo sapiens
ctgggtggccttaac

SEQ ID NO: 618425 - DNA, 15 bp, Homo sapiens
tgggtggccttaaca

SEQ ID NO: 618426 - DNA, 15 bp, Homo sapiens
gggtggccttaacag

SEQ ID NO: 618427 - DNA, 15 bp, Homo sapiens
ggtggccttaacagc

SEQ ID NO: 618428 - DNA, 15 bp, Homo sapiens
gtggccttaacagca

SEQ ID NO: 618429 - DNA, 15 bp, Homo sapiens
tggccttaacagcag

SEQ ID NO: 618430 - DNA, 15 bp, Homo sapiens
ggccttaacagcagg

SEQ ID NO: 618431 - DNA, 15 bp, Homo sapiens
gccttaacagcaggg

SEQ ID NO: 618432 - DNA, 15 bp, Homo sapiens
ccttaacagcagggc

SEQ ID NO: 618433 - DNA, 15 bp, Homo sapiens
cttaacagcagggct

SEQ ID NO: 618434 - DNA, 15 bp, Homo sapiens
ttaacagcagggctg

SEQ ID NO: 618435 - DNA, 15 bp, Homo sapiens
taacagcagggctgg

SEQ ID NO: 618436 - DNA, 15 bp, Homo sapiens
aacagcagggctggt

SEQ ID NO: 618437 - DNA, 15 bp, Homo sapiens
acagcagggctggtg

SEQ ID NO: 618438 - DNA, 15 bp, Homo sapiens
cagcagggctggtgg

SEQ ID NO: 618439 - DNA, 15 bp, Homo sapiens
agcagggctggtggc

SEQ ID NO: 618440 - DNA, 15 bp, Homo sapiens
gcagggctggtggct

SEQ ID NO: 618441 - DNA, 15 bp, Homo sapiens
cagggctggtggctg

SEQ ID NO: 618442 - DNA, 15 bp, Homo sapiens
agggctggtggctgg

SEQ ID NO: 618443 - DNA, 15 bp, Homo sapiens
gggctggtggctgga

SEQ ID NO: 618444 - DNA, 15 bp, Homo sapiens
ggctggtggctggaa

SEQ ID NO: 618445 - DNA, 15 bp, Homo sapiens
gctggtggctggaac

SEQ ID NO: 618446 - DNA, 15 bp, Homo sapiens
ctggtggctggaacg

SEQ ID NO: 618447 - DNA, 15 bp, Homo sapiens
tggtggctggaacgc

SEQ ID NO: 618448 - DNA, 15 bp, Homo sapiens
ggtggctggaacgcg

SEQ ID NO: 618449 - DNA, 15 bp, Homo sapiens
gtggctggaacgcgg

SEQ ID NO: 618450 - DNA, 15 bp, Homo sapiens
tggctggaacgcggt

SEQ ID NO: 618451 - DNA, 15 bp, Homo sapiens
ggctggaacgcggtg

SEQ ID NO: 618452 - DNA, 15 bp, Homo sapiens
gctggaacgcggtgc

SEQ ID NO: 618453 - DNA, 15 bp, Homo sapiens
ctggaacgcggtgcc

SEQ ID NO: 618454 - DNA, 15 bp, Homo sapiens
tggaacgcggtgccc

SEQ ID NO: 618455 - DNA, 15 bp, Homo sapiens
ggaacgcggtgccca

SEQ ID NO: 618456 - DNA, 15 bp, Homo sapiens
gaacgcggtgcccag

SEQ ID NO: 618457 - DNA, 15 bp, Homo sapiens
aacgcggtgcccaga

SEQ ID NO: 618458 - DNA, 15 bp, Homo sapiens
acgcggtgcccagat

SEQ ID NO: 618459 - DNA, 15 bp, Homo sapiens
cgcggtgcccagatg

SEQ ID NO: 618460 - DNA, 15 bp, Homo sapiens
gcggtgcccagatgg

SEQ ID NO: 618461 - DNA, 15 bp, Homo sapiens
cggtgcccagatggt

SEQ ID NO: 618462 - DNA, 15 bp, Homo sapiens
ggtgcccagatggtc

SEQ ID NO: 618463 - DNA, 15 bp, Homo sapiens
gtgcccagatggtca

SEQ ID NO: 618464 - DNA, 15 bp, Homo sapiens
tgcccagatggtcag

SEQ ID NO: 618465 - DNA, 15 bp, Homo sapiens
gcccagatggtcagt

SEQ ID NO: 618466 - DNA, 15 bp, Homo sapiens
cccagatggtcagtt

SEQ ID NO: 618467 - DNA, 15 bp, Homo sapiens
ccagatggtcagttc

SEQ ID NO: 618468 - DNA, 15 bp, Homo sapiens
cagatggtcagttct

SEQ ID NO: 618469 - DNA, 15 bp, Homo sapiens
agatggtcagttctg

SEQ ID NO: 618470 - DNA, 15 bp, Homo sapiens
gatggtcagttctgc

SEQ ID NO: 618471 - DNA, 15 bp, Homo sapiens
atggtcagttctgcc

SEQ ID NO: 618472 - DNA, 15 bp, Homo sapiens
tggtcagttctgccc

SEQ ID NO: 618473 - DNA, 15 bp, Homo sapiens
ggtcagttctgccct

SEQ ID NO: 618474 - DNA, 15 bp, Homo sapiens
gtcagttctgccctg

SEQ ID NO: 618475 - DNA, 15 bp, Homo sapiens
tcagttctgccctgt

SEQ ID NO: 618476 - DNA, 15 bp, Homo sapiens
cagttctgccctgtg

SEQ ID NO: 618477 - DNA, 15 bp, Homo sapiens
agttctgccctgtgg

SEQ ID NO: 618478 - DNA, 15 bp, Homo sapiens
gttctgccctgtggc

SEQ ID NO: 618479 - DNA, 15 bp, Homo sapiens
ttctgccctgtggcc

SEQ ID NO: 618480 - DNA, 15 bp, Homo sapiens
tctgccctgtggcct

SEQ ID NO: 618481 - DNA, 15 bp, Homo sapiens
ctgccctgtggcctg

SEQ ID NO: 618482 - DNA, 15 bp, Homo sapiens
tgccctgtggcctgc

SEQ ID NO: 618483 - DNA, 15 bp, Homo sapiens
gccctgtggcctgct

SEQ ID NO: 618484 - DNA, 15 bp, Homo sapiens
ccctgtggcctgctg

SEQ ID NO: 618485 - DNA, 15 bp, Homo sapiens
cctgtggcctgctgc

SEQ ID NO: 618486 - DNA, 15 bp, Homo sapiens
ctgtggcctgctgcc

SEQ ID NO: 618487 - DNA, 15 bp, Homo sapiens
tgtggcctgctgcct

SEQ ID NO: 618488 - DNA, 15 bp, Homo sapiens
gtggcctgctgcctg

SEQ ID NO: 618489 - DNA, 15 bp, Homo sapiens
tggcctgctgcctgg

SEQ ID NO: 618490 - DNA, 15 bp, Homo sapiens
ggcctgctgcctgga

SEQ ID NO: 618491 - DNA, 15 bp, Homo sapiens
gcctgctgcctggac

SEQ ID NO: 618492 - DNA, 15 bp, Homo sapiens
cctgctgcctggacc

SEQ ID NO: 618493 - DNA, 15 bp, Homo sapiens
ctgctgcctggaccc

SEQ ID NO: 618494 - DNA, 15 bp, Homo sapiens
tgctgcctggacccc

SEQ ID NO: 618495 - DNA, 15 bp, Homo sapiens
gctgcctggaccccg

SEQ ID NO: 618496 - DNA, 15 bp, Homo sapiens
ctgcctggaccccgg

SEQ ID NO: 618497 - DNA, 15 bp, Homo sapiens
tgcctggaccccgga

SEQ ID NO: 618498 - DNA, 15 bp, Homo sapiens
gcctggaccccggag

SEQ ID NO: 618499 - DNA, 15 bp, Homo sapiens
cctggaccccggagg

SEQ ID NO: 618500 - DNA, 15 bp, Homo sapiens
ctggaccccggagga

SEQ ID NO: 618501 - DNA, 15 bp, Homo sapiens
tggaccccggaggag

SEQ ID NO: 618502 - DNA, 15 bp, Homo sapiens
ggaccccggaggagc

SEQ ID NO: 618503 - DNA, 15 bp, Homo sapiens
gaccccggaggagcc

SEQ ID NO: 618504 - DNA, 15 bp, Homo sapiens
accccggaggagcca

SEQ ID NO: 618505 - DNA, 15 bp, Homo sapiens
ccccggaggagccag

SEQ ID NO: 618506 - DNA, 15 bp, Homo sapiens
cccggaggagccagc

SEQ ID NO: 618507 - DNA, 15 bp, Homo sapiens
ccggaggagccagct

SEQ ID NO: 618508 - DNA, 15 bp, Homo sapiens
cggaggagccagcta

SEQ ID NO: 618509 - DNA, 15 bp, Homo sapiens
ggaggagccagctac

SEQ ID NO: 618510 - DNA, 15 bp, Homo sapiens
gaggagccagctaca

SEQ ID NO: 618511 - DNA, 15 bp, Homo sapiens
aggagccagctacag

SEQ ID NO: 618512 - DNA, 15 bp, Homo sapiens
ggagccagctacagc

SEQ ID NO: 618513 - DNA, 15 bp, Homo sapiens
gagccagctacagct

SEQ ID NO: 618514 - DNA, 15 bp, Homo sapiens
agccagctacagctg

SEQ ID NO: 618515 - DNA, 15 bp, Homo sapiens
gccagctacagctgc

SEQ ID NO: 618516 - DNA, 15 bp, Homo sapiens
ccagctacagctgct

SEQ ID NO: 618517 - DNA, 15 bp, Homo sapiens
cagctacagctgctg

SEQ ID NO: 618518 - DNA, 15 bp, Homo sapiens
agctacagctgctgc

SEQ ID NO: 618519 - DNA, 15 bp, Homo sapiens
gctacagctgctgcc

SEQ ID NO: 618520 - DNA, 15 bp, Homo sapiens
ctacagctgctgccg

SEQ ID NO: 618521 - DNA, 15 bp, Homo sapiens
tacagctgctgccgt

SEQ ID NO: 618522 - DNA, 15 bp, Homo sapiens
acagctgctgccgtc

SEQ ID NO: 618523 - DNA, 15 bp, Homo sapiens
cagctgctgccgtcc

SEQ ID NO: 618524 - DNA, 15 bp, Homo sapiens
agctgctgccgtccc

SEQ ID NO: 618525 - DNA, 15 bp, Homo sapiens
gctgctgccgtcccc

SEQ ID NO: 618526 - DNA, 15 bp, Homo sapiens
ctgctgccgtcccct

SEQ ID NO: 618527 - DNA, 15 bp, Homo sapiens
tgctgccgtcccctt

SEQ ID NO: 618528 - DNA, 15 bp, Homo sapiens
gctgccgtccccttc

SEQ ID NO: 618529 - DNA, 15 bp, Homo sapiens
ctgccgtccccttct

SEQ ID NO: 618530 - DNA, 15 bp, Homo sapiens
tgccgtccccttctg

SEQ ID NO: 618531 - DNA, 15 bp, Homo sapiens
gccgtccccttctgg

SEQ ID NO: 618532 - DNA, 15 bp, Homo sapiens
ccgtccccttctggt

SEQ ID NO: 618533 - DNA, 15 bp, Homo sapiens
cgtccccttctggtg

SEQ ID NO: 618534 - DNA, 15 bp, Homo sapiens
gtccccttctggtga

SEQ ID NO: 618535 - DNA, 15 bp, Homo sapiens
tccccttctggtgag

SEQ ID NO: 618536 - DNA, 15 bp, Homo sapiens
ccccttctggtgagt

SEQ ID NO: 618537 - DNA, 15 bp, Homo sapiens
cccttctggtgagtg

SEQ ID NO: 618538 - DNA, 15 bp, Homo sapiens
ccttctggtgagtgc

SEQ ID NO: 618539 - DNA, 15 bp, Homo sapiens
cttctggtgagtgcc

SEQ ID NO: 618540 - DNA, 15 bp, Homo sapiens
ttctggtgagtgccc

SEQ ID NO: 618541 - DNA, 15 bp, Homo sapiens
tctggtgagtgcccc

SEQ ID NO: 618542 - DNA, 15 bp, Homo sapiens
ctggtgagtgcccct

SEQ ID NO: 618543 - DNA, 15 bp, Homo sapiens
tggtgagtgcccctc

SEQ ID NO: 618544 - DNA, 15 bp, Homo sapiens
ggtgagtgcccctca

SEQ ID NO: 618545 - DNA, 15 bp, Homo sapiens
gtgagtgcccctcag

SEQ ID NO: 618546 - DNA, 15 bp, Homo sapiens
tgagtgcccctcagc

SEQ ID NO: 618547 - DNA, 15 bp, Homo sapiens
gagtgcccctcagcc

SEQ ID NO: 618548 - DNA, 15 bp, Homo sapiens
agtgcccctcagcct

SEQ ID NO: 618549 - DNA, 15 bp, Homo sapiens
gtgcccctcagccta

SEQ ID NO: 618550 - DNA, 15 bp, Homo sapiens
tgcccctcagcctag

SEQ ID NO: 618551 - DNA, 15 bp, Homo sapiens
gcccctcagcctagg

SEQ ID NO: 618552 - DNA, 15 bp, Homo sapiens
cccctcagcctaggc

SEQ ID NO: 618553 - DNA, 15 bp, Homo sapiens
ccctcagcctaggca

SEQ ID NO: 618554 - DNA, 15 bp, Homo sapiens
cctcagcctaggcaa

SEQ ID NO: 618555 - DNA, 15 bp, Homo sapiens
ctcagcctaggcaag

SEQ ID NO: 618556 - DNA, 15 bp, Homo sapiens
tcagcctaggcaaga

SEQ ID NO: 618557 - DNA, 15 bp, Homo sapiens
cagcctaggcaagag

SEQ ID NO: 618558 - DNA, 15 bp, Homo sapiens
agcctaggcaagagc

SEQ ID NO: 618559 - DNA, 15 bp, Homo sapiens
gcctaggcaagagct

SEQ ID NO: 618560 - DNA, 15 bp, Homo sapiens
cctaggcaagagctg

SEQ ID NO: 618561 - DNA, 15 bp, Homo sapiens
ctaggcaagagctgg

SEQ ID NO: 618562 - DNA, 15 bp, Homo sapiens
taggcaagagctggc

SEQ ID NO: 618563 - DNA, 15 bp, Homo sapiens
aggcaagagctggca

SEQ ID NO: 618564 - DNA, 15 bp, Homo sapiens
ggcaagagctggcag

SEQ ID NO: 618565 - DNA, 15 bp, Homo sapiens
gcaagagctggcagc

SEQ ID NO: 618566 - DNA, 15 bp, Homo sapiens
caagagctggcagcc

SEQ ID NO: 618567 - DNA, 15 bp, Homo sapiens
aagagctggcagcct

SEQ ID NO: 618568 - DNA, 15 bp, Homo sapiens
agagctggcagcctg

SEQ ID NO: 618569 - DNA, 15 bp, Homo sapiens
gagctggcagcctgg

SEQ ID NO: 618570 - DNA, 15 bp, Homo sapiens
agctggcagcctggg

SEQ ID NO: 618571 - DNA, 15 bp, Homo sapiens
gctggcagcctgggt

SEQ ID NO: 618572 - DNA, 15 bp, Homo sapiens
ctggcagcctgggtt

SEQ ID NO: 618573 - DNA, 15 bp, Homo sapiens
tggcagcctgggttt

SEQ ID NO: 618574 - DNA, 15 bp, Homo sapiens
ggcagcctgggtttt

SEQ ID NO: 618575 - DNA, 15 bp, Homo sapiens
gcagcctgggttttc

SEQ ID NO: 618576 - DNA, 15 bp, Homo sapiens
cagcctgggttttcc

SEQ ID NO: 618577 - DNA, 15 bp, Homo sapiens
agcctgggttttccc

SEQ ID NO: 618578 - DNA, 15 bp, Homo sapiens
gcctgggttttccca

SEQ ID NO: 618579 - DNA, 15 bp, Homo sapiens
cctgggttttcccaa

SEQ ID NO: 618580 - DNA, 15 bp, Homo sapiens
ctgggttttcccaaa

SEQ ID NO: 618581 - DNA, 15 bp, Homo sapiens
tgggttttcccaaag

SEQ ID NO: 618582 - DNA, 15 bp, Homo sapiens
gggttttcccaaagg

SEQ ID NO: 618583 - DNA, 15 bp, Homo sapiens
ggttttcccaaaggg

SEQ ID NO: 618584 - DNA, 15 bp, Homo sapiens
gttttcccaaagggt

SEQ ID NO: 618585 - DNA, 15 bp, Homo sapiens
ttttcccaaagggtc

SEQ ID NO: 618586 - DNA, 15 bp, Homo sapiens
tttcccaaagggtca

SEQ ID NO: 618587 - DNA, 15 bp, Homo sapiens
ttcccaaagggtcat

SEQ ID NO: 618588 - DNA, 15 bp, Homo sapiens
tcccaaagggtcatc

SEQ ID NO: 618589 - DNA, 15 bp, Homo sapiens
cccaaagggtcatct

SEQ ID NO: 618590 - DNA, 15 bp, Homo sapiens
ccaaagggtcatctt

SEQ ID NO: 618591 - DNA, 15 bp, Homo sapiens
caaagggtcatcttg

SEQ ID NO: 618592 - DNA, 15 bp, Homo sapiens
aaagggtcatcttgg

SEQ ID NO: 618593 - DNA, 15 bp, Homo sapiens
aagggtcatcttgga

SEQ ID NO: 618594 - DNA, 15 bp, Homo sapiens
agggtcatcttggat

SEQ ID NO: 618595 - DNA, 15 bp, Homo sapiens
gggtcatcttggatt

SEQ ID NO: 618596 - DNA, 15 bp, Homo sapiens
ggtcatcttggattg

SEQ ID NO: 618597 - DNA, 15 bp, Homo sapiens
gtcatcttggattgg

SEQ ID NO: 618598 - DNA, 15 bp, Homo sapiens
tcatcttggattggc

SEQ ID NO: 618599 - DNA, 15 bp, Homo sapiens
catcttggattggcc

SEQ ID NO: 618600 - DNA, 15 bp, Homo sapiens
atcttggattggcca

SEQ ID NO: 618601 - DNA, 15 bp, Homo sapiens
tcttggattggccag

SEQ ID NO: 618602 - DNA, 15 bp, Homo sapiens
cttggattggccaga

SEQ ID NO: 618603 - DNA, 15 bp, Homo sapiens
ttggattggccagag

SEQ ID NO: 618604 - DNA, 15 bp, Homo sapiens
tggattggccagagg

SEQ ID NO: 618605 - DNA, 15 bp, Homo sapiens
ggattggccagagga

SEQ ID NO: 618606 - DNA, 15 bp, Homo sapiens
gattggccagaggag

SEQ ID NO: 618607 - DNA, 15 bp, Homo sapiens
attggccagaggagg

SEQ ID NO: 618608 - DNA, 15 bp, Homo sapiens
ttggccagaggagga

SEQ ID NO: 618609 - DNA, 15 bp, Homo sapiens
tggccagaggaggac

SEQ ID NO: 618610 - DNA, 15 bp, Homo sapiens
ggccagaggaggacg

SEQ ID NO: 618611 - DNA, 15 bp, Homo sapiens
gccagaggaggacgc

SEQ ID NO: 618612 - DNA, 15 bp, Homo sapiens
ccagaggaggacgcc

SEQ ID NO: 618613 - DNA, 15 bp, Homo sapiens
cagaggaggacgcca

SEQ ID NO: 618614 - DNA, 15 bp, Homo sapiens
agaggaggacgccag

SEQ ID NO: 618615 - DNA, 15 bp, Homo sapiens
gaggaggacgccagg

SEQ ID NO: 618616 - DNA, 15 bp, Homo sapiens
aggaggacgccaggc

SEQ ID NO: 618617 - DNA, 15 bp, Homo sapiens
ggaggacgccaggca

SEQ ID NO: 618618 - DNA, 15 bp, Homo sapiens
gaggacgccaggcac

SEQ ID NO: 618619 - DNA, 15 bp, Homo sapiens
aggacgccaggcaca

SEQ ID NO: 618620 - DNA, 15 bp, Homo sapiens
ggacgccaggcacaa

SEQ ID NO: 618621 - DNA, 15 bp, Homo sapiens
gacgccaggcacaag

SEQ ID NO: 618622 - DNA, 15 bp, Homo sapiens
acgccaggcacaagt

SEQ ID NO: 618623 - DNA, 15 bp, Homo sapiens
cgccaggcacaagtc

SEQ ID NO: 618624 - DNA, 15 bp, Homo sapiens
gccaggcacaagtct

SEQ ID NO: 618625 - DNA, 15 bp, Homo sapiens
ccaggcacaagtctg

SEQ ID NO: 618626 - DNA, 15 bp, Homo sapiens
caggcacaagtctgt

SEQ ID NO: 618627 - DNA, 15 bp, Homo sapiens
aggcacaagtctgtg

SEQ ID NO: 618628 - DNA, 15 bp, Homo sapiens
ggcacaagtctgtgg

SEQ ID NO: 618629 - DNA, 15 bp, Homo sapiens
gcacaagtctgtggt

SEQ ID NO: 618630 - DNA, 15 bp, Homo sapiens
cacaagtctgtggtt

SEQ ID NO: 618631 - DNA, 15 bp, Homo sapiens
acaagtctgtggttt

SEQ ID NO: 618632 - DNA, 15 bp, Homo sapiens
caagtctgtggttta

SEQ ID NO: 618633 - DNA, 15 bp, Homo sapiens
aagtctgtggtttat

SEQ ID NO: 618634 - DNA, 15 bp, Homo sapiens
agtctgtggtttatc

SEQ ID NO: 618635 - DNA, 15 bp, Homo sapiens
gtctgtggtttatca

SEQ ID NO: 618636 - DNA, 15 bp, Homo sapiens
tctgtggtttatcat

SEQ ID NO: 618637 - DNA, 15 bp, Homo sapiens
ctgtggtttatcatt

SEQ ID NO: 618638 - DNA, 15 bp, Homo sapiens
tgtggtttatcattt

SEQ ID NO: 618639 - DNA, 15 bp, Homo sapiens
gtggtttatcatttt

SEQ ID NO: 618640 - DNA, 15 bp, Homo sapiens
tggtttatcattttc

SEQ ID NO: 618641 - DNA, 15 bp, Homo sapiens
ggtttatcattttcc

SEQ ID NO: 618642 - DNA, 15 bp, Homo sapiens
gtttatcattttccc

SEQ ID NO: 618643 - DNA, 15 bp, Homo sapiens
tttatcattttccct

SEQ ID NO: 618644 - DNA, 15 bp, Homo sapiens
ttatcattttccctg

SEQ ID NO: 618645 - DNA, 15 bp, Homo sapiens
tatcattttccctgt

SEQ ID NO: 618646 - DNA, 15 bp, Homo sapiens
atcattttccctgtc

SEQ ID NO: 618647 - DNA, 15 bp, Homo sapiens
tcattttccctgtct

SEQ ID NO: 618648 - DNA, 15 bp, Homo sapiens
cattttccctgtctt

SEQ ID NO: 618649 - DNA, 15 bp, Homo sapiens
attttccctgtcttt

SEQ ID NO: 618650 - DNA, 15 bp, Homo sapiens
ttttccctgtctttc

SEQ ID NO: 618651 - DNA, 15 bp, Homo sapiens
tttccctgtctttct

SEQ ID NO: 618652 - DNA, 15 bp, Homo sapiens
ttccctgtctttcta

SEQ ID NO: 618653 - DNA, 15 bp, Homo sapiens
tccctgtctttctag

SEQ ID NO: 618654 - DNA, 15 bp, Homo sapiens
ccctgtctttctagg

SEQ ID NO: 618655 - DNA, 15 bp, Homo sapiens
cctgtctttctagga

SEQ ID NO: 618656 - DNA, 15 bp, Homo sapiens
ctgtctttctaggac

SEQ ID NO: 618657 - DNA, 15 bp, Homo sapiens
tgtctttctaggaca

SEQ ID NO: 618658 - DNA, 15 bp, Homo sapiens
gtctttctaggacaa

SEQ ID NO: 618659 - DNA, 15 bp, Homo sapiens
tctttctaggacaaa

SEQ ID NO: 618660 - DNA, 15 bp, Homo sapiens
ctttctaggacaaat

SEQ ID NO: 618661 - DNA, 15 bp, Homo sapiens
tttctaggacaaatg

SEQ ID NO: 618662 - DNA, 15 bp, Homo sapiens
ttctaggacaaatgg

SEQ ID NO: 618663 - DNA, 15 bp, Homo sapiens
tctaggacaaatggc

SEQ ID NO: 618664 - DNA, 15 bp, Homo sapiens
ctaggacaaatggcc

SEQ ID NO: 618665 - DNA, 15 bp, Homo sapiens
taggacaaatggccc

SEQ ID NO: 618666 - DNA, 15 bp, Homo sapiens
aggacaaatggccca

SEQ ID NO: 618667 - DNA, 15 bp, Homo sapiens
ggacaaatggcccac

SEQ ID NO: 618668 - DNA, 15 bp, Homo sapiens
gacaaatggcccaca

SEQ ID NO: 618669 - DNA, 15 bp, Homo sapiens
acaaatggcccacaa

SEQ ID NO: 618670 - DNA, 15 bp, Homo sapiens
caaatggcccacaac

SEQ ID NO: 618671 - DNA, 15 bp, Homo sapiens
aaatggcccacaaca

SEQ ID NO: 618672 - DNA, 15 bp, Homo sapiens
aatggcccacaacac

SEQ ID NO: 618673 - DNA, 15 bp, Homo sapiens
atggcccacaacact

SEQ ID NO: 618674 - DNA, 15 bp, Homo sapiens
tggcccacaacactg

SEQ ID NO: 618675 - DNA, 15 bp, Homo sapiens
ggcccacaacactga

SEQ ID NO: 618676 - DNA, 15 bp, Homo sapiens
gcccacaacactgag

SEQ ID NO: 618677 - DNA, 15 bp, Homo sapiens
cccacaacactgagc

SEQ ID NO: 618678 - DNA, 15 bp, Homo sapiens
ccacaacactgagca

SEQ ID NO: 618679 - DNA, 15 bp, Homo sapiens
cacaacactgagcag

SEQ ID NO: 618680 - DNA, 15 bp, Homo sapiens
acaacactgagcagg

SEQ ID NO: 618681 - DNA, 15 bp, Homo sapiens
caacactgagcaggc

SEQ ID NO: 618682 - DNA, 15 bp, Homo sapiens
aacactgagcaggca

SEQ ID NO: 618683 - DNA, 15 bp, Homo sapiens
acactgagcaggcat

SEQ ID NO: 618684 - DNA, 15 bp, Homo sapiens
cactgagcaggcatc

SEQ ID NO: 618685 - DNA, 15 bp, Homo sapiens
actgagcaggcatct

SEQ ID NO: 618686 - DNA, 15 bp, Homo sapiens
ctgagcaggcatctg

SEQ ID NO: 618687 - DNA, 15 bp, Homo sapiens
tgagcaggcatctgg

SEQ ID NO: 618688 - DNA, 15 bp, Homo sapiens
gagcaggcatctggg

SEQ ID NO: 618689 - DNA, 15 bp, Homo sapiens
agcaggcatctgggt

SEQ ID NO: 618690 - DNA, 15 bp, Homo sapiens
gcaggcatctgggtg

SEQ ID NO: 618691 - DNA, 15 bp, Homo sapiens
caggcatctgggtgg

SEQ ID NO: 618692 - DNA, 15 bp, Homo sapiens
aggcatctgggtggc

SEQ ID NO: 618693 - DNA, 15 bp, Homo sapiens
ggcatctgggtggcc

SEQ ID NO: 618694 - DNA, 15 bp, Homo sapiens
gcatctgggtggccc

SEQ ID NO: 618695 - DNA, 15 bp, Homo sapiens
catctgggtggcccc

SEQ ID NO: 618696 - DNA, 15 bp, Homo sapiens
atctgggtggcccct

SEQ ID NO: 618697 - DNA, 15 bp, Homo sapiens
tctgggtggcccctg

SEQ ID NO: 618698 - DNA, 15 bp, Homo sapiens
ctgggtggcccctgc

SEQ ID NO: 618699 - DNA, 15 bp, Homo sapiens
tgggtggcccctgcc

SEQ ID NO: 618700 - DNA, 15 bp, Homo sapiens
gggtggcccctgcca

SEQ ID NO: 618701 - DNA, 15 bp, Homo sapiens
ggtggcccctgccag

SEQ ID NO: 618702 - DNA, 15 bp, Homo sapiens
gtggcccctgccagg

SEQ ID NO: 618703 - DNA, 15 bp, Homo sapiens
tggcccctgccaggt

SEQ ID NO: 618704 - DNA, 15 bp, Homo sapiens
ggcccctgccaggtt

SEQ ID NO: 618705 - DNA, 15 bp, Homo sapiens
gcccctgccaggttg

SEQ ID NO: 618706 - DNA, 15 bp, Homo sapiens
cccctgccaggttga

SEQ ID NO: 618707 - DNA, 15 bp, Homo sapiens
ccctgccaggttgat

SEQ ID NO: 618708 - DNA, 15 bp, Homo sapiens
cctgccaggttgatg

SEQ ID NO: 618709 - DNA, 15 bp, Homo sapiens
ctgccaggttgatgc

SEQ ID NO: 618710 - DNA, 15 bp, Homo sapiens
tgccaggttgatgcc

SEQ ID NO: 618711 - DNA, 15 bp, Homo sapiens
gccaggttgatgccc

SEQ ID NO: 618712 - DNA, 15 bp, Homo sapiens
ccaggttgatgccca

SEQ ID NO: 618713 - DNA, 15 bp, Homo sapiens
caggttgatgcccac

SEQ ID NO: 618714 - DNA, 15 bp, Homo sapiens
aggttgatgcccact

SEQ ID NO: 618715 - DNA, 15 bp, Homo sapiens
ggttgatgcccactg

SEQ ID NO: 618716 - DNA, 15 bp, Homo sapiens
gttgatgcccactgc

SEQ ID NO: 618717 - DNA, 15 bp, Homo sapiens
ttgatgcccactgct

SEQ ID NO: 618718 - DNA, 15 bp, Homo sapiens
tgatgcccactgctc

SEQ ID NO: 618719 - DNA, 15 bp, Homo sapiens
gatgcccactgctct

SEQ ID NO: 618720 - DNA, 15 bp, Homo sapiens
atgcccactgctctg

SEQ ID NO: 618721 - DNA, 15 bp, Homo sapiens
tgcccactgctctgc

SEQ ID NO: 618722 - DNA, 15 bp, Homo sapiens
gcccactgctctgcc

SEQ ID NO: 618723 - DNA, 15 bp, Homo sapiens
cccactgctctgccg

SEQ ID NO: 618724 - DNA, 15 bp, Homo sapiens
ccactgctctgccgg

SEQ ID NO: 618725 - DNA, 15 bp, Homo sapiens
cactgctctgccggc

SEQ ID NO: 618726 - DNA, 15 bp, Homo sapiens
actgctctgccggcc

SEQ ID NO: 618727 - DNA, 15 bp, Homo sapiens
ctgctctgccggcca

SEQ ID NO: 618728 - DNA, 15 bp, Homo sapiens
tgctctgccggccac

SEQ ID NO: 618729 - DNA, 15 bp, Homo sapiens
gctctgccggccact

SEQ ID NO: 618730 - DNA, 15 bp, Homo sapiens
ctctgccggccactc

SEQ ID NO: 618731 - DNA, 15 bp, Homo sapiens
tctgccggccactcc

SEQ ID NO: 618732 - DNA, 15 bp, Homo sapiens
ctgccggccactcct

SEQ ID NO: 618733 - DNA, 15 bp, Homo sapiens
tgccggccactcctg

SEQ ID NO: 618734 - DNA, 15 bp, Homo sapiens
gccggccactcctgc

SEQ ID NO: 618735 - DNA, 15 bp, Homo sapiens
ccggccactcctgca

SEQ ID NO: 618736 - DNA, 15 bp, Homo sapiens
cggccactcctgcat

SEQ ID NO: 618737 - DNA, 15 bp, Homo sapiens
ggccactcctgcatc

SEQ ID NO: 618738 - DNA, 15 bp, Homo sapiens
gccactcctgcatct

SEQ ID NO: 618739 - DNA, 15 bp, Homo sapiens
ccactcctgcatctt

SEQ ID NO: 618740 - DNA, 15 bp, Homo sapiens
cactcctgcatcttt

SEQ ID NO: 618741 - DNA, 15 bp, Homo sapiens
actcctgcatcttta

SEQ ID NO: 618742 - DNA, 15 bp, Homo sapiens
ctcctgcatctttac

SEQ ID NO: 618743 - DNA, 15 bp, Homo sapiens
tcctgcatctttacc

SEQ ID NO: 618744 - DNA, 15 bp, Homo sapiens
cctgcatctttaccg

SEQ ID NO: 618745 - DNA, 15 bp, Homo sapiens
ctgcatctttaccgt

SEQ ID NO: 618746 - DNA, 15 bp, Homo sapiens
tgcatctttaccgtc

SEQ ID NO: 618747 - DNA, 15 bp, Homo sapiens
gcatctttaccgtct

SEQ ID NO: 618748 - DNA, 15 bp, Homo sapiens
catctttaccgtctc

SEQ ID NO: 618749 - DNA, 15 bp, Homo sapiens
atctttaccgtctca

SEQ ID NO: 618750 - DNA, 15 bp, Homo sapiens
tctttaccgtctcag

SEQ ID NO: 618751 - DNA, 15 bp, Homo sapiens
ctttaccgtctcagg

SEQ ID NO: 618752 - DNA, 15 bp, Homo sapiens
tttaccgtctcaggg

SEQ ID NO: 618753 - DNA, 15 bp, Homo sapiens
ttaccgtctcaggga

SEQ ID NO: 618754 - DNA, 15 bp, Homo sapiens
taccgtctcagggac

SEQ ID NO: 618755 - DNA, 15 bp, Homo sapiens
accgtctcagggact

SEQ ID NO: 618756 - DNA, 15 bp, Homo sapiens
ccgtctcagggactt

SEQ ID NO: 618757 - DNA, 15 bp, Homo sapiens
cgtctcagggacttc

SEQ ID NO: 618758 - DNA, 15 bp, Homo sapiens
gtctcagggacttcc

SEQ ID NO: 618759 - DNA, 15 bp, Homo sapiens
tctcagggacttcca

SEQ ID NO: 618760 - DNA, 15 bp, Homo sapiens
ctcagggacttccag

SEQ ID NO: 618761 - DNA, 15 bp, Homo sapiens
tcagggacttccagt

SEQ ID NO: 618762 - DNA, 15 bp, Homo sapiens
cagggacttccagtt

SEQ ID NO: 618763 - DNA, 15 bp, Homo sapiens
agggacttccagttg

SEQ ID NO: 618764 - DNA, 15 bp, Homo sapiens
gggacttccagttgc

SEQ ID NO: 618765 - DNA, 15 bp, Homo sapiens
ggacttccagttgct

SEQ ID NO: 618766 - DNA, 15 bp, Homo sapiens
gacttccagttgctg

SEQ ID NO: 618767 - DNA, 15 bp, Homo sapiens
acttccagttgctgc

SEQ ID NO: 618768 - DNA, 15 bp, Homo sapiens
cttccagttgctgcc

SEQ ID NO: 618769 - DNA, 15 bp, Homo sapiens
ttccagttgctgccc

SEQ ID NO: 618770 - DNA, 15 bp, Homo sapiens
tccagttgctgcccc

SEQ ID NO: 618771 - DNA, 15 bp, Homo sapiens
ccagttgctgcccct

SEQ ID NO: 618772 - DNA, 15 bp, Homo sapiens
cagttgctgcccctt

SEQ ID NO: 618773 - DNA, 15 bp, Homo sapiens
agttgctgccccttc

SEQ ID NO: 618774 - DNA, 15 bp, Homo sapiens
gttgctgccccttcc

SEQ ID NO: 618775 - DNA, 15 bp, Homo sapiens
ttgctgccccttccc

SEQ ID NO: 618776 - DNA, 15 bp, Homo sapiens
tgctgccccttccca

SEQ ID NO: 618777 - DNA, 15 bp, Homo sapiens
gctgccccttcccag

SEQ ID NO: 618778 - DNA, 15 bp, Homo sapiens
ctgccccttcccaga

SEQ ID NO: 618779 - DNA, 15 bp, Homo sapiens
tgccccttcccagag

SEQ ID NO: 618780 - DNA, 15 bp, Homo sapiens
gccccttcccagagg

SEQ ID NO: 618781 - DNA, 15 bp, Homo sapiens
ccccttcccagaggt

SEQ ID NO: 618782 - DNA, 15 bp, Homo sapiens
cccttcccagaggtg

SEQ ID NO: 618783 - DNA, 15 bp, Homo sapiens
ccttcccagaggtga

SEQ ID NO: 618784 - DNA, 15 bp, Homo sapiens
cttcccagaggtgag

SEQ ID NO: 618785 - DNA, 15 bp, Homo sapiens
ttcccagaggtgagc

SEQ ID NO: 618786 - DNA, 15 bp, Homo sapiens
tcccagaggtgagcg

SEQ ID NO: 618787 - DNA, 15 bp, Homo sapiens
cccagaggtgagcgt

SEQ ID NO: 618788 - DNA, 15 bp, Homo sapiens
ccagaggtgagcgtg

SEQ ID NO: 618789 - DNA, 15 bp, Homo sapiens
cagaggtgagcgtgc

SEQ ID NO: 618790 - DNA, 15 bp, Homo sapiens
agaggtgagcgtgcc

SEQ ID NO: 618791 - DNA, 15 bp, Homo sapiens
gaggtgagcgtgcca

SEQ ID NO: 618792 - DNA, 15 bp, Homo sapiens
aggtgagcgtgccat

SEQ ID NO: 618793 - DNA, 15 bp, Homo sapiens
ggtgagcgtgccatc

SEQ ID NO: 618794 - DNA, 15 bp, Homo sapiens
gtgagcgtgccatca

SEQ ID NO: 618795 - DNA, 15 bp, Homo sapiens
tgagcgtgccatcag

SEQ ID NO: 618796 - DNA, 15 bp, Homo sapiens
gagcgtgccatcagc

SEQ ID NO: 618797 - DNA, 15 bp, Homo sapiens
agcgtgccatcagcc

SEQ ID NO: 618798 - DNA, 15 bp, Homo sapiens
gcgtgccatcagccc

SEQ ID NO: 618799 - DNA, 15 bp, Homo sapiens
cgtgccatcagccca

SEQ ID NO: 618800 - DNA, 15 bp, Homo sapiens
gtgccatcagcccag

SEQ ID NO: 618801 - DNA, 15 bp, Homo sapiens
tgccatcagcccagt

SEQ ID NO: 618802 - DNA, 15 bp, Homo sapiens
gccatcagcccagtg

SEQ ID NO: 618803 - DNA, 15 bp, Homo sapiens
ccatcagcccagtgg

SEQ ID NO: 618804 - DNA, 15 bp, Homo sapiens
catcagcccagtgga

SEQ ID NO: 618805 - DNA, 15 bp, Homo sapiens
atcagcccagtggag

SEQ ID NO: 618806 - DNA, 15 bp, Homo sapiens
tcagcccagtggagg

SEQ ID NO: 618807 - DNA, 15 bp, Homo sapiens
cagcccagtggaggg

SEQ ID NO: 618808 - DNA, 15 bp, Homo sapiens
agcccagtggagggg

SEQ ID NO: 618809 - DNA, 15 bp, Homo sapiens
gcccagtggaggggc

SEQ ID NO: 618810 - DNA, 15 bp, Homo sapiens
cccagtggaggggct

SEQ ID NO: 618811 - DNA, 15 bp, Homo sapiens
ccagtggaggggctt

SEQ ID NO: 618812 - DNA, 15 bp, Homo sapiens
cagtggaggggctta

SEQ ID NO: 618813 - DNA, 15 bp, Homo sapiens
agtggaggggcttag

SEQ ID NO: 618814 - DNA, 15 bp, Homo sapiens
gtggaggggcttagg

SEQ ID NO: 618815 - DNA, 15 bp, Homo sapiens
tggaggggcttaggt

SEQ ID NO: 618816 - DNA, 15 bp, Homo sapiens
ggaggggcttaggtc

SEQ ID NO: 618817 - DNA, 15 bp, Homo sapiens
gaggggcttaggtct

SEQ ID NO: 618818 - DNA, 15 bp, Homo sapiens
aggggcttaggtctg

SEQ ID NO: 618819 - DNA, 15 bp, Homo sapiens
ggggcttaggtctgc

SEQ ID NO: 618820 - DNA, 15 bp, Homo sapiens
gggcttaggtctgca

SEQ ID NO: 618821 - DNA, 15 bp, Homo sapiens
ggcttaggtctgcat

SEQ ID NO: 618822 - DNA, 15 bp, Homo sapiens
gcttaggtctgcatt

SEQ ID NO: 618823 - DNA, 15 bp, Homo sapiens
cttaggtctgcattt

SEQ ID NO: 618824 - DNA, 15 bp, Homo sapiens
ttaggtctgcattta

SEQ ID NO: 618825 - DNA, 15 bp, Homo sapiens
taggtctgcatttat

SEQ ID NO: 618826 - DNA, 15 bp, Homo sapiens
aggtctgcatttatg

SEQ ID NO: 618827 - DNA, 15 bp, Homo sapiens
ggtctgcatttatgc

SEQ ID NO: 618828 - DNA, 15 bp, Homo sapiens
gtctgcatttatgct

SEQ ID NO: 618829 - DNA, 15 bp, Homo sapiens
tctgcatttatgctt

SEQ ID NO: 618830 - DNA, 15 bp, Homo sapiens
ctgcatttatgcttt

SEQ ID NO: 618831 - DNA, 15 bp, Homo sapiens
tgcatttatgctttt

SEQ ID NO: 618832 - DNA, 15 bp, Homo sapiens
gcatttatgcttttc

SEQ ID NO: 618833 - DNA, 15 bp, Homo sapiens
catttatgcttttcc

SEQ ID NO: 618834 - DNA, 15 bp, Homo sapiens
atttatgcttttcct

SEQ ID NO: 618835 - DNA, 15 bp, Homo sapiens
tttatgcttttcctg

SEQ ID NO: 618836 - DNA, 15 bp, Homo sapiens
ttatgcttttcctgc

SEQ ID NO: 618837 - DNA, 15 bp, Homo sapiens
tatgcttttcctgca

SEQ ID NO: 618838 - DNA, 15 bp, Homo sapiens
atgcttttcctgcac

SEQ ID NO: 618839 - DNA, 15 bp, Homo sapiens
tgcttttcctgcact

SEQ ID NO: 618840 - DNA, 15 bp, Homo sapiens
gcttttcctgcactc

SEQ ID NO: 618841 - DNA, 15 bp, Homo sapiens
cttttcctgcactct

SEQ ID NO: 618842 - DNA, 15 bp, Homo sapiens
ttttcctgcactcta

SEQ ID NO: 618843 - DNA, 15 bp, Homo sapiens
tttcctgcactctac

SEQ ID NO: 618844 - DNA, 15 bp, Homo sapiens
ttcctgcactctacc

SEQ ID NO: 618845 - DNA, 15 bp, Homo sapiens
tcctgcactctacca

SEQ ID NO: 618846 - DNA, 15 bp, Homo sapiens
cctgcactctaccac

SEQ ID NO: 618847 - DNA, 15 bp, Homo sapiens
ctgcactctaccacc

SEQ ID NO: 618848 - DNA, 15 bp, Homo sapiens
tgcactctaccacct

SEQ ID NO: 618849 - DNA, 15 bp, Homo sapiens
gcactctaccacctg

SEQ ID NO: 618850 - DNA, 15 bp, Homo sapiens
cactctaccacctgc

SEQ ID NO: 618851 - DNA, 15 bp, Homo sapiens
actctaccacctgca

SEQ ID NO: 618852 - DNA, 15 bp, Homo sapiens
ctctaccacctgcag

SEQ ID NO: 618853 - DNA, 15 bp, Homo sapiens
tctaccacctgcaga

SEQ ID NO: 618854 - DNA, 15 bp, Homo sapiens
ctaccacctgcagat

SEQ ID NO: 618855 - DNA, 15 bp, Homo sapiens
taccacctgcagata

SEQ ID NO: 618856 - DNA, 15 bp, Homo sapiens
accacctgcagataa

SEQ ID NO: 618857 - DNA, 15 bp, Homo sapiens
ccacctgcagataaa

SEQ ID NO: 618858 - DNA, 15 bp, Homo sapiens
cacctgcagataaaa

SEQ ID NO: 618859 - DNA, 15 bp, Homo sapiens
acctgcagataaaag

SEQ ID NO: 618860 - DNA, 15 bp, Homo sapiens
cctgcagataaaagg

SEQ ID NO: 618861 - DNA, 15 bp, Homo sapiens
ctgcagataaaaggg

SEQ ID NO: 618862 - DNA, 15 bp, Homo sapiens
tgcagataaaagggc

SEQ ID NO: 618863 - DNA, 15 bp, Homo sapiens
gcagataaaagggcc

SEQ ID NO: 618864 - DNA, 15 bp, Homo sapiens
cagataaaagggccc

SEQ ID NO: 618865 - DNA, 15 bp, Homo sapiens
agataaaagggccct

SEQ ID NO: 618866 - DNA, 15 bp, Homo sapiens
gataaaagggccctg

SEQ ID NO: 618867 - DNA, 15 bp, Homo sapiens
ataaaagggccctgc

SEQ ID NO: 618868 - DNA, 15 bp, Homo sapiens
taaaagggccctgcc

SEQ ID NO: 618869 - DNA, 15 bp, Homo sapiens
aaaagggccctgcca

SEQ ID NO: 618870 - DNA, 15 bp, Homo sapiens
aaagggccctgccaa

SEQ ID NO: 618871 - DNA, 15 bp, Homo sapiens
aagggccctgccaat

SEQ ID NO: 618872 - DNA, 15 bp, Homo sapiens
agggccctgccaatg

SEQ ID NO: 618873 - DNA, 15 bp, Homo sapiens
gggccctgccaatgc

SEQ ID NO: 618874 - DNA, 15 bp, Homo sapiens
ggccctgccaatgca

SEQ ID NO: 618875 - DNA, 15 bp, Homo sapiens
gccctgccaatgcag

SEQ ID NO: 618876 - DNA, 15 bp, Homo sapiens
ccctgccaatgcagg

SEQ ID NO: 618877 - DNA, 15 bp, Homo sapiens
cctgccaatgcaggt

SEQ ID NO: 618878 - DNA, 15 bp, Homo sapiens
ctgccaatgcaggtt

SEQ ID NO: 618879 - DNA, 15 bp, Homo sapiens
tgccaatgcaggttt

SEQ ID NO: 618880 - DNA, 15 bp, Homo sapiens
gccaatgcaggtttc

SEQ ID NO: 618881 - DNA, 15 bp, Homo sapiens
ccaatgcaggtttct

SEQ ID NO: 618882 - DNA, 15 bp, Homo sapiens
caatgcaggtttctc

SEQ ID NO: 618883 - DNA, 15 bp, Homo sapiens
aatgcaggtttctct

SEQ ID NO: 618884 - DNA, 15 bp, Homo sapiens
atgcaggtttctctg

SEQ ID NO: 618885 - DNA, 15 bp, Homo sapiens
tgcaggtttctctgt

SEQ ID NO: 618886 - DNA, 15 bp, Homo sapiens
gcaggtttctctgtg

SEQ ID NO: 618887 - DNA, 15 bp, Homo sapiens
caggtttctctgtgt

SEQ ID NO: 618888 - DNA, 15 bp, Homo sapiens
aggtttctctgtgtt

SEQ ID NO: 618889 - DNA, 15 bp, Homo sapiens
ggtttctctgtgttc

SEQ ID NO: 618890 - DNA, 15 bp, Homo sapiens
gtttctctgtgttcc

SEQ ID NO: 618891 - DNA, 15 bp, Homo sapiens
tttctctgtgttcca

SEQ ID NO: 618892 - DNA, 15 bp, Homo sapiens
ttctctgtgttccac

SEQ ID NO: 618893 - DNA, 15 bp, Homo sapiens
tctctgtgttccaca

SEQ ID NO: 618894 - DNA, 15 bp, Homo sapiens
ctctgtgttccacag

SEQ ID NO: 618895 - DNA, 15 bp, Homo sapiens
tctgtgttccacagg

SEQ ID NO: 618896 - DNA, 15 bp, Homo sapiens
ctgtgttccacaggc

SEQ ID NO: 618897 - DNA, 15 bp, Homo sapiens
tgtgttccacaggcc

SEQ ID NO: 618898 - DNA, 15 bp, Homo sapiens
gtgttccacaggccg

SEQ ID NO: 618899 - DNA, 15 bp, Homo sapiens
tgttccacaggccgt

SEQ ID NO: 618900 - DNA, 15 bp, Homo sapiens
gttccacaggccgtg

SEQ ID NO: 618901 - DNA, 15 bp, Homo sapiens
ttccacaggccgtgg

SEQ ID NO: 618902 - DNA, 15 bp, Homo sapiens
tccacaggccgtggc

SEQ ID NO: 618903 - DNA, 15 bp, Homo sapiens
ccacaggccgtggca

SEQ ID NO: 618904 - DNA, 15 bp, Homo sapiens
cacaggccgtggcat

SEQ ID NO: 618905 - DNA, 15 bp, Homo sapiens
acaggccgtggcatg

SEQ ID NO: 618906 - DNA, 15 bp, Homo sapiens
caggccgtggcatgc

SEQ ID NO: 618907 - DNA, 15 bp, Homo sapiens
aggccgtggcatgcg

SEQ ID NO: 618908 - DNA, 15 bp, Homo sapiens
ggccgtggcatgcgg

SEQ ID NO: 618909 - DNA, 15 bp, Homo sapiens
gccgtggcatgcggg

SEQ ID NO: 618910 - DNA, 15 bp, Homo sapiens
ccgtggcatgcgggg

SEQ ID NO: 618911 - DNA, 15 bp, Homo sapiens
cgtggcatgcgggga

SEQ ID NO: 618912 - DNA, 15 bp, Homo sapiens
gtggcatgcggggat

SEQ ID NO: 618913 - DNA, 15 bp, Homo sapiens
tggcatgcggggatg

SEQ ID NO: 618914 - DNA, 15 bp, Homo sapiens
ggcatgcggggatgg

SEQ ID NO: 618915 - DNA, 15 bp, Homo sapiens
gcatgcggggatggc

SEQ ID NO: 618916 - DNA, 15 bp, Homo sapiens
catgcggggatggcc

SEQ ID NO: 618917 - DNA, 15 bp, Homo sapiens
atgcggggatggcca

SEQ ID NO: 618918 - DNA, 15 bp, Homo sapiens
tgcggggatggccat

SEQ ID NO: 618919 - DNA, 15 bp, Homo sapiens
gcggggatggccatc

SEQ ID NO: 618920 - DNA, 15 bp, Homo sapiens
cggggatggccatca

SEQ ID NO: 618921 - DNA, 15 bp, Homo sapiens
ggggatggccatcac

SEQ ID NO: 618922 - DNA, 15 bp, Homo sapiens
gggatggccatcact

SEQ ID NO: 618923 - DNA, 15 bp, Homo sapiens
ggatggccatcactg

SEQ ID NO: 618924 - DNA, 15 bp, Homo sapiens
gatggccatcactgc

SEQ ID NO: 618925 - DNA, 15 bp, Homo sapiens
atggccatcactgct

SEQ ID NO: 618926 - DNA, 15 bp, Homo sapiens
tggccatcactgctg

SEQ ID NO: 618927 - DNA, 15 bp, Homo sapiens
ggccatcactgctgc

SEQ ID NO: 618928 - DNA, 15 bp, Homo sapiens
gccatcactgctgcc

SEQ ID NO: 618929 - DNA, 15 bp, Homo sapiens
ccatcactgctgccc

SEQ ID NO: 618930 - DNA, 15 bp, Homo sapiens
catcactgctgccca

SEQ ID NO: 618931 - DNA, 15 bp, Homo sapiens
atcactgctgcccac

SEQ ID NO: 618932 - DNA, 15 bp, Homo sapiens
tcactgctgcccacg

SEQ ID NO: 618933 - DNA, 15 bp, Homo sapiens
cactgctgcccacgg

SEQ ID NO: 618934 - DNA, 15 bp, Homo sapiens
actgctgcccacggg

SEQ ID NO: 618935 - DNA, 15 bp, Homo sapiens
ctgctgcccacgggg

SEQ ID NO: 618936 - DNA, 15 bp, Homo sapiens
tgctgcccacggggc

SEQ ID NO: 618937 - DNA, 15 bp, Homo sapiens
gctgcccacggggct

SEQ ID NO: 618938 - DNA, 15 bp, Homo sapiens
ctgcccacggggctt

SEQ ID NO: 618939 - DNA, 15 bp, Homo sapiens
tgcccacggggcttc

SEQ ID NO: 618940 - DNA, 15 bp, Homo sapiens
gcccacggggcttcc

SEQ ID NO: 618941 - DNA, 15 bp, Homo sapiens
cccacggggcttcca

SEQ ID NO: 618942 - DNA, 15 bp, Homo sapiens
ccacggggcttccac

SEQ ID NO: 618943 - DNA, 15 bp, Homo sapiens
cacggggcttccact

SEQ ID NO: 618944 - DNA, 15 bp, Homo sapiens
acggggcttccactg

SEQ ID NO: 618945 - DNA, 15 bp, Homo sapiens
cggggcttccactgc

SEQ ID NO: 618946 - DNA, 15 bp, Homo sapiens
ggggcttccactgca

SEQ ID NO: 618947 - DNA, 15 bp, Homo sapiens
gggcttccactgcag

SEQ ID NO: 618948 - DNA, 15 bp, Homo sapiens
ggcttccactgcagt

SEQ ID NO: 618949 - DNA, 15 bp, Homo sapiens
gcttccactgcagtg

SEQ ID NO: 618950 - DNA, 15 bp, Homo sapiens
cttccactgcagtgc

SEQ ID NO: 618951 - DNA, 15 bp, Homo sapiens
ttccactgcagtgca

SEQ ID NO: 618952 - DNA, 15 bp, Homo sapiens
tccactgcagtgcag

SEQ ID NO: 618953 - DNA, 15 bp, Homo sapiens
ccactgcagtgcaga

SEQ ID NO: 618954 - DNA, 15 bp, Homo sapiens
cactgcagtgcagac

SEQ ID NO: 618955 - DNA, 15 bp, Homo sapiens
actgcagtgcagacg

SEQ ID NO: 618956 - DNA, 15 bp, Homo sapiens
ctgcagtgcagacgg

SEQ ID NO: 618957 - DNA, 15 bp, Homo sapiens
tgcagtgcagacggg

SEQ ID NO: 618958 - DNA, 15 bp, Homo sapiens
gcagtgcagacgggc

SEQ ID NO: 618959 - DNA, 15 bp, Homo sapiens
cagtgcagacgggcg

SEQ ID NO: 618960 - DNA, 15 bp, Homo sapiens
agtgcagacgggcga

SEQ ID NO: 618961 - DNA, 15 bp, Homo sapiens
gtgcagacgggcgat

SEQ ID NO: 618962 - DNA, 15 bp, Homo sapiens
tgcagacgggcgatc

SEQ ID NO: 618963 - DNA, 15 bp, Homo sapiens
gcagacgggcgatcc

SEQ ID NO: 618964 - DNA, 15 bp, Homo sapiens
cagacgggcgatcct

SEQ ID NO: 618965 - DNA, 15 bp, Homo sapiens
agacgggcgatcctg

SEQ ID NO: 618966 - DNA, 15 bp, Homo sapiens
gacgggcgatcctgc

SEQ ID NO: 618967 - DNA, 15 bp, Homo sapiens
acgggcgatcctgct

SEQ ID NO: 618968 - DNA, 15 bp, Homo sapiens
cgggcgatcctgctt

SEQ ID NO: 618969 - DNA, 15 bp, Homo sapiens
gggcgatcctgcttc

SEQ ID NO: 618970 - DNA, 15 bp, Homo sapiens
ggcgatcctgcttcc

SEQ ID NO: 618971 - DNA, 15 bp, Homo sapiens
gcgatcctgcttcca

SEQ ID NO: 618972 - DNA, 15 bp, Homo sapiens
cgatcctgcttccaa

SEQ ID NO: 618973 - DNA, 15 bp, Homo sapiens
gatcctgcttccaaa

SEQ ID NO: 618974 - DNA, 15 bp, Homo sapiens
atcctgcttccaaag

SEQ ID NO: 618975 - DNA, 15 bp, Homo sapiens
tcctgcttccaaaga

SEQ ID NO: 618976 - DNA, 15 bp, Homo sapiens
cctgcttccaaagat

SEQ ID NO: 618977 - DNA, 15 bp, Homo sapiens
ctgcttccaaagatc

SEQ ID NO: 618978 - DNA, 15 bp, Homo sapiens
tgcttccaaagatca

SEQ ID NO: 618979 - DNA, 15 bp, Homo sapiens
gcttccaaagatcag

SEQ ID NO: 618980 - DNA, 15 bp, Homo sapiens
cttccaaagatcagg

SEQ ID NO: 618981 - DNA, 15 bp, Homo sapiens
ttccaaagatcaggt

SEQ ID NO: 618982 - DNA, 15 bp, Homo sapiens
tccaaagatcaggtg

SEQ ID NO: 618983 - DNA, 15 bp, Homo sapiens
ccaaagatcaggtgc

SEQ ID NO: 618984 - DNA, 15 bp, Homo sapiens
caaagatcaggtgca

SEQ ID NO: 618985 - DNA, 15 bp, Homo sapiens
aaagatcaggtgcag

SEQ ID NO: 618986 - DNA, 15 bp, Homo sapiens
aagatcaggtgcagc

SEQ ID NO: 618987 - DNA, 15 bp, Homo sapiens
agatcaggtgcagct

SEQ ID NO: 618988 - DNA, 15 bp, Homo sapiens
gatcaggtgcagctg

SEQ ID NO: 618989 - DNA, 15 bp, Homo sapiens
atcaggtgcagctgg

SEQ ID NO: 618990 - DNA, 15 bp, Homo sapiens
tcaggtgcagctggg

SEQ ID NO: 618991 - DNA, 15 bp, Homo sapiens
caggtgcagctgggg

SEQ ID NO: 618992 - DNA, 15 bp, Homo sapiens
aggtgcagctggggt

SEQ ID NO: 618993 - DNA, 15 bp, Homo sapiens
ggtgcagctggggtg

SEQ ID NO: 618994 - DNA, 15 bp, Homo sapiens
gtgcagctggggtgt

SEQ ID NO: 618995 - DNA, 15 bp, Homo sapiens
tgcagctggggtgtg

SEQ ID NO: 618996 - DNA, 15 bp, Homo sapiens
gcagctggggtgtgg

SEQ ID NO: 618997 - DNA, 15 bp, Homo sapiens
cagctggggtgtggg

SEQ ID NO: 618998 - DNA, 15 bp, Homo sapiens
agctggggtgtgggt

SEQ ID NO: 618999 - DNA, 15 bp, Homo sapiens
gctggggtgtgggtg

SEQ ID NO: 619000 - DNA, 15 bp, Homo sapiens
ctggggtgtgggtgc

SEQ ID NO: 619001 - DNA, 15 bp, Homo sapiens
tggggtgtgggtgca

SEQ ID NO: 619002 - DNA, 15 bp, Homo sapiens
ggggtgtgggtgcag

SEQ ID NO: 619003 - DNA, 15 bp, Homo sapiens
gggtgtgggtgcagg

SEQ ID NO: 619004 - DNA, 15 bp, Homo sapiens
ggtgtgggtgcaggg

SEQ ID NO: 619005 - DNA, 15 bp, Homo sapiens
gtgtgggtgcagggc

SEQ ID NO: 619006 - DNA, 15 bp, Homo sapiens
tgtgggtgcagggca

SEQ ID NO: 619007 - DNA, 15 bp, Homo sapiens
gtgggtgcagggcag

SEQ ID NO: 619008 - DNA, 15 bp, Homo sapiens
tgggtgcagggcagg

SEQ ID NO: 619009 - DNA, 15 bp, Homo sapiens
gggtgcagggcaggc

SEQ ID NO: 619010 - DNA, 15 bp, Homo sapiens
ggtgcagggcaggca

SEQ ID NO: 619011 - DNA, 15 bp, Homo sapiens
gtgcagggcaggcag

SEQ ID NO: 619012 - DNA, 15 bp, Homo sapiens
tgcagggcaggcaga

SEQ ID NO: 619013 - DNA, 15 bp, Homo sapiens
gcagggcaggcagac

SEQ ID NO: 619014 - DNA, 15 bp, Homo sapiens
cagggcaggcagacg

SEQ ID NO: 619015 - DNA, 15 bp, Homo sapiens
agggcaggcagacgg

SEQ ID NO: 619016 - DNA, 15 bp, Homo sapiens
gggcaggcagacggg

SEQ ID NO: 619017 - DNA, 15 bp, Homo sapiens
ggcaggcagacgggc

SEQ ID NO: 619018 - DNA, 15 bp, Homo sapiens
gcaggcagacgggca

SEQ ID NO: 619019 - DNA, 15 bp, Homo sapiens
caggcagacgggcag

SEQ ID NO: 619020 - DNA, 15 bp, Homo sapiens
aggcagacgggcagc

SEQ ID NO: 619021 - DNA, 15 bp, Homo sapiens
ggcagacgggcagca

SEQ ID NO: 619022 - DNA, 15 bp, Homo sapiens
gcagacgggcagcat

SEQ ID NO: 619023 - DNA, 15 bp, Homo sapiens
cagacgggcagcatg

SEQ ID NO: 619024 - DNA, 15 bp, Homo sapiens
agacgggcagcatgt

SEQ ID NO: 619025 - DNA, 15 bp, Homo sapiens
gacgggcagcatgtg

SEQ ID NO: 619026 - DNA, 15 bp, Homo sapiens
acgggcagcatgtgg

SEQ ID NO: 619027 - DNA, 15 bp, Homo sapiens
cgggcagcatgtgga

SEQ ID NO: 619028 - DNA, 15 bp, Homo sapiens
gggcagcatgtggag

SEQ ID NO: 619029 - DNA, 15 bp, Homo sapiens
ggcagcatgtggagt

SEQ ID NO: 619030 - DNA, 15 bp, Homo sapiens
gcagcatgtggagtc

SEQ ID NO: 619031 - DNA, 15 bp, Homo sapiens
cagcatgtggagtct

SEQ ID NO: 619032 - DNA, 15 bp, Homo sapiens
agcatgtggagtctg

SEQ ID NO: 619033 - DNA, 15 bp, Homo sapiens
gcatgtggagtctgg

SEQ ID NO: 619034 - DNA, 15 bp, Homo sapiens
catgtggagtctgga

SEQ ID NO: 619035 - DNA, 15 bp, Homo sapiens
atgtggagtctggaa

SEQ ID NO: 619036 - DNA, 15 bp, Homo sapiens
tgtggagtctggaac

SEQ ID NO: 619037 - DNA, 15 bp, Homo sapiens
gtggagtctggaacc

SEQ ID NO: 619038 - DNA, 15 bp, Homo sapiens
tggagtctggaaccc

SEQ ID NO: 619039 - DNA, 15 bp, Homo sapiens
ggagtctggaaccca

SEQ ID NO: 619040 - DNA, 15 bp, Homo sapiens
gagtctggaacccag

SEQ ID NO: 619041 - DNA, 15 bp, Homo sapiens
agtctggaacccagg

SEQ ID NO: 619042 - DNA, 15 bp, Homo sapiens
gtctggaacccagga

SEQ ID NO: 619043 - DNA, 15 bp, Homo sapiens
tctggaacccaggag

SEQ ID NO: 619044 - DNA, 15 bp, Homo sapiens
ctggaacccaggagc

SEQ ID NO: 619045 - DNA, 15 bp, Homo sapiens
tggaacccaggagcc

SEQ ID NO: 619046 - DNA, 15 bp, Homo sapiens
ggaacccaggagccc

SEQ ID NO: 619047 - DNA, 15 bp, Homo sapiens
gaacccaggagccca

SEQ ID NO: 619048 - DNA, 15 bp, Homo sapiens
aacccaggagcccag

SEQ ID NO: 619049 - DNA, 15 bp, Homo sapiens
acccaggagcccagc

SEQ ID NO: 619050 - DNA, 15 bp, Homo sapiens
cccaggagcccagct

SEQ ID NO: 619051 - DNA, 15 bp, Homo sapiens
ccaggagcccagctg

SEQ ID NO: 619052 - DNA, 15 bp, Homo sapiens
caggagcccagctgg

SEQ ID NO: 619053 - DNA, 15 bp, Homo sapiens
aggagcccagctggc

SEQ ID NO: 619054 - DNA, 15 bp, Homo sapiens
ggagcccagctggcg

SEQ ID NO: 619055 - DNA, 15 bp, Homo sapiens
gagcccagctggcgg

SEQ ID NO: 619056 - DNA, 15 bp, Homo sapiens
agcccagctggcggg

SEQ ID NO: 619057 - DNA, 15 bp, Homo sapiens
gcccagctggcgggg

SEQ ID NO: 619058 - DNA, 15 bp, Homo sapiens
cccagctggcggggg

SEQ ID NO: 619059 - DNA, 15 bp, Homo sapiens
ccagctggcgggggc

SEQ ID NO: 619060 - DNA, 15 bp, Homo sapiens
cagctggcgggggca

SEQ ID NO: 619061 - DNA, 15 bp, Homo sapiens
agctggcgggggcag

SEQ ID NO: 619062 - DNA, 15 bp, Homo sapiens
gctggcgggggcagc

SEQ ID NO: 619063 - DNA, 15 bp, Homo sapiens
ctggcgggggcagcc

SEQ ID NO: 619064 - DNA, 15 bp, Homo sapiens
tggcgggggcagccc

SEQ ID NO: 619065 - DNA, 15 bp, Homo sapiens
ggcgggggcagccct

SEQ ID NO: 619066 - DNA, 15 bp, Homo sapiens
gcgggggcagccctg

SEQ ID NO: 619067 - DNA, 15 bp, Homo sapiens
cgggggcagccctga

SEQ ID NO: 619068 - DNA, 15 bp, Homo sapiens
gggggcagccctgat

SEQ ID NO: 619069 - DNA, 15 bp, Homo sapiens
ggggcagccctgatt

SEQ ID NO: 619070 - DNA, 15 bp, Homo sapiens
gggcagccctgattc

SEQ ID NO: 619071 - DNA, 15 bp, Homo sapiens
ggcagccctgattcc

SEQ ID NO: 619072 - DNA, 15 bp, Homo sapiens
gcagccctgattcct

SEQ ID NO: 619073 - DNA, 15 bp, Homo sapiens
cagccctgattcctg

SEQ ID NO: 619074 - DNA, 15 bp, Homo sapiens
agccctgattcctgc

SEQ ID NO: 619075 - DNA, 15 bp, Homo sapiens
gccctgattcctgcc

SEQ ID NO: 619076 - DNA, 15 bp, Homo sapiens
ccctgattcctgccc

SEQ ID NO: 619077 - DNA, 15 bp, Homo sapiens
cctgattcctgccct

SEQ ID NO: 619078 - DNA, 15 bp, Homo sapiens
ctgattcctgccctt

SEQ ID NO: 619079 - DNA, 15 bp, Homo sapiens
tgattcctgcccttg

SEQ ID NO: 619080 - DNA, 15 bp, Homo sapiens
gattcctgcccttgt

SEQ ID NO: 619081 - DNA, 15 bp, Homo sapiens
attcctgcccttgtg

SEQ ID NO: 619082 - DNA, 15 bp, Homo sapiens
ttcctgcccttgtgc

SEQ ID NO: 619083 - DNA, 15 bp, Homo sapiens
tcctgcccttgtgcc

SEQ ID NO: 619084 - DNA, 15 bp, Homo sapiens
cctgcccttgtgccc

SEQ ID NO: 619085 - DNA, 15 bp, Homo sapiens
ctgcccttgtgccct

SEQ ID NO: 619086 - DNA, 15 bp, Homo sapiens
tgcccttgtgccctc

SEQ ID NO: 619087 - DNA, 15 bp, Homo sapiens
gcccttgtgccctca

SEQ ID NO: 619088 - DNA, 15 bp, Homo sapiens
cccttgtgccctcat

SEQ ID NO: 619089 - DNA, 15 bp, Homo sapiens
ccttgtgccctcatt

SEQ ID NO: 619090 - DNA, 15 bp, Homo sapiens
cttgtgccctcattc

SEQ ID NO: 619091 - DNA, 15 bp, Homo sapiens
ttgtgccctcattca

SEQ ID NO: 619092 - DNA, 15 bp, Homo sapiens
tgtgccctcattcat

SEQ ID NO: 619093 - DNA, 15 bp, Homo sapiens
gtgccctcattcatg

SEQ ID NO: 619094 - DNA, 15 bp, Homo sapiens
tgccctcattcatgt

SEQ ID NO: 619095 - DNA, 15 bp, Homo sapiens
gccctcattcatgtg

SEQ ID NO: 619096 - DNA, 15 bp, Homo sapiens
ccctcattcatgtgg

SEQ ID NO: 619097 - DNA, 15 bp, Homo sapiens
cctcattcatgtggc

SEQ ID NO: 619098 - DNA, 15 bp, Homo sapiens
ctcattcatgtggca

SEQ ID NO: 619099 - DNA, 15 bp, Homo sapiens
tcattcatgtggcat

SEQ ID NO: 619100 - DNA, 15 bp, Homo sapiens
cattcatgtggcatc

SEQ ID NO: 619101 - DNA, 15 bp, Homo sapiens
attcatgtggcatct

SEQ ID NO: 619102 - DNA, 15 bp, Homo sapiens
ttcatgtggcatctg

SEQ ID NO: 619103 - DNA, 15 bp, Homo sapiens
tcatgtggcatctgt

SEQ ID NO: 619104 - DNA, 15 bp, Homo sapiens
catgtggcatctgta

SEQ ID NO: 619105 - DNA, 15 bp, Homo sapiens
atgtggcatctgtac

SEQ ID NO: 619106 - DNA, 15 bp, Homo sapiens
tgtggcatctgtact

SEQ ID NO: 619107 - DNA, 15 bp, Homo sapiens
gtggcatctgtacta

SEQ ID NO: 619108 - DNA, 15 bp, Homo sapiens
tggcatctgtactaa

SEQ ID NO: 619109 - DNA, 15 bp, Homo sapiens
ggcatctgtactaag

SEQ ID NO: 619110 - DNA, 15 bp, Homo sapiens
gcatctgtactaagc

SEQ ID NO: 619111 - DNA, 15 bp, Homo sapiens
catctgtactaagca

SEQ ID NO: 619112 - DNA, 15 bp, Homo sapiens
atctgtactaagcaa

SEQ ID NO: 619113 - DNA, 15 bp, Homo sapiens
tctgtactaagcaac

SEQ ID NO: 619114 - DNA, 15 bp, Homo sapiens
ctgtactaagcaaca

SEQ ID NO: 619115 - DNA, 15 bp, Homo sapiens
tgtactaagcaacag

SEQ ID NO: 619116 - DNA, 15 bp, Homo sapiens
gtactaagcaacagc

SEQ ID NO: 619117 - DNA, 15 bp, Homo sapiens
tactaagcaacagcc

SEQ ID NO: 619118 - DNA, 15 bp, Homo sapiens
actaagcaacagccc

SEQ ID NO: 619119 - DNA, 15 bp, Homo sapiens
ctaagcaacagccct

SEQ ID NO: 619120 - DNA, 15 bp, Homo sapiens
taagcaacagccctg

SEQ ID NO: 619121 - DNA, 15 bp, Homo sapiens
aagcaacagccctgc

SEQ ID NO: 619122 - DNA, 15 bp, Homo sapiens
agcaacagccctgct

SEQ ID NO: 619123 - DNA, 15 bp, Homo sapiens
gcaacagccctgctg

SEQ ID NO: 619124 - DNA, 15 bp, Homo sapiens
caacagccctgctgt

SEQ ID NO: 619125 - DNA, 15 bp, Homo sapiens
aacagccctgctgtg

SEQ ID NO: 619126 - DNA, 15 bp, Homo sapiens
acagccctgctgtgg

SEQ ID NO: 619127 - DNA, 15 bp, Homo sapiens
cagccctgctgtgga

SEQ ID NO: 619128 - DNA, 15 bp, Homo sapiens
agccctgctgtggac

SEQ ID NO: 619129 - DNA, 15 bp, Homo sapiens
gccctgctgtggaca

SEQ ID NO: 619130 - DNA, 15 bp, Homo sapiens
ccctgctgtggacag

SEQ ID NO: 619131 - DNA, 15 bp, Homo sapiens
cctgctgtggacaga

SEQ ID NO: 619132 - DNA, 15 bp, Homo sapiens
ctgctgtggacagag

SEQ ID NO: 619133 - DNA, 15 bp, Homo sapiens
tgctgtggacagagg

SEQ ID NO: 619134 - DNA, 15 bp, Homo sapiens
gctgtggacagaggg

SEQ ID NO: 619135 - DNA, 15 bp, Homo sapiens
ctgtggacagagggg

SEQ ID NO: 619136 - DNA, 15 bp, Homo sapiens
tgtggacagaggggc

SEQ ID NO: 619137 - DNA, 15 bp, Homo sapiens
gtggacagaggggca

SEQ ID NO: 619138 - DNA, 15 bp, Homo sapiens
tggacagaggggcag

SEQ ID NO: 619139 - DNA, 15 bp, Homo sapiens
ggacagaggggcagc

SEQ ID NO: 619140 - DNA, 15 bp, Homo sapiens
gacagaggggcagca

SEQ ID NO: 619141 - DNA, 15 bp, Homo sapiens
acagaggggcagcac

SEQ ID NO: 619142 - DNA, 15 bp, Homo sapiens
cagaggggcagcact

SEQ ID NO: 619143 - DNA, 15 bp, Homo sapiens
agaggggcagcactg

SEQ ID NO: 619144 - DNA, 15 bp, Homo sapiens
gaggggcagcactgg

SEQ ID NO: 619145 - DNA, 15 bp, Homo sapiens
aggggcagcactggg

SEQ ID NO: 619146 - DNA, 15 bp, Homo sapiens
ggggcagcactgggg

SEQ ID NO: 619147 - DNA, 15 bp, Homo sapiens
gggcagcactgggga

SEQ ID NO: 619148 - DNA, 15 bp, Homo sapiens
ggcagcactggggat

SEQ ID NO: 619149 - DNA, 15 bp, Homo sapiens
gcagcactggggata

SEQ ID NO: 619150 - DNA, 15 bp, Homo sapiens
cagcactggggatag

SEQ ID NO: 619151 - DNA, 15 bp, Homo sapiens
agcactggggatagg

SEQ ID NO: 619152 - DNA, 15 bp, Homo sapiens
gcactggggatagga

SEQ ID NO: 619153 - DNA, 15 bp, Homo sapiens
cactggggataggag

SEQ ID NO: 619154 - DNA, 15 bp, Homo sapiens
actggggataggagg

SEQ ID NO: 619155 - DNA, 15 bp, Homo sapiens
ctggggataggaggg

SEQ ID NO: 619156 - DNA, 15 bp, Homo sapiens
tggggataggagggt

SEQ ID NO: 619157 - DNA, 15 bp, Homo sapiens
ggggataggagggtg

SEQ ID NO: 619158 - DNA, 15 bp, Homo sapiens
gggataggagggtgc

SEQ ID NO: 619159 - DNA, 15 bp, Homo sapiens
ggataggagggtgcg

SEQ ID NO: 619160 - DNA, 15 bp, Homo sapiens
gataggagggtgcgg

SEQ ID NO: 619161 - DNA, 15 bp, Homo sapiens
ataggagggtgcggg

SEQ ID NO: 619162 - DNA, 15 bp, Homo sapiens
taggagggtgcggga

SEQ ID NO: 619163 - DNA, 15 bp, Homo sapiens
aggagggtgcgggag

SEQ ID NO: 619164 - DNA, 15 bp, Homo sapiens
ggagggtgcgggaga

SEQ ID NO: 619165 - DNA, 15 bp, Homo sapiens
gagggtgcgggagaa

SEQ ID NO: 619166 - DNA, 15 bp, Homo sapiens
agggtgcgggagaaa

SEQ ID NO: 619167 - DNA, 15 bp, Homo sapiens
gggtgcgggagaaag

SEQ ID NO: 619168 - DNA, 15 bp, Homo sapiens
ggtgcgggagaaagt

SEQ ID NO: 619169 - DNA, 15 bp, Homo sapiens
gtgcgggagaaagtg

SEQ ID NO: 619170 - DNA, 15 bp, Homo sapiens
tgcgggagaaagtgc

SEQ ID NO: 619171 - DNA, 15 bp, Homo sapiens
gcgggagaaagtgca

SEQ ID NO: 619172 - DNA, 15 bp, Homo sapiens
cgggagaaagtgcaa

SEQ ID NO: 619173 - DNA, 15 bp, Homo sapiens
gggagaaagtgcaag

SEQ ID NO: 619174 - DNA, 15 bp, Homo sapiens
ggagaaagtgcaaga

SEQ ID NO: 619175 - DNA, 15 bp, Homo sapiens
gagaaagtgcaagac

SEQ ID NO: 619176 - DNA, 15 bp, Homo sapiens
agaaagtgcaagact

SEQ ID NO: 619177 - DNA, 15 bp, Homo sapiens
gaaagtgcaagactc

SEQ ID NO: 619178 - DNA, 15 bp, Homo sapiens
aaagtgcaagactcc

SEQ ID NO: 619179 - DNA, 15 bp, Homo sapiens
aagtgcaagactcca

SEQ ID NO: 619180 - DNA, 15 bp, Homo sapiens
agtgcaagactccag

SEQ ID NO: 619181 - DNA, 15 bp, Homo sapiens
gtgcaagactccagg

SEQ ID NO: 619182 - DNA, 15 bp, Homo sapiens
tgcaagactccaggt

SEQ ID NO: 619183 - DNA, 15 bp, Homo sapiens
gcaagactccaggtc

SEQ ID NO: 619184 - DNA, 15 bp, Homo sapiens
caagactccaggtcc

SEQ ID NO: 619185 - DNA, 15 bp, Homo sapiens
aagactccaggtcca

SEQ ID NO: 619186 - DNA, 15 bp, Homo sapiens
agactccaggtccag

SEQ ID NO: 619187 - DNA, 15 bp, Homo sapiens
gactccaggtccagg

SEQ ID NO: 619188 - DNA, 15 bp, Homo sapiens
actccaggtccaggc

SEQ ID NO: 619189 - DNA, 15 bp, Homo sapiens
ctccaggtccaggcg

SEQ ID NO: 619190 - DNA, 15 bp, Homo sapiens
tccaggtccaggcgt

SEQ ID NO: 619191 - DNA, 15 bp, Homo sapiens
ccaggtccaggcgtt

SEQ ID NO: 619192 - DNA, 15 bp, Homo sapiens
caggtccaggcgttg

SEQ ID NO: 619193 - DNA, 15 bp, Homo sapiens
aggtccaggcgttgt

SEQ ID NO: 619194 - DNA, 15 bp, Homo sapiens
ggtccaggcgttgtg

SEQ ID NO: 619195 - DNA, 15 bp, Homo sapiens
gtccaggcgttgtgg

SEQ ID NO: 619196 - DNA, 15 bp, Homo sapiens
tccaggcgttgtggg

SEQ ID NO: 619197 - DNA, 15 bp, Homo sapiens
ccaggcgttgtgggg

SEQ ID NO: 619198 - DNA, 15 bp, Homo sapiens
caggcgttgtggggg

SEQ ID NO: 619199 - DNA, 15 bp, Homo sapiens
aggcgttgtgggggt

SEQ ID NO: 619200 - DNA, 15 bp, Homo sapiens
ggcgttgtgggggtg

SEQ ID NO: 619201 - DNA, 15 bp, Homo sapiens
gcgttgtgggggtgg

SEQ ID NO: 619202 - DNA, 15 bp, Homo sapiens
cgttgtgggggtggg

SEQ ID NO: 619203 - DNA, 15 bp, Homo sapiens
gttgtgggggtgggg

SEQ ID NO: 619204 - DNA, 15 bp, Homo sapiens
ttgtgggggtgggga

SEQ ID NO: 619205 - DNA, 15 bp, Homo sapiens
tgtgggggtggggag

SEQ ID NO: 619206 - DNA, 15 bp, Homo sapiens
gtgggggtggggaga

SEQ ID NO: 619207 - DNA, 15 bp, Homo sapiens
tgggggtggggagag

SEQ ID NO: 619208 - DNA, 15 bp, Homo sapiens
gggggtggggagagg

SEQ ID NO: 619209 - DNA, 15 bp, Homo sapiens
ggggtggggagaggt

SEQ ID NO: 619210 - DNA, 15 bp, Homo sapiens
gggtggggagaggtc

SEQ ID NO: 619211 - DNA, 15 bp, Homo sapiens
ggtggggagaggtcg

SEQ ID NO: 619212 - DNA, 15 bp, Homo sapiens
gtggggagaggtcga

SEQ ID NO: 619213 - DNA, 15 bp, Homo sapiens
tggggagaggtcgag

SEQ ID NO: 619214 - DNA, 15 bp, Homo sapiens
ggggagaggtcgagc

SEQ ID NO: 619215 - DNA, 15 bp, Homo sapiens
gggagaggtcgagct

SEQ ID NO: 619216 - DNA, 15 bp, Homo sapiens
ggagaggtcgagctg

SEQ ID NO: 619217 - DNA, 15 bp, Homo sapiens
gagaggtcgagctgg

SEQ ID NO: 619218 - DNA, 15 bp, Homo sapiens
agaggtcgagctggg

SEQ ID NO: 619219 - DNA, 15 bp, Homo sapiens
gaggtcgagctgggc

SEQ ID NO: 619220 - DNA, 15 bp, Homo sapiens
aggtcgagctgggcc

SEQ ID NO: 619221 - DNA, 15 bp, Homo sapiens
ggtcgagctgggccg

SEQ ID NO: 619222 - DNA, 15 bp, Homo sapiens
gtcgagctgggccgg

SEQ ID NO: 619223 - DNA, 15 bp, Homo sapiens
tcgagctgggccggt

SEQ ID NO: 619224 - DNA, 15 bp, Homo sapiens
cgagctgggccggtc

SEQ ID NO: 619225 - DNA, 15 bp, Homo sapiens
gagctgggccggtct

SEQ ID NO: 619226 - DNA, 15 bp, Homo sapiens
agctgggccggtcta

SEQ ID NO: 619227 - DNA, 15 bp, Homo sapiens
gctgggccggtctaa

SEQ ID NO: 619228 - DNA, 15 bp, Homo sapiens
ctgggccggtctaat

SEQ ID NO: 619229 - DNA, 15 bp, Homo sapiens
tgggccggtctaata

SEQ ID NO: 619230 - DNA, 15 bp, Homo sapiens
gggccggtctaatac

SEQ ID NO: 619231 - DNA, 15 bp, Homo sapiens
ggccggtctaatacc

SEQ ID NO: 619232 - DNA, 15 bp, Homo sapiens
gccggtctaatacca

SEQ ID NO: 619233 - DNA, 15 bp, Homo sapiens
ccggtctaataccaa

SEQ ID NO: 619234 - DNA, 15 bp, Homo sapiens
cggtctaataccaac

SEQ ID NO: 619235 - DNA, 15 bp, Homo sapiens
ggtctaataccaacc

SEQ ID NO: 619236 - DNA, 15 bp, Homo sapiens
gtctaataccaaccc

SEQ ID NO: 619237 - DNA, 15 bp, Homo sapiens
tctaataccaaccca

SEQ ID NO: 619238 - DNA, 15 bp, Homo sapiens
ctaataccaacccat

SEQ ID NO: 619239 - DNA, 15 bp, Homo sapiens
taataccaacccatg

SEQ ID NO: 619240 - DNA, 15 bp, Homo sapiens
aataccaacccatgg

SEQ ID NO: 619241 - DNA, 15 bp, Homo sapiens
ataccaacccatggt

SEQ ID NO: 619242 - DNA, 15 bp, Homo sapiens
taccaacccatggtc

SEQ ID NO: 619243 - DNA, 15 bp, Homo sapiens
accaacccatggtca

SEQ ID NO: 619244 - DNA, 15 bp, Homo sapiens
ccaacccatggtcag

SEQ ID NO: 619245 - DNA, 15 bp, Homo sapiens
caacccatggtcagt

SEQ ID NO: 619246 - DNA, 15 bp, Homo sapiens
aacccatggtcagtg

SEQ ID NO: 619247 - DNA, 15 bp, Homo sapiens
acccatggtcagtgg

SEQ ID NO: 619248 - DNA, 15 bp, Homo sapiens
cccatggtcagtggg

SEQ ID NO: 619249 - DNA, 15 bp, Homo sapiens
ccatggtcagtgggt

SEQ ID NO: 619250 - DNA, 15 bp, Homo sapiens
catggtcagtgggtg

SEQ ID NO: 619251 - DNA, 15 bp, Homo sapiens
atggtcagtgggtgc

SEQ ID NO: 619252 - DNA, 15 bp, Homo sapiens
tggtcagtgggtgcc

SEQ ID NO: 619253 - DNA, 15 bp, Homo sapiens
ggtcagtgggtgccc

SEQ ID NO: 619254 - DNA, 15 bp, Homo sapiens
gtcagtgggtgcccc

SEQ ID NO: 619255 - DNA, 15 bp, Homo sapiens
tcagtgggtgcccct

SEQ ID NO: 619256 - DNA, 15 bp, Homo sapiens
cagtgggtgcccctt

SEQ ID NO: 619257 - DNA, 15 bp, Homo sapiens
agtgggtgccccttc

SEQ ID NO: 619258 - DNA, 15 bp, Homo sapiens
gtgggtgccccttcc

SEQ ID NO: 619259 - DNA, 15 bp, Homo sapiens
tgggtgccccttccc

SEQ ID NO: 619260 - DNA, 15 bp, Homo sapiens
gggtgccccttcccc

SEQ ID NO: 619261 - DNA, 15 bp, Homo sapiens
ggtgccccttcccca

SEQ ID NO: 619262 - DNA, 15 bp, Homo sapiens
gtgccccttccccat

SEQ ID NO: 619263 - DNA, 15 bp, Homo sapiens
tgccccttccccatg

SEQ ID NO: 619264 - DNA, 15 bp, Homo sapiens
gccccttccccatgc

SEQ ID NO: 619265 - DNA, 15 bp, Homo sapiens
ccccttccccatgcc

SEQ ID NO: 619266 - DNA, 15 bp, Homo sapiens
cccttccccatgcca

SEQ ID NO: 619267 - DNA, 15 bp, Homo sapiens
ccttccccatgccat

SEQ ID NO: 619268 - DNA, 15 bp, Homo sapiens
cttccccatgccatc

SEQ ID NO: 619269 - DNA, 15 bp, Homo sapiens
ttccccatgccatct

SEQ ID NO: 619270 - DNA, 15 bp, Homo sapiens
tccccatgccatctt

SEQ ID NO: 619271 - DNA, 15 bp, Homo sapiens
ccccatgccatcttg

SEQ ID NO: 619272 - DNA, 15 bp, Homo sapiens
cccatgccatcttgc

SEQ ID NO: 619273 - DNA, 15 bp, Homo sapiens
ccatgccatcttgct

SEQ ID NO: 619274 - DNA, 15 bp, Homo sapiens
catgccatcttgctg

SEQ ID NO: 619275 - DNA, 15 bp, Homo sapiens
atgccatcttgctga

SEQ ID NO: 619276 - DNA, 15 bp, Homo sapiens
tgccatcttgctgag

SEQ ID NO: 619277 - DNA, 15 bp, Homo sapiens
gccatcttgctgagg

SEQ ID NO: 619278 - DNA, 15 bp, Homo sapiens
ccatcttgctgaggg

SEQ ID NO: 619279 - DNA, 15 bp, Homo sapiens
catcttgctgaggga

SEQ ID NO: 619280 - DNA, 15 bp, Homo sapiens
atcttgctgagggag

SEQ ID NO: 619281 - DNA, 15 bp, Homo sapiens
tcttgctgagggagg

SEQ ID NO: 619282 - DNA, 15 bp, Homo sapiens
cttgctgagggaggg

SEQ ID NO: 619283 - DNA, 15 bp, Homo sapiens
ttgctgagggaggga

SEQ ID NO: 619284 - DNA, 15 bp, Homo sapiens
tgctgagggagggac

SEQ ID NO: 619285 - DNA, 15 bp, Homo sapiens
gctgagggagggact

SEQ ID NO: 619286 - DNA, 15 bp, Homo sapiens
ctgagggagggactg

SEQ ID NO: 619287 - DNA, 15 bp, Homo sapiens
tgagggagggactgg

SEQ ID NO: 619288 - DNA, 15 bp, Homo sapiens
gagggagggactgga

SEQ ID NO: 619289 - DNA, 15 bp, Homo sapiens
agggagggactggat

SEQ ID NO: 619290 - DNA, 15 bp, Homo sapiens
gggagggactggatt

SEQ ID NO: 619291 - DNA, 15 bp, Homo sapiens
ggagggactggattg

SEQ ID NO: 619292 - DNA, 15 bp, Homo sapiens
gagggactggattgt

SEQ ID NO: 619293 - DNA, 15 bp, Homo sapiens
agggactggattgtg

SEQ ID NO: 619294 - DNA, 15 bp, Homo sapiens
gggactggattgtga

SEQ ID NO: 619295 - DNA, 15 bp, Homo sapiens
ggactggattgtgag

SEQ ID NO: 619296 - DNA, 15 bp, Homo sapiens
gactggattgtgagg

SEQ ID NO: 619297 - DNA, 15 bp, Homo sapiens
actggattgtgagga

SEQ ID NO: 619298 - DNA, 15 bp, Homo sapiens
ctggattgtgaggag

SEQ ID NO: 619299 - DNA, 15 bp, Homo sapiens
tggattgtgaggagg

SEQ ID NO: 619300 - DNA, 15 bp, Homo sapiens
ggattgtgaggaggg

SEQ ID NO: 619301 - DNA, 15 bp, Homo sapiens
gattgtgaggagggt

SEQ ID NO: 619302 - DNA, 15 bp, Homo sapiens
attgtgaggagggtg

SEQ ID NO: 619303 - DNA, 15 bp, Homo sapiens
ttgtgaggagggtga

SEQ ID NO: 619304 - DNA, 15 bp, Homo sapiens
tgtgaggagggtgag

SEQ ID NO: 619305 - DNA, 15 bp, Homo sapiens
gtgaggagggtgagt

SEQ ID NO: 619306 - DNA, 15 bp, Homo sapiens
tgaggagggtgagtt

SEQ ID NO: 619307 - DNA, 15 bp, Homo sapiens
gaggagggtgagtta

SEQ ID NO: 619308 - DNA, 15 bp, Homo sapiens
aggagggtgagttag

SEQ ID NO: 619309 - DNA, 15 bp, Homo sapiens
ggagggtgagttagg

SEQ ID NO: 619310 - DNA, 15 bp, Homo sapiens
gagggtgagttaggc

SEQ ID NO: 619311 - DNA, 15 bp, Homo sapiens
agggtgagttaggcc

SEQ ID NO: 619312 - DNA, 15 bp, Homo sapiens
gggtgagttaggcct

SEQ ID NO: 619313 - DNA, 15 bp, Homo sapiens
ggtgagttaggcctg

SEQ ID NO: 619314 - DNA, 15 bp, Homo sapiens
gtgagttaggcctgc

SEQ ID NO: 619315 - DNA, 15 bp, Homo sapiens
tgagttaggcctgcc

SEQ ID NO: 619316 - DNA, 15 bp, Homo sapiens
gagttaggcctgcct

SEQ ID NO: 619317 - DNA, 15 bp, Homo sapiens
agttaggcctgccta

SEQ ID NO: 619318 - DNA, 15 bp, Homo sapiens
gttaggcctgcctag

SEQ ID NO: 619319 - DNA, 15 bp, Homo sapiens
ttaggcctgcctagg

SEQ ID NO: 619320 - DNA, 15 bp, Homo sapiens
taggcctgcctagga

SEQ ID NO: 619321 - DNA, 15 bp, Homo sapiens
aggcctgcctaggag

SEQ ID NO: 619322 - DNA, 15 bp, Homo sapiens
ggcctgcctaggaga

SEQ ID NO: 619323 - DNA, 15 bp, Homo sapiens
gcctgcctaggagat

SEQ ID NO: 619324 - DNA, 15 bp, Homo sapiens
cctgcctaggagatc

SEQ ID NO: 619325 - DNA, 15 bp, Homo sapiens
ctgcctaggagatca

SEQ ID NO: 619326 - DNA, 15 bp, Homo sapiens
tgcctaggagatcac

SEQ ID NO: 619327 - DNA, 15 bp, Homo sapiens
gcctaggagatcact

SEQ ID NO: 619328 - DNA, 15 bp, Homo sapiens
cctaggagatcactg

SEQ ID NO: 619329 - DNA, 15 bp, Homo sapiens
ctaggagatcactga

SEQ ID NO: 619330 - DNA, 15 bp, Homo sapiens
taggagatcactgag

SEQ ID NO: 619331 - DNA, 15 bp, Homo sapiens
aggagatcactgagc

SEQ ID NO: 619332 - DNA, 15 bp, Homo sapiens
ggagatcactgagcc

SEQ ID NO: 619333 - DNA, 15 bp, Homo sapiens
gagatcactgagcct

SEQ ID NO: 619334 - DNA, 15 bp, Homo sapiens
agatcactgagcctt

SEQ ID NO: 619335 - DNA, 15 bp, Homo sapiens
gatcactgagcctta

SEQ ID NO: 619336 - DNA, 15 bp, Homo sapiens
atcactgagccttag

SEQ ID NO: 619337 - DNA, 15 bp, Homo sapiens
tcactgagccttagt

SEQ ID NO: 619338 - DNA, 15 bp, Homo sapiens
cactgagccttagtg

SEQ ID NO: 619339 - DNA, 15 bp, Homo sapiens
actgagccttagtgt

SEQ ID NO: 619340 - DNA, 15 bp, Homo sapiens
ctgagccttagtgtc

SEQ ID NO: 619341 - DNA, 15 bp, Homo sapiens
tgagccttagtgtca

SEQ ID NO: 619342 - DNA, 15 bp, Homo sapiens
gagccttagtgtcac

SEQ ID NO: 619343 - DNA, 15 bp, Homo sapiens
agccttagtgtcacc

SEQ ID NO: 619344 - DNA, 15 bp, Homo sapiens
gccttagtgtcaccc

SEQ ID NO: 619345 - DNA, 15 bp, Homo sapiens
ccttagtgtcaccct

SEQ ID NO: 619346 - DNA, 15 bp, Homo sapiens
cttagtgtcaccctc

SEQ ID NO: 619347 - DNA, 15 bp, Homo sapiens
ttagtgtcaccctca

SEQ ID NO: 619348 - DNA, 15 bp, Homo sapiens
tagtgtcaccctcaa

SEQ ID NO: 619349 - DNA, 15 bp, Homo sapiens
agtgtcaccctcaaa

SEQ ID NO: 619350 - DNA, 15 bp, Homo sapiens
gtgtcaccctcaaac

SEQ ID NO: 619351 - DNA, 15 bp, Homo sapiens
tgtcaccctcaaacc

SEQ ID NO: 619352 - DNA, 15 bp, Homo sapiens
gtcaccctcaaaccc

SEQ ID NO: 619353 - DNA, 15 bp, Homo sapiens
tcaccctcaaacccc

SEQ ID NO: 619354 - DNA, 15 bp, Homo sapiens
caccctcaaacccca

SEQ ID NO: 619355 - DNA, 15 bp, Homo sapiens
accctcaaaccccag

SEQ ID NO: 619356 - DNA, 15 bp, Homo sapiens
ccctcaaaccccagt

SEQ ID NO: 619357 - DNA, 15 bp, Homo sapiens
cctcaaaccccagta

SEQ ID NO: 619358 - DNA, 15 bp, Homo sapiens
ctcaaaccccagtag

SEQ ID NO: 619359 - DNA, 15 bp, Homo sapiens
tcaaaccccagtagc

SEQ ID NO: 619360 - DNA, 15 bp, Homo sapiens
caaaccccagtagct

SEQ ID NO: 619361 - DNA, 15 bp, Homo sapiens
aaaccccagtagctg

SEQ ID NO: 619362 - DNA, 15 bp, Homo sapiens
aaccccagtagctgg

SEQ ID NO: 619363 - DNA, 15 bp, Homo sapiens
accccagtagctggg

SEQ ID NO: 619364 - DNA, 15 bp, Homo sapiens
ccccagtagctgggc

SEQ ID NO: 619365 - DNA, 15 bp, Homo sapiens
cccagtagctgggct

SEQ ID NO: 619366 - DNA, 15 bp, Homo sapiens
ccagtagctgggctt

SEQ ID NO: 619367 - DNA, 15 bp, Homo sapiens
cagtagctgggcttg

SEQ ID NO: 619368 - DNA, 15 bp, Homo sapiens
agtagctgggcttgc

SEQ ID NO: 619369 - DNA, 15 bp, Homo sapiens
gtagctgggcttgca

SEQ ID NO: 619370 - DNA, 15 bp, Homo sapiens
tagctgggcttgcag

SEQ ID NO: 619371 - DNA, 15 bp, Homo sapiens
agctgggcttgcagg

SEQ ID NO: 619372 - DNA, 15 bp, Homo sapiens
gctgggcttgcaggc

SEQ ID NO: 619373 - DNA, 15 bp, Homo sapiens
ctgggcttgcaggcc

SEQ ID NO: 619374 - DNA, 15 bp, Homo sapiens
tgggcttgcaggccc

SEQ ID NO: 619375 - DNA, 15 bp, Homo sapiens
gggcttgcaggccct

SEQ ID NO: 619376 - DNA, 15 bp, Homo sapiens
ggcttgcaggccctg

SEQ ID NO: 619377 - DNA, 15 bp, Homo sapiens
gcttgcaggccctgg

SEQ ID NO: 619378 - DNA, 15 bp, Homo sapiens
cttgcaggccctggt

SEQ ID NO: 619379 - DNA, 15 bp, Homo sapiens
ttgcaggccctggtg

SEQ ID NO: 619380 - DNA, 15 bp, Homo sapiens
tgcaggccctggtgc

SEQ ID NO: 619381 - DNA, 15 bp, Homo sapiens
gcaggccctggtgcc

SEQ ID NO: 619382 - DNA, 15 bp, Homo sapiens
caggccctggtgcca

SEQ ID NO: 619383 - DNA, 15 bp, Homo sapiens
aggccctggtgccac

SEQ ID NO: 619384 - DNA, 15 bp, Homo sapiens
ggccctggtgccacc

SEQ ID NO: 619385 - DNA, 15 bp, Homo sapiens
gccctggtgccacca

SEQ ID NO: 619386 - DNA, 15 bp, Homo sapiens
ccctggtgccaccag

SEQ ID NO: 619387 - DNA, 15 bp, Homo sapiens
cctggtgccaccagc

SEQ ID NO: 619388 - DNA, 15 bp, Homo sapiens
ctggtgccaccagct

SEQ ID NO: 619389 - DNA, 15 bp, Homo sapiens
tggtgccaccagctc

SEQ ID NO: 619390 - DNA, 15 bp, Homo sapiens
ggtgccaccagctcc

SEQ ID NO: 619391 - DNA, 15 bp, Homo sapiens
gtgccaccagctcct

SEQ ID NO: 619392 - DNA, 15 bp, Homo sapiens
tgccaccagctcctt

SEQ ID NO: 619393 - DNA, 15 bp, Homo sapiens
gccaccagctccttg

SEQ ID NO: 619394 - DNA, 15 bp, Homo sapiens
ccaccagctccttgt

SEQ ID NO: 619395 - DNA, 15 bp, Homo sapiens
caccagctccttgtg

SEQ ID NO: 619396 - DNA, 15 bp, Homo sapiens
accagctccttgtgt

SEQ ID NO: 619397 - DNA, 15 bp, Homo sapiens
ccagctccttgtgtg

SEQ ID NO: 619398 - DNA, 15 bp, Homo sapiens
cagctccttgtgtga

SEQ ID NO: 619399 - DNA, 15 bp, Homo sapiens
agctccttgtgtgat

SEQ ID NO: 619400 - DNA, 15 bp, Homo sapiens
gctccttgtgtgatg

SEQ ID NO: 619401 - DNA, 15 bp, Homo sapiens
ctccttgtgtgatgg

SEQ ID NO: 619402 - DNA, 15 bp, Homo sapiens
tccttgtgtgatggg

SEQ ID NO: 619403 - DNA, 15 bp, Homo sapiens
ccttgtgtgatgggg

SEQ ID NO: 619404 - DNA, 15 bp, Homo sapiens
cttgtgtgatggggg

SEQ ID NO: 619405 - DNA, 15 bp, Homo sapiens
ttgtgtgatggggga

SEQ ID NO: 619406 - DNA, 15 bp, Homo sapiens
tgtgtgatgggggag

SEQ ID NO: 619407 - DNA, 15 bp, Homo sapiens
gtgtgatgggggagt

SEQ ID NO: 619408 - DNA, 15 bp, Homo sapiens
tgtgatgggggagtc

SEQ ID NO: 619409 - DNA, 15 bp, Homo sapiens
gtgatgggggagtca

SEQ ID NO: 619410 - DNA, 15 bp, Homo sapiens
tgatgggggagtcac

SEQ ID NO: 619411 - DNA, 15 bp, Homo sapiens
gatgggggagtcacc

SEQ ID NO: 619412 - DNA, 15 bp, Homo sapiens
atgggggagtcacct

SEQ ID NO: 619413 - DNA, 15 bp, Homo sapiens
tgggggagtcacctt

SEQ ID NO: 619414 - DNA, 15 bp, Homo sapiens
gggggagtcaccttc

SEQ ID NO: 619415 - DNA, 15 bp, Homo sapiens
ggggagtcaccttcc

SEQ ID NO: 619416 - DNA, 15 bp, Homo sapiens
gggagtcaccttccc

SEQ ID NO: 619417 - DNA, 15 bp, Homo sapiens
ggagtcaccttccct

SEQ ID NO: 619418 - DNA, 15 bp, Homo sapiens
gagtcaccttccctg

SEQ ID NO: 619419 - DNA, 15 bp, Homo sapiens
agtcaccttccctga

SEQ ID NO: 619420 - DNA, 15 bp, Homo sapiens
gtcaccttccctgag

SEQ ID NO: 619421 - DNA, 15 bp, Homo sapiens
tcaccttccctgagt

SEQ ID NO: 619422 - DNA, 15 bp, Homo sapiens
caccttccctgagtg

SEQ ID NO: 619423 - DNA, 15 bp, Homo sapiens
accttccctgagtgg

SEQ ID NO: 619424 - DNA, 15 bp, Homo sapiens
ccttccctgagtggg

SEQ ID NO: 619425 - DNA, 15 bp, Homo sapiens
cttccctgagtgggc

SEQ ID NO: 619426 - DNA, 15 bp, Homo sapiens
ttccctgagtgggct

SEQ ID NO: 619427 - DNA, 15 bp, Homo sapiens
tccctgagtgggctg

SEQ ID NO: 619428 - DNA, 15 bp, Homo sapiens
ccctgagtgggctgg

SEQ ID NO: 619429 - DNA, 15 bp, Homo sapiens
cctgagtgggctggt

SEQ ID NO: 619430 - DNA, 15 bp, Homo sapiens
ctgagtgggctggta

SEQ ID NO: 619431 - DNA, 15 bp, Homo sapiens
tgagtgggctggtag

SEQ ID NO: 619432 - DNA, 15 bp, Homo sapiens
gagtgggctggtagt

SEQ ID NO: 619433 - DNA, 15 bp, Homo sapiens
agtgggctggtagta

SEQ ID NO: 619434 - DNA, 15 bp, Homo sapiens
gtgggctggtagtat

SEQ ID NO: 619435 - DNA, 15 bp, Homo sapiens
tgggctggtagtatc

SEQ ID NO: 619436 - DNA, 15 bp, Homo sapiens
gggctggtagtatcc

SEQ ID NO: 619437 - DNA, 15 bp, Homo sapiens
ggctggtagtatcct

SEQ ID NO: 619438 - DNA, 15 bp, Homo sapiens
gctggtagtatcctg

SEQ ID NO: 619439 - DNA, 15 bp, Homo sapiens
ctggtagtatcctgg

SEQ ID NO: 619440 - DNA, 15 bp, Homo sapiens
tggtagtatcctggg

SEQ ID NO: 619441 - DNA, 15 bp, Homo sapiens
ggtagtatcctgggt

SEQ ID NO: 619442 - DNA, 15 bp, Homo sapiens
gtagtatcctgggtc

SEQ ID NO: 619443 - DNA, 15 bp, Homo sapiens
tagtatcctgggtca

SEQ ID NO: 619444 - DNA, 15 bp, Homo sapiens
agtatcctgggtcat

SEQ ID NO: 619445 - DNA, 15 bp, Homo sapiens
gtatcctgggtcatc

SEQ ID NO: 619446 - DNA, 15 bp, Homo sapiens
tatcctgggtcatct

SEQ ID NO: 619447 - DNA, 15 bp, Homo sapiens
atcctgggtcatctt

SEQ ID NO: 619448 - DNA, 15 bp, Homo sapiens
tcctgggtcatcttg

SEQ ID NO: 619449 - DNA, 15 bp, Homo sapiens
cctgggtcatcttgt

SEQ ID NO: 619450 - DNA, 15 bp, Homo sapiens
ctgggtcatcttgtc

SEQ ID NO: 619451 - DNA, 15 bp, Homo sapiens
tgggtcatcttgtcc

SEQ ID NO: 619452 - DNA, 15 bp, Homo sapiens
gggtcatcttgtcca

SEQ ID NO: 619453 - DNA, 15 bp, Homo sapiens
ggtcatcttgtccac

SEQ ID NO: 619454 - DNA, 15 bp, Homo sapiens
gtcatcttgtccaca

SEQ ID NO: 619455 - DNA, 15 bp, Homo sapiens
tcatcttgtccacag

SEQ ID NO: 619456 - DNA, 15 bp, Homo sapiens
catcttgtccacagg

SEQ ID NO: 619457 - DNA, 15 bp, Homo sapiens
atcttgtccacaggt

SEQ ID NO: 619458 - DNA, 15 bp, Homo sapiens
tcttgtccacaggta

SEQ ID NO: 619459 - DNA, 15 bp, Homo sapiens
cttgtccacaggtaa

SEQ ID NO: 619460 - DNA, 15 bp, Homo sapiens
ttgtccacaggtaac

SEQ ID NO: 619461 - DNA, 15 bp, Homo sapiens
tgtccacaggtaaca

SEQ ID NO: 619462 - DNA, 15 bp, Homo sapiens
gtccacaggtaacaa

SEQ ID NO: 619463 - DNA, 15 bp, Homo sapiens
tccacaggtaacaac

SEQ ID NO: 619464 - DNA, 15 bp, Homo sapiens
ccacaggtaacaact

SEQ ID NO: 619465 - DNA, 15 bp, Homo sapiens
cacaggtaacaactc

SEQ ID NO: 619466 - DNA, 15 bp, Homo sapiens
acaggtaacaactcc

SEQ ID NO: 619467 - DNA, 15 bp, Homo sapiens
caggtaacaactccg

SEQ ID NO: 619468 - DNA, 15 bp, Homo sapiens
aggtaacaactccgt

SEQ ID NO: 619469 - DNA, 15 bp, Homo sapiens
ggtaacaactccgtg

SEQ ID NO: 619470 - DNA, 15 bp, Homo sapiens
gtaacaactccgtgg

SEQ ID NO: 619471 - DNA, 15 bp, Homo sapiens
taacaactccgtggg

SEQ ID NO: 619472 - DNA, 15 bp, Homo sapiens
aacaactccgtgggt

SEQ ID NO: 619473 - DNA, 15 bp, Homo sapiens
acaactccgtgggtg

SEQ ID NO: 619474 - DNA, 15 bp, Homo sapiens
caactccgtgggtgc

SEQ ID NO: 619475 - DNA, 15 bp, Homo sapiens
aactccgtgggtgcc

SEQ ID NO: 619476 - DNA, 15 bp, Homo sapiens
actccgtgggtgcca

SEQ ID NO: 619477 - DNA, 15 bp, Homo sapiens
ctccgtgggtgccat

SEQ ID NO: 619478 - DNA, 15 bp, Homo sapiens
tccgtgggtgccatc

SEQ ID NO: 619479 - DNA, 15 bp, Homo sapiens
ccgtgggtgccatcc

SEQ ID NO: 619480 - DNA, 15 bp, Homo sapiens
cgtgggtgccatcca

SEQ ID NO: 619481 - DNA, 15 bp, Homo sapiens
gtgggtgccatccag

SEQ ID NO: 619482 - DNA, 15 bp, Homo sapiens
tgggtgccatccagt

SEQ ID NO: 619483 - DNA, 15 bp, Homo sapiens
gggtgccatccagtg

SEQ ID NO: 619484 - DNA, 15 bp, Homo sapiens
ggtgccatccagtgc

SEQ ID NO: 619485 - DNA, 15 bp, Homo sapiens
gtgccatccagtgcc

SEQ ID NO: 619486 - DNA, 15 bp, Homo sapiens
tgccatccagtgccc

SEQ ID NO: 619487 - DNA, 15 bp, Homo sapiens
gccatccagtgccct

SEQ ID NO: 619488 - DNA, 15 bp, Homo sapiens
ccatccagtgccctg

SEQ ID NO: 619489 - DNA, 15 bp, Homo sapiens
catccagtgccctga

SEQ ID NO: 619490 - DNA, 15 bp, Homo sapiens
atccagtgccctgat

SEQ ID NO: 619491 - DNA, 15 bp, Homo sapiens
tccagtgccctgata

SEQ ID NO: 619492 - DNA, 15 bp, Homo sapiens
ccagtgccctgatag

SEQ ID NO: 619493 - DNA, 15 bp, Homo sapiens
cagtgccctgatagt

SEQ ID NO: 619494 - DNA, 15 bp, Homo sapiens
agtgccctgatagtc

SEQ ID NO: 619495 - DNA, 15 bp, Homo sapiens
gtgccctgatagtca

SEQ ID NO: 619496 - DNA, 15 bp, Homo sapiens
tgccctgatagtcag

SEQ ID NO: 619497 - DNA, 15 bp, Homo sapiens
gccctgatagtcagt

SEQ ID NO: 619498 - DNA, 15 bp, Homo sapiens
ccctgatagtcagtt

SEQ ID NO: 619499 - DNA, 15 bp, Homo sapiens
cctgatagtcagttc

SEQ ID NO: 619500 - DNA, 15 bp, Homo sapiens
ctgatagtcagttcg

SEQ ID NO: 619501 - DNA, 15 bp, Homo sapiens
tgatagtcagttcga

SEQ ID NO: 619502 - DNA, 15 bp, Homo sapiens
gatagtcagttcgaa

SEQ ID NO: 619503 - DNA, 15 bp, Homo sapiens
atagtcagttcgaat

SEQ ID NO: 619504 - DNA, 15 bp, Homo sapiens
tagtcagttcgaatg

SEQ ID NO: 619505 - DNA, 15 bp, Homo sapiens
agtcagttcgaatgc

SEQ ID NO: 619506 - DNA, 15 bp, Homo sapiens
gtcagttcgaatgcc

SEQ ID NO: 619507 - DNA, 15 bp, Homo sapiens
tcagttcgaatgccc

SEQ ID NO: 619508 - DNA, 15 bp, Homo sapiens
cagttcgaatgcccg

SEQ ID NO: 619509 - DNA, 15 bp, Homo sapiens
agttcgaatgcccgg

SEQ ID NO: 619510 - DNA, 15 bp, Homo sapiens
gttcgaatgcccgga

SEQ ID NO: 619511 - DNA, 15 bp, Homo sapiens
ttcgaatgcccggac

SEQ ID NO: 619512 - DNA, 15 bp, Homo sapiens
tcgaatgcccggact

SEQ ID NO: 619513 - DNA, 15 bp, Homo sapiens
cgaatgcccggactt

SEQ ID NO: 619514 - DNA, 15 bp, Homo sapiens
gaatgcccggacttc

SEQ ID NO: 619515 - DNA, 15 bp, Homo sapiens
aatgcccggacttct

SEQ ID NO: 619516 - DNA, 15 bp, Homo sapiens
atgcccggacttctc

SEQ ID NO: 619517 - DNA, 15 bp, Homo sapiens
tgcccggacttctcc

SEQ ID NO: 619518 - DNA, 15 bp, Homo sapiens
gcccggacttctcca

SEQ ID NO: 619519 - DNA, 15 bp, Homo sapiens
cccggacttctccac

SEQ ID NO: 619520 - DNA, 15 bp, Homo sapiens
ccggacttctccacg

SEQ ID NO: 619521 - DNA, 15 bp, Homo sapiens
cggacttctccacgt

SEQ ID NO: 619522 - DNA, 15 bp, Homo sapiens
ggacttctccacgtg

SEQ ID NO: 619523 - DNA, 15 bp, Homo sapiens
gacttctccacgtgc

SEQ ID NO: 619524 - DNA, 15 bp, Homo sapiens
acttctccacgtgct

SEQ ID NO: 619525 - DNA, 15 bp, Homo sapiens
cttctccacgtgctg

SEQ ID NO: 619526 - DNA, 15 bp, Homo sapiens
ttctccacgtgctgt

SEQ ID NO: 619527 - DNA, 15 bp, Homo sapiens
tctccacgtgctgtg

SEQ ID NO: 619528 - DNA, 15 bp, Homo sapiens
ctccacgtgctgtgt

SEQ ID NO: 619529 - DNA, 15 bp, Homo sapiens
tccacgtgctgtgtt

SEQ ID NO: 619530 - DNA, 15 bp, Homo sapiens
ccacgtgctgtgtta

SEQ ID NO: 619531 - DNA, 15 bp, Homo sapiens
cacgtgctgtgttat

SEQ ID NO: 619532 - DNA, 15 bp, Homo sapiens
acgtgctgtgttatg

SEQ ID NO: 619533 - DNA, 15 bp, Homo sapiens
cgtgctgtgttatgg

SEQ ID NO: 619534 - DNA, 15 bp, Homo sapiens
gtgctgtgttatggt

SEQ ID NO: 619535 - DNA, 15 bp, Homo sapiens
tgctgtgttatggtc

SEQ ID NO: 619536 - DNA, 15 bp, Homo sapiens
gctgtgttatggtcg

SEQ ID NO: 619537 - DNA, 15 bp, Homo sapiens
ctgtgttatggtcga

SEQ ID NO: 619538 - DNA, 15 bp, Homo sapiens
tgtgttatggtcgat

SEQ ID NO: 619539 - DNA, 15 bp, Homo sapiens
gtgttatggtcgatg

SEQ ID NO: 619540 - DNA, 15 bp, Homo sapiens
tgttatggtcgatgg

SEQ ID NO: 619541 - DNA, 15 bp, Homo sapiens
gttatggtcgatggc

SEQ ID NO: 619542 - DNA, 15 bp, Homo sapiens
ttatggtcgatggct

SEQ ID NO: 619543 - DNA, 15 bp, Homo sapiens
tatggtcgatggctc

SEQ ID NO: 619544 - DNA, 15 bp, Homo sapiens
atggtcgatggctcc

SEQ ID NO: 619545 - DNA, 15 bp, Homo sapiens
tggtcgatggctcct

SEQ ID NO: 619546 - DNA, 15 bp, Homo sapiens
ggtcgatggctcctg

SEQ ID NO: 619547 - DNA, 15 bp, Homo sapiens
gtcgatggctcctgg

SEQ ID NO: 619548 - DNA, 15 bp, Homo sapiens
tcgatggctcctggg

SEQ ID NO: 619549 - DNA, 15 bp, Homo sapiens
cgatggctcctgggg

SEQ ID NO: 619550 - DNA, 15 bp, Homo sapiens
gatggctcctggggg

SEQ ID NO: 619551 - DNA, 15 bp, Homo sapiens
atggctcctgggggt

SEQ ID NO: 619552 - DNA, 15 bp, Homo sapiens
tggctcctgggggtg

SEQ ID NO: 619553 - DNA, 15 bp, Homo sapiens
ggctcctgggggtgc

SEQ ID NO: 619554 - DNA, 15 bp, Homo sapiens
gctcctgggggtgct

SEQ ID NO: 619555 - DNA, 15 bp, Homo sapiens
ctcctgggggtgctg

SEQ ID NO: 619556 - DNA, 15 bp, Homo sapiens
tcctgggggtgctgc

SEQ ID NO: 619557 - DNA, 15 bp, Homo sapiens
cctgggggtgctgcc

SEQ ID NO: 619558 - DNA, 15 bp, Homo sapiens
ctgggggtgctgccc

SEQ ID NO: 619559 - DNA, 15 bp, Homo sapiens
tgggggtgctgcccc

SEQ ID NO: 619560 - DNA, 15 bp, Homo sapiens
gggggtgctgcccca

SEQ ID NO: 619561 - DNA, 15 bp, Homo sapiens
ggggtgctgccccat

SEQ ID NO: 619562 - DNA, 15 bp, Homo sapiens
gggtgctgccccatg

SEQ ID NO: 619563 - DNA, 15 bp, Homo sapiens
ggtgctgccccatgc

SEQ ID NO: 619564 - DNA, 15 bp, Homo sapiens
gtgctgccccatgcc

SEQ ID NO: 619565 - DNA, 15 bp, Homo sapiens
tgctgccccatgccc

SEQ ID NO: 619566 - DNA, 15 bp, Homo sapiens
gctgccccatgcccc

SEQ ID NO: 619567 - DNA, 15 bp, Homo sapiens
ctgccccatgcccca

SEQ ID NO: 619568 - DNA, 15 bp, Homo sapiens
tgccccatgccccag

SEQ ID NO: 619569 - DNA, 15 bp, Homo sapiens
gccccatgccccagg

SEQ ID NO: 619570 - DNA, 15 bp, Homo sapiens
ccccatgccccaggt

SEQ ID NO: 619571 - DNA, 15 bp, Homo sapiens
cccatgccccaggta

SEQ ID NO: 619572 - DNA, 15 bp, Homo sapiens
ccatgccccaggtac

SEQ ID NO: 619573 - DNA, 15 bp, Homo sapiens
catgccccaggtaca

SEQ ID NO: 619574 - DNA, 15 bp, Homo sapiens
atgccccaggtacaa

SEQ ID NO: 619575 - DNA, 15 bp, Homo sapiens
tgccccaggtacaaa

SEQ ID NO: 619576 - DNA, 15 bp, Homo sapiens
gccccaggtacaaat

SEQ ID NO: 619577 - DNA, 15 bp, Homo sapiens
ccccaggtacaaatc

SEQ ID NO: 619578 - DNA, 15 bp, Homo sapiens
cccaggtacaaatct

SEQ ID NO: 619579 - DNA, 15 bp, Homo sapiens
ccaggtacaaatctg

SEQ ID NO: 619580 - DNA, 15 bp, Homo sapiens
caggtacaaatctgg

SEQ ID NO: 619581 - DNA, 15 bp, Homo sapiens
aggtacaaatctggg

SEQ ID NO: 619582 - DNA, 15 bp, Homo sapiens
ggtacaaatctgggg

SEQ ID NO: 619583 - DNA, 15 bp, Homo sapiens
gtacaaatctggggg

SEQ ID NO: 619584 - DNA, 15 bp, Homo sapiens
tacaaatctggggga

SEQ ID NO: 619585 - DNA, 15 bp, Homo sapiens
acaaatctgggggag

SEQ ID NO: 619586 - DNA, 15 bp, Homo sapiens
caaatctgggggaga

SEQ ID NO: 619587 - DNA, 15 bp, Homo sapiens
aaatctgggggagat

SEQ ID NO: 619588 - DNA, 15 bp, Homo sapiens
aatctgggggagatg

SEQ ID NO: 619589 - DNA, 15 bp, Homo sapiens
atctgggggagatgg

SEQ ID NO: 619590 - DNA, 15 bp, Homo sapiens
tctgggggagatggg

SEQ ID NO: 619591 - DNA, 15 bp, Homo sapiens
ctgggggagatgggg

SEQ ID NO: 619592 - DNA, 15 bp, Homo sapiens
tgggggagatggggg

SEQ ID NO: 619593 - DNA, 15 bp, Homo sapiens
gggggagatgggggt

SEQ ID NO: 619594 - DNA, 15 bp, Homo sapiens
ggggagatgggggta

SEQ ID NO: 619595 - DNA, 15 bp, Homo sapiens
gggagatgggggtat

SEQ ID NO: 619596 - DNA, 15 bp, Homo sapiens
ggagatgggggtatg

SEQ ID NO: 619597 - DNA, 15 bp, Homo sapiens
gagatgggggtatgt

SEQ ID NO: 619598 - DNA, 15 bp, Homo sapiens
agatgggggtatgtg

SEQ ID NO: 619599 - DNA, 15 bp, Homo sapiens
gatgggggtatgtgg

SEQ ID NO: 619600 - DNA, 15 bp, Homo sapiens
atgggggtatgtgga

SEQ ID NO: 619601 - DNA, 15 bp, Homo sapiens
tgggggtatgtggag

SEQ ID NO: 619602 - DNA, 15 bp, Homo sapiens
gggggtatgtggagg

SEQ ID NO: 619603 - DNA, 15 bp, Homo sapiens
ggggtatgtggaggg

SEQ ID NO: 619604 - DNA, 15 bp, Homo sapiens
gggtatgtggaggga

SEQ ID NO: 619605 - DNA, 15 bp, Homo sapiens
ggtatgtggagggaa

SEQ ID NO: 619606 - DNA, 15 bp, Homo sapiens
gtatgtggagggaag

SEQ ID NO: 619607 - DNA, 15 bp, Homo sapiens
tatgtggagggaagt

SEQ ID NO: 619608 - DNA, 15 bp, Homo sapiens
atgtggagggaagtg

SEQ ID NO: 619609 - DNA, 15 bp, Homo sapiens
tgtggagggaagtgg

SEQ ID NO: 619610 - DNA, 15 bp, Homo sapiens
gtggagggaagtggg

SEQ ID NO: 619611 - DNA, 15 bp, Homo sapiens
tggagggaagtgggg

SEQ ID NO: 619612 - DNA, 15 bp, Homo sapiens
ggagggaagtggggg

SEQ ID NO: 619613 - DNA, 15 bp, Homo sapiens
gagggaagtgggggc

SEQ ID NO: 619614 - DNA, 15 bp, Homo sapiens
agggaagtgggggca

SEQ ID NO: 619615 - DNA, 15 bp, Homo sapiens
gggaagtgggggcag

SEQ ID NO: 619616 - DNA, 15 bp, Homo sapiens
ggaagtgggggcaga

SEQ ID NO: 619617 - DNA, 15 bp, Homo sapiens
gaagtgggggcagag

SEQ ID NO: 619618 - DNA, 15 bp, Homo sapiens
aagtgggggcagagt

SEQ ID NO: 619619 - DNA, 15 bp, Homo sapiens
agtgggggcagagtt

SEQ ID NO: 619620 - DNA, 15 bp, Homo sapiens
gtgggggcagagttg

SEQ ID NO: 619621 - DNA, 15 bp, Homo sapiens
tgggggcagagttgg

SEQ ID NO: 619622 - DNA, 15 bp, Homo sapiens
gggggcagagttggg

SEQ ID NO: 619623 - DNA, 15 bp, Homo sapiens
ggggcagagttgggg

SEQ ID NO: 619624 - DNA, 15 bp, Homo sapiens
gggcagagttggggg

SEQ ID NO: 619625 - DNA, 15 bp, Homo sapiens
ggcagagttgggggc

SEQ ID NO: 619626 - DNA, 15 bp, Homo sapiens
gcagagttgggggcc

SEQ ID NO: 619627 - DNA, 15 bp, Homo sapiens
cagagttgggggcca

SEQ ID NO: 619628 - DNA, 15 bp, Homo sapiens
agagttgggggccag

SEQ ID NO: 619629 - DNA, 15 bp, Homo sapiens
gagttgggggccagg

SEQ ID NO: 619630 - DNA, 15 bp, Homo sapiens
agttgggggccaggg

SEQ ID NO: 619631 - DNA, 15 bp, Homo sapiens
gttgggggccagggg

SEQ ID NO: 619632 - DNA, 15 bp, Homo sapiens
ttgggggccaggggc

SEQ ID NO: 619633 - DNA, 15 bp, Homo sapiens
tgggggccaggggca

SEQ ID NO: 619634 - DNA, 15 bp, Homo sapiens
gggggccaggggcag

SEQ ID NO: 619635 - DNA, 15 bp, Homo sapiens
ggggccaggggcagg

SEQ ID NO: 619636 - DNA, 15 bp, Homo sapiens
gggccaggggcaggg

SEQ ID NO: 619637 - DNA, 15 bp, Homo sapiens
ggccaggggcagggg

SEQ ID NO: 619638 - DNA, 15 bp, Homo sapiens
gccaggggcaggggg

SEQ ID NO: 619639 - DNA, 15 bp, Homo sapiens
ccaggggcagggggt

SEQ ID NO: 619640 - DNA, 15 bp, Homo sapiens
caggggcagggggtg

SEQ ID NO: 619641 - DNA, 15 bp, Homo sapiens
aggggcagggggtga

SEQ ID NO: 619642 - DNA, 15 bp, Homo sapiens
ggggcagggggtgaa

SEQ ID NO: 619643 - DNA, 15 bp, Homo sapiens
gggcagggggtgaag

SEQ ID NO: 619644 - DNA, 15 bp, Homo sapiens
ggcagggggtgaaga

SEQ ID NO: 619645 - DNA, 15 bp, Homo sapiens
gcagggggtgaagac

SEQ ID NO: 619646 - DNA, 15 bp, Homo sapiens
cagggggtgaagacg

SEQ ID NO: 619647 - DNA, 15 bp, Homo sapiens
agggggtgaagacgg

SEQ ID NO: 619648 - DNA, 15 bp, Homo sapiens
gggggtgaagacgga

SEQ ID NO: 619649 - DNA, 15 bp, Homo sapiens
ggggtgaagacggag

SEQ ID NO: 619650 - DNA, 15 bp, Homo sapiens
gggtgaagacggagt

SEQ ID NO: 619651 - DNA, 15 bp, Homo sapiens
ggtgaagacggagtc

SEQ ID NO: 619652 - DNA, 15 bp, Homo sapiens
gtgaagacggagtca

SEQ ID NO: 619653 - DNA, 15 bp, Homo sapiens
tgaagacggagtcag

SEQ ID NO: 619654 - DNA, 15 bp, Homo sapiens
gaagacggagtcagg

SEQ ID NO: 619655 - DNA, 15 bp, Homo sapiens
aagacggagtcagga

SEQ ID NO: 619656 - DNA, 15 bp, Homo sapiens
agacggagtcaggac

SEQ ID NO: 619657 - DNA, 15 bp, Homo sapiens
gacggagtcaggacc

SEQ ID NO: 619658 - DNA, 15 bp, Homo sapiens
acggagtcaggacca

SEQ ID NO: 619659 - DNA, 15 bp, Homo sapiens
cggagtcaggaccat

SEQ ID NO: 619660 - DNA, 15 bp, Homo sapiens
ggagtcaggaccatt

SEQ ID NO: 619661 - DNA, 15 bp, Homo sapiens
gagtcaggaccattt

SEQ ID NO: 619662 - DNA, 15 bp, Homo sapiens
agtcaggaccatttt

SEQ ID NO: 619663 - DNA, 15 bp, Homo sapiens
gtcaggaccattttt

SEQ ID NO: 619664 - DNA, 15 bp, Homo sapiens
tcaggaccatttttt

SEQ ID NO: 619665 - DNA, 15 bp, Homo sapiens
caggaccattttttc

SEQ ID NO: 619666 - DNA, 15 bp, Homo sapiens
aggaccattttttct

SEQ ID NO: 619667 - DNA, 15 bp, Homo sapiens
ggaccattttttctc

SEQ ID NO: 619668 - DNA, 15 bp, Homo sapiens
gaccattttttctca

SEQ ID NO: 619669 - DNA, 15 bp, Homo sapiens
accattttttctcag

SEQ ID NO: 619670 - DNA, 15 bp, Homo sapiens
ccattttttctcagg

SEQ ID NO: 619671 - DNA, 15 bp, Homo sapiens
cattttttctcaggc

SEQ ID NO: 619672 - DNA, 15 bp, Homo sapiens
attttttctcaggct

SEQ ID NO: 619673 - DNA, 15 bp, Homo sapiens
ttttttctcaggctt

SEQ ID NO: 619674 - DNA, 15 bp, Homo sapiens
tttttctcaggcttc

SEQ ID NO: 619675 - DNA, 15 bp, Homo sapiens
ttttctcaggcttcc

SEQ ID NO: 619676 - DNA, 15 bp, Homo sapiens
tttctcaggcttcct

SEQ ID NO: 619677 - DNA, 15 bp, Homo sapiens
ttctcaggcttcctg

SEQ ID NO: 619678 - DNA, 15 bp, Homo sapiens
tctcaggcttcctgc

SEQ ID NO: 619679 - DNA, 15 bp, Homo sapiens
ctcaggcttcctgct

SEQ ID NO: 619680 - DNA, 15 bp, Homo sapiens
tcaggcttcctgctg

SEQ ID NO: 619681 - DNA, 15 bp, Homo sapiens
caggcttcctgctgt

SEQ ID NO: 619682 - DNA, 15 bp, Homo sapiens
aggcttcctgctgtg

SEQ ID NO: 619683 - DNA, 15 bp, Homo sapiens
ggcttcctgctgtga

SEQ ID NO: 619684 - DNA, 15 bp, Homo sapiens
gcttcctgctgtgaa

SEQ ID NO: 619685 - DNA, 15 bp, Homo sapiens
cttcctgctgtgaag

SEQ ID NO: 619686 - DNA, 15 bp, Homo sapiens
ttcctgctgtgaaga

SEQ ID NO: 619687 - DNA, 15 bp, Homo sapiens
tcctgctgtgaagac

SEQ ID NO: 619688 - DNA, 15 bp, Homo sapiens
cctgctgtgaagaca

SEQ ID NO: 619689 - DNA, 15 bp, Homo sapiens
ctgctgtgaagacag

SEQ ID NO: 619690 - DNA, 15 bp, Homo sapiens
tgctgtgaagacagg

SEQ ID NO: 619691 - DNA, 15 bp, Homo sapiens
gctgtgaagacaggg

SEQ ID NO: 619692 - DNA, 15 bp, Homo sapiens
ctgtgaagacagggt

SEQ ID NO: 619693 - DNA, 15 bp, Homo sapiens
tgtgaagacagggtg

SEQ ID NO: 619694 - DNA, 15 bp, Homo sapiens
gtgaagacagggtgc

SEQ ID NO: 619695 - DNA, 15 bp, Homo sapiens
tgaagacagggtgca

SEQ ID NO: 619696 - DNA, 15 bp, Homo sapiens
gaagacagggtgcac

SEQ ID NO: 619697 - DNA, 15 bp, Homo sapiens
aagacagggtgcact

SEQ ID NO: 619698 - DNA, 15 bp, Homo sapiens
agacagggtgcactg

SEQ ID NO: 619699 - DNA, 15 bp, Homo sapiens
gacagggtgcactgc

SEQ ID NO: 619700 - DNA, 15 bp, Homo sapiens
acagggtgcactgct

SEQ ID NO: 619701 - DNA, 15 bp, Homo sapiens
cagggtgcactgctg

SEQ ID NO: 619702 - DNA, 15 bp, Homo sapiens
agggtgcactgctgt

SEQ ID NO: 619703 - DNA, 15 bp, Homo sapiens
gggtgcactgctgtc

SEQ ID NO: 619704 - DNA, 15 bp, Homo sapiens
ggtgcactgctgtcc

SEQ ID NO: 619705 - DNA, 15 bp, Homo sapiens
gtgcactgctgtccg

SEQ ID NO: 619706 - DNA, 15 bp, Homo sapiens
tgcactgctgtccgc

SEQ ID NO: 619707 - DNA, 15 bp, Homo sapiens
gcactgctgtccgca

SEQ ID NO: 619708 - DNA, 15 bp, Homo sapiens
cactgctgtccgcac

SEQ ID NO: 619709 - DNA, 15 bp, Homo sapiens
actgctgtccgcacg

SEQ ID NO: 619710 - DNA, 15 bp, Homo sapiens
ctgctgtccgcacgg

SEQ ID NO: 619711 - DNA, 15 bp, Homo sapiens
tgctgtccgcacggt

SEQ ID NO: 619712 - DNA, 15 bp, Homo sapiens
gctgtccgcacggtg

SEQ ID NO: 619713 - DNA, 15 bp, Homo sapiens
ctgtccgcacggtgc

SEQ ID NO: 619714 - DNA, 15 bp, Homo sapiens
tgtccgcacggtgcc

SEQ ID NO: 619715 - DNA, 15 bp, Homo sapiens
gtccgcacggtgcct

SEQ ID NO: 619716 - DNA, 15 bp, Homo sapiens
tccgcacggtgcctt

SEQ ID NO: 619717 - DNA, 15 bp, Homo sapiens
ccgcacggtgccttc

SEQ ID NO: 619718 - DNA, 15 bp, Homo sapiens
cgcacggtgccttct

SEQ ID NO: 619719 - DNA, 15 bp, Homo sapiens
gcacggtgccttctg

SEQ ID NO: 619720 - DNA, 15 bp, Homo sapiens
cacggtgccttctgc

SEQ ID NO: 619721 - DNA, 15 bp, Homo sapiens
acggtgccttctgcg

SEQ ID NO: 619722 - DNA, 15 bp, Homo sapiens
cggtgccttctgcga

SEQ ID NO: 619723 - DNA, 15 bp, Homo sapiens
ggtgccttctgcgac

SEQ ID NO: 619724 - DNA, 15 bp, Homo sapiens
gtgccttctgcgacc

SEQ ID NO: 619725 - DNA, 15 bp, Homo sapiens
tgccttctgcgacct

SEQ ID NO: 619726 - DNA, 15 bp, Homo sapiens
gccttctgcgacctg

SEQ ID NO: 619727 - DNA, 15 bp, Homo sapiens
ccttctgcgacctgg

SEQ ID NO: 619728 - DNA, 15 bp, Homo sapiens
cttctgcgacctggt

SEQ ID NO: 619729 - DNA, 15 bp, Homo sapiens
ttctgcgacctggtt

SEQ ID NO: 619730 - DNA, 15 bp, Homo sapiens
tctgcgacctggttc

SEQ ID NO: 619731 - DNA, 15 bp, Homo sapiens
ctgcgacctggttca

SEQ ID NO: 619732 - DNA, 15 bp, Homo sapiens
tgcgacctggttcac

SEQ ID NO: 619733 - DNA, 15 bp, Homo sapiens
gcgacctggttcaca

SEQ ID NO: 619734 - DNA, 15 bp, Homo sapiens
cgacctggttcacac

SEQ ID NO: 619735 - DNA, 15 bp, Homo sapiens
gacctggttcacacc

SEQ ID NO: 619736 - DNA, 15 bp, Homo sapiens
acctggttcacaccc

SEQ ID NO: 619737 - DNA, 15 bp, Homo sapiens
cctggttcacacccg

SEQ ID NO: 619738 - DNA, 15 bp, Homo sapiens
ctggttcacacccgc

SEQ ID NO: 619739 - DNA, 15 bp, Homo sapiens
tggttcacacccgct

SEQ ID NO: 619740 - DNA, 15 bp, Homo sapiens
ggttcacacccgctg

SEQ ID NO: 619741 - DNA, 15 bp, Homo sapiens
gttcacacccgctgc

SEQ ID NO: 619742 - DNA, 15 bp, Homo sapiens
ttcacacccgctgca

SEQ ID NO: 619743 - DNA, 15 bp, Homo sapiens
tcacacccgctgcat

SEQ ID NO: 619744 - DNA, 15 bp, Homo sapiens
cacacccgctgcatc

SEQ ID NO: 619745 - DNA, 15 bp, Homo sapiens
acacccgctgcatca

SEQ ID NO: 619746 - DNA, 15 bp, Homo sapiens
cacccgctgcatcac

SEQ ID NO: 619747 - DNA, 15 bp, Homo sapiens
acccgctgcatcaca

SEQ ID NO: 619748 - DNA, 15 bp, Homo sapiens
cccgctgcatcacac

SEQ ID NO: 619749 - DNA, 15 bp, Homo sapiens
ccgctgcatcacacc

SEQ ID NO: 619750 - DNA, 15 bp, Homo sapiens
cgctgcatcacaccc

SEQ ID NO: 619751 - DNA, 15 bp, Homo sapiens
gctgcatcacaccca

SEQ ID NO: 619752 - DNA, 15 bp, Homo sapiens
ctgcatcacacccac

SEQ ID NO: 619753 - DNA, 15 bp, Homo sapiens
tgcatcacacccacg

SEQ ID NO: 619754 - DNA, 15 bp, Homo sapiens
gcatcacacccacgg

SEQ ID NO: 619755 - DNA, 15 bp, Homo sapiens
catcacacccacggg

SEQ ID NO: 619756 - DNA, 15 bp, Homo sapiens
atcacacccacgggc

SEQ ID NO: 619757 - DNA, 15 bp, Homo sapiens
tcacacccacgggca

SEQ ID NO: 619758 - DNA, 15 bp, Homo sapiens
cacacccacgggcac

SEQ ID NO: 619759 - DNA, 15 bp, Homo sapiens
acacccacgggcacc

SEQ ID NO: 619760 - DNA, 15 bp, Homo sapiens
cacccacgggcaccc

SEQ ID NO: 619761 - DNA, 15 bp, Homo sapiens
acccacgggcaccca

SEQ ID NO: 619762 - DNA, 15 bp, Homo sapiens
cccacgggcacccac

SEQ ID NO: 619763 - DNA, 15 bp, Homo sapiens
ccacgggcacccacc

SEQ ID NO: 619764 - DNA, 15 bp, Homo sapiens
cacgggcacccaccc

SEQ ID NO: 619765 - DNA, 15 bp, Homo sapiens
acgggcacccacccc

SEQ ID NO: 619766 - DNA, 15 bp, Homo sapiens
cgggcacccaccccc

SEQ ID NO: 619767 - DNA, 15 bp, Homo sapiens
gggcacccaccccct

SEQ ID NO: 619768 - DNA, 15 bp, Homo sapiens
ggcacccaccccctg

SEQ ID NO: 619769 - DNA, 15 bp, Homo sapiens
gcacccaccccctgg

SEQ ID NO: 619770 - DNA, 15 bp, Homo sapiens
cacccaccccctggc

SEQ ID NO: 619771 - DNA, 15 bp, Homo sapiens
acccaccccctggca

SEQ ID NO: 619772 - DNA, 15 bp, Homo sapiens
cccaccccctggcaa

SEQ ID NO: 619773 - DNA, 15 bp, Homo sapiens
ccaccccctggcaaa

SEQ ID NO: 619774 - DNA, 15 bp, Homo sapiens
caccccctggcaaag

SEQ ID NO: 619775 - DNA, 15 bp, Homo sapiens
accccctggcaaaga

SEQ ID NO: 619776 - DNA, 15 bp, Homo sapiens
ccccctggcaaagaa

SEQ ID NO: 619777 - DNA, 15 bp, Homo sapiens
cccctggcaaagaag

SEQ ID NO: 619778 - DNA, 15 bp, Homo sapiens
ccctggcaaagaagc

SEQ ID NO: 619779 - DNA, 15 bp, Homo sapiens
cctggcaaagaagct

SEQ ID NO: 619780 - DNA, 15 bp, Homo sapiens
ctggcaaagaagctc

SEQ ID NO: 619781 - DNA, 15 bp, Homo sapiens
tggcaaagaagctcc

SEQ ID NO: 619782 - DNA, 15 bp, Homo sapiens
ggcaaagaagctccc

SEQ ID NO: 619783 - DNA, 15 bp, Homo sapiens
gcaaagaagctccct

SEQ ID NO: 619784 - DNA, 15 bp, Homo sapiens
caaagaagctccctg

SEQ ID NO: 619785 - DNA, 15 bp, Homo sapiens
aaagaagctccctgc

SEQ ID NO: 619786 - DNA, 15 bp, Homo sapiens
aagaagctccctgcc

SEQ ID NO: 619787 - DNA, 15 bp, Homo sapiens
agaagctccctgccc

SEQ ID NO: 619788 - DNA, 15 bp, Homo sapiens
gaagctccctgccca

SEQ ID NO: 619789 - DNA, 15 bp, Homo sapiens
aagctccctgcccag

SEQ ID NO: 619790 - DNA, 15 bp, Homo sapiens
agctccctgcccaga

SEQ ID NO: 619791 - DNA, 15 bp, Homo sapiens
gctccctgcccagag

SEQ ID NO: 619792 - DNA, 15 bp, Homo sapiens
ctccctgcccagagg

SEQ ID NO: 619793 - DNA, 15 bp, Homo sapiens
tccctgcccagagga

SEQ ID NO: 619794 - DNA, 15 bp, Homo sapiens
ccctgcccagaggac

SEQ ID NO: 619795 - DNA, 15 bp, Homo sapiens
cctgcccagaggact

SEQ ID NO: 619796 - DNA, 15 bp, Homo sapiens
ctgcccagaggacta

SEQ ID NO: 619797 - DNA, 15 bp, Homo sapiens
tgcccagaggactaa

SEQ ID NO: 619798 - DNA, 15 bp, Homo sapiens
gcccagaggactaac

SEQ ID NO: 619799 - DNA, 15 bp, Homo sapiens
cccagaggactaaca

SEQ ID NO: 619800 - DNA, 15 bp, Homo sapiens
ccagaggactaacag

SEQ ID NO: 619801 - DNA, 15 bp, Homo sapiens
cagaggactaacagg

SEQ ID NO: 619802 - DNA, 15 bp, Homo sapiens
agaggactaacaggg

SEQ ID NO: 619803 - DNA, 15 bp, Homo sapiens
gaggactaacagggc

SEQ ID NO: 619804 - DNA, 15 bp, Homo sapiens
aggactaacagggca

SEQ ID NO: 619805 - DNA, 15 bp, Homo sapiens
ggactaacagggcag

SEQ ID NO: 619806 - DNA, 15 bp, Homo sapiens
gactaacagggcagg

SEQ ID NO: 619807 - DNA, 15 bp, Homo sapiens
actaacagggcaggt

SEQ ID NO: 619808 - DNA, 15 bp, Homo sapiens
ctaacagggcaggtg

SEQ ID NO: 619809 - DNA, 15 bp, Homo sapiens
taacagggcaggtga

SEQ ID NO: 619810 - DNA, 15 bp, Homo sapiens
aacagggcaggtgag

SEQ ID NO: 619811 - DNA, 15 bp, Homo sapiens
acagggcaggtgagg

SEQ ID NO: 619812 - DNA, 15 bp, Homo sapiens
cagggcaggtgagga

SEQ ID NO: 619813 - DNA, 15 bp, Homo sapiens
agggcaggtgaggag

SEQ ID NO: 619814 - DNA, 15 bp, Homo sapiens
gggcaggtgaggagg

SEQ ID NO: 619815 - DNA, 15 bp, Homo sapiens
ggcaggtgaggaggt

SEQ ID NO: 619816 - DNA, 15 bp, Homo sapiens
gcaggtgaggaggtg

SEQ ID NO: 619817 - DNA, 15 bp, Homo sapiens
caggtgaggaggtgg

SEQ ID NO: 619818 - DNA, 15 bp, Homo sapiens
aggtgaggaggtggg

SEQ ID NO: 619819 - DNA, 15 bp, Homo sapiens
ggtgaggaggtggga

SEQ ID NO: 619820 - DNA, 15 bp, Homo sapiens
gtgaggaggtgggag

SEQ ID NO: 619821 - DNA, 15 bp, Homo sapiens
tgaggaggtgggaga

SEQ ID NO: 619822 - DNA, 15 bp, Homo sapiens
gaggaggtgggagag

SEQ ID NO: 619823 - DNA, 15 bp, Homo sapiens
aggaggtgggagagc

SEQ ID NO: 619824 - DNA, 15 bp, Homo sapiens
ggaggtgggagagca

SEQ ID NO: 619825 - DNA, 15 bp, Homo sapiens
gaggtgggagagcat

SEQ ID NO: 619826 - DNA, 15 bp, Homo sapiens
aggtgggagagcatc

SEQ ID NO: 619827 - DNA, 15 bp, Homo sapiens
ggtgggagagcatca

SEQ ID NO: 619828 - DNA, 15 bp, Homo sapiens
gtgggagagcatcag

SEQ ID NO: 619829 - DNA, 15 bp, Homo sapiens
tgggagagcatcagg

SEQ ID NO: 619830 - DNA, 15 bp, Homo sapiens
gggagagcatcaggc

SEQ ID NO: 619831 - DNA, 15 bp, Homo sapiens
ggagagcatcaggcc

SEQ ID NO: 619832 - DNA, 15 bp, Homo sapiens
gagagcatcaggcca

SEQ ID NO: 619833 - DNA, 15 bp, Homo sapiens
agagcatcaggccag

SEQ ID NO: 619834 - DNA, 15 bp, Homo sapiens
gagcatcaggccagg

SEQ ID NO: 619835 - DNA, 15 bp, Homo sapiens
agcatcaggccaggg

SEQ ID NO: 619836 - DNA, 15 bp, Homo sapiens
gcatcaggccagggg

SEQ ID NO: 619837 - DNA, 15 bp, Homo sapiens
catcaggccaggggc

SEQ ID NO: 619838 - DNA, 15 bp, Homo sapiens
atcaggccaggggct

SEQ ID NO: 619839 - DNA, 15 bp, Homo sapiens
tcaggccaggggctg

SEQ ID NO: 619840 - DNA, 15 bp, Homo sapiens
caggccaggggctgg

SEQ ID NO: 619841 - DNA, 15 bp, Homo sapiens
aggccaggggctggg

SEQ ID NO: 619842 - DNA, 15 bp, Homo sapiens
ggccaggggctgggg

SEQ ID NO: 619843 - DNA, 15 bp, Homo sapiens
gccaggggctggggc

SEQ ID NO: 619844 - DNA, 15 bp, Homo sapiens
ccaggggctggggcg

SEQ ID NO: 619845 - DNA, 15 bp, Homo sapiens
caggggctggggcgg

SEQ ID NO: 619846 - DNA, 15 bp, Homo sapiens
aggggctggggcggg

SEQ ID NO: 619847 - DNA, 15 bp, Homo sapiens
ggggctggggcgggg

SEQ ID NO: 619848 - DNA, 15 bp, Homo sapiens
gggctggggcggggc

SEQ ID NO: 619849 - DNA, 15 bp, Homo sapiens
ggctggggcggggcc

SEQ ID NO: 619850 - DNA, 15 bp, Homo sapiens
gctggggcggggcct

SEQ ID NO: 619851 - DNA, 15 bp, Homo sapiens
ctggggcggggcctc

SEQ ID NO: 619852 - DNA, 15 bp, Homo sapiens
tggggcggggcctca

SEQ ID NO: 619853 - DNA, 15 bp, Homo sapiens
ggggcggggcctcat

SEQ ID NO: 619854 - DNA, 15 bp, Homo sapiens
gggcggggcctcatt

SEQ ID NO: 619855 - DNA, 15 bp, Homo sapiens
ggcggggcctcattg

SEQ ID NO: 619856 - DNA, 15 bp, Homo sapiens
gcggggcctcattga

SEQ ID NO: 619857 - DNA, 15 bp, Homo sapiens
cggggcctcattgac

SEQ ID NO: 619858 - DNA, 15 bp, Homo sapiens
ggggcctcattgact

SEQ ID NO: 619859 - DNA, 15 bp, Homo sapiens
gggcctcattgactc

SEQ ID NO: 619860 - DNA, 15 bp, Homo sapiens
ggcctcattgactcc

SEQ ID NO: 619861 - DNA, 15 bp, Homo sapiens
gcctcattgactcca

SEQ ID NO: 619862 - DNA, 15 bp, Homo sapiens
cctcattgactccaa

SEQ ID NO: 619863 - DNA, 15 bp, Homo sapiens
ctcattgactccaag

SEQ ID NO: 619864 - DNA, 15 bp, Homo sapiens
tcattgactccaagt

SEQ ID NO: 619865 - DNA, 15 bp, Homo sapiens
cattgactccaagtg

SEQ ID NO: 619866 - DNA, 15 bp, Homo sapiens
attgactccaagtgt

SEQ ID NO: 619867 - DNA, 15 bp, Homo sapiens
ttgactccaagtgta

SEQ ID NO: 619868 - DNA, 15 bp, Homo sapiens
tgactccaagtgtag

SEQ ID NO: 619869 - DNA, 15 bp, Homo sapiens
gactccaagtgtagg

SEQ ID NO: 619870 - DNA, 15 bp, Homo sapiens
actccaagtgtagga

SEQ ID NO: 619871 - DNA, 15 bp, Homo sapiens
ctccaagtgtaggaa

SEQ ID NO: 619872 - DNA, 15 bp, Homo sapiens
tccaagtgtaggaaa

SEQ ID NO: 619873 - DNA, 15 bp, Homo sapiens
ccaagtgtaggaaaa

SEQ ID NO: 619874 - DNA, 15 bp, Homo sapiens
caagtgtaggaaaaa

SEQ ID NO: 619875 - DNA, 15 bp, Homo sapiens
aagtgtaggaaaaag

SEQ ID NO: 619876 - DNA, 15 bp, Homo sapiens
agtgtaggaaaaagt

SEQ ID NO: 619877 - DNA, 15 bp, Homo sapiens
gtgtaggaaaaagtt

SEQ ID NO: 619878 - DNA, 15 bp, Homo sapiens
tgtaggaaaaagttt

SEQ ID NO: 619879 - DNA, 15 bp, Homo sapiens
gtaggaaaaagtttc

SEQ ID NO: 619880 - DNA, 15 bp, Homo sapiens
taggaaaaagtttcc

SEQ ID NO: 619881 - DNA, 15 bp, Homo sapiens
aggaaaaagtttcct

SEQ ID NO: 619882 - DNA, 15 bp, Homo sapiens
ggaaaaagtttcctc

SEQ ID NO: 619883 - DNA, 15 bp, Homo sapiens
gaaaaagtttcctcc

SEQ ID NO: 619884 - DNA, 15 bp, Homo sapiens
aaaaagtttcctcca

SEQ ID NO: 619885 - DNA, 15 bp, Homo sapiens
aaaagtttcctccat

SEQ ID NO: 619886 - DNA, 15 bp, Homo sapiens
aaagtttcctccatc

SEQ ID NO: 619887 - DNA, 15 bp, Homo sapiens
aagtttcctccatcc

SEQ ID NO: 619888 - DNA, 15 bp, Homo sapiens
agtttcctccatcct

SEQ ID NO: 619889 - DNA, 15 bp, Homo sapiens
gtttcctccatcctg

SEQ ID NO: 619890 - DNA, 15 bp, Homo sapiens
tttcctccatcctgg

SEQ ID NO: 619891 - DNA, 15 bp, Homo sapiens
ttcctccatcctggc

SEQ ID NO: 619892 - DNA, 15 bp, Homo sapiens
tcctccatcctggct

SEQ ID NO: 619893 - DNA, 15 bp, Homo sapiens
cctccatcctggctg

SEQ ID NO: 619894 - DNA, 15 bp, Homo sapiens
ctccatcctggctgc

SEQ ID NO: 619895 - DNA, 15 bp, Homo sapiens
tccatcctggctgcc

SEQ ID NO: 619896 - DNA, 15 bp, Homo sapiens
ccatcctggctgccc

SEQ ID NO: 619897 - DNA, 15 bp, Homo sapiens
catcctggctgcccc

SEQ ID NO: 619898 - DNA, 15 bp, Homo sapiens
atcctggctgcccct

SEQ ID NO: 619899 - DNA, 15 bp, Homo sapiens
tcctggctgcccctc

SEQ ID NO: 619900 - DNA, 15 bp, Homo sapiens
cctggctgcccctca

SEQ ID NO: 619901 - DNA, 15 bp, Homo sapiens
ctggctgcccctcac

SEQ ID NO: 619902 - DNA, 15 bp, Homo sapiens
tggctgcccctcacg

SEQ ID NO: 619903 - DNA, 15 bp, Homo sapiens
ggctgcccctcacgt

SEQ ID NO: 619904 - DNA, 15 bp, Homo sapiens
gctgcccctcacgtt

SEQ ID NO: 619905 - DNA, 15 bp, Homo sapiens
ctgcccctcacgttt

SEQ ID NO: 619906 - DNA, 15 bp, Homo sapiens
tgcccctcacgtttg

SEQ ID NO: 619907 - DNA, 15 bp, Homo sapiens
gcccctcacgtttgc

SEQ ID NO: 619908 - DNA, 15 bp, Homo sapiens
cccctcacgtttgct

SEQ ID NO: 619909 - DNA, 15 bp, Homo sapiens
ccctcacgtttgctc

SEQ ID NO: 619910 - DNA, 15 bp, Homo sapiens
cctcacgtttgctcc

SEQ ID NO: 619911 - DNA, 15 bp, Homo sapiens
ctcacgtttgctcct

SEQ ID NO: 619912 - DNA, 15 bp, Homo sapiens
tcacgtttgctcctc

SEQ ID NO: 619913 - DNA, 15 bp, Homo sapiens
cacgtttgctcctct

SEQ ID NO: 619914 - DNA, 15 bp, Homo sapiens
acgtttgctcctctt

SEQ ID NO: 619915 - DNA, 15 bp, Homo sapiens
cgtttgctcctcttc

SEQ ID NO: 619916 - DNA, 15 bp, Homo sapiens
gtttgctcctcttcc

SEQ ID NO: 619917 - DNA, 15 bp, Homo sapiens
tttgctcctcttcca

SEQ ID NO: 619918 - DNA, 15 bp, Homo sapiens
ttgctcctcttccag

SEQ ID NO: 619919 - DNA, 15 bp, Homo sapiens
tgctcctcttccagt

SEQ ID NO: 619920 - DNA, 15 bp, Homo sapiens
gctcctcttccagtg

SEQ ID NO: 619921 - DNA, 15 bp, Homo sapiens
ctcctcttccagtgg

SEQ ID NO: 619922 - DNA, 15 bp, Homo sapiens
tcctcttccagtggc

SEQ ID NO: 619923 - DNA, 15 bp, Homo sapiens
cctcttccagtggcc

SEQ ID NO: 619924 - DNA, 15 bp, Homo sapiens
ctcttccagtggcct

SEQ ID NO: 619925 - DNA, 15 bp, Homo sapiens
tcttccagtggcctt

SEQ ID NO: 619926 - DNA, 15 bp, Homo sapiens
cttccagtggccttg

SEQ ID NO: 619927 - DNA, 15 bp, Homo sapiens
ttccagtggccttgt

SEQ ID NO: 619928 - DNA, 15 bp, Homo sapiens
tccagtggccttgtc

SEQ ID NO: 619929 - DNA, 15 bp, Homo sapiens
ccagtggccttgtcc

SEQ ID NO: 619930 - DNA, 15 bp, Homo sapiens
cagtggccttgtcca

SEQ ID NO: 619931 - DNA, 15 bp, Homo sapiens
agtggccttgtccag

SEQ ID NO: 619932 - DNA, 15 bp, Homo sapiens
gtggccttgtccagc

SEQ ID NO: 619933 - DNA, 15 bp, Homo sapiens
tggccttgtccagct

SEQ ID NO: 619934 - DNA, 15 bp, Homo sapiens
ggccttgtccagctc

SEQ ID NO: 619935 - DNA, 15 bp, Homo sapiens
gccttgtccagctcg

SEQ ID NO: 619936 - DNA, 15 bp, Homo sapiens
ccttgtccagctcgg

SEQ ID NO: 619937 - DNA, 15 bp, Homo sapiens
cttgtccagctcggt

SEQ ID NO: 619938 - DNA, 15 bp, Homo sapiens
ttgtccagctcggtc

SEQ ID NO: 619939 - DNA, 15 bp, Homo sapiens
tgtccagctcggtca

SEQ ID NO: 619940 - DNA, 15 bp, Homo sapiens
gtccagctcggtcat

SEQ ID NO: 619941 - DNA, 15 bp, Homo sapiens
tccagctcggtcatg

SEQ ID NO: 619942 - DNA, 15 bp, Homo sapiens
ccagctcggtcatgt

SEQ ID NO: 619943 - DNA, 15 bp, Homo sapiens
cagctcggtcatgtg

SEQ ID NO: 619944 - DNA, 15 bp, Homo sapiens
agctcggtcatgtgt

SEQ ID NO: 619945 - DNA, 15 bp, Homo sapiens
gctcggtcatgtgtc

SEQ ID NO: 619946 - DNA, 15 bp, Homo sapiens
ctcggtcatgtgtcc

SEQ ID NO: 619947 - DNA, 15 bp, Homo sapiens
tcggtcatgtgtccg

SEQ ID NO: 619948 - DNA, 15 bp, Homo sapiens
cggtcatgtgtccgg

SEQ ID NO: 619949 - DNA, 15 bp, Homo sapiens
ggtcatgtgtccgga

SEQ ID NO: 619950 - DNA, 15 bp, Homo sapiens
gtcatgtgtccggac

SEQ ID NO: 619951 - DNA, 15 bp, Homo sapiens
tcatgtgtccggacg

SEQ ID NO: 619952 - DNA, 15 bp, Homo sapiens
catgtgtccggacgc

SEQ ID NO: 619953 - DNA, 15 bp, Homo sapiens
atgtgtccggacgca

SEQ ID NO: 619954 - DNA, 15 bp, Homo sapiens
tgtgtccggacgcac

SEQ ID NO: 619955 - DNA, 15 bp, Homo sapiens
gtgtccggacgcacg

SEQ ID NO: 619956 - DNA, 15 bp, Homo sapiens
tgtccggacgcacgg

SEQ ID NO: 619957 - DNA, 15 bp, Homo sapiens
gtccggacgcacggt

SEQ ID NO: 619958 - DNA, 15 bp, Homo sapiens
tccggacgcacggtc

SEQ ID NO: 619959 - DNA, 15 bp, Homo sapiens
ccggacgcacggtcc

SEQ ID NO: 619960 - DNA, 15 bp, Homo sapiens
cggacgcacggtccc

SEQ ID NO: 619961 - DNA, 15 bp, Homo sapiens
ggacgcacggtcccg

SEQ ID NO: 619962 - DNA, 15 bp, Homo sapiens
gacgcacggtcccgg

SEQ ID NO: 619963 - DNA, 15 bp, Homo sapiens
acgcacggtcccggt

SEQ ID NO: 619964 - DNA, 15 bp, Homo sapiens
cgcacggtcccggtg

SEQ ID NO: 619965 - DNA, 15 bp, Homo sapiens
gcacggtcccggtgc

SEQ ID NO: 619966 - DNA, 15 bp, Homo sapiens
cacggtcccggtgcc

SEQ ID NO: 619967 - DNA, 15 bp, Homo sapiens
acggtcccggtgccc

SEQ ID NO: 619968 - DNA, 15 bp, Homo sapiens
cggtcccggtgccct

SEQ ID NO: 619969 - DNA, 15 bp, Homo sapiens
ggtcccggtgccctg

SEQ ID NO: 619970 - DNA, 15 bp, Homo sapiens
gtcccggtgccctga

SEQ ID NO: 619971 - DNA, 15 bp, Homo sapiens
tcccggtgccctgat

SEQ ID NO: 619972 - DNA, 15 bp, Homo sapiens
cccggtgccctgatg

SEQ ID NO: 619973 - DNA, 15 bp, Homo sapiens
ccggtgccctgatgg

SEQ ID NO: 619974 - DNA, 15 bp, Homo sapiens
cggtgccctgatggt

SEQ ID NO: 619975 - DNA, 15 bp, Homo sapiens
ggtgccctgatggtt

SEQ ID NO: 619976 - DNA, 15 bp, Homo sapiens
gtgccctgatggttc

SEQ ID NO: 619977 - DNA, 15 bp, Homo sapiens
tgccctgatggttct

SEQ ID NO: 619978 - DNA, 15 bp, Homo sapiens
gccctgatggttcta

SEQ ID NO: 619979 - DNA, 15 bp, Homo sapiens
ccctgatggttctac

SEQ ID NO: 619980 - DNA, 15 bp, Homo sapiens
cctgatggttctacc

SEQ ID NO: 619981 - DNA, 15 bp, Homo sapiens
ctgatggttctacct

SEQ ID NO: 619982 - DNA, 15 bp, Homo sapiens
tgatggttctacctg

SEQ ID NO: 619983 - DNA, 15 bp, Homo sapiens
gatggttctacctgc

SEQ ID NO: 619984 - DNA, 15 bp, Homo sapiens
atggttctacctgct

SEQ ID NO: 619985 - DNA, 15 bp, Homo sapiens
tggttctacctgctg

SEQ ID NO: 619986 - DNA, 15 bp, Homo sapiens
ggttctacctgctgt

SEQ ID NO: 619987 - DNA, 15 bp, Homo sapiens
gttctacctgctgtg

SEQ ID NO: 619988 - DNA, 15 bp, Homo sapiens
ttctacctgctgtga

SEQ ID NO: 619989 - DNA, 15 bp, Homo sapiens
tctacctgctgtgag

SEQ ID NO: 619990 - DNA, 15 bp, Homo sapiens
ctacctgctgtgagc

SEQ ID NO: 619991 - DNA, 15 bp, Homo sapiens
tacctgctgtgagct

SEQ ID NO: 619992 - DNA, 15 bp, Homo sapiens
acctgctgtgagctg

SEQ ID NO: 619993 - DNA, 15 bp, Homo sapiens
cctgctgtgagctgc

SEQ ID NO: 619994 - DNA, 15 bp, Homo sapiens
ctgctgtgagctgcc

SEQ ID NO: 619995 - DNA, 15 bp, Homo sapiens
tgctgtgagctgccc

SEQ ID NO: 619996 - DNA, 15 bp, Homo sapiens
gctgtgagctgccca

SEQ ID NO: 619997 - DNA, 15 bp, Homo sapiens
ctgtgagctgcccag

SEQ ID NO: 619998 - DNA, 15 bp, Homo sapiens
tgtgagctgcccagt

SEQ ID NO: 619999 - DNA, 15 bp, Homo sapiens
gtgagctgcccagtg

SEQ ID NO: 620000 - DNA, 15 bp, Homo sapiens
tgagctgcccagtgg

SEQ ID NO: 620001 - DNA, 15 bp, Homo sapiens
gagctgcccagtggg

SEQ ID NO: 620002 - DNA, 15 bp, Homo sapiens
agctgcccagtggga

SEQ ID NO: 620003 - DNA, 15 bp, Homo sapiens
gctgcccagtgggaa

SEQ ID NO: 620004 - DNA, 15 bp, Homo sapiens
ctgcccagtgggaag

SEQ ID NO: 620005 - DNA, 15 bp, Homo sapiens
tgcccagtgggaagt

SEQ ID NO: 620006 - DNA, 15 bp, Homo sapiens
gcccagtgggaagta

SEQ ID NO: 620007 - DNA, 15 bp, Homo sapiens
cccagtgggaagtat

SEQ ID NO: 620008 - DNA, 15 bp, Homo sapiens
ccagtgggaagtatg

SEQ ID NO: 620009 - DNA, 15 bp, Homo sapiens
cagtgggaagtatgg

SEQ ID NO: 620010 - DNA, 15 bp, Homo sapiens
agtgggaagtatggc

SEQ ID NO: 620011 - DNA, 15 bp, Homo sapiens
gtgggaagtatggct

SEQ ID NO: 620012 - DNA, 15 bp, Homo sapiens
tgggaagtatggctg

SEQ ID NO: 620013 - DNA, 15 bp, Homo sapiens
gggaagtatggctgc

SEQ ID NO: 620014 - DNA, 15 bp, Homo sapiens
ggaagtatggctgct

SEQ ID NO: 620015 - DNA, 15 bp, Homo sapiens
gaagtatggctgctg

SEQ ID NO: 620016 - DNA, 15 bp, Homo sapiens
aagtatggctgctgc

SEQ ID NO: 620017 - DNA, 15 bp, Homo sapiens
agtatggctgctgcc

SEQ ID NO: 620018 - DNA, 15 bp, Homo sapiens
gtatggctgctgccc

SEQ ID NO: 620019 - DNA, 15 bp, Homo sapiens
tatggctgctgccca

SEQ ID NO: 620020 - DNA, 15 bp, Homo sapiens
atggctgctgcccaa

SEQ ID NO: 620021 - DNA, 15 bp, Homo sapiens
tggctgctgcccaat

SEQ ID NO: 620022 - DNA, 15 bp, Homo sapiens
ggctgctgcccaatg

SEQ ID NO: 620023 - DNA, 15 bp, Homo sapiens
gctgctgcccaatgc

SEQ ID NO: 620024 - DNA, 15 bp, Homo sapiens
ctgctgcccaatgcc

SEQ ID NO: 620025 - DNA, 15 bp, Homo sapiens
tgctgcccaatgccc

SEQ ID NO: 620026 - DNA, 15 bp, Homo sapiens
gctgcccaatgccca

SEQ ID NO: 620027 - DNA, 15 bp, Homo sapiens
ctgcccaatgcccaa

SEQ ID NO: 620028 - DNA, 15 bp, Homo sapiens
tgcccaatgcccaac

SEQ ID NO: 620029 - DNA, 15 bp, Homo sapiens
gcccaatgcccaacg

SEQ ID NO: 620030 - DNA, 15 bp, Homo sapiens
cccaatgcccaacgt

SEQ ID NO: 620031 - DNA, 15 bp, Homo sapiens
ccaatgcccaacgtg

SEQ ID NO: 620032 - DNA, 15 bp, Homo sapiens
caatgcccaacgtga

SEQ ID NO: 620033 - DNA, 15 bp, Homo sapiens
aatgcccaacgtgag

SEQ ID NO: 620034 - DNA, 15 bp, Homo sapiens
atgcccaacgtgagt

SEQ ID NO: 620035 - DNA, 15 bp, Homo sapiens
tgcccaacgtgagtg

SEQ ID NO: 620036 - DNA, 15 bp, Homo sapiens
gcccaacgtgagtga

SEQ ID NO: 620037 - DNA, 15 bp, Homo sapiens
cccaacgtgagtgag

SEQ ID NO: 620038 - DNA, 15 bp, Homo sapiens
ccaacgtgagtgagg

SEQ ID NO: 620039 - DNA, 15 bp, Homo sapiens
caacgtgagtgaggg

SEQ ID NO: 620040 - DNA, 15 bp, Homo sapiens
aacgtgagtgagggg

SEQ ID NO: 620041 - DNA, 15 bp, Homo sapiens
acgtgagtgaggggc

SEQ ID NO: 620042 - DNA, 15 bp, Homo sapiens
cgtgagtgaggggct

SEQ ID NO: 620043 - DNA, 15 bp, Homo sapiens
gtgagtgaggggctg

SEQ ID NO: 620044 - DNA, 15 bp, Homo sapiens
tgagtgaggggctgg

SEQ ID NO: 620045 - DNA, 15 bp, Homo sapiens
gagtgaggggctgga

SEQ ID NO: 620046 - DNA, 15 bp, Homo sapiens
agtgaggggctggag

SEQ ID NO: 620047 - DNA, 15 bp, Homo sapiens
gtgaggggctggagc

SEQ ID NO: 620048 - DNA, 15 bp, Homo sapiens
tgaggggctggagcc

SEQ ID NO: 620049 - DNA, 15 bp, Homo sapiens
gaggggctggagcca

SEQ ID NO: 620050 - DNA, 15 bp, Homo sapiens
aggggctggagccag

SEQ ID NO: 620051 - DNA, 15 bp, Homo sapiens
agatacaggggtggg

SEQ ID NO: 620052 - DNA, 15 bp, Homo sapiens
gatacaggggtgggg

SEQ ID NO: 620053 - DNA, 15 bp, Homo sapiens
atacaggggtggggc

SEQ ID NO: 620054 - DNA, 15 bp, Homo sapiens
tacaggggtggggcc

SEQ ID NO: 620055 - DNA, 15 bp, Homo sapiens
acaggggtggggccc

SEQ ID NO: 620056 - DNA, 15 bp, Homo sapiens
caggggtggggcccc

SEQ ID NO: 620057 - DNA, 15 bp, Homo sapiens
aggggtggggccccc

SEQ ID NO: 620058 - DNA, 15 bp, Homo sapiens
ggggtggggccccct

SEQ ID NO: 620059 - DNA, 15 bp, Homo sapiens
gggtggggccccctt

SEQ ID NO: 620060 - DNA, 15 bp, Homo sapiens
ggtggggcccccttt

SEQ ID NO: 620061 - DNA, 15 bp, Homo sapiens
gtggggccccctttc

SEQ ID NO: 620062 - DNA, 15 bp, Homo sapiens
tggggccccctttcc

SEQ ID NO: 620063 - DNA, 15 bp, Homo sapiens
ggggccccctttcct

SEQ ID NO: 620064 - DNA, 15 bp, Homo sapiens
gggccccctttcctc

SEQ ID NO: 620065 - DNA, 15 bp, Homo sapiens
ggccccctttcctcc

SEQ ID NO: 620066 - DNA, 15 bp, Homo sapiens
gccccctttcctccc

SEQ ID NO: 620067 - DNA, 15 bp, Homo sapiens
ccccctttcctccct

SEQ ID NO: 620068 - DNA, 15 bp, Homo sapiens
cccctttcctccctt

SEQ ID NO: 620069 - DNA, 15 bp, Homo sapiens
ccctttcctcccttt

SEQ ID NO: 620070 - DNA, 15 bp, Homo sapiens
cctttcctccctttt

SEQ ID NO: 620071 - DNA, 15 bp, Homo sapiens
ctttcctccctttta

SEQ ID NO: 620072 - DNA, 15 bp, Homo sapiens
tttcctcccttttag

SEQ ID NO: 620073 - DNA, 15 bp, Homo sapiens
ttcctcccttttagg

SEQ ID NO: 620074 - DNA, 15 bp, Homo sapiens
tcctcccttttaggc

SEQ ID NO: 620075 - DNA, 15 bp, Homo sapiens
cctcccttttaggcc

SEQ ID NO: 620076 - DNA, 15 bp, Homo sapiens
ctcccttttaggcct

SEQ ID NO: 620077 - DNA, 15 bp, Homo sapiens
tcccttttaggcctg

SEQ ID NO: 620078 - DNA, 15 bp, Homo sapiens
cccttttaggcctgg

SEQ ID NO: 620079 - DNA, 15 bp, Homo sapiens
ccttttaggcctggc

SEQ ID NO: 620080 - DNA, 15 bp, Homo sapiens
cttttaggcctggcc

SEQ ID NO: 620081 - DNA, 15 bp, Homo sapiens
ttttaggcctggcct

SEQ ID NO: 620082 - DNA, 15 bp, Homo sapiens
tttaggcctggcctt

SEQ ID NO: 620083 - DNA, 15 bp, Homo sapiens
ttaggcctggcctta

SEQ ID NO: 620084 - DNA, 15 bp, Homo sapiens
taggcctggccttag

SEQ ID NO: 620085 - DNA, 15 bp, Homo sapiens
aggcctggccttagg

SEQ ID NO: 620086 - DNA, 15 bp, Homo sapiens
ggcctggccttagga

SEQ ID NO: 620087 - DNA, 15 bp, Homo sapiens
gcctggccttaggat

SEQ ID NO: 620088 - DNA, 15 bp, Homo sapiens
cctggccttaggatc

SEQ ID NO: 620089 - DNA, 15 bp, Homo sapiens
ctggccttaggatca

SEQ ID NO: 620090 - DNA, 15 bp, Homo sapiens
tggccttaggatcac

SEQ ID NO: 620091 - DNA, 15 bp, Homo sapiens
ggccttaggatcact

SEQ ID NO: 620092 - DNA, 15 bp, Homo sapiens
gccttaggatcactg

SEQ ID NO: 620093 - DNA, 15 bp, Homo sapiens
ccttaggatcactgc

SEQ ID NO: 620094 - DNA, 15 bp, Homo sapiens
cttaggatcactgca

SEQ ID NO: 620095 - DNA, 15 bp, Homo sapiens
ttaggatcactgcaa

SEQ ID NO: 620096 - DNA, 15 bp, Homo sapiens
taggatcactgcaag

SEQ ID NO: 620097 - DNA, 15 bp, Homo sapiens
aggatcactgcaagg

SEQ ID NO: 620098 - DNA, 15 bp, Homo sapiens
ggatcactgcaaggt

SEQ ID NO: 620099 - DNA, 15 bp, Homo sapiens
gatcactgcaaggtg

SEQ ID NO: 620100 - DNA, 15 bp, Homo sapiens
atcactgcaaggtgg

SEQ ID NO: 620101 - DNA, 15 bp, Homo sapiens
tcactgcaaggtggt

SEQ ID NO: 620102 - DNA, 15 bp, Homo sapiens
cactgcaaggtggtg

SEQ ID NO: 620103 - DNA, 15 bp, Homo sapiens
actgcaaggtggtgt

SEQ ID NO: 620104 - DNA, 15 bp, Homo sapiens
ctgcaaggtggtgta

SEQ ID NO: 620105 - DNA, 15 bp, Homo sapiens
tgcaaggtggtgtaa

SEQ ID NO: 620106 - DNA, 15 bp, Homo sapiens
gcaaggtggtgtaag

SEQ ID NO: 620107 - DNA, 15 bp, Homo sapiens
caaggtggtgtaagc

SEQ ID NO: 620108 - DNA, 15 bp, Homo sapiens
aaggtggtgtaagcg

SEQ ID NO: 620109 - DNA, 15 bp, Homo sapiens
aggtggtgtaagcgg

SEQ ID NO: 620110 - DNA, 15 bp, Homo sapiens
ggtggtgtaagcggt

SEQ ID NO: 620111 - DNA, 15 bp, Homo sapiens
gtggtgtaagcggta

SEQ ID NO: 620112 - DNA, 15 bp, Homo sapiens
tggtgtaagcggtac

SEQ ID NO: 620113 - DNA, 15 bp, Homo sapiens
ggtgtaagcggtacc

SEQ ID NO: 620114 - DNA, 15 bp, Homo sapiens
gtgtaagcggtaccc

SEQ ID NO: 620115 - DNA, 15 bp, Homo sapiens
tgtaagcggtaccct

SEQ ID NO: 620116 - DNA, 15 bp, Homo sapiens
gtaagcggtaccctc

SEQ ID NO: 620117 - DNA, 15 bp, Homo sapiens
taagcggtaccctcc

SEQ ID NO: 620118 - DNA, 15 bp, Homo sapiens
aagcggtaccctcca

SEQ ID NO: 620119 - DNA, 15 bp, Homo sapiens
agcggtaccctccat

SEQ ID NO: 620120 - DNA, 15 bp, Homo sapiens
gcggtaccctccatc

SEQ ID NO: 620121 - DNA, 15 bp, Homo sapiens
cggtaccctccatct

SEQ ID NO: 620122 - DNA, 15 bp, Homo sapiens
ggtaccctccatctt

SEQ ID NO: 620123 - DNA, 15 bp, Homo sapiens
gtaccctccatcttc

SEQ ID NO: 620124 - DNA, 15 bp, Homo sapiens
taccctccatcttca

SEQ ID NO: 620125 - DNA, 15 bp, Homo sapiens
accctccatcttcaa

SEQ ID NO: 620126 - DNA, 15 bp, Homo sapiens
ccctccatcttcaac

SEQ ID NO: 620127 - DNA, 15 bp, Homo sapiens
cctccatcttcaaca

SEQ ID NO: 620128 - DNA, 15 bp, Homo sapiens
ctccatcttcaacac

SEQ ID NO: 620129 - DNA, 15 bp, Homo sapiens
tccatcttcaacacc

SEQ ID NO: 620130 - DNA, 15 bp, Homo sapiens
ccatcttcaacacct

SEQ ID NO: 620131 - DNA, 15 bp, Homo sapiens
catcttcaacacctg

SEQ ID NO: 620132 - DNA, 15 bp, Homo sapiens
atcttcaacacctgg

SEQ ID NO: 620133 - DNA, 15 bp, Homo sapiens
tcttcaacacctggt

SEQ ID NO: 620134 - DNA, 15 bp, Homo sapiens
cttcaacacctggtt

SEQ ID NO: 620135 - DNA, 15 bp, Homo sapiens
ttcaacacctggttc

SEQ ID NO: 620136 - DNA, 15 bp, Homo sapiens
tcaacacctggttcc

SEQ ID NO: 620137 - DNA, 15 bp, Homo sapiens
caacacctggttcca

SEQ ID NO: 620138 - DNA, 15 bp, Homo sapiens
aacacctggttccag

SEQ ID NO: 620139 - DNA, 15 bp, Homo sapiens
acacctggttccagc

SEQ ID NO: 620140 - DNA, 15 bp, Homo sapiens
cacctggttccagct

SEQ ID NO: 620141 - DNA, 15 bp, Homo sapiens
acctggttccagctg

SEQ ID NO: 620142 - DNA, 15 bp, Homo sapiens
cctggttccagctgt

SEQ ID NO: 620143 - DNA, 15 bp, Homo sapiens
ctggttccagctgtg

SEQ ID NO: 620144 - DNA, 15 bp, Homo sapiens
tggttccagctgtgg

SEQ ID NO: 620145 - DNA, 15 bp, Homo sapiens
ggttccagctgtgga

SEQ ID NO: 620146 - DNA, 15 bp, Homo sapiens
gttccagctgtggag

SEQ ID NO: 620147 - DNA, 15 bp, Homo sapiens
ttccagctgtggagc

SEQ ID NO: 620148 - DNA, 15 bp, Homo sapiens
tccagctgtggagcc

SEQ ID NO: 620149 - DNA, 15 bp, Homo sapiens
ccagctgtggagccg

SEQ ID NO: 620150 - DNA, 15 bp, Homo sapiens
cagctgtggagccgg

SEQ ID NO: 620151 - DNA, 15 bp, Homo sapiens
agctgtggagccggc

SEQ ID NO: 620152 - DNA, 15 bp, Homo sapiens
gctgtggagccggca

SEQ ID NO: 620153 - DNA, 15 bp, Homo sapiens
ctgtggagccggcaa

SEQ ID NO: 620154 - DNA, 15 bp, Homo sapiens
tgtggagccggcaaa

SEQ ID NO: 620155 - DNA, 15 bp, Homo sapiens
gtggagccggcaaag

SEQ ID NO: 620156 - DNA, 15 bp, Homo sapiens
tggagccggcaaagg

SEQ ID NO: 620157 - DNA, 15 bp, Homo sapiens
ggagccggcaaaggg

SEQ ID NO: 620158 - DNA, 15 bp, Homo sapiens
gagccggcaaagggt

SEQ ID NO: 620159 - DNA, 15 bp, Homo sapiens
agccggcaaagggtt

SEQ ID NO: 620160 - DNA, 15 bp, Homo sapiens
gccggcaaagggttg

SEQ ID NO: 620161 - DNA, 15 bp, Homo sapiens
ccggcaaagggttga

SEQ ID NO: 620162 - DNA, 15 bp, Homo sapiens
cggcaaagggttgat

SEQ ID NO: 620163 - DNA, 15 bp, Homo sapiens
ggcaaagggttgata

SEQ ID NO: 620164 - DNA, 15 bp, Homo sapiens
gcaaagggttgatac

SEQ ID NO: 620165 - DNA, 15 bp, Homo sapiens
caaagggttgatacc

SEQ ID NO: 620166 - DNA, 15 bp, Homo sapiens
aaagggttgataccc

SEQ ID NO: 620167 - DNA, 15 bp, Homo sapiens
aagggttgatacccc

SEQ ID NO: 620168 - DNA, 15 bp, Homo sapiens
agggttgatacccct

SEQ ID NO: 620169 - DNA, 15 bp, Homo sapiens
gggttgatacccctg

SEQ ID NO: 620170 - DNA, 15 bp, Homo sapiens
ggttgatacccctga

SEQ ID NO: 620171 - DNA, 15 bp, Homo sapiens
gttgatacccctgag

SEQ ID NO: 620172 - DNA, 15 bp, Homo sapiens
ttgatacccctgagg

SEQ ID NO: 620173 - DNA, 15 bp, Homo sapiens
tgatacccctgaggg

SEQ ID NO: 620174 - DNA, 15 bp, Homo sapiens
gatacccctgagggt

SEQ ID NO: 620175 - DNA, 15 bp, Homo sapiens
atacccctgagggtc

SEQ ID NO: 620176 - DNA, 15 bp, Homo sapiens
tacccctgagggtcc

SEQ ID NO: 620177 - DNA, 15 bp, Homo sapiens
acccctgagggtccc

SEQ ID NO: 620178 - DNA, 15 bp, Homo sapiens
cccctgagggtcccc

SEQ ID NO: 620179 - DNA, 15 bp, Homo sapiens
ccctgagggtcccca

SEQ ID NO: 620180 - DNA, 15 bp, Homo sapiens
cctgagggtccccag

SEQ ID NO: 620181 - DNA, 15 bp, Homo sapiens
ctgagggtccccagt

SEQ ID NO: 620182 - DNA, 15 bp, Homo sapiens
tgagggtccccagtg

SEQ ID NO: 620183 - DNA, 15 bp, Homo sapiens
gagggtccccagtgc

SEQ ID NO: 620184 - DNA, 15 bp, Homo sapiens
agggtccccagtgcc

SEQ ID NO: 620185 - DNA, 15 bp, Homo sapiens
gggtccccagtgcca

SEQ ID NO: 620186 - DNA, 15 bp, Homo sapiens
ggtccccagtgccac

SEQ ID NO: 620187 - DNA, 15 bp, Homo sapiens
gtccccagtgccact

SEQ ID NO: 620188 - DNA, 15 bp, Homo sapiens
tccccagtgccactt

SEQ ID NO: 620189 - DNA, 15 bp, Homo sapiens
ccccagtgccacttc

SEQ ID NO: 620190 - DNA, 15 bp, Homo sapiens
cccagtgccacttct

SEQ ID NO: 620191 - DNA, 15 bp, Homo sapiens
ccagtgccacttctg

SEQ ID NO: 620192 - DNA, 15 bp, Homo sapiens
cagtgccacttctga

SEQ ID NO: 620193 - DNA, 15 bp, Homo sapiens
agtgccacttctgac

SEQ ID NO: 620194 - DNA, 15 bp, Homo sapiens
gtgccacttctgacc

SEQ ID NO: 620195 - DNA, 15 bp, Homo sapiens
tgccacttctgacct

SEQ ID NO: 620196 - DNA, 15 bp, Homo sapiens
gccacttctgacctg

SEQ ID NO: 620197 - DNA, 15 bp, Homo sapiens
ccacttctgacctgt

SEQ ID NO: 620198 - DNA, 15 bp, Homo sapiens
cacttctgacctgtc

SEQ ID NO: 620199 - DNA, 15 bp, Homo sapiens
acttctgacctgtcc

SEQ ID NO: 620200 - DNA, 15 bp, Homo sapiens
cttctgacctgtcct

SEQ ID NO: 620201 - DNA, 15 bp, Homo sapiens
ttctgacctgtcctc

SEQ ID NO: 620202 - DNA, 15 bp, Homo sapiens
tctgacctgtcctct

SEQ ID NO: 620203 - DNA, 15 bp, Homo sapiens
ctgacctgtcctctc

SEQ ID NO: 620204 - DNA, 15 bp, Homo sapiens
tgacctgtcctctct

SEQ ID NO: 620205 - DNA, 15 bp, Homo sapiens
gacctgtcctctctg

SEQ ID NO: 620206 - DNA, 15 bp, Homo sapiens
acctgtcctctctgc

SEQ ID NO: 620207 - DNA, 15 bp, Homo sapiens
cctgtcctctctgct

SEQ ID NO: 620208 - DNA, 15 bp, Homo sapiens
ctgtcctctctgctt

SEQ ID NO: 620209 - DNA, 15 bp, Homo sapiens
tgtcctctctgcttc

SEQ ID NO: 620210 - DNA, 15 bp, Homo sapiens
gtcctctctgcttcc

SEQ ID NO: 620211 - DNA, 15 bp, Homo sapiens
tcctctctgcttccc

SEQ ID NO: 620212 - DNA, 15 bp, Homo sapiens
cctctctgcttccct

SEQ ID NO: 620213 - DNA, 15 bp, Homo sapiens
ctctctgcttccctc

SEQ ID NO: 620214 - DNA, 15 bp, Homo sapiens
tctctgcttccctca

SEQ ID NO: 620215 - DNA, 15 bp, Homo sapiens
ctctgcttccctcac

SEQ ID NO: 620216 - DNA, 15 bp, Homo sapiens
tctgcttccctcaca

SEQ ID NO: 620217 - DNA, 15 bp, Homo sapiens
ctgcttccctcacag

SEQ ID NO: 620218 - DNA, 15 bp, Homo sapiens
tgcttccctcacagt

SEQ ID NO: 620219 - DNA, 15 bp, Homo sapiens
gcttccctcacagtg

SEQ ID NO: 620220 - DNA, 15 bp, Homo sapiens
cttccctcacagtgg

SEQ ID NO: 620221 - DNA, 15 bp, Homo sapiens
ttccctcacagtggg

SEQ ID NO: 620222 - DNA, 15 bp, Homo sapiens
tccctcacagtgggg

SEQ ID NO: 620223 - DNA, 15 bp, Homo sapiens
ccctcacagtggggg

SEQ ID NO: 620224 - DNA, 15 bp, Homo sapiens
cctcacagtggggga

SEQ ID NO: 620225 - DNA, 15 bp, Homo sapiens
ctcacagtgggggat

SEQ ID NO: 620226 - DNA, 15 bp, Homo sapiens
tcacagtgggggatg

SEQ ID NO: 620227 - DNA, 15 bp, Homo sapiens
cacagtgggggatgt

SEQ ID NO: 620228 - DNA, 15 bp, Homo sapiens
acagtgggggatgtg

SEQ ID NO: 620229 - DNA, 15 bp, Homo sapiens
cagtgggggatgtga

SEQ ID NO: 620230 - DNA, 15 bp, Homo sapiens
agtgggggatgtgaa

SEQ ID NO: 620231 - DNA, 15 bp, Homo sapiens
gtgggggatgtgaaa

SEQ ID NO: 620232 - DNA, 15 bp, Homo sapiens
tgggggatgtgaaat

SEQ ID NO: 620233 - DNA, 15 bp, Homo sapiens
gggggatgtgaaatg

SEQ ID NO: 620234 - DNA, 15 bp, Homo sapiens
ggggatgtgaaatgt

SEQ ID NO: 620235 - DNA, 15 bp, Homo sapiens
gggatgtgaaatgtg

SEQ ID NO: 620236 - DNA, 15 bp, Homo sapiens
ggatgtgaaatgtga

SEQ ID NO: 620237 - DNA, 15 bp, Homo sapiens
gatgtgaaatgtgac

SEQ ID NO: 620238 - DNA, 15 bp, Homo sapiens
atgtgaaatgtgaca

SEQ ID NO: 620239 - DNA, 15 bp, Homo sapiens
tgtgaaatgtgacat

SEQ ID NO: 620240 - DNA, 15 bp, Homo sapiens
gtgaaatgtgacatg

SEQ ID NO: 620241 - DNA, 15 bp, Homo sapiens
tgaaatgtgacatgg

SEQ ID NO: 620242 - DNA, 15 bp, Homo sapiens
gaaatgtgacatgga

SEQ ID NO: 620243 - DNA, 15 bp, Homo sapiens
aaatgtgacatggag

SEQ ID NO: 620244 - DNA, 15 bp, Homo sapiens
aatgtgacatggagg

SEQ ID NO: 620245 - DNA, 15 bp, Homo sapiens
atgtgacatggaggt

SEQ ID NO: 620246 - DNA, 15 bp, Homo sapiens
tgtgacatggaggtg

SEQ ID NO: 620247 - DNA, 15 bp, Homo sapiens
gtgacatggaggtga

SEQ ID NO: 620248 - DNA, 15 bp, Homo sapiens
tgacatggaggtgag

SEQ ID NO: 620249 - DNA, 15 bp, Homo sapiens
gacatggaggtgagc

SEQ ID NO: 620250 - DNA, 15 bp, Homo sapiens
acatggaggtgagct

SEQ ID NO: 620251 - DNA, 15 bp, Homo sapiens
catggaggtgagctg

SEQ ID NO: 620252 - DNA, 15 bp, Homo sapiens
atggaggtgagctgc

SEQ ID NO: 620253 - DNA, 15 bp, Homo sapiens
tggaggtgagctgcc

SEQ ID NO: 620254 - DNA, 15 bp, Homo sapiens
ggaggtgagctgccc

SEQ ID NO: 620255 - DNA, 15 bp, Homo sapiens
gaggtgagctgccca

SEQ ID NO: 620256 - DNA, 15 bp, Homo sapiens
aggtgagctgcccag

SEQ ID NO: 620257 - DNA, 15 bp, Homo sapiens
ggtgagctgcccaga

SEQ ID NO: 620258 - DNA, 15 bp, Homo sapiens
gtgagctgcccagat

SEQ ID NO: 620259 - DNA, 15 bp, Homo sapiens
tgagctgcccagatg

SEQ ID NO: 620260 - DNA, 15 bp, Homo sapiens
gagctgcccagatgg

SEQ ID NO: 620261 - DNA, 15 bp, Homo sapiens
agctgcccagatggc

SEQ ID NO: 620262 - DNA, 15 bp, Homo sapiens
gctgcccagatggct

SEQ ID NO: 620263 - DNA, 15 bp, Homo sapiens
ctgcccagatggcta

SEQ ID NO: 620264 - DNA, 15 bp, Homo sapiens
tgcccagatggctat

SEQ ID NO: 620265 - DNA, 15 bp, Homo sapiens
gcccagatggctata

SEQ ID NO: 620266 - DNA, 15 bp, Homo sapiens
cccagatggctatac

SEQ ID NO: 620267 - DNA, 15 bp, Homo sapiens
ccagatggctatacc

SEQ ID NO: 620268 - DNA, 15 bp, Homo sapiens
cagatggctatacct

SEQ ID NO: 620269 - DNA, 15 bp, Homo sapiens
agatggctatacctg

SEQ ID NO: 620270 - DNA, 15 bp, Homo sapiens
gatggctatacctgc

SEQ ID NO: 620271 - DNA, 15 bp, Homo sapiens
atggctatacctgct

SEQ ID NO: 620272 - DNA, 15 bp, Homo sapiens
tggctatacctgctg

SEQ ID NO: 620273 - DNA, 15 bp, Homo sapiens
ggctatacctgctgc

SEQ ID NO: 620274 - DNA, 15 bp, Homo sapiens
gctatacctgctgcc

SEQ ID NO: 620275 - DNA, 15 bp, Homo sapiens
ctatacctgctgccg

SEQ ID NO: 620276 - DNA, 15 bp, Homo sapiens
tatacctgctgccgt

SEQ ID NO: 620277 - DNA, 15 bp, Homo sapiens
atacctgctgccgtc

SEQ ID NO: 620278 - DNA, 15 bp, Homo sapiens
tacctgctgccgtct

SEQ ID NO: 620279 - DNA, 15 bp, Homo sapiens
acctgctgccgtcta

SEQ ID NO: 620280 - DNA, 15 bp, Homo sapiens
cctgctgccgtctac

SEQ ID NO: 620281 - DNA, 15 bp, Homo sapiens
ctgctgccgtctaca

SEQ ID NO: 620282 - DNA, 15 bp, Homo sapiens
tgctgccgtctacag

SEQ ID NO: 620283 - DNA, 15 bp, Homo sapiens
gctgccgtctacagt

SEQ ID NO: 620284 - DNA, 15 bp, Homo sapiens
ctgccgtctacagtc

SEQ ID NO: 620285 - DNA, 15 bp, Homo sapiens
tgccgtctacagtcg

SEQ ID NO: 620286 - DNA, 15 bp, Homo sapiens
gccgtctacagtcgg

SEQ ID NO: 620287 - DNA, 15 bp, Homo sapiens
ccgtctacagtcggg

SEQ ID NO: 620288 - DNA, 15 bp, Homo sapiens
cgtctacagtcgggg

SEQ ID NO: 620289 - DNA, 15 bp, Homo sapiens
gtctacagtcggggg

SEQ ID NO: 620290 - DNA, 15 bp, Homo sapiens
tctacagtcgggggc

SEQ ID NO: 620291 - DNA, 15 bp, Homo sapiens
ctacagtcgggggcc

SEQ ID NO: 620292 - DNA, 15 bp, Homo sapiens
tacagtcgggggcct

SEQ ID NO: 620293 - DNA, 15 bp, Homo sapiens
acagtcgggggcctg

SEQ ID NO: 620294 - DNA, 15 bp, Homo sapiens
cagtcgggggcctgg

SEQ ID NO: 620295 - DNA, 15 bp, Homo sapiens
agtcgggggcctggg

SEQ ID NO: 620296 - DNA, 15 bp, Homo sapiens
gtcgggggcctgggg

SEQ ID NO: 620297 - DNA, 15 bp, Homo sapiens
tcgggggcctggggc

SEQ ID NO: 620298 - DNA, 15 bp, Homo sapiens
cgggggcctggggct

SEQ ID NO: 620299 - DNA, 15 bp, Homo sapiens
gggggcctggggctg

SEQ ID NO: 620300 - DNA, 15 bp, Homo sapiens
ggggcctggggctgc

SEQ ID NO: 620301 - DNA, 15 bp, Homo sapiens
gggcctggggctgct

SEQ ID NO: 620302 - DNA, 15 bp, Homo sapiens
ggcctggggctgctg

SEQ ID NO: 620303 - DNA, 15 bp, Homo sapiens
gcctggggctgctgc

SEQ ID NO: 620304 - DNA, 15 bp, Homo sapiens
cctggggctgctgcc

SEQ ID NO: 620305 - DNA, 15 bp, Homo sapiens
ctggggctgctgccc

SEQ ID NO: 620306 - DNA, 15 bp, Homo sapiens
tggggctgctgccct

SEQ ID NO: 620307 - DNA, 15 bp, Homo sapiens
ggggctgctgccctt

SEQ ID NO: 620308 - DNA, 15 bp, Homo sapiens
gggctgctgcccttt

SEQ ID NO: 620309 - DNA, 15 bp, Homo sapiens
ggctgctgccctttt

SEQ ID NO: 620310 - DNA, 15 bp, Homo sapiens
gctgctgccctttta

SEQ ID NO: 620311 - DNA, 15 bp, Homo sapiens
ctgctgcccttttac

SEQ ID NO: 620312 - DNA, 15 bp, Homo sapiens
tgctgcccttttacc

SEQ ID NO: 620313 - DNA, 15 bp, Homo sapiens
gctgcccttttaccc

SEQ ID NO: 620314 - DNA, 15 bp, Homo sapiens
ctgcccttttaccca

SEQ ID NO: 620315 - DNA, 15 bp, Homo sapiens
tgcccttttacccag

SEQ ID NO: 620316 - DNA, 15 bp, Homo sapiens
gcccttttacccagg

SEQ ID NO: 620317 - DNA, 15 bp, Homo sapiens
cccttttacccaggt

SEQ ID NO: 620318 - DNA, 15 bp, Homo sapiens
ccttttacccaggta

SEQ ID NO: 620319 - DNA, 15 bp, Homo sapiens
ctcccctcccctacc

SEQ ID NO: 620320 - DNA, 15 bp, Homo sapiens
tcccctcccctaccc

SEQ ID NO: 620321 - DNA, 15 bp, Homo sapiens
cccctcccctacccc

SEQ ID NO: 620322 - DNA, 15 bp, Homo sapiens
ccctcccctacccca

SEQ ID NO: 620323 - DNA, 15 bp, Homo sapiens
cctcccctaccccac

SEQ ID NO: 620324 - DNA, 15 bp, Homo sapiens
ctcccctaccccaca

SEQ ID NO: 620325 - DNA, 15 bp, Homo sapiens
tcccctaccccacag

SEQ ID NO: 620326 - DNA, 15 bp, Homo sapiens
cccctaccccacaga

SEQ ID NO: 620327 - DNA, 15 bp, Homo sapiens
ccctaccccacagaa

SEQ ID NO: 620328 - DNA, 15 bp, Homo sapiens
cctaccccacagaaa

SEQ ID NO: 620329 - DNA, 15 bp, Homo sapiens
ctaccccacagaaag

SEQ ID NO: 620330 - DNA, 15 bp, Homo sapiens
taccccacagaaaga

SEQ ID NO: 620331 - DNA, 15 bp, Homo sapiens
accccacagaaagac

SEQ ID NO: 620332 - DNA, 15 bp, Homo sapiens
ccccacagaaagaca

SEQ ID NO: 620333 - DNA, 15 bp, Homo sapiens
cccacagaaagacat

SEQ ID NO: 620334 - DNA, 15 bp, Homo sapiens
ccacagaaagacata

SEQ ID NO: 620335 - DNA, 15 bp, Homo sapiens
cacagaaagacatac

SEQ ID NO: 620336 - DNA, 15 bp, Homo sapiens
acagaaagacataca

SEQ ID NO: 620337 - DNA, 15 bp, Homo sapiens
cagaaagacatacac

SEQ ID NO: 620338 - DNA, 15 bp, Homo sapiens
agaaagacatacaca

SEQ ID NO: 620339 - DNA, 15 bp, Homo sapiens
gaaagacatacacag

SEQ ID NO: 620340 - DNA, 15 bp, Homo sapiens
aaagacatacacagc

SEQ ID NO: 620341 - DNA, 15 bp, Homo sapiens
aagacatacacagcc

SEQ ID NO: 620342 - DNA, 15 bp, Homo sapiens
agacatacacagcct

SEQ ID NO: 620343 - DNA, 15 bp, Homo sapiens
gacatacacagcctt

SEQ ID NO: 620344 - DNA, 15 bp, Homo sapiens
acatacacagcctta

SEQ ID NO: 620345 - DNA, 15 bp, Homo sapiens
catacacagccttaa

SEQ ID NO: 620346 - DNA, 15 bp, Homo sapiens
atacacagccttaac

SEQ ID NO: 620347 - DNA, 15 bp, Homo sapiens
tacacagccttaacc

SEQ ID NO: 620348 - DNA, 15 bp, Homo sapiens
acacagccttaacct

SEQ ID NO: 620349 - DNA, 15 bp, Homo sapiens
cacagccttaacctc

SEQ ID NO: 620350 - DNA, 15 bp, Homo sapiens
acagccttaacctca

SEQ ID NO: 620351 - DNA, 15 bp, Homo sapiens
cagccttaacctcac

SEQ ID NO: 620352 - DNA, 15 bp, Homo sapiens
agccttaacctcacc

SEQ ID NO: 620353 - DNA, 15 bp, Homo sapiens
gccttaacctcacca

SEQ ID NO: 620354 - DNA, 15 bp, Homo sapiens
ccttaacctcaccag

SEQ ID NO: 620355 - DNA, 15 bp, Homo sapiens
cttaacctcaccagt

SEQ ID NO: 620356 - DNA, 15 bp, Homo sapiens
ttaacctcaccagtt

SEQ ID NO: 620357 - DNA, 15 bp, Homo sapiens
taacctcaccagttt

SEQ ID NO: 620358 - DNA, 15 bp, Homo sapiens
aacctcaccagtttt

SEQ ID NO: 620359 - DNA, 15 bp, Homo sapiens
acctcaccagtttta

SEQ ID NO: 620360 - DNA, 15 bp, Homo sapiens
cctcaccagttttat

SEQ ID NO: 620361 - DNA, 15 bp, Homo sapiens
ctcaccagttttata

SEQ ID NO: 620362 - DNA, 15 bp, Homo sapiens
tcaccagttttatat

SEQ ID NO: 620363 - DNA, 15 bp, Homo sapiens
caccagttttatatt

SEQ ID NO: 620364 - DNA, 15 bp, Homo sapiens
accagttttatattt

SEQ ID NO: 620365 - DNA, 15 bp, Homo sapiens
ccagttttatatttg

SEQ ID NO: 620366 - DNA, 15 bp, Homo sapiens
cagttttatatttgc

SEQ ID NO: 620367 - DNA, 15 bp, Homo sapiens
agttttatatttgct

SEQ ID NO: 620368 - DNA, 15 bp, Homo sapiens
gttttatatttgctg

SEQ ID NO: 620369 - DNA, 15 bp, Homo sapiens
ttttatatttgctgc

SEQ ID NO: 620370 - DNA, 15 bp, Homo sapiens
tttatatttgctgct

SEQ ID NO: 620371 - DNA, 15 bp, Homo sapiens
ttatatttgctgctg

SEQ ID NO: 620372 - DNA, 15 bp, Homo sapiens
tatatttgctgctgc

SEQ ID NO: 620373 - DNA, 15 bp, Homo sapiens
atatttgctgctgcc

SEQ ID NO: 620374 - DNA, 15 bp, Homo sapiens
tatttgctgctgccc

SEQ ID NO: 620375 - DNA, 15 bp, Homo sapiens
atttgctgctgccca

SEQ ID NO: 620376 - DNA, 15 bp, Homo sapiens
tttgctgctgcccac

SEQ ID NO: 620377 - DNA, 15 bp, Homo sapiens
ttgctgctgcccaca

SEQ ID NO: 620378 - DNA, 15 bp, Homo sapiens
tgctgctgcccacat

SEQ ID NO: 620379 - DNA, 15 bp, Homo sapiens
gctgctgcccacatc

SEQ ID NO: 620380 - DNA, 15 bp, Homo sapiens
ctgctgcccacatcg

SEQ ID NO: 620381 - DNA, 15 bp, Homo sapiens
tgctgcccacatcgg

SEQ ID NO: 620382 - DNA, 15 bp, Homo sapiens
gctgcccacatcggc

SEQ ID NO: 620383 - DNA, 15 bp, Homo sapiens
ctgcccacatcggct

SEQ ID NO: 620384 - DNA, 15 bp, Homo sapiens
tgcccacatcggctg

SEQ ID NO: 620385 - DNA, 15 bp, Homo sapiens
gcccacatcggctgt

SEQ ID NO: 620386 - DNA, 15 bp, Homo sapiens
cccacatcggctgta

SEQ ID NO: 620387 - DNA, 15 bp, Homo sapiens
ccacatcggctgtat

SEQ ID NO: 620388 - DNA, 15 bp, Homo sapiens
cacatcggctgtatc

SEQ ID NO: 620389 - DNA, 15 bp, Homo sapiens
acatcggctgtatca

SEQ ID NO: 620390 - DNA, 15 bp, Homo sapiens
catcggctgtatcac

SEQ ID NO: 620391 - DNA, 15 bp, Homo sapiens
atcggctgtatcaca

SEQ ID NO: 620392 - DNA, 15 bp, Homo sapiens
tcggctgtatcacat

SEQ ID NO: 620393 - DNA, 15 bp, Homo sapiens
cggctgtatcacatt

SEQ ID NO: 620394 - DNA, 15 bp, Homo sapiens
ggctgtatcacatta

SEQ ID NO: 620395 - DNA, 15 bp, Homo sapiens
gctgtatcacattac

SEQ ID NO: 620396 - DNA, 15 bp, Homo sapiens
ctgtatcacattacc

SEQ ID NO: 620397 - DNA, 15 bp, Homo sapiens
tgtatcacattaccc

SEQ ID NO: 620398 - DNA, 15 bp, Homo sapiens
gtatcacattacccc

SEQ ID NO: 620399 - DNA, 15 bp, Homo sapiens
tatcacattaccccc

SEQ ID NO: 620400 - DNA, 15 bp, Homo sapiens
atcacattaccccct

SEQ ID NO: 620401 - DNA, 15 bp, Homo sapiens
tcacattacccccta

SEQ ID NO: 620402 - DNA, 15 bp, Homo sapiens
cacattaccccctag

SEQ ID NO: 620403 - DNA, 15 bp, Homo sapiens
acattaccccctagt

SEQ ID NO: 620404 - DNA, 15 bp, Homo sapiens
cattaccccctagtc

SEQ ID NO: 620405 - DNA, 15 bp, Homo sapiens
attaccccctagtcc

SEQ ID NO: 620406 - DNA, 15 bp, Homo sapiens
ttaccccctagtccc

SEQ ID NO: 620407 - DNA, 15 bp, Homo sapiens
taccccctagtcccc

SEQ ID NO: 620408 - DNA, 15 bp, Homo sapiens
accccctagtcccca

SEQ ID NO: 620409 - DNA, 15 bp, Homo sapiens
ccccctagtccccag

SEQ ID NO: 620410 - DNA, 15 bp, Homo sapiens
cccctagtccccaga

SEQ ID NO: 620411 - DNA, 15 bp, Homo sapiens
ccctagtccccagag

SEQ ID NO: 620412 - DNA, 15 bp, Homo sapiens
cctagtccccagagc

SEQ ID NO: 620413 - DNA, 15 bp, Homo sapiens
ctagtccccagagct

SEQ ID NO: 620414 - DNA, 15 bp, Homo sapiens
tagtccccagagctg

SEQ ID NO: 620415 - DNA, 15 bp, Homo sapiens
agtccccagagctgt

SEQ ID NO: 620416 - DNA, 15 bp, Homo sapiens
gtccccagagctgtc

SEQ ID NO: 620417 - DNA, 15 bp, Homo sapiens
tccccagagctgtcc

SEQ ID NO: 620418 - DNA, 15 bp, Homo sapiens
ccccagagctgtccc

SEQ ID NO: 620419 - DNA, 15 bp, Homo sapiens
cccagagctgtccca

SEQ ID NO: 620420 - DNA, 15 bp, Homo sapiens
ccagagctgtcccag

SEQ ID NO: 620421 - DNA, 15 bp, Homo sapiens
cagagctgtcccagc

SEQ ID NO: 620422 - DNA, 15 bp, Homo sapiens
agagctgtcccagcc

SEQ ID NO: 620423 - DNA, 15 bp, Homo sapiens
gagctgtcccagcca

SEQ ID NO: 620424 - DNA, 15 bp, Homo sapiens
agctgtcccagccac

SEQ ID NO: 620425 - DNA, 15 bp, Homo sapiens
gctgtcccagccacc

SEQ ID NO: 620426 - DNA, 15 bp, Homo sapiens
ctgtcccagccacca

SEQ ID NO: 620427 - DNA, 15 bp, Homo sapiens
tgtcccagccaccag

SEQ ID NO: 620428 - DNA, 15 bp, Homo sapiens
gtcccagccaccagc

SEQ ID NO: 620429 - DNA, 15 bp, Homo sapiens
tcccagccaccagcc

SEQ ID NO: 620430 - DNA, 15 bp, Homo sapiens
cccagccaccagccc

SEQ ID NO: 620431 - DNA, 15 bp, Homo sapiens
ccagccaccagccct

SEQ ID NO: 620432 - DNA, 15 bp, Homo sapiens
cagccaccagccctg

SEQ ID NO: 620433 - DNA, 15 bp, Homo sapiens
agccaccagccctgt

SEQ ID NO: 620434 - DNA, 15 bp, Homo sapiens
gccaccagccctgtg

SEQ ID NO: 620435 - DNA, 15 bp, Homo sapiens
ccaccagccctgtga

SEQ ID NO: 620436 - DNA, 15 bp, Homo sapiens
caccagccctgtgac

SEQ ID NO: 620437 - DNA, 15 bp, Homo sapiens
accagccctgtgaca

SEQ ID NO: 620438 - DNA, 15 bp, Homo sapiens
ccagccctgtgacat

SEQ ID NO: 620439 - DNA, 15 bp, Homo sapiens
cagccctgtgacatc

SEQ ID NO: 620440 - DNA, 15 bp, Homo sapiens
agccctgtgacatcg

SEQ ID NO: 620441 - DNA, 15 bp, Homo sapiens
gccctgtgacatcgt

SEQ ID NO: 620442 - DNA, 15 bp, Homo sapiens
ccctgtgacatcgta

SEQ ID NO: 620443 - DNA, 15 bp, Homo sapiens
cctgtgacatcgtag

SEQ ID NO: 620444 - DNA, 15 bp, Homo sapiens
ctgtgacatcgtagc

SEQ ID NO: 620445 - DNA, 15 bp, Homo sapiens
tgtgacatcgtagcc

SEQ ID NO: 620446 - DNA, 15 bp, Homo sapiens
gtgacatcgtagccc

SEQ ID NO: 620447 - DNA, 15 bp, Homo sapiens
tgacatcgtagccca

SEQ ID NO: 620448 - DNA, 15 bp, Homo sapiens
gacatcgtagcccag

SEQ ID NO: 620449 - DNA, 15 bp, Homo sapiens
acatcgtagcccaga

SEQ ID NO: 620450 - DNA, 15 bp, Homo sapiens
catcgtagcccagag

SEQ ID NO: 620451 - DNA, 15 bp, Homo sapiens
atcgtagcccagaga

SEQ ID NO: 620452 - DNA, 15 bp, Homo sapiens
tcgtagcccagagat

SEQ ID NO: 620453 - DNA, 15 bp, Homo sapiens
cgtagcccagagatg

SEQ ID NO: 620454 - DNA, 15 bp, Homo sapiens
gtagcccagagatgg

SEQ ID NO: 620455 - DNA, 15 bp, Homo sapiens
tagcccagagatggg

SEQ ID NO: 620456 - DNA, 15 bp, Homo sapiens
agcccagagatgggc

SEQ ID NO: 620457 - DNA, 15 bp, Homo sapiens
gcccagagatgggct

SEQ ID NO: 620458 - DNA, 15 bp, Homo sapiens
cccagagatgggcta

SEQ ID NO: 620459 - DNA, 15 bp, Homo sapiens
ccagagatgggctag

SEQ ID NO: 620460 - DNA, 15 bp, Homo sapiens
cagagatgggctagt

SEQ ID NO: 620461 - DNA, 15 bp, Homo sapiens
agagatgggctagtc

SEQ ID NO: 620462 - DNA, 15 bp, Homo sapiens
gagatgggctagtca

SEQ ID NO: 620463 - DNA, 15 bp, Homo sapiens
agatgggctagtcag

SEQ ID NO: 620464 - DNA, 15 bp, Homo sapiens
gatgggctagtcagc

SEQ ID NO: 620465 - DNA, 15 bp, Homo sapiens
atgggctagtcagca

SEQ ID NO: 620466 - DNA, 15 bp, Homo sapiens
tgggctagtcagcaa

SEQ ID NO: 620467 - DNA, 15 bp, Homo sapiens
gggctagtcagcaag

SEQ ID NO: 620468 - DNA, 15 bp, Homo sapiens
ggctagtcagcaagc

SEQ ID NO: 620469 - DNA, 15 bp, Homo sapiens
gctagtcagcaagca

SEQ ID NO: 620470 - DNA, 15 bp, Homo sapiens
ctagtcagcaagcag

SEQ ID NO: 620471 - DNA, 15 bp, Homo sapiens
tagtcagcaagcagc

SEQ ID NO: 620472 - DNA, 15 bp, Homo sapiens
agtcagcaagcagca

SEQ ID NO: 620473 - DNA, 15 bp, Homo sapiens
gtcagcaagcagcac

SEQ ID NO: 620474 - DNA, 15 bp, Homo sapiens
tcagcaagcagcacc

SEQ ID NO: 620475 - DNA, 15 bp, Homo sapiens
cagcaagcagcaccc

SEQ ID NO: 620476 - DNA, 15 bp, Homo sapiens
agcaagcagcacccc

SEQ ID NO: 620477 - DNA, 15 bp, Homo sapiens
gcaagcagcaccccc

SEQ ID NO: 620478 - DNA, 15 bp, Homo sapiens
caagcagcaccccct

SEQ ID NO: 620479 - DNA, 15 bp, Homo sapiens
aagcagcaccccctc

SEQ ID NO: 620480 - DNA, 15 bp, Homo sapiens
agcagcaccccctcc

SEQ ID NO: 620481 - DNA, 15 bp, Homo sapiens
gcagcaccccctccc

SEQ ID NO: 620482 - DNA, 15 bp, Homo sapiens
cagcaccccctcccc

SEQ ID NO: 620483 - DNA, 15 bp, Homo sapiens
agcaccccctcccct

SEQ ID NO: 620484 - DNA, 15 bp, Homo sapiens
gcaccccctcccctc

SEQ ID NO: 620485 - DNA, 15 bp, Homo sapiens
caccccctcccctcc

SEQ ID NO: 620486 - DNA, 15 bp, Homo sapiens
accccctcccctccc

SEQ ID NO: 620487 - DNA, 15 bp, Homo sapiens
ccccctcccctccca

SEQ ID NO: 620488 - DNA, 15 bp, Homo sapiens
cccctcccctcccag

SEQ ID NO: 620489 - DNA, 15 bp, Homo sapiens
ccctcccctcccagg

SEQ ID NO: 620490 - DNA, 15 bp, Homo sapiens
cctcccctcccaggg

SEQ ID NO: 620491 - DNA, 15 bp, Homo sapiens
ctcccctcccagggg

SEQ ID NO: 620492 - DNA, 15 bp, Homo sapiens
tcccctcccaggggt

SEQ ID NO: 620493 - DNA, 15 bp, Homo sapiens
cccctcccaggggtc

SEQ ID NO: 620494 - DNA, 15 bp, Homo sapiens
ccctcccaggggtcc

SEQ ID NO: 620495 - DNA, 15 bp, Homo sapiens
cctcccaggggtcca

SEQ ID NO: 620496 - DNA, 15 bp, Homo sapiens
ctcccaggggtccac

SEQ ID NO: 620497 - DNA, 15 bp, Homo sapiens
tcccaggggtccaca

SEQ ID NO: 620498 - DNA, 15 bp, Homo sapiens
cccaggggtccacaa

SEQ ID NO: 620499 - DNA, 15 bp, Homo sapiens
ccaggggtccacaaa

SEQ ID NO: 620500 - DNA, 15 bp, Homo sapiens
caggggtccacaaag

SEQ ID NO: 620501 - DNA, 15 bp, Homo sapiens
aggggtccacaaaga

SEQ ID NO: 620502 - DNA, 15 bp, Homo sapiens
ggggtccacaaagaa

SEQ ID NO: 620503 - DNA, 15 bp, Homo sapiens
gggtccacaaagaac

SEQ ID NO: 620504 - DNA, 15 bp, Homo sapiens
ggtccacaaagaacg

SEQ ID NO: 620505 - DNA, 15 bp, Homo sapiens
gtccacaaagaacgc

SEQ ID NO: 620506 - DNA, 15 bp, Homo sapiens
tccacaaagaacgcc

SEQ ID NO: 620507 - DNA, 15 bp, Homo sapiens
ccacaaagaacgccc

SEQ ID NO: 620508 - DNA, 15 bp, Homo sapiens
cacaaagaacgcccc

SEQ ID NO: 620509 - DNA, 15 bp, Homo sapiens
acaaagaacgccccc

SEQ ID NO: 620510 - DNA, 15 bp, Homo sapiens
caaagaacgccccct

SEQ ID NO: 620511 - DNA, 15 bp, Homo sapiens
aaagaacgccccctc

SEQ ID NO: 620512 - DNA, 15 bp, Homo sapiens
aagaacgccccctcc

SEQ ID NO: 620513 - DNA, 15 bp, Homo sapiens
agaacgccccctccc

SEQ ID NO: 620514 - DNA, 15 bp, Homo sapiens
gaacgccccctccct

SEQ ID NO: 620515 - DNA, 15 bp, Homo sapiens
aacgccccctccctt

SEQ ID NO: 620516 - DNA, 15 bp, Homo sapiens
acgccccctcccttc

SEQ ID NO: 620517 - DNA, 15 bp, Homo sapiens
cgccccctcccttcc

SEQ ID NO: 620518 - DNA, 15 bp, Homo sapiens
gccccctcccttccc

SEQ ID NO: 620519 - DNA, 15 bp, Homo sapiens
ccccctcccttccca

SEQ ID NO: 620520 - DNA, 15 bp, Homo sapiens
cccctcccttcccag

SEQ ID NO: 620521 - DNA, 15 bp, Homo sapiens
ccctcccttcccagc

SEQ ID NO: 620522 - DNA, 15 bp, Homo sapiens
cctcccttcccagcc

SEQ ID NO: 620523 - DNA, 15 bp, Homo sapiens
ctcccttcccagccc

SEQ ID NO: 620524 - DNA, 15 bp, Homo sapiens
tcccttcccagccct

SEQ ID NO: 620525 - DNA, 15 bp, Homo sapiens
cccttcccagccctc

SEQ ID NO: 620526 - DNA, 15 bp, Homo sapiens
ccttcccagccctca

SEQ ID NO: 620527 - DNA, 15 bp, Homo sapiens
cttcccagccctcac

SEQ ID NO: 620528 - DNA, 15 bp, Homo sapiens
ttcccagccctcaca

SEQ ID NO: 620529 - DNA, 15 bp, Homo sapiens
tcccagccctcacac

SEQ ID NO: 620530 - DNA, 15 bp, Homo sapiens
cccagccctcacact

SEQ ID NO: 620531 - DNA, 15 bp, Homo sapiens
ccagccctcacacta

SEQ ID NO: 620532 - DNA, 15 bp, Homo sapiens
cagccctcacactag

SEQ ID NO: 620533 - DNA, 15 bp, Homo sapiens
agccctcacactagc

SEQ ID NO: 620534 - DNA, 15 bp, Homo sapiens
gccctcacactagca

SEQ ID NO: 620535 - DNA, 15 bp, Homo sapiens
ccctcacactagcag

SEQ ID NO: 620536 - DNA, 15 bp, Homo sapiens
cctcacactagcagc

SEQ ID NO: 620537 - DNA, 15 bp, Homo sapiens
ctcacactagcagct

SEQ ID NO: 620538 - DNA, 15 bp, Homo sapiens
tcacactagcagctg

SEQ ID NO: 620539 - DNA, 15 bp, Homo sapiens
cacactagcagctga

SEQ ID NO: 620540 - DNA, 15 bp, Homo sapiens
acactagcagctgag

SEQ ID NO: 620541 - DNA, 15 bp, Homo sapiens
cactagcagctgagg

SEQ ID NO: 620542 - DNA, 15 bp, Homo sapiens
actagcagctgaggc

SEQ ID NO: 620543 - DNA, 15 bp, Homo sapiens
ctagcagctgaggct

SEQ ID NO: 620544 - DNA, 15 bp, Homo sapiens
tagcagctgaggctg

SEQ ID NO: 620545 - DNA, 15 bp, Homo sapiens
agcagctgaggctgg

SEQ ID NO: 620546 - DNA, 15 bp, Homo sapiens
gcagctgaggctggg

SEQ ID NO: 620547 - DNA, 15 bp, Homo sapiens
cagctgaggctgggt

SEQ ID NO: 620548 - DNA, 15 bp, Homo sapiens
agctgaggctgggtc

SEQ ID NO: 620549 - DNA, 15 bp, Homo sapiens
gctgaggctgggtca

SEQ ID NO: 620550 - DNA, 15 bp, Homo sapiens
ctgaggctgggtcac

SEQ ID NO: 620551 - DNA, 15 bp, Homo sapiens
tgaggctgggtcacc

SEQ ID NO: 620552 - DNA, 15 bp, Homo sapiens
gaggctgggtcaccc

SEQ ID NO: 620553 - DNA, 15 bp, Homo sapiens
aggctgggtcacccc

SEQ ID NO: 620554 - DNA, 15 bp, Homo sapiens
ggctgggtcacccct

SEQ ID NO: 620555 - DNA, 15 bp, Homo sapiens
gctgggtcacccctc

SEQ ID NO: 620556 - DNA, 15 bp, Homo sapiens
ctgggtcacccctcc

SEQ ID NO: 620557 - DNA, 15 bp, Homo sapiens
tgggtcacccctcct

SEQ ID NO: 620558 - DNA, 15 bp, Homo sapiens
gggtcacccctcctg

SEQ ID NO: 620559 - DNA, 15 bp, Homo sapiens
ggtcacccctcctgc

SEQ ID NO: 620560 - DNA, 15 bp, Homo sapiens
gtcacccctcctgct

SEQ ID NO: 620561 - DNA, 15 bp, Homo sapiens
tcacccctcctgctt

SEQ ID NO: 620562 - DNA, 15 bp, Homo sapiens
cacccctcctgcttt

SEQ ID NO: 620563 - DNA, 15 bp, Homo sapiens
acccctcctgctttc

SEQ ID NO: 620564 - DNA, 15 bp, Homo sapiens
cccctcctgctttcc

SEQ ID NO: 620565 - DNA, 15 bp, Homo sapiens
ccctcctgctttccc

SEQ ID NO: 620566 - DNA, 15 bp, Homo sapiens
cctcctgctttccca

SEQ ID NO: 620567 - DNA, 15 bp, Homo sapiens
ctcctgctttcccac

SEQ ID NO: 620568 - DNA, 15 bp, Homo sapiens
tcctgctttcccaca

SEQ ID NO: 620569 - DNA, 15 bp, Homo sapiens
cctgctttcccacaa

SEQ ID NO: 620570 - DNA, 15 bp, Homo sapiens
ctgctttcccacaat

SEQ ID NO: 620571 - DNA, 15 bp, Homo sapiens
tgctttcccacaata

SEQ ID NO: 620572 - DNA, 15 bp, Homo sapiens
gctttcccacaatag

SEQ ID NO: 620573 - DNA, 15 bp, Homo sapiens
ctttcccacaataga

SEQ ID NO: 620574 - DNA, 15 bp, Homo sapiens
tttcccacaatagag

SEQ ID NO: 620575 - DNA, 15 bp, Homo sapiens
ttcccacaatagagc

SEQ ID NO: 620576 - DNA, 15 bp, Homo sapiens
tcccacaatagagct

SEQ ID NO: 620577 - DNA, 15 bp, Homo sapiens
cccacaatagagctt

SEQ ID NO: 620578 - DNA, 15 bp, Homo sapiens
ccacaatagagcttt

SEQ ID NO: 620579 - DNA, 15 bp, Homo sapiens
cacaatagagctttc

SEQ ID NO: 620580 - DNA, 15 bp, Homo sapiens
acaatagagctttct

SEQ ID NO: 620581 - DNA, 15 bp, Homo sapiens
caatagagctttcta

SEQ ID NO: 620582 - DNA, 15 bp, Homo sapiens
aatagagctttctat

SEQ ID NO: 620583 - DNA, 15 bp, Homo sapiens
atagagctttctatg

SEQ ID NO: 620584 - DNA, 15 bp, Homo sapiens
tagagctttctatgt

SEQ ID NO: 620585 - DNA, 15 bp, Homo sapiens
agagctttctatgta

SEQ ID NO: 620586 - DNA, 15 bp, Homo sapiens
gagctttctatgtac

SEQ ID NO: 620587 - DNA, 15 bp, Homo sapiens
agctttctatgtaca

SEQ ID NO: 620588 - DNA, 15 bp, Homo sapiens
gctttctatgtacag

SEQ ID NO: 620589 - DNA, 15 bp, Homo sapiens
ctttctatgtacagc

SEQ ID NO: 620590 - DNA, 15 bp, Homo sapiens
tttctatgtacagcc

SEQ ID NO: 620591 - DNA, 15 bp, Homo sapiens
ttctatgtacagcca

SEQ ID NO: 620592 - DNA, 15 bp, Homo sapiens
tctatgtacagccac

SEQ ID NO: 620593 - DNA, 15 bp, Homo sapiens
ctatgtacagccacg

SEQ ID NO: 620594 - DNA, 15 bp, Homo sapiens
tatgtacagccacgt

SEQ ID NO: 620595 - DNA, 15 bp, Homo sapiens
atgtacagccacgtc

SEQ ID NO: 620596 - DNA, 15 bp, Homo sapiens
tgtacagccacgtct

SEQ ID NO: 620597 - DNA, 15 bp, Homo sapiens
gtacagccacgtcta

SEQ ID NO: 620598 - DNA, 15 bp, Homo sapiens
tacagccacgtctac

SEQ ID NO: 620599 - DNA, 15 bp, Homo sapiens
acagccacgtctaca

SEQ ID NO: 620600 - DNA, 15 bp, Homo sapiens
cagccacgtctacac

SEQ ID NO: 620601 - DNA, 15 bp, Homo sapiens
agccacgtctacaca

SEQ ID NO: 620602 - DNA, 15 bp, Homo sapiens
gccacgtctacacag

SEQ ID NO: 620603 - DNA, 15 bp, Homo sapiens
ccacgtctacacagg

SEQ ID NO: 620604 - DNA, 15 bp, Homo sapiens
cacgtctacacaggc

SEQ ID NO: 620605 - DNA, 15 bp, Homo sapiens
acgtctacacaggca

SEQ ID NO: 620606 - DNA, 15 bp, Homo sapiens
cgtctacacaggcac

SEQ ID NO: 620607 - DNA, 15 bp, Homo sapiens
gtctacacaggcact

SEQ ID NO: 620608 - DNA, 15 bp, Homo sapiens
tctacacaggcactg

SEQ ID NO: 620609 - DNA, 15 bp, Homo sapiens
ctacacaggcactgc

SEQ ID NO: 620610 - DNA, 15 bp, Homo sapiens
tacacaggcactgct

SEQ ID NO: 620611 - DNA, 15 bp, Homo sapiens
acacaggcactgctt

SEQ ID NO: 620612 - DNA, 15 bp, Homo sapiens
cacaggcactgcttc

SEQ ID NO: 620613 - DNA, 15 bp, Homo sapiens
acaggcactgcttcc

SEQ ID NO: 620614 - DNA, 15 bp, Homo sapiens
caggcactgcttccc

SEQ ID NO: 620615 - DNA, 15 bp, Homo sapiens
aggcactgcttcccc

SEQ ID NO: 620616 - DNA, 15 bp, Homo sapiens
ggcactgcttccccc

SEQ ID NO: 620617 - DNA, 15 bp, Homo sapiens
gcactgcttcccccc

SEQ ID NO: 620618 - DNA, 15 bp, Homo sapiens
cactgcttcccccca

SEQ ID NO: 620619 - DNA, 15 bp, Homo sapiens
actgcttccccccag

SEQ ID NO: 620620 - DNA, 15 bp, Homo sapiens
ctgcttccccccagc

SEQ ID NO: 620621 - DNA, 15 bp, Homo sapiens
tgcttccccccagcc

SEQ ID NO: 620622 - DNA, 15 bp, Homo sapiens
gcttccccccagccc

SEQ ID NO: 620623 - DNA, 15 bp, Homo sapiens
cttccccccagccct

SEQ ID NO: 620624 - DNA, 15 bp, Homo sapiens
ttccccccagccctc

SEQ ID NO: 620625 - DNA, 15 bp, Homo sapiens
tccccccagccctcc

SEQ ID NO: 620626 - DNA, 15 bp, Homo sapiens
ccccccagccctcct

SEQ ID NO: 620627 - DNA, 15 bp, Homo sapiens
cccccagccctcctc

SEQ ID NO: 620628 - DNA, 15 bp, Homo sapiens
ccccagccctcctcc

SEQ ID NO: 620629 - DNA, 15 bp, Homo sapiens
cccagccctcctccc

SEQ ID NO: 620630 - DNA, 15 bp, Homo sapiens
ccagccctcctcccc

SEQ ID NO: 620631 - DNA, 15 bp, Homo sapiens
cagccctcctccccg

SEQ ID NO: 620632 - DNA, 15 bp, Homo sapiens
agccctcctccccgg

SEQ ID NO: 620633 - DNA, 15 bp, Homo sapiens
gccctcctccccggc

SEQ ID NO: 620634 - DNA, 15 bp, Homo sapiens
ccctcctccccggca

SEQ ID NO: 620635 - DNA, 15 bp, Homo sapiens
cctcctccccggcac

SEQ ID NO: 620636 - DNA, 15 bp, Homo sapiens
ctcctccccggcacc

SEQ ID NO: 620637 - DNA, 15 bp, Homo sapiens
tcctccccggcacct

SEQ ID NO: 620638 - DNA, 15 bp, Homo sapiens
cctccccggcacctc

SEQ ID NO: 620639 - DNA, 15 bp, Homo sapiens
ctccccggcacctcc

SEQ ID NO: 620640 - DNA, 15 bp, Homo sapiens
tccccggcacctccc

SEQ ID NO: 620641 - DNA, 15 bp, Homo sapiens
ccccggcacctcccc

SEQ ID NO: 620642 - DNA, 15 bp, Homo sapiens
cccggcacctccccg

SEQ ID NO: 620643 - DNA, 15 bp, Homo sapiens
ccggcacctccccgt

SEQ ID NO: 620644 - DNA, 15 bp, Homo sapiens
cggcacctccccgtg

SEQ ID NO: 620645 - DNA, 15 bp, Homo sapiens
ggcacctccccgtgg

SEQ ID NO: 620646 - DNA, 15 bp, Homo sapiens
gcacctccccgtggg

SEQ ID NO: 620647 - DNA, 15 bp, Homo sapiens
cacctccccgtgggg

SEQ ID NO: 620648 - DNA, 15 bp, Homo sapiens
acctccccgtggggg

SEQ ID NO: 620649 - DNA, 15 bp, Homo sapiens
cctccccgtgggggt

SEQ ID NO: 620650 - DNA, 15 bp, Homo sapiens
ctccccgtgggggtc

SEQ ID NO: 620651 - DNA, 15 bp, Homo sapiens
tccccgtgggggtct

SEQ ID NO: 620652 - DNA, 15 bp, Homo sapiens
ccccgtgggggtctg

SEQ ID NO: 620653 - DNA, 15 bp, Homo sapiens
cccgtgggggtctgg

SEQ ID NO: 620654 - DNA, 15 bp, Homo sapiens
ccgtgggggtctgga

SEQ ID NO: 620655 - DNA, 15 bp, Homo sapiens
cgtgggggtctggac

SEQ ID NO: 620656 - DNA, 15 bp, Homo sapiens
gtgggggtctggacc

SEQ ID NO: 620657 - DNA, 15 bp, Homo sapiens
tgggggtctggaccc

SEQ ID NO: 620658 - DNA, 15 bp, Homo sapiens
gggggtctggacccc

SEQ ID NO: 620659 - DNA, 15 bp, Homo sapiens
ggggtctggaccccc

SEQ ID NO: 620660 - DNA, 15 bp, Homo sapiens
gggtctggacccccc

SEQ ID NO: 620661 - DNA, 15 bp, Homo sapiens
ggtctggaccccccc

SEQ ID NO: 620662 - DNA, 15 bp, Homo sapiens
gtctggaccccccct

SEQ ID NO: 620663 - DNA, 15 bp, Homo sapiens
tctggaccccccctc

SEQ ID NO: 620664 - DNA, 15 bp, Homo sapiens
ctggaccccccctcc

SEQ ID NO: 620665 - DNA, 15 bp, Homo sapiens
tggaccccccctcct

SEQ ID NO: 620666 - DNA, 15 bp, Homo sapiens
ggaccccccctcctc

SEQ ID NO: 620667 - DNA, 15 bp, Homo sapiens
gaccccccctcctcc

SEQ ID NO: 620668 - DNA, 15 bp, Homo sapiens
accccccctcctccc

SEQ ID NO: 620669 - DNA, 15 bp, Homo sapiens
ccccccctcctcccc

SEQ ID NO: 620670 - DNA, 15 bp, Homo sapiens
cccccctcctccccg

SEQ ID NO: 620671 - DNA, 15 bp, Homo sapiens
ccccctcctccccgg

SEQ ID NO: 620672 - DNA, 15 bp, Homo sapiens
cccctcctccccggc

SEQ ID NO: 620673 - DNA, 15 bp, Homo sapiens
ccctcctccccggct

SEQ ID NO: 620674 - DNA, 15 bp, Homo sapiens
cctcctccccggctt

SEQ ID NO: 620675 - DNA, 15 bp, Homo sapiens
ctcctccccggcttg

SEQ ID NO: 620676 - DNA, 15 bp, Homo sapiens
tcctccccggcttgg

SEQ ID NO: 620677 - DNA, 15 bp, Homo sapiens
cctccccggcttgga

SEQ ID NO: 620678 - DNA, 15 bp, Homo sapiens
ctccccggcttggag

SEQ ID NO: 620679 - DNA, 15 bp, Homo sapiens
tccccggcttggagg

SEQ ID NO: 620680 - DNA, 15 bp, Homo sapiens
ccccggcttggaggc

SEQ ID NO: 620681 - DNA, 15 bp, Homo sapiens
cccggcttggaggca

SEQ ID NO: 620682 - DNA, 15 bp, Homo sapiens
ccggcttggaggcag

SEQ ID NO: 620683 - DNA, 15 bp, Homo sapiens
cggcttggaggcaga

SEQ ID NO: 620684 - DNA, 15 bp, Homo sapiens
ggcttggaggcagac

SEQ ID NO: 620685 - DNA, 15 bp, Homo sapiens
gcttggaggcagaca

SEQ ID NO: 620686 - DNA, 15 bp, Homo sapiens
cttggaggcagacac

SEQ ID NO: 620687 - DNA, 15 bp, Homo sapiens
ttggaggcagacaca

SEQ ID NO: 620688 - DNA, 15 bp, Homo sapiens
tggaggcagacacag

SEQ ID NO: 620689 - DNA, 15 bp, Homo sapiens
ggaggcagacacagg

SEQ ID NO: 620690 - DNA, 15 bp, Homo sapiens
gaggcagacacaggg

SEQ ID NO: 620691 - DNA, 15 bp, Homo sapiens
aggcagacacagggt

SEQ ID NO: 620692 - DNA, 15 bp, Homo sapiens
ggcagacacagggtc

SEQ ID NO: 620693 - DNA, 15 bp, Homo sapiens
gcagacacagggtcc

SEQ ID NO: 620694 - DNA, 15 bp, Homo sapiens
cagacacagggtccc

SEQ ID NO: 620695 - DNA, 15 bp, Homo sapiens
agacacagggtccct

SEQ ID NO: 620696 - DNA, 15 bp, Homo sapiens
gacacagggtccctt

SEQ ID NO: 620697 - DNA, 15 bp, Homo sapiens
acacagggtcccttg

SEQ ID NO: 620698 - DNA, 15 bp, Homo sapiens
cacagggtcccttgc

SEQ ID NO: 620699 - DNA, 15 bp, Homo sapiens
acagggtcccttgca

SEQ ID NO: 620700 - DNA, 15 bp, Homo sapiens
cagggtcccttgcaa

SEQ ID NO: 620701 - DNA, 15 bp, Homo sapiens
agggtcccttgcaag

SEQ ID NO: 620702 - DNA, 15 bp, Homo sapiens
gggtcccttgcaaga

SEQ ID NO: 620703 - DNA, 15 bp, Homo sapiens
ggtcccttgcaagac

SEQ ID NO: 620704 - DNA, 15 bp, Homo sapiens
gtcccttgcaagaca

SEQ ID NO: 620705 - DNA, 15 bp, Homo sapiens
tcccttgcaagacac

SEQ ID NO: 620706 - DNA, 15 bp, Homo sapiens
cccttgcaagacacg

SEQ ID NO: 620707 - DNA, 15 bp, Homo sapiens
ccttgcaagacacga

SEQ ID NO: 620708 - DNA, 15 bp, Homo sapiens
cttgcaagacacgac

SEQ ID NO: 620709 - DNA, 15 bp, Homo sapiens
ttgcaagacacgacc

SEQ ID NO: 620710 - DNA, 15 bp, Homo sapiens
tgcaagacacgaccc

SEQ ID NO: 620711 - DNA, 15 bp, Homo sapiens
gcaagacacgaccca

SEQ ID NO: 620712 - DNA, 15 bp, Homo sapiens
caagacacgacccag

SEQ ID NO: 620713 - DNA, 15 bp, Homo sapiens
aagacacgacccagc

SEQ ID NO: 620714 - DNA, 15 bp, Homo sapiens
agacacgacccagca

SEQ ID NO: 620715 - DNA, 15 bp, Homo sapiens
gacacgacccagcac

SEQ ID NO: 620716 - DNA, 15 bp, Homo sapiens
acacgacccagcacc

SEQ ID NO: 620717 - DNA, 15 bp, Homo sapiens
cacgacccagcacca

SEQ ID NO: 620718 - DNA, 15 bp, Homo sapiens
acgacccagcaccaa

SEQ ID NO: 620719 - DNA, 15 bp, Homo sapiens
cgacccagcaccaac

SEQ ID NO: 620720 - DNA, 15 bp, Homo sapiens
gacccagcaccaacc

SEQ ID NO: 620721 - DNA, 15 bp, Homo sapiens
acccagcaccaacca

SEQ ID NO: 620722 - DNA, 15 bp, Homo sapiens
cccagcaccaaccac

SEQ ID NO: 620723 - DNA, 15 bp, Homo sapiens
ccagcaccaaccacg

SEQ ID NO: 620724 - DNA, 15 bp, Homo sapiens
cagcaccaaccacgg

SEQ ID NO: 620725 - DNA, 15 bp, Homo sapiens
agcaccaaccacgga

SEQ ID NO: 620726 - DNA, 15 bp, Homo sapiens
gcaccaaccacggaa

SEQ ID NO: 620727 - DNA, 15 bp, Homo sapiens
caccaaccacggaac

SEQ ID NO: 620728 - DNA, 15 bp, Homo sapiens
accaaccacggaaca

SEQ ID NO: 620729 - DNA, 15 bp, Homo sapiens
ccaaccacggaacag

SEQ ID NO: 620730 - DNA, 15 bp, Homo sapiens
caaccacggaacagc

SEQ ID NO: 620731 - DNA, 15 bp, Homo sapiens
aaccacggaacagct

SEQ ID NO: 620732 - DNA, 15 bp, Homo sapiens
accacggaacagctc

SEQ ID NO: 620733 - DNA, 15 bp, Homo sapiens
ccacggaacagctcc

SEQ ID NO: 620734 - DNA, 15 bp, Homo sapiens
cacggaacagctcca

SEQ ID NO: 620735 - DNA, 15 bp, Homo sapiens
acggaacagctccaa

SEQ ID NO: 620736 - DNA, 15 bp, Homo sapiens
cggaacagctccaag

SEQ ID NO: 620737 - DNA, 15 bp, Homo sapiens
ggaacagctccaagg

SEQ ID NO: 620738 - DNA, 15 bp, Homo sapiens
gaacagctccaaggc

SEQ ID NO: 620739 - DNA, 15 bp, Homo sapiens
aacagctccaaggcc

SEQ ID NO: 620740 - DNA, 15 bp, Homo sapiens
acagctccaaggccc

SEQ ID NO: 620741 - DNA, 15 bp, Homo sapiens
cagctccaaggcccc

SEQ ID NO: 620742 - DNA, 15 bp, Homo sapiens
agctccaaggcccct

SEQ ID NO: 620743 - DNA, 15 bp, Homo sapiens
gctccaaggcccctg

SEQ ID NO: 620744 - DNA, 15 bp, Homo sapiens
ctccaaggcccctgg

SEQ ID NO: 620745 - DNA, 15 bp, Homo sapiens
tccaaggcccctggg

SEQ ID NO: 620746 - DNA, 15 bp, Homo sapiens
ccaaggcccctgggc

SEQ ID NO: 620747 - DNA, 15 bp, Homo sapiens
caaggcccctgggcc

SEQ ID NO: 620748 - DNA, 15 bp, Homo sapiens
aaggcccctgggccc

SEQ ID NO: 620749 - DNA, 15 bp, Homo sapiens
aggcccctgggcccc

SEQ ID NO: 620750 - DNA, 15 bp, Homo sapiens
ggcccctgggcccct

SEQ ID NO: 620751 - DNA, 15 bp, Homo sapiens
gcccctgggcccctc

SEQ ID NO: 620752 - DNA, 15 bp, Homo sapiens
cccctgggcccctct

SEQ ID NO: 620753 - DNA, 15 bp, Homo sapiens
ccctgggcccctctc

SEQ ID NO: 620754 - DNA, 15 bp, Homo sapiens
cctgggcccctctcc

SEQ ID NO: 620755 - DNA, 15 bp, Homo sapiens
ctgggcccctctccg

SEQ ID NO: 620756 - DNA, 15 bp, Homo sapiens
tgggcccctctccgg

SEQ ID NO: 620757 - DNA, 15 bp, Homo sapiens
gggcccctctccggc

SEQ ID NO: 620758 - DNA, 15 bp, Homo sapiens
ggcccctctccggcc

SEQ ID NO: 620759 - DNA, 15 bp, Homo sapiens
gcccctctccggcct

SEQ ID NO: 620760 - DNA, 15 bp, Homo sapiens
cccctctccggcctg

SEQ ID NO: 620761 - DNA, 15 bp, Homo sapiens
ccctctccggcctgg

SEQ ID NO: 620762 - DNA, 15 bp, Homo sapiens
cctctccggcctggg

SEQ ID NO: 620763 - DNA, 15 bp, Homo sapiens
ctctccggcctgggg

SEQ ID NO: 620764 - DNA, 15 bp, Homo sapiens
tctccggcctggggc

SEQ ID NO: 620765 - DNA, 15 bp, Homo sapiens
ctccggcctggggct

SEQ ID NO: 620766 - DNA, 15 bp, Homo sapiens
tccggcctggggctg

SEQ ID NO: 620767 - DNA, 15 bp, Homo sapiens
ccggcctggggctgg

SEQ ID NO: 620768 - DNA, 15 bp, Homo sapiens
cggcctggggctggg

SEQ ID NO: 620769 - DNA, 15 bp, Homo sapiens
ggcctggggctggga

SEQ ID NO: 620770 - DNA, 15 bp, Homo sapiens
gcctggggctgggag

SEQ ID NO: 620771 - DNA, 15 bp, Homo sapiens
cctggggctgggagc

SEQ ID NO: 620772 - DNA, 15 bp, Homo sapiens
ctggggctgggagct

SEQ ID NO: 620773 - DNA, 15 bp, Homo sapiens
tggggctgggagcta

SEQ ID NO: 620774 - DNA, 15 bp, Homo sapiens
ggggctgggagctac

SEQ ID NO: 620775 - DNA, 15 bp, Homo sapiens
gggctgggagctacg

SEQ ID NO: 620776 - DNA, 15 bp, Homo sapiens
ggctgggagctacgc

SEQ ID NO: 620777 - DNA, 15 bp, Homo sapiens
gctgggagctacgcg

SEQ ID NO: 620778 - DNA, 15 bp, Homo sapiens
ctgggagctacgcgc

SEQ ID NO: 620779 - DNA, 15 bp, Homo sapiens
tgggagctacgcgcg

SEQ ID NO: 620780 - DNA, 15 bp, Homo sapiens
gggagctacgcgcga

SEQ ID NO: 620781 - DNA, 15 bp, Homo sapiens
ggagctacgcgcgag

SEQ ID NO: 620782 - DNA, 15 bp, Homo sapiens
gagctacgcgcgagg

SEQ ID NO: 620783 - DNA, 15 bp, Homo sapiens
agctacgcgcgaggg

SEQ ID NO: 620784 - DNA, 15 bp, Homo sapiens
gctacgcgcgagggc

SEQ ID NO: 620785 - DNA, 15 bp, Homo sapiens
ctacgcgcgagggcc

SEQ ID NO: 620786 - DNA, 15 bp, Homo sapiens
tacgcgcgagggccc

SEQ ID NO: 620787 - DNA, 15 bp, Homo sapiens
acgcgcgagggcccc

SEQ ID NO: 620788 - DNA, 15 bp, Homo sapiens
cgcgcgagggccccc

SEQ ID NO: 620789 - DNA, 15 bp, Homo sapiens
gcgcgagggcccccg

SEQ ID NO: 620790 - DNA, 15 bp, Homo sapiens
cgcgagggcccccgc

SEQ ID NO: 620791 - DNA, 15 bp, Homo sapiens
gcgagggcccccgcg

SEQ ID NO: 620792 - DNA, 15 bp, Homo sapiens
cgagggcccccgcgg

SEQ ID NO: 620793 - DNA, 15 bp, Homo sapiens
gagggcccccgcggg

SEQ ID NO: 620794 - DNA, 15 bp, Homo sapiens
agggcccccgcgggc

SEQ ID NO: 620795 - DNA, 15 bp, Homo sapiens
gggcccccgcgggcc

SEQ ID NO: 620796 - DNA, 15 bp, Homo sapiens
ggcccccgcgggccc

SEQ ID NO: 620797 - DNA, 15 bp, Homo sapiens
gcccccgcgggcccc

SEQ ID NO: 620798 - DNA, 15 bp, Homo sapiens
cccccgcgggccccc

SEQ ID NO: 620799 - DNA, 15 bp, Homo sapiens
ccccgcgggcccccg

SEQ ID NO: 620800 - DNA, 15 bp, Homo sapiens
cccgcgggcccccgg

SEQ ID NO: 620801 - DNA, 15 bp, Homo sapiens
ccgcgggcccccggg

SEQ ID NO: 620802 - DNA, 15 bp, Homo sapiens
cgcgggcccccgggg

SEQ ID NO: 620803 - DNA, 15 bp, Homo sapiens
gcgggcccccggggc

SEQ ID NO: 620804 - DNA, 15 bp, Homo sapiens
cgggcccccggggcg

SEQ ID NO: 620805 - DNA, 15 bp, Homo sapiens
gggcccccggggcgc

SEQ ID NO: 620806 - DNA, 15 bp, Homo sapiens
ggcccccggggcgcg

SEQ ID NO: 620807 - DNA, 15 bp, Homo sapiens
gcccccggggcgcgc

SEQ ID NO: 620808 - DNA, 15 bp, Homo sapiens
cccccggggcgcgca

SEQ ID NO: 620809 - DNA, 15 bp, Homo sapiens
ccccggggcgcgcac

SEQ ID NO: 620810 - DNA, 15 bp, Homo sapiens
cccggggcgcgcacc

SEQ ID NO: 620811 - DNA, 15 bp, Homo sapiens
ccggggcgcgcaccc

SEQ ID NO: 620812 - DNA, 15 bp, Homo sapiens
cggggcgcgcaccct

SEQ ID NO: 620813 - DNA, 15 bp, Homo sapiens
ggggcgcgcaccctg

SEQ ID NO: 620814 - DNA, 15 bp, Homo sapiens
gggcgcgcaccctgg

SEQ ID NO: 620815 - DNA, 15 bp, Homo sapiens
agtttggggtcttgg

SEQ ID NO: 620816 - DNA, 15 bp, Homo sapiens
gtttggggtcttggg

SEQ ID NO: 620817 - DNA, 15 bp, Homo sapiens
tttggggtcttggga

SEQ ID NO: 620818 - DNA, 15 bp, Homo sapiens
ttggggtcttgggaa

SEQ ID NO: 620819 - DNA, 15 bp, Homo sapiens
tggggtcttgggaaa

SEQ ID NO: 620820 - DNA, 15 bp, Homo sapiens
ggggtcttgggaaaa

SEQ ID NO: 620821 - DNA, 15 bp, Homo sapiens
gggtcttgggaaaaa

SEQ ID NO: 620822 - DNA, 15 bp, Homo sapiens
ggtcttgggaaaaaa

SEQ ID NO: 620823 - DNA, 15 bp, Homo sapiens
gtcttgggaaaaaat

SEQ ID NO: 620824 - DNA, 15 bp, Homo sapiens
tcttgggaaaaaatt

SEQ ID NO: 620825 - DNA, 15 bp, Homo sapiens
cttgggaaaaaattg

SEQ ID NO: 620826 - DNA, 15 bp, Homo sapiens
ttgggaaaaaattga

SEQ ID NO: 620827 - DNA, 15 bp, Homo sapiens
tgggaaaaaattgac

SEQ ID NO: 620828 - DNA, 15 bp, Homo sapiens
gggaaaaaattgaca

SEQ ID NO: 620829 - DNA, 15 bp, Homo sapiens
ggaaaaaattgacag

SEQ ID NO: 620830 - DNA, 15 bp, Homo sapiens
gaaaaaattgacagg

SEQ ID NO: 620831 - DNA, 15 bp, Homo sapiens
aaaaaattgacaggg

SEQ ID NO: 620832 - DNA, 15 bp, Homo sapiens
aaaaattgacagggg

SEQ ID NO: 620833 - DNA, 15 bp, Homo sapiens
aaaattgacagggga

SEQ ID NO: 620834 - DNA, 15 bp, Homo sapiens
aaattgacaggggac

SEQ ID NO: 620835 - DNA, 15 bp, Homo sapiens
aattgacaggggaca

SEQ ID NO: 620836 - DNA, 15 bp, Homo sapiens
attgacaggggacac

SEQ ID NO: 620837 - DNA, 15 bp, Homo sapiens
ttgacaggggacact

SEQ ID NO: 620838 - DNA, 15 bp, Homo sapiens
tgacaggggacacta

SEQ ID NO: 620839 - DNA, 15 bp, Homo sapiens
gacaggggacactag

SEQ ID NO: 620840 - DNA, 15 bp, Homo sapiens
acaggggacactagg

SEQ ID NO: 620841 - DNA, 15 bp, Homo sapiens
caggggacactagga

SEQ ID NO: 620842 - DNA, 15 bp, Homo sapiens
aggggacactaggaa

SEQ ID NO: 620843 - DNA, 15 bp, Homo sapiens
ggggacactaggaaa

SEQ ID NO: 620844 - DNA, 15 bp, Homo sapiens
gggacactaggaaac

SEQ ID NO: 620845 - DNA, 15 bp, Homo sapiens
ggacactaggaaact

SEQ ID NO: 620846 - DNA, 15 bp, Homo sapiens
gacactaggaaactg

SEQ ID NO: 620847 - DNA, 15 bp, Homo sapiens
acactaggaaactgg

SEQ ID NO: 620848 - DNA, 15 bp, Homo sapiens
cactaggaaactggt

SEQ ID NO: 620849 - DNA, 15 bp, Homo sapiens
actaggaaactggtc

SEQ ID NO: 620850 - DNA, 15 bp, Homo sapiens
ctaggaaactggtca

SEQ ID NO: 620851 - DNA, 15 bp, Homo sapiens
taggaaactggtcat

SEQ ID NO: 620852 - DNA, 15 bp, Homo sapiens
aggaaactggtcatt

SEQ ID NO: 620853 - DNA, 15 bp, Homo sapiens
ggaaactggtcattc

SEQ ID NO: 620854 - DNA, 15 bp, Homo sapiens
gaaactggtcattcc

SEQ ID NO: 620855 - DNA, 15 bp, Homo sapiens
aaactggtcattccc

SEQ ID NO: 620856 - DNA, 15 bp, Homo sapiens
aactggtcattccca

SEQ ID NO: 620857 - DNA, 15 bp, Homo sapiens
actggtcattcccat

SEQ ID NO: 620858 - DNA, 15 bp, Homo sapiens
ctggtcattcccatc

SEQ ID NO: 620859 - DNA, 15 bp, Homo sapiens
tggtcattcccatca

SEQ ID NO: 620860 - DNA, 15 bp, Homo sapiens
ggtcattcccatcat

SEQ ID NO: 620861 - DNA, 15 bp, Homo sapiens
gtcattcccatcatt

SEQ ID NO: 620862 - DNA, 15 bp, Homo sapiens
tcattcccatcattc

SEQ ID NO: 620863 - DNA, 15 bp, Homo sapiens
cattcccatcattca

SEQ ID NO: 620864 - DNA, 15 bp, Homo sapiens
attcccatcattcat

SEQ ID NO: 620865 - DNA, 15 bp, Homo sapiens
ttcccatcattcatc

SEQ ID NO: 620866 - DNA, 15 bp, Homo sapiens
tcccatcattcatcc

SEQ ID NO: 620867 - DNA, 15 bp, Homo sapiens
cccatcattcatcct

SEQ ID NO: 620868 - DNA, 15 bp, Homo sapiens
ccatcattcatcctt

SEQ ID NO: 620869 - DNA, 15 bp, Homo sapiens
catcattcatccttt

SEQ ID NO: 620870 - DNA, 15 bp, Homo sapiens
atcattcatcctttt

SEQ ID NO: 620871 - DNA, 15 bp, Homo sapiens
tcattcatccttttc

SEQ ID NO: 620872 - DNA, 15 bp, Homo sapiens
cattcatccttttcc

SEQ ID NO: 620873 - DNA, 15 bp, Homo sapiens
attcatccttttccc

SEQ ID NO: 620874 - DNA, 15 bp, Homo sapiens
ttcatccttttccca

SEQ ID NO: 620875 - DNA, 15 bp, Homo sapiens
tcatccttttcccag

SEQ ID NO: 620876 - DNA, 15 bp, Homo sapiens
catccttttcccaga

SEQ ID NO: 620877 - DNA, 15 bp, Homo sapiens
atccttttcccagaa

SEQ ID NO: 620878 - DNA, 15 bp, Homo sapiens
tccttttcccagaat

SEQ ID NO: 620879 - DNA, 15 bp, Homo sapiens
ccttttcccagaatc

SEQ ID NO: 620880 - DNA, 15 bp, Homo sapiens
cttttcccagaatcc

SEQ ID NO: 620881 - DNA, 15 bp, Homo sapiens
ttttcccagaatcct

SEQ ID NO: 620882 - DNA, 15 bp, Homo sapiens
tttcccagaatcctt

SEQ ID NO: 620883 - DNA, 15 bp, Homo sapiens
ttcccagaatccttt

SEQ ID NO: 620884 - DNA, 15 bp, Homo sapiens
tcccagaatcctttg

SEQ ID NO: 620885 - DNA, 15 bp, Homo sapiens
cccagaatcctttgc

SEQ ID NO: 620886 - DNA, 15 bp, Homo sapiens
ccagaatcctttgca

SEQ ID NO: 620887 - DNA, 15 bp, Homo sapiens
cagaatcctttgcac

SEQ ID NO: 620888 - DNA, 15 bp, Homo sapiens
agaatcctttgcaca

SEQ ID NO: 620889 - DNA, 15 bp, Homo sapiens
gaatcctttgcacaa

SEQ ID NO: 620890 - DNA, 15 bp, Homo sapiens
aatcctttgcacaag

SEQ ID NO: 620891 - DNA, 15 bp, Homo sapiens
atcctttgcacaagc

SEQ ID NO: 620892 - DNA, 15 bp, Homo sapiens
tcctttgcacaagcc

SEQ ID NO: 620893 - DNA, 15 bp, Homo sapiens
cctttgcacaagcct

SEQ ID NO: 620894 - DNA, 15 bp, Homo sapiens
ctttgcacaagcctg

SEQ ID NO: 620895 - DNA, 15 bp, Homo sapiens
tttgcacaagcctgt

SEQ ID NO: 620896 - DNA, 15 bp, Homo sapiens
ttgcacaagcctgtt

SEQ ID NO: 620897 - DNA, 15 bp, Homo sapiens
tgcacaagcctgttt

SEQ ID NO: 620898 - DNA, 15 bp, Homo sapiens
gcacaagcctgtttc

SEQ ID NO: 620899 - DNA, 15 bp, Homo sapiens
cacaagcctgtttcc

SEQ ID NO: 620900 - DNA, 15 bp, Homo sapiens
acaagcctgtttccc

SEQ ID NO: 620901 - DNA, 15 bp, Homo sapiens
caagcctgtttccct

SEQ ID NO: 620902 - DNA, 15 bp, Homo sapiens
aagcctgtttccctt

SEQ ID NO: 620903 - DNA, 15 bp, Homo sapiens
agcctgtttcccttc

SEQ ID NO: 620904 - DNA, 15 bp, Homo sapiens
gcctgtttcccttca

SEQ ID NO: 620905 - DNA, 15 bp, Homo sapiens
cctgtttcccttcag

SEQ ID NO: 620906 - DNA, 15 bp, Homo sapiens
ctgtttcccttcaga

SEQ ID NO: 620907 - DNA, 15 bp, Homo sapiens
tgtttcccttcagat

SEQ ID NO: 620908 - DNA, 15 bp, Homo sapiens
gtttcccttcagatt

SEQ ID NO: 620909 - DNA, 15 bp, Homo sapiens
tttcccttcagattt

SEQ ID NO: 620910 - DNA, 15 bp, Homo sapiens
ttcccttcagattta

SEQ ID NO: 620911 - DNA, 15 bp, Homo sapiens
tcccttcagatttag

SEQ ID NO: 620912 - DNA, 15 bp, Homo sapiens
cccttcagatttagg

SEQ ID NO: 620913 - DNA, 15 bp, Homo sapiens
ccttcagatttaggg

SEQ ID NO: 620914 - DNA, 15 bp, Homo sapiens
cttcagatttaggga

SEQ ID NO: 620915 - DNA, 15 bp, Homo sapiens
ttcagatttagggac

SEQ ID NO: 620916 - DNA, 15 bp, Homo sapiens
tcagatttagggact

SEQ ID NO: 620917 - DNA, 15 bp, Homo sapiens
cagatttagggactc

SEQ ID NO: 620918 - DNA, 15 bp, Homo sapiens
agatttagggactca

SEQ ID NO: 620919 - DNA, 15 bp, Homo sapiens
gatttagggactcac

SEQ ID NO: 620920 - DNA, 15 bp, Homo sapiens
atttagggactcacc

SEQ ID NO: 620921 - DNA, 15 bp, Homo sapiens
tttagggactcaccc

SEQ ID NO: 620922 - DNA, 15 bp, Homo sapiens
ttagggactcacccc

SEQ ID NO: 620923 - DNA, 15 bp, Homo sapiens
tagggactcacccca

SEQ ID NO: 620924 - DNA, 15 bp, Homo sapiens
agggactcaccccaa

SEQ ID NO: 620925 - DNA, 15 bp, Homo sapiens
gggactcaccccaac

SEQ ID NO: 620926 - DNA, 15 bp, Homo sapiens
ggactcaccccaacc

SEQ ID NO: 620927 - DNA, 15 bp, Homo sapiens
gactcaccccaaccc

SEQ ID NO: 620928 - DNA, 15 bp, Homo sapiens
actcaccccaacccc

SEQ ID NO: 620929 - DNA, 15 bp, Homo sapiens
ctcaccccaacccca

SEQ ID NO: 620930 - DNA, 15 bp, Homo sapiens
tcaccccaaccccat

SEQ ID NO: 620931 - DNA, 15 bp, Homo sapiens
caccccaaccccatg

SEQ ID NO: 620932 - DNA, 15 bp, Homo sapiens
accccaaccccatgc

SEQ ID NO: 620933 - DNA, 15 bp, Homo sapiens
ccccaaccccatgcc

SEQ ID NO: 620934 - DNA, 15 bp, Homo sapiens
cccaaccccatgccc

SEQ ID NO: 620935 - DNA, 15 bp, Homo sapiens
ccaaccccatgccca

SEQ ID NO: 620936 - DNA, 15 bp, Homo sapiens
caaccccatgcccaa

SEQ ID NO: 620937 - DNA, 15 bp, Homo sapiens
aaccccatgcccaaa

SEQ ID NO: 620938 - DNA, 15 bp, Homo sapiens
accccatgcccaaac

SEQ ID NO: 620939 - DNA, 15 bp, Homo sapiens
ccccatgcccaaaca

SEQ ID NO: 620940 - DNA, 15 bp, Homo sapiens
cccatgcccaaacaa

SEQ ID NO: 620941 - DNA, 15 bp, Homo sapiens
ccatgcccaaacaaa

SEQ ID NO: 620942 - DNA, 15 bp, Homo sapiens
catgcccaaacaaat

SEQ ID NO: 620943 - DNA, 15 bp, Homo sapiens
atgcccaaacaaatt

SEQ ID NO: 620944 - DNA, 15 bp, Homo sapiens
tgcccaaacaaatta

SEQ ID NO: 620945 - DNA, 15 bp, Homo sapiens
gcccaaacaaattac

SEQ ID NO: 620946 - DNA, 15 bp, Homo sapiens
cccaaacaaattact

SEQ ID NO: 620947 - DNA, 15 bp, Homo sapiens
ccaaacaaattactt

SEQ ID NO: 620948 - DNA, 15 bp, Homo sapiens
caaacaaattacttc

SEQ ID NO: 620949 - DNA, 15 bp, Homo sapiens
aaacaaattacttct

SEQ ID NO: 620950 - DNA, 15 bp, Homo sapiens
aacaaattacttctg

SEQ ID NO: 620951 - DNA, 15 bp, Homo sapiens
acaaattacttctgc

SEQ ID NO: 620952 - DNA, 15 bp, Homo sapiens
caaattacttctgcc

SEQ ID NO: 620953 - DNA, 15 bp, Homo sapiens
aaattacttctgcct

SEQ ID NO: 620954 - DNA, 15 bp, Homo sapiens
aattacttctgcctc

SEQ ID NO: 620955 - DNA, 15 bp, Homo sapiens
attacttctgcctcc

SEQ ID NO: 620956 - DNA, 15 bp, Homo sapiens
ttacttctgcctcct

SEQ ID NO: 620957 - DNA, 15 bp, Homo sapiens
tacttctgcctcctc

SEQ ID NO: 620958 - DNA, 15 bp, Homo sapiens
acttctgcctcctcc

SEQ ID NO: 620959 - DNA, 15 bp, Homo sapiens
cttctgcctcctccc

SEQ ID NO: 620960 - DNA, 15 bp, Homo sapiens
ttctgcctcctcccc

SEQ ID NO: 620961 - DNA, 15 bp, Homo sapiens
tctgcctcctccccc

SEQ ID NO: 620962 - DNA, 15 bp, Homo sapiens
ctgcctcctccccct

SEQ ID NO: 620963 - DNA, 15 bp, Homo sapiens
tgcctcctccccctc

SEQ ID NO: 620964 - DNA, 15 bp, Homo sapiens
gcctcctccccctca

SEQ ID NO: 620965 - DNA, 15 bp, Homo sapiens
cctcctccccctcac

SEQ ID NO: 620966 - DNA, 15 bp, Homo sapiens
ctcctccccctcaca

SEQ ID NO: 620967 - DNA, 15 bp, Homo sapiens
tcctccccctcacat

SEQ ID NO: 620968 - DNA, 15 bp, Homo sapiens
cctccccctcacatg

SEQ ID NO: 620969 - DNA, 15 bp, Homo sapiens
ctccccctcacatga

SEQ ID NO: 620970 - DNA, 15 bp, Homo sapiens
tccccctcacatgaa

SEQ ID NO: 620971 - DNA, 15 bp, Homo sapiens
ccccctcacatgaac

SEQ ID NO: 620972 - DNA, 15 bp, Homo sapiens
cccctcacatgaacc

SEQ ID NO: 620973 - DNA, 15 bp, Homo sapiens
ccctcacatgaaccg

SEQ ID NO: 620974 - DNA, 15 bp, Homo sapiens
cctcacatgaaccgc

SEQ ID NO: 620975 - DNA, 15 bp, Homo sapiens
ctcacatgaaccgcc

SEQ ID NO: 620976 - DNA, 15 bp, Homo sapiens
tcacatgaaccgcct

SEQ ID NO: 620977 - DNA, 15 bp, Homo sapiens
cacatgaaccgcctg

SEQ ID NO: 620978 - DNA, 15 bp, Homo sapiens
acatgaaccgcctgc

SEQ ID NO: 620979 - DNA, 15 bp, Homo sapiens
catgaaccgcctgcc

SEQ ID NO: 620980 - DNA, 15 bp, Homo sapiens
atgaaccgcctgccc

SEQ ID NO: 620981 - DNA, 15 bp, Homo sapiens
tgaaccgcctgcccc

SEQ ID NO: 620982 - DNA, 15 bp, Homo sapiens
gaaccgcctgccccc

SEQ ID NO: 620983 - DNA, 15 bp, Homo sapiens
aaccgcctgccccct

SEQ ID NO: 620984 - DNA, 15 bp, Homo sapiens
accgcctgccccctc

SEQ ID NO: 620985 - DNA, 15 bp, Homo sapiens
ccgcctgccccctcc

SEQ ID NO: 620986 - DNA, 15 bp, Homo sapiens
cgcctgccccctccc

SEQ ID NO: 620987 - DNA, 15 bp, Homo sapiens
gcctgccccctccca

SEQ ID NO: 620988 - DNA, 15 bp, Homo sapiens
cctgccccctcccag

SEQ ID NO: 620989 - DNA, 15 bp, Homo sapiens
ctgccccctcccagc

SEQ ID NO: 620990 - DNA, 15 bp, Homo sapiens
tgccccctcccagct

SEQ ID NO: 620991 - DNA, 15 bp, Homo sapiens
gccccctcccagctg

SEQ ID NO: 620992 - DNA, 15 bp, Homo sapiens
ccccctcccagctgg

SEQ ID NO: 620993 - DNA, 15 bp, Homo sapiens
cccctcccagctggt

SEQ ID NO: 620994 - DNA, 15 bp, Homo sapiens
ccctcccagctggtc

SEQ ID NO: 620995 - DNA, 15 bp, Homo sapiens
cctcccagctggtca

SEQ ID NO: 620996 - DNA, 15 bp, Homo sapiens
ctcccagctggtcag

SEQ ID NO: 620997 - DNA, 15 bp, Homo sapiens
tcccagctggtcagc

SEQ ID NO: 620998 - DNA, 15 bp, Homo sapiens
cccagctggtcagct

SEQ ID NO: 620999 - DNA, 15 bp, Homo sapiens
ccagctggtcagcta

SEQ ID NO: 621000 - DNA, 15 bp, Homo sapiens
cagctggtcagctac

SEQ ID NO: 621001 - DNA, 15 bp, Homo sapiens
agctggtcagctaca

SEQ ID NO: 621002 - DNA, 15 bp, Homo sapiens
gctggtcagctacag

SEQ ID NO: 621003 - DNA, 15 bp, Homo sapiens
ctggtcagctacagt

SEQ ID NO: 621004 - DNA, 15 bp, Homo sapiens
tggtcagctacagtc

SEQ ID NO: 621005 - DNA, 15 bp, Homo sapiens
ggtcagctacagtca

SEQ ID NO: 621006 - DNA, 15 bp, Homo sapiens
gtcagctacagtcag

SEQ ID NO: 621007 - DNA, 15 bp, Homo sapiens
tcagctacagtcagt

SEQ ID NO: 621008 - DNA, 15 bp, Homo sapiens
cagctacagtcagtc

SEQ ID NO: 621009 - DNA, 15 bp, Homo sapiens
agctacagtcagtca

SEQ ID NO: 621010 - DNA, 15 bp, Homo sapiens
gctacagtcagtcac

SEQ ID NO: 621011 - DNA, 15 bp, Homo sapiens
ctacagtcagtcacc

SEQ ID NO: 621012 - DNA, 15 bp, Homo sapiens
tacagtcagtcacca

SEQ ID NO: 621013 - DNA, 15 bp, Homo sapiens
acagtcagtcaccat

SEQ ID NO: 621014 - DNA, 15 bp, Homo sapiens
cagtcagtcaccatg

SEQ ID NO: 621015 - DNA, 15 bp, Homo sapiens
agtcagtcaccatgg

SEQ ID NO: 621016 - DNA, 15 bp, Homo sapiens
gtcagtcaccatggc

SEQ ID NO: 621017 - DNA, 15 bp, Homo sapiens
tcagtcaccatggca

SEQ ID NO: 621018 - DNA, 15 bp, Homo sapiens
cagtcaccatggcaa

SEQ ID NO: 621019 - DNA, 15 bp, Homo sapiens
agtcaccatggcaac

SEQ ID NO: 621020 - DNA, 15 bp, Homo sapiens
gtcaccatggcaacg

SEQ ID NO: 621021 - DNA, 15 bp, Homo sapiens
tcaccatggcaacgc

SEQ ID NO: 621022 - DNA, 15 bp, Homo sapiens
caccatggcaacgcc

SEQ ID NO: 621023 - DNA, 15 bp, Homo sapiens
accatggcaacgccc

SEQ ID NO: 621024 - DNA, 15 bp, Homo sapiens
ccatggcaacgccct

SEQ ID NO: 621025 - DNA, 15 bp, Homo sapiens
catggcaacgccctc

SEQ ID NO: 621026 - DNA, 15 bp, Homo sapiens
atggcaacgccctca

SEQ ID NO: 621027 - DNA, 15 bp, Homo sapiens
tggcaacgccctcat

SEQ ID NO: 621028 - DNA, 15 bp, Homo sapiens
ggcaacgccctcatt

SEQ ID NO: 621029 - DNA, 15 bp, Homo sapiens
gcaacgccctcattc

SEQ ID NO: 621030 - DNA, 15 bp, Homo sapiens
caacgccctcattcc

SEQ ID NO: 621031 - DNA, 15 bp, Homo sapiens
aacgccctcattcct

SEQ ID NO: 621032 - DNA, 15 bp, Homo sapiens
acgccctcattcctc

SEQ ID NO: 621033 - DNA, 15 bp, Homo sapiens
cgccctcattcctcc

SEQ ID NO: 621034 - DNA, 15 bp, Homo sapiens
gccctcattcctccc

SEQ ID NO: 621035 - DNA, 15 bp, Homo sapiens
ccctcattcctccca

SEQ ID NO: 621036 - DNA, 15 bp, Homo sapiens
cctcattcctcccag

SEQ ID NO: 621037 - DNA, 15 bp, Homo sapiens
ctcattcctcccagg

SEQ ID NO: 621038 - DNA, 15 bp, Homo sapiens
tcattcctcccagga

SEQ ID NO: 621039 - DNA, 15 bp, Homo sapiens
cattcctcccaggag

SEQ ID NO: 621040 - DNA, 15 bp, Homo sapiens
attcctcccaggaga

SEQ ID NO: 621041 - DNA, 15 bp, Homo sapiens
ttcctcccaggagat

SEQ ID NO: 621042 - DNA, 15 bp, Homo sapiens
tcctcccaggagatc

SEQ ID NO: 621043 - DNA, 15 bp, Homo sapiens
cctcccaggagatca

SEQ ID NO: 621044 - DNA, 15 bp, Homo sapiens
ctcccaggagatcag

SEQ ID NO: 621045 - DNA, 15 bp, Homo sapiens
tcccaggagatcagg

SEQ ID NO: 621046 - DNA, 15 bp, Homo sapiens
cccaggagatcaggc

SEQ ID NO: 621047 - DNA, 15 bp, Homo sapiens
ccaggagatcaggca

SEQ ID NO: 621048 - DNA, 15 bp, Homo sapiens
caggagatcaggcag

SEQ ID NO: 621049 - DNA, 15 bp, Homo sapiens
aggagatcaggcagg

SEQ ID NO: 621050 - DNA, 15 bp, Homo sapiens
ggagatcaggcaggg

SEQ ID NO: 621051 - DNA, 15 bp, Homo sapiens
gagatcaggcaggga

SEQ ID NO: 621052 - DNA, 15 bp, Homo sapiens
agatcaggcagggag

SEQ ID NO: 621053 - DNA, 15 bp, Homo sapiens
gatcaggcagggagc

SEQ ID NO: 621054 - DNA, 15 bp, Homo sapiens
atcaggcagggagct

SEQ ID NO: 621055 - DNA, 15 bp, Homo sapiens
tcaggcagggagctg

SEQ ID NO: 621056 - DNA, 15 bp, Homo sapiens
caggcagggagctgg

SEQ ID NO: 621057 - DNA, 15 bp, Homo sapiens
aggcagggagctggg

SEQ ID NO: 621058 - DNA, 15 bp, Homo sapiens
ggcagggagctgggg

SEQ ID NO: 621059 - DNA, 15 bp, Homo sapiens
gcagggagctggggc

SEQ ID NO: 621060 - DNA, 15 bp, Homo sapiens
cagggagctggggcc

SEQ ID NO: 621061 - DNA, 15 bp, Homo sapiens
agggagctggggccc

SEQ ID NO: 621062 - DNA, 15 bp, Homo sapiens
gggagctggggccct

SEQ ID NO: 621063 - DNA, 15 bp, Homo sapiens
ggagctggggccctg

SEQ ID NO: 621064 - DNA, 15 bp, Homo sapiens
gagctggggccctgg

SEQ ID NO: 621065 - DNA, 15 bp, Homo sapiens
agctggggccctggt

SEQ ID NO: 621066 - DNA, 15 bp, Homo sapiens
gctggggccctggta

SEQ ID NO: 621067 - DNA, 15 bp, Homo sapiens
ctggggccctggtaa

SEQ ID NO: 621068 - DNA, 15 bp, Homo sapiens
tggggccctggtaag

SEQ ID NO: 621069 - DNA, 15 bp, Homo sapiens
ggggccctggtaagg

SEQ ID NO: 621070 - DNA, 15 bp, Homo sapiens
gggccctggtaaggg

SEQ ID NO: 621071 - DNA, 15 bp, Homo sapiens
ggccctggtaaggga

SEQ ID NO: 621072 - DNA, 15 bp, Homo sapiens
gccctggtaagggaa

SEQ ID NO: 621073 - DNA, 15 bp, Homo sapiens
ccctggtaagggaaa

SEQ ID NO: 621074 - DNA, 15 bp, Homo sapiens
cctggtaagggaaag

SEQ ID NO: 621075 - DNA, 15 bp, Homo sapiens
ctggtaagggaaagg

SEQ ID NO: 621076 - DNA, 15 bp, Homo sapiens
tggtaagggaaagga

SEQ ID NO: 621077 - DNA, 15 bp, Homo sapiens
ggtaagggaaaggag

SEQ ID NO: 621078 - DNA, 15 bp, Homo sapiens
gtaagggaaaggaga

SEQ ID NO: 621079 - DNA, 15 bp, Homo sapiens
taagggaaaggagat

SEQ ID NO: 621080 - DNA, 15 bp, Homo sapiens
aagggaaaggagatc

SEQ ID NO: 621081 - DNA, 15 bp, Homo sapiens
agggaaaggagatct

SEQ ID NO: 621082 - DNA, 15 bp, Homo sapiens
gggaaaggagatcta

SEQ ID NO: 621083 - DNA, 15 bp, Homo sapiens
ggaaaggagatctag

SEQ ID NO: 621084 - DNA, 15 bp, Homo sapiens
gaaaggagatctagg

SEQ ID NO: 621085 - DNA, 15 bp, Homo sapiens
aaaggagatctaggg

SEQ ID NO: 621086 - DNA, 15 bp, Homo sapiens
aaggagatctagggg

SEQ ID NO: 621087 - DNA, 15 bp, Homo sapiens
aggagatctaggggg

SEQ ID NO: 621088 - DNA, 15 bp, Homo sapiens
ggagatctagggggg

SEQ ID NO: 621089 - DNA, 15 bp, Homo sapiens
gagatctagggggga

SEQ ID NO: 621090 - DNA, 15 bp, Homo sapiens
agatctaggggggag

SEQ ID NO: 621091 - DNA, 15 bp, Homo sapiens
gatctaggggggagc

SEQ ID NO: 621092 - DNA, 15 bp, Homo sapiens
atctaggggggagca

SEQ ID NO: 621093 - DNA, 15 bp, Homo sapiens
tctaggggggagcaa

SEQ ID NO: 621094 - DNA, 15 bp, Homo sapiens
ctaggggggagcaac

SEQ ID NO: 621095 - DNA, 15 bp, Homo sapiens
taggggggagcaacc

SEQ ID NO: 621096 - DNA, 15 bp, Homo sapiens
aggggggagcaaccc

SEQ ID NO: 621097 - DNA, 15 bp, Homo sapiens
ggggggagcaaccca

SEQ ID NO: 621098 - DNA, 15 bp, Homo sapiens
gggggagcaacccag

SEQ ID NO: 621099 - DNA, 15 bp, Homo sapiens
ggggagcaacccagg

SEQ ID NO: 621100 - DNA, 15 bp, Homo sapiens
gggagcaacccaggc

SEQ ID NO: 621101 - DNA, 15 bp, Homo sapiens
ggagcaacccaggcc

SEQ ID NO: 621102 - DNA, 15 bp, Homo sapiens
gagcaacccaggccc

SEQ ID NO: 621103 - DNA, 15 bp, Homo sapiens
agcaacccaggccca

SEQ ID NO: 621104 - DNA, 15 bp, Homo sapiens
gcaacccaggcccaa

SEQ ID NO: 621105 - DNA, 15 bp, Homo sapiens
caacccaggcccaag

SEQ ID NO: 621106 - DNA, 15 bp, Homo sapiens
aacccaggcccaaga

SEQ ID NO: 621107 - DNA, 15 bp, Homo sapiens
acccaggcccaagag

SEQ ID NO: 621108 - DNA, 15 bp, Homo sapiens
cccaggcccaagaga

SEQ ID NO: 621109 - DNA, 15 bp, Homo sapiens
ccaggcccaagagaa

SEQ ID NO: 621110 - DNA, 15 bp, Homo sapiens
caggcccaagagaac

SEQ ID NO: 621111 - DNA, 15 bp, Homo sapiens
aggcccaagagaact

SEQ ID NO: 621112 - DNA, 15 bp, Homo sapiens
ggcccaagagaacta

SEQ ID NO: 621113 - DNA, 15 bp, Homo sapiens
gcccaagagaactat

SEQ ID NO: 621114 - DNA, 15 bp, Homo sapiens
cccaagagaactatt

SEQ ID NO: 621115 - DNA, 15 bp, Homo sapiens
ccaagagaactattg

SEQ ID NO: 621116 - DNA, 15 bp, Homo sapiens
caagagaactattgt

SEQ ID NO: 621117 - DNA, 15 bp, Homo sapiens
aagagaactattgtg

SEQ ID NO: 621118 - DNA, 15 bp, Homo sapiens
agagaactattgtgg

SEQ ID NO: 621119 - DNA, 15 bp, Homo sapiens
gagaactattgtgga

SEQ ID NO: 621120 - DNA, 15 bp, Homo sapiens
agaactattgtggag

SEQ ID NO: 621121 - DNA, 15 bp, Homo sapiens
gaactattgtggagg

SEQ ID NO: 621122 - DNA, 15 bp, Homo sapiens
aactattgtggaggg

SEQ ID NO: 621123 - DNA, 15 bp, Homo sapiens
actattgtggagggg

SEQ ID NO: 621124 - DNA, 15 bp, Homo sapiens
ctattgtggaggggg

SEQ ID NO: 621125 - DNA, 15 bp, Homo sapiens
tattgtggagggggc

SEQ ID NO: 621126 - DNA, 15 bp, Homo sapiens
attgtggagggggct

SEQ ID NO: 621127 - DNA, 15 bp, Homo sapiens
ttgtggagggggctg

SEQ ID NO: 621128 - DNA, 15 bp, Homo sapiens
tgtggagggggctgg

SEQ ID NO: 621129 - DNA, 15 bp, Homo sapiens
gtggagggggctggg

SEQ ID NO: 621130 - DNA, 15 bp, Homo sapiens
tggagggggctgggg

SEQ ID NO: 621131 - DNA, 15 bp, Homo sapiens
ggagggggctgggga

SEQ ID NO: 621132 - DNA, 15 bp, Homo sapiens
gagggggctggggag

SEQ ID NO: 621133 - DNA, 15 bp, Homo sapiens
agggggctggggagg

SEQ ID NO: 621134 - DNA, 15 bp, Homo sapiens
gggggctggggaggg

SEQ ID NO: 621135 - DNA, 15 bp, Homo sapiens
ggggctggggaggga

SEQ ID NO: 621136 - DNA, 15 bp, Homo sapiens
gggctggggagggaa

SEQ ID NO: 621137 - DNA, 15 bp, Homo sapiens
ggctggggagggaag

SEQ ID NO: 621138 - DNA, 15 bp, Homo sapiens
gctggggagggaagc

SEQ ID NO: 621139 - DNA, 15 bp, Homo sapiens
ctggggagggaagcc

SEQ ID NO: 621140 - DNA, 15 bp, Homo sapiens
tggggagggaagccc

SEQ ID NO: 621141 - DNA, 15 bp, Homo sapiens
ggggagggaagccca

SEQ ID NO: 621142 - DNA, 15 bp, Homo sapiens
gggagggaagcccaa

SEQ ID NO: 621143 - DNA, 15 bp, Homo sapiens
ggagggaagcccaag

SEQ ID NO: 621144 - DNA, 15 bp, Homo sapiens
gagggaagcccaagt

SEQ ID NO: 621145 - DNA, 15 bp, Homo sapiens
agggaagcccaagtc

SEQ ID NO: 621146 - DNA, 15 bp, Homo sapiens
gggaagcccaagtct

SEQ ID NO: 621147 - DNA, 15 bp, Homo sapiens
ggaagcccaagtctt

SEQ ID NO: 621148 - DNA, 15 bp, Homo sapiens
gaagcccaagtcttt

SEQ ID NO: 621149 - DNA, 15 bp, Homo sapiens
aagcccaagtctttt

SEQ ID NO: 621150 - DNA, 15 bp, Homo sapiens
agcccaagtcttttg

SEQ ID NO: 621151 - DNA, 15 bp, Homo sapiens
gcccaagtcttttgc

SEQ ID NO: 621152 - DNA, 15 bp, Homo sapiens
cccaagtcttttgct

SEQ ID NO: 621153 - DNA, 15 bp, Homo sapiens
ccaagtcttttgctt

SEQ ID NO: 621154 - DNA, 15 bp, Homo sapiens
caagtcttttgcttt

SEQ ID NO: 621155 - DNA, 15 bp, Homo sapiens
aagtcttttgctttc

SEQ ID NO: 621156 - DNA, 15 bp, Homo sapiens
agtcttttgctttcc

SEQ ID NO: 621157 - DNA, 15 bp, Homo sapiens
gtcttttgctttcca

SEQ ID NO: 621158 - DNA, 15 bp, Homo sapiens
tcttttgctttccag

SEQ ID NO: 621159 - DNA, 15 bp, Homo sapiens
cttttgctttccagg

SEQ ID NO: 621160 - DNA, 15 bp, Homo sapiens
ttttgctttccaggg

SEQ ID NO: 621161 - DNA, 15 bp, Homo sapiens
tttgctttccaggga

SEQ ID NO: 621162 - DNA, 15 bp, Homo sapiens
ttgctttccagggat

SEQ ID NO: 621163 - DNA, 15 bp, Homo sapiens
tgctttccagggatg

SEQ ID NO: 621164 - DNA, 15 bp, Homo sapiens
gctttccagggatgc

SEQ ID NO: 621165 - DNA, 15 bp, Homo sapiens
ctttccagggatgcc

SEQ ID NO: 621166 - DNA, 15 bp, Homo sapiens
tttccagggatgcct

SEQ ID NO: 621167 - DNA, 15 bp, Homo sapiens
ttccagggatgcctc

SEQ ID NO: 621168 - DNA, 15 bp, Homo sapiens
tccagggatgcctct

SEQ ID NO: 621169 - DNA, 15 bp, Homo sapiens
ccagggatgcctctg

SEQ ID NO: 621170 - DNA, 15 bp, Homo sapiens
cagggatgcctctgc

SEQ ID NO: 621171 - DNA, 15 bp, Homo sapiens
agggatgcctctgcc

SEQ ID NO: 621172 - DNA, 15 bp, Homo sapiens
gggatgcctctgccc

SEQ ID NO: 621173 - DNA, 15 bp, Homo sapiens
ggatgcctctgccca

SEQ ID NO: 621174 - DNA, 15 bp, Homo sapiens
gatgcctctgcccac

SEQ ID NO: 621175 - DNA, 15 bp, Homo sapiens
atgcctctgcccaca

SEQ ID NO: 621176 - DNA, 15 bp, Homo sapiens
tgcctctgcccacag

SEQ ID NO: 621177 - DNA, 15 bp, Homo sapiens
gcctctgcccacagc

SEQ ID NO: 621178 - DNA, 15 bp, Homo sapiens
cctctgcccacagcc

SEQ ID NO: 621179 - DNA, 15 bp, Homo sapiens
ctctgcccacagccc

SEQ ID NO: 621180 - DNA, 15 bp, Homo sapiens
tctgcccacagcccg

SEQ ID NO: 621181 - DNA, 15 bp, Homo sapiens
ctgcccacagcccgt

SEQ ID NO: 621182 - DNA, 15 bp, Homo sapiens
tgcccacagcccgtg

SEQ ID NO: 621183 - DNA, 15 bp, Homo sapiens
gcccacagcccgtgg

SEQ ID NO: 621184 - DNA, 15 bp, Homo sapiens
cccacagcccgtgga

SEQ ID NO: 621185 - DNA, 15 bp, Homo sapiens
ccacagcccgtggag

SEQ ID NO: 621186 - DNA, 15 bp, Homo sapiens
cacagcccgtggaga

SEQ ID NO: 621187 - DNA, 15 bp, Homo sapiens
acagcccgtggagaa

SEQ ID NO: 621188 - DNA, 15 bp, Homo sapiens
cagcccgtggagaat

SEQ ID NO: 621189 - DNA, 15 bp, Homo sapiens
agcccgtggagaatc

SEQ ID NO: 621190 - DNA, 15 bp, Homo sapiens
gcccgtggagaatct

SEQ ID NO: 621191 - DNA, 15 bp, Homo sapiens
cccgtggagaatctg

SEQ ID NO: 621192 - DNA, 15 bp, Homo sapiens
ccgtggagaatctgg

SEQ ID NO: 621193 - DNA, 15 bp, Homo sapiens
cgtggagaatctggc

SEQ ID NO: 621194 - DNA, 15 bp, Homo sapiens
gtggagaatctggcc

SEQ ID NO: 621195 - DNA, 15 bp, Homo sapiens
tggagaatctggcca

SEQ ID NO: 621196 - DNA, 15 bp, Homo sapiens
ggagaatctggccag

SEQ ID NO: 621197 - DNA, 15 bp, Homo sapiens
gagaatctggccagg

SEQ ID NO: 621198 - DNA, 15 bp, Homo sapiens
agaatctggccaggc

SEQ ID NO: 621199 - DNA, 15 bp, Homo sapiens
gaatctggccaggcc

SEQ ID NO: 621200 - DNA, 15 bp, Homo sapiens
aatctggccaggcca

SEQ ID NO: 621201 - DNA, 15 bp, Homo sapiens
atctggccaggccat

SEQ ID NO: 621202 - DNA, 15 bp, Homo sapiens
tctggccaggccatc

SEQ ID NO: 621203 - DNA, 15 bp, Homo sapiens
ctggccaggccatca

SEQ ID NO: 621204 - DNA, 15 bp, Homo sapiens
tggccaggccatcag

SEQ ID NO: 621205 - DNA, 15 bp, Homo sapiens
ggccaggccatcagg

SEQ ID NO: 621206 - DNA, 15 bp, Homo sapiens
gccaggccatcaggc

SEQ ID NO: 621207 - DNA, 15 bp, Homo sapiens
ccaggccatcaggca

SEQ ID NO: 621208 - DNA, 15 bp, Homo sapiens
caggccatcaggcag

SEQ ID NO: 621209 - DNA, 15 bp, Homo sapiens
aggccatcaggcagg

SEQ ID NO: 621210 - DNA, 15 bp, Homo sapiens
ggccatcaggcaggc

SEQ ID NO: 621211 - DNA, 15 bp, Homo sapiens
gccatcaggcaggcg

SEQ ID NO: 621212 - DNA, 15 bp, Homo sapiens
ccatcaggcaggcgt

SEQ ID NO: 621213 - DNA, 15 bp, Homo sapiens
catcaggcaggcgtc

SEQ ID NO: 621214 - DNA, 15 bp, Homo sapiens
atcaggcaggcgtcc

SEQ ID NO: 621215 - DNA, 15 bp, Homo sapiens
tcaggcaggcgtcct

SEQ ID NO: 621216 - DNA, 15 bp, Homo sapiens
caggcaggcgtcctg

SEQ ID NO: 621217 - DNA, 15 bp, Homo sapiens
aggcaggcgtcctgc

SEQ ID NO: 621218 - DNA, 15 bp, Homo sapiens
ggcaggcgtcctgcc

SEQ ID NO: 621219 - DNA, 15 bp, Homo sapiens
gcaggcgtcctgccc

SEQ ID NO: 621220 - DNA, 15 bp, Homo sapiens
caggcgtcctgccct

SEQ ID NO: 621221 - DNA, 15 bp, Homo sapiens
aggcgtcctgccctc

SEQ ID NO: 621222 - DNA, 15 bp, Homo sapiens
ggcgtcctgccctca

SEQ ID NO: 621223 - DNA, 15 bp, Homo sapiens
gcgtcctgccctcag

SEQ ID NO: 621224 - DNA, 15 bp, Homo sapiens
cgtcctgccctcaga

SEQ ID NO: 621225 - DNA, 15 bp, Homo sapiens
gtcctgccctcagat

SEQ ID NO: 621226 - DNA, 15 bp, Homo sapiens
tcctgccctcagatg

SEQ ID NO: 621227 - DNA, 15 bp, Homo sapiens
cctgccctcagatgg

SEQ ID NO: 621228 - DNA, 15 bp, Homo sapiens
ctgccctcagatggc

SEQ ID NO: 621229 - DNA, 15 bp, Homo sapiens
tgccctcagatggcg

SEQ ID NO: 621230 - DNA, 15 bp, Homo sapiens
gccctcagatggcgt

SEQ ID NO: 621231 - DNA, 15 bp, Homo sapiens
ccctcagatggcgtg

SEQ ID NO: 621232 - DNA, 15 bp, Homo sapiens
cctcagatggcgtga

SEQ ID NO: 621233 - DNA, 15 bp, Homo sapiens
ctcagatggcgtgat

SEQ ID NO: 621234 - DNA, 15 bp, Homo sapiens
tcagatggcgtgatg

SEQ ID NO: 621235 - DNA, 15 bp, Homo sapiens
cagatggcgtgatgg

SEQ ID NO: 621236 - DNA, 15 bp, Homo sapiens
agatggcgtgatggg

SEQ ID NO: 621237 - DNA, 15 bp, Homo sapiens
gatggcgtgatggga

SEQ ID NO: 621238 - DNA, 15 bp, Homo sapiens
atggcgtgatgggaa

SEQ ID NO: 621239 - DNA, 15 bp, Homo sapiens
tggcgtgatgggaag

SEQ ID NO: 621240 - DNA, 15 bp, Homo sapiens
ggcgtgatgggaagg

SEQ ID NO: 621241 - DNA, 15 bp, Homo sapiens
gcgtgatgggaagga

SEQ ID NO: 621242 - DNA, 15 bp, Homo sapiens
cgtgatgggaaggaa

SEQ ID NO: 621243 - DNA, 15 bp, Homo sapiens
gtgatgggaaggaac

SEQ ID NO: 621244 - DNA, 15 bp, Homo sapiens
tgatgggaaggaacc

SEQ ID NO: 621245 - DNA, 15 bp, Homo sapiens
gatgggaaggaacca

SEQ ID NO: 621246 - DNA, 15 bp, Homo sapiens
atgggaaggaaccaa

SEQ ID NO: 621247 - DNA, 15 bp, Homo sapiens
tgggaaggaaccaag

SEQ ID NO: 621248 - DNA, 15 bp, Homo sapiens
gggaaggaaccaagc

SEQ ID NO: 621249 - DNA, 15 bp, Homo sapiens
ggaaggaaccaagcc

SEQ ID NO: 621250 - DNA, 15 bp, Homo sapiens
gaaggaaccaagcct

SEQ ID NO: 621251 - DNA, 15 bp, Homo sapiens
aaggaaccaagcctt

SEQ ID NO: 621252 - DNA, 15 bp, Homo sapiens
aggaaccaagccttg

SEQ ID NO: 621253 - DNA, 15 bp, Homo sapiens
ggaaccaagccttga

SEQ ID NO: 621254 - DNA, 15 bp, Homo sapiens
gaaccaagccttgag

SEQ ID NO: 621255 - DNA, 15 bp, Homo sapiens
aaccaagccttgagt

SEQ ID NO: 621256 - DNA, 15 bp, Homo sapiens
accaagccttgagtt

SEQ ID NO: 621257 - DNA, 15 bp, Homo sapiens
ccaagccttgagttg

SEQ ID NO: 621258 - DNA, 15 bp, Homo sapiens
caagccttgagttgt

SEQ ID NO: 621259 - DNA, 15 bp, Homo sapiens
aagccttgagttgtt

SEQ ID NO: 621260 - DNA, 15 bp, Homo sapiens
agccttgagttgttc

SEQ ID NO: 621261 - DNA, 15 bp, Homo sapiens
gccttgagttgttcc

SEQ ID NO: 621262 - DNA, 15 bp, Homo sapiens
ccttgagttgttccc

SEQ ID NO: 621263 - DNA, 15 bp, Homo sapiens
cttgagttgttccca

SEQ ID NO: 621264 - DNA, 15 bp, Homo sapiens
ttgagttgttcccat

SEQ ID NO: 621265 - DNA, 15 bp, Homo sapiens
tgagttgttcccatg

SEQ ID NO: 621266 - DNA, 15 bp, Homo sapiens
gagttgttcccatgg

SEQ ID NO: 621267 - DNA, 15 bp, Homo sapiens
agttgttcccatgga

SEQ ID NO: 621268 - DNA, 15 bp, Homo sapiens
gttgttcccatggat

SEQ ID NO: 621269 - DNA, 15 bp, Homo sapiens
ttgttcccatggatt

SEQ ID NO: 621270 - DNA, 15 bp, Homo sapiens
tgttcccatggattc

SEQ ID NO: 621271 - DNA, 15 bp, Homo sapiens
gttcccatggattct

SEQ ID NO: 621272 - DNA, 15 bp, Homo sapiens
ttcccatggattctc

SEQ ID NO: 621273 - DNA, 15 bp, Homo sapiens
tcccatggattctcc

SEQ ID NO: 621274 - DNA, 15 bp, Homo sapiens
cccatggattctcca

SEQ ID NO: 621275 - DNA, 15 bp, Homo sapiens
ccatggattctccag

SEQ ID NO: 621276 - DNA, 15 bp, Homo sapiens
catggattctccagg

SEQ ID NO: 621277 - DNA, 15 bp, Homo sapiens
atggattctccaggc

SEQ ID NO: 621278 - DNA, 15 bp, Homo sapiens
tggattctccaggca

SEQ ID NO: 621279 - DNA, 15 bp, Homo sapiens
ggattctccaggcag

SEQ ID NO: 621280 - DNA, 15 bp, Homo sapiens
gattctccaggcagt

SEQ ID NO: 621281 - DNA, 15 bp, Homo sapiens
attctccaggcagtc

SEQ ID NO: 621282 - DNA, 15 bp, Homo sapiens
ttctccaggcagtct

SEQ ID NO: 621283 - DNA, 15 bp, Homo sapiens
tctccaggcagtctc

SEQ ID NO: 621284 - DNA, 15 bp, Homo sapiens
ctccaggcagtctct

SEQ ID NO: 621285 - DNA, 15 bp, Homo sapiens
tccaggcagtctctc

SEQ ID NO: 621286 - DNA, 15 bp, Homo sapiens
ccaggcagtctctct

SEQ ID NO: 621287 - DNA, 15 bp, Homo sapiens
caggcagtctctctg

SEQ ID NO: 621288 - DNA, 15 bp, Homo sapiens
aggcagtctctctga

SEQ ID NO: 621289 - DNA, 15 bp, Homo sapiens
ggcagtctctctgat

SEQ ID NO: 621290 - DNA, 15 bp, Homo sapiens
gcagtctctctgatc

SEQ ID NO: 621291 - DNA, 15 bp, Homo sapiens
cagtctctctgatcc

SEQ ID NO: 621292 - DNA, 15 bp, Homo sapiens
agtctctctgatcca

SEQ ID NO: 621293 - DNA, 15 bp, Homo sapiens
gtctctctgatccag

SEQ ID NO: 621294 - DNA, 15 bp, Homo sapiens
tctctctgatccagg

SEQ ID NO: 621295 - DNA, 15 bp, Homo sapiens
ctctctgatccaggg

SEQ ID NO: 621296 - DNA, 15 bp, Homo sapiens
tctctgatccagggc

SEQ ID NO: 621297 - DNA, 15 bp, Homo sapiens
ctctgatccagggca

SEQ ID NO: 621298 - DNA, 15 bp, Homo sapiens
tctgatccagggcac

SEQ ID NO: 621299 - DNA, 15 bp, Homo sapiens
ctgatccagggcacc

SEQ ID NO: 621300 - DNA, 15 bp, Homo sapiens
tgatccagggcaccc

SEQ ID NO: 621301 - DNA, 15 bp, Homo sapiens
gatccagggcacccc

SEQ ID NO: 621302 - DNA, 15 bp, Homo sapiens
atccagggcacccct

SEQ ID NO: 621303 - DNA, 15 bp, Homo sapiens
tccagggcacccctt

SEQ ID NO: 621304 - DNA, 15 bp, Homo sapiens
ccagggcaccccttc

SEQ ID NO: 621305 - DNA, 15 bp, Homo sapiens
cagggcaccccttcc

SEQ ID NO: 621306 - DNA, 15 bp, Homo sapiens
agggcaccccttccc

SEQ ID NO: 621307 - DNA, 15 bp, Homo sapiens
gggcaccccttccca

SEQ ID NO: 621308 - DNA, 15 bp, Homo sapiens
ggcaccccttcccat

SEQ ID NO: 621309 - DNA, 15 bp, Homo sapiens
gcaccccttcccatc

SEQ ID NO: 621310 - DNA, 15 bp, Homo sapiens
caccccttcccatca

SEQ ID NO: 621311 - DNA, 15 bp, Homo sapiens
accccttcccatcag

SEQ ID NO: 621312 - DNA, 15 bp, Homo sapiens
ccccttcccatcagc

SEQ ID NO: 621313 - DNA, 15 bp, Homo sapiens
cccttcccatcagca

SEQ ID NO: 621314 - DNA, 15 bp, Homo sapiens
ccttcccatcagcac

SEQ ID NO: 621315 - DNA, 15 bp, Homo sapiens
cttcccatcagcaca

SEQ ID NO: 621316 - DNA, 15 bp, Homo sapiens
ttcccatcagcacag

SEQ ID NO: 621317 - DNA, 15 bp, Homo sapiens
tcccatcagcacagc

SEQ ID NO: 621318 - DNA, 15 bp, Homo sapiens
cccatcagcacagcc

SEQ ID NO: 621319 - DNA, 15 bp, Homo sapiens
ccatcagcacagccc

SEQ ID NO: 621320 - DNA, 15 bp, Homo sapiens
catcagcacagcccc

SEQ ID NO: 621321 - DNA, 15 bp, Homo sapiens
atcagcacagcccct

SEQ ID NO: 621322 - DNA, 15 bp, Homo sapiens
tcagcacagcccctc

SEQ ID NO: 621323 - DNA, 15 bp, Homo sapiens
cagcacagcccctcc

SEQ ID NO: 621324 - DNA, 15 bp, Homo sapiens
agcacagcccctccc

SEQ ID NO: 621325 - DNA, 15 bp, Homo sapiens
gcacagcccctccct

SEQ ID NO: 621326 - DNA, 15 bp, Homo sapiens
cacagcccctccctc

SEQ ID NO: 621327 - DNA, 15 bp, Homo sapiens
acagcccctccctca

SEQ ID NO: 621328 - DNA, 15 bp, Homo sapiens
cagcccctccctcaa

SEQ ID NO: 621329 - DNA, 15 bp, Homo sapiens
agcccctccctcaag

SEQ ID NO: 621330 - DNA, 15 bp, Homo sapiens
gcccctccctcaaga

SEQ ID NO: 621331 - DNA, 15 bp, Homo sapiens
cccctccctcaagaa

SEQ ID NO: 621332 - DNA, 15 bp, Homo sapiens
ccctccctcaagaac

SEQ ID NO: 621333 - DNA, 15 bp, Homo sapiens
cctccctcaagaaca

SEQ ID NO: 621334 - DNA, 15 bp, Homo sapiens
ctccctcaagaacac

SEQ ID NO: 621335 - DNA, 15 bp, Homo sapiens
tccctcaagaacaca

SEQ ID NO: 621336 - DNA, 15 bp, Homo sapiens
ccctcaagaacacac

SEQ ID NO: 621337 - DNA, 15 bp, Homo sapiens
cctcaagaacacact

SEQ ID NO: 621338 - DNA, 15 bp, Homo sapiens
ctcaagaacacactt

SEQ ID NO: 621339 - DNA, 15 bp, Homo sapiens
tcaagaacacacttc

SEQ ID NO: 621340 - DNA, 15 bp, Homo sapiens
caagaacacacttcg

SEQ ID NO: 621341 - DNA, 15 bp, Homo sapiens
aagaacacacttcgc

SEQ ID NO: 621342 - DNA, 15 bp, Homo sapiens
agaacacacttcgcc

SEQ ID NO: 621343 - DNA, 15 bp, Homo sapiens
gaacacacttcgccc

SEQ ID NO: 621344 - DNA, 15 bp, Homo sapiens
aacacacttcgcccc

SEQ ID NO: 621345 - DNA, 15 bp, Homo sapiens
acacacttcgcccct

SEQ ID NO: 621346 - DNA, 15 bp, Homo sapiens
cacacttcgccccta

SEQ ID NO: 621347 - DNA, 15 bp, Homo sapiens
acacttcgcccctac

SEQ ID NO: 621348 - DNA, 15 bp, Homo sapiens
cacttcgcccctacc

SEQ ID NO: 621349 - DNA, 15 bp, Homo sapiens
acttcgcccctacct

SEQ ID NO: 621350 - DNA, 15 bp, Homo sapiens
cttcgcccctacctt

SEQ ID NO: 621351 - DNA, 15 bp, Homo sapiens
ttcgcccctaccttc

SEQ ID NO: 621352 - DNA, 15 bp, Homo sapiens
tcgcccctaccttcc

SEQ ID NO: 621353 - DNA, 15 bp, Homo sapiens
cgcccctaccttcct

SEQ ID NO: 621354 - DNA, 15 bp, Homo sapiens
gcccctaccttcctg

SEQ ID NO: 621355 - DNA, 15 bp, Homo sapiens
cccctaccttcctgc

SEQ ID NO: 621356 - DNA, 15 bp, Homo sapiens
ccctaccttcctgct

SEQ ID NO: 621357 - DNA, 15 bp, Homo sapiens
cctaccttcctgcta

SEQ ID NO: 621358 - DNA, 15 bp, Homo sapiens
ctaccttcctgctaa

SEQ ID NO: 621359 - DNA, 15 bp, Homo sapiens
taccttcctgctaac

SEQ ID NO: 621360 - DNA, 15 bp, Homo sapiens
accttcctgctaaca

SEQ ID NO: 621361 - DNA, 15 bp, Homo sapiens
ccttcctgctaacaa

SEQ ID NO: 621362 - DNA, 15 bp, Homo sapiens
cttcctgctaacaag

SEQ ID NO: 621363 - DNA, 15 bp, Homo sapiens
ttcctgctaacaagg

SEQ ID NO: 621364 - DNA, 15 bp, Homo sapiens
tcctgctaacaaggt

SEQ ID NO: 621365 - DNA, 15 bp, Homo sapiens
cctgctaacaaggtg

SEQ ID NO: 621366 - DNA, 15 bp, Homo sapiens
ctgctaacaaggtgt

SEQ ID NO: 621367 - DNA, 15 bp, Homo sapiens
tgctaacaaggtgtg

SEQ ID NO: 621368 - DNA, 15 bp, Homo sapiens
gctaacaaggtgtgt

SEQ ID NO: 621369 - DNA, 15 bp, Homo sapiens
ctaacaaggtgtgtc

SEQ ID NO: 621370 - DNA, 15 bp, Homo sapiens
taacaaggtgtgtca

SEQ ID NO: 621371 - DNA, 15 bp, Homo sapiens
aacaaggtgtgtcat

SEQ ID NO: 621372 - DNA, 15 bp, Homo sapiens
acaaggtgtgtcatg

SEQ ID NO: 621373 - DNA, 15 bp, Homo sapiens
caaggtgtgtcatgc

SEQ ID NO: 621374 - DNA, 15 bp, Homo sapiens
aaggtgtgtcatgca

SEQ ID NO: 621375 - DNA, 15 bp, Homo sapiens
aggtgtgtcatgcat

SEQ ID NO: 621376 - DNA, 15 bp, Homo sapiens
ggtgtgtcatgcatg

SEQ ID NO: 621377 - DNA, 15 bp, Homo sapiens
gtgtgtcatgcatgt

SEQ ID NO: 621378 - DNA, 15 bp, Homo sapiens
tgtgtcatgcatgta

SEQ ID NO: 621379 - DNA, 15 bp, Homo sapiens
gtgtcatgcatgtat

SEQ ID NO: 621380 - DNA, 15 bp, Homo sapiens
tgtcatgcatgtatg

SEQ ID NO: 621381 - DNA, 15 bp, Homo sapiens
gtcatgcatgtatgg

SEQ ID NO: 621382 - DNA, 15 bp, Homo sapiens
tcatgcatgtatgga

SEQ ID NO: 621383 - DNA, 15 bp, Homo sapiens
catgcatgtatggac

SEQ ID NO: 621384 - DNA, 15 bp, Homo sapiens
atgcatgtatggaca

SEQ ID NO: 621385 - DNA, 15 bp, Homo sapiens
tgcatgtatggacac

SEQ ID NO: 621386 - DNA, 15 bp, Homo sapiens
gcatgtatggacacc

SEQ ID NO: 621387 - DNA, 15 bp, Homo sapiens
catgtatggacacct

SEQ ID NO: 621388 - DNA, 15 bp, Homo sapiens
atgtatggacacctc

SEQ ID NO: 621389 - DNA, 15 bp, Homo sapiens
tgtatggacacctca

SEQ ID NO: 621390 - DNA, 15 bp, Homo sapiens
gtatggacacctcag

SEQ ID NO: 621391 - DNA, 15 bp, Homo sapiens
tatggacacctcagt

SEQ ID NO: 621392 - DNA, 15 bp, Homo sapiens
atggacacctcagtg

SEQ ID NO: 621393 - DNA, 15 bp, Homo sapiens
tggacacctcagtgg

SEQ ID NO: 621394 - DNA, 15 bp, Homo sapiens
ggacacctcagtggg

SEQ ID NO: 621395 - DNA, 15 bp, Homo sapiens
gacacctcagtgggg

SEQ ID NO: 621396 - DNA, 15 bp, Homo sapiens
acacctcagtggggg

SEQ ID NO: 621397 - DNA, 15 bp, Homo sapiens
cacctcagtgggggg

SEQ ID NO: 621398 - DNA, 15 bp, Homo sapiens
acctcagtggggggc

SEQ ID NO: 621399 - DNA, 15 bp, Homo sapiens
cctcagtggggggcc

SEQ ID NO: 621400 - DNA, 15 bp, Homo sapiens
ctcagtggggggccc

SEQ ID NO: 621401 - DNA, 15 bp, Homo sapiens
tcagtggggggccca

SEQ ID NO: 621402 - DNA, 15 bp, Homo sapiens
cagtggggggcccag

SEQ ID NO: 621403 - DNA, 15 bp, Homo sapiens
agtggggggcccagg

SEQ ID NO: 621404 - DNA, 15 bp, Homo sapiens
gtggggggcccagga

SEQ ID NO: 621405 - DNA, 15 bp, Homo sapiens
tggggggcccaggag

SEQ ID NO: 621406 - DNA, 15 bp, Homo sapiens
ggggggcccaggaga

SEQ ID NO: 621407 - DNA, 15 bp, Homo sapiens
gggggcccaggagac

SEQ ID NO: 621408 - DNA, 15 bp, Homo sapiens
ggggcccaggagaca

SEQ ID NO: 621409 - DNA, 15 bp, Homo sapiens
gggcccaggagacag

SEQ ID NO: 621410 - DNA, 15 bp, Homo sapiens
ggcccaggagacagg

SEQ ID NO: 621411 - DNA, 15 bp, Homo sapiens
gcccaggagacaggt

SEQ ID NO: 621412 - DNA, 15 bp, Homo sapiens
cccaggagacaggtg

SEQ ID NO: 621413 - DNA, 15 bp, Homo sapiens
ccaggagacaggtgg

SEQ ID NO: 621414 - DNA, 15 bp, Homo sapiens
caggagacaggtggg

SEQ ID NO: 621415 - DNA, 15 bp, Homo sapiens
aggagacaggtggga

SEQ ID NO: 621416 - DNA, 15 bp, Homo sapiens
ggagacaggtgggaa

SEQ ID NO: 621417 - DNA, 15 bp, Homo sapiens
gagacaggtgggaag

SEQ ID NO: 621418 - DNA, 15 bp, Homo sapiens
agacaggtgggaagt

SEQ ID NO: 621419 - DNA, 15 bp, Homo sapiens
gacaggtgggaagtg

SEQ ID NO: 621420 - DNA, 15 bp, Homo sapiens
acaggtgggaagtgg

SEQ ID NO: 621421 - DNA, 15 bp, Homo sapiens
caggtgggaagtggg

SEQ ID NO: 621422 - DNA, 15 bp, Homo sapiens
aggtgggaagtgggc

SEQ ID NO: 621423 - DNA, 15 bp, Homo sapiens
ggtgggaagtgggct

SEQ ID NO: 621424 - DNA, 15 bp, Homo sapiens
gtgggaagtgggctg

SEQ ID NO: 621425 - DNA, 15 bp, Homo sapiens
tgggaagtgggctga

SEQ ID NO: 621426 - DNA, 15 bp, Homo sapiens
gggaagtgggctgag

SEQ ID NO: 621427 - DNA, 15 bp, Homo sapiens
ggaagtgggctgagt

SEQ ID NO: 621428 - DNA, 15 bp, Homo sapiens
gaagtgggctgagtg

SEQ ID NO: 621429 - DNA, 15 bp, Homo sapiens
aagtgggctgagtgc

SEQ ID NO: 621430 - DNA, 15 bp, Homo sapiens
agtgggctgagtgct

SEQ ID NO: 621431 - DNA, 15 bp, Homo sapiens
gtgggctgagtgctg

SEQ ID NO: 621432 - DNA, 15 bp, Homo sapiens
tgggctgagtgctgg

SEQ ID NO: 621433 - DNA, 15 bp, Homo sapiens
gggctgagtgctgga

SEQ ID NO: 621434 - DNA, 15 bp, Homo sapiens
ggctgagtgctggat

SEQ ID NO: 621435 - DNA, 15 bp, Homo sapiens
gctgagtgctggatg

SEQ ID NO: 621436 - DNA, 15 bp, Homo sapiens
ctgagtgctggatgc

SEQ ID NO: 621437 - DNA, 15 bp, Homo sapiens
tgagtgctggatgca

SEQ ID NO: 621438 - DNA, 15 bp, Homo sapiens
gagtgctggatgcaa

SEQ ID NO: 621439 - DNA, 15 bp, Homo sapiens
agtgctggatgcaaa

SEQ ID NO: 621440 - DNA, 15 bp, Homo sapiens
gtgctggatgcaaat

SEQ ID NO: 621441 - DNA, 15 bp, Homo sapiens
tgctggatgcaaatc

SEQ ID NO: 621442 - DNA, 15 bp, Homo sapiens
gctggatgcaaatct

SEQ ID NO: 621443 - DNA, 15 bp, Homo sapiens
ctggatgcaaatcta

SEQ ID NO: 621444 - DNA, 15 bp, Homo sapiens
tggatgcaaatctag

SEQ ID NO: 621445 - DNA, 15 bp, Homo sapiens
ggatgcaaatctagt

SEQ ID NO: 621446 - DNA, 15 bp, Homo sapiens
gatgcaaatctagtg

SEQ ID NO: 621447 - DNA, 15 bp, Homo sapiens
atgcaaatctagtgg

SEQ ID NO: 621448 - DNA, 15 bp, Homo sapiens
tgcaaatctagtggg

SEQ ID NO: 621449 - DNA, 15 bp, Homo sapiens
gcaaatctagtgggg

SEQ ID NO: 621450 - DNA, 15 bp, Homo sapiens
caaatctagtggggg

SEQ ID NO: 621451 - DNA, 15 bp, Homo sapiens
aaatctagtgggggt

SEQ ID NO: 621452 - DNA, 15 bp, Homo sapiens
aatctagtgggggtt

SEQ ID NO: 621453 - DNA, 15 bp, Homo sapiens
atctagtgggggttg

SEQ ID NO: 621454 - DNA, 15 bp, Homo sapiens
tctagtgggggttgg

SEQ ID NO: 621455 - DNA, 15 bp, Homo sapiens
ctagtgggggttggg

SEQ ID NO: 621456 - DNA, 15 bp, Homo sapiens
tagtgggggttgggt

SEQ ID NO: 621457 - DNA, 15 bp, Homo sapiens
agtgggggttgggta

SEQ ID NO: 621458 - DNA, 15 bp, Homo sapiens
gtgggggttgggtat

SEQ ID NO: 621459 - DNA, 15 bp, Homo sapiens
tgggggttgggtatg

SEQ ID NO: 621460 - DNA, 15 bp, Homo sapiens
gggggttgggtatgg

SEQ ID NO: 621461 - DNA, 15 bp, Homo sapiens
ggggttgggtatgga

SEQ ID NO: 621462 - DNA, 15 bp, Homo sapiens
gggttgggtatggaa

SEQ ID NO: 621463 - DNA, 15 bp, Homo sapiens
ggttgggtatggaag

SEQ ID NO: 621464 - DNA, 15 bp, Homo sapiens
gttgggtatggaagg

SEQ ID NO: 621465 - DNA, 15 bp, Homo sapiens
ttgggtatggaagga

SEQ ID NO: 621466 - DNA, 15 bp, Homo sapiens
tgggtatggaaggaa

SEQ ID NO: 621467 - DNA, 15 bp, Homo sapiens
gggtatggaaggaag

SEQ ID NO: 621468 - DNA, 15 bp, Homo sapiens
ggtatggaaggaaga

SEQ ID NO: 621469 - DNA, 15 bp, Homo sapiens
gtatggaaggaagag

SEQ ID NO: 621470 - DNA, 15 bp, Homo sapiens
tatggaaggaagagt

SEQ ID NO: 621471 - DNA, 15 bp, Homo sapiens
atggaaggaagagtc

SEQ ID NO: 621472 - DNA, 15 bp, Homo sapiens
tggaaggaagagtct

SEQ ID NO: 621473 - DNA, 15 bp, Homo sapiens
ggaaggaagagtctg

SEQ ID NO: 621474 - DNA, 15 bp, Homo sapiens
gaaggaagagtctgg

SEQ ID NO: 621475 - DNA, 15 bp, Homo sapiens
aaggaagagtctgga

SEQ ID NO: 621476 - DNA, 15 bp, Homo sapiens
aggaagagtctggag

SEQ ID NO: 621477 - DNA, 15 bp, Homo sapiens
ggaagagtctggagc

SEQ ID NO: 621478 - DNA, 15 bp, Homo sapiens
gaagagtctggagct

SEQ ID NO: 621479 - DNA, 15 bp, Homo sapiens
aagagtctggagctg

SEQ ID NO: 621480 - DNA, 15 bp, Homo sapiens
agagtctggagctga

SEQ ID NO: 621481 - DNA, 15 bp, Homo sapiens
gagtctggagctgag

SEQ ID NO: 621482 - DNA, 15 bp, Homo sapiens
agtctggagctgaga

SEQ ID NO: 621483 - DNA, 15 bp, Homo sapiens
gtctggagctgagag

SEQ ID NO: 621484 - DNA, 15 bp, Homo sapiens
tctggagctgagagc

SEQ ID NO: 621485 - DNA, 15 bp, Homo sapiens
ctggagctgagagca

SEQ ID NO: 621486 - DNA, 15 bp, Homo sapiens
tggagctgagagcag

SEQ ID NO: 621487 - DNA, 15 bp, Homo sapiens
ggagctgagagcagc

SEQ ID NO: 621488 - DNA, 15 bp, Homo sapiens
gagctgagagcagca

SEQ ID NO: 621489 - DNA, 15 bp, Homo sapiens
agctgagagcagcag

SEQ ID NO: 621490 - DNA, 15 bp, Homo sapiens
gctgagagcagcagg

SEQ ID NO: 621491 - DNA, 15 bp, Homo sapiens
ctgagagcagcaggg

SEQ ID NO: 621492 - DNA, 15 bp, Homo sapiens
tgagagcagcagggc

SEQ ID NO: 621493 - DNA, 15 bp, Homo sapiens
gagagcagcagggcc

SEQ ID NO: 621494 - DNA, 15 bp, Homo sapiens
agagcagcagggcct

SEQ ID NO: 621495 - DNA, 15 bp, Homo sapiens
gagcagcagggcctg

SEQ ID NO: 621496 - DNA, 15 bp, Homo sapiens
agcagcagggcctgg

SEQ ID NO: 621497 - DNA, 15 bp, Homo sapiens
gcagcagggcctggg

SEQ ID NO: 621498 - DNA, 15 bp, Homo sapiens
cagcagggcctgggg

SEQ ID NO: 621499 - DNA, 15 bp, Homo sapiens
agcagggcctgggga

SEQ ID NO: 621500 - DNA, 15 bp, Homo sapiens
gcagggcctggggag

SEQ ID NO: 621501 - DNA, 15 bp, Homo sapiens
cagggcctggggagg

SEQ ID NO: 621502 - DNA, 15 bp, Homo sapiens
agggcctggggaggt

SEQ ID NO: 621503 - DNA, 15 bp, Homo sapiens
gggcctggggaggtc

SEQ ID NO: 621504 - DNA, 15 bp, Homo sapiens
ggcctggggaggtca

SEQ ID NO: 621505 - DNA, 15 bp, Homo sapiens
gcctggggaggtcag

SEQ ID NO: 621506 - DNA, 15 bp, Homo sapiens
cctggggaggtcagg

SEQ ID NO: 621507 - DNA, 15 bp, Homo sapiens
ctggggaggtcaggg

SEQ ID NO: 621508 - DNA, 15 bp, Homo sapiens
tggggaggtcagggt

SEQ ID NO: 621509 - DNA, 15 bp, Homo sapiens
ggggaggtcagggtg

SEQ ID NO: 621510 - DNA, 15 bp, Homo sapiens
gggaggtcagggtgc

SEQ ID NO: 621511 - DNA, 15 bp, Homo sapiens
ggaggtcagggtgct

SEQ ID NO: 621512 - DNA, 15 bp, Homo sapiens
gaggtcagggtgctg

SEQ ID NO: 621513 - DNA, 15 bp, Homo sapiens
aggtcagggtgctgt

SEQ ID NO: 621514 - DNA, 15 bp, Homo sapiens
ggtcagggtgctgtg

SEQ ID NO: 621515 - DNA, 15 bp, Homo sapiens
gtcagggtgctgtgg

SEQ ID NO: 621516 - DNA, 15 bp, Homo sapiens
tcagggtgctgtgga

SEQ ID NO: 621517 - DNA, 15 bp, Homo sapiens
cagggtgctgtggag

SEQ ID NO: 621518 - DNA, 15 bp, Homo sapiens
agggtgctgtggaga

SEQ ID NO: 621519 - DNA, 15 bp, Homo sapiens
gggtgctgtggagac

SEQ ID NO: 621520 - DNA, 15 bp, Homo sapiens
ggtgctgtggagact

SEQ ID NO: 621521 - DNA, 15 bp, Homo sapiens
gtgctgtggagactt

SEQ ID NO: 621522 - DNA, 15 bp, Homo sapiens
tgctgtggagacttc

SEQ ID NO: 621523 - DNA, 15 bp, Homo sapiens
gctgtggagacttca

SEQ ID NO: 621524 - DNA, 15 bp, Homo sapiens
ctgtggagacttcaa

SEQ ID NO: 621525 - DNA, 15 bp, Homo sapiens
tgtggagacttcaag

SEQ ID NO: 621526 - DNA, 15 bp, Homo sapiens
gtggagacttcaagg

SEQ ID NO: 621527 - DNA, 15 bp, Homo sapiens
tggagacttcaagga

SEQ ID NO: 621528 - DNA, 15 bp, Homo sapiens
ggagacttcaaggag

SEQ ID NO: 621529 - DNA, 15 bp, Homo sapiens
gagacttcaaggaga

SEQ ID NO: 621530 - DNA, 15 bp, Homo sapiens
agacttcaaggagag

SEQ ID NO: 621531 - DNA, 15 bp, Homo sapiens
gacttcaaggagagg

SEQ ID NO: 621532 - DNA, 15 bp, Homo sapiens
acttcaaggagaggg

SEQ ID NO: 621533 - DNA, 15 bp, Homo sapiens
cttcaaggagaggga

SEQ ID NO: 621534 - DNA, 15 bp, Homo sapiens
ttcaaggagagggaa

SEQ ID NO: 621535 - DNA, 15 bp, Homo sapiens
tcaaggagagggaag

SEQ ID NO: 621536 - DNA, 15 bp, Homo sapiens
caaggagagggaagg

SEQ ID NO: 621537 - DNA, 15 bp, Homo sapiens
aaggagagggaaggc

SEQ ID NO: 621538 - DNA, 15 bp, Homo sapiens
aggagagggaaggcc

SEQ ID NO: 621539 - DNA, 15 bp, Homo sapiens
ggagagggaaggcct

SEQ ID NO: 621540 - DNA, 15 bp, Homo sapiens
gagagggaaggcctt

SEQ ID NO: 621541 - DNA, 15 bp, Homo sapiens
agagggaaggcctta

SEQ ID NO: 621542 - DNA, 15 bp, Homo sapiens
gagggaaggccttag

SEQ ID NO: 621543 - DNA, 15 bp, Homo sapiens
agggaaggccttaga

SEQ ID NO: 621544 - DNA, 15 bp, Homo sapiens
gggaaggccttagag

SEQ ID NO: 621545 - DNA, 15 bp, Homo sapiens
ggaaggccttagagt

SEQ ID NO: 621546 - DNA, 15 bp, Homo sapiens
gaaggccttagagtg

SEQ ID NO: 621547 - DNA, 15 bp, Homo sapiens
aaggccttagagtgg

SEQ ID NO: 621548 - DNA, 15 bp, Homo sapiens
aggccttagagtgga

SEQ ID NO: 621549 - DNA, 15 bp, Homo sapiens
ggccttagagtggag

SEQ ID NO: 621550 - DNA, 15 bp, Homo sapiens
gccttagagtggagc

SEQ ID NO: 621551 - DNA, 15 bp, Homo sapiens
ccttagagtggagcc

SEQ ID NO: 621552 - DNA, 15 bp, Homo sapiens
cttagagtggagcct

SEQ ID NO: 621553 - DNA, 15 bp, Homo sapiens
ttagagtggagcctg

SEQ ID NO: 621554 - DNA, 15 bp, Homo sapiens
tagagtggagcctga

SEQ ID NO: 621555 - DNA, 15 bp, Homo sapiens
agagtggagcctgac

SEQ ID NO: 621556 - DNA, 15 bp, Homo sapiens
gagtggagcctgaca

SEQ ID NO: 621557 - DNA, 15 bp, Homo sapiens
agtggagcctgacac

SEQ ID NO: 621558 - DNA, 15 bp, Homo sapiens
gtggagcctgacact

SEQ ID NO: 621559 - DNA, 15 bp, Homo sapiens
tggagcctgacactc

SEQ ID NO: 621560 - DNA, 15 bp, Homo sapiens
ggagcctgacactca

SEQ ID NO: 621561 - DNA, 15 bp, Homo sapiens
gagcctgacactcag

SEQ ID NO: 621562 - DNA, 15 bp, Homo sapiens
agcctgacactcagc

SEQ ID NO: 621563 - DNA, 15 bp, Homo sapiens
gcctgacactcagca

SEQ ID NO: 621564 - DNA, 15 bp, Homo sapiens
cctgacactcagcag

SEQ ID NO: 621565 - DNA, 15 bp, Homo sapiens
ctgacactcagcagt

SEQ ID NO: 621566 - DNA, 15 bp, Homo sapiens
tgacactcagcagtg

SEQ ID NO: 621567 - DNA, 15 bp, Homo sapiens
gacactcagcagtga

SEQ ID NO: 621568 - DNA, 15 bp, Homo sapiens
acactcagcagtgac

SEQ ID NO: 621569 - DNA, 15 bp, Homo sapiens
cactcagcagtgaca

SEQ ID NO: 621570 - DNA, 15 bp, Homo sapiens
actcagcagtgacag

SEQ ID NO: 621571 - DNA, 15 bp, Homo sapiens
ctcagcagtgacagg

SEQ ID NO: 621572 - DNA, 15 bp, Homo sapiens
tcagcagtgacaggt

SEQ ID NO: 621573 - DNA, 15 bp, Homo sapiens
cagcagtgacaggtg

SEQ ID NO: 621574 - DNA, 15 bp, Homo sapiens
agcagtgacaggtgt

SEQ ID NO: 621575 - DNA, 15 bp, Homo sapiens
gcagtgacaggtgtc

SEQ ID NO: 621576 - DNA, 15 bp, Homo sapiens
cagtgacaggtgtct

SEQ ID NO: 621577 - DNA, 15 bp, Homo sapiens
agtgacaggtgtctt

SEQ ID NO: 621578 - DNA, 15 bp, Homo sapiens
gtgacaggtgtctta

SEQ ID NO: 621579 - DNA, 15 bp, Homo sapiens
tgacaggtgtcttag

SEQ ID NO: 621580 - DNA, 15 bp, Homo sapiens
gacaggtgtcttagc

SEQ ID NO: 621581 - DNA, 15 bp, Homo sapiens
acaggtgtcttagct

SEQ ID NO: 621582 - DNA, 15 bp, Homo sapiens
caggtgtcttagctc

SEQ ID NO: 621583 - DNA, 15 bp, Homo sapiens
aggtgtcttagctca

SEQ ID NO: 621584 - DNA, 15 bp, Homo sapiens
ggtgtcttagctcag

SEQ ID NO: 621585 - DNA, 15 bp, Homo sapiens
gtgtcttagctcagg

SEQ ID NO: 621586 - DNA, 15 bp, Homo sapiens
tgtcttagctcaggc

SEQ ID NO: 621587 - DNA, 15 bp, Homo sapiens
gtcttagctcaggct

SEQ ID NO: 621588 - DNA, 15 bp, Homo sapiens
tcttagctcaggctc

SEQ ID NO: 621589 - DNA, 15 bp, Homo sapiens
cttagctcaggctcc

SEQ ID NO: 621590 - DNA, 15 bp, Homo sapiens
ttagctcaggctccc

SEQ ID NO: 621591 - DNA, 15 bp, Homo sapiens
tagctcaggctccca

SEQ ID NO: 621592 - DNA, 15 bp, Homo sapiens
agctcaggctcccaa

SEQ ID NO: 621593 - DNA, 15 bp, Homo sapiens
gctcaggctcccaat

SEQ ID NO: 621594 - DNA, 15 bp, Homo sapiens
ctcaggctcccaatc

SEQ ID NO: 621595 - DNA, 15 bp, Homo sapiens
tcaggctcccaatcc

SEQ ID NO: 621596 - DNA, 15 bp, Homo sapiens
caggctcccaatccg

SEQ ID NO: 621597 - DNA, 15 bp, Homo sapiens
aggctcccaatccgc

SEQ ID NO: 621598 - DNA, 15 bp, Homo sapiens
ggctcccaatccgca

SEQ ID NO: 621599 - DNA, 15 bp, Homo sapiens
gctcccaatccgcag

SEQ ID NO: 621600 - DNA, 15 bp, Homo sapiens
ctcccaatccgcagc

SEQ ID NO: 621601 - DNA, 15 bp, Homo sapiens
tcccaatccgcagcc

SEQ ID NO: 621602 - DNA, 15 bp, Homo sapiens
cccaatccgcagcca

SEQ ID NO: 621603 - DNA, 15 bp, Homo sapiens
ccaatccgcagccag

SEQ ID NO: 621604 - DNA, 15 bp, Homo sapiens
caatccgcagccagc

SEQ ID NO: 621605 - DNA, 15 bp, Homo sapiens
aatccgcagccagcg

SEQ ID NO: 621606 - DNA, 15 bp, Homo sapiens
atccgcagccagcgc

SEQ ID NO: 621607 - DNA, 15 bp, Homo sapiens
tccgcagccagcgcc

SEQ ID NO: 621608 - DNA, 15 bp, Homo sapiens
ccgcagccagcgcca

SEQ ID NO: 621609 - DNA, 15 bp, Homo sapiens
cgcagccagcgccac

SEQ ID NO: 621610 - DNA, 15 bp, Homo sapiens
gcagccagcgccacg

SEQ ID NO: 621611 - DNA, 15 bp, Homo sapiens
cagccagcgccacgc

SEQ ID NO: 621612 - DNA, 15 bp, Homo sapiens
agccagcgccacgcc

SEQ ID NO: 621613 - DNA, 15 bp, Homo sapiens
gccagcgccacgcct

SEQ ID NO: 621614 - DNA, 15 bp, Homo sapiens
ccagcgccacgcctg

SEQ ID NO: 621615 - DNA, 15 bp, Homo sapiens
cagcgccacgcctgc

SEQ ID NO: 621616 - DNA, 15 bp, Homo sapiens
agcgccacgcctgcc

SEQ ID NO: 621617 - DNA, 15 bp, Homo sapiens
gcgccacgcctgccc

SEQ ID NO: 621618 - DNA, 15 bp, Homo sapiens
cgccacgcctgccct

SEQ ID NO: 621619 - DNA, 15 bp, Homo sapiens
gccacgcctgcccta

SEQ ID NO: 621620 - DNA, 15 bp, Homo sapiens
ccacgcctgccctag

SEQ ID NO: 621621 - DNA, 15 bp, Homo sapiens
cacgcctgccctagg

SEQ ID NO: 621622 - DNA, 15 bp, Homo sapiens
acgcctgccctaggc

SEQ ID NO: 621623 - DNA, 15 bp, Homo sapiens
cgcctgccctaggca

SEQ ID NO: 621624 - DNA, 15 bp, Homo sapiens
gcctgccctaggcat

SEQ ID NO: 621625 - DNA, 15 bp, Homo sapiens
cctgccctaggcatc

SEQ ID NO: 621626 - DNA, 15 bp, Homo sapiens
ctgccctaggcatcc

SEQ ID NO: 621627 - DNA, 15 bp, Homo sapiens
tgccctaggcatccc

SEQ ID NO: 621628 - DNA, 15 bp, Homo sapiens
gccctaggcatccca

SEQ ID NO: 621629 - DNA, 15 bp, Homo sapiens
ccctaggcatcccat

SEQ ID NO: 621630 - DNA, 15 bp, Homo sapiens
cctaggcatcccatc

SEQ ID NO: 621631 - DNA, 15 bp, Homo sapiens
ctaggcatcccatcc

SEQ ID NO: 621632 - DNA, 15 bp, Homo sapiens
taggcatcccatcca

SEQ ID NO: 621633 - DNA, 15 bp, Homo sapiens
aggcatcccatccag

SEQ ID NO: 621634 - DNA, 15 bp, Homo sapiens
ggcatcccatccagc

SEQ ID NO: 621635 - DNA, 15 bp, Homo sapiens
gcatcccatccagct

SEQ ID NO: 621636 - DNA, 15 bp, Homo sapiens
catcccatccagctg

SEQ ID NO: 621637 - DNA, 15 bp, Homo sapiens
atcccatccagctgt

SEQ ID NO: 621638 - DNA, 15 bp, Homo sapiens
tcccatccagctgtt

SEQ ID NO: 621639 - DNA, 15 bp, Homo sapiens
cccatccagctgttc

SEQ ID NO: 621640 - DNA, 15 bp, Homo sapiens
ccatccagctgttcc

SEQ ID NO: 621641 - DNA, 15 bp, Homo sapiens
catccagctgttccc

SEQ ID NO: 621642 - DNA, 15 bp, Homo sapiens
atccagctgttcccc

SEQ ID NO: 621643 - DNA, 15 bp, Homo sapiens
tccagctgttcccct

SEQ ID NO: 621644 - DNA, 15 bp, Homo sapiens
ccagctgttcccctg

SEQ ID NO: 621645 - DNA, 15 bp, Homo sapiens
cagctgttcccctga

SEQ ID NO: 621646 - DNA, 15 bp, Homo sapiens
agctgttcccctgag

SEQ ID NO: 621647 - DNA, 15 bp, Homo sapiens
gctgttcccctgagc

SEQ ID NO: 621648 - DNA, 15 bp, Homo sapiens
ctgttcccctgagcc

SEQ ID NO: 621649 - DNA, 15 bp, Homo sapiens
tgttcccctgagccc

SEQ ID NO: 621650 - DNA, 15 bp, Homo sapiens
gttcccctgagccca

SEQ ID NO: 621651 - DNA, 15 bp, Homo sapiens
ttcccctgagcccac

SEQ ID NO: 621652 - DNA, 15 bp, Homo sapiens
tcccctgagcccacc

SEQ ID NO: 621653 - DNA, 15 bp, Homo sapiens
cccctgagcccacct

SEQ ID NO: 621654 - DNA, 15 bp, Homo sapiens
ccctgagcccacctc

SEQ ID NO: 621655 - DNA, 15 bp, Homo sapiens
cctgagcccacctcc

SEQ ID NO: 621656 - DNA, 15 bp, Homo sapiens
ctgagcccacctccc

SEQ ID NO: 621657 - DNA, 15 bp, Homo sapiens
tgagcccacctcccc

SEQ ID NO: 621658 - DNA, 15 bp, Homo sapiens
gagcccacctcccct

SEQ ID NO: 621659 - DNA, 15 bp, Homo sapiens
agcccacctcccctc

SEQ ID NO: 621660 - DNA, 15 bp, Homo sapiens
gcccacctcccctcc

SEQ ID NO: 621661 - DNA, 15 bp, Homo sapiens
cccacctcccctccc

SEQ ID NO: 621662 - DNA, 15 bp, Homo sapiens
ccacctcccctccca

SEQ ID NO: 621663 - DNA, 15 bp, Homo sapiens
cacctcccctcccag

SEQ ID NO: 621664 - DNA, 15 bp, Homo sapiens
acctcccctcccagg

SEQ ID NO: 621665 - DNA, 15 bp, Homo sapiens
cctcccctcccaggc

SEQ ID NO: 621666 - DNA, 15 bp, Homo sapiens
ctcccctcccaggcc

SEQ ID NO: 621667 - DNA, 15 bp, Homo sapiens
tcccctcccaggcca

SEQ ID NO: 621668 - DNA, 15 bp, Homo sapiens
cccctcccaggccag

SEQ ID NO: 621669 - DNA, 15 bp, Homo sapiens
ccctcccaggccaga

SEQ ID NO: 621670 - DNA, 15 bp, Homo sapiens
cctcccaggccagag

SEQ ID NO: 621671 - DNA, 15 bp, Homo sapiens
ctcccaggccagagc

SEQ ID NO: 621672 - DNA, 15 bp, Homo sapiens
tcccaggccagagcc

SEQ ID NO: 621673 - DNA, 15 bp, Homo sapiens
cccaggccagagccc

SEQ ID NO: 621674 - DNA, 15 bp, Homo sapiens
ccaggccagagccca

SEQ ID NO: 621675 - DNA, 15 bp, Homo sapiens
caggccagagcccaa

SEQ ID NO: 621676 - DNA, 15 bp, Homo sapiens
aggccagagcccaac

SEQ ID NO: 621677 - DNA, 15 bp, Homo sapiens
ggccagagcccaacc

SEQ ID NO: 621678 - DNA, 15 bp, Homo sapiens
gccagagcccaaccc

SEQ ID NO: 621679 - DNA, 15 bp, Homo sapiens
ccagagcccaaccct

SEQ ID NO: 621680 - DNA, 15 bp, Homo sapiens
cagagcccaaccctg

SEQ ID NO: 621681 - DNA, 15 bp, Homo sapiens
agagcccaaccctgc

SEQ ID NO: 621682 - DNA, 15 bp, Homo sapiens
gagcccaaccctgca

SEQ ID NO: 621683 - DNA, 15 bp, Homo sapiens
agcccaaccctgcag

SEQ ID NO: 621684 - DNA, 15 bp, Homo sapiens
gcccaaccctgcagg

SEQ ID NO: 621685 - DNA, 15 bp, Homo sapiens
cccaaccctgcaggg

SEQ ID NO: 621686 - DNA, 15 bp, Homo sapiens
ccaaccctgcagggt

SEQ ID NO: 621687 - DNA, 15 bp, Homo sapiens
caaccctgcagggtg

SEQ ID NO: 621688 - DNA, 15 bp, Homo sapiens
aaccctgcagggtgg

SEQ ID NO: 621689 - DNA, 15 bp, Homo sapiens
accctgcagggtggg

SEQ ID NO: 621690 - DNA, 15 bp, Homo sapiens
ccctgcagggtgggt

SEQ ID NO: 621691 - DNA, 15 bp, Homo sapiens
cctgcagggtgggtg

SEQ ID NO: 621692 - DNA, 15 bp, Homo sapiens
ctgcagggtgggtgc

SEQ ID NO: 621693 - DNA, 15 bp, Homo sapiens
tgcagggtgggtgca

SEQ ID NO: 621694 - DNA, 15 bp, Homo sapiens
gcagggtgggtgcac

SEQ ID NO: 621695 - DNA, 15 bp, Homo sapiens
cagggtgggtgcaca

SEQ ID NO: 621696 - DNA, 15 bp, Homo sapiens
agggtgggtgcacac

SEQ ID NO: 621697 - DNA, 15 bp, Homo sapiens
gggtgggtgcacact

SEQ ID NO: 621698 - DNA, 15 bp, Homo sapiens
ggtgggtgcacactc

SEQ ID NO: 621699 - DNA, 15 bp, Homo sapiens
gtgggtgcacactcc

SEQ ID NO: 621700 - DNA, 15 bp, Homo sapiens
tgggtgcacactcca

SEQ ID NO: 621701 - DNA, 15 bp, Homo sapiens
gggtgcacactccac

SEQ ID NO: 621702 - DNA, 15 bp, Homo sapiens
ggtgcacactccact

SEQ ID NO: 621703 - DNA, 15 bp, Homo sapiens
gtgcacactccactc

SEQ ID NO: 621704 - DNA, 15 bp, Homo sapiens
tgcacactccactca

SEQ ID NO: 621705 - DNA, 15 bp, Homo sapiens
gcacactccactcac

SEQ ID NO: 621706 - DNA, 15 bp, Homo sapiens
cacactccactcact

SEQ ID NO: 621707 - DNA, 15 bp, Homo sapiens
acactccactcactc

SEQ ID NO: 621708 - DNA, 15 bp, Homo sapiens
cactccactcactct

SEQ ID NO: 621709 - DNA, 15 bp, Homo sapiens
actccactcactctc

SEQ ID NO: 621710 - DNA, 15 bp, Homo sapiens
ctccactcactctcg

SEQ ID NO: 621711 - DNA, 15 bp, Homo sapiens
tccactcactctcgc

SEQ ID NO: 621712 - DNA, 15 bp, Homo sapiens
ccactcactctcgct

SEQ ID NO: 621713 - DNA, 15 bp, Homo sapiens
cactcactctcgctc

SEQ ID NO: 621714 - DNA, 15 bp, Homo sapiens
actcactctcgctct

SEQ ID NO: 621715 - DNA, 15 bp, Homo sapiens
ctcactctcgctctc

SEQ ID NO: 621716 - DNA, 15 bp, Homo sapiens
tcactctcgctctct

SEQ ID NO: 621717 - DNA, 15 bp, Homo sapiens
cactctcgctctctg

SEQ ID NO: 621718 - DNA, 15 bp, Homo sapiens
actctcgctctctgc

SEQ ID NO: 621719 - DNA, 15 bp, Homo sapiens
ctctcgctctctgct

SEQ ID NO: 621720 - DNA, 15 bp, Homo sapiens
tctcgctctctgctc

SEQ ID NO: 621721 - DNA, 15 bp, Homo sapiens
ctcgctctctgctcc

SEQ ID NO: 621722 - DNA, 15 bp, Homo sapiens
tcgctctctgctcct

SEQ ID NO: 621723 - DNA, 15 bp, Homo sapiens
cgctctctgctcctc

SEQ ID NO: 621724 - DNA, 15 bp, Homo sapiens
gctctctgctcctcc

SEQ ID NO: 621725 - DNA, 15 bp, Homo sapiens
ctctctgctcctcca

SEQ ID NO: 621726 - DNA, 15 bp, Homo sapiens
tctctgctcctccag

SEQ ID NO: 621727 - DNA, 15 bp, Homo sapiens
ctctgctcctccagg

SEQ ID NO: 621728 - DNA, 15 bp, Homo sapiens
tctgctcctccagga

SEQ ID NO: 621729 - DNA, 15 bp, Homo sapiens
ctgctcctccaggaa

SEQ ID NO: 621730 - DNA, 15 bp, Homo sapiens
tgctcctccaggaag

SEQ ID NO: 621731 - DNA, 15 bp, Homo sapiens
gctcctccaggaagc

SEQ ID NO: 621732 - DNA, 15 bp, Homo sapiens
ctcctccaggaagct

SEQ ID NO: 621733 - DNA, 15 bp, Homo sapiens
tcctccaggaagctg

SEQ ID NO: 621734 - DNA, 15 bp, Homo sapiens
cctccaggaagctgg

SEQ ID NO: 621735 - DNA, 15 bp, Homo sapiens
ctccaggaagctggc

SEQ ID NO: 621736 - DNA, 15 bp, Homo sapiens
tccaggaagctggca

SEQ ID NO: 621737 - DNA, 15 bp, Homo sapiens
ccaggaagctggcac

SEQ ID NO: 621738 - DNA, 15 bp, Homo sapiens
caggaagctggcacc

SEQ ID NO: 621739 - DNA, 15 bp, Homo sapiens
aggaagctggcaccc

SEQ ID NO: 621740 - DNA, 15 bp, Homo sapiens
ggaagctggcacccc

SEQ ID NO: 621741 - DNA, 15 bp, Homo sapiens
gaagctggcacccct

SEQ ID NO: 621742 - DNA, 15 bp, Homo sapiens
aagctggcacccctt

SEQ ID NO: 621743 - DNA, 15 bp, Homo sapiens
agctggcaccccttt

SEQ ID NO: 621744 - DNA, 15 bp, Homo sapiens
gctggcaccccttta

SEQ ID NO: 621745 - DNA, 15 bp, Homo sapiens
ctggcacccctttac

SEQ ID NO: 621746 - DNA, 15 bp, Homo sapiens
tggcacccctttact

SEQ ID NO: 621747 - DNA, 15 bp, Homo sapiens
ggcacccctttactg

SEQ ID NO: 621748 - DNA, 15 bp, Homo sapiens
gcacccctttactgt

SEQ ID NO: 621749 - DNA, 15 bp, Homo sapiens
cacccctttactgtt

SEQ ID NO: 621750 - DNA, 15 bp, Homo sapiens
acccctttactgttt

SEQ ID NO: 621751 - DNA, 15 bp, Homo sapiens
cccctttactgtttt

SEQ ID NO: 621752 - DNA, 15 bp, Homo sapiens
ccctttactgttttt

SEQ ID NO: 621753 - DNA, 15 bp, Homo sapiens
cctttactgtttttt

SEQ ID NO: 621754 - DNA, 15 bp, Homo sapiens
ctttactgttttttt

SEQ ID NO: 621755 - DNA, 15 bp, Homo sapiens
tttactgtttttttg

SEQ ID NO: 621756 - DNA, 15 bp, Homo sapiens
ttactgtttttttgc

SEQ ID NO: 621757 - DNA, 15 bp, Homo sapiens
tactgtttttttgca

SEQ ID NO: 621758 - DNA, 15 bp, Homo sapiens
actgtttttttgcac

SEQ ID NO: 621759 - DNA, 15 bp, Homo sapiens
ctgtttttttgcaca

SEQ ID NO: 621760 - DNA, 15 bp, Homo sapiens
tgtttttttgcacat

SEQ ID NO: 621761 - DNA, 15 bp, Homo sapiens
gtttttttgcacatt

SEQ ID NO: 621762 - DNA, 15 bp, Homo sapiens
tttttttgcacattt

SEQ ID NO: 621763 - DNA, 15 bp, Homo sapiens
ttttttgcacatttg

SEQ ID NO: 621764 - DNA, 15 bp, Homo sapiens
tttttgcacatttga

SEQ ID NO: 621765 - DNA, 15 bp, Homo sapiens
ttttgcacatttgat

SEQ ID NO: 621766 - DNA, 15 bp, Homo sapiens
tttgcacatttgatg

SEQ ID NO: 621767 - DNA, 15 bp, Homo sapiens
ttgcacatttgatgt

SEQ ID NO: 621768 - DNA, 15 bp, Homo sapiens
tgcacatttgatgtg

SEQ ID NO: 621769 - DNA, 15 bp, Homo sapiens
gcacatttgatgtga

SEQ ID NO: 621770 - DNA, 15 bp, Homo sapiens
cacatttgatgtgat

SEQ ID NO: 621771 - DNA, 15 bp, Homo sapiens
acatttgatgtgatt

SEQ ID NO: 621772 - DNA, 15 bp, Homo sapiens
catttgatgtgattt

SEQ ID NO: 621773 - DNA, 15 bp, Homo sapiens
atttgatgtgattta

SEQ ID NO: 621774 - DNA, 15 bp, Homo sapiens
tttgatgtgatttaa

SEQ ID NO: 621775 - DNA, 15 bp, Homo sapiens
ttgatgtgatttaat

SEQ ID NO: 621776 - DNA, 15 bp, Homo sapiens
tgatgtgatttaatt

SEQ ID NO: 621777 - DNA, 15 bp, Homo sapiens
gatgtgatttaattc

SEQ ID NO: 621778 - DNA, 15 bp, Homo sapiens
atgtgatttaattct

SEQ ID NO: 621779 - DNA, 15 bp, Homo sapiens
tgtgatttaattctt

SEQ ID NO: 621780 - DNA, 15 bp, Homo sapiens
gtgatttaattctta

SEQ ID NO: 621781 - DNA, 15 bp, Homo sapiens
tgatttaattcttac

SEQ ID NO: 621782 - DNA, 15 bp, Homo sapiens
gatttaattcttact

SEQ ID NO: 621783 - DNA, 15 bp, Homo sapiens
atttaattcttactt

SEQ ID NO: 621784 - DNA, 15 bp, Homo sapiens
tttaattcttacttc

SEQ ID NO: 621785 - DNA, 15 bp, Homo sapiens
ttaattcttacttca

SEQ ID NO: 621786 - DNA, 15 bp, Homo sapiens
taattcttacttcaa

SEQ ID NO: 621787 - DNA, 15 bp, Homo sapiens
aattcttacttcaat

SEQ ID NO: 621788 - DNA, 15 bp, Homo sapiens
attcttacttcaatt

SEQ ID NO: 621789 - DNA, 15 bp, Homo sapiens
ttcttacttcaattt

SEQ ID NO: 621790 - DNA, 15 bp, Homo sapiens
tcttacttcaatttg

SEQ ID NO: 621791 - DNA, 15 bp, Homo sapiens
cttacttcaatttga

SEQ ID NO: 621792 - DNA, 15 bp, Homo sapiens
ttacttcaatttgat

SEQ ID NO: 621793 - DNA, 15 bp, Homo sapiens
tacttcaatttgatg

SEQ ID NO: 621794 - DNA, 15 bp, Homo sapiens
acttcaatttgatga

SEQ ID NO: 621795 - DNA, 15 bp, Homo sapiens
cttcaatttgatgat

SEQ ID NO: 621796 - DNA, 15 bp, Homo sapiens
ttcaatttgatgatg

SEQ ID NO: 621797 - DNA, 15 bp, Homo sapiens
tcaatttgatgatgt

SEQ ID NO: 621798 - DNA, 15 bp, Homo sapiens
tgatgtaggcactat

SEQ ID NO: 621799 - DNA, 15 bp, Homo sapiens
gatgtaggcactatc

SEQ ID NO: 621800 - DNA, 15 bp, Homo sapiens
atgtaggcactatcc

SEQ ID NO: 621801 - DNA, 15 bp, Homo sapiens
tgtaggcactatcct

SEQ ID NO: 621802 - DNA, 15 bp, Homo sapiens
gtaggcactatcctt

SEQ ID NO: 621803 - DNA, 15 bp, Homo sapiens
taggcactatccttc

SEQ ID NO: 621804 - DNA, 15 bp, Homo sapiens
aggcactatccttcc

SEQ ID NO: 621805 - DNA, 15 bp, Homo sapiens
ggcactatccttcca

SEQ ID NO: 621806 - DNA, 15 bp, Homo sapiens
gcactatccttccat

SEQ ID NO: 621807 - DNA, 15 bp, Homo sapiens
cactatccttccatg

SEQ ID NO: 621808 - DNA, 15 bp, Homo sapiens
actatccttccatgt

SEQ ID NO: 621809 - DNA, 15 bp, Homo sapiens
ctatccttccatgtc

SEQ ID NO: 621810 - DNA, 15 bp, Homo sapiens
tatccttccatgtct

SEQ ID NO: 621811 - DNA, 15 bp, Homo sapiens
atccttccatgtctt

SEQ ID NO: 621812 - DNA, 15 bp, Homo sapiens
tccttccatgtctta

SEQ ID NO: 621813 - DNA, 15 bp, Homo sapiens
ccttccatgtcttac

SEQ ID NO: 621814 - DNA, 15 bp, Homo sapiens
cttccatgtcttaca

SEQ ID NO: 621815 - DNA, 15 bp, Homo sapiens
ttccatgtcttacaa

SEQ ID NO: 621816 - DNA, 15 bp, Homo sapiens
tccatgtcttacaaa

SEQ ID NO: 621817 - DNA, 15 bp, Homo sapiens
ccatgtcttacaaat

SEQ ID NO: 621818 - DNA, 15 bp, Homo sapiens
catgtcttacaaatg

SEQ ID NO: 621819 - DNA, 15 bp, Homo sapiens
atgtcttacaaatga

SEQ ID NO: 621820 - DNA, 15 bp, Homo sapiens
tgtcttacaaatgaa

SEQ ID NO: 621821 - DNA, 15 bp, Homo sapiens
gtcttacaaatgaac

SEQ ID NO: 621822 - DNA, 15 bp, Homo sapiens
tcttacaaatgaaca

SEQ ID NO: 621823 - DNA, 15 bp, Homo sapiens
cttacaaatgaacaa

SEQ ID NO: 621824 - DNA, 15 bp, Homo sapiens
ttacaaatgaacaaa

SEQ ID NO: 621825 - DNA, 15 bp, Homo sapiens
tacaaatgaacaaat

SEQ ID NO: 621826 - DNA, 15 bp, Homo sapiens
acaaatgaacaaatt

SEQ ID NO: 621827 - DNA, 15 bp, Homo sapiens
caaatgaacaaatta

SEQ ID NO: 621828 - DNA, 15 bp, Homo sapiens
aaatgaacaaattat

SEQ ID NO: 621829 - DNA, 15 bp, Homo sapiens
aatgaacaaattatg

SEQ ID NO: 621830 - DNA, 15 bp, Homo sapiens
atgaacaaattatgg

SEQ ID NO: 621831 - DNA, 15 bp, Homo sapiens
tgaacaaattatggc

SEQ ID NO: 621832 - DNA, 15 bp, Homo sapiens
gaacaaattatggct

SEQ ID NO: 621833 - DNA, 15 bp, Homo sapiens
aacaaattatggctc

SEQ ID NO: 621834 - DNA, 15 bp, Homo sapiens
acaaattatggctca

SEQ ID NO: 621835 - DNA, 15 bp, Homo sapiens
tggctcagagaggtt

SEQ ID NO: 621836 - DNA, 15 bp, Homo sapiens
ggctcagagaggtta

SEQ ID NO: 621837 - DNA, 15 bp, Homo sapiens
gctcagagaggttaa

SEQ ID NO: 621838 - DNA, 15 bp, Homo sapiens
ctcagagaggttaag

SEQ ID NO: 621839 - DNA, 15 bp, Homo sapiens
tcagagaggttaagt

SEQ ID NO: 621840 - DNA, 15 bp, Homo sapiens
cagagaggttaagtg

SEQ ID NO: 621841 - DNA, 15 bp, Homo sapiens
agagaggttaagtgg

SEQ ID NO: 621842 - DNA, 15 bp, Homo sapiens
gagaggttaagtggc

SEQ ID NO: 621843 - DNA, 15 bp, Homo sapiens
agaggttaagtggca

SEQ ID NO: 621844 - DNA, 15 bp, Homo sapiens
gaggttaagtggcat

SEQ ID NO: 621845 - DNA, 15 bp, Homo sapiens
aggttaagtggcatg

SEQ ID NO: 621846 - DNA, 15 bp, Homo sapiens
ggttaagtggcatgg

SEQ ID NO: 621847 - DNA, 15 bp, Homo sapiens
gttaagtggcatggg

SEQ ID NO: 621848 - DNA, 15 bp, Homo sapiens
ttaagtggcatgggg

SEQ ID NO: 621849 - DNA, 15 bp, Homo sapiens
taagtggcatggggt

SEQ ID NO: 621850 - DNA, 15 bp, Homo sapiens
aagtggcatggggtg

SEQ ID NO: 621851 - DNA, 15 bp, Homo sapiens
agtggcatggggtgg

SEQ ID NO: 621852 - DNA, 15 bp, Homo sapiens
gtggcatggggtggg

SEQ ID NO: 621853 - DNA, 15 bp, Homo sapiens
tggcatggggtgggg

SEQ ID NO: 621854 - DNA, 15 bp, Homo sapiens
ggcatggggtggggg

SEQ ID NO: 621855 - DNA, 15 bp, Homo sapiens
gcatggggtgggggg

SEQ ID NO: 621856 - DNA, 15 bp, Homo sapiens
catggggtgggggga

SEQ ID NO: 621857 - DNA, 15 bp, Homo sapiens
atggggtggggggag

SEQ ID NO: 621858 - DNA, 15 bp, Homo sapiens
tggggtggggggagg

SEQ ID NO: 621859 - DNA, 15 bp, Homo sapiens
ggggtggggggaggt

SEQ ID NO: 621860 - DNA, 15 bp, Homo sapiens
gggtggggggaggta

SEQ ID NO: 621861 - DNA, 15 bp, Homo sapiens
ggtggggggaggtag

SEQ ID NO: 621862 - DNA, 15 bp, Homo sapiens
gtggggggaggtaga

SEQ ID NO: 621863 - DNA, 15 bp, Homo sapiens
tggggggaggtagag

SEQ ID NO: 621864 - DNA, 15 bp, Homo sapiens
ggggggaggtagagc

SEQ ID NO: 621865 - DNA, 15 bp, Homo sapiens
gggggaggtagagcc

SEQ ID NO: 621866 - DNA, 15 bp, Homo sapiens
ggggaggtagagcct

SEQ ID NO: 621867 - DNA, 15 bp, Homo sapiens
gggaggtagagccta

SEQ ID NO: 621868 - DNA, 15 bp, Homo sapiens
ggaggtagagcctag

SEQ ID NO: 621869 - DNA, 15 bp, Homo sapiens
gaggtagagcctagg

SEQ ID NO: 621870 - DNA, 15 bp, Homo sapiens
aggtagagcctagga

SEQ ID NO: 621871 - DNA, 15 bp, Homo sapiens
ggtagagcctaggag

SEQ ID NO: 621872 - DNA, 15 bp, Homo sapiens
gtagagcctaggagg

SEQ ID NO: 621873 - DNA, 15 bp, Homo sapiens
tagagcctaggagga

SEQ ID NO: 621874 - DNA, 15 bp, Homo sapiens
agagcctaggaggac

SEQ ID NO: 621875 - DNA, 15 bp, Homo sapiens
gagcctaggaggacg

SEQ ID NO: 621876 - DNA, 15 bp, Homo sapiens
agcctaggaggacgt

SEQ ID NO: 621877 - DNA, 15 bp, Homo sapiens
gcctaggaggacgtg

SEQ ID NO: 621878 - DNA, 15 bp, Homo sapiens
cctaggaggacgtgt

SEQ ID NO: 621879 - DNA, 15 bp, Homo sapiens
ctaggaggacgtgtg

SEQ ID NO: 621880 - DNA, 15 bp, Homo sapiens
taggaggacgtgtgc

SEQ ID NO: 621881 - DNA, 15 bp, Homo sapiens
aggaggacgtgtgca

SEQ ID NO: 621882 - DNA, 15 bp, Homo sapiens
ggaggacgtgtgcaa

SEQ ID NO: 621883 - DNA, 15 bp, Homo sapiens
gaggacgtgtgcaag

SEQ ID NO: 621884 - DNA, 15 bp, Homo sapiens
aggacgtgtgcaagg

SEQ ID NO: 621885 - DNA, 15 bp, Homo sapiens
ggacgtgtgcaaggt

SEQ ID NO: 621886 - DNA, 15 bp, Homo sapiens
gacgtgtgcaaggtc

SEQ ID NO: 621887 - DNA, 15 bp, Homo sapiens
acgtgtgcaaggtcc

SEQ ID NO: 621888 - DNA, 15 bp, Homo sapiens
cgtgtgcaaggtcct

SEQ ID NO: 621889 - DNA, 15 bp, Homo sapiens
gtgtgcaaggtcctc

SEQ ID NO: 621890 - DNA, 15 bp, Homo sapiens
tgtgcaaggtcctca

SEQ ID NO: 621891 - DNA, 15 bp, Homo sapiens
gtgcaaggtcctcat

SEQ ID NO: 621892 - DNA, 15 bp, Homo sapiens
tgcaaggtcctcatc

SEQ ID NO: 621893 - DNA, 15 bp, Homo sapiens
gcaaggtcctcatcc

SEQ ID NO: 621894 - DNA, 15 bp, Homo sapiens
caaggtcctcatcca

SEQ ID NO: 621895 - DNA, 15 bp, Homo sapiens
aaggtcctcatccat

SEQ ID NO: 621896 - DNA, 15 bp, Homo sapiens
aggtcctcatccatc

SEQ ID NO: 621897 - DNA, 15 bp, Homo sapiens
ggtcctcatccatcc

SEQ ID NO: 621898 - DNA, 15 bp, Homo sapiens
gtcctcatccatccc

SEQ ID NO: 621899 - DNA, 15 bp, Homo sapiens
tcctcatccatcccc

SEQ ID NO: 621900 - DNA, 15 bp, Homo sapiens
cctcatccatccccc

SEQ ID NO: 621901 - DNA, 15 bp, Homo sapiens
ctcatccatccccct

SEQ ID NO: 621902 - DNA, 15 bp, Homo sapiens
tcatccatccccctg

SEQ ID NO: 621903 - DNA, 15 bp, Homo sapiens
catccatccccctgc

SEQ ID NO: 621904 - DNA, 15 bp, Homo sapiens
atccatccccctgcc

SEQ ID NO: 621905 - DNA, 15 bp, Homo sapiens
tccatccccctgcca

SEQ ID NO: 621906 - DNA, 15 bp, Homo sapiens
ccatccccctgccaa

SEQ ID NO: 621907 - DNA, 15 bp, Homo sapiens
catccccctgccaac

SEQ ID NO: 621908 - DNA, 15 bp, Homo sapiens
atccccctgccaaca

SEQ ID NO: 621909 - DNA, 15 bp, Homo sapiens
tccccctgccaacac

SEQ ID NO: 621910 - DNA, 15 bp, Homo sapiens
ccccctgccaacacc

SEQ ID NO: 621911 - DNA, 15 bp, Homo sapiens
cccctgccaacaccc

SEQ ID NO: 621912 - DNA, 15 bp, Homo sapiens
ccctgccaacaccca

SEQ ID NO: 621913 - DNA, 15 bp, Homo sapiens
cctgccaacacccat

SEQ ID NO: 621914 - DNA, 15 bp, Homo sapiens
ctgccaacacccatt

SEQ ID NO: 621915 - DNA, 15 bp, Homo sapiens
tgccaacacccatta

SEQ ID NO: 621916 - DNA, 15 bp, Homo sapiens
gccaacacccattag

SEQ ID NO: 621917 - DNA, 15 bp, Homo sapiens
ccaacacccattagg

SEQ ID NO: 621918 - DNA, 15 bp, Homo sapiens
caacacccattagga

SEQ ID NO: 621919 - DNA, 15 bp, Homo sapiens
aacacccattaggaa

SEQ ID NO: 621920 - DNA, 15 bp, Homo sapiens
acacccattaggaat

SEQ ID NO: 621921 - DNA, 15 bp, Homo sapiens
cacccattaggaatt

SEQ ID NO: 621922 - DNA, 15 bp, Homo sapiens
acccattaggaattc

SEQ ID NO: 621923 - DNA, 15 bp, Homo sapiens
cccattaggaattcg

SEQ ID NO: 621924 - DNA, 15 bp, Homo sapiens
ccattaggaattcgg

SEQ ID NO: 621925 - DNA, 15 bp, Homo sapiens
cattaggaattcgga

SEQ ID NO: 621926 - DNA, 15 bp, Homo sapiens
attaggaattcggag

SEQ ID NO: 621927 - DNA, 15 bp, Homo sapiens
ttaggaattcggaga

SEQ ID NO: 621928 - DNA, 15 bp, Homo sapiens
taggaattcggagaa

SEQ ID NO: 621929 - DNA, 15 bp, Homo sapiens
aggaattcggagaag

SEQ ID NO: 621930 - DNA, 15 bp, Homo sapiens
ggaattcggagaagc

SEQ ID NO: 621931 - DNA, 15 bp, Homo sapiens
gaattcggagaagct

SEQ ID NO: 621932 - DNA, 15 bp, Homo sapiens
aattcggagaagcta

SEQ ID NO: 621933 - DNA, 15 bp, Homo sapiens
attcggagaagctag

SEQ ID NO: 621934 - DNA, 15 bp, Homo sapiens
ttcggagaagctaga

SEQ ID NO: 621935 - DNA, 15 bp, Homo sapiens
tcggagaagctagaa

SEQ ID NO: 621936 - DNA, 15 bp, Homo sapiens
cggagaagctagaag

SEQ ID NO: 621937 - DNA, 15 bp, Homo sapiens
ggagaagctagaagg

SEQ ID NO: 621938 - DNA, 15 bp, Homo sapiens
gagaagctagaaggt

SEQ ID NO: 621939 - DNA, 15 bp, Homo sapiens
agaagctagaaggtc

SEQ ID NO: 621940 - DNA, 15 bp, Homo sapiens
gaagctagaaggtcc

SEQ ID NO: 621941 - DNA, 15 bp, Homo sapiens
aagctagaaggtcct

SEQ ID NO: 621942 - DNA, 15 bp, Homo sapiens
agctagaaggtcctg

SEQ ID NO: 621943 - DNA, 15 bp, Homo sapiens
gctagaaggtcctgg

SEQ ID NO: 621944 - DNA, 15 bp, Homo sapiens
ctagaaggtcctggc

SEQ ID NO: 621945 - DNA, 15 bp, Homo sapiens
tagaaggtcctggct

SEQ ID NO: 621946 - DNA, 15 bp, Homo sapiens
agaaggtcctggcta

SEQ ID NO: 621947 - DNA, 15 bp, Homo sapiens
gaaggtcctggctac

SEQ ID NO: 621948 - DNA, 15 bp, Homo sapiens
aaggtcctggctact

SEQ ID NO: 621949 - DNA, 15 bp, Homo sapiens
aggtcctggctactc

SEQ ID NO: 621950 - DNA, 15 bp, Homo sapiens
ggtcctggctactcc

SEQ ID NO: 621951 - DNA, 15 bp, Homo sapiens
gtcctggctactccc

SEQ ID NO: 621952 - DNA, 15 bp, Homo sapiens
tcctggctactccca

SEQ ID NO: 621953 - DNA, 15 bp, Homo sapiens
cctggctactcccac

SEQ ID NO: 621954 - DNA, 15 bp, Homo sapiens
ctggctactcccacc

SEQ ID NO: 621955 - DNA, 15 bp, Homo sapiens
tggctactcccacct

SEQ ID NO: 621956 - DNA, 15 bp, Homo sapiens
ggctactcccacctc

SEQ ID NO: 621957 - DNA, 15 bp, Homo sapiens
gctactcccacctcc

SEQ ID NO: 621958 - DNA, 15 bp, Homo sapiens
ctactcccacctcca

SEQ ID NO: 621959 - DNA, 15 bp, Homo sapiens
tactcccacctccat

SEQ ID NO: 621960 - DNA, 15 bp, Homo sapiens
actcccacctccatc

SEQ ID NO: 621961 - DNA, 15 bp, Homo sapiens
ctcccacctccatcc

SEQ ID NO: 621962 - DNA, 15 bp, Homo sapiens
tcccacctccatccc

SEQ ID NO: 621963 - DNA, 15 bp, Homo sapiens
cccacctccatcccg

SEQ ID NO: 621964 - DNA, 15 bp, Homo sapiens
ccacctccatcccgg

SEQ ID NO: 621965 - DNA, 15 bp, Homo sapiens
cacctccatcccggg

SEQ ID NO: 621966 - DNA, 15 bp, Homo sapiens
acctccatcccgggc

SEQ ID NO: 621967 - DNA, 15 bp, Homo sapiens
cctccatcccgggct

SEQ ID NO: 621968 - DNA, 15 bp, Homo sapiens
ctccatcccgggctt

SEQ ID NO: 621969 - DNA, 15 bp, Homo sapiens
tccatcccgggctta

SEQ ID NO: 621970 - DNA, 15 bp, Homo sapiens
ccatcccgggcttag

SEQ ID NO: 621971 - DNA, 15 bp, Homo sapiens
catcccgggcttagg

SEQ ID NO: 621972 - DNA, 15 bp, Homo sapiens
atcccgggcttagga

SEQ ID NO: 621973 - DNA, 15 bp, Homo sapiens
tcccgggcttaggaa

SEQ ID NO: 621974 - DNA, 15 bp, Homo sapiens
cccgggcttaggaac

SEQ ID NO: 621975 - DNA, 15 bp, Homo sapiens
ccgggcttaggaaca

SEQ ID NO: 621976 - DNA, 15 bp, Homo sapiens
cgggcttaggaacag

SEQ ID NO: 621977 - DNA, 15 bp, Homo sapiens
gggcttaggaacagc

SEQ ID NO: 621978 - DNA, 15 bp, Homo sapiens
ggcttaggaacagct

SEQ ID NO: 621979 - DNA, 15 bp, Homo sapiens
gcttaggaacagctg

SEQ ID NO: 621980 - DNA, 15 bp, Homo sapiens
cttaggaacagctgg

SEQ ID NO: 621981 - DNA, 15 bp, Homo sapiens
ttaggaacagctgga

SEQ ID NO: 621982 - DNA, 15 bp, Homo sapiens
taggaacagctggat

SEQ ID NO: 621983 - DNA, 15 bp, Homo sapiens
aggaacagctggata

SEQ ID NO: 621984 - DNA, 15 bp, Homo sapiens
ggaacagctggatag

SEQ ID NO: 621985 - DNA, 15 bp, Homo sapiens
gaacagctggataga

SEQ ID NO: 621986 - DNA, 15 bp, Homo sapiens
aacagctggatagag

SEQ ID NO: 621987 - DNA, 15 bp, Homo sapiens
acagctggatagagc

SEQ ID NO: 621988 - DNA, 15 bp, Homo sapiens
cagctggatagagca

SEQ ID NO: 621989 - DNA, 15 bp, Homo sapiens
agctggatagagcag

SEQ ID NO: 621990 - DNA, 15 bp, Homo sapiens
gctggatagagcagc

SEQ ID NO: 621991 - DNA, 15 bp, Homo sapiens
ctggatagagcagct

SEQ ID NO: 621992 - DNA, 15 bp, Homo sapiens
tggatagagcagctg

SEQ ID NO: 621993 - DNA, 15 bp, Homo sapiens
ggatagagcagctgg

SEQ ID NO: 621994 - DNA, 15 bp, Homo sapiens
gatagagcagctggg

SEQ ID NO: 621995 - DNA, 15 bp, Homo sapiens
atagagcagctgggg

SEQ ID NO: 621996 - DNA, 15 bp, Homo sapiens
tagagcagctgggga

SEQ ID NO: 621997 - DNA, 15 bp, Homo sapiens
agagcagctggggag

SEQ ID NO: 621998 - DNA, 15 bp, Homo sapiens
gagcagctggggaga

SEQ ID NO: 621999 - DNA, 15 bp, Homo sapiens
agcagctggggagag

SEQ ID NO: 622000 - DNA, 15 bp, Homo sapiens
gcagctggggagagg

SEQ ID NO: 622001 - DNA, 15 bp, Homo sapiens
cagctggggagaggg

SEQ ID NO: 622002 - DNA, 15 bp, Homo sapiens
agctggggagaggga

SEQ ID NO: 622003 - DNA, 15 bp, Homo sapiens
gctggggagagggat

SEQ ID NO: 622004 - DNA, 15 bp, Homo sapiens
ctggggagagggatc

SEQ ID NO: 622005 - DNA, 15 bp, Homo sapiens
tggggagagggatcc

SEQ ID NO: 622006 - DNA, 15 bp, Homo sapiens
ggggagagggatccc

SEQ ID NO: 622007 - DNA, 15 bp, Homo sapiens
gggagagggatcccg

SEQ ID NO: 622008 - DNA, 15 bp, Homo sapiens
ggagagggatcccga

SEQ ID NO: 622009 - DNA, 15 bp, Homo sapiens
gagagggatcccgag

SEQ ID NO: 622010 - DNA, 15 bp, Homo sapiens
agagggatcccgagt

SEQ ID NO: 622011 - DNA, 15 bp, Homo sapiens
gagggatcccgagtc

SEQ ID NO: 622012 - DNA, 15 bp, Homo sapiens
agggatcccgagtct

SEQ ID NO: 622013 - DNA, 15 bp, Homo sapiens
gggatcccgagtctg

SEQ ID NO: 622014 - DNA, 15 bp, Homo sapiens
ggatcccgagtctga

SEQ ID NO: 622015 - DNA, 15 bp, Homo sapiens
gatcccgagtctgag

SEQ ID NO: 622016 - DNA, 15 bp, Homo sapiens
atcccgagtctgaga

SEQ ID NO: 622017 - DNA, 15 bp, Homo sapiens
tcccgagtctgagat

SEQ ID NO: 622018 - DNA, 15 bp, Homo sapiens
cccgagtctgagata

SEQ ID NO: 622019 - DNA, 15 bp, Homo sapiens
ccgagtctgagatat

SEQ ID NO: 622020 - DNA, 15 bp, Homo sapiens
cgagtctgagatatg

SEQ ID NO: 622021 - DNA, 15 bp, Homo sapiens
gagtctgagatatgg

SEQ ID NO: 622022 - DNA, 15 bp, Homo sapiens
agtctgagatatggt

SEQ ID NO: 622023 - DNA, 15 bp, Homo sapiens
gtctgagatatggtc

SEQ ID NO: 622024 - DNA, 15 bp, Homo sapiens
tctgagatatggtca

SEQ ID NO: 622025 - DNA, 15 bp, Homo sapiens
ctgagatatggtcat

SEQ ID NO: 622026 - DNA, 15 bp, Homo sapiens
tgagatatggtcatt

SEQ ID NO: 622027 - DNA, 15 bp, Homo sapiens
gagatatggtcattt

SEQ ID NO: 622028 - DNA, 15 bp, Homo sapiens
agatatggtcatttg

SEQ ID NO: 622029 - DNA, 15 bp, Homo sapiens
gatatggtcatttga

SEQ ID NO: 622030 - DNA, 15 bp, Homo sapiens
atatggtcatttgag

SEQ ID NO: 622031 - DNA, 15 bp, Homo sapiens
tatggtcatttgagg

SEQ ID NO: 622032 - DNA, 15 bp, Homo sapiens
atggtcatttgaggg

SEQ ID NO: 622033 - DNA, 15 bp, Homo sapiens
tggtcatttgaggga

SEQ ID NO: 622034 - DNA, 15 bp, Homo sapiens
ggtcatttgagggaa

SEQ ID NO: 622035 - DNA, 15 bp, Homo sapiens
gtcatttgagggaat

SEQ ID NO: 622036 - DNA, 15 bp, Homo sapiens
tcatttgagggaatg

SEQ ID NO: 622037 - DNA, 15 bp, Homo sapiens
catttgagggaatgc

SEQ ID NO: 622038 - DNA, 15 bp, Homo sapiens
atttgagggaatgcc

SEQ ID NO: 622039 - DNA, 15 bp, Homo sapiens
tttgagggaatgcct

SEQ ID NO: 622040 - DNA, 15 bp, Homo sapiens
ttgagggaatgcctt

SEQ ID NO: 622041 - DNA, 15 bp, Homo sapiens
tgagggaatgccttg

SEQ ID NO: 622042 - DNA, 15 bp, Homo sapiens
gagggaatgccttgg

SEQ ID NO: 622043 - DNA, 15 bp, Homo sapiens
agggaatgccttggg

SEQ ID NO: 622044 - DNA, 15 bp, Homo sapiens
gggaatgccttgggt

SEQ ID NO: 622045 - DNA, 15 bp, Homo sapiens
ggaatgccttgggtt

SEQ ID NO: 622046 - DNA, 15 bp, Homo sapiens
gaatgccttgggttc

SEQ ID NO: 622047 - DNA, 15 bp, Homo sapiens
aatgccttgggttca

SEQ ID NO: 622048 - DNA, 15 bp, Homo sapiens
atgccttgggttcaa

SEQ ID NO: 622049 - DNA, 15 bp, Homo sapiens
tgccttgggttcaag

SEQ ID NO: 622050 - DNA, 15 bp, Homo sapiens
gccttgggttcaaga

SEQ ID NO: 622051 - DNA, 15 bp, Homo sapiens
ccttgggttcaagag

SEQ ID NO: 622052 - DNA, 15 bp, Homo sapiens
cttgggttcaagagt

SEQ ID NO: 622053 - DNA, 15 bp, Homo sapiens
ttgggttcaagagtc

SEQ ID NO: 622054 - DNA, 15 bp, Homo sapiens
tgggttcaagagtca

SEQ ID NO: 622055 - DNA, 15 bp, Homo sapiens
gggttcaagagtcag

SEQ ID NO: 622056 - DNA, 15 bp, Homo sapiens
ggttcaagagtcaga

SEQ ID NO: 622057 - DNA, 15 bp, Homo sapiens
gttcaagagtcagag

SEQ ID NO: 622058 - DNA, 15 bp, Homo sapiens
ttcaagagtcagagt

SEQ ID NO: 622059 - DNA, 15 bp, Homo sapiens
tcaagagtcagagtt

SEQ ID NO: 622060 - DNA, 15 bp, Homo sapiens
caagagtcagagttt

SEQ ID NO: 622061 - DNA, 15 bp, Homo sapiens
aagagtcagagtttc

SEQ ID NO: 622062 - DNA, 15 bp, Homo sapiens
agagtcagagtttca

SEQ ID NO: 622063 - DNA, 15 bp, Homo sapiens
gagtcagagtttcag

SEQ ID NO: 622064 - DNA, 15 bp, Homo sapiens
agtcagagtttcaga

SEQ ID NO: 622065 - DNA, 15 bp, Homo sapiens
gtcagagtttcagaa

SEQ ID NO: 622066 - DNA, 15 bp, Homo sapiens
tcagagtttcagaag

SEQ ID NO: 622067 - DNA, 15 bp, Homo sapiens
cagagtttcagaaga

SEQ ID NO: 622068 - DNA, 15 bp, Homo sapiens
agagtttcagaagag

SEQ ID NO: 622069 - DNA, 15 bp, Homo sapiens
gagtttcagaagagg

SEQ ID NO: 622070 - DNA, 15 bp, Homo sapiens
agtttcagaagaggg

SEQ ID NO: 622071 - DNA, 15 bp, Homo sapiens
gtttcagaagaggga

SEQ ID NO: 622072 - DNA, 15 bp, Homo sapiens
tttcagaagagggag

SEQ ID NO: 622073 - DNA, 15 bp, Homo sapiens
ttcagaagagggagg

SEQ ID NO: 622074 - DNA, 15 bp, Homo sapiens
tcagaagagggaggg

SEQ ID NO: 622075 - DNA, 15 bp, Homo sapiens
cagaagagggagggg

SEQ ID NO: 622076 - DNA, 15 bp, Homo sapiens
agaagagggaggggg

SEQ ID NO: 622077 - DNA, 15 bp, Homo sapiens
gaagagggagggggc

SEQ ID NO: 622078 - DNA, 15 bp, Homo sapiens
aagagggagggggct

SEQ ID NO: 622079 - DNA, 15 bp, Homo sapiens
agagggagggggctg

SEQ ID NO: 622080 - DNA, 15 bp, Homo sapiens
gagggagggggctgg

SEQ ID NO: 622081 - DNA, 15 bp, Homo sapiens
agggagggggctggg

SEQ ID NO: 622082 - DNA, 15 bp, Homo sapiens
gggagggggctgggg

SEQ ID NO: 622083 - DNA, 15 bp, Homo sapiens
gagggggctggggaa

SEQ ID NO: 622084 - DNA, 15 bp, Homo sapiens
agggggctggggaaa

SEQ ID NO: 622085 - DNA, 15 bp, Homo sapiens
gggggctggggaaac

SEQ ID NO: 622086 - DNA, 15 bp, Homo sapiens
ggggctggggaaaca

SEQ ID NO: 622087 - DNA, 15 bp, Homo sapiens
gggctggggaaacaa

SEQ ID NO: 622088 - DNA, 15 bp, Homo sapiens
ggctggggaaacaaa

SEQ ID NO: 622089 - DNA, 15 bp, Homo sapiens
gctggggaaacaaaa

SEQ ID NO: 622090 - DNA, 15 bp, Homo sapiens
ctggggaaacaaaac

SEQ ID NO: 622091 - DNA, 15 bp, Homo sapiens
tggggaaacaaaact

SEQ ID NO: 622092 - DNA, 15 bp, Homo sapiens
ggggaaacaaaactg

SEQ ID NO: 622093 - DNA, 15 bp, Homo sapiens
gggaaacaaaactgg

SEQ ID NO: 622094 - DNA, 15 bp, Homo sapiens
ggaaacaaaactggg

SEQ ID NO: 622095 - DNA, 15 bp, Homo sapiens
gaaacaaaactgggg

SEQ ID NO: 622096 - DNA, 15 bp, Homo sapiens
aaacaaaactggggt

SEQ ID NO: 622097 - DNA, 15 bp, Homo sapiens
aacaaaactggggtg

SEQ ID NO: 622098 - DNA, 15 bp, Homo sapiens
acaaaactggggtgg

SEQ ID NO: 622099 - DNA, 15 bp, Homo sapiens
caaaactggggtggg

SEQ ID NO: 622100 - DNA, 15 bp, Homo sapiens
aaaactggggtgggc

SEQ ID NO: 622101 - DNA, 15 bp, Homo sapiens
aaactggggtgggct

SEQ ID NO: 622102 - DNA, 15 bp, Homo sapiens
aactggggtgggctg

SEQ ID NO: 622103 - DNA, 15 bp, Homo sapiens
actggggtgggctgg

SEQ ID NO: 622104 - DNA, 15 bp, Homo sapiens
ctggggtgggctggt

SEQ ID NO: 622105 - DNA, 15 bp, Homo sapiens
tggggtgggctggta

SEQ ID NO: 622106 - DNA, 15 bp, Homo sapiens
ggggtgggctggtaa

SEQ ID NO: 622107 - DNA, 15 bp, Homo sapiens
gggtgggctggtaag

SEQ ID NO: 622108 - DNA, 15 bp, Homo sapiens
ggtgggctggtaagg

SEQ ID NO: 622109 - DNA, 15 bp, Homo sapiens
gtgggctggtaagga

SEQ ID NO: 622110 - DNA, 15 bp, Homo sapiens
tgggctggtaaggat

SEQ ID NO: 622111 - DNA, 15 bp, Homo sapiens
gggctggtaaggatc

SEQ ID NO: 622112 - DNA, 15 bp, Homo sapiens
ggctggtaaggatct

SEQ ID NO: 622113 - DNA, 15 bp, Homo sapiens
gctggtaaggatctg

SEQ ID NO: 622114 - DNA, 15 bp, Homo sapiens
ctggtaaggatctgt

SEQ ID NO: 622115 - DNA, 15 bp, Homo sapiens
tggtaaggatctgtg

SEQ ID NO: 622116 - DNA, 15 bp, Homo sapiens
ggtaaggatctgtgc

SEQ ID NO: 622117 - DNA, 15 bp, Homo sapiens
gtaaggatctgtgcc

SEQ ID NO: 622118 - DNA, 15 bp, Homo sapiens
taaggatctgtgcca

SEQ ID NO: 622119 - DNA, 15 bp, Homo sapiens
aaggatctgtgccaa

SEQ ID NO: 622120 - DNA, 15 bp, Homo sapiens
aggatctgtgccaac

SEQ ID NO: 622121 - DNA, 15 bp, Homo sapiens
ggatctgtgccaacc

SEQ ID NO: 622122 - DNA, 15 bp, Homo sapiens
gatctgtgccaacct

SEQ ID NO: 622123 - DNA, 15 bp, Homo sapiens
atctgtgccaacctt

SEQ ID NO: 622124 - DNA, 15 bp, Homo sapiens
tctgtgccaaccttg

SEQ ID NO: 622125 - DNA, 15 bp, Homo sapiens
ctgtgccaaccttgc

SEQ ID NO: 622126 - DNA, 15 bp, Homo sapiens
tgtgccaaccttgcg

SEQ ID NO: 622127 - DNA, 15 bp, Homo sapiens
gtgccaaccttgcgg

SEQ ID NO: 622128 - DNA, 15 bp, Homo sapiens
tgccaaccttgcggg

SEQ ID NO: 622129 - DNA, 15 bp, Homo sapiens
gccaaccttgcgggt

SEQ ID NO: 622130 - DNA, 15 bp, Homo sapiens
ccaaccttgcgggtg

SEQ ID NO: 622131 - DNA, 15 bp, Homo sapiens
caaccttgcgggtgg

SEQ ID NO: 622132 - DNA, 15 bp, Homo sapiens
aaccttgcgggtggg

SEQ ID NO: 622133 - DNA, 15 bp, Homo sapiens
accttgcgggtgggg

SEQ ID NO: 622134 - DNA, 15 bp, Homo sapiens
ccttgcgggtggggg

SEQ ID NO: 622135 - DNA, 15 bp, Homo sapiens
cttgcgggtggggga

SEQ ID NO: 622136 - DNA, 15 bp, Homo sapiens
ttgcgggtgggggag

SEQ ID NO: 622137 - DNA, 15 bp, Homo sapiens
tgcgggtgggggaga

SEQ ID NO: 622138 - DNA, 15 bp, Homo sapiens
gcgggtgggggagaa

SEQ ID NO: 622139 - DNA, 15 bp, Homo sapiens
cgggtgggggagaag

SEQ ID NO: 622140 - DNA, 15 bp, Homo sapiens
gggtgggggagaagg

SEQ ID NO: 622141 - DNA, 15 bp, Homo sapiens
ggtgggggagaaggg

SEQ ID NO: 622142 - DNA, 15 bp, Homo sapiens
gtgggggagaaggga

SEQ ID NO: 622143 - DNA, 15 bp, Homo sapiens
tgggggagaagggag

SEQ ID NO: 622144 - DNA, 15 bp, Homo sapiens
gggggagaagggagg

SEQ ID NO: 622145 - DNA, 15 bp, Homo sapiens
ggggagaagggaggg

SEQ ID NO: 622146 - DNA, 15 bp, Homo sapiens
gggagaagggagggg

SEQ ID NO: 622147 - DNA, 15 bp, Homo sapiens
ggagaagggaggggg

SEQ ID NO: 622148 - DNA, 15 bp, Homo sapiens
gagaagggagggggc

SEQ ID NO: 622149 - DNA, 15 bp, Homo sapiens
agaagggagggggca

SEQ ID NO: 622150 - DNA, 15 bp, Homo sapiens
gaagggagggggcag

SEQ ID NO: 622151 - DNA, 15 bp, Homo sapiens
aagggagggggcagg

SEQ ID NO: 622152 - DNA, 15 bp, Homo sapiens
agggagggggcaggt

SEQ ID NO: 622153 - DNA, 15 bp, Homo sapiens
gggagggggcaggtg

SEQ ID NO: 622154 - DNA, 15 bp, Homo sapiens
ggagggggcaggtgc

SEQ ID NO: 622155 - DNA, 15 bp, Homo sapiens
gagggggcaggtgcc

SEQ ID NO: 622156 - DNA, 15 bp, Homo sapiens
agggggcaggtgcct

SEQ ID NO: 622157 - DNA, 15 bp, Homo sapiens
gggggcaggtgccta

SEQ ID NO: 622158 - DNA, 15 bp, Homo sapiens
ggggcaggtgcctag

SEQ ID NO: 622159 - DNA, 15 bp, Homo sapiens
gggcaggtgcctagc

SEQ ID NO: 622160 - DNA, 15 bp, Homo sapiens
ggcaggtgcctagca

SEQ ID NO: 622161 - DNA, 15 bp, Homo sapiens
gcaggtgcctagcag

SEQ ID NO: 622162 - DNA, 15 bp, Homo sapiens
caggtgcctagcaga

SEQ ID NO: 622163 - DNA, 15 bp, Homo sapiens
aggtgcctagcagat

SEQ ID NO: 622164 - DNA, 15 bp, Homo sapiens
ggtgcctagcagatt

SEQ ID NO: 622165 - DNA, 15 bp, Homo sapiens
gtgcctagcagattc

SEQ ID NO: 622166 - DNA, 15 bp, Homo sapiens
tgcctagcagattcc

SEQ ID NO: 622167 - DNA, 15 bp, Homo sapiens
gcctagcagattccc

SEQ ID NO: 622168 - DNA, 15 bp, Homo sapiens
cctagcagattccct

SEQ ID NO: 622169 - DNA, 15 bp, Homo sapiens
ctagcagattccctt

SEQ ID NO: 622170 - DNA, 15 bp, Homo sapiens
tagcagattcccttc

SEQ ID NO: 622171 - DNA, 15 bp, Homo sapiens
agcagattcccttcc

SEQ ID NO: 622172 - DNA, 15 bp, Homo sapiens
gcagattcccttccc

SEQ ID NO: 622173 - DNA, 15 bp, Homo sapiens
cagattcccttcccc

SEQ ID NO: 622174 - DNA, 15 bp, Homo sapiens
agattcccttccccc

SEQ ID NO: 622175 - DNA, 15 bp, Homo sapiens
gattcccttccccct

SEQ ID NO: 622176 - DNA, 15 bp, Homo sapiens
attcccttccccctt

SEQ ID NO: 622177 - DNA, 15 bp, Homo sapiens
ttcccttcccccttt

SEQ ID NO: 622178 - DNA, 15 bp, Homo sapiens
tcccttccccctttc

SEQ ID NO: 622179 - DNA, 15 bp, Homo sapiens
cccttccccctttcc

SEQ ID NO: 622180 - DNA, 15 bp, Homo sapiens
ccttccccctttccc

SEQ ID NO: 622181 - DNA, 15 bp, Homo sapiens
cttccccctttccct

SEQ ID NO: 622182 - DNA, 15 bp, Homo sapiens
ttccccctttccctc

SEQ ID NO: 622183 - DNA, 15 bp, Homo sapiens
tccccctttccctca

SEQ ID NO: 622184 - DNA, 15 bp, Homo sapiens
ccccctttccctcaa

SEQ ID NO: 622185 - DNA, 15 bp, Homo sapiens
cccctttccctcaac

SEQ ID NO: 622186 - DNA, 15 bp, Homo sapiens
ccctttccctcaacc

SEQ ID NO: 622187 - DNA, 15 bp, Homo sapiens
cctttccctcaacct

SEQ ID NO: 622188 - DNA, 15 bp, Homo sapiens
ctttccctcaacctg

SEQ ID NO: 622189 - DNA, 15 bp, Homo sapiens
tttccctcaacctgg

SEQ ID NO: 622190 - DNA, 15 bp, Homo sapiens
ttccctcaacctggg

SEQ ID NO: 622191 - DNA, 15 bp, Homo sapiens
tccctcaacctgggc

SEQ ID NO: 622192 - DNA, 15 bp, Homo sapiens
ccctcaacctgggct

SEQ ID NO: 622193 - DNA, 15 bp, Homo sapiens
cctcaacctgggctc

SEQ ID NO: 622194 - DNA, 15 bp, Homo sapiens
ctcaacctgggctcc

SEQ ID NO: 622195 - DNA, 15 bp, Homo sapiens
tcaacctgggctccc

SEQ ID NO: 622196 - DNA, 15 bp, Homo sapiens
caacctgggctcccc

SEQ ID NO: 622197 - DNA, 15 bp, Homo sapiens
aacctgggctccccg

SEQ ID NO: 622198 - DNA, 15 bp, Homo sapiens
acctgggctccccgc

SEQ ID NO: 622199 - DNA, 15 bp, Homo sapiens
cctgggctccccgcc

SEQ ID NO: 622200 - DNA, 15 bp, Homo sapiens
ctgggctccccgcca

SEQ ID NO: 622201 - DNA, 15 bp, Homo sapiens
tgggctccccgccag

SEQ ID NO: 622202 - DNA, 15 bp, Homo sapiens
gggctccccgccagc

SEQ ID NO: 622203 - DNA, 15 bp, Homo sapiens
ggctccccgccagct

SEQ ID NO: 622204 - DNA, 15 bp, Homo sapiens
gctccccgccagctg

SEQ ID NO: 622205 - DNA, 15 bp, Homo sapiens
ctccccgccagctgc

SEQ ID NO: 622206 - DNA, 15 bp, Homo sapiens
tccccgccagctgcc

SEQ ID NO: 622207 - DNA, 15 bp, Homo sapiens
ccccgccagctgccc

SEQ ID NO: 622208 - DNA, 15 bp, Homo sapiens
cccgccagctgcccc

SEQ ID NO: 622209 - DNA, 15 bp, Homo sapiens
ccgccagctgcccca

SEQ ID NO: 622210 - DNA, 15 bp, Homo sapiens
cgccagctgccccag

SEQ ID NO: 622211 - DNA, 15 bp, Homo sapiens
gccagctgccccaga

SEQ ID NO: 622212 - DNA, 15 bp, Homo sapiens
ccagctgccccagag

SEQ ID NO: 622213 - DNA, 15 bp, Homo sapiens
cagctgccccagaga

SEQ ID NO: 622214 - DNA, 15 bp, Homo sapiens
agctgccccagagaa

SEQ ID NO: 622215 - DNA, 15 bp, Homo sapiens
gctgccccagagaac

SEQ ID NO: 622216 - DNA, 15 bp, Homo sapiens
ctgccccagagaacc

SEQ ID NO: 622217 - DNA, 15 bp, Homo sapiens
tgccccagagaaccc

SEQ ID NO: 622218 - DNA, 15 bp, Homo sapiens
gccccagagaacccc

SEQ ID NO: 622219 - DNA, 15 bp, Homo sapiens
ccccagagaaccccc

SEQ ID NO: 622220 - DNA, 15 bp, Homo sapiens
cccagagaaccccca

SEQ ID NO: 622221 - DNA, 15 bp, Homo sapiens
ccagagaacccccaa

SEQ ID NO: 622222 - DNA, 15 bp, Homo sapiens
cagagaacccccaat

SEQ ID NO: 622223 - DNA, 15 bp, Homo sapiens
agagaacccccaatc

SEQ ID NO: 622224 - DNA, 15 bp, Homo sapiens
gagaacccccaatcc

SEQ ID NO: 622225 - DNA, 15 bp, Homo sapiens
agaacccccaatcct

SEQ ID NO: 622226 - DNA, 15 bp, Homo sapiens
gaacccccaatcctg

SEQ ID NO: 622227 - DNA, 15 bp, Homo sapiens
aacccccaatcctgg

SEQ ID NO: 622228 - DNA, 15 bp, Homo sapiens
acccccaatcctggc

SEQ ID NO: 622229 - DNA, 15 bp, Homo sapiens
cccccaatcctggct

SEQ ID NO: 622230 - DNA, 15 bp, Homo sapiens
ccccaatcctggctc

SEQ ID NO: 622231 - DNA, 15 bp, Homo sapiens
cccaatcctggctct

SEQ ID NO: 622232 - DNA, 15 bp, Homo sapiens
ccaatcctggctcta

SEQ ID NO: 622233 - DNA, 15 bp, Homo sapiens
caatcctggctctat

SEQ ID NO: 622234 - DNA, 15 bp, Homo sapiens
aatcctggctctatt

SEQ ID NO: 622235 - DNA, 15 bp, Homo sapiens
atcctggctctattc

SEQ ID NO: 622236 - DNA, 15 bp, Homo sapiens
tcctggctctattcc

SEQ ID NO: 622237 - DNA, 15 bp, Homo sapiens
cctggctctattcca

SEQ ID NO: 622238 - DNA, 15 bp, Homo sapiens
ctggctctattccag

SEQ ID NO: 622239 - DNA, 15 bp, Homo sapiens
tggctctattccagc

SEQ ID NO: 622240 - DNA, 15 bp, Homo sapiens
ggctctattccagcc

SEQ ID NO: 622241 - DNA, 15 bp, Homo sapiens
gctctattccagcca

SEQ ID NO: 622242 - DNA, 15 bp, Homo sapiens
ctctattccagccaa

SEQ ID NO: 622243 - DNA, 15 bp, Homo sapiens
tctattccagccaat

SEQ ID NO: 622244 - DNA, 15 bp, Homo sapiens
ctattccagccaatt

SEQ ID NO: 622245 - DNA, 15 bp, Homo sapiens
tattccagccaattc

SEQ ID NO: 622246 - DNA, 15 bp, Homo sapiens
attccagccaattcc

SEQ ID NO: 622247 - DNA, 15 bp, Homo sapiens
ttccagccaattccc

SEQ ID NO: 622248 - DNA, 15 bp, Homo sapiens
tccagccaattccct

SEQ ID NO: 622249 - DNA, 15 bp, Homo sapiens
ccagccaattccctg

SEQ ID NO: 622250 - DNA, 15 bp, Homo sapiens
cagccaattccctgg

SEQ ID NO: 622251 - DNA, 15 bp, Homo sapiens
agccaattccctggg

SEQ ID NO: 622252 - DNA, 15 bp, Homo sapiens
gccaattccctgggc

SEQ ID NO: 622253 - DNA, 15 bp, Homo sapiens
ccaattccctgggcc

SEQ ID NO: 622254 - DNA, 15 bp, Homo sapiens
caattccctgggccc

SEQ ID NO: 622255 - DNA, 15 bp, Homo sapiens
aattccctgggcccc

SEQ ID NO: 622256 - DNA, 15 bp, Homo sapiens
attccctgggcccct

SEQ ID NO: 622257 - DNA, 15 bp, Homo sapiens
ttccctgggcccctt

SEQ ID NO: 622258 - DNA, 15 bp, Homo sapiens
tccctgggccccttc

SEQ ID NO: 622259 - DNA, 15 bp, Homo sapiens
ccctgggccccttcc

SEQ ID NO: 622260 - DNA, 15 bp, Homo sapiens
cctgggccccttccc

SEQ ID NO: 622261 - DNA, 15 bp, Homo sapiens
ctgggccccttcccc

SEQ ID NO: 622262 - DNA, 15 bp, Homo sapiens
tgggccccttcccct

SEQ ID NO: 622263 - DNA, 15 bp, Homo sapiens
gggccccttcccctg

SEQ ID NO: 622264 - DNA, 15 bp, Homo sapiens
ggccccttcccctga

SEQ ID NO: 622265 - DNA, 15 bp, Homo sapiens
gccccttcccctgag

SEQ ID NO: 622266 - DNA, 15 bp, Homo sapiens
ccccttcccctgagg

SEQ ID NO: 622267 - DNA, 15 bp, Homo sapiens
cccttcccctgaggt

SEQ ID NO: 622268 - DNA, 15 bp, Homo sapiens
ccttcccctgaggtg

SEQ ID NO: 622269 - DNA, 15 bp, Homo sapiens
cttcccctgaggtgc

SEQ ID NO: 622270 - DNA, 15 bp, Homo sapiens
ttcccctgaggtgca

SEQ ID NO: 622271 - DNA, 15 bp, Homo sapiens
tcccctgaggtgcag

SEQ ID NO: 622272 - DNA, 15 bp, Homo sapiens
cccctgaggtgcagg

SEQ ID NO: 622273 - DNA, 15 bp, Homo sapiens
ccctgaggtgcaggg

SEQ ID NO: 622274 - DNA, 15 bp, Homo sapiens
cctgaggtgcaggga

SEQ ID NO: 622275 - DNA, 15 bp, Homo sapiens
ctgaggtgcagggac

SEQ ID NO: 622276 - DNA, 15 bp, Homo sapiens
tgaggtgcagggact

SEQ ID NO: 622277 - DNA, 15 bp, Homo sapiens
gaggtgcagggactt

SEQ ID NO: 622278 - DNA, 15 bp, Homo sapiens
aggtgcagggacttg

SEQ ID NO: 622279 - DNA, 15 bp, Homo sapiens
ggtgcagggacttga

SEQ ID NO: 622280 - DNA, 15 bp, Homo sapiens
gtgcagggacttgag

SEQ ID NO: 622281 - DNA, 15 bp, Homo sapiens
tgcagggacttgagg

SEQ ID NO: 622282 - DNA, 15 bp, Homo sapiens
gcagggacttgaggg

SEQ ID NO: 622283 - DNA, 15 bp, Homo sapiens
cagggacttgagggg

SEQ ID NO: 622284 - DNA, 15 bp, Homo sapiens
agggacttgagggga

SEQ ID NO: 622285 - DNA, 15 bp, Homo sapiens
gggacttgaggggag

SEQ ID NO: 622286 - DNA, 15 bp, Homo sapiens
ggacttgaggggagg

SEQ ID NO: 622287 - DNA, 15 bp, Homo sapiens
gacttgaggggaggg

SEQ ID NO: 622288 - DNA, 15 bp, Homo sapiens
acttgaggggagggg

SEQ ID NO: 622289 - DNA, 15 bp, Homo sapiens
cttgaggggaggggc

SEQ ID NO: 622290 - DNA, 15 bp, Homo sapiens
ttgaggggaggggcg

SEQ ID NO: 622291 - DNA, 15 bp, Homo sapiens
tgaggggaggggcgt

SEQ ID NO: 622292 - DNA, 15 bp, Homo sapiens
gaggggaggggcgtc

SEQ ID NO: 622293 - DNA, 15 bp, Homo sapiens
aggggaggggcgtcc

SEQ ID NO: 622294 - DNA, 15 bp, Homo sapiens
ggggaggggcgtcct

SEQ ID NO: 622295 - DNA, 15 bp, Homo sapiens
gggaggggcgtccta

SEQ ID NO: 622296 - DNA, 15 bp, Homo sapiens
ggaggggcgtcctaa

SEQ ID NO: 622297 - DNA, 15 bp, Homo sapiens
gaggggcgtcctaag

SEQ ID NO: 622298 - DNA, 15 bp, Homo sapiens
aggggcgtcctaaga

SEQ ID NO: 622299 - DNA, 15 bp, Homo sapiens
ggggcgtcctaagaa

SEQ ID NO: 622300 - DNA, 15 bp, Homo sapiens
gggcgtcctaagaaa

SEQ ID NO: 622301 - DNA, 15 bp, Homo sapiens
ggcgtcctaagaaac

SEQ ID NO: 622302 - DNA, 15 bp, Homo sapiens
gcgtcctaagaaact

SEQ ID NO: 622303 - DNA, 15 bp, Homo sapiens
cgtcctaagaaacta

SEQ ID NO: 622304 - DNA, 15 bp, Homo sapiens
gtcctaagaaactag

SEQ ID NO: 622305 - DNA, 15 bp, Homo sapiens
tcctaagaaactagg

SEQ ID NO: 622306 - DNA, 15 bp, Homo sapiens
cctaagaaactaggg

SEQ ID NO: 622307 - DNA, 15 bp, Homo sapiens
ctaagaaactagggc

SEQ ID NO: 622308 - DNA, 15 bp, Homo sapiens
taagaaactagggct

SEQ ID NO: 622309 - DNA, 15 bp, Homo sapiens
aagaaactagggctt

SEQ ID NO: 622310 - DNA, 15 bp, Homo sapiens
agaaactagggcttc

SEQ ID NO: 622311 - DNA, 15 bp, Homo sapiens
gaaactagggcttct

SEQ ID NO: 622312 - DNA, 15 bp, Homo sapiens
aaactagggcttctt

SEQ ID NO: 622313 - DNA, 15 bp, Homo sapiens
aactagggcttcttc

SEQ ID NO: 622314 - DNA, 15 bp, Homo sapiens
actagggcttcttcc

SEQ ID NO: 622315 - DNA, 15 bp, Homo sapiens
ctagggcttcttcct

SEQ ID NO: 622316 - DNA, 15 bp, Homo sapiens
tagggcttcttccta

SEQ ID NO: 622317 - DNA, 15 bp, Homo sapiens
agggcttcttcctac

SEQ ID NO: 622318 - DNA, 15 bp, Homo sapiens
gggcttcttcctact

SEQ ID NO: 622319 - DNA, 15 bp, Homo sapiens
ggcttcttcctacta

SEQ ID NO: 622320 - DNA, 15 bp, Homo sapiens
gcttcttcctactaa

SEQ ID NO: 622321 - DNA, 15 bp, Homo sapiens
cttcttcctactaag

SEQ ID NO: 622322 - DNA, 15 bp, Homo sapiens
ttcttcctactaaga

SEQ ID NO: 622323 - DNA, 15 bp, Homo sapiens
tcttcctactaagaa

SEQ ID NO: 622324 - DNA, 15 bp, Homo sapiens
cttcctactaagaaa

SEQ ID NO: 622325 - DNA, 15 bp, Homo sapiens
ttcctactaagaaaa

SEQ ID NO: 622326 - DNA, 15 bp, Homo sapiens
tcctactaagaaaag

SEQ ID NO: 622327 - DNA, 15 bp, Homo sapiens
cctactaagaaaagc

SEQ ID NO: 622328 - DNA, 15 bp, Homo sapiens
ctactaagaaaagcc

SEQ ID NO: 622329 - DNA, 15 bp, Homo sapiens
tactaagaaaagcct

SEQ ID NO: 622330 - DNA, 15 bp, Homo sapiens
actaagaaaagcctg

SEQ ID NO: 622331 - DNA, 15 bp, Homo sapiens
ctaagaaaagcctga

SEQ ID NO: 622332 - DNA, 15 bp, Homo sapiens
taagaaaagcctgat

SEQ ID NO: 622333 - DNA, 15 bp, Homo sapiens
aagaaaagcctgatc

SEQ ID NO: 622334 - DNA, 15 bp, Homo sapiens
agaaaagcctgatct

SEQ ID NO: 622335 - DNA, 15 bp, Homo sapiens
gaaaagcctgatctc

SEQ ID NO: 622336 - DNA, 15 bp, Homo sapiens
aaaagcctgatctcc

SEQ ID NO: 622337 - DNA, 15 bp, Homo sapiens
aaagcctgatctcct

SEQ ID NO: 622338 - DNA, 15 bp, Homo sapiens
aagcctgatctcctc

SEQ ID NO: 622339 - DNA, 15 bp, Homo sapiens
agcctgatctcctcc

SEQ ID NO: 622340 - DNA, 15 bp, Homo sapiens
gcctgatctcctccc

SEQ ID NO: 622341 - DNA, 15 bp, Homo sapiens
cctgatctcctcccc

SEQ ID NO: 622342 - DNA, 15 bp, Homo sapiens
ctgatctcctccccg

SEQ ID NO: 622343 - DNA, 15 bp, Homo sapiens
tgatctcctccccga

SEQ ID NO: 622344 - DNA, 15 bp, Homo sapiens
gatctcctccccgag

SEQ ID NO: 622345 - DNA, 15 bp, Homo sapiens
atctcctccccgaga

SEQ ID NO: 622346 - DNA, 15 bp, Homo sapiens
tctcctccccgagag

SEQ ID NO: 622347 - DNA, 15 bp, Homo sapiens
ctcctccccgagaga

SEQ ID NO: 622348 - DNA, 15 bp, Homo sapiens
tcctccccgagagag

SEQ ID NO: 622349 - DNA, 15 bp, Homo sapiens
cctccccgagagagc

SEQ ID NO: 622350 - DNA, 15 bp, Homo sapiens
ctccccgagagagct

SEQ ID NO: 622351 - DNA, 15 bp, Homo sapiens
tccccgagagagctg

SEQ ID NO: 622352 - DNA, 15 bp, Homo sapiens
ccccgagagagctgg

SEQ ID NO: 622353 - DNA, 15 bp, Homo sapiens
cccgagagagctggg

SEQ ID NO: 622354 - DNA, 15 bp, Homo sapiens
ccgagagagctgggg

SEQ ID NO: 622355 - DNA, 15 bp, Homo sapiens
cgagagagctggggg

SEQ ID NO: 622356 - DNA, 15 bp, Homo sapiens
gagagagctggggga

SEQ ID NO: 622357 - DNA, 15 bp, Homo sapiens
agagagctgggggag

SEQ ID NO: 622358 - DNA, 15 bp, Homo sapiens
gagagctgggggaga

SEQ ID NO: 622359 - DNA, 15 bp, Homo sapiens
agagctgggggagac

SEQ ID NO: 622360 - DNA, 15 bp, Homo sapiens
gagctgggggagact

SEQ ID NO: 622361 - DNA, 15 bp, Homo sapiens
agctgggggagactg

SEQ ID NO: 622362 - DNA, 15 bp, Homo sapiens
gctgggggagactga

SEQ ID NO: 622363 - DNA, 15 bp, Homo sapiens
ctgggggagactgag

SEQ ID NO: 622364 - DNA, 15 bp, Homo sapiens
tgggggagactgagg

SEQ ID NO: 622365 - DNA, 15 bp, Homo sapiens
gggggagactgaggc

SEQ ID NO: 622366 - DNA, 15 bp, Homo sapiens
ggggagactgaggca

SEQ ID NO: 622367 - DNA, 15 bp, Homo sapiens
gggagactgaggcag

SEQ ID NO: 622368 - DNA, 15 bp, Homo sapiens
ggagactgaggcaga

SEQ ID NO: 622369 - DNA, 15 bp, Homo sapiens
gagactgaggcagag

SEQ ID NO: 622370 - DNA, 15 bp, Homo sapiens
agactgaggcagagg

SEQ ID NO: 622371 - DNA, 15 bp, Homo sapiens
gactgaggcagaggg

SEQ ID NO: 622372 - DNA, 15 bp, Homo sapiens
actgaggcagagggt

SEQ ID NO: 622373 - DNA, 15 bp, Homo sapiens
ctgaggcagagggtg

SEQ ID NO: 622374 - DNA, 15 bp, Homo sapiens
tgaggcagagggtga

SEQ ID NO: 622375 - DNA, 15 bp, Homo sapiens
gaggcagagggtgaa

SEQ ID NO: 622376 - DNA, 15 bp, Homo sapiens
aggcagagggtgaac

SEQ ID NO: 622377 - DNA, 15 bp, Homo sapiens
ggcagagggtgaacc

SEQ ID NO: 622378 - DNA, 15 bp, Homo sapiens
gcagagggtgaaccc

SEQ ID NO: 622379 - DNA, 15 bp, Homo sapiens
cagagggtgaaccct

SEQ ID NO: 622380 - DNA, 15 bp, Homo sapiens
agagggtgaacccta

SEQ ID NO: 622381 - DNA, 15 bp, Homo sapiens
gagggtgaaccctac

SEQ ID NO: 622382 - DNA, 15 bp, Homo sapiens
agggtgaaccctacc

SEQ ID NO: 622383 - DNA, 15 bp, Homo sapiens
gggtgaaccctaccc

SEQ ID NO: 622384 - DNA, 15 bp, Homo sapiens
ggtgaaccctaccca

SEQ ID NO: 622385 - DNA, 15 bp, Homo sapiens
gtgaaccctacccat

SEQ ID NO: 622386 - DNA, 15 bp, Homo sapiens
tgaaccctacccatt

SEQ ID NO: 622387 - DNA, 15 bp, Homo sapiens
gaaccctacccattc

SEQ ID NO: 622388 - DNA, 15 bp, Homo sapiens
aaccctacccattcc

SEQ ID NO: 622389 - DNA, 15 bp, Homo sapiens
accctacccattcct

SEQ ID NO: 622390 - DNA, 15 bp, Homo sapiens
ccctacccattcctc

SEQ ID NO: 622391 - DNA, 15 bp, Homo sapiens
cctacccattcctcg

SEQ ID NO: 622392 - DNA, 15 bp, Homo sapiens
ctacccattcctcga

SEQ ID NO: 622393 - DNA, 15 bp, Homo sapiens
tacccattcctcgaa

SEQ ID NO: 622394 - DNA, 15 bp, Homo sapiens
acccattcctcgaag

SEQ ID NO: 622395 - DNA, 15 bp, Homo sapiens
cccattcctcgaagc

SEQ ID NO: 622396 - DNA, 15 bp, Homo sapiens
ccattcctcgaagcc

SEQ ID NO: 622397 - DNA, 15 bp, Homo sapiens
cattcctcgaagcct

SEQ ID NO: 622398 - DNA, 15 bp, Homo sapiens
attcctcgaagcctg

SEQ ID NO: 622399 - DNA, 15 bp, Homo sapiens
ttcctcgaagcctga

SEQ ID NO: 622400 - DNA, 15 bp, Homo sapiens
tcctcgaagcctgac

SEQ ID NO: 622401 - DNA, 15 bp, Homo sapiens
cctcgaagcctgaca

SEQ ID NO: 622402 - DNA, 15 bp, Homo sapiens
ctcgaagcctgacat

SEQ ID NO: 622403 - DNA, 15 bp, Homo sapiens
tcgaagcctgacatt

SEQ ID NO: 622404 - DNA, 15 bp, Homo sapiens
cgaagcctgacattc

SEQ ID NO: 622405 - DNA, 15 bp, Homo sapiens
gaagcctgacattcc

SEQ ID NO: 622406 - DNA, 15 bp, Homo sapiens
aagcctgacattcca

SEQ ID NO: 622407 - DNA, 15 bp, Homo sapiens
agcctgacattccat

SEQ ID NO: 622408 - DNA, 15 bp, Homo sapiens
gcctgacattccata

SEQ ID NO: 622409 - DNA, 15 bp, Homo sapiens
cctgacattccatat

SEQ ID NO: 622410 - DNA, 15 bp, Homo sapiens
ctgacattccatata

SEQ ID NO: 622411 - DNA, 15 bp, Homo sapiens
tgacattccatatag

SEQ ID NO: 622412 - DNA, 15 bp, Homo sapiens
gacattccatatagt

SEQ ID NO: 622413 - DNA, 15 bp, Homo sapiens
acattccatatagta

SEQ ID NO: 622414 - DNA, 15 bp, Homo sapiens
cattccatatagtat

SEQ ID NO: 622415 - DNA, 15 bp, Homo sapiens
attccatatagtatc

SEQ ID NO: 622416 - DNA, 15 bp, Homo sapiens
ttccatatagtatcc

SEQ ID NO: 622417 - DNA, 15 bp, Homo sapiens
tccatatagtatcca

SEQ ID NO: 622418 - DNA, 15 bp, Homo sapiens
ccatatagtatccac

SEQ ID NO: 622419 - DNA, 15 bp, Homo sapiens
catatagtatccacc

SEQ ID NO: 622420 - DNA, 15 bp, Homo sapiens
atatagtatccacct

SEQ ID NO: 622421 - DNA, 15 bp, Homo sapiens
tatagtatccacctc

SEQ ID NO: 622422 - DNA, 15 bp, Homo sapiens
atagtatccacctct

SEQ ID NO: 622423 - DNA, 15 bp, Homo sapiens
tagtatccacctctc

SEQ ID NO: 622424 - DNA, 15 bp, Homo sapiens
agtatccacctctcc

SEQ ID NO: 622425 - DNA, 15 bp, Homo sapiens
gtatccacctctccc

SEQ ID NO: 622426 - DNA, 15 bp, Homo sapiens
tatccacctctcccg

SEQ ID NO: 622427 - DNA, 15 bp, Homo sapiens
atccacctctcccgg

SEQ ID NO: 622428 - DNA, 15 bp, Homo sapiens
tccacctctcccggc

SEQ ID NO: 622429 - DNA, 15 bp, Homo sapiens
ccacctctcccggct

SEQ ID NO: 622430 - DNA, 15 bp, Homo sapiens
cacctctcccggctc

SEQ ID NO: 622431 - DNA, 15 bp, Homo sapiens
acctctcccggctct

SEQ ID NO: 622432 - DNA, 15 bp, Homo sapiens
cctctcccggctcta

SEQ ID NO: 622433 - DNA, 15 bp, Homo sapiens
ctctcccggctctag

SEQ ID NO: 622434 - DNA, 15 bp, Homo sapiens
tctcccggctctagg

SEQ ID NO: 622435 - DNA, 15 bp, Homo sapiens
ctcccggctctaggc

SEQ ID NO: 622436 - DNA, 15 bp, Homo sapiens
tcccggctctaggcc

SEQ ID NO: 622437 - DNA, 15 bp, Homo sapiens
cccggctctaggcct

SEQ ID NO: 622438 - DNA, 15 bp, Homo sapiens
ccggctctaggcctg

SEQ ID NO: 622439 - DNA, 15 bp, Homo sapiens
cggctctaggcctgc

SEQ ID NO: 622440 - DNA, 15 bp, Homo sapiens
ggctctaggcctgcc

SEQ ID NO: 622441 - DNA, 15 bp, Homo sapiens
gctctaggcctgcct

SEQ ID NO: 622442 - DNA, 15 bp, Homo sapiens
ctctaggcctgcctc

SEQ ID NO: 622443 - DNA, 15 bp, Homo sapiens
tctaggcctgcctca

SEQ ID NO: 622444 - DNA, 15 bp, Homo sapiens
ctaggcctgcctcag

SEQ ID NO: 622445 - DNA, 15 bp, Homo sapiens
taggcctgcctcagt

SEQ ID NO: 622446 - DNA, 15 bp, Homo sapiens
aggcctgcctcagtc

SEQ ID NO: 622447 - DNA, 15 bp, Homo sapiens
ggcctgcctcagtcc

SEQ ID NO: 622448 - DNA, 15 bp, Homo sapiens
gcctgcctcagtcca

SEQ ID NO: 622449 - DNA, 15 bp, Homo sapiens
cctgcctcagtccag

SEQ ID NO: 622450 - DNA, 15 bp, Homo sapiens
ctgcctcagtccagg

SEQ ID NO: 622451 - DNA, 15 bp, Homo sapiens
tgcctcagtccagga

SEQ ID NO: 622452 - DNA, 15 bp, Homo sapiens
gcctcagtccaggag

SEQ ID NO: 622453 - DNA, 15 bp, Homo sapiens
cctcagtccaggagg

SEQ ID NO: 622454 - DNA, 15 bp, Homo sapiens
ctcagtccaggagga

SEQ ID NO: 622455 - DNA, 15 bp, Homo sapiens
tcagtccaggaggaa

SEQ ID NO: 622456 - DNA, 15 bp, Homo sapiens
cagtccaggaggaaa

SEQ ID NO: 622457 - DNA, 15 bp, Homo sapiens
agtccaggaggaaat

SEQ ID NO: 622458 - DNA, 15 bp, Homo sapiens
gtccaggaggaaatc

SEQ ID NO: 622459 - DNA, 15 bp, Homo sapiens
tccaggaggaaatcc

SEQ ID NO: 622460 - DNA, 15 bp, Homo sapiens
ccaggaggaaatccg

SEQ ID NO: 622461 - DNA, 15 bp, Homo sapiens
caggaggaaatccga

SEQ ID NO: 622462 - DNA, 15 bp, Homo sapiens
aggaggaaatccgac

SEQ ID NO: 622463 - DNA, 15 bp, Homo sapiens
ggaggaaatccgacc

SEQ ID NO: 622464 - DNA, 15 bp, Homo sapiens
gaggaaatccgaccc

SEQ ID NO: 622465 - DNA, 15 bp, Homo sapiens
aggaaatccgacccc

SEQ ID NO: 622466 - DNA, 15 bp, Homo sapiens
ggaaatccgaccccc

SEQ ID NO: 622467 - DNA, 15 bp, Homo sapiens
gaaatccgaccccct

SEQ ID NO: 622468 - DNA, 15 bp, Homo sapiens
aaatccgaccccctc

SEQ ID NO: 622469 - DNA, 15 bp, Homo sapiens
aatccgaccccctcc

SEQ ID NO: 622470 - DNA, 15 bp, Homo sapiens
atccgaccccctccc

SEQ ID NO: 622471 - DNA, 15 bp, Homo sapiens
tccgaccccctccct

SEQ ID NO: 622472 - DNA, 15 bp, Homo sapiens
ccgaccccctccctt

SEQ ID NO: 622473 - DNA, 15 bp, Homo sapiens
cgaccccctcccttc

SEQ ID NO: 622474 - DNA, 15 bp, Homo sapiens
gaccccctcccttca

SEQ ID NO: 622475 - DNA, 15 bp, Homo sapiens
accccctcccttcat

SEQ ID NO: 622476 - DNA, 15 bp, Homo sapiens
ccccctcccttcatc

SEQ ID NO: 622477 - DNA, 15 bp, Homo sapiens
cccctcccttcatcc

SEQ ID NO: 622478 - DNA, 15 bp, Homo sapiens
ccctcccttcatccg

SEQ ID NO: 622479 - DNA, 15 bp, Homo sapiens
cctcccttcatccgg

SEQ ID NO: 622480 - DNA, 15 bp, Homo sapiens
ctcccttcatccgga

SEQ ID NO: 622481 - DNA, 15 bp, Homo sapiens
tcccttcatccggac

SEQ ID NO: 622482 - DNA, 15 bp, Homo sapiens
cccttcatccggacc

SEQ ID NO: 622483 - DNA, 15 bp, Homo sapiens
ccttcatccggaccc

SEQ ID NO: 622484 - DNA, 15 bp, Homo sapiens
cttcatccggacccc

SEQ ID NO: 622485 - DNA, 15 bp, Homo sapiens
ttcatccggacccca

SEQ ID NO: 622486 - DNA, 15 bp, Homo sapiens
tcatccggaccccac

SEQ ID NO: 622487 - DNA, 15 bp, Homo sapiens
catccggaccccact

SEQ ID NO: 622488 - DNA, 15 bp, Homo sapiens
atccggaccccactt

SEQ ID NO: 622489 - DNA, 15 bp, Homo sapiens
tccggaccccacttc

SEQ ID NO: 622490 - DNA, 15 bp, Homo sapiens
ccggaccccacttcc

SEQ ID NO: 622491 - DNA, 15 bp, Homo sapiens
cggaccccacttccc

SEQ ID NO: 622492 - DNA, 15 bp, Homo sapiens
ggaccccacttccct

SEQ ID NO: 622493 - DNA, 15 bp, Homo sapiens
gaccccacttccctc

SEQ ID NO: 622494 - DNA, 15 bp, Homo sapiens
accccacttccctca

SEQ ID NO: 622495 - DNA, 15 bp, Homo sapiens
ccccacttccctcat

SEQ ID NO: 622496 - DNA, 15 bp, Homo sapiens
cccacttccctcatc

SEQ ID NO: 622497 - DNA, 15 bp, Homo sapiens
ccacttccctcatcc

SEQ ID NO: 622498 - DNA, 15 bp, Homo sapiens
cacttccctcatcca

SEQ ID NO: 622499 - DNA, 15 bp, Homo sapiens
acttccctcatccag

SEQ ID NO: 622500 - DNA, 15 bp, Homo sapiens
cttccctcatccaga

SEQ ID NO: 622501 - DNA, 15 bp, Homo sapiens
ttccctcatccagac

SEQ ID NO: 622502 - DNA, 15 bp, Homo sapiens
tccctcatccagacc

SEQ ID NO: 622503 - DNA, 15 bp, Homo sapiens
ccctcatccagaccc

SEQ ID NO: 622504 - DNA, 15 bp, Homo sapiens
cctcatccagacccc

SEQ ID NO: 622505 - DNA, 15 bp, Homo sapiens
ctcatccagaccccc

SEQ ID NO: 622506 - DNA, 15 bp, Homo sapiens
tcatccagacccccc

SEQ ID NO: 622507 - DNA, 15 bp, Homo sapiens
catccagaccccccc

SEQ ID NO: 622508 - DNA, 15 bp, Homo sapiens
atccagaccccccca

SEQ ID NO: 622509 - DNA, 15 bp, Homo sapiens
tccagacccccccac

SEQ ID NO: 622510 - DNA, 15 bp, Homo sapiens
ccagacccccccact

SEQ ID NO: 622511 - DNA, 15 bp, Homo sapiens
cagacccccccactc

SEQ ID NO: 622512 - DNA, 15 bp, Homo sapiens
agacccccccactct

SEQ ID NO: 622513 - DNA, 15 bp, Homo sapiens
gacccccccactctg

SEQ ID NO: 622514 - DNA, 15 bp, Homo sapiens
acccccccactctgc

SEQ ID NO: 622515 - DNA, 15 bp, Homo sapiens
cccccccactctgct

SEQ ID NO: 622516 - DNA, 15 bp, Homo sapiens
ccccccactctgctt

SEQ ID NO: 622517 - DNA, 15 bp, Homo sapiens
cccccactctgcttt

SEQ ID NO: 622518 - DNA, 15 bp, Homo sapiens
ccccactctgctttt

SEQ ID NO: 622519 - DNA, 15 bp, Homo sapiens
cccactctgcttttc

SEQ ID NO: 622520 - DNA, 15 bp, Homo sapiens
ccactctgcttttcc

SEQ ID NO: 622521 - DNA, 15 bp, Homo sapiens
cactctgcttttcct

SEQ ID NO: 622522 - DNA, 15 bp, Homo sapiens
actctgcttttcctg

SEQ ID NO: 622523 - DNA, 15 bp, Homo sapiens
ctctgcttttcctgc

SEQ ID NO: 622524 - DNA, 15 bp, Homo sapiens
tctgcttttcctgcc

SEQ ID NO: 622525 - DNA, 15 bp, Homo sapiens
ctgcttttcctgcca

SEQ ID NO: 622526 - DNA, 15 bp, Homo sapiens
tgcttttcctgccag

SEQ ID NO: 622527 - DNA, 15 bp, Homo sapiens
gcttttcctgccagc

SEQ ID NO: 622528 - DNA, 15 bp, Homo sapiens
cttttcctgccagct

SEQ ID NO: 622529 - DNA, 15 bp, Homo sapiens
ttttcctgccagctc

SEQ ID NO: 622530 - DNA, 15 bp, Homo sapiens
tttcctgccagctcc

SEQ ID NO: 622531 - DNA, 15 bp, Homo sapiens
ttcctgccagctcct

SEQ ID NO: 622532 - DNA, 15 bp, Homo sapiens
tcctgccagctcctt

SEQ ID NO: 622533 - DNA, 15 bp, Homo sapiens
cctgccagctcctta

SEQ ID NO: 622534 - DNA, 15 bp, Homo sapiens
ctgccagctccttag

SEQ ID NO: 622535 - DNA, 15 bp, Homo sapiens
tgccagctccttagt

SEQ ID NO: 622536 - DNA, 15 bp, Homo sapiens
gccagctccttagtg

SEQ ID NO: 622537 - DNA, 15 bp, Homo sapiens
ccagctccttagtgt

SEQ ID NO: 622538 - DNA, 15 bp, Homo sapiens
cagctccttagtgtg

SEQ ID NO: 622539 - DNA, 15 bp, Homo sapiens
agctccttagtgtgg

SEQ ID NO: 622540 - DNA, 15 bp, Homo sapiens
gctccttagtgtggg

SEQ ID NO: 622541 - DNA, 15 bp, Homo sapiens
ctccttagtgtgggg

SEQ ID NO: 622542 - DNA, 15 bp, Homo sapiens
tccttagtgtggggg

SEQ ID NO: 622543 - DNA, 15 bp, Homo sapiens
ccttagtgtgggggg

SEQ ID NO: 622544 - DNA, 15 bp, Homo sapiens
cttagtgtggggggt

SEQ ID NO: 622545 - DNA, 15 bp, Homo sapiens
ttagtgtggggggtg

SEQ ID NO: 622546 - DNA, 15 bp, Homo sapiens
tagtgtggggggtga

SEQ ID NO: 622547 - DNA, 15 bp, Homo sapiens
agtgtggggggtgag

SEQ ID NO: 622548 - DNA, 15 bp, Homo sapiens
gtgtggggggtgagg

SEQ ID NO: 622549 - DNA, 15 bp, Homo sapiens
tgtggggggtgagga

SEQ ID NO: 622550 - DNA, 15 bp, Homo sapiens
gtggggggtgaggag

SEQ ID NO: 622551 - DNA, 15 bp, Homo sapiens
tggggggtgaggagt

SEQ ID NO: 622552 - DNA, 15 bp, Homo sapiens
ggggggtgaggagtg

SEQ ID NO: 622553 - DNA, 15 bp, Homo sapiens
gggggtgaggagtga

SEQ ID NO: 622554 - DNA, 15 bp, Homo sapiens
ggggtgaggagtgaa

SEQ ID NO: 622555 - DNA, 15 bp, Homo sapiens
gggtgaggagtgaat

SEQ ID NO: 622556 - DNA, 15 bp, Homo sapiens
ggtgaggagtgaata

SEQ ID NO: 622557 - DNA, 15 bp, Homo sapiens
gtgaggagtgaatac

SEQ ID NO: 622558 - DNA, 15 bp, Homo sapiens
tgaggagtgaatact

SEQ ID NO: 622559 - DNA, 15 bp, Homo sapiens
gaggagtgaatactg

SEQ ID NO: 622560 - DNA, 15 bp, Homo sapiens
aggagtgaatactgc

SEQ ID NO: 622561 - DNA, 15 bp, Homo sapiens
ggagtgaatactgct

SEQ ID NO: 622562 - DNA, 15 bp, Homo sapiens
gagtgaatactgctt

SEQ ID NO: 622563 - DNA, 15 bp, Homo sapiens
agtgaatactgcttc

SEQ ID NO: 622564 - DNA, 15 bp, Homo sapiens
gtgaatactgcttca

SEQ ID NO: 622565 - DNA, 15 bp, Homo sapiens
tgaatactgcttcag

SEQ ID NO: 622566 - DNA, 15 bp, Homo sapiens
gaatactgcttcagg

SEQ ID NO: 622567 - DNA, 15 bp, Homo sapiens
aatactgcttcaggc

SEQ ID NO: 622568 - DNA, 15 bp, Homo sapiens
atactgcttcaggca

SEQ ID NO: 622569 - DNA, 15 bp, Homo sapiens
tactgcttcaggcag

SEQ ID NO: 622570 - DNA, 15 bp, Homo sapiens
actgcttcaggcagg

SEQ ID NO: 622571 - DNA, 15 bp, Homo sapiens
ctgcttcaggcaggg

SEQ ID NO: 622572 - DNA, 15 bp, Homo sapiens
tgcttcaggcaggga

SEQ ID NO: 622573 - DNA, 15 bp, Homo sapiens
gcttcaggcagggat

SEQ ID NO: 622574 - DNA, 15 bp, Homo sapiens
cttcaggcagggatg

SEQ ID NO: 622575 - DNA, 15 bp, Homo sapiens
ttcaggcagggatgg

SEQ ID NO: 622576 - DNA, 15 bp, Homo sapiens
tcaggcagggatggg

SEQ ID NO: 622577 - DNA, 15 bp, Homo sapiens
caggcagggatgggg

SEQ ID NO: 622578 - DNA, 15 bp, Homo sapiens
aggcagggatggggc

SEQ ID NO: 622579 - DNA, 15 bp, Homo sapiens
ggcagggatggggcc

SEQ ID NO: 622580 - DNA, 15 bp, Homo sapiens
gcagggatggggccc

SEQ ID NO: 622581 - DNA, 15 bp, Homo sapiens
cagggatggggccca

SEQ ID NO: 622582 - DNA, 15 bp, Homo sapiens
agggatggggcccac

SEQ ID NO: 622583 - DNA, 15 bp, Homo sapiens
gggatggggcccaca

SEQ ID NO: 622584 - DNA, 15 bp, Homo sapiens
ggatggggcccacag

SEQ ID NO: 622585 - DNA, 15 bp, Homo sapiens
gatggggcccacagg

SEQ ID NO: 622586 - DNA, 15 bp, Homo sapiens
atggggcccacaggc

SEQ ID NO: 622587 - DNA, 15 bp, Homo sapiens
tggggcccacaggca

SEQ ID NO: 622588 - DNA, 15 bp, Homo sapiens
ggggcccacaggcag

SEQ ID NO: 622589 - DNA, 15 bp, Homo sapiens
gggcccacaggcagg

SEQ ID NO: 622590 - DNA, 15 bp, Homo sapiens
ggcccacaggcagga

SEQ ID NO: 622591 - DNA, 15 bp, Homo sapiens
gcccacaggcaggag

SEQ ID NO: 622592 - DNA, 15 bp, Homo sapiens
cccacaggcaggaga

SEQ ID NO: 622593 - DNA, 15 bp, Homo sapiens
ccacaggcaggagag

SEQ ID NO: 622594 - DNA, 15 bp, Homo sapiens
cacaggcaggagagg

SEQ ID NO: 622595 - DNA, 15 bp, Homo sapiens
acaggcaggagaggg

SEQ ID NO: 622596 - DNA, 15 bp, Homo sapiens
caggcaggagaggga

SEQ ID NO: 622597 - DNA, 15 bp, Homo sapiens
aggcaggagagggag

SEQ ID NO: 622598 - DNA, 15 bp, Homo sapiens
ggcaggagagggaga

SEQ ID NO: 622599 - DNA, 15 bp, Homo sapiens
gcaggagagggagag

SEQ ID NO: 622600 - DNA, 15 bp, Homo sapiens
caggagagggagagc

SEQ ID NO: 622601 - DNA, 15 bp, Homo sapiens
aggagagggagagca

SEQ ID NO: 622602 - DNA, 15 bp, Homo sapiens
ggagagggagagcag

SEQ ID NO: 622603 - DNA, 15 bp, Homo sapiens
gagagggagagcagg

SEQ ID NO: 622604 - DNA, 15 bp, Homo sapiens
agagggagagcagga

SEQ ID NO: 622605 - DNA, 15 bp, Homo sapiens
gagggagagcaggac

SEQ ID NO: 622606 - DNA, 15 bp, Homo sapiens
agggagagcaggacc

SEQ ID NO: 622607 - DNA, 15 bp, Homo sapiens
gggagagcaggaccc

SEQ ID NO: 622608 - DNA, 15 bp, Homo sapiens
ggagagcaggacccg

SEQ ID NO: 622609 - DNA, 15 bp, Homo sapiens
gagagcaggacccgg

SEQ ID NO: 622610 - DNA, 15 bp, Homo sapiens
agagcaggacccggg

SEQ ID NO: 622611 - DNA, 15 bp, Homo sapiens
gagcaggacccggga

SEQ ID NO: 622612 - DNA, 15 bp, Homo sapiens
agcaggacccgggag

SEQ ID NO: 622613 - DNA, 15 bp, Homo sapiens
gcaggacccgggagg

SEQ ID NO: 622614 - DNA, 15 bp, Homo sapiens
caggacccgggaggt

SEQ ID NO: 622615 - DNA, 15 bp, Homo sapiens
aggacccgggaggtg

SEQ ID NO: 622616 - DNA, 15 bp, Homo sapiens
ggacccgggaggtgg

SEQ ID NO: 622617 - DNA, 15 bp, Homo sapiens
gacccgggaggtgga

SEQ ID NO: 622618 - DNA, 15 bp, Homo sapiens
acccgggaggtggac

SEQ ID NO: 622619 - DNA, 15 bp, Homo sapiens
cccgggaggtggact

SEQ ID NO: 622620 - DNA, 15 bp, Homo sapiens
ccgggaggtggactc

SEQ ID NO: 622621 - DNA, 15 bp, Homo sapiens
cgggaggtggactca

SEQ ID NO: 622622 - DNA, 15 bp, Homo sapiens
gggaggtggactcag

SEQ ID NO: 622623 - DNA, 15 bp, Homo sapiens
ggaggtggactcagg

SEQ ID NO: 622624 - DNA, 15 bp, Homo sapiens
gaggtggactcagga

SEQ ID NO: 622625 - DNA, 15 bp, Homo sapiens
aggtggactcaggac

SEQ ID NO: 622626 - DNA, 15 bp, Homo sapiens
ggtggactcaggact

SEQ ID NO: 622627 - DNA, 15 bp, Homo sapiens
gtggactcaggactg

SEQ ID NO: 622628 - DNA, 15 bp, Homo sapiens
tggactcaggactgg

SEQ ID NO: 622629 - DNA, 15 bp, Homo sapiens
ggactcaggactgga

SEQ ID NO: 622630 - DNA, 15 bp, Homo sapiens
gactcaggactggag

SEQ ID NO: 622631 - DNA, 15 bp, Homo sapiens
actcaggactggagt

SEQ ID NO: 622632 - DNA, 15 bp, Homo sapiens
ctcaggactggagtg

SEQ ID NO: 622633 - DNA, 15 bp, Homo sapiens
tcaggactggagtgg

SEQ ID NO: 622634 - DNA, 15 bp, Homo sapiens
caggactggagtggg

SEQ ID NO: 622635 - DNA, 15 bp, Homo sapiens
aggactggagtgggc

SEQ ID NO: 622636 - DNA, 15 bp, Homo sapiens
ggactggagtgggcg

SEQ ID NO: 622637 - DNA, 15 bp, Homo sapiens
gactggagtgggcgg

SEQ ID NO: 622638 - DNA, 15 bp, Homo sapiens
actggagtgggcgga

SEQ ID NO: 622639 - DNA, 15 bp, Homo sapiens
ctggagtgggcggag

SEQ ID NO: 622640 - DNA, 15 bp, Homo sapiens
tggagtgggcggagg

SEQ ID NO: 622641 - DNA, 15 bp, Homo sapiens
ggagtgggcggaggc

SEQ ID NO: 622642 - DNA, 15 bp, Homo sapiens
gagtgggcggaggcc

SEQ ID NO: 622643 - DNA, 15 bp, Homo sapiens
agtgggcggaggccc

SEQ ID NO: 622644 - DNA, 15 bp, Homo sapiens
gtgggcggaggcccc

SEQ ID NO: 622645 - DNA, 15 bp, Homo sapiens
tgggcggaggccccc

SEQ ID NO: 622646 - DNA, 15 bp, Homo sapiens
gggcggaggccccca

SEQ ID NO: 622647 - DNA, 15 bp, Homo sapiens
ggcggaggcccccaa

SEQ ID NO: 622648 - DNA, 15 bp, Homo sapiens
gcggaggcccccaag

SEQ ID NO: 622649 - DNA, 15 bp, Homo sapiens
cggaggcccccaagc

SEQ ID NO: 622650 - DNA, 15 bp, Homo sapiens
ggaggcccccaagcg

SEQ ID NO: 622651 - DNA, 15 bp, Homo sapiens
gaggcccccaagcgt

SEQ ID NO: 622652 - DNA, 15 bp, Homo sapiens
aggcccccaagcgtc

SEQ ID NO: 622653 - DNA, 15 bp, Homo sapiens
ggcccccaagcgtcc

SEQ ID NO: 622654 - DNA, 15 bp, Homo sapiens
gcccccaagcgtcca

SEQ ID NO: 622655 - DNA, 15 bp, Homo sapiens
cccccaagcgtccag

SEQ ID NO: 622656 - DNA, 15 bp, Homo sapiens
ccccaagcgtccagg

SEQ ID NO: 622657 - DNA, 15 bp, Homo sapiens
cccaagcgtccaggc

SEQ ID NO: 622658 - DNA, 15 bp, Homo sapiens
ccaagcgtccaggcc

SEQ ID NO: 622659 - DNA, 15 bp, Homo sapiens
caagcgtccaggcct

SEQ ID NO: 622660 - DNA, 15 bp, Homo sapiens
aagcgtccaggcctg

SEQ ID NO: 622661 - DNA, 15 bp, Homo sapiens
agcgtccaggcctgc

SEQ ID NO: 622662 - DNA, 15 bp, Homo sapiens
gcgtccaggcctgcc

SEQ ID NO: 622663 - DNA, 15 bp, Homo sapiens
cgtccaggcctgcct

SEQ ID NO: 622664 - DNA, 15 bp, Homo sapiens
gtccaggcctgcctg

SEQ ID NO: 622665 - DNA, 15 bp, Homo sapiens
tccaggcctgcctgt

SEQ ID NO: 622666 - DNA, 15 bp, Homo sapiens
ccaggcctgcctgtg

SEQ ID NO: 622667 - DNA, 15 bp, Homo sapiens
caggcctgcctgtgg

SEQ ID NO: 622668 - DNA, 15 bp, Homo sapiens
aggcctgcctgtggg

SEQ ID NO: 622669 - DNA, 15 bp, Homo sapiens
ggcctgcctgtggga

SEQ ID NO: 622670 - DNA, 15 bp, Homo sapiens
gcctgcctgtgggat

SEQ ID NO: 622671 - DNA, 15 bp, Homo sapiens
cctgcctgtgggatg

SEQ ID NO: 622672 - DNA, 15 bp, Homo sapiens
ctgcctgtgggatgt

SEQ ID NO: 622673 - DNA, 15 bp, Homo sapiens
tgcctgtgggatgtg

SEQ ID NO: 622674 - DNA, 15 bp, Homo sapiens
gcctgtgggatgtgt

SEQ ID NO: 622675 - DNA, 15 bp, Homo sapiens
cctgtgggatgtgtt

SEQ ID NO: 622676 - DNA, 15 bp, Homo sapiens
ctgtgggatgtgttg

SEQ ID NO: 622677 - DNA, 15 bp, Homo sapiens
tgtgggatgtgttgt

SEQ ID NO: 622678 - DNA, 15 bp, Homo sapiens
gtgggatgtgttgtc

SEQ ID NO: 622679 - DNA, 15 bp, Homo sapiens
tgggatgtgttgtca

SEQ ID NO: 622680 - DNA, 15 bp, Homo sapiens
gggatgtgttgtcag

SEQ ID NO: 622681 - DNA, 15 bp, Homo sapiens
ggatgtgttgtcagg

SEQ ID NO: 622682 - DNA, 15 bp, Homo sapiens
gatgtgttgtcaggg

SEQ ID NO: 622683 - DNA, 15 bp, Homo sapiens
atgtgttgtcagggt

SEQ ID NO: 622684 - DNA, 15 bp, Homo sapiens
tgtgttgtcagggtc

SEQ ID NO: 622685 - DNA, 15 bp, Homo sapiens
gtgttgtcagggtct

SEQ ID NO: 622686 - DNA, 15 bp, Homo sapiens
tgttgtcagggtctt

SEQ ID NO: 622687 - DNA, 15 bp, Homo sapiens
gttgtcagggtcttg

SEQ ID NO: 622688 - DNA, 15 bp, Homo sapiens
ttgtcagggtcttgc

SEQ ID NO: 622689 - DNA, 15 bp, Homo sapiens
tgtcagggtcttgct

SEQ ID NO: 622690 - DNA, 15 bp, Homo sapiens
gtcagggtcttgctc

SEQ ID NO: 622691 - DNA, 15 bp, Homo sapiens
tcagggtcttgctcc

SEQ ID NO: 622692 - DNA, 15 bp, Homo sapiens
cagggtcttgctccc

SEQ ID NO: 622693 - DNA, 15 bp, Homo sapiens
agggtcttgctcccc

SEQ ID NO: 622694 - DNA, 15 bp, Homo sapiens
gggtcttgctccccc

SEQ ID NO: 622695 - DNA, 15 bp, Homo sapiens
ggtcttgctccccca

SEQ ID NO: 622696 - DNA, 15 bp, Homo sapiens
gtcttgctcccccac

SEQ ID NO: 622697 - DNA, 15 bp, Homo sapiens
tcttgctcccccacc

SEQ ID NO: 622698 - DNA, 15 bp, Homo sapiens
cttgctcccccaccc

SEQ ID NO: 622699 - DNA, 15 bp, Homo sapiens
ttgctcccccaccct

SEQ ID NO: 622700 - DNA, 15 bp, Homo sapiens
tgctcccccaccctt

SEQ ID NO: 622701 - DNA, 15 bp, Homo sapiens
gctcccccacccttt

SEQ ID NO: 622702 - DNA, 15 bp, Homo sapiens
ctcccccaccctttc

SEQ ID NO: 622703 - DNA, 15 bp, Homo sapiens
tcccccaccctttcc

SEQ ID NO: 622704 - DNA, 15 bp, Homo sapiens
cccccaccctttcct

SEQ ID NO: 622705 - DNA, 15 bp, Homo sapiens
ccccaccctttcctg

SEQ ID NO: 622706 - DNA, 15 bp, Homo sapiens
cccaccctttcctgc

SEQ ID NO: 622707 - DNA, 15 bp, Homo sapiens
ccaccctttcctgct

SEQ ID NO: 622708 - DNA, 15 bp, Homo sapiens
caccctttcctgctg

SEQ ID NO: 622709 - DNA, 15 bp, Homo sapiens
accctttcctgctgc

SEQ ID NO: 622710 - DNA, 15 bp, Homo sapiens
ccctttcctgctgca

SEQ ID NO: 622711 - DNA, 15 bp, Homo sapiens
cctttcctgctgcag

SEQ ID NO: 622712 - DNA, 15 bp, Homo sapiens
ctttcctgctgcagg

SEQ ID NO: 622713 - DNA, 15 bp, Homo sapiens
tttcctgctgcagga

SEQ ID NO: 622714 - DNA, 15 bp, Homo sapiens
ttcctgctgcaggag

SEQ ID NO: 622715 - DNA, 15 bp, Homo sapiens
tcctgctgcaggagc

SEQ ID NO: 622716 - DNA, 15 bp, Homo sapiens
cctgctgcaggagcc

SEQ ID NO: 622717 - DNA, 15 bp, Homo sapiens
ctgctgcaggagccg

SEQ ID NO: 622718 - DNA, 15 bp, Homo sapiens
tgctgcaggagccgg

SEQ ID NO: 622719 - DNA, 15 bp, Homo sapiens
gctgcaggagccggc

SEQ ID NO: 622720 - DNA, 15 bp, Homo sapiens
ctgcaggagccggcc

SEQ ID NO: 622721 - DNA, 15 bp, Homo sapiens
tgcaggagccggccc

SEQ ID NO: 622722 - DNA, 15 bp, Homo sapiens
gcaggagccggcccc

SEQ ID NO: 622723 - DNA, 15 bp, Homo sapiens
caggagccggcccca

SEQ ID NO: 622724 - DNA, 15 bp, Homo sapiens
aggagccggccccac

SEQ ID NO: 622725 - DNA, 15 bp, Homo sapiens
ggagccggccccacc

SEQ ID NO: 622726 - DNA, 15 bp, Homo sapiens
gagccggccccaccc

SEQ ID NO: 622727 - DNA, 15 bp, Homo sapiens
agccggccccacccc

SEQ ID NO: 622728 - DNA, 15 bp, Homo sapiens
gccggccccaccccc

SEQ ID NO: 622729 - DNA, 15 bp, Homo sapiens
ccggccccaccccca

SEQ ID NO: 622730 - DNA, 15 bp, Homo sapiens
cggccccacccccac

SEQ ID NO: 622731 - DNA, 15 bp, Homo sapiens
ggccccacccccacc

SEQ ID NO: 622732 - DNA, 15 bp, Homo sapiens
gccccacccccacct

SEQ ID NO: 622733 - DNA, 15 bp, Homo sapiens
ccccacccccacctc

SEQ ID NO: 622734 - DNA, 15 bp, Homo sapiens
cccacccccacctca

SEQ ID NO: 622735 - DNA, 15 bp, Homo sapiens
ccacccccacctcac

SEQ ID NO: 622736 - DNA, 15 bp, Homo sapiens
cacccccacctcaca

SEQ ID NO: 622737 - DNA, 15 bp, Homo sapiens
acccccacctcacac

SEQ ID NO: 622738 - DNA, 15 bp, Homo sapiens
cccccacctcacaca

SEQ ID NO: 622739 - DNA, 15 bp, Homo sapiens
ccccacctcacacac

SEQ ID NO: 622740 - DNA, 15 bp, Homo sapiens
cccacctcacacacc

SEQ ID NO: 622741 - DNA, 15 bp, Homo sapiens
ccacctcacacaccc

SEQ ID NO: 622742 - DNA, 15 bp, Homo sapiens
cacctcacacaccca

SEQ ID NO: 622743 - DNA, 15 bp, Homo sapiens
acctcacacacccac

SEQ ID NO: 622744 - DNA, 15 bp, Homo sapiens
cctcacacacccacc

SEQ ID NO: 622745 - DNA, 15 bp, Homo sapiens
ctcacacacccacct

SEQ ID NO: 622746 - DNA, 15 bp, Homo sapiens
tcacacacccacctg

SEQ ID NO: 622747 - DNA, 15 bp, Homo sapiens
cacacacccacctgc

SEQ ID NO: 622748 - DNA, 15 bp, Homo sapiens
acacacccacctgcg

SEQ ID NO: 622749 - DNA, 15 bp, Homo sapiens
cacacccacctgcgc

SEQ ID NO: 622750 - DNA, 15 bp, Homo sapiens
acacccacctgcgcc

SEQ ID NO: 622751 - DNA, 15 bp, Homo sapiens
cacccacctgcgccc

SEQ ID NO: 622752 - DNA, 15 bp, Homo sapiens
acccacctgcgcccg

SEQ ID NO: 622753 - DNA, 15 bp, Homo sapiens
cccacctgcgcccgg

SEQ ID NO: 622754 - DNA, 15 bp, Homo sapiens
ccacctgcgcccggt

SEQ ID NO: 622755 - DNA, 15 bp, Homo sapiens
cacctgcgcccggtg

SEQ ID NO: 622756 - DNA, 15 bp, Homo sapiens
acctgcgcccggtga

SEQ ID NO: 622757 - DNA, 15 bp, Homo sapiens
cctgcgcccggtgag

SEQ ID NO: 622758 - DNA, 15 bp, Homo sapiens
ctgcgcccggtgagt

SEQ ID NO: 622759 - DNA, 15 bp, Homo sapiens
tgcgcccggtgagtc

SEQ ID NO: 622760 - DNA, 15 bp, Homo sapiens
gcgcccggtgagtcg

SEQ ID NO: 622761 - DNA, 15 bp, Homo sapiens
cgcccggtgagtcgc

SEQ ID NO: 622762 - DNA, 15 bp, Homo sapiens
gcccggtgagtcgct

SEQ ID NO: 622763 - DNA, 15 bp, Homo sapiens
cccggtgagtcgctg

SEQ ID NO: 622764 - DNA, 15 bp, Homo sapiens
ccggtgagtcgctgg

SEQ ID NO: 622765 - DNA, 15 bp, Homo sapiens
cggtgagtcgctggg

SEQ ID NO: 622766 - DNA, 15 bp, Homo sapiens
ggtgagtcgctggga

SEQ ID NO: 622767 - DNA, 15 bp, Homo sapiens
gtgagtcgctgggaa

SEQ ID NO: 622768 - DNA, 15 bp, Homo sapiens
tgagtcgctgggaag

SEQ ID NO: 622769 - DNA, 15 bp, Homo sapiens
gagtcgctgggaagg

SEQ ID NO: 622770 - DNA, 15 bp, Homo sapiens
agtcgctgggaaggg

SEQ ID NO: 622771 - DNA, 15 bp, Homo sapiens
gtcgctgggaagggt

SEQ ID NO: 622772 - DNA, 15 bp, Homo sapiens
tcgctgggaagggtc

SEQ ID NO: 622773 - DNA, 15 bp, Homo sapiens
cgctgggaagggtct

SEQ ID NO: 622774 - DNA, 15 bp, Homo sapiens
gctgggaagggtctc

SEQ ID NO: 622775 - DNA, 15 bp, Homo sapiens
ctgggaagggtctcc

SEQ ID NO: 622776 - DNA, 15 bp, Homo sapiens
tgggaagggtctcct

SEQ ID NO: 622777 - DNA, 15 bp, Homo sapiens
gggaagggtctcctc

SEQ ID NO: 622778 - DNA, 15 bp, Homo sapiens
ggaagggtctcctcc

SEQ ID NO: 622779 - DNA, 15 bp, Homo sapiens
gaagggtctcctcca

SEQ ID NO: 622780 - DNA, 15 bp, Homo sapiens
aagggtctcctccac

SEQ ID NO: 622781 - DNA, 15 bp, Homo sapiens
agggtctcctccact

SEQ ID NO: 622782 - DNA, 15 bp, Homo sapiens
gggtctcctccactg

SEQ ID NO: 622783 - DNA, 15 bp, Homo sapiens
ggtctcctccactgc

SEQ ID NO: 622784 - DNA, 15 bp, Homo sapiens
gtctcctccactgcg

SEQ ID NO: 622785 - DNA, 15 bp, Homo sapiens
tctcctccactgcga

SEQ ID NO: 622786 - DNA, 15 bp, Homo sapiens
ctcctccactgcgaa

SEQ ID NO: 622787 - DNA, 15 bp, Homo sapiens
tcctccactgcgaag

SEQ ID NO: 622788 - DNA, 15 bp, Homo sapiens
cctccactgcgaaga

SEQ ID NO: 622789 - DNA, 15 bp, Homo sapiens
ctccactgcgaagat

SEQ ID NO: 622790 - DNA, 15 bp, Homo sapiens
tccactgcgaagatg

SEQ ID NO: 622791 - DNA, 15 bp, Homo sapiens
ccactgcgaagatgt

SEQ ID NO: 622792 - DNA, 15 bp, Homo sapiens
cactgcgaagatgtg

SEQ ID NO: 622793 - DNA, 15 bp, Homo sapiens
actgcgaagatgtga

SEQ ID NO: 622794 - DNA, 15 bp, Homo sapiens
ctgcgaagatgtgag

SEQ ID NO: 622795 - DNA, 15 bp, Homo sapiens
tgcgaagatgtgaga

SEQ ID NO: 622796 - DNA, 15 bp, Homo sapiens
gcgaagatgtgagat

SEQ ID NO: 622797 - DNA, 15 bp, Homo sapiens
cgaagatgtgagatg

SEQ ID NO: 622798 - DNA, 15 bp, Homo sapiens
gaagatgtgagatga

SEQ ID NO: 622799 - DNA, 15 bp, Homo sapiens
aagatgtgagatgag

SEQ ID NO: 622800 - DNA, 15 bp, Homo sapiens
agatgtgagatgagg

SEQ ID NO: 622801 - DNA, 15 bp, Homo sapiens
gatgtgagatgagga

SEQ ID NO: 622802 - DNA, 15 bp, Homo sapiens
atgtgagatgaggag

SEQ ID NO: 622803 - DNA, 15 bp, Homo sapiens
tgtgagatgaggagg

SEQ ID NO: 622804 - DNA, 15 bp, Homo sapiens
gtgagatgaggaggg

SEQ ID NO: 622805 - DNA, 15 bp, Homo sapiens
tgagatgaggagggg

SEQ ID NO: 622806 - DNA, 15 bp, Homo sapiens
gagatgaggaggggg

SEQ ID NO: 622807 - DNA, 15 bp, Homo sapiens
agatgaggagggggt

SEQ ID NO: 622808 - DNA, 15 bp, Homo sapiens
gatgaggagggggtg

SEQ ID NO: 622809 - DNA, 15 bp, Homo sapiens
atgaggagggggtga

SEQ ID NO: 622810 - DNA, 15 bp, Homo sapiens
tgaggagggggtgat

SEQ ID NO: 622811 - DNA, 15 bp, Homo sapiens
gaggagggggtgata

SEQ ID NO: 622812 - DNA, 15 bp, Homo sapiens
aggagggggtgatat

SEQ ID NO: 622813 - DNA, 15 bp, Homo sapiens
ggagggggtgatatg

SEQ ID NO: 622814 - DNA, 15 bp, Homo sapiens
gagggggtgatatgg

SEQ ID NO: 622815 - DNA, 15 bp, Homo sapiens
agggggtgatatggg

SEQ ID NO: 622816 - DNA, 15 bp, Homo sapiens
gggggtgatatgggg

SEQ ID NO: 622817 - DNA, 15 bp, Homo sapiens
ggggtgatatggggg

SEQ ID NO: 622818 - DNA, 15 bp, Homo sapiens
gggtgatatgggggc

SEQ ID NO: 622819 - DNA, 15 bp, Homo sapiens
ggtgatatgggggcg

SEQ ID NO: 622820 - DNA, 15 bp, Homo sapiens
gtgatatgggggcgg

SEQ ID NO: 622821 - DNA, 15 bp, Homo sapiens
tgatatgggggcggg

SEQ ID NO: 622822 - DNA, 15 bp, Homo sapiens
gatatgggggcgggc

SEQ ID NO: 622823 - DNA, 15 bp, Homo sapiens
atatgggggcgggca

SEQ ID NO: 622824 - DNA, 15 bp, Homo sapiens
tatgggggcgggcag

SEQ ID NO: 622825 - DNA, 15 bp, Homo sapiens
atgggggcgggcagg

SEQ ID NO: 622826 - DNA, 15 bp, Homo sapiens
tgggggcgggcaggg

SEQ ID NO: 622827 - DNA, 15 bp, Homo sapiens
gggggcgggcagggg

SEQ ID NO: 622828 - DNA, 15 bp, Homo sapiens
ggggcgggcagggga

SEQ ID NO: 622829 - DNA, 15 bp, Homo sapiens
gggcgggcaggggac

SEQ ID NO: 622830 - DNA, 15 bp, Homo sapiens
ggcgggcaggggaca

SEQ ID NO: 622831 - DNA, 15 bp, Homo sapiens
gcgggcaggggacag

SEQ ID NO: 622832 - DNA, 15 bp, Homo sapiens
cgggcaggggacagg

SEQ ID NO: 622833 - DNA, 15 bp, Homo sapiens
gggcaggggacagga

SEQ ID NO: 622834 - DNA, 15 bp, Homo sapiens
ggcaggggacaggaa

SEQ ID NO: 622835 - DNA, 15 bp, Homo sapiens
gcaggggacaggaat

SEQ ID NO: 622836 - DNA, 15 bp, Homo sapiens
caggggacaggaatg

SEQ ID NO: 622837 - DNA, 15 bp, Homo sapiens
aggggacaggaatgc

SEQ ID NO: 622838 - DNA, 15 bp, Homo sapiens
ggggacaggaatgcc

SEQ ID NO: 622839 - DNA, 15 bp, Homo sapiens
gggacaggaatgcca

SEQ ID NO: 622840 - DNA, 15 bp, Homo sapiens
ggacaggaatgccag

SEQ ID NO: 622841 - DNA, 15 bp, Homo sapiens
gacaggaatgccagg

SEQ ID NO: 622842 - DNA, 15 bp, Homo sapiens
acaggaatgccagga

SEQ ID NO: 622843 - DNA, 15 bp, Homo sapiens
caggaatgccaggag

SEQ ID NO: 622844 - DNA, 15 bp, Homo sapiens
aggaatgccaggagg

SEQ ID NO: 622845 - DNA, 15 bp, Homo sapiens
ggaatgccaggaggc

SEQ ID NO: 622846 - DNA, 15 bp, Homo sapiens
gaatgccaggaggcc

SEQ ID NO: 622847 - DNA, 15 bp, Homo sapiens
aatgccaggaggcct

SEQ ID NO: 622848 - DNA, 15 bp, Homo sapiens
atgccaggaggcctg

SEQ ID NO: 622849 - DNA, 15 bp, Homo sapiens
tgccaggaggcctgc

SEQ ID NO: 622850 - DNA, 15 bp, Homo sapiens
gccaggaggcctgct

SEQ ID NO: 622851 - DNA, 15 bp, Homo sapiens
ccaggaggcctgctg

SEQ ID NO: 622852 - DNA, 15 bp, Homo sapiens
caggaggcctgctga

SEQ ID NO: 622853 - DNA, 15 bp, Homo sapiens
aggaggcctgctgaa

SEQ ID NO: 622854 - DNA, 15 bp, Homo sapiens
ggaggcctgctgaat

SEQ ID NO: 622855 - DNA, 15 bp, Homo sapiens
gaggcctgctgaatg

SEQ ID NO: 622856 - DNA, 15 bp, Homo sapiens
aggcctgctgaatgg

SEQ ID NO: 622857 - DNA, 15 bp, Homo sapiens
ggcctgctgaatggg

SEQ ID NO: 622858 - DNA, 15 bp, Homo sapiens
gcctgctgaatgggg

SEQ ID NO: 622859 - DNA, 15 bp, Homo sapiens
cctgctgaatggggg

SEQ ID NO: 622860 - DNA, 15 bp, Homo sapiens
ctgctgaatgggggg

SEQ ID NO: 622861 - DNA, 15 bp, Homo sapiens
tgctgaatggggggg

SEQ ID NO: 622862 - DNA, 15 bp, Homo sapiens
gctgaatgggggggg

SEQ ID NO: 622863 - DNA, 15 bp, Homo sapiens
ctgaatgggggggga

SEQ ID NO: 622864 - DNA, 15 bp, Homo sapiens
tgaatggggggggac

SEQ ID NO: 622865 - DNA, 15 bp, Homo sapiens
gaatggggggggacc

SEQ ID NO: 622866 - DNA, 15 bp, Homo sapiens
aatggggggggaccc

SEQ ID NO: 622867 - DNA, 15 bp, Homo sapiens
atggggggggaccca

SEQ ID NO: 622868 - DNA, 15 bp, Homo sapiens
tggggggggacccag

SEQ ID NO: 622869 - DNA, 15 bp, Homo sapiens
ggggggggacccagg

SEQ ID NO: 622870 - DNA, 15 bp, Homo sapiens
gggggggacccaggc

SEQ ID NO: 622871 - DNA, 15 bp, Homo sapiens
ggggggacccaggca

SEQ ID NO: 622872 - DNA, 15 bp, Homo sapiens
gggggacccaggcac

SEQ ID NO: 622873 - DNA, 15 bp, Homo sapiens
ggggacccaggcacc

SEQ ID NO: 622874 - DNA, 15 bp, Homo sapiens
gggacccaggcacct

SEQ ID NO: 622875 - DNA, 15 bp, Homo sapiens
ggacccaggcacctg

SEQ ID NO: 622876 - DNA, 15 bp, Homo sapiens
gacccaggcacctgc

SEQ ID NO: 622877 - DNA, 15 bp, Homo sapiens
acccaggcacctgcc

SEQ ID NO: 622878 - DNA, 15 bp, Homo sapiens
cccaggcacctgccc

SEQ ID NO: 622879 - DNA, 15 bp, Homo sapiens
ccaggcacctgccct

SEQ ID NO: 622880 - DNA, 15 bp, Homo sapiens
caggcacctgccctc

SEQ ID NO: 622881 - DNA, 15 bp, Homo sapiens
aggcacctgccctcc

SEQ ID NO: 622882 - DNA, 15 bp, Homo sapiens
ggcacctgccctccc

SEQ ID NO: 622883 - DNA, 15 bp, Homo sapiens
gcacctgccctccca

SEQ ID NO: 622884 - DNA, 15 bp, Homo sapiens
cacctgccctcccag

SEQ ID NO: 622885 - DNA, 15 bp, Homo sapiens
acctgccctcccagc

SEQ ID NO: 622886 - DNA, 15 bp, Homo sapiens
cctgccctcccagcc

SEQ ID NO: 622887 - DNA, 15 bp, Homo sapiens
ctgccctcccagccg

SEQ ID NO: 622888 - DNA, 15 bp, Homo sapiens
tgccctcccagccgg

SEQ ID NO: 622889 - DNA, 15 bp, Homo sapiens
gccctcccagccggc

SEQ ID NO: 622890 - DNA, 15 bp, Homo sapiens
ccctcccagccggca

SEQ ID NO: 622891 - DNA, 15 bp, Homo sapiens
cctcccagccggcac

SEQ ID NO: 622892 - DNA, 15 bp, Homo sapiens
ctcccagccggcact

SEQ ID NO: 622893 - DNA, 15 bp, Homo sapiens
tcccagccggcactg

SEQ ID NO: 622894 - DNA, 15 bp, Homo sapiens
cccagccggcactgc

SEQ ID NO: 622895 - DNA, 15 bp, Homo sapiens
ccagccggcactgcc

SEQ ID NO: 622896 - DNA, 15 bp, Homo sapiens
cagccggcactgccc

SEQ ID NO: 622897 - DNA, 15 bp, Homo sapiens
agccggcactgccca

SEQ ID NO: 622898 - DNA, 15 bp, Homo sapiens
gccggcactgcccac

SEQ ID NO: 622899 - DNA, 15 bp, Homo sapiens
ccggcactgcccaca

SEQ ID NO: 622900 - DNA, 15 bp, Homo sapiens
cggcactgcccacag

SEQ ID NO: 622901 - DNA, 15 bp, Homo sapiens
ggcactgcccacagc

SEQ ID NO: 622902 - DNA, 15 bp, Homo sapiens
gcactgcccacagcc

SEQ ID NO: 622903 - DNA, 15 bp, Homo sapiens
cactgcccacagcca

SEQ ID NO: 622904 - DNA, 15 bp, Homo sapiens
actgcccacagccag

SEQ ID NO: 622905 - DNA, 15 bp, Homo sapiens
ctgcccacagccagc

SEQ ID NO: 622906 - DNA, 15 bp, Homo sapiens
tgcccacagccagct

SEQ ID NO: 622907 - DNA, 15 bp, Homo sapiens
gcccacagccagcta

SEQ ID NO: 622908 - DNA, 15 bp, Homo sapiens
cccacagccagctag

SEQ ID NO: 622909 - DNA, 15 bp, Homo sapiens
ccacagccagctagc

SEQ ID NO: 622910 - DNA, 15 bp, Homo sapiens
cacagccagctagct

SEQ ID NO: 622911 - DNA, 15 bp, Homo sapiens
acagccagctagctc

SEQ ID NO: 622912 - DNA, 15 bp, Homo sapiens
cagccagctagctca

SEQ ID NO: 622913 - DNA, 15 bp, Homo sapiens
agccagctagctcag

SEQ ID NO: 622914 - DNA, 15 bp, Homo sapiens
gccagctagctcagc

SEQ ID NO: 622915 - DNA, 15 bp, Homo sapiens
ccagctagctcagca

SEQ ID NO: 622916 - DNA, 15 bp, Homo sapiens
cagctagctcagcat

SEQ ID NO: 622917 - DNA, 15 bp, Homo sapiens
agctagctcagcatg

SEQ ID NO: 622918 - DNA, 15 bp, Homo sapiens
gctagctcagcatgg

SEQ ID NO: 622919 - DNA, 15 bp, Homo sapiens
ctagctcagcatggc

SEQ ID NO: 622920 - DNA, 15 bp, Homo sapiens
tagctcagcatggct

SEQ ID NO: 622921 - DNA, 15 bp, Homo sapiens
agctcagcatggctc

SEQ ID NO: 622922 - DNA, 15 bp, Homo sapiens
gctcagcatggctcc

SEQ ID NO: 622923 - DNA, 15 bp, Homo sapiens
ctcagcatggctcca

SEQ ID NO: 622924 - DNA, 15 bp, Homo sapiens
tcagcatggctccac

SEQ ID NO: 622925 - DNA, 15 bp, Homo sapiens
cagcatggctccacg

SEQ ID NO: 622926 - DNA, 15 bp, Homo sapiens
agcatggctccacga

SEQ ID NO: 622927 - DNA, 15 bp, Homo sapiens
gcatggctccacgac

SEQ ID NO: 622928 - DNA, 15 bp, Homo sapiens
catggctccacgacc

SEQ ID NO: 622929 - DNA, 15 bp, Homo sapiens
atggctccacgacca

SEQ ID NO: 622930 - DNA, 15 bp, Homo sapiens
tggctccacgaccac

SEQ ID NO: 622931 - DNA, 15 bp, Homo sapiens
ggctccacgaccaca

SEQ ID NO: 622932 - DNA, 15 bp, Homo sapiens
gctccacgaccacaa

SEQ ID NO: 622933 - DNA, 15 bp, Homo sapiens
ctccacgaccacaag

SEQ ID NO: 622934 - DNA, 15 bp, Homo sapiens
tccacgaccacaagc

SEQ ID NO: 622935 - DNA, 15 bp, Homo sapiens
ccacgaccacaagcc

SEQ ID NO: 622936 - DNA, 15 bp, Homo sapiens
cacgaccacaagcct

SEQ ID NO: 622937 - DNA, 15 bp, Homo sapiens
acgaccacaagcctg

SEQ ID NO: 622938 - DNA, 15 bp, Homo sapiens
cgaccacaagcctgc

SEQ ID NO: 622939 - DNA, 15 bp, Homo sapiens
gaccacaagcctgcc

SEQ ID NO: 622940 - DNA, 15 bp, Homo sapiens
accacaagcctgcca

SEQ ID NO: 622941 - DNA, 15 bp, Homo sapiens
ccacaagcctgccat

SEQ ID NO: 622942 - DNA, 15 bp, Homo sapiens
cacaagcctgccatg

SEQ ID NO: 622943 - DNA, 15 bp, Homo sapiens
acaagcctgccatgc

SEQ ID NO: 622944 - DNA, 15 bp, Homo sapiens
caagcctgccatgct

SEQ ID NO: 622945 - DNA, 15 bp, Homo sapiens
aagcctgccatgctc

SEQ ID NO: 622946 - DNA, 15 bp, Homo sapiens
agcctgccatgctcc

SEQ ID NO: 622947 - DNA, 15 bp, Homo sapiens
gcctgccatgctccc

SEQ ID NO: 622948 - DNA, 15 bp, Homo sapiens
cctgccatgctccct

SEQ ID NO: 622949 - DNA, 15 bp, Homo sapiens
ctgccatgctccctc

SEQ ID NO: 622950 - DNA, 15 bp, Homo sapiens
tgccatgctccctca

SEQ ID NO: 622951 - DNA, 15 bp, Homo sapiens
gccatgctccctcag

SEQ ID NO: 622952 - DNA, 15 bp, Homo sapiens
ccatgctccctcagc

SEQ ID NO: 622953 - DNA, 15 bp, Homo sapiens
catgctccctcagct

SEQ ID NO: 622954 - DNA, 15 bp, Homo sapiens
atgctccctcagctg

SEQ ID NO: 622955 - DNA, 15 bp, Homo sapiens
tgctccctcagctgg

SEQ ID NO: 622956 - DNA, 15 bp, Homo sapiens
gctccctcagctggg

SEQ ID NO: 622957 - DNA, 15 bp, Homo sapiens
ctccctcagctggga

SEQ ID NO: 622958 - DNA, 15 bp, Homo sapiens
tccctcagctgggaa

SEQ ID NO: 622959 - DNA, 15 bp, Homo sapiens
ccctcagctgggaat

SEQ ID NO: 622960 - DNA, 15 bp, Homo sapiens
cctcagctgggaatc

SEQ ID NO: 622961 - DNA, 15 bp, Homo sapiens
ctcagctgggaatca

SEQ ID NO: 622962 - DNA, 15 bp, Homo sapiens
tcagctgggaatcac

SEQ ID NO: 622963 - DNA, 15 bp, Homo sapiens
cagctgggaatcaca

SEQ ID NO: 622964 - DNA, 15 bp, Homo sapiens
agctgggaatcacaa

SEQ ID NO: 622965 - DNA, 15 bp, Homo sapiens
gctgggaatcacaat

SEQ ID NO: 622966 - DNA, 15 bp, Homo sapiens
ctgggaatcacaatg

SEQ ID NO: 622967 - DNA, 15 bp, Homo sapiens
tgggaatcacaatgt

SEQ ID NO: 622968 - DNA, 15 bp, Homo sapiens
gggaatcacaatgta

SEQ ID NO: 622969 - DNA, 15 bp, Homo sapiens
ggaatcacaatgtac

SEQ ID NO: 622970 - DNA, 15 bp, Homo sapiens
gaatcacaatgtacc

SEQ ID NO: 622971 - DNA, 15 bp, Homo sapiens
aatcacaatgtaccc

SEQ ID NO: 622972 - DNA, 15 bp, Homo sapiens
atcacaatgtacccc

SEQ ID NO: 622973 - DNA, 15 bp, Homo sapiens
tcacaatgtaccccc

SEQ ID NO: 622974 - DNA, 15 bp, Homo sapiens
cacaatgtaccccct

SEQ ID NO: 622975 - DNA, 15 bp, Homo sapiens
acaatgtaccccctt

SEQ ID NO: 622976 - DNA, 15 bp, Homo sapiens
caatgtacccccttt

SEQ ID NO: 622977 - DNA, 15 bp, Homo sapiens
aatgtaccccctttt

SEQ ID NO: 622978 - DNA, 15 bp, Homo sapiens
atgtacccccttttc

SEQ ID NO: 622979 - DNA, 15 bp, Homo sapiens
tgtacccccttttct

SEQ ID NO: 622980 - DNA, 15 bp, Homo sapiens
gtacccccttttctt

SEQ ID NO: 622981 - DNA, 15 bp, Homo sapiens
tacccccttttctta

SEQ ID NO: 622982 - DNA, 15 bp, Homo sapiens
acccccttttcttag

SEQ ID NO: 622983 - DNA, 15 bp, Homo sapiens
cccccttttcttaga

SEQ ID NO: 622984 - DNA, 15 bp, Homo sapiens
ccccttttcttagag

SEQ ID NO: 622985 - DNA, 15 bp, Homo sapiens
cccttttcttagagg

SEQ ID NO: 622986 - DNA, 15 bp, Homo sapiens
ccttttcttagaggc

SEQ ID NO: 622987 - DNA, 15 bp, Homo sapiens
cttttcttagaggcc

SEQ ID NO: 622988 - DNA, 15 bp, Homo sapiens
ttttcttagaggccc

SEQ ID NO: 622989 - DNA, 15 bp, Homo sapiens
tttcttagaggccca

SEQ ID NO: 622990 - DNA, 15 bp, Homo sapiens
ttcttagaggcccac

SEQ ID NO: 622991 - DNA, 15 bp, Homo sapiens
tcttagaggcccaca

SEQ ID NO: 622992 - DNA, 15 bp, Homo sapiens
cttagaggcccacaa

SEQ ID NO: 622993 - DNA, 15 bp, Homo sapiens
ttagaggcccacaac

SEQ ID NO: 622994 - DNA, 15 bp, Homo sapiens
tagaggcccacaact

SEQ ID NO: 622995 - DNA, 15 bp, Homo sapiens
agaggcccacaactg

SEQ ID NO: 622996 - DNA, 15 bp, Homo sapiens
gaggcccacaactgc

SEQ ID NO: 622997 - DNA, 15 bp, Homo sapiens
aggcccacaactgcg

SEQ ID NO: 622998 - DNA, 15 bp, Homo sapiens
ggcccacaactgcgg

SEQ ID NO: 622999 - DNA, 15 bp, Homo sapiens
gcccacaactgcggc

SEQ ID NO: 623000 - DNA, 15 bp, Homo sapiens
cccacaactgcggct

SEQ ID NO: 623001 - DNA, 15 bp, Homo sapiens
ccacaactgcggctc

SEQ ID NO: 623002 - DNA, 15 bp, Homo sapiens
cacaactgcggctcg

SEQ ID NO: 623003 - DNA, 15 bp, Homo sapiens
acaactgcggctcgt

SEQ ID NO: 623004 - DNA, 15 bp, Homo sapiens
caactgcggctcgtc

SEQ ID NO: 623005 - DNA, 15 bp, Homo sapiens
aactgcggctcgtcc

SEQ ID NO: 623006 - DNA, 15 bp, Homo sapiens
actgcggctcgtcct

SEQ ID NO: 623007 - DNA, 15 bp, Homo sapiens
ctgcggctcgtcctc

SEQ ID NO: 623008 - DNA, 15 bp, Homo sapiens
tgcggctcgtcctcc

SEQ ID NO: 623009 - DNA, 15 bp, Homo sapiens
gcggctcgtcctcca

SEQ ID NO: 623010 - DNA, 15 bp, Homo sapiens
cggctcgtcctccat

SEQ ID NO: 623011 - DNA, 15 bp, Homo sapiens
ggctcgtcctccatc

SEQ ID NO: 623012 - DNA, 15 bp, Homo sapiens
gctcgtcctccatca

SEQ ID NO: 623013 - DNA, 15 bp, Homo sapiens
ctcgtcctccatcat

SEQ ID NO: 623014 - DNA, 15 bp, Homo sapiens
tcgtcctccatcata

SEQ ID NO: 623015 - DNA, 15 bp, Homo sapiens
cgtcctccatcatag

SEQ ID NO: 623016 - DNA, 15 bp, Homo sapiens
gtcctccatcatagg

SEQ ID NO: 623017 - DNA, 15 bp, Homo sapiens
tcctccatcataggc

SEQ ID NO: 623018 - DNA, 15 bp, Homo sapiens
cctccatcataggct

SEQ ID NO: 623019 - DNA, 15 bp, Homo sapiens
ctccatcataggctc

SEQ ID NO: 623020 - DNA, 15 bp, Homo sapiens
tccatcataggctca

SEQ ID NO: 623021 - DNA, 15 bp, Homo sapiens
ccatcataggctcac

SEQ ID NO: 623022 - DNA, 15 bp, Homo sapiens
catcataggctcaca

SEQ ID NO: 623023 - DNA, 15 bp, Homo sapiens
atcataggctcacaa

SEQ ID NO: 623024 - DNA, 15 bp, Homo sapiens
tcataggctcacaag

SEQ ID NO: 623025 - DNA, 15 bp, Homo sapiens
cataggctcacaagc

SEQ ID NO: 623026 - DNA, 15 bp, Homo sapiens
ataggctcacaagca

SEQ ID NO: 623027 - DNA, 15 bp, Homo sapiens
taggctcacaagcat

SEQ ID NO: 623028 - DNA, 15 bp, Homo sapiens
aggctcacaagcatt

SEQ ID NO: 623029 - DNA, 15 bp, Homo sapiens
ggctcacaagcattt

SEQ ID NO: 623030 - DNA, 15 bp, Homo sapiens
gctcacaagcattta

SEQ ID NO: 623031 - DNA, 15 bp, Homo sapiens
ctcacaagcatttat

SEQ ID NO: 623032 - DNA, 15 bp, Homo sapiens
tcacaagcatttatt

SEQ ID NO: 623033 - DNA, 15 bp, Homo sapiens
cacaagcatttattt

SEQ ID NO: 623034 - DNA, 15 bp, Homo sapiens
acaagcatttatttg

SEQ ID NO: 623035 - DNA, 15 bp, Homo sapiens
caagcatttatttgg

SEQ ID NO: 623036 - DNA, 15 bp, Homo sapiens
aagcatttatttggt

SEQ ID NO: 623037 - DNA, 15 bp, Homo sapiens
agcatttatttggtg

SEQ ID NO: 623038 - DNA, 15 bp, Homo sapiens
gcatttatttggtgc

SEQ ID NO: 623039 - DNA, 15 bp, Homo sapiens
catttatttggtgca

SEQ ID NO: 623040 - DNA, 15 bp, Homo sapiens
atttatttggtgcac

SEQ ID NO: 623041 - DNA, 15 bp, Homo sapiens
tttatttggtgcacc

SEQ ID NO: 623042 - DNA, 15 bp, Homo sapiens
ttatttggtgcaccc

SEQ ID NO: 623043 - DNA, 15 bp, Homo sapiens
tatttggtgcacccc

SEQ ID NO: 623044 - DNA, 15 bp, Homo sapiens
atttggtgcacccca

SEQ ID NO: 623045 - DNA, 15 bp, Homo sapiens
tttggtgcaccccaa

SEQ ID NO: 623046 - DNA, 15 bp, Homo sapiens
ttggtgcaccccaaa

SEQ ID NO: 623047 - DNA, 15 bp, Homo sapiens
tggtgcaccccaaac

SEQ ID NO: 623048 - DNA, 15 bp, Homo sapiens
ggtgcaccccaaact

SEQ ID NO: 623049 - DNA, 15 bp, Homo sapiens
gtgcaccccaaactc

SEQ ID NO: 623050 - DNA, 15 bp, Homo sapiens
tgcaccccaaactct

SEQ ID NO: 623051 - DNA, 15 bp, Homo sapiens
gcaccccaaactcta

SEQ ID NO: 623052 - DNA, 15 bp, Homo sapiens
caccccaaactctaa

SEQ ID NO: 623053 - DNA, 15 bp, Homo sapiens
accccaaactctaaa

SEQ ID NO: 623054 - DNA, 15 bp, Homo sapiens
ccccaaactctaaac

SEQ ID NO: 623055 - DNA, 15 bp, Homo sapiens
cccaaactctaaacc

SEQ ID NO: 623056 - DNA, 15 bp, Homo sapiens
ccaaactctaaacca

SEQ ID NO: 623057 - DNA, 15 bp, Homo sapiens
caaactctaaaccag

SEQ ID NO: 623058 - DNA, 15 bp, Homo sapiens
aaactctaaaccagg

SEQ ID NO: 623059 - DNA, 15 bp, Homo sapiens
aactctaaaccaggg

SEQ ID NO: 623060 - DNA, 15 bp, Homo sapiens
actctaaaccagggg

SEQ ID NO: 623061 - DNA, 15 bp, Homo sapiens
ctctaaaccaggggg

SEQ ID NO: 623062 - DNA, 15 bp, Homo sapiens
tctaaaccagggggg

SEQ ID NO: 623063 - DNA, 15 bp, Homo sapiens
ctaaaccaggggggc

SEQ ID NO: 623064 - DNA, 15 bp, Homo sapiens
taaaccaggggggct

SEQ ID NO: 623065 - DNA, 15 bp, Homo sapiens
aaaccaggggggctg

SEQ ID NO: 623066 - DNA, 15 bp, Homo sapiens
aaccaggggggctgg

SEQ ID NO: 623067 - DNA, 15 bp, Homo sapiens
accaggggggctggc

SEQ ID NO: 623068 - DNA, 15 bp, Homo sapiens
ccaggggggctggct

SEQ ID NO: 623069 - DNA, 15 bp, Homo sapiens
caggggggctggctg

SEQ ID NO: 623070 - DNA, 15 bp, Homo sapiens
aggggggctggctgg

SEQ ID NO: 623071 - DNA, 15 bp, Homo sapiens
ggggggctggctggg

SEQ ID NO: 623072 - DNA, 15 bp, Homo sapiens
gggggctggctggga

SEQ ID NO: 623073 - DNA, 15 bp, Homo sapiens
ggggctggctgggag

SEQ ID NO: 623074 - DNA, 15 bp, Homo sapiens
gggctggctgggagc

SEQ ID NO: 623075 - DNA, 15 bp, Homo sapiens
ggctggctgggagct

SEQ ID NO: 623076 - DNA, 15 bp, Homo sapiens
gctggctgggagctg

SEQ ID NO: 623077 - DNA, 15 bp, Homo sapiens
ctggctgggagctgt

SEQ ID NO: 623078 - DNA, 15 bp, Homo sapiens
tggctgggagctgtc

SEQ ID NO: 623079 - DNA, 15 bp, Homo sapiens
ggctgggagctgtca

SEQ ID NO: 623080 - DNA, 15 bp, Homo sapiens
gctgggagctgtcag

SEQ ID NO: 623081 - DNA, 15 bp, Homo sapiens
ctgggagctgtcagg

SEQ ID NO: 623082 - DNA, 15 bp, Homo sapiens
tgggagctgtcaggc

SEQ ID NO: 623083 - DNA, 15 bp, Homo sapiens
gggagctgtcaggct

SEQ ID NO: 623084 - DNA, 15 bp, Homo sapiens
ggagctgtcaggctc

SEQ ID NO: 623085 - DNA, 15 bp, Homo sapiens
gagctgtcaggctcc

SEQ ID NO: 623086 - DNA, 15 bp, Homo sapiens
agctgtcaggctcca

SEQ ID NO: 623087 - DNA, 15 bp, Homo sapiens
gctgtcaggctccag

SEQ ID NO: 623088 - DNA, 15 bp, Homo sapiens
ctgtcaggctccagg

SEQ ID NO: 623089 - DNA, 15 bp, Homo sapiens
tgtcaggctccaggg

SEQ ID NO: 623090 - DNA, 15 bp, Homo sapiens
gtcaggctccagggc

SEQ ID NO: 623091 - DNA, 15 bp, Homo sapiens
tcaggctccagggca

SEQ ID NO: 623092 - DNA, 15 bp, Homo sapiens
caggctccagggcaa

SEQ ID NO: 623093 - DNA, 15 bp, Homo sapiens
aggctccagggcaaa

SEQ ID NO: 623094 - DNA, 15 bp, Homo sapiens
ggctccagggcaaag

SEQ ID NO: 623095 - DNA, 15 bp, Homo sapiens
gctccagggcaaaga

SEQ ID NO: 623096 - DNA, 15 bp, Homo sapiens
ctccagggcaaagaa

SEQ ID NO: 623097 - DNA, 15 bp, Homo sapiens
tccagggcaaagaac

SEQ ID NO: 623098 - DNA, 15 bp, Homo sapiens
ccagggcaaagaacc

SEQ ID NO: 623099 - DNA, 15 bp, Homo sapiens
cagggcaaagaaccc

SEQ ID NO: 623100 - DNA, 15 bp, Homo sapiens
agggcaaagaacccc

SEQ ID NO: 623101 - DNA, 15 bp, Homo sapiens
gggcaaagaacccca

SEQ ID NO: 623102 - DNA, 15 bp, Homo sapiens
ggcaaagaaccccat

SEQ ID NO: 623103 - DNA, 15 bp, Homo sapiens
gcaaagaaccccatt

SEQ ID NO: 623104 - DNA, 15 bp, Homo sapiens
caaagaaccccatta

SEQ ID NO: 623105 - DNA, 15 bp, Homo sapiens
aaagaaccccattag

SEQ ID NO: 623106 - DNA, 15 bp, Homo sapiens
aagaaccccattaga

SEQ ID NO: 623107 - DNA, 15 bp, Homo sapiens
agaaccccattagag

SEQ ID NO: 623108 - DNA, 15 bp, Homo sapiens
gaaccccattagagc

SEQ ID NO: 623109 - DNA, 15 bp, Homo sapiens
aaccccattagagca

SEQ ID NO: 623110 - DNA, 15 bp, Homo sapiens
accccattagagcag

SEQ ID NO: 623111 - DNA, 15 bp, Homo sapiens
ccccattagagcagt

SEQ ID NO: 623112 - DNA, 15 bp, Homo sapiens
cccattagagcagtc

SEQ ID NO: 623113 - DNA, 15 bp, Homo sapiens
ccattagagcagtca

SEQ ID NO: 623114 - DNA, 15 bp, Homo sapiens
cattagagcagtcaa

SEQ ID NO: 623115 - DNA, 15 bp, Homo sapiens
attagagcagtcaat

SEQ ID NO: 623116 - DNA, 15 bp, Homo sapiens
ttagagcagtcaatc

SEQ ID NO: 623117 - DNA, 15 bp, Homo sapiens
tagagcagtcaatcc

SEQ ID NO: 623118 - DNA, 15 bp, Homo sapiens
agagcagtcaatccc

SEQ ID NO: 623119 - DNA, 15 bp, Homo sapiens
gagcagtcaatcccg

SEQ ID NO: 623120 - DNA, 15 bp, Homo sapiens
agcagtcaatcccgc

SEQ ID NO: 623121 - DNA, 15 bp, Homo sapiens
gcagtcaatcccgcc

SEQ ID NO: 623122 - DNA, 15 bp, Homo sapiens
cagtcaatcccgccc

SEQ ID NO: 623123 - DNA, 15 bp, Homo sapiens
agtcaatcccgccca

SEQ ID NO: 623124 - DNA, 15 bp, Homo sapiens
gtcaatcccgcccac

SEQ ID NO: 623125 - DNA, 15 bp, Homo sapiens
tcaatcccgcccaca

SEQ ID NO: 623126 - DNA, 15 bp, Homo sapiens
caatcccgcccacag

SEQ ID NO: 623127 - DNA, 15 bp, Homo sapiens
aatcccgcccacagc

SEQ ID NO: 623128 - DNA, 15 bp, Homo sapiens
atcccgcccacagcc

SEQ ID NO: 623129 - DNA, 15 bp, Homo sapiens
tcccgcccacagcct

SEQ ID NO: 623130 - DNA, 15 bp, Homo sapiens
cccgcccacagcctc

SEQ ID NO: 623131 - DNA, 15 bp, Homo sapiens
ccgcccacagcctca

SEQ ID NO: 623132 - DNA, 15 bp, Homo sapiens
cgcccacagcctcac

SEQ ID NO: 623133 - DNA, 15 bp, Homo sapiens
gcccacagcctcacc

SEQ ID NO: 623134 - DNA, 15 bp, Homo sapiens
cccacagcctcaccc

SEQ ID NO: 623135 - DNA, 15 bp, Homo sapiens
ccacagcctcaccca

SEQ ID NO: 623136 - DNA, 15 bp, Homo sapiens
cacagcctcacccac

SEQ ID NO: 623137 - DNA, 15 bp, Homo sapiens
acagcctcacccact

SEQ ID NO: 623138 - DNA, 15 bp, Homo sapiens
cagcctcacccactc

SEQ ID NO: 623139 - DNA, 15 bp, Homo sapiens
agcctcacccactcc

SEQ ID NO: 623140 - DNA, 15 bp, Homo sapiens
gcctcacccactccc

SEQ ID NO: 623141 - DNA, 15 bp, Homo sapiens
cctcacccactcccc

SEQ ID NO: 623142 - DNA, 15 bp, Homo sapiens
ctcacccactccccc

SEQ ID NO: 623143 - DNA, 15 bp, Homo sapiens
tcacccactccccct

SEQ ID NO: 623144 - DNA, 15 bp, Homo sapiens
cacccactccccctt

SEQ ID NO: 623145 - DNA, 15 bp, Homo sapiens
acccactcccccttc

SEQ ID NO: 623146 - DNA, 15 bp, Homo sapiens
cccactcccccttct

SEQ ID NO: 623147 - DNA, 15 bp, Homo sapiens
ccactcccccttctc

SEQ ID NO: 623148 - DNA, 15 bp, Homo sapiens
cactcccccttctcc

SEQ ID NO: 623149 - DNA, 15 bp, Homo sapiens
actcccccttctccc

SEQ ID NO: 623150 - DNA, 15 bp, Homo sapiens
ctcccccttctcccc

SEQ ID NO: 623151 - DNA, 15 bp, Homo sapiens
tcccccttctcccct

SEQ ID NO: 623152 - DNA, 15 bp, Homo sapiens
cccccttctcccctc

SEQ ID NO: 623153 - DNA, 15 bp, Homo sapiens
ccccttctcccctcc

SEQ ID NO: 623154 - DNA, 15 bp, Homo sapiens
cccttctcccctccc

SEQ ID NO: 623155 - DNA, 15 bp, Homo sapiens
ccttctcccctcccc

SEQ ID NO: 623156 - DNA, 15 bp, Homo sapiens
cttctcccctccccc

SEQ ID NO: 623157 - DNA, 15 bp, Homo sapiens
ttctcccctcccccc

SEQ ID NO: 623158 - DNA, 15 bp, Homo sapiens
tctcccctcccccct

SEQ ID NO: 623159 - DNA, 15 bp, Homo sapiens
ctcccctcccccctt

SEQ ID NO: 623160 - DNA, 15 bp, Homo sapiens
tcccctccccccttc

SEQ ID NO: 623161 - DNA, 15 bp, Homo sapiens
cccctccccccttca

SEQ ID NO: 623162 - DNA, 15 bp, Homo sapiens
ccctccccccttcaa

SEQ ID NO: 623163 - DNA, 15 bp, Homo sapiens
cctccccccttcaaa

SEQ ID NO: 623164 - DNA, 15 bp, Homo sapiens
ctccccccttcaaac

SEQ ID NO: 623165 - DNA, 15 bp, Homo sapiens
tccccccttcaaacc

SEQ ID NO: 623166 - DNA, 15 bp, Homo sapiens
ccccccttcaaaccc

SEQ ID NO: 623167 - DNA, 15 bp, Homo sapiens
cccccttcaaaccca

SEQ ID NO: 623168 - DNA, 15 bp, Homo sapiens
ccccttcaaacccag

SEQ ID NO: 623169 - DNA, 15 bp, Homo sapiens
cccttcaaacccagc

SEQ ID NO: 623170 - DNA, 15 bp, Homo sapiens
ccttcaaacccagct

SEQ ID NO: 623171 - DNA, 15 bp, Homo sapiens
cttcaaacccagctc

SEQ ID NO: 623172 - DNA, 15 bp, Homo sapiens
ttcaaacccagctcc

SEQ ID NO: 623173 - DNA, 15 bp, Homo sapiens
tcaaacccagctcca

SEQ ID NO: 623174 - DNA, 15 bp, Homo sapiens
caaacccagctccag

SEQ ID NO: 623175 - DNA, 15 bp, Homo sapiens
aaacccagctccagg

SEQ ID NO: 623176 - DNA, 15 bp, Homo sapiens
aacccagctccaggc

SEQ ID NO: 623177 - DNA, 15 bp, Homo sapiens
acccagctccaggct

SEQ ID NO: 623178 - DNA, 15 bp, Homo sapiens
cccagctccaggctc

SEQ ID NO: 623179 - DNA, 15 bp, Homo sapiens
ccagctccaggctcc

SEQ ID NO: 623180 - DNA, 15 bp, Homo sapiens
cagctccaggctccc

SEQ ID NO: 623181 - DNA, 15 bp, Homo sapiens
agctccaggctccca

SEQ ID NO: 623182 - DNA, 15 bp, Homo sapiens
gctccaggctcccag

SEQ ID NO: 623183 - DNA, 15 bp, Homo sapiens
ctccaggctcccagc

SEQ ID NO: 623184 - DNA, 15 bp, Homo sapiens
tccaggctcccagcc

SEQ ID NO: 623185 - DNA, 15 bp, Homo sapiens
ccaggctcccagcct

SEQ ID NO: 623186 - DNA, 15 bp, Homo sapiens
caggctcccagcctc

SEQ ID NO: 623187 - DNA, 15 bp, Homo sapiens
aggctcccagcctcc

SEQ ID NO: 623188 - DNA, 15 bp, Homo sapiens
ggctcccagcctccg

SEQ ID NO: 623189 - DNA, 15 bp, Homo sapiens
gctcccagcctccgg

SEQ ID NO: 623190 - DNA, 15 bp, Homo sapiens
ctcccagcctccggt

SEQ ID NO: 623191 - DNA, 15 bp, Homo sapiens
tcccagcctccggtc

SEQ ID NO: 623192 - DNA, 15 bp, Homo sapiens
cccagcctccggtcc

SEQ ID NO: 623193 - DNA, 15 bp, Homo sapiens
ccagcctccggtccc

SEQ ID NO: 623194 - DNA, 15 bp, Homo sapiens
cagcctccggtcccg

SEQ ID NO: 623195 - DNA, 15 bp, Homo sapiens
agcctccggtcccgg

SEQ ID NO: 623196 - DNA, 15 bp, Homo sapiens
gcctccggtcccggc

SEQ ID NO: 623197 - DNA, 15 bp, Homo sapiens
cctccggtcccggcc

SEQ ID NO: 623198 - DNA, 15 bp, Homo sapiens
ctccggtcccggcct

SEQ ID NO: 623199 - DNA, 15 bp, Homo sapiens
tccggtcccggccta

SEQ ID NO: 623200 - DNA, 15 bp, Homo sapiens
ccggtcccggcctag

SEQ ID NO: 623201 - DNA, 15 bp, Homo sapiens
cggtcccggcctagg

SEQ ID NO: 623202 - DNA, 15 bp, Homo sapiens
ggtcccggcctaggg

SEQ ID NO: 623203 - DNA, 15 bp, Homo sapiens
gtcccggcctagggt

SEQ ID NO: 623204 - DNA, 15 bp, Homo sapiens
tcccggcctagggtg

SEQ ID NO: 623205 - DNA, 15 bp, Homo sapiens
cccggcctagggtgg

SEQ ID NO: 623206 - DNA, 15 bp, Homo sapiens
ccggcctagggtggc

SEQ ID NO: 623207 - DNA, 15 bp, Homo sapiens
cggcctagggtggca

SEQ ID NO: 623208 - DNA, 15 bp, Homo sapiens
ggcctagggtggcag

SEQ ID NO: 623209 - DNA, 15 bp, Homo sapiens
gcctagggtggcagc

SEQ ID NO: 623210 - DNA, 15 bp, Homo sapiens
cctagggtggcagcg

SEQ ID NO: 623211 - DNA, 15 bp, Homo sapiens
ctagggtggcagcgg

SEQ ID NO: 623212 - DNA, 15 bp, Homo sapiens
tagggtggcagcgga

SEQ ID NO: 623213 - DNA, 15 bp, Homo sapiens
agggtggcagcggat

SEQ ID NO: 623214 - DNA, 15 bp, Homo sapiens
gggtggcagcggatg

SEQ ID NO: 623215 - DNA, 15 bp, Homo sapiens
ggtggcagcggatgc

SEQ ID NO: 623216 - DNA, 15 bp, Homo sapiens
gtggcagcggatgcc

SEQ ID NO: 623217 - DNA, 15 bp, Homo sapiens
tggcagcggatgccg

SEQ ID NO: 623218 - DNA, 15 bp, Homo sapiens
ggcagcggatgccgg

SEQ ID NO: 623219 - DNA, 15 bp, Homo sapiens
gcagcggatgccggc

SEQ ID NO: 623220 - DNA, 15 bp, Homo sapiens
cagcggatgccggcg

SEQ ID NO: 623221 - DNA, 15 bp, Homo sapiens
agcggatgccggcgc

SEQ ID NO: 623222 - DNA, 15 bp, Homo sapiens
gcggatgccggcgcc

SEQ ID NO: 623223 - DNA, 15 bp, Homo sapiens
cggatgccggcgccc

SEQ ID NO: 623224 - DNA, 15 bp, Homo sapiens
ggatgccggcgcccc

SEQ ID NO: 623225 - DNA, 15 bp, Homo sapiens
gatgccggcgccccc

SEQ ID NO: 623226 - DNA, 15 bp, Homo sapiens
atgccggcgccccca

SEQ ID NO: 623227 - DNA, 15 bp, Homo sapiens
tgccggcgcccccac

SEQ ID NO: 623228 - DNA, 15 bp, Homo sapiens
gccggcgcccccacc

SEQ ID NO: 623229 - DNA, 15 bp, Homo sapiens
ccggcgcccccaccc

SEQ ID NO: 623230 - DNA, 15 bp, Homo sapiens
cggcgcccccacccc

SEQ ID NO: 623231 - DNA, 15 bp, Homo sapiens
ggcgcccccaccccg

SEQ ID NO: 623232 - DNA, 15 bp, Homo sapiens
gcgcccccaccccgc

SEQ ID NO: 623233 - DNA, 15 bp, Homo sapiens
cgcccccaccccgcc

SEQ ID NO: 623234 - DNA, 15 bp, Homo sapiens
gcccccaccccgcca

SEQ ID NO: 623235 - DNA, 15 bp, Homo sapiens
cccccaccccgccag

SEQ ID NO: 623236 - DNA, 15 bp, Homo sapiens
ccccaccccgccagg

SEQ ID NO: 623237 - DNA, 15 bp, Homo sapiens
cccaccccgccaggg

SEQ ID NO: 623238 - DNA, 15 bp, Homo sapiens
ccaccccgccagggt

SEQ ID NO: 623239 - DNA, 15 bp, Homo sapiens
caccccgccagggtc

SEQ ID NO: 623240 - DNA, 15 bp, Homo sapiens
accccgccagggtcg

SEQ ID NO: 623241 - DNA, 15 bp, Homo sapiens
ccccgccagggtcgg

SEQ ID NO: 623242 - DNA, 15 bp, Homo sapiens
cccgccagggtcggg

SEQ ID NO: 623243 - DNA, 15 bp, Homo sapiens
ccgccagggtcggga

SEQ ID NO: 623244 - DNA, 15 bp, Homo sapiens
cgccagggtcgggag

SEQ ID NO: 623245 - DNA, 15 bp, Homo sapiens
gccagggtcgggagc

SEQ ID NO: 623246 - DNA, 15 bp, Homo sapiens
ccagggtcgggagcg

SEQ ID NO: 623247 - DNA, 15 bp, Homo sapiens
cagggtcgggagcga

SEQ ID NO: 623248 - DNA, 15 bp, Homo sapiens
agggtcgggagcgag

SEQ ID NO: 623249 - DNA, 15 bp, Homo sapiens
gggtcgggagcgagc

SEQ ID NO: 623250 - DNA, 15 bp, Homo sapiens
ggtcgggagcgagca

SEQ ID NO: 623251 - DNA, 15 bp, Homo sapiens
gtcgggagcgagcaa

SEQ ID NO: 623252 - DNA, 15 bp, Homo sapiens
tcgggagcgagcaac

SEQ ID NO: 623253 - DNA, 15 bp, Homo sapiens
cgggagcgagcaacc

SEQ ID NO: 623254 - DNA, 15 bp, Homo sapiens
gggagcgagcaaccc

SEQ ID NO: 623255 - DNA, 15 bp, Homo sapiens
ggagcgagcaacccg

SEQ ID NO: 623256 - DNA, 15 bp, Homo sapiens
gagcgagcaacccgc

SEQ ID NO: 623257 - DNA, 15 bp, Homo sapiens
agcgagcaacccgca

SEQ ID NO: 623258 - DNA, 15 bp, Homo sapiens
gcgagcaacccgcag

SEQ ID NO: 623259 - DNA, 15 bp, Homo sapiens
cgagcaacccgcagg

SEQ ID NO: 623260 - DNA, 15 bp, Homo sapiens
gagcaacccgcaggg

SEQ ID NO: 623261 - DNA, 15 bp, Homo sapiens
agcaacccgcagggg

SEQ ID NO: 623262 - DNA, 15 bp, Homo sapiens
gcaacccgcaggggg

SEQ ID NO: 623263 - DNA, 15 bp, Homo sapiens
caacccgcagggggc

SEQ ID NO: 623264 - DNA, 15 bp, Homo sapiens
aacccgcagggggct

SEQ ID NO: 623265 - DNA, 15 bp, Homo sapiens
acccgcagggggctg

SEQ ID NO: 623266 - DNA, 15 bp, Homo sapiens
cccgcagggggctgc

SEQ ID NO: 623267 - DNA, 15 bp, Homo sapiens
ccgcagggggctgcg

SEQ ID NO: 623268 - DNA, 15 bp, Homo sapiens
cgcagggggctgcgg

SEQ ID NO: 623269 - DNA, 15 bp, Homo sapiens
gcagggggctgcgga

SEQ ID NO: 623270 - DNA, 15 bp, Homo sapiens
cagggggctgcggag

SEQ ID NO: 623271 - DNA, 15 bp, Homo sapiens
agggggctgcggagc

SEQ ID NO: 623272 - DNA, 15 bp, Homo sapiens
gggggctgcggagca

SEQ ID NO: 623273 - DNA, 15 bp, Homo sapiens
ggggctgcggagcag

SEQ ID NO: 623274 - DNA, 15 bp, Homo sapiens
gggctgcggagcagg

SEQ ID NO: 623275 - DNA, 15 bp, Homo sapiens
ggctgcggagcaggc

SEQ ID NO: 623276 - DNA, 15 bp, Homo sapiens
gctgcggagcaggcg

SEQ ID NO: 623277 - DNA, 15 bp, Homo sapiens
ctgcggagcaggcgc

SEQ ID NO: 623278 - DNA, 15 bp, Homo sapiens
tgcggagcaggcgcc

SEQ ID NO: 623279 - DNA, 15 bp, Homo sapiens
gcggagcaggcgccc

SEQ ID NO: 623280 - DNA, 15 bp, Homo sapiens
cggagcaggcgcccg

SEQ ID NO: 623281 - DNA, 15 bp, Homo sapiens
ggagcaggcgcccgc

SEQ ID NO: 623282 - DNA, 15 bp, Homo sapiens
gagcaggcgcccgcc

SEQ ID NO: 623283 - DNA, 15 bp, Homo sapiens
agcaggcgcccgccc

SEQ ID NO: 623284 - DNA, 15 bp, Homo sapiens
gcaggcgcccgcccc

SEQ ID NO: 623285 - DNA, 15 bp, Homo sapiens
caggcgcccgcccca

SEQ ID NO: 623286 - DNA, 15 bp, Homo sapiens
aggcgcccgccccag

SEQ ID NO: 623287 - DNA, 15 bp, Homo sapiens
ggcgcccgccccagc

SEQ ID NO: 623288 - DNA, 15 bp, Homo sapiens
gcgcccgccccagcc

SEQ ID NO: 623289 - DNA, 15 bp, Homo sapiens
cgcccgccccagccc

SEQ ID NO: 623290 - DNA, 15 bp, Homo sapiens
gcccgccccagcccg

SEQ ID NO: 623291 - DNA, 15 bp, Homo sapiens
cccgccccagcccgc

SEQ ID NO: 623292 - DNA, 15 bp, Homo sapiens
ccgccccagcccgcc

SEQ ID NO: 623293 - DNA, 15 bp, Homo sapiens
cgccccagcccgccc

SEQ ID NO: 623294 - DNA, 15 bp, Homo sapiens
gccccagcccgcccc

SEQ ID NO: 623295 - DNA, 15 bp, Homo sapiens
ccccagcccgcccct

SEQ ID NO: 623296 - DNA, 15 bp, Homo sapiens
cccagcccgcccctg

SEQ ID NO: 623297 - DNA, 15 bp, Homo sapiens
ccagcccgcccctgg

SEQ ID NO: 623298 - DNA, 15 bp, Homo sapiens
cagcccgcccctggg

SEQ ID NO: 623299 - DNA, 15 bp, Homo sapiens
agcccgcccctgggc

SEQ ID NO: 623300 - DNA, 15 bp, Homo sapiens
gcccgcccctgggcg

SEQ ID NO: 623301 - DNA, 15 bp, Homo sapiens
cccgcccctgggcgg

SEQ ID NO: 623302 - DNA, 15 bp, Homo sapiens
ccgcccctgggcggg

SEQ ID NO: 623303 - DNA, 15 bp, Homo sapiens
cgcccctgggcgggt

SEQ ID NO: 623304 - DNA, 15 bp, Homo sapiens
gcccctgggcgggtg

SEQ ID NO: 623305 - DNA, 15 bp, Homo sapiens
cccctgggcgggtgt

SEQ ID NO: 623306 - DNA, 15 bp, Homo sapiens
ccctgggcgggtgtc

SEQ ID NO: 623307 - DNA, 15 bp, Homo sapiens
cctgggcgggtgtct

SEQ ID NO: 623308 - DNA, 15 bp, Homo sapiens
ctgggcgggtgtctt

SEQ ID NO: 623309 - DNA, 15 bp, Homo sapiens
tgggcgggtgtcttc

SEQ ID NO: 623310 - DNA, 15 bp, Homo sapiens
gggcgggtgtcttcg

SEQ ID NO: 623311 - DNA, 15 bp, Homo sapiens
ggcgggtgtcttcgg

SEQ ID NO: 623312 - DNA, 15 bp, Homo sapiens
gcgggtgtcttcggt

SEQ ID NO: 623313 - DNA, 15 bp, Homo sapiens
cgggtgtcttcggta

SEQ ID NO: 623314 - DNA, 15 bp, Homo sapiens
gggtgtcttcggtag

SEQ ID NO: 623315 - DNA, 15 bp, Homo sapiens
ggtgtcttcggtaga

SEQ ID NO: 623316 - DNA, 15 bp, Homo sapiens
gtgtcttcggtagac

SEQ ID NO: 623317 - DNA, 15 bp, Homo sapiens
tgtcttcggtagaca

SEQ ID NO: 623318 - DNA, 15 bp, Homo sapiens
gtcttcggtagacaa

SEQ ID NO: 623319 - DNA, 15 bp, Homo sapiens
tcttcggtagacaat

SEQ ID NO: 623320 - DNA, 15 bp, Homo sapiens
cttcggtagacaatg

SEQ ID NO: 623321 - DNA, 15 bp, Homo sapiens
ttcggtagacaatgg

SEQ ID NO: 623322 - DNA, 15 bp, Homo sapiens
tcggtagacaatggc

SEQ ID NO: 623323 - DNA, 15 bp, Homo sapiens
cggtagacaatggct

SEQ ID NO: 623324 - DNA, 15 bp, Homo sapiens
ggtagacaatggctc

SEQ ID NO: 623325 - DNA, 15 bp, Homo sapiens
gtagacaatggctca

SEQ ID NO: 623326 - DNA, 15 bp, Homo sapiens
tagacaatggctcag

SEQ ID NO: 623327 - DNA, 15 bp, Homo sapiens
agacaatggctcagg

SEQ ID NO: 623328 - DNA, 15 bp, Homo sapiens
gacaatggctcaggc

SEQ ID NO: 623329 - DNA, 15 bp, Homo sapiens
acaatggctcaggca

SEQ ID NO: 623330 - DNA, 15 bp, Homo sapiens
caatggctcaggcag

SEQ ID NO: 623331 - DNA, 15 bp, Homo sapiens
aatggctcaggcagc

SEQ ID NO: 623332 - DNA, 15 bp, Homo sapiens
atggctcaggcagca

SEQ ID NO: 623333 - DNA, 15 bp, Homo sapiens
tggctcaggcagcag

SEQ ID NO: 623334 - DNA, 15 bp, Homo sapiens
ggctcaggcagcagc

SEQ ID NO: 623335 - DNA, 15 bp, Homo sapiens
gctcaggcagcagcg

SEQ ID NO: 623336 - DNA, 15 bp, Homo sapiens
ctcaggcagcagcgc

SEQ ID NO: 623337 - DNA, 15 bp, Homo sapiens
tcaggcagcagcgcc

SEQ ID NO: 623338 - DNA, 15 bp, Homo sapiens
caggcagcagcgcct

SEQ ID NO: 623339 - DNA, 15 bp, Homo sapiens
aggcagcagcgcctc

SEQ ID NO: 623340 - DNA, 15 bp, Homo sapiens
ggcagcagcgcctcg

SEQ ID NO: 623341 - DNA, 15 bp, Homo sapiens
gcagcagcgcctcgc

SEQ ID NO: 623342 - DNA, 15 bp, Homo sapiens
cagcagcgcctcgcg

SEQ ID NO: 623343 - DNA, 15 bp, Homo sapiens
agcagcgcctcgcgg

SEQ ID NO: 623344 - DNA, 15 bp, Homo sapiens
gcagcgcctcgcgga

SEQ ID NO: 623345 - DNA, 15 bp, Homo sapiens
cagcgcctcgcggac

SEQ ID NO: 623346 - DNA, 15 bp, Homo sapiens
agcgcctcgcggacc

SEQ ID NO: 623347 - DNA, 15 bp, Homo sapiens
gcgcctcgcggacca

SEQ ID NO: 623348 - DNA, 15 bp, Homo sapiens
cgcctcgcggaccag

SEQ ID NO: 623349 - DNA, 15 bp, Homo sapiens
gcctcgcggaccagg

SEQ ID NO: 623350 - DNA, 15 bp, Homo sapiens
cctcgcggaccagga

SEQ ID NO: 623351 - DNA, 15 bp, Homo sapiens
ctcgcggaccaggag

SEQ ID NO: 623352 - DNA, 15 bp, Homo sapiens
tcgcggaccaggagg

SEQ ID NO: 623353 - DNA, 15 bp, Homo sapiens
cgcggaccaggaggg

SEQ ID NO: 623354 - DNA, 15 bp, Homo sapiens
gcggaccaggaggga

SEQ ID NO: 623355 - DNA, 15 bp, Homo sapiens
cggaccaggagggag

SEQ ID NO: 623356 - DNA, 15 bp, Homo sapiens
ggaccaggagggaga

SEQ ID NO: 623357 - DNA, 15 bp, Homo sapiens
gaccaggagggagaa

SEQ ID NO: 623358 - DNA, 15 bp, Homo sapiens
accaggagggagaaa

SEQ ID NO: 623359 - DNA, 15 bp, Homo sapiens
ccaggagggagaaaa

SEQ ID NO: 623360 - DNA, 15 bp, Homo sapiens
caggagggagaaaaa

SEQ ID NO: 623361 - DNA, 15 bp, Homo sapiens
aggagggagaaaaac

SEQ ID NO: 623362 - DNA, 15 bp, Homo sapiens
ggagggagaaaaaca

SEQ ID NO: 623363 - DNA, 15 bp, Homo sapiens
gagggagaaaaacaa

SEQ ID NO: 623364 - DNA, 15 bp, Homo sapiens
agggagaaaaacaaa

SEQ ID NO: 623365 - DNA, 15 bp, Homo sapiens
gggagaaaaacaaat

SEQ ID NO: 623366 - DNA, 15 bp, Homo sapiens
ggagaaaaacaaata

SEQ ID NO: 623367 - DNA, 15 bp, Homo sapiens
gagaaaaacaaatag

SEQ ID NO: 623368 - DNA, 15 bp, Homo sapiens
agaaaaacaaatagg

SEQ ID NO: 623369 - DNA, 15 bp, Homo sapiens
gaaaaacaaataggg

SEQ ID NO: 623370 - DNA, 15 bp, Homo sapiens
aaaaacaaataggga

SEQ ID NO: 623371 - DNA, 15 bp, Homo sapiens
aaaacaaatagggag

SEQ ID NO: 623372 - DNA, 15 bp, Homo sapiens
aaacaaatagggaga

SEQ ID NO: 623373 - DNA, 15 bp, Homo sapiens
aacaaatagggagag

SEQ ID NO: 623374 - DNA, 15 bp, Homo sapiens
acaaatagggagagg

SEQ ID NO: 623375 - DNA, 15 bp, Homo sapiens
caaatagggagaggg

SEQ ID NO: 623376 - DNA, 15 bp, Homo sapiens
aaatagggagagggc

SEQ ID NO: 623377 - DNA, 15 bp, Homo sapiens
aatagggagagggcg

SEQ ID NO: 623378 - DNA, 15 bp, Homo sapiens
atagggagagggcgg

SEQ ID NO: 623379 - DNA, 15 bp, Homo sapiens
tagggagagggcggc

SEQ ID NO: 623380 - DNA, 15 bp, Homo sapiens
agggagagggcggcg

SEQ ID NO: 623381 - DNA, 15 bp, Homo sapiens
gggagagggcggcgg

SEQ ID NO: 623382 - DNA, 15 bp, Homo sapiens
ggagagggcggcggc

SEQ ID NO: 623383 - DNA, 15 bp, Homo sapiens
gagagggcggcggcg

SEQ ID NO: 623384 - DNA, 15 bp, Homo sapiens
agagggcggcggcgc

SEQ ID NO: 623385 - DNA, 15 bp, Homo sapiens
gagggcggcggcgca

SEQ ID NO: 623386 - DNA, 15 bp, Homo sapiens
agggcggcggcgcag

SEQ ID NO: 623387 - DNA, 15 bp, Homo sapiens
gggcggcggcgcaga

SEQ ID NO: 623388 - DNA, 15 bp, Homo sapiens
ggcggcggcgcagat

SEQ ID NO: 623389 - DNA, 15 bp, Homo sapiens
gcggcggcgcagatc

SEQ ID NO: 623390 - DNA, 15 bp, Homo sapiens
cggcggcgcagatcc

SEQ ID NO: 623391 - DNA, 15 bp, Homo sapiens
ggcggcgcagatcct

SEQ ID NO: 623392 - DNA, 15 bp, Homo sapiens
gcggcgcagatcctg

SEQ ID NO: 623393 - DNA, 15 bp, Homo sapiens
cggcgcagatcctgg

SEQ ID NO: 623394 - DNA, 15 bp, Homo sapiens
ggcgcagatcctggg

SEQ ID NO: 623395 - DNA, 15 bp, Homo sapiens
gcgcagatcctgggg

SEQ ID NO: 623396 - DNA, 15 bp, Homo sapiens
cgcagatcctgggga

SEQ ID NO: 623397 - DNA, 15 bp, Homo sapiens
gcagatcctggggac

SEQ ID NO: 623398 - DNA, 15 bp, Homo sapiens
cagatcctggggacc

SEQ ID NO: 623399 - DNA, 15 bp, Homo sapiens
agatcctggggaccc

SEQ ID NO: 623400 - DNA, 15 bp, Homo sapiens
gatcctggggaccct

SEQ ID NO: 623401 - DNA, 15 bp, Homo sapiens
atcctggggaccctc

SEQ ID NO: 623402 - DNA, 15 bp, Homo sapiens
tcctggggaccctcg

SEQ ID NO: 623403 - DNA, 15 bp, Homo sapiens
cctggggaccctcgc

SEQ ID NO: 623404 - DNA, 15 bp, Homo sapiens
ctggggaccctcgca

SEQ ID NO: 623405 - DNA, 15 bp, Homo sapiens
tggggaccctcgcac

SEQ ID NO: 623406 - DNA, 15 bp, Homo sapiens
ggggaccctcgcact

SEQ ID NO: 623407 - DNA, 15 bp, Homo sapiens
gggaccctcgcacta

SEQ ID NO: 623408 - DNA, 15 bp, Homo sapiens
ggaccctcgcactac

SEQ ID NO: 623409 - DNA, 15 bp, Homo sapiens
gaccctcgcactacc

SEQ ID NO: 623410 - DNA, 15 bp, Homo sapiens
accctcgcactaccc

SEQ ID NO: 623411 - DNA, 15 bp, Homo sapiens
ccctcgcactaccca

SEQ ID NO: 623412 - DNA, 15 bp, Homo sapiens
cctcgcactacccat

SEQ ID NO: 623413 - DNA, 15 bp, Homo sapiens
ctcgcactacccatt

SEQ ID NO: 623414 - DNA, 15 bp, Homo sapiens
tcgcactacccattg

SEQ ID NO: 623415 - DNA, 15 bp, Homo sapiens
cgcactacccattgt

SEQ ID NO: 623416 - DNA, 15 bp, Homo sapiens
gcactacccattgtg

SEQ ID NO: 623417 - DNA, 15 bp, Homo sapiens
cactacccattgtgt

SEQ ID NO: 623418 - DNA, 15 bp, Homo sapiens
actacccattgtgtc

SEQ ID NO: 623419 - DNA, 15 bp, Homo sapiens
ctacccattgtgtct

SEQ ID NO: 623420 - DNA, 15 bp, Homo sapiens
tacccattgtgtctc

SEQ ID NO: 623421 - DNA, 15 bp, Homo sapiens
acccattgtgtctcc

SEQ ID NO: 623422 - DNA, 15 bp, Homo sapiens
cccattgtgtctccc

SEQ ID NO: 623423 - DNA, 15 bp, Homo sapiens
ccattgtgtctcccc

SEQ ID NO: 623424 - DNA, 15 bp, Homo sapiens
cattgtgtctcccca

SEQ ID NO: 623425 - DNA, 15 bp, Homo sapiens
attgtgtctccccaa

SEQ ID NO: 623426 - DNA, 15 bp, Homo sapiens
ttgtgtctccccaag

SEQ ID NO: 623427 - DNA, 15 bp, Homo sapiens
tgtgtctccccaaga

SEQ ID NO: 623428 - DNA, 15 bp, Homo sapiens
gtgtctccccaagac

SEQ ID NO: 623429 - DNA, 15 bp, Homo sapiens
tgtctccccaagacc

SEQ ID NO: 623430 - DNA, 15 bp, Homo sapiens
gtctccccaagaccc

SEQ ID NO: 623431 - DNA, 15 bp, Homo sapiens
tctccccaagacccc

SEQ ID NO: 623432 - DNA, 15 bp, Homo sapiens
ctccccaagaccccc

SEQ ID NO: 623433 - DNA, 15 bp, Homo sapiens
tccccaagacccccg

SEQ ID NO: 623434 - DNA, 15 bp, Homo sapiens
ccccaagacccccgc

SEQ ID NO: 623435 - DNA, 15 bp, Homo sapiens
cccaagacccccgcc

SEQ ID NO: 623436 - DNA, 15 bp, Homo sapiens
ccaagacccccgccc

SEQ ID NO: 623437 - DNA, 15 bp, Homo sapiens
caagacccccgcccc

SEQ ID NO: 623438 - DNA, 15 bp, Homo sapiens
aagacccccgccccg

SEQ ID NO: 623439 - DNA, 15 bp, Homo sapiens
agacccccgccccgg

SEQ ID NO: 623440 - DNA, 15 bp, Homo sapiens
gacccccgccccgga

SEQ ID NO: 623441 - DNA, 15 bp, Homo sapiens
acccccgccccggac

SEQ ID NO: 623442 - DNA, 15 bp, Homo sapiens
cccccgccccggacg

SEQ ID NO: 623443 - DNA, 15 bp, Homo sapiens
ccccgccccggacgg

SEQ ID NO: 623444 - DNA, 15 bp, Homo sapiens
cccgccccggacggc

SEQ ID NO: 623445 - DNA, 15 bp, Homo sapiens
ccgccccggacggcc

SEQ ID NO: 623446 - DNA, 15 bp, Homo sapiens
cgccccggacggcct

SEQ ID NO: 623447 - DNA, 15 bp, Homo sapiens
gccccggacggcctc

SEQ ID NO: 623448 - DNA, 15 bp, Homo sapiens
ccccggacggcctcc

SEQ ID NO: 623449 - DNA, 15 bp, Homo sapiens
cccggacggcctccc

SEQ ID NO: 623450 - DNA, 15 bp, Homo sapiens
ccggacggcctccct

SEQ ID NO: 623451 - DNA, 15 bp, Homo sapiens
cggacggcctccctc

SEQ ID NO: 623452 - DNA, 15 bp, Homo sapiens
ggacggcctccctct

SEQ ID NO: 623453 - DNA, 15 bp, Homo sapiens
gacggcctccctctc

SEQ ID NO: 623454 - DNA, 15 bp, Homo sapiens
acggcctccctctcc

SEQ ID NO: 623455 - DNA, 15 bp, Homo sapiens
cggcctccctctccc

SEQ ID NO: 623456 - DNA, 15 bp, Homo sapiens
ggcctccctctcccc

SEQ ID NO: 623457 - DNA, 15 bp, Homo sapiens
gcctccctctccccg

SEQ ID NO: 623458 - DNA, 15 bp, Homo sapiens
cctccctctccccgc

SEQ ID NO: 623459 - DNA, 15 bp, Homo sapiens
ctccctctccccgcc

SEQ ID NO: 623460 - DNA, 15 bp, Homo sapiens
tccctctccccgcct

SEQ ID NO: 623461 - DNA, 15 bp, Homo sapiens
ccctctccccgcctc

SEQ ID NO: 623462 - DNA, 15 bp, Homo sapiens
cctctccccgcctcc

SEQ ID NO: 623463 - DNA, 15 bp, Homo sapiens
ctctccccgcctcca

SEQ ID NO: 623464 - DNA, 15 bp, Homo sapiens
tctccccgcctccac

SEQ ID NO: 623465 - DNA, 15 bp, Homo sapiens
ctccccgcctccact

SEQ ID NO: 623466 - DNA, 15 bp, Homo sapiens
tccccgcctccactt

SEQ ID NO: 623467 - DNA, 15 bp, Homo sapiens
ccccgcctccacttt

SEQ ID NO: 623468 - DNA, 15 bp, Homo sapiens
cccgcctccactttc

SEQ ID NO: 623469 - DNA, 15 bp, Homo sapiens
ccgcctccactttcc

SEQ ID NO: 623470 - DNA, 15 bp, Homo sapiens
cgcctccactttccc

SEQ ID NO: 623471 - DNA, 15 bp, Homo sapiens
gcctccactttcccc

SEQ ID NO: 623472 - DNA, 15 bp, Homo sapiens
cctccactttccccc

SEQ ID NO: 623473 - DNA, 15 bp, Homo sapiens
ctccactttccccca

SEQ ID NO: 623474 - DNA, 15 bp, Homo sapiens
tccactttcccccag

SEQ ID NO: 623475 - DNA, 15 bp, Homo sapiens
ccactttcccccaga

SEQ ID NO: 623476 - DNA, 15 bp, Homo sapiens
cactttcccccagaa

SEQ ID NO: 623477 - DNA, 15 bp, Homo sapiens
actttcccccagaag

SEQ ID NO: 623478 - DNA, 15 bp, Homo sapiens
ctttcccccagaagc

SEQ ID NO: 623479 - DNA, 15 bp, Homo sapiens
tttcccccagaagcg

SEQ ID NO: 623480 - DNA, 15 bp, Homo sapiens
ttcccccagaagcgc

SEQ ID NO: 623481 - DNA, 15 bp, Homo sapiens
tcccccagaagcgcc

SEQ ID NO: 623482 - DNA, 15 bp, Homo sapiens
cccccagaagcgcca

SEQ ID NO: 623483 - DNA, 15 bp, Homo sapiens
ccccagaagcgccaa

SEQ ID NO: 623484 - DNA, 15 bp, Homo sapiens
cccagaagcgccaac

SEQ ID NO: 623485 - DNA, 15 bp, Homo sapiens
ccagaagcgccaacc

SEQ ID NO: 623486 - DNA, 15 bp, Homo sapiens
cagaagcgccaaccc

SEQ ID NO: 623487 - DNA, 15 bp, Homo sapiens
agaagcgccaacccc

SEQ ID NO: 623488 - DNA, 15 bp, Homo sapiens
gaagcgccaacccca

SEQ ID NO: 623489 - DNA, 15 bp, Homo sapiens
aagcgccaaccccag

SEQ ID NO: 623490 - DNA, 15 bp, Homo sapiens
agcgccaaccccaga

SEQ ID NO: 623491 - DNA, 15 bp, Homo sapiens
gcgccaaccccagat

SEQ ID NO: 623492 - DNA, 15 bp, Homo sapiens
cgccaaccccagatc

SEQ ID NO: 623493 - DNA, 15 bp, Homo sapiens
gccaaccccagatcg

SEQ ID NO: 623494 - DNA, 15 bp, Homo sapiens
ccaaccccagatcgc

SEQ ID NO: 623495 - DNA, 15 bp, Homo sapiens
caaccccagatcgct

SEQ ID NO: 623496 - DNA, 15 bp, Homo sapiens
aaccccagatcgctt

SEQ ID NO: 623497 - DNA, 15 bp, Homo sapiens
accccagatcgctta

SEQ ID NO: 623498 - DNA, 15 bp, Homo sapiens
ccccagatcgcttag

SEQ ID NO: 623499 - DNA, 15 bp, Homo sapiens
cccagatcgcttagc

SEQ ID NO: 623500 - DNA, 15 bp, Homo sapiens
ccagatcgcttagct

SEQ ID NO: 623501 - DNA, 15 bp, Homo sapiens
cagatcgcttagctc

SEQ ID NO: 623502 - DNA, 15 bp, Homo sapiens
agatcgcttagctcc

SEQ ID NO: 623503 - DNA, 15 bp, Homo sapiens
gatcgcttagctccc

SEQ ID NO: 623504 - DNA, 15 bp, Homo sapiens
atcgcttagctcccc

SEQ ID NO: 623505 - DNA, 15 bp, Homo sapiens
tcgcttagctccccc

SEQ ID NO: 623506 - DNA, 15 bp, Homo sapiens
cgcttagctcccccc

SEQ ID NO: 623507 - DNA, 15 bp, Homo sapiens
gcttagctcccccca

SEQ ID NO: 623508 - DNA, 15 bp, Homo sapiens
cttagctccccccac

SEQ ID NO: 623509 - DNA, 15 bp, Homo sapiens
ttagctccccccacc

SEQ ID NO: 623510 - DNA, 15 bp, Homo sapiens
tagctccccccaccc

SEQ ID NO: 623511 - DNA, 15 bp, Homo sapiens
agctccccccacccg

SEQ ID NO: 623512 - DNA, 15 bp, Homo sapiens
gctccccccacccga

SEQ ID NO: 623513 - DNA, 15 bp, Homo sapiens
ctccccccacccgaa

SEQ ID NO: 623514 - DNA, 15 bp, Homo sapiens
tccccccacccgaat

SEQ ID NO: 623515 - DNA, 15 bp, Homo sapiens
ccccccacccgaatc

SEQ ID NO: 623516 - DNA, 15 bp, Homo sapiens
cccccacccgaatcc

SEQ ID NO: 623517 - DNA, 15 bp, Homo sapiens
ccccacccgaatcca

SEQ ID NO: 623518 - DNA, 15 bp, Homo sapiens
cccacccgaatccag

SEQ ID NO: 623519 - DNA, 15 bp, Homo sapiens
ccacccgaatccagg

SEQ ID NO: 623520 - DNA, 15 bp, Homo sapiens
cacccgaatccaggg

SEQ ID NO: 623521 - DNA, 15 bp, Homo sapiens
acccgaatccaggga

SEQ ID NO: 623522 - DNA, 15 bp, Homo sapiens
cccgaatccagggaa

SEQ ID NO: 623523 - DNA, 15 bp, Homo sapiens
ccgaatccagggaac

SEQ ID NO: 623524 - DNA, 15 bp, Homo sapiens
cgaatccagggaaca

SEQ ID NO: 623525 - DNA, 15 bp, Homo sapiens
gaatccagggaacag

SEQ ID NO: 623526 - DNA, 15 bp, Homo sapiens
aatccagggaacaga

SEQ ID NO: 623527 - DNA, 15 bp, Homo sapiens
atccagggaacagaa

SEQ ID NO: 623528 - DNA, 15 bp, Homo sapiens
tccagggaacagaat

SEQ ID NO: 623529 - DNA, 15 bp, Homo sapiens
ccagggaacagaata

SEQ ID NO: 623530 - DNA, 15 bp, Homo sapiens
cagggaacagaatac

SEQ ID NO: 623531 - DNA, 15 bp, Homo sapiens
agggaacagaatacc

SEQ ID NO: 623532 - DNA, 15 bp, Homo sapiens
gggaacagaatacca

SEQ ID NO: 623533 - DNA, 15 bp, Homo sapiens
ggaacagaataccac

SEQ ID NO: 623534 - DNA, 15 bp, Homo sapiens
gaacagaataccact

SEQ ID NO: 623535 - DNA, 15 bp, Homo sapiens
aacagaataccactc

SEQ ID NO: 623536 - DNA, 15 bp, Homo sapiens
acagaataccactca

SEQ ID NO: 623537 - DNA, 15 bp, Homo sapiens
cagaataccactcaa

SEQ ID NO: 623538 - DNA, 15 bp, Homo sapiens
agaataccactcaat

SEQ ID NO: 623539 - DNA, 15 bp, Homo sapiens
gaataccactcaatt

SEQ ID NO: 623540 - DNA, 15 bp, Homo sapiens
aataccactcaattc

SEQ ID NO: 623541 - DNA, 15 bp, Homo sapiens
ataccactcaattca

SEQ ID NO: 623542 - DNA, 15 bp, Homo sapiens
taccactcaattcac

SEQ ID NO: 623543 - DNA, 15 bp, Homo sapiens
accactcaattcacg

SEQ ID NO: 623544 - DNA, 15 bp, Homo sapiens
ccactcaattcacga

SEQ ID NO: 623545 - DNA, 15 bp, Homo sapiens
cactcaattcacgaa

SEQ ID NO: 623546 - DNA, 15 bp, Homo sapiens
actcaattcacgaac

SEQ ID NO: 623547 - DNA, 15 bp, Homo sapiens
ctcaattcacgaacg

SEQ ID NO: 623548 - DNA, 15 bp, Homo sapiens
tcaattcacgaacgc

SEQ ID NO: 623549 - DNA, 15 bp, Homo sapiens
caattcacgaacgcc

SEQ ID NO: 623550 - DNA, 15 bp, Homo sapiens
aattcacgaacgccg

SEQ ID NO: 623551 - DNA, 15 bp, Homo sapiens
attcacgaacgccgc

SEQ ID NO: 623552 - DNA, 15 bp, Homo sapiens
ttcacgaacgccgcg

SEQ ID NO: 623553 - DNA, 15 bp, Homo sapiens
tcacgaacgccgcga

SEQ ID NO: 623554 - DNA, 15 bp, Homo sapiens
cacgaacgccgcgaa

SEQ ID NO: 623555 - DNA, 15 bp, Homo sapiens
acgaacgccgcgaag

SEQ ID NO: 623556 - DNA, 15 bp, Homo sapiens
cgaacgccgcgaaga

SEQ ID NO: 623557 - DNA, 15 bp, Homo sapiens
gaacgccgcgaagag

SEQ ID NO: 623558 - DNA, 15 bp, Homo sapiens
aacgccgcgaagagg

SEQ ID NO: 623559 - DNA, 15 bp, Homo sapiens
acgccgcgaagaggg

SEQ ID NO: 623560 - DNA, 15 bp, Homo sapiens
cgccgcgaagagggg

SEQ ID NO: 623561 - DNA, 15 bp, Homo sapiens
gccgcgaagaggggg

SEQ ID NO: 623562 - DNA, 15 bp, Homo sapiens
ccgcgaagagggggc

SEQ ID NO: 623563 - DNA, 15 bp, Homo sapiens
cgcgaagagggggct

SEQ ID NO: 623564 - DNA, 15 bp, Homo sapiens
gcgaagagggggctg

SEQ ID NO: 623565 - DNA, 15 bp, Homo sapiens
cgaagagggggctga

SEQ ID NO: 623566 - DNA, 15 bp, Homo sapiens
gaagagggggctgac

SEQ ID NO: 623567 - DNA, 15 bp, Homo sapiens
aagagggggctgacg

SEQ ID NO: 623568 - DNA, 15 bp, Homo sapiens
agagggggctgacgg

SEQ ID NO: 623569 - DNA, 15 bp, Homo sapiens
gagggggctgacggg

SEQ ID NO: 623570 - DNA, 15 bp, Homo sapiens
agggggctgacgggc

SEQ ID NO: 623571 - DNA, 15 bp, Homo sapiens
gggggctgacgggcg

SEQ ID NO: 623572 - DNA, 15 bp, Homo sapiens
ggggctgacgggcgg

SEQ ID NO: 623573 - DNA, 15 bp, Homo sapiens
gggctgacgggcggg

SEQ ID NO: 623574 - DNA, 15 bp, Homo sapiens
ggctgacgggcggga

SEQ ID NO: 623575 - DNA, 15 bp, Homo sapiens
gctgacgggcgggag

SEQ ID NO: 623576 - DNA, 15 bp, Homo sapiens
ctgacgggcgggagc

SEQ ID NO: 623577 - DNA, 15 bp, Homo sapiens
tgacgggcgggagcc

SEQ ID NO: 623578 - DNA, 15 bp, Homo sapiens
gacgggcgggagcct

SEQ ID NO: 623579 - DNA, 15 bp, Homo sapiens
acgggcgggagcctg

SEQ ID NO: 623580 - DNA, 15 bp, Homo sapiens
cgggcgggagcctga

SEQ ID NO: 623581 - DNA, 15 bp, Homo sapiens
gggcgggagcctgat

SEQ ID NO: 623582 - DNA, 15 bp, Homo sapiens
ggcgggagcctgatc

SEQ ID NO: 623583 - DNA, 15 bp, Homo sapiens
gcgggagcctgatca

SEQ ID NO: 623584 - DNA, 15 bp, Homo sapiens
cgggagcctgatcag

SEQ ID NO: 623585 - DNA, 15 bp, Homo sapiens
gggagcctgatcagg

SEQ ID NO: 623586 - DNA, 15 bp, Homo sapiens
ggagcctgatcaggg

SEQ ID NO: 623587 - DNA, 15 bp, Homo sapiens
gagcctgatcagggg

SEQ ID NO: 623588 - DNA, 15 bp, Homo sapiens
agcctgatcaggggg

SEQ ID NO: 623589 - DNA, 15 bp, Homo sapiens
gcctgatcagggggc

SEQ ID NO: 623590 - DNA, 15 bp, Homo sapiens
cctgatcagggggcg

SEQ ID NO: 623591 - DNA, 15 bp, Homo sapiens
ctgatcagggggcgc

SEQ ID NO: 623592 - DNA, 15 bp, Homo sapiens
tgatcagggggcgca

SEQ ID NO: 623593 - DNA, 15 bp, Homo sapiens
gatcagggggcgcag

SEQ ID NO: 623594 - DNA, 15 bp, Homo sapiens
atcagggggcgcagg

SEQ ID NO: 623595 - DNA, 15 bp, Homo sapiens
tcagggggcgcaggc

SEQ ID NO: 623596 - DNA, 15 bp, Homo sapiens
cagggggcgcaggcc

SEQ ID NO: 623597 - DNA, 15 bp, Homo sapiens
agggggcgcaggccc

SEQ ID NO: 623598 - DNA, 15 bp, Homo sapiens
gggggcgcaggcccg

SEQ ID NO: 623599 - DNA, 15 bp, Homo sapiens
ggggcgcaggcccgc

SEQ ID NO: 623600 - DNA, 15 bp, Homo sapiens
gggcgcaggcccgcg

SEQ ID NO: 623601 - DNA, 15 bp, Homo sapiens
ggcgcaggcccgcga

SEQ ID NO: 623602 - DNA, 15 bp, Homo sapiens
gcgcaggcccgcgat

SEQ ID NO: 623603 - DNA, 15 bp, Homo sapiens
cgcaggcccgcgatc

SEQ ID NO: 623604 - DNA, 15 bp, Homo sapiens
gcaggcccgcgatcg

SEQ ID NO: 623605 - DNA, 15 bp, Homo sapiens
caggcccgcgatcgc

SEQ ID NO: 623606 - DNA, 15 bp, Homo sapiens
aggcccgcgatcgcg

SEQ ID NO: 623607 - DNA, 15 bp, Homo sapiens
ggcccgcgatcgcgg

SEQ ID NO: 623608 - DNA, 15 bp, Homo sapiens
gcccgcgatcgcggc

SEQ ID NO: 623609 - DNA, 15 bp, Homo sapiens
cccgcgatcgcggcc

SEQ ID NO: 623610 - DNA, 15 bp, Homo sapiens
ccgcgatcgcggccc

SEQ ID NO: 623611 - DNA, 15 bp, Homo sapiens
cgcgatcgcggcccc

SEQ ID NO: 623612 - DNA, 15 bp, Homo sapiens
gcgatcgcggcccct

SEQ ID NO: 623613 - DNA, 15 bp, Homo sapiens
cgatcgcggcccctc

SEQ ID NO: 623614 - DNA, 15 bp, Homo sapiens
gatcgcggcccctcc

SEQ ID NO: 623615 - DNA, 15 bp, Homo sapiens
atcgcggcccctccc

SEQ ID NO: 623616 - DNA, 15 bp, Homo sapiens
tcgcggcccctcccg

SEQ ID NO: 623617 - DNA, 15 bp, Homo sapiens
cgcggcccctcccgg

SEQ ID NO: 623618 - DNA, 15 bp, Homo sapiens
gcggcccctcccggc

SEQ ID NO: 623619 - DNA, 15 bp, Homo sapiens
cggcccctcccggct

SEQ ID NO: 623620 - DNA, 15 bp, Homo sapiens
ggcccctcccggctg

SEQ ID NO: 623621 - DNA, 15 bp, Homo sapiens
gcccctcccggctga

SEQ ID NO: 623622 - DNA, 15 bp, Homo sapiens
cccctcccggctgag

SEQ ID NO: 623623 - DNA, 15 bp, Homo sapiens
ccctcccggctgaga

SEQ ID NO: 623624 - DNA, 15 bp, Homo sapiens
cctcccggctgagac

SEQ ID NO: 623625 - DNA, 15 bp, Homo sapiens
ctcccggctgagact

SEQ ID NO: 623626 - DNA, 15 bp, Homo sapiens
tcccggctgagactc

SEQ ID NO: 623627 - DNA, 15 bp, Homo sapiens
cccggctgagactca

SEQ ID NO: 623628 - DNA, 15 bp, Homo sapiens
ccggctgagactcac

SEQ ID NO: 623629 - DNA, 15 bp, Homo sapiens
cggctgagactcacc

SEQ ID NO: 623630 - DNA, 15 bp, Homo sapiens
ggctgagactcaccc

SEQ ID NO: 623631 - DNA, 15 bp, Homo sapiens
gctgagactcaccct

SEQ ID NO: 623632 - DNA, 15 bp, Homo sapiens
ctgagactcaccctg

SEQ ID NO: 623633 - DNA, 15 bp, Homo sapiens
tgagactcaccctgc

SEQ ID NO: 623634 - DNA, 15 bp, Homo sapiens
gagactcaccctgcg

SEQ ID NO: 623635 - DNA, 15 bp, Homo sapiens
agactcaccctgcgg

SEQ ID NO: 623636 - DNA, 15 bp, Homo sapiens
gactcaccctgcggg

SEQ ID NO: 623637 - DNA, 15 bp, Homo sapiens
actcaccctgcgggc

SEQ ID NO: 623638 - DNA, 15 bp, Homo sapiens
ctcaccctgcgggct

SEQ ID NO: 623639 - DNA, 15 bp, Homo sapiens
tcaccctgcgggctg

SEQ ID NO: 623640 - DNA, 15 bp, Homo sapiens
caccctgcgggctgg

SEQ ID NO: 623641 - DNA, 15 bp, Homo sapiens
accctgcgggctggg

SEQ ID NO: 623642 - DNA, 15 bp, Homo sapiens
ccctgcgggctgggg

SEQ ID NO: 623643 - DNA, 15 bp, Homo sapiens
cctgcgggctggggg

SEQ ID NO: 623644 - DNA, 15 bp, Homo sapiens
ctgcgggctgggggg

SEQ ID NO: 623645 - DNA, 15 bp, Homo sapiens
tgcgggctggggggc

SEQ ID NO: 623646 - DNA, 15 bp, Homo sapiens
gcgggctggggggct

SEQ ID NO: 623647 - DNA, 15 bp, Homo sapiens
cgggctggggggctc

SEQ ID NO: 623648 - DNA, 15 bp, Homo sapiens
gggctggggggctcc

SEQ ID NO: 623649 - DNA, 15 bp, Homo sapiens
ggctggggggctccg

SEQ ID NO: 623650 - DNA, 15 bp, Homo sapiens
gctggggggctccgg

SEQ ID NO: 623651 - DNA, 15 bp, Homo sapiens
ctggggggctccggc

SEQ ID NO: 623652 - DNA, 15 bp, Homo sapiens
tggggggctccggcg

SEQ ID NO: 623653 - DNA, 15 bp, Homo sapiens
ggggggctccggcgg

SEQ ID NO: 623654 - DNA, 15 bp, Homo sapiens
gggggctccggcggc

SEQ ID NO: 623655 - DNA, 15 bp, Homo sapiens
ggggctccggcggcg

SEQ ID NO: 623656 - DNA, 15 bp, Homo sapiens
gggctccggcggcga

SEQ ID NO: 623657 - DNA, 15 bp, Homo sapiens
ggctccggcggcgac

SEQ ID NO: 623658 - DNA, 15 bp, Homo sapiens
gctccggcggcgact

SEQ ID NO: 623659 - DNA, 15 bp, Homo sapiens
ctccggcggcgactt

SEQ ID NO: 623660 - DNA, 15 bp, Homo sapiens
tccggcggcgacttg

SEQ ID NO: 623661 - DNA, 15 bp, Homo sapiens
ccggcggcgacttgc

SEQ ID NO: 623662 - DNA, 15 bp, Homo sapiens
cggcggcgacttgcc

SEQ ID NO: 623663 - DNA, 15 bp, Homo sapiens
ggcggcgacttgccg

SEQ ID NO: 623664 - DNA, 15 bp, Homo sapiens
gcggcgacttgccgg

SEQ ID NO: 623665 - DNA, 15 bp, Homo sapiens
cggcgacttgccggg

SEQ ID NO: 623666 - DNA, 15 bp, Homo sapiens
ggcgacttgccggga

SEQ ID NO: 623667 - DNA, 15 bp, Homo sapiens
gcgacttgccgggag

SEQ ID NO: 623668 - DNA, 15 bp, Homo sapiens
cgacttgccgggagc

SEQ ID NO: 623669 - DNA, 15 bp, Homo sapiens
gacttgccgggagcc

SEQ ID NO: 623670 - DNA, 15 bp, Homo sapiens
acttgccgggagccc

SEQ ID NO: 623671 - DNA, 15 bp, Homo sapiens
cttgccgggagcccg

SEQ ID NO: 623672 - DNA, 15 bp, Homo sapiens
ttgccgggagcccgg

SEQ ID NO: 623673 - DNA, 15 bp, Homo sapiens
tgccgggagcccggg

SEQ ID NO: 623674 - DNA, 15 bp, Homo sapiens
gccgggagcccggga

SEQ ID NO: 623675 - DNA, 15 bp, Homo sapiens
ccgggagcccgggag

SEQ ID NO: 623676 - DNA, 15 bp, Homo sapiens
cgggagcccgggagg

SEQ ID NO: 623677 - DNA, 15 bp, Homo sapiens
gggagcccgggaggc

SEQ ID NO: 623678 - DNA, 15 bp, Homo sapiens
ggagcccgggaggcg

SEQ ID NO: 623679 - DNA, 15 bp, Homo sapiens
gagcccgggaggcgc

SEQ ID NO: 623680 - DNA, 15 bp, Homo sapiens
agcccgggaggcgct

SEQ ID NO: 623681 - DNA, 15 bp, Homo sapiens
gcccgggaggcgctg

SEQ ID NO: 623682 - DNA, 15 bp, Homo sapiens
cccgggaggcgctgc

SEQ ID NO: 623683 - DNA, 15 bp, Homo sapiens
ccgggaggcgctgcc

SEQ ID NO: 623684 - DNA, 15 bp, Homo sapiens
cgggaggcgctgccg

SEQ ID NO: 623685 - DNA, 15 bp, Homo sapiens
gggaggcgctgccga

SEQ ID NO: 623686 - DNA, 15 bp, Homo sapiens
ggaggcgctgccgag

SEQ ID NO: 623687 - DNA, 15 bp, Homo sapiens
gaggcgctgccgagc

SEQ ID NO: 623688 - DNA, 15 bp, Homo sapiens
aggcgctgccgagca

SEQ ID NO: 623689 - DNA, 15 bp, Homo sapiens
ggcgctgccgagcag

SEQ ID NO: 623690 - DNA, 15 bp, Homo sapiens
gcgctgccgagcagc

SEQ ID NO: 623691 - DNA, 15 bp, Homo sapiens
cgctgccgagcagca

SEQ ID NO: 623692 - DNA, 15 bp, Homo sapiens
gctgccgagcagcag

SEQ ID NO: 623693 - DNA, 15 bp, Homo sapiens
ctgccgagcagcagc

SEQ ID NO: 623694 - DNA, 15 bp, Homo sapiens
tgccgagcagcagcc

SEQ ID NO: 623695 - DNA, 15 bp, Homo sapiens
gccgagcagcagccc

SEQ ID NO: 623696 - DNA, 15 bp, Homo sapiens
ccgagcagcagcccc

SEQ ID NO: 623697 - DNA, 15 bp, Homo sapiens
cgagcagcagcccca

SEQ ID NO: 623698 - DNA, 15 bp, Homo sapiens
gagcagcagccccag

SEQ ID NO: 623699 - DNA, 15 bp, Homo sapiens
agcagcagccccagc

SEQ ID NO: 623700 - DNA, 15 bp, Homo sapiens
gcagcagccccagca

SEQ ID NO: 623701 - DNA, 15 bp, Homo sapiens
cagcagccccagcag

SEQ ID NO: 623702 - DNA, 15 bp, Homo sapiens
agcagccccagcagc

SEQ ID NO: 623703 - DNA, 15 bp, Homo sapiens
gcagccccagcagcg

SEQ ID NO: 623704 - DNA, 15 bp, Homo sapiens
cagccccagcagcgg

SEQ ID NO: 623705 - DNA, 15 bp, Homo sapiens
agccccagcagcggc

SEQ ID NO: 623706 - DNA, 15 bp, Homo sapiens
gccccagcagcggca

SEQ ID NO: 623707 - DNA, 15 bp, Homo sapiens
ccccagcagcggcaa

SEQ ID NO: 623708 - DNA, 15 bp, Homo sapiens
cccagcagcggcaac

SEQ ID NO: 623709 - DNA, 15 bp, Homo sapiens
ccagcagcggcaaca

SEQ ID NO: 623710 - DNA, 15 bp, Homo sapiens
cagcagcggcaacag

SEQ ID NO: 623711 - DNA, 15 bp, Homo sapiens
agcagcggcaacagc

SEQ ID NO: 623712 - DNA, 15 bp, Homo sapiens
gcagcggcaacagcc

SEQ ID NO: 623713 - DNA, 15 bp, Homo sapiens
cagcggcaacagccg

SEQ ID NO: 623714 - DNA, 15 bp, Homo sapiens
agcggcaacagccgc

SEQ ID NO: 623715 - DNA, 15 bp, Homo sapiens
gcggcaacagccgcg

SEQ ID NO: 623716 - DNA, 15 bp, Homo sapiens
cggcaacagccgcgc

SEQ ID NO: 623717 - DNA, 15 bp, Homo sapiens
ggcaacagccgcgcg

SEQ ID NO: 623718 - DNA, 15 bp, Homo sapiens
gcaacagccgcgcga

SEQ ID NO: 623719 - DNA, 15 bp, Homo sapiens
caacagccgcgcgag

SEQ ID NO: 623720 - DNA, 15 bp, Homo sapiens
aacagccgcgcgagg

SEQ ID NO: 623721 - DNA, 15 bp, Homo sapiens
acagccgcgcgagga

SEQ ID NO: 623722 - DNA, 15 bp, Homo sapiens
cagccgcgcgaggac

SEQ ID NO: 623723 - DNA, 15 bp, Homo sapiens
agccgcgcgaggacg

SEQ ID NO: 623724 - DNA, 15 bp, Homo sapiens
gccgcgcgaggacgc

SEQ ID NO: 623725 - DNA, 15 bp, Homo sapiens
ccgcgcgaggacgct

SEQ ID NO: 623726 - DNA, 15 bp, Homo sapiens
cgcgcgaggacgctg

SEQ ID NO: 623727 - DNA, 15 bp, Homo sapiens
gcgcgaggacgctgg

SEQ ID NO: 623728 - DNA, 15 bp, Homo sapiens
cgcgaggacgctggg

SEQ ID NO: 623729 - DNA, 15 bp, Homo sapiens
gcgaggacgctgggg

SEQ ID NO: 623730 - DNA, 15 bp, Homo sapiens
cgaggacgctggggc

SEQ ID NO: 623731 - DNA, 15 bp, Homo sapiens
gaggacgctggggcc

SEQ ID NO: 623732 - DNA, 15 bp, Homo sapiens
aggacgctggggcca

SEQ ID NO: 623733 - DNA, 15 bp, Homo sapiens
ggacgctggggccac

SEQ ID NO: 623734 - DNA, 15 bp, Homo sapiens
gacgctggggccact

SEQ ID NO: 623735 - DNA, 15 bp, Homo sapiens
acgctggggccactc

SEQ ID NO: 623736 - DNA, 15 bp, Homo sapiens
cgctggggccactcg

SEQ ID NO: 623737 - DNA, 15 bp, Homo sapiens
gctggggccactcgc

SEQ ID NO: 623738 - DNA, 15 bp, Homo sapiens
ctggggccactcgcc

SEQ ID NO: 623739 - DNA, 15 bp, Homo sapiens
tggggccactcgccg

SEQ ID NO: 623740 - DNA, 15 bp, Homo sapiens
ggggccactcgccgg

SEQ ID NO: 623741 - DNA, 15 bp, Homo sapiens
gggccactcgccggc

SEQ ID NO: 623742 - DNA, 15 bp, Homo sapiens
ggccactcgccggcg

SEQ ID NO: 623743 - DNA, 15 bp, Homo sapiens
gccactcgccggcgg

SEQ ID NO: 623744 - DNA, 15 bp, Homo sapiens
ccactcgccggcggc

SEQ ID NO: 623745 - DNA, 15 bp, Homo sapiens
cactcgccggcggca

SEQ ID NO: 623746 - DNA, 15 bp, Homo sapiens
actcgccggcggcat

SEQ ID NO: 623747 - DNA, 15 bp, Homo sapiens
ctcgccggcggcatc

SEQ ID NO: 623748 - DNA, 15 bp, Homo sapiens
tcgccggcggcatcg

SEQ ID NO: 623749 - DNA, 15 bp, Homo sapiens
cgccggcggcatcgc

SEQ ID NO: 623750 - DNA, 15 bp, Homo sapiens
gccggcggcatcgcg

SEQ ID NO: 623751 - DNA, 15 bp, Homo sapiens
ccggcggcatcgcgg

SEQ ID NO: 623752 - DNA, 15 bp, Homo sapiens
cggcggcatcgcggg

SEQ ID NO: 623753 - DNA, 15 bp, Homo sapiens
ggcggcatcgcgggg

SEQ ID NO: 623754 - DNA, 15 bp, Homo sapiens
gcggcatcgcggggc

SEQ ID NO: 623755 - DNA, 15 bp, Homo sapiens
cggcatcgcggggct

SEQ ID NO: 623756 - DNA, 15 bp, Homo sapiens
ggcatcgcggggcta

SEQ ID NO: 623757 - DNA, 15 bp, Homo sapiens
gcatcgcggggctag

SEQ ID NO: 623758 - DNA, 15 bp, Homo sapiens
catcgcggggctagg

SEQ ID NO: 623759 - DNA, 15 bp, Homo sapiens
atcgcggggctaggc

SEQ ID NO: 623760 - DNA, 15 bp, Homo sapiens
tcgcggggctaggcc

SEQ ID NO: 623761 - DNA, 15 bp, Homo sapiens
cgcggggctaggccg

SEQ ID NO: 623762 - DNA, 15 bp, Homo sapiens
gcggggctaggccgg

SEQ ID NO: 623763 - DNA, 15 bp, Homo sapiens
cggggctaggccggg

SEQ ID NO: 623764 - DNA, 15 bp, Homo sapiens
ggggctaggccgggc

SEQ ID NO: 623765 - DNA, 15 bp, Homo sapiens
gggctaggccgggcc

SEQ ID NO: 623766 - DNA, 15 bp, Homo sapiens
ggctaggccgggccc

SEQ ID NO: 623767 - DNA, 15 bp, Homo sapiens
gctaggccgggccct

SEQ ID NO: 623768 - DNA, 15 bp, Homo sapiens
ctaggccgggcccta

SEQ ID NO: 623769 - DNA, 15 bp, Homo sapiens
taggccgggccctag

SEQ ID NO: 623770 - DNA, 15 bp, Homo sapiens
aggccgggccctagc

SEQ ID NO: 623771 - DNA, 15 bp, Homo sapiens
ggccgggccctagcg

SEQ ID NO: 623772 - DNA, 15 bp, Homo sapiens
gccgggccctagcgg

SEQ ID NO: 623773 - DNA, 15 bp, Homo sapiens
ccgggccctagcggt

SEQ ID NO: 623774 - DNA, 15 bp, Homo sapiens
cgggccctagcggtc

SEQ ID NO: 623775 - DNA, 15 bp, Homo sapiens
gggccctagcggtcc

SEQ ID NO: 623776 - DNA, 15 bp, Homo sapiens
ggccctagcggtcca

SEQ ID NO: 623777 - DNA, 15 bp, Homo sapiens
gccctagcggtccat

SEQ ID NO: 623778 - DNA, 15 bp, Homo sapiens
ccctagcggtccatg

SEQ ID NO: 623779 - DNA, 15 bp, Homo sapiens
cctagcggtccatgg

SEQ ID NO: 623780 - DNA, 15 bp, Homo sapiens
ctagcggtccatggc

SEQ ID NO: 623781 - DNA, 15 bp, Homo sapiens
tagcggtccatggct

SEQ ID NO: 623782 - DNA, 15 bp, Homo sapiens
agcggtccatggctc

SEQ ID NO: 623783 - DNA, 15 bp, Homo sapiens
gcggtccatggctcc

SEQ ID NO: 623784 - DNA, 15 bp, Homo sapiens
cggtccatggctccc

SEQ ID NO: 623785 - DNA, 15 bp, Homo sapiens
ggtccatggctcccg

SEQ ID NO: 623786 - DNA, 15 bp, Homo sapiens
gtccatggctcccgc

SEQ ID NO: 623787 - DNA, 15 bp, Homo sapiens
tccatggctcccgcc

SEQ ID NO: 623788 - DNA, 15 bp, Homo sapiens
ccatggctcccgcct

SEQ ID NO: 623789 - DNA, 15 bp, Homo sapiens
catggctcccgcctg

SEQ ID NO: 623790 - DNA, 15 bp, Homo sapiens
atggctcccgcctgg

SEQ ID NO: 623791 - DNA, 15 bp, Homo sapiens
tggctcccgcctggt

SEQ ID NO: 623792 - DNA, 15 bp, Homo sapiens
ggctcccgcctggtc

SEQ ID NO: 623793 - DNA, 15 bp, Homo sapiens
gctcccgcctggtcc

SEQ ID NO: 623794 - DNA, 15 bp, Homo sapiens
ctcccgcctggtccc

SEQ ID NO: 623795 - DNA, 15 bp, Homo sapiens
tcccgcctggtcccg

SEQ ID NO: 623796 - DNA, 15 bp, Homo sapiens
cccgcctggtcccgc

SEQ ID NO: 623797 - DNA, 15 bp, Homo sapiens
ccgcctggtcccgct

SEQ ID NO: 623798 - DNA, 15 bp, Homo sapiens
cgcctggtcccgctc

SEQ ID NO: 623799 - DNA, 15 bp, Homo sapiens
gcctggtcccgctcg

SEQ ID NO: 623800 - DNA, 15 bp, Homo sapiens
cctggtcccgctcgc

SEQ ID NO: 623801 - DNA, 15 bp, Homo sapiens
ctggtcccgctcgcc

SEQ ID NO: 623802 - DNA, 15 bp, Homo sapiens
tggtcccgctcgccc

SEQ ID NO: 623803 - DNA, 15 bp, Homo sapiens
ggtcccgctcgcccg

SEQ ID NO: 623804 - DNA, 15 bp, Homo sapiens
gtcccgctcgcccgg

SEQ ID NO: 623805 - DNA, 15 bp, Homo sapiens
tcccgctcgcccggc

SEQ ID NO: 623806 - DNA, 15 bp, Homo sapiens
cccgctcgcccggcc

SEQ ID NO: 623807 - DNA, 15 bp, Homo sapiens
ccgctcgcccggccc

SEQ ID NO: 623808 - DNA, 15 bp, Homo sapiens
cgctcgcccggcccc

SEQ ID NO: 623809 - DNA, 15 bp, Homo sapiens
gctcgcccggccccg

SEQ ID NO: 623810 - DNA, 15 bp, Homo sapiens
ctcgcccggccccgc

SEQ ID NO: 623811 - DNA, 15 bp, Homo sapiens
tcgcccggccccgcg

SEQ ID NO: 623812 - DNA, 15 bp, Homo sapiens
cgcccggccccgcgc

SEQ ID NO: 623813 - DNA, 15 bp, Homo sapiens
gcccggccccgcgca

SEQ ID NO: 623814 - DNA, 15 bp, Homo sapiens
cccggccccgcgcag

SEQ ID NO: 623815 - DNA, 15 bp, Homo sapiens
ccggccccgcgcagc

SEQ ID NO: 623816 - DNA, 15 bp, Homo sapiens
cggccccgcgcagcc

SEQ ID NO: 623817 - DNA, 15 bp, Homo sapiens
ggccccgcgcagccc

SEQ ID NO: 623818 - DNA, 15 bp, Homo sapiens
gccccgcgcagcccc

SEQ ID NO: 623819 - DNA, 15 bp, Homo sapiens
ccccgcgcagcccca

SEQ ID NO: 623820 - DNA, 15 bp, Homo sapiens
cccgcgcagccccag

SEQ ID NO: 623821 - DNA, 15 bp, Homo sapiens
ccgcgcagccccagc

SEQ ID NO: 623822 - DNA, 15 bp, Homo sapiens
cgcgcagccccagct

SEQ ID NO: 623823 - DNA, 15 bp, Homo sapiens
gcgcagccccagctc

SEQ ID NO: 623824 - DNA, 15 bp, Homo sapiens
cgcagccccagctct

SEQ ID NO: 623825 - DNA, 15 bp, Homo sapiens
gcagccccagctctg

SEQ ID NO: 623826 - DNA, 15 bp, Homo sapiens
cagccccagctctgc

SEQ ID NO: 623827 - DNA, 15 bp, Homo sapiens
agccccagctctgcg

SEQ ID NO: 623828 - DNA, 15 bp, Homo sapiens
gccccagctctgcgc

SEQ ID NO: 623829 - DNA, 15 bp, Homo sapiens
ccccagctctgcgcc

SEQ ID NO: 623830 - DNA, 15 bp, Homo sapiens
cccagctctgcgccg

SEQ ID NO: 623831 - DNA, 15 bp, Homo sapiens
ccagctctgcgccgc

SEQ ID NO: 623832 - DNA, 15 bp, Homo sapiens
cagctctgcgccgcg

SEQ ID NO: 623833 - DNA, 15 bp, Homo sapiens
agctctgcgccgcgc

SEQ ID NO: 623834 - DNA, 15 bp, Homo sapiens
gctctgcgccgcgcc

SEQ ID NO: 623835 - DNA, 15 bp, Homo sapiens
ctctgcgccgcgcct

SEQ ID NO: 623836 - DNA, 15 bp, Homo sapiens
tctgcgccgcgcctc

SEQ ID NO: 623837 - DNA, 15 bp, Homo sapiens
ctgcgccgcgcctcg

SEQ ID NO: 623838 - DNA, 15 bp, Homo sapiens
tgcgccgcgcctcgc

SEQ ID NO: 623839 - DNA, 15 bp, Homo sapiens
gcgccgcgcctcgca

SEQ ID NO: 623840 - DNA, 15 bp, Homo sapiens
cgccgcgcctcgcag

SEQ ID NO: 623841 - DNA, 15 bp, Homo sapiens
gccgcgcctcgcagc

SEQ ID NO: 623842 - DNA, 15 bp, Homo sapiens
ccgcgcctcgcagct

SEQ ID NO: 623843 - DNA, 15 bp, Homo sapiens
cgcgcctcgcagctc

SEQ ID NO: 623844 - DNA, 15 bp, Homo sapiens
gcgcctcgcagctcc

SEQ ID NO: 623845 - DNA, 15 bp, Homo sapiens
cgcctcgcagctccg

SEQ ID NO: 623846 - DNA, 15 bp, Homo sapiens
gcctcgcagctccgg

SEQ ID NO: 623847 - DNA, 15 bp, Homo sapiens
cctcgcagctccggc

SEQ ID NO: 623848 - DNA, 15 bp, Homo sapiens
ctcgcagctccggct

SEQ ID NO: 623849 - DNA, 15 bp, Homo sapiens
tcgcagctccggctc

SEQ ID NO: 623850 - DNA, 15 bp, Homo sapiens
cgcagctccggctcc

SEQ ID NO: 623851 - DNA, 15 bp, Homo sapiens
gcagctccggctccc

SEQ ID NO: 623852 - DNA, 15 bp, Homo sapiens
cagctccggctcccg

SEQ ID NO: 623853 - DNA, 15 bp, Homo sapiens
agctccggctcccgc

SEQ ID NO: 623854 - DNA, 15 bp, Homo sapiens
gctccggctcccgct

SEQ ID NO: 623855 - DNA, 15 bp, Homo sapiens
ctccggctcccgctc

SEQ ID NO: 623856 - DNA, 15 bp, Homo sapiens
tccggctcccgctcc

SEQ ID NO: 623857 - DNA, 15 bp, Homo sapiens
ccggctcccgctccc

SEQ ID NO: 623858 - DNA, 15 bp, Homo sapiens
cggctcccgctcccg

SEQ ID NO: 623859 - DNA, 15 bp, Homo sapiens
ggctcccgctcccgc

SEQ ID NO: 623860 - DNA, 15 bp, Homo sapiens
gctcccgctcccgct

SEQ ID NO: 623861 - DNA, 15 bp, Homo sapiens
ctcccgctcccgctg

SEQ ID NO: 623862 - DNA, 15 bp, Homo sapiens
tcccgctcccgctgc

SEQ ID NO: 623863 - DNA, 15 bp, Homo sapiens
cccgctcccgctgcg

SEQ ID NO: 623864 - DNA, 15 bp, Homo sapiens
ccgctcccgctgcgg

SEQ ID NO: 623865 - DNA, 15 bp, Homo sapiens
cgctcccgctgcggc

SEQ ID NO: 623866 - DNA, 15 bp, Homo sapiens
gctcccgctgcggcg

SEQ ID NO: 623867 - DNA, 15 bp, Homo sapiens
ctcccgctgcggcgc

SEQ ID NO: 623868 - DNA, 15 bp, Homo sapiens
tcccgctgcggcgcc

SEQ ID NO: 623869 - DNA, 15 bp, Homo sapiens
cccgctgcggcgccc

SEQ ID NO: 623870 - DNA, 15 bp, Homo sapiens
ccgctgcggcgcccg

SEQ ID NO: 623871 - DNA, 15 bp, Homo sapiens
cgctgcggcgcccgc

SEQ ID NO: 623872 - DNA, 15 bp, Homo sapiens
gctgcggcgcccgct

SEQ ID NO: 623873 - DNA, 15 bp, Homo sapiens
ctgcggcgcccgctc

SEQ ID NO: 623874 - DNA, 15 bp, Homo sapiens
tgcggcgcccgctca

SEQ ID NO: 623875 - DNA, 15 bp, Homo sapiens
gcggcgcccgctcag

SEQ ID NO: 623876 - DNA, 15 bp, Homo sapiens
cggcgcccgctcagc

SEQ ID NO: 623877 - DNA, 15 bp, Homo sapiens
ggcgcccgctcagcg

SEQ ID NO: 623878 - DNA, 15 bp, Homo sapiens
gcgcccgctcagcgc

SEQ ID NO: 623879 - DNA, 15 bp, Homo sapiens
cgcccgctcagcgcg

SEQ ID NO: 623880 - DNA, 15 bp, Homo sapiens
gcccgctcagcgcga

SEQ ID NO: 623881 - DNA, 15 bp, Homo sapiens
cccgctcagcgcgat

SEQ ID NO: 623882 - DNA, 15 bp, Homo sapiens
ccgctcagcgcgatt

SEQ ID NO: 623883 - DNA, 15 bp, Homo sapiens
cgctcagcgcgattg

SEQ ID NO: 623884 - DNA, 15 bp, Homo sapiens
gctcagcgcgattgt

SEQ ID NO: 623885 - DNA, 15 bp, Homo sapiens
ctcagcgcgattgtc

SEQ ID NO: 623886 - DNA, 15 bp, Homo sapiens
tcagcgcgattgtct

SEQ ID NO: 623887 - DNA, 15 bp, Homo sapiens
cagcgcgattgtctc

SEQ ID NO: 623888 - DNA, 15 bp, Homo sapiens
agcgcgattgtctcc

SEQ ID NO: 623889 - DNA, 15 bp, Homo sapiens
gcgcgattgtctccg

SEQ ID NO: 623890 - DNA, 15 bp, Homo sapiens
cgcgattgtctccga

SEQ ID NO: 623891 - DNA, 15 bp, Homo sapiens
gcgattgtctccgac

SEQ ID NO: 623892 - DNA, 15 bp, Homo sapiens
cgattgtctccgacc

SEQ ID NO: 623893 - DNA, 15 bp, Homo sapiens
gattgtctccgaccg

SEQ ID NO: 623894 - DNA, 15 bp, Homo sapiens
attgtctccgaccgg

SEQ ID NO: 623895 - DNA, 15 bp, Homo sapiens
ttgtctccgaccgga

SEQ ID NO: 623896 - DNA, 15 bp, Homo sapiens
tgtctccgaccggag

SEQ ID NO: 623897 - DNA, 15 bp, Homo sapiens
gtctccgaccggagc

SEQ ID NO: 623898 - DNA, 15 bp, Homo sapiens
tctccgaccggagcc

SEQ ID NO: 623899 - DNA, 15 bp, Homo sapiens
ctccgaccggagccg

SEQ ID NO: 623900 - DNA, 15 bp, Homo sapiens
tccgaccggagccgc

SEQ ID NO: 623901 - DNA, 15 bp, Homo sapiens
ccgaccggagccgcc

SEQ ID NO: 623902 - DNA, 15 bp, Homo sapiens
cgaccggagccgccg

SEQ ID NO: 623903 - DNA, 15 bp, Homo sapiens
gaccggagccgccgc

SEQ ID NO: 623904 - DNA, 15 bp, Homo sapiens
accggagccgccgca

SEQ ID NO: 623905 - DNA, 15 bp, Homo sapiens
ccggagccgccgcaa

SEQ ID NO: 623906 - DNA, 15 bp, Homo sapiens
cggagccgccgcaag

SEQ ID NO: 623907 - DNA, 15 bp, Homo sapiens
ggagccgccgcaagc

SEQ ID NO: 623908 - DNA, 15 bp, Homo sapiens
gagccgccgcaagcg

SEQ ID NO: 623909 - DNA, 15 bp, Homo sapiens
agccgccgcaagcgc

SEQ ID NO: 623910 - DNA, 15 bp, Homo sapiens
gccgccgcaagcgcc

SEQ ID NO: 623911 - DNA, 15 bp, Homo sapiens
ccgccgcaagcgccc

SEQ ID NO: 623912 - DNA, 15 bp, Homo sapiens
cgccgcaagcgcccc

SEQ ID NO: 623913 - DNA, 15 bp, Homo sapiens
gccgcaagcgccccc

SEQ ID NO: 623914 - DNA, 15 bp, Homo sapiens
ccgcaagcgccccct

SEQ ID NO: 623915 - DNA, 15 bp, Homo sapiens
cgcaagcgccccctg

SEQ ID NO: 623916 - DNA, 15 bp, Homo sapiens
gcaagcgccccctgc

SEQ ID NO: 623917 - DNA, 15 bp, Homo sapiens
caagcgccccctgca

SEQ ID NO: 623918 - DNA, 15 bp, Homo sapiens
aagcgccccctgcag

SEQ ID NO: 623919 - DNA, 15 bp, Homo sapiens
agcgccccctgcagg

SEQ ID NO: 623920 - DNA, 15 bp, Homo sapiens
gcgccccctgcaggc

SEQ ID NO: 623921 - DNA, 15 bp, Homo sapiens
cgccccctgcaggcg

SEQ ID NO: 623922 - DNA, 15 bp, Homo sapiens
gccccctgcaggcgg

SEQ ID NO: 623923 - DNA, 15 bp, Homo sapiens
ccccctgcaggcggc

SEQ ID NO: 623924 - DNA, 15 bp, Homo sapiens
cccctgcaggcggcg

SEQ ID NO: 623925 - DNA, 15 bp, Homo sapiens
ccctgcaggcggcgc

SEQ ID NO: 623926 - DNA, 15 bp, Homo sapiens
cctgcaggcggcgcg

SEQ ID NO: 623927 - DNA, 15 bp, Homo sapiens
ctgcaggcggcgcgc

SEQ ID NO: 623928 - DNA, 15 bp, Homo sapiens
tgcaggcggcgcgcc

SEQ ID NO: 623929 - DNA, 15 bp, Homo sapiens
gcaggcggcgcgcca

SEQ ID NO: 623930 - DNA, 15 bp, Homo sapiens
caggcggcgcgccac

SEQ ID NO: 623931 - DNA, 15 bp, Homo sapiens
aggcggcgcgccaca

SEQ ID NO: 623932 - DNA, 15 bp, Homo sapiens
ggcggcgcgccacac

SEQ ID NO: 623933 - DNA, 15 bp, Homo sapiens
gcggcgcgccacacc

SEQ ID NO: 623934 - DNA, 15 bp, Homo sapiens
cggcgcgccacaccg

SEQ ID NO: 623935 - DNA, 15 bp, Homo sapiens
ggcgcgccacaccgc

SEQ ID NO: 623936 - DNA, 15 bp, Homo sapiens
gcgcgccacaccgct

SEQ ID NO: 623937 - DNA, 15 bp, Homo sapiens
cgcgccacaccgctg

SEQ ID NO: 623938 - DNA, 15 bp, Homo sapiens
gcgccacaccgctgg

SEQ ID NO: 623939 - DNA, 15 bp, Homo sapiens
cgccacaccgctggc

SEQ ID NO: 623940 - DNA, 15 bp, Homo sapiens
gccacaccgctggcc

SEQ ID NO: 623941 - DNA, 15 bp, Homo sapiens
ccacaccgctggccc

SEQ ID NO: 623942 - DNA, 15 bp, Homo sapiens
cacaccgctggccct

SEQ ID NO: 623943 - DNA, 15 bp, Homo sapiens
acaccgctggccctc

SEQ ID NO: 623944 - DNA, 15 bp, Homo sapiens
caccgctggccctcc

SEQ ID NO: 623945 - DNA, 15 bp, Homo sapiens
accgctggccctccg

SEQ ID NO: 623946 - DNA, 15 bp, Homo sapiens
ccgctggccctccgg

SEQ ID NO: 623947 - DNA, 15 bp, Homo sapiens
cgctggccctccggc

SEQ ID NO: 623948 - DNA, 15 bp, Homo sapiens
gctggccctccggca

SEQ ID NO: 623949 - DNA, 15 bp, Homo sapiens
ctggccctccggcac

SEQ ID NO: 623950 - DNA, 15 bp, Homo sapiens
tggccctccggcacc

SEQ ID NO: 623951 - DNA, 15 bp, Homo sapiens
ggccctccggcaccg

SEQ ID NO: 623952 - DNA, 15 bp, Homo sapiens
gccctccggcaccgc

SEQ ID NO: 623953 - DNA, 15 bp, Homo sapiens
ccctccggcaccgcc

SEQ ID NO: 623954 - DNA, 15 bp, Homo sapiens
cctccggcaccgccc

SEQ ID NO: 623955 - DNA, 15 bp, Homo sapiens
ctccggcaccgcccc

SEQ ID NO: 623956 - DNA, 15 bp, Homo sapiens
tccggcaccgccccc

SEQ ID NO: 623957 - DNA, 15 bp, Homo sapiens
ccggcaccgccccct

SEQ ID NO: 623958 - DNA, 15 bp, Homo sapiens
cggcaccgccccctc

SEQ ID NO: 623959 - DNA, 15 bp, Homo sapiens
ggcaccgccccctcc

SEQ ID NO: 623960 - DNA, 15 bp, Homo sapiens
gcaccgccccctccc

SEQ ID NO: 623961 - DNA, 15 bp, Homo sapiens
caccgccccctcccg

SEQ ID NO: 623962 - DNA, 15 bp, Homo sapiens
accgccccctcccgg

SEQ ID NO: 623963 - DNA, 15 bp, Homo sapiens
ccgccccctcccggc

SEQ ID NO: 623964 - DNA, 15 bp, Homo sapiens
cgccccctcccggcc

SEQ ID NO: 623965 - DNA, 15 bp, Homo sapiens
gccccctcccggccc

SEQ ID NO: 623966 - DNA, 15 bp, Homo sapiens
ccccctcccggcccc

SEQ ID NO: 623967 - DNA, 15 bp, Homo sapiens
cccctcccggccccg

SEQ ID NO: 623968 - DNA, 15 bp, Homo sapiens
ccctcccggccccgc

SEQ ID NO: 623969 - DNA, 15 bp, Homo sapiens
cctcccggccccgct

SEQ ID NO: 623970 - DNA, 15 bp, Homo sapiens
ctcccggccccgctc

SEQ ID NO: 623971 - DNA, 15 bp, Homo sapiens
tcccggccccgctcc

SEQ ID NO: 623972 - DNA, 15 bp, Homo sapiens
cccggccccgctccg

SEQ ID NO: 623973 - DNA, 15 bp, Homo sapiens
ccggccccgctccgc

SEQ ID NO: 623974 - DNA, 15 bp, Homo sapiens
cggccccgctccgcc

SEQ ID NO: 623975 - DNA, 15 bp, Homo sapiens
ggccccgctccgccc

SEQ ID NO: 623976 - DNA, 15 bp, Homo sapiens
gccccgctccgcccg

SEQ ID NO: 623977 - DNA, 15 bp, Homo sapiens
ccccgctccgcccgc

SEQ ID NO: 623978 - DNA, 15 bp, Homo sapiens
cccgctccgcccgcc

SEQ ID NO: 623979 - DNA, 15 bp, Homo sapiens
ccgctccgcccgccg

SEQ ID NO: 623980 - DNA, 15 bp, Homo sapiens
cgctccgcccgccgc

SEQ ID NO: 623981 - DNA, 15 bp, Homo sapiens
gctccgcccgccgcc

SEQ ID NO: 623982 - DNA, 15 bp, Homo sapiens
ctccgcccgccgccc

SEQ ID NO: 623983 - DNA, 15 bp, Homo sapiens
tccgcccgccgcccc

SEQ ID NO: 623984 - DNA, 15 bp, Homo sapiens
ccgcccgccgccccc

SEQ ID NO: 623985 - DNA, 15 bp, Homo sapiens
cgcccgccgcccccc

SEQ ID NO: 623986 - DNA, 15 bp, Homo sapiens
gcccgccgccccccg

SEQ ID NO: 623987 - DNA, 15 bp, Homo sapiens
cccgccgccccccgg

SEQ ID NO: 623988 - DNA, 15 bp, Homo sapiens
ccgccgccccccggt

SEQ ID NO: 623989 - DNA, 15 bp, Homo sapiens
cgccgccccccggta

SEQ ID NO: 623990 - DNA, 15 bp, Homo sapiens
gccgccccccggtac

SEQ ID NO: 623991 - DNA, 15 bp, Homo sapiens
ccgccccccggtact

SEQ ID NO: 623992 - DNA, 15 bp, Homo sapiens
cgccccccggtactg

SEQ ID NO: 623993 - DNA, 15 bp, Homo sapiens
gccccccggtactgc

SEQ ID NO: 623994 - DNA, 15 bp, Homo sapiens
ccccccggtactgcc

SEQ ID NO: 623995 - DNA, 15 bp, Homo sapiens
cccccggtactgccc

SEQ ID NO: 623996 - DNA, 15 bp, Homo sapiens
ccccggtactgccca

SEQ ID NO: 623997 - DNA, 15 bp, Homo sapiens
cccggtactgcccac

SEQ ID NO: 623998 - DNA, 15 bp, Homo sapiens
ccggtactgcccacc

SEQ ID NO: 623999 - DNA, 15 bp, Homo sapiens
cggtactgcccacct

SEQ ID NO: 624000 - DNA, 15 bp, Homo sapiens
ggtactgcccacctt

SEQ ID NO: 624001 - DNA, 15 bp, Homo sapiens
gtactgcccaccttc

SEQ ID NO: 624002 - DNA, 15 bp, Homo sapiens
tactgcccaccttca

SEQ ID NO: 624003 - DNA, 15 bp, Homo sapiens
actgcccaccttcag

SEQ ID NO: 624004 - DNA, 15 bp, Homo sapiens
ctgcccaccttcagc

SEQ ID NO: 624005 - DNA, 15 bp, Homo sapiens
tgcccaccttcagcc

SEQ ID NO: 624006 - DNA, 15 bp, Homo sapiens
gcccaccttcagccc

SEQ ID NO: 624007 - DNA, 15 bp, Homo sapiens
cccaccttcagccca

SEQ ID NO: 624008 - DNA, 15 bp, Homo sapiens
ccaccttcagcccac

SEQ ID NO: 624009 - DNA, 15 bp, Homo sapiens
caccttcagcccacc

SEQ ID NO: 624010 - DNA, 15 bp, Homo sapiens
accttcagcccaccc

SEQ ID NO: 624011 - DNA, 15 bp, Homo sapiens
ccttcagcccacccc

SEQ ID NO: 624012 - DNA, 15 bp, Homo sapiens
cttcagcccaccccg

SEQ ID NO: 624013 - DNA, 15 bp, Homo sapiens
ttcagcccaccccgc

SEQ ID NO: 624014 - DNA, 15 bp, Homo sapiens
tcagcccaccccgca

SEQ ID NO: 624015 - DNA, 15 bp, Homo sapiens
cagcccaccccgcag

SEQ ID NO: 624016 - DNA, 15 bp, Homo sapiens
agcccaccccgcagc

SEQ ID NO: 624017 - DNA, 15 bp, Homo sapiens
gcccaccccgcagcc

SEQ ID NO: 624018 - DNA, 15 bp, Homo sapiens
cccaccccgcagccc

SEQ ID NO: 624019 - DNA, 15 bp, Homo sapiens
ccaccccgcagcccc

SEQ ID NO: 624020 - DNA, 15 bp, Homo sapiens
caccccgcagccccc

SEQ ID NO: 624021 - DNA, 15 bp, Homo sapiens
accccgcagcccccg

SEQ ID NO: 624022 - DNA, 15 bp, Homo sapiens
ccccgcagcccccgc

SEQ ID NO: 624023 - DNA, 15 bp, Homo sapiens
cccgcagcccccgcg

SEQ ID NO: 624024 - DNA, 15 bp, Homo sapiens
ccgcagcccccgcgc

SEQ ID NO: 624025 - DNA, 15 bp, Homo sapiens
cgcagcccccgcgct

SEQ ID NO: 624026 - DNA, 15 bp, Homo sapiens
gcagcccccgcgctc

SEQ ID NO: 624027 - DNA, 15 bp, Homo sapiens
cagcccccgcgctct

SEQ ID NO: 624028 - DNA, 15 bp, Homo sapiens
agcccccgcgctctg

SEQ ID NO: 624029 - DNA, 15 bp, Homo sapiens
gcccccgcgctctgc

SEQ ID NO: 624030 - DNA, 15 bp, Homo sapiens
cccccgcgctctgcg

SEQ ID NO: 624031 - DNA, 15 bp, Homo sapiens
ccccgcgctctgcgc

SEQ ID NO: 624032 - DNA, 15 bp, Homo sapiens
cccgcgctctgcgct

SEQ ID NO: 624033 - DNA, 15 bp, Homo sapiens
ccgcgctctgcgctc

SEQ ID NO: 624034 - DNA, 15 bp, Homo sapiens
cgcgctctgcgctcc

SEQ ID NO: 624035 - DNA, 15 bp, Homo sapiens
gcgctctgcgctccc

SEQ ID NO: 624036 - DNA, 15 bp, Homo sapiens
cgctctgcgctccca

SEQ ID NO: 624037 - DNA, 15 bp, Homo sapiens
gctctgcgctcccag

SEQ ID NO: 624038 - DNA, 15 bp, Homo sapiens
ctctgcgctcccaga

SEQ ID NO: 624039 - DNA, 15 bp, Homo sapiens
tctgcgctcccagac

SEQ ID NO: 624040 - DNA, 15 bp, Homo sapiens
ctgcgctcccagact

SEQ ID NO: 624041 - DNA, 15 bp, Homo sapiens
tgcgctcccagactc

SEQ ID NO: 624042 - DNA, 15 bp, Homo sapiens
gcgctcccagactct

SEQ ID NO: 624043 - DNA, 15 bp, Homo sapiens
cgctcccagactctg

SEQ ID NO: 624044 - DNA, 15 bp, Homo sapiens
gctcccagactctgc

SEQ ID NO: 624045 - DNA, 15 bp, Homo sapiens
ctcccagactctgcg

SEQ ID NO: 624046 - DNA, 15 bp, Homo sapiens
tcccagactctgcgc

SEQ ID NO: 624047 - DNA, 15 bp, Homo sapiens
cccagactctgcgct

SEQ ID NO: 624048 - DNA, 15 bp, Homo sapiens
ccagactctgcgctg

SEQ ID NO: 624049 - DNA, 15 bp, Homo sapiens
cagactctgcgctgc

SEQ ID NO: 624050 - DNA, 15 bp, Homo sapiens
agactctgcgctgca

SEQ ID NO: 624051 - DNA, 15 bp, Homo sapiens
gactctgcgctgcaa

SEQ ID NO: 624052 - DNA, 15 bp, Homo sapiens
actctgcgctgcaaa

SEQ ID NO: 624053 - DNA, 15 bp, Homo sapiens
ctctgcgctgcaaag

SEQ ID NO: 624054 - DNA, 15 bp, Homo sapiens
tctgcgctgcaaagg

SEQ ID NO: 624055 - DNA, 15 bp, Homo sapiens
ctgcgctgcaaagga

SEQ ID NO: 624056 - DNA, 15 bp, Homo sapiens
tgcgctgcaaaggag

SEQ ID NO: 624057 - DNA, 15 bp, Homo sapiens
gcgctgcaaaggagt

SEQ ID NO: 624058 - DNA, 15 bp, Homo sapiens
cgctgcaaaggagtg

SEQ ID NO: 624059 - DNA, 15 bp, Homo sapiens
gctgcaaaggagtgt

SEQ ID NO: 624060 - DNA, 15 bp, Homo sapiens
ctgcaaaggagtgtc

SEQ ID NO: 624061 - DNA, 15 bp, Homo sapiens
tgcaaaggagtgtcg

SEQ ID NO: 624062 - DNA, 15 bp, Homo sapiens
gcaaaggagtgtcgg

SEQ ID NO: 624063 - DNA, 15 bp, Homo sapiens
caaaggagtgtcggg

SEQ ID NO: 624064 - DNA, 15 bp, Homo sapiens
aaaggagtgtcggga

SEQ ID NO: 624065 - DNA, 15 bp, Homo sapiens
aaggagtgtcgggat

SEQ ID NO: 624066 - DNA, 15 bp, Homo sapiens
aggagtgtcgggatt

SEQ ID NO: 624067 - DNA, 15 bp, Homo sapiens
ggagtgtcgggatta

SEQ ID NO: 624068 - DNA, 15 bp, Homo sapiens
gagtgtcgggattag

SEQ ID NO: 624069 - DNA, 15 bp, Homo sapiens
agtgtcgggattagg

SEQ ID NO: 624070 - DNA, 15 bp, Homo sapiens
gtgtcgggattaggg

SEQ ID NO: 624071 - DNA, 15 bp, Homo sapiens
tgtcgggattagggt

SEQ ID NO: 624072 - DNA, 15 bp, Homo sapiens
gtcgggattagggtc

SEQ ID NO: 624073 - DNA, 15 bp, Homo sapiens
tcgggattagggtcc

SEQ ID NO: 624074 - DNA, 15 bp, Homo sapiens
cgggattagggtccc

SEQ ID NO: 624075 - DNA, 15 bp, Homo sapiens
gggattagggtccca

SEQ ID NO: 624076 - DNA, 15 bp, Homo sapiens
ggattagggtcccat

SEQ ID NO: 624077 - DNA, 15 bp, Homo sapiens
gattagggtcccatc

SEQ ID NO: 624078 - DNA, 15 bp, Homo sapiens
attagggtcccatca

SEQ ID NO: 624079 - DNA, 15 bp, Homo sapiens
ttagggtcccatcac

SEQ ID NO: 624080 - DNA, 15 bp, Homo sapiens
tagggtcccatcacc

SEQ ID NO: 624081 - DNA, 15 bp, Homo sapiens
agggtcccatcaccc

SEQ ID NO: 624082 - DNA, 15 bp, Homo sapiens
gggtcccatcacccg

SEQ ID NO: 624083 - DNA, 15 bp, Homo sapiens
ggtcccatcacccgg

SEQ ID NO: 624084 - DNA, 15 bp, Homo sapiens
gtcccatcacccggg

SEQ ID NO: 624085 - DNA, 15 bp, Homo sapiens
tcccatcacccgggt

SEQ ID NO: 624086 - DNA, 15 bp, Homo sapiens
cccatcacccgggtt

SEQ ID NO: 624087 - DNA, 15 bp, Homo sapiens
ccatcacccgggttc

SEQ ID NO: 624088 - DNA, 15 bp, Homo sapiens
catcacccgggttct

SEQ ID NO: 624089 - DNA, 15 bp, Homo sapiens
atcacccgggttctt

SEQ ID NO: 624090 - DNA, 15 bp, Homo sapiens
tcacccgggttcttg

SEQ ID NO: 624091 - DNA, 15 bp, Homo sapiens
cacccgggttcttgg

SEQ ID NO: 624092 - DNA, 15 bp, Homo sapiens
acccgggttcttggg

SEQ ID NO: 624093 - DNA, 15 bp, Homo sapiens
cccgggttcttgggt

SEQ ID NO: 624094 - DNA, 15 bp, Homo sapiens
ccgggttcttgggtt

SEQ ID NO: 624095 - DNA, 15 bp, Homo sapiens
cgggttcttgggttt

SEQ ID NO: 624096 - DNA, 15 bp, Homo sapiens
gggttcttgggtttc

SEQ ID NO: 624097 - DNA, 15 bp, Homo sapiens
ggttcttgggtttcg

SEQ ID NO: 624098 - DNA, 15 bp, Homo sapiens
gttcttgggtttcga

SEQ ID NO: 624099 - DNA, 15 bp, Homo sapiens
ttcttgggtttcgag

SEQ ID NO: 624100 - DNA, 15 bp, Homo sapiens
tcttgggtttcgaga

SEQ ID NO: 624101 - DNA, 15 bp, Homo sapiens
cttgggtttcgagag

SEQ ID NO: 624102 - DNA, 15 bp, Homo sapiens
ttgggtttcgagagt

SEQ ID NO: 624103 - DNA, 15 bp, Homo sapiens
tgggtttcgagagtc

SEQ ID NO: 624104 - DNA, 15 bp, Homo sapiens
gggtttcgagagtcc

SEQ ID NO: 624105 - DNA, 15 bp, Homo sapiens
ggtttcgagagtccc

SEQ ID NO: 624106 - DNA, 15 bp, Homo sapiens
gtttcgagagtcccc

SEQ ID NO: 624107 - DNA, 15 bp, Homo sapiens
tttcgagagtcccca

SEQ ID NO: 624108 - DNA, 15 bp, Homo sapiens
ttcgagagtccccaa

SEQ ID NO: 624109 - DNA, 15 bp, Homo sapiens
tcgagagtccccaaa

SEQ ID NO: 624110 - DNA, 15 bp, Homo sapiens
cgagagtccccaaaa

SEQ ID NO: 624111 - DNA, 15 bp, Homo sapiens
gagagtccccaaaat

SEQ ID NO: 624112 - DNA, 15 bp, Homo sapiens
agagtccccaaaatt

SEQ ID NO: 624113 - DNA, 15 bp, Homo sapiens
gagtccccaaaattt

SEQ ID NO: 624114 - DNA, 15 bp, Homo sapiens
agtccccaaaatttg

SEQ ID NO: 624115 - DNA, 15 bp, Homo sapiens
gtccccaaaatttgg

SEQ ID NO: 624116 - DNA, 15 bp, Homo sapiens
tccccaaaatttggt

SEQ ID NO: 624117 - DNA, 15 bp, Homo sapiens
ccccaaaatttggtg

SEQ ID NO: 624118 - DNA, 15 bp, Homo sapiens
cccaaaatttggtgc

SEQ ID NO: 624119 - DNA, 15 bp, Homo sapiens
ccaaaatttggtgca

SEQ ID NO: 624120 - DNA, 15 bp, Homo sapiens
caaaatttggtgcaa

SEQ ID NO: 624121 - DNA, 15 bp, Homo sapiens
aaaatttggtgcaaa

SEQ ID NO: 624122 - DNA, 15 bp, Homo sapiens
aaatttggtgcaaaa

SEQ ID NO: 624123 - DNA, 15 bp, Homo sapiens
aatttggtgcaaaat

SEQ ID NO: 624124 - DNA, 15 bp, Homo sapiens
atttggtgcaaaatt

SEQ ID NO: 624125 - DNA, 15 bp, Homo sapiens
tttggtgcaaaattt

SEQ ID NO: 624126 - DNA, 15 bp, Homo sapiens
ttggtgcaaaatttg

SEQ ID NO: 624127 - DNA, 15 bp, Homo sapiens
tggtgcaaaatttgt

SEQ ID NO: 624128 - DNA, 15 bp, Homo sapiens
ggtgcaaaatttgtg

SEQ ID NO: 624129 - DNA, 15 bp, Homo sapiens
gtgcaaaatttgtgt

SEQ ID NO: 624130 - DNA, 15 bp, Homo sapiens
tgcaaaatttgtgtg

SEQ ID NO: 624131 - DNA, 15 bp, Homo sapiens
gcaaaatttgtgtgt

SEQ ID NO: 624132 - DNA, 15 bp, Homo sapiens
caaaatttgtgtgtg

SEQ ID NO: 624133 - DNA, 15 bp, Homo sapiens
aaaatttgtgtgtgt

SEQ ID NO: 624134 - DNA, 15 bp, Homo sapiens
aaatttgtgtgtgtg

SEQ ID NO: 624135 - DNA, 15 bp, Homo sapiens
aatttgtgtgtgtgt

SEQ ID NO: 624136 - DNA, 15 bp, Homo sapiens
atttgtgtgtgtgta

SEQ ID NO: 624137 - DNA, 15 bp, Homo sapiens
tttgtgtgtgtgtag

SEQ ID NO: 624138 - DNA, 15 bp, Homo sapiens
ttgtgtgtgtgtagg

SEQ ID NO: 624139 - DNA, 15 bp, Homo sapiens
tgtgtgtgtgtaggt

SEQ ID NO: 624140 - DNA, 15 bp, Homo sapiens
gtgtgtgtgtaggtg

SEQ ID NO: 624141 - DNA, 15 bp, Homo sapiens
tgtgtgtgtaggtgg

SEQ ID NO: 624142 - DNA, 15 bp, Homo sapiens
gtgtgtgtaggtggg

SEQ ID NO: 624143 - DNA, 15 bp, Homo sapiens
tgtgtgtaggtgggg

SEQ ID NO: 624144 - DNA, 15 bp, Homo sapiens
gtgtgtaggtgggga

SEQ ID NO: 624145 - DNA, 15 bp, Homo sapiens
tgtgtaggtggggag

SEQ ID NO: 624146 - DNA, 15 bp, Homo sapiens
gtgtaggtggggagt

SEQ ID NO: 624147 - DNA, 15 bp, Homo sapiens
tgtaggtggggagtg

SEQ ID NO: 624148 - DNA, 15 bp, Homo sapiens
gtaggtggggagtgg

SEQ ID NO: 624149 - DNA, 15 bp, Homo sapiens
taggtggggagtgga

SEQ ID NO: 624150 - DNA, 15 bp, Homo sapiens
aggtggggagtggat

SEQ ID NO: 624151 - DNA, 15 bp, Homo sapiens
ggtggggagtggata

SEQ ID NO: 624152 - DNA, 15 bp, Homo sapiens
gtggggagtggatat

SEQ ID NO: 624153 - DNA, 15 bp, Homo sapiens
tggggagtggatatt

SEQ ID NO: 624154 - DNA, 15 bp, Homo sapiens
ggggagtggatattg

SEQ ID NO: 624155 - DNA, 15 bp, Homo sapiens
gggagtggatattgc

SEQ ID NO: 624156 - DNA, 15 bp, Homo sapiens
ggagtggatattgcc

SEQ ID NO: 624157 - DNA, 15 bp, Homo sapiens
gagtggatattgcct

SEQ ID NO: 624158 - DNA, 15 bp, Homo sapiens
agtggatattgccta

SEQ ID NO: 624159 - DNA, 15 bp, Homo sapiens
gtggatattgcctac

SEQ ID NO: 624160 - DNA, 15 bp, Homo sapiens
tggatattgcctaca

SEQ ID NO: 624161 - DNA, 15 bp, Homo sapiens
ggatattgcctacaa

SEQ ID NO: 624162 - DNA, 15 bp, Homo sapiens
gatattgcctacaac

SEQ ID NO: 624163 - DNA, 15 bp, Homo sapiens
atattgcctacaaca

SEQ ID NO: 624164 - DNA, 15 bp, Homo sapiens
tattgcctacaacac

SEQ ID NO: 624165 - DNA, 15 bp, Homo sapiens
attgcctacaacact

SEQ ID NO: 624166 - DNA, 15 bp, Homo sapiens
ttgcctacaacactc

SEQ ID NO: 624167 - DNA, 15 bp, Homo sapiens
tgcctacaacactct

SEQ ID NO: 624168 - DNA, 15 bp, Homo sapiens
gcctacaacactctc

SEQ ID NO: 624169 - DNA, 15 bp, Homo sapiens
cctacaacactctca

SEQ ID NO: 624170 - DNA, 15 bp, Homo sapiens
ctacaacactctcaa

SEQ ID NO: 624171 - DNA, 15 bp, Homo sapiens
tacaacactctcaag

SEQ ID NO: 624172 - DNA, 15 bp, Homo sapiens
acaacactctcaagg

SEQ ID NO: 624173 - DNA, 15 bp, Homo sapiens
caacactctcaaggg

SEQ ID NO: 624174 - DNA, 15 bp, Homo sapiens
aacactctcaagggg

SEQ ID NO: 624175 - DNA, 15 bp, Homo sapiens
acactctcaaggggt

SEQ ID NO: 624176 - DNA, 15 bp, Homo sapiens
cactctcaaggggta

SEQ ID NO: 624177 - DNA, 15 bp, Homo sapiens
actctcaaggggtac

SEQ ID NO: 624178 - DNA, 15 bp, Homo sapiens
ctctcaaggggtacg

SEQ ID NO: 624179 - DNA, 15 bp, Homo sapiens
tctcaaggggtacgg

SEQ ID NO: 624180 - DNA, 15 bp, Homo sapiens
ctcaaggggtacggt

SEQ ID NO: 624181 - DNA, 15 bp, Homo sapiens
tcaaggggtacggtc

SEQ ID NO: 624182 - DNA, 15 bp, Homo sapiens
caaggggtacggtca

SEQ ID NO: 624183 - DNA, 15 bp, Homo sapiens
aaggggtacggtcat

SEQ ID NO: 624184 - DNA, 15 bp, Homo sapiens
aggggtacggtcatg

SEQ ID NO: 624185 - DNA, 15 bp, Homo sapiens
ggggtacggtcatga

SEQ ID NO: 624186 - DNA, 15 bp, Homo sapiens
gggtacggtcatgaa

SEQ ID NO: 624187 - DNA, 15 bp, Homo sapiens
ggtacggtcatgaaa

SEQ ID NO: 624188 - DNA, 15 bp, Homo sapiens
gtacggtcatgaaag

SEQ ID NO: 624189 - DNA, 15 bp, Homo sapiens
tacggtcatgaaagt

SEQ ID NO: 624190 - DNA, 15 bp, Homo sapiens
acggtcatgaaagtc

SEQ ID NO: 624191 - DNA, 15 bp, Homo sapiens
cggtcatgaaagtct

SEQ ID NO: 624192 - DNA, 15 bp, Homo sapiens
ggtcatgaaagtctc

SEQ ID NO: 624193 - DNA, 15 bp, Homo sapiens
gtcatgaaagtctca

SEQ ID NO: 624194 - DNA, 15 bp, Homo sapiens
tcatgaaagtctcag

SEQ ID NO: 624195 - DNA, 15 bp, Homo sapiens
catgaaagtctcaga

SEQ ID NO: 624196 - DNA, 15 bp, Homo sapiens
atgaaagtctcagaa

SEQ ID NO: 624197 - DNA, 15 bp, Homo sapiens
tgaaagtctcagaaa

SEQ ID NO: 624198 - DNA, 15 bp, Homo sapiens
gaaagtctcagaaaa

SEQ ID NO: 624199 - DNA, 15 bp, Homo sapiens
aaagtctcagaaaac

SEQ ID NO: 624200 - DNA, 15 bp, Homo sapiens
aagtctcagaaaact

SEQ ID NO: 624201 - DNA, 15 bp, Homo sapiens
agtctcagaaaactg

SEQ ID NO: 624202 - DNA, 15 bp, Homo sapiens
gtctcagaaaactgt

SEQ ID NO: 624203 - DNA, 15 bp, Homo sapiens
tctcagaaaactgta

SEQ ID NO: 624204 - DNA, 15 bp, Homo sapiens
ctcagaaaactgtaa

SEQ ID NO: 624205 - DNA, 15 bp, Homo sapiens
tcagaaaactgtaag

SEQ ID NO: 624206 - DNA, 15 bp, Homo sapiens
cagaaaactgtaaga

SEQ ID NO: 624207 - DNA, 15 bp, Homo sapiens
agaaaactgtaagaa

SEQ ID NO: 624208 - DNA, 15 bp, Homo sapiens
gaaaactgtaagaac

SEQ ID NO: 624209 - DNA, 15 bp, Homo sapiens
aaaactgtaagaact

SEQ ID NO: 624210 - DNA, 15 bp, Homo sapiens
aaactgtaagaactc

SEQ ID NO: 624211 - DNA, 15 bp, Homo sapiens
aactgtaagaactcc

SEQ ID NO: 624212 - DNA, 15 bp, Homo sapiens
actgtaagaactccc

SEQ ID NO: 624213 - DNA, 15 bp, Homo sapiens
ctgtaagaactccct

SEQ ID NO: 624214 - DNA, 15 bp, Homo sapiens
tgtaagaactccctg

SEQ ID NO: 624215 - DNA, 15 bp, Homo sapiens
gtaagaactccctgc

SEQ ID NO: 624216 - DNA, 15 bp, Homo sapiens
taagaactccctgct

SEQ ID NO: 624217 - DNA, 15 bp, Homo sapiens
aagaactccctgctc

SEQ ID NO: 624218 - DNA, 15 bp, Homo sapiens
agaactccctgctcg

SEQ ID NO: 624219 - DNA, 15 bp, Homo sapiens
gaactccctgctcga

SEQ ID NO: 624220 - DNA, 15 bp, Homo sapiens
aactccctgctcgat

SEQ ID NO: 624221 - DNA, 15 bp, Homo sapiens
actccctgctcgatg

SEQ ID NO: 624222 - DNA, 15 bp, Homo sapiens
ctccctgctcgatgg

SEQ ID NO: 624223 - DNA, 15 bp, Homo sapiens
tccctgctcgatggc

SEQ ID NO: 624224 - DNA, 15 bp, Homo sapiens
ccctgctcgatggcc

SEQ ID NO: 624225 - DNA, 15 bp, Homo sapiens
cctgctcgatggccc

SEQ ID NO: 624226 - DNA, 15 bp, Homo sapiens
ctgctcgatggcccc

SEQ ID NO: 624227 - DNA, 15 bp, Homo sapiens
tgctcgatggccccc

SEQ ID NO: 624228 - DNA, 15 bp, Homo sapiens
gctcgatggccccct

SEQ ID NO: 624229 - DNA, 15 bp, Homo sapiens
ctcgatggccccctt

SEQ ID NO: 624230 - DNA, 15 bp, Homo sapiens
tcgatggcccccttc

SEQ ID NO: 624231 - DNA, 15 bp, Homo sapiens
cgatggcccccttct

SEQ ID NO: 624232 - DNA, 15 bp, Homo sapiens
gatggcccccttctc

SEQ ID NO: 624233 - DNA, 15 bp, Homo sapiens
atggcccccttctcc

SEQ ID NO: 624234 - DNA, 15 bp, Homo sapiens
tggcccccttctccc

SEQ ID NO: 624235 - DNA, 15 bp, Homo sapiens
ggcccccttctcccg

SEQ ID NO: 624236 - DNA, 15 bp, Homo sapiens
gcccccttctcccgg

SEQ ID NO: 624237 - DNA, 15 bp, Homo sapiens
cccccttctcccggt

SEQ ID NO: 624238 - DNA, 15 bp, Homo sapiens
ccccttctcccggta

SEQ ID NO: 624239 - DNA, 15 bp, Homo sapiens
cccttctcccggtag

SEQ ID NO: 624240 - DNA, 15 bp, Homo sapiens
ccttctcccggtaga

SEQ ID NO: 624241 - DNA, 15 bp, Homo sapiens
cttctcccggtagaa

SEQ ID NO: 624242 - DNA, 15 bp, Homo sapiens
ttctcccggtagaac

SEQ ID NO: 624243 - DNA, 15 bp, Homo sapiens
tctcccggtagaaca

SEQ ID NO: 624244 - DNA, 15 bp, Homo sapiens
ctcccggtagaacac

SEQ ID NO: 624245 - DNA, 15 bp, Homo sapiens
tcccggtagaacacc

SEQ ID NO: 624246 - DNA, 15 bp, Homo sapiens
cccggtagaacacct

SEQ ID NO: 624247 - DNA, 15 bp, Homo sapiens
ccggtagaacaccta

SEQ ID NO: 624248 - DNA, 15 bp, Homo sapiens
cggtagaacacctag

SEQ ID NO: 624249 - DNA, 15 bp, Homo sapiens
ggtagaacacctagg

SEQ ID NO: 624250 - DNA, 15 bp, Homo sapiens
gtagaacacctaggc

SEQ ID NO: 624251 - DNA, 15 bp, Homo sapiens
tagaacacctaggca

SEQ ID NO: 624252 - DNA, 15 bp, Homo sapiens
agaacacctaggcag

SEQ ID NO: 624253 - DNA, 15 bp, Homo sapiens
gaacacctaggcagt

SEQ ID NO: 624254 - DNA, 15 bp, Homo sapiens
aacacctaggcagtg

SEQ ID NO: 624255 - DNA, 15 bp, Homo sapiens
acacctaggcagtgc

SEQ ID NO: 624256 - DNA, 15 bp, Homo sapiens
cacctaggcagtgct

SEQ ID NO: 624257 - DNA, 15 bp, Homo sapiens
acctaggcagtgctg

SEQ ID NO: 624258 - DNA, 15 bp, Homo sapiens
cctaggcagtgctgg

SEQ ID NO: 624259 - DNA, 15 bp, Homo sapiens
ctaggcagtgctggg

SEQ ID NO: 624260 - DNA, 15 bp, Homo sapiens
taggcagtgctgggg

SEQ ID NO: 624261 - DNA, 15 bp, Homo sapiens
aggcagtgctggggt

SEQ ID NO: 624262 - DNA, 15 bp, Homo sapiens
ggcagtgctggggtg

SEQ ID NO: 624263 - DNA, 15 bp, Homo sapiens
gcagtgctggggtga

SEQ ID NO: 624264 - DNA, 15 bp, Homo sapiens
cagtgctggggtgat

SEQ ID NO: 624265 - DNA, 15 bp, Homo sapiens
agtgctggggtgata

SEQ ID NO: 624266 - DNA, 15 bp, Homo sapiens
gtgctggggtgatag

SEQ ID NO: 624267 - DNA, 15 bp, Homo sapiens
tgctggggtgatagc

SEQ ID NO: 624268 - DNA, 15 bp, Homo sapiens
gctggggtgatagca

SEQ ID NO: 624269 - DNA, 15 bp, Homo sapiens
ctggggtgatagcag

SEQ ID NO: 624270 - DNA, 15 bp, Homo sapiens
tggggtgatagcagg

SEQ ID NO: 624271 - DNA, 15 bp, Homo sapiens
ggggtgatagcaggg

SEQ ID NO: 624272 - DNA, 15 bp, Homo sapiens
gggtgatagcaggga

SEQ ID NO: 624273 - DNA, 15 bp, Homo sapiens
ggtgatagcagggaa

SEQ ID NO: 624274 - DNA, 15 bp, Homo sapiens
gtgatagcagggaag

SEQ ID NO: 624275 - DNA, 15 bp, Homo sapiens
tgatagcagggaagg

SEQ ID NO: 624276 - DNA, 15 bp, Homo sapiens
gatagcagggaaggc

SEQ ID NO: 624277 - DNA, 15 bp, Homo sapiens
atagcagggaaggcc

SEQ ID NO: 624278 - DNA, 15 bp, Homo sapiens
tagcagggaaggccc

SEQ ID NO: 624279 - DNA, 15 bp, Homo sapiens
agcagggaaggcccc

SEQ ID NO: 624280 - DNA, 15 bp, Homo sapiens
gcagggaaggccccc

SEQ ID NO: 624281 - DNA, 15 bp, Homo sapiens
cagggaaggccccct

SEQ ID NO: 624282 - DNA, 15 bp, Homo sapiens
agggaaggcccccta

SEQ ID NO: 624283 - DNA, 15 bp, Homo sapiens
gggaaggccccctag

SEQ ID NO: 624284 - DNA, 15 bp, Homo sapiens
ggaaggccccctaga

SEQ ID NO: 624285 - DNA, 15 bp, Homo sapiens
gaaggccccctagac

SEQ ID NO: 624286 - DNA, 15 bp, Homo sapiens
aaggccccctagacc

SEQ ID NO: 624287 - DNA, 15 bp, Homo sapiens
aggccccctagaccc

SEQ ID NO: 624288 - DNA, 15 bp, Homo sapiens
ggccccctagacccc

SEQ ID NO: 624289 - DNA, 15 bp, Homo sapiens
gccccctagaccccc

SEQ ID NO: 624290 - DNA, 15 bp, Homo sapiens
ccccctagacccccc

SEQ ID NO: 624291 - DNA, 15 bp, Homo sapiens
cccctagacccccct

SEQ ID NO: 624292 - DNA, 15 bp, Homo sapiens
ccctagaccccccta

SEQ ID NO: 624293 - DNA, 15 bp, Homo sapiens
cctagacccccctaa

SEQ ID NO: 624294 - DNA, 15 bp, Homo sapiens
ctagacccccctaag

SEQ ID NO: 624295 - DNA, 15 bp, Homo sapiens
tagacccccctaagt

SEQ ID NO: 624296 - DNA, 15 bp, Homo sapiens
agacccccctaagtc

SEQ ID NO: 624297 - DNA, 15 bp, Homo sapiens
gacccccctaagtct

SEQ ID NO: 624298 - DNA, 15 bp, Homo sapiens
acccccctaagtctc

SEQ ID NO: 624299 - DNA, 15 bp, Homo sapiens
cccccctaagtctct

SEQ ID NO: 624300 - DNA, 15 bp, Homo sapiens
ccccctaagtctctc

SEQ ID NO: 624301 - DNA, 15 bp, Homo sapiens
cccctaagtctctct

SEQ ID NO: 624302 - DNA, 15 bp, Homo sapiens
ccctaagtctctctt

SEQ ID NO: 624303 - DNA, 15 bp, Homo sapiens
cctaagtctctcttt

SEQ ID NO: 624304 - DNA, 15 bp, Homo sapiens
ctaagtctctctttt

SEQ ID NO: 624305 - DNA, 15 bp, Homo sapiens
taagtctctcttttt

SEQ ID NO: 624306 - DNA, 15 bp, Homo sapiens
aagtctctctttttt

SEQ ID NO: 624307 - DNA, 15 bp, Homo sapiens
agtctctcttttttt

SEQ ID NO: 624308 - DNA, 15 bp, Homo sapiens
gtctctctttttttt

SEQ ID NO: 624309 - DNA, 15 bp, Homo sapiens
tctctcttttttttt

SEQ ID NO: 624310 - DNA, 15 bp, Homo sapiens
ctctctttttttttt

SEQ ID NO: 624311 - DNA, 15 bp, Homo sapiens
tctcttttttttttt

SEQ ID NO: 624312 - DNA, 15 bp, Homo sapiens
ctctttttttttttt

SEQ ID NO: 624313 - DNA, 15 bp, Homo sapiens
tcttttttttttttt

SEQ ID NO: 624314 - DNA, 15 bp, Homo sapiens
ttttttttttttttg

SEQ ID NO: 624315 - DNA, 15 bp, Homo sapiens
tttttttttttttga

SEQ ID NO: 624316 - DNA, 15 bp, Homo sapiens
ttttttttttttgag

SEQ ID NO: 624317 - DNA, 15 bp, Homo sapiens
tttttttttttgaga

SEQ ID NO: 624318 - DNA, 15 bp, Homo sapiens
ttttttttttgagac

SEQ ID NO: 624319 - DNA, 15 bp, Homo sapiens
tttttttttgagaca

SEQ ID NO: 624320 - DNA, 15 bp, Homo sapiens
ttttttttgagacag

SEQ ID NO: 624321 - DNA, 15 bp, Homo sapiens
tttttttgagacaga

SEQ ID NO: 624322 - DNA, 15 bp, Homo sapiens
ttttttgagacagat

SEQ ID NO: 624323 - DNA, 15 bp, Homo sapiens
tttttgagacagatt

SEQ ID NO: 624324 - DNA, 15 bp, Homo sapiens
ttttgagacagattt

SEQ ID NO: 624325 - DNA, 15 bp, Homo sapiens
tttgagacagatttt

SEQ ID NO: 624326 - DNA, 15 bp, Homo sapiens
ttgagacagattttt

SEQ ID NO: 624327 - DNA, 15 bp, Homo sapiens
tgagacagatttttt

SEQ ID NO: 624328 - DNA, 15 bp, Homo sapiens
gagacagattttttt

SEQ ID NO: 624329 - DNA, 15 bp, Homo sapiens
agacagatttttttt

SEQ ID NO: 624330 - DNA, 15 bp, Homo sapiens
gacagattttttttt

SEQ ID NO: 624331 - DNA, 15 bp, Homo sapiens
acagatttttttttt

SEQ ID NO: 624332 - DNA, 15 bp, Homo sapiens
cagattttttttttt

SEQ ID NO: 624333 - DNA, 15 bp, Homo sapiens
agatttttttttttc

SEQ ID NO: 624334 - DNA, 15 bp, Homo sapiens
gatttttttttttca

SEQ ID NO: 624335 - DNA, 15 bp, Homo sapiens
atttttttttttcag

SEQ ID NO: 624336 - DNA, 15 bp, Homo sapiens
tttttttttttcaga

SEQ ID NO: 624337 - DNA, 15 bp, Homo sapiens
ttttttttttcagag

SEQ ID NO: 624338 - DNA, 15 bp, Homo sapiens
tttttttttcagaga

SEQ ID NO: 624339 - DNA, 15 bp, Homo sapiens
ttttttttcagagac

SEQ ID NO: 624340 - DNA, 15 bp, Homo sapiens
tttttttcagagaca

SEQ ID NO: 624341 - DNA, 15 bp, Homo sapiens
ttttttcagagacaa

SEQ ID NO: 624342 - DNA, 15 bp, Homo sapiens
tttttcagagacaag

SEQ ID NO: 624343 - DNA, 15 bp, Homo sapiens
ttttcagagacaagt

SEQ ID NO: 624344 - DNA, 15 bp, Homo sapiens
tttcagagacaagtg

SEQ ID NO: 624345 - DNA, 15 bp, Homo sapiens
ttcagagacaagtga

SEQ ID NO: 624346 - DNA, 15 bp, Homo sapiens
tcagagacaagtgaa

SEQ ID NO: 624347 - DNA, 15 bp, Homo sapiens
cagagacaagtgaac

SEQ ID NO: 624348 - DNA, 15 bp, Homo sapiens
agagacaagtgaaca

SEQ ID NO: 624349 - DNA, 15 bp, Homo sapiens
gagacaagtgaacat

SEQ ID NO: 624350 - DNA, 15 bp, Homo sapiens
agacaagtgaacatt

SEQ ID NO: 624351 - DNA, 15 bp, Homo sapiens
gacaagtgaacattt

SEQ ID NO: 624352 - DNA, 15 bp, Homo sapiens
acaagtgaacattta

SEQ ID NO: 624353 - DNA, 15 bp, Homo sapiens
caagtgaacatttat

SEQ ID NO: 624354 - DNA, 15 bp, Homo sapiens
aagtgaacatttatt

SEQ ID NO: 624355 - DNA, 15 bp, Homo sapiens
agtgaacatttattt

SEQ ID NO: 624356 - DNA, 15 bp, Homo sapiens
gtgaacatttatttt

SEQ ID NO: 624357 - DNA, 15 bp, Homo sapiens
tgaacatttattttt

SEQ ID NO: 624358 - DNA, 15 bp, Homo sapiens
gaacatttatttttg

SEQ ID NO: 624359 - DNA, 15 bp, Homo sapiens
aacatttatttttgg

SEQ ID NO: 624360 - DNA, 15 bp, Homo sapiens
acatttatttttggg

SEQ ID NO: 624361 - DNA, 15 bp, Homo sapiens
catttatttttgggc

SEQ ID NO: 624362 - DNA, 15 bp, Homo sapiens
atttatttttgggcc

SEQ ID NO: 624363 - DNA, 15 bp, Homo sapiens
tttatttttgggcct

SEQ ID NO: 624364 - DNA, 15 bp, Homo sapiens
ttatttttgggcctt

SEQ ID NO: 624365 - DNA, 15 bp, Homo sapiens
tatttttgggccttt

SEQ ID NO: 624366 - DNA, 15 bp, Homo sapiens
atttttgggcctttc

SEQ ID NO: 624367 - DNA, 15 bp, Homo sapiens
tttttgggcctttct

SEQ ID NO: 624368 - DNA, 15 bp, Homo sapiens
ttttgggcctttctt

SEQ ID NO: 624369 - DNA, 15 bp, Homo sapiens
tttgggcctttcttc

SEQ ID NO: 624370 - DNA, 15 bp, Homo sapiens
ttgggcctttcttcc

SEQ ID NO: 624371 - DNA, 15 bp, Homo sapiens
tgggcctttcttcct

SEQ ID NO: 624372 - DNA, 15 bp, Homo sapiens
gggcctttcttccta

SEQ ID NO: 624373 - DNA, 15 bp, Homo sapiens
ggcctttcttcctat

SEQ ID NO: 624374 - DNA, 15 bp, Homo sapiens
gcctttcttcctatt

SEQ ID NO: 624375 - DNA, 15 bp, Homo sapiens
cctttcttcctattt

SEQ ID NO: 624376 - DNA, 15 bp, Homo sapiens
ctttcttcctatttc

SEQ ID NO: 624377 - DNA, 15 bp, Homo sapiens
tttcttcctatttca

SEQ ID NO: 624378 - DNA, 15 bp, Homo sapiens
ttcttcctatttcaa

SEQ ID NO: 624379 - DNA, 15 bp, Homo sapiens
tcttcctatttcaag

SEQ ID NO: 624380 - DNA, 15 bp, Homo sapiens
cttcctatttcaagt

SEQ ID NO: 624381 - DNA, 15 bp, Homo sapiens
ttcctatttcaagtc

SEQ ID NO: 624382 - DNA, 15 bp, Homo sapiens
tcctatttcaagtct

SEQ ID NO: 624383 - DNA, 15 bp, Homo sapiens
cctatttcaagtctt

SEQ ID NO: 624384 - DNA, 15 bp, Homo sapiens
ctatttcaagtcttt

SEQ ID NO: 624385 - DNA, 15 bp, Homo sapiens
tatttcaagtctttt

SEQ ID NO: 624386 - DNA, 15 bp, Homo sapiens
atttcaagtcttttt

SEQ ID NO: 624387 - DNA, 15 bp, Homo sapiens
tttcaagtctttttc

SEQ ID NO: 624388 - DNA, 15 bp, Homo sapiens
ttcaagtctttttca

SEQ ID NO: 624389 - DNA, 15 bp, Homo sapiens
tcaagtctttttcaa

SEQ ID NO: 624390 - DNA, 15 bp, Homo sapiens
caagtctttttcaaa

SEQ ID NO: 624391 - DNA, 15 bp, Homo sapiens
aagtctttttcaaaa

SEQ ID NO: 624392 - DNA, 15 bp, Homo sapiens
agtctttttcaaaac

SEQ ID NO: 624393 - DNA, 15 bp, Homo sapiens
gtctttttcaaaaca

SEQ ID NO: 624394 - DNA, 15 bp, Homo sapiens
tctttttcaaaacaa

SEQ ID NO: 624395 - DNA, 15 bp, Homo sapiens
ctttttcaaaacaag

SEQ ID NO: 624396 - DNA, 15 bp, Homo sapiens
tttttcaaaacaagg

SEQ ID NO: 624397 - DNA, 15 bp, Homo sapiens
ttttcaaaacaaggc

SEQ ID NO: 624398 - DNA, 15 bp, Homo sapiens
tttcaaaacaaggcc

SEQ ID NO: 624399 - DNA, 15 bp, Homo sapiens
ttcaaaacaaggccc

SEQ ID NO: 624400 - DNA, 15 bp, Homo sapiens
tcaaaacaaggcccc

SEQ ID NO: 624401 - DNA, 15 bp, Homo sapiens
caaaacaaggcccca

SEQ ID NO: 624402 - DNA, 15 bp, Homo sapiens
aaaacaaggccccaa

SEQ ID NO: 624403 - DNA, 15 bp, Homo sapiens
aaacaaggccccaag

SEQ ID NO: 624404 - DNA, 15 bp, Homo sapiens
aacaaggccccaaga

SEQ ID NO: 624405 - DNA, 15 bp, Homo sapiens
acaaggccccaagaa

SEQ ID NO: 624406 - DNA, 15 bp, Homo sapiens
caaggccccaagaat

SEQ ID NO: 624407 - DNA, 15 bp, Homo sapiens
aaggccccaagaatc

SEQ ID NO: 624408 - DNA, 15 bp, Homo sapiens
aggccccaagaatct

SEQ ID NO: 624409 - DNA, 15 bp, Homo sapiens
ggccccaagaatctc

SEQ ID NO: 624410 - DNA, 15 bp, Homo sapiens
gccccaagaatctcc

SEQ ID NO: 624411 - DNA, 15 bp, Homo sapiens
ccccaagaatctcca

SEQ ID NO: 624412 - DNA, 15 bp, Homo sapiens
cccaagaatctccaa

SEQ ID NO: 624413 - DNA, 15 bp, Homo sapiens
ccaagaatctccaaa

SEQ ID NO: 624414 - DNA, 15 bp, Homo sapiens
caagaatctccaaat

SEQ ID NO: 624415 - DNA, 15 bp, Homo sapiens
aagaatctccaaatt

SEQ ID NO: 624416 - DNA, 15 bp, Homo sapiens
agaatctccaaattc

SEQ ID NO: 624417 - DNA, 15 bp, Homo sapiens
gaatctccaaattca

SEQ ID NO: 624418 - DNA, 15 bp, Homo sapiens
aatctccaaattcaa

SEQ ID NO: 624419 - DNA, 15 bp, Homo sapiens
atctccaaattcaat

SEQ ID NO: 624420 - DNA, 15 bp, Homo sapiens
tctccaaattcaatt

SEQ ID NO: 624421 - DNA, 15 bp, Homo sapiens
ctccaaattcaatta

SEQ ID NO: 624422 - DNA, 15 bp, Homo sapiens
tccaaattcaattat

SEQ ID NO: 624423 - DNA, 15 bp, Homo sapiens
ccaaattcaattatg

SEQ ID NO: 624424 - DNA, 15 bp, Homo sapiens
caaattcaattatgt

SEQ ID NO: 624425 - DNA, 15 bp, Homo sapiens
aaattcaattatgtc

SEQ ID NO: 624426 - DNA, 15 bp, Homo sapiens
aattcaattatgtcc

SEQ ID NO: 624427 - DNA, 15 bp, Homo sapiens
attcaattatgtccc

SEQ ID NO: 624428 - DNA, 15 bp, Homo sapiens
ttcaattatgtccct

SEQ ID NO: 624429 - DNA, 15 bp, Homo sapiens
tcaattatgtccctg

SEQ ID NO: 624430 - DNA, 15 bp, Homo sapiens
caattatgtccctgg

SEQ ID NO: 624431 - DNA, 15 bp, Homo sapiens
aattatgtccctggg

SEQ ID NO: 624432 - DNA, 15 bp, Homo sapiens
attatgtccctgggc

SEQ ID NO: 624433 - DNA, 15 bp, Homo sapiens
ttatgtccctgggct

SEQ ID NO: 624434 - DNA, 15 bp, Homo sapiens
tatgtccctgggctt

SEQ ID NO: 624435 - DNA, 15 bp, Homo sapiens
atgtccctgggcttg

SEQ ID NO: 624436 - DNA, 15 bp, Homo sapiens
tgtccctgggcttgg

SEQ ID NO: 624437 - DNA, 15 bp, Homo sapiens
gtccctgggcttggc

SEQ ID NO: 624438 - DNA, 15 bp, Homo sapiens
tccctgggcttggcc

SEQ ID NO: 624439 - DNA, 15 bp, Homo sapiens
ccctgggcttggccg

SEQ ID NO: 624440 - DNA, 15 bp, Homo sapiens
cctgggcttggccga

SEQ ID NO: 624441 - DNA, 15 bp, Homo sapiens
ctgggcttggccgac

SEQ ID NO: 624442 - DNA, 15 bp, Homo sapiens
tgggcttggccgact

SEQ ID NO: 624443 - DNA, 15 bp, Homo sapiens
gggcttggccgactg

SEQ ID NO: 624444 - DNA, 15 bp, Homo sapiens
ggcttggccgactgg

SEQ ID NO: 624445 - DNA, 15 bp, Homo sapiens
gcttggccgactggt

SEQ ID NO: 624446 - DNA, 15 bp, Homo sapiens
cttggccgactggtg

SEQ ID NO: 624447 - DNA, 15 bp, Homo sapiens
ttggccgactggtgc

SEQ ID NO: 624448 - DNA, 15 bp, Homo sapiens
tggccgactggtgca

SEQ ID NO: 624449 - DNA, 15 bp, Homo sapiens
ggccgactggtgcag

SEQ ID NO: 624450 - DNA, 15 bp, Homo sapiens
gccgactggtgcagg

SEQ ID NO: 624451 - DNA, 15 bp, Homo sapiens
ccgactggtgcagga

SEQ ID NO: 624452 - DNA, 15 bp, Homo sapiens
cgactggtgcaggag

SEQ ID NO: 624453 - DNA, 15 bp, Homo sapiens
gactggtgcaggagt

SEQ ID NO: 624454 - DNA, 15 bp, Homo sapiens
actggtgcaggagtc

SEQ ID NO: 624455 - DNA, 15 bp, Homo sapiens
ctggtgcaggagtct

SEQ ID NO: 624456 - DNA, 15 bp, Homo sapiens
tggtgcaggagtctt

SEQ ID NO: 624457 - DNA, 15 bp, Homo sapiens
ggtgcaggagtctta

SEQ ID NO: 624458 - DNA, 15 bp, Homo sapiens
gtgcaggagtcttag

SEQ ID NO: 624459 - DNA, 15 bp, Homo sapiens
tgcaggagtcttagg

SEQ ID NO: 624460 - DNA, 15 bp, Homo sapiens
gcaggagtcttaggg

SEQ ID NO: 624461 - DNA, 15 bp, Homo sapiens
caggagtcttaggga

SEQ ID NO: 624462 - DNA, 15 bp, Homo sapiens
aggagtcttagggag

SEQ ID NO: 624463 - DNA, 15 bp, Homo sapiens
ggagtcttagggagc

SEQ ID NO: 624464 - DNA, 15 bp, Homo sapiens
gagtcttagggagcc

SEQ ID NO: 624465 - DNA, 15 bp, Homo sapiens
agtcttagggagcct

SEQ ID NO: 624466 - DNA, 15 bp, Homo sapiens
gtcttagggagcctt

SEQ ID NO: 624467 - DNA, 15 bp, Homo sapiens
tcttagggagccttg

SEQ ID NO: 624468 - DNA, 15 bp, Homo sapiens
cttagggagccttgt

SEQ ID NO: 624469 - DNA, 15 bp, Homo sapiens
ttagggagccttgta

SEQ ID NO: 624470 - DNA, 15 bp, Homo sapiens
tagggagccttgtac

SEQ ID NO: 624471 - DNA, 15 bp, Homo sapiens
agggagccttgtaca

SEQ ID NO: 624472 - DNA, 15 bp, Homo sapiens
gggagccttgtacaa

SEQ ID NO: 624473 - DNA, 15 bp, Homo sapiens
ggagccttgtacaaa

SEQ ID NO: 624474 - DNA, 15 bp, Homo sapiens
gagccttgtacaaat

SEQ ID NO: 624475 - DNA, 15 bp, Homo sapiens
agccttgtacaaatg

SEQ ID NO: 624476 - DNA, 15 bp, Homo sapiens
gccttgtacaaatgc

SEQ ID NO: 624477 - DNA, 15 bp, Homo sapiens
ccttgtacaaatgct

SEQ ID NO: 624478 - DNA, 15 bp, Homo sapiens
cttgtacaaatgcta

SEQ ID NO: 624479 - DNA, 15 bp, Homo sapiens
ttgtacaaatgctag

SEQ ID NO: 624480 - DNA, 15 bp, Homo sapiens
tgtacaaatgctaga

SEQ ID NO: 624481 - DNA, 15 bp, Homo sapiens
gtacaaatgctagag

SEQ ID NO: 624482 - DNA, 15 bp, Homo sapiens
tacaaatgctagagt

SEQ ID NO: 624483 - DNA, 15 bp, Homo sapiens
acaaatgctagagtt

SEQ ID NO: 624484 - DNA, 15 bp, Homo sapiens
caaatgctagagtta

SEQ ID NO: 624485 - DNA, 15 bp, Homo sapiens
aaatgctagagttac

SEQ ID NO: 624486 - DNA, 15 bp, Homo sapiens
aatgctagagttact

SEQ ID NO: 624487 - DNA, 15 bp, Homo sapiens
atgctagagttactc

SEQ ID NO: 624488 - DNA, 15 bp, Homo sapiens
tgctagagttactca

SEQ ID NO: 624489 - DNA, 15 bp, Homo sapiens
gctagagttactcac

SEQ ID NO: 624490 - DNA, 15 bp, Homo sapiens
ctagagttactcact

SEQ ID NO: 624491 - DNA, 15 bp, Homo sapiens
tagagttactcactt

SEQ ID NO: 624492 - DNA, 15 bp, Homo sapiens
agagttactcactta

SEQ ID NO: 624493 - DNA, 15 bp, Homo sapiens
gagttactcacttac

SEQ ID NO: 624494 - DNA, 15 bp, Homo sapiens
agttactcacttacc

SEQ ID NO: 624495 - DNA, 15 bp, Homo sapiens
gttactcacttaccg

SEQ ID NO: 624496 - DNA, 15 bp, Homo sapiens
ttactcacttaccga

SEQ ID NO: 624497 - DNA, 15 bp, Homo sapiens
tactcacttaccgac

SEQ ID NO: 624498 - DNA, 15 bp, Homo sapiens
actcacttaccgaca

SEQ ID NO: 624499 - DNA, 15 bp, Homo sapiens
ctcacttaccgacat

SEQ ID NO: 624500 - DNA, 15 bp, Homo sapiens
tcacttaccgacatt

SEQ ID NO: 624501 - DNA, 15 bp, Homo sapiens
cacttaccgacatta

SEQ ID NO: 624502 - DNA, 15 bp, Homo sapiens
acttaccgacattaa

SEQ ID NO: 624503 - DNA, 15 bp, Homo sapiens
cttaccgacattaaa

SEQ ID NO: 624504 - DNA, 15 bp, Homo sapiens
ttaccgacattaaac

SEQ ID NO: 624505 - DNA, 15 bp, Homo sapiens
taccgacattaaact

SEQ ID NO: 624506 - DNA, 15 bp, Homo sapiens
accgacattaaacta

SEQ ID NO: 624507 - DNA, 15 bp, Homo sapiens
ccgacattaaactaa

SEQ ID NO: 624508 - DNA, 15 bp, Homo sapiens
cgacattaaactaaa

SEQ ID NO: 624509 - DNA, 15 bp, Homo sapiens
gacattaaactaaaa

SEQ ID NO: 624510 - DNA, 15 bp, Homo sapiens
acattaaactaaaac

SEQ ID NO: 624511 - DNA, 15 bp, Homo sapiens
cattaaactaaaacg

SEQ ID NO: 624512 - DNA, 15 bp, Homo sapiens
attaaactaaaacgc

SEQ ID NO: 624513 - DNA, 15 bp, Homo sapiens
ttaaactaaaacgct

SEQ ID NO: 624514 - DNA, 15 bp, Homo sapiens
taaactaaaacgctg

SEQ ID NO: 624515 - DNA, 15 bp, Homo sapiens
aaactaaaacgctgg

SEQ ID NO: 624516 - DNA, 15 bp, Homo sapiens
aactaaaacgctgga

SEQ ID NO: 624517 - DNA, 15 bp, Homo sapiens
actaaaacgctggaa

SEQ ID NO: 624518 - DNA, 15 bp, Homo sapiens
ctaaaacgctggaat

SEQ ID NO: 624519 - DNA, 15 bp, Homo sapiens
taaaacgctggaatt

SEQ ID NO: 624520 - DNA, 15 bp, Homo sapiens
aaaacgctggaattt

SEQ ID NO: 624521 - DNA, 15 bp, Homo sapiens
aaacgctggaatttt

SEQ ID NO: 624522 - DNA, 15 bp, Homo sapiens
aacgctggaattttt

SEQ ID NO: 624523 - DNA, 15 bp, Homo sapiens
acgctggaatttttc

SEQ ID NO: 624524 - DNA, 15 bp, Homo sapiens
cgctggaatttttcc

SEQ ID NO: 624525 - DNA, 15 bp, Homo sapiens
gctggaatttttcct

SEQ ID NO: 624526 - DNA, 15 bp, Homo sapiens
ctggaatttttcctt

SEQ ID NO: 624527 - DNA, 15 bp, Homo sapiens
tggaatttttccttg

SEQ ID NO: 624528 - DNA, 15 bp, Homo sapiens
ggaatttttccttgg

SEQ ID NO: 624529 - DNA, 15 bp, Homo sapiens
gaatttttccttgga

SEQ ID NO: 624530 - DNA, 15 bp, Homo sapiens
aatttttccttggaa

SEQ ID NO: 624531 - DNA, 15 bp, Homo sapiens
atttttccttggaaa

SEQ ID NO: 624532 - DNA, 15 bp, Homo sapiens
tttttccttggaaac

SEQ ID NO: 624533 - DNA, 15 bp, Homo sapiens
ttttccttggaaact

SEQ ID NO: 624534 - DNA, 15 bp, Homo sapiens
tttccttggaaactg

SEQ ID NO: 624535 - DNA, 15 bp, Homo sapiens
ttccttggaaactgg

SEQ ID NO: 624536 - DNA, 15 bp, Homo sapiens
tccttggaaactgga

SEQ ID NO: 624537 - DNA, 15 bp, Homo sapiens
ccttggaaactggac

SEQ ID NO: 624538 - DNA, 15 bp, Homo sapiens
cttggaaactggact

SEQ ID NO: 624539 - DNA, 15 bp, Homo sapiens
ttggaaactggactg

SEQ ID NO: 624540 - DNA, 15 bp, Homo sapiens
tggaaactggactgt

SEQ ID NO: 624541 - DNA, 15 bp, Homo sapiens
ggaaactggactgtg

SEQ ID NO: 624542 - DNA, 15 bp, Homo sapiens
gaaactggactgtga

SEQ ID NO: 624543 - DNA, 15 bp, Homo sapiens
aaactggactgtgat

SEQ ID NO: 624544 - DNA, 15 bp, Homo sapiens
aactggactgtgatt

SEQ ID NO: 624545 - DNA, 15 bp, Homo sapiens
actggactgtgatta

SEQ ID NO: 624546 - DNA, 15 bp, Homo sapiens
ctggactgtgattag

SEQ ID NO: 624547 - DNA, 15 bp, Homo sapiens
tggactgtgattaga

SEQ ID NO: 624548 - DNA, 15 bp, Homo sapiens
ggactgtgattagag

SEQ ID NO: 624549 - DNA, 15 bp, Homo sapiens
gactgtgattagagg

SEQ ID NO: 624550 - DNA, 15 bp, Homo sapiens
actgtgattagaggt

SEQ ID NO: 624551 - DNA, 15 bp, Homo sapiens
ctgtgattagaggtg

SEQ ID NO: 624552 - DNA, 15 bp, Homo sapiens
tgtgattagaggtgc

SEQ ID NO: 624553 - DNA, 15 bp, Homo sapiens
gtgattagaggtgct

SEQ ID NO: 624554 - DNA, 15 bp, Homo sapiens
tgattagaggtgctt

SEQ ID NO: 624555 - DNA, 15 bp, Homo sapiens
gattagaggtgcttg

SEQ ID NO: 624556 - DNA, 15 bp, Homo sapiens
attagaggtgcttgc

SEQ ID NO: 624557 - DNA, 15 bp, Homo sapiens
ttagaggtgcttgcc

SEQ ID NO: 624558 - DNA, 15 bp, Homo sapiens
tagaggtgcttgcca

SEQ ID NO: 624559 - DNA, 15 bp, Homo sapiens
agaggtgcttgccat

SEQ ID NO: 624560 - DNA, 15 bp, Homo sapiens
gaggtgcttgccatg

SEQ ID NO: 624561 - DNA, 15 bp, Homo sapiens
aggtgcttgccatga

SEQ ID NO: 624562 - DNA, 15 bp, Homo sapiens
ggtgcttgccatgaa

SEQ ID NO: 624563 - DNA, 15 bp, Homo sapiens
gtgcttgccatgaac

SEQ ID NO: 624564 - DNA, 15 bp, Homo sapiens
tgcttgccatgaaca

SEQ ID NO: 624565 - DNA, 15 bp, Homo sapiens
gcttgccatgaacat

SEQ ID NO: 624566 - DNA, 15 bp, Homo sapiens
cttgccatgaacata

SEQ ID NO: 624567 - DNA, 15 bp, Homo sapiens
ttgccatgaacataa

SEQ ID NO: 624568 - DNA, 15 bp, Homo sapiens
tgccatgaacataag

SEQ ID NO: 624569 - DNA, 15 bp, Homo sapiens
gccatgaacataagc

SEQ ID NO: 624570 - DNA, 15 bp, Homo sapiens
ccatgaacataagct

SEQ ID NO: 624571 - DNA, 15 bp, Homo sapiens
catgaacataagcta

SEQ ID NO: 624572 - DNA, 15 bp, Homo sapiens
atgaacataagctac

SEQ ID NO: 624573 - DNA, 15 bp, Homo sapiens
tgaacataagctact

SEQ ID NO: 624574 - DNA, 15 bp, Homo sapiens
gaacataagctactg

SEQ ID NO: 624575 - DNA, 15 bp, Homo sapiens
aacataagctactgt

SEQ ID NO: 624576 - DNA, 15 bp, Homo sapiens
acataagctactgtt

SEQ ID NO: 624577 - DNA, 15 bp, Homo sapiens
cataagctactgttt

SEQ ID NO: 624578 - DNA, 15 bp, Homo sapiens
ataagctactgtttc

SEQ ID NO: 624579 - DNA, 15 bp, Homo sapiens
taagctactgtttct

SEQ ID NO: 624580 - DNA, 15 bp, Homo sapiens
aagctactgtttctt

SEQ ID NO: 624581 - DNA, 15 bp, Homo sapiens
agctactgtttcttc

SEQ ID NO: 624582 - DNA, 15 bp, Homo sapiens
gctactgtttcttct

SEQ ID NO: 624583 - DNA, 15 bp, Homo sapiens
ctactgtttcttctc

SEQ ID NO: 624584 - DNA, 15 bp, Homo sapiens
tactgtttcttctcc

SEQ ID NO: 624585 - DNA, 15 bp, Homo sapiens
actgtttcttctcct

SEQ ID NO: 624586 - DNA, 15 bp, Homo sapiens
ctgtttcttctcctt

SEQ ID NO: 624587 - DNA, 15 bp, Homo sapiens
tgtttcttctccttc

SEQ ID NO: 624588 - DNA, 15 bp, Homo sapiens
gtttcttctccttct

SEQ ID NO: 624589 - DNA, 15 bp, Homo sapiens
tttcttctccttctt

SEQ ID NO: 624590 - DNA, 15 bp, Homo sapiens
ttcttctccttcttt

SEQ ID NO: 624591 - DNA, 15 bp, Homo sapiens
tcttctccttctttt

SEQ ID NO: 624592 - DNA, 15 bp, Homo sapiens
cttctccttcttttt

SEQ ID NO: 624593 - DNA, 15 bp, Homo sapiens
ttctccttctttttt

SEQ ID NO: 624594 - DNA, 15 bp, Homo sapiens
tctccttcttttttt

SEQ ID NO: 624595 - DNA, 15 bp, Homo sapiens
ctccttctttttttt

SEQ ID NO: 624596 - DNA, 15 bp, Homo sapiens
tccttcttttttttt

SEQ ID NO: 624597 - DNA, 15 bp, Homo sapiens
ccttctttttttttt

SEQ ID NO: 624598 - DNA, 15 bp, Homo sapiens
cttcttttttttttt

SEQ ID NO: 624599 - DNA, 15 bp, Homo sapiens
ttctttttttttttt

SEQ ID NO: 624600 - DNA, 15 bp, Homo sapiens
ttttttttttgagag

SEQ ID NO: 624601 - DNA, 15 bp, Homo sapiens
tttttttttgagaga

SEQ ID NO: 624602 - DNA, 15 bp, Homo sapiens
ttttttttgagagag

SEQ ID NO: 624603 - DNA, 15 bp, Homo sapiens
tttttttgagagaga

SEQ ID NO: 624604 - DNA, 15 bp, Homo sapiens
ttttttgagagagag

SEQ ID NO: 624605 - DNA, 15 bp, Homo sapiens
tttttgagagagagt

SEQ ID NO: 624606 - DNA, 15 bp, Homo sapiens
ttttgagagagagtc

SEQ ID NO: 624607 - DNA, 15 bp, Homo sapiens
tttgagagagagtct

SEQ ID NO: 624608 - DNA, 15 bp, Homo sapiens
ttgagagagagtctt

SEQ ID NO: 624609 - DNA, 15 bp, Homo sapiens
tgagagagagtcttg

SEQ ID NO: 624610 - DNA, 15 bp, Homo sapiens
gagagagagtcttgc

SEQ ID NO: 624611 - DNA, 15 bp, Homo sapiens
agagagagtcttgct

SEQ ID NO: 624612 - DNA, 15 bp, Homo sapiens
gagagagtcttgctc

SEQ ID NO: 624613 - DNA, 15 bp, Homo sapiens
agagagtcttgctct

SEQ ID NO: 624614 - DNA, 15 bp, Homo sapiens
gagagtcttgctctg

SEQ ID NO: 624615 - DNA, 15 bp, Homo sapiens
gagtcttgctctgtt

SEQ ID NO: 624616 - DNA, 15 bp, Homo sapiens
agtcttgctctgttg

SEQ ID NO: 624617 - DNA, 15 bp, Homo sapiens
gtcttgctctgttgc

SEQ ID NO: 624618 - DNA, 15 bp, Homo sapiens
tcttgctctgttgcc

SEQ ID NO: 624619 - DNA, 15 bp, Homo sapiens
cttgctctgttgccc

SEQ ID NO: 624620 - DNA, 15 bp, Homo sapiens
ttgctctgttgccca

SEQ ID NO: 624621 - DNA, 15 bp, Homo sapiens
tgctctgttgcccag

SEQ ID NO: 624622 - DNA, 15 bp, Homo sapiens
ggagtgcagtggcgt

SEQ ID NO: 624623 - DNA, 15 bp, Homo sapiens
cagtggcgtgatctt

SEQ ID NO: 624624 - DNA, 15 bp, Homo sapiens
agtggcgtgatcttg

SEQ ID NO: 624625 - DNA, 15 bp, Homo sapiens
gtggcgtgatcttgg

SEQ ID NO: 624626 - DNA, 15 bp, Homo sapiens
tggcgtgatcttggc

SEQ ID NO: 624627 - DNA, 15 bp, Homo sapiens
ggcgtgatcttggct

SEQ ID NO: 624628 - DNA, 15 bp, Homo sapiens
gcgtgatcttggctc

SEQ ID NO: 624629 - DNA, 15 bp, Homo sapiens
cgtgatcttggctca

SEQ ID NO: 624630 - DNA, 15 bp, Homo sapiens
gtgatcttggctcac

SEQ ID NO: 624631 - DNA, 15 bp, Homo sapiens
tgatcttggctcact

SEQ ID NO: 624632 - DNA, 15 bp, Homo sapiens
gatcttggctcactg

SEQ ID NO: 624633 - DNA, 15 bp, Homo sapiens
aacctctgcctcccg

SEQ ID NO: 624634 - DNA, 15 bp, Homo sapiens
acctctgcctcccgg

SEQ ID NO: 624635 - DNA, 15 bp, Homo sapiens
cctctgcctcccggg

SEQ ID NO: 624636 - DNA, 15 bp, Homo sapiens
ctctgcctcccgggt

SEQ ID NO: 624637 - DNA, 15 bp, Homo sapiens
tctgcctcccgggtt

SEQ ID NO: 624638 - DNA, 15 bp, Homo sapiens
ctgcctcccgggttc

SEQ ID NO: 624639 - DNA, 15 bp, Homo sapiens
tgcctcccgggttca

SEQ ID NO: 624640 - DNA, 15 bp, Homo sapiens
gcctcccgggttcaa

SEQ ID NO: 624641 - DNA, 15 bp, Homo sapiens
cctcccgggttcaag

SEQ ID NO: 624642 - DNA, 15 bp, Homo sapiens
ctcccgggttcaagt

SEQ ID NO: 624643 - DNA, 15 bp, Homo sapiens
tcccgggttcaagtg

SEQ ID NO: 624644 - DNA, 15 bp, Homo sapiens
cccgggttcaagtga

SEQ ID NO: 624645 - DNA, 15 bp, Homo sapiens
ccgggttcaagtgat

SEQ ID NO: 624646 - DNA, 15 bp, Homo sapiens
cgggttcaagtgatt

SEQ ID NO: 624647 - DNA, 15 bp, Homo sapiens
gggttcaagtgattc

SEQ ID NO: 624648 - DNA, 15 bp, Homo sapiens
caagtgattctcctg

SEQ ID NO: 624649 - DNA, 15 bp, Homo sapiens
aagtgattctcctgc

SEQ ID NO: 624650 - DNA, 15 bp, Homo sapiens
agtgattctcctgcc

SEQ ID NO: 624651 - DNA, 15 bp, Homo sapiens
gtgattctcctgcct

SEQ ID NO: 624652 - DNA, 15 bp, Homo sapiens
tgattctcctgcctc

SEQ ID NO: 624653 - DNA, 15 bp, Homo sapiens
ccaagtagctgggac

SEQ ID NO: 624654 - DNA, 15 bp, Homo sapiens
caagtagctgggact

SEQ ID NO: 624655 - DNA, 15 bp, Homo sapiens
aagtagctgggacta

SEQ ID NO: 624656 - DNA, 15 bp, Homo sapiens
gctgggactacaggt

SEQ ID NO: 624657 - DNA, 15 bp, Homo sapiens
ctgggactacaggtg

SEQ ID NO: 624658 - DNA, 15 bp, Homo sapiens
tgggactacaggtgc

SEQ ID NO: 624659 - DNA, 15 bp, Homo sapiens
gggactacaggtgca

SEQ ID NO: 624660 - DNA, 15 bp, Homo sapiens
ggactacaggtgcac

SEQ ID NO: 624661 - DNA, 15 bp, Homo sapiens
gactacaggtgcacg

SEQ ID NO: 624662 - DNA, 15 bp, Homo sapiens
actacaggtgcacgc

SEQ ID NO: 624663 - DNA, 15 bp, Homo sapiens
ctacaggtgcacgcc

SEQ ID NO: 624664 - DNA, 15 bp, Homo sapiens
tacaggtgcacgcca

SEQ ID NO: 624665 - DNA, 15 bp, Homo sapiens
acaggtgcacgccac

SEQ ID NO: 624666 - DNA, 15 bp, Homo sapiens
caggtgcacgccacc

SEQ ID NO: 624667 - DNA, 15 bp, Homo sapiens
aggtgcacgccacca

SEQ ID NO: 624668 - DNA, 15 bp, Homo sapiens
ggtgcacgccaccat

SEQ ID NO: 624669 - DNA, 15 bp, Homo sapiens
gtgcacgccaccatg

SEQ ID NO: 624670 - DNA, 15 bp, Homo sapiens
tgcacgccaccatgc

SEQ ID NO: 624671 - DNA, 15 bp, Homo sapiens
gcacgccaccatgcc

SEQ ID NO: 624672 - DNA, 15 bp, Homo sapiens
cacgccaccatgccc

SEQ ID NO: 624673 - DNA, 15 bp, Homo sapiens
acgccaccatgcccg

SEQ ID NO: 624674 - DNA, 15 bp, Homo sapiens
tttagtagagacagc

SEQ ID NO: 624675 - DNA, 15 bp, Homo sapiens
ttagtagagacagcg

SEQ ID NO: 624676 - DNA, 15 bp, Homo sapiens
tagtagagacagcgt

SEQ ID NO: 624677 - DNA, 15 bp, Homo sapiens
agtagagacagcgtt

SEQ ID NO: 624678 - DNA, 15 bp, Homo sapiens
gtagagacagcgttt

SEQ ID NO: 624679 - DNA, 15 bp, Homo sapiens
tagagacagcgtttc

SEQ ID NO: 624680 - DNA, 15 bp, Homo sapiens
agagacagcgtttca

SEQ ID NO: 624681 - DNA, 15 bp, Homo sapiens
gagacagcgtttcac

SEQ ID NO: 624682 - DNA, 15 bp, Homo sapiens
agacagcgtttcact

SEQ ID NO: 624683 - DNA, 15 bp, Homo sapiens
gacagcgtttcacta

SEQ ID NO: 624684 - DNA, 15 bp, Homo sapiens
acagcgtttcactat

SEQ ID NO: 624685 - DNA, 15 bp, Homo sapiens
cagcgtttcactatg

SEQ ID NO: 624686 - DNA, 15 bp, Homo sapiens
agcgtttcactatgt

SEQ ID NO: 624687 - DNA, 15 bp, Homo sapiens
gcgtttcactatgtt

SEQ ID NO: 624688 - DNA, 15 bp, Homo sapiens
cgtttcactatgttg

SEQ ID NO: 624689 - DNA, 15 bp, Homo sapiens
gtttcactatgttgg

SEQ ID NO: 624690 - DNA, 15 bp, Homo sapiens
tttcactatgttggc

SEQ ID NO: 624691 - DNA, 15 bp, Homo sapiens
ttcactatgttggcc

SEQ ID NO: 624692 - DNA, 15 bp, Homo sapiens
tcactatgttggcca

SEQ ID NO: 624693 - DNA, 15 bp, Homo sapiens
cactatgttggccag

SEQ ID NO: 624694 - DNA, 15 bp, Homo sapiens
actatgttggccagg

SEQ ID NO: 624695 - DNA, 15 bp, Homo sapiens
ctatgttggccaggc

SEQ ID NO: 624696 - DNA, 15 bp, Homo sapiens
tatgttggccaggct

SEQ ID NO: 624697 - DNA, 15 bp, Homo sapiens
atgttggccaggctg

SEQ ID NO: 624698 - DNA, 15 bp, Homo sapiens
tgttggccaggctgg

SEQ ID NO: 624699 - DNA, 15 bp, Homo sapiens
gttggccaggctggt

SEQ ID NO: 624700 - DNA, 15 bp, Homo sapiens
ttggccaggctggtc

SEQ ID NO: 624701 - DNA, 15 bp, Homo sapiens
ggccaggctggtctc

SEQ ID NO: 624702 - DNA, 15 bp, Homo sapiens
gccaggctggtctcg

SEQ ID NO: 624703 - DNA, 15 bp, Homo sapiens
ccaggctggtctcga

SEQ ID NO: 624704 - DNA, 15 bp, Homo sapiens
caggctggtctcgaa

SEQ ID NO: 624705 - DNA, 15 bp, Homo sapiens
aggctggtctcgaac

SEQ ID NO: 624706 - DNA, 15 bp, Homo sapiens
ggctggtctcgaact

SEQ ID NO: 624707 - DNA, 15 bp, Homo sapiens
gctggtctcgaactc

SEQ ID NO: 624708 - DNA, 15 bp, Homo sapiens
ctggtctcgaactcc

SEQ ID NO: 624709 - DNA, 15 bp, Homo sapiens
tggtctcgaactcct

SEQ ID NO: 624710 - DNA, 15 bp, Homo sapiens
ggtctcgaactcctg

SEQ ID NO: 624711 - DNA, 15 bp, Homo sapiens
gtctcgaactcctga

SEQ ID NO: 624712 - DNA, 15 bp, Homo sapiens
tctcgaactcctgat

SEQ ID NO: 624713 - DNA, 15 bp, Homo sapiens
ctcgaactcctgatc

SEQ ID NO: 624714 - DNA, 15 bp, Homo sapiens
tcgaactcctgatct

SEQ ID NO: 624715 - DNA, 15 bp, Homo sapiens
cgaactcctgatctc

SEQ ID NO: 624716 - DNA, 15 bp, Homo sapiens
gaactcctgatctca

SEQ ID NO: 624717 - DNA, 15 bp, Homo sapiens
aactcctgatctcaa

SEQ ID NO: 624718 - DNA, 15 bp, Homo sapiens
actcctgatctcaag

SEQ ID NO: 624719 - DNA, 15 bp, Homo sapiens
ctcctgatctcaagt

SEQ ID NO: 624720 - DNA, 15 bp, Homo sapiens
tcctgatctcaagtg

SEQ ID NO: 624721 - DNA, 15 bp, Homo sapiens
cctgatctcaagtga

SEQ ID NO: 624722 - DNA, 15 bp, Homo sapiens
ctgatctcaagtgat

SEQ ID NO: 624723 - DNA, 15 bp, Homo sapiens
tgatctcaagtgatc

SEQ ID NO: 624724 - DNA, 15 bp, Homo sapiens
gatctcaagtgatct

SEQ ID NO: 624725 - DNA, 15 bp, Homo sapiens
atctcaagtgatcta

SEQ ID NO: 624726 - DNA, 15 bp, Homo sapiens
tctcaagtgatctac

SEQ ID NO: 624727 - DNA, 15 bp, Homo sapiens
ctcaagtgatctacc

SEQ ID NO: 624728 - DNA, 15 bp, Homo sapiens
tcaagtgatctaccc

SEQ ID NO: 624729 - DNA, 15 bp, Homo sapiens
caagtgatctacccg

SEQ ID NO: 624730 - DNA, 15 bp, Homo sapiens
aagtgatctacccgc

SEQ ID NO: 624731 - DNA, 15 bp, Homo sapiens
agtgatctacccgcc

SEQ ID NO: 624732 - DNA, 15 bp, Homo sapiens
gtgatctacccgcct

SEQ ID NO: 624733 - DNA, 15 bp, Homo sapiens
tgatctacccgcctc

SEQ ID NO: 624734 - DNA, 15 bp, Homo sapiens
gatctacccgcctcg

SEQ ID NO: 624735 - DNA, 15 bp, Homo sapiens
atctacccgcctcgg

SEQ ID NO: 624736 - DNA, 15 bp, Homo sapiens
tctacccgcctcggc

SEQ ID NO: 624737 - DNA, 15 bp, Homo sapiens
ctacccgcctcggcc

SEQ ID NO: 624738 - DNA, 15 bp, Homo sapiens
tacccgcctcggcct

SEQ ID NO: 624739 - DNA, 15 bp, Homo sapiens
acccgcctcggcctc

SEQ ID NO: 624740 - DNA, 15 bp, Homo sapiens
cccgcctcggcctcc

SEQ ID NO: 624741 - DNA, 15 bp, Homo sapiens
ccgcctcggcctccc

SEQ ID NO: 624742 - DNA, 15 bp, Homo sapiens
cgcctcggcctccca

SEQ ID NO: 624743 - DNA, 15 bp, Homo sapiens
gcctcggcctcccaa

SEQ ID NO: 624744 - DNA, 15 bp, Homo sapiens
cctcggcctcccaaa

SEQ ID NO: 624745 - DNA, 15 bp, Homo sapiens
ctcggcctcccaaag

SEQ ID NO: 624746 - DNA, 15 bp, Homo sapiens
tcggcctcccaaagt

SEQ ID NO: 624747 - DNA, 15 bp, Homo sapiens
cggcctcccaaagtg

SEQ ID NO: 624748 - DNA, 15 bp, Homo sapiens
cactctcacccccgc

SEQ ID NO: 624749 - DNA, 15 bp, Homo sapiens
actctcacccccgcc

SEQ ID NO: 624750 - DNA, 15 bp, Homo sapiens
ctctcacccccgcct

SEQ ID NO: 624751 - DNA, 15 bp, Homo sapiens
tctcacccccgcctc

SEQ ID NO: 624752 - DNA, 15 bp, Homo sapiens
ctcacccccgcctct

SEQ ID NO: 624753 - DNA, 15 bp, Homo sapiens
tcacccccgcctctc

SEQ ID NO: 624754 - DNA, 15 bp, Homo sapiens
cacccccgcctctcc

SEQ ID NO: 624755 - DNA, 15 bp, Homo sapiens
acccccgcctctccc

SEQ ID NO: 624756 - DNA, 15 bp, Homo sapiens
cccccgcctctccct

SEQ ID NO: 624757 - DNA, 15 bp, Homo sapiens
ccccgcctctccctt

SEQ ID NO: 624758 - DNA, 15 bp, Homo sapiens
cccgcctctccctta

SEQ ID NO: 624759 - DNA, 15 bp, Homo sapiens
ccgcctctcccttag

SEQ ID NO: 624760 - DNA, 15 bp, Homo sapiens
cgcctctcccttagt

SEQ ID NO: 624761 - DNA, 15 bp, Homo sapiens
gcctctcccttagtt

SEQ ID NO: 624762 - DNA, 15 bp, Homo sapiens
cctctcccttagtta

SEQ ID NO: 624763 - DNA, 15 bp, Homo sapiens
ctctcccttagttaa

SEQ ID NO: 624764 - DNA, 15 bp, Homo sapiens
tctcccttagttaat

SEQ ID NO: 624765 - DNA, 15 bp, Homo sapiens
ctcccttagttaatc

SEQ ID NO: 624766 - DNA, 15 bp, Homo sapiens
tcccttagttaatct

SEQ ID NO: 624767 - DNA, 15 bp, Homo sapiens
cccttagttaatctg

SEQ ID NO: 624768 - DNA, 15 bp, Homo sapiens
ccttagttaatctga

SEQ ID NO: 624769 - DNA, 15 bp, Homo sapiens
cttagttaatctgac

SEQ ID NO: 624770 - DNA, 15 bp, Homo sapiens
ttagttaatctgact

SEQ ID NO: 624771 - DNA, 15 bp, Homo sapiens
tagttaatctgactc

SEQ ID NO: 624772 - DNA, 15 bp, Homo sapiens
agttaatctgactcc

SEQ ID NO: 624773 - DNA, 15 bp, Homo sapiens
gttaatctgactcca

SEQ ID NO: 624774 - DNA, 15 bp, Homo sapiens
ttaatctgactccag

SEQ ID NO: 624775 - DNA, 15 bp, Homo sapiens
taatctgactccagg

SEQ ID NO: 624776 - DNA, 15 bp, Homo sapiens
aatctgactccaggc

SEQ ID NO: 624777 - DNA, 15 bp, Homo sapiens
atctgactccaggca

SEQ ID NO: 624778 - DNA, 15 bp, Homo sapiens
tctgactccaggcag

SEQ ID NO: 624779 - DNA, 15 bp, Homo sapiens
ctgactccaggcagc

SEQ ID NO: 624780 - DNA, 15 bp, Homo sapiens
tgactccaggcagcc

SEQ ID NO: 624781 - DNA, 15 bp, Homo sapiens
gactccaggcagcct

SEQ ID NO: 624782 - DNA, 15 bp, Homo sapiens
actccaggcagcctt

SEQ ID NO: 624783 - DNA, 15 bp, Homo sapiens
ctccaggcagccttg

SEQ ID NO: 624784 - DNA, 15 bp, Homo sapiens
tccaggcagccttga

SEQ ID NO: 624785 - DNA, 15 bp, Homo sapiens
ccaggcagccttgaa

SEQ ID NO: 624786 - DNA, 15 bp, Homo sapiens
caggcagccttgaaa

SEQ ID NO: 624787 - DNA, 15 bp, Homo sapiens
aggcagccttgaaac

SEQ ID NO: 624788 - DNA, 15 bp, Homo sapiens
ggcagccttgaaact

SEQ ID NO: 624789 - DNA, 15 bp, Homo sapiens
gcagccttgaaactt

SEQ ID NO: 624790 - DNA, 15 bp, Homo sapiens
cagccttgaaacttt

SEQ ID NO: 624791 - DNA, 15 bp, Homo sapiens
agccttgaaactttc

SEQ ID NO: 624792 - DNA, 15 bp, Homo sapiens
gccttgaaactttct

SEQ ID NO: 624793 - DNA, 15 bp, Homo sapiens
ccttgaaactttctc

SEQ ID NO: 624794 - DNA, 15 bp, Homo sapiens
cttgaaactttctca

SEQ ID NO: 624795 - DNA, 15 bp, Homo sapiens
ttgaaactttctcac

SEQ ID NO: 624796 - DNA, 15 bp, Homo sapiens
tgaaactttctcacc

SEQ ID NO: 624797 - DNA, 15 bp, Homo sapiens
gaaactttctcaccc

SEQ ID NO: 624798 - DNA, 15 bp, Homo sapiens
aaactttctcaccct

SEQ ID NO: 624799 - DNA, 15 bp, Homo sapiens
aactttctcaccctg

SEQ ID NO: 624800 - DNA, 15 bp, Homo sapiens
actttctcaccctgt

SEQ ID NO: 624801 - DNA, 15 bp, Homo sapiens
ctttctcaccctgtg

SEQ ID NO: 624802 - DNA, 15 bp, Homo sapiens
tttctcaccctgtga

SEQ ID NO: 624803 - DNA, 15 bp, Homo sapiens
ttctcaccctgtgaa

SEQ ID NO: 624804 - DNA, 15 bp, Homo sapiens
tctcaccctgtgaag

SEQ ID NO: 624805 - DNA, 15 bp, Homo sapiens
ctcaccctgtgaagc

SEQ ID NO: 624806 - DNA, 15 bp, Homo sapiens
tcaccctgtgaagca

SEQ ID NO: 624807 - DNA, 15 bp, Homo sapiens
caccctgtgaagcag

SEQ ID NO: 624808 - DNA, 15 bp, Homo sapiens
accctgtgaagcagt

SEQ ID NO: 624809 - DNA, 15 bp, Homo sapiens
ccctgtgaagcagtc

SEQ ID NO: 624810 - DNA, 15 bp, Homo sapiens
cctgtgaagcagtct

SEQ ID NO: 624811 - DNA, 15 bp, Homo sapiens
ctgtgaagcagtctt

SEQ ID NO: 624812 - DNA, 15 bp, Homo sapiens
tgtgaagcagtcttc

SEQ ID NO: 624813 - DNA, 15 bp, Homo sapiens
gtgaagcagtcttca

SEQ ID NO: 624814 - DNA, 15 bp, Homo sapiens
tgaagcagtcttcat

SEQ ID NO: 624815 - DNA, 15 bp, Homo sapiens
gaagcagtcttcatc

SEQ ID NO: 624816 - DNA, 15 bp, Homo sapiens
aagcagtcttcatca

SEQ ID NO: 624817 - DNA, 15 bp, Homo sapiens
agcagtcttcatcac

SEQ ID NO: 624818 - DNA, 15 bp, Homo sapiens
gcagtcttcatcacc

SEQ ID NO: 624819 - DNA, 15 bp, Homo sapiens
cagtcttcatcacct

SEQ ID NO: 624820 - DNA, 15 bp, Homo sapiens
agtcttcatcacctg

SEQ ID NO: 624821 - DNA, 15 bp, Homo sapiens
gtcttcatcacctgc

SEQ ID NO: 624822 - DNA, 15 bp, Homo sapiens
tcttcatcacctgcc

SEQ ID NO: 624823 - DNA, 15 bp, Homo sapiens
cttcatcacctgccc

SEQ ID NO: 624824 - DNA, 15 bp, Homo sapiens
ttcatcacctgccca

SEQ ID NO: 624825 - DNA, 15 bp, Homo sapiens
tcatcacctgcccac

SEQ ID NO: 624826 - DNA, 15 bp, Homo sapiens
catcacctgcccact

SEQ ID NO: 624827 - DNA, 15 bp, Homo sapiens
atcacctgcccactt

SEQ ID NO: 624828 - DNA, 15 bp, Homo sapiens
tcacctgcccacttc

SEQ ID NO: 624829 - DNA, 15 bp, Homo sapiens
cacctgcccacttct

SEQ ID NO: 624830 - DNA, 15 bp, Homo sapiens
acctgcccacttctc

SEQ ID NO: 624831 - DNA, 15 bp, Homo sapiens
cctgcccacttctcc

SEQ ID NO: 624832 - DNA, 15 bp, Homo sapiens
ctgcccacttctcca

SEQ ID NO: 624833 - DNA, 15 bp, Homo sapiens
tgcccacttctccag

SEQ ID NO: 624834 - DNA, 15 bp, Homo sapiens
gcccacttctccagc

SEQ ID NO: 624835 - DNA, 15 bp, Homo sapiens
cccacttctccagct

SEQ ID NO: 624836 - DNA, 15 bp, Homo sapiens
ccacttctccagctc

SEQ ID NO: 624837 - DNA, 15 bp, Homo sapiens
cacttctccagctcc

SEQ ID NO: 624838 - DNA, 15 bp, Homo sapiens
acttctccagctccg

SEQ ID NO: 624839 - DNA, 15 bp, Homo sapiens
cttctccagctccgt

SEQ ID NO: 624840 - DNA, 15 bp, Homo sapiens
ttctccagctccgtc

SEQ ID NO: 624841 - DNA, 15 bp, Homo sapiens
tctccagctccgtcc

SEQ ID NO: 624842 - DNA, 15 bp, Homo sapiens
ctccagctccgtcct

SEQ ID NO: 624843 - DNA, 15 bp, Homo sapiens
tccagctccgtcctg

SEQ ID NO: 624844 - DNA, 15 bp, Homo sapiens
ccagctccgtcctgt

SEQ ID NO: 624845 - DNA, 15 bp, Homo sapiens
cagctccgtcctgtc

SEQ ID NO: 624846 - DNA, 15 bp, Homo sapiens
agctccgtcctgtct

SEQ ID NO: 624847 - DNA, 15 bp, Homo sapiens
gctccgtcctgtctc

SEQ ID NO: 624848 - DNA, 15 bp, Homo sapiens
ctccgtcctgtctcc

SEQ ID NO: 624849 - DNA, 15 bp, Homo sapiens
tccgtcctgtctccg

SEQ ID NO: 624850 - DNA, 15 bp, Homo sapiens
ccgtcctgtctccgc

SEQ ID NO: 624851 - DNA, 15 bp, Homo sapiens
cgtcctgtctccgct

SEQ ID NO: 624852 - DNA, 15 bp, Homo sapiens
gtcctgtctccgctt

SEQ ID NO: 624853 - DNA, 15 bp, Homo sapiens
tcctgtctccgcttt

SEQ ID NO: 624854 - DNA, 15 bp, Homo sapiens
cctgtctccgctttc

SEQ ID NO: 624855 - DNA, 15 bp, Homo sapiens
ctgtctccgctttcc

SEQ ID NO: 624856 - DNA, 15 bp, Homo sapiens
tgtctccgctttcct

SEQ ID NO: 624857 - DNA, 15 bp, Homo sapiens
gtctccgctttcctg

SEQ ID NO: 624858 - DNA, 15 bp, Homo sapiens
tctccgctttcctga

SEQ ID NO: 624859 - DNA, 15 bp, Homo sapiens
ctccgctttcctgac

SEQ ID NO: 624860 - DNA, 15 bp, Homo sapiens
tccgctttcctgact

SEQ ID NO: 624861 - DNA, 15 bp, Homo sapiens
ccgctttcctgactt

SEQ ID NO: 624862 - DNA, 15 bp, Homo sapiens
cgctttcctgacttg

SEQ ID NO: 624863 - DNA, 15 bp, Homo sapiens
gctttcctgacttgc

SEQ ID NO: 624864 - DNA, 15 bp, Homo sapiens
ctttcctgacttgca

SEQ ID NO: 624865 - DNA, 15 bp, Homo sapiens
tttcctgacttgcag

SEQ ID NO: 624866 - DNA, 15 bp, Homo sapiens
ttcctgacttgcaga

SEQ ID NO: 624867 - DNA, 15 bp, Homo sapiens
tcctgacttgcagag

SEQ ID NO: 624868 - DNA, 15 bp, Homo sapiens
cctgacttgcagagc

SEQ ID NO: 624869 - DNA, 15 bp, Homo sapiens
ctgacttgcagagca

SEQ ID NO: 624870 - DNA, 15 bp, Homo sapiens
tgacttgcagagcat

SEQ ID NO: 624871 - DNA, 15 bp, Homo sapiens
gacttgcagagcatc

SEQ ID NO: 624872 - DNA, 15 bp, Homo sapiens
acttgcagagcatct

SEQ ID NO: 624873 - DNA, 15 bp, Homo sapiens
cttgcagagcatctg

SEQ ID NO: 624874 - DNA, 15 bp, Homo sapiens
ttgcagagcatctgc

SEQ ID NO: 624875 - DNA, 15 bp, Homo sapiens
tgcagagcatctgcc

SEQ ID NO: 624876 - DNA, 15 bp, Homo sapiens
gcagagcatctgccc

SEQ ID NO: 624877 - DNA, 15 bp, Homo sapiens
cagagcatctgcccc

SEQ ID NO: 624878 - DNA, 15 bp, Homo sapiens
agagcatctgcccca

SEQ ID NO: 624879 - DNA, 15 bp, Homo sapiens
gagcatctgccccaa

SEQ ID NO: 624880 - DNA, 15 bp, Homo sapiens
agcatctgccccaat

SEQ ID NO: 624881 - DNA, 15 bp, Homo sapiens
gcatctgccccaatc

SEQ ID NO: 624882 - DNA, 15 bp, Homo sapiens
catctgccccaatct

SEQ ID NO: 624883 - DNA, 15 bp, Homo sapiens
atctgccccaatctg

SEQ ID NO: 624884 - DNA, 15 bp, Homo sapiens
tctgccccaatctgc

SEQ ID NO: 624885 - DNA, 15 bp, Homo sapiens
ctgccccaatctgct

SEQ ID NO: 624886 - DNA, 15 bp, Homo sapiens
tgccccaatctgctc

SEQ ID NO: 624887 - DNA, 15 bp, Homo sapiens
gccccaatctgctca

SEQ ID NO: 624888 - DNA, 15 bp, Homo sapiens
ccccaatctgctcat

SEQ ID NO: 624889 - DNA, 15 bp, Homo sapiens
cccaatctgctcatc

SEQ ID NO: 624890 - DNA, 15 bp, Homo sapiens
ccaatctgctcatcc

SEQ ID NO: 624891 - DNA, 15 bp, Homo sapiens
caatctgctcatcct

SEQ ID NO: 624892 - DNA, 15 bp, Homo sapiens
aatctgctcatcctc

SEQ ID NO: 624893 - DNA, 15 bp, Homo sapiens
atctgctcatcctcc

SEQ ID NO: 624894 - DNA, 15 bp, Homo sapiens
tctgctcatcctccc

SEQ ID NO: 624895 - DNA, 15 bp, Homo sapiens
ctgctcatcctccca

SEQ ID NO: 624896 - DNA, 15 bp, Homo sapiens
tgctcatcctcccag

SEQ ID NO: 624897 - DNA, 15 bp, Homo sapiens
gctcatcctcccagt

SEQ ID NO: 624898 - DNA, 15 bp, Homo sapiens
ctcatcctcccagta

SEQ ID NO: 624899 - DNA, 15 bp, Homo sapiens
tcatcctcccagtac

SEQ ID NO: 624900 - DNA, 15 bp, Homo sapiens
catcctcccagtacc

SEQ ID NO: 624901 - DNA, 15 bp, Homo sapiens
atcctcccagtaccc

SEQ ID NO: 624902 - DNA, 15 bp, Homo sapiens
tcctcccagtaccct

SEQ ID NO: 624903 - DNA, 15 bp, Homo sapiens
cctcccagtaccctc

SEQ ID NO: 624904 - DNA, 15 bp, Homo sapiens
ctcccagtaccctca

SEQ ID NO: 624905 - DNA, 15 bp, Homo sapiens
tcccagtaccctcag

SEQ ID NO: 624906 - DNA, 15 bp, Homo sapiens
cccagtaccctcagc

SEQ ID NO: 624907 - DNA, 15 bp, Homo sapiens
ccagtaccctcagcc

SEQ ID NO: 624908 - DNA, 15 bp, Homo sapiens
cagtaccctcagcca

SEQ ID NO: 624909 - DNA, 15 bp, Homo sapiens
agtaccctcagccat

SEQ ID NO: 624910 - DNA, 15 bp, Homo sapiens
gtaccctcagccatc

SEQ ID NO: 624911 - DNA, 15 bp, Homo sapiens
taccctcagccatct

SEQ ID NO: 624912 - DNA, 15 bp, Homo sapiens
accctcagccatctg

SEQ ID NO: 624913 - DNA, 15 bp, Homo sapiens
ccctcagccatctgg

SEQ ID NO: 624914 - DNA, 15 bp, Homo sapiens
cctcagccatctggc

SEQ ID NO: 624915 - DNA, 15 bp, Homo sapiens
ctcagccatctggct

SEQ ID NO: 624916 - DNA, 15 bp, Homo sapiens
tcagccatctggctc

SEQ ID NO: 624917 - DNA, 15 bp, Homo sapiens
cagccatctggctca

SEQ ID NO: 624918 - DNA, 15 bp, Homo sapiens
agccatctggctcat

SEQ ID NO: 624919 - DNA, 15 bp, Homo sapiens
gccatctggctcatg

SEQ ID NO: 624920 - DNA, 15 bp, Homo sapiens
ccatctggctcatgg

SEQ ID NO: 624921 - DNA, 15 bp, Homo sapiens
catctggctcatggc

SEQ ID NO: 624922 - DNA, 15 bp, Homo sapiens
atctggctcatggct

SEQ ID NO: 624923 - DNA, 15 bp, Homo sapiens
tctggctcatggctc

SEQ ID NO: 624924 - DNA, 15 bp, Homo sapiens
ctggctcatggctct

SEQ ID NO: 624925 - DNA, 15 bp, Homo sapiens
tggctcatggctcta

SEQ ID NO: 624926 - DNA, 15 bp, Homo sapiens
ggctcatggctctac

SEQ ID NO: 624927 - DNA, 15 bp, Homo sapiens
gctcatggctctacc

SEQ ID NO: 624928 - DNA, 15 bp, Homo sapiens
ctcatggctctacca

SEQ ID NO: 624929 - DNA, 15 bp, Homo sapiens
tcatggctctaccaa

SEQ ID NO: 624930 - DNA, 15 bp, Homo sapiens
catggctctaccaaa

SEQ ID NO: 624931 - DNA, 15 bp, Homo sapiens
atggctctaccaaaa

SEQ ID NO: 624932 - DNA, 15 bp, Homo sapiens
tggctctaccaaaac

SEQ ID NO: 624933 - DNA, 15 bp, Homo sapiens
ggctctaccaaaaca

SEQ ID NO: 624934 - DNA, 15 bp, Homo sapiens
gctctaccaaaacag

SEQ ID NO: 624935 - DNA, 15 bp, Homo sapiens
ctctaccaaaacagc

SEQ ID NO: 624936 - DNA, 15 bp, Homo sapiens
tctaccaaaacagct

SEQ ID NO: 624937 - DNA, 15 bp, Homo sapiens
ctaccaaaacagctc

SEQ ID NO: 624938 - DNA, 15 bp, Homo sapiens
taccaaaacagctcc

SEQ ID NO: 624939 - DNA, 15 bp, Homo sapiens
accaaaacagctcca

SEQ ID NO: 624940 - DNA, 15 bp, Homo sapiens
ccaaaacagctccac

SEQ ID NO: 624941 - DNA, 15 bp, Homo sapiens
caaaacagctccact

SEQ ID NO: 624942 - DNA, 15 bp, Homo sapiens
aaaacagctccactt

SEQ ID NO: 624943 - DNA, 15 bp, Homo sapiens
aaacagctccacttc

SEQ ID NO: 624944 - DNA, 15 bp, Homo sapiens
aacagctccacttcc

SEQ ID NO: 624945 - DNA, 15 bp, Homo sapiens
acagctccacttccg

SEQ ID NO: 624946 - DNA, 15 bp, Homo sapiens
cagctccacttccgg

SEQ ID NO: 624947 - DNA, 15 bp, Homo sapiens
agctccacttccggt

SEQ ID NO: 624948 - DNA, 15 bp, Homo sapiens
gctccacttccggtc

SEQ ID NO: 624949 - DNA, 15 bp, Homo sapiens
ctccacttccggtca

SEQ ID NO: 624950 - DNA, 15 bp, Homo sapiens
tccacttccggtcac

SEQ ID NO: 624951 - DNA, 15 bp, Homo sapiens
ccacttccggtcacc

SEQ ID NO: 624952 - DNA, 15 bp, Homo sapiens
cacttccggtcaccc

SEQ ID NO: 624953 - DNA, 15 bp, Homo sapiens
acttccggtcacccg

SEQ ID NO: 624954 - DNA, 15 bp, Homo sapiens
cttccggtcacccgt

SEQ ID NO: 624955 - DNA, 15 bp, Homo sapiens
ttccggtcacccgtg

SEQ ID NO: 624956 - DNA, 15 bp, Homo sapiens
tccggtcacccgtgg

SEQ ID NO: 624957 - DNA, 15 bp, Homo sapiens
ccggtcacccgtggt

SEQ ID NO: 624958 - DNA, 15 bp, Homo sapiens
cggtcacccgtggtg

SEQ ID NO: 624959 - DNA, 15 bp, Homo sapiens
ggtcacccgtggtga

SEQ ID NO: 624960 - DNA, 15 bp, Homo sapiens
gtcacccgtggtgac

SEQ ID NO: 624961 - DNA, 15 bp, Homo sapiens
tcacccgtggtgacc

SEQ ID NO: 624962 - DNA, 15 bp, Homo sapiens
cacccgtggtgaccc

SEQ ID NO: 624963 - DNA, 15 bp, Homo sapiens
acccgtggtgacccc

SEQ ID NO: 624964 - DNA, 15 bp, Homo sapiens
cccgtggtgacccca

SEQ ID NO: 624965 - DNA, 15 bp, Homo sapiens
ccgtggtgaccccat

SEQ ID NO: 624966 - DNA, 15 bp, Homo sapiens
cgtggtgaccccatt

SEQ ID NO: 624967 - DNA, 15 bp, Homo sapiens
gtggtgaccccattg

SEQ ID NO: 624968 - DNA, 15 bp, Homo sapiens
tggtgaccccattgc

SEQ ID NO: 624969 - DNA, 15 bp, Homo sapiens
ggtgaccccattgcc

SEQ ID NO: 624970 - DNA, 15 bp, Homo sapiens
gtgaccccattgcca

SEQ ID NO: 624971 - DNA, 15 bp, Homo sapiens
tgaccccattgccac

SEQ ID NO: 624972 - DNA, 15 bp, Homo sapiens
gaccccattgccaca

SEQ ID NO: 624973 - DNA, 15 bp, Homo sapiens
accccattgccacat

SEQ ID NO: 624974 - DNA, 15 bp, Homo sapiens
ccccattgccacatc

SEQ ID NO: 624975 - DNA, 15 bp, Homo sapiens
gactcccactgctgc

SEQ ID NO: 624976 - DNA, 15 bp, Homo sapiens
actcccactgctgct

SEQ ID NO: 624977 - DNA, 15 bp, Homo sapiens
ctcccactgctgctg

SEQ ID NO: 624978 - DNA, 15 bp, Homo sapiens
tcccactgctgctga

SEQ ID NO: 624979 - DNA, 15 bp, Homo sapiens
cccactgctgctgat

SEQ ID NO: 624980 - DNA, 15 bp, Homo sapiens
ccactgctgctgatt

SEQ ID NO: 624981 - DNA, 15 bp, Homo sapiens
cactgctgctgattt

SEQ ID NO: 624982 - DNA, 15 bp, Homo sapiens
actgctgctgatttc

SEQ ID NO: 624983 - DNA, 15 bp, Homo sapiens
ctgctgctgatttca

SEQ ID NO: 624984 - DNA, 15 bp, Homo sapiens
tgctgctgatttcag

SEQ ID NO: 624985 - DNA, 15 bp, Homo sapiens
gctgctgatttcagg

SEQ ID NO: 624986 - DNA, 15 bp, Homo sapiens
ctgctgatttcagga

SEQ ID NO: 624987 - DNA, 15 bp, Homo sapiens
tgctgatttcaggat

SEQ ID NO: 624988 - DNA, 15 bp, Homo sapiens
gctgatttcaggata

SEQ ID NO: 624989 - DNA, 15 bp, Homo sapiens
ctgatttcaggatac

SEQ ID NO: 624990 - DNA, 15 bp, Homo sapiens
tgatttcaggatacc

SEQ ID NO: 624991 - DNA, 15 bp, Homo sapiens
gatttcaggatacca

SEQ ID NO: 624992 - DNA, 15 bp, Homo sapiens
atttcaggataccag

SEQ ID NO: 624993 - DNA, 15 bp, Homo sapiens
tttcaggataccagc

SEQ ID NO: 624994 - DNA, 15 bp, Homo sapiens
ttcaggataccagca

SEQ ID NO: 624995 - DNA, 15 bp, Homo sapiens
tcaggataccagcat

SEQ ID NO: 624996 - DNA, 15 bp, Homo sapiens
caggataccagcatg

SEQ ID NO: 624997 - DNA, 15 bp, Homo sapiens
aggataccagcatga

SEQ ID NO: 624998 - DNA, 15 bp, Homo sapiens
ggataccagcatgat

SEQ ID NO: 624999 - DNA, 15 bp, Homo sapiens
gataccagcatgatg

SEQ ID NO: 625000 - DNA, 15 bp, Homo sapiens
ataccagcatgatgc

SEQ ID NO: 625001 - DNA, 15 bp, Homo sapiens
taccagcatgatgcc

SEQ ID NO: 625002 - DNA, 15 bp, Homo sapiens
accagcatgatgcca

SEQ ID NO: 625003 - DNA, 15 bp, Homo sapiens
ccagcatgatgccac

SEQ ID NO: 625004 - DNA, 15 bp, Homo sapiens
cagcatgatgccact

SEQ ID NO: 625005 - DNA, 15 bp, Homo sapiens
agcatgatgccactg

SEQ ID NO: 625006 - DNA, 15 bp, Homo sapiens
gcatgatgccactga

SEQ ID NO: 625007 - DNA, 15 bp, Homo sapiens
catgatgccactgaa

SEQ ID NO: 625008 - DNA, 15 bp, Homo sapiens
atgatgccactgaat

SEQ ID NO: 625009 - DNA, 15 bp, Homo sapiens
tgatgccactgaatg

SEQ ID NO: 625010 - DNA, 15 bp, Homo sapiens
gatgccactgaatgc

SEQ ID NO: 625011 - DNA, 15 bp, Homo sapiens
atgccactgaatgca

SEQ ID NO: 625012 - DNA, 15 bp, Homo sapiens
tgccactgaatgcag

SEQ ID NO: 625013 - DNA, 15 bp, Homo sapiens
gccactgaatgcaga

SEQ ID NO: 625014 - DNA, 15 bp, Homo sapiens
ccactgaatgcagag

SEQ ID NO: 625015 - DNA, 15 bp, Homo sapiens
cactgaatgcagagt

SEQ ID NO: 625016 - DNA, 15 bp, Homo sapiens
actgaatgcagagtt

SEQ ID NO: 625017 - DNA, 15 bp, Homo sapiens
ctgaatgcagagttt

SEQ ID NO: 625018 - DNA, 15 bp, Homo sapiens
tgaatgcagagtttc

SEQ ID NO: 625019 - DNA, 15 bp, Homo sapiens
gaatgcagagtttcg

SEQ ID NO: 625020 - DNA, 15 bp, Homo sapiens
aatgcagagtttcga

SEQ ID NO: 625021 - DNA, 15 bp, Homo sapiens
atgcagagtttcgag

SEQ ID NO: 625022 - DNA, 15 bp, Homo sapiens
tgcagagtttcgaga

SEQ ID NO: 625023 - DNA, 15 bp, Homo sapiens
gcagagtttcgagat

SEQ ID NO: 625024 - DNA, 15 bp, Homo sapiens
cagagtttcgagatg

SEQ ID NO: 625025 - DNA, 15 bp, Homo sapiens
agagtttcgagatgt

SEQ ID NO: 625026 - DNA, 15 bp, Homo sapiens
gagtttcgagatgtg

SEQ ID NO: 625027 - DNA, 15 bp, Homo sapiens
agtttcgagatgtgc

SEQ ID NO: 625028 - DNA, 15 bp, Homo sapiens
gtttcgagatgtgca

SEQ ID NO: 625029 - DNA, 15 bp, Homo sapiens
tttcgagatgtgcat

SEQ ID NO: 625030 - DNA, 15 bp, Homo sapiens
ttcgagatgtgcatg

SEQ ID NO: 625031 - DNA, 15 bp, Homo sapiens
tcgagatgtgcatgg

SEQ ID NO: 625032 - DNA, 15 bp, Homo sapiens
cgagatgtgcatggt

SEQ ID NO: 625033 - DNA, 15 bp, Homo sapiens
gagatgtgcatggtc

SEQ ID NO: 625034 - DNA, 15 bp, Homo sapiens
agatgtgcatggtct

SEQ ID NO: 625035 - DNA, 15 bp, Homo sapiens
gatgtgcatggtctg

SEQ ID NO: 625036 - DNA, 15 bp, Homo sapiens
atgtgcatggtctgc

SEQ ID NO: 625037 - DNA, 15 bp, Homo sapiens
tgtgcatggtctgct

SEQ ID NO: 625038 - DNA, 15 bp, Homo sapiens
gtgcatggtctgcta

SEQ ID NO: 625039 - DNA, 15 bp, Homo sapiens
tgcatggtctgctat

SEQ ID NO: 625040 - DNA, 15 bp, Homo sapiens
gcatggtctgctatg

SEQ ID NO: 625041 - DNA, 15 bp, Homo sapiens
catggtctgctatgt

SEQ ID NO: 625042 - DNA, 15 bp, Homo sapiens
atggtctgctatgtt

SEQ ID NO: 625043 - DNA, 15 bp, Homo sapiens
tggtctgctatgttg

SEQ ID NO: 625044 - DNA, 15 bp, Homo sapiens
ggtctgctatgttga

SEQ ID NO: 625045 - DNA, 15 bp, Homo sapiens
gtctgctatgttgag

SEQ ID NO: 625046 - DNA, 15 bp, Homo sapiens
tctgctatgttgagc

SEQ ID NO: 625047 - DNA, 15 bp, Homo sapiens
ctgctatgttgagcc

SEQ ID NO: 625048 - DNA, 15 bp, Homo sapiens
tgctatgttgagcca

SEQ ID NO: 625049 - DNA, 15 bp, Homo sapiens
gctatgttgagccag

SEQ ID NO: 625050 - DNA, 15 bp, Homo sapiens
ctatgttgagccagg

SEQ ID NO: 625051 - DNA, 15 bp, Homo sapiens
tatgttgagccaggt

SEQ ID NO: 625052 - DNA, 15 bp, Homo sapiens
atgttgagccaggtc

SEQ ID NO: 625053 - DNA, 15 bp, Homo sapiens
tgttgagccaggtct

SEQ ID NO: 625054 - DNA, 15 bp, Homo sapiens
gttgagccaggtcta

SEQ ID NO: 625055 - DNA, 15 bp, Homo sapiens
ttgagccaggtctag

SEQ ID NO: 625056 - DNA, 15 bp, Homo sapiens
tgagccaggtctagc

SEQ ID NO: 625057 - DNA, 15 bp, Homo sapiens
gagccaggtctagca

SEQ ID NO: 625058 - DNA, 15 bp, Homo sapiens
agccaggtctagcat

SEQ ID NO: 625059 - DNA, 15 bp, Homo sapiens
gccaggtctagcata

SEQ ID NO: 625060 - DNA, 15 bp, Homo sapiens
ccaggtctagcatac

SEQ ID NO: 625061 - DNA, 15 bp, Homo sapiens
caggtctagcatacc

SEQ ID NO: 625062 - DNA, 15 bp, Homo sapiens
aggtctagcataccg

SEQ ID NO: 625063 - DNA, 15 bp, Homo sapiens
ggtctagcataccgc

SEQ ID NO: 625064 - DNA, 15 bp, Homo sapiens
gtctagcataccgct

SEQ ID NO: 625065 - DNA, 15 bp, Homo sapiens
tctagcataccgctg

SEQ ID NO: 625066 - DNA, 15 bp, Homo sapiens
ctagcataccgctgt

SEQ ID NO: 625067 - DNA, 15 bp, Homo sapiens
tagcataccgctgtg

SEQ ID NO: 625068 - DNA, 15 bp, Homo sapiens
agcataccgctgtgc

SEQ ID NO: 625069 - DNA, 15 bp, Homo sapiens
gcataccgctgtgcc

SEQ ID NO: 625070 - DNA, 15 bp, Homo sapiens
cataccgctgtgccc

SEQ ID NO: 625071 - DNA, 15 bp, Homo sapiens
ataccgctgtgccct

SEQ ID NO: 625072 - DNA, 15 bp, Homo sapiens
taccgctgtgccctg

SEQ ID NO: 625073 - DNA, 15 bp, Homo sapiens
accgctgtgccctgc

SEQ ID NO: 625074 - DNA, 15 bp, Homo sapiens
ccgctgtgccctgct

SEQ ID NO: 625075 - DNA, 15 bp, Homo sapiens
cgctgtgccctgctg

SEQ ID NO: 625076 - DNA, 15 bp, Homo sapiens
gctgtgccctgctgt

SEQ ID NO: 625077 - DNA, 15 bp, Homo sapiens
ctgtgccctgctgtg

SEQ ID NO: 625078 - DNA, 15 bp, Homo sapiens
tgtgccctgctgtgt

SEQ ID NO: 625079 - DNA, 15 bp, Homo sapiens
gtgccctgctgtgtt

SEQ ID NO: 625080 - DNA, 15 bp, Homo sapiens
tgccctgctgtgttt

SEQ ID NO: 625081 - DNA, 15 bp, Homo sapiens
gccctgctgtgtttt

SEQ ID NO: 625082 - DNA, 15 bp, Homo sapiens
ccctgctgtgtttta

SEQ ID NO: 625083 - DNA, 15 bp, Homo sapiens
cctgctgtgttttag

SEQ ID NO: 625084 - DNA, 15 bp, Homo sapiens
ctgctgtgttttagg

SEQ ID NO: 625085 - DNA, 15 bp, Homo sapiens
tgctgtgttttaggg

SEQ ID NO: 625086 - DNA, 15 bp, Homo sapiens
gctgtgttttagggg

SEQ ID NO: 625087 - DNA, 15 bp, Homo sapiens
ctgtgttttagggga

SEQ ID NO: 625088 - DNA, 15 bp, Homo sapiens
tgtgttttaggggag

SEQ ID NO: 625089 - DNA, 15 bp, Homo sapiens
gtgttttaggggaga

SEQ ID NO: 625090 - DNA, 15 bp, Homo sapiens
tgttttaggggagat

SEQ ID NO: 625091 - DNA, 15 bp, Homo sapiens
gttttaggggagatg

SEQ ID NO: 625092 - DNA, 15 bp, Homo sapiens
ttttaggggagatgg

SEQ ID NO: 625093 - DNA, 15 bp, Homo sapiens
tttaggggagatggg

SEQ ID NO: 625094 - DNA, 15 bp, Homo sapiens
ttaggggagatgggg

SEQ ID NO: 625095 - DNA, 15 bp, Homo sapiens
taggggagatgggga

SEQ ID NO: 625096 - DNA, 15 bp, Homo sapiens
aggggagatggggaa

SEQ ID NO: 625097 - DNA, 15 bp, Homo sapiens
ggggagatggggaaa

SEQ ID NO: 625098 - DNA, 15 bp, Homo sapiens
gggagatggggaaac

SEQ ID NO: 625099 - DNA, 15 bp, Homo sapiens
ggagatggggaaacc

SEQ ID NO: 625100 - DNA, 15 bp, Homo sapiens
gagatggggaaacct

SEQ ID NO: 625101 - DNA, 15 bp, Homo sapiens
agatggggaaacctg

SEQ ID NO: 625102 - DNA, 15 bp, Homo sapiens
gatggggaaacctgg

SEQ ID NO: 625103 - DNA, 15 bp, Homo sapiens
atggggaaacctggt

SEQ ID NO: 625104 - DNA, 15 bp, Homo sapiens
tggggaaacctggtg

SEQ ID NO: 625105 - DNA, 15 bp, Homo sapiens
ggggaaacctggtgg

SEQ ID NO: 625106 - DNA, 15 bp, Homo sapiens
gggaaacctggtggg

SEQ ID NO: 625107 - DNA, 15 bp, Homo sapiens
ggaaacctggtgggt

SEQ ID NO: 625108 - DNA, 15 bp, Homo sapiens
gaaacctggtgggta

SEQ ID NO: 625109 - DNA, 15 bp, Homo sapiens
aaacctggtgggtaa

SEQ ID NO: 625110 - DNA, 15 bp, Homo sapiens
aacctggtgggtaag

SEQ ID NO: 625111 - DNA, 15 bp, Homo sapiens
acctggtgggtaaga

SEQ ID NO: 625112 - DNA, 15 bp, Homo sapiens
cctggtgggtaagag

SEQ ID NO: 625113 - DNA, 15 bp, Homo sapiens
ctggtgggtaagagc

SEQ ID NO: 625114 - DNA, 15 bp, Homo sapiens
tggtgggtaagagca

SEQ ID NO: 625115 - DNA, 15 bp, Homo sapiens
ggtgggtaagagcaa

SEQ ID NO: 625116 - DNA, 15 bp, Homo sapiens
gtgggtaagagcaaa

SEQ ID NO: 625117 - DNA, 15 bp, Homo sapiens
tgggtaagagcaaaa

SEQ ID NO: 625118 - DNA, 15 bp, Homo sapiens
gggtaagagcaaaag

SEQ ID NO: 625119 - DNA, 15 bp, Homo sapiens
ggtaagagcaaaagc

SEQ ID NO: 625120 - DNA, 15 bp, Homo sapiens
gtaagagcaaaagcc

SEQ ID NO: 625121 - DNA, 15 bp, Homo sapiens
taagagcaaaagccc

SEQ ID NO: 625122 - DNA, 15 bp, Homo sapiens
aagagcaaaagccct

SEQ ID NO: 625123 - DNA, 15 bp, Homo sapiens
agagcaaaagccctg

SEQ ID NO: 625124 - DNA, 15 bp, Homo sapiens
gagcaaaagccctgg

SEQ ID NO: 625125 - DNA, 15 bp, Homo sapiens
agcaaaagccctgga

SEQ ID NO: 625126 - DNA, 15 bp, Homo sapiens
gcaaaagccctggag

SEQ ID NO: 625127 - DNA, 15 bp, Homo sapiens
caaaagccctggagt

SEQ ID NO: 625128 - DNA, 15 bp, Homo sapiens
aaaagccctggagtc

SEQ ID NO: 625129 - DNA, 15 bp, Homo sapiens
aaagccctggagtca

SEQ ID NO: 625130 - DNA, 15 bp, Homo sapiens
aagccctggagtcag

SEQ ID NO: 625131 - DNA, 15 bp, Homo sapiens
agccctggagtcagg

SEQ ID NO: 625132 - DNA, 15 bp, Homo sapiens
gccctggagtcaggc

SEQ ID NO: 625133 - DNA, 15 bp, Homo sapiens
ccctggagtcaggct

SEQ ID NO: 625134 - DNA, 15 bp, Homo sapiens
cctggagtcaggctg

SEQ ID NO: 625135 - DNA, 15 bp, Homo sapiens
ctggagtcaggctgt

SEQ ID NO: 625136 - DNA, 15 bp, Homo sapiens
tggagtcaggctgtc

SEQ ID NO: 625137 - DNA, 15 bp, Homo sapiens
ggagtcaggctgtcc

SEQ ID NO: 625138 - DNA, 15 bp, Homo sapiens
gagtcaggctgtcca

SEQ ID NO: 625139 - DNA, 15 bp, Homo sapiens
agtcaggctgtccag

SEQ ID NO: 625140 - DNA, 15 bp, Homo sapiens
gtcaggctgtccagg

SEQ ID NO: 625141 - DNA, 15 bp, Homo sapiens
tcaggctgtccaggc

SEQ ID NO: 625142 - DNA, 15 bp, Homo sapiens
caggctgtccaggct

SEQ ID NO: 625143 - DNA, 15 bp, Homo sapiens
aggctgtccaggcta

SEQ ID NO: 625144 - DNA, 15 bp, Homo sapiens
ggctgtccaggctag

SEQ ID NO: 625145 - DNA, 15 bp, Homo sapiens
gctgtccaggctaga

SEQ ID NO: 625146 - DNA, 15 bp, Homo sapiens
ctgtccaggctagaa

SEQ ID NO: 625147 - DNA, 15 bp, Homo sapiens
tgtccaggctagaat

SEQ ID NO: 625148 - DNA, 15 bp, Homo sapiens
gtccaggctagaatc

SEQ ID NO: 625149 - DNA, 15 bp, Homo sapiens
tccaggctagaatct

SEQ ID NO: 625150 - DNA, 15 bp, Homo sapiens
ccaggctagaatctc

SEQ ID NO: 625151 - DNA, 15 bp, Homo sapiens
caggctagaatctca

SEQ ID NO: 625152 - DNA, 15 bp, Homo sapiens
aggctagaatctcag

SEQ ID NO: 625153 - DNA, 15 bp, Homo sapiens
ggctagaatctcagc

SEQ ID NO: 625154 - DNA, 15 bp, Homo sapiens
gctagaatctcagct

SEQ ID NO: 625155 - DNA, 15 bp, Homo sapiens
ctagaatctcagctc

SEQ ID NO: 625156 - DNA, 15 bp, Homo sapiens
tagaatctcagctct

SEQ ID NO: 625157 - DNA, 15 bp, Homo sapiens
agaatctcagctctg

SEQ ID NO: 625158 - DNA, 15 bp, Homo sapiens
gaatctcagctctgc

SEQ ID NO: 625159 - DNA, 15 bp, Homo sapiens
aatctcagctctgcc

SEQ ID NO: 625160 - DNA, 15 bp, Homo sapiens
atctcagctctgcct

SEQ ID NO: 625161 - DNA, 15 bp, Homo sapiens
tctcagctctgcctc

SEQ ID NO: 625162 - DNA, 15 bp, Homo sapiens
ctcagctctgcctct

SEQ ID NO: 625163 - DNA, 15 bp, Homo sapiens
tcagctctgcctctg

SEQ ID NO: 625164 - DNA, 15 bp, Homo sapiens
cagctctgcctctgg

SEQ ID NO: 625165 - DNA, 15 bp, Homo sapiens
agctctgcctctggc

SEQ ID NO: 625166 - DNA, 15 bp, Homo sapiens
gctctgcctctggct

SEQ ID NO: 625167 - DNA, 15 bp, Homo sapiens
ctctgcctctggctg

SEQ ID NO: 625168 - DNA, 15 bp, Homo sapiens
tctgcctctggctga

SEQ ID NO: 625169 - DNA, 15 bp, Homo sapiens
ctgcctctggctgag

SEQ ID NO: 625170 - DNA, 15 bp, Homo sapiens
tgcctctggctgagc

SEQ ID NO: 625171 - DNA, 15 bp, Homo sapiens
gcctctggctgagca

SEQ ID NO: 625172 - DNA, 15 bp, Homo sapiens
cctctggctgagcaa

SEQ ID NO: 625173 - DNA, 15 bp, Homo sapiens
ctctggctgagcaag

SEQ ID NO: 625174 - DNA, 15 bp, Homo sapiens
tctggctgagcaagc

SEQ ID NO: 625175 - DNA, 15 bp, Homo sapiens
ctggctgagcaagct

SEQ ID NO: 625176 - DNA, 15 bp, Homo sapiens
tggctgagcaagctt

SEQ ID NO: 625177 - DNA, 15 bp, Homo sapiens
ggctgagcaagcttg

SEQ ID NO: 625178 - DNA, 15 bp, Homo sapiens
gctgagcaagcttgg

SEQ ID NO: 625179 - DNA, 15 bp, Homo sapiens
ctgagcaagcttggg

SEQ ID NO: 625180 - DNA, 15 bp, Homo sapiens
tgagcaagcttgggc

SEQ ID NO: 625181 - DNA, 15 bp, Homo sapiens
gagcaagcttgggcc

SEQ ID NO: 625182 - DNA, 15 bp, Homo sapiens
agcaagcttgggcca

SEQ ID NO: 625183 - DNA, 15 bp, Homo sapiens
gcaagcttgggccat

SEQ ID NO: 625184 - DNA, 15 bp, Homo sapiens
caagcttgggccatg

SEQ ID NO: 625185 - DNA, 15 bp, Homo sapiens
aagcttgggccatgc

SEQ ID NO: 625186 - DNA, 15 bp, Homo sapiens
agcttgggccatgcc

SEQ ID NO: 625187 - DNA, 15 bp, Homo sapiens
gcttgggccatgccc

SEQ ID NO: 625188 - DNA, 15 bp, Homo sapiens
cttgggccatgccct

SEQ ID NO: 625189 - DNA, 15 bp, Homo sapiens
ttgggccatgccctg

SEQ ID NO: 625190 - DNA, 15 bp, Homo sapiens
tgggccatgccctga

SEQ ID NO: 625191 - DNA, 15 bp, Homo sapiens
gggccatgccctgat

SEQ ID NO: 625192 - DNA, 15 bp, Homo sapiens
ggccatgccctgatc

SEQ ID NO: 625193 - DNA, 15 bp, Homo sapiens
gccatgccctgatct

SEQ ID NO: 625194 - DNA, 15 bp, Homo sapiens
ccatgccctgatctc

SEQ ID NO: 625195 - DNA, 15 bp, Homo sapiens
catgccctgatctct

SEQ ID NO: 625196 - DNA, 15 bp, Homo sapiens
atgccctgatctctg

SEQ ID NO: 625197 - DNA, 15 bp, Homo sapiens
tgccctgatctctgc

SEQ ID NO: 625198 - DNA, 15 bp, Homo sapiens
gccctgatctctgcc

SEQ ID NO: 625199 - DNA, 15 bp, Homo sapiens
ccctgatctctgcct

SEQ ID NO: 625200 - DNA, 15 bp, Homo sapiens
cctgatctctgcctt

SEQ ID NO: 625201 - DNA, 15 bp, Homo sapiens
ctgatctctgccttc

SEQ ID NO: 625202 - DNA, 15 bp, Homo sapiens
tgatctctgccttca

SEQ ID NO: 625203 - DNA, 15 bp, Homo sapiens
gatctctgccttcag

SEQ ID NO: 625204 - DNA, 15 bp, Homo sapiens
atctctgccttcagt

SEQ ID NO: 625205 - DNA, 15 bp, Homo sapiens
tctctgccttcagtg

SEQ ID NO: 625206 - DNA, 15 bp, Homo sapiens
ctctgccttcagtgc

SEQ ID NO: 625207 - DNA, 15 bp, Homo sapiens
tctgccttcagtgcc

SEQ ID NO: 625208 - DNA, 15 bp, Homo sapiens
ctgccttcagtgcct

SEQ ID NO: 625209 - DNA, 15 bp, Homo sapiens
tgccttcagtgcctt

SEQ ID NO: 625210 - DNA, 15 bp, Homo sapiens
gccttcagtgccttt

SEQ ID NO: 625211 - DNA, 15 bp, Homo sapiens
ccttcagtgcctttt

SEQ ID NO: 625212 - DNA, 15 bp, Homo sapiens
cttcagtgccttttc

SEQ ID NO: 625213 - DNA, 15 bp, Homo sapiens
ttcagtgccttttct

SEQ ID NO: 625214 - DNA, 15 bp, Homo sapiens
tcagtgccttttctg

SEQ ID NO: 625215 - DNA, 15 bp, Homo sapiens
cagtgccttttctgt

SEQ ID NO: 625216 - DNA, 15 bp, Homo sapiens
agtgccttttctgta

SEQ ID NO: 625217 - DNA, 15 bp, Homo sapiens
gtgccttttctgtaa

SEQ ID NO: 625218 - DNA, 15 bp, Homo sapiens
tgccttttctgtaaa

SEQ ID NO: 625219 - DNA, 15 bp, Homo sapiens
gccttttctgtaaag

SEQ ID NO: 625220 - DNA, 15 bp, Homo sapiens
ccttttctgtaaagt

SEQ ID NO: 625221 - DNA, 15 bp, Homo sapiens
cttttctgtaaagtg

SEQ ID NO: 625222 - DNA, 15 bp, Homo sapiens
ttttctgtaaagtga

SEQ ID NO: 625223 - DNA, 15 bp, Homo sapiens
tttctgtaaagtgaa

SEQ ID NO: 625224 - DNA, 15 bp, Homo sapiens
ttctgtaaagtgaag

SEQ ID NO: 625225 - DNA, 15 bp, Homo sapiens
tctgtaaagtgaagg

SEQ ID NO: 625226 - DNA, 15 bp, Homo sapiens
ctgtaaagtgaagga

SEQ ID NO: 625227 - DNA, 15 bp, Homo sapiens
tgtaaagtgaaggaa

SEQ ID NO: 625228 - DNA, 15 bp, Homo sapiens
gtaaagtgaaggaaa

SEQ ID NO: 625229 - DNA, 15 bp, Homo sapiens
taaagtgaaggaaat

SEQ ID NO: 625230 - DNA, 15 bp, Homo sapiens
aaagtgaaggaaatg

SEQ ID NO: 625231 - DNA, 15 bp, Homo sapiens
aagtgaaggaaatga

SEQ ID NO: 625232 - DNA, 15 bp, Homo sapiens
agtgaaggaaatgag

SEQ ID NO: 625233 - DNA, 15 bp, Homo sapiens
gtgaaggaaatgagt

SEQ ID NO: 625234 - DNA, 15 bp, Homo sapiens
tgaaggaaatgagtg

SEQ ID NO: 625235 - DNA, 15 bp, Homo sapiens
gaaggaaatgagtgt

SEQ ID NO: 625236 - DNA, 15 bp, Homo sapiens
aaggaaatgagtgtc

SEQ ID NO: 625237 - DNA, 15 bp, Homo sapiens
aggaaatgagtgtcc

SEQ ID NO: 625238 - DNA, 15 bp, Homo sapiens
ggaaatgagtgtccg

SEQ ID NO: 625239 - DNA, 15 bp, Homo sapiens
gaaatgagtgtccga

SEQ ID NO: 625240 - DNA, 15 bp, Homo sapiens
aaatgagtgtccgac

SEQ ID NO: 625241 - DNA, 15 bp, Homo sapiens
aatgagtgtccgacg

SEQ ID NO: 625242 - DNA, 15 bp, Homo sapiens
atgagtgtccgacgg

SEQ ID NO: 625243 - DNA, 15 bp, Homo sapiens
tgagtgtccgacggg

SEQ ID NO: 625244 - DNA, 15 bp, Homo sapiens
gagtgtccgacgggg

SEQ ID NO: 625245 - DNA, 15 bp, Homo sapiens
agtgtccgacgggga

SEQ ID NO: 625246 - DNA, 15 bp, Homo sapiens
gtgtccgacggggag

SEQ ID NO: 625247 - DNA, 15 bp, Homo sapiens
tgtccgacggggagg

SEQ ID NO: 625248 - DNA, 15 bp, Homo sapiens
gtccgacggggagga

SEQ ID NO: 625249 - DNA, 15 bp, Homo sapiens
tccgacggggaggag

SEQ ID NO: 625250 - DNA, 15 bp, Homo sapiens
ccgacggggaggagg

SEQ ID NO: 625251 - DNA, 15 bp, Homo sapiens
cgacggggaggaggt

SEQ ID NO: 625252 - DNA, 15 bp, Homo sapiens
gacggggaggaggtt

SEQ ID NO: 625253 - DNA, 15 bp, Homo sapiens
acggggaggaggttc

SEQ ID NO: 625254 - DNA, 15 bp, Homo sapiens
cggggaggaggttcc

SEQ ID NO: 625255 - DNA, 15 bp, Homo sapiens
ggggaggaggttcct

SEQ ID NO: 625256 - DNA, 15 bp, Homo sapiens
gggaggaggttccta

SEQ ID NO: 625257 - DNA, 15 bp, Homo sapiens
ggaggaggttcctaa

SEQ ID NO: 625258 - DNA, 15 bp, Homo sapiens
gaggaggttcctaaa

SEQ ID NO: 625259 - DNA, 15 bp, Homo sapiens
aggaggttcctaaaa

SEQ ID NO: 625260 - DNA, 15 bp, Homo sapiens
ggaggttcctaaaag

SEQ ID NO: 625261 - DNA, 15 bp, Homo sapiens
gaggttcctaaaagg

SEQ ID NO: 625262 - DNA, 15 bp, Homo sapiens
aggttcctaaaaggg

SEQ ID NO: 625263 - DNA, 15 bp, Homo sapiens
ggttcctaaaaggga

SEQ ID NO: 625264 - DNA, 15 bp, Homo sapiens
gttcctaaaagggag

SEQ ID NO: 625265 - DNA, 15 bp, Homo sapiens
ttcctaaaagggagc

SEQ ID NO: 625266 - DNA, 15 bp, Homo sapiens
tcctaaaagggagca

SEQ ID NO: 625267 - DNA, 15 bp, Homo sapiens
cctaaaagggagcag

SEQ ID NO: 625268 - DNA, 15 bp, Homo sapiens
ctaaaagggagcagg

SEQ ID NO: 625269 - DNA, 15 bp, Homo sapiens
taaaagggagcaggg

SEQ ID NO: 625270 - DNA, 15 bp, Homo sapiens
aaaagggagcagggt

SEQ ID NO: 625271 - DNA, 15 bp, Homo sapiens
aaagggagcagggtc

SEQ ID NO: 625272 - DNA, 15 bp, Homo sapiens
aagggagcagggtct

SEQ ID NO: 625273 - DNA, 15 bp, Homo sapiens
agggagcagggtctg

SEQ ID NO: 625274 - DNA, 15 bp, Homo sapiens
gggagcagggtctgg

SEQ ID NO: 625275 - DNA, 15 bp, Homo sapiens
ggagcagggtctggg

SEQ ID NO: 625276 - DNA, 15 bp, Homo sapiens
gagcagggtctgggg

SEQ ID NO: 625277 - DNA, 15 bp, Homo sapiens
agcagggtctgggga

SEQ ID NO: 625278 - DNA, 15 bp, Homo sapiens
gcagggtctggggag

SEQ ID NO: 625279 - DNA, 15 bp, Homo sapiens
cagggtctggggagc

SEQ ID NO: 625280 - DNA, 15 bp, Homo sapiens
agggtctggggagcc

SEQ ID NO: 625281 - DNA, 15 bp, Homo sapiens
gggtctggggagccc

SEQ ID NO: 625282 - DNA, 15 bp, Homo sapiens
ggtctggggagccca

SEQ ID NO: 625283 - DNA, 15 bp, Homo sapiens
gtctggggagcccag

SEQ ID NO: 625284 - DNA, 15 bp, Homo sapiens
tctggggagcccagg

SEQ ID NO: 625285 - DNA, 15 bp, Homo sapiens
ctggggagcccaggc

SEQ ID NO: 625286 - DNA, 15 bp, Homo sapiens
tggggagcccaggcc

SEQ ID NO: 625287 - DNA, 15 bp, Homo sapiens
ggggagcccaggcct

SEQ ID NO: 625288 - DNA, 15 bp, Homo sapiens
gggagcccaggcctc

SEQ ID NO: 625289 - DNA, 15 bp, Homo sapiens
ggagcccaggcctct

SEQ ID NO: 625290 - DNA, 15 bp, Homo sapiens
gagcccaggcctctg

SEQ ID NO: 625291 - DNA, 15 bp, Homo sapiens
agcccaggcctctgg

SEQ ID NO: 625292 - DNA, 15 bp, Homo sapiens
gcccaggcctctggg

SEQ ID NO: 625293 - DNA, 15 bp, Homo sapiens
cccaggcctctgggg

SEQ ID NO: 625294 - DNA, 15 bp, Homo sapiens
ccaggcctctggggt

SEQ ID NO: 625295 - DNA, 15 bp, Homo sapiens
caggcctctggggtt

SEQ ID NO: 625296 - DNA, 15 bp, Homo sapiens
aggcctctggggttg

SEQ ID NO: 625297 - DNA, 15 bp, Homo sapiens
ggcctctggggttgg

SEQ ID NO: 625298 - DNA, 15 bp, Homo sapiens
gcctctggggttggg

SEQ ID NO: 625299 - DNA, 15 bp, Homo sapiens
cctctggggttgggt

SEQ ID NO: 625300 - DNA, 15 bp, Homo sapiens
ctctggggttgggtg

SEQ ID NO: 625301 - DNA, 15 bp, Homo sapiens
tctggggttgggtga

SEQ ID NO: 625302 - DNA, 15 bp, Homo sapiens
ctggggttgggtgac

SEQ ID NO: 625303 - DNA, 15 bp, Homo sapiens
tggggttgggtgact

SEQ ID NO: 625304 - DNA, 15 bp, Homo sapiens
ggggttgggtgactg

SEQ ID NO: 625305 - DNA, 15 bp, Homo sapiens
gggttgggtgactga

SEQ ID NO: 625306 - DNA, 15 bp, Homo sapiens
ggttgggtgactgag

SEQ ID NO: 625307 - DNA, 15 bp, Homo sapiens
gttgggtgactgaga

SEQ ID NO: 625308 - DNA, 15 bp, Homo sapiens
ttgggtgactgagaa

SEQ ID NO: 625309 - DNA, 15 bp, Homo sapiens
tgggtgactgagaag

SEQ ID NO: 625310 - DNA, 15 bp, Homo sapiens
gggtgactgagaagg

SEQ ID NO: 625311 - DNA, 15 bp, Homo sapiens
ggtgactgagaaggc

SEQ ID NO: 625312 - DNA, 15 bp, Homo sapiens
gtgactgagaaggca

SEQ ID NO: 625313 - DNA, 15 bp, Homo sapiens
tgactgagaaggcag

SEQ ID NO: 625314 - DNA, 15 bp, Homo sapiens
gactgagaaggcagc

SEQ ID NO: 625315 - DNA, 15 bp, Homo sapiens
actgagaaggcagcc

SEQ ID NO: 625316 - DNA, 15 bp, Homo sapiens
ctgagaaggcagccc

SEQ ID NO: 625317 - DNA, 15 bp, Homo sapiens
tgagaaggcagcccc

SEQ ID NO: 625318 - DNA, 15 bp, Homo sapiens
gagaaggcagcccct

SEQ ID NO: 625319 - DNA, 15 bp, Homo sapiens
agaaggcagcccctg

SEQ ID NO: 625320 - DNA, 15 bp, Homo sapiens
gaaggcagcccctga

SEQ ID NO: 625321 - DNA, 15 bp, Homo sapiens
aaggcagcccctgaa

SEQ ID NO: 625322 - DNA, 15 bp, Homo sapiens
aggcagcccctgaat

SEQ ID NO: 625323 - DNA, 15 bp, Homo sapiens
ggcagcccctgaata

SEQ ID NO: 625324 - DNA, 15 bp, Homo sapiens
gcagcccctgaatac

SEQ ID NO: 625325 - DNA, 15 bp, Homo sapiens
cagcccctgaataca

SEQ ID NO: 625326 - DNA, 15 bp, Homo sapiens
agcccctgaatacag

SEQ ID NO: 625327 - DNA, 15 bp, Homo sapiens
gcccctgaatacaga

SEQ ID NO: 625328 - DNA, 15 bp, Homo sapiens
cccctgaatacagag

SEQ ID NO: 625329 - DNA, 15 bp, Homo sapiens
ccctgaatacagagc

SEQ ID NO: 625330 - DNA, 15 bp, Homo sapiens
cctgaatacagagca

SEQ ID NO: 625331 - DNA, 15 bp, Homo sapiens
ctgaatacagagcag

SEQ ID NO: 625332 - DNA, 15 bp, Homo sapiens
tgaatacagagcaga

SEQ ID NO: 625333 - DNA, 15 bp, Homo sapiens
gaatacagagcagag

SEQ ID NO: 625334 - DNA, 15 bp, Homo sapiens
aatacagagcagagc

SEQ ID NO: 625335 - DNA, 15 bp, Homo sapiens
atacagagcagagct

SEQ ID NO: 625336 - DNA, 15 bp, Homo sapiens
tacagagcagagctg

SEQ ID NO: 625337 - DNA, 15 bp, Homo sapiens
acagagcagagctga

SEQ ID NO: 625338 - DNA, 15 bp, Homo sapiens
cagagcagagctgaa

SEQ ID NO: 625339 - DNA, 15 bp, Homo sapiens
agagcagagctgaag

SEQ ID NO: 625340 - DNA, 15 bp, Homo sapiens
gagcagagctgaagg

SEQ ID NO: 625341 - DNA, 15 bp, Homo sapiens
agcagagctgaaggt

SEQ ID NO: 625342 - DNA, 15 bp, Homo sapiens
gcagagctgaaggtg

SEQ ID NO: 625343 - DNA, 15 bp, Homo sapiens
cagagctgaaggtgg

SEQ ID NO: 625344 - DNA, 15 bp, Homo sapiens
agagctgaaggtggg

SEQ ID NO: 625345 - DNA, 15 bp, Homo sapiens
gagctgaaggtgggg

SEQ ID NO: 625346 - DNA, 15 bp, Homo sapiens
agctgaaggtggggc

SEQ ID NO: 625347 - DNA, 15 bp, Homo sapiens
gctgaaggtggggca

SEQ ID NO: 625348 - DNA, 15 bp, Homo sapiens
ctgaaggtggggcag

SEQ ID NO: 625349 - DNA, 15 bp, Homo sapiens
tgaaggtggggcagt

SEQ ID NO: 625350 - DNA, 15 bp, Homo sapiens
gaaggtggggcagta

SEQ ID NO: 625351 - DNA, 15 bp, Homo sapiens
aaggtggggcagtaa

SEQ ID NO: 625352 - DNA, 15 bp, Homo sapiens
aggtggggcagtaag

SEQ ID NO: 625353 - DNA, 15 bp, Homo sapiens
ggtggggcagtaagt

SEQ ID NO: 625354 - DNA, 15 bp, Homo sapiens
gtggggcagtaagtg

SEQ ID NO: 625355 - DNA, 15 bp, Homo sapiens
tggggcagtaagtgc

SEQ ID NO: 625356 - DNA, 15 bp, Homo sapiens
ggggcagtaagtgct

SEQ ID NO: 625357 - DNA, 15 bp, Homo sapiens
gggcagtaagtgctg

SEQ ID NO: 625358 - DNA, 15 bp, Homo sapiens
ggcagtaagtgctgc

SEQ ID NO: 625359 - DNA, 15 bp, Homo sapiens
gcagtaagtgctgct

SEQ ID NO: 625360 - DNA, 15 bp, Homo sapiens
cagtaagtgctgctg

SEQ ID NO: 625361 - DNA, 15 bp, Homo sapiens
agtaagtgctgctgg

SEQ ID NO: 625362 - DNA, 15 bp, Homo sapiens
gtaagtgctgctggg

SEQ ID NO: 625363 - DNA, 15 bp, Homo sapiens
taagtgctgctggga

SEQ ID NO: 625364 - DNA, 15 bp, Homo sapiens
aagtgctgctgggag

SEQ ID NO: 625365 - DNA, 15 bp, Homo sapiens
agtgctgctgggaga

SEQ ID NO: 625366 - DNA, 15 bp, Homo sapiens
gtgctgctgggagaa

SEQ ID NO: 625367 - DNA, 15 bp, Homo sapiens
tgctgctgggagaac

SEQ ID NO: 625368 - DNA, 15 bp, Homo sapiens
gctgctgggagaaca

SEQ ID NO: 625369 - DNA, 15 bp, Homo sapiens
ctgctgggagaacag

SEQ ID NO: 625370 - DNA, 15 bp, Homo sapiens
tgctgggagaacagg

SEQ ID NO: 625371 - DNA, 15 bp, Homo sapiens
gctgggagaacaggc

SEQ ID NO: 625372 - DNA, 15 bp, Homo sapiens
ctgggagaacaggca

SEQ ID NO: 625373 - DNA, 15 bp, Homo sapiens
tgggagaacaggcag

SEQ ID NO: 625374 - DNA, 15 bp, Homo sapiens
gggagaacaggcagc

SEQ ID NO: 625375 - DNA, 15 bp, Homo sapiens
ggagaacaggcagca

SEQ ID NO: 625376 - DNA, 15 bp, Homo sapiens
gagaacaggcagcac

SEQ ID NO: 625377 - DNA, 15 bp, Homo sapiens
agaacaggcagcaca

SEQ ID NO: 625378 - DNA, 15 bp, Homo sapiens
gaacaggcagcacag

SEQ ID NO: 625379 - DNA, 15 bp, Homo sapiens
aacaggcagcacagg

SEQ ID NO: 625380 - DNA, 15 bp, Homo sapiens
acaggcagcacaggc

SEQ ID NO: 625381 - DNA, 15 bp, Homo sapiens
caggcagcacaggct

SEQ ID NO: 625382 - DNA, 15 bp, Homo sapiens
aggcagcacaggctg

SEQ ID NO: 625383 - DNA, 15 bp, Homo sapiens
ggcagcacaggctga

SEQ ID NO: 625384 - DNA, 15 bp, Homo sapiens
gcagcacaggctgag

SEQ ID NO: 625385 - DNA, 15 bp, Homo sapiens
cagcacaggctgagt

SEQ ID NO: 625386 - DNA, 15 bp, Homo sapiens
agcacaggctgagtt

SEQ ID NO: 625387 - DNA, 15 bp, Homo sapiens
gcacaggctgagttg

SEQ ID NO: 625388 - DNA, 15 bp, Homo sapiens
cacaggctgagttgg

SEQ ID NO: 625389 - DNA, 15 bp, Homo sapiens
acaggctgagttggt

SEQ ID NO: 625390 - DNA, 15 bp, Homo sapiens
caggctgagttggtg

SEQ ID NO: 625391 - DNA, 15 bp, Homo sapiens
aggctgagttggtgc

SEQ ID NO: 625392 - DNA, 15 bp, Homo sapiens
ggctgagttggtgca

SEQ ID NO: 625393 - DNA, 15 bp, Homo sapiens
gctgagttggtgcag

SEQ ID NO: 625394 - DNA, 15 bp, Homo sapiens
ctgagttggtgcaga

SEQ ID NO: 625395 - DNA, 15 bp, Homo sapiens
tgagttggtgcagaa

SEQ ID NO: 625396 - DNA, 15 bp, Homo sapiens
gagttggtgcagaag

SEQ ID NO: 625397 - DNA, 15 bp, Homo sapiens
agttggtgcagaagt

SEQ ID NO: 625398 - DNA, 15 bp, Homo sapiens
gttggtgcagaagtg

SEQ ID NO: 625399 - DNA, 15 bp, Homo sapiens
ttggtgcagaagtga

SEQ ID NO: 625400 - DNA, 15 bp, Homo sapiens
tggtgcagaagtgag

SEQ ID NO: 625401 - DNA, 15 bp, Homo sapiens
ggtgcagaagtgagt

SEQ ID NO: 625402 - DNA, 15 bp, Homo sapiens
gtgcagaagtgagtc

SEQ ID NO: 625403 - DNA, 15 bp, Homo sapiens
tgcagaagtgagtca

SEQ ID NO: 625404 - DNA, 15 bp, Homo sapiens
gcagaagtgagtcaa

SEQ ID NO: 625405 - DNA, 15 bp, Homo sapiens
cagaagtgagtcaac

SEQ ID NO: 625406 - DNA, 15 bp, Homo sapiens
agaagtgagtcaaca

SEQ ID NO: 625407 - DNA, 15 bp, Homo sapiens
gaagtgagtcaacat

SEQ ID NO: 625408 - DNA, 15 bp, Homo sapiens
aagtgagtcaacata

SEQ ID NO: 625409 - DNA, 15 bp, Homo sapiens
agtgagtcaacatat

SEQ ID NO: 625410 - DNA, 15 bp, Homo sapiens
gtgagtcaacatatg

SEQ ID NO: 625411 - DNA, 15 bp, Homo sapiens
tgagtcaacatatgt

SEQ ID NO: 625412 - DNA, 15 bp, Homo sapiens
gagtcaacatatgtg

SEQ ID NO: 625413 - DNA, 15 bp, Homo sapiens
agtcaacatatgtgc

SEQ ID NO: 625414 - DNA, 15 bp, Homo sapiens
gtcaacatatgtgcc

SEQ ID NO: 625415 - DNA, 15 bp, Homo sapiens
tcaacatatgtgcca

SEQ ID NO: 625416 - DNA, 15 bp, Homo sapiens
caacatatgtgccat

SEQ ID NO: 625417 - DNA, 15 bp, Homo sapiens
aacatatgtgccatc

SEQ ID NO: 625418 - DNA, 15 bp, Homo sapiens
acatatgtgccatcg

SEQ ID NO: 625419 - DNA, 15 bp, Homo sapiens
catatgtgccatcgt

SEQ ID NO: 625420 - DNA, 15 bp, Homo sapiens
atatgtgccatcgta

SEQ ID NO: 625421 - DNA, 15 bp, Homo sapiens
tatgtgccatcgtat

SEQ ID NO: 625422 - DNA, 15 bp, Homo sapiens
atgtgccatcgtata

SEQ ID NO: 625423 - DNA, 15 bp, Homo sapiens
tgtgccatcgtataa

SEQ ID NO: 625424 - DNA, 15 bp, Homo sapiens
gtgccatcgtataaa

SEQ ID NO: 625425 - DNA, 15 bp, Homo sapiens
tgccatcgtataaaa

SEQ ID NO: 625426 - DNA, 15 bp, Homo sapiens
gccatcgtataaaat

SEQ ID NO: 625427 - DNA, 15 bp, Homo sapiens
ccatcgtataaaatg

SEQ ID NO: 625428 - DNA, 15 bp, Homo sapiens
catcgtataaaatgt

SEQ ID NO: 625429 - DNA, 15 bp, Homo sapiens
atcgtataaaatgta

SEQ ID NO: 625430 - DNA, 15 bp, Homo sapiens
tcgtataaaatgtac

SEQ ID NO: 625431 - DNA, 15 bp, Homo sapiens
cgtataaaatgtact

SEQ ID NO: 625432 - DNA, 15 bp, Homo sapiens
gtataaaatgtactc

SEQ ID NO: 625433 - DNA, 15 bp, Homo sapiens
tataaaatgtactca

SEQ ID NO: 625434 - DNA, 15 bp, Homo sapiens
ataaaatgtactcat

SEQ ID NO: 625435 - DNA, 15 bp, Homo sapiens
taaaatgtactcatc

SEQ ID NO: 625436 - DNA, 15 bp, Homo sapiens
aaaatgtactcatcg

SEQ ID NO: 625437 - DNA, 15 bp, Homo sapiens
aaatgtactcatcgg

SEQ ID NO: 625438 - DNA, 15 bp, Homo sapiens
aatgtactcatcgga

SEQ ID NO: 625439 - DNA, 15 bp, Homo sapiens
atgtactcatcggac

SEQ ID NO: 625440 - DNA, 15 bp, Homo sapiens
tgtactcatcggact

SEQ ID NO: 625441 - DNA, 15 bp, Homo sapiens
gtactcatcggactg

SEQ ID NO: 625442 - DNA, 15 bp, Homo sapiens
tactcatcggactgt

SEQ ID NO: 625443 - DNA, 15 bp, Homo sapiens
actcatcggactgta

SEQ ID NO: 625444 - DNA, 15 bp, Homo sapiens
ctcatcggactgtag

SEQ ID NO: 625445 - DNA, 15 bp, Homo sapiens
tcatcggactgtaga

SEQ ID NO: 625446 - DNA, 15 bp, Homo sapiens
catcggactgtagat

SEQ ID NO: 625447 - DNA, 15 bp, Homo sapiens
atcggactgtagatg

SEQ ID NO: 625448 - DNA, 15 bp, Homo sapiens
tcggactgtagatgt

SEQ ID NO: 625449 - DNA, 15 bp, Homo sapiens
cggactgtagatgtt

SEQ ID NO: 625450 - DNA, 15 bp, Homo sapiens
ggactgtagatgtta

SEQ ID NO: 625451 - DNA, 15 bp, Homo sapiens
gactgtagatgttag

SEQ ID NO: 625452 - DNA, 15 bp, Homo sapiens
actgtagatgttagc

SEQ ID NO: 625453 - DNA, 15 bp, Homo sapiens
ctgtagatgttagct

SEQ ID NO: 625454 - DNA, 15 bp, Homo sapiens
tgtagatgttagcta

SEQ ID NO: 625455 - DNA, 15 bp, Homo sapiens
gtagatgttagctat

SEQ ID NO: 625456 - DNA, 15 bp, Homo sapiens
tagatgttagctatt

SEQ ID NO: 625457 - DNA, 15 bp, Homo sapiens
agatgttagctatta

SEQ ID NO: 625458 - DNA, 15 bp, Homo sapiens
gatgttagctattac

SEQ ID NO: 625459 - DNA, 15 bp, Homo sapiens
atgttagctattact

SEQ ID NO: 625460 - DNA, 15 bp, Homo sapiens
tgttagctattacta

SEQ ID NO: 625461 - DNA, 15 bp, Homo sapiens
gttagctattactat

SEQ ID NO: 625462 - DNA, 15 bp, Homo sapiens
ttagctattactatt

SEQ ID NO: 625463 - DNA, 15 bp, Homo sapiens
tagctattactatta

SEQ ID NO: 625464 - DNA, 15 bp, Homo sapiens
agctattactattac

SEQ ID NO: 625465 - DNA, 15 bp, Homo sapiens
gctattactattact

SEQ ID NO: 625466 - DNA, 15 bp, Homo sapiens
ctattactattactg

SEQ ID NO: 625467 - DNA, 15 bp, Homo sapiens
tattactattactgc

SEQ ID NO: 625468 - DNA, 15 bp, Homo sapiens
attactattactgct

SEQ ID NO: 625469 - DNA, 15 bp, Homo sapiens
ttactattactgcta

SEQ ID NO: 625470 - DNA, 15 bp, Homo sapiens
tactattactgctat

SEQ ID NO: 625471 - DNA, 15 bp, Homo sapiens
actattactgctatt

SEQ ID NO: 625472 - DNA, 15 bp, Homo sapiens
ctattactgctattt

SEQ ID NO: 625473 - DNA, 15 bp, Homo sapiens
tattactgctatttt

SEQ ID NO: 625474 - DNA, 15 bp, Homo sapiens
attactgctatttta

SEQ ID NO: 625475 - DNA, 15 bp, Homo sapiens
ttactgctattttat

SEQ ID NO: 625476 - DNA, 15 bp, Homo sapiens
tactgctattttatg

SEQ ID NO: 625477 - DNA, 15 bp, Homo sapiens
actgctattttatgt

SEQ ID NO: 625478 - DNA, 15 bp, Homo sapiens
ctgctattttatgtt

SEQ ID NO: 625479 - DNA, 15 bp, Homo sapiens
tgctattttatgttt

SEQ ID NO: 625480 - DNA, 15 bp, Homo sapiens
gctattttatgtttt

SEQ ID NO: 625481 - DNA, 15 bp, Homo sapiens
ctattttatgtttta

SEQ ID NO: 625482 - DNA, 15 bp, Homo sapiens
tattttatgttttat

SEQ ID NO: 625483 - DNA, 15 bp, Homo sapiens
attttatgttttata

SEQ ID NO: 625484 - DNA, 15 bp, Homo sapiens
ttttatgttttatag

SEQ ID NO: 625485 - DNA, 15 bp, Homo sapiens
tttatgttttataga

SEQ ID NO: 625486 - DNA, 15 bp, Homo sapiens
ttatgttttatagac

SEQ ID NO: 625487 - DNA, 15 bp, Homo sapiens
tatgttttatagaca

SEQ ID NO: 625488 - DNA, 15 bp, Homo sapiens
atgttttatagacag

SEQ ID NO: 625489 - DNA, 15 bp, Homo sapiens
tgttttatagacagg

SEQ ID NO: 625490 - DNA, 15 bp, Homo sapiens
gttttatagacaggg

SEQ ID NO: 625491 - DNA, 15 bp, Homo sapiens
ttttatagacagggt

SEQ ID NO: 625492 - DNA, 15 bp, Homo sapiens
tttatagacagggtc

SEQ ID NO: 625493 - DNA, 15 bp, Homo sapiens
ttatagacagggtct

SEQ ID NO: 625494 - DNA, 15 bp, Homo sapiens
tatagacagggtctc

SEQ ID NO: 625495 - DNA, 15 bp, Homo sapiens
atagacagggtctca

SEQ ID NO: 625496 - DNA, 15 bp, Homo sapiens
tagacagggtctcac

SEQ ID NO: 625497 - DNA, 15 bp, Homo sapiens
agacagggtctcact

SEQ ID NO: 625498 - DNA, 15 bp, Homo sapiens
gacagggtctcactc

SEQ ID NO: 625499 - DNA, 15 bp, Homo sapiens
acagggtctcactct

SEQ ID NO: 625500 - DNA, 15 bp, Homo sapiens
cagggtctcactctg

SEQ ID NO: 625501 - DNA, 15 bp, Homo sapiens
agggtctcactctgt

SEQ ID NO: 625502 - DNA, 15 bp, Homo sapiens
acccaggctggagtg

SEQ ID NO: 625503 - DNA, 15 bp, Homo sapiens
cccaggctggagtgc

SEQ ID NO: 625504 - DNA, 15 bp, Homo sapiens
ccaggctggagtgca

SEQ ID NO: 625505 - DNA, 15 bp, Homo sapiens
caggctggagtgcag

SEQ ID NO: 625506 - DNA, 15 bp, Homo sapiens
aggctggagtgcagt

SEQ ID NO: 625507 - DNA, 15 bp, Homo sapiens
ggctggagtgcagtc

SEQ ID NO: 625508 - DNA, 15 bp, Homo sapiens
gctggagtgcagtca

SEQ ID NO: 625509 - DNA, 15 bp, Homo sapiens
ctggagtgcagtcac

SEQ ID NO: 625510 - DNA, 15 bp, Homo sapiens
tggagtgcagtcaca

SEQ ID NO: 625511 - DNA, 15 bp, Homo sapiens
ggagtgcagtcacac

SEQ ID NO: 625512 - DNA, 15 bp, Homo sapiens
gagtgcagtcacaca

SEQ ID NO: 625513 - DNA, 15 bp, Homo sapiens
agtgcagtcacacaa

SEQ ID NO: 625514 - DNA, 15 bp, Homo sapiens
gtgcagtcacacaat

SEQ ID NO: 625515 - DNA, 15 bp, Homo sapiens
tgcagtcacacaatc

SEQ ID NO: 625516 - DNA, 15 bp, Homo sapiens
gcagtcacacaatca

SEQ ID NO: 625517 - DNA, 15 bp, Homo sapiens
cagtcacacaatcat

SEQ ID NO: 625518 - DNA, 15 bp, Homo sapiens
agtcacacaatcata

SEQ ID NO: 625519 - DNA, 15 bp, Homo sapiens
gtcacacaatcatag

SEQ ID NO: 625520 - DNA, 15 bp, Homo sapiens
tcacacaatcatagc

SEQ ID NO: 625521 - DNA, 15 bp, Homo sapiens
cacacaatcatagct

SEQ ID NO: 625522 - DNA, 15 bp, Homo sapiens
acacaatcatagctc

SEQ ID NO: 625523 - DNA, 15 bp, Homo sapiens
cacaatcatagctca

SEQ ID NO: 625524 - DNA, 15 bp, Homo sapiens
acaatcatagctcac

SEQ ID NO: 625525 - DNA, 15 bp, Homo sapiens
caatcatagctcact

SEQ ID NO: 625526 - DNA, 15 bp, Homo sapiens
aatcatagctcactg

SEQ ID NO: 625527 - DNA, 15 bp, Homo sapiens
atcatagctcactgc

SEQ ID NO: 625528 - DNA, 15 bp, Homo sapiens
tcatagctcactgca

SEQ ID NO: 625529 - DNA, 15 bp, Homo sapiens
catagctcactgcaa

SEQ ID NO: 625530 - DNA, 15 bp, Homo sapiens
atagctcactgcaac

SEQ ID NO: 625531 - DNA, 15 bp, Homo sapiens
tagctcactgcaacc

SEQ ID NO: 625532 - DNA, 15 bp, Homo sapiens
agctcactgcaacct

SEQ ID NO: 625533 - DNA, 15 bp, Homo sapiens
gctcactgcaacctc

SEQ ID NO: 625534 - DNA, 15 bp, Homo sapiens
ctcactgcaacctca

SEQ ID NO: 625535 - DNA, 15 bp, Homo sapiens
tcactgcaacctcag

SEQ ID NO: 625536 - DNA, 15 bp, Homo sapiens
cactgcaacctcagc

SEQ ID NO: 625537 - DNA, 15 bp, Homo sapiens
actgcaacctcagcc

SEQ ID NO: 625538 - DNA, 15 bp, Homo sapiens
ctgcaacctcagcct

SEQ ID NO: 625539 - DNA, 15 bp, Homo sapiens
tgcaacctcagcctc

SEQ ID NO: 625540 - DNA, 15 bp, Homo sapiens
gcaacctcagcctcc

SEQ ID NO: 625541 - DNA, 15 bp, Homo sapiens
caacctcagcctcct

SEQ ID NO: 625542 - DNA, 15 bp, Homo sapiens
aacctcagcctcctg

SEQ ID NO: 625543 - DNA, 15 bp, Homo sapiens
acctcagcctcctgg

SEQ ID NO: 625544 - DNA, 15 bp, Homo sapiens
cctcagcctcctggg

SEQ ID NO: 625545 - DNA, 15 bp, Homo sapiens
ctcagcctcctgggc

SEQ ID NO: 625546 - DNA, 15 bp, Homo sapiens
tcagcctcctgggct

SEQ ID NO: 625547 - DNA, 15 bp, Homo sapiens
cagcctcctgggctt

SEQ ID NO: 625548 - DNA, 15 bp, Homo sapiens
agcctcctgggctta

SEQ ID NO: 625549 - DNA, 15 bp, Homo sapiens
gcctcctgggcttaa

SEQ ID NO: 625550 - DNA, 15 bp, Homo sapiens
cctcctgggcttaag

SEQ ID NO: 625551 - DNA, 15 bp, Homo sapiens
ctcctgggcttaagc

SEQ ID NO: 625552 - DNA, 15 bp, Homo sapiens
tcctgggcttaagcg

SEQ ID NO: 625553 - DNA, 15 bp, Homo sapiens
cctgggcttaagcga

SEQ ID NO: 625554 - DNA, 15 bp, Homo sapiens
ctgggcttaagcgat

SEQ ID NO: 625555 - DNA, 15 bp, Homo sapiens
tgggcttaagcgatc

SEQ ID NO: 625556 - DNA, 15 bp, Homo sapiens
gggcttaagcgatct

SEQ ID NO: 625557 - DNA, 15 bp, Homo sapiens
ggcttaagcgatctg

SEQ ID NO: 625558 - DNA, 15 bp, Homo sapiens
gcttaagcgatctgc

SEQ ID NO: 625559 - DNA, 15 bp, Homo sapiens
cttaagcgatctgcc

SEQ ID NO: 625560 - DNA, 15 bp, Homo sapiens
ttaagcgatctgcct

SEQ ID NO: 625561 - DNA, 15 bp, Homo sapiens
taagcgatctgcctc

SEQ ID NO: 625562 - DNA, 15 bp, Homo sapiens
aagcgatctgcctca

SEQ ID NO: 625563 - DNA, 15 bp, Homo sapiens
agcgatctgcctcag

SEQ ID NO: 625564 - DNA, 15 bp, Homo sapiens
gcgatctgcctcagc

SEQ ID NO: 625565 - DNA, 15 bp, Homo sapiens
cgatctgcctcagcc

SEQ ID NO: 625566 - DNA, 15 bp, Homo sapiens
gatctgcctcagcct

SEQ ID NO: 625567 - DNA, 15 bp, Homo sapiens
atctgcctcagcctc

SEQ ID NO: 625568 - DNA, 15 bp, Homo sapiens
tctgcctcagcctcc

SEQ ID NO: 625569 - DNA, 15 bp, Homo sapiens
cctcagcctcccaag

SEQ ID NO: 625570 - DNA, 15 bp, Homo sapiens
ctcagcctcccaagt

SEQ ID NO: 625571 - DNA, 15 bp, Homo sapiens
tcagcctcccaagta

SEQ ID NO: 625572 - DNA, 15 bp, Homo sapiens
cagcctcccaagtag

SEQ ID NO: 625573 - DNA, 15 bp, Homo sapiens
agcctcccaagtagc

SEQ ID NO: 625574 - DNA, 15 bp, Homo sapiens
gcctcccaagtagct

SEQ ID NO: 625575 - DNA, 15 bp, Homo sapiens
cctcccaagtagctg

SEQ ID NO: 625576 - DNA, 15 bp, Homo sapiens
agctgggactacaga

SEQ ID NO: 625577 - DNA, 15 bp, Homo sapiens
gctgggactacagat

SEQ ID NO: 625578 - DNA, 15 bp, Homo sapiens
ctgggactacagatg

SEQ ID NO: 625579 - DNA, 15 bp, Homo sapiens
tgggactacagatgt

SEQ ID NO: 625580 - DNA, 15 bp, Homo sapiens
gggactacagatgtg

SEQ ID NO: 625581 - DNA, 15 bp, Homo sapiens
ggactacagatgtgt

SEQ ID NO: 625582 - DNA, 15 bp, Homo sapiens
gactacagatgtgtg

SEQ ID NO: 625583 - DNA, 15 bp, Homo sapiens
actacagatgtgtgc

SEQ ID NO: 625584 - DNA, 15 bp, Homo sapiens
ctacagatgtgtgcc

SEQ ID NO: 625585 - DNA, 15 bp, Homo sapiens
tacagatgtgtgcca

SEQ ID NO: 625586 - DNA, 15 bp, Homo sapiens
acagatgtgtgccac

SEQ ID NO: 625587 - DNA, 15 bp, Homo sapiens
cagatgtgtgccacc

SEQ ID NO: 625588 - DNA, 15 bp, Homo sapiens
agatgtgtgccacca

SEQ ID NO: 625589 - DNA, 15 bp, Homo sapiens
gatgtgtgccaccac

SEQ ID NO: 625590 - DNA, 15 bp, Homo sapiens
atgtgtgccaccacg

SEQ ID NO: 625591 - DNA, 15 bp, Homo sapiens
tgtgtgccaccacgc

SEQ ID NO: 625592 - DNA, 15 bp, Homo sapiens
gtgtgccaccacgcc

SEQ ID NO: 625593 - DNA, 15 bp, Homo sapiens
tgtgccaccacgcct

SEQ ID NO: 625594 - DNA, 15 bp, Homo sapiens
gtgccaccacgcctg

SEQ ID NO: 625595 - DNA, 15 bp, Homo sapiens
tgccaccacgcctgg

SEQ ID NO: 625596 - DNA, 15 bp, Homo sapiens
gccaccacgcctggc

SEQ ID NO: 625597 - DNA, 15 bp, Homo sapiens
ccaccacgcctggct

SEQ ID NO: 625598 - DNA, 15 bp, Homo sapiens
caccacgcctggcta

SEQ ID NO: 625599 - DNA, 15 bp, Homo sapiens
accacgcctggctaa

SEQ ID NO: 625600 - DNA, 15 bp, Homo sapiens
ccacgcctggctaaa

SEQ ID NO: 625601 - DNA, 15 bp, Homo sapiens
cacgcctggctaaat

SEQ ID NO: 625602 - DNA, 15 bp, Homo sapiens
acgcctggctaaatt

SEQ ID NO: 625603 - DNA, 15 bp, Homo sapiens
cgcctggctaaattt

SEQ ID NO: 625604 - DNA, 15 bp, Homo sapiens
gcctggctaaatttg

SEQ ID NO: 625605 - DNA, 15 bp, Homo sapiens
cctggctaaatttgt

SEQ ID NO: 625606 - DNA, 15 bp, Homo sapiens
ctggctaaatttgtt

SEQ ID NO: 625607 - DNA, 15 bp, Homo sapiens
tggctaaatttgttt

SEQ ID NO: 625608 - DNA, 15 bp, Homo sapiens
ggctaaatttgttta

SEQ ID NO: 625609 - DNA, 15 bp, Homo sapiens
gctaaatttgtttaa

SEQ ID NO: 625610 - DNA, 15 bp, Homo sapiens
ctaaatttgtttaaa

SEQ ID NO: 625611 - DNA, 15 bp, Homo sapiens
taaatttgtttaaaa

SEQ ID NO: 625612 - DNA, 15 bp, Homo sapiens
aaatttgtttaaaat

SEQ ID NO: 625613 - DNA, 15 bp, Homo sapiens
aatttgtttaaaatt

SEQ ID NO: 625614 - DNA, 15 bp, Homo sapiens
atttgtttaaaattt

SEQ ID NO: 625615 - DNA, 15 bp, Homo sapiens
tttgtttaaaatttt

SEQ ID NO: 625616 - DNA, 15 bp, Homo sapiens
ttgtttaaaattttt

SEQ ID NO: 625617 - DNA, 15 bp, Homo sapiens
tgtttaaaatttttt

SEQ ID NO: 625618 - DNA, 15 bp, Homo sapiens
gtttaaaattttttt

SEQ ID NO: 625619 - DNA, 15 bp, Homo sapiens
tttaaaatttttttt

SEQ ID NO: 625620 - DNA, 15 bp, Homo sapiens
ttaaaattttttttg

SEQ ID NO: 625621 - DNA, 15 bp, Homo sapiens
taaaattttttttgt

SEQ ID NO: 625622 - DNA, 15 bp, Homo sapiens
aaaattttttttgta

SEQ ID NO: 625623 - DNA, 15 bp, Homo sapiens
aaattttttttgtag

SEQ ID NO: 625624 - DNA, 15 bp, Homo sapiens
aattttttttgtaga

SEQ ID NO: 625625 - DNA, 15 bp, Homo sapiens
attttttttgtagag

SEQ ID NO: 625626 - DNA, 15 bp, Homo sapiens
ttttttttgtagaga

SEQ ID NO: 625627 - DNA, 15 bp, Homo sapiens
tttttttgtagagat

SEQ ID NO: 625628 - DNA, 15 bp, Homo sapiens
ttttttgtagagatg

SEQ ID NO: 625629 - DNA, 15 bp, Homo sapiens
tttttgtagagatgg

SEQ ID NO: 625630 - DNA, 15 bp, Homo sapiens
ttttgtagagatggg

SEQ ID NO: 625631 - DNA, 15 bp, Homo sapiens
tttgtagagatgggg

SEQ ID NO: 625632 - DNA, 15 bp, Homo sapiens
ttgtagagatggggt

SEQ ID NO: 625633 - DNA, 15 bp, Homo sapiens
tgtagagatggggtc

SEQ ID NO: 625634 - DNA, 15 bp, Homo sapiens
gtagagatggggtct

SEQ ID NO: 625635 - DNA, 15 bp, Homo sapiens
tagagatggggtctc

SEQ ID NO: 625636 - DNA, 15 bp, Homo sapiens
agagatggggtctcc

SEQ ID NO: 625637 - DNA, 15 bp, Homo sapiens
gagatggggtctccc

SEQ ID NO: 625638 - DNA, 15 bp, Homo sapiens
agatggggtctccct

SEQ ID NO: 625639 - DNA, 15 bp, Homo sapiens
gatggggtctcccta

SEQ ID NO: 625640 - DNA, 15 bp, Homo sapiens
atggggtctccctat

SEQ ID NO: 625641 - DNA, 15 bp, Homo sapiens
tggggtctccctatg

SEQ ID NO: 625642 - DNA, 15 bp, Homo sapiens
ggggtctccctatgt

SEQ ID NO: 625643 - DNA, 15 bp, Homo sapiens
gggtctccctatgtt

SEQ ID NO: 625644 - DNA, 15 bp, Homo sapiens
ggtctccctatgttg

SEQ ID NO: 625645 - DNA, 15 bp, Homo sapiens
gtctccctatgttgc

SEQ ID NO: 625646 - DNA, 15 bp, Homo sapiens
tctccctatgttgcc

SEQ ID NO: 625647 - DNA, 15 bp, Homo sapiens
ctccctatgttgccc

SEQ ID NO: 625648 - DNA, 15 bp, Homo sapiens
tccctatgttgccca

SEQ ID NO: 625649 - DNA, 15 bp, Homo sapiens
ccctatgttgcccag

SEQ ID NO: 625650 - DNA, 15 bp, Homo sapiens
cctatgttgcccagg

SEQ ID NO: 625651 - DNA, 15 bp, Homo sapiens
ctatgttgcccaggc

SEQ ID NO: 625652 - DNA, 15 bp, Homo sapiens
tatgttgcccaggct

SEQ ID NO: 625653 - DNA, 15 bp, Homo sapiens
atgttgcccaggcta

SEQ ID NO: 625654 - DNA, 15 bp, Homo sapiens
tgttgcccaggctag

SEQ ID NO: 625655 - DNA, 15 bp, Homo sapiens
gttgcccaggctagt

SEQ ID NO: 625656 - DNA, 15 bp, Homo sapiens
ttgcccaggctagtc

SEQ ID NO: 625657 - DNA, 15 bp, Homo sapiens
tgcccaggctagtct

SEQ ID NO: 625658 - DNA, 15 bp, Homo sapiens
gcccaggctagtctt

SEQ ID NO: 625659 - DNA, 15 bp, Homo sapiens
cccaggctagtcttg

SEQ ID NO: 625660 - DNA, 15 bp, Homo sapiens
ccaggctagtcttga

SEQ ID NO: 625661 - DNA, 15 bp, Homo sapiens
caggctagtcttgaa

SEQ ID NO: 625662 - DNA, 15 bp, Homo sapiens
aggctagtcttgaac

SEQ ID NO: 625663 - DNA, 15 bp, Homo sapiens
ggctagtcttgaact

SEQ ID NO: 625664 - DNA, 15 bp, Homo sapiens
gctagtcttgaactt

SEQ ID NO: 625665 - DNA, 15 bp, Homo sapiens
ctagtcttgaacttc

SEQ ID NO: 625666 - DNA, 15 bp, Homo sapiens
tagtcttgaacttct

SEQ ID NO: 625667 - DNA, 15 bp, Homo sapiens
agtcttgaacttctg

SEQ ID NO: 625668 - DNA, 15 bp, Homo sapiens
tcttgaacttctggg

SEQ ID NO: 625669 - DNA, 15 bp, Homo sapiens
cttgaacttctgggc

SEQ ID NO: 625670 - DNA, 15 bp, Homo sapiens
ttgaacttctgggct

SEQ ID NO: 625671 - DNA, 15 bp, Homo sapiens
tgaacttctgggctc

SEQ ID NO: 625672 - DNA, 15 bp, Homo sapiens
gaacttctgggctca

SEQ ID NO: 625673 - DNA, 15 bp, Homo sapiens
aacttctgggctcaa

SEQ ID NO: 625674 - DNA, 15 bp, Homo sapiens
acttctgggctcaag

SEQ ID NO: 625675 - DNA, 15 bp, Homo sapiens
cttctgggctcaagc

SEQ ID NO: 625676 - DNA, 15 bp, Homo sapiens
ttctgggctcaagcg

SEQ ID NO: 625677 - DNA, 15 bp, Homo sapiens
tctgggctcaagcga

SEQ ID NO: 625678 - DNA, 15 bp, Homo sapiens
ctgggctcaagcgac

SEQ ID NO: 625679 - DNA, 15 bp, Homo sapiens
tgggctcaagcgacc

SEQ ID NO: 625680 - DNA, 15 bp, Homo sapiens
gggctcaagcgaccc

SEQ ID NO: 625681 - DNA, 15 bp, Homo sapiens
ggctcaagcgaccct

SEQ ID NO: 625682 - DNA, 15 bp, Homo sapiens
gctcaagcgaccctc

SEQ ID NO: 625683 - DNA, 15 bp, Homo sapiens
ctcaagcgaccctcc

SEQ ID NO: 625684 - DNA, 15 bp, Homo sapiens
tcaagcgaccctcct

SEQ ID NO: 625685 - DNA, 15 bp, Homo sapiens
caagcgaccctcctg

SEQ ID NO: 625686 - DNA, 15 bp, Homo sapiens
aagcgaccctcctgc

SEQ ID NO: 625687 - DNA, 15 bp, Homo sapiens
agcgaccctcctgcc

SEQ ID NO: 625688 - DNA, 15 bp, Homo sapiens
gcgaccctcctgcct

SEQ ID NO: 625689 - DNA, 15 bp, Homo sapiens
cgaccctcctgcctt

SEQ ID NO: 625690 - DNA, 15 bp, Homo sapiens
gaccctcctgccttg

SEQ ID NO: 625691 - DNA, 15 bp, Homo sapiens
accctcctgccttgg

SEQ ID NO: 625692 - DNA, 15 bp, Homo sapiens
ccctcctgccttggc

SEQ ID NO: 625693 - DNA, 15 bp, Homo sapiens
cctcctgccttggcc

SEQ ID NO: 625694 - DNA, 15 bp, Homo sapiens
ctcctgccttggcct

SEQ ID NO: 625695 - DNA, 15 bp, Homo sapiens
tcctgccttggcctc

SEQ ID NO: 625696 - DNA, 15 bp, Homo sapiens
cctgccttggcctcc

SEQ ID NO: 625697 - DNA, 15 bp, Homo sapiens
ctgccttggcctccc

SEQ ID NO: 625698 - DNA, 15 bp, Homo sapiens
tgccttggcctccca

SEQ ID NO: 625699 - DNA, 15 bp, Homo sapiens
gccttggcctcccaa

SEQ ID NO: 625700 - DNA, 15 bp, Homo sapiens
ccttggcctcccaaa

SEQ ID NO: 625701 - DNA, 15 bp, Homo sapiens
cttggcctcccaaat

SEQ ID NO: 625702 - DNA, 15 bp, Homo sapiens
ttggcctcccaaatt

SEQ ID NO: 625703 - DNA, 15 bp, Homo sapiens
tggcctcccaaattg

SEQ ID NO: 625704 - DNA, 15 bp, Homo sapiens
ggcctcccaaattgc

SEQ ID NO: 625705 - DNA, 15 bp, Homo sapiens
gcctcccaaattgct

SEQ ID NO: 625706 - DNA, 15 bp, Homo sapiens
cctcccaaattgctg

SEQ ID NO: 625707 - DNA, 15 bp, Homo sapiens
ctcccaaattgctgg

SEQ ID NO: 625708 - DNA, 15 bp, Homo sapiens
tcccaaattgctggg

SEQ ID NO: 625709 - DNA, 15 bp, Homo sapiens
cccaaattgctggga

SEQ ID NO: 625710 - DNA, 15 bp, Homo sapiens
ccaaattgctgggat

SEQ ID NO: 625711 - DNA, 15 bp, Homo sapiens
caaattgctgggatt

SEQ ID NO: 625712 - DNA, 15 bp, Homo sapiens
aaattgctgggatta

SEQ ID NO: 625713 - DNA, 15 bp, Homo sapiens
aattgctgggattac

SEQ ID NO: 625714 - DNA, 15 bp, Homo sapiens
attgctgggattaca

SEQ ID NO: 625715 - DNA, 15 bp, Homo sapiens
ttgctgggattacag

SEQ ID NO: 625716 - DNA, 15 bp, Homo sapiens
ctgggattacaggca

SEQ ID NO: 625717 - DNA, 15 bp, Homo sapiens
tgggattacaggcat

SEQ ID NO: 625718 - DNA, 15 bp, Homo sapiens
gggattacaggcata

SEQ ID NO: 625719 - DNA, 15 bp, Homo sapiens
ggattacaggcataa

SEQ ID NO: 625720 - DNA, 15 bp, Homo sapiens
gattacaggcataag

SEQ ID NO: 625721 - DNA, 15 bp, Homo sapiens
attacaggcataagc

SEQ ID NO: 625722 - DNA, 15 bp, Homo sapiens
ttacaggcataagcc

SEQ ID NO: 625723 - DNA, 15 bp, Homo sapiens
tacaggcataagcca

SEQ ID NO: 625724 - DNA, 15 bp, Homo sapiens
acaggcataagccac

SEQ ID NO: 625725 - DNA, 15 bp, Homo sapiens
caggcataagccact

SEQ ID NO: 625726 - DNA, 15 bp, Homo sapiens
aggcataagccactg

SEQ ID NO: 625727 - DNA, 15 bp, Homo sapiens
ggcataagccactgt

SEQ ID NO: 625728 - DNA, 15 bp, Homo sapiens
gcataagccactgtg

SEQ ID NO: 625729 - DNA, 15 bp, Homo sapiens
cataagccactgtgc

SEQ ID NO: 625730 - DNA, 15 bp, Homo sapiens
ataagccactgtgct

SEQ ID NO: 625731 - DNA, 15 bp, Homo sapiens
taagccactgtgctg

SEQ ID NO: 625732 - DNA, 15 bp, Homo sapiens
aagccactgtgctgg

SEQ ID NO: 625733 - DNA, 15 bp, Homo sapiens
agccactgtgctggg

SEQ ID NO: 625734 - DNA, 15 bp, Homo sapiens
gccactgtgctgggc

SEQ ID NO: 625735 - DNA, 15 bp, Homo sapiens
ccactgtgctgggcc

SEQ ID NO: 625736 - DNA, 15 bp, Homo sapiens
cactgtgctgggcca

SEQ ID NO: 625737 - DNA, 15 bp, Homo sapiens
actgtgctgggccat

SEQ ID NO: 625738 - DNA, 15 bp, Homo sapiens
ctgtgctgggccata

SEQ ID NO: 625739 - DNA, 15 bp, Homo sapiens
tgtgctgggccatat

SEQ ID NO: 625740 - DNA, 15 bp, Homo sapiens
gtgctgggccatatt

SEQ ID NO: 625741 - DNA, 15 bp, Homo sapiens
tgctgggccatatta

SEQ ID NO: 625742 - DNA, 15 bp, Homo sapiens
gctgggccatattac

SEQ ID NO: 625743 - DNA, 15 bp, Homo sapiens
ctgggccatattact

SEQ ID NO: 625744 - DNA, 15 bp, Homo sapiens
tgggccatattactg

SEQ ID NO: 625745 - DNA, 15 bp, Homo sapiens
gggccatattactgc

SEQ ID NO: 625746 - DNA, 15 bp, Homo sapiens
ggccatattactgct

SEQ ID NO: 625747 - DNA, 15 bp, Homo sapiens
gccatattactgctg

SEQ ID NO: 625748 - DNA, 15 bp, Homo sapiens
ccatattactgctgt

SEQ ID NO: 625749 - DNA, 15 bp, Homo sapiens
catattactgctgtc

SEQ ID NO: 625750 - DNA, 15 bp, Homo sapiens
atattactgctgtca

SEQ ID NO: 625751 - DNA, 15 bp, Homo sapiens
tattactgctgtcat

SEQ ID NO: 625752 - DNA, 15 bp, Homo sapiens
attactgctgtcatt

SEQ ID NO: 625753 - DNA, 15 bp, Homo sapiens
ttactgctgtcattt

SEQ ID NO: 625754 - DNA, 15 bp, Homo sapiens
tactgctgtcattta

SEQ ID NO: 625755 - DNA, 15 bp, Homo sapiens
actgctgtcatttat

SEQ ID NO: 625756 - DNA, 15 bp, Homo sapiens
ctgctgtcatttatg

SEQ ID NO: 625757 - DNA, 15 bp, Homo sapiens
tgctgtcatttatgg

SEQ ID NO: 625758 - DNA, 15 bp, Homo sapiens
gctgtcatttatggc

SEQ ID NO: 625759 - DNA, 15 bp, Homo sapiens
ctgtcatttatggcc

SEQ ID NO: 625760 - DNA, 15 bp, Homo sapiens
tgtcatttatggcca

SEQ ID NO: 625761 - DNA, 15 bp, Homo sapiens
gtcatttatggccaa

SEQ ID NO: 625762 - DNA, 15 bp, Homo sapiens
tcatttatggccaaa

SEQ ID NO: 625763 - DNA, 15 bp, Homo sapiens
catttatggccaaaa

SEQ ID NO: 625764 - DNA, 15 bp, Homo sapiens
atttatggccaaaag

SEQ ID NO: 625765 - DNA, 15 bp, Homo sapiens
tttatggccaaaagt

SEQ ID NO: 625766 - DNA, 15 bp, Homo sapiens
ttatggccaaaagtt

SEQ ID NO: 625767 - DNA, 15 bp, Homo sapiens
tatggccaaaagttt

SEQ ID NO: 625768 - DNA, 15 bp, Homo sapiens
atggccaaaagtttg

SEQ ID NO: 625769 - DNA, 15 bp, Homo sapiens
tggccaaaagtttgc

SEQ ID NO: 625770 - DNA, 15 bp, Homo sapiens
ggccaaaagtttgct

SEQ ID NO: 625771 - DNA, 15 bp, Homo sapiens
gccaaaagtttgctc

SEQ ID NO: 625772 - DNA, 15 bp, Homo sapiens
ccaaaagtttgctca

SEQ ID NO: 625773 - DNA, 15 bp, Homo sapiens
caaaagtttgctcaa

SEQ ID NO: 625774 - DNA, 15 bp, Homo sapiens
aaaagtttgctcaaa

SEQ ID NO: 625775 - DNA, 15 bp, Homo sapiens
aaagtttgctcaaac

SEQ ID NO: 625776 - DNA, 15 bp, Homo sapiens
aagtttgctcaaaca

SEQ ID NO: 625777 - DNA, 15 bp, Homo sapiens
agtttgctcaaacat

SEQ ID NO: 625778 - DNA, 15 bp, Homo sapiens
gtttgctcaaacatt

SEQ ID NO: 625779 - DNA, 15 bp, Homo sapiens
tttgctcaaacattt

SEQ ID NO: 625780 - DNA, 15 bp, Homo sapiens
ttgctcaaacatttt

SEQ ID NO: 625781 - DNA, 15 bp, Homo sapiens
tgctcaaacattttc

SEQ ID NO: 625782 - DNA, 15 bp, Homo sapiens
gctcaaacattttcc

SEQ ID NO: 625783 - DNA, 15 bp, Homo sapiens
ctcaaacattttcca

SEQ ID NO: 625784 - DNA, 15 bp, Homo sapiens
tcaaacattttccag

SEQ ID NO: 625785 - DNA, 15 bp, Homo sapiens
caaacattttccagt

SEQ ID NO: 625786 - DNA, 15 bp, Homo sapiens
aaacattttccagtt

SEQ ID NO: 625787 - DNA, 15 bp, Homo sapiens
aacattttccagtta

SEQ ID NO: 625788 - DNA, 15 bp, Homo sapiens
acattttccagttac

SEQ ID NO: 625789 - DNA, 15 bp, Homo sapiens
cattttccagttacc

SEQ ID NO: 625790 - DNA, 15 bp, Homo sapiens
attttccagttacca

SEQ ID NO: 625791 - DNA, 15 bp, Homo sapiens
ttttccagttaccag

SEQ ID NO: 625792 - DNA, 15 bp, Homo sapiens
tttccagttaccaga

SEQ ID NO: 625793 - DNA, 15 bp, Homo sapiens
ttccagttaccagag

SEQ ID NO: 625794 - DNA, 15 bp, Homo sapiens
tccagttaccagagc

SEQ ID NO: 625795 - DNA, 15 bp, Homo sapiens
ccagttaccagagcc

SEQ ID NO: 625796 - DNA, 15 bp, Homo sapiens
cagttaccagagcca

SEQ ID NO: 625797 - DNA, 15 bp, Homo sapiens
agttaccagagccac

SEQ ID NO: 625798 - DNA, 15 bp, Homo sapiens
gttaccagagccaca

SEQ ID NO: 625799 - DNA, 15 bp, Homo sapiens
ttaccagagccacat

SEQ ID NO: 625800 - DNA, 15 bp, Homo sapiens
taccagagccacatc

SEQ ID NO: 625801 - DNA, 15 bp, Homo sapiens
accagagccacatct

SEQ ID NO: 625802 - DNA, 15 bp, Homo sapiens
ccagagccacatctc

SEQ ID NO: 625803 - DNA, 15 bp, Homo sapiens
cagagccacatctca

SEQ ID NO: 625804 - DNA, 15 bp, Homo sapiens
agagccacatctcaa

SEQ ID NO: 625805 - DNA, 15 bp, Homo sapiens
gagccacatctcaag

SEQ ID NO: 625806 - DNA, 15 bp, Homo sapiens
agccacatctcaagg

SEQ ID NO: 625807 - DNA, 15 bp, Homo sapiens
gccacatctcaaggg

SEQ ID NO: 625808 - DNA, 15 bp, Homo sapiens
ccacatctcaagggt

SEQ ID NO: 625809 - DNA, 15 bp, Homo sapiens
cacatctcaagggtc

SEQ ID NO: 625810 - DNA, 15 bp, Homo sapiens
acatctcaagggtct

SEQ ID NO: 625811 - DNA, 15 bp, Homo sapiens
catctcaagggtctg

SEQ ID NO: 625812 - DNA, 15 bp, Homo sapiens
atctcaagggtctga

SEQ ID NO: 625813 - DNA, 15 bp, Homo sapiens
tctcaagggtctgac

SEQ ID NO: 625814 - DNA, 15 bp, Homo sapiens
ctcaagggtctgaca

SEQ ID NO: 625815 - DNA, 15 bp, Homo sapiens
tcaagggtctgacac

SEQ ID NO: 625816 - DNA, 15 bp, Homo sapiens
caagggtctgacact

SEQ ID NO: 625817 - DNA, 15 bp, Homo sapiens
aagggtctgacactg

SEQ ID NO: 625818 - DNA, 15 bp, Homo sapiens
agggtctgacactgg

SEQ ID NO: 625819 - DNA, 15 bp, Homo sapiens
gggtctgacactggg

SEQ ID NO: 625820 - DNA, 15 bp, Homo sapiens
ggtctgacactggga

SEQ ID NO: 625821 - DNA, 15 bp, Homo sapiens
gtctgacactgggaa

SEQ ID NO: 625822 - DNA, 15 bp, Homo sapiens
tctgacactgggaaa

SEQ ID NO: 625823 - DNA, 15 bp, Homo sapiens
ctgacactgggaaaa

SEQ ID NO: 625824 - DNA, 15 bp, Homo sapiens
tgacactgggaaaac

SEQ ID NO: 625825 - DNA, 15 bp, Homo sapiens
gacactgggaaaaca

SEQ ID NO: 625826 - DNA, 15 bp, Homo sapiens
acactgggaaaacac

SEQ ID NO: 625827 - DNA, 15 bp, Homo sapiens
cactgggaaaacacc

SEQ ID NO: 625828 - DNA, 15 bp, Homo sapiens
actgggaaaacacca

SEQ ID NO: 625829 - DNA, 15 bp, Homo sapiens
ctgggaaaacaccac

SEQ ID NO: 625830 - DNA, 15 bp, Homo sapiens
tgggaaaacaccacg

SEQ ID NO: 625831 - DNA, 15 bp, Homo sapiens
gggaaaacaccacgt

SEQ ID NO: 625832 - DNA, 15 bp, Homo sapiens
ggaaaacaccacgtg

SEQ ID NO: 625833 - DNA, 15 bp, Homo sapiens
gaaaacaccacgtgc

SEQ ID NO: 625834 - DNA, 15 bp, Homo sapiens
aaaacaccacgtgcg

SEQ ID NO: 625835 - DNA, 15 bp, Homo sapiens
aaacaccacgtgcgg

SEQ ID NO: 625836 - DNA, 15 bp, Homo sapiens
aacaccacgtgcgga

SEQ ID NO: 625837 - DNA, 15 bp, Homo sapiens
acaccacgtgcggat

SEQ ID NO: 625838 - DNA, 15 bp, Homo sapiens
caccacgtgcggatc

SEQ ID NO: 625839 - DNA, 15 bp, Homo sapiens
accacgtgcggatcg

SEQ ID NO: 625840 - DNA, 15 bp, Homo sapiens
ccacgtgcggatcgg

SEQ ID NO: 625841 - DNA, 15 bp, Homo sapiens
cacgtgcggatcggg

SEQ ID NO: 625842 - DNA, 15 bp, Homo sapiens
acgtgcggatcgggc

SEQ ID NO: 625843 - DNA, 15 bp, Homo sapiens
cgtgcggatcgggca

SEQ ID NO: 625844 - DNA, 15 bp, Homo sapiens
gtgcggatcgggcac

SEQ ID NO: 625845 - DNA, 15 bp, Homo sapiens
tgcggatcgggcaca

SEQ ID NO: 625846 - DNA, 15 bp, Homo sapiens
gcggatcgggcacac

SEQ ID NO: 625847 - DNA, 15 bp, Homo sapiens
cggatcgggcacacg

SEQ ID NO: 625848 - DNA, 15 bp, Homo sapiens
ggatcgggcacacgc

SEQ ID NO: 625849 - DNA, 15 bp, Homo sapiens
gatcgggcacacgct

SEQ ID NO: 625850 - DNA, 15 bp, Homo sapiens
atcgggcacacgctg

SEQ ID NO: 625851 - DNA, 15 bp, Homo sapiens
tcgggcacacgctga

SEQ ID NO: 625852 - DNA, 15 bp, Homo sapiens
cgggcacacgctgat

SEQ ID NO: 625853 - DNA, 15 bp, Homo sapiens
gggcacacgctgatg

SEQ ID NO: 625854 - DNA, 15 bp, Homo sapiens
ggcacacgctgatgc

SEQ ID NO: 625855 - DNA, 15 bp, Homo sapiens
gcacacgctgatgct

SEQ ID NO: 625856 - DNA, 15 bp, Homo sapiens
cacacgctgatgctt

SEQ ID NO: 625857 - DNA, 15 bp, Homo sapiens
acacgctgatgcttg

SEQ ID NO: 625858 - DNA, 15 bp, Homo sapiens
cacgctgatgcttgc

SEQ ID NO: 625859 - DNA, 15 bp, Homo sapiens
acgctgatgcttgcc

SEQ ID NO: 625860 - DNA, 15 bp, Homo sapiens
cgctgatgcttgccc

SEQ ID NO: 625861 - DNA, 15 bp, Homo sapiens
gctgatgcttgccct

SEQ ID NO: 625862 - DNA, 15 bp, Homo sapiens
ctgatgcttgccctg

SEQ ID NO: 625863 - DNA, 15 bp, Homo sapiens
tgatgcttgccctgc

SEQ ID NO: 625864 - DNA, 15 bp, Homo sapiens
gatgcttgccctgct

SEQ ID NO: 625865 - DNA, 15 bp, Homo sapiens
atgcttgccctgctc

SEQ ID NO: 625866 - DNA, 15 bp, Homo sapiens
tgcttgccctgctca

SEQ ID NO: 625867 - DNA, 15 bp, Homo sapiens
gcttgccctgctcag

SEQ ID NO: 625868 - DNA, 15 bp, Homo sapiens
cttgccctgctcagg

SEQ ID NO: 625869 - DNA, 15 bp, Homo sapiens
ttgccctgctcaggg

SEQ ID NO: 625870 - DNA, 15 bp, Homo sapiens
tgccctgctcagggc

SEQ ID NO: 625871 - DNA, 15 bp, Homo sapiens
gccctgctcagggct

SEQ ID NO: 625872 - DNA, 15 bp, Homo sapiens
ccctgctcagggcta

SEQ ID NO: 625873 - DNA, 15 bp, Homo sapiens
cctgctcagggctat

SEQ ID NO: 625874 - DNA, 15 bp, Homo sapiens
ctgctcagggctatc

SEQ ID NO: 625875 - DNA, 15 bp, Homo sapiens
tgctcagggctatct

SEQ ID NO: 625876 - DNA, 15 bp, Homo sapiens
gctcagggctatcta

SEQ ID NO: 625877 - DNA, 15 bp, Homo sapiens
ctcagggctatctag

SEQ ID NO: 625878 - DNA, 15 bp, Homo sapiens
tcagggctatctagt

SEQ ID NO: 625879 - DNA, 15 bp, Homo sapiens
cagggctatctagtg

SEQ ID NO: 625880 - DNA, 15 bp, Homo sapiens
agggctatctagtgt

SEQ ID NO: 625881 - DNA, 15 bp, Homo sapiens
gggctatctagtgtt

SEQ ID NO: 625882 - DNA, 15 bp, Homo sapiens
ggctatctagtgttc

SEQ ID NO: 625883 - DNA, 15 bp, Homo sapiens
gctatctagtgttcc

SEQ ID NO: 625884 - DNA, 15 bp, Homo sapiens
ctatctagtgttccc

SEQ ID NO: 625885 - DNA, 15 bp, Homo sapiens
tatctagtgttccct

SEQ ID NO: 625886 - DNA, 15 bp, Homo sapiens
atctagtgttccctg

SEQ ID NO: 625887 - DNA, 15 bp, Homo sapiens
tctagtgttccctgc

SEQ ID NO: 625888 - DNA, 15 bp, Homo sapiens
ctagtgttccctgcc

SEQ ID NO: 625889 - DNA, 15 bp, Homo sapiens
tagtgttccctgcca

SEQ ID NO: 625890 - DNA, 15 bp, Homo sapiens
agtgttccctgccag

SEQ ID NO: 625891 - DNA, 15 bp, Homo sapiens
gtgttccctgccaga

SEQ ID NO: 625892 - DNA, 15 bp, Homo sapiens
tgttccctgccagaa

SEQ ID NO: 625893 - DNA, 15 bp, Homo sapiens
gttccctgccagaac

SEQ ID NO: 625894 - DNA, 15 bp, Homo sapiens
ttccctgccagaacc

SEQ ID NO: 625895 - DNA, 15 bp, Homo sapiens
tccctgccagaacct

SEQ ID NO: 625896 - DNA, 15 bp, Homo sapiens
ccctgccagaaccta

SEQ ID NO: 625897 - DNA, 15 bp, Homo sapiens
cctgccagaacctat

SEQ ID NO: 625898 - DNA, 15 bp, Homo sapiens
ctgccagaacctatg

SEQ ID NO: 625899 - DNA, 15 bp, Homo sapiens
tgccagaacctatgc

SEQ ID NO: 625900 - DNA, 15 bp, Homo sapiens
gccagaacctatgca

SEQ ID NO: 625901 - DNA, 15 bp, Homo sapiens
ccagaacctatgcac

SEQ ID NO: 625902 - DNA, 15 bp, Homo sapiens
cagaacctatgcacg

SEQ ID NO: 625903 - DNA, 15 bp, Homo sapiens
agaacctatgcacgt

SEQ ID NO: 625904 - DNA, 15 bp, Homo sapiens
gaacctatgcacgtg

SEQ ID NO: 625905 - DNA, 15 bp, Homo sapiens
aacctatgcacgtgt

SEQ ID NO: 625906 - DNA, 15 bp, Homo sapiens
acctatgcacgtgtg

SEQ ID NO: 625907 - DNA, 15 bp, Homo sapiens
cctatgcacgtgtgg

SEQ ID NO: 625908 - DNA, 15 bp, Homo sapiens
ctatgcacgtgtggt

SEQ ID NO: 625909 - DNA, 15 bp, Homo sapiens
tatgcacgtgtggtg

SEQ ID NO: 625910 - DNA, 15 bp, Homo sapiens
atgcacgtgtggtga

SEQ ID NO: 625911 - DNA, 15 bp, Homo sapiens
tgcacgtgtggtgag

SEQ ID NO: 625912 - DNA, 15 bp, Homo sapiens
gcacgtgtggtgaga

SEQ ID NO: 625913 - DNA, 15 bp, Homo sapiens
cacgtgtggtgagag

SEQ ID NO: 625914 - DNA, 15 bp, Homo sapiens
acgtgtggtgagagc

SEQ ID NO: 625915 - DNA, 15 bp, Homo sapiens
cgtgtggtgagagct

SEQ ID NO: 625916 - DNA, 15 bp, Homo sapiens
gtgtggtgagagctt

SEQ ID NO: 625917 - DNA, 15 bp, Homo sapiens
tgtggtgagagctta

SEQ ID NO: 625918 - DNA, 15 bp, Homo sapiens
gtggtgagagcttaa

SEQ ID NO: 625919 - DNA, 15 bp, Homo sapiens
tggtgagagcttaaa

SEQ ID NO: 625920 - DNA, 15 bp, Homo sapiens
ggtgagagcttaaag

SEQ ID NO: 625921 - DNA, 15 bp, Homo sapiens
gtgagagcttaaagc

SEQ ID NO: 625922 - DNA, 15 bp, Homo sapiens
tgagagcttaaagca

SEQ ID NO: 625923 - DNA, 15 bp, Homo sapiens
gagagcttaaagcaa

SEQ ID NO: 625924 - DNA, 15 bp, Homo sapiens
agagcttaaagcaat

SEQ ID NO: 625925 - DNA, 15 bp, Homo sapiens
gagcttaaagcaatg

SEQ ID NO: 625926 - DNA, 15 bp, Homo sapiens
agcttaaagcaatgg

SEQ ID NO: 625927 - DNA, 15 bp, Homo sapiens
gcttaaagcaatgga

SEQ ID NO: 625928 - DNA, 15 bp, Homo sapiens
cttaaagcaatggat

SEQ ID NO: 625929 - DNA, 15 bp, Homo sapiens
ttaaagcaatggatg

SEQ ID NO: 625930 - DNA, 15 bp, Homo sapiens
taaagcaatggatgc

SEQ ID NO: 625931 - DNA, 15 bp, Homo sapiens
aaagcaatggatgct

SEQ ID NO: 625932 - DNA, 15 bp, Homo sapiens
aagcaatggatgctt

SEQ ID NO: 625933 - DNA, 15 bp, Homo sapiens
agcaatggatgcttc

SEQ ID NO: 625934 - DNA, 15 bp, Homo sapiens
gcaatggatgcttcc

SEQ ID NO: 625935 - DNA, 15 bp, Homo sapiens
caatggatgcttccc

SEQ ID NO: 625936 - DNA, 15 bp, Homo sapiens
aatggatgcttcccc

SEQ ID NO: 625937 - DNA, 15 bp, Homo sapiens
atggatgcttccccc

SEQ ID NO: 625938 - DNA, 15 bp, Homo sapiens
tggatgcttccccca

SEQ ID NO: 625939 - DNA, 15 bp, Homo sapiens
ggatgcttcccccaa

SEQ ID NO: 625940 - DNA, 15 bp, Homo sapiens
gatgcttcccccaac

SEQ ID NO: 625941 - DNA, 15 bp, Homo sapiens
atgcttcccccaaca

SEQ ID NO: 625942 - DNA, 15 bp, Homo sapiens
tgcttcccccaacat

SEQ ID NO: 625943 - DNA, 15 bp, Homo sapiens
gcttcccccaacatg

SEQ ID NO: 625944 - DNA, 15 bp, Homo sapiens
cttcccccaacatgc

SEQ ID NO: 625945 - DNA, 15 bp, Homo sapiens
ttcccccaacatgcc

SEQ ID NO: 625946 - DNA, 15 bp, Homo sapiens
tcccccaacatgcca

SEQ ID NO: 625947 - DNA, 15 bp, Homo sapiens
cccccaacatgccag

SEQ ID NO: 625948 - DNA, 15 bp, Homo sapiens
ccccaacatgccaga

SEQ ID NO: 625949 - DNA, 15 bp, Homo sapiens
cccaacatgccagac

SEQ ID NO: 625950 - DNA, 15 bp, Homo sapiens
ccaacatgccagaca

SEQ ID NO: 625951 - DNA, 15 bp, Homo sapiens
caacatgccagacac

SEQ ID NO: 625952 - DNA, 15 bp, Homo sapiens
aacatgccagacact

SEQ ID NO: 625953 - DNA, 15 bp, Homo sapiens
acatgccagacactc

SEQ ID NO: 625954 - DNA, 15 bp, Homo sapiens
catgccagacactcc

SEQ ID NO: 625955 - DNA, 15 bp, Homo sapiens
atgccagacactcct

SEQ ID NO: 625956 - DNA, 15 bp, Homo sapiens
tgccagacactcctg

SEQ ID NO: 625957 - DNA, 15 bp, Homo sapiens
gccagacactcctga

SEQ ID NO: 625958 - DNA, 15 bp, Homo sapiens
ccagacactcctgag

SEQ ID NO: 625959 - DNA, 15 bp, Homo sapiens
cagacactcctgagg

SEQ ID NO: 625960 - DNA, 15 bp, Homo sapiens
agacactcctgagga

SEQ ID NO: 625961 - DNA, 15 bp, Homo sapiens
gacactcctgaggag

SEQ ID NO: 625962 - DNA, 15 bp, Homo sapiens
acactcctgaggagc

SEQ ID NO: 625963 - DNA, 15 bp, Homo sapiens
cactcctgaggagcc

SEQ ID NO: 625964 - DNA, 15 bp, Homo sapiens
actcctgaggagcct

SEQ ID NO: 625965 - DNA, 15 bp, Homo sapiens
ctcctgaggagcctg

SEQ ID NO: 625966 - DNA, 15 bp, Homo sapiens
tcctgaggagcctgg

SEQ ID NO: 625967 - DNA, 15 bp, Homo sapiens
cctgaggagcctggc

SEQ ID NO: 625968 - DNA, 15 bp, Homo sapiens
ctgaggagcctggcg

SEQ ID NO: 625969 - DNA, 15 bp, Homo sapiens
tgaggagcctggcgg

SEQ ID NO: 625970 - DNA, 15 bp, Homo sapiens
gaggagcctggcggc

SEQ ID NO: 625971 - DNA, 15 bp, Homo sapiens
aggagcctggcggct

SEQ ID NO: 625972 - DNA, 15 bp, Homo sapiens
ggagcctggcggctg

SEQ ID NO: 625973 - DNA, 15 bp, Homo sapiens
gagcctggcggctgc

SEQ ID NO: 625974 - DNA, 15 bp, Homo sapiens
agcctggcggctgct

SEQ ID NO: 625975 - DNA, 15 bp, Homo sapiens
gcctggcggctgctg

SEQ ID NO: 625976 - DNA, 15 bp, Homo sapiens
cctggcggctgctgg

SEQ ID NO: 625977 - DNA, 15 bp, Homo sapiens
ctggcggctgctggc

SEQ ID NO: 625978 - DNA, 15 bp, Homo sapiens
tggcggctgctggcc

SEQ ID NO: 625979 - DNA, 15 bp, Homo sapiens
ggcggctgctggcca

SEQ ID NO: 625980 - DNA, 15 bp, Homo sapiens
gcggctgctggccat

SEQ ID NO: 625981 - DNA, 15 bp, Homo sapiens
cggctgctggccatg

SEQ ID NO: 625982 - DNA, 15 bp, Homo sapiens
ggctgctggccatgc

SEQ ID NO: 625983 - DNA, 15 bp, Homo sapiens
gctgctggccatgcc

SEQ ID NO: 625984 - DNA, 15 bp, Homo sapiens
ctgctggccatgccc

SEQ ID NO: 625985 - DNA, 15 bp, Homo sapiens
tgctggccatgcccc

SEQ ID NO: 625986 - DNA, 15 bp, Homo sapiens
gctggccatgccccg

SEQ ID NO: 625987 - DNA, 15 bp, Homo sapiens
ctggccatgccccgt

SEQ ID NO: 625988 - DNA, 15 bp, Homo sapiens
tggccatgccccgtg

SEQ ID NO: 625989 - DNA, 15 bp, Homo sapiens
ggccatgccccgtgt

SEQ ID NO: 625990 - DNA, 15 bp, Homo sapiens
gccatgccccgtgtg

SEQ ID NO: 625991 - DNA, 15 bp, Homo sapiens
ccatgccccgtgtgc

SEQ ID NO: 625992 - DNA, 15 bp, Homo sapiens
catgccccgtgtgca

SEQ ID NO: 625993 - DNA, 15 bp, Homo sapiens
atgccccgtgtgcat

SEQ ID NO: 625994 - DNA, 15 bp, Homo sapiens
tgccccgtgtgcatg

SEQ ID NO: 625995 - DNA, 15 bp, Homo sapiens
gccccgtgtgcatgt

SEQ ID NO: 625996 - DNA, 15 bp, Homo sapiens
ccccgtgtgcatgta

SEQ ID NO: 625997 - DNA, 15 bp, Homo sapiens
cccgtgtgcatgtag

SEQ ID NO: 625998 - DNA, 15 bp, Homo sapiens
ccgtgtgcatgtagg

SEQ ID NO: 625999 - DNA, 15 bp, Homo sapiens
cgtgtgcatgtaggc

SEQ ID NO: 626000 - DNA, 15 bp, Homo sapiens
gtgtgcatgtaggcg

SEQ ID NO: 626001 - DNA, 15 bp, Homo sapiens
tgtgcatgtaggcga

SEQ ID NO: 626002 - DNA, 15 bp, Homo sapiens
gtgcatgtaggcgat

SEQ ID NO: 626003 - DNA, 15 bp, Homo sapiens
tgcatgtaggcgatg

SEQ ID NO: 626004 - DNA, 15 bp, Homo sapiens
gcatgtaggcgatgg

SEQ ID NO: 626005 - DNA, 15 bp, Homo sapiens
catgtaggcgatggg

SEQ ID NO: 626006 - DNA, 15 bp, Homo sapiens
atgtaggcgatgggg

SEQ ID NO: 626007 - DNA, 15 bp, Homo sapiens
tgtaggcgatgggga

SEQ ID NO: 626008 - DNA, 15 bp, Homo sapiens
gtaggcgatggggaa

SEQ ID NO: 626009 - DNA, 15 bp, Homo sapiens
taggcgatggggaag

SEQ ID NO: 626010 - DNA, 15 bp, Homo sapiens
aggcgatggggaagt

SEQ ID NO: 626011 - DNA, 15 bp, Homo sapiens
ggcgatggggaagtg

SEQ ID NO: 626012 - DNA, 15 bp, Homo sapiens
gcgatggggaagtga

SEQ ID NO: 626013 - DNA, 15 bp, Homo sapiens
cgatggggaagtgag

SEQ ID NO: 626014 - DNA, 15 bp, Homo sapiens
gatggggaagtgagt

SEQ ID NO: 626015 - DNA, 15 bp, Homo sapiens
atggggaagtgagtg

SEQ ID NO: 626016 - DNA, 15 bp, Homo sapiens
tggggaagtgagtgg

SEQ ID NO: 626017 - DNA, 15 bp, Homo sapiens
ggggaagtgagtgga

SEQ ID NO: 626018 - DNA, 15 bp, Homo sapiens
gggaagtgagtggag

SEQ ID NO: 626019 - DNA, 15 bp, Homo sapiens
ggaagtgagtggagg

SEQ ID NO: 626020 - DNA, 15 bp, Homo sapiens
gaagtgagtggagga

SEQ ID NO: 626021 - DNA, 15 bp, Homo sapiens
aagtgagtggaggag

SEQ ID NO: 626022 - DNA, 15 bp, Homo sapiens
agtgagtggaggaga

SEQ ID NO: 626023 - DNA, 15 bp, Homo sapiens
gtgagtggaggagag

SEQ ID NO: 626024 - DNA, 15 bp, Homo sapiens
tgagtggaggagagc

SEQ ID NO: 626025 - DNA, 15 bp, Homo sapiens
gagtggaggagagcg

SEQ ID NO: 626026 - DNA, 15 bp, Homo sapiens
agtggaggagagcgg

SEQ ID NO: 626027 - DNA, 15 bp, Homo sapiens
gtggaggagagcgga

SEQ ID NO: 626028 - DNA, 15 bp, Homo sapiens
tggaggagagcggaa

SEQ ID NO: 626029 - DNA, 15 bp, Homo sapiens
ggaggagagcggaac

SEQ ID NO: 626030 - DNA, 15 bp, Homo sapiens
gaggagagcggaacc

SEQ ID NO: 626031 - DNA, 15 bp, Homo sapiens
aggagagcggaacct

SEQ ID NO: 626032 - DNA, 15 bp, Homo sapiens
ggagagcggaacctt

SEQ ID NO: 626033 - DNA, 15 bp, Homo sapiens
gagagcggaaccttg

SEQ ID NO: 626034 - DNA, 15 bp, Homo sapiens
agagcggaaccttga

SEQ ID NO: 626035 - DNA, 15 bp, Homo sapiens
gagcggaaccttgat

SEQ ID NO: 626036 - DNA, 15 bp, Homo sapiens
agcggaaccttgatt

SEQ ID NO: 626037 - DNA, 15 bp, Homo sapiens
gcggaaccttgattc

SEQ ID NO: 626038 - DNA, 15 bp, Homo sapiens
cggaaccttgattct

SEQ ID NO: 626039 - DNA, 15 bp, Homo sapiens
ggaaccttgattctg

SEQ ID NO: 626040 - DNA, 15 bp, Homo sapiens
gaaccttgattctgc

SEQ ID NO: 626041 - DNA, 15 bp, Homo sapiens
aaccttgattctgct

SEQ ID NO: 626042 - DNA, 15 bp, Homo sapiens
accttgattctgctc

SEQ ID NO: 626043 - DNA, 15 bp, Homo sapiens
ccttgattctgctca

SEQ ID NO: 626044 - DNA, 15 bp, Homo sapiens
cttgattctgctcat

SEQ ID NO: 626045 - DNA, 15 bp, Homo sapiens
ttgattctgctcatc

SEQ ID NO: 626046 - DNA, 15 bp, Homo sapiens
tgattctgctcatca

SEQ ID NO: 626047 - DNA, 15 bp, Homo sapiens
gattctgctcatcaa

SEQ ID NO: 626048 - DNA, 15 bp, Homo sapiens
attctgctcatcaaa

SEQ ID NO: 626049 - DNA, 15 bp, Homo sapiens
ttctgctcatcaaac

SEQ ID NO: 626050 - DNA, 15 bp, Homo sapiens
tctgctcatcaaact

SEQ ID NO: 626051 - DNA, 15 bp, Homo sapiens
ctgctcatcaaactg

SEQ ID NO: 626052 - DNA, 15 bp, Homo sapiens
tgctcatcaaactgc

SEQ ID NO: 626053 - DNA, 15 bp, Homo sapiens
gctcatcaaactgct

SEQ ID NO: 626054 - DNA, 15 bp, Homo sapiens
ctcatcaaactgctt

SEQ ID NO: 626055 - DNA, 15 bp, Homo sapiens
tcatcaaactgctta

SEQ ID NO: 626056 - DNA, 15 bp, Homo sapiens
catcaaactgcttaa

SEQ ID NO: 626057 - DNA, 15 bp, Homo sapiens
atcaaactgcttaac

SEQ ID NO: 626058 - DNA, 15 bp, Homo sapiens
tcaaactgcttaacc

SEQ ID NO: 626059 - DNA, 15 bp, Homo sapiens
caaactgcttaaccg

SEQ ID NO: 626060 - DNA, 15 bp, Homo sapiens
aaactgcttaaccgc

SEQ ID NO: 626061 - DNA, 15 bp, Homo sapiens
aactgcttaaccgct

SEQ ID NO: 626062 - DNA, 15 bp, Homo sapiens
actgcttaaccgctg

SEQ ID NO: 626063 - DNA, 15 bp, Homo sapiens
ctgcttaaccgctga

SEQ ID NO: 626064 - DNA, 15 bp, Homo sapiens
tgcttaaccgctgaa

SEQ ID NO: 626065 - DNA, 15 bp, Homo sapiens
gcttaaccgctgaag

SEQ ID NO: 626066 - DNA, 15 bp, Homo sapiens
cttaaccgctgaagc

SEQ ID NO: 626067 - DNA, 15 bp, Homo sapiens
ttaaccgctgaagca

SEQ ID NO: 626068 - DNA, 15 bp, Homo sapiens
taaccgctgaagcaa

SEQ ID NO: 626069 - DNA, 15 bp, Homo sapiens
aaccgctgaagcaaa

SEQ ID NO: 626070 - DNA, 15 bp, Homo sapiens
accgctgaagcaaaa

SEQ ID NO: 626071 - DNA, 15 bp, Homo sapiens
ccgctgaagcaaaag

SEQ ID NO: 626072 - DNA, 15 bp, Homo sapiens
cgctgaagcaaaagg

SEQ ID NO: 626073 - DNA, 15 bp, Homo sapiens
gctgaagcaaaaggg

SEQ ID NO: 626074 - DNA, 15 bp, Homo sapiens
ctgaagcaaaagggg

SEQ ID NO: 626075 - DNA, 15 bp, Homo sapiens
tgaagcaaaaggggg

SEQ ID NO: 626076 - DNA, 15 bp, Homo sapiens
gaagcaaaaggggga

SEQ ID NO: 626077 - DNA, 15 bp, Homo sapiens
aagcaaaagggggaa

SEQ ID NO: 626078 - DNA, 15 bp, Homo sapiens
agcaaaagggggaac

SEQ ID NO: 626079 - DNA, 15 bp, Homo sapiens
gcaaaagggggaact

SEQ ID NO: 626080 - DNA, 15 bp, Homo sapiens
caaaagggggaactt

SEQ ID NO: 626081 - DNA, 15 bp, Homo sapiens
aaaagggggaacttt

SEQ ID NO: 626082 - DNA, 15 bp, Homo sapiens
aaagggggaactttt

SEQ ID NO: 626083 - DNA, 15 bp, Homo sapiens
aagggggaacttttt

SEQ ID NO: 626084 - DNA, 15 bp, Homo sapiens
agggggaactttttt

SEQ ID NO: 626085 - DNA, 15 bp, Homo sapiens
gggggaacttttttc

SEQ ID NO: 626086 - DNA, 15 bp, Homo sapiens
ggggaacttttttcc

SEQ ID NO: 626087 - DNA, 15 bp, Homo sapiens
gggaacttttttccc

SEQ ID NO: 626088 - DNA, 15 bp, Homo sapiens
ggaacttttttcccg

SEQ ID NO: 626089 - DNA, 15 bp, Homo sapiens
gaacttttttcccga

SEQ ID NO: 626090 - DNA, 15 bp, Homo sapiens
aacttttttcccgat

SEQ ID NO: 626091 - DNA, 15 bp, Homo sapiens
acttttttcccgatc

SEQ ID NO: 626092 - DNA, 15 bp, Homo sapiens
cttttttcccgatca

SEQ ID NO: 626093 - DNA, 15 bp, Homo sapiens
ttttttcccgatcag

SEQ ID NO: 626094 - DNA, 15 bp, Homo sapiens
tttttcccgatcagc

SEQ ID NO: 626095 - DNA, 15 bp, Homo sapiens
ttttcccgatcagca

SEQ ID NO: 626096 - DNA, 15 bp, Homo sapiens
tttcccgatcagcag

SEQ ID NO: 626097 - DNA, 15 bp, Homo sapiens
ttcccgatcagcaga

SEQ ID NO: 626098 - DNA, 15 bp, Homo sapiens
tcccgatcagcagaa

SEQ ID NO: 626099 - DNA, 15 bp, Homo sapiens
cccgatcagcagaat

SEQ ID NO: 626100 - DNA, 15 bp, Homo sapiens
ccgatcagcagaatg

SEQ ID NO: 626101 - DNA, 15 bp, Homo sapiens
cgatcagcagaatga

SEQ ID NO: 626102 - DNA, 15 bp, Homo sapiens
gatcagcagaatgac

SEQ ID NO: 626103 - DNA, 15 bp, Homo sapiens
atcagcagaatgaca

SEQ ID NO: 626104 - DNA, 15 bp, Homo sapiens
tcagcagaatgacat

SEQ ID NO: 626105 - DNA, 15 bp, Homo sapiens
cagcagaatgacatc

SEQ ID NO: 626106 - DNA, 15 bp, Homo sapiens
agcagaatgacatcg

SEQ ID NO: 626107 - DNA, 15 bp, Homo sapiens
gcagaatgacatcgt

SEQ ID NO: 626108 - DNA, 15 bp, Homo sapiens
cagaatgacatcgtg

SEQ ID NO: 626109 - DNA, 15 bp, Homo sapiens
agaatgacatcgtga

SEQ ID NO: 626110 - DNA, 15 bp, Homo sapiens
gaatgacatcgtgat

SEQ ID NO: 626111 - DNA, 15 bp, Homo sapiens
aatgacatcgtgatg

SEQ ID NO: 626112 - DNA, 15 bp, Homo sapiens
atgacatcgtgatgg

SEQ ID NO: 626113 - DNA, 15 bp, Homo sapiens
tgacatcgtgatggg

SEQ ID NO: 626114 - DNA, 15 bp, Homo sapiens
gacatcgtgatgggg

SEQ ID NO: 626115 - DNA, 15 bp, Homo sapiens
acatcgtgatgggga

SEQ ID NO: 626116 - DNA, 15 bp, Homo sapiens
catcgtgatggggaa

SEQ ID NO: 626117 - DNA, 15 bp, Homo sapiens
atcgtgatggggaaa

SEQ ID NO: 626118 - DNA, 15 bp, Homo sapiens
tcgtgatggggaaag

SEQ ID NO: 626119 - DNA, 15 bp, Homo sapiens
cgtgatggggaaagg

SEQ ID NO: 626120 - DNA, 15 bp, Homo sapiens
gtgatggggaaaggg

SEQ ID NO: 626121 - DNA, 15 bp, Homo sapiens
tgatggggaaagggc

SEQ ID NO: 626122 - DNA, 15 bp, Homo sapiens
gatggggaaagggct

SEQ ID NO: 626123 - DNA, 15 bp, Homo sapiens
atggggaaagggctc

SEQ ID NO: 626124 - DNA, 15 bp, Homo sapiens
tggggaaagggctcc

SEQ ID NO: 626125 - DNA, 15 bp, Homo sapiens
ggggaaagggctccc

SEQ ID NO: 626126 - DNA, 15 bp, Homo sapiens
gggaaagggctcccc

SEQ ID NO: 626127 - DNA, 15 bp, Homo sapiens
ggaaagggctcccca

SEQ ID NO: 626128 - DNA, 15 bp, Homo sapiens
gaaagggctccccag

SEQ ID NO: 626129 - DNA, 15 bp, Homo sapiens
aaagggctccccaga

SEQ ID NO: 626130 - DNA, 15 bp, Homo sapiens
aagggctccccagat

SEQ ID NO: 626131 - DNA, 15 bp, Homo sapiens
agggctccccagatg

SEQ ID NO: 626132 - DNA, 15 bp, Homo sapiens
gggctccccagatgg

SEQ ID NO: 626133 - DNA, 15 bp, Homo sapiens
ggctccccagatggc

SEQ ID NO: 626134 - DNA, 15 bp, Homo sapiens
gctccccagatggct

SEQ ID NO: 626135 - DNA, 15 bp, Homo sapiens
ctccccagatggctg

SEQ ID NO: 626136 - DNA, 15 bp, Homo sapiens
tccccagatggctgg

SEQ ID NO: 626137 - DNA, 15 bp, Homo sapiens
ccccagatggctggt

SEQ ID NO: 626138 - DNA, 15 bp, Homo sapiens
cccagatggctggtg

SEQ ID NO: 626139 - DNA, 15 bp, Homo sapiens
ccagatggctggtga

SEQ ID NO: 626140 - DNA, 15 bp, Homo sapiens
cagatggctggtgag

SEQ ID NO: 626141 - DNA, 15 bp, Homo sapiens
agatggctggtgagc

SEQ ID NO: 626142 - DNA, 15 bp, Homo sapiens
gatggctggtgagca

SEQ ID NO: 626143 - DNA, 15 bp, Homo sapiens
atggctggtgagcag

SEQ ID NO: 626144 - DNA, 15 bp, Homo sapiens
tggctggtgagcagt

SEQ ID NO: 626145 - DNA, 15 bp, Homo sapiens
ggctggtgagcagtg

SEQ ID NO: 626146 - DNA, 15 bp, Homo sapiens
gctggtgagcagtgt

SEQ ID NO: 626147 - DNA, 15 bp, Homo sapiens
ctggtgagcagtgtg

SEQ ID NO: 626148 - DNA, 15 bp, Homo sapiens
tggtgagcagtgtgt

SEQ ID NO: 626149 - DNA, 15 bp, Homo sapiens
ggtgagcagtgtgtg

SEQ ID NO: 626150 - DNA, 15 bp, Homo sapiens
gtgagcagtgtgtgt

SEQ ID NO: 626151 - DNA, 15 bp, Homo sapiens
tgagcagtgtgtgtc

SEQ ID NO: 626152 - DNA, 15 bp, Homo sapiens
gagcagtgtgtgtct

SEQ ID NO: 626153 - DNA, 15 bp, Homo sapiens
agcagtgtgtgtctg

SEQ ID NO: 626154 - DNA, 15 bp, Homo sapiens
gcagtgtgtgtctgt

SEQ ID NO: 626155 - DNA, 15 bp, Homo sapiens
cagtgtgtgtctgtg

SEQ ID NO: 626156 - DNA, 15 bp, Homo sapiens
agtgtgtgtctgtga

SEQ ID NO: 626157 - DNA, 15 bp, Homo sapiens
gtgtgtgtctgtgac

SEQ ID NO: 626158 - DNA, 15 bp, Homo sapiens
tgtgtgtctgtgacc

SEQ ID NO: 626159 - DNA, 15 bp, Homo sapiens
gtgtgtctgtgaccc

SEQ ID NO: 626160 - DNA, 15 bp, Homo sapiens
tgtgtctgtgacccc

SEQ ID NO: 626161 - DNA, 15 bp, Homo sapiens
gtgtctgtgaccccg

SEQ ID NO: 626162 - DNA, 15 bp, Homo sapiens
tgtctgtgaccccgt

SEQ ID NO: 626163 - DNA, 15 bp, Homo sapiens
gtctgtgaccccgtc

SEQ ID NO: 626164 - DNA, 15 bp, Homo sapiens
tctgtgaccccgtct

SEQ ID NO: 626165 - DNA, 15 bp, Homo sapiens
ctgtgaccccgtctg

SEQ ID NO: 626166 - DNA, 15 bp, Homo sapiens
tgtgaccccgtctgc

SEQ ID NO: 626167 - DNA, 15 bp, Homo sapiens
gtgaccccgtctgcc

SEQ ID NO: 626168 - DNA, 15 bp, Homo sapiens
tgaccccgtctgccc

SEQ ID NO: 626169 - DNA, 15 bp, Homo sapiens
gaccccgtctgcccc

SEQ ID NO: 626170 - DNA, 15 bp, Homo sapiens
accccgtctgcccca

SEQ ID NO: 626171 - DNA, 15 bp, Homo sapiens
ccccgtctgccccac

SEQ ID NO: 626172 - DNA, 15 bp, Homo sapiens
cccgtctgccccacc

SEQ ID NO: 626173 - DNA, 15 bp, Homo sapiens
ccgtctgccccaccc

SEQ ID NO: 626174 - DNA, 15 bp, Homo sapiens
cgtctgccccacccc

SEQ ID NO: 626175 - DNA, 15 bp, Homo sapiens
gtctgccccaccccc

SEQ ID NO: 626176 - DNA, 15 bp, Homo sapiens
tctgccccaccccct

SEQ ID NO: 626177 - DNA, 15 bp, Homo sapiens
ctgccccaccccctg

SEQ ID NO: 626178 - DNA, 15 bp, Homo sapiens
tgccccaccccctga

SEQ ID NO: 626179 - DNA, 15 bp, Homo sapiens
gccccaccccctgaa

SEQ ID NO: 626180 - DNA, 15 bp, Homo sapiens
ccccaccccctgaac

SEQ ID NO: 626181 - DNA, 15 bp, Homo sapiens
cccaccccctgaaca

SEQ ID NO: 626182 - DNA, 15 bp, Homo sapiens
ccaccccctgaacac

SEQ ID NO: 626183 - DNA, 15 bp, Homo sapiens
caccccctgaacaca

SEQ ID NO: 626184 - DNA, 15 bp, Homo sapiens
accccctgaacacac

SEQ ID NO: 626185 - DNA, 15 bp, Homo sapiens
ccccctgaacacacc

SEQ ID NO: 626186 - DNA, 15 bp, Homo sapiens
cccctgaacacacct

SEQ ID NO: 626187 - DNA, 15 bp, Homo sapiens
ccctgaacacacctc

SEQ ID NO: 626188 - DNA, 15 bp, Homo sapiens
cctgaacacacctct

SEQ ID NO: 626189 - DNA, 15 bp, Homo sapiens
ctgaacacacctctg

SEQ ID NO: 626190 - DNA, 15 bp, Homo sapiens
tgaacacacctctgc

SEQ ID NO: 626191 - DNA, 15 bp, Homo sapiens
gaacacacctctgcc

SEQ ID NO: 626192 - DNA, 15 bp, Homo sapiens
aacacacctctgccg

SEQ ID NO: 626193 - DNA, 15 bp, Homo sapiens
acacacctctgccgg

SEQ ID NO: 626194 - DNA, 15 bp, Homo sapiens
cacacctctgccggc

SEQ ID NO: 626195 - DNA, 15 bp, Homo sapiens
acacctctgccggct

SEQ ID NO: 626196 - DNA, 15 bp, Homo sapiens
cacctctgccggctg

SEQ ID NO: 626197 - DNA, 15 bp, Homo sapiens
acctctgccggctga

SEQ ID NO: 626198 - DNA, 15 bp, Homo sapiens
cctctgccggctgag

SEQ ID NO: 626199 - DNA, 15 bp, Homo sapiens
ctctgccggctgagg

SEQ ID NO: 626200 - DNA, 15 bp, Homo sapiens
tctgccggctgaggg

SEQ ID NO: 626201 - DNA, 15 bp, Homo sapiens
ctgccggctgagggt

SEQ ID NO: 626202 - DNA, 15 bp, Homo sapiens
tgccggctgagggtg

SEQ ID NO: 626203 - DNA, 15 bp, Homo sapiens
gccggctgagggtga

SEQ ID NO: 626204 - DNA, 15 bp, Homo sapiens
ccggctgagggtgac

SEQ ID NO: 626205 - DNA, 15 bp, Homo sapiens
cggctgagggtgaca

SEQ ID NO: 626206 - DNA, 15 bp, Homo sapiens
ggctgagggtgacac

SEQ ID NO: 626207 - DNA, 15 bp, Homo sapiens
gctgagggtgacaca

SEQ ID NO: 626208 - DNA, 15 bp, Homo sapiens
ctgagggtgacacaa

SEQ ID NO: 626209 - DNA, 15 bp, Homo sapiens
tgagggtgacacaac

SEQ ID NO: 626210 - DNA, 15 bp, Homo sapiens
gagggtgacacaacc

SEQ ID NO: 626211 - DNA, 15 bp, Homo sapiens
agggtgacacaaccc

SEQ ID NO: 626212 - DNA, 15 bp, Homo sapiens
gggtgacacaaccct

SEQ ID NO: 626213 - DNA, 15 bp, Homo sapiens
ggtgacacaaccctg

SEQ ID NO: 626214 - DNA, 15 bp, Homo sapiens
gtgacacaaccctgt

SEQ ID NO: 626215 - DNA, 15 bp, Homo sapiens
tgacacaaccctgtt

SEQ ID NO: 626216 - DNA, 15 bp, Homo sapiens
gacacaaccctgttc

SEQ ID NO: 626217 - DNA, 15 bp, Homo sapiens
acacaaccctgttcc

SEQ ID NO: 626218 - DNA, 15 bp, Homo sapiens
cacaaccctgttccc

SEQ ID NO: 626219 - DNA, 15 bp, Homo sapiens
acaaccctgttccct

SEQ ID NO: 626220 - DNA, 15 bp, Homo sapiens
caaccctgttccctg

SEQ ID NO: 626221 - DNA, 15 bp, Homo sapiens
aaccctgttccctgt

SEQ ID NO: 626222 - DNA, 15 bp, Homo sapiens
accctgttccctgtc

SEQ ID NO: 626223 - DNA, 15 bp, Homo sapiens
ccctgttccctgtcg

SEQ ID NO: 626224 - DNA, 15 bp, Homo sapiens
cctgttccctgtcgc

SEQ ID NO: 626225 - DNA, 15 bp, Homo sapiens
ctgttccctgtcgct

SEQ ID NO: 626226 - DNA, 15 bp, Homo sapiens
tgttccctgtcgctc

SEQ ID NO: 626227 - DNA, 15 bp, Homo sapiens
gttccctgtcgctct

SEQ ID NO: 626228 - DNA, 15 bp, Homo sapiens
ttccctgtcgctctg

SEQ ID NO: 626229 - DNA, 15 bp, Homo sapiens
tccctgtcgctctgt

SEQ ID NO: 626230 - DNA, 15 bp, Homo sapiens
ccctgtcgctctgtt

SEQ ID NO: 626231 - DNA, 15 bp, Homo sapiens
cctgtcgctctgttc

SEQ ID NO: 626232 - DNA, 15 bp, Homo sapiens
ctgtcgctctgttcc

SEQ ID NO: 626233 - DNA, 15 bp, Homo sapiens
tgtcgctctgttccc

SEQ ID NO: 626234 - DNA, 15 bp, Homo sapiens
gtcgctctgttcccg

SEQ ID NO: 626235 - DNA, 15 bp, Homo sapiens
tcgctctgttcccgc

SEQ ID NO: 626236 - DNA, 15 bp, Homo sapiens
cgctctgttcccgct

SEQ ID NO: 626237 - DNA, 15 bp, Homo sapiens
gctctgttcccgctt

SEQ ID NO: 626238 - DNA, 15 bp, Homo sapiens
ctctgttcccgctta

SEQ ID NO: 626239 - DNA, 15 bp, Homo sapiens
tctgttcccgcttat

SEQ ID NO: 626240 - DNA, 15 bp, Homo sapiens
ctgttcccgcttatc

SEQ ID NO: 626241 - DNA, 15 bp, Homo sapiens
tgttcccgcttatct

SEQ ID NO: 626242 - DNA, 15 bp, Homo sapiens
gttcccgcttatctc

SEQ ID NO: 626243 - DNA, 15 bp, Homo sapiens
ttcccgcttatctct

SEQ ID NO: 626244 - DNA, 15 bp, Homo sapiens
tcccgcttatctctc

SEQ ID NO: 626245 - DNA, 15 bp, Homo sapiens
cccgcttatctctcc

SEQ ID NO: 626246 - DNA, 15 bp, Homo sapiens
ccgcttatctctccc

SEQ ID NO: 626247 - DNA, 15 bp, Homo sapiens
cgcttatctctcccg

SEQ ID NO: 626248 - DNA, 15 bp, Homo sapiens
gcttatctctcccgc

SEQ ID NO: 626249 - DNA, 15 bp, Homo sapiens
cttatctctcccgcc

SEQ ID NO: 626250 - DNA, 15 bp, Homo sapiens
ttatctctcccgcct

SEQ ID NO: 626251 - DNA, 15 bp, Homo sapiens
tatctctcccgcctt

SEQ ID NO: 626252 - DNA, 15 bp, Homo sapiens
atctctcccgccttt

SEQ ID NO: 626253 - DNA, 15 bp, Homo sapiens
tctctcccgcctttt

SEQ ID NO: 626254 - DNA, 15 bp, Homo sapiens
ctctcccgccttttc

SEQ ID NO: 626255 - DNA, 15 bp, Homo sapiens
tctcccgccttttcg

SEQ ID NO: 626256 - DNA, 15 bp, Homo sapiens
ctcccgccttttcgg

SEQ ID NO: 626257 - DNA, 15 bp, Homo sapiens
tcccgccttttcggc

SEQ ID NO: 626258 - DNA, 15 bp, Homo sapiens
cccgccttttcggcg

SEQ ID NO: 626259 - DNA, 15 bp, Homo sapiens
ccgccttttcggcgc

SEQ ID NO: 626260 - DNA, 15 bp, Homo sapiens
cgccttttcggcgcc

SEQ ID NO: 626261 - DNA, 15 bp, Homo sapiens
gccttttcggcgcca

SEQ ID NO: 626262 - DNA, 15 bp, Homo sapiens
ccttttcggcgccac

SEQ ID NO: 626263 - DNA, 15 bp, Homo sapiens
cttttcggcgccacc

SEQ ID NO: 626264 - DNA, 15 bp, Homo sapiens
ttttcggcgccacca

SEQ ID NO: 626265 - DNA, 15 bp, Homo sapiens
tttcggcgccaccac

SEQ ID NO: 626266 - DNA, 15 bp, Homo sapiens
ttcggcgccaccacc

SEQ ID NO: 626267 - DNA, 15 bp, Homo sapiens
tcggcgccaccacct

SEQ ID NO: 626268 - DNA, 15 bp, Homo sapiens
cggcgccaccacctt

SEQ ID NO: 626269 - DNA, 15 bp, Homo sapiens
ggcgccaccaccttc

SEQ ID NO: 626270 - DNA, 15 bp, Homo sapiens
gcgccaccaccttct

SEQ ID NO: 626271 - DNA, 15 bp, Homo sapiens
cgccaccaccttctt

SEQ ID NO: 626272 - DNA, 15 bp, Homo sapiens
gccaccaccttcttg

SEQ ID NO: 626273 - DNA, 15 bp, Homo sapiens
ccaccaccttcttgg

SEQ ID NO: 626274 - DNA, 15 bp, Homo sapiens
caccaccttcttgga

SEQ ID NO: 626275 - DNA, 15 bp, Homo sapiens
accaccttcttggaa

SEQ ID NO: 626276 - DNA, 15 bp, Homo sapiens
ccaccttcttggaaa

SEQ ID NO: 626277 - DNA, 15 bp, Homo sapiens
caccttcttggaaat

SEQ ID NO: 626278 - DNA, 15 bp, Homo sapiens
accttcttggaaatg

SEQ ID NO: 626279 - DNA, 15 bp, Homo sapiens
ccttcttggaaatga

SEQ ID NO: 626280 - DNA, 15 bp, Homo sapiens
cttcttggaaatgag

SEQ ID NO: 626281 - DNA, 15 bp, Homo sapiens
ttcttggaaatgaga

SEQ ID NO: 626282 - DNA, 15 bp, Homo sapiens
tcttggaaatgagac

SEQ ID NO: 626283 - DNA, 15 bp, Homo sapiens
cttggaaatgagaca

SEQ ID NO: 626284 - DNA, 15 bp, Homo sapiens
ttggaaatgagacag

SEQ ID NO: 626285 - DNA, 15 bp, Homo sapiens
tggaaatgagacaga

SEQ ID NO: 626286 - DNA, 15 bp, Homo sapiens
ggaaatgagacagag

SEQ ID NO: 626287 - DNA, 15 bp, Homo sapiens
gaaatgagacagagc

SEQ ID NO: 626288 - DNA, 15 bp, Homo sapiens
aaatgagacagagca

SEQ ID NO: 626289 - DNA, 15 bp, Homo sapiens
aatgagacagagcaa

SEQ ID NO: 626290 - DNA, 15 bp, Homo sapiens
atgagacagagcaaa

SEQ ID NO: 626291 - DNA, 15 bp, Homo sapiens
tgagacagagcaaag

SEQ ID NO: 626292 - DNA, 15 bp, Homo sapiens
gagacagagcaaagg

SEQ ID NO: 626293 - DNA, 15 bp, Homo sapiens
agacagagcaaaggg

SEQ ID NO: 626294 - DNA, 15 bp, Homo sapiens
gacagagcaaagggg

SEQ ID NO: 626295 - DNA, 15 bp, Homo sapiens
acagagcaaagggga

SEQ ID NO: 626296 - DNA, 15 bp, Homo sapiens
cagagcaaaggggag

SEQ ID NO: 626297 - DNA, 15 bp, Homo sapiens
agagcaaaggggagg

SEQ ID NO: 626298 - DNA, 15 bp, Homo sapiens
gagcaaaggggaggg

SEQ ID NO: 626299 - DNA, 15 bp, Homo sapiens
agcaaaggggagggg

SEQ ID NO: 626300 - DNA, 15 bp, Homo sapiens
gcaaaggggaggggg

SEQ ID NO: 626301 - DNA, 15 bp, Homo sapiens
caaaggggagggggc

SEQ ID NO: 626302 - DNA, 15 bp, Homo sapiens
aaaggggagggggct

SEQ ID NO: 626303 - DNA, 15 bp, Homo sapiens
aaggggagggggctc

SEQ ID NO: 626304 - DNA, 15 bp, Homo sapiens
aggggagggggctca

SEQ ID NO: 626305 - DNA, 15 bp, Homo sapiens
ggggagggggctcag

SEQ ID NO: 626306 - DNA, 15 bp, Homo sapiens
gggagggggctcaga

SEQ ID NO: 626307 - DNA, 15 bp, Homo sapiens
ggagggggctcagac

SEQ ID NO: 626308 - DNA, 15 bp, Homo sapiens
gagggggctcagacc

SEQ ID NO: 626309 - DNA, 15 bp, Homo sapiens
agggggctcagacca

SEQ ID NO: 626310 - DNA, 15 bp, Homo sapiens
gggggctcagaccac

SEQ ID NO: 626311 - DNA, 15 bp, Homo sapiens
ggggctcagaccacc

SEQ ID NO: 626312 - DNA, 15 bp, Homo sapiens
gggctcagaccaccg

SEQ ID NO: 626313 - DNA, 15 bp, Homo sapiens
ggctcagaccaccgc

SEQ ID NO: 626314 - DNA, 15 bp, Homo sapiens
gctcagaccaccgcc

SEQ ID NO: 626315 - DNA, 15 bp, Homo sapiens
ctcagaccaccgcct

SEQ ID NO: 626316 - DNA, 15 bp, Homo sapiens
tcagaccaccgcctc

SEQ ID NO: 626317 - DNA, 15 bp, Homo sapiens
cagaccaccgcctcc

SEQ ID NO: 626318 - DNA, 15 bp, Homo sapiens
agaccaccgcctccc

SEQ ID NO: 626319 - DNA, 15 bp, Homo sapiens
gaccaccgcctcccc

SEQ ID NO: 626320 - DNA, 15 bp, Homo sapiens
accaccgcctcccct

SEQ ID NO: 626321 - DNA, 15 bp, Homo sapiens
ccaccgcctcccctg

SEQ ID NO: 626322 - DNA, 15 bp, Homo sapiens
caccgcctcccctgg

SEQ ID NO: 626323 - DNA, 15 bp, Homo sapiens
accgcctcccctggc

SEQ ID NO: 626324 - DNA, 15 bp, Homo sapiens
ccgcctcccctggca

SEQ ID NO: 626325 - DNA, 15 bp, Homo sapiens
cgcctcccctggcag

SEQ ID NO: 626326 - DNA, 15 bp, Homo sapiens
gcctcccctggcagg

SEQ ID NO: 626327 - DNA, 15 bp, Homo sapiens
cctcccctggcaggc

SEQ ID NO: 626328 - DNA, 15 bp, Homo sapiens
ctcccctggcaggcc

SEQ ID NO: 626329 - DNA, 15 bp, Homo sapiens
tcccctggcaggccc

SEQ ID NO: 626330 - DNA, 15 bp, Homo sapiens
cccctggcaggcccc

SEQ ID NO: 626331 - DNA, 15 bp, Homo sapiens
ccctggcaggcccca

SEQ ID NO: 626332 - DNA, 15 bp, Homo sapiens
cctggcaggccccat

SEQ ID NO: 626333 - DNA, 15 bp, Homo sapiens
ctggcaggccccata

SEQ ID NO: 626334 - DNA, 15 bp, Homo sapiens
tggcaggccccataa

SEQ ID NO: 626335 - DNA, 15 bp, Homo sapiens
ggcaggccccataaa

SEQ ID NO: 626336 - DNA, 15 bp, Homo sapiens
gcaggccccataaaa

SEQ ID NO: 626337 - DNA, 15 bp, Homo sapiens
caggccccataaaag

SEQ ID NO: 626338 - DNA, 15 bp, Homo sapiens
aggccccataaaagc

SEQ ID NO: 626339 - DNA, 15 bp, Homo sapiens
ggccccataaaagcg

SEQ ID NO: 626340 - DNA, 15 bp, Homo sapiens
gccccataaaagcga

SEQ ID NO: 626341 - DNA, 15 bp, Homo sapiens
ccccataaaagcgac

SEQ ID NO: 626342 - DNA, 15 bp, Homo sapiens
cccataaaagcgact

SEQ ID NO: 626343 - DNA, 15 bp, Homo sapiens
ccataaaagcgactg

SEQ ID NO: 626344 - DNA, 15 bp, Homo sapiens
cataaaagcgactgt

SEQ ID NO: 626345 - DNA, 15 bp, Homo sapiens
ataaaagcgactgtc

SEQ ID NO: 626346 - DNA, 15 bp, Homo sapiens
taaaagcgactgtca

SEQ ID NO: 626347 - DNA, 15 bp, Homo sapiens
aaaagcgactgtcac

SEQ ID NO: 626348 - DNA, 15 bp, Homo sapiens
aaagcgactgtcact

SEQ ID NO: 626349 - DNA, 15 bp, Homo sapiens
aagcgactgtcactc

SEQ ID NO: 626350 - DNA, 15 bp, Homo sapiens
agcgactgtcactcg

SEQ ID NO: 626351 - DNA, 15 bp, Homo sapiens
gcgactgtcactcgg

SEQ ID NO: 626352 - DNA, 15 bp, Homo sapiens
cgactgtcactcggt

SEQ ID NO: 626353 - DNA, 15 bp, Homo sapiens
gactgtcactcggtc

SEQ ID NO: 626354 - DNA, 15 bp, Homo sapiens
actgtcactcggtcc

SEQ ID NO: 626355 - DNA, 15 bp, Homo sapiens
ctgtcactcggtccc

SEQ ID NO: 626356 - DNA, 15 bp, Homo sapiens
tgtcactcggtccca

SEQ ID NO: 626357 - DNA, 15 bp, Homo sapiens
gtcactcggtcccag

SEQ ID NO: 626358 - DNA, 15 bp, Homo sapiens
tcactcggtcccaga

SEQ ID NO: 626359 - DNA, 15 bp, Homo sapiens
cactcggtcccagac

SEQ ID NO: 626360 - DNA, 15 bp, Homo sapiens
actcggtcccagaca

SEQ ID NO: 626361 - DNA, 15 bp, Homo sapiens
ctcggtcccagacac

SEQ ID NO: 626362 - DNA, 15 bp, Homo sapiens
tcggtcccagacacc

SEQ ID NO: 626363 - DNA, 15 bp, Homo sapiens
cggtcccagacacca

SEQ ID NO: 626364 - DNA, 15 bp, Homo sapiens
ggtcccagacaccag

SEQ ID NO: 626365 - DNA, 15 bp, Homo sapiens
gtcccagacaccaga

SEQ ID NO: 626366 - DNA, 15 bp, Homo sapiens
tcccagacaccagag

SEQ ID NO: 626367 - DNA, 15 bp, Homo sapiens
cccagacaccagagc

SEQ ID NO: 626368 - DNA, 15 bp, Homo sapiens
ccagacaccagagca

SEQ ID NO: 626369 - DNA, 15 bp, Homo sapiens
cagacaccagagcaa

SEQ ID NO: 626370 - DNA, 15 bp, Homo sapiens
agacaccagagcaag

SEQ ID NO: 626371 - DNA, 15 bp, Homo sapiens
gacaccagagcaagc

SEQ ID NO: 626372 - DNA, 15 bp, Homo sapiens
acaccagagcaagct

SEQ ID NO: 626373 - DNA, 15 bp, Homo sapiens
caccagagcaagctc

SEQ ID NO: 626374 - DNA, 15 bp, Homo sapiens
accagagcaagctca

SEQ ID NO: 626375 - DNA, 15 bp, Homo sapiens
ccagagcaagctcaa

SEQ ID NO: 626376 - DNA, 15 bp, Homo sapiens
cagagcaagctcaag

SEQ ID NO: 626377 - DNA, 15 bp, Homo sapiens
agagcaagctcaaga

SEQ ID NO: 626378 - DNA, 15 bp, Homo sapiens
gagcaagctcaagac

SEQ ID NO: 626379 - DNA, 15 bp, Homo sapiens
agcaagctcaagacc

SEQ ID NO: 626380 - DNA, 15 bp, Homo sapiens
gcaagctcaagaccc

SEQ ID NO: 626381 - DNA, 15 bp, Homo sapiens
caagctcaagaccca

SEQ ID NO: 626382 - DNA, 15 bp, Homo sapiens
aagctcaagacccag

SEQ ID NO: 626383 - DNA, 15 bp, Homo sapiens
agctcaagacccagc

SEQ ID NO: 626384 - DNA, 15 bp, Homo sapiens
gctcaagacccagca

SEQ ID NO: 626385 - DNA, 15 bp, Homo sapiens
ctcaagacccagcag

SEQ ID NO: 626386 - DNA, 15 bp, Homo sapiens
tcaagacccagcagt

SEQ ID NO: 626387 - DNA, 15 bp, Homo sapiens
caagacccagcagtg

SEQ ID NO: 626388 - DNA, 15 bp, Homo sapiens
aagacccagcagtgg

SEQ ID NO: 626389 - DNA, 15 bp, Homo sapiens
agacccagcagtggg

SEQ ID NO: 626390 - DNA, 15 bp, Homo sapiens
gacccagcagtggga

SEQ ID NO: 626391 - DNA, 15 bp, Homo sapiens
acccagcagtgggac

SEQ ID NO: 626392 - DNA, 15 bp, Homo sapiens
cccagcagtgggaca

SEQ ID NO: 626393 - DNA, 15 bp, Homo sapiens
ccagcagtgggacag

SEQ ID NO: 626394 - DNA, 15 bp, Homo sapiens
cagcagtgggacagc

SEQ ID NO: 626395 - DNA, 15 bp, Homo sapiens
agcagtgggacagcc

SEQ ID NO: 626396 - DNA, 15 bp, Homo sapiens
gcagtgggacagcca

SEQ ID NO: 626397 - DNA, 15 bp, Homo sapiens
cagtgggacagccag

SEQ ID NO: 626398 - DNA, 15 bp, Homo sapiens
agtgggacagccaga

SEQ ID NO: 626399 - DNA, 15 bp, Homo sapiens
gtgggacagccagac

SEQ ID NO: 626400 - DNA, 15 bp, Homo sapiens
tgggacagccagaca

SEQ ID NO: 626401 - DNA, 15 bp, Homo sapiens
gggacagccagacag

SEQ ID NO: 626402 - DNA, 15 bp, Homo sapiens
ggacagccagacaga

SEQ ID NO: 626403 - DNA, 15 bp, Homo sapiens
gacagccagacagac

SEQ ID NO: 626404 - DNA, 15 bp, Homo sapiens
acagccagacagacg

SEQ ID NO: 626405 - DNA, 15 bp, Homo sapiens
cagccagacagacgg

SEQ ID NO: 626406 - DNA, 15 bp, Homo sapiens
agccagacagacggc

SEQ ID NO: 626407 - DNA, 15 bp, Homo sapiens
gccagacagacggca

SEQ ID NO: 626408 - DNA, 15 bp, Homo sapiens
ccagacagacggcac

SEQ ID NO: 626409 - DNA, 15 bp, Homo sapiens
cagacagacggcacg

SEQ ID NO: 626410 - DNA, 15 bp, Homo sapiens
agacagacggcacga

SEQ ID NO: 626411 - DNA, 15 bp, Homo sapiens
gacagacggcacgat

SEQ ID NO: 626412 - DNA, 15 bp, Homo sapiens
acagacggcacgatg

SEQ ID NO: 626413 - DNA, 15 bp, Homo sapiens
cagacggcacgatgg

SEQ ID NO: 626414 - DNA, 15 bp, Homo sapiens
agacggcacgatggc

SEQ ID NO: 626415 - DNA, 15 bp, Homo sapiens
gacggcacgatggca

SEQ ID NO: 626416 - DNA, 15 bp, Homo sapiens
acggcacgatggcac

SEQ ID NO: 626417 - DNA, 15 bp, Homo sapiens
cggcacgatggcact

SEQ ID NO: 626418 - DNA, 15 bp, Homo sapiens
ggcacgatggcactg

SEQ ID NO: 626419 - DNA, 15 bp, Homo sapiens
gcacgatggcactga

SEQ ID NO: 626420 - DNA, 15 bp, Homo sapiens
cacgatggcactgag

SEQ ID NO: 626421 - DNA, 15 bp, Homo sapiens
acgatggcactgagc

SEQ ID NO: 626422 - DNA, 15 bp, Homo sapiens
cgatggcactgagct

SEQ ID NO: 626423 - DNA, 15 bp, Homo sapiens
gatggcactgagctc

SEQ ID NO: 626424 - DNA, 15 bp, Homo sapiens
atggcactgagctcc

SEQ ID NO: 626425 - DNA, 15 bp, Homo sapiens
tggcactgagctccc

SEQ ID NO: 626426 - DNA, 15 bp, Homo sapiens
ggcactgagctccca

SEQ ID NO: 626427 - DNA, 15 bp, Homo sapiens
gcactgagctcccag

SEQ ID NO: 626428 - DNA, 15 bp, Homo sapiens
cactgagctcccaga

SEQ ID NO: 626429 - DNA, 15 bp, Homo sapiens
actgagctcccagat

SEQ ID NO: 626430 - DNA, 15 bp, Homo sapiens
ctgagctcccagatc

SEQ ID NO: 626431 - DNA, 15 bp, Homo sapiens
tgagctcccagatct

SEQ ID NO: 626432 - DNA, 15 bp, Homo sapiens
gagctcccagatctg

SEQ ID NO: 626433 - DNA, 15 bp, Homo sapiens
agctcccagatctgg

SEQ ID NO: 626434 - DNA, 15 bp, Homo sapiens
gctcccagatctggg

SEQ ID NO: 626435 - DNA, 15 bp, Homo sapiens
ctcccagatctgggc

SEQ ID NO: 626436 - DNA, 15 bp, Homo sapiens
tcccagatctgggcc

SEQ ID NO: 626437 - DNA, 15 bp, Homo sapiens
cccagatctgggccg

SEQ ID NO: 626438 - DNA, 15 bp, Homo sapiens
ccagatctgggccgc

SEQ ID NO: 626439 - DNA, 15 bp, Homo sapiens
cagatctgggccgct

SEQ ID NO: 626440 - DNA, 15 bp, Homo sapiens
agatctgggccgctt

SEQ ID NO: 626441 - DNA, 15 bp, Homo sapiens
gatctgggccgcttg

SEQ ID NO: 626442 - DNA, 15 bp, Homo sapiens
atctgggccgcttgc

SEQ ID NO: 626443 - DNA, 15 bp, Homo sapiens
tctgggccgcttgcc

SEQ ID NO: 626444 - DNA, 15 bp, Homo sapiens
ctgggccgcttgcct

SEQ ID NO: 626445 - DNA, 15 bp, Homo sapiens
tgggccgcttgcctc

SEQ ID NO: 626446 - DNA, 15 bp, Homo sapiens
gggccgcttgcctcc

SEQ ID NO: 626447 - DNA, 15 bp, Homo sapiens
ggccgcttgcctcct

SEQ ID NO: 626448 - DNA, 15 bp, Homo sapiens
gccgcttgcctcctg

SEQ ID NO: 626449 - DNA, 15 bp, Homo sapiens
ccgcttgcctcctgc

SEQ ID NO: 626450 - DNA, 15 bp, Homo sapiens
cgcttgcctcctgct

SEQ ID NO: 626451 - DNA, 15 bp, Homo sapiens
gcttgcctcctgctc

SEQ ID NO: 626452 - DNA, 15 bp, Homo sapiens
cttgcctcctgctcc

SEQ ID NO: 626453 - DNA, 15 bp, Homo sapiens
ttgcctcctgctcct

SEQ ID NO: 626454 - DNA, 15 bp, Homo sapiens
tgcctcctgctcctc

SEQ ID NO: 626455 - DNA, 15 bp, Homo sapiens
gcctcctgctcctcc

SEQ ID NO: 626456 - DNA, 15 bp, Homo sapiens
cctcctgctcctcct

SEQ ID NO: 626457 - DNA, 15 bp, Homo sapiens
ctcctgctcctcctc

SEQ ID NO: 626458 - DNA, 15 bp, Homo sapiens
tcctgctcctcctcc

SEQ ID NO: 626459 - DNA, 15 bp, Homo sapiens
cctgctcctcctcct

SEQ ID NO: 626460 - DNA, 15 bp, Homo sapiens
ctgctcctcctcctc

SEQ ID NO: 626461 - DNA, 15 bp, Homo sapiens
tgctcctcctcctcc

SEQ ID NO: 626462 - DNA, 15 bp, Homo sapiens
gctcctcctcctcct

SEQ ID NO: 626463 - DNA, 15 bp, Homo sapiens
ctcctcctcctcctc

SEQ ID NO: 626464 - DNA, 15 bp, Homo sapiens
tcctcctcctcctcg

SEQ ID NO: 626465 - DNA, 15 bp, Homo sapiens
cctcctcctcctcgc

SEQ ID NO: 626466 - DNA, 15 bp, Homo sapiens
ctcctcctcctcgcc

SEQ ID NO: 626467 - DNA, 15 bp, Homo sapiens
tcctcctcctcgcca

SEQ ID NO: 626468 - DNA, 15 bp, Homo sapiens
cctcctcctcgccag

SEQ ID NO: 626469 - DNA, 15 bp, Homo sapiens
ctcctcctcgccagc

SEQ ID NO: 626470 - DNA, 15 bp, Homo sapiens
tcctcctcgccagcc

SEQ ID NO: 626471 - DNA, 15 bp, Homo sapiens
cctcctcgccagcct

SEQ ID NO: 626472 - DNA, 15 bp, Homo sapiens
ctcctcgccagcctg

SEQ ID NO: 626473 - DNA, 15 bp, Homo sapiens
tcctcgccagcctga

SEQ ID NO: 626474 - DNA, 15 bp, Homo sapiens
cctcgccagcctgac

SEQ ID NO: 626475 - DNA, 15 bp, Homo sapiens
ctcgccagcctgacc

SEQ ID NO: 626476 - DNA, 15 bp, Homo sapiens
tcgccagcctgacca

SEQ ID NO: 626477 - DNA, 15 bp, Homo sapiens
cgccagcctgaccag

SEQ ID NO: 626478 - DNA, 15 bp, Homo sapiens
gccagcctgaccagt

SEQ ID NO: 626479 - DNA, 15 bp, Homo sapiens
ccagcctgaccagtg

SEQ ID NO: 626480 - DNA, 15 bp, Homo sapiens
cagcctgaccagtgg

SEQ ID NO: 626481 - DNA, 15 bp, Homo sapiens
agcctgaccagtggc

SEQ ID NO: 626482 - DNA, 15 bp, Homo sapiens
gcctgaccagtggct

SEQ ID NO: 626483 - DNA, 15 bp, Homo sapiens
cctgaccagtggctc

SEQ ID NO: 626484 - DNA, 15 bp, Homo sapiens
ctgaccagtggctct

SEQ ID NO: 626485 - DNA, 15 bp, Homo sapiens
tgaccagtggctctg

SEQ ID NO: 626486 - DNA, 15 bp, Homo sapiens
gaccagtggctctgt

SEQ ID NO: 626487 - DNA, 15 bp, Homo sapiens
accagtggctctgtt

SEQ ID NO: 626488 - DNA, 15 bp, Homo sapiens
ccagtggctctgttt

SEQ ID NO: 626489 - DNA, 15 bp, Homo sapiens
cagtggctctgtttt

SEQ ID NO: 626490 - DNA, 15 bp, Homo sapiens
agtggctctgttttc

SEQ ID NO: 626491 - DNA, 15 bp, Homo sapiens
gtggctctgttttcc

SEQ ID NO: 626492 - DNA, 15 bp, Homo sapiens
tggctctgttttccc

SEQ ID NO: 626493 - DNA, 15 bp, Homo sapiens
ggctctgttttccca

SEQ ID NO: 626494 - DNA, 15 bp, Homo sapiens
gctctgttttcccac

SEQ ID NO: 626495 - DNA, 15 bp, Homo sapiens
ctctgttttcccaca

SEQ ID NO: 626496 - DNA, 15 bp, Homo sapiens
tctgttttcccacaa

SEQ ID NO: 626497 - DNA, 15 bp, Homo sapiens
ctgttttcccacaac

SEQ ID NO: 626498 - DNA, 15 bp, Homo sapiens
tgttttcccacaaca

SEQ ID NO: 626499 - DNA, 15 bp, Homo sapiens
gttttcccacaacag

SEQ ID NO: 626500 - DNA, 15 bp, Homo sapiens
ttttcccacaacagg

SEQ ID NO: 626501 - DNA, 15 bp, Homo sapiens
tttcccacaacaggt

SEQ ID NO: 626502 - DNA, 15 bp, Homo sapiens
ttcccacaacaggtg

SEQ ID NO: 626503 - DNA, 15 bp, Homo sapiens
tcccacaacaggtga

SEQ ID NO: 626504 - DNA, 15 bp, Homo sapiens
cccacaacaggtgag

SEQ ID NO: 626505 - DNA, 15 bp, Homo sapiens
ccacaacaggtgaga

SEQ ID NO: 626506 - DNA, 15 bp, Homo sapiens
cacaacaggtgagag

SEQ ID NO: 626507 - DNA, 15 bp, Homo sapiens
acaacaggtgagagc

SEQ ID NO: 626508 - DNA, 15 bp, Homo sapiens
caacaggtgagagcc

SEQ ID NO: 626509 - DNA, 15 bp, Homo sapiens
aacaggtgagagccc

SEQ ID NO: 626510 - DNA, 15 bp, Homo sapiens
acaggtgagagccca

SEQ ID NO: 626511 - DNA, 15 bp, Homo sapiens
caggtgagagcccag

SEQ ID NO: 626512 - DNA, 15 bp, Homo sapiens
aggtgagagcccagt

SEQ ID NO: 626513 - DNA, 15 bp, Homo sapiens
ggtgagagcccagtg

SEQ ID NO: 626514 - DNA, 15 bp, Homo sapiens
gtgagagcccagtgg

SEQ ID NO: 626515 - DNA, 15 bp, Homo sapiens
tgagagcccagtggc

SEQ ID NO: 626516 - DNA, 15 bp, Homo sapiens
gagagcccagtggcc

SEQ ID NO: 626517 - DNA, 15 bp, Homo sapiens
agagcccagtggcct

SEQ ID NO: 626518 - DNA, 15 bp, Homo sapiens
gagcccagtggcctg

SEQ ID NO: 626519 - DNA, 15 bp, Homo sapiens
agcccagtggcctgg

SEQ ID NO: 626520 - DNA, 15 bp, Homo sapiens
gcccagtggcctggg

SEQ ID NO: 626521 - DNA, 15 bp, Homo sapiens
cccagtggcctgggt

SEQ ID NO: 626522 - DNA, 15 bp, Homo sapiens
ccagtggcctgggtc

SEQ ID NO: 626523 - DNA, 15 bp, Homo sapiens
cagtggcctgggtcc

SEQ ID NO: 626524 - DNA, 15 bp, Homo sapiens
agtggcctgggtcct

SEQ ID NO: 626525 - DNA, 15 bp, Homo sapiens
gtggcctgggtcctt

SEQ ID NO: 626526 - DNA, 15 bp, Homo sapiens
tggcctgggtcctta

SEQ ID NO: 626527 - DNA, 15 bp, Homo sapiens
ggcctgggtccttag

SEQ ID NO: 626528 - DNA, 15 bp, Homo sapiens
gcctgggtccttagc

SEQ ID NO: 626529 - DNA, 15 bp, Homo sapiens
cctgggtccttagca

SEQ ID NO: 626530 - DNA, 15 bp, Homo sapiens
ctgggtccttagcag

SEQ ID NO: 626531 - DNA, 15 bp, Homo sapiens
tgggtccttagcagg

SEQ ID NO: 626532 - DNA, 15 bp, Homo sapiens
gggtccttagcaggg

SEQ ID NO: 626533 - DNA, 15 bp, Homo sapiens
ggtccttagcagggc

SEQ ID NO: 626534 - DNA, 15 bp, Homo sapiens
gtccttagcagggca

SEQ ID NO: 626535 - DNA, 15 bp, Homo sapiens
tccttagcagggcag

SEQ ID NO: 626536 - DNA, 15 bp, Homo sapiens
ccttagcagggcagc

SEQ ID NO: 626537 - DNA, 15 bp, Homo sapiens
cttagcagggcagca

SEQ ID NO: 626538 - DNA, 15 bp, Homo sapiens
ttagcagggcagcag

SEQ ID NO: 626539 - DNA, 15 bp, Homo sapiens
tagcagggcagcagg

SEQ ID NO: 626540 - DNA, 15 bp, Homo sapiens
agcagggcagcaggg

SEQ ID NO: 626541 - DNA, 15 bp, Homo sapiens
gcagggcagcaggga

SEQ ID NO: 626542 - DNA, 15 bp, Homo sapiens
cagggcagcagggat

SEQ ID NO: 626543 - DNA, 15 bp, Homo sapiens
agggcagcagggatg

SEQ ID NO: 626544 - DNA, 15 bp, Homo sapiens
gggcagcagggatgg

SEQ ID NO: 626545 - DNA, 15 bp, Homo sapiens
ggcagcagggatggg

SEQ ID NO: 626546 - DNA, 15 bp, Homo sapiens
gcagcagggatggga

SEQ ID NO: 626547 - DNA, 15 bp, Homo sapiens
cagcagggatgggag

SEQ ID NO: 626548 - DNA, 15 bp, Homo sapiens
agcagggatgggaga

SEQ ID NO: 626549 - DNA, 15 bp, Homo sapiens
gcagggatgggagag

SEQ ID NO: 626550 - DNA, 15 bp, Homo sapiens
cagggatgggagagc

SEQ ID NO: 626551 - DNA, 15 bp, Homo sapiens
agggatgggagagcc

SEQ ID NO: 626552 - DNA, 15 bp, Homo sapiens
gggatgggagagcca

SEQ ID NO: 626553 - DNA, 15 bp, Homo sapiens
ggatgggagagccag

SEQ ID NO: 626554 - DNA, 15 bp, Homo sapiens
gatgggagagccagg

SEQ ID NO: 626555 - DNA, 15 bp, Homo sapiens
atgggagagccaggc

SEQ ID NO: 626556 - DNA, 15 bp, Homo sapiens
tgggagagccaggcc

SEQ ID NO: 626557 - DNA, 15 bp, Homo sapiens
gggagagccaggcct

SEQ ID NO: 626558 - DNA, 15 bp, Homo sapiens
ggagagccaggcctc

SEQ ID NO: 626559 - DNA, 15 bp, Homo sapiens
gagagccaggcctca

SEQ ID NO: 626560 - DNA, 15 bp, Homo sapiens
agagccaggcctcag

SEQ ID NO: 626561 - DNA, 15 bp, Homo sapiens
gagccaggcctcagc

SEQ ID NO: 626562 - DNA, 15 bp, Homo sapiens
agccaggcctcagcc

SEQ ID NO: 626563 - DNA, 15 bp, Homo sapiens
gccaggcctcagcct

SEQ ID NO: 626564 - DNA, 15 bp, Homo sapiens
ccaggcctcagccta

SEQ ID NO: 626565 - DNA, 15 bp, Homo sapiens
caggcctcagcctag

SEQ ID NO: 626566 - DNA, 15 bp, Homo sapiens
aggcctcagcctagg

SEQ ID NO: 626567 - DNA, 15 bp, Homo sapiens
ggcctcagcctaggg

SEQ ID NO: 626568 - DNA, 15 bp, Homo sapiens
gcctcagcctagggc

SEQ ID NO: 626569 - DNA, 15 bp, Homo sapiens
cctcagcctagggca

SEQ ID NO: 626570 - DNA, 15 bp, Homo sapiens
ctcagcctagggcac

SEQ ID NO: 626571 - DNA, 15 bp, Homo sapiens
tcagcctagggcact

SEQ ID NO: 626572 - DNA, 15 bp, Homo sapiens
cagcctagggcactg

SEQ ID NO: 626573 - DNA, 15 bp, Homo sapiens
agcctagggcactgg

SEQ ID NO: 626574 - DNA, 15 bp, Homo sapiens
gcctagggcactgga

SEQ ID NO: 626575 - DNA, 15 bp, Homo sapiens
cctagggcactggag

SEQ ID NO: 626576 - DNA, 15 bp, Homo sapiens
ctagggcactggaga

SEQ ID NO: 626577 - DNA, 15 bp, Homo sapiens
tagggcactggagac

SEQ ID NO: 626578 - DNA, 15 bp, Homo sapiens
agggcactggagaca

SEQ ID NO: 626579 - DNA, 15 bp, Homo sapiens
gggcactggagacac

SEQ ID NO: 626580 - DNA, 15 bp, Homo sapiens
ggcactggagacacc

SEQ ID NO: 626581 - DNA, 15 bp, Homo sapiens
gcactggagacaccc

SEQ ID NO: 626582 - DNA, 15 bp, Homo sapiens
cactggagacacccg

SEQ ID NO: 626583 - DNA, 15 bp, Homo sapiens
actggagacacccga

SEQ ID NO: 626584 - DNA, 15 bp, Homo sapiens
ctggagacacccgag

SEQ ID NO: 626585 - DNA, 15 bp, Homo sapiens
tggagacacccgagc

SEQ ID NO: 626586 - DNA, 15 bp, Homo sapiens
ggagacacccgagca

SEQ ID NO: 626587 - DNA, 15 bp, Homo sapiens
gagacacccgagcac

SEQ ID NO: 626588 - DNA, 15 bp, Homo sapiens
agacacccgagcact

SEQ ID NO: 626589 - DNA, 15 bp, Homo sapiens
gacacccgagcactg

SEQ ID NO: 626590 - DNA, 15 bp, Homo sapiens
acacccgagcactga

SEQ ID NO: 626591 - DNA, 15 bp, Homo sapiens
cacccgagcactgag

SEQ ID NO: 626592 - DNA, 15 bp, Homo sapiens
acccgagcactgagc

SEQ ID NO: 626593 - DNA, 15 bp, Homo sapiens
cccgagcactgagca

SEQ ID NO: 626594 - DNA, 15 bp, Homo sapiens
ccgagcactgagcag

SEQ ID NO: 626595 - DNA, 15 bp, Homo sapiens
cgagcactgagcaga

SEQ ID NO: 626596 - DNA, 15 bp, Homo sapiens
gagcactgagcagag

SEQ ID NO: 626597 - DNA, 15 bp, Homo sapiens
agcactgagcagagc

SEQ ID NO: 626598 - DNA, 15 bp, Homo sapiens
gcactgagcagagct

SEQ ID NO: 626599 - DNA, 15 bp, Homo sapiens
cactgagcagagctc

SEQ ID NO: 626600 - DNA, 15 bp, Homo sapiens
actgagcagagctca

SEQ ID NO: 626601 - DNA, 15 bp, Homo sapiens
ctgagcagagctcag

SEQ ID NO: 626602 - DNA, 15 bp, Homo sapiens
tgagcagagctcagg

SEQ ID NO: 626603 - DNA, 15 bp, Homo sapiens
gagcagagctcagga

SEQ ID NO: 626604 - DNA, 15 bp, Homo sapiens
agcagagctcaggac

SEQ ID NO: 626605 - DNA, 15 bp, Homo sapiens
gcagagctcaggacg

SEQ ID NO: 626606 - DNA, 15 bp, Homo sapiens
cagagctcaggacgt

SEQ ID NO: 626607 - DNA, 15 bp, Homo sapiens
agagctcaggacgtc

SEQ ID NO: 626608 - DNA, 15 bp, Homo sapiens
gagctcaggacgtct

SEQ ID NO: 626609 - DNA, 15 bp, Homo sapiens
agctcaggacgtctc

SEQ ID NO: 626610 - DNA, 15 bp, Homo sapiens
gctcaggacgtctca

SEQ ID NO: 626611 - DNA, 15 bp, Homo sapiens
ctcaggacgtctcag

SEQ ID NO: 626612 - DNA, 15 bp, Homo sapiens
tcaggacgtctcagg

SEQ ID NO: 626613 - DNA, 15 bp, Homo sapiens
caggacgtctcagga

SEQ ID NO: 626614 - DNA, 15 bp, Homo sapiens
aggacgtctcaggag

SEQ ID NO: 626615 - DNA, 15 bp, Homo sapiens
ggacgtctcaggagt

SEQ ID NO: 626616 - DNA, 15 bp, Homo sapiens
gacgtctcaggagta

SEQ ID NO: 626617 - DNA, 15 bp, Homo sapiens
acgtctcaggagtac

SEQ ID NO: 626618 - DNA, 15 bp, Homo sapiens
cgtctcaggagtact

SEQ ID NO: 626619 - DNA, 15 bp, Homo sapiens
gtctcaggagtactg

SEQ ID NO: 626620 - DNA, 15 bp, Homo sapiens
tctcaggagtactgg

SEQ ID NO: 626621 - DNA, 15 bp, Homo sapiens
ctcaggagtactggc

SEQ ID NO: 626622 - DNA, 15 bp, Homo sapiens
tcaggagtactggca

SEQ ID NO: 626623 - DNA, 15 bp, Homo sapiens
caggagtactggcag

SEQ ID NO: 626624 - DNA, 15 bp, Homo sapiens
aggagtactggcagc

SEQ ID NO: 626625 - DNA, 15 bp, Homo sapiens
ggagtactggcagct

SEQ ID NO: 626626 - DNA, 15 bp, Homo sapiens
gagtactggcagctg

SEQ ID NO: 626627 - DNA, 15 bp, Homo sapiens
agtactggcagctga

SEQ ID NO: 626628 - DNA, 15 bp, Homo sapiens
gtactggcagctgaa

SEQ ID NO: 626629 - DNA, 15 bp, Homo sapiens
tactggcagctgaac

SEQ ID NO: 626630 - DNA, 15 bp, Homo sapiens
actggcagctgaaca

SEQ ID NO: 626631 - DNA, 15 bp, Homo sapiens
ctggcagctgaacag

SEQ ID NO: 626632 - DNA, 15 bp, Homo sapiens
tggcagctgaacagg

SEQ ID NO: 626633 - DNA, 15 bp, Homo sapiens
ggcagctgaacagga

SEQ ID NO: 626634 - DNA, 15 bp, Homo sapiens
gcagctgaacaggaa

SEQ ID NO: 626635 - DNA, 15 bp, Homo sapiens
cagctgaacaggaac

SEQ ID NO: 626636 - DNA, 15 bp, Homo sapiens
agctgaacaggaacc

SEQ ID NO: 626637 - DNA, 15 bp, Homo sapiens
gctgaacaggaacca

SEQ ID NO: 626638 - DNA, 15 bp, Homo sapiens
ctgaacaggaaccag

SEQ ID NO: 626639 - DNA, 15 bp, Homo sapiens
tgaacaggaaccagg

SEQ ID NO: 626640 - DNA, 15 bp, Homo sapiens
gaacaggaaccagga

SEQ ID NO: 626641 - DNA, 15 bp, Homo sapiens
aacaggaaccaggac

SEQ ID NO: 626642 - DNA, 15 bp, Homo sapiens
acaggaaccaggaca

SEQ ID NO: 626643 - DNA, 15 bp, Homo sapiens
caggaaccaggacag

SEQ ID NO: 626644 - DNA, 15 bp, Homo sapiens
aggaaccaggacagg

SEQ ID NO: 626645 - DNA, 15 bp, Homo sapiens
ggaaccaggacaggc

SEQ ID NO: 626646 - DNA, 15 bp, Homo sapiens
gaaccaggacaggca

SEQ ID NO: 626647 - DNA, 15 bp, Homo sapiens
aaccaggacaggcac

SEQ ID NO: 626648 - DNA, 15 bp, Homo sapiens
accaggacaggcacg

SEQ ID NO: 626649 - DNA, 15 bp, Homo sapiens
ccaggacaggcacgg

SEQ ID NO: 626650 - DNA, 15 bp, Homo sapiens
caggacaggcacggt

SEQ ID NO: 626651 - DNA, 15 bp, Homo sapiens
aggacaggcacggtg

SEQ ID NO: 626652 - DNA, 15 bp, Homo sapiens
ggacaggcacggtgg

SEQ ID NO: 626653 - DNA, 15 bp, Homo sapiens
gacaggcacggtggc

SEQ ID NO: 626654 - DNA, 15 bp, Homo sapiens
acaggcacggtggct

SEQ ID NO: 626655 - DNA, 15 bp, Homo sapiens
caggcacggtggctc

SEQ ID NO: 626656 - DNA, 15 bp, Homo sapiens
aggcacggtggctca

SEQ ID NO: 626657 - DNA, 15 bp, Homo sapiens
ggcacggtggctcat

SEQ ID NO: 626658 - DNA, 15 bp, Homo sapiens
gcacggtggctcatg

SEQ ID NO: 626659 - DNA, 15 bp, Homo sapiens
cacggtggctcatgc

SEQ ID NO: 626660 - DNA, 15 bp, Homo sapiens
acggtggctcatgcc

SEQ ID NO: 626661 - DNA, 15 bp, Homo sapiens
cggtggctcatgcct

SEQ ID NO: 626662 - DNA, 15 bp, Homo sapiens
ggtggctcatgcctg

SEQ ID NO: 626663 - DNA, 15 bp, Homo sapiens
gtggctcatgcctgt

SEQ ID NO: 626664 - DNA, 15 bp, Homo sapiens
tggctcatgcctgta

SEQ ID NO: 626665 - DNA, 15 bp, Homo sapiens
ggctcatgcctgtaa

SEQ ID NO: 626666 - DNA, 15 bp, Homo sapiens
gctcatgcctgtaat

SEQ ID NO: 626667 - DNA, 15 bp, Homo sapiens
ctcatgcctgtaatc

SEQ ID NO: 626668 - DNA, 15 bp, Homo sapiens
tcatgcctgtaatcc

SEQ ID NO: 626669 - DNA, 15 bp, Homo sapiens
catgcctgtaatccc

SEQ ID NO: 626670 - DNA, 15 bp, Homo sapiens
atgcctgtaatccca

SEQ ID NO: 626671 - DNA, 15 bp, Homo sapiens
tgcctgtaatcccag

SEQ ID NO: 626672 - DNA, 15 bp, Homo sapiens
gcctgtaatcccagc

SEQ ID NO: 626673 - DNA, 15 bp, Homo sapiens
cctgtaatcccagca

SEQ ID NO: 626674 - DNA, 15 bp, Homo sapiens
ctgtaatcccagcac

SEQ ID NO: 626675 - DNA, 15 bp, Homo sapiens
tgtaatcccagcact

SEQ ID NO: 626676 - DNA, 15 bp, Homo sapiens
gtaatcccagcactt

SEQ ID NO: 626677 - DNA, 15 bp, Homo sapiens
taatcccagcacttt

SEQ ID NO: 626678 - DNA, 15 bp, Homo sapiens
aatcccagcactttg

SEQ ID NO: 626679 - DNA, 15 bp, Homo sapiens
atcccagcactttgg

SEQ ID NO: 626680 - DNA, 15 bp, Homo sapiens
tcccagcactttggg

SEQ ID NO: 626681 - DNA, 15 bp, Homo sapiens
cccagcactttggga

SEQ ID NO: 626682 - DNA, 15 bp, Homo sapiens
ccagcactttgggag

SEQ ID NO: 626683 - DNA, 15 bp, Homo sapiens
cagcactttgggagg

SEQ ID NO: 626684 - DNA, 15 bp, Homo sapiens
agcactttgggaggt

SEQ ID NO: 626685 - DNA, 15 bp, Homo sapiens
gcactttgggaggtt

SEQ ID NO: 626686 - DNA, 15 bp, Homo sapiens
cactttgggaggttg

SEQ ID NO: 626687 - DNA, 15 bp, Homo sapiens
actttgggaggttga

SEQ ID NO: 626688 - DNA, 15 bp, Homo sapiens
ctttgggaggttgag

SEQ ID NO: 626689 - DNA, 15 bp, Homo sapiens
tttgggaggttgagg

SEQ ID NO: 626690 - DNA, 15 bp, Homo sapiens
ttgggaggttgaggc

SEQ ID NO: 626691 - DNA, 15 bp, Homo sapiens
tgggaggttgaggca

SEQ ID NO: 626692 - DNA, 15 bp, Homo sapiens
gggaggttgaggcag

SEQ ID NO: 626693 - DNA, 15 bp, Homo sapiens
ggaggttgaggcagg

SEQ ID NO: 626694 - DNA, 15 bp, Homo sapiens
gaggttgaggcaggc

SEQ ID NO: 626695 - DNA, 15 bp, Homo sapiens
aggttgaggcaggca

SEQ ID NO: 626696 - DNA, 15 bp, Homo sapiens
ggttgaggcaggcag

SEQ ID NO: 626697 - DNA, 15 bp, Homo sapiens
gttgaggcaggcagc

SEQ ID NO: 626698 - DNA, 15 bp, Homo sapiens
ttgaggcaggcagcc

SEQ ID NO: 626699 - DNA, 15 bp, Homo sapiens
tgaggcaggcagccc

SEQ ID NO: 626700 - DNA, 15 bp, Homo sapiens
gaggcaggcagccca

SEQ ID NO: 626701 - DNA, 15 bp, Homo sapiens
aggcaggcagcccac

SEQ ID NO: 626702 - DNA, 15 bp, Homo sapiens
ggcaggcagcccact

SEQ ID NO: 626703 - DNA, 15 bp, Homo sapiens
gcaggcagcccactt

SEQ ID NO: 626704 - DNA, 15 bp, Homo sapiens
caggcagcccacttg

SEQ ID NO: 626705 - DNA, 15 bp, Homo sapiens
aggcagcccacttga

SEQ ID NO: 626706 - DNA, 15 bp, Homo sapiens
ggcagcccacttgag

SEQ ID NO: 626707 - DNA, 15 bp, Homo sapiens
gcagcccacttgagg

SEQ ID NO: 626708 - DNA, 15 bp, Homo sapiens
cagcccacttgaggt

SEQ ID NO: 626709 - DNA, 15 bp, Homo sapiens
agcccacttgaggtc

SEQ ID NO: 626710 - DNA, 15 bp, Homo sapiens
gcccacttgaggtca

SEQ ID NO: 626711 - DNA, 15 bp, Homo sapiens
cccacttgaggtcag

SEQ ID NO: 626712 - DNA, 15 bp, Homo sapiens
ccacttgaggtcagt

SEQ ID NO: 626713 - DNA, 15 bp, Homo sapiens
cacttgaggtcagtt

SEQ ID NO: 626714 - DNA, 15 bp, Homo sapiens
acttgaggtcagttt

SEQ ID NO: 626715 - DNA, 15 bp, Homo sapiens
cttgaggtcagtttg

SEQ ID NO: 626716 - DNA, 15 bp, Homo sapiens
ttgaggtcagtttga

SEQ ID NO: 626717 - DNA, 15 bp, Homo sapiens
tgaggtcagtttgag

SEQ ID NO: 626718 - DNA, 15 bp, Homo sapiens
gaggtcagtttgaga

SEQ ID NO: 626719 - DNA, 15 bp, Homo sapiens
aggtcagtttgagac

SEQ ID NO: 626720 - DNA, 15 bp, Homo sapiens
ggtcagtttgagacc

SEQ ID NO: 626721 - DNA, 15 bp, Homo sapiens
gtcagtttgagacca

SEQ ID NO: 626722 - DNA, 15 bp, Homo sapiens
tcagtttgagaccag

SEQ ID NO: 626723 - DNA, 15 bp, Homo sapiens
cagtttgagaccagc

SEQ ID NO: 626724 - DNA, 15 bp, Homo sapiens
agtttgagaccagcc

SEQ ID NO: 626725 - DNA, 15 bp, Homo sapiens
gtttgagaccagcct

SEQ ID NO: 626726 - DNA, 15 bp, Homo sapiens
tttgagaccagcctg

SEQ ID NO: 626727 - DNA, 15 bp, Homo sapiens
ttgagaccagcctgg

SEQ ID NO: 626728 - DNA, 15 bp, Homo sapiens
tgagaccagcctggc

SEQ ID NO: 626729 - DNA, 15 bp, Homo sapiens
gagaccagcctggcc

SEQ ID NO: 626730 - DNA, 15 bp, Homo sapiens
agaccagcctggcca

SEQ ID NO: 626731 - DNA, 15 bp, Homo sapiens
gaccagcctggccaa

SEQ ID NO: 626732 - DNA, 15 bp, Homo sapiens
accagcctggccaac

SEQ ID NO: 626733 - DNA, 15 bp, Homo sapiens
ccagcctggccaaca

SEQ ID NO: 626734 - DNA, 15 bp, Homo sapiens
cagcctggccaacat

SEQ ID NO: 626735 - DNA, 15 bp, Homo sapiens
agcctggccaacatg

SEQ ID NO: 626736 - DNA, 15 bp, Homo sapiens
gcctggccaacatgg

SEQ ID NO: 626737 - DNA, 15 bp, Homo sapiens
cctggccaacatggt

SEQ ID NO: 626738 - DNA, 15 bp, Homo sapiens
ctggccaacatggta

SEQ ID NO: 626739 - DNA, 15 bp, Homo sapiens
tggccaacatggtaa

SEQ ID NO: 626740 - DNA, 15 bp, Homo sapiens
ggccaacatggtaaa

SEQ ID NO: 626741 - DNA, 15 bp, Homo sapiens
gccaacatggtaaaa

SEQ ID NO: 626742 - DNA, 15 bp, Homo sapiens
ccaacatggtaaaac

SEQ ID NO: 626743 - DNA, 15 bp, Homo sapiens
caacatggtaaaacc

SEQ ID NO: 626744 - DNA, 15 bp, Homo sapiens
aacatggtaaaaccc

SEQ ID NO: 626745 - DNA, 15 bp, Homo sapiens
acatggtaaaacccc

SEQ ID NO: 626746 - DNA, 15 bp, Homo sapiens
catggtaaaaccccg

SEQ ID NO: 626747 - DNA, 15 bp, Homo sapiens
atggtaaaaccccgt

SEQ ID NO: 626748 - DNA, 15 bp, Homo sapiens
tggtaaaaccccgtc

SEQ ID NO: 626749 - DNA, 15 bp, Homo sapiens
ggtaaaaccccgtct

SEQ ID NO: 626750 - DNA, 15 bp, Homo sapiens
gtaaaaccccgtctc

SEQ ID NO: 626751 - DNA, 15 bp, Homo sapiens
taaaaccccgtctct

SEQ ID NO: 626752 - DNA, 15 bp, Homo sapiens
aaaaccccgtctcta

SEQ ID NO: 626753 - DNA, 15 bp, Homo sapiens
aaaccccgtctctac

SEQ ID NO: 626754 - DNA, 15 bp, Homo sapiens
aaccccgtctctact

SEQ ID NO: 626755 - DNA, 15 bp, Homo sapiens
accccgtctctacta

SEQ ID NO: 626756 - DNA, 15 bp, Homo sapiens
ccccgtctctactaa

SEQ ID NO: 626757 - DNA, 15 bp, Homo sapiens
cccgtctctactaaa

SEQ ID NO: 626758 - DNA, 15 bp, Homo sapiens
ccgtctctactaaaa

SEQ ID NO: 626759 - DNA, 15 bp, Homo sapiens
cgtctctactaaaaa

SEQ ID NO: 626760 - DNA, 15 bp, Homo sapiens
gtctctactaaaaat

SEQ ID NO: 626761 - DNA, 15 bp, Homo sapiens
tctctactaaaaata

SEQ ID NO: 626762 - DNA, 15 bp, Homo sapiens
ctctactaaaaatac

SEQ ID NO: 626763 - DNA, 15 bp, Homo sapiens
tctactaaaaataca

SEQ ID NO: 626764 - DNA, 15 bp, Homo sapiens
ctactaaaaatacaa

SEQ ID NO: 626765 - DNA, 15 bp, Homo sapiens
tactaaaaatacaaa

SEQ ID NO: 626766 - DNA, 15 bp, Homo sapiens
actaaaaatacaaaa

SEQ ID NO: 626767 - DNA, 15 bp, Homo sapiens
ctaaaaatacaaaag

SEQ ID NO: 626768 - DNA, 15 bp, Homo sapiens
taaaaatacaaaagt

SEQ ID NO: 626769 - DNA, 15 bp, Homo sapiens
aaaaatacaaaagtt

SEQ ID NO: 626770 - DNA, 15 bp, Homo sapiens
aaaatacaaaagtta

SEQ ID NO: 626771 - DNA, 15 bp, Homo sapiens
aaatacaaaagttag

SEQ ID NO: 626772 - DNA, 15 bp, Homo sapiens
aatacaaaagttagc

SEQ ID NO: 626773 - DNA, 15 bp, Homo sapiens
atacaaaagttagcc

SEQ ID NO: 626774 - DNA, 15 bp, Homo sapiens
tacaaaagttagcca

SEQ ID NO: 626775 - DNA, 15 bp, Homo sapiens
acaaaagttagccag

SEQ ID NO: 626776 - DNA, 15 bp, Homo sapiens
caaaagttagccagg

SEQ ID NO: 626777 - DNA, 15 bp, Homo sapiens
aaaagttagccaggc

SEQ ID NO: 626778 - DNA, 15 bp, Homo sapiens
aaagttagccaggct

SEQ ID NO: 626779 - DNA, 15 bp, Homo sapiens
aagttagccaggctt

SEQ ID NO: 626780 - DNA, 15 bp, Homo sapiens
agttagccaggcttg

SEQ ID NO: 626781 - DNA, 15 bp, Homo sapiens
gttagccaggcttgg

SEQ ID NO: 626782 - DNA, 15 bp, Homo sapiens
ttagccaggcttggt

SEQ ID NO: 626783 - DNA, 15 bp, Homo sapiens
tagccaggcttggtg

SEQ ID NO: 626784 - DNA, 15 bp, Homo sapiens
agccaggcttggtgg

SEQ ID NO: 626785 - DNA, 15 bp, Homo sapiens
gccaggcttggtggc

SEQ ID NO: 626786 - DNA, 15 bp, Homo sapiens
ccaggcttggtggca

SEQ ID NO: 626787 - DNA, 15 bp, Homo sapiens
caggcttggtggcag

SEQ ID NO: 626788 - DNA, 15 bp, Homo sapiens
aggcttggtggcagg

SEQ ID NO: 626789 - DNA, 15 bp, Homo sapiens
ggcttggtggcaggt

SEQ ID NO: 626790 - DNA, 15 bp, Homo sapiens
gcttggtggcaggtg

SEQ ID NO: 626791 - DNA, 15 bp, Homo sapiens
cttggtggcaggtgc

SEQ ID NO: 626792 - DNA, 15 bp, Homo sapiens
ttggtggcaggtgcc

SEQ ID NO: 626793 - DNA, 15 bp, Homo sapiens
tggtggcaggtgcct

SEQ ID NO: 626794 - DNA, 15 bp, Homo sapiens
ggtggcaggtgcctg

SEQ ID NO: 626795 - DNA, 15 bp, Homo sapiens
gtggcaggtgcctgt

SEQ ID NO: 626796 - DNA, 15 bp, Homo sapiens
tggcaggtgcctgta

SEQ ID NO: 626797 - DNA, 15 bp, Homo sapiens
ggcaggtgcctgtaa

SEQ ID NO: 626798 - DNA, 15 bp, Homo sapiens
gcaggtgcctgtaat

SEQ ID NO: 626799 - DNA, 15 bp, Homo sapiens
caggtgcctgtaatc

SEQ ID NO: 626800 - DNA, 15 bp, Homo sapiens
aggtgcctgtaatcc

SEQ ID NO: 626801 - DNA, 15 bp, Homo sapiens
ggtgcctgtaatccc

SEQ ID NO: 626802 - DNA, 15 bp, Homo sapiens
gtgcctgtaatccca

SEQ ID NO: 626803 - DNA, 15 bp, Homo sapiens
cctgtaatcccagct

SEQ ID NO: 626804 - DNA, 15 bp, Homo sapiens
ctgtaatcccagcta

SEQ ID NO: 626805 - DNA, 15 bp, Homo sapiens
tgtaatcccagctac

SEQ ID NO: 626806 - DNA, 15 bp, Homo sapiens
gtaatcccagctact

SEQ ID NO: 626807 - DNA, 15 bp, Homo sapiens
taatcccagctactc

SEQ ID NO: 626808 - DNA, 15 bp, Homo sapiens
aatcccagctactcg

SEQ ID NO: 626809 - DNA, 15 bp, Homo sapiens
atcccagctactcgg

SEQ ID NO: 626810 - DNA, 15 bp, Homo sapiens
tcccagctactcggg

SEQ ID NO: 626811 - DNA, 15 bp, Homo sapiens
cccagctactcggga

SEQ ID NO: 626812 - DNA, 15 bp, Homo sapiens
ccagctactcgggag

SEQ ID NO: 626813 - DNA, 15 bp, Homo sapiens
cagctactcgggaga

SEQ ID NO: 626814 - DNA, 15 bp, Homo sapiens
agctactcgggagac

SEQ ID NO: 626815 - DNA, 15 bp, Homo sapiens
gctactcgggagact

SEQ ID NO: 626816 - DNA, 15 bp, Homo sapiens
ctactcgggagactg

SEQ ID NO: 626817 - DNA, 15 bp, Homo sapiens
tactcgggagactga

SEQ ID NO: 626818 - DNA, 15 bp, Homo sapiens
actcgggagactgag

SEQ ID NO: 626819 - DNA, 15 bp, Homo sapiens
ctcgggagactgagg

SEQ ID NO: 626820 - DNA, 15 bp, Homo sapiens
tcgggagactgaggc

SEQ ID NO: 626821 - DNA, 15 bp, Homo sapiens
cgggagactgaggca

SEQ ID NO: 626822 - DNA, 15 bp, Homo sapiens
gggagactgaggcag

SEQ ID NO: 626823 - DNA, 15 bp, Homo sapiens
ggagactgaggcagg

SEQ ID NO: 626824 - DNA, 15 bp, Homo sapiens
gagactgaggcagga

SEQ ID NO: 626825 - DNA, 15 bp, Homo sapiens
agactgaggcaggag

SEQ ID NO: 626826 - DNA, 15 bp, Homo sapiens
gactgaggcaggaga

SEQ ID NO: 626827 - DNA, 15 bp, Homo sapiens
actgaggcaggagaa

SEQ ID NO: 626828 - DNA, 15 bp, Homo sapiens
ctgaggcaggagaat

SEQ ID NO: 626829 - DNA, 15 bp, Homo sapiens
tgaggcaggagaatt

SEQ ID NO: 626830 - DNA, 15 bp, Homo sapiens
gaggcaggagaattg

SEQ ID NO: 626831 - DNA, 15 bp, Homo sapiens
aggcaggagaattgc

SEQ ID NO: 626832 - DNA, 15 bp, Homo sapiens
ggcaggagaattgct

SEQ ID NO: 626833 - DNA, 15 bp, Homo sapiens
gcaggagaattgctt

SEQ ID NO: 626834 - DNA, 15 bp, Homo sapiens
caggagaattgcttg

SEQ ID NO: 626835 - DNA, 15 bp, Homo sapiens
aggagaattgcttga

SEQ ID NO: 626836 - DNA, 15 bp, Homo sapiens
ggagaattgcttgaa

SEQ ID NO: 626837 - DNA, 15 bp, Homo sapiens
gagaattgcttgaac

SEQ ID NO: 626838 - DNA, 15 bp, Homo sapiens
agaattgcttgaacc

SEQ ID NO: 626839 - DNA, 15 bp, Homo sapiens
gaattgcttgaaccc

SEQ ID NO: 626840 - DNA, 15 bp, Homo sapiens
aattgcttgaacccg

SEQ ID NO: 626841 - DNA, 15 bp, Homo sapiens
attgcttgaacccgc

SEQ ID NO: 626842 - DNA, 15 bp, Homo sapiens
ttgcttgaacccgca

SEQ ID NO: 626843 - DNA, 15 bp, Homo sapiens
tgcttgaacccgcaa

SEQ ID NO: 626844 - DNA, 15 bp, Homo sapiens
gcttgaacccgcaag

SEQ ID NO: 626845 - DNA, 15 bp, Homo sapiens
cttgaacccgcaagg

SEQ ID NO: 626846 - DNA, 15 bp, Homo sapiens
ttgaacccgcaaggt

SEQ ID NO: 626847 - DNA, 15 bp, Homo sapiens
tgaacccgcaaggtg

SEQ ID NO: 626848 - DNA, 15 bp, Homo sapiens
gaacccgcaaggtgg

SEQ ID NO: 626849 - DNA, 15 bp, Homo sapiens
aacccgcaaggtgga

SEQ ID NO: 626850 - DNA, 15 bp, Homo sapiens
acccgcaaggtggag

SEQ ID NO: 626851 - DNA, 15 bp, Homo sapiens
cccgcaaggtggagg

SEQ ID NO: 626852 - DNA, 15 bp, Homo sapiens
ccgcaaggtggaggt

SEQ ID NO: 626853 - DNA, 15 bp, Homo sapiens
cgcaaggtggaggtt

SEQ ID NO: 626854 - DNA, 15 bp, Homo sapiens
gcaaggtggaggttg

SEQ ID NO: 626855 - DNA, 15 bp, Homo sapiens
caaggtggaggttgc

SEQ ID NO: 626856 - DNA, 15 bp, Homo sapiens
aaggtggaggttgca

SEQ ID NO: 626857 - DNA, 15 bp, Homo sapiens
aggtggaggttgcac

SEQ ID NO: 626858 - DNA, 15 bp, Homo sapiens
ggtggaggttgcaca

SEQ ID NO: 626859 - DNA, 15 bp, Homo sapiens
gtggaggttgcacag

SEQ ID NO: 626860 - DNA, 15 bp, Homo sapiens
tggaggttgcacagt

SEQ ID NO: 626861 - DNA, 15 bp, Homo sapiens
ggaggttgcacagtg

SEQ ID NO: 626862 - DNA, 15 bp, Homo sapiens
gaggttgcacagtga

SEQ ID NO: 626863 - DNA, 15 bp, Homo sapiens
aggttgcacagtgag

SEQ ID NO: 626864 - DNA, 15 bp, Homo sapiens
ggttgcacagtgagc

SEQ ID NO: 626865 - DNA, 15 bp, Homo sapiens
gttgcacagtgagct

SEQ ID NO: 626866 - DNA, 15 bp, Homo sapiens
ttgcacagtgagctg

SEQ ID NO: 626867 - DNA, 15 bp, Homo sapiens
tgcacagtgagctga

SEQ ID NO: 626868 - DNA, 15 bp, Homo sapiens
gcacagtgagctgag

SEQ ID NO: 626869 - DNA, 15 bp, Homo sapiens
cacagtgagctgaga

SEQ ID NO: 626870 - DNA, 15 bp, Homo sapiens
acagtgagctgagat

SEQ ID NO: 626871 - DNA, 15 bp, Homo sapiens
agtgagctgagattg

SEQ ID NO: 626872 - DNA, 15 bp, Homo sapiens
gtgagctgagattgc

SEQ ID NO: 626873 - DNA, 15 bp, Homo sapiens
tgagctgagattgca

SEQ ID NO: 626874 - DNA, 15 bp, Homo sapiens
gagctgagattgcac

SEQ ID NO: 626875 - DNA, 15 bp, Homo sapiens
agctgagattgcacc

SEQ ID NO: 626876 - DNA, 15 bp, Homo sapiens
gctgagattgcacca

SEQ ID NO: 626877 - DNA, 15 bp, Homo sapiens
ctgagattgcaccac

SEQ ID NO: 626878 - DNA, 15 bp, Homo sapiens
tgagattgcaccact

SEQ ID NO: 626879 - DNA, 15 bp, Homo sapiens
gagattgcaccactg

SEQ ID NO: 626880 - DNA, 15 bp, Homo sapiens
agattgcaccactgc

SEQ ID NO: 626881 - DNA, 15 bp, Homo sapiens
gattgcaccactgca

SEQ ID NO: 626882 - DNA, 15 bp, Homo sapiens
attgcaccactgcac

SEQ ID NO: 626883 - DNA, 15 bp, Homo sapiens
ttgcaccactgcact

SEQ ID NO: 626884 - DNA, 15 bp, Homo sapiens
tgcaccactgcactc

SEQ ID NO: 626885 - DNA, 15 bp, Homo sapiens
gcaccactgcactcc

SEQ ID NO: 626886 - DNA, 15 bp, Homo sapiens
caccactgcactcca

SEQ ID NO: 626887 - DNA, 15 bp, Homo sapiens
accactgcactccag

SEQ ID NO: 626888 - DNA, 15 bp, Homo sapiens
ccactgcactccagc

SEQ ID NO: 626889 - DNA, 15 bp, Homo sapiens
cactgcactccagcc

SEQ ID NO: 626890 - DNA, 15 bp, Homo sapiens
actgcactccagcct

SEQ ID NO: 626891 - DNA, 15 bp, Homo sapiens
ctgcactccagcctg

SEQ ID NO: 626892 - DNA, 15 bp, Homo sapiens
tgcactccagcctgg

SEQ ID NO: 626893 - DNA, 15 bp, Homo sapiens
gcactccagcctggc

SEQ ID NO: 626894 - DNA, 15 bp, Homo sapiens
cactccagcctggca

SEQ ID NO: 626895 - DNA, 15 bp, Homo sapiens
actccagcctggcaa

SEQ ID NO: 626896 - DNA, 15 bp, Homo sapiens
ctccagcctggcaac

SEQ ID NO: 626897 - DNA, 15 bp, Homo sapiens
tccagcctggcaaca

SEQ ID NO: 626898 - DNA, 15 bp, Homo sapiens
ccagcctggcaacag

SEQ ID NO: 626899 - DNA, 15 bp, Homo sapiens
cagcctggcaacaga

SEQ ID NO: 626900 - DNA, 15 bp, Homo sapiens
agcctggcaacagag

SEQ ID NO: 626901 - DNA, 15 bp, Homo sapiens
gcctggcaacagagc

SEQ ID NO: 626902 - DNA, 15 bp, Homo sapiens
cctggcaacagagca

SEQ ID NO: 626903 - DNA, 15 bp, Homo sapiens
ctggcaacagagcaa

SEQ ID NO: 626904 - DNA, 15 bp, Homo sapiens
tggcaacagagcaag

SEQ ID NO: 626905 - DNA, 15 bp, Homo sapiens
ggcaacagagcaaga

SEQ ID NO: 626906 - DNA, 15 bp, Homo sapiens
gcaacagagcaagac

SEQ ID NO: 626907 - DNA, 15 bp, Homo sapiens
caacagagcaagact

SEQ ID NO: 626908 - DNA, 15 bp, Homo sapiens
aacagagcaagactc

SEQ ID NO: 626909 - DNA, 15 bp, Homo sapiens
acagagcaagactcc

SEQ ID NO: 626910 - DNA, 15 bp, Homo sapiens
cagagcaagactcca

SEQ ID NO: 626911 - DNA, 15 bp, Homo sapiens
agagcaagactccat

SEQ ID NO: 626912 - DNA, 15 bp, Homo sapiens
gagcaagactccatc

SEQ ID NO: 626913 - DNA, 15 bp, Homo sapiens
agcaagactccatct

SEQ ID NO: 626914 - DNA, 15 bp, Homo sapiens
gcaagactccatctc

SEQ ID NO: 626915 - DNA, 15 bp, Homo sapiens
caagactccatctcc

SEQ ID NO: 626916 - DNA, 15 bp, Homo sapiens
aagactccatctcca

SEQ ID NO: 626917 - DNA, 15 bp, Homo sapiens
agactccatctccaa

SEQ ID NO: 626918 - DNA, 15 bp, Homo sapiens
gactccatctccaaa

SEQ ID NO: 626919 - DNA, 15 bp, Homo sapiens
actccatctccaaaa

SEQ ID NO: 626920 - DNA, 15 bp, Homo sapiens
ctccatctccaaaaa

SEQ ID NO: 626921 - DNA, 15 bp, Homo sapiens
tccatctccaaaaaa

SEQ ID NO: 626922 - DNA, 15 bp, Homo sapiens
ccatctccaaaaaag

SEQ ID NO: 626923 - DNA, 15 bp, Homo sapiens
catctccaaaaaaga

SEQ ID NO: 626924 - DNA, 15 bp, Homo sapiens
atctccaaaaaagaa

SEQ ID NO: 626925 - DNA, 15 bp, Homo sapiens
tctccaaaaaagaac

SEQ ID NO: 626926 - DNA, 15 bp, Homo sapiens
ctccaaaaaagaaca

SEQ ID NO: 626927 - DNA, 15 bp, Homo sapiens
tccaaaaaagaacag

SEQ ID NO: 626928 - DNA, 15 bp, Homo sapiens
ccaaaaaagaacaga

SEQ ID NO: 626929 - DNA, 15 bp, Homo sapiens
caaaaaagaacagaa

SEQ ID NO: 626930 - DNA, 15 bp, Homo sapiens
aaaaaagaacagaaa

SEQ ID NO: 626931 - DNA, 15 bp, Homo sapiens
aaaaagaacagaaat

SEQ ID NO: 626932 - DNA, 15 bp, Homo sapiens
aaaagaacagaaatc

SEQ ID NO: 626933 - DNA, 15 bp, Homo sapiens
aaagaacagaaatca

SEQ ID NO: 626934 - DNA, 15 bp, Homo sapiens
aagaacagaaatcaa

SEQ ID NO: 626935 - DNA, 15 bp, Homo sapiens
agaacagaaatcaat

SEQ ID NO: 626936 - DNA, 15 bp, Homo sapiens
gaacagaaatcaatg

SEQ ID NO: 626937 - DNA, 15 bp, Homo sapiens
aacagaaatcaatga

SEQ ID NO: 626938 - DNA, 15 bp, Homo sapiens
acagaaatcaatgaa

SEQ ID NO: 626939 - DNA, 15 bp, Homo sapiens
cagaaatcaatgaag

SEQ ID NO: 626940 - DNA, 15 bp, Homo sapiens
agaaatcaatgaagc

SEQ ID NO: 626941 - DNA, 15 bp, Homo sapiens
gaaatcaatgaagca

SEQ ID NO: 626942 - DNA, 15 bp, Homo sapiens
aaatcaatgaagcac

SEQ ID NO: 626943 - DNA, 15 bp, Homo sapiens
aatcaatgaagcacc

SEQ ID NO: 626944 - DNA, 15 bp, Homo sapiens
atcaatgaagcaccg

SEQ ID NO: 626945 - DNA, 15 bp, Homo sapiens
tcaatgaagcaccga

SEQ ID NO: 626946 - DNA, 15 bp, Homo sapiens
caatgaagcaccgag

SEQ ID NO: 626947 - DNA, 15 bp, Homo sapiens
aatgaagcaccgagt

SEQ ID NO: 626948 - DNA, 15 bp, Homo sapiens
atgaagcaccgagtg

SEQ ID NO: 626949 - DNA, 15 bp, Homo sapiens
tgaagcaccgagtga

SEQ ID NO: 626950 - DNA, 15 bp, Homo sapiens
gaagcaccgagtgac

SEQ ID NO: 626951 - DNA, 15 bp, Homo sapiens
aagcaccgagtgaca

SEQ ID NO: 626952 - DNA, 15 bp, Homo sapiens
agcaccgagtgacag

SEQ ID NO: 626953 - DNA, 15 bp, Homo sapiens
gcaccgagtgacagg

SEQ ID NO: 626954 - DNA, 15 bp, Homo sapiens
caccgagtgacaggg

SEQ ID NO: 626955 - DNA, 15 bp, Homo sapiens
accgagtgacaggga

SEQ ID NO: 626956 - DNA, 15 bp, Homo sapiens
ccgagtgacagggac

SEQ ID NO: 626957 - DNA, 15 bp, Homo sapiens
cgagtgacagggact

SEQ ID NO: 626958 - DNA, 15 bp, Homo sapiens
gagtgacagggactg

SEQ ID NO: 626959 - DNA, 15 bp, Homo sapiens
agtgacagggactgg

SEQ ID NO: 626960 - DNA, 15 bp, Homo sapiens
gtgacagggactgga

SEQ ID NO: 626961 - DNA, 15 bp, Homo sapiens
tgacagggactggaa

SEQ ID NO: 626962 - DNA, 15 bp, Homo sapiens
gacagggactggaag

SEQ ID NO: 626963 - DNA, 15 bp, Homo sapiens
acagggactggaagg

SEQ ID NO: 626964 - DNA, 15 bp, Homo sapiens
cagggactggaaggt

SEQ ID NO: 626965 - DNA, 15 bp, Homo sapiens
agggactggaaggtc

SEQ ID NO: 626966 - DNA, 15 bp, Homo sapiens
gggactggaaggtcc

SEQ ID NO: 626967 - DNA, 15 bp, Homo sapiens
ggactggaaggtcct

SEQ ID NO: 626968 - DNA, 15 bp, Homo sapiens
gactggaaggtccta

SEQ ID NO: 626969 - DNA, 15 bp, Homo sapiens
actggaaggtcctaa

SEQ ID NO: 626970 - DNA, 15 bp, Homo sapiens
ctggaaggtcctaat

SEQ ID NO: 626971 - DNA, 15 bp, Homo sapiens
tggaaggtcctaatt

SEQ ID NO: 626972 - DNA, 15 bp, Homo sapiens
ggaaggtcctaattc

SEQ ID NO: 626973 - DNA, 15 bp, Homo sapiens
gaaggtcctaattcc

SEQ ID NO: 626974 - DNA, 15 bp, Homo sapiens
aaggtcctaattcca

SEQ ID NO: 626975 - DNA, 15 bp, Homo sapiens
aggtcctaattccat

SEQ ID NO: 626976 - DNA, 15 bp, Homo sapiens
ggtcctaattccatg

SEQ ID NO: 626977 - DNA, 15 bp, Homo sapiens
gtcctaattccatgg

SEQ ID NO: 626978 - DNA, 15 bp, Homo sapiens
tcctaattccatggg

SEQ ID NO: 626979 - DNA, 15 bp, Homo sapiens
cctaattccatgggt

SEQ ID NO: 626980 - DNA, 15 bp, Homo sapiens
ctaattccatgggta

SEQ ID NO: 626981 - DNA, 15 bp, Homo sapiens
taattccatgggtat

SEQ ID NO: 626982 - DNA, 15 bp, Homo sapiens
aattccatgggtatt

SEQ ID NO: 626983 - DNA, 15 bp, Homo sapiens
attccatgggtattt

SEQ ID NO: 626984 - DNA, 15 bp, Homo sapiens
ttccatgggtattta

SEQ ID NO: 626985 - DNA, 15 bp, Homo sapiens
tccatgggtatttac

SEQ ID NO: 626986 - DNA, 15 bp, Homo sapiens
ccatgggtatttacg

SEQ ID NO: 626987 - DNA, 15 bp, Homo sapiens
catgggtatttacgg

SEQ ID NO: 626988 - DNA, 15 bp, Homo sapiens
atgggtatttacgga

SEQ ID NO: 626989 - DNA, 15 bp, Homo sapiens
tgggtatttacggaa

SEQ ID NO: 626990 - DNA, 15 bp, Homo sapiens
gggtatttacggaac

SEQ ID NO: 626991 - DNA, 15 bp, Homo sapiens
ggtatttacggaacc

SEQ ID NO: 626992 - DNA, 15 bp, Homo sapiens
gtatttacggaaccc

SEQ ID NO: 626993 - DNA, 15 bp, Homo sapiens
tatttacggaacccc

SEQ ID NO: 626994 - DNA, 15 bp, Homo sapiens
atttacggaacccct

SEQ ID NO: 626995 - DNA, 15 bp, Homo sapiens
tttacggaaccccta

SEQ ID NO: 626996 - DNA, 15 bp, Homo sapiens
ttacggaacccctac

SEQ ID NO: 626997 - DNA, 15 bp, Homo sapiens
tacggaacccctacg

SEQ ID NO: 626998 - DNA, 15 bp, Homo sapiens
acggaacccctacgc

SEQ ID NO: 626999 - DNA, 15 bp, Homo sapiens
cggaacccctacgcc

SEQ ID NO: 627000 - DNA, 15 bp, Homo sapiens
ggaacccctacgccg

SEQ ID NO: 627001 - DNA, 15 bp, Homo sapiens
gaacccctacgccgt

SEQ ID NO: 627002 - DNA, 15 bp, Homo sapiens
aacccctacgccgtg

SEQ ID NO: 627003 - DNA, 15 bp, Homo sapiens
acccctacgccgtgt

SEQ ID NO: 627004 - DNA, 15 bp, Homo sapiens
cccctacgccgtgtg

SEQ ID NO: 627005 - DNA, 15 bp, Homo sapiens
ccctacgccgtgtgg

SEQ ID NO: 627006 - DNA, 15 bp, Homo sapiens
cctacgccgtgtgga

SEQ ID NO: 627007 - DNA, 15 bp, Homo sapiens
ctacgccgtgtggag

SEQ ID NO: 627008 - DNA, 15 bp, Homo sapiens
tacgccgtgtggagt

SEQ ID NO: 627009 - DNA, 15 bp, Homo sapiens
acgccgtgtggagtc

SEQ ID NO: 627010 - DNA, 15 bp, Homo sapiens
cgccgtgtggagtct

SEQ ID NO: 627011 - DNA, 15 bp, Homo sapiens
gccgtgtggagtctt

SEQ ID NO: 627012 - DNA, 15 bp, Homo sapiens
ccgtgtggagtctta

SEQ ID NO: 627013 - DNA, 15 bp, Homo sapiens
cgtgtggagtcttat

SEQ ID NO: 627014 - DNA, 15 bp, Homo sapiens
gtgtggagtcttatt

SEQ ID NO: 627015 - DNA, 15 bp, Homo sapiens
tgtggagtcttattc

SEQ ID NO: 627016 - DNA, 15 bp, Homo sapiens
gtggagtcttattct

SEQ ID NO: 627017 - DNA, 15 bp, Homo sapiens
tggagtcttattcta

SEQ ID NO: 627018 - DNA, 15 bp, Homo sapiens
ggagtcttattctag

SEQ ID NO: 627019 - DNA, 15 bp, Homo sapiens
gagtcttattctaga

SEQ ID NO: 627020 - DNA, 15 bp, Homo sapiens
agtcttattctagac

SEQ ID NO: 627021 - DNA, 15 bp, Homo sapiens
gtcttattctagaca

SEQ ID NO: 627022 - DNA, 15 bp, Homo sapiens
tcttattctagacag

SEQ ID NO: 627023 - DNA, 15 bp, Homo sapiens
cttattctagacagt

SEQ ID NO: 627024 - DNA, 15 bp, Homo sapiens
ttattctagacagtg

SEQ ID NO: 627025 - DNA, 15 bp, Homo sapiens
tattctagacagtgg

SEQ ID NO: 627026 - DNA, 15 bp, Homo sapiens
attctagacagtggg

SEQ ID NO: 627027 - DNA, 15 bp, Homo sapiens
ttctagacagtgggg

SEQ ID NO: 627028 - DNA, 15 bp, Homo sapiens
tctagacagtgggga

SEQ ID NO: 627029 - DNA, 15 bp, Homo sapiens
ctagacagtggggac

SEQ ID NO: 627030 - DNA, 15 bp, Homo sapiens
tagacagtggggacg

SEQ ID NO: 627031 - DNA, 15 bp, Homo sapiens
agacagtggggacga

SEQ ID NO: 627032 - DNA, 15 bp, Homo sapiens
gacagtggggacgag

SEQ ID NO: 627033 - DNA, 15 bp, Homo sapiens
acagtggggacgagg

SEQ ID NO: 627034 - DNA, 15 bp, Homo sapiens
cagtggggacgaggc

SEQ ID NO: 627035 - DNA, 15 bp, Homo sapiens
agtggggacgaggcc

SEQ ID NO: 627036 - DNA, 15 bp, Homo sapiens
gtggggacgaggcca

SEQ ID NO: 627037 - DNA, 15 bp, Homo sapiens
tggggacgaggccat

SEQ ID NO: 627038 - DNA, 15 bp, Homo sapiens
ggggacgaggccatg

SEQ ID NO: 627039 - DNA, 15 bp, Homo sapiens
gggacgaggccatga

SEQ ID NO: 627040 - DNA, 15 bp, Homo sapiens
ggacgaggccatgaa

SEQ ID NO: 627041 - DNA, 15 bp, Homo sapiens
gacgaggccatgaac

SEQ ID NO: 627042 - DNA, 15 bp, Homo sapiens
acgaggccatgaaca

SEQ ID NO: 627043 - DNA, 15 bp, Homo sapiens
cgaggccatgaacaa

SEQ ID NO: 627044 - DNA, 15 bp, Homo sapiens
gaggccatgaacaag

SEQ ID NO: 627045 - DNA, 15 bp, Homo sapiens
aggccatgaacaagg

SEQ ID NO: 627046 - DNA, 15 bp, Homo sapiens
ggccatgaacaaggt

SEQ ID NO: 627047 - DNA, 15 bp, Homo sapiens
gccatgaacaaggta

SEQ ID NO: 627048 - DNA, 15 bp, Homo sapiens
ccatgaacaaggtag

SEQ ID NO: 627049 - DNA, 15 bp, Homo sapiens
catgaacaaggtaga

SEQ ID NO: 627050 - DNA, 15 bp, Homo sapiens
atgaacaaggtagat

SEQ ID NO: 627051 - DNA, 15 bp, Homo sapiens
tgaacaaggtagatg

SEQ ID NO: 627052 - DNA, 15 bp, Homo sapiens
gaacaaggtagatga

SEQ ID NO: 627053 - DNA, 15 bp, Homo sapiens
aacaaggtagatgag

SEQ ID NO: 627054 - DNA, 15 bp, Homo sapiens
acaaggtagatgaga

SEQ ID NO: 627055 - DNA, 15 bp, Homo sapiens
caaggtagatgagag

SEQ ID NO: 627056 - DNA, 15 bp, Homo sapiens
aaggtagatgagaga

SEQ ID NO: 627057 - DNA, 15 bp, Homo sapiens
aggtagatgagagag

SEQ ID NO: 627058 - DNA, 15 bp, Homo sapiens
ggtagatgagagagg

SEQ ID NO: 627059 - DNA, 15 bp, Homo sapiens
gtagatgagagagga

SEQ ID NO: 627060 - DNA, 15 bp, Homo sapiens
tagatgagagaggag

SEQ ID NO: 627061 - DNA, 15 bp, Homo sapiens
agatgagagaggaga

SEQ ID NO: 627062 - DNA, 15 bp, Homo sapiens
gatgagagaggagat

SEQ ID NO: 627063 - DNA, 15 bp, Homo sapiens
atgagagaggagatt

SEQ ID NO: 627064 - DNA, 15 bp, Homo sapiens
tgagagaggagattt

SEQ ID NO: 627065 - DNA, 15 bp, Homo sapiens
gagagaggagatttc

SEQ ID NO: 627066 - DNA, 15 bp, Homo sapiens
agagaggagatttct

SEQ ID NO: 627067 - DNA, 15 bp, Homo sapiens
gagaggagatttctc

SEQ ID NO: 627068 - DNA, 15 bp, Homo sapiens
agaggagatttctcc

SEQ ID NO: 627069 - DNA, 15 bp, Homo sapiens
gaggagatttctcca

SEQ ID NO: 627070 - DNA, 15 bp, Homo sapiens
aggagatttctccat

SEQ ID NO: 627071 - DNA, 15 bp, Homo sapiens
ggagatttctccatc

SEQ ID NO: 627072 - DNA, 15 bp, Homo sapiens
gagatttctccatcc

SEQ ID NO: 627073 - DNA, 15 bp, Homo sapiens
agatttctccatcct

SEQ ID NO: 627074 - DNA, 15 bp, Homo sapiens
gatttctccatcctg

SEQ ID NO: 627075 - DNA, 15 bp, Homo sapiens
atttctccatcctgg

SEQ ID NO: 627076 - DNA, 15 bp, Homo sapiens
tttctccatcctggt

SEQ ID NO: 627077 - DNA, 15 bp, Homo sapiens
ttctccatcctggtc

SEQ ID NO: 627078 - DNA, 15 bp, Homo sapiens
tctccatcctggtca

SEQ ID NO: 627079 - DNA, 15 bp, Homo sapiens
ctccatcctggtcag

SEQ ID NO: 627080 - DNA, 15 bp, Homo sapiens
tccatcctggtcagg

SEQ ID NO: 627081 - DNA, 15 bp, Homo sapiens
ccatcctggtcaggg

SEQ ID NO: 627082 - DNA, 15 bp, Homo sapiens
catcctggtcaggga

SEQ ID NO: 627083 - DNA, 15 bp, Homo sapiens
atcctggtcagggaa

SEQ ID NO: 627084 - DNA, 15 bp, Homo sapiens
tcctggtcagggaat

SEQ ID NO: 627085 - DNA, 15 bp, Homo sapiens
cctggtcagggaatt

SEQ ID NO: 627086 - DNA, 15 bp, Homo sapiens
ctggtcagggaattt

SEQ ID NO: 627087 - DNA, 15 bp, Homo sapiens
tggtcagggaatttg

SEQ ID NO: 627088 - DNA, 15 bp, Homo sapiens
ggtcagggaatttgt

SEQ ID NO: 627089 - DNA, 15 bp, Homo sapiens
gtcagggaatttgtt

SEQ ID NO: 627090 - DNA, 15 bp, Homo sapiens
tcagggaatttgtta

SEQ ID NO: 627091 - DNA, 15 bp, Homo sapiens
cagggaatttgttaa

SEQ ID NO: 627092 - DNA, 15 bp, Homo sapiens
agggaatttgttaaa

SEQ ID NO: 627093 - DNA, 15 bp, Homo sapiens
gggaatttgttaaag

SEQ ID NO: 627094 - DNA, 15 bp, Homo sapiens
ggaatttgttaaaga

SEQ ID NO: 627095 - DNA, 15 bp, Homo sapiens
gaatttgttaaagac

SEQ ID NO: 627096 - DNA, 15 bp, Homo sapiens
aatttgttaaagact

SEQ ID NO: 627097 - DNA, 15 bp, Homo sapiens
atttgttaaagactg

SEQ ID NO: 627098 - DNA, 15 bp, Homo sapiens
tttgttaaagactga

SEQ ID NO: 627099 - DNA, 15 bp, Homo sapiens
ttgttaaagactgat

SEQ ID NO: 627100 - DNA, 15 bp, Homo sapiens
tgttaaagactgatg

SEQ ID NO: 627101 - DNA, 15 bp, Homo sapiens
gttaaagactgatga

SEQ ID NO: 627102 - DNA, 15 bp, Homo sapiens
ttaaagactgatgaa

SEQ ID NO: 627103 - DNA, 15 bp, Homo sapiens
taaagactgatgaaa

SEQ ID NO: 627104 - DNA, 15 bp, Homo sapiens
aaagactgatgaaaa

SEQ ID NO: 627105 - DNA, 15 bp, Homo sapiens
aagactgatgaaaac

SEQ ID NO: 627106 - DNA, 15 bp, Homo sapiens
agactgatgaaaaca

SEQ ID NO: 627107 - DNA, 15 bp, Homo sapiens
gactgatgaaaacat

SEQ ID NO: 627108 - DNA, 15 bp, Homo sapiens
actgatgaaaacatg

SEQ ID NO: 627109 - DNA, 15 bp, Homo sapiens
ctgatgaaaacatga

SEQ ID NO: 627110 - DNA, 15 bp, Homo sapiens
tgatgaaaacatgaa

SEQ ID NO: 627111 - DNA, 15 bp, Homo sapiens
gatgaaaacatgaat

SEQ ID NO: 627112 - DNA, 15 bp, Homo sapiens
atgaaaacatgaata

SEQ ID NO: 627113 - DNA, 15 bp, Homo sapiens
tgaaaacatgaataa

SEQ ID NO: 627114 - DNA, 15 bp, Homo sapiens
gaaaacatgaataaa

SEQ ID NO: 627115 - DNA, 15 bp, Homo sapiens
aaaacatgaataaat

SEQ ID NO: 627116 - DNA, 15 bp, Homo sapiens
aaacatgaataaata

SEQ ID NO: 627117 - DNA, 15 bp, Homo sapiens
aacatgaataaataa

SEQ ID NO: 627118 - DNA, 15 bp, Homo sapiens
acatgaataaataat

SEQ ID NO: 627119 - DNA, 15 bp, Homo sapiens
catgaataaataatt

SEQ ID NO: 627120 - DNA, 15 bp, Homo sapiens
atgaataaataattg

SEQ ID NO: 627121 - DNA, 15 bp, Homo sapiens
tgaataaataattgt

SEQ ID NO: 627122 - DNA, 15 bp, Homo sapiens
gaataaataattgtg

SEQ ID NO: 627123 - DNA, 15 bp, Homo sapiens
aataaataattgtgt

SEQ ID NO: 627124 - DNA, 15 bp, Homo sapiens
ataaataattgtgtc

SEQ ID NO: 627125 - DNA, 15 bp, Homo sapiens
taaataattgtgtct

SEQ ID NO: 627126 - DNA, 15 bp, Homo sapiens
aaataattgtgtcta

SEQ ID NO: 627127 - DNA, 15 bp, Homo sapiens
aataattgtgtctag

SEQ ID NO: 627128 - DNA, 15 bp, Homo sapiens
ataattgtgtctagt

SEQ ID NO: 627129 - DNA, 15 bp, Homo sapiens
taattgtgtctagta

SEQ ID NO: 627130 - DNA, 15 bp, Homo sapiens
aattgtgtctagtac

SEQ ID NO: 627131 - DNA, 15 bp, Homo sapiens
attgtgtctagtaca

SEQ ID NO: 627132 - DNA, 15 bp, Homo sapiens
ttgtgtctagtacat

SEQ ID NO: 627133 - DNA, 15 bp, Homo sapiens
tgtgtctagtacatt

SEQ ID NO: 627134 - DNA, 15 bp, Homo sapiens
gtgtctagtacattc

SEQ ID NO: 627135 - DNA, 15 bp, Homo sapiens
tgtctagtacattct

SEQ ID NO: 627136 - DNA, 15 bp, Homo sapiens
gtctagtacattcta

SEQ ID NO: 627137 - DNA, 15 bp, Homo sapiens
tctagtacattctat

SEQ ID NO: 627138 - DNA, 15 bp, Homo sapiens
ctagtacattctatt

SEQ ID NO: 627139 - DNA, 15 bp, Homo sapiens
tagtacattctattc

SEQ ID NO: 627140 - DNA, 15 bp, Homo sapiens
agtacattctattcg

SEQ ID NO: 627141 - DNA, 15 bp, Homo sapiens
gtacattctattcgt

SEQ ID NO: 627142 - DNA, 15 bp, Homo sapiens
tacattctattcgtg

SEQ ID NO: 627143 - DNA, 15 bp, Homo sapiens
acattctattcgtga

SEQ ID NO: 627144 - DNA, 15 bp, Homo sapiens
cattctattcgtgaa

SEQ ID NO: 627145 - DNA, 15 bp, Homo sapiens
attctattcgtgaat

SEQ ID NO: 627146 - DNA, 15 bp, Homo sapiens
ttctattcgtgaatc

SEQ ID NO: 627147 - DNA, 15 bp, Homo sapiens
tctattcgtgaatct

SEQ ID NO: 627148 - DNA, 15 bp, Homo sapiens
ctattcgtgaatctc

SEQ ID NO: 627149 - DNA, 15 bp, Homo sapiens
tattcgtgaatctca

SEQ ID NO: 627150 - DNA, 15 bp, Homo sapiens
attcgtgaatctcat

SEQ ID NO: 627151 - DNA, 15 bp, Homo sapiens
ttcgtgaatctcata

SEQ ID NO: 627152 - DNA, 15 bp, Homo sapiens
tcgtgaatctcataa

SEQ ID NO: 627153 - DNA, 15 bp, Homo sapiens
cgtgaatctcataac

SEQ ID NO: 627154 - DNA, 15 bp, Homo sapiens
gtgaatctcataaca

SEQ ID NO: 627155 - DNA, 15 bp, Homo sapiens
tgaatctcataacag

SEQ ID NO: 627156 - DNA, 15 bp, Homo sapiens
gaatctcataacaga

SEQ ID NO: 627157 - DNA, 15 bp, Homo sapiens
aatctcataacagac

SEQ ID NO: 627158 - DNA, 15 bp, Homo sapiens
atctcataacagaca

SEQ ID NO: 627159 - DNA, 15 bp, Homo sapiens
tctcataacagacag

SEQ ID NO: 627160 - DNA, 15 bp, Homo sapiens
ctcataacagacagt

SEQ ID NO: 627161 - DNA, 15 bp, Homo sapiens
tcataacagacagtg

SEQ ID NO: 627162 - DNA, 15 bp, Homo sapiens
cataacagacagtgg

SEQ ID NO: 627163 - DNA, 15 bp, Homo sapiens
ataacagacagtggt

SEQ ID NO: 627164 - DNA, 15 bp, Homo sapiens
taacagacagtggta

SEQ ID NO: 627165 - DNA, 15 bp, Homo sapiens
aacagacagtggtag

SEQ ID NO: 627166 - DNA, 15 bp, Homo sapiens
acagacagtggtaga

SEQ ID NO: 627167 - DNA, 15 bp, Homo sapiens
cagacagtggtagag

SEQ ID NO: 627168 - DNA, 15 bp, Homo sapiens
agacagtggtagagt

SEQ ID NO: 627169 - DNA, 15 bp, Homo sapiens
gacagtggtagagtg

SEQ ID NO: 627170 - DNA, 15 bp, Homo sapiens
acagtggtagagtga

SEQ ID NO: 627171 - DNA, 15 bp, Homo sapiens
cagtggtagagtgac

SEQ ID NO: 627172 - DNA, 15 bp, Homo sapiens
agtggtagagtgacc

SEQ ID NO: 627173 - DNA, 15 bp, Homo sapiens
gtggtagagtgaccg

SEQ ID NO: 627174 - DNA, 15 bp, Homo sapiens
tggtagagtgaccgt

SEQ ID NO: 627175 - DNA, 15 bp, Homo sapiens
ggtagagtgaccgtg

SEQ ID NO: 627176 - DNA, 15 bp, Homo sapiens
gtagagtgaccgtga

SEQ ID NO: 627177 - DNA, 15 bp, Homo sapiens
tagagtgaccgtgac

SEQ ID NO: 627178 - DNA, 15 bp, Homo sapiens
agagtgaccgtgacc

SEQ ID NO: 627179 - DNA, 15 bp, Homo sapiens
gagtgaccgtgaccc

SEQ ID NO: 627180 - DNA, 15 bp, Homo sapiens
agtgaccgtgaccca

SEQ ID NO: 627181 - DNA, 15 bp, Homo sapiens
gtgaccgtgacccat

SEQ ID NO: 627182 - DNA, 15 bp, Homo sapiens
tgaccgtgacccatt

SEQ ID NO: 627183 - DNA, 15 bp, Homo sapiens
gaccgtgacccattc

SEQ ID NO: 627184 - DNA, 15 bp, Homo sapiens
accgtgacccattcg

SEQ ID NO: 627185 - DNA, 15 bp, Homo sapiens
ccgtgacccattcgc

SEQ ID NO: 627186 - DNA, 15 bp, Homo sapiens
cgtgacccattcgcc

SEQ ID NO: 627187 - DNA, 15 bp, Homo sapiens
gtgacccattcgcca

SEQ ID NO: 627188 - DNA, 15 bp, Homo sapiens
tgacccattcgccac

SEQ ID NO: 627189 - DNA, 15 bp, Homo sapiens
gacccattcgccaca

SEQ ID NO: 627190 - DNA, 15 bp, Homo sapiens
acccattcgccacac

SEQ ID NO: 627191 - DNA, 15 bp, Homo sapiens
cccattcgccacaca

SEQ ID NO: 627192 - DNA, 15 bp, Homo sapiens
ccattcgccacacag

SEQ ID NO: 627193 - DNA, 15 bp, Homo sapiens
cattcgccacacagt

SEQ ID NO: 627194 - DNA, 15 bp, Homo sapiens
attcgccacacagta

SEQ ID NO: 627195 - DNA, 15 bp, Homo sapiens
ttcgccacacagtag

SEQ ID NO: 627196 - DNA, 15 bp, Homo sapiens
tcgccacacagtaga

SEQ ID NO: 627197 - DNA, 15 bp, Homo sapiens
cgccacacagtagag

SEQ ID NO: 627198 - DNA, 15 bp, Homo sapiens
gccacacagtagagt

SEQ ID NO: 627199 - DNA, 15 bp, Homo sapiens
ccacacagtagagtc
